United States Patent Application Publication US 2015/0240253 A1 - sequence listing, part 29

SEQ ID NO: 137330 - DNA, 547 bp, Zea Mays
aatccttggcatccattctatacggtctttttgagatagctgcggttctgggtaataattcaataggaaactatatatcacggtcaggtggcatacctggtaattcctccggaaatacgtctgggtattcgcacactactttgatattttccaagggcttttcttccaagtgattgatcactgttttccctttttcatctgttgacttgtctatgttaacttggattctttcaccttgaggacttgtcaacataattgttccattggcacactgtatcactccatcacaacttttcaaccaattgcatccaagaatcacatcaataccattggatcctaggaccactgggtcgactgaaaaatctattccttgaatcttgatattaacatgggggcatgagtgtgtggccttcatgttacctcccggtgaactaatgtgtaatatcttcttaagaggatacttaggtatgttatgtttttccacaaatgactcggttataaacgaatgagatgctctagagtcaaataaaactgatgcaggtatgga

SEQ ID NO: 137331 - DNA, 628 bp, Zea Mays
caattatgtcatcaacataaatcagcataaacataatgacatctcctttaatatagtagaacagagatgtatctgccttagaacttttaaaaccaagatcacaaagtttcttactgagccttgagaaccaagctcttggtgcctgtttcaatccatacagcgccttgtttagcttgcatacatagtctcgtcgagttgaatcttcgtacccaggaggttgtttcatatacacctcctcttcaagtagtccatgcaggaaagcattatgtacatccagttgcctgagagtccaccccctggatacaacaatagaaagaacaactcgaatggtagcagctttaacaacagggctgaaagtatcctcataatcaataccatatctttgcttaaacccttttgcaacaagacgagctttatacctgtccaagctgccatcttgttttcgcttaattttatatacccatttgcagtcaataatattccgccctttctgaggaggaactaggtgccaagtattatttttcatgagagcattatattcagtatccattgcctgtttccagttgctatcttctagagcttccactatgttgtaaggttcaccagtagaggagagaagagaatattt

SEQ ID NO: 137332 - DNA, 729 bp, Zea Mays
ggcatggattggcactcgctaattaatgggttagcgactgccggaattcttaatgcttcggccgggacgcgacgcaagcacatggagtgatgagtgaagcacaagatgcgtcccgaataccagtaccgctcacaacaacaaaaaaaaaaaaaaaaaaaaactcacacgctggcaagcggcgacgcgagccttcaagattaaactagtcaaaacacggcaggtagctgggatggaaacatccgtcccagaaaaggggatggtgagtggctacagaccgaacgtattgtattgtccacaaaaggctcgtggcaggttgagttgcaaaacgaggcagcccccctccgatgcagcgacggaataagagacgagtgtctcatcacggaagtatttgggttcagtaggccaattctgagtcgctcacctaaacattcacacagatccaacaggtattcttttccgacccatggaatccatggcagataggcatcagaaggtttcctacgcaagtattctttctacaaagggcaaagatctacaacatgcttctgtggttgcggtaaaccatgctgatcatgcatgtgattcagcgatttggtggggtcctcctctagtagtatgatacagtgggacagcatgagaagtgcaacagcagcacatccatagctagcagaccatccacttcacgaaccaaaaagtccaaaccagccaaaattttcaagactagagaac

SEQ ID NO: 137333 - DNA, 450 bp, Zea Mays
gaagaggaggaaatccccttaattcggaaaaacagtcggcgctacctagtcagtggggggagtagtgatgttccttctccagctttgtctgctctcgttggtctgcaagagttgtccatagcaaattttgatcaggctctcgaggatgtggttcctgaagatctgctatctaagccgacagatggtggtatgatggacgtttgcactgacattctggatgtggggttagagttatctcgagcagcgtctcatgcctcgtcgaccttcgagtgcggtcttcagagtcaagaagctggtctaggttgttccactcccatagaggtagctgagaatccttcagccttagaggtggctgctgcagagaacccggtccccaagtatggcgccagtggttacccagcccccgagggtgttgccggtaatgatccggcttgggcgggtagcacgagc

SEQ ID NO: 137334 - DNA, 358 bp, Zea Mays
ctttccgtaatcgccatcaccccctctaggtttggcaccggtcaattttaaggttggggcgtccaggcttcgaattgcaagtccgtggtgatgctccgccgtgtcgctgtgctgcgccgccgcggcgtgagcgaggttggggaaaacgatgccagccgtaggatgggatatcgacgatccagattagaaaccggggttcggttaatcgggaatcgtggatgcaggatctaagggcgcagattcgatctggggttggggcaccgtggtccgtcgatcttagatcgggtggatcctgtcgcgtaccgtttcgggttaagttagatgtaatctgagccgtccgcactggatcgtgtgtccc

SEQ ID NO: 137335 - DNA, 278 bp, Zea Mays
atcggagcaaattccaccatagaaaaggacaataaaccatgaataccattttcaaaatttaaaacttgcctagaaactgctacggatcgtcaggactagaccgctagacctaagacgaaagaccttaggcatagagggagaaatatgtggctaattaagtaggccccgtgggccagtacttagacttttaaggatgccctaagagcaccctattatttggagaggagacattacttccagcatgcatgcattataaacacaaaagggaattaaaactt

SEQ ID NO: 137336 - DNA, 384 bp, Zea Mays
gcctaagccctactcttgacctatgaaccctaggcttaagtcccccgatgtcctacaagcctagggctgagatccactcataaccaatgggttcaaagcctgagtccatcgacagtctatgagcccacacgacgacaaggggagactggtagccaagctacaaaggcagaaggtcggcatagggagaagcaaacaagaacgagtaatggttatgcctagacttccgtcgctagcacggaacacacgcaccctcgacaatctcagaaacatgtcaggagacccacacgagaaaggatatcgacacacaacaaggttttagcaggggtgaaccgttccttttgacccaaacgttatgctcccttctaggagaagctatctgtaatc

SEQ ID NO: 137337 - DNA, 418 bp, Zea Mays
catgccctagtacaaatgggtgatgcaagaagacacaagttttatcctggttcgggcaatagaaggccctacttccagcagaggagagatgtgacttatattatcttacacctaggtgcttgtagtatgggtacaagctagtgaagagagggagtggatcccaagtctctggagatgattaaggcaaatgacaatatcggttgtggaggcaaaaacatgtgaagtattccccctctttgaagccctgggctctccttttatagactcaaggagggatccttggagcgcccaggtttgtcgtttcgaggagaggaggcgaacccgagccctgtagcagcatggccgctggaatggcctttgtacttgcggttgacttggatcagggggaggatgtatggcccctgtatctgacatcttg

SEQ ID NO: 137338 - DNA, 1061 bp, Zea Mays
ttatttcaattttaaatcctgcacatccaaccattcttttacaattcatggacagccatgcatgtcgtagatagacccctacctgatgccttgatgagtttccatctaggtcgtttgaactgtttcaatttcacttgcacttgagttttatacggatgtgtaaagacctctatttcaatttaacttggtgattccgtgcatgcgagaagaaattatctagaacatgcagcacacctggtggatcctagtgcataggaatctcattgctagttttgctttaatcctctctcatctttatttgcacaaagatatgtgctttcctaaagtttatacctttgagcaacctcctctctagctagctatgcctgggataaccctatagctttcaagaatgtgaaagccatgcatgcttttgccccaatagcaaatgcactcttctttattttcagcctaccatgcacctaagaatcacgagagagatgcgtatgtttccgtgtccaaattatatgttcatggatttaactgaaattggaggatggaaaggtgaaggtggaatgattatatgaaatctagtgagcgatatcttggcgaactatgtttgtcgatcctacagttgtttaagagaatgtttggatccacagtgctaaagtttaacactacacttttagtaaactttaccaattggagatccaaacacgaatgctaaaatgtgctagaagaaggtactaaaaataaactgctaaattttagcacccattagcacaaagagtgctaaagtttagcgtgtggaatccaaatgggtcctaagtttctttcatttgtagtcttcttcctatccctgattacttacaccaggcaatgatcaaagtaggaaaagaagcataaagtttgcccttttgatattgcctgaaatcttagcctttagttctttacgtcgcctttaatttagctttgctacttacctttctcatgtttataagctgcaaataggtttctctagcatgcatgcacatatgcacgggcatatctcttctctactgttataaagcacaattttaccg

SEQ ID NO: 137339 - DNA, 554 bp, Zea Mays
atctcctttttgcagaatttcaatgtgttgatgctgaaatttagaagcaagcaacggcattttatactcactagtgtcccaggcaaagttgcctagcagactgaattttcatcctgccacttctgattgccgtcggccgccacgctgctttcagtgccgacagttttaggccatcggatagtcggctgtcccaacaagggtgttggtaataatgccctgactttgagacgtggtggagtttgggatcgtcttggccctcgtccagcaggggctactgttgacgcgaagcacccggctcatcgacggtctgtgtgggaattgggataggatttcgcctgctgcgatgcaccatgagagggggcacagccgactgatgtggccaaccatgctggtaagtgtctcccgctgttgttccaggagccaaggatgtgcagggcaggcggcctcgtcgtcgtggaaagagatggcaaactccggtctcagctcctacctctctagcgccatcacatccagtaggatctgatgcttcgcttgagcctgtgactggagctgat

SEQ ID NO: 137340 - DNA, 274 bp, Zea Mays
caaacacatagatacaaggtaccattatattcgtgaatgtgtcagcaatggggtggtggatgtaaaccatgtgagcactgatagacagatagctgatgctctgaccaagccactcggcagaatgaagttctcagaactaagaaggcaattgggagttatcagaattcaagaatgacaagattaagggggtgatttgttgcatttttcaccagtttgtaatcctatcatagctaggtgcattagttagtctgcatatttcgttttcgcgtagaat

SEQ ID NO: 137341 - DNA, 457 bp, Zea Mays
cccgcttgtctctgggcacctgtggcatctggacttgcacctaaggttgaggtgggggttgttgctgctgcacctgctgcatcgctgctaaagtctgaccaattgcttgaactctttgggtttgcaccaggaacatctactcaatggtcatcgggggtggtggtggcaattgctgctaggctgcctcctcctggggtgcctgctgctcctgatgagcacgtcttccacctctacgcctgttctcagacatctatagaaagcacacacacatcagatccgactctacagtctttcaacataagaaaatatatatggaaatcttcatagcactaaacaattgatcctcttcactgactctcaacacaaccaacacagcttctcagataaagaggaaagtgggaataaataggttgcccaactaaacaactgactttattaataactacaccaacttgca

SEQ ID NO: 137342 - DNA, 404 bp, Zea Mays
gcggaagaagctgctgcagccgctgaagagatccctggcatagtggctggaaaagggaaggagaaagtcgaggatacttcggcagaagaggacttcaatttccaagatatacttgggcaggaattgtcaaagactgaaaaagaagaacttaaagagtatgctatatcttgcgggtacagactaggtgcattactcttcgggggagtcaacgaagaaagcttaggatgccttcgggaccacactggggcgaaggttgtcgacactttttcgaagagtgttggcttcccgaaggttgaggcagaccttagcaggtaccggcggcagcatatcgccggtagtctattttatgctaactttaaggtaaaattcttaactttctattgctttgatatgaagattgtttt

SEQ ID NO: 137343 - DNA, 357 bp, Zea Mays
gcataggaggcattagtagggcacaaacggtgcgatgctcacatgaatcggtaacagactaaccgagtcttggtgggttgacaccggagcagttcatgtggcgtcgagcccatgttccgaccaaactatgaccgtaaagactaaacggatacctcggtgatcttcaccagcctataaggacactagaacattgattcatatgcgtcgattcatgccgcagtcgtctggccacgtaagggtgaggcgtcagcaatgaggtcaccaggtacgttgagtttcttgaccaaggagtttaggcgcgtccacagtatagttttgggaagcgaaagcaatacaactaactgaagctacacacgg

SEQ ID NO: 137344 - DNA, 451 bp, Zea Mays
ggaaatttgaaaaacaaaacttctcttggatataatgtgtagtgttgtcaacaattaccaaaaagggagagattctgaatcatctaggccccttagtgatgttttggtaattaatgactactgtttgtggactaacggttcttggagaaataagaatgcagggttggaccacatagaacagaaaatcttggagatttataagcattggttgtggatcaagtgaaggcaaaggtataacataggttttgtttttgtcggtctccaggagtttagagaagttatttgaccggattagtaggctagatggccgtactattaagaggggtcaatgacgtttgtctgtgtcaaacttagtgcctcatagagcatctagtggttgcatttgcatgaggactaacagtgtttccaatttcaagagttaaaaatcttttcaaaagcttgtttcaaaatt

SEQ ID NO: 137345 - DNA, 467 bp, Zea Mays
atttagggtccgtagcaaaagcacgggcaactggttataataataataatcattaagaatctaatgtgggcaactgtgctaccactcaatacctatttatatgatatatttagggttcgtagcaaaagtacgggcaactaactgtaataataatctattaagaatctaatgtgggcacctgtgctaccatgacttcaccctctccacgtcaagcacccgcaaaaaataatgcaaagcgagccctcgaagccacacccctctactctagaaatttggggctaaccactagaccacatgtattttaatgtttaagaataaacaataattatatttgcagcctagacgccgctccccacgctctcccgtctcgtggcaacgcacgggcacatacctagtagagtataaagcataaatacatgtgttttgttggctaggtgagtgtaaatgtgggtttatagcagggctgt

SEQ ID NO: 137346 - DNA, 530 bp, Zea Mays
tctcatagtttggcttatactagcattaaggtaacaagaaacctctcttttttttattccgaagcaactttgggggtaaaactatgttcaattagattgttgtgtcttcgtaatgcagggactaatgttaagtaaggccctaagagtacaacaagagaaggaagacatggagctgtcaacacttccagacgaggttgaaaaacttcgtagctctctagaagaaaaagaagttgaagtaaaatctttgaaagagaaggtagccgaggctgaaagaattcacagtgccgatgtgacgaaagcgaaggaacaagacaaccttatcaatgagcttcgtgcaaaccttgatgcaacaaaagaggatattgctagtaaagacggagaaaatcagaagttactggcgactttgaaccagctccgagacaaatgcttcgccattgcctcccggtgttgtgataatatgaagaaatttttgcaacttcgaaggccacctccttcgcgagcggcaacaccgaaggggcccttggttggat

SEQ ID NO: 137347 - DNA, 369 bp, Zea Mays
cacaatatgtacaaacctgtatgttcccactgtttgcactcgcatgtatactccccagcttctatgtctgttgttatcttgaattgatgttgtccccacacaattttattagatctttttgtatgttgtacgatccaatctttatcacaaccgtttgtgaccttcaatattctgtatgcagtggcgtattttattgattcctcaaatctattcataacagctctggtgtatgccctagagactctcacttcgaacctatacaatatatctgttgtccttggtccctataagacgttaatatcataattaaacaatgtatttacataaacatgtatgccatacattattgataacaaacacgacatacct

SEQ ID NO: 137348 - DNA, 331 bp, Zea Mays
gcgttaggagccagctgatgaagaaaaatctcaaaattttccaaaacatctgcaatcatcccgtgcagaggaaacctcaaccccgctttgaagaagctcttaaaaactaccacttcatcattttctggtttcgggatggtctcttccccgccaaagcgaatcaacttcttcttggcttccccgaagtagcctaacttcgtcatcatgggcatatcagcttcggagacagtcgacttcccaaaatccaaatggctgggcttggatggcatagcggtgttataatcaatctcttcttcaccagtatcgccctcttcaatatctgcctgctcgg

SEQ ID NO: 137349 - DNA, 280 bp, Zea Mays
agatgtgtctaccttttgcaggttcgacagacagaggcagaagaaggtcaccgacttcgagacccaccatcgagattatattgatgaatgcgatcaggagtcggacctaaactacgagaacgaccagccgcacacgaactaccacttccgtaggtatttgacttagtatgctggtgtcactaggtgcaagcttacgggccagtggatagatgcagactatgcgaagcaatagtcctctagacgacgaagacactttgttcaacatagctgctcggctagg

SEQ ID NO: 137350 - DNA, 422 bp, Zea Mays
gcaggttgcgggttggccgtttggctgctcatacacacgcaacaaagagaaatgagaaggtgttgagccaaaacgcgaccttggtttgtcagttgggaacgcgccgtctgacgtctcatgctcacctctagctaggcgcatttgagaaatggcaaatggtaacggaagctgtcaaggccactctattacagaaattggtaataaatgaggttgttaccggatcgtgtatatggacatgtaaaacactgacttacgctgctgtttttctatagtgaagtttgaaatagaatatgagataacgaaactgtgatgtaggaaaacaaggtcgaaagcgttcgtgtttcttgtcaggtttgtcatctgcttaccgtacgtatgtatttggaccgctgttgctctcatgttttttttgtgtgtgatgt

SEQ ID NO: 137351 - DNA, 634 bp, Zea Mays
ttgctgaaaatcgttgagatctgtggatacttttggagtatctgaatagaacaaacagattcagcttttgaggaattctttctgtctgaacaatactttttgaggaattctttgtctgaacaaacaaattcagcttgtggatactcttgcgttgcatcacatgtttgcccgctgcatagatgggtaagcaagccattatttctctgatatggaaaccaggagggatggatgaagtggaagcaggatggagaggcgagatgagagatgaaccttcagatgtctttttgtcaaaatgttagccacatcaaataacaagcaaaagcaagcactgattactcgatctgtgacgtcctgagaggagaaggattcaaggtaggcagcaagcaaggggcatccatcgtaggaggacgacactataagctcctaggcgatactagaaacaaagtacaatgcaagggagtagtagtataggaggaagaaaggtagagagactggtttctgagagtaatttgttcttgccgctcatgccccttcgtatatatttgctgtgatatatatgtcagtatgtcactttgcttggttctagcaacacccaggtcccacctggcagccaccttatgcatattctaggttc

SEQ ID NO: 137352 - DNA, 563 bp, Zea Mays
attattacctagatagagtcattccctttttgcgtccggggtagtccggttacaaaatccatgcctatttcttcccacttccattcaggcacggggaggggttgtaataggcctgcaggtttttggtgctcggccttcgtcctttggcaggtgtcacactgggccacatactgagctatctctttcttcatccctctccaccagtatctggttttgaggtcaaggtgcatctcggtagttcctgggtggatggagtaggctgagttgtgagcttcctcgagcaggacctctcatgcttccccttttggtacacaaagacgatttttgaaccaaagggctccttgttcatctgccctgaggtccgggagttgttccttgtgggctttttccacaagtcttgctgtctctgggtctaggcgttgagctttgtatatgaggtcttctagcattggtttgacttcgagactgccactgtttcccagacatgtattcagttgagctgattctttcttccaatcttctaaaaagttggttccctttattctgaatggttttcgactgag

SEQ ID NO: 137353 - DNA, 769 bp, Zea Mays
tagaccagcctcctggccctcaagatcgcgctccaaggtcgatgaggcgtgggacgccgaccaggataactccagcccagcatcaggcacatcagtgcaaacatccatcatgccagaccatgtcttcaagagtttgatcaaagctcaccagagataattcttgcagaccaatgagggcagataaagctggagaaggaacaccactgctttccccgctggctaggtaacgccggctgttcttccgaattagaaggatttcatcctcctcttcctcaccttcatcaacaacatggacagtacacccattggggtcagctttggccaaatcacacctatcgagttcaatgtcatccaggtcacacccattgggttccacagcagtcgggtcacacccattggggtcagctttggccagatcacacttatcgggttcaatgttatccaggtcacacccattgggtcacagcagtcgggtcacacccattggggtcagcttcagcaaattcaggcactggcacttcctcagcagcaggaacagaaggaccgacatcctgatccaagctagacactcgacgaagacgtctcttcttctttttcttcccctctgcaggagaagagggctgattggctcggcgagaacgctttgggcgaacactttcagacctctgagcatccaaatctttgctggcctcagggatgggcgccaccacctgtgtttcagcaggagcggcatcagaagaatcctcagctaccatatccagcatggcac

SEQ ID NO: 137354 - DNA, 476 bp, Zea Mays
acttgttctgcctcggatatgggcagtctttgatgaaatgtccagacttcccacaattgaagcagccggttgaagaacttggtagggcggggaaacgagcaccaggggcactcggtagagttgttgaagtgggggtagtggcagggcggatgaatacaggctgtttgaagggataggagggtggacgaggtgaagaacggttttgattgaaaggtcggattaccaacctttgtcgcttttcaggcccctgattggacctatcacctctaattccctttgatttgcctgggcctgcatgcttagcttcaactgccagcgctgtgctgacagccctgctgtaggagagatcgaggcaggtggccatctttcgttgtagccggtcattgaggcacctcataaaacaattcctctttttcaggtcagtattgacctggtcaattgcgtactgggacaaatgattgaatttgttgagatac

SEQ ID NO: 137355 - DNA, 846 bp, Zea Mays
atcgaattttttcctagattgcctattacagagatctcttagattcctccaccaatcatacaacgactccgatgtctggtttcctcccaggaaaaaacagttccccatatcaaaattttgttccacacctctctactgaaagggcaatctttgcataaatgggttaccgtctctagtgctgagttacaaagacagcaaactgggttgcactgccaatgtcttttctgaaggttgtcagcagtcagcactttattatgcaaaagagtccatgcaaaaaaacggcacttaggttcagtttttgctttccaaatggggtcaattttcattgtacaataatttgctgcaaattggatcttataagcgttgcttgcactgtactcaccatcttctgtccatctccaagaaatggagtcttctagatcgttgagctcgtgtgtactattgatggcctgccaaaggccgagcaattccttgaattcttctgcaccatcgtagggagagcataactggatccaacggttgtttctcagggcctggaaagtcgaaatgttcttcctttttgctttgttgaaaagacttggtgcaatgttttttggtgcttgaccatggatccaactagatttccaaaatacagcagttttcccattacccaccttcacacaagtggaagcgttgaaaagatcttcatctgattcatcacatggcagctgcagattcacccatgctttgtctttggccttccatcgaaaccacaaccatcttagtcttaaagccctcgcaaaacgattcaggtctagaatgctcaatccccctttgcactttggtaaacaagtagtagaccagttg

SEQ ID NO: 137356 - DNA, 465 bp, Zea Mays
cttccaaaccattccgctgaatatttcttttcgtcggggtctagtggggcagctacgtgaacaatggttggatttagtggctcacctttttcatgttcgattaaacacagcgagtgacacgttccgttgggacttatcggcggacggatcctttagtgttcattcgatgtacaaggggctaataactaatgtcaatgtggcgtggcacaaagacatttggaaggctaagatgcctttgaagattaaaatcttcatgtggtatttacatagtggtgttgtacttaccaaagataatttactcaagcataattggaaggaaaatgcaaaatgttctttttgtacacagaatgagacaattgattatctttttttccactgccaacttgctaaatttatttggcgtttagttcgaatcagatgtggtgttcgtccaccaaacaatattagacatatctttggttcttg

SEQ ID NO: 137357 - DNA, 308 bp, Zea Mays
ctcgctgctatgcatgcttcagcacttgggggcacttcggtgtacctgtgacacatagtcgattgaaacaactgttctattggcccggtatgaagaatgctattcatgagtatgtgcaaaattgtacagtgtgccagcaagacaaacctgacaaacccaagtatctcagcttacttctccctctactagtcccaccacacgcctagcgcacggtctcgatgaacttcatcgaaggccttcccacttctgctaactttagctgcattatggtggtggtagacaaatggtccaagtatgctcactttttt

SEQ ID NO: 137358 - DNA, 536 bp, Zea Mays
aggggcctcagcacaataattctcaagactcagactattctgagttggatggcgggttgtttattaaataccacgagggctcttatgcaaagtgctatggccaaaggggtatgaataactactggccgttagatccggaatccgcgcaccaaaaccacccacatcgcgaattaatctcagcctttcgatccccgatcgacgacccagaagtaacgagcccgaatagcttttctacttctaatctgggccgcccaataccggatccacgactcccagcacacatcgccatcctctcatcaccatcgcaggtcctggatctgacggttcccagcgtttcttcctccctgcgccctcctacttccttctctctctttctggcggcccgacgccggtagttcttcccccaacgcgacaagaaccagagcactggcgcgtcggccatgctccaccagagataacccgcccgacacctagcgtctaaatatctagcgtgaatcacggagacaggaagacatttcttacccaagatcacggtg

SEQ ID NO: 137359 - DNA, 581 bp, Zea Mays
cgaccatggtctcttattcaccaaggacagcacgggtggtggttgtggaccgacagatgcaggaccgtgaccttttttggcagaaattcgggaaagactgcttcaagctcaagtgacaatgaaaatgtatcaagacaagagccgtcggggtgtccagttcattgtgggtgattgggtctggctccgtttacagcacaggactgttgttggtgtcactgcagcttccccgtccaaattagggcccaagttctatggtctgtatcaagtgctgcggcgcattggcaatgtgtcttatcagctccaacttcctccacgtgccaagattcatgatgtgtttcatgtttcactgcttaagaagtttgaaggacccccgccaacggctgttgttcctttaccagatattcttcatggcagaattgtccctacacctaacaaggttactaaagccaggctgaaccgtggagtctgggaagtcctagtgcattgggttggtcggcctgctactgacgcctcatgggagcagctggatgacttcaagcgtcagtttcctgcagtacagctcgcggacgagctgtttgttg

SEQ ID NO: 137360 - DNA, 329 bp, Zea Mays
caggagcaccaatattcgataccttgcccctcaatatcatctccagtcggctcaccagatcaacagtgggaatcctcttgtcagtaacccgagtcgagtcagaggcaccgctatacaaataagccgggtacgctttgtccttcagtggctgaatgttcttaaaaacaaagtctgcaactacagcttcagcagtcagacccttctccttcaacaaaccaatttcggcaagcagaatcctggcctctgttatctccaattccatgggggattcagtccaacttgaagcgcgaacatccggctgtctccctgaccgaggggggagggacttg

SEQ ID NO: 137361 - DNA, 687 bp, Zea Mays
aataaacggagcatctaatgcagataaatcatgattgtggatggccaactcatccaagtcaagagtgtagctcctctcctcagccttacccaaaatgttctcatagaaatcaaaacacccttctgttttatcttcttgtgaggtgaccacctgatcaccaacgtgcagcttaggaatgaagttcttctttttcctgtatttagcctgctaataaaaaaaggaggtgttggcatcaccctcctgaatatacaaaatccgagaatgcagtcgggcgatggttctcaccagagagggcaaaccaagacaatgaagcttcaacttccatctcagccactcctcatcatcaacaagagccctttcatcactttcaatttcccaacgatggagaagctctttagcaatttctaattgtgatttgatgctcccaactttcctctggccccacttttgcaggctcctgctgagccgctgcagcttcatgaacatacgctcaacgacacagttagattgcaccggagcctcccgactttgcttaactacatcaaacaaaccaggaaccttcaaccagaagctctcaaaatggaatctgcgcttacccttgttggccacattcaaaccaagcaggagcgaacaatgatcagagaccccagccgccatactttgcaagactgcatcaggaaaaatgcc

SEQ ID NO: 137362 - DNA, 701 bp, Zea Mays
atttttgtaataggagcgcacaataccgaacgcatgaaaacatataaaaaatagaaaatgaagttggttatgttagttatatggaaatgtatatttaatgagtagagggatatataggggaaatttagggggaagggttgcgggacgagtgaatataggggagagaatcttgctgacgtggctgcatagtaatatttagggggaaaaatttagggggaacggttgcggatagtctgattctccacacaaacggtaggatccggaaccgatccgcatactgtttaattagacaggtcgatcctgtttgattctgcagctggaactggacggacgtagctagagggtctttggctgtttgcttcactttttctctccccctcatttctatatgtacaacaacagtggttccgaagctccaatacataccagtacgttgcaacagttccgtggaaggaatccgacgtggcggcgggaggcctatccaaatccaaccgcctgctccacctccactaacgtgaccgacgtggccaaaggtccatcagcgtggcccgacggccacgacggacgactccacgaggacacgtcccgctccgacgcaacacgagattgtctgacgcaaacgcaaggcaagatgcgtgtctgtgtctggttctctgatggatctgtttgacaacaagggtcacgtcggagctggacattgt

SEQ ID NO: 137363 - DNA, 833 bp, Zea Mays
acgccctaatcgggggcgcaacaattgtaatggttacggcccccttcaccacgtgctacagtaaaaggcgggcaaggggccggcacgggaaccaacattccctagaccatctcgtcaccagatacgcacaagcaaaaccctaaccaatctgttagagcgtgaaggtgagggagggctgtcgtcacctctactgcgatcacgagatcagctactgcgaccatgagatcattgtcaccctaggaggaaaaagaaggaaggacaaatccatggcgagttcctccaacaccaaccccgaaggtgcaaattgttgtttatgttctagatctagtgattagggttgtgggatgatccttttagatttatcataataaactgcacagatgaataaattattcagaaagcaacctaataaacaccatacctctgtcttagcagttcctgtcatcccagaaagtttaggataaagcttaaacaatgactgatatgtgatttgagccacaattaccgagtctgcctgattaaattgcaattagcattgcacaccaaaaactatcataaacattcagaaaattataaaaatattagttccatcaatgtaaagtgacaatgtgtaagttaatactaacctggatttttaggccttcttttgcttctactgcttggtggataccatcagaccatcttctcttgggttcaactcggccggttaactggaaaagaattaatactatcatccaaccacaggattttcaaagcacgcaattgttatgaactaataggcaatgtgaattatattatcaagagagcataatagatactccctccgtcccaaa

SEQ ID NO: 137364 - DNA, 843 bp, Zea Mays
cacaagctcacacttccctgggaaggaccgttcatcatcgtcgaggtgttgaaagcaagaacttacaagttgtccaacagccagggtgaaatctatgacaatgcttggaacatcgagcaactatgtcgcttttcccttagaattccaagtcattatgcacttcaatctttgaatataaataaaatctaaccttcaagtgaggcttggccctgcttcaccagaccaaacctccctcggaggctagaaggggaaccccctccacgtcacttttttctagaaatgtttttctaaaaagcgactttggcagggatcctctgaaaagacaagctaaaagcacgaaacaagagggaaaaagccacacaaacatgaaagtgtttgggccttaggacatcaccattcactaaagacttaaaaggtttttacataggtctacaggaccagcaactcaagcgtcggggtggggagaaacaacatcctcaggatcatcatcgcccgccatgaggacgtttactctcatggccatgatggaaacaaggagacgatgacgacgaggtacgcagatctcccactgccaccaagtagctccttacttcaacctcttttgtccctcttgctctggtttcaatctttggttacggccaaaaaagcagaggaagatgaggctgagaatgcgagtgcggggtgaaagccatgggtagccccctcccaaatatacagaggagaggaggtgaaccggcaaatccgtcgagattgaaactgagccccttgcatttaaaagtcgaatccaaaagcggattttgtttctcgaatcccgcgtgcatgccccgacaacagatcactcgc

SEQ ID NO: 137365 - DNA, 609 bp, Zea Mays
cttccttaacatgataaccatccagggaaccaccaagaatggcatggaacgccaaactcatagaatgcttagaaagcttacaagtaaagcgtcgaaaaaccgcaataagtagaaaataaccttcaatgaatggtgagggatgatgaaccgatgaagagaatctatgtagaacttccttttgaaagcataaaccaggagccaaatccaaatcaacaatgttgagggacacatgattgtctcccactgccatgagagaacaaaggtcgaagaacactggtaggaaaaggcaagaaagatgagaggaagcaaagattcaaggaaggagagaaagagagcaaaccaactgaggaactagagaaacccaccattcgagagaggaagaaataatgtcggcagtggcgaagagaagagggggagggagattggaggagaggatagcaggaggaagaggaaggagaaagcaaggggagggagcggtgagagcaccattgcttaacaaaaagcttggtaaacttgttgtaccattttagcacagtttggtgtccactttgacttgatgtggattatctaatttttttttgccatttagctagtttcgaaggtcaaagc

SEQ ID NO: 137366 - DNA, 281 bp, Zea Mays
tggggtcgggtccgtcagccatagtagtggaagcaggctcgactggggggcggtggagtcgactcaagagcaacccaattggcgtcatcgtgctcctcctccacaaagatggtctgacccatatgatctggacctgcaggctcaaagataggggatggacaaggtgtagtctcatcgaatgtaacctcacaagtctccataatgtggttagtgtctaggttaagaatacgataagcatgaaaatgtaatgcataacctagaaaaaccccattagaagatca

SEQ ID NO: 137367 - DNA, 541 bp, Zea Mays
tagatatgtcatcacatgctccctcccctcagtttcttgtgtcagaacagccccaataaccttgtcttcagctgcaatgtataatctgaatggtgctcctacttgtggtgcttttaacacgggagccgaagacaagtattttttaatgagatcaaatgcttcctgctgctctgccccccaagtgaattcggcatcattcttaagccgaaggataggggtgaatgcatcaatcttcccggctaggttagaaataaaccttcgtaaataattcaccttgccgagaaacttctgcacttcgaccttacaagtcggaggtcccacattccgaatagacttgattcggtcagggtctatttctataccatgttcatggatgacaaatcctaaaaacttattagccgacactccaaaagcacatttacgtgggttcattttcaaaccataccgacgcattttatcaaaggctttgcgcaaatcagctatatgaggactaaactccgtcgatttgactacaatatcatcaatgtagacttccacagtg

SEQ ID NO: 137368 - DNA, 565 bp, Zea Mays
atcattcagcgccccatctggtctcgcttcggtcttcgaaggccgaaggtggaagttgatgacactgtcgaagcatgccagagggcttttagcactgtgtgtgcctacattggcacaagagatttgattcaagaacatatagccttcagggtatggccgcttgtggaaagctgggaaatgccgaaggagaccaccactgattctagtgatggtggtctggtccgactgaaatatactttcagatttagagagaagtttgatgagccaaacgacgattggctgaagtgtattgaagctaccagcgatgagctgcttggagcttactccaaggccgaagataatgctctgtccgcagccttcggaggtcgggggaagaaaagactgaacagggtttttgatgtgatcggcttcatataccccgattatcgctacccgctgcgagggcaagggaaaaagaggaagattagtgcttcggtcatcctagctgaacctgtgccgacgagcaaaaaggtgaaggttctaacccacaggtcgcactatattgaaccggccatagtgcctaagt

SEQ ID NO: 137369 - DNA, 321 bp, Zea Mays
gtctggtatggttggctatgctgtgctggtgtgattatagtcggtcttagcgcgggtggtttgatgctgtcgtttctgcttttgttgtactggttcggctgcgcccttaggcggcttctgcgcgggttctttgcgatagacttcaggtttttttcgcacttgttgtgctagtccggctgcacccttgggcgacttctgcgcggatagtcttcgcgatagacatcggattttttcgcacttgttgtgcttagtccggctgcacccttaggcgacttctgcgcggatagtcttcgcgatagacatcggattttttcgcacttg

SEQ ID NO: 137370 - DNA, 419 bp, Zea Mays
ggtagggggatcatctctaggtaaaggtgtgtgtagtgtggctagaaggtgtgggttattgtttgctgcctgcctggggtgcgctcttgctggcctttcgccctccattatttctttggcctctttgatagtgtggcagtcttcggttgagtgtccgacgtcttcgtcattaaagacacattatatcttacggttgcacatggggacgcatcccttgccactaggacctttgtcgcctctggctggttactgattttgatcatagagacgaggggggtctttgagctatttctactagttgatggtgtgggttcgttgctgctaatttgggggtggaggcttctgatttctggtcatgatttgatgtttgctatatgtgagggcttgcatatttttcaaagatttgatacaacacttgg

SEQ ID NO: 137371 - DNA, 668 bp, Zea Mays
tggacgtcgagaacggtggatcagggacgagcaccggggagctcacgcgtgtgaagaagctcgacaccaatctgctgctgttctggcgtcgagaggcgaggcgatggagagccggcgtgagggatggatgaacgcgagcgacggtgatgaagaccgggcgtcggtgaggtgacaggagttggtatacagggcctggcaaacttggagataagaacgatcccttcctttcccccctccggctactctttatatggatacagaaaagctccagcagtggctggtttcagggaataaacagcgaaggatacttaggagatgtgggcaactgcatgggcgtgagtgcgtggcgaaatttcaaggatccacgcccaactctgaagtacagcaaagcaatgaccaaggcagatttttaccacggcaagggatacagataaggctgtctagatagatgctctccagttcacctgggatatttcagtgttggctaaagttctaaacacccgtgcaattcatctcatctctatctccacttcaaaccaaaataagatacgacaaggagaagaaaatcagtggtagatatttctgatcaatagtatctacaacattcgactgactcctccctgttcagccactcttttctctttaccttgattaagaacagatcagtc

SEQ ID NO: 137372 - DNA, 293 bp, Zea Mays
ctctaccacatcacagtgaatcaccttagcttgtccgttcatcaccggtggttatgccacggtgaaggccacgataaccctgcgccagtgactttccccctctccggtcgctagtgtgccattccaaaatcaagagccaccgcccccaagcactataaattaagcatcccattagcttcgttgggtcatcacgaagccagagcacccgctcctgcctccgattagccaccagagagctccaatttctttctcttcccaaatcagttttccgcacgctgtgaactaccgtgtca

SEQ ID NO: 137373 - DNA, 458 bp, Zea Mays
agaggtatcaatagcaccaaaaggaaccaggctctgctcctcaatctgcatgaacgcatcattgtcaacctgacgttcggaggctaaaggacccttagaacgagtatttgggacacgagctcctatatgagtctaatccttaggcgatggatgatagaatccaaacatcaggtgtgagtgaccaagaactgcctggaatgaggaggtttgatcagttgtgcaaagatgtgacagaggtagtgagcatatggcagctgacgaggagcacgatgtccatccaatacagtgtcctctatctcacagattagaaaatctacaacatcaaacaccgagtgagagaccaaggcacctaggagccagagctgaatatgagtggtggcctccctgtctcgcatgcgaggtaaaagggtctgtctcatcagagcatgtagaaacttggtagctatggtgaagtctgc

SEQ ID NO: 137374 - DNA, 415 bp, Zea Mays
gccaacctctagcttcgggaatcctatattttttgccatctcccgacaaacaaatatctcattattgtccggaaggcactatagaaactcgtcttcatcagtgccattaaacaccaaggatcctgggggatacttcaaatccttggcatattgcatagcttcggcaatctgctcttctgatagtttttccctgccgcgtgacgcactataaattccaatccctcagtagaagcttcagcagcagggaattcagactctttgctagtttttgtagcatctgaaggttttgcttcagtattcttttcaacaacctccgtaggccctgtttctgcgggaactgaggacccggcttctgttccaacctgagtcatgacggcttcggcagtttccttcgtattcttttcacccatgttag

SEQ ID NO: 137375 - DNA, 483 bp, Zea Mays
attgctaagctttcgattaagcaaatggtgataactgcttggcaacagcgaaacaagactgttatccgtctgggaccaggcttcaacaacagatagtagtgctctcataagaagaaatcatcaggagtagagaggatacaataggtctccacaagatcttcatatttctatcacaaattatcatcactagtagtctagtggtcaagacatatggctcttctggctccaaggaccaaggacatattaatgtctaatttagcttcaagctcagtggtgatgtgggatttcatagctagtttctactcttcttactcctagtagatcagagatagattacggtaagcatttcaaaggtggaatccaatgtagttctgctacataaattccaggtatatgtccattcaggactgacctttaccatttggctgaaaaatatatcataccaatcaaaggactatacctagtcaattcagcggctataag

SEQ ID NO: 137376 - DNA, 405 bp, Zea Mays
cgtgcgcgaagcggtacccacggtccgggccgtgcgatctgaatcggacggaggggatcagaccaggggaaaaaacagacggctgcgggcggcgctgctcctctccgcggcggtgaggtcgccggagttgaggcaggcgtgagctaggggttccgtggtcgctagagttgggcagagaggaagagggcgccacgacgaactcaatggcggggaaggggccatgaatccacgggcagagaggggagaacgacggtgaggaagcctcgggcgatcggagtaactccagtgagccattccggccatagggatgggacttaaggcgcgctaaggccttggctaacttcagcagaggcaagggtgacatagggacctactccggtgaactagactaggctaaatcggccg

SEQ ID NO: 137377 - DNA, 311 bp, Zea Mays
gtttggtgtttgccccaaaaaggcgccaaacacactttttggcgacactgctacggatgagtacgtttcagatctattaggtcagccacgattgccagatccaatgatcacactaatgtctccccagacaatatccttaggccgactatgtagagtttgttggccgacgagcagcaggaatttgaaaatctcatgaaccaatatcgtgaagtggaatagaagtttataccacacttcatggttgactaacacaaaaagatcaccaagcaagaagagatcaacctcgagtcctattgggaaaatggtccccg

SEQ ID NO: 137378 - DNA, 606 bp, Zea Mays
atctgcacagccaaccgagtcactaggtcatgcgaagcatgccagaagttctctcctcgctcaggcaacccttcgcaattcaccaagctcatcacacacacatggccacttcaacactgggtgctggacatcgttggaccactgcctacagcccaagggaacctcaagttcaccttcgtcgccattgaatatttcacaaagtggattgaggccagggcagtctccacgataacatcaaagaccgcccaaaaattcttctggcaaaacattgtctaccgctttggagtcccgtccgaactcactgtcgacaacagcaaacagttcgacatccaagacttcagggaattatgtagttccatcggcaccaagtctgtcttcgcctctgtataccacccacaatccaacgacatcgttgaacacaccaatggcaagatcttcagttccatcaagaaaaggctccttgacgacaaaaagggcaaatgggccgaccaattacctgaagttgtatgggccctgaatacgacagagtgccgagcaaccgggttcacactcttgatgtatggatccgaagcaatgacgccgcaagaattaaagcacgggtccccc

SEQ ID NO: 137379 - DNA, 568 bp, Zea Mays
gctatttgctagaagataagcccgaagagtgtgatcattgtgtgcgtagagagtgtcccacggtcgtgtatataaggcccaggggaaccccatcattttcatctcattagcacctctccgttcggcagacaccacttgtgaacacaccacgcatataaagccaccccagaaagtaggatattacgcctctcaaagcggcctgaacctgcagaaattcgcctatctccctccctctctctctttctctttctctctctcactctcgtgctcccggcacgaaccatcgagctacgaccagcaacaccgtcctacccaaaagcaccacgagggtatccccaggtgtgcggtcgaatactagacaccgacagcatgtacctctataagcaagggcggagctaaccttgttcattggtgttagatgacactggcgaccttttgcaaaatcaatgagaaactttgatatgaattatttatctatagagctgacatcattgtttagtggagctgataccggttgctccttcggctagcttcgcccctgtctacaagtagtacgacgtgataatcc

SEQ ID NO: 137380 - DNA, 581 bp, Zea Mays
acaacatcgatccttcgcagtgggagatcttgtcctccgccgaattctaacgggggaaggacgacacaaattgtcgccactatgggaagggccattcatggtagcagaagtcactcagccaggatcatatcgacttactcaaatggatggcacagaaatagggaattcatggaatatagagcatctcaggaagttttacccctagctagatttcaaaagctatcggacaacattgtattctgtaattgggaaagtacgtcatcaataaaaagacttcgttctcaaaagctctcgaactacttattatcaatctacatgttcacgcttacttaacttaggatgaccactataccctgctaagggagcaatcggcttaagtcggcagtgacttaagacggtgcgacatgctcacgcttacttaacttagggtgaccactataccctgctcacgaagcaatcggcttaagtcggcagtgacttaagacggtgtgacatgctcacgcttacttaaacttagggtgaccactataccctactaacgaagcaattggcttaagtcggcagtgacttaagacggtgcg

SEQ ID NO: 137381 - DNA, 4167 bp, Zea Mays
ggcaggggtttcataagtcataacaattgttaaattgtttactggcttttatgactttgcagctacacgtaacctttgttttgccatatgtaaagacattccacagtccgcacccaaacaaacaaaatattaaagaaatcactcagcaaaaaacccaatcataaatttatgggccaagtgatagagtgaaatggcaacatccataaatgctgctaagatgaacaattccatagatagatatacactgcagagagaatagcatgctacctttccatcataacgactttcttgaatgacctctggtgccatccaatgtggagtaccaatgaactgaaagcattaacatgaaggatcaaataatggaaattagtgtgccactaaaacctttgttctttgcaaaaaaaacactgcattatttttatttggcaaaagccatacagactgaggttagagagcaatgctgacagtctgttgatagagttattttactgtaaaatcgggacagttttatctttgcattttgattgaagtatatattaacgccccaacaacagaaacatccaagacaccgtatacatgtagatttgtgttgtgcgatcatgatggatctgggctcaaagcatggctgcatgtcaatgacaaattgacaacaaatcagtatgtgtacttagaagtgtctgcttgtgcgtgcttgcagaaaagcaatggatattggataccatcaagaagaggacaccaaatgtttccggcacactactacgaaatggttggatgtagaactattagttatgggttactcaagcatttatgtattgccatggttggaaactagagaagtgtagctgcctagaacgtgtagaagagaaacaagaagtatcaacagcagtagaaagggagtagattgatttttttttcttttggtttctttctagatattgataaattccagtcaattcttttttttttgagcaaacgcaggagagctacgtgtcatttcattaagaaggaaacaatacaacaaggggggggacaacaaatgccccccccccaacacaaggccagtcagggcagtcatgactagcaaaacacaccccagccactagaacaacactggcagcagtactggggacgacgaccaagaactattctataggtgtggtgagagcaggcccctaagcccagcaccaagcattaccttcctcaaaaacagccaccacaacacttatagtatagtactacattatatcatcgtcctagagaacctgaacttgtactctaccctgattttccaaactctgactcaacgtacctcctagatctagccaactatgaactaccctagctgatttggactcccagtgcaccaactccctaacagtgaggaaaaaagatgaaagtaccatccatagtgaagatgacatattgggcaggggccacctgccagtaggatgataacaccctgaataatatttcccaatttggacgtctttatattatgatttccacaactgttgatttgatatgctactgtcacagtaaccctctactttctccaatagctccagcagggcagcaatgtgccagcttgaaatgagcctcgcagtcatcaagaacagaagaattgttgagtggtgggctagtggccaaggaagaagccaaatgggggaatgagcaaactcataatgggatatttggggactagaggctgtcacgaatgggtttcgaaaaacagaagaatgccaaggaagaattgagcaagatatattatatatgaaatatacacattcctatttttcaatataacacttaacagaaatagctaggacttcacatcgatcattttccaacacgaacttgtttcaagttctcatcaaagtatcatcatattaaagaaccatgcacaagcacaaatggggcatcttatagtaaactggcattgacaagtttcatctgcacttcattttgtttgtcacatcgatgtgaagtttcttgaactttggaatttgaagtagcaaaagaaacactgttaagaataccgtgttgcgctttgacatggttcttgtcagctgggcagctacaccaaaatcacctgtttgtacattgttgagcatgtcaaacacagaagtcaagacatgcagaaatatcaagtgccaacaaaatgaaaaaaatgaacaaacaaatgtgcttacccaacttcacctcgccttgctcagttagaaggatgttgccccccttaatatctctgtgaactttaaaaatggagtgcaggtaagcaaggccctggagaagaaaataagcacacaaaagttaaatatccgaagacatttaattgccccacaaatgtggtgttagaacctttagtgcttctctacaaatgtaagctatttgggattcatcaagaggctcctctgtgatgcctatcaagtcagcaacacttccaccaccacagtattccataattatctgtaggttgagaatcacatttgcatcaagatcatgttaaatgagttgacaactagataaatctcacaatgatagaaaagtttggctagttcctaatattaataaaatggatacaagcaggctatttgattatttatacccataggtactcctctccttggtagcttccaaagtagcggacaacatttggatggctgcattgctgcagcatctcaatttctccccgtatgtcttcatagccttcttcctgaatgccagagatacatgcttatattttaaagacaaaaatgcaaggactcagaaatcagaaagcaaccacatttatgagattctcccacaattaagcccatgcaaacaaaatgctcacaacaaaagcaatatggttgccaaatatgaaatatgtcttgggtagccttccggaatattcacagaactttgtaataagaagctagaaactaaccccttctgttaatgagatgatcttgacagccacaagctcctgcgttctgagatcccttgctttgtacactgcaccatatgaacctttccctgcatttccaattgaatttgcattgcgcaaaatagctcaaaatttcaggcattatacaaaaagacatataaagaactaatgaaataataattccagagcaagagtcgcaccaagctcatggagcagctcgtacttggtggaaggatcctccctggtaacactgtctggcaccgagctgaccgatggcttccgccttgaatgttgttgctgttgttgctgcatcagaggcgatggctgccggagctcctctgactgctccaccgctggagtccagaaagaggacccgaaacccccgccgccgccagaggcagattcatgggaactggagcccccgctggtgtggcgaatgaaggtgccagagaacgacccgcgggggctcgacgggctccctggccggcggatgaatgtgccggaggctgacttcccggggctcgacgggctgccggtccggcggatgaatgtgccagagacggactcgcgagggctagacgagccacccgagcgacggatgaatgtgccggaggcggacccgcgagggctggaggaggttctccccgagcgtgtggtggaatgaacgacgaaggtagagtacgggtcgtcatcggtagcgcgggggcttgagcgccgcagatccaggaacggagatcgaccggaggccgggacgccgctcttgaaggccgccgtggcagagagggaagcatcgtcagggtcggaggagtaggggtcctcgtcgtcgtcgaacgaggcgccgccaaagtccttggggagccgctgaagaagcggaggcagcgaggaggggtcttcctcctcgtcttcctccgcccgcgtggaggggcccctgccgccgcgggcgtcgtcttcatcgtcatcgccgtggacaacgaaggttgagtagacgtcggttttcttggcacgcgaccacggcgagcgcggggagaaagccatggcgtgccacgcgaggtgggactgggaggagacggtgaaggtgctcgtcgggaatggcaaatggggaaaattgtttgtttagttggatccagttcactcgaatctggcaaatacgggtcgggcttggatgggccatcccattttaggcccacacgaccacacccaatcacccacagtccagagagcttcgaggactgaagggtctcgca

SEQ ID NO: 137382 - DNA, 388 bp, Zea Mays
ggtttctatcaattctaaccattcagtgcatggctctttaaatcccttctgaaatttgaagtggtaagggagttgaacaagttgatactttttcccttcttccttcttctttggcattccccatccactagaggttggcaaagttctatttgccaagtattcctgcactaaatccctggtgccaatatgcccagccaccaccctcaattctacttcggccaattggcatggggagccgagttgcatgttgcatagtggtctcgtcatgccgaagcttaatttcaagggactcatcaccatactcataagcttctctcttctcttctcgtcagctttcacataaaaccactcatttgtccagccagtaggccatttggtgcggtatcca

SEQ ID NO: 137383 - DNA, 326 bp, Zea Mays
cttgtgacagggtttgatttaatcgaaaccaaattgaatttatctgaatctcatttatattggcaaaagcaaatttcagaaatccgagttctggtattaggatttagacgtggtctaatttagtcggaccaaaattatatgggtgattgtatttagacaacgtttgcttaagtttgaaattggacaaaaatgtatctgctaaggaacatatttaatttcttcgccttaatgaatgggaaactgattaattgtgaatacacgctctcgactccaattttctcggtctagtttaatctcgcatcaacacacttgtcgctgagcttcta

SEQ ID NO: 137384 - DNA, 980 bp, Zea Mays
caacaataatgtgtgtataacaggtcacctaattttttcagcagctctttttcaaagtcataggataagcagctttcttcgaagctatccctgtaggcatcaaaacaaaccaaatgaactgaaaaagctttattcctattgtggtgtttcaagaaatggaagcctagaggtagcatggtactgacaaacgattacttatggagcaaaagaatgctcttgctgttgcagcattgtgttctctatcacttggctaatcggttcataaaactaaaacggtaagacatgaaactggagaagatatttgagtttggaacttgacaaccgatggaaccaaagacaacctaaaacagaaaaatattttatcttgaaaactttagtattaaagcgatgggagatggagaagagtatcacgaaaacaatcaaacaaaaaaatgcatctgaaatgcatgtgttagagagcccatcaaaagctatatgtagactgcaatattatcatacttgagtccagcaaatatctagaatccataaatcaagtcctcaatttagatttcaagaataccatataatccatgtgaacatataaagaaggtttatttaaaaaaacatcatgtgtttcagcaagagttaggagtaatgcatccatactgctttgtaatttgtttcttcaagcattatataatctcattgtcaagttgaccacatactcgttgttgtcatggaaaagaatttacttttaaatctgaattgtaagttacaaacttttagtgaatatttttatatgaggatgcacaccttcaattttgcagtagtctgaatatcttttttgcatagtttatcccattcgcctcactgatatcctacaatataaagagtaattaaatatgcataattcaattagatggtgcataaaaggaagaacgacaggtgtattgtgtccataaatcaccaatggtgaacagtagcaaggacatgtgcaccat

SEQ ID NO: 137385 - DNA, 426 bp, Zea Mays
tgggggtggaacatgggctattggatttaagatgtaaggctaggatgcaatcgggcgtaactatggattggtgagctggttatttacttggtggagaagacgatccgtgtgccgtccgatccttatcatgtggatgcgattggcgaggaaggagtggttgctgtgtctgtagatcaaataatggacggacaagattgagttgttgtgtacccctttcgcccatttagatctggccgtagatcccagaatcaatggtcctaatagcgtaccggttcaatagggcttagatctaatccaaaccactcgctttagatcggacggccagaattgatgcatacccccttcgcggatgcaatttgctaaagagtccctggccaatgttaaaaccaacccgcagtcctggcgcatgcgctctgtgtcttaaga

SEQ ID NO: 137386 - DNA, 479 bp, Zea Mays
tgggaaacggctagaaaagcatgcatgtttttagtaccgctttgtgtgtttgctttaaatgaaaactctgttaggttttgattcattttttttaaaaaaaatagattaagtttggtccatatgcggtttcagttatttaaatttgtttggtccatatatgggttccgttatttaaatttgtcggcgtattagtcaaccggcactcgcggtggtcaaacacacagacaccaaacatgcttagccgcctgctgccggccccataggcccagagtattccagaggctgtcgtactgatccagcaactgcaactgtgcaacctttctctctgccatgattgtagtcgacacatataccctgtctactacttcctgttaactgagacaacgcaagcactctggctgcctgcaatgatttgcaattgtttttctagtacaatgtaagatcaccaacccctacctataagtcaaaccaaatcacag

SEQ ID NO: 137387 - DNA, 786 bp, Zea Mays
aaaccacttggtccaaataacaaaaagtggccaaactacccaaggcacacccctgaaaaatttgaaaccaaaccagggtcatttgacacggtttggcatccattttgtcgcgggtgaacagtgcagacagacaagacttggcgccaccatatcttctaagctaggacagatcttcccgtggaaatcacatgaactagctagctctaggtgccaggaagaaatcttgcacaagacatttggcgagattcacacgtttgggagctctgcaggcgcaagaacttgggctaatgaacacggccacgtgttcgacgcgccctggcaatgcccgatcacgccctcggcgctcggcccgcgcgcccagccccgcaccatgtcaaccccgcgcccacgctcgcgcccgcggctacaaagcccacaccggtcttgatcgtacgcccccgcgcgttcctaacctcgcccgagcatgagttcgtcggcatttgctcagagaacggcgtgccagcggccgcgcaagacacgaccaccgtagaccggccacactagccctcctccacctcggccgaccttttggctagcttctccggacctcagtgaagcttcccgagccgcggattggacaccacctcaccagagacgccggatcgacgtcgtcggacttcaaccggccgccgtcgcacgtagactaagccacacggtaagccattcgtcgattccttgtacctatagcatccttagcatccagtgaagctccccgtgccatttgattgaaccctaccaccgtaagca

SEQ ID NO: 137388 - DNA, 507 bp, Zea Mays
ctgagaatcaccaaatgccttcacatgttttactcccatacaatttaaaagttccaagccgaacaaaagggcctcatatttggcttgattgttagtgcaataagttttcaatcggctagagaagtcaaaggagacattacttggtgaaacaagcacgatgccaattccttgtccttcattgcaaaccgatccatcaaaatataaagtcctgggagtaacagtgaggtacgatatgtctagtttatgagtatcatcgatccgatgttctacaataaaatctgctacgacctggcctttcatagatttcaatggttcataagccaagtcatattctataagtgcataagcccatttaccaatcctaccactcataatcgggttttgcaacatgtatttaatcacatcggtttgactggcaatggtgcaatgactagacagtaaataacatctacacttggtgcatgcataaaataggcataagcataacttctcgataaaagtgtacct

SEQ ID NO: 137389 - DNA, 347 bp, Zea Mays
atggaaatggttttttaatgagtagagggatatataggggaaagtatagggggaacggttgcgggacgagtgaatataggggatggaatcttgctgacgtggctgcatagtaacattttagggggaaaaatttagggggcacggttgcggacagtcttataacgacgtctccgggggtataaacaccgtgcgccaggaccttgtttccccttcctcgccgtacttcagtcactgactacagagagggagtgagagaacgcagagaagtcagccaccgccgctatccttgatctcgacgccgcacggtgccctaagaggtctcgggtgataagtcaaagacagtgaag

SEQ ID NO: 137390 - DNA, 362 bp, Zea Mays
tatggttgaggtagctccttcagtggttgttgcagttcttaaaaagtttcagagcatacagactgtccaacaagccctcccttcctccaactgggtccaggtaatcaaggggaatctatttcttgttggcttagaggaattcttgcaactttgggacttattacaagattttcaattgcatgagaggcccgacaggcatgtgtggaggttctctaactccggggtgttttcctcaaagtcggcttacagagctttcttcactggtgttttttctttgagccgtggaaaaggatctggagaagctaggttgagcctaagtgcaagactttcatttggctcactatcaacaagtgttggacagc

SEQ ID NO: 137391 - DNA, 567 bp, Zea Mays
agaaagtttgcttgttattctattcatatattccctaactgtcggtgtttatgacctgaccgtgcaccacggggttccccacgtagtgcttttgagtaggacgacgtcattgattgcgactcgatggtacatgctggcatacgtcggagcatacaagagtttatacaggttcaggctgcggaaatgtgtaacactcttctacctgttgaggctgagtatttagtgttgctagtgtacaagggttacagacgagctgtgggcagtggagggtgagttctctagttgatctagttgtggcgtggttgctatgggaaagctagtgagctatgaggcgacgatgggatgtgacgagctgagagatatgagccgagatgagatcgtaggggcacctcctcgaccttatatagacgatcagagggttatcccttataagtcgtgatgactataactctacttgaatcctcattttaatgcggcatgcattcttacttatctagatttcagttgcccttcatctgagtcatctccgagtatctagcacttctggtatgctcaaccttcttgccc

SEQ ID NO: 137392 - DNA, 473 bp, Zea Mays
cttatcgcttgctactgccggattccatggcaggggtacacccggtttttcatgtctctatgttgaggaagttcttgcgggatccggaccatcagattgagatggaaccaattgcggtgcagcaggatctgactctgagtgtcgtccagtgcgtatattggaattctcggagcgtgtattgaggaagagatcaattaagtatgtcaaggtcttatggactaatcagtctgagcgcgaggctacgtgggaacttgaggagctgatgcggcagaagtacccggaacttttcattgtgggtaagtgttgttggttcattaatcttttcttttgtcattccgatagaagcgtcagaattcgaggtcgaattctttttaagagggatagagtgtgatcctgtacgctctgtccagtgaccctgtacgctgagtcttggcgatcttgcaggatagcccctgggttttctggaaattgag

SEQ ID NO: 137393 - DNA, 441 bp, Zea Mays
attcctttatcagtcttacctctttgaaattcaactaagttgactcttctcttgtagatggttcgcactctccaaaccacccgcgtcaacaccagctacgcccctcagccccggcagatcctggtctacccagtggtagtcgaggaagctccagagaatctccctcccgtccgagtggagaatgtaatcaacctggaggacagctcggaggagcagctgccgacccccaccccgttggccgagcccctggccttcgcagctgggtcattgacgtcagcatcatcggcaccagcctttcaagcacctgcacctggaggcgacgaccccgacgactcaggagacggcgatgacgaggatgacgacgacgacgatgatggagaggatgagcacgtcaaccaggaagctgactacgcccagcaggaccacttcatggggattggt

SEQ ID NO: 137394 - DNA, 849 bp, Zea Mays
agatctcgatactgcctacgttcttgctcagttgcaggaggaggtgcgcgagggtaccagacatcgtgagggcaagttcactccacggggattcagcaaaccggcgtcctcactgatgggaatgccaccagacagtcaggctacttcctcactcaagcgggatcaacccattgctgcacttccgcctcgaccaattcagtctgaagacaaattggccactttgtatgcatatcgaaaagccaagggcctctgttacaagtgtggactccaatatgcccgtggtcacaagtgtcctgatactgtgcagttacacctagttgaagaattgtggcaatcacttcagttgtctgatgatgaagaacctgttactgatactacaactgaagaggtgcatctgttgtctatctcccaggctgctgttcatagtgcagatgctccaaagaccatgcattttctgggccacattggagggatggatatgctcgtgttgttggactctggcagttcttcatctttcatcagtcacagagttgcttctcatctgcctaattggactcaacttcctgctgctcttatagtacagatggccaatggctccaggttgtcctgtgaacatgaactggccaatgtcacatggtatcttaatgagtatgctttttcatcaaccctaaagatcctccatctcactcattatgacctggtcttaggcatggactggttgagttcctacagccctatgtgggtccactgggatgataagtggctgattctaccctaccacagttcttcaatcaagttgtgtggtatgggggtcaatgacctgcagtgtaccgctatggaggtctcttc

SEQ ID NO: 137395 - DNA, 387 bp, Zea Mays
cgcaaaagtcgcctaagggtgcagccggaatagcacaacaagtgtgttaatcgaagtcttttatttaaaagacacttcgtgcaaaagtcgcctaggggtgcagccggaatagcacaacaagtgcgttaatcgaagtctctcattaaaaagacactccgcgcaaagtcaaccacgggcgcagccgaatcaacacaggcgtacgaatacggcgaacaggccacattaccatacaaattacagttacatacacacgacgagggcatcacatattacatcagctcaaccttcgggatgatacccatctccctgtaattgaacagcattatcctcaattcctcaccctcaaaaagattccgaagatccccctcgcctttgctcgccccaatc

SEQ ID NO: 137396 - DNA, 325 bp, Zea Mays
ctggactgggcgtcaaatttcaggaaggttaggggcctcggtgtaagatccccgagacacagtgaatagtaccctgaggaccgcgggttgtttccaaagtttggcggggtctctttagcaaaaatccctagccgaaggggtatgtttcgtctagggccgcacgatcctacatctacggctaggattagatccgcccgcccatcaaccgataagcgctggctcccgtccgattgatgatcaacgcactagattttaaagcgctcaccctaaccaccggaacgtctgatcaagatctaagggcacaaatacacttgaccaaaggggt

SEQ ID NO: 137397 - DNA, 425 bp, Zea Mays
gcccggtgtaaggatcgacgtcccgtggctgacagcgagctcccgcagcgtgagaagtcgaccaactggagaagaagacttcccagacacgctcagataagtttcaggttttggtgggatgtgttctttattcaaatcatgtcctcttccagaagcagttacaggtatttatagatgctaatctgggcctaatcgcctggatctattacacggcttggaaccctaatgggccagcccaacagtaatccttcctcttcaaccgacttactaaaccatacaagtagtagtagtagcagatttaccaggggccgtgacatttccccccccccccttgaacacttgcttgaccccaagcaagagaatctgggaaccttgtgcgcaccacattaaaatcttcccaagtagcagactccttcggaattcca

SEQ ID NO: 137398 - DNA, 785 bp, Zea Mays
ccgctcttaaattgggataggaaattggagatttcagataacgggcatagggtaaacaccaaggtaagatcgagagatgagaaaggtggaggcaataagaaacaaaagcacaacaaaggacgggattacaaattcgcgagccaaagaagaggatacgaccaagagaaagaaggtatgagatggaagaggggcaattttaaagggcaggtacgaaacaaacatcaatataggatatagaggtgtcaagggtacatatgataataattaaaagaataacaaagggtatagttaaggcaagactcgtgaagtgacaaagtggagaaaacaatcaagggtaagataggtaaggttccaacagaagggttgatgtaaagattccttaccgagggagataaaatgatcgttcatggattgttaagaaacaagggtagtcaagggcatgttgaatgaaatatcttaaacagacattgggttataaaggtaagcatagaaagataagagtatgaaagatttcaaggagatgagcataccaataccaagagacaagaaattgccaaaagatagcgacttaacaacagaggaggaaagggtctcaaaagacaggaaggtcatggacatataaattgaaatgtttaagtagagagtggagaatcagatgtaagtatttgaaacacgagtattgaagaatccagggatatgtgcatgtcaatactaagggaataaagatagtcaaagggtagcaatttaatgacagaagaggaataaatcccaaaaggcaagaaggt

SEQ ID NO: 137399 - DNA, 513 bp, Zea Mays
tgtaaatggagtatgctacctatgatgatttggtgattaagcctcaaaaccatctatcaacgattttgcggttttggccttaaattttgatggcgcgatttctgagggaattagaggttgaacatggagccatcacgaaggttgtgtcaagatgaaggaaattcgtgaagtgagtgtggtcgtcagatcaatggattaggagttcgaccgttacacatgtagcttaggggatgtaaatggagtacgctacctatgatgatttggtgattaagcctcaaaaccatctatcaacgattttacagttttggccttaaattctgatggcgcgatttctgagggaattagaggttgaacatggagccatcacaaaggttgtgtctagatgaaggaaatccgtgaagtgagtgtggtcgttagatcaatggattaggagttcgaccgttacacctgtagcttaggggatgtaaatggagtacgctacctatgatgatttggtgattaagcctcaaaacc

SEQ ID NO: 137400 - DNA, 288 bp, Zea Mays
tgtccatctgactaggggtggtaggcggtgctgaagtctagcttggtgcccatagcttgctgaaggctcatccaaaattttgaggtgaattgcgttcccctgtctgacactattcttcatggaatgccgtgaagtctgactatttctttgaggtatatccgagaaagggtggctcctccgaagttagtttttactagaataaagtgagctaccttggtaagacggtcgattataacccagatagaatcgttccctttttgggtccggggtagtccgattacgaaatcc

SEQ ID NO: 137401 - DNA, 414 bp, Zea Mays
cagcagcggaatctagcaccgggagcgtgtcggaaatggacaccggctgcttcgacactaggatggggctcacccccaacgacactagagccaagctcgcctcttcggcccatgcggcgatacgctggaccccgatgcgatgctccgcccggagatcttctagcgtcttcttcatcacctctaccgcctgggaacctggagccgcctgtgccgtttgggctacctgcgcctacgtcgcctggaaccggcggacccgctcctctagtgtttgctctttctcctccagtttcttctcctcctccgcctcgagctcgtgctcggccagcaacttttcctgccttttccacatcttctccctccaggcaaggtccttctcctgtcgggtgagatctgtcgcccgctcctctagggagg

SEQ ID NO: 137402 - DNA, 308 bp, Zea Mays
ctggcagtagcggcgtcaatgcgtctgaggcggtggagatggatttggggtcacggggtggtgggacggcgcgaagcggtggctggagtatgctttttcgcgtatgacttagcaccaacgttgatttcgggagtcccaacgaggttggtaaatgtagggatgaaactgagttttgtagggagtttgtaaattcagggacctgctttacataactattggaggagagtttttcttgaaaacttcttaaattcatatttagggagttttttacataactattggagatgctcttttgagatattattctc

SEQ ID NO: 137403 - DNA, 505 bp, Zea Mays
gtccgattaggaatgagcggttaagatgggcgtctgggattttgccttcatcggtcagccagaggtggcgcttcccgcggacacagcggcgccgtcgccgaaggcgaggcagatcggggttcttaggccgttaggggtcggtccgtatagctggagaggttggggatgacctgccaagcgttatggcggggtcggggttgcatgaacgaggctgagacgaccagacggcggagggggagtcctcggcggaccggggaacactccggcgagcaatcgcgcgcgactaagtgcaagacaggggaaaataggggcgggggttaggacagttaccttgagggaagactttggagctcacaaacggcgtccgagcacgacgaggacacgggtcgacgatggctgagctacggtagtgaaccggtgatcgcgtaccgggcgaactagaggggaagaggacgaactaaggggcgtcccgggttgcgggtgataaggcggagcttaccgaggc

SEQ ID NO: 137404 - DNA, 1111 bp, Zea Mays
agtctgtcgcagagctccagagggcagcggggccggagtgcggggagcaggaacctccccggagtcggagggggcagcccgaggtgcgctgtagagggccgtggcgggagcggtggttgcagcggcggagaggcaaagctcctcgagaagcagatcgttcttagcctccgcaaaggtgggaaacggcttcatgcgggtgaggatgggggccacgcgatcgaagcgaggactcagaccacgaaggaggttgagcacgaggctctcatcggtcatgggggccccaagggtgcggagtgtgtccgccatcgtcttcatctgacggcagtactcgtccacagagagatcgccctgaacaagctggcggaaggcggtctctaggtacaggatccgagtcttgcggttgccgaggaactgagcctcaagggcaccccagatacggtgagcagtatcgtccggcacgcgaacgatgtcctgaagttcggccgtgagggtgccatggatccaagagagcaccacttcgtccattaggagccaatcctccgtcggtgcagcgaccgtggggaggacgtggtcggcgagggcgtagcggcggagggtctgcaggacctggtcgcgccaccgaggatactgagtggagtccggcgcgagaacgtcggtgacggttgcccggatgctggtgagggccgccgcctgggcgtgaagagaggcgcgaagggtcgaggctgggacgggcgcgggctcgaaagtgtcagcgctgtgacgagcggacataggagaaccatccgagacgcccttgccagcgaggcgacggtaggtctcggcgtactagcgctcgatggcgtcgacaaccgcctgttcctgctcaagggcacaagcggcgtcatgggcccgctggcgagccgccgcaacggcagcacgggtggcagcgaggatggctgcagcgtcatccgaaggggaaggagcacgcagtgtagaggtgatagaggacggctggctgtagaccgtcgtgccaatggtgccaccgggaaaaaccaggggcaacagcagggcggcgtcgtggccgagcacggtgatctgggacgcgggaggaagggagatcggcgcgggacag

SEQ ID NO: 137405 - DNA, 686 bp, Zea Mays
tgcagtaatgacatcggggatgttatgcgagtaagggaaaataagttgttccctcgccatacgggctaatgcaacatcctcgcagccacacgtcgtggttgtatccctcaccacccaccgtttcgcgctacccgagccaaccctcattggaatcaaatctctccccaacttacccctagtgactttctcggtgaagtcctccacggctcaggcctccgcgtcattccccaactgcatcagatggctcatagccacgaaatccgcggcaaaggcttctgaggcagtggcctcatcaagctctcccgagtaggctgacggggtcttagtcaatgtttgcaactaggcggagaccccagtcggtgtttttctccccctcttaggcttggccttgtgttctgcatactcaagacccaccaagctaaaaacatggttgaggcggacgaagcccccatgtaaagcagcatcctactcaagctcagcctctgtcactgaaccaacaaggtcttcttccttcgtctccatctccgcgacaaatagctcatgggaacactcgcccaaatcaacaacaaactctagacttaaaatttgcttgtcaaaaccatcaaagtctcggcgagtcatagccacgactgaacacccacgactaagcgggcgcacgccataagacaaaaactcctccaccaagt

SEQ ID NO: 137406 - DNA, 715 bp, Zea Mays
tggaggcgtcttcttttcttcttctgttcatcagcagaaggattaggctggttagctcggcaagggcgccttgggcgagtactgacaggcttctgagcatccaaagtcgtatcagcctctgggagggatgccactaccaacaccccagcaggagcagcatcggaagaatcctcagctagcagatcaagcatagcacttatctctgcatcactagggttcaggggcacctcaaaatggacctgccgttcgtcatcaggaatctccccaagcgaggcaaccaaagcactaacttcttcagcagagggtcgcactttaaggcccaaactgccatcagtaatggggggattcgacacaaaaagggtgaaggctttgggaggaggcagattccaggccgagtatgccactggagcaccaacatttgacaccttgcccctgaggatcatttcaagtcggctcaccaagtctgcagaaggaattctcctgttggtatcccgagttgagtcggctagccctcgatacagataagctggataggccttgtctttcagtggctgaatattcttgaaaacaaaatcagtaaccacagcttcagcagtcagacccttctctttcagcagtccaacttcagctagcaacacacttgcctcagctacttcctgatctgtgggagacttggtccagcttggggtgcgaacgtccggctgtcttcccgacc

SEQ ID NO: 137407 - DNA, 327 bp, Zea Mays
acctggccaatttcaaggtggagaagcatcagaaagtagtccggcaaagggagactgaccgagcattgctcttacctattgcacccgcccccaatgtaagtaaaacaaacgatatttaatctattagagcttgcatatatgaacagcaagagcaaatgcatcaagtaatagggggtatgcaagaggatataaaagaatagcgtgcgcatttgaaaaatctgttgttcccaattttttaacgtatgatgttgaagctaggaacgatgcacaaaattctttggctgcaaacgggtattcacaaccccaaccattgtatggtatgctaat

SEQ ID NO: 137408 - DNA, 526 bp, Zea Mays
ctaattcacagggcccacatatcaatgccatcacccacactcacgcccatgtgtcgctaatcgctacctgcctagccccactagttagccctgcctttcccttttcgttgtcgttctaggctcactttttggcaccatcggtttccatcgctcctagtcactggcacgttgaaccccatgtcagctccttcgccccaatcgtcgtccaccccacgctcgcagccgcctccccacatccatgtctccatctcccccacgttgctcggtattcaaaagggagacactgagcctcgcacgttcccccactccccaaacgtacaattactcatccatttcccctacccgcacaccacgcagcgccattgccatgctcacgatccatcgtcatcaccgcactatcgtcatccctctcacctcggtaagctttgtcgggcataggaagccatagacacgtgatcgttccctcttcacctcactgtctcgccttgcctccgttcaaccccctttcccctgtgctaaaccggag

SEQ ID NO: 137409 - DNA, 1073 bp, Zea Mays
aagagatcttcatcagttttgtcacaaggaagcttcaaggcagtccacgccctatctttgctcttccaacgtagccacggccatcttaatcttagccccctcgcaaaacgatcaaggtccagaacaccaagacctcccttgtcctttgggaggcaagttaggggccagttgacgaggcagtgccccccgctgcaagcttctggattgccccctttccacaggaagtttctacgcattttgtcaattgtttgcagcagccatttttgaggtggaaaaaccgttaaatggtagattggttgtgcgaatagcaccgctttaacaagagtttctctaccggcctttgacagcaatttgcctttccagcctgccaacctattgttgattttttctattagaggttgaaggtcatttcttctaactttcttgaaatgaaggggtaacccgaggtacttcccggggagactagagtatttgcccggaaacacctccattagtgcaggccataatgctgtcgggtaacgaattgggtagatttctgttttgtcatagttgatctttagcccagagcacccctcgaacgcgttgagaatccctttgagcacctccaagtctgacttgtcagctttaatgaacacacctgcgtcaaccgcgtagagagagcaccgcaacttagcccctctaggtaaaacctgcccaagcaatccctcgccagcggctttctcaatcatccggtgtaatggatccatcgctaaaatgaaaaggtagggggatagagggtctccttgtcgcaccccacgcctgtgattgattgcatttgaacgttgcccattgataactattcttgaggaggaggaccccaaaatgtccgccacccaattgcgccatttctgagagaacccgcaggcccttaacacatccaggaggtatgcccaattcagggtgtcaaaagctttggagatatcgagcttgatgaagagagcaggattaccatttttatgcaggttcataatcaccctttgcacatacagaaaattgtcgtggattgaccggttctggatgaaggcattctgagc

SEQ ID NO: 137410 - DNA, 831 bp, Zea Mays
tggtcaccctaggtcaagtaagcgtgagcaagttgcaccgacttaaatcgtcgtcgacttaagtcgattgctccgttagcagggtatagtggtcaccctaagtcaagtaaatgtgctgatttcaagccaagcccaatcgaagtcagctgtaagtcaagagtctgaatgcctttggaaaacaaaaagtttattgatgatgaagtcctcagattacatagtacaatgttccttcaagaatttagaggcctcgctaaggataaaattttctgaggtgttctatgttccatcagttcccacttttgtgtcgtccatctgagtaagccggtatgatcccgcccgtgtgacctctgatatgatgaacggtccttcccatagtggtgatagcttgtgccgcccttcccccgttagaattcggcgaaggaccaagtctcccactgcaaaggatcggtgccgcacaactttatcatggtagcgcctcaagatctgctagtacctagtagactgaattactgtgttcaatcgttcttcctccagtacatcgatatcttccagcctggttgcttctgcttcggctatgctttcgaaagttaacctcgacgccccaaagattagatcggcgggtagcactgcctctgacccataaaccatgaaaaacagggtatttccatgcagagcccgactgggttgagttctcaggctccagaccacgtatggcagctctctgatccattttcctacaagcttttcactcttgtcaaatactttctttctgagtgcttacaatatcattctgttggctctttctacttggccattggctcttgggtgtgc

SEQ ID NO: 137411 - DNA, 869 bp, Zea Mays
ccgacccgagactgccttggtccgttagatcggatcttaatggtttagataccgcctacctaagcgctataccaggagcaaatccgcgccgttcaccgagaatctaacggcgccagcgttccgtgactcaaacacggtggcactatccccgccgcggtggagcactcgccggcgacacacgacggaacgacccggggtttgtctaccaacactaccgggtgcaaaatgatctagggcatgcaacgaaccaatggagctgagtcttacccaagattgcagtggcgaggatgcagcccgcggtgacacttggtaggttggcggaggaggaggtccgtcgagcaattccggcaaccccgccttatgctccgacctcagtggtctacggacgcgtcccatgactccaggcgacacgccctgcacccgccgcagagcccagcctgccgcgaaggttgaaatcaacgacggcgacaagtctcaccgagggtcgcactccttacggatttctcgcagggtgatggcgaaggcgttggtggctcgagatcggctgtagagaggaaaacgggtccaaggaaccggcatcgtgacccttgcttaagtattcggtgggcggatcctaacaaactagctagaatcccgacagttatgcgagggtgggttgcgaagggatccaaagtccgtcgaattcaggcagatgcgatctgttggatccagaggagatgcagctgacgacatggccctacatgtaagcgacactagttggaaatgagctaacaacatcatggcgtctggatgagatagttttgtagttaggaaataaataataggaagaaaagaaggtgggttgacggcagggaagaatgaatgggttg

SEQ ID NO: 137412 - DNA, 289 bp, Zea Mays
tggtgatgccaacaccaaggttttccatgcatgtgctcgttataggaagaagaagaacttcatcgccaagttgtctaatggtgaagggctggttactagtcatgatgataaagtggaggtgctgctcaattattttacggagctgattggtagcagcagcgacagggagtcttctattgatcttgaggcccttgggatccaacaccatcttctggatcaccttgtcagctcatgttcggaagaagaagtttgggataccatcaagctgatgccctctgacaaagcgccg

SEQ ID NO: 137413 - DNA, 675 bp, Zea Mays
tatatatttgctggcgaaagtatgcacagagtttgccattgaacaggtgtgctggagtatgttacatcaagtgttgcgctaggtggatggaagtgttccgaataaatgccgcaatatggttgtattcgtgacaaggaggtgtaggttttactcgactagaagtttggttgatgtggctaggcattgctttggcttgtgtggtgaggtgatgacatgccaaagtagtcatcgcttcctctatgtttataagtcgagtcgtgacgatacacattatgcgttcgttaaattatgctttgcatatagggtatggctatgctcacaatttcgattagacacatcgggtggtcaagtaggttcgtgatacaagttgtgtaatggagttagtttgttttagaatgattattgaaatgctcagttcatattataaacatgtatgtgttcacgatttgggaagtaagtgcatggtggttgcgagttggagattagtggtttacagttcatatgatttggtcaaagtgcgaatatacgcgtaaatacgtatgtttataaaaaatgttgtagtgtatgttgtgtctcggattgtgataataatgggctagtcgacgtgtatgttatttagcgggctatgtcgttgctctagttagccgaattgttagacggctttggttaagctcg

SEQ ID NO: 137414 - DNA, 1007 bp, Zea Mays
ccccctagatctaatcttagccctacagcgattgatcaatggtcttggggcttcttcctccccatgaccccggacgactgcgtcacgaactggggaaacgtctagctcgcgtgtaggttgactaaccacccacgggtatggatcggagcgcggatagaacctatgcagtgaggatggaatgttgaattacagggacgtcttcttaccaagttcgaagcgcaagtacagttgcccacggaggcttgcggcatgatgtcgattcctcaacaccgcccgtgaagctcccgatttccgaattggcgaatacatgaatgagtcttcgcgcagtacggggtgatatcgcagcttgacaccccacgcaagttgttggagaacccggctcccaccgcgcggcagagacgacgctcacaccctcacgacggcggtgaaacacggtggcgcccgcatgaatggcttatctgctggcaaccgggacagcgatttccaaggacgagggttttgtagggtgagggaaggcggggtttgcggcaagcgatttaagcccgcgtccatctctagagagaaatacaagcacaactacgaaatgggacccacatgtcattggtggaggcaccgtagagatgagatcatccgtgacctcagcgtgatgtcaccgcccacgatacattaaagaactccggcggccgaaaaagaatctatacgccgcgggatgggcctggtgggccggtcttccggaattgaggccatgcgtgagcccttctcttttttttcatttatttttattttcttttgctttcttctctctttctctaaaattcaaatttgaatttaaaccctgttgtgaacttatactcatttttggatgtatactttaatcaggcctttatggatttaatttacttatctttaaatttacttatattatttctttctgctttctctcctcttctattctctattatttccaaattcaacattcaaatccccatttaagttcaaacttcgtg

SEQ ID NO: 137415 - DNA, 302 bp, Zea Mays
gggtgatcacgtgtatctgaaggtgtcaccgatccggggtatgaggagatttaaagttaaaggaaagttgtcccctcgctttattggacctttcttgatcttaaagcgagtgggagaagctgcatatcaactagaactacccgatcatcttgcggatgtacatgatgtcttccacgtgtcataactaaagaagtgcctcagggtacctgaagagcaggtaccgatgggggatcttagtgtccaagatgatctgacttatacggaatatccaatcaagcttcttgacactttgactcgagtta

SEQ ID NO: 137416 - DNA, 649 bp, Zea Mays
catggtcatcctctaaggccttaatgttatgacgagcaacctccaactcttgcgcaacgagcttcttcgaggcgcgcaactccttgatgacagatccttcgaagacagtagcttaccaagccgtgacacttcagtctgcgaatcccttaactcatccctatgatggtctatttccgacatagtaaagcgatggctcctctctaggatagtgagggaattgctagcatcacgatacaacctatccatattgtcacgagaatcaagaagcgtttgcctctcctcctacaagtaagaagagcactaagcatcgaagcaaaggggcaaaacagaagcagtcaggaaaatctacctcatgaggcatcttctctgaatcgagctgggcatttaaggaagagttcagggtccgagcgctgtccaagaatgcagaaacctagttcagatcagcttgactctaggcatacctttcctcagcatcggagcaccgttgagtcagagctggtgaagcaacaggaaaaaatacaagatgcaaaacaagagaagcaataaatagcaaaaggaagctacagacccactaactaaatttggaggactttagatcatctatttgcctctgaagcaggagaggattccactgcatcaaaggcaaaac

SEQ ID NO: 137417 - DNA, 275 bp, Zea Mays
gattaaataggggagtatcggtagtcactccctagaacatgccctaacataaaagtagaccaaatggcagcacatgacatatggaaatcgggcatgcaaattctagcactggagacaagttggagtttacaacgagggcggaggcaaacaagccatcacgagtagtatacacttgtaatctcatagaacactgcactcactacaccggagtctagaatatcgagctccctcaatcaagtttgtaccccctgttacagacattagtgcagagtacg

SEQ ID NO: 137418 - DNA, 985 bp, Zea Mays
cgacattgcaggcaggaactgcgctgaagcagctggcagtactatcatctggctaccactgcaggagctgccccatgcatgcgttgcatgcacatttactccatgtctccatatgcatggtgcgaaaaaaaaacggcagtgccctgctactacactcgtttcaatccaatccttgggcgattggcacgacggcttgggcagagaaaggaggaaaaactgcagtgcagcgccctccgtgcattttttgccctgagaccgaccgactcgaccgggcaatgcggctgcgtgatggtctgatgcgtggtgtctacggctccgggcacgtattgtcaccgtaccgttgagtggccaagtcatgccatatatatatagtcggttgggtaactgtaaactccaggataccatcgcacactgacgcattttgagctccaccagcacaagccggactggagatgagatgactgctagctgccgatgggagataggtcaagctggcgccatgggcacttgtagattttacaacgtagctcgaattgtttttgctaccctgtctttccgatatattataatttgccatcaataatattgatcccttctcattctagtatttaagttatccgcactcatactactctaaattcttaaccttaaaaagaatattcagttattagtatatgtcgtggctctgtctctgtctgtgcacttatgccttacgcaaacatgcatccacacgtaaattgcaatatatcctgctgtgcacctatggtatattttagttttttcaagtagcattcatgtggtgctctttgataattttaggacgttttctcactatcttttctctgttacttttgattactatttttttattttgttttatcccttgtagttttttttatatttcatgaggtgctacaagtatacttttatctaaaatattatgcccgtgagggtagaatattttttccttagatttaaatacttt

SEQ ID NO: 137419 - DNA, 546 bp, Zea Mays
ggggacaccaacttaactgtcctcttgtcacaactgacagtggcttgatttttgtgtagccaattcatccctaggatgacatctaacccttgagttcccatgactactaggctagcggggaaggctatcccccttatttcaatccttagattcagacaaatcctatcggactgaacttttcccgcaactgaattaactctcaaaggtgggatcattggttatatggggatgttatatgattctacccaagatgtagaaacaaaagaatgtgtggcaccagtatcaaatagtaaatttgctgggtaggattcgactggaaacatacctactgccacgtcctgagcatcttggattgcttcggcctccaggtggttcacctttccacggttgtaagcctgaccacggactcctggtgcttgctgtggtgctccttgtcttgttagggcattgactgctggcgattgctaggctgctttctttggacaattcttcgcccagtgattttgttctccacagtagaagcatgcacgacctcctacttgtgct

SEQ ID NO: 137420 - DNA, 823 bp, Zea Mays
tgcatgatgaggaaattaaagtgccacgttgatgcaggtgcagatgggggacggaggccgggcaacgcaactaactaacccaacaaaggcaaccaaccactactcgcccgttcctcctgctgctcagctcatgctcctgagtcctgcctggatggtctctttcctttgaaactgggcaatgtttggaccaaccaaccaacaaccgagatggtacgtaccatgcaatgcatgttgcatgcggcactgcactggtatgtaactgtaacgttgtactctccctgactgacacgacttgcatgctctagcccaggttattcgtcccggaggataggacgcttgggcttacatcagcctccgagtcgatcggccggtggtcaactaatgaaacccgtttcatttttgaactaatgaaagagagtatatattagtgaaaaaggtacataaacggaatattatttatttcttcacgtaacaaaaaagtgcataacatgctacgaaaagacaaagtaaaaatatatgtatgtatgaaaccccatgcatgtgctaattattgcaagttttataaaattagtgggtgtgcacagcattgtgctagctagctagctagcttgtcttcattaattaatatacaccgccatccaattaacaagaatattaaagcgtgcactgcatatatagagaggtaatccaacaattaataattgtgtaatggtttgttaggcgacgcgcgcgcgcgcatgcaatgcaatgcaagagggtttgttaggcgatcctccatctcgcaattatttgcgacagctcgaatgtgtactagctactccca

SEQ ID NO: 137421 - DNA, 490 bp, Zea Mays
tgtcaacttggtcgtcatgtccgtcttcctttttccttttcccagtctcgtgctctgcgtcactttgatctcgtccactgtgatctgtggacttctccaatacccagtatttctggttataagtactatctcgccatccttgatgactgctcccacttcttgtggacctttcctctccgcctcaaatccgacacatttcccactattgctaattttttctcttttattgccactcaatttggcaccaccataaaaaacttgcaatgcgacaatggtcgtgagtttgacaactcccacgcacgagctttcttcctatcccacggtgtccaccttcgtatgtcgtgtccctatacctcccagcagaatggtagagcagaacgtgtcctccgcactgttaacaacatcgtccgttccttactctttcaagctcaccttcctgctccctattgggttgaggctcttcacaccgccacataccttctcaatctcc

SEQ ID NO: 137422 - DNA, 810 bp, Zea Mays
cgacccgcaaggagtcataaagaatggctcacatgtcgaataactcatgcagtgagtctagggccattgtcggcatctagaaaagggtataccctcatatggtgtcgagacatgctaagatatcttgaacaaagagacccacactctttaggacaactaccgacttagtctatgaaactccacatgtgttaactccatgcatcaagtcttgtgacggacaaagcccccacagcccctcgtgccctagggcaccaaatagataaaactctcgagacctcttggtccccgaggcacgtggcagataaagctctataggccctcgcaccttggggcaccaaacagataaagcctctaggcccccttcagccctaaggcatgtggcgccaaaacctcgagacccataatgctcgggtcaccttagggataagtcctccgaacctagcagataagcctctagaacccctcgcacccctagggcacctaacaaatatggcctctaaggccccggggcacctaaagtataaacccttgtaccccttgtgctttggggcatctaatggttaaagcccctaggacccctaatgcactaagacacctaatgaatgagccacatgcccctcgtactccgggagacctaatgaataagaccctctggtcccctcacttctcaaggcacctaacagatagggcactcggtcctcatcgtgtgtcgaggcatctaacaaatgagccccctgaggccactcacgctcctaggcacctaacatgtaaggccattggggccctcatgtcttagggcacataacaaat

SEQ ID NO: 137423 - DNA, 366 bp, Zea Mays
gggtagtctagctcaattgaatgggtcgaggagcatcaggagaacctaaggacactgaaacagaagagcagagagcatgaataaacctgaaatgagctagccacggcgaggtcactatgcacggtgtttcggaccgatttggaggaatcccaaattggggctatctggtgagtaattggaggcacgagtgggtggattggatgcttgaatacctaatggagtcgagggtgtgctcaatttataggacccttaatcggtggctcgtgaatttgaaggagacgcgcggcggccggagatgaggaagagcactggcgcaagcgattggtggcatttaccgtggcgggctcaccggcgatgaccagatgt

SEQ ID NO: 137424 - DNA, 452 bp, Zea Mays
gtcaagccagtcgaagataaggttgataaggctgaagagccaaaggttgaagaaataataaggatgccaaaaattttgagccctccgatagaggcaaaactgctgaaggtgcaaaagacttttgccgcaactcctaagaggaggaagatggcaacgtgctagatgctgtgctggaaactacgaaggtcttgagccctactgctacaaagaaagttgttgaagctacaaaaatgcaggtcgaagccaaaactgggcaagcagaagccgaagctgcgcaagttcaaactaaagccgaagctgggcctttagtgcccaccgagatggagcctgccatgcctgagaaaaaaacgacagagcagattgcatctgaaaagatcgaagctcctgctcccgaagcttcgaacaaaagcactgactacatcattcgtcatgcttcgggaaaagaactatcc

SEQ ID NO: 137425 - DNA, 613 bp, Zea Mays
gcattttcttatcacaacaagagatagcacgaaaattgtgcaagtatagattctacaactagtgatcatgtataaaaaaaataccaattgaaaaccacaaattgatacaatctggtagataactagcatattaaactaagttctcgtattttagtacatacatatgattatacatattgagagtacttatttacaatttaaagtatatttagcataaaaggagtatcaattgaagataatcatgcaacaaggaatatatgtactatttaatcaatcaagttttagataggagaatttataagttatgctactttagatatttaaaatctaaaagaatatgatacatatttactaaacttggacgacgtcggagtagcatagtatattgtgtgtacttactatatgaatttctgctgatgtacttcgatgagcatggtatattgtgtgtacttactatttgaattttaaactctagaagtttgttctctagatccatgaatcagcataatatgaacagtaaaatgctttgcttgaaatataaaactaaaacgaatgcacttctgttagtagaaatcaaagtattcagttcttagctatgaaacagatggtcgcc

SEQ ID NO: 137426 - DNA, 459 bp, Zea Mays
gtggagaccataggtatccagctacttattatataggatgtaaaccgaacaagttgaggtaagaaagattatggcaaggaaaagacttcatctgaaaggtttaaatcttgattcatctcgagatttgctttgactgttatatccttcctcgttggtgttgatcatttcttctccggtcttggtctcattgattcagagttagtgtatattatcggggttgggaaatatggttaagatagacatggatgaggtaaaccaaatgatgtagatcaaaagtttgtttgaggttaggtgaggatagattgatgataccattcatcatgactctatgggttgggttagctcttataattatgtttaagttggtctacacctggctagaagggtccgaaaaccactaatatgtttaagcagaccacattggattagatcaccctagattccataatcctatttaag

SEQ ID NO: 137427 - DNA, 708 bp, Zea Mays
cctacggatgctaaaacaagcaacagaaggacgggaactaaccggaatcgagctggccgcggcgagctgttcttcacggcggcggagaccggatttggggagaatgggaaattcgtgcgtgctggtggatgatcgagggtgggagcgggtgctatagcttcgggatggcttagcgcagctgcccaggggctcaatttatagtgttcgcgggcggtggtgctcaatttgaatgaagatgagcggcgaccggagatagggaagaacgcaggtgcggcgaattcgtggctactgccgtggcaagctccccggcgacgatgggacgggtagagggagtcatggcgacgcggtggaaaggcttggacacgcggcataaggccgggaagcggcggtcaccggcgaggtaatccacatccgccgcggtaacgatggtacagtggccggagttgtttaatggctcaagtttatccccgacggtgacctccaagcgttatccacactgtccgcacgaatcacagcaacggatcgaccaccggcgacgacttaccagcgacgagcccgccgcgctggcaacctgatccgctcggtctactgtaccatggcaatcctcattcagagcaccagacagccggagttgagggtcgattttctcaaaattttgtattacgacttggtcatctctctgcaccaaagttgtagtgctacatacca

SEQ ID NO: 137428 - DNA, 282 bp, Zea Mays
gccatccatctgggtgaggcgatacgatccgggccgagtgacttctgttactatgaaaggcccttcccataagggtgataatttgtgccgtccctcccccgttagaattcggcggaggacaaaatcccctactgagaagaatcgttgccgcacggccttgtcgtgatagcgtcttagagtctgctggtaccgtgctgattggatcactgcatttagccgttcctcctcaagtacatcaatatcctctagtcggttggcctcagcttttgctatactgtcgaa

SEQ ID NO: 137429 - DNA, 826 bp, Zea Mays
cgccgccactgctccccacaatgccgctgctgtagcttcatgacggcgcccctgcaccaagcctcgctcgtgccaaagcgaagccatcggctccaccgctcctccagccacgaacgtcgtcggttgtccaaccctccccttcaccaccgcttgccacgatgtcgctgctccagccttgcaacagcgcccccttccattgtccccccgcccgcggccccgctgctgctccaactctacagcccctgtccgacatgaccaacgcctcgcaggcggaggcgacatccgaccctatgaacataggcgttggggcttcacactaagcttcaccagagcgtaaaactccctcgtcggtccaggggagggactctagcaaacgacggacctgccgatggtcagccgaatcgctggattaccgttgaattgctgagtttgattcagtgcgcattatctccggctagggcctaggggtttgcagtggctatttctgggtcgatggatcggtcggctttggactttttctgatgttgatggcttaggattttttgttgccatcgcttggggagataatctttggggagggttttaggtctagattagccacaatataaaatttgatccatcagccaagtcgatttatattaatacactatgatacagggatgtttagaagattcttaccatctgattcacgtacttatgaaatgaattttctattattagatgttcgttatggtttctttctgctttatgttctcccagaatattgttaaccagtgttatgagttgggtagtacaattggagtgatatcttgatcagctgcatttg

SEQ ID NO: 137430 - DNA, 342 bp, Zea Mays
aaccattcttgtcatggccctttgaattgtttctcaaatttgaaccgataaggcagtcgcacaagttcattcttttcctttgtcccctttagcttcggcatgtgccattcactcagcatcgggaacaccttataggccagattttcttggactagatctctggtgctgctctgctcggctaccacccagaattctgccatagcttcttggcacggtgaccccgatgacatgcggcataggggcctagtcaacccgaagcttaagctcagcgggctcagtactagcgtcttgagcttctacctcttcttctcatcggctttcacatagaaacactcatttttc

SEQ ID NO: 137431 - DNA, 302 bp, Zea Mays
gcaattttgatggtctcgagtgcctccttcaggaatgggtcggcttctggattgtatggctctagaggcggagatagttcagctgcaccgtagtatatgtttgttagttccgaagttaaaacagattgcaaagctaaaacagatgcatacctataagcctagcccgctcggcagcttcttcatcccttttcgcctcttctgaagcatcatgtgattccatttcgttccttttgatggcttcatcagcgacttctcgcccgcccttcaaccatatctcggagtaaaatttcccacctagggta

SEQ ID NO: 137432 - DNA, 576 bp, Zea Mays
cagaaatcgaagaactctgagcttgtgaaattggaccccaggtcagttatgatgcgatttggtattccaaacctgaatattatgtcttgtatgaattccactgccttagctaaagttagagaggcgatgggtttgaactctatccatttagtgaatttgtcgatagcaaccagtacatgagtgtgtcctccttgggctttcttgaaaggtccaatcatatccagtccccagcacgcgaacaaccaagttacaggtatggtttgcagttgctgtgctggtagatgctgctgctttgacacgtactagcaggcttcgcacctctggactaactcggctgcatcattctttgctgttagcgagtagaaacccgaccaaaagaccttcccaaccagggttctggatgctgcgtgtatcccgcattgcccagcatgaacttcttctagtagctgcttccctgtagttgagagaatgcatttcatgaggactcctgatgcgccccttctgtatagcgtttccccaatgagagtataatgagccgattgccttgcaatttgttctgcttcatttttgtcatct

SEQ ID NO: 137433 - DNA, 640 bp, Zea Mays
accgaatttcacccctagcgaccctaatccctccattaattgcacgattctggcccgaaatccctctatccacgacgacggcgaaaatcgaggacaacccgaggtgttcccggcgatctagcatagtctagttcaattggttgggccgacatggatccctagcatgcaagggtgctgaaacaagggtaaggagggcaagaatggacctggagacggcggtccacggcgcagtggctcacggcggcacgaagaaccgatttgggggaaatcacaaattggggcatggtggtggatgatcggaggtgaggactggtgtactaagcacgtaataacctagcggagctctgcggcatcaatttatagagagtgctcgatagtgcgatgaatttgggcgaagaagagctggcggtaagataggggagcagtcaccgtacaccgctaaacgtggcattcactgagctatgttcccggcgacagaggggctatctaccgcgacctattgtggcgtggtaacaaggtcagtagcatgggtgctcgagttaacggcgatcatcaccgcgacggccacgtcgcgacgcaagtgggtacaacaacagggcggccacagtgccccgacctcatccacgacgaagatcttttc

SEQ ID NO: 137434 - DNA, 472 bp, Zea Mays
gggctttactgctatgtcgtaatgccttacggtctgaaaaacgccttgccgacatttgtgcgggcgatatgtaagactttcggggacctgattagggacaaggtgaaggtatatgtcgatgacatcgtggtgaagactaagagagggtcgaccctagtggaagacttaaccctggtcttcgacaagctgcgggcaacccgcacaaaactgaacccggacaagtgcgtctttggtgtctccgcaggaaaattgctggggttcctggtttcgtaccggggcattgaagcaaacccggagaagatcaaagcgattgaggcgatgaggcctccggcccgtatcaagaatgtccagaagctcacggggtcattagccgcccttagccgcttcatttcaaggctggctgagagggcgctacccttcttcaagctgttgcggaagtctggcccattctcttcgaccgaagaggcagaac

SEQ ID NO: 137435 - DNA, 505 bp, Zea Mays
cggagttggatatccatcctcctcaaaaaactctgtgttggaccgtctggcgttatattcggactgtttggcgccgtacgtggaccgtccgaatgggttatctagggtttgcacggtatgtggcggcttgggtgcgggcctcggtaattcgcttctaaaaatgggatcggccgccgctggcccggacggtccgcgctcacgtgcggacggtccggacatgcgcagatcgacaaatttatcgccgatgtgcgtgggaggctgttgttgcctagggtacatgtctatcggccccccataaaggggttgtgattggtcgtgacaacctgttgccgatgaatcacgtgtgtattccctcagttcaacctcgtgcgaaggaagatttgcaatagtagacttatcaagcgcacgcactagccttttatgatcgttttgtatatcccatacgatacgttgcatctgctttcgctgttcgtctatgtaagccttaagagattggagctcattg

SEQ ID NO: 137436 - DNA, 276 bp, Zea Mays
gcttgctcacgttaatcatccctatgcctacatctatgttttggttttgctgacctgcatgaatacaaccacttgttttggtccttggtatgttttctatgttttggtttttctaatctgcattggaaggcatgttgttggtaagcattgtcgatgctctggtagaatatatcttgagttacaaatgcgagcttcagttttcacgcaacttcatgaaagcttagctttatagcgcagttcagtgttaattatttaattttgtaggcaataaaaatg

SEQ ID NO: 137437 - DNA, 332 bp, Zea Mays
ctagtcttgctttgccattgccccaacctccaattcctaatctctcaatgccgctttccgattgcgacaactcctgatggctccgaagaagaagaagacgaagaccacaacatggaatcctggtaaattacaatccccctttgatcccaacaataagcttccgttttgcgcctttttcgagtcttctgtcaccgaattcgatctgttgcgccttgtcaatatgcatgtgcttccccctaaagagttgagtcagtggagaacttgggaaaggatttcggtgcccactaaagatactaatgaatctgttgcctttacatccttttttgtccacg

SEQ ID NO: 137438 - DNA, 701 bp, Zea Mays
ctgggtcccgggagctttcggggccccccacaacttgcggctgctgatgcatagcttgtgggccacttttcctttttatcaatccatcccgctccagctttaggttcctttccccttttcgagtttatgctttctccccacacacagccgggtaccatctcaaggtattctactacactgctcctcctacccgtagcgtattatgtacacatacatacataccagaaatacgcatatggaatagcatgattgatgagtataagttgttacgttcaaaatggcaattcactggattttgggccgcagacaactactaatacatgttatctatttgctcgtttctgttaaccatgcttaagatttgtggctacgacgctaaagcccacatggtttttacaacgtgagggaggtggcaaacaagtcggccgatccaacagcctagaggtgaacaggaagagcacacatgacgcaggtagtttaagatttaaaagcaatgactcttagtaactcttacctggcaatgatggacttaaccaaatggtaaagtacggttagccagctcaattcataaggagacccagatctcacaacttcacgtcgcctttgaggaatgcaggaagaagaaagggagaatttagcccacctggacccagaagatcagctcatgcatcttcgtaatgatgccaaagacaaaaacatac

SEQ ID NO: 137439 - DNA, 331 bp, Zea Mays
gacatcctctattacgccctaaaattaagtactatcatagatcaaaatactaacccacaacctgggtgacgtttaggacgagcatgcatcatgacatataaccttaaattcaacccccatgtagctatttgagagtgtttcatccaccctattcatgctacccattcttgcttttctgtcttgtcttttcaaatccgtgagattgggagctaagttctcttttgttgacagaatgaggactcattctggattggttcatggtgagggcatttcccagaataaggctaacacatcgaatccacagtcaacatccatgcttgagaatgcagtt

SEQ ID NO: 137440 - DNA, 302 bp, Zea Mays
atgaaggctaaccttaagttgagctaatctaatgtaagttacttaatgctggtacaaaggataaggccatactcctaattcacttaagactaaattggtgacttaaatcaactcggatatacccaacaacttgacctacataacagatcaatcttagcctatcccaaacctggatggaaacaccaagacccaagaaggaagacatcaatgtcatcaaggaaggataagagccaagccggatctccaaacgagtcaagatccaccacccggaatagaagctttccttgcctaacctttctttc

SEQ ID NO: 137441 - DNA, 370 bp, Zea Mays
tatgtactcggccttgtagctggacatggccaccacctgctgcttaaccgtctgccagctaatgagacacttgccgaggaagaagaggatcccgctcatgattttgccggtgtcgatgtcgccggcatgatcactatcgttgtacccgacaaggcgtgcctccccagagcatctcgggtagtggggaccgtggtcgcaacatagtggatgatcctctttacagcctgctcatgctcagtcgtcggtcgctgtaggaaccgactaacatagtcgatggagtatgctatgtttgactatgtgtggacgaggtagcaaaggctccctacaagaccgatactgcatagcctccacctccgtcgtgctgtcgcga

SEQ ID NO: 137442 - DNA, 323 bp, Zea Mays
agtagacttcaggagctttccaacaagtactcataggcttcaaacaatattcggagctaagagttatggccttccaaagttgccccctcctggaggtccgaactggtatggtccgatcagatcatccacacttgctttcttttcgtgattgctctccctccaatttggttcatgtcccgagttcctaagaataagaaaagcatcacaagaatttagtagtaccccattattggatgatggtttatggacagcgaggaacgagtttacctaataatttagctctcgtgcacgagctcttgtcattggtccttgctacgtagtag

SEQ ID NO: 137443 - DNA, 1080 bp, Zea Mays
ggaaaagccaaattacttgaagattggagaagaatgaaggaaaccccaaatcatgagaatccaggtggtggctcgacggaggaatatcaaccgaggcaatctgaagggcatcatcagggatcaactcaacatcaccagcaggaatcagaactctagtgtcaggtgcgccggtctctaaggcgactttctcgtttaaagcatgtgttgttgccatgccatcagaatgtggaggagaagacccaacgtggacatccatggaggtatgagaaggggagcctgctcagacaccctcaggggctgggtcgcagcccgcactgcccatcagagccggatcaccaccggcaacacccttgggggctgggttgcagcttgcgctacccacccgagtcggatcaccaccggaaacaccctcggggcttggtaaccgcttgcaccatccttgaggaccgggttcttcgcaacagccacctctaaggctgaaggactctcagtcacctccatgggagttgaacaaccttgactagcctcttggcctcgaagactgcactccaaggtcgacgaggcacgagacgctgctcgagataactctaatcccacatctggaatgtcagagcaaacatccatcataccaccgtccgtgggctcggacagcaaatcttcaggaacaacatcctcgagagcctgatcaaaatttgctagggataattcttgcagaccaacgagagcagacaaagctggagaaggaatatcactactctccccactgactatgtaacgccgactattcttccgaattaaggggatttcctcctcttcttcttcatcctcgtcaacaatacgaacaatacccccattggggtcagctctagcaggatcacgcccattgggatcagctctggcaggatcacacccattgagatcagcatcgtcaaggtcacacccattgggttcagcatcagcagggtcacacccattggggtcagctctagtaaaaagttccactgatacttcttcagcagtaggagcagaagggccagcatcctggtccaaacacggcactcatcgaagccgtctcttttt

SEQ ID NO: 137444 - DNA, 287 bp, Zea Mays
tggatttcatgcgcgtgcgaccgcgctacgcttgaactgattgttctgttagccgggcgttgagaccaccctcaaatatgtgagcatgttgttttactttgaggcattcctgatttgagctgactgcttcgttagtagggtatagtaatcacccctattcatgtaagcatgagcatgtcgcaccaacttaaggcttttccgacttaagccaattgctccggttgggtatagtgatcaccctaagtcgtgtaagcgtgagcatgtcgcaccgacttaaggtgtttccg

SEQ ID NO: 137445 - DNA, 329 bp, Zea Mays
ttggcggaatggtgccttggtgggcagtgggctggcacctgggctcaatggacaatggtgggctggcgatttgttcattggtgtccatgtgtgggctgacagtagtggactaatggttaatttcggatatccaacggattacccgcgagtgaggtttaatatccaaattcatgcccgctttatctcggatcggatatgggtctaacccgcgggtcaaaaaacatatacatatcttgatccgtcgggtcggatattcgacggatacccctatccatggattaaattgccatccctaattcccaccggccgtgtagccatgacttttgcgc

SEQ ID NO: 137446 - DNA, 686 bp, Zea Mays
attgactatgataatcttcttattgcaaatgagcttttatcttgtaatacacatgaggctattaaccctgttgttaagattgatgtagcaacctcatgtgatgatttgagccaagttgacccgtcttgtctccatgatgaattgattgaaaaagttaaagtcatgacactagagaaccagaaattgaagaagtacttgacagatgcaaccactagagtaaaagttgccatagaaagcaatggtattaataatgagttggcagtggacaattaaaggcttagagatgaagtcaagaaacttaagattgagaaagaacatcttgccacaagtgtacaaaagttcaacaaaggccaataccttcaaaatgagttactcatgaacactgttatgaaaaacaataagagtggtattggatacaattcttttgtgcaaaagaaagcaaaaagtcaatacaaggcaaaacatactcctaagccaatcaagtgctttgagtatggaaaagaaggacattttgcacacaactgcaaagccacaccaccaactcccttgccaaagcactcaagaccatttgctttcaatgctcattgtgtactaagaaaagtagcaaatggaaaagtcaaagtaacattcctaggtccaccaagcaagagtagacctagacaaatttgggttgcaaagtccttgat

SEQ ID NO: 137447 - DNA, 437 bp, Zea Mays
aaacatgtttctgcgattaattttatactgaaaactattttctaaatgaatttctcgattttaataggggcttggtctgcgcgctaaataaacagaaacacaggggctaactcacaatgatttccaagactcagcaacccccgcacaggacggcgggtttaatactttattctgtaggggctcatatgaaaaagagttggccgaaggggtacgggccaatatgtgtcgtccgaactttgtgcagcggacgagattagatggcgcagggttatgaaccggtatgtaattataaccacacgatcgtgatccgatggcgcatgatcaatagaacgaaagggtacgcccaaattaatctctaccatccgtctcaaatcctacaatccggagccctcttctagtcctaaccgttcatcgcgagatcaatggtcctgggctcg

SEQ ID NO: 137448 - DNA, 296 bp, Zea Mays
cgtcattctcattaatctttggtttggtcttaggcattggaagttattccaacttccaagtaaggaaacaaactggaactgctttattggaagttttagtttcgtgccaaatcacaaactattggttactgctttaatggcagtcgagcaatgaaccaacagcctgcttggttgggttccaaaactggtccaaccaaaatcatggcaagccaaaactcaggcttgcgaaagttagggcaaaaaatgtaggcatgcatttggtcgagtgacaagaaaaaacacggcaacgagccctg

SEQ ID NO: 137449 - DNA, 383 bp, Zea Mays
cgagggtagccagcgctgcccctcgcggtgacttcgttgtggtcgaatgccgaagaccgtcgatgcggtcttttttgacgttgtaattttttgtgggggattttttttcgtgtatattacctggctccgcctcgttaaaaacctcaccccttgggaggaaaagagtgcgggccggaataaaactgtttggtgaattacaagggcaagttggcccttaggagtcaaacaaaaaattttcggagattgtcaatatttcatgaatgctctaagtcttcgccggatggcgttgttagcctgtacgcgctgggggacgccttcgtcttgacgatgaaggggccctcccactttggttccagcttgccccgcgactctgtccgagttgt

SEQ ID NO: 137450 - DNA, 354 bp, Zea Mays
ttcaggctatgtcgacacctggccttcgtagcttggggctcggcatgactcgtcatgttgtatcctgccatcggcctacgcactcagacctagtcgtgataggtcatgagtgcgcacagaccgagggcatgcatgccataaatgcgctgcagtccgaggggttcgtaggttatgagtgctctatggtccattcacaggaaggtgaagtgcgagtcgtctcgtgcccccttgatgattgaggttatagcaagcctcctttttgcgaggcgagcccctaagtcccccattccttatgaaggatccatctgggggtacgtcccgtctttctatagttcctttccccatgcattccgt

SEQ ID NO: 137451 - DNA, 799 bp, Zea Mays
attccgtaatcattggatggctgtggcgctcgctcgggtataaaagcaatgctgtggcatgtccctccacatccaccgtatctaccagcagcaccacatacccatgccctcgacggagaaactctgagccagaagcacctctcatcatggaccgtgggcagtgagaggaagagagttcgacgtcgtcgccatcatcggatcgcatctgcaccagcaattcagggtcgggggtagggttgatcgcctggtatcctagaaggcgattggtgtggtggcatgcgtggttggtgaccggtgctgcgccaatcgctcgccgggcttcgttcccgccgtggagtcattgtgcgtcgtggtcagctcttgtcgctgcccatctctggtatggctgtctcccatcgcttcgctttccttcccgtcgtgtctagagtcgttcgtagtggtggagcagtcattggtgcatgagtgtgggtaactccgacggacccgcgttgtcgcggttgtacgccgccgggcgagctctgtttctcgcgcggggtgttccgtcgatggcgtggggcgtatcctccgtcgatctgtgaacgaacgggcgcgattagttcattttactggtgcgagggggacgaagtttggtcgttggatcgtagatgaaggagtgggatcggatctcgcgcgtattaaatctggggccttggatctagatccaacgatccctggcacatacagattcctcgacggcaggatctaatcctggccgcaggacttagatcgtgtggctcgggttatcccatacccccttcag

SEQ ID NO: 137452 - DNA, 763 bp, Zea Mays
gtaatactcaaaagagcaataatgagaattgagataatctcaatagtttgtgacctctacttatcattacatgtgatcaaccctagttcaaaattggataattaaaacaaagaacacataaataacttgtgcatcatgctggagtttatttgattgtgcatttgtggataataaaaataaaagtatcaatagcaatgtattaatgtgcccacaacatccaagccctaatttgaaaacaaaaccatgaaaatggaggagagaaagaaatatcatataatacaaataaatttataaacatataacttcatcacattttggtaaaaccaagtggaacaattagactgagtacagacgtgccacaaagttggatttaaattgaggttttgaatttggaattcaaaataaatagagaacaaaacaggaaattagaaatagaaaaaagggaaaaaaagggattagcgcgtgggccgaatctcctgtgcgcggcccagtaacccccgcgcgtcagcgctcttgccgcgccttaccctagcgccgccagcctcacttccctcgcgctcgctgcagacgagacccactcttcatccacctctctggcgcgcgcctgcatccattcggtcagcggctcatcgcctcgttggtgcggctacggagtgggccacccaggacatcatcttcttcaaccgtccgcggaactcgcgggtagctccgggttcgcccaaatcatgtactcccctagctctcagtcgaagcaacgacctcc

SEQ ID NO: 137453 - DNA, 273 bp, Zea Mays
gaaggtacaagaagtaatggattgggaacctcctaccacagtgagacagattcggagttttctgggattggtagggtattatcgacgatttattccggatttctccagaattgccaagccaatgaatgaattgttgaagaagggagtcaagtatgcttggagccaaaagtgtgaggatgcctttcatacactaagacagcacttgacaacagccccagtgctagcccaacctgataacaccaagccctttgaagtgtattgcgatgcttccgg

SEQ ID NO: 137454 - DNA, 809 bp, Zea Mays
tcctgtaaacattgcgtctgtcctcttcccacaagatcaatctaccgaaagaaccaatagccgcctgcaagtattctgatgaacggtaatccagggggaatcccaacaacataagccagcattcccgattaaataaaagggctatatgattccaagcatcgttatgccgctgagcagtgaaggaggcatcgaggtattgttgcggaccgagcaggacgagattgtctctttcaagcacgctactaaactgaaccagaacctgacccaggtgcgaccgctggatatcgcgcaccccaagccgcctgtgctccacaaggtattctctgaccacatccctcaccgccaggaaagtaatctcatgatcaggtaaaggttgaatgttgataatagcccagtcctcatgcaatggcgagaggcgcctagtcactgacctggccataatctcccggtgaaggaccaccgaagcgctgaagcccggcgggagaaagggttcaggatcaacacgcctatacgccatcagagcaggaattgaagatcgccaaccagcggacgaagacggagcaggttggggttttggtgaggtgacacccaaagaaagtgtcagggactgaaggggtgtcgattcggattttttaatacctcccaggcgaactcctcgaagcaactaaatttgggcggtccaccgttcagagacaccacaggggtgcgaaaccaggaattgtgatcaggagaattttggtttcccaccaagatggcccgactcccaaaggcagggaacgaagccagaggagaaccgaaggaagttttct

SEQ ID NO: 137455 - DNA, 316 bp, Zea Mays
ggggtatgctatgctatatgctgaagcggatagaactggaagcgatcgagagaaagaatggaagtgagaggcttaaaacgtgaaaactctaaaaatattcacaaaagacaaactcggcaaaataaccatgaacaattcgttgtctcttggcaagggaggatttggtgaggttcacaaagggactttacctgacaagaccgaggtggctgttaaggcctcaaacgaggtcactcaaggtacgctagacaagtttgtggaggaagtagagatccagtcaaaaatgatgcaaaccgcttataccggcaggggagggggc

SEQ ID NO: 137456 - DNA, 578 bp, Zea Mays
tcatgagctggcgaggcgacagcgggagactgacgaccacctccgtcgtcaggcctcttccatgggtatgccttttgctcctcgctcgcctgatgtgccccttcaccctccttcgccagagatcaatgaatggtaccagcaggcttatggggtgcccttcatgacaacagaagatgaagaagaagaagaggaagaattttttgatgatcgtgagcagtatgtcccgcctccccaccaaggggatccaggtcaatcttcttcatatcctcctccccaggatccatcgggtagctatccccccagctcagcccggggaagaaaactttgtagctaatttggcatctcagttctttgatccatctcctccgtggtaatttgtggttgatgtttctctccatttttggtgctagttgccaaaaaaggggagaaggattgacagcttggcttggtagccctcaggggcttttatttttgtaatgaacactgggtctgtaataactttattcgcctatgcttgttgtgatgcatgtgatgatggcctagagccataaacatttaatgatgtgatgccctttatt

SEQ ID NO: 137457 - DNA, 427 bp, Zea Mays
aagtattgtttgcaattcctcttccaatgaccaagttctttgtagtaaaagcactctacatctgcagctagtccagccttgggcttttggtttggcttggatactgtatcccttgccttgcccttcttcttttgagatttacccttcttcaagttgggtttgttttggaccgccatcacatggtcgctgctagcagcgtttttctttaggtcaccctctgctgttttcagcatgccacatagttcattgaggcccttctctgccccatgcatatccatgtatatggtagttcataatgaagtttgcatagctaggcggaagagatgccaaaatgaagtcagtagccaactcttggcttactgggtagcctagcttctccaacctctgactgtaaccaaccattttgattacatgtggcccaactgct

SEQ ID NO: 137458 - DNA, 983 bp, Zea Mays
cgagggatgacaaaggtgagggtgacaatgggcaaacacacaacaaaggatggagttgaaaactcgcaagtgacaaagaagatgatacgtccaagagaaaattaggtaaaacgtacaactcttatattgagatgggagagagaagattttaaagggcaggtataagataaacatcaaggtaagatatagaggtggtaagggtaaaggtgataatgatgaaaagcataaccatggacagagttaaggcaagaccgacaaagtggagaaatcaagcaagggtaagataggtaaggttccaacaaagtggttgaagtaaagaaaattaattaccaagtggagttacaaggatacaatgagatcaccaaggatatgcaaagtaaaatgaccgttcatggatcattaagaaacatgggtggtcaagatcatgtaagttgaaaaatgtcttaaacaaatattggggtatgaagataagcatacataaaaaatacgagagtatgcaagactctaaggacacgagtatactaaaaccaatggaatataaattgttgaaagataatgacctaacaacagaacaggaaagggtctcaaaagacaggaagatcatggtcatatgaactgaaatgtctaagtaggcagtagaaattcaggtgtaagtatttgaaataagagtattaaagaattcagggatacgagtatgtcaataacaaaggaataaggattgccaaatggtagaaatttaatgatggaagaggaataaatccaaaaggcaagaaggttatggtcaggggcatctacaaggatgtcacaagcacaagagcgagatcagatctagtagattgagaaaagtatagaccatactagaataaaatactttttggcaaggggcatataggagcacaatatagaattagtcgaggtgactaatattttgaaacaaaatcaaggatgaggtgaagtaataatcaataagtccttaaaacgac

SEQ ID NO: 137459 - DNA, 396 bp, Zea Mays
tggtattggaatggagggagtgttatttggatgcctttactgattgggttacaagaggttatttcttattcaggctaatctattactccttccaaaagaacagccaaggtggtggtgaaaggaaggtgtcagaggtctgttcgttccatcgtacgtggcaaccaatttgtacatatttacccttcttgcggcctctctgttaacttctttagtctcttcagcgaccgcttgttcagtgatgatttggttttcttctccttcgccatacgatgtttcagtggtagttttctttctcccacgttttgggcttctcttctttttattgagctttcaccatcactttcatcgcttaacccatccacgacatcttgagaagtccttgatgaaaaattagca

SEQ ID NO: 137460 - DNA, 448 bp, Zea Mays
gtgcggagtacgacgacgcggctggaagaggcgtagcagcggcaacgaaggaaaataagatggggcacgagagaggcgtggtcaaggaaggaagatccgcttttatccctagaggcgcggacccgtggagcgtcagctcacgccgaggtggagcaaaacccgccgcgcgactcgcacaggaggttatcgacgcgatggacgggatgacaggtagggcctaggtcgcagtgtcacgtgagaatgcgggagcgagcgcgtggagctgagacggaatggtggggcccggtcgccagtgcttgaagtctctcccaagcgatcagggtcacttggccagggggcccacacgtcagtgtcgcggtggaaaaagaaaaagggggagggaatagagtgggccgcgtgagggggatcggggaagatgggccaaacagattgggcccggacgctatgg

SEQ ID NO: 137461 - DNA, 712 bp, Zea Mays
aattatattaataaaatgataaacagtaaagccagaaagacagataataatgcaacgatggttgcgtggatggagatgggcgatgacagtgacacatgtggccgacggaaggacgctgacccagtgacgtgactgtgactgctcaaaaaaagaatatcttgatgaattatggaccgtgaaaaaaggatggaaatgcttggacggttccaccactccaaagttggaagaatccgacggtcgatagcacgcaagtacggttgaccaggaacaggaaactgtttactctctctctctctcctaaaataactgcttattctctatccttgacgccttcctctcaaaataattaacctatgtcctaaaatagcctgtcactctcttttctaaaataattagctcctttgtctcataataattaacctgtcctgaagctactgtttgttctctactatgctaaaatagatgacgctttcctatcaaacgttgaatgactcaaatttagtctcaaaatagttggcccctcaaaaataattatttattctctgtgtcccgaaccaattgatgtcttcatctgaaaaaaaaaataaaatatcgtaggatctaaatccagtcccagaatagttggtattatgtctctctctgtcaatgcacctttatcttgtgctgccaatatatcttttcattttaccaatacatctttatctctaattac

SEQ ID NO: 137462 - DNA, 513 bp, Zea Mays
cagcagtttctaactttctattgacatgcatgaacaatatgccaatcatagtaatattgatgcccattgcccataaagataaatatagctttgatggacaatttaattcatgcctgttgagtggccaggacagtacttctgtattatgaactgaactaacctctatcagagagaactagaatggtgtatccctcatgaatagcttcacgagcttgatcacagagtttatccaaagtttgttctaaaccttcccttccatactctttaggataagttatgtcaagaaccttgctgcgccaaccacgaaagttcatatttttaatagcctccatttcatctatatgcagtaaaggaccttgaagtttcagtcgatgacactgatgttctgttgtttcagataagtcaccttctggaccaatcatacactccatggatgtgacaattttttctctaattgggtcgattggtgggtttgtaacctgagcaaacatttgcttgaaataatcaaaaggc

SEQ ID NO: 137463 - DNA, 589 bp, Zea Mays
cgcgccggactccactcagtatcctcggtggcgcgaccaggtcctgcagaccctccgccgctacgccctcgccgaccacgtcctccccacggtcgctgcaccgacggaggattggctcctaatggacgaagtggtgctctcttggatccatggcaccctcacggccgaacttcaggacatcgttcgcgtgccggacgatactgctcaccgtatctggggtgcccttgaggctcagttcctcggcaaccgcaagactcggatcctgtacctagagaccgccttccgccagcttgttcagggcgatctctctgtggacgagtactgccgtcagatgaagacgatggcggacacactccgcacccttggggcccccatgaccgatgagagcctcgtgctcaacctccttcgtggtctgagtcctcgcttcgatcgcgtggcccccatcctcacccgcatgaagccgtttcccacctttgcggaggctaagaacgatctgcttctcgaggagctttgcctctccgccgctgcaaccaccgctcccgccacggccctctacagcgcacctcgggctgccccctccgactccggg

SEQ ID NO: 137464 - DNA, 278 bp, Zea Mays
attgcagaggcgttcacagcctaagagatcacattattctcaagtaagtagttttcagacacaaacaacgtgaatgcgcaaacgacacgataccatgttgccgagcaagctccaatcactgatctaagtgcttttaagtgggacggtaaaggtgtcggagcttacacatcacatcttgtgggaacgatagagcgtaataagaccttgcttttcttgtatgtcaatatgccggaacttcatccttatttccaaatttttgatagcatatataaacccaa

SEQ ID NO: 137465 - DNA, 307 bp, Zea Mays
ccccttcctccaatagtggtaggattgcctgatcacacgaatacacagccaacaaactagctaacagatggaacagaccaaactaattgctaattaacgatagtgctgaagagttatagcagcgttgtgcgtacatagcacgcacgctcctccctcctccataccatagtaggctggagctgcaacacctgctgcgcgccagacgacgaccccaaggaacaacctctccctaaccaccatcgtcgtccatcatcacgcgtcgttgcttgtggcgttggtgctttgaaaatcttgcaagcagctacgt

SEQ ID NO: 137466 - DNA, 416 bp, Zea Mays
gttttgttctcaggtgcggtaggctccgtctcggtggacattgaaggcctagcttcggcttcggcctgagctttcgtagcttcgacaattttcttaggagcagggctcaaggccttcgtagtctctataacagcgtctaatacgttggccatcctcctccttctaggagtggcggcaggaattttttgcatctttggcaaatctgtctctatcggtgggctcaagatttctggcatttttatcaccttttccacctgtagctcttcaaccttgtcatctctagcttcggctggcccgactgtaggcatcttcggcactacaatcgtctcttcagtactctgcacggtcggggcaacgcgctttgcttcggtagaagaagatgtccctgcgccaaactcaggaaccacgaccggttt

SEQ ID NO: 137467 - DNA, 303 bp, Zea Mays
gagcaccataaggaggagtatatagaggaggagcaccatacgagccatatggaggaagagcgtatcgatactcgtatggatatggaggaggattcaaataagtgaaaggttatggatgacaagcatcagtggaaggtgcttcttcagttctaagaggaggagagtcagtggttggaggctcagtaggaggaggggctttgatatttggttagtaaggatataaaggaggagcatacatataaggaaagagaggttgagaaattaggccattgggatgattatgaccttccgctcatcgatggt

SEQ ID NO: 137468 - DNA, 387 bp, Zea Mays
cgggtatcagcatagctcttctgtcttgattgtgcaattctcaaattctctcttatcattcgcacttgctcctctgcctcttgtataagttcaggcccaaagaactgtctttctccagtctgatcccaatatagaggagtcctgcacttcctgccatataaagcctcaaacgcgacattttcaaactggcctgatagctattattgtaagagaactccacatatggtaagcacttatcccaactaccaccatgcttaagagcacaagctcttaacatatcctctagcacttggttggtcctctcggtctacccattagtttgaggatggtaggccgaactaaaattcaattgtgtatccaagctctcatgcaacttcttccaaaacc

SEQ ID NO: 137469 - DNA, 413 bp, Zea Mays
attttctgtcacagcatgatctttaatcatgccattctgaataagtaccttattggcttattcctactttatcaagtgttttttatcactttatgtgaaaactgttgggacataatttgctgttttttatgctaccgtaaacggagaagcaaggggctccaatgtttttccagtaaaacttcgtgtaaagtgttactttctttgaaagagtcaaggctcagcctatatccttgcccagtacagcagcccatatatatccagtgatttccaatgtccacgtgctaaacttgtggccatcctttgatcccagacctgacaagactgagtgctggtacatgaggggaatcaaagtcgcatccctagtcatacgctctccatgatttgtgaatctatgcatactgtgtggttgtgga

SEQ ID NO: 137470 - DNA, 393 bp, Zea Mays
cgaacaagtcgttggtgcgaggtcggagcggtggcaacctgatgctcaaggtagttccagatgtccactcagacagatgctagaggcttttggatgcgacatgcctcatcaggggaaagtggctcctaaagccgatgttgctcgctaggagcagggtgctccaagccaagaaacatcccagaaagggaaggaggttgcgccgaacgagggtggatcaagcgacgatcgcaagaggtcacccgattggggagactcctcgcaaatagtaacgataaggtcattaggaccttttgggggcacatggcacgatcatgatatttagacttccttgttagactttcttttttgttgcatccttacatctattttcttagccctatgacatcagcccgt

SEQ ID NO: 137471 - DNA, 634 bp, Zea Mays
gcttgactaccctacggagctcacggtggcctcaatttaaagtaggcaagagcggtggccattgaatcggacgacgacgcgcggtggtcggaggagtgggaggtcactggcacaaggaatttgtggcatctaccgtggcagccctcaccgacgatgatgagacggccaaagtgagtcacgacgatgcggtgaatgtgcccaggtacgtggtgcaaggctgtgaagtggctgtcaccggcgagctcatccgaagcgaccctggcaagctcagtacggtggccggagtagtttaatggtcggagtatatccacgacaatgatacttactcaaccccgagcgttatccagtcgatccgaacgcgaatcacggcggtgaaggcacgaatctgcgtgcggcttgtcggcggcgaggttctttgaacctgatccccccgtttactgtaccatggtgattaccatgcagtcagtctgtcagagcaaaatcagagccacttttctcctcatttcatgtgacaaccccatcatcccactgcatcaaagttatagcccaattaaccaactgcaatcttgctatggggatcatgcccaaacttgcgctggatcatgttcaaatctgggttcaaagattgcctcat

SEQ ID NO: 137472 - DNA, 327 bp, Zea Mays
cctcgaaaggatatgattctatatgggttattgtggatggactgaccaaagtggctcatttcattccggtcaagactacttataaggtatctcaattgatagagttatatatggctcggattatgtctctacacgggtaccgaataagatcgtttcggatagatgatcatggtttacctccagaatttggaaaagttttcatgagaatatggatacgaagttgaattttagttcgccctaccatcctcagactgaaaggactaatcaagtattggaggacatgttgagagcttgtgcccttcagcatggtagtagttgggacaagag

SEQ ID NO: 137473 - DNA, 583 bp, Zea Mays
gcaatagtgagcatcagcttcgctgcaatagccagagcacgaatgatccaccataactagagctatgtcattcacatatattctctgtattgcttcattaaatgaaggataatacttgactgcaaactcacatccagcaacccttacaattgctatagcaactgaaagtttagtagtagataatgaagctaaaggatggcacctctggacttctgtcatggttgatattcctcctccctgactgaacccctttagatatacaattttcctgactgtgtgtggcagtaagcctttatgcacactctggttaggtgactcctcatcccattgaacttcatcatcgatcagctcaacctgcagcacctcatccatagccccttctttagattcagcaaggtaatcttccacctctttccccccccctctgtccagacctagctgctgcttttgtacatctcgatttgggccgtgtagtgggctgcgatggcaccacttcagacaagtgggtcggatgttacagtgcataacagtatatgaacacaataaactgaaatctcctccactgtctcctgctggaatctcc

SEQ ID NO: 137474 - DNA, 472 bp, Zea Mays
cttgacacgagcgggaggcctcattaccttgatagccttgatttttctgggttagcttcaatgccccggtatgaaaccaggaaacccagcagctttcctgtggagacgccgaagatgcatttctctgggtttagtttggtgcgggttgcctgcagcttgttgaaaaccagagccagatcttctactacagtcgaccctcttctagttttgaccacgatgtcatcgatgtaaacctccaccttgtcctggattaagtccccgaaggtcttactcatcgcccaaacaaatgttggcaaggcgtttttcagaccataaggcatcacaacataacagtacaacccatctaccgttacaaaagcggtgtgcttcctatcctccctagacatccggatttgatgaaaaccggagtaggcatccaggaaagacaaaaagtcgcaccctgagatagagtcgcaccctgagatatgggtcc

SEQ ID NO: 137475 - DNA, 337 bp, Zea Mays
ggcagaaccaatattggggttgttgtcaacttctgcttcaacatctcaaaggactcttggcatgctggggtacacttgaactcaaccttatttgccagcaaggctgtctttggcctggcaatcttggagaaaccttcaatgaaacactgatagtaaccaaccattctgatgaaactcttgattcctcggacatctttcagtgctttccagtccagaatcgctgctaccttctttggatccacagctagtccatctcggtttataatatgacccaagaacagaacttcgttgatccagaactcgcacttgctaagcttggcatacaactaacaatctc

SEQ ID NO: 137476 - DNA, 378 bp, Zea Mays
gtttgcctcagaaattattatcaaataaaatcacttgatcaactcatgagagtaatacaataaattgcctcagtttttatgaataaacacctcatttgaccatacatgggagaacaaagggcaggtggagaaatcagattaaaggatagagtatgtttggttgcctgacccaaaataaaacatagacaggaagaaaaccaagagcaaggaaaacaaagcagtaagtcaacctcccatggatggtcattagtcaaatatatttcatcacaggcaaaattcacaaaatgagcaaggaaaacaaagcaacaagtcatactctcttgattgatcatcattataaaacatatcatcataggcaagtaaaggcaacagttaaat

SEQ ID NO: 137477 - DNA, 319 bp, Zea Mays
cagagccagtaaggcaaaaaactgtcaaaaggttcatagagttgactcaacctttgggcttttctgaaggtgtacttgctcctggatatggcctggctgagaactgtgtctatgttagctgtgcttttggtgaatgcaagcccatttttatagactggcagggaagaatttgttgtgggtatgttgatacaaatgatacagatgttgtgatcagaattgttgatccggactatttgacagagcatcaagaggatggtgctgagggtgagatatggatcagcagttctagttctggagttggttattggaacaataagga

SEQ ID NO: 137478 - DNA, 456 bp, Zea Mays
ctcacacgcacgtttaaccgcttttgcactgcacaaccccggccgcccggcggcggcgtccgtgccttgatctggttgtttactcggatcgagggattcagatgtcctctccgtccgtttgttaatcggctccggtcatttcttaatctcgtcctggattcggtcacgaaaagctagaggtcaagattttgctctcgattactatatccttgcctcatgttctaatggagtttattttattggtctgatgtgattagataggatgctagccaggcttgtctccggccaaaagcggcggtttagtttattgatgattgcttctttccttgggggatttattcctgtctggttgttgggagcctaaccacgctcctattgctgctgcggtttactaaccatctgcgccagtacacctactccatggaccccaaaatacagttcttccaaccattcccc

SEQ ID NO: 137479 - DNA, 640 bp, Zea Mays
ctgactaccctcgcgtgcgacactccatgcaaaagtcgcctacgggtgcagccggaatagcacaataagtgcgcaaaatcgaagtcttctccaaaagactacccgtgcaaaagttgcctacgggtgcagccggactagcacaataagtgcgcaaaatcaaagtcttctccaaaagactccccgtgcaaaagtcgcctacgggtgcagccggactagcataataagtacgcaaaatcgaagtattttccaaaaggttccccgcgcacaagtcgcctacgggcacgaccggatcaacgaaggcacgcagcttcacataaattacggttacatacatacagcgagggcatcgcactttacattggctcaaccttcgggatgatacccatctccctgtagttgaacagcattatcctcagctcctcaccctcaaaaagatttcgcaactctccctcacctacactcgccccagccggcgaggacaacaattcccgtttgctagccccgttcacacgaagacgaccaccctccatctcactcaccctccgtttcgccaccgcccttcaccgcctacgcccagcactcggaccaggaagaacttcagcacccatcacatgcggagaagcctccgccgcagacacat

SEQ ID NO: 137480 - DNA, 644 bp, Zea Mays
attttctgcagtaaaagggaggcaatctatgtctgcagtcataaaatgagttcggatgacagctgttgtatttcttcagggggttgaaatgctcagtgcttgactgcttgtgcatccgagcagcaacaacatgcacacaaaataaaccattgtcatagttagagattcagtgggctgctgaaatgggctgtccagacctccagatcaggtcagctccatctcgattgtgtgaaacacataggcagaccagaatctacagctattcctttttgaagcaaaatgtcccctagttgggattcgaaatttacacaccggcaaattcagccacaagcttgatgtgttagaaagggtgacagtgtgcatgcacaaagtcatccaaacatcagcaaattaactttaacaacagataaaacgtacagctgctatggccctaatacctaagcttgggacatgaagagttctttctctgacatcatacccagcatcatgcaccagcagtcatctcaacacaaaaaaattaagaggtttttaaacatagagattctactgtttgaatttagatcacagtctccatgtcccttggctctgaaaccagccaaccttattctcctcagccacctttaacctacaatcgtgattccatg

SEQ ID NO: 137481 - DNA, 458 bp, Zea Mays
ttcaccgccagatggagtgacaaggagctagaccgtattgaagaacaagttcgccctcacgcccgattgatcgtgagctaggttgacatgaagttcctcctggcgggcacttggagtctagggccgcccaccggcgtctagacaccgttaattcattgtcttgtaacaaactttgtttgaatgatgagaccaaacatatgttcatgccttttggtgtgatgttgtttcttgcttaagtactgtgcccccatcatttcctcaagtcaggggtcctgtggcacgttttcacagagtgatccctgtttcccaccccctgagcagagtgtgctgacttggttgccatgttctgcttactcgggcgtgtggacgaggacgagatcccgaaaagacttgcaaccagtagcgtatcctcagacctggctgatgcacaatagaggaaaagagctcacatcccgccg

SEQ ID NO: 137482 - DNA, 484 bp, Zea Mays
ctaagcggccccactgctccggaccaccccatggaacgagctcctattctttagaaccggtccctaggctacccgaccccctgctttcgtagaggggtcctaaactgcaggcctggctactcaaatcggatgtcttcatgtcaggacaaataggaactgtacgggtgggttagataaaaataatatccgggaactgcagggtaaaaccatggatcaggaggataagactgtcataggagcgcatctgatggggtaagtcttctctttataactcgacatgcatgggtgcaggccaacaggccaggcttatgagggggacctcactgggcttgcgtacacgtatgcgcaacctagttacaaaagggagaaaaactaaaccccacagacttgctactatggatagaacttacagaggtgctccaggggttaggaagaggtgctctagctgtagcaaggtggttacccctgggtcggcacatttcca

SEQ ID NO: 137483 - DNA, 703 bp, Zea Mays
gttgatcgccgcccggattcatgcacggtgagggatggataacgccgggaaaaggatgactcatacgtggcaccctctcccgggcttagccggaatttctcaccggcggtcgccgtgactcagtgcagtgcgccgcgctgtcgccatacttcgatctctcttactgttcttcgttcttacgtggtagacatgcgctagtaacccacctcgtggccgcggaccgatcctgtacctccgcggctataaatagccattaggtccacggcgaggtgttttcatctccaccagtgaagctcagtagaagtccaaattcgcgaaattccctccaccgttcccaaaattgatagtgcatggtgaaactatactcctttacggacgtgtagccttaatcttgcctcccaattccacccgagaccgttgtggcttcgttttccccttttctgttacccacgagccaagatcttctgcgccccgtggtcagctcgtcccaggtctgctcctgctcgtttaattcatgttccagtatctatatgcgttagtgatgctcatcggcccgaccctttttgcttagtcacaatcaatcaacaggaacacatgaattcatgtcggtatttttccgccatcgtggtcagactaaacccgggccatagctacataattgaaacccgttctagggttgtctcacgcccgtaacactcaccca

SEQ ID NO: 137484 - DNA, 424 bp, Zea Mays
aagaggtctatgtggaaattccacttgggtttgcaaatgagcagactgctgggaaagtgtgcaaacttaagaagtcactctatggcttgaagcagtctgtcaagggcgtcaaacccctgactggccggaccatggctacgtagctcgcaaccgtcgtccgtcttctccggtgaggataaccacctcaaccgcaggcttgagagaataggagtgtattagagtttattgcttgcctcctccctgtggtttacaaggatatatatagccctcataagagtttattgctgccggtcgtagtggagcttctgggatgcctgtgcctcctctaggcggtagcgtacatcagctaggaaggcctcgcgagcttccatgtcctgggcgacggcggccacccgcgtctcccctggctcataagagtggatgg

SEQ ID NO: 137485 - DNA, 650 bp, Zea Mays
gaaattgagaaacatgtcttagagatgctcactcaaggggtcattcagaagagccatagttcttttgcctctcatggccttcttgccaaaaagaaagacaatacctgacgtttttgtgtagattacagatacctcaacaccttgaccctcaaaagcaaatatcttgtcctagtatttgatcaattgatggatgatttagcccatgcccattggttcagcaaactagacctgaaagctggctaccaccagatcttattacagcaaggtgaggagcgcaagactacattccagactcatatgggacactttgaattctgagttatggcctttggattatctggggctcccaacactttccttcgagctatgaacgaaaccttggcacctgtactcagaaaatcaactctagtcttctttgatgatattcttatatatagtgtttccttcgaggagcacttgaagaacctgaggactgtgctccaacttctcaaccaagaccattggaaagtcaaactttctaagtgtgagttcactaaaactgagatgtcttatttaagccattttattagtcaccaaggaattgcaactgatgccacaaaaaattgttgctatcaccaattggccgacaccagcttcagtcaaggacctac

SEQ ID NO: 137486 - DNA, 405 bp, Zea Mays
cgacgttagaacaggagcagaagaaaccatgccacgtgctcgaccgcagctgacatgcccggtgcacgccagcccatgcacccgcatcgagccgtgcatgcccgtgaaccacgccgcacctttaaaggtcacccccggacgcgcaacacttcactccgcacttgccctcactgtcccagcccagtccttagctccggcgagctcttcgccgcccgccatgccacccgagggcacgaccaccatggccagctcttcccaacgaccctcagccttgccctagcccctggacggcttccccgagaggcggagaagctttcccaagcttgagccgaggcattgcctcaccggagaagcgagcatgacctcactggacttcggccgaccgccaccgcgcgtataccaagt

SEQ ID NO: 137487 - DNA, 1032 bp, Zea Mays
cggcttcctcgattctactacatgtgcacctgttggctgcttcgtttcccttttgcgctttaaatcgaatttcaatccgtgaactcgatgcggttggtcggtgtctgttcccagggacctgtccttcaacaacctcactggccccgtcccgctcttcccgacacggaccttcaagtaagtgcgcttaatactgctgctgccccgccacacgaccgtcttatcctaatgcacactgtaacttttgcttcttcttcttcttttttttttaaaaaaagagagctcgagctgtatgatggtggtggtagtagcatcgaatctaatgcgaagggtgtttgttttgtttaataatgttcgcgtggcgtgcagcgtcgtgggcaacccgatgatatgtgggagcaacgccggcgcaggggagtgcgccgccgcgctgccgccggtcaccgtacccttcccgctggaatccactccgggcggcagcagtgagcactcttccttcctgcctctatgtctatcattcatatctacggccagtcaggcaggccagctcgcgcgcctagcagctagtcgcgctcaatgcttttcggccctttctcggagtgcgtggcgtggcgtgcatgcatgcgtcgctgctgccgctgcttttgtgcccttgcctcgccggggtagcggtcgaggggacacggtgctgtcggcatgggggcgccgtcgctctcgcttgcggccgggaatacctgtagtaggctgtatgcctgtatgtagcgctggtggcgcggtctggcctgaaccgtgcatctgctgctgctcgcgcctggggatcagcgtttggcttttgtgtgtgtgtgcgcgcgcagggacagggacaggggcggcggcagcgggcaggtcaaaggctgctggcgcgcggctgccgatcggcgtagggacaagcctgggcgcctcctcccttgtgctcttcgccgtgtcctgcttcctctggcggcgaaagcgccggcacacgggggggcggccctcctccgttctcggcatcatcca

SEQ ID NO: 137488 - DNA, 664 bp, Zea Mays
gattggtggaaagttggagggttgaagtatactactttgagaaagcttgctcgagatatcctatcaattcctgtgacaacagttgcatccgagtccatctttagtactagtggtagaatcattagcccacaccgtagcagacttgccccaaacatggtggaagctttgatgtgtatgcaagcttggtctcgagctgatatgttaggtataacatgtagttcatttggttttgtttcccttcttttatttacagacacactaactttgaatgatttattctattaggccctgaatcttcagctcttaatgcattgatgacatgtcttgatgatgaagaagaaggcttggtaattactataacctgcattgatgaatcttccctctattttatttactataccttactgtacatgtattctttgctcttaggaaaatttggagtctgaaatcattgatacatgatccattataccatgacttgtgagatggatggactgctggatggtggattggtggattgttgcttgttggaacttggtcgctggaatctggatggtggattggtgtactactagatggtgcatttctgtttgtgtacctatgtgtgttagagtcagacaaatagtgtgtggaatttatttgtgcgttcattttatcttagaaa

SEQ ID NO: 137489 - DNA, 590 bp, Zea Mays
ggttccgctttgagcgagaggatgttactattcatgctagccagattcaccagatgtttggattcaccgagtcgtcgactcgccttcacagcttgtgctacagtacctctgatcctcctcgtcgccctcacggtggagttgctccagctacagctcacgtcgtggcctttgttccgccggcccttcacaaatgggtcgcgacgctctccgggcagacttcactccagcggccaagtacttatatcagctcatgagacggacgctactaccccggatgggttatagagaggctaccactcatatccatctctggctacttggtgccctgatctctcattcagagtttgatgttgttgacttccttatatgtgagatcgaggacacattattggatggtcttcgtgcccggcaacagctgtcgtatgctcattatctctgctacatcttcgcgcagctgatccagccaccatagttctagggcacccttggggcctcacgcctccactttggctcctaccatccagcccctgaggaccaagtgctagtacctgatccagtgacaaacatttaggcagaggatacaactttcc

SEQ ID NO: 137490 - DNA, 500 bp, Zea Mays
gcttcaaatcctgatcccttttctcctggttagcaagttgaaggttaattcttcccccaaaatgattcataccatccagcccaatactgtttctgttgacccgactgtttgtaattgtattaatctctttgtttgagcagaaagtctgatcatccactctctgtttcatcatttcaatctgagatttctctggagccaccttggcccgatcatccaccgaaccttcattatccagcacatcagaaagttgactatcagagatgattttttgttctatttccttattaagcatcaagacttcagatgagttcaccgtatcagtgtgatcttcaactttttttagatcggatgaaaagaatccttttgtgggatgaaacgccgcaatgggtatctcatcataaatctcttgcagtgtcccctccaccccagcatcttcctccatgtcctcctgagactctccaaaactacaatcttgatttttctctaactccttccctttc

SEQ ID NO: 137491 - DNA, 340 bp, Zea Mays
gctgacgagtgcactagaaactgctcctgtatggcatacgcctatgccaacctaagcagcattggtgctgtgggtgacacatcaaggtgtttggtttggagcggggatctcatcgacatggagaagaacagcttttcagaggtcttgtacatccggcttggtggatctggtacgtgcattccgaacacctcatccttctttcgtcaaaggtgacagtgtgacactagtgctcaacatgataaggtgtcatgccatcaccaccataaggcctatttttaagattgccatcaccatcataaagcctatttttaagatagatcgactaatcacatgaggattg

SEQ ID NO: 137492 - DNA, 479 bp, Zea Mays
cattgatggttgtctcatacctgccctttaaaatcgccccttccgtcccataccttcttttctcttggtcgtatcctcttctttggctcgcgagtttgtaacctcatcctttgttgagcttttgtttcttattacctttacccttctcatctctcaatcttaccttggtgattacgctatgttcgttatctaaaacctcgaatctcccaccttagttcaagcgtggtctcttacttatctcacccgtggttatatcctatactttacctcttgcaagacttatcttatttctattcttgattgtacctagattcctggtttttttatgcacatttacctcttcctttatatccttgcctattatcacctttgacccttgacctctctccatatttaccatgacgtttacctatttcttagccccacttattccatttcaatccgagagtgttattttccctatcctgctcttgttcgtt

SEQ ID NO: 137493 - DNA, 497 bp, Zea Mays
ggccgttaaggtctgaattttcagactaacagtggactgacatcaacttcaagctcaattctgagcatgatccagtgctcaactaagtttaatccctatagtcgaattgtagatggtttgtagctctgaaactttgctacagagagtggagtgagttactagagaaactttagagaaatttggacctaaaattgctctgtcaggttcatctaactgaacttcctccatggtacagtgctatcgggaggatcagatcgccagcgcaacggtcctcaccgctggtgacctgctgccgcaatttgggcttggctaagttggatagcactttgggtcacataaatatccttgccgtggataactccggccataaacaagtccggccaccgtaccgtgtatggcgcggtggaaagttcgatgggctcgccggtaaaccgtcgtcgcatggccttatgccacatatccgagcaccctgtcgtatcatcgtgactccttactac

SEQ ID NO: 137494 - DNA, 512 bp, Zea Mays
cactctgcttgggcgcgctcaggatgaagtcacaaggccatggcaaactacgacaacgtgaagcagagaccttgaaggcaaaggggcgcagaaagctcggaggcgaaaggacgccgcgagtgggagagaagcaaggcatgactactactcgagggatgaacccctctttataggcagactcccctgctctcgcctcgaagcgccgcgagaagcctcccccgatgcacaccggggtatccatcccatgacacgggggctcggtcccacaagtcatacatctggcgtgctggccttcgagtgcgaagaaggcgcgtgctaccgccccgcggtagtgcgcccccttcatcttcgccgtgactaacggtcaagaaggcgaaccaccgcacagggagcatgctaccaccccgcggtagtgtgccccctcggcttcgccgcaaccagtcgtccaacctctggcatgagggcccaggcccacatgtcatgcacctggtgcgccggtttctgtgtgcgga

SEQ ID NO: 137495 - DNA, 378 bp, Zea Mays
agagatgtggctgcacatgtggctatgtgcgaagtgtgtcaaagagttaaggctgaacaccaaagaccagctggactattacacccattaaagatacccgaatggaagtgggaagagattggtatggatttcatcactgggctgcctcgcacccagaaaggttatgattctatatgggtgattgtggatagattgactatagtggctcatttcattccggtcaagactacttataaggtatctcaattggcagagttatatatggctcggattgtgtctctacacagtgtaccgaagaagatcgtttcggataaaggatcacagtttatctccagattttggaaaagttttcatgagaaaatggatatgaagttgaaa

SEQ ID NO: 137496 - DNA, 358 bp, Zea Mays
ggtgtgctctggccacgggggccgtgaacatggcggctagctcgtcgtgttcccgacgattgggggcatctacattcaaattgatggcttggcaagcatcactgagctatgagaagacttaaacaagggagaaaagaagatgagctaaccgggagggggctggccgcggtgaggttgagcttcgggtggcggagaatggaattggggcgaatgagaaattccggagcttggatgaacgattacgagtgggagtggggtgcgttggcttcgcaattacctagcgcaactacctgggtgctcaatttataggagggtaaggcggtggccgcgaattttggggaggacgcgcggcggccgg

SEQ ID NO: 137497 - DNA, 412 bp, Zea Mays
gtcatcagtcactcaaacgttaattctaaaacgttgatatggcttcgtcatcatttggacgctacttcagaatcgtaaatgttgacaataataactcggccatcacccctaaaagcgacgatatgatgcccgagttactcagctactattccagaggaattgacttcacagataaggcaaacggaggaatgattcgaaaactccaagttacgacacaagcataacagacagagagcattacggacaaaaaatatcgcgacaatcatcaactgaccatgaggcaaaataaccaacataggaggagacgaaatcattcttcattaagggaagctacagaacttacaaatcaactcgttatgagttgatgctgcccctactactactactactgcactacactacactactctac

SEQ ID NO: 137498 - DNA, 484 bp, Zea Mays
gacatgtttatggtacctggctgtaaggcttgttgcctctggaacctgtggattcacgtaccatttgcaagacgatccacctgtcagcgaagtggtacctgaaaggtttggaaccttaggtaaacatagtcttaatagaaatgtaaatagcaaggttagacaaacataccagcataggatctagcaagagtaccaacaaagataataatctagagtgagtcctggccggcaatactaatctgatcagccgggaaggaggttgcctgctcaccccacagcacaacctcaaggggagtatagctaaaaacacgattaaaacgattcacaagtataacttcgtgggtaaaataacttgctgcaaaggtaaataactaacctctcattttgtatagtgacagatctctttgctgtttgagtctggcgcatctttgtacgaatggttgcgacatccgagatcatggtgaccgcgccaatgacatctatt

SEQ ID NO: 137499 - DNA, 385 bp, Zea Mays
acgaacagtcagatcataaaagtgctctaaaaattctgccatcttccttgcgttttcccaatctatctcatcaggatgaccaaaaccaccccttccttcagataggtccataacataactcatgtcttcatctgctagttttgtgaacaccttctcatacacaattgcagatttaagcataatatatgtggagttcccatctagttgggacatcagccttaagatatggattgttggttagcttctcttcctctataatttccttaaatttgagcattcttgaaccaccatttctaatgtacttcacagctgccctaacacgcttcactgataggtctacttcttttaggccatcgtgcacaattagattaacgatgtgagctgc

SEQ ID NO: 137500 - DNA, 393 bp, Zea Mays
ctttgagcgagaggatgttagcattcatgccagccagattcgcgagttgtttggattcaatgagtcatcgactcgtcttcacagcttgtgctatggcacctccgatcctcctcgtcgccctcatggcggagttgctcctggtacagctcacgtcgcggctttgttccgaccgcccttctcagatgggtcgcgacgttctccggcagacttcaccacagcggccaagtttctatatcagctcatgagatggacgcttctgccacggatgggttatagggaggctgccacccatatctagctctggctccttggtgccctggtctctcactccgagtttgatgttgtggatttcctcatttgtgagatcgaggacaccgtactggatggtctacg

SEQ ID NO: 137501 - DNA, 280 bp, Zea Mays
ctaatgtcatgcttgtaactttctgtcaagaacatgacttgaccttatgaaacatatttgactgggtatctttagggctgagattgttgttgatagcattatagcaagtacgcttgctgtctccattcttctgtggtgccattcacttactcagacttgctcttctgttgaagcctgaaggcagttcattgtttgaaattttgaatgcattatcataaccaagtttttgatggaaaatcaatgttggtgtagcacatagagttgtcattagaggacccct

SEQ ID NO: 137502 - DNA, 576 bp, Zea Mays
caaggtttcagtatttttcagaccaacctccgctataggagcgggagggacaaaaaaattctcaagcggaaaaccatagcagaagacactttggcaagccaagaagcgcgccgtctccctttcccctcgccgccgcatatcaggtccacgaccgagcgcgcccccgtgctggtgtggacgtgcgagtagagagacggcgagtctacggtttcgtgcagccaggctgctgcatcgaaccagagtgatttttttccacatcgcttttgcgtcgctgggaagaggattggtagcgaacacggcatgaagcgacgccagagttccgtcagtctgccgtatctcagcttcatcagtcaagaagaaggtcaggtgcagcgtgcagtcgtgcaccggctaggtgtcaatggcaaccaaacagtggcgaacttggctggagccggaggtcgtggtccattttcatgctcacggtactccaacttcttttctggctcacctcaatcaaaagaaaacaaaaaaagaaaaagaaaatgaaaacccttctgaccaaatttcttttctatctgttatgcttcaatccag

SEQ ID NO: 137503 - DNA, 897 bp, Zea Mays
cttctgtgaactgtgacagcacggcttgcactctgttgtcggctgtgacttgctgtggatcgttggttgttgctggagagtccgaaaacagccgcagctcaatcactgctcccactggtaacgttgacagcataccttgctgagagacataggttccctgataagggatagtaatccacttgtgataccaatcaatatgcatgggactataatgttgaagccaatccatgcccaccactaaatccaccgaagggagaggtaaaaagatgaagtcggacacgaactggtaggtagccatagaccaagttgcttgtggaagatgttgagaacaagtgacgatctgtccattagccactctgaccgccattgggcgttgcaatggttgcgtgcccgtcaacaacgacagaaatcggtcgctgataaatgaatgagtcgatcccgaatcaataagtatcatcaagggatgctgttgaatattgccctgaaaacgcaatgtggagactgcatctttccctgtccatgctgcatcagacagggtcatcaataattgaggttgagtgtcttgcactgtctcactgtcatctggttcatccagcaaatcccacacctcttcaataacttgtagttgcacagtatttggacatttgtgtcccctgaaccacttttctgcacagcgatcacagagaccacgagcacgccggtaacttttcaatgaagccagacgatcagtagatttacccagccgacgagcgtcattcaccggcttgtcaactcctggagtcacgccatcaagtcgatcgtgatcagccggcgcggtgggaggaggccaagccatccggttggaaataggctcgacccgtcggcgtcttgtggattccaacgcctcttcctgcacaa

SEQ ID NO: 137504 - DNA, 633 bp, Zea Mays
ggactccgaatttctgggcgattcgctcggaatccgccagctcggctgaccgtccctgcgggattataaagccaatgtggccatggactcgttcgctccataccctcgcatactccctgttcctcgcgccatcgtcggtgagagagagaactccttcgcgtgtggagaaattgctgtcgtgatccatcgccgccgtggaacctagcctgcgaagcttttcggaccaaaagggctggccttgtgggttcatggggttccttgggttgagttcagggcaccgccgtgtggacttgaagcctgggaagctcggaatttctcgccgtcggcgtgcgtcgtgccgcaccgtgaaacacttcttcgccggtcaccaagctaggtacgttacccacccgcgtactcgtttcgtgcctcacaacgtatagaagcaactcaatcgggatttagggcgtcggggttgggaaaccaggtagctccggcgagttccgccgtaatggtggggcggcgccgcttcacgcgactggactggggaagatgcccctcagtcgtcgatctcctaattgtacggcgattcctatgactcaagaattataaacttagcaccgccgttgtttcatagcacttggagcacgccat

SEQ ID NO: 137505 - DNA, 464 bp, Zea Mays
cctgtagatcaagtagaaagaatcaggatgactcgacactaatgtgtcccacattgcagattcacatccagtcacagatcaagaagcaactttcaataagcaaactgtgaatggcgaaacaagcgagagatctgctcctttaaaattgtgagaagcgttgacagtagtttacaggctgcattgtcccttcaattgcagaacgagcaacgttgaaaaacacatgcagtacaggaaaaaagagcctgtcagacaacctgtaggccaccccagccaggcaagcctgagcaaggaacgatcctctacagcaaccagagcaagcagtagagctgaactcatagccgttaatcacgctctggcccacaggtcatgtctcatcaaccaggcttaagtgcttgcctccttattaatcaaggatgcaacggtacgatcctatagaacagatcctgttcaagtaaggtcgtgct

SEQ ID NO: 137506 - DNA, 517 bp, Zea Mays
attggccatcaccgtcgtcacgtgttcgtcggcggtggaggggtgtcgtcggggaagatgagttgctaggagagggaagaagaagaacgaccgtggaccgtctatctgcttgtgtacggtctggattagatgttggcgtatcgattgggggaagggctgtggatcgtccgatcggaatcggatggagatcggtcctttgggcttcattaaatcctgagcgttggattcaaatctaggggctcttgtcgtataccgattcatcagctcaccgttctaatcgtgcgcgttgccgctcgatccgacggccagaaaacatccataccccttcgcggtgcacttttgcataagagcccctcaggaagtaggaaatagaacccaccgtccaccctcactgcgctctgtgtctatagaattttaccgcagaacccctggactttctgataattgacgcctagtccagagttgtttaaaaaccagagaaatgcatttaaaaatggatttttagtattaattaaat

SEQ ID NO: 137507 - DNA, 276 bp, Zea Mays
atgggggcagaccctaccgggttggcatacccgtgtgcactacctagttacaaaaagggaaaaacttcgacccctcagacttgctctatagataaaacttacagagatatttcgacactgggggaggcattccttcagtcgtagctagacagttgcccttgggtcggggtactcccattaccatgaagggtccttcccagctgggggagtgttacggagccctaatttggtctggtatttttgtaggattaggtcccgaccctgggttcctgatag

SEQ ID NO: 137508 - DNA, 376 bp, Zea Mays
tgctaaaattgggcatgaaaaggcagtggggacacgtatgtacgtgtgtgctgtggtgtattgtagtagtggtggcgtaagataattgattgaggtgtgcgggtatatgccgtaatgtggttatactcgcgacgaggaaagatgcatgtattgtgtaacacgatgcttaggccgctattatataaacgtgtgaaggatgctcgtgatgggtgtgtgattgaggagtgacgtagtggcaagcgggaagtaagtttcgtttttcaacggttagtggatagtatgtgtcagtgtcgtcatgaatttttgttgtatgacggatcaatgtgtagctttataaattattgcattccattcccttttgataaataatgtcttg

SEQ ID NO: 137509 - DNA, 322 bp, Zea Mays
gcagtcggccgtatgcatggtgtcatttggccgtacggcgcgggcggggctggggcgctggcctggtactacttgctctcctgctagctgcatgcggcatgccgtgtatagtaaagctagagagctagccgcgcgcggcttccagttcaagccggtgaatgccatgttgtactgcctactaggtgtcggcagcggtcttactcgcgactacaaatcttgggttctccatagatactctacaacttcgttctgaaattaaactgaacagggtaaaactagctcgccttccttcacctcggatcctccactatcttgctcttcc

SEQ ID NO: 137510 - DNA, 773 bp, Zea Mays
ttttattgcagaataaaagtaggtggacattcttttttagttttattataacattttatggatagggcagtgtgaagtgtgaaccatcagcaaacttccataacaccaacatcattcatttattttggagaggctctaaaatattatgataaaaataaaatttctttgatatttatagttttagattagagcttaaagccatggaagcccactaccagttcaacgcaatttgctcaagcatctcagcagtaaaatcatctcccaaagacacaaagctgctatgtggttgttgattgagcacatcagcacataaagtaatgtgcagatgggacctagcatccctttccatgcacccagttcacttcactaccaagaagcaaccaaaaacaggacaaacatccaaagaaaataggggaggagaacatggagaactgtagtaggagcatagatttttctacaccgtaactaatgtaggtgaggtggggcgtaggcagggtagcggcgcaccgactggactgcccgtctaggagctagggcctataggtggggatgggcgcggggtagaattatgctgggtagcgtcgtgccggctggactggccgtccacgggccaaggactttcgaccatgagggaacagtggtgctggcgatgcctcatcgacaatgccgcacagtggcttctcctacatcaccatcatccccaactcctcaccctggccggctgttgaaagaaacaggcagtaacatagctagtattccaacaaaacatacct

SEQ ID NO: 137511 - DNA, 514 bp, Zea Mays
cggagcacggccgagctccggcgagctgtctgtgccggccgattggggcaaggactgacgtccttcttcggtcgaaaccgaattcacaccccggccaacgattcccctaagttaattgcacaattggtggattaatttggtctggccacagagagcgcacggatggaccaaagattcatgtgttcccgacggtcaggggacttctagcccaattggacggttcagtaagcatcacagacacggggagaagcttaaacgaagcagagagagggttggactgactggaaaaatggctgacgacggtgaagcttgtttcacggtggcggaaagagatttgggggaaaacgcgaattcgagctcactggtggatgattgtggccgattagcggtggctagttagctggcgacctcacggagctagtcacgggctcaatttataggagggtaaggcggtggccgtgaattttgaggaggacgcgcggcggccggagagggagaagaaggcactggccgc

SEQ ID NO: 137512 - DNA, 365 bp, Zea Mays
caacagggccggccctgggggtgggcagggtgggcggccgccctgggcccccgaagttatggggcccctaaatatgtattaagtatatgatgtgtgctataaatatttagtaattagtcttggatcaaacactatttgatagtctgttcgctagatgtagcttgttggaaacctaagaaacgaaccgacaagcctattactgtcacagagaaaataaatcgtcacagactcctaacacgacgtggcgacaccctgagtgcgtattcgatagatgactatagccgtagtgtatagtgtactagttcttatattatatgttatatgtgtgtatttttgcaatctcacgaactaatgattgttcattg

SEQ ID NO: 137513 - DNA, 586 bp, Zea Mays
gcgggaacgtcccgtggtcaagaagatacacccaatccaccgccggtaccgcccacgttggccgaggctatcgctgccttggtcaccacgaccactgacaacacacgcttcctacgtgaaatggcaggacatcaatttcagcaacaaggggtgagggcttatccacagggaccccgtgaaacttcgtacctggatttctcagaaacccgtcccccacttttcgtcaaagctgaggatcccctcgaagctgacgaatgggtacgggtcattgagcagaaatttggactcatccgatgcacagagacctagaagccattgtttgcagctcagcagttaagaggccttgccagcacctggtggggaaactatgtggccattcagcctgccggacatcaagtcacatgggacgaatttaaattggcgtttagtgagcactacatcccagaaggagtgctgcatatgaagcaggaagaattcatgatgcttaaggatgagatactgttatgcagtatctcaacaaattcaatcatttgtcccagtacgcaattgaccaggtcaatactgacatgaaaaagaggaattgttt

SEQ ID NO: 137514 - DNA, 428 bp, Zea Mays
gtgcacgggagctggaaggggctttccttaggcgccctgctggattgttgggatcaatccagaaaggggtatatgattgatgtcttgtacctttatcaattttaaactgggtcacaacctcaatcatcttcatgataaaaggagcatgaagacatcccttcaatggaaagcaggcagcatgaatgatttcctgccaaatcatatcaaagacatttatactctctgagctgctgggtttcatgaatgagagcaagaccttgctctctccaagaatgttcatctgattaccccttttggaatgagggtcatcctgcagagggagttgatgtatcgataataattatgcatgtttgtagactcccaatacttcccagactcagagagatgaagatctttggcttcatctctagtaggctggcggaaatcat

SEQ ID NO: 137515 - DNA, 431 bp, Zea Mays
cggcgtgtgagcccgagggcgaactagcgctggcacgtggtaggggaagccaagaaatgcagtgattcggcgggggttcgacatctatgaactcgtgcatcctcgtcgccaggagcgccttcttcctcgaccacttcacctccgtcctcttgcctcgcccaacaggccagatctgggcgccgcgacgctcgatcatcggaagtggaggagcggccagccagggggaaaccaaaggggagcacgccggtacctcctccgcttcgcccatgaccaacaacaccgccgtaactgcctcctccctgacggtgacgaactggagaacggagaatacaaccatccagcgctgaccaagattgtcgcaccctgtccaatgtccatcctgccagacctgacgctgctccacagcagtcgagagggtagtgcacctccgc

SEQ ID NO: 137516 - DNA, 446 bp, Zea Mays
ctccaacaagaaactgcgaagaagtgacctcattgtttgggttgataagattgctgcaaggttgcctaactggaaagcatcccttcttaatctcgctggaagaatagccttggttcgtttcgtcctctcagccattccagtctatctcctcattgctatgagcgttcccaagtgggtgatcaaagctattgataaaattagacgggctttcctctggaagggtagaaaggaaataaatggtggttgctgccttgtggcttgggagaaggttgctaggccgctgcatcttggtggtcttggcctcccaaatctgctttacagaagctgggcactgcaagccaggtggttgtggctacagaaaaccgaccctagcaggtcctggattggtcttgatatccctgttcagccacaagtcaaggcgttggttgccatttcagtgatctccc

SEQ ID NO: 137517 - DNA, 340 bp, Zea Mays
cgtagggtaaccggcggagttaagcacatcccacaagatggaaggaaaaccatcgtgagaaaggaaatcagagctgaaacgagtgtctcctccactaacgggggtaggtgaagtcatctacggaagggtatcagatgtaaagattatggtggaagaaagaaaatgaaagagcctgggtggtttaaaaggaaacgggttagatcaaatttttacttccttaatttctgatccttttagttttattatacatgcatgctgaaaataacatctcctccctgaatcagaagggtgctttttaggacatcctttgaaaatctaaatactggcccacagggcctac

SEQ ID NO: 137518 - DNA, 396 bp, Zea Mays
atcgaacaggaggactagttgtttcactatgatggtataggctacctgttgcttgttgttacatgcacaaatcctatgaacctaattaataacaagttaagagtcacctttgactaataattggtgaaccctgagggagatggcaaattttagccccacgatgagcgccttatactcagctatgttattagtggcaaagaaatgatgatgcctgacgtagtggatctgttcactagttgggaaaacctgatgaaatctatgttagtgtcttcacgctaactagtagacccattaaagcatagcacccagtgattccatctagagttggtttgcaaaggacttgggctggccctaggtctaaccctggaaagtctaatggggtccattctgccataa

SEQ ID NO: 137519 - DNA, 311 bp, Zea Mays
atttctccaagactcatattcaccccgcgtggatggcgggttgaaactctaaatttgcaggggttctttagataaaaatcacggcgaaggggtatcgacgatagtgggccgttggattacgatcgagcggatcagattagattcaaaccccaccgaaccgctatgcagctccagtcgtccgattttgatcaaacgaccaggaacaccccacaccatgatctcatctgattcatccgtgggtcgatcgacgacacggattaatctcaggaaaggggtacgtgcacatcaaccgcaaccgcggatttcaagat

SEQ ID NO: 137520 - DNA, 386 bp, Zea Mays
tcagccacccatctccccttcatccgagctcaatcgcgctagcgccgccgtcttcctccactccggtatgccctcctcctctcttccctccccctctggttgttcagcgagcaattagcaaggctcatcagtttcgccacactgccgcgagcatggaacaccactcccatgcccccgatccccgcacgagcctcaccggcgacgactcccgccgcggagctccgccacctccccgcggtcagccccctcccagcctcctctggccaaattgggcccacccctaagctcgccagcccctcctcatgctagggcgcccgcccgatgcccaagaaccgggtcaccggcggcgaaccgccgtcgagcccaccggcggccgggtttctccc

SEQ ID NO: 137521 - DNA, 482 bp, Zea Mays
tggagaggtgatgattcggatttttttaatacctcctgggcgaactcctcgaagcaactgaaacagggcggtccaccggacagggacaccatgggagagcgaaaccaagtagagtgatccggagaatttcgatttcccaccaaaatggcccggctcccaaaggcaggaaatgaggccaacgggaaaccgaaagaagatttctttgagggacaaaaaagctccaagtgaccgagcgccttacagaaaaacagcggaaggccgacgggcccagcagcccaaaaggcccccgaggccgaacgggacgctagtgaagattacgacgccgataccagttaaaatttgaattttgaaagttggaacggtcgtgcattccgccgccatgaaccacaccaataggatcagagctcgagaaccgatgaggcacaacacccggccgagaggaagaagacgacaagcccaggcaattgaacgccgagattcta

SEQ ID NO: 137522 - DNA, 338 bp, Zea Mays
aaaaaacgctggcgtcgtcacaagtcactcggctgtcacctctaagatcgctgacgtggtcaacagtcattccggcgctgacatgatttcgtcgtcactcggactctattccaaatgcataaatgtcgacaataatagctcggccatcacccctgaggcggcgatatgatgcccgagttatttagatactattccgaatgaatcaacttcacaaataagagatcaatttactatgaagcaaagtaattgacacaggaggagacaaagtcattcttcattaaggaaagtaacaatacttacaaatcaactcattatgagttgatactcccctactacta

SEQ ID NO: 137523 - DNA, 349 bp, Zea Mays
ttcttcttggagcctcgagccctcgaggtagcagtgtaggcgtgtagcacatgtttttggtttctgcacagatttgatgtcctcggaacaacctctgcagttcctttctcccgtgttgagatggccatggcatcttgttattattattattgatgaaggcagagactgctctggtctgatgtactgaggccctgtttggttcagtacgtgaaacctgcaagccggattatctgtgaaccaaacgccctcttgagtctgctagcatctagacttttgctcacgaacggccacaagcccaacgctattctgccataccgacatgatcgattgccaagacgctaccctttcc

SEQ ID NO: 137524 - DNA, 537 bp, Zea Mays
tcatcatcaacagttgtaccctaggtctcgaactatcggaacgcctcatccttagcctgaatatctgatacaagatctggtactgggactgggtcctcaggggctggacgatatgaaccaaactggaggcgagaagcctcgagggtgccctagaactgaggcggcctgatcagctacgcgaagatgtgacagaggtaatgcgcatacggcagctgacggcgagcacgaagaccatccaaaactgtgttctcgatctcacagataagaaagtcaacaacatcaaactcagaatgtgagatcaaggcaccaagtagccataaccgaatatgtgtggtggcctttctgtatcccatcctgggaagcagtgtccgtctcatcagctcatacaagtacttcgctgcaggggtgaagtcagctagagagcgtcgcaacccttctatgaaaggaggtctgaatagggccacgacgtgagctatggccgatgcaactccaccatgagggcgacaaggaggatctgatgtatcatagcacagactg

SEQ ID NO: 137525 - DNA, 432 bp, Zea Mays
tcttaaatagttcagggacatatatgaaagagtgcgctcgaaggggtatccgacgatccgaaccgtcagatccaaatcgacgcccaggattagatcagggtgagttacacatccgcgctcaaccctagccgtcggatctggaattcaccaccttgatttaatgactcgaaggggtacgccaagattcgatctaagccgttcatctaatatctacaactcccacactctcaaccatccatctaatcgtgatcgttgaagatgagatcaacgatccaccgtccttcttcaacctctggctgcccaggcacatacgccgaccgcgcgcaagcgcaaattcgcatggaaaacacaacgagttcaaggggaaagtttctcaggcgccagcatggtggtaatgtcggccctccaggtgcagcggcaccacaaaacgcc

SEQ ID NO: 137526 - DNA, 477 bp, Zea Mays
taagcaaactctgccaatgcaagatgatcctcccagctacccttccatgacagaacacaagcacacaacatgtcttccaaggtttggatcgttcgctccgactgaccatcagtctgagggtgaaaagcgacactaagtgaaagcttggttcccaatgcactatgaagactctaccagaatttggatacaaatttgaagcctcgatcagaaacaatggacttaggtaccccgtgaagcctgactacttccttcatatacaagggaaccaaatctgaagctgaatttgtggtcttcatgggaataaaatgtgtagacttagtcaagcgatccactaccacccatatagcatccctgccccgaggagaacgaggtaaacccaccacaaaatccatggtgatatgctcccatttccactccggaatttccaatggcttcagtaaacctgcaggtcgcttatgctcggccttcacgcgctga

SEQ ID NO: 137527 - DNA, 543 bp, Zea Mays
aacatccttaattaaccctgcaatcacacactccgacttctctaggctttggaaggttctgcggttccgctctttccaaatctcccaccagaaaaggatgatcaaaccatcaaactctctccttgagcatttatcgactttggctctgcatttattccaccaagtgtatattgacgaagattgtgccatccctggcaacaaggcgaggtcaagccaatgagaaagttgcgcccacaccatcctagtgaagatacagttttggaacaagtgggttatagcttctggttcttgtatgcaaagtctgcagatcggatcattactccaacctcttttctggagattttcagctattaagatcttattatgcagtagagtccacgcgaagaaacgacattttggctccactttcgccttccaaattggtagtagattgcacttggtataacctccaatgaactgggccaaataggcactcctggttgagtaggcaccatcattggtccagcgccagtaaatggcatcctcaatccctggatttaattg

SEQ ID NO: 137528 - DNA, 719 bp, Zea Mays
caaaagggtatgaaaaccacatgatcatgacttgggccaattataaatgatgtagtaaacttaataccctacaaatgatagtaagaaagtgaccccaaaaagaattcagaaaaaaccccaaaaggttcaccaaaaggttgagcacaaaagaaaaatcagaattcttctaagtccaaaaccaccccctttccaaagatcaaacatgttcaccctcattcaaacttcaaaaccatttgacccaattgacaaagtggcgccaaaatacctctagaataccctggagaaagttgaaccccaccccaagtcgtttgacatgacttggcatagcttttgtcccggtttggacagctgggatagaggcaacttctcacctctatatctccctaccccagccgtatcttggcttgggactcacatcaaaaaggtaggatatggtgtagggaagagaccgtacacagtggttttgccaagatctgcacgctaaggtgctccaatcggccgttgaaccatggcagaagcaaacacacacgtgttcgacgcgggctgacactcgggggcgcgctcagagcacgcccgtgcgcgaacccccgcgcgtccgcggccgcccgtgaccacgcccgtgccacggctataaagcccaccctagtgcccagccatcttccccgttgcatcccctgtcccgtgcccaactccccagagctcgcccatagctccggcga

SEQ ID NO: 137529 - DNA, 790 bp, Zea Mays
atgtggatgaccatccagctcgtcggagaccgcgctaagcctccccgagctccgccccgaggtgagacacccgtccttgtgcccaatttcccttattgcgccttgtgttcgtccaatttggctttcgccagtgctcgaccgcggcggtccgccatgctcgcgcggtggccggccgatttagcccggtatagtttactggagtagttccctgtgtcacccctgtctctgctgaagttagccaaggccttaacgtgccttaagtcccctccccgtggccggaatcgctcaccggagtttctccggcccgcccgagactctctcaccacagttctcccctctctgcccgtggattcatggcctcttccccgccattgagttcgccgtggcgccctcttcctctctgcccaactctggcgaccctggagccaccctagctcacaccagcctcaacgccggcgacctcaccgccacggagagcagcggcgccgcccgcagccgtctgtttccccagtctgatcccctccgtccgattcagatcgaacgatccggaccgcgggataacgcttcgcacacgcacgcctaacgccttggcccgcctgtcagcgccgctcgcagccattcaaccccctcagtctgatttccaccgtccgatcttgatcgaatggttcggaccccttcagacccctgtagccgtccgtttcccctctggtgctggccccgcttggtcagtgcgccctccccctcggtcgctcacacccctggcccgcttgtcagcgcttgcccgcccgcg

SEQ ID NO: 137530 - DNA, 440 bp, Zea Mays
cggttcgcgcgccgagctgacggtgcgcgtccacgagcaacgcgtgctctcggtcgaccccggcgcgggtggaggcctccgtcttgtcaatgtagccgcacaagctctttagccccgactccgtgtctgtggcgtgcttgagggcaaggctggcctcggcgcgggctttttctacgccctccctctcctccgcaagacgacggctaatgtcctctttctccgcgttcgccgctgtcagcttctcatgcaggttacggctcctcttctccgctgccgacttgtctctaaccgcctccgtatgttgcatccgggggtggcaggcttcacgctcggcagcgccatcttcgcctcacgcctcgggtctgccaacctagcgaacgcccaacacttccacgacgcgtcttggcaatccttctccatcactgccgatacaacatcac

SEQ ID NO: 137531 - DNA, 834 bp, Zea Mays
cccatcgactcggccctcgaccacagcgtgtgatcgaatcacagagggcggtagagcgtcaccgcgcctgtgatccagctccatcgtccttgggtctcgggggaggattggtcgggggtattcgtcgtgtggcgggccgtgtgcgaggtattcggggggagaatcgggagttgctcagactgaattactcgtcggagcaattgaaactccacggatccgcctcacgccccgagcagggtgttcaccgtttctgatttcggtaagaaacccacctgaaccgttcgccttcacctctacatcacatagcaccgcttgccataggatttggcgcactgggtcgctgcatcgcctctctccggcgagagtgccgctgcgtgagctctactccaccgcgctttttcatcggagagggagaacacttttggccgttgatcgactactgcatggtctagattagatccacaatgtaccggttcagtgggaaatcttagcacttggatcgagattgtgcgcaccggattagatcgtggcgctttaaaccctataccattggatcatgatccagcggcatccagtgagtaccggttcggattttgatctcggccatatgatccaaattatacgcgtaagatttgatctcagtgtttaaaatctgggccactgatctcaggatcaccggtttctcagcacatactggttcgattaaatagcgatctaatcggtgccatctcattggtcggtaccccttcactgtttatactttgcaagggagaccctggttttaattgaaatcaagccgccatccacactggggctggggttagtgcacatggg

SEQ ID NO: 137532 - DNA, 522 bp, Zea Mays
aacagccgagtgactgacggtggcgtcggcgttttagaggtaacagccgagtgattaatggcaacatcggcgttttagaagtaacagtcgagtgactgacggtgacgtcggcgttttagaggtaacgaccgagttagaacgggccgcgtcggccattttggaaataacgtccgagcgatgacatggcacgacagcgtttttagaaataaccgctgggtgatgactggacgctttttggaaacagtatctggccgagaaaaaccccatatgtactgcatcgttgcacgcttccactttccgtgccctaattcttgcttttctgcatccaagctttccttgcgctcgtgcgatactgcctccgtcctgctcgccggcgagattgagatggcgcccaagcggaaagcatcaggttcatccgctgctgtcattcctcccatcgatcccaacagccagttgcctttcgcaggtaaccatatgtcagttgtttctgagtctgatcttctccaccttacgtacatcggg

SEQ ID NO: 137533 - DNA, 314 bp, Zea Mays
cacagaattgagtaagaccagtcgaccacctgacgatagaaatttggccttccaagtactaagtctcctttcaaaccggtcaatcacaccttgccagtcactatttctcaatcttctatgagtcataggaatcccgagatatttgaaaggcattgtcccaattccacacccgaataagtgagagtattgcacttcatattccttcgccaacccatagcagaataactcacttttatgaaaatttatttttagtcctgacatttgctcaaaaagtgtcaaaagaagtttgacgttccgagcatgccccagattat

SEQ ID NO: 137534 - DNA, 416 bp, Zea Mays
ttccattctcgagcaagtatccaagggaagagggttgggttcgtgacatttggtatcagaggataggttcccaaaaaaattcggtgagtgggatcattctggcgtcgaagaagtgacaaaccaagttggaactccgagtcgattcggccatggaggacttcacgaagaagttggagggattggaaactatgttgcagaagaccttcgatgctgtgagcggcttggagtcgtggcgaactagtgcaaaccagtcgctcggcacattgcttcagagaacggatgaggcgggaacgcgtctgcagcaattggaatctccaccgatgcgacctctcccgccgccaccacctccgccgccccgccaaccagcttcatcgaagtattgcgatccgttcaacatgcatcaatttcgaccacaa

SEQ ID NO: 137535 - DNA, 591 bp, Zea Mays
caagcctccaactcacaaaaaaaaagagcaagaaggaccggccttgggattctgttctgtcagctagcgtttgtaaaaagcaagataaaaaaaaagagtacatgcaggttcgttatgaaacataacaaatgaagtagctagtgcagcattttgcgtttcagtgaaagctagtgtaggaccgaaacggcgactagagggggtgaatgggagcccaataaaatttctcgatgcaagcagaaccaaatatcaccctaaacaagcaacggaaataactaactataaaataaggaagtagaacacaaatgatatgtataggtgtttaattaaataattaacacaaataatctcggctgaccatgcatataaactaattaataagctagaccaattaaccaaccagagtcattaaatataactagtgacagagacaaataagtaaaataagtaaacaagtaagcagtcacgaggctaatgattgaacactattttctgaaagtgacacctgatgaaaattaaaatgaattacttgctcttggtgtatcgtggatcacaatagttggccggcagcagatccttttcagcaccttgacc

SEQ ID NO: 137536 - DNA, 289 bp, Zea Mays
gtgagtcggggtggtagcggggtcaaggatgggccccaggagtgtggtggtgacgatgtcgagggagatgtcggtgacataggcaacatcagtggttgtgcatgcgaatgctgcaacatcaacgacgagttgtttcgggtaggcgaggtcggactcacacataaagccgagtatggatggatggtcagagccaccatcgtgtgcatcaggcggccaatgcaggtccctggtgttgatcgtcgctcgaacttgctccatgaaagagtggagatggtcgaccgaagaatcc

SEQ ID NO: 137537 - DNA, 363 bp, Zea Mays
gcgccgccgcgattgggtgcggatagggaagacaaccagcccacctttggatggccactggacggctgagattcatctggtgctgtcgcacaacgggggactcaatcgtgaccgtcgatctgagttcctaggcgtgggattcaatcccgcgctggtgagctcacggccgttgatgggggatccagcggttgggatcgcgcaccggttcacttgagtcgtgatttaatccgggccatttaaatctaatcgagcggctgcaatcctcccgtaccccttcggccgcaggatttgtaaaataaaccctggggttttgtgttatcaacccgccgtccaatgctgcagccctctgagtctggggttttc

SEQ ID NO: 137538 - DNA, 505 bp, Zea Mays
gtgtttattaatgtgctgcgtcgcgtgcttcgtcgcgcgacgattcttttagtttatattcattaaagtgtggtgccgcgctcttcgtcgcgcgacgatctattttaatttcaggttgtttaaggtgcgatgtcgcgcgtccagacgcacgacgttccactttaaactcagccctgttggcgtatgtcgtcgtgcgcttcgtcgcgcgatgcttaacgtctctttaaaattagtgcaagtgtcgcgttgtgcgctctgtcgcgcggcgagttgttcacttcttaattcaatctaaatgtcgtgttgtacgtctcgacgtgcgaccgctccctttcattcaccttcaattgtttacaataattaaatgtggagctcgactttactttatgctggacgtagtgtctaaattaattcccttccattgagcgagtaatttaattcataatcatgtaacgtgatcgtttctcgactgtctttttctctttctctcttagccttaattgcg

SEQ ID NO: 137539 - DNA, 568 bp, Zea Mays
tttgacagccaagacttcaaggatttatgcttctccatcggcaccaagcttgccttcgcctcagtgtaccacccgcaatccaacggagttgtggaacgcgccaacggtaaaattttcacagccgtcaagaaaatgctcctcgacgacaaaaaaggcaagtgggcagacctgttacctgaagcggtcttggcgctgaacacgactgagtgcagggcgactgggttcacccctttccgccttctatatggatcggaggccatgactccgcaagaaataaaacatgggtcaccgcggatagtcgcgtcagccgtccccgacgtagacgagcctacttcgaaggacctcatcgacggagaccgcgtcttcgcactacaggctctaaacaaataccaagctcaaacaaaagcatggcgcgaccacacagtcatcccgagggaattcaacgaaggagacctcgtactcgtccggacagctcggacagagtcccggggcaagctagagccaaaatgggagggccctttcatcgtcaagacgaaggcgtcccccagcgcgtacaggctcacaacgc

SEQ ID NO: 137540 - DNA, 631 bp, Zea Mays
gatgagccgaatgatgactggcttgaggctgtcgaagctaccagtgacgatctactggcggcttacacgaaggcagaggatgaagctatgaccactgccttcggtgcttgcgtgaagaggatgttgaatagagtttttgatgtgattggattttttatcctgattactgctttcctgcccgaaaacaagggttgaaaaggaaaatggtagcctcatccttttccaccgcgcctaagctaaagaaggttaaagttttaactcacagaccgaggccacattctataagaaggtcagctgcaattcccgatacaaaaggatacagattgctgaacagaccgaagctacccccttggcttcagagacgattcctaatatgacagtcgaagctagtgctagtccagtagaagagtctgagataaagagctcaaaggcagaagagcatttaagattgctgagtcccccaaccacaactgagttgccgaagctaacaactactgcaaccacaacaatgactcctaagaaaaggaggatggccagcgttttggattctgttttgaagtcaataaatattccgactcctgcttctattgaacctccgaaaggcaatgttgaagactcaagagtgctcact

SEQ ID NO: 137541 - DNA, 339 bp, Zea Mays
tggtgagtgtagtggcttgacatccttaggaaatattcagccaccctaagcttgtcaaaatcactccacccaaatttgtcacccctgttgtgagagatggagtatttgtggaacatgtgagagcctcacatcataaacaagtgcggtgtataaaacctaaccatctcaggaacacacttgacacccttcttgacatctctagtgatccccttcctagagctcctcaaccacccaaaaagactcactcccacaaacatattccaaccaaatgctcattggttacctggttttctcgcaaacaacctagtgttacctagtctatcaccgaggttgagtatg

SEQ ID NO: 137542 - DNA, 654 bp, Zea Mays
ttttaattgcatatcaaaaagcgtcttaaggtttctatagacgattttaatacgtgttttgcaacgtgtctataggttactgacgattgaaagcgtgtctaatttcgtgtcattctaatacgattttaatagcgtgttaaaaattgtgtttaggtatctcttcacgttgaaagcgtgtcaaataccgtaacattttgatgcgttcttaaaattgtttcaaataacgtctttatgtaccgccgccgtagagacacttttgtgtgcgctacaactaaaacgtacatacaaggggggttttctagtagtgatcggtcatgcacggcgacgcccgagcgcagacggtggcgccatggcacatgaccatgaattctcccctctgaagcccaaacctcgaggcgaagagtgttacacgttccagggaaaatagcaaatctaaaggaagagttcgcaccaggatttgaggcaacgacgtggccggtcgctgatgtcgagcgaatccaaggcggagcttgactctggcgagcaatcgcaggtactctggccaactccaccgcccggacaggttaccaacacatgcaagtagcacctatcaatcttccccaaccaggaaattgacgcagtgtttcacctggttccgcgcgtggcggcacccgc

SEQ ID NO: 137543 - DNA, 425 bp, Zea Mays
cccttaaacatggtggtagttgggataagagcttaccatatgcggagttctcttacaataatagctaccaggtcagtttgaagatgtcaccgtttgaggctctatatgccagaaaatgcaggactccactgtattgggattagactaaagaaagacagttctttgggcctaaacttattcaagaggcagaagaacaagtccgtataatttgggagaatttgagggtagctcaaaccaggcaaaagagctacgctgataataggagaagattgctagagtttaaggagggtgatcacgtgtatctgaaggtgtcaccaatccggggtatgagaagatttaaagttaaaggaaagttgtcccctcgcttcattgcacctttctcttaaagcgagtgggagaagttgcatatcaattagaactacccg

SEQ ID NO: 137544 - DNA, 314 bp, Zea Mays
tttgaaagctatgtgctcttggatcaagtctctggtgccaatgtagctgcacacagtgttgaaggctaccaggcaggcttgagccttatcactattcacgatcgagggccttctgatgccgaagtgtggttgtatcggacactgaattatgcctttcacatcctccctctcaaccaaatcattattaacataaaaccattgccttatccaagatactggccatttcttttgaaacgttaggacatgacgtctcacatcagagcggtatacgaaggaataacaaccaaaattgttatgatattgctcattctcca

SEQ ID NO: 137545 - DNA, 319 bp, Zea Mays
gttagttttactatcaacttccacattgatgtttttcgatttctcagcatccagtggaggaagattggcagaacaagggaaatctgaaaaacctgaaggcagtgttaaagacatgttcccaataactgtgccgtcatcacctctaagaggttggtcaagtttgggctgaagagaaagcatagtaagactctctccaataaagaactgtaaatcgttaatatagtgtgtggacttattcgtccagcaacattcgctaacagctcatttatcttaccggatgctacagacgtccgccaaccgtagagtcttcctgtgctaa

SEQ ID NO: 137546 - DNA, 460 bp, Zea Mays
ggataggctcccaaccatgaccaatgcaagcgccgtaaaaaatggccattgtgctagggattgtcttagaaagcccaaggacgaggcccacgtcacgcaaagagacttggagtccacgttgtagatgtcattaaagaggatgtatttgagctgcttagcagtatgatgaggaggaggcttagaggtggagttgtacgtagtcactattcatccccaaacgaccactattctttttatcgttgtcgtcaacaggttaaagtatggaattcataaaggtgtatgtgtacttataaatattttgttcttcgtcttagtttagtcttgtcacagttggaattgtaatacattgagaaacgcatactagttggaggctacatcattgtggctgcttagtggcactatcgtgtctgagggagcacgagaagaggcagggacaccatatgtgggaggagtaccatag

SEQ ID NO: 137547 - DNA, 372 bp, Zea Mays
gagatgaagcatcaaaagccattgctagcggctaggagaagtgcttcctcagaagcgaggagctacaaggccgtcgcgtgcttgcgatgagtccttggtgagtattttattgtagctacattcgaaggtgagcgtgtactgtttcactagagctaggccagttgggaacgagatagagatggttggtggcctttcgatgcaaagcgtggatggcagatacgtagtggatgtctattgttcgaggcattttgttcattggctcatctgtttcttgtagttggatcggaattaaccacccctcgtgcatgacgcaagacgatactggacaccgctcaactcatgcatgaatctctgcatggcctttgtttggta

SEQ ID NO: 137548 - DNA, 370 bp, Zea Mays
gacaaatattggaacaaagcagattacagaatacctactgagtctggttaccaatgggtgatgagatcattgggcaataggacttactgctatcaaaattatagaatgcataggaatgtgtttgatcttttgcataatgtcctagttgagtcctatggtttgacttcaactagaagaatgtcatcagttgagaccttagcattctttctgtggatgtgtggaactccccaaggcatgaggcaggcagaggacagactatttaggtccaaggaaaccttgagtaggaagtttgagaaagttttgaattgtcttaacaaactagctgttgacaacataaggcctttagatcctgagttcactacaattcacc

SEQ ID NO: 137549 - DNA, 478 bp, Zea Mays
ttctagaggttccaaacatggcctaagtctatcaaatcaaaaccttgcatgtttcttctttttcttttcaaatgaaaagaatacttatgttactctcttttgggttgatcaggaagttattcaataaaaccagttggtggtggtaacatcaagagaacaatctttcacacctttccatgaaacaagcgcttcactccccataaattatttagatgtaccagtaaagaacttctcaaccagtctggtccatgctgattttttggtatggagaatttcaactgaggtttcttcacctcatgaacaaatatcctacagattagatccagacactgaagggctgatagcaatgcttcacttgactgaacatcaagagctgactttgcacagagctctgaagctgaaacctctacagaattagtgaggatttggacaaggttctgaagcttcgttaataaattggacattgaaaatgcccctg

SEQ ID NO: 137550 - DNA, 397 bp, Zea Mays
ttctatagcgaggagggtgagcttcttcagtgggcgatctacttggagttggcaaacagcagcagaaaatagggcttcttcataggctctgttgctgcattaaaataaacaaacaacagtagaaagcaatggcaaggagttcatctgtctagcgctaggaggcagaaaattcacataacttccgacacagagcaggacgaccaatccgttttaggccctgtcatcgcctccgccacatcgtcacgccagaaaagtagcaaaactatgaactccaggaccacatactatatggctgattacctggaaaccaaacaaaagtcacagattgtttacatcacaagtgtaatgccccaacattctcatatgaattaggcatgcataaacctgaaagggcgtc

SEQ ID NO: 137551 - DNA, 484 bp, Zea Mays
taccggtgatagtagcgtgggcagagccgcccacgggaggtcagtgcaacggagcgccctggttcgccaatggcggtgcatcggctctccgacacagtgacgccccatacaaccaccgccgtacgggaaacgccgcggagcacccctgcttgactccgcccttggcttcccgcgcacacctcgcacttcgacggctgatccaatcctctggcctctccctttccctttccctctctcctatcaacagtttcaacagaggcaactcccagcgtggcgcaaatcctcgaagcatagggctggaaaaggtggcggacgggtttatatccaggcgccaagggcccagcatgcgcacaactgggggaagattcgcgcaggaggtggttagatccgttcatgcggcgctattctcgcggagacgaagaccggaagcgcgcacacacagcgactgacacaagggcccctcttgccatgtgatgagagcgtg

SEQ ID NO: 137552 - DNA, 576 bp, Zea Mays
agggaacatgctagccactggggatggagttctccctcctagagtggcttgtagcgtagcatgcccacaaaaccctctgaaattcatgttagaggttgatcatagatggaagggctttcttgtggaatctccgggcaataaacaaggtactccaccttggtgttgtcaggtacattgaataatgtcagcaccatcgatgaggtgtagaattgcttatcttcctagtgggactcaaacataggttccgagacgatgtagttcccaactagaacctgtttggccacctttgtgatgacattctctagggagttgaccatcatctcagaccgcatagggtgacaatgagctctaccgacgatgtcaatagattgatctcctctagtagagactccgactgtccggagagccggtcatttctagagagtgttcaggtgaagcaggagaggatcttgtcagataggcttttaagagccctatcataatagtatcgtgtctctaggttggagtcaccaagctatggaggtgcctccttgtccaacgagtattgttcttcatcctcaagtgatcaccttttct

SEQ ID NO: 137553 - DNA, 445 bp, Zea Mays
tcgcgacagcgactcccaattaccgcgtgcaagtagatccctgtactgtaccgccctcgccccttggtccttccgcccatccgcatgcgttgacgacttgacgtacgtaggttcgcgcaaggagcctgtgatgtagctagtcatgcggccgggcatggatggtccatgactccactgtccactcatcatcgacttcattcaactagcagcaatactactactccacctacccagccaggggcccgattgctagtagaacaatccaggaagaattgcgcgtgcatcacatgtcattgacgaccttgctgcatcgatccgtcgaccgtcccgtcccgatgagatttgagatggacctaagctgatgctactacgtactgtactccgtagggttcgtggagtgtaccagtacccattttgcatcttttggctcggttgctgattagct

SEQ ID NO: 137554 - DNA, 478 bp, Zea Mays
gtctgccccttccatccctcatttacatccaaccaaacactcttacttatcatacagagttctgaatttatcgagcatgttaaactaatctactctttcaaaaaacattttagagagtgactaacttaataaatttagctaattttttgataatctcttagagttgctctaaaaagtctgatccgacacatctcaaagtaatggaacctcgaggtgaacaggcatgtcgcctagtgtcattgaatcctagtgttatttttcctcagcaggtagcccacgtggatgaagtgatgaattactaagccctatgtttatcccaaatttgattctatattttcttaattaacgcaaggatcagcacagttgtgtgcttgtgtatatctacaaatcatggttaagcagaaagtaagacagacactttattctttttaccataagattgaaggtacattttgtggtgtgcaagggtaaaataatt

SEQ ID NO: 137555 - DNA, 668 bp, Zea Mays
agcgccattgtcttcttcgcctaaagaccgggcacataggtcgtgtccgggagcttttagggtgtctggtgaagattttgtggccgtacggggagatggcgaccacggtggtgtccggaatttgtcgccggacttctgtttccgccgtgtgccgtgggaagcctaggtcacctcttcgaatctcggtgagtagcatcctccgcaataccatactattaccgcttcgtacttctactttcggattagagtttagggtgggcaatcgggtcggtgcgatcgccagccatggcgccaccgtcgatgcggagtcgccgccatgtcaccgcgtcgaggaagggttgagggttatcgtgaccgttagatctgcatttgaaggccaggattagaagatcttaccccttcatttgagtgactcacgtagtcgtagatcattgatccttcggcgcagatcacatcctactgcattaaatcgcgaccgtcgatcgttaatcgtatgggcgcgctcgcacaccagtttaccgcggtcgggatctaatccggacccttgaatctggatcgaacgacactgaatgactaataccccttcggccgcgttttattgcgaatgagcccctcggttcctagggaatcaacccgtcgtccaccctagggttgctctgagtctagga

SEQ ID NO: 137556 - DNA, 891 bp, Zea Mays
attgattctaagcgcgattgagatgctgatgacgacgtggcaaccgaagcagggtccgactgccagccaatcagttatcggttggtgatgatatatcaacaaatggaatgccatctattcactgttcacttcagctttggctactacggctcctgcttcaaaatttcaataggataataccgagtgcagaagtcttctgaactattagcagttcacctcatctactaaactatgaacttttgttaaagcaaaagacaaacctgcctccgatgcaaatagcttgcacggattgagcctaatagatatggtctgatatgaggattcaggatactcacaatggtcactggagccttatttcaaagcatataagtttatatcgtagccatgtctttctcggcaaatggggtctgcgacaggaggcactaaaacacatgcaaagcttaaagttgccaacaaaattatggcctgtttgctggttagaacaaaaatgatcttatgtttgcaagaatattgcttgcaaaaaaagattgaaagcagtgagtagatgcaatgctgccaaagagaacagatggacatggttttcaattatgtactagtaggaattctattgggagctagttgttgagttcctcatggcccagtcagaccttgtctgttaaaacgctctgaagaaaatctggcaagcttatgtatctaaaatgaaggtctccatttcacggcccatgttaggctacttacaaccttcctataggctataggctttcagatttatcagctctgtgcatcacgtctgctctcaagatagtaagctatcaccagaaatgaaccgaagaacccctcacgataccagaaatgaaccctaagagcatgttcgtttcaacctcaatccat

SEQ ID NO: 137557 - DNA, 280 bp, Zea Mays
gaagtgcgttgtagtagtgattgcgttaacttgaacaaagagtctcaagtgcatgtcgtgctatggttgtatttgagatagtaaattataagagttgcgcaatatgaggttcgatcgatgtagttaatactgattggactgtagagaggtggtgatatgccgaagtagtcatcgtttcctcagcggttaagtcgaggtcatgtgtgatgatgctatttacgtggtcaatgtgtttgttgaatgtatgtggtaattttagtgcactaaatgacacagataa

SEQ ID NO: 137558 - DNA, 585 bp, Zea Mays
caaggacctcgcatttgtcccacatcgacaaaggtgagagggcagcgttccgcgtttaatttgctggtcaaggacaactaccacgcgtcaaccaaaacagtacacatgataacaacaacataaaaagccaaggtctacattaaaatagccagatgaagttctcatcacaagtttgcaagccaaacaagtacaatcaaggactagcgggctcctccttcataataagttcgtgctccctacaattaaacaacataatctcaagctccctagcctcgccaaatagaccatgattagacttgctaatgcgattgagggcagagactccgctcaaaaccctagccaagacaacatgatgggggccaagatttagctcgccgacctcgcgtcaccaatacataaggcgccatccaaattgggtccatccaacttaaaacgtttttggcgccagtcgccacctcattcatgtgatgtccccttccgctttcgtgtgccaacatgtgttggttggcccctaccccatgtcatgccgctcactcctaaaggccccctggctactccggaagcggccgagtccacgacatccat

SEQ ID NO: 137559 - DNA, 559 bp, Zea Mays
cggctgagggcgcgtgggggtgcgcgtgcgggcgtgctctggcgcgttcccgagtgtctgccaacgtcgaacacatggtggtttacttctaccagtgttcaacggcctgtttggttgccttagcgtgcagatctcagcaaaaatcccgtgtacggtctcttctctgcaccaaatcctatcttttccttgtgagttccaagcaaagatatggtcggggatgagagatatgggggtgggaagttggctctgttcgagctgtccagaccgagacaaaaccatgtcaagtcgtgtcaaacgacttagggttgggttcaaatttttccagggtgttctacaggtctttaggcgccattttgtcaattgggccctttggttttgaggtttgaaaaaggtgaacatgtttgatctttaaaagagggttggttttgaaggtgagaaaaatctaatttttcttttacgtccttctctttggtgacctttttggggtttttctgaattctttttggggtcactctcttactaatttttgtagggtattaagtgtactacaacttttata

SEQ ID NO: 137560 - DNA, 399 bp, Zea Mays
atctctatcaccaaatctaaacttataaattgtcaaagatcaaactagaacaaaattgaatatagcagcaaatcagtcaattgagaagccatcttagaagctttgtttagcaagtacttgttagtcatggaatagtttttaacgtgtccattacacatttcaaaaactttatcctccagttttggcttctagtgatttaagccaaacggttaagatagatgttcttaataaagggataaagtaccacaagatgcaaacagaacagaagtgtgtttcagacatgctgactgacatgctcaaaatggcaaaacggccaatgagtattcggtatctaagcagaatgcatttcatcagatacatttgcttttgcacattgtccatgtctatgaattttctatg

SEQ ID NO: 137561 - DNA, 558 bp, Zea Mays
agccaagtatcacataaaagctcaccagcagtaacatgatgcagtactagatcataggcatggcaacaaaataagctcagatctagggaccaaatcataggcatggcaacaataagctcagactaaatgctataaaatcacaggcatggcaacttaagctcagatcattcaagaaatgaagggggaaaggggaggggaaggaatggcgtctgttataccgaacaacaacaggaagaaggacgaagcgccgagaggaagcagctacaaggcgtgaggaagcagcaatccggatgccctgtcaagaaattaaaaggggattagaaaccctaggtcgcgaaatagaacaaaaaacgaagctccaaacctacaaagcacgaatccaccacagatctgaaaagagaagaagaaatagggggaggatgggaggaactcggcaccagtcaccggcggcgacagtagagcagggcgcgcagaggaaggggaaggaggtggcggtatataacagcggtcacggtgggaaggagggaggtaaccacatcgttcgcgccatctcccgcg

SEQ ID NO: 137562 - DNA, 414 bp, Zea Mays
ggagaagatagtcatgcaacagttggtgcagcaacacttagcccgagctcagcagcgtatgaagtcccaagctcacaaacaacgcactgaaagacattttgaagctggagatcaagtgttcctgaaaattcagccttatgtctagtcctccctcgctcctcgtgcaaatcaaaagttggattttcggttctttggaccttttccagtaattgagaaaattgggtctattgcatacaagcttggattgccatctacttcaagcattcatccagttttccatgtgtcgcaattaaagaaagttgttccacctctagtctccattggtagttgcctacctctttggatggtttccaagtacctgaacaagttctgaagcatcgtgttggttctgatgggaagtcgcttgtgcttgtc

SEQ ID NO: 137563 - DNA, 759 bp, Zea Mays
cacaaattgtcaccgctatgggaagggccattcatggtatcagaggtcactcggccaggatcatatcggcttactcaaatggatggcacggaagtggggaattcatggaatatagagcatctcaggaagttttatccttagcaagacttcaaaaactatcggagcaatgttgtactctgtaattggaaaatacgccatcgataaaagatttcactctcaaaggcattcaaactattggttatcaattgacttcgatttgattaaacttggaatcaacacgcttactcgacttagggtgaccactataccctaataacggagcaatcggcttaagtcggcaatgacttaagacggtgcgacatgctcactcttactcaacttagggtgaccactataccctactaacggagcaatcggtttaagtcggcaatgacttaagacggtgcaacatgctcgcgcttactcgacttagagtgacaactataccctactaacggagcaatcggcttaagtcggcaatgactaaagacggtgcaacatgctcgcgcttactcggcttaggaggaccactataccctactaacggagcaataggtttaagttggcaatgacttaagacggtgcgacatgctcgcgcttacttggcttagggtgaccactataccctactaacggagcaatcggcttaagtcggcaatgacttaggacggtacaaagtgctcacgtctactcatcttagagcaaccactatgccttacc

SEQ ID NO: 137564 - DNA, 411 bp, Zea Mays
catatctacagaaaacacaatttagttcatcaaacatacagcacaactaaaacagcgcgtgcagcccaaaacagaaattaataaatttcagctcctatacaattcaagaatcgccgcgttctagagacttgaattatcctaacacttcaccatttgttagagttaaatcaataaaggaggactaacaagtagactcactaatttttatataagttaattcacacgcgagaactaacatacacatttaattaacgcattcaccacacgaacacagtttatcgccgcacactagtttctaacatgcttttcacataactcgtaattcaactattcactaacaataaatcatgcacgacaacttccacagcaaccgatttatttatttggaacaccgcctgcctagcgtaccac

SEQ ID NO: 137565 - DNA, 371 bp, Zea Mays
atatagttgccagtgcggcttgttcgtcgacggcgacctccctgcgcgaaaattcacgccgccgccgtgattcgtgttcactggcggttggataactacggcggggaggggataggatcgcgtcgtggatatttttgggttgccgtggcctcgcggtattccgaccacgtgcatcgacaacgtggtcgtgcggccgtcgccggagtttgcatcctccgccgcgattgtgccacgcttccggtcagtgaccacgtcgccgtgaactatgatcattacccagtgactgtcgtggcttctcatcccgtgaactgccacgaatcaccatgccggtgactcacttcttctccggccgccaccgcgccatcctcaat

SEQ ID NO: 137566 - DNA, 648 bp, Zea Mays
tccgacccgatgcagacccgcacacaaaacactcaggtcgcaccgtacatggccggaccatcagggtacaaccccgaacaattcggccccatcacggaccgtccggcgcatcacgccggaccgtccggatatgttgcggaccatccgccatcttacgtcggaccgtccggatatggcatgaaccggccgacgtattacgccagaccatccgactctacacgagtccacgtgcagactgcccaagtcgcgccatatatgaccgatccgtccaggtacagccctggaccattcggaccgattgcggaccatccagttctttacgacagacagtctgggtacgagactacccacgtagcaccttatacggctggacattccggatataccttcggaccgtttggccaggtcgtggaccatccggcctcttacgccggaccgtccggatatgcgtacgcagagccgagagctgcgcaatatgcacagtttccacattcatcacagcaacattatggtgccccaccagcaacacattgtaatcataccataccacctcatggacatagggctgaatactgttcggccacaagagagcctgagaggtatagggcaggagctggtgacattaataggacacctaacacacacctc

SEQ ID NO: 137567 - DNA, 385 bp, Zea Mays
ttccactactagggttacacgtgacggagaagaaaccgaaactgctgaaactgctccaatttccgaagtgatgaaacggtcggggctagtagtgtcagaagatgtttctgacgaaggtgcacctgctactgaggctgagcaggttggtgctgaggaagatgaatctgaagatgattatagtgccgtgccatctaaacccagccacctggaatttgggaggtccaccattaccgaagacgatatgcctaagttgatgaaattaggctatttcagtgaggccaaaaaggagcttattcgctttggcggagaggaaattattccgaagccggaaaaggatgaggtggtagtctttaaaagcttcttcaaagcaggattaagatttcct

SEQ ID NO: 137568 - DNA, 763 bp, Zea Mays
ggcagcctttgtgaatattttgaaactcacgttcagaagacatataggtctatactgttctatcctaattgcctcacttaatttcggaagcaaaattattgttccaaaattcaagctgtgcaacggaagacagcccttactaaagtcttcgaacagagccatcaaatcatccttgatggtttcccagaagatttgataaaattctgtcgaaaaaccatccggccctggagctttgttgtgctccatctgaaaaattgcaccctttacctcttccatggtaaaaccagcagtaagactatcattctcctcatccgatatttgaggaatatcatctattcgctcatcattaagatgaaaattggaatcctcagccggcccgaacaggtttttgtaataagaagtgatgtgtttcttaagctcaacatccccacttattactctgtccccatccagcaatttatagattctcgtcttcctgtgtttaccattagccaccaaatgaaagtatttcgtatttgcatccccttccaataaaccttttgttttcgctctttggtaccatttaacttcttcttctctcaacatcgcagctaatctgttacggagaaagtttctcatgtctacctcttgagtggagagaagacctgtttccgctttcttgtctaagatatcaagtcgacccaacacctctttcttttcttttttattggatccactcgtattcttagcccaaccccgcaaatattgcctcagtttcctcagc

SEQ ID NO: 137569 - DNA, 483 bp, Zea Mays
ccgaccatggacggcggagcagcggctccgatgagcttgtaccggccggaaattgcaacgaccgacgctctggtgtggctaacacctaattctatccctaacgaccataacccctcactaaattactgagttctagctcacaatcactctgtccacggtggcgattgaaatcggagataactcaacgtgttctgggtgattcaagatggtctagttcaatcggatggttctgtgagcaataggggacatgagggaggctagaacatcccacagaagagcatgagctaacctgtagacgtctggccacggcgagctcactcacggcagagttttgactgatttgggggaacttcaaaattggagcgctctagtggacaatctgaggcacgggctagtgcgttgggtgtgtaattacttagcagagctcactggggtggcaatttataggttccatcggcgtggcggctaattttgagaatacgc

SEQ ID NO: 137570 - DNA, 377 bp, Zea Mays
ggggcagcatcagctggttgggggtgctagtttagagatgcgccgtgggaggaagtctgattatcttgaaatccctctcaaggacagtattaagggatggcgcttggagtggtttgtcgttgagaaccacggaaattctctccccccacggtcggggagacagccggacgttcgtaccccgagttggaccgagtcccccacagatcaggaggtgactgaggctggggctttgctagctgaagttggactactgaaggagaggggtctaactgcagaggctatggttgctgattttgttttcaagaacattcagccgttgaaggacagggcttacccggcttatctatacagaggcctagctgactcgactcgggtta

SEQ ID NO: 137571 - DNA, 437 bp, Zea Mays
gcgacatgtgttcttctatggtagtagcgcgtgcgagtacgacaacctaggcccagactgtgaatccaacccactacggtcgtgcctactctcccgcactgaccttcaccgtcggtcttgatctgagagtgttcgttcactaagtatgttataaaaatcgtgtttctcatggagggggaaccctagcttcattttcattctcctctagttgtgttccatctttgttcttttgttctacttctctatgaggttcaagagaatgacgtgacagcgacatcgtgggcctctgactggcacgtgtgctcctctttgggtgcacaccatcatcaagagatcccactatggtgtcatgggaagacaaagccaggtctccactctgaagctcgccatcgactatgactctaaagttgtgtcctctaccctgctcatccttcttc

SEQ ID NO: 137572 - DNA, 458 bp, Zea Mays
caaggacactcggagtgctgttgcgggtgatccgccctcgatgtggcttcggacctccacacgagtcctattcgtggtaagcccaccatctaactcgtgatcacctccacattgttttgcatcagtgcttgtcgtgaatcggtcgccagggggaaatcgattttgcctctccggcgaggggcgccgccgtgctcgggttcacgggcgtggagtgtgctcgtagggggagaagctcgggtgtcgtccgtcttgagataaacggtcacggttaggcaggcagctcgaggagaaaggagtgggcgcgaccgtgggatctcagaattgcggctccgatccgatctggcgatggttgatcggtggccgttgatttgcggatgaacgcgcgggattagaacaacttaccccttcgcctcattaattaacgaccgtagatcgcgaatccgacgactacgatcgcg

SEQ ID NO: 137573 - DNA, 585 bp, Zea Mays
gataaaaccacataagaaccaacaggtgcaccatgcaaacatatgggtaaggctcaagattagatagtaattaatgcatcaaagagtaaagtagtgaatacagtaaaataacaactcttaatctcggtgttaattcatccattttatgttcataccagggaagtctctaccaggtttacaaattgcttgataataggtgatcgcaagagccagtgaaatgagggggaacataacagaatagctacctagcactgccacattgtgagatcaaatgcaagatgatgatgttgatatgataaagcttaatcaacattggacatcggtaaattgagaccctctgttcgattgcgcatgatgtggtggaagacctctcggacatgtctctagctggtgtagcccgtccttcgtggcggagcagacctcagcgagctagcctgcagcctcccgcacctcagcttcccgctcgccggtgagtgggactgacgacctaactctaccataatagttcagtggattgtacttagcctggtgctgtcaatgcctgctatcgacttacagacttacaaggaaataatcattgacttc

SEQ ID NO: 137574 - DNA, 617 bp, Zea Mays
acgttggtgatggtgaggggcgtgtctgttaggtgcgagctgaaggtggtggtgagggagaaagatcgagagatgctggacatgaggtcgaacacatcgctatcccaggcggtcacaacgccccctggaacaagtggcgttgaggcagaggaagctgggaaggtttttaggcagaaatgagcgtgctttgaaacagttgagctcgcaaagtttggactcttgtaggcaagcaacagagggggaggcaagggagatagcatcacgaacgattgtgcatttatccggatcgcctaacccacggacgttccacgatagcacattacaacttttacaaactagactcatgaccaaacaaacagaacaccaaaggagcacacgacgacaacggtagaggggcacacacaacactgacctaaggagcacaaagataggcacgacctgacagcagacttagagagacaacaggttgacattacagaccatagaccgacaacagatcgactacagttgtgatgacagagagccccgccactgacagccaaggggagagaagcgatcattccgccataggaggcaccactccaatggagtttgcggcgttgcagcctagccccgca

SEQ ID NO: 137575 - DNA, 573 bp, Zea Mays
tcgtatccttcaaacaccggtaccacaacattatagtgcgcccaccaatatcacgaagtattcaggagaatcgaaccccaacctttggctgggaaattatcgactggcgtggcatgcaggaggagcgactcatgacgacttcataatccacaatctcccctgtacctagtagacttagcacgggcatgttggaaaacttgaggcccggttgcattcagaattgggccgaccttgaagaaaattttgtggggaacttccaaggcacatacgtccgccctggcaacctgtgggacctcaagaactatcgacaaaaacttgatgagaccttaaaggactacatctagcatttctcgtggcaatgcaacaaattggcaaaccttgccgacaccgatgtcatcagcgcctgcatttcgggaaccacgaacgaaactctgatgcacaaactggggcgcaagagcctatggaccacgaaggagctgttggacatcacaatgacccacccgtcaagggaagatgcagtgggagaaatttttagtcatagcaaggagaaggccaagcgcgacaaagagtacg

SEQ ID NO: 137576 - DNA, 289 bp, Zea Mays
gtcgccgtcgacccggattcaaatcttccatcggatgcgacgttcggggggcgatgagacgatcggtgtccgctccgatccacggctccgttgcttttgcgtgaacacaaccttcttcctgtcgggcacgcacgcacgttcttggggcgagaaatcgtggtcctggtggtggtcgcagtcgcgggagagggcttagggctgacgtggcgatgcttgcgcagccttgaagcaatgtgttaaccgccgcttatgctgaaaatttggcgaatataaacttgcaacttgcaag

SEQ ID NO: 137577 - DNA, 438 bp, Zea Mays
cgacgctttagtggaggggcacgcaaaaccgcggcccgtcttggggagcagcggccttacccccgcgcagcgcaaccccaatgagtggcgcgggcagccgctccggttctagaaccgcggcgcctcgaagctcctccttttcctcaacgatgagcgtgaggagcagtctcggaatgagctccatgagcatgtcgaggcggcgatgaggtcgcttcggttgaccatggaggtcctttccagggacgttcccagggtcttccaggtaaggatttgggcgtacaccttgcgtgaccagggcattctttgtaataccctgctttccttcctcaggaacttgcggatatgagcaccgccaagtcgttgttcatccgccgtgagagcggcgtctggggttcgctgcggtcctagaaggccgcgcttgccgaggctaatgaatgc

SEQ ID NO: 137578 - DNA, 373 bp, Zea Mays
ctagaggcgtgcgtggggtcgggtgtagcgctggtggccaactgggcggtgccggattggcggacagcgttcggggcgacgttgtagcatgcagacgcgcaggcgcgtggggcgaggatgggggcgtgtggctcgggctggacaggatcgtggaggtgctgcaaggattttgcaccaaagtttagctttagtaggcttagcatctccaagttacagtgacatacagggagagcgtatttgcattttctatatatgcctatcatgaatacactactttttacttgtagcaagagcattaataccttcctacatggttcttacaacaataagccagtaaggcatcaatggagactcagtacatgcaacaagaccc

SEQ ID NO: 137579 - DNA, 428 bp, Zea Mays
gtcgccgattttgtttttaagaacattcagccgctgaaggacagagcgtacccagcttatctgtatcgtggcattactgattcgacccgggttaccaatataaggattcctgctgtggacctggtaagccggcttgagatgattcttagaggcaaggtgtcgaatgttggtgctcctgttgcgtattcagcctggaatctgcctcctcccaaaacgttcatcagttttgtgtcaaatcctcctgctggggatagtggtttgggccttagagtgtggccctctcccgaggaggttgaggctttggttgcttcgcttagtggaatctcgaatgacgagaggcaggttcactttgagatgcctactagcccgagcgacgcagaaataagtgccatgctggatatgttggctgaggattcctctgatttggc

SEQ ID NO: 137580 - DNA, 533 bp, Zea Mays
cctctagaacataatgctcctggaatgccaacttgaactcatcccaggtaatttgatgtccagcaggctggattgctgagaaatttgcccaccaggtgctggcaggccctcttagctattgtgcgtcaaacagtggcttttgcgtctctgtgcatcgaattaacccaaacttttgttccataactctcacccattagtcagcttctaaaggttcttctgctttgatgaagagcgggggtcgagtctcaaagaattccaaataagtagtatcacacggtccttgaggaggagctcttcctctatgcggttggaactgattgcccaccatttcgcgtaagaagcacgtattatcagcggtggcattgaccagggcagcgatagcctcggtcaaagtcggtggtactggtggcgggttgggagtagcctccctcccacaggaagtccccgcaccatcatgtgcgcgagtccgtgatggcatctaaggcaaagaaacatttggaaaaaatataacatgccaacatacaccatcatat

SEQ ID NO: 137581 - DNA, 528 bp, Zea Mays
gtgaaaccgtctgtccagacgcgtctcgtgctggaggctatggcgactgtggagcagaagggagaagataagtgggaacagatgatgaagatgatggatcgagtggtgaagaagttggatacggtggaagctggacaacatcggctggaaggacaagccgagctctcagctacgatggcaaggaaggcagaagaagagtgtactatattggcaaggcagatggaggagacgggcaaggtggtggcgcagttgtgtttggagatgatggcaaaggacttggagggcgatggtgctggatcatcaagggagggtgctgatcaaggtgatccaaatcgaagaagtagagaaccacaacaggagagagtaagagatgaagaagatcaggtgatgggagggcgaggatatccatctctgcctagatattcgtttcccagatttcaagggaaggaacctggaatatggttagccaagtgccaagactacttcaccatttatcaggttcctgaagctctgtgggcaatatcacca

SEQ ID NO: 137582 - DNA, 344 bp, Zea Mays
ggcgtgtgggccaaattacctgagttcggaccatttccccttttctccgcgttcgcgcggcccatgcgggtgctggtgcgccaactattgggactctaaagtcagtcgtctgggatcgctgctgagcagggcccacatggttatctcacccacgactttctactccttagcctcccggtcatgcggcgctcgtcgatggctggtggggctgcaccgtcagccacgttcccccttctccgcaacaacccgcgcatggaccgccaccatcgccgatgaacgtaggtgccctcctcccttttcccaaaccaagaccctaggatataaattggagctcctgcgactcg

SEQ ID NO: 137583 - DNA, 507 bp, Zea Mays
tgagcttcgccttgacgtccgcaacccgggacacgccccaatttcccctctccctccctaatttcctctgcccgcgctcatccgccgtcctctacgcagtcgccgtggtccgccaccgtcgacccgggctatcgccgcgccttcgccgccaccgaggagtccccggggttcgccttgaggtaaggaacctcccctgccctctcccttcctttctattgccccctgctgcgcttaattcctcgccagagtcgattagcgccgcccgcccgagccacttcgtcatggaccaccccctccggtgcccctgtcccgacctagcccccaccagaagattccccgcgccttccccaacctccccggccatcccggtcgccctaaggacctgcagagcccccgcgccccttgtctccggcgagttccccgccgcgggaacgggcgccgccgcctctgctagccggaggggaggacagaagccagccgccagatctccgccgtccatcttagatc

SEQ ID NO: 137584 - DNA, 403 bp, Zea Mays
ctcgatgccataggctacggcgccaagataacacagctcgacgtcatagcctatgacgagctctaacgtgacggtggcggctcgcggcgactagagttggcgtggcgtcaacgctgcatcctagcttggctccacagatattggcgccgagctagaaagttctataaatcggctgttctactggccgagaggtgtgccctcctcatttctcaacttttcctccattcaaatcttcttcaaaagcgaccaaattcgagttggaatagtttatatgatgactacattttatttgatagtttgtgaaatccgagtatacagtttattaggtacttgtgttaatatataatcgtttcttagatgaaagacatgtaccgggaggcgttgtggcagaagagaggtcgtc

SEQ ID NO: 137585 - DNA, 576 bp, Zea Mays
cgagccaagtcatccccggcgacatcctcgggggttgggcatgtgtcaacaccaccctgggggtccaggttctctgcggtagccacttctaaggctgatgggccctcagttacttccatgggaccagaacgatccaattcagtctctcgaccctcgagatcgcgctccaaggtcgacgaggcatgggatgacctcaacccaacatcaagcacatcagcacaaacctccatcacaccatcatccactggctccgataacaaatcctctggaaccatatcctcaagagtctgatcaaaattggccagggacagttcttgcaggccaatgagagcagacaaagcaggagaagggactccactactttcaccaccagcaatgaactgccgactatttttccgagtcaaaggaacttcatcttcttcctcctcgtcatccactttagcaacacaggcagcacacccattgggttcaacaacagatggagcacccacattgggatcaacaacagatggagcacccacattgggatcaacagcagactgggtacacccattggggtcagcatcagtaaattca

SEQ ID NO: 137586 - DNA, 407 bp, Zea Mays
tacccacgacaccagcatgtttaacggatttgacaaacttatgcttcagtttagcagaagaggagccccagtcactgaccttatgatcctttgccttctctctaagctcatcgtagtgaagctcatctataacatcctctgcctcctcaactgcatccctgaactgccacagccaaagatcaagggcagagctttgttccttgatgtattcagggtcaacgatatcaaatacaacctggaccttcttcactgactgcagcaccctacccttgacatcttccaagccatcagccttccagtagtcagtcaggcaggtgaaagctttgttgatccaaaaggagatggttgcatttgccaccgagctcccggccaacttcccagcgaacatgattgtggcggcggcggcc

SEQ ID NO: 137587 - DNA, 737 bp, Zea Mays
aaagaattcccgacttccttgaccgacgatccggaagcaattgcgacaacaaggataacgtgaactttggagaacttcccaagaatatcacctccctacccgacgatgcctacaataacactgtcttccaaaaaaggatataactgcgcgatactgagataaccaatccatatccaagataacatcgaatgcccccaaggaaatcacaacaagattggccaaaaagacctcatcagcaagaatgacggaacacccctgacaaactgaacaactactaatggagccattagcagaactaaccaaaattgggtgacccaacctctgcaccgaaagaccagtctgcgacacaaaattctccgaaacaaatgaatagctagcgccagagtcaaaaagagcatgggccacaaacgaatcaactgagatcgtacctgtcaccatgtctccttgctctctgccatctgcagagggtagcacataagctccggaaatacccacagaagaggaagctcccagggtgaagttaacaaaagaaccccactgagtcgtcgggtgaggtagacgcggagctccaaactgagacggcatgggagtagtcggtgtaggagtaggcgtagccagatactaaggaaaaccctgcattggcacgaactgagaaggcccaggaacatagaactgctgcggagggagtggaactgaaaattgctgctctgcgcttgacatcatgttgacagtgccct

SEQ ID NO: 137588 - DNA, 487 bp, Zea Mays
caaattttcactcagttctgtgcgaaaagaatatgatgatgtttagtgttcctgaactgaaactgaaaggtcggtctttgactgtagcgttactgtactcgaaccacctgttccctgttctctcttggaggctccagaaggtgccaaactcttgcaggatagcagccgtttggaagaaacgcacaaacgtggacgcggcacgccactgcacagtgcagaccagtacgccagacagagacccatgagaccatctctaaccgtttccctcacttttctctccacatctatactttctattatattttactatatcacctaaaaaatactcaccaagcaccaacaattcaccttatacagctccccctatatactataatttatttatttgacattttttcatcagtttttaaagtttaaaaaaaatcataaactgatcgtaatatcataatatacattgttacctaattacattactttaaaaaaatta

SEQ ID NO: 137589 - DNA, 389 bp, Zea Mays
gctggattccaaaggtaaaaaccaagtcagtctctttcgctgacccattaatctctgttgtttggcccccagctgctatggaagagctggaaggtggaaaaggtgttattttggctgatgattggaatcctggcgaccagacagcacaacagcctcagcttgctgctcctaccaaggttcgcgttgccgagcatttaagtttctcagatgttgtgttaagccctaaatctatagagattgcatatcctaatcctgttacaactatgagtactttgcaacttatagacacaacttgggtggcagcagccccaaattcaataaatcagctgttggatgtagaacctcaagcacttccacattcaaaccttaattgtgcatctgtcatgccg

SEQ ID NO: 137590 - DNA, 312 bp, Zea Mays
gagagatggaagaggttgccgtaggcacacagcaaggaaagtgagctcattgcctcagcggagaagaaaataggaggtaaaagctggaggatgactgctgaatgtccattgaacggctcaaaatatcgggtggtagttgtaaacccccttgtcgagagatacacacacaccaaaatgagtgtacttgcttgcactagagcccgtcagcctggtccggggcaggacagacaccacacgtccttcttgtaagaggatcggatgccaaaaaccatgtggaaatcggagacgtactgcccgagcagccacctcccc

SEQ ID NO: 137591 - DNA, 802 bp, Zea Mays
ctccaagacgtggaatcaagatgggcacaggcaattcctcgccgtcgctgggataaccgccgtcgtgttaccctcacagtgcgtagggagctccacgccacactaagccggtactactccctccccacgtttctctttccgcctcgcatcgcgtagcagtgtttggatcgggttttagagtgtcgggggtcaggaattggatgtctccggcaaggtccgtcacgtggaggggcagcgccaccgtgtttggggtttaaacgagtgtgaggtctccagaccgttggatcaggcatagacgatcgtgattagggcgggcgcagctgatgggttgcattgagactgggtcgtagatctatgatcctacagctatcatggcacgctgatccttagatctaggaacctaatcccaagcgttgagccagatccaacggcgggggttacccgataccccttcgctatgccattttattgaaaagccccttagtttctagtgaatcaatccacaatacatctcggaggtagactgagtctaggaaacttttgcgtagtcgcccctgtgttttctgattatggtgcgctcggtccagagaagcagaaaatcatattaaattcagttagaaaatactttttaatgtaaaaatagttgtagaaacttgtttaattcctaggaaattaattctagttcctataattttgtattaatattgtctatcacttagtaccactcttttaacacgaaacccatattagaatttaccacttaattaatgttgtaccaaacacataaatacttcgaatttag

SEQ ID NO: 137592 - DNA, 459 bp, Zea Mays
aaaatttcaaataagttgtattgtcctagtgttttgcaaataagaccctcaatagggcacttaaccctaaagggggattaaaggggtaaaacataacccaaattgagaaaacctaaaagctttaaggaaaaggtcataaaatgatcccaagaataaagttgaattgcatttatacccctggggtaccaaaaaccctaattggaatcctagaaaaccctaaaaccaaaccctaggggcttatgtgcaaaattagtccacttttggactaaagtgcaaaaaccaagttaaataagtatcttaagtcaattgggtcactcatatgtgaatttacaagccaaaccctaagttttggattcatttgcaaaaaggtccctaattgagatttcattctaagtctgaattttagtgttaagggctcaacttttgagctttgtaactttcaaatactagggtttttgc

SEQ ID NO: 137593 - DNA, 519 bp, Zea Mays
ttttttttctttttttttttcaaaacgctcggggtccctcccgtctcgcgtggttggacgtaacgtaactgcttgcgattcttcctcttgttctcgtcgtggtggactggcgctagtggtcgttgctgtcatgtcatgcatggcgccttcgtcgattcggttcttgctcgtgtgcttgcgtttctctggtctggtgtcaaacatttggtttgatcgacctatcgtctaggaactaactactcctggttttggtttctgtgtttggtgcgcgtacgtacttcaatatttaacgatggggttgaaaagtatgagacagtgatggtacccgatgaactagaaacaaacaatctgtaatgtccggttgtgattcatagtctacagcccatgttttctggagagaaaaaacatcacatgcataccattgatcttccagaaagtccggcgtctcttcatctcccatggaatcccagcaagtctggttataacttgtatgcccactccattctccgtctctcgatc

SEQ ID NO: 137594 - DNA, 478 bp, Zea Mays
aggggtagaacagcaggaagcgtttgatctcatcagaaagtatttgtcttcggctcccgcattaaaagcgccacaggtaggagtaccgttcagattatacattatagctgaagataaggttattggagctgttctgacgtaagagaccggaggaaaggagcatgtggtaacctacctaagttggaggctggtggatgctgaaatgaggtacacttttatcgagaagttatgcttatgcctgttttatacatgcaccaagtgtagatgttattttctgtctagtcattgcaccgttgccggtcaaactgatgtgatcaaatacatgttgcaaaacccgattatgagtggtagaattggtaaatgggattatgcactcatagaatatgacttgacctatgaaccattgaaatctatgaaaggccaggtcgtagcagattttattttagaacatcggattgatgatactcatgaactagac

SEQ ID NO: 137595 - DNA, 509 bp, Zea Mays
aggcggggctggcgcgtagaatgggaagaatgagatggcggggtggtcctgcacttgcgatgggatgcgggccgatggtggtactgtgcgctggatgacgatgaggggattgggttgcgattccttccatggcggcgagacgtggattgcgtttggggcgagcagaatatgggcggggcatccgcggtgcatgagaagaacgattaggcaatgagtggtcctgcgcgtcgtcggcaatgggattcctgcgtgctggattgctgcgaggcgtcgatagcggcgaggggatgtgcttccttctatggtgattttttccttccatggctgaggcattaatcggtgaggggattgcggcgaggaccatgcggatgcaggggtagaggagagagggcgcgcacggggaagaaaagagacactaacatgtgggtcgtatgcgccgtgaggaggcagaaccgtgcaccacggtctacgttaggttcttatagagtagcagagaaaattattcaata

SEQ ID NO: 137596 - DNA, 816 bp, Zea Mays
attctgttaagaaaggttgctctgttcttaacaaaaatccagagataaagagggaagaaggtagtcggttcagacaagaactgaagatcaagcactgacaaatatctgatgaacgcgataagattagcggcactgtggaattggatgagcttggatgaatcggtggggaattaatctgggatggataacttcaaacgtggcacaattccatgaatccagtcgagcgtggccggagttagtcaccggcggccaccgtgactcagttgatttttgccgcggtgtcatccatgcctcgatctccctcactgtgtctcttccctacgtggtaagcatgcgctaacgaagttatccatggccggagattgctagccggaccgccgtggctataaatagcactatgaactacggcgagggatgcacacctccactcagtgagatgatccaagcccaaattcgcagcctctgcccccctcctcccaaattgattgcgcacggtgaaactacagtctcttacggccatatagcccaaatctccacccccaatttcacccagagccgccgtgacaccattttcccccttttctctgtcaccagcaagccaaagttctccgcgccccgtggctagcccactctggtaaggctctgcgcctctcgaatgtcgttttagtagcttagtgtgcctaggaagctcatcgtggcaaccgtttggtcaattcggccatgattgagcgggaacgcgagcttgatgtcacggtctccgccgtgcacatgggcagaccattctcaaagtgttcaagccgaaattaacaagtgttc

SEQ ID NO: 137597 - DNA, 655 bp, Zea Mays
ggtgtgcgtgggtgagcgctagtgcgcgctctagcatctgggcacggtgttgagcacgaggcagtgcagagagaggtcatgttcaagcgcggattggctccaaatctttgagattatggccatgatcccgttgagagatctcttcccctgacattcctttgtcgtttgtgtgtggaggttatgggtttcgctgactggatcaagagatatggaggggtgaagttgggtctgtctcactgctgaactccgagagaagatctcgggtttgacgtgtctagggcacgcatcccgatgccatcttcacacacattgcagaggggttagtttagaacaaaattgtcaatgggggcttaaggatttgagctagggtcaaggtgaacgcgctcaagctctaggtgaaggctgaaattcagaaatctgaatttcagattccccctagggagctttcacttggagggcctttttggggtttttaataaactattttggccaaacttttataacagttgttgtagtttagttagtgtatttcaactttgataattggcctaagccatgattccatgtttttcatggtctttttacccatttcttcttttctacttaagtggttcaattagggttgatctagggtttcaaaatttttccctttttg

SEQ ID NO: 137598 - DNA, 432 bp, Zea Mays
cacgcatttacgcgcgcgtactgcagagccccgcatgcaagctgtcctcaacaacatccaggttggcatcctctctcctccgtccctccccttcgccgcactagccgacgcgtccacctcggctatatatacacgcgagccccggacacgccgcctcgcttactcatctcaacttctccaccagtcaagtccaccagccagcagctcgccggctgcctcgctcctgctctgcactgcactagtcgccgctcgagctacccggctgtagcaactagcaagattcgttgggtccgtgaacgtgcagacgcaacacgctagactgtctagacacacattatcagattcgttctgcagtacaataatgggagcctgcaactcgtgcgaggccacggcggtggcggcggcgccggggccggcgacggcggaggcgag

SEQ ID NO: 137599 - DNA, 326 bp, Zea Mays
gcctctgttgaaactgatccatgtcatcttcgtcgtcgacaactggaggcaatacctcagacatgtccactctcggccaatcaccaggaggaataaccttcacagaaatgggataaaccaaggtgcgagggacaatggttgcatcttccccaacaacaagaggttcctgaacatgaagatctaataccgctggcaggccatccggagagaaacaccacgctctgagcttgagaacagacatatccacactgtccactgaatctgggtgaagtccctgaaccatgcacagaccatccaataggagctcagcggttccaacccccaga

SEQ ID NO: 137600 - DNA, 645 bp, Zea Mays
tgttgattagtttccgttgttgtgatctgttgaacaaactataggttaggtgagttatcagattcttagatctgtcctgtacgtctgatctctaccatgttacaaacatctgaaacttaataatagtcactactacattcacatctgcaattgctggtatgaccaggatccgtccaccctcattatcgacgatgaagcgacacccaattctaggcgcggacgaacgatggcgccctcgtgcgggatatcgggctgagtgatgagacactgatgttattggggtttcaggcgcgcctgaccgctcccactcctaggcccaacatgtctctccgacgctacctaccggtgccggtgaaacgcaaacttaaaatcgtgcattgcaagatgttgccttctctttatgtctcctctactctacgcctatgagctttctttgtttctaactttttctgtggtttcgctttcagcaagctcaagcggtcaacagatcaacttagacgaaatgcggatgcattggaaatattgaggaagaccagattccctcatgttcatggagcaggtgaaaagaagtcaccagagacaattctggatcatgagactatgagaggactttggcaacaaatgttcagtttgggtttctctggg

SEQ ID NO: 137601 - DNA, 477 bp, Zea Mays
aaaagatgaaggcacagaagagccagtggtataagtacaataaaaatggagttacatcaaggcttacacgcggtgaagaagaggatattgccaagggtgagataagtaaaacaccactctcaaattgagatagaagactgaagattttagataacagacataatataatcacaaggcaggatagagtgatgagaagggtaacggaaataacaaacagaaacacaacaaaggatagagtttaaaactcgcaggtgacaaagaagaggatacgaccaagggaaaagtaggtaaagtacgatgctcaaattgagatggaaagggagaagattttaaatgccggtataagataaacctcaagtaagatatagaggtgtctaaggtgaaggtgataataacaaaagtcgtgacaaatgatagagttaaggcaagactcgcgtagtggcgaagtggagaaaacaatcaagggtaagatatgta

SEQ ID NO: 137602 - DNA, 271 bp, Zea Mays
tgatctcaaagatgaagtaaaccatgtaaggcaacttaacgaggactatcggattctagtagcaaactgctataccctcgtcaacaggtgctaaaatgaattgataaagacctttgcttctaccagagctacctcttgagaaaagaactttgcagatggtgatctagaagggttgatgcggtgggcactgagtgtaactcgcgcttacaaaaacgttctttcggcgcgcgaggactactttgcatagataggcgcccaaagcactggttcg

SEQ ID NO: 137603 - DNA, 827 bp, Zea Mays
taaacatgctcaaggtagcagtgccacttgcaagaacaaaacaggtagaacctgctactagctggaccatcttgctccctagtactgctgaacaacagctgccaccaacctagtaactgaagataatgtaattccaaactcaaatgacagaatgtcgacaggataaaaaggaaaaaaatcaaagaatgtcagattacatgaactgcaagtacatttcttgaaagtacggttcaactagcatactgtttgctggaagatcgaacaaaacatgacgaccatcactgcctccataggaggatgcaactggatcagactcaaatctggcaacttggatagtatgtcgcaagggcctccactgctgcgccactgcggaaggctgtcgccgatgcagaccacctcccgcaaggcctggcagtgacagcgtgattaggctgacagatttgtagcggcaggaatacatctcagccaccgacatgccctccacctccaggctccaacgtagccgaatctctccctctgccaccaccgcttcctacctccgccaccaaaacaacgtacgcagcaggaaaaaacgcgcgcgggtgcccagattggggaagaaaggtgcacgcgaaaatataaggcaagggaggagctcgatgcgggtcgccaatattttggggtgaagaagaggcgtctgttggatcagaaaaaaaggattttttcctaatatcgattttcaggttggtttaagggttcttctggagatgctctgagcccgtgatcagatgtaaccaccacagacgaaataactggaactttgccacacgaaacgttctcgatttgcg

SEQ ID NO: 137604 - DNA, 643 bp, Zea Mays
aagttctataccatctttttagtcactacagtgaattttcctaaaaaacaatacaatgaatttgcaagttggaaaacaacgttggtgtttgactaagaactaacaagtggcctagcacccacttttcatcctcacatttgatttattttcaaactgacacttctcttttcactttacagtggttcagcatttagcgttccatttgacgctaacaagtgacatatcacattcttatctgtacccttttatgtcccagttgcccaagcagcatatccagtctaaagtatctaaaatggtgaaactgttcttcgtcagttgtgtttgcataattttttataattacatcaccgatgtgtataacctagttgtacttctcaaatcatcacatgcagtgactataagttacaccaaaatcattttctgaggtatagactatagatcacttgttagtatggttcatttaaccttactgttgtgcacaagcaaattgcttgacaaatgacgatacttgatgcctctcgcaacctattaggatcatgcctggttttaaatattatggtccatgcaggcgaatgtttttcatattttaagttatcatttcctcacttgcatagtaaatgagaatgtcaactttagcactatt

SEQ ID NO: 137605 - DNA, 654 bp, Zea Mays
ccgacgtacacgaggcggcgctagtcttcttcgcggcggagcgccgtcggcaaggcgtcacaacggcccccagagcatcgaatcaagcgctatcaggtgcgaaaggggtggggaacttcgttaagcctaatagggtgattctttccgagatctcgcccgttaatccccacatcaacgatcacacttcttccacctcacagcctccctcctaccgacgtacacgaggcggcgctagtcttcttcgcggcggagcgccgtcggcaaggcgtcacaacggcccccagagcatcgaatcaagcgctatcaggtgcgaaaggggtggggaacttcgttaagcctaatagggtgattctttccgaggttcatgcaataggcaacccggcccgctgtgtgcggtggcgccattgaagtccggcgagcaatttctccatcaccaatcaatccccgcacccagctgccacattcatgtgctcaatgtgctcgggcgaacatccgggcctacttcacaccgacgaacgggcggtgatgtgccccgcccacgtcacggcgcggcttcacgaaggattccaaccatggattgccacccaagcaagctcacccatgatcctgactccatgggtaagagtaccggggggcgaacgtccttcatcgccc

SEQ ID NO: 137606 - DNA, 743 bp, Zea Mays
gtgcagcgccagctcggatttaggacttgctgatccccatgagctccagggtctcgacatagatgacattgaggcttctgcctccatccatgaatactttggtgagtatggtgttaccgatgacagggtcgacgatgactaggtactttcttgggttcgggatgtagtctaggtggtcgtcttggtcgaaggtggtgactttgttagaccggtctaggtagaccgcgcgctgctacttcgaccgagaagacttcccggtgttcttgtttccgttgtctcactgagaggttcactattggtccaccaaagatcatgaagcagttgtggacatctgagaactcctcgtccttgtagtcgcccttgtcactagggccctcttattgttgtcgcccaccgaggggttgggtttgttgaagtagtgtcagagtaggtcacactcctcgagggtgtgcttgattgggcccttgtgataggggcacgcttccttgagcatcttatcgaagacattgagacccctagggggcctcgaagatttatttggtatgtagcgatgacaagatcagtcttgagtacttcgtgcttctcccgcggcactttcttcttgttgttcttcttggagttgtgttgggtggacgcctcgggggcgtcctccttccgcttccccttatccttgtccttgtggaaaatggcctcgacggcttgttgccctgaagcgaacttggtggcaatgtccatcaacttgc

SEQ ID NO: 137607 - DNA, 548 bp, Zea Mays
gcgggaggttttgtttcgctgcgtggccatgtgtggtcgtaatcatccaaggaagacgcccgcgccttctattggtgtcgtgcgtcggtgtggagggcgaattgctcgccgccgtgtcaactgcgggcgattttccgcttcgtgccgtggtaggcttctccgccgtggccgtctgccgtaaggtaccttctacatgatcgcctcgtcctcaatttcgttttgcgcatgaagtcaaccgcatccagtagccggaacggtggaattcgggtggccggcgaagagctccgccgagcggaggtgtctctgcgcgcgccgccgggggggagctggctgctggcgtaggattgatgacggaccgatggtcgttggatgggaaaggagcgcccgagattagatcgtgtgaaccgttgattcctaacccttggatcataatcggacgataggcgcgtagctctgtattcattaaaccgcggccgttgatcttggatccggtgatcagaatggatgcgggttattagccggcccagatctaatctggtccgtccatt

SEQ ID NO: 137608 - DNA, 824 bp, Zea Mays
ggcacaagaaatcctgctagatgaagcccaccatttagcctattctatccatctagggtctaccaagatgtacctagacctcaaaaccacatactgatggaaagggatgaaaaaggagatagctcaacatgtagctcggtgtgatacttgtcaacagactaaggtagagcatcaaaagcctgatatcaaggtatcccacttcataccagtaaagactacttacggaggagccaccctcgcccggttgtacctcaaagaaatagtcagactgcacgacattccgtgaagaatagtgtcagacagaggaacacagttcacctcaaaattttagttgagtcttcagcaagccatgggcaccaagctaagttttggcacctcctaccacccccagtcagattggcagacagaaagagtcaataaaatccttgaagatttgttgagagctagtgtgctgaccttcgacagagattgggaatccactttgtcgtatgtagagttctcttatagcaatagttaccaagccagcatcaaattgtcaccttttgaagctttatatgggaggagatgctagatccctctgatgtggtcaaacgtgggagaaaagaccctagaagggcctgccttcatccaagaggcagaagagaaagttgctctgattcgcaaaagactcctcgaagcccagagtcggcagaagagctatgctgacaacagaaggagagaactcagtttccaagaaggtgattttgtctatctcaaggtttctccaatgaaaggggttcggaggttccaagcgaaaggaaagttagctccacgctacgttggcc

SEQ ID NO: 137609 - DNA, 391 bp, Zea Mays
ggccatgcagttgtccaaatgtttttatttttggattatgttggtgatacggcagggttgtggtaatggtggtccgtagcaatctgttgtcacggcccctaccaggcagtggcatcgggccgttgcctaaatgggcgtctgtcttatgcatggcccactgttttaggtcacgctagtctagaaagcacggctaaattagtaggctgggccggtccatagcccggtaatcctagatctaccacatcatctatattcagtgttctgttttcaaatctcaattcaaatatggaaattacaggtaggctaccaatcgccatcgtctcttctcaataatcctgctcgtcaaattaaaggaaaaaagcagtcttttaaaatttccggctaccaatcg

SEQ ID NO: 137610 - DNA, 624 bp, Zea Mays
accttcttcttccctcccatccttgtcggtatgtcgcttcccgtcggcacctcctcccttccatcccctccttccccctgtaccacacatggtcaacagttgccacctcccctgcgccctctccggttgcctgcgcgggagcacgcacggatccctcgactcacgtggctcccttaggcgtagccgtgtaggccctctccaccccgatggcgccatcctcgccttcttcaacaataacactgaaaaccccatagccgtggctggcccagacacaacctccaccacagtctcgttgagtcaagtgcggacctagccaccgcagtcgcccctggccgaggcgcgagtgtgcatctcccacccacaacagcacgcctgccccttcccctgtggccctaggcgtcgtagcagccatcgtctggcttcccccggccgttgttgcccccttctcagacttcgcaccgcccactgttgcagcagcatggtcccaccctgctccgacactccctcacgtctccattgatcccccacaggtggtgcctacatcccctgacgttgtcactgctaaatccaccttggttgcggccctcactgctactgagcatctccaagagctccctagaaaat

SEQ ID NO: 137611 - DNA, 445 bp, Zea Mays
ggacgccttcgtcttgacgatgaaagggccctcccactttggctctagcttgccccgggactctgtccgagctgtccagacgagtacaaggtctccttcgctgaattccctcgggatgactgtgtggtcgcgccatgcttttgtttgagcttggtatttgtttagagcctgtagggcgaagacgcggtctccgtcgatgaggtctttcgaagtaggctcgtctacgtcggggacggctgacgtgactgtccgtggtgacccatgttttatttattgcggggtcatggcctccgatccatatagaaggcggaaaggggtgaacccagtcgccctgcactcagtcgtgttcagcgcccagaccgcttcaggtaacaggtcggcccacttgcctttcttgtcgtcgaggagcattttcttgacggctgtgaaaattttaccattggcg

SEQ ID NO: 137612 - DNA, 390 bp, Zea Mays
gttcccaggttgtcattgacatagcataagaaacatcaacaacgacacctgattgttctaccgtcattaccatagtatacacacataactctagatgaagtttatggaaatattgtatacataatatcttacataactaaactagactacatctatgagaacttgaatctttgatgtctgcaaggagcgagatggctttgttcttgcgatggaatgtgatgtagtatagtgcaagagaccgtagatccctggtgttgtcctgcaagccaataaaattgtgttagctagacatgagtaccgtatgctgacttggggccaaatataaaacgaaatgacaaatttgtacatactggttgtatgtatgacttgacagatgcttcgatgcagtca

SEQ ID NO: 137613 - DNA, 442 bp, Zea Mays
ggtgttttagctacaaaccaaccactactagaactatgtagtaggaggttgtttgaagtgaactagagatagtgcttgtatttgctattaggtttacctgatatactaccttttttctctagtgaattatgctatgtagaagaatttttttagactatcaacttccatctagccatctcgatccttccaagcgaacacatgctggtgtcttttcccacattagtcaagcccacaacgatgacacctaggggtatacccatgtttggtcgagcgaggcacagacctccaccgaattttcttggtttagtggactttttatctcatctactatacctacaaatccattagttagccggcctccgtttaggcctccactcagattttgggccctcgctcaaattttaggctaggtccgcctctaaagacatctagcccattggct

SEQ ID NO: 137614 - DNA, 459 bp, Zea Mays
gcgtatggtcagaaatatccctagagtgtgctaccaccgacgccttagggaagtgtagctcccattcagtagacactaggattcggtctagcttttcgtaggttgggttgaccctagaattggcccacgtaaattgtctattcaataactctagttccatgaggttcaatccgtctatgactgcgttaaacaagaacgaccacctcgggttaaagttgtcgttgtttttctcagatgacttcctgagaatattaaagtcaccaccaatcaaaactggcaccgttacccgacctaccatgttaaccatttctgccaaaaattcttcttttaagttatcttgcgcaggaccataaacacaaacaagcacccatttaaagccatcattcttatttcgcaaatcaaatttaacatagaagtcgccttcatctataactcctatatcgaaaaccgagagatcta

SEQ ID NO: 137615 - DNA, 349 bp, Zea Mays
tagacatgaacctcatcagtgtgggtagctagacgaggatgacaatgacatctgaatcaagaagggcatcatgaccatgcgtgaccagcagaggtgctaccggcatgtgcccgacactctaccaataggttgtacaacgtccacctcaatatcacacgtgttatgtgcctcaccatgcggcgggtcgacaaggtgtggtgctggcatgggagatacgaccacatcagcttccccgcgctacggagctggctagcgagacatcaaccatgttgatcaggtttgagaagggtgccttgccagtaagcagtgacgtcatttgttcccgacacaagcacgggagggctgcgac

SEQ ID NO: 137616 - DNA, 404 bp, Zea Mays
ctcgcatgcgacactccgcgcaaaagacgcctaagggtgcagccggaataagcacaccaagtgcgttaatcgaatacttttatcaaaaagacacttcgtgcaaaagacgcctaacggtgcagccggaacaagcacgccaagtgcgttaatcgaagtcttttataaaaaagacactccgtgcaaaagacgcctaagggtgcagccggaataagcacaacaagtgcgtgagtcgaagtcttttcttaaaaagacactccgtgcaaaagacgcctaagggtgcagccggaatagcacaacaagtgcgtcaatcgaagtcttttcttaaaaagacactccgtgcaaaagacgcctaagggtgcagccggaatagcgaagttttctattaaaagacactccgcgcaaaa

SEQ ID NO: 137617 - DNA, 3768 bp, Zea Mays
tggtttggcaatatgggtacagtgattcataattctgaaaataatgttgtggtaatatatacaacataagagtatcgaagttcccggtttctaagttctagatgtacaagcaaacaacaaaaaagtggaagtacaaaacgtacctgccaaatgatggcaaccccctgtcccatgaagttttgcctgcttctgaccctaataatcaatgaaagtaacaagtctgatcatttaaacatcaatccagcagtataagagaacaaagaactcaaatcttgtaaggtataaacctcctaaattcagcttttccattaaaagaaagtaactcatccctcaatggagcaaacgcctttttaatatacagcaatcagcaggctagcagtaaaatatttggagttttcctgtttacaatgtaaactgatccaagacaaacccaaaactctacaaaaagtattatctcacacttaccgaagaagggtgtatcttgacttccaaatttactagctggagcaccagacaagttatccctggtaggccatgtaacatagtgagaagctaatatggaagattggaagtgataccgtactttggcctaatgatggtgcaattgcattacaggatttacagcataagcggcaaaggaaagaaaactgtaacatgcttcaattgcttaccccctattagctgggactgaaagaagatcagcttgtactgcacacatggagaagtcagtcattgtacaaacaacaagtccaacaataggtaagctaaccaacctgtaacaattttcagtagagagtctagcttaacagtcacatcattccgaaatatcctaactactcgacagaggtagcccttcaaaggaccctttctaatgcgcagcatctgcccaatagagaaaagttgttctctggtgctcctgtaaggcccttcagctgtattatgaaggaaatcagaacaatgtacttacatgcagaaaatattacagaagaaaacaagaaacacttactgttcctatgctcattttgctcataagcaggttcagaaaacatgggagttggaaagtcctgatacatagaaagcaaagtcacacaaagaacatcctcaattcattgacaagtagatacccatatctgcataccgaattttcagtagtagagcttcccagacccttccgtatcttttcgcatgacccactttgagcacagaaaaacccacagttctcactttcactttcattaaaaataaacagtattcccaagtacaagtgtttaacgagcccttgcttaccctgcaaatatatttaatcaaactacaagtgtgctaaatggaataaacagtattcttgaatactccaaaaacacatatgctggaattcaaaagtgtgctacctgttattgcaataacagataagaacaatgtagcactactaatacacgcataatgttaaaactatcattggcaatactcagtgaaagaatccacaccaggttttttaaaagataaaaaatgaaggtttccttgaaataaaagtaaaaaagacacataaattcccatattgcttacaaaatgagaggccaaaagcagatccatgtcagattaatagttcaattttcacctgaaatggcccttccacaacattaacagtgtcattaatggatatcgtctttttatgatgatcaacagctgtaaacattttgtctacacagcctttcttaatatcctgcttcctcactgtcaccgcagatccttcgggaccaccctttagtatctacacagaacccattcttagagaaaattaagaatataaaattgaattgtgcattataagattattaattaccctaaaaccatctttctcaacagcaatgatcacaccaaaatcttttcgcctgctcgttaggaaataaaatataaggatgaaatccgtagttagtggacaatgataaaaaaaaccatggaacacactcacccatagagtacaagatcatgaaggttgaattcatcattgtcgtcataattttcagtagaagttgaccctttaaggtctggtgctttggaggattttattttagaagatgatgacttcatatctcgttctgctggaaggttccttttcttagaaccatacatgccggagagccaatccaggtcatcagcagaagctctattgcttggactagaagagaatttcaaaagctctgtttctgtcggttgtatcccccaataaatcaaagaactaagtgcaacctttttatacagaaatccatccttgaacatcaaaccatcaagtacttcaaaaacttcgccagtctgacgatcgcgctttatttcaatgtgaggcctgaagaacctgcatgacaaataacagtttggaaactgtgtcaagactggttaaaataaaatagaagtttaatggatgtaggacaaggaagctttcagaagtaaggaaaaaattactcaagttcttgggagctgatcaaccgtggggcaggaactgcagcttcttttagtgaaactgcaccaccctgcaaagaccgaagtatgagataagttaagtaataagcaacacagggtgctgccaaaacaaaaactgtcaaaggagaaaggtggaaacagatggttgttcacaagcacatgggagccaaacaatgttgggctgacaaacaagcagttatataatcagttgatcaatccagggaaaatacattcagtaaatatagaaccccactagcattctatctcgacatgcaagctgtccacctcggcagtccactatcacatgtaattacagctcattagcacatgcaattatgatatccacgccatcacgacacatcacccactaacatgcatttagttgtccacatccgtgccacaccatccacaacattatctataatagtttatcattttatataagtaattatatgtattctaatttacttataatagtttatcctttcaaagaagtaaccatattgattctaatttcattccaaattaacagcaattcctacaacaacgtgtgggtatgctcctagttatatctactgtagaacacaatactattggtgcatctatattccagagatgtctcacagtttgaagcaaaagtcccccagataccagatatctatatcctacttaatcatggccagaaacaaaataaattcaagtagcttgaataaatagagaaagcaaatcaattcaatgtcatttttaatgcaaaagtataagagcattacaaattttttcgaaatagcatggaggtcaactctgggtataatttttatcatcacttttttccgtccagaatccatgttaacgacctaaaaagtcacaggaaaatagtgatgtaagaacatcgaaaatgaatcatatgaaggagggtgatgctcccagaaaagaaaaaatgcacaaacacattatatcatacctgtgccagatcacctttatagttaccattcttcatgcgtatccatgtaccacgagagatttcaaatggtttcgtacggctggataacaagctaggaacttcagttgcaggaacagaagtaattctgcttgtgtacacactacaaaaccctttgcatgcctgtacaatgggatgtctatggtcagtgaaccattttacagccaaaatacaaagcatataatagatatattaatagaaaataaaaacattgtgttcactaaaatgtaaaaatactttttacaattaaaaagatcctctctttccaatgaagtagtaaaacttggagttagtac

SEQ ID NO: 137618 - DNA, 371 bp, Zea Mays
caatgcaaggattgtcccattggtaacaaccccacctctagcttgtcaatcatttcgcatgtaactaggcaacccaaaattgcaacttgtgctagaaaggtaacaagtttaccaagcgctaacacaaaggacttttgggttcctagatctttgttgactaaccgtgatggacccatcaagcgatgggtaccaaaatatgtttgacaagctttgtaggagaaggagatggtatgaacctttggggtgcttgaggaaattaattcaattcttatcgactcaagctatcaatcttcaaatgatctacgtattcaagattgacccaaggttacttcaatttattgtattcaaaacccatatcatctcggaaagat

SEQ ID NO: 137619 - DNA, 312 bp, Zea Mays
gtgaatttgggcgttgatgtgcgacggtcggaagtgaggaagaacgctggtgcagtgaacacgtgttcatcgtcgtggcagtaacttcggtggtcgacggggagtttagagggagtcacgacgatgcggtggcgcggttaggacacgcggtggacaacggcgatggcaagacgacggtgagcagttttacccgcaggcggtgagccaggggaaaagtaccgcggctgaccggggtggcttccagcttgacggcggcgaagatctttctacccgaagcgttatccaaccaagccgagcacaaatcgcgacggc

SEQ ID NO: 137620 - DNA, 357 bp, Zea Mays
ctttgtcagggaaagttaggatgaaaagtagccttgcacatagccaagaaattttacactgcgctaacaaattgtgatatgaccggccttgcatgtagccaagaaattttatattgtgctaacttaactcaactgtcatgattctataaaaagaatgtagctcatctctttgcattgttgaataaaactaagatacttacaagtcactgtaatgcaataatagaccacactctatgatgacaagaacattgatccataaaacaaataaaaattagaaaatgcagatatcaaggagagacaatcggtatggacctatttgggctatctgggagagaccaacatccaatgaaaaataga

SEQ ID NO: 137621 - DNA, 556 bp, Zea Mays
gtgtctggcagggaggcgacctttactgtgccgctccaaggctctaggctccattctccaacttctcagtaaagaaagaaaaaaatcaacgacagggcacaaaccgaccatgtagaaggtgcctggcagggaggcaacgtcgtcaccgccgatgacaacgatgtcgtggttgctctgcaccctccctcgactgtcgcttatccacgtaaagaaatgctttccatgcttccattcgcttcctgctgttcgctgcttactgtagctcccgcattcgtatcgtcgttcatcgtgctccggtccggcaaacacacatcattttccccttttcctacgatattgcataagtgatgtgtgttttcctcctatggatgctacagtctgtgcttactgtagcataacctaggtaggtttttctcctaaaaaacaccgcaacatctaagagcaggtgctgtgcagctgcctttgccttttgttgcatgcgccatctccactcacgagttcgtaacagttccaatactggctaaaagatatgcttctcgattcttcacaccctaaa

SEQ ID NO: 137622 - DNA, 330 bp, Zea Mays
gatcaatttaatatggtagggcttattctctctactgaagatttttggggtacacttagcaaattagggccaagcttagtaagctaattggtaagtccattttggtgttccactgatttccttttaatgtcgtactgagagcttatcaagatttctagctgaacttattggagtgagattaaattttcctctcttcctttctaattcttttatgcttttaaggtgggtttgaactacaagacaatttaataaatttccaaaaattctgcaaaccttacagtggcttctcactggtgtataattctttgtctcaaaatttggggcttaaac

SEQ ID NO: 137623 - DNA, 973 bp, Zea Mays
gaaaggtgcaagaggatgccagcgatgtggctgcgagccatgcatgacgaaagactccgaaggcggtggacgagcagcaacgatggttgtgagccaatatgaacccatatatgccgcaggagtggtgttccaaacttccaatgctggtaggtaagagcagctgtgggagatcttgaaacgatcgatgttgtcatatattttggtgcatctagaagagaatatgtcgggttacaataaaaaccgatagagatagtctctatattactgttagttcatggcttaaatcggtagtgatatgtgttacggtaggtttagggcttgagccaacagtagtgtatatggtgggcttacaagggttaagggtttaaggtttaggatttagggattaggggagacacgctggactgcaggaccaaagcggagacgtacggaagacaagagggtgaggcggcggaagcgggcaatcaggcttggggcagagcgtccatagccatgacgatgactatcgagggaaggaaaatagtcattgcctgtctgtccgtggcacctgagtacggtggttcgcctatgtggtcttaacggtctgtatcatgtgattagattaactcgggcgagagcacttatcccttgcatatttatcctaacttgtccgtggaaatctattagacctcgcctaaaaacaggtctaaacatactcctttataaatataaagggatacgaccaagggagaacccccgaacatatttccaatcgaaccaaactatttattttctttataattcatgccttatgagtagaaatagtgtagccctagttgtagttcacacatcatcgccctttttggctcgagtcgtctggggacgccccgggtggcctaccgacctcggcgcatcattgtcacatctattcgattatacgtcgtccagaccggtccaatgaagcttgtatggtttaagttctttaatttagtaa

SEQ ID NO: 137624 - DNA, 624 bp, Zea Mays
gagagggagtgttgagctccatgcccctgtccaatgagccctgctactacactcagtgccccactcactgagcttcggcatcgagctccacgctcgagccccaatgctaagcttcgagctccgtgtcctcggcaacaagtttcaccgtgacagtgaggcttgtgttggtcttgggtggggaaacgagcggaaagaaaatagaacgaaacgaactggtatgttgtgtaaccaatggtatggtggtttcataccaactccatgggggcagtggaaacatgaatttgtggagcacctcttttgaggctccaccaaattggagttgaggtaaactccaaatattttaggtgtggagctggttggagttgggagtatttggcaattgatttgtggagcagagctaaaattagtggtgtagagtagtcctaaacatcccctaaaatgcactctcgtattgtcaaggtgtacaaggcgaggacataagtaccatgttatttaagaagagatgtgatgctttgatggaaaataattatagatcatacaagtgtttttatcccattctgaacatcaaccttacctagttaatctataggactaacatgttgtttggttacaagcacgtaaatg

SEQ ID NO: 137625 - DNA, 271 bp, Zea Mays
gctcaaggcaccacaccatcttggttgtggtagtcgggcaaccaacgtcgttctccaacaagttttccaccaccatcatctctcatcgaaagatcgggcacccttctactcgttgggtttatcaagtggtatcaaatttcaggttgctcggtgagagatctccatcttccttattttatttacctacagtccacttttgccaaagatatatttagagcagaaaatcacctaaaaacattttgagcctttgctttactacttagtttttgac

SEQ ID NO: 137626 - DNA, 567 bp, Zea Mays
gcctatatgaaaataccagagacttgcacgcaattacaacaataaggttaaggccttggttgtaaaaataaggttcctggacggtgggttaaggtttcaaagaatccagggttcattctgtaagcttatggactattatgcaatgatcttaacactactatggactgcgggttcttttttaggaaactcgaggggctcttaaagaattttgttggggctgtgtaacacgtgggttgtcctagccgttagacctgcgatcaacggttgtcgttcaatgcgtgaaggggtatgggctttctaatcctatctgtgcattgctagatcaacggtcagcgtccatcttctcagcgccgacagcccaggtagcagtgccctaagccagtgcggtggtggccattgccggaccacccaaccatcgtaccaaagccccaaactctgatccaaatgactctaaacaaagtattcgctaccgccaactcgatacctgcactcacaacgtcagttgttgcgctcaaatccccgaccacgacgaatagcaacccgtcgacgccattgaataccagtgag

SEQ ID NO: 137627 - DNA, 481 bp, Zea Mays
caacaattcattatccaagtggaggcatagcaacaattgtttgctgctatagtcgtttcatgcttgtggcagcagctagcaggcgacagacaatgaagtggtggtggcgggcaaccagtataggcgtacaaggagcttggtttttttgttaaagattcagggagcttcagggaggtggaaggtgttttctgataaaataccgaggcgggagaggcaaccgtttgattgaagattaggggctgagatattatatgtgcaccatgtgcaccaaagcttcatgtgcacagatactttgcctattacaaatcctgttcgaaacgacgtcagctattgtatccacgtcagcccacaaactttcagccgtccaatgatttattgatggtcacagaagtgtcggacttcttgtgcttttttcccttccatacggctctcgaaacttcatccccatccattgtctctcgcccaccagtccactgcgcac

SEQ ID NO: 137628 - DNA, 563 bp, Zea Mays
gcttgaagctcaaagtcgacagaagagttacgcagacaataggcggagggaactacgatttgaggaaggagacttcgtctacctcaaggtttctccaatgcgtggtgtcaggaggttccaagtcaaagggaagctagccccacgttttgtaggtccctatcccattattggcaaggtaggacccgcagcataccgcttggaactaccagaatccatgtcagacatccacaatgtgttccacgtatcccagctccgcaaatgcctgcaagcaccagaaagtcacctcgaagaagagacagtgcagattcagaaagatctttaatatcgtgagaaaccagtgaagattcttgattcagcagtcagaaagacccgcacctcagaagtaaagctctgtaaagttcagtggagcagagaaagagaagaggaagccacctgggagagtgaggacttctggaggagggaatacccttatcttttcccaaatccagtctaatctcgagggcgagattcctttaagtggggtaggtttgtaacatcccaaaatcccaacccaggtttgaaac

SEQ ID NO: 137629 - DNA, 438 bp, Zea Mays
acggcacaaattgtcgccactatgggaaggaccattcatagtagcagaagtcactcggcctggatcatatcgtcttactcaaatggacggcacataaatagggaactcatggaatatagagcatctatggaaattttatccctagctagatttcaaaagctattgggacggcattgtattctgtaattggatgatacactatcaataaaaagacttcactctcaagggcactcgaactgtttattgtcaaatctgcacacttacttaattcagggtgaccactataccctactaacggagcaatcggcttaagtcggcgatgacttaagacggtgtgacatgctcacgcttacttaacctagggtgaccactatgccctactaacggagcaatcggcttaagtcggcgatgacttaagacggtgtgacatgctcacgc

SEQ ID NO: 137630 - DNA, 1078 bp, Zea Mays
gtttctccttccctgcttcctatttgcctgtgtctgagtagcgacgccctcgcgtgaggtacgaatgtagtagcaccgagcgggcgggtggccacctcttccattcagtcgcatactcgcatctcgctccttgtcagtcttagttcctagcgatctcttgtctcgttgccggcccccgacggctccgtgcggctgctgctgcgaattccattcttaaatttttgtccacctgatggcggcctccaagtggcccagtctcttaaactatgcagttgtagacaacttatatagttgcagtagtttcagtcttttgctgctgcaaacatgaaatccaattatctattgaacctgttttgcgagtttgtgcgctatggcccgacaacgaattcgtattgatttgttctatgaagaggtagattagggatctcaatcattttgaatgtgttattttccattatttttgtctctgttgattctgtgttgctgcttgccatttctctattaagataaaagaggaaaaacatttatatcgatcaacaaagtctaaagcttgcagtagagtgggcttatttgaaatgattttgattatcaattttgtggcacctcataaaaggaactcaagtgacattcagagatgagagattgcctggatttctagcaagattcatgcaacgtcgggaggtgggaaaatatttttttgtcaacctaaaagtatgcttcttattaccaactaggactgcataccagttaggttcagactctgtaaacaaaggccaataccctatcagcacaactcacactgctccaggtatatgcacaatgttaccagtgaagtataatttcagacaggtatatgcacaacgtggcacctgatagttcaaagaccatcacggaaaaaatcagtgagtatgacgagaccctgtttttcttctacgaaacaataggttctgatgcatgtgtgatattgactatgctttagatattagttctttagttcaaagatcacacattcttttctgatagttttgacatttcatcgaagataacttttttactttgtttcagtcttgcgggaaat

SEQ ID NO: 137631 - DNA, 660 bp, Zea Mays
aggaaacacagctatagtccaagtattgatcagatggtcggacatgccatcatcatatgctacttgggaagattttcatgtggtcaagaaccgatttccacgggctcttgctaggggtcaaccaagttctcaagaaggggcggattgtcatgaccctatcaatggtgcatagatccattcaaggtggttcagatagggaaggaggattaagaaggattagaggaatatagctgtaactcagctgtaatctagttgtctgctagctataataactgattagcatgctgtaatctagctatctgatagctgtaataacaaattagcttgcaaaccctctcagggtgctataaaatcagagagcttgtaatcaaaggggaagaaataaaagaacagaaatcaagcaactaccacgtacctgtgttggtgttcttgactgattcggccaagggggtaaccaccctcacgtcggatgaaccctagagaaagggaaatacataccagcgcgcagatccaagcaggggcgaaaccctacccagggttcctcacagaaggcgacgcgaatggtagaaaccaagacctaaaaagggcacgacggccataggatacaccataggtgatacagttcacgacagcgtggctgctccagttcgtggcggcgtg

SEQ ID NO: 137632 - DNA, 395 bp, Zea Mays
aaaacaccgacgtggcccgttatcactcggctattacttctaaaacgtcgacgtcgccagcagtcgctcggctgttattcccaaagcagcgacgtggctccaaaggattcagctgttacctctaaaacgccgacatcaccagtaattgctcggttgttacttctaaaacaccgacgtggcccgctatcactcggctattattcctaaagcagtaacgtgaccccaaaggactcggccactaccactaaagcgctggcatcacgaagaaggcagtctgaaatgcaactcgatggttctaagttgctactcaagcattacatccaaacacaacatctgcaataagcataaatacggtcgacgattgacagagaggcaaagtggtgcacacagaatgg

SEQ ID NO: 137633 - DNA, 429 bp, Zea Mays
cgaagaagcagagcatccaaccagagattgcctagaaaccaatgaaaccaaagactgcatggctagagtcgtaccagcaaacaactagagagccatcgctcacgcctaccatcctcattcttacctccaccctcattaccaaaacgaacatccataccgcccccaacatcagcagaactacaaccatgcttttccccagcaaccgcgcctacatcaccaagaaagattagcactgccaccataggcaaaccagcaaccccctctaccaccaaaacaggaagaagaattcgccaacctaaagtttagggggtcatccatatgatcactcaagggtccagtgtagaattcaataacaagcgatacaagaaagatcactaccaaagggtcaatcatgtcgctcccactagctcggtggcccagtggtcccat

SEQ ID NO: 137634 - DNA, 503 bp, Zea Mays
ccggtctttcatgtgtcacaactgaagccatttctgccctgctattctctagttttctcagagctacctactgtggtggatttgtctcaagggggtatagagccagagcagatcctggatcgaaggatggtgagaaagggcaatcgagctattgttcaagtgttggtgaaatggactggggtgcctaaagaagctgcaacatgggaggattattcagtggccaaggcaaggtttccggaggcaaacgcttggggacaagcgttatctgaggcccgaggagatgtcatgactgaagatgcagcctaaagtggatctgtgggaaatgggagtggcgcgagaggatggtggaatgaggtcagtcaggcaatttctatttcgctattatggagttggtaatcgagtctgtaatggagttgtgggctgcataggccgtattagtgccatcttgggccgtaaataataggtcaggggagttgatggtgtgcctatatatattgtactcg

SEQ ID NO: 137635 - DNA, 542 bp, Zea Mays
ctttgttcggagctttcgggggtcggggcaagaaaagattgaacagggtatttgatgctattggctttgtacaccctgattaccattacccgctacaagggcaagggaaaaggataaaaaccgccgcttcggccaccactgttgtgccagctgcgccgaaaaataagaaaataaaggttctgacccatcggccgcgatatattgaaccgaccgtagtgcctgaacttggcgaaggggcctcttcaactgccaaagcaagacaagttgctccaattgcacagagcgttgaagagccaactatagtgccgaagatgcctacagtcggaccagtcgaagctaaggatgataaggctgaagagccaaagatggaagaaacaatgaaaattccagaaattctgagccctccaacagaggcaaaacttccgaaggtacaaaaggcttctgccgcaactcccaagaggaggaggatggccagcgtgctggatgctatgctagagactacaaaggccttgaatccccctcctacaaagaaaactgctaaa

SEQ ID NO: 137636 - DNA, 325 bp, Zea Mays
aggctgcaataccatgggccagtcaagctcccatcccacgactgcgaccacgaccacgtggtgtgggagatccgcgaccaggagaggaacgcgagggaccggcagcaacatgtccacgagagctggagggggctttcctcagacgccctgctggattgtttggatcaatccagaagggggtgtaggagagatgtcttgttcctttctcaaagcgaaactgagtcaccacttcaatcatcttcatgatgaagggggcgtgaagacatcccttgagagggaagcaggcagcatggatgatttcttgacaaatcatatcaaatacatt

SEQ ID NO: 137637 - DNA, 334 bp, Zea Mays
cagccgagagcaaccaggcgaagcaagcccattctgatacagcaaaggcccacgtccgagttaggtgccacgagagcacgagtatgtcgggggtgatggttgtgcccactcgacaggctgagcctccggcgataacttgggcggatgagcgtaagaatttctcaaggtataggaggacagtttgctacaaaccgggagacaggcgaatggattacttttgtcacctgtgcggggatagctacccttggtcgtatatataaggccaagaggcacccctaccattatcatctgacctcagcccaccattctcatagtacacaacttgtaatctcat

SEQ ID NO: 137638 - DNA, 419 bp, Zea Mays
aaattttactgcaacttttggatgaaaggtgcccgagaactagccaacgaagctataaagaagaataagaaagaaacccatgaagcccggaaggaagccaagcgagccgaagaggttgccgagtgcgcaaggcacataggtattttaattaattcatagcttcagtattttttctggcttcggattaacaacttattacttttactgtagctgaactttcaccgccacctgagccatatgatcccgaagctgatccagtcatgaaggcggcgctagaaactataagaattgctgaagaagctgttgacgaagctgtcaacaaacttttgaacgaagctgctgagaaaattttgaaggaagactagattttttgtgtagctaagaaatgtaacatttgtgtgatgtaatattcgtacaag

SEQ ID NO: 137639 - DNA, 1067 bp, Zea Mays
ggattaccaaccgaagcaatccgcaaggcatcagtgggtaccaactcagtgtcatcaacggaaatcaaaactctgtcatcaggagcaccgacctctaaggcgacttcctgacccaaatctcgtgccgctaccatgcaaccagaatgcagaggagaagaccctacatgaacatccatggaagcatgagagggagaacccactcggacaccctcgggggctgggtcatagctcgcgctatccatccgagccggatcatctccggcaacaccatcgggggctgggcaagcgttagcgccatccttgaggactgagccctctgtaacagccacctctaaggctgaaggaccttcaaccacttccatgggagcagagcaatccagactagcctcctgacgcttaagaccgcgctccaaggtcgatgaggcatgagacgccgctcgggataactccaacccggcatcaggcacatcagcacaaatttccatcatcccaccatctgccggctccgacaatagatcttctgggaccatatctttgagagtctgatcaaattttgccagagacaattattgcagaccaacgagggcagacaaagctggagaaggaacaccactactgtctccgctggctatgtagcatcggctgttcttccgaattaaagggatttcctcctcctcttcctcatcttcatcaataatgcggacggtacacccattaggatcaactttggccggattacacccgttgggttcaacatcatcaaggtcacacccattgggttcagcatcagtcgggtcacacccattgggatcagcttcagcaaaaaccggcactggcacttcctcagcagcaggagcagaagggccggcatcctgattcaagcatgacactcgacgaagacgtctctttttctttttcttcccctcagcatgagaaattggatgattggttcggcgaggacgcttcgggcgagtactatcagacctctgagtatccaaagctttgccagactcggggatgggtgctacaaccagtgtttcagcaggggctgcatcagaggaatcttc

SEQ ID NO: 137640 - DNA, 599 bp, Zea Mays
tagagaacgaagcccttcaaatcgccctatcagatggactgaatagcattgccatggtacagtagctaaaaagaccttcagtgccgtgaacccgccgccggtgatctccacgcgtcgattcgcaccggccattgtgatttgtactctatggcacgaggataactgcgagaggtaaaaagatcggaagggaggaggatttggtcccggatgtgagcttatcggcgcacttgattgcttggagacgtgtccacgtggccgatgtcgacggggaacgctggcgatctcagttgcgccatgcaataggccgtattaccacgtcgtcgcgagtcatggagagtaactagtgactgatgtaagaccttgccccagtacgtgccacgatgaactcactttagcaacatatcccttcaccgtcgtgatccaaatctcattcaaattcggagcaaccgtgaccgacttttataaattgagcgcttcccttgctccgcccctttgtcacaaacccagtgcaaccccaaccatgtcctaccctccaccgtagctcgtgaattcctattttcccccaattcggtcatccgcgccgacgtgtgacctcgtgc

SEQ ID NO: 137641 - DNA, 552 bp, Zea Mays
ggccttctcaaagtccagcttgagcacaatgatttcttttttggaaacatggcacaaatggatgtattcataagcccaagctaggcaatcctggatggatctacctttgatgaagccatattgatttttgtgaacaagtgaggtcatcactgtctgaagatggttggccagcaacttggtgatgattttcatactattatttagaagcaagattggcctaaaatctctcaccaattgatcattctccttcttcggaatcaaaacaataaaagaaccattaatacttcgaagacaaacatccccttgataaaatttctcacataagtcatagaaatcctgagaaatgatcggccagcattttttgagaaaattggtgttgaatccgtcaggccccggcgatttgtcagtgggaagggcagcaacaatgctgtcgatatcttgctttgtgaaaggctcttctaaccaatgtaagtcttcttgcaacgaaattaggctagagaggttaaaaacattgtccgaaaagtcagaagaacccaagcgacatttgaagac

SEQ ID NO: 137642 - DNA, 626 bp, Zea Mays
accagagatgaggcaactttgctgacttcatcaacactcgtgacgaaactgaactgccttccaaagggatgcttacatgattgaggaataaataaggcactaggcagcgttctctgaagaaacatacagagagaaggatggtctcctttgaaacagtttatccaaaattcaatatcatggcaacatacaccaagatgctctttggcaatagaaagaaatcgctcatccagtgggagataacagcatgcatgactaaggcgcccactggtgaacagcaaggacaacaacttctcaatgggtaatttttcttgcttccatatcattatcataaccttgcacaacttaaactgaagctcaaaacagccctgagatggcagaacaaatactcatgattatgttgctaaaggaaagcaattgcatctcatccaacttaataaactgaagatatatcatggccctaccttcatagacaacaaatcaaccaggaaacaaataagtggtacaatagtttttgatggctgttgcaagaccatatcagaagaagaatggtcaaaagcctccatgtccaaccacaagttaagtgctttctcagcgctatcaaatattacctatggaaaataataata

SEQ ID NO: 137643 - DNA, 885 bp, Zea Mays
gacggagagagatcgagagagagaatggccgccaccgacgaaccgtggtctggctgccgtgatgactccatggtggttcccggggacctcgcaaggcttcgggagtccgctcggcgcccaatcaaactggaagcatgggcatggcgcgtaccttgctagacgacacattccatggcggatctgtactgcgctgctgtcgactccaccggccggtgagtctttacacccataaaattcgcctccatatattctcatcgtgggggccgttgcatgggagaattgggggctgtgggcgagcggggctcaactaaattctcgccggagcgctgtcgcttccgtggaactgccctcttcgtagacatcaccccctacgtctgcattgccggtaagaagaagtacctcctggagttcgcttaactcccctcgtggatccgtgcgtgtccactctagagctggggcaccttggcgccgggtcgatggacgccggtgtgttcaccgccgctgggcactcggtaccgcctcatgcggccactgggaggaagaagagtccctggtcgtttgtcttattttgaacggctacgattaaatcatgtcttcactgaaccctgaccgtagatccgtgatcgaaggaacgttatcgcgggtcggttcgatagggttgaatctaatctgatccgctcgatcgtgatccaacggtccacagacgaagataccctttcgaccgtcaatgttgcatatgagccctcgtccttttagtgaatgaacccgcggtccagcgcggatggctctgtgtcttagagatttttgccccgagacccctgtgttacctttaaatagtgcgcccagtccaaggatttataaaacccagtaaaagtaattaggaaa

SEQ ID NO: 137644 - DNA, 581 bp, Zea Mays
atcagcggtcattttattttgcacatccttggtgatctcgttaaattccttgtaacttccttcgataatgaatttttacttcaactcttctgtcggaacctcacttatcttatccttgattgttttctccactttgtcactttgcgagtcttgccttaactctatccttggttatgctttcatgattatcatctttacccttgtctcctctatatcttactttgatgcttatattatacccgtcctttaaaaccttctctcttccatctcaattttatagttgtattttacctattttcccttggtcgtattctcttccttgtcgcttgcgagtttttaactccatcctttgtcgtgctccggttgggtattacctttacctttctcatctcttgatcttaccttagtgattacactatgcccgttctctaagatctccaatctcctatcccaatttgagagcggggttttacttatcttacccttggcaatattctcttctttaccgcgtgaaagcctggatgtaactccattctttgttatactcataccgctggctcttcaatgccttcatcttttcc

SEQ ID NO: 137645 - DNA, 728 bp, Zea Mays
gtccgtcagcgtcgttgcgtgttccttcgcacacgcgcccgtgtctgtgcgcagcgggctagccctatcagctccaccttccccatgaaccgtcgctgaccctcgcgtgcacgcacgccgagaagatcagtcatgtcgcctgcccacgtgccatagctcccttttgagcaacgctcgcactcgctctcccccctgcctcatttcgcacacaccctctctccactctttgccgtcgccactagtgcccctcggagtaaaggcccgtcatgccggtcgtccagcacacccgaagccgcaccaagccttcccgagcatcgtcccgaggtgaggaactcgctcctgtgctcggtttattttaattccgcctcgttgttgtcaattcggcctcgctagagctcgaccgcgccagctcgccacacccgtgtggtgtccggccaaattggccctgtcccgagccctggttgtggcccatagcgtttcccttccctcgccggagctagtctgggctttagcacacccgattgcccctcccagcagccgggattcctcaccggagttaccccgacccgctcggagcacccccccccctccgtcgttctctcgtccttggtctcattcttgaggccagagtccggacagtgagtttgacggtgtggcggaatcgcccagattattccagcttaagtgccctagtcctgccttaaaggcgacaactcacttaaatcgga

SEQ ID NO: 137646 - DNA, 993 bp, Zea Mays
gacactagggagatacggtctcttgcgctgcattacatcacattccatcgcaagaacaaagccatctcgctgcttgtagacatccaaagattcaaggtctaatggatgtagtctagtttagatatgttacatattgtgtatacaatggttccgtaaacttcagctgagttatgtgtgtatactatggcaatgacggtagacgtttcttatgttatgtcaatgacaacctggggaacagtgatgtctaaactggataaatgtaccctatgtattttaacttcatgtgtgttttctcagctgattctgctaattttttcacaattttatgttgttaacagcatcgtgttatgcttatttttttcaagtttatgctataatcatcaccgtgttatgctaaaaacatcactttgtacatttataagcttcaccgtctcacaagtttatccactaaacaacaccgtgttatgcatatttttttcataaatttatgctatataggtcaacgtgttatgccataaacatctcgcagtacattcataagtctacatatctaaataatgcttacgatacctttcacctacgtttatgttattatgcgtacatatttatgatgttgtatgtgccttgaaaatttaaattacgattcacaattacatctagaataccatttttaacttatatttccagcatattgtatgtcgttcattcatttgcatcactagttacaacagtaaacaaacccattgtctcataaatcttttggtattctactccctaccagatgattcatcatctccgacatacaccgttcgtttttttgatgttgatgtctcattccagtgtggtgctgcacctccgattttgttccttgaaccaggaggtcgtcctctcttgcgtccagctaggttagccaatcgaaccctattatcctctatagttaaacacgtacgactgttgtgaccatcagcgatgccacatttttggcacttcctg

SEQ ID NO: 137647 - DNA, 505 bp, Zea Mays
ggaagaaattgtgtgtgccgagtcaggcgatcctagtcccatcaaagacccctaaccccaccgcttcgctggggaaaccgggctggcggcgtcggggactaatgggggagtacgcagcggtgaagacgtcggtgtggtgggacatcgagaactgtcatgtgccccgctgctgcgacccccacctcatcgcccagaaaatgagctccgccgtcgccgccgctggctacaccggccccatcaccatctcagcctacggggaccccaactgcgtccctaaacacgtccagcacgccctctccagcaccggcatcgcgctcaaccacgtccccgcaggcacggattcccccgccgtcccgtgctccccacccactcacccatccattgttccctgattgctcctgccgagttcatcccaatgcatgcggattgcgccgatacgttcctgttgtatctgaactgaactgcccgtttggtgttttcgcccactctctcgatgcttttgatt

SEQ ID NO: 137648 - DNA, 1030 bp, Zea Mays
gttgtatttagcatccaactctttatctcgcttgcttgcaaccaccctttcaaaatgagtgaaaaacctagcaatgtccaaatcacattttaaaacatctttcatatctttgtttaggctttcacttaattgtgtgcttcgcattccaagagtgaatacgttcttcatgtaacattcagcccatttctccttttgttggtagagaccacccaaccaagtatcatttttcactttacttctcaaggtgctgaaacttttctcaaatgtgttcacatcctcatattcatacatacatgcacttaactcagccaaggcactagattcatctcttcctatgcgagctaggtgttttacagcattttgcataatgtgaaatgaacacaagccatgccaagattccggaaataccactgatattgcatttttcattgccatatcttgatctgtatagatagttcttggatgcttttgcttttgtgcttctagaaatgcttcaaacaaccatttgaaagaagattctgtttcatcatacaatagagtagctccaaatataaccatttctctgaattggttcaatccaacaaacacaccaagtggcctacaatctttgtctgtcccaaatgtggtgtcaaaagtaataacatcaccaaaataagcataatcaataagcatcttagcatctgcccagaacaagtttgttattttctcatcgcaatctagctgaatagctgaataaaatgaaggattttttgcagctttctttgtaaaatacctcacaatacttcctgcctctccatacatcatatttctttgtctttttgtcctcaaataatttttgtgatcaattcttgtgtaaccaaggttacatgaaccaccagcttgtctactagctaactcatgagcatctttagggctaattccacaatcatctgccatatcaatttgacaagcttgcacacttgaaattttctgttgtgaaggcattaggtggcatgtttcatgaagttgaagaatatggttatgttcaagt

SEQ ID NO: 137649 - DNA, 488 bp, Zea Mays
caaagaccggcaatggttatcaccatggccatggcagtggcttattgcgcctataaattcatcgcctcctcaccctctccgttcaaatcaactgagcacaactcttcgtctctaaattgtgaagccgtagcactcgcctacaccctcgattgcccaccatagccggagaattcccctttcccccaaattggtctccgccaccgtaaagcaccactccaccgtggccagtccgttctggtaaggcaccatccaattcgcgtgttgttctcatgtccttgtatgctggtgatgctctccaaaccgcccaatcaaactagaagcccaccaatcactgggaacacgagctaatgtctatagctttcgctgtcctcgtgggtagagcgaaatagatcaccagatatgaaattgattggggggaaaccattgataggccgtgaatttggtgtagaccgctcagtagcacctatccttgccccgtttggccggtc

SEQ ID NO: 137650 - DNA, 1809 bp, Zea Mays
gctggaactgcagagagtagcagcaaagacatacggccttgctcctgcggaggtggccacaaagctcctgctgtctgaagaggagcccgctgatgctcaaaacaaggaagtgatcaatggatagcaccagccatagatcctggaatgtcctcaattgaaacattagaggactaaacgccgatgacaagcatacagcaatccgaaacaaaattgaggaaagtgattgctctatattatgtattcaagaaactaaaatgagcaacattgatatgacaatgttcaaaaaaggcacctaagcgtttcaatcaattcgcttttgttccttcctgtggtgcttctggaggtattctgatgggctggaatgcctccatcttcaccgggcaggtccttagctcctcaaacttccaaatcactcttggtttcacgtcgatgcacaatgctaatcaatggaatctcactacgatttatggaccgtgcaaagggcaggagaaacaaaattttattgactggctatacaaccttcagatcgcagatgatcaagattggatgatagtaggcgacttcaacatgtactgttcaacagaaaatagaaacagggagggtggtaatatgacagatgtgttcacattcaatgaaattattagttcggtaggcctgcaggaaattcccctcaaaggaaaaaattacacttggtccaatatgcaagaagatcctctccttgaacgaatagactggtgctttacttcaattcactggattagtgctttcccgaacactttgatgcttctgctctcaagaccaacttctgatcacacaccgtgcagaattcagattggcacttctattccaaaggcccaaattttccgttttgaaaaccattggatccaacaacctggattctctgagttggttcagcaggtctggaacattaaccaaagagctaacaatatcgcctcaagaattgcagctaaattcaagcttttgcgacaagtgctaaaacactggggaaaaagtctatctacgattaatgacaccataatctcctgcaacaatgttctccttgtattggatagattagaagagatcagacccctatatacacaagagttcaacttcagaaatattttgaagaagcacaccctgaatctactggaaagaaaaaagattttttggagacaaaggtacactatcagatggaccaaatttagagatgaaaacatgggtttctttcatgcggcagcaagagagaggtttaggtttaacaccataactggccttgaggatcaaaatggtacgctcataacggaccatcgctgtaaggaagcaatcatctgggatgagttcaataataaacttgggtctaccacaacgccaacgatgctcttcgatctgcatcatctcattgccctaagacacttaacctcccttccacaatcctacactcatgatgagattgacaaagtggtcaaggaaatgccagcaaataaagcacctggtccagacggctttaatggtgccttttacaagagttgttgggaaatcattaagcatggcatataccaattgtgtgataaatttttcagtggccaagttcagttgactgctcttaacagctctttcataaccctaatccccaaagtcagcaacccaacaactattggagactacagaccaatttcccttagtagttcagcacttaaaatcatcacaaagcttatgggaaacaatctccaaaagattattatacccttggtccacactaaccaatatgggttcattaaatctagagcaattcaagattgtttggcg

SEQ ID NO: 137651 - DNA, 1139 bp, Zea Mays
gtgtacctgaagttcatcaactgggttatatgtaaaagaaaagaagtatataaaacactaaggttgagatgttgcttacccaaaggctttcagcggagccaaaattccatgaatacaaaaggcttccttgttctcgctcttttgctgcacaaaagtgtagaagaaccataaattagttcatctaagtttttcagcaacaacttctagcccaacaaaccaagcaaaagccatatggacttactggaagcatgccaatcctaggagcaattctctcagtttcagatacagattctataatatctgcaagttgtatcttttgtctctcaagccactccccatacgggcgagctccagagtattgtttcttcaatgcatcatcatccacaatacaatgcttctcaaaatcaactaaaagcatcataccagggtttagcctgccctttctcatcacatcgtcattagggacatcaaccacaccaacttcgctagccatgatcacgcggccactgtatgtcacataaaaacggccaggccgcaagccattacgatccagagtagcaccaagataacggccatcagtaactgtgagaatggggtcaacaagtgaagtcaatccatcaggacttgtacagaaaatattaaggagtcaaatggtttcatattttttacatgacactagggcaggtccatcccaaggctccataagggccgaaaagtattcatacaaagcctttttctctgggtccatgttaacgtcattgtgccacgcctcagggatcatcatcatcacagcctctggcaagctccttccagaccggatgagaagctcaagtacattatcaaatgcacctgaataaggaccatttttcatcgaatcaatgcttttgacaagacaaatataatttaacctgccatgtgtagatagaatatggatctagtatcctagcactttttactacttcctttttcttgcatgtgtagatagaaaatggaacctgagtctgaagaggtaacatccactataggcagaagttttgacatttcatcccttgatagaccgagtcccttgcactccagaagaccttcacgtgctgtcatcctattaaacataaaaatatagcacatcgcagtgaaatgcg

SEQ ID NO: 137652 - DNA, 482 bp, Zea Mays
gctgatgcacttttggtttgatcgatttcttcatcttaatcgattttagatccacgaaggcgacatggaacgaggtgttggcaaacctcctttcttcgatatgatgaactactcgtactggaagattcacatgttagcgtattttcagagtattaggtatcacatatggggagatcttcctcgacgttgctttcgatgtccagcgtgctcgaatcacgcctcttcagatagagtcgcaagattcgaaaaacaaggcccaaaatgcttcgttctcgtgtctctcgcttactgagtttgagcaagttggacatttaggtacgagtcatgagatctagtccatcctcgagatattccatgagggcaatgaccatgtgaagactagactcttttagacgaagcggcaagaatacgagaactttgtccagttaataggacagcccatagacactatgttttcttggttccagttgattgtgaacaag

SEQ ID NO: 137653 - DNA, 789 bp, Zea Mays
gtttgaattcattgtcctttgtgttcatgattgatttgcttctttgaaatgattgttggtgtattgtgtgacttttgtccacaatggcatcaattagctaggaaaaaaccttagataaatgggttttctctgctctctataatctgtctttactcaaccctttcgtccctcccattcttccatacccatacagatgtcagaccttggaatgtcaactacaagtgatgtcactaaatgcaaagaatgtggtgtgttgacaagtcaaaacaacactacaaatgaaacagctgatgaacagacattcaagacacaaaaggatgcacaactaaaccaacagacaagtgaccttggaacatgttgttgttgcgagtactatggaattccttgtcgccagatcagtacaaacgaaagtgaaactacaaaacagaagaaccggattttgttttccggtataaaaagacaatggtctccccaagaacaactaatagcagatgcactgtcagacgatgaattgtcaggtattccaaaaaggaaacatcacaaggatgctcagctccaaaaagaagcaaatgagtgttacattgatggatggactatcacctgcacacagtttcagcctcgtcgtcgcatcagttccaagaaacaaaaatggaaacatggaaaaagtcaagaaataacttcaagaaaagcttgctatcaatgtggacgtgaaggtcatttattccgtaactgtcctgagaagagttcactacaggtcacctccgagatgaagctatctcagtcttcaga

SEQ ID NO: 137654 - DNA, 322 bp, Zea Mays
gtatacatcaagaaacatatcttttgcagtgatccaggtccgattccaaacaaaaaaggacgaaaaatgccgcccgatgttggcactgtcacagctgccactgctcactgtcaccagacatgtccagagctcctgctctataaatggcagcagcatgccttctcccttctccccccacgccactcctccctcccagcacacgagtcttctcccaaccatgagacctcctctctaccccgcgcctaggaacacaccagccttcttccccacgtcgagctcgtcacccatggcccctcctagatcttctgcacgacttcttcat

SEQ ID NO: 137655 - DNA, 873 bp, Zea Mays
gcagttaatagaagagtggtggctagtattataccagaattcggccgctgacagccactgtgcccatttagtaggacaggcgtgaacaaaacaacgtagataagtttcaaggcattggttcacccgctccgtctgtccatccgactgcggatggtaggaactgctcatgtgcaaacggacaccagcttgtttgaagagggcttgccaaaatttactggtgaaaaccttgtcgcgatcagacacaatagcagacggcagcccatgaagtttgtagacctgatggaagaaagcctgagcaaccgacactgcagtgaaggggtgagtaaggggcacaaagtgtgcgtatttagtaaagagatcaaccaccaccaagatgcaattaaaactgcctgaccgtggaagaccctcaatgaaatccatggaaatagtgttccaagctgatttaggtacctccaagggttgcagcagaccaggggcgcgagacctgtctgatttagcttgctgacatacgagacaagcacgtacccaatcatggacaaaagatttcataccccgccaagcgaaggcttgtttcaaccgtcggtatgtgacagggatacctgagtggccacccagagggctattgtggaatgcttgtaccaattttgccttgagagtatcatcctcgccaacccaaattctgtctttatatcgcagcagtccgttgtgaagggtgaaatgctgcaccgacgaagcatctgtcgccaatttagcaaggatagactgggcatgagcatcagctgaatatgactgaacgacagattcaaaccatcgaggagaggccatggacaacgctgaacacgatgactcgtggtttgggcgacgagacaatgc

SEQ ID NO: 137656 - DNA, 355 bp, Zea Mays
tcaaggttcatttaagcgttgtcacatcctcttcagcttccttggtgtgaacttcttcgataggaacttcttagttgtagtcttgggtcgtgactggatttggacatcagcttgaacatggacaacatcagcttcaacatggggaaaatagctcttccattatggacagcaccttcaacttggatagcaccttcaacttggggaaaaatagcgccatcatcatggataatatcttcaactgaaaaacaccatcttcaacatggaaaacagaaccttgaacttgggggaaaatagctgtaaaactgcaggtaagatcttgccagtaagttgtctccaattcttctccttttttccc

SEQ ID NO: 137657 - DNA, 651 bp, Zea Mays
ttagtctaggattagccaccaaccgaatagacgtttcatgacctcacacctagggtagctaggtgatgagtggttcacacttcacacaacagatatctttgaattgtccacctagcttgtctggatcctaataaagctgatgagccagagtgagattcttgtcgtttcggctttcttcgattgaatcctagttattagcaccattaaggcgtactttggagtccttattaaagcagctggcctgctaagaaaccatctcaaaactccctttgaatatcaatcagcatcgatcggttgagaaatattataatggtaaaaaatcaactaattttacacccctgtaggttgtagtatctcttaacatatatgggttaagatgaattggtgtacacagcaaaaacaagtcctgaggcatcaaccgaattcaagtgggaccataaaaaagaagcatcccaactctttctgaacaacatcagcatgcaggcttgagttaatcaggtgctactaccacctagctagcggcgtacagtgactcgccaccagcagtgaatatactggttgcataattctgcacaaatcagtatgcattactacatcaaaggctatagttttgatcaggaaagcttcagtagttttgaggcatcatgattc

SEQ ID NO: 137658 - DNA, 847 bp, Zea Mays
ccctccctttccgatctggtctcccctgccctcctataaagctaaacggtgccacccctttgtcgaactgtcattgtgccatctcggagaaccacgacacctgttcggtggccgccatgggagcatgattgggctgccgcgtgtggacttcgattcgccgtcctggagttgtgtcctagggcttcttctggcctgcgggtgggaggctgtggttgcgccgtggaggatttgtcacctgcgccatcccgattgctcaccggagcagtccgtgtaacgcagatccgctgtctgtcgcaggccggcttcaccagggtgccctcgatggtatgatgttcctaaccctattcggtttgatgtccgctttcagtaggtccctccgatgttggcgattgtaccctgggtctcggctagccgctcaccggcttgttcgccacgcggtggcggggcgccgccgtgctctggcgaggtatggtagaagacaagcttgcaaccgtaggttatgtgatggatggttgtgattcaatgcttagataccccttcgtcgcacttgatctgggccgccggattgggatcgaacgtgatcgggtcaagggtgacttctggccttggatcttggatccagcgatcaggatcgcaccatggttcataatgtgtgtgcgtctaatctggacggatgaaacacgatccaatggccccgattgcataataccccttcagctgggcaggtttgcataagagcccctgtgcttatatgaaaccaacccaccgtccactgcaatgtaaaaagcattacagatcggtcctgtttttcatgatttagaccctgagctctctgataattatgccc

SEQ ID NO: 137659 - DNA, 555 bp, Zea Mays
gagggaatcctttgcatctcggtcgttggcccattctctaattggatagccggcttaactctgtgattgtgcaccgcagaactgggccgagtgtgttggaggattctaatgggctgggcttacgcgcgtttcattcgtttccaatcaagttaacgctgtacaatttttctttttccctttttcttttttgttagggttagggccgaaaggcctgattcgatggccgacagagcagtagaggagcacctcctgcagccgcagcctagccaaacaaacagttggttccatccaaacaaacagttggctccatccaattcgcaaatcgagagaggcagcaactacctcgacagagctttggactgcacacgtgagtttcccaagacgcaaaaggtgaatataatgctgacatatatagcttcgtcacaaaataggtctctttctgcggaagtggcgaatcctgctgccgccggtgcttcaagctttcgcgcgctgtggtggtgcagactgcgacgacgaaaagagagatcatcctctctgcatcctgtttcgtggtgt

SEQ ID NO: 137660 - DNA, 1028 bp, Zea Mays
gcaaaagagacccccggtttctgtttcttcgcagtgggaggtcctcgacggcgtcgagcgcggagaggctccggcgagctcctgtactggccgaatggggctatgaccggcgctctcgagcggctaacactcagttgaactctccccgaatgattcccctaagttaatttctcatttggtaaactatcctgctctgtccacgtgaaccgcggacgatgaagaaatggtacgtgttcccggcaatccctggcggtccggttcaattaaaggggtcggggagcatcaccatcatgtagggatgctagaacaggaacaagaagggaatgagtagacctggggaaggctggccacggtagggtgtggttctcggcggcggagagggatttggggcgaattcaaaattcgcgagttctggcgaaggactgctagcgattagcggtggccgggtggaggatgaccttgcggagctagcgggggcttcaatttatagggctcttcggtggtgaccgtgaatttgggcgttgatgtgcggcggtcggaagtgaggaagaacgttggtgcagtgaacacgtgttcatcgtcgtggcagtaactccggtggtcgacggggagtttagagggagtcacggcgatgcggtggcacggttaggacacgcggtggacaacgacgatggcacgacgacggtgagcacctttacccgcgggcggtgtgccaggggaggagtaccgcggctgaccggggtggcttccggcttgacggcggcgaagatctttctacccgaagcgttatccggttaccagcgagcgtgaatcctaacggcggcagcgcgaatctttgcgcaggggggtcaccggcggcgagcaagctacgctggcattctgatccactcggtctactgtaccatggcgagacccttgcagtgcacctgacagccacggttgagggccaaattgctcctaaatttcaatggcaacacacctaagtttctgcagcaaagttgttcttgtatagtagccctacaactttg

SEQ ID NO: 137661 - DNA, 660 bp, Zea Mays
ttctgcgcaagtggaggcgctacgacgacgacatggccgactgggacggcgggtacgcgcgcaaggtgcgctccagcgacgaggactacggcggctggtgggtcggcgagcccgacgtcgaccgcaaggcctccgacttcatcaacaacttccaccagaagaattgaagggtcgcgttctctgctagctgcgactgctaccgcttccccacgccagcatagcatgcaatatgcatatatatggtcgacgacgacgatggcacacggccggcagcaccaccgcccgccgccgcgccggtccacgctatgcatgcatgcagctacgtttcatttattaccaggttctttgatattcttatatatatgttgacgactatacatattagctgatctcgtttgtcatgttattatgtcgtgctcatttaatcagagagtgagagagaggatgaataattcaatctgctcgacagacatatatcgctgtcattggatttgtttggatgatgcactgtatgtgtatgtttatgtgtgcgtggaggcatatggacggtgatgcagatgtatgtgttgtccgtcgcacattcattcatgtaggatcgtatgacgctagattggtcaatgtgagtgaatgactgtggaagcttacaaataaatattccac

SEQ ID NO: 137662 - DNA, 309 bp, Zea Mays
cgcgttcattcgagatcgggcggcctaggtttaattagatccgagctaatcccaaccgtccgatgtagatctggccgcttagatgcgtgccctcgcccgtgcctctgtagctgggcccggccagttagccctacctcaggtcgctaacgcccctggcccactggttagtgtgcgcccgcgcccacgcgcttgcccgtgggatctgatctcagccattgatcatggatctgacggctgaggagacccgataccccttcacgtggtctttttgcttaagagaccctcgattttctggaaaacaaccccccg

SEQ ID NO: 137663 - DNA, 820 bp, Zea Mays
aataaacaatagtcacggattacatacacacagcgaggggtcaccaaccccaccgcacaaataaatacaatcgcactttctcccctccctctttattgcgagccgggggagggcagcgttttcactcactaccgtaagacaagagtgagggcaccaaacatactacatcggcttagccttcgggatatggcccgcctcccgataaataaacaacatcattttcaactcctcatcctcaaaaagattccgcagatccccctcaccaatactcatcccaaacgacgaggacaacaaatcttgttggccaccccgatctacccgaaggcgggttcgctccatccccatccgacggcgccaaccacttcgtgacatctcgccaacgctatgcttcgacactactcttcgtcgacgacgatctgtccttgcgctagccgggggatccaacgcttcgcgcacctccagctgtggtgaggactccgccgcggccacatctaacgcagcaaaataatccaaatcttcatctgatgactcttcagtccaggaaaacgggctcccaaactcaccaccatcagacgaccaagacccaaattcagaaccagacaaactatcattagcaggcactgcgtttgcggctgccacaaaattagtatcatcagtaggggttgctagcgcaggcccagacgtcggaacccgcgcagcaaccaactttcagtatcacacaaataaggccctaaacacaacacccctaacatgaccccgccacctgcaaaggagcgatcggcaccgcagggtcttcggtggccgtcgtggccaacgccgg

SEQ ID NO: 137664 - DNA, 504 bp, Zea Mays
gatgatcgaacttatatgtgcttatttttggtggtactggactggcaaggaggtgcagttgttttttgttttcttttgatgcttaggtcactgagttttggcggtggaggtagactaggtgaaatgctgtggtgttcttggctagctttgcaggatggagccagtgagccaccgaggtgggaaatgtgccttggggggatgaagccatctttgtggaaattctatgaccgccactttcgtgaagtgaaagccatatcaccttagtgccttttgcacttgtgccttatccttcagaccatgcagagcgttagagccacagagcagagtgaaacgatatggatgatgttggtaaagatgtccagtatcttcgagcgttcttgtgcgtgcgagcctgtatgttcgaagcggtggtattcatggatacccttcgtatttcgaattcggtcaggtgtttttttgtaactctaggctgcctaatgatgcccagcagcccaggtacaagga

SEQ ID NO: 137665 - DNA, 786 bp, Zea Mays
ccttttcctaggatggggagtacgagtagagtccataccctgtagaggtatctccactctctccggtgcatttgccgcaggaatatgcgacttcgacactcctcttatatcagtaaaggcatctggcagattatttgctaagttttgcaggtgtattattcgttgaacttcaagttcggtttctctagtgtgtgggtcaagcgattggatgctactagcactccattctatttctcggcattctttattattaaggtacaatcctccccctaatgccgggaaatgctcttcatcgaagatgctatcagcgtaccgagccatgaacagatccccagttctaggctctaaatatttgattatggacagagattcataaccaacatagatccccaacttccggtgaggtcccatagatgtacgctggggtggtgatatcggcacgtatacaacacaaccgaattttcgcagatggaaaaccactggttgttgatcacacgttaactggtggggagaagcagagtggtaagtagggatggcaaatctgcccgcgggtacgggtatccgcgggtttcgtacccgatgggtacggatacgggtaagaaatctcgcccatgggtaaggatatgggcaaaacctctcatctgcgggtaattaaaggatataaaattgtgcccgtgggtattacccgttacccgcttaatttacaaacccatgaaaatatcccctggtccggcccaattctcagtcggcccaccaaattttccaaaggctaaaaccttaaatccc

SEQ ID NO: 137666 - DNA, 424 bp, Zea Mays
gtgaagtgtaatgtagtagtagggaggtcatcaactcataacgagttgatttgtaagttctgtagcttccctttataatgaaaagtgatttcgcaccacttctgtatgcgttatgttgctttttcgctgttcaccaatcttatcaatgcgcgaggagtattagtgatcattgaatcacatttctgattgccttatttgtaatgatagcgctttggtggttgcggccgagtcatctgaaatctcgtagttgctttaggaatgacggccgagttacggtgggccgtgtcggtgttttagagataacgaccaaacggttgctgatgataccggcgttttagaagtaactgccgaatcctttggagctaccttaccgatttagtgatagcggccgagtgatggatgtgacatcggtgttttagaggta

SEQ ID NO: 137667 - DNA, 484 bp, Zea Mays
gagagaaaatggagaaaatgaactgtgcgcggttgggcccaagctgaccaattcggcccaaccatcccttcactccgcgcggcccaagtctacgcgcggcaaagtgctcggctccaggcgcctctgccgtgtgggtccatcatgtcaggttcgctcccatgccgcgcgcatctttcttttcgctggcacgtgggacctctgtgtcggactcatcccctccaactcaacgaacacatccgagatccacgctcgtgaatgacggacttggtgcggactcgcccagctcgggggaggttgttggggcatgtggtagcgccgcttcctcgagactataaagatgagatgcgccatcgtcttgccgtcaacctctggaatgagagagaaagaagcagagagaagaatagcgccgccgcgggctcaattcgtggtgtgctcgcgaccggtcagggtagctagcctgtgcactccctcccgatccctgcga

SEQ ID NO: 137668 - DNA, 327 bp, Zea Mays
ccgagaatgacaacctatctgtcgacggacatggtggatggccacacttacatggaattgctgcgccaaacaattcgtttttttagaaagttcatatggtaaactattggagggggtaaattaaggttggtgcttattttgttaacttgtctctggtttagcaagtaaattatacattaaagtcctggagattctctaattactaaaaactactggagaggaagataaaaatagagccctctatttattttgttcatcgatcacttggcataatcatgcattgacttcccaaatgatttttaaggagggttttggagatgttctgag

SEQ ID NO: 137669 - DNA, 528 bp, Zea Mays
ccaccggcgagcgagtgaggagctcgcacagcaaggacgcggcgagcagtaatggcggcgaggagggggcgacagtggtagaggagaggaggaggtgcgcgaccgcctgcgggatgaggagcgaccgacggcgggtgaggagcgaccgacggcgggtgaggagccgccgcgcgagagctgccgcgcgaccgacggagaggctacgggcgcgggcatctctagggtttttccttagatgggccgtttacgattgaattgatagatgggccttatacaagccagccaaataaattccatgttctctaccgcagcgcaaataaatggtaccatatcgcctagccaaagagtgcagtagcaacttataaacgtggctgctatagagaaagcaatcagctcttgtaatcagttagtggtatattgtgaacatgtattgaatttttgtgcgcgcagatggacgatccagattgaacaacagcgatgcggatggacgatccagattgaacaacagcgatggacgatccagattga

SEQ ID NO: 137670 - DNA, 414 bp, Zea Mays
gctttgtacgagcagctgggttggtggaatcaacccagtagggtacatagcgggagtgtttgacagttttttcgaagtgagtctgggtgaccacttcgatcatcttcataataaagggtgcataaagacaccccttgagaggagactaggaagcacgaaggatctcttcccagatcatgtcaaacacattgatgtgggcgagactattaggagcaaggaggagaaggaagactcgactctccccaaagacgttcatttgattcccgcccttcgggagaacggtcatcctggacaaagagttaaggtacttgtagtacctatgcatgttggtggtggtccagaactcccgatccaaagagacatgaataaattcagtctcttcccgcatgggcagcctaatgtcatgaactctca

SEQ ID NO: 137671 - DNA, 429 bp, Zea Mays
ttttctagatgtagagatgtatcagttgtagaagtcggatattactatattagtaacttcatagatcagatgtccagcacaacagagaaaattttcagatatgctaataaacaaaagtctcgctgaatctgcaaattgacctctgaaaacgacatgtttgccatttatgcaataatggttataagttcctcacactctacaatgtcaactaacaatctgcatcactaatgtgttagaagcaaaccacgaagttcgcagctatgggtgtaaatggtacgaataatatctgttcgtatttgaattcgattcgtctaagatgcccgaaattcgattcatattcgagtctagatatccttcaatccgtatccgatttttatccgtattcgtattttcaaagttggatttttaagataactatatacatttaat

SEQ ID NO: 137672 - DNA, 539 bp, Zea Mays
ctgattggctcggccagggcgcttcggacgaacactgacaggcctctgaatatccaaggttttaccagcttccgggagaggcgccaccaccaatgtcccaacaggagcggcatcagaagagtcctcggccagcatatcaagcattgcacttatctctgcatcactaggatccaaaggcacctcaaagtgaacctgttgttcatcatcaggaatttctccaagcgaagcaaccaaagcactaacttcttcggcagagggtcgcactctaaggcccaaaccgccatcagcagcggacgaactcaaggccttccgcttgggcgccatctcaactccaccggcgagcagagcgggagccgaattgcaaaagggcagagagggtctgaaggcaggaaagcaagaactagggcacggaaagcagaggcagccgaaggtgcagtacatatggggctttcccggggcagataccgtttccaaaaagcgcccagtcatcacccggcggttacttctaaaacaccggcgtgccatgtcatcacccggcg

SEQ ID NO: 137673 - DNA, 620 bp, Zea Mays
ttgaaatcagttttctttctgtgttggacgtgcttttgacacctagctagtttgcctccaccgcactaggaacgggagaacctgtcctcccaccgagaaagagccaagtctgccctgccaaggagcgcccatacgcgccggcgccccaataaggccctggatctgtgcagctgggactgaaagaggggcagcggcgctggtggaaagtagggcgatggagatcccattgagagcatgtttggttcgaggagattaaattcttccttaatcaaaattaaatagaaggagatttaaccctctcttccactatccatttcgatccagacgtaatcgaacaaggtctaatagtggcagtgtgtggaaggtgtgggtggtgtcagtcggtgcaaggagaagctgatggtgatctagaggaatatgagggtggcagcggtcgaagcattctgaggactccggcctgatgaacaaagatcacagtggcgatcgttagaaaaattaataggaagcggagatagggcagcccgaggggtgtcctatacttgaggcactctagaccctgccctatttatttttgacgaaaattaataaaatgatgcaccgttagaattgtattttgaatg

SEQ ID NO: 137674 - DNA, 467 bp, Zea Mays
tttcagttatgactattgttagtgtatttcaaaattaatatacttcttacattcttagacatataaagtcacattggggcactagatatttcacacatggaaaacaagcagatgaatgtaactgatctaataagagtaacttcctatatgtgcttgtagtttccagttaatacttaatttagtgtctttctatggaaacgggaaattaaccttgcaagttgtaacaccatttggttaacatggatgtggtttgtagcacgtgaggggtagaacgatgtccgcctctttcatttatggttcatggtacaagtctatgagagatgtctgttaattgaaaatcatgatggttcatatatgaaacagaataccaatctctctagaaatataaaagtatcaggggtcagagattaatctcgttggggactgcaactagacatcactcggttctagatcaaagtagatttatt

SEQ ID NO: 137675 - DNA, 510 bp, Zea Mays
atatgatatacagtatgctatccaaagttttgtctaaaaatatatctacctgacctcaatattcatagtttccctttatatgaaactgtagttcctgtcagatcgcgacatttatatgaaactgtagacttatccaaattttttgatggttcaaactatgtcctatataccagtttaatctgttcaacgtgttgcggttcttgtcagatcacgaatattaacatgttcaaggtgatccaaaccccttagccctatcctttgtcttattagtccatacttctatacactatattgttttagttcagtgtctctatcctgaacttatgtgtctgtggtaaagtacccccatttaatgacattcttagtcacggtaaattattgaattaagaagaaaatgtgttgcgacacagttgtctatctttacacttttttgaattgatttaagggtgtcaccgtttttccccaattcatctatcagtcttctacacaaattcgtgatctccctttatt

SEQ ID NO: 137676 - DNA, 528 bp, Zea Mays
gttttccacaaccaagattcactttcatcaccgaagcaatgcatccaaatcgaaatcccgaccacttttgtcacacctagattttagaacaaattcggatgcatctcatatgtgtcagaattaactttacacccatatgatggttcagtgtatagaaaccagtgtcacaaaactttattatctaaataaaacgtctttataaaaagcgaagtcgtggcacggaagatgaaggccaacaacaaaaaaaagtctcgaacaccatgactaggtgctgttgcggcaaagtattcgacctagaggtctactcggccccaccagaaagtatcccagacgctccatttctcttaaggctaggcgttcgtgtatatagccgaaaatttggttcgggttgtttgggttttcaaaatttcgggtatcaacacctgaacctgacccgatattttcaggaaccgaaaattttgggtaccaaaaaattgggttcggcttagtttgatatactcgaaattccatcaccgttgcgctcctagc

SEQ ID NO: 137677 - DNA, 587 bp, Zea Mays
gggtaagccgacgctcgtgagcccgggccaagctcatggctgtttggaggttcggtggtcgcttcagctcgacctccgttcgcaagggttcccctaggcctgcagtaaagagctcaacctgctggtgaggcgtgacgtcgtgcgcacgacacaggagctgggagaattgtcgttggtagtcctccacggtgccggtgcgatacaagtccttcagctccgccaagctattgtgtcgcagcggaggcccgaaccgcatgttgatgtacttggcaaagcggcgccacggcaccataccgtagtcgagctcgaagccgaagtaccaatccagtgctgcaccgtccaagtgcagggacgccacccacactctgtcgtcgtcgagtgtgctcatcccccgaaaataggtttcacacttattgagccatggtagaggatcggattcaccgtcgaacgatggaaactgcagtttaggccgtcgattgtgatcctcgtagcgatcacggtcatagaaatcgtcccgccgacgccggtcgcggccctctggtcgccagttgcggcgccgttggaaggcgccaccagcgggatctcgc

SEQ ID NO: 137678 - DNA, 372 bp, Zea Mays
cagccattttccaccccactgccccaatatacgatctggaagctaatacacgttgctaggagcattacgaaacaaggagaactctcatctgggcaagcagagtgacagcagcgcccgaccacggtgtacgatgacatggcggtgagggagaactccgatccgcaattaaccattcacaggccgaatcaccaagcctgaagaccccacgaaccgccccccggagtcaccgtccatcccaataccacgcgcgcgaagaagatccgcaccgccggtctctaactctctttccgtctacggttcccgttggtggtggctgggttctcggctagatggataagggagcgggagcggctgggttatataggggcgggg

SEQ ID NO: 137679 - DNA, 533 bp, Zea Mays
cacgacatagcgattgaagcgctggctctcgatcaaaacgcgtgctgttcttgttttacacgtacaatctatcggacagaggcgggattccagtcatgtgcgctgcaattaagaaactatccccaaggaccttccgtgcattcagcagggggcgtaattttgactcctcgtcgtgctaaagaaatgccggcctctcttgttagattagatccagtcaaatgcacagttttatttcctccatgcatgcatcgaattgcctcgtctctctgcttctctacttgtgttgctagttgcaatagttttatttcctccatgccatcgatcgaattgtcatttcccactggagagttaattagctgagacgtcaatgtcgtcagaactcacatcttctcaactcaaaacaatacagcacgggtttttcagtccgctacgaacagccatatgtgaaatggaggaagcagcaacagaagcatagcgcgtgtttggccaagtcgcgttcagagacgacgacgagctcatcacatcacgttgct

SEQ ID NO: 137680 - DNA, 540 bp, Zea Mays
cccgcccgagatcctcgcggcgcgctcggccggcgaaatccgcgactcaatcttcaaccaccctgccgagtttctcaccgcgacatgctcaccagtcatgcggctatggatcgagacccctcgccccataagtacgagccccacgagcccctgccgctcctctgtagatatgccacgccgaagaaaatagcccccgtgtcgtgtgtatgcgcagagcgaactatgggcgggaggagagtgagaaggagagaaaatgatggctcgggtcgccgccgttagtacccaccttcgatggcgccatctcccctgtgctctgcgactagcttaggtagggtcgccgggtgtcaaggagtgtgtccgtggactgcacggatcggggcatcggcctggattgccggaattgcgcgtcgaacttccttctccgccatcgtgccgcaagccgctactgcacccgtgacactccaatcttgggtaaggactaactcattcgattcgttgcacgccctagatcgtttagcacctggttgggttgtgggaccg

SEQ ID NO: 137681 - DNA, 598 bp, Zea Mays
cgaggaggctctcaacatcgtggtcgcggtcgtggtaattcacgtggccggagttcttttcatggacccgaacatactggtcctactgcccacgacccctgtcagatttgtggcaagttgggtcacacggccctcaaatgctggcatcgcatggacaaatcttatcaacatgactctccatcagctgcagttgctgcaacatcttcttatcatgtcgatcgtaactggtatagtgacaccggagcaactgatcacataaccagtgagttggatcgtctcgccatgagggagccatatcgtggcaatgacaccgtgcaagtcagcaacgacgcaagtttgcaaattaagcatcttggttcttgttccattaacactgatactcgccctcttgcattaaataatgttcttcatgtccctcaaatatctaaacatcttttatctattcataagttaacccgtgataatgatgttttctttgaatttcgtccctcccattttttcatcaaggatcgtgccactcagaatcttcttctggaaggaaaatgtgaatccggcctctatcccatcaagcctgctgatcttgcgtctgttaaacaag

SEQ ID NO: 137682 - DNA, 571 bp, Zea Mays
ttgtggaaaaacacaatatacctaagtatcctcttaagaagatattacacattagttcaccgggaggtgacatgaaggccacatactcatgcccccatgttaatatcaagattcaaggaatagatttttcagtcaacccagtggtcctaggatccaacagtattgatgtgattcttggatcaattggttgaaaagttgtgatggagtgatacagtgtgccaatggaacaattatgttgacaagtcctcaaggtgaaagaatccaagttaacatagacaagtcaacagatgaaaaagggaaaacagtgatcaaccacttggaagaaaagcccttggaaaatatctaagtagtgtgcgaatacccagacgtatttccggaggaattaccaggtatgccacctgaccgtgatatagagttttctattgaattattacccggaaccgcaccgatctcgaaaagaccatatagaatggatgtcaaagatttagtagaactgaagaaacaaatagaagaattactagaaaaaggtttcattcgcccaagttcatccccttggggagcccagtgctat

SEQ ID NO: 137683 - DNA, 481 bp, Zea Mays
agaatgaattaaatactagcagaaaggcatagttagtttttgagatggtaggcaaaaaaaaaggaagcataaaataataggcaaggtaagtactgtactatacaagtgcaacattaatctttccaattacaaagcacccaaaagaagaaccgaattaaaccccagtagtgcacagcgagacagtgaaggcaacacattgatgcaatggtgtgggatcagtgaaagtagccataggcctagggacggaggtagcagctgctggctctcaccaaagagaatgcagtacaactgtacaaacatcaaacggtgtttagaaaaagatggaaattccatgtactgactgactactgatgtgacaggagatcttgcagcctttgtatccttttttgtgccaaaagagaaccagaagcccgacggccagagataagaactagtagtacttctactgccctgcagtgtactcctactactccaggcatgc

SEQ ID NO: 137684 - DNA, 388 bp, Zea Mays
cagcaacgggctgtcttaacaccaacaaatgagatagctgatttaattaacgaacatgtggttgaccttattcccggaacgcacaaacaatatttaagttgtgaccggattgcatcacagtcaaatacaggtgggacattagatcttttatatccagttgaatttctaaattcaataaatagtaacaactttccgcaacataaactgctgcttaaagaaggagtaccgattatattgcttcgaaatctaaatcaatctgaaggtttatgcaatgacacaagacttatcataactgctctaggagacatggttttggaagctcagattttaactggtacacatgctggaaagaaagttctcattcccagaatatgtctggtgcttaaaa

SEQ ID NO: 137685 - DNA, 847 bp, Zea Mays
gtggagcacacccattggggtcaccgtcagtgaattcaggcacaggcacttcttcagcagcaggaactgaaggaccaacgtcctgatccaaactagatactcgccgaagacgtctctttttctttttctgctcatcagcagaaggatcaagttgattggctcggcaagggcgttttgggcgaacactcacaggtctctgaatatccaaggttgtatcagtttctaggagaggcgccaccaccaatgtcccagtaggagcagcatcagaagagtcctcagccagcaaatcaagcatagcacttatctctgcgtcactaggatccaaaggcacctcaaagtggacctgccgttcatcatcaggaatttccccgatcaaggcaaccaaggcgttaacttcttcagcagagggtcacactctaaggcccaaaccgccatcagcaacaggtggattcgaaacaaaatgagtgaaggctttggaaggaggcaggttccaggccgagtatgccactggggcaccaacatttgataccttgcctctaagaatcatctcaagtcggttcaccaagtctacagagggaattcttctgttagtaacccgagttgagtcagcttggcctcggtacagataagtcgggtatgccctgtccttcaatggctgaatgttcttgaagacaaaatcaacaaccacagcctcagcagtcagacccctctctttcagtagtccaacttcagctagcaaagcccctacctcagctacctcctgatccgtgggggactcggtccaactcggagtgcgaacatccggctgtcttcccgaccgtggggggagagaatttccatggttctc

SEQ ID NO: 137686 - DNA, 702 bp, Zea Mays
ttcactgataggtaaatatgtatgacaatgagtgaagggagtgcttggtttgaagtttggcagagggaaaataattttggcacccggctcgaaaaggatcgccaaaaatatgaataggatgtgtaaccggtgcctggagtattggatagtcatgaaatttggcatgagaggtaatggtagtagctggcgtgtgctggaaaaaattgggttcgatttgagcttgtttggctggtttgtgtatttcaccgagcacatggcgtgcgatgttttagaaaggcagaaatcaaagctttttaaggtgtgaaacccccaaggggatgaagcacccgcaagggaaggtacactagtgcaccaagatcacatagagcactggattcacatgatttcacagagcgttgattggatttgaggggtggaagggattcttcaatggagaggaaaaacagagagagtgaggaagaaggagagggtgaagctcaccatggaggagaggaagaagccgagcacgggcagcttgccagagatcggaccaaagtgatcgccggcggtgaccaggtggtgacggtgagggagtgcactagacagagagagcagctgggcaacactacggtgagaatgaaataagcctggcctcggactcgagcgggtgagagttttttttaaaatgagttatgggcacaccggacagggccgcacattggc

SEQ ID NO: 137687 - DNA, 473 bp, Zea Mays
gaaacgtcaaccttcatccgcttccaccagaagttttgcttcaaatctctgtacattttggtttcgccagggtgaacggtgtaaggcattttatgagcttctctcaagatatccatcttcacctctgatctctgaggcacacaaaggcggcccctgaaacgaaccaaatcattctcatcaatggtgaactcccggggtttaccatcgccaaccctctttcgagcttcctgcaataaacgatcctgctgctgagctgcacacactctctccatgagggaggattgaataagcatccgagtctcctcactagcggtgccgacatagcacaaagcgatccccaaacggtccagatctgcgatcaaaggcaaggccacttttggaaccccggacctgctaagggcatcagccaccacatttgccttccccgggtgataatgaatggacaaatcataatctttaatcaattcgagcca

SEQ ID NO: 137688 - DNA, 513 bp, Zea Mays
tgccacaccgctacagggctcgaacacaaggacgagagtcatcccgctggccatgccactacagggctcggacacatctcctctgaccacaacaaccgtacactaacccttgtactctttggtctcctccttgcgactataaaaggagcccgaggccttgtactacgagcacttaggtgcaaaataatacaagcctccccttcccgctaaatgtaaggtcttcttttgtccgaactaaaataaattttgtgtcttcggaccaggataaaccaaggacacgcaacataaatttactagttggttagaacttggttaggactccggtttctaaaacaccgttaaatagaaatctcaacttggatgtgtgcatccaccatacgacataggacattttttatgcaagcaactcaatacaactataggcacagaacatccatgtgacatatgaggcagctccacccgcacacgctcgtggcatcactacttgaaaatgtgaaatcccaaatgtgcaat

SEQ ID NO: 137689 - DNA, 509 bp, Zea Mays
gcgttagtgagacaactgacctaattatcattacaaaagaagggcactagaattatagataaccaatatcatagagacctgacatctgaattttgagtgctatctaaaaagagattgagataacgtggatatgctaaactcagaacaagaccacaacaacctgaatagggtacaaatccagagaatgtggatgtgctgaaccctgagcaggaccaccgtttttgctgttccagctttccaagacataacatccaaatactaatcatttaattgagttctcactcgaaccacgtccaaggaatggttggactgtgtcattgcctgtaaaatctgctatttgtatgcttttaagccttttcttgatgccagcctttcttatagtatcaaagttcttcacattcttagtcttggtttctcaagtttgctgcactgtgcaattttttgtggctaccaagagaatattctcagctagcatgttcttatgcctactacttcttaaacattgtttc

SEQ ID NO: 137690 - DNA, 414 bp, Zea Mays
caaagtgtcgaaggttgcaccttctaaaattgttttaaggcaaattgtaaagaaaaagaaatgaaaattacaatagatgtgcatcaaattcttgacccagcccatctgttgcttcagtagatatgtttggattctagaatagtgttgttgactgttcgagcttcacactcttcccttgcatcacgctgttgctgatcttgatattgcccatgaggctgctgattgtaagatgaagttggaactggtgcggatggttgaggtaaggcccacctagctggagagttactttctcaagaccccgaagctgtagagtgtggaagtcgctattggttacacacatactatgggatgtatggagagtaatacgaagcagtgtgaagaacatacttcggctgattctaccgtgcttcggcc

SEQ ID NO: 137691 - DNA, 679 bp, Zea Mays
caaggtcagggactaaagcataaagcttacgcagactcagaactcccctgctaggactgcgggtttatttttcagaaagcagagtgctccattgctaaactgatctcggactcctataccaggacacatggcgccccgcgactggctaaaatcatgccacaccccggtgcacaaggtgaggcacacgggatccgatccacacaagatccccaccaccgcccgcacgtgcatataagtgggatcacccccggaccgtcagatcgacaatcaatggcccagatctaaagtgtcgaagggatattagttgatataatcacaaccgtccattagaagatccacgacggcgatttttccatcccaggatctaatcaccgccacactattaaaaatctatggttctcaacctttcttagctctatccaccctaggctgttcgttataagatcaacggcaatagcatcttcttcttccccgagctcgcgctacggtagtctgccagtcgggtccagcgcacagcgatcaggcgggttctagcctaccgactggagcacgaccaggacccacgcagtacaggaacgacgacgaacaccaaggccagaaccttaccggcgtcagtagcataggccgagccgcccacggagatgctgatccacgacggggccgactggtgatcctcgcc

SEQ ID NO: 137692 - DNA, 452 bp, Zea Mays
ggtgtaccgaaccagttcggtggcgcattagacccactttgcggagacgtctgttttttggtagctagggtttgacacaccagaccagtctggtggtgcacgagaccactttactagagatgccatttttgaagagctgacgaccctagcacactagaccagtctggtggtgcaccgaagtagtcagactcaacgtctagtttaagttcgaacgactattccaacggctagctgatgtgacaacatacatcacgaggttcggtggtgcaccgaaccactaaaatggcaagttttcgtcaaaacgacaattgatttcgcagtctgacaagggttgagtggggcaccaaatatgtattgttggaggtctggtgcacccgggaaagtgtagattttaggcaacgactagtttagctttgggggaaatccatgttgtgaaaatcaagaatatttag

SEQ ID NO: 137693 - DNA, 510 bp, Zea Mays
agccacggttgcagaaccaatcccgcgagcgtgaccgcacccggaagcgacataccaagcactctcctcctccccgtccgtcgttgatctcggtacggtacgtgatggagatgggatcgatgggaatggatttcgtggcgccggcgttggaggagctgctgccggatctttcccgcgaggagcagctacggttgcaaaacaaagcccgcgggcatgaccgcatcttgaagccacataacaagcacactcctcgtccccgtccgtcgtcgttctcggaatggtacgtacggtcggcgtctagctcctcatttctcaatttgaattcatctgtgcaatttctctctgccaaaatttcaatctgggtgaggaacaaaaaagagatctagcgttatttcggacggaccgatacatttagtattttattttatttaccgcgaaataattatcatataccgtcttattattgcattacataagaactttgtttttatatatattgtgatgtatcat

SEQ ID NO: 137694 - DNA, 603 bp, Zea Mays
cgggttgctgatcaccgccgcgtcgctcagtcttcgccactagtcctgccttggcgaggagttgatggtgacttcagcaacatgggcgagaagaagggacgactcgtcgtcttgggccacatgggcctgctaactttgctgaacctgctgttccttcttcctcccccgacactcttggccgtgggggccgacatgtcggatcaatgcgcaagccttggtaccaagtgttggatctgagctagcgatcacctgagccggagaagaagcactcacctcaccctctttgatacagacgaactcacacacgcattgggacagtttcagactcaggctattttgtgctacaatgaaacgacaacgtcttttggtgcatatattcctccttttattgagtactgattgcatgcagaaaaactaacgaaaatccatcgtctcccggaccgtgcgtttagcgcattcatccccacgctgcacgaactcatgatccgtccgaggaaccaggcgagtgagcgagtctcactgcctttatatggcacgacacccacaaatttaggagccgtgtgcaagctacagatacatgcaactaactgactgactagctaa

SEQ ID NO: 137695 - DNA, 349 bp, Zea Mays
acaacaccttcacctgaaccactggatgatttcctctacgcaccaatcgtcgttccaaaatcttcaatggtttcacatcagcaccagatagatccaccatctgagataaatctgaatacataggagtagtggaagaagtaaaagccttcagttgtgaaacatggaatattggatgaatctgagaagaagatggaagctccaactcatatgccaccaagccaatcttttgaagaattttgaatggaccgaagtatttgagaaatgatcctcgtcaacctgtggatttaggtaatcaagttattcctaaactgccatttccaaaattctcagagggagatcctgttgtttg

SEQ ID NO: 137696 - DNA, 708 bp, Zea Mays
ctggagtgtaccagttgtataaatatctatcagtatcagcactactgtttgctgaataccccaaaactctctgcttgacttctcttccctaacctttgcactgtccaaaatggcttcctgatcccctcacttcctcgaatcattctaagaagaaactcaagccgctaccattaggggcagattaattgctgcactttcagataatctaccatggccactgtgaacaactggctcgctttctccctctccccgcaggagctgccgccctcccagacgacggactccacgctcatctcggccgccaccgccgaccatgtctccggcgatgtctgcttcaacatcccccaaggtagcatctatctatctggcgacatacgtgcataaataagtgctcatatatatcttctgcagtttgtggtacgaatacttattgaggctagcatgaaatgtcgtttgttctttcagattggagcatgaggggatcagagctttcggcgctcgtcgcggagccgaagctggaggacttcctcggcggcatctccttctccgagcagcatcacaagtccaactgcaacttgatacccagcactagcagcacagtttgctacgcgagctcagctgctagcaccggctaccatcaccagctgtaccagcccaccagctccgcgctccacttcgcggactccgtcatggtggcctcctcggccg

SEQ ID NO: 137697 - DNA, 612 bp, Zea Mays
gtaagacagaaaacgtctgatgccctcataaccttggccatctcttgcaactgatcgtgatggcacccgatttgatgactgatcattgactaatgatgagatccaccatggatacattaggaaaaaccaatatgagcttggctgtcgccataaggagaactatggtatcttccgacattgagacgagatgctaataatgacataatctctgcaacatgtatctcactatcactgaccatcgtgagcacaacaacatgctacaaatcctcttatgcctccatgaggtgtcgattccacctaagaacgcaaggggacagaacaagaacaacaggtagggcggggtctacggcttggcaggttgcccccatcttcttcgttgcagttcgacttagagtttgcctaacctctagccgatcgccaatgcttgcgagatcaatgacaacgagatcgaacaacctccccgcgcttcccctcagcttctccaccagatactttaagatcttctagcttcgtatccttcaacttctcctagtcaggcataacaacatcggatgcctgaaaggatagccgatccgaggtcttaaaggtcttcacatccctgttaggtcttgt

SEQ ID NO: 137698 - DNA, 877 bp, Zea Mays
ggaaggctggccgcggtgaggtgagttcacggtggcggagagtggatttggggcgaatccaaaattcacgagttctagcgaaggactgccagcgattaacggtggttgggtggatgatgatgttatgcagctaggggagggctcaatttataggcagcttcgacggtggccgggaattttaacggcgatgtgtggcggtcggagataagtaaaaaccgtggcgcggtggttgcgtgtcccgtgtcgtggcaattgctccggtgatcaacggggagctaggagaggtcacgacgatgtggtggcgaggttgggacacgcggtggacaacagcgagggcacaacgacggggagcagctttattcacggcggtgagcaaggggaggagtattgcggctgaccggggtggcttccagctcgacggcgacgatgatctttttacctcgcagtgttatccggttaccagcgaacgttaatcttaacgcggcggcgtgaatccttgcacgggggagggtcacagacggcaagcacgcgatgctggcatcctgatccattttaactactgtaccatcagagctcgtttcagacagcctgacagaacattttgcagaggaatttcccttcaatttcatatggcagctcctcccaagctctgcagcagaattgtagagctacaaaccaaccataattcggctataggacttgaacccatttgagcactaaatcaaggtggaattcatactcaaagttggctctgctacactgaatatctgaatttcagactgaatcatcctgacagccaatctttaggcttaattatctccaatattttcttaacaactctgctcacactcttaagcaaagttatgctcctataatt

SEQ ID NO: 137699 - DNA, 484 bp, Zea Mays
acacttgtgaaaattgcatacttcaacatgtagagacgatactccatctcttccttagatgcaaccttgctaaaagatgttggcttatgataggtatcaccccatcgagcacagcggatctagtacatgctctattgaggatcagagtgagactgaaagtaccatggagaatggaaattattataatcatatcctggtgcatttggaggagtaggaataactagatattcaacgagatcccacccacggtggaagcgtgcagggagatgttcaagggtgaaatgagactcatctgccataggattaagtcgggagtaggtgatagaattagaagctggatacaacattctgtaacatagtggtccgctatcccctcctgtaaaatgtacatacatacccaaaagcattaaaaactgtaggcagtaacttaccctcacaaaaatatgtttggatctctcatgaaacttctcatcttttgcaagat

SEQ ID NO: 137700 - DNA, 374 bp, Zea Mays
ttgggccaggccaccggtgtcagtgaaccgagagcccctcagatctgagcaccactgaccggcgacccatcaccgcggcggttgacccccaaccccccgtctcccactctcccgcctccctataactagtctcctttccactccccgcctcgcgagaccacacgcgacggctgcctccaccacgccgatggcgaccgctcactcacccagctgaacaactccgccgagcacgcgcaagcagcaggagcgatagagatagaggaaggcgacgaggagctcggtccgagctactagctgcggctgcggcgaccatggagttggaccggctgctgctcgaccagctggctggcgaggccctgcgggagctgctgcac

SEQ ID NO: 137701 - DNA, 438 bp, Zea Mays
gatccacacgaggcccacagtccctgcgccttccaaattgccgcgctgctagccgcatctcgcccgtgcatgcccaacccacgcctcccaaatcgccgccaactccccaagctccacgagatctgactgctcctcctagccagtagtctctccgccgcccaccactcgatcccacccactccatagctaatcttaccgggatcgtagatctagaaggtagcatcggatggctccatagggaatggaagcatggatgcaagcgttgatgggggtggtgaggatgaaggtgactatgatgaggaggacaccggccggtttctgtatgcatccgctgacttatccacgctccagtgatgtggcatgttgcctcgtgggctgtgggcgcagcggcagggcgacggacatgcgctcgtgaacggaggaggcggggatctggac

SEQ ID NO: 137702 - DNA, 418 bp, Zea Mays
gtcagccttctcttcctcgcaacggtgctcgcgagatcttcgccgcgcagaccgcgcccacctcgcgtggggggcactccggtgatctcggggtccgcgtaactgtcgcgcttctacatgtagtaaagaccccgccccatcgcctggaacccctgaccgctttttcgtcccccagaacgcaaaagcaccgccgccagggtagaactccacccgccgcgcgcccagggtcgctcgccgtcgacttgttccccgtttggtgtgcgggatccatctacgtgatcccttggtgccggcgcaagggtctccttggtttgtcttcgtctctggagcattggattgctcgtcggagcagggggcaacaccgtcgaccgccctctaccgtggacaggtatctccgcggcataattggtggtatgag

SEQ ID NO: 137703 - DNA, 480 bp, Zea Mays
acaatgccttgatcgtattttctgaaacatttggcttttccggcttctattttctcacggatgtgtttcataccctcattatccttttgagcatccattatcctttgtaagaggactgactcaagctttaattgatttaaggttccatattggatcatttccaggtttaacttttccatctcctgacatattgtaatgtcagaagtcttcattgtaagacagtgacaggaagccttacggctgagtgcatctgccaatatattggccttgcctatgtgataatgaatttccaattcatagtccttaataagctcgagccatcgcctctgtctcatgttcaactctgactgggtgaagatatacttcaggcttttttgatctatatagatgtgacagatattccctagtagataatgacgccagatttttagggcatgaaccaccacagctaactccagatcatgagttgagtaatgttcc

SEQ ID NO: 137704 - DNA, 402 bp, Zea Mays
agatgcattatcttcatagataatattgggtgattcaatgaaatgaatcccacatgatgattgaatgtgattaatcacccttcgaagccagacacattgatgtgaagcttcatacaaggcaataatctctgagtgattagtggatattgttactagagtttgcttgaggacttccaagaaatagcagttccaccattcagaaatacaaacccagtttgagaccttccattgtgggggtctgaaagataaccagcatctgtgtaccctacgaggctaggatcttgatttcttccgtagaatagactgagatctgtcgtgccatggatgtatcgaaggacatttttatttcagtccaatggcgtttggtaggggatgcactatatctagcaagtaaatttactg

SEQ ID NO: 137705 - DNA, 534 bp, Zea Mays
ggaatggactaaaaaggacttcatatgaattttatatgaattacacaaattttagcatttattttctcattaaaatcattctctaatcactttttccggattttataattccctggactgggcgcactatttacagataacgcaggggccaaatcttaattttctctagacacagagcacagtagggttggactgcgggttggttctcgaaaagtgaaggggctctttaacaaataagccaacgaaggggtatccgggaatccagaccgtccgatctctgcccatcggcccagattaggtctacgcagcaaataacgtataactcttttcgaccgccagatctaacatccacggtttggatcgactcacgcgaaggggtattcgttgttctaatcttgatcgtccatcggaaatctgacgaccgaggtgtgcagggagcgaatcggtacgcagccaaagatctgggccgcacaaccagatcccacggcgcatgtgctttcttccccacctgactccaggcagcggcagtgccca

SEQ ID NO: 137706 - DNA, 329 bp, Zea Mays
cattgcgtatactgtatggatgtgactgcttgggaaaatctattgaaatttcttggacgcccccccaatgggtgtgaccgagggacggcttggtacgccgagcgtttagcaaactatccttgagtagtaacttgacgtgaccgcggggtgtaatcatatcgtccaagcagttgaccttagtccaaatggtgtcgtgtaacgtgaaacggcgtccgctgcctgacttgcttccagacgatttgaattgttaattgaatacttgcgactgctcggtgaccgtggtaggagatgagcggttgcttctggcctctataaatagactgtctgcc

SEQ ID NO: 137707 - DNA, 476 bp, Zea Mays
caaggttatcgcgagaagctgcaagggcacgtttttcttcctgcagacaagaatcaactctcaaatacccagcaggcagtaagaacacagcagagaaagtcaaagcaaacttacctcgttagccaccctttcagagtcaagctgagcactgagagaggaattcaataagttggcgtcgtctaaagaagcagaaactcgagccaggtccatctaaccttgagagtacttctcctcgagctcagagtaccaccggaccatatctagcaagaaatggttgaagaaggacacttagtaaaaagcagactaatcaagtggccaaagaggaaacagaggcactaaccagcatttgtcatctccaactcagatacccgccgctaaagtagcactggattccaatgcatcagagacagagctctttctgagacagaagcaccctgtgatctcaaccgatcagccatctcgtcaaccaaagcctg

SEQ ID NO: 137708 - DNA, 474 bp, Zea Mays
gctgtgtattaatgcaagaagaccgagtaattgcatatgcttcaaggcagttaagccgacatgaggaacattatcctactcatgatctggagttagatgcgatggttcatgccctaaagatctagcgtcattatctgccgggtaatgtctgtcatatctatacagaccataaaagcttgaagtatatcttcaccctgtcagaattgaatatgagacaaaggcgatggcttgagcttattaaggactatgaactggaaattcattatcacccaggcaaagccaatgttgtggcagatgcactaagctgtaaggtttcctgtcactgtcttacgatgaagacctctgacaacactttatgtcaagagatggagaagctaaacctgggaatggtccaacaaggaactctgaatcagctaaagcttgagtcagttctcttgcaaaagataattgatgctcaaaaggataatgagggta

SEQ ID NO: 137709 - DNA, 640 bp, Zea Mays
ggaacgggggctggaaggtggtgcttcgggttcgtggctacgcgagggagctgctcggctcactcaattccttgccggaccaatagagagggagagggaggaggaggaaaagactcaccggagaggaggacgacgccggcgctttgtgaattgagctcggggaggggaggagagggatagccgaagctggtgcgaggaagaaggggctcggggcgagctttttataggcgcgcgggggaagggggggcggtggagctccctgactccggcgagcttcccagtgccgccataaatggcgcacaacgccgccgaggggacgccacggcggggcggtaccggcgaggacgctggtcaaggggaggaggacggagcggtgccaaacttccctgtgcggcaggatggcagaggggaggacggaggcgacggccggaggtgacttcggtgaggggacggcggacggacgacgaagcaactgactcgtggggccgcttggtcagagggagtgagcgtgcgagagagcgggtggctgacgggtggggacgccttgtcagcgagagggagggcggggtgtggagcggctgtcgcgcgcgcggaagcaggccgaagttgggccgaatgcggaggagtgcgggcgcgtggg

SEQ ID NO: 137710 - DNA, 366 bp, Zea Mays
ccgggatgaccccaacccggcgtcaagcacatcagcacaaacatccgtcgcaccaccatccgctggctctgataacagatcctctggaaccatatcttcaagagtctgatcaaagttcgccagggacaactcttgtagaccaatgagggcggatagagcaggagaaggaactccactactttccccactgacgacatattgctgactgttcttccgagtcaaagggacctcatcttcttcctccacgtcattttcatcagcaacacagacaacacccccattgggatcagcgacagatggatcacacccattggggtcagcgtcagtaaattcaggcacatgcacttcctcagcagcaggaaccga

SEQ ID NO: 137711 - DNA, 573 bp, Zea Mays
gaagaaataccctcaagtttagaaattattatatgcagtacttctaactgcacgcaagctccgtcactacttcgacgaccacaaagtcatagtagtcactggatttccgataggggatattcttcacaataaagaagccattggaagaatagccaagtgggcctgcgaactgggatctcatgacatcgaattttgacctcgcaccgcaatcaaaactcaagcactggttgacttcgtatcagaatggaccgaacaataggtgccggataacccggaaactgcagaagtatggcgaatgtattttgatggctcgttgaaactgcagggggcaggtgctgggatcctcttcattgcacccggaggtgaacaactcaaatatgatcttcaattgttatttccagcatccaacaatgcagcagaatacgaagctctaattcatggactaaacattgccatatcactgggcatcaagagactgatggtatatggagattctctggtggtcataagtcagataaataaagaatgggattgctcgaatgattccatgggaaaatactgcactgctgtccg

SEQ ID NO: 137712 - DNA, 527 bp, Zea Mays
aaaatttggggttcaactggatcccacggcttgattttctcttggttaaatattgttcttacatataggatagacatgctctatgggggtactggtgtttgctagtttggtatatagtcaaaattctgaaataagaatcagtttaagttttgttccaaaatgcgataatttagtttatgttgggtgcaatgtgtgtagttctccatgccttttgacatttcctgacagattgcttattattccatccactccccctatggtttgtttgcatctgttcttctgtctcaaactcgcaccactagtattagttatttcacaggatttggtcgtttcaaattaaaccctatgccgcattaagtaatgccatgtggtaaattgtaattttcctgttcaaacaacacaacgacatctctgatctatatgacactagtaaaactttgtgttttccctaggtttgttgtttaaggaccatttataagaaatactcaattacgatttgtacttcctctcttgactcatttgtgcac

SEQ ID NO: 137713 - DNA, 550 bp, Zea Mays
atgaatgcaatttacctacatcctgttggggtcatgcagttttacacgctgctgatcttattcaacttcgcccaactgcatatcataccacatctccgttgcacctggtacgaggaaatcctccaaatatatcccatctgcggaaatttggatgtgcggtctacacccctgtatcaccgcctcagcgaatagctatgggacctcataggaaattgggcatctatgtgggatatcaatcccccatcgatcatcaaatacctagagccccttacaggggatttgtacacagctcgtttcgctgattgcatctttaacgaggaccacttcccggcattaggggagaattcaagtatcctaatgaatgccaggaaatcaattgggatgataaatccatcctgtcctcagatcctcgaacccaggaatctgaacttcaagttcagaaaattatagaattgcacattttgctaataatctgcctgatgcgtttactgactaaaatggtgtcacaaaatccttgaatcctgctgttaatgcgcccaatcgagtggag

SEQ ID NO: 137714 - DNA, 1053 bp, Zea Mays
gggagtaccatgtaataagtatcaatgggttaccaaaagtggatgggtaagtaccaaaagtttgtgggtctaatatcgattattatttcaagtggttgcaagttaaggctatgaatgcattttgggttaataaagtcaagcatgaaggtgatctcattgctaagcaccagaggagtttcacatagtaactaaatattctctttgtgggatgcatcattagcattattgttgtctgtttatgtcatgtgtacatacaaataatagatgcaaaggtgctatggtatccatcaaatgtcacatttggtgcatcgtatgtaagtagtcaactgcatgtcatggaaaatttgcatgacaataggatggtggacaatcgctttgttgtggaaagccgatgagatatagtggattgtcaagccattgagatcctagaatgtgtcatactagatccttgtcgccagttgcgtaatagcaaagtagcctccctcagcgacgaatatcaaaacttctcaagacacaagaggactagtatgccagtctgatagtgtcacttgaggttgaagagaaggcaagattctaatggtaaggacgctaagtccagttcactacaaacttggtcataggaaattcggcaagaataaaggagaaaataaacctaacaagcctacaacttcaaggagatgatgatgaacatggatgatttacattgcctcacatgtggtaaccttctgcacttttccaagtgtagcgaagatggcctctcatgccatattttgctaaattgttttggtgattattggctgataaaaaaatttagaataataagcttgtctagatgcacattctcagtttatgagtacaatgaatgaaacaaatatcacataaagaaaccaagtcgagaggagcaaactcaagaaattcaatacaacagttaaactagtacatatagaatatactcagtggtgcatctagtactcagtggctgagaaagattagagcaccagttgaacctatgatggtgagatagcactcactgatgcaattaaagacttggtg

SEQ ID NO: 137715 - DNA, 666 bp, Zea Mays
ttaagcatagtcacacaatagatgacgtgatggctacgtagtcatgccatcacttcaccccacaatcccaagtaacaaaataactctaaccgaacttggcatttagccgatcgattcctaacccatttttcataccaccactacacgacatgcctaatacgttaaatgactcgttaacaattcacctacatctttaccaaaacattcccacatcgcttgaaactcaacctaagcttcactacacaattttaggacatctacttaattcatgaatatcatcgtcatacacaccgactcgatttgaattaaccacacatgtccatcacatgaatggagcatttcaacaaatatcctaaaacaactaacttcatcacacatctttcattacaaacctacttgacttatttgatgtgtctactcgaaaccgtgagcacaatcatacactatatgcgaagcatattttaacgaacgcataatacgcatcgtcatgacttgacctataaatatagagaaagcgatgactactctaacatgtcaccacctctctatttaagccaagacaatttctaccatcgactaagagtcgtaagcattaaataccttactacttacatgcacaaataaacttcaacttaacacaactgacaccgacggaatttttactaa

SEQ ID NO: 137716 - DNA, 593 bp, Zea Mays
aaccgctctcagccacgctataaccatgggagattggaccacttggaggctaaagcagttcaggaaacccccggcatgatagtaggtatatttccagtcgactcccatattgcagaagtgttattcgatactagagcaacacattcttttataattgcatcatgggtagaagcacataatcttccagtaactaccatgtcaacacccattcaaattgactcaaccggtggtagaattcgagctgatagcatttgcttgaatgtaagtgtgaaaataaggggggtagtgtttcccgctaacctcatagtaatgggtactcagggaatagatgtcatcctagggatgaattggctagataagtatcaggcagttatcagttgtgataagaggacaatcaagttgatgtccccactaggagaggaagtggtgaccgagttagtcccgcctgagccaaagaaaggaagttgttatcagatggccgttgatagcagtgaagcagatccacttgagattatcaaggttgtgtctgagttcctaaatgtgtttccaaaggacttaccaggtatgccacccgagcgaaaagttgagtttgc

SEQ ID NO: 137717 - DNA, 458 bp, Zea Mays
cgcactaccaactcatcctcactctatttgtttttgaaaacccatttggtaccaatgggatgacagttttaaggaggtggcaccaaaacccaaacctgatacaacatcctggggctcaaaagaagcaacaaaatcatgaagtgatgtcgagtgactcgctcatgaagctcaacaatcatggtacttggagcgagtgacttgctcatgaagctcaacaatcatctgttgagggggtgatcgcgttggatgtgtcatggagcctctctcgaagaagtggcctcccctcaacaacaacctaaactcctcccggcgcaataggctccggctcgactagaccccgagtggtagaagaagtgatgtcgagtccatcgtccgaggtcgtcgatgcagactcaaccggggcagtaggtggagttggctcgaaatcaccccagtcagcgtcctcgtgctcatcctcc

SEQ ID NO: 137718 - DNA, 437 bp, Zea Mays
ctccaaggtcgatgaggcacgagacgccgctcgggataactccaacctggcatcaggcacatcagcacaaatttccatcatcccaccatgtgccggctccgacaatagatcttctaggaccatatcttcgagagtctgatcaaaatttgctagagacaattattgcagaccaacgagggtagacaaagctggagaaggaacaccactactctccccgctggctatgtagcgccggctgttcttccgaattaaagggatttcctcctcctcttcctcatcttcatcaataatgtggacggtacacccattgggatcaactttggtcggattacacccattgggatcaacatcatcaaggtcacacccattgggttcagcatcagtcgggtcacacccattgggatcagcttcagcgaaaatcgacactgacacttcct

SEQ ID NO: 137719 - DNA, 572 bp, Zea Mays
cctgctcggccgcgactgttgtttcaccgtcgtgtgggaccgtgttggcagacccgcctccttcgtcgacctggtctccactgcaacaaaccgaggagatctcgggagcgcatgcgttcaacgcgggattagtgcggacgccttgccctttcccttgggcatatccaaccggtctcgcgggatctccgggcgaacttcatcggagtccataactcggtcggggctcttgggcatataagaaccagcgctcccgtagccattgatggagccgcataagataaaaacattgccgccacggttggggccgtcctggtgcgaattggcgctctggtcgggcagaattcctcgccgaagacatggcagcgccaacaatccctcgccatcgttccgctcagccgcgaatccgccccaacgacgacaccagggagctcgactgcaatctgcacggtgagaacgctgtcaggtcactcgcttttatgtcggctacgtgtagaaccttgcagggtagggatcggggctctggatcgtcggagtaacgactctccggcaaggcctcgccgtaatggctggtg

SEQ ID NO: 137720 - DNA, 414 bp, Zea Mays
tgctggagaagcagcgggatgagcagaccacgactgaggcgacactgcagaagctgcagcaggagcttgatgacaggactagcaacatctctctcaccgaagaaaacctcaaggcaaaggatgcctccctagaggagcgggtgacggatctcatccgacaggggaaggacctcgcctggagggaggagatgtgggaaaggcgggacaagttgctggccgagcacgagctcgaggcggaggagaaggagaagaaactggaggagaaagagcggacgctggaggagcgggtccgctggttccaagcggcacaggcagcgcaggcagcccagatggtgcaggcggccccgggttcccaggcggcagaggtgatgaggaagacgctagaagatctccgggcggagcatcgcatcgggg

SEQ ID NO: 137721 - DNA, 859 bp, Zea Mays
tcatactaaaaatctattttcaattcatttattcaattttaagtcagctctggactaggtctcatttactgaaaagtgcaggggtctcggggtaagatttctaaggcacagcgcacagctccaggcggatggcgggttgatttctataaactatagggacttatctacaatttgtgccaaccaaaagggtatcttacaatcctggccgctggattagacttgaacgcgctagattaaatctgctacgctgacgtattccgcgccatcctatccacccgtggcaggatcaacggcgatcggtcatctgaccacgtgccccacccgaagcccttggttctccgatcgacggtcaggagttaatgaagcccagaggaatgatcaccatccgatcccgatcggacgatccaccacccttcccccaatcggtacgccatcatctaatctagaccgtcgctatggatatcaacggttcgcagagacccggcgaccgcgcctcccccctgagcgcttcgcgcacggcggcgctagagcagccgcgacggcgccacggtcggcattgcccaaacaccgcacccgagctctaaatgcccaacagaggcgcacaacccgagaaggactcagcgatcacaggaaaggaactcataccggctcttgcgcggtgttgtgccctggccacggaggaggtgcggcccgcggcggaccaatatcgacggtgagaaattcccgacagcacgagaccacgcacaccaggattccttccctaacacaataagcgccaccccacgaacgaccgggactgggctatctgggtagggaagtagcggtgacgcgatttgatgacagcggcgggggactccgg

SEQ ID NO: 137722 - DNA, 346 bp, Zea Mays
gtaaaactttcttgtggaacgctatactcatgcatttgaggtcccaacaaaaaattgtgttgtttgtagcgtcctccggcgtggcttcactactattaccaaaaggccatactgctcattcacgtttcaaaatacccttcgatctagatgagggtggtgtttgtggtgtcaagagaggtaccatgttgtctgaacttatacagcagacttctcttgtcatatgggacgaggcgccgatgacccatagacattgctttgaggccctagacaggactatgtgtgatattctttcggaacatagagcggaaaatgcgaacatcccatttggtggcaaacctgttgtgct

SEQ ID NO: 137723 - DNA, 512 bp, Zea Mays
gcttcatcgaaccggcctcagtgcccgaatttggtggtgagacctctactgctactgaagccaaagaaccttctcttactcagaagaatgaagagctagctatgttgccgaaggctgataatattaaagaaatagagaccgcgaaaacaaagatagtagaagttacaagccctccggcaggaatgacagtgttgaaggcgcaaaaagacctcacagcgactccgaagagaaaaaggatggtcaatgtactagatgtgttagagacgataaagtcttcaagctctactccaaagaaaattgccgaagttccaaaagcgcaaattgagacgacagcctctgaagccgaagctacaaaacaccaggctgagactgaagctgggccttcggagcctgccaaggggaaatccttggaaaccagaggaaaagaaacagaagcggcggaacaaattttggctgaagaaactggcactgccacccccgaagcattttccgaagctcccaattatatttta

SEQ ID NO: 137724 - DNA, 1028 bp, Zea Mays
tttccctgcctggcccaagattgatttcaccctggcccaaaagggaggcgcgccagcccgaccctcctctgctcgtgcgtggccacctcgcttgcctcactggcaggtgggcctatcgagccagccacccagcagtgaactcttccgcgcctgtctcactgtttccgtgggccccgttgttcgcacgcgctcagcccacttcgccacttccgcgtgggacccatgatgtcagcgctatattctccaccgccacgacgcaaacgtgaccgagtccgtcgccggggaaataggagtgagctgttgcatccgcgcgctaaccccgcaccccatatctccacctcgcctggtgcttcaaatgcggacccaacccctcctcgtgctcctccttttgccgcaacccaacccctcgccagtcgccaccagagaaggcagtaccagtcgcgccgtcgccgctattggtctcaaccatgggtgactctgtaaccctggagagtgatcgaggtgggtcgtggagtcttcgccgttcgtgcgagatgcatcgtcgtgtggaagcagtactgggtgatcggcgattgcccgccgtcgtagggcgcctgcgcgaagccacaatttgcagtggaggtgctattggtgcggtcgaatcgcggtaaggacccccctgccaattcctgttatatgccccacgcgtagctattagattacgctcgggatcgcgcgttgggacgacggtggagatggctcaccgaagacggccgctgctcgccgtagatggatggttacattgcgcgattcctggtaattgctaggttagtgagttcgggtggacttgggcatcgtttcggattcgcgggggggccgggattgttgcttgggcaccggatcgatgtgcgccggcgggttcttcgccatggacacggcggcgcggccgtgctcaaggttgggcctgggcggcgcgacatccgtccgtcgatctagtaatgggtggccatgattagatcctggcaaaacctttggggcgctagatctag

SEQ ID NO: 137725 - DNA, 610 bp, Zea Mays
aagatgatgaactagcttatttctcaaaccaaacaacctatatgtaaccacttcactctagtcaagtagagacagatacaacatactccttccgttctataataataatggtttttttcagaaatttcggacgaattaaaggccctagcaaaagacacatgtatccgattgattgttatcgtttgcctgttgttaagaggccgcacggcgcacgcatacatacagatttaagcaagtgccaatgattaaaatggatggagaaataatagaggagaggcatgcagccgaataaataggagaaataacataagctgaatagaaggggaaatgggggatgctgctgcatgctctcagagaatgttatgggacatttatggaacaggagtagactactggagtaattactaaacggttaacactaacacaacttattttagctttgtcctatcttaattttgtcaaagaagaaattttacactaaaagttatcaacatctacaatatcaaataaatccaccgccaaactatatttcaagacgtatccaatcaatctagtgaggtttgaccaagaacaaaaagcaaaaactgatttaatttctctatcccaaaat

SEQ ID NO: 137726 - DNA, 747 bp, Zea Mays
cttagagatccaagtgatcaaggagaaacactcgaccggtttgtgtgacctattgagagagagaaatggttggagtagacccctctaggcgactattgagtgttcaaagtttataattttcatgtttcgtctattcacccctctaggcgactttcagttaaatctagaggagaaaagttggcgtggctgttagacgaaaatgcagatgactgatgacgtgacaatgacttggactaaacaatagtgaattaagcgggtgataccaatgcaagcgatccgtttttatttctccttttaaaatgaactaggagcccgtaacttgaccaaccacacactatagaagaaaagaaaagcaagagatgtttgaaactacgctaaacaattttatcttgttcctgttagcaaggaacaacggtgacagtctgaatctatagcatttcagataacgtgccgtcagcaaacacaaacaaaatccggtgataattggaatcgttagcaaattcctacattctaacatggttgatatgggaaagtaagtacataagaaactggcggcagcgtgctctctagcaaattcatggagcccttggccgcgtcctggcacgagcgaagatgatgacggcgctgaagaggatccacggcgcaaagatcccgttggccagcctcgacgaccgcagcggctccggcaccccgttggccgcaaccgccgccatcacagcgagcaccagcaggccggcgacgatcacc

SEQ ID NO: 137727 - DNA, 641 bp, Zea Mays
gcctgttcgtggaaacgtcctcaagcagaagcagtcctagggatggacggttaacgtgttcgacgttgacatgcacgtacgtattgctggatgctctgtggcgctattgctggagaggcaggaggagagcggcgcctgtattttcagctctcgtcaccccactctggaaacaaacaagaatttgcaccaaccgagcacatacgctggttgtggttgaattcttcaatttgttatttgtcttaaattaacacggtgtcgtttcacccaattcattattgagactgggacatctcaccttcttcttttgtctttttagttgacctgactcttctaactcatcgcccatccctttctggctttttcgaattcttgtcgctaaggataatatatgtcggttttagtgaggacgtacagaaaaatgtcaacgccgcgttagaaccaaaatcaaagaaggtcactgcagacctgaagcctagcaactaagttgtgcctaaaaggtctcttcagccaaaaccccgcaagctcagttttccattgagaagatgcctggagattgcagggtggacagctgttgatgaggttccgaggtatctgctgctttttagacaagattaccctcttcctttatgtggtttttgctc

SEQ ID NO: 137728 - DNA, 654 bp, Zea Mays
agccggattgacatgatgctaagaggaaaggtttcgaatgttggtgctcccttatcttattctgcctggaatctacctccacagagtcccttttctgaattcatttccaaccctcctatccaagatggcagtccgggtcatagaatgcgaccctccttagatgacatcgaagttttcattgctccgttctagaatcttcctgaagtggagagacagacccatttccagatgccgaccagcgctgatgaggctcaggtgaacgatattctcagtatgctggctggagaatcgtttgactctgcccgtactgagtcgatggctgttgcgattgggcaggaccttggtgaggatgaaggagttcagaatcctaaaagtgtttgttgtaagcgatcacgccggacgagctatctagtcgcgcctgatgaggagaagaagagaaagaaaagacttcgatggttatcatgcttagaacaagatgttgatcccttgacatcactcggttgtggcccgacgggcaccaccatcgaggacaatatcggaggttgtgatgatgccagagttggcggtcgcgtgattgatgaggatgaagaggaggaagaagaagaaattcccttgattcgcaagaacagtcgcagcaacaggagaagtgatatc

SEQ ID NO: 137729 - DNA, 387 bp, Zea Mays
ggcgtggcagtaactccggtgatcgatagacagttggaaggggtcacggtgatgcggtggcgcggttaagacacgcggcgcatgatcggacggcggcggttcaccggcgagcctatcgttccagccgtaaagcagaggggaaggcaggagaggccgtcggagtggtggccagctcaccggcagtgaggatctttaccgagctatgtttatccgatggccacgacgcacgaatcacggcaagcggtgatcaacgatgatggaccaccggcggcgagcagagggataggatcttcttcagttaccctttactgtaccatggcgagtgctccatcagacaactgacagaacgatttgcaaaggagttttcttccaatttcatgtgacaac

SEQ ID NO: 137730 - DNA, 569 bp, Zea Mays
actcgtatgaacatctcggacagagtccaagggcaagcaggagcccaagtgggagggccctttcattgtcaagacgaaggcctcccccagcgcatacaggctcgcaacgccaaatggcgaacacctggagcactcctggaacatcgataatctccgcaaattttttgtttgactcatcagggccggttcgcccttgtaattcgcaaaaacaattttattctggcccgcactcttttcctcccgggggatgaggtttttaacgaggcggagtcatgtaatatacaagtgaaaaatcccctgcaaaaacctacgtcgaaaaagaccgcgccgacggtcttcgaaattcgaccaatacaaagtcaccgcgaggcccagcgctagctaccctcgcgtgcgacaactccacgcaaaagtcgcctaagggtgcagccggactagcacaacaagtgcgaaaaatcgaagtcttctgcgaagactatccgtgcaaaagtcacctaagggtgcagccggactagcacaacaagtgcgaaaaatcgaagtcttccacgaagactatccatgcaacaatc

SEQ ID NO: 137731 - DNA, 413 bp, Zea Mays
catttatctctaaacctagaatcccgcacgccacgtgctcggtgaaatgcccaaaccaaccaaaattgctccaaacgaacccaattttttcaggcatcttcatgacacatccagtaacatattcaccaaatttcacgccattccgatatcccagactccaaatttccacaaatccccatttttagcgatcgattccgagccgagtgcccaaattccactttcttcgcctaaaatcaaaccaagtgcacacttcactcatatttacccatataaacctattcgagaagtatcggctcaattccaagtcatttcatgcctcaattccaatttcaaacctcctatggcactatttgtcgttcaaactctgttttcacgccgtttgacctctcgatcgccaaatcactcgattcctg

SEQ ID NO: 137732 - DNA, 483 bp, Zea Mays
aaggctatctagggacatatcctcgacgtcggacaaattctctatcttagagagaggtggagctggaggggctttcttcttccgctcagtctggcatccttggctcttggtcttcttttggattttcttcgtgggggcgagcttctttagcttcttatcgtaatccatcttcagggttcggtaggcttcacgagtgttggcctcttcgccttctgctatatcgagactctcttggagggatgccttctcctttttaagttccttgacctactgctctaagctttccacccgagagtttaggtgggtgcagtgggaggaaaggtcatcgtagtggttatcgagagtgtggagatatccggccatgtagacgatggtggggtcatcctcggtaagatctcttcctgacagtgcctgaagtcttttcctccaggtaggggtatttttgttgctaggtgggaagtaatgaaggggggtttcaaaaac

SEQ ID NO: 137733 - DNA, 833 bp, Zea Mays
gtgctttcctgcgcataaagcctctactgtggccctaaccttcgccgccatagcttagaaaccatcacggcagccgccgagagaaagagaggagagagaacaaacgcctgggcgctcccatcgcgtggaggaccttcggaccgtgagcgtcagtcccgtcttcaccccctccgcgtcggtatgttccgtgccccttctctgtagcgtgataggaagcgcgagacgtcttagcctaggcactggtgtggatgcggtggggcaatgctccaggcgctgtcgaggggatggcttgccactggatggcacatagtctcaagcagtctgtagatgaaggcttggtgccgagctagacgggtagtgggaggcgaagaacgttccgcgccgtataacggggactcgaatggcggacttgggttgtcgctgccagatccttggcgctcggccgcggcgagtggactggagagagaaaagagagaagggagagaatcggtgatgaagaagacgcccgacatcacttgatcatgcgttggacggtaaggattaaaggatagggatgaagaaaccgggaccataggatggtgagtggagggggtagattaatctcgcgtacccgccgttcatcactaatcgcacggctttgattagaagcaggaaataccccttcatcccaaccgttatccaccgtagaccggcaatctgacgactaaagcgaaatagtggggatcgtgcgctgtgagtcgtcgatctcagatccgacgatgactcgagaatcaggatttatacccatcgccggtctaatctgggcgctcggggttggatcggacggtccaaac

SEQ ID NO: 137734 - DNA, 464 bp, Zea Mays
cacctccaagctgtgctccttctgaaacagcagcctctcccagtcattcttcacctttcctagccaaaaaatcattgccggacttgcagctcggaaatcagctccctgagtcttcttcgctggtgtgcacagcaggctccatcctggtagcattactgctacctgcctcacaagctattccataaccttccaaatagtttcctggaagcatagagtgtttttgtagtttccatagctttcacgaaacaaaattttggacatgtttggatccattagcactaaaaattagcaaccaaaattagtactagtggaccaaacaagtctgctaatagacctaccaatcattagctggatgcctactaattattagttccattagcagatttagagttgctaataggcgttaactaatcggtagcctatgtcttactacggtctctatattcacaatatttacagtatct

SEQ ID NO: 137735 - DNA, 322 bp, Zea Mays
aacacatacaacacccccattgggatcagcagcagatggagcacacccattgggatcagcgacagatggatcacacccattggggtcagcgtcagtaaattcaggcacaggcacttcctcagcagcaggaaccgaatgaccaacatcccgatccaaactagatactcgccgaagacgtctctttttctttttctgctcatcagcaggagaatcaagctgattggctcggcaagggcgtttcgggcgaacactgacaggtctctgaatatccaaggttgtaccagcttccgggggaggcaccaccaccaatgtcccagcagga

SEQ ID NO: 137736 - DNA, 2017 bp, Zea Mays
cttgtatacttatttttgtttgctcatcctcatcactgatcattttccacaaaacatcattgaacatagctcgaagtcttgcagtttgcctcctgtctttatccctcaaggtaaagaatttacctggattcaaataaagggctgccccatataattgttgctccatctgagtatcccacctcttctcaaagcatgagattactttagcaagtaatcgtggtttctctttcaaagactcatgtatggtagcttttgctttgtccatagctgccattatctctggagctgctagtgtctcatcactatcaacaatccctagagcaatgagtagtggttgtgaagcctgaagacaattttcaagagtttgccaaaatgatactgaaaggacaatattttcatcttgttcaccttctttaactagggcaaatttagacctgttccattcatcactaacaaacaagccttgtaatttactcctatgcttatacatgcttgccaaagtcaagaatgatgttgcaaatcgagtcacacctggcctaataaggtccccacctagcttttctctcattaggctgtgaagtcgcccatgcttgtacaggaacctcgaaatcttcttggccatgttgatgcaagtgttgaactccttgatcttgccaatattctccaacaacaaatccaagcaatgcacagcacaaggagtccaaaacagatgggaaattctgtccataaggatcctccccgctgctttgaaattggctccattgtcagtgatcacatggaccacatgttctttccccaccttcattatttgcttctccaacagatctgccaacatattggcatttgctatctcacttgatgcatcgacaaaacctatgaagtaggtccccactggactgttggcaaggaagttgatcaaatgacgttgttgtatgtcagtccacccatctgacataattgagaaaccatattccttctaagcctcttcgtgtttagctctcaatgttgatgttctcttcactgccctttcaagccaaggtacccttgcctcatagtatgatggtccacgatatccaggaccgtactgaccaatggactccatcataatctgccagcttcttgaattgacgacattcaatggaatcttgttctcatatagaaaatcagctacatggtcgtcaacaatttgctttacttctgttcctttctttgagcaatgctcaagagtggcctgagaagttttgtttttatgtctctctgctacaacttcctctggagtcttgcaaagcatggcactcactgatttgcttgccttctttgtatttggttttataggagctgatacaacaaatgaagacatggaagcttgggaaatttgcttttttgcttgcttggtttttgtcctagaacttggtaggggacgtacatcaatctgctccccttcctcttcaccttcatcaccatcagcagtaatcacaaccctcatgttccttctcagataggtgtgcatctcctttgaaaccagttctggtactctagcacacttcatggtgtcaccaaacccaccagcaagatgctgcttaaacctcttgattccagatagcacaatcttcttacagaagacacactgaacaaaatccttctttattgtgtctggccaccacccaaactgccatcctgggtcatgtgaccttgcctttctcttggggtcattttcttgtgcactaagctcaggagggagtgctataattgccttttcaacaagagttttacaatctgtagcagctgataaagcagacacaggaccagtgctatctgcatttaaggccacagggggaacagaagcacttccacttgcactgccgaccacatttgactcagggaataagacctcaacattattagcaagtccacagccaccattaaactctgaacagacaacacaaacacagacagagatgcagttactactgggtactggcactgtcgcactgatgaactcatggtgactgctcac

SEQ ID NO: 137737 - DNA, 674 bp, Zea Mays
ggaggcgctaggccatggcatggcatgatccatggtagattccaggctccggtgaggaattgtcaagccgccacggccacccgtgcttgtttccggtgttgcccatgattacctccttccggtgaacccctctggtagcctgcggagctcgacacgacgtcgatcgtggtggttgacggttgcggtctgcggtggctgctaaactcgattctccacgcacggtgcccctcacggtggttgtgggcaatctacagagctgggatgggagaggacgtgcccgcaacgcggctttataggcctccgccatgaagatgatttctaggtcgtcgcaatgacatctcagattctatgcgcggtggttgggttttcggtttgagccgagcatcgcggggaaggggaatccctgacaacccaggcccgctcgtaagagagacccccatctgtggtacacgattgagagactggcgaggtgggggccaaatgtctatgctggtggttaagcgtgggttgacgagagctgggattgggccggtgccggatgagtttgtgggtgatggtgggccaactggtggtgaaggagcgacccagcagatcctttttcttttctttctgttttccatatcaatataaactacaaattcaaatcttttttgaatgccaaacttaagttcaaa

SEQ ID NO: 137738 - DNA, 477 bp, Zea Mays
ttacgactgcataacgctgtgtaacatgatagcgtaaaccatgcaacatttaaatctcccaccggtttgagataaggaaagacatgccccacgatcgcgtaaataaaggcacagttacgggaggaaaccaattctaatttactgccgctcatccacgttcgtatctgtgatcttggcggaggttaacggcggcggaaggaagagcaccgggcggcgattcacggcgagaaaatgtccagcaccggcgctgacgatgacatgccacctgtagcatctgtgcatagatcaacaggtacgtctattttaatggacatgcatcctgtagcgtctgcgatcaccggttacacaaagggtgtatctgttactccccccgcggcattgagggcacctggacatattgatgagcacacaaaaacggcagacgtggtcggcgcagataagcacatccccatgagacatattgggccgcatgaacag

SEQ ID NO: 137739 - DNA, 346 bp, Zea Mays
gaggaatctctcggacgatgcatgaccagggcacaaagcactggaacaacatctcactggatgctttgctctgggctctctggccctggggaaggtctgctccgaaatggagatcttaacaagagcaatcaattcagtaccaccgatttatgtcgtatatggcgagcaggttaacgatgtcaggatagtatgatgagcaggttaatcatgtcgggatcattgatcggcaggttaatgttgtcaagatcatagtcctgaaacgacggacagctcatgttggtacagagaagaccgcctgaatattaatcgctgcctctgaatatctctgcagtgttgggttaacttg

SEQ ID NO: 137740 - DNA, 6937 bp, Zea Mays
ggaaaactaaatattaatttacaacaattgccaccggttgaaaacaaactttgcatgccattcatgtggcgttctcccatagccagaattgctagggctcggtgtccgaccactatccggtgcggcggtgcctccgatcaggtcatagggcaccagccaccgcgtacatccactcctccattcctcaacggaagtttctagaagaggtgacaacgaacctgctcttatgttgtcgtaaaggtcatcggcacccaactgcctacgacatcgttgttgctgctcctgcatgcacaagagtcgggccgatggcctctacctccgatctgtgccctctcctcttgccacaaagctaacgtatgtgaacatcctctcctccttgcttccccaattaaatctagaaagatgtttcttacttagaaattacaaattaatgctgctacaattttggacaggaagaattttacattagcttgttgcagtttttgccttgagagccttgaccaagcgaacatgaattgattattgtggtccgtagctagatataggtggtgcaattgctaatcttagtagggattttatggaagtttcttatgacacatgattgatggagagcaatgaaactagtccacactattttcaacacataatagtcttggaaacatgatacgaattccctactaagactagctaccttaacaactgcaccttaaaaagaaaacacactgctgattacttgtggctctagctaagctgatgatgctttgatacttcaacaacaatttatttgacaacatgttaggtagaatcatttttagtaataaatcatacaatatgcgtaacttgttcaacacttatatgtcttgctatgttctgaatttgcgctgccatgttatgagttttttcattgctcaagattgccatgttcttctatgttgcacttgaattgctcacttttaaaattcattttaaacaacctcatatggagaaatgaacaaaatgaatgttgtagataacaaaaagttatgcaactttaaagttgatatgcttttatttgaataatttctttaaataaaattacatttaaattttttaaatatttgaatcatatttaaaattcaaaattttgaaaccacctcagatgaagaaatggccaaaataaaagttgtagagcttgaaaattataaaacttttttttgatgaaataggatgggtgagaacccctagtgaaattaatatttaaaagtaaaaatacaacgagttaaaaagttgacatcaaaactattacattttgactaatctaagtaattatgccaggcacatatgatagagacatttttttcttctgcactctaagaagaaacaaatcaaaaagatctttgaaattattatagtagttcattactgaaggatttatgccttagaatagccaagcattcctttgagtccagattgaccacatcataatgatgatgatgtccattgcaaatggcaaacccaaagcagattttattgcagtgatggtctggatgtgggagcctcctctttggaaagtaactccaatttttggtacaacgctttgcaaacccacaatggaaaaataggtgcttcaccgattctagcttctgtagaatgcaaagtccaaatactcattttaaagtataataagcataatgtctagaatgaatattttaaatgaacataagtgtcttattgatgcatttgttagacaaataacccgcaaggactgagatatcgagctcgagcaatggcagccacaaacccgtttgtccactatcctaatggtcgtcagcacccgaccgtctcccacattgttgttggtgctagatgcatagtccaagctctatgttggatgtatgcccactttttcacacatatagtgtcgaagccaagttccaatatgtctcggcacatgctcgagctttgaccgaggtattacgtggaggccaacccaacacaaaggttaggacgccagacccaacacataggtgcccaagtgggctaggacgtcaggaagtggtgtccaatattcaatttcaagctggctccactagtatgagcatcctctcctccttgctcccccaatcagatctctattccccttattctcccaattagatatagaaagatgttgcttagatgttacaaattaatgcacatgacttgattactatggcaaccattatgtgctaatatatacctaaataggtgttgcaattgacagtcacattgaggattttatgaaagtttcctatgacccatgatttatggagagccatgaaactaattcacattattctcaacatacgatagttttagaaacatgcatataaaattcgttgtgatctttggtgtgctcgaatatcaatagcatgtatgcatgagctcaaatacatatgtgtggagctttccaggtgcatcttacaatgttgcacatttaagaaaaataaaacattcatatgcatgccaaattctagctttcggtcacccatggttcctagaaatgaataagctaacttccaatgcacaataaaaccaatgcttccaagaaattaataatatgaactatcagtaagtgagaagtaattgtagatgagctttttcggcttagattttggttcggcaggagaggagcttttgtgcggatggttgcgagttagaaaaactaaatattcaccacaatttccaccagttgaaaacaaactttgcatgccattcatgtggcattccccacaactggaattgctagggcatgttgttcgatcgctccccggcgcctccagctaggttatagggcgccagccatcacatatatccactcctatattcatcgctagaagtttctagaagaggtgatgacaaacctgctcatatgttgcctacgatgttgctactgctcttccatgcacaagagtcaaggcgatgacctctaccttggatctgcgccactcatcttgtcgtacagccgacatatatgaacatcctctcctccttactctcctgagcagatttggaaaggtgttggtccctaagaggttacaaattaatgctactacaatttagatggcaagaattttacattaacttgttgcagttttttccctgaggcccttgaccaagtgcacatgatttgattatcgtggcaaccattatgtgccatagctagataggtggtgcaattgctaatataataacagtggggattttatgaaagtttcttatgacacacgattgatggagagccatgaaactagttcacactattttcaacacataatagtcttggaaataggatacaaattccccgttgagactagccttaacaattgtagcttaaagagaaacacaagattgattactagtagctctagctaagttgatgatgctttgatctacaactgtagttcatctggctacatgttaggaataatatattttagtagaaaattgtacaacatgcctaacttgtttagcactgatatgccttgttgtgttctgaatttgcctgataagtgctgccatgttatgagtttttagtgctcatgatcgtcatgttcttctatgttctaatttgttcattttcataaaattttcatgcattgttttacttgtatagatggccaaataaaccatctgatctgaacccgcataagcctgaccaagacaggacccaatagttgtcaggcgagcaacacacgagtgtgactaactaacacattgggttgtgttgcacctactcatggctacacatgtgcctcggttataaccttggtcataaccccataaaccttgagccttactaggttggcccattgacacacgagcccgttgtgcttgaagcattgcaaatctattatgccactaaggttgtgttcggttcagctttctgaaccagactcgttgccaaaaatttggaacttcaaacaaatgggtacaacaacataatagattcctgaaaatcgacatatttctctagttcaattcagaatcaccttttaccccagatttttagattcctattatctatgctataagctaccattctcttataaaatatataattgatagttgtttcaaattttcagtttttccacaatcgtcccttcacagcagttttctcatagctcacagctagaatccgattttttaggaatctacagttgaaccaaatagacccgaagttacccctaaatagaaggaggctaccaccctacccctgcatagatcaggggtgaagtcactgcctcacccctgcacaaatcaggaaggatgatgcatcaccctatccatgcggtcggatctaagggaaggaggcccacaataccacctacacatggatctgagggaacatgtcaccatggatcttggtgggcattaatgagaggacaaaccgagaggaattaatagacattagtgagagaaggaacattaccaattagaggacatatttcgtttcgagaggagatgtgacattaaattgactagggagtatgatgtaggagaggagctcgggaggtgatttttctagggataggatctgggaggtcatcgattgggattaggattatgagaggagagggaataaaaataaggtgtccgagtgagagttcgatggggtggtgttggtatatactatataagctagggtttaaagtagtgggccatgttgcgtcaggctggcacgtgtgccaaggggatggcctaggcattgtgcaagcgtcggctaggccaacataagcatgacgattatggcaaaacatcaggctatgggtcatgttgatggctaggactcgagccttatggtcatctatagttagttgtaatagtaagcagaccctatttattattgcatagtcatgtacatttcattttctcatcttcatgaatgctagtgaatatctagttggttgtgacaataattaattttatatatagatggaaaaagggacaaaaaggaaaaccattgcaaaattggatgccagtgcacatatagcgtgaatagacatggtttaggaagagatcactagctactagctagaatagggcataaggtcacacacaaatcatgttaaattttgaagaataaactggcagggatcctactatcgtggacaacatagaaataggtggtaccgatgctcacaaagctgaatctagagcagggaagactttgaagatccatgacccaaggttagcggtgaccctgaaatttggacaatttttagggattattttggaagcaccctggtttttaagaatccagtttctagaaattggtttctaaaaaaaagaggtgagggtgtttgaaacccggtttctaagaaaaacaatttctaattttttgatacacaatgtctagcctatccttcctctataaattgggtgagggtggaaataaatgtaaatgtcatgaaataaataagggcatgatgtaattaaacagacaaactagttttagctgggagaggtcaccttctggattttaagaaactagggatctagattctataaactagagcataaaccattatgtttggaatcactctagtttccataaactagtttcttaaaaatgggcccttaagagttgtggaatgaaaaggttaaggtataaacaaatacatgttttcttttttagttgacgaggattaattgtttaaaatggattggcatttgccttttaattataggtcactctagtttgtaagaagtacatacatgcaccactagaatatgaacatagattatatgttatttttcttacacaccaatgattccctcatgttccaaggctaatggatggagctatcaattgatgccatagccatgggcaatagatgtgagatccaaaatgggtcaagtgaggcttggaacccaaggcattgagttgttcttttttagtaattttatttaatattgcggtgatttgtcaatgttggccttgggctagagataaatagttcattgattgaaatactagctgaatttagcctctaggaaggctagaggttaagctaatccacttttagagctaaacactttttgcagctattagttgaatttagtacactaaatgttctagatagagctccatttagcccgcaaatcaggcgaggggaaccaaaaaggactaccaaactagctgaccaaagataatcatttataaattgatgtgtttgttagactatcacttgttagttggtatttatagtatcttgttcatcttttttgtttagatatgtgtaaaattccctgatgtttaacatgttttttgcccacccgctaaattatttagcgcactaaaggtcatagcagactatttagaacactgaataccagtctattgttttctcttgtatagaacccgttggccatacaaagtatgcaaactaaattatagttggactctaaacaagagcttgttgtttgattaaaattctaaatgactggagttttttttggacatgtcagtttggacctatagttgtatactttgaaataacatttgtttgttcacttgttctataaagaaattatgtaagcttagagcctagactagaagtgcattttccttgtgttggttgaaactgcacctatatttttactatcatcaattctaatgtattataacaatatagtaccatcatgagcttttccaattattctagaaaacaggtcatgttcctctattatccatttaaggtttttaaaaagacaagtaatcagttttgatgtaaagtttgcaagaacttacacatttatattatttatttgataggtcatgaagcataatactaataaaagtattgaccaaagaacgcaaatggcttcttcaaatggtcatgtcatacctaatgtatctcaaaatgattcaaagctcgagctctttggttttgattctctagtcaacattttggga

SEQ ID NO: 137741 - DNA, 792 bp, Zea Mays
caaagctcaacaaattcagattcaagcctgctgaaggaaatagtggaacccagggaggcatccttttgctttgggatagtgacgtcttagacctgtctaatgtaactgttggggagttccacttatctgcaagtgtgacacttaaggatcgccgagcttccttctccctaacagtcgtctatgggccaacctgtagaagccgcaagcctgccttccttagagagatgaacgatcagagacctcctttgtcttccccatggctgatcctcggggatttcaattgcacatacaaagctagtgacaaaaataattctagaataaatcatcaccttatgcagttgttcagacaagctctcgataattgcgacctaaaggaaattcctctgcaaaatagaaaattcacttggagcaatgagaggcgacaccccactttggtcaggcttgataggttcttttgcaacccagagtgggaggagtttttcgacaactatgggttgcacgctctttcatcttcagtctctgaccactgcccgctgcttctatctaataatgctaggccgaggcgtccacgctccttcaaatttgagaaattttggacggttttactgggtttcaagcaggtggtggagcacgcttggtcgaagccgacccaacatcatgaacctttccatagactgtactataaactccagagcatagcccgggcgctcaggggatggagctccaggcttgttcctgattctaagctgttcatgcatatgaccatggaagttctccttaggctaaacctag

SEQ ID NO: 137742 - DNA, 404 bp, Zea Mays
ctcctgaccactcacataacttgttctcattagttggcatcaccgttggggctaacaatatgtacccttcaggttggaaatagcgggatggtcattgttgtaagtgtgtcctcacttctattttatcctaggaccgctcggtggtattatgtaggagtgttgtgctatttcggcttcctgtcctatttggtttaggaggtttaggtgatttttgatagcctatctatagtgtaagagtaactccaacaactcccaagaaaattacttcaacaactgcagacttagggagattggatgaagtgcgtatgcgacaaaatggcgtgggaacggaaaccaccagctagattgggagcctgcaggtcagcggaaatttgcgcactggctgagattgtattcgcacgtga

SEQ ID NO: 137743 - DNA, 563 bp, Zea Mays
ttaaactgtcagctgaagtcagtcgcttgaggtttgagatctcggagcgggactcggccattgattgggccattaactcgcgttcgatcacttggcaccgtgaagcaaaagcttgagcttgtgtggatgagcttagcgtgaccctcgataacctgcaagcgtactgtaatacattacatgaagaagttcatttgctgtatgctcgactgcacccggacgtgccctctaccgctgctgcaatggtagctggaccctcgggaacagcaaacacagggcctgagggggagttggacctttttaagccccctccttctatgaacctggttgatgagcggtctcctgtagcagacagtgaagcaacaaaggatgatgaagactagactagtatagtttagataaatacttatgtaaaataagtaatgaagtcgggttgtatgctggagtctgtataattacattttggtaatgtaatatgatggtatgtactgtcatgttatattttatccaaatgtttctttgccttagatgccatcacggactcacgcgcacgacggtgcggggac

SEQ ID NO: 137744 - DNA, 401 bp, Zea Mays
gccctcccgcctgttttggaatgccaaatttctttttagttcctgcgtttttccgtcatatgtatttatgtacgactgccacgcgtcctgtcacaggatccggcagcgctagtctggaagagctcagatgtggcctctgttgcgaaacattcacatgtgatcaaacccatccgatgggttactacccaagggtcgcaccccttgggggagtacccctgcaatctgtatataatccaatgttcccctgcaataaagactgacaactgtcaattcctttctactctctgtgtctcgtttacacttattcaaacacgttatcagcactgtttcttcactgagcgcaagaaaaaacaacagaaggttcttgacgacgcgagccgacggtagtgcggttggtgtct

SEQ ID NO: 137745 - DNA, 275 bp, Zea Mays
gccgaggggagggggagaagacgaggcggcggagcgcacggagggagatggatgggagagccagccagccaggtgcgcgacgggagagatggcatttggaggggacgaactcagagcgagaattgatagagttcgggtccgtggctagacacgcgtcaaatgcgcgatggtcggagacccgtgaagcgcggagaagagccgaaacccgagcgtcttttaactaaaggtaattcattgcttgctcgaccaaatgattctttctaagcctagaatgt

SEQ ID NO: 137746 - DNA, 483 bp, Zea Mays
ataggataaataaaaagaaacgaaaacgatccggctcagcctgtggattacaccatgatttggatccactaatcaaattgagcagcaagacttggctttaccatatgcgatagcaagagcatttctttatgaaataggtttctcgtattggtcatagtgggatgaatctcttttacttttaggattagttagaagtttaaatccccttaagttctggtttaagttctggtgaggatttgagcttccaaattagcccagaaggtgaaggtcgtatctcatttctggttgtccaaatttccaacaaatgagcacaacagttgtcatgaagaattgggactgtgtaacctgacttctggaacatctattcccaacattgttgcgcaaatgggcattgaagaattgggactgcagcagcgctgcatctgcttcttggttgtctgcgtcctgtatgcatcaagcagatgatctgtgagagcaaaaacc

SEQ ID NO: 137747 - DNA, 379 bp, Zea Mays
ctccactatttggttttcgcatcgccttccaaatccaaaagacccaagccctagctgtagccgccccctaaggtcatcgagatgtctcagcgcggtgagacgggcagtggagaccggcggccgcatcggcgtcgtccgcgcgatcaaggggtacatcgatgccattgccgacatcctccacgaccacatggtgagattgctcccctcccctttgctagaactcccactaggcgtccccttctgcttgcccaaatccgaacacagggcaggtctggggcacgaattgaacatggttctatttcagcttgggagtgtgccagtcgtcgacgacacgcgatacgcttcaatcgacttcgccaaccactgcacgccgcagggg

SEQ ID NO: 137748 - DNA, 796 bp, Zea Mays
attttaagtaagattttgtgactttttgtgggtgcacaatgtagcaaagttagagttggtctattaggctacaactttgctgcagagcattggtctagttgccatataaaatcgggaggaaattcgccccaaacatggtctgtcagactgactgaagaagaatctgatggtacagtgaccagaagaatctattggttcagtgaaccggccgccggcgaccccacgcgtggattcacaccggtgaggtgattcgtgctcaccggcgcccggataacgttccgcggtgaaaagatcttctcccccccggatgagcttaagccactgtttgtccggccgccgtgtccgctctaccccgatcgccttgaatcgaccctcgccggagttagacacctcacggtattgtgccacgtgcctcagcactttaaccacaccgtcgtgactcgtactgacctatccagagatcgctggtgaggttgccacggttgcagccactaatctcgtgcgccagtgactcctttcttctccaaccgccaccacgccaaaccaaattcactggccaccgcttagcgccgctataaattgacagcacggtctgctgcgttaggtcatcaccaagcctgagcacccgctcctgcctccgattagccaccacaactctccaatttcccatttcctccaattctgttttccgccaccgtggtagagccctcgccgtggtcagcatactccaggtctgttcatgctccctgttctcttgtttcagcatccttaggttctcctgatgctcctcggccaa

SEQ ID NO: 137749 - DNA, 521 bp, Zea Mays
aacaaccaatcctcgtagacaagtccatcagatatctggaaagtgtttttgtcccaaacacagcaatagtgtggggggtcttattgcagtattagaccaacatactgcacacagaagctggctctttagagtaacccactaggtatatcaaccctgtctgtggccagtcttggtcagaagaataaagttagcttttgtacaaacatctctatccaatacagctacaaaaatgtaactctagagcatcattcctttggatgccatgtctgcggaggaaccacggcctaacaaatcagctccctttgaaacaacccactaacacttacatataaaataccagcagaagcatgtttcaatgcagtgagattgttgaactacagttacagcactgctgaattatcaacgcctggtgattcgaggaaaatgtaaagtcgggagatgggtgcaggttaagcttctgaggaaggttgcatcacagacacatggcctgcagaaatcaccaaacctcgtgtcagaataat

SEQ ID NO: 137750 - DNA, 805 bp, Zea Mays
gtaacgcgacagagtgggtccagctggtctattgaagcttggtcccttgggtggaagcccaaaggatcgagctctctggtgacggtcttgctgctgagctcggagaacctggaatttcctcttgaggtgccctttttcttcctcttttgccctttccacttggatggctttgttggagaggtgcaagaagctgaggaaatcttggctggcgaggatggtcttgagttcaggtcttagccctttcagaaaacaggccatcttcctggcctcggtgctgacatcgtcaggcgcgtaacgagccaactctgtgaacttgtgcacgtactcactgacagatcttccaccttgagttagttcccggaactcatcttccttgagttgaactatcccctggggtacgtggtgctcgcggaaagcagtttcgaattctgcccaggtagcatccctgacggcctcgttgaacgtatcccaccatgctagggccatcccagaaagttgatgagcagccaattgaacacgctgatttttggggcatccgatggcttccaatttcctcttgatcgtgcgcagccagtcatctgcatcgaggggattgctagaccccgcgaatgtgggaggcttgagtctcagaaattctcacatcctgttctgtggtctcccaccacctgggcgctggttttccaggcttctagtgaggacttcaatgagtcgggtctgattggctagaacttgggccaaatctagtggtagttccggaggtgcggggaggtgggtctcactcccttctccgccagcttctccttct

SEQ ID NO: 137751 - DNA, 578 bp, Zea Mays
atcaattagccgatatttttacaaagtcattggatgaaacgagattttgtactctaagaagtgaaatgaatgtgatcgatctctcaaatgtagcttgaggttgaacgcacatgtgtagtattgcatttcggttctaaatatgctctctacgctatttattgggtatttttgatgaatttttcattttagattgatctaagtagtttgatatgaaaatgtgcattcctcaaatacataatgtgtatatgcatgcatactaacccttggattggtcgaaatgtccatatatgagcatcaaatcagatttgaaattcaaaatcagaaagtgaacagaatttgaaaaattgagtatcaggccacggaccgtccgcccatgggccgcggaccgtccgcagtatcaggatctttacagtccggtcagaagtgcagacagtctgaagttatcagggcgcggaccgtccgccgcccctgcgcggactgtccgcgacaggcagtaaaaatgggcagaggcagtcaacttctcatttctgctcatttcctctcacgctctccactcgccaaaaggtcactttcgtcga

SEQ ID NO: 137752 - DNA, 538 bp, Zea Mays
gtggatttgtagcactcggctcggaatcgatcgctagaaatgggaatttgtggaaatgtgaagtctgggatatcatattggcgtgaaatttggcaaatatgttactggaggcattatgaaggtgcctgaaaaatttgggatcgattggagcaagtttggctggtttggacattttatcgagcacctggcgtgcgagggtttaggtgtcgagggaaatggctaatagaggtggtgaaaccctccctaaggagctagaaacctgcaggggatctccatgaagcacagagcacacatccatgcacaagattcaaatggatttgcacagaattttggatttgagttaaaaggtgggggagtgagcatagagcagcacactggacagagaaggaaaaggagaggagaagcttagggctgctcaccagaggctcctaggctggaggaggtcaccggagcacggctgccggcgatcgccatcggtgaaccgaggggaagaggagatcgccagagaggtgagggcgccaaagctgagagggaatcg

SEQ ID NO: 137753 - DNA, 928 bp, Zea Mays
taatacttaatgaatcggtacgacattgcgccacttggatcaagaatcaacggtccgcagcaatgacccatcctggccatcggatggacgatccacgacccgcgttcaatgggcgaaagggtaagcggccgatttaatcctaaccgttaatccagcgatcgatggcttctacgcgtcgcccccatcgcctgcaccttcggcgaacagacacggcggcgcaaagacaccacacggcggtgccatcgccggcgcccagccaaactccgaaccacacgcccaaaccccgatttgattgcggcaacacgtagcggtcatcaacacgatgcagaagagaggtcgctcaccgagagattagaagcgcccagattaacccggacccggttatatacactgctacgctgacaaccgttagatcctagatccgcggtccacggcgcacgatgccctttactccctctcggccacacgattccctttcaacgcgctagattcaatacgacgaaggggtatgctagggtctaatctcggccgtccgccaacgatccgatggcgcacggttatcgccccaactgggcagatgtgcatggcggcgtcgctcaggccgacggcggcgttctcaccggagatcggccatccggcgcggtggaggtccatctcttaccccaactggtgctacgcgaagtatatgacacgacgaactacatgggtagccaaacttaccagattcgggaaccggacgtgccacccgcggcgtacggcggatcggggccgaggtgaagactccggcgaggaattccccgcactgttgggacgcaaggtccaccgcaaggccacggtcagcttcctaggacacagacgcgcgccgatggccactcgccgaggtcgggacgtcggcacggatgaaaaccaccggcggcggccctctttc

SEQ ID NO: 137754 - DNA, 434 bp, Zea Mays
gaaatcgttgaggattaaccatattggtttgaatgcttctacctgatgtagatgtggatatacccgggattaatatcatatccacatttgacttattggcatttgatctattctgtggggacgcctgcggatatgatccatcggccttagtcaaagcatatgttctgattgcagattcacgtggtctgtcataactctcctccgattaattcaccctgatggtgatttgcctcacgaagaggttcatcttgatgatgaaattcctagcaatgcgtgcaatatcattgtgctaggaattcggaacaatgaatctttcgttttgggaaatgacggagctcattattaaatgtgggagacaaatatgtcgacacttatcttgcctctatagattgcaaagggatccaaaaacaaagtcctaggcatgagtgcttgaa

SEQ ID NO: 137755 - DNA, 822 bp, Zea Mays
cgcaggttgaaggagcggagatggattgaagcggcggaagacacctggcaagtcgccttggccgccggaatggaggggtttccttcctgtttggcagatggagaagatagaaacccctatggactcgcgcgggtttatctctgttgattgcgcgaagacggttttggaaaccaggaaacgagggagacatgcgacgctaactgagacagaggctaacgacgaccgtgactgtgtatatgctgaccaagtctggttcaaccaaaagtgcatattgactggcctaggcttcctctattattggaagcccagggctcttaatatataaactataatcttcgattttcttcacgtctccagcgaggtcttctactccggtgagcttctccattcttattccctattttttcttcgatttgcatggtatgtgcatcccttcctctctcccaccccggtagcccctctcccactgctctctcccatctccaccctgcgccctctctctcctctcccccacgccctctctctcccctccctgccctcgcgcggcggcagcggccggtcggccgagcggcgctccttgcccacacgcaccgtgcggcgcgacgcgaccttctgccccctaacccgtggcggtcgagcggcccctcccctccccttgccatggcgcttgtagaagggagatagagggaggtagaaaaagatattttaacaaggaggacctggaatttcatttaaacgcgcactgaagtttgattgatttaaatattcaatatcttttgccttataaatctgattcgctccgttcaagtcacgttagattcg

SEQ ID NO: 137756 - DNA, 400 bp, Zea Mays
atcacttatcttgatttttgaatttgtagcacgatttgaataaatcaagacaagtgaatgcctcaaagcatgagacatacccacctagcatactagtaatagcaaaaaagatttcaacacatcctacacatgctaggtgccaatcttaatggtgaacaattttagattgagcaagtaatagtcaagttcacaattatgaaaacaacttagctcaacaatattgtatcaatatgagcaaaaagagcctaagcatgccatagcattatcatgtacacaaagaacatacaactaggagcagaatcacactctagcagttatacaagtgaaactcaatatgacatgcagatataatacaaaagaaagtgaaagcagaaaataagaagaaaagaccaaaagggag

SEQ ID NO: 137757 - DNA, 479 bp, Zea Mays
gccaaataaaaccagatgattcgatggaaaaagtttgacattgacttacttttgtggttccatggcagtagatgtttgcctttcacaaaagaaaaaacaagagaatggggaccaagagaataagatggaggggaccaagagaagaaaaggaggataggaaccacagaccttggagtgttgcgagtaagaagaaagggaacaagaaatggaggggaccgagaaaacaaaaggagagggggaccaggagttgcatggagtgttggcgactttttagttgcctcgagtgtaggtgccttttttaagttgtctgtagtgttggcatcttttttattggctggagtgttgacgccactttttattgtactttactgagtccaacgactgagatgaagctaaattcagtgaatttgtgtttgtcgaattgagaggacccggttccgtgcagacttgtacaacatttatgtatgctccctgctgcc

SEQ ID NO: 137758 - DNA, 812 bp, Zea Mays
tttcattctgctggtttgctctagtcaaccttcactttagttttggccatttgatctgtacctcctggagttcctgcttttcacaaggtgccttcttcagtggtatctggttttgggaatggtagtttaggtggacttcattgtcatcactgtgatcgagatggagatgttgaggcttattgttacaggaagaaggtctaatctcgtcgaggtggccgttcatcacaaggtacgggtagtgcgcctactagtggctcttagaatactaatacacatgagatatgttgcttcaccatcttggtacctgacctactagaactaccagttcagttactcctgcccctacactatctgctattacttctcagtcctccactaagggactaccatccaatttaggtatcaacccatggattcttgactagtgctttttttcatatgacacctaattgtacacatctttcttccatttgccctcctattcctctcactgttcaaactcctgatggctcacctcttttggttatttgatgtggtattatttcatcctcttcttttcatgttcctagcgtttcttaagtctgcaagttgaccatgcaacttatttctgttggctagcttccccatcatggttgttgtgttattcttgattctgactcttgtcgtattcaggatctcatcatgagtttcttggttggtattggcgatcaccactgtgatccttggagtgtttgggagcttgactggcttcgtcttccttctgctcactctgccagtcttgtaggctctgcttctcctgcattgacttctac

SEQ ID NO: 137759 - DNA, 468 bp, Zea Mays
atttgtggttgaagtgttgaagatattccagatctttcttcattagatcacccccgaagctataattaggatggggatatttgtctgggctataaggagccaggggctggagccgagcgcgaagtgcttctgcaatatgcacaagcttttatacaagacgaaggctactggcaaagaacagtaccacaacaacttcggttgttatggatttgttgctcgccccgatgcaagctacccagtgccaacattccggaaaagatggcccggggcctggatggaggagtggttttacgttaaaaatgatttaattaaaagggaagacatcaaggaaattatccagcgccccatctggtctcgcttcggccttcgaaggccgaaggtcactattgaaagtgacgtcgaagcatgccagaaggcctttagcaatgtttgtgcctttattggcacaagggatataattcaagagca

SEQ ID NO: 137760 - DNA, 486 bp, Zea Mays
acggacctaagtgggctcaatgatgagtaggggcaggaaatgcatgccgactacgctccgatgacaaagctacaacacaacctgcagctatttgttgacgacgatgacaatgtcagcgatccagtgcaggaaggtgtcaggaacgaaggagtcgcaaaggatacatatattgtgccagggttgggccgttgctcacttgcttgtctaggcctagtgggcgttatctagttaatgtgtggtctaagtttgcaatatggactgatgtataaatacgtgtaaacaacaatgcaagggataacattcagatgcctatcagcttggctcattcaatctctattttgttccttgtcgttcttcttcttcacacaacaacggtggtaggacccaacaattggtatcgtagaaacttcctgggctgactgacaacatttggcgagcgacgatggacaccactacggagtccagtgtcatgggggcgttggaggc

SEQ ID NO: 137761 - DNA, 411 bp, Zea Mays
ggggtatgggatctgtcgccgacgcgtgggcctttacggtcagcgggaaccagttccttgtgtgtgtgcgcgtgggaaatgggtgtgacaagcgggacccacctggaggcgactactctgtcagtcagctacctcatccgctccatgggttcgtcctcaaccgcaagcgcgaaatcggtgggtgatccgtggcggggttggttgtgcagggattatggagctaaaagccggacctgcgactgcgtagccctttccccctccatcgcgtgcccaccaccgcgaccaactgtatcagctgtgcgccaagattcgccatcgagagagagagacagagaaaagggagtgcggggaaaggctcgccgccatagataaacgacggtgctcgtcgtcgaccttgttccataggccggt

SEQ ID NO: 137762 - DNA, 278 bp, Zea Mays
agctgcaaaaagggcgcgcggcgaatgctataactgcacagagaagtacactgctgaccataaatgtgcagccaaaggggtcttctttctggagttagccgatgaagatgaagaggaggtagctgctgaattgggcatctccctccacgcattgacaggcattgaggtgggacataccatgtagctccgaatcaatatccatggcacctccctgattgcgctggtggattctgggtcaacccacaccttcatccaggagaatgtggcggctaaacttt

SEQ ID NO: 137763 - DNA, 540 bp, Zea Mays
taaaaaagtgtaatatccagatatatcatgaagatctaagtaagctgcatcgtatattgtatgtggtctattcttttagtagcaaagttcatgacttatcatattctccatttcctttttatctaggccaagaaaaaagttgctttgcttctacagaagctcaagaagtatgagctaccagacttacaagctcctcgtcatgatcctgagctgttaacagctgagcaactacaagcatacaagaagattggattcagaaatagaaactatgtgcctgttggagttcgtggagtctttggaggtgttgttcaaaacatgcatatgcactggaaattccatgagacggtgcaagtttgttgtgacaatttcccaaaggaaaaaattaaggaaatggctgcaatgctgacaagattgagtggtggaatagtgatcaacattcataataccaaaacaatcatcatgtttcggggaagaaactaccgtcaaccaaagaaccttatacctttcaacacacttaccaaaaggaaggtcagtcccttg

SEQ ID NO: 137764 - DNA, 540 bp, Zea Mays
gcgtggtgctcgtagtacgttagtttccgtctcagcagacagcaggcatgcaatgacgctcgcggggagatgatatgatgtcgtgcgtctctatatctcctgtctgcccccgatgccacaagaaccagcccccttggccctgacgtggccagcggcggcatacgtatagtatcataattcataagcactcctcgctctgtatatctctttctatcctctccccgacgccacaacaagaaccagcgtgttccctccccacccgtcctccacctccactgcatccacgtactagctccttcatattcctgcgcacgtcgacgatatgcccggcgcgccacgttcatccaccatcgatctctaccgccttgctcgcgacggctggatctgaggtcgccgggcgcgcggcagcggccagaacccgagctctcgcccgcgtcagcgtccacaaggaccacgatatggtcaggtactcaggttccatgcatgcccgcccataggcatcaccgaaccgcgccctacgtacgcaactgcccagccgat

SEQ ID NO: 137765 - DNA, 334 bp, Zea Mays
cgatgatgaagctatactttttgaagatgacgaagacgaaggatacctattcgctgggcaaggtacttgcgtaatgtttttaatatagactttgaaagtttctagacctgtacatcttatccattattcttcgaacacaaatttagatggtgaatctggtgaggatatcgatattgatgaaacacaagatgcctttactgttatccctgacgtacctgacccgtacgacaaggtgtatagtaacatacctgaagaaacatatttgttgaacactgttgctgactgcgactactgcaaggcaaagaagtttcaatatgaaccacctggattttgt

SEQ ID NO: 137766 - DNA, 447 bp, Zea Mays
gccacactcgtgtgcgacaaatccgcgcagaagtcgcctaagggtgcagccggactagcacaacaagtgcgaaaaaaaatcagtctatcgcgaagactatccgcgcagaagtcgcccaagggtgcagccagactagcacaacaagtgcgaaaaaatcaaagtctatcgcgaagactatccacacagaagtcgcctaagggtgcagccggactagcacaacaagtgcgaaaaaacctaagcctaccgcgaagactgtccgcgcagaagacacctaagggtgcaaccggactagcacaacaaaggcagtaacgacaacatcaaaccgtccgcgacaagaccaactataatcacaacagcacaacaagacaaaccagacaaagtacacaacgccttcgcacacaagcgagggcacacaacttcatcatacaagcctctacatatacaagc

SEQ ID NO: 137767 - DNA, 938 bp, Zea Mays
tcgcgcgcaaggggaacgcgcgccaatttacaggggaaacgcccgccaagctagcgcatcgggcaccaaaatccagcgccaacaaaccctaggttaggcgtcgcccagggggagaaaggcgtcgcccagacgcctaccgcgcctaggcggacgccatactcaattttacctgggtggcgcggacgcctagcaaaaaatgtcgcctggacgcctaggcgacaccttttaaacaatgatagtaggtgagcccaaatttcattactacatcacaacctaattacaagaacccaacagtttgaaagtcaaccgatcatatcatcagcacaatttgttagaggaatggcaggctcatggcctcatgcaacctttttcttgctactgcctatatcactctacattagccatgaccatagaagttttttagaggaaaataacacatggctgcccacagctgacagcactcctgcattttgagaaaaaaatattgatttatacaaattcctaccaactaactctaaaccatgatgctttagttttgttatgattctagtagcacatcaaatgactctgcgatgtatggccagactcttctatcatgtgtagcacatgaatggtagaaacagatctgacttctagccttctgtcttggtttaacgagagtaattcatttcaaaacaaggaaaaaatgttagtagaatcagtgcaattctcagagcttagatggcccacacctgagattgaaaactataactgcataattgttagtgatgccacttcagtggattaccatcaacctagaagtgtttgtatatacaataactttattttataaatctgtccaaaaagttatgtagacagtatggtttggttggtagttaagcttttatctccagatatgcttttaagaaggctgtactgtggcagattcctcccgtcaa

SEQ ID NO: 137768 - DNA, 384 bp, Zea Mays
tcttgcctagttgccaggtccatacaggatggcgacatattataggttcagtggagccatacatgctaccttgataacagactaaaatctctcaagtcaaagtttgtaaataaactatcttgataagacgaggcctcccaaagcttgatatccactatgaagtaggaacccaaattaccgatcctaagcatactacctgaattattcataaatcatagcagacaacctttttagaatacataacacagacaataacataatggtcctaaacatgaagatgtccacaatgtggctagcagcactaaaatcaccagtatcggaagatgtcctaaacatgaaagtttgatattttcaatgacaagacttgaaacctgaaaaattcaa

SEQ ID NO: 137769 - DNA, 513 bp, Zea Mays
gtcgggacgggaacggagacaggaccgagcacgacggatacacgcaccggatccaccagcccgacggcgacagccgatgctagcacatctgccgctgcccctggtaagcgctccaggaggcggggaccgacctctaaggtttggttgcattttgaggaagttactgagaagcagggaggtaaggaggtaaggatttccgccatttgccttcactgcaagcacaccctatctgctaaatcttcttctggaactggacacttgatctgtcacctagaactttgccccaataagaaagataaagaaaaaactggtagatctcaatccctgcttaagtttaatgctgatggatctgttatgcactgggagtactctccatctgttgcaaggactgagctttgtcgtatgattgctagactagacctacctctgtgttttggtgaatgtagtgcatttcaagaatatattactcgtgctcataatcctcggtttgttaagtcctctaggcaaactact

SEQ ID NO: 137770 - DNA, 399 bp, Zea Mays
cgatgaacgtgaggtcgatggccgacgcaagcctaccacgacacacagaatgggcagggagaaactgaaggcgacaggtgctaacgtcagggcacgatggtgaacagcagccgagaccggaccaaggtgcaggacatggagaggacgacgtgcagcctgatcggcgaacaggtgaagctcgaccaaagagagggagtggaagtggaggtccaacattgcggcatgaccgcacaattgatgcgcttcgctaaaactactgttgtatgggttgcgcatgcctggctgatggcaggagacggctgttggacggtaaaagagctggaggcgagtggtgactggtgagatcgatggccagaagaagaaggatgagcagtgaaagagacgtccgcgataagaaaa

SEQ ID NO: 137771 - DNA, 412 bp, Zea Mays
ctttggtcataaactttctaaatccaggtttctcaccaaagcaaaatggcaactcatcttctattatcatctcggcaaaagcaacccttagtgtcttgatcaaacctccacatgcttcatgttgagttgcttgtagagtatcttaaacttatttggattgcgtttgcaagcaactaaatgcctcttcaatgacgtgccatggcgtcgagcctctgccttcatgttttgatggcaatatttacacttagcatgcctaacaatatgtttatcatcttttaccttaacaaaatgttgccatacatctgacctaggctatttcctttctacccccatccttactcaactcacgttcctcttgtgtaggtgtagctattacattctactgtgtagctattacatcatatgactgagc

SEQ ID NO: 137772 - DNA, 521 bp, Zea Mays
gaagacgcggcattggcgcgagtggcggtgcgatttccttgcacgtagtaaccgttgcgccactggaccgctggatgctggaccgctggatgccacgaagctgaaagggtgcacaaccgtggtgcggttgtgtgctttctgcatggcggtccgccctttcgaccgctggtttcggcgaggatgggggaacgcttataaccgcggggcggttacatgcttcgtgtgcggcgatttggcttcttccgtttcgggtcagctcgcatgacgtgtgggacccagcccccacgttggagggtgagaaccctggagcacgtcagtggagactttgcccgtgacgcttgggggtgcgagtgaggagatctgcctttaaaaagggatcgaccccccaggcagtagccatgtcttcacactcttcgcattcatcgtgcccttccaccctccgagccccagatggggtgcacccgtgttgccttcttcttgctgctgttggaggagcacgacctcgtgggggttggcgctct

SEQ ID NO: 137773 - DNA, 616 bp, Zea Mays
tgaaggttcgccgaaaagccgcgccgccgcgtggactgtggtactgcaaccccagattgaggtataaactcaccaaccagcttgcccttccctaagcatgacgcagcgttgatcgaatttggaatttgggacttgattcatggatatagtgcgctggccatagttgccgccgtgggtccatgcttgcgctgccgtggttgtgcctggtacgcctatggcgcaccaaatttacgccaccacagtattcgccatgggctcctcatcgttttgcatctatcggtcgtgaagattgggtcccgatgcactggatccaccatctccggcgagctcaacggcggactgttgggtggcgccgttgccggagtacgcgggttggggaagagtgctcgcaaccgttagattcattatcaacgtcaacgattagaagtcgagcgcatcgtttcggccgagtgcgcgcgaccattgatccctgatccgaaggtggcgcgttgatctcggtgatgtagaatgcagtccgttgatcgatcatccgatggctgtgatcgcgcgctagtgtatagaaccatggatctaatctgggccataggagtaagatcgagcggcccaaatatgtcga

SEQ ID NO: 137774 - DNA, 540 bp, Zea Mays
gtagcaaaatgatagatggattatagctctataactttgctgcagaaggatggtttaggtttcacacaaaatcgggagtaaatggggttacaattggctctgtcagtcaagctctctattgaattcagagcactgtttaccatcatctgaaaatatcgcgcagtggataaggtcttggacctcgccggcgataagaacgccaccgcggcgtgaccggtcgtcggtggtcgcggtaaagttccttggcaccgtggcaaagagttaccgcgctggcgagctctggttaagcggcgaccccgtgccctcaccggaaaccgccgcgcggaaaacttgccagcacctccgcagctcgcgtttcttctccaactccggtcgacggtcgtccgccgcgtggcctagcttttctaccgtgtcgccgtgactcccttgggccatcccatcatcgttggggaggttgccacgccttaggacacgtaaccgcgcgcgccaggcttcttcttcacctccggccgccagctcgtcgcggtcaaattgagagcc

SEQ ID NO: 137775 - DNA, 307 bp, Zea Mays
ctcaaacaaggccatacaagtggaaagggctagagaagaagaaaagggtcacctcaagaggaagtttcaagtcctccgagctcagcagcaggacaggcaccaaagagttcaatcttttgggtttcctcccaaatgaccaagcttcaacaaaccagcaggatctgattcgtcatgtttcagtcagcagggtcaaagttccctccaggccccctccgttgcaagcaaccatcctccagccaatgcttgttggcactacggagaccccagtcactacaagaataattgtcctcagttgaagacatcagtg

SEQ ID NO: 137776 - DNA, 633 bp, Zea Mays
gcactaattccagttttcttttgtaagtgttcagccatgatttgttgaggggtcataggcttgagtacatactttctcccattcagatctagtgtgtactgatttgttattccataatgctgaaaataacagtcatattgccaaggtcttcccagcagcaagtgacacacagacatgggtgcaacattgcaatccactatgtcaacatactctccaatcttgaatgaaactttcaccttataaccaatcttgatatctcctgattcattcaaccattggacatgatatgaatgagggtgtcgccgcaacttcagaccaagcttttcaaccttctcacgacctacaagattatgatagcttcctccatcaataatcacctttagtactttgtcttgcacttttgctctcgtttgaaaaagattatgtcgctgtccaatttcagcttctttcatttgaacactcaatatttgtgtaaccacaagagcggtaccatgctcaaattcacatcccatatgttcttcaaagttatcaatgtcatctacatttcctgcttcagcttcctcttcactagctgatgtatattctccatcattagtgacaaggatcacacgattatttggacactccttaatg

SEQ ID NO: 137777 - DNA, 737 bp, Zea Mays
agcctctattaaaagtcaaaggaggcgaatatggttgtctcggttgatattgttaacgaagatagccattcttggatgtacgtctcaattatctctactaactattaaggtattagtgtagactgcccccgcctcttctcagcgcgtggcaccccctccacccgccgcaaaccccgaccccgaccaagccggcctaccgagcaatccgccccgagctcaatacccgcacgcacaccccgagcaatccgtcgtcgcaaccgcgaccgcctactcaagccgctatcgcaatggcgcccacctactctgccccgctagcaagccactgtcgaaacccatggccgcataccccgcgcgcggcccgaggaatccaccgtcacaaccgcgcttgcctaccacacaattccagtgctccaaagccctgtctccccgcgtgcatgccccgatcaaaccaccgtcgcgagcgcaccatcctcccccacgattccaatggagatagctcccaatccgttgattgtatctagtgaatgtttggtaggcgctcaatcctactccccgtgcatgcctcgagcaagccaccgttgcgatcgctccctcctcccctgtgattctagtggagatagcgcccaattcgttgtgcggcgatggcggaggacaaacaccctcgacttccatgctaacatatccccgcatcccatgccaacattgtgggggacagatatcccccgggtccactggaa

SEQ ID NO: 137778 - DNA, 527 bp, Zea Mays
gtttacgtagtgcaatttcaacaagatatagggatcaaggttcacaaaaccagttgcttagcaaaaaccacgccgggaccgattaatcgcaataaatcggtagaaaccggccaaattcaaaatcaaaccagttcttgaattgaaacggcttgtccattgcttagcaacaaaattgaccacattctttcctgccttcgaaaatgggctcgtatcaatcatatccttgtctgcaccgtttgtggcttctccttcctaggaggtgttctttcaaacatgcatggcacgtacaccctcttgggaggagccatcactcgcctcatacatgccaccactcgcacgagcacatctcctaagttctcctcctctctcgatgcatacaatgcaaaccgcaaactcttcatagttctcatcgtatcgttagactattatggcaatgatcctaggcttccttttgtgtgaggtttgattgtctatttgtttcctcctacgagacgaacctgccaatgccaccctccatacctcctccg

SEQ ID NO: 137779 - DNA, 387 bp, Zea Mays
gtcttctctctctcactgatttttctcctcgcgcgttcttatcggtctgcgccgctcaagttcctggaagaatatcccgccgccgagctcatcctctgctctccctgctcgccggcagaagccccagccgagttccagccgtcggtcttatcccgtcgtgggatatttcctgctccctcctctgccttatctcccacgcgcaggcttcttctccacgcgcgctctctcctctcttgtccctcgtggtgcttcgctggccggtgttcttcccagccgtggagctccatcgctacccatctctccttctcgcggttccccgagctcgccccaaatcagacagcgtctggaccaagccccagggctggtcgtgcccagccccggcgtcgg

SEQ ID NO: 137780 - DNA, 343 bp, Zea Mays
ccgacttaagctgattgctctgttagtagggtatagtggtcaccctaagtcgagcaagcgcgagcatgttgcaccgtcttaagttattgtcgacttaagccgattgctccgttagtagggtatagtggtcactctaagtcgagcaagcgtgagcatgttgcaccatcttaagtcattgccgacttaaactgattgctctgttactagggtatagtggtcaccctaagtcgagcaagcgtgagcatattgcaccgtcttaagtcattgccgacttaagccgattgctctgttagtagggtatagtggtcaccctaagtcgagtaagcgcgagcatgttgcaccg

SEQ ID NO: 137781 - DNA, 1010 bp, Zea Mays
catatttacgggtaaaggtttgcctcagtttatcccttccccatacaccactcgtatggaagccttcggcactagattttccctttaatgatattttaataaggttttcttcattggagaaagtaacacatgtttcatttaccatgatcttgcaaatgaacacttagtcaacactaaggaagcgttaaacagtttatgtcaagctcagcattcatgcagtacagccgctctactcttatacttgaattgaattactgaaaccaaactctgacctattatattgaaatattactttgatcgttaactgtttacattttttaatatactttcctgacttcggacaggaacatagagaataatattttttctggaccggtgcctgcgagcttgcttaacataccaaacttcaagtgagataccttcttcctttcacatttaccttaatcagcttcattaaacctccacgatgttgtctgtagcattgttatttcatctattagacaaatatataatattatttagataggttgtctcgtctatatgaacttgttaagcgactaatagtatatcatcacagaaaggacgggaatccattcaataccacatctgcatctccgccttcaacaggacccgacccaactctaacaccagcacctaacacttcaaattcaacgcccccagcaccagcacccccatctccttcaagagctactcccccgcctaaaacaacctcaaattatcctgaaggatcaactacccgagacagcacttcatcatctaggaaacacaatacatcaaccctcaagattgttggttttgttcttgctggagtagtgctgtttattgttatagtcttcctagtattattttgtctatccaagtaccaagggagacagtcgagatacgatcgtaatagaagtcagctgggaggggtgcatcatagggttgaaccgcaaatcaagccacctccagtgcaacaaagcaatgatattaaagaaggtaaacctttc

SEQ ID NO: 137782 - DNA, 362 bp, Zea Mays
gacaataaacacctggggtgttacgagacggcctccagcggtggcgattcttggggttcagagtccatgattattgggcggcggcggtcgttcccgagggagacattgggtgtgtatggtgagaaggcgtcgcgggatggaaacaaaatgatagcgatttgtatatatcatcaactcagggtgatttcactatttgctatatttttcatatacatcttgttagactatcatgtgaagacggttccatatttataagtgtctagtatactcactaacatctatgacggttcttatagtctagacgactctaatagtattcttatttgagatggtttcatacatagaagtgtctcaaatactca

SEQ ID NO: 137783 - DNA, 298 bp, Zea Mays
gctggttccatcagaggacacacctgctgccgaagcaacgcaagctgatgttgaagaagttggtttcgaagatgagtacagctgcgggatgccaagcaaacctagtcatttggactttggaaagtccaccatttctgaagctgatcttccaaaaatggtgaagctgggctactttagtgaaacaaaaaaggagctggttcgttttggcggggaggagattactccgaagccggaaaagaatgaggtggttgtgttcaaaagcttctttaaagcaggattaagatttcctttgaatggg

SEQ ID NO: 137784 - DNA, 284 bp, Zea Mays
ccgctgccaacgcctaccaaaatcgacctctattctagattcgccatgtgcacgactgtggaggagctcgtcatcagccatggccccaccgcctcgcccccatctacctccccaattttagcatgaacacgatctcagacgcaaacctcgcccccacacctcgccatccatccacctccccggatggtgtgccttcctggaattaaaagaccgaagggaggccacacacgagtttaccaagcagacgcacgtgagtacatccgacgtccaccatcagccaacgc

SEQ ID NO: 137785 - DNA, 470 bp, Zea Mays
tgtactgagaaaacttcaattattaatggtttccacgtacacagcaagcatcaaggattttcccattgtttaaattacctaactgccagggatcaaatcttggcaaagagaaaaacaggagccagcaagcaggcctcaactgccacgcagcacaattagtaaaaatcatgccaagcagagttcaatcttccatgaagaacatgaaccagcaaacaagcctcaaacttaggaacacaatcatatctgcctctataggagaagaaaagacagctaaaattcaatacttatctggaaaaaaaatcactccaattctatatgcaacatagacactgtttggagttgaactgcttaggttctgtaacaacatccagcccaacacaaaatgacatgttcgcctgagcccaaaaccagaagttaatagcactctaggagagtcatagtgtgatgcaacgtctcagtagtgtttgatt

SEQ ID NO: 137786 - DNA, 326 bp, Zea Mays
ccttacccgggagcccgcgtcaccggagaagccgaatcacgctcaccggagttcacgaacccgccggcgcacgtggaccgggtaaaccccttcgccattttccgattcctcgcgcgtatggcctctgtgtcatcccgcgaagctcctcgtaccctttgattgacccctgccgccatgttttggccggagcagacatcaccgtcgacctccgccgcctgcgcacgtggaccgagtagctccgaccaccgctgacgccaacccgcacatcgccgtgaccgtcgcgacctcctgaacctcgccgaccacctcgccggacctacctcgcc

SEQ ID NO: 137787 - DNA, 535 bp, Zea Mays
atcaaaccggtgaaaggcagttctttggacctgagattatacaagaggcagaagaacaagtccatcaaataagggagaatttgagaactgcatagtcaaggcagataagctatgctgataaccagagaagattattagagtttaaggagggtgatcatgtctatttgaaggtgtcaccagtccggggtatgcgaagatttaaagtcaaaggaaagttgtcccctcgctttattggacctttcttaatcctaaagcgagtgggagaggttgcatatcaactagaactacccgatcatcttgcggatgtacatgatgtcttccatgtatctcagctgaagaaatgtctcagggtacctgaagagcagctaccaatagaggaccttagtgttcaagatgatctgacttatgctgagtatcctatcaagattcttgatacactgactcgtgtcacgaggagtaaagtgattaaaatgtgtaaagtacaatggagccaccatggtgaagatgaggctacctgggaaagagaagaagaact

SEQ ID NO: 137788 - DNA, 389 bp, Zea Mays
tggagttagggctcgaatttaagcatgaaccagtaagaatttggttagggatgctatagcaaagatgaagagggattattgctctacaacttttctaaagagagattaacaaggcatcatatgaaaaatcgagattcgggcactataaaatggtttgggaggaaaactgattgtgttgcgccatggtacagtgcaccggggggatcaggttcagaacctcgccgtcgacgaccgatctacgccgtgatttgcgccggggtcaggctgagctatcgacaggcatctcctcgcgacgatattcttgaagcaggataagatcttcgcggtaggggggtgattattccggccgccacgcggtcactgatctttccggccatgcttggtcaccg

SEQ ID NO: 137789 - DNA, 401 bp, Zea Mays
gccagctccgtatcgtcttgaggcagctggctggctgaggtggggagcgatcgaacgttatggtcagaagtaatgtgatctctacttggcacccatcatcggggcatcatggcctatgcagaggttgaattctgacgctacaaacaaagccgcttttgatctcctttaaccctggagcaagatataaaaggcacccattagaacctcccttttccatctgcacatcgagtgcacgcggagggatcgatggaggcaaggaaggactagtcgtggatgggaggggaggggaaagggcagcagctcctgcaagctagctagccactagagtgggggcgaggggacaacttgagaccgggggaatctgcggcggcctatcgatcgctgtcgatgttaggcctgcc

SEQ ID NO: 137790 - DNA, 376 bp, Zea Mays
tccttagagaaagagtatgagaatgatcagaaatgagagatttaggcaagatcaacatctgatacttgagaacgggttatagcagataaccagataacggggcagattcaatgggggatcccgagattcggatgataagccacaacatgattcacagaggaaaagattaccagatctaggtgaaaagagaggtcatcaacctagatggcttctgggttgagcagaggagaacttaatgaggattttggacaaggttcccaaaaaaagaatttgaggctagatatggtttgcgtgaacagacagtaaaccatttttttggcatacacaagggcacaaggaagctttagtcgatttaggggtcgagctatgagtgtct

SEQ ID NO: 137791 - DNA, 397 bp, Zea Mays
aactcaggcgctctggcttgctcgactgcttgatggtttccttgggagagatactggagcggtggaacttagggtggatagccagtccgctctagcgtatctgagtgaggtatcacttcatccgtgactgcttggcagaagggagcatcaaggcatgctacatcaacaccaaggatcaacttgcagacctgctcactaagccctttgggagaatcaagtttcttgaactttgctccaggtccgggatggcccaactatccaacaagatgacaaacaagacttagggggagaattattggaataagtctcgtggtctatgggaagaacaacagcagtagcatctcagtcttttgactgcaaggacaacgtgggacaacagctgtggcagaaccacccg

SEQ ID NO: 137792 - DNA, 623 bp, Zea Mays
ggggcattggtgaccaccctgatcgcgcggtgaagtggcgctgtggttccagacagcggccgggtgccctcacctcagtcgtgcgtcgcggcggattcggcgccgacccgtgttcatcccctgtcgtggacccactcgaccttcacgaattactccggtatgatgccctccatcgacctcactacctataagcagtagtttacgcccctcggatcgattcacggcggccagagtagagttttgggtgtgatccagcaatggaccaccgtggtccagggcgccgccgtgttttacgagaactagagaagaaaacatggtgttggtcgttgaacgtgtgatggacgaccacgattaaatccagtttcccctttctcccgattggatcgcgaccgttggatctttcaccgatggtgtcgattagattaagtgtaccgattcggggtatcccacctggagcgatagatcggaatccaagggccacgatcgcttactgcttcattataatgttgatctgatctgggccgtccatgtttgatctggcggcccacaataacggataccccttcgccatggttaaaatgcaaaagagcccttactaagtgacaaatagatcccgcggtcca

SEQ ID NO: 137793 - DNA, 398 bp, Zea Mays
tcagttctaggccacccttgaggcctccatacttcagtttggcttatatcgcccagctcctgaggacacagctccagcaccatttgatccactggcaccagatatcagggttgaggatgaggccatcagacagtttgaggatcagggtgcagatgctgagacttcctctaatgatgatgaggatctgggaattctgccaccacctcatgtgccacctcgttcccatgatcacgaggctggtggctccagtgctgctcctccggctgctcctccagcgatagaccccgctctagctgccatccttcagtcactcactcagcagcaggctcacaaggccgcagagcaagcccgtcaggcagtagagcaggccaggcaagcagccattcagcagcagttgt

SEQ ID NO: 137794 - DNA, 381 bp, Zea Mays
cggttctgtgagcagaggctcccttatcctccccgtttgcatcaattccaaattcttcaaattcttgtcaaatcaaatgaatccagttggtggaatgtgttcaattgtccccattatgtatccctgcaggttcttggctccttcgagagggttttcactcctcatatggccatttctccgaaaccctaatatctcgcccaccacgtgttcggtaaaatacccaaaccagccaaaaatgctcaaattgaacacaaacttttcaggcacctttacaacacttccagcaacatccttgccaaatttcacgccaatccgagattccaggcttcaatttcactaaattccccgtttcgagcgatcatttccgagccgagtgcccta

SEQ ID NO: 137795 - DNA, 377 bp, Zea Mays
caaccttcgggataatacccatctccctatagttaaacaacattatcctcagctcgtcaccctcaaaaagacttcgcaattccccctcacctacactcgccctagctggcgaggacaacaattcccgcttgccagtcctgtccacacaaagacgaccaccctccacctcactcactctacgcttcgccgtcgcccttcgacgcctacgcccaacacttggaccgggaacttcagcacccaccacacgcggagaagcctccgccgcagccacatccaatgccgcaaaataatccaaatcatcatccgaagactcttccgtccacaccaccgaactcctagaatcatcagactcaaaaaacttagacacagaatcaccc

SEQ ID NO: 137796 - DNA, 391 bp, Zea Mays
ctagcggagctcacgtgggcatcaatttatagagagcaacggcggtggcgtctaatttggagaaggcacgctgtcgaccagagagaggggaaatcaccgggaagcgctaacgtggctattactgaggcaaggctcctgaggatggacagactccctattacggttcactgcgatgtggtaatgctcctaggcacgtggcgcaggtacgaagatggcgaactccggcgaggacatctcggttagtcgtacaagtgggtacaatgaatagttcagtggttgggtccaagctcatccagcgccaagatcttttatccaacgtcattatccgcgtgttaccaggcacgaatcgtagcaccggcgagcatcgtggcgcggggtcatcggcgacgag

SEQ ID NO: 137797 - DNA, 674 bp, Zea Mays
caatgggtgagacaaatcttgatcctgaataatatgattgattatttttttattgatgttaattttgttttgtaattcttcaatacttctgggcccctagctcaggtcctcctgcttctcgctccttcctccccccggtcttctcgtttttcaaccatggacttctctctcctggactttcggccaggcctggccttcgaggactccctcagggatgtcctggcatcttcagtttgccctgcccgcccaagtcttcggtcgtccttctggttggtggtctcctttggtagatgcatcttcaagttgaattcggtctcggttggtcatcttcttcaggctgcccttggtgggttcgccgcgggctttgaggtgcttcagctggctgaccgggtttttcggttttcggtttcttcgatggcggtgggttttcatatttacaactcaggttgcattgagcgtaaggaattcagggctttcttcaacctttggaatcgtggtggacctaattggaagcatgaattcaggattttttcgtatgaggaagcagcttcctggttgaaggtccggggcaggaagaatccttcctatgcggatattgttaagctccctctcaccggtgccaatgttgttccgattcgcaacattatcaagtcccctggtggtgctcagcgtgc

SEQ ID NO: 137798 - DNA, 650 bp, Zea Mays
gagggcagttgttcttgaagtgactggggtctccgtagtgccaacaggcgtttgctggtggctagttgcttgcaacggagggtgcctgaagggagctctgactctgttgactgtagcgtgatggagtgggtccagatggtttattgaagcttggtcccctgggtggaagcccaaagggtcgagctctctggtgacgttcttgctgttgcgctcggaggacttggaatttcctcttgatgtgccctttttcttcctcttttgccctttccacttggatagctttgttggagaggtgagagaagctgtggaagtcttggttggcgaggatggtcttaagctcgggtcttaatcctttcagaaaacgggccatttttctggcctcggtgctgacatcctcaggcgcgtagcgggccagctctatgaacttgtgcacatactcactgactgaccttccgccttgagttaactcccggaattcatcctccttgagttgaactatcccctggggtacgtggtgttcacggaaagctgcttcgaattctgcccaggtagcatctctgacggcttcactgaaagtgtcccaccatgctaaagccattcctgaaagctgatgagctgccagttgaacacgctgattctcgagacaagtg

SEQ ID NO: 137799 - DNA, 347 bp, Zea Mays
cccacgtgtcataggcagggggtcttcttctttggacgtagggggcttcttcccaggttgcaactagcgtgagcgccatgtgggcaagtcgacgatgagggttggtgcttgcttcggccatcgagaaggatgacatgctcgtggaggccgaacagagctcgcacgtagccgctgttaccataccgctggagctcaacgtacgccacggccagctcgatgtgcgcgagcagcaacaactcatcaaaggttttggcctgcgtgtggagttgcagtggctgcgtgggaatagggttgacgtcgtcggcgcgcagtgaagcttggagagaggaggtgcaggcgtaggcgcg

SEQ ID NO: 137800 - DNA, 450 bp, Zea Mays
tgtatatctaaagaattcaaatataaagaggtagcagcctttacgagtgtatactttgcagacgagcacaatatcaatgcccctacattgaggtatcatgatgccaaagtagggacccacaacaatccccaaatttttgagattgagggcaagactgtcggagcatccacggaatatcatcctgagcgcgaagaaaagttggacgctttgctctatttgtatgaaaatatggatgagatgaccccatatttcaagtaagatgaaatttaatttgtcatttgtgtatctatatagtaatcgtgttccgcacctcatttgtttacttgttgtaacagagaattccaatcgcaacttaatgagaaattgtcctcgaggcagtatgaaaacgtgcttcgaggaagacatgggaagcccaatttcattaattggttgtgagcttatgtaaataac

SEQ ID NO: 137801 - DNA, 560 bp, Zea Mays
gtttgtttttcttttctacactgtcgaatactggaatgtaataagtttggtgcaaagtatggttaaaatggactgcagttaattcaccattttggctcctaggatagaaagtattagaacatttttccgtagtatttctttacaaatgctacaaagcattttgacatagaattatgaaaataatatttggttaagctcattcatttggaatataattcagagtgaaaagaatatagtcctgtttgtttccattagttctgagttctgactatgccaaaacaggagaggtttgtggcactagaatttgctttggcaatgatgattcacatgtttattatagcattctggtcccgtatcttggttgtggcaaattgtgctaatgtgcacagaagtaaatatgcggattagaagtagaggtaaattatctgcgtttgaacgaccttttgttcgagaaaaaaaggtaaattatctgctgtgtttcaaagcagaatcaatatggtacagttttacctttattattgtttacctgaactaagttacttattattccctcggtctga

SEQ ID NO: 137802 - DNA, 426 bp, Zea Mays
agcgagcctattccggctagatgacgccacggctggagctctcaagcgacagggacacaattagatccaccccgaccatttcccctccatcaatttcacctaggggacactgaatcaatcagttcacggtgaccgagcggatggacaagaggatgaacatgttccgatcaaacagcgatggggatggccaaattgaggctgggtaaaggttcacgggttcaccagggtccatggacatactttggtttgggcagaacaagacccgaagagcgggtcgacggtgaggggggtcacggcggtgtttgacagcgcacgggtgcgttccggtgatgggcttcggccaaactccaaattgccgcatctaggagcaacaggatatcaaagactaactaaaacagggagtaatttgataattactgaccagag

SEQ ID NO: 137803 - DNA, 651 bp, Zea Mays
tgacaggtccactaggtatagcatttggaacctgtaattgtggtacgtagactacggtgttactggtagtaaggcatcgaaatgaaataaggacttgtgtcttatgtatgtgatgcatgggtgaccgatgtacgaatgctcctaccttatgtttactttgtatgaaccttatgtgcaatggttcatccttatgtgttccttctctatgagtcttatgtggaatgcttaatcgttacgttggtttcgtatgaacctttttgtccaatgcgtcatcattgtgttcctttgctatgaacctttatgtgcaatgcattacagttcatactttacagttcaagtctgttctgtgttgtccaaattaatgtattcctgtatttcattccagaatggctgacaacaactcaaacacaccttttcgacctactggtgccagccccaattcaggtaaccagtctttccccccacccatgtgggatcctcagatgtggcagggccaaggtttggacccaacccatccttctacatttactactcctacaaaccatatgagtaatcctacctggtcccagggagctaatgacccatctacatatacctttcgtagtccatggaacccattttttggtatgatcaatcctgggggtcctccac

SEQ ID NO: 137804 - DNA, 625 bp, Zea Mays
aagtaagtggcacgaacactctattctagcactaacatatcagtacagtttaatatataattatatatacacaaaagccactagaactacattactgtggttccattccatcgttacactacaccactaagagcaataaggtataagtaaaaatgcatttgtttgtagatcatcctggcaatttaagactacaagaagtgtggtgcttacaattaaggtaccgcaggtgctttgaatcaagaaaaaaactgcatacttctttttttcaccatattgctgttttattgacttaaagctaaattaactgaaaggaggctctgcacttttttctctcttcatccaagcaacagccaacttgatcagtcccttcacttgtgagcagtcgaattcaccacccaatctaaaaatctacaaactctgctatccagaaaagttgatccccgtccaatctgtaagaaatcatcttgatgagcgtcttcagcgtcacatgcaaccctctcatcttcacgtttgaccaaatcgaaaagccgtgttcctgacactagttcaagaggctttgcgcctccgtctaggcgcgccgcacgacctaactccccgccgtgaagaaaggagaaacttcaaacaa

SEQ ID NO: 137805 - DNA, 397 bp, Zea Mays
aagcataaggagcacctgcattaccaactcttccctattcccttgatgagacatggccactcatccgatccctttgaatgcgttggtgcggaagcttctagatgtaatttctcgggggttagaaaacaattttgcaggtagagcagtctttgcaagcatgtgttttggtttatgaaatagtgggggagagtagtgagcggagctacagtagtcaataatgatgtgtttacaagcataagcgtgtgtttggtttatgaaatgcagtaggactttagaaagaacaccatgttgaaaactgataagcccattgttcactgaccctcatgcaacacctttacactgtttggttggtatttacatggaggccaacacatgttgcttgacacgtaatagtttt

SEQ ID NO: 137806 - DNA, 442 bp, Zea Mays
tataactttggctaagaagttttggtctgtaccatatgaaattatgagataccaggggctttaacagggaggtgtgtagatggggcagcaggcctaaggtaattgggttcagtctttcatttgaaaactaatgaagatcacccctgctgctctcacctgtgtatgtgaatggaaatgaggggcaatggagactgaatattggttgtagtgtcgactgtgtaaactttcagtatctaaaactgaattcagttcagttctttttcagttacctgaatttgagtttttgtgttttcaccttaaattggtgttcaacttaagatctatttggggtcagctactagccattgaaacaaagataaagagtgaatatagaggaacaactcctagtaggggagtatgtcgagccctcatgtggaattgagaaaaagtgtagtcttgtgat

SEQ ID NO: 137807 - DNA, 342 bp, Zea Mays
attttttcttgtaaaataaagtatgtttgtagcttttctttctgtcattatgtgctcattctttgtttttagggcttgattctaagcaaggctttaaaggcccaaaaggaagcagaagatgagagctatcaaatagctcttgggaatcttcgatcagaagtcattacactaaggaacgaagctctcgaaaaagataagatattgctttccttagtggacaggctgaaatctagcgaagccaaacttactgcacaaaccgaagctcacagagtcaaagttgaagatttaaagaagattgcagaaacgaatgaaaaatttgaagttgcaacggcgaagcacgag

SEQ ID NO: 137808 - DNA, 372 bp, Zea Mays
caagccagcaaggtccaccccatagtgtttcgactagccaagttagagctctttttgcacttagtttgtagcaagcagtcaacctccagccaatgcttgttagcaccgtggtgaccccagtcacttcaagaacaactgcccacgactaaagccagcaacatctgccttctccaactcgttgaatggccccaagaatgtctcagcactagcctccaaggcaccttcctccaacagccaggtgagcaagcaacatttccataaccgggctcgggtgaaccacattgacgcccaggaagctcagtagcacctagagtagtactcggtgagttcttggtagaatttacccctaccgtagtacttattgattttgga

SEQ ID NO: 137809 - DNA, 382 bp, Zea Mays
caagtatcaagccagtcttagttgtgataagagaacggtgaagttagtgtccttatcaggagaagaagtgttagtgcagttgatcttgtcaggaccaaggaaagggagttgtcaccaagtcaccgcccatattaaggatattaacccatcagaggttatcaatgtagtatcagactttccagacgtgtttcccgaggagttactaggtatgccacctaaaaggaaggttgaatttgccatagatattataccaggcactgcccctatttccaagagagcctatcgagtgtccggactagagttggtggaactcaagaagtagattgatgagttgtcggagaaaggctacatcaggcctagtaccttgccttgggcagcccta

SEQ ID NO: 137810 - DNA, 340 bp, Zea Mays
ctcaggtcccacatggagttttcgtacaggaaatactgcacccgagcatctcactagatcgggtggaggaatgcaacgctctaagccaaccagagtcaaattctgatgactggagggagctgatcatcaggtacataaaaatgaggaggagccagacgacaaaaatgcagcagaaagaattgcaaggcaatcagctcattatactctcattgcggaaacactgtacagaaggggcgcatcaggagtcctcatgaaatgcattctctcagccaccggaaagcaactgctagaagaggttcatgctgggcaatgcgggatacacgcagcatccaggaccctg

SEQ ID NO: 137811 - DNA, 450 bp, Zea Mays
cgctgcagttatctacctattgtcttgttgtgcacataagctctcttgtctctcgagtgttgggcccacatgttcacgtgttagagggaaccaacatttggcgcccaccgcttgtgctatgaaagaacaaacctgcgatgcccccccaagaaagtgacaaacagagccagcacatcattggacgacgctacgaaggcgaccctcgtcgaaaagaaaggcaaagcggccctcgccgatgacgccctcagggcgcaccgacaatgattgagcaataaacaacaaacatccccgaacagaaaacacacccattctcgaaggcaccgttcgcacgtgcaattctgaagatctccctcgagatgcccccgccaggtttaccccccctcccctaggcctgaagacatcacgaagggcatcttatattctgctccaaccctcgtcactgtccaatga

SEQ ID NO: 137812 - DNA, 622 bp, Zea Mays
cggctctatacacagccggcgcagtggaggcagaacccatggaagagggagaggtcaatggtacaaaggggatagtgcaaggtggagatggaagcgagggtggcatcggggacgcgcgtgcaaagggactacggctatgggtgttacgaggccatggcagcgtgagaggccgagatccacctgctgcgactggacctagggtttggagtgcaggaagggtggtcgtttagctcgaggaggggataacagatgaccgtggattgagggctagatctagaggggcgacgtacaggtttatttcaaaggttcgtgagggactttcatgtaaaagagatgactaactggtactttataatatacgataatattgcaacataccataagcatggccaaaaatcaaataaatatacaaatgatacttgcaacacataattagtgttgctctatacttgtcagtaacgtataataactgcaacacataataaatgttggtatatgcttcacgacaacacataaaactatgtgttgctaaacatgcatagctataggggtgttcctgttgtagtggtatggagatattggttctgttggattcgggcagttcagcttccttcatcagcga

SEQ ID NO: 137813 - DNA, 1372 bp, Zea Mays
tccgaggtccagggtggaggtgcagcaggcctaaatcggatggacacaggccggttcagaaaagagaggagtcctgttgggacgctgggagtgggagggcctagctattcgccggttgccggtcccctacggaaaacagccacgtctgggcaggcgtagcgtaggtgcctgctgccatcaaccactaccgcgtccaggtccattccaaaagacagcctgtcgtcgagttcatcggagacaggcaggcctaaaaggctagtaagggcctgggactaaccagaccaggtcgtccaacacgctaggcagcccatcaagttggttctcctccacgccgacgccgctatgattttttcccttgcaaaacccatgctcgctaatgatggaaccgagaaaagaaccacagcgttctgactgagacacctgggcaatgagttgagatgattttttccagacagaaacctgctgcgcccacttgaactcgtaggatggtggctacggtctctacctgtagtagcctgtcaacctcgacccaatcgggttccttaacgtacaccatcttctcccgggctgttgtaaactgtactaactactaatataggcaggctgtagccatgaatgagaaggatagctgcctggagtacgtcctccaccagattagagactactcctgcagtcctgctataggtcagtgcagctagcggacaccgcaattatttgcgacaacgagaacgtaacaccaaccgataatattgcatggccgcccccggacccccttttcgtcgtatgggagcaacttttttgttgttgttgttgttgtcgtcgtcgtgcaacgcactgtggctccggctgtacgtgacagggatgtttttttttggatggagggagcgtggttgctgctgcaatcacgccatggtgtgtccccatggcaaaaactaacttgtgcctctgtgatcatgtcccctgtcccatgcatacacgaccgggacagacaaactttcaccagctaccaagcgcgttttcagatggcggtctcaattttcaagcgggagcagcactgatcaacacagcggccgcacagggcaggcgatcgcggcaaagctgggagcaggaaacaccaagcagtagtagtagtagctcacgtgccgtaacggaagcaattataaaagacacggccgggtgagcgcgaggccggttgcgccatctagaggtgacggccaatggttttggatcgtcagttggtggtgatcagctgttactaaacagccgggaaacgacccccgcgcggggttggctcataacgcgggaaggtacgcgtgtaaagcaagcagccggtttgtctggttctggcttattacttgtcacctcagtggag

SEQ ID NO: 137814 - DNA, 440 bp, Zea Mays
tatatgtagtctgcttatatcctaagaagatgcttacactctctcttacctcataggactcagacaaggagcagagctagcagcgaccaccccactaaccaacccaaccccaatggtccccaccaccacctcaaatgaccatcaagcaaatgatggtcatgtagacacaactgatgcaagatattgctcatatgatgatcatgcagtaaaactagaattaaatcccattacaaccacaatgtcaaccacttgccaacaccctaagagacaagtgtggaaagttaatgaagggatgtccacccttattcccacattccaccaaaccactgcaaggtgataactggttgaaagaggtggagaggcaattggacataacacaatgcaatgacagaaaaggaagacctcgatggcttaggacaagtatagagagctaccttgac

SEQ ID NO: 137815 - DNA, 379 bp, Zea Mays
atagatgccagactttgagtggcgtttttacatcgattgtgacgtctcaggtgccggtttcggcgccgtcctgcaccaaggcgacagtgtgatcgccttcttcagcaggaccgtggtgcctccccattagaagctgcctgcctacgagcgtgaactcatcagtttggtcaaggcggttcgtcattggaggccatacatttggggatgaccttttactgttcgtactgatcactatagtttaaagtatattttggatcaacgtctctctaccattcctcagcacacatgggtgagcaagctcttcggatatgacattgccgtcgagtacaagccagagaagatgaatggcacgactgatgtgctgcatcgcatgacgagg

SEQ ID NO: 137816 - DNA, 511 bp, Zea Mays
cttggttggcgccataagcatatcgggctgggggattttaaggatccgccgccgccaccggcgttactcgccacgtcaccgctgggtacccgattggggagccagagaccttcgcaaacacacaccgcgcataacctggtgctcatcgtgcaggattagtgcgcgaggctcgggtaatcgctcaccgtcgctgtatattgttgccgagccgcacgcttccgtggctaggcacctccgcccttctatccactggtaatttcccctcccttgtgcttgtcctactcctccgatcgtgtttcataggtccatgtggggatttgtgcgcaggctttacgctccggcgagcttggtcgccgctgggcaggccagcgccgccgtggtcggccagctgcttggggaagaaggccgttcggccatctgatcttaacggacgggtgcgattagatggagagaggagctagcgtcagccgtaggatcactggcttgtggtcctgatctgatccagtgtacc

SEQ ID NO: 137817 - DNA, 301 bp, Zea Mays
ccaatggaataagaacgccaatgcattgcaacaggcaagcaagcagaagcgccttttggagcatcgcatatcagagttagactctgttgccagccacttaggagagagcatgagagcgtccgattccctcgtgctctcgctgaagttggagtacagtaaagtgaagcgggaacgggacgatgcggtcaaagaggccagggacatgcgcatggagaaagagctcacagaacctcgtgcctatggagcaatgagctctgagttctccttggcggagttggagcaggctacccaggcattcagc

SEQ ID NO: 137818 - DNA, 438 bp, Zea Mays
gcagccttgaccctaaaacttgccttaaaggaaaatacctcttaccccaagaaaagtcttctctcctcttccccaattttaacagacccttcttttcctattctagatggaagactctctggccattaggacatcctactgctcagaggtggaagggttcccacatcttttgcgaagttgtgcgcttcgcatgggaatccgcaagaagccggaatacgtctggaaggagtatttcgagggcggaatggagaaatgctctatggcagtctacctaggagaaatctgaaactatccgaatcatccttccttccaagtcacttttaccggataccgctttccagatacttgccagaatgttgcccgaacagccctccgacaactatgccagaactacaacaaggtgatctttgaaaccccccttcgctactttccacccag

SEQ ID NO: 137819 - DNA, 489 bp, Zea Mays
gactttactatatttcttttatattatttttattttgtcacaaataatgcacacaaaataaaacctcagcatgatgcataaattaatggtacgtcttttattatttagttgtttctaatgtggtgttcacatgtgtaaatgaatagatgcaatacatatgagggaaataataccattttctatgcttttacaaatcgggtattacagcagtaccacttgaatagataacgcatactctaagtcaccaatacgctttgcatctttttgttgcttttcatcaaactccctcatcttctgctctgcctcggaaaggctagacaacctagttttgttagatttcaatctctctaccaaggagagtaggattttatctttctggagagcttcgtttctcaatgttataacttccgagcgaagatttccaattgctatttgattgctctcatcttcagcatccttctgagcctttaaagctttgctaagaattag

SEQ ID NO: 137820 - DNA, 276 bp, Zea Mays
atggccacctgcctcgatctctcctacagcagggctgtcagcacagcgctggcagttgaagctaagcatgcaggcccaggccaatcaaagggaattggaggtgacaggtccaaccaggggcctgaaaagcaacaaaggttggtaatccgacctttcaatcaaaaccgttcttcaccttgtccaccctcctacccctttaaatagcctatttttatctgccctaccactgcccccacttcaacaattcagccgagtgcccctggtgctcgtttcccc

SEQ ID NO: 137821 - DNA, 709 bp, Zea Mays
gcgggaccgagagcttcaccaagtcacatggagtacgtgggaggagtgagagctgccattagcgctagattgaaaaagagccaccaccgttgcatcgtgtccgcgtcgccgctctgccgtcgggtgcgggaccgagagcttcaccaagtcacatggagtacgtctatggcttagcctgggcataatttttcttcaaactgctggaattgctcgctggagcattcactccgtcgtggctccacgctacgccgtgggcaggcctctctacaacacaatcgtaggtaagaactcctcccaccatcttccttaacctcctcttcatgtcgcaccgagcgagcttcgtatcgggacacaaatggggcgtaggcgtgtagctccggtgaggtgcatcaccacggggtcgtcgagtgtcgtcgtgtggtggtcgggtgagggaggagggcctaggtgtcgttgattgtctgatggacatttaagattagatagaggcatacctcttcagtggatgaatctgacatagatatgctatccaacgggtgagtgtagatcacgcttcatcgaattgtggtcttcgatgttggatccaagtttcacaattgtgtaccatttcatttaactagggatctaatccgggcgaccggaacttgatcgggggctagaaattatgtgtaccccttcgtcgtggtctttttcattaagacccctgaac

SEQ ID NO: 137822 - DNA, 678 bp, Zea Mays
ctcaaaccacccgcgcgtggaattcggggtattgagggttgttgtgggcgcttgggctgacctcctagggatataaggccgtaagactagcgcctaaccctcatctcaccgacgtatcgccgaccccgccgccattgactcatagcgaaagaaaccgaggttgggggaaactctgccgccgttagcattggcgacttccagtcttgatactgccctagtgtgtagccgagggacttcgcaagcgctccctgcgtgtattcgtggtgtcttcgtgtggtaattcatatcgacgcgagggaaattgctcattggcgtcgggatttcgctgccggacgaagctctccgtggccagggcctcccactccgcggttgtaggtaattcctctctccctagctcgaattaacagtagcaccatgtattagctattagagtcgggtttgggtcacggggggaggtcaggactcctcatcagagtaggcttttacacatcaccgcccagcgccgtcgttagtgcaattttgggcttagtctgcggcattgatcttgtaaactcgtgcacccagtcgcgctcttcgtatttattccatgcgcgtcgaagttcaggcttcggggagagattttcatgaccaccggtcaaggcaccgccgtcggagctcggtcgccgccgtgcacggtct

SEQ ID NO: 137823 - DNA, 573 bp, Zea Mays
ctggcctatggggccgaaacctgccttcccctagaaacccttctggactccccacgggtccaaccttttgatgggtttgtgtaggggccactacaacacgaggacgtggactcaagcggcggactcaggtgtcaagttgcaacccgaaacgcacatcgtaaccaggtgcctaagtactatggccgacggttcgtgcatagtagggaacctagggtcgggacctaatcctgcggcaaagtactgaaccaagaggggatccgcaacctctcccccagcagggagcaacccctcaaggcgatggaaatatgccaacccaagggatgccaactttgctatagctgaagaagtacctcttcctatctcctttcataattaaatttcgcatatgtgtacaccagcccggtgaggtctgcccacataaacccggcccgatggtttacacccatgcatatcaagttataaagaggaaattcaccccctcggacgcgtttctatgacaactttatcttcctgctccatggatttggcctacagttttcagataataccttttatctaacccacccgcacggt

SEQ ID NO: 137824 - DNA, 586 bp, Zea Mays
cctagaaccgggtgcccaaaataggcccaagactcttgacggcccacttgtcgaccaagtctttattaagcaaccctgcgaggcggagcggccaaccaagtctctaccaagcaacactgcgaggcggaacagccgaccaagtctctaccaagcaaccctacgaggcggagcggtcgactaagtctctgtcgagcaaccatgcgaggcggagtggacgatcaattctctgccgagcaactcggcgaggcgaaggccttgatctagtactattgacccacgtcagccatgacaagacgcgccatcaccaaaccacgtccggaccacgagtgcggcataccgaaggggcatcgagaggtccctatcaacatgatggtacaccactgtgtatggtctctagcgtatcccgtctgccttgtggggtcagtcaatctcgtcatgagggacctaagcactagagtctccacagtaacccgcataccaggaaggacaagattatacaccatagtggttttacacctacgcacactggaaggtgacacatggttcatgacgaaaggcgagactacgccgcacacgaccccgaaac

SEQ ID NO: 137825 - DNA, 790 bp, Zea Mays
aacggaccaacctacccacccgcaccctctcttgtgcacctccggctcccagtccactgcctcctgccaaaataaatccgtccgctctccagcttggtggcacaatcccatcgaaagctagggtttcaagcctcttccgacttctccttcccttcccttccccaccacaacgcggccgccatagacgcggtaccgcgcgaactcccatagatctgagcgagccaccctgcgaatcatcccctgacgcaccaaatctggtcagaaacggtgaagagttcggacacgatcttaagcgtcgttgatttaagaccacacacaaacacatctgtttgcccttcccccctatttttttcctgtttcggacgattcataagaacagacctgcaaggtttgcagatctacctgttcaagaaccagggaccttgttttggacgcccagaacgaacccttgaccctgcggatctgctcgatccgttttggatctgcttgcttttttctggatctagagagaatgttcaagtcgatggtttatttcgtgaacatctcaatcggggaggttgaggtgtggcccaagggccaggcgagcgcaggcctggccgtggcggcgtgggcgcgagatatccgcgttgaccgcctttccccgcccagcgagcggtgccctccgctggccgtcatgcacaccgtggccgtcgccgcccgatgcctcgtcatggagtccaggccgcccgtcgccgccgacgtggcgtcgctgcctctcgtcgacatgcacgccgcttgcctcagggacaac

SEQ ID NO: 137826 - DNA, 395 bp, Zea Mays
cttaatagatccatcttatctcgaaaaagactctaccctagcctactagatctaactaatctcaaaagattatgtcttattcgtagagacttgtcttgttctagcaagcatacttatcccaaccacttggcttatatcataaccttttaacgaatataatctattctcatctaacaacaaacaaacttttgacctatatcatgtagtctatcttaccataactatcttaaccatattcccccaactccgatgagatacactaaacccgaagcaatgagaccaagaccggagaagaaaagatcaacctcgtcaaggaagggtagaagtcaaactcgatcttcaaaggcattaccacccaacaaggagttctttctcaccgcaaactttcttacccc

SEQ ID NO: 137827 - DNA, 539 bp, Zea Mays
gaacagatccaaggccactggtactgccattcagaggccggctgcttcctccgacagcaaggatgaggaatccgtcttctctgatgaacaggtgggggaccatcacttcaatgatgacaatgatgatgatgacaatacctcggcggggttgtaaggctttggcctcccccttttgggtcgtctggtattttcttttcactggttggcaactattttgttggttaacggttggtgctggcgcgcatgtggcgctttttgctttttttgaaacgtactctgatggaatcgaggtctctttcctgtttgatacaattaaatatgttggagtcaatgactctgtgctgcctgaaatggttaattttgatggttggaggttcggttatttgttatgtggactatccttgcactttgccggtcgggcccattggaggccatattcccctcttgacatgttggttatgtggcccttccaattcttctgcttatggatttatactggaacaaggacctattggtgtatgctacgcataccggtattt

SEQ ID NO: 137828 - DNA, 919 bp, Zea Mays
cttcttcctctctcgtggcgtccacctctgcatgtcctgcccctacacgtctcctcagaacggccgagctgagcggatgattcgcacgacaaacgatgtagtgcgctctctccttttccaggcttcccttcccgcttcttactgggctgaggcccttggcactgccacctatctcctcaaccgtctccccaccaaggaggttgcccaccccaccccttactttgctctcttcggcgtccatccctcctacgaccatcttcgtgtcttcgggtgcgcttgctatcccaatctcgcttctactgctcctcataagctcgcccctcgctccactcgttgtgtcttcctcggctactctcccaatcataaggggtatggtgtcttgacctcgcctcccacagagtcctcatctcttgtcacgttgttttcgacgagtcggacttccctttttcctccacccccactgcctctctcaccgacctcgacgtgctcctcgacctcgaccctgtgtcccccactatcgtgcctcccttccccgctggttcgcccgcttcaccgcctcgcgtggccctgcctgcgccgcccgcccccgcactgccacgtgcggcctcgccgttcccggagtcgcctcacgcgaccctgcctgcgtcgcccactcccgcacagccacgtgcggcctcgacgttccctgagtcgcctcacgcgaccctgtctgccccgccctcccccacacagccacgtgcggcctcgacgtccccttcatctcctgcacagcctagtgcgacaccggcgcccgctccgccgtctcgctacaccgagcccatccagacataccagcgccgtggtcgacgcggtaccccggctcgttccggcgccgaggtcccgacctaccaccccgtcgtcgtccaccgtgatcctcgac

SEQ ID NO: 137829 - DNA, 340 bp, Zea Mays
tgccctccaaggtcgatgatgcgcgagacaccactcgggttacctcttgctcggtagaatcaagcaatgaaagcccattatctgggacctatgaacagacggctaggatatcagctttaggaggctctgatagtatgtattcaagaatgacctcctccagtgcttgatcaaaatctgatatcgaaatcccctaaagacttacaagtgccgacaaagctagagagggaatatctctacccccctcactgcctctatagtgctggctgttcttgtggatcagtgggatctcttcttcttcctcctcttcatcctcatcaaacatgccgccagtagcctgcgc

SEQ ID NO: 137830 - DNA, 701 bp, Zea Mays
tggactgtagcatgtaacagggggcacagatgtatttaggccacctacccccggttaccctataaataccctcacactgtagctagacggaacacacttaacaagacatatgtgccccctgcctactgttttgttgagccacccaatgcccactgctcttagtcaaaaaatttggcgctcactgtgctcgatttgaagaccaacctgcaatggctcccaaaaaagtaaccatcagggccaactcctccccacatgaggccacaaaggtagcccttgttgccaagaaggcaaagtcaacttcactgacgacccctacctctcgcagctaagaacaccaactggtctgagccacaaaacaacaaactccctcggactgaagacttgcctaccccgaagggcagcattcgcaactgcagctccgagagcacacccgaagacccccctaacccaaagagtcagttctaccaggccaaagtgtgtttagacttgataggcagcatgatacccccgccccacccaggttcgcgcctattgggcaccccggaccacaagaggaagacaacatcctacaagaagacgaggacctgggaattaccgcataagaccaaccgctattgcgcagccttcgcatgaaaaacatccacctccaaaaaacagagggaagtccttgtagccaagaggcagagaaccaccatgcaggc

SEQ ID NO: 137831 - DNA, 430 bp, Zea Mays
gcatgggaccctcctgcgcactaccactcactgacaatcgggcgtgggggcgctctcgctgttatgtggccctccctgccagtagttgtttctcttaagtcgatcacatgtggtccctttacaacagctcattcttccacctcgacgcaggaagcggatcgtgggcaacaaccccccgagtcaacccttggcttccccgatttctcggcgtcgttggtcctctcactccagaggccataaatatcattttcgctccttctactcattgaccgagcaccacggaaccagatagtgttttcgtgaggataggtaatctgggtggtggtgcggaccgtggggaaggagatccttggtggtgggcataaatcccagggcttcaagccgaggaggtgtttgagtcgctgcgacctggcgaacgtgttcgcggcac

SEQ ID NO: 137832 - DNA, 412 bp, Zea Mays
accatccatcaacactatattcgtgtgcaaggtaataaaaaaatacaaattctataactcgttacagacaccttccatcggcttgcaaaactcggcatccagcaggacatatctgtcacaaccactggtactgatgctaatcaccaagaatatgctgatacaattgggcatcgtcgactgtcacttcctctagttagcaatcaactcaacagtcagcaagtcaggtacctatttctaatcagaacaacagggcccagccatcaatgtacctagcagatgtcaacgaaacacaaattgataataaacagcatggtgccaattctacaaacgccattgacaatcacccattcaaaacacagcaaatgaggatggcaaatcattggcacaggcaacaaaagctgggaaatagttt

SEQ ID NO: 137833 - DNA, 1002 bp, Zea Mays
caaccagtcaggaaagtgttgatccatcaaattctgaatggaggaaggtgttagattaattgagggatgtaattttcttttctcctcatccaagaattctctacaacaatagtatcagtatcatgtcagcaaatagcagtaaaaaataaatataggttactggttataataaatgtgatgttgtgtgttttagaaatactgaactattgcatattgcaagcttgaagcaagttctggacattctaattataaaaaatgtatcttgcagcatgcgatcttatctctaaaccatgtttaattctaagtaatttcctatagaacagtattgctcctttattagtcattatcttaaccacttctgaacataagacttcaaatttaagctttgtttgatcaattaaactgtagaaatactccttccacactagtgatgataaaaaatttggtcattaatactgaaaaaaattaggtttagattcctaaggccttaagccctacactctaatcaataagaaaacacacaaacaaatcaaatcagccaacatcacaaaaaataaattattaaacaatgaaatcagtacccctctactagtcatcttattaacgttctgcgttccagccaatccagaaaagaaactcaaacacggacagactagtatcgaataaacaacatcacactttgaaggagacaacactatatgaacgcacctgcgaaaatcttcaagttcatcacaatgccgcaacacatatcgatgagcctgaataagaagctacttatcaaggttgatggcagtactctttccaataggttcaccagcagcatcaaacaaatacatgtttgctatttcatcagatggtccaggatttctagatggccttgtaaaacgtgtagttccttctataaatctggaacaaaaggtcaagcactcctccatgcaatatccttcagctattgatccttctggttgagctttattcttcacaagtgccttcagcttaaca

SEQ ID NO: 137834 - DNA, 657 bp, Zea Mays
tgctggaccacggataatgccgaggaggggaaatgccttcatcgagaggcatggtcgaagacaaccgccatcaggcacctggcaacaatagccggcatgaagaccgcaaggtgtgcatggtgcagcccgccacccctcggtatccctagtggtcggagctgtcgatcaccttcgattggcgtgaccactcgggccgggtcccgcacactagaacctacccctcgtagtcaagtcgattatgagtacgaaatgactttctaaggtccttatggatggagaaagcagcctcaatatcctaagttgagaccctcgatcgcatggggatctcacgctctgcactgcacccaagaacgaagacaattcaaggcgtaacgctcggacatggaattcattcgctcgggcgaatcacactaccggttactttcagcgctccctccaatttccgcatcgagtcactgtgcttcgaagtgatggtcgtccctagaccctacaacgcaatatttgggagaccatgctatccaattcatggtgattccaaactaaacctaccttaagttgaagatacccagaccccgcagggtcattattgtggccacctcattcgaggaagcatacgcatgtgagcaggccaactacaaactcacgtcagcgctcgcc

SEQ ID NO: 137835 - DNA, 1087 bp, Zea Mays
gctcaatccggcttttcgacccaccagaggagtacccctcgcgcggcctagccttctttcctccaccatgcgccgacaggtgggcctcctctgtcagtcgcaccagagcgtcagcgcttccctacttcattagcttgtgcaccctagctgtcagcccaagtggtgaacggcctgcgcaaagctaccgccacggcgtccgcgcacggcgcgcacccagctcggccaaccggttgatcctttcacgtataaggaagggagaggacgaccctagtcgcgcacacccttctcccttcttttcgcccgctcgcgccgcattccgttggaactcctttgctcccaccgccaccgctagctcgggtttggtccgtcgtcgtcgttcggcaagtacactggtgcacgtgcctcggtgccagggttggtgtgttggtgccgttgcctcagtggtgatcacgggcttccctgccccataactcaagctgcctcgccgtgatttctcgtcgtcgaagcgcgcatcgcctggatccgccccgcgccgtcgtcgtggatctctgcgccctaattcctggtgaatagctgcgtgttcgcgcgatagtcgtaatcgttttgcgctagtagattcagggtttagtgccttggatcgccaggcagagagttcgtcggcgtgacgagcgtgctggttctggagttcgctccgccgtgggatagccggaggttgaagacgcgagatcaccgtttgatctcctttgggccactgagattagaactgggataacccttcgtgtgattaatcgggtgctgctagatcgagatcgggcggcattggttagatcggaaattataaaatctgggtcgtcgtttctccatcctacagccatcgcagcatacccattcacaatctaatttgcaccatgcattatagatccggcgtccgagaacctaggatactggttcgctctggcaaagttgcttatgagtccctgaattccttgagaatgaacccgcggtccacatcgactatgtagctcagtcttaggaatttttctgtattaatccctgaccttttgtatattttgcgcccagtccagat

SEQ ID NO: 137836 - DNA, 398 bp, Zea Mays
cttccaacagaggggggtgagacttatattacttgcacctaagtgcttgcagtagggagtacaagctgatcaggagaggtaaggatcccaagtccctgaggttgattgaggcaagtgctaatgttgtggttgaggtgaaaaccgtgaagtgttcgcctacccccttgaagccatggactgtccatatttatagcctcaaggagggctgctaggagtcccggagttgccgcatacggtgaggagtgaagccaagcccctatagatggtatggcctggagcatgggtcttgtacttgctgttgacttatgcccgatggagatgcccgatttttgctgagagccgaggccatggccgagggctcggtcacgtaccagagccccctagacaggaggttgccc

SEQ ID NO: 137837 - DNA, 442 bp, Zea Mays
cggcagagcacgacatcgaacggggggagggagcaggagcactgacgacgaggtcagttgttagtgtagcggcgtgacagacagtggcgccatggagagttcctagaggagcagctcagagcggacctcgacgaacttggggagggcccgctggagcttgtggaaagaccgaatgtgctcgaaccgctcattgaggtcgcagaggacgttaagggtgagtacacgatcggtcattggctcgccgagctcaacaagagtccgtcagggtcttcatcttgcggcaatagttagtgatggagagagtaccttggttgcggttgcggaactcggtgtcaatgaggagaacacgggtctcacatttgcccacaaactgttgctcgagggtgagccacgtagtgcgggcggtcggtgtggtcgtcgtgacgatctcatagagcttcag

SEQ ID NO: 137838 - DNA, 616 bp, Zea Mays
agagggggggattaattgacggccaaatttaacaaccaagaacgtattaaggtagagatatatagctgtagcctcgtggatggatcgtactgcacctgggatgggggttgttcttgatggacttctgcccgtacttcctccacctgtacccgtcgctcggcgtcttgccgccacagctcctcaccttcgtcgtgtgcctctccggtgcccgacccgccgctccgaacctgccactccaatttccaaccaaaaccacccatatgcatggcatcgtcagccttctagttctagctagctatcttccaccaagatttaattttgtccagcccatgcacggacggtcgtacgagatgcatgcacctacagatgcattggactgtagcggcggctgctccaggggtacggcggcctggacgtcgacagcgctttctcgatgtcccggatcgttgggccggtgtacaccgagcacagagccctgctcaccgcctccggctgcggaagaagctcctggtgctcggccacggtgccgccgccgccggtgcacgccgcgggagcagatgacgacgcgcctgtgtcacgcgagcagtagtgctccgagtcgacggcggcggggtcc

SEQ ID NO: 137839 - DNA, 471 bp, Zea Mays
ccgagaacttcgttgataaagtagaccggatgctgcactggatatgtatgtccttcctctgcctgctcgactactaacgcgatgctcaccatgtgagtcatgcatgagatgtataacaacagatcttctgctagctgattcggcgtggctcggcgtggtggcttgagtactggtggtgtagtcaggaactttttcagtgcctctagagcttcctgtgcctctgtggtccattgaaacttgtccacctttttgagcagtttgtagaatggcatgcctttctcgcctagccttgatatgaacctgctcagggctaccatgcatccagtaagcctctgtaccttttttgtgatcatggcgcttacattctcatgatggcctcgattttttctggattggcttcaattcctcggtggctgacaatgaatccgagtaacttccctgctggtactccgaagacacatttctttggat

SEQ ID NO: 137840 - DNA, 550 bp, Zea Mays
cctcaatcccggacaaaacatggtcgcagtagccaggatgctttggtccatcctcgagatagacgaaccgaaggcaagggcgatgtaccgaaacctccacaacttattggagaaagccacgacacagtaaggccaaattgatcggcagtttcccaccgacatggatagctataccctgcacacggcctcatcctagagtatgggtgcgaccctcccaatccacgagaacgtgcatcccactaaaggatcacctcggggacatctacgacgaccgacacatcatcaacaaccaacgtcgggagcaagaagaggtcgagcaaccacgggaaagaagacgcgagcatagccctagcctacctaggccagggccacacgcctttggacgcgcaatccgcaaggcccagttccctacaaaagtgagggcgccagcaaatatttccaaatatgacaggtctttgaatccctgtgtatggttggaagattaccaccttgcttgccgcatggcaggactcaaggacgaccagctcatcatccaattcctccaaatcca

SEQ ID NO: 137841 - DNA, 764 bp, Zea Mays
gccggactagcacaacaagtgcgcaaaaccgaagtcttcttcaaaagactatccgtgcaaaagtcgcctaagggtgcagctggactagcacaacaagtacgcaaaatcgaagtcttcttcaaaagaatatccgtgcaaaagtcgcctaagggtgcagccggaccctccgtgcaaaaaccgactacaggtacaaccagaccaacacaataaacgcgcaagatcaagtgcacaagtcttctacgggcgcggccggatcagcgaaggcacacaacctcatcacacaaattatagttacatacatgcagcgagggcatcacacattacatcggctcaaccttcgggatgatacccatctccctataattgaacaacattatcctcaattcatcgccctcaaacagacttcgcaactctccctcacctacactcgccccagccggcgaggacaaaaattcccgtttgctagccccgtccacacaaagacaaccaccctccacctcaccataatgacgcctatctcttcgcgacacctcactaattctccgtttcgccaccgcccttcgccgcctacgcctagcactcgcaccaggaagaacttcagcacccatcacacgtggagaagcctccgtcgcagccacatccaatgccgcaaaataatccaagtcctcatccgaggactcctccgtccacacaaccgaactcctagaatcatcagactcaaaaaacttagacacggaatcatcagaattatcttcagcaaccac

SEQ ID NO: 137842 - DNA, 785 bp, Zea Mays
aggactgcaagtgtttcgaaagcctttttaacttcactgcaaaacgttgcagtggacaaaaggaaccccctggttgtacccaagattcttctaccttctccatagaaccttccaattttgaccaatagctttcaaagtgaaatcgtctcctgccctgggaatactcatgcagccccaacagaagaggacaatggtctgaaatgaatgttgccgaactttgcaaaacacagtccgggaaataatccccccagtctgaagtgtgaaagactcggtttaaacgaacaagcgtgggacttgctcgttcattggaccaagtaaatttgcgccccatcaatggcagttctgacagatttaactcattaagaatacgacggaatctacccatcatagccctgtcaaggttgctattgttcttgtcttcggcttgatatataagattaaagtccccaccaataatccaaggtccaaaacatgccgagcaaattgtgcgcaactcatttaagaactgcaacttctgatcatctggttgagggccatacaccccagtaaaccaccaaggagtaccagaaatatgatcaacttgaacagatactgaaaaagagtctactctggtctgaagaaccttacaagtgccccccttccaagccaccaatatccccccacgcgtgcccagtgcagggagacaaatgaaatggtcaaactcacttccaagcaaagacatgaccctaaaacgggaaatagaggccttctttgtttcttgcaagcagaccatatctggtcgagcg

SEQ ID NO: 137843 - DNA, 527 bp, Zea Mays
aaggcccctaaagccgcacagtctcttgatttaatatggagaggacgcgccgcctgccaccacgctgacagacgatgtgccctctcagcatttaatgtgtcctgtccactccgctggcagacagcgtcagggtaaccttgcaggcggcgcgtctgtcaggtctgttaccaaacagtgcgcccatgctatgcagcgcactgtggatatcgtcccttgtacaagaagcttccccagcacgccaaggatacgcaaatctcgggtgtcagggcacgggaaggttgccccagcagcgaacattagtagctccaagtgctatatacattttgtccctgggcccacatgtcggggctcagtacctttgtgcatgccccccttcatctataaaaggggaggcatgcgacgttacaacacaagttcactcagactctcaagcttccacagcaatccaacacacagtggagtagggcgtcacgcttcggcgacccgaaccactctaaaccctcgcgtgttcttgtgttcatccttcc

SEQ ID NO: 137844 - DNA, 382 bp, Zea Mays
gcaaccgccgctctgccaatgggagcaccctccggcggtggatagcggcgacatccctcgcggcggtaaggccttcggcttggagcttctgcagggcatggagaatgggctggagcttctcctggttctcgcgtgtagccccccagcgccagttatcgtcggtggcggtcaccactcgttgagaaaagggcggcaacaccccgtcgtcattctggagataaaaccaccgattttgccaccccttgttcgaagacacaagggaggcagggatgtactactgtgcgtgccccgacctcagctggagggtgcagccaccggcccgcaccgccatacggaccttcttcacgtccgtcgatgcggcgaagaattccgcggagaagag

SEQ ID NO: 137845 - DNA, 658 bp, Zea Mays
tactcgcccagagtcgtcgatcaaacaatcaacgaccgggatttaaaatactcagattgattccagcgcgcacgatctggatcgaacggccgagggggaatcaggctgaaccggtcacaggacccctaatttctaccgccagatgcaaatcctacgatcacgagcacttccccccatctccttgtcggacgatggcaacagccgcacctccacggcggcgctccctcggcgacggaaaccgcccgctctctctcgctgcactccctttctctgtctacgctagggttgcacagtggcggcacaagaaggtttgagcaagaggcgaggcttgatcgggttatataccccggccgtgcttggtcaacggcgggaccgcggattccgagcagaagcgcatgagcagcgccactatcggaggtagttgatggtgctgacagacgggtcccaggtggaagtgaaacggcgcgcgcgcgaggtgactgccagtggaccccacgcgtcagcggaagggaagatggccggtgagcgcgtgcgcgactgtcatgtagggcccgcctgtcggcgccatcaccaggagctgggccgcgtgggaggttaagggttaatgggccgaattcaggtttgttggcccatccaggtatagtattcctttttcttt

SEQ ID NO: 137846 - DNA, 723 bp, Zea Mays
attagaactcccagcctcatgaccatgtgagcgaggaggcataggaggtggaggcgggggtggaatcccaaaatcatcatcatcatcatcaattgctgcatcctgagcttcgaactgatgaagagcagtagcctcggcctgagtgtcaaaaactggagcagaagctggcacaggagcctcaggcgcaggacggtaggatccaaaaacaaggcgtgaggcctcaagtgtgccctggaactgtggaggccgaattagctgagcaaaaatgtggcacaagtagtgagcatatggcagctgacgatgagcacgcataccatccaatacagtgtcctcaatctcacaaataaggaaatcaacaacgtcaaactcagagtgagagaccagggcaccaaggagccagagctggatatgtgtggtagcctccctgtatcccatccacggcagaagtgtccgtctcataagctgaaaaaggaacttcgctgctgtagtgaaatatgcctgtgagcgtcgcgacccatctgagaagggcgggcggaacagagccgcgacgtgagctgtacccggagccacaccgccgtgagggcgacgaggtgggtcagaggtgccgtagcataagctgtgaagtcgagtcgatgactcgtgaaaaccaaagagctggcgaatctggctggcagtaatagtgacatcctctcgctcgaaacgaaacctcatccagtgatgatc

SEQ ID NO: 137847 - DNA, 1272 bp, Zea Mays
acagctgtaataaaatttctactttgataagtaactgcgattaaaaagtaatagagtactatttgttcattaactaagcttggcaactcaaaccatataaaagcaccatacttgttccccaagtaacagcatgcacacatggaattaccaaaccgcatagtaccttgacatctcagtaataatcaccgttcaaatcagacagcagttcaaattcccagctagttatttgtttttatcctaatcctaactatcagtgcaagcacgtccaacagccactacactgaactgtaaattggagtgactgaaaccctaaagccacaaatccgctctagcatacccactaaagcattctatcacaaaacatgattttccccagctcctactccaaagcgatattaacaagcaaacctgtcgcatatctctcaagaaactacaataatcatggagtaagctgaggttgaagggggcgtacggatcccggcgctcccagccggcgagggcggcgtggcagagttgccctcgagcgcggtggcaccaccaaagagtatcaggcgcgggcccacgtaccccggcgagccctcctccccgactgccggcactgccgttagcgtgtgcccgcaccggcatcccggcccgtcctccttcttgtccatcgcggcgtccaccaccgtgtaccccggcgccggcctgggccccgccaccagccccggggacgcggccgcggccgtgggcgtcccgggcgcgggcgcggacgtggacggggacgcggacgcggacgcggacgccgtgggggtctcgctcccggaccccgacccgccgccgcgagcgtcggagtcggagtcggactctgtcgccatgcgggagtccacgtccatcgccgccctgcaagcttcgcctcctgctgcccctagggtttcgcgagctgagcacaaggatccccccacgcgcgcgcacgagctcagcctcgggtaaccgccgccctaggagacggtcgagcttgcggcggccggcgcggccgccatcacccgtagataagccctaggcttgtccactcgccgccggcggcgaggcgtggtggtggcgctccgcgacgagcaagtctcgggtcgggtcgaggcgatgggatcgcgagcgggcgggggtggtaagcggagaagcccctgggagatttgggaattggcggggcaagtggtggtgaggaactgaggatgggggcgtgggggaggctagaagtgggagtgggaaatgcgggggagatcggggactccagcg

SEQ ID NO: 137848 - DNA, 774 bp, Zea Mays
cagcgacccaaggatttggatactgcctacgttcttgcgcaattgcaggaggaaatcggcgccacagccaagaagccagagtataagaagatggattatataccactgggaatgtcttacaatagaggtcccctacctctaccttctccacccaaggctggtgctacaactcctgttcggccacaagaacacaagtctctgcactctattcagccacctgggagtggtgatcgtcttgcttcagtctatgcgtatcggaaggctcaagggttatgctacaagtgtgggtcaccttatacccgcggtcatcaatgcccagattcagtccagctgcacctcgtggaagaactttgggatcaatttccagaaccatctgaagaggccctttctgaaaagcttgaggacattcagctcaacagttttcagttatcgtattcagcaattgctcaggtgcctcaaatgaaaacaatgcgttttgtgggcgaagcttgtggtctctcggtgctcatcctgcttgattccggcagctcaatttcatttattagctccaccattgcaaatcaatgttccaatcttacttccttgccacaaccattgttggtccgtgtggcaaatggcgcccagatgacttgtgaatctgcattggttgacacagtgtggtcccttcaaggttaccagttcaccactacattccgggtattggatttaactcagtacgacgtagtgcttggcatggattggttggcaacaaatagcccaatgatggtgcattgg

SEQ ID NO: 137849 - DNA, 530 bp, Zea Mays
gttggttctgcatcgaagggttcagtattacatattttcgaagagtaaacttgcatgtgtctggttctgcaacgaaggatccagtatatattgctaggcgacggtgacggggggtttccagttattgaccagtcagtcagtgaggtttttgaaaactcgatgtaaatggtgcagtgaggtttttggtcagaagcagtcgatggatttaaaaaaagattaatggcaaaaaaagcaatggagattctagctcagttttgtttacagatggaaactgtccaaacacactacaatgctctgcggcaactggattcttctaggggttttgcaagaaggtctaaggtttatcagcactactaatctaccattgttagggttcaccaacagtgatcgatcaccaagcagatacaaataattaagggacaggatctcattatgctccctgatttgataatttgattagtatctgcaacctcgaaatgtgatcgattttaagttctaatttctttcaaagccatgtttgcgttccagat

SEQ ID NO: 137850 - DNA, 377 bp, Zea Mays
gtgccacaggaagatcagaaccactcaacaccgctgccacagacagtgacgtcaagcccaagtttgatgtctgtgcatgcagagcgacgcttctacctggccgggtctaccgcaggcgtgctcgttttgccccaccagtactggggcaacattcgtctgccaccatcacgagggatgcagcgctggaggtagctgtgggttcggagacaacacttgtcaccggcatggagaacgctcagcaggctatagctgctttcctagagctaggggagccgacccctaccactgtggcgtccttcatcagcaaccacacctaccctgttgcaccaccgctgctccaggagctccatcaagcgccaccaaacctgaagacaaag

SEQ ID NO: 137851 - DNA, 606 bp, Zea Mays
gaacgagttggtcctttggcatcgacgcgacatcaagttgggtgatgagccgatcttaagccgtgtatcgcgtcataagtcaccaacgctgaattcaacaccaatgcaacaaaaagatagttcgatcattacataccccatggtgcaggaaaatatgacaccgacctccaaaaaaatcattgaaacaatcatatcgcctcttgcgaaggaactcgacaagggggacgtagacaaaattgttcctcagaatgtcgacgtaaacataaaaaaggaagcaaaggttgacaccaatgttgaagggccaactatttcaaagaaaattcatcagcgaatcgccactgacgatgtcaagaaaccgtcagaatcaatgtcacgttacctgcataaattgcggagagttatgacaaatcaatcaaaagcggaattagcatctcatggagtaggcacatggtcccaaatagacaatttcaaagtatgggaagaagatggaatgattcatactcgagaatcattacgtcttaaaaccaatatctcgatatacaataaggaggatgttcctcctaaatttgtgaatgggaggccgttcttgacgacagtgcaactttc

SEQ ID NO: 137852 - DNA, 468 bp, Zea Mays
ccgggacagacgacgaacgacgaacagcgcgtaggcacggtgagacaggtggagcttcggcgagcgacgacaactacgtggtgacgatgttgcgcgcaggtgggctagtggccgaggtgctaatgcatggcgaatggcgagggagagagaaccgagaggagggagagagcttggggtagggagagtgaagggctcggctggggttttatagagagggagggagaggagaggacgccagggtcttcaagctaccattagtggcgtgcataaatggagggaagagtggggagggagtaatggatgcagtaacctccattcacacagagaaacggacggtaatgaaggtccattaacgaggttagaagaacggacggggcacgggtggcgcggtcggtttccaggcatcgcgcgctgggcgcagcttctcggttggcgtgcacggctcggtcggcgtcggcttcaaagcat

SEQ ID NO: 137853 - DNA, 449 bp, Zea Mays
caccaaggtatggtcgagggatgggaaaggtaaaggtaataacaaacaaaagtaggcaaaggatggagttaaaaactcgcaagtgacaaagaagatgatacgtccaagagaaaaataggtaaaacatacaactctcggattgtgatggaaaagaggagattttaaagggccgaaataagataaacatcaaagtaagatatataggtgataaggacaaaggtgatattgatgaatagcataatccatggacagagttaaggcaagactcgcaaagtggtgaagtggacaaaacaatcaaggataagataagtgaggttccaacagaagagttgaaataaaaattcattaccgagggaagttacaaggcaacaacgggatctccaaggatgtgcaaaatagaatgaccgctcctggatgattaagaaacaagggtggtcaagggcgtgcta

SEQ ID NO: 137854 - DNA, 344 bp, Zea Mays
caaataagcaagatccaccactatcacctgtttccaccactgttattcttgcattgcatagatgagttttgatcccttttggcttcattaattctaagctcttgttgcttcacaagatgtggtgcatagattttaatctgtttctagtgtacctctattttgtataggatgtgtttggttgcctagaccagactgagcctggctcagggagaggatcaggctcaaagaaacccgcatgtacagagccaatccaaaatatttgtttgtctggacaaaatcaaccaggcccatatgacacattgtttgattctcaattttttttagcttggcccaattaggttgcc

SEQ ID NO: 137855 - DNA, 705 bp, Zea Mays
atcaggttgactaacatgcaatacctaggaactcatattacaagacattggtacgtaattctattttcagagtctgtagacactttcgaatcagcgtgcttgcagcttactcatcggttctattgccgctcttgctgccttctttctcgtagagacacaactgcataaccttcccttccatacgaccacggccctattagttttgtatccatgtttttgtgtgcactgccaatgatggatgggggcacacgtgacagcatggcgtgctgccgtcaaagcccaagtgctcagcgttctgcgattttgtgaggtatgtactggtatagctaccttctttaggtttaatatgtcccctggttaggccagtctagctctttccctttcgcctacacaaacatagaatcgtttcgtcttcgaacaactactatcgagcgcgttagctggcttcccgccgtttcgcgggacctcctcctcttcccgccaactgcctactttctcacagagatatgcctgtggtatctgcccttccatacgaacctgttagtttggcattcctgttgttgtgtgtgctgctgctaatggatgggggaacatgtgagaacatggtgtgttgccgtcgaaaccccattgcccaacgttctgcaatttctcaaattctgcactaatattaggcgctctttgagttgaatatagcctttgtttaag

SEQ ID NO: 137856 - DNA, 444 bp, Zea Mays
cagagactctctctttttttttaaccgctgccactacctctccatcagcacgaattacaagaaaggccggggtgatggcattattagtttattacctctagtgctaggtggttgcggtaacagcagcagcagtagatcccatctagcggcgcgagggcatgtgccgccctccgtccatcaatgggcggcgtggatctgatgcatccttttgtttaacctctgcagagcgggagcaggcggggcagagatctaacagtaagaaagtgctgtgattgttaattagtctgttaatgcgcgacggaacttataatctaacagttgtgttaccaccgcttcacccagtagcgagtactccagctgtgatctgccccctttttactttgttttctttacccccacttttcacctttcggctaatttcaaccatccagattcttgcttcgg

SEQ ID NO: 137857 - DNA, 421 bp, Zea Mays
aagtactggcaggccctctcaactgttgtgcagcaaacaatggcttttgcgtctctgcaatgaatcaacccaaatttctgttccatcactcttacccactcatcggcttctagaggttcttctgttttaataaagagcgggggtcgagtctcagaaaattccaagtatgtagtttcacgcggtccttgaggaggagctctcccaccatgcggttggaactgattgcccaccatttcgtgcaagaagcgcgtattatccgcagtagcattgaccagggcagcgatagcctcggccaaagtcggtggtactggtggcgggttaggagtatcctccctaccgcgggaagtccccgcaccatcatgtgcgcgagtccatgatggcatctgaggcaaagaaacattggaaaaatataacatgccag

SEQ ID NO: 137858 - DNA, 349 bp, Zea Mays
taataagaattgtggatgcgtacatgcacctatcaatacactattgaggttgctaaacttgtgattatcaaatctcaatcacctcactaagtaaaggctctctctttcactccaatagctttcttcaactaaacaaatcaacaagacggagggatatatatagccctaaagcaaggcaatagttgttgtccctccactcggttttcacaagtgcacccgacacgtatggtgcacatcaacctcctgaacatgacgtgtttggtgcatgctccaatggctagttcagaaactagtgatttatatattggtgtatcatgctatgactagtgactcactagatatgttcagt

SEQ ID NO: 137859 - DNA, 804 bp, Zea Mays
ccccactcgccagtcgcatgtccccacgctcagcaatctcgctatcggccggatggctcaccgatttgtgggacccgcttttcagccgttttctcctccgcgttacatgcttgtcccactgcagtcgagccccacctgtcaggtctttcatcctcctcttgtccactccagcaaaatggaacctggagtcttcggcgcgctccgcggtgcgcgctcccatccaaccgaatgcactgggagcatatatataggaccggtcgcacccttccttggccataggatctagttgaggcaagcttgtcgtgggcgaggatgccattatcgaacaccaggaggtgagacgagagagagagaatgaggaagttgcactgccaccgtaatccaggttcgccaaggcggagggggagaagagggtcgaggcactttgtaggaggtccctacaagtcttcatagtcgcgtcaggggggattatcgacgggcgagccgaggatttgtcgctggagttccaacgccgccgcgaatcctctgtttgtcgactccggctcctgtgcaatgccgccaccggtaagatctccctcaatcgattcgcatccttcggtagatcttgtaggaactatctgcacacgaattgtatcgcctgggcgcctggccggggtgctcgacggcgcggcttgcaatggggtgagctctgtgctgcgatgttccggtgaccagggtagaagaagagtggtagccgtagatccataaagcaatgtctagattggaaccagggcgtacttcttcgcggattgatcttaggccgtt

SEQ ID NO: 137860 - DNA, 312 bp, Zea Mays
gttcatccatcccatctagccatgatctagtgagccccgtcgccatacacccccatggccgggtgagagaaattggccgccgtctgtgccctgcattcctagcgttagtcgggttccaaggagaagtcaagaagggtcgtgagcgcttgtggaagcttctgcaaccctcaattcgacgataagagagctgggaacatccaatttttcgctgggactcggaataccgcgatgcgccgtgggcgggtggtctggactgcgcagatcactggtgagtccactatcacgctcgccatgttctacgctgtgtttagc

SEQ ID NO: 137861 - DNA, 514 bp, Zea Mays
tggtagcagtgtgctgtgttgtaatggctggatgtaatgaataaaataactagtttaaaaaaatggcatgtgcatgatagtgactcttttcccatggcagatggcttcggataaaaccatgcctatcgcctccgggattggagcaagacttcctctaggagctgaaggagaggctggcagagaagggggtgagacccacctccccgcacctccgaaactaccactagacctagcccaagttctagccaatcaaacccgactcattgaagtcctcactcgaagtctggaaaaccagcgcccaggtggtggaaggccacaggacaggatgggagaatttttgagactcaagcctcccacgttcgcggggtccagcaatcccctcgatgcagatgactggcttcgcacgattaagaggaagttggaagccatcggatgccccgaaaatcagcgtgttcaactggcagctcatcaactttcaggaatgactttagcatggtgggacactttcagtgaa

SEQ ID NO: 137862 - DNA, 727 bp, Zea Mays
gcaatatagagcgaaagaccaactcacctggagattggaaaggaattgtggaagactcagggcaggaggaactggagcatggcttgacgagggaagatcagtaggaacaatctggagagcaccacctgaggtgacctcaaccccaccagcagacagcaggctccttgcgtctggctcgccgacctctaaggcgacttgtccagttaaggtcttagaagcacgtgctgtcgtcaccccatcggaccggattgggggtgacccgatgtgtacatccatggaaacattggaaagagagcacacctgaacatcctcgggggctagattgcagcttgcactacccacaagggctgggttgctaccagcaacaccctcgggggctaggtagctgccagtgccaccctcgggggctaggtcttctgcagcagccacttctaaaggtgaaggccctttagccacctccatgggagtcgggtaactcggatcagtgtccttgcatgggagactgtcctccaaggtcgacgatgtgtgagacatcacttgggttacctcttgcctggcagaatcaagcagtgaaagcccaccatctgggacctctggacagatgacggggatatcagcctcaggaggctccgatagtatgtcttcatgaatgactttctccagtgcttgatcaaaatctgatattgaaagcccctgaagaccgacaagtgccgatagagctggagag

SEQ ID NO: 137863 - DNA, 382 bp, Zea Mays
gcggtcagctcgaccttctctccctcccagcagaatcgccgcgcatggcgggcaggcgctgggatccgttctaatcggcaagtccgcgctggaggaagttgaccgagggctcggggataaattggagacggaagacccacctgttaagccacatcgaactcctgaggccatcccaacataaaccgaagcgccgccagtgctcacgcgcagatttaggtagtcctccgccggtgctgctcctcgtgttgccggtgtccggtggctcgaggtgtgaacgtcggtactcgatcgccggggtccttgggggttgatgcgtgcggtcttggagcctggagtgcactggtgactctggaatttctcaccgtcgtcgtgcgtccgctgc

SEQ ID NO: 137864 - DNA, 446 bp, Zea Mays
ccaaaatttcgttgcacatagtttctatcatttctaaccattcttggcatggccctttgaattgtttctcaaatttgaactgataaggcagtcgcacaagttcattcttttcctttgtcccttttagcttcggcatattccattcactcagcgtcgggaacaccttataggccagatattcttggactagatctctggtgctgatctgctcggctaccaccctaaattctgccacagcttgttggcacggtgaccccgacgtcatgcggcacaggggcctagtcaacctgaagcttaagctcagcgggctcagtactagcgtctttagcttctccctcttcttttcatcggccttaacatagaaccactcatttttccaactggttggccatttggtgcgatacctgaccaccggagccttcatatctttgcggtaagcgaagttg

SEQ ID NO: 137865 - DNA, 415 bp, Zea Mays
gtcaggtttcggggcttggaagtcatgacttgctgctgccacatgactgaccggaggtctgcaggccacaaagaaatggaggaatcttgcgtagaaaggtcgattgagatcggagctgacgagctctagacttgtagcgcatgcacgcagcattggcccttgtgatttccagccttccaggctcctatcaacgtcctacattggcacctcatggacatcaccagccacgcatttaaaagtgcccgttaactaaaagattggttctgattaggtgactagtagcaatttctggcaggtgacaggtggcttatttttgtagtttctttactgtaggagattaagtttctgtggatcaaagaatatctttccaactacaccaagctacgttgtttggcatggctgcaaagatagctcc

SEQ ID NO: 137866 - DNA, 391 bp, Zea Mays
gcaccaaactttcgtttccgatgttccgaaataccgatatcgtttccgtttctggagttaccgttttcgattttgtttccgataaaaaatatgaaaacggtaatggttttagtgtttaccgaccgttttcatccctaatagatggcaatggttatcctgattagatagttattaactccattatagtattcatatagcctaaatattctatcttttggtctgttattagacaaaaaccttcatccactgactaaacgagtattaaacattctgccatcacccatactcgttaatcaatgggcataaaatacctagtataaacttggacaaaaaaatataaacttgatcacttggtctagcccaaaacaaatgaagccctagctatataatc

SEQ ID NO: 137867 - DNA, 309 bp, Zea Mays
cctgcacagctgcccaaccgccgggcccaccggtcccctgctcatcttcccagcctcaccagcgctccccagcgcgtcgcgttcctaagcccagcgtcgctgcccactcatccatctctctccctgcttccccacgacacgcagcagccaccgcgtccctcctctcacttcaacaaccgtcacctgtcgagatctcgcccacgtctcgaggaaatcgacaacgactcccatttgatcccagccccgtcctcctctccccacctcgtctcacgcccgtccttgccccatgctccgccggtgccgctgcaa

SEQ ID NO: 137868 - DNA, 508 bp, Zea Mays
tgaaattggacctagcccgagcatttcccctaatctaatttcattaacgactaattaataagctctggccacggcgaccgtgaaccacacggcaagacagccgtgttcccggcgatgggtggtggcctaattcaattagggggtcgaagagcttaagtaggatctaggaatgctagaacaagcagcagagggacttgagctcacctaaaccgagctagccacggtgaggtcttctttgcggtggcagaaagctgatttgggggaaaacggcgattctccggctaggggggctaatcgagggggagagtgggtgctatggcttcggtatgacctagcgcagctgcccgggggctcaatttataggaggcttcgacggcggcgcttaatttggtcgagcaacgcggcggccggagataagagagaaccgtggcgcagtgaattcgtggctaacgccgtggcaacctcaccggcgttgataagacagtggtagggagtcacggtgacgcgg

SEQ ID NO: 137869 - DNA, 359 bp, Zea Mays
ggcttgacaggaaactgcttttccttggcgatcggtgagaaggacggtcttacttgcgcagctgatgatacccttgtgcttagtgagccaatccattcctaggatcacatcaatcccttgggatggcaagacggttaagtctgccaggaacactaccccacttaagaggattctgacttgggagcacctaagttggcataggaggtctgatcccggggttcgggtgaccaaagggatagctaggggcgtaaaggggatgccatgcttttccacaaacttagtggctataaatgaatgggaggctcctgaatcaaaaagcacagtggcgggagtaaattcaacaaggaactcaccgagca

SEQ ID NO: 137870 - DNA, 570 bp, Zea Mays
agggagagagcccgagtggatccgcccacggtacgaggaggttccgcggcgttgtttgtgctccagcgagcaatcgttcaaaggccgaggtcttaattcgcctagcgatgcaacgagtggcttccgtggcggtacgaggaggttccgtggcgttgtttgcacggcaccgggatacgtgtggtcgaagtacgatggtggcggccctattttctccaagcttgcggcgatggtggctacggtgcttgcgcaacggatgtgggcgcaggcggatgagacgatgggggtcgcgacagttaccatttatggcctgaggagatgcggccccgacttgtatatcccctgtgattcacggcggcgatagcctaatggcccggcgcccgcggggaattggttgtgaggaaggggatagtgctgacctcgcggccccaccagacagccagacgaacagcaccagcgtgcgcgggtggccgacgggcgggacccataggttggcgcccaacagagagggcagtgcgctggacaactgagatgggccaaaagcagtagagttggcccaattaggtctttctc

SEQ ID NO: 137871 - DNA, 321 bp, Zea Mays
atcttttaaatacttcaccaatcatcttgtacaacgggaatcgaagcccgatacggaagaagctcttgaaaaccaccacctcatcatccttcggctctagaactattttgtcacctatgaaccttatcaagtcatcatcgttctttctgaaataaccaagcttcttcactaaaactaagtcatcaagtttcatggtggatctgccaaactcaatatggctgggcttgcttggacttaagataccgacatcatcttcggcatcgtctccatcagtgttacctttggcatcaaaaatgttcttctctggagtgtccttctctt

SEQ ID NO: 137872 - DNA, 350 bp, Zea Mays
gggaaaataacaaacagaaaacaatataccaaacatatgcagcagagaggggtcacaagttcataacaaaaaaaggataggcactctagtgttccctaggtctggggtagaggactacacaaagtgatttactatctactaatcagatctaagtcaggggtgggattaaataattatctggtttaagttcctaaacttaagtgtttaagtccataaacttaagtaatccaactattactaaagtctactcatttccaattatcttaaataaggtttcaatagtcttaatcctatcctagtggttagctattaattaatacatggaaacagcagggaaacattgcataaac

SEQ ID NO: 137873 - DNA, 537 bp, Zea Mays
catcacctcgccaacctcctccttcggggcctttcccagcctctgcggtcatggagcatctcgccggggtgcctgggttcacgcccgtcgtaccctatcgtctatccagtaaccggcatcgcacccggaggaaaacaaaattagtggcgggctcgccgtgcgcagcacctgcaacgcacgagcaccgcgtcttcggcaccgacgcgtgatcgccgtctactcgctcgttgcagggcagacattccacgatctcgtctacggctgcgccggcgtcgtctccatccctctggtccgtgccccgccatggcccagcccaagctacagcgaccttcggcaattgctcaccgtcagcacagttccgctccacccgtgactggccctgtgatcgcccaaatcagcggtaagtagccatcggtcttactcaccccagccttctgtacgaaaatcatttgctaatttgacgcttgaagaccggggttgtcggattgcgggtccccggcgtgggctccgccgcgggtgggcgcgccgccggcatgc

SEQ ID NO: 137874 - DNA, 408 bp, Zea Mays
ttgaaatgcatagttttctttagataccctgttaatcatttagagagatagagtatatttatgtgttgttttttttcaagcatcattaatttgagctcgtctgttctactttgcacaatgctgatttgctactattcgtggttatggaacttcagcttgatttatggaacttcaactcgaattaggcaatacttttgcacaatgctgatttgctactatttacagagatattacatgtttatagagatgctcttttacccctttttctattaaatttacaaaatatcttcatccttgtgggatactttttcctattgcaaatatgcatatagattttcttgtgccttatctttttgccattggaagtcgactatccacatactacaggaatgtcttgttattccttgt

SEQ ID NO: 137875 - DNA, 276 bp, Zea Mays
gcctgtttcacggcgaagactgcgcgcacccaacgagggactgcccggaaacgaaggccaccagggacaggatgtctcgggcgcaaccaaccgacaacccaagagttgtcacgcacacatatcaacaccacctcccacaaccatacaaccatggccccgctcatcattcacctaaccacgcataccaaaaccaccaggaggtacaggtcgtaccacctccactaccgcctccgcacccacatcagccaaacatccaccacccaaatcacccccaag

SEQ ID NO: 137876 - DNA, 966 bp, Zea Mays
ttcattttcccttcactttcagctagcagtttctgatatttgaaactttgaatacatatgaacactccataaattttcagccagcattttccctatagaaactgaagcatacatggcatacatatcatatattcccttcaagaaaccgaagctgtcatacaaaaatttaagcattttccgtacagaaattttcagtcaacattgtcccttcattttcagccaacagttcagattactcaaagttcaaattagtaacggaggattgtgaccttcgttagctcataacctgtatagatattactcaaagttcagattactcaaagcactaacagcaaattcgtgtagacctctgaacgtatagtttttgtttcatgtggccaatcatctagacatctgaacgtgtagacctctgtatgtgatttggtcatactgatccccatgtttgaacgtgtagtttttgcttcatgtgaccatttggtcatactaatccccaaagactaatgttagtgttctctatattgtctcctggaatagtgggtgcaatgcttttatgtacactgggagcacgaataaagggtactatccctggtgccaagttcccttccgtgatcatctttagtttcatccctactggccttatctgcaggaacctcatcattctcattgtggtaaatttgagagagggtaggtttaattaagagtatcattatcaacagacattgcagcacactttgtgtcaggggcagttcctaagtcagttctgatgttagatgattttttgctcacattgtgtgctttcataaactgctctggagtgctcaagttttttccagtagcacccactacattgctagcagagacagtttgtgtcagcggcagttcctaattcagttctgatgttagatgattttttgctcgcattgtgtgctttcataaactgctctggagtgctcaagtgttttccag

SEQ ID NO: 137877 - DNA, 300 bp, Zea Mays
ctaagaacgagcttgatacaactaaaagggaagtgcactacccaaccttctcaagataaccgtgattacatggtgaaaaagcttgagacgggaacaaccgtggcatgcacaaaatcccttgaagaaaaagtcaaggacttgaggattgtcaagaggaaggaacaaaagaagaaaatcaatacctccgccaaaagcctcaacaatgcctccatgcaaggtaacatccaaggtaatgatcaagccacacttcacactaagaaatgtaagaagtgcagtgaatgctttgaaaagggacacttg

SEQ ID NO: 137878 - DNA, 355 bp, Zea Mays
gtttcctcaggtaccttgagttatatttcagtagagcccactctgcatgagcaaatagtcatggcacatatgggtgacaagggtgttcaagtcattaaggatatgctcgaacaaagggtggataagtacaaatgctttcatcaggacagcaagggagttctatggtttgaagaccgattggttgttcctaagaatcccaaactcaggaagaaaatattggatgaagctcatctttccaaattttccatgcaccccgacagtaacaagatgtatcatgatctcagatctttgtattggtggaccagaatgaagagggaaattgctaagtatgtatctgaatgcgatacttgccaaa

SEQ ID NO: 137879 - DNA, 473 bp, Zea Mays
ctatgctgttaagctaattgtccatgttttcttactgctcgaatgaatagaaatctggaattatgctattattaaaactgggtttcaacactttaccattaatcgaacgggtttcgcttgaataccattacgaaacttgacataaatgttgtaatgccgtttcattattttataaagctaaaaaggaaataagagagatggagagacaattttgctctcttccccgcagcgcacggtggtctgggtgtggccgtgtgggtgtggtgtctgtagtctgtactcgtactcgtagatagaggcttttcaagtgccacctacgcaagtgcaattcaagaatgaatcgatggagagaaatttggcaaaatgggtcgctctagcttgccgctctgtaaaacacaccgcttctagctgtactcgtaaaaacgggtcgctcaagtctgatcgctcgtcagaaggggtcacggatacttttg

SEQ ID NO: 137880 - DNA, 330 bp, Zea Mays
tatctctaaagtgccgatgatgtcctcagtcgctcggcatttatctctaaagtgccgacgatgtcctcagtcgctcggcatttatctctaaagcgccgacgatgtccccagtcgctcggcggctatctctaaagcgccgacgttgtcatccgtcgctcggcggctatctctaaaaaacgctggcgatgtcacaagacactcggatgtcagctctaagagcgccgacgtggtcatcaatcattccgacgctgacatagtttcgtcatcactcggactctatttcaaatgcgtaaaatatcgacaacaatagctcggccatcacctccaaag

SEQ ID NO: 137881 - DNA, 687 bp, Zea Mays
ctcgcgtggtggtcggccggtttagcccggtctagttcaccggagtagttccctgtgtcacccctgcctctgctgaagttagccaaggccttagcgcgccctaagtcccctccccgtggccggaatctctcatcggagtttctctgacccgcccgagactctctcactgccgttctcccctctctgcccgtggattcatggcctcttccacgccattgagttcgccgtggcgtcctcttcctctcttcccaactccggcgaccccagagccaccctagatcgcactagcctcagctccagcgacctcaccgccatggtgacgagcgacgccgcccgcagccatccgtttaccctcggtctgatttccctccgtctgattcagatcgaacggctcggaccgcgggataccgcttcgtgcacgcgcgcctgacacgccctggcccgcctgtcagtgccattcgcacccgctcggacccccctcggacccgtttggacccccctcggacgcgcttggacccgttcagacccccttcggaccccctccgtctgatcttgatcgaacagctcagacctcctcggacccttgtagccggccgtttcaccctctggcaatgggcccgctctgtcagcgctctctctccccctctgtcactaacattccctggcccgcctgtcagcgctcgccag

SEQ ID NO: 137882 - DNA, 425 bp, Zea Mays
gtgggcccgtggcaaaatgaattggagggatccaaaaccacggaggaaaatatagcaaaataaattggagggaaataaaataattggagggaaacatgaattaatacattaattatttaattaattcatttcacattttaaatattttgctaaaaacagatggtgtaattcaaaataattgaatttttaaatttgaatagtaatacagggatgaggatttatcaggccgaagggtattggatgatttaatcccaaccgttcatccattgatcaacggacagatcatcacctccccatcatcctccctccttagaacccatggcaggtgaacacccaactagcgcttcaatgattgaattccccttcagaaaagtgccacccgaagaagagaacatggcaagcataatagggcagattgtcacaac

SEQ ID NO: 137883 - DNA, 616 bp, Zea Mays
gcacgtgagtgagatataggaggataaatttaggggaaccgttgaagtcagtcttactgctactactccgtagcacacgcactgtagcgtttggctgggggattggtgtgtgttggtgctagatttgccttgcagtatatggccacattctggcctaaagctgcgtaggccgaaaggcaatagggcgtctatacgtacttgtcagtcagtcaatcaaaaaaaaaaacgaaggtaaagttgtcatgagtagtatcagcaattcagatagcagccagcggttggagacgcaaactaatccgccgtgcacggggcacagagctgagaggtggtaagcaagggacggctgctaagccacacaggtggaggtggtcaaagttccggcggtgattagccggtcaaagcgcagcgcagttccttgacaccgaagcagcagcagcgacctcgggggtcaaacgggctggctgttggcgtctagacctgttcaactttggcgactctgcttgaacccaacaaactagcagatgaaaaaggaagagaagaagaaagttttgctcgctgggatctcatctctgtgggtcgcgtgtgggccccgccgtgacagggtgctgattagaac

SEQ ID NO: 137884 - DNA, 421 bp, Zea Mays
cacgcttacttaactcggggtgaccactatgccctactaacggagcaatcgacttaagtcggcaatgacttaaggcggtgcaacatgctcacgcttacttaactcggggtgaccactatgccctactaacggagcaatcgacttaagtcggcaacgacttaaggtggtgcaacatgctcacgcttacttaactcggggtgaccactatgctctactaatggagcaatcggctaaagtcagtggcaacttaagccggtgcaacatgctcatgtctatgcaattcagggtgaccactatgccctattaacaaaaacaatcgacttaagtcagcagcgacttaaggcgaacagacgtattatgattactcatacagggatgacttctatatcccacaaacaaatttcataattatcgcgcgtca

SEQ ID NO: 137885 - DNA, 529 bp, Zea Mays
ccaatccttaccataatgtagcacacatgccgtcaacatgtcctcaagaatctggttcactctctctgtttgcccgtctgtctgaggatggtatgctgaacttcttattacatgggtcccaagtgattcttgcaattgctcccagaaacatgctacgaacggtgctcctctatcagatacaatagtccttggtattccatgcaaacaaactacctagtcaatatagatctcagcatacttctctgctctgtgggtggtatgtactggcaagaaatgagcggtcttagtcaatctatccacaatgacccaaatagaatcatggtgccgagaggtattgggcaaacccacgatgaaatctatgcaaatatcctcccatttccaagatggtatgggaagggactataagttgcctgcttccttcaagtgtctggccttaactctttggcaagtgtcgcactcagatatatacttagcaatttctctcttcattctggtccaccaatacaaagatctgagatcatgatacatc

SEQ ID NO: 137886 - DNA, 412 bp, Zea Mays
gtttagttcactgtacccccttgcacggaaatgtggccggacgatcatcgccgtggtggctgccgtccttcgcggttgcaccacgccgtgaccctttcaccatgtagctataaccatggcaagcctagagttactgcccctgaaccgttgtaccggtgggcgccacgacgaactcgtccaataaaacatcccaccgccgccgtgatcatcttcgactcaaattggtgaagcacgtagtcggttcctttaaattgagaactaccctcgctccgcctctctgttacgcgctcataccaccctcagttagcctctctcgtgcactgtagcccccagccaccggatttccccaaatcaggtcactcacgccgccgtgaggcaccctgccgtgatcagccattcccaggtccgttca

SEQ ID NO: 137887 - DNA, 728 bp, Zea Mays
tccaatgatcgagatacaatctggtcaaaggggtgggttgcttctaatcctggccgatgatctactattcaacgacctagattttattatggctataccttatcacacctccacggcttagatcaaatcacccagatgatacgcctagcgccaaatcacggtcgttgcacgctggatcaacggcgcaagcttgcccccacctcacgtcatccaagcacggcggcgccaccagcctagacggcggagagatggccggagttcggccaccccgtccaggagggccttatactctaatctaaagtgtgaatcatatagtgcaaggcatggcgaacgcaggggaagagttctcaccggcagggacgaagcatagaggcccgaccgcggagagtgggtggtccgcggcggattcagtcaccgacgagaaattcaccgagccctggccgcccacggccccggaattccacacggcgacgtccgcaaaccttgacaaagctttcccgagcgcacgttttgccctaaatggacggtaatcaccgagggccgattacggcggtggtgctcggctttccctcccccttctcattgtttctcttgcggtggcttagaaatctgcagacgagcaggaaagagggtcacagcgtggtcacttttatggtcccgggagcacgcgaccagcaggtatttggttgctcgcctccgggttcgtcagcgagggcgcaacggtcgcg

SEQ ID NO: 137888 - DNA, 627 bp, Zea Mays
accccaatcccatggttaattaccctactctagggttaagaaacacttcaagtcaccacatcacacttgttttgaagttttagcctagtgaatgcactctaggtgtaacaaccataatgaaatgtcaatgcatatgatgtcatgctcaagttttagttctcataacaccagaggtgttacacatcgacccaagatgcaacgggcacatagcacgacccacggcgccactcaaatcccactttccgggaagcagaacaacggggaaggccaagaatggcaacggcgcacaatcttacatcacattccttcatcgccgatattggagctaggctttcttgttgcgtatgcctatctaaagaggtgaggtgatagtcgaagggggtcacggggtcgcgttatatactccaaatcgaaggtccgagcgaaacaagatgcggcatgcgcggactcggagaatttctttctcccggttgttacgatccgctctcaaaaatcggaggagggagataatcctgacggattgtccccacggcgtcagcggcttagggcaacgcacgcgctatcaggtcaagaccgacccgatgggcccacgtgacagcgcatgaggtttggtcactggcccgagct

SEQ ID NO: 137889 - DNA, 631 bp, Zea Mays
cgttaacctcaagttcatcgacgatgtgttgaagaatctcaggcatactcctaatacccctgtgatatcaaaaatcaatttcagtatggtccacttcatcagtgacatgctcgggcgtctcaggataacgccccaacaacttcaagatagtgatgtccgaatcaaactgatacaatctacaattcgggccgacttccatcacaacaacttttcagacttagactctgcatcaattcggtcaattataatgactcggatttggactacaaatacttgggggcttagttcatgttcgtgacgagctttgagcgatatgagaattcgcccttcgaggacaaagacaactcaacaataagaatatgagagatctaggaagatctgtgttggagtggtcgtgaaacccatttccaaaactagatggctgagttccaagggcagccagtctgcacctcctcgacacacaatatcatgatggctaagctcttattggatgggactactccacttctatcctaggacaacacatggttccatgaggacctaaggacgatccaaaacatgattgcatacgctatgttgcgtgcggatgctaatacaatttagggtaggtccaggataagtctaaatcatc

SEQ ID NO: 137890 - DNA, 594 bp, Zea Mays
ctcgggccgattccagcgtaaatcgtgagctaaaacagcgtaaatgagtacgaaatttagcgtaaatcctatatctattttgtaacagcaaacgaagcccaaaattacggcgtgaaaatcgcgtgcagtcgatcgtgcgcgggttctggctcgggcggattccagcgtaaaacgtgagctaaaacagcgtaaatgaatacgaaatttagcgtaaatccttactctattttgtaacagcaaacggggctcaaaattacggcgtgtaaatcgcgtgcagccgatcgtgctagggttctagctcgggtggatttaatcataaaacgtgaaccgaaatagcgtaaatgaatacgaaatttacctaaattatagacctgttttgtaacagcgaatggggcccgaaagttacggcgtgaaaattgcgcacgttcgatcgtgcacggattctggctcggtcaaatttcagcgtaagatgtgaaccaaaacaacataaatgagtacaaattttagcgtacatcatcaatttatttcgtaacgacgaatagggcctaaattacggcgaggcacgggtcgaactcctccaggcagcgggatgat

SEQ ID NO: 137891 - DNA, 696 bp, Zea Mays
gtcgtggagcgcgccaacgacaagattttcacggcgatcaagaaaacgctcctcgacgacaagaagggtaaatgggtcgacctgctacctgaagtagtctgggcgctgaacacgaccgagtgtcgagcgaccgggtttactccctttcgcctgctatacggttcggaggccatgaccccgcaggaaatcaagcatgggtccccaagaacaagcgcttcggcctcacccgatgtagacgagctaacctccaaagatctcatcgatgcagaccgcgtcttcgccctgtaggccctcaacaaatatcaagcccaaatgaagacctagcgcgaccacgcagtcgtcccgagggaattcaacgaaggagacctcgtactcgtccgaacaacccggaccgagtcacgaggtaagctggagccgaagtgggaaggaccattcatcgtcaagatgaagtcgtcccccagcacgtacaagctaacaacgcaatctggcgaagtcctggagcattcctggaacatagacaatctccgcaaattctttgtttgattcctcagggccatcacgcccttataattaaccaaacattatcattctggcccgtactcttttcctcccggggggtgaggtttttaatgaggcggagccatacaatatacccacaaaaatcccccgcaaaaattaagacacgtcgaaaaagac

SEQ ID NO: 137892 - DNA, 398 bp, Zea Mays
cctgtctgaacccagctctggagtctttcaggcgcttactccttctgagctctgattccacaatggtcgggccaggaacaccagaattgttctcttcctgctcagagcttggaggctgtggattctccgagagaacatcatctaggaaattatccttcgggcaacccttgggaatggcaaaagataaggactcaagctccggctccagcaacgttgagggtatttctgacgacaagaaggacttgtaccagttaaaagattatggctgaagcaaatttgaaaggaaaaagggcgaccattttttgggaatcttcactgtaatgtctgggttccctattggagcaaaataattggcccaaatcctgtaaagctgagtagaccttttcctctccaagtgc

SEQ ID NO: 137893 - DNA, 394 bp, Zea Mays
gtggccatccgatcaagatcccacggcgcggattcaatttggtcgaaggggtaacctagagcctatcagagctgtccatcaggggatcaacggctgaagtccagccttccacaccgagcgcccagggcggcggcgcccgagctctacatggtggagcgcacgccggtgatggtgatctagcgccctgggtcgacatccagtaccccaagggcggaacagagagccccaacacaaacctcagaagatggcgaatgcacaaggggtagtcttaccggcagtggtggagagtttggggtcgcccacggtgacctgtgatccgaggcagaaggattgctccggcgagcaattgccgagagtccaaccgcccgcgagctccggatttcctccagccacg

SEQ ID NO: 137894 - DNA, 404 bp, Zea Mays
tgcgaggtaggtcttgtttgacagtctttaccccatcgtcatcagcgagaggacgttcctattcgtccttgtttccttactccgcaaccactgtttccttatgtgtcctcctccatccatatgtgtgctcctaatactactactaagcctcctacgatcaacgctcctcctaccactaaagctctcttccaccgacgctcctcctccataatcttttgattatttgtatacttcttcttatccatacgaatatccatatggttctcctccttaaggattgtatggtgattctcctcaatatgcttatccttatggtgttccttccgtgttccttccttcgtatggtgctcctcccacatatgatgctcattcttctttttgtcctcctgcatgcacaatactgc

SEQ ID NO: 137895 - DNA, 428 bp, Zea Mays
gagacattgaagaaggtgcacctgctgccgaagctgaacaagttgatatcgaggaagaaaatgttgacgaagaagaggaagactataacactctgatcccaacaaaacccagccacttggattttgaaaaatctactgtgtctaaggccgacgtgcccacgatgatgaagctgggttacttcggagaaggtgagaagaagcttattcgttttgccggagaagaaaccactccaaagccgaaagatgacgaagtagtggttttcaaaagctttttcagagcaggattacggtttccgcttcacgagatgattggagaagttttggataattatgaaatctatcttcatcagttgacccctaacaccatcgttaggctcagcatcttcatttggtcccttcgaagccaaggaatggacccaaatgctaaa

SEQ ID NO: 137896 - DNA, 446 bp, Zea Mays
caacagcgccaggggctgttcttgctcctctagatagcaatcatgacgaaatccttctaagagtggcccagagtcagaagaggaaggccactatcccaactccacaagatgaggagctagatcaagagatcagcaacctagaagccatacatcaacatgtggagaagagaagggagaagatgcttcggttgtccgagcttcaaaagaagatcaacgaagcaaccgaggaaatgcgacatatcgcacaagatactgagcaagggcatagaccacaataaagagaccttggtcaggagcgccccagccacgatgatatgtggtatgatgattttcaccatgacaatattgcttttgatgatgcttctcccctagctatagagctgctggctgtgccattgccaccttcgtacaagccaccccagctacctgtgtacgatggccactca

SEQ ID NO: 137897 - DNA, 902 bp, Zea Mays
actgtcagccgctcaatcactcacgtacacccgccttctttccgcgctgcgcgcgcgttcagtcaatggctcatgggccccacattgtcagctctatccctcccctctcaaccacttcctcggttgctcggctgaaaactcgccggtagacccggcaacaagaccgcgcagggccgtcgcgaccacacctccctgcggtataaaaccctcctcgcagtgttacaacctccgctccttccaccgtgccctcgcatcatccctagcagtcgcgtcacgccgttgaccttgagccaccccattccagagccttccgtccgccaactccgttcccgtccgcggccacttccagagccttccgtgccgcctcgggctacttcgcagcgctgctggggagcgctcgtgaccggctgggggtgtttcgacctcggcagcgaccggaatttctcatcggaagcgtcgctccgccgcgtaaccactcgcgccgtggacagcttcactccaccgcccaaccctcggtaagtctcaatttcctgtttctccatgcacctaggtccgcgttacgccggttcaatttgtgttagacgctcgggtacggttgattgggtgccttgccggcgtgctccgccggatgaacagggcggcgccaccggtttgagagcctaaggaaggagattagcgtccaccgtcagatttggaatgaacagcccagattgaagttgggatgagatgggtttctggccgttgatccgatcacgtacgcgcgagattagatcgcgtgccccccccccttcgcgggattagctttgaaccgttggatcacgatcggacgaccacggttcgatactggttcatacacatgcgctttgatctgggccgcccacgcacgatcggatggcctagag

SEQ ID NO: 137898 - DNA, 1052 bp, Zea Mays
ccatgcacgaagcttgaaaatagccctgttgttgtcatcaaaagaacttggaaggatctcatgaatcatacaaagaccaaatagaaggctctccactgtttcaaccctccaaagatgagcaggaattccataagctggggtaaggctccaccccctgaggccaaagcatgacgagaccagcgcttgatgttcagccggaggggggggacatacagagattgcccaccggaaagcacacgatccgctagctcgacacttgaaaattgaacaatgaagttgtttgacgccaccatgcgtaagtcgagcgcatcagcctcaaggttgaaacttgagatgagcgcatccaagacatctgccgcgcagaaagagccatctatagcaataaccgagacaagtaaagcacgccgaagctcttcttcagcctgagaaatgatcctggagcgcttgatgaaacacacctgacggacggaggcagtggcaggagcagggacaggcggtgatgaggaagaggtgggaggatcatcatgaccactgcccctccgagaactcctcttcctcggaccacgacgagtacgccttcttcctttgccatcagaaattccatcgacgagacgcgcataatcctccattctgcacccaatgaccttcacgggagatgtcccctgggagaccggacgccacacttgggtacgacgatgacgaagcgtctctgtccttcggcgcgggcacacgtgagcacggtgcccaggcagctggcaacagaaacaccgcacttgatgatgacaaacggctactcgatgagatggcgagaggcaattaaagcactttcccctcagatcaatgggcatcgaaatagggaggggcttagaatgggaggagctccgccgacgagcacgacggccaagaacttgcacccagccatcaccatcctcccggccagaagaagggagggcagagcatttggaagataccagaacgtccttgtacgaagcttgcagtttgaaaggcctctggggtacgtcagaggagtatccaccgtcttcactccagcg

SEQ ID NO: 137899 - DNA, 378 bp, Zea Mays
ggtggccagattaggcggcttgaggattggcggggttgtgaagaatctttttagagccttgaatgtctcctgggtctcaggagtccactggaatctatctacctttttgagtagcttatagaagtgcatgcctctttcgccgagccgtgaaatgacttagtactgtcatgtagctggtgagattctgtaccttcttctatgatcacggtggctccattcatgtgatggcttcaatcttctcagggttggcctcaattctccggtatctgatgatgaaaccgagtagctttccggtgggtaccccgaacacacacttgtctaggataagtttccaacggtagcacctcaaactgtttaaaaacttgttagaggtcatca

SEQ ID NO: 137900 - DNA, 286 bp, Zea Mays
aatcaattatccaacacctcctatgtggcccttggggcccatcctccaggcgctgcttcacttgctcgttcctgcgtacaaaaaggataaataggtgtttagagttggttctgcttaatgtgtattctcgccagcgcatcttctgcccccttgctctagcttctgtgttcttgcttccatctcggtagcttcgtggtaatggcgtcgttccctgcttgctcgatctgattaggatgcctccttggcatggagaggaaagggttccttcccccaagggagtctctta

SEQ ID NO: 137901 - DNA, 555 bp, Zea Mays
aataatcaagtcacacttcacactaagagaagtaagaagtgtagtgaatgctttgaaaaggggcactcgattaggacatgtccctatattaaaaatgacttgattattaacaaggatgataaactttgttttaaatgctccaagaagggacacttgtttaggtcttgtccccatttaaaacaaaaaggcatagtgttagaaaagaaaatattcactaaccatgtagcaagaaagaaataaggaaagaagaaatcttcaagacttgaggatcgcctatgctacatatgccgaaagaagggacatcaatgcaaggattgtcccattggtaacaatcccactcctagcttgtcaattaattctcttgtaactaggcaacccaaaattgcaacttgtgctagaaaggtaatgagtttacctagtgctagcataaaggacatttgggttcctagatccttgttgactaaccttgatggacccatcaagagatgggtaccaaaatatgcttgacaagccttgcaggagaaggcgatggtatgaaactttggggtgcttgag

SEQ ID NO: 137902 - DNA, 542 bp, Zea Mays
ctcctctcgtctctctcgtgcttctctgccgtgcgtgtatataaagggagggagcagggagggagacacgcggtcgggatgggcgggcaagccggcgagggttgatcagcattcagcagagagagtatttgtatttgtcagatgaaacgagaccaggtggcaactcatgcatcttcgttcgcgccctgtgagtgactcgcgcgcggtacaggtacagctctgaaatgtacagggcagctactactactgcctggatggacgatggggtagggtagttcagacacgtttgtcagtataggttgcgctcacggttggtgacgacagaaagagccaagatattcaatgaaaaaggaggactgcaggcgaggaccatgtgttcgtacgtgtactgtacgtcaagcagcaggcacacgctggtctcgactcttctgatgtctgtgtaaatctctttcggagaagacaggccccagcatcgatcatatcacaccactcgtaaagttaggtcatccctatcatgtcagttacggacatcggaggcgtga

SEQ ID NO: 137903 - DNA, 722 bp, Zea Mays
gcgagaccaccgtgcacctacacgtcttaaggccacgtccccaacacccgaagcccttgaccatcttccgtcctctagaactcaaaaaagccggctgccattaccttcgagagcttgagggggagaatcgggtggcgccaccacaaaaccacgggaaacaccaccatattcgcaagtgcttggccggggagatcggcgagctctggtcgtgtgtgtgaaggacctgtcggggcagaaaggttcaccggggtggcatcaattgctcgttggactcaaaggaccacggcagatctgcccattgccacgatcaacaccaattaggcgtccatctgcggtaagatgtatactagcatgttcgtcatattccgtacttcgtataaccctgagccgtgatagaataggagcacgatttggccaaatcgcctaactctggcgatccccaccaaggatggtggcggagccgccgtcgagtagttggtttggggagggcgaagtttggccgtgggatgtcctatgaacagctatgattaaaccgagcgtaccctttcgcgcaaacagatctgggtcgtagatacggtatcgtgtgagcgaggagtcgatcgtagtcgtattaaatttggtccgtggatccttaatcctgcggccataaacgcatatcgattcggatgattatcatattagatccgagccgttcgcctctaatctaacgaccagaactctcc

SEQ ID NO: 137904 - DNA, 729 bp, Zea Mays
ttgagttcatgtggacgaagctagcaggaggtactacaattgaacagctaaagcacaccataaaatctgatgctggaggtggttgtgtgatttctcatgcacctgggacgggaaagacgcgactggcaatcacatttgttcaatcctaccttgaggttttcccgcactgtagcccggttatcattgctcccagggggatgctagcgacatgggagaaggagttcaggaaatggaaggtaaagctccctttccatgtactgaattccactgagatcaactggagtgaggacaagaccctccaagaacaggctgcgaagaatggaacttttcaccgtaggctactgacagataaaatggatcaaaattataggcgactggtgaagctagggtcctggatgaacggtaccagcataatcggtctgagctactcgctttttaggaagctagctaatcacgaaggcatggacggggataaggtgaggaagctgctgctggagaaacccaacttgcttgtccttgacgaagggcacacgccgaggaacaagaagagtctcatctggaaggttcttaaaagggtccacaccgaaaagcggataattctatcggggactctattccagaacaattttgaggaactctacaacaccttgcgccttgtcaggccaaaggatgcagatgcattgcatctagagacggacgagagcaaagatttctggtcttcgttgagac

SEQ ID NO: 137905 - DNA, 451 bp, Zea Mays
gcctgatatcactgatttcagagttaagccatatgggtgctctttgggactttttgcaatttactccaatttgttccacaaaacttggaaatctccaaatgtaaaagttgcttaatttttgttactctaccactttgatatatgcactttggtccaaaagtgtatagaaattaatctcatctcatagagcactaattagggtttccagagtccttattagggtttgagtgttcttagggtttaagtggcacttaactttccaaatttagtctctctttaacatctccactaacttttgaggtcatactcaaattattatttcacacacctacatacttctaatccttgggtaagtaccctaccctagggtgaaagatcaagtcaagtcatcacaccacaagcttgtttcgagattttagcctagtggatgcactctaggtgtaacatacat

SEQ ID NO: 137906 - DNA, 301 bp, Zea Mays
gtttacgattcgtatagattggtcgatgtgtgaaaatacttgtgagtatgtgtgtttataaaaatgtggcagtgtatgttgagtctcggattacgataataataggcaagccgacgtgtattatgttatttagcggtctatgtcgttgctctagttagccgactgttagatggctttgattaagctcgtaatcacagtgatttgcttgttttggtctagacgcgcatggttatggtcgcgggtaaaattagtggtgttcatgtgatgtctaagtaaaaatacaaattagtgtgtgaagggc

SEQ ID NO: 137907 - DNA, 550 bp, Zea Mays
gtgggttgatatcaataattagtttcacaaaatcattataacagttgttggagaaggtgtactttgacttcatcgccatgagacgtgttaccacctgcagtatgctcacattggttccttcatgcactttagcctctgaggcttcaagaagcttgtagaactctttcacatcctttggaaaagcttgattattctgtagttctaggtactcattcctaatatcatccaacatctcttccattcgatctacatcctggtccccatccgactcaatagtatggtccacctctccatgctcatgccataccagatagttcggcataaagccatgtttgaaaacatgatacgagagctccacctttttcaaccgaaccaagttccgacattttattcacgggcacctcgctaaacgagcatcactagcaaatgcgagtaccatgaattcatctgcaactctcacccatgcatcagagtgcccatgagtgacactgtcgaatccatcgtacatcgcccttcttcgatcgtcactcatattcaaagctaaagaaac

SEQ ID NO: 137908 - DNA, 989 bp, Zea Mays
tatcatacatactactgcaggaactgctgtgggacccataaccaggaattgtcaatcctaaatccagtttaacaatattctctttgcatgcaaactatatttactgctatgtgtcaccattacaataaataaatattacacaacagattgttgtacaccacagaaaccaccattgcgtaaagctaagactacaggtttatcgaacaaacatttttgagaagttttgtggcattgaaacatcctttccatgatgtcatcttccatgaatggtcaatctgattagatgaaaagggcacaaacagtgcctcccgagccaaataaaattaaacttgaacagctgtgctatcaataatgtgacattgacattgacatgtggggctcacttgattgtattattgttctggctgaagtagaaatgtcagtcataatttcttccagaaacagaatggtattggtattagagttcctgcagttattacaggatgccctagagagaaagttctagcagcaatgcattatgacttgtgccccgtgtctcactcctagcgttttgggggatcaaccacactactgcgccttttcacattagtataggtattaataaagacctcccttggcgcgcactctttgccccccctttaaggaatggtataggattccaagcatgcgcttaaatgtttgatgtaatagtcaaaggcagcagtcttaaagacagtcctaacaaaaggctagcatgatgattaatttcacttggcagtatttataggggctgggcccatgtttgttttcttaaccacaagcacaaacagaaaaatccccccttctgattatcatcctttaaagcaaaatcaacatgacacttgaatgccagcaaacatttgtttcagtgccataaatatactctaggcatcattgtcatgttccttctaaaccattgttgaattaaacaaccacataactccaacactgtttcaactatccaactcaac

SEQ ID NO: 137909 - DNA, 461 bp, Zea Mays
tgaatagtgggtggggtcaccggagggccaagcaccggcgagaccgccgccgcgagcgctgttttcgtcgtcgccgagaccgtaaggaggaaggacataggagcgccgtccgataacgatcgtatggtcgagatagatcgcagggataccctttcggactttgatcgtggaccgttggatgtgatctgacggacccgatccgatctcgcttgcatagagttaccgccgtcagatttagatccaagggtctagattggataccggttcgtttaaacaaccttctaatcttagtcgtccacttacgatccaacggctgagatctgtgagtaccccttcgccgagcctgttttgttaaaaagcccctgaacgatgttagatttaaacccgccgtccttggccactgtgcgctgagtctagaaaatatttcaccgtagcccctgcgcttaccagaaattgaaacc

SEQ ID NO: 137910 - DNA, 390 bp, Zea Mays
gtcttccctaatgtgtggtgtatgaacaaaatatttttttaatgaaagagtatatttatatactgtgtttcaaacatatcaatgtacaccaatatcatcaatgttgccatcttgcctccatgcttctacttcagtcccagtggaagctgacacggaagggaatatgccagcagcattaacttttctgaaagccaagtagattaaagctgcaatatatgccgccatgaaagggaagacaagggtgctaattataacattgactatccttgggagttcactgtgcacaagccaacttatgaagctattgcagaagaaataaatattgatccccataattacaatggagagaatccacgcgacttggacaatctagaagtgaagacagaaatt

SEQ ID NO: 137911 - DNA, 394 bp, Zea Mays
atgggattgtaggttcaagatttatttaaaaggatttaatatgcccatgttatgcataaaacaagatttcaaggttataattgtaagatgtttaaaagttgcagggttctggtattaaaaacatggatctcgggttctaaaacgtaaaaactggagagcttaaaaccctatgcgagagaaaacagggttttagggcttatctacaagaaggcaggggtcaagatcgtgctctaaatctctagagctgattatctgggttggagcagctaacagctaattgctatttcagaggtataactaataattagtttgtttattagctgactcgttttaaatcttctaactaattttagcggctaactattagttttaaagttcaaaacaaagttctaaa

SEQ ID NO: 137912 - DNA, 424 bp, Zea Mays
attggtgctactatgagcttcttaatgacatgtgatcgagttcaaggagagggtggtatggacaccttacaaagtacatgaccaagactccaacatgttttggcgaatatctgatgtccctgttgaactatccatcggagcacaactctggttgataggctgataaatcaaccactagaccatctatcagctctagtcgacccatttaccaatgctcaaaattactagctttagcaatacataatacatacctttttgcaaatatgaatttttataatgcaatgcccatagtgatcatgcttatgtgtcaagtgcacactaagttgttacaccatatgtcgtgcaaatgtttttatgaggttgcaatgaaacaatccaagcacttcttgatttcacacttgcatgtgggataacaacatgaaag

SEQ ID NO: 137913 - DNA, 316 bp, Zea Mays
gtcgtccacataggtgttgagggcggaggttggctggtggctgacgatgggaacctcatacaccatagggctcggtttatgatcatcatggtggaccacgtagatcttggcgcttccaacccatggcgcgctagatgtcgacgagccaccccagatgatgtcgaagtgtacgagttggggttcattggtagcggtggcgaggaagtcgggagagccgaacatgatgtgacttcatagagcgaagctctcactgccggtgaacgctgaaatgtgagccatcaaagtggaagatgtcactaggcatgctaatgatccc

SEQ ID NO: 137914 - DNA, 1779 bp, Zea Mays
agttaagatgcccgaagcgctcgtgccactgccatgccccgtcgtcccgacgagcagcaaggcagcaaggttgtgccaccttcacgttgaggatgtaaagccgatttggactcctgcgtaccttggcaagaaggcgacgagaggggtcccagttcctcatgactccttgctcgaccgccacgcgcgaaccgttctcatccaactgtcccaagctgatgatagagtttatcaacgcagggatgtagtagactccggtgagcagcccgtgctcaccagacgcgacggtgaatacgactgagccggcgcccttgatctctacgtcggaggcgtccccaaacttgacggagcctcggacgctagagtcgagctcggtgaagaactcccgtcggccggtcatgtgatgagtggcgccggtgtcgaggcaccatccttcgatcatgtcgttgctggagccgtcgccgaggaaagcgcgtgctttcgactcatcaaggtggagtgccgctgcggccgatgtcgctggaggtagctcgatgcttgcgtgtgctaggagcagagcttccgcctctacctgtgcgacgttgacctggccgcgtcgtggctatcgacattccctggcccagtggccaagcttgccacagttgtgacaaccatcatctcgtgccggcttcttgttgccgacggcgccgccttgggcgcctccgcgagcaccaccctcagcttgtcctcgtgccccggcttaggcgcctccgcgcgccttgcacggcttgccgcgtttgcggccctgtgtcgaggaggactccccctttttcttgtcaccttagcaggcctcccactgctcccgagtgagatgtagcttcccgccgatggtgataggccttgagacgaccaatcgcttcttcgatcgtcatcgtggagaggtctagcagagactcgattgagcgagcaatctgcttgtacttctcggggatgcaacggaagagcttctcgacggctctctcctcatcgtaggtgtcgtcgtcgaactgcaccatcttctgcaacagagtgttgaggcgaagagcaaagtcatcaacatcctcacttggcttgaaggccaggttctcccactccttgcgaagtgcctgcagtgtggtcttgcgggcacggtcgctgccgatgcgggtcgcagcgatggcatcgcaggcttccttggcagtccgcttctgggaaagcgaaaactgcatcttgggcgggactgcagcaatgagggcatctagcgttcgtcgatcctcgtagtagtcgacgtcgccgtactgaactgcttcccacatgtggcgaacctggagccgtaccctcatcaccgcggcccactcgacgtagctggtcttggtgagggtaggccacccaccgccaggaccgatgtccctgacaacggcctggaccccatggtgaccatggtaccgatccggggagagagccgcgccgcctgtagaggccacgatctccgtcgactcggccgccgccaccgggagcactgtcggcgcatcctcgctcgcccatctgggctgccgccgtgtgcgttctcgcccggagcgccgtcggcgcgtctgcgcctttctagtctgccgccccgtgcgcccccatgggggtgcgtctgcccattgagtcgcctgttcttgctctgcctcccttgccatcctgagctcatcgttggtgctgccgtcgccggaaacagagttgccagcgctattgccgcgcaaagcctcgagctctgccgccgccgcacgtgcagcatccgct

SEQ ID NO: 137915 - DNA, 354 bp, Zea Mays
gcaggacaaaccttgactggaagataaacataggaacactggcagcagcaagagatgcaaatcctagctttcttcctttacttagttatctcatcaatatctgattaaaataaaatgcacaaagtagcacaaaataataaacgaacaagagcacatgagtacagaacataataaaagccttaaccaattcaaacaacagattagatgtatcattaccagtaacaacaacaaagccaacctctaaaaaccaccatgggaattgggtggaagggggcaggactatttagatagtggtaccaagagaaaagatcatttgagtggctcagatttaaccattctcaggatagcaagtgc

SEQ ID NO: 137916 - DNA, 886 bp, Zea Mays
gtcatcatgcactgttttcttctatctagttatcctttgccgagttttttttaccggttgtttttttttgttagacactcggcaatgaacttttttgtcaagtgtccgaaaaaaacactcgacaacttgtttgacactcggtaaagagccagattctgatagtgaaccattgcttgctgagtcgtctcaatccactttcactatcaaaactaagcaaaatgggatgagattgaatgaacatgatggacgactatatatcagtcagttatcatataccaattgctcatcaccttggcaaaatatacagagcggagctttttgcttggctgcgtaactccgtttcacatttaatctatagatagatagatggattgaccagtatggagtgcagcggcgtttggatttcagacacacaaatatcgagtccccacaaacgactccggctgctgaatggctgtgtcactgtgtgacatagctgacacacatcccctaacacggcccagaagcgaacctgacctcggcctgtttatattcttttatacaagcaaaaagcccaatacgttagcccgcccatggtatatctatagtatgttaacttttttatatataagatgatgtgaacctcactgacactgagccatgcatgagtggtaagatgtgtgacttgcaatttgatttctctgcaccgtatatgaattaagacatcagagataacatgaaatatgacagtaagaaatttctacatatgattttttttcaaataagttttctttttccattttatcggccttcatatgttctcaatgatccatttctgcaacgagggaatagaagttattagtgacaccatatatactaatagaaacttctgtaaataatgaaggca

SEQ ID NO: 137917 - DNA, 528 bp, Zea Mays
ggagttctctaatgcaaggaggcactcccattcgcgagccgtgttttagcggctgaagttacttttctaatgcacagatgaggcattactcctacgctatccacctgcttttagcgtttatgacccggaataagtacgagacgtcagacgtgtaggaatggggtgtttgggaacaaagctgtacatagtaatactggttttacttcagagagacagctttggtcgtttgtcttacctgagcaccttcagctctaaaaaccattctacctccagataagtagcacaagaacaggcaggcaggatcaggcttcaccagcctcatccatggatgacgacagagctgatacgaacaagccagatgaggttcttcttccaggcttccggttccatcctacagatgaagagctcataagcttttacctcaggagaaagattcagcaaagacctctgtccgttgagctcattaggcagctggacatctacaagtatgatccatgggatctcccaagtaagcatctccatctctgt

SEQ ID NO: 137918 - DNA, 433 bp, Zea Mays
tgcgagggcagtaccgagcggtcgcggccgcgaccccggccgcggcggcggcggcagcggacgaagcagaagatggccagagcgaccgccgccgcgagagccgggaagaggacggcgttgatgagcaccttgcgcattggtctccgttctagacttgggcgcgcgctctactctagatcggagggagggagggagcacggaccgcggcgtgcttggttgctcttgcttgggggggcaaatgggcaatgtggaaggaggaagggggtgcggtgattgtgggggtttggaatttgagagaggtttgcttgacttggtgaaccgtgaacgtgcttcttttgggctggcctgcttctgcttttcctctgtcctgctcctgcgaagacggcagagactgctattcttgccgttgggatggaggagaggctacacctac

SEQ ID NO: 137919 - DNA, 625 bp, Zea Mays
tcttgtcgttgccgcgctcgactacgtcgttggactgtgggtggtagagagaggcgaacactgccttcgtgccgatggaattgcataattcttggaagtcttggttgtcgaactgcttgtcgttatcgactgtccattcggatgggacttcgaaccgatatacgatattctgccagaaatttttttgtgttgtcttggatgttattgtggagactgctctgccctcgatccagttggtgaagtatttgacagcgacgaaggtgaatttgagattcccttaagctatgggtattggtccaacaatgttaagcccccaccgttgaagcggccaggtgtgggcaatgagcttggtgagttgcgaaggggtgcctgttcggggagagaatttctggcatgctttgcacgatcaggttactcggttggccgtacatatgactgcaagggccttgggtcctgagtgtgatccgcaagtttcgatgtggattttgtggagaagctctaagccttcagtttcagttatgcatttcaacataggctggctgattccttttttgtaaagctggccgctgacgattgtgaagtctttgcttctgtgtttgagccttttggccttattgcgatcgga

SEQ ID NO: 137920 - DNA, 454 bp, Zea Mays
ggacaccgatcaagacagacggctccgacgaacaccttttgcttgtcaaggctagcggttgtaaaaaaaaaaatcgtccgttcgattgtcaaggtctgtagtagccgcggtttactgcggtgcaaaggcctggtcttgttttttctctctctctttctgttgttagaaatttcaccagctaactcataccatagtccatattcataattaaattctactttacaaacagtgtagtccacagtaaaaaaaccgtattttgagtgactatacatttgtcagtacttttccacggctggtcccacattgccctgcggtctgcagtctgcaccgtccgggacagccttgttgcggtctgaatgaatattcttggacgcatgatacgagcgacgaacacaacatccacctcgatgcgcccatggctggctgcgtttcgcgcggacgccgggagggccgc

SEQ ID NO: 137921 - DNA, 385 bp, Zea Mays
acgagattagaaactgtgtagggatgaaacgattcgcgtctcagtccggtttcatctggcttggtacccgtgacaggcgagtttgagtaggatgaaactttgttgctctctcttcataaatagtctgccaaatcatcacatttactgataaacctatttgaaacccccatttaggatgccaaaacacatcgctacgtaataatgtcattcgaaacatttgttcgtaaaaaccaaactacaaccattgaccatattcttttcttttataatttattttcatgtatttttgtaccaaaggagacacatttatccctgcttttacgtgatctctttgtctcctctgcggcgtcgtgaatgagtagaggaaggatccccgatctcaccg

SEQ ID NO: 137922 - DNA, 493 bp, Zea Mays
atttcaacagactcagaccgcgcatgcctaggaccgcgggttgattacccagaaaggcaggggctctttagaaagaaagccagggcgaaggggtatcgttgattcagagccgtccgatccgattcggatggcccggattaaatcgtggttttaaccgaacgtgatgtggttcgtcagatctccatccaacgaccaacattataatccgaaccggtgtatgcgattgaccacccgatccaataccaagggtctagatttaaagtaacggaggggatccctgtcgtccgttccaaatcaacgatccatatccagttcgatcccgatcttatcacgaccctcaattctcgatccaaaggccaaggcagccccacacgtcccccctttgatcacacccgttcaaacctaatcaaacggccaaaagtttgtctcctacccgatggtgagctcggcgagcggagctctccgcgcggcggcggtgctgccagagtacgcc

SEQ ID NO: 137923 - DNA, 391 bp, Zea Mays
aaaaaaatcgaagtaggaagctgccaagtttgaaattttatgctagtagttccttgccagttgccacttgacctgaatgtgtggtgaaatttgccacgttctttggattgtttgcttagagagcgataggacgttgctggatatgctgaacgggggggtgtgagaatgtgagatcatgagaatgaggtggcctctggcctgttactcaaaagaagagagagagatggcacggtccaccgatccaccaaacgttgaaaacccaggagagaccaagcagcagcagggcctcaggactgtgtccgagatagctggctagaaggcccaggaaaataggctgccccttcgcgtaacggtgcaccgcgcacatcgtggctgcgcaacagccttctcg

SEQ ID NO: 137924 - DNA, 347 bp, Zea Mays
caaggtcgcatgtaggtggcaaaccgggtataccaagcacggggcgcctgtttgagtacatagagagacttgtttaggcgacaaaacccaatctggatgagtggaatcaacaaaaccagctggctggctgcaatatattgtctcggacaatgtgccatgcagaaaaccattcttcacatccaactgatgaataggccaatctcgggaaaaagcgagagacagaactgtacgaactgtagctggtttgacgatagggctgaaggtctcatcatagtcaatgcctagtcgctgagtgaatccacgacatacctagtgagccttgtaacgctcaagagatccatccgcat

SEQ ID NO: 137925 - DNA, 547 bp, Zea Mays
gctccattgtactttgtacatctttataaccttatttcttgtaactcgagtcaaagtatcaagaatcttggtaggatattccgtgtaagtcaaatcactctgaacactgagctcttccattggtaactgttcctctgggatacggagacacttcttaagttgagatacatgaaatacattatgcacatccgatagattatcaggtagtccgagttgataggccatctctccaacttgtctaaaaaaactctaaagggtccaataaagcgagggggcaatttgcccttgactttaaatctcctcattccacgaagtggtgacaccttgaggtacatatgatttctttcctcaatttccagtggtcttcttttattatcagcgtagctcttttgcctggtctgagctaccctcaagttctctcgaattatacgaacttattcttctgcctcttgaataagttcaggcccaaagaactgtcttcccctagcctgatccaatatagaggagtcctgcatttcctgtcatatagagtcttgaaacagtgaca

SEQ ID NO: 137926 - DNA, 437 bp, Zea Mays
tttgcttgtcggtaccacaacagggatatgtgtgccataaattgccccaatgtaattgtctgaggtatggtgcaaatctaggtaattgcagcctttgatagacacttataaacttaggatctaccggtctaatgatatctactaccagtttgctcacattgttgagaactttgtcgaatttcctactgcatctttcaagtgatctagtaaatcgatcttcatcttgtcttactgattgaggagcaccacaaatccataaaaacagacctaaagcctctattgatgacatccttttagtgcttttcagcctatttgaatccaccagcaagctatgtaatttttcaaacactatcctgctcatcctaaacatgttgtagcaactagttctgtttgctagtgttttcattacccatccatgaccagtttctactggaatc

SEQ ID NO: 137927 - DNA, 573 bp, Zea Mays
cagaggatccccttgtctaagtcctttctttgtttgaaagtagtggcctatgtcgtcattgactttgataccgacactacctcccttgacaatttggctgatccaattgcaccactggggggaaaagcctttcatgcgcaaagcttgttggagaaaggaccaattgaccttgtcataggccttctcaaggtcgatttttagtacgacgccatcaagcttcttcctgtgtaactcgtggatcgtctcgtgtaaaataatgactccctccataatgtttcttcctgacatgaaagcagtttgagaaggcttaatgactttctgtgctactagagccacacggttcgtcattaccttggtgaaaatcttaaagctcacattaagcaggcatataggtctaaattgttgaatttgtttggcctctttttgcttggggagtaaagtaattataccaaagttgagacagtacaggggcaaatttcccttatggaactcaagaaagaggcatagtaaatcgtctttgattacgtcccagaagacttgataaaattcagctgggaagccatcaggtcctgg

SEQ ID NO: 137928 - DNA, 510 bp, Zea Mays
tcaccttgatgatcaaagagtatctacggcttggcaacagaaggcactaacaaaactgttgggcttacaatacaagatcgtgtaccacaaggggacagataacagggtggctgacgctttgtcacgccggcctggattggaacaagatgagccacatcttcagctgaatgcagtggcagtttccaccgtagttccaaattggttactacatgtagtgcaaggctacaagcaggatcctaatgctcaacagattctacagaagcttgcaactggaactagtactggtccgtacactctcacaaatggagtcatcagacataagggccgtatttggttgggcgctaatcccagtttgcagcagactgttatgacagcaatgcacagcagtgccttagggggccactctggtttccctgttacataccgaagactcaaaacgacatttgcatggcctggcatgaaacaacaagtgaaggaatttgtgcaatcttgtctcatatgccaacaggc

SEQ ID NO: 137929 - DNA, 391 bp, Zea Mays
caacaagtgcgaaaaaatccgatgtctatcgcgaagactatccgcgcagaagtcgcccaagggtgcagccggactaagcacaacaagtgcgaaaaaatccgatgtctatcgcgaagactatccgcgcagaagtcgcccaagggtgcagccggactaagcacaacaagtgcgaaaaaatccgatgtctctcgtgaagactatccgcgcagaagtcgcctaagggtgcagccggactaagcacaacaagtgcgaaaaaacccgaagtctatcgcaaagactccgcgcagaggccgcctaagggcgcagccgaaccagtacaacaaaagcagaaacgatagcagcaaaccatccgcgctaagaacgactataatcacaacaacacagcataacc

SEQ ID NO: 137930 - DNA, 340 bp, Zea Mays
ggagtataaagtaaaacagaaaaaaaggtttgtctatgtggtaatccatggctgaatattgcagttgagaagaataagaaacaaaaaaaccactctctaaagtaccaccacgttctaatccatcatgtattttgcaaggatcaaacacatttctcacacgccaacactcttacaccattttcatatcagtcagttgtacaaaccagcaatgaaaggaagctaagagtccctcaaatcaagacatggcatcaagtcatcctgctactacacgcgagaaaatagacaacaaggtatgcttcccagggatgaaccacaaagtttttttgtcagacaattaaat

SEQ ID NO: 137931 - DNA, 598 bp, Zea Mays
gagatgctttgattctccgaaaaaaaagtcagactggtttatagtttaggatagagggaataactgacaattactctattcatttagtggcagtgctttcagtaatcaactcaggctcatagtatcaatcatgaaataacacatataccaggctgcaactataaaccgagcaatgatgaaccattggaaactgatttattgcaccttctgaaaacagttcataatttgagctaaatcctaaaaaatgatcttcttgagttctcgagttagtgtagttgaaatgccaggggaaaatggcagcatgttcttggccctccctctgccataaatcatacattcatagctagttgctctattgcattaatagacactgcgcttcaggattagctggtcaaggacagaggtgtaaaatcgtgcctatgattcttctgcaatgtgggcaatgcagcatacctgacagaattgggcaaagagtctctagcctcaaaacatgtcaaactgtattcatattctaagttattttggaccagcaaccaaacaaagatgaaccatgtggaatgagacaatgggttaatggtacacaagtccattgtccgat

SEQ ID NO: 137932 - DNA, 432 bp, Zea Mays
cgcacgggttgagccgcggggagatctcgacgactctctgtgctgcgtgggagtcttcggctggatatcaccagcgccgcgggccacgtctcgccctcggccagcaagggtgtcgtcacgtttcccaaccacaagctcgttccgtctgggcattggtacgtactcaactcggtagaatcgtcgctatctctgcattaagaaacccttgtccggactccgtcgtgccttgcatgaacggcaatggctggctctggatcctgtttacgctaggggagtacggcgtgttcgtcgggaggaagaagatggcttttcgttcgtagatctggaagcggacggcttagataggggcacgcagatcggttgggctaggtgaaatccggaccgtcggatccgatcgggtggatctcagtgacgctggcttaataaaatctg

SEQ ID NO: 137933 - DNA, 403 bp, Zea Mays
tggatttcgaggtcataatccttgatcaattcaagccatcttctttgacggaggttaaggtccggctgcgtgaagatgtatttcagacttgtgatcagtgaagatgtggcatttgttcccgatcagataatgcctccatatttttagggcgtgcactatggctgctaattccaagtcgtgggtagggtagttctgctcgtgtggcttgagtaagcgggatgcataggcaataactttcttgttttgcatcaagacacaccctaagccttaccttgaagcatcacagaagatgacgaaatcctggtgtatatctggcagtgtcaaaactggcgcagttgtaagcttctccttgatgatctggaaactctcctcacactttggagtccacacaaacttattgtcc

SEQ ID NO: 137934 - DNA, 880 bp, Zea Mays
agtatagtatcaaacccttcagatcttggcaatccttcaataaagtccatggtcacatcccttgaggaataggcaacagttttgtgagaggctttgccaagagtccataacctttgacaaactttctatagtatatagttagacccaaaaatcccctgagttccgtaacatttctgggttgtggccaagacaacatgactgcagttttactggaatctgttgccaccctccctagaaatcacagggcccaaatacttcaactcatgcttcacaaaggaacacttcttcaactttaagtaaaactgatgctccctcagcttagctaaaaccaacttgatatggtaaatacatgtttctaggttgggactatatatgagaatgtcatctagaaaaaacatcacaacttccttagaaaactctccaaaactgagttcatggcacattgaaaactggctggtgcattagtgagaccaaatggcatcaccctaaactgataatggccatggtgtgttttgaaagcagtcttgtattcatattcaacccccattctaatatggtggtagcctattgtcatgtctagacttatgaagaactgagctccagccaattcatccaaaatctcatccaccagaggcattggaaatatgttctttatagtcatctcattcaacttcctgtaatcaacacagaatggcatagaattgttctacaggatgtcatgtatgtaatggaattaggtttgtggttatttttcattatgtcatgtatgcaatggaattgatggaatgtcatagaattgttctacatgatgtcttggttgtataatctcacttttgtgcctttgtgattgctgatggcagaagatgagaagcactcatac

SEQ ID NO: 137935 - DNA, 404 bp, Zea Mays
cagcaacatgcgaggggcagcgagggcaagcggctataggcagtggcaagcgacaacaattgttgcattgcgacgacgtggtgggaccctggtggcatagtgagggcagatggtggtggcaccatggtgccaaggcaggatcccaccaatagcttgcccaccagtcgatgtggaataggaggcaaagtagtggcgctgcgtgtgggatcccgacaacgcgatgaactaacgagtgacgagaagacaaggtgacactggtagcggacgggtctggtcacccactaccgatccagtcatgatcgaaggagcaatcgagccacgagtaggtcgagtagctagccgctagaggaaggaatcaaactatttgtatggagagcgggctgagcaatgaactgtcgagaaaa

SEQ ID NO: 137936 - DNA, 289 bp, Zea Mays
gctggagaaggaacatcactactctccccactgactaggtagcgtcgactgtttttccgaattaaggggatttcctcctcttcttcctcatcctcgtcaacaatacgaacaacacacccattgggatcagcttgagcaggatcacatccagtgggttcaggatcatcgaggtcacacccattggggtcagcgtcagcagggtcacacccattgggatcagctctagtaaaaagttccactggcacttcttcagcagcaggagcagaagggccagcatcctggtccaaac

SEQ ID NO: 137937 - DNA, 734 bp, Zea Mays
gccatgcgggccccgtgggtcatacgctctaccgcggcgagctcagattcgactgacgtgtgggacccaactcgccacgtcgctaactcctggacccgctttgcattagctcctcctttcccctccgcacgacttcgcgtaacaacctggttcgattcttgtgggagtcaatctccacaaccccggatgaattggccgccttgatcgtggtgcatataagttgcgccccagaacctctaatcccacgtcggaatcacgtagaaccaccgcgagggagagagagagtcgatcatatcgtcgcgatcaaccagagtaatagcgaggggagagggagagccgctgcggcaaactcgggtgattgacctccagtctacgccaggctgctgggggaggcgctaggatcaccaccgaacgaagaagggcccgagattccgaggatagttcgtcggcgtggaagcttcgccgccgcgccaccatctgcgtttgggagccttcttccactgacccgctctctggtaagacctccagatagtctctacttgttacaaggatggtgtagcgcatgtccgggggaggaatcgtgcacccaagggccagattgacttgctccggcaagcaaaccatcatgggtgcgggcgccgccgtgtcgggattgctggaggatggtggcgccctctgatcgttgatatgtagatgtgcggctaagattagtctgtcttaccggtttggtgagg

SEQ ID NO: 137938 - DNA, 403 bp, Zea Mays
aatctgtggcatgcacccttgttgtactcatggccatcaccatgaagttcacatttggtgcttcacccttaagaacaccagtgaacaacgatgactggtttagcacgttcacatcgttgttcgaccccgccaccccaaaaaagcatgccgaatccacaagtcatacaaggcaaatgcctcaaacatggtggtcagggatccaatctcaccttgaaaattatcctctcgatccaatgggatagttccttagtttcagctcataaaatctatactccctatcatactaggaaaccacattttctctcccttagctaacaattgtttgagatcatcgatagttggatgacgaattttctccacactaaacatgaaatagcacctctatgaaataggcaagcatgtg

SEQ ID NO: 137939 - DNA, 956 bp, Zea Mays
ccacccaagggaccaaacttcagtagaccagctggacccaccccgtcacggttcagccagcagagtaagagctctttccatgccccctcagtggcaagcaaccaacccccgacgaatgcatgttggcactgcggtgatcccagtcacttcaagaacaactgtccgcagctgaagccaccaggacccgcctactccaactcggtgaatggccccaagaatacctcagcatccgcccccaaggcgccctcctccgtcagccagcagaacaagacccagtatcaaggaagggcacgagtgaatcacgtcgatacccaggaggctcagcaagctccgggagtagtgctcggtgagttccctgttgaatttactcccgctaccatacttttcgattctggagcatcccactctttcatagccactagttttgtggaaaagcatggcattccctttactcctctagagattcccttggtcacccgaaccccagggtcagaccttctatgtcagctcaaatgctcccaaatcagaatccttttaagtggggtagtatttttggtagacttaaccgtcttgccatccaaaggaattgatgtgatcttagggatggattggttaactaaacataaaggcatcatcaattgcgcagacaagaccgtcctcctcaccgaccatcagggaaagtcagtctcttgtcaagcccagccacccaccaatgacccaatgatgttcagtctagcaacaggaagtataatagtggtagaggaattcatggatgtgtttccagaagagttaccaggaatgccaccagaaagagaagtggagttctacatagatctgatccctgggacggcacccatcgcaaagagaccataccgcatggctcctactgagttggcagaactgaagcttcaaattgcagatcttcagcaaaagggatacattcgtcccagctcatc

SEQ ID NO: 137940 - DNA, 444 bp, Zea Mays
ccgagatccacgttgtctggtagttccccgcgactccaaatcacgatgagcgtgagatgtgggagtggtggtccgatttcctcccgtgatttctctctcctctcttctctcgcctctgttcttgtgaccacggtggacctcggcgttcgttcacagggtcaggcgagggagcagggctcaggatttatagtgccgcggattccgcaagagctggcgggcgaatcgctccatcatccccctagccgagccgttcaatccgcgcggagtcaaccatgacccgttcgtggcacgcgagatctacggggaagagatatctgacgactcgggcccacaccacggcggcagcgaagacggtgcaagcgcgaaagaatgacgtgcgggccccgcgaagcagccgcacggagtgggctgagcgcgcgccagtgaccgacgagctgggcccgc

SEQ ID NO: 137941 - DNA, 361 bp, Zea Mays
attacattagaaggatatgcctggcgcggtagtgagaaacaaaaaatgcagggggtaagacttgcctcgattaaggtcatcgtttcgactcctgtgggagccgcctttttagttgtaattattttcagataaaagaagttactcgaatctagctattttgtcgtttgcggattttgtcgggaaagcttgcggaacacgaatgtttcaatgtgcctaatgtggttccccctgcattattccagagagaagttactggaatctagctattttaccgtttgtggattttgtcgggaaagcttgcggaacacgaatgtttcaatgtgcctaatgtggttctttttacattctaatctaggaagtc

SEQ ID NO: 137942 - DNA, 473 bp, Zea Mays
cgcagagggatcgcgggatcacgaccacacgatcagtaatcggtggccaagattagatttcccatacacgaaacggtacactattttgaccgtgcgatcagggatccaagaccaggagttcaccttgacgcgagttcgccccagccctcggatcaaaattctacggtcccgattttcagtatccgcgatttaaccctatgcgttaaatctcagatcaacggcacctggttgcttgcgccaagttccaaactctacctctgattaactaccgggccatcccctaatcccggtcgctgcttttagatcccgcggtcagaaacgctcccacaacccaggtgaccggacggcggcgcccgcgacggacacggcggcgcatcgccggagtgcacccaaaatcccatcctcgctgcccccaaaactcgattaacaccctcctactcgatgctaggcgaaaagcaatacgtgggaagggg

SEQ ID NO: 137943 - DNA, 500 bp, Zea Mays
aagtacttgcacttagtcaagggactaaccaagctcaagagaagtcatgcaatgttgagtaatctttgttgaaagaaagatgtgaggaacgaatggacattgactaagttagttttcaatgttatatgacttggagatggtctgataggggcaagacagccacaaaaagtgctttaagggacccggaaaaggtgaaggtcaaacaaatggcttgtggaccaagataccatggctagggtaaagaagagagtacttgtaatatgtcgacgaattaatcagattatgaagagtcatattgtgataaggatcacaacattaggagacgtgatttgaagccatcagtttaactcatatgaagatgtgatggttcaaaacataaggcggaaaggaggtaataaggatctaggaacaacaaggacacaagttgaaagcaagaacaatcatagaggtgcacaactcaatggagtttctgcttatgtgcaactatttttgtctttttg

SEQ ID NO: 137944 - DNA, 583 bp, Zea Mays
ataaccgggggactacttggtcatgtcaccacttcattacccaagccgaaacaaatttctagccacatcaaccaaacttctaattgagtaaaacccacacctccttgtcatgaatacatccatacactatgtgcgacgtgaaatttaatgaatgcctaatgggtatcgtctcgacttataaacatagggaagcgatgactactttggtatgtcaccacctcaccttacacgcaaaacattcttaattggactgaccaatttgaacgactgttcttccaattattattattaatccacacacttagataagcataatttcaactcaaattgcccatattttaaatctcggcataagcttggctattggctaacgtcgtgactattttctacttaccaacatacaccaactttcaccatttttggatacccgtacgatacgcagttattctaatacatcacaagtacattcaaccccatcagtaaagcaccagcacatttccgaaaattccccgagactacgacgacaaggcatcgatccgccatacaacaaaaatcatgacgaagccgataggtgctatcaact

SEQ ID NO: 137945 - DNA, 514 bp, Zea Mays
tcaacatggtgacgctggcaagaacatgccgaccaacacaaacgtcactcctcaagcaacaccagaatgcacattcaacataccacatatggaatcttgctcgtcgatatatgatgcgacgccgcaaataaatgtatgtttactccccctcgctgttttctgtataattattagtagtgtactaaacatctaatccatttataccataattgttagtctcccggcagtgtccacccggtggcacaaacagatctccccgatagtggcccatgttttgatcagaccccatctgaacatgtcagctcagtaatatacattttcattataattgccaaaaatgtgcagagattgaaatctatatttcatataccttttttaggtttccgttgaaaccgatccagatataaacacatctcaggttgaccaggtttcacatgattcggatatgcaatgtgtgttagctctacgcgactacttgtgtggtacgcaatctgacaccagcaggtataaagtc

SEQ ID NO: 137946 - DNA, 518 bp, Zea Mays
aattttatgaatattgtcgtcgattatccgtaagagatacaaaaactcacaaatgcttacttaacatctattatcgcccatttatattttcaacttaaactatttattgggatgtcaattggtagatatgttgaatgtacatcatcagtgctagaagcttttatatttttcaaagagctatatccttcctaccgtaccaaagagatagataaatgcataaacaatgctgccatgtttattgagaacaaacaaaggaaggatggttcatggtaagtaacattatgtaatttcattgtatatagatgctttcaacctacatgacctagaactattttggcaggtatggcacatggggtatatgtttcatctgtggaaccttttttgcaataaaaggattagtagctactggaagaacgtatgatactagttcttccataaggcaagcatgcaactttttgttgtcaaaacaacaagctacaggtggatggggggaaagctacctttctagtgaaataggg

SEQ ID NO: 137947 - DNA, 282 bp, Zea Mays
gatcgaggaaccggtcactcgcgattcgcccaggaaaacacggcgatttctgttacaggggaggagacgaagctggccgcgatgctcggatttctgttgcgcgcgcgcgattcctgcggagtccgcgctttgcggcatggtgaggacgacgtacctgaagcgtggtcccacgggtcagtcggtgagggcggcgtgtgtgagaatgagaacaaggccccaggatgaccacgacggcgcgacaaggaacgaccttgcgcgatgattagtagggagatgggccgg

SEQ ID NO: 137948 - DNA, 537 bp, Zea Mays
atcagattcatgaagaaggttggtgcattcgttaagccaaaagacataacagtgaactcatacaacccatacttggtaatgaatgccgtcttcggaatgtctgaaggtcgaatcctgagctgatgataacctgacctcagatctatctttgaaaacacgctggctcctctcaactggtcgaacagatcttctattctgggcaatgggtacttgttcttgattgtgacctcaatcagagttcgataatcgatacacatccttctggtgccatctttcttctccacgaacaggacaggggcggcccaaggcaaggtgcttggccggatgtaacctttctctgacagttcatcaatctgcttcttaagttcaactaactctggcctagacactctgtaggctcttttagaaatgggggcggtgccaggaagaagctctatagcaaactcaactttccgctcaggtggcatgcctggtaaatctttcggaaacacatctggaaattctgacaaaaccttgataatctcgagtggatctggc

SEQ ID NO: 137949 - DNA, 407 bp, Zea Mays
attagtgagcttctcctacaatctcgccatggcggttcgacgggtggactagggaatcgacggcagcgcagatttggttctccctccccctcggtacaggcggcttggttcgtggttgagggaaacccatgtgcacggaagagcgtgagctatttatcagcatgaattggtcacggatgcaacggtgaggccggacgtgtcggagattctccggtatacgcggcggatcccgttgcgcttctgttgggcggaggagctggaagatgcacaggagaataccgagactggcgagcgggcccgttgtgtcagcgcaccacgcacgcagtgctctgctgggccgcgcgcgtgtttctgcagatgggccaaaagtaagatccgaggcccaggtaagtccccttctctttttc

SEQ ID NO: 137950 - DNA, 1057 bp, Zea Mays
ttggtggagcgcagggctggcagccggtgggtggtggtgctcgtttgtgctgtatcgaagcttgtgcaggtcaatgtttacaagtcgggcgaccagctggtcgagtgagaggggcgaccaggcgactaatcgcgattagggcgacgattagtcgacctaatcggtcctggtcgacctctggtcgtccgttagtcgtcctatagatttaaggacatatgtatatgtatataactatatattaactatatgaacactgcatttctgcaataatataggcatagttagtagcagactagcagtaattcagtaaaagtgtaaaattggatccatccaaagtccaaactgaaagtaaaattggcataattacttgcagtaatttagtaaaaagtactgcattacctgctggctgctacctagagcagatcagcatccaaacaaaatgcagcagcagcagcaccatcttcgtccaggtaatagagggaaagggaagggagactgggagataatcagagaagggagagcaagtgctgccttcagatgacgagctcatcttcaattcttgactagctgacagacgccggagcactggagtactggacgccgctggacggctggagcacttggaggctggagcagagacgtcgacagaaaccagagaagaggacagaggagaggagtagggtttctggcggctgggaacggttctgctgggtttctggcgtctgggaggggtcctggcggctaggaggatttttggagggggcaggctactgtagatgggccaaaaactagagtgaagcccagtaccaaaactgcaacgaccaaaaacgactaggaagtgttcgaccagacgactaatcgcccaggtcgacgactagtcggacgactaggacgactagaaaccctaatcgcgtcgtcctcctaatcgccctcttccaggcgaccagcccgactaatcgcgattagtcggacgacttgtaaacactggtgcagaggtgaccgtgttatgtgttgagcggatgaggcaaagggggttcgggggttaactggactgggc

SEQ ID NO: 137951 - DNA, 506 bp, Zea Mays
tttcaagcatctgaaggaaatgcacattccataaagaaactagaaattagaaactaaaaatgcacgacaaatagagtttattacctttaggttagatttctctgattcagatatgactaccatagaccttgttgtgtcaaaagtgttaccactcttgcttaaggctgcagcaacaaacttccaattctctttataatgcctgtaatgtctttcaacttgagtagcagtgacccccatattgaattgtctgttcaatgcctcagcacacttgcagtggtgttgttttttaatcttaaaaccagcatgttgttcttttatgaagtcagtaaaccaaccaagcataaacttgctttgatcctcatcccacacaatggtcctctcaatcttctcgtttcctttactcatctataaatttcagcaataaaggcacaaacaaaataccatgaatataacataaataggttctgagtacagcaacataataccataaaataggttctcattac

SEQ ID NO: 137952 - DNA, 1364 bp, Zea Mays
gtcaacctccttgtccaggccccatcgaccacatattgtctagccctctgttagacatcgattcatgctgggatcgaatggactacgttgtcatctccgtgatcttcagcaccatctcccccaatatatgtcggatggccagggagcaatggcacggcacaccacctctggctcactctcgagaaccagtttcttatgaattgtgacctgcatcctctaactcaacgccaccttccacacctttgtccaggatgacctctttgttggtgattactgctacaagctgaaggggatgtccgactccttggctgacatgggcacgtcggggccatcattcgacgccccccttcctatccttccttaagattcaatacgatcttgttctggaggatctcaacatgaccaccactggtcttgctgttgctctaatggccttcatcgccactcccccgtcgatcgcccccacatcggctgccctagctcctttttattttggcacactccttcgggacttgaaagcaacccactcccatctcacgatctgacaagaagaaaggtgtggtcggggtaacactctttggcgggccttctacaaccggtggacgggtagcatcaccatgctcctggcctggctcctagcagccagcagcaatagctgcgccaggtgtcctaggccatgatggcggcgtttgtactgtttggaccgtctgacatacttgtctcttaacccttataggcttcaacattcccatcacaaccgcctacaccgccaagttgaactccatgaaccgatagctgggattagtaaattcttgctaactcgtttagcactatggctctgcatccacatgttacgttcatcaattgggtggccgactctggcgcctccaaccataccaccaacatgtcggcaacatctccctcttctgctcatctaattcaactacaccttcatctattgttgttggtaataactccatcctccccatcacctcaacatgtggcgcggttcttcccgggccattctatctcaacaacattcttctcaccccttatatcatttagaatttcctttgtatttgttgcttcactattgacaattcgtgttctttggagttgaaggatctcgttacccgaaacatgatcatgaggtccaatagctctgagcctctgaccctttctacacacaatgcctctttgggtctcctgccccctgcgtcatgtctgttgttgctgcgtctacctggtatcgtcgtcctagttaccctgtctctaatgtgttgtctagtttgtctaatgcttcaactgtcaagggctccaatgcccaagacagcagggccccgactacggagctcatagtcgtg

SEQ ID NO: 137953 - DNA, 290 bp, Zea Mays
tttcgctatggtcgttgttgtcgttgccacactgcccattcctgccgcgtgcacgcttcccacgctggcagtgtcgtgcctccaattgctcctccgtgagcagcagtcagtagcctctttcgtgtcgtcgttgtctgtgccctccgccacacgcaatcgtcgtcgtgatgaggtcgaggacatctcaatggccacgaccacctgcttgagcctcttcaggctgacggggaggatcttcttcacgaccggtgatcctccaccttctcccacatctcgcgcaaactctcgac

SEQ ID NO: 137954 - DNA, 834 bp, Zea Mays
atcgactgaaaggttatgttttaacctgagcccttatcatagatctatgactcataataaaaggtgaattggtacgctatcacagcctttggatcttggatccatgacctggattaaagatgaagcgatatgcgactaggatcgttgaatcctcatcctacagccacgatttaatgcaccgatacgatatctctatagtgaccttgaccgcccattggctgatcaacactctccatgccttcaccatgttgccgactatacaggcagcggcgctgcccaccccccacggtagaggcccgccggagacatgcgctccctagtacccgatgccctgaacttagattcgactagatctactcgacgtgggaaacaacacggacaagaggatgggtaactcacaacaattatgccttgtaggagtctggcggcgccatgcgacatggtggcgagttctcggctccgacgagaaatcgtcgtaaatatgtgccctcctccaccgaactgggggccgccacgtcttcaccatgtcctagcgatcaaactgagcattctgccaaggttcggggagacgcaaaatcgtgcggctgacggaggcgagccatcttctcatcactagtctctctctgctcgctcgattaatcgtggcatgacatcctggtcatgtttgcagcccgaagggagggtgaggtgttggccgaaaagggtgttgcagccacgacctttataccctggcgtagagcttcctcgatgagtgcaggcggttgcaatgacctgcacatttcgcgttttgttgtgagcgagcgagaagaggatctaacgaagtggggcccacac

SEQ ID NO: 137955 - DNA, 601 bp, Zea Mays
gcatgctctcgctacttctctgtcggttgttgcttgcttgttcagttttcactttgtgtctttcagtgattcagtctttgtcttactcttgcttgtgtgcacgatgcacttgcttgttcagttttcgtgcacttgcttagttgcttgttcagttttgccttactctattggctgttgactgttttgcctgtttactattcagttgtgagcctagttactacagaaaagtatgctatctgcagcaaatgattcaaggaaggtaattggtaaaaagagttatcttgggtggtcctgatgtcggtacagataagatcaggactagatacatgcgtgcacgtctagctttttatgtggctcgcgagacaaacgagccagctcaagctgacaaatgagccaagctaagttggctcgttaacttaacatagcagcgaccggttgtagagagccacatgcgtgtaccgtccaaaaatgaatggaaaaagggaaaacaagcacacaaaaaaataagtggtacataaagaaagggatatatgggtgggcccggttgacatgctgataccacaccgtactatagatggccaataagcacgaggcccgtgag

SEQ ID NO: 137956 - DNA, 553 bp, Zea Mays
gatgcatatgtatgaatatgatgaaatatatcacaagataatcccaaaatagatggtagcgaactaaacattaaatcgtaagacaccataaataaccacatgctagagttagctatctacatgttatcgggcacacaagatcaacactagtggaaatacgacgatttgctacctataattaaccaacgcgaacacgacatgacttgtacaaacatttaccacattcactttaatcatttattagttactctattattaaactacttaggcacacgtacattcactgtgacttctaaacatcatacagacaaacttactttaatagggaatatttacttaatctggttctaccaacaatctcaatattctaatgcaagcacacacccaagagcacacacgtaaagcaatagcctaatcacactgcttcttatactagtctaatgaggttggttatttagcaatattatatttgctacacaagtattaaaaatggtaacatctcgtttattgtgtttcttatccatataacgacacttgctaaaataacgttgat

SEQ ID NO: 137957 - DNA, 1459 bp, Zea Mays
ttagtacatatatcatatgcagtcgagaggactgatgacgtgaatggtagcaaattaaaattgccacgtatactacacgtactcagtatactgttccccaaagggctgggccgatttaggaattaggatattggcctaatgattgattattgttagagtgtatcaagatatgtaacaacatcctagtttatagctatatcagtttagattagcatgtaaacgcatagtctattagggggcttatccctgaaattatgctgagcttatcctgtaaatcgtacctataagtaatcaagtcatgccaccagaatgaggtgagcagcccaatctaatcttttaacttggtatcgcagagccaagatccattcttccttccatcctccctcgccatgtcaacaaccactacacacagcagcttctcaggcgttacctctgctccttccctcagcaccgccatcaccatccgtctctcccgcaccaattttttcctgtggaaagctcaagtcacgccgatccttcgtgctcatcagttgttcggccatgttgatagctcgcttccaccaccgactccggtcatcaccaccggaactggagccgatgctcttcaggttcccaacccagattaccttcgttgtttcgcctttgatcaactcattctttctgcactccttgcatccatgtctgaagaaatgctaggccaaatgacccagcacaccagtgctgttgctgcctggtctgcgttgcacgctatgttctcctcccaaaatcgtgcccagatcatgcaggttcgctatcagctttccaacgccaagaaggcagatctcacagccgctgcgtacttccagaagatgaaggggtatgctgacaccatggcttctttgggtcaccccctttctgatgaagaagtcctcggctacatgttggccgggttgggctctgattttgagtccttcgtcacgactgttgccctgcgtgatacatcgatggatctcaataccttcttcgctcatcttctgagtgccgaagctcgtctccaacgctacacctccactggtgagatccattcctcggcgaatgctgctactcgccatcccttcaacactcgtagtggtggccatggtggccagaaccgtggacgaggcggttctggccgtggcagcggtggcggcggtcacaactctggacgtggcggtagcggacctaagccaacatgtcaggtatgcaacatatatggtcatgatgcgctacactgcaggcagcgtttcaatcatgcgtatcagcctgacgatactcgtgagcgtcaagtgaatgccgctgtgactccttcctactcggtcgacacaaattggtatctggacagtggtgccaatgatcatctgaccaacgaccttgatcaactcagtctacatgaacgttacactggcaaagacatagttcaggtggctaacggatcaggttt

SEQ ID NO: 137958 - DNA, 447 bp, Zea Mays
gcaaaagatatgaaataaacaagttttgaaattcaaaatacaaaataagacctatttctgtgataaaaataaagttcaggggtttctttgcaagaaacaaggggtctgcgtgcaagaaaacaggactgcgggttattttataaaaagtcgagggtctctttaacaaaaagaccacgcgaaggggtatgaggtgttcttagccatccgatcacagatagacggccgagaacagatctgagcgcgagcgcgcgcagacgcacgggcgagcattgacaggcaagccagggaagtcagcgactaggggcacgacgggctgaccggtcgggcccagcgttaggggcacaggcaaccgacaggtgggacccaggggtagggcatgctcgcacgaagtggtatccagagatctagaccgctggatcagggatgaacgattaagatctagcgcgc

SEQ ID NO: 137959 - DNA, 604 bp, Zea Mays
ttgggactcaagcgatgggtttgagacagtgggttatattggttcaggcttgcgccctagtccagtgtagcgctaatcgtagtattgctgagggcatgttacaactagtgtgcttgtgtgtgaagaaagagggggtcattcacttttatagctcaacagttagactctatagtggggacctgtattctaccggagggagctctaccggtggtccttgggggtgttgttcttctgacgtcgtccatagggtcgtgtgtagccgtactcccatcatggcgtactatcccatcatctcgtcatttgggtccctgtagcgagtctcccgctgacatccacatagtagtgcgtggggcgggtcagtcatatggagttgacatgtgtcgtgcggtcttgcccatcatcacgagtttgtgtcactcatcggcatgcgtaggggtacacctggtctggtgtatctgttgcgcattatttggtatttgggtcactatataagctctagttttgaggtcttccgtgaatagggttgattgtcccctcgaggcagtgaggttgtgcccggtgtcgtacttgaggtggtgtagtcatgtcgacaaagacccctcga

SEQ ID NO: 137960 - DNA, 495 bp, Zea Mays
ccggggaagaaaccactccgacactgaaagatgatgaggtggtagttttcaaaagtttttttagagcagaattacggtttccgctgaacgaggtaattggagaaattttggataattatgaaatatttcttcatcagctgactcctaacgccatcgttaggctcagcattttcatctgggcccttcgaagcatgggatggacccaaatgctgaagctttttgccaagtgcatgagctacattaccaaacaaaggccagagaagacggcctacatgaaaattttggctgttataacttcgcgtatcgcaaggatacgaaggccccgatcctcagctattggaccaaatggccaactggctggaaaagtgagtggttttatatcaaggctgatgagaaaaagagggagaagttgaagacactggtgatgagccctatgagcttaagcttcgggatgactagacccttgtgcaacatgaagccagggttaccatgcca

SEQ ID NO: 137961 - DNA, 1344 bp, Zea Mays
tatgctgcccagcaataggctgcgcaacagccctatacaccatggcaggacgcctgggactaacagtctcttgcaaattccttcaacacgatgtcactacagcagccaccttcgctcacctccgagtgggtagctgactctagtgcgtctaaccacatgacaccttatgctggtaatatctcactttttcgccccccctaattttgctatcccttcatcaattgttgttggaaatgagtctattctgtctgtcacctcagtaggcgacacggtcctccccgaccctttttatgtaaacaatgtccttgttacatttgaaattatcaagaacctgatctttgttcgtcaattcaccattgataacagttgctctatgaaatttaacccttttggtctctttgtgaaggatcttgctactaggaaacgtgatcatcaggtccaatagctccaggcctctctacattgtgcgcttgccagtcctccgcgctcctttggcatccacacattttgcgcttgttgccacaaccacacccatcccctctggtattggcgtcttggtcaccccggccctggcgctctgtctaagttatctagtgctgctgccatttcttgcaataagccagataatattcctgtttgccatgcttgtcagctaggttgacacactcggcttcccttcacgttgtcaaattctcgagctactcaatgttctgatcttatacattgtgatttgtggacttcttcagtagctagtttttgggatataagtattatcttctcattcttgatgatttctcccactactcttagacttctctgcagggtctgacactttcactactattacccaattttttattatgtcaatactcagttcaggtgcatggtcaagggtgtccagtgtgacaatggacaggagtctgtttgatagctcctcatcgtgggctttctttctcacccacgatgtgcttctttgtatgacctgctcatacaactcaacgcaaaacaataaagctgaacgcatgctgcgcaccatcaataatatggttcacactttactgtttcatgcctctatgccaccgcgctattggctcgagagccttcacaccaccacatatttaattaactgcctacctacgaaaaccatatcctctccctgcccgcacatcgctctatacaacacccctcccacttatgagcatcttagggtttttgggttcacttgttatcctaacctctccgccacggttccccacaatcttgttcctcgttcaactctgtgtatttttctagggcattctccggaccataaaggatatagttgtctccatctgtctacaaacc

SEQ ID NO: 137962 - DNA, 2561 bp, Zea Mays
taacaaggcagtgccccccgtgcacgttatcctcgcctttccataggaaagagcgtcgaatcttatcaatttgcttcgtagcccatctcgcaagggggaatatggtgaggtggtagatcggcatggaggagagcactgaagatactagggtgaggcgtcctgcgcggttaagcagtggacctttccatccggcaagtcgctgtccgatcttctccactagtggttggacatgaattttttggagtgggcgggtgtcgagttgaaggccaaggtattggcaagggaaggttttgcagcaccccgggaacggctggaggatgttggacaaatccacattttcacaacggatggggtggatggagcttttctcaaaatttgttgttagacccgtggcagctccgaacgcattgaggatctgtttgaccgcttgcaggtcattacgggttggattgatgaagatagccgcgtcgtcagcatagagggaggttctgagcttagctgcagcaagagagagaggtgtcaggacgccatgctctgaagcaaggtctaaaatcctttgcagtgggtcaaaggcaaggatgaacaacatgggagagagggggtccccttgtctcaccccacgcatgtggtcgaagctttcttcttgaacaccatttatcagggccctggaactcgccgtgctaaaaaggatggtaatccattcacgccaacggtgtccaaatccgcgagcttgtagatattctaaaaggtagctccaatttatcgtgtcgaacgctttctggatgtccagctttaggaatagcgtcggtgttttggtcttttggaattgcctgacaatattttgcacgtacaagaagttatcctggatgcatctcttccgaatgaaggcactttgacactttgagacaagaccgtctaggtggggcgcaagcctgttggccaataattttgagaaaattttggcaacactgtgtatgaggctgatggggcggaagtcgctcacccgcaaagcatccttttttttggggatgagaacaatattgcctgcattcagtagtttgaagccttgcccatttaagttgtggagctgattaaacactgctgttaaatcgtccttaatgatgtcctagcacgtcctatagaaggtacctgtgaacccgtccgggcctggcgccttgtcgtgaggcattgagaggatagtctctttgatttcttcttgggagaaaggagcttccagggaggaaagatcaatgtgttggtagcctagcgaattccagtcgaatgtccttgctctaggggccgttgtgcccaaatgctgcttgaagtggtcagtgatgaccttctcctttccttcctgtgtgacgaccaagccagtctcagtttgcaaggcttggatgaagttcttccttgccctagagcatgcccggagatggaaaaatcttgagttggcgtccccaaggcggatggcagtcaagcgggacctttgtctgattcgtgatttctcaacgagtgctagtcccaaggatttagctttcaatcttctgaggaggttcagttcgacgagagatagagtgcgcacttcctgagcagtttctaagcgaagaatcacttccttgactatggccagttgaagtttcgtgtctcctactttcactctcctccaagctttgatggccttggctgttcgcgctagtttgatgtgcaggcgcaagagtggttgctggacagagggtaacggcttattccaggccgagtatactgcttctttgaatccgtcaatgtgtgtccagaagttctcgaagcggaaggaggtgtttgttttgcgcattatctccccctgtaagagcagaggggtgtggtccgacatgagggagggtagggagtggatgtagcaggttgggaagaggagctcccaatcgggcgtgcagaagaatctatcaattcttgtcatggttggttcagcctgcccattgctccaggtgaattggcggccattcagacgaagttccttaaggtggatgtcatctatggtggatttgaatgaacccatgaggcgcctatttaggtttagattgttcttgtctgaagcctggtaaatgagattaaaatccccaaggactagccacctctcgtgcccctgggaggcaagggccctcaattcctgaagaaacaggagcttgtctgcatcgggttggggcccgtagaccactgtaatccaccactctgtgtcgtccgctttcatggtgatcatggctgtgatggcgttgtcggaagtagatacgttagagagtgtgaagaagtcttccgacacagcaagcaaaatgccccctctggtttggtttgctggccgagcaacatagttagtaaggaattttgaccctaaagtgtgtgcgatgacatggtggtctaccattgacagctttgtttcttggagacatacgattgtgctacctgtatcacgaacaagatcatgcatagtgtcccttctcgccccttcattgaggcctctcacattccagctcaggatttggcagtggcgttgagtcattcctgtaccagag

SEQ ID NO: 137963 - DNA, 380 bp, Zea Mays
tatgtttttaaatgttagcctgggtgctcaaaagatcagatccgctagtaatactgcctccaatccatataccatgaagaatggggtgtttccatgcaaggcccagcttggctgcgttcacaggctccagaccacatacggtagttctctgatccattttcctgcaagcttttcgctcttgtcgaacacctttttcctgagtgcatcaagtatcattccgttggctctttccacctgcccattatctcttggatgtgccactgatgcataattgatctggatgatcctttgctcacagaaatcaaagaactctgggctagtgaaattagatcctaggtctgtgataatgttgataggtatcctgaacctaaacattattt

SEQ ID NO: 137964 - DNA, 711 bp, Zea Mays
aacaaatgctaaaataaatactattttaagacggagggaatggatgcccagttaactttgctaaaaacctgacacgacatgttcataacgttacataggagaggaggcaaacatgttaagggtacgctggcttaccgtttctagatttaagcgtggcccacgaacccgttttgatccacgctgtctaggtggtttattttactgtggcagggtatcccgaagaccgaggcgattatatatatgatacaagtacgtacttgtgtggttgtggttcatcatggttgtgttgacaaaacgggatgcaatattctgccctgaaatccgagtgatggtaccgatgcaggccatgggttcttgtatggcacgtacacatatacttgttctgagatttgggtgattatatttaccagggcaccttttgcttctacagcagtcaccatacatccttggataactcaagtctaggaggaacctcctctacccagcgcgggctctggcggggtccaacggtgccctcgaccaggccccccagattagtggggccttaccccatgtattaaataacagtatatatattgtatagatttgtctgctagctctataaaatttttaaagacctaattataagtcaacaacacgacgacaacaagcaaagataattaggcatagcctataaatcttgatttctatattctagtagtagtacttcat

SEQ ID NO: 137965 - DNA, 358 bp, Zea Mays
caacttggcctcccagactagaccctgcaggtcccgagcatgtatcaaaggatggctagtgtcagatggcgggtcctgtgggtgtactactaatgctccctagccgaagctgtgtgcaggaccaggtcctagtcgaggctacctcctaggggccattgccaactctttcttaggtatgctggtctgcagcctcgacaaatcgagcctacatcccaggggggccaggtaccaaggaggaatcggttacaccacacacaacaggacaagtgatacacagataagtgctaatattgcttgataaatagtactcaaaagtaccttacaaaaagcaaaagtattacatccgccttcaagtgga

SEQ ID NO: 137966 - DNA, 439 bp, Zea Mays
cgctgctcctgaccatgtttgtcttctgcagcgctctctttatggcttaaagcaggctcccagggcatggtaccagcggttcgccacgtacatacgccagctcgggttcaccgcctcctcctccgacgtctccctctacaaagagggtgagagtctcgcctacttgctcctctacgtcgacgacatcatcctcaccgcctcttcgacggatcttcttcagcgcttcatcactcttcttcactcggagttcgccatgacagaccttggggacctccatcacttcctcaacatctccgtcacgcgctcctccgacgggatcttcctgtcttagcgacagtacgccgttgagcttctccagcgcgctggcatggctgagtgtcactctacatcgacccctgtcgacactcacgccaagctctccgccactgatggtgctccc

SEQ ID NO: 137967 - DNA, 629 bp, Zea Mays
ccgcatcagctcctcaagttcccaagtagcctcgcgctcagactgattagtccacaagaccttaacatacttaattgatctcttcctcataacacgctccgaggactccaagatacgcaccggacgacactccagagtcagatcctgctgcacagcaattggttccatctcgatctgatggtctggatcccacaagaacttcctcaacatagagacatgaaataccgggtgtactcctgccatggaatccggcaattgtaagcgataagccaagctgcccacccgggccaagatagtgaacggtccaatgtatctcgggctaagctttccggagacaccgaaccgaacaactcctttagtaggttataccctgagaaagacttggtcacccactgcaaattccaagtcccgcctcctcacatcagcataactcttctgacggctttgagcggccaaaatattctgacgaatttcccgaaccttctcagaagtctgctgaacccaatcaggaccaaccagagatctctctcccaaagtctcccagcacagaggggagatacaccgcctgccatataaggcctcaaatggtgccatcttgatgctagcctggtagctgttgttataagcga

SEQ ID NO: 137968 - DNA, 687 bp, Zea Mays
gtccggataaggacgagatcgccttcatcgaactctttggttttgactgacttgtctctccaagtcttgatttcttcttgatacttgatgattgtgccgagcacattgactatgtagtcttcgagtaagtccttgtccgctggttcatcgacccccgttgctgagttgttttccactcttggggacttgaaattgagctcttgtggtgtcatggcctccgcgccatacaatagcttgaaaggtgtgaaacctctgcatctagtctcggccgtgtttcaaccccaaatgacttcaggtagctggccaggccatcgtcccttcgtttcgtcgtgtagtcttttctcgaccgctgggagttttttttcatttgctctttctactatgtcgtttgactaggaatgatatacatatgcgaagttgactttagtctcggctgatgcacagaaatcgtagaattactagttgtcgaactgctttccattgtccatggttatcttagaggggaccccgaatctacagatgatgttctaccaaaagaatttctgggatgtgtttgaagttatcacggagactaccctcgcttctatccatctagtgaaatattccacagcgacgaaggcgtatttcagattcccttgagcagtttggagggagcaacaatatcaatgtcccatcattgcagcggcc

SEQ ID NO: 137969 - DNA, 653 bp, Zea Mays
gtgctgacatagcataaagcgatccccaaacggtctagatctgcgatcaaaggcaaggtcacttttggaaccccggacctgctaagggcatcagccaccacatttgccttccccgggtgataatgaatggacaaatcataatctttaatcaattcgagccaccgacgctgcctcaaattcagctccttctgagtgaaaatatacttgagacttttatgatcggtgtaaatgtcacaagactcgccataaagataatgcctccacgattttagagcaaagactaccgcgaccaatttgagatcatgaattggataattcccctcatgcttcctcaactgccttgagccataagcaatcactctgccttcttgcatcaacacacagctaagaccaattcgagaagcatccgtataaactgtgaaatgcttaccactctcaggcaaagctaggataggggcgttcaccaacttgttcttcaatgtctgataactaacctcgcaatcactagaccagacgaaaagaacacccttctccaagagtctagtcaaaggcttagcaatgctggaaaaatttggtatgaagcgtcgataatatccggcaagccccaagaaacttcggatttcagagacactagaaggtctcttccactccac

SEQ ID NO: 137970 - DNA, 1064 bp, Zea Mays
ttaagaacacccgaattacccccctaacaaacacactcagagaaataaggactaaactcaagtggggtgacagccgagccacctataaaaaactaagacgtctccccgagggtctcccaccttgagcagggctctgcctcacccgaagtcgacgtcgctcactccgcctcgcccgagattgcctcagctcagtccgtcttgctcgagccagcctcaagcagataggacaagggtgcccgaaaacaggtaggggacaggcgcatttaatgcgtgtgccaacccgcgctgtggcagcagagcacagtggcggataagacaacaatcacatccgacgtagcagtatgattacgcctacacaacagtgcacatatgccgcctgatgccctccaatgtgacgcctaatacgacaagccgagcaaacgagccttcgggcgcaacctctctgcctcgcccgaccccgggtccagccttcgggcaatttctccgcctcgcccgacgtcaagctcagccctcgagcaagttctccacctcgctcgagctcgccctcagccaccaactactccgtgaatcccacagacagccactccgctaactgtagcgcacgtcgaggaatagctcgactaacatctcggggagacttcccaatcaaccgagcaggggctctgatctcgatgggtgcagctgggaatctcgacatcatctcgtgccaggatgatgacgcaccccgtaagcagcctttggcccataccccgacggtgttacaaccactacagcatgggcggcctctccctcaggagcttgggcgtacggacgacacctcggtctcggcctcggctctctacgggaagtcagcaggcatgaatcaactgcatagttcatcgtcacgtcagatgccagacatctctccttcgaatacaagacccggcttcactaaggatgcttcccttggtgtataaatatggcagtggtccctccacagatggggggtcgagatcgacatccacatatcaacacacgtagacgaacgctcgctctcccattctgtcttagatattggcacatgc

SEQ ID NO: 137971 - DNA, 582 bp, Zea Mays
gtaacagtaaaattttgaccatacatgcatatctagtgacagaaatcaataaaaaatgtcactcccgatgaattattcaccgtcaattgttcgaaacatcatatcgtcgtggaaaagaatgtgaggatggatgcagtgcgagctgctaaggcctcgacgagttaatcaggagcaggcaatggaagacgacacgggcttgaaggcgaactgggagggcgaggcgtaggagaacttgacggcgtactccgggcccatgccgatggggcgcccgccgttgagggtgcagagcttgccgtccacgctgagcacgcccgggtcgacggccacggaggagctgaacccgtcacatgccagcttgacgttcgcctgtgtgcagatgcaccggttctccaccgtcaccgcgtagacgttcaccttcgagggcaccgcggtctgcgtcacgtcaaggtctgacaggctgcagctgcaggcacctgctgtgcatcctgctcgctcaaacagacatgtgttcatgactcatcaggggtgcggtggtatagggagagaagatctgtttgtgtggaagaagacggtgtacctggg

SEQ ID NO: 137972 - DNA, 1031 bp, Zea Mays
ggcacactttcaaggggatcctgcgtgaccacgggccggcggacgacgcggcggtgggccagctgccgccgtcctctgcggagtaccaccaccagctgacggcggggcaagcgagggaagggtcgtcgcccgcggggagcagcgaggcggcggccacggtggccacgtcggcggcggtgctgatggacccgtacccgacgccgatcggcgccttcgccgcaggcacccagttcttccctcataaccctagaacctagcttaagttagctagctttgctgcttccattattcgtatcggtgctagtagcttaattcctttgatggttccatttacttcttccaacaaattaaagatgatgatgaacatgagctaagtagtcatcgtcatcgtcgcaatcaaattcgagacaagaagagaagagattttaattgttactgcatactactactacaacgtgcattcgagccgttgatcgatgaacactagtgcatgatcagcaatgtgtggatcatatataatgttattagctagtagagctagtgtactgttacttgttgagcaatcttgttttgggtttcattaataatttggctaccttaatgcaatgcaaagataagaattttcaagtgtagcttccttcttcattcattccacaaatgatgggagctccatttgacatgcagtagtcctgcacgtgattagttagtgctagctactgtatactgtctagctagctagctagcttattataagctaatatagtataatcctcccatgaatagtgtctgtgtatacgtaggtcacacactgacacaccctgtgattgcttgcgctaatctccttttgtttacatgcatgggggtggagaagcttcttccctcctctctggatttagcttgtgtaaagctgcactgcagggggcgtttcttgcattgcaccggtgctttttatatgatttgttgcatgtcttgggctctctagctaccgcgacgcatgctgttcatctagttttgttccagtttggttcttt

SEQ ID NO: 137973 - DNA, 400 bp, Zea Mays
acaacaggcgtcgatgcaacagatgtgctcagcaagagcagcgtgcccagcaggaggaacatcagagacaacctcccccaccacccccgatgaccgtggagcagatgttcttgatgcagactctggtagtgcaggctattgggtagactctggcagccatgcagcaggctcaacagcaaccccaaccccagttgcaagtgcagatgccccagatgccacgggataagcgtggcgagttcatgagagggcaccctcctaccttcgcccattctgctgaccctatggatgcagaagactggctgcgtgcagtggaaagggaattgcgcaccgcccaatgttatgacagggagaaggttctgtatggtccccgccggctaaggggagtagcccagtcctggtg

SEQ ID NO: 137974 - DNA, 512 bp, Zea Mays
ttgtgccggcaaatttaagcaacggccggtgctcccgagcggcgtacaccggatcaaaccctctcagaacgattcccctaactcaatttcacgattggtaagctatcacgccctgtccacgtgaaccgcgaacgatgaggacaatggtacgtgttcccggtgatccctggcggtccggttcaattaaagggttcgaggggtttgcggggtacctacggaggctagaacaagcggcagagggacttgagctcacctgaatcgagctgaccacggtgaggtcttcttcgcggtggcggagaaccaaattggggggaattcaaaatttgtgctcgctagtgggggatttgggatgcaagtgggtgcggtagctgcttgggtacatggcggagctgggggcatggtcaatttatagaggccgcgagcggtggctggggatttgggcgacgacgcgcggcggccggaggtagaagaaggtactggcgcacgtgaattcgtggcatctaccgtggcag

SEQ ID NO: 137975 - DNA, 747 bp, Zea Mays
gttcgcggtgatccatgcttcagctcttgcggagtcattgcttgggatccgtacattaaacggaaaggggtaaacccggtagctctagattctgttgtgttttgtgcccaaatgacttcaagaagttggtcagcccatttgccatttttgtcaagaagtctcttctttatagcgctgaaaatcttgccattggcgtgttctagtactctgttggattgtgggtggaacttgccgacacatggtcagactagctcaaacggtgggagaacaaaaacagtttgatgccagcaaacataatgtattagagcaacaatgtttttcttcgtccatcgcaatggtgttgtacggggtatttataggtaaccaagggacaacaccctgtcaaatacgattatgcccctggtgacctatgtatccctagaatattcccctcccaggggttattgcgggtcattatagcgtgattaagtacatacatggacaaacacactatcaactcttctcacacagtggcttacaagtgggaccctgcgccacgaggcggttacacacgggccccccattacaataatgtgcgggtaacgacatgtagtctttgcgttccacgcgctcagccttcggtagtcgtggtggccttcatcgttccccacttcgacggagagcgcctaagccttcgcccgttctgtacgctccctccatcatggggctctcgctattcagtcttcgcttgcttttgcttttcctcca

SEQ ID NO: 137976 - DNA, 314 bp, Zea Mays
gcatcatgtatgcagagctttttgatactgatactggagttttattattcacttctagttagttagttagttattcgaggtagtgatggttttattatcatgggtttgatgttcagaataggacatcattgaaccctacaagcactaaatgttgtgggtaaaatacctaagtttctaattcactgctgctgggcagatggcttgttcagttatgtttgatatgatttttcgcatgtgatatattttgctgatggtggtgtttctctagatgtctgttttaaatcatctgtatttgctgtttgtttgctaagcag

SEQ ID NO: 137977 - DNA, 578 bp, Zea Mays
ttggttggcagttttccctaaaggcactgattttacgtaagatatcttcccattctttcttgccacatgtttgggtttgagttatgctcctctagaagaatatattaaatcattcatcttcatagttacgacttcttgtggggaataacaaacaacttatatttcagagtccaaacttttggtttcttgtagttctgctctgtcgacagaccctaataaagttagccttgttttgatgttgttatgtttacatgattaatgtcatatttagctaccgctggctttgttcttttagaagctataggattgaagaattcagaaccttggggcaatctttttttggtatttctatagtctacccaagctgttcataatcaacatgcagaaagatgcatcaacatgtcaagtttggttatacactttaacttgcaagggaatccaacactcctaaatttggttcttttttagagcaccattccaatgtcaacccatgataggcacaatcttctgcaaccagttatccaagtaaacaaaagcacaggttccagaagatagcaaacattatcgaggaatccaat

SEQ ID NO: 137978 - DNA, 370 bp, Zea Mays
tgggcaaagacggtagacgtttcttatgttatgtcaatgacaacttggggatcagtgatgtctaaactggaatattgtaccctatgtgtttgatcttcatgtgtgtttcatgcacttgattctgccaatttcctgtacaattttatgttgtcaacaacatcatgttatgcttattttgtctcaagtttatgatataaatatcactgttctatgctgaaaacatctctttgtacagttataagcttcacagtctgaccagtttatgcaataaacaaccccgtgttatgcatatttgcacatacatttatgctacatatgacaacgttctatgttttataagcttcacaatctgaacagtttatgccccgtg

SEQ ID NO: 137979 - DNA, 552 bp, Zea Mays
gtgggatgtcacgaagtgggagacgtcgccggatgggtatggagcgatcccgtcttcgactagatcggggtagccaacgcgatctactatccttgacgtccaggacgtgtattgcggagggggacttgcggaatctatttgagggcaaagagttgaggatgatattgtttaatttctgggagacgggtcttattccgaaggcagagccgatgtgacatttttgttgtcctcgctctcgtgttgcgatagtgagtgaaaacgctgccctcccctgcttcgcaatagagagggagggcgacaaaatatgatttgtattatttatgcgatgtggccgacgagccttttgttttatgtatgtaaactatgatggcatatcgcgtgctgcatttattgcgagattgtttcgatttgtaatcgtgttggcacgacagttgggtgggatgaggacttcgcttcctgcgggtgatgtcgtgtgcttctggtgcatgcccggctgcacccttaggtggcttttgcttggacatgtcttgtagtaaagacttcacaccctgt

SEQ ID NO: 137980 - DNA, 956 bp, Zea Mays
gttgaggagcatcatggaagcacactaatgctgaaacaaggtagcagagagcatgaacaaacctggaagtggctggccacggcgaggtgcgttttacggtggaggaaaccgtgattgggggaagtgagcaattctcggtccctggtggataatccggggcaaggattggtgcaatagatgtgtgattaccctatggagccacgggtgcactcaatttatagtgatcgtgagcggcggccagggaatttgggttggagatcagctcacgacgacttggatatttcaccgtgctctgcgtatcgtggcgagcgaggagaaaacggtgcaggaggggtaactgactatcctccacgatccctacgacgtggagaatgctttgaggcgtggcacggttgagtgaaacggcgagctccggtgaggataaactcggccggccgcgcggcaagtggacaggatggccggaccagctagcaatcgcaatccatcccgcccagatctttttacccatccccggtgttatccattcctccccgagcacgaatcgagacagcggtggcacgaatcgcagcggagaggtcatcgacgatgaatggctacaggcgatcttctttagtactgtaccatggccattcctcatttagtgcacctgacagccaaagtttagggtgaattttctcttaattttatgtaataacatgatcgacactctttagcaaagttatagctctaggatccagctataatcttggtatagcaaccctaggcaaattcttgctcgatcatgccagaatccgtgcccaaagttcttgcagttgtgctgttagtctgaaattcagacatcaaacagcctgacagcctgactttgggtttaattatctccaaattcttcataacaacaatgtttaatcccttaaacaaagttgttcacctttgatagatctacaaaattgatgtgg

SEQ ID NO: 137981 - DNA, 413 bp, Zea Mays
ttggttaggcttcaattgagcgacggagagggttctaaaggagtgagctttttgcggtgggttgggtaattaggaagcaagaagtttgttgtggcaagattgtgctgtacatggtgttgtagctcttgaatacctagattcctggtggattttgcttattctggctggaatcctttggcttgggtcagaggaagtgctgaggtccaactcatgtgcttctcttaagttgtatttgctgaaattgtggttgcaatttggcacccgtaggctttttacagtagccaatggaagctggagatttaatctttgaattgttttggtgggttcatgtgaatatctttttttctctctaaaaaaccaatgcatgttgcatggaaatgctcttataagaataccatttacatgtgttattg

SEQ ID NO: 137982 - DNA, 463 bp, Zea Mays
tacgtatatagtaacgtcactgcagcctgtgtgacgatcatctaaaaatacccgtagagctaaccgaagctcccaccgcagattccaagagagcgtcgctttgtcccgtagtacttcccggttgagcaaaaacaactgctacttgcactcagcgtaccatatatacaagagcgccgtttgttttttgttcgttgaaatcgtcgtggccggacagggacagggacagggacaggggtcccgtttccatattccatgtacagacctcgcgcccactgctatctatcttgcccagcccatgcaaggaattctttggacgggacacatcggtgagcgtactatgtaaagccttgtcagtcaaaaaagacaacaccggttaagtggaggagcttccaaaggtggatttcgcttggtgtcagtgagggaactgaggccagtggaacgcccttacgtacagtcgtacagg

SEQ ID NO: 137983 - DNA, 309 bp, Zea Mays
atcagcccattaatacaaaatccagagcctaggaaagctttccggccccgcctagaaggccggaaaggaacgatcaatcctatgagccatatagggcaaatggcaatgcaccacatagctcaaaccagtggggggaagacaacaagctaatatccagccaaccccacctatgtttgaccagagagccagtagtctcgcaccggctgccatcgatatagtgagggaggaaatagctggggcgttccgagataagctcggagtaagcatgctacctggggggcaatcatatcggaaaccttatgacagccg

SEQ ID NO: 137984 - DNA, 582 bp, Zea Mays
caactagaggagcagtttcatgcacacttcttcgactttgataagatgatgatcttagacctcatcgtcctctgacaacggtagtgttggtcttcagaggcctgctctacccaacacataattcctacgacgcaacagacttttaattcataagcaaaatgttggcccaagcatcaacttgtttaaggtggcatcctgaggcctagcatggaaggtacataaagtcgatatcttatctataggtccaacaagaaagtgatgaagctgaggtcactatcgtcgattgggcctagggcgtataacccatctttccccccctagatcaaggctcatgaggcggtcacgggattcaatttcgacctcatggagatagagccaatctttgacctgctcctaaaggagatgcaattaaagttatcagttgatcactagattccttcaatcgagcaattaaaagtgaagaggtattgtaagtggcacgactgcaacaagcacaacaccggagactacaaagtgctctgacaatagatccagtcggacatcaagcaaggctaacttatttttggtaggaggcaaatgaac

SEQ ID NO: 137985 - DNA, 749 bp, Zea Mays
aaaaaatgtatctagcttaatagattcatctcatcttaaaagattctatcctacactcatagatctatcttatctcaaaaggtcttaacttatcctaatgtatatagatccatcttatcttaagaggttttctcttatcttaataaattcatcttatcttgaaggattcatcttatcctaaccactttacttatctcatcttgatagatctaactaatctcaaaagattctatttcatcttatcttaataagcatacttatccaccctagtttaacaaccatgatctaatgcaaattaattagatcatatctagtcaaactagtcataccaatctaatctagatcccatctaacctaatatgatctaatctaaagtgagttacttaacggactagttgatactagtgaaatagattagaccctgctggccatgttttaacttaaattagtacatcataccaaaccacccatgaacaaataacttaccagcatatttatggtgaccatccctcctagatgttgccataatacacttatcttatgccaccagcctgttaaccatttgtccttacccacaagttatcctaactacatgaacctaattcggataaaaacttcaagaatgaagatcgaagatgttcgacctcatcaaatcaaggaaggataagattcaagatagatcttcaaaggaattaggattcacaatcttggatagaacctttcctcaccctaccctttcttaaccaaac

SEQ ID NO: 137986 - DNA, 652 bp, Zea Mays
gacagatcaatggctagatcaacggctatctgcctcggtgacatctgcggacggtctgcccttggtcccggacggtccgcgccagctctataatttctttggatcaacttgtcaccttcgggatgaaccaggtcttcacatgcggacggtccatgaattatagtcggatggtccgcactatatggccggacagtccgtggtttagtcggactatccacgatttttagttcctggctgaagtcgaaacggtgtcgcggacggttcgccagaaggggccggacggtccgcgctaggcaattttagaacatgagtttctgactttccgttgatctttgaacaatcttctccaagttgctttggctagacttgagagagatcctatgacttagaaaaatatctcaagtggttttccatctagtctaagtcatggattatgaacattttgattctttcactcatatttcttcttttgctcaaactagctccaaaacagcgatatattgattttgagcttcccaacctttctagaagtgttgaatacgttcctcggggtatttatccaaagagtagaattattggtagttcatctattccatgttttacccctatttggttgagtctgagctgattctgactaagaaactgaactttt

SEQ ID NO: 137987 - DNA, 490 bp, Zea Mays
atttcaacaatacgtatgctatcctcaaatatactgggacaaattttaactagaatcacataatttgttccattgctaatagaaacagaagaacacacactgcatactaaacatccaaaaaaacagtagaactaggaaaatatactcgagcacaggaaagatgaagtaaaatgaagagcatcctcactggatcgacagtgccaccagatgccgggacacaaccttcgcgcagtggaactccagacccgcctgcttcacaacaggttgttgtcgccggacagcgaaaatggatcccgtcgggacaccctcgccctccgccgtagataccgtcgcagccagctccaccacccctagccatggatcccgtcggaccttcccctcctccaccatggatcctgcagcagcccactcgccccccgccatagatccagtcgcgacctcctcgccctccaacgtggacctcgtcggaatcgcagctgcctccacccgc

SEQ ID NO: 137988 - DNA, 625 bp, Zea Mays
cgggatggctggggggcagcatcagcttgtcggcgcaagtttagagcttcaccgggggaggaaagtggagtatcttgatattcccctcaaggacagcattaaaggatggcgtcttgagtggtttatcatggaaaatcattgcaaatctctccccctcagttagggaggcaactagatgttcgcactcctagctgggttgaatctcctaccttttcagagataactgaggccaaagtgctacttgctgaaatcttcttattgaaggataggggtctgactgctgaggctgtggttgctgactttgttttcaagaacattcaacccttgaaggacagagtttatcccgcctatttatatatcggcatcaatgattccacctgagtcacaaatagacatattcccaataaggatttgctgagccatctggatatgattctgaggggtagggtctcgaatgctggtgctcctttagcttactctacgtagaacctgcctccaaataggccattctctgaatttgtctccaaccctcctgctcatgatggtagcccaggtcatagagtatggccctcccccgaggatattgaagccttgattgccccacttcggagtcttcccgaagcta

SEQ ID NO: 137989 - DNA, 557 bp, Zea Mays
gaaagatcgagagatgctggatgtgaggtcgaacacagcgctgtcccaggcggtcacaacgccccctggaactagcggcgttgaggcagaggaagctgggaaggtttttaggcagaaatgagcgcgctttggaacagttgagctcgcaaagtttggactcttgcaggcaagcaacagaggggaggcaagggagatagcatcacgaacgatagtgcatttatccggatcacctaacccacggatgttccacgatagcacattacaacttttacaaactggactcatgactgaacaaacagaacaccaaaggagcacacgaccacaatggcagaggggcacacacaacaccgacctaaggagcacaaagacaggcacgacctgacagcagacttagagagacaacaggttgacattacagaccatagaccgacaacagatcgactacagttgtgacggtagagagccccgccactgacagccaaggggagagaagtgatcattccgccataggaggcaccactccaatggagtttgcggcgttgcagcccagccccgca

SEQ ID NO: 137990 - DNA, 297 bp, Zea Mays
aaagattaggccatactcctaattcacatatgcctaaattggtgacttagatcaactcggccacacccaacaacttgacctacaatacaggttacataactaatcccatctagcatatagctacccattaaaccctctacccatctattactgacagacctatcttaacctcttgtccctaatccggatgaaggcaccaagactcgagaagaaggagatcaagctcgttgaggaataataggattcaagccagatcttcaaaggaatcaagatccacaatcttagatggagtctttt

SEQ ID NO: 137991 - DNA, 696 bp, Zea Mays
accaaaatgaagataatattcagctaacattcagtaccaaatttcagcaacattaaactaacacccataagcaaatttcagcaacattcactcaacattgagaaccaaaatgaagctaacattcaactaaattcaaccagaattctatacatgtggctccttcaccatattcttcgcattctttcctttgcgaggcttcaatagttcttttgctctcttgattcttttacttctaccctttgatcgaaaatcatttggagggtgtatttgtatttctggtggaattttgcaaccaataaaattctcatattcttcttgtgtaggttgcactatgctaggtacaatgtgtcccaaggaatcacctatgttgagaacacttgaaactaagaaatccaaggcttcttttgaactctttgctctttggatcgcctcttctatcttgtttcgcaccactgctatcttttttcttttttccacttcattagcgtcttcgggcttttcttccaataggttgccttccatgactcacgaattttaaatctattacccaaccattcgttgctatgaagaccataagcatctatgatagcagtccaccgcatctcaaattcttctctagtttctgaactccatacataattgtttaaagcagcccaaaatttcttatcctgatttgttggatgacccaccttctca

SEQ ID NO: 137992 - DNA, 308 bp, Zea Mays
aatctgcttacaataattaatcaaatcatcataaagcaccttcagattacccacaatccttcttctgaaagtaagggattcaaaatttgaagtgaaaacttcgttgacagaaatatctttgttataggccaagtcatacaaaactttaaactggccagacagcggttggttacccaaccaagtgcttttccagaaactagttttcaaaccattacccacattagttttacagtatttgtaaaagatgtctcttaaactcagaagctttttccagaaatgagagtcattttgtctttgcttaactagga

SEQ ID NO: 137993 - DNA, 405 bp, Zea Mays
ctacgatttcacaccatcgaatttggatgcaactatacatcaacatcaatgtcttaaaacaacactcttttaagaaggggtaatatgcactaagcacaacccttaccagcttcaacaattcattttaattaaatggtgaaacatccacaccagatgaatgtataagaagatcaaacacctcacctcaaagcaccacaaaacaagtagttctattgaaacaaaactcctaatcttcctaaaccttgttcttgccatcatgaaaagataatcatgtaatctcacattctttgcaccccacaaaagggagaaagtctacaaaattaatggagcaataaagccgacaagaagccaataacattctgcgcagcacagttcatcgaagaaatgccaaaaactccacaatga

SEQ ID NO: 137994 - DNA, 305 bp, Zea Mays
gcagtataagaatcccaccaatcagcagcaggacctgtcagacgtccagaagcatatagaaccttctcctggtccgtgcactgtgcaatattcaacatcttttcaacggatttcagccaatcatccgcgtccagtggatcaggtgagctagcgaatgtaggtggcttatgactcatgaactctctatgcttgtctcggggtggaactggtggtggtggtggaggcaatggcacttgttgctgctgttgctgttgttgtgccctcctttcctggcgtatctcatcccgctcctggcacaactcctg

SEQ ID NO: 137995 - DNA, 457 bp, Zea Mays
cctggatgcgtaggtaatgactcgattgtcttgcatcaaaacacaacccagtacagtgccagaggcatcacagtacacatcaaatggcttgttgttgtcgtgttgcgctaacacgggtgctgtggtcagatgctgcctcaaggtgtggaaagcatcttcacacttctgacccaatcaaatttggctaccttcttcaacaattcagtcatgggcttcgcaattcgagagaagtctagaatgaatcttcgataataaccggccaatcctagaaaacttcgaatctgaaggatagttgttggcggcttccagttcatcacttcttgcactttatctggatcaacagctatgccatcctgagagagtgtgcgacccaagaatttgatttctttcagccaaaaatcacatttagacagtttggcataaagacggtgctctcgcagacgttggagcactacat

SEQ ID NO: 137996 - DNA, 459 bp, Zea Mays
ggtgtgtttgccgtcaggaattcactggtacttgagacgccaaatccgatcatacaagtacgcatctcaagagctgactacatcatcactctgctgcttttggttatagccctcacagtggagctggtgcatgcggcattttatctggcatcggactgggcccaggtatcactagccaccatgtatgtcaagagatactggtacgaaatcagcccatccatctttgcaacagtcatcgctttccttagaagggtcacgttttctggacagctgatgagaaacaggatgaagcagcactcattgatgagaaacgggataaaacagcaagatccagtggaggtttctgatgcagtgaagagagctgttgctagatcgctcatatcaacgtatggcggcaacgacccaaccaaggacgacgacgccgtagaaacatcgcaatggcaggaccagatgccgttc

SEQ ID NO: 137997 - DNA, 1116 bp, Zea Mays
gccatctaaatattatttttctcatcttgtaatctactgtcctaacaattattgtggtgtagcaacatcaggatactgtagctacccaaatgtattgatgagtgaaggacagagcgagggacacaggctagaggcacgctgatcctggatactgtcaagttactatcatacgagagatttataatgcttgcaggtatattgccatagtgttgagatcgtcttgtacatgtactcatgctgtaggggttgatacgtactttcatagtggcaggacctatgacctaagatcacaccatgggtacaacgtagttgataaacggtgtagctgcttgcactttataatgcttgcaggtatgttggcaaattcaggcgtgactacaaggacaatggcacgcactgtacaatgatcccaggtacccttgctatccattgttgtgcctacagggacaatgtacagtggtcatgggtacacctgctacctccgttacggcaacagtgcacctctttgagcataatgtctcatgtcacatttaatatgatggaggaagccttatcttaacagctcagcacccggtggttgtcctaggtaggggtatacatggcaccagggttataccgctagggtcgtcttgccctaagggcttcgattaccaagttgtggatgtagcctacaggggtccttacacttggcagaacagtgaatttgatttccgaccagtagagccctgaacgccaagagagtcctaaaggccaagaggttcttggatctggtctttcgacatgggggcaccagacttagctagagccgccgggcatgatccctagagtacgagatctctgggacacggggctcgtatcaacgccccccccccccccccaccttcaggtttcttgtactgatgtaatcttcagaaggcatttgaacaatatgcggagatatgatttttcctagatgctaacaacaattattcttaatcgtgcaggatccaagaacttagggcttcccgtcctctaatctactagttcaatatcgtgtgtcatagttatttgccttgagctcttctacatgtcactcattgccttgtattttaggagatttttccattaccatgtgag

SEQ ID NO: 137998 - DNA, 293 bp, Zea Mays
gcgtgaagtcccggcttcggtgtttgaggcgcttggcctcgttgatatcggttgggtgatagtacccctgcaggaacagggttattggtgcccgccagtcttcggtcatgatgaggttgactatgcggtggccctcgctgtcattggttatttgaaggcctctgggctgcggacggctggcgtgccgatgacatggtagaatacgtcggagggcagggcctcgcctctagcggctgccttggccaaagcatcggcctcctcattcttggctcggtccacatgctgcaaggtga

SEQ ID NO: 137999 - DNA, 341 bp, Zea Mays
ggctaagacactgaactaagcattattatagactccgactctgtctatctagggatccaaatctatccgggtcctgctgtctggggtaccatagtcgaagcgaccacggggcagtgaatggtaagggtgctgaatcccgacaggggcgagagaaccaccatccaaatagtggcgtgctgcgcacttagcacgcaattccgcaacctccgcccaaaccttgcccaactcatcaagggcgtggtccaactctgtgttgagcatggcagccaggttgaccatgttgttcagcctaggattgccctcaccaactggcgagacaatcacacctccagcactgtcgg

SEQ ID NO: 138000 - DNA, 490 bp, Zea Mays
ctgacgcctccgtgatcctctctctccgcgtcatgtgaaacaaccatcacttgcttccttcagaaggaaaaagatctcaggctttccaccaaaagttttcctcgcacaccacgctgttccgttaggaccaagtcctctggggcacaacagccaaggctgtgagcgcgccgcactttacgccccctgatcccatcagtgcctggcctcgacgacatcggcgccaactgcgagttccttttttgctcgtcgaggacacaaccatggtggcgggccatcttcttttgtgtcgtcaggccgccgttgtggcattctgttatgcacgcgggaggggcgagcagcaggcgtccgcccacacaggaagtgtggggcctgctgtgttcgtcacaacgtcagcgcaaatgggaacacgacgtcggcacaaatctggtgcggctgttgaagcgggcacagttccagcgcgggcgctgctccgcgacggcgtgtggctgtt

SEQ ID NO: 138001 - DNA, 305 bp, Zea Mays
agcgtgttacctttattttaccaccatcattaagccattgaatgtgatacatatgtgggtgtgtgcaagtgggtaaggataatttctctaccaaagctgtacttgccaaattgttgcagctgccactatcgatgatggtgcgaatcgatcgttcttttacaacgcccttggtatggaatatagtgtgtcgctgattgctttcggcctaggcaagctgtgtattgagaacacgctgcacaacaagactctcatacctatcagcgtcgatgggatcaatgtgtacttcctcattttctgcatggtta

SEQ ID NO: 138002 - DNA, 504 bp, Zea Mays
ctggcggtggcttgctagaagatatagatcagcagcagcagtagcatcaatgcatcaccatcgtctttcgatccaactccatgcatatatatcatatgatcgaatcttctccaattctagttactcggatttaaatgacatggcacaaatctaatggctgaaatttaaccagacggagagccacatagaaagcaaccatagaagatccgaatagtgagtcagtaaaagaaagccaagttcgtacatgtggggaagaggcggcagtttcccttacttctccacgataactgcagcaacacaaatgtcgaatctcttttcgttgagaattgagacagcgaatgagggggagaagggagggggctcacgacctgctagccagggatgggctggccacgctcagcgtagggccgctcgaccgaggaggggcagggcgtccgagcacagggcctttgcccacgcgcaggcaggagatggcgccgccggcaggggagaggttgcgaggaa

SEQ ID NO: 138003 - DNA, 454 bp, Zea Mays
ggaggggaagctcatcgtccgcgacgacatggcgacggtcaaggaggtccagagcattgcgagatcgttgcactgggaggtgaggatgaccgtgtccaagcaggggcaggggctgctctgcgtcaggaagactatgtggcggcccacgcaagtcgaggcgctgagctagtgtaagttcatggtgatggctgctgatgttcttgttcttcctagcaaaacacagaataaccaagatagccattgggtggtatactaccgagtttcgtagctctctaacctgttattagtagctaaagtattagctctatttacaacttgacttgagtgctgttggggaaactgaagatggcgatttgaaactgcaaaatcatgagccctatgcactctcccatacgttgataactcaaagcaccacaacatttcaggatcgcagaacgtggaattaaaggcgcat

SEQ ID NO: 138004 - DNA, 551 bp, Zea Mays
tggtggtctgttgttagataactcttgctagtcccaatagtcccttgttatttgtgttttcagtcattgtcaggttattcagttagtttcagttattgttcagttaggtgttagagtagtcagttagctcatgccagaatttacctgtgctgagcgagtctcacggagaactgggtgtcatgtggaccgtggggatggacacgactgtgatcgtggcattggtgtatctcagtgatttgttttctctatatgaatatacaatagcaaatgctgagcagcaccaaaaacttgtctctctcatatgttgtttgttctctattgtagggagtgtgtagggtgagagaccctgctgagcttgctccaacatctgttttgtttgccatgtctctctcttttatcatgatcagcatagccctggtttacaccaccatcaataccattatcatgatacatgttcacatgcaaaattctccaagcaagattttgtaatattgctatatcagctggagagttaacttaaagagcgcttaatacatagagtggaacatttc

SEQ ID NO: 138005 - DNA, 405 bp, Zea Mays
cacgattagtcgggctggtcgcctggaagagggcgattagaaggacgacacgattagggtttctagttgtccgactagtcgtcgacctgggcgattagtcgtctcgtcgaacacttcctggttgtttttggtcgttgaagttttggtactgggcttcactctggtttttaacccatctacagtagcccgcccctccaaaaaacctcccagccgccagaacccttcccagccgccataaaccctactcctctcctctgtcaattctttggtttctgccaacgtctctgctccagcctccaagtgctccagccgtccagcggcgtccagtactccagtgctccggcgtctgtcagctagtcaagaattgaagatgagctcgtcatatgaaggtagcacttgctctcc

SEQ ID NO: 138006 - DNA, 500 bp, Zea Mays
tgtacatgtaaggctgtgggaaacgacaatatataatggatggaagaaccggaaatttaaaggctccgagccgttttgggcagttcacactccgatcgacactctaaataggaaaaggtcagcagctactgtagccgatcgaccgatcatgcaatgcatgattggaatggaatcgtttggcggtggtagctacctagggttggattggatatatccttctaggagcagagtactgcatgcatttgagcctgcctttgtggttgaatgatttgggtttagctggctgaaagcaagcagacttttaagggggctctgtccacattgagccatatatatccgcatcagtgaggagtgtacgggaaagtttgactttcagaaagcgatggcatcctctagtgccaaaggagccgaggacgtacgagaaccggaacatgtattttccacggcgtgggaacacggctttcactcttcatccatacttgttaggttagctctaaatc

SEQ ID NO: 138007 - DNA, 506 bp, Zea Mays
cacccccggtcgcatgcgtatatatatccacagcctgcgcgtgattcccggccacggactcccaacgagttgcgcgggtcatgcggtacccaacccgcgacttccgcgcgttaggtagggaggaaatcccgggttccgttgaagtgccccatgcggcggcgaaggaatcgcgtagcgctgttttggccttgagtccgatacaggggagggggacgtagctgacacaaaggggccacacgccagtaacccagccgcacgcggtgagcctgcccccagggtccacccgccagtgaagaaaggaagaagggaaggggagaagtgggccgacgggagattggggaaatgggccggccagggaagaaagggcccaggcgccagaaattctctttttctttaattttcttcttctcctattttcaattctaaatttgaatctcaagtatggttttgaattttgtactcaaattaaaggtagattttaatcctaccaatatggttgagtttat

SEQ ID NO: 138008 - DNA, 403 bp, Zea Mays
ccacttgctatggaccagctagccaatacgcaaatgtccagctaagactgaagtgtactctacctttgtaaagggagaacagatctcaacatctttggagagcagacgctccaagcaacacttgggaaataagaacagagttcgcccttgagactggctgggatataccaagttgttgcttttatagtttgtggaaccgtcaaggaacgactggcagcgagcgtgcagcactacacctttgggcgcggctcagttgggagaggtgctggatcagaaaccaacggcgacgatcttcatcgatccagcgtcagttctgtcgcctcgaactgaaatcctacctagacgttggctcttgatcgacatcgacccacatttccgtttcgctttcagccttcctgcgtcg

SEQ ID NO: 138009 - DNA, 388 bp, Zea Mays
atgggaaggagaactcgctcaaacaccctcgggggctgggtcgtagatcgcaccacccatcggagccgaatcgctaccggcaacaccctcaggggctgggttatagcttgcgttacccacctgagccggatcactaccggcaacaccctcgggggctaggtaaccgccaacatcacccttgaggactagattttctgcaacagccacctctaaggctgaaggatcttcagtcacctccatgggagtcaggcaatcttgaccaacctcttgacactgaagaccgccctccaaggtcgacgacgcgcgagatgctgcccgggatacccctaatcccacatctggaatgtcagaacaaacacccatcatatcaccatcagtcggctctgac

SEQ ID NO: 138010 - DNA, 420 bp, Zea Mays
ccgaagacggctttctctaccagatacggactctatgagtacttggtgatgtcattggggctgaccaatgccccgacatatttcatgtatttgatgaactcagtatttatgccagaactggataagtttgtggtggttttcattgatgacattctggtatattcaagaaatgaacaggagcataatatgcacttgcacacagtacttcggagactacgtgatcatcgcttatatgctaagttatccaaatgtgatttttggctgagggaaattaaatttttgggtcacaccatttctcaggatggggtatcagttgatcccgagaaagtgcaagaagtgatggactggaagcctcctaccaccgtatggcagattcagagtattctaggattggcaggatattatcggcgatttattcgg

SEQ ID NO: 138011 - DNA, 312 bp, Zea Mays
gctagatggacaaaaaaatgtctaccggggttctcattttgcttgcaacaaaaatgtccatttgtgtctgtggttaggtagacacttttgaagtttgaatacagcttcgttcagaggagttcccaagagtatatcgagattggtcggaggtttgcataccaactctgtggtgtatacctactacattctagggtacatatcagtgcacttacatgagaggcgaggccacctcgagcggacccgaatgttgcattgatcctcctgctatgtctctatcttcaaatggacacctcttttggacgccaacctttg

SEQ ID NO: 138012 - DNA, 703 bp, Zea Mays
gaaggtaaggggtaggctgccattcctggttctgccattcccattccatcctggttttctgctattcacgttctcattcccattctcatcctagttctgcccacacaccctagccgtacaacgtctgacatgtggggtcccacacccctagcctgttctccattcccattcccatcctcgttctgcccacaactctatcgtatagcgggtcccacacttttggccgtctgacatatggagtcccacactcctggcttgttctccattcccatcctggttctgcccacaccctgtcgtacaacgtctgacaggtgggtcccacacccctggtcttgcatgtggggtccttgtctccgtgcaccgcgcatttgaccaaaaaagcctgctatttggggtgacagcaatggtcaggtaagaatacacaagatgttccacacaaaaacttataaacatgtgtctgcacaattcagtggccgatgtggtactaagtttagcttgcaaatacaaagtgcatgcgtcctcggaggcccatctggttgttgcgacccataccaaatcctcctctaccacctccttcccagcccagcggtcctgctctcttggtctcacctcgtgctctcctgttcctcgtcaagctcgggcatctcggcgcaaccacggactgccttgctctcccttcggcgtgcagcacgatcccagtcca

SEQ ID NO: 138013 - DNA, 366 bp, Zea Mays
cgggtgcccagaaaatcaacgtgttcaattggctgctcatcaactttctgggatggccctagcatggtgggataccttcagcactaccgtcagagatgctacctgggcagaatttgaaactgctttccgtgagcaccatgtaccccatgggatcgttcagctcaaggaagatgaatttcaggaactaactcaaggaggaagatctgtcagtgagtacgttcacaaattcacagaattggctcgctatgcgcctgacgatgtcagcacagaagccaaaaggatggctcgttttctgaaaggactaagaccagaactcaagaccatccttgccagccaagatttccttagcttctcgcacctctccaa

SEQ ID NO: 138014 - DNA, 409 bp, Zea Mays
ttcggggacctgattcgggacaaggtggagatctacgtcgatgacatcatggtcaagactagggaggggtcgactatagtggaagacctgaccctagttttcgcaagctacgggcaacccgcaccaagctaaacccggagaaatgcatcttcggtgtctccacaaggaagttgctagggttcctggtttcataccggagcattgaagctaacccggagaaaatcaagactattgaggtgatgaggcctcccgcccatattaaggacatccagaagcttacggggtcactggcagcccttagccgcttcatttcgaggttggctgagagggcactgcccttcttcaagctcctgcagaaatcaggcccatttgcttggaccgaagaggtggaacaagccttccaagaatt

SEQ ID NO: 138015 - DNA, 590 bp, Zea Mays
ggctgcggcagctttatgcgcggtgtggcggaacgtgcggagggggtggttgacgccagctggacccacgggatcggagtcgcggcgaggatctcgcggaggttgttaggcgcattcgcgcgtacgctacggtgacgaagaagctacagatgagcgggtcccacccgtcaacaccacagcccgaagaacccccgcgtaggtttggctgacacacgtcccccacatatcagcgcccacccagtgcgcgcggacggccaagttgggtcgcgcggtgggaagaatgggccgagacagctggaattcagcccaagcgcagggaaaaccttttcttctcttttttttttgatttctttttcaagctttcaactcctatttcgaattcaaacacaattcaactttgaatttcaaacatcattctaatgcgaacccaaatcctagcttcatgtttattattatttatattatcattattatttatcttcccctcaccatttaattaaatgattatcataattatctttctcaactcttttcaaatccatgtttgatcttcaaatttccaagtgtctaaattcatactaatgtgaaca

SEQ ID NO: 138016 - DNA, 735 bp, Zea Mays
gctcccctaagtttgtctggaagagctataggtaggccggtcgacgtgaacagtgccttcggcgacgttcaccagcagacatgacggtgttccggttgatcctgtgcggtagagttcaagcgagcaagcgcatgagcttcaccatgatctatagattgcgaaacacgagttaaacaactatgactgaccttaggaaaggctgaccacacgtttgcactgcgcggcggcgctagtgaccactgatggggaaaaccgatgttctgggctatcaaaggtagaatagtgggaacaaaaggtggcttgggtgtgtaacagagaggcggggctgagcgcaggctcaatttaaaggaagtcaccccgacggtgagcaatttggtcgctgactcactgcggcggcgataacccgagaagctccacgttagcctcaatggcgtccacaggccgataacgtgtgggtttaccgagaaccttttacggcggtgcattactcgagcctccaaccagctgcgtggacggccagagcgtccggtggcttgctacggtggcggcggatgattcacggtgaggacacatggtgtccgtggctagagtggtaatccaagcatcgaatccgagccagagatctttttaccatagattgatccacatctcggtggcaccaatcgtggcgcgagctcgaatcatgggctcatggtgacgggacgtcggcgacgagcacacgacacttggggtctt

SEQ ID NO: 138017 - DNA, 343 bp, Zea Mays
aattatgtgcacatgagatggtctgacctataaagacagattcttgtgtaaaagttgagagggctcaaagcacgagtaaaaatacaaactatagagtatggatcctcatgcagcataggaatcaacttttatgacatttctcagtcaaagcttcgattgagcttcttgtcggtcgtggagttggatacttgtaggaagcacagagttttttatacggtagcaattgtatatgtgtgttcttgccgtgtcggctggcggatggatttcatatgtaagatacgaaccaacatattcaaacttcgtgtttatttatttttcatgaaatccagacaatcaaatccca

SEQ ID NO: 138018 - DNA, 690 bp, Zea Mays
gttttgcaccagctgtaatgttataccggtacttactatttttttgtaggagacgagaaaatgcagttgggagagttacgacgacaaaggagaggtgatgcgcacaatagagtccaagagactaatgggacagaagatgcgttgtggatctcagctcgtcgattcgtacattaacgatcgcatacgcgacatgcgtaggtacgcgaaatctgtcttttatgacagcccgaagcgtgcagagttaggaggttgaaggcagcagatgagaagagagcacaggatgcaagggaatgggaagcgatttgagccgagaaacagatgttggataatcttgctgatcgtctcaagggaagtgagtgagaaaaataatactataatttttttagtacaatttatttatcctgactttgctaacttatttttctcattatatttgcagagattgaatgtggcgtaaactatatggccgatgaggcgcatgcaagatatgttcaggaaaaaatggcgacagtggatctgatggaggaggaggacgacgacacatctagattgagtgaggtaggattacatggagaagagaaggacgatacatcaaggttgagtgagctcatcgcactagctgaggcaggattacgtgctcaagagaaagaggacgagtttatgtctcaggccgccgaagaggtagaggcg

SEQ ID NO: 138019 - DNA, 343 bp, Zea Mays
aaacgagcaccaggggcactcggctaattgttctaggcgggggcaggagtgggacggataaacaccggctgcttgatgggatatgtgggtgggcgaggagaagaacagtttgggttgaagggacgaattaccaaccttgtctgtttttcagatccctaagatgatctgtcacccccatatctcttgttttttccatgacccgaattcttggcttccatagacagtgttgtgcttacagccctgctataggtgagatccaggcatgtagcgatcttgcgctagaattgttcattcaaccctctgatgaagtaatttttgttttaaaatctgtgtccacttgatc

SEQ ID NO: 138020 - DNA, 302 bp, Zea Mays
attgagcctgagcactgcttattcaccacattacgcacacgagcgcttgtgcaatcgactcaattccaccggagaactcagacagaccacaaatctcctcctccctgttcttagcgccgccgtaaaggacctcttcgtgggcagcccttctcgggttagtactcgcccgattgtctcttgttctagtgtgtcgttagcttcctattgctctcggtgccaaccaattgaagtttaccagagtcccaccactggaacacctcgttgttccgtagaacaccgtcgtatacaccctctctgtcgac

SEQ ID NO: 138021 - DNA, 408 bp, Zea Mays
ttgcaagtaatccaaaatttctgacaaaacgcctataataacctgctaggcctaagaaactccgtagatccttaatggaagtaggagaagaccaattagccacggcttggatcttagctggatctgtggcaacacctgatgcagatatcacgtgtcccaaataagtcaactgattctgggcaaaagagcatttggacagcttgatttgccaactgtctttgagaagcaactccaacacaagcctcacatggtttaggtgctgctcaaaatcctcactataaatgagaatgtcatcgaaaaagactagcacacaactacgaagcaaggggctagggtaacattcatagttcgttgaaatgtagccggtgctccagttaatccaaacgccatcaccttgaactcgtagtg

SEQ ID NO: 138022 - DNA, 381 bp, Zea Mays
caaggctccagctgatttcaagtggcttgcctttatcctctgacatgtgtcacattctgctacatattgggctatctccctcttcattctggtccaccaatacaagggcttcagatcatggtacattttggtgcttcctagatgcatggagaatttggagaggtgagcttcatccaagatcttcttcttgagatccttatttttaggaactaccaatctactttcaaaccataatataccctttccatcttggcggaaacatttatacttctctgtcttctgatggaggttctctttaatgatttgcactcccctgtcattgagttgggccataattatcttgtcttgcaaagtgggctcaacggaaatgtgagacaaagc

SEQ ID NO: 138023 - DNA, 367 bp, Zea Mays
ccacgattcaacgcgaaggtgacatggacaaggagtaataggcttacaaacatctagcactagtcggtcagagcaaaagccctcatttaatttgagagatttgacctaagttgaagcttgttcatgttacggcatctgaccgaccctggagatcacgttccggatgattaatgggatcgaagctaaaattgaagcttgggaaggctttacgggttcaccaggaactaggtacacgattgaatttaggccgaacgaggatagagaagtggatcgacagagagggtgcatacagcggcgttcttcggagcaacggagtgttccggtggtgggactttggtaaactttgattgattggcgtcgagagcaa

SEQ ID NO: 138024 - DNA, 667 bp, Zea Mays
ccacgtctatgccgacgttctcctcccatgaagtagccgagtgggttcacggatgcacgcttgacgaagccacggcataattgggcggggagaagccttagaccgaagggaatttgtcgccgacgatctaacgccgccgcggaaccgtccgcgccatggtcgggtcttgtcacgtcgtactagccggtaaattcaatgcccatagtttcgccatagcctcattattcttttgcgccaatctgcgtcgcgattagttcaccagatcgtgtgatcgccgcgtgccgatgacgctccgccgcggggatcgcgagcgccgccgctctgctcggccggctggagaggatggatcgagtgccgctcatcaaaggatcaacgacttagattagaactggataacgcttcgagcccgtctgcggtgaaccgttgagattagatccgacggatgaaaatgaatcgatcttcataaaagtagggccgtagatcgcaggatgagtggccctggttgcgcaccgtttcggtgaaggcaacttctaatctgagccaaccaatcgtgatcctacggctagtattggccgatacctcttcaccgcgagattttagctaaagagcccctgatagatttagtaataaacccacggtcctgtaccgttataagaacataaaattc

SEQ ID NO: 138025 - DNA, 319 bp, Zea Mays
ccattagcagggcatagtggtcaccccgagttatgtaagcgcgagcatgttgcaccgtcttgagtcgttgccgacttaagccgattgctccgttagcagggcatagtggtcaccccgagttaagtaagcgcgagcatgttgcaccgtcttaagtcgttgccgacttaagccgattactccgttagcagggcatagtggtcaccccaagttaagtaagcacgagcatgttgcaccgtcttaattcgtcgccgacttaaggagattgctccgttagcacgacatagtggtcaccccgagttaaataagaatgtcggttaat

SEQ ID NO: 138026 - DNA, 625 bp, Zea Mays
gcctcatgcgcttgctgctcatcccttgatcaccaccactttgcagcatgctcccttgtgatttgtttgttccagcagcagttacgtgtccatgccctatgtttggcttagctggcacttcttcacccttctttgtgtaattcctagtgacagccatctgatcattctgctttgccacctctgcctgggaaccttctgtagcatttaatatgtcgtactccactgttcccactatgatttttgagcagctcttgctcagtggctcatctcgcccatcaacaatatcaccctcttcttctgattttttgcccatatgcagccctctggcatccgttgggttgtgaggagcccatttcttttgaatctgcgagcgcaactccttggggccttttgatatggcaacagccctgggccgactccccatacttctccctagcctgctccacacttcacctccatgccttcgctctgtctccaaatgtccgcttcgggaattcacgttgtgagaacaaatatcggctttctgcatgagcctagtcttccctgcttctctagttcagtggcccttccctctatccaaagaggctgccttgtgtccatcttggagacctaggtctcttgaaac

SEQ ID NO: 138027 - DNA, 657 bp, Zea Mays
atgctcgggccaaatcggggtataggtttcgggcaacaagcaggatctcccgtcggagtctagcatcttgtttagctatttcccgctctcgctcttgagcatgacgacaatcgcagcggtgggagttgcgcctctctcaatgtgctcttgcatcgggagtttctctcatttctgaggctttgtcccaagagacgggttgcgctgggtcccgttctccagcttcatgatgtcgtcgtacgttctggcgcctgttcctctgtcgccgagcatcacgttggggaggttcctccccatttatggtgggttcatcgtcggagatgggcgatgactccaatctcccctgaatgaagaggacgtcgaggtagaaaggagcaggtatggtggtgcgcctctcctaatcctcctttgagggtggaggtgttgggaggattgcttgctgtgttttccttcctcgatagggaacatccacttccctcattcgagtgatctgtgtccactccttagtgggcgaggtggacaacagagttctccgagttggagaggccatgactgattggccctccatcctctaggggcttttgagccctgacttgcgaggggccatgccccccgagctctgagcaagggcatggctcgttgtttcccttcagcttctcg

SEQ ID NO: 138028 - DNA, 395 bp, Zea Mays
gcgacaaatccgcgcagaagtcgcctaagggtgcagccggactagcacaacaagtgcgacaaacacgaagtctatcgcgaagactatccgcgcagaagtcgcctaagggtgcagccggaatagcacaacaagtgcgaaaaaaacccgaagtctaccgcggagactatccacgcagaagccgcctaaaaggcgcagccgaactagtacaacaaaagcagaaacgacagcatcaaaccgtccgcgttaagaccgactataaccacaccagcacagcataacaaaacataccagacaaagtacacaacgcctccgtaggcacaggcaagcgatggcacaccacttcatcgtacaagcctttacacatatacacgcgagggcgccacactctacatcgg

SEQ ID NO: 138029 - DNA, 455 bp, Zea Mays
tgttagaccaaaagacataacagtgaactcatacaacccatacttggtaatgaatgtcgtcttcggaatgtctgagggtcggatcctgagctgatgtgataacctgacctcagatctatctttgaaaacacgctggctcctctcaactggtaaaacagatcttctattctgggcaaggggtacttgttcttgattgtgacctcatttagagcttgataatcgatgcacatcctcctagtgccatctttcttctccacgaataggacaggggtggcccaaggcgaggtgcttggctggatgtaacctttctttgacagctcatcgatctgctttttaagttcaactaactctggtccagatactctgtaggctcttttagaaatgggggcggtgcctagaagaagctctatagcaaactcaactttccgctcaggtggcatgcctgataaatcttc

SEQ ID NO: 138030 - DNA, 1213 bp, Zea Mays
catattctataggataaaaacctctaatttttatagatgactcttagctgccacctagtgtttgtgttaccttcacctttaatcatttattgaggtgttcatccagaaatagctgaagccaatttgatataaggaattacaaatctcacctctatcatcaaaagaatctcataccactatacctctggcttatgtgttggagcttttgggagatacttaaccttcattagaaagacacgttgtatctaggtaaatagtagttttcatgctatttttctagcgtggcccctgtttatctaaagatgccaccacagcttgttcactccagtgttaaatcgcactatagtgttgttggcacaactaacattgcccaaaagtcaagtcaagcacacattttgatgttagatgttctctccaaggtgacaaattggttgatgaaaagtaatgccatggcctttttgacatattgattcaattggacccaatcaacctaatccagttgtatgtaaattcagacgtctcgttttcgaattcatactggtgcggactcggagcagatgaactgatgaagtaccgggttggacgaaagcccttcatatttttagtgtaaaaaggtatataatatatataactatataacagaattacttcttatttgaaccacggtgcacaggtggtgattggtgttctcctgattattagctggtgcgccaggattttaaacagcagctagttttctcaaagatccttctctttgaagtttttgttgtttgtgctactagtctcctaagaatggctaagatgacaggttatgcggtttgcatacagtattattctttcttttgctcatatttacttaaatgcaggccaactatgttgtgggattcatttcctaaggaattgcagattactatcatggtagaagtagccgcacgcaccatctttgagttattggttttgcatttagctagtgatattaaattcatgataggtgccacctacattccaagaagaaaacaatgactagtagcctctccatgtatttcattttctttttagagttatattggtccctgagacccgtgtgtaacgtgttctagatttgtttcgcgcgctgcttgcattacttcattactgactcttggtattgtaatctccaacacactaaacaccatgctttttgtgctctttagagcatctccaacgtgtccta

SEQ ID NO: 138031 - DNA, 332 bp, Zea Mays
aaaaataaaaagaaaaacgaatggggagcctaactgggccctgacctcggtttcggcccaatacacaaactaccccgcgcagcccgtcatcacctaagcgccacgcagacatgccaggcccgcacgtcggtcagtgtgtttcactctcccttcccccgcgtgacttactcgtgggccccgcctgtcatgtcgtcgcccactcgccccactgcttcgcgggacccgcgcgtcatacgccgtcaactcgcgcccacgtcgcgacccagttgactcgctgcgctcgggacccaactgtcatccctctcctcactgtgctggtcgcctccgcctag

SEQ ID NO: 138032 - DNA, 416 bp, Zea Mays
atcacaatgatgtatggacttgtttgttgcacttatattcaccaaatgggctcctaggggtctattttatagccccaaatgagctgctagccattgccctttcattgtgatgaagatctcaaacctgggaaaaactgccacttctgcgggggcaccgaactatgagcagactttgattgttttccttaaacggttgcaccaacgttgaagccttcgaccatccgacacaccaaacaaggcacaaggaacctaagtcatgactcgcacgagaccaaccccgagcgggagatgcagtcatggctcgcccaatacctcccccagtcatgcctcgcccgagaccaacctcgggtgggagacgcagtcacggctcgcccgagacctcgtgcagttacaactcgccccagaccaacctcggg

SEQ ID NO: 138033 - DNA, 513 bp, Zea Mays
ttatcaccggactattccctgagccacttactgcgtgattgactgaggtgtcctcgctggagttcgcggtcttttcatagccgtgccacgtacttagaagagttaccacgtcgtagtagacaaccgtaagtagtcagtccatcgcctaagacgttgccccgatgaacgccacggtagctcgcgccggtgactcacccctgtcttcgaccaacgatcttcccctttcaaaattcggagccaccgcctccagacactaaaaattgatggtgttgctagctccgcaaggttgtcacgaagccaggacatccacccctgccctcgattagccaccatagtcggggaattttgttcttcccccaaatcagtcgaaatcccgctgtgaaggtctctcaccgtggtcagcctgcctcaggttgattcatacccctctgttgaatgtttttagcatctctaggatctcctgttgcttgtaggctcgattaattgaactagacgtactgaattgcccggaac

SEQ ID NO: 138034 - DNA, 716 bp, Zea Mays
ctaattagtatatttatctcactctagaataacaaccaggagctaatccaaaatttatttagatcttatctagtctaaaatagtcatatcgatttattctagatctgatccaacctaataggttaatctaacctgatgaagtctaaccttaagttgagctaacctaaggatagtcccttaacaagttaacactagtaaaataaactggatcctactcctataaatcttgttctctcctcatgcacttaaacctaaaattagtgcattagaccactcaaccatgagcagaagagctaacccaaccatagaatcttgagggattgcataatctgtctaccctcacctaacatcaaacaagattttgacctacatcatgtagactatctcatccatatctatcttaatcatattccccaatcccgataatatacactaactccgaaaacaataagaccaagactagaaaaggacaagaacaacctcgtcaagtaaggagagaagtcaaacttgatctctagatgcatccaacacggagttcttctcaccataaactatcttaccccaggctatccttgccctaaccttcctatcttttatcctacataataatgtggctatacccatgtatacccatgcttttctaatcacctgataatttgtgatatggaaaaaattgatattaaaatcaattagaaactaacccatagactgcaaac

SEQ ID NO: 138035 - DNA, 845 bp, Zea Mays
aatttgtggaggataacctaaaaggagaaatgacattcctttgtatatatgtgtgttgtccatatttatcatttcatgagaacatcacatgaaaacaaataaatataaaatatatgccactaaattatgcatcatgctggactttatttggtgtgcattttgtgacaatataaaaggaataacatggaaatataataatgagaagagaattggatttaatcccaaaagtgcaaattggggaaaattagaaataataaatactatacaaaacaaaataaaagctatacataaataaataactacgatactagtatgtttattttgtacattaatttgggtacaagttcacaacactatttgaattcaaatttgagatttaaatttaaaagagaagaggaagaaaatgaaataaagaaaaaaggcttcacttggcgttgtggaccaacttcttctccccggcccattccccttactcccgcagcccagttctccacccgtgcacgcacttgcgccaaaccctagccgccatgtgggcccacgtcaccagtaacacccccgccgcacgaacaacttgggcacgatgcacctgggctcgccactgccactgcccgtgggtccctctgctaagcttcacgttccaaccctttgcgtggcctcactgcccgtgggtcccccttatcgaaaccatcttctcccaccggattatggcgaacttgtggccgtgaatgtcgccaccaagcgcatgagccttccggattcctcgccaacggactcttaaaccgtgtataaagctcgtggccatggacccctcccttatccgcagtacgaataccatagacgccgtc

SEQ ID NO: 138036 - DNA, 510 bp, Zea Mays
taggataagcaagtttatgatgtgaaagaattccgtgttgagtggtaatgcatctgaagatcgtgtttgactcgtctctttccttgacgaggttgatattttcttctccggtcttgagctcattgattcgtggtgagtgcatatcatcgggggtgggggaatgtggttaagatagatttggatgagataggctacatgatgtaggtctaaagttcatttgatgttaggtgggagtagacagattatgcaatccatcatgacactattggttgggttagctcttatgttcacggtagagttggtctaatgcactaattttaggtttaagtgcatgaggagagaacaagatttataggagtaggatccagtttattttactagtattaacttgttaaggtactatccttaggttagctcaacttaaggttagacttcatcaggttagattaacctattaggttggatcagatctagaataaatcgatatgactattttagactagataagat

SEQ ID NO: 138037 - DNA, 879 bp, Zea Mays
ggttctcgcacctccgccgctggtaagatctcgtatcttcttccacgtgttagctctgtaaccctagggtttgcagccatggattccggcatggaatctgctgctgagctctttgcctagaagttctctgcggccgttgatgcagcctgtgacaccgtgagtgcttctgctgccgcctgtgtggtagctggtgatctctatgccacatcatcagtaggtaaccatgtggtttctatgcttgatgttcttgaatccgttgtggaggcagaaaaatgtgttatgtgttcgtatcaacaggccagtgcagctgtcgtttgtgctcaggagacattggccaaatactatcaggtttgtattctgaaacttttactgagccaatgcttcagatttttgtgccatatggtttatagcagccctgtgatggaattataataacctaagtgcttttttgaggcttgtgatacatgtgagatgatatagttgctttgccctatgatgtttttctttgaaaatattgaattgtatactacacttggtgttttttgtggaaaatagctgatggcatatggctgtgtgttgacagtgcagagttgattatgccagttcatatggttgttctattattgagcccagttatggtgcatatggctgtttgttgctgtttcattgaaaatattgaactgtatggtactgaggcttgtgatacatgtgagatgagatagtagctttgccctatgatgctttctttgaaaaatttgaactgtaaactacacttgatgttttttttgtgaaaaatagctgagggcatatgtcatatggttgtttgtgttgcatcatagagttgatgttgccagttcatatggttgttctattattgag

SEQ ID NO: 138038 - DNA, 355 bp, Zea Mays
ttactcacgaaaaatccccagaaactgctaatactgctgctgttcggccacctgaaaatctgttttttggacagccacctacccggattcaaacggcgatatctcctaatctataacttcgaattgagcgcataagtactcgttggaaaggtatgacaaagaaccacatgattcccatacttattcccattaacttcacacgaaaaattcccagaaactgctaatactactggtgttcgcccacccactaaaattctggacagcacctctaccaattcgcatacgcaacatctattcaatcggattgcagcacaaatgaacaagagataaacacaaaaatcaccttggattctcc

SEQ ID NO: 138039 - DNA, 303 bp, Zea Mays
ggaagaggtccgttggcaatgttgtcgatgtaccttgcctcctttgccatcatgtgtctgcttacaaattttcccataatttcttcgagcaacattttggtgtatctagggttctcatgaataaggtttacaagattaatatcaataatggtaaatgaccatagcgttagtcacatgacatcattatctatccatcttatactcccatagcttcgaatcttttcattagggtcttgatcttgttgtacgttttggttggctcttcccctctcttcatggcgaacctccctagctcgctttcca

SEQ ID NO: 138040 - DNA, 330 bp, Zea Mays
gcttggtgcgaactcgaccacgcaacgtccctattccctagtcaggcggaggcctggtgcagtcaagcggcctactatgcatgacgtaagcatatgggatgggcctgacgtaaagccgttgggccatgctgcccctgcatttattgtggaaaggacgcgccgtctgactacctcgctgacaggagatgtgccccttcagcattaaatgtgccctgtccacccaactggcagggcggcgcccaagccatcctacaggcggcatgtctggctattcccgttggccaacagtacagctacgtcgtggcatgcgccgcacccatcataactcgc

SEQ ID NO: 138041 - DNA, 580 bp, Zea Mays
cgatggagtgacccgagtagcgctatagatggccattgtagcatcggcggtagactcgagctcctcaggccatgcaaggtgggggacgacttctaatgattgaggatggcctttaggtgcccatagcgagggctcaggccatgcaagacgttgaggacaagactctcatccatgagataagccctaaggacacaaagagagtccgtcaacgtcttcatctgacgacaatactcggtgatagaaaggtcccctgaacaagttggtggaaggcagcctccaagtatagcttccaggcccagtagttgtcgcagaagtgagtgtcgagcgcgacccagacccgttgggcagtgttgtccagctcaccggtaatatcttgcagctcagcggtgatggtgccgaagatccaggtgagcaccacctggtccatccaaaacaaggactcagacgactcagtggtgacatagaggatgtggtcttcgagggcgtagatacgcaagatctgcaaaacctgttggtgccatcgggcgtagtgaagatagtcagggccaagaacggcagtgacgagtgctcgaatgctgag

SEQ ID NO: 138042 - DNA, 666 bp, Zea Mays
ccttccccccgaatgctggaggaagaagcaggaaggagcgtcgcctccacggacatcccgcggaggtaggcgatgatggccgcctgaaagatgaagcaggacgccacgggtagaagctgcgggccaagcccctccagcagctgctcgaagaaagacgggatcggcattgccaactagctggggagtttggaaacaataaacacaaactcttcggtggcggggtcatcgagaggagagacaccgacacaggtcctcccggcaaacgccagcactccccatctgagcgggttgcgcaccaagttgagtgccacctcgggccggaagcgccatcacagatacgatgacataagaacgcgaagagctcgagggcgaaaggccgctgatgagaatggataccatgcttggggggagtccctttttaaagaaggattctcctaatggcgccccgaagcaccacagaagacctcgcccgacgtacgccagggtgactcagtccctggcacgggggaccgggcccacgaatcatgctccttgggcgttggcctccatgtgcgaagaaggcgaaccccgcaaagggagcacgccgccgccctgcagtagtgcgccccttcgtcttcgccgcgaccaacggtccagagggtgaaccgccacacagggagcatgcta

SEQ ID NO: 138043 - DNA, 321 bp, Zea Mays
cttaaaactctagaatctttcaaaggaattgctcgggtggagatcggagatggaaaacaacttttttgtggcatgacaattaagatggtatgcacaaatcggcacgatacccagaactttggtctttcgcctcaagcaaagacatcaccatccaccaagcaagaatggcagcctcacatgagatgtttcacactcctctgtcggaggaggcctttgagcagtttcaagctttgcatgatcttttggttaatcttccgcttaataatcagagagacaaatggctctgcaatggctcctctagccttttctcatcgcaaaagg

SEQ ID NO: 138044 - DNA, 400 bp, Zea Mays
tgagatttcaagaaatgaagactgacagaccacctgtccctgttagcatattagagtcgacaggcaagaaaggtaaaaatattatcattggtaaccctcgcactctaaatctatcacgtagagtggttactcagaaggccataaaagaaagaccagagacgtcggggacaagcacgaccggatacccaatcatggtcacctctcctacatatactgaacggtccaagcactaaggctagacagtccaagacagacacgaacagttcggctatgaagtccgaaccgtcatgggcaaccagaagccgcaactacctcagaccattagatcatagcggcttaaaatatgtactaggtagcaaaacacttccaagacatctgaccggctcaacagagtcggtcc

SEQ ID NO: 138045 - DNA, 293 bp, Zea Mays
ctgcttctctcttggtgccgtcgagaacttgagattacgattggtttggggaattcgagacttcgcgcagagcgaaagtgtgaacaccattggctttatgcgttctcggttcgagattttgctagtaatgcatatctgtcggcgtaaattgcacgggacggtgactgtaatctcgatgtgttgattttgaatatcacgtgccttaggggttaagtattctggatagacgatcgactgttctaacttctaattgtagcatgcaacaacgccaacagatgggacgggagacccaa

SEQ ID NO: 138046 - DNA, 694 bp, Zea Mays
gagaaattgatgaccatggttatgagtcatatgcgattaagcttcggaatgacaaggccgttgtgccatatgcaactcggttcctcgtgccagctgaccgaggttgaattcagagtggtagctgccgaaattagcaccagagatttggtataggagtacttggcaaacaagacttttctgacctccagcggctgggggatgccgaagaagaaagaaggggaaagaaatatgagcttgtttggctcccctatcgctttaaatttgagaagcaattcaagaaaccgtgcaccgaatagctagagatgatcgaaactatgtgcaacgagattattggcaattatacgaagaaagaggatcaactaatcattgttgccttcggcacccgaccgaaatgaagactaaaccaagtaatggatgcattgaactttgagtatccagattatgagagacttgacaaaggggtcgagggagcgaagagaaaaagggttgtcaacattctgaccagggaagctgccaagtccgtgaaggcagacgaaaaggctctgaagagagtgaaagtagcaccatagccgaaggtgcaagcccctaagaaaagaaaacttgatgaaattcttctaccgatccgaaggtagatgaagcgccaaaggaaaccttgagcccttcgtcgcccacagctgccgaggtggcagaaatt

SEQ ID NO: 138047 - DNA, 568 bp, Zea Mays
tttgttcctttgcctgacaatctgatcccagataaccttattgacgagtcttagctttctagagatactgaccgagcccttttactctgttgcgccaaaaacttgcccgagccaccagtctgtcattctgcgcctgactcagtgtgccaacctatattcttgtcgacgctttcttggcccttgaatcctatttcttgttttttcctccaccgttttctagcatcctgagctcccacatcttttcacattttgttcttgagccacactgtttgaaagatcgtgatggcgcccaggaagaggaaacatagtgctgccatgcccgtcatccctctgatcgatcctgatagccaactcgcttttgctggtaatcacgtctctgttgtttctgaagctgatctcttacatcttgttgaaatcggtgttctgccgcctaaggaactatgttcttggcggatctggcggggagttaccgtctcgacggaggatacccatgaggcggttattttcgtgccttttctcatccgaggactagccttgccagtttctcccttctttcgtggccttcttg

SEQ ID NO: 138048 - DNA, 523 bp, Zea Mays
gcagaaacagaatagtatgtgcatatcagaactttacaaatcaaatcttcatagttcaaagataacacggagagaacatttggaatgctaattttgtttggcatgtaggttcaaaattgtactaattgaatccagtgactcaatataagcagaatgtacagataagctgactaagaagcgcccaacagtacacatggtgttttagggaaggatgctgcaagcctgcatatatattatgatgtatcattaccaacaagcagtacatatggtggtgttcaatacaaaatcagcacaatattttgatttgactgtagtagtatgggctttggggatagtatttttccaatttttcatcaagtactttgtttctttggcatggtggcaggcggttaatcacatggcaaatttcatcaggaaagtatttaacaattgcactgctgattacatgctatcccttaccttgccagtcatacgactaagcctactatgtaaatgaacatgcttttatatgattttcatatca

SEQ ID NO: 138049 - DNA, 522 bp, Zea Mays
ccccaacccggcgtcgaacacttcagcacaaacatccgtcgcatcaccatccgctggctccaataacagatcctctggaaccatatcttcaagagtctgatcaaagttcgccagggacaattcttgtagaccaatgagggcagacagagcaggagaaggaactccactactttccccacttgcaacatattgccgactgttcttccgagccaaagggacctcatcttcttcctccccctcgttttcatcagcgacagatggagcacccccattggggtcagcgacagatggatcacacccattggggtcagcgtcggtaaattcaggcacaagcacttcctcagcagcaggaaccgaaggaccaacatcccgatccaaactagatactcgccgaagacatctctttttctttttctgctcatcaacaggataatcaagttgattggctcggcaagggcgtttcgggcgaacactgacaggcctctgaatatccaaggttgtaccagcttccgggagaggcgc

SEQ ID NO: 138050 - DNA, 293 bp, Zea Mays
agaagacctgctatcagagccagcggatgatggtgtgatggaggtttgtgccgatgtgctcgacgccgggttgggatcatcccgggcagcgtcccgcgcttcgtcgaccttagagcgcggtcttgagggtcgggaaactgacttggatcgtcttgctcccatggaagtaattgagggaccatcagccttagaggcggctactacagagaacttggtcctcaaggatggtgctgacacttgcccagcccccgaggatattgccggggatgactcggctcgggtgggaaacgcaa

SEQ ID NO: 138051 - DNA, 348 bp, Zea Mays
caggtttggatttcagacttagtgtaattgtccaagtctgaatttcagtgtgtgtggctcaactttggaactttgtggtgcctgatccatgtggttttggactgaggttgctgtagcaagtttgaagaccatatgttgttgtgcaagtttggttaaaggttatacccctaaagctaattggaacttggagaaaaggtgatccaaattggacctgtcagacttgtgatttctggacttagattcagaaattgaagtgcagtttcatcatttttagcaaacttcagatctctgttgtgataaacttctgatgttatggcctgcactctccatagcaaagtgttagagggt

SEQ ID NO: 138052 - DNA, 617 bp, Zea Mays
gtcgcctgcaatcgacgtgcgcacacgtctcagtatgcgcatagagatgtagcagataaaggcagcagcaaaagccctagagccactaacctggtcgctttcgacgtaccggctatgagtggaatggaactgcataacgcgacgcatgtgccggcgccgaagtggatggccgatcaagtgtgttcatgtgtttgatagcagctgttcaaagacataacgaatgtttggttggctatgcgaaagggaaagagagagattggctttaattaaggccatattcaacccaaagaacgcataatatcagtatagactttgtgaaactgcaaaacgttgggtaacggggcctcgacgtcaacaccatatatggctaaccggtcactgccacatctccgcgaaaaactaacagggtcgtatggaagggaggatgccactgccacatctccgcgaaaaaggaggcagcaagcgcagcaataggaccaatgagaaagcagcaagcacgcaacaccatatatggctaactggtcactgcgcactgcgctatgcgaaccacatagaaacacaacaacagtactgctagctagatgtgcaaaacccatcagtaaggaaggctaacactt

SEQ ID NO: 138053 - DNA, 422 bp, Zea Mays
tgccatctttagactcgactggtagctgttattataagagaactccgccaatgaaagacacttgtcctgatcctttccatagtgtagcacacatgccctcaacatgtcttccaaaatctgattcaccctttctatttgaccatctgtttgaggatggtatgctgagcttcttattacatgggtcctaagtaatttttggagctgctcccaaaagcgtgccacaaacagtgctcccctgtcagacacaatggtcttcggaattctttgcaaacgcactatttgatcaacatagatttctgcatatttctctgtcttgtgggtggtatgcactggcaagaaatgagctgtcttggtcaacctatccacaatgacccagatggaatcatggtgccgggaggtattgggcaatcccacgataaaat

SEQ ID NO: 138054 - DNA, 650 bp, Zea Mays
taccgtcgttttatcaaaggattctccagcatagcaagacctatgaccgagctcctcaagaaagacaataagtttgtgtggaccccgaagtgtgaagaaagcttccaaatcataaagaagaagctcacaaccgtactcgtttaccagacatccatcaggatttcgtcgtcttttgtgatgctttaaggcaaggcttagggtgtgtacttatgcaaaacgagaaagtcatcgcatatgcatcgcgcttactcaagccgcatgagcagaattatcccacccacgatttggaattggcagccatagtgcatgccctaaaaatatggaggcactacctaattgggaacaaatgtcacatcttcatcgatcacaagagtctgaagtatatcttcactcagccagacctcaacctccgtcagcgaagatggctggaattgatcaaagattatgaccttgagatccactaccaccccgggaaggccaacgtggtagcagacaccctcatccaaaaacctttcgggaagaaagggaccaactttttagaagattggaagaaagcatcagctcagcttaatgcatgtctgggagacaacggcagcctagaagtcaagccaatgctagaagacctcatatgcaaggctcaacgcttggac

SEQ ID NO: 138055 - DNA, 722 bp, Zea Mays
gctggagttgcactgcatgattgcatctccatagcaacgagagagagaagcatttctctatagcttttacaatatactgacatgtcgtatatctaagtgtgcaacaaaagttattaagctagaaaagccaagatgttttataatttgagatgaaagggagtagaattgaagactttatttcattaacacataagatccaaatagcttcatgttttaacattaatagttgatatattagtaagtactccgtattgcaagaagaagaaaaaaaatgtaataaacagttaaaatataatattttatggcctcgtttcgtatttcgccatagtcctcaatttcctagagacaaccctgctttaagggctctccctacttctaagggccatgtttcctaagctacactccagtagaaaccctcaaaacaaggctcttaaagtcattctaacaaagaataacactcatgacccactagtcattctctttcctatcttctctttattgacaaacttagccatgctagagaggctatggcaatgacatttgtgtccaagaggggagtccgagagaggcgacgaacaagagcatctccaatgggaaggccatttgtggagcggcttagggaggagtttcgactacaggcatgttaagtgtgaggaggggaggttctttgacagggtctggctttgactaaaaccctctacgggataggtgctccgatgggg

SEQ ID NO: 138056 - DNA, 864 bp, Zea Mays
aacaccaaatacccacttatttttttttgaaagggacgggcaaaagatttgccggtccaatatattagagaaggagacaaacacttacaagacactcacgaagacgaacaagagaaaagggggggggggggagaaagcagaagagcaaaactcgactgactactgagactacaaatcctaagccactacactagagcgccaacaagctctctcactaaataagcgacctgatctgagttcttctgctgatttctgaagatcctgttgtttctttctaaccataagctccaccaaaagtagatcataagcccatcaaattttttcctagattgcctattacaaagacctcttagattcctccaccaatcatataacgactctgttgtctggtttcctcccagaaaagaacagtttccccatatcaatatttggctccacacctctctactgaaagggcaatctttgcataaatgggttaccgtctctaatgctgagttacaaagacagcaaactgggttgcattgccaatgtcttttctgaagattatcagcagtcaacactttattatgcaaaagagtccacgcaaaaaaacgacacttaggttcagtttttgctttccaaatggggtcaattttcattgtgcaataatttgctgtaaattggatcttataagcgttgcttgcactgtactcaccatcatctgtccatctccaagaaatggagtcttctaaatcgttgagctcgtgtgtactattgatggcctgccaaaggccgagcaattccttgaattcttctgcaccatcatagggagagcataattggatccaacggttgtttctcaaggcctggaaagttgaaatgttc

SEQ ID NO: 138057 - DNA, 1006 bp, Zea Mays
aaagccctcgacggaggcgcgtgagcgaaggcacgtgacatccaacgttgcatcgaggaagacgtcgacactgtcacgccccttgtcctcaaccgagctagtcaaagtctcatcgtggcaacactcttgctctgcaccatgccagagccctccaccaccaaaggatgtcgcatccatggcgaacttcgggggcttatggaatgcgtcgtagtctagcaggccgagagctctgcctctcagctctaagaactcgtctcaagtcatcaggcagggccctcttgcttcaaggggaagcctcaatgcaccctatgcctaccagagagagggcgcccacagtgtgtgatcgtctttgggacaaccgccagccctaggcaattcatgatcgtctcggcggacgcgtacgacatcacgagacattcggctaccaccctcggtggggcggccattacgacagcagggaggaccaaagcccctccctcgagccgccaataccttaggtctttagcaaggccatccacagagcatcattcccgtctcgatttagagccccgactactatcatcaagtattcgggggagacgaagctagagctttagcttgctgactatagacttgcctatcaacttgatggaatgaatgatgataacctcatcattcggaacctccctctctttctatctaactctaccagaccttggctcgagcaccttccatcggcacagatccatgactgggaagacctggtccagctctttggagggaacttccagggcacgtacattcgcccgggaaactcctgggacctctaaagctgctaacagaagcacgacgaaagcctctgcaattacatttgccagtttttgaaacaacgcaccgagctccccaacatcactgactccgacgtcattgggcattcctcgccgggacctcctatcgggatctggtcagcaagctaggtcgcaaaaccccgaccaaggccaatgaaatgatggacatcgccatgaag

SEQ ID NO: 138058 - DNA, 641 bp, Zea Mays
tcctcttgaggtgccctttttcttcctcttttgctctttccacttggatgactttgttggagaggtgagaaaagttgaggaagtcttggctggcgaggatggtcttaagctcgggtcttagtcctttcagaaaacgggtcatcttcctggactcggtgctgacatcgtcaggcgcgtaatgggccaactctgtgaacttgtgcacatactcactgactgatctcccgccttgagttagctcccggaattcatcctccttgagttgaactatcccatggggtacatggtgctcacgaaaggctgtttcgaattctgcccaggtagcatctctgacggcctcactgaaggtgtcccaccatgctaaagccattcctgaaagctgatgagcagccagttggacacgctgattttcggggcatccgatggcttctagcttcctcttgatcgtgcgaagccagtcatctgcatcgaggggattgctggaccccgcgaacgtgggaggcttgagtctcaaaaattctcccatcctgtcctgtggccttccaccacctgggcgctggttttccagacttctagtgaggacttcaatgagtcgggtttgattggctagaacttgggctaggtctagtggtagatccgga

SEQ ID NO: 138059 - DNA, 2025 bp, Zea Mays
aattaaattaatagctctgaagaaccaaacagtaatttggttggttattgcctaaatttggtaggatagacacccggagtcaaactcggggctcaccaatttgtcaatacctccctgagaaattggtttcagcatgtttcctggccagacagggtttagtacacctcaaccttcaattaaaaaaatggcatgggaagtatctcctctcccagtgatcaagttaaaaaaacttacagccatgacatgccccatgtgcaaccaaaacatcaaacaatgttttttttgaactttaaatacagcaggggagatccccacggtaaggattttattaacaaatgaaaagaacaccactgcacaaagagggagaggggaaaataggagccagggagctacaagtctacaactaagagaactgcacaagctgtacaagcagaaacaagaccaacaaagttaagctaggacagtaagaagggagaagaaactaggttttttagaggagccggtcagacaatgttgttgaccaaatttctaagacgtgctgcagatttcgacttacattaactccagagaagtgatatttccgacctccttaggtatggtcccgccaatcgaattccacataaaatcccttcaaaagaaataaatactcagcatctttgtgcatgtacgattaaataagtgggcagttcaaatgacaagctaaacttagctcagcaatcaatcaattgccagctgaaattaaatccactcacataattttcatttgagaaagctgaccaagctcaggagccaaaattccagatagattcaaacttaggagctgtctgcaatcaaatttgtgttatacacgtaaatgctttaatagctatggaattaactggcgggtggggtggggtgggcttttttgcggttgtaaattattctcttctttattgaaatgacatgttgctctcctatgcttttgagaggaaactggtggatggaagatgtggtcaagtgaaacaagtgcacagaatcacagtaattacatctgattgtaaaaatagctaacttcagtcataacagaatagtattaacacattatgttccaaacaaaatattgtctattttccaacaatgcaaatcaggaagagtataatgaatgctccaacatatttctgctttggagagagaatgtgtgatagcagttaataggtaatcaatttttatcttcccaaaaatgttggaaaaaagatccaggtgcaaacttttggcctactaaggcagtaaacaaatttataacaaaactaagttcaggtttagtcactcatcaccaaaagtaactcataaccaaatgttaaggtgtagtgtggaatataacaagcacttgattgacaaagagatcgcttatgctcatacaattcttttacatggaagtatccatcactgcctgttgcattgtaacagataacatgggaccaatttcccatgcatggatctcctcggttccagctgctaagatttccgtgtggatctatcaagctgcccctaatagccttgagggcatcaactgcagagcagatgaattagtttgagaataatgttgcaaagaaaaaattgaaggcatgaaaaacaattgtgataatataagtagtactgctgaattgtatacacctctccaccaaagtaaggggctaagggccatgtttacaaggtaaaagtgaaatgggcacaaatgacgattatgcagagatcaagtcgagtaatgggtatgcatgcaaagtgcagtgaataagaaggattttaccttcccatggtgcagtgatctgtgcagcggtcggttgcaaaagggtaaaaaataacgtgaggataatggagcacaggcagagcacttgtggctgtaacatattttgccccatttgtccagaatatatagatttcacacttgcaggatccctctgatagcagaatccattccctgttagggagcagtgaagtaggtgttagttgtacaaaaccaagatacataaagggcaccaagataca

SEQ ID NO: 138060 - DNA, 304 bp, Zea Mays
gtgaatgtgtccgacttcaaccgaagcgggaaggtccagagaaaatgggaaaaatcatccaaaatcaccagatagtatttataaccagaaagactgagtacaggggaggtccaaaggtcacaatgaaccagatcaaaagcctgctcagcccgagaagaagtagtaaatgggagacgagtatgtcggcctaactgacaagcatgacagagaccctcaaaatgtcccctactacaggaaggatcgagactactggtaatcttggtcatgacgtcgggtccaggatggccgagacgtcggtgccatg

SEQ ID NO: 138061 - DNA, 581 bp, Zea Mays
ccataccagcgtgggcccaaagcaacgggcgcacggcctatttaaccatgcgcggccggatcctatcgtgcccccactcacgcttgggcagcccatttcattttcttgtcgcgcggcccaaaccgggaattgggtgctgacaggtaggtccatatgggcggtctccaacttagagctgctccgcgggccccgttgactggagacttaatcgggcgcccgtgtggacgttgcgctcgcgcttgtttcgctgacttcgtgggaccgtcttgccagggccttctcctccgtgaagttcgtggttgttgcaaccagatcggcctagatcgccggagcgcaactctgctcggactttccccctttcatcttggcccataaatcgcgcgccttctcatcagttcgtcgataccgaaacacctgggagagagagccaccgcatgcgagttgtcgcccacaccattgtcatagaatgaagctcacgccgtcgccgaggatactggcgccggggaatcctcatatacgccgtcgttcgaggtccctattcatgctagggagcttcgcctcgaaacgtgggcggtgtccgc

SEQ ID NO: 138062 - DNA, 439 bp, Zea Mays
attttcactcagaaagagctgaatttgaggcatcgtcggtggcttgagttgataaaggattatgatctgtcaattcaatatcacatagggaaggcaaatgtggtggctgatgcacttagcaggactggtgtcccaaaagtgaccatgcctttgattgcagaactggatcgtatgggagttgctttgtgctatgttggcaccgctagagaggagactcagatgctcattccatcctcccttctggatagagtgtgtgtggcacaacagcaggatcgtttgttgcaggaagctcgaaagagggttggcaatggtaaacctcgagagttcaccattgatgagaatgatttggttcgtttcagaggtcgtctctgtgtgccacagaaatcagaggtgaagatggatatattgagagaagctcataaaacgccttacaccgttc

SEQ ID NO: 138063 - DNA, 536 bp, Zea Mays
atcatggtggggtacatcctcgccgaggcgttcctcgtttcggccgtgacgtcgctctgggcgttcctctcggtggccgcgctcggcgcggtcatactgttcgcggtgcgcccggtcgcgctcaaggtgatcgagcgcacgccgccgggcaagcccgtggacgagagctacgtcttcttcttcctcctcgtcgtgcttcttgtcggattctacagcgacgttatcgggaccaactcgttccacggcgcgctgatgctggggctggcgatccccgacggaccgccgctcggcaccgcgctgggggagaaaattgacgccatggtgtccggcctgattctgcctctgtactacgccatgaccggcctcagcaccgatgtgtggtccctgcattggggcaggctgcagctagtcgtgctcctcggatggtttggcaagatgatcggcgtcatggtgccgtcgctgtaccttgagatccccctccgggacgccgtgtccctcagcttgttcatgagctccaagggcatcgtcgaggtcat

SEQ ID NO: 138064 - DNA, 310 bp, Zea Mays
gcagggcattgcggttgatcccaagaatgtcgcggttgtggtggagtggaagagaccctctagtgtctctgaaatccgaagcttcttggggctcgccggatattattgacgcttcgtaccaaatttttccagcattgctaagcctttgactagacttttggagaagggtgttctgttcgtctggtccagcgattgcgaggtcagctatcagacattgaagaacaagttggtgagcgcccctatcctagctttgcctgagagtggtaagcgtttcacagtttttacggatgcttctcgaattggtcttggc

SEQ ID NO: 138065 - DNA, 616 bp, Zea Mays
ctccctccccacccgtggcctgcctgctaccagtacaaatacccgtgcctgcgcgcatccccctggttcattctccagctagcccgggctcaggagccagtatcccaacaagctgcaggtgcagctatataaaaagcgagcagctcggacatacccgcaccaaaaggacccaacgaagtccagccagctgagctgagcctcgtgaaccagagcatttgctccttcctcgtcctcctcgatcgacctctctccttggtgccgctgccgccatatatgaactgctagcacgcgcagcagccagcagctgccgaccggcctataatcagaaggccagaaaggatcgatggagaccatcaagtgctgcatcgcgtgcatcctgccgtgcggggcgctggacgtggtgcggatcgtgcactccaacggacgcgtggaggagatcagcgggggccccgtgctggccggggagatcatgaaggcgtaccccaagcacgtcctccggaagccgccgtccacgtgcccggccgacggcggcatcgtcgtgcagaagcccgtcatcctgccgcacaatgccgagctgcagaagggcaagatctacttcctcatgccggtcatggcc

SEQ ID NO: 138066 - DNA, 276 bp, Zea Mays
gtccaatgggggaagggtgtctctcccttttaaagtagcttcctcctcccaagttaagtgaggtgggacaattctgaggctcacactgtcaccgtccgactacaattggaccaacttggccaattgcgactttgccaacgggtaatagtggaggatgtcctcatcattcccaccttcttaaaatgggccctagcttcggataccagatgatacacccagcccaggtggggttggccgaggcccaacaaattagggttgcccggagcccaacagttc

SEQ ID NO: 138067 - DNA, 536 bp, Zea Mays
ctctctctttgcatcatatttttttttgtttctcccaaattctgtgtttaaaactaaaacattaactattttgggatgaagtgcgtaagattcgagaagtagcgtttaatttggtggtcattagtttctattggaagttggaacatactttctccgatcttttttatttatcgtaaatgaactagcggacgacgaatattcgaaaatagaggtaatacacatttattatacgcgcacgttgacaacaaacaattcatcataattaataaatgcaagtgcacttagcttcaagacggatctgtacaaggacactcatcatcacagtaccaagctggccctggtcctggtcctggtcctggtcctagactcctagttcctagtcttgcagccatgaatgaattcgatcaagcatcctgttctagcatagcctcgtcatcagctagcttttcatgccaaaaatcatcctagctcccccgaactgactcgcgtgcgctgctggcggaatcaatgcgcattgactgctgcttctggccggt

SEQ ID NO: 138068 - DNA, 478 bp, Zea Mays
gctgcacggtacctttcgtgaggctcacacatgattggttgccccgctatcgaggtacataaggctatcgtcgggctccatctcaccattgagctgcgcaaagacttctcccccaacgacgcgtaagggccgctcggacggagatagagttagagaggcttgtggtgacggcgacgcattggggaagacaacgacttaggcaattagtgatgtgagcttcgagtcttcttccgcttgcgcgacatgggcctcgcctttaggcttgccaacacttgcagtggtcccggttgggatcctgtccaccgtcaaactagcccttgttgtaagtgttgcgcgatgcggagacaaactctcgcctttgtcgtgcccactactcatgtcgtctctctccttagacttacagagcttgagccgacgagtcaatcatcttcacacataagcacttggtccttgttgtcgatgacgaatgtcggcttgc

SEQ ID NO: 138069 - DNA, 662 bp, Zea Mays
ttggacccttcaagaaagctcaaagaggatacactcatgtactggttgctatcgacaaattcactaaatggataaagtacaagcccatcgcttctctaacttcagctaaggcagtggaattcatacaagatataatattcaggttcggaataccgaatagcatcataactgacctaggatccaatttcactagttcagagttctttgatttctgcaaacaaaaaagcatccagatcaaatatgcatcagtggcacacccaagagccaacgggcaggtagaaagagccaacggaatgatattggaagcactcagaaagaaagtctttgacaagaatgaaaagttcgcaggaaagtggatcagagagttgtcgtatgtggtctggagcctaagaactcaacctagccgagctttgcatggaaacactcccttctttatggtctatggttcggaggcagtgctacctgctgatctcaagtttggggcaccaagattgatcttcgaaaacatagctaaagctgaggccactagactagaggatgttgatatactagaagaagaacgattgaataaagtgatttagtcagccaggtaccagcaaactctgaggcgctatcatgataaggccatacgacatcgatccttcgcagtgggagatcttgtc

SEQ ID NO: 138070 - DNA, 335 bp, Zea Mays
gtgggagacttcacctacaaaggagggatcataatgtacaaggaccgggtgtggctgggtgcaaaccaatctatgcaacataaagtgatggctgcattacatgacagcgcagtgggtggtcactcgggatttccagttacatacagacgcataaaggctcatttcagctggccaggaatgaaacaagcagtgatgacctttgtccaaacctgcctaatctgccagcaggccaaagcggaaagaggtcgctatcctggtttattgatgccattacctataccagagcaggcatggcaggtagtaagtctggattttatatctggtttacctatttc

SEQ ID NO: 138071 - DNA, 440 bp, Zea Mays
gttttaaagaggtaaggagggttctggaccgcccgattagagattcacggcccagatcggccccggccgaaggggtatcctatttctaatcgtagccgtccatgcgatgatcaacggtcgcggaagcatcgtctcctacccagcccgagccacccaactggcctcagcgcacggcggcggagtcaccggagtccatgaatccgaccaacccgagcgccagactcaaattcgttcggccctcgcgaaattgacgacgcccagagcctgattcacccatcaattgctactgccatccatcgtaggacctggcccacagtgcaccgcgccagcatcacccgctaccccgaattgacacacgagccatggctaattgagtgcaatacgactgacaaaccaaggaattaacggtgtttctcatacctaattgcgcagcagaggtt

SEQ ID NO: 138072 - DNA, 773 bp, Zea Mays
gtcaaatgttggtgctccagtggcgtactcggcctggaacttgcctcctcccaaagcctgcacccttttcgtatcgaatccacccattactgatggcaatttgggccttagagtgcgaccctctgctgaagaagtcagtgctttggttgcttcgcttggggagattcctgatgacgaacggcaggttcattttgaggtgcctctgaatcctagtgatgctgatataagtgctatgcttgatttgctagctgaagattcttctgatgctgctcctgctggggcgttggcagtggtgcccctctcagaggttgatacgactctggatgctcaaaaacctattagtactcgcccgaggcgcccttcccgagccaatcagcctgatccttctgctgacgagcagaagaagaaaaggagacgcatccggtgagtatccagctttgatcaggacgctggtacctcggttcctgctactgaagaaatgcctgcgactggacttattgatgctgaccccaatgggtgtcccccatctgctgttgatcccatagtggatgccccatctgctgttgatcccaatgggggtgctccacctgttgctgatcctaatgggggtgctgcttgtgttgccaatgtggatgatgaggaggaagaaaatgaagctcctttgactcggaaaaacagtcggcaattcatcgccagcggtggaagtagtggagttccctctcctgctttgtctgccctcattggtctgcaagaactgtccctagccaactttg

SEQ ID NO: 138073 - DNA, 272 bp, Zea Mays
ctgaggcgttcattttactgcagactagtcctgaattctgagatgaacttgaacttgttacatattgggcctccaatttgacttggatgtccttgttggcctcctaaggaagtggccacgggtgagggtgtccaagggcttccttgttgtgttctccatctccttgaggcatgttccaatttagaccagggtcctagggtgaatatcaggctcacaacaacgacatagttttttcggcagaaacgacgtcaaattaccatgattgtttggag

SEQ ID NO: 138074 - DNA, 377 bp, Zea Mays
gcttcggcttctgttatgctttcgaagatcaaccttggcgccctgaactcgagatctgcgggtaacactgcctccgacccatagaccatgaagaaaggagtgtttccatgcagagcttggctaggctgggttcttaggcttcaaacgacgtagggcaattcccttatccacttccctgcgaacttttcattcttatcgaagacctttttcctgagtgcctccaatatcatcccgttagctcgttcaacctgcccgttggctcttgggtgtgctacagaagcatacttgatctgaatgcttttttgctcgcagaaatcgaagaactctaaacttgtgaagttggatcctaggtcagttatgatgctgtttggtatccc

SEQ ID NO: 138075 - DNA, 371 bp, Zea Mays
cgggtgaggaagtacctgaggagataacaatattagctaaggagcctaacatggttgcacattcttacgacagttatactataaatgggataaatttccatacacattcttatgatgtgggtaggtcagtgcagtgtagtggtgtagccctagttgcacatgcaacaattttagatgggacaaacaacaataacccaatatcaatgagcaaaacttattatggtgttataaaagacattcttgagctgaactaccatcaccaaggaaaattagtattgttcaaatgtgattggattgataaccgagtacgagacaaatgggtcaaaatagataattttggggtgacaatggtcaacttcaagcatttattc

SEQ ID NO: 138076 - DNA, 319 bp, Zea Mays
ccctaatacgtttgtcacccaaaggttctcatcacttccgttttgttttttgaagctctttctttcattttcttcttcaagaatgtaaagctgacagcagaactttagatgcagctaggaactcgtctccgtctgaaagtttttactactagtttcagaaactttcaggacacttgtcaacgtatgtcaatctagcaaggactctgttgccccaataaataaaccacaaatccacaatcacaaaagcatctatgattttgtccttgtggcatttgcaaaataaaagacgcgacatcctcttgcattgctaactatccac

SEQ ID NO: 138077 - DNA, 376 bp, Zea Mays
caggtatgcagtgaggtacacgactgtggggtcatcctcaagcagatgcttcccttccaatgcacgcaccctggccatccaaactggacggtctctctgaaagggcggaaagaatctgagcggggtgtcggccacttcttcttcatagatctgacacaaggccctcaatgccttgcgagcgatgacttggcaggtgtctttgaatctgtgcccagcagcagtgacactccattccacatggtgcggactggatccaatgtatatagtcacgacacacttctttatccatgctcgacgaattcacgaccatcatactctggctgactcctgattccgaggcaaactatgcatgctctcagtaacttggggaaaccat

SEQ ID NO: 138078 - DNA, 343 bp, Zea Mays
ggggctttcgatgttatcttgggtatggattggttatctcagtatcatgcagttatatcctgtttttggaagacagtgttattgcaggcgccatcgggtaggaagttccccaaatttcatgttatccttgttggcgcaattgcttccggatcgccggtcaaggaagtcaggaatctttttctccatggtggtggagggtgaggctgccttgcgggtgcaagacattcgggtggtgtgtgactttgccgacgtgtttccggcagagcttccaggcgttcctctggagcgcgatgcagcttttgaaatcaagctgattccgggtacgcagcctattcataaggca

SEQ ID NO: 138079 - DNA, 278 bp, Zea Mays
cgacatggcgttcagtcgctcggcagttatctttaaaaactctgacatcatctacaagtcactcggcaactacttctaaaagcatcgatatgatgtccgagttattcacttactattccaaaggaattaacttcacgaaaaaggcgggaaaaggaatgattcaagaactttgagttaagagtatcaacgagcaatcatcacagaaaagccaacaccatttcttcattaaagggaagatatcatatttacaaatcaactcattatgagttgatacttcc

SEQ ID NO: 138080 - DNA, 883 bp, Zea Mays
atttgatctaaaaatcatgaatttatttttattaaatactacaggaaattagggttctaagaaaattggtctcatatttttaggatttttctgtaattttctacatcttttcaaagttctgctgaaaaagaaaaagaaaaagattaagaggaactgggccggattcagcccagcggcccaagaccagggaggaaagcgcccgcgcgcactggcatttttgcagaagggtcctctggtttttagctaaccataactgggttctatcactatttcactgagtctctgacatactatagaaaacccctccaagttctaatccttcactgtgctgagtccacgacggcgtcgagcgcggccgaagtccggcgagctcctagaccggcgggatagggcaacgactagggttcccgagcgacggacacggaattggactcatcccaaacctttcccccaacttaatttcactaatgatcaacagggttgtgctggccacggtgaccgtgaaggttgcggatggatggggatgttcctggcgatgggtgggcttctagtgtaattggacggtttggtgagcatcaagggcacatgaggacgctagaacaagaaacagagggacacgagctaaccggaattgagctggccgcagcgagctgttcttcacggcggcgggaactaatttggggcgaattcaaaattcgcggattctagcgaatggatgcggctgattcgtggtggctggatagtttactgccctacggagattgtggcgcactcaatttatagatcccatcgacggtggtgtccaatttcgcaaggtcgtgctggcggccggagatgaggaaggactctggcgccacggtttcgtgtccactgccgtggcggg

SEQ ID NO: 138081 - DNA, 426 bp, Zea Mays
ttaaaaccgcgctccaaggtcgatgaggcacgagatgctgcttgggataactctaacatgacagcaggcacatcagcacaaacttccatcgttccatcatctgccggctctgacaacagatctttagggaccatatcttcgagattctgatcaaaatttgccagatacaattcttgtagaccaacgagagcagacaaagctggagaaggaataccactactctccccactggctatatagcaccgactgttctttcgaattaaggggatttcttcctcctcctcatcttcatcaatattatagacagtacacccattggggtcagcatcatcaaggttacacccattggggtcagcatcatcaaggttacacccattggggtcagcatcatcaaggttacacccattggggtcagcatcgtcaagg

SEQ ID NO: 138082 - DNA, 592 bp, Zea Mays
gcctcaccccgctcctgtgcaggatacctgacccttgggagccgttgaacagagccctgaaagaggtcgtaccgaacaggatggagatccactcacgccagcgtggcccaaatcccatgtcctgtaggacttctaggagatatccccagttcacagagtcgaaggccttctggatgtcgagcttcaggaagagcgccgactttttttgcttatgtagcctcctgaccacgttttgaacatacaagaagttgtcttgaatgcaccttttcctaatgaatgtagacagggatttggaggctaaattgttcaggaagggggccagccgattagcaagtaatttggagaagatttttgctatgctatggatcaagctaatagggcggtagtctcccactgacttagcatctggcttctttggaatgagcacgatattcgcagagttcaggaacttgaattcagctccattcatggcatggagttggtcaaggcctccaacacatccaccttgatgatgtcccagcactccttgaagaaaattcctgtaaaaccgtctggccctggggccttatcgcttgcatggagaagatggttt

SEQ ID NO: 138083 - DNA, 563 bp, Zea Mays
cacgattgagcggtgtggattagattgagacttcattaacgtggtgtgatctagcagcccttggatcagggatccacggtcagaggactaacgtgtccccaaaaccgtctgatatgaattgaatggcccgatccccatcttccagctcctgacctaatcctagccgttccttagactatcgacggtcctagcaccttctcttcccctggccacgcatcgcggtggcactcaacagcccgcacggtcgcgcccgccggcggtcatcgtgcccggcgccctattttcctaccgaaagcgagcaacgcgaagagaagacggaggcagacctagctgtaggttccttaccgcggattcgggcgcggagacgaacgcccacgatggaacgcaactcgcgacagacgccacagctccggtgagccattgcccgagttctgaccggccgttcatcaaattgtcggtcgggatagcttccccgtgcccagtcaaagctccgcctctattccctggattccggccgtcgacagaggcgaggaacggcgacagcggtggcctaccgcactccc

SEQ ID NO: 138084 - DNA, 866 bp, Zea Mays
ctgcctgttctgtctctatctgatcagcggttatcagcgaagacttcgagcgaggggtggcgcctttgccttcgccccaacacctgtgttgttatgatagtcttgattaggttgtgttatgtgttctccttgccatgctgtctaggaggtacggtaactatttaatacatttttcctctaaccaataaaaaaatgttgtctgtcctgctcatgaaaagacccccttccgcaaataatctagttgttcccgagtaaagcccttaaaaaaatcaaatcacgtgcttgttttggtgtttctagccttgagtgttttatccttgaagttacacctgcacagcttatagacccccacagcttgaccgctagaccaacccaagtctccttgtgcacttgtgtcaaaaaatatatatttgttgttggtgtctagtcgcgcaaaccctatcaaggccatgtttctttccataaatccttgtcctaaaacatcatagcatttctgttaatcatcctagctgatcttgtttgcctacctctccttttgcctggatctggtaatcctctttcttgtgaatcatgttgtggctttatcatccatcaaatctctagatcattcatcgagatctaccttgtcgtcttgtaatctgctccaaccgattctccagtacagggtgtcgatcaatctaatctctcatttctagtctttccgatgctctttctctaggcatcatgacctcgtttttgttaaccttatctttaaatggcatatccatgtggattaatggattcttctgttgtccttggatctcttgtgtctctaaaagctcgacaatctattttgatcttatggttggttcatcctcatatcaaat

SEQ ID NO: 138085 - DNA, 541 bp, Zea Mays
cgagcatgcagtgattgttcttttgcaaaatagattagaccctgtccgtgaacgatcatcttgcattgtattcttgtccaacaatcgtaggaccctgtcacccatctctacacatcgccaacttgcctaaacgacgaggggcccaagtacgacctcgagctatccaagaaagagcacacgaagcatgggttctgggggcttctggctcagaaagccaaggtcatgctcgacgagaatggcaccccacgcattcaggtaacaactctgaaaccaaaaggagaaggaagagccatcatcaggcgcgttgacgtgatccttttgtcagttctaatatccatggaaatttccagacctctgaatctcgctggtcctacgatcgggtccgaagctcggagagccagagccccacggcacggagaggaacgctggaaggcaggctagacatcggagggaagatcaaggacgttcttgaggtgggttcaccgatactttccactgcttcaggctctctgcgcgcgcaccacatctgctaataaatttt

SEQ ID NO: 138086 - DNA, 630 bp, Zea Mays
taataattcaagatgaagggaaccttttggaatgcaaacgggtttagagaccctgcgaaacacagatttgtgtcggatttaaccaaacagcataatctcagttttatagctatttctgaaacctgtagaagggattttactgaccccttcctgaaaaacctgagtgcggggaagaatttcctatggcacgtcaaggaacctaatggaaggtcaggtggaatcctaatgggtattgatgtacaggtttttgatattggggctattgaggagggggatttttttgtcaaattccacctaattaataagggggataattttaaatgggctcttgtgtgtgtttatggtccggcgcaggaggaccgcaaaggacggttcttgacggagttggccaacttgggagcaagggaaagattgcccattcttattgggggggattttaatatcctaaggaacccaaaagaaaagaataactccaactttaatcctagatggccgtttctgtttaatgccgtcattgagggcctgaacctccgcgagctggaaataacgggtcggcagtttacctgggcgaatgctttggctaatccgacttttgaaaagctggaccgtattcttatgtccacggattgg

SEQ ID NO: 138087 - DNA, 469 bp, Zea Mays
gttcggttgtgtggacggaggagtcttcggatgaggacttagattattttgcggccttagatgtggctgcggcggaggcttctccgtgtgtgatggatgctaaagttcttcctggtacgagtgctgggcgtaggcggcgaagggcggtggcgaagcgtagagtgagtgaggtggagagtggtcgtcttcgtgtggacggggctggcaagcaggaattgttgtcctcgccggttggggcgagtgtgggtgagggggagttgcaaaatctttttgagggtgaggagctgaggataatgctgtttaactacagggagatgggtatcatcccaaaggttgaaccaatgtaaggtgtgatgccctcgctgtatgtatgtaactataatttgtatgatgaggctatgtgccttcgctgatccggccgtgcccgtaggggacttgtgcacttgatctagggcgtttattgtgtcgg

SEQ ID NO: 138088 - DNA, 799 bp, Zea Mays
aagagtcttcggatgagggcttggattactttgcggccttggatgtggctgcggtggaggcttctccgcgtgttacggatgctgaagtttttcctggtccgagtgttgggcgtaggcggcgaagggcggtggagaagcgtagagtgagtgaattggatggtggtcggcttcgtgtgggcagggctggcaagcgggaattgttgtcctcgccggttggggcgagtataggtgagggggagttgcgaagtctttttaagggtgaggagctgaggataatgctatttaactatagggagatgggaatcatttcgaaggttgaaccaatgtaaggtgtgatgccctcgctgtacgtgtgtaactatagtttgtatgatgaggctgtgtgccttcgcgcatccggctatgttcataggacgttgcgcacttggtctagcacgtttattatgtcggtccggctgcgcctgtagtcggtcttagcgtggacagtttctcgatgtaaacttctgcactgatgtaatgcgcctttgattttttgcactcgttgtgctagtccggctgcacccttaggtgacttttgcacggatggtcttttgaagaagacttcgattttgcgcacttgttgtgctagtccggctgcacccttaggcgacttttgcacggatagtcttttgaagaagactttgattttgcgctcttgttgtgctagtccggctgcacccttaggcgacttttgcacggatagtcttttgaagaagacttcgattttgcgcactggttgtgctagttcggctgcaccctt

SEQ ID NO: 138089 - DNA, 443 bp, Zea Mays
gccaaccaggtgagttaagcgtagccaaacgagaccacccaaacaatcgtcagaccatttacgatctcctgcacaaacgtttatgatggttacattcccgttttacgcaaactaacacaactcagcgcgacttatggtccacggctccacgcccacgtttccgccccagtccgcacaccatggcccaccagtcgatcaacggagtctgcatcctggccagaccccaccgcatgccccaaacctaaccactcgcccgaacatctagcaaccctaattgatttcctcgtcgctctcgccgtcgtgtgctcccacaatcgccatctccaagcgccccccgcccctgcccacaccgccgtcttcgtgcgtggcgtctcgatcccccaacatcgtcgcacggtattgcctcatccatctgccatttctcgtcttcgtgcactcttctg

SEQ ID NO: 138090 - DNA, 307 bp, Zea Mays
aacataaaaccgccttcaagactcaccatgactattttcagttccaggtcatgccattcggtttgaccaatgcccccaccacatttcagtgtctaatgaactctgttcggaagtttgtgctagtcttcttggataacatcttgatttatagtccaacgatggagcaacacattagccacctctagcaagtattttcccaactcagagcaccagttatatatgaaaaggagtaagtgtaccaatcctctttgcattatctcagccacatcatttcccaggagggggttgctactgatccttccaaaac

SEQ ID NO: 138091 - DNA, 472 bp, Zea Mays
gcatcctgtagggatattgtgcatagaatataggtgctcctcacatctagttgaacgcatatggtggaggtgaatatttaaatgcataaggagggataaattgacgggtatataggtgcgtaattagatggaggcgtccatggtggtgttgattgtgtgtttggaaccaactgtacgatatctcgagtcgacttattcggcctcacctcttgtgatgagtttgtctattttgcctgcctttttagtggaggagaatgaggttactttattggccggttgcgatgaatgactttttaattgacatatttagctggtaattgattaaaggtaggaccgactttgattagccgaccaaatgccttagatgtgttttttcatgtacatattttgagtcgttggggcttgaaggtacatggtcgtggttgtgggcgtctctggtctcctgtataatttggattttgccccaggaaga

SEQ ID NO: 138092 - DNA, 336 bp, Zea Mays
ggcagtagtcatcagcgccaacgcgggtaggagtacaggcacgtcatccccattggttcaacccagacggtgcatgcatcgacgactggaacttgggttcccgggatccttcgacgacgaggcttgttcccccacgatgcgcgatatcctctctctcccaacatcacgcatagacctgctcgagctacggaaggaaaggaacgtgggtggactacgtatcaagtctgatacgaagcaacccaggaaggataggatgtgggcgtatatgaaggcctgggatctccgtgaaaattggtcagcgttgagccaggataactgcccagagatgtttagcgg

SEQ ID NO: 138093 - DNA, 666 bp, Zea Mays
cctcattttctggaaagttcaggggttctggcacaagtttaccgagacttagagaatagggttctctggatggcgggttgatatcctgaaagcagaggggctctttagcaatgttgacccgattagattggctcaaccatatagggttacttctctcaatgaccattgatcaccaaatcaacggacagggtcctaaacgatctaagccacacaatcctaaaccgaggactctgattttataacgcgaagaggtattcttcgttttaatctcgaccgtctatttcctaatgtacggacgcctggtgtcttcaaccacaggccgtccaagcatggacgccgcgccctcctggcactctctctctcgttggtcaaccgaaaaggggggtacgtcggcacaggtggaaagcttaccggaatctagacaagccggctgtcaacgtcgcgtgcagagctgaccacagaagatcggggcaaccaagcgcctagattcgccggggttgatgcgtcggtttccaacacggtgatgtttcagccgaccaccgccacaggggagacaccgcggaacgcttctccgcctaactccacccaaagccgtacacaccgggaaaatacaagcgcatagcagacggcctgccgacacccacaccgtggcaacctatgctctcg

SEQ ID NO: 138094 - DNA, 513 bp, Zea Mays
tcatcacacgtgacatcgacttaaccgcagaggaagcgatgactacttcggcatgtcactacctctctacagtccaatcaatattaactacatcgatcgaacctcatattgcgcaactcttataatttactatctcaaatacaaccatagcacgacatgcacttgagactctttgttcaagttaacgcaatcacaactaccatacacatgcgtaccactttttcccccacgtacttttaatctatgctaaaaccatactcgtgcacataccaacttacaaacccatgcacaacgacaaaactgacgaccatctcactacaacatctaacaagagctgtgaatccttaacatgttcacacccgactttttctataattgtcgcggctcctcggcaccagcaatagcataaaaatccccacgatcgctaagtatctcatcaaaagcttcgacctcttcgcctatccactagataaccccatcgggatcaccataaataaatttctgctccaaaga

SEQ ID NO: 138095 - DNA, 286 bp, Zea Mays
tgctgaaggaaagaggtctgaccgccgaagctgtggtcgctgattttgtttttaagaacatccagcccctgaaggacagatcaaatgttggtgctcctgttgcctactctgcttggaatctgccacctcctaagtcctttttcaatttcgtgtccaatcctcttgctggtgatagtggtctgggtcttagagtgcgaccctctcccgaagatattgaggtcttggttgcttctctttgtgatcttcccaatgatgagaggcaagttcaatttgagatgccagcgag

SEQ ID NO: 138096 - DNA, 393 bp, Zea Mays
gagcaagcacatccggctgagataccatttcatccgagactgcttggcagaagggagcatcaaggcgcgctacatcaacaccaaggatcagcttgcagacctgctcaccaagccccttgggaagatcaaatttgttgagctttgctccaggtccgggatggcccaactttcccacaagacgacgcccaagacttagggggagaatgatggaataagtcttgagcatctagaggacagcagtcgcttttgactgtcctttgtagtcctttagcatctagaggacagtttgactgccctctgtagtctctttagcatctagaggacagcagtcgttttttgactgtcctctgtagtctctttagcatctagaggacaatcctgttgtgtagtgtg

SEQ ID NO: 138097 - DNA, 450 bp, Zea Mays
tctacagtcacgtttacgtggtgttatggcgcttcgtcgacaccggaactacatcttagatctgcgcatcaaagctcacgtcctagatctgcctgtgtagtgtagatcactgcatgcagcattacaggaccccgagcgagagcggcagagcatcggcgcgcacgcgaaacgcaaaggagcgagcaagacggcaacagaaatttgagacatgtatacacagccacacaggtgaagatgatcgcacacagcatttctgccgcgctggctcatcatccttcccgcctcaccgtactgtcttgtctgtctatatcctaatcctatcctataataagatgtgctggggtgggggacgcatctgtgatctcatctggatttctctattcctccgcttcgtgcaggccgcccagctacagggacggcccgaggacggcgaccacctcgcggagcgcg

SEQ ID NO: 138098 - DNA, 725 bp, Zea Mays
cccgccggtgaggactttgcagcaacaaggccgacgacggcagcaaggaggcgcacactttgggagtgagggacaggcggcggtagttgtagatcttggacgaggccgacggccgccgaccaggttgtgcaactcggtggagccgtggagggatggaggcagcaccagcgaaggagcggtcaccaaatatggagcaacgtccggttggaggtggaggagacgacggagatcgacgaagaggcctagtggcagtggggacagtggaggtacgcgttgagggcaaggaagaaagcacaagcggtgaatactgaagagacaggcgccgatggcaaggaaagaagaaggcctaagtgccagggagggaagcacatgcaccggggaagaaagagcacaccagtacaaaagagattaacgacggtttcggttacgcgccgagtgataaacagtaggactcggcttaataaaccactagcgaaaaccaattttcacggctagttctcttaacgtaaccatgagtgaaaataactcactttcactgacggttgtattaacaaaactgtcagtgaactttgtattataaatatcatttcgtcctcaccgacaggagctgtatctcacaaccaacttatatttaagatgattttggaggtccaaatttcacaaaatacaaaggagaggttttgaattttggatatagggtttcacccattcatccttccagacag

SEQ ID NO: 138099 - DNA, 525 bp, Zea Mays
ctcagtattctcctaggccctgcgcgataggagcagagctaacttagttctgcttgcagctgtactgcaaaatggaagggaccgtagtcagttctcagatcatctctgcgctgaatgtgatgtatgggtttgatttgagttcgttagtccgaaattgtgaggagagcacgaataatttgccgcttcagagctcgaggtagcatagacaaggtgcatggcaagttccttttgggctctggaggaatcttggccaacaactgttttgctttcccatggtaatcttcaattacaaatggggttcttgaactagctagagagaatttctttagggtatgcacattcttggtttcagccaatatcactgtaggaatttgtgttttgacaaattttgtgaagattgatgttgaactgcttaaacatttcagcaccatatggcattcgaattacttgttttgttaggctgggaaacaagaaaaggccaatagggtaaagcaaatgaatatgtataaaaagtggccttgggct

SEQ ID NO: 138100 - DNA, 996 bp, Zea Mays
gcatggttttctacccttgatctgcgagcagggttccatcaaattcgtttggcacctcatgatcagcacaaaacagccttccaaacccaccacggccattttgaattcaaggtcatggcctttggcctctccggagcaccggctacctttcaaggagcaatgaatcgcaccttggcaccattactcagatcctgtgtgttagttttcttcgatgatatcctggtatacagtactacctgggaggatcacttacatcgcctagagctggtgttgaatctgctcgcacaggatcgttggcagatcaaactttcaaagtgttcctttgccagacagcaaatttcatacttggggcatgttatctcccatcaaggggttgctactgatcctgccaaaattgatgctgtcacgtcgtggcccctccctactaactgtaaagaactaaggggattcttgggcctggcggggtactatcgcaagtttgtgcgccactccaagccacttactaccctattgaagaaacatgtattgtttgtctggaccagcgagcacgatcaagcatttcaggcattaaagtcagctctttcttctgcgccggttttggctttacccgactttaccaaaccatttgccatggaaacagatgcttccggcactggcataggagctgtgcttacacaggagggccaccccttagcatttgtcagtcgcgcactgggtgtcaagaatcagggactttccacttatgagaaagaatatctcgctatcctcttagccgtcgatcaatggcggccatacctgcaacatgctgagttcatcatttatacggatcagcgcagtttgtcacacttgactgagcagcggctgcatacaccttggcaacagcgagtcttcaccaaattactgggcctccaatacaagatcgtgtttaaaaaaggcgtcgaaaatggggctgcagacgcattgtctcgacgccctcctgttggcttagaagttttc

SEQ ID NO: 138101 - DNA, 873 bp, Zea Mays
aagggcccgactcccaaaggcagggaacgaagtcagaggagaaccgaaggaagtaaacttgctaggacaaaaaaatccacgtgtccccggcccttacagaaatgacagcatagagtcttagagcccggtagcccagcaggcccgcgagcacgcacgggacgccattgcaggttgcagggacgagaccgaccggagttcaaaatttgaaatttagaacggttagagggtctgccaccaatagcaacaccagaacgattagggtccaagaactgagggagaccagttcttccattagaagcggaaagccacggtcccgaatcctgcgggcgaagacggttgaacacggagaccctcgggagaggccgaggcaaagcctgcgggcgccagctgttaagagcctgggcacaattagtggaaggacggcccaaacgattgaaaaccgaagaaccagcccgagcagcgtgctgaacaccaccaggcgacctggcaaggctccgaatcggaacaacattggcaccggtgagagggagtttaaccacgtccgcatatgaaagagaattcctgacccggaccttcgaccaggaggcagcttcctccgccaaaaaaagcctgaattcatgcttccaattaggtccaccacgattccagaggttgaagaaggccctgaactccttacgctcaatggaacccaagttataaatgtgaaaacccaccgccatcgaggaaaccgaaaaccgaaaaacgcggtcagccagctgaagcacttcgaaattctcggcgagcccaccaagagcagcctggagaagatgaccgaccgagaccgaattcaacttgaagatgcatctgccaaaggaaaccaccagccagaagggc

SEQ ID NO: 138102 - DNA, 278 bp, Zea Mays
ccgccttccaaggtcgacgatgcacgagacgctgcccgagatacctctaatcccacatctggaatgtcagagcagatgtccatcatatcaccatcagttggctcggacaacagatcttcaggaacaacatcctcaagagcctgatcaaaattcgctagggataattcttgcagaccaataagagcagacagagctggagaaggaatatcgctactccccccactgactctgtaacgtcgactgttcttccgaattaatgggacttcctcttcttcttc

SEQ ID NO: 138103 - DNA, 402 bp, Zea Mays
ccttggactaccccatatttaatgacagatcacattaaaatacgcctggcaccaagccatggcagagagtcggtcctccttccacccatggcctgtgaacctaggctagagccccacttgtgacctgcaagttgtagacatgtggctcactcatagcctaccaagccctagcctgagtcccctaacgatatatggaacccacaacacgacggggatcaccaaggctcaggctacgaaggccatgggttggcatggagcaggaggagttaagatgatgcttaggccctgtcgcccatacttgtcatctagactggcttaaaggaacatgaacagagaagctcggacgatgatggcgaataatgatggacggacttctaccgagggtagaacaccttgttttac

SEQ ID NO: 138104 - DNA, 712 bp, Zea Mays
cgaccgtggctgctgatgacgattcgtttggctctgtgtctaagtgttttgagtctgatgattctgggagttcgattacgtggacggaggagtcttcagatgaggacttggattattttgcggtgttggatgtggctgcagcggagccttcgccgcgcgtggagggttccgaggaactctcgggcgcgagtactgggtataggtggcgaagcggagagtgagtgaattgtcgcgaagtggtaggcattattgtagcgaggtggagagaggtcgtcttcgcgtggacgggactggtaagcgagaattgttgtcctcgccgattggggtgagtgtaggtgagggggagctacgaaatctgtttgagggtgagaaactgaggataatgctgttcaactacagggagatgagtatcatcccgaaggttgagccaatgtaatatatgatgccctcgctgtgtgtatgtaaccgttatttgtatggtaaggttgtgcgccttcgttgatccggccgcgcccgtgggcgacttctgcacggagagtcttttggaaaaggcttcgattttgcgcgcctattattccggctgcactcttaggcgacttttgcacggagagtcttttgggaaagacttcgattttgcgcacttattattccggctgcaccctttgacgacttttgcacggagagtgttttggaaaagacttcgattttgtgc

SEQ ID NO: 138105 - DNA, 279 bp, Zea Mays
ggaaaagtgtgtggaggtggtctgcccgtaaggttggggaaaataaattcctgatgagctttccagatcctaaaatgataagtgatcttgggtattttaggccattggggatgagaacaattaaagctcagattactattgatccttggtctccctccatcaatgctaaagggtgcttgcaaatggtctagtttagaatcaggggcatacccatagaacaaaggtccatcaaaactatagccaaaattggaggtctggtagggaaagttgtggagattg

SEQ ID NO: 138106 - DNA, 356 bp, Zea Mays
gccccttttctgggacggtttctgcagaactgggacaagaaaaaggaggcgacagcaacgggcgaagattcgcgtttttgcagtgggcgcttgtgtgttgtgttctggactggaggaagtggctggtgcatcgaagacgaagatatcattaacgtcgtggtcaatgcgcgcgtagtctgtggctgattgaggggagcaactggatggaggaggaggtgaggaagaggataatggcgctggcgcggccggggtgggtgggtgtgggtgagtgggcacggctgtgccccccgtttacttttggtgcgttggagagcgtcgggcgatgtgtacgtctgcgtcgctgtttgcctcggccc

SEQ ID NO: 138107 - DNA, 432 bp, Zea Mays
gctccacatgaagttgtttcgtctcgacacacacttcacaatgacgccacgtgtcacctctgattcccgccagaaccgcgccgcagagttttgatggacaaactcgaggcccaaccaccaaatgtcgtgagtagcgtactgtgtacatgccctggacacttgtcccactggtccgcaatcgcgtcggcaacacgatccgcgccatacatcctcacgtcggtgcgtgacccaagtatcagccatcatggttagtcatccagcttctccggtccccgtcaagtcccagcgtgcttcgccgctcccggctcatcgacacaaacctgcataaccttcgtttttacgtcgaccactgttcctgtgttccacacctgtacactacaaaccgagagatattgttgcacaatacaatctcatactctatttagttcactg

SEQ ID NO: 138108 - DNA, 561 bp, Zea Mays
gccagatcaacggtcgcggtttttcttctccacccgataacccagagcggcggcgccggttttcacggcgacatccacaccggtgcgcgatgaccgcgcgcaaccgcaccccattcagcactccgaacggacctaggcatagaggatgggattgaggatgtgtttaggaggtcgctcaccagctgttgatttgtgaaggagctcggccacgcagcgctgcggttcggcagtcaattccaagtacggcgagcaattcccgcaactccatggcttctccctccgatttgagggttgcagcatcatcactacgggcacgccaagatctcggcttcgaacgcatgattccgtccgtgatgattcgcttatctccctcacgacgggcggctccttctttgtctgttaggttcgctgccgagtccgcgatttcaggccagcagctatcacggcgttttctgttcggcgagcaattcccgcaactccatggctagaagcaagctaagaataccctgcctggctactgataacagggtattggaagttcgcggcgcacatgctaagaat

SEQ ID NO: 138109 - DNA, 506 bp, Zea Mays
cgccaggatgctgtaagggctgaggtcgtctcatctggagtggatgtggtttgtttacaggaaactaaaatgcaggatatttctcgttttttggttatccggatgcttggaccagattttgccaactttgtctttcgcccttcgattggtgctagtggtggcattttggttgcttggaaagatcatataaactgggctggtgtttctagagtggatgatcattcattgtcaattctttttcatcctgttgatgatgtggagtggtgggcgggtggctgacttgtgtgtatggtccccagctcaaccaggacaaaattgccttccttcaagaattgagagatattcgtgcttcctgttctggcccttggttggtccttggggattttaatttaatttataaagatgaggataagaataactccaatctggataggccaatgatgcatagttttcggagatggattgatgacttggctcttaaggagttgcctttggttgggcgcaag

SEQ ID NO: 138110 - DNA, 364 bp, Zea Mays
aacgaaacggggtgccagttttcctttcatctggaaccttttgacaccacgcatcagggaaaccttgagataaacaaaatctccttcctcaaatttgagttcccttcgcctattgtctgcgtaactcttctgtcgactctgagcttcaagtaacctcctgcggattaaagcgactttttcttcggcttctttaacaaagtcgggtccttctagtgtcctttcccccacattggaccacattaggggagtctggcattttcttccatacagtgcttcgaatggtgacattttgatgctggcctgatggctgttgttgtacgagaattcggcgtacggcaaactggactcccaatctctgtcgaag

SEQ ID NO: 138111 - DNA, 654 bp, Zea Mays
cttctgctgaggggtgtaccgataaggtcgaagcctaaatggttgtgctccaggtaacaattcaatggcgtggtcaacctgtattttcggtggtaggctgtctggccggagaaacaagtgctgatattgttcaagtaattgctgcacagcttctggggtatttttaacagtcaattcagttacagtctacaattccaaccaatgctgcactgcttcttgctttatcatgaaacccaactgttccccgttcaggccgtaacaggtctgaacctttggtaacacaccctgcaggtgaactctcttcttatcataatcaaactccatccattttgcagcccagtgaactgacataggacagtggcgttctagctagtccatgccaagaatcatgtcgtaaccccctagagcaatgaatttgaaatctgttgtaaaagtggtgcctccacacaaccatttgcagtttggcaaccagtgttggctccaaagaattcccccatctgctactttaacttgcattggcttggtcaacagttcaatccctggtaagacattcatcaagtgactttccagaaaactagcagagctgcctgaatctactagcaccagcaattgttgacaataaactgaagcccaaagtcggatagtcctgctgcc

SEQ ID NO: 138112 - DNA, 425 bp, Zea Mays
gcccaaagtgtatgattggcagtgagggggtgtttgcggtggtggtgtatactcctgcgaggaatttgtgtgtgctttatgcgaggttagaccagggaaggggcattcgaggttcagtacctactaatgcacctccaagtgctgagaagtagccgagagcttgaccagggactcaactcgacgatggttgtggcactgtggatttgagtagatgtgggatgggtcacagacattggtagagcttcggggaagactcattgtgtgttcctctagctcatctagtgatgccagtgggcaggttgagggtgctccgatgagggcagaacatgaccttcgatgctcctaaatgacggtgatggcagtgtttggctaggaggagatgaaagtcgcctagagggcggtgaataggtgaaacctgaaattta

SEQ ID NO: 138113 - DNA, 594 bp, Zea Mays
gaagtgcttcgcctggtgccatggggcgtttccgttgcgatgccggggactgtgatcaatgggatggcgatgaatttctcgccgtcgcgcaacgacaccaggaatccgccgtgcgccatggactggggtctctgctataccactataggtaattcatctcctattgtgtttgatatcccgtcctcatcacttagcactaactagactcgaggttgcggccttcggtgttggattgcgcggctccggtgtggctccgccgggtggagcttgggcgccgccgtccggtcacctgggatgtgggagcgtttctgaccgcgggattgggaaaacacgtgtgcaccgtagatccgtgggtgtgtgtggctgggatcgcgtctggccatgataaatggtgatcgttgatcccagatcttagggccatagactcataccgcttcagctaataatggatctaatcgtagccatccagagtagatccaacggccacaatcggcccataccccttcggtcggtggcttttcccaatagtccctgggttttctctgtttaaacccgtagtccgtagcagtaaagtcttgggtcttagaaattttg

SEQ ID NO: 138114 - DNA, 557 bp, Zea Mays
caagatcgcacggccaagctttaataaaatcgaagcgctacgtccgagcactccagaccgcatagatcggatcggacggagcagcgccatcttcttcacttgtacaagacgcgcgacggcaccgctcactgacgcggccatgacccgccggagtccctgccctccgccgtgccagtgcaccaaaacctaccccaattagtgccacgcatggaggagaacgaggtcaacacaacagtcgatgatttaccggagattggtgtggtagaagatctgaccacggcgagcaatggatttgcggcggtgccgggtcatcggcgagaaattgccgacctcacggctgtgatacacgcctgccgatgtcacgagcacgcgaggcggcatcccgcgacgtgcccagaacacccccccaaggtcggggagttgcccacggtgagatcgatggtggcggcatcctgattcccttctcctctgcctcttcacgcggcggcttcaaggtcaattcccccagcccagagagcactaccagcacgtaggagccccgatgagcacccgaacgg

SEQ ID NO: 138115 - DNA, 475 bp, Zea Mays
gctagttctttagtaacacattcatgctactaagccaaagcatatagcttcatcttcgcaaatgcaatgcttgtacatcattttcaaacgaaggtgttctttggcttttaccttgtcatactaaaatagactttggaataactgataagttaatgttttgaggacttcggttgaggaacgtccccaacacttagctcgagaacaccaatttcaacgtatgatctttccatcctctctaaggtgctcaaatatcttctttttcattcttatgaacctacaactattctcttagcaaactagttagtgcataatgttatgatggccataaacaccaaaaccaatatataaatggctttaagcccatttccctttcaaaagcgagggacattggcgaaatgatgatgatcctaggtgcaccttggttagcagcatacaattagtttataatgatttgaaccacaagaagcatgatacc

SEQ ID NO: 138116 - DNA, 333 bp, Zea Mays
gagcaactagatcttgatatctttgtaagtttgtatcatgctactactaagtagtaagcgattacctacttgagtgattttgatctttaatttttttattcaatacttactgtcttatttgatgctttttagtggataattggatggttgatcacacaataagtggcatggatgatggactcatggacatggatgagcacacaacaagtggaatttgattttggaattttggatggtggcagttgcatgccacttgtatctgtgtaactgtgggttgtcaggctgtggcatggttctttacttctttcgtttatctcttcactgtttatactt

SEQ ID NO: 138117 - DNA, 474 bp, Zea Mays
caagagcagggtcaatggcaggaggggcagcaggggtagcactagaactaccagcctcatgatcatgtgagcgtggaggcataggaggcggaggtggaatcccaaagtcatcatcatcatcatggactgttgcgtcctgagtctcaaactggtgaaaagtggtatccttggcctgagtatcagtcactggagtaggtgccggcacatgatcctctagagctggacggtacgacccaaagatgaggcaagaggcctcaagagtaccctggaactgtgggggccaaatcagctgagcaaagatgtggcacagatagtgagcataaggcagctgtcgacgagcacgtagaccatccagtactatgtccttgatatcacaaatgagaaaatccacaacatcaaactctgaatgagaaactagggcaccaaggagccaaagctgaatatgagtggcagcctcccggtaacccatccgtg

SEQ ID NO: 138118 - DNA, 652 bp, Zea Mays
tcaattagcttcggcacatcgaccgtcccaatgggctttggtcttcgtgtcaagaccttatctctcttcgccttcggtgcactagaagatgttgaagcagcaactttcttttttcccccttgctttcggacaggaaagcagtaatcagggtaaacaaacccgataaaatcgaaaaccctgttcagcctctttttccctcgagcaccgaaggcaactgtcatggcttcgtcttctatccttgagtaggctccaagtagctcatcaatcgttgcctctatagcgtctagccagtcatcatttggctcatcaacttggcttctgtatcagaaggtgtatttagataaaccaagccactttggctagagtcagcggcagcttccctcggcatttcccattcatttgcaagaggccatactttgtaaacagtgtgctcttgaactaaatctctcgtgccaatgtcggtgcatatggtgttgaaggccatttggctcacttgcacttcattcctaagtgcgattgatggccttctaatgccgaagtgtgaccatataggatgctgaatgacgcccctcacatcctccgtcttatccaggtcattcttcacgtaaaaccattgcttcatccaagagcccgaccacgtcttccgaaatgt

SEQ ID NO: 138119 - DNA, 871 bp, Zea Mays
ctggggtcctcaccgtgcagggcgaccaccccgctgtgcttgcagctgtcaagaagttgcacgccctagttgcagaagccgctcgcccggatgacgaggggagggacccctcaacttcctgtaccaagacgcctgccaaggtgcctaatgtgcaaccatctaaagcagacgacgtccccgtcaagaccatccggctcagcggggattcctcccagaccactcgcatcgcgggtgatctggaggagaaataggaaatcacgctcatcgccttcctccaggcaaatgctgacgtattcgcatgggaaccgtcgcagatgcctgggatccctagggaggtgatcgagcaccatttgaagatccaccctgacgccaaaccggtgagtcagaagcctcagagacagtccattgagcggcaggatttcatccgtaaggaggtctataagctgctggacgctggtttcatcgaagaggtccatcatccagaatggctggccaatctagtcatcgttcccaaggctaacgagaagcttcggatgtgcatcgactacaccaacctcaataaggcctatcccaagggcccatatccacttccacgaatagatcaaatcgtggattctacctctgggtgtgacctcctgtctttcctagatgcttactctggtttccatcagatccagatgtctaggcaagataggaagcatatcgcttttgtaaccatggataggctttattgttatgttataatgccttacggtctgaaaaacaccttgccaacatttgtacgggcgatgagtaagacttttggtgacctgattagggacagggtagaggtatacgtcgatgacatcgtggtcaagactaagagagggtc

SEQ ID NO: 138120 - DNA, 1886 bp, Zea Mays
ccagatatttttcattttatgtttattaatcattttatctctttggaaattcaacattccagatttatttagaactctgaactcctagggggttattggagtatcgtggaataaccctatatgcattcattatggataaagaccgcaactatgcccaaaccacccaactcccaagctcgagtccgtgttgagaaaaaaattggatgactatttcttcttcgtataaaaacgcctagtcctcctaggttggtctagtttattttaacaaataaaggcccaaaatatggcatgtattcataagagatatgcctagtggactagaaactagaaatggtagtaagggcagaggcgtagccaggagttttcgttagggggggcaacacatataactatagttgtaatgttaataaatagaatatatgtatatataaatatacaatagtcactagttataacaagtaacacatatatacgctaagtacataacatattttaacttattataaactaccacatttattttagccatagattgataaatatagttctttttgttggggggggcacccccccccccagtcgcgtatacgccacttgctaagtggcaagccatatggttaaatagtgcattaatcatcgtcatcatgaaccattgatgacagcatttgcaatttctaggttatctttcaaccataggtagacatgttgaattcatcttccaaattttggctcctcataggtcatagctgttttctgataactaagagcaaatagcaggtaatagtccaataaaccaacatacccattgacatgtcatatgacaaaggcaaattttgatgtggaacatccaacttgcgtggatttgccatttcaaaccacaaacaaccaaattggccagttacctttacaaaagtatggatctttgctcgttcacacttcacacttcacaccacagccatgtaaacaatcattttccaatatgaaacagagggggtagaaatgtatttccgatccacttcagttcttcctccctctctctccaactcctgtgttggtgattggaagctgggggccaccaccacctcttccttctcgcaatatgaatcgcagcctgatctgtgcttctacatcctatttgtccccccagcagcgagtccaagctgggtgccggcagctcatccatccccttccagcagtgggacggatccagatgctgttgctcgcctccattccccgcccgtaggaggcacctcatgcacagccacaacctccctatgcacatgcagctcacaatgacagattcaggaagggcaaagaggtggagggggcacgcaatgctttgatcggtgaagccacccacaacgtggagccatcgcttacccaagtgcaaacacgagcagcgctgagtaaaaccagagcagcgcaagcaggctagtgtcaagatcaagtgtcgcacgtcgacaccatcagagttgctcatgccaccaccgctgtgcctcctccaccgccgctgctgccggagatgcccaacatggcagacaccactcaccccatcacaacaggtaaagaagcagcactcctgggactgtgtggatagaccttagcagcaactatgtggctcgattttagcttccaggaggcgacagcacaaaagcagatgaacaagggaagagaggaggggaggagggaggccactatcatatatggcgtgagtcccgtgagaagataaagacaattgagaaaatgttaatcctcccccaccgcctctctcctcaaatcagatacataagtataacaatcgttgcggtgtgttacatttaagaatcacgattttgtaatggtactcggccaatatagacaaaaacagtgtaaaacagaatatactc

SEQ ID NO: 138121 - DNA, 345 bp, Zea Mays
tgcggactcactccgagtggttaatcaagtgactcgagagggtttatactggtttaggctcacgccctacgtccagtgtagtgttaatcgttgtattactcttgagaacgtgttacactgttacagttggtgtgagtgtgagaatgagagtaatgggggagaactctagttgaatgctcctctatctcttgttcgtgttccaccaccgacttttatatttcaagggagcggcctcatacaaagcgtgggctgatctgaaatggagcggcctctacaaagcccttctgacgtagctcccctgacatcaccttccgatacgcgcataagcatatgtgcggtatggtg

SEQ ID NO: 138122 - DNA, 538 bp, Zea Mays
attaattaagaggactcgactacatatcatctaactcggttgagtttgcctcaagctggttgtgcaagttctagatgaattctatcaacttagaagctataccttttctcttactatatggtcgaccgagtggactcgattgactatagtttttctctggccaagagaacctggtcacataatgatgggttttctagagttgacaatgattctcaacaagatcaattttagccctgacatgcttcatgaataacccatttgagttatattcgagatgctttttcttacctcatgaagggttggatttagataatttattgatcaccttctttgtggcactttggtggactcgacaccagttggacatactggtggccaagcacatttttcatgggacacaacctgttttgccctttggttgttctattttttctgacaagttcaaagacttacacttagaccctattcacgagaagatggttaataatcaacaaatgtacaacattgatcatttaaataagggtcaccttgaaggaag

SEQ ID NO: 138123 - DNA, 321 bp, Zea Mays
gtggtatagtcacggcggtgccaagctgtccggctcactggatgtgtaaattgtacacggcaatggactagggagtgcggggcggacacgagtaaggtgcgggttgctcaccgaattcgcgttgaggtggatgctggtttccgcgcgggtggcaaagaaggatgtcgacggcgagaaattaacggtccgctgtaggtgctccttgccaacggatggttcctacacgtgtggcgggggcgtgcggagcagcaggccaattcaccgtggccgataatccgaccaaggcccgattcaatggtggcggcgcaactccgatcttgc

SEQ ID NO: 138124 - DNA, 1050 bp, Zea Mays
caccactctgcaacgggtgccctagtatttggaactgtgatcctgtgggtccgggcatacgacttagcttcccaggctaaatcctgcaggtcctgttgcattaatcaaagtatgaaagataccagatggtgggtcctacgggtgtgctcctaaaacttcaaagccgaagctgtgtgcaggtccaggtcctagtctagaggtaggtagtctcaaactatagagactacctcctaggggtcgggccaccaactttttctttggtatactggtatccagcctcgacacgtcgagcctacctcctaggggggccaagtaccaggtggtagttgatgacgctacacacaacaagggaaaataacatacagataagttccagtgctacttgattaacagttcttaaaatatgttacacaaccaaaagttattacagccacccccagcgagaccctcgccttgtctctacaggtacaactattcggtgtcggcaggatcatgctgaaagcgagcggccaccatctccactgcatcttgtacgctctctcggtcgacgtcttctgtggcggctactggaccatcgatcactggtgccaaggatatggcggggtcatgactccggaagcacgtcaggacgtattcaaccaccgcccggtagagcttgttgccctctgcctccaggcgggcaccgaggatctaatccaggcgccggaggcggtcggcggcagagtccagcactgggagggcatcggagatcgacactggcagttccgacactgggatggggctcatccctagtggaaccagtgtcgtgcttgcctcaccggcccactcggcgatgcgctggaccccaacgcggtgttctgcttggagatcttcaagggcctttctggtagcctccattgcctggggcctggcgccgcctgcgccgcattgaactggcggatctgctcctccagcttcctctctttttcctctgcttcgagctcgtgctcggccagcaactcgcctcgccgggtgagcatttcttccctgaaggcgagatctgtctctcgc

SEQ ID NO: 138125 - DNA, 538 bp, Zea Mays
gtggattctacctccgggtgcgacctcttgtccttcttagatgcttactctggtatccatcaaatccagatgtttagggaagataggaagcataccgcttttgtaacagtggatgggttttactgctatgtcgtaatgccttacagtctgaaaaacgccttgctgacatttgtgcgggcaatgagtaagactttcggggacctgatttgggacagagtagaggtatacatcaatgacatcgtggtcaagactaagagagggtcgaccctagtggaagactcaaccctggtcttcgacaagctgcgggcaacacacacgaagctaaactcggacaagtgcgtctttggtgtctccgcaagaaagttgatggggttcctggtttcgcaccggggcattgaagcaaacccggagaagatcaaagcgattgaggcgatgaggcctctagcccgtatcaaggatgtccagaagcttacggggtcattagccgcccttagccgcttcatttcaaggctggctgagagggcgctgtccttcttca

SEQ ID NO: 138126 - DNA, 306 bp, Zea Mays
ataaagtccaatggattgtgctagataaaattcctaattttgaccgcctttttagatctacaaggagcacaaacaaatcaaacctgtccaagaaaaccaagggtacgtttttctatcatgattccccatggaacaaaacaacaaaatgtattgccgccaggtgaggtttggtttccgattttttccaatcctgagaagcaagtgtttgaggctgatctctttcagtgatctggtcatgaattcatgattcacagtcccaaagagttgggtgcgtgcgtgcaattgacaaatccccgtcaccaacgg

SEQ ID NO: 138127 - DNA, 324 bp, Zea Mays
gcatttttgaagtttcggctattttacctgaagtagagcttgaaatttttatttcttccagtacatccaatacgtggaccattcttttcctcttaggggtaattgcaagatctttttgtgccttcggcacggatacttctgccgaaggacttgtaatttctgataactttgttttcttgacctccggctcacccaatttgaccaatggtattttcggcgttgtagccagcccttcagttttctgcattagcgcagtttctttggctttgttagccgaagaggcctcaccaccaaattcaggcactgtagccgtttcaatgaatc

SEQ ID NO: 138128 - DNA, 460 bp, Zea Mays
gcccagatgaagacgctaagcctaacaatggcgttaggggtcagctgatgaagatatatttcgaaatttttcaagacttcccctatcatctcgttcagaggaaatcgtagtcctgctctgaagaagctcttgaaaaccactacttcatcactcttcggtgctggggtggtctattctctggcaaatcggacaagtttgctttcagcttccccaaagtagcccagcttcatcatcatgggcatgtcagcttcggacacagtagatttctcaaaatctaaatggctgggttttgttgggatcataatactataatcttcctcatcttcatcaatattttcttcttcagcaatggtctgttcagctttggcaccaggagtaccttcttcagtagttccctctatcacaactagacctgattgtttcatgacttcggaaattggtgttgtcttagtgacctcgc

SEQ ID NO: 138129 - DNA, 615 bp, Zea Mays
gcgtcgagcgggttgctggatccggcaaatgtgggaggctggagccttaggaactctcccattctatcctgatgccttcctccattcgggcgctgttctcgaggcttctagtgaggacctcaatgagtcgggtttggttggccagaacttgggctaggtctaatggcagctccgaaggtgcggggaggtgggtctcactcccttctccaccgacttctccatcagcacctaggggagacctttctccaatccctgaggcggtaggcgtggttttatccgaggccatctgctagaggggagaaaggattactactatgcatatgccatattttttttctcaaacatgttattttattcagcactccagttcattacaagcatacaatcatcatagatcacactacgcgcgagcgttttctaaggtgtccctaaactgtctgagaagatcgtcaaggctagccagggacacttcctcaacatcaaaaaagttttatatccctgggggaggcagtgttggcgaggcttcctcctttgggtcagtctggcatccttggctcttgaaccgctttcggatcttcttgacggcggcgagcttctttaacttcttagcatagt

SEQ ID NO: 138130 - DNA, 669 bp, Zea Mays
gtgggcctctcctcacgataagcttcttcctagtttgttacatatcgcgcaaacaactccatcttctaccgtatcagagacagaacagaatcacacaacagcctccataacaaactcaaagtttgttgtaaccgcctgtaagatctgagcaaaccagcagatcttccctgccgccaggcgcataaataccggccaaggcatgcctccgttctaccaagcctgagcaaaaatatctgaaccagccaaaacaaacagagatagaggtaagcattcatcgtgatcaatgtcgtgcatatgccgctgttcagggttgtacatggagtcctaattaccggctatgacaccgccacgccgtgaagaccatatgctgcagtcagccttgtctttgtctccaacgacggtacgatttcacgcctacggttcgccaccgtcatagaatcctttttttgcaccgcgtcacggaccataggggtcacctgagcgctagatcggggtggcgtttgctagcaatagccgcagccgggtggatgcagttctgccggggcggacgccgagagagataggagagagaatgagaggcaagagcgcgagaggttgaagatggtccgggtaccatccatctcgtgatgggcgtctatgattaaaagcgaacatacccttcgcctcata

SEQ ID NO: 138131 - DNA, 481 bp, Zea Mays
atccacattggcaacacaaacagcagcacccccattgggatcagcaacagatggggcacccactatgggatcaacagcggattgggtaaacccattggggtcagcgtcagtaaaaccagtcgcaggcacttcttcaatagcaggaactgaggtaccagcgtcctgatcaaaactggatactcgccggaggcgtcttcttttcttcttctgctcatcaacagaaggatcaggctgattggttcggcaagggcgcctcgggcgagcactgacaggcttctgaacatccaaagtcgtatcagcctctgggaggggcgccactaccaacgtcccagcaggagcagcatcagatgaatcctcagctagcaaatcaagcatagagcttatctctgcatcactagggttcaggggcacctcaaaatgaacctgctgttcgtcatcaggaatcttcccaagcgaggcaaccaaagcactgacttcttca

SEQ ID NO: 138132 - DNA, 554 bp, Zea Mays
atagggggttatttcactagactaaactacccctagatacatagaccttatccactcagtgaggggtaaaatggaccaactttaataattcttgatccgacgaccacacccacttcataaagttgcttcgccttgacgcgcccttcatgtcgacgtcacggtcgtcctcgattcctgccaaaactataccgctggattttgaggccaaatccggtgaaaccagccctccgtagcgctggatgtttttgaggctcaaccactaaaaccatagcgggtagcgtactccatacgcatcctccatgtcctagaaacgtgtcctgtcagtccacgaccgtgtcggtgacacgatccgctcctccatatcctcgctcacgttagtgtctccacgtgttagccaatatggctagtcacctagcttatttagtccctcagttaagactcaacgctcatccttcgccgctcccggtccatcgacataaacccgtatgaccaccttcgctgttgaccaccgtctctggactctatacctgcacaacacaagccgagagacttag

SEQ ID NO: 138133 - DNA, 304 bp, Zea Mays
gacgaatacacgctcccccactccgtcttagatattggcactggcctcaatcatctctagggacttggggacttcccctctcccgctatgcttgtaaccccctactacaggcaccatggtgcgaataatataagcctcatcctctttgctggaagtagggccttgagcagcccgaaccagaataatcacttgagtcctctcgcacaccatctagagtcggccacgcttcacatttactggttggttaaggacccgtggtccaaatatcaatagttggcgcaccaggtaggtgattgtcacgtga

SEQ ID NO: 138134 - DNA, 548 bp, Zea Mays
gtccgcgccatgtgcacgtggcctcggcgcgcgtcgctccggacgtcggagttggagcccccccaccccacgccgtgttcccggctccggcgctcgatcccaatgaagttccggggtcgtctgttgcatttggtggggcgcgagtttaccgtctagtccttcttggctgtttttcagagttttcgatcattccaggggatttatgtgaacatttccttttccgtgatactgatatgataggggactccgagtgctggagtttactccagagcatctatctgatgccgataccgatgccgaagaggaggactgtcttcggaattttctctttggtttgatgcgtgcgtgttggcagtggcacttggcagccggtagctttgcactttagtgggcgaccaaatcaaaaggacaagggagctgcaggccggcacgacggagcaagccatgtcgtcagccaagaagactttttgagagccgagttgacatttatcttgtggcttgtatggccaaaaaagaggaacgattgggaactgagcagctacgccctg

SEQ ID NO: 138135 - DNA, 489 bp, Zea Mays
tgagagtttacctggactcttcacgctgggagccttagactgttgttggtgttggagaaggggaagcgcggagggcacctcggtatgggcacaccacattaccgcaggccacacgatgaagggcggagctggatagtgtcaagccgcggagacggcctatggcctacgagcaaggggcagctccataatgcgcgattcacttatgcacaacagcacaagacaacgactgtgcacatgtgcgtgtgacggctgtgagtggcggcggagaagaagatcaagtgtccaggtgaatgcagatctcgaccagactaaggtatggcgtgagccatacttggccataccgggtgatctgcccctataagaacatatcaatgagataatgaaaacaatatgtaaatcaagaagagttaggcgagtcactcatctggatgtgcatactcatattcatttcattccttgtaagataataagtacaagtgtatcttcggc

SEQ ID NO: 138136 - DNA, 575 bp, Zea Mays
gagaaaatccgaataatcccaaatttgaagaaatttgatgaaatccatgagattatgaaataccgggatgaagataatcccatagagtacaaaatgagcacctttgggataccatagacattcacttcttagagtacaaaatctcgtttcatccaatgactttgtaaaaatatcggctaattgatcatccgtaccaatggaatatatagagatatcttcctttccaacatgatctcttaagaagtgatgtcatatatcaatatgcttagttcttgagtgttggaccgaatttgtagccaattttaccgcactctcattatcacacatgagaggcacattcttgaaaataatcccataatccaatagagtttgtttcatccataatagttgagcacaacaatttctggccgatatatattctgcctcggcggtagagatagcaacagaattttgctttttagaagatcatgaaacgagagatctaccaagaaattgacaacaaccggaggtgctttttctatcaattttgcaccccgcatagctcgaatctgaatatctaattaattctaattgag

SEQ ID NO: 138137 - DNA, 697 bp, Zea Mays
cttatcttttatagtgtgataagctgatttcactgtgaaaaggccctttgtatcagggtgccatgccacgtgatcctcctgatccatctgaattggaatggcaagaattagatttgcatcaatgtcccagaaaactgcctcaacaagatctctatcccaaagaccagtattaggatcaatcaagtctgccacctttgttaagatagtccttccttttggtgtcgctggtctttgatttgccccattcggtatccaagggtccaaccagatgttaatattttctccgtttcccactcgccagatgagccccttctgtaacgcttgaacaccatgaagaatacttcgccatgcataagaaatccctgatttctcttttgccttgagtagattaccatgtgggaaataccgtgccttcaacacttgagcacataaggaatcagggtaatgaattaaacgccagccctgtcgagctaacatggccaggttaaaacaatgtacatccctgaaacccatacctccctttgattttcgtttgctcatcatctcccaggacaaccaatgaattttcttctcattatcctggttcgcccaccagaatcttccaatcatggagctgatctcatcacacaacgttttggtcagatcaaaaacagacatcgcataggtaggcatagactgaatgactgccttaatgagt

SEQ ID NO: 138138 - DNA, 488 bp, Zea Mays
taaattgtgctctttgtaattcatttctttctaaggcaccaagacatataaagcattaaaattaagggtgtgtttggttcaactatacgttcctgaaaatctgattttatctgagctgtgagaaagttactgcaagctgatggccgtgagaaagctgaaagttgtttgattgaaacctgtatcaactatagattttgtaagattatgatatcttggcaacatggcaggaatggcgctatcctagcctctttaacgagtcgattcgatatcaatatcatttcatcatcggtaaaggagtggtacgccatgtcatggggggcctacacccacaacactaggccaaagcatcatggctataatcatgcccagtccaacatatgcatggcgtcctagacaagtagtgtgtatggtagctaaagtgataggtattgtgtcatcgtcttccatagggatagagtctcgcaatcaccaaacatcaaagtgggggc

SEQ ID NO: 138139 - DNA, 522 bp, Zea Mays
gtcatcacctcggccatggtgtgttgatcgccatcgcccatggttgacggtgcggacgttgccgtggacgacgaggaaggagatggaggcggcggttggaatggtggtgaggctgcgatgaaagattgggtggaggtggtgggagaggatcgacgagactgagataccaggttgtcaagggcagtgagcccgagggtagggggacctcggctacgtagatcgtaaccgctgtccgtgatggccggccgggttatacccccttgccgtcgttcttcgtcggtgggttattcccctaccgccggcttaggtagatgaagagagaggattagatattaatatctttcttaattcccaagtatttgattacaatatatttatagcctccggctcaaccaaaagaagtaacaaactccactaattaatgaccaaccaaaatagctaaagatctccatatttatagcctttcggctcaaccaaaaggagtaacaaactccactaattaaggactaactaaaatagcta

SEQ ID NO: 138140 - DNA, 752 bp, Zea Mays
cgatatttaatatgaggaggaaccaaccatgagatcgagattgataagcttttagagacatgagagatccaaagataatagcaacatccattaatccacatggatatgtcgtttagagataaattgataaaacaagtgtcatgatcctcggagaagggggtatgagaatgaccagaaatgagagatttaggcaagatcgacatccgatacttgagaacaggttatagcagataactagataatagggcagaatcattaaaggatccagagatttagatgataaagccacaacatgattcacaaggaaaaagattaccagatccaggtgaaaggagaggtatgcaaacaggatcagctaggatgatcaacagaaatgctatgaagtttttggggcaaggatttatggaaagaaacatggccttgatagggtttgtgcaactagacgccgacaacattttttttgacacaacaagtgcacaagaagacttgggttggtctagcggtcaagctatgggggtctataagttgtgcaggtgtaacttcaagggtaaaacacacgagggctagagaaacactgacataagcaggtgattttttttgtttcacttgctaaccactaggttgtttaaagtgggggtcttttatgggcaaaacaagcaacatttttttggcaaaaagggttaaacaattgcaataccacctagatagcaagacaagagaagcacataacacaacctagtcaagactatcat

SEQ ID NO: 138141 - DNA, 618 bp, Zea Mays
ccagacactttggaaggccgtccatggcgctgcgtacatccacttcgcaaagccggcaacaggaagtgcggaggcggctccaccaggtgcgcggagagcttcgaggggagctagcagctggaggaggaggaggaagctgcaggtgcgacgacgacgagaggatctggagctgcatcgccagactcgggtgatctctcacgtgctcgacttgtggggcgcgcacgcacccgtcgagctacgaggcttggtcttgaactggattcgaaaggagaaggaaaggcagtgcctgaggttctgagtcttgtacacgtggagagatcaactgagttgggagatggggactgttttcttgtagggaaacagatcaaaaggttggattactactaaggctggctccaacaggccagctatcagaccaggcaaagctagtttagctgtccaactggtactgtagcgtctccaataaggcagctatcctggctaggcaaaatacatgggaggagagagaagagccaaattggctggcattgacacgccatgcatttccctctgacaaccgtcagttgggaccatgtgagggaatcgacgagcaggatgcttcggtgatttggcgcgaaa

SEQ ID NO: 138142 - DNA, 350 bp, Zea Mays
aagcatcattagagacagaaggtagcaatgcaaatgaatcggtgggtttaagagatagcaatatcaataatgtcgatcaagttatagccgatcctggtcttcgcatgccaattgagcaaattgatgcaaacattagagatgctgtcagaagagcatatattgcgaagggtccatgtcaaccaaaaggtcataagtatcctaaaagaatgataagcaatcgcaataggtcttttcatgatgaatggtatgtaaataattcatggttggagtatagcattgctaaggatgcggctttttgtttttattgctacctttttaaacaacaaagagctgaaaattatggtgttgat

SEQ ID NO: 138143 - DNA, 445 bp, Zea Mays
ctcgagtagcggctcttcaccttccacggaacttgcactgttcacaaaaccccatccctccccgctgccgtggaagagtccgccaacttcaagctcttcgtggcacgtggtgctttcgtcgccttcgcgatttgctcctctcaaaaccgctgaagaaatggcatttcatagagttgatcttgcaccgttcctcccccatggctttgtggcgcagcaggtcgatcatcgagaaatcatggtacgtactgtgactcgacctcaaccctccacccattaagattggggcatcgtgcttgtgcaaccattgccggagcatgaggttaattttcatatttttgatgatatcatccgagagtatctagtgggggtccggcgtattcaagtcaggagcattcaacgctcccaattgggacaggcacttgtgcgattcagattcgcttttgac

SEQ ID NO: 138144 - DNA, 428 bp, Zea Mays
ccggttctcaagcagtgattggcgccccaaaaagacaccaacatcgtgtcgtaccaacaaatttatgcatggctactacatgttgcaccgggatatgcttatcgatcgtggcttatttgtaagtcctgagcagagacgacgaaagatcgccaaaacgataagtctctctcacaattcttctcatgcatgcacatcgagtgcaggtagataactatacacatcagccagcatagggttaattagttccttctttttgcgactgtcacagtacagatagacatgcacgtatccactcttgaacgtctccgaaagaatacatccaattgtaagtctgaaaccaaaatcaccaaaaatgcttattcatggtgcgaattggccaagttaagcgtctagcaagttcacctactctatcgccaccctctgctatt

SEQ ID NO: 138145 - DNA, 959 bp, Zea Mays
cccattctgtggatcttctggctctacattcagatcaagaagagaagcttggcaactagcaccaggcctcaacaagttctgtgtgtccacgttgatctggacagttcaaacagttgttaagcacaacttcaaatcagtgcattattagaacaataaactatgagagaacaaatatagctcttattctttataaaatgttagatgaacaggaaactctaccgcatctgaaaaacagctgtgttcactttgcttgccagaaaaacttggaaaaggcattcctgaagttgtacactcagcaagaatcggatctgacaattgattagaatgcctcttgcaattagtttctattgtcagtggcttaaccaagccctcaaagtatgacacagattttttaagaggaacggcagtatcagtgtcaaatgatgacatatcagtgattatccaattactccagtggattggcatgctggcctacaaaaaagtatttcacttcacttgaccttgagtactgataaaacttctgcgaaaatatacaaaacatgcatttgcttggcatacctctgattggtacacaacatgaataggataaaatggtggatccctttcagaatcacaaagcccatgcatgttttcaatattgatgacatcttgatcttggctagcacatttgttcaatttccgagaatgaaagaaagggtgaattttctttccagatgataaccttcgaatttcctagcaattagattaaaatatactttttacattgaaaaaagagcatgagcaacaatattgtaaacctgaagtcaactaaaaagtggggcaactgaaatcacaagtgcttttttccttaaactactagagcacatgtatggagatagacaagctgctattgaacattaaagatcaaggagaggaaaatgaaaaggaagatacagaataggcgctagcattctttctac

SEQ ID NO: 138146 - DNA, 782 bp, Zea Mays
ggcgaatctgcagagaggggtctcaccggcgattgaagaggtagcgagcctgtccacgatgcagggcgggactgcggcaagaacagggctccggtgaggaattccgcccaacccgagcaccaattcgtaccggcgtggcctcgtcttcacacaagagaaccccacggaggtcactatgttgtccttatgcttcaattcgccgcgccggtgaggagcggccatggcagattccctccacggcgtatgcagaacggtagctagggctttctggtagtcacgaaagggtggcagggtttggcgcctatgtaggccttcccgcggagggcccgggtgtggcgcgaagcgtggcgaaaggatcggccaggttgttgccgggtagctcaaggagaagttccaggcgaggcggggaccgtgcgtcgttgcggagattggcggactaggcccacccgtcagtacgcgattcgggcaggtgcggagttaaggcgctgatgccagcgggcggggggatggtcaaatcgagttgtcggactacgcgcggcaatggcggcgttagttcaacaacctatcgcccgcggtcatcagttgaagggggatctgacgaggtggtcccacccgccagatagagaactgaggtcgcgacggggtgagtggatgaccagttgggtccgcccgtcagtaccgcggccacgctgagagggagagactgccaaatcgggcccacctgtcggcaccggctggcgtgagggcagatgatgggccgcgcggaagtaattccctagtgg

SEQ ID NO: 138147 - DNA, 573 bp, Zea Mays
gtggatttttacaactcagtgatcctccccaagaaacatcaacccatactacatcaacgctatatcaactgggaaggatgtgaggcaattggggacccagagatgacacaggcattgagggcctatgaaagaaagaagatgaaggatataatgacattccaatatgattggaatgatgaggtcattgcccagttttactcaactctgtgggtcaagctggcggatgaggaaagtccatacaactatccttatcttcacttctacattgagggcagctggtacaaggtgagctaccgtcggtttgctcacattcttggattcactgacaatgatatttctgggcataagatcaagatccatgatttccgccaacctaccagagatgaagccagagaacttcatctctctgagtctgggaaatattgggagtccaccaacattcacaagtattatagatacatcaactccctcagcaggatgaccctcattccaaaagggggtaatcagatgaatattcttggagagagcaaggttttgctctcattcatgaagcccagcagctcagagagtatc

SEQ ID NO: 138148 - DNA, 590 bp, Zea Mays
cttgggggtaccaaaaggctatgagccatgcataattaaagatgtttttattgaggcgaggttgtcacacgatggatgatagtaccaccaagtatcaagaacaggatgatgaccatgatggcaattatattaggagctacataccactactagtaagtactcaacaccttagcccctgaggattgcactgcacctgcactgcattgatgaatctctcttttcagatggctctcgatctctgaccgaatccaggacatgtgtactccaaggagaccattatggagatcagaactgggtacttaaggagtactatatgtattaacaccggagatcagaatggcagaaggcacgtacgcagatcataatgcacgcatgcagatccaaggagaagggtccgatccatcgaacccgtaagcttcagagggaatttattttcctgatcacgtcgtcgtcgcctgcagaggacgtatcattgagagggtagaatatgctccatgcaccccttcctaaaaggattgccatcatacactcaagtcgatgacgactttttagaacttctccaatcttcctaaaaagaagtagctgaccat

SEQ ID NO: 138149 - DNA, 618 bp, Zea Mays
ctggcgtgctgtcggggtgcctcagtcgactcaagggcgagcgctgggtggctggtatttggcggcatggcgatgtccaccgtgggagcatagtgctgccttatctggcggttgtaggaagcggtctcggggccggtgcgccgacaaaggacggcggtggcgaccactggatggtcttggccgggcagagcgctggttgaccggcaggagagagggcagcaggttgtgcgcggtcggcgtctgtgcctgggcagccggaggttgaagaaggacggcagatcgttgatctcatcttcaacggtcacgattagatggatggttaagagtgtgggagccatagatattagatggacggcttagatcgaatcctggcgtaccccttcgagtcattaaattagggccgtgaattccggatacgacggctagggttgagcgcggaagtgtaactcgcctggatctaatctggcgcgtctttttcggttcgggcggccaggacttcgcgatacctcttcgcgactgcagttttgcatatgaaccctcatcctttacgtaaatagaacccgcggtccgatgagcatggctgtgggttagctctgaatcttggaacaattatgaatt

SEQ ID NO: 138150 - DNA, 439 bp, Zea Mays
gtctggcactccttctaacttcagttcaaccataattggttgcttatgcttggatacggcttctgcagcagtgggggactgtggttccacatgcagctcctggctaggaggaggcagacactttgggggaatcttaagcgagacagtttccatgctgggctccacaagagcagagatagcacctgacgttaagaattttttggcccagtcaaaggaattcgacctcaacaacaggcccatgaaaaaagcagcccacacctttggaacagtgacaaggtctgagttgcaggggaaaatatcagcccaggagttgagacactttctagccaagtagtcctcatatgcagggtcagggatggattgctccaggtgctgcataaggcccacattgatgttttcttctatttgcatgttttcacccccctggtcgttgtttccc

SEQ ID NO: 138151 - DNA, 318 bp, Zea Mays
cggagttagagagcttacggattgatagaggaatcccgaatccccaagtaggtgcaaggaaaattttgtatttcgcaaggcaataaggcagaaatggtggccaacttctctccacattggatgggagtaactgaactcttggaaatattagtttttagccctgtagcatgaccaaagatgtctaaaatgctgataattgctgagatatcttggtgggagagctgcaggaacagaacatcattaacatagaaggagatacagtgtttggctttttgagagacaatcggttgcaggatatgtactcggaaagcataactg

SEQ ID NO: 138152 - DNA, 336 bp, Zea Mays
ctcggtggagaagaagactttgcccacggtgtcgtgcagtccgcgcactccgacaacgaattgaggtcgctctgcccgtcgattcggcccacaagtgcttcggtctcccacgcagcaacccgacgaaggttcctgagtctatccccggcactagacagcgacgggaacagaaatcccgtctctccccacacgatttggcttggcggcggcaatggtgtctctggcggcgctagtgggcaaaggaacagggcgcgaggtgttatagccaacgtgggagggatgaagcttccgcacgatctcaacaacccggagcgcgcggaacctccacacccgtgc

SEQ ID NO: 138153 - DNA, 483 bp, Zea Mays
gcaaagcttgggactaaacttttgttctccaccacatgccacccccaaactgatggacaaactgaagtggtgaatcgtacattgtcaatgctgctgcgaacaatgataaagaagaacttgaaggattgggaggaatgtttgctacacatggagtttgcttataacaggggagtatattgtacaactaatttatgccccttcgaaattgtatatgggttcaaagctgttgctccgatagatttgttgccccttccattgcaggaaagaaccaatatggaagcttctaagcgtgctgcatgcataaaaaagatacatgagaagactaaggaagcaattgagctcaaagcactgcgcaaggctgcaagcatgaacaagcataggaagaaagtgttatttgaaccgggggacttggtttggattcacttacgcaaggggcgttttcttaatcagcacaaatccaaattgatgccacgaggggatggt

SEQ ID NO: 138154 - DNA, 866 bp, Zea Mays
cacaatccctcgccgtcgatgatctttacgctgtgattcacgttgccatcgtgattcgtgttcactggagaggggataactacggtgaggtaaagatcttggcatgggatcagcttgagctcggttgcggctaagcccgccgtacccccttgctcatcggtcgatcgggataagagctcgcagccgttggttgatcactgccatgcgccgtgtgtccaggctctttaccacgtcgcgtttagtcacgcttggggatccggtgatcgccggaggaagcaccacggtgaaaaccattatgcacttgcgccagtgctcctccccttctacgaacgccatgcgtcatcgctcaaattcccggccaccgctcttgcctagtataaattaaagccaccgtgagctccgtaggatcattacgtatccagccaccaagtattgccctcaatcgatcatcggtgagctccaattttggatttccccaaaaatactcaagaacaccgtagcaaggacctcaccgtggccagctcgattcagatctgctcataccttttgttccctcgtttgagtgttcttatgtacccttgatgctcatcgacctgtctaattgaactagaatccccttaatcaccgggaaggctttcagctatctgtgatgtccacggtcaccgtggccagagcaaacctagtagccattgatgaaattaagtggggggaaacgttcattagaccttgaattcggtctcggtcaaagtatggcgccagtcactgcgtgagtcggccggtatatgggctcgtcggagcactgcgcaccgtcgctcgacgtcggggacttcatgttgtgaagggaaggaagtgtaagggttttttgg

SEQ ID NO: 138155 - DNA, 480 bp, Zea Mays
ccggtgacgagagcgcctcgcacggcagcgcgccatgaccagaattcccatgttagcctacagtgcacgattacccgccgcgctagatgctaaccgaagctgagaccacgatgaattatggaaggaagtactcactcgtgattgagttgatgacagggcagaccacggagcgaagcggctctgccgtggtacgcacgactggcgaggatttgccggtgacctgagtcccttcgagacgatggatcctgatgttcacccttcacacacctaactccttctcccctcttatgcaaacttcaggttaatcggcgacggaagcgaatgccccaatcgccgtcgcgtctctcacttctctctctcctgagtcgcaagctgggtgggtaaaggggtaaccagcggcccaggcgcggtttataaccccagggtcgcagctcagtctggtcatggcgaatcagcaggatcaatcccgagctatccgcg

SEQ ID NO: 138156 - DNA, 672 bp, Zea Mays
agcactcttccacagttttgtgtcctcctctgacccacatgcatctacgatctgttgccatgttagtccagtcacagtgttgacatcagagctttcttcatctctaccttcaacaatccacccttgagcagaagcagcatcagttgccagcaggggatctactttgttgttattgttggccttatcttttttctttgtatgaagtggattgaatcacacaaagacaagattttcaactctttcacaagttagcctatttatcttcttggtatgaatatgcaataatagatttatttttcaaattagtcattgcatgtaaaatatatagaatttagatttccaatctatcacagttcaaaactaatttaacttaccccttcaaagcaactccaattcctttcacatcccgaggcacttgcagtgagtgaaataatccttatagccatcttttggagagctagtatgtgttccataatttccccaccacttggctgcataaagtataaaggtttgaatgcttataccattaaaatacaataaaaactgtattggttggctgcatacaaaaaagcacaatatagacatcaatttcaacatgcataccagggcaaaagtcataattcttgcagccagccttagctacatttttttccaaagtggccaacttgatct

SEQ ID NO: 138157 - DNA, 419 bp, Zea Mays
tgggaagtcagggtaagttagggatctagcgttctcatgtctttgattagcaacaaaccactcagttagcatggttcgacgtaagaattcttgtgataggatttgcgacatgttggcattagcatggtatgtaatgtaattttcattaggtaagtgaaccggcaatctctccacgggaggaaaatgccgatggatttcaaaaccaaaaatcctccaacatgaatcatatggacatataaatctagcatctaaatattccttgacctcattccttgtatttgtctcctcatcaataggagtgtcctgaccatctataatctgtttcaaatacaacttgctgcgatctggaccctttgtaacatatttgaaaaggtacttaatgaatatgcttttgttacaccattctacattgatgtggg

SEQ ID NO: 138158 - DNA, 670 bp, Zea Mays
ggcacatggtgctcccggaaagccgtttcaaactctgcccaggtcgcatctctgatggtaacattgaaggtatcccaccaggctaaggccattccggaaagttgatgagcagccagttgaacacgctgattttccaggcatacgatggcttccagcttcctcttaatcgtgcgcagccaatcgtcagcatcgagggggttgctagatccggcaaacgtgggaggcttgagcctcaggaaatctcccatcctgtcttgcagtcttccaccattcgggcgttgattttccagacttcgagtgaggacctcgatgagtcgggtttggttggctagaacttgggctaaatctagaggtagttctggaggtgcggggaggtgggtctcacttccttccctaccggcttctctttcagctcttaggggaaaccctgctccaatcccggaggcggtaggcgtggttttatccgaagccatctgccaggggaagagagtcactattatgcacatgccatttttttcaaccaagttattttattcattacaccaatacattacaagcttacagctactacaagtcgtactacacgtgagcattccctgaggtacttccaaactctttttctaaagtgtccccaaattccttgagaaggtaatcaaggctagctagggac

SEQ ID NO: 138159 - DNA, 378 bp, Zea Mays
gcacggcgcacgctggtagcagggtgacggtagcgggaggcattgtcggggtggcaaaagaagcagaagtttaagaaaagatgagccgatcggccgcggcctccgctttctagagcgggagtgaggggagagggggagtggacgccgccatttttggttgtaaaacatactactacattgctatgctgccatcggcgggggagatcaaccgtgccgcgccgtgccgctcacacgtggcgcgggaatctgccgctttccgtttcctgctgcttcttttgttatggtttgctctctttcgtcccccgtccgtctttggatcccactcgctgtgaagaaaagcagaaaccagaagaaattgcggttgctgtcatgttgcac

SEQ ID NO: 138160 - DNA, 281 bp, Zea Mays
tcagatcggcgagatttcaagcgagtgagagggacaacccggatctgttaccggtgacttgagcgaccaatcgtcgacgatgagcatcatgcgcttcccgggaatctctctctagcccgatgaggtttacactctggtcaggcttccatcacatggacaacaacacggccggagccacagacaggaactagaggcgacgctcgtgcttgaagaagacgaactatttggaaagcagcgttggagtgcgggggagagagagaacgcggaggaaaagggagtcc

SEQ ID NO: 138161 - DNA, 618 bp, Zea Mays
accggggtacgcgaggtatcttgcagaaatgaaggaaaaagaacgcagggtccaatccaaagtaatcgatgggccctaaagctgcgtggtaatccaaagtgatcggaccacaccttcaacttcaaataaaattaggaatagcgtttaagtcggaggaagaagccgccagcacattatacacacgcacagcttccaagacaaacaccatcgtaatgactaatcagcaattcactggcacttgagacgccaaatccgctcatagaagtacacatatcaagaggtgactacatcatcactctactgcttctcggcatagccctcatagtggagctagtgcatacggcattttatctggcatcggactgggcccaggtagcactagccaccatgtatgtcaagaaacaatggtacgaaatcagtacatccatctttggagcagtcaccactttccttagcagtcaccactacatccatcgttttcgccgttgtcggacgtctcgttcatctttccggtctttgtcctattcttcctccctaacctgcagcccccgaccacgatcgcagccatgagccgacggacgtacgaccgcctactaaatctcttggaggtgcttttcg

SEQ ID NO: 138162 - DNA, 385 bp, Zea Mays
cctgtacaggaattgattttgtactgctgttcctgtttatgtgttttggattaaaaaagcgcaccattgctgattttaagctcagaaaagccatgccaaaaacgttttgtgagctctcgcttgcatttatatcattcctgttgccagaaattgtgatggattgcaagtgagtgaatttggtaaagattaatacaagcataaatgcgacaactttgtttgatgtatcaaccttactctttctggacatttcagctcaaaggaatggcataagatatggtgtaattgtaaatatcatttctgacaataaaattcatttctgacaataaaatttagtttctccctccctccctctctctctctccctcgtttaatctcgattagtcgg

SEQ ID NO: 138163 - DNA, 646 bp, Zea Mays
cttcgttgtccatccacttcttacttctgtagttcctgatctcgttcaccatggacatgagtcggttgtacatttattaaggcccattctcctgtgttcatggcgaacctcccaagctccacctctaggagctccatcttcgtgatcttggtgatcttgtcacctttgtacaccattttgagtgtatcccaaatctccttgacgctttccaacccattcaccttgttgtactcatccctacacaaagaagcaagaagtattgtggtgccttgtgagttgcggtggatgatttgctccgacttttcgttttgtcactccactaagagcaccatcaaagtgtcctagttttctgagtggaaccgaaagcaagggagtagtattatttaaaggaatgtgaaaataattgaatggggtacaagtaaagtctgatttaatcgaattttgttgatggcgtttcttggaggtggattcatcgctacttaaggtctatggtgtcgttgatgatccggttttgtagtagaccaccttcttcatcttcttatccttttcatccttcctcttataggatcggtataacttggaacccgtacttgtggattcctcgaccttctctttgtgcttttctcctaagggcgctttatctctt

SEQ ID NO: 138164 - DNA, 495 bp, Zea Mays
caacaaacactattcattttgatttaatttaggttggggatatgtaagatttttaatggttacttttcttaattacattgttagggtttaggatttagcaaaactattgtcacctcaagactctccatccacatctatagcaaaattattcgctaaaactcctacatcttttatcatcacatgacatttatttagaaggcatagtcagcttctagctcattcatgtatatatttcctgttctgtaacaattatcgtccataaggcacacttactttcgtcgctgcctctcaattcatatatgaagtgatattctgattttctgtttgtggctgtagcacttcatgacttagggtatgtcaaatgtcctctggcgcttattatctgtgtgtttgatcacctctatcagatgtgagcttaccttcacatgaaaatccatcatgaacttaaaaaatcaaattaatgagaacacaaatgaagctaaagttattaaaaag

SEQ ID NO: 138165 - DNA, 761 bp, Zea Mays
ggacaggtgccttgtatagaagaagcaacgtcgtcattctatgtacttaaataaataacacatgttatatatcgacaaggcaaggtatgtatatagtttcacgtgctactggtttattttgtttccatagtgttgaaaaggagtacgctaaactagcgataaaagcaaaatctcaaaaagcacataatattaagggtatgtttggatcaatcacatatgcatgagctaaaacaaagtgacttattagaagctagagatccaaaaaagaggaacatgctctaaaaccatcgaatctatcaagatctgctgtaaagcagctggtctcccaagtaaaatgactggtgcccgcgcgtcacctcttgctcttgggccggctgcggggtagtagtgtagtacgcgtagcaataggcacgatcctctattgcggagttgatggtatgcgcgctgtggtggggcccgcccgcgccagccgtctgtggacccggtactctgttgtccgcgagcctacgggtggcgacaacggatccgacttgagaggagccctgcccactgccttgcctctcttctccgattcccgcctttttttttttcctcccgactacttcactggcatgtacgtactattgtttctctctctctctcgctttgcatgcatctttttggttccgccgctttgcttgcgtgtgttttcctgtttggagattctctacctcgtatagggtatagtcgtctcctgcgttgcattatctcctctgattgct

SEQ ID NO: 138166 - DNA, 573 bp, Zea Mays
gatgaatattttctaggtcaaaccactggtaaaaatagtagctgataattgtgtgacatgttagtccactatcgaatgaaattgcattttgcacaaattgtagcctcctaagctcctaccatgaacgaaccacaatgagctaagcaatactctgatctctcggcaaaaccaaaggatgcctggaacacaaaccgatgaaaagcacccaacaaccagatgataagatgcactggcagaggtcagtggcaaaacaaacctgcacccatgaaggtcttcgcaagatctagtttaggaacgctctcagcactaaccccatggaatgccggccagaggcctaacgacgcgggcgtggagcaggggcagagaggaggcgaggcagctctctggccaccgacggcctcgtctctagtgggaaaagggggtcctgtggtagatggcttaaccgtgtccgtgaggagcaggacgtcctctgggtcgatgcagggagcgacagagcagacagagggagaggagagtgcgtgtgggagtgtgatgtgggcgcggctaggtggtagcggcagaggtggaagaacg

SEQ ID NO: 138167 - DNA, 749 bp, Zea Mays
aataataaggcctcagacggagtccatgggacttccacatccaaggcctgaagaaccgcaaggtgctggtccgcgctcgcctgaggtggggaggaaccaagcattgaatatgcccgaacagcagccaagtcttcttccctaggctgaaccgcagaccctgggcctagacgttgaagagcagattgtctgcccttatgcacaccgtcatctgcagagcccctcctaccatcacggtccccaggtggcgaacgtgaacggaagcgcctcctccgccgtgcagaatcatccaaatcagatgggacctgggtgggatctggtacagcacgttgtcccaccaacactttaatctgaacatgataggcaagagctagcctaccaacacctggtccaattcccagagggtcggtaatccaaaggtctctagtctgagggattaaagccaagtcataacaccaaccgtaacaacgaaagacatccaaattcttgagttgtaaagtatcatcatgcacctcctggacccaagcaaaaggatttaaaagctgttggacagtggtcagctcccaggcatgcattggaatgccacgtagctcgaattccacagggataggcaaacttgcactcgaagacccaaagaacttggaccactttttacaatgcagggaaaaagcgcctgcacgaatagtgttccatctcactgtcaactggtcagcaaactgcagggagggaagcatgagcaggaaatgtccatg

SEQ ID NO: 138168 - DNA, 340 bp, Zea Mays
acaataatcaatcggatggtgcatgattcctcacctttctctggtcagcatggcggcctagcccgctggcgtgcacggattcgaagccccagtgatctttgtgtgccactacccggtgcaaaaggaaattgaggcacaagcggattgattaggggtatcttacatgtagcggcgaaggattcgatgctgcccttggcaggatgtggcaacacggcagaaatggttctccggtgagcaattagtttggcttcggccgctgagttggcccagcgacagcgcggacaccatctatatgtcccagggaacaccctagggtggttgatggtgccttattgatggc

SEQ ID NO: 138169 - DNA, 444 bp, Zea Mays
gcaccgcctgaagatcaaccccgacgccaggccggtgagtcagaagcctcgtagacaatctgttgagtggcaggacttcatctgaaaggaggtccggaagctgctagacgctggcttcatcgaagaggttcatcacccaatatggctagccaacccagtcatcgtccccaaggcgaatgggaagctttggatgtgcatcgactacaccagcctgaataaggcatgtcccaaggacccgtacccacttccacgtatagaccaaatcgtggattgtacctccgggtgtgacctattgtcattcttagacgcttactctagtttccatcaaatccagatgtccagggaagataggaagcataccgcttttgtaacagtggatgggctttacggctatgttgttatgtcgtacagtctgaaaaacgccttgcctacatttgtacgggc

SEQ ID NO: 138170 - DNA, 986 bp, Zea Mays
cagaaaattttcactttgttggtgctgcaatgagcaaatcttcggtgtttccatttcgcatgagtgctaaaggaactccctctctagcacaaaataaataatgcagtggaggatgtgtatatgaacaatgaactgaaataatcaaagttaataagcgtttgaactggttggctgatgaagataacagattggtaagttttctttcttactttaaaacttgatagcattgtttatgtatgcctatagaaattatattgctttgttatttctgtaatttgtaggataatgcttggttgtataattcaaaggatgtggttgatagaactggcaggaaggcaaagcagttttgggcagtaatgggcagctgttactagcacatacactaccaccacagaaaatagtcgtaagaggaactggaaccagatgatattatataggggacaaataaaccattataagcggtttccatggatgttgggtacaaacctgtagagtgtggtaaagtgggatgagtgacaaccaggttattgacaaagtattagaggtttatgccattcaaaataatggtgagtccttcactctactgcacatgtgttaaggtagtacgtgatcaaaagtggtcaacagatctgaataggttgaataacgaaaagaaaaagagctcaaaggataacccagctcaagttgtcaatatggaagtagaccgataaaagcgacgtatgggacataagagagtaaaaaatgagtgtaatgacaaagggaggcagctgatactttgtctgattttagtgcaaaacctgagtacattgaagtaagcacgaaaaataggacagacagagagaatatgactgaaattcagcaaacttcggtgataagaagattgaagcagctcatgaataaactaagtgcaaaacgctagaaactgacacccaactattgcttgcatctatcgattggattactgcagatgctttggctgatgggaa

SEQ ID NO: 138171 - DNA, 468 bp, Zea Mays
agcacgacaaaaacagcgtgtgcagtccaaaacagcaatcaataaatttcagctcctatagaattcacgaatcgccgcgttcgagcgacttgaattattctaacgctttactatttaattgagttaagacaatcaaattagaaccaacaagtcgacttgcaaattttattcaagttatttagtgcactaaaactactacaaccaatcaacgacacattctccccaataagcacccaaccatttgcgttttaatttagacatcacatgagcactaatacttttcatccgcgaccgtaaccatacgcattcagaatacaacaagcaatttaccgcgactacgagcttaactaaagtcatctaacgagttgattaatcaaaggaatggcatagcccgccatacgacatacacgtcggcttgcctattattatcgcagtccgagacaccacacctatttatatcacaatcac

SEQ ID NO: 138172 - DNA, 740 bp, Zea Mays
accaaggatttgcctcaggctcgggctgtgagacagatcgtactcgagtgctccatatctctggaaccagtaggccaaatcctttgacccccacacaagatcggtagcttagaggaaggggaagacgttttgtgcactgaccaaggcaagagcaggcatggacgagtgactacacgcgccagaactcgggcagaaacaacgcacacacgtgttcgaccctggtcggcgcgccagcgttcgcccaacccccatgtgcgctcgctcccacgcatggtcaagtcctccacgcgccctccctcgcgcccgttcctataatggccaatagcccttgaacaatccttgcctcagccccgcacactcgccgcgctcaatcaccggagcattggccgtgaatcgagagctccaccgcccgccaagccgcccgagctctggccaccgcggccagctcaccccagccatccctcgcccacgtcagcagttcggttagcttcaccggagacccgtgaagcttcccaaaccctcagaccgagcgcaacctcaccagaaacaccggatcacccttgctggacttcttccgctcactggagagcgtggaccaggtaagccactgcaccatttccaaattcctcacgcataccgcctctccgtcacttggtaaagctccccgagccaaccaattgaactattctgctgtggttaggccgggacactcaccgccgacgagctcccccgcctgcgca

SEQ ID NO: 138173 - DNA, 358 bp, Zea Mays
ggatgggactggggagtttcttgggagacctccacaccgttgtgcggtttcttcagagccgtcgttgtgtggcgtgacaatcgaaaggagatttgggagagaaacaacgttcacttgtagaaataacatcaacgaccaccatataacacataacaaccttagttcgcttggttaagcatgggctcgagagaatcagtcagggttcgacccctggacacctcacatttttaccgcgcaggagggcatatggccgggtggcagaacagccagaggcaggctacccttgcgaccttagtaagtagtagagattacattttcaaaatgttcaaactatttctgtagaataacactatatgca

SEQ ID NO: 138174 - DNA, 783 bp, Zea Mays
acagcagcgttcccagatgacgacacgatgttccctaagctactgtgcagtagcgtttaattggccgagactaggagcttcaccagcacgagagggtgtacaaacatggattagagggacgtgaacggacctgagaatggctggccacgacacgatgtctcacggcggcgttcctagccgatttgggggaaatctggtaaacttgcactctggtggacgagaagggtcggctgagggtggactgggttcataacagagaggcagagcaagggaaacactcaatttatagagagcaaccatgagcgtaacaaatttgggtgtagatggactcgcggcggcgaagagatgagtcaccggagcatgactaccgtggcgctcagtggggtaaggacttagggcggtaaatgggctatccactgtgacctcttgcgacgtggtaacaccctcaagtacatggcatcatcgcgatgagcagtggatgccgatgatggcactttggtcgatcatgaagcaagtgggtacggcggctagcgcacaaactcatatgaggtcacgatattttcacccacccggtaatatccgcgtcgagcgatgcacgaatcttcatggcgagctcgaatcatcgcactcaatcactgggcggcgaggtgctctgcatctctgatattttgctgttactgtaccatgccaactccatttagtgccgcgatagagcaatttgaggagccttttccttcaattttcattcagcaaactaccaagtcgactataacaaagttgttc

SEQ ID NO: 138175 - DNA, 454 bp, Zea Mays
tggccaaaaccgtcctggccaatattcatggtctgttcaaaatatcctgcatgatttgcatgtcccgagatttacgtgtcccgaccaatttacgattacctgcctattctgttacagcaacataaactcctcacccccacgtgcgaccccaccacgaaaccatgatcccagtagacctgctcgccacccacaccacgatatgcatgcgtcagatcgttatgcagttgttatcggcaatttaaacaagcataaatgtccaaccacatcctgctcgcgtcccgacataccaatatgcccatttacgcacccactaacggtaaaatacgtatacataaacgtgtgaatcacgcctgaccccctattccctattacgcatccgtttcaggcaaattacttatgcataaccattgaactccacacacccgaccccaccatgtcttggtgctccgcgaca

SEQ ID NO: 138176 - DNA, 357 bp, Zea Mays
tgaatggtgaagtttgagcggaaaaggatcagaactcctagtctagcaatgccggacttgagagtggcagtgtcgcacaatcaaaacttcaccgaatcccctcaagttttgcaaacagtttgcgcaaagggaaatttgtctagtggtggagaatcaactccagcaacacaaaaaacaaagcgcagatcgaaaatctcattttgattgtggttttgatagggttttctattttgaattcaatctgagttcttccaaaccacgaccaaaaactacaagaactgagtgtacatagtggtttgagaagtgcaactcaccaccaattaacccccaaaccaaattctttcacaagaatccaag

SEQ ID NO: 138177 - DNA, 991 bp, Zea Mays
caccccccacttcgtttgccgcctcaacaagtctctctatggcctcaagcaggcccccgtgcttggtacaaccgcttcgcctcctacctgctatctcttggcttcatcaacaccaagactgacgccttgttgttcatttaccaccacgagggcaacaccatctacctactcttgtacgtggatgacattgtcctcacatcatcctccatggcccttcttcggcactattgcagctcttcagaaggagtacatgttggatattctcaattgagctggtatggccgactgcaagtcatgcaccaccctagttgacaccagtccgaaggtctcagctaacactggtaccccccttggcgcacaggatgtttccgatttccgcagtctggcaggtgctttgcagtatctgatcttcactcgacctgacctcacatatgttgtccaacagatttgccttcacatgcatgatccttgagaatcccatttggcagcactaaagcgcattctttgttatgttcgaggcacctttcagttggggttgatgatccgtccctgccagcgccaagtgttggtggtgtattctgatgcagagtgggctggatgtcccgacacccgtagatatacttcaggctatgcagtatttctaggtgacaacctcatctcatggtctccaagcaccaaaacacggtttctcgctccagcgctgaagctgagtatcgtgcggtcgccaacgcagtgccgaggcttcctggctgcaacaactcctcaccgagttacagacaccactgcgtcgcgcttgagtggtcttctgtgccagcatcagcgcaatctacatggcctccaacccacttcaacatcagcgtaccaagcacatcgagattggcctccatttggaacgtgctgcttgtgtgaaattagcattcttcatgtcccaatgtcatcacagtatgccgatatattcaccaagggtcttccgtcctctgtctttacggag

SEQ ID NO: 138178 - DNA, 841 bp, Zea Mays
gcgagtttgggctacttcccatgtggatacaggcgtaccactggggtggagactatgtcgaggccagatggtgaagtgctcgttttttagggttgttcgctgcaagacttcgtctgccgtgtcaagattttttgactaaggtgcttgagaagtttagggttcaaattcaccaactgacgtcaaatgcccaagcatcgaggtcttcgccaagaactattgcttgcactggcagaagaggtcttcaggtggtggagttgatcagtttggaagctatacttttaccttgaagactgggaagacgaaggaaaaagttgttcagttagccccttgtgcgaagaataagtggagggatggacaaaattggttttatgttcggtgcattaagggcaaagggtggcctcgggcgagtaccctgagtccatttcagtttgaggctttcccacactttgcggttgaggagagggaccaaaatgactattcctttgattttgctgttgttgcctgcattggccaagatctggttgatgagtatttggcgtgtggggtcttgtcgcttggtcagggctgggttgtgggtccggttgcccggaaacacttcactagttttgataggcagattttgagtcctatcttcacaattgagcttagggaccattctcgggacatattttttgcggagacataagaaagcagaagagcttgtcagtcctgttactgagtaggagattaagaaggtggtcgaaattcacgaaggccatgtgcgtgtgaaccttgtgtttagcaagatggggcttgcttaagaagagcacatggcatgcctgaagaggaggcgaaaggcgtc

SEQ ID NO: 138179 - DNA, 287 bp, Zea Mays
ttcttggcttggaagtgttggaggaagtgggccatcgttatagcctcaatattgatgacatgtctatacatcaaaccatgctggaagacttccttctattcttgcctgatgaagaagtggcgacaagagtgctttacgaaggaaggtcgttcagaggtcctatgctctctctcgtgttcaagtagtggacaagattcacacatgcttcggctacgtcactgcctcatttgattgatattgagattcgagggatcccagcgcacgcgtggggtctgaccatagccaag

SEQ ID NO: 138180 - DNA, 415 bp, Zea Mays
gcagactctgatgctaagcacttttgtgataacatcaggttttttaatggccatttttctttcacttccctgtactgttgcctcgacagtatgacaactaatatgagggattctggtatatacacattctgtgcacaaggcatgatgtaccataatatcaagtcattcggtagtgaatgtggggcagagcataagcacccagagctttacttttacgatgatgatcccagtctcgagcatcgataccgtaagtgtcgtgaagatcagattcagaaagaccaagaggttattaaacagatagttggcatacttcgtggaaatctgtactctgagcaccttaggagcatgggtcatgttgagaaccttgctgactatcacatcacattgaaccttgaccagacgttgagccaaaaag

SEQ ID NO: 138181 - DNA, 312 bp, Zea Mays
gagggaagaggggcgtatgggtatgggcagagcagaagagatgcagcacagcagcaggcagccacggacacgtttgtcagccagtacgtatgcagagggagggccggaggggcgagtcgtggttgcaatttccatgcatgagcatcgaatgcttcgcctcgcctctgggctctctgacctctgaaatttgacccgggcggggcgggcccccgctctgccttcttgagtgcgttgtgagaccgacagcgtagcagcggtggcgtaagcagtagtactagcagcggcaacaccatgcaccagcacgggtaccgc

SEQ ID NO: 138182 - DNA, 328 bp, Zea Mays
gactgaaatcaggctaacagtgagctaacagcaacttcaagcccaatttcgagtatgatctaatggcttttagtggcaacaccatattgcaacatggtatatggtacattgctctacaatttttctgcagagattgacacgggttgtcattagaaattgagagaggattgggctccaaaattgactgtcaggcgtctgaaccgaacttcaccatggtacagtaacccaattggggatcagaccgccgcgacagaaaaatcccgccgacggcgacctccctgcgcgaacagtcacgacgcctccgtgattcgtgttcactggcggttgg

SEQ ID NO: 138183 - DNA, 1100 bp, Zea Mays
agttccccctcctttgctcctcattacacactgttgcttctcaggttgggagcgtgggcgcgcggcgctgttgctgagagctgctggtgtggtttgtttgcttgtttcggattgggtcggtggattggattttggattcggctgttgggctgcaatgctcgcttattttgaatatttcccttggagcttcgtgctggaattagtgtacgagtgcgctgtggctgcgagatgtgtgattttgcatcgatgtacgtgtatgctgttcccgtggatttgagggtgccagtggggtcagagcttgtgctgctgaaaggaatgatacgccttggttctgattgggcttaggtttcggggaggactgaatcatttgtgtgtgacaggagattcattttatggcaaagaggaggctttgtttgttttgttatgctgaacctattatcttgtggcattctgtttcatgaacttttgtgatagacaattgtttgttatgcatagggcactgctgctgctgcagaaagtatttgcatttcacgctggaatagtgtaccattgcaatatgcccttgccaatatatttctttttagttatgctcatggaaatgccctcgttggatttactgggattaaattctgttttgttcactgcatagtcacataatatatacaatggaataaaaatgatgtgacacctgtaattttatgtacaagcttgcaacttaatatatatccgattttgtttttgaagtgattcttgaacttgatcactttcattgtaaaccattcttattctttcgatggtcagtttagtcactgcaaatagcttgatccatggaggccttgtgttttttactcatttactattaaagagagttattaattcagggccgtgtctgagactttaggggctctgggcagaaccatatataaaaacacattttgatagaccgaacgacaaaacacaatgagttagctattgcctatggtatatgtgtacatgcgaaggtcgattgtcgatggcgtgtcctggcgtttttgtagttctgtctggactctccagtcctttggagacgtggtggcggcaacacgacgggaattatgttt

SEQ ID NO: 138184 - DNA, 338 bp, Zea Mays
gcccgaagcagagcggtgatcgcggcagcagcagcatgatgcggatgaaggcagcgcgaacagaggcaagaaaaagagcacacgagagaaaaggccatgctgctccattttatagaagaggaaagggaaggataaaggacgccggattaatgctccattggtggcctctttgctgcgcccttaaattcataggaaaaaacggtcgtgtaaattccattactggtgatttaaagataggagcaagaaacggctgggtagagaacgaaaacggacgacgtccactgagaaggacacgcaagtgggcagagtggaaactcgtgtcgcgacagcacgtggag

SEQ ID NO: 138185 - DNA, 1577 bp, Zea Mays
gccaagccataataataatataataatagtaatcgatggggtctcacctcctcttgccgttcctcctgctactgtcctcaccatatgtgcaagctcaacagagaatcaccttgggctcctccttaacaacccaagggcctaacagcttttggctctccccttctggtgactttgcctttggcttccggtccatcgagggcaacacctcctcctacttgctcgctgtctggttcaacaagatcagcgacaagacagtggcatggtatgccaagaccgctgatccagatccagcgctggtacaagtttcatccggttcatgcctcgagctcacgtccagtggagcgctctcgctccaggaccctactggcaaagaggtatggaatccagaagttgtgagtgcaacctatgcttccatgctcgatactggaaacttcgtactggctgctgcagatggctcttccaagtgggggaccttcgataacccagcagacactattctgctcactcaggtgctcacccctgaaaccaagctccacagccggaccattgccacagactactccaatggacggttccaccttaacctgcaaaataatggtgttttcttctatgctactgctgtgcaatccgatcctcaacatgaatataattggtccatgcctgggaacgccacaaatttggtattcaatgcgactggcatgatatacatcaccttggataatggaacacaagtaaaaatcacatctgggaagacaagctccatagcggactactaccatcgtgccacacttgatccagatggcgttttccggcaatatatgtatccaaagaagttcagcaaccacctgtacactcaggcatggtcagttgtcgacttcaaagctccaaatatctatatcccaagaaggtcaatagcagagacacaggtcagcagtggaacatgcggtttcaacagttacagcaaggtggatgtcataaacaaccagactacctgcgtgtgcgtcccacagtacacatttaaaggtggaagtaaaggctgcacgcctgacttccagcaaccaagttgtgacttggatgaagcaggtgccacgaagcagtttcagttagtaacaatgagcaatgtggattggcctcaatgtgactatgaacagcatgacaacatacctaacaaccagtgccagcagctctgcctgacggattgtttatgtgctgtcgctgtgtttcgtgatagtgacaatacatgttggaagaagaagttgcctttaacaaataatgttgtaggggatagtgtgcagaggacagtttacatcaaggtaccaaaaaacaacagtcaacaacctgagcttcttgattccaacagatggaagaaagataagaagcactggatccttggaagttcattgtttctaggaagctctatcttgctgaacattgtcctgatctctgttatactcttcggtacttactgtactataaccataaatgaaagcccgtctgtgcagtcatcaaacaatctaggattgcccctgaaagccttcaattacactgagcttgagaaggcaaccagtggattcacg

SEQ ID NO: 138186 - DNA, 284 bp, Zea Mays
aaggttctcagttccgctccggaaatcagagtggaaacagcaactaccaggtacggtgctctggacaacaaggtcagagaagcaaccaatacccaaaccaacagacaagcagcactcagaccggtcaaaggtctagtggtcaacaacaaaatcgtcaaggaagtgtcccaaacaaaccggccagaaacaacaacacaactaccccagttcaacctaatggttgtttcaagtgtggcgaacttggccactatgccaacaactgcccaaggcgtaatcaacagaca

SEQ ID NO: 138187 - DNA, 349 bp, Zea Mays
ctcagaatatatcaagtctggttctagggcaacatccattacgttaatggttcgatcaggaacccgaagacacttcttcaattgtgacacagggaatacattatgtactgcagacaaggttttgggtaactgaagtaggtatgccactggtccgtatctttcaaggataggaaaaggaccaatataccggggtgcaagcttcccttttaccccgaaacgtgatatacccttcattggtgaaactttcaggtagacataatctccaactggaaagtacaagggtatccggtgggtgtctgcataactcttctgacgagcttgagctttcttcaaattatgaattattcgc

SEQ ID NO: 138188 - DNA, 299 bp, Zea Mays
gtcgcccacttctcgctcccctctcgccctctcccgcccggacacgtgctccagtgcagaaaagagcaagggacagacatgctatcgccgggcgcagccgtcgccccgctcccacacactcacgaccctctccagcccagctcctgcctccatacgccccctctcgcctctgctaccgccttcactggcaccggcctaacaatattctgaaccacaacaggcctctcgcttccttcaacttcacctcagcatcatccatgtccatcccatgggcactagcagcgtcgtctcgctcgtcg

SEQ ID NO: 138189 - DNA, 402 bp, Zea Mays
cgaaaattaaacaacatcatcttcaactcctcaccctcaaaaagattccgcagatccccctccccaatacacgtcccagacgtcgaggacatcaaatctcgttggccaccccgatctacccgaagacgggttcgttccatccccatccgtcgacgccgaccacttcacgacatctcgccaacattatgctttgacaccacctttcgtcggcggtgcttctcggtcatcgcaccagccgggggatcagacgcttcgcgcacttcaagctgcggcacggactccgccgtggccacatccaacgcagcaaaataatccaaatcctcatccgaagactcctctattcatgaaaacgggatcccaaactcacccccatcagatgaccaagacctagtttcagaacca

SEQ ID NO: 138190 - DNA, 1757 bp, Zea Mays
gctcaaacacacatcgcaatcatgcacatacacctctccagcacaaatatccctttagtctagttttgcagacagcaattaaaatagatatgactctatttatggataggcacaaacaagcccaactgaaatacgttcagcaaggggaaaagaaatgagacgcctagagcctagttatgcactgtacctttatttcaatccacataatcaaacaaaatacagcagggcgctgatctttatccacccacgtggttaggaacccaacagctagggctgcatctttgagtaggttcaaactagtccaaaactggatattttcagttgggagagatctctagatgcttagccatgttctccatccatatcatcagcgatatatatacaagtgcagccacagtaaggatgaaaatatcttcttcagatattcttggagcacactaaactgctactgcttgactgagttcacaacatcactccttcatttctcccagtttcaaaccacaacagggaatcaaccttaatgaactttgttcaccaactaaccctctaacaatttgccgttgggaccttagtcttgtacctcttggatcagacacaaaacagctccgaattccaaggaaaaacactaaaccaaaccaacagtgaactgaatcagcacaacactgatcccttgcagacctcccttttcaaaccttggtttctcacaattccatatgtcaactggtcaatcttccttaaccaaaactattcttcacttatagcccttcctacttggtataacattccatggcttaaaatgctcagaacaagagttgtggtgcactgaagttgagcaacaacactgaaaatccaatttcaaagtctgaaatagcatatcaccaagtctgacagaacatgtttgggaccattttactcccttctttgtgtagtaccagaccaaacccacttaaggaaacttgtgctcctatatatggtatttcactttactataatttttttaactcaactcgctttatactaattaccacagggttccaaaggtgggtaaaaacacactagaactgccatcaacagtcaactaaatcagcacctctcaagtctgacaaaggaaattagagggtactttactcccagatttatatagtaccaagtctatctttcttcaagaaacttattcaccttgttatggcctacaactttactatgtgtttcttagtcgaaatccacatgaatgggtcacaaatgggctccaaactcagaaactttcactgaaattcagttttcactaactgaataaaattcagtttcagccatagacagtccaactttgagccagttttactccacttttcgtgtaggatcatgctatacccacttactgaaaattattcaccatcatatggtctttatttcatctacaaatactatagcctaaaactttataggctagccacaaaccagctttcaaacaaccatcaaaacactgaaacttagtttcagttactgtttccaatctgaaaattcagaaatatagcagcaccacttagaaccactcttttgcctgggttccaaatgtttctaggggcaagttgcttaataaagtttatacttctatagctcctctacaagtttgatatagtgaccattgaccaaaacctcttggattccaaactacactagcccaaagcttgctccaaatgctgaaattcatgctctgaatttcactaagtctgaaatccacaatttttgacagcttt

SEQ ID NO: 138191 - DNA, 835 bp, Zea Mays
ccaaagtgtaaatcgtctaggttcatggaggtagactttggtgatggacagaaggtgcagctcgacatccctgtgacaatcctacgccaccttccattcatactgaggatccagcgtctatacatgaccgaggaatccgctaaaccgatgacatggcacaaaaatggcaaactatacaatcctaacaagttggtgcacacatccgatggtaaagcatggaaacacgttaatgccattcaccgtgagaaagccgaagaggctcgtaatgtacgtgttgcgctggccacaaatgggttcaatccctatggaatgagcgctgccccatacacatgttggcccatgtttattatccacatcaatctccccctcggagtatgctttcaaagacagaacatatttgtgtcgttgataatgcccggacactcggggaataaaatgggcgtgtacatggagcctttgatgcatgaattggtctgtgcttgggaggaaggggtatggatgtatgaccgagctacaaagacaaacttcaaaatgcatgtttggtaccagtactccatgcatgacttattaccaacgtatgggctattctgcgcctggtgtgttcacggtaagttcccatgcccattttgcaaggaagctcttaggttcatttggttgaagaaaggtggcaaatattcatcgttcgataaacatcgacaatttctccctcctgaccatccattccacctagacactaagaactttacgaaaggtgtcgtagtgacaaactgcccacttgcaatgatgactggtgtcgaaattcgtcaacagatagatgggctcgtggccattccag

SEQ ID NO: 138192 - DNA, 592 bp, Zea Mays
tcaggtttagatcccctcgctgccgacgagctatgagctcggattcgtgctcgccgttggcgattcacgctcggatcagttggatagcgctaggggtaagtaaatatcacgccgtggatatactccggccactaatttactccgagcactgtacccgagctagtcacggttgcttcagatgggttcgccggagatagccacctcgcggccttgtgccatgtgcccgggcatcttaccacgtcgcagtcgatcgtgttaagcctatccggtgatcgccggggagcttgccacggtaattgccaccaatcgcgcgccagtaaccttcttcttcttcggccgccgcgcgtctttctcaaattcactggccgccactcaagcctgctataaattgccgaccccgcctgctccgctaggtaattgtgcaaccagtgaagcaacccatgcctcgaatcatcccatagaactccccaatttggggtttcccccaaatcactcaagaacaccgagcggtttgacctcgccgtggccagcgcatctcaggtctgttcatgtcctctgagtcctcatttcagtatccttagatgctcttgat

SEQ ID NO: 138193 - DNA, 323 bp, Zea Mays
cgagctctagggacttatttgcaattctcagggactactaggtaatcatcttatcgcacagatggacgacaggttgattaatatagagcacaaggtctctcttgcaaaagtagacaaccgaatgggtatggcttttgtagaccgttggatcgatagtctacggtgcatattagatcgaagtctcggtcgttggatcgaagatcgacgacagagattttatgatagtagatcgaatttcccccgccagattgaatcggacgtcctacgacctcggccaaatcggtatgcgaccgatcccatcacaaccgtcggatctaaaatca

SEQ ID NO: 138194 - DNA, 421 bp, Zea Mays
ggagtgaggaagggttggcctttacgaaggggtgtcgggtgaaggacatcgatgacacggccatgggtttccgcctcctacgactgcatggctaccatgtctctccttgtaagtggtacacgatcttgtgtgcagaacatcttggaaaactgaataaagcatgcgtttggatatgaacatatatgaatcatgaatatgaaggtgttttcaagcggttcgagaatggcgacgggcagttcgtgtgctatgcaaggcaatcgaaccaatcggtaagcgccatgtacaacctgtaccgtgccgctgaccagggatcgttccctggcgacgatcctgtcctccagcgcgccaagagctacagtcgtgcgttcctccgggagaggcgagcctcagaccagcttaacgacaagtggatcatctccga

SEQ ID NO: 138195 - DNA, 352 bp, Zea Mays
gtccacgatcacggcggacaccgagcatgggagcacacgttcccgcggattggggatggtctagttcgatcgggtgggttgatgagcatcacgaatgcatacaggtactgaaacagaaccgctgagagcatgatcagacctggaagtggctggccacggcgagggtgcttttacggcggcggtaaactgatttgggggaaaacggcgattctccggctaggggagctaatcggagacaggagtggtggctatggcttcgcaatttagagacgaaggtcggagctcggttgatttgagcgaagggagcgaggatgtggtgaatttatagccgcggtgagtcactgccgcggcc

SEQ ID NO: 138196 - DNA, 324 bp, Zea Mays
tcggcttcgagtttgtgctaccccctccggtatgaatcaaagacgcagttgcttcaaatgatcactgttgtgttggtttttattagcgcgcttgaaagtttgtctatgcgcttgacagtgctggtattttagaggtaatgtctgagtgactactgaggcttttacttttctgagtggtgatctggcactttagagataatgcctaacccaagaaacccatttatactcgcaccgacatgcctttttgatttctgaaccttaacttcactttttcactcagccgcttttctgccttcctgaatttctaagcccactcattccgcc

SEQ ID NO: 138197 - DNA, 358 bp, Zea Mays
ggcgttacgtacttggtctggtgtatttgttatgctggtctggtgcgcatgtagtcagtctttgcgcggacagtttggtgtagtagttttcacacttgttaagcttcgtccggctgcacccttaggcaactgttgcacggatagtctgtgcggaagacttcgatttttcgcacttgttgtgcttgcccggttgcacccttaggcgacttctgcacagatagtctgcgtggaagactacgatttttcgcacttgttgtgctagtccggctgcacccttaggtgacttttgcacggatagtcttcgcggaagacttcgatttttcgcacttgttgtgctagtccggctgcacccttaggc

SEQ ID NO: 138198 - DNA, 458 bp, Zea Mays
aaggaactcaccgagcactactcccggagcttgctgggcctcttgagcgtcgacgtgattaactcgtgctctgccctggtactgggtcctgctctgctgactgttggagggggtgccttggaggcaggtgccgagggaatcttggggccattcaccgagttggagtaggtaggttcgggtgccttcaactgggggcagttattcttgaattgactaggtctccgcagtgccaacaggcatttgctggcggttggttgcttgcaaccaagggggcctgaaaggagctctcactctgttgactgtaacgtgacggagtgggtccagctggtctattgaagcttggtcccttgggtggaagcccgaaggatcgagctctctggtgacggtcttgctgctgagctcggaggacctggaatttcctcttgaggtgccctttttcttcctcttttgccctttcc

SEQ ID NO: 138199 - DNA, 560 bp, Zea Mays
gtttcttcttcataacttgtcgtgcatgtgtgcagaccaatagtccgggttcatgggggcagaccccaccgggttatcatacacgtatgcgtcatttagttataaaaaaggaaacagactcgacccctttgccttactctatggatagaacttacagagatattgacatcagggtaagatactcctccagtcgtagctagatagttgcccctgggtcggtgcactcccattaccttagagggtccttcccagccgggggagagttgcagagcacctcttggtgtggcacttgccgccgacctagggtttctatccgcatttgacacgggaacccttgtctctggctgtgatcacttctgcatgtacttatctgtagctcggacccatgggaggtccggatgggccccgaaggaaggcgtgcttcagcttcgtagaccgggggacacggagttcccccgatgtccgtctagttgtcttcaccggagtaggagcctccaacaaagatatccttcaggtccccctcgggcgactgatacccaaggtctcgttcagccgcggcc

SEQ ID NO: 138200 - DNA, 305 bp, Zea Mays
ctgagacaaatttgggtccacacgtcagtcgacggcaagtgacggaaacagcgtgggagggcatgaatgaggaaaggagagaggcatgggtatggttgaggtcgtccggaaactaagggtagcaatgaggtctgtgccaaaactaaggatacagatgtaaaaaaccctaataagaaggatacatgttctactgtttctcatgccttcttgtttgttacctagatgacaaggttataatctgtcccgagtcattgtatttgtttttttaaggccgagtggttggttgtttttagggtataatcgaa

SEQ ID NO: 138201 - DNA, 482 bp, Zea Mays
cgcccacacctggccactgcaacgttggggcctcgatatcattggaccattgcccactgcgcaaggcaacctcaaatttgcttttgttgcagtcgaatacttcactaagtggatcaaagctagagttgcgtcaacaataacatcgaaggcagcatagaagttcttctgtcagaacatcatttgtcactttggagtcccctctgagttgacagtaaacaacggaaaacaattcgacaattaggactttagggaattacgcgactccatcgacatgaaggtaatgttggtttctatctatcacccacaatccaacggggtagtagagcgcgccaacggcaaaatttttagcgccataaagaacagacttttagacgtcaaaaagggcaagtgggtcgagcaactacccaaagtcatttgggcactcaacacaacagaatcccgagccactggattcactcccttcagactaatgtacagatcag

SEQ ID NO: 138202 - DNA, 305 bp, Zea Mays
gagtggtatattgaaatgtgaatgggcggctcttcctccaggcattatggaagacgcaacgctagatgtagatgttgccactgcaatcttgccctgtttgcgtagcatcgcgagcagcactttgtatagataagtcttcccggtgccaccaagtctatccacaaagaacaatctgccctgatcagtgtcaacgacagacataatcttatcataggcagccctttgttcctcattaagagagtctttgagagccacatctctcgttgtcggttcgatactttcctcctcgtaaacctccctagcag

SEQ ID NO: 138203 - DNA, 383 bp, Zea Mays
cggtgtagtttctgaaggtctagctttggcaggagcttctaaaggtccagcttcaggaagagtgtgggctatgttggcatcaacaatttcccttaaatttttagcctgtgtgccaagagcttcggcagcggcatgagttgatgtcttcacggactccataacagcatatagcacactagtcattctccttttccttggagtcactgcgggggtgcttgatggcttcggcagttccgttgtgcacggtggactcagtgcattaattgttctgtcgtcttctctagtttcggctcttcagtcggatttgtcctagctttgactggcatagagcgacctggttctgtgataggagcaaccccttcacttagcttcgacacgtcgac

SEQ ID NO: 138204 - DNA, 525 bp, Zea Mays
cgaggcccagaccttgtctggcgcaccttctactccacccgcggagcctaggtatcaagccggaggggaaaggcagcggcaatggattttcttgcgtgcgcccgggagactacgcgagtgagagagaccacggctcccgctttatcgcccagctcgagggggactccgagcccgacgttacgttgggatggagcacggaaggggaggatacggatgaatcctgcctgggtttttcgtcaacgactccgctggacccgcgcgtgatccacagctgcgcaacaacccagcgcgtgctgagcggaatccgcggagcagacgacgcgaggaagacggaggcctgacgtcccgggcccgcggtcagtgagccggtgtcatgcgcactggggaaagttgggccgcacggtagggatgtcgactgggccgagaagtggagtctgccagcccaagttgtattttactcttttttctttttcttttcttttcttttatttccaaatcccattttcaattcagatttaaattcaa

SEQ ID NO: 138205 - DNA, 895 bp, Zea Mays
agggtgtttctagttatgtctagaaccttcaaaatgtttttcaaatattaaatgtgaactttagtttatatatatatatatatatattgatttaatcataaaaaattagtagttgcaaaaactaaaattattttgagaaccaaatattatataaatattcctcttgtcgatctcgttctgggtctcacccttttttgtgagaccgtcaaaccgctattctccttgtgaacatcgtgctgtttgggtctacatcgtctacccccgcctaccacattgcctcgcctcatcgcgtagtgcctcacgtgttgtgcgcgcaaccattttcccctcacttgttcctctcgctgtcattccgagctcgcgtgtcgtcttcacctcctcaaactgttgtcgttttcgcacgtgctagtctcactcggacacagccgtaaccaccccgcctctgtgcctgaataccttgcctatattcactcgcaaggccatttcatgcgcgcctgacccatcagccgaacctcccaagtttcttgtcccacgcttaggactacccgatgaagcccacccatcatcttcctccttgtaacctccagtcccgcttggatcagccacatcctaaggaggtcgacaaccacttgccagttctctttcaaaccacttgcttaaatgccctgctccctcacacaacatcacctcccatacacctgcattgccctacccccacctctacacacagcctatgcactgaagtgcatgctgatctcgctatcgtgcccaaagaattgtcgtcgatcctcacatacatgtgagttctctcccttccacctttcttcctactgtcgagtcacccaagcgtgatgccactctctaggcgcgacctcctcttatcgtaggcctctgc

SEQ ID NO: 138206 - DNA, 396 bp, Zea Mays
ccaattttaggtatccctaacggcacccaaggatcgagctctcgggatctgcactttgtccagtggcatacggattgcaccaacaacatcttgcagtaaatctctgcactcggggagcaggcgaggaggagaagacaacctaaaatgcgagcagcgcacaccatggctggagaaaaatggagaggaggccgagcaggaaggaagtgcggttgtgcgcaaggagctcggcatgggcgccgcgctggagaggcacagtccgagcaggaaattcttgggtgcgcagagctgtgctgaaaccagggccgtggtcgagcagggaccggaacaccgtcctgggcgagctgaagacggtggggcagaaggcgcgcgcaggcgagcttgaagaggaccgcaatg

SEQ ID NO: 138207 - DNA, 466 bp, Zea Mays
tgacaagacattgaacacccctactttatattttattgagcattgttgccttacctaccctcgagtgcttggtcaacgtgtttgaacccaacatttggtgcctactgtgtctgctctgacaaccaatcccatgatgcctcctaagaagatgaacacctctcacactccacccctctgaccgagatggcgaatgcagtcttcgttgacaacaccaagaaagtcaaagtcaccttcaccaaccaaactccactgaccccacatgaaggcatcccccgccatcgctgatcaatcagcaaaagaaaaaactctcccccatcgccacaaagagtcaatcacctaccctaccctcgaaggaagtctacacttgtctagttcagagactcccagcgatgtccctttcaatccttagagtcacccctaccatcccaaaatctagcccgacctataaataaaccacccaaccgac

SEQ ID NO: 138208 - DNA, 538 bp, Zea Mays
tagagacagagctccttctgggacagtggcactgcacgacctcagctaggcagacattccatcaaccaaagcctgtggtcgaagacagataagcataagaaagataatttactaatatgaacaataaaaggcaagtaattaattcacctgaagattggaaaggaacgatggtagacccaaggcagggggagctatgtcatggcttgacgggggaagatcagtaggaacaatttgaagggcattgtcaggggtgatctcagccccaccagcagataacagacttcttgcatctagctcgctgacctctaaggcgacttgtttattcaaagctgtagaagcatgcatcgccgtcgccccatcggactgaggtggagacgacccaacatggacgtccatggaggtgtgggaaggagagcccacctgaacaccctcaggggctgggttgcagcttgcgctacacttaacaccctcgggggctgggttgcagcttgcgctacccaccagagccggatcactaccggcaacacccttggggctg

SEQ ID NO: 138209 - DNA, 629 bp, Zea Mays
ggtggtgctcctgctcggcctcctttcccctctagtgagcagctcaagatctttctcccccttttttctctctgtttcacagtttagtgaagcctctccacctcttgaatccctatatccaattcttgatattcctgtgaatccaagtggtgggatgtgttcttttgtgtctcttgaacatctctgcaggttcctagctccctttgggagggtttcaccacctaaaatgggcatttcactctaaacctagatcaccacacgccacatgctcggtgaaatgcccaaaccagccaaatatgctccaatctatcccaaattttttaggcaccttcacaatacctccagtaacatattcgccaaatttcacgccaatccgatataccaagcttcaatttcactcaattccctatttcgagcgatcaattccgagtcgagtgccctaattccattttcttcgcctaaaatcaaaccaagtgcacacttcactcatatttattcatataaacctattcgtgaagtatcggctcaattccaaatcatttcatgcctcattttcaatttcaaacctcctatggcgctatttcacgttcaaacgccgttttcgcgtcgtttgatctctcgatcgtcat

SEQ ID NO: 138210 - DNA, 438 bp, Zea Mays
aaagcggtgtgaaaacaaggtaccaaagaatgacactgtgagacggttggcacagggaccctcgtccattgtagcgacatggcagagttacgacattaatggatacactttctacatagaaaaacaagtggtaaaagcacccgacaaaatagtggagtttgcaacgacgcgataactgaggtgtttaatcgcaataaaaatcgtcatatctaaggaaggacatgtattatggacaattagaacacatctaggagttggactacacacttttcaagcaaattgtttttctttgtaagtggttcaaccctaaaggtgttgtcgttgacccaaaacatggggttaccactatagattttagacgagaagcttacaaggatgatccatttattcttgcaaagcatgcaaatcaagttttctatatcgatgatcttgcaaaca

SEQ ID NO: 138211 - DNA, 352 bp, Zea Mays
gtcagcatggatatataaacagaaacggcaaacctcagctgcgactgcgaatgcctggaaaatggcagacgctagtgcagttgaagacagaaacataattggtttcttcaaagaagctggcactagaggttgctgccagctctgaacaaaaactagatgaaaatgttaagcgagcagcgatcgttttccagagaactgcccaaagcactgcactctggtagaaaccaaactgaattttattgagtcgttcaaaagtaaaacgtgtcaagtgacctgcaacgacagaaacaatacgcaggtcagagcgatattagaatggctaccgcttcacttgaaatatacagcccgtaga

SEQ ID NO: 138212 - DNA, 1244 bp, Zea Mays
tagcaaaccagcagttgtgcccctctagccctcgcaaagctgccatcgtgaacctaatagttcggtatgaggcgcttcctccctgtatgtgtggatacctcggaggtattgcaactggagcactaggacgaaccacacggagacgtgaaggatgccgacgactgcacaacactgctcgacgtgtttgtctacatcgagacggcttccgctttcctgggcaactaatggtaattctatgacctataacaacagtacatcttgttttatggggtcaaaatttttgttttgcgctagtgtagacttcccataatcctacacatagttctttttttccaggttttacacctatttggttggagttgagctattctgacttagaaactaaactgattgaacttatgagcatgtgaatcaaagactaggcaaactagttagtccataagattatgatgatcatcaagcaccaaaataaatataagaaatggtttaaggacatttccctttcaacgtcgttgttacgggcgacactatgttgccaactccagagtacctcccaatcaaggtcaggtacctttgagagtacgaagcactatacccatgacagcggcacaaaacaccttcactaaagtatgacgacaagtacacgacatagtaccagcgtaaagtaggattttacgagtggacaatctttttacatttctatgtattctcccatgggagagaccattataagaggccccttccttgagctataaaaggagatgtcgcctcaatgagacgaggagagacactccaaaacgcacacaccagagacttgggattgcttccctctctcgcctacttgtaacccctaccatgagcaatttggtgtcagtagtgcaaggcaccaaagactggagtaggtatattcgactagaacaagtataactcttgcatccaccttgcacaccatccgagcctaaaacacacatgacaaatttactcattgacacttattctgaacaccgacacttatataattcgatggtacaacgaccgtatgcaagccaccaataaactaaaatggcaaacaaattacatgttacatgctaaaaactaaagttgatatattgaaaatagaatcaatgctaccaattttagaatacttatgtgaattccttgtctgtgcattttttatagccattggatttacaaatgcctctctttggttgccattcttgagcatcaatcttctgtcaaagatc

SEQ ID NO: 138213 - DNA, 475 bp, Zea Mays
gcaggttgacagtaaacagtttgagtgcctctgagaatgaagtctttttattgatgatgtatttcccaatttacagaatacaaggccgtcccaatagcttttgaaatctagctaggggtaaaacttcctgagatgttctatattccatgagttcccaatttctgtgtcgtccatttgagtaagacgatatgatccaggtcgagtgacttctgctactatgaatggcccttcccatagtggcgacaatttgtgtcgtccctcccccgttagaattcggcggaggatgagatctcccactgcgaaggatcgatgccgtatggccttatcatgatagcgccttagagtttgctggtaccgggctgactgaatcaccgtattcaactgttcctcttctagtatatcaacatcctccagcctagtagcttcagcttcagctatgttttcgaagatcaatcttggtgccccaaacttgaga

SEQ ID NO: 138214 - DNA, 568 bp, Zea Mays
cttgcctttcctctctcttctctctctgattcaaagccagtgagcacccctcttcccacctttgattccctatctcaaattcttgaaattccaatgaaattcttgaaagtcccttgagtatccctgtaggtttctagctccctttgggagggtttcaatcctcaaatagccttttcaccaaaaccctaatccaccgcataccacatactcggtgaaatgcccaaaccactcaaaattgctccgattgaacccaaacttttcaggcaccttcacaacacctccagtaacatattcgccaaatttcatgccaatccgatataccaggcttcaatttcactcaattccccgtttcgagcgatcaattccaagccaagtgctcaaattccattttcttcgcctcaaatcaaaccaagcacacacatcactcatacttacccatataaacctattcgtgaagtattggctcaattcctcatcatttcatacctcatttcgaatttcaaacctcctatggcactatttctcgttcaaacgtcgttttcgcgtcgtttgacctctcgatcgccat

SEQ ID NO: 138215 - DNA, 559 bp, Zea Mays
ggtggtcgactcaggtgcttcctaccacaccactcccactgcaggcacgctctctcggtcccatcccatccattcctcccacccctcctcgatcgttgttggaaacagtgccactttgctagtcacctcagtaggtgcctcggttctccctgggccgttcggcgttctcgtagcccctcacatcactcataatcttattttgtttgtcggttcaccaccgacaactcttgttccatttttgacccctctgttttttctgtgaaggatctgaccaccaggacccctctcgcccgctgtgacaactcaggggccctctacaggctctgccctaaccccaccggtgcgtctccacctcccgtcctggtctccaccacttggcatcgtcgtctcgaccatcaaggatcatgatcaagctcaccaatagtttagatctttcatgtagtgggggacattttgatggtctctgccatgcttgttagctagatcgatatacttgtctcccattcactacttctagggctaagcaggcttttgatctgggtcattatgatctctggac

SEQ ID NO: 138216 - DNA, 355 bp, Zea Mays
attcctttatcgtttgtgtgtggaggcttgcaggttttgctgactggatcaagagatatggaggggtgaagttgggtttgtctcactgccgagcacagagagaagatcccgggtttgatgtgtccagagcatgcgccccgatgccatcttctggtatgaggtagaggggttagttagacacatttttctcaatgggagcttagaggtttgagatagagatcaaggtgaacgcgctcggttttggttcaagagctgaaaatttagaaatctgaatttcatatttccccattgaacctccacttgaatggcttgtttgaagtttttaacaatctattttggccaaactttcataatc

SEQ ID NO: 138217 - DNA, 548 bp, Zea Mays
tgaggtagtagttttcaagagcttcatgaaagttgggcttcgctttccgctccacaggatgtcggttgaggttttgacgacattcaagatattccttcgtcaacttacccccgaagctcttgtgaaagtgggggttttatatgggccataaggagtcagggattggagctggatgccagatgcttctgcaacattcatgaattatcttaccagacgaaggtgactggaaaagaacaatatcataataactttggctgttgcagcttcgtgccttgttctgaggcaaattaccctgtgcctacattccggaagaagtggtcaaggacttggatgaagcaatggttttatgtgaagaatgacctggatcagagggaggacgtgagggacgtcattcaacgtcctatatggtcacgcttcggcatcagcaagccatcgattacgagggaatgaagtgcatgcatgccaaatggctttcaacaccatatgcacctacattggcacgagaggtttagttcaagaacacatcgctttcaaagtgtggcctctgg

SEQ ID NO: 138218 - DNA, 378 bp, Zea Mays
cgttaatgtcgaggtagacccgtcgcacttggatcagaccaacgtcgccgacgatgctctacagcggggacaagggccgcgcgcaggatactttggtcgtcttcgaacgcgctctggtgcataagtgtagcttcgcatcaagggccttccgctacaccgacatcgagaggagaagcaaccgtcaacgtcgacccgagtgcacgtcgtctttggaggctaaccatggggccaggtgggctcgcctgcttccactgatcgtgaacctagagcaattggtgctggcgagtcaacctaggcgagaggatttctcgtcatagctgctgcgccaccacggaaccacagaacgcgtgggcagagcaatacaatgtcctaaattca

SEQ ID NO: 138219 - DNA, 505 bp, Zea Mays
gcgggcaataatcagaatcagtcaaaaactaagcaaaactagaaacagaaacgacgatgcaattgcaatatgcaacgcgtacacacagcttgcaaccgtacgtacgtacgtacgtatttcagcaagctcagctggcccggtcgtcgtcgtctctgtcgttgctgctactcgacagacagcgatggattataaatttcagcaaacagactaaaccacacacctgacagtctgacagcaacaaaactctgtctgtttttggctcgcgtacgtgacctctgatctgtatttgctcctcccggccgctcgtcgtcctctcgcctagcttctttcttcttcctgtgtcgttgccctcgtcggcgcctctgcttcttttaatctttgacgtggtcctgcattaattgctactgctttgcaggcgggatcttgattattaacttcgtcctgatgctggaatctttcctaatgcatcggatgcgtcccccattcctgctttaagctagctagc

SEQ ID NO: 138220 - DNA, 401 bp, Zea Mays
ctatgaatggtccttcccataagggtgataacttgtgtcgtccctcccccattagaattcggtggaggacgagatctcctactgaaaaggatcgttgtcgcacgaccttgtcgtgatagtgtctcagagtctgctggtaccgtgccgattgaattactgtgttcagccgctcttcttcgagtacatcaacatcttctagcctagttgcttcggcctctgctatgctttcgaagatcaacctcggtgccccaaacttgagatcagcaggtagtactgcctctgaaccatagaccatgaagaaaggagtgttcccatgcagagctcggctaggttgggttcttaggctccaaacgatgtagggcaattcccttatccactttcctgcgaacttttcattttta

SEQ ID NO: 138221 - DNA, 364 bp, Zea Mays
gaagatgattcaactagcgagtgaaattgagaacctagagactactggactaacgagtggagctaagaacctaaaggatattggacttaggtgcagtagcaacataaagttgcccttgaatgcaagacatcttccctggtgtttcttattactagttataacctttgtgatgttaacaactcgattttatattgctatacaccttttttataacacaaaggagatagttacatctttacctagatgatgggtcccgtttattaaagatataactacttctatcttattgtatttgtaatatcgtacatggtgcccatctctagtgtgccacagtggtgggtgtgaagtgccacaatcataggta

SEQ ID NO: 138222 - DNA, 634 bp, Zea Mays
ctagtgagcaaagtgcataaagactaagtacactggcactactcaacttagcaaagctgcacaagctaaactagagaggtaaacaacctaactatataagttaagcaaaggtaaacacaagcttactagaacaactattttactacataagtaaactagttacaaaaacgatgccgatcatggaacaagctagtgctagagatttacaaaccaacgagaacatatatgttgatacaatgaattttctcccgaggttcggtagtttgccaaccacttactccccatcgaggcaagcccacgattgccgccaatcctcgtgcaagtggtgacccataagttacactcttccatgtggattgctctaccactagatgcaacaccctgattttggggatataaatttttttctaattatcacccaaaatcatgtgttactcttctttttctcactctaggttttctctctctagattcattctccctttttcctttttgattagagatagcctaaactagtggaggttaattatttatttttgctaaaacctcatgagtcatgacatgttgcatcatgctgagtttaaaatattttttgaagtattgcacaagtttgaatttatttgaatttggaacc

SEQ ID NO: 138223 - DNA, 537 bp, Zea Mays
tctcccaacatctccttcctacaatctaccaaacgacgagctcatctgctgatttctccaaaaaacaagaatgaaccatccatagaaaccaagcgaagccgagagcccaaaaaagaggcttctctggctctctccttcattccctctccaacaaaaataggaggagctgtgatttccaaccaaatagggtgctgctctagggacttctcctaaacataagaaaagagctatttttctagatgagctagagctagagttgttgatacgagagacctaccaaagagggcctaaaacctacacggattcgcacccctctccgtgttcaacgggcattcagtcacgcagcgtgccgacgggtggcagacgcctggacccgaaatccttgattcaatggaaccgtgcgtgagatcacgtcttcccctccctctccacctctccgacccaccaaccactcgccgagatccctagaggagagtacatggagcccttcgatgaagcagatctcctagtgctcccattgtccctcgtcgcgtcgcc

SEQ ID NO: 138224 - DNA, 360 bp, Zea Mays
caggcacatcgacatgataactcctgggattgagcttctacgaacagcggagattggtccggatgaagcaacaaatactgagttgcagcaagatgcagatggacggcagaatattggtcccattgcaccaacacaacaaagttctgaaaacaatatggaacctgttgtgatgtccactggtcctacaccaccaccagaatcgggcctcaatccaggttctgcaaacttcctcgctgatctaacattgactaaaacgccagtgtcgcgcacgaagggtaggaagtctgccagtggggctaaatgtgctaaaaatagtgtggaacctgctaatccatacagcacatacagtgggggtcaggg

SEQ ID NO: 138225 - DNA, 314 bp, Zea Mays
aaactgagggtggcttgcaggaactttctcatatggtgggggtcctgggatgaatggtagtggaattgcccgatgactaggtgagggactagttgaagcaatggaacccaaaggttgtggcttcggctcttgttgaatttgttgtgggatgcatgtggaatagtatgaagatgtatgaaaaacttcctccggttgacatgcttgtgtagcggcaagctctttctacttctgtatggttatttggcaagtcttcatagtgtggcctttgttttctccacaaaagacacattatagttttgttggttgagtattat

SEQ ID NO: 138226 - DNA, 478 bp, Zea Mays
ccacttatatgttccttacctgggtctcttacctagtgacgagggagagcgcgtccaaatccggttccttgcgaactaccagcgccaccgtcagcctcactcctcggccacctcgtcggaagccaaggggtgtaacatagtaaattgggtttgcgtgcttgttttcgcagagcaggaagataagaccaagcgattgatgtaccttgttatactcctcgccgacaaagggcctgaagaagatctgggcatctggtgtatggcagcagcgactaaatctgccatagatgtagggcgtgtttggtgtggcggcttaggcaccacaccaaacacgcccgtagtaccacaaagaatatcaactgtgggaatataatgaatgcatgctcacctgcacagctctgtctagcctcttgattggcctggaacacagatcaccgcatgaattttagcaaagagatcaaagtagcagaaaaaacagaac

SEQ ID NO: 138227 - DNA, 316 bp, Zea Mays
ggcctgggtactgcaaaacaagatgccatggatgacatacaggagcaggtagaaaatgttagctactttgccaagatggtaaaagagcacatatatgttactaaccatttaatccttggctgcatactgcatgtctgcaaaattatgcattaaaactacaatgaacatatttttccttgggagtgcaagggagtagatatgttagtgacacattagatttgtctacttacaaataagatatcatcaggcatgtgaattactgaggaacgaacaacatgcgtgtttacttacaatttgtaaatctgcagtaattcac

SEQ ID NO: 138228 - DNA, 642 bp, Zea Mays
caatcggcttaagtcggaaacaccttaagtcggtgtgacatgctcacgcatacataacttagggtgactactatgcctcactaacgcagcaatcggcttaagtcgaaaactccttaagttggtgcaatgtgatcaattaagcagcaaaaagctcagggcgcgtactataccctactcacacacaacaaaatgggagaataactcaatgttcaaaaaaccgcgaaaaaatactatctcaatgaaaagtgttttctgtttgaacaaatcaatgttcgctttcactctctagttactgtgcaggagcatcctcgcaaggaaccttgtccgcagggtcaccagaagaacagggattactcaaagtagccgacacagcgagtacatcagctacaatgtcatcagacaccacaacgtcaggcctcttcatcagaatccggctagcccagactgccttatccatcgctttgtcacaccatgccttcatgatggcacggtcgtcatccatgaccttaatatcacgacgcgtagcctccacatcacgacaagcaacttctagctcctgtgacacaagtttttttgagacgcaaagctctctgatgatggaatctttcgaagacaatgacctgctgagtctcgatacctcgc

SEQ ID NO: 138229 - DNA, 474 bp, Zea Mays
ctggggctcagcagaggcgagaatgaagaacgggtctcagctagtcagctgccaagtacgctgtgccttcccggcacctgaaagaagcaagcacattttcgactccgtttggtggtctatctttctgtttccacagtcagggtggttgggtggctggccggctgggtgttgctggagtgctgctgctctctgtctcttttcgttctgggcccttttcgctgcttaggtaggttccccgtgtcacgccatccaactcgcaaggagatagatagacagcgatcgtgcttcgttcatatcctcggaagacagcggtcatgcttcgttcatatgagcaaggaggaggaggcgtccaatcttggatcggaccacgcagttcagttcctcacaagcaacgaaaaccaaactaattgtgcaagaatgatgtaatcctcctccggggaagaaggcgtcttatgcgtgcgttctaattttttt

SEQ ID NO: 138230 - DNA, 716 bp, Zea Mays
aacctcaatgtaagtgacaacaattacaactgtgtccttcgtagtctgaacatagaagaaacaacatttcatctcttcggcaccaagtgttctctacatccatctctagaagaacaatgaggacaacgatcaagctcagcagaatgatactcctcatcgccatcagggctgtcatcagaaggatttggcgcttgctgcactcttctagacacaaggaaaatttgatacaaaagcgccatcctaaaatctgaaccaccccctcaatgttcataggatcaaccacccctaactccataatctctggaattgcagatggatcagcacatcatccaaatcatctaaagcagggtaaatcctttagaatcagagtgctctggtgtatctcatgaacccaaacagacagattgagttgctgttgcaccgtagacaactcccaagcatgcagtggaagaccataaatctccaactccaccaaagaaggcaaacagactcccgaagcatccaccaacttcgaccatctctgagaatgtataaccaaatctccttcatttatcgttgtccatctagtcaaaacctctagtaccaagtccaatcgtggaagcattaaaatgaatcttgaggaagacatctgtttaaccttcaaggatgaagcctgaactcccaccttgagcgcatcactgaccaaagtgatcaacagagcattacttagctcatcc

SEQ ID NO: 138231 - DNA, 407 bp, Zea Mays
ccggaatagcacaacaaatgcgttaatcgaagtcttttatttaaaagacactccgcgcaaaagtcgtctaagggtgcagccggaatagcacaacaagtgcgttaatcaaagtcttttatttaaaagacactccacacaaaagtcgcctaagggtgcagccggaatagcacaacaagtgcgttaatcgaagtcttttacttaaaagacactccgcacaaaagtagcctaagggtgcagccggaatagcacaacaagtgcgttaattgaagtcttttacttaaaagacactccgcgcaaaagtcgtctaagggtgcagctggaatagcacaataagtgcgttaatcgaagtcttttatttaaaagacactccacgcaaaagtcgcctaaaggtgcagccagaatagcac

SEQ ID NO: 138232 - DNA, 609 bp, Zea Mays
gctcgtttcattactaaggactggacttgggaggctttgccccatagtgaggaatccttcttggtggttttcccttcggttgaggaattacagagaatggttgatgtggacttcactcttaaaaatcatggtgtgactctcactatctcgaaatggaaagatgctagtgatgctgatcctagttaccagcttgacgaggtatgggtccatatcaaggggccccccatgcttggagacactacctaggattttgggctctaggctcggtaattggagcgaccttggatgtggatatgtatacatatagaaaaatgggagtgattagagtgcttgttggaatgatgaacatagatcctcttccccttaccactgacattgtctttggcactaaaggatatgagatcacttttgttttggaagatgagaaattcacccctgcagaccctgtggtgttcacagatgtcccacgctaggatggtgatggtggtggggatattggagatgaccaatatgacaaaaacccaggtcatgcaaagaagaaacaaagaaatggatggagtgttggtgggtctggtgcttcatcaagtggaggagatagggagggggaaa

SEQ ID NO: 138233 - DNA, 628 bp, Zea Mays
ataagaagatagattggtatggctgaaagaacaaacttcaccaatgctgttcacccagccagattggggagtcgagccttcaaattagggaggcgatctgcaatcttctcaatccacagcataagatcactcttcctcaatttcttatcagagatgggcagccccaaatacttgcaaggaaaagaagcgggacttcactgcaacacattgcatccagcctgcacaacttgaccatcacaccttattggaatggcacagctcttgtgcagatttgttaccagaccaaaggctgaaccaaagcaattcaatatcattttagcacaattcagatcttcttcaattggttttataaagaggaccacatcatccgcataaagggaaactctactacggacatcagctcctcccaggctttgcaacagtcctctactttcagcagcaccaaacatgctgctaagaacatccataaccaacacgaataccatgggagatagaggatctccctgacaaagatctctccggtgagaaatatggttaccaggcgaaccattcaagagcacttgcgtagaggaagtgaataacaagttggagattagattatgccaaataggtccaaagtccaaatgcg

SEQ ID NO: 138234 - DNA, 297 bp, Zea Mays
tgtcagatacaatagtccttggtattccgtgtaagcgaactatctggtcaatgtagatttctgcatacttctccgccctgtgggtggtatgcactggcaagaaatgagctgtcttggtcaacctatccacgatgacccaaatagaatcatggtgtcgggaggtattgggcaatcccacgataaaatccatgcaaatatcctcccatttccaagatggtatgggaaggggctgtaaggtgtctgctaccttcagatggttggccttgactctttggcaagtgtcgcattcagatacat

SEQ ID NO: 138235 - DNA, 533 bp, Zea Mays
cagtcatcgtgtagtttccagtccactccaccactgcgatggtcgccacaacacagcgaaactgcaagcttgatcgatccgtgtccacgaattttccggtccgacagaaacagctgactccgtgcacgcaccggtagaatataccgtgcggatttgaggcaactggaaagaccagtcgagcagacgccgttaggttaccggaattaccgggcacgctgtttcatctcacctttccggtcgcaacccgtccgttggccgttacacatcgcgacctcgcaccggcaccaccagccaagccgtttccgactaccccacgaccgagagagagagagcaggagaccgacggtttggccgatggccgttacacatcgcgacctggcaacggcaccaccaccagccaagcggtttcccactgccccacgtacgtagaggcagagagagagagaccaggagacacggttcaaatttcaaatcgaaccgccccactcccacaaccaccgggtcaaaccgccgtaccctcactgacccagggc

SEQ ID NO: 138236 - DNA, 553 bp, Zea Mays
gttcagttggtcagctttcatctttttggacatcctgagtcctaaaagtgatgttttctcttgtacgattttcccgtgataagcttttatctgtagaaagcataatttaggaattcatatctcaatctgttggtgcacattaggtcatcaaaaagattttcacaaagtagtcaattcaagatatgttgtcaagtcccccctgttcagccaatgcttttgtagaaaacagtttatgatgacgagttggagacactagagccctatctagaattttgtgcatatagaaaaatgattttctatgtgtttgagcaatagttcaggttaaggaccaggcactgctatgttcttacgttttcgatccccctgaccccgaccgttcatttgctttgtaccggaactagagtcaactctggagcttgttccctttggccaaaagaaagaaaatttccactttaaaagtatatatcattgtttatccagtaatttatagccttgaacgtctttattctggaaatataatttaaacatatgcactaaaaatgtaaggtttcac

SEQ ID NO: 138237 - DNA, 322 bp, Zea Mays
cgttggatccaaggccagtggtgaagattagatctagttcaatgtggcggggaccgtcgatctcgctatgggtggctaagattagaggcttgtaccggttcggctcggctcgatctcgaccgtagatcggtgtgtaagcgggcacagttggtttggggctgttttaaatcatggtcgtcgatctcgtgatccgcggctcggatgtattggtgggttgggatctaatccgatccctgaattcaggatcggacggctgtgattagctcgtaccccttcgccccggcatttattcaaaagagtccttatgttattagaatataga

SEQ ID NO: 138238 - DNA, 469 bp, Zea Mays
ctttccaatacatttccttttgctttgtaagtctagtctctagtatcaggcgaacacaaagtgtaacaagttaaaaattcatggctgggcgactttccttctggtaggttctcactatgcgatcattaatttgaatttcacatacagtgtttggttaagaatcatgcaagcaagttggtgtacaagcgatgacaacattgagggcctattaaatcttagattaaactagtgcagtaaggctaacttgtgttggatagattatagatttatagattggtgtgaactggtaattttggttcctgataatcatttttgatcttatatagatggaagtgtgttgacgttcaaaagatctttctaaacgtagaaccttgtgggggaggggttggatcaggggtcagcgcagtgatatactgatatgtattaagttttgtcatgttcttatgaaacctttttgtttaaatagaac

SEQ ID NO: 138239 - DNA, 432 bp, Zea Mays
gttgggacgcacaactccctagtagaattgcatcatctgcacccatggggtttggagcagtgtgatctctctacatgcatgtggcactcctctagcctcgtatcgtgaccagggtgaggcgagctccaagcatgagggttcctccctacatagctcatcttgacacactcattggtgtgtcaactttgccaccaaaaatatgtcgttgattctctgaacacagtgcaagctctccttcacaacccagttgtactgaacaccggtgcgacgactgttgaataatggtgacaagataccactaggttcatagtcattgctaaggtcaacccttcccttctctacatgtacagcctcacctagaaaagtctacatcagactatgatgtgccatatgcatgctctcgagccctaaccatggtctcttcaactttga

SEQ ID NO: 138240 - DNA, 455 bp, Zea Mays
cttgagttcccattactactaggctagcgggaaatctatcccccttatttcaaccttagattcggacaaatcctatcatactgaacttttcccccaactgaattaactcttgaaggtgggatcattggttctatggggttgttatgtgattctacccaagatgcagaaacaaaagaatgtgtggcaccagtatcaaatagtacttttgctgggtaggattcgactagaaacatacctactgccacgtcctgagcatcctagattgcgtcggcctccaggtgattcacctttccacggttgtaggcctgaccacggactcctggtgcttgttgtggcgctccttgtcttgctggggcattgactgctggcggttgctaggctgctttcttgggacagttcttcgcccagtgattttgttctccacagtagaagcatgcacgacctcctacttgtgc

SEQ ID NO: 138241 - DNA, 485 bp, Zea Mays
cagaaggcactctccccagcattaaccgcgctagccattagatcacagatccacggcccggatcttcacacgcaaaggggtacgccggatcgattctccaccacacatccccggatgaacggttcagaacgaatcggtcacgatctaatcacaggcgtccattacggatccaacggccctgcgcccttcttcctcccttcgactccggacggcaccacaccacactaggatggcgcaatccctggtgagtcggcgagcaacagcctcagcgtgtggatcaaagcgggaacagagactgcgcatagcggagatgatagcgaactataggaacgtgctcttacttccgattgaggcgtaggccggtcgttcggcgttaagttgcctatggcccaggcatcccagcgattcctggtggaaacacggccacaatgacccccagacccagcgaagtccgcaccacgggcaccttggctgcagggccctcc

SEQ ID NO: 138242 - DNA, 595 bp, Zea Mays
ttgttgtctagctttttacccattcctctcgatcgtctggttccccgaattaatttgaatttgggtacataacttctataactcttttcacttgtcgtattcaaatcacctgacacttgtttcttttcgtttgcgcaccagataatccatgagctagcattaattggaaccatagaattccttacactatgcaaacccaaaacatgtaattaattattgtcaatgatgaaaaggctttgatggctttcttgaaggaggagagagagctggatctgaattgtggattagtaccatcttaacaacgagtcagtcttccttcaacaactcagaatcttaattaataaaattgcaacggagagattcgttacaaagctgcagagcgcacacattgttctgatggagagcgcatttctcctgcataccgttcgagctcagctatgtgatataagtatccaattaagcgcggagggagcggagaaggcaggaaagaagatgagctgggagggacgcggagggaaaaaaatattggtgcagccccattgcaaaccgtgctccgaccggcggccaccgtgcggacgacgcacaagggagggcg

SEQ ID NO: 138243 - DNA, 278 bp, Zea Mays
gctttgggtcaggctggtacctggcacatagggaccaccctgtgcctctgcccctgcaccacaccatcatacgtgctaccaactctagtccatcatcacctccatctaattgccctcctcttagacccactcttctgcacaatcctcctcctagtggtgccctatgtctaaagcctcctccacatagttgtcaaatgcaggagcagacatatggcagggggtgtaacccgagggagagcaaccctcttcgtctagtgtaccatagatcaagagtgagg

SEQ ID NO: 138244 - DNA, 709 bp, Zea Mays
gtcatattatatccaaggatggggtgtctactgacccagcaaagactcaggcgatggtggattggccagttccttcctcacttactgagttgagaggtttcctggggttgacaggttactataggaaatttgtcaggcattatggtgctattgccaagcccttgactactcttctccaagggaagaaaagatgggagtggacaaaagaagcacaacaagcttttgataagttgaagcaggctatgattcagaccccagtgttggccctaccagattttgagcttccttttgtggtggagactgatgcctgtgagaatgggattggggctgttttgatgcaacaaaacagacctgtggcttttttaagcaaggctttgggagttaagaatagtcagttgtccatttatgagaaggagttcttggctttaatgatggcagtggataggtggaggccatatcttcagagatctcagtttgtgataaagacggatcaccagtctctgacctttttgggtgaacaacaattgcagtctgaatggcaaaagaaggctatggctaagctgatgggtttgcaatttcagattgtctacaagaaaggaaaagagaatgtggtggcagatgccttgtccagagtgggaatggcgatggctatatccacagttacagagttgcaacctgtttggatccaagaggttactaattcctatgt

SEQ ID NO: 138245 - DNA, 2347 bp, Zea Mays
gccgccgttctgagggatcacgacccgccgttggtgctcgccaaagtggacgcgtacgacgagaggaacaaggatatcaaggacaagtaccaggtgcacgcgtaccccaccctcaagatcatagagaacggagggaaggacgtgcgtggctatggtggtccgagggatgccgatggcatcgtggagtacctcaagaagcaggtcggcccggcttccatcgagctcagttcggcggaggctgctcaggcgtccatcggcgacaaaggagtgattcttgtaggtttccactgctgttaaggatgatgtctcctgttcttttcaaaaaaatgtttcctgtttattgagtgccatgagagagtgatggaagcgagcgagtgtgatgcgtgcgtgtgaaacattctgttacaggttggagttttccccgagtttgctggtgtggagtacgagaatttcatggccgtggcagagagaaaacggtcagactacgatttctttcacacgtcggacgcgagcattctgccgcgtggtgatgtagccatcaagggccctgctgttcgtctctttaaaccatttgatgagctctttgttgattcacaggttggtacaatcctttttcatgtatactcaacgccactagtactaaagcaccattctggatctttttcaggattttgatacggatgctcttgaaaaattcattgaagtgtctggtttccctgcagtggttaccttcgatgctgacccaaccaaccataagtttcttgagagatactacagcactcctagcgccaaagtgagtaatacaactgtgattatgttctgtttgctctttcaaaatttgaatatatgagctgtatgtatgttgggtggaggagctaggttttcatcattcatttacctttgcataagtatagataatactttcatatctactgaaatcaaatatggttgggcaggcaatgcttttcttgaacttcagcgacgacagaatcgaggccttcaagagtcagattcaagaagctgccacgaaattcagtgctaataacataagttttttaattggtgacgttgaatctgctgaccgtgccttccaggttgctatttgtggtttctctgagtaattgtttgccaaggataaaggatttctacagctaaatgcctaacaagctctcgtgcaaattgtttcagtactttgggcttaaagaggacgatgtgccgctcctttttgtgattgcacagggtgggaaatatctcaatccgaccatcgaccctgatcaagtcataccctggttgaagcagtatacagttgaggccttctctactttattatgttgcttagttactgagctgtttacagtactttactagtaaataatttcctgcccaatcttgttgttgagttgtgctggttcatgtagtatggaaacttgacaccttatgtgaagtcagcgccaatcccaaaggtgaatgaccaacctgttaaggtcgttgtggctgacagtatcgatgatgttgttttcaactctggcaaaaatggttagttattctcacttctgtcggatttcatttacgcttagcattcaacttgttttactacatcatgcttggcgtgatccttttcttcgcagtactgctcgagttctatgcaccttggtgtggccattgccggaagctggccccaatcctggaggaagttgcagtctcattgcaagacgacgaagacgttgtcattgcaaagatggtgaacaattctgcgactgatgtgcaatcgtttctctttgtttcctttctgtggtatggtatggtatgaccatgctcatacctgaacattactcgtcattcaccccttttggttttcacaggatggcactgcaaatgatatccctaccgactttgcggtggagggataccccacgatctacttctactcaaccaccggtgaactttattcctacaatggcggaagaacggccgaggacatcatcagtttcatcaagaagaacaagggccccagagcgggtgccgtggacgaacagacgggtgatgctagtgctgcagaggaggccgttacaccgccgtcgtcgtcagagcttctgaaagacgaactctgatcacggtgccatatgtaggcatgcagctagctacagcgagagaatcgggcacgtccagagattcagagaaaatattcagttataacttacagtactaaatgcactcaggtcgctagttttatttgtcccgagaattattattaatgatcaaaaccgttactgatttgaataaggctagtgtaatccaccactcaactttttccttgtttctgccaaattcatgtagaaatagttcg

SEQ ID NO: 138246 - DNA, 327 bp, Zea Mays
cggagggacctcattagagaggaaagatcatagatgttgtcttaggatcgacagaccatcttagatgcctctaaacgaagtcgagctgagaaggtgaagattgatgatgaagaagagctactcatacctcaatcgaccgtacccctcatgtaaagaaaccggtaaatagattgatttgatcgattgagtgatgctttaatcggtacccctcatgtatataggggtggaggtctgaacccgttcctaggcgcttcccccaacaaattcttgtgtgattagtcgggtaagcacgtgcgtgataagaactctcgcctaagttaatccaat

SEQ ID NO: 138247 - DNA, 371 bp, Zea Mays
ctaaagtgccttctcctcttcctcgactgtttagccatgcatcgtcggaagcaacatctcctcctctccctgactccatcggctgttcttgccccgtggcctgcagaggtgcatgatggcagagaggcagttgtttagccagacatcatcgacgatgaatcctcctctccctgactccctcagctgttcttgccccgcggcctacagaggtgcatgatggcagagagtcagttctttagccacacatcatcgacgatgaatccttctctcccttgattatttttgctcgctgcctacagaggtgcatggaggtggagagtcatggcaacggttctaagcgctagcttaccgatgggggaaggtaaaggtgg

SEQ ID NO: 138248 - DNA, 749 bp, Zea Mays
cgcacaaaaacagaagagtgcaggggcatatctacaaaaatgcccagactcagtgagcaactacggtggacggcgggttcattataaaatatcttagggtttctttagcaaaatgtacccgcgaaggggtatcggtgaatcgaggccgctggattagaaaacaagggctgggattagatcttgcccacccaaaccggtacgcgaactcagccattggattgaggatctacgaccctgcaacactcacgatccgatcccgtctgatctgatcgaacggctcaaattagtcctaaccccacattcaatcccgaccgcaaaccctaagatcgacgacccacgctagttcaaatctaaaccgttcgctggtcgatcaatggtccaagggcatctctctcttctccccaacccgttcctgcatccatggacagcggtgaacaggcacagcggcggcgccatggtcgggtgatagcccgcacacccgaatgctccatttcctaatcaaacgatgctacacgaaattaggaacatgggttagcagtggagatggttcttaccgggattcgcagagtaattcctcctggccacgacacgaggcggagctgcgaccatccataacttcggcgagaaattggtcctactccggccacccacgctgcacatcaacgcgttgcggacgagcggcaagctccagctcccacgacacccgacggcgaatcaccccactgttctctctcttctctcgattgctc

SEQ ID NO: 138249 - DNA, 286 bp, Zea Mays
ggcgaatgacaaaaggcagtgttgtacataaataatagcttttgaaaacttggctagttgatttagcagagatgatttggcagctaggttaattagaaccaaatgattttcccatgttaagttaatttcttctttggagatggacaagagttttatgcaataagaaaaaagcaaagcagaaggatatgcaggaatatgctcttacttaaattcagaagaggctctattattacttttagtgtgtatgtgtttggctgcagggggtaaccagtaacaagcatatatg

SEQ ID NO: 138250 - DNA, 351 bp, Zea Mays
cttcttcgagtacattaatatcctccagcctagtagcctcggcttctgctatgctttcaaagatcaaccttggcgccccaaacttgagatcagcgggtagtactgcctctgacccatagaccatgaagaaaggagtatttccatgcagagctcggctaggttgagttcttaggctccaaacgacgtagggcaactcccttatccattttcctgcgaacttttcatttttatcgaagacctttttcctgagtgcctctaatatcatcccgttagctcgttcgacctgcctgttggctcttgggtgtgccaccgaagcatatttgatctgaatgctcttttgctcgcagaaat

SEQ ID NO: 138251 - DNA, 635 bp, Zea Mays
gggtgcggcacatggcgaagacgccaagaaggcccttggccagacgaatgaaaagtccccggcctctaccccgtccctggctcggaccacttcctctcccgctgcggtccatcggacgtgaggcagcggcggcgcgagaggaggatgggtgatgtggaggctgaggaggtggctcatcagaggaggcagggcctccagaccctgagggagcccgcttcgtacgagcagctgggttggaggaatcaacccagtagggtacgtagcgggagtgtttgatgggtttttcgaagtgagtctgggtgaccacttcgatcatcttcatgataaagggtgcatgaagacaccctttgagaggagaccaggaaacacggatgatctcttcccagatcatgtcaaacacattaatgcgggcgagactgttgggagcaaggaggagaaggaagacccgactctccccaaggacgttcatttgattcccgcccttcaggagaacggtcatcctggacaaagagttaaggtacctatagtacctatgcatgttggcggtggtccagaactcccgatccatagagacatgaataaattcagtctcttcccacatgggcagccaaatgtcatggactctcatgttgctg

SEQ ID NO: 138252 - DNA, 373 bp, Zea Mays
ccagggatggctcccctcctcgccgccggcttggcaaggaaagggtcgacagtggcaaggtggccgtaggagaaccagatctcaggtatcagtcatccgagagggtcctgaaggatgttttcaccggagactccaactccgatgatggcaactagatgggccaccagggggaccccgtactccctggtctatagggtcgaagcctgccttcctccggaagcccctctggactccccatgggtccaattttttgataaagtctgtgcaggaacgataacagtacaaggatgtggactacatcgacgaactcagacgtcaagcggtgacccgaaatgcacgttgcaaccaggcgcccagtcgctgctaacggctc

SEQ ID NO: 138253 - DNA, 521 bp, Zea Mays
tttctttgaaagaaacccaagggcttatttgtaactttgccgcgaccgaagggttacctttaagtctcagccgttggattagatctggacgaatcggattgtgaggatgaaggggaacaacccgagccacacatcaatagatccatggtccggatcgggttggcacaaagcagtacacaggttttaatctgcaccgcccatgtcgatcaaacggctgagagatcatcttccatcctggccgacagagcggtggcgcccgagcgacggtggtggcgggttcgccggagccacacacaaatgcgcaacagagcgtagtttgcctatccaactagtgaaacgcagggagggggttatggtggtcacgcagaggggaaacttaccgacggcggcgaagcagggacacccggccatggcgcggtgcggatccccaactccggcgaggaatcgccagttgccccgcgtacaatacgtgcccagcgagtcaccatactccctcccggatcactacgagtcttcacagt

SEQ ID NO: 138254 - DNA, 357 bp, Zea Mays
ccaaaaccgggtgtgacaatggggcttaggtattaagcaataagggagttattatgattagggcctcgtaggcagggcgatcatgctctcaaccttgccattgttctatgtctaggcggatttaataaagccaatcatctagtcataacatctttggtgtttggagcctttgatcctgcaaccttttccatcttcattttccccacgcccagattagatctattcctacccattctcatccccaattcacgacaattgcatatttaggacttcaaacatgacgcttcgcaattgtgccattcaaaacatttgtttcgtaaaaatgggactcagaacatctcctatttgattaggatg

SEQ ID NO: 138255 - DNA, 475 bp, Zea Mays
attggcagttgtagtccatgccttaaaaatcgggaggcattaattgatgggagctcgctgcaacatctataccgatcacaagagcctcaagtatattttcacccaggccgacctcaatatgaaataaagaagatggctagaattgatcaaagattatgacttagagccacactaccaccctggaaaggccaacgtagtagcggatgccctagtcgaaagccacaatgcaattgtctaactatggattctcgcgtcaataccttgtgtgacgagatggagaaaatgaagattgaagtggttctttctagtaccttggattacatctccgttgaaccgactttgctagaccaaattattatggcccaactcagtgataagggagtgcaaatcataaaggaaatgcttaaccagaagattgaaaactataagtgttttcgctaagaccgtaagggaatattgaggttcaaaagttgat

SEQ ID NO: 138256 - DNA, 781 bp, Zea Mays
atgcagcaaaaaaggtcttaattttatcaattgcgttgagatgcatgatcaatataattgctcatctccatatccccttttccagtactggatcttagctgctgtgcaaggacaagggcacaatgcaaacccagcagcagcactacaactaccaactccagctttccccttccttcccataaacccacccccaaagaaagctgctaaaacctaaagcgtggaaagttgcatcttctcactctcgtttggtgctgtctctgtagcagctccacaaaagccaacaccaaagaccccttcttcccaccaccaccctccacccctccttaataattccttctcccagcacaacctgagttgtaattattatactagtactcgtcagtattcaccttcgtttattgtttgttcccccatctggttgttgatctcttcttctcccctcgggcgctctgcggctatatatatacgtccaatccaatcccctctccattcggtctccatcgcctgatcaaactagctagaggtggtgggggggaaaaggaacaagttttctggctcttcttcttgttccctagtccctcctccgtactattcttagcgctagctgctcttcaccgagatcgcctcgccgtcacccatgttgggcttctgcgcccccgccgccggatcgcctcccgacgaggcgatgccggagccgttctgttcgctgcagatcgccaccacggccgccgccgccgccacgacaaagaagaagcgccggcccgccggcacaccaggtaag

SEQ ID NO: 138257 - DNA, 469 bp, Zea Mays
aagaaattatcccgaaaccagaaaatgatgaagtggtggtctttaagagcttcttcaaagcagggctgagatttcctctgcacgggatgattggagatgtcttgaaaaattttgagatttaccttcatcagctgacccctaatgccattgttaggctcagcgtgtatatctgggctctccgaagtcaaggggttgagccgctcgccgaaacattctgccgagtacacgaacttcattatcagacgaaggctagggaagacagactgcatgagaacttcggctgctacaattttgcttatcgcaaagacatgaagacaccagtggtcagctatcgctctaaatggctgacgggctggaaatctgaatggttttatgttaagattgatgagaaaaaggagaagctagtgcagagcccgctggagttaaccttcgggctaactaggcctcagtgcaacatgacgccgggggc

SEQ ID NO: 138258 - DNA, 385 bp, Zea Mays
ttactctgaactcatacatgatctacttcaggcagaaaagcatgatgagcttacgatgaaaaatcataagcaacgtcgtgttggagctgctcctatgcctgaaatacatcgtgctgtgaagaatgagaagaaaagggatggccccaaaaatcatcccaagaagtctgataattcaaagaagcgcaaacgcaacaagcgtccggataagcaaaatacaaaggctccaaggaaagacacccccacttccaagcaagagaagtgtaagaagtgtggatgcttcaaccatcctactaagaagtgtcgcattcctcgtcatttagtggcactgtaccagcaatctcttaagggcaaaaattctgaaggacagggatatgaagctcacttc

SEQ ID NO: 138259 - DNA, 304 bp, Zea Mays
gtgatggctttcaagagggatacaaaaggtggacttatcatggagaaatagactctatgcctattaatagtcatgactacactgatgcagaggctgtaaacaattcagatgaagatgacatagccaatttggttcaagacttagctggtggtctagatgataaaggagattttgaagtatctgatggtttagatgaaacagatgtagatttagaagccatcaatcagttagcgatagataatacccaagagctatacccagggtgtaagaagttctccaagttgcatttcttaataagaattct

SEQ ID NO: 138260 - DNA, 428 bp, Zea Mays
atctaacccgatatcaggcacatcagtgcaaacgtccatcataccaccatctgtcggctcggacagcagatattcagggaccatatcctcgagagtctgatcaaaatttgccagagaaaattcttgcagaccaacgagagtagacaaggctggagaaggaacaccactactctccccactgactatgtaacgacgactgtttttccgaattaaggggatttcctcctcctcttcctcatcctcgtcaataatacgaacagcacacccattgggatcagctctggccggattgcacccattgggttcagcatcatcaaggtcacacccattggggtcagcatcaaccaggtcacacccattgggttcagcaacagtaaaaatctccaccggcacttcctcggcagcaggagcagaagggccggcatcct

SEQ ID NO: 138261 - DNA, 407 bp, Zea Mays
aaaagatggatataaatgatggatatagagaacgttgctggagacagcctaatttgctacttctgttaccgagcgccccctcatctccataggaacacagccaagcaacaccgcctcctcgcctgttcagctcggaaatggagcacctctaccgtcatgacctctctccttcctctctgtctcccaccgcgatgttgattcctcttcacgccattaatagttgtaaccgctctgctctcctctttaattagtcattcgcttcttccccactggccattgtacacggttgtccctctcccttcccactattgttgtgccaccaatggcgtccgtctttctgcgctccaccgacgaccactcatctccccatctttcggctataaaactgacaccccgttgaacccctc

SEQ ID NO: 138262 - DNA, 610 bp, Zea Mays
gggatatttggcaaagccgccagtgcttaaagcatccaaggcgggagtgcctttcaaattgtatattgcagcacaagagaaggtaatcggtgctgttttaatacaagaacatggtgggaaagagagtgtggtggcctatttaagccgtcgtctgctggacagcgagagcaggtatgtgttcattgaaaaactctgtttatccttgtactttgcatgcactaggtttcgacattatttgctctcaagtacttgtactgtagtatgtcaaacggatgtggttaaatatatgttgcaaaagccgattcttagtggtcgagtcgggaagtgggcatatgctttgatagagtatgatctaatttatgagtctttatgttctatgaaagggcaagttatagccgattttataactgatcatagggttgatgtagagcataaaatctcatgtcttaatattcgtccttggcaattattttttgatggttctgtgtgcaaagaagggcagggaatcggctatgttttagtgtcactaaatggtttatggcatgaaacatcaattaggattgaatattgctgcactaacaatcagattgagtatgaggctttgttgttt

SEQ ID NO: 138263 - DNA, 2244 bp, Zea Mays
gcgcgtggcgttgcaccggctgttcgtgttcgcggacaggacggacgcggcgctcatggccgtgggcgccgtcgccgcggtggcgaacgggatggtgcagccgatcatggccttcatcttcggcgacgtcattgacgccttcggctccggagccaccgacggcgtcgtacgcagggtcgtccaggtagctgtgtgccctcttgcactttgcttttggcccataagacacgcttcggcccaaagctactgccaggggtgaaacgattggtgattgctacgtcagggtgatggttctgaccaaagccccattctcgtctcaggtgatcatgaacttcgtttatcttgccgttggatcaggagtagcttcaaccctccgtaagtggatttgctcttccaacctagaggtatcatgttgatgacttttatgttccctagaggtatcatgttggacaatcgccggagaaagacaggcggcacgaatcagagccatgtatctcaaggcaattctgaggcaggacattgcgttctttgacatggaaatgagtgctgggcaggcagttgagaggatggcaggggacacattcctcatccaagacgccattggagaaaaggtactatatatatatatatgctttgagattatatattatgcaagaggtgaactgcaaacagataaacttaattcctacgggtttaataatatggacaatatgtacgactactattctagtaccgagtgaagattgcacccaaaattatctcatcaatttgggcatcgtttgatgctatttttttcccgaaaaccttttctgtcaaattctctttaggttgggaaggccatacaactcctttctactttcattggtggattcatcattgcattcacgagaggatggctcctggcccttgtcatgctttcaagcgtccctccgattgccattgccggtgcaattgtttcaaagttgatgacagggctctccacccgaatgcaagcaaactacagtgatgctggaaacgtggtggagcaaactcttggtgccattaggacggtttgtgctattagctagcaaacacttcttccttttttgttttgtctattcatttactatcatcaccagtaacttcctgatatatatcctgcttacctggtttatctgtccatgcttatctgaaggttgtttcattcaatggcgagaatcaggctataacaaaatataacatgttcataagaaaggcgtaccggtcttctctgcaagaaggtgctgtaaatgcccttggattcggttctgtgatagcaatcttattttcaagttatggcttggctgtttggtatggatctaagctgatagtcgagcgaggttacaatggtggcatggtcatttctgttatcatgtctgtcatgatcggagcaatgtaagatttctgttatcatttaaaattttcttaaacgaacaatgacaatgacaataagcgagctatatatgtttctgtgtggacgagccttgactccgtcacagtgacagtgactgtatctatcttctgcctattaaaatgtaaagtgtaccatttgtgcttccaaggaaaacatctgcttaacttctaatactaaatacccaataaggattaaatcatgcatctttcagacaaaacattttgtatctattctttcagaccatcggttatatctactgatttcggttataaatacttcttttctgcaggtccttaggccaggcaacacgatcagtgacagcttttgcagaaggccaaggagcagcacatagaatgttcaagataattgaacgcaagccagatattgacatagatgataacacaggtatcatattggaggatgtcaagggtgatgttcaactgaaggacgtgtacttcagctatcccaccaggcctgaacatttgattttcgatggattctcgttgcaagtacaaagtggaacaacaatggccctggttggtgacagcggcagtgggaaatcgaccgtgatcagtttggtagaaaggttctatgacccacaggctggagaagtcttgattgacggggtcgacattagaggaatgaagcttggatggatgagaggaaaaattggtcttgtcaaccaagagccggtgctattctcaactacaatcagggaaaacattgcctatggaacagaaaagccaacacttgaagatatcaatagagcgatacagctcgctaatgctgctatattcatcgacaagttacca

SEQ ID NO: 138264 - DNA, 398 bp, Zea Mays
caagctcagacttagcctgatctgagagacgggagacggaggccataggtagagggtgggagaggaccccacaaatattttggttcacatttttagtatgcgacatgagggcatggaattttgtggtaaggtcgtcatccgagcaccagacatcgtgctagaatgaggtattttttccatcgtggatgacataagtggcaataacatggtagagggggagcaaggagcgcaatgaggtccaatgagcgcctgggagatcacttgagaggctggccaaacaggcgcgacggcggacccagtcaccccaccccaagaggaacatgacgaagtgtggaggcggtggatgagtttaaagtggaggcaggtgttgaaccactcgtgatctcggacgcctaggc

SEQ ID NO: 138265 - DNA, 1085 bp, Zea Mays
tttccatgccccttttacttttctaaaattgtcttcatgacttcttcattcgttacccgtccataccgcctcctctaacaatatcattcttagagcatctccaagagaacccgtaaaccaacactaaaaaacgttttaaggaaaaaaaactcattttaagccctccaacagttccctgttcttgccccaatattgttcgcgtcccgcatcgactggcttgcctcccgtaaatttgcgtgtgacggattcttccccaatcgccgagcgcgcgcatcagctgatggttcccgcgtcggcggcggtgagagaaactttagcggcgccgttcgggatcacgcgttcgctcgtcgagatcctccccgacggcccgacctcaacaagcacgccccgaacgccatcgtgtgctcccctcccggcatgcctctgccatgcctccgacccgtcatcgcctggtgcgtgcgccacccgcacctaccgcccatactagctcccacttgctcctctcttgcggcgacgacatgtatgcaggttgcggtaaggacttgaatgcagctgtgacggaaaacgtaggagcaggcagtgattaggactgcactctgctcatcaagtaccttgttctttcctcgtggtggcggttcctgctgatggggcaaacacaggagcaggcaatgataaggacttgcctgtgttggtggatgacaacagtttcattttcatgaacatttgcctgacttgtcgcctagtttagacttcttctattactattttgtgtgtctcggctattgttttgttttactattttcaattctacttatatatgatgaatgatactcaaagaaccatgatagatgttgcagaaggcgagaattctgtaaactcctccactgcattactaatcaactccaacaaatcaatttatcagttgacctcccatgtttaagcataactgattaaatgaacattctgtagtacagaccattgcaaaataaaactagcttgatgtcaacttgtcaagcaggaacttaacgaagagaggccaggccaggcctcaacagagcaaaagtgatctatcagcagaattgaag

SEQ ID NO: 138266 - DNA, 515 bp, Zea Mays
aatggagtagggtatgcatagctggaaggtggggagcagtgggatagaggtgaaattaagtgggtgtttgatttaaaaaaccactcgaggtggtatattataaatctattctttagatctggtgaaatgacctcattactcatattaatactaattaattatgagaaatgtgttaatattggatcaactcattctattttataggccaaacaaaaaatgagaaatacttaggaccgtgctacctcgatctttattatttcgtgtcggattgtactttggcctcctatttttaggctgtgcttgtggtgaaaaaaaatccggcccatattccttgggcttctctctcgaaaccaccatgatcgtggccgtctgtgcttgtggtgaaaaaaacccggcccatattccttgcgcttctctctcgaaaccaccatgatcgctgccgttccggccacgtcgcaccgtcatcatgacggcgaaatgtccctcagctggcaccaaattaagccccgtgcagc

SEQ ID NO: 138267 - DNA, 539 bp, Zea Mays
gtcaatgaatacaaaggcgcatttaacaatttctgaaacagaggacataagaaacaagataagttatgcacaaaagaacttaccgtggaagtggttttggcacgcttcttgcgtaggttgtactgaataggtgcagttctcttgtcacgcacaggtttgtccggggaacaagaatcagtgaatgaatgtgccagattgggcaaacttatgcaggaactacgccaaaaaagaagagtggtttaatacattaaaatggaggcacgagggcagatagcaacagtaaaatggaggaactaagtagttcacctagatctggtgtctggcgcgcggtgtgcagagtcgacggccgagcccaccgcctacttcacttcggctaggacgacggaggcagggcggatccggcaacgacaacgaaggagagggacgtcggcggctggagcgacaacggtggctggagcgacaacagcggctgggatatactaggacgtatggagcggcggaaaccattgagtcgcatatatgtcccaaccgcatcatta

SEQ ID NO: 138268 - DNA, 694 bp, Zea Mays
atttattttaattaatcactcttaatatgtatgctcttattgtgataaatatatgacacacaaaaataggagatcaactatattctctttgtatacatttttgggcattacaaatcctaccccccttaacaagaatctcgtcctcgagatttagaaagatctagggaaaagatggggaaaatttatgcgaaggtcttcttctctctcccaagtagcttcatcttctccatgatggctccactgcactttgcacatctttataaccttatttcttgtaactcgagtcaaagtgtccagaatcttgatagggtactcagcataagtcaggtcatcttgaacactaaggtcctccattggtagttgctcctcaggtaccctgaggcacttctttagttgggatacatagaagacatcatgtacatttgataggtgatcgggtagttctagttgatatgcaacttctcccacttgctttaagatcaagaaaggtccaatgaagcgaggggacaactttcctttaactttaaatctcctcatactccggatcggtgacaccttcagatacatgtgatcaccctccttaaactccaatagtcttctccgggtatcagcatagctcttctgccttgattgtgcaattctcaaattctcccttatcattcgaacttgttcttatgcctcttgtataagttca

SEQ ID NO: 138269 - DNA, 501 bp, Zea Mays
cagagatcaccagttgggaggaggatgatgaggagcaaagaggtggtgcgccaggtgagaggcaaagtgttcttccccagactgatcccggggaggagcactgccagaaggatcctggggcggagggtgagaagatgattggcccggatccccgtgatacggaggcgggacaaactgctcacgatcatcaaaataagcttcttcttcttcgtcgacgtcgtctgctgtcataaaaggcaccccgtatgcctgctggtaccactcgttgatttccggaggaggaggatggagaggcacgtcaggcgagcggggggcaaagggagtacctaaagaggaagcttgacgacgtaggttgtcgtcagtctcccgctgatgtctttccacctcatggacatccgcagcaatgttccggcacatggagaaaaatgtcgcaaacccgtgggccaagcgggcacccatccctcggccacaacctcgatcgcgaccacgaccacgtggcgt

SEQ ID NO: 138270 - DNA, 567 bp, Zea Mays
gcgctggcgctggcgccgcagtagtgcaggaaggaaacggacgagaggtgtgctgcggtcccgtcgtcgttcttcaccgtgccctgctggtctggtcttgcgtcgccgtcgtctgagactcgggaaaacaggaataaagcaaccacggtgtatgtacacgtaggtagagacagaaagggtagtgtgtgagtgagaggggagatggctacagtacaatacaaagcaaaacatgcagtgcagtgcagtgcaggagagagcgggtgagtgagagacatgcgaacctttcagctatagcctcctcggtttgcagaaggggaatctgtgcaggggagggggccaacagcagggcacagtgcaggctgggcagtgcatgctcagggacagcatgcaacaccaaaacacaccaaccgagagatggaaacagggagaggcgtgcgtggcgtgattgggggagctagtgttgcgttgcattgcatcccctcgtcactggccgccaagcaattgccccctttgatcctcctctcggaattgtaattcgcctctcgagaatccaactctcactaatag

SEQ ID NO: 138271 - DNA, 472 bp, Zea Mays
agtgcggagtatcgtggctttcaccggggcaacgtcctaggcgatggacagactacctaaggtggtttactgcaacgtggtaacacttctcagtacgtggcgtttgagcggcaagcggtagactccggcgaggtcatctggaccggccgcagagcaagtgggtacgacgactgggcggcttgatccattccccttttggatcttttacccctccgcgactatcccctcgccagagagcacaaatcgtagcaccaacacgaatcacggcgcgagggtcaccggcggtgaggtgcgatgtatctgcagattttcttcatcactgtaccatcgcgatcgttcatcagaacgcctgagagagcatctttagggctgttttcacaaatttttatgtgacaacgccctaatccgtctgtaacaaagttgatctcctatatactagctccaattcgaccatagaaaccttggtcattta

SEQ ID NO: 138272 - DNA, 303 bp, Zea Mays
caatgaatgtgtgggcactacaccctgagcaggttggtagagtgatgactcagtgcatgagcgcactgtatcgcctacaggccctacacagcaaggccatgacactccttactagcctggctcagactaccaagacaaccctcgacgatagggaggtctttgtggtggacttgtcttttgaattggtggagaaggatctccaaatctagcagatgaacacgcacacccgcgagctcgaggagctagtggaaattggggacaacaccattgaggtcctggagaactagctccacgatgtgcagg

SEQ ID NO: 138273 - DNA, 448 bp, Zea Mays
aagaaatccgagcgccatgccccctgctcaccagaacagaaccaagaacacaggatatctcgataccattgcaggaggggatggatcaccatgggagaaagtggggacgccgcgagcaggattcgttgagcacgacatcgtgatttccggtaacaacccctcccatagattctctttgagcctagctttgttttgatgtgtttcgcttagagcaccgggcaccgtatcggcaacggaccaatcaccggtgaagctctgtcgtatgggggcggcgacgccgctgctctggtcgtggcgggcaagggggaagtgccttaaacgtggattaaaggatgaacggttgagattaggcctgtgcataccattttgtggggtgatctgagctactgatcgatgacggacgaatgagatctaatcggggagtctgttaattcctgctcgttgattc

SEQ ID NO: 138274 - DNA, 761 bp, Zea Mays
ggggacactcaccgctggtcggcgatgccatcgctagtgatggtgcctcgtggtcgggaacgacagtggctgctgctactgttgcgggtccaaatatggacctgaggccgatgccggtgttgcggggtggcggcgaagaggaacatcagcttcagcttcatctaggcgtcatcgagcttgtggacgagcgtctggcgggatgacactcgaatgatcgaccgtgagttgttggccggttaggttagtgaggaaagctcccaccaattattggaaccaatcgccattcggcagtggcagctacaggagaagctggtgcaaccttatctaggcgggcgccctccttcttgcgggtggagaagcgggtgggagtctgttgtggagtgggcgagtgggacacgacgactgacatggcatggaggttgcagatggcgtgaagactggcgactggcgtggaggtcatggtttgctggcggaggaagttcgttgtgagagccaatcggcgcgaacgcgagaagcgagaggctggctggggcttgtcgtgcagagggtgcgggaggcgacacgggtgttggcgagcgtgcgcgggcctgggggtggagtcatggtctgcttgtgtacgatagaggtgagttggtgtgcattttggtgcgggtggagaagcgggctggagtatgttgtggagtgggcaggtgggacgtgacaactaacatgtcatggatgttgcagatggcgtgaagacatgcgactgacgtggaggtcat

SEQ ID NO: 138275 - DNA, 932 bp, Zea Mays
agacttagcctaagttctggccaaccaaacccgactcattgaggtcctcaccagaagccttgagaaccagcgcccgaatggtggaagacctcaggacaggatgggagattttctaaggctcaagcctcccacatttgctggatctagcaatccgctcgacgctgatgactggttgcgcacaataaaaaggaagttagaagccatcggatgccctgagaaccagcgtgttcatctggctgctcatcaactttctatgatggccctatcctggtgggataccttcagcattgccgtcagagatgctacttgggcagaatttgaagccgccttctgagaacatcatgtgccccaagggatcgttcagctcaaggaagatgaatttcgggaattaactcaaggaggaagacctttcagtgagtacgtgcacaaattcatagaattggctcgctatgcgcctgacgatgtcagcacataagccaagaagatggcccatttcttgaaggggctaagaccagaactcaagactatccttgccagccaagatttcctcagcttctcgcacctctcaaacaaggccatacaagtggaaagggctagggaagaagaaaagggtcacctcaagaggaaattccaagtccttcgagctcagcagcaggacaggcaccagagagttcgatcttttgggtttccacccaagggaccaagcttcaacaagccagctagatccactctgtcacgtttcagttaggaggggcaaagttccctccaggccccctccgttgcaagcaaccaacctccagcaaatgcctgttggcactgcggagaccctagtcactacaagaataattgcccccagttgaaggcatctgtgcctacttactccaactcggtgaatggccccaagaatgccccagcaaccgcctccaaggcac

SEQ ID NO: 138276 - DNA, 940 bp, Zea Mays
gcttccttcaaagctgctgcatctgacggtttgaggtggtagagaccccctttacaccgcccggccaagagagttttccgcgtgagatgatccttaacaagaaaatgccacgggtgaaattcaaagaatactttgttatcaagggtaaacttatgaacagaaagaaggtgcttagtgattgcaggaacacggagtatgttacgcaaaacaagaggccgatcaacagtatcaattgaggaatgaccagtatgagagatattcaaacctgctccattgccaacttggacttgatcacctccattgtagcgttctcgtatagccaagcaatctagatcactggtgatgtgatcagtagcgcctgtatccggaaaccagttcgtgtccaccttgtagtttgatgtagcagccaaatttgcagatggatcgtcatcttgataggtctcatccatccggtaccagcaacggcgagcagtgtgcccttccttttcacaaatttgacaggtcgggcgagatgtggacccacggccaccgcccctggatggtgcaccacgacccctggtgatcgggccgcgaccacggccagagcgaccccggccacggtgggagccttgacggccagcgacattggccgatgcaccgagattcagttgaagctctgcatggtgacgaagttgtcgggcttcaaaggccactagatgcgcgaagacatcatctagggtcggagtggacggcatagttgtcattgtggtgacaaagggatcatattcggcaggcaatcctgcaaaaagataggcaagaatttcctcgtcgcggagggcagcgtcagccgcagcgagttcattggccaggccacgaaccttgttgaagaaatcagccgccgtcagatcccgcttcttgcacgtagcaagatccacacgaatctgtatcgtgcgggctcgtg

SEQ ID NO: 138277 - DNA, 463 bp, Zea Mays
ccgaccacgtcctctctccggtctctgacccgacggaggattggctcctgatggatgaggtggtgctttcttggatccatggcatcctcaccgcgaactctaagacatcgttcatgtgacgaacgatacgaatcattggatctggggtgcccttgaggctcagttcctcggcaaccgccagactcggattctgtacctcgagattgccttccgacagcttgctcagggcgatctctctgtagatgattactgtcgtcagatgaacaccatggcgaacactcttcgcaccctcggtgccccatcactgatgagagtctcgtcctcaacctcctacgcggtttgagccctcgcttcgatcgcgtgactcccatcgtcacccacatgaggtcgtttcccacctttgcagaggtcaagaatgaccttcttctcaaggagcttcgcctctcttccacttcgacctcca

SEQ ID NO: 138278 - DNA, 621 bp, Zea Mays
agcagccgaagccgaagatgttgctaccagggagaaggttaccccgtggaaggtgtcgaacagtgaagttgatgaagccagggagccacgaggagaaaaaataaagttaattgaagaacaagtacccctgcttgaaggtgcaaagaaaatgaagcaaattgagtatgtgcttcatcatgcagctgaccaagtgctaacactgaacaagttgccaaggtgcagacttaagccgaagggctagggcatctggcaggagcgactatgtttggtggcagtgatgaagactttttgtacaacctgccggatagtaaagagattgatgtggcccaaattataatgaataacaccggacatccaaaacttgaagacaaattatctatgacacatagtgggatcttgtgggttgtctcacatatacatttataaaggttgacacttgccttattttggtttatgaataattctcatttaacacttgccctattttggtttatgaataattctcattctgaagctgaagcagtgtactaattttctatatcatgcagggacttatactgagaaaagcgttgaaaacgaaaagggattttgaagatggcagcacccaagaggcgataaaca

SEQ ID NO: 138279 - DNA, 550 bp, Zea Mays
gcgacactccgcgcaaaagtctcctaagggtgcagccggaatggcacaataagtgcgcaaaatcgaagtcttttccaaaagactcttcgtgcaaaagtcgcctaagggtgcagccggactctccgtgccaaagtcgcctaagggtgcagccggaataataggtgtgcacaatcgaagtcgctcccaaaagactctccgtgcagaagtggcctatgggcacggctgtatcaacgaagtcgtgcagccttatcatacaaattatggttacatacacacagcgagagcatcacatattacattggctcaaccttcaggatgatacccatctccctgtagttgaacaacattatcctcaattcctcaccctcaaaaatatttcgcagctccccttcacccacactagccccagccggcgaggacaacaattcccgcttaccagtcccgtccacgcgaagatgaccactctccatctcaccacaatgacacctgttacttcgcgacaattcactcactctccgtttctccaccacccttcgccgcctacacccag

SEQ ID NO: 138280 - DNA, 457 bp, Zea Mays
tgagcagagcttcctgaggcagagtttccatataagaaaggaagagtttcctcaggtagggtgggagagggttgatgatgctctgagtctgagttgctcgtcctccgatggaccatcgagagaataacctgtcacatttgtgtatggtcactgactcgagcgacgagaggccacagaatccagctccttcctccatgggtaggatcagattcttacaccctgtgaagttgacatctctcagcgagctagagggtggaaaatgcagtaccacttcctcgttgtcctcatctgatggtgatgccatcacatgcaaagaagaaagtgctggaaaacatttgaataattttgacaaataatttttggtaggtgtaaatcgtccaaggtagagagattggactgtgggtagcacaacaccatcatccagtcctctcaaaaatgtttcctcacatctagtgac

SEQ ID NO: 138281 - DNA, 538 bp, Zea Mays
cttttgtcacatggaatgaagtatatcaagaacgtgcctccttttggagactactacttgatcatcacatgaggtctcacgtagatgcatgatgtggtgaaaggcccaacaccaactgtgacgacgactttgcaactgttgatgatgactatggctaccctgaaggcgatggctgcattggaggcgtgatgacgatggcagcatacaccaaagagatgaacactctaatgacctcgacggtgcatgcatgaccatacaggccgatctacatattctatgccttaggatataatgggagtggcagagaagaaagactaaagccaccaattccatgttaactgcagggatggcatctaacttattttgggcccctttgatgacaggagactagccttttgctaaaatgtactggtacaatatagccccctgtggcatggtatatgtataggttgccaatatatatgaagaatggtgttgtaatgaacctatggatgctagactatatgatatactagctaggtcaatttgagcgtggctg

SEQ ID NO: 138282 - DNA, 823 bp, Zea Mays
ccgaagccttgttcattgcagctatgccagctgtttcacttcacatgttctagtgactggacaagtaatcctctttaacctaagagaatccgcagtttagacacctagtagagcacctaacaactgcaccttttctctatatctcaaagaaacaggtaaccctgagcaagttgcctgtcaaatccttgtattatcgcacccaatccaatcaaaagcacatcctcctcttattggaatctcctctagtggccgttgcctcgtcgttacccatagccggaaagttgcctcctttccccttgttcgccaaatcgccatccccccctgccctacacgagcagtgtttcgttcgcttgcatgcatccgcccttgtggtgtctagtctagctgcctgcctctctcggttagtggtggtggggctcggcagtgaccctcccaatcttttgccaatcaaaggccccttttcgcaagaaatttcagtcgcccacagcccccaaaggcacccacatctgtcgcactcaagatcctgtttcgtgcgtggctgttctgttcacttgccactgcccttgtgtgtgtgtgtgtgtctggaaagcaactaaaaaaagagaaaacccccatggcaatggcaaccaactcatcattagccgcgtgccagagcagtcagcaccattgaatgcctccttgtttattagcttcctgggatcaatacctttgtggagttcggaattcggatggaccacctttcttgaaacgcgaacgtgaaatggagggaactttattcctaattcctatcctggtgcgtcagccactacagttcttcgaaaaa

SEQ ID NO: 138283 - DNA, 885 bp, Zea Mays
gtgggtatgcgtggttttgttgaatgagtgtgttgttgctgcagatggcgcatgccaaaggggttgaggaccttggtggtctagtcggcgcgctgcccgaggctgcaagggcggatctggcgccgtcatccgatgccagcgagggcccatcgtcgacccccgcgccgactagagccggtgaagactctgcaccagcccctgcgccgacgtgtgaggacacctcgaaggcggtggtcgaaccagctgccaaagaccccatggccgctgccgatccttcgcaggtggcggagtaggggttagggattgtgtgtgtaaaattgtctatgtgatactgaacctcggttgctgcgcaggttccgaagtttgggcctgcgcaagcaaccactactgacaatactaattttgcggcagagacttcaattgtagtgcttgccgacgatagtgtgcctggttttatgtctgaatgttttgagtccgacggtgagtctaggagtttgtttccttggacggaggagtcctcagatgaaggcttggattattttgttgtgttggatgtggctacggtggagacttcgccgtgagtggagggtgctgaggatcttgtgcgagtactgggtgtaggcggcgaagggtggtgggaaaacaaagtgtgggtgaattttcacggagcggcaggcgccaccgcatggggatggagcgtggccggctttgggtagacggggttggtaaacgagagttgttgtcctcaccgattggggtggccataggcgaggggggtcttcaggagctttttgagggtgaggaattgaggataatgttgtttaattacagagagatgggtatcatttcgaaggttgagccgatgtaataggcgatgccctcgtc

SEQ ID NO: 138284 - DNA, 454 bp, Zea Mays
gcaattagtggttgttgctgttgccaaatgttgcccttctatcacggatttctttacctacaccacatcaattgttaacactgttaatgcatcttgtaagagacatgatcagttggcccaagaacatcatgacaaccttgtgcatagtttggaaatgggtgaaattttttctggaagaggggaaaaccaagcaactaatcttgcaaggcccggggacactcggtggggatcacaccacaaaacattgtgtcgtcttcattatatgtggaaagcagtcttagaggtattagagattatatgtcaagatggttctagttctcaaagaactactgcatctggtttgctaaaacaaatggagacttttgagtttgtgcttattatgcattttgttatcaaattattgggtaagactaatgatttatcccaatgcttgcaaaagaaagatcaaaatatt

SEQ ID NO: 138285 - DNA, 446 bp, Zea Mays
acggtagggacgatactcccaacccgccaccagtaccaccgactttggccgaggctatcactgccttggtcaatgccaccgctgataatacacgctttttgcgcgaaatgatgggcaatcagttccaacagcatggaggcagggctcctccccaaggaccgcttgatactacatattcggaattctctgagactcgacccccgctctttatcaaagcagaagaacctctagaagacgatgagtgggtaagagttatggaacagaagtttgggttaattcgttgcacggagatacaaaagccactgtttgtcgcacaacagctaagagggcctgccaggacttggtgggcaaatttctcagcaatccagcctgctgggcatcatatcacctaggaggaatttaagttagcatttcgggagcattatgtcccagaaggagtgctccat

SEQ ID NO: 138286 - DNA, 375 bp, Zea Mays
ttcaatatttagcttcaaagaaccttccttcagaataatgattctgtactgacatttttatttcttaggtaatgtcaaatttactgtattattatggcatgtgtaatgtcgtgaaggatattttgttgcaacactactttggaaaggtaactaaatatggcttatgttatggcatgcgatgtgatatttgtgtagctgcttaaaacttgtgtttgaactttatgatccttagggagtacgtggaggctcggttgaacctgaatcagatattgtgcaggcttgcagaagcgtatgcgctaagacatctcatcccttatcagttatggtgtatttgtttatgatctttaaccctccttttattcaatgaagtttcta

SEQ ID NO: 138287 - DNA, 1076 bp, Zea Mays
acccccaaattcagggcgttacaccaatcgtttctccctccatgttttcttagggataaccattggcctatcctcgttaaaccacctgtcacgctcctcctctttcatcttttctgtcatttccatagtcctaaaccgctagacacgacgcttttgtgtatggcttaacccaggtggacaccatctcggtactggttttgtatcaggcgcaactgaaccatgattttttctgcccctcacatccagtacaccaccagctgaagctcgactaacaggacctgcattctgggcgacaccaatcaacacattttttctcctgcataaatccattctctaaccgacactcttgttgttcgcttattactgcaacctggttgctcggcccacgtgtgatgctctcctctacagtggccatccatcacaacaccgggaccgactacacgctgattcgcaatcatttcggtcctatgtttcctatcccagctagcagaattactcatttgccgtgtagccactacatcaagcttcatacgcttgcttctcatcccttgacctccaccactttgcggcctactctcctgtaatctgtttgtcccagcagcagctatgtgtccctgtcctatgtttggcttggttgccacttcttcgccgttctttgtgtaattctttgtgacagccacctgaccattttgcttcgccatctctgcctggagactttctgcagcatttaatatgtcgcactccactgttcccactatgatttttgagccgcttttgcccagcggctcattttgcccaccaacacccatacacagctctttggcatccgctgggttgtgaggagaccatttcttttgcatctgcgagcgcaactcctcgggaccttttgatatggcaacagccctgagccgactccccatactcctccctagcctgctccacactccatgctttcactctgtctccaaatatagtcgcttcgggaattcacgttgtgagaacaaatctcggttttctgcatgagcacagtttcctcaacttctccaattcagcaaccccccctctgtccaaatagg

SEQ ID NO: 138288 - DNA, 774 bp, Zea Mays
ctaatatttgaaaacacagggtctgctttctaaaattgtggaccaccctgtaatgatcttcacataggctaggaccacgagttggttatcacattagttaggggctttttagcaaatgacccacacctgatacacgcgcacgaacacgagtcgttgaggtctagattcacaacctcaattagaagctgaatcgatatgacagagtggccgtcggatcggggatcgacgaccagcgcatgagatctaatttgaaccgtgcgtaggccgatcaacgacttcgatttaatgggccgaaccattttcttatcttctaatctcgatcgtccactcacagatccatgaccagagtatgtctcccctccctcgacagcagagatggcagcgccgcccgctcgtatgacgacgagatcttcggcaaccccgtgctccagcccacggtgcacgatttcgaatgacaacgagttatagatgcattggtgacaaaagagaacttcgaagaagatatctaactagaaatcgacgcatggagctctttgtccacgatgaagagccggcccgccgtgacatccgagctccaacgagtaattgaaagtgctcccgccaccaaacgatcccgttgagtccacgtgcacccacctgggagctcgatgagcttcttgtcccaacatgaagaccccaacaacagtgtggtgtgttatcttctgtgacagccatcccaagttatcgggcctacatgcaccaatccttaccatgcatttacacttaagtctaaaa

SEQ ID NO: 138289 - DNA, 352 bp, Zea Mays
attagcaagttgtcatgtaaagattcgagatcttggccctgcaaattgggctgtcatgcgcacttaatagggattccattgtacagtgactgaaaaagatcccaaattcatcccccctcgccaccggtgatcttgcgtcgggattctcatcgctgttgcgattcaggctcagcaaagtaccagatgtggctcagggtggtaaagatcattgtgtggataaactccggccactgttctcaccggccgtcgtgtcccgccgtggttagtcgcactggcatcaccagcgttcaccgttatccggccaggctacgtgcctcgacgctttaccacatcgtggtgagtcaccataaac

SEQ ID NO: 138290 - DNA, 409 bp, Zea Mays
cccacttcacctttcccttcgctcggtccatctttccctcaccggttgataggcgggcccacgaccaacactgccctcgcatgcttccccctgccattgtcgtatgggacccacatgtcatcccttttttccttcaccgtaataagcgcgcggagatcggatcgagccgtatccagacggatgcaatccgtatcgaccgtaacagattatctgcctctgggcctataaaacccggagtcgcgttgcttcccgcagaaatagatatgccccggtgcccttcgtcctgaggcaccgtgcgcctcgcttcggacgaagatgcagagatgggagatcgggcttgtccggtgcttgtgtagtgcttatggcgatgcgtcacgcgcaagcagctgggggaaatcatgggcgctga

SEQ ID NO: 138291 - DNA, 776 bp, Zea Mays
gccggctcaaaatattgatcctccatggagaatgtaatctcataccccaccttataaaaaaccacatctgttgtgagcagaagaagttctttatctagtgtcccaaccaagattcgaatcacacctttcttcctgtatgtatacatatcaacatcaatggtggtgccaatcattgatccaagtgcccaaaaaccaagataatgcctccatgcatgaggtacaccagtagcatgcacccacacttcatccaaaaagtaggttggtgctgcatcgcccccatgtttccatttagatatggttaaggtcactccactactcctcatcttgtattccatttcagacatccttgctaattcttcttctgatggaaaagtaactaggaaagaatcttctccatgctgcaaagcttcccgagcccattcaacccttgacaattttgccaattcagtttgaattgaggtagcatcaagcttacccccagtcatctttatcaatccagttggagcagcataaggtgtttcaagtctatagtcaaaaactgatatgcgaaagaaacaaagctcattcttggcatatccactcatggctgcagttggtttctccatcttgagcaaaggacatttggctgcaatatgtatattcttcttattgcatacataacaatctaaatctgctttgcatgcttcaactagatgtctgttgcacttacagcgatagcagtgtggtggccttggtttcttggccttgaaatctcggttctcccgtttctgagtcgc

SEQ ID NO: 138292 - DNA, 334 bp, Zea Mays
actgctgccagctatcgccaaactggcaacctccccatccccaaccttcactctaggcccagtaacaacaaaaccctaatccccatcctcctcctgaaccatcacctgaatccctaaccctaactggagtgtcaccaacacctggagcatccacaaatccctatccccataccaaacccctaacccaagtcctaaactctaaccctaactggactgttcccatagccctgatcaagtgatcattgtcatcgccagaatcaaagatttatctcgttcttacttcctgcatgcaattcttacttgattccttatcttacttccgtcattcgatttt

SEQ ID NO: 138293 - DNA, 545 bp, Zea Mays
cttcttgtcaccggagcccacccatgcgtgcgattaaacacctctcttgccgtctctctgattcgcttgcttcctgcctccaacatcttttttgttctccctgtctgcattagtgcccagtaatccaaaagagaacaacacatgaagattacatcagtggggtcattatggagtttttttattaaagcaaacggaatttctggacttccagatcgcccatagaacagctccgcacccaactacaacagattttctgtaccccttatcaaagtttctaagccacaccccagttagatgttccacatctgacggagtagtaggcaaataaagtgcaatctgaatcagacgccaaatgaatcgagctactgagcattcaaaaaacaaatgcttagtagattcaaacaagccacaaaagacgcaatcagagaccccaaaccagcttcttttaatcaaattttccttcgagagaattctgttcttgataatcagccataagaatatcttgattttatgggggattttgattttccataaaaatctgtaag

SEQ ID NO: 138294 - DNA, 398 bp, Zea Mays
cacggatcgtcacaggatttgccttgccagtttgcaagagcgggtggatattaactgggtggaaatgaaccggagcgaagagtgtcccgtacgtcacgtcagggggggcgccagctagaggcccagagcagctccccgtccgccgcgggttctctctcccagacataaaatgctccagcttctcgcgtagcaagagaccacagctgcgatgcgatcgaggcggatggaggaattggaatttcaagaagccgacgtcctgtggccatggccagacacgccgtcgccggaggaggacagcagctacgacctactactactactagcgtcgtcgtcggctcccgagctgtacgagtacgatgccgccgtcgtcaccgacttctcgtgcgaaccgttcagcg

SEQ ID NO: 138295 - DNA, 374 bp, Zea Mays
tagttccggaggaaggcattcacaaatctctcaaaaacgaacactatattgtgtcttttgtggagaagataatgggcactctaccaagtactgcaccatcactatacagaaacaaagggagctagcatctaccatccaagctagccaaccgaaggaaatatgtcacatgccatcctactatgtccagcatcagggtcttaatgcccatcctttggcctcaagtgtgtcagtgcacccacaatcaaattattgggaagcttatcatcctcaactcctagggccaccaccgtatgaccaagtgcccccaatcaacattcgtacccaactcaagaatcattccaagctgatagaagggaggggttagttagaatagt

SEQ ID NO: 138296 - DNA, 359 bp, Zea Mays
tctatatactgtcgaacggtctaacgacctatcattggaccactgcttatagtccaacgctttctgatcttgccatatgtactagtcgtttgattttgcttgttatagcccaacgactagttgagcttttggtacaacgtcctccagttggactctcgtcgaactatagtctccacggtccaacgcctacaaacatctccccgtcagattggtccgatgacctcctttggactatagtatagagtctgacgccttcccgtcctttacagactaatggaccctctcagtgaacattgtctctgtttagttcgatgttgtccgggccatagtctaaggcgtctgtgagtaggacaatatgg

SEQ ID NO: 138297 - DNA, 340 bp, Zea Mays
cgggaatttctccaatcgaagcaaccaaagcactaacttcttcggcagagggtcgtactctaaggcccaaaccgccgtcagcaacaggaggattcgacacaaaatgggtaaaagccttggaaggaggcaggttccaggccgagtatgcgataggggcaccaacattggacaccttgcctctaagtatcatttcaagccggttcactaagtctacagcgggaattcttctattggtgacccgggttgagtcagctaaaccttggtacaagtaggctgggtatgccctatccttcaatggctggatgttcttgaaaacaaaatcaacaaccacagcctctgc

SEQ ID NO: 138298 - DNA, 336 bp, Zea Mays
tggtgacaccttggggtacacttgatcaccttcctcaaactccaatggtctccttctattatcagcataactcttttgtctggttcgagctaccctcaagttctccttgattatacagacttgttcttctgcctcttgggtaagtttagatccaaagaactgtcttcctccagtctgatccaacatagaggaatcctgcatttcctgccatatagagtctcgaacagtgacatcttcagactggcctgttaactagtatatgagaactcagcataaggtagactcttatcccaacttcctccctgctgaagggcacatgctctcaacatatctttc

SEQ ID NO: 138299 - DNA, 361 bp, Zea Mays
gcgatagttaaaatggtccccagtcacattactcacatttatgttctgctagtgtccgggacgggattttggcatgcagttttctttctcgctgatgaagcatgtgcccagtgccctcgtcgactactacaaggcttgaacacaacacatggaggaacacagaggagtggggaaagcgaacatgcccgagaccaagaggctcgtaaaagcaatggtgaggtcgtcaaaccagcgacacagagtacacagattcctcgctatctggcgcgcacaccacccatgatcatgtttatacccatcccctgatataaaacgacctcctccggggacgccacgactcacaacacaagcacgcacccgc

SEQ ID NO: 138300 - DNA, 567 bp, Zea Mays
gtgaatttgtcaatggcaaccaacacgtgagtgtatcctccttgagctttcttgaagggtccaatcatgtccagtccccagcacgcaaatgtccatgttacgggtatggttggcaattgctgtgctggtaaatgctgctgttttgataagtattggcaagcttcacacctctggactaactcggctgcatcactctttgttgttggctagtagaaatcagacctgaagaccttcccaactagagtcctggatgctacgtgtatcctgcattgcccggcgtggatctcatctagtagttgcttcccagtggccgaaagaatgcacttcatgaggactcctgttgcgccccttctgtacagtgcttccccaatgagagtgtagtgagctgactgccttgcgatgcgttctgctgcagttttgtcatccggcacctcttcattctttatatatctgatgattggctcccattagtcatcagaatctgactctggctggctcagaacattgcactcttctgcccgatctaaggaaatacttgggcatggtacttcttggacgaaaacccca

SEQ ID NO: 138301 - DNA, 548 bp, Zea Mays
gagatatctctgtatttccatcatcactgtaaactttggctgacaatagagaaaataccaatatactttctaactgcagcaccctctgtacagcttacaacattggcagcatcgtaaagcatcacaaatttaaagaaagataatcactgaaaggttgcaactgtgtcccacaccatagaaaagataaaaatctgccctatgcaccatatcatatatgttcttcggtgatgatctgacatgggtcagttctattcgatgcttgacactgagaccatggtttgcttgcatccatggacatcttttgttccgcttgtcgatgttttatgattgagaccactacacttcactgcaaccatggagagtaacacacccctagtgttttgaaatagaagcattatcaactaacattacgtcactccaatttgtaatgcatcgaatatattctctgataattcttgtgcatcaatccaactccttccagtatcctttcttgcacgctgggtgtcgaatacagtgcgattccagtatttctcatcccacatgtcaac

SEQ ID NO: 138302 - DNA, 571 bp, Zea Mays
agcctttcggttcaactaattttctcaggtctcatcagtaagtaacacaatttttatttgtattaagagtttcgtttttttttgttttgagagaaatatttacctttcttatgagacccaattaccatctatgtttcatgataaattggtgtcacaacagtgaagcttcgcgtgttcatcgttgctgtcctgattgtgatcaacttgggcacctgcatggcaaaggttggatcttacggcacaactgtgtcagcgtcaccgaggcaaatccgagtacttaccgccgcaactgatggaagaaatggacctcccagcaatgatcaccagtgcccgctcgggacctaccccaattgttaagcaatggatgtatcaaaacactgaggaacagctcaaatacgttcacgaaaattacacccgtctgtgctgttaggggagcatgaatatcatgaacatggatagctgtattgccatcccacacagtacttgtttttattcttgtgtacacgtcactctcttatatatacttaagaaagatgtattaaatacattgaattcactactgtaatccggc

SEQ ID NO: 138303 - DNA, 972 bp, Zea Mays
cagagcgggagcacgggcgggcatcgcgatgacgggtgcgggagcaggcgggggcacgcgaatgacgggagcggagccacggtgaagctggtggtggacgccctcgttagtgtcttatagagtagtagagattgtcacttgtatacaactctaggtcctaattgtgctcctaaaaaaatcctagtattcaagtggcaaaacccattgatgtagtttattgattggtagatgggtagcagatagatctttgactcgccctgttgtggaggctttgagctgcactttttgatctattttctgtttaatctcaactcctatctaactttgtcctaatggacctgatcagtccaatagacctaacctagttggccccatcaactgctcataacactaccaccccttttcgagcagctcgttcttgagatgcaacacctcctattccatgattgacaaaggcgagcctcaccttctattccatgattgacaaaggcgagcctcaccatgtacggggagggtgtgatgaaggcctgtgtgagggagagggatgcacgctaaagctcgcgatagcgttgtcctcaatcccttgttcctgctttacgatagcttagggtactgttgaggtcttcatattaatcacggtggtagacgttggtgctagacacacaactcgagaagctacttgcacccctcaacagaggtggtgctagttagggcagaagtggcggtagggatcatgatggctgcaatactgttcacatatgaatagtagtcatgggtggttgtttttgggttaggatttaggaatgggaggagatgagatcttagatctagattggattagaggcgtgaatttgggtgagatttgaactggactggattaggggtgtggttttgggtgggtattgtggtcggaggattgaaagctcttgataccaaataatgtagtttattgattgatatgggatagcatat

SEQ ID NO: 138304 - DNA, 279 bp, Zea Mays
gcaccgtttaaagtcatcgccgacttaagccgattgctccgttagtagggtatagtggtcaccctaagtcgagtaagcgtgttgattcctagtccaatcgaatcgaagtcaagtgatagttaacagtttgaatgcccttgaaaatgaaaactttattgatgatgtattctcccattatagagtacaatgttgccccgatagctttcgaggtcttgctaagggtaaaactttctaagatgctctatgttccatgaattccccacttccgtaccatctctt

SEQ ID NO: 138305 - DNA, 677 bp, Zea Mays
tgcctctagagatttgaattgagttcaagaatgaagtaacgtgctagattgagaatttttagtggctctcattcacaccctgtagtcgcccttttcgatccttcaaccactcatctcaagagttgactcttttgacttcagaaagtggatatgatttgagatatccaagcttttgtgtcttcctcaataacatgttggtaggcaaactttggtagagtgtttggagtaaatcctactgttttgtgttttttatattatgcattacttgtttataaggtggctcaagggttgggacccgatctactactttgtgcttctacaacaacttttaagtggtgaattatgctttactgtatctagggagctcaataatttacttgtatctttgggcagattttgaattatgacattaataaggtctgtgcacaccagtgcaaggcttcaaacgatagtaccacacctgttgctatcacgattttaagtgttgtttttaccaaatctattcacccctctggtcataacggatcctaggaaaaactattttgttccaacgagctgaccattgcttgtccacgtgacattgtggtagataaagttggagggctcatactattcattaattggaattgttgcatccaaacaaatgtatcctactgtcccatatattggaaaataac

SEQ ID NO: 138306 - DNA, 427 bp, Zea Mays
tttccccattagcaacatattgtcgactgttcttccgagtcaaaggtacttcatcttcttcctcccccttgttttcatcagcaacacagacagcaccaccattgggttcagcgacagatggagcacacccattgggatcagcgacagatggatcacacccattggggtcagcgtcggtaaattcagccataggcacttcctcatcagcaggaaccgaaggaccaacatcccgatccaaactagatactcgccgaagacgtctctttttctttttctgctcatcaacaggagaatcaggttgattggctcggcaagggcgtttcgggcgaacactgacaggcctctgaatatccaaggttgtaccagcttccgggagaggcgccaccaccaatgtcccagcaggagcagcatcagaagagtcctcagc

SEQ ID NO: 138307 - DNA, 715 bp, Zea Mays
cgccaaccctcgctgctgctaccatgccagtgaccgcaacaccccactccttgcccatctacgatggcagcggtgaccctctgggatggttaaacgacagcgaacggttcttctggagccagcgcaccctggagtccgacaaggcctagttggcatagtatcacctcatgggccacgcacatacgtggttctagtggctggaacacggcgagcatcaggtcacgtggccacagttcaagatcatgtgccagcagcgctttggttccctcgcggtagtggcgacttctgctgccacgtttgtcgtgtcctcgtcgccgacaccgcccccgtcatcaggggcagccatcaccactacccttgaccccaagagcgacgtctagcagagtgtggttgctccacgacagacgacgacgatcgtccacctgcaggttgcagcacgcggtttactagcgcgtcgacgagtgaagcagatgttggcgatgttccattgcggggagtcgtaactgcaccagcgcggcccagcaacatggtggttgttcacctcaccgtacgagaggctgcaagacacgacgcccctctgcatcgctctgtccggcgctggccctcatctgtggcgaccgagcaactacctcgactactctccttcgtacaaggggatctggtggccttgccaccctctgctctagccacgccaccctctgtgcactggtggtca

SEQ ID NO: 138308 - DNA, 382 bp, Zea Mays
gtggacttcccaacgtgcgagtctatccgcatgtcgcagcaggtggaccgctccggcgagcgcacgcttgccgtggtcaccaaagtcgacaaaaaccccgagggactgcttgagaaggtcaccatggacgacgtgaacatcggcctcggctacgtctgcgtccgcaaccgcatcggcgacgagacttatgaccaagcgcgcgtcgaggaggaacggctctttaaataccatcctttgctgtcgaagatcgacaaggacatggtcggcatcccagtccttgctaataggctcatgcagatacagtccaccatcattgccaagtgcctcccggacatcgtgaagcagatcaacgaccgcctcagccgcagcagcgccgagctgg

SEQ ID NO: 138309 - DNA, 424 bp, Zea Mays
ccatgttgttttcggaaagtcgacaatcaaacaaggacagattgatgccatgaggggaaggtattctcgtgacatttctattgtgcgggctgggggagagagtaatgtccctctgcccgaagctgacgaggtagttgtctacaaaagttttatgaaagcggggcttcgattccctttggataatgtgctggttgaagtgttgaaaaccttcaaagtctaccttcatcagcttacccctgaagccatcatcaggatagaggtttatatttgggccatgaggagtcaaggacaagagccgaatgcgaaatgcttctgcaacttgcatgaattaactaatgagacgaaggctgttggaaaagagcaataccacaacaatttcgaatgttatggcttcgtaccccattctgaagtaagcagtctagtg

SEQ ID NO: 138310 - DNA, 603 bp, Zea Mays
acttattttcgttggtactcaattattcttaaactaggtgcgtgggaatggtgagatgggtttttgtacagtacagccattgtgcgcgctctgcaaaagcaaggttgccgactgcggatctacactgcaccctgccagatctacaatttattccacaatcgtgtagtagcagtagtagtacgctgtacaacagtgactagtgtagtagcagtagtagcagcgtaggtctagctagctgattctgaactgcacgcacgactgctttagcacgcttcagtttctcggaggttgacaacttaaactaggtgcgtgggaatggtgtgacacggtgagatgatcagggaatcaactatgacataggaagtgcagttttgtgccatatctcaccatgacaagcagctaaaaaggggtggagtttctgggttaaatgggaacctcacaaagaagtacaaggttacatgttccacacttctattgcatggccaccacgtaggataggggcacaggaaagtagcagttgtcgccaaatctccactgagcaccaacactgaagttcagtttcttctagttactatttctagtctgaaaattcagacctctgcc

SEQ ID NO: 138311 - DNA, 633 bp, Zea Mays
agagctccggcgagcatctgcactggccgattaaggcgacgaccggcgctcccgagcggcggacatcacatcggacctaccccgagtgtttcccctaacctaattgcacaaatggtgagctatcaagctctgtccgcgtgaaccgaatgggtggcggacagttgatcgtgttcccagtgattggtgagcccgcagttcaaattggtggttcagcaagcatcgtaggcatgtgagaaagcttaaacgaggaagcaggggacggggactgaccggaaaagggctggcgacggtgaagctcgtttcacggtggcggaagcttgaattgggggaaattggaaattgggactcactgggggatgatagctaacgattcttcatgtctgggttcgcgataatctaacgcagctaggggagggctcaatttataggcgtcgcaagcggtggccgggaattttacgatggacgcgcggcggccggaggtagagaagatactggcgcacgtgaattcgtggcatctaccgtggcagttactccgacgagccacgaagaggcacaagggttcacggctaagcagtggaggggctgagccacgcggcgcaaggccgggaggcggctgtcgccggcgagcatatc

SEQ ID NO: 138312 - DNA, 431 bp, Zea Mays
acacaaccttgatagtctcgagtggatctgcctccttgcaataaatagtcatctggtgacaacctcctttccttggctcgggcgagactaactcagtcaccacttcttctcctagtggggacaccaacttaattgtcctcttatcacagctgataactgcttggtacttatctagccaattcatccctaggatgacatctattccctgagtagacgttactataaggttagcgggaaactctatcccccttatttccacacttacattcaagcaaacactatcggctcgaactttaccacttgctgaatcaatttgaattggtgttgacatggtagttattggaagattatgcgcttctaccccatgatgcactaataaatgaatgtgttgcttcagtatcaaataacacttctacaatatgggaatcgac

SEQ ID NO: 138313 - DNA, 292 bp, Zea Mays
agtgtttgttagtcggaataaaattcgacagaggactttggtgtgctgatcttctattgtacccatcacatttatcgaggtctagcacggttatcggagaatattgggagccaaggacttagtgaggtttaggctaccggaatgtaataacctacgtccctattttggtgagataaattgcttgaacgggttaagtggttgtcctgatgttccctcccctgcacaagagcaccatctctcttttatagaccaaagaagagagagttatagctgacatgtgaggccaagtcat

SEQ ID NO: 138314 - DNA, 353 bp, Zea Mays
cgagatcgcgctctaaggtcgacgaggcacgggatgacctcaacccagcatcaggcacgtcaacgcaagcctccattgcaccatcatccactggctccgataacaagtcttctgggaccatatcttcaagagtttgatcaaagttggctagggacagttcttgcagaccaatgagggcagacaaagcaggagagggaactccactacttccaccgctggcgatgaattgtcgactatttttccgagtcaaaggagcttcattttcttcctcctcatcatccacattggcaacacaagcagcacccccattgggatcagcaacaggtggagcacccacattgggatcagcagcc

SEQ ID NO: 138315 - DNA, 376 bp, Zea Mays
cttattttgagaccaagagagtttttttagtcactgtgtccaacctacagagctcagtggacgcgagaaaagggcagtacttcactcttgtgtcttgcaagttgcaactcccggatgaccccacattggtgggcggccggtgcctggtggtggtcgatggccatgccggccggcatgccccttagtgacggcaggcaaagggagacgacagggaggacgacctaagacacctctcatggcgtaactctggtgtacttctccataacagcttctgcaagtcgatctgcaacaagtactggtactagagctctagctacctgtgctactgttgcttgacctgtgttcgcattctctattccatattcattgcctgccc

SEQ ID NO: 138316 - DNA, 577 bp, Zea Mays
ggagcccacactgcaagagcaaatagtcagggcacagattgaagacaagggtgtgcaggttatcaaagaaatgatcaagcagaaggcggagaaatacaagtgcttccatcaggacagcaaggggattttatggtttggagattgattggttgttcccaaggaccctgaactcagaaagaggatattggatgaagctcacctttccaaattctccatgcaccctggtagcaacaagatgtaccatgatctcagatccttatactggtggaccaggatgaagagggaaattgccaagtatatatccgagtgtgacacctgccaaaggattaaagccagtcatttgaaggcagcagaccctttgcaaccccttcccataccatcttggaaatgggaggacatttgcatggactttatcgtgggattgcccaatacctttaggcaccatgattcaatttgggttattgtggacagattgaccaagaccactcatttcttaccagtgcataccacccacaagacagagaagtatgcagaaatttatgttgatcaaatagtgcggttgcatggtattccaaag

SEQ ID NO: 138317 - DNA, 393 bp, Zea Mays
cggagcagggcatctacgaattttagagagagaccgaaggagttagggatggagagagcaagtgagctgatgattaccttggagaaggcacgacaaattcttttggctggtacagcgaggagacgggatactcggccagatctgcttgggcagcgaggagatgggttcctcgcccaaaattttgttgccaaagaatgcttgtggtagtgacgggatgacacactaactagttgtggtctagtgtggtgcacagaatgcggtcgatttggtgggaaaatggcgagaggcagcaaaaattaagcgccaattctcaggttgggaatgccgaagaggagagcaagtttggggagaagaaacactggttttggatatgcgtaaatatcaggattaatt

SEQ ID NO: 138318 - DNA, 526 bp, Zea Mays
aaatgactttgttacgaaggagtgaaatgttccataataaaataaaactgatgcaggtatggagttaataagaaacataccatacaccacgtcggcatcctcaggaactgattctgctgtcacttgattaactcttcccctactttggttttgcggagtcttgttctgtgcagatccacgagcaggtgtattctgatcagcccgctggttgttgttcctctgagtgtttgttgattgcgccttgggtagttgttagcatagtggccaagttcgccacacttgaaacaaccattgggttggactggggtgtttgtggttgtttttggccggccggtgtgttcaaggcgcttccttgacgattctgatgttgaccactagacctttgactggtctgagtgttgttcctctgctggttctgatattggttgctcttttgaccttgttgtccgcagtgttgtgcttggtagttgttgttcccactctgatttccagagcggaactgagaaccttgggagttgttttgacg

SEQ ID NO: 138319 - DNA, 756 bp, Zea Mays
atgacaaaagagtttgtcatactcgttgcccttccctttttaatgtgcttatatatttgctttcaagcaaaaatatttgaatacaaagtgttagtctacaacataatgtagacacatactcataagtccacaagtcttatgattttctttgctattctttttgcgcttgcgtatcaagccgcaaaagcacatcagttcttttcataagaaccataagagaaagaaagcatcttatttcctccaaaatgaagaggtgaattcccatatcatgcaaaaatgaaatgaacatatgcaatgaacattaaggataattaagcccattaggcgagttcatcaaactctattaaataattatcctccaaatggcttaaccattttcgtttgcttttgcaactttgccgcaaaatatatcatatctttatatgttggagaatttcaggtatcacataaagtgtaccatagatttttgaaaattggtgtacacaacgtagataatctccatttaatgaaacaatggagtagatctcccagtagtgggcaaaacttttgctgcctgaaagcatggtctctgggctgatatattcaaggaacataccgcagccaatgcttaggactccactaccctgtgtttgaccaaaatttcaaaaataaaatggaaatcaccataaaggtgaataaccaacatcacatctccaatatatctacttgggagaacacataggtaatcatcatgaccatatgatgtagacctcttac

SEQ ID NO: 138320 - DNA, 761 bp, Zea Mays
gaaagggagaggtcagtcgccgccggtgtcgacatcgatctaccttgtcgtttggtcctctgtgtccaggcctgggcatctcaggggtctgctattgctttccgtgcgactaattgggggtgtggttggtcggtgaccacttaattcctcgtcggagccgggcgggtacgcggatcctctgtagggctcttacacaaattccccctccgttctcggtgagttctcggtttctcaccctcgacctgttcctttccttagttaatgtcgcgtcgttgccaattgcgtgcggattggggcgaattcgacctcttgggtcgggaatttgccctggcgccacccgtatcgtgagcagtagggttaggccgtgtggtgattggcgcagtcatcccccatgggttcgccatagtcttagcttcgtgtggagcggacttccttcggagttggtgtagccaggcctcgccgggatttttccggccatggccccgccgtgagagggcgggtgccgccgcgtccgagcaccttgcgcgcgttgagtagtgaccgtggatgcgtggatgaagggttgagattagattccgcgtaccctttcgccacattcgttctggttcattcatctagatcggacggatccgactgaccacgcctgtttaaaatcctcgctgttggttcccaattggatggtggagggcgcgcaccgattcatcagctcgccgatctaatcgagaccgtgtaattgtgattggacggctgtgatagctctc

SEQ ID NO: 138321 - DNA, 466 bp, Zea Mays
tcattacaaagtgccgaagattgcaccttctcaaattgtttttaaggacaaaatgtaaaagcaaaggaaacaaaaaatacaatagatgagtacaaagttcttaatctagcccctctattgcttcagtagatatgcctggactctggaacagtactgttgactgtccgagcttcggactcctcttttgcatcacgctgttgttgaacttgacattggccctgaggctactaattatgggatgaagttggagccaatgcaggtggttgtggtaagacccacccaactggagagttacttgccgaagctactgaagatataggttgtgagaatggatgttggttacccacatactctgggatgtatggggagtaaaacgaagcagtgtgaagaacttgctttggttagttctgatgtgcttcggcctcagctatctcctacttttgaatcgtaacttggtaggttcttg

SEQ ID NO: 138322 - DNA, 657 bp, Zea Mays
acactgctcctttgtattgtttcccttagcacatggatcggcatgggccgttagactcacattccctaacagccccgtccctccttcctcgcacttgcccgttccacatcagccgccactgcacccccaccttgtctcccccctgcatggttttgccgccctgcaacacgttggacctggacgtcgttccccatggcaaggaagatgagcatgccatggttgttatgcatgtgttcttttgggctcatgaattcaacaacataacaggtcatttcaatcaaaatctctaattattggatctggagctgtaagcagaacccatttctcacatgtacgacgatgactcgatgagttgtgggcagcccggcaaggtgagggctgcatcatccacgagtgataattaaaggagacgaaataagagcaaaggtggcgagctgaggcagtgacatgcctaacaaagcgagtgcagaaaagaggtcgactaatggtggcgggagagcccagctgggagccatcgaccacagcgaggacacatgttaattgaaatgtttgctagctggtggatgaatcttcaggtgttggcgggctatggaggcataataaccggccacctactgtgtctctcctcaatcatcttcatccccaaatatctgttta

SEQ ID NO: 138323 - DNA, 501 bp, Zea Mays
gctgatgtactcaccatcaatccgccttcggtcatgctaagtgccatatttgttctcatggctgactggcctgtggtccccacgcctggtggtttcgtcgggccacgcgcggggcgcctcgataccgctgcattggtttaaaaaattaccttctatgttctgtcgcggccccgaggaggcgcactaccggtgcgtgcgtcggttcgctctttccgcacccgagatccggcacccaaggagtatgacctgtgggcttgggcccccgtgtcatagactgggctatggtctcttacggtggagatgaagaggcgtgctacctcgtgcggcggttcccgcacccgaaaactggcacccacactgcatgacttgtggacctgggcccccgtgtcatagactgggctgcctggatcctaggtgcccgtcacgcgtgatctcttgcggcgattgaggggcgctaggaagggtttccttgagcaaggactctggtttccttgaaaaagg

SEQ ID NO: 138324 - DNA, 668 bp, Zea Mays
cctagtgactgcagaagtatggcagatgtattttgatggctcgttgaagctgcaggaagcaggcgtaggaatcctcttcattgcacctggaggtgaacaactcaaatatgctctttagttgctattctcagcgtccaataatgcagcagaatatgaagctttgattcatggactgaacattgccatatcactgggcatcaagagactgatggtatatggagattcactggtggtcataagtcagataaacaaaaagtgggattgctttaatgattccatggacaagtactgcatagccgtccgaaagctagaggacaaatttgaagggctgggattccatcatgtggagagagatcgcaacgcggcaatagacgcgttgtcaaaactaggatccagtcggactcaggtcccacctggagttttcatccaagaggtaccacacctgagtatttccttagatcgggcagaagagtgcaatgttctgagccaaccagggtcggactctgatgactggagggagccaatcatcagatatataaagaatgaagaggaaccaggttacaaaaatgcagcagaacgcattgcaaggcagtcagcccactatactctcattggggaaacattgtacagaaggggcgcaacaggagtcctcatgaaatgcattcttt

SEQ ID NO: 138325 - DNA, 491 bp, Zea Mays
gtctacaccactgccgcccaagccgctggggcaaccgaagatgtgaagaccgcgtacttgcctattgtccttggacaagacgcgctgcaatggctgcgacacctagctcgacattgcatcgacgactggagcaacttcagtcggtgcttcaccgccaacttccaatctctctccgacaaaccggcgcaaccatgagacctcaaatccatcaagcgccggggggacgaaactctccggtcgtacctcaagagatttcagaccatgagaaatcgtatccccgaggtcgcggaagcggcagtgatcgaggacttctaccggggatccaatgactcgaccttcattcgagccatactacagaaggcgctgaccacttctgagcagctattccgggaagccgacctctacatcaccaccagaggatttgaggtctcaagacctcatcggaggagcaaagcccgcaccggcagcaccgcgacgtgacgcgaaccagc

SEQ ID NO: 138326 - DNA, 276 bp, Zea Mays
cacacatgagtgatacaccaaatccaaacacaagttctgttcatagtccatacttcaagattacagttccaacaagagtacataaataagatgacacatgacagtgtaccaaatacatgcaacaagctcacaagtcacaaagtctgaagtaacttccttgcaccaatatcacattaccagatcctgcaaatgaagaaagtaaatttcaacatgtattcatcaagccaaaaatgacattgtctttagaacattacctgcatcccttctgatatgtcc

SEQ ID NO: 138327 - DNA, 409 bp, Zea Mays
attcaaactagtcattgggtgcgccaacaactaccctggcacaaggttcaacgctcctaagttcaatggccatcggaccaacaaccacaccaatctgatgtgttctaaagagctcctagagtcgctcctaggccatcgggccaatgcccacaacgtgatgtctcttcaaccgttatccaacactaacaagtggggccaaccgaggaacagtggaaccgaatgatctgacgctagtcaaatgtcatcagaccatacctctcagtctgatgcatcctagttcgccttcatcgctagggttagccatcagactggtcagccctgctggtttggtgctctctacagggtctggtgcctatctaaaggcacttctagattgagttaacaaccccttttcaaatgtgctaactcc

SEQ ID NO: 138328 - DNA, 293 bp, Zea Mays
aaacaacatcacactttgaaggagacaacattatatgaacgcacctgcggaaatcttcaagttcatcacaatgccgcaacacatatcgatgagcctgaacaagaagcttcttatcaaggttgacgacagtactctttccaataggttcaccagcagtatcaaacaaatacatgtttgctatttcatcagatggtccaggatttctagatggccttgtaaaacgtgtagttccttctataaatctggaacaaaaggtcaagcactcctccatgcaatatccttcagctattgat

SEQ ID NO: 138329 - DNA, 433 bp, Zea Mays
tggtgctggcactgagaggtcttcaaaggaatggagttgggctgcatcatcttgaggttcagccacatgccatatttccaataaggtacccgccagcacaagaggcttgcggccatgaagcaccactgtttgacctgaataaggaagggacaaccatttatgcttccaatcgacagtcatcaggctgaattgctcgagctagtccatgccaaggatgatatcataacacgacagtgggataactttgaaagtagaagaaaactacatgttttgtacaaaccactgtgcttctggcaattccatgacacttcagtatacaccatttgccacttggactgataaaggagtattcatatgtgtcaaccccactaatgaagaagcatggatattgctcacaaaacagtgatagcttcctgagtcgagcaatatgagc

SEQ ID NO: 138330 - DNA, 307 bp, Zea Mays
cagagatctggggccgagatccaatcacgctcgcctacccgctgaaccatccgatataatctaacggctctcatttaatgtaccgaagcggtacgcttgccctaatcgtggtcgtcaccgaacagatcgatggcaaccgtttcaccgcgcggcatccaatccaggccctacactgccgatcggacgacgcgcaatccagcttcaaccctaaggctgggtgacggcggtggccgtgcccctacggcggcgccattgatgcagaccgcaattctcccagcccgcacgccaagacctgacccaaactgag

SEQ ID NO: 138331 - DNA, 526 bp, Zea Mays
cccaacacgtgtagtgagcggtactgcgatgtgactgcttttagttattgattatcaaaagatagattggtcgtcaaaagatagaaaacatatcgtcaatatgatctcaccagtagcaggccatgatattatgcttttgcagtatattcactaatcgccattaggttgatccttagtgaacgcctggcagggcccactcccccaccatctactcccctatttattagacgaccatctagtcatctacccatagcgtagcctttcaccaccgccgtacgcccgtacccccatgatccaaacctaattgccactgtaatccccacaatgccacgattgttcgtaaccctgattgccgtcgccgttgctgctgtcagctcagtggattcgcacgccaccgaccgcgccgctctgctcgccttcaagtccggcgtacggggcaacctctccgactggggctcccgctcccctagaatgtgcaactggactggcgtcacgtgtgactcgacaggacgcgtgacgcgcctcc

SEQ ID NO: 138332 - DNA, 320 bp, Zea Mays
gtttgatgcacttgcgctagtccggctgcacctttggacgtattttgctcagagtggttgtctctcgaacgacttcacaccctttattaaaatgcacttatgctcatccagctgcacccttaggcgacttttgcttggatagaaacgtgcgtctctcagacgacgttgcccccttagatgttgtgatgcatttgttgtgctgatccagctgcacccttaggcaacttttgcttggatagaactgggcgtctctcggacgactttgcacccttaggtgttgtgatgcacttgttgtgctgatccagctgcacccttgggtg

SEQ ID NO: 138333 - DNA, 446 bp, Zea Mays
aataaaatgcacagacttagtcaagcaatccactaccacccatatagcatccctgccccgaggagaacgaggtaagcccaccacaaaatccatggtgatatgctcccacttccactccggaatttccaatggcttcagtaaacctgcaggcctcttatgctcggccttcacgcgccgacatacttcacaggcggccacatacttagaaacatcaaccttcatccgcttccactagaagtgttgcttcaaatccctgtacattttggtttcgcccgggtgaacggtgtaaggcgttttatgagcttctctcaagatatccatcttcacctctgatttctaaggcacacaaagacaacccctgaaacgaaccaaatcactctcatcaatggtgaactcccagggtttaccatcaccctctttcgagcttcctgcaatagacgatcctg

SEQ ID NO: 138334 - DNA, 276 bp, Zea Mays
gccgtgactccctaccgctgtctcatcaacgccggtgaggttgccacgacagtggacacggattcacgtgcgccagtgccttcttctacctccgaccggcgcgcgtccttcttcaaattcccggccactgtcgatgccctctataaattgatggcgcgagcagctgcgctacatcatcccaaaaccagagcctccaatcccaccctcaatcgttcgccagagcgcacgaattttgaattccccccaattcggttctccgccaccgcgaagaacagc

SEQ ID NO: 138335 - DNA, 496 bp, Zea Mays
gttggagccatgcatcatcactagctatcgcgtctggaatggaagcactgcacaggcacggcagcaaggacacaagtgcgtgcgtgtgcctcaactgtccactccatttctatcttcccaccactaaactccgcagtctgcacctgcactaccaccactgccgtcttatcaagcactagctccgtttcgtttgcgtaaagccggccgtgcgtctgtctgtcgtccaggtccaacttttagtctagaggcctcagccctcaggtcgcgacggcgcatgccaattgccaaggaccggcctcacaagtctagaggccttttgaaccgccctacaccgccgacgagcaagctagcctgaactagcgcgccccccactttcgttttcccaacaaggatctgtctggtaaagggacggtaagatctgccgcgtacacggtccgcgcatccaccatccgtcaaaaaaggcccatccttgaatccttgatccagccagcgtagt

SEQ ID NO: 138336 - DNA, 405 bp, Zea Mays
acctgggtctgacgtgtcatggcctggatatgcacgccttttgtgttctctatgactattctaataaaccaataatccacctcaaacccaaacccccaaatttggcctccccgaaattgctatatcatccccccaagctaggtgaatcttagcaagtgggacccagctgttgaacgtccaacctaacccagcttttgcacggtagtattattctaaattttctaacacatcgccaatccttccttttactaggcaatcaggcttctaaacaatagcaccaaaaccaaacttttcctccacttgatataatggtggtggccatatcgaatgctttgggtttttttaatcagggtaatcagagagcactaagcatatttaaggcataaattagctaggaaaagcacc

SEQ ID NO: 138337 - DNA, 579 bp, Zea Mays
gaagaaatcggtatggacttcatcgttggtctagctaccccgcacttctgctgggtatgactctatttgggtaattgtggacaggctaaccaaagtagcccactttatcccagtaagaaccacttacacgggagccaagctagctgaattgtatatctctcaaatagtctgcatacacggagtacctaagaaggtcgtgtctgacagaggatcacagttcacttcacgattttggcagaagttacatgagtgcatggacacaaaactgaatttcagctcagcatatcatccctaaactgatgggcaaaccgagagaatcaaccaagtgttagaggaaatgttgagatcttgtgctcttaagcatggtggcagtggggacaagagtttgaagatgtcccctttgaagctttatatggaaggaattgtagaaccctttgtattgatatcagactggtgcgagacagttcttcggactagaaattattcaagaagcagaagaacaggttcgaatgatcagtgagaacttgaggacaacatagtcgaggcagaaaagctatgcggatactcaaaggagatagc

SEQ ID NO: 138338 - DNA, 587 bp, Zea Mays
ggactctccacgaggtatgctcccatgtaatggacagcaataatccacttagcagtagattttttgcatttttgttgcaatggactgctataaatataagtctcatggtttttgtactgttatttggtaaaatgcaaatacacattagggattgataacgttgtagtaggtgcggcattgtctctgtctctgactgaagaaaatgtgcaattgttgttcggccgtggcgtgtcgccaaccaatgaaatgactgcaccgcgctgcgaagaggaagattggagtttagcttgtattggccaggacgatcgcgtcacatttggtacctcggtgagtaatgtatttgtgatgctctttagtttgatccaaatatgtactaattatgagtttgtgttgtgtagggaaattgtaatccaagtgaatatgttgattgggattcaatcgaagttgaagacaggtggaccgaggaaggaagacagaatgttactagtgaacaagcattgtatatccagctgggtttgcataatgaggatgtgtttgaatctgctcaaagggaagaagaatcagctcgtcatgttagatggagtaat

SEQ ID NO: 138339 - DNA, 648 bp, Zea Mays
tcagcatcagtcgggtcacacccattgggatcagcttcagcaaaaaccggcactggcacttcctcagcagcaggagcagaagggccggcatcctgattcaagcatgacactcgacgaagatgtctctttttctttttctttttcttcccctcagtaggagaagttggatgattggttcggcgaggacgcttcgggcgaatactatcagacctctgaatatccaaagctttgccagactcggggatgggtgctacaaccagtgttttagcaggggctgcatcagaggaatcttcagccaacatgtccagcatggcacttatttctacgtcactcagattcaaaggcacctcgaaatgaacctgcctctcgtctttggggatttcgccaagtgaagcaaccaaagcctcaacctattcgggagaaggtcgcactctaaggcccaaaccgctatcaccagtagaaggatttgacacaaaactgatgaaggtcttggaaggaggcagattccaggctgagtatgcaataggagcaccgatattagacaccttgcctctgagtatcatctcaagccggctcaccaaatccatagcaggaatccttctgttggtaacccgggttgaatcagcaaggccttgatacatataagct

SEQ ID NO: 138340 - DNA, 375 bp, Zea Mays
aaaaattcattaccaaaggaaattgcaaaagaatttacaagatcaccaaggatgtgcgaaataaaatgaatgctcatggatcatcgagaaacaagggtggtcaagggcatgtaaactaaaatgttttaaattggcattggatatagaagtaagcatataaaaatatgagagcatgtaaggtttcaaggagatgagcataccaataccaaaacacaagatattgccgaaagatagcgacttaacaacagaagaggaaaagggtctcaaaagataggaaggacatataaactgaaatgtctaagtaggcagtagaaattcagaggcaagtgtttgaaacaagagcattaaagggatacaagcatgtcaataccaaag

SEQ ID NO: 138341 - DNA, 497 bp, Zea Mays
ggaggccgtggttttgctgccaggggaggctttggaggtcgacggggtttgggacgctctgaatttgatggtcaaggaagtagacagtttgagacaaaggaaaaattccgtggtgcccaattctctggagacagtggtttgatcacagaaaacagattggggacacactttgaaaaagattttcgtcttcaggaagatcagggcaaagaaatcaaatgttttcgctgtactcagtctggacaccaccaatctgagtgtagtaatgaacctctttgctacaaatgcaagggatttgggcacatggctgcagagtgccacatgcagaggaaactgaggttgtttggatttggtatgccagaacagggtttctttggtattgatatttctgaaaacaaagagcagatggcgggtctggtggcttctatccatgttttggagggggaacctaatgaggaaaaattagaggaggaactaaaaaatttagtgcaagaaaattg

SEQ ID NO: 138342 - DNA, 799 bp, Zea Mays
gatcttcattatcgagaaaagccagtaaagattcttgactcgtcagtccgaaagacccgcaactcagaagtgagactctgtaaagttcagtggagcagagaaggagaagaggaagctacctgggagagtgaggactccttgaggagggaatacccttaccttttctcaagcccagtctgaatctcgagggcgagattcctttaagtggggtaggtttataacatcccaaaatttaacccaaggtttggaaccctaatctcctaaccccacttaatctctacctagactccacctcataggacatctcatcatttgcatatactatgattgttagaagcacctcacatagaatatttttagcacctaagattatttagctaattatttgttcaaaagaaaaagagataagaaatagaaataggaaatagaagatagaaaaaaagaaaaggaaaaactccccccccttctgcggcccaagcggcccatcgcccgcgcgcccgcgctcccctccccttcgccgctgctagcccggccccacccgtcagcccacactcccctcgctctctcacgatctctctctttggcaagcgggtcccgcttgtcagcgccttcctcgcgctcgtgaccgggctaacgacgcgatcaccgctggtcgccaccgccccgtcatctcgccattactcgctcgcctgcccggttggcgccttgcgcctctgtccccttgcgccagccgagccatcccgtcacctgcctgcccgagcggtcccatcgtcgccactgtgcgccaccatccccgccg

SEQ ID NO: 138343 - DNA, 287 bp, Zea Mays
cgatgacgaggttgttacaacgacacaggcaacgaacttcaggtatttttattttgacgacgagttctattttctgttggattgatattattacccgtgcacaatttacaattttgtaggtttcggcggtcccttagagttccaccgacacgacccttggaccaacgtagggtcataaaccctgcaggagagaggagctgggtggaggtggcatggagtggcaaaggtcaccggacaccagttaacacagtgctgggatctatagcttgttttcactatccaggggt

SEQ ID NO: 138344 - DNA, 935 bp, Zea Mays
gtcagcgcccgcgggccgggccacatctggatggccccagtccaaggattttggagggagggccataggccggaggcaccccggtgctgaaggggaacatggccgctgggactagtgcttgagattggaaggagacccctggtggccttggccacccctcttgctgcgacggttggggtggccgaaacgtggagccgaagacgcgttgttgacggcagcaggagccttgttggaggccgtcgaagtcccgctttgtggaggcttggtggaggtaagccaggcggcagatggagcagacgcacgatgagccatcgtgagttcctccaacaggagagtggcccggacgtcatggaacgtcggaaaggggcgaccgaggtgaagatgacggtcgatgtcggagaaacgatcgctaaggctgcgcagaacgttgaggaccaattttcagtcggagactggttcgccaaggcatctgccatggttttgaagcggcgatagtaatcagagataggtagatcaccttggatgaagtgccgaaactgagcgtcgaggtggggggcgcgagtctcccgattcccgagaaactggttctcgagagttagccaagtggtgcgggcactggcgcctcgctccatggccatttcagcaaggtccggggagatggaactggagatccaggacttgacaacgcagtccatgcgtgcccagtcggggaagtaaggcgcgggagtgtcgtcgaggatgtggctgtccagggagtatttgccaacgacgaggaggaactcatcgcgccagcgggtgtagttgttgttggcgaggtcgaggacgacgtgaacgagactccgtatgttctagacaacgacggtctgggagtggaggttgacgatagcagcagcctcgtgaaggaagatggtgtggtggatgcccttgtcagcacc

SEQ ID NO: 138345 - DNA, 818 bp, Zea Mays
ccggggcagacggtgggcccgcgaagaccatccaggtcggcgcggactcctcccagaccacccgcatcgtaggggatctaggagaaaaataggaactcgcgctcatcgcctttctctaagcaaatgtcgacgtcttcgcttgggagtcgtcacaaatgtcagggatccccagggaggtgatcgagcacaagctaaaggtttacccggacgccaagccagtaagccagaaaccatgaagacagtccgtggaacggcaggacttcatccgagaggaagtccggaagctattgcacgcgggctttattgaagaggttcatcacccggtgtggttggccaacccagttgtcgtgccgaaggccaacggaaagcttcggacgtgcatcgactacaccagcctgaataaggcatgccccaaggacccgtatccactaccgcgtatagatcagattgtggactctacttcggggtgcgacctcttatccttcttggacgcttactctggtttccaccaaatccgaatggctaaggaggataggaagtataccgcttttgtaacagtagatggactatactattatgttgtaatgccctacggtctgaggaatgccttgccgacctttgtatgggcaatgagcaagaccttcggggatctgatccaggataaggtggaaatttacgtcgatgacatcgtggtcaagactagggaaaggtcggctatagtggaagacctggccctggttttcggcaagctacgggcaacccgcaccaagctgaacccggagaaatgcatcttcggtgtctcggtagggaagttgttg

SEQ ID NO: 138346 - DNA, 520 bp, Zea Mays
gttgataactttactgcgagtaattctgcgagatgtttccaaaattctaatagggtactctgaataagtcaaatcctcattaacattgagttcttccataggtaattgttcctcaggcactcttaagcatttcttatgttgtgacacatgaaatacgtcatgcacatccgataaactatcgggtagctctaactgatacgctacttcacctttctttccaaaattttgaacgggccaatgtagcgaggagatagtttacccttaaccttaaatcttttcattcctctcattggtgaaactttaaggtatacgaagtctcccttttcaaagatcaactctcttcttctattgtcagcatagcttttctgtctcgactgtgctatttttaaattctctctgacaatctgtacttgcttttctgcttcttggagaatttctataccaaatacttgactttctccggtatgattccaataaagcggtgttctacattttcgtccataaagtgcttcaaacggtg

SEQ ID NO: 138347 - DNA, 847 bp, Zea Mays
agtgatgttgtgaccattccaaggatgaaaactatcacacatggtgatggttgtggtcccctcagcgccctctcacagccaccaaccttgatttttttcatgatgtttcaagggtgtggtgagcgacaagcacgacatcctcaagtggggaggcatcgatgcgaggggggcgacgtgatagtaggtgatgaatgggaattgtggtgggtggcccatttcgacggaagtggtcatgtctaggcctatgcacatacactgtacattctaagaccaagcacggttgccgacggggttcatggtattatctgggtatcttttttgttaggtacaagccaaagaagtgtctctgtggtagaatgtttatggtttagggtttaggattttgtgactttctataagttgttccctttgtacgtgatgagctcaatcataacgtgatatctcgttttcctcctcgtgttgatttctgctgatttcttgacgcgtggggcctttagctgtaagaggggcaacatgtgttggtgtgtgcccaacctagttagtcatggcatattgttcacttttcggttgtcctaggttagaattgtgtagccgaaagccatcattatggcaagcatagaccgagcatagtcctcacttagggttttttgttaggcggggttaggtgtcatgagatcatcgctatggcgagctgttggttggttcaaatgaaggtacacaaattccttagatcaaagaacttgggaatatatagaaatatcttatctcttaggtgttgccatgtgttggtcgccatggttgtactagagctcgtggtggtggtggatggtcttcacacaaagttgcc

SEQ ID NO: 138348 - DNA, 736 bp, Zea Mays
tccacgtgcgtgcgtgcgtgcaggcagcaaggtgagcatcacgtgccgggacgacaggagccgggtggtgtaccacggctcggactacacggacggccagggcatcttcaacatcgaggtgcccagcaaggcgaccaacggctgcgacctcgcgccgtcccgctgcctcgtccgcctcgcctcctcgggcgacgctgcctgcgccgccttcaccgacttcaaccgcggccagactggccaggtcccgtcccgcctcacgcacgcctcccccaccaaggtcacctacgccgtcggcccgtactactgcaccctgcgccagtgcgacgacgacgtcaagggcgacgacgaagacgacgcctgctactgatgatgatcccggcagctcggcgctggccaccagtcaaccggcgttcgcaatcgcgttattgtgttcctggtggtttatgcgagcgttttgcgttcgcgtaatttttcattctttccttttttttccttctccgatttcgaagtctctttggaaggtggatcgatgcgttgcgtacgttactgctctgctctgttcatctgtgtaacgcgcgatcagcatgccggcatggttttagttgaactctgtgaactattcttttgcctcgatcctgaacctgatatataattgcgtgcgtagcattcagcttgaacttttttttataaaaagaaatggaaagtacaatattactaacttaagccgatcccaaat

SEQ ID NO: 138349 - DNA, 403 bp, Zea Mays
ccggtcacctgacttgtgactcgctgggagcttgctcggcccaccccttgctctacgtgaggagtcggggtaggttttggtttttacctggcgtgaagcagttccggcggcgtggtaaaaacgcggggttcatcatggcgcttctcgtcgtgggcggcttgacgggacgcgaaacggcccactctccgcatcctgtatgtgtggcgtggtggtgtggttaaccttcctgtccgttactgacgcctttctgccacgcggtcccccggtgcctcgtccgaagcggcgcgagctctgcaaaaagtatgatttttcttgcggcgcccgaggcgggagggattccgatgcgatggattccctatgtcatccgcggggtcccaccttccaggcaccggctggcttcccc

SEQ ID NO: 138350 - DNA, 570 bp, Zea Mays
tccacattcattcaaatatcgtcatagttgcacatcacgtagtttgaagtcattctcctccacatccacatcacaaatatctatcacctagttggttggagttgtgtccacttcctttgcctagactctagatggtgaaaaggttgttcacccatgaaaccgaggcgtcgtcttggctacatccatctccaactgcggcaaccgaagtaggaggtgtctcgaaaccctataacacatatttggatattaattaaccgctaagttcttcatttgtaacacacacacacatatatcagcacatcaatgaatacatgagctagatgaaccaaagggaaatgtggcaaaggtggaagcggtggtggaggcagcgattcaagttccgaaggcgacatcccaaaggatggcatctagatgcccgcttgttatgtcagttgctacaaattaaatgcaagtacctattgaggaagtacgatacacaacatgtttgtagtcgcgaataagattttgctaatttgaaattgcaacgacattggcaaacattttcttcagtttatcacagcattgcgcggc

SEQ ID NO: 138351 - DNA, 523 bp, Zea Mays
ccggtagatgtccattccatatcactcatgtctgctgtgcctgctcacatcaaatcaaagcatggctgtaaagtactagcaggagtcaggagtgatctatcgatcggccattgggagaggttctccttgcataggttaacaggcaatgcattgcattatttcagtatcggtatcggccatttgcctaacgccgtttgcctaccgatactcaaacagtagtaggctgctaacccctaacgccgtttgcccatgggttaacaggcaatgcattatttcagtatcggccagagacaacagaaagtggcgtgccggggtacatccgtggactgtgcatacactattgttgtcgcttctcttagcattttctagtattgtttgctgcagaattaatatatataattcgttctagctatttgaataaagtgggttgtcattttgaagtttcaactctaagcagctacacagtaggcgtcattcgatgattattgtttcgagtgcttttagagaactgtttcgttctgtg

SEQ ID NO: 138352 - DNA, 580 bp, Zea Mays
cgacaagtagcacgggcattttttgacgatattgtcatgttacatggcctgccctattcgatagtgggtgaccgagatgtggtagttaccagcaacttttggacataattgtttcggatggcaggagtaaagctacatttgagtttccgcatttcacccacaaacaaatggtcaatcggaggtcacaaacagagtgatattgatgtacctacgctacttagcaggtgataggccgaagacttggctccagtggctgccatgggtggagtacaactataattcttcatatcaaactgccatcaagtgctcacccttctaggtagtctatgggcatgaccccctgccattactaccttaccgaccggggaaagcgagagtagctgcggtggatgaccagctttgcgattgggatgagttcttagcagaaatcaaagagaggctggtccaggcccaagtcacaatgaagcagtaccaagaccagactcgacgggaggtgaaattccaggttggggattgggtgtggctccggttacagcaaaggtcagccgtgggcgtgacaccagcatctacatccaagttg

SEQ ID NO: 138353 - DNA, 462 bp, Zea Mays
caattagggttggcattatcgaagcatgaccaaaaaggaaacaattaaaggcatcaaatcaaaaatagtttatggttcccattatattctcatgtttttcaatgggggatagggaaagagagagagcatcaggaatcctatatcctaccaggatgggccatgagttcaggataccctctcattctatgcaatctatccttccatggggttgggctaggctctaagctagtcaaaccattgtctcaagtcaaggttttgggcaatgaagggatttgattgacttcggtatacattattttagatagatcttctagcgattggggtcccatgctaaaaacttttgggttctttgaacaagggagtaggttgtcgatggcctatttgaaccaaaggaatattaacagacaaccaactaaagctagttcagatgagtagtgtgatcgtatagtccaatgctccggc

SEQ ID NO: 138354 - DNA, 293 bp, Zea Mays
ggaaatcttagttctgccttaaagaaacttttgaagaccactacttcatcctttcctggcttctgggtaatctcctccctgcctaaacgaaccagctccttctttgcttcactaaaatatcccaaattcatcagtttagacatatcaccttcggtaacggtggatttcccaaactccaagtggctgggtttagttggcacggcgttgtaatcatcttcagattcaaatttctcagtatcgacctgctcagcttcagcggcaggggcatcctccgatactaccagccttgaccg

SEQ ID NO: 138355 - DNA, 710 bp, Zea Mays
cggtggataatatgatttatgttaggcaagatgctagcgcggactcactctgaatggtgaatcacagagactcatcagagacaggtgtttatactggttcaggcttgcgccataatccagtgtagtgttgattgtaatattgcttgggagcgtgttataacatatgtgtttgtgtgttggaaggaagtggccctgcccttttatagcccaagggtaggattttacagtggggacttatattctactggtatgagctcggctcgttgcccttaaatggtgtagtccctcctgacatcgtctgtagggtcacgcactgccgtactcctggtatggcgtactgcatcgtccgttcgacgttttggtccctatagcaagttcgatgttgatgtaacggctttgtctaacgtcatggcctcatgggcctcgtgtcatcttccagcatgcgtaggcatacatgtatcgttccgtcctttctgtatgtgggtcactgtagagacttcgatgctaaggtacttacgacagggattgactagccccgtacgtgagtgggggtatgcttgagactgtacgcagtggcatgccgttgggattggtagggacttttcggaactgtacccgaggcccggacgtggtttggtggtgacacgtcttatcagctgacgcatgtcaacaacattggataggcccttcccctttgctggtttgctcgg

SEQ ID NO: 138356 - DNA, 310 bp, Zea Mays
ccgacttaagccgattgctccgttagcagggcatagtggtcaccccgagttgagtaagcgcgagcatgttgcaccgtcttgagtcgttgccgacttaagccgattgctccgttagcagggcatagtggtcaccccgagttaagtaagcgcgagcatgttgcaccgtcttgagtcgttaccgacttaagctgattgctccgttagcagggcatagtggtcaccccgagttaagtaagcgtgagcatgttgaaccgtcttgagtcgttgccgacttaagccagttgctccgttagcagggcatagtggtcac

SEQ ID NO: 138357 - DNA, 524 bp, Zea Mays
ttggaagacgaattctgcatgactttcagtgatttggttggggaatttcgagttccgctggaattcaaagtcagatgggtgctggggatttggaaattggaaagatgactttgatttgtgggataaattttgaggtttgtgaaagggtgtgttttttgtgtttgtgctgggatgggggctcaaggtttgtacgggttgggtagaggtatcgctatgagtatgacaataagtggtgctcttcgatgccgagatcatacagtggagtctgaaaccgtgaatgagataaaaaaaaattactacttatagacaagttagactgccattccgtgattccatgttctgtgactttttccatcccttctctccgtacattcatgttctttctcattcccccttccatcacttctctccgtacattcatgttctttctcattccccctcctcgcgtacatctcacgcctatctaaaattaaatttaaaaaaacacaaatagcacccaagggtattcgaacccacaacccacc

SEQ ID NO: 138358 - DNA, 645 bp, Zea Mays
aaaggtgaaggcatagaagagctagtggtataagtacaataaagaatggaggtatgtcaaggcttacacgcggtaaagaataggacattgccaaggatgagataagtaaaacaccgttctcaaattgggataggagattggagattttagataacaaaaataatgtaatcaccaaggtaacattgagagatgggataggtggatgcagtaacaaacaaaagcacagcaaaggacgaagttacaaactcgcaagccaaagaagaggatgtgaccaaggtaaagataggtaaagtatagctctcagaacaagacgggagagaggtgattttaaaggcaggtatgagacaaacatcaagtaagatatagaggtgtcaaaggtaaaggtgataataatgaaaagcacaaggatagagttcaggcaagactcgctaggtggcgaagtggagaaaacagtcaagggtaagataggtaaggttgcaacaaaatggttgaagtaaagaaaattaattaccaagtggagttacaaggagacaacaagattaccaaggatatgcaaaataaaatgaccgctcatggatcatgaagaaacaaaggtggtcaagggcatattaactaaaatgtcttaaacagaaattgggatataaa

SEQ ID NO: 138359 - DNA, 1077 bp, Zea Mays
agatggactaccccattactcaaaccaaacacactataaatcttgctcggtagggccacccacagccgaagctgcatttttttgggtaaacacagccgaagcagctctgcaccacccgtcatcaaatgaattctccctgggttgagaaaggatggtgaggcccactcttagtatgtaaaaccagaattggcaggaaactagacaataagatacgctgagtagccttgtgttcttcaacacagaaggggcaaacctccggatggaccttgccgcgccaattgatctgctgttcaatagaggatatgagccacaaatcagaggaagaactggcatttaacaggtgcccaagacttccctatcctcttgcaatggcaaaagtcgacagcacctggaaaaagagcatcataggccgacttggctgtatattggccagataagcaccatacatgcttatctggcatatcttattggagctgcagctcggcaatcaaatcccacagtaaggaaatcagcaagggcaccctctgtcaaaccagcaccaacaccattctcttgtttgctcttttgagcaccaattcaaagaggtataatacaccataagcattcaatcccatcctctcttcgattaataatgcacctaaaaacttgctgttttttcccactaaaaaactacctttaactatatttttcctgaggggtaggaggatacttccacctatcttgttctaactgtactaagctagcatcctgttcctttgccttttatgcttctgacctgaacattctgtagagaaatggaggtgtgatatttatttttcatgcagtttacatcaggtatttaggcgacatggatatttgcatactttgtgatagatttcatctgtcttacagtatgtaactgtattatatttttgtcctcttctctgtttctggagcaacgatgagctttgcaactgcgtttctaattctatatattattaattgaaaattagaactgcacattctctactgtgaaatattttcgaattgcctcgagaggtaaatcttttaagggacataggaaggaacaggatgctc

SEQ ID NO: 138360 - DNA, 450 bp, Zea Mays
cgcgaacactgggtcatacaacgtcgacaccaactggtacatcgatagcggcgccaatgatcatctaaccagtgacttggatcgcttgactgtgcacgatcgctacactggaaaggactccgtgcaggttgccaacggtgcaggactgtcaatctcccatattggtcatactatgcttcctggcttatctaaacctatacatcttcgaaatgttttacatgtgcctaatcttcataaaaatcttctctctgttcaaaaattagcccttgataataatgcgtttattgagtttcatcctcatttctttcttattaaggatcaagcaaccaggaaaactctactccgcggtaggagtcacaacggcctttatccagtgccaatttcctcttcgccaccagatcatgctgccttgtccagtgtcactgctcgtgctgcttctgttcatctatg

SEQ ID NO: 138361 - DNA, 318 bp, Zea Mays
tcaaatcgttcttctcctcgtccacccacatatcccttcagataacccgtgttcattcgtcccacacctaccccgcccagaacaatcagccgagtgccctggtgctcgtttccctgccgttcccagttcatcaagtggctgcttcaattgtggcaagtctgggcatttcatcaaagacttcccctacccgaagcagaacaaatcaaactttcaacaaacttctgggaacacaaatcaaggaaagggaaacacggccaaccctccagcgggctgaaatatgaagaaaactagacgagtgtattataccgaggtggctac

SEQ ID NO: 138362 - DNA, 300 bp, Zea Mays
gctacttctgttgcactatgtgatgtgtgccaacgagttaaggccgaacatcaaagaccagcaggattgttacaacctctcaaggtactggaatggtaatgggaagaaatcgatatggatttcatagttggattacctcgtactcgtgtcggctatgattccatatgggttatagtggacaggttgactaaagtggcacactttatacttgtgaagacaacttactcgggagcccagttagtagaattatacatgtcgaggatcgtttgtctgcatggagtaccgaagaagattgtatca

SEQ ID NO: 138363 - DNA, 637 bp, Zea Mays
accagatgtaccatgatctcagatctttgtattggtggaccagaatgaagagggaaattgccaagtatatatcagagtgtgacacttgctagagaataaaagctagccacttgaaggcagcaggccctttgcaaccccttcccataccatcttggaaatgggaggacatttgcatggactttatggtgggattgcccaatacatccaggcaccatgattctatttgggttattgtggacagatagactaagactgctcatttcttaccagtacacaccacccaccggacagagaagtatgcagagatctacattgaccagatagttcgtctgcatgggataccaaggactatagtctcagaccgaggagcaccttttgtggcacgattttgggagcaattgcaggaatcacttgggacccaggtcatccgaagctcagcataccacccccaaacagatggccagacagaaagggtgaatcagattttggaagacatgttgcgggcatgtgcactacactacggaaaagattgggacaagtgtctctccttggcagagttttcttataataacagctaccagtccagtctaaagatggcaccttttgaagccttgtatgggagaagatgcagaacccc

SEQ ID NO: 138364 - DNA, 881 bp, Zea Mays
tgcttaaggccttttggtactgtaggtacgatctagtcatggtttggtgacgttgcgttttgtcgcggaggtcgtgggccgacaacgttggcccggattcgttccttgcagatctgcttggaagaggtttgttcgttcgcccacctcgcatacttgctcggttggggcttggtcgttcgccctgccttgcagatttgctcggcagggactgggtcggtcgccctgcctcgaagacttgctcggcgggggctcattcattcgccctacctcatagaattgctcggcgggggctcgctcgttcgctttgtctcgcagacttgcttggtgggagcttggtcattcgccccacttcgcatacttgctcggcgtgggcttggtcgtttgccccggctttcagacttgctcggcaagggctcattcgttcgccctgcctcatagaattgctcggcgggggctcggtcgtttgcctcacggacttgcttggtggggcttggtcattcgccctgcctcgcagacttgcttagtgaggacttagtcggtaaatgggctagagagaggtttatgggcctcgccttaggtaccccttttctgtgtactcgacaagcccatcgtgagtcatcattgctgagctcaacacaagggacaatgagcttcaacttcccaacacagggtgcacacggccaaaggaaatcgacgacgcctatacccaaacaccggcacacaaggcagaagattgtggtgctccatcattgctcgcctcgacataccttacacgaggcaactccaattcatcaacaacgagcttggagccacaacaccgagcaccgggagcaagcagacgcacggagtgcaagggtccaagcaaccgtgggcgattggat

SEQ ID NO: 138365 - DNA, 619 bp, Zea Mays
tgttgttgttgttacctttcacgtcatcaagttaaattcataattaatcacccagatggccagttcaccatctctggacaccagcaccctcaaaaatttactcctccaaatcagcctacaaaaggttttttgaaggttctgttgggtttgaaccctgcccagtgaatatggaaatgttggacaccaaggtgtaaattctttatctggcttgccacttataataggtgttggacagctgattgtctagcacgacgagggctggaccatcctgagaggtgtcctctttgtgaccaggaggaggagacggcgcaacaccttttagtgttttgtgtatttgctaggcaaatctggtggcatgtctttttcccaatgggctggcaagccttgactcctcaacctcatgatcatgttttccaagactggtggaaaatgcagagaagcaggtggataaaaatcggcgcaatggcttcaattcagctgtcaatttagtcgcttggtggctgtgaaacatcgaaacgtttatgtcttcaaggggcaatcttcgtgtgcccagcaactgttacagttcatctggggtcacgccattaattggtctctagcaggagccattgggttgaca

SEQ ID NO: 138366 - DNA, 560 bp, Zea Mays
gatggatgttgatggccagggagctgaggtgcgagaagaaatgaaaaagacaatgcatttagtggcctcggagtcgatcttccagaagaagggaactttcaaaaggagaaacgggaggaagggtaatgatggagaggttgcagtataagaggggagtatggaaagaaaacaccaagcctcaaaggagatcgatgttgactctaggcccaaaaaagttgaagtgggcaggggatctttctgtgacgatggaggacaagtcgagggggagtaaggaagaaatggagatgctaaatgcaaaggcgggactgtaggagaagttccgcctggcaaaattaggattatagcttggaactaccgagggttggggaatgccttaacagttcatgggcttctggatgtccagaaactggaataccctgatgttcttttcttggctgagacaaaaatggacttcaaaagaattgagaaatttaagtggatgttgaatatgccaaacctggttggaaaaaattataaaggcttgagcggaggactggctcttttctggaggagcgaagttt

SEQ ID NO: 138367 - DNA, 358 bp, Zea Mays
ccacgaagcgtgaaaactcaatcaatgactgctacgcgatgcctagaggatggtgaattgggtggaggatcatattggggtttcgtggctatggagaggttggttcgcgatgattgaaggattcacggcggtggagagctctgatgaggaattcctcagcctcccggctttcgatcccgagcgccaagacccacacaaccactgtacgatacggtgatttccccacaaagttctccggcacccggtgtcagcgtggacggcggacggcaatagcggcctccctggttcacatcgcaggaggtatggccgcgagctccccagatcccactcgaggtgatattggcagaggatatggctt

SEQ ID NO: 138368 - DNA, 294 bp, Zea Mays
gtgagcgtctgagtgagcctaagattggatctgtcttgtaacgccgcatgcctccccttttatagctgaaggggggcatgcacaaaggtactgaaccccgatatgtgggccgagagacataatgaatatagcgcttggagttacaaatgttcgctgctggggcaatcttcttgtgccctgatatccgagatctgcatatcctcggcgtgcaggggaagcttcttgtagaaggggtggtgagcacagtacgccacacggcacgggcacactgtttgtcaacagactggtcaggcg

SEQ ID NO: 138369 - DNA, 482 bp, Zea Mays
cccatatcttccttctaaaagactgccggtgaagcatgccgacgacgggagtctgatcatcataagtactctgcctgcctgtctctacccgcgtcgacccttagtcttcgtagcttgtcctcatgtcttcccttcgtcctcttgcgtgctctgtagggcgtcgtaggacttagggttcataggtcatgaataaggctcagacctaggacttataggccttgagtaggtttcaggcctaggacttataggtcatgaatgggaggtggactggctctcttccacaccacggctcagcgccaagcgtagttaatatagcatgagagcagtccttgggtcagacatggaatccacttgagtggctccctgatgcctcgtctaacacccgagctaggttgagcctcgcctgacactaggcacggtgcaggggtcatccgggtgtggattcacccgagcgagttcctccatgcgctctctgactcgtg

SEQ ID NO: 138370 - DNA, 381 bp, Zea Mays
accatggcgacgacttgcggcggcgtgatgacgttctggatcacatctggcggtggcattaggagtatcaactcagtgagtttcattggccaatatggattaccgaacaagcctcacctgggcatgcaaatcctcgagacaccctggccacggtgaggtgagcacactgctggtcaccacttcaggcaatggcgtgcaaggttcagagacagggcaaatcctaggactggggagagaataaatcttgacttgatctcaggaacttcatgcttacacgagggacaaaagccagagctcgagacaaggagaaaagcttcactggaaccagccctaaggcactgcatatctttactacttattaagaacctaatagtagtctgc

SEQ ID NO: 138371 - DNA, 463 bp, Zea Mays
ggagaagcacgtgcgtagcgtggagctacgaactggggaactgccggagcccggatgctcctggctggtgtcatgctactcagagcagtgctccttcatgaggcattactctgagcattgaccttaagcaggccatgcaccggtaccgaccgtatccatcgaaatctgatctgccagtctgtactgtagtcgaggaaaaacacacgaacatacaaccgtgaattaattatgcaaacaaacataaaaataaaggtgaaagaatcttttcaaaatatattattttaaagtatgataattttgaaaaggccatttcatctctacccatctctatccttacgttgtacgtactgtagaaatatgttgatttccacctcaggccatattcgattctatctcaatccatatgaattaagggggatttcaatccctagtaaatcaaaatttcttccaatttgtatcaatc

SEQ ID NO: 138372 - DNA, 608 bp, Zea Mays
cgcccaccagggattgtgatcaccatattgcattgttgccaggtgcacaaccttttcatatgcgaccttataggtatgctcctgcattgaagtctgagatcgaaaagcaagtgacagagatgttggatgctggaattattcagccaagccaaagtgagttctcttcttcagtgattctagtcaagaagaaggacaacacttacaggttttgtgtggattatcgtcaccttaatgccctcacagtcaaaaccagatttcctgttccagtcattgatgagttccttgatgagttgcatggggctgcttggttttcaactctggatttacgagctgggtttcaccaaattcgaatggctcctcaagaccagcataagacagccttccaaactcatcatggacattatgagtttcgagtaatgtcgtttgggcttacgggggcccctgcgacgtttcaaggggccatgaataagaccttgcagcctttgcttcgcaaatgtgccttggtattttttgatgatattttggtttatagccctacgtgggaggttcatctccaacatattgagcaggtgttacagttgttgctcaaggattcttggcaggtcaag

SEQ ID NO: 138373 - DNA, 639 bp, Zea Mays
cctccatgcattctctccacgggaatgaggggaggtgagctatacaacactttcctcgatgggctagcaatgggactcggtgagttacaaatgggtaattcaagtgaggccctggttcctttcgcaggaaccaagcacagggtccactaggggccgtcctcatactcccgagcaccgactcatatagctatcgattccattcgatcggaaccgatggcttgccgcctctctccacgataaatcatgagtcagaccttcccagaactcgaacatgatctggtgacgaccttaacgcttcacgcgtcagtgccttggcgtgccaactatcggtgtttcgatcctctgctccaataagtaaatttctatgtgtgcattctgggctccaaacggtgtgcaaggtgggcgcatggtttatactgttcgggcagaatgtccctacatccagtcttcgatggctcacgctaccggcacctctgttgctcaatgctcgtagtaggggttatgagcgggttacaagcgagcgagagagggaggaaaggctcccaagtctcttatgagggagtgtccctaaagactacggaactagagtcctacgctaagccttggctatggcctccaggtcttcaagtctctccaggc

SEQ ID NO: 138374 - DNA, 299 bp, Zea Mays
tgtttgatgaacgaggttttgcgcccatttattggaaaatttgtggtggtttattttaatgatatcttgatctacatcacttgtttatctaaacatcttgaccatctacgtgctgtttttgatgctctgcgcgccacgcgcttatttgctaaccttgagaaatgcaccttttgcaccgaacgagtatcgtttcttggctatgttgtcactccacagggtattgaggttgatgaggccaaggtgcatgctattcagagttggccaacgccatcgacggtgacacaaatgcggagttttct

SEQ ID NO: 138375 - DNA, 772 bp, Zea Mays
tttatgtgtcacaagccaaagtataggtctaaggacggccccagtcacgattgtttcacacatgggctaagctgccgctacatatgggtggagcatggttaagggttttctccatctatttgaggtctttttgttgatataatgttctcaagggttgtcttaccctataggttgagtttttttatttacacccaccaaacaaccattttactacgcctactgtttgatttgtccaccagacccatacgaaatttgaactcattgaactaccgcgcctactagattatttaaactggtgcatctgcccatattatgattttttctgtttattccttttgttttactactaccactctttgtgaatggttgttgggattcttattgttgttaatgctcacaatcaaattgtcggccacttgttgaagaagaatcgtgaagccgaacaacatctattgattattcgaaataaaaacactaacaaatctaaatatcttgtaaaatatgttaaagactattttatcttatataataatttatatgataggtattatggagcatttaagccttgatatgcaatgtactaaaagatcataaaaaactgcattactttgttttatacgtatgtggtatgttgagggccctaagagtatccatttcacaatgttaatacatctaatgattgcgttgttgtttctctagagtacaagtcttttaatgcaaatgttttgtccaaatgcaatatatggctttacatgtgatgtgaacataatcc

SEQ ID NO: 138376 - DNA, 626 bp, Zea Mays
atagccactaagtttgcggaaaagcatggcatcccctctacacccctagaaattcctttagtcacccgaaccccggggtcagaccttctatgccagctcaagtgctcccaagtcagaatccttttaagtggggtagtgttcctggtagacttatccgtcttgccatcccaagggattgatgtgatcctaggaatggattggctaactaagcacaagggtatcataagttgcgcaagtaagaccgtccttctcaccgatggccaaggaatagcagtttcctgtcaggcccaaccgcccgccaatgatccaatgatgtttaatctggtagcagaaaaaatatccgtaatagaagaattcgtggatgtatttccgaaagagttgcctggaatgccaccagaaagaggagtggagttctatatagacctcattcctggcactgcgcccatcgcaaagagaccataccgcatggcccccacagagttagcagaattgaaactccagattgcagagctgcaacaaaaagggtacatctgtcccagtttgtctccctggggagcacccatccttttcgttaccaaaaaggatggaagtatgagaatgtgtattgattaccggtccttgaatga

SEQ ID NO: 138377 - DNA, 287 bp, Zea Mays
tacatgtgcatgaagatctcagacccctagggtgcaatcaccatatatggagaccagcaggtcaccaggaacatagaaagagattccattctcggccagcgtaatgtgcactgcctcacaactgatcgcgaagacccctgcaaccttcacccaatcaaagggaaaaatatcaacgcacagctatagagcaacgaaggggtgaaaaagtccccatagacacagccacccccaatcaaagagttctgatcagcgaggacctcttggaggcaaaagaagaaagcctattg

SEQ ID NO: 138378 - DNA, 386 bp, Zea Mays
gcttcaagagacgaagaggtcctagagccgaagggggtgttggttgtttttaaggcgttcttcactgttggccttcgcttgcctgtgcatcaatttgtcatcgaaggctgcagcgctttgaagttcagattcaccagctcacgtcgaatgccatggtggcgatggcaaagtttatgtcggcagcgactatgtatggcgaagagccctcggttgaagtcttcaccaagaattattgcctccattgatagaagaaggttgctagcagaaatattatgcaatttggctcgtgcatgttcaccccgaggactgtgaagacttcgggtgaagttgtggaacttgttccgtgcacgaagaacaaatggggaattggtgggatttctggtttt

SEQ ID NO: 138379 - DNA, 395 bp, Zea Mays
ttagtgcctcaactttggagccaatgatgttgttggtcctctcaacgtcatggatgtatgcttctacaatccaccgacaccagacatcgatgaggctactgctacattatggtgataagacattactaaattcatagcccttgttagggttgatattgtcccttcttaccctgtgtagcctaactcaaaaaaggatgcaatggattgggatattccatttgcgctcttgaacaccaactatggtgtctctgggtttagtcattggggcaatacctcattctataaagccatagtgtagggccctaccttattgtcaactttgagcactacactagctacctaagcggtcatacaaagcatatcgcatgcacatccactagccacaacctttcggc

SEQ ID NO: 138380 - DNA, 721 bp, Zea Mays
gaaggcacccacgaatccgtcatttatgttccttttcttatccgtggccttgctcttctcatttctcctttcttccgcggtctccttgatttctatcgcctgaatctgacccatctgaatcccaattccattctgcaagtttctgtttttgtccatttatgcgaagccttccttggtgttttgcctcacttcggcctttggaagcatttgtaccactgtcggcctaggatggccggagggcagcaccagcttgtggggggcgtgagtttggagatgcgtcgtgggaggaagactgactatctcgacatccccctcaaggacaacattaagggttggcgcctggaatggttcaacgtggagaatcatgggaattctctccccccacggtcagggagacagccagatgttcgcactccgagctggaccgaatcccccacagaccaggaggtggctgaggcaggggctatacttgctgaggttgggctgctgaaagagaggggtttgactgtagaggctgtggttgccgacttcattttcaagaacattcagccactgaaagacagagcataccccgcatatctgtatcgaggcctagctgattcaacccgggtaaccaacagaagaattcctgctgtggacttggtgagccggctcgggatgatactcagaggcaaggtgtcgaacatcggcgctcctgttgcatacttggcctggaatctgc

SEQ ID NO: 138381 - DNA, 587 bp, Zea Mays
ctagagacacgcatgcatgcagtgttgtaaacagtgattgtaaacagtacagtataaaacagtgttttccacggttatatacacggtcttttggacacaacctgactaggagcaccctcaatctctatatcgtcaacacagatttaacatagattttagtcaaacaatactctctaacagttttttcttatttaaatatctaaacattgttattatgtactttgaatttttcattagccgaatatatataaagaacgagattgatcccccacaagatataagaagctgtgttgcagggcgaaacgttaggaaggagagatgacaaaagcagacagagccttgactcaacagatgttgggggcaccgggcacgcacgtagggcactgacagcggctagttaggattaggctggttaggtacttaggtggtaacataaacgcacggcgctgacagcaacgtcgcaaccaccaccaccgatgatgggtcgtcggtcgaccgcgacggcgtcgtcgtcgtcgcacgtcctgcgtctctgctggatcgacacgacacgacacgacatcgacacgtccatgtaaaacgcagcg

SEQ ID NO: 138382 - DNA, 1120 bp, Zea Mays
aggcaaccgcatcgctgtaacgcgaaacgttcagtcagatcaacaggcctagggcctagacgggctgtgtcccatggtcacaggagctagttagtcacaagccctttcgcttctagcacgcgctgtctgatgcacatgcacgtcagctgctaagctaagctccatcctcagctaattgtctgatttaagcagtccagcaccgcaccactccggaaacaaaagcaagcagcacagcatctaagatgaacataagaagcaacaggactgacattgtcaagtactatataccacatgctttggttccaaaaggcgacaaaacttcaaaggcgaaatcttaactttacgatggccctacaatatattacctgcaagcaaacagaagcacgcagccaagtttattttccttcttgaggttcagctctcgcttagtactcgacttcccagcgatgctggtggtagtcaacagactcctgggtgacattagggcagtctgacaaattgactctcttcagcttaggcaatgttgatgcatgtaagatagccagtaacctgtcagtgatcaaggggcaccagcaccacgttaaattaaactcctcaagttggtgaaatcctacaagcataaggatcctgatttggacatcactgattccaatacgattcaaggtcaacttggttaggttggggcaagactctctgaggcacaccacaaagttgcccagaacgttcgggcactcgtccaatataagttcctgcagagctccctggcatgaacgagctacagtgcaaacatgcgtgtctggaaaatggtaggattgcagttcaacctttctgatcccattgtagtgcaggatgtcacataaaatgtgttccatgtgataagcctgaacagatgctggaaagccaacaagcctaagctccttaagccctcgacacactatgttgacccattacaagatagttctctcacagtgctccgttctgatcaccttcagcttgggacactcacaggccacagctacagcttcatgaagatcacgtggcgtcattatgccaaaatcacatgaatccataatcattgattcaatagttctgctgatcaaggacatgacttctattacag

SEQ ID NO: 138383 - DNA, 674 bp, Zea Mays
ccagattaaatcggaccaacccgaaccggtatgcatcccgagtgctcggatccataaccaacggctcggattttaaacactcgccaggtaatcgcgaccgtctaacccgagaccaacgccccagattggccccggccgaaggggtatccttcaactaatcgtgatcgcccattttgaatcggacgatgcagcactgttcttccctcacgcaacctggcgacggcggcgaccgcgcccgcacgaaggtgtcctcgccggcgtaagccaatacgactctccggtgccctaacaagtccctaattcgccccaaaacgaagcggagactactacgaacacgtgagtcggtactttagtgggatcgatgtgaagacgacgcgcgcccacgccctgatgcggatcagcggtggcgcaaaagtccgtcgagctcttgtgcaaggcgcccaggggtctaaccctaccggcactagttctacgcattccggagaacgagtcggacaagatggccgaggtcttaccgacgccgctgacgagtcgaggtaggtccacggtacaacgcgagttcggcgaagggccccactccggcgaggaatcgatggcgatcccgacccaaacaccacccgcagaggacccgcacagtttccctgggatcaagcgcaacttcacggctagcaatg

SEQ ID NO: 138384 - DNA, 837 bp, Zea Mays
cgggttgattcccaaattcttcgaggtctcttatgcaaaactacgtagccgaaggggtatcgttgcttttcggccgttcgatcagaaacgaacgacccaaatttgctctgataataatccgaaccggtacgtaatcttaaccgttggatcatagatccacggatcaaaaccccacacgcccacatctaatcccaaccgcttactagaggatcgacggtccagatcggatctagccgaaacaaccctgaccatttcatctaagtcgaccataaggagatcaacggccagcggccatcacctcgccgttcatcttcaacctcccgatgcagcagcgcctggcttcccacggcggcgagcccaccagagtgaacgccaactggtcccctagtgaccaatacgcctccccgaactgttctacgcgcaaaggaggtcgagggaaatacgatgattgaggacttactagcgatttggtgccgcgacgacaactacccacggtacgcgcgatagcatggcggagtttccactccggcgaggcattctggtggtccagagtgcgattctgcccaagagaagccgcgacgagcatcagagaggaccagcgattgccctcggtcgattccgatcgcccaacaccaggtataatggtttcccctcctgcggcggcgccatccttagctccattcgcccctctcgagcggtcatacgagtggcccgccatgcccacacgatccccagacaccagtggttctccgtgatcacccatcgaagcccaagcggcagaggtcgaggcgaattgcacgacagaggcaaggtcatggctgctctctctctctcctg

SEQ ID NO: 138385 - DNA, 482 bp, Zea Mays
cccttcgcataacatgaatggaagataaggaatgagaatacctactaggtgttcatcactagcgcatagattgacgaaggccttgacacctgaagtagggtagcggcgactggcggtcgactagttgtaggagagcgagagcagggtgagacactgcctggactcctccctcaatctagatttgggtcggggagcggtcgagagactgactgacggctaggactgagagtgtgaggacgacatgtccgcaggagctagggtttcaagtatatttatatagctggtttgcacgtatacgagcacgagtgagacatttttatgtctatgagagtaaaaccattaggcacagaatcaaacttgtacgctcaacttaggcacaaactcacaccaaaattctcatcctataggatttgtgtcaacagggcatgcaaataatttgtacacattgccatccctaggcacaagtgtgcttagagtgtgtt

SEQ ID NO: 138386 - DNA, 716 bp, Zea Mays
cccaggcgaagaagtgtgtgagggtggtgaacgtgtcagacttcaaccgaagaggaaaagtccaaagaaaattggaaaaatcatccaaaatcaccaaatagtagttataaccagataggttgagtacatgggaggtccagggatcagaatgaaccagatcaaaagcctgcctagcccgagatgtagtaaatgggagacgagtatgtcgacctaactgacaagcatgacagagaccctcaaaatgccccatactacatgaaagatctaaactgctgataagtttggtcatgacatcgagtcctagatggtcacgccgacgagacgggaggtggagacgtgcctgtggtggaaggccgaagtgtgtagagtggccctgcgctgtcacagagggcgagaggggtcctggtggccagatccttcacagaaaaaccagaggggtcaaacacaatggaacaagagttgtcggtggtgaaccgacgaacagaaagaagattatgggtgatgtgtggggctatgagaacgtcattgaagtagaatggcccagggagaaccgaggcatctactgaggtgatcgtcagagtggaaccgtttccaacgacgatcgaggagggatgggaggaatgagggggtgggagcgagagagcgtgcctgcagtgggggtggtgtggtaggaagcaccggagtcgatgacccagtctgatgagggtggggccatc

SEQ ID NO: 138387 - DNA, 611 bp, Zea Mays
cgggactcgttgggaattcgtcgccaaacctggtggcgccgccgcggagccacctataccgtgggcggggtacgtaggcgtcctatatccatgtaaaagtcccctggcactttcgattcgtactccatgcgatgttgcagcattcggatttgagcttggggccctggcgcgcaatgtggacaacatcggccatggcgccaccgtccctgctcgagggccaccatgcgtggccgggttacgtggggaaggaacccccggcgccgttggtcgattgatggacggctcggatttcctcaggggtaccgctttggtagaattgaaatcgcgaccgttcgattctgatcctgcgtgggtgaaacattggcgctgttttgaaatagtgaccgtccgatcggaatcggacagtctaggctgcgtaccggttcagagttgtaaaaatctaatctggagtgtatccttttaatccaacggctctggttgttccttacctcttcgccgttggctttttgcttaagagccccttgggttatggggaatcaacccgccatcctgtgtggagttctctgtgtctgggggatttcacgtgttagcccccgagttttcgaaaaata

SEQ ID NO: 138388 - DNA, 1211 bp, Zea Mays
ctggctccttgtgagtctgctcagctggagccgcccgcgcctgtaatcacccgttcgattttagtggaaaagaaaccatgcatgttcgtgagaggtggaagaaaaagcaatccgtcacgcaatatttagaaacaaccttgtgggctccatgcatgccaatgatgccatacatccacgttccttggtgcatgcaggaaaatatctagaaaccgctccacactagatcctctcaggagttgttgtggttgtgctctttgtagccctccacgtggccagccttccagccaataaatttgcgacacatcgctcagctgccttttaaagaaaagatcctgcttttattctagaattaatttactattctcctaagtcatgcaaaaactaattgctagtccacgaagcatatggttcattacgtataagctcctagttcgttaaataagcgaaatctttcacgttataaatcaatttcgacctgttcaaattgcgttagcttcgggataacattgccgacgcgttaataatgttaacgtagatgattttgaattaatacttgtttagtataaacattacatctatttggcgattctcgcgtgacggcttgctgttcgcgttcgtctatccgtagacgacgcccgtctacccccgaacccgttcatctatcctgcgtgttagtagcattattttgtcgcgacacatgctttcgttaattatttagttagttgataattattaaaatagaaatctagttaagcctatcctacaattttaattggcgctttgaaaataccgattaacatgattaatgccacctcaaatgttttgtgaagtaatatttatttagtataaacgcgatgattattagtaattctcgtgtgtcgtaggtgttgtctgcgtgttgttcgtgcgtgttgggctcatcgtcgcgtgctgttcgcgcgcgttgtgcgtgctgttcacacgtgtcgtcgtgcgttttacgcacgctaatgattcatctcacctagaatagctcgcgctaagtaaatatatatttaagcaacggttattcgaacaacacactaatcgggactaagtagtaattttactcggcatgtgattattgtctgttaatatgattaagccgaattaaatattataattcatattcgcttagtatacatgtgatatccctcgatcgtagtatcagtcgtctcggttccgttctcgcg

SEQ ID NO: 138389 - DNA, 567 bp, Zea Mays
cagacgacggagggggacccttgagcgaacccagggctactctggcgagcaatatccgtcgtggtggggttaatccggcactctacggtcgacataggctccagggagagggtgcgggttctctaggcctgagttcgggctcggggaggggttgcagtggttggatgccgtgaagatgtggcggcccaacaaggggcgactccagcgaggcaaaattccccatggtaaagcggaattggcgcaaaataggaacggggaagggccacttaccagagacggcgcttggggcaacttggcacatcgcttgcaggctccggttggccggacgtcgaaggattgtgacggcggcgagctccgacctgtgtaggggagaggctaagtgcggacagggcagagaagttaaggaaaggggaaaccaccgcgggttcctcgtgcgccaagctctagcaaagatcacagtggccaaagcgatggcggaagtcctgcggtaataacagaatggcgaagcaacaacggggggcactgtggctaggtgagtacgagggcgaggagagtgtgaatgtgagg

SEQ ID NO: 138390 - DNA, 549 bp, Zea Mays
gctgctcgccccggctcggacttgggcgcagcctgggtataaatctgtggccgttgtccccaaacaacggcgcgcagagagggagagagaccagggcgagagagaatggccgctgcgagggagttccgccgtgggcgaaatccatggtggttgccgttcggagtcagggatgttgcgcgcccgctcacctggcggaatcggcggcttgggcgagctaatctcctcatcgtcgcggatatcgtgccatggtcgacgctccactgtggctgggccgctcggacttcgtctccggtaagtgtttggtcacatggtgttcgctttggcctccgcaatgcgtagcataatcgggatgggagttcttgagtccgtgtggggatgggtctgtccccatcaatggcgccgccgtgcgtatagggcaccgccggtcggagtcagaggagggaggtcaaagttataccagccgcagatcggctcgggcgtggtgacgagattagtgggcactggaccgttgatctggtgttgtgtggctgtgatcagatcgtagggtgg

SEQ ID NO: 138391 - DNA, 291 bp, Zea Mays
ggaggaaatccccttaattcggaagaatagtcggcgttacatagtcagtggggagagtagtgatattccttctccagctttgtctgctctcgttggtctgcaagaattatccctagcaaattttgatcaggctctcaaggatgttgttcctgaagatttgctgtccgagcccacggacggtggtatgagggacatttgctctcacgttccagatgtgggattagagttatcccgagcagcgtctcgtgcctcgtcgaccttggagtgcagtcttcggggccaagaggctgg

SEQ ID NO: 138392 - DNA, 552 bp, Zea Mays
ccttcgttcagtcgcgccttaagcctttccgcccgctccagagttgattcgtccattgacgcgccccttcttttgctagaccgggtggacttgctacccgccagcatttcaggaatggcagccaactcttgagcgctgcaggacacgctttgatacggttccactgccccgtcttgagccacttgctgcccacccgaccctgccaccaatcccattccaccttcctcatccaaagccgccccctgagcagttccagtcttggattgatgggtaaatgatcccccagtaccagcagctggagcccgatcacccatcttaccaagctgaccaggaccaaccccattaagatcatcgccatcatcatcccccaacaggtcatcatcatcatcattgaaccccctctcaacattatcagtctcaggcagaagccccccattcccatcttcaacgcggaaggacagaaggtatacttcctccccaatgaccacctccaccgtgctgggaataagattagcatcaagaatcataacttggactctaccaacctcaaat

SEQ ID NO: 138393 - DNA, 329 bp, Zea Mays
tttttttcccgccgcaacagaacggctgcaggacccgtgtcttgaaaggtgaatcttcgctggccatgtgaatttccagcaagattctgcacatctgctagtgctagtgcaaggagagcgtctggtccacgaaattggccgacgaaattcactttatttgggattttcctttggctgcacctgcatcccgtttcctcctgaacatgacaggctcgatacttatctagctccgtttacgtctcttgagaggtttgttttctgtcagcaaggcacgcaacttcgcctttaatttgcatgtgtagacagcccatattgttgcatcttagtct

SEQ ID NO: 138394 - DNA, 371 bp, Zea Mays
gttggcttttacactggatgaggcaggttacagcacagttttagacctgatttacaaatggctggtctaattgatttcaatgccattacgcccttccccaataatacaccagctccgtgcagcagctgtaccttcacctagctctagcaacagcgctgcgctagtttactgctgcaaccacaactgaaatagtcagaagcgaacaggcccattggttcatcataattaatttgtaaagaaagcaagcagccaacaggcaagcgcgcagagcaagagcaagccagtaaagagactagcagaaggcccaagtggcagcccaatatcgtatcctaaacccaacgttggatggaaccaatccatggatcttattt

SEQ ID NO: 138395 - DNA, 428 bp, Zea Mays
ccattttgtaaaattcataattcccaaactgtcaggcctatggttgtgaacttttaacacaggcaagataagaaaagcatctacaactttcttataaggaccatgaacagattgtaacattagcttaagcaaacaattcactctctgaaatctgtacagatattggacagattcagttactgaatttgcaaaaaacacaacttctaaacgatcagacttatggctgtaaaattttaacacaagtaagataataaagttatctacaactttcttatatggcttttctacagaaaacataatttagttcattaaacaaacagcacgacgaaaacagtacgtacagcccaaaacaacaaccaataaaattcagctcctattcacttcaaaaattgccgcgttctagagacttgaaccattttaacacttta

SEQ ID NO: 138396 - DNA, 582 bp, Zea Mays
cgcgcgtgcggaggcaggccggagatgggccgaaagggggagttgcgggcgcgagggggggggggggaagcggccgcggcatggcttggatttggcccagctagggggagagaagggtttctctttttctttttattttcccaaattctatatccattttttatacccttttcttttgaacaattaatttactagataatctagatgctagaaaataaaatctaagtgaggtgttcatattcaatcaaagtgtatgcatatgatgggaagacctaggggagatttgggatagataataagaagggggggttagattagggtttcaaacctgggttgaaaattgggatgttacacagactctctccttgacctcgacgagcccgtcgccaaccgtaccttagtgttcaacgtctccatgtggctaggtcaagcctcgagtgcctcccttcctccggtgtcggtcctcctgactgcgcttcccttcggtgtaccgctgacaactctggccacgccacatctcccgccctggggaccaccacctcgatgccttagtctccgctggctggaggatgggaccccgcc

SEQ ID NO: 138397 - DNA, 560 bp, Zea Mays
tcaaatttaaacaatgcgccataaaactttttgttaacagtgcccttacactttcaatcgtagttctggcagactgatttcaacgtaccagggaatctaaaacctggttacaaaacagtaataagagtaacgtaaaaaaatgaaattctgagtagttagtatattcagagaagaatggccgacacgaatacgcactcgcactcgccgaagctgctacattaaaaacctgttgcgcactgtacaccaaccaatcgcagtaaaaacctaacgcgctgtaccgcgaacagttcgtctggcctggtacaccttttatgaaagcggcaggaagtacgtatgtactggtacgattgcatatcgggttaatcgtggagcaaggatcctgtatgtttgtctcggagaattgggtacatgtactgttaatcctggagctgctccgctacgtacgtgtccactgtcccgaaagtagcgttcctacaacaaattctcctgttccaccatttccgttctcctatcatggacgaaggcggccctcctgtttccacagaagtggtacgtgtcat

SEQ ID NO: 138398 - DNA, 593 bp, Zea Mays
ccgggagtggcagggctagagcagcagctgctgcggcgtccgctgctcaggctggagggagtagcgctgcaccgagctccacttgagagtacagtagacctgcagatctttgtttaattatattaccatgttcgcgtgtatcgtaagattaatttgggctttgattctagttttgctccacatatgcttcttgcttctttcttctctcggcagtttcattctctttgtagcttgtttttggatctttttttctttccgatttattagataggtcagtatatatatggctagaatttgtagtaggctaaggatcggaggtggaatgggctgatttaattaatcagtgcaactatgtgttcatgatctgatacgtatacgtatatatcctaataagcaaaacaagggcgatttgaggccatggtgatggtttcctagcttgctacaataaggctacccgcagtcacggacttcagaggtcactctatccgtttacagtccacgatcgagtgtgtaatcagctgcagcgggtaacgctttcacctacgctaaaatacaggcggacagcaaaaaccccatttacagagtacccgtgc

SEQ ID NO: 138399 - DNA, 395 bp, Zea Mays
caggctaactgaagaagtttgcaatcgggctgtgtggtgcactgttcatcagatttcagaaaaatttcgtcggagataagatcgccaccgtggctggggatgggtctccagccgcggtaaaaatcttccgcggtgtggcatcaaaacattgaggtggcgctgcgcggttagtcggcggtcaccggaccatcgccgtggcgatagcgcgcgggtaagctcgccagcgcggttacaccgccgtgaacctcatccaactccggccatcggcctataaattgagcctgaatcctgcttcttcaccacatcatgcacacaagcacttgagcaatcgactcaatttcaccagaagaactcacaaagtccacaaatccattccgccctgttcttcgcgctgt

SEQ ID NO: 138400 - DNA, 563 bp, Zea Mays
ttctgggcatcctgtgggatcatcataagctgggatgtggatcatataatttggcttataatctgggatgttagtaaacgacattggcttgtataagcccctattatgagcttggagtaagcaaccgtgccctaacataaactcaacacatgttaaaagagtattgcctagtacatggtccattgtttagaatcactcaatcacatcaggataagataaataaaatagtactgactttgatcggattagctctgcacagctgcgctcggatgcaattatcatatattttgatatgaagaggctgagtggatatgatcaaacagaagcagcttagatggagtgtgtgtgtgtgtcatgtacttgtcagaagtgtttttttattgactggtctgcacatgagcctgcactattatgcgggtcaaccgatatcatccatcccgtacagatttcactgcaagtggctatgattttaacatcagtgttcagcgcacaaccccagaaaaggttcctcaggagagtaaaaccaacctaatctgccaaaaaatcggtctgcagaattcccc

SEQ ID NO: 138401 - DNA, 288 bp, Zea Mays
gtaagtggcaaggccgattgagccgaggaactcctatgcctccgggctagggacgcctcactcatcacctgccacgaaaaatggcccaacttgggaagccaccccattattgacaagctgggccggacacgcagactgaaagaaagaagagtacgacttcatgcaagaaaaacagagtgttcaggcctcagcggccgcggtaagacacacattcaacagaagctgttccaacaagagttaggcgccgccttgggaaggagccgcgccctcagttccgaccccgccgtc

SEQ ID NO: 138402 - DNA, 379 bp, Zea Mays
tgtcaccttgcgtcttatggatcgcggtggtcaaggaagaggatagggtagaggttttggctcgcgcctctggcctggctgccatcttctcaatgtgtcatgacatttcgtccaacgtgcatgagttggctccgctctagcgagagacctatgaaaatttgcaccttcaggtatcttctccaagtgtgctgataccacctcattctgaggatgtgcctctccatcaacccttcattgacattgatcagtggcaccaacatcactatagtgtcccttatatgactctagaacatgataatgatggtggtgcatgcggacagggccagtctgttcctcatcctcctccgcacctagattagccgtcggcttcctatcctcc

SEQ ID NO: 138403 - DNA, 634 bp, Zea Mays
caagtaaccctgaccgcggtaagcagccaagttaccaagcaaatgaaatatatgttgttacattgaaggcgtactgtaagcttggaattagggagaccttaaatctgtacatagctttaaaaggataagttaaactgcttcacccatgtgttaccggccatgcaaaaaaggataagaagatggcaagtcttgtcataccccaatgtctcaaataccaccaaccatagttaccatactactgcattatttcctaaaattgaatggtcactttacataaggctaagcttgcttgcatgaagtagtgtcatacaagtaaatcctgatcacggaagcactaaatttgccaagaaaatgaacaaatgctcagttacattgagggggtaactgtaagattgaggcttggaagccttaaaatctgtacattgctgaaacgacatattccaacaacataaaaatgtagctcataaaaatttaggggattcaaggaacatgataggagatagtatcatccgcaaaggacatggagaaaaccctatttaatcgtgttccaaaataattggggatctaagctagagcgattcttgttcgttgcaggctagattatataaaaaggttcccttcccatgctagtaac

SEQ ID NO: 138404 - DNA, 385 bp, Zea Mays
gcagattggctgacttatgtggaggataagatggacgtctttgagattgtgtatggtgatcgtgttcgctttggcacacagctgctgaagggagaggctcaaatttggtggagaggcgtgcagacagctcactcctcttcaccaggagtcctgtcctgggatgttttcatcaggcagtttgagaggaggttctacccggtcacttttctggagaaaattaagattgatttgcagtctttcaagcaagagaagaagtccgtcactgagtatgaagtgagcttcaacaagatggtctgctttgttcctcatgtggcttacaatgagatggagaaggcgagccagttctgtcagggcctgaaaccttctatcaggcatgctttgggcg

SEQ ID NO: 138405 - DNA, 503 bp, Zea Mays
atcctcattcaacaatttaaacaaccatttacttagcagacacttgttctggacgtctatattctgaatacccaaaccccctacttcttttggctggcaaagaatttcccatttagcaagtctatatttctttttgtaatcactaccttgccagaagaatcgtgatctaaagtagtctattttttctaggactccctttgggacctcgaaaaaagacaacatgaacattaccaaacttgttagaacagaatttaacagcactagacgaccaccaaccgacatcagtttccctttccagctacttaatttcctttcaattttgtcttccactactttccagtcaatattacttaatttcctaaaatgcattgggattccaagatacttgaaagggtataccccttttttgcatccgaataggcaaatataactgtcttcctcattctccgcctgaccaaaacaaaacaactcactcttatgataattaatctttaaacccgaca

SEQ ID NO: 138406 - DNA, 292 bp, Zea Mays
tggagctaaaatttcatagattcatcttttgttcatgcactgctttggacgaaggctagcttcgttgtcgtttcagagcacctgaaacacttttgagagcaattgatgacacaacatttgagggcctttagtaaatacattccccccaacagtagccccgccggattagttcgtttttttcataacgtggttaggccgtgaaacaaacataggcctcatgtcgaatgtctgaaaacaccttcctccagcatgttattgaaaatgggaataaatgcaaagcatcaaaacgaaa

SEQ ID NO: 138407 - DNA, 389 bp, Zea Mays
gggggtactgcaaggcaaaagtggggatgggagagttgcagagaatgagcgtagtggtttgagtggagattgtggtgagtgtctttagagcccattcgtccctagctttagtcattcctcataacttatgctttcttggctttacctttgggtcaacattgaggttatgttcaattatgcttttgttgacgagatcatttataaactaggcaaatacatctttgttatttgaacaagaatcttttcatttgatcttcttgttctttggacaacttagtgccaaagaagactttctaatcatttaggttatcagaaatgattactttctttagttatctaaaggtgcggccttctccttgattttggttccttttggtgcttaatctgtc

SEQ ID NO: 138408 - DNA, 407 bp, Zea Mays
gcctagaaggccggaaaggaacgatcaatcctatgagccatatagggcaaatggcaatgcaccacatagctcaaaccaatggggggaagacaacatgccaatatccagccaaccccacctatgtttgactagagagccgatggtctcgcacaggctgccatcgatatagtgagggaggaaatagccggggcgttctgagataagctcagagtaagcatggtccctggggggcaatcatatcggaaaccttatgacagccgatttaatcaccacccatacccacagggaaccaggatacccgaattcgcaaaattttcgggtgacccaggaaaaaacacgcacgaacacataggccagttcttagcacaattaggagaattgaccaatacataagcatttcgtgtgcg

SEQ ID NO: 138409 - DNA, 301 bp, Zea Mays
tcaaaagttcctgacttaagcaaactagcagtaaaatgttaactttttctagcattttgtcaactactagtagcgtttttcacaatgagaatgagaagtaccagaagtacccatgatcctttttggctactgctatttttcttatttctcgctctgctcatgtctgctcacagacaatgagacaaaggtgactgagcagctcttacgtgccaggcgcccaggcccaaatgtgccgacctcctgtcggtgacccagtggcttgctttctcgttggtgggtccctggtggccttctgctgggg

SEQ ID NO: 138410 - DNA, 681 bp, Zea Mays
ccagattattcctctcttcgtgttttcggatgtgcttgttggcccaatctacgaccctacaacacccataaactccaatttcgctccaagcaatgcaccttcttaggatacagtccgtttcataaagggtttaagtgtctagatcctgattctggaagagtctatatttctagagatgtaacttttgatgaatctctatttccctttcaatttcttcattctaatgctggtcgtagatttcaagatgaaattaatcttttacctacctatttgttaaatcctactagtggggttcgtagcataagtgatcatgtgactgattcatccattaatcctgctaacaatgctttcccagcgcatgaaatcgtgcaggaattagcgtcatcacatgctgacccccaaggtgattcacctgtgtctccaatgacttcggcaagtgtatctgcccaggagtctgagcctggattatcgtcccatgacacatttcctggaccaatgacaacctctctaacacatgtgggtgatcctacgtccaacgcacctaacagggcgttcgattcggagctcccggcggccgtatccactccagatcccgtgttggaatcgtctacagcaccttcggctgggggcgaactttatcaaaggccgaagactcgtttacaaagtggtattcgcaaggag

SEQ ID NO: 138411 - DNA, 278 bp, Zea Mays
aggaaagtggataagggaattgccctatgttgtttggagcctaagaacccaacctagccgagccctgcatggaaacactcctttcttcatggtctatgggtcggaggcagtgctacccgccgatctcaagcttggggcgccaaggttgatcttcgaaagcatagcggaagctgaggccaccaggctggaggacattgatgtacttgaagaagaacggcttaacgcagtaatccagtcagcacggtaccagcagactctaaggcgctatcacgacaagg

SEQ ID NO: 138412 - DNA, 384 bp, Zea Mays
gttcttggctgaagtgatgagtaccaagtgtgggctacattttttaccgccatgactttgtcatgactgttgtgttgtcaccatagaaggatatggtagctttgtagctcatcaagaactgcttcaggtcagacaaaccatcatacataggcagtgttggagatctgtatagtggtggcctaggtgtggcttgcaattctggtgtgagtcgagaggttttgtcatataggaaatcttggaagttgtatgcctctggaggtgaattgccaaagttgtgattgtactggtttttgtatgattcaatgttgcgcatttctttggctgcttcatcaatcttcttctgcagcttggagagacaaagcattttttctttgcgcttctcta

SEQ ID NO: 138413 - DNA, 300 bp, Zea Mays
gggtaagaaagtttatggtgaggaagaactccgtgttgggtggtaatgcatctgaagattgagtttgacttctctccttccttgacgaggttgatcttttctttcccggcctgggtctcattgcttcgaggtgggagtatatcatcgtggatggagaatatggttaagataggtatgaatgtgatagactacacgatgtagatcaagatcttgtttgatgttaggtggggatagacagattatgcaatccagcatgactctattggtggagttagatctttttgctcttggttaagttgg

SEQ ID NO: 138414 - DNA, 324 bp, Zea Mays
ggataatgcagtgtgcccacaacacaacagacacacactatttgctgcctataattaatggttttaccatttcagcaattggattcgaacgatttattttgctacaaaacaagcaaatagaatgtttattagaaaatggcaattatttattagcaagggaaacaaagatcagtgaatggagaagtttaagtattttcagatagataaattgctataatcatcatctataatattcatcatggatcacgcaccacctcttattttgcttcaggagcttctgcgtctgctttaattcttgccaaagtataaggatctctctcttga

SEQ ID NO: 138415 - DNA, 667 bp, Zea Mays
tctctgtctgccccgcggcccacacctgtcagctgtccctaacctctcgcccacgtccccaccgtggatgcgcccatgtccgcgcgttctccggccacctccttacgccctcgcccctttagagcccgcaccccgctcgcccacttccccttgctcacttgcgccctcagtcgagctctctcgccccctctcccgccctgcgcgcgtgaccaggcaactctgccgctgctaaccgaagttcgccgcccattctgtgaccgtcgttgagccctcgtcgcacccgttccctcggtaagctctgccgcatcacccgcagctcgggacacccttcagttcgtcctttccccctctgttcatccggtccacgctcaccggagcacttcttgcacagccggagagccgccgccgtcgacccacgtcgtcgccgcgccccaacctccgttcgtgcgttccttggacttccctcaaggtaaccgccctagccccgcccttattttcccctgtcttgcatttacctgcccgtgattgctcgccagagtattccccagtctgctgaggactccccttcgccgtccggtcacctcagtcccgttcacacaaacctgaccccgccatagtgttcgccagaccctccccaacctctccagctacccggaccgacctctcg

SEQ ID NO: 138416 - DNA, 503 bp, Zea Mays
gacccagtcactacaaaaataattgtcctcaattgaagacatccgtacctacctactccaactcggtgaatggccccaagaatgtttcagcacccgcctccaagacaccctccaccaacagccaggtaagcaagacccagtttcacggcagggcttgagtgaatcacgtcgacgctcaagaagctcagcaagcccctagagtggtgctcggtgagttgctagtcgaatttacccctgatgcggtactttttgattctggagcatcccattcattcatcaccactagttttgtggaaaagcatggcattcccactgcatctttagaaattcctttggtcacccgaaccctagggtcagaccttctatgccacctcaaatgctcccaagtcataatcttctaagtggggtagtattcttggcggacttagccgtactcccatcccacgaaattgatgtgatcctaggaatggattggttgaccaagcacaatggcatcataagtt

SEQ ID NO: 138417 - DNA, 365 bp, Zea Mays
gagcaagcaaagttggttggatagtatatacaaggtgaaagaaaaatgggctgaatgttacatgaaggatgtgttcacattaggtatgagaagtacacaattgagtgagagtctaaatagtgagctgaagagacatttcaaatctgattttgatatcattcgatttcttaagcaatttgaaagggtggtggaagataagagaaaaaatgagctaaatgctgaatttgaatcaaggaagaaaataccaagaatcaaaatgaggacacctatgctaatccaagctagcaagttgtacacgccagttatattcgaggcttttcaaagtgagtatgaaaggtccatggtagcatgcacctcggcattgg

SEQ ID NO: 138418 - DNA, 832 bp, Zea Mays
ttggtatcagagacacttttcagcaacctgttcatggccacacccaagagccgatctcgaactctagtttgcgatggtgcttattgtattagcgtttcccgtgatattgggcttgaaccagtcattcatagagctctgccaaaaaccggtcacgctcctaaagcgccatctgcactgcttgagtttgcgtggtgcgcactgtgaatgggaccaagggcagtggcacctatcttcgagcgtgatttggaaggatgtattgtatcaatactcttcccatggcagtcattccagccatgtgcacgacctatctcccgtgatgcactgcaagtacattgcaatagttctattcaccacctctagcatcagtttgtagatggaaagctatgcttatacgaagctcacaccagccatcttgaagaggtccagccaaaagttacctttcacggggtcctggtcgcttacaatggatgctagaaaagccataaaaaccatcgaatgacgccttcacaaccgatgccacaatctataggtggtgaacgagggcaatgaaatgtgcatacttagaaaaattggtcggcgactgtgaggatcacacttctcgtgcacccttggaaggccttccatgaagtcaagggagtcacccttccaaaccttcaacatcaccagcaatggctagagcagtcccgacaggtgaagagtttctattttgttcctctagcatgtgaaaaggctttcacaaaataacagaccaccttgcggcctcgagcaatataaaagtccacttggaggcacttgagcgtttttatggacacttgtcttgtgcgatctccaa

SEQ ID NO: 138419 - DNA, 274 bp, Zea Mays
gtgcgatcaactgcaagggtgtctcgtgagggagaagagaccgaggtcactaagacaacaccaatttcagaactagcccctatagatcttgtatggtgcccacatgtgcatatttctactgagcgtatgcgtattgagtactatgaccactactacaaggcaacataactcttgacagccctacacaggttggcgccattttcccctagatctacgacaaactgagtgagaaccaaccgacggatagcagcaggggcacagagatgcgaggaga

SEQ ID NO: 138420 - DNA, 649 bp, Zea Mays
gtatatcctctatgagctttcttgaatggcacgaccatgtccagcccctagaatgcgaagggctaagtgattggaatagtctgcaattgttgtgctggtagatgttgttgcttggccaagaattgacagaattcacatctctagactaggtcggctgcatctttctttgcagttggccagcaaaaaccagcccagaatgccttcccgataagtgttctcgatgttgcatgaaccctacattgcctcgcgtggatttcctacagcaagtgtttttaagggcatgagtcaatgcacttcatgaaaacacccttggcccctcttttgtatagtgcatcgcctatgactgattagtgagccgactgccttgcgatacgctcgaccgtggctctatcatcttgctcttcttcatttttatgtatttgatgattggtaccctccagtcattcggatctggttctgcttactctattgccttgcattcttcccctggccctgacttgacactgggttgttgtacctcttggacgaagacaactgaggaagcctgtgctcggctcgatcctagattaaataaagcctcaattgccatgttgcagtctctctcaatgtggtgaaactccaacccttcaaatttatcctcaactttcct

SEQ ID NO: 138421 - DNA, 542 bp, Zea Mays
caccgtatgtgtcggtccgcgcccagcctctgcaattctcaatcatccctagctgggctaccactgcactacgcaattaccgctaccaccgtcaggtcaggtgaacgaaaactctcaggttcgtagccatctcgggttgagctgatgctttgtggacttgttgcttaaatttagcccaccacacgaaaacatggcccatgaaacgctccacaaatggctcaatatgcgtatagacagaactgaggttcctgcacgagcccatgcggtcatgcggcacagtatcactacgcgtctacgcctccgccacagtcgctagcaatacgagtaccaaacagcccagagagcaaggactagctgatgatataaagattactctgaacgcaacgacatgtagcaagctgtgacgaaaagcagtagcactggtgggtccggtgctttcttctgaacctttgaagacataagcgtatctgagcttgtccctttttttttcttactgaatttcaaagttgattcagcgaatttcagtgaattcttccgatacg

SEQ ID NO: 138422 - DNA, 287 bp, Zea Mays
tggttgtgtggtttaggcagtttgtaatgtggatcgtcctggtcatgtggttgcaccgtccagcagtactagccagaagggcctagtatttggctaagtctctggtgcgctgtgtggaccgtccgggcgaggggtgtggaccgtccgtaactgacttggtgaatttacatagggacttgcgtttctgggggttgtattatggactgtccgtgcctaagtcacggacgatacatgttctcaagtcgtgggccatctgttcctaggtgccatactgtccgtacgtctca

SEQ ID NO: 138423 - DNA, 346 bp, Zea Mays
gtgggggtggaaaaaggtaagggcgagtactttcacacttaacaagtatccgattatttggtaggtaggttggctatatagtggacttggctcaagcgattgcttttagttggtgaaattttatttttacttgcaaagcattttaatccctttctgatagaacatttatcatgtaaatatcattacagcccaataactttatgtttattgcatcccacaatgaagcatttatcaagtctaatggtgaatcattacagtaaaatttggaaatcgttgattgcatcccacaataaaccattcaccaagtctcatggtaaaccttttgaaaaccatcgcgagtatcaac

SEQ ID NO: 138424 - DNA, 404 bp, Zea Mays
ctatttgttgccatgattgaatatcagtgttcctgcatgcatatttatattacacctggtcacattaacaacataaatgggaaattatgccagggcagtagggtacatgttggtgcttgtgctagcgtggtggtagactaacgaccgagctatgtcatggtggcatatcaggttatcgctagtaaggcggtagcaaatggatcaacccgccactcgcggccgaaaatcactatatttcggtatcaaagacccttttccttgattcatactgtttcattgctcctatttatgctttacttatcttttcgggagtaatgttaaaggccatttgaatttttatatttttggtgcttgctgccaaaagaggagaaattatatgacaaagcgaatggatcaacccacca

SEQ ID NO: 138425 - DNA, 397 bp, Zea Mays
aagagaataagatctagaagagagccacaaacaaagcagatatctcaacacaagcacctttgtccaagaggaccagagatatgcaaattttattgttgatagtacatattcactatcaagggatgtagaagcgacccattggcccgctacgtataagccaccgcaactccttaatatgatgggcaatctgacccgaaatagtttatcattagacatgaaaccacccttacttccttcagtactagccaaatcattcatcatggccgcaagatacatagctcaaacctggtatttcttccttctccggggttgatcaacacctcaagagctagctagttgatcactagctttcaattagtattgttggtgatgctgattagagtagtatattaaatta

SEQ ID NO: 138426 - DNA, 407 bp, Zea Mays
atcaaggacagcggcggcgcgcgcactcggcgcaacgcgacgatctccaaggcggcaatgggtgatgactagcggagaaggacacaagaggaatcaggaaaggagcgtacgggagctggtgtttacccaaggaagcttactatgtcaatgaatcgaatggaagctgcggggacaatggcaatggcgactagggttaatggagagatactaacgcttaactaggggaacgagagagagcgctcgaccgactgaccctcgtgcattcatggtcgggcccgagctgcattggggcgcttcgtgcgatggctggtgagtgggagaacgaaaacacgcgcgagccgaatgacttgggcctaggttttcgggaagaggaaagaaatattaaaaaaataaacatctgaaattgg

SEQ ID NO: 138427 - DNA, 272 bp, Zea Mays
ttacgcttttgttcctaagttcaatacatattctaaagaaacggtcaattggagagttctcttctctgtattcatatcaccttgattctaatttgatactctttaaccatttaaagacttgttccccttattataacgcgctctcgggccttttggacttcttccccttattataaagcactcactgaacatccaacaacgccgagacatcgaattcaagcctttgctttagtagattgagatttgggcacttgttttgagttgtaactccg

SEQ ID NO: 138428 - DNA, 563 bp, Zea Mays
gaaggaggagcctgcagcaatcaagaagcctgctgaaaaaaggcgaaggattattactgttattgatgctattgaagaaatgccactgtcggcttcagcgtcaaaaacaccagctgtcgaagctactcccaccgaagctacaactgccgaagccacacatcttgagagcgcattttctgatattgataagatgattttgaaaatggccacggaagaaactgttgcaactgccgaggaaaccctggccacagtgcttggaaaaggggagaaggtgcttaacaaagagaagaagattaccgaagatatttcggagaaaggggacttcaattttcaaaacatgattggtcaagagttatccaagactgaaaaagaggagctaagagattatgctatatcttgcggctaccagccaggagcgttgctctttggtggtgttgacgaagagagcttaggatgcctccaggaccggactggagcgaaggttgtcagcactctatcgaagagtgttggctttccgaagcttgaggccgaccttagcagataccagcggcaacatatcaccg

SEQ ID NO: 138429 - DNA, 318 bp, Zea Mays
tacaagagctacaacattcactccaacattcaaagcaacacctccaagtgatgaaagccacacaagtgccacactaaaaagattagtgcattgagttagcgccttgtgtgagagtgaattagtggagagtgtgttgtgctcttgagattagagtcttaactcccattgattgtaaagctagcgagaggcttcaacgtgtgaactacctcatggagactatggtctctcatctgagtaaaagagaggactcaagcttgatctgtggaatcacctgagagggtttaaaaagacccgatcctttgggacaccccaacggag

SEQ ID NO: 138430 - DNA, 986 bp, Zea Mays
gacagtttctaaattttgtgtgctgctagcctaaattatgtgttgtttcataagctcagttctattaaaaaagtgtggcacaaattgagttaagtgataaaccaaacagtagccgcacatttaatggtgtgcctaaccttaggtgtggtagtaatccaaacagccgccacacatttataggtgtgcctaaccttaggcgtggagataaaccaaacaaagaactaaccttaggcgtcttaggcacgccacagatgtggcagggtgctaacgttaggcgtggcacattacacgtgcaaccaaacacatcctacatcttctgctactgggaccattgtggcgcaacgggttagcagaccgaccaagaaatctacaaaggtgtatgggccggattgggtggatgggctgcagctgtgctcgctttgcgaataagtagaacgagagttgcctggtgaagggcatgtaagaattattcactacaacttcttctccaagttctactgctcgtccgccgccactcttcttcctccttccctctgctactcctaatcgttctctgctactcttaattgttgttctcttctactgctaccttgtatccataccgagttgttaacagtggtatcagattcaacgatccttggccgatcctcgcgttctcgcgctggatccttctggtgttcattcccatttcactcgttttcgccgtcagcaagttctcatgaatccagatactcagatcatcttggacgagatcgctcgccgattcgctgatcatgatgccaaatgggatcggcgcgcgtcggagcaagaatctcgctgggaggcggtgttctctgattttgccaaaaaccagagcgatcgtgtcggggcgctcgagaaagcctccggtgcgttcgacgaatggcgtgtggggatggaaggtgccgtggatgatctgcgcttggaggtgggcaagattgcgcgtcattgggagcgggctgtcgtgg

SEQ ID NO: 138431 - DNA, 528 bp, Zea Mays
cgatcacacaatatgaccatgaagtttagagacaatgttgattacaaatactaaagtctcagtattgaaagcgctgacaaaagagacaaagcattagaccaacatacaactaattcatggggagaacgcatctgatagcagcaccattggaaaatgaagcaaatcgatcagcaaatgcgcctctctaacgacgcccatcctagatctcggctgaaaacctctttagccattcttctgatgtggaggcttccggtcgctagcttctttctttccatctctctctgcaacaaaaacaaaaagagtctagccagaagcaacaaagaaaaataacatcagcgggatcaatcataattctgttgttgaaacagaaaatgttcttaattctccatatataccaaagcgcagcacaacacaacacaacaagggccaatgatcaagtttctgtaagctttattaaatctcctaacccaaccatcaaaaagcatctcgacattattagaaatgatgtgaatgttgagcgcattttgc

SEQ ID NO: 138432 - DNA, 368 bp, Zea Mays
gaactaacaaaatgccttaccttgtgttagattggcaagtcttgttaggtcgtgttatgtgtttctcctgccttgccatctaggtagtattgtaattgttcaaccctttttgcaaaacattttgttgcttgttctgttcataaaaagacccctccaaacaaccttgagttagaaagtgaaacctcttaaaaaaattcatgcttgtgttggtgttttctaacccttgtgtgttttacccttgaatttacacctgcagagtttgtagacccccatagcttgaccgctaaaccaactcaagtctccttgtgcacttgttgtgtcaaaaaaaattgttgtttggtgtctagttgcgcaaaccctatcaaggc

SEQ ID NO: 138433 - DNA, 699 bp, Zea Mays
tcaacgaatcggtacgttcattctaatctgcgccgttccttttcaatccaacgtctcacggttcgtcttctctccctcataaccctcagacggcggccggaccaggtgaccaagcaggccacggcggcggcattgacggaaagcgcccatcgaagtccgagctcccatcggtcaccactgtcaaattgaacggagctacacggtgtgcgcggcatcacagtcacaatggatgtattcttaccggcattaaggtgcggatgaagcttggccacggcgcacagcgaagcctgggtgacagcgaagaatcatggtcaccgggatctcccttcctccctgccaccgccccccgacgcgatccagatgcatgacatgagcctcctgaccgcgcaccaacccccgatggagaacacccgtggtgaatccatgcggcggcatcactcaaatctctctgtgcttcgttaatggcggacacaattagaaggtggtggtgaggaagcaacggtggccggtcctggcggtgattgtggtcgaggctcggagtggatgaggttgcggtctgggaacccacctgccccctcgatggcgatgggacgacaacaacacgcgcgagttcttctccccggcgcccactgtgcttcagctcgccaatggtccaggggagagggattcggtggggttttattgagatggttagggctg

SEQ ID NO: 138434 - DNA, 404 bp, Zea Mays
tacccttgaaattaaacgtgcacaacttatagacacccatagctcgacccctaaatcgactaaagcttccttgtgcccttgtgtatgtcagaaaaatggtttactgtctgttcacgtaaaccatatctagcctcaaattctttttgggaaccttgtccaaaatcctcattaagttctcctctgctcaacccagaagccatctaggttgatgacctctcttttcacctagatctggtaatcttttcctctttgaatcatgttgtggcttatcatccgaatctcgggatcccctattgaatcagccccattatctggttatctgctataacccgttctcaagtatcagatgttgatcttgcctaaatctctcatttctgatcattctcatactctttctctaagga

SEQ ID NO: 138435 - DNA, 509 bp, Zea Mays
ctattcacaaaatgcataggaaagacctgagtggaataattttgaagattgatttccaaaaggcttacaacaaggttaaatgtccgttcctactacaaaccctacaaacgtatggtttctcgaccaaatggatttcttgggtaaagactttcattttggtgggaagtgtggcaataaatgttaacaatgatatcagacatttctttcaaacaaaaaagggctcagataaggagacccattatcccctcttctatttaatatagtagcagatagatatgttggatgtgttattagggagggcaaaagaacagggccaaattggtggggtagtgcctcatttaatagaggagggattatctatcttacaatatatggatggtattgttttatttttggaacatgatctagaaaaaaacctataacatgaagttgatactcattgcctttaaacaagtatcatggctgaaaattaactttcataaaagcgagcttttctattttggggatgc

SEQ ID NO: 138436 - DNA, 419 bp, Zea Mays
cttcagcccacgcatggcattgcaacatctttgccaggccagggtgacatgacctatacataatacatatatagtgtcgccaccgctactttagcctactatggctgcttgggattaagggaggggagcaggtgtcctaggaaggagctcatagaagtgataccaatgcaggatcgagctcaggggagacgtaggaggtgactaggtgaagaatgacaacccggagaagagaatacacagaacaaaggtgatagatatatgtaggagccaaggtacaagataggaggtcgtatcaagccggccggccggtattcagacaacgctaggctagaacgttgtgatgggacaacagcttaggtatgacaagacgaccatcaagcctagggtgaaaacgagccgagccgagccctccgactcgc

SEQ ID NO: 138437 - DNA, 436 bp, Zea Mays
gtcgcattcggatatatacttagcaatttccctcttcattctggtccaccagtacaaggatgtgaggtcatgatacatcttgttactaccggggtgcatggaaaattttgaaaggtgagcttcatccaatattttctttctgagctcggggttcttgggaacaaccaatcggtccccaaaccataggattcctttgctgtcctgacggaagcatttgtatttttccgccttctgtccgatcatttccttaataacttgaacacccttgtcaccaatctgtgccatgactatttgctcttgtaatgtgggctccactgaaatatagcttaaggcaccggaggaaacgacttctattttcagcttgcacaactcatcacatagggtggtgatccttgcatccatattcatacaattgcactgggccttcctgcttaag

SEQ ID NO: 138438 - DNA, 675 bp, Zea Mays
ctagtcaggaattgcatgaggaacctcagtcccctttgcctgcagaagcggtcaacagaaagaaacagtcaatcttgatcgacactgaagtaaggagtgccaggctcaaggagaaggctagaggttttaagacttgctctggaataaggaagaattgctcgtgctgtgctaggacatcgccaccctctatctctcacaagattattaagaagctaggagctgaattctgcaaagttaatccctccaagttatgccctaatgcattaaacaactccaggtccttcagctctgccatccagaggccacgtgcttcatccagtagcagggccgagctacgagcaacgtccgaagatcagagggatgaatcagaagatgaagatgatgcggggtctcgcccctcggctgggatgtaaggctttgccttcttccttgggtcagccagtttttactgtgcttctgttggcgataacttttggtgttattatgtataccaacaaaacttctctttctggtgatgggcttgtcgtgccctttttgtctgcctcaacaaacttggttcgagattatgacttttgggtggttggcatgaatattcatattatgtggaagttatgtggtttgttcttatggtccttttgggaaatttcatgtttgaatttcttggggagatttcgc

SEQ ID NO: 138439 - DNA, 378 bp, Zea Mays
ctagcccgagcctagtcggtgaaaattcatcggtggccatcgtggctcggtcatttccatctccgtgtcatccatgcctcgctcctccctcactgtgtccctgctttacgtggtaaccatgcacgaacggtgtaatccacggctgtggatcgttagctggaccaccgtgcctttaaatagccccaccacccacggcgaggtattcacatcttcaccagtgaactcggttgaagcacaaatccgtgaaatcctctccacctctcccaaaattggttgtgtacggtgaaaccatagtcctttgcgaccatgtagccccaacctcacctcctaattccacctggaaccgtcgcgacgtcgttttccccttttctatcacca

SEQ ID NO: 138440 - DNA, 455 bp, Zea Mays
cgtggatgagaccaagggctggccgccgtacccgcttgcctcacggccggtccagatagcctcgccggagttggccacctgctgtgcgatggtcacgtgccttgaagctttaccacgtcgtagtaagccactttagatagctggttcgtcgctggtaagcttgccatagtgaaagccatgcatcccttgcgccagtgaacttctctctctccggccgccagcacgccatgccaaaattaggagccaccgctctgggattctataaattgagcacaccgccagctccgttaggtaatcacgaagccaaagcacccgctcctgcctccgattagccaccatagccctctaattcccctttcccccaaatcgggttttccacacgccgtgaaccaccgcgtcatggtcagccttctgcaggttagctcaagtctttttgattgatattctagcttccc

SEQ ID NO: 138441 - DNA, 351 bp, Zea Mays
gcggtacaggattgaaccaagaacaatcacttcaaagacctggagacactcggtggtgttctcattataagactcttaagagtctaaacagtctatttccttctgttattgaggtgctagattatgtggaaaaagatggtccaaatgataagaaaaggagacaagcccgcgagctcatagattatcttcagaattttgattttgtgtttcatctgcaattgatgttgataatattgggaaatgcaaatgctctatcactttgtttacaaaggaaagaccaagatatattggcagccatgttagaggtggagtcaacgaagcaaaaaattcagaagcttagagatgatggat

SEQ ID NO: 138442 - DNA, 506 bp, Zea Mays
caaaagtcgcctatgggtgcagccggactagcataataagtacgcaaaatcgaagtattttccaaaaggttccccatgcacaagtcgtctacgggcacgaccggatcaacgaaggcacgcagcttcatataaattacggttacatacatacagcgagggcatcacactttacattggctcaaccttcgggatgatacccatctccctatagttgaacagcattatcctcagctcctcaccctcaaaaagatttcacaactccccctcacctacactcgccccagccggcgaggacaacaattcccgtttgctagccccgtccacacgaagacgaccaccctccacctcacttaccctccgtttcgccaccgcccttcgccgcctacgcccagcactcacaccaggaagaacttcagcacctatcacacgtggagaagcttccgccgcagccacatctagtgccgcaaaataatccaagtcctcatccgaagactcttccgtccaca

SEQ ID NO: 138443 - DNA, 515 bp, Zea Mays
ccccgttctggcgtgaacatgatcgtgcgggggagaaacggacctggccatcgatccgatgatgagcgctcacaattgaatctcaaatacctcatcatgatcgaaaatcgtagtcgttgatctcggatctgttggcggagatcagatcgtgagatcctttaattccgagcgttgattttagatccgacggctgtgatggcatcggtcgcgtaacgattcagccgaggctatgggccgtcctatttaatctggcgggagaaattcgatctgctatcataaaatctctgtcgtcgatctccgatccaaggaccgagacttcgatctaatctgcaccgtagactatcgatccaatggtccacaaaagcccataccccttcgatcgtctacttttgcaaaagagaccatgtgctctatattaatcaacccaccgtccacctgtgcggtaacatgattacctagcagtttttgagaattgcgagtaattccctagagcttgatttaattataaaaatgac

SEQ ID NO: 138444 - DNA, 428 bp, Zea Mays
aagagcctcggtggagtcagatttgtgggcgcttcgtcttccgacgcgaatgaggttgattgctcacgaactcgacgtgctccacttggtcctgctcgccgccgacctccaccggctcggaatcacccttctaccggcagatccgcagcagcgtcgcccgatttcgcctcacttcgacagacgcatcgagagggagcgaagtggacagggaactttcctcggtgtggcgcgggcgacgacttccgcgataagcaggagcgggggagtgaacagtgcaccccttcatctggcgtgagagagaaggggagcgcgtcggagaggagaccatagggcgcgccgttgcggagggggagggggacactgttgctcctaaacggtgaacattgttaggggaggggagggaaagggtcgcccgctgcagacagtct

SEQ ID NO: 138445 - DNA, 423 bp, Zea Mays
tgccggtgcggcggcagagcagggagccctcagctcccccgtcgatcgaaagcgacggcgtccgtgccactgccacccagccccagatcagcaggggcccgcaaccagccagctgcgctgttacttgacggcagcacactccatgtctgtgtcttttatctatctctaatgatttaatctaatcaggccccctatctgctgtgccgactgccaagcttatcctgctcctgctccctctccgcctccggcctccaacttgtcagcgagttatattctaccaagtggtggaggagtgcccgcagaagcaacgacgacgcacacggctggcttgagcaagccagccaagcaacaatggcggacggaggaccgagggaggacgaagcggagagggtgctgcaggtggtggcagacgcgatgattcta

SEQ ID NO: 138446 - DNA, 311 bp, Zea Mays
gcctgatgctggtctggaacagagaaggaagaaaggagggcgccatggatggagctcggatggggagatttctgcgctatgaacaggggaaaggagaggggaggaagaaggttgtggtggctgcttgggggctaggggtgggagtgcaaaatagccaagtgcaaggaaggaggtccttctatttatagagaagtgctagggctagggtttttgtggggttgcttagggtagaaggaaaccaaaaattactactggattttggcggcgattcatctgcgcgagactgaaactgatgcgacaaacgaggaaag

SEQ ID NO: 138447 - DNA, 696 bp, Zea Mays
ctctccacatgcgtggccacgtcggcgaggtcgcgtgccatcttgcatttgcagtcgggcgtgcaggggtctggttgctgtctcggcaccgatctggccggaccgagacgggggggcagccagcagtggtagttgtagtagccctgtagctgccatgtcgcgctcccgccgctgcagcgaaagggacaccgaagccgaagcagatctgaatctgaacctgctcttgaatctgacgagagggcgggtgaggaggaagaaccttctccgctctgctcttatctagctgaaaggctgcgcttccgttgctttgaaccttctctgctctgctctgctctgattctcgaagcggatccatggaccatggcgtgttcattcaaggagcatgcaagaaaacaacgacgacggaagaacactagttacatgttcgttcacggaccggaccattcatggtccaggcctccagctcgcggcaacgctcgatcgatcgtctttccttccgagatcgagcgataccaccatacacacgaccaccatattctagtacatatgtaaaagccatgccatattgccatatacaccaccgaaaaacaaaattcaattgctttattgcgacagctggaccactgctgatcctgtgatccacgcccggccgccaccgccacggccgtcccgccaccacccgcatcacgcctcgcc

SEQ ID NO: 138448 - DNA, 503 bp, Zea Mays
ttgtcgggcagcgccgctgggggcatggcggtcccgcagccaatggtacgttgtacatcggggtagatgggctgctctcccaagagcacagcagcctactgccccatgcctcggccgcagcgaccgtgtggtcgccctaccatgcgcaaaacaatgatgctggcatggaggctagggcttacgacgacgtcgacgctcatccctccccaagtttttataagctagagttcgccacgtatgacggatccgaagacccattgaattggctcaatcactgtgagcaattctttaggggacagcgcactccggcctccgatcgcacatggctaacgtcacaccacctcaaggggcctgcgcagatgtggtactacgccctggagcacaatgagggcatgcctccttgggaccattttgctgaactgtgatgtctccgcttcggacaaccagtgcgaggctcacgcatcgccgagctgggatgccttcccttcctgtctacggtctag

SEQ ID NO: 138449 - DNA, 377 bp, Zea Mays
gtagtccacctcaaccacaggcaaaagccccaaaacacatggatacccaaacagaagaatcaagtcaggctcagccatttgagatacagacacccaatcaaccctcacccccggttggtcaaacaaagttgacacgcaaataattcaaagcaagatgtgcttgctattattgcaaaaatgaaggacatcttattcacgaatgccccaagaagcgtctagaccaaataaagaataaagctgccaagcatgacctaagcaatagtttagaagacccaccattttataagtacgatgacgaaggtcgcttgattagtatacattgcggagcaaagaagtaaggaagttccttaagattgggagagttcaataagaactaa

SEQ ID NO: 138450 - DNA, 541 bp, Zea Mays
gacgaagtgaggatctaggtcgtgcattgggtcacgtaggcaggtttttattgcccatctcttcctcaagctgaattacatggagcgctaagactatttcgatcccaacaatattgacatacagatgtggataatgaattgtccttggctgcacgcgagtgcgtaaaaattgagcgtgtccagcagaccatgattgtggatgcatatcgtcatctccacaaatgagagggaactgcgtgatcgagcgtccgaacgcttattttgcacgactaaattcctgatctactgaaaagatgaatagtagaatatcctagcgcaaaatacggatcctccgctggatacgcaagctgacgggagagcataatcacgaaagaaaacaaaagccactggcccactgctgaatggaaaagcagtagattgattatgcgggatcgtgtagtacaactgtacatatagccatataggtaacgatgatttaaggctagcttataaaagtatgattactattgaatattttattattaccagttttttattcgag

SEQ ID NO: 138451 - DNA, 527 bp, Zea Mays
gatgggtccaggcgctaggcgcgcgtgcgcgaagcagtatcccgagatctgtgtcgtgtgatcaagatcgggcgattgagatcaacgccaggggggttccgctgcgggcggcatcgctcctgctccttggtggtgaagtcgccgaagctagggcaggtgtaggctacaggggttccgaggtcgccggggttggtcaggatcaacgaggagaaccccgcaaacacactggtggggttctaggcacgagaccagggctagagatgggataacggcagagggagagctccaggcgggtcggggtaactccagcgaagaatcccagccatggggagggtgatcgggtgcgataaggctcggactagctccagcgagggtaggggagtgccatgggccaacaccggggcacaggacggggctgaattggccggacactgcgtgaggcacgacgaaccggtgcggataaactccggcaaggccgaattggttaaggtcagacgcgaataaagaaaactgagcacgtgaatggg

SEQ ID NO: 138452 - DNA, 408 bp, Zea Mays
aaacttttgatttgaagtgtcgatgcttgtcttgcagcaaacttgccgatgcttgtttcactagtatttgaatttgaacttgtctcatttatataagccaaatattgttctaccaaacagtgctatgtatggacaaatactgcagtttaactctagttttgtttaaactgtggtattgtgtcacgtcattctgtagaccatggtatcgaaatactgtagtacgagaaaaatccatttccaaatagggcctcagttgttgttctttctcccgccacctatgtctattgtcgttcctctcggctgcgagatcttcccacttgttgtcgctttcgtggtgtccctattcgtcttcctcacccgacctcgagatatcttcgaccttgtgtacttcattcaaacggagttccc

SEQ ID NO: 138453 - DNA, 1297 bp, Zea Mays
cgccagtgccgacgacgatggctgaggaaggagtcatgtcggtttttttctggaaggatcccgtatggtatgatcgtgtcactgtaaatgaaacagactcgtgaacgtttgatgcatatcgtacggctgacaaagaaacagatgacgtggaccaacatggagataattttgctcccacggttaatatatagaaatggcttgggtgagagcgatggcggctggcgcctaggatctggcaagacgactgctagcgtgagggcactatgggctggcgcatgcgccggccgattcgccgaaggccgaagcacggccacacgattgtgttggtcgagcagagcctacgccagtgctgacgatgatggctgaggaaggagtcatgtcggtttttttctggaaggaccccgtatggtatgaccgtgtcgctgtaaatgaaacagactcgtgaaacgtttgatgcatatcgtacgactgacggagaaagggatgacgtggaccaacgtggagagaattttgctcccatggttaatatatagaaatttctggaaggatcccgtatggtatgaccggtagctgtaaatgaaacagactcgtgaacgtttgatgcatatcgaacggctgacgaagaaagggatgacatggactaacgcggagagaattttgctcccacggttaatatatagaaataatgaaaagaattgaaagttaaacatgtttgagcagtactgcaagtgaagtggcacaaataaaagctcaatttccaagatatctcatgttggtaactaaatccaaactgtatgtggagaaaaggtaaacaccataatcagctaacaacatagtttcacgcaatttgaatggatttgtacaggctgcgcttaacactcccgattcagggaaggagaagagactgacctgaatttcatagaagacgacagtgagtagcatgagaatggttccgcccacgacgaaccccatctgcgcgtcgagctcatctatcatcccgggccggtaatcaaagctggcgatgtgcgcaaggaggtcgtgcatattgacagccagaaacctgacgacatcagccattaagttgttagctgttaatctttctgagccaagacttcttcgagaaactaatctaaaaacatcagctcatgactccgacacgaaccactgggtggaaattcatcaccgctgtggcaaagtattttctagttgagttgctcgccgcggcgcggtcgaccataccggggcggaggcacggcaaccctgtagagcgcggcgaggtggcggtgtgtgccggcgc

SEQ ID NO: 138454 - DNA, 575 bp, Zea Mays
cgatgattggtggtctctcagtttgaattggtgactcggtaagcatcacagagctatgagagtgctcaaacgagggagagagagggataagctgaccggattggggctggccgcggtgaggttagttttgcggtggcggagaactgatttggggcgaaaccaaaattctagctctcggatgcacggttgctagcgattcttggtggcggggtggatgatgaccttgcagagctggtgggggcttcaatttatagggctcaacgacggtgactggaaattcggatgataatgcacggcggtcggaagaaaggaagggcactggtgcagtggtttcgtgtcctcagtcgtggcgatggttccggtgatcaacggagagcaagggtgagtcacggtgatgcggtagatggacagagacacacggcgcaaggccggaaggcggtggttcaccggcgagctaatctgctccagccgcaaagtagcagagtgcggcggtgagtcaccggagtgacctccagctcaccgacggcgaggatccttaccccgcgacgttatccatccaacacgagtgtgaatcc

SEQ ID NO: 138455 - DNA, 1455 bp, Zea Mays
tttatcggataggtcttgatgtcataagcctaaacacaaaagaagcgcaatctacaagatcgctggtgcaacatcctttctatattaaatattatatacacacacgttaagtacgcggcgtatgccagggcatacctaacataactgctagatataatgcccctgctcatggttgtatcatgcagttccttagttgtctcttatgctttgaaaatcgattcatggtctcatggttagggcatatactttacaactctgagcctcggaacggttttcaaatataagagacaattaggagtctatatagtacaattctaataagtctctagataataaatacagttaaggcacaatatgtataaagagtcgtgtagaaacaagctcttcacgaagagcccgtctcttgattttttttcacttagcctactcgaatcccctcatttaattgggttgtacatgacctaaggtaatccaggttttaagaaatatcgtacggtgatttaaattctactcagactataacttaatagaggtgtgctattagaacttctagttttattaaaacttgagtataaaattctactatgtgtatgactcctatttacatgtacgagttttagcaaagactgtataaaaagatatataggctataggcagtaaccaagaatttaagccaattcagaatttattctttgtttctccacttctttcttttacctcccaaaccttgtgaaagtatcaaactgaagttagatagtttgagccagatactaccatagtggcttcgtagaatggttctaacaagatacataacttctttgacatctcccaatcattaggcgaaggctcatgtgtggatttgtgggtcatttcgccttaaagcttcatatgctcttctatacttcaaagatgtcttaagaatatgataggtcgaatttcaccgggtgaggacaccgaatgtagggtgtttctcaacatcgagtacaacaactgtgtggtcaacttgaggaggaggtgccaccaatgaagatattattggcggagcaggagaaatgtcgagcacgaccgatggaaaggcagtagtgacacttcacaccagggactttccccttagatgtgataaggttgtccttccctctctggtctgcatagatcaatagacgatattattaagtcaataacagtatcaagtgcctgtgctaattattggaagaggagagagggcgatagtgacgacagcgcgagtgagggagagggcgcggcgaggatgcgagggagggggggactagacgcaacgaggtcgcatgggaggagaggggtcgatgacgacgacaatgcgagtggggggagagggtggcagggacgtggggagggggaggcttttgtcaatggagtcgcaaggtgatgatgagggtgagagatgatccaaataatattgtccattatacttgaatg

SEQ ID NO: 138456 - DNA, 347 bp, Zea Mays
tgagccatctgagcttaagcttcgggctgactaggctgttgtgccgtatagagccggggtcaccatgccaacaagctgtggcagaattccgggtggtggtcgagcagatcggcacaagagatctagtccaagaatatctggcctatagggtgttccctacactgagtgaatggaacatgccgaagcttaaagggacaaaggataaggaagaacttgtgcggctaccttataaattcaaatttgagaaacatttcaaaggaccatgccaagaatggttagaaatgatagagacaatgtgcaacaaaattttgggaaattacactaaaaagaagatcagctgatgactg

SEQ ID NO: 138457 - DNA, 399 bp, Zea Mays
gtttgatttgttctgcttcgggtaggggcagtctttgatgaaatgcccagacttgccacaattaaagcagccacttgaggaactgggaagggcagggaaacgagcaccaggggcactcagctgattgttttggtcgggggcaggagtgggacgaatgaacacgggttgtctgaagggatatgtgggcggacgaggagaagaatgatttgaattaaaaggtcagattaccaaccttgtcctcttttcaggtccctaagttgatctttcacccgcatatccttttgacttttcttgtcccacatttttggctttaactgacagtgttgtgctgacagccctgctatatgtgagatccagacacgtagccattttgtgcttgagtctgtcatttagtccccc

SEQ ID NO: 138458 - DNA, 355 bp, Zea Mays
gacaatggcttccaccaaagaaagaggaagtccaaatgtatgcaaaaactgctaggggcttcggtggaagattccacccgaggtatgtccgaagcattcacaacccagagtcaagagaagacaacctagtctcacggataaccaatctagcaacagtagtcaaacactcagcagcattcctcctaaagcaccttccacccatcaactccgcgagggggaagaggaggctgaagctttggtggtagatttaatgcacaaccaaggaagtcgttttgtctcttttgtggcgaagataaaggccacacaataaggaccttctagcacaccatccataagcaaaaggggattgctgctg

SEQ ID NO: 138459 - DNA, 428 bp, Zea Mays
tgtcgcgccgaaagattctgctcccgggccccgcggcgccacctgggagtgagggcgacccggtcattaaaatccccgcacccacctgtcgccttcctcctttctctcctcgcctgctccaccaccacaccgcttgccctccccgatctccgcacgctccggccagcgggacccaacggacagccagccgaacatatcccccctacgctggcgccgtcgcacgcgccgccactaggtgtcacccgtccttgcgccgccgccgcatccttcgactttcgatctgcgagctagcgattctccgctgaggagtggggcccatccctccggagcccaaccccagggcatccgcccgcccccgccgccgtggctcaggccccacgcgtcatccccgcgacggacaacgtagtcacgcaggtggagcgcggtcc

SEQ ID NO: 138460 - DNA, 413 bp, Zea Mays
gggagccatgtgttccgcctgagctcgcgcttgcggtggatacactcataggcaagaccgagggaggaacgacgtctaatttctcgtcgtcgatcgccctgtgtcacgatttcgccgtgtgccgcggacaaacatctccggtcgccgattgctggtgagtaccctatacccgtgttcgccataccattgtccatatgttgcatcaatcggtttagagattagggcgagggaggggagaattgtgtgtcgccggtgagagctcaccgggtggcgatggtggcaccgccgtcgggctggattggagggagagggtgtgatggctgtcgatccgtagatgggcggccaagattaacccgtgcttactgtttcggatggtgcggtctggttcgttcgatccggatcatgcgaatggg

SEQ ID NO: 138461 - DNA, 406 bp, Zea Mays
tatgccaaggttttagttctcgtaacaccagctgttatagttttgatgttttcttatgtccgtgaatctagttttcatccatcccaagcttcgacgtttatattcatggtgcatgtttctgatggcggttttctgttctacatctgttaagtgtgagatactcgattatgtgatgattattgattctttatttgaatccggaactccaaacaaatttcagaaatattagcagcacaggatcaatggttgaatttggctctgcagtgaaatgtattcaagcatcacaatattgtcttacgctatatttggaagttcaatgctcagagcacgccggcctgtgcacaaactaaaaacaccctacactttattatggccaattggccatgaaacacagaattagaaaaac

SEQ ID NO: 138462 - DNA, 386 bp, Zea Mays
gggagacggacgggactccggctgaagacgaaccgcagcggtggccggaggtctggaagaaagcacgacgtcgcaaaggggagcccagaggatggcacgctgcccgggctatctcctccccatcgctcgaacttagtcctcccgcctgacttcaatggagcagcaccccggaaaagaggagaagacgaaggtcgtcgtggggggaacacggccgcaacggaggtttgagtggtggtcgccgccccaggcgaagggaacggcgaggaagtggtcgccggcctcggagtgggcaccggcgcagaggagtcgctctctctcatctccccctctggtcagtcccgtagctgcattttcacaaagcacaaattttgcttttttggataatg

SEQ ID NO: 138463 - DNA, 295 bp, Zea Mays
gctccgttagtagggcatagtggtcaccccgagttaagtaagcgtgagcatgttgcaccgccttaagtcggcaacgacttaagccgattgctccgttagcagggcatagtggtcaccccgagttaagtaagcgtgagcatgtcgcaccgccttaagtggttgccgacttaagccgattgctccgttagcagggcatagtggtcaccccgagttaagtaagcgtgagcatgtcgcaccgccttaagtcgttgccgacttaagctgattgctccgttagcagggcatagtggtcacc

SEQ ID NO: 138464 - DNA, 640 bp, Zea Mays
tcgggttcgggttcggggatgggggcgagtctgtgctcatggatacgggtctggagagttaatcccagtgagaaattcctcattgacatctctaaacctggcccttgagttatttgcacccttctaattgtttttcacttccatctcatatgtgtttggtctaagaccaacactagtgtccaccgtgcttggcatgataatatttctctaagagatacgatctaaaagcgaaaaagaaaagctcatgttttaaaaagaattgtagcatatttgtttgtatctgcatccgctttcgctcaaacctattcgcaccatgtacaccaccttcgcttcgattacctaggaagtcattatttcggatggccatgaagaaccgaccaatcggttagagagtggaaagcattgctaaagttgatcgtagtttatagttgctagtttgaaaggtacctttcatggttaaatgtcattctggatctatcggatggtcggtcgatcaaactggtgttgcattgtctacagttaaaataagcggcttccaaagagtgaatctagcctataatattggggtcatatgaccttaaggaactttagtacctcaatagagaattagtattcatcattgtgcatgggtggacctcat

SEQ ID NO: 138465 - DNA, 468 bp, Zea Mays
cgctaccatgaatgacccttcccataatggcgacaatttgtgccatccttcccccgtcagaattcggcgaaggaccaagtctcccactgcgaaggatcgatgtcgtatggccttatcatgatagcgcctcagggtttgctggtatctagctgactgaattactgtattcaatcattcttcttccaatacatcaatatcttctagtctggtaggttttgcttcagctatgttttcgaagaccagccttggtgccccaaacctgaggtcggcaggtagtactgcctccgaaccatagaccatgaagaagggagtgttaccatgcaaagctcgactaggttgagttcttaggctccaaaccatatatggcaactctttgatccacttcccgctaacttttcattcttgtcgaagactttcttcctgagtgcttccaatatcattccattagccctttctacctgaccgttg

SEQ ID NO: 138466 - DNA, 399 bp, Zea Mays
cacagattcctcgacgttcgactcaggagtccttgactccttggttaaaagctgggcgtaccgtgctatttcctccgcttgcgaccaactccaggctagggcggcaaacgtggccacctgttagctgagaagttgggaggagagagatcgagcgcgcaaatcgccgtagccatcaacccgcttcggttcgggaggccgataaggagtccgggcgcggcgtgatcttctagtgcggcggcgggagcatcttggtgtctcggcgtcagggtttcccggagctcccatcacggggcgaactttgggccgtgcgcgccggcctcgccttcgtctcggtggcggtatgttgcgtctctctggtaacaagtgtgaattccgctgatacttgtgtcggcgggcggg

SEQ ID NO: 138467 - DNA, 339 bp, Zea Mays
agagcataaaaccttggaaacatgggttaactaataaaagtgaatggcaagggtttcaaccacacaatggaacaatggtcatttggagccaagaagattaaaccctagaaagggcacctaagagcactagacttccaagccagagattagtggttaagtcaaccaaattgccaaagcatgatcttagttcttaaacaacttttagtaaccttgtaacctagcaaatgcagggtggaaacattgcaaaaaggccccttgaagaccccaaatttcccccttaaggagaaagcacactagagctctctaattctttctaagttaaattttgaacctaatcta

SEQ ID NO: 138468 - DNA, 522 bp, Zea Mays
tctcaatcgccttcacctgcaggcaggcagacacggaaggggacgggaatggcgacaggcaggcgtcgtccgcggcagtgcaggcgatgacgatgtgggctcggcggcgcgtcgcttttacgcaagaaaccatccatcgccggaataaagaaggcgcacgacggagtgcgtcttcccccctctagtttatctgctgcccaagcgacaggtatcgcatcgctccccgatttgccatggatccgtcacggcaccatctagtttatctaatcctgaccatgatttctctttcacctgctaactgagagatagatacgccggggatctgttgtgcggcaagagcgacctcacgcgatgcgttcatgcatgccaatatgccatcactgcatcacagcaccgcaccccctgccgcctttttccagcgatcttgtgtcgcgttgtagcctttgtaaaaattcagtgattgtagatgcgtggatatgtggactaggagcagctagcggtctcattagcggccgggccggc

SEQ ID NO: 138469 - DNA, 447 bp, Zea Mays
agcgtctttatctgggtcctctaaagccaagggatggatgcagatgccgaagctttctgtcgggtgcacgagctgcactaccagacgaaggccagggcggacagtcttcatgaaaattttggttgctacaattttgcgtatcgcaaggatacgaaggctccagtattcagttaccgcacaaaatggccaaccggctcgaaaggtgaatggttttatatcaaggctgatgagaagaagagggggaaactgatgacgatggtcatgagcctgttgtccttaaacttcagaatgaccagacccctgtgcaacatgcagttagggtcaccctgccagctggccgaagtggaattcagggtagtggctgaacaaatcagcaccagggacttggtgcaggaatacctggccaaccggacgtatccaacgtcgagtgcctgggggatgtcgaag

SEQ ID NO: 138470 - DNA, 360 bp, Zea Mays
caaatatccgaatatccgttaaacccataggcccacgagctacagcccacaaggccacaacccacaagcctagtcctccaggctgccagcgaagccctcgctcggcctccatctctcattctctcctctgtcctctcccacccgaccactcctatcgccaccgcccactccatgctctatctctcctctgtcctctcccagactcccgctgcactccggctccggcactccggctcctaccgcagtcgcacggctgcgcgcaatcgtccgtccctgcggcactcctgcactccgtcactccggtctccggcactccgtcactccggtctccggcactccaagctgcaagctcaaagtcct

SEQ ID NO: 138471 - DNA, 806 bp, Zea Mays
acatgccatttttttaactagttattttattcattacatcaagccattacataatacagcacacagctaccataagctcattacacgcgagtgctatctagggtactcccgaactccttctctaaagtgtccccaaataccttgagaaggtcatcaaggctggctagggacatctcctcggtgtcggacgagttccttaacccggcagggggtagggttggaggggcttcttccttctgctcagtctggcatccttggcttttggtcttcttgcagatttttcttgtgggggcgagtttcttcagtttcttgtcatagtccatctttagggtgcggtaggcctcatgggtattggtttcctcgccttctgctattgtgaggctctcttgaaggggtgccttttcccttgaaagttccctgactttttgctccaggctttccacccgggaggttaggtgggtgtagtggagggtgaggtcatcatattggttatcaagggtgtgaaggtatccagccatgtagacgatggtgggatcatcctcaataggatctcctcctgacagggcctgaagtcttttcctccaggtgggggtattcttgttgctgggtgaaaagtagcgaagggggtttcaaagatcaccttgttgtagttctggcatagttgtcggagggctgttcgggcaacattctggcaagtatctggaaagcggtatccggtaaaagtgacttggaaagaaggatggtttggatagtttcggctttctcctaggtagactgccatagagcatttctccattctgctctcg

SEQ ID NO: 138472 - DNA, 755 bp, Zea Mays
gcgaacgacacaccattcgagggtcaaacataggaggctgaccgccccatactcagcctccatcgttacaacagtcttcgcaacatggagaagaatgagggtcgtccctgttttgcctaaccttcatacatgttatgtctaaatcaactatgagctcccactccaatcgtataggggtgggaaattatgtacgaatggacttcaggggcctggcaaaccagcggatatgggggtacgaatgaacccatcggtactctggcccatcctggaggtgagaatcatcgccacaggtggcactatactaccaactctagtataggtcctcatatagggctaatgacggttgctggtatggaccattgtaccccccacgaactgcacgcaacccattcgatcaagagaagtcaggaaggttgtggctacaggggaacaaacgatgaggaagaagaacatcgatcgagtgaaatacgactgttcttcacgtagacatcatcttcttcacaattgtagccaacccctcccttggcatataaaagggaggggctcggaccctgacttagggatattggaactccatcaaactcaatccaatacaccaaaaccagatacttgggagtttctccctctcttgctcagcttgtaacccctaatacgagcaattagatgttgatagagcaagccaccgaagactggagtagggacattctgcctaaactagtataaactcttgtgtcctactagcacaccatcccggg

SEQ ID NO: 138473 - DNA, 332 bp, Zea Mays
gagaacacagaacatgagttacccgagtgtgtagtagctccagatatctttgccacggtagggcgggagaattacaggttgtggtcaccagactcaggtcacggcgtgcaagctttgaagtaaaccataccagagaccggggaggggtttacatcgactcaaactcaagagctacatccccttttgtgatgaacataggctggactcaagggtaggaaaaccatcgctggaccatgccttaatggtaactgaacatgggcaaccatctctgaacttatataagactcagtggggaaatgttctgggaacgccagcagtgcagggctcataca

SEQ ID NO: 138474 - DNA, 610 bp, Zea Mays
gtttctctctgctagctcagtttgtaagccaggacaagcggtacaagcacctaacaagctatatctagatctcaactcgtcgcgctcatctagcaaggtggcatacttggtctacaaagttgtaatgttcaacatgtgtagagcacactcatcacattgtctttttcagacaccacaactgaagctctagtagactcaagctccataagtgtgctctcgtacatggatctaaactctctcctatcatgagtagcctgtctaagaaacttatcctgactagccaaagtagttttcaactcatctatctcagcagcgagatcatcggtggaaggtagtacctcagatgttgatctatcgccaatgtcctagtcatcgtcgtcccctacaacctcatcaccaaaggccatggtacacaggcctccaatggtgtcggtgatgaagcacaacccattcagcttgtcctcgaccagcctctcaatcttctcatcgctcgaggaagatgcaacgtcatcggagtcatggtcgaggtcgctgagggaggcgagaaaggcattatccttgatctttgccttctagagatacttcttcttgagcacctccttatcaaatc

SEQ ID NO: 138475 - DNA, 364 bp, Zea Mays
aatccaaaccgcaccaaacatcaaaaactgaataattcggtgtttggttcggtgcattgttttggtaatattttgcccacccctactgacacgtcacaatatatatactccgggaggttgagatgctatgtcggcctggccaactttggttagaacacatgacaaagtatgtttgagcttccctatttttttacatcgtagtgatttaacacatgccttgtttgttgatgcataaacaagctcacaccccctgcaaacataaaccacaacaaccaagtaaccacaataggaagcacatataatacaagtccatcgagtgtattgctgcaatcactcatttgcatagttttctaggtgccctatt

SEQ ID NO: 138476 - DNA, 953 bp, Zea Mays
gtaatgtattatgttctccatgtatatattgttgatatttaagtgtaagttgtcaggggtgataattaggggtatccagattatccctccaaaaagcgcactcaggaatggtaaaggcataaccccaaggggaagtagtcgaggtacctcccaacacgaggcctctacccgagagtctcccacctcatgcagaacttcgcctcgcccgaagtcacaaccgctcgatccgtctcgcccgagctgatcctaggcaagtaagaagcgcccgaaaacaagtgggaacactcgcatttaatgtgcataactaccccacgtcgcggcagcaggagcgcaatggcaaacaagacagcagtcaaatccgggcgcaacaatatgattacacccccgctacagtatgtgcacgccgcctgccattccccgatgggacatctaatacgacgggtgaagcagaccggtcctcggacacaatctccgcctcgcccgacgcagagttcagcctcggatgctttctccgccttgcccaagctcggcctcgcccgagcagggctctgaccttgataaacgcggcaaggaattacgacgtcactccacacagggacgctgatgcaccccgtaaacaggcttttacccatactccgacgctgttacaacaactacggtatgggcgactcctcccctgagggctcgggcgtacgaccatcccctcggcctctgcctcggctctcagcaggaaatcagcggacataagtcaacaatgcagtgcaccgttacgtcggcttacaggacaccaggacaaccccttggactacgacgaccccagacttcacagcatatatctcttacaccaaggcgaacaattagtcatttcccactaagtcttagaatattggcacttgccttaatcagttctagggtcttgggaacttcctctctctcactttgcttgtaattcc

SEQ ID NO: 138477 - DNA, 423 bp, Zea Mays
aacaaacaatgtcatagtttacatacacacagcgaagggccactggccacattgcacaaataaatactaatcgcattttgctaccctccctctttatcgcgagccgagggagggcagcgtttttgctcactatcgcaacacaagagcgagggcagcatacacgctacattggctcagccttcgggataaggcccgcctcacaaaaattaaataacatcatcttcaactcctcaccctcaaaaagattccatagatccccctccccaatacacgtcccggacgacgaggacatcaaatctcgttggccaccccaatttacccaaagacgggttcgttctatccccatccgacgacgtctaccacttcacgacatctcaccaacactatgcttcgacaccactcttcgccgatggtgctcatcgg

SEQ ID NO: 138478 - DNA, 281 bp, Zea Mays
tgaagagagagttttttcacatagattttgctttaaagtttcctttgtagtttctccttcggtttccaaggatttctccttggcagactctgaagttccagtttcgatttcagcctggtgctttgtagcttcggctccagaggctgttgtttcaatctgtgctttttgagcttcggcaatttttctcggggtagagcttgaagactttattgtctccagtacatccagaacattaaccatccttttccttttgggggtcaccgctagacctttctgagttt

SEQ ID NO: 138479 - DNA, 368 bp, Zea Mays
tgcagatgttgtccctcaaccaacaatgtcgaggtagcgggataggagacagcggtcctcaccagaaacgttaagcggaccatcatccatctaatagtgagccttaaaatgcctcatcaagcttccctctagaaggaatgggaggcaaagagggatagcaaggatggtgggcttgaggtcgggttgcacttgtcagcctatcacattagactgaccactgggcaggtgaaagctccatgtgcgattttggtaaatgagacaactagtggactaacctctaccctaagcgtcgataataagatagttaaaatccacatccaaggttgagctagattgacaaccataaaaaggatgatgatggacacgaa

SEQ ID NO: 138480 - DNA, 335 bp, Zea Mays
agaggaggaagaagcttcagagaaagatacaactctcaaccaaaatggctattctgcctattctgtggagaggatacagggcacacaacaagaacttgacaagtcacaattcaaaagcagaaggaaatagctgaagtcgaagcaagacaaaatcaaccgaagtaggttcttcatactgctttgtattactctccatacatcccagagtacgtacacaaccaacagccaattcaacaaccttcagcttcagttgcttgagcaaatcattctccggtcagacgggccttacgccaaccacccacatcagttccaacttcgtcatacaatcagcagcc

SEQ ID NO: 138481 - DNA, 373 bp, Zea Mays
cgaagcggcaacctttccagaggctgcaccctttcttttctgccctcgtggcgggtagcgatagtcagggtatacaaatctaatagcatcgaaaactctatttagccttttcttttttggctcccgaaggccgcagatagtgcattatcttcagatttggagtatgctccaagtagctcatcactagtattttcgacacacttcagccagtcatcgtatggttcgataaacttgtccccaaacctgaaggtatatttcaatcgaactaaaccaccttcgctagggttagtgatgctctctgttggcatttcccagctgtctatcaatggtcatatcctgtaggatacatgttcttgaactaaatctcttgtcc

SEQ ID NO: 138482 - DNA, 2803 bp, Zea Mays
agttagaatgcaactaattgaaactataacaaaatgtttatactccatattcaatcctagaattactttgtcgctattggccaattgcagagtttaatgtacttgtactttacctagctatgagaagaaagaaaaagatgccacggtgtgaagtactgaattagattactgataccatgtggtcccaggtgttttaaggaactactgtgtcaattgaggtactagagatatcttgcttagcatactgttaagttgcacatctggaggttgcattggttcttttggagattttgtgctgttgataattgcggttgttaggtgaaagagaatgtatattcaggggcatcgttaggtggttgaagggattgcgggctggattcagctgaaggtagtcagccatagttgccaacatccgggtaataaatatggactggctgggttttgatactatagagcttggatgccatgctaggtactcaacaaataagttgtattgagttgaaaactggtatatatacaagagaaggaaggacatatggacaacattcagacttgatgtgccaaaaagccaaaggcacatcaatctatatgctaatgttgatagtagtatagtactatagttaccgtttatttcccagatatacattgtctaatggcaagtgtatcctgtttgtgaagaacatatacttttttttcaaggattatattcatcctactatgctgcagggttaactcattttcattcaatatatttaacttcctacttttttttctgtactaccaaacagggtgggattctgtggttccataacttgactgagtttccacatggtactttagctcccatctttcctatcttagttgctggtctgcattacctaaatgttcaggtattctcttgccaatttctgttttcaatggctttgtccactattctcctttcttcctttccaatacatttccttttgctttgtaagtctagtctctagtatcaggcgaacacaaagtgtaacaagttaaaaattcatggctgggcgactttccttctggtaggttctcactatgcgatcattaatttgaatttcacatacagtgtttggttaagaatcatgcaagcaagttggtgtacaagcgatgacaacattgagggcctattaaatcttagattaaactagtgcagtaaggctaacttgtgttggatagattatagatttatagattggtgtgaactggtaattttggttcctgataatcatttttgatcttatatagatggaagtgtgttgacgttcaaaagatctttctaaacgtagaaccttgtgggggaggggttggatcaggggtcagcgcagtgatatactgatatgtattaagttttgtcatgttcttatgaaacctttttgtttaaatagaacccgttttttttgctaagtagatcaacaatagtagtttgtaattgtatgaagctattactaggagttatttgtctaaactgatctgagactgacttcatctgttgtctcagatttctttcaggggtcccagatcaaggatcacccaggaatttttggcttgctggctaaggtatgattcagaaaaccagacacaggaatacatatagctagttgccgagctgtcataaattttctaagttatcagtataagtaacccattactcagattttgtaaagaaaaaggatgacggtcaccaatcagtcttttaatctgagtatatatgatgtgtatagtgtacttgggcagttggccttaggagttgtggcccgtatgatgttgttagcttacttggatgatgtgggtacttacaattgatgcaatgaagtgttttgtacatggcactgagcccctgacagcagcaggttgtcatgtggactgtggagtaaattatcggactaatgatgatgaactgctccttttactgtttggtggcaatcagtggagttcagtgaaatacttgtgggggtttaagtggtaaataatgctagcattacaaccaaggttgttaaaatcgtaatcttgaatcggatcggaactccaatagtaggatcgcaaatcataggatcatcactgctagaatcacaaaatccaagggttcttcaacaccggattctctgtatgcggatgaaaatatttggtgaaaagttggttccaaaggagttgaagaaggggatgaactctctcaccattctggtggcttgggaactttggaaacaccgtaacagatgtgtcttcgatgggatgatgccagatttggtggtggctttacaggacattgctagcgatggagtgctctggtgttcggctggggccaaggggccccagcagctggttgtaagggtctcgaacagaggctagtgttgttgcgttgtcacctcctgttctcagggtggctggtcggtgcgttagaacatttttagtttgtcttggtgtatacagattcctttccttgtgtactttctcctttcttaatgaaatgatacgcagttctcctgcgtgttaaaaaaactgtttactttgtatgtgttctattttcattacttttatgtaaaaatctgtcttttttctgaaaatacttgtttcttgtttgcagtactatagaatatacctcaatgtcctgactatccctttgtttcttgtcgcacatgtggttcctcaggtcagttgtgtttttgctttgctttattgcatatgtgattcctcagatcaggtgcttgcattacgtttttatgtggttacgaacaaatgccatgtggtcaattaccatttccagattatgttctcaagt

SEQ ID NO: 138483 - DNA, 416 bp, Zea Mays
gtgcaccttatcttttattttactagaacacagtgcaacttctatatattcttatttgtaacttggatatgttgcaaaaataataaatattactagatccttgcaaagagaaggagaaataataaaatctagaaaagaataatacaatacaagggagctttgaaatgaaatattatttatatacaaaccttctatggattgaaaagaccgtttaatctgttactggatttcattatatttgattcagctcctcagtgcaggtatgtactgttttcagtatcatgtttattttatgttctgaagtagaaatgcctttgtagggccataaatactttgtcttttactgctttcaggtttctggatttgtttttaccaaggttcaagaaaacctaggcgctagtcacacgttatcctac

SEQ ID NO: 138484 - DNA, 577 bp, Zea Mays
gcttctgagtatccaaagttgtatcagcttccgggagggcgccactaccaacgccccagcaggagcagcgtcggaagaatcctcagccagcaaatcaagcatagcgcttatctctgcatcactagggttcaggggcacctcaaaatggacctgtcgttcgtcatcaggaatctccccaagcgaggcaaccaaagcactaacttcttcagcagagggtcgcactctaaggcccaaactaccatcagtaataggtggattcgacacaaaaagggtgaaggctttgggaggaggcaggttccaggccgagtatgccacaggagcaccaacatttgacactttacccctaaggatcatctccagtcgactcaccaagtctgcagggggatttcttctgttagtaacccgagttgagtcggctagccctcgatacagataagctgggtaggccctgtctttcaaaggctgaatattcttgaaaacaaagttagtaaccatagcttcagcagttagacccctctctttcagcagtccaacttcagctagcaacacacctgcctcagctacctcctgatctgtg

SEQ ID NO: 138485 - DNA, 437 bp, Zea Mays
agaatatgaaagtggagcactgacattcaaaaccttgcctctcagcatcgaatcaacccgactcaacatgtcctcctcagatattcgcttattggtaattcaagtggggtcatcaacaccggtgtacaagcagggtagactctatccttcaaaggctgaatattcttgaaaacaaagtcgacaacaacaacttcagcagtcaagcctctatccttcaatacacatatctctgcaagcaacatcctggactcagcaagctctgaatctgtggggatctctatccagctaggcgttggaacgtcgggctatctccctgatcgagtaggaagagacttgttatgattttccatagtaaaccactcgaagtgccatcccttaatgctgtctttcaaaggaatgtcgagatactcagccttcctgcctcggcgaagttccaa

SEQ ID NO: 138486 - DNA, 731 bp, Zea Mays
atgcgctacaccaggaaaatgggggtggttcatattttggtggcagtgaccaatgtgaatcatatttcggagtccgcagaaatagtagttgatgaagggttatatgagattttcttcaaagttgataaggttctcatagaggggaagtggatggataacgataacatgagtaatcgagacaaagatgatttctctgagaaacatgaaaatgattcttttcagttgaaggagctagctaaagatactgtcatggaagataactctttgcatggtgattctaagaagcctgaagatgggacttgtgccatggggatggtgtctcagctagagaatcagattgttaatgggtcagtggcaagaacgggtattgaaccagaaggtctatctctaggcatgccgacagacttgatggcacttacttctccttttgttgatcagtatgttgtcactcacacacatggtgctcttgatcagtcaccaggctgtggtagcggtgatgggaagtccaattcctggctcgagcagtatcctagttgctcttcccttgcgggcatgtcacagggtgaggttgggtggaccttgtcagggcctgccaccggtcatttgttcctgaatgagactgcatctcttgctggagcggcagccggtatggttgttgaagatgtctatgctcagccaaaggttgtgatcgaattggatgatggtcatattaaatctgttggtaacttact

SEQ ID NO: 138487 - DNA, 423 bp, Zea Mays
caagggaataaaaatggtgtctcgcatagtcaagggaataaaaatcacaagaaacgtaaaatagatcacaaattcaacacaattacctgagaagttgttgtgataggtgacaaattatggaggcgcgaaaagagggagaacagatagaaactgggggtgtggctacatttatagccagtgaggacactgccgatttccatcttacatcaatggagaaagttggaaaggaaagagatccatacattcaaggaaacagagcagaggaaaatatagggagggacccacctcggctaaaattacgaaggtaaatatggcattcgcactacagacatcaggcaagcaataacgtgtggagggaaactcgtctacacaggcgtgattagtggttttatttccaacctggccgctcggatctacaaaggc

SEQ ID NO: 138488 - DNA, 414 bp, Zea Mays
tagacgatttggaatatatggatattgtatgtctatccatctattatgtcacatgaggcacgattatggcaagggtataataaggacagacttcatccagaactgtggatcctggttcctctggcgatccaacttgatcttgagttgatgcttatcctcctttgatgtggttggtcttctttggcctttattcttggagttgtcatccgagttaaggacatatggctaaggatatatagttagggtagccagggtacacgaggtaggtaggtttgaacaaagttttacattgcttttaggacaaatggactaagtagcctgtgaggtaggttatgttgtttgttcacggacgagttggtccaaggtattaatttagggtaagatatgtttatagaattagggcctaattttttt

SEQ ID NO: 138489 - DNA, 522 bp, Zea Mays
cgtgtccttcttgcatcagtagacatctaatgccaatgccaaaagcatcacaatacacatcaaatggctttgcgatatctagttgagctagcactggtgttgtagtcaatagcttcttcagcttctcaaaagctttgtcacactcaggtgaccaaacaaacttgacatgatttttgagcagttcggtgataggcttggctattctagtgaaatctggaataaagcgaccataatagcccaccattccaagaaaacttctgacctgatgtaaagtagtgggaggtttccaatcgaggatatccttgaccttgctcgggtcgacagcaacaccctcagtagacaagacatggcctagaaactgaactttatccaaccaaaactcacatttgctaaatttagcatataattggtgttctctaagccgcatcagaacaatacgtaggtggtcagcatgttcttccttggtcttgaagtatatcaagatattatctatgaagacaaccataaacttgtcaagctccg

SEQ ID NO: 138490 - DNA, 299 bp, Zea Mays
acccacattttgctgatatggctatctaattggcaagattgtcttcacatcagcactaatgtgaacaagcatttagtcccaaacaagttggggtctgcgcaagtatcatgtatatgagcctgtggagagtactaccaaactggactggtgcagccattgttggggtacgcaataagagaaactgaacagccactggtcaggggcatcaaagaacagaacagaaagcttcagaatcaccttctccagttctcctttgtgctggctctcacccccaattctgatatcagatctgattctac

SEQ ID NO: 138491 - DNA, 454 bp, Zea Mays
agatcctaatcctacggtcacgattttatgaaatgagatccaacaggatccgtctgttaacagatcagtggtccagatcggatttccgagctgccatctaccgcatctatctttggcccacgatcgagatcccacgatcaatatcaccccacctttcatcacggatccgatggctcacgagcttcttctccccccagccgacccacaggcggggcgcgcttgtgaacacagtggtggctcgtcggacttcacaaatccgtgccccacgatcacaactcaaatcctaagcactctatacgcacagggaattcatgtgaatccaacagttcccatcttaccttcaatcgtgcagtcatgccccccggcgtcgacgtccagcggtctaagtccggcgagatctactccctgcgacaccggtcgtccctggcctccaaaaccgatgtccacgcatcca

SEQ ID NO: 138492 - DNA, 511 bp, Zea Mays
ctctgcgatacgtcgcgttctggaatctccatgttggaaagcatgaacaagtgccgatcccagactgcgatcagttgaagcggcttgggcgatatcctctgcccttagaatcctctccacagcccacgtcaccctgtgctgaagactgcctgtcgggttctccttcaagatgtcgaatataggtgcaactccattagacctatggagcaccaagacgccctctgcagcctccactccatcttcaagcagggtgcaaatagcagccagagcagcctcgacgaccttcttgttagaatggttcaagcaatggatcagtcgttccacagctctcccttctaggatgcagaagttgtccctgatcgaacagactccagaatgaacacgacagagctgaatgtttgtcggtttcctcccaaacagtgcgagcttagacctctgttcagcatcaaacttcggcgtactggtcagatacttagattccaacgagagattcatcaatgccttcgcagag

SEQ ID NO: 138493 - DNA, 534 bp, Zea Mays
gtggcttttgtgcatcgataacagtgtcttccaaagggcagcgcccttgtgctagccgggcgcaaccaaccagccccctctctgctgggcgtggcccccttggtcacgatggggccctttccttcttctagctccttactagatttagcacataatggccctgcactagccaccagtggccctgtctccccacccgcatgccttgcctcgcccacaacaccaacgccctagctctccatagtgttcctcctcccaccaccaagggccctgccattgccctggccgttggtgccacttcctccctggctctgcctagttccactgcccttgttgtgctatttgttttttccagtgctgtgattacctccctgtcgatcaagaccctggtgtctacctcacctcctagtggctctattggagcccctcccatggctctctcctcgcacaccacccttcaccaccccctctcttccaatgattgggtggttgactctagagcctccttccacactactcctactactatgtcattat

SEQ ID NO: 138494 - DNA, 836 bp, Zea Mays
ggaatgttctcacaactctgaactacacaatcactagcacaatgttacggcccgtggccaccagcggtgagacaaccgtgacgtgagcaatcgttgccgccgtcaaccgagacaacagcgaggtaggtgggatttctgttcgtattatttcctttctgccagtttcatcatacacacaagagttatacccgtgtcccaacgtcggcccatatcaatgttcccattacaacagcccatacggcccacatccagccttacacttcctattccacatccgccagcccctgaacatcttccagccttacccttcttgaccagccgacgatcgactatctccaatggaaccagttcatacttgctgaggtccacagaaaccggaagagtagaaaacactggcgaatagttagcagtaaaaggcttgagttgggaaatatgaaaaaccggatgcacctgggctgataaagggagatccaaacgataagcaacagacccaatacgttccagcactttgtatgggccaaaaaatttgaacgcgagcttgggacagggtcggttcaccaccgaatgctgagcatatggttgcaacttgagcaaaaccaaatcccccacctggaactgccgctcagaccgcaagcgatccgctttgagtttcatcctgttctgagcaacaaccaactggtctttcaacatctcagtaaagtgagcacgctcagccaacacctgggccactgaatgatcagtatcagatggaataagaggggcagcagcaaatggtggatcatagccgtacaaggccttgaatggagaacaatccagtgaagtatggtatgatgtat

SEQ ID NO: 138495 - DNA, 483 bp, Zea Mays
ctagctctagaacaaaacaccacctaatttaattaaagagtggacagatcagcaagatcagccccgtgatcgtttccttttccctccctcctctctactccttttgacacacatgcacattttgcagtagttattatagctttatctgtaaagcttatctcccgtttatccactgatagcaagcaatctgcattattgtgaccactagtcggcatgacgggtcccatgcatgcatgaaatggcagatgctgaacattcccttggctggaggagagagagacaacaccccctgctgaagttgaacccccacctggtctcagctccatgatctgctcacttttcttagtttccacgtctcaggagcagcgctgctaatcttcaaataatcaccaacaccggcatcatcggacttttgttgtgcgctatcaaagtataacatttaattattgtactagagtctgccccacaatttgggagagaaag

SEQ ID NO: 138496 - DNA, 469 bp, Zea Mays
aacggagtcaagtcatcgtggaactagtgctgcgggcagcctcaccgtggaccgatcgactggagtcatccctggtcaatctcacgcacgcaccgagactttggaaggtcagtgaagctctctacgccattaatttgaactcgaccacgagattaggatcgtcagagcaactgtccgtcaccgctgacagtagagtggttccaaagtctctgcgggtaaattgagtgcacggccgagtttgccgtagcctggagagttggttggtaccatcgtcgtcgtctgcgatgtgtgatcatggcggatccggtgccggttcaccggagaactgtgcggcggtgtcggggccgaggcgttgtgaaagaaggaaagccgaggggcttaggtgcatctgtcagtgacccgagaattcaatcggagtgcggggtcctttttacaaaacctcaggcatgggctcctcagcgtgggccgg

SEQ ID NO: 138497 - DNA, 467 bp, Zea Mays
ccctcctgtaatcggacttagacactttcactcaaggaggatgtagggtattatgcctaggtggcctagacctccctaaaacccttgtccccctcgcagcgctcgcctagttgttcgctatgttcacctcctggcaactgggatggaccccttgagttgtggtaggcagaagacaacacaccaagatcccttggcaaatctttacataaggtgacaaatatacggttgaagaaaataaattcacatactatgttcttcttacaacaataaaactcaagcaaacacctaggttaaaggacaacttcatcttcgcaattacatgaaagagggttcacaatccttcattggtcacttttgttttatcctcacttgtcagtgatcgagggttgggggaggttacacctctaacggttgtaaaaaaggagctaccttgggtcaaacttgttaggaccatcaatccattgtgt

SEQ ID NO: 138498 - DNA, 533 bp, Zea Mays
cgtggtcgaggtcgtggccgagggatgggtgcccacttggtccatgggtttgcggcatttttctctatgtgccggaacattgctgctgatgtccatgaggtggcaaggcgtcagcgggagactgacgacaaccttcgtcgtcaagcttccactatgggtattcccttcgccccccgctcgcctgacgtgcctctccatcctcctcccccagagatcaatgagtggcactagcaggcctacggggtgccatttatgacagcagacgacgaagaagaagaagcttattttgatgatcgtgagctgtttgtcccgcctccctatcacggggatccgggtcaatcatcctctcaccctccgccccaggatccttctggcagtgctcctcccctggatcagtctggggaagaacactttgcctctcacctggcgcaccacttctttgctcctcatcagcctcctcctaactggtgatctttggattggcggctctctctctttttggtttttgttgccaaaaagggggagaaggtttc

SEQ ID NO: 138499 - DNA, 735 bp, Zea Mays
acgggctgggggtgaaccgaggggcgttccaggtggcgggtgatagggtggagcttaccagggcaacagacacggcggggagtccaacggtgaccgtagaacgggcggcggacgttggtgagcggtggcggaactgcctgggtgcgcacgcagggcgagagtgctcgactgagggtgcaaatgagcagggggaagtgggcgagcagggcgcgggctctaaagaggcgagggcgtgcaggggtggctagggattgcgcgggcgtgggcgcatccatggcgggggcgtggtcgggaggttagggacggggtctgacgggtggggtccgcggggcagagagaggatgagtgcgtgcgcgaggggatcagtgccgataggctggccccacagagcaacgagagggagagaagggtgcacgggctggcgccgacatgcggggtccgcctgtcaagggctgagggtgcgtgggcacgggcacgcgcggggctgggcctgctggtccgacttgggctgaaatggatttttccattttctagggaatttctaatgcttttctatttattttctctagggttttcaattcaaattcaaatcaagtttcaaattcaaaacaaatcaaacatgtgcgacaattcaaagaatatttggagctcaacatgaagcaacatttcatgactcatattgttttgacaaaataaaataattaatccctcactaattaagctaattctaccaaa

SEQ ID NO: 138500 - DNA, 357 bp, Zea Mays
tgcttgtcgtgatgaacttgtaatgaagttggatctttgtaatgattgtcaccaaggtgtgggtatcccctaccacttggtgtagttattaataaagtcagttatttagttgggcaatccctttatttccattttcctctttatctgagaagctgtgttgggagtcagtgaagatgatcaattgttcagtgttataaagatttccatatatcttttctcatgctgaaagactgcagagttagatctgatgtgtgtcctttctacagatgtctgagaaaaggcgtcgaggtgcaaggtgtgctcagcaggagcaacaggcaccccaggaggaggcacctcaacagcagttgccaccgc

SEQ ID NO: 138501 - DNA, 320 bp, Zea Mays
tgctcctgttgtgcgcgtgacaagagggcatggcaccagggcccacatgtgtattggccctgttgcggtcattcgcttctccgtcacgctaagttgcttgccaggagttggttggctggtccgtctcacatagttgcttgacaggacttggtcggtcggtccgccttgagttatgggctcactttgggtatcccgtttctgggtacccgtcacattgtattaccatgacttatttccccttctccaaccctacggatgcccctttacttttaggcttggttttaattaaatgtatctagaaattgtgtgttgttttattt

SEQ ID NO: 138502 - DNA, 554 bp, Zea Mays
cgggtggtggcgtgctcggcttgggggaaactctagtgaaggggcacttgccaatggttctggggcttgtggggatgaatggccgacgacacaggtggtcttataggcgcaggcgtgggtggaaaccagtagtggctgaccatgggcacgggggcgcgtgggctccgttggacgcgcactggtgtgtcgtcctgggtcgagcacgtggtgattgctcgtgtggtcatattcgaacgcctattggtccctaatctagacgaatttgggcaagataattttgtaggatctcctctcttggcttccctctatctgttttgtgtggagacagaagtgtttcttggcctgggtgtggagttgtctcgtcccaaagattgatctgtcacaagggccccaaccgagaagaaactggtgttttgtcttgtcaaaaggattggtcccgaggccatcttctaacatgttatgagtgaggtaatttaacaccactttgtcaattggagtccacggttttgaggtctacaagataatgaacattggaagcttagttagaggggctg

SEQ ID NO: 138503 - DNA, 638 bp, Zea Mays
attcaaccctacatgatcatttcccctcacttaatttctagatttgagctctaaatcaccctgcccgcggtgacagcgggatcaatggaccgcatgaagtgttcccgacgatctaaggagttctagtctaatcggtcgggtcgagaagcatcaggggcatgtaagggtgctgaaacaagagagcagaggtcatgatcggacccggagcgcactggccacggtgagacccttcttacggcggcgaaaaaccgatttgggggaagtgagcaattcaggggctctggtgagtaattggaggcacgagtgggtgtgtcgggtgcataattacatagcggagccgagggtgtgctcaatttataggaccctagagcggtggcccgtgaatttgagatggcgcggtggcggccggagagaagggggtgcactagcgcaagcaattggtggctttcaccgtggcgagctcaccatcgacgatcgggtgggctaaggtgactcactacgacgtggttaaagcaccaaagcatgtggcacaaggtcgcgaggtggctaactccggtgagtcgatccgaagcggccgtgactcaggcgggtacgacgacaggagtgaacagtggccgaagttcatccacggtgcgata

SEQ ID NO: 138504 - DNA, 559 bp, Zea Mays
gttccaagggcctgtttctgaagctcgtcctccggtggccatgttcactggtgcacagctggggttcacctcaccgccggggttcgccgtcgcctctccgtcgccctggacctcgacgcctgccgcttcatcgtggcccacgccaccagctactccaccgtccgggctggttggttgggacgcgaccgccctggctaccttccagactcccactctgactccaccgctaggtcccgagtggatcgcggacaccggtgttacctaccacaccactccagaccctggtatactcacctctgttcgccctcctccttcctctctcccttcgtccatcatggtggcgaatggctcgtgtctccctgtcacatctgtgggtgccgccggccctcccggctcttttcgcatgcccaatgttcttgtcgctccttctttggtccacaatcttctttctattcgtcggtttactactgataattcttgttctgttgagtttgactcttctggtcttactgtgaaggactcggcaactcggcgccccctcctccgatgtgacagcacc

SEQ ID NO: 138505 - DNA, 332 bp, Zea Mays
ctatggtgtaacctattggtaggtgagaagtgggggagaggaacagacctacacggttcaaacgtgacacacgacacacaaatatgatgctttaaatgaatagagactactacaatcctcatgcattgtgatgacacatcaattatatttgatggtatagtgcaacgtctattcgatacgcgaggacctagtggcaagctagtgtgatggaccatccccacaaaaaataaatttaaaattaaagaggacacgccccacaaaagatacttttaaaattaaagcggacatatgacccacagactagatattaaactacagatactataatttat

SEQ ID NO: 138506 - DNA, 654 bp, Zea Mays
ccgaacctccacgtgtgtcgtccggacccccgcaggagggtctcggacctccccgtgcgccatctaggccccaaacaagagggcccaaagcttcaagccagtctacactcttggtccccgctctccactcaggtagaggtccgaagccgccacgtggcccatgggcacatggcacaagccttcggctggaagcaagctcgccgctcgcattgcggctgaggcgtgtcctactctgcacagggcatggacatgctttcgtcaggccgagcaggtgtgaatgaccgctttgcttactgatgtgggcagttgtgtgtcagcgccacgcgtaagccttgtacagtgcaccacgtgataccaaggaagacagttgtgtctcaatgccgcgcgcgtggacagcgccatcatgagcggtcgtttgctcgggcagagcgcgcacgtccagcacattaactcccgcacacatcagtgcgcccggtccctacatatgtcagcatatcaggtacactccacgactggcacaagccggcaaacggggcggaagacacgcctggttagaagttgcacggcggccgaggaagaacatctctgctgctcaatgtggtatatatttaatactagttcgttgcagcccagctgtcagggctgctcagcacc

SEQ ID NO: 138507 - DNA, 373 bp, Zea Mays
gcccagatggtatcccgatagaggtgtggaaatgtcttgggatattgctatcgtttggctaaccaagttgttcaaccatatttttcgatcaaacaagatgcccaatgagtggaggaggagtacattagtaccaatcttcaagaacaagggagatattcaaagttgtgccaactatcgagggattaagctcatgagccacactatgaaagtctaagaggaatgacacataccaccatgaaccaatttggattcatgcctggaagatcaaccatggaagcaattttcttaataaggcaggtcatggatcgatataaggaggagaagaaggacttgcacatggtttttattgacttggaaaaggcctatgataaaa

SEQ ID NO: 138508 - DNA, 396 bp, Zea Mays
cgcccaggcgcgcgaccgtggcgtaccggtggcggtggtgggggtcacccccggcatgcacgccggaacactagagcccaaaacccgtgctggtggatctgctgctcctctcccgactccggtggtaagaatgacactgtagatctgaactagtagtgcggtggtgccgtacagtcatatcgttcgacatgcggttaatacagttactctaattgcccggtctctgaattctgaacgtccttctagactttccacgtgctctggccccttggtctcgatcgtatcatacggtttgccacgtgcttgcgtcacagcggtatactactacgctctttccgtactcgaaacaaaagcatcgctcatcaagtggacagcacggggtggcgagttggcgac

SEQ ID NO: 138509 - DNA, 460 bp, Zea Mays
gcgtgatgggggcagatgcatctgtaaccccctcggccgccgccgatgatgggcttggcgccgacactgatggggtcgcagtagccgttggcagatcgccggtaacactcccagcagatgtatgctaatgggcaccaaacccataggtgggcatggcgaccgacgaggaaggagcatccatggtagctgctgacagatcgccggcgacgttcccggcaggcgtatgccggtgggaaccggacccccggcaggcatggcggccggtggggagggaacacctacggacgccgaggaagaggaggccctggcaggcaaaggtcggatcatgacctgtcgacataaaggctacgatcgagcgaacatcgggagggcctatgcttacttgggactgtgaaccttctagtggccatggaagcggggcacacgttactgttgttgctgtcgcttcccctgcggcgat

SEQ ID NO: 138510 - DNA, 467 bp, Zea Mays
gccccgagctaatgtgtgcgtgggttgtctctacctcctcgcccacaccgatgttgtccggatttgccattgcctttgccccgagctcagtggggaaggatttgccattgcctttgccccgagctcagtgaggaagagagtgacgttacaacctttgtggcctcacctctcgcgcgccctcacaccaaccccaacccgtgtttgctccgatccgccattcctatgtcctcgccctgacacgcactcaccttagccacatagccttgcgtcaccataccctcgcctccccggatcccacccacacaccatcatcgtcctgtgcgcatcacaacgccctctgttgagcattgctgtcaacgggtgagttcttgagtcattggtcttctgtttagcaaccaacctatatgtcatgacatcatggttttatgggatacatggttttatggaatacgaatggtttctaaatt

SEQ ID NO: 138511 - DNA, 911 bp, Zea Mays
cattgttcccagggtgtatctgatattaattcccaccggagttcctgtctaaagtttttgctcccacaagattcggtagcataatcttccagagctggtatctaggttttttgcccagtgatttcttttgatttagttaattattctgcacggctctctcatgatgtattgttttcttattacggtgccttctcacgtgtatgtgtgctcttgcgtcgttaaatcttgcagcagtttcctatgtggttatccagtaggaaacgccttacgggcttcatttcaatatatgctctttaaaaaaaaattccgagtccaggactacaggtacgtgtttcgatctccagatctaatcttaaccattttatcaaaatagcttctgtaactgatatcatttacttaccattgctatctgaattcttgtgcaggagagatacgtgtactgaggtggatctagatcactcccaacgatcgtagcttggttgggacgtggctacagcgttgcttactctcattcttgtccttatgcaggcgtgctttgcacaattcttaaacggcaggttcctagcctagacggccgcctgcccagggctttggtccggcacttgcctgagtggtggggtgggcacggggaggattgatggaacacctaaaatggcgagtgcttgtattgaatgagcaggcttgagctcactgtagcacattatgaaacctttgcatgtctgccctgcatctgccattcagttcagtcaactctttctacactgattacacagtagatcaagaatctgaagacattgcaattacttcgggggggggggggggggggggggggtgtttggttaggtttgcgtcgttctgctgtgcaggcaggcatgggcagctgtaataaatctgcacaagtacagcaagct

SEQ ID NO: 138512 - DNA, 280 bp, Zea Mays
caccatttatgcatccaactgttataccattggaaatccgcgcaactgcactatatccattggaattctgtgcttttgtcagtaattggtttgatggatttgaatttatgatccccaagtataatggcagatgcttaaatagttattggaaaatgggaaatctttctgctagacatgtatagggatgttttttgcgctcacaaccagttgattggaagcacattaagtcattagctctgctagtttatggaatatggaatgcttcatttttgtatgtgtc

SEQ ID NO: 138513 - DNA, 925 bp, Zea Mays
attcccccatcctagattacgccgcggacacatctaacgcaacaaagaaatccaaatcctctttcgaggactcttcacccatctttgcgaaggggcacaaccatccttcgctacctgacgaccatgaatccaattcagagccctcgtcgcttaaccccattggactccgagaagacaacgatgtaacacatttagtagccccaacaatttctttccccttgtccaagaggccaaaatttgcttgcataggcccaatcaccggaacctgtgcagcatccgactttaagtattaacaaatatcaaaagtattgtcacaccaagcctactcctatttttacacctgctcagaggcagacgactgtgaggtccccgccgctccaaggtcagtaccgccgactgctcttccgtatctgcctccgcaccagcatcctacgtagacattgagctctccaagccagcgaggtcctcaatcacttcgtccctcatcacctacgaaaacaacatatcaaagcttcagaagtcagaaaaaagcatcctcccccaacaaaagaacaatcattcacctgcgtcagcgcctgaccaaccctctcttggacaactccacgaccgtggggaccacacatccggtcgtacaacaccctggacgaatgcttcagcacgtcgtcttcgacctggaacactccctggtcgaagtcctcattacttttgtcaaaggcttcaaagtgcctacagccctcacgggacaaggcattcgctgtcccttcgcaggtaacgagggaggcgtaagacatgagacccgtcgcgatagatgggagggactccaactcctcttgcaaccagccgaggaagagggtccccacctcggcccacgacttctcgaaggggcctgtctccgcgcccagatcgtgataggcgtcaataaaaa

SEQ ID NO: 138514 - DNA, 365 bp, Zea Mays
agctgacactgcttatgatcaaacttgaagattttatgatcatgagtatgacatcccagagatatccatgtacctcacattggctcggaatttatgataaccacctagattcgtgcacgcctgttacactatatatgacactatttacgctcaaacttaaggattttacaatcaagaatttgacgtcctagagatatctacatctctcatgttggctcgacaatcacgggaaccacctggattcgcacacgtttgttatgcgaggtcatacgtgacatcgctttgaccatcaaaacaacatttacgctatatacgacactttatactcaaacttcaggattttacgatcacgaatacgatgtccc

SEQ ID NO: 138515 - DNA, 572 bp, Zea Mays
tataactgattgttggtggatatctgattggtccatgttttggatgaaaaacttgcatcttttcattactgatctgcttaactgaacttcactgacctgaacttaactgaatattacttgcatcttttcattactgatcttttcattactttcatattagttaagccatctttcaatattactatctgtttggtccatgttttgccatgtttatttattgacttaactaaatttaacatgtttgtcatgcttgtcctgtttaatttaatggattatgcaactagcataatctgtctattatattaagtagctagttgttcctcttttcttctccccctcttaccttcatctattcttgtttcctcttcccttacaacaatcttacctttgttcatcctttcttctcccctctgtagcttcttgtcttgtttaatttaatggattaatgcattatattatgcagctacctccataactatcttctttttatactatgcaggtagttaatgcattatattatgctgctacctccataactctcttcttttattctgatcatttttcagtgatga

SEQ ID NO: 138516 - DNA, 455 bp, Zea Mays
cttataaactgaagctaccggattcttctcatgtgcatccggtgttccatgtgtcccagttgaaaccttctgtcaaacaacatgtgttggtgagtgcatctcttccctcagtgcctgacgctcttcgtgttcctgtccaagtgctgcagcgtcgagtggtttcccgcggaggtgcttctatcgatcaggttttgatcaggtggtcggggtgtgatgctgctatggattcttgggaagatgaatgtgatgtccgtcgtcgctttccatgtgcggtcgcttgggggcaagcgtcctttcaagacagggggaatgtcagcagacaacatgtgagcagacatgttgacgaggtgcagcagccggatggagttctgatggaagatgtaaaggctgcggaaatgggccaagacgatgtcgaagctggaattatcagactgggccgtcgtgttcgcaagccc

SEQ ID NO: 138517 - DNA, 474 bp, Zea Mays
ccagggtgagcaggtatgcagtgaggtacacgactatggggtcgtcctcaagcagctgctgcccttccaatgcacgcatcctggccatccaaacgggacggtttctctgaaagggcagaaagaatcttagcggggtgtcggccacttcttcttcataaatttgatacagggccctcaatgccttgcgagcgacgacttagcaagtgtctttgaatctgtgtcccgcagcagtgacactccattccacatggtgcggactggatccaatgtatacagtcacgacacactttctgtgccatgctcgacgaattcacgaccatcatactctagttggctcctgattccgaggtggactgtgcatgctctcagtagcttggggaaaccatcttcattctcgcaaaagctggtttggcagcggacctccatctgacttctaagagaaggaaagggggaaagcatttttgaaatgaaggg

SEQ ID NO: 138518 - DNA, 645 bp, Zea Mays
tgcttgtgcctttctatgagcacgggttgggcttcccctgcatccctttgtctggggttggggctgctattcttctacgagatggagattcagaacctccatcccaactatgtcttgcaagtggcgtgcttttatcagactgtgcgagacatccgtagggattgacccccactagaagttgtggcactacttcttcagtggtagggttgtctgcaacaaccaactgtatgtcggttcggtcaacttccaactccgatctggctggaaggcgggttacttcaagatcatgttccccacctccatgaggtatgagggcaaatggttctacatcaagaatctagccggcagcgccctgtgctttattagtcgggagccgatgtcgacagacgattggaatcatggggcagagccaggtctgaagggtgaggtggaacctattttggtggtgctcaagacgctgaaggagtatgatcttaccaggacaagattgatgtgcatctttatgcaccgccaacttcagcctttgatggctcgctaaaggccaatgcacaagtattccggcatcaatgatctcgaccgccactcctccgagtcgctcacgttgtccgagattgaagcaagagtcaaggtcgtcatcgcgttatc

SEQ ID NO: 138519 - DNA, 505 bp, Zea Mays
atcaaattaatataggactctagacctgaggacccaaatatattacctccacggagaggacctatccctcaaccaatgaatctacggttccgtgaagagtcttttgcgacaccgacccacttccccatgcattcgccatcacagaccggagggccccatgcattcgccatcacagaccggagggcctgccttttcggttgactgcataggatgcaaatcaatcacaagaaatatctatccaaatactctaggaacaggataaaaagtggaagggagagatcggctagtaaacataaggaagaaaaaaaacctgatcttcaccgagaacacatccagttgcacagggaccagtgcggcatgatttgtggtcagactggcgcactgaaatggaatcgatgcaacgcttcaaatataggcgtgaactggcgacgcacatggaaaatgtgaagatggtggcgctaaatcatagggataactaactggtgtgattataggagtcactgtt

SEQ ID NO: 138520 - DNA, 334 bp, Zea Mays
cttgggaagtgtgcacgtgctacaatatgtcctcaagcagccatggtacatgaactagtcgtagcaggagttgatcgttgcatccttttcatcttctatgctgctttcctagagacaacttcctgagaatcaccaccattgctagaataaccgctgcagagcaaggcttcttggctacagccaggaccgactgctaataaactgaagctttgatgatgaacatttggtctgtttccttcaccactcgtcgtcttgcgcctaaaacctcgtgaatctgtagaatctgatgcggacaatgacggctcacttctcgcatctgacaagctgccagcat

SEQ ID NO: 138521 - DNA, 594 bp, Zea Mays
ctttgagcgtcaataattctttgcagaagaactaactcaagcttcacatttatcaaaattccttgctgcactatccctagattcaacttctccatttcttgacatatagtggtgttaggtgctcttactgtaagacaatgacaaaatatcttccgacttaaagcatctgccaccacattggcttttcctgggtgataatggatttccaagtcataatgtttgattagctcaagccatcttctctgcctcatgtttagttccgactgggtaaagatatatttcaaacttttatgatccgtgtacaaatggcaggtatttcccagcagataatgacgccaaatcttgagggcatgaacgactgtagttagttccaagtcatgagttgggtagtgttcttcatgccggcgtagctgccttgaagcatatgctataactcgcccttcttgcatcaagacacatccgagtccattgtctgacgcgtcacaatacacatcaaaaggcttttcaatatccggttgggccaacaccggggcagtggtcaacaacactttcagctgctcaaaggctttgttgcattttgaggaccaatcaaac

SEQ ID NO: 138522 - DNA, 299 bp, Zea Mays
gggagaggcagtactcacggtgtgctatgtcctgaatagggtgccacctcgcaaccgtgaggccacgccctatgaaggatttaaaggaaggaagccaaatctttcgcatcttcggacttggggctgccttgcaaaggtgaatgtcctgttgccgaagaagagaaagctaggccctaagaccgtagaccgtgtcttcttgggctatgcacataacagtgcagcttatagatttctagtggtccattccgagacgagcgaagtcgttgtaaatgtaataatggagtctcgggatgtgacat

SEQ ID NO: 138523 - DNA, 394 bp, Zea Mays
cgcccactggtttcggtgtcgctgtcggtctgcgccgtctcccctccctgtcgtcgacgtcagttcgctgcctgtctcgagaacgcggggggggaaggggaatggaatccaccactccagcaggcattggaagcttcctctctcctccggcgacgcgtccggactcttgagtctgagggggcccaagcaacggatatatctcaaatctgtgccgatggatgaagggaaaactccaaattattgctcgggtttgggagatgtcctgctatgctgtgctggcgcacctctggaaccacaggccgcctgcaatgcaaccgtgccttgcaaggcttctggccgggctggctacaacgagacatgctgtctctagagctgcagggttaaaggcgcacga

SEQ ID NO: 138524 - DNA, 857 bp, Zea Mays
cgcgttacggtcttgcgtcgaggcccctaggtatttgaataaccagtaaagagcccatggcactattcatctgtcttacttacattgacaaagaggccactgtatttctattccttcacaattcaagtccctgacgacggcgcgttcagccgctggccatcccttgctgggacttgcttcaaacaacgatgaccaccaaaacagagtatttgatcatcatccccgacccaagacgatcctagtccatgtactaattgagctaatctaacccggaatctcccccgtccacaatgtcggcaaacacagcggatcggcagagctgttcccatcgaccaaacgcggtagcgttcagttgatcgagtttacaagcaacaggggaccctaaggatgctagacacaaactagagaaatatgaatcaacctgtggatggctggccacgacacgaggtccaacggcggcgcggatgaccgaattgggggaaaacaggaattcacgagctacgatggatggcaggacgtgggtggggttgcaatgggttagtgacaaaggggcggagcaagggaagctctcaaattatagaagccgaccgcggttgctccgaatttgaacaagatttggatcacggcggtgaagggatattgttactaaagtgagttcaccatggcgcgtactgggaaaagtcttatggcaatcaccagttactctccatgattcgcgacgacgtggtaatacggcctatggcgtggtgcgactgagatcgccggcgtccccgtcgacaccggtcgtgaggtcacgtcgcctgccaatcgagtgcggctgataagctcacatccgggaccaaatccacatcccttcc

SEQ ID NO: 138525 - DNA, 725 bp, Zea Mays
cttaactttgaatatccagattacgacatgcttgatgaagggtcgggagagcaaagagaaaaagggttgtgagtattttgaaaaggcagaccatccggtccgtcaaagaagattagagggctgttaggaagaagaaagttctagcgttgtcgaaggattcggctcccaaaaaatgaaagcttatcaggatggctggtgcagagatgaaggtacaagatgtaccagaaaagactacaggctcttctccgtcttcctttgtcgatgtttcagaaatactaaaggtaatgactgaacccttctcgttttcattgctaagtcccctgggatcagatctgactagcctactgcagtcgaaaggagaagggatttgaacaaggctcaggaggaaaggagactgttgcggctaccggggaaaatgtcggggtcagaagaaatagcaaatgatggacgtaatgcaagtcgtccaaaagatcacgccctcaacttcggcggaaaaaattggtgtgcatgctaatgccgaagatactaccgaagccgaagctaatgaagccacacctgaagttgagaaccttgggaccacaatgtcagagattgacagacttatatctaatgtggctctcgagaaagacatagccgaagtatccactgataaggcttcggaggacacagagttggacctatggcacctgggcggccaagaactgtccgatgaagttatttctgaa

SEQ ID NO: 138526 - DNA, 357 bp, Zea Mays
gttagatgtcgtcctagggatgaattggctgcacagaaactaagcaactgtcagttgtgacaagaggatagtaaagttagtgtccccattcgggaaagaagcagtaactaaactgttcatgcctgatttagaaggagcctgtcactatatgtctgtagatggtaaggaggccaacttgcttgaggctatcagagttgtgtcaaaggtccctgatgtgtttcctgagaatttaccaagcatgccacccgagcgtaaagttgagtttgccatagagcttgaacctagaactgcccctatttccaagagagcctatagagtgtctagaccagaattggtggaactcaagaagcaaatcga

SEQ ID NO: 138527 - DNA, 533 bp, Zea Mays
caacgaagaaagatgtatgtctggtgtaacacaacgtttagattgctgtcgtgtaaccgtgtgaaggatgctcctgatggtcatgtgactaaagggtgttgtagtggcaaggcgagaagtaagtctaatatttttaaaacgattagttgatagcacctatcggcttcgtcatgatttttgtcgtatggtgaatcgatgccttgtcgtcgtagtctcggggaattttcggaaatgttctgatgccttactgatggggttgaatgtacttgtgatgtattacaatagttgtgtgtcgtgcatgtatccaaaaatggtaaaatgtggtgtatgttggtaattagaaaatagtcacgtcattagccaactcgtgttcagcaggagtcgattgcgttaagtgattgctatatacatattgtgtctcggagtgctataataatgagttagcagacttgttagatggttttgggttaagttcgtggtcacgatgaattgcttgttgtagtctaaatgcgtgtggttatggtcacgggtaa

SEQ ID NO: 138528 - DNA, 903 bp, Zea Mays
atcaccgccgagccgtctccgatctccactaatcaatgccaccggctccgcctcgtacacctccctcctcccctgatcaaaaccgcccggcgccaccgccgtccactccgcttttctcttcccaccgcctgcttcggcagtcgtcactcccccgtcccagcagtaccggctgcttattcacctgtccgacactccgacctgcgccacgccaccctgccgtttgaggtttgaccttgagcccctgcctgctccgtgctcccactagtcccacaccccctttcccttttccccgccattaacctgacgcttcaccaggcgcagctgcggccgcagtcgagaggacggcggcgaatccctcccgcatcgggctcggccctgggccgcactcggaagaaggaaaaaaaaaacccattccctcgaatcccttccctgcttctgctcgcctgaaaaaagctctcgttttgcaggcccgtgcccgccattacgcgcccccgattcaatgccgtcttgagctcgtctcgtcgcacataacagtatcacgtcctccccgccccgctgcttgctccctctcgtgctcctcccacgcacggcacgcagcacgctctcatcctcctcctcacgcctcccgccccaccctcacaggccggaaagctccaaccgagaggcctctgtttgtatgtaggacacccagagcgcgtcaagaaaatatacgagagggaaggttgggagcagttcccctgtgtcccgtcccctcatgtgcctatacctgcctgccgattctatcttggccgaccactcccttgtcgtcccaattcaattctgattgccggcgcgcgagtggtgtggtgtgtcgtcttcgtgcgcgtgggaatgcaggttttggaggcaccagcccactaatcg

SEQ ID NO: 138529 - DNA, 438 bp, Zea Mays
tgagcgtgcatatggtggtcaagattgagtcagagccctcttaagtccaagtatttcaagactctagggtcactcactcgttatcgtgtgagttatctctaaaagtcctctccagctgaggtcgacccttccttttattgctcaaggaaggagcctcttacaaggaccttccccgtgggggagtatgtagaaaggtaaaagggtcttctgttggtgagggtcctgcaatgtgctggtactatgtttcatacttgcctacgaactttggttgaggtgcttctgcattgcttacatggatacaatgctccgtacccttaaaggtacttgaccttgactggtagcatagtgtcatctgtaatggtgacataagctcctcggatgggcctacgccatggaagtttcattcgtaccatccaattccgttgaccctcatacccc

SEQ ID NO: 138530 - DNA, 722 bp, Zea Mays
gagacattagttaaatctgtgttatccgcacaacctatttatcacctgacggtcttcccggctcaaaaatggctactgaaaaaaattgataagataagaaggagcttcctctggaaaggaagtaatcctgagtcatgcaatgggggtcactgcttgatcaattggtctactacttgcctgccaaagtgcaaagggggattgggtatcctggacctggatcgttttgcgagggctttaagacttagatggttgtggttgcgttggaaagccaaagataaagcatgggtggatttgcagctgccatgtgataaaacagatgaagatcttttctacgcttccacttgtgtgacagtgggcaatgggaaaactgcagtattctggaaatctagttggatccatggtcaagcaccaaaaaacattgcaccaagcctattcgaaaaagcaaaaaggaagaacatttcgactttccaggccctgagaaataatcgttggatccagctatgctctccctttggtgatgcagaagaaatcaaagaattggtttccctttggcaggctatcaatagtacacacgggctgaatgatctagaagactccatttcttggagatggacggaagatggtgagtatagcgctagcagcgcatataagatccaatttgcaacaaattattgcacaatgaatatcaaccccatttggaaagcaaaagctgaacctaaatg

SEQ ID NO: 138531 - DNA, 787 bp, Zea Mays
cggattcgtctgtcaactggcctccaaccacgagtcttgttgtagatctcacacgccatctttttgattttgagacttccgagctccaccaattttcttgccttctttttttgacgaatagcccaagtattaagccaaaaacaacaagagaaaatcacattagtcggatcatcaattcggttagtcccaaagcaacaattattgcgacatctccagatcgcccaaatgacagcaccatagccaaacagaaccagatttttttcagtcttattaaaactgttaatccaagtaccaaacaaatcatccacattatcaggaatagaatttagaccaagagcagagtagacaattctccacgtaaatctggctaccggacattgaaaaaacaaatggtctatggattctgaaaatccacaaaagatacattccagattacccttccaatttttcttgaacaaattatctttagttaaaatcttcttgtgcataacaagccacataaaaactttgatcttatgtggaagtctagtattccacaagaaactaggagccaaaggaatctgagagcacttgatttctttgtaaaaagaattaacagaataacctttgctacccaaaagccaaacagatttatcttcttcctcagaaataatagtattattacattgtgtaataagattgttatactcaacttccaaggcaccataaatcctccttctgaaattcacatctctaaaatcagaagaaaaagcttttttcactgtgatatctttatcataagcaatat

SEQ ID NO: 138532 - DNA, 303 bp, Zea Mays
gtagaggtccagacttcacggaggatgaacaaggcacagtatggttcaagaatagtatatgtgttatgagattgatagcctccgtgagatcatactaaaggaagcccatgactcagactgttatattcatcctggtagcaccaagatatatcaagatctgaagtagaagtactggtggtatgggctaaaaagagatgtagttgcacatgtgactgtatgtgatgtatgtcaaagagtcaaagttgaacatcagaggctagctgaaccactacacccgttaaagctacccgaatggaagtggga

SEQ ID NO: 138533 - DNA, 567 bp, Zea Mays
gttacaggtgtaccggaggcgcatgctgcggctgggtcaacgcactgcgcaatcaagggtaatgaccttatcctcgtattcctcatcttatttgctctgtgtggctatgtcgaattggggagggatcaccagagcaggtggattgggatcgcctgggagggcgccactgtcgaagcaagcgccgccgtggtcagctcggtagaggaagaagagccgataaccgttggatgggaaaaggacgtctaggattagatctggtatgtgttggtcctcgaccgtcgatcttacagcgaacgactgcgattggaaccagccattccagcgctgacgtgggtcggtagccattgatctcgcgatccacggctcgggtgtgaagacaggttttaatctaatcccgaccctcaatactcgatcggatggccgaagtcttttcataccccttcgcgctggcacttttgttaaagagcccctctggatgtaggaaatgaacccgcagtcctgcgctgtggcgctctgagtcattgtatatttcgcgtttaagcccttgcctttctcagatttagtgcg

SEQ ID NO: 138534 - DNA, 758 bp, Zea Mays
gggggataagataaggggggaaagattggttccaaaccttgggttgaaatttttgggatgctacaaacctaccccacttaaaggaatctcgccctcaagatttagactggatttgggaaaagataagggtattccctcctcaaggagtcctcactctcccaagtagcttcctcttctccttctctactccactgaactttatagagtttcacttctgagttgcgggtcttccggactactgagtcaagaatctttactggcttctcacaatactgaagatctttctgaatctgtattgcctcttctttgatgtgactttctggtacttgcaggcatttgcggagctgggacacgtgaaacacattgtggatatcagacatggattctggtaattcaagaaggtacgctgcgggtcccactctgccaatgatgggataggggccgacgaatcgcggtgctagcttccctttcacttggaatcttttgacaccacgcatcggggagaccttgaggtagacaaagtctccttcctcaaatctgagttctctccgcctgttgtccgcataactcttctgccgactctgagcttcaagtaatcttctgcggatcagggcaactttctcctcagcctctttgacaaaggcaggtccttccagtgccttttcccctacgttggaccacatgagaggggtctggcattttcgtccatacaacgcttcgaacggtgacatcttgatgctggcctaatggctgttatt

SEQ ID NO: 138535 - DNA, 366 bp, Zea Mays
catgcattcctttaccttatctttttctagcctaccacacctttttgcaagcaacttatgactgcttgtctcatgatctaccaccatcactcctcgatggcatctatgctcacacatagggcgtgcttggttttagagctaacctaacatgtgctcgttgggcaaggcgacccgaacctcacttgtgcaggagagcaaaatttgtccgcctcttttagcatggaaagtttgaaaaaatcaaggtgtaatttgtcgttgcctagaaactaaacctccatttcacccgaacttcttattgggcaaggcaacatggtatctagcaaggaaaccaagctcacccagagtgtctatgttaacgacatcccc

SEQ ID NO: 138536 - DNA, 662 bp, Zea Mays
ggagctgctggccaaggcttcacctcaaatagcgtgcgccggggtcttcgccactaatccctacctccatctccgcaatacccgtgggtttcggctgttgaattgggagctggtcgcagtgcgcttacgtcgtcgtcgtgcgccgtagcagagagggagagagagggaattggagagcccagcgcccccaccaacgcctcgccttgtggaatcaccatcgagttcgcctggagaccaccggcaacgaagacaattggaaggctgagcggaattccacgttgtcctcgcccgccgccgtacaattccaccgcagccgggcactgcatcaatcaggcaccgattcatggtatggatcacacccatcacgttcgccttcctctcaacgtcgtataggatcgttcggattgagtcttggtggtgaatttgggctaacagcgtcggcacggctgcaaatcgaggcctccgccatgggcagggatctgtgctcgatggcggatgcaattggttgaggaattagattcagggagtcatcgatttggcaagggttgagctaattggagaatggtgctcgggatggtcggattcgcagtcccgacgatctcgccgccgcgcggtggctttgctctggtgctctgctgctcggggtagacgatggattagag

SEQ ID NO: 138537 - DNA, 545 bp, Zea Mays
cggacggacagcgagagtgggtgtggaaaacggcaggcccggcggaggaaaaggggcagcaaagcaaaagcagagcgcgcgccaccagcggatggatgatgtggtgagcgtgatggaccgacagtcagtggagctaatcccatcccatccaatttatgaccctctcatccagcaaatttatgaccgtttacccgacgccatcaaatcaaatcaaaccaaaatccttgtgattctcgccaatgcctccacaactcacgatagctacagcccggccctggtagattagattagctcagcccagtccttagcagcttgcagtacattctctgggggggtgtccgttcaggctcagattctacactgatgctcttctcctttaatcaccgcagtgtagctgaaaatgctgttgtaatggtagacacaaagagcatgcatgcatgcatcgccgttcaactcggtgagcgcagacaaaaaatatgcacaagcacagggttaacaattgggtgtaagctagaggtagggtgtggcggtgtgcttagggtctg

SEQ ID NO: 138538 - DNA, 709 bp, Zea Mays
tgtggtccctagtcttcccggacttgaccaacacgaaaaaatggcagaagagggaagtgcaggggcccacacctacaaacatctcgcagaggtggacgaagattgctgcctagaggatggaatggggtgtgaggtgttgaagctgaagcccgaactcctccagcagtatcaggaagaagggcgaaatcggcagtgccaacccgcaagaaatgtatgaggtgaacaacacaaacttcccggcggtgagatcgccaaggggagcagcgccggcacggattcttccgaggagccctgacgcgctccacccaagcaagccacgcaccaggttgagcgcttcctcagccggaaagcgatcaggatgaccgagcgatgccatggcgtgtgcggcagcgcgggcgtggaatagaggagcacgaaggcaaaggggcgcaaccgattgggagagaatgcaaaaaggtaactgctgcacacggggtgaatcctttttcagggaaacctgaatccttttttaggaaaactctctcgcgcgcccctgaatcaccgcaggaaatcccgttcgatgggcacctaggacccaggcaccccagtctatgacacgggggcccgggtccacaagtcatacagtttgtgtgccggatttcgggtgcggaaagagcgaaccgccgcacgcgatagcgcgcctccttggggccgctgcagaagacaaaat

SEQ ID NO: 138539 - DNA, 757 bp, Zea Mays
gttggggaattcggtgcttgtgttacataccggtgatgaagaaaggtggtgtgaagtatggagaacttgaaagctcgctcttcaccttaactttgttggcatgtcctaatttagaagttagcatatccattgtcatggttgtcattgtgtttgcggactcatgtcaagatacttaggcagagcatggtgctaacagtacgagtaaagtcgactgtggttgatgggattttttggggtagggcaacattactgtccccctccctctcatttattggtgtatgctgttgaaaggatggccatagaaagcaggcctcaacagtgcacctatgctaatgcttagatgagtcatgagacacacgaggtaaaagggtcaaagagcattgcaccatggagcctgcttaacaatggcctattggtgggctcacagacaaacctgtcgcgtcctgatgttcaatgccctaggttcattgtctccacaacttggacgacgtgggtcaatgtttggggcaagtgggatagtatcttgaacattggcgtggtaaagccatcaatgttcacagactctagatcccaactaggcggagaactttgattagggtgtcacgcatgcatgtctccatgtaggtgataatggttggggaggcacgctcagtggatgaaggattgtagcggtggcatgatatcttgttgtccatgtctgtgtgagatcttggttcttagtgccaacatcacctatcagtgattagctagcgttgag

SEQ ID NO: 138540 - DNA, 495 bp, Zea Mays
ccctcctcctccatggactccaccaccgcctccttcggggccgcgccattcagccttctgccgcccgtcgcgcccaccagcatccttggctctgctcctatggctgcaaccctttcggttcatgtgccttccactgcttccattgttcctagcccctatggctccactatcgctctggctgccggcacccacttccttctggctccaccaagttctgctaggatcgctgagcccgtcctccttcacgacgaccagcttgtctagggcatttttgtatcctttgatcgagccatgaaccctgttcttcgtgtctgcgttgagatccttccctaggcgggtcgtcacgtgcctggaccgattgtcttccccccccccccgccgtggttgcctccctagcaatcgagacctcgttgtctccctctcctcttagtggctctatcggagcgcctcctctagccctctccacgcacaccgtgccttcgccaccccctcccg

SEQ ID NO: 138541 - DNA, 488 bp, Zea Mays
ggtggggttgtcaagaattttttcagtgcgtccagggcttcctgcgcttctaaagtccattgaaacttgtccaccttcttgagtagcttgtaaaacggtaaacctttttctcccagcctggatataaatctgctcagagccgccatacacccggtaagtcattgaaccttcttttgtgatcgtggagcttccattttcatgatagcttcaatcttttccggattagcttcaattcctcggtggcttacaataaatccgagtagcttccctactggtaccccaaaaacacatttttcgggattaagcttccaccgataccgccgtagactgttgaaaaccagctgcaagtcttcgatgaagttttccgagttctccattttgattaccacatcgtctacgtaggcttccacacgcttgccccagtgatcggctaagcatgtttggatggctctctgataagtcgctccagcgttcttgaggccgaacgg

SEQ ID NO: 138542 - DNA, 1028 bp, Zea Mays
acatgcatgcgaactcacgattgatccacattttggttaaatatttgatgtcttaaatacttagtaaaaatttgcatgcttaaatattggaaaatatttttacacttacgattaagcattaatattggtatttattttttctgctttatttcctgaagtaaatagtagaaaaatataaaaatacatgtgaatgctatgttgcgtatttttatatcgctataaatatttgagttgtgttgagcttttggactcacgtcgaacgattaaattgtataatgggtactcagacacgccgatcaggctgcgttggtaatcggctgagttatgacattagttgaatattgactgcgccctggcaacacgacgcaatatctgtgcagttcgaacttggctgcgtcatgtgattgctatgttgcggtctccattaatcggattgctctcgttgagtcagaccgtcatcgctgagtcgcatattttttgcatgccctgtaggcactgtctgtctgacgcgagccaaaattgcgtctgttgcgcacattgcgtggatttatcgtgtaccccaattaccgagccataattgtgcctgttgcgcttattacgaaggcttgctatactgtcgtagccctgatggccgcacacacgttgacgccagatacgctagagcttgtactagcttggattgtggtgagttgttcaaggtcctgaagtcacattatgtgcaaccttcgtaaacaattttgttttcactttatattttgtttgattgtgttgtgtggcatcgtatatttatatatatcgccaagtggccataacaactatattaaatctgggaaattaaatcgaaatacaatggaacacagataagttaaatctctgctctctcctcgtgcataaagttttacccaaagtaacctgaagaaattcaatattaatgcatgaaagcctttttggcacagaaaacatcacaaattgggattttattagtaagcaataagactttgtcagatgaatagatgctagaatctcag

SEQ ID NO: 138543 - DNA, 447 bp, Zea Mays
ctagccgtccgatctccgagcaaaggtccagattagaatagcgagcgagggcgcaggctcttgacaggtgggctcgggtgggttgaggcactgacacacagggcccatgggtcagcagtatgaagaggacacggggcgcgttggccactggattgtagatcgatggctctggttccataaaccacgcgaaccgttatccatgacttcaggccgtcagatcaagaccgggcggttcggattcggcacgaggggtttagtctcctctggtcagctaggggtggcgctctcagcggacacagcagcgcagtcgccggaggcgaggcagaccggggcttctaggacactaggggttggtctgggtagccaaagaggttggggaggactcggcaagcactatggcaaggtctgggtgccgagaacaggactaagacgggcagacggtggagg

SEQ ID NO: 138544 - DNA, 302 bp, Zea Mays
ctaaatttagttacttactatccaactccatttgctctccacattgttaactcaatagtaactccctaaacgtatttgtcgtcaatttattcacacacgcgtgctcatttccgcctttttcccacacaatgtggtagccaggtccgtcacactctttttccacttttacacacagtgaggcaactaggtcttacgcgtgacacaagctttacctctaccgtcggaccactaatgcctcatagattgtgcctccagaccaccgcttcttcacatgtcgtgtcgaccgaccttttctcctccgt

SEQ ID NO: 138545 - DNA, 420 bp, Zea Mays
ttgagggccgaaaatggatgtaacagtggtaggaagtgagcatatttagaaaaggtgtccaccaccacaagaatagtatcaacattacgagaacgaggcaaaccttcgacaaagtccaggctgaccacttgccaaacctattccgggacaggaagaggttgtagcagccccgggtatttactccggtcaggcttggcttgctgacacaccttgcactgagcaacataatctctgactgccagtttcataccagtccatgcaaatgtttgtttgactcggcggtatgtgacaggaaagcccgaatgcccacccaaaggactatcatgcagggctgcgataattgtcttatggagaccaggatctgctcccacccatactcttcctttgtatcgaataataccagattgcagcgtataaggt

SEQ ID NO: 138546 - DNA, 520 bp, Zea Mays
ggtaagagtagtctgccttttttgttctgccccactcgtgttctgccttcctccggttctgcctcctctctaaccgtactactctgacaaccatgaaccgctccctcctccacccacgcacgcacccaagccatcgttctgctcacgatttcgaggcagccgacgagtgacgctcgcgatttcgcaccatctgcccctgcctgcaacggattgagatccccgaagtgtaggccgctcacaccgtcttcctcgctaagttctacgcccgggcgagcctgtgctcgccgccgcgctcgacggtcttccgctccctactctgcgtggctccatcggccagctccctccaccgctgccgcatcaccgcacctctgttggcgagcgccaccacctcctcatccttctccatggaggtaccaacgcgcctcccctttcctcccaaatttctcctccctcctcccacgggccaacttcctggccaccccttcgacaccgtcgcctgtccaccccttgcgcacgtcca

SEQ ID NO: 138547 - DNA, 565 bp, Zea Mays
ctttccatccaccatggttgtgaactttagcattactcttgactactttaacccactgttttaatggcgcctcctaggcgtctaggcagcggtccaacgctaaggcgccttgctcgctctaagtgaaggaggtttggaggaattgtactatgttttatgagagttggcagcagcacatttataggggtgaaaaaggaggctaaaggaaacctatcaggactatggaaacctgcagatatgcatgaatcaatcctttgactatggaaacctgcagatctgcaggatccaattctctcccctatgatctctcttttctaatacactccaattctaggttaacttagagtgatagaatatttattaaagttaaaataaaaggtaggacctagtgaatattcatgtacctaaattggtagattctaatctcaattaatgtaatcctatccctcgaataactttatctaaattagtaatttactaagatagacatagttaggtagttaatctactgagatagtcagtagttggagaacagtagacccttaaacatagtgatctaccctag

SEQ ID NO: 138548 - DNA, 1665 bp, Zea Mays
ggaatgcagcgaggtggcttcaagtgtacaagatgaggcagggactgggaaactggatgcagtttggcagagctgttagggccaaatttggagtggaagaatatcccaaggccatgagacatcttctgaacctgtatcagaagaatggagttgaagagtacactcaagagtttgaagaagcaaagtatgccactgctgttcacaacccggggatggatgagatttttttgtcaatcagtttgtgaagggactgaagacagaattacaagggggtgtaatgtgtcatctgccacagtctgtggatagatcagttattttagctcacatgcagcaggagatattagagaagaataggttgaagatgcagaggagtattactgctaataaggctttgggcagtaatctgaagactgacaataagggaggatttattctgggtgatctaacaaaggagaggcaactcaaggagcttagaagagctaatggactttgtttcacttgtggtgaaaagtttgagccaggtcaccaagggaagtgtcccaagagggtggtgcctcagttgcatgccttaactgtggaagacatgggcatggtgttgactgatcctgtgttggaacatctggagtccaaagacaaggaggttgaagaattgtataaactgtctctaaatgctatcaatggaatggaaagtgatggatgtatgagggtgcaaggttttatgcataaccagatgttggtggttctgatagactctggcagttctatgagttttgtcagtcaaaacttagtggataaaataggcttgcctgtgcaaaagtgtgcagcagtggaggtgaaggtggctaatggagaaaagatgaggagtgacaagaaggtggttgatctggagtggtggtctgggggtcatacctatactactactctgagggtattggagttggatgtgtatgacctgattttgggttttgattggctgaaaaagcatagtcctatgcaatgtgattggctgcagaatgtgctcacatttgtggacaagggagtgactgttcagctaagaggaaatgcgggtcagcagaaggaggttccacaaatttccattctacaagtgaataaatggttgaaaggcaatgaggtttgggctttggttatgctggagcaagtggtggataagaaagaagcattagtccctgagcatttacaaaggttgctggtggagtttgaggatatttttgctgtccctactggtttgcctccttccagagattatgatcatcatatttctttggtaccaggacatatacatgtgaactcaaggccctataggtgctcaccattgcacaaaacagagatagagaagcaggtctctgaactattaacttctggtctaattatgcctagcatgagtccctttgcatctccagtcttgttggttcaaaaaaaagatggaagttggagattttgtgtggactacagaaaactcaatgacatgaccatcaagaacacatttcctatgcccctagtagatgaaatactggatgagttagcagggactcagtattttactagtctggatatgacagcgggttaccatcaaataagaatgaaggaggaggatgagtatatgacagcctttaagacacatcagggacattatcagttcagggt

SEQ ID NO: 138549 - DNA, 754 bp, Zea Mays
gtggcgacgagcttggatctggacaagacaccactatggaatctcaaagaggcaacaagttggcattctagagtgatagcgacgattttggatctcaatggggcatcagggggggttgaaagaggcaacaagcctagagatcgaagcaacgacgatgagctcggatctcgataaggcagtaggatgggaccttccaagattagagctcaaagcaatggtgttgaggtgggataacaaaggagcaacatgtctagtgccaaaagaggcagcaacaattcagggtcttggtgaggcgacatgtcgagctcttaaaacatcgaggatgagttgggatttggacaaggatgacaaggggaatctcaacgaggtatcaggcttagagtcgattttgggtttggaggaggacgttgaatggaatctcgatgaggtaccgggcttagagcattgttcagatttagatgaggatgttgagtgggatctcgatgaggtaccaggcttagagacaagttcggatttggacgatgatgcagagtggaatctcgatgaggtactaggcgtagagtcgagttcagatttagagggtgatgaatggaatctcaatgaggtacgaggcttagagtcgagttcgagtttggatgaggatgttgagttgaatctcactgaggtaccaggcttagagccaagttcagatttagacgaggatgttgagtcgaatctcgacaaagtaccaggcttagagtctgaagaaatagag

SEQ ID NO: 138550 - DNA, 373 bp, Zea Mays
gcacgatgttcttggttgaattgggggaaatcccaaattggagctctctggtggaggatctgaggtacgggtgggtgggctagatgcctgaatacatagcgaagccgatggcgcactcaatttataagctccgggggcagtggcatgtgaattgaagctggcgcggtggcgatcggagaagaagaggagtactggtgcaaacgctcagtgtctttcacgatggtagatgcaccagcgatcaccggatatcgatttcctgagtcataacgacgtggttaaaggcatgagacgtggcacagttgcggtgaacgacgcggactccggtgatggccgtaaggccacatcggcggcgcaagtgatcggaaacaacgag

SEQ ID NO: 138551 - DNA, 272 bp, Zea Mays
ctccccctggtgctggagcatctctgtaagttctatccataggagcaagtctgaggggtcgaatttgttttccttttgtaactaggtaacacacacgtgtacgccaacccggtgaggtctgtccccttaaacccggcttgttggtctgcacccatgcatggtgagttataaagaaaagctaccccctcagttgtgcccctgtgatagttccatcttgctgctccatggtcctaccttgcagttttttagataataccttttatctaacccac

SEQ ID NO: 138552 - DNA, 809 bp, Zea Mays
cgtggacgcgcccatgaccgcgtgtttatcggccatgcccccacactcccgagccttttctggagcccgcccacactcaatcgtcctcccccactgagttgcgcccccagccgagcaccctcgctctctctctctctcgctctacacgcgcacctaggaagctctgccaccatttgttgtggtctcgtgcccgttctgcggtcgctgtcgagtcctcgcctagtcagttgtcacagtgagcttaacctcgtcacccgtgacccgggatacccctcggttcgctccctccccctctatttctctcggtccacgctcactggtcctctctctgcccagccacagctccgtcgtcatcgacctgtgtcctcgctgtggccctgaaccgttcgtgagtccctgagccttctcttaaggtaactgatctaaccccgcccctaatttcccataggctgcccttagttgtgtgcaattgctcgccggagtaaacctcggtcagccgaggactccccctccgctgtttggtcgcctcagccccattcctgcaaccccgatcccgccataggattcgctgagtcctccccaacctctctggctactcagaccaaaccctagctccctaggagccccggtttgcctcgctgtcgatgattgcgccgccgagtccgcgtatggcaccgcctctggccggctggagaaggcccctggcgcctatgctaaccgcccagttctgatctgacgtctcggatttgcggataacggttcgcgcggttcgtggaaccaaagccgtcgatctgcgatccagtggctag

SEQ ID NO: 138553 - DNA, 438 bp, Zea Mays
gaaaaattacaccggctctggtaccatgttgaacagtgaaaccctaaccctagtagggttgggaaatatatttatactaggaatagttgggcctaggcccattacagagggacccggtaggggtaaaccctaatacacctaatatagttctaaacagaggacatggtcacatgggcgctagggagggaggagactgagctggggttggaagacgagggcatcgatcacactgtgttgtcttatatagttatattattcttaatgcctgttgtttagaatgactgacccactagaatgacttgacttatctctcagtagttctcattaatgactgaggttaaaagatgaaatgactgagtttgttcacttcatttcttgtaatacctatttttagaatgactgactcactaaatgcctcctatctcaattattctcaag

SEQ ID NO: 138554 - DNA, 482 bp, Zea Mays
cctgagaaggataatcgtaatgccgaagctgaaaatattattgccaaagttggaagtgatgacgaagaggatgatggtataatgagtccaagcaagcctagccatatcaagtttggcaaatccaccgtgaaacctgaggacttagttttgatgaaaaaacttggttattttggaaaaaacgatgataacttgataaggttcgcgggtgaagagatagttctagagccgaaggatgatgaggtggtggtttttaaaagcttcttctgtgccaggcttcgattcctgttgtacgagatgattgatgaagtattaaaaagatttgagatatatcttcatcaggtgacaccaaacgctatagtcaggctcagtgtctacatatgggctctccgaagccagggaaggagtgccaatgctaaaggattctgcaaagtccatgaactccattaccagaccaaggcaagagcaaatggtctgtacaaaag

SEQ ID NO: 138555 - DNA, 947 bp, Zea Mays
cctcttcctcgcggcgtgctgttgcaacagaatccgcgcgcaatccgcggcactagctccacccacctcgcggcccccttataacatcagggcaaaacctctccgctcccctctcaaccacccgcgacctcgagccgttccctgaagccctccaatttcgccgtgccttactcctatttgaccagtagcgccgccaagacaaattgagaggggagtgtagctcatcgccattcatctcgagccgcaatcgtttaacatccttgtcgggaccggagggcggtcaccagtgtgagccaagcgtgtgcaatcgaccgacgtggcggccccttctcatcggagtgtggcgggtgcgaagatccgcacttcgccgcgacctgccccaacccggcgtccaattgcggtaagtttcctacctgtacgttccgcatcaacccgtactccgttaaaaccgagccacaatagaataggagcgtcgtgtggccgaatcgcccaagtccggcgatcctccgccatgaatggtggcggcgccgccgcttcctcgatcgggctttggtaaaggaatcctgaccgcccgatctaaaatgaacgctagcgattaagacccagagtaccgcttcgcgcgtgagaccgaacccgttcgattgtgatcgatcggtctcgggtggagcacgattatttagaatatggaccgtagatctttgatctaatagtcagcgatgcgtacatgtttgcatagtgagcagatctgatcctacgcgtcgagctctaattggacggccgagacggctccataccccttcgaccgagccaaaactgcaaaatagcccctcggtttcattaaaatcaacccgccgtccattagtcactatgcgctgtgtctcgagtttcttgtcccgagacccctgcgcttcacagaaaatgaggcctagtccagagctgttttaatt

SEQ ID NO: 138556 - DNA, 809 bp, Zea Mays
ctttcaccgtggcaatcactccggcgatcaccggacatgcaccccatggttcaccacgatgcggctaaagcttaagcatgtggcgtgcaatggtgacagatcgacggcgacgaaggttatccgatcgaccgatgagctggagagggtacggcaaccttagccgccacgagacccaactcaatccgggcgccaatatttttacctgcccgtgcttatcttgtgaccacggtgcacgaatcgcgacaatcagcgctcatcgcggcggcgagtcaccggtgacggtgaacggctggcagtcgatcttatgcagatactgtaccatggcatcccttattcagttagcctgaccgagcgatttgaaacccaatttcctcccgattttcaatggcaaccagttgattggccagtaaaaaagttgttgtctgatgatccaacaacaatcttgttatagcaaccatggccaaattcttattagatcagggttgatttctagttcaaagttggctcagtatcactgttagtctgaatttcagactgcaaacagcctgacagcccgactttgagctgaattatctccaaattcttcataacaacaatgtttaactccttaaacaaagttgtgcccctttgatagatttacatatttgatgtggtgacctagggcaaaaaccttataatttgaatgttacaaagctccaaagttgagcccatatcacagaattttagacttagtgtgagatctcaaatagggtctttttgcaaataagtccaaaatttcgggtttagcttgcaaatcttcatgattgtga

SEQ ID NO: 138557 - DNA, 356 bp, Zea Mays
tacaaccggtatggtgtattgctccgtcctgtccggtatgtagattactgtagagactccggtgcttaggtcctccatgactagggtcggttggacccacaaggcgaagacggggagcggtaaagaccgtatgtggtgatgtgatgttacttcaacatatacttcccgcaccccttcggtatggcgtgccattgattggttcggacggagtttagtgacaacgcgacctatcatggatgacgtggatcaatagtacccacctcattttcataccgggcgagtacaagcgtatgtgagtgatcatctggtgagtgataggcgagcctgggagccggggggccatggacgtgtgccga

SEQ ID NO: 138558 - DNA, 455 bp, Zea Mays
acattagattgttttctagaggaccaagagacaagcgaagaacccaaaaattggcaagtacccgatgtagactttctatccaaacgacacccagcaaaatcagcgtccgaataaccacacaaactgagagtcgaagcagtagagtaccaaagaccaaattcaggagtaaatcgaagatacctcattatgcgtttcaccgcctgacagtgagaagacctgggggacgcctgaaaacgagcacacatacacacagcaaagtgtatatctggcctcgtagcagtcaagtataacagcgacccaatcatgcttcgatattccttttgatccatgggctctccatcgtcatcagcattcaaagctgcgctagtcggcatgggcgtagaaattggcttcgcatcatccatcgcaaacttcttcaagacatcctttgtgtactttccttgatgcacaaatgt

SEQ ID NO: 138559 - DNA, 658 bp, Zea Mays
ttagctatcaccaaacattattatataattatgttaatatggtccagagtctgggtgtgtttagactacagcaaggtacactgttacagtattgcagatgcttttcctgtgccgctccatcgtagtgtgtgtcaggcatcaacctgacattatacgctaccggtgaggatgagagtcctatgaagaacgagctcaacacaacaccaatacacacgagaacacttggaacacgaatggttttggtgctgcctgaaagcacaacttttctgaactcctattgcttcttttattctgaatacaaagagcagaaatgcttggcgcttagccacacatcacgctacaaacgtgtccatccccatgtccacgatgccgctaattcactggtcattccagggctgtgtgtgagctaatcttgccacgccctcctatgcgcaaggccaccacaggtgggagctcgtgcacatgcagaattgaaaacagctaaacatgcaactaccatgcacacggattactaacaaattctcttaagccttgcgcacgttcggtacatcaatgaccccgagcttagtacgaagttcactgcaccgctcatgtctccgggcctttgtcaaattgtagccagctgcttaacagtcccaatggactcaactgtgaccct

SEQ ID NO: 138560 - DNA, 722 bp, Zea Mays
taacacccctggtgttacgagtaactaaaacttggcatgtcatcatacgcattagcatcattttgtttgatacacctaaaatgcattttactaggttcaaaactttcaaaacttatgtggtgtgttgtcttgatgagagccatagaagtttaaaaaccttgtttgtaaccaagtttaagtacacaacttctaaactaatgacactgtcggtatgagctctaagtaccaagttgaatcttagcttatggagcagatttactcttaagtaatggacccaaagttgcgtgagtgtaaaaaaaacaacaatcacaactaaaaacctaaattagcccaaaagtggaatttaaaatctagccatattttgccaaaaatcaaaataccaaagttgtagagtgtttcaaattaaacaactttcatgtgtgaagattttcaagtttttgagagacatttggagtaatttgcagatttcagatttggtacagttttggtgcagctgaaaatagtttggtttgcttgtttttgggcccctgtaccttttgatatgtgggcttttggcaaaaggttattatagaaaacttgtagagtaactataggagaacaacttttattaagtatggtagccctaaaaccatatgcaacttggagtaaaagtggctcaaagtggtgctgtttgaattctgaattttcagatttggaacaatagcccaagtctgaaatcagta

SEQ ID NO: 138561 - DNA, 415 bp, Zea Mays
tgagtgggcctcgtggcgcctgtcttggttcagttggagtagacattactttgttggggtcgatgtcctcattagatttgtcctttgtggactcctcaatggggatgtacatccttcgacgcggaacctcgaaaaacaaatcgttgtgtctttgctttgatcataatctttgcgatttgcttcttccctctcccctctctagttctcttgcttgtgatcgttttgcattggctcccaaagtaatccgcaaattgattgagcaactctaagcaagaactctcttccgcacttcaatttgttttattctattctcattctaacgctaacctcgggtgaagtttgtgttcaaagtttataatttttaggttttgcctattcatcccctctaggcgactttcaaaaagcataactcagc

SEQ ID NO: 138562 - DNA, 299 bp, Zea Mays
cgaagtgttgaacgggtcttgcccaggcctttatatacccagaagagggactggttgcggttctttactctgctgctcgcctcctgctttggtttttgcaacctaagggaatagccagagaaagaaaaccgcgtaccttgtccgctccgccaccacccccttcgtttggcgatggccgaccgggtgaccgttgttccgccgcgtgacccatggcctttttccatcgtcacagtggacgatctggaggcccttgtcgccgatggtttgctccgtcccctctccggtgacccatagccgaa

SEQ ID NO: 138563 - DNA, 421 bp, Zea Mays
aaaagtctaatgggtaccaacagaatcgtcaaggaagcactgtgaacacactggccaaaaacaacagcacaaacaccccagtccaacctaatggctgtttcaagtgtggcgaacttggccactatgctaacaactgcccaaggcgcaatcaacagacacccagaggaacagcaaccagagggctaatcagaatacacctgctcgtggatctgcacaaaacaagactccgcagaaccagagtaagggaagagttaatcacgtgacagcagaatcagttcctgaggatgccgacgtggtgtatggtatgtttcttattaactccatacctgtatcagttttatttgattctggagcatctcactccttcgtaacaaagtcatttgtggaaaagcataaaatactaaactatcccttgaagaag

SEQ ID NO: 138564 - DNA, 388 bp, Zea Mays
ccttggaggtgggtactgcgacattcttggggccattcgccgagttagagtaggcaggtgtggtcggtttcagctgtggacaattgttcttgaagtgagtggggtcaccatagtgccaacaagcattggttgaaggttgactacttgcaacggactgagtgtggaaggaactctaactaggctggttaaaacgcggcagagcagatcctactggcttgctgaaatttgaccctttgggagggaaccaaaaagattggatcttctggtgcctgtcttgctattgagatcagagaatttgaaactttctcttgaggtgacctctttcttcttctcgggctctttccacctggatggccttgtttgagaggtgcgagaagctgagaaaatc

SEQ ID NO: 138565 - DNA, 503 bp, Zea Mays
ggcagcgtgaactatgacctagcccccgagggtgtccgagcgggttccccttctcatacttccatggatgtccacgtcgggtcttctcctccacattctggttgcatggcagtagtaggagcttcgggtcaggaagtcgccttagaggtcgacacacctgatgctagagttttgatttctgctggtgatgctaaattggtccccaatgatgctttgcagattgctttggttggtaatccttcgtcaagtcaccaactaacttcccatgatttggggcttccttcgttcttctccaatctctaggtgatttggcttttcctgatctgactatactctgggtgaaatactgtccttgcactcatttgttttcaatgttaggctttggttgacgagatggctggtcagctgagatcgcagggtgcctctatcccggaaagagctctatctctatcacattggaatccagtgctgcttcagcagcgggtatctgatttggagatggc

SEQ ID NO: 138566 - DNA, 316 bp, Zea Mays
gaagaaacggtggatgataaatgtgatgcaagcgattgagcagacgccgccctcagcttcggcggcaaaagcagcgatgcctgtcgataccgaagatatcgctggagccaaagctaaggaactcgcaaccacaatgtcagaaatcgacagactcatatcagatgtggttgccgaggaaaacatagccgcaacgcttgacaagggaaaaagaattgaaggtgcctcttcagaagataaagattttgaccttcgacacttgggtggccaagaacttttcgaagaggacaaatcagaattgaaagagtttgttatatct

SEQ ID NO: 138567 - DNA, 520 bp, Zea Mays
ggtttgggacgatctcgttctggactctggaggagatccacctagatacctctggtctagttgttgctcctacgacgctctactccaacagcacaccatttgcttcaaagtcgtcgtcctccatgttgccttgcctgcccatcgttgggaacgacaccaactagtataactcctacaacaaccagaagaggaacaattgtcgcaacggtggccatgacaatggcaacaatgagagcaataacaacagcgggggcaaccatggtggtaactttggaaacaccattgtcgctcccgttggtgacacaacaacgatggagataagactcatccttcgtcaacatacgtcaacctatggcggcgacatatcaccatgtaccctgacccaacgcctaaagggcaataatgagcgcatgcattcatggccgcgctgagcaactacacgctcctagggttcacacccgggcagtagccgatgtacacacatgcaactcctacacctacactaggttggcattcatgg

SEQ ID NO: 138568 - DNA, 397 bp, Zea Mays
gctgggcgtggtggcttgagtactggtggcgtagtcaagaactttttcagtgcctctaaagcttcctgtgcctctgtggtccattgaaacttgtccacctttttgagcagtttgtagaacgacatgcttttctcgcctagccttgatatgaacctgctcagggctaccatgcatccagcaagcctctgtacctttttctatgatcgtggcgcttccattctcaagatggcctcgatttttttgggttggcttcaattcctcggtggctgacaatgaatccgagtaacttccctactggtactccaaagacacatttctccggattgagcttccatcgttatcgcctcaagctgttgaagactagttgcaagtcttcgatgaagttttctgagttttc

SEQ ID NO: 138569 - DNA, 825 bp, Zea Mays
gcaagcagagagcaaggaagctagggttttttccgcacgcagatgggtaaaaaaccagcagcccaggcacgactttttataggccagagacaatgcctcaggaactcaacagtcccatagtaaagcgtctcttttcaacaatcacatttcaaaaaccccgtggggccacttcgagcgagggcatcgtttcggccatctctcgacagacttcggcactagctcacttagttgaactagcccctctaagggcaagtgtttgggcgaaggcataacaccccctcgcttgatagttttcatagtagaagcggcacatgtcggagggaaagcaagagcagacgaagactagaagagcgaaagccctgtgacagagggagcgtacgaaacagacgaaggccttggcggttcccgtcatagccaggaatggcaaaggcctccacgactaccgaaggctggacatatttagcacgaagactacgtgttgttatcagcgcgttattgtaatagggaccgtgtaaaaccgccccgtgtcatagggtcccacttgtaagcatctgtgtggctagagttgatagtgtgtctttctgtgggtgtacataatcacattgtaatgacccgcaataacccctgggagtggaatatttcagggataacgtaggtaaccaggggcataatcgtatttgatagggtggaaccgtcccttggttacctataaatacctccgtacaacaccattgcgggggacgaaaaaaacattgttgctctaatacattgtgttagcaagcatcaaattgttttcattctcccactgtttgagctagcttgacc

SEQ ID NO: 138570 - DNA, 302 bp, Zea Mays
cgaggaggatggaggcacgcagtacgttttgttctcgatctctgctacagcatgtcatcttaattaagcctactggttgcatgcatgggtgaggattattcatcgctaagtttccatgtacgtagcatactatcacatgtacaatgaaataggcaaatagcctagacgttcttctcatgacgaccatgtctgccaattaaatatattgcaggtagtaaacctcaagtactgatagccattaattcttggttggagttcgacagagaagatcgaaaagacatgtatagaatactgatcgtctg

SEQ ID NO: 138571 - DNA, 496 bp, Zea Mays
taaaaagactttattctcaaaggcactcgaattgtttattgtcaatctacatgcttactcgacccagggtgaccactataccccacgaacggagcaatcagcttaagtcggcaatgacttaaggcggtgtgacatgctcacgcttacttaacctagggtgaccactatgtcctactaacggagcaatcggcttaagtcggcaatgacttaaggcggtgtgacatgctcacgcttacttaacccagggtgaccactatgccctactaacggagcaatcggcttaagtcggcaaagacttaaggcggtgtgacatgctcatgcttacttaatccagggtgaccactataccctatgaacggagcaatcggcttaagtcggcaatgacttaaggcggtgtgacatgctcatgcttacttaacctagggtgaccactagaccctacaaacggagcagtcggtttaagtcggtagtgacttaaattggcgtgacatgctca

SEQ ID NO: 138572 - DNA, 609 bp, Zea Mays
tctgtcttgataaccacatcatcaacataagccttcactcgcttgccccagtggtcagctaagcatgtctggatggccctttggtaagtcgctccagcgttcttgaggccggacaacatggaggtatagcaaaaaggcccggacagtgtgatgaatgcagtcttctcctcatcttccttcactagactaatctaatgaaacccggagtagcagtctaggaaggagagcatagagcagccagcagtcgagtcaactacctgatctatcctagggagttcgaagggatccttcgggcagtgcttattgagatcggtatagtcgacacacatgtgccaatcaattttattctttttgagtatacaagaatggggtttgtcagccactctagatgcagtagttctttaataaaccttgccaacactaggcgagctaactctacatgaatggcttctctcttatcaggcgtgaaatgacacaacttctgtcggatgggtcttgcctgaggataaactttaagtttgtgctcgaccagtcctctcgggactcccagcatgtccgcaggttgccatgcgaatacatctctattgtcttgcaggaactggacgagtg

SEQ ID NO: 138573 - DNA, 503 bp, Zea Mays
caaaacggatccgcgaagaggtatctaaggtttctggccgtccgatcggaaattaggggcccggattagatctccacgcccgcgaaccggtacgccgcactgaccatcggatcaagatcctacggcccatagccaatccgtgggttggaacgcagggccaaatctatccgtcagttcccaaaccaacggttccgatttaaataaatccatcgccgccccagcactaatctcgatcgcccaaccaggatccaacgacccaggttacaactcagccaaaagtgcgcacatccgatcctagccgttggcttctaatcgtatggccaggaacccttctcctacctagcgcccaaagccgaccacggcacttgcgccaccgctagagagcacacgacgagtggccaggcgacgacctagtgcacatctacacgagcgatcggtgcaatacgaagatagagagagggctgacttgccagtggtccccatacctcgaatctggacggcgt

SEQ ID NO: 138574 - DNA, 977 bp, Zea Mays
tcagaattacccctcacatcaacaataaatatatcgagttggtctctaaggatcaagaggtcatattgagagaagtctgcagaataaatcttagccaattctatcggttgagctttgtcatagctggtaaatgaatttcttggatctagacacgaaatgcatctcaataattgagtagatctttcagtgaaacgattatttaattccacaataacttgatcatacacaacaataaatatctcatttttgaaatgatgatagtaagtcactaattgacctccacgcccccttgagcgacctcggacagtaattgtatcatccatctttggtacaataatgttatgttggttacaaaagatctttacctcctcaaacaattcttccaatccactatcacgtacttcactaatattctgcaatgtggctccaatcaatccaacagcaaggaaaatattctaatcttttctttgcaaacattgtgacaaatcattagtcttgtctaataacctcatcatgagatgtagaataagcacaaattcaaagctctccatttgtttcaacaaaccagaagtcatatatttcgtatccccactagagccatcatcagctacaatctctagtacctctagaatagcatcccacatgagaacaatacgacataaagttttatgatgtgaaccccatcgagtatccccaggtcgtgctaggttggtttcttgatttttccctctacctgaaaaaattttcccctttcccaatatgacaagcaaacgacctttatattcctctttcatctttttaccccctcgattcatcacatgagacacactttgcctctgatttttgtagtcctcataggaccttctacacttattgtgatctatgccattaccatgagctccaatggtttcacgtccatctttccatcgacgaaacccaacaaccgtgaaggcatcaacaccataattttcagctct

SEQ ID NO: 138575 - DNA, 461 bp, Zea Mays
ggacaaatttgtggtggttttcattgacgatattctggtctattccaagaatgaagctgagcacactaaacatttgcataccgtacttcagagactgcgtgaccatcagttgtatgctaagttgtctaaatgtgatttctggctgagggaaattaaatttttgggtcacacaatttctcaggacgggatatcagttgatcctaaaaaggtacaagaagtaatggattggaaacctcctaccacagtgcggcagattcagagttttctaggattggtaggatattatcgacgatttattccgaatttctccaggattgccaagccaatgactgaactattgaagaaaggagtaaagtacgactggagtcagaaatgtgaggatgcttttcatacactaaggcaacatttgacaacagcaccagtgctagctcaacctgacaacaccaagccctttgaggttt

SEQ ID NO: 138576 - DNA, 429 bp, Zea Mays
gttggatgtggctgcggcggagacttcgccgcgtgtggagggtgctgaggatcttcctggtacaagtactgggtgtaggcggcgaagggtggtgggaaaacagtgtgtgggtgaattttcgcggagtggcaggcgccgtcacacggggatggagcgtggccgacttcgagtagacagggttggtaagcgagaattgttgtcttcgccgaatggggcgggcataggcgtaggggatcttcgggagatttttgagggtgaggaattgaggataatgttgtttaattacatggagatgggtatcattccgaaggttgagccgatgtgataggcgatgccctcgccgtgtgtgtaataggcgatgccctcaccgtgtgtatgtaattgtaatggtgatgtggcctgttggccgtattcgtatacttgtattgt

SEQ ID NO: 138577 - DNA, 288 bp, Zea Mays
gactaactagtttgcctagtctttgattcacaggttcataagattcaacagttcagtttctcagtcagaatcagctcagactcaaccaaataggggtaaaacatggaatagatgaactaccaataattatactctttggataagttcaaaataccccgaggaacgtattcaacacttctagaaaggttgggaagctcaaaatcaacatatcgctattttggagctggtttgagcaaaagaagaaatatgagtgaaagaatcaaaatgttcatgatccatgacttagac

SEQ ID NO: 138578 - DNA, 333 bp, Zea Mays
ttttaatggccatttctctttcacttcactgtattgttgcctcgatagtatgacaactaatgtgagagattctggtatatacatgttccgggcacaatgcatgatgtaccacaatatcaagtcatttggtagggaaggtggggcggagcataaacaccttgagctttacttttacgatgatgatcccaatctcgagcatcggtatcgtaagtgccgtgaagaatgtcaacagaaagacaaagatgttattaaacaattagttggcatactccatggaaacccgtactctgagcaccttaggagcatgggccatgttgagaaccttgatgacta

SEQ ID NO: 138579 - DNA, 298 bp, Zea Mays
taatctctactattctataaggactcaatgtgggcgtccactcttggcttcaccgtgcacctgcccttccccaccgcccctctagcgcctccatcgcacacatcgcacgctcatggcacgcggcgtgctattgttgcgctgctgccggcctgccgccgtcgcccaaccctagcagcccccgaccagtagtacctccaaaccccctttgtgccccaccacagcaacccatgtcggcccctccatgctcgtcaagttcaggtggtgccaacagccctgttattttctcttttgtttgatt

SEQ ID NO: 138580 - DNA, 721 bp, Zea Mays
gtgaaatggagtgtgagggctgtgaatgtacctaaacatcctctccatttataggatggattctagatttttttatttttttacttcaaacgattgaaaatagatacaatgcaaggctagttgatgtagcgcacgtgtggaccaatcaaaacgtgccacctcaaaaaatttaattgattggatcagtactagccaaaccgaccaattaggaatgactgttaagcctgtcgatcagtgtcgatcccatcatccgaggtatcgattggtatcacctataggtatctatcgactctggctccaatgtggtccgtacctattgataggtagaactgagcaacatctagctgagcttgatatctactctcataagagcaagtataataaaatggtgtaggcgggctataagagatgacacgtcaaatttatgataatgtagaagaaagataaatgaacagagaatggaagcagattgatcactagtagccacttgaaatcaggctcctcacagactctgaggtattaaatgtataacttgtatcatgagagagctattacatgactagacttttagttggctatacatggcatgataacattataaaccttatttcattgtactgctgctatctcggcatgtataaccttatttaatatagggtttctagggtgttgctcaaaaatacatgagacagactcgtgtcgtgaagagtctgtctccacc

SEQ ID NO: 138581 - DNA, 355 bp, Zea Mays
cgcgtatttatttcgcgaaatgtcaagtctggtccgtttaaaatttatggattaagagaatatgaagttgaaatcttgactcactcttgtgatttttgacctgagtaaattttattagaggctcggcgacaagagtgttgatgcgagattaaactggagcgaaataattagagccgatattgagtttttgtaattaatttgtttccctattcagattgcagatgaaattatttgatttcaaatcaaatcgaatacaacctaaaatatggaagctgatttcgtttggttcgttccgtgtgtttctcgctccggtctaaatctccaaataaacaacgagtaagcatttgagtattcc

SEQ ID NO: 138582 - DNA, 297 bp, Zea Mays
attcgtatgtcattctttggagtccttttggtctgtggaatctttgatttttgagcggtccttgtttgagcctggcaaataaaatgtagaatgttaataatcttattgatcgttatgtagtggagtacaaatatatgacctgtaatagcatcagtaggaacaatgaacattgatgatggatacaaggtaactatgtagaaggttacctttttttgaggagactgaagaggagcatcgacttctctacctttaccgcctatagttttctgtagttgttaaattggaatgagtgaggtg

SEQ ID NO: 138583 - DNA, 1543 bp, Zea Mays
cccagctattcggctgcctcgccggcctgaaatttgtgtatattctacctgtataggagggttcatcttctgattcaagttttttgcgcgaagccatgtcttgcctagatgcttttgttgtacctaagggtacaactccttcaccatgctcgcttgctggtgcataatttactcgtttatttttagctaactctcttcatggtaaaaaaatattgcctagttgatgctagttacattaatggtcctggttttgtagctccacatcgatcgtcatcacttgaaagagtgggctgcaaatcaataatagcacaaaaccccaaaataattgtttaacttactacatgctcgggctagaaatatggtagagactagagagcacctttccctatgggacgatgggtacggaacagcgatgttcccatccttctccacctacgacgtaaacgaggatcatctgaactgtttcaactattgtgagcagttcttccgtaggcagcgctcagtcgccggcacctgttctggttgctggggcacctcccgcgccgccccctaggacaacttctcttttggccctcgaggcaactcttcagacccctggggcacctcgtgctccttgaggcacctccgtgtgccggcccccaaacatttgttctgccgctatggagcacctcttgtgtcgacccctagggcaactcttctagcccccggggcacttgtttcgcccctcgaggcacctcatgcctcggtccctgggacacctcctgtgttgccccctaggccatctcttcctacctatggggcaactctttagaccctcgaggcacgtattccgccccagggcacctgtgctttgggaacttcccattggggtctcttgtaggcgtgcactgcatagcgccaccgtcactgaccgtctccactggtcatcgttgcgaccactcttaggtctcgacacctgctaaactacaccatggtatctaggtggttgtgcacatgcaactccatcgtttggatggtgcccgtctaagatccacgtctccattggaacatcgacatctgcatccatggccaccaacacagctcgggaaaattgcttttttaggtcacactgctgctcaccaaaataccccggcattcgttgcactcgttagaattaatatatatgctcttgtgctaggatagtatagatgagcctttagacttctagatagtccgctgttgctgacaagctagctagcagcagtagtcggccaccaatagttgccaggcactgtagcaaccggacagctctagcaaaggtggttactgtagctagtcagatagtaggtcttgttagtatgaataatatagtttgtgtaatacactggctgctcactatttattttttgctgatttttctctcatatttacttggattttttatacctttcttatttccatgattctttttagtttcgttagttttttatttagcgcagcagctctttctttgtatggattgtttcattagttgtcaacttacaaagcactctgcttgtttggt

SEQ ID NO: 138584 - DNA, 648 bp, Zea Mays
gagggctcttatgaaaaaccacccaggcgaaagggtatgaatgagtttcaggcgtccgatccaatctcaacggccccgaacagcccgagcccacagccaccctggttttaatctcacccgtggatccatcaatcaacggccaaaggaatgcctcatgtactgatctaacctcccccgcccacatcagatcgaatggttagagcgcttcttccctgaccgaggccgagtagcgaatgcccaggccgttggcggaggtgcgctcgccggtgacaggcttctccctccctggtgggtctacgcgtggtaaaaaggatgcagagggattgaagggaccttaccagtgccgattccatcctgagttccttccgcggagggtgcaatcaagcggcaccaacttcatcaattgcagcttagattcaagcaccgggctgcaccatggccaccactgcttcatccaccccgccgtcacgtatgagcccagctgttcacggtgaaaacgcgaccacaacgacctccccagccccagtggcatctatcccgacggcatgctcgacgatgaagatctgcaccgggtgttctttatcttcttaccgcacgacacaaccgacgacaagagaatctccccgtggtggcgagctctagttccct

SEQ ID NO: 138585 - DNA, 710 bp, Zea Mays
gtggtgaccgtcaccgtcgactgaagcggcgagcgcggacatgagacggttgtagtcgtaggggtgcggggaccgtggtcgcgacgggagaggcgggggcgggggctggtcggagtgttccttcgcgatggcggcgaagcgaagtaggtaatgtcgagcggacttggacaggcggcgtagatgcaggagacgggcaatgggaggggagcgggagggcataaggaggtgaagaagacttgcagtgacttctgagagcggcggtggctgcggcgggcttgcagcccgggggagaggagggcgcgaaattacgcctcggtcggaaaagttgccgggctaggtttggcagagaaaggagcgatggtgttgttgccttttagttgctacccgcagtggacgcagccgaagttggaaccgcgccgcggcggccgcctccaccggcatcccacgctcctctcccactccgtgcgcccgagccgcgaaggggcgcagaccacccaccacccatcgtctcaggcttcggcacccccagcgtctgaaggcagtccgctactccgctcctcgcgtcctgtttccactcgcgcgggatcacctggccgagacgtgacgtgaggaggagaaggcgtcgacgtgaagatggacaaggcggtggactgcgactacgacgatgaactccggtacacccgcttcaagtacccctcttgttgctctgc

SEQ ID NO: 138586 - DNA, 674 bp, Zea Mays
aaaagtttcatgcatcgcaaagaaatgaattacaaagccatttatacattacattaagaacccatgagcaccaaatattacaagcatagtccagcaaatgttacattaatattctagcaatattttttacaatatctattcttcttctttcaaaactttgtctgcagcttcgatcagcatttgagtaacgacttcgtccataatgctttcggccatgttaataatttctactgattcctttgcctctatgtcgaccaatgactcgaagggatctgggggaggagatagttcggctgcggtagaaaacgtaaataagttcgaagtcacaaaaataaataataaagttaaaagctattaagcaatacctatccgcctttcgagttccgcagctttttcagctgccttcgttgcttccctagcgtcatgagtatctttttcgttcgtctttataatctcatgggccatccctcggccgccattttctcatatgtcagtaaaaaaattttgcctactaaacttgcttcggccgaggagtccttcgtatcgtcaaccgataaagcagattcggtttgggccgaagtttttacatgatcgcaacctgacttctgcaaaatagatgcaattcccctcgcgccagagaaggcacagatgtctccacggtcattcaaaatctc

SEQ ID NO: 138587 - DNA, 473 bp, Zea Mays
tttatgtttttatgttttcgtcctccgtaaggaggctcttgtatctaggctgttttctggccccataaccttctttcttcataatgagacgcagtcctcccgcgttttcgagaaaaaaaatcgtgtggtcgttgggtaccctgtagttgatgcggaatctctaggaatgtctggtttcttgacgagcagaattggtgccgagaatgccgacgtgctgttctaatgacactatggacgagcatgtcggcacactgccttttgagctcatctttctgtaattgccgatagtggtatgggtgcacgacaatgggggcggttctaggcatgaggtgaatcttgtggtcgcagctatgtggtgggggtagccctgatggagtggcgaataccacgtcgaatgcctagaggaggttgtccagcatgggttgttctgtcgtggccacgagtgcggttggcataatgttgttgcctagtgg

SEQ ID NO: 138588 - DNA, 383 bp, Zea Mays
ttacgctggtgcgaattgactgatgaccatggaaggctacgtgctacgtacgagactttcccgtacgtacgtgtggtgttcgtctgagcatgcatgcaatgcaacaatatccgatgcacacgcagggttaagtgtcaaccgtcaacgatgaccgatcgatcgatcgagtccggtccctgccgatgagctgcctagcctgcctaacctgacgcatggctcaaagtaattcgatctctctgctgtactgctgggagtacgtaccctagctacgcccttttgactctttcaagtctctccagtgtccacacacacaacacttgcaaaccacacacaaaaatacaagagagtagtccacatgcagcacactagctccaataattcac

SEQ ID NO: 138589 - DNA, 308 bp, Zea Mays
aaaaaatggaaattaaaaatgttgaatacactatggttgatatgcatgatttgattgaaatttaaatgcagcaaaatgtagtgagagtgtgatgggtcagggtacaaaaatttacggatttgtactcatccagctgcttgaaggaaggcagtgtcttcaagaggtaactctccaaaactgaagggtcaaatggacgaggagacttactatgttgctcctgctcctcaaagttcaatatagcctaataggatagagtagtattatgtattttccatatatgctatgcatttaaaaaagtagtataaatg

SEQ ID NO: 138590 - DNA, 876 bp, Zea Mays
gccacattcagacgaaacaagattaggcgaaacaagatgacacaccgagcagagatcaaactcgaataatacgacacaagaatgttatccatgcacgattttcgcagaggaatggcggggattctgagacgcgtcctagacgcgaccagatagcgacctactcggaggataactcagaggaaaagcaaccgaaccctggaagaatagacacgctcgcagtagaagatgatagactcaaacaatatgtaagataggacatctatctagtcggctatataaggctgcagaggtacctttaccaaaaaggagtctctcactcacctttagatcgataggaactctttaattcacctccacaactacctgtaatctgcaaactcagagcaatccaatactcaacaccgcaaatgacatagggtgttacacattcacgtggcccgaacatgtttaaaccctatgttccgacttgcatccacgtgtaccatcaagcagcgatcaacatcgccgtcctcccagaagcactacgtgggctaccccttagtgcacagccgagactaaacaccgagaaaccatatacctagtcatgatgccagttaattcaatgccttaactggctgggaaccatcattttccccattttggagacaaatccgcctctaaaaatggagccatttttataggctcactaaataagtctgaagcccatgagacccaattgatgatcttgtacatacaagcaatccttagggtttccaacattcttgttcatcagttccctctttctttgaactccattaaatctcacaacaacacggtggcaggctccaagacgccaagggcacgagcaaaaaacaccctaactgaacccactcggat

SEQ ID NO: 138591 - DNA, 650 bp, Zea Mays
gccaggtgccgcgtggcagctcattcggcgtgaacgctttgtgcaggcaccttcgggtttttggatctccacttcctcgccatattcttgtctagtcgtgatggccattggctcgatacgggtagagtcagacgattccccagccaacaagctaagcacgacgtccatcttagcatcatcggtgctagatggcatctcaaaatgagtttgcctcttagcctcaggaaaactccgaagtggggcaatcaaggcttcaatatccttaggggagggtcacactctatggcccaggctaccatcacgagcaggagggttggagacaaattcagagaatggccaatttggaggcaggttccacgcagagtaagctaaaggggcaccagcattcgagaccctgcccctcagaatcatatccaaccggctcagcaaatcctcattgggagtctatctatttgtgacccgggtggaatcattgatgtcggtatacaaataagcgggatagactctgtctttcaggggttgaatgttcttgaagataaagtcagcaaccacggcctcagcagtcaaacccctatccttcaacaagcagttttcatcatgtagcactttggcctcggttatctttgaaaaggtgggagactctacccagc

SEQ ID NO: 138592 - DNA, 344 bp, Zea Mays
ccaccccccaatttgccgacaacggcgtcgagtcaaagggctcacggcggcgggtccgctagatctctcagctcaccgaattcctggttcccttcgtcgaaattcgaggcaagaattggagcaggcgataggatgggtccctatataccccctcgtgggagacatgaagcattggaggtggtttgttacgtactcggagtttgcggaggggagagagacgttcggttgaacgcgcacgcgtcgtgtgggaggggaagaagcacagtaacaggtccacgcggtggagaggctgccagtgggtcccacggaccagcggttgcggggaggaacggcgagcgcatgcg

SEQ ID NO: 138593 - DNA, 745 bp, Zea Mays
tggccgagctattattgtcaccatttgcacttttaagacagcgtccgagtgattacgaaactgtgtcagcgacggaatgactgaaggctgcatcggcgttttagaggtaactgccgagcgaatgaagacatcatcggcgctttagagatagctgccgagtgactgaagacattatcggcgctttagaggtagctgccgagtgaccgaagacattatcggcgctttagaggtaaatgccgagcgaatggagacatcatcggtgctttagagatagccgccgagcaactgaagacattggtgataacgtcagcgtcttagaaatgacagccgagttaaaacgggccgcgtcggccacttttgaggataatagccgagtgatgatgtggcacaccggtgttttagaagtaaccgccaggtgctgactgggcgcttttggaaacgacatccagctcaggaatatcccgcttatacagcgctttcagccgcctctgctttccgtgccctagttcttgttttcctgcctccaaattctctctgcaattcagctctcgctctgttcgccagtagattcgagatggcgcccaagagaaaagcttcgagttcatctacagcagtaattccccctatcgaccccaacagccaattgcctttcgcgggtaatcacatgtccattgtctccgagtctgatctcctccacctcgtgtccatcggggttcttcccccgagggagctttgttcttggcgg

SEQ ID NO: 138594 - DNA, 627 bp, Zea Mays
gcgaacccgggccagagcctcactcatgacctatgaggccgtagacctgtggctaactcatggcctacctagcataggcttgaccccctaacgatctataggtccgcaatacgctgaggaatgccgaggctcatgctacgaaggccaggggtcgtcatggcacaggaggggtaatgatgacttctgagtccctcgccgcccacgcgtgtcatcctaaccgacttaaagggtccgaccagagagcttagacgaccagggtgagtgccgatggacaaatgtcaaccaaaggtagaacacttcattctaccacaatacagtaactccttctccgagaagccacttgtaattgccccctccttagtttataaaataggaggtttggcacaacgaaagggggaccgacgacggacgaccaatgagagcactagaccacacagagagaaacaatactcaacaacttagtcgctagtgaacacatggtatgtagaacccttagcaacgcaacccatagagcttgggaactcttccctctcttgcatgcttgtaacccctactacgagcatcaagcaacaagatgtcggtaacgcaagccaccgaagactagaagtatggacgttttttccgaac

SEQ ID NO: 138595 - DNA, 1208 bp, Zea Mays
cgctggcgaaccctagcttcctggcgctagatctggcctcggttcatagaatcgatgcggtggctcctccctctcctctcgctgacgggcctgcagagcaccatgggcgtgctgtggttcgcgaggcagaacatgtcgagccctcggcacgccgccagcacctaccccgacgcctcaagctccaccgtcgggagctccagctcgccccccgtgcggcgtggtcgtggcctttgccctcctcctctagctccaagaaagggaacagcgggcaggacaagttcgccatccgtgttgtctcccggcgcgaccgcccatgcccggatcctcgctagctgcctcccctgctcgtgaggtcgacgccgacggatcgaaggacgccagagccgcccctctccgagctccccctatggccacctcaggcgattgcaaggagaaggcggcgggcgatgaaaactccgccgagaagttggcagtggtgttgcctgcacgcaattggaaggccccgcggcatcgtccagcccacactcatccaatttaggggcttcttgttgtgctctcaggccccagtaagaaccccaatccctagatctcttttcgtgtgttaagttgtgcttaagaactgctgatgcagacattaggttagggcaaggattttggttaattggaataagggcaacgctttaaccttagttcctcagtttcagctttaatatgtgctgtctccatagtatatgctctggttaacatatgctcagtttcagacactattggttgttttcaaatcctaggattcttttagctcggtaccttacatttctgctgcttgtgctcttctccgaggttatttcgcagactacaacaacgatggtggtcggatgtagctcgtccaagcttgcactgaaggagacaagatgaagaggattttgcagaagcactaacgtcgatcaacacatgatggggaagcatcccactcggttcgtacaagctaatctgggtaacttgatctacaacttattctaatgatgatgtttcatggtttatatgtaatttgcagcactgtaggcctaatatgtgtttcattttttggtcaggaacaattcatttactcattttgctattatgtctgtcatattatgcatttgcttgcttttgtttgtcactatttaccaattctgaataattacagttgcttttttggtgtccaactt

SEQ ID NO: 138596 - DNA, 276 bp, Zea Mays
ggactccccttcttgtcaccctggcaggcctcacactgctcccgagtgagatgtagctttccaccgatggtggtaggcctcgaaagagaccgtggttcgtcgtcgtcaacaaatttaaggtgacgtatcacctcttcgattgacatcgtagagaggtctaacagagactcgatagagcgagcgatctgcttgtacttttcagggatgcaacggaagagcttctcgacgatgactctcatcgtaggtgtcgtcgccgaactacaccatcttctgcag

SEQ ID NO: 138597 - DNA, 487 bp, Zea Mays
atggatatggatgatactgactttggggaagatgataaaaagtcagaggataatggttccagtaaacaaaattttgggtcactaactttggaacaatacaaacaacatgctgttcaaccgaaaatggggctacatggagtaacattgggaagaaagttactgaccagggggtgcagacactgttgggttcacaaccaagtgttgttgatacacattttgacagtggaaaggacacaagtggggcgctggttccaggatctcctaatgtctctacgctgagtgctgatctgaatatggctgatgttgggaatctatcttctaaagtactggcgcttgctgctgtgtcggaagctaacaactcagctaaattacttaggagcaaaagaagggcagctacaagtatgaaggactctgtagctcgggccaccaaactaaaagctgcacgcaatttagactcggcgttcgctgaaggtaccttgttttttcc

SEQ ID NO: 138598 - DNA, 582 bp, Zea Mays
cacatatgtaataatactatcgggtatcataattaggggtacctggaatgtgcccataaacatacctaacacctgagtaccgagaaatcataaaacgtgttccccgaggtcaagcagggttgaatcacgattcacccgaggtctcgctcaacggacgctcaaaactatgctcggacgatggctacacccatgagaaatccttgactcgctcgagggtcccctacacggaaaagcaatttccatctcgctcgagctcatatcgggaaccttgaagatgtgcgcattaaatacacacgatacggatatctgttctatgtcacaccgcagtaaaatagaggatgatggggtcccatctactttcaccaactacgatgacacacgcccgcgaataccggacactgctcccccactctggtcactgttctcgaataaccccagatgggacatgcacgcatttgggcgcagcctcaccctcaggagagaactctaccttgcccgaagatggctccagcctcgggagaaaactctgcttcacccgagcatggcctcagccaactactctgacagtcaccaccatctccc

SEQ ID NO: 138599 - DNA, 554 bp, Zea Mays
ggcacctcgaatattgtgatcccaaatgttccaaatacctttgctactttggtcctacattaggacactgcacacaactttttatccttgatggtgtcagggttagaaaatctgaattcaaaaaggtcgttggaccctgggtggtatctgtttagcgttattaccagtcatctcttattttttatgtattttctggaacttgtagcatcacaaaacatataagaatgtgtacccattaaaatcaataagaatagatcaaaaaaacatttcgctagtagctgcagcacacagcactacatgtagtctagtacccacaggtttcactggaacaaatgcacttcctagtgtgggagcagacttagttcctatctggcctctttcctactaaacaaactgaatatttgtttttggtgaatgtttttttttgactggggtttttggtgaatgttgagaaccagtgttagtttgttttcaggtaagcttttgagccttttgattatacagcaaaagtgataagttgaaaaataccagatagtgcttctaacagaaaagca

SEQ ID NO: 138600 - DNA, 417 bp, Zea Mays
aatagatgcaagtttgccttttatactgattgaacataacattgcatctatgtcatactcacagcaatgttatactggatcaattaacgaaatgccaaacttgcaagtcgaatgatgtaacatagaaaagcatgttgaatcagctcatgtttgctctatagctggcatcttggtttgcaaactaattgctaatgcatgataccttttcacatccttgggtgttgttcttgatcgttttccttggtctaaggcattcaggactatctttgttcagttgtagtttgcaacagataattctgtgttttctttttgtccttattgtactgtttgaagttgtaccctcagggaaactgctatgccaagtttcatttcagatctctatgacagaaaatataattcatttgcatttgcagggac

SEQ ID NO: 138601 - DNA, 343 bp, Zea Mays
gcgggggcaagcttcttcagcttcttgtcgtaatccatcttcagagtgcggtaggcctcacgggtgttggtttcctcgccttctgctatctcgaggctctcttgaagggacgccttctcctttgtaagttccctgacttgttgctctaggctttccacccgggagtttaggtgagtgcagtgggaggctaggtcatcatattggttatcgagggtgtggaggtatccagccatgtagacgatggtggggtcatcctcgatagggtctcctcctgacagggcctgaagtcttttcctccaggtgggggtatctttgttgctgggtgggaagtagcggagggggg

SEQ ID NO: 138602 - DNA, 382 bp, Zea Mays
ggagggggaagatttagagccgaattaaactccattgatgccaattgctgcactgaaatcgtccaccagaaactgcccctttcaatctccattagcgccggcttggttatgactgcagaaaccgacgcggctagaaaacgaacgaacgacgggcgagtgcgtgcgctgtcagctgagcgcggtgcgcgtgcatctggcggcggtaggcatggtgttttcgctggtcttcaaacaacgacgaaacaacctgggaatcgagcgaaccaaagaaataggagagaaggtgaacagtgctggagaggggcccacatgtaagccacacaaaggagagaacgtgagagtcctgggcatgggccttcggccaagcatttcgtgtgttttt

SEQ ID NO: 138603 - DNA, 573 bp, Zea Mays
tggattcgatgtctagtcagttttccaaggcagatttgttagaagtcgacgtgaagggccacttgaagcaattcttcatcaacattggtgattatccaaaggattgctttgtagcatcctattctctaatagtgcctcgcccactggaacatataatctctttgtcattagattatagtgtctgaaatacctaattctataatttgatggactcttatatagatgttggtatataactggcctccacaggaactagaatgggctccaaagtgttgtaaagaatcagggccaagtcatttttcagagcagttttgcgaaaaggcctctaccgggccccctctgttaacacagtcgaaagcccctgtccctccaaaaagaaaaagagaagaaaaaaaaagttgtcaagaaagtccccaagaagactttagaagttgttaatgtggaggactctcctcccccagtccttgtcgatcaaagcaaacaaggacacaaaatcctccgtgatatcagaaactgtaatggaacgaatgaaactgtaacattaacggaatgactgaaactataacagaatga

SEQ ID NO: 138604 - DNA, 646 bp, Zea Mays
gctaccatcactagcaggagagggttggacacaaactcggaaaatggcctgattggtggcaggttccaagcagaataggccacaggagcaccaacatttgaaactctacccctcaagatcatgtccagtcggctcattagatcttctgtgggaattctcctgttcgtaacccgggtaggacaccactgtacaaataagcagggtacgccctgtcctttaaaggctggatgttcttgaaaacaaaatcagtgatcacagcctcaacagtcagacccctatccttcagcaagcagacctcgacaagcagtactttagcctctattatctccgaggggttcggagattctatccagcttggtgtgcggacatctggctgcctccctaacctagagggagtgacttgtagtggttttccacaatgaaccactcgagatgccaccccttgatgctatccttaaggggaatatcaagatactttgtttttctcctgcgacgaagctccaggcttgcgccgccaatgagttggtgctatcccccgccatcccgggctgacaatgatacaggtatttccagagacagaaatgggggagaatccctagaaaggcctcacatagatgtacaaaaatgaaaacttgcaagatggaat

SEQ ID NO: 138605 - DNA, 673 bp, Zea Mays
gaagcgagtgagcgagcgacggcggcggcgcaagcgagacactggcaagctctactccggcaagcttctcttcggttggatagatctactctccacctctctctccctgtctttgttgcttcagagaggtcgaagtgggtagatccgtttggtaccttcaccaggagacagaagtgggcagatccggccatacatgaagatgtgcttgccgacggggaggccgagcgatggcagcgcacagcagaacaggcggatgtctcgggacagcactgtcttggcgacgagtctgcatgggaccttccggcgggttggatagctgcggcggagcgccggtatgacctgctatggctctcgccataccttgtcgtagtctactagtctttttctctaacatcgctggcatgccgactccacttccgcagtctgcttctccgtcgccggccgccgccattctagttctcctctccagctctgcccgtcagtctactagtctttttctctaacgtcgctcgtagcctcgctgagtcgctcgcatgccgactccactgccgcagcctacttctccgtcatcggccgccgccattccagctctcctctccagctccgcccgtagcctgcttcttcgctcgcgtcttgttcgctccggtctgagtgtccgtttgtcagatagaaa

SEQ ID NO: 138606 - DNA, 941 bp, Zea Mays
ggctgatcggcggcgttccacggcttgggttacctaccactaccaacgacggaacggaaccggccgggccggcggcatggcggcgtggatgcggtcgctcttgtcgccgctcaggaagctctggatccgaatgcattcggcgcagaacaagagtacgtaacgtcggtcccacacgtcgtccgtcctctttctcgcggcgcgtgcatgcatgcttcgatcgcttactgcatgaaacccatccatcatccatgtatcctagctgacatgttcgttctctgtctgtgtggtgacgagcagaggggcggggcatctacatcctgtacgaggacgtcaagtcgtgcccctgcgaggacgtgcacatcctctggtccatcctcgtcgactcgtcccactcccacccgccgccgctgtctctgcgcctcaagcactgactgactcgtccctccctccctgcctccgacgaacgagaccgtcggtgtacatgaagatgacgacgagtggcggcagctcaccttcttcttcagccgccgcgataccatatcgcttccacgcgcgggaagaagttccttttgtttgatgagtaggagattgatgagctccttcgttcaccctgccccgcgcgtcctccggtagatgcagccatgcaggtgcatagcagagcagagcagagcaggcttccctcaccgacaccgccaagggattttttttttcttctttcctttgcttttgtttttggaaaaggaacggcgcggttggtgatccgggacatgccgcgtgtgcctctagctaccatgtaaatacagaaaggtgaagagggggcaaaaaaaacagagaggtgtgtgtatatacggagagtactccactactaatactgtagtacagcgacgtgtgatgcaagctttttaaaaggatccgtcgtcacaagcgtgcttcgcgtgcac

SEQ ID NO: 138607 - DNA, 272 bp, Zea Mays
ctagaatttgatgtttactttattgttgtgcacctgtagagctagcgattcaccaaccaccccaaaacctccctagttgataggttaagtcagttgacatgcctagaaccctggctgcctctaacacttaggggtagttggagttgctttaggagcggtgatcatagtagcaacgtttctcctggccccacatgtgtcaactgcccacatgattgatcgcaggtttcctaagatgacaacccctaatttactcttcaaaacgatgcactcag

SEQ ID NO: 138608 - DNA, 553 bp, Zea Mays
caacaattcattatgcacaccaaactcagggaaagggccaattgccccaaaagactagtccaatgggggaagggtgactctcccttaaagtgggttcctcctcccaagttaagcgaggtgggataattctgaggctcacacggtcaccgtccgactacaattgggccaactgggccaattgcgtctttgccaacgggtaatagtggaggatgtcctcatcattcccaccttcttaaaatgggccctagctctgatactagatgatacacccagcccaggtggggttggctgaggcccaacaaattagggttgcctggagcccaacagttcattatccacacccaactcagggaaaggcccaatcgccccaaaagactagtccaatgggggaagggtggctctcctttttaaagtggcttccccctcccaagttaagcgaggtgggataattctgaggctcacacggtcaccgtccgactagaattgggccaactgggccaattgcgtctttgtcaatgggtaatagtggaggatgtcctcatcagaacctaac

SEQ ID NO: 138609 - DNA, 411 bp, Zea Mays
aacaatacatcctccacacaactagcattttctaaactactcgtgacatctataaatataccccctatataatcacgaatcccatcccattgcataggatttgcacttaaatctcggcttaactgcacgcctcatactcgtctattagaaaactcttcgcctagccaatacactacactccgcatacgtagaatccacttaacacactcgacatatacacttaatagaacatttttcatacaacctataaaatcaatctagcctttacatcacacaacacatctccttccctattttgaatccaaccatatttcggcatgcatccgaaatacttcggacaactctaatgcaaccactattatgatacttcagcacacacacacacatacgtgtccccacattatgcacatg

SEQ ID NO: 138610 - DNA, 851 bp, Zea Mays
tccgaggaagacaacataaccagaagtagacctcctagtgcctggacaaccagcccaataagcatcagagtaaaccacaagttccatctgcgaagaggggctgaggtgaaggcccaactgaagagtgcctcggacataccgcaggatacgcttgagggctgccaaatggggttcccgaggatcgtgcatgtggagacagacttgttgaaccgcatacgcaatatccggacgggtgaaagtgaggtactgtaatgcgcctgcaagactgcgaaattccgtgggatctgagacagggtcaccatcagctgagagtttggggttgatatcaacaggggttgtacagggtttgcagtcactcataccagctcgctcaagtatctcaatcatatactggcgctgagagagagtgatgccagaagcagactgttgaatatgcatgcccaggaaatgatgaagaggaccaagatctttcagtgaaaactcctgttggagagcagtaatagtgcgtcgtagaaggggcatggacgaggcagttaacacaatgtcatcctcgtgaagaatgtaaatcatatatgcacccttgtgatagacaaacaatgaagtgtcagacttggcctcaacaaatccaatttgaatcaggtgggaagcgaatctgctgtaccaggcacgaggagcctgtttgagcccataaagtgaccgattgagacaacaataattaggatgaggggaatcttcaaaaccagtgggctgaacacaataaacagtctctgacaaggtcccctgaaggaaagcattattgacatcaatttggtgaatcggccagctgtgcgagagagatagggaaagaacgg

SEQ ID NO: 138611 - DNA, 578 bp, Zea Mays
cttcttcactgtatcccacatctcagcaactaagcgcccgactcaagatcaccaaaaaacccacgtagcccccaaatacctcgctcccttgttcttaactccgccgtgaagaacatctccgtggccagctttcctcgagtgagtacttacccaattgtttcatgttcttgcttgctattagccccctattgctcccagtaccaaccaatcgaacttaagccgaaacctttcaccggaacgtgcggttgctctgtaaaacgccgccgtaacccaccctcaccgtcgacctgctcttcggctcgtattctgcccaaaccaaagagtgtgcataactcctggtgaacccgtgaatccttcctcagcctcaatttggtcgaccccgccgtcgtttggccggaacgcgttcgttcctataaccatccgcctgtcaccatgaaccagttgttttagagctccaattcaaaaattgagtgaggggaaacctcgggttaggtcggaatctggagtcagtcgtcggtgagcaccaatccttgcgtgctccgcccagtccagctcgtcggagaatggctcccgcgcgg

SEQ ID NO: 138612 - DNA, 1072 bp, Zea Mays
gacttcaactacaaggcaacccgtgtcacctacaaggctacaagacaatcctaattgcacgatgtgaattctggaattacttaagtttaactttaaccaaacagcatagtcatagtcatagtcataggtagtcagctttgagtttgaaatatctgacctgtatattgttagctgaataccagtctacatcatatgcgtgggtttgtgctggtaatgctattatgctaatgtacctacccgcagcaacttgagtgttcgcttgtacagttatgggctttatggccgctccaaactgagcaagtctggattaggccacaatgaagcatcattaccataaatctagtgacgattgactaggcaacaattggttcttgttagtgcatcacccatcatcatattattctagagcttcgccctgcgctaataccaagaggacgtctgatacctgcttatgtggggtaggtaataatctcgttccttgtttggtgaaaattgagatgatgacttgaaatggcagtggttgctttgccgacgcatcacactttcgctagcaaaatccatgaaagtttggcttataggttccatgaatgcatgcgcgctgtacatctgaaactactttagattggatcttagttgttccaaactaccttggctggacattcttaagatgcatcggtacagaactaaatggagtacggcgaagagccgatgtagtggttgatacagatgcgctgtgctcgtgatgaaaatgtcttgtggctaaagccctttctggatcgccaattgctgggggactgtttgatcggtacgaacgggggggaagtcaaggcaaaacagcaccaaacccatgttccgatccgtgcgcctgtacatgaatgcagcttgtttcggctttaaaaaacgcattgagggtgctctggccgtacgccattttcccataggatggagctggaccggtcgactccatgtactgtacgtcttttacctacatttgaggctaatgtgctcaccaactcgatgcatttattgacggattggattccctttagatctgcttttttttgttgaagca

SEQ ID NO: 138613 - DNA, 397 bp, Zea Mays
gacaaaattacaaatttctcaattctagtggtaaagatctggttttgcgccgtttagagctgtcccaaacaggctggagaaagtttatgaactccgccgccacctccacagctggcgctgcgagcggtgcgtcctgcggccgcggagaaatggcggagcgagaccgggtcttggagagagagcgaaggcagatggagcagatcctagagctggatatggaggagctccaggtagaggaggtcgacgacgacggctcatcctcctcctccgacgtcgacaccttccttaggtccgaccgcgcccattgcccctttttcctcacgagagtggagtttcaggggatagggtggttttgactgacgatgtaagtcattgtgaaaatacactacacattgaa

SEQ ID NO: 138614 - DNA, 378 bp, Zea Mays
cctccagaatacctctctatcatcatctgctttatcagctgagttgcatatgtctttgaagagccatagaactgaccctttattctatcaaggtattctgtgacagtgtcacattctggaattgagcccgcaatagaaggctcaactgtattctttagcactgccatgcactttttgttggcaataacccactttctatgttcaagatcataagccatctgtttgggagcatggtccctctgtctggtctgccaagcagactcagcctcatctgtctctctcactggtgccacaggctcagtgggacacggtgtggttactacccagtccacctcagccaaaacgaaggctaggtcaatctttttcttccattttgta

SEQ ID NO: 138615 - DNA, 276 bp, Zea Mays
cctcccttccaaatcaccgccactggataccgcttcccagacacttgccagaatgctgcccaaaaagccctccgccagctatgccaaaactacagcagggaagtctctgagacaccccttcgctactttccacccaacaacaaaaatactcctgcttggaagaaaagactccaggccttgtcagggagggatcccaatgaaattgaccctaccatagtctacatggccggatatctccacaccctcgacaaccactatgacgaccttatctcccac

SEQ ID NO: 138616 - DNA, 659 bp, Zea Mays
cgctcttcaaaagaaagatgttatgaaaaatctgtagaatgtgtggaaaagataaaaactagcttcgccaatgttggcacatattcaagtgaagacaacttcgtacggggtgatcccgaggggccaattgagtggatcagcagcgaggccgaagcctttgaggagattttaaatgaccgtggggacgtctgtgccttctaaggtgcgaggggaattgcggctattttggagaagtcaggttgcgatcatgtgaaagctttgtcccaagccaaagctactttatctattgatgatacgaaggacccctcagccgaagcaagcttagttggtgggaaattctttactgacatctgggaaaatggcggccgagggatggctcacgaaataataaagaaaagtgaaaaagatactcacgacactagagaagcgacaaaaacagctgaaaaggctgcggagcttgagagacaaataggtattacttaacgatttttacttttgatgttttcttttgcgacttcgaaataatttacgttttctaccgcagctgaactatctcctcccccagagcccttcgagccactggccgaagcagaggcaaaagaatcatcagaaattattagcatggctgaaaccattatggacgaagtcgttactcaact

SEQ ID NO: 138617 - DNA, 517 bp, Zea Mays
tcataaattttaagtcgtcacctaggcatccagtcgaatttccaggctgggcgtcggtcttgtcatgaccaatcggggtatggcgtcgcttaggtgcgatttggtgctgtttaaggcctgaatgacctgagatggacgttgcatgagcttgcgcatgggcaggaccagtaaaggagttgcgcgcgaaaaagttgacgcgggagtggatgcatgggatttgcatgccaaggagactgtcggggaattgggcgcctacaggtcctgcaaggtcaaaacccatctctcccgcatgcctctttcatagattcgagcctcccttcctcttgtccactgatttgcgaccctgattggcgtctactgcccccctttggtcctccctcatctctgttgattgattcacggtttcttccctttctcttcatacagtcacagggcaggcacataagcatctcttcctctccttttggcttccctcctcttgggtttgcactgcccctgctcttgacttggatgtgca

SEQ ID NO: 138618 - DNA, 340 bp, Zea Mays
gtccgagaaagccaactcatccgaaagataataagtgaagcgatgagcaggacgttcgggtggtgcccgagggatcgacgtatttctggttgaagacttcattttggctctggcgtcggctgttgtcgatcagtgcagctcaattagttcttttggtcttaaaaactgtgttgatggttctgccagaatttgaagttttcactttgctggtctgatccttttgggtttgctctatgtaaataagcttagcttaaaaactgtggggcggtttggtaggaaattagtggcgattaacttctactcttctcgttctgatggttgaagttagtttcactagttt

SEQ ID NO: 138619 - DNA, 1064 bp, Zea Mays
atgtggttgggcctagctgtgggtgcctcctcgacacacccacccagctggctctgcttgccacccactacggcagccccatcagcaccaatcgcagctgccatccctccttccgctcccggggacccccgcctcgcccactctgtccctgtggggtggtggctagaactaggtctgggcattcgagttacctgaaaaaatcgggtcaagtacttcgggtaaaagaaaattcgggttacccgaaaaagccttgctccacgcctgtcaacacccaggcaaaggtctccgacgacggcggcacctcggtaggtgacgagacgacctaccgaagcctcggcggggcgctccaatacctcaccttcactagacccgacatcgcatacgtcatccagcatttgtgcctccacatgcacatcccgcgagagccacacctcacagcttcgaagcggatcctttgctgcctccgcgacaccctcgaccatggccttctccttcggccctctctagcatccgagctagttgtctacaccaacgccgatctagcaagttgtccacttgtcccaacacgggtcgatccacctcggactacgccatgttcctgggcgtcaacctagtctcatagtcctcagagcggcaaccatcgtctcccgctccagcgttgaggtcaagtaacgtgtcgtggccaacagcgttagctgcttccgaagcttcatagccctcttgcccgtgccacactcgtctactgcgacaacatcagtgcagtcacacctcatgaccaatcccatgcagcatcaacgcacgaagcacatggagattgacctccactttgtccacgagtgtgtcgcggtcgacaacgttcccgtcctccgcatcccgaccacctcccagttcaccgatatcttcactaagggcctcccctcgacggtgttctcgttgtttcggaccagtctcaacatctatagtggctagaattacaactgcgaggggtgttagattatgtgtttacgttgtaataggcctgagcctagccaatgtatttaactcaatatatatacaacactgac

SEQ ID NO: 138620 - DNA, 626 bp, Zea Mays
caggaattaggtttagcaagagagtgagggcaggtccacaactagaggagcaatcttcaaaaaggcttcactctacagagacagatggccacaatgtataggaaccaacagatgctaatgatgacataccaaacagccctactacacctggacttgctgatcatttcagcagagctgtagaggaagacatggcatctgctgctcatgacagtacaggtgatggtgaaggcaacagccctactacacctggacttgctgatcatttcagcagagctgcagaggaagacatagcatctgctgctcatgacagtacaggtgatgctgaaggcaatgtagctagagatgaagaaactgaaggcaagttatagttttttcagtcaaatatggcatctcttttgctgatttgcatgaaacaaaacaatttcattattcaataaatgtgaattctattttgtagctcctacacagcgagcaccaaggagacccagggcagcaactaagggaaaacaactggacaggatgactaaagttatgtaaaggagacttcccatagctgttgaggaaggcaaaaaaggccacatgaacctgttcaagctgccaagtttgcatcagaggctggcatcatt

SEQ ID NO: 138621 - DNA, 582 bp, Zea Mays
gcaaaagtcacactgcatgctgacaggtatgtggggatctctagccgttggatcttactaggcggtgtagtttagaactgagggtgtgtgggtggctagagcatagtgatgttcatcctcggtgatgatgaactcgacgatgatgctagactaagcactatagggtttgactggtgccatagctcaccgtcgaaccattgtcagccatagcaaattcaatgggtacaaaatcaaggcaaagggtggtccaagagtgctcagacaacaacaagggtgtttgcagtgaccaagcgaactctggtgagcgattcactactacttaggacgtgatctagcgaaaggtgtgtgtgatgggtttggtacctacttgtgtaccatctggtatcgagtagaggaacatggaatggtctaaaacttctaaaactcctatcatctaatgtcttgattggaaaaacttttgaaactcctatcatcaagtatcttgagtggcaaaacatacccacaccccacatcacatcatgttgggttagtacaaccacagatcgatggtgaaggcacgctcccacgtgtggcacatcctca

SEQ ID NO: 138622 - DNA, 284 bp, Zea Mays
aagagatcagcaacctggaaggcatacaacaacaggtggaaaagagaagggagaaaatgcttcggctggctgagctacaaaagaagattgacgaagcagccgaggagatacgacatatcgcacaagataatgagcaaggacatataccacaacaaagtgaccttctttaggagggccccagctatgatgatgtgtggtacgatgattttcatcatgacaacattgcttttgatgatgcttcttctctagctacagagttgcaggctgttccatggccaccttcg

SEQ ID NO: 138623 - DNA, 342 bp, Zea Mays
gagcgccactgaggcggagacctggagttgacatgtagtcgtcgtctcctcgacaccaaaatttggccggcaagccgagtcgagtggagagcaccagcaggccgcaacataccaatcattttagcaagagaggatgtcaaatattgttacaattcacccataaccataatcggactggattcatccaacgcttgaagcatccgtgtataaatgcacgtgtcaagctgtatacgcatttgcaggccagcgactgtgcagaacactggagaccgttacatttcaacagtcaacgaaaaagacagctttcacatgtcagcagccagaacaatacatacacatgaa

SEQ ID NO: 138624 - DNA, 425 bp, Zea Mays
ccccgacctaacgttcaccttcctatttatttcggagctccgcttctctctcctcccgtgcatccgccgcgggcctcctccagtcctcttcctcaccccgacgactccgcctcaaatccaatcccactcccacctagcggtccggctggcctcgcctcctcctcctcgcttctctcagcctcaggacgacgcctgcctaggcttccaccgctgatctgaccccgaaacctcgttcccttgtccgcttcctgccgtctcagtcgtcgatacttgtcccccaaaaccccgggctccggccgatctctgcgcgttgaccggggcgccgctgatggtggcgaggatgatgcggtggccgcggccgccggcggcgcgcaagttccgcgtgcggctgttggtgcggcgtgcggaggggctcccgcctcctt

SEQ ID NO: 138625 - DNA, 532 bp, Zea Mays
ggatgatattagaggcactcaggaaaaaggtcttcgataaaaatgaaaagttcacaggaaaatggataagggagttgccctacgttgtttggagcctaagaactcagcctagtcgagctttgcacggaaatactcctttcttcatggtctatgggtcggaagcagtattacccgctgatctcaagtttggggcgccaaggttggtcttcgaaagcatagcagaagccgaagctactaggctggaggatattgatgtactcgaagaagaacggctgaacaaagtaattcaatcagcacgataccagcagactctaagacgctatcacgacaaggccgtgcgacgacgatccttttcagtgggagatctcgtcctccgccgaattctaacgggggagggacggcacaagttgtcacccttatgggaaggaccattcatagtagcagaagtcactcggccgggatcgtatcgtctcactcagacggacagcacagagattgggaactcctggaatatagaacacctcaggaagtt

SEQ ID NO: 138626 - DNA, 1146 bp, Zea Mays
caaacacttagctaatctttttaacttcaatgatatcttctccatagggcaagaatcctgtaatggctgattccacgatgcagccaccacatccaaaaacccagggatcttaggcccaaaactctcgaaatgaaaccgtcgcttacccaagcacacctctctgactttaagagttaggggacactgggacagtgatatgaaactgaggtagcgttactgtgaagagaacaatcaggaaaagaatcttcccaacctgtagtgcagaaaacatgatccaatttcacaagggtaggctcatccctctgattcgatcaagtaaaccttctaccaatcaaaggaatctcctttagctccaaggaattaacaagacctctgaaattacccaacattgtcctgtttatgttggaaatattcttatcctcctctctgtaaatcaggttaaaatcaccacacaagatccatggccccgcacactcctccctgaccaatcttaattcatggagaaaagcttgtttaaggttgtcctgatgaggtccataaacacatgtgaaccaccagcaagaaccagactcctcctgaaactggactgagacagagaagttcttcacaacagaatccacagagacaaaagacccatcacaccaagcaattaacacccctcctctagtcccctgagatgagctataaacaaaattactaaatccagccctaagaatagacagaatatcaaaatcagagatggaacataatttgatctcctggagacaatggaaggtttgatatcaagaaccagagttttaaccgaatccctcttggcacgatcattgagacccctcacattccatattagaaaacaactatactccataaaaacaaacgaagactaccatcactgcctcacagaccaacatctaaacatgcccatcttgaggcacctcccaaccaaacaaagcgccaaagcagcgatatgctcattagaaagcccagtatcaaataattttgcataattgctggcatccttgaaggatatattcttattatcatcacaaaatcccggatgtcggcacgcatgagcagccgaactggaactcaactccagagggaatttggccactctcctacttcgccttggtcgaaaattacttg

SEQ ID NO: 138627 - DNA, 613 bp, Zea Mays
aaaggagtaaaaatggaatttctatgaattaaataagttctggatatatttttatacataaaaaccatttcccaaattatttttctgaatttcctaagcttctggactgggcacactaatacagagaaggtcggggtttaacctgtaaaatctaccagacacagcctactcccgcggggacggcgggttagttttctggaatcctgggggtctcttttgcaaaatgggcaaaccaaggggtacgggacgatctacaccgctcgattcagtttgaacgcgcaagattaggtgagtgggattatgaatcgatacgcagcatcgaccataggatttagatcttatggttgagattagatctcggctcaccgaaccggtatcaaccgagggcccttagattaaaatcgaaccgctagagtttttaagtagtgcagatcacgcgatagccgctcgatcaaggatctatggtccaaactggattgcgtgaagggttctaatctgagcagcccattccctaatccacggccgtgacgctgtcatccctcacccgagcacacgcagggcggagcttcctcacggcggcgccatgccccagagctccggcgagcaatcccgg

SEQ ID NO: 138628 - DNA, 601 bp, Zea Mays
cagtactctgcccacggtgacagcggcaacaatggaccactaagcgcgttcccgatgatctaaggcagctcagttcaattgggcgggtcggtgagtatccagagcatgcaagggtattgaaacaatgacacggatggcgagatcaaacctgaatttggctagccacggcgggaccaaaaccgtgtggtgttcttgagtaaattgggggaaatcctaaattgaagctctctagtgattgattgaggacaatacttggtggctgggggcgtgatgatcctacggacccgatgatgcgcttaatttatagcaagcaagagcggtggtcgggaatttgagcgacgacgcgcggcggtcggaggagtggaaggttactagcgcagcagattggtgtcctattaccgtggcagtcattccggcgatcaatagagagttacaatgggtcacggcgatgcggtggaggtgccaaggcacgtggcacaaggtcgtgaagaggcagtcacctgcgaggttatccgaagtgaccgtgacaggctcggtacggtggccggagtagattaatggccggagtttatccacggcgaggattcttactcgatcccag

SEQ ID NO: 138629 - DNA, 405 bp, Zea Mays
gagaccgattactttgcgccctagaggaagatctgcaagtgtcaaggtctggttatcttcaattgatttcatctcctccatcattactttcctccagctcggactcctttctgcttcaccaaaggagactggttcatcagcacttactgcatgtaactcctcatctagcaacctccttgttgcataaccaggtagagttgtggattcaagtagtccatctatcttgcagaacctgagtggatcatcttctgctcgataggcatctagatattcatcaatatttccctccggtggtgaagcaaattccactccctgcatctcattctcctcttccaatacatgcactgcatcacatgaggggtcagaggggacagacccccagcaaattgctcatctttagattcc

SEQ ID NO: 138630 - DNA, 518 bp, Zea Mays
cctttcaagtatgttccaaggaaacgacgttgtttgaaagccaagacttagatatcatagctgaacaagattccctctgggatccccaaactgtttatgttacttcttaaggcacttatgtcaagtgttgctcatttgtatgctacttcccatgacacttatgtttgttgttgccagtgtttatgctacttcatatcagtctttatttcaagtgtgtaaaacagaagtggtaccagaaattctagttatgttatctgtgctgatcgtctatgccattcatgtccagattgtcagattgttaatcgttccaatccaatggttggcgtatatctagtatcatattatccttaatcttcaagttttatgcaacatattatagttgcatatattatatacattaggtccttttttcaaatttaccatgttaattatgttcactgtggccattgtctatgctactacatatctggtttatatcaagtgtgaaaaccgaagtttgtgcctgactgtttagttat

SEQ ID NO: 138631 - DNA, 542 bp, Zea Mays
caaagacagataagcatatgagagataatttaccgatatgaacaataaaaggcaattagttgactcacctgaagattggagaggaacgatggcagacccaaggcagggggagctatgtcatggcttgacgggggaagatcagcaggaacaatttgaagggcattgtaaggggtgatctcagccccgccagcagataacagacttctcacatctagctcaccgacctctaaggcgacttgtttgttcaaagctgtggaagcatgcatcgccgtcgccccatcggaccgaggtggagacgacccaacatggacgtccatggaggtgtgggaaggagagcccacctgaacaccctcgggggctgggttgcagcttgcgctacccaccagagctggatcactaccggcaacaccctcgggggctgggtaactgccagcaccaccctcgggggctgggtcttttgtagtagccacctctaaggctgagggctcctccatcacctccatgggagtcgagcgactcggaccagcatcttggcattgaag

SEQ ID NO: 138632 - DNA, 623 bp, Zea Mays
gacgagacgataacttgggcaacaaacaatacaagcacacaacatcatcgttagttttgaccaaaaactaaaacacaaagatgttgaaaacttgcggctgcttcggctcctcttcgatctctgttagaaactgtgcagtcctgtggcgtagcgaccacgagctccaacttggtgtgctggtgtttgcggaaagagaagatccctcaaagactccttggcctctggctcctccagatccgccgtagctattgtacaatgcccaaacgatagttgtcatagttgttcatttttgacctatgcatgatggcatcggacaaattaaaaagagatagcaccgtcaagattttgagctaggcagcccctttatattcccatttgtgatgagtgttggtgatttctttatagtcttctggcatcttaattattctcatacgcgagcacatgcataaacacaacactattattatctggataaataaatggctaatcattttaaagggcattatatgtccctctcgattagtcaaaaataactgccatcatagttcggttgcaagcacaagcttgaagactgaattatagacgccaatatctcttctgaaatttgaaatagacttttggaa

SEQ ID NO: 138633 - DNA, 371 bp, Zea Mays
acgatgcatacattttttatccacctcaaaaagggaaatatattcacatattgtctcatcaaaactgtaaggtgtgtcaattcaatatgttactgaattgaacttagacctctctgaatatgtacagtgggctgctgaatcacatgataaagtgatgtgctgcaacagtaaccactgttgtagtgcatgacaagaggtgaaaacaccttcaaagaccaccacgctttggtgtgtcctgtatcttaatcagaggtaagggcgtgaccattccatcaccattatttaccaaatagaagccctccgcttccgctgtgcagcaacaatagtgttaaatgaagaggcacccaggccatctgatacgagagttgtac

SEQ ID NO: 138634 - DNA, 568 bp, Zea Mays
gtgatggtcgtgcctcaccgggaatcacagggctatttatagccgcagcggtccagcgataacctcacggccacggatagcatcgcgagcgcatgccgaccacgtgggtaggagacacagtgagggagatcacggcatgagtgccaccgcgacaaaatttactggtcacggtggccgccggtgaggattccggttggactcggggaatggcgccacatacgagttatccatccccggcattatccgctcctcaccgggcacgaatcaggacggcggcggcacgaatcgcggcggggatcgtcggcggcgagttgagctggcgtcctaatcctttcagatactgtaccatggcgtccttcattcagttggcctgatagcccaagtttagggttaaatttctcttaattttctgtggcaacatacctagagttctgcagcaaagttgtagaccaaagattcagctataattttgccacaacaactatagccaaattcctactgcatcatgtttgaatttgtacccaaagtttctgtggttacactgtcagtctgaaattcagacttcaac

SEQ ID NO: 138635 - DNA, 285 bp, Zea Mays
gacattttgatgagatgataagaaagtgattgtgaaatatcgatcagttcgttcatacttacatgcagatcatccttgcctgacagatggaatgttagggtgaggttgacctgaccttttgagaggatagtgatgatgagaaaggataaggtgttacgattgaacacaccagttggtgtgtcagtcattggatgagagagcgtaatggttgattggctgcactggaaataaatacaacaaggacatccctccccattcggaaacgggaatggaggagcatctcag

SEQ ID NO: 138636 - DNA, 782 bp, Zea Mays
aggacggaggcgatggccggaggtgacttcggcgaggggacggcggacggacgacgaagcaactgactcgtggggccgcttggtcagagggagcgagcgtgcgagagagcgggtggctgacgggtggggacgccttgtcagcgagagggagggcggggtgtggagcggctgtcgcgcgcgcggaagcaggccgaagatgggccgaatgcggaggagtgcgggcgcgtgggaaggggggggttgcgggtgttgggccgagatttggtccaacagggagaggagagggtttttccctttttctttttacttttcaattcccatttcccattttgcccctttttcttctgaacaaaatattttgtgaatactctaagtgtttagaaaatagaatctaagtgaggtgctttgtgatcaaacaaaatgtatgcatatgatgaaagaaaacttagtggagatcttagaattagaggatgaagggaggggaaaaaggtagattagggtttcaaacctagattaggatttttgggatgctacaaacctaccccacttaaaggaatctcgccctcgagattcagacggggctcgagaaaaggtaagggtattccttcctcagagagtcctcactttcccaggtggcttcctcttctccatctctgctccactgaaccttacagagtctcacttccgaattgcgggtccttctgactgctgagtcgagaatcttcactggcttttcccggtactggagatctttttgaatctgaattgtctctgcctcgata

SEQ ID NO: 138637 - DNA, 1000 bp, Zea Mays
ctcgtacagtcatactaggttacttttgtttccaaaagttcaagtttcggatatctgaaataaataatctggaatatttgctcaacaagatttgataatatggtaatatgcaatacttcagtttggaatgtggcggagaacactacttttttggttggttaatcttgtatatttagtctgtagttgaactatgcttccggatgaatggtgatagaatgttggatggtttgttttgggccttaattttttgcttgctcactgatggatcatgatggaatcttggatggtttgtttctgatcctgtgttgctttgatatgctgatatgttgtggtggtctggtgatgaagtttttggctccgcttgtgatttaaattgttgcctgatgatcagttgatgctcttcaatctgtagtagttcagttttcctgtataaaatgctgcattggatagttggtcatgatctattttttcgtgtatattttttgaccgggatatttttcgtgtatagggctgctatttctatccagaactacctggaaagtggaaaaaatctagaaacctagtagtaccccgtttcactttttttggaagtatgtcaatatgccatctggttcatgttcacctgaaaatctgaagtttaggagtgaaccaaaatgaattaaggcagggaggctgtaaaatattgttttgcactggagtggagagtttgaaatagtgtgggataagaggtaagataggaaggctggaggcagcctgttatttgtgtttccctcgttaaaggccactccacttgatgtattttgcaacccttgtctgcgttgatttcatggtttctgtgagaaataatgtgtgtgttcaaaatataacactatggccgtaagaggcttaattgtatctcattttgtattgataaactagtaaaatcagtctcatacatttgtgcagaacatgttctttcttttaatatatatggtggtgattcttacgtttgacggcgtag

SEQ ID NO: 138638 - DNA, 604 bp, Zea Mays
cttgtgagcagtaattccttgagcttctgccacatggtgattgattctagtcgaatagaggaataccatgtcaatgcaatgcccttactaccatgatgaaaacttagctagcactactgtatttccaccgaaggaagcaatggttgcttcataactcctcatcaattacttagtgacagattgaccttcatatttgggtagttgaggatgcctatacgaaacccgctgcaatgctgcttgtagattagctgacagtggagatgttgtcgaacatgaaggccacatgattttgctcttctaggtgaaggtcccttgcatcatggcagccttggcgttgcattttcttttcctcttttctcatgcgatgcaactcttctataacttcatcaatttgctgccgaagatgggtgacatgaagcatcttatgcctctgtacatcgacttgtttttggaatgtctcaagattcttgagtccttcatcaacatcatattgttgaggtggttgttgtagggcctttcttttctcttgccttcggcctaggacttcgggttgatgggcaccttcgacatgtttctagccttcggggttgagagtagagctagc

SEQ ID NO: 138639 - DNA, 359 bp, Zea Mays
gtgaaggagatccgacgtgaacatccatggaagtacaagagggagatcccgctcggacaccctcgggggctaggtcatggcttgcgctacccacttgagccggattatccccggcaacaccctcgggggctgggtcgtgactcgcgctgcccacccgagccaaatcatcctcggcaataccctcgggggctgggtaagcgtcaacaccatccctgagggtcaagttctctacggcagccacctctaaggctgaaggaccctcagttacttccataagaccaagacgatccaagtcagtctcctggccctcaagaccgcgctctaaggtcgatgaggtgcgggacgctgcccgggatgac

SEQ ID NO: 138640 - DNA, 717 bp, Zea Mays
tgtcttcgggagaatccaacaccttgcgaagactctcctaccatcccaacactttgtttcgataccccaatcttttttcacccctgcggttcaccaggggctaccctgaccgaagtcgtcgctgcctcaagggggcgaccttcaaaggagactccgctacagctaaatctagcgccacaaaataatctaaatcatcttccgaagattcgtcatctatccaagcaaacaagctccctagttcttcaccttccgaagaccacgacccaacatcagattcctcagatgcgtcactactaagaatcacaacatttccacacaccaacatatcatcattcgtgttatcatcaaggtttgcttgcacaggcctagtcgccggaacctgcgcagcaaccgaccttcagtatcatgcacaaaacgaacactaacaaactattcctattacattttttcaacctgcgtagaagcacccgccgctgcaggaccctcagcgccaccttcttgaagcaaggatagctcctccgctcccgcctccaccgcagcatcctttcgagccaccgagctctcgaggccggcgaggtcctccacctcttcatccctcatcgcctgcgaagataacacaataacgttttagacaacgaacacacacaccaccctcaccaaaacccaaaacatacttgtgcccgcgctcggtcgaccctctctcggatgacaccgcgt

SEQ ID NO: 138641 - DNA, 557 bp, Zea Mays
attggaaggatctgcctgtatgtgatttggctgacaggataagggaggaaattatggagatgtttcacaggaggaggaggattgcacaaaagttgcaaggaaggattttaccgtcggttctacatatcctacacgccagaacaagaggtttaggtcatttatcagtacgtaaagctgacaactacgttgctgaggtaagggacaacaatgatgtgcattctaagcacattgtcaatgctcagctgcgggaatgttcttgcaatgagtggcagcacacgggcaaaccgtgtatccatgctttgtgcctgataacagcacaagaatttagggatgtcaggatggaggattttgtcgatgactactattctgtagctcatttcaccaccgcgtactcaagggtggttccatctgtgggtgacaaatcattttggccagaagttcctttcacaaaagaagtgggtgctccaattggaaaacgcactgtgggtcgacagaggaaaaataggatgaaaggatgccttgagggaggtagtggaaaaaagaaagttaacaatgac

SEQ ID NO: 138642 - DNA, 529 bp, Zea Mays
ggagggccgactgggccagcacggagtgagacgaccagggctacgtcccggcaattatcgacagaggatccactcggcccgagatcaagtaccccatagggttaggcacagccaaggtaggtccctagaccatggagccccaggagctaggacaaccgcagccccaatagatgaatcctacggtaattttgtataccaagataattgaatacatcttggtagtattttgaggtagggtcttccccacgtattgcaacacatttattaaagttaccaaaatcacaaatggttgacttaacaaagctaatatgacatataatttggaaatggattttatatttaccagacacgacctttccagatttcgagcaaaagaattcaaaacatgaaccactaaattatgagcaaattactaaatacgcctaaccaaggctataatctggacggcaagcagaaaacagcccgtcccagatacaatataccccatgtataaattaaaaaataatgtcagctaccataccttctcgac

SEQ ID NO: 138643 - DNA, 650 bp, Zea Mays
cctaggcgtcatcattattcctcttgtgttgcgccgaccctagccttcgtatcctgagcctcaacttcccccatcgtgttgtaggctcggtaggccatgagtgagtcgcagatctatgacttcgtaggtcataagtggggcacttggtctgtgttcacaagtcatgagtggaaggaggaccaaccttctgccgtggctcagcacaaggcatattaatttaatatggtcagacatttatgacgagggcagtcctagaaacgctagtaaatcgagaggaaagcaatggggcttaccctttgctaagggccttgacgaagtacccttagtactatttccggtgatggcatcttgacggggcccacttggccgctacatgccgatgcctcgccccacctcgacggttgcctcacgaaccagggcggcagtactaatccctccccaaaaaatggaccacggggtggattgccgacatgtgggctcttgggtgataaaatgtacccctaagcgtcgtgaaacgacctcgagtgtcgaacgacataggcctcccagctctaggctcgaagttagactccacccaaacccgtcctgacgtagggaaaatgatggcccgtccgagaacaagagtgtcacaacccaaccaagtaatcgag

SEQ ID NO: 138644 - DNA, 384 bp, Zea Mays
taactgctaacagttgtaacttggctttatacagttccgtagccgttcagaaacatgttatgtcgttgcaccagaacggcccgtttctgacgttttcaacatatatgtgccacatatcaagcatttgattggcaacaagctgaaatgtttgccctcccagcatcgaccaatgtttgaatcaatgtttgatgctcatgacaaggaggtggataagtactgtgattctcttcagctgagccatcagatgattgtttttaagcagattcaactatctgagacctttggtgaaatgatcgatgaagttctgagggctgcaacgcagcgcgatacatagcaagaaggttttaatatttatgtttaattttttaaaaaattaatcaagct

SEQ ID NO: 138645 - DNA, 1012 bp, Zea Mays
tgaggagcagcatgggaagattgtggaggtgatgatggatgtaaaggtactaaagtttgaggaggcggagatggttggggatgagatgatgatggcgttggtggatgaaccaatttgacatcccttcgaggccaaaggatgaaatttttgatggcttgtccaagtgtctcgattccttcgggcccagggatgtctagcatgtcgtcctcagatccttggatgaccattgccacttctaccctgcaataatcatctggtatgtcgcttccatgaaacttatgtcctgggatcgcaatgctcgttcctactttcttcgtgcgattattgttaataccttatcttataactaatgtgcacgtcactggccttgttatgtcatcaactggataacggaccttatttcctgttgacgcgacagagccttgggatggttgtacaatcggtgcaagctggtggttgagctactggaattatttgcagctatggagtggtcatcagttgaacagacatcgcacttgccaactgctgcatcaattctggtggaggatttgatagcatttgagacatcaagtctttgaactctttctttgcctcctgcttaaaataatccgacaacacttctttgtatcgatcacgtttcttgtacaaaccttcccactgtggtccgaatccttccttagacgagattcctcgtacacggcctggatgctcagggttaccgagaccagccattaggatgtctctctccctttgtggcttaaatgatccttggctctgcttagctgtcattacatatatgtttttcgcaacttctttgacatttggatcatcaaaagatacaccagcctcagtttcccagggttttctagcacgaatctaatttgccgtcctttcaccaagttgctcggaaagcatcggcaaccctgcggccttcttctcggcgtcttcttgtctccatttagaaacttgacgcttgtaaccacctgtgcctaagtggtggtggtacttgttc

SEQ ID NO: 138646 - DNA, 691 bp, Zea Mays
ccagcgaattcttacgggggaagggtggcacaaactgtcaccactatgggaaggaccattcatagtagcagaagtcactcggcctggatcatatagtctcactcaaatggacgacacagaaattgggaactcatggaacatagaacatctcaggaagttttacccctagctatatctcaaaagctattgggacgacaatgtattctgtaaactgggaaatatatcatcaataaaaagacttcaaaggcactcaaattgttcactgtcaacctgcatgcttacttaactcgaggtgaccactataccctactaacggagcaatcgacttaagtcggcaacggcttaaggcggtgcgacatgctcacgcttacttaactcagggtgaccactataccctactaatggagcaattggcttaagtcggcagtggcttaaggcggtgcgatatgctcacgcttacttaactcggggtgaccactataccctactaacggagcaatcgacttaagtcggcaacggcttaaggcggtgcgacatgctcacgcttacttaactcggggtgaccactataccctactgacggagcagtcggtttaagtcgataatgacttaaattggcacggtacactcgcatctacttaatccaacacaaggacgtttgcaattactcatcttagggcgacctctatgc

SEQ ID NO: 138647 - DNA, 613 bp, Zea Mays
ggttaaaggaacaaactttctggaagattggaagaaagaatcagctcagctgaatgcatgtctgggagacaacggtagcctggaagtcaagccaaatctagaagatctcatatgcaaggctcaacgcctggacgcagagacagccaggcttatgggaagagctcgcaaggagcaactcccgggaccttaggacagacgagcaaggggtcctctggttcaagaaccgcttatgtgtgccagtgggagaggcacgagaaaccctgctcaatgaagcccacaactcagcttactctatccacccagggaccaccaaaatgtacctagacctcaaggccagatactagtggaaagggatgaagaaggaaatagcacagtatgtggcccgatgtgacacctgtcagcgaacaaaggccgaacatcagaagcctgcaggcctacttcaacccctcccaatacccgaatggaagtgggaaaaaataggcatggatttcgtaatcggactgcccagatcacagaaaggaaatgattccatacgggtaataatcgatcgtctcaccaaggtggcccacttcgttccagtaaagaccacttttggaggagccgcccttgcccg

SEQ ID NO: 138648 - DNA, 436 bp, Zea Mays
gttgaaatgacctgtatgtttcttatattgttttgttatttctctcagcttaccaggatccccatcgtctccttgccgtttgcttaaatgaaacttggagcaaaaagcaactgcaataaactgaaattgaatattcagaaactaaaactgcacaaactggaactcgactaaatatccagaaagtgaaactgcacaagttggcgcaaacaaaaactgaatattcttggttcagaagattattcagactgaactttgaagcttattaagttagttttttgtggtgtctgcaatgggcacaaacagatcagttacgaacagactgaggggaggtgttcgactgagcatgttgcttcactagttctcacttttctccgcggatttttcttgattcaccatcaccatcaacaacattgaagatcacctctaggttacagct

SEQ ID NO: 138649 - DNA, 404 bp, Zea Mays
gggtggctgggggacagcaccagctcgttgacggcgcaagtatggagctgcgtcgcgggaggaaaatagagtacctcgacatccccctcaaggatagcatcaaggggtggcgtctcgagtggttcattgtggaaaaccactgcaagtccctaccctctcggtcagggaggcatctagatgtccgcactccaagctgggtagaatctccaacctcttcggagataacagaggcaaaagtactgctttccgaggtctgcttgttgaaagacagaggtctgactgctgaggctctggtcgctgatttcgtcttcaagaatatcccgcttttgaaagatagggcgtacctagcttatttgtacagtggtatcaatgactctactcgggttacaaccaatagaatcccc

SEQ ID NO: 138650 - DNA, 294 bp, Zea Mays
aattgacatacctgccaacccattcaaccgaagggtacttagacagcaataacaacaagcagagatggatcctccaaatcctccaccagccggaactgatccagcagttgcaacccagatgcggataatgcaacagatggctgatactatggcagatatgcatgcacagatgcgacaggagcgtcaggaattgcgccaagagagggaggagatgtgcaaagagcgaagggtgcaacagcagcaagcaccactgccaccacctccactaccagctccaccccgggacaagcaccg

SEQ ID NO: 138651 - DNA, 763 bp, Zea Mays
atgacgccgacatcagttcatcgatcaaatccatgtttggagatcgtatcaatggtgcaggaagatcaaccaggagggaaccagtttgcctcctgccattactgcacatgggcaaacagatactgccggaggggcaattactccaccagcaatattgagggcgccgggggttgatgatcagaacacatcagatgcgtcgatgatggccataaatcaaggaggacaacatctaactactatgcgaactattggtgagcatgaacaggacacaccagttattctgcagagacatgtaagtactttataaattgtttggattttcattagtgtagcttatattgcatacggtagaataattgaatcaagggtaatattatgcaactagatcgtatgacatgttatattgtgcatacgatggaaaattaggtcagacaccatacatcgtacatgttattgatatttgtacatacatatatattttatttatttgcacatgaagttacaattgatccgaggttggtacctaaagttggtatgacattcagtggtgtggatgaagcatatcaattttatagtatgtatgcatatgaagtttgcttcccattgaaaaagtatagggaacggaaaaattgtaagtggttgaattgctcgatggaaggaaagagtgcggtaaggggaatatcgaacccaaaggtacgtaataccagctcgaagcggacgcaatgcaaggccggtatggaacttaaaaaaatttatgatgatg

SEQ ID NO: 138652 - DNA, 643 bp, Zea Mays
caacgcttcaggttgtgggggtcggggcaggggcagcggagaataagctggtcttgtggaagaagtggatataaacttgcgatgatctgctcgccccggctccgagacttcctcctgcaattgggcaagagcacaagcagtatcgagagtcgaaggtcgctgtaacaatacagcagacttgatatgatcttttaagccatcaataaatcgcatagtgtagaagcgagggtctgtgtgagactcataagccaatagctgatccactattcctgagaattgttcaatataagctgctatggtggtggattgtttgatgtggaaaagttgtctaatgagggcgtcatgttgatcccgaccaaagcgttcaaggagtagtttggtgaattctgcccaagggaaaaacctaaaccgcgggcctaatgattgcaaccagcgagaggctggtcctgtgaagtgcattgtagacacacggatccaggcggagggatcaacattgcataagtcaaaatagtcctcgctacgagtgatccaaagacgtgggttttcaccgtcaaatggaggaaacggaaccttcggtaagggaccgaactgtgaggactgcgtgaaccccgctggggggctctccgctgtgactgtgtggtga

SEQ ID NO: 138653 - DNA, 310 bp, Zea Mays
ttttagggcgatttggcctttccctgagttggatgtgcttaatgaatttttgggctccgggcaaccctaatttgttgggcctcggccaaccccacctaggctgggtgtatcatctggtatcagagctagggcccattttaagaaggtgggaatgatgaggacatcctccactattacccgttggcaaagacccaattggcccaattggcccaattggcccaattgtagttggacgacgaccgtgtgagcctcagaattatcccacctcgcttaacttgggaggaggaagccactttaaaagggagagcca

SEQ ID NO: 138654 - DNA, 390 bp, Zea Mays
tagcaatcatacaactatttcaatcctagcaagtcggctaaaccaatcccaaaaccataagccatcaaaccatgcgattgtcgatgacatcgtagaaaaaattgaagaatctaacacccacgaaaccccctagtttcatagacaaagtgaaaaaatattgagcgacaatacatctatggcctatcctagcacaattgcttcttactcattctcagtaaccagtgatcagtccttggtcatctcgctgcccacccacaatatcagccattcagcctagtgtcgtatatatatatatagagagagagagagaaattaaatcagtctaattttacaaaacatcattccattaccgagctaacacctttagacaccaattgacaaaaataaaat

SEQ ID NO: 138655 - DNA, 450 bp, Zea Mays
tgtgtgttcaataaagagagagagttcccttttatagtttcagggttggactttaaaatggggacttgttctctagggacttgtattctgcggggaggagatcgaccgatgggctttgggtagcgtggttcctctagtgttgtccgtagggttgttcgtggtcgtactccatcatggcgtactgtcttgtccactcgtcgtatgtgtcctttttgcttgtcttccgctgatattctcgtggtactacacgggggtcttgcaaatcagtcatatgagttggtgggtgtcgtgcgatattgcctatcgtcacgagcctacgtcacttattggcgtgcgtaagcatacatttggtatggtgtatctattgcacactacccgatattctggtcactgtagaagctctgatgctgagatacttcatgaatagggttggtcggcccctcgaggatg

SEQ ID NO: 138656 - DNA, 503 bp, Zea Mays
gaaagatggcgtcagtatctacagagggctgaatttgtgattagaacagatcacaaggcattgagcttcctaactgaacaagtgttgcaatcagatctacaaaagaaagctatggccagattaatgggattgcaatacaagatttttttataaacaagggaaggagaacatcgctgtagatgcattatcaagagtgggtcattttatggcattacaaaccttgacagaggtgaaacctttatgggtacaggaagtgcttaattcctatgtgactgatgaagaagctcaaaggttattggctgaattggtgcttcatagtcccaatgaacaaggtttttctgtgcagcagggtgtgatcagaagaggttctcagatttggattgctcagaactcagcccttagaactaagatcattgtggcattacatggcagtatagtaggaggtcactcaggctgtctggcaacctatcagagggtgaagaggctattttggtggaaaggat

SEQ ID NO: 138657 - DNA, 1068 bp, Zea Mays
cctatctgcgcgttcgttctagaaaggcaacttgctcggattgctcacatgttctcaagccaggcgccgatgtttgtgtatggcaagcagtttacagaggagaaacaaaagattctgtatgtcacttccttccatctttgctatccttacttcaatatggaatggatgcatcatctcacatccgctttgttctctttatacgtgcaggtactgttgtgctgccgtgatgcaaggctcatcaaaatcaagagaaaccatcaatcggaccggtgcctatgcttgtttgccgttattttctacaaagaccagtgcccaggcagcaaagaaaaagtgatatccggtacaatagctgacgtagtgacgatagacgacatctgcatcttgcagaatctccaacctgaggagctccaggatgggagcgtgcgatggaattctgcagtggactgcttccatcataacagaagcaagctgctaagtgcaagattctccctggaagtcgcatacctcatagttttgtctagcctgaggagaatggaattcaacatcaagatggtcgacggcaacatcatttaccagatcatcaaaggagaccaagcacgggatagtattgattccatgagcatacctccaggttttgggaagaacatggacataatatcattcaaaccacgtggtgaggctttacgcccaattaccagaacagttccagtcactcaggttgaagaaggcaatctcacagaagatgggtgtatcgccgtgaagggagaatctgatagtgcacaagatgtcgagatcttgtatgcgcatgtggacataagacgctcaaagcgtatgaaaactcaaccagatcgctttactagttatgatgcgcgtaatttcaaccggacctacaacaagaaagaagcagatggaccatctactaagtatgaagattcggagagcggcttgagttgtgattcatcagagcagagagaatcaagtgatgaagaggccttagaaaatccaaggtctatggcagccgagcacaagtacccagtgaaaagaaatcagtgctctttgcctgtaaaa

SEQ ID NO: 138658 - DNA, 1405 bp, Zea Mays
ctggcattcaaacatccgatattacaggactaaaattgtctcctaatccaaacgagctcttagtttccctcgtaccaagaaccaggtataaaaaacagactatctttagaagcctcttacatttcgtttcaaactccactcgataaatgtctacaacagtgttttacatattcatatacacaatctgatggccaatgcctaacaacttacatagtcatatgcacaatctgctggccgaaggtccatactacctggtctccttgagtttcctataaattgagctgggtcgtttgtattgtacttcaaaaaaggactagaaaagattagcatacatgtttcgcaaggcttctcagccaggacagtggaccgcaggagccaagaggcatatagatattgaacggaagataacattctcgtagtcactgcagctagagaaacacatggtttgccaagggcaaaacgcccgaacatcataacaaccagcaaagctcgtgcacaagcttccgaatctgagctataatcaatgtagttaatacatagcattatatatgagaataatctacctgacctaataacccgctaggcgcaaaaaggggcaaaatttgcaggttaaagcttcaccatgccagaaaggcagccttgaagacgaggtcaagttttcgtactatatatatatatatagttatatacctacacatgctgatggctgtgcaaagggaaatgatcgtatcattcgtcactttcaacagatcgaccacttccccgatcatctaatgaagcgtgcccaagtagctagcttttttttacgctattacacctgatggcttcaaggattgatacatcgtcgtgcaaggtgaatggtacgctgaaaaattgagtggaaagtacatacgggttaggaccaagacacgttaatttggagggagcatcagttttgagttctggtagtaccagttgaagtccaaaccagcaaactttgagttttctgagatctcaatctccacccttgcttttctggatgcctgctcataaataaatgctactgttagtacctactagactatcaaaaatttcagtgcgttcttaaaattattataagcttgctgtagtgtgagccctttcgggtgcatgcataagcataagtcaaggaattgtgtgcaactcaagccaccaagtagattgaggtcaatatgaactcaaaaacctgtgtggactagccagcaagcaatgtggaatcagctaggtgctgccttatatgtaactacgtaattttcttttaggtgtgttgcaaagaaaataagaaatatgaaattcgtctcctgccttgtgtgttctgcatttgttgcttttcaccatgtatacttgagttcgtgtctaacctctaagttctgaaccaacgaaacca

SEQ ID NO: 138659 - DNA, 515 bp, Zea Mays
tttacttttaatttataaatttagggataagaagtttcttgttaattagaaagtgatggatatctatatgtatagccatttcattatgtaggataaaagataggaaggttagggcaagaataaccgggggtaagaaagtttacggtgaggaagaacgccttgttgggtggtaatgcatcttgaagattgaggttgacttctctccttccttgacgtggttgatcttttccttctccggtcttgctctttggtgtctccatccgggttcgggacaagaggctaagatagatttgttatgtaggtcaagttgttgggtatggccgagatgatctaggtcactagtttaagcttaagtggatttgaagtatggcttaatcctttgtaccagcattaagtaacttacactagattggatcatataagcttagataggatctagattagacggaatatgactagattaaactagtgaagatctcattattttggactagatcatgatcatggtggggtaa

SEQ ID NO: 138660 - DNA, 549 bp, Zea Mays
gtgatttactcattctttgtctgcatcatgacaagtgacaataaatcaattagggaaccaacaatctaaaggctggaaccatttgaggaaatgtgcatattaaacaagggtacctgtcacatccccacaccaactgcttcatccgcgcctcctagtttacaaaaatatcatgcaaactaccttgtgcaactaattcagataatatgtcatgagccaactcgctggattcgaccacatgagccaaggaaaacacatatctaggcatggtgaagcggaacatgaagtaatatagatacctttcgatgatctgaggcacgttctgggcagcgacgtctacaaccacccacccatgacgactgtggtcgaggatacctccgtgcgtgggctcttacctcaccgcaatacctctcggcggatcgagcctccctcctcttcgacggtctactgatctgatcgtagactcgctccatgaccgcgactgtcatcgtactctagcaccgccagcaaggtttctcttgatgtccgcatacaggacccgcaccgactccg

SEQ ID NO: 138661 - DNA, 343 bp, Zea Mays
cttgatttcattatcctcaatcgcaatgtctaaatctgataaatcaaatggcaaataacccaaattatcccaacgaacagccctctgtctcactccacttgttcctagtactgtatcaaaatgatggtgagcctcgtgcagtttatctcgttggctggtcaatattgattcatcatgaactagagatctaatgtagttttttcttcttctgttgttggccatcaaatggaagaatttattattcgcgtcccccaggcgcatccaggttagcctggaatgttgtcttgcaattgtcttttgaatggaggcaaggccaagaattttggatttaagccatttcctg

SEQ ID NO: 138662 - DNA, 1473 bp, Zea Mays
agatcgaagtggtcccagctagagcaacatggtggatctaaagccatagatctatgttctatgtttaatgtttgttacttcagcttgatagtagtgatgcatatatgtttttagtgaaattagtgtcgttacctctcatttcctttcctaatttactcatttccctcattgcctatcttgttcttactagtatacaaagtgatagctcacattatactactattttgactatgttatataagtaatatagcgatatataattattctaaaaccgaaataagctatcattaatgtttcatcacagttttatcccacatacactgaagccttccatgctggcatctttttgcatacacatcaaacaaatgttcaagaattcaagtacaagcagttcatcaactccttatatggcttttgtttttctatgtttggccctacatatgaaacttctgctacatttagatccttagttgctgcctgttttgtaaaactggtagctaatcatttatcatagtagctgcttcatgtttcccttatgccagtagcagtgcgtttacttaatcctgtttgttttgctagtattcatgatagagtccaaagtaatatcattgcagttagtggtttcgccctaatgaaaactatatagcttatatccccctgttagtttaccaaattatgacatctatgaatatattgattatctatgcttctcttgtagattaaaatagtaccgctacagattgtgcaagggcttgtgaggaacaaccgttattctagtattgttgtcatctgctactattgtaaattcgtaaccagatttttctccagcatataccttgtattaaatgttgcttattcgtgatagcattatttaactagatctggatgtctagctttctttgtttaattgcaattgaatggaccaagaagcactaggatatatacttttctttagtcttagtaacttttctctctgcttatattgatggttgaatgaatcataaagcactaggatttatactaagatcatgatggtgatgcaatgtaattgaatatttatttatctattcatgttttatgtcacaagcacaagtatattatgaatactatgccactttggccattcttgtttgcttgctttgttaatggcaggatttccttcaaagcagatagttctctatacgattttgccatgacatgtcgtatggtatatatgggaatgttacaaacgtcatgatctttctactgtcaattacattgtcgatttttgaataataattatgtttttatgttctgtgtaatggtgcactcatatatggaacccctcctagtgcagcgtgaactcatctttgaacttttctattacagtttgatggaatacatcgagtgtcatcatcaagtactccagtgaagaagcaaccaacagtgcagtttcatgttcagaattgtgtttcacatagatgttatctaaaa

SEQ ID NO: 138663 - DNA, 1034 bp, Zea Mays
gtcatagtcctcgtcaaatatcatcagcagattctcatacgctgctaagtcaaaaggacgattcagtaaaaaaaaaaggcaaataattaatcagtgttttccttgtacgaaccaactcttgtgcacccctcactacctgctgacccctgctgttaacttctctaccccttttttgtctttttctcagaaagtcttgggcacattcactgattcacattagtacattacacactccaaaacatctttatatacacttgcgataactcgccaggcaccacttcgtcctctgttggaacacatttgattcctgtccaagatttttcttgagcaagcaaaggaattgaagctacaaatacttattttggatcctaatgaccgagatggtcagttctgtgcttgtgcaggagacagtcagccaaattctatccggtatagttcgaaggtacgagggcaaagagaactcgactccaaatgacgacctggagaggctggagatggcgcatatcaagctggaggcagttctcgagacatccagcaggtggcagatcactactggttcaccgctgtcgcggtggcgcaagaagctgaagcgggctgctcaggagtgcgacgacacgctgtgcgagcacaagaagatggtcctcgaagaagaagagacggaacaggaggtgaggaattcttccttccccagaagactagcgcacgctaccagatccttcgttttctcagccttgggccgccgcagcaacgacggcgagtgcagctccagcaggtccgccgtcgtcagaaggttcgagtggtttgcggacagcgctagcgagttcctgagattcgtagagctgggcggcacgccgtcgtgccgccgtcacatgccgctcgcctctttcgccaggcacctcttcgcgggcaaggagctgcagcacaggatcgttggtggggatgagcatgaggagcgccactcgtctcttctatggctggcgcccttcgttacggaagagcatgggacagaagcctgcctggtgcttatcaagaaa

SEQ ID NO: 138664 - DNA, 432 bp, Zea Mays
cttatgttgtagttactgagttggaactaagcgtgtgtttggttgtgggggcaatgtgggatgagttggagtgagcccatttttggcagtgtttggcttggggacgatagggaagagaccgtcgccaccatagagggagtattcccctagattcggggtcagcactgtccctttgaattgagggcatgggtttgtcccctattcatgttgcctgctccgttctgatccctcaggtggtggctgcagaggttggatcttggtgcagggagctggacatctctgagtagggcagcacaacgagttccagtcactccaacacgtggcaaatcaaaccacgcggctcggtgttgagtgtagcatgagacatagatgcatggttgagcacaagagtgccatggctccatccctaaccgagcacacagtgccatggct

SEQ ID NO: 138665 - DNA, 728 bp, Zea Mays
caaagccacccctcggtcgtgctcgcccacgcctttaagaccacccccagacgcgcctcacatcactcctcactcaccttcgctggccagacaccacccttagctctggcgagctctgcgccacccgcccgagccacccgagcatcggccaccacgaccagccatttctagagacccttagcctcaatcgagcccttggatagcttcctcgtggagccgtgaagcttctccaagcaaggatcatggcccttcctcatcggaatagcgagatcatcatcgctggacttcggtcgcccgccaccacgcatagcccgagctatctggtgagccattcttcaattcctcgcacccatgccttcccgagcacctagtgaagctctctgaccagtttaattgaactctaccaccctggataggctggatcccttaccgccgacaagctcccccgcctgcgcacatggaccggcctactccgaccatccctggagacgatccgcacctcgacgtgaccgtcacgacctcccctacaccctcggccacctcaccggagcaatctcgccaccggtaagcccatccaccctttccttcggcgcgggtactgtttaattgggagaaggacctcgggttaggttcagcaaaaccccagggggttttttgaactgtcagtggtaaatttgaatagtgacccgaggactagtctgtaaggaaacttaaaaaacattcgcaag

SEQ ID NO: 138666 - DNA, 573 bp, Zea Mays
tggatggtgtggtttccttgaacgaaattcttcatgaagtgagacagaaaaagcaaagtggggtggttcttaaaattgactttaaaaaagcttatgataaagttaattggcaatttcttcattgtatgatggaaaaaagggttttggggatatttggtgtgattgggttatgaggactgtcagaggtggtaaagttgccatcaaaactaatgatgtgattggtccttattttgctactcataaaggtgttagatagggtgatcctttttcgccccttttgtttaaccttgttgcacatggcttggcatgtattattcagaaagctcaggaaagaggtctgatccgtggccttattcctcatatcattcaaaatggttgctgttgtcttcaatatgctgatgatactatcttcttaattcaagattgtttggaaggtgctagaaatcttaattttattctttgtctttttgagcacatgtctggtttgagaatcaattttcacaaaagtgaaattttctgcttaggggaagccaatgagtttgagaatatgtatgctgacatttttaattgttc

SEQ ID NO: 138667 - DNA, 361 bp, Zea Mays
gttcgcacgtcttttcagcttatggtagcagttactaaaatgagcataactccttattgggacgtccaaataatgaactgtttgatgggctagaaagtagacttgaagacacttccatccacttatagaacaccgtctaactccttgtattctgtctgcagtgatgcttggaattcgtaccatgtgtcagtcatctagcttctggttgcattcccatgctaaggtgatgaaccaccattttattcatgcacaccataggcttcttggttcagatgtctagaggcttgaatccatcttgatcccatgctggttcatacactccatcattcctaaggacattgaaacaagaactcaaaagcat

SEQ ID NO: 138668 - DNA, 496 bp, Zea Mays
ctccacataatgagattgtttcagaataatcccattctcacccttaatcagttttatgtttaatataacatctgcctctcccaaatccttcatatcaaaattttgagataaaatgatttcacatcatttatcacatcaatactagtcccaatgattagtatgccatccacatacaaacacaatattactcccttaccaccaacaaaccgatagtacacacaagtgttggcttcgtttaccacaaagcctgctgacgttagagttctatcgaacttctcatgacattgctttggcgtctgcttgaggccatataaggatttccttagtctacacaccacgttctcctgtccatgcgtcacaaatccctctggctgctttatatagatctcctcgtcaagctcaccattaaggaaagttgtcttcacatccatttgatggatgagtagatcatgactcgcagcaagtgctattagcacacgaattgtgatcaatttgg

SEQ ID NO: 138669 - DNA, 588 bp, Zea Mays
gtctgaaggcactgggtctcttctggcagtagtcttagctagagtgtcggcttcctcatttttgcttctgtctatgtgctgaagtgtgaaacctttgcactgcttttctagactatgcactacagttaggtattgcaagaggactggttctcgagctatgtagtcttttttttatttgtctggcgatgatttttgagtcaatttttatgatgttgattctgacaccaaaggtccttaacttatggagacctaagataacagcttcgtattctgctatgttattggtgagtcgtctgtctcgagggagaagctaaggcgggtggcatatttgtacttggctctagatggagttatgattattgttgtggcaaccgccctcgcgtggtaccaagcgccatcgcagtgaatggtctagactgtttcggcatttagatggttcaaaggcagaggccctttccagtcaactatggaatcagcgaggacttgggattttatggcagttctagactcgaagacaatgttgtagcaggagagttctgctacccagttgcctattctggcgaaggcctctagattgctgaataggtc

SEQ ID NO: 138670 - DNA, 356 bp, Zea Mays
gtgcgacaaatgcaggaaaaggaaggggtgactacgtaaaaatctcgagactcagtcaatagtagcactggactgcgggtttattccactgaacccgaggggttcgtgtgcaaaaggctcgtagcgaaagggtatggagcctctatggccgttcgatctaaaaccgacgcactagattagatcatcgcgttataaaacgggtagcctaccccgatcgtccgatccgaaatcaatggatgaagggcgatcctgccgtgatctaatctaaaccatccattaccgcatcaacgttccagatcccacagagcgaattggtacgccgtgatctaatcacgatcgtccgtcttgaatcctac

SEQ ID NO: 138671 - DNA, 781 bp, Zea Mays
cgccttaagaacagtgctgctgatgcagagaatcaagggctgttgaaggagtttgctgatattttcacagttcctactcaattgccacctgctagacagtttgatcatcacattccactggttccaggagcggtgcgccggtgccagttaattctaaaccctatagatactcaccttttcacaaggatgaaatagagcgtcaggtctgcattattgcaagctggattgatcattcctagttctagtccctttgcctctccagttcttttagtgaaaaagaaggatgggacatggcggttttgtgttgattacagacgactgaatgatctcactattaagaacatgtttcctatgccattggtggaagagattttggaggagttggtgggtacaatttttcacaagcttggacttgacaactggataccaccaaatcaggatggcagagtctgagcctctgaggaatataaaactgcttttaaaactcatcaagggcattatcaattccgtgttatgccttttggacttacaaatgccccggctacattccaatgtgcaatgaactcgattttggccccttttctcaggaaatttgccatggtttttattgatgatattctcatttatagtgattcttggactgctcatctttgagcatattcggttggtgttcacaaaactgagggagtatcagttcttcctttaaaaggactcaatgtgattttggcaaaactgaactcacttatttgggccatattatttcacagaagggtgttgctgc

SEQ ID NO: 138672 - DNA, 605 bp, Zea Mays
cccgaatgcaaagtgcctctgatgtatcgtaggatgcgtttgagggcagccaagtgtggttcccgtggatcatgcatgtggagacaaacctgttgaatagcataagcaatgtctgaacgggtgaatgtaaggtactaaagagctcctgcaaggctgcggtaatcaatgggatccgaaactggagtgccatcagaggggagcttggggttcacatcgactagtgtagtcatggcttgcaatcactcataccagctcgcccaagaatctcaatcatgtactgatgctaggaaagatagatgcctgaggtagagtgttgaacatgcatgccgaggaaatggtgaagtctgccaacatccttcataggaaattcttgctagagggcattgatgatacgtcgtagtgttggcagggaggaggcaatgagcacaatatcatccacatacagaagaagataggccatgtctacacccttgtgacagacaaacagggacgtatctgttttggcctcaatgaaatcgagttgcagaaggtgagaagtgaatctgttgtaccatgcacggggggcttgcttgagtccataaagagagcggttgaggcggcataca

SEQ ID NO: 138673 - DNA, 628 bp, Zea Mays
gccgttcatcatcaggaatccccccgagcgaggcaaccaaggcactaacttcttcagcagagggccgcactctaaggcccaaactgccatcagtgacaggaggattcgacacaaaaagagtgaaggctttgggaggaggcaggttccaggctgagaatgccactggggcaccaacatttgacactttgcctctaaggatcatctcaagtcggctcaccaagtctgtagagggaattcttctgttagtgacctgagttgagtcggttaagcctcgatacagataagttgggtatgccctgtctttcaacggctgaatattcttgaaaacaaaatcagcaaccacagcttcagcagtcagacccctctctttcagcaatccaacttcagccagcaaagcacctgcctcagctacctcctgatttgtgggagactcggtccagcttggggtgtgaacatccggctgtcttcccgaccgggggggggagagagtttccataattctcaactatgaaccactccaagcgccaccccttgatactgtctttgagagggatttcgagatactcagtcttcctcccccggcgcatctccaagctagcacccccaaccaattgatgttgtcccccgg

SEQ ID NO: 138674 - DNA, 482 bp, Zea Mays
tactgtttggaatagctcgaagttggtaggcagtgctatttttcagaatgagtatgctctctcggttgagttctctgctatttcgtcgaatgaatcttggatcatcacaaacatttacgcgctctgttctccgcatgggaaaattgaattcctacactggttctccaatattagcatgccctcagaaaagctttggttgattgttggggactttaaccttacgcgtaggcctgaaaacagaaatatcgctggggggacattaacttgatgttgaaattcaacgaggcaattagtgagcttgatctgatggaaattctcctccatggcctttccttttacttggtcgaacaggcaaagggagccccttcttcagagactcgattggtttttcatttcgcaagaatggtcggtgtgttaccctgacacccacgcaacaacgctgcctagggatatctcggatcatgtaccttgtctgatttctt

SEQ ID NO: 138675 - DNA, 526 bp, Zea Mays
cctccgacatcaacgccgctcccttcgcgttcccgtcatccacacacctcgccgagaatcccgtcgcccacgccctacctccttcccccaacaccgctgtcgcgccctacctccttccccacgttgtcttccactcttcccccaacaccgctgtcgcgccctacctccttcccccaacatcattgtcgaggcccgcggtggggcccggttcctgtcgcggccagcggtggggctcggttcctgtcgcggcgctagaccgccgccgccatggaatgtcgaggccagatccgctactactcctcgatccggccttgtgggcatgcgcggtggtgatggaagacccgatcggcgcagcccaactgaatgccgcgcaagctgtgacattctcatccgtgtggtgccaacaaccacccccgccatgcgcggcaagcgacggatgcggcggatagttggtgaccttcaactcctgcccgacgcacggtcaaggaagagcaagccccaccactgctgagaaggaggaccaagc

SEQ ID NO: 138676 - DNA, 529 bp, Zea Mays
cgggtgatgactcatgaagtcccggtgtttatctctggccgggggtgcatactgctgctactggggttgctgattctgttggttctgttgtaattgctgaaccgcagcagtgagtccttgcagaatctgcatttgggtggcgatgaactgctccatgttgggattaggtggtggtggtggtgcttgttgtccacgctggttccggttgttaggtccttgacgttggttcaccatctgatttgttaggaagtgaagtccttagaaaattgaggagtagaaaagattctagagggaagatggcttaagttttacaaattttatatgttcttatggccatcattccataagaccatagcactcaaacaaagattcaaatcaagcatttcaaccaatcaccatcacatggttgatatttattaatataaaaactgaaagatagtttcatcgtctaatgcgaagcgtaacttattacatcatgatcaacactcctaaagcagcctagtgacggatccgggctctccatagcgca

SEQ ID NO: 138677 - DNA, 385 bp, Zea Mays
ataaccttcgccccagtttgatctctgacacagcccaacttttcatcgtcgacatcgccgaagattagtgctcccggccggtacccgcaggagatggcatactctctcaaatcatctttttcagcctttgtcaattcttgtcctactaagttttggaagttgaagtcttcttcttccgaagtatcttcggttatttcctgtctagacactgtggctatggtctctccggcggctgtagcaacttcttctgcatctatttcctgaagtgctctatcaatgtcagaaagcatactttctagagttgcaccttcggcagtcgcagcttcagcaggtgcaccttcgtcggctgtaccttcctcaatggctagagtttttgaagctgaag

SEQ ID NO: 138678 - DNA, 877 bp, Zea Mays
ggttgagttggccctttttgaatgtaagctcttctaacttgatctcgaatttcaggacgaaactcataaatttgttttctaagtgctgggtcacttacaatatatcatccagattaaatccatatccatgattactatcttgaggtggagcagaaggttgaagtggaggaggtggtgggtgactgccttgtgctatcaaatacctcctcatcgtagcaatccaaaattcacagcatgtcgatacttaaattaaatcaaatgttcaatcaagtaatcaacaatcaataattagatactataaaaaatcaattaagaaactgggcgtcgagcagtgcctgcctggccgctgccactggccgctcagccgctggtcgcctgggcactggccgcctgggcgctggcacctggtgtgcagtgcacagtgcagggacgcagggtgcaagactgcaggcagcaggcgtgcagctggaacctggcgagcggcagcgctatggggactggggatggaaatatggaataatggatgacctagcgttctagccttcactttattattgggcctaattaactaatgtagatatttagtcttagtggactgcatgcagccgaagctcgggcacgtgccctggcttgtcgggctatgcctctgctactgatatccggagctattggattattatcttttttttggtttaatacttttaaggagatcccaattttaatgttttgggagcaatattttttgaagctgttggagttgctcttagctggttattatacgctaaagtttattgtgagctatattattaacgttctctaagcgcgaagattccggccatgcaatgcacgtaatgggagagacgacggcgacggagag

SEQ ID NO: 138679 - DNA, 955 bp, Zea Mays
ctagacgtgagccgcgacagcaggaaccgacagctttcctagtaagcttcggtggcgaggaagaagaagtagacaggtttgtggctaatcctttcttattcaattcgtcatctctgacggtttatcagtacaagtatttataggccattagatgggccagattacaatcaaagaaaagccacacaatggcccagattaaccctaatgcttctagaacctcatagatctccagatctactactacaccgaactcacctctgcttcagtcgttacatttccccccccccccaacagaactcgcttgtccccaagcgagggcatcaggaaacctgtttttgaccacataaaaatcttcccaggttgctgaagaaacaggcaaacctgaccatttaatcatcacttgaggcaatgcatgattacccctccgaaccaaccttctgtccacaattttctcaggccaaatccctggaccagacaaatctgccaccttgggaagctcagcaaaaactggagtatgattagggtgaaatgcctttaactgggatacatgaaaaacagggtgtatctgtgcattttctggcaactccaaccgataagccacatcaccaattcttgccacaattttgaaaggaccaaagaacttaaaggataactttggatatggcctgttaaccactgtcttttgagcataaggttgtaacttgagaagcacaaattctccaacctggaattccataggagttcgccctctgtctgccatttgtttcattctattctgagcttgtgccaacctctctataagcagttcagaggccacttgtctttcctgcaaccaggtagtaacatccctgtccccttcctctctcaaccaaggaacagccatcacaggaggtgtataaccatacagaattttaaagggagaacaatccagagcagtatggtaggtggtgttata

SEQ ID NO: 138680 - DNA, 605 bp, Zea Mays
ggcgtggcggccatggaaaagggagacgaggacggtggcgtggtagagcttgaggtcggcccgacggcgagctgcagtagagaccaaggcgagaccgcgaccgggcgagttccatggctgggagggcgcgcggccagcctggaggagcaagagctagggcgagcccgcgcgtgggaggaagacatgagggagataattgtgcgctgaagatagagagaggaggggcggctggggaagaagcctgcgcgcgtgggagataactcagataaggcagccagtgaaaaatatcagggggagggaagcggcggtagataggatcgactgtaggatattttccttttttttccttttctttttacacaataatcgatatttattcgtgctctcatatttgaatctagtaccaagatataaataaggtttaacttggttaaaccaaaatgacattgccaattacacagtagatttcttttgatataactgagacccaataaattcatctgttattcgaatgctcacagtagagcaagaaataacggaccagaccacatcattatcttcgagcacgatttctcagataacacatgggttcaagattattttga

SEQ ID NO: 138681 - DNA, 372 bp, Zea Mays
cttgtctacaaggtggcttcagtccatggattcaaatcaccaaaacaatgctggaggccactttaacatggaaacatggtgctcttgatcatggagtatgtgagaatcatcctgtattgcacattactgctacaggatagtgggttcgtctaggcagtgaagtgtcaaaaattaaaaggtggaattgtcataagctttatcttgccttgtttgcacaagagattcgagagattgagctttctgaaaattcagtgatggagcacctgagcttatttgatcataaggtacagtcatctttgcaattatatgagggcaagcaatctcttgcattatatttacaagccagtctagtgattactctagcactctcat

SEQ ID NO: 138682 - DNA, 1013 bp, Zea Mays
gcgtcttgaatcagctggtcaatattaacatacctttcgtcaatattcgaatttggttctagactacttgtgtgttgcactgaaacattaccttgaaaattccattcatcataattctcaagtatcccattgcacaccaaatgtccatacatgtcatcccttgtttgaacagtagtgtgcacacatgtctggcatggacaataaatcttgataccttcaggtttatctttaaatgcaaattcaaggaatttctctacaccagctagatatggatcagaacctttagagtaacgcagaagacgcttgaccaggccaatatccattccgacactggaacaaaatacaaccattcatctacatatgtttatttctccaaacgtaactacaatacattgatccaaaattcatagatagctatctttgagacattggtaactccattgagtaaatgagtagtcagtttcagcacataatgatgtctacacagcacaccaatatctccatggggaatgagagggataccttgcctgagcgcttgtggcggggagtaggccttaatgaagtcgtggggatcacgtccttcactgtgggacaccggcgcgatcctattcctcgtctcctctcgctgtcctacagaaggcgcgcgctgacttttgaggaggcggtggtgcgcagcggccagcagggcgttggtgtggctggcggcctataggtgcttgggtgtggccgtgtgggcgggcttggcaggcggcgccgggcgtggccagaaaatggacacagcgagcttggcaggcgcagccggacgcggccagaaaatggaggcgcggatttctgggatccagggaggccgagtccagcgtggatttctgggatccagcgcggaattgttggtcttccaaggatctagggaggccgagcggattgcaagaattgttataagaaactgaagtgccatccatacatacaaatctactagggtctgttggttagctggtgttaatgttgaacagttg

SEQ ID NO: 138683 - DNA, 1285 bp, Zea Mays
ctttcatcaaagtccaaaaagccatgaccgcaagcatttgatctaggtgtgtcgtttctctataagaagcttcgtcattgattgatgtcacaattggggctgtctacacacaacgattgtctcgctatcaaatggctggatgtggtggtggcattaggtccacgaggtgggctattgaggcttcaacacatttgtgcttgtccctggctttatggaaggatcctagtcacacatgatcttttccatctttgtaatgattttggctaagattggtgtcatcgaagttaagaaagatctcttaagtattgttggggcgaagtgtcaaccatggtaggactctgaaccaagacatcaacatgtccaatgctcgaggcatacgtgagggcatgcttcacatttgaatgccacaagtcggagcacctacaacatctggcaatccggatatcaatgtggtccaatgtcatgatggacttcatcgagagacttcccaaggttgattacaaattaatgatcctcaacctcgattggtcaaggacttcccaaggtcgatggcaaataattgattctcaaccatgattgatcggtggagacggtggcatgattcttctttgttgaggtcatatacttgaatggcatcccatcttccattgcatcgggtacaccttgtttttaccttttacttttaactttccaaaatgtgttgtttgatgcttccggctccaaatttcacatgagctccaaggcaactaacaaggtaatcaccatttacttgctatctatggtagctaattgtcctcgatagtgggtaaaatgtctcctttgggcccaattcttctacaacaattcttaccacttggcgcttgacatgatgttatgtgtgtgagtttgctcgtatgaatcaggcaagctatgtgtcgtctcggcaccccatgccatgcagaagtgtgccgagttcctcgttgacatccacagttgtcttgagcatgcttagcagattgccaagtgtagttatgatcatggccatcgtataacatcctttgctgccaggaattggttgtcgctccgcctttgtcatcacacacctgtagcggtggcaacaactacacgtctatcacaagagagtgcatgaagggaaggtgctagcaattgacagagtcaagacgtgtgtgtgtccatctacgttttgagggtatctaagtggggcctatggatagtgtaaaaaccaactatatggctaggtacttataagaggcaagacaagctataacagataaaactcaaattg

SEQ ID NO: 138684 - DNA, 418 bp, Zea Mays
ggcagttctctgatccactttcctgctaatttctcattcttgtcgaagactttctttctgagtgcttctaatatcatcccgttagctctttctacttgcctgttggcccttggatgtgccaccgaggcatatttgatctgaatgctcttttgctcgcagaaatcgaagaattccgaactggtgaagttggatcctaggtcggttatgatgctattcggtatcccgaacctaaatattatatcttgtatgaattctactgccttagctgaagttagagaagcagtgggtttgaactctatccatttagtgaatttgtcgatagccaccagtacatgagtgtatcctccttgagcttttttgaaaggtccaatcatatccaatccccagcacgcgaacggccaagttatgggtatagtct

SEQ ID NO: 138685 - DNA, 772 bp, Zea Mays
agcaatgtatgctgagatttatagtcttaaattatttggtaaggccttttgcttactaatagaatcccaatttgtgatgtcttatatgccaaaaaggcttccatgcattatatatcttcaggttacttcaggtaaaactttatgcatgaggaaagagagcacggaattaacttatctgtgttctatattatttcatttactttcccagattattcaagcactatagagcttgatatagttgttatagccacttggcaatataaataaatatataataccacacaacacagtcaaataaaatatagagccaaacaaaattgtttatgaaggttgcgcataatatgactttaggggcttgaacaattcacgcgagtacaagctctagtgtatatggcgtcaacacatgtgcggccatcagggctacaacaacaaataagccttcgcaacaagcgcaacaggcgcaattgtggctcggtagttgggtacaggacaagtccacgcaacatgcgcaacaggcgcaattgtggttcgatgatcacgacagacggatagtgcctacagggctgcgaaaaatgcgcgacccggcgatggcggtccgactcaacgggagcggtccgatgaaacgagagtgcaacatagcaatcacatgacgcaaccaagttcatacgacacaaatactgcgtcgtgttgccagggcgcagccaatgcttagccaatgtcaaaactcatctgattaataatttagtctgatcggcatatccggatacccact

SEQ ID NO: 138686 - DNA, 610 bp, Zea Mays
cgcaaacgcacgggataaatgatctttggctagcaaataaaggcgcatcacgacaaattggtgttagtggatttgtgaccatgggttatgagattgttgcaagaatgaactgcgaagatgggttgaaaacaccaaatcaagagccatgggaaggggaggatgagaaattcaagcagggtaaatccatacttctgcacactgcacgtttgcaataaatccacctttgactaaatccaaccaattcgcttcataccgttttggtccaattagaaaattcagatcagtctatcacaagggtagatatcataatattaacatagttaatttataatacaccaaggcaaatagtgaaatcatgcaggattatatgatgggaacataccagtaagaccaagcttgaagtgagatttagtaatgctgatgacttttctgaacatatgtgcagggacaacatgaacatgaaaacacatatacacaagaaaatgagacaaaaagtgagtgcggcactttattaagacatggaaccataaacacctcaataatcatataatagattaatccacctcatccattagaagcaccagtttcaacagttagtcgttcatgcaag

SEQ ID NO: 138687 - DNA, 307 bp, Zea Mays
ggcgagtccgcatcaaggagatcggcgcagaatcctggttcagcgcgagaatcgcgacatcggtagcggcggtccggtacggaggttcggctggattcgcgaggaagaaggttctgcggtccggccccacatggcggaggtggtaatcgatggtatacgcgcgggcagggagtctggtcggtggacccatgggacagtgatcgagtcagcgaggtggagttcggaaatgggcagcgcgcacgaaaacaaacgaaaggtgggttgaattctggttccaaggcccaatacaggtagtattcctcttttc

SEQ ID NO: 138688 - DNA, 656 bp, Zea Mays
aacacacacacacacacacgctggccggtgcagcactgcagctagatctgcaagtactgagtctgcactctgcactgcagcagcaacagcagccgcgctgccggtactgtaattttctgcatcgagcaacccagctaacaagaaggccagccatgccatcatcatgcatgctgctgcgttgcctgctcaattccattcatccttccttccttgttgcttgtcccaactccacggtgctagctccactgcgtagctagcggaatcacatcagtgaaagcactcctctgtaacgcacccactgggtcagtccgcctaaagctcaccatcgccagcgtcgggcgttcatgcgctcgtgcgcagcctattcagacgggcacctcactctcaaaacctaggctgagagaggagggaggcccgcccttataagtgcaacacggcccccttggctaggcgaggtggtactaaaccagggcatgcataccggccccttacatcccacccccctaagaggcccaaagctctcccaggcagcagcggcaatgtgggctccgataccaattgtaacgcacccactgggtcagtccgcctaaagcccaccatcgccagcgtcgggcgttcatgcgctcgtgcgcagcctattcagacgggcacctcgc

SEQ ID NO: 138689 - DNA, 421 bp, Zea Mays
gacggagccaaggtagggacaggtgtcggtgctggcgtgtgtgcaggcaccagaattggagctagtgctggcgtaggggtaggtgtcggagccaagataggggcaagtgttggtgctggcgtgggagcaggcaccggagtcggagctagtgctggcgtaggtgtaggtgccggtgctggtgtaggggcagacgtcggagctagggtaggggtcggggcaggtgtcggagttgaagacggtgtaggtgtcgtagcaggcgttggtgctagtgttggagccggagcacacattggtgctggcgtaggtgcagatgtactgggagccggtgtgggtccttgagccctaccatgagccacaagcacggctgtcacccaaaggagtaggagcgcaggtgaagctatggacttattgggcgccattg

SEQ ID NO: 138690 - DNA, 558 bp, Zea Mays
ggggcggctagggttggggaggagaggggggctcccatccaccggatcgagatcaatggcccaaactcgctctcccttttgagctcccgaccccagcggaaaaaatgtcaaaatatctactgttttctgaggaatggctcctgaaactccaaactctaatgccacagaacaagaaagaaaagagaaaaagaagtttaacttcttttcagaaaattggggtatcacactctaccctccttaaaaagaattcgtcctcgaattcgaccactccaacaaaatatccaaggtacgccatataacagcaccatgcaaaacatgggtccattattggtcttaattaacacaagaaattctacatcgactaattgtctaaggaaactacaccacctgacatcaagcatgaaccaacatgtaatgaagctcaaaccaagtcatagatgcaatcaacactacgatttcacaacatcgaatttggatgcagccatacatcagcatcaatgtcttaaaacgacactcttttatgaaggggtaatacgcactaagcacaacctttaccaa

SEQ ID NO: 138691 - DNA, 274 bp, Zea Mays
gcacagcgccgccgcactagagcatcatgacgaggccagggctactacgactgcgcgcgccaacgacggatctactctccctccctcacctatttctctcgcgttttccctccgacgctttcttcttctctcaatccagtggcgtatgggaattcgtgaactggagctaatctaagtgcgactcacgcggagggcaatgcggcatccatttgaagcccacgatcaaagtccccgccaatatcgtgccgacggcaaggacctatctgaccgggtt

SEQ ID NO: 138692 - DNA, 352 bp, Zea Mays
ggttgtcatgacatttggtctgaaaaatgctggtgctacttatcagagggctatgaatttgatctttcacgagctgttgggaaacactgtggaagtctacattgatgatattgtagtcaaatcggttgagtttagttctcatatatctgatttgcgcaaagcctttgataaaatgcgtcggtatggtctaaaaatgaacccatgtaaatgtgcttttggagtgtcggctggtaagttctttggattcatcattcatgaacatggtatagagatagaccctgaccgaattaaatccattcggaatgtgggacctccgacctgtaaggtcgaagtgcagaagttacttggcaag

SEQ ID NO: 138693 - DNA, 635 bp, Zea Mays
tgacactaaaacagagtgatttggagaaacagaggtcaaacgacgtgagagcggcatttgaacggtgaattgtgccacagagagtttgaaattcgaaatgaggcatgaaatgacttggaattgagccaatacttcacggataggtatatatgagtgaatatgagtgaagtttgtgcttggtttgaagtttggaggagaaaaaatatttttggcactcggttcaaaaagaattgctataaatgtaaagaggtggtgtaacaggtgtccgggatatcggttaggagtgaaatttgacgtgtgaggtactggtagtggcaggagtgtgctggaaaaagttggggtcgatttgagctattttgactggtttgggcatttcaccgaacgcttggtgtgtgggtttttggaataacggtgaaatggctactttagtggatgaaaccctacctagggagctcaagacctacaggggagcacactagagtactaggtacacacacatccacttgattcacaagattttcacaggatttggagttttgctcaaatggtggaaggaagagatgggatcttctcactggatggcaacagagagagaagggaggagaagactcaccagaggagagggggaacacgag

SEQ ID NO: 138694 - DNA, 312 bp, Zea Mays
tcatgggaattccctcccccccacggtcagggagacagccggatgttcgcactccgagctggaccgaatcccccatggaccaggaagtggctgaggcaggggttttgttagcagaagttggattgttgaaagaaaggggtctgactgcagaagctgtggtcgctgactttgttttcaagaacattcaaccactgaaagacagagcatatccggcttatctgtaccaaggcttggctgactcaacccgggtaaccaacagaagaattcctgccgtggacttggtgagccagctcgagatgatactcagaggca

SEQ ID NO: 138695 - DNA, 418 bp, Zea Mays
agcaaaccttgtgtcgtgcacaaatacgtgtccatccccacatcgcacaacgtgttctctcggtcgcaaaatgaaactaatctcccacactagctaagcacgcatggcctccacaaaactagggcttatacgcatgcaagaaactaaataatgcatgattaaccaacctaacatctccccctaagccttgcacatatgtttcatgtcgacgaggttgagcatggtttgtaactgcacaaactagtaccgcccaagagccttcgttaggatgtccactagttagagcttggtgttgatcgactccaccttcaccttgtcttcctcgatgcattctcgaatgtagtggtatctgatgttgatgtgtttggtgagatcatgaaaacatggttcttactcagctcgattatggattgtttgt

SEQ ID NO: 138696 - DNA, 655 bp, Zea Mays
aaaggatggcgcttggaatggtttattgttgagaaccacagaaaatctctccccccacggtcagggagacagccggatgttcgtactccaagttggaccgagtctcctacagaccaggaggtggctgaggcaggggctttgctggctgaggttggactactgaaggagaggggtttgactgcagaggctgtggttgctgattttgttttcaagaacatccagccgttgaaggatagggcatacccagcctacttgtacagaggtttagctgactcaacccgggtcaccaatagaagaattcccgctgtagacttggtaaaccggcttgaaatgatacttagaggcaaggtgtccaatgttggtgcccctatcgcatactcggcctggaacctgcctccttccaaggcttttacccattttgtgtcgaatcctcctgttgctgacggcggtttgggccttagagtacgaccctctgtagaagaagttagtgctttggttgcttcgattagagaaattcccgatgatgaacggcaagtccactttgaggtgcctttggatcctaatgatgcagaaataagtgctatgcttgatatgctggctgaagactcttctgatgctgctcctgctgggacattggcggtggtgcctctcccgg

SEQ ID NO: 138697 - DNA, 728 bp, Zea Mays
caagggcccatcaccaaacgtgccctaggctcaaggtgcgaggtaccttaggtcctctatacgtgagcatggaccattcacactgtatagagaggctccaatcttttatggggcgcgcggagcatccatatatggacggtggactgttcatgaagcacgtagagggtttcatacctgcagaacatagttctcgtctcctgtgaggaaaaatcttaggattgttatggggtcgacaaatctcccaaaacgtctctaaacgatgtagcataacgacgtagcattaagcgcttggagatcaactatcaaacaaagtcaaattgatgcaatgaaaggaaggtacttccgcgatatttctattgtgagggccgggggagatagcaatgcccttttgcccgaagctgacgaagtaatcgtttacagaagcttcatgaaagcgggacttcggttccctttagataaattgctagttgaagttttgaagacttttgaaatattccttcatcaactcaccactgaggctatcatcagaatgaggatttttatttgggccatgaggagccaggggttagaaccaaatgtaagatgtttttacaatattcacgaactgtcgtacgagacgaaggccactagcaaagaacaatatcacaataattttagttgctacagctttgtgcctcgctctggtgtgagctatccagttccaacgtttcggaataggtggccagggg

SEQ ID NO: 138698 - DNA, 1321 bp, Zea Mays
tcgtttactttcatatggaacacacgcaccaccaagtcagaacggtcgcatggttgttggccaggttcaaagcgtaaggcatctgctatttccctccacttggtattacaagtaaaagtcacaaaaagatcaggtggtccgtataccctacatatagccatcgcgtcctggtaattcatgacatggtaccttctaccaccagtgaagctggcaggtacaactaccctaccgccaatcgaatcagcactaacgaagcccttatcaatggcgtcagctatgccctgaactgtttctgaccgtagatcgctttggtggcttgctatgaactgtagcatgtttccctcgatagttgaatacacatcgacatctatttgatcacttaatctaccgtaacacgtatatgggtttggctcgtccaatctgtagtgcatgtgtctccttacaaactcaagcatcgtgacgtattttcgttttgatgaaccaacatcgtcatcaccaaagtacctaataccaagatggaagccatgtttcaccgtaaggaaacaacaatgggtattgcaaaggcatgtatgctggatgcaagcatgaaacacgtttgaggccgcactctctatcatgcacaagaacatcatatgtgtattccccgatcgtgtagtcgccaacaataatggcagcaatctcaccatttgagggtaggttgtattgtacatcatggcgtgtgttacagcctaacaatctgagtgttatcttttgatcaccctcgtgctcaaggcgttctctcgcgcatcggaacgctttgacaagcgagttgttttcattcaacatatcgagcagtgacgacaccatttcagggtctggctggccagcagcaccatcatcggtctcaaaaatgcctagcctattctgggtctcatgctccgtgtcatatgtgtacagttgggcaaattttggttgtgtcccacgctgtggaagtagggtgccaatcctatggtgcaccaccccattaattttgaaaacataaggtgtagtgtcgttatttatcgttttgtcgatagctgcaccgaaagaggtgaatgcaaacaatgaattgtacggccggataagcctcaagaaacgcctcgagcgagtacctccatcaaatttcaaaagatcagcaagcaaaggcggcggacgttcaaatggttttaggttcaccttccctcctttgcagcaaaggttgtacacaattttcctctaggtggagaaggaatcgtttttgacacgctcttggaaccagaaaacaacatggcaatatgggcatatgtgttcaggtccaccgtag

SEQ ID NO: 138699 - DNA, 583 bp, Zea Mays
atgatggcgggatggttggcaacgaaaaacgtacccatcatcataggctctgcttctggggtggtagccacttgggtgtagtagactcgaccagttttccttgtattttttcccgctttagtgctggccacatttaccttgccttgaaatgggctcccagaagtctattgggaattgaatttattttgttttggatagggacagtccttaatgaagtgtccagacttcccgcagttgaagcatctactagatgaactgggtaaggcagggaaacgagtaccaggggcactcggttgattgtttatagcatgggtaggagtgggacggataaaaattggttgcttgaagggatagagggtggacgaggaaaagagtgatttgggttcaaaggatgaatcaccaacctcgaccgcttctcagatccttgagaggatccttcacccccttcacgcccataacttgtttcctcgtcgagtgcatttccctgcatcaaattcttggcttccaccgaaagcgctgtgctcacagctttactataagtgaggtccaggcaagtggccatctttccctatagtcgatcatt

SEQ ID NO: 138700 - DNA, 382 bp, Zea Mays
atgctgacagagtaacgcatgagtaatcagcgggagtcatgatggctgcagtccatgcagcattgataggtagtaatccttttcccggtaacgcgggagtaatggtgagtcattgccctcgatatggtaacgtgtgagtaactgcacgacccacgtatcgtggactaagcatgccgcctgtcagtggaatggacaggcgcacgtcttaaccgtaacgaatgcgaaggcgcgtgtatcccagaggcgttatgccaggttccgcccgttggcttatgccgcgcgcagtatgccatgtggcagcattggtctctgcttgagcggggagcaggagtgtatgaggataggtccggatcccaccagaccaggtctggacatgtgtcgg

SEQ ID NO: 138701 - DNA, 1182 bp, Zea Mays
atgagtctgagttgaccactttagatagattttgtgagctttctgctgcgccgcgtagaaagaaatcgaacaaggctttctcaaatagaaaggttaatcgtccttctataaagccattttcaccctctaaaattagtttaaaatgaaaggaattttttggaattgtagaggtcttggggatttggctaaacacaattacttatctcacctttctagagaacatagactcgactttattgctctcatggagacaggtcgtagtgcattctcagagtctactttgagacatttttgtagtggcgtcgatttcctctggcaccttatgccacctagaggaagatcaggagggatgttgttaggggttaacccgggggtgtatgacattggagctattgatgaaggtaatttctattgtaagttccggctccgaaacaaagaggacggattcatttgggccctttttgctgtttatggccctgctcaagatgatttaaagaatgattttttagcggaaattgcaggtgcgtgtagttctgagacacatccgtttatcatagggggagacttcaatatcatgcgaagtgcggaagacaaaagtaatgataacttcagccttcgatggcctaatttgtttaatagtgtcatagcgaatttagatttgcgcgaaattgaaatggtgggacgtcaatttacttgggcaaatgatttgaatccacccacatttgagaagcttgatagggttttaatgagtccggaatgggaacttaaattccctaacgtctcagtgaaagcgcttgatagatctcggtctgatcatacgcctttattactgaatggtaaagccccgacgaacctggggaatttctctgagtttaaatttgagttaggatggttcattcgagagggattttttgatatggtttcttccatttggcaacaagaaaagagaggtgaaaccgccattcagatatggcaaaacaagataaggtcccttcgacaatatttaagggggtgggcaaagaactcagcggggttagtaaaaaaggagaaacaacatcttttgaaaatgattgatgatcttgataaaaaggcggagtttacttgcttatcgcctaacgagttggagtctaaatcttttgccaatgataggcttgccaatattttgagagaggaagaagttcg

SEQ ID NO: 138702 - DNA, 417 bp, Zea Mays
aacattgtattctgtaattggaaaagtacgtcatcaataaaaagacttcgttctcaaaagctctcgaactatttattatcgatctacatgcttacttaacttagggtgaccactataccctgctcacggagcaatcggcttaagtcgacagtgacttaagacggtgcgacatgctcatgcttacttaacttagggtgaccactataccctgctaacggagcaatcggcttaagtcggcagtgacttaagacggtgcgacatgctcacgcttacttaacttagggtgaccactataccctgctaacggagcaatcgacttaagtcggcagtgacttaagacggtgcgacatgctcatgcttacttaacttagggtgaccactataccctactaacagagcaattggcttaagtcggca

SEQ ID NO: 138703 - DNA, 373 bp, Zea Mays
attgaggtcaccgagacagcaccgatttctgaagtcatgaaacaatcaggtctagttgtgacagagggaaacactgacgaaggtactgctgttgccgaagctgaacaaaccgttgctgaagaagaaaatattgaagtggatgaggaagattatagtattttgatcccaacaaaacccagccatctagattttgagaaatctattgtgactgaagctgatatgcccatgatgatgaagctgggctacattggggaagttgaaaggaaacttgtccgatttgccggagaagagaccaccccaacaccgaagaatgatgaaatagtggtttttaagagcttcttcagagcaggactgcgacttcccctgaaagaga

SEQ ID NO: 138704 - DNA, 496 bp, Zea Mays
cagattggtaagtcttgttaggtcgtgttatgtgtttctcttgccttgctatctaggtggtattgtaaatgttcaaccctttttgcaaaaaaaacatttgttgcttgttctgttcataaaagaagacccccctttccccaaataatctagtggttcccgagtgaaactctaaaaaaaatcaaatcacatgcttgttttggtgtttctagcccttgtgtgttttacacttgaaattgcacctgcacaacttatagacacccatagcttgaccgctagatcaacccaagtctccttgtgcacttgtcgtgtcaaaaaaatttttgtgtctagttgcgcaaaccatatggaagctatgtttctttccataaaatcattgcccctaaaacttcatagcatttctgttaatcatccagctaatcttgttgcccacctctcctttcacctggatctggtaatccttttcctggtgaatcatgctagctgtatcatccgaatc

SEQ ID NO: 138705 - DNA, 316 bp, Zea Mays
tcaatgaacgcctcgagggagtagtgttcacgtcgaagtaaccaaaagagaacacatctcaaaacctgggtcacccaatggcagctcatcttttcatacggatcgtgagatctcaatgtggctgcacacagtccgacctgtatgggcgcaagagctcgatcagctctctctgagttcatgtacggaccaatggatgtacatttgcatgcctcgtaatcctgcttgaactgggttctttacactaccaataatagtagtattatacgtatgctctcccaagataaccaacatactgtaatgatggtgggattataag

SEQ ID NO: 138706 - DNA, 468 bp, Zea Mays
gtgttttagaagtaacagccgagttacaacgaaccacgtcagtcgccttggaaacggcgaccgagtgaagtctgataacgtcagcgtttttagaaatagcagtcgagttatattgggccgcgtcggctgttttggaaataatggccgagtgatgacatggcacgccagcgttttagaaataacagctgggtgatgactgggcactttttagaaatggcgcctggcctagaaaaaccacatatgtactgcactgtcgcatgcctctgcgttctgagccctagtcctgcttttctgcatccagaccttccctgttctcttgcgatattgctcccgctccgctcgccggcaagattgagatggcgcccaagcggaagactcaaagttcgtctgtcgcaatcattcctcccatcgatcccaacagccagttgcctttcgcaggtaaccacatgtctgttgtttctgaatccg

SEQ ID NO: 138707 - DNA, 537 bp, Zea Mays
aaaaagtgtagggtaaggaaagactccatccaagatttgtggatcttgattcatctgatgatctagcttgatctttgaaggcttgagttggggctgaagaccagatttggcttgactcttatccttccttaacacggttgatcctttcttccttcctttggtcttggtatgatcatccgagttagggatatgtagttaagataattgtgggtaggatatatttcatggggtaggttggttagaatctctgttttgttgttaggttgatacagagggtttatgcaaccatttgacgggtaaggtagttacatatggtcaggtagttgtatatggccaagttagtctggggcacctatttaggttaagtcatgtttatagaaatagggtctaatctatatcaccagggttaactaacctgttaagtaattcaatatagattgggtcatattatattagttgggttctggattagcttggtatggcaagattagactagataagctctaatatttttttgtgggttagatcgtagttgtt

SEQ ID NO: 138708 - DNA, 443 bp, Zea Mays
cttacaaaagtatcgcctatgttgctcaagatcggccagcaccctctaccccacctttggatgatgaagaagaagcgtctttctctgccttatcctcattctttttggaaggctttgttatgaaacccctgagtctatcaccatactccttcaggttgataggatagtttattgaaataagctagacgcgatagacgataaaacagtgttatactataataataacaacaatgtgatggtgatgtttgatatgtttgagttggatttttgtttgagtgcaatggtctgatggccataagagcattaaaaaacataaacttaagaaatttccctctagaatcttttctattccccacttctctaaggacttcacctcctaaccaatcagatggtgaacgctcgtcaaggacccaaccacaaccggaaccagcatggtcaacaag

SEQ ID NO: 138709 - DNA, 527 bp, Zea Mays
tccggcgtgatcaccgcatcggcacggtggcgccgccgtgcgcggacagccggaggggggaatagtgcttaccgttgatcgatgggggaacgactaggattagattcttctgttactggttggggtatggaatctgcaccgtctgatcgggagagagcgggtgagattataggaagtgtgccgcttcgaccacattcgttttgagccgtcgatggcgtgataagcgatcatgagtgagatcaagacacgaggggtggtgctgaccgtcgacatttgatcaaacgactactatttggtaccggttcggttatgagcttgatctaatctaggccattgaaagcagacccgacggctctggatggctcgtaccccttcggtcgcaaacaaatgcaaaagaaccgatgtcgttttaccaaataaacccgtcatcccgtgccattataagatcattacagattgacccaaacatttatagatcagtccttgacctttgggaaattaatgtcgccacccatttttcagttaac

SEQ ID NO: 138710 - DNA, 590 bp, Zea Mays
agcagaaaggaagaaaaacaaaaaaggggagtcctcgataaaaaaagggaagcaaaccctcaatccccctagcaaatgtgcaaaagtgtactaatcaaggggtttggtgaaaatgtcagccagctgtcgatgggtatcaacatggcacagatcaatgtcgcctttctcaaaatgatcacgaagaaagtgaaagcaaacatcaatgtgcttagtcttcgaatgagcataggattcttggcaacacttatggcactcatgctatcacaaaacaaaggcacatgatgaaaatccaagacaaaatcatgtaaagtagccatcatccataacaattgcgagcaacagctagcgacaacgacaacgacatactcagcatctatggtagactaagcaaagctagactatttacttgtagaccaggaaaccaatgagtccccaaaaactgtcaagtcctagaagtagacttacgctccaagtgacatctcgaataatcaacatcagaataaccgcacgaagatagaatggaagaagaagaataccacaaaccaaactcatgagtgaatcgcaggtacctcataatctgttcacagact

SEQ ID NO: 138711 - DNA, 452 bp, Zea Mays
attacatctgaccactaggcgcagaccgtccggctcgtctatagaagccctagcctctgtgccaggttgcagaccatccgatcttctgtcatgggccgtccgcgctgccgtagagagcaccaccaccggtactcatcgcagtgattagcgtccagatcggcaacatcacgtcctctatgattggaaccacattgtaggttttatacataaacatgtagctagtgtcgatttgttcttattgattccaccatgtactagacatgcaactaattcatgaaaaccaaaggccatggccatggttataccttaagtccatgtacccatttttccctactactaattaagaacgcagtgtgggcgcccggcgtggccatgcccccgcctcgcctcacctccccctctgagttgtcactgccatactggtcccgcctgacgctcccctcgcgttgccc

SEQ ID NO: 138712 - DNA, 437 bp, Zea Mays
acgaatcagcacaacactaacttcttgagggagaactctccagacagcaagtggcagtaaatcttgtagaagaatgtggttgccatgagtattaagattaactatctttttttcattgacaagaacattatgtcgtatatcagcggcatatccatcaggaaacttgaccccttttaatacttgacaaaacaatttcttctccacagagctcattgagtagggtgcaggaggcaaataaaattaattagcttctagttcaataggatgaaggtcgcttctaacacctaaagcttgaagatccaagcgagcattcagattatccttagattttccagcaatgtccaacaaagtattaattatattttcacacacattcttctctatgtgcatgacatcaaaattatatcgaattttcaagtccttccaatatggaagag

SEQ ID NO: 138713 - DNA, 1209 bp, Zea Mays
cccatctcagcccgtagagtgtcaaacagagcaaatgtgggggtggaaatactgtgtaggttcaacatgacttcatctctgcgagacaacgcatcagcagctccattgagtttgcccgacttgtactcaactatcatgtcatacccaaataatttgctgacccatgtatgttgagggatggtggataactgttggtctaggatgaatttcaagctgtagtgatcagtctgaactgtgaacggtcgcccctagagatatggacgccaatacctgacagctttaaccaagccaatcaattcccgttcatatgctggcagcttttgatgatgaggggctattggcctactgaagaaagctatggcgccctcaccttgatgtaagacagccccaaacccaactctagaagcatcacaatcaacaataaagcgacgagtgaagtctggcatctgcagaaatggtgatgtgatgagggcttgtttgagcaatgtaaaagcctcggctgcttccggtgtccaacggaaagactcccttttcaataaggcggtgagaggtgctgctattgttccatatccagcaataaacttccgataatatccggttagtcccaaaaatcctctgatagctcgcaaactattaggaagtggccaggtttccacagcagaaactttgtcgggatccatggcgacccctgttgcagatatgatatgtccgagataggctactgtagcagcctcgaacaagcatttggagcgtttcaggactagttgatggtcacagagggtctgtagaaccaacttgacatgttgcagatgggttgtccagctattactataaatgaggatatcataaaaaaataccagcacgaactttctgataaatggtttcaatatgtcattcatcaagctctgaaatgtagatggggcgttagtgagcccaaagggcatgactagaaactcaaaatggccacgatgggtgcggaacactgttttttccacatctgctgggtacatgcgtacttgatggtagccacttcttaaatctaacttggtaaagaatacagcaccacggagttcatccaataattcatcgaccactgggattggaaatttgtcttttactgttttgtcattaagggcgcgataatccacacaaaacctccaggaaccatcagactttttcacaagaagcaccggggatgaaaaagaggag

SEQ ID NO: 138714 - DNA, 833 bp, Zea Mays
ctcccccctctcttccggcccaggcggcccaacccgcgcgccgctctcgccccctgaccactgggccccgcctgtcagcacctcacctctctctctcgcgcgaacctctctcgtggacagcccgaccccacccgtcagctccttctccctcgcccatccctcaccggcgcgatcgccgccgagcgcccctcgcctcgtcgcctcgccattaatgcctgccagcccccgcgacaaactccgccgctgtgcttgagccgaccactcacccccggcctgcccgagccgtcccaatcggcgttagcgccattcccgtacccatggcgagctcgccggtgctcgccatctcccccatccccctcccttccccgagcacctataaaagggcccgctcgagcaccgtcttcgccacacaacaccagccatcctcactgtcctcctccccgagccgttcaagcgagcgccgccgtgtcccctgccttgctccggtgagctcctttccccctctctagcatctctctgttcaattaagctatggccaaagctccgccacacactcgcgatcactcgacgccactctgccccctgtcatggccggaaacctcaccggtggctccgccgctgcgggcgcccgccactgcgccgtggaccggccgccataggcccccgcaggccaaattcgccccaccatcgtgacccactccaaccgcccgtgcttcgccacccctcccccgccagaggaccggatcgacggcggagaaccaccgcggagctcgccgccgaccggcccggtcgagccccccccttcccctccgttaccagtagcgccgtgagcc

SEQ ID NO: 138715 - DNA, 530 bp, Zea Mays
gcagactccgagctaacggctctcgcaattctccgcagctcctattggtccatgaaaccaacaggaacctacggacgcctttccacgaacagattaaacgcgcgcgagaagcagcgccgccatggcaccaataagtagtcgcgaaacacgcagcaaacggcctaaaaggtttcctctttctcctctggaactgacctgatcggtttcccacgacgacggcgactccagcagccgcaaatccggtaggtttcggaatcgagggtcggagactctggggttctggaaggaggagctggtgaggaacgaaacgggaatgaatgaatgcgaatggaaagaaactgactggggatccgcgaagcgagggagagcaaatgcaaggtgttttccgttaaattgcggtccgtggcgggctttgcctgaatgtccgggtggcgggtagtagttgttgaaaacttccgccgctaggacagttagatttcctttttttgggggtggtgtggtgttggggagactacagttatagtgttgcc

SEQ ID NO: 138716 - DNA, 1000 bp, Zea Mays
gaagacaattgcacagaggactatcctaatcttctttgcagggcagatgcgtggtcgagtttgacctgtacttctcaagtattggggagacaaggatgctgatatgagaatgtataagtaggctgccacactgtactatattatataataccataaagcgtgccaaagaaagatgatagttactataaataattgatgagtggttgtgtgcatatgtcgtctcatatctgaaggtgatcaaattgttagtgctcgtgcatgtgctgattgaaactgaaacaactgttggcagtgatgatatgatgttaagatttacctagagatagcttgttaagatttgctcttcatataagaatatctcatgtaatttgctcttctctataatctgtccctattttactctctctttcatgcttctcctcttgatataccattgaacataaagacaaacaaccttaagaacactaatattttgttgaatactttatatactattgacctgttgcaacgcacgtgcatctaactagtaacacaacaacacaacaagaccttgagaacctacgaaatctggttgcatctcaactgatcctctagatctctgttactcttagtatcgtcgcagagtaatgtagtgtcacattctgaccaattctcttgatctgcccctctgatttccactgatactcttagagcttgtttagtttcgttgtaaggtattgtaatgtcgcatcctgatcgattctttatcgtagggtaatgtagtgtcgcatcatcacgacaccacctaaaatttgttgttgttttccagtacaaatagaaaacacttcagcgcctagctctagcaagcttgtctattaagtctttcgagccatatacgctgtttatggctcacaacaaaatcgcatctcgattcgtcatgctatattcacaattagcttaccatggaaaaagaacagcatggcttgggaacccctaatgttccataccgactcagatattt

SEQ ID NO: 138717 - DNA, 1433 bp, Zea Mays
gcaagcaccaagcaggagaagaccgcagcgcagagagagagagaggggtggcagcgaaaacccaaacggcaacggcaacggcaacagaaacgagaacccaaaacccgcgcggcgcctcaaaaaccacccaaagcgaagagcgcggggcagagaaaccagagcaaagcagcccaggcaggaagcagagagccaccaccaccgccgcggcggcatcggcgacacactacgctgcccaagcagcgagcagagcccacaccgcctcggcacctcccccatccgcttcctgacccagcgcctcatcgattgcgatgatgaagattccttcacgcgcgcctgccccctactcgccgtcgttcctatccgtataaaccctccccatttctctcctcctatttccccccaaccccaacccctccctcttggagattttggggaaaattttgaattttgaataggagtagaatcggcggccgcctcccgtgccgagggatggccaaggcggagaagctggtggtggaggtggtggcggcgcacaacctcatgcccaaagacggccagggctcctcgtcgccgtacgtggaggtggagttcgagcaccagaagcgccgcacgcgggccaggcccaaggagctcaaccccgtctggaacgagcgcctcgtctttcccgtctccgaccccgacgacctgccctaccgcgccatcgacgttggggtatacaacgaccgcggcgccgccgtcggcggaggcggcgctccgcacgggcggaacttcctcggcaaggtgcgcgtcccgtccgccggcgtgccggcgcccggcgaggaggcagtaccgcagctcttcaccctcgagaagcgcagcctcttctcccacatccgcggcgagatcaccctcaagatttaccgcgtcaactccggcgacgtcgtcgtcaagtccaagcaggagaagccggcgaaggcggtggtggttgggccggaggtggtggcggcgccgacggtgactgggcccaagaagcagccgcactcgcacccacacccaccgccgccgcagcagcagcaccagcgccatcctctggcggccgtgcagccgccgccggagccgcccatggatgtcatgccgcaaccgccggtcccgatggctatgaagccggtggcgatgcacgcggacccttaccccgtcccgcccatgttctccggccctgcggacttctcgctgaaggagacgcggccccgcctcggcagcggcgtcgtcgccgacaaggcgagcgcgacctacgacctggtggagcaggtggagtacctctacgtgcgcgtggtgcgcgcgcgcggcgtgcccatggcgaccgaggccgtcgccgaggtcaagcttggcaactaccgcggcgtgacgccggccgtcccttcgcacaactgggaccaggtgttcgccttctccag

SEQ ID NO: 138718 - DNA, 1720 bp, Zea Mays
attatttcctgctgatttctggaaatttgagttgttttggcgggggtaggggcagtctttaatgaaatgccctgcttttccacagttgtagcaaggatatttggtgccagtgggagcaggcaaacagggagcttggttatttgtaggtagtgattggcgttgcatgtttgtgggacggatgtagataggagtcttagcaggataagcagctgagtgatagggaatgttgggagaaccagttgttctgattactaccttttgacgctttgatgggtcctgggaagatccagctccagagcctttccacatccttttagcattttgatgcacctgccccttatcttctactgcaattgccacactgactgctctattaaatgtcaagtcataacaggtagccattttcttctgcagcttgaaactcaaaccccgcatgaaacaatctcgctttttaccatcagtgttcacatgatcaacagcataccgggacaagtgattaaacttcccaagatattgcatcaccgtgtcaggaccttgcttaagccttaaaaattcctccagtttcatttgcaggactccatctggaatataatgtgctctaaaagcttccttaaattcagcccaagtaatttgatgtcctgctggttgtatagccacaaagttggcccaccaagtgctggcaggtccacgaagtaactgagctgcgaactgaggtttttgcacttcggtacactggatcaacccaaacttttgctccaccacccaaagccattcatcagcttcaagtggctcttcagcttttataaaagtgggaggtcgagtctccatgaattccatgtaagaagcatttctggcattatttggaggtacccgagccccatgttgattttggttctgaagcacttcacgcaaaacacgtgcattgtcagccgtcgcatttactaacgcggcaattgcatcagctagggttggaggaattggtggcggtggaggatcagagtcatcttccacaccgccctgagaggtgccagctatatcagatagtcgaacacgcataggcatctgaaatgaaacagaactcataaatgggcgtccacaactaggaatatattataaaaaacaaaatacatgatccttagtggttacaataccaaaatttccagactgctgctggtactaatattacaacagaggatgcactcatagacctagtgcctattctaatcctctgcatcagtgtctatctctgacacatcactaccccctgaagaatttccacctggtgcaaacacaggcgctgcttcttcctctgagtctgcatccggttcacccccatcagctaacacaacaccaccctctgcctctgcagctcctggtgcatcatcggggtgcagctggtaatacagctgatgaacttcctcatgcagtacattggagtagtcctccagatcattgtaggccatgaccaaatcctgaaaacgacccatcaaatggttctcacgagcaatcgctgcctccctagatcgcattgtcgcagccagttgctccttctgttcagctaactgcttctgaagctgcttcttttcagccagtagctccagaatatgagcagcgtccaggccccgttcgttgactgacgcttttaaatcctgctgtagttgtgccaccagcgacggaggtgcgtgacggccactgtttgcctccacctgcgacggaggtg

SEQ ID NO: 138719 - DNA, 518 bp, Zea Mays
ttaaagtgagaaacatgcccaaaccctaaaataaccctaattaagccattaagtgcaggagggagatttgagaaagggtaatgtaaaatgtgaaatcatggcttgggcaaattataaaagttgacctacacttaataagctacaaaaactagtagaaaattttggccaaaataaatgttcaagatccccaaaaaggccatgcaagtgggagctctctatagaaatgcgaaaattcagatttttgaatttcagccctcacctagaactcgagcgcattccccttgatccctaactcaaaaccttaagctcccattgacaaagttgtgttaaattaatccctctacagcatgtgtgaagatggcatcgagattcgtgccctagacacgtcaagtcaaggattttatctcggattcaagcagtgagacaaaccctactagagcaccccatatcttcggttccagtcaacaaaatccataggtcgccacacacaaacgacaaagggaagttcggtgaagaga

SEQ ID NO: 138720 - DNA, 444 bp, Zea Mays
ctctcgctcagatttggtttgtcggctaaacaaatctctatatggactgaagcaggctcctcgtgcatggcatcacaggttcacctcatatctctccattgggtttattgaaaccaagtcggatagttctttgtttatttgtcgccgagggtccgacactgcttatttgttgctctacgtggacgacatcgtcctcactgcctcctctaccgagtttcttcgtcatgttattggggctctccagcatgagtttgcaatgacagacatgggtcagcttcaccatttcttgggcatctctgtcacacgctcagcacatggcctgtttctttctcagcggcagtacactcaggatattttggagcgcgccgggatgagtgcgtgcaaaccttgtagcacacctgttgatatccactccaaactatctgcagatggacctcctgttgg

SEQ ID NO: 138721 - DNA, 592 bp, Zea Mays
atcgaggttgctataacaaaatcaaagctggtttatagaagaacaactttgatacagacggattagtaggttgtcacatgaaagttggaaaacaaaggccttcaattcgctctgtcagaacgactaatgaagatcgcgattgtacagtatctgcaaaagatcacagatgtagtgaacgttgccgctggtgaactacgcgccacgatcctctccggtgttacgattcatgcgctctggtgtgcggataacagcctatggtgaaaagatctcgcgtgaggatgaacttggggcactgtattgctgtgttgccatacccacttgcactgacgacgtggctgcgcgaccgccgccgtcgtgccgccatttatctctgttatgacacgctttcagtcgtttcaccacgtcgtcgcaggccgtgtagactcggcagtgaccgccgtagaccattacccagtgaatgccacattagagaactccgatgactcttctcccttatcaccgcgagcgcttctccgttaaaatttgtcctactcgcggccgcccgctataaattgatgcctcgacctgttccgctagattgttacaaagccag

SEQ ID NO: 138722 - DNA, 357 bp, Zea Mays
tcaaatatgcctcagtggcacacccaagagccaacgggcaagtggaaagagccaacgggatgaaattggaagtgctcagaaagaaagtcttcgacaagaatgaaaagttcacaggaaagtggatcagagagctgccgtatgttgtttggagcctgagaactcaacctagtcgagctctgcatggaaacacgcctttctttatggtctattgttcagaggcagtgctacccgctgatctcaagtttggggcaccaaggttaatctttgaaaacatagcagaagctgaggctactaggctggaggatgttgatgtactagaagaagaacgattgaatacagtgattcagtcagtccgat

SEQ ID NO: 138723 - DNA, 666 bp, Zea Mays
cgcacactcgtagcctcagctcttgcctcacaccgtgcgcacgccccggggagttccgccgctaccattgggagctcgccccgtctgttgcctcggtaagctccgccatgtcaaccgcagctcgggacgccctttggttaaccctcgtcctctccagttcaccagttccatgctcaccagttcacaaccgttgatctgccgctgtcgacccgtgccctcaccgtgccccggccaccgttcgtgcattcctgagactttcctcaaggtaatcgtcatagcccgcccttattttcccctgtctcgcatttacttgcttgcaattgctcgccgaagtactccccgatccgccgaggactcccctccgtcgtccggtcgcctcagtcccattcacacaaacccgaccctgccatagtgttcgtcaggtcctccccaacctctccagctatttggactgacctctcgtagcataggagtccttgtctgcctcgcctccggcaacggtgccaccgtgttcctggggagcgccaccgctagcttcccggcgaagttgaagtcccctggcacgcatcctgtccgcccaaccctaatcggacggcccgattatttcaattaaaccagacctaatcccaaccgccatatccggatttgacagctcccctctcactc

SEQ ID NO: 138724 - DNA, 866 bp, Zea Mays
gaactgtccaaacataggttaaggttgtaaggcaattttttccaccatacagttgctaaaaagttggaaaataaagaattcaaaacaatagatcaccttttaaacctcaaatgacgtttctgtgatatttagggcattgtattcacacgagagggtattagagtacaactagcagatgaaggcgttattgggctagttaatgaccttttgtgataccaggtttcctataatccctttattcaaggcatatctagatggtgtttatgtccactcaagttcaacatcgcacatcattatgccacatcatttctcaaaataaaataaagaccatgagaaattttgccaaattgcacgagagaactttccaaacataggttagggttgtaagacagcttttttccaccaaaaagatgctaataagtaggaatataaagaattcaaaactatagatcaccttttaaactaaaaatgacgtttccctgatgtcaagggcattgtattcgcatcagagggtattagagtacaactagtggatgaagacgttattgggctagctaataactttttgtaatactaggtttcctataatcccttctattcaaggcgtacctagattgtgtttatgtccactcaaggaaaacaccacacatcaatttgccacatttttctcaaaataaaataaagacgtcttcatcgactagcccaatgtgccttacaaccttaacctatgtttggactgttctctcactcaatttggctaaattttccatggtcattgttttattttgagaaatgatgtggcatattgatgtgtgttgtttttcttgagtggacataaacaccgtctaggtatgccttgaatagag

SEQ ID NO: 138725 - DNA, 427 bp, Zea Mays
gtggttcagggcttgtgtagcatgtggcggctcgaacgcatatcttagtaactcattaaaaatgggaccgaccattgctggctcggacggtctgcgctcacgtgcggatggtccggacatgtgcagatcggctaatttactgtcgatgtgcgtaggaggccgtggttgctcaggtatgtgtccatcgacatcccataaaggggttgtgactggtcgtgacaacctgtagccgatgaattacgtgtgttttcccccaattcaacctcgtgcgaaggaaaatttgcaacagtggatttatcaaacgcacgtactagccttttataatccttttgtataccctatgatatgttgcatttgctctcgctgttcatctatgtaagctttaagagattagagcttgttggtgttacttacattggggtattcg

SEQ ID NO: 138726 - DNA, 455 bp, Zea Mays
cgtttttttggcttgggctgcatgcagatcatgcgcatgggagaggagtccccaaggcagttctttcctccacatttcctgcaaccgcatggcatggtacgacggccgctggacttccgggtgggagcggcaatacgccaactcgccgaggctgggaaggggctacatggggaagggcgccgccatggccaagggagtcgtgtcaaggggacggttgcatgttgtgcgtaaggagaagaacacgtcatggctagagaagaagatcagcaagggttggtaatggcgctacgtgcttccacggcgagtacagaaaggggcgtggggagcaagggagtgtacctgctaactgcaattgacatctcggcgaacctcccagaacacctgtacgagcccgatttaccgtagaggaggagcgacatcgaatggcggcccatggcctcagcactaaatttggc

SEQ ID NO: 138727 - DNA, 741 bp, Zea Mays
taaaccatgaagaacaaggtatttccatgcagagctcaactgggttgagttcgcaggctccagaccacgtatgtcagttctctgatccattttcctgcaagcttttcgctcttatcgaataccttttttctgagtgcttccagtatcatttcgttggctctttccacttggccattggctcttggatgtgccactgatgcgtacttgatccggatgctcctttgctcgcagaaatcgaagaactcagggctggtgaagttggaccctaggtcagtgatgatgttattcggtatcccgaacctaaatattatatcatggataaactccactgcttttggtgaggtcaaggaggaaattggcttgtactctatccattttgtgaatttgtcaatggcaaccagtacatgagtataacctccctgagccttcttgaaaggcccgatcatgtctagcccccaccatgcaaacgaccaggttacaggaatggtctgcagctgctgcgcgggcaagtgctgttgcttggataagaattggcatgcctcgcacttctggagtaacttggcagcgtcactattcgcagttggctagtagaagttggatctgaaagcctttccaaccagagttctcgatgcggcgtgcatgccacactgctcggcatggatttcatccaatatctgcttcctagtggccaagtaaatgcatttcatgaagactcctcctgctcctcttctgtatagcaag

SEQ ID NO: 138728 - DNA, 328 bp, Zea Mays
aggccagcctgcagccacggacacacttaaccaatcagccggtatttgcacacgttgaatatggttaatgggaacctggctgattggagccatgcaggctaggttggtaagacaaccaatcagccccaaggtcccaattcagcttcaaccttcaacatagcatcgccgccacctacccaccggtacgaatattgctgggtggcggaaagataatgcaaggctttgttcagagggggatcccatttttgtcatcgatgacgttgccacatcactctcaccggagctccacgcacttctgagcgcgagcgcgacccgtcatcgtccccgc

SEQ ID NO: 138729 - DNA, 472 bp, Zea Mays
ccagaatgctgcccaaaaagccctctgctagctatgccaaaactacagcatggaggtctatgagacaccccttcactactttccacctagcaacaaaaatactcctgattggaggaaaagactctaggccttgtcagggagagatcctaatgaagatgacccaaccatagttacatggccggatatctccacacccttgacaaccactttgacgaccttttctcccactacacccacctaaactcccgggtggaacgcctagagcagcaaatcaaggaattgaaggaagaaaaggcggctcttcaagatagtctcgagatggaagaaggcgaagaagccaacactcgtgaggcatactggaccctgaagatggactatgctaggaggctaaagaagctcgcccccgtcaagaagatctgaaagcgtttcaagagccaaggatgctagactgacccgaaggaagaagccccgc

SEQ ID NO: 138730 - DNA, 310 bp, Zea Mays
gatatgtttttgtgatacaaaacataagttttttgtcatatgaatctagtaacattcaatgcatctttttgtgctcttctaaatgtgatttcttttaaactaactcaattaaatcttccagtggaaagcatgggcctctaaagttatcctctaccaaagtgatcagcattcccgagtattttaaggaagtgtatttgctagacaggtcacataggaaccgtctcattgaagatattgacgatgacttcccgttcttaattcatgatagggtttgcaagctactgagatctggattactctcttcgtattt

SEQ ID NO: 138731 - DNA, 665 bp, Zea Mays
catttttgtgataatctaaaacaagtaaaaagaaatgtattgaagtccaaagcggaatttaagatctaaaagaaattctataatttagaaaagagaagaaggaaatattatgtgagtgaaaataggtataaaaaaatatataataaaacatataaacaagaatgtatttatgtacttcaaaattttaatttggtacactgtaatcattgatgaatctcaaaaccaaattcaaattcaaatttgaatgctaaaaacaaagagaaaagaaaggaaaaaaagaaaagaaaaagataaagaagtggaactgctcgtggccgcgaactgcatttccagcccactcacactttctctccgcgcggcccactccttatccagccttttcttttgtttgatcacacttgcgtgtgggtcccttgcgccagcagtgttcctgttcttcttcagtcacgcgtgagcgccgcctcagtccagggaggaattggcctactagctcaaatggccctagcctgtgcctctgcgcacctgttcgttgcaacggcctccctaatactcgtcgcgtccctcgctgttaatcctcctatcttctacatgccctctctctaagtataaatgctgaaaccgagaacctcaagattatcatccaaagctcccgtatcatagcgaga

SEQ ID NO: 138732 - DNA, 602 bp, Zea Mays
ttgaatttgcagaggaatacctcaccctcgcatcccacacaccatcaccaccaacaaaccccaccctagcttagttgtaagtactacgacaaaacactttgtccgctccacccccataacaaaacttgggctcaatttactcatgacgctatttcaattgatccagtatatctcctaatgagatttgtccttttgtttctctgcatacaagttgagttttcacattcaaattccatggggtgatagaggacaaaaatgttcatagttgcttttcatgaaatttggtatcccaaatattaatttagtattagatggtcttaacctatgaagaatgattattaaaaattctaatgtacttttcggtatatgatagatgtcgtttctcatttgtcactccagaaaatttgaactttaaacataagcagagaaacaagaaatatgaatctcattaggaggtagattgtaccaattgaaatagtttagatgagtaaaatgatccgggagtttcttaaagggtaaggtagacaaacttgattgttggggattgtaaaatggacttcttatttaaacaagttatgtgaatcaaaatgataattgaagtc

SEQ ID NO: 138733 - DNA, 505 bp, Zea Mays
gttggggtctaacatagaggtactaacacatggcgtaaaattccataagattacatttgctactgagggacctaaagcacttaggtgcacatcttatcggattgttcttccatttttaacaaggactgacttatgaacgctactcgcctccaataattattgggctgcgataacgctcatacaagatatctaatcgatcaacaagacatttatttatcccatgggcatggaatgtgatgattgacaaagcgaagcatcagattgccatacaacaaaaatcatgacaacaccgatagatactatccactaaccgtttgaaaaaaaaccaaacttacttctcgcttgccactacatcactcctcaatcacacgaccatcatgagcatacttcacacgactatataatagcgatctaagcgtcgtgttacacaatacatacatcctttctcgttgcgagtataaccataatgcggcatatacccgcactcctcaatcaattatcttac

SEQ ID NO: 138734 - DNA, 347 bp, Zea Mays
gtttaggctggcattttgttttccacaaccaggagaagatggggtgggtccactggttgccggtcatatgagtataggccttctgagaggaaaacatgctagaggaaccattgcagagccatttgtctctctgatcatgttgcagaagattttccaataggtcttgtaaagcatgaaactgctcaaaagcttcaacagacagaggagtgtggaacatctcatgcgaggctgccattcttgcttgatgaatagtgatgtctttgatggaagagaaagaccaaagttctgggtatcttgcagatttgcacataccatcccagttgtcatgccacagaagtgtttttttc

SEQ ID NO: 138735 - DNA, 734 bp, Zea Mays
tatggtgcctcaatattattggacctttcaatatggctaagggaggggtcacatatctctatgtatctattaacaaattcacaaaatggtttgaagctaagctggtggcaaaaatcatgttaacaaaggaattcaaatttattcaagagatattcaattggttccacatgctaggatcaattattactgacaacatgagaattcacctcttgggtattcatgaactattgcactaataaaggaatcattatgaactttgacttattagcacatcatcaaagaaatggtgaggttgagcgagataatgagctcgtccttaagggactcaaaccccggatggattaacgatggtttgaggattttctagccatcttgtggggactgcagacatctccaagtttggtcactagacaaacatcattcttcctggtgcatgggtcataagccatgttgcctaccaagatcgagctccaatctttcagagttctcaacttcatggaggctcggtcactcgatggtcgagttgaagatctcgacaaacttgaggagtccagggactcgaccatgatataatctgccaaataccaacaagccatgcaaaggtatcatgaaagaaatgtttaggatagaagcttcactatgggtgatctagtactatgcaaaattcaaaccataatggacatacacaaattatcacccatatgggaggggcctttcatcatggctgaagactc

SEQ ID NO: 138736 - DNA, 769 bp, Zea Mays
tgttggtaaaagtcagttttgtcctactggaacggaaccctaacttagcccactccagacgccgatggtgttgtccaccatcctctagctttccttccatggcgactccgactcgggggaagaagcgggttgtggtggatttagatctggaggtagacggcgcgtcataggtggtcgccaccttcattcgactatttgtcgccatctccaccaagccgacaacctctcccgacgtcggtcactgcgtggagaccgactgtgtggccacctcaactcttgtaccacctcggcctctcccgccatcgcccttgtacacccagcagccgcaatcgtcgaccaccctcctgtgttcaagagggcatgtccactaactgtactggtattttgaatacttcaactttagattggtcagattgttttaaattctcagtggacttcatatttgtattcacagttaagcaagttccaagaggtccagagagcactcaacgacaccatttctaagatgaaggtagttgcgaaggagttgaaggaactggctagacaagagattttttatgagccttttataggcaaagacatctcagtgaactttaccaggtggcgtgtgtatgagcttgctcggtcacttgaagaagcttggtgaggcaaagccgatgattccgaagaagaaatgaagggtggggaatgggcactccaagatgtcaactatgaagagattcgggatcatcagaggaagtgaagtttggacaccggaagtcagtagtgt

SEQ ID NO: 138737 - DNA, 633 bp, Zea Mays
cgtcgtgtagcaggcatccaagggcgactggtgtcgcgtcccgggatcacagtctgcggcgcgcatcggcggggcttgggcggcgtaatccggtaagatgccctacgaatctccgctcctttacaacatgtagcgtagaggttggggttcggcaagctggggcaatgttggtgcgcaacccagtgccacgcggtgccgatgatgggctcagatcctcgtgttcctatttagcttgtagcgcaatggggctgctagggctggcgcatctgccaggtgcgccggcgagccatgggccgctgctccaggtgctcgctccgccatggagtgacctaaggttgaagacgaactcgtgtccactagattagtgatgaatggctaggatcaagtcgcgccgtaacggttcggctgcgggtgtatcgtgcgttgatctgaatccgaggggcacaatcggatctcagataattaaatctcgtccgtcgatctggccgtcaatggtaggtgagcgtattcgattcataaccacgttgattgaatcgtgaccgtgcactcatgatctggcggccagagctctctgataccccttcggcctgcaccttttgctaaagagaccctagggttaaaggatatcaagcc

SEQ ID NO: 138738 - DNA, 893 bp, Zea Mays
ctggtgaaaagatctcgtcgtggatgaagtcggagcaatgtggtcgctctattacctcatccacttgcgccgcgacgtggccacacggccaccgccggtgtgaccgccgtttaccggaatccgccacgctactgaccccgttacctcgtcgcaaggtgtcgtgtgaattgcttagtcatcgtctcaggtctctaccccagtaaatgccacgttatgcgactccggtgacacacccctctctccggccgctagcttctctcatcaaatttggagccatcgtttatgaatcctataaattgatgcccctgcaaactccgttaggttattacgcacccagcgcaccagctctcatgcttgatcgtccaccatagcgccttaattcgggtttccccccaaatcggttctccgcgccatcgtggatagctcttctgtggccaacgtcgcctgaggtagttctagcccaattaccgtttgttctagcttccttagggtgtagtgattctccccgtacttaaaaattgaacgctatcgtacccagtcgccgggaacacgtcggggttgtctcaagttctgcggtgtgcgtagaccgaactctagaatggcgttccgtccaaattggggattcccagtggagagccaagggtagaattaagcatggaccaaagtagagtgcgaattgttgggtattgtggccggtacaagctcgccgaagcagctgctccgccatccgtggtcggggacctgatcttgcgaagaaaagaaaagggaggggcctcggtacaaacgtcagagacacagatgaatagtgctaagggttctttactggttagtcaaatccctgagggtctctgcgcaaattgtccaacgcgggcgcgcgcgcaggcgcgtttcgc

SEQ ID NO: 138739 - DNA, 428 bp, Zea Mays
gtaggttggcataacttggttgaatttctaaattttcttttacttaatcgagcagtttcaagcaagcataggatttatcttttcatgtgagtatttggttcaaacttctaaaaatctttagaatacacatgatagataaagatgaattatgatatagagaaaacaagtcgatttgcatcagaattaattagaggtttgcacaacagagattgcgctggagaatgcggatttagactacgtatttagacatagactgactatcgagaaggcggattcggacaccgataggataacataacaactatcgagagtccgaataaatgagtctggacgggagttgcgagacgagattgactttcgaatttgcatttgctccgagaaataaaagttttaacaggctccaaatttggctgttcttgagatcgaat

SEQ ID NO: 138740 - DNA, 592 bp, Zea Mays
ctatgcccaccgtgggagatcgtgtgcaagggggaactctgggacatctctttgcagaagactagcgcggctcgacgcgacttccgtgggtcagggccggggaccctctgggccgtttcaattactcatcggaggagaaatcgccgccgggccgcgtgccgccatccgaccaccgggaggaagccgccgttcgccaaaattaacccagtcgtcgcctccattattggtaagtgccctgcacgcgtggccgctaatgtttcctctttagtttggctcggtcaaaacgtcgaattgtgctacggggtgggcggattaggctatgcgctggcgtctgcgctggcgcgatggagttcctggccatggcgggtctccgggaagaagacgaattcttcggaccgttgatctccgcgctgacgaccaagatcagaactataggaaggatggctccggaccgttagatttctatcccacgaacatggttggatctgagttaattaaatctaggccgtatattctagatcccatggctgttgggcgtaccggttcggtcccttagggctgaccgtagatctgatatcctacggctcgaagc

SEQ ID NO: 138741 - DNA, 291 bp, Zea Mays
gcaggacaacaacagctgtggtatgtattgtccatgtatatatgcggcagctagaatctttgcaatgcaaccaaacacctagctcctcattggtagctaaactttaactaatcaatccttccagctaaacttcatccagctaggatgaaataatgcctagtatgtctaggaagcaactgcttcttgttgtctacccgaggacaggagagagggaacgaaggtgcacattggctgaagcaggaaacctaggaattcagtgctctcctgctctgctttcgtcacacacactac

SEQ ID NO: 138742 - DNA, 359 bp, Zea Mays
tgaaaagtggagggttcttttgaaaaacaaccagggccgaagggtatgctcatatctccactttccgatcacacttggatggaccagatcacatcgcacgctttatgaaccggtaaccacccacaaccatctgatgacatcccaacggcctggatctaaaatctctaccttcccaccggaccgttcgatccagatccgctggtaagggttgattgcataaggattacaccgcgcataaatcctggccacacgctcgtaggttaacggcataggatgactcccccacagatctaatcctagccacccctggttagatcagcggcgtaggacccattttccatctcctgacagcgcccggc

SEQ ID NO: 138743 - DNA, 740 bp, Zea Mays
caattccattggttccttggtgcacactatggaatgattagaaacacaaatataaaattagcgagtggccaattcacaatgaagctatgcgtatttggtcactatttaattaagcaagataattgtcctttcgagaacatctcgagagcagtgcccgggttctgtgggtagtggactggagtcctttgatctctttcggctctaagcagcaattgaaccaaaagtacccatataatacagctgtaaccatctttccctactttatttgtgacatagtcagcttttataatatgcatttgagttttgtttttcaggttagctgtgcccattttacactgatatgaacgcaattatgcagtatattcgttgcttgttcaccatcagctccaatcttcacctcaatttgggagattgttaactattcccaagaatgtgtacctttgcttttcactgcatgtctatacctcagtctggagaaacatatatatagaatgtctcatcatgtggtggttctgaaactctcttacactgttcttgtgcaaaatcgaaggctctgctgttcttcaaggtatttctgaattttgacaacattaatgatcatgccctctgttagttcaagtcttcaacatggccctctgttagcatcttgaagtaattatgaagttccatggtcaattgatgtcatgctacagaaaactaaaatctgaggtataacacatccaaaacagaggtcagaaacc

SEQ ID NO: 138744 - DNA, 458 bp, Zea Mays
agaatcgcgcgatggcgtgtgaactccggtccgccgtccgtcgccatgggaggtagaacatgtgccgctgcgggtgagtgtcctgccggtggccccctctgccaggtcgtcgtccccaacagaacgcgcgcctgcgcgggcgaaatcccatcctccgccgcgggagcagccgggcccagggattccgtgccggtgtcgccgtcggggtaacatgccatctccaccgtcggtgccccgctggcagaccaagaagcatcgccccgtcgtcaggaacgtacctgtagccttcccgggtggggaggatcaccggaccacggacgatttctcaccggagacaccaaggtgccgccaactcgcgctgcgtcgtggacgatggtctgtgagtcccgattcctcggttagtgaccctcaccgtgctcgttgtgttcccaatcgcgcgtaccacctattcgatttgg

SEQ ID NO: 138745 - DNA, 563 bp, Zea Mays
cggacataggatactatcaccatcctcactttcatgtcatttttgggaagtcaactgttaagcaagggcaaatcgaagcgaaagggaaaatattttcatgatatttctatagtgaaggccgggggaagcaccgttccccttcctgaagctgatgaggtggtggtctttaaaagcttcacgaaagttgggcttcgttttccactatacaagatgttggttgaagttctgcagacattcgaaatataccttcatcaacttacccccgaagcctttgtcaaattgggggttttatatgggctttgaggagtcaagggctagagccggatgctaggtgtttctgcaatattcatgagttatcttaccagacgaaggcaaccggaaaggaacaatatcttaacaactttggatgttacagcttcgtgccccgctctgaggcaaattatcatgtgccaacattttggaagaagtggccagaatcttggatgaagcaatggttctacgtcaagaatgatctgaatcagagggcctctttgggctagcatgaggtttgatcttcatcatcg

SEQ ID NO: 138746 - DNA, 681 bp, Zea Mays
cgctctacccacgcaagcagagagctccgccaccgcccgccgtcgacttttgtcgttctgctatcaccgtcgcgtccacgccccgtcccgtgtcacggtgagttccgcttcgccgtcagctgctcgggacacccttcggtgtgcccttcccctctctggttcgtccggtccgcgctcaccagagcgattcttgtgcagccggagccctgccgccgtcgccctgtcgtgtccttgcgcctccgtcgttgccccgtgactccaacacttcccctcaaggtcagcaacccgctcgcgcccttaatttggtcattattgctctgttgctcacgcgattgctcgccggagctatcccgcaccgccgttagcccgcctcgccgtgtgcagcgccttctggtgcccccgtgccggcgtgatgtccatggccgagtccgccagaccgccctgatcgcacctgagctaaatcccaagcctctggaaccccgccgtgaccagcctccccgtcttcggcgagccctcgccgcgggacctagcggcgccaccgtgcctttgtccgcccctgaccgttagatcttgggcgtccgtccgagatcgggcggtttagacttaacccgagcggatctgatctcagccttccgatctagagtgagatagagcggatctgatcttaacccgcaggcccct

SEQ ID NO: 138747 - DNA, 376 bp, Zea Mays
agcagttctctcaacttccatcctctttgatctagttctcgcatctatccatcaggtcccatttcttctgacgtcccgacctgccggggccaatccgcccaaatgctctgttcttgacaccgctgcctccttcttgacgcctgacgtcgcctaacactggccccttcccaacgtcctcgtcccgctcgttatcgtcatgacaccatcccgctcttggcagacccgacctcgctcgtctcaatgatacgacccgtccccgacaactggcaagcttgacgaaccagcgagccttggctctcagttggagacatcatctgaccccgcctctttctcagttgtaatgtgttttttggccccccatgaattttggtcctgc

SEQ ID NO: 138748 - DNA, 537 bp, Zea Mays
acaccagacacacgatgagtgtcggatacccaggaacggggtacccagaacaaagccataaaccccttcttttggcccatgccaagcaactccgcgaggcatcgcgaggcgaagcagtcgaccaagtcccctatcgagaatgtctacatggcggagcgggcgaccagatcccccgccgagcaactcctcgaggcggaacgagtgaccaagtctctcgcctagtaagtctacgaggcggagcgagcgaccaggtcccccggttagcaactccttgaaacggggcgggtgactaaattcgcacgtcagtcatgctggcataggggaagggccaatccaatgatgttaccccatataaacaggacaagacgcgtcaccaccaagccatgtctgtgcctcaggtacgatgatgaaaagtccccatcaagcaccaacgacacatcatcacgcaagcacccatcgacgtgtgggaccagccaacctcggttttgggggcatcaacgtcggagtctcaacaatgacccgcatacacgaagggag

SEQ ID NO: 138749 - DNA, 348 bp, Zea Mays
aaaaattgactgcatcgacgatacagttccgcgacacaaagacaactacctaaccatctgtgcttgattaccttttacagaacaaaaggatccatttctaccgttgcagaacgacattgctggttctgttgccttcgcctacaactgatactttcaacatctttgtgtaatatgctactaatgcatttcgtatgatgacatgtatgcattctacaatgctacattgattatattatccgtacacttaaaataaatcatatgtatatatttatgtttattatcgcatatcacatacgaatttgatatcacgcccagggcgtgcggcatccactagtaagaaagatagga

SEQ ID NO: 138750 - DNA, 1635 bp, Zea Mays
ttattctagtattgtctatgctttacttattcattctattagacccgatctcactcttgtgcttgcgacatctttgtagaagacccctgaccatagctcttagtcttttgggattctttcctcttccattattaacttgctaccatttgaccatctctattcccttggcattgacatgctcgtacccctaaattcttcaatactcttgtttcaaatacttacatctaaatttctcatccctacgtaaacactccagtttatatgtccatgaacttcttgtcttctgagatcccttcctattccactattaagtcgttatcctttgcctttttctattcccttgtcttggtatgcccgtatccttggaaacttgcataccccaatgactgctcaagacattttagttaacatgtccttgaccacctctgtttgttgacggtccatgagcgatcattttattttgcacatccttggtgatctcgttgtttccttataacttccccccagtcattaatttttacttcaaccattcggttggaaccttacctatcttacccttaattgtttcctctacttcaccatttcaagagtcttaccttaattccatcctttgttatgcttgttattgatatcatctttacctttgccatctctacatctcaccttgttgcttattttaatcctgccctctaaaatcttctctcttccatctcaacgtgagagttgtattttacccattttccttggatgcatcctattctttgccgcttgaactttcaaacccaacgtttaatgtgttttgtttgctatcgcctttacccttgtgatcctaccttgatgttatcgtatgtctgccacttaaaacctcccttctcccctctcaattcgagagtggtgttttgcttaccccgcgcttggtcataacctcagctttgccctgtgcaaatcttgtcttaactcaattctttgttgtactcatacccttggttcttttatacctttacctcttctcttacacccttttctgttaccaccttcaacccttgtaatacctatatttttaccacaacacttactttgaacctagcctttggagccttctccttcccattcgagttcaagagcggtgctttactatttcacccttgattgtttccctttcttttccaccttgcaagcttcgtcttaattccatcctttaatgagtttttgtttgctaaccccattacctttgtcatccatcgatctcaccttgatacttatctttatggctgctcttcaaaaccccctctcttccacctctatttgagagttgcagtttacttatctagcccttagtcgtatcctcttctttgccactcgcaggtcttgtcttaactagacccttcgttgtgcttttggtctgttatctgccttacctttgtagtctgtggatcttgccttggtacatattttaaatctactttttgaaaatcttctcttttctatctcaaattgagagcggtgttttgcttatctcacccttggccatatcatcttctttaccgcgtgcaagccttgatgtaactctattctttgttgtacttataccactgggtcttctatgcctttatcttctctcttacacacttgtcc

SEQ ID NO: 138751 - DNA, 525 bp, Zea Mays
ctcaagcacagggactgagtcagtgagtgagtggtggtatccggtttctgatcctgcagcgcatcagcgtaatcgatctagggctgagctgaactgatactgtgaggaggtgatcgtctagatcgtctagacctttgacatttccttggttctttcgattctaagatataagatttgtagcctgtttcttttctttcggtcgaaatgtatgtgtggagagaaagaaagtggatggaagatttgccgtcctcaactgaaggtggggggaaaaaacggaggacaaaaggaacaatgaaaaagagagcaattgtacagagtatgacaacatgatgctacatttatgtgcattattaataccaacttgtttccgttttcttaaggacaaggagcgagcctaagctagctgcagtttctaggttctgcgctccgcagcctgatcggaatcgaatgattcgtctgcgtggctatctgtgtctctgttctctattgtctgctgtgtgtgtgggctgaaatttgttcaggaac

SEQ ID NO: 138752 - DNA, 287 bp, Zea Mays
cagttgtgataagaggacgatcaagttggtgtccccacttggagaggaagtggtgactgagttagtcccgcctaagccacgaaaaggaagttgttatcagatggttgtcgataacagtgaagcagacccaattaagagtatcaaggttgtgtccaagttcccagatgtgttcccaaaaggaccaaccaggtatgccaccagagcggaaagttgagtttgctatagagcttcttcctggaaccgcccccatctttaagagagcttatagagtatctggaccagagttg

SEQ ID NO: 138753 - DNA, 332 bp, Zea Mays
cattggtaactgctcctcaggtaccctgagacatttcttcagctgagatacatggaatacatcatgaacatccgcgagatgatccggtaactccaattgatatgcaacctctcccactcgctttaagattaagaagggtccaataaagcgaggggacaactttcctttgactttaaatcttctcataccccggagtggtgacactttcaaatagacataatcaccctccttaaactctagcagtcttctctgggtatcagcatagcttttctgccttgactgtgcagttctcaaattctcccttatttgctggacttgctcctctgcttctt

SEQ ID NO: 138754 - DNA, 741 bp, Zea Mays
tgaaaagcgagaagaccagtggacaggctacgaaggaagaaggtcggtataggtaaataagcggaaaaaatcaataatgacaacacccggacttccctcgccgacgcaaattaagtcctcgtcatattcagaaatacgataggaagacccacgtgggaagggggagagacacgcgccatgttttcactaggccaggtgaaaaccttcttttacgttatactctcttccgagagaagccatatgtaaccccctccttggtctcagtcggccttgttagggaggacataggacacaaagagatagacacggatggcacagagagagagatacatgcacgaggatagagagaaccacaaacacaacgcaacacatagacttgaggtccttccctctctcacatgtttgtaaccctactacgagcaaccaggcactggtaaagcaactaatataatccttatatccactgagcacaacatccaggtataaaatgtgcatacataaatttacttgtcggtgctagttcgaacaccgatagttggtgcgctaggttggggcctttgtgcatcttcgtcaccttattcgcttggttccggatggccagaagcggcgacgacgctcgaagtgtcaagagtcttaaaggcggacaacgtcgaattcttctcagacgcacgggcgacgccgaacagatacattgtccataaaccccttactcattatttctccatttacgaaaatcctctc

SEQ ID NO: 138755 - DNA, 1857 bp, Zea Mays
gcgggatctcacggccgcgacgtacttcgccaaggtcaaggcgctcgctgccgagatggcagccgcgggcgcccctcttggtgatgaagatataatctcatatttgcttgcaggacttgccaccgactacgatgcctttgtgacctcgatcaccactcgaagtgatcgcctttccctggatgaggtttattctcatctcatggtgtttgaggctcgactccaacgcaaccaggcggagatgcagatgcatctcaattcctcggccaactacgctcgtcgcggcggcaacaacttgcgtggtcgcggtggccctcgtggtcgcggcggtcgcggaaactactcgcatggtggttcttcgtcgcgtcctacagatccgcctggtgctcgacgtcctgccaccaccaacaacaacagccggcccctttgccagatctgtggcaaaataggccacactgcggtacgctgctggtaccgtcatgatgactcctacaacgaagatccaccgatggccaatgtcgcctctacgttgccttcatacaagcttgacaactggtacggggacacaggcgccacagaccacatcaccaacgaacttgatcgccttgcggtccgagaacgctacaacggcaatgaacaagtccaagtgggcaatggtgcaggtttgaaaatttcacatatcggtcactctactattaatactgctgcacgtcctttatttcttcgtaatattcttcacgttctggggattaccaaaaatctattatccattcatcgtttcactcgtgataatgactgttattttgaatatcacccttggaattttttcataaaggaccggcaaacgaggagatgccttctggaagggcaatgtgaaggtggtctctatcccctgacgatctctagcgcacaagacctgacgcatgcattggctgcccgcaaaataaatcgtgatcaatggcatgctcgcttaggtcatccagcttcgcaaacagtccagtccatcttacgtattaataatattatgtgttctagtgagtctttttcatcagtttgtaatgcttgtcagatggctaaaagccaccaacttccatattctaggtctatgaataatgcttcagctcctcttgaattaattcactccgatgtttggggtcctgccgctacatctgttggtggttatcgttattatattagttttcttgatgatttcagtaaattctcttggatttatcttcttcatgatcgttctgaggctccacaaattttcttgcaatttcaagctcatgttgaacgccttttagattctaaaattaagtgtgttcaatctgattggggtggtgaatatcaaaagactcataacacattctttaaaaagttaggcattgctcatagagtatcttgtccgcatacccaccagcaaaatggagctgctgaacgcaaacatcggcatattgttgaaactggccttgctttacttgcccatgcctccatgccccttaaattctgggatgaagcttttctcactgctaccttcttaatcaaccgtttaccaacccgggtcattgataataaaagtcctcttgagcgcctcttcaatatttcacctgattattctacacttcgtgtctttggttgtgcgtgttggcctcatttacgcccttataataaacataaactttcttttcgatcaaaagaatgtgtttttcttggctatagtcctttacataaggggtataaatgtcttgatttgtcatctggccgtgtttatatttcacgcgatgtcatttttgatgagtccatatttccttttgctaagcagctgacgacttcatctcacattgattcatcaggcagcag

SEQ ID NO: 138756 - DNA, 880 bp, Zea Mays
gaaaaaggaaaagccaattcggcccaaggcagcccacttagcccagcccccgcacgtgcgtccgcgcctgcgcgccccctctgcctgacaggcgggtcccgcctgtcggcgcaaccctgagcgctcgcactctcttcccctccctctctctctatcccgtgggccagacctgtcggcgctagttctcttgcgcgcacccgctctctctgtcccgccgtccccacctgtcagccgtctctaacctatcgcccacgatctcccgccgtggacgcgcccacgatcgcgcgttctccagccacgtccgagcccccgcgccctgctcgtccacccctcctctctcatttgcgccctctgcccagctccctcgatctctctctctctcgctccgcccacgctaaccgagagctccgccaccgcctgccgacgtccaccgcttgttccgtggtcgccgttgcgcccgtgccccgtctagtgccacggtgagcttcgccttgacgtcagctactcgggacacccttcagtgtgccctctccctccctgctgcgcccggtccacgctcacttgagtagttcttgcacagtgggagccccaccgccgttgactcgaggctccaccgcacccccgccgttctccaagcgtcctagagttcgcactcgaggtgagcatccttcccatgccgttatttcgccaagtatcatccctgcgccctcgcaattgctcgccggacttagttacgccgccgcggaaccttttctaccgcagtctgcgttctctggcgcccccgtgtcggttctgcgcccacggtcgtgttcgtcgtgtcgcgctgaacgtgtctgaccctttccctaagccaccagagctcggccgtggccggtctgcc

SEQ ID NO: 138757 - DNA, 295 bp, Zea Mays
ctctgtttgtctaatttacatgcagtggcaactttgttgtagtgttgcggttctaaagtactactgtatttcagttcgaagacctgggagaacattttggttcacctgaataaagtgcagacaaaaaattcaagaaatggccctcccgatgctgctttatttagtgcgtgaaatttgaaagacattttatactaagactttaatcaaactgccatactacagattcagagaagtgagctctcaaaacccaaacctgaggtgatatcaatttctagatttgagcacgagtcactct

SEQ ID NO: 138758 - DNA, 452 bp, Zea Mays
cgggaacaatatatcggggccggtgagtaaggaccttcacctttttcctcttcggcgcgggctcgcttggagcagctggagcagcatctttcccggaaatggcactctttctcttctgcccccacgacgggtagcggtaatcagggtacataaacccaataacatcaaaaactctattcagcctcttcttcttccggcctccgaaggccgcagataacacgttatcctctgcctttgaatatggcccaagcagttcatcgcttgtagcttcgatacatttcagccaatcatcatctggctcaacaaacttaccttcatatctgaaggcgtatttccacctaaccagcccaccttcgtcagacttgctgatagtttcctttggcatttcccatttctctacaagtggccacactctgaaggctatgtgctcctgcactaaatcccttgtcccg

SEQ ID NO: 138759 - DNA, 507 bp, Zea Mays
cccgatctcgggtgcgagagttccagccaattgccggcctgttaagttcctgtgcatgagaaaagaaataagaatccaatgtgcatgatttgtgtaaaacgtgaagacacaaataaacaatagcagcaaatcaaatcggcacagcagctctgtaaaaagttcatgctaactacaagaaaggaacaacataaattggttctttcaattccttcctctgttgtcctcttaatggacagaggtagcaaactattagaaacggaagttcaaaaatcatcaagagatcattagcgagctattaaaatggaacttcaagaatcatcaggaggctgttcatggcatcaatctggatggaaataaatgaaaaccacacttacagaatctctactttatcgtcaaagcatcgcacgccagaccagctgcatgggctgctgtccatggggtcccaatcctggaatacgccatggggatcagcttccaccctcaccttcagttccagcaacgccaatc

SEQ ID NO: 138760 - DNA, 277 bp, Zea Mays
cccgcctagcctttgtttgtgcttggtatctgttcaatgtttccagggcagtgacacgatctccatcgagaaggtccttggttgttgacttgtcgatatctggtgtagccatggcgtttgttcatggtgatccatgctttatttcttgtggagtcatggcttcggatccgtacattaatcggaaaggggtgaatccggtggctctggattctgttgtgttgagtgcccaaatgacctcaggaagttgctcggcccacttgccctttttgtcatctag

SEQ ID NO: 138761 - DNA, 2024 bp, Zea Mays
ccgagccaacagttggtgatctactgcagcgacacaagctgttcccggctgataggacagcagggttggagggtcacgcccatacacaattctgaaaggagtgcacttagcagccgtctggtaggaagaattgtaacaaaactcggcccaaggaagccattgtaaccaagtctttggcctgtcacctgccaagcagcgaagatacatgacaatgaccctattgaccacctctgactgaccatccgtctgtggatggaatgctgagctcaggagaagcttgacgccagcaaggcggaacagttctgtccaaaagagactagtaaagaccgtatcccggtcgcttactatggagcatggaatgccatgaagtcgcacaatctcctcaaagaatgccttggctaccgatgcagctgtgtatgggtgaccaagcggaataaaatgtgcaaacttggagaatctgtctaccacagtgagaattactgatttaccgccaactttgggaaatccttccacaaagtccattgcaatgtcactccaaacttctgacgggactggtagaggctggagcagccctgctggatgtaaatgttcagttttgttcttctggcaaatggtgcagcccttgacaaactccctgacccgacgtgctgcttgagggttgaagaatgatgctcgccaccgatgtaatgttttctcactgccttcatgaccactgttgtgagcatcctaagggcactggccaaactgatgatgctgctggcacaaacacttttccttgaaattggagcagaccatccctaagcgcccacccttccttggcggttcctgctgtgagtttgttgcgtagttccgacacttgagggtcactgtcggcttctgctctcagagtctcaaacaagtgaaactgcggagtggatatgacgttgagagctgcatcttcctcattacgccgagataacgcatctgctgcaccattcaatttgctcggtctgtactcaacagtgatgtcatagccaaacaacttactaacccatgtatgttggggaatggtggatagacgctgatcaagaaggaacttgaggctatagtgatcagtccttactgtgaatggacgcccccacagatagggcctccagtggcggactgctttaacacggccaataagctctctttcatatgccggtaatttctgatgatgggttgccactgcccgactgaagtaagcaatatctccctctccttggtgtagcacgacgccaaaacccacaccggaggcatcacaatcgacgacgaacctcttggtgaaatctggcatttgcagcagcggggccgtcatgagagcttgtttcagttgaacaaaagcatcttcggcctcctcggaccagcggacagcctcccacttgagtagcgccatgaggggtgctgcgaccgctccataacccgcaataaacttgcggtaatatccagtgaggccgagaaagccccgtagcgccctgaaggagcgcggtcgtggccaggcttccacggcagcgatcttgtctggatccatggcgacgccctgaactgaaatgatatgccctaggtatgcgacggacgtcgtgccgaaggagcacttggactgtttgagtgccagcttgtgtgtctggaggacctcaaacacctgtttcacatgctgcagatgggctgcccaagagtcgctaaagaccaaaatatcatcgaagaaaaccagtacgaattgacggataaatggcttcaaaatatcattcatcagcgaccgaaatgtggatggcgcattggtgaggccgaatggcattaccatgtgtgtgcgaaaggcagtcttctccacgtcagcagggtgcatgcgcacttgatggtagccactccggaggtcgagcttggtgaagaagcgagctccgcagagttcatcaagaagttcgtcgaccaccggaattagaaacttgtccttcaccgtcttgtggttgagctcgcggtagtcgacacagaagcgccacgagttatccgcc

SEQ ID NO: 138762 - DNA, 443 bp, Zea Mays
cgtgttaccaacagaaggattcctgccgtggatttggtgagccggcttgagatgatactcagaggcaaggtgtctaatatcggtgctcctgttgcatactcggcctggaatctgcctccttccaaggccttcatcagttttgtgtcaaatcctcctactggtgatagcggtttgggccttagagtgcgaccttctcccgaagaggttgaggctttggttgcttcacttggcgaaatccccgacgacaagaggcaggttcattttgaggtgcctttgaatccgagtgatacagaaataagtgccatgctggacatgttggctgaagattcctctgatgcagcccctgctgaaacactggctgtagcacccatccccgagtctggcaaagctatggatactcagaggtctgatagtattcgcccgaagcgtcctcgccgaaccaa

SEQ ID NO: 138763 - DNA, 306 bp, Zea Mays
cccattcgatcccgatcggacggatcaccgatcatctggacgaaacggtacccgacttgaatcgtggccgcccatgagctgatcaacggccgaggcttcgtcttcctcaaccaacctcagccacggcggcggagtagccaccccggcggtgcgtccactggcaacatggccgatcgaccccaattgcccaaacccaagcgctaatcggtgcaaacggaagagacggagatgcagaaccaaatggagaccatcctacctgaaatagtggtgacagtcatgctacccacagcatggggcggattcatg

SEQ ID NO: 138764 - DNA, 962 bp, Zea Mays
cgacgacttgtcgcgggagcgggccgagtcatggaatggctcgtcggaggaggggtcctgtggaccaggccacacgccgctggtagatgcgggcgggatcggcgaagtgaatgtaagggggtcggagaggtggggcaacgcgtggcatggttagaggcaacgtggtgacgcatggtgtgggtggaggctacaaggccgcaggtggcacggtcgaaggcgaaggagccatgcatggcacagaagaggtcgctgggaccggtggtaggggaaggggactaggggaggtacttagacgagatcgacatcgagaagagagttgaggtcgagatgtggggaggagccagcaaggggaaaccatcctcatcgaaaacatgtcgagagatgatggtgcaacgagtgagaaggtcggggcaccgtaccccttgtggtcacaggagtacccgaggaaaaaggtagcgtgctgatcggggcgaaagtttgtggggaacgatggcagaggtattaggataggtgcgaatcatgcgatcagtcttgccgttttgaggggaggtgcaaggatatgacatccgcagctacatgtcgtgcaagagaaagaaggcatgagacatggagttatcgaactcctgcccgttgtcacactgaacaccccagatggtgcaaccgaactgagtcaacacccatgcgaagaagtgagataaggtggggaaggtgtcagacttacgacggaggggaagagtccagaggtagtgagagaagtcatccatgatgaccagatagtattggttaccggaaaagctcggtatcaaaggggtgagcattgtgggacatggaagaggtgaagggtaagtgattgtggtgaccaagctgacaagcatggcaaggcgaggtaacgttgccgcggggtggggaatgatcaaggtggacgagagtcgagaaaggacgtcatggctggggtggccaag

SEQ ID NO: 138765 - DNA, 394 bp, Zea Mays
attgtctctaaaggatgccaatttcttcatagttaaggccttagtaaaaccatctgcaatctgatcttcagtggagatgagtctcacttctaagagctttctagctactctttctctgacaaagtgaaaatcaatttcgatatgctttacctggccatggaacattggattcgttgtgagataagtagcccctatattatcacaccagattctagcagcaggtggacaggggacctttagctcatacagaagagattgtatccacattaattctgcagtagcattggcaatagccttgtattcagcttcggtacttgaccttgacaccgttggctgctttctagcactccagggcacaagattactgccaagataaactgcaaaaccccctgaa

SEQ ID NO: 138766 - DNA, 472 bp, Zea Mays
ctggtctatttggattgtagaaaaatctcttccaccagtgattcgtcggtggattcagctcaattttattggaggcaatagttttagtaaattgtgcaatacctgaagtcaaactagagcaatcttatgaataatcatgttgttgctatcaaaattaaataaatttatctatgcttattggaggttgttgaacagtgaatgagttatcatagttgggcttactcatgatattgtttacattctttcgattcaatacaaacagcaccggaacccacttacgtagttagtgtccatatgagctactaatgtttcattgtcttcaggatgaacacccttttcagttttcaccctatcagagcttgtttaaagtgaagagcgcaagtctgggttttgtgatccccactagaggataatgaaggaacatgtgcctatcaggagcttatgaaagcaaccgagaactttttcagagagt

SEQ ID NO: 138767 - DNA, 774 bp, Zea Mays
cccgagtccgcgttcaaagctgggttgctgagcacgaacgaggtggtccgtgtccgtcaatgacgacgcaagagggggagagagacagtgacccgagtagcgtaggaggcaggacgttgcagtaactgcttccagtgatctctgaacgctgaacacggaccaccgatcgctcgctagcggccgatggttgcacgcagacccagcacgcctcacttccttcatccaggaggggccgagatgtctggacactttcagcggcatgacgaattgacgatgacgacgtgcagttacttggagtaatttattcgtacactgtctttagcagtacacctcggttagaaacttccattaaccagcaaaaatatcttgctacgacgtaagtacatgatcttgtacaaaataatgttactcttcttttgcaacatactatatggtttcaactggctgtcacgactgcttgctcatgcatgtctctctcacactcagctcgtaaccaacaacaacacagttacacacgcagagaaagtacccccactgttacgttacgcctgacgaagctgcaccgcgacggtctccatgccgagggccggggcccgggcgtcgcgtcggtcaggcgacgccgacggcgtggagaaggcgggcgtcgtgccgtccttctccgtcccctcgtcgatcgtggacatggacctgttcgggccgcggaagatcttcctccaccgcgcgatctcgagctcgtcgggctccacgaccgggtcgtcgtccgccgcggcctcg

SEQ ID NO: 138768 - DNA, 447 bp, Zea Mays
ggagttagtccgccgtggggaagaattcgtcaccgtcgctcagccaggtagggggaggaagacctaatgcgcgccgttggatgtgtgttggacggctcggattagagtctcataccgattcagccgcgtctaaccacaaccatagatcgcgaatccgatgggcgcaggacgatctcagttagagagaagaagtgaccgttgatatctgatctgagggtcagcgttgcttaccgcttcatttaaacctagatctaatctgggccgcaagctggtgatccgacggtctagatcgccagataccccttcggccttggaaccttgcataagagcccctgcgtttagtcgaattagaacccgccgtccagtggggagttttctgagtctagagtattcttgcgccaagccccctgctgtctctggtaatcttgcgcccagtccagagccgac

SEQ ID NO: 138769 - DNA, 661 bp, Zea Mays
atggcaggatattaccgccactttatcaagggattctccaacatagcaagacctatgaccaagctcctcaaaaaagacaataagtttgtgtggaccccgaagtgtgaggaaagtttctagatcataaagaagaagctcacgaccacgcccgttttgacactaccggatatacaccaggatttcgtcgtcttctgtgatgcttcaaggcaaggcttagggtgtgttctgatgcaaaatgagaaagtcattgcttatgcatcacgcttattcaagccacatgagaagaattatcccacccacgatttagaattggcagccatagtgcatgccctgaaaatatggaggcactacctaattgggaacaaatgtcacatcttcatcgatcacaagagtctgaagtatatcttcacttagccagacctcaacctccgtcagagaagatggctggaactgatcaaagattatgaccttgagatccattatcaccctggaaaggccaaagtggtagcagacgccctcagccgaaaacctttcgggataaaggggatcaactttttagaagattggaagaaggaatcagctcagctgaatgcatgtctaggaaacaacagcagcctagaagtcaagccaatgctagaagacctcatatgcaaggctcaac

SEQ ID NO: 138770 - DNA, 551 bp, Zea Mays
ccgccgtgaaccgctaccctcgcgccgccactgtcgacctctgcccttccctccgtggaattgtagctttagtaccggatatatgctagtttcacagattgatgacttcttttcaccaatcaaaagaacctgctcaaaatggcaacatatccaatcctcaaaaagatattgtgctcatgtgcatattttagctcaaaatggcaacatatccgatcctcaaaaagatattgtgctcatgtgcatattttaaatctaggacataaatcttatatctaacaacatcattaattttataaaaaaccccttctacaccctcccaccggtgcaaaattaattgatacctggtatgagattgatgtcccggattaaatatgtgcatgtccccacagcatcatcgtattttctgcaagagcacattattgtcatgtcctcagagttgaagacaactaatgcttcatcatgaaatttcattgggatcacctggtaagtcatgattgttccctctgactgtaacaatttgcaagacacaaaaaattgctttttaaattcct

SEQ ID NO: 138771 - DNA, 427 bp, Zea Mays
ccatgtgtcggtccatgggccttcgcgttgatctcgccagcagttacgtgtatcgggcccacgaatccagcaaccgagcacgcattttttcagctcacctctcccgtaacgctcgcgcggcggccgaaccctagctaaatcgccgtcgtctgcttcctctcctccgcgcccgccgaaccctagattaatcgccgctgtgagcttcttctctaccgcggccgccgaacacatagagattctccccccgtcgttccaccgccgtcgcattcaccttctccaccgcagagacccggaatcgccttctccgctgcagagacgctgtcgccttattcttcctcatcgggaagggacccggaatcgcggaggcggtggcgccgccccttcgttcttctcctccgcacagaccgagacctcgatcttctccacc

SEQ ID NO: 138772 - DNA, 806 bp, Zea Mays
tttggctcctacctgtagtttttctctctttgttctgtccaatggatccgtaaaaaattatgttttggaatgttagagggttgaactccgctccgcgacaaaaatcagtcagagagttagtgtcttctgtcggggttgatataatctgtctacaagaaactaaaatgggtgaggttataggtggacaatgttgtctatgcttggcgcaaatttcatcgattggatttctctaccttcagtaggtgcaaggggtcaggggtggcatgctggtggcgtggaaaagacacttggtccccactagtcaaaaaagagtgcataataatagcatctccgttcacttttttttacttctgatgagaatacttggtggctcacatgtgtttatgggccgcaaaatagtgaggaaatttttttattcctccaggagcttagagagattagggcagtttgtgatggcccttgaatagtggcaggggatttcaaccttatttataaaggttcagataagaatacttccaacttaaataggcctatgatgggctgtttcagaagactgattgatgatcttgccttgaaggaaatacctcagcatggccgcaaatttacatggtcaaatcagcaagctgctccggtgttggtgaaaccggatagggttttctgtacagttgactgggaggggctctttcccaatgtcctgcttcaaagtgcagcttctaaagactcagatcattgtctgcttggggatcggttccaacttcagattgtccttttcaaaccttggatttgaagctaaaggcaactgccag

SEQ ID NO: 138773 - DNA, 339 bp, Zea Mays
agtttgacacccagggtacagcagcagctgatgatgatgatgatgatgattttgggattcctcctccgcctccgcctcctatgcctccacgctcgcatgatcatgaggctgggagctctagtgctgcccctgctactcctcaggctatggaccccgcccttgcttcgattctccagactctcactcagcagcaggctcatctggcagccgagcaggcccgtttatccgataggatgctctcgatgtttcagaacatgcaggacaggcaggatgcacttcagcagcagcttattcaggatagggcagagaatagggcattcatggccctcatgcttcagc

SEQ ID NO: 138774 - DNA, 336 bp, Zea Mays
ctgaagcaagaaagatcacgccggacggctgtgtccgtgcagagctccaccgacgtacggtacccacgaagcagatcttgagcagtggacaacatccaagcatggacaggaacacccctcatttctatgctcacgcggagggatagtgagactgcttcagcatgagccaatcttgaccagaatttgaacttcaaagagcaactaggggtattaaacattgcctcgttgttgaaaacatttcttgccatctcgcttggaattagcatcaggaagtcttccagcgaagatttgtgcactacgatgcgatccaccttgatggctagagccgtcgcgact

SEQ ID NO: 138775 - DNA, 311 bp, Zea Mays
tcccgatgcaggtcgaccgtggagggttacgccgcggcgacgtgatggcggagaagcgtgtcaccgcggaagttcctgtcgtcgatgagcaattcagagcgcccactccaccacctgcgctcgatgaggcccccagcaacccaaagcgcgccccggtggagtccttaggctcgagctcgcgcagagacctctgcccacggagatgtgcggctgcggcgaactccaatgttccagtgagcaattgagctagctccggtggtcaatactttccgccgagctcacgaacgacttcgtctcccacccgcgacaac

SEQ ID NO: 138776 - DNA, 364 bp, Zea Mays
atcttctatacaaatctatgcactcaatattagatcttgtaataggaatgtgccggttcttgttgctaaagtttaagtttttccaccatgcatttctctttaaattattcgaataaatgtatcttatactgtgcattaatgcatttttttacgctacagatgtttcactttctcctaaagttggaaagtaaccattcctgtcccaaaaaattcatacccacatgcccatatggagggttatttccctatttttaagcataactttttttatatggaagtagtcttgtcgggtaggattttcagtaaaggaagtgtattagctattctcttaaataattgtttgttttttgttagttactcactg

SEQ ID NO: 138777 - DNA, 606 bp, Zea Mays
aggagaaagaactccactactttcaccactggcgacgtactgccgactgttctttcgagtcagagggacctcgtcctcttcctccccgtcgtcttcatcagcaacagatggagcacacccattggggtcagcagcagatggagcacccccattgggatcagcaacagatggagcacacccatcggggtcagcatcagtaaattcaggcacaggcacttcttcagcagcaagaaccgaagtaccagcgtcccgatccaaactagatactcgccggaggcgtctctttttctttttctgctcatctgcggaaggatcaagttgattggctcggcaagggcgtctcgggcgagtactggcaggtttctggatatccaaggttgtaccagtttctgggagaggcgccaccaccaatgtcccagcaggagcagcatcagaagagtcctcaaccagcaaatcaagcatagcacttatttctgcgtcactaggatccaaaggcacctcaaaatggacttgccgctcatcatcaggaatttccccgagcgaggcaaccaaggcgttaacttcttcagcagagggtcgcactctaaggcccaaactgccatcagc

SEQ ID NO: 138778 - DNA, 403 bp, Zea Mays
cgcgaagaagtccacgctgccggaccacctacctctcgcgcccggggaggacctcgtggaggcgaacgcacgctggacgacatcctcgacgcccagtgcccgtaccacaaggacatgcgccacacccttcggaactgtagagacttcaagcactccgtcgggcacagccgacccttccaacctctacctcctcctccgcagcggggaggaccaggagaaccgcgacaaccccagcaacaggaggagggaggaggtggagccttcccgcatgtcgacggagaggtcaacgtcatcttcggcggacacgggtcgcaggagaacaagagacaacaaaagctcaacgatcgtcagatactggtagcgactaccggtcctcccgctctgtaccgatggtctgaacacc

SEQ ID NO: 138779 - DNA, 543 bp, Zea Mays
gtagcttcaatatttgaccttgttgttggtgatgtagttcccctcaaaatcggtgaccaagtacgaaatcatatattctggtctatctctacatcttagatcattctctattttcccctctaaatttgatgtggttatgttcatccatctttaggttcctgcagatggtatactgatatatggtcattctcttgcaattgatgaatcgagtatgacaggggaatccaaaattgtaggtgttgataaaagatggaacccttttttgtttcccaaaatctgtgtttctaaatgtttcaactaatatatcatgaccaggttaataaggaccaaagggcccctttcttgatgtccggttgcaaggttgcagatggttatggctctatgctggtaagcatcagactttttcctaggactagctgagtataccttaattgactctttcaaattatatatgttgagtggagtatgttgctttagctacatattctttcctgtacagtattacgtgtaacgactgctactatcacattcattatgacacta

SEQ ID NO: 138780 - DNA, 626 bp, Zea Mays
ggcgaggaggtcaggcgaggggttgatggcgcaggtgttggcgacgacgagaggtggtagtgcgaattgcccagtgagcggagcatcgcaacggtggcgacagttgggctagggttaggggtgatttgggtcgggggagaggaactgtgtatgtgggccgtggagacgttggcaaagttagctacgggccgatgcgatcggacggtccaaattgatcgaaggcagaacgtcagaacgacagaaccagagatgcaaactttccttacagccttaataactagtagagatatagaaccagcattcaaattgccagttcacacatatataccaaccatactttacttgaaatatagaactaacaatccataaactgtaagtaccgatcactgcataaaggaatgggatgggtggcgttctccgacgactgaggctctatgggtgaatggctggcgggcatacaacagtgggatctacatgggcgatggagccctcatccatggagtcgtaggcactggcttcggagggagcagcgtccgacctttccatggagcagtcgacacaacctacttcatctgtggattttgatgaggggattcaagcacaacatagagagaggaagaggagat

SEQ ID NO: 138781 - DNA, 493 bp, Zea Mays
gtcagtccacttctttactctcacaggggtaatactaggatcacgaacgattctacctatgtgtcgtgcgaatgttgtacaaagagcatggttgttgtagaacgttactttaatttttttctccaggctttagtttagcaagttttttacatttgtttttgccatggcccctcttctcttcagttctatcagctgaaacatttatacttcaactattagttgtgttcctatacctaaaagagaaaaatgaaaactgtgtaaattaatcatacctttttttgtagcattcacaatgttttcggcattggatgccctggtacagtccctcccctcctcatagttttcagaattgagtgccctagcactgtctctcccttcttcataatcatcccttctgttgtgtgaattaagcacaccattttttgtagcattcattaagtcttcaacattagatgctctggcacagtccctcctatcttcaaaataatccctt

SEQ ID NO: 138782 - DNA, 889 bp, Zea Mays
ggcgtggttttatccgaagccatctgccaggggaaaagagttactactatgcacatgccaatttctttttcaactagttattttattcattacatcagttcattacatagtacagcacacagctaccataagcttattacacaagagtgctatcgagggtactaccgaactccttctctaaagtgtccccaaattccttgagaaggtcatcaaggctggctagggacatttcctcggtgtcggacgagtttcttatcctggtaggaggtaggtctggaggggcttcttccttctgctcagtctgacaaccttggcttttggtcttcttgcgattttttcttgcggggacgagattcttcagtttcttgtcgaaatccattttcagagtgcgttaggcctcacggatattggtttcctcgccttctgctatcttgaggctctcttgaagggacgccttttcccttgtaagttccctgactttttgctctaggctttccacccgggagtttaggtgggtgcagtgggaggcaaggtcatcatattggttatcaagggtgtgaaggtatccagccatgtagacgatggtggggtcatcctcaatagggtctcctcctgacagggcctgaagtcttttcctccaggtaggtgtatttttgttgctgggtgggaagtagcgaaggggggtttcaaagatcaccttgttgtagctctggcatagttgtcggaaggctttccgggcaacatcttggcaggtatctgggaagcggtatccggtaaaagtgacttggaaagaaggatggtttggatagtttcggctttctcccaggtagactgccatagagcatttttccattccgttctcgagttactccttccagacatattctgg

SEQ ID NO: 138783 - DNA, 826 bp, Zea Mays
cctcaaaaggtgccatcttcagactggactggtagctattattataagaaaactctgccaaagacagacacttgtcccaatcctttccataatgtagtgtacatgctcgcaacatgtcttccaatatttgattcactctttctgtttgaccatccgtttgagggtggtatgctgagcttcggattacttgggttccaagtgactcctgcagttgctcccaaaatcgtgccacaaatggtgctcccctgtcagatataatggtcttgggaataccatgcaaccttactatctgatcaatataaatctcagcgtacttctctgccctgtgggtggtatgcactggtaagaaatgagcagtcttggtcagcctgtccacgataacccaaatagaatcatgatgtctggaggtattgggtaatcccactataaagtccatgcaaatatcctcccatttccaagatggtatgggaaggggttgtaaagggcctgctgccttcaagtgactagcctttatcctctggcaagtatcacattcagagatgtacttggcaatttctcttttcattctagtccaccaatataaagatctgaggtcatggtacatcttggtgctaccagggtgcatagagaatttggaaaggtgagcttcatctagtatcttctttctgagctcaaggtccttaggaacaaccaatcgatctccaaaccatagaattcccttgctgtcctgtcggaaacacttgtatttctctgccttttgcttgatcatatccttgataacctgaacacccttatcctcaatctgtgccctgactatctgttcttg

SEQ ID NO: 138784 - DNA, 587 bp, Zea Mays
aaggacatgacatccacagttacacgtcgcgagagagaaagaaggcacgagacgtggagttatcgaaatccgtcgttgtcaaatggtgcaaccaaactaagtcaacacccatgcgaagaagtgaggtagggtggggaaggtgtcagacttacggcgaatgcgaaaagtccacaagtagtgagagatgtcatccaggatgaccagatagtactggtaaccagaaatgctcggtatcagggatgtccaaagatcacaatgaatgagatcaaaggggcgagttgtacgggacatggaagaggggaaagaaaacgagtgtggcgcccaagctgacaagcatagcaaggcgaggcagagttgatggtcgaggtgctcgagagtctagagaggacgtcgtggccagggtggccaagacgacgatgcctagtggaggcaaaggcagcaacggtgagggcatagggtggccaagacgacgatgcctagtggaggcaaaggcagcaacggtgagggcatagtggaggcagaggcagcaacggagaggcaacaacacaggatgagggagatggggcagggaagcaaataggatatag

SEQ ID NO: 138785 - DNA, 284 bp, Zea Mays
cgcggccgtacctgatgggtcccgcagaacgtgctcacacgaaggttaaggttcgtgttcagtacaacttcatcctctgtcaatgcccttgcgtcaccctccagcatgtgcgagtatgcactagacgtgttgtcctatcctttctggtacgtgggttgttactgtggagactttgttgacgtggtcctccttggcactgtacacatggcccaaacatagtttggtgatgatgtgtgctgtcacgaccgttgtgggccaacatcggcctgaattccttccttgcg

SEQ ID NO: 138786 - DNA, 379 bp, Zea Mays
gaaaatatttgacacattcaacaaataatggaataactaatagctaagtggaattacgcagagctcaagcccaaaggcttgctcggctgctgctactctggaaagtggaaacacgcagagctcattatattaagattgtgtgctgcaagttcttttctggatcacaccgactagtgcgtgcctacttaacaagtttagagacctagaaatgagttctcaaagtttgtggacctaagtggcacctcttgacaacttcaggagccgtgcaggcattttaactcttatgttattgtgcaatgtagtgttgtcttagaattttttttccctaaacatgcaggagagctgcgtgtcacttcattaattggtagaaaacaatctg

SEQ ID NO: 138787 - DNA, 514 bp, Zea Mays
gtccttgaccacccttgtttctaaatgatccatgagcggtcatttaattttgcacgctcgtggtaatctcgttgcttccttataacttctctcggtaatgaattcttacttcaaccattctattgaaacatcacctatcttaccttgattgttttctccacttcgccacttcgcgagtcctgccttaactctatccttggttatgcttttcacgatcatcatctttaccctcgtcgcctctatatcttaccttgatgcttatattatacccgtccttaaaaaaaccttttctcctccatctcaatcttatagttgtattttacctatttacccttggtcgtattctcttccttgtctcttgcgagtttttaactccaccctttgttgtttgttattacctttaccttcatcgtctctccatcttaccttgatgactatcttatgtctgttatttaaaattccctctcccatctcaattcgagggaagtgttttacttatactgcccttggtcgg

SEQ ID NO: 138788 - DNA, 565 bp, Zea Mays
aggatgctgaggtattcttggggtcattcaccgagttggagtaggcaggtcctgatggcttcagctggggacagttgttcttgaagtgactgggatctccgcagtgccaacatgcattcgccgggggttggttgcttgcaactgaggggcatgaaatgagctctgactctgctgactgaaccgtgatggggtgggtccagctggtctactgaagcttggtcccttgggtggaaatccaaaggatcgagttttctggtgccgatcttgctgctgagcccagaggacttggaattttctcttgagatggcctttttcttcctcctttcccctttccacttgcatggccttgttggagaggtgagagaaactgaggaagtcttggctggctaggatggtcttgagttctggcctgagtcccttcaggaagcgggccatcttcttgacttcagtactgacgtcatctagcgcgtagcgggccaactctgtgaacttgtgcacatattcactgacagatcttccgtcttgagtcagttcctggaattcgtcttcccggaaagctgtttca

SEQ ID NO: 138789 - DNA, 607 bp, Zea Mays
accaaactagcacttaacaatattctatatattacttattaaagctgtaaaggtcggtgactcttcctcccgcgaggcaaaaatttgaggtgtatagaaatcgaacagtgaccaattctctagaggtgcccacagttaaccacgccaactaaggctgctttgagttatatggtggtcgttcaagataattgtactgacaaacattctttccctcccatcccaaatctcctttagacacacacacaacaacgcggaaactgcacagcgcctccaacaaagtctccaaacaaattcccagtcccatccccggaaccgctcgctctatccctctcgtcagctccacgatctgcacgtctaccaactcgctcactccctccctcacctcaactccacgatctgctcgtccaccagctcgcagaggaagataaatgagggcgtttgacaacggatccgagggcgcaaaggaaggagaagcaatcgggccgagtccgtcaccggagatcaaggagaagacgattatgtggcgattgtcgctgggttgcttcgttgtggcatcgaagctgacggtgagtccaccgacgacaacaatgcgttgtcatattctgct

SEQ ID NO: 138790 - DNA, 3538 bp, Zea Mays
cgaacacgcgcgcaaaaaatattgacgaaaactggaggggtaaaggggaaaaggcgacggccgcctgggccctggaggagcgagaaggcggaagaaggggagcggcagtcgcaggccgcagctcgttgatggtggttagggtttcgccgcccgcacgctcgacctgctgaagaatcgcccccctgttgaagaggtctgcgcctcgccctataaggctccggggaagaggagatagacatcagtggaccccggcgcgcggctgatggcggagcaggagcggagggacgcggaggctgggggcgatgccgcgggcgcagcggtggcgtctcacaccagcagcatgcaggtgaggtctccgcaccctacttctcggctgtcctgtacgattttgggagctttatgatgcgtagatccgctcgctgctatttgattggctaaacctgcgtccgttgcgtgccttcattttagtttgttagtgcgtagtaggttctggaagggagctgtcggaattttgcatggaggcggtggggaatttctgtgggccaaccgtgccttagatccgagttagctgccgttggagctggtaaattattgttctgagagggattgggtgtgcttatttcttggtgaactgtagtaatgagcgagatatcataagacttggtttttttgttcatgaggaatatgtgggtatgtttttttttgttttttgtgctatccccatgctgctgtaccagcacctgcatgtttgggaagtagtgaggcctgctttactgtggagttagcctgtgtcacttggtttctcactctgtcagtgaacttattggtgatagtctcgatgtgaacagttcagcacaatgagattgacaatttaaacaaagacgaatgtgccctgagcatgatgtaatcactacccatatgccatatcatttcgtaaacgtggggcatacttgattgaattatattgatacaatatatcagctactaccattttgattatttctatgccggcagtagtatccttctatcttgaaaactgtagagccttcccatctcatctgaaatttctatacaatcaaaagttccagcttaggtggatgtgatctacattgataaacttaacatctaggaagtaggaacagaagttgttttgatttaaatttattgcatcatttgattatatgtaccggtgggattttgttcctctgaagccaaatatcccaacttcattgaatgtctcacttcattgtagaaaaacaatcgacttttggtagtttgacctaaaagaaagataataaaaggcacccatgatactccctttcagtggttgttgcgtatgtcagaaaggtcaaaacagcttgtgatacctgccagctgatctatggtcatatttgtatccgtagttaactagttatactacccaatccaagtatcggtcacttcagtattaaacaaacactgatagccatgatttgttagacattgttgcaatggactagagcacgtgatgaatgtttcacttgcacagaatttttattgtggataagaggcccttgcagcagcatgtcattaggtctaggtgcagcagaggtaccaaggatagcaaagtatgacagtagctgggcataatgtgggagagcctagagtgcagatctaaccacgtcaaaagtcctacaagtcttaacgttcatatgattagaccgaaattttgtttttaggaatttgcaaattttgattagttcttactgtgttagtcattggtccaacgtccaatgaatgtttaatttgtgttaactactagcctttctagggtatctatatcgaggaggtccacacgcataatataatgatgaagcattcttctattttctgtctctcgagctctctagttctctctaccaagctatatctgtctgtctcattacaatccttaaccccattcagccatgtatattactaacgatggttacaattctaactgttccagcgtgtcaaagtataccgtttggctgatggtgggaagtgggacgatcaaggaacaggtcatgtttctattgattacattgaggtatgaagaatttctttgctaatatgggtggtatttataatttcttattcatgggtctaagctaattctcatactttctcctgattttctttgatagtgcccaaatatttgtttgcctcttgatctactttagttttgctaccctagtaccttgttgcaacatgcttcatttgaccctcattctgtttctacaaataatgaaattgtcaactattcatttttttcactgtcaagggaacagtgtcccaatgtaaaactaaagaaaaccttgtcgaagtagacatcattttcatatttcatactgtaatggtgattcatggaacagtgtcccaatgtaaaactaaagcaatagtccactaaaaatgaaaataagcacaaattacttgatgatgattcatggatcaatatatcggtgtaaaagtaaagaaatggtccagtacaaatggaaacaagcagaaattacttgtagtctatgcctctatggcaccatgatattctgtcattgtattatgatttctaatctgtgtgcttactttttggaccttatatgatttattatttcgttggtttcagggttcgaaagaactcggtttgactgttttagatgaagatgacaatgagacgctacttatgcacaacatcacatctgatgatatttacagaaaacaagaaggtgaactaactcagtatcactctgtttttgagctaattcatatcttttttgcaacttcctaatccatttcttttgttagaaacaatcatttcatggagagatcgtgaagcagcgacagacttagcactaagctttcaggaagctgcaggatgctcctacatatggtgattgaagcaagagctgtggtgcagttaccatgtttttgttcaattactctttttggtttatttgtgttctttgttggtgctttgcagggaacatatatgtgaaattcagagaaaccttcagttcagtaaccttggtggtgagtttttaaaaatcagctgtgactgtttattcaaccacacatttgcatgcagcatgctcttctcattttaacgatgcctgcagctccggaagttggtcgtcgtcaatcatcagaatctctagaagcctctagaataatgcattcaaatggtacaccccctttgctgaacgtccacttgagattgtgccattgtggtatctttcaaaaataatatttagaaattattttaaagcgtctagtttgggaacataacagaaaagtatcttactgtccattgcaaagtaggtgactagattctggagtgaagcacaactagaatctggccgttcactatttttgcttggtgttatgtgaacgaaaaggcttgcaccatctgaatataaataaatgtgtcctatgttagtagagttcagtgaccatttgttactctattttgtacttttagctcgataactaaaatgaattctttcaattgtcctcacacattcac

SEQ ID NO: 138791 - DNA, 307 bp, Zea Mays
gaagatattggagataattaagcccaaagttggactgtcaggctgatggaactctgaaattcagaattgcagtgtaacagagctaacattggacttggattcaaccttgatccagtgctcaactaagtttaatcccagtagtcgagttgtagctggtttatagcactataatattgctgcagagatctggatgtgttgccacagaaatttggaagaaatctggccctaaactatggctgtcaggcttactgaaggagcactcgccatggtacagtaagtcccaaactgaagaagatcacgattcccc

SEQ ID NO: 138792 - DNA, 377 bp, Zea Mays
ataaaagctttgaccaaagctaacaagaggaaggtacgccatgggactgaaccttttggacattgtgaagtaagttattcatattttcacagttggttatgcacatttacacagttggttactcacagtcacttcaattttatttctagttccgaagctcgaccgagacatgctatgcagttggacctaagatcgatcgccaatctgaggcaagtttatgatgtattatatacattgtttatgaatatttatggaacaaatagaataggaaggtggacatggattcttattaatttttgctgaacaaccagccggagtgcaggaccaatatttttgatgcaccgcgccctgcccccatgcctcggccaacttttaac

SEQ ID NO: 138793 - DNA, 319 bp, Zea Mays
aagatatagaggtgataaggataaaggtgataatgatgaaaagcatagtccatggacagagttaaggcaagactcgcgaagtggagaaaataatcaagggtaagatagatatggttctaaccgatgggttgaagtaaaaattcattacacaaggaagttacaagaaaacaacgagatcaccaaggttgtttaaaataaaatgactgctcatggatcattaagaaacaagggtggtcaaagacatgtaaactgaaatgttttaaatagacaatagaaatttaggggcaagtatttgaaacaagagtatggaagggatacg

SEQ ID NO: 138794 - DNA, 329 bp, Zea Mays
gtcttcgtaacttgttacctgttataggatattcctgtgcttaccttaaagactgacgagtggtcacgttattgcgtttatttacttccaatgaatccagaggcagcaattaattcgcgtcgacagtctagaatggacacgtccacgcaggagatgcttgcccatggatcaatcagtacggacagaaattcgattccagaatcagggaacacgaaatggaaacgaagtcgacgttttgtggcttgtggctacagtttcggtgccgggagaacagacgctttgccaatggctttggcttctctcgttttcccacaccacaggtggaggcg

SEQ ID NO: 138795 - DNA, 311 bp, Zea Mays
gagaaggtggtgacaaaggttgcacataaacagcttcggtacatgcctctcactcctagagtgaaatgtttgtttctctcgagctatgcacatgaggtggcataaagattgtacggacagacaagatgggttaatagtgcacccgtcagatggtgatgcatggaaggctcttgacaactttgatccagagtttgtcagcgatgcaagaaacgttcgtatcggcttggcaactgatggtttcacgcctttcaatatgaccgctgcgtcgtattcatgttggcctgtcattgccataccgtacaaccttccac

SEQ ID NO: 138796 - DNA, 376 bp, Zea Mays
gtggacggaagagtcttcggatgagggcttggattactttgcggccttggatgtggctgaggcggaggcttctccgcgtgttacggatgctgaagttttgcctggtccgagtgttgggcgtaggcagcgaagggcggtggcgaagcgtagagtgagtgaattggatggtggttggcttcgtgtgggcaaggctggtaggcaggaattgttgtcctcgccggttggggcgagtataggtgagggggagttgcgaagtctttttgagggtgaggagccgaggataatgctatttaactatagggagatggggatcattccgaaggttgaaccaatgtaaggtgtgatgccctcgctgtacgcgtgtaactatagtttg

SEQ ID NO: 138797 - DNA, 890 bp, Zea Mays
atcaagtgcccagattagaagttgaatcggtaggtaaccaggggcattggatcaagatctgttggccccgagttaatgaaaccggatccaccgtttatctcacaatctatggccatgatttgatgaatcaaaggggtaccaagcgatttaatcgaagccgtccactagctgatctatggccacgagcccatcacccaccacagccgttcatcaccgagcatgcggttcgcgagcttcttcttccccaagacgaactgtggtggcgtgagcacccagggtggcggcgcccagagcccgatggtggttgccatggctggccacccttttaacgtgttctggggcacgccggtgaggtcgagatctgtgtggcatcgacaaggaggagttcaacgacattgcgcaggggcttggcgtgggaggtgtagctcgctgcgcacgatgtcgctgtagcagtccggcaacagggaagaagcccgcagtacagggcgcggcaaccaatgcgtaggagcacactcggccgcgaagcttaggttattcatggacaaaatcttaaccaggcggtggtgagtaggcagggacgactcatacttacagagacgacgcgcagcgacagatccacaacaaggctcgggtgtgagaccgatgcacaccgcggtgagcgatttctgttcaccccggagaccttcccgccaagcgatgctttgaagacttgcgacccagctgcggtcgagtcgtgatgaggatgcacacgtggttgataccaggagatccccacggagggcttcatatataggggcgagagccgcagtcagccgacaacttgccggcgggaatcgcggcagagtccgcggcagcgcgaaggagatatgcgtgattctgttgggaacaaa

SEQ ID NO: 138798 - DNA, 394 bp, Zea Mays
gctttacgccataagggtcagattaccatgcactttttaccatacttatcgctttttcaaccactacgactcagacgtctcgttcacaagatgggctaggtacacatcttagcccccaaccctggccttggttctctgcttagtaaaaatacgggatacaggggccggaaactctccttcgatcaaaggtaacagccaggacatgggctcgggctcgcctcttatccatattacgacaacccttgtacacctaggttccctccttgcagctataaaaggagtccggggcctccaagggacaagaggacaacacttcaccgtttgccctccacgttcggtattggcactagcctcaatcactcgcagagacttgggatccactccctctctcgac

SEQ ID NO: 138799 - DNA, 411 bp, Zea Mays
ccctcgccccctttagagcccgcaccccgctcgaccacttccccctgctcatttgtgccctcaaccgaacaccctttccctctctctcgccctgcgcgcgcacccaggcagctccaccaccgctcaccgacgtctgtcgcccgttctacggtcgccgtggaaccccccgccgtgtccattgcctcggaaacctctgccctatcacatgccatctagaacgccccttagttcgccttctccccctctggttcgtccggcctgcgctcaccgaagcatttcttgcgcagccggagaaccgccaccggcgacccgcgtccttgccgcaccccagccttcgtttgtgagctcctgagtctccacttgaggtaaccttcctacccctgcccttattttcctctgtcatgcgctttc

SEQ ID NO: 138800 - DNA, 508 bp, Zea Mays
aagaccgacccctgaggacgtgtcggacgcgctgggactcattatcgatgttttgattcgcattatacgcttaaatttacccggccagaatccactcactatcgtacgcgcgctattttcacgctgtaattcgggctccattcgtcgtacgaaatagatcgatgatatacacttaaatttgtacctatttatgttgttttggttcacattttatgctaaaatcttctcgagccagaacacacacacggtcggatgtgcgcaattttcacgccttaattttcggcctcattcgccgtacaaaacatatctacgatttacgctaaaatttgtactcgaatacactatcgtacaggaaaggctactacaaagtaacgtcaaagtctcaaaagaatatttccttattttaatgctcctcaaaccgcaacattgagaataaaaaggtatttgtcgcacatttatcgcgattttacagcactactttcctaatctcaaaccaaaccagatctac

SEQ ID NO: 138801 - DNA, 928 bp, Zea Mays
gggccggcccgacggccgggccgtgtatgggccgccccctcggcacgacgtgcttggcacggcccggcccggcccgtttaaacggtcggcacggcgttggcccgttaacaaaaaacgtcgtggccaatccacagaatccgttcgaccgctcccccgaccccagcccagtccgcactccacacttccgcagtcactccgcagcgccgttcccctaaccctaatccccttcttccttcgctcgctttcgcttcgcacgacggcagtggacctcagcggtgtcggtggcgtgctccactcctctccacgcggccaccgccctgctcaccggtggtaagtcgtcgacgtgggccaccgcctcaccgagtcaccggtatgtcaccggctcacccgtcttcttccccttccggccttctgtggttcttccttcgctcgcttctcagacctccagtgagtcactgtgttggttacttggtggcgttgcgttgcgccgtggcgatgatcccagttcccagatctgaaatccggtaaggcgccgataagtccccactccccagatccgctctgtgttggatccttggcttcccgtgctcgatccactcctcggttgcgcgactccggtgctccctgctctggttttcctaatcctacattcctacctaaccctaaatccttaatactccctgctgctgctgatggaagcagtgttggtactggtactagtggtagcatgggtgccaatgcctccaggaagagatccaaagtctggaatgactttgaggagctgactaatctcgtcaatggtaagagggtaaggtatggtgccctttgcaaatactgtaagcagaccttcagtgctaaatctagttgtgggactggccatttgcttcggcataattgcaatgctaaaaaggaacaacaacgttgtcgg

SEQ ID NO: 138802 - DNA, 338 bp, Zea Mays
cgacactgttgatctttgaggaaagcaagtaaagccctaggctgatgaaggcccctcaagagagagggctctgggtgcagctgttcgaaagagaaaattaggtacggcggatgatgagacggggctgagggctactgtgtgttttgttgaggaattgatggaaacgtgcacggttcccggggaattgatgtcttcgccagagctccaggaaacctcttcgtgaatgctgaaggttaccgaggggcgatggcctaggaatgatccgataccctgggccgctagcgaggtttttttacgtcttgactagctcgtgacctgaaaatttttccttatggaag

SEQ ID NO: 138803 - DNA, 472 bp, Zea Mays
gaagcttttttcactgcgctctcaagcgagcacttcatcatttagagataacttcgttagaagagtgagcttcgtcaaaactgcaaaaacaaacatcaacttcgttaaaaccacaaaaaacccatcaaatgctagagtgcgttcgactgcaagggtgactcgtgagggagaagagaccgaggtcaccaagacagtaccaatttccaaagtcatgaaacaataggtctagttgtgacagagggaactactgacgaaggtactcctgttgccgaagctgaacagaccgttgctgaagaagaaaatattgaagaggatgaggaagattatagtattttgatcccaacaaaacccagccatctagattttgagaaatctactatgtctgaagctgacatgcccatgatgatgaagctgggctactttggggaagctgaaaggaaacttgtccgatttgccagagaagagaccaccc

SEQ ID NO: 138804 - DNA, 487 bp, Zea Mays
tgcactaattagtatgcattaattgaatgtatatttagtgatgttttgccattttttttacagatgccttctgaaacctgaagaagatcgcgaagttgggtctgaaaatgaacaaaatatggagctggagctagtggatgcaacaacaaagcgaagtgaggatgaggtggttcaaactgttggtagacaagacaaagacaaggatgcagatgaggatggtaagaacacaactgaaacaggaaggaaagaaatggctccgaggtctgaaatgtggcagcacttcatcaagattaaggatgaccaaggtgtgttgaagaagggaaagtgtaagtattgtagtcgtcccattaaggcagatccgtatgtcaatggtacaactgcattgcataggcacttcaatatttgcaagcgtaatccacataagaataataaggatccgaagcaaggcacattgcaagcaattcaaggagaaggcattaccacttgg

SEQ ID NO: 138805 - DNA, 358 bp, Zea Mays
gctattctgcagtttggcacgtttggtttagtggtgaagtaaggaaagggaaggcaatgcaagaaaccttggctggccatggacttgtcacttgtgagttgtgatggagaagcagaagctcttctcgggaacatgctggacccttcatgaaacttcgcgcctccaccagattcaacagctaggtgatgatggcctttgtgaactgtgaattctacaaattgctggcccaatggcctcttgaatgaattctacaaaaaaagggaagcatctggtcccttccccggagatgttccagtcaaatgacgatcgagtaaaagcgctggaatcatccgtcgttccttgttggatgaggtcccag

SEQ ID NO: 138806 - DNA, 452 bp, Zea Mays
gtttgcattcgatatgttcccctcttaaagtgtctctagaaggttaatttaaaaatacaagagacagactcttcacgaatagaccatctctacacaacactccatacataatgtctcttaattgcatttatggtctatgggctcatgattgtaccacttagtctcttaccttttttatacttagaaaatcgaaccaccgtatcagagttgtacttgcccttatattgataaaaagaaagcttcaaaataggtaacaacaacctttaaaaggactacaacaaaaataaccagtacaacaaaagctacgccaaccctacaaacaagagcaacacccgaacaacaggagtgcacgacaacgttagcaacacgagcatacaaaaaacacacaacacaacaaagacaaaatctaataaaaaaagcaaagaaacctccaccacgaagtcccaaaaagc

SEQ ID NO: 138807 - DNA, 506 bp, Zea Mays
ctcaagccgagctacaacaacgtggtaaagtgctttagcacgtggcgcacggcggtaatcggccaacggcggtgagatctatcccaatcgatcgatgagcaagggggtacagtgagcctagccgtgaccgggacccaagttgatccaggcgccaagatctttacccgcccacggttatccgcaagccacgacgcatgaatcgtgacgatcaatcaacaatcacggtgaatggtcaccgacggcgagggggaatgaacccgcgatctgattcagccactgtaccataggagggttctgcagacagcctgacagtccatactcaaggtagattttctctaaattttgcatgacaactccatcatccttctgcaccaaagttgtagacctatcaaccatctctacttttgctataacagttccagccaaattcccactgaatctagctcaaatccgatctcaagttcggccaataccactggtggcctaattttagtctagaaaccgac

SEQ ID NO: 138808 - DNA, 542 bp, Zea Mays
tatgtttttagcttgtttgaaggaagtgttgtagcctgtcaaggaggaggattctatcatcaagttgtggctagcacatgtgaacaaccatttgaagcatgcataggtgcatggggagcatgcttctatctccaacttggccaagctctttggcccctgttctccaatgaagcatgattcgccatcgttgatccttgcttctctcgcagcagcctacatggttgccgacttcttggtatatcaagacacaagtgcaaactccgcagtctctgagatgcccacatggatccttggtacagagaatcatagagagatagatagatcttaccagtaatgaagtggtcgcaaggacatttgaagcagaatctcaccaaatgatgtccatcgagaagaccattgaggtgtcttcatagacctctacattgcgtcatgttgtcatctttgttgaggatgttgttttggtggaggatgcatcggtggatgaggaagctaccttggttatgcttactacttttgaggaccccatctttcttaccaccatc

SEQ ID NO: 138809 - DNA, 632 bp, Zea Mays
atattaagttagacctattagatcgaccaccatgaccgatcacaaatatcacaacaacgttgccccaggcaacaacacaatgctgactaactcgccggctgctgaggatgataaattagaagactacatgaagaggttgaacgaggagctctagcaacaagaggctcagatatacaagttgacagagaagtggtacctctcgcacttcaagatagatcgccaccagaaggtcgttcgagagagaaataaacaatgattccatgtcaaccttgcttggccggttcatcacttttagtggcgtcgcaccattcgacaatattcaatatattaaaatcgctttagatgatcggattaaaagtgtgatagaggatatagggaaaatgagcatgcatttgaaaaaaaactcatacgcccgattttttgtcatatgaattgggcaccgaaatagctatgccaataacatcggcaacaaatgggttttcttagtcccagccatattgtggtatgccgatgaactcatatccgagacaactgatatcgtcatctttgctatgtggtagattggatctgagcacagctgaacaatccgcgtatgaccccggatagtccgaccctccatcagaccgtccgac

SEQ ID NO: 138810 - DNA, 543 bp, Zea Mays
agtgcccaaagaatgcctatgtgaagttaaaagttgtgaatgcttctgtcattgatcttaagctgtgacatggaatctgggtcctcaagatcaatttccagatctttgtgcataactttctcttgtagcagcttaagaagccgaatctggcacatcctcatctgtttgacgtgtgacataacttttttctttgctgaacgaatctgatcatatccagtagtagtgcgctgaatagtattcacaacgtccaagagagtagttgtcagctcatctcctgtaacaatctcaacgtttccttctgcggtagttcttttgcccttaacactaagctccttgttacccataaaatttctaactttcagtgggacattcgacgctttgagatctttagtgtcatcactaacttcagatgtcagcgcctcatctcctctatcttcactgcccacaatgtgcttctttgccctctcaccatgagcaccagaatagctaattagcagagtatttgtgctgcatgacttcatgaagttaaagattttctcttca

SEQ ID NO: 138811 - DNA, 747 bp, Zea Mays
cggggacgcagtcttgattacgtgagcataagtgacgggcgggtaagtttttcttttgtagtttctctttccgtgatcttttgttcatccggattgtttgtatggtctctttctctagtgtcttcttgctcgagcggtagcttgggtggaggcgctgcgatcagctgaggtggaggcgatccagctccacgcgagttcctcctgtgccaaagacaaagagcgcgagctcgctaacctccactccaaaatttgtcgtcttcgaagcgaggtgtcgcccttgcacgcggagtgtgatggtgctcgtggcgacatggaccacctccaggatgagggctctagactcaaggagacaccacgtggagtgaagtctcgcatcgaactggccaaatcatcctcatgggaggtggaggttcgcctggtgcagccaggctcggagctcacaagggagcgcgacacgatcgaaggtccgcccacttgtttatccatcacgtcttgatcaactaccgcctctgatttctttgcgccttttctcctacagagctccacaagattgtcgttcaagcgtgggatgcaaaggccatggtggacaaggtgggggtggtggccatagaaaaaacatgcaagctcttgctcgctcgtgaaaatgccgtcaccgcggggtgccggacggacgcccttctttctgagaggagctccgaacaccaagagctctgtctggttgctagcattgtctgtgactacctcttt

SEQ ID NO: 138812 - DNA, 420 bp, Zea Mays
cgaacacactggagtagttcttaccgacagtctcggcgcgcagagggtccggcgacggcgaaggcggatccgcggcggcgagtcgaagttcgacgaggaattgcgccacgcccagtggccgtcttcgcccacgaacgactcgacacccttccaatagacctggagacgctccaaggccgatcaccggggacccgacgtcgacgacgacgcgtttcggtcacggcggcgaacttgtcccgagaaaatcgcgacggtggtttggtggctggcgagaggttgcgaataccggtgaggatgggaagggtgcgagggccgccactggttttatctcgccgcggaacgaatcggagcgcgaagcccgggattccctgtcaacgacgcgcccgccatgctcggggcagccgttgagagacggatccg

SEQ ID NO: 138813 - DNA, 330 bp, Zea Mays
caaccggttaaaaagaccatataattcgcaccacagcaaggactgatgtgcgttagcgtttcacagccgtcggcagaaactgcaaggccatgaatgatgacacacacactggttttggcccactgcgtaatcaggggtaggttcaggataagataaccaatgggggtcctggtggagaggtttgttagagtagagcattggataccctcctcttatgaccatattaaaggatcttcaaccactcaacctctcggtgaaattggaagtctgtaaaacgaagctctgtccgagctaggttacagttacagggccggcgtgagagcaacttat

SEQ ID NO: 138814 - DNA, 472 bp, Zea Mays
ctacgaacggtgctcctctgtctgacacgatagtccttggtattccatgcaaacacactatttggtcaatatatatttctgcatacttttcagccctatgggtggtatgtactagcaagaaatgagctgtcttggttagcctatccacaatgacccaaattgaatcgtggtgccaggaggtgttgggcaaacccacaataaaatccatacaaatgtcctcccacttccaagaaggaatgggaagaggctgtaaggtacctgctaccttcaaatgactagccttgattctttggcaagtgtcgcactcatatacatacttagcaatttctctcctcatcctagtccaccaatacaatggtctgaggtcatgatacatcttgttacttccggggtgcatagaaaattttgagagatgagcttcgtccaatattttcttcctgagttctgggttcttggggacaaccaatcggtc

SEQ ID NO: 138815 - DNA, 449 bp, Zea Mays
tacatatctacaaagcagcattgatgcaaatgatttttgaataaatgatttccatccaaattgtagtgtcttgcccatatctttgcatttatttactgttgcacatagcagcaaccattcgtagaggttgcatgatgtgtatattggagaagcaaaatatggcgtagcactagcgaagcaaatctgcagattttcttggtagcagtgcagtggagaattgatgcagatgccagaatttacaggtttgcaaagcatggcaaaaacacgattcagagttcaattttgtccaatactttttgccaaaaaaggaggattattttgtcaagaatctatgctgctgcttctttccaacaatgccattggcaattcagaagtactagcaagatataaatgtaatgtacagtttgtaggaaagcaggaaagatacgtaacaagtacccttaggccca

SEQ ID NO: 138816 - DNA, 449 bp, Zea Mays
ttcggctccaatccatcaaacctagggaaggtccacttcggtatagatactggtggatactcccccgcatctccgccaccattcccacctccccgatcgcgaacaggagaataaccgcgataccttcgattggcgttcggctcgtgatgtcaaggttccccgcgagctcgctcctccatcaccgattctgaaccttccatgttccgcgccatccactcgagtcggatctcggccacctctcgtcctgtcttctccacttgctgcgccaaatggacccgctcttctgccgccttctgagccacagccgccgccaattccgactgcatcattagcttctgttgtacctcctccactccaacgaccttctccgtcagccgatcgatcttcgccatcatccgatcccaccgatccccgtcttccttctccttgttcgccatggcctcaagtac

SEQ ID NO: 138817 - DNA, 808 bp, Zea Mays
cgccaggagcttcttcctcaccgtggtgtgcgcgcaggggaaatcggacctccgtaacaaaactctcgagatttccgggctcggttccgtcttcgttccaccgtgaagctcggcccactcagcatcgcgcgcgcagcgccaacctcacccatggcctctgctggtgggaccctgttgtctgctgacccagtccgagtttgcgcgaaacgcggtagctgttgcgaatcgatcgcggtagttgggatttggtagcctcgacctgcctctacgtgcctatatttacgtcagtggaggtaccgtcgacctgagtgtcccagaatctttcgcgacggtggacaatagagtgaaattgagcatccgcgaaggaagaaggtgggagtgcgagcaatcggtggttgcgccatcaattgagctaaggaaaagggacctggggcttcggttgttgacgtggggcgtgtcctcgggcggctgcgtgggggtttgtggcggaatcggagtgaattgctcgccggacccccttcatcgcctctgtgtcgctgctcgtcgcgggcagtgctgttaagcacacggaatcacggtaagaaacctctgttgtcttcgctcccttccttgatacgtttaggaccgtattaatcgggagttcgtgtgccgggtcaccactgatttctcgccgaagatcatctccgccacggatccgcattccgccgtggccaacgatctgtgctacgtaaccaccagtgagttctagacgatcgcgttcacctcttcctcctctttcgatcgcgctaggtaactactcgcatccttc

SEQ ID NO: 138818 - DNA, 529 bp, Zea Mays
gcgtcggtcagtagagaatacctgttgtttccgcggacgcgcgtgatgaggagctgtccagtgggcccaggccgccagcggctgaccagtgcgcacaagccaagcagcggggtggttggttgggccgcgacgcggttgaggtaaatgggccgacgtgcagagaagtgaaggtgggccgagatagagaggcctaggcgcggttatgggttttattttttctttttttattctcaattaaaaactcaagtattcaaacttaaatttaaacccttgttttaaatttctagatttccaaatgtttaatggaaatataaattctactgtttaccaatcttattcttcttcctattccattgtggaggggataaatgattttattaatattttgccttctcgttttatattttgcttttctttctctaattcaaaatctactatctgaatttgaatttgttgatgagtttcacccatggattatgtgcaccaatgaaagtgccaacatgaaggaatatacattcatatatatata

SEQ ID NO: 138819 - DNA, 460 bp, Zea Mays
atggctccgcttcatttaaaacctcaccccaggaggaaaagagtgcgggccggaataaaactgtttggtgaattacaagggcgtgttagccctaaggatttaaacaaaaaatttacggagattgtcaatattccaggaatgttccaggtcttcgccagattgtgttgttagtctgtacgcgctgggagacgacttcgtcttgacgataaatggtccttcccactttggttccagcttaccccgtgactctgtccgggttgtgcggacaagtacgaggtccccttcgttgaattctcttgggacgactgcgtggtcgcgccaggccttcgtttggacttgatatttgttgagggcctggagggcgaagacacggtctctgtcgatgagatctttggaggttagctcgtcgacgtcgggtactgctgaaggtttgtccgcggggacccatgtttcatttcct

SEQ ID NO: 138820 - DNA, 594 bp, Zea Mays
ctgaaagcttataacacagtgctggagaaacagcgggacaagcaggttgcggcagaggcgaagctgcagaagctgcagcaggaacttgccgacaaagacagcgacattgctcgtgccgaggataaccttaaggcgagggaagcttccttggcgaaatgggcaactgacctcacctggcaggaggaggacctcgccttcagggaggagatgtgggcaaggcggaacaagctactggatgagcttgagctcgaggtagaggagaaagggaagcgtttggaggggaaagagcaggcactggaggagcaggtctgccagttccaggcagcgcaagctgtataggcgacacagatggccccgggcccctaggcggtggaggtgatgaggaaaacacttgatgacctccgggctgagcaacgcgccggggctcagcgcatcgccgcctgggccagcgaggcaagcacgacgctagtgccattgaggatgagtcccatctcggcattggtgcggccggcgtccatcttcgacgtgctcccgatactagattccgtcgctgaccgcctccgacgtctagatcagattcttggcgcccgcttg

SEQ ID NO: 138821 - DNA, 579 bp, Zea Mays
gttgcgtattctgcttggaatctgcctccttccaaggctttcatcagttttgtgtcaaatcctcctgctggtgacagtggtttgggtcatagagtacgaccctctcccgaagaggttgaggcattggttgtttcgcttggtgatatccccaatgatgagaggcaggttcattttgagatgcctacaaacccgagcgatgcagaaataagtgctatgctggacatgttggctgaggattcctctgattcggtccctgctgaaacactagctgtagcaactatcccagagcctggaaagaccttggacactcaaagacctgatagcactcacccgaaatgtcctcgccaggccagccatccaatttctcctgctgaggggaagaaaaagaaaaagagacggcttcagcgagtgtcatgcttgaatcaagatgtcggccctcctgctcttgctgccgaggaagtgccagtggagttttttagtggagttgatcccaatgggcgtgacccggctgatgctgaccccaatgggtgtgaccttgatgatgctgatcccaatgggtgcaatccggccagagctgat

SEQ ID NO: 138822 - DNA, 609 bp, Zea Mays
ggagtaattatcaaaaagtctacctaggtaccccttccataaatcggccatccatcatccgcggcgagagttgcgaccccgaggggtggacgcctggtttctctcaaacaccgttgagccccctctgtgcgtgcctacctgacgtccgatctagcgcgtgcggcccagatcgttgcatcgcaggagagagctctcgggacctccgctccgccgccagcccgttgcccggctcgtttctctgggtttcctctctggctggctcctgcagcacgcgccatgtccacaactcacgcgcgctacacctatctacgctctctcgagaggcggaacagacgaccccacgactgcgagcctgcaaggtacataacacatcgctggaaggggagagcgcgaacagtggtcacggagacgccgtgattttcctagggtgctttggccgtgcctgtcagagccacgtagcaggtgccggtgtgccgtgtaactggcgtgtactgggcagcgagcccaaggtgtttgcggaaatgccgcggccagtgagatccttcctctgcgctacctgcgcctctcagcttgcagtcctgtacgtaccttctttcacatttgcaaaaa

SEQ ID NO: 138823 - DNA, 702 bp, Zea Mays
gggggaatcaccgcagcggatgaactcgaggcctttctcttgggcgccatctcaactctactggcgaacagagcgagagccgaattgcagagaggatttggaggcaggaaagcaagaactagggcacggaaagcagaggcggctgaaagcgcagtatatgcgggatattcccgagtcagataccgtctctaaaagcgcccagtcagcacccggcagttacttctaaaacatcggcgtgccacgttggcatccggcgactacttctaaaaccccggtgtgccacatcatcactcggttattatcctcaaagtggccgacacggcccgttttaactcggctgtcgtttctaagacgctgacgttatcaccagtcgctcggcagctatctctaaaacgccgacgatgtccttagtcgctcagcggttacctctaaagcgccgacgttgtcttcagtcgctcggcagctatctctaaagcaccgacgatgtcttcagtcgctcggcagctatctctaaagcgccgacgatgtccttagtcactcgacagttatctctaaaaaacgatggcgttgtcacaggtcactcggcagtcacatctaagagcgccgacgtggtcaacagttatttcgacattgacatggtctcgtcatcactcggactctatttcaaacgcgcaaatatcgacaataatagctcggccatca

SEQ ID NO: 138824 - DNA, 348 bp, Zea Mays
tacgggtcggcgttagaggtggtcggggtcggctggtccacgtgcacaggcgagggagttcatcgacaacaagaaatctggcctgctcacgacgagatagtccaattggttggcttgggaggcttaaccaggtgacatagaggtggtacacggaaggaatttgagaatggcgcagagacttacccggttcacgttcgccagtgagcggaagaagtccggcgaggtgattcgggtcctccggtgaggctctatcggttctgagggcttggggagcttcacgggtctctggcaaagctagccaagccgatatcgaggactgggaatggctggagcgagctggctatggtg

SEQ ID NO: 138825 - DNA, 500 bp, Zea Mays
cggacggtccgggccaatgtccggacagtccgcgcatgacctttttgaggaggattgttacctgaatcctcacccgtcccagcaacacatcccatcgcactatgcaatgcatcaacccattaattcgaggtctagagcccaagaaagctttccggtcccacgtagaatgccggaaaggaacaatcaaacatatgaaccatatagggcaagtggcaatgcaccacgtagctcaaaccaatggggggaaagacaacatgctaatatccagccaaccccacctatgtttgaccagagagtcggtggtctcgcaccgactgctattgatatagtgagggaagaaatagctggggcgttccgagataaactcggagtaagcatggtacctagggggcaatcatatcggaaaccttatgaaagccgatttgatcaccacccatacccccagggaaccaggatacccgaattttcaaaatttttgggtgaccaaggaaaaaacacgc

SEQ ID NO: 138826 - DNA, 800 bp, Zea Mays
ccacatttcaaggactacataggagctatcgttggaagccattttcccgcctctgtccctttgtcggagcaaccaaaatatattggtcgtcacgggtacacatcgcagaatgtcatgatcatttgtgagttcgaaatgaggtacacatttatcatcactggttggcctcgttccgtgcatgatactagagtgctacaagatactctgatcacgtacgacgataggttcccgcattcttcagaagatattactccaatctacgtctgtagtatttcgaagtcacctcgttatgtatgaccttaaccatgataattttatatttcaggaaaatattatcttgttgattcggggtacctcaataggacgggataccttgcaccttataaaggtcaaaagtaccacattttcgaatttaaggatggaaggcaacctgttgctaccaaagaggttttcaactatgcgcacttgttcccgaggaatattatagagcaatcattttgggtgcccaagataaattggagaattcttattagcctaccttcattttcactgagaaagcaatccaagataattatatcatgcatgatgttacataacttcattcgggacagtgttttacactttcgcgacttcgattagtatatacctgcatgaggcatgttcaggatgtagctataggtgagagtagtagcaacacgtagatgagttagacatatgtgcttttagagattcaagtgctaatgtgttagtgtcatagttagttatccgtacgagtaaataaacatgttgtaatggacaaa

SEQ ID NO: 138827 - DNA, 470 bp, Zea Mays
tgggtcacgtcggccgctttggaaacaatggccgagtgaagtctggtaacgtcagcgtttttagaaataacagctgagttaaattgggccgcgtcggccgttttggaaataatggccacgtgatgacatggcacgccagcgttttagaaataacagctgggtgatgactgggcgcttttttagaaatggcgtctggcctgggaaaaccccatatatactgcactgtcgcatgcctctgcattttgtgccctagttttgcttttctgcatccaggccttctctgctcccttgcaatattgcttccgctacgctcgctagcaagattgagatggcacccaagcggaagactcagagttcgtctgtcgcaatcattcctcctatcgatcccaacagtcagttgcctttcgtaggtaaccacatgtttgttgtctctgaatccgaccttctccatctcgtatccatcggagttc

SEQ ID NO: 138828 - DNA, 616 bp, Zea Mays
ggggaaaagaaatcaggaaaaaggaaaggaaaagaagtctgttgggctggattcacctgcgctcggcccaaaccacctcccacctcattaccgcacggcccggctccactctgcggcgccgccatgtggggccccctggtcagtcgcttggcgcgttttctcgactagcatgtcaccgccaggtgggcccgccatgtcatccccgacctccggtaaaatcgcgctgcgccgcagcggaactccgattttgtcgcgcgcgttcaagatcgggcgggggtttccgggtccacggcatctatatctatgcccgtcctccctggagtcgctaatcgccctgtcgttcacgcgaaggcgtctccatccgcgccgccacaaccgcagacaaagctatccgcgctgccaccatcaatcctcgcccccattgacgcactgccccggggttagagccctgcacctcgcgtagtcgtgtggagtgtgtgcgcggagccaattgagcttggagcgtcgtcctgactcaagacgtcgccgccagtgtccccttttccgccgtggtgcgtggtcacggcctccgacatcgagtcttcaggtaataagcagttccgatagtccgttttcg

SEQ ID NO: 138829 - DNA, 375 bp, Zea Mays
aaacttcgaatggcttggtgttatccggttgagccagcactggggctgttgtcaaatgctgcctcaaagcgtgaaaggcatcctcgcacttttggctccaatcatacttgactcccttcttcagcagttcagtcattggtttggcaattctggagaaatccggaataaagcgtcgataataccctgccaaacccagaaaacttcgaatctgccttactgtagccgggggtttccaatccatcacctcttgtaccttctcaggatcaaccgatatcccttcctgagaaattgtgtgacccaagaatttgatttccttcagccagaactcacacttagacaacttagcatacaaccgatggtcacgcagtctctgaa

SEQ ID NO: 138830 - DNA, 378 bp, Zea Mays
atgaggttgacatcctttcggcaggagacatgctgagacagaagttcgatcttcgccatggtcagtatcaactagttaagcattacccagagcagttttttattgtcttccctgacgcaagaacaaaacaatgggcacttgatagaagatcggtttcatatcgtgggcgagagtttcatttcggtgactggtccgaggagagctatgctagaaagacaagctgggagtttagagttaaggttcgggttgaagggatccctgtccactgctggggtgaagaggtggcatccacggccatgggcaggtgctgcaccattcactatgtccaggagcgctctagacgtagagagcgtactcgttcttttgacctttgggctt

SEQ ID NO: 138831 - DNA, 448 bp, Zea Mays
ccaaaagcatcttaacacgatgtgattacatcggttttcttaagcattttgccacatactgggatgatactgcttgaggaaacgcccattcaaagctttaggcaaatctttgccttgtaatgtttgtagcaaataggcgttgccagacatcacctgttttactttataaggaccctcccagcttggcgaccatttcccgaacttccggtctttattccttagaggcagaatggtcttccacaccaggtcccctacttgaaatgattttgctttgaccttcttgttgtaggccctggctagcatgatcttgtccttttctattgctctcaaagctatcatcctcttgtcggtcacctcatcaatattatccatcattgaattataataatcggtagcagttagatcattttgcctggcgaacctgacagcattcaaacttatttccaca

SEQ ID NO: 138832 - DNA, 307 bp, Zea Mays
gggtcatcgacccgaacgctagggagtaactataccaatgcagatggaacaacggtcgatgctcatttatgacagaggtggatcatgctagttggggcaggagcagggcaacaaaggttacagtagggcgacatgtatggtggcaagaacagggatcctcccgtggctagctagagatggctctctggcttcctgcgccatcgctcctcttgcaggttgcaaaggtcttaggttgggtggtgccacttctgcctcgcgagctctatggctcctatgcgtctagggcagaagtatagtgtttcattgc

SEQ ID NO: 138833 - DNA, 739 bp, Zea Mays
gccaactctataagagcagatagtcctggcacagattgatgacaagggtgttcaagtcattaaggaaatgctcaaacaaaaggtggataagtacatatgttttcgtcaggacagcaagggagttctatggtttgaagaccgattagttgttcctaaaaacctagaactcaggaagaaaatattagacgaagctcatctctccaaattttccatgcaccccggcagtgataagatgtatcatgacctcagatccttgtattggtggaccagaatgaagagagaaattgctaagtatgtatctaagtgcgacacttgccaaagaatcaaagctagtcatttgaatgtagcaggtaccctacaacctcttcccattccttctaagaagtgggtggacatttgcatggatttcgttgtgggattaccaaacacctcccgacaccacgattctatttgggtcattatggataggctaactaagacaactcatttcttgccagtgcatactacccacaaggcagaaaaatataaagagatctatattgaccatatagtgcgtttgcatggaatcccgaggactattgtgtcttatagaggagcactgttcgtggcacgtttttgggagcagctacaaaagtcacttggaacaaccgtgattagaagctcagcataccatcctcaaaccgatggtcagacagaaagagtaaatcagattctggaggacatgttgagggcatgtgtg

SEQ ID NO: 138834 - DNA, 325 bp, Zea Mays
gggggattccgcaaggcagtggctgcagccttccggcgtgacccctgctagcgtcgggtagcttatacctgcagagtagagatggagctagggcttcacttgaaagcagatgtaatacttttgcgttttgtgaggtacttttgagtactataagaagtattagcacttatctgtgtaccgacatgctcttgctgtgtgttgcgatgttatgttgttgattccccctggtacctggcctcccgcctgggatgcaggcttgatgtgttgaggctggatatcagcgtatctgaaagggttatcaacaactctcgggagggagccttgc

SEQ ID NO: 138835 - DNA, 310 bp, Zea Mays
cctcggcaatagtaattcggagcttggaatatatcccgctgctggcgacgttgtccccgtttgctaccttgacggagagacccgatcttggtgtgacttggaggcccagctgggtggccacagcttcccggatgaatgtgtgggtagagcctgtgtccaccagcgccaccaatgtccgatccttgaccctgacctggagcttcatggtgctgctgatgtcaatgcccgtgagggcaggaagagaaatgcccaggtctttcgctgctgcatcttcctccatgtcgtcgtccatttccagcaagaatacccc

SEQ ID NO: 138836 - DNA, 611 bp, Zea Mays
cgaaccctttgttctccttcttcccctatgctcatctcggcgatcacaggacccagtagagcaggaggtggtgtgaccagtgagttaccatcaactcctccctctgtctctggatcaagacgaacgtcatctccttccatcgccggcgactctccagagccggccatctccaactccaattagttatgcaggcttagtggtctttttttcgaatgaaaggcaatcacggatactataaaagtaaccgcatccacgtttacagggtctccccattatttccgaaaccgtcccgatattatggcaatgtcaatgtcaaactaatatccataataaaatatttacgcacaatgactcaatgttttacgccaaacggtatatactatttatgcaactattataccgtttcggttttatgccatagctttcaacatcttatgctacatttttttaccttctgccattacttcccatgcaagatccataaattacgcgcccacgtatcatagtaatcacgtttgcatgtggaaactattccctataattccgcgcctttcccttatgtttaccgccttgccattcaaacaaccgcgtaacggcgccgtctgtcctgc

SEQ ID NO: 138837 - DNA, 834 bp, Zea Mays
tctgatctcactcttgtgcttgcgacatctttgtagatgtcccctgaccataaccttcttgtcttttgggattctttcctctttcttcattaaattgctaccatctggcgaactctagtcctttggtattgacatgcccgtatccttgcaatcttgcatacaccaatgactgttcaaggcatttcagttaacatgtccttgaccacccttgcttcgtaataatccatgagtgatcattttattttgcacatccttggtgatctcgttaattccttgtgacttccttcggtaatgaatctttactttaacccttctattggaaccttaccaatcttaccctttattgttttctccacttcgccacttcgcgaggcttgccttaactctatacttggttatgctctcacaattatcatctttacccttgtcacctctatatcttaccttgatgcttatgttatacatgtcctttaaaaccttctctcttccatctcagttttatatttgtattttacctattttcccttggctgtatcctcttccttgttgcttgcgagtttttaactccatcctttgttgtgctccggttgggtattacctttacctttctcatctctcgatcttaccttagtaattacactatgtctattctctaaaatctccaatatcctatcctagtttgagagcaatgttttacctatcatgcccttggcaatatcctcttctttacagcgtgtaagcttggacgcaactccattctttattgtactcataccacaggcttttcaatgccttcatcttttctctaatacccatgtctgttatcgcctttga

SEQ ID NO: 138838 - DNA, 347 bp, Zea Mays
tgagaccgaagccactgaaactgtcccaatttccgaagcaatgaggcggtctaggctggcaacatcagaggatacatctgccgccgaagtaaaacaagctgatgttgaagaagatgaatttgaagatgagtacggtgcaacgccatctaaacccagccacttagagtttgggaagtctactattaccaaaggtgatatggctaagctactgaagctaggctattttagtgaagacaaaaggggactgatccgcttcgggggagaggaagttaccccgaagccagaaaaagatgaggtggtggtttttaagagcttcttcaaagcagggttaagatttcccctgcatg

SEQ ID NO: 138839 - DNA, 422 bp, Zea Mays
ctcgacatcggacagattctctatcctggcgggagctggtgctgggggagctttcttcttcctctccgtctggcatccttggctcgtggttttcttccgaattttctttgtgggggcgagcttcttatcatagtccatctttaaggttcgataggcttcacgagtgttggcctccttgccttcctctatgtcgagacactattggagggaagccttctccttcttaagctctttgacttgctgctctaagctttccacccgggagtttaggtgggtgcagtgggaggagagatcatcgcagtgggtatcaagagtgtggaggtatccggccatgtagacaatggtggggtcatcctcggtgggttctctccctgacagggcttgaagtcttttcttccaggagggggtatttttgttgctgg

SEQ ID NO: 138840 - DNA, 444 bp, Zea Mays
gggagctttggcgggagagagcatcgcgtttaaaaagggtttgcagctcccaggggaagcggctgtcgcgatacgagcgacagtcaggacgggagggggcagcaaagagggggcaggtgagacaggacgtgtaattcctccactgtcggagaccgcagcgctgtcagacaaaaacgtatccctggagatctcgcagtgtccggccacagtagaggggatgggcgacaatgacgcgggcacagggcggggggtggttgggctgcattgaagacaccatcgtcaacctcagaagacctcgcgaggcaggcaaccgcgagcaccaccgaacccagggagtggtgcgggatgagcacagatgaagctaagacaagaggacccccagtcacaatgacgttcgcaatgttctgactggcaaccgaaaccctgaacacccatggacgcatg

SEQ ID NO: 138841 - DNA, 571 bp, Zea Mays
gtgtatataccttcaagctattgtaagcaaggctatctgcaagttcatcctttgacatcgcagataaaccaagctctagcttcgggaatcctatgttctttgtcatttctcggcaaacagatatctccttcttgttcgataggcaatatagaaaatcatctttgtcagtaccgctatataccaaggatctcgtgggatactttaaatccttggcatattgcctagcttcggcaattttttcctctgttagttttttccctacagcgtgacacactataaattctaactcctcagaaggtgcatcaggggcagggaattcagatccttcggtagccttttctttttctaacggcaacgatactttcgcggcatccgaaggtatcagttcagtgttctcaacaatctctgtaggtctcccttcggcgggagctgagggctcagcttcagtttcaacctgcgtcatggcaatttcggcagattccttcttgtctcccacgctaggtgcttctacagaagcaggagtcagcacctttgtggattccataacagcatccagtacactggccattct

SEQ ID NO: 138842 - DNA, 528 bp, Zea Mays
tgtacatctgatgggaattgaatgttcaaaatccttctcttcttgaccctgtgaccctagagttctcctcattcttttagtggcctgatatattttcaagacctgatcatttgactgggtgcctctttatcattctttactactatactcactttgtagtttgaagattctgttgaagcatagcatattagaagaaagaacaaagttgcatcaatgtttgaactgggatgtgttttcaaattcgagttacaattgttgtacttccccaggcggtagagaaaagcaggtgcatacttgacaatgatagattgttaccacttgctagataactagaacaatgttctgtgtttcaactagtttatcgtggtctacataattacacaaggtagttcttttcgtcgtcaaatatgccattaagttctgtcagctgccaactcctagcttcagaattctggaatgacgactgagaacctttgaacatcttcttaatttggtcctttcttttggattggattccattgatgggcc

SEQ ID NO: 138843 - DNA, 511 bp, Zea Mays
gataaacacgtgagataggggtttaaccgtctgatctaatcctatcacggaccgtccaggtctcaatgccggaccatccggccatgcccagtgccacaaatggtgctcaacacaccctttaagcgttccgatcgaacacaacttttaaggccgactctagcagttcacataaattttgctcatgagtattgttttgcactgtagactacactattcgcgtagtagagcttgaatatgagtataggtaagattctcgagatagtctaagcgtttcatcgcaactggtaagaggtgccaccaagtccaaagtctacatggatcggagtccggtcactgtcgtgaggaccaaggaacgagctcaactgccatttctatgacaacagtagcttatgttagacgagacggcaacaagtggcattttcagtaggaaatgcgacgacaaatcatttcgaaaatcaggaggatgatccatctagtattgtctctagtctctacgtgcgtctcggaaatc

SEQ ID NO: 138844 - DNA, 377 bp, Zea Mays
atcatggtacatcttggtgcttcccgggtgcatggagaatttggagaggtgagcctcatccaagagtctcttcttgaggtatctattttaggaaccaccaatctatcttcaaaccatagtatccccttgctgtcttggtgaaagcacttatacttctccactttctgattaggattctctttgatgatttgtactcccttgtcaccgagttgggccataataatctggtctaacaaggttggctcgacggagatgtgagacaaggtaccagaaggaattacttcaatcctcatcttactcaactcatcacacagggtattgatgcgagaatccatcaccatacaattgcattgtgactttcgacttagagcatctgc

SEQ ID NO: 138845 - DNA, 315 bp, Zea Mays
gtagtaatgggtgctgaaagtgtcgaagagagaggagaactgcccgaagtcattctggagctgttgttgcctctgacggatatcctggatgctttcattggtggcaggttgtcaaattgactggacaaggcccccatattatcctgaaagctctgctgcatgttgttcattctagtcataagtggatcatgaatagtgtcttggatgtgagagcgaaattcagaaagctcagagttcagcgcatcaaggttatcatcaaagcgagtctgcatggcatccatgcgctggtccatatgggtcatcatgccctgaaag

SEQ ID NO: 138846 - DNA, 649 bp, Zea Mays
cgatgaatctttgggatgagatgtccttcacgtgtgctgtctctacctctggttttactactttttctatagcttcatcacctgattctcgcatgcatggcttcttacatgaacaatgcaggacgacagcaggggctaaaataataggtattacatcatcatcttctatagagatagatcgaacatggaagtggggacaacaggtgtgttgaactggaaaatgacagatgggggacgggccgtatgaatgttcaaatttaatctataatcaaaactaaggatgtaattaatcaatagagagaaataatgttaccgcgccaatattgcataatcaactctttcatcatcaagatttgtgtaaaaaaatgctctccaacgcagccggtgagaatgaggagtgaaagaccggacgtgtgttttgcggagacagatacggaggccgttggagagcgaaatagtgacttagagcgtgtataatgcggatgcggagtgggatagccggtgttgctggagttggtctgacgcacatgcatgcaagcatcaacacttacacggaccattttctacacacgcatgcagcatgcaaatgcacgaagtctcaactgtttgcatgcatataagtagtgctgaatatggatcgggctttcta

SEQ ID NO: 138847 - DNA, 605 bp, Zea Mays
ctgaggtccgggagtcgttccttgcgggctttttccacaagtcttgttgtctccaagtctaggcgttgagctttgcatatgaggtcttctagcattggtttgacttcgagactgccgttgcttcccaaacatgtattcagttgagctgattctttcttccaatcctctaaaacgttggttccctttattccgaatggttttcgactgagggcgtctgctaccacgttggcctttccggggtgataatggatctcaaggtcataatccttgatcagctccaaccatcttcgttgacggagattgagatctggttgagtgaagatatacctcagactcctgtgatcggtgaaaatgtgacatttgttcccgattaggtaatgcctccatatcttcaaagcatgcactatggctgccaattccaaatcgtgtgtggggtaattctgctcatgcggcttaagtaggcgtgatgcataagcaatgactttctcgttttgcatcagcacacaccctaagccttgcctcgaggcatcacagaagacgacaaaatcctgatgaatatctggtagtgtcaaaacgggtgcggttgtgagtttctcctttatgat

SEQ ID NO: 138848 - DNA, 939 bp, Zea Mays
aagcagtaaggaaaattgatgtgtataatcatccactgttccagtgcgatagagatccttgaggtcagcgaggccattcatgcgcagtgggggccgaacctaagattgatcaattcggagaaacggccccaggtaatgtcgccgtagtcgcgctcgatggtgtagtaccattcagcggcaactcagtcgaggtgcagggacgccagccagactcgttcctcgtgcagtgtcctcatgccgcgaaagtagatatcacattttgtcagccacgccagggggtccgattcgccgtcataggacggaaaattgggcctgggtcgatgtgatctgtcctcccgacggaaggggccatccccgtcgtcgccgccgccgcgcaacccctccttgaagcggccgccgggattttggaacccctgaagattcttcctccgtgggtggaatttccacgtgggcaaggcgacgatcatgagattcgaggtgtgtgttgatggtggtgatttgggctagcatttgggttttgtgatcaaggatttggcgtagggagtcagcaagtccacgcccattaggattctgtccagtgccggactcgaaagtcatggcgctggctgtctctgataccaaatgatgcagactccctactttcgatggaggctcaacaggaggttgtggacaagaacgcaggaaataggagtgggaagggtgaggaggattcctggtggcgttccggacgctggagagttcttctagtgcgccccaggcaacctcctaggactaggagattttcttcttttgataatccctagtacaaactacccctggtctcttatagactgagcccaggttaatataaaaacaaatcatatcagtctcaacttgctagaaaacagactgactaaatatagaaacttatctgttgtctcttgtattccttatctgctg

SEQ ID NO: 138849 - DNA, 607 bp, Zea Mays
gtgcctgcaataacactgtcttccaaaaacaggatataaccgcgtgatactaggataaccaatccatacccaagataacatcgaatgcccccagggaaatcaccaccagattggccgaaaagacctcatcagcaagaatgacggaacacccctgacaaactgaacagctactaatggagccattagcagatctaaccaaaattgggtgacccaacctctgcaccgaaagaccagcacgcgacacaaaatcctccgaaacaaacgaatagctagcaccagagtcaaaaagagcatgggctgcaaacgaatcaactgaaatcgtacctgtcaccacgtctccttgctccctgccatccacagcgggtagcacataagctccagaaatacccgcagaagaggaagctcccggagtgaaattaacagaagaaccccactgagccgccggctgaggcagacgcggagctccaaactgagacggcataagagtagacggtgcaggagtaggtgcggcctgatactgaggaaaaccctgcatcggcacgaactgagaagtcccaggcacataaagctgctgcggaggaagaggaactgaaaactgctgctcagc

SEQ ID NO: 138850 - DNA, 321 bp, Zea Mays
agattcacgacttccttgaccgatgatccagaagcaattgggacaacaatgataacgtgaactttggagaacttcccaagaataccacctccctacccgacggcgcctgcaataacactatcttccaaaaacaggatataactgtgtgatactaagttaatcaattcatacccaagataacatcaaatgcccccaaggaaatcaccacaagattagctgaaaagacctcatcagcaagaatgacggaacaaccttgacatactgaatagctactaatggagcctttagcagaactaaccacaattgggtgacccatcctct

SEQ ID NO: 138851 - DNA, 688 bp, Zea Mays
ctcttttacaaaatgtgcaagccgaaggggtatcaggctttcaggaccgtctgatcagaaacggttggcccggattagatccatcccaccgcgaaccggtacgctcccgcgacggttggattaaagattaacggcacggatttaatgaatcacagatctactctgcaccaccggatctcgcatctacggtcgcagttcgtttggacgaaagggtacgcgagatctaatctccaccgttcgctcagatcaaacggcagagacgccttctccctcctcaacgccgacggcgaggccaccccagaaacccacggcggcgcacaggttccggcgaacaacgatttcggcaaaccagtggttcatatcgcaattaacttcacctacgcaatgcggagttcaaagcgaaattagtggcgaggttctcacccagaatattgatgtaggtgaggcagtccgcgacgaccagaggcgcggtgcttcccccgtcgtccgccgagaaattccccgcgctgcgacgacgtaggttccgccgcgaggtctcggtcggcttccccggatccggatcgacgatgaggagccgctgtgactacgcagagccctccgctctctctctcttggacctatcaaacggcggccaggtggttcacaatcgcaagggatgcacgagcgtggccgagggccccgacccgac

SEQ ID NO: 138852 - DNA, 637 bp, Zea Mays
cagacttttccttatgcactgtatctgtcacgacttgtaaagcgactgtacaaagaaaaccgatacgcgggtcgtggtggtggtgtcgtctgctttcgctgtcatttttagaagagaaattggccctcgagaacgacctgcctataggctataggtctgcgctgtttgtggcttggaaatttttcatccgaaatttgctgtgcgatttagatcatatttttctttggtggtgtggttggtcataatttgaagagacgagcactcgaaagatgcagttaccaaattaaactgttagtctagactgaaggctaggcgcctagtaaattattggatgaaccacatattgccgtccaagagtgtattgagcctggttttgtttaaggctgatgtatgtcgaagtaaaatgtattatttgacctatctgcagccatcaccgaacccggacgagacacgactctgaagttttgaaccttaagcttactgacaagaggccttggggcatgtgagtagctcacaagtcataattcactgcattttacttcaatgaaatctacggttcttgtttggtgaggccaggtgataaagatgtaggtcgattaaaggatgtaaagttgtattacaaaaacaagtacaactg

SEQ ID NO: 138853 - DNA, 508 bp, Zea Mays
cgatcatagaaaacagggttgtactcagcttcgcatgatgacggggctaccaccttctgcttttgagactgccaggttatgatgttgctgctgaggaagaacaggacactagaggtactcttccttgtatcaatatctccagcaaggtcactgtcactataaccttcaagctgtgcctccttcgtcctctagtagtggcaaccgtagtgaagagtccttgcaatttacctgagcactctctttactgctgccatatgtccagtggtttctcaatgaatctgcttatgtaccccattgagaacgccaaatctggccttgaattcaccaaatagcacagagaaccaacaatgaacctataccgaggagcgtcaacagcagggacaaagcttgacttagcttcaacctgggctccattggggtgttgcttggattgcagcctgacaaaccctagatcactcatctggcttacagtgatccccatctcagattgtgccacctccaggccaag

SEQ ID NO: 138854 - DNA, 282 bp, Zea Mays
ctggaacttcttcgactaccactgggtacaccgggatctgccggggctgaggggcgtagctggtgttgacgcgggtagtttggagggtgcgaaccatctacaagagaagtgttaactcagttgaatttcaaagaggtaagactgataaaggaatttataggaatgaaattagcaagttttgaacaactaggctttccatttctaactaatctaacgacctagggtcagcataggctttgataccacttctgtcacacctggttccagggggtagaaccgagc

SEQ ID NO: 138855 - DNA, 374 bp, Zea Mays
aaaacatcaaacgaatctcaagttctcaactactataagattataagatcagcaaagatccagaagagtgctatttccaaattccgtcaaccatgggttccgctggcctggcacgaacgttgaagtccctgtgcatcaccgggcacctgtccaaggccgtgagcctcatgtgccggagtcccgtgtgccccggcgctggaacctacgcgcttctgctgcaagaatgcgtgaaccggagggacccgaggctcggcaagaggatccatgcgcgcatggtcgccaccgggttccgctgcagcgcgtacgtcgccaccaagctgctcatcttctacgccaagatcgggcacctcggatgcgcgcagaagatgttcgac

SEQ ID NO: 138856 - DNA, 829 bp, Zea Mays
caacatctacccgcacaacagttgcagactattcctgtgacctggccatttgcatgctaggggctggacatgatcgggcccttcaagaaagctccaggaggatatactcacatactggttgccatcgacaaatttacgaagtggatagaatacaagccaatcatttctttgacctcagcaaaggcagtagagttcattcaggggataatgttcaggtttggaatacctaacaacatcatcactgacctagggtctaacttcaccagtttggagttctttgacttctgcgagtagaggagcattcagattaagttcgcatcagtggcacacccaagagctaatgggcaggtggaaagagccaacaggatgatactcgatgcactcaagaagaaggtgtttgacaaaagcgagaagcttgcagggaagtggatcagagaactgccatatgtagtctagagcctgcgaacccaaccaagtcgagctctgcatggaaacaccccattcttcatggtatatgggtcggaggcagtgctaccagccaatctgatctttggggcgcccagattaacctttgaaagcatagccgaagcagaagcaactaggctagaggacattgacgtactggaggaagaacgactaaatgtggtaatccagttggccagatactagtagaccctgaggcgcgctaccatgacaaagcggtgcggcatcgatccttctcagtgggagacttgtcctccaccgagtactaacgggggagggatgtcacaaactatcgccaccgtgggaaggtgatgtgcacccgttgggtgaatgcccgatctttcga

SEQ ID NO: 138857 - DNA, 528 bp, Zea Mays
gaaatgtaggtagtcatacctttagggttgaggtggaccatggtagtaggagtcagcgtaggatctagaagttgagcgcccatgttctgtttcgattctcctcctcccccttacatagtgggtacttggggcgtagtatcagtagcgtcataggaacgttggtttctaagggtgtcatatcttagggtttggtaattctgttcactaggcgctagaaagagattagatctcttgtgaattgtggcaactagggtttaagaaagcacatgaattggcttccgtctcagtctctgcctcacctttttatagtgcctatgagtcaagggtcacaaccataggataggatcgtacccccgattttggtgcaataagttgtagattgccccatactgagtttattggcaaagttcaaagacatatcatgtattctcgtgtttgttcttggcttttctcgttctttgacgatgtggagcttgttcttcgtttgatagattcttgaacacctcctaagaagacatgtcatggagg

SEQ ID NO: 138858 - DNA, 325 bp, Zea Mays
caaatttgtctctagctgggctgaatctaaccgtcgttagcaagtgtaacaattttttccactccactaatttacttcccgtaattgttcggcgaaaagataaattaagattcgtgtctagacaaacttctgcaaccaaggccgatttaatgcgcactgtattaaaaaggttcgggaattgctcacaaaagggacgactggttagccatttatcctgccaaaatctggtgttttgaccatcccccacttgaaagtgacccaatctaagaaactgatccttgatgttcattagacctgactagaagtgtgaatcacctgatcttct

SEQ ID NO: 138859 - DNA, 281 bp, Zea Mays
cgcccgtccgtttctctcctctcccctttaatccgtcagtttctccttgccattaatggcattttatgcggacgtttctctgcggcaatcaaattcgaggccgtgatttccttctactcacctataaatagtgccgaccttcatcccttttctccctggtcgacctttgctcagctgctaccgcactcgtctcgcttctgagttccttgctgctactgtagtgccgtgcgctgcaggccgccatccaagttctctcacccgaactgctccgcgcacagagc

SEQ ID NO: 138860 - DNA, 616 bp, Zea Mays
gctaacgaacgattccaacaaggaattgcccaaagactagggacccctcctgacaagcgacgtgacgagcggcttcagtggcgccaagcaaacctctctgcacaccaatttggcttcaggtggcgcggtggcccaggggtgggcacgacggctccgacgacccccgcaagcgacgatagagcggcctggagcggaagagcgagctatgggcgaatcatggtgaatccataaggcgaggctgcggtacatgtagagcgaattagagaggtcccgttcaacccccaactccggtgcgaagccgacacggacgccggtgatcttggcatggtttgttatgaagatgatggctgacggtgtggccccacgcacagtgaggtggataggtcgtgttgtgggcgcaggtgagcggttgtcgagcgggccccgctcgtcagggtggcgcgcgcggaaggggagagtttgggccgcgcgaggagagaaaggagtattgggccgaattagttttatcttttttttctttaatttcttctttttattttctttttttcttcccaaattcaaaacttcaattcaaatttaaattcaaattctgtggcaaatttgtcctcagattaaa

SEQ ID NO: 138861 - DNA, 4214 bp, Zea Mays
ttttgaaatacttgacttcctgactctgtgaaaacaaagacaagatatgtgcgtcaatcttttgggtttaagaggtaaacctatgtggcatttcaaatgtatggatatggttgacaaatataactacttgagcacttatttgtaattttcatgcacaaacaagcatgctgacgtatcatgtatttgtatgtactttgtgcactaaccttttcttgcagtttgaaattgactatggcctctttcttcaaaaaaacctgaaattgttcagtttaccaaaaaatagtttcatggttgtacaactacatcatgatttgtgcttaagtgagttacataattgataattgggtacatcttccacaagtaaaatttcacaatagtgatcaaaggtggtcatgataattttaggtgggagttgacttgctcatcgtgtagaattagggttagggccaaagattggctttggtatactcatctttatccacctttgttaagtagttgtgcaatatgttttcatatagaatttgtgatgcgatagggagctcacacatggctcaactactatgtgggttcattttttttaaaatgaacattttatcattaactttttggaggtataacaatgtaatcttttttaaaaactacttatatgcttcacacaacttgtaacttacatgtgtcccaacttactagatagacataaatgccttcctgagaaaggtcgagtatttccataggagtggttggcctttcttttggagtattgcaaatgtcttaaaaatctaccaaatgcatctttaatttgcctaggtttctataagaagtaagctattaaacataccaatagtaattgtaggattggatactcttgtagtacaattttctattttctctatagcaccaaaactgaatttggcttaagatctttaagtgtcatagttcccttgtccatactaaacaatagtgcaattttacatctagttagaataatagtataaacataattatttgtaaaaaacatggtttagttaaattttaaataatacaatggacaatttattatataacattacatgccagacaaataaatattatataaatccacatacatataactatttgaaacacatgtgcttgtgtgcacaatatatatgaaaaatatatgattaatgacacttggttaaaagactttgcatatcattctaaaaaatatatgatttgggttttagtaacattgttttactattcatgtatgaggtgaaactttttgttgctaggaactaagaagaaacatttaatagcacctcaaaatgttgtagaacgaagtcttatagtagtttagtggtatagtttagttatatagtaggtaattatgttgtatggtataactattattaaaactagtataactactagtaaatttgtcttagtataatataatagatggtgtgtgtgtcattctttaggagaacatttataaccttattatactattctactacttcttctcataaatgatgtcctagaatgaatgtagtaaaatttctctaactttggccactaatttaagaaaaactatttagatactgcatgccaaaaatagtcttattggatttgtcatgaaaatacttcatttcataaaatactaattcacaaaaaatattatcatgttcatgcaaaattttatggtcaaaggttcatgtatgaaaccattctaaatcaaaatgttagacatttacaaatagaaaaggtaaagaagccatcattgtgtcacattctttgggcaacaactaatgtttcaaatcctaattatatttagtaggatgtttatgtagattttctataatattttaactcaataaaatgtttatgtgaatttttgtagaatgcaattaatttactagaatgattataaagaatgaaattcaaaaatagtttagaattttattgtattgtaaatatagaaatgtttttggtagtaagagacattacctatagttgatagttattgatatcacaattctgattattagttagaagaggcaatcttatagttattatattttcattattgaccaattttccttatcaacaaataattgtcctatacacatacaaaatttatgtgttaggatatattatactctcaatttgaaatctaaatggcgattctatttttaagctatgataacatgtttggacctcctattgagtagttatatgtgtagttttatttcaagttgactattagatgcatttagatcattacaataaggtaccaaaccttgttggcctccttattgtgatgtaaccgatataaaaaccttatttgtgggttcaataaacatatcatgtagttcaattattgtggagattaaagtttttggctaatgttcactattctttgttgcaatatggtgtgtgtttgcttatctacaaggcaaatatgataggcatattacatgcccataaatgcgtagttgaagactatgtgtttgctcattttcatgcaactagaatggttcatactcatgaggattctcatgcacgggatcacctcatatgcgacaattaaatagattattcagttagtaaattacacataatcttttgatatgttagtcatttttactaaattgtgaatagtgctattgctaatgccatttggtagtcattgtttctagtagttaggacaaaatgctagtgatatttacaagctactcccatccctaaaaaacatgttactctagaatttcttagacaaattagtatgaatctaatttttatataatggcaagatatatcgctaggtaagaccatctccaagaactccataaaaaaactctaatactttttgtttgcaaaaattaaagaaacttcaatagtattgtatttgaactcccaaatgtaagcatttggtaaatctcctccaactcctaggtatgtgctcgagttttgtgtttgctattgaaaaaataacattttttccttgtggttttctttgtaggttcttgattttcttagtggtggcttccttatcctagccacttgtagccatgtgtggttgttttggttgatgattgggtggcccaaacttctaccaattatgagtcactagccaccagctgggagcgtcattgtcggttagggggtggtagtagcctcgctaagggcactatggctagtttgggggccatagtagtctagctagagtcaatggttgtatgactaaggataatggagatagatcgaggatggcgtgggaggaaatccttatggtatgcctattttagtaaccaaatattacaactattggcagaaagcaaaaaaatgtgctccctacttatttttctcaattattaaaataatttttaagtaagtgggttttacaaaactatcatagataacctaattaaacattcacaataaattacgtgtgggatcaaataattgttgcatgtagtagtactgaaggaactcacatctagccatgcaacttagttgccatcccttggtctcttagcacaaagttacaagtgagttgttgagaatttctcttcgcaaacagtggccccatgatatctattagctgctcaattttcaggataccacaacctcatagatatggatttcattgaattgcagagttgtgcttgattgaagccttggatagttgggtacctagacgaatctgaaggtagaagagtggtgtcgatgtttgcaacaagaagtattatgtacactatttatcgagagcgttatttgtactacctaaattacaattgatagaccaaaataccccaaccatatggctggaacctaaacatatttttaatagtaaaggaatttaggtcttttagtatagaactcataaatgaatacaaattagatttggattcatagcatgtcagccacttcacaacaaaccgggccttctagaattagacatagttcccttctcatgcacggtgggcttatgatttcatcatactagttccaaaatcctatagtttcagatgtttggatatcatttcgtagcactaatcgtggaaggatcgaaatgcctaaagggggagatggtgtgaataggtatatactaaaattctaaaacttatgcaataaattaaatcatggatattagaatttactatcctaagaggtaatggaattgtccaaaaaaattggtgaggaccaacatttagaattcctaagagtag

SEQ ID NO: 138862 - DNA, 401 bp, Zea Mays
atcgaggacgcgtacaatacagtaggttacatgcacattcacaaaattcaagtagcagcagcccacatgtctctatctcgcccgggaacctcggccacgtccatcccgtccctgcatgtatgtgtttcacgatcagccttggggaattgacgaactgtcttcattagtctctgagcacatgtaacatatatatgcatgttttggtttatatattacttgtgcattgtgacaataatgtacgtggtcctaagagacctggatgctctgtctcttcatgtgagcatgccccccatccacatgtgtttcacgcgtcgtgttttacgatatgatgatgagccccaaagcccttaggtgcgtttggttgcgagacattcagaataagccactagcgtcctctctcg

SEQ ID NO: 138863 - DNA, 395 bp, Zea Mays
aaccctttatatgtggaaggcaagcaagttgctaaaatagagaaacctcataatatggactaaatttcccttaatcccttatgcacaatacattattgaatgacatagatttagatatgcatggttattcaatgaagtctaaagggctgacttaatccatattatggtgagtgtctaatatagaagaatcaaatccaaattaactagaaagagtacatcacatagttttggattgttgaccatatgataagattcatttttcttccaattggacttttacttcataatcaacaattgatgtataccctcaagtgctccctcttccttagtggctacacaagtcataaaggaggtaagaattgaaaataatatgcacttgagattcaattgttacc

SEQ ID NO: 138864 - DNA, 376 bp, Zea Mays
tccttcttcaagcagcagacagggcgcggagaggagggactagggagggttctagaaccttctagaagtgaacactccttgccgggggcagctcctgttgctctgcgccttctgcagcgtctttgttccgccactcctgttcctgagctcctccactccactcaagtggttcgaatcgagttcggcgcgatctgaatttctccatccaaattttgaaatctcctgttcctctgacgcggatctcctccccatgctccttcagctctcagaaggcggccgcggcggcagacgatagagagcaccattcgccgcctcaccatcctcctgctcgccgcctccgcctcctccgccccgctcaggtgcctccgccgcctcg

SEQ ID NO: 138865 - DNA, 424 bp, Zea Mays
cttgaaaagaaagagtggaatcaaaccgctttgtttttatctacttttccaaaatataaacttagtatgcaaggctatcatatcggatgtgttctcggaaaaggaattttgcacgaggccaccggtgaagtcggctactgactacctgacaatgtatgtatgtatagcaaactgtctgtcatctccgtcgtgccatgccatgccagccagtcggtcgacggcggtggttacggtggttgttgcgtgggcgctttcggccctttccgcgctgattcgcctcacatcagctgttctgttcccttggctcggtacctccctctcgatccctctcgcccgcggcgccgagcgagtccggccaaactgacgagcatgcagcacggacgcgaaaaagaaaaaaggcagcatgcatgtgtgccagcccggg

SEQ ID NO: 138866 - DNA, 556 bp, Zea Mays
gcacagtaccactagaatagatcatgactagccgttagttccttattgacatctagatttggaatgaccatcatgcaaaggaagctcacaccaaatgatgatcacgattaaacgcataagaagccccttgacaagactctgtcccggccggccggcgcactacctcctatgataagctcccgtaatcaatcagaggtgacatctcccaggacttttagtgggggaggaagaattgacatgatacccccctttgaacagtgcagcctacagcagggaccaaagcccccactagctagagaagcagtcttttgtttcgggcgactgttggacacaagtttgctgctatagacccacaacgactaacgctgttttcagttaggcaattggttgttggtaacaccactggagtgtccttcagaccaatcactgcactccatgcccattttgtggccacaaccagctcccatgaatccgatccctacaggagcccactcacgagtcgtctatcacgttgacctatagagtatagcctcatgcccccccgacgacttcaagt

SEQ ID NO: 138867 - DNA, 658 bp, Zea Mays
tgaatccatgaatagccgcgccacttttaaggctgtgaaggggtgagccaaagccacggagtgagaaggttttgagaattttgtcaactataactagaatgcaatcgtacttccctgattttggtaagaggcatgggtatttcgatcgatccagtttggcacgggcacagatgtcacataaactcacaaattgccggaatgtcctcctatagcactgtcatgcagggaatgaagaaataactttggagtgaagctcgaaattagtacccaatcaaatccgccctttgtacttgatgaggccgtcagacagttgataagggtcggcgggcgtagcaccggtggacaactcaacaagcaattgtttggccttggtatctttgagataactggtagcaacatcggataaccactaaggggtgcttactgatagagcatgaaggtccataactgaatgaggttatcgggaaagagcacctgcatctcgtttggttgacccttgcttatataccacctgctggtattgtaggcccagtagtttagtaaacacttttttgttgccaagatgtcttcaagtgctgctcattaagatgtactagatttttgggtctatgaaaatcaggaaggtcccatgatgcaagtatgatctctagtgatcgac

SEQ ID NO: 138868 - DNA, 390 bp, Zea Mays
cggtggtagaagacgatccggtctctgacgatgagccgaccgtgcaagggaggagctcccgcaacgagaggcacgtcatcggcggaactgccgccataacatccgacatcaccatgccactaggaaatgagacccaacccaacctatttcccgacacaagacgtccgaggtttgggaaactcctgacgaacaggagtttcgcctgcaaggaactcccgccagcgaaacctccgcctcgccttagagcgtgagcatgaagcggctcgacataacaataggacctcttgtgggcaccaacttcctcatgatctacagccggagtccgcccaaaccatgcaaaccccaagctaggtcgggcgtgctggcaaagatagcaaatgatctaccccg

SEQ ID NO: 138869 - DNA, 497 bp, Zea Mays
acttttgttaagaagcattggtctgttgccatatgaaatgacgaaataaagggggcatgaacaggatgggttcaggtgggcagtagggcatagaatcagggaagttcagtgttaatctgcaattttgaacaagataatttggtactgttgttagcggttgtttttggccagtggtgttgtggataggtgtgagcatcggtgaggaggtatgggtaaactttgtactccaaatatctgaaaccagaaagttctaaagtctatcttaactgctgccttaacgagtggtatacacctttattaaaatactactgcccctatggtttctgttgctgtaacttgcccttacgtaggtgtggatgccagggccatgaatggtaaccctgctgtgctggcatctttgggatttctcttcatcgggttgtggttaagcttgatggttccctcccccttgctctgcatatattcggtggctgcaaactgaattcagtgaagccccc

SEQ ID NO: 138870 - DNA, 567 bp, Zea Mays
ggtcattagagtttcaggttcagtttttctagtgtccagtcaacccacatgtgagctgattcaattcttcagtgatgcgttcatgtgggagtagtaatggggggttagttaccggtcttagcgtagacgtggggatggacgcgtcaatcacgcgctaaggcagccggccttattgtagtcagtctgaacttttcttaatatagtcaatagacagaaaacgctgcaagtgttcagcagcaccaaaattctcctgtcggtgtccagtgtgtgtgatcgtgtgtgtatccagcgtccagattgttctccagctcgccgatccttgttgccggtgtacatcgccaggacgaagggcaacatccgaggcgtcaagtcactaatggacaacgcatgggacagaacccgccccttatcacactctatcacattttctatttcaaacttcgttttacaaacaatacaatttacagtactttgcacggccgtttacatggcctcctggagatggcataagaccgaggccttcctcttctttaagcaccccatcatgtccacgaccacataaatggg

SEQ ID NO: 138871 - DNA, 322 bp, Zea Mays
cgagaatgaatgaaatgaggaaccaaaggacttgaagtttgcttgataagcacatgtgcatgtcacgagttttaccgagtgtatgtacactcgtgtattccaccatatgtggaattacggtatcctctaaagccctgatggcagaaacctataaggtttaggtgttactggcaaaatatccccattgtgctagaatggcagactacaacgatgtatctgatcgataaaaaatctctgatggattatgatctttgatggacttttattacaccatcatagatgttgcgatggatgaacacctggagcgatgtgtcatatttag

SEQ ID NO: 138872 - DNA, 430 bp, Zea Mays
ctttattggcttttctcggtactgaagatctttctgaatctagattgtctcttcttcgatgtgactttctggtacttgctggcatttgcggagctaggacacatgaaacacgttgtggatatcacacatggattctggtaattcaagatggtatgctctgggtcccactcagccaatgatgggataggggccgacgaatcacggtgctagctttcctttaacttggaaccttttgacaccacacatcggggagaccttgaggtagacgaaatctccttcctcaaatctgagttctctccgcctgttgtccgcataacttttctgccgactctgagcttcaagtaatcgtttgcggatcagggcaactttctcttcagcctctttaacaaaggcaggtccttccagtgtcttttcccctacgttggaccac

SEQ ID NO: 138873 - DNA, 733 bp, Zea Mays
caccaagatcctacctccgatcttttttccagccttcaagtaatcggggaaccctagatacagccgctagcgccagctatcgcacccccctccgtgatgcccagcgtgtaggacgccacgccgtctagacgccgtggactccaggaccccgctaccctgtctctctggacctcggtggccagcgcctgccgcctccggctgagtactgtgtaatcagaattctttgccctctcacatgttttattgctagtgtcgtatggattagtaccaaatggtttcatattttatctagcaatcgcttttgaactttggattcatctgatctaatcatctgttgagatttatgtttttttattgggtaatgacaagtggaaagaagttagatccgattcttgagctcactggtatttcctattgtgatctgtagaacataaaccttcacattatgcatgcatgcctcgaattattgatcctatataccagatgctgctgtaggcatttgagattactttcaaaattcctaggtccgctagattgtagcatgacttattttttgtagggtcctttttcatatgcatggatacatttgtgctatctattttatctttccatccattacatgatcaagctgaaatggttgaacaagacaggctttgatgttattttagctattcaacatcaccatttctgttcatgatggggttataacctgaatagtgaatgtgtgtctggc

SEQ ID NO: 138874 - DNA, 522 bp, Zea Mays
gagcagcacaaccaggacgcctgccggacctccacgaagaggaactaccagcgacgcaagaagcagaagattcgacttccatgtgcggaaaaaggaagcagagctggagggaagtaattgaggttgtttcaggcggctgttgtcagcgacggagaggaatggcgattggacgcaacggcggccacccataggtcgtaggtgtggaagaagctatgggggcaaagcttcacagcaatggcggccacgagcgctaggggcctaaatgcaaatatgccggcgccaggggcttggcctgcatatcaaccaaagcactgaactactaatcataaatgaaactaaaatgcaaatgaactaaggaagaggcaagaaacaaatgatgagctgcagtatgggagggctgcaactgcagaacctaaatactagcaaaggatcagcaggggaaaaatatgctagcaagacattggcttactagcatgcagacactcaagagttcatgtcccctgcgtacaggctaccatgcac

SEQ ID NO: 138875 - DNA, 791 bp, Zea Mays
gatcttgtagagacctattgtatcctctctactccagacgatttcttcgtatgagagcaatactatctattgttgaagacggatcctaggcggataccagtcttgtttcgttcttgccaagcagttatcatcatttgtttcatgaaaagctagttatatggtgatttttcacagataaaaatgaattcttggccttgtctgttctattccaaagcttctctttttgccgaacaacgaagagatcgaaataatgctttatagaacaaattggtatataatatgaggagaaatgtttgccctgctggcagcatcacaaattattaactattgttataaattctctctcaaaattattatacctaaaaatgttgcattaaccgatacccaatttcagaacggtatgagtaattgggtaaaccatgggcaataataaaatgagctggactatacatctctgcatataaaaatctctgcttggcagcattggcctgatgccatgcactttaccaccattatatacgcacatattctcctatgtgcttgaaagcacaatgtaaccaatgaatgtccttgtgagcgctagaccctgatggtcattttatttgttgatttgaagtcaactactacctccaaacgatgaatggtatgcatgagcccctgaaggactcttctggataacatagtgttgcgcatatcagtctaaatcttaatgattgacttgtatttggtaataaaaacaataagtttgcagaattgtaaccatgaagcaacttgttgttgcgtgtcttgct

SEQ ID NO: 138876 - DNA, 479 bp, Zea Mays
ccaaggtgcggggcggcccaacggagaaaattaactccggtggcgaatcccgtgaatctcgagacccttccctctctccgctgccacgagcggctacaatggcgctcgatgaacattcctgccctcttgttcgaccctgggcggtgtgtgggcaattgacgatggcggcaactctctctatctctctgcactctcttccacacggtgatggtggtggctctatggcgaagggggctctcggcgtttgtagagagagaggggtcgctgggctcctcgttttatagcccaaaggtggttgcaacgtctgtccagaaatcacagcggatgcgattctattaggatacacgggcgtgacgagggcgggaatgacaatgctgacagatgggccccacttggcggaggaaggcgctacgcgagcgctgctgtgagaggagcgtgcgattgggcatttggctggcgaacaggcccgggaagtcagc

SEQ ID NO: 138877 - DNA, 889 bp, Zea Mays
ccgccacggggagcctctagcctggtcgttgcttgcatcgtcggtgtggttggagaccttccccaggctcagggtgagacatttgtggccgcgctacctgtgattaatcaccagctccaccccaatttcttaccgtcgttcgcgcgacgccccgattccgcacctcgccgtcgccaagggactcggcgccacaatcgtcggtgagtacgcatccaccgtgttcgcgcggccatccttgtcattttgcgcttgtagaattggggggggggcagcgctcggtatcaccggccagtgggggtcgccggcgagacttgaccgccagagcggcgccaccgtcggtagcgattgggttggggaagatggtctcgcgccgtcagatggaaattggacggtggcgattagagcagaccttacctattcgcgggagtcatccggtccgtccatctggtctcgggcggatgctaatcggtgtgcgcgtgtattagatctggccctgaattttagatccgacggtgacatgtgtggtcgtgggtgttgtccgatccgatccaatcagcgtcgtccgtttctaatcggatggccgtgcttggccgataccccttcgacctcgtgacatttacaaaataaaccccctagtttccagtattcaacccgccgtccatgcggatgttgttctgtgtctcggtaacacttgcaccgagacccctgcacttttcatattttagcgcccagtccagaggagtttaaaaacagagaaataatatcagaaattcatttttaatacaaaaacaaatctagaaacttgtataaaccatagaaaatccatttttactccaaatcacttcattccagttcctaaatttttgtaataatattgtctacgtattag

SEQ ID NO: 138878 - DNA, 813 bp, Zea Mays
accttcttgaaacggaaggaaacaatacaacatacaacaatataggtcaaataaatatgcacgcgacatagaattcgcatctacgaccacgcgagaaaggaactgagacgaccgacgctacggtcgagggatatcacgtttacactaagcggatatgagtgataatatttaattctgcttaatcatattgacggaggttaatcacattaacatgtatttatgaaaacacaatttgaaactatgaattaatcttaactagattactactgtaataatcatcgggtaaacaaataattaaccaattgaagtaaacatgtgtcatgacaaattgatgtttttaacttgtagtcgatgctattacaaagctaacacaacttaaaggactcaaaacggatttaaaacacgaaagatatgaatatctagcgaactagataacttgacgctattttattagctggattccgaccacacatagggccatacgttggtagccacagaaaatcctgggaactgttgtgtggccactttccacattatggctgcatgctacaggagacatcgcatgccaaaaaaatgccacgcatgcggggtagccagtttcctattttttcccacgcccatcacgcaagatgaggacaccagcaacatgcaggtggacccctacgacagttctacattttggctgaataccgcatgcagatccttctctctaatgcacttgcgcacgaccgttttcttctcatctccttcttcccaattgcacagcagggcttcttcttcttcgatctatagcaagtgggggttgatgggcgc

SEQ ID NO: 138879 - DNA, 326 bp, Zea Mays
ctttcgtggaggagttggtggcgtcctttcatcgatgttatctaagccgaggccaggctcggacgagacggaggtttctcccgatgccttggtcgatccttcctcgggtcgtgcagccgtgtagggatgggttagtacagttgtcagagtggcctcctgcgggattcgcggggagttgttgccaggcagttggctgaggccgagctcgggtgaggcggagacttctcccgaggctgaagccatcttcgggtgaggcagagttctctcctgagggtgaggttgtgcccaggcacgtgcatgtcctatccagaattgtttgggaacag

SEQ ID NO: 138880 - DNA, 1352 bp, Zea Mays
cttcttctaccggtgggctcagaatttccagcactactgtttttttcaaactctggctttttggccaccccatcttcggcttccactggctcaactataggcaccttcggcactatagtcgattcttcagcgctccgagcggtgggagcagcttgttccgcttcgacaacggaagatgtctcttcaccaaattttggcactatggtcgtttcaatatatcttggccggtgggtcaaaaccttgattttcttgcccttcggcacagcagagatggccgaagtggcagttttcctcttttttccctgctttcgcgagggatagcaataatcaggatatacaaaaccaattgcatcgaaaaccctgttcaaccttttcttgccccgacctccgaaggctgaggacaaaacatcatcttcggctctagtatatgccccatgtaactcatcactagtagcctcaatacatttcagccagtcatcatttggttcgtcaaaccggtctctgtatctgaaggtatatttcaaacgaattaatccaccttaactggacccgacagcagtctccttcggcatctcccagttatccacaagtggccataccctgtaggctatgtgctcttggatcaggtctcttgtaccaatgaaagcacagacattgctgaaagccttttgacatgcttcggcatcattttcaatcgccacgatcggccttcgaaggccgaagcgagaccagatggggcgttggataatcccctttatgtcttcccttttaaccagatcatttttgacataaaaccattcctccatccaggccctgggccacctttttcgaaatgttggaaccagatagcttgcattagaacgagcaatgaatccataacaaccaaagttgttgtgatgctgctctttgccagtggcttcgtctcgtacaacagttcgtgcatattgcaaaaacactttgcgctcggttccagcccttggcttctcacagcccaaacaaacaaacccattttgattgtagcttcgggagtaatttgatgaagaaagatctgaaatatcttcaacacttcaaccaaaaatttgctcaatgggaaccgaaggcccgccttcataaagcttctgtagacaataacctcattttcttcaggagcaggggcagtgctgtcccctccatccctcacaatagacatgtcacgaaagtatcttcccttcatggcatcaatttgactttgtttaatggtcgactttccgaagatggtatggcttggccgccagggccggtcttcataatcttcatccccactttccacatcatagtcatcgctatcgtcagaatcttcagacaaatccgcc

SEQ ID NO: 138881 - DNA, 379 bp, Zea Mays
cgggaggctggttggccgtctatacaaccgctgcccggaccgctggggcaactgaggacgtaatgaccgcgtacttgcccatcgtcctatggcaagatgcattgcaatggctacgacacctaccgcgacactgcatcgacgattggagcaacttcagtcggcgctttatcgccaacttccaatccctcttcgacaaaccggcgcagccatgggacctcaaatccatcaggcgccggggggatgaaacactccggtcatacctcaagaggtttcagaccatgaggaatcgcatccccaaggtcgctgaggcaacgatgattgaggacttctaccggggatctaatgacttggccttcgtccgagccatactgcaaaaggc

SEQ ID NO: 138882 - DNA, 690 bp, Zea Mays
agatcggttggttgttcccaaggaccctgagctcagaaagaagatattggatgaagctcacctttcaaaattctccatgcaccccgacagcaacaagatgtatcaggatctcagatccttatactggtggaccagaatgaagagggagattgccaagtacgtatccgagtgtggcacctgccagaggatcaaagccagtcatttgaaggcagcaggccctttgcaaccccttcccataccatcttggaaatgggaggacatttgcatggacttcatcgtgggattgcccaacacctccaggcaccatgattccatttgggtcattgtggacagattgaccaagtcatctcatttcttgccagtacacaccacccacaggacggagaagtatgcagaaatctacattgaccagatagttcgtttgcatggaataccaaggacaatagtatcagatagaggagcaccatttgtggcacgattttgggagcaattgcaagaatcacttgggacccatgtaatacgaagcttagcataccatccccaaacaaatggccagaccgaaagggtaaatcagattttggaagacatgttgagggcatgtgcgctacactatggaagggattgggacaagtgtctttctttggcagagttttcctataataacagctaccagtgcagtttaaaaatggc

SEQ ID NO: 138883 - DNA, 305 bp, Zea Mays
ccagccatagtgcctgagtttagcggggagacttcttcagctactgaagcgaaaggacctgctcctcctaagcagaagattgaagggccggctgcaataccgaaggcaccctcagccaaattggctgagccgaagactgataagactgatgagccaagaatcaaagggacaaaaatattggaacttttaagcccttcggcagaagtgacggtgccgaaggcccaaaaagatcttgcggctactccaaaaagaaaaaggatggcaagtgttctagatgtgctagagtcagtaaaggcttcaagttc

SEQ ID NO: 138884 - DNA, 645 bp, Zea Mays
cctgagatgttctatgttccatgagttcccaatttctgtgccgtccatttgagtgagacgatatgatccaagctgagtgacttctgctactatgaatggtccttcccatagtggtgacagtttgtgccgcccttcccccgtaagaattcgccggcggacgaggtctcccactgcgaaggatcgatgtcgtatggccttgtcgtgatagcgcctcagagtttgctgatgccgtgctgactgaatcaccatgttcaatcgctcttcttctagtatatcaacatcctccagtctggtagcctcagcttctgctatgttttcaaagatcaacctcggtgccccaaacttgagatcagcgggtagcactgcctccgaatcgtagaccatgaagaaaggagtatttccatgcagagctcggctaggttgagttctcaggctccaaacaacatatggcaactctctaatccactttcctgcgaacttctcattcttgttgaaaactttctttctgagcgcttccagtatcatcccgttggctctctctacctacccgttggctcttgggtgcgccaccgaggcatatttgatctgaatgcttttttgttcgcagaaatcgaaaaactctgagcttgtgaaattggatcccag

SEQ ID NO: 138885 - DNA, 531 bp, Zea Mays
ctgagcggaggatatcaaccccaattgagatggtggatggccatagagcacttcaaaaggggttttgccaagtgatgaatggtggcaagtattgtaccaaaattctgctaggggtaaccaattaggccagagtctgggacaggagtgaacaaagcacctcagataagtttccagacactggtttactcgctctgtttgtccgtcggactgcgggtggtatgaactactgaggcacaactgggttccagttagtttgaatagttcctgccatattttgcttgtgaaaatgggatctcggtcagaaataatggcagtaggcatcccatgcaaccgataaatctcagacatgtataccttggcaactgtcaaagctgtgaatgggtgaagcattggtatgaaatgtgcgtacttagacagcttgtccaccaccaccagaatacagttacccttgcgagacggcgggagacctgaaataaagtccatactgactgtttgccatgactgtttaggaatcggtaatgggagtaggag

SEQ ID NO: 138886 - DNA, 290 bp, Zea Mays
tcttcgcgctgctgtggttccagacactgtgcctgcccagggcacccctcaccctgttgacacgcctttgtccgttgagccgcaggacgttaccaattttagcggaggtggcacccctatccaccttcaagaccactctgacagcagattcaaagtaaagcctccctgtttcaaagtctactcgcgaagaaaagaagtccaggcagcggtggcccagatgacagatgttgagagggctgaaaaattacaagaattcatgcagattgttaccaagccagctacaaggctgt

SEQ ID NO: 138887 - DNA, 380 bp, Zea Mays
caaaatcttgaaaacacacaattaaagaggttaatcacataattaccaagcttaacaaaacaatgattaaatcccttaatattatttcttcaaaataaattagtgcaaggttaaatcttttattaacggtagtccttaggaggttgtcataaattagatattgtcttctacctttagtgagggagcaggaagggtgcagctgtcaggcaagatcgatatagcgcaggagagggatgccgaggcgaactccgatgaggatcgacgtcgttcggcaaaggggggaaatcaggtactcgacgatgcggacaacatcgcagcggtggaggagggtctctgtcgacgagtcgatgacaagcggtcaacgtcgatggtgacgcgca

SEQ ID NO: 138888 - DNA, 588 bp, Zea Mays
ctgtagccagtcatatcccaagattgcatcaaaagcactaatgggtaagactctcatatcaatataatagaagtgaccatttgcccaccattccacatttttaaccatttgatggcagttcatagaagctccatttgccaccttcacagttactggtgaacacgaatgtgtaggtaatgccaacttctgaaccatagtggaactaccagaatcaaccaacattaccatgatttgcttctgcactactgctcgaattctcatattttgcaacccaacagtaccagataaagcatgtgttgaaacctggtagcacaacccctgttgaacatcctcctgctcaagctgttgcaacaactcatctgttaaaaccatctccacattctcagtaataacagcattgagttgggcaggcctcgtttagtgcatttagtaatgtgtcccggctcaaacttttcaccacatgcgtagcacaatccattgagtcttcgaaactccctcacctgtctttctttggacagatcactctgcttcccttctcccttaaatcctaacatggtctgtttgttaatgaatggctgacgctacccc

SEQ ID NO: 138889 - DNA, 548 bp, Zea Mays
gcaatactaagagaaagcttggtacccaaagcactgtgaagactctcccaaaatttggatacaaatttggagtctcggtctgaaacaatggacttaggcacaccgtgaagccttattacttctttcatatataagagaactgattctgaagctgaatttgtggtcttcatgggaataaagtgcgtagacttagttaggcgatccacaacaacccatatagcatccctgactcgaggggaacggggtaagccaaccacgaaatccatggtgatatgctcccacttccattctggaatttccaacggcttcaataaacatgcaggcctcttatgtttagccttcacgcggtggcacaccccacaggctgccacatacttagaaacaccaaccttcatcctcttccaccagaagttttgcttcaaatctctgtacatcttggtttcgccagggtgaacggtgtaaggcgctttatgagcttctctcaatatatccatcttcacctctgatttctgtggcacacaaagacgacctcttaaatgaaccaaatc

SEQ ID NO: 138890 - DNA, 448 bp, Zea Mays
cgatctagctataacagtaatgcccaaatggtcacttcgatgagcttcaccaacaaacatggacagtagaacgctagaccagagacaatgaaccataccgtgctcgcttgaccgtgtgaggttgctatgtcggcgacatggtcaccaggctcacgaaagcactaagcaagaagcttgggtaaaccttgagtgtaatttggggaaagtgaaggtggtagcactgcacagatgtgaaccacaatgatccacagtgatcttggttgggcttggagatgacaatgatcctttccaccccctcggttgctctttatatggatagataaaaactcaagcagtggctagattcaagggatgtagaacaaaggatactcttgaggggttggcaactgcatgagcatgattgcgtggctcgatccagggatccacgctcgactcatgaacacagcaa

SEQ ID NO: 138891 - DNA, 766 bp, Zea Mays
gacgaagaaggaattttttgacagggctgacctcagaaggttctgtcataattcttttgatgagtttgcttttgtcccctcgataggaaattcggggggttccattactgtttggaatagtttgaagttggttggcaatgctatttttcagaacgagtatgctctctcggttgagttttctgctatttcgtcggatgaatcttggattgtcactaacgtttacgcgccctgttctccgcatgggaaaattgaattcctccactggttctccaatattaatatgccctcggaaaggcgttggttgattgttggggactttaaccttacgcgtaggcctgaaaacagaaatatcgctggggggacattaacttgatgctgaaatttaatgaggcaatcagtcagcttgacctgatggaaattcccctccatggcctctcctttacttggtcgaacaggcaaagggagcccccttcttcagagactcgattggtttttcatgtcgcaagaatggtcggtgtgttaccctgacaccctcgcaacaacgctgcctagggatatctctgatcatgtgccttgtctgatttctttcaagtcaaaggtccccaaacccaagatctttagatttgaaaatttctggctgcaattcgatgagtttatgactgtttttcaaaattcttggactggtcagccaagtcttttggacaaagcgaagaacttaacggcaaaattcaagttcaccagaaagatccttaaagagtggcagcga

SEQ ID NO: 138892 - DNA, 597 bp, Zea Mays
gacaccgtgatcccggtcatactcctcccggcaccttatctcattttcgtgccgtcggtcgtgcgaagcgttgatggagctctgtgtgtcctgttggctgttgatggcgtgacgtaggtcgtttggaggatgagtgatgggtagaaggtgattagctgcttgagtaagcagccgtcggtatccttcagcgtctggggttcacaggagaccgtcagctatctgggccagtacccctctgacttcactcggcgtgttcattgcatgagcaaagtcggggtacaagttccgagcaaagagagggttctctcggcgcagccttgcaccttgctcagcttgctctcgttctcgcccctgagcttgtcggcgatcgcggcgatgagagtttcgcctttctcagtgtactcgttcgtcgggagtttctcccacttctgaagcttcatcacgggacatgggctgcaccggatcccgttccccagcttcgtgatgtcgccgtacgttctgacgtctgttcctccgtcgccgcgcttcacgctggggaggttcttccccttgcatggtagactcatcgtcggagatgggtgctgactccaatctccc

SEQ ID NO: 138893 - DNA, 358 bp, Zea Mays
tgaggggtgaatccagtcgctggccggaccggccgtcgtgtcccgccgcggtcagtctcgctggcatcactggagctcgtcgtttttccggctgtgacatgtaataaccactcctccgcatcgtaagggtcgtggcaagccgccggttatcgtccatagaccagttccctcttgcgcgccacagtgagcaagccactgtgaaatatcctagccagataaccgtgatctcaatcccaaaaatcttgtccagttctatcgggacctatatattgaggatgccctctactccgcttcttagttacacgtacaacaaatccccagctagctcctatcgtgcaccaccgcgccccaatttcgc

SEQ ID NO: 138894 - DNA, 662 bp, Zea Mays
tgacggaatgcacccgccctaaatcctaagatgaggaaggggcttaagtgttttgcctgtcttgctaagcgatcaccgagcacacgaacacgcgaggatttagagtggtttgggccgccggagcgtaataccctactccattatgtgtcggattgctatggaagcttgagagctgagagtctctgtctaagttcggtctaagagagccctattgtaacgttgcatgcctccccttttatagctaagggggcatgtacaagggtactgagccccgacaagtgggcccaggaacataacggatgtagtactttggagctactaatgtttggtgctggagcaatcttcttgtgccctgacatccgagatctgcgtagcatcggtgtgcaggggaagcttctcgtataagggatgatgagcacaatgcgccacatagcacgggcgcactatttgacaatggactgacaggtgcgccgtgtgcaggatggccctggcgccgcctgccagtggattggataggacacactaaatgctgagggggcacatcgcctgtcagcagggtggacaggcggcgcgtcctctccgcaataaatgtcgagaccacgcggcctagagaccttacgtgttatgtcaggctccgcctagtggcttatgtcacgggcaac

SEQ ID NO: 138895 - DNA, 893 bp, Zea Mays
ttattttgctatataccgattacgcagttgccacataagaattggtgaaaacatctatgaaaatgctctatctggcgctctgatgaagaccctgattgtacagtagtctgaagaagatcagcagatgcactgcacctcgctgccggtgacccccgcgcctggattcgtgccggtgatgcgatttgtgcctaaggacgcacggataacgactcagggtaaaaagatctcgcgcaagggatgaagttggggcactgtggccgccatgttgtcgtacccacttgccctgcggccggtccaggtgacctcgccggagtttgccgcctgccgctcgaatgccacatgcctcaaagctttaccacgtcacagtgaaccggcataggaagcctgtccatcgcctgagtcattgcctcagtgaccgccacggtagctcgcgccagtgacttcctcttctctccggccgccagcgtttcccttctaaattcagagccgccgctcaaagactctataaattgatgcaccagcctgctccgctaggttgttatgaagccagagcaccagccctagcctctgattagccaccatagcgcctgaatttagcttttcccccaatttgatcgccatcgccgccgtggatagctcctccatggccagcatcgccagaggtagttccagcacaattaccatttgttctagcttccttaatgtatagtgatgctccccgtacttagaaattgaacgcaaccgtacctagtcgccgggaacagctcgaccttccctcggtatttgccgtcatcctgagcagaggggattctgggtctgactagctcaattaggggatgaactaggatcgcctaggatcagggatgctagcgcaacgcttggtttagatagtc

SEQ ID NO: 138896 - DNA, 448 bp, Zea Mays
gttttaagggccacgaacgtatctcagcttctcaagtagcagcggtctccagaaaggtcaagtagcactgtagcagtggtctccagaaagtcggacaaggccgttcaggccctccgaacgtcgaggacgtttctagagagagcacgaagcatgaaggggtcgcattaaatagaaagcaacttccttcagacctctgctcgcttttgaggtgcacaatctccgatcgcatatcacagtggtgggactaggtacatccgcagcttacgcttcgcccaatggtgtcgtggacggcatcaacgagccatcgtcatcgaccaattctactgcaacatgccccggtagaaggtccgttgcggcggcggcgacgacgactttgccaatcagacctccgtcgtggctgtgttcgacgtgtcgtatcacaagatcgatgacatgttgcggcgccgag

SEQ ID NO: 138897 - DNA, 306 bp, Zea Mays
cacttcacttgcggtctttgcccgacccacgatgagacgaccttgtggggcaactggtctatggacccatgcaaaggtctttcgccttctagtggacctggaggatatctgtcccccacaggtacccaagggttagatgtcatcctagggatgaattggttgcacaaaaaccaagctactgtcagttgtgacaagtggacattaaagttagtgtccccatccgagaaataagtagtaattgaaatcttcatgcctaacctaaaagcagtagtctgtcaccatttgtctatagatggcaaggaggcc

SEQ ID NO: 138898 - DNA, 539 bp, Zea Mays
gccatgtttaagttgggcaattaatgtgaagatagatccaccactaaatttgaatttaaatgggaatttaaagttgaatttgaaaaaaataagaaaaagaaaaacaataaaacactacttgggccaagtcctcactttcggcccattcttttttttcccgataccgcacggcccaacgcccctcacccgctcgtgtggccttcgcgtcgccgccaggcgggccccacattccagggtcacccagctaacttatccacctagccggcagtggtcttcttctcccaccctacctttcctccgcttcgtgctcaaaaccggtggcactggtgagctcgtgcccgattcacggaaatcgcggacccctagcgcaacaacccccgtgccccgaccccgcgtacagcgctggcggcgcacctggccaccgctactccctcaacggcctctgccgaagccccaggattctagcgccgcccggttaacgtcctcagcccggactcgtcatataggtgcggcatcgcgccggcgtgacctgttcgtcc

SEQ ID NO: 138899 - DNA, 1005 bp, Zea Mays
atgtctatggagggagataggaagacttagaacgggtaagcaaggagtcctaccattatgctactcgtcattgacgtcactgtggtattcccacggggatcatcacaattcccctttgctcctttggcatgtgcaggggtccaatccctccctcctttgggcttcatcgctcctatttagatcccaaccctcatgacgcgtgtgagacgatcccctgagccccctgttggttatagcagattcatctggggggcacatcccatctttttgtagatcctttccacgtgtcccatctactggaaaggggaagggtgagaagtaccatgcttcccttgatggtcaagttcatggcgcttggtgagttgcgagcgggtagtccgagtgaggccctagtctcttccacaagagcccagcgtggggtcagctagtgatcgtccccatatttctatgtgccaactcatatagttcccgacctcgttcgactaggactaaaggctcgtttcctagaactcgaatgtgattcgaaagcacccttggagctcatgcactagggtcctagccagtactgtgcctgcctcctatcgcctctcactctattgttttgggagcgaccgcgaaccctagtaggctggccttcgaacttcgattgcttagacccacctagtttgccccttggtgcaataggcatgggttttgaggtcctattcatgtaaagaaagggagatagagataatgaacagggacatgtgagtggtctcactgaagcacggtcgtgcggttgcatggtaacactgttgcgctggttatgtgaacttggcagctctcatctgagccagagttggtgggcatcatgctttgggggtttggtcaaggcattcttacgtcgtgtccactcctcattccatgtaccaatggttagcgatgatttaactaggcattgatgtttaccggagtgtgtgccttatcgaaagatcagaaagtagtgtgacagtcgttctggtttgg

SEQ ID NO: 138900 - DNA, 476 bp, Zea Mays
ggacggaggcctttagaacacgtggctcatggattttatctgttcgcgccacatgaccggaagctcaaaatggttctccagcctcaacctcgtgattggtaaggaatacatcacattcggggataagtcatcagggaaggttgtttctcgtggcaccattcgggtgaacgagagcgttattctcaaggatgttgctttggtttggagtctgcatttcaatctgctttcagtttcgcaactccttgaggatgactatgaagtgcgctttaaaaagggcttgtctcgagttttggatgcccgtggggatcttatttgctagatttcccctcttggtcgagttttcagtgctgatttttcacattcttctagcccttctcgatgtttgatggcaggatcttcctcttctctttggaagtggcataggaggctaggtcacttgagctttgatcttttgtgtcgtttgagctcacttgacc

SEQ ID NO: 138901 - DNA, 490 bp, Zea Mays
gttgtatttgatagttgtttgagtagattgttatgagcataatcatttgtacactctacattgtcaatgaattacagcgaacaaccattgatccgaatatagttccaatagtagggatgactttcaaggatattgatgatgcatataaattttataaaaggtaagcatatgaagttggatttcccttgaaaaaatatagggacaagacgttcagtaagtggataaattgttcacgtgaaggaaaaagtgcacctagaccaaatgaatacacctaggttgaggaataggaattctggacgtacgcaatgtaaggctggaatcaaattaaaaatatgatgatggtaaaaaatgtggtagctgcaaatattgaactagtgagcataattatgatttcatcactgacgaagcagagaaacaacatctacgttgcaacaaaagtcgggatgcagaattcataaattttgttgatgcaatgcatgatagccgggtg

SEQ ID NO: 138902 - DNA, 346 bp, Zea Mays
gtgacagagaaagaggttgtgaggtgtcgcagtgacgggttatgggaggagacaggagagacgcgccagagaagacgaaggaggagagttttgggcgggagaaaagaacgagctttcatgtcgtcaatgccagcaaaagcttcgcctcctggatgcatacaacggaggatttagaggaaagcagcatatcgcggacaatcatgcacacatttgccaggctcaccaagaccgcgcacgttccaagaaagcatgtagacagttttagatttaaaattcatggagcaccagagttattaccaagcaaatacaaatggcataggccatggctgaggggatgatgcgatgc

SEQ ID NO: 138903 - DNA, 754 bp, Zea Mays
cccccacaaaaatatatcaagtctaatagatccatctcatcttaaaagattctctcttatcttaatagattcatcttatcttgaaaagattttatcttattccaatttgatctagatcctacctaatctaacatgatctaatgcaaattgagttacttaaataagttagataacgttggcgacaaaaaaaaaaagagttaggccataattctataaacatatcttaccctaaattaataccttaaactaactcgcccgtaaacaacaacctaacctacatcataggttgcctaatccatttgttcaaaaagcaaagtaaaaactttgttcaaacctatccacctcgtgtaccccggctatcctaactatatgtccttaactcggatggcaactccaagaagaaaggccaaagaagaccaaccacgtcaaagaaggatagacaaccactcaagtcttcaaggaccaggctggatcgccagatgaatcaagatccactatctatgatggagtcttttcttacatactctttcttacccaaacccctctatgctttaaaagcatctttcaccatataccataaaatagatatacatgcccatgctttcctaatcatcttctaatttgtgttgtaaaaaaaatcatttggaattaaaaccacatgaaaactgaaacatagactacaaaacaaacttattgcaacctctttcttacaaatctcgaggacgagattctttttaaggggggtaggatttgt

SEQ ID NO: 138904 - DNA, 453 bp, Zea Mays
tgcttcgggcttcggctggaatattaaccaggtccgacgacgaaaggctaaagtttggtctattgacagccttcgcatgattacacccgacctttatgaaagtagcggttgtacgacgagaagccaccagcgcaaagaagtctccatggccggtgataactttgtcgaggacatcgacttctttctctacacattcatgggccccagggatatcttcggcagaaaagttagcttcttcagatgcagctctaactgagttgaatatgtttttcaatcgagcagtgcattggattgcaaagttaaagcacctctccttaagagccctcaacgcttcactgagcttcgaattcttctcatcctcaaccttaagtgacattttcaaagttttagactctctgttgaatcggctggaagcttcttctaaaagtatttgcgccttcgtcagctcctcgc

SEQ ID NO: 138905 - DNA, 281 bp, Zea Mays
gaaaatgaaaggtactggcttcatcgcagcgctgttgctgctgaagttcaccatgtttatagagtgtctttgtctctatacaaggcactaaggcagcagcggcagccggagctgctggttttaaagccagtcgaacggtgtgtctgaactagttaactcatgcagcccaataaggtagagtcaagtaggcttgcttgcatatcagaaagcccggcccatcatgcattcactcatgtggctcttagtcaactcaatttctcccctccttctcatcgatagat

SEQ ID NO: 138906 - DNA, 737 bp, Zea Mays
acaacccctgtcttgcaactcccaaaatttgccaactcattcattgttgactgtgatgcgtccgactcagattttggcgtcgtactgcatcaagatgagggaccaattgcctttttcagccgcccctttgcagcccgacatgtcaagctcgctgcatatgagagagaactcattggactggtacaagtagtacgccattggtgtccatacttgtggggcaggaagtttgtggtacgtacagaccattttagcctcaagtatatgctcgatcaacgactctcaactgtaccccagcatcagtggattagtaagctatttggtttcgacttcaaggtggaatatagggctggccggctaaatacagtagcagacgctctttcgcgcagggaaaccaccagtggatcggtatatacaatctcaacaccaacctttcaactctacaaagacctccagcaagactaagcaagcaaccaagagttttagctcctgcacaatcagatcagtacagggcatcagggtgcgccatggcagatcagggagggactcataatgcatggcaatcagatttttgtaccacaatcctccagcatacttcctactatcctgcacacaggcacacatcccacttcgtaggccatggtggcatccagaaaaccctgcaaaggttgaggacatatttctttgttcacagggacaaggcattggttagagattgggttcgttcttgtgcagtttgc

SEQ ID NO: 138907 - DNA, 278 bp, Zea Mays
caggttgcattcaggagagcagtaaatggccttgggtggccttgggcttgccattgtaatacctggtcttcagtcgttcattgctggaactgttattacttggtttgacacatgttagattttttattgcatgtggtcgaatatgtgatacaactaaattactgcatgttatttcacttttattgtttgaagtatgaattgaatggactattcgtttatcaaatgtaatatgttagtgttgcctctgttctaaactataacatgtttttgctttttag

SEQ ID NO: 138908 - DNA, 408 bp, Zea Mays
cacggacggacgtagcccagtgaggctttcggcccattatccaggcaactcgtgtcggccttctctccctgagtgctaaaatagcacatagcgggaccccacggatcagccttacaccacgagtccacgacacagccctcagtgcactggccgacagtccagtcccacctatcatcccgcaccacgccgtctcgaattcattttctcattctctgtttcactgactgtcacccaaacatcacaccgtgctcgaattcattttctcaattttctcgtccggtatagtctgtctctgttctgtcctcagccaagccccgcgagtcccttgctcacatccaataaaaccctagcctacttgacgccctagcgcgaagcttgggactgctgtctccattgttaggtttctcc

SEQ ID NO: 138909 - DNA, 451 bp, Zea Mays
ccggaattggaaaaattcgtggtggtcttcattgatgatattctggtatattcaaaaaatgaagacgagcatacaatgcacttgcacatagtactccagcgactgcgggatcatcatctgtatgccaaattctccaaatgtgatttctggctaagagagatcaagttcttgggtcatacaatttctcaagacggaatagcagttgatcctaagaaagtgcaagaggtgatggattggaagcctcctaccaccgttcgattcggagttttctgggactgacaggatactatcgacggttcattccagacttctcccgaattgctaagccaatgaccgagttgttgaagaagggagtgaagtttgattggggtcagaaatgtgaagatgcctttaacaccttgaggcagcatctgacaaccgcacccatactagcgcagcccgacaacgccaa

SEQ ID NO: 138910 - DNA, 393 bp, Zea Mays
  misc_feature (356)..(393): n is a, c, g, or t
aatatctaagttcttagatataacggagggagatagtacatctgttctactgcgcgcatcaactaaaactgatgcgtacgaccagagatgacaccacaacgtaccaccagccatatgataaagaaccgctaacacgagagaagcttctgcaacaattgactgacatcagaacttatttagaaagccgcaatgattcgccagtctaacttacaagataaaaaatggaaacatagaggaactaacttttggcaacatctcatctccccttattatttcttctcccttcaacaaataaatctgtgacaatgtacaactgtttaaaggctacaaatcaatgacgaattctccaaaaacgnnnnnnnnnnnnnnnnnnnnnnnnnnnnnnnnnnnnnn

SEQ ID NO: 138911 - DNA, 539 bp, Zea Mays
gccgccatcgcggcgatgtgcgtgcagacgaaggcggagtacaggccgctgatgacggacgtggtgcagtcgctgatccccatcgccaagaccaccccggcgatgtcctgctcctccacgccgctcagaccggccctgcagcacgtcatcttcatgggcccgcagtgcggcgacgacaaggcatcctcctagccctagtcctgccatggaggtaccctacccaccactgcctggatcggagcgtggtggagtcggtggccatcgactatagcgcgcgctaagaattctcgttccttgatgtatagagctcctcccctcttctccaggatctgcagacgcaacgcatcgttgcagtagtgcatcgtgattgtattcgggcacaagcgtacggcgtgtcatttattggtacggactgttttaaagataacatggaaatacaaataaatattctttgttcatcatcttcttttttacaaataagtagagtgagaggacacttcttattgtagaaaggatttaattgaactggcatcttgagc

SEQ ID NO: 138912 - DNA, 437 bp, Zea Mays
gcactattcccacactccgaccaatgtttcaaccacccatagcgtggctacatgcaacgtatgatctcggcctcgacctcgggagaaatctccacctcgcccgagctcgacctcggccaacttccctagcaaacacgcattaaatttaacctactcttccacgaatttcgcagaagaccatgtcaagcactgtttcaactactctaacttgacacttctgtacccctatacaggctagggctcgggcacatgcccatgctctcgagctcggcctcggctctctatcccgtcaagagaacatgctacagggatcaggcaccattctcctaaccgaaagacaacacaagaacaaggtccatcccaccggccatgctgctacagagctcggacacaaggacaagagccatcccgccgtccacgccgctatagggctcgga

SEQ ID NO: 138913 - DNA, 576 bp, Zea Mays
agttggtggtgtcctttggtcgatgttatctaggttgaggccatgctcaggcgagatggaggttcctcccgatgccttggtcgagcctacctcgaagcatgcagccgtacaaggaggggtagttcagttgtcggagtagcctcctacgggattggcggggggttgttgccggggcagttggccgaagccgagctcgggcgaggcaaagtttcctcccgaggctgaggtcgacttcgagcaagcggagttccctcccgaggttgggaccgtgcttagatgcacacacattcaatccgtagttgtttgagcacggtagtcggcgtgggggagcagtggccgttattctcgggcgctcgtcatcgtagttggtgaaagtggatgggaccatggtcccatctctccttgtttgactacgatatcatgtggggtaggtaattgaatcgttacattaaatctacatgtctccatggttcccatgacctttgacggaggttggtctcgggactatcctcctttccgagacggactcaggtgaggcaaaaaccgccattacatgaagaggcaacatcaggcaag

SEQ ID NO: 138914 - DNA, 519 bp, Zea Mays
ggctactgcaagcagtcatccaatttagtcaacccatcatgccctgactcagtttgcatctttctatatggcctcaagtagacacatctcacattggcatttgtgctttgccatctacgtatgaaagcacaacttgtccacgacaaagtctagcacgtcaatctttatttaaaaagatcgagataagttgcctacatgttactctacttcgatgatattgtattgacaatgtcctcttttgttctactatgacgtgtcatggatcacctcagccctgagtttcaatgattggttttggcgctctccaccactttcttggcatctccatcacacactctactgatggcttgctccggtcatagagttaatacgttggtcatatatgctccagtggggcgacatggttgaatgtcactccataatgacttttatcgactctcagtctaggctatttgtgaatgacaatgacctgttgttgaaccctcatagtaccagagtctggctaacgcctacaatacc

SEQ ID NO: 138915 - DNA, 307 bp, Zea Mays
ttctggaacatgacgtgcccgaaatacctcacagaactcaacccgagaacttaacgtccttctagctgcagcgcaaggtattctgcccaccaactaaacttggcttctagtcttcaaaaacaaagaaaggtagcatagaaaggcaaagacatgtagcatgaacagggtagacgaaacacgtactaaagctactacatagggggtttaacttaaaagtgtatgtcatgatgcatgctcgtcctattcgtcctcacaatcttgccagcatatagtggcttgcacgctctatggcggtggcatacctact

SEQ ID NO: 138916 - DNA, 923 bp, Zea Mays
ggacgacgcacaacccaacccacagtcccacaccatttaaatagtacactcaatccactaatgcacaacccaacccaaaccaaacttgaagcctcaacgcagacatggtttttggttcttcaagcaaaaagaaagcgtgcatatgaaaaagatgatgatgatgatgatgatgtgcaagtcgtccatgaggtgcccatagatatccaagatggtggtgcagacgcagacatcgatgacgaagatagggctgcggctactggtatgagacatccacttctagatgaagttaatattattgatgttccgagtggaaaaaatgttggtggaacaaagtagtggcaatgtaaacattgcaagaaatcgtacaaaggtagtttaactagagtttgtgttcatttgcttggtccattacctggtaaaaaggtacaaattgcacgttgtatgtcattgcaaaatgatcccaacaagagcaaagctttgcgggaaaaaggtgaaagaagctgatactaaaggatgtcatatgagatcaacatcagggacgtccactccgaattcgttggcaaaatcgtttggagtagcccaaagggaatctgtcgatatggaaattaccaaatttttatgtgctaacagtattccattcaatgtgtcgaggtgccctcaatttcacaaatggtaatggcaattaaaaatggtccaaaagattataaaggtccgtcgagtgagaaggcaaggacaactctcctagatgcatgcaagaaaagtgtggagaccgacttagcaccacttaaaagtatatggtaagttcttaattatattgccttttcattgtatgattttttctttcaaaaattcacttttaatcatgcattagattgacacaaggtgtttcggttgtgtccgatggatggacaaatataaaaaac

SEQ ID NO: 138917 - DNA, 513 bp, Zea Mays
cgagtggggaggagaggagtcgcatcttgatcttgttatagcctacatcacacgggaagaggagtcatgtgcatgtgttgggttcttagtagcaagatgtgatgaatgaagatctgatccaaataatattagttgttggatttggctgaaaagagaaatggttagccttgtgcaaacatatggttgatatgtgcccatgttgttcatgttgtgatatgtgattgccaacaaggtcgagtcatgtggactaaccggggcatgagtgcgtatgtgcaacatgtatcttggattgtggtgcacaagtatggagttttgagatggtggccaatggcgaagatgaaggtcatgtcagttcatgctgatggaccaggagcggtgaagaatgagcagtggatcttgattggggattagagaagtaaggtgactagccgtggtggttgatacctagggacactgataggcacaaggacatggcaaagtggatcatgttgttggagtagttgtggaccaatg

SEQ ID NO: 138918 - DNA, 467 bp, Zea Mays
ttttgacagggaagggcgatggagggctagccacgggagctgaccattggtgacaatagtgtcatgtggtcagcgcacaggagaagggtggagcttcgattaactggtacactggccatggtgttgtgtggcgaaggtgtcaaggtgctcagatgggactgcaaatgggcaggtgtgcacactcgtgcgactaggtgttggcgacgatgggggcacggtggaatgggcactggcaagggtgaacgatggtgagctcgtgtaggagtgagcgagtgaggtgccaggagctgttgtgtgccgtagctgtgcttaggctatccgcaagcgttccctctaaatttttccccctaaatgttactatgcagccacatcagcaatattctctcccctatattcactcgtcccgcaaccattccccctataaattcccctatatatccctctacacattaaatatacatttccac

SEQ ID NO: 138919 - DNA, 489 bp, Zea Mays
cttttgtcacgagtcagttcagtgtacattaaaatcctgattcagctaagatttccattttggccctcatcctagccgttgccactcaggcccaccgctaaccagccacatcttcccatccttgaaggcttgaacgcaacctcctgcactaaacccggctcgttcagcgcgcctctcagctcctttttataggcagcttaactctcatgcacgagactataggccttccccgcaaggaccaccgcacgacggccaccgcccgtctcctcctcatatccttcccgctgtcgccggcctccatacttggtttgcaaaccatcgcatggccgtggatggggagcacgctcgtgtggcaggcgagtgatcgaaccatgggcacgtaacaaaagcaaggaagccagcgagtgaagaaggacggaagatgtcaaacccgccgccaaagaaggcgatccggaatcccggcggcggcgctggggggccggcgggcgg

SEQ ID NO: 138920 - DNA, 645 bp, Zea Mays
aaaagatataaaaataatatatataataatatatattcaaagtagtactgtttatggcgcaatatcatctgagaataattggtcacaagagcttgaattaaatttgaatacaacttgaatttgaaaagagggagagaagaaaataaaaaaggaaaagactaaaacctagtttgggctggcttctccaattcggcccactctttctctcttctaccccacggcagcccatttcctcgttccctttttcttttctgtgaagtcactggcgtgcgggcctgggtcctcggtgtctcacgccgcgctgtgcgccccacgctcatgccactgattggtgggcccacggcaccgagtcgttcttctcgccaggatcgcggatggccggttcggaccgattcctcctccctcaaacagaacgcgagttctctgcgcgctccgtgggaatcgggggtctctagctggccgttccggtctctgtcccgagccctatatatgtgtcgcttctcctctatgacgcgtagccacatctcatcccctcgacgcagcaagccggatgcctgtgtgcgtgctcggtccgccgccattgccatcgatcccgcatagcggcaacgccctgcgaccaccgcccttatttgaccctgggagctt

SEQ ID NO: 138921 - DNA, 440 bp, Zea Mays
ctaaagcatactgcagaggtccatcgagtccttagatgaagtgttcttatttcctctcatcctcaacaacttcatccggtgcatatctggagagctgaatgaatctgtcgcggtactcactgactgtcatgcttccttgcttcagtgatagaaattctttcttcttgatcttcatcagtccagcaggtatgtggtagttcctgaactgagtagcaaactccacccatgtgatagtatcagcagcatcgtgggcagcagtgtagaaatcccaccaatcagcaacaggaccagtaagatgaccagaagcatagagaaccttctcccagtcagagcattgggcaatattcaacatcttctccactgactttagccaatcattagcgagcagaggatccagagagctggcgaacgttggtggcttttggctcatgaactcccgg

SEQ ID NO: 138922 - DNA, 451 bp, Zea Mays
ttgaaccataggactccttggtcatctgtcctgaggtccgggagttgttccttgcgggctttctccacaagccttgctgtctctgagtctagacgttgagctttgcagatgaggtcctctagcattggtttgacttcaagactgtcgttgtttcccagacatgcatttagttgtgctgattctttcttccagtcttctagaaagttggttccttttattccgaatggttttcgactgagggcgtcggctaccacgttggccttcccggggtgatagtgaatttctaggtcgtaatccttgatcagctctaaccatcttcgctgatggaggttgagatctggttgagtgaatatatacctcagactcttatgatcggtgaaaatgtggcatttgtttccgattaggtaatgcctccatatcttcaaggcatgcactatggctgctaattcca

SEQ ID NO: 138923 - DNA, 551 bp, Zea Mays
gtttctcaagagttagtagaggtctggccggcacataatgtttaggcacatttttataatctaccttagttggcatatttatctttgcggccattgccttagccttttatgcggacaactcgtgctcgaccaaatcaacagtacgtgacgtgaggtcccgtccaatccctttcaaaaatcgagctgtgtcagcagtagtagctttactcttctttatctcgaatgtggacaccaattttggtagagggaatttagatttctttgattgtcgtgaatcccttgatggctgtggagaaggtggtggtgtcctaaatgttgatgcttgtggcggagatggtggattagaaagaggatgaggagcagcatgggaagattgtggaggtgatgatggatgtaaaggtactaaagtttgaggaggcggaaatggttggggataagatgacgatggcattggtggatcaaccaattcgacatcccttcgaggccaaaggatgaaattttttatggtttgtccaagtgtctcgattccttcgggcccagggatgtctagc

SEQ ID NO: 138924 - DNA, 287 bp, Zea Mays
gcgtaccgggctgaagttccaaatagctatgcaatgcacttcggtgacctagcacaccgatctagtttggtggtgcaccagaccttgggtccaacgactctctacgacgtcaacggtcatctcaatgactagctgacatcgtgacatatggtcgatccggtggtgcaccggactcggtcggtgccccacagagagggaaggatggtgcagatcctgttgatggtgggcgtctgtcggaggtccggtgacgcaccctatcggtccaacgcactagccgagagtagaat

SEQ ID NO: 138925 - DNA, 368 bp, Zea Mays
gcggggtatttataaggtaatcaggagtatggctctaacatacatgactaggcttgattacctgccacattctcaaaatatattatacaatggtataaatagagagtagtgcgacccaaattctatttacacctatcactattttctgagctaggacgattcatctgcttccgcccaagtttgttgaggtcgctcggccagtcggccttcaacaaattgggtcgtcccactgtggtcgcgtcctatgcttagggtcttcaaactctgttcacaacacagtttgtgaccagctatagctaatttggagtatgattaaggtctggcttgaccttctccaccaagaataattgacagccatgtaattttta

SEQ ID NO: 138926 - DNA, 746 bp, Zea Mays
taaatgtgcatacagagtatggactatatgcatatataataaaacaaatgtgtaaacaaatgactcaagtgaatgtgcataaatagtacagaagatatgcatatatattaaatacaaaaagcatatatgtgttacttggtttgtgtgatagtactctatgctgactcatcagtaaatacctctgtctagatctatgaatgtcgggcgatagtggggatatagaataaatacatatgctctaataccagggctcctgaacaaaaaaatagatgcaatgcgcgatgcaatgactcgattagatagatgtctaaacgcattcaaatcacacatttagctggagaataagggttacaatcaaatccacttcaatcgacccaaatgcttcaaaaaatggacggcaacctcggggtatttcaatgttggatttcctgaaacttcttgactcgggatccaatgctggcagattgaaggatgtaagctggaatggaacggcgctggattggagcggcggtggattggcgctgcgctggattggaggcgcggaaatcgcctggcgagtcgcctccaacgaaaggagagtctgcgggctggggttttcttcctgcaggcgctggtctgcctccgttgattgcgcgaaacggttttagacacaggaaacgtgggagaggtggctggctgacggaggaaacggtgtaacggcgccgtgactggtgcgtgttgacccggtgtggttcaaccaaaatgcc

SEQ ID NO: 138927 - DNA, 558 bp, Zea Mays
tttacttttttagggcgttacattctacccccttaaaagaattcgtcctcgaattctaccatttctacaaatcaagacaatcaccaacggtaaaactcagtcaaactccctaaatagactcatataatatactagtagcattgatgccatcttgaaaaaaagttttcctgaaacaacgtctaactcagactaatttatcaaagaaaacaatacaccttgacaacaatcataaaacaatataaaatgaaacccaaggcattgtcataggtgcaatcaacactaggatttcctatcatcaaatttggatgcagctccccagtctttaaacaacacttcaccaagtacgttagaacactaagcacaacaatcatcgaattcaacaacctcgtttgttaatgccattaaggccaaacatccatatattgtcaatgtatgaaacacctcacataccgctctcaagcactataaaacatggttgttattacattagaatccaactactagagacctccaaactattctattgacatgaagcaaatggtgttcatgtcatataac

SEQ ID NO: 138928 - DNA, 408 bp, Zea Mays
cccaaaccaaagtggcgaacaacgacaaagacgggctggagaagctatcggttccaggacctagtaaggcaaacatgaattgaggagagagggaagaaaatattaaaaagggaggaaagtactcaccgtcatgcagcacagagcgcggagccatgcctgtcactggtgaggcatgggagcgagagagatgggtactggtacggcgacgacggctacgcggccacccgctgtttccttacaggctgcacgtggacccgcacgacgtcacggaccacataagcagcgtcatctgacgccgaggcgatgacgaccgtgcctgggagctaggccattgcccgcgtcaatcaaccgaaggcaagctggcgtacaccgtggatgtggccgatgcggggcccgcccggcacccgg

SEQ ID NO: 138929 - DNA, 593 bp, Zea Mays
tgcttgcagattcaaaagaaatggtctcctcgcaacccaacagatgccagagggctgtgtatgggcaaaaaattagaaggggcattattgttgatgggcaaaatgagccgctgggcaaaagcgactcaaaaatcatagtgggaacagtggagtgtgacatattaaatgctatagaaggttcctaggcagagatggcaacacaaaatggtcaggtggctgtcacaaagaattacacaaagaaaggtgaagaagtggcagccaagccaaacataggacatggacacgtagctgctgctgggacaaacagattataggggagcaggccacaaagtggtggtggtcaagggatgagaagcaagtgtatgaagctttatgtagtggttacacgacaaatgagtaattctgctagctaggatagggaacacaggactgaaatgattgtgaatcagtgcatagtcggtcccggtgttgtgatggatggccactatagcggagagcatcacacgtgggccgaacaacgaggttgtagtaataagcaaacaacaagagtgccagttagagaatggattgatgcaggcgagaaaaatgtgttg

SEQ ID NO: 138930 - DNA, 524 bp, Zea Mays
aagtccggcgtcgagtcggtcggtccacggcgacccgcgaatgcgcgacggtggagacggattgggcgcgctcctgtcaccctcctgccccgtaatcgccaccggaacggaccagggactcgggcgaagccttcgggccgcacacggggatccaattgggtgccgagcatgaaggacgacggtggctatctatctgcaacaatggtggtagtgggcacagggattccggcgaacagggcttgcgagcgaggacgagggggtcgcggccgtgtttatatccgggcgtccgagaagatcgcgcggcgtgaacgagtccgtcgctcagagcaggcccggtcccagcggcgagcttctcgcgcgggtaggcgagcgacgcgctatcggttgaaggtgggagaggactgacgagtgggtcccaacggtcacatacagagtgaaaggagcgggcgtgagaggagatagtgggcagcggctgacagttggccccgcgcgtaagggaggtgatgacagcgtgggcccgcctg

SEQ ID NO: 138931 - DNA, 366 bp, Zea Mays
tgaggaaagagcacctaatcaaaggggcccgttattcagtcggaagtggcaggtgtgtcgtcccttgaaggaccagcccctggtcgaaccccgcggcaccgagcctagggttgagcatggtggagcctaacaagggagtccgggcatgtcggaagggaaccactcgagtggatcccatgtctagcccttgacaaacctaccattaatgactggccacattaaccacacatggcactgggccatagtgtgggcgtcagtccgcttcccacttctgacctacggaccccttggccgcatagcgctcatgacctacgagccttcggactgtgacacattaatggtccacgcgtccctcggcctgtggca

SEQ ID NO: 138932 - DNA, 961 bp, Zea Mays
cacaaaactatttttattaaattctaggaaaaataacaagcctaggaaaattgatttcataattttaccatttttctaccatttttaacagatttccaaagtcttttggaaaaagaaaaaagaaaaagatcaaatagagctgggccggttctggcccagacggcccaggtccagggcaaaacgcgcccgcgtgcgcccgcgccctggcagctttgcagaaaggacctcgcgtttcagaacaacccgaagtagatccgtagcactattcactaagtcgctgacgctttacaccgagcccctctggtttctaattctttgcacggctaagtccccgacggcgcggagcacggccgagctccggcgagctgtctgtgccggccgattggggcaaggactgacgtccttcttcggtcgaaaccgaattcacaccccggccaacgattcccctaagttaattgcacaattggtggattaatttggtctggccacggagagcgcacggatggaccaaagattcatgcgttcccgacggtcaggggacttctagcccaattggacggtttagtaagcatcacagacacggggagaagcttaaacgaagcagagggagggttggactgaccggaaaaagggctaacgacggtgaagcttgtttcacggtggcggaaagagatttgggggaaaacgcgaattcgagctcactggtggatgattgtggccgattagcggtggctagttagctggcgacctcacggagctagtcacgggctcaatttataggagggtaaggcggtggccgtgaattttgaggaggacgcgcggcggccggagagggagaagaaggcactggccgcatgagtgcgtgtccacagtcatggcgagctcgccggcaatgatttgacggcagtaagaagccagggcgacgcgatgggaagttaaagccacgcggcgcaaggctagg

SEQ ID NO: 138933 - DNA, 657 bp, Zea Mays
gccgccggcggagcccagtcgtacgggttcgccttagtagtagccttgggcctcgccttcggtccgggcttattggcccccggggccgggctcggctcttggctgctgccctgctggctgctcggaggcgtcgccggcctcctgttggtggcgccttgtggcggcgctttgccggccgtggccggttcaggctgatcaggggaggtggaggtggtgccgcagaagcatacgttgcccatggcagctagctaccccggacctgctctctctgtgcctcgtgtacgtctcgttctgaagatactaacgaccaacggctgttactgttgctctgcaggctgttctctctcgagcttccgagctctgcatgcgactgcctctgcctgtctacatatgagtacgtagctacctaagctcgggatggagaactggtcgcggccagcgggacgagagggaagaggtccagctatccaaagtacgcaacgacgacagggacgagaaaggggaagccgcagcagcagcagcatatgcaggtgcagatgcagctttcaaccactaaaaaaatgccaatagaatattcagatggatgatcgatcgatcgatccggaacggggaagctttgcttcacgcttacgttctttggaggagactgacgggtca

SEQ ID NO: 138934 - DNA, 467 bp, Zea Mays
aaataaaaaggaaaggaaaaaaagaagaattgcgcttgggcccctttcctctcggcccgctcagccttcttccaccacgcggcccatctatccaacgtgccgcaccgctgaactgatggacaccgctacggaggccccactggccagttctttctgccgcatgcgctccggagcattgtgactgcgtgtgggaccaacctgtcggacctatcttctttcccccaacagcttttccgaatcctcgcgcaaccgaccacgcaacgactccgaattcttgggcgcgtttttcgcggatgcctttgacttggggctcggtcgttctccctgtgcgccctacataaactccagctgtgccaccgccttactccctcctgttcatccagttgcctccagcagaagaaaaactctcgttcccattagagctcaacggtgcagaggagggagaggaagggggagggaagtgcgca

SEQ ID NO: 138935 - DNA, 591 bp, Zea Mays
agaaggccaaaactcgagatgttaaatgcggtggggaaacttcaggaatgacttcagacgctgacagagaatgtgaaacagccttgccactgcccagagttcctctgccacctttggaacgtcttcttttttcttcttgttgcagagagagcgctgggaatgaccactaggttccagcagacctttctccatcagggcttcaccagcaggggtaatcctcacccacactgatttcttcttcagagagcgaccctcagtcaaagagagcggcaccggtgaagctgacagccgttgccacactgatttcttcttcagagagcgaccctcagtcaaagtgagcggccccggtggagctgacagccgatgccacactgagggtctcctacacggatgaccaagacgttgccgcactgaattcctgttgacctgatgatccacacggaggtatggacaccaggcagcttgatgaccaagatggaaacaacggaaacagcgagttggccggcggcaagcagcaactcggtggctgggcgcaaggcagttgaagcactttccacgaagttccacttggggccggcgacggggcagggg

SEQ ID NO: 138936 - DNA, 364 bp, Zea Mays
ctaacttgaaaaatcagaaaaacaaatggaagtaggaatcatttttgtagtgttgtcaccaattactaaaaaggatgggattgaaagctctatatgttgttttggtagttgagacaattaggtgattaactattttatgagtgaaatgaatgagataggtttggagtccacaaagacgagcaggtactgtacaaggatgttgattgatagagtaaatcaaatgaggtgcctatcattgctagatgtggggaggttattaatgttgtagaaacaaatacttgaatatgtggaagatgtaaggctaatgaggttcctgacattgttggatctagagaggttattgatgttgcagaagtgaagactt

SEQ ID NO: 138937 - DNA, 331 bp, Zea Mays
acggtgagaagtctccgtagcgctgggctcgcctatatcaacccctgcccgcgaagactgctcctccgagcccgtttcaacaccgacatcgtccagagtagccagcgagccttccaagcaatccaaatatttggtttcctcatccttctgcgcctgttacagaaaacctacacgttagtctcaaagacacaaaaatttagcctctagctacacgaaaaacaccatcaccattacctgctccatcgcccaggcaaccctctccctagccacggagcgactgtgactaccccacatccgatcaaaaagtgcaccaacagattgcttgaagggc

SEQ ID NO: 138938 - DNA, 546 bp, Zea Mays
gtccgtggctccgccgcgcgtgcatgtgcatcgaggtatattaatcacggtcagcggttgagttggccggggcacgtcagcagatggcaacggagaaaataagcgaacgatggcttagttgtgaccatgattccatgaaagggataatacacatacacatatgccactctcgtcgactatgaaagagcaaaaatgcacgatagagaaaaaaatgagtgtactagtttagaagaagaacagatctagcatgagagtttttatttggtaatctaactaatctataccactatataacaatccaccggtataaacttcgcaaaacccaaccaaccaaatcaccctcgcatctatgacctctaataaacgtaccaaacaaattacactcagacttaacacaccatcaaaactaacaattcagattgttggataacctactctcttttactcatccaacttcaatagataatattatttggatcatccttcatctccccttccccacgacccctcatcctcccctaactcacgttgccaccaccgttgacc

SEQ ID NO: 138939 - DNA, 863 bp, Zea Mays
cgcccaagcattccctcagatcaggtggaaaagtgcaacgctttgagccaaccagagtcagactctaatgactagagagaacctatcatcgggtatataaagaacaaggaagaatcggatgataaggcagcaacagaacgcatcgcaagacaatcggcccactacaccctcatagggggcgcattgtacagaaggggtgcaataggagtcctgatgagattcatgccggacagtgtggaatacacgcagcatccagaactcttgttgagaaagtcttcaggtccggtttctattggccaatagcaaagagtgatgcagccaagttagttcagagatgtgaagtttgccaattttcgtcaaagcaacaacatttaccagcacagcagctgcagaccatacctataacatggtcatttgcgtgctggggattggacatgattggacccttcaagaaagctcagggaggctatactcacgtgctggtcgccattgataaattcaccaaatggatagaatacaaacccattgcttctctaacttcagccaaggaagtggaattcctacaagacataatattcagatttgggataccgaatagcatcataaccgacctaggatccaacttcactagctctgaattctttgatttctacgagcaatggagcatccagatcaaatatgcatcagtagcacaccaaagagctaatggtcaggtggaaagggctaatggaatgatactggaagcactcaggaagaaagtcttcgacaagtatgaaaagttcgcaggaaagtggattagagagttgccttctgtagtttggagcctaagaactcaacccagtcgagctctacatggaaacacc

SEQ ID NO: 138940 - DNA, 1082 bp, Zea Mays
gcctctttgtaccgtcggtcgcctgtgcgtcgccgactcgcgaagcagacagcaacaggctccgccgccaaagaaatcgggtcgctgctctgttccgtactccgtctccttggaaaccgttgtttcgaggtcgatctgtgtccgtaattcttcgattttttttgctgttgctcttcgttgctttgttgatggcgtggttggtgattcgctggtttggcggcgcggagcggaccttgttagcctggccgagcgcctcctgagcccagctacatggatccgccggagtcgatcaactgaccgagcgtctccttgcccccacggagtcgctcttgtcaagatctgacacattcgctccccattttctgccaacctcggaagcccagcacacaataaaattttgtttggtttggagagaaatttcggccgttcttgctttgtttttttttgtagctttgagatcgatcgcaggtgtaagtcaggtggcagcgtgagacccttacccttctggggtggatgagctgacacagttacacgcctgcgagatcacccacaacgggagcgctctttcgttacgcgcgccgcgtcaaatttccagtagcggctcgcgtacatcagggcgccacatttctttagcaaaccccacatttctttttctaccatttccttgttagtccagactccagatgggccattcgcctattatctcgagattttggtctgatcttgctcaacttgccggctggatttgtaagccgaaattagttggacctcaaccgaaggaccattcacccattgtctgaaaattgaagatgtatatatgcctttttgttttgtttttgagatgcatcaaattgtgctttagtggaacgtggtccgggataatttgtgtataaaatgaaatgcaagcaaccagcgtgcacaaccaatttggcaacggaggataataggcgaatgaccttaaattaatttggctgtataaaatgaatgtattaaattatcttgatttagggaatgaactaaaatttccaaattctttggaaaatggggtttggaactacctttaaagatagtttaactacctt

SEQ ID NO: 138941 - DNA, 691 bp, Zea Mays
ttcaacaatggatccacggccccgcgccttcttcaacccccagctcgtctaacacgctggcgagggagacttccccccacagccgccattaccagagcacaagctcggtgcttccagtgccaccatagccaaaccaaacactactagctacgtaaaggaaacagggatgcacacgagagtccttgcctgagattcagagttcgcccaatcacgagagatccagccacggcgatggtcttgcatccgaacaggtctgatgcgatccccgtagtgtaggtcgcccccagaatctttcctgtccagaggttcccaagaacagtgcggcgcgcctccaggtgctttgctgcgcgcgcagaaggaacaccaatcagtgatcccccaatctcttctctctcttcttcgttgcgctctctcaggttctcgcattcccgcggattctatcgaccgtgcacggcaatggggttacagacattcacttatatgcgcaggggaagcagtagtttggttccggccggatcgacgaggttgttgcggcgcggcgagaattccgggcggactccgtgcttacctgctacaacgaaggtgattacgcgggtgtaactgtgtaaccaacgtggggatgcagcaggtgggggtcccacatgccagagattgaacgacgccctggtcgtcatgtcatactccaatgtgg

SEQ ID NO: 138942 - DNA, 716 bp, Zea Mays
ttgaatgccattgaggaatatccagcaccatagcatgataaataatagaagaggtcatcacaaactgaacttggaccgatctccccacttttgtcataagatcttcattccatctaggcagctgatccgcaagcttgtcaataagaggctgcaattgagttcttgtaagttttcttaaggacagaggtaaatcgagatatttaatagaaaaggcttcaatgcgacaaggcagctgagcctgaatagtctcaatgtcggctgcagaacattggatggggcaatgttgcttttatggatattagttttgtcccgtggcttctccaaagagatgaagaatattagtaaccatatgaatatcactagaagctggtctaataaacatcaccacattatcggcgtaaagggatagacggtgttgtattgatctagaagaagggctgcaacagacctgcatccgcaacattagacactagttgattgagggcatccataacaataatgaacaacatgggggacagggggtctccctggtccctgctggacccccctctggtgcctaataaaatcctaggcaccccattgagcaacacttgtgtagaagaggtagtgaggatgccactgataatatccctccaaaccttctcaaagccaactttctctagaaccttcagcaagaaggaccatgaaacactgtcaaaggccttggtaatatcaag

SEQ ID NO: 138943 - DNA, 458 bp, Zea Mays
tgccacaaatggtgctcctctgtccgagactatagtccttgtattccatgcaaacgaactatctggtcaatgtagatctctacatacttctctgtcctgtgggtggtgtgtactgttaagaaatgagcggtcttggtcaacctgtccacaataacccaaatagaatcatggtgcctggaggtattaggcaatcccatgataaagtccatgcaaatgtcctcccatttccaagatggtatgggaaggggttgcaaagggcttgctaccttcaaatgactggctttaatcctttggcaggtgtcacactcggatatatacttggcaatttccctcttcatcctgttccaccagtataaggatctgagatcatgatacatcttgttgctaccagggtgcatggagaatttggaaaggtgagcttcatccaatatcctctttctgagttcagggtccttggg

SEQ ID NO: 138944 - DNA, 603 bp, Zea Mays
gatgaattggttgaccaagtaccaagcatgccttagttttgataagaggactgtgaggttgatgtctttgtcagaagaagtgttggtggagttgatcttgtctgaactaaggaaaggaagctgtcatcagatatctgtccatagtgaggaagtcaatttgctcgaggtcatcagagtagtatcagaattcctagatgtgttccccgaggagttaccaagcatgccagccgagagaaaagttgaatttgccatagagcttatcctaggcaccgcccccatttctaaaagagcctacaaagtgtccggactagagttggtggaactcaagaagcacatagatgagttgttgcagaaggagtacatcagatccagcacctcgccttgggccgctctagtgttgtttgtggagaagaaggatggtacgaagaggatgtgcgtagattacagagatctgaatgaagtcaccatcaagaataagaaccccctgcctagaatagaagatccgttcgaccagctgagaggagccagtgtgttctcgaagacagatctgaggtcaggttatcatcatctcagaatccgaccttccgatgtatcgaagacaat

SEQ ID NO: 138945 - DNA, 591 bp, Zea Mays
caagtttgctacaaacagattagcaagttgtcatgcaaaaattcaagaaaaatgcctctgaagattctcggtcagaacaattgacgaagcttctgatggtacagtactaaaaatatcccaagattagataacttcgccgccggtaaaccgtgcgcccgaattcacgtcggtcgccatgattcgtgccgccgggaaagagattgcgctaggccgtgaaaagatcaactcgcggatgagttcgggctactgtggcctcgttgttcctcgaccacttgcaccggcgacgtggctttgcggccgtcaccggagtttgcgcccttcaccgcgattgtgccacgcctcaggccattaaccacgtcatcgtgagttgtgatcattacccagtgaccgtcgtggcttcttatcccacaattgccacgaatcactgcgctagtaacatctcccctctccggccaccaccgcgccatccccgattcacaagccaccgccctcggagcctataaattgagtgtgtcgttggctccgcaaggtagtcaagcaaccaatacaccaactcgtgcctcgaattatccaccagagaacttcaatatg

SEQ ID NO: 138946 - DNA, 500 bp, Zea Mays
ttttgtgaatataatgcatgcttggattgttacccttaaaccatgatggtagaggcatggagtccattatatagatgcttctggtgttcatgttaaatacatataaactgaagtgactgtgtatagcacataaaggatagaaaatacagagctgaaaagcacaagctaacacatttacatgattaatttacatattttcagaccataagggcaccgtttcttcagttcgtgccatgattaatttacatggaggacagatggccgcccacaaccacatcacgtagcatggccacacttttcaagttgcaaggaagtaactcaattattggttgaacattgcagttttgattagttaaaccagaagaacattttgggcttttttctaatcaccaatcaagaaacaaacagaaagataaactgagaagcaacccaattaagccacctttccggaaatgagctggaaatccaaccatgaaatgaacatgtacaatagacagaaa

SEQ ID NO: 138947 - DNA, 846 bp, Zea Mays
cggattatctcctgttcttggctgcttccctctgttctattctggcctggccgccattgtttcagcggatgagttcggggtcggaagtcttgttcttggaggttctcccctctgcttattggccatatgatgttctactcctgcctaaattttgcctgtgcgaaaaatttgtgtcctttttgatgttgtggttttggttggataatagtgtgggaaagctgacaactttcttgattttggtttgataatattatccttgcagtgtgcttgtgatgttgcgatttttcagaaagctctgatttttagcgcttcattatttggaatccttctggctctgtagtttgctgtggtttgtgatctcgtcttcaatattttttgtcgcttgcatttatggcccttcacgccttctttttcttcccattccctgacgtcctacaaatgacaaattacaggtctcttgttgctgacactacctggacttttcttctgcttatgacaaagacgaactgataagctggcattcgtagatcggtttcttgggagatacacatacagaagctttagggtcggctcgtagaatctctcagacaccgtcgttttgcatccgagaacttggtaagtagtatgagatgtccttcttgcggttttctgaaccaatgctcgtttaccttctgtttgtcatcagagaagatccttatcctacttgttgatcgaaattgaagtgtttgtaaagaatgctaagtaatgcgtttctttatgtgcatttttgtgatgaggttcgggggtttcgcctctgtgctgtttcattcactttggactaaattttcaacattttcttcaatcgat

SEQ ID NO: 138948 - DNA, 512 bp, Zea Mays
cacaaaactggtaaaggcctttgaaggaggcagattccaagctgagtacgcaacaggagcgccaatgttcgataccttgcctctgagtatcatttcgagccggctcaccaagtccatagcaggaattcttctgttggtcacctgggttgaatcagccaggcctcggtacagataggtcggatatgccatgtctttcagcggctgaatgttcttgaaaacaaagtcagcgaccacagcttttgcagtcagacccctttctttcaacaatccaacttcagctagcaaagcctctgcctcagccacctcctggtttgtgggggattcggtccagctcggagtgcgaacatccggctgtctccctgaccatggggggagggaattcccatgattctccatgatgaaccattccaggcaccaccccttgatgttgtccttgagtgggatgtcgaggtagtcagtcttcctctcacggcgcatctccaagctcgcaccccccaccagctggtgctgcc

SEQ ID NO: 138949 - DNA, 457 bp, Zea Mays
acatgaagatgaatcccaaaacccccaacaacagtagagtggtccttgttagggcaaggacaaaggaagaaacaatattgggaaagagggaaatagggaattccaagatacaccccatagaggtggccgaaagatgacaatgtgcaacatagagctggggttgagatgaacatgctagatgtgatattaatgaagaagttctcaatttttttggaaatagggagcccaaatccatgcattaggaagtgcacaaaaaacaacaatcgcattagcatttggcatcagataaggatccttactagggacacataattatattactttcttctcttgcaacaatccttccacatggaaagcctacagatatttggattcgactatggaaactttgagctcccatggatgagaggtggccatgggaacgaaatacagatctggcagcgacggaaaagtttag

SEQ ID NO: 138950 - DNA, 348 bp, Zea Mays
gaaaggtcgtcgtagtggttatcgagagtgtggaggtatccgaccatgtagacgatggtggggtcatcttcggtaggatctctccctgatagggcctgaagtcttttcctccaggtgggggtatttttgttgcgaggtgggaagtaacgaaggggggtttcaaagacctctctgctgtagttttggcatagctgtttaagggcttttcgggcaacactttggcaagtgtctgggaagcggtgcccgatgaaggtgacttggaagggagggtggtttgggtaacttcggctttctcccaggtagaccgccatagagcacttctccactccattttcgcggtattccttc

SEQ ID NO: 138951 - DNA, 587 bp, Zea Mays
caaccagccgcttctcagggtcttctcctgcaacttactcggactccgcaaacagatcgtcatctatgcgagtgcaaatatacattcacatccttgaattagaaaataaacagtacaccatacaagaaagcagatcaattaaacacgcacgtgaagcatttatgattacgcgagagagaaagaaattacacgactaaagctatggccgagaggtattacaagtatgctacgcaaataattattataatatcttattggacctagccatattaaccagtatttatcacatgcaccgatagaattaacacttagtttcgattggttgctactgggttaatcatcatttaatttagggatgacaattttacccacgggttcggtttcgggtacgaatttgtacccgcgggtcttgcccgtactcgacccgtgataaaattggagcgggtatgaatatttttgtcgcccacgggttacccatggatatccgtaaaaactaaaaaaactagtgcacatgtatcatgaatacttgaagtgtttccatattatgttttgtatgcttgtgttgacacataattcatgaagacttg

SEQ ID NO: 138952 - DNA, 416 bp, Zea Mays
cagtatcttcgtccccagttttgcgtcaggtgatgctgctgctgctgctgctgtggcagggtccaattccaattcctcctatgtgccatctgagtcgcacttatctgggcccaggtgatgaagcaactgttttgccatttgcgtcggttagatgtgtaatttcccagtttgcaggaggaattctggtgtgtaaccagtcagcatgattcagtttaggccgttgggtagtgaggcaccgaagagttgtgtttttactgaagaaaggaagagttggcagcgtttttagtacaagtatttgacatatattctgatcatggggggcattgtacttctgaattaagcctattatattcactcatcgtcttcatgacctcgacctgtccaaaccaaatggcaggaaatcagcgaccactcac

SEQ ID NO: 138953 - DNA, 428 bp, Zea Mays
gggtccttaacctcacaactcaaaatgaggcactccttatgaaaaccgtggacaagttcttcaacaagcacaatctcccgtgggtggactaagtctgggataaccactatcgatcgggtatgctcccctcggtttccacaaaaaggaggtatttctggtggaacggtgtgctaaaattggtttagaaattcagagatgtcactaccatacaagttggaaatagctgctcgaccaggatgtggcaagacgcctggggcactggtgttcaaatgcagctattcctagaattatactcttacgcgcgcgataaagacatcacccttttacaaaccaaaactctccccaaccctatggatatgtttgtgacaccagtatcggtggaagcctatcagtagttccaaattctgtcaagacactctgaacaccaa

SEQ ID NO: 138954 - DNA, 419 bp, Zea Mays
ggattattcaccaaacaacttgtcctagaactccacctcagaatggtgtagcagagcgaaaaaatcgtcatttgttggaggtagcaagatctctcatgtttgagatgaatgtgcccaagtatatgtggagtgaggcagtaatgacagccacatacctcatcaatcgaatgccctcaagaatacttgatatgaaatcacctactgagcttctgttgggaaagagtgactttcgagttccacccaaggtctttggttgtgtctgctttgtaaaagatcatcgacctatggtgagcaagttggatcctcaagcagtcaagtgcatttttgtgggttatgcatctactcataaaggatacaaatgttgggatcctattggtaggcgactatttgtgagtatggatgtgacatttcgagaggaa

SEQ ID NO: 138955 - DNA, 364 bp, Zea Mays
gccaagtttcagcttccgttcgtgtcaccgtgttcgtcggaaagagagaggtgcagggaggcatcgtgcgaacatccgcgtcgctctcgagcgcggagaaggtcctgggccccggtcaaacctgttgtagtgagccagcaccgtagcgcgtgggcagtcctgccacatgctgagtccaggtaagaactcccagctgggtgattccctctgttctctgcgtcgtgttttgctagtaggcacatgggtagttcaccggtgcaccgggctgggactcgccggtgtgtactgtcgccgcgcttggtcgtcggtctgagcgacgagaggaaggagatggtgctgggccgttgatccggtatcatgcggc

SEQ ID NO: 138956 - DNA, 521 bp, Zea Mays
ctgtggcaccgcgtcgacgtgggcataggcacgagcatggtttcgacattctcccccgctaggcgcatggtggaccatagcgcgggcagtgcgaagccttctagtgatcctgcgacgatgacatgctaatctatcttgtggaaagttatctataggatctagtcctttgcctctccatccccttagggcctgattggttgtccgcataatctagccttgctcggatctaatgaaataggctctcttgagacaggttgtgcaaatgcaattcaatgtgtttggttggttgctttgcatgtgatcaatcaatgtgacgatgttggagccacggaatggaaaacaagctcacaagtgctcatcagagccctgtactcctatattgttgcacgtcaactggagtcagcgagcgcagagcaaacggagctcgacgttgaggagacgttgccgaagaggaagctaggtgagggcgagcagatcaagaggcatatggaagtcggcgttaccatcaggtgatggttcac

SEQ ID NO: 138957 - DNA, 565 bp, Zea Mays
attaaacactaaggcccctttcggatacttcagttctcgggcatagtatttagcttcaaaaatttctccttcagataatctttttcccgaagcatgtcgaacaatataactaaggtcttcggaaggtgcttcgggagtgggagcggcagctttttcaggcaaaatctgttctatagcttcttcctccactgccttttctccaatttctgagggtttctccttggtaggctctgaaggcccagctttggcgctggcctggctcattgtagctttggcttcggtcagttttgtttcggttccaattgacactttcgaagctttggcaattttccatggagtagagcttgaagccttcactgtctccagcacatctagtacactggccatcctttttctcttgtgggtcgccgcaagacctttttgtgccttcgacattgtcatttctgccgaagggcttaaaatttctaatgtttttgttccctcgattcttggctcttcagctttatcagtcttcggctcagctaacttggctgagggtgcctttggcaaggtggccggttcctca

SEQ ID NO: 138958 - DNA, 914 bp, Zea Mays
taactgtgcacgtaagctataggctgatatctcttccttttacaggtattggcaaatgccaagtttaaaattacgaaatttcccattcggatgagctgaggcagttagaatttatattatcgcgttaaggtgctgaagcgaccacaggtttcagcatcataatagttcttgatgattgaagctaatccacatagaacaaccaataagcactgtgggttgtgcttctgctgccataaaatgacagtccttgtttaccagcctagtttggattatgaccttattatttcttgaatgtacatctgcaactctgcaccggagcatcataccactgctccaagcatatatcatttatgtaaaaactgaaatgaaaattcaatattctgacagtcaatttgttttttaaccgcttgcagcttctgcattatgatatcagatacgtcccttgcttcgtgctcctggacaagcacggtagagctctagcgaagactggagtaccaaccagccggcagcacgttgtcgccggtctccatcacctcctgaggatgcagcagccatccggactggaaggaaaccagaatgcgcctccgtcatgaagcccaaatacctgagcaaggcctgtattgacaaagaaaaattttcagaatgtgccttttgtttttgcaagcatgaacaatgggcaaacattgatgcgttaattctttagctggtaagtacagattgaagttggtgcaaaagcaaaaggcaggtggtattttttttatgatatccgccttgaaataaccttggaatttgtctcatagatcttctaggataattttttttcttgttcattcatcagcagtcattcatattcttggtccactagctgtctcatgcttaatcttgaaaatggacttaacatatctgtaacaccc

SEQ ID NO: 138959 - DNA, 913 bp, Zea Mays
gatagattagccatttgcaaaagtaaatttgacatgacaaagtaaattaattgccagagtttcttaataccacagtacaaggtatcctttactcaaagatatggtgtatggcaacatagtttccaacacttgccgagctcttatcaaccaggcatgcgcagaacatgcaatgcaccaagcacgcatatgaattggctcaactgtatgcacagtcgaaatttgattctagataaagaggggaagtgtcagtttatcatttgtgttggggattcaaccttgtgcaacacatctggtaagaaccaccaaggaggaaaatacaacatcaagctcaaccatgtacaatcaaggatacttgaccgttgtcaagagaagttggaaggacagaagtgtatgtgtgaaatgattcagagatctccatacagttattggcatttagagttttgagagcattctaagacactaaaatctatttaacagtcaagattgctgagcacttgcgaacctatttgaaaggtagttgtaattctgtagtacattggaatgcaggataatgtaatgtgagtaatttgaataaaagcagttgctaccatttagaatcttaccagacagagtcttaatgcaccaagttctgtcatagtgaggtgtgaaaacatgagcattatcacattatgtctatgggcagtgaactactgagctgtcatgccacatcaactatcagtctctctgcactacctgcaagaagtcatcatttcaatcgcaccggacatcctgaaaatactcctagtgcttgaacatgacgaatcttctaaattaatgcactcaaaccatataactcttgtccactattttgtaatcgccagtctgcaattcaaataaaaaaggagcgtattttacaagttagaggatccataga

SEQ ID NO: 138960 - DNA, 598 bp, Zea Mays
gtgaagtcgccggagacggggaagacagcctccgagggggttctagggtcaccggtgagggctggaacgggtgaagaaggtccggcaaactcactggcagggctctggccacaagaacgggaccagagacggcggaacgacgaaggggaggtgctctaggcgggtcgggcaaatcgagcgaggaatctcggccgaggggaggggtttttgggcgcgctaaggcctagactggctttgactgggtaaggggaacaatatggaccaacgcaggggcacaacacgaggctaaatcggctagtctccatgtgggcgcggcggaccggcacggctgaattccattgaggcaaaattggctaagaccaggcggaattaaggtaaaccaagcatgggaacgagttcctcaccttgggatggagctcggggtggcttggcgcgacttctggcgggctggacgaccggtagcgtggccgcggacctcagtctagcatgggcggcgatggcagagcgcgagagagggcgagagtgtgcaaaatgaggcaggagagagagagcgggtgcgggcggggctaaaaatgagctggagcgcatgggcgagcaa

SEQ ID NO: 138961 - DNA, 599 bp, Zea Mays
aggcgcggcaggcttcacctcggtgggcactgaaggcccagcttcggcttcggcctgaactttcgtagcttcggcaatcttcttaagagcagggctcaaggccttcgtagtctctataacagcgtctaaaacgctagccatcctcctcctcttgggagttgtggcaggaattttttgcatctttggcaaatctgcctctgtcggtgggctcaggatttctagcgtttttatcactttttccacctgtggctcttaagccttaccatctctagcttcggctggcccgactgtaggcaccttcggcactacaatcggctcttcagtactttgcactattggagtagcttgctttgcttcagcagctaaataggtcccctcgccaaatttaggaaccatgaccggttcaatgtaacgcgaccggtgggtcaggaccttcatcttcttgcccttcggcacaacagtggtggtcgaagcaatagcttttcttttcttctcttgccttcatagtgggtagtgataatcagggtatacgaagccgatggcatcaaatactctgtttaaccttttcttccccctacccccgaaggctgcggacaagg

SEQ ID NO: 138962 - DNA, 344 bp, Zea Mays
catccatctcgggtgccaaggaggtagtgaaatcgatgggtggcgtcgaccacacaattccgccgtcgtcgcaatggagtccgggttacgccgtcgatctggcctctactggtggattgagagcttcgtgaaattgagcgaatcaggcattgggtcgtcgaatctgggagccatggcgtgcataactgggactgcgcaccgaagaaagaacaccgccgtgggccgcgcgacaccgtggccggggcggtctgcgcccacatcactggtaagaagtcctcctctgagtttgcctcggcctcctcatcgcgtcgcactggtcgggaaaagcttgggacatcggctcg

SEQ ID NO: 138963 - DNA, 399 bp, Zea Mays
gctagggcctagggcttatagccacttgatgccggcaatggaggcggagacccggagatccggcgagccggcgagggcatgttcgtttacggaaccgttccgactagaataataagtttatttgtactttctgacctcaatccaatttgactgaacaaagcccaaggaaaggtgagagatccggcgaagcctgtgatttgtcgcagaagttgctggtaccttcgccgtgcgttttcgaaggtgtgagtagagatgacaatggaccccggtccctgattccttgtggataatttattcattaggagatggaaataaagaaggttcccccacagagatgtaaacggaaaaaacctcccccaatgataaacgaggacagggatgggaaatctccgttccccg

SEQ ID NO: 138964 - DNA, 353 bp, Zea Mays
ctctgtctgacacaatagttttaggagccccatgaagcttaaccacagtgtccagaaacacctgagctaccccttgagcagtgtatggatgtttgagggaaataaaatgagcatatttggagaatctgtccaccactaccaaaatagtgtcaaaaccttcagatttaggcagcccttccacaaaatccatagaaacatcctcccaagcacctgtaggaataggcagaggctgtaacagtcctggtggatgcactctttcacttttagcctgctgacatacttggcactgccccacaaactgagtaacatcattcttaagtcccttccaccaaaccattttttcactctgtgat

SEQ ID NO: 138965 - DNA, 578 bp, Zea Mays
gttagcaaccgggggagctccgccacctaaatccgaccaaggcgccaccactgagactctgctccgttggtctgtggctggggatggaagacaaagtattagtcgttgatcatccaacacatggctgggattagatcttggttaccggtatgacctaggggagccatgatccgttggatctgatgagaacagataggattagaccatggtatgatgttgcgcgtgacatcgatcttgttgtttacggctaggattagttgatatcataccccttcgccgcattaaaccggagccgcagattcccagacgagcggccccgatttgtacgtgaatacctcttcgcgtgatccgatctgggcccttgttttctgatcggacgactttaactacccgtacccctttggtcgtggctttttagtaaagagaccctctgtttccgtaaaataaacccgcagtcctagcagtggaattatgagtcttagaactttttgcgcagtgaaccctgcacttccctgttttcatgcgccagcccagagagctcataaattggataaaagattatggaaatggattgttaa

SEQ ID NO: 138966 - DNA, 471 bp, Zea Mays
cggggttccaaaagtggccttgccgttgatcgctgatctagaccatttggggatcgctttgtgttatgtcggcacctctagcgaggagactcggatgcttattcaatcctccctcatggagagagtgcgtgcggctcagcagcaggatcgtctattgcaggaagctcgaaagagggttggtgatggtaaaccacgggagttcaccattgatgagaatgatttggttcgttttaggggctgtctttgtgtgcctcagaaatcagaggtgaagatggatatcttgagagaagctcataaaatgccttacaccgttcaccctggcgaaaccaaaatgtaccgagatttgaagcaaaacttatggtggaagcggatgaaggttgacgtttctaagtatgtggccgcctgtgaagtatgtcaacgcgtgaaggccgagcataagcggcctgcaggtttactgaagccattagaaat

SEQ ID NO: 138967 - DNA, 318 bp, Zea Mays
aaggggtgcctaatcacgcgagtctagtgctcaacgaagatttggtggccactctacctgattgcacatgacagtgccaacacatggctatggcatgagcattatagtcacatacactttaatgcactgtgcatgcttcgagcaacaggacagggtgcacaagctgcccacgccgagcacatccaccagctctgcgccgactgtgtcaccaccaagccgaagagaagttcgttcctgtcgcaggcaaagcgagcggaggggctattggaccttgtccatgacgacttgtgcggccccatcacgccgacgacactcgac

SEQ ID NO: 138968 - DNA, 280 bp, Zea Mays
aggtctcccccatgcgtggtgtcaaaagattccaagtgaaaggaaagctagcaccgtgattcgtcggcacctatcccatcattggcagagtgggacccgcagcataccgtcttgaattaccagaatccatgtctgatatccacaatgtgtttcatgtgtcccagctccgcaaatgcctaaaagtaccagaaagtcacatcgaagaagagacaatccagattcagaaagatcttcagtaccgagaaaggccaataaagattcttgactcagcagttcgaaa

SEQ ID NO: 138969 - DNA, 1112 bp, Zea Mays
caacgggaccctcgccggcctggacttctcggccttcacgcgtctggactctggagaccctcgccctggtgcagaacgacggcctgcaaggtgccataccggaggcgatcggcaacctgacgagcctggtctcgctggcgatccagcacaaccggggcctcacagggccgattccacgccgcataggccagctgaagcgcctcgcctcgctgaggctgcaatctctggggctcgctggcgcgatccccggcgagatcggtaacctgacgggcttgaaagaactgtacctcgacgacaaccgtctggcgggctcgatcccacctgcactcgggaagctccagaagctcgcctcgctttacctgagttataacagcttggcagggaccatcccggaggagatcggcaacatgacggagctgcgggtcatggacttgtcggacaacggcttggaaggcgagctgggactgggaagccattgctgcctcgctcagctccggaagctctcagccctgcttgtggcagacaaccaactactaggaggcgacatcaccccatgtctcaggaacaagagcagcctgatcgaggccaacgttgcaggcaacagtttctcccagatatccgcgcaggccatctgcgcaggtggagggtcatcgctgcagcatttcctggccagcggcaacaggctctggaacctacgtgatctggacttccagaactgcacctccttgcggtacatcgatctggcggcaaacggcgttcttgcaggcacgcaggagtggctcggtacgctgcccagacacctcgagaacatctattttgcccggaaccaactgcacgggacactcccgccgcagctgggcgagttcgggaagctcacagttctcggcctggatgaaaacagaatctccggtcagatacctcaggttcttggaaatctgactagcctgacgaatctcaacctgggacacaacgtactctccggtacaatccctccagaacttgggtcgctgtatcagatccttcagctgaacctgagcttcaatcatttgtcgggtccgttgcccctaacatttaggaacctctccaaacttttctcgctcgacttgtcaaac

SEQ ID NO: 138970 - DNA, 488 bp, Zea Mays
cgaaggttgataaggttgatgagccagaaattgaagaaataacgaaaatgccagatattttgagcgctccaacaagggcgacggtaccaaaggtacaaacgggttctatcgtgactcctaaaaggagaaggatggtaaatgtattagatgtattggaaacaaccgactccataagtcccgctcccacagggaaggttgctgaagctggcaaacgcaacccaaagctaatactaagcaaatagaagttgaagctacaataacccaggctgaaaccgaggcagggcccacaatgcctgctgaaatgaagcctgccacaaccgagcagggggccgaaggaataactctagacgctaatatagcttttgagaaaagtgtggccaaagaagccgaatcccttactctcgaagcattctccgaaggttttgattatatcgttagacatgcttcgggaaaaagactatccgaagaagaaatttctgaagccaaac

SEQ ID NO: 138971 - DNA, 448 bp, Zea Mays
caaaccgtgagtgccactgagagccaccatcagtgaatggagaaacagagaggagtcactgtgtctaaggattgcttatgctgtcatgattctagtaggctgccatggagattcgctctaagtgcgcgtaacatgcacatagcgtggtcgtgcgtgtggatcaggttggtgccttgtgagatccctctttagagccagcaggggagtagtgagccaggagaagagatgggatgtcgccgccatggtcctgctcctccactgtcattcagtgtgcgcggcatggtcgaaggtgatcacaagatccagagcaagaagccaacggagtctccatggggaatctcgacctcatcgtcagggaattgctcgtcgtcgtgcaacgtccgccatggagccaatgcaccgtgttggaaggaccactgtcaccccaatccgaggtgagaacccctcc

SEQ ID NO: 138972 - DNA, 280 bp, Zea Mays
agctgcaaagtcctctgtcagaaatagtaagggttgttcagttaagttgagactgaatgtttggttgtttctgctatactttggaacaccacaactacaaatctgagtagtttcagctttggagtgttgtacccaagtggaagacctatggttggaaaataaggcttgttaagggagatgcagatggtgcagcaggctatttcagtcaactgaaaattagtttcagtgtgatgagcccaactttggggctctctagtgtttgattcatagagctatgaac

SEQ ID NO: 138973 - DNA, 435 bp, Zea Mays
agattttaggctttgatataccaagcggaaaccaagataggtaaagggcattgaacctatctgacagttgagggttcctgcaaggatcgccattttagcaggactgacattgatggggtacatacttgatttgttgtaattcaccttcaaccccgtcgaagttgcaaaagagttcagaacggctctgagaaaaaatagttgtctagggcaagcttccattatcagtagtgtgtcatccgcatattggactatcggaaaatcttgaccacaattctcggccaagggtaacttgagcaggtcttgctgtcacgctttattgatgatgctctgtaacagatccgccgcgagaacaaaaagaagaggcgagaggggatctccctgcctaaccccacgcttgcagtgaaaggttttcccaggaacaccattaagaagaac

SEQ ID NO: 138974 - DNA, 410 bp, Zea Mays
gagagagagagagagacgccgcgaccgaccggccatgatggtgattggtgaatgtgaatgtgaatgtgatcccttccccatgagtgacaggttttggtacctttttttcttctggaactgccgttgctccagcctcctccgggtttggtgtgtgtgtcggcaacggtgcgtcagtcactcagtctcacacaattttgtaatgcacgccaatgcatgctagttcggttgttgcgctctactagttgttttctccccggccccggcaccgagacttgactcaaaccatcgttttgaattcctaaccgagtttagttttcttaacataaacatgtacgtacgtacgtgttgttggcatcgggttgtgcttgagcggactcctcgctcagatttgctgggcccttcgaactcta

SEQ ID NO: 138975 - DNA, 507 bp, Zea Mays
tgtgaccgttggtccgattgccgatactaaagacgccgcccgggaggtcgtacaagatgtcgtggagacggcggtcgcgcgcctccagcgtgaccctactgatgtcgagtagctcatacctgtagaaatgaggctagggcccgcttgaaggaggatgtaataacttttgtttttgtaagatacttttgggaactatcaattaaatagctcttatctgtgcagtatttgttcttgcttgtgtgtggctttaccaactcttctcctggtgcttggcccccctgggatgtaggatcgacgtgtcgaggctggataccagcatacctaagaaagagttggtgtcccggccccccaggaggtagcctcgactgggacctggacctgttcatagcttcagcaaggaagtgctagtagcacacccattaggacccatcgtctggtatcagccatcctttgattcatgcaataggacctgcaggattgggcctgggaagccaagtcgtgtgcccg

SEQ ID NO: 138976 - DNA, 520 bp, Zea Mays
cgtcaaactccttgacctcatcctcaggagtaacgaatggcacaccatactcctgttggtgccactcgttaaggttctcggggtaggtaggggttggaggcggaggagagcgtggacgcaagggatgacccatggaggctgtgtaacctcaaaagtcctcatgcagcgcctcagtccggcgcctatgcacgaactcctcgattgcccagctgcggcacatggcgaagacgccggcgatgcccttggccaaacacacaaacatgccctgaccctaaccgcgtccccggccctgacctctacctctctcgctacggtccatcggacacgaagcagcgacagcgcgagaagaggtctcgtgatgaggaggctgaggaggtggctcgtcagaagaagcagggcctcctgaccctgcgagagcccgcttggaacgtgcagctgggttgttggagccaacccagtacggcatgtagcgggagtgtttgataggcttatcgaagcgagtctgggtgactacttcgat

SEQ ID NO: 138977 - DNA, 341 bp, Zea Mays
cttccctggacgagcgcagcagaaggctccatggccgcgcacgccatgggctttggcccctagcgttcgacctcaatttccccttgtgctgctcgtcgaggaccctctgcacgagcaccgccccaagtccggttgcctttctcccccttccgagatccagggcgccctcaccagctcagcccccgtcggcgccctcaccatgagctccctccctattgcatacgtgctggaggaagaagaccccctagtgccaacgacaagtgggcccgaggagagatgtgagtacacaaagttgcagatttttgtgttgtgttcaaaaatccgtatctcgagttttagag

SEQ ID NO: 138978 - DNA, 449 bp, Zea Mays
tgtcccctggcggccttctagcgagtctcgctctaggttttgaccttttcatccgagacgggctcgagcgaggcagaccgtgctgtcctgggatgaggggacctcggtcgggtcggagattcttccgagcacacaccccgcccgagatcgggcgaggcggagttttgggaggaccactaagggggaccttgagcgaggcggagttttgggaggacccctaagggggacctcaggcgaggcggagcacttgatcttttgacctcggggaacatactttgatgatgtccttaagttttaagcgtgtattaggggtgtaatcttggtacccctaattatcatacccgacaaatatagagtccataacatccatcatatatacataaagcataaaaccattatagagttcacaacatccggcatatatacatatggcatgaaaccaatacaga

SEQ ID NO: 138979 - DNA, 342 bp, Zea Mays
cgttttcagtgcgcatgctcaagtacatttctgttgtcggtcaggcttctgcagttccttgtgcataattagcgtttaaggcgtgcagttcttgtgaacatgctctgtgcattgtgctgtcgcagtctaggactagagaactgcgaggagccgaggaccaatcttgtaggccctatgctccaaatcatggctgattagtggccgtccaacagtggcttggtggagcaggactgtaggagtagcgtagtagcttctactagttccgacgattcttccccaccccgtactgtgtgtgtgtgtgtctcgtggtcccaacccaaattggctccaaggtcaatctgc

SEQ ID NO: 138980 - DNA, 501 bp, Zea Mays
ctagccaacccagtcatcgtccccaaagagaatgggaattttgggatgtgcatcgactacactagcctgaataaggcctgtcccaaggacccgtatacgctgccacgtatcgtggattctacctccgggtgcaatctattatcattcttagacgcttactctggtttccatcaaatccagatgtctagggaagatagaaaacataccgcttttgtaacagtggatgggctttactgctatgttgttatgccgtacggtctgaaaaacgccttgcatgcatttgtgcgggcaatgagtaagactttcggggacctgattagggacaaagtagaagtctacgtcgatgacatcatggtcaagactaagagagggtcgaccctagtggaaaacttgaccctggtcttcgacaagctatgggcaacccgcacgaagctgaacccagacaaatgcgtttttggcatttccgctgggaagttgctgggattcctggtttcgtaccgc

SEQ ID NO: 138981 - DNA, 564 bp, Zea Mays
agcttcatcttcagtgtgttggttccactgtaccttatagaatttaagagtcctttttcgggtgatcctgtccttctgaccaaaactcgaatgggatgttctgaataagtcaaatctggttccaaagcaacatccaccacatcgatggttctatcaggaatccgagggcacttcttcaattgagatacatggaatacattatgtactgcagacaatgtttctggcagttgaagtcggtatgccattggtccgcattgttcaagaatagggaacggaccaatgtatcggggtgccaactttccttttaccccaaatcgattaacacccttcattggtgatacattcaggtacacatgatctttgacttgaaagaacaagggtcggtgtcgtttgtccgcataacttttttgttgagcttgagcttctttcaagtggtgccttatccgttgaacctttgcctctgtttccttgactaaatcaggcctgaaaatccacagttcccctagtttagaccaatttaagggtgttcggcaccatcgcccgtacaatgcttcaaatggtgcc

SEQ ID NO: 138982 - DNA, 505 bp, Zea Mays
tcgcagtataaatgcagaaacttatgcactttctaaagctttttttaaagccagtttggggaataggaatgaggagatgattatgttgctaacaacatggtggcaagcttctttctctgtgatctgtgaatgaaagagggcaaactggctttcgcatctttagagttttaagtagtaaattgcaagcgtgttttgaggtctgtgacattgtgaacgtcgaagaaccaagtaccaagaccacatctgtttttcatgtggtcagcttcttgtggtgtgggtatatattttactacctgttgatcctggatccaaggcttgctccagcgctgcatttttcaatctttgtacagttttctatttccatcatgcataaaccacgtagctataggttgcaaattgactcctacgatacaacaatataatcttgggcattgccgcaaagagttgaatacgcaggattccaaaaagaaacgctactgcccgtactgcagtctgaattttttac

SEQ ID NO: 138983 - DNA, 871 bp, Zea Mays
tctaacgggggaaggacggcataaattgtcacctctatgggaaggaccattcatagtagcagaagtcactcggccgggatcatatcgcctcactcagatggacggaacagaaattgggaactcatggaacatagaacatctcaggaagttctacctgtagctacatctcagaagctattggggcgacgatgtactctgtaaattgagaaaagtatcgtcaataaaaaaaggtttcaaagacacccagattgttcactgtcaattagcatgcttacttaactcgggtgaccactatgccctactaacggagcaatcggcttaagtcggcaatgacttaagacggtgcgacatgctcatgcttacttaactcggggtgaccactatgccctactaacggagcaatcggcttaagtcggcaatgacttaagatgatgcaacatgctcatgcttacttaactcggggtgaccactatgccctactaatggagcaatcggctttagtcggcaatgacttaagacggtgcgacatgctcatgcttacttaacttggggtgaccactatgccctactaacggagcaatcgacttaagtcggtaatgacttaagacggtgcgacatgctcatgcttacttaactcggggtgaccactatgccctactaacggagcaattggcttaagtcgacaatgacttaagacggtgcgacatgctcatgcttacttaactcggggtgaccactatgccctactaacggagcaatcggcttaagtcggcaatgacttaagacggtgcgacatgctcatgcttacttaactcggggtgaccactatgccctactaacggagcaatcggcttaagtcggcaatgactta

SEQ ID NO: 138984 - DNA, 691 bp, Zea Mays
atgccttgagtcgtaaggcccagtgcaactgtctaactatagactctcgtgtcgtcgctttgtgcgacgagttgcgcaagatgaatgtagaagtggtttctccgggtactctggattatatcttagtcgagccgaccttgcaggatcagataatcatggcacaacttagtgacaagggtgttcaaatcattaaaggaatgctcaaccaaaaggtggataagtataaatgctttcgtcaggacagcaagggcattttatggtttgaagaccgacttgttgttcccaaggatctagaactcagaaacaaaaattttgacgaggctcatctctccaaattttccatgcatcttggaagcaacaaaatgtatcatgacctcagatccttgtattggtggaccaggatgaagagagaaattgctaagtacatatctaagtgcgacacttgccaaagaatcaaagcaagtcatttgaagatagcaggtaccttacagccactccctataccatcttggaaattggaggacattagcatggactttattgtgggattgcccaacacttcccgacaccacgattccatatgggtcattgtggataggctcaccaaggccgctcatttcttgccagtgcataccacccacaaggcagaaaggtacgcaaagatctatattgaccaaatagtgtgcttgca

SEQ ID NO: 138985 - DNA, 359 bp, Zea Mays
ggcatttaatgcgtcctatccaatccaccggcaggcgacgtcagggtcacccagcagacggcgcgcctaactagtctattggcaaacagtgcgcccgtgccgagtggcgcacagtacccatcaccccttctacaagaagcttccactgcacaccgaggatacggagatctcgggcgtcagggcacaagaagattaccccagcagcaaacattggtggctccaagcgcaatattctttatgtccctgggcccacatgtcggggcccagcacctttgtgcactcccccctttaactataaaaggggaggcatgcgacgttacacacaggcagcattggacaaactcagtcttttagactca

SEQ ID NO: 138986 - DNA, 489 bp, Zea Mays
aaattttgtagcagtttaaccggctaggcatcagatcacttggtaagaattcaacttagcattccgagagcattatgttccagagggggtgctccatatgaaacaagaagaatttatccgattaaagcaagggggagatacggtaatgcagtaaattcaaccatctatcctagtatgccatcaactaagtaaataccgatctgaagaaaaagaattgttttatgaggggacttaatgataggcttcaacggaaaatggcaacaaacaatggcagcgctggcagcggaagccaaaaatgtcgggcatggaaaatcaaaggggtttggaggtgaaaggtcaaatcaaggacctaagaagagaactaggttggtgatccgaccttttaatcaaaatcgttcttcgtcttgcccaccttcgtatccctttaaggagcctgttttcatttgtcccaatactacccccgctcctaccgatcagccgagtgcccct

SEQ ID NO: 138987 - DNA, 347 bp, Zea Mays
ccgtgagttaccgaggtggcaggctccggttaaacggcgaccgccgcgctgtccccggaatccgccgcgtggtacgctcgccagcgcgatcccgagctccccaagcctcatccgtcgccggccagccgtctataaattgagcgcgtcctcaactccgtcaagtattcacgcagctatagcacccactctcatctcccctcgttcaccgtagccccgcaattcaggtttcttcccaaatcaattctccgccgccgtgaaccaagctcgtcgcggccagcccatttcaggtcggttcatgttgctctattgctcgttctaacatccctaagctcttctcaaactccccg

SEQ ID NO: 138988 - DNA, 692 bp, Zea Mays
gtggcgctagctttcctttcatttggaacctttttacaccacgcatcggggagaccttgagataaacgaaatctccttcctcaaatcggagttctcttcgtctgttgtctgcgtaactattctgtcgactctgagcttcaagtaaccttccgcggatcaaggcaactttctcttcggcttctttaacaaagtcgggcccttctagtgtcctttcccctacattggaccacatcaggggggtctggcatttccttccgtacagtgcttcgaacggtgacattttgatgctggcctgatggctgttgttgtatgagaattcggcgtacggcaaactgaactcccaatccctgtcgaatgtgagcacacaggctcttagcaaatcttcgaggatcttgttgactctttctgtttgaccatctgactgggggtggtaagcggtgctgaaatctagtttggtgcccattgcttgctggaggcccttccaaaattatgaagtgaactgcgttcctctatctgacactctcttccgtggaatgccatggagcctgactatctctttaaggtatattcgggcaagggcggctcctccaaaagtggtctttactggaacgaagtgggccaccttggtgagacgatcgattattacccatatggaatcatttcctttctgtgttcggggcagtccggtcacg

SEQ ID NO: 138989 - DNA, 765 bp, Zea Mays
cgcgcgtgccgcggactccgcgcccacgtcgcgcgtggagctcgcaaccacctcgccctcggccacttgagcccagaacctcgctcgccctctctccctccctcatttgcgcacctgcagacctcccttccacctcccccacgctgctcacacgccaaagcgccgccgccattaaccgccgccgcccgagcccgtttctccgtcgccgttggagccccgccgtgccttctgccacggtgagcttcgccccgacgtccgcaacccgggacacgccccaatttcccctccccctccccgaattcctctgcccgcgctcacccgccgttctctgcgcagtcgccggggtccgccaccgtcgactcgggctgccaccgcgtcttcgccgccaccgaggagtccccggagttcgccttgaggtaaggaacctctctcgccctctcccttccttttttttactgcccccgctgcgcttaattcctcgccggagtcctttagcgccgccgccgagccacttcaccgtggaccacccccctccggtgcccctgtctcggcctagtccccaccatagggttccccacgctctccccaacctccccagccacccaggtcgtcccaaggacccgcagagcccccgcgcccctcgtctccggcgagtcctccgccgcgggaacgggcgccgccgcctctgctagccggaggggaaggcagaagccgaccacccaatccccaccgtctatcccagatcgaacggctctattttaaata

SEQ ID NO: 138990 - DNA, 282 bp, Zea Mays
ggacggtgctcggttcgtctggactctggactcaccgtggacaccccacggtttgtacggcgtatgattgtgccctcgatggcgaacgccgtgcgccggccggccgccatggaggagcgcagctaaaacgtggagcgaggctgggagacacgctcacacacatggcagggcattcaagtggcgaagtgaaggtagcagagcagagcagaggaaggagaacaagtgctgccgtcgctggactcgagcggcgacgtcaggctgctggagatcggcgacgctgag

SEQ ID NO: 138991 - DNA, 420 bp, Zea Mays
atgcgcatttaaaccataacaagcaatccaccgtgattacgagcttaaccacacgcctagataagcatgatttgaaatcaaattgcccatattttaaatctcggcataagcttggctattggctaacgacgtgacccttttctaattaccaacatacaccacctttcaccatttttggatacttgcacgtcccaccgctattgtaatacctaacaagtacattcaacccctcagtaaagcactagcacatttcagaaaatttcctgagactacgacgacaaggcatcgatcttatcatgtacataaaagcatcacaagcatatttttggaacctatcggttaacttgatcgacacactacacatgttcttcgcccttcaaaatttatcgcacaaccgaaatcatcccacttgccaatgac

SEQ ID NO: 138992 - DNA, 537 bp, Zea Mays
tgggattgctcgaatgactccatgggcaagtattgcacagccgtccgaaaactggaagacagatttgaagggctggagttccatcacgtggaaagagaacgcaacgctacggtagatgcattgtcaaagctagaatccagtcggactcaggttccacccggagttttcatccaagaggtaccacacccgagtatttcctcagatcgggcagaagagtgcaatgttttaagccagccacagtcagactaatgactggagggaacctatcatcaagcatataaagaatgaagaggagccggatgataaagctgtagcggagcacatcgcaagatagttagcacactacaccctcattggggatacactgtatagaagagatgcattgggagtcctcatgaagtgcattctttcggccactgggaaacaactattagatgaggtccatgtcggatagtgtggaatacatgcagcacctagaacactggtgggaaaggtcttcagatttagtttctactggccgatcgcaaagcacgatgc

SEQ ID NO: 138993 - DNA, 442 bp, Zea Mays
ggctggtgtatgtgaggggctctaaaagagaatctttacatccagatgtaaagaattttttctaggagttgccctgaaggactactacttaatcactatagaaatggtgttgcttatgaacaaaattatgtgtaatatgcattccatttgtagaaagaaggtgtgcttactggccaaatgttgttgcattccacgcagatatctaaacttccatcagaatactagcattttcatagatgcattgtacaatatatcattcaaccagaaaactcttaccgtgaaaatgctgaagttcctattgaagctataaatgtgatatcagatcacaaatgctattaaagcctgtcctggacaaatgttcgaatagccgaccggccccgccggatgccggtgtcgatgacgcggcggagacggagacggcaaggccctggatcagcttgtc

SEQ ID NO: 138994 - DNA, 433 bp, Zea Mays
gtccgactaaacgtgtgtttccatcagtacaatgtaggattcaatgccatggtgctatcgtggcaacaaatgagagtgcaagtatgaccaaacaaggaagtggggtggatcatacccagtcgaagccaagggtcatttccaatggtaattgttaagaatctttattcaggttacatattttcaccacccttttatcctgaatgcccaggtattttatgtggcttgtattttcaccctccagttgatgacgatgacggtgtcgtatttgaagacgatgctgatgagaacaagggatacctattcactgggcaatgtactaatttcaatctttttatgatatggtaccaatgcttatataaatacatatatgtcttactcattgtttccaaaaaaaatatcagatgaggataccgatgaggatatagagatcgat

SEQ ID NO: 138995 - DNA, 612 bp, Zea Mays
ctctaagtaatgggatagttccagaaaactttcgtgtcatctttgcagctccaccccttactccgccgctactcccactccccattggcgtcatcccttctccacaccgcctccatgtggacagtctgatcgaacgaaccaacgccatcctcctcgccgtgtccttctcacccatcttctctatcgtttgcctagtctccggcgcacgcatatcagctgttgtggagcttttcgccccctccgctgacgaatctttcggttcgccgatccgcccctcactccgccgccgctcccactcccactcccactctccgagggcgtcatctcttctccacgccacctccatggtgctgcctccatggaacccgatgctgaatgagtatggatgtgcaggtcgccgcaccgctgctggcaggaggcgtttctgtacgacgccgatagtgacgcgacggccgatacagatggcggccatgctgagacgagaagcacaacaacaattagtgtgtgtgtgtgtgacggcaagcatctactactgtctccgatcctacagataaagctgttgttgtgactctgtgaggaagcgaagcgttgttgaaatcaaacactgatgat

SEQ ID NO: 138996 - DNA, 632 bp, Zea Mays
aaaaaaactagcggccctgctccccacgtcccccacgcgcgcggcgcgtctgcgcccagcctcgcacctggccgttgcacgctggatcccaccggtcagctccatcctccctacgtaactgcagcgcccacatcgctctctcccctcggcgaactgctctgcccgcgctgatcgctcttaagaagttagccgcgagacctacagcacaatccccttctccactcgcgcttgtacagccacagggtgccatgcatctccctcgcctctgtgccgccgtagttcgtcgcaccctcgttgttgtcgccgggtagtcgccgcgcacagagcctcgccagtaccctcgatcatgacgtcctgtcgccaaggtacttgctatgcttccctctctctcttgtctctcttctttggcgtagttggccacgaaggcctcatgcgcgtgtcccccgtgcgtcttccccctcgactctccctgcacgagttgcagcgttgctatcggtgaagcacgcagtgccagccagtctatccctgccaccatctgtccccacggccttgggctggtgtcccagcccggcgcgcgtgattccttcccctggccgaatcagtagccggtgaaacccctccgttgtcgcggc

SEQ ID NO: 138997 - DNA, 469 bp, Zea Mays
gttagttcggagtcccatcagagctaacagtcgacaatggaaaacagttcgaaaaccaagatttccgggaattttgcaacgctatcggcacgaaggccatgttcgcttctgtctaccacccacaatccaacggagtagttgaacttgccaacgacaagatttttagcgccatcaagaaaaggctactcgacgacaagaaaggaaaatgggcagaccagcttcctgaagtcatatggacgctgaacacaacagaatctagagcaaccgggttcacaccttttcgcttgatgtacgaatccgaagcaatgacgccgcaagaactgaaacatggatctccatgtgcaagctccacagctacccccgatgtcgatgagtcaacctccaaggaccttaccgatggagaccgtgttcttgccttgacaacactgaacaaataccaagcgcagacgaaggcatggagcgacaatac

SEQ ID NO: 138998 - DNA, 515 bp, Zea Mays
aatgtaggtgcacaatgtgttgaaggccatcaaacatgcttgtgtttcatttccacccacgatcgaaggtctcctgatgccgaagcgtgaacgaatgggacgctggattatgcccttcacatcctccctctcactcaaatcatttttaacgtaaaaccattgcttaatccatgagcccgtccattttttccgaaacgttagcacatgacacttcacatcagaccgatacatgaagctataacatccaaagttgttatgatattgctctttcccaaccgcctttgtctggtaggacaattcatgaatattgcagaagcagttggcatctggctccatcccttggatcctcatagcccaaatgaaaactccaactttcatcaaagcctcgggagtaagttgatgaaggtatatttcaaatgtcttcagtacttcgaccagcatcttatgcaagggaaagcgaagcctagccttcattaaacttttgaataccaccacttcgtctgctttaggaagag

SEQ ID NO: 138999 - DNA, 517 bp, Zea Mays
ccgcaaagaagtcaggggaggacattgtctggttgcctagggaagggtgtgcagacccctccatttgggagggttaggtatttctagtttaaaggaactttgctgggcccttcgtatgagatggttatggcttcataaaactgatccagaaaaaccctgggcaaacctccctatccaagttccaaaaaaggcaggagctttcttctccactgttttggtctctgaggttggaaatggagcaaacactttgttttggacagataaatggatcttgggatagaatttgtgtagtctgacgcctagattatttgccatcattcctaaaaggattgcaaatagaagaactgtgcttgaggctctttccaatagaaaatggatatctgatataaagggtgctctgtctgtgggagttctagtggattatttgaatctttgggagcttctttcagaaatagtgttgcagcctgaagtggaagataagcatatttttagtattgcggcagatggtaaatactcg

SEQ ID NO: 139000 - DNA, 669 bp, Zea Mays
ccgaagaagtgccatggaggatgcagtgagtacaatatcatcaacatagagcaggaggtaaatcatgtcttcgcctttgcgatacacgaacaataatgtatcagatttggtttatgcaaaaccaagctgaaatagatgagaggcaaggcgactatgccaggcacgagaagcttgcttaagaccgtacagtgagcggttgagacagcagacataatctggatggacagaatccttgaaccctgaaggttgtgcacaataaattgtttctgacagagtgccctgaaggaatgcattattgacatctagctaatgaatgggccaaccatgagatagagccagtgacaggactgtccgtacggtagcaggtttaacaactggactgaaagtctcaaagaaatcaatgcctgaacgctaggtgaagcctcgaagaatccaacgcgctttgtagcgctcaagagaaccgtcaacaatgaaattgtgcttgaaaccccatttgccaattacaatattggagtgtgaaggacgggagatgaggtcccaagtcttgttatcaaggagcgctgagtactccaattccatggttgtccgccaattgggatcggggagagcaacacgataactctgaggcactggtgagagcacagaagcttcaaacagagccaggaaccg

SEQ ID NO: 139001 - DNA, 401 bp, Zea Mays
tgaacatccaggctccaaacatcacccaaactagcccacgcgcagcacccaaactagccaggccgcccactgtcccagctcccaaccaagcaccaggcgctcctagggctaggaaccctagccgccgcagcgccgtcgatagccggtctccaacgctcctcggctccgatggttgatgcttcctccgctctcgtcctcgttcgacactccgactgaccgccggtgtggatcgtgctgtgctaatgcctcctctccttcattcatctgccatggtccttgaccagctagaagttccccgtgctccttcattcatctgccatggtccttgactagctagaagttccctgtgcctcctctccttcattcatctgtcgtttggtgcctcctccccactcctccag

SEQ ID NO: 139002 - DNA, 663 bp, Zea Mays
ccatcctcgacccgtgctgcatcgccgacgtcccaccaccggctgcggcagccagaccgtgcggcgcaggcagcgcggtctctgggccgccgaacaccccgaattgtccacccaccccgccgtcgctgtacccgccgccgccgaagccgaaagggctcgcggccgcctcagcgcccgacggccccggctgcgcgtggtgtggggccatgtaggagaaccccggcgcggcgccggcggccgggccgagccacggcaggagcgccgggccggcgccgtgcccgtagtcggccgctcctgatccggcggcctgcagcaggagcgcctcgtggctgccgtgaaagccgccgccttcccacatcccgatcggtcggtcggcggcgcccctctcgcaggagctgaggtagcgtaacggtagcttgctggtggattcttggggacggcgcggcggctgcttcgcctcgtgtggtgctctcgcttcttctctttgctttgccggtcaaaggaaagcgtgggacggccgggtggtgccttttaaactctcggttgtgtcgacctgcccacttcgttgcgcgacactcgtgtgtggctttaggccgtccgccatagctttttgctatgcgtcctgtcgccttttcgcaccgcggagggggtgagctggtcgcc

SEQ ID NO: 139003 - DNA, 728 bp, Zea Mays
tgacatgtcgacacggtcaaacccacagcctgagcgcgccaagcagaggagggcgtgtgtaccccagtgtccgccacacacaccgggtcgtcatgctcatgcaggacaccactgagccttagcttattggacacatcagtgaccctcaccagcttaaccaaccctactcagattaatcaggttggtgacgatattttgtcatcatcgaatcggctaaaaaaaacgaggtctattcctgtgtggatccgtccgggtagggtaggaaagtcagggggcttccgagcaaagtgactcgctttcagttattctgcacgccgcagtttggtttcacagtagtcagcctcagccaccccaattgtttcttctgccgagtagaacgtggttttcttttgttaggccgtcagttagatacgcgatcacttggacctatgcagccggctgactcagatatgggtatgcgtatagtactctggttgacctgtagtcaaataatccaaaaggagaggttggaatagaccaacaggcaacagccatggggctgcaaatgagtgacagtgcaccgaacaaaatctggcatgtgcgtacctacttagcagcctttttatttagtccacagttagttaccgtacgcaaaacttttcgatggcttttactgggaccgtgacaggccggcccggcactcttttgacagttacagacttacatggtgactaaactgccgttcaccc

SEQ ID NO: 139004 - DNA, 697 bp, Zea Mays
aatcgttcataatcagggtattcaaagttcagcgcatccattactcgattcaaccttcgctttggtcgagtttcgaaggccgtagtcatcagttgatcttcttagttgcccaaaatctcattgcacatagcctcaatcatttctagccactcttagcaaggctctttgaattgtttcttgaacatgaagtgatagggcaatcgaacaagttcattctttttcttttctcctttcagcttcggcatattccattcactcaacgtcggaaataccccataggctaagaattcttgcaccagatctctagtgtcgttctgctcagtcacaactctaaattctgccgcagcctgttggcatggtgaccccgacgacatacggcacaagggcctagtcaacccgtagctcaaactcagcgggctcaatactaacgtcttcagcttctcccttttattctcattagctttaacatagaaccactcacttttccagccagttggccacttggtgcggtagcttagcaccggggccttcatatccttgcggtaagtgaagttgtaacagccaaaattctcatgaagcccatcttatctggccttcgtctgataatgtagctcatgtactcggcagaaggcttcagcatttggatccattccctggcttcaaagggcccaaatgaagatgttgagcctaacgatag

SEQ ID NO: 139005 - DNA, 338 bp, Zea Mays
accttcttaagattcctgaatggaagtgggaagagattggtatggatttcattgtggttctacccacacatctgctgggtatgactctatttgggtaattgttgataggcttaccaaagtagcccactttatccctgtgaataccacttattcgggagcacgactagcagagttatatatggcacgaattgtttgtctgcatggtgtaccaaagaagatcatatctgatagaggatcctagttcacttcccggttttggcagaagttacatgagtgaatggagacgaggttgaatttcagctcggcctatcatccccaaactgatgggcagaccgaga

SEQ ID NO: 139006 - DNA, 358 bp, Zea Mays
tgagtctaggacacatttatgcttactactctttgcaagaaactgtcgaactattttgttcaaccaggaatgctggattatgctacatggttttcccctagattactggtcccatgagcacattcaaaatgccatcgccactttcgtgagattgcttcattaggataatgacagaagattcctaggaatgattatcatcaaggctcgggtgacggttttccaagacatcccacaattcactattctttcagtctccaatcatttcagtggaagatcatagactattcagtgtgaagttctccagcaaaacatgttaatcgaacttccagcagatgaggacctaatccctcccgagaac

SEQ ID NO: 139007 - DNA, 475 bp, Zea Mays
ctgggagtgcaagaactggggctgttgttaacttcgtttttaattcttcaaatgccttttgttgtgcttctccccatttgaatggtacttcttttttggtcaattcgttgatgggagcaacaacggtactaaagtcttctacaaaccgccggtagaacccagcgagcccaaggaagcttctcacttggctcacattttgtggaggcatccagtcgcgtacaactttgatcttttcttcatctacctccacaccttgtcctgatacaacaaatccaagaaacactaccttgtcggtgcaaaaggtgcacttctcaaagttagcatacaatttttgttctcgaaggacagcaagtacatatcatatatgttcaacatgttcatcaagggattttactataaattagtatgtcatcaaaatagacaacaacaaatttgccaatgaaagttctaagaacatgattcattaatctcataa

SEQ ID NO: 139008 - DNA, 490 bp, Zea Mays
ggtacgctaggcggtgttccaaataaattaaccggttgatgtggaatctgtcgtgcgtgatttattgttagtgagtagtttgaattacgagttatatgtggattatgttagaaactagtatgcggcatgtaattgtgttcgtgttgtgaataatagatcagtaggtattgttggtgtcattagcaaatgggatgatttcagttgtgcgataaattttgaagggcgaagaacatgtgtagtgtgtcgatcaagttaaccgataggttccgtaaaatatgcttgtgatgcttttatgtgcatgataagatcgatgtcttgtcgtcgtagtctcaggaaattttctgaaatgtgctagtgctctactgatggggttgaatgaacttgagatgtattacaatagctgtgtgtcgtgcaggttatccaaaaatggtgaaaggtggtgtatgttggtaattgggaaatagtcacgttattatccaattcatgttaa

SEQ ID NO: 139009 - DNA, 439 bp, Zea Mays
gtatcaaaacaactctctaaatcttaaattttaaatttaagtaaacaaccaataattgtgtaagtgtaaatagacttctaaatttatttaacacactatttaaccacagttggtctctaaatttggagctcgatagacactcctcaaacacagtggacacaatttcttcacaccacatgcttattttttcctttcccccttaatgatgtcgttatatcttttcctttcccccttaatgatgtcgttatatctggcatgctcttctttatccttttacacatggcgaggcagccagatcgaacataagtgacacaagcttgtcctccactgtcgaaccgctgctaatccataaatcgtgttatccgaccttcttttctgcccctaatgtcctctgctctcgaccctatcgtcaaccaaatatgatgggagcaggcccgct

SEQ ID NO: 139010 - DNA, 380 bp, Zea Mays
ctcccactcgctttaagatcaagaagggtccaatgaagcgaggggacagctttcctttaactttatatctcctcataccctggatcagtgacaccttcagatacacgtgatcaccttccttaaactctagcagccttcttctattatcagcgtacctcttttgcctggtttgagctaccctcaaattctcctgaattatacggacttgttcttctgtctcttgaataagttcatgcccaaagaattgcctttcaccagtttgatcccaatacagtggagtgctgcactttctgccatacaaaacctcaaacggggacatcttcaaactggcctggtagctattattgtaggagaactccgcatacggtaaactcttatcc

SEQ ID NO: 139011 - DNA, 295 bp, Zea Mays
gggccgctggcaggtgacggggcgccggaacgggcagcagagcgcgcggtgtggccctggtagggaccggggcccccttgtcaagctccatcagctccacttggtgcgccagactcattgctgccggaagcgactgcggattgtggatgcgtaccgcgtggctgagcggtggtaggaggccgcccgtgaagagctggacgtgctgcacctcctccaatggatcggcgtgggttagcagcgcctggaagaggttttggtactcctcaacggaccccgtgcgccggcactcggcgag

SEQ ID NO: 139012 - DNA, 662 bp, Zea Mays
tgcggatgataggctgagctgaagtttagcttggtatccatggactcatgtaatcttttccaaaagcgcgaggtaaattgggttcctcgatctgatatgatcttcttcggtactccatgcaaaaaacaatccttgacatgtataactctgctaactgggctcccgagtaagttgtcttcacaggtataaagtgtgccactttagtccctgtccactataacccatatggaagcatagccatcacgaatacggggtagtccaactatgaaatccataccgatttcttcccatttccattccagtactttgataggttgtagcaatcctgctggtctttggtgttcggctttaactcattgacacacatcacacagtgcaacataaatatccacatctcttttcaaaccgtaccaccaatacttttcctttatgtcctggtacatcttagtacttctagggtgaatagaataagccgaatcatgagcttctcttaagataagttggcttaggtgctcgatttttggtatacagattcacttttaaaaacacacggtgccatgttcgtctttagtgaaatccgaggtttttcccaaattaatttgtgccttaatttctttgattttctcatcagattcttgttctttacgaatctcatgttccaa

SEQ ID NO: 139013 - DNA, 641 bp, Zea Mays
ctatttctaccagccgtcagatttcggatacacggtgagataagagcgcggtggaaaacggtaaggaccacaatgagcctggattgtcctcttcactgttgcctttcgtgttcgaatcttccaaggtaagatcaatgtgtcaagcatctagaaatttcgtcttgtcgcttttatttacagcgaaggcacggagccgacgcttatcttccgctcccttccttacttgccctcgacacgcaggcgacgacggtgacgcctacactcgacggcgccagcgactttccctcacacctcttccacaggcgtaggcgcgtagtaggtttctgcatcacccatcatcttcctcgcaacgacgatgctcatcttcgcccgcatcctttctcgcgctcggcacacatgagacggcaatgacgctcatgcttgacggcgccagcgacttcccctcccgcctctcacataggcacatgcccgtggtgcgtttctgcatctcacatctatatcttcctcaacgtcggcactcatattccgctccctcccttactcgcgctcgtcacacaggtggcgacgatcaggctcgacggcttctcctcccacccctcacacgggcgcatgcacataccctctcacaaagtcccgctctg

SEQ ID NO: 139014 - DNA, 328 bp, Zea Mays
gggtggtggatgttttgctgttgcgggtgtggaggtgggagtgggggaggtatgatttgtacctcctggtggtgttggtatgcgtggtgaggtggatgcggagcggggccgtggttgtacggctgggggggttgttgatatgtgtgcgcgacaactctagggttgtcggctggttgcgcccgtgccatcctgtctctggtggccttcgtctctgggcagtctcttgtagggtgcacgcagtcttcgccgtggaacaagcagtaaaatctgcgcggctgctgcgcacgtccccggccccgaccacgagttcagtttccacggccctggg

SEQ ID NO: 139015 - DNA, 579 bp, Zea Mays
aggaaatctatcccccttatttcaatcctttgatttgagcaatcttattggactgaacttttcccccaactgaattaacccttagaggtagaatcattggttccacggggatgttatgtgcttctacccatgatgtagaaacaaaagaatgcatggcaccagtatcaaatagtacttttgctggataggattcgactggaaacatacctactgccacatctggtgcatcctggattgctttggcctccaagtggttcacctttccacgattgtaggcctggccacggcctcatggtgcttgatatggtgctccttgtcttgctgaggtgttggaagctggctgttgctgggctgctttcttcgggcaatgattctcctagtggccttgttccccacaatggaaacatccacggcctcctccttgcgctggcattgcctggttgctctgattggtggatggggtaggaagacgaggtgcctggctgctctaccgctgatactggtttcctccctgttggttgtgctagcggtactgctgctgctgctgctgagggaactacctctagaactgcttttgat

SEQ ID NO: 139016 - DNA, 581 bp, Zea Mays
gagacctgtccagcgatgaatggtagcagttgttataccagaattcagcaagtggtaaccaggtgggccattgctttggacaagagtgtacaaaacagcgtaagtatgtttctaagcactgattaaccctttcggtttgtccgtctgtttgtgggtggtaggagctgctgagacacaattgggttcctgttaagcggaagagctcttgccacaacttactagtgaaaatggggtctcgatcatacaccttagccattgttaaagctgtgaaaggatgtaatagaggtaggaaatgggcatacttcgagaacttgtctaccaccaccaaaatgcaattgcccttgctggaaggaggtagtccagaaatgaagtccatgctcacagtttgccaggcttgttctgggactggcaggggcagcagtaacccgggtatttgactctttctggtttagcttgttgacagatctggcacgaactcacaaattcatgtatatgtttcttcatgcccggccaagcgaaattagctttaactcttctgtatgtgactggaaaaccggagtgtcctcctacggcactgtcgt

SEQ ID NO: 139017 - DNA, 778 bp, Zea Mays
tgttttgtgaattgtaggatccaattgtaatactcttttagttatagtggacgacggattcatttaaataaaaccgagggtctctttagaaactttgtctggccaaaggggtatgagttcactctagctgttggatctccctataatggttcagattagatctaaactggcacgccctctggaccgtgggatccaggatccttggcccagatccaaaacattgccaactggatcagacccacttgatctgagatcgatgactgggatctataacgcattaacgcgaacaagtatgccatcttctaatctggtttgatcagggccggatcgatggtcaggagctgttctccctcctagctaaccaacgtcgggcggcgcccacatcgcggcggcggcgcacctcgatgtcgcatggctgacaccggccacagcgcgccaaactccacgataaacggtgctacacgtagagaacgacaaggcgaacttcacggatagtttcttacctgcgattgcattgcaccatgtagagaactggccacgggttcttgcagcccacatcggtgtcatggagttcagtgaggaattcatggtagtcggctcacttttgcgccctccaacttctatgatccacttctaagttccctggtaatccatcgaggattcgtcgtaggattattcgtgattcgatgatggcagtcacgacttgtcgacttctctctcttttccctcccattgtttcactctgcacgcgcgctcggcttgggggctgcttgttccg

SEQ ID NO: 139018 - DNA, 342 bp, Zea Mays
catgggtatatatatgtatgtccactttattatgtaggatagaagatgtctttagagcatagataggtttggttaagaaagggtagggctaggaaagactctatccaagattgtgaatcctgattcctttgaagatctatcctgaatcttaaccttccttgatttgatgaggtcgatcatcttcgatctttgttcttgaagtctttatccgaattaggggcatgtacttaggataacttgtaggtaaggacagatggttaacaggttggtggcataagataagtgtattatggcaacatctaggatgggatggatggtcaccatgaatatgctggcatttat

SEQ ID NO: 139019 - DNA, 282 bp, Zea Mays
ggattagagagggaattagtttatttccactttaatcctcaccctgaaggagattcgaagttcccaaagtaggcctaatagtgagcaaatctagcggctgccgtgcagatcacgttatgctgtttcttcttcacccaacatgcggggctgtggttgttcaacaaatgtcatcacctcagcccgaatctgttggttccatggttgtttagatcatagtgctgtgcatacttgctggatcaactaggcatgtctcattaagggattgcttggatcaactagaca

SEQ ID NO: 139020 - DNA, 545 bp, Zea Mays
cagtctctgtcttcgcatggcaaactccaagaagacgggtgatgagaggtgggagaagatgatgaagaggttggaccgattgggaggtagactggaggcgatgatggtgggtcagcatcgatttctggagctggcggaccgcgtggccgcagtggcaaggaaggcagaggaacacaagcaagtggagaggtatgtgccgtgcgagcagctttggatgggttgatagggaaactaggggcaaggcaagggacaaaacaatcgagtcatccaagcattctagggcaagtggatgtggctgcaaagaggggtgaagctgtgagcaaggttgtagatgatgaatggaagcttcgtttcaactcaggtgttccattgcaatagcgcgaataggaagttgtgcctaatgacccatgggtgtttgttggaatgttatagccagcatgtatgcatcatgtgttcagtgaagtgggtctaaaagtggcatgggatgaggagatgcaatatgaaacttacatgtaggaagggttactgaagcaacttgctcgagg

SEQ ID NO: 139021 - DNA, 282 bp, Zea Mays
gttatttgatactggagcaacgcattcatttattactacatcatgggtagaagcacataatcttccaataactaccatgtcaacccccatccaaattgactcagccggtggtagaatccgagccgatagtgtttgcttgaatgtaagtgtggaaataagggggatagcgtttcccgctaatctcatagtaatgggtactcagggaatagatgtcatcctagggatgaattggctagataagtaccaagcaattattagttgtgataagaggataattaagtt

SEQ ID NO: 139022 - DNA, 1211 bp, Zea Mays
caggaaccgaaacgaaagcgctagacgtccgccgtcccattcgctttcccccaaggcctttctatctgcagccggtgcggcggctgtgctgtctgcctttctcccgtctccgccaaccgctccgctagccaccacgcccgccgctttcctgccgtggcctccgtcggggttcctcaacgggtaacccttctgccttcaacgcctccaccacccatcgctcgcatgcgcgtcgatcccaagtgcgaaccccctccactctagtcctctactccctccatctactttctcctgcgatcaatgatcatcatcccgtcgccacgtcttctgttggctcgctttacagacgccacttgcgtcgcgatatttatttatttttctttgtcacctcgattgttagggtttacggtctgcaggtcggtatgccccagcgctcaatcgccaatttatctgcaagtctcagcacttgtggataatttggatccatgtggtttggtttcgttctaccgccgtgctctgcgctacaccgttaccttcgccttttgcttcgcgcattgcagatttggtgccgcgttgtagatagtttatgtttggtcgaaccagtttcttccatgcagaaaataaaaaatattgtttggaccacaattgtttgttccttcgatgtttcgttgaaataaagcggggaaagtttttatctaaaaaattgtttgttcttttgtccgtttactgttcctaatcatcacttccgtacttttctgtacttgctgtggtctccaccctttttgattagcctttcttgtaatggttatttcttcctttggttgaacacttgacttatttttgttttattctgactcgcttccttctaacgttattaaaattaattttgacatcctgccatcactgtttgaaatactgtatagccagtatgtagctaattaaatgtagggatgatatcaggtgtatatagaaggctagcgcacatctgcacctatagaattctgcccttcaaaattagatctcacgatggactatatctggagtttttctataataaaacgaaaaggctaagagtgggaagagtttttctaaaacaattgtgcactgttagatctgattttaaagccaggattttaggccagccctcatatgcagctgataggatcccttaaatgtcggtgacagtcggttctcactcatttcacctgtggctg

SEQ ID NO: 139023 - DNA, 318 bp, Zea Mays
cgcaacatgtcttcgaggatttgatttactctttctgtctggccatctgtctgcggatgatatgcggagctccttattgcatgggtcccaagtgattcttgtagctgctcccaaaagcgtgccacaaacagtgctcctcggttagatacaatggtcttcggaatgccatgcaaacgcactatttgatcaacatagatctctgcatacttttctgtcttgtgggtggtgtgtaccggcaagaaaagagctgtcttggtcaatctgtccacaattccccaaatggaatcatggtgccgggaggtattgggcaatcccacg

SEQ ID NO: 139024 - DNA, 743 bp, Zea Mays
gtgaccgggtagaatctcctttcaaactgcctgatgaagacatcccaagacaggactcctggtgatgaggagtgcgctgccagcacgcctctccaccaaatttgggcctctcccttcagcagctgtgtgcgaaagcgaacccgatctccatacacaatctcgaagacattcatcttaacctccacgtaagtcagccaatctgctgcctccaccggagtaccactgccatcaaaagaatccaacttcatgcccatccactgcatcagagaaagaccactgactggaagaggcacctcggccccgccacctggagcagcacccgtagggacagcgcccctgggcactccactaccagcaccctgagcagcacatgcaggggcaacatgaatagcttgcctcagaatggccaactcctgctgcatggcctgcatcgcggctaacattgccgtcggactcatcgagtccccactaggaaattgcggactaccccgagccctacgaggcggcatagctggagccacaggggtgagaataataagtaaataagattggcatagcatttcttcagataatgtcaaactagcacagacaataacataacatatcaatagtaaagcagaaatcccatcctacatgtgcagtgtgtcaatttattattactccacttgctaggacctacagcctattcctttgataccaactgtaacacccccaccggtcccacacattggatgttatcaaat

SEQ ID NO: 139025 - DNA, 393 bp, Zea Mays
cgcagccttatcatacaaattatggtcacatatacacagcgagggcatcgtatattacattggctcaaccttcgggatgatacccatctccctgtagttgaacagcattatcctcagttcctcacactcaaaaagatttcgcagctcccccttatccacactcaccccaatcggcgaggacaacaattctcgcttaccagtcccatccacacgaagacgcccactctccatctcaccacgttgacgcccaccacttcgcgacaacccactcaccctccgtttcgccaccgcccttcgccacctatacccagtactcgcgcccgggggctcctcggaaccctcagtgcgcggcgagggctccgctgcagccacatccaacgccgcgaaataatc

SEQ ID NO: 139026 - DNA, 518 bp, Zea Mays
aagggcacgaaggccctggaaatggttagtttacacataaaatttccttgggttgtctacattccacgagtgcttgaggtcttcgcctgattgtgttgtgagtctgtaggcgtttggtgacgttttctttttgatgatgaagggccctacccatttaggctcgagttttccttgggattctgttctgctggttctgatgaggacgaggccccccctcgtcgaactctttaggagtaatagcattgtctcgccaggcctttgtttgtgcttgatatttgtttaatgctttgagggcgacgacacgatcctcatcgaggaggcctcaacgctgcagtggccaagtgtgggcgatgagctttgtaaattgcgaggggcacccgttctaggtgagaatttttggaatgcttcgcacgagaggaccactctattagctgcgcacacaatagctggccggtagaaacttggcgcatgactttagcggcgagggccctaggtcctgagtttgacctacatgttcc

SEQ ID NO: 139027 - DNA, 321 bp, Zea Mays
gtctggacgtttctttgaaaagaaaatctgatgttgctcagctcattatgaacttccacgcctacgctagtacgcagttcaacattcccattaaagcttttcaatcagataacgatggcgagtttgacaacaacgttcttcgctctttctattcttcccacggcatactcttgcgtctcacttgctcccacacgtcacaacaaaatggctatctccctctttaactcttacagatacctcgtgatcctggtaccaaacagccttaaatcgaagcggttggcgaaggcgtcttctttctttccccaccgagcactttcacgg

SEQ ID NO: 139028 - DNA, 648 bp, Zea Mays
cggaggcggaaccccaaagtcatcatcatcgtcaggaactactgcgccctgagtctcaaactgatgaaaagcagtatcctcggcctgagggtcaatcactagagcaggtgccggcacagggtcctcggggctggacggtagcagcgaaagaggaggcgagaggactcaagagtgccctagaactatggtggccgaatcagttgagcgaagatgtgacagagatagtgagcatatggcagttgtcgccgagcatgtagaccatctagtacggtgtcctctatctcacaaatgaggaagtcaacaacatcaaactctgagtgagagaccagggcaccaagtagccagagctggatatgagtagcagcctccctgtaacccatccacggcagaagcgtccgtctcatgagctgatataaaaacttggccgctgtagtgaagtctgccggagaacgtcgtgacccatctgagaagggcgatcggaacagagccgcgatgtgagctgtaccaggagcaactccaccgtgagggcgacgaggacgatcagaggtgtcgtagcacaagctgtgaagacgagtggatgactcgttgaatccaaacagctgtcgaatctgactggcatgaagtgtaacatcctctcgctcaaagcga

SEQ ID NO: 139029 - DNA, 460 bp, Zea Mays
agtgatcgagaacttctaccggggatctaatgacacggccttcgtctgagccatacagcagaaagcgccgaccacctctgagcaactgtttcgagaagcggacctctacatcaccactgacgaatgggcctaggacctcatcggaggggcaaaacctgcgccaccagcacctcggcgcgacgcgaaccagtagcctgacaagcgttgggagaagaggcctcgtgaagaggtccatgctgccggaccacccgtctctcgtgctcgaggggcacctcgtggaggcgagcggacactagacgacatcctcgatgcccagtgtccgtatcacatggacatgcgccacaccttgcggaactgcagagacttcaagcattccgttgggaatggccgaccattccagcctctaccacctccccgaccacgaggagggcctggtgagcctaggtagcctcagtgacag

SEQ ID NO: 139030 - DNA, 338 bp, Zea Mays
gcatggctgtatctcgggggcatgcttcgacgcgacgctaggaataattccaggcttaaaggtacgttggttttacttttaccatttcagaaattgcggtcagttcttctattgtcatatccttgaatcctccgtgagagcctcagggtggcatgggtgtggcagaaggcgcacaggctatgattctgtgaagaggtctggttgcgtttaagcaagcagtctggatggataaagcttaggtgaacatagtattacttctagagacctctcctcaagggctcttagtcactcacatagtgctcatggtcattcgttcgattcttggattcatatttatc

SEQ ID NO: 139031 - DNA, 780 bp, Zea Mays
ggggcatgtaagggtactaaaacaagagagcagaggacaggatcggaccagaaatgagctagccacggcgaggacctttttacggtggcggaaacccgatttgggggaagtgagcaattcgggggctcaggtgaacaattggaggcacgagtgggtgtgttgggtgcttgaatacctagcggagccgagggtgtgctcaatttatagggcccttgagcggtggccagtgaatttgagctcgcgcggtggcggtcggagagaaggaggtgcactggcgcaagcgattggtggcaattaccgtggcaagctcaccagcgatcaccggatgggctaagatgagtcacaacggtgtggttaaagcaccgaggtaagttgcgcaaggttgtgaggtggctaactccggcgaggatggtctttaagcggccgtgagctaagcggaaacggcggccggagtgaatagtggctcaagttcatccacagggtgatatttctcacccccttgctgttatccaactgcgccgagcacgaatcaccgcagcaggagcgaatctgggcgcacggtcgccgacggtgagttagctgaactggcgatctgatctgaatattgtaccattgaagacctgattcagagcacctgacaaccagatttgtagtgcccagatcgtggattttcgcataagagcttgctaattcgtctgtagcaaacttgtagtccaatgatccagctacgaatcgactatagcaataatccccaatcgaacaatagatcccactctaatt

SEQ ID NO: 139032 - DNA, 597 bp, Zea Mays
ggcgaggctaggttgtttacctcaagagaagactccaggacccttgaacggcaacagggacatggcgagggcttgggtcgatggcggcggtgctccgactgcgcagggaaagctccggtgagcacggacagagataaccacacggggagagggcaaattgaggtgcatcgcgagttgcggacgccaaagcagaactcacctaggcaatgggcatggcgaggcctcaatgatggcagcagaacggacgtgcgaccccagcgaacgccggcggcggtctttcgagcacgaggaagaggcagcgcacgagcgagggcgggctgggagatgtctacgagagggggaaatggcaaagcggacgagagggggtttgagtaggggttgagcgcgtgggtagtggccaagatttgcacggacgtgggcatggccatggcgggcgcgcgaactgaaggttggaggagggatggggctgataggcggggtctgtagtccagcgacatagacgtgtggtcgcggcaacgggcagagaatgacccgtggagcagagagcgtgcaggagtgtggacgtgtgaggaaaggcgcagacacatggggcccaaa

SEQ ID NO: 139033 - DNA, 372 bp, Zea Mays
tcggttccgcaaggtagtcaagcacccaatccatcaactcgtgccttcaattgttcaccagagcccccgaattgctcacttcccccaaatcggttttctatcgccgtgagaaggctctcaccgtggccagtgcgcttcaggtccgatcatgtcctctgctctcttgtttcattacccttatgtgctcctgatgcttctcgacccgaccgattaggctagagcccatttgatcgccgggaacactttgtgttatccgttgatcgtgcggtcgccgtgagcagagaggttgggagctcgaaccgtgcaattgatcgaggggaaacgttggttagatgttgaattaggtatcaaccaagttagagcaccgtccat

SEQ ID NO: 139034 - DNA, 633 bp, Zea Mays
gctctgattcacaacaatcgatcttggtgatagaaatgctataaaatacatatttcatgaggaaagaaaaaaacacaataaaaccctaaccctaatgagtgtggtaacggctaattataaagtcttgagcgtgcaaacccctggacgcactccctaataggttctaggacgatataaggggtacgaaagtcgaccagctgaaggtgatatgtcctagctagcaccttctggcagattctagatgttgactcgttttcgacaatttttgatgactctactagataaattttgacataaactcaaacccactggttagcttatagaattagcttttcatgagtacatggatcattgaaataaagcggagttcgtatgacgtctgttttacctgctagctaggagcctaggaatgcttaagttggaggataagccttcgtcacaacttggaagacttagttagatgcccatgcatgttagtacagatgattatagaatttttttaggaaacagtatattcgtttagttttctgatagcgattagctatcatcaacggtttaggaagtcgctcgacgaaataaattccccaaaaaaaggtgcatgtcttcgtagcatgcaatgcaaccatgtggaat

SEQ ID NO: 139035 - DNA, 727 bp, Zea Mays
gcgggaggaggcatgcacaaccggcacaacagagtcgtaacaatatgcgcacaaatcgtaacaaacctacgataggggcggatttggtggtcctagagatttcgtgcgatttgaatctgggttacggctgatgaggcggatccacagtttagtagtgtagggccacggcgtattcaagtctagcgctagatcccgtcgatccagtgttctactccatgggcgaactggaggtagatgagatacctgacaatagagttcactagtcactgaaactccatgtgcgcgaggtgggagcagagctagcctgtccacagggtcccgccggttggcgaccatgcagttacacgtgcgcgtgggtgggtccaaggctacaggtttcgtccaagcacggcgcgcatgcaacggctgagaagctaccttcgtcaagcagtatcagcgaaggggatggagctaactccatggtcccacgtatcactgagacaaggcaacgtttggctggtggaataaagaatgagaaaaaaacaaggagacgtgggctacatgaagggttaaaggtgattgggccaatgggaagatggatctgagcgcatgtggtttctatttttttatttcttttctaattcaatccaaattacaaatttaaatctgttttgaaatttacacaaaagttaactgaagccaagaatgaaccttagcatgatgcaaatttaatttagtcttaattatt

SEQ ID NO: 139036 - DNA, 567 bp, Zea Mays
gtttatgatccaataatggatttaatattttggtgactgtactgaacataatagcctatctgattggtttacttccttatggatattatatcaaaataattcataagtcatacattacttgatccgaaattaactccacacacgttacctgaattaagatagttgtccccttttcagatagtaatagaattatcccatgggaagtgttatattccatccgaagcattatattaattctaaagtctcctgaccttgtgttgaggggggacatttgttgttccccttgtattgtttccttcttcttaataaaatggcacacggttctccggcgtttgttcaaaaaaaaagtcccctgacctttttctcactgaatttgtgtagtgagtagtgaatgtagatgcatgtgctaatgaactttcttggtgcctcaatacatttatgtaaaagatattacatttcctgatgacatgcatttgcagcatgtgttcctcacagcccatattaccttgcaaattgcattgcccatatatatatatatatactatctaagttctgacaggcagccac

SEQ ID NO: 139037 - DNA, 487 bp, Zea Mays
gtaactgttgggaacaggcttattaatctctgcaacaccaactatctagaattatgactactgcagattacgacgtggtaaactagttacctcatttaaacaaactattcgttaaatgcttattacctgcgcatatctagacgacgtaaagatctatctagtattgtgcacgtgtgtctcctgcccaatgttgacctcaggcgagccgtggctgtgtttggttggcctcacgagccgtgactgtctctcacccaaagcgagccggtgattgcgtctcccacccgaggttggccccgcgagccgtgactgtctcccgcccgaggttggcctcgggtgaggcgtgactccgtctcccgcccagggttggcctccggtgagccgtgactgtgtgtcccgcccagggttcgtctcggacgaggcatggctgcatctcccgtccagggttggcctcaagcgagccgtgactgcgtgtgccgcccgaggttgg

SEQ ID NO: 139038 - DNA, 777 bp, Zea Mays
gcccgtacgtgcaaaaagggaagccagccctggcgtaggtctgtaaggaattccagggctgagtttcagctgctgggctctcccaaatctacgcctaccatacacatacaaactatggctccttgtatccggaaatgaagatgtgagcgattcctgcagatttgcccgatctccagcctttccaaataaacaaggaagcaaatttgaagctgcctccggcggccccactaacacagccgtacattccgccttcttcaacccttgaacacgacgcccatcgtcgtaacttggtttccggcgctcttgcgccattgataggacatctccaagtgtgagcttcggcgaacaccgtggcgatggcaacttgccctgccatggcttcaccttactcctagaagaagaggtcaaaggaggaggatgaagcggactatgaacaggcgtccgcataggtcccgacctgcagacccccactgcgcattcaccaacggactgcaacgtctccatccactcgaactttgccggagctgagtcccatcccggtttacagccaccacctccagccgcagaaacattacccagatcaggcagcggagatgcagaacacgctggcgaagaacacgtactggtaacctctccatgatgggcaccagtaacattttccgcatgcaacaaattctccgttccaccgccaaagcacgaatgccatctgcttctgtaggcgcaagcgttttccggcgacaacccttccgcgcgtatgtgaccagaccttgctgtcgc

SEQ ID NO: 139039 - DNA, 458 bp, Zea Mays
gggaaacgggcgacgatggcctgcttccgtatcaaatcagagaaacttgattttttttatttgacaccccatgacacagaatttcaacttccaccgtttaactcaccgttttatacatatgtgcggattacaattgtatttatcatgatgccgacttcaacaacatgaatggaagaacatagctcttccaatatatgaggtcgtgtatgcgcgtggaggttatcaaactcgaaggtaaagaagacaaggaacagtgcagcgatataaggggcttttcttaccttgcagtagacctttccgttaggccacaacggcgtatatgcccttgcagtgtgatctctctcaagggtatgcccttgagattgtataatccggtgacgcgatcttcctcaagggtatgctcttgaggtctttggaaccagtttctctctaaggtatgccttagagagaggtgattg

SEQ ID NO: 139040 - DNA, 582 bp, Zea Mays
gcccggccccatgaataggatgaatacgatgcaccatttttaatatagcaaaagaaatacaagtggacggtcctaggagaccacctatagtatataggaataaaactgacacacaacacaacaaacagtacacggcaaagaaaaaacaggcgtccaccagccaaactctcttggtctcttcgctttgaactttgcttttgatcttttgaatgagatccagtacctaccgaccactttttagctgaaatgtgcatggatttttttatgtttccaaatccctcaatctaggctagatccattgccactagactatatctaccaccatctcactgcgtaccagtctgtatctactagcctcagcctttatctaccttaacttttcactgttcagcctttgaagttagcctatacccacatcagtgctcatagtcgtccacgtggtatgatcctccacactcattctcaatgattatattgtgcataacgatacatgcatacatgatcacaccgagtactagttggaagaaagagcgacttagggttccgagaatatgaaattgatccttgacgaccctaaatctc

SEQ ID NO: 139041 - DNA, 482 bp, Zea Mays
cgggtcctcatcttgaagctgacctcccaacaaagtttgctggatgatctcacactgcaccgtccacgaatccccaataaagccatcagcgtctgaaaaaacaatgatctgcgggacctcctccagagacgtgacccgcaccctgagcaaagtcctataaatattgcgtatgtcctcttcccacaatcaatctgccaaaggagctaatagccacctgcaagtgctctgaagaacggtagtccagagggaatcccaacaacataagccagcattcccgattaaaataaagggctctatggttccaagcatcattatgtcgttgaacagtgaaggaagcatcaagatactgttgcggaccgagcagaacaaggttgtctctttcaagaatgctgctaaactgaaccaaaacctgccccaggtgcgaccgctgaatatcacgcaccccaagccgacggtgctccacaaggtattctctaaccaca

SEQ ID NO: 139042 - DNA, 723 bp, Zea Mays
cacagtaatgtgtgtgtgaattgtgatgctgcgtggcagtgaggagtgcatagtggagatcggaagagcaattgggatcaagaactggggcgctgaggatagcgaggaagtggcgcggtggtttcgtcgacggcggctgcggctgaatcgccagtcgccatagtcgaaaagaaacccacccgcctgggaggtttattccttcttcaatgatgattacagcaaatcaagtgccccttgtactttggagcacttctactaatcctcctaattacttccttcctgatccaataaaccggtcccacgcttggctagactagccacgggccaggcttcgtggacgtcgtgggtgtcgcctatactggcgcccaatgggaaacaccacacaccctgatggaggggggtgacctttaatatatagtcaatatgacttgcagtacatggaatatatccaattacatggaaagctatcaatctagaatatccctagaatatctcaaagaacatggaaagagtgtcaaaagttggcgaagccaacaacactcgacgacttcagcagtggacctagacaccgtggtctgacacttggaagactaggaaaccaagttgccatcgaggaagacgcagaagccgaaggtagagtgtcaaaagtccgaacaggcagtccaatccgcattagagtaagcggtgagtagagatagcaatggggccccgatccccgattcc

SEQ ID NO: 139043 - DNA, 614 bp, Zea Mays
tcatagttgagaattatggaaactctctcccccctcggtcgggaagacagccggatgttcgcaccccgagttggactgagtcccccacagatcaggaggtagctgaggcaggtgctttgctggctgaagttgggctgctgaaggagaggggtctgactgctgaagccattgttgctgattttgtcttcaagaatattcagccgctgaaagacagggcgcacccggcttatttgtatcgaggcctagctgactcaactcgggttaccaacagaagaattccctctgcggacttggtgagccgacttgagatgatccttagaggcaaagtgtcaaatgttggtgccctagtggcatactcggcctagaacctgcctcctcccaaagccttcaccctttttgtgtcgaatccacctgttactaatggtagtttgggtcttagagtgcgaccctctgttgaagaagttagtgccttggttgcctcgctcggggagattcctgatgatgaacggcaggtccactttgaggtgcccctgaatcctagcgatgtagaaataagtgctatgcttgatttgctggttgaggactcttctgatgctactcctgctgggacatcg

SEQ ID NO: 139044 - DNA, 907 bp, Zea Mays
ccccatcaatgtgttggaccagaagatggaaattctagcaaacacgtttcattgcaagattgggtcaatgcctttcacgtacttggggctacctttggggctaaaaaagcccaaccttgtagctttccttccactcattcagaagatagagaaacgacttgcgacaacttccatttttctatctcgggatggcagattgcaaatggtcgatgttgggttttcctccctcccaacatattatatgtgcattctcaaactcctgaaatcggtgattaaacatattgacaaaattagaagacactgcctttggagaggagcagacatcaatgcaaagaagcctccacaagatgcatggaaatcagtttgtaaaccaaaaactcaaggtggacttggagtaatcaatatagaaatgcaaaacaaagctctcctgatgaaaaacctacacaaaatttataacagagctggcactccctggatcaacattatctgggccaatcactaccacaacaatacaataccttcagagagactagtaggttctttctggtggagggacattttaaaaatccgaagcacttacaaagagctcgttcgggtggagataggggatggaaggacaactttattatggcatgacaactgggacggtatatgtaaatctgagatcttcccggaactatggtcgtttgcctccaacaaagacatcactatacaccaggcgagaacggcgggcatacatgagatgtttcacactcctttgtcagtggaagctttccagcagctccatagcctacaagactcgattgcaaatcttcccaaggaagaccagagggatagatggctttgcactggtacctcaagccttttcacatcacataaggcatatgttcacatggctggcgatgag

SEQ ID NO: 139045 - DNA, 433 bp, Zea Mays
ggatgaaagacgcttgggacaaagatgcaaatagcctaccaaggagggctgttggtacgatggaaatgataggaaaagcatctgcaattcgacatgccgaaattgctgagttggacaaaaagattaatactctgaaggaagagattctggcgctagaggcagctgagaaagggaaatctcctgagtgaagtataacttgaaacaatgtaggaatatatgcgctagactttctgatggaatcagtctcctttgtgaatttgttctgatccagtcctgcaaaaaatgttgcacttcagtccaattaggctcaaatactttgccttggaatgaatggactagtaatcgatggtaaaaatctttctttcttttatggtctccggtactcggattttctgaggatacttatttttcgcaacctgctggtttaccggac

SEQ ID NO: 139046 - DNA, 997 bp, Zea Mays
ggggagcaaagttatccaacccaaactttctgagcagattataccagaaaatccttgcaaacacacatgagaccagcaggtgattaatagattcaggttcttggtcacataatggacaactgcttggatgagtgagccccctctttgccaatctgtcagcagtctagcacctgttatgggccaccagccagaggaagaaatgacattttgatggagcccaagttttctagaccctcttatagtggccaaatgtgcaggatcccaggaagagacccttgtaagctgctttcgccaaatactttccatctcgagctacactaaagatatgtctgtcttcaatgagagggtgcagctcaattttggagagatagtcccagagctttaagtaatctgccaaaactccaatagtaagaccacctctaatgtcagatatccatcttctgtttaacaaggcctcatgaattgttctactttttgttatcttctttgggattatagagtatagtctaggggcaatggtcgagatgcttttactctgcagccaattatcaaaccagaaaagggtactatacccatttcccacctccgagacaaggaccttactaaagaactctctggctttacttggaacctgaataggaagccatgtccaaggtcttctagagtcggttttttgaagccacagccatcgcatccggagggcccatccaagctctgggaggcttgatattcccagacctccaagctgaagaggacgacacaccttgccccaagccaccaaacagtgccccctttagcttcctttcttcctctccaaagaaatccctttcttattttatcaatagcatcaagggcccaatggggtatataaattgccattgcaagatacacagtcatacctgtaagaacatgttgcactaggattctcctgcctgctctggtcatcaaatcagctttccaattaggaagttggtcagcaaatctatcaacatatggc

SEQ ID NO: 139047 - DNA, 354 bp, Zea Mays
ctggcatggtgaccctggcttcatattgcacaagggtctggtcatcccgaagcttaaacttagtgggctcatggccatcgtcttcaacttctccctcttcttctcatcagccttgatatagaaccactcacttttccagccaattggccacttggtccgatagctgaggaccagagccttcgtatccttgcgatacacgaagttataacagccaaaactttcacgtagcccgtcttctctagccttcgtttggtaatgtagctcatgcactcgacaaatagcttcggcatttgggtccatcccttggcttcgaagggcccatatgaaaatgctgagcctaacgatggcgttagg

SEQ ID NO: 139048 - DNA, 469 bp, Zea Mays
ctctacttaactctcattaaaacactatagaaactatagtcgtccctttccatccctctttatacattcaaccaaatacactataactttataggcccatacaaaatcatccaaaactgaattcactcgaattagatgtcacatgcaacgtctgagctactctgtacttactatttaggtcctcaaacttagcgtgttgtgccacttaggtcctcaaacttcacatgttttgttcccaaacttttattagtatatttcaacgtttcacttaatgccagcattctatttaaacaaatctgattttggatgattttgcacggactcacaaagccagaggacttgttttccctgttttggcagttcaagcaagtaacacagcgtgcaaaatttaaaccgctactcaccaaaaaaatcccccgtgaaacgcattggcgtcgcagtcgcaggtcgcacgcagccagcaagcggc

SEQ ID NO: 139049 - DNA, 357 bp, Zea Mays
gcacgagaagtcctactcaaggaagctcacaactcagcctactccatccacccaggaactaccaagatgtacctagacctcaaaaccagatactggtggagagggatgaagaaagagatagcacagtatgtggcccagtgtgacacctgccaacgaacgaaggccgagcaccaaaaacctgcaggcctattgcaacccctcccagtgccggaatggaaataggaagaaataggcatggattttgtaaccggactaccccggacacaaaaagggaatgactctatctaggtaataatagatcgcctcaccaaggtagcccatttcatcccagtgaaaactacctttggaggagccacc

SEQ ID NO: 139050 - DNA, 606 bp, Zea Mays
gaaaggcaaatctgggtttaggaggagcttgtttaattacactgattattcaaacggtgcgtgaacttatatgatgccatgcaattgtagtagatgtaaattagagtaaacgtttaagagtgaatgatatatgaatttgttttgacaacaaatatattgccacaggttttataattaatatttaccatatttatggcaccgagtaaggcatggatgaatctagttgatgagcgtcttagtactgaatgtttggatggcctgacttcaaaaaaatctttatttagatggagtcgccaagttcttggattatgcattcagtaggtcaggtgatgggggtaaaattaggtgtccctgcatcaagtgttgtaatacttacaacatgtcccgtgatgtagtctattcgcatctgatagcctatggaataataagaagctataccttttggtatcatcatggagaagttcttggagaaactgagaatgagttggaagtggaagatgatgatgattcacatgatggaatgcgggagctgatggaggatttgttccattcgactaaccatcctggcaacgatacaatgacagaaccaacccctagtgatttttt

SEQ ID NO: 139051 - DNA, 631 bp, Zea Mays
tgctggtgctcgcaggttggtgattgagagtccgagaacagccgcagttcaatcactgctcccactggtaacgtcgacatcattccctggagacagacataggttccctgatacggaatagtaatccacttgtgataccaatcaatatgcatgggactataattctgaagccagtccatgcccaccaccaaatccaccgaaggcagaggtaaaaagatgaaatcggacaagaactggtaagcagccatagaccaagttgtccgaggaagatgttgagaacaagtgacgatttgtccattagccactcggacagccattaggcgttgcaattgctgcgtgcccgtcaacaacgacagaaatctgttgctgataaatgaatgtgtcgacccggaatcaataagtatcatcaaaggatgctgctgaatactgccctgaaaacgtaacgtggaaactgcatctgtgcctgtccacgcttcatcagaaagtgtcatcaacaactgaggctgagtttcttgcaccggctcactgtcatctggttcatccaacaaatcccacacctcttcaatcacttgcagctgcacagtagttgggcatttgtgtcccctgaaccacttttccgcacagcgatcac

SEQ ID NO: 139052 - DNA, 628 bp, Zea Mays
cccatctcgcgtcgccaataactacagctgccaggttatatgcgtagacattaagtacgactattttggtacagcaccgatacgacacggtacgatactaactgtgccgtgccgggccggcacaagatctgttatggaccgtgcttgagcttagataaaagtcggcacgagcatggcctatttagcacgacagcagtgttggttccgaatccgtatcctacggagtggcaggcgtggatacggaggtgcgcatggagggtgctttccaggaacgctccgtaaaaacgacggtcgtttatgttcccgcgattcctctgaataggtagctgttggcccctatccgaagacagcggtcgcccaaagtacacctccaccgtcgtcatcctcgtctccggctgggcggcccggcggattggatctccgcatcgtctgcgcctcggccgcgggtagcttccggcggattgcagctccgcctcgtctccggacctcgacagcggctactctccggcggatttcagctccgcgtcgtctccggctcggccgcgcctactctctggcgccacaatctcgtcggtatgttgttggtcgtgttcaaaaattctccattttcccggcagatgcgagttca

SEQ ID NO: 139053 - DNA, 599 bp, Zea Mays
tacgtacgtacgtacagactggaatttgcagggtggtcagctgtctcgactgtgggggtgtgtgtcagcctgtcaggtgtgcacgagacaacctcatctcttattaatactacttcagtaaagaaagcgcagttcactaatgcagggattagtaagtgggatgcctgcgttctttctaaacaacaaggcatagaatattgggacgcctaaatcaccaccactacagatccgttcaaacaaaacccaccactaggagaggagaggagagggaaatcatgccatttggctcctaaagtgactcctcccatttgcctacagtaccacttgtactaacacacacagaaaatgctactggtagatgtctagaccccctaccccgaagacaatcagtcgttaaagacaaggctaagtttgtgggcatgccaactaggctttgtttagggtcactcacacacaacgcaacacaacacaagcagcgaagcagcggggcccaaaagaatggaagaaaagattggggctcagcctcaaaagcgtcgaaagcggggcgcggggagggtaaaggaggggggccggccgtggtcgtgcgtggctggctgccc

SEQ ID NO: 139054 - DNA, 609 bp, Zea Mays
ccgaagagaaagttgccctgatccgcaagaggttacttgaagctcagagtcgacagaaaagttttgcagacaacagacggagagaactcagatttgaggaaggagatttcgtatacctcaaggtctccccgatgcgtggtgtcaaaaggttccaaatgaaaggaaagctagcaccgcgtttcgtcggcccctatcccgtcattagcaaagtgggacccacagcataccgccttgaactaccagaatccatgtcagatattcacaatgtgtttcatgtgtcctagcttcgtaaatgcctgcaagtaccagagaaccacatcgaggcagagacaattcagattcaaaaagatctccagtaccgggaaaagccaataaagattcttgactaagcagtccgaaagacccgcaactcagaagtaagactctgtaaggttcagtggagcagagaaggagaagaggaagccacctgggaaagtgtggactctctgaggagggaatacccttaccttttctcgagccctgtctgaatctcgagggcgagattcctttaagtggggtaggtttgtaacatcccaattttcaacccgaggtttggaaccctaatccaac

SEQ ID NO: 139055 - DNA, 530 bp, Zea Mays
tggaatggggctcacccccagcggcgccagagccgagcttgcctcgtcggcccattcggcgatacgctggaccccggtgcgatgctctgcctagagatctttaagcgtcttcttcatcgcctcgaccgcctaggagcccagagtcgcctgcgccgtctaggctacctgcgctgcctgcgtcgcctagaaccggtggacccgctcctccagtgtccgctccttctcctccagtttcttctccttctcctccgcctcgagctcatgttcggccagcaacttttcccgcctttcccgcatctcctcccttcaggcgaggtccttctcctgcctgacgagatctgtcgcccgctcctccagggaggcatccttcgcattgaggttctcctcggtgagagagttgttgctagccctgtcatcgagctcccgccgcagattttgcagagccgcctcagtcgcggtctgctcatcccgctgcttctccagcatcacattataggctttcagcttcttatggaattccgtgatgaccg

SEQ ID NO: 139056 - DNA, 284 bp, Zea Mays
gcaatatataggaagttggggatcaacgaaggttgattccgtaattattgggttatgcatgcatcatgtttaaaaattatactaataaatcttcccctcttatggagatatggcacgtacgaggaaaaccacgcgcaagtccactggaccttttggtgtgcctcgtcatcagttagcccccagacatgaaggaagcagtagcggcggcaatgatccaatcagagatttggaagccaaagtggaacagctttggacagagctacgtcaccaaaatagggtgtggg

SEQ ID NO: 139057 - DNA, 410 bp, Zea Mays
ccggccaccgcttgcgagcgctataaattgagcccgcggctagcttcgcaacatcatcacgcaccaccacacccagtattgctcccagctgatcaccagcgagctcaaattttgcattctccccaacccggttcaaatacaacgtgaagctaacctcgccgtggccagccctccacaggtcagtccatgtcctctgcttccccgtttaagtgctctcatatgtctacgatgcttgccgacccacgcaattgcgctaggaaccctctgatcgccgggaacacactcctttgtccgcaatgttcacggtcgccgtggccagagctaattagttagtcgttgatgaaattaggttaggggaatggatcggggagggttcaattgggtgttagtcgcttggggaccctagtcgt

SEQ ID NO: 139058 - DNA, 289 bp, Zea Mays
ctccatgttatcacatggccttcttggttcatcaatctcaacatagcttgctcttcaccattgctttatgtccattggtgctaagtccttgctcttgcttcaccgccacgcagtccctcacacatgagcctttgacttgcccttcacactagccacttggtccatcgaagacaagccatatctcttgatcttctccattagccacatgacaccatgtcatgtcttcatatgcaatgagctcctttatcacactagttgagcatctcaatatcacaaagccacatcacca

SEQ ID NO: 139059 - DNA, 464 bp, Zea Mays
tcacccggccattgtttccaaagcggccggcgtggcccgttatcactcggttgttacctctaaaacgccgacatcgccatcgatcactcggctgttacctctaaaacgctgacatcgtcatcgatcactcggctgttacctctaaaacaccgatgtcgccatcagtcactcggttgttattcctaaagcggtgacgtggctccaaaggattcggctgttacctctaaaacgccgacatcaccagtaaccgctcggtcgttacttctaaaacaccgacgtggcccgctatcactcagccattacttcaaaaagcgccaacatcactaataataactcggccgctaccaccaaagcaccgacgtcgcaaataaagcaatcgaaagcgtggttcgatgactccaagttactactcaagcgttgcagacaaaaaacatcattggcagtaaatattacaacgatcggcg

SEQ ID NO: 139060 - DNA, 330 bp, Zea Mays
agaaggtctgaccctggggttccggtgaccaaagggatttctaggggtgtagaggggatgccatgcttttccacaaaactagtggctataaaagaatgggatgctcctaaatcaaaaagtatagtagcgggagtaaattcgacaaggaactcaccgagcactactcccggagcttgctgggcctcttgagcatcgacgtggttaactcatgctctgccttgatactgggtctggctctgctgactgttggaggggagtgccttggaggcaggtgccgaggtattcttggggccattcaccgagttggagtaggtaggtcctggtgccttc

SEQ ID NO: 139061 - DNA, 342 bp, Zea Mays
aaaactaattagagatttaatggttatgtcatggtgttctaaagataaatattaatagtgcttcatcatgattttgtgtgatgtcggacatgtgtgtcgaagtgttttattttggtgaatatgtttgttaattgtgtggtaattctagcgcacgaaataacttggataaaaagttagtaagtctacttgttggtcctaattttattgtttcaactccaacaaatggttaagtgttaaaatgattcaattctctagaacgcggcaatttttaaagtgaataggagctgaattttattggttgctgttttgggctgcacgtactgttttcgtcgtgctgtatgt

SEQ ID NO: 139062 - DNA, 327 bp, Zea Mays
aacgattataggagactagtacgtgcgtttgataaatctagtatagcaagttttccttcacacgaggttgaattaggggataacgcacgtaatacatcggctagaggttgtcacgaccagtcacaacccctttatgggatgccgatggacacgtaccctgagcaaccgcaaatcgacagcaaaacagtcgatctgcacatgtccggaccgtccgcacgtgagcgcagaccgttcgggccagccacggtcgggcccatttataatgagttacctagacatgcacccgagccaccacatacgtcacagaacccaaactacccagtcgga

SEQ ID NO: 139063 - DNA, 438 bp, Zea Mays
tgaggtaagctgctgcagatagcctaacagctgaaaataagcagcaagttgtagggagacgacttcgaatgagagaatactagagtatagtttgaatatagatatgtagatgaggtaagctgctgcagatagcctaacatctgaaaataagcagcaagttgtagggagacgacttcgaatgagagaatactaaatttgtggtttgttcattattttttcgtacaatgtatagagagaacatgacccttctggactatcgccttgacttgctgctgcctaagattaagttgtaaattgatctttcatattcaggggacatgcctcttcaagtatgccctgattgttcccgaccagctctagggccatgggcatggggtgctctgggccacagttgccacggccccaggacatcgtcgccgggggacaggacgtttgaac

SEQ ID NO: 139064 - DNA, 596 bp, Zea Mays
gaatgccaaagcctacaaaccgaagtggctaaattaaaggagtagttggccaacatgattgtaaattttgaagtggaaaaggtaaaaagagaaatatttagtgacgaaaagtaccagctttagaagattgttgatgaacttcgaagctcaagggaagactgcatctccgccccacccaatgctatcataggttgaaggacacttttgtttcaattgggactagttctagtgaaaaagactatgtcgatggtgataccactggagttgtgaaatggatcaacgacaaggtagtggcttttggtgaagttctatcaaccagggaggactactgcgcatggataggcgctcgaagcgcagcttcaatgttggagaaggtcgattgcgaacatgtgaaaattattggaaagcctgactttaaggtcttccaggatgatgtcgaaaatccctcgttgaagcctccaaaatgggacacaaagggggccacaacgtttagagtggcccaaaggttaaaagaacttgaaggtattgactttgcaacaattagagtggcccaaaggacttcagagtcttatcaccattactaggtgatcttttcc

SEQ ID NO: 139065 - DNA, 812 bp, Zea Mays
ttgatgtatggctatcagtcaccattgaagtctgaaattggtccgatagtgggttctgatgaactttggagttgattcaagcttgatcgagtaagtaaatgatcaaggttcttatagtcgaattgtagctggattatagattaacaactttgctacagaaggctagttaagttgtcacataaaaattggagaaccaagccctctaattacctttgtcaggcgctctgatggggcttctgatgatacagtgcctgacaaagatcagtagatgcattgcacttcgctgccagtgactcccgcacctggattcgcgtcggcgatgcgattcgtgcccatgggcgcgcggataacgactcggggtgaaaaagatcttaccgcggatgaggtcgggtgctggccgccgtacccacttgctctacggccagccgaaatgatccttgctggtgttggctgcttgccgctcgtgcgccacgtaatctgtggtgttaccacgtcagaatagaccacagtaggtagccgatccatcgcctgtgacagtgcctcagtgaatgccacggtagagcgccacggtgactcatcccctctcttcggccgccagcttctcttcttaaattcggagccaccattcatggactctataaattgatgccccagtgagctccgttaggttattacgcgcccagtgcaccagcccttgcctccgattagccactgtagctcacgaatttcaaattccccccaaatcggtcggaacgccgccgtgagacatgtcgccgaggccagccccctacaggttagttcaagcttctctg

SEQ ID NO: 139066 - DNA, 496 bp, Zea Mays
atattgctcttcaattttggaataaagtagacttcagtaattaccttgtggccctttgtcttcgtatggagcatcacagagccaatgccctatatctcgacgagtgatccatcgctaaaacccattgtgctgcgtacaaatttgccgaatgatgtgagtgcctcaagccccctatcatgtgattgctagcacccatatcaaggacccaaacatcattgccttcatcactatcaacaaggatcaccttcttctcatgaatatgcacaacttgatcatccatgttcaccttagatgtcataacgtcacacgagctacgcttgatgtgcatggtgttaaccgtggacattaggagcgctggatgttctggctcttcctgcacatggtgtgcctcttatttgtgctccatcttgggttgcttgcatcttgcttccagtgaccatagatactacaattacgacatcttcccttttgcctcaatgttcccttagatgttagc

SEQ ID NO: 139067 - DNA, 733 bp, Zea Mays
ctggcatagtggaggaaggtggagtggtagtggtagtggtggaggctcgcatagtgggtcaaaccgagctagagtggagtgagttcgagacgagaggtaataaacatgaagacattttgattagatccaatcctcaactggcctccctactctactctcttagctactattgctgcttctgcaactgctcgagtggcgctatccaactttctcttcttcttgcctccctactgctcaaggtagacatccttgcccttgtcctgtctgaaagggcgaggagggtcctgatcatcgcctccccctgctgaggtgacattttcggtcctcaccatcctgactgatcactaacatgctgcatgagaaccagagagataagcaagagtagcaaagtaggagataaggatggagaaggaaagagctagctacctggggcacgtctctcgagagaaaaaccaagtaggagagaagtcacgcgagcgggcacgccgtcacaatgaaaatgaaagaagaggtgagcatgagttagtcacatagtcataagcatatgaattgtgaactaaacacatatacgcatgagaggatacaaggattttgagttgttggtacaagggttgataagtatgtggtcatatgaatatggcacatggatctttttaggtatggagacaactttggacaataggataactaggtgagtaatttttggctttggtaacttgaaccacacatatgg

SEQ ID NO: 139068 - DNA, 273 bp, Zea Mays
ctctgaaggctgcgcaccacgctggccatgggaagcgagagagagcttgccagggaagatgggagaaagagagtggattctcacctgcgctcgacaaagacggcccaggcacggctcgacaggacgtgaatgactgcggtggtgagcggtttcggacgaaacgaggcgcagcgcacaatgggtctcggcgagctatggtcttagcaaagcaggcacacgacgacgagatgcaggggcggctccgggcaggcgaacacggcgagactcgacaag

SEQ ID NO: 139069 - DNA, 322 bp, Zea Mays
gaaaaacatagtacttcagcccctcacactgagttcgtgttcagctatatgaatggaaataatgcaaataagaaccggtcagtccaacgttcaaaggctagttttggcgccccgtgatgtgagaaaacattttacccatggtgtgcccatgttgacggattttccaagagctacaatcatcactaattgtttcatcaattggccctaagaggttttagagcaaaatactcctatggggctagaacactgtccaaagaaatttctcgatccatcccaatcctatgatcctatagaaactgctaattctagcataaaattccta

SEQ ID NO: 139070 - DNA, 351 bp, Zea Mays
cctaaaacaagcacctaagcaatggcatgaaaaattcgatagaactttgacatctgccggctttgttgtgaataaagcagacaaatgtgtatactctaggtatggtggggtgagggagtaattttatgcatgtatgttgatgacattctaatcttgggaaaagtcttgatgtgattaaagagacaaaagactttctgtccaataattttgaaatgaaagatttgggagaagttgatgttattcttaacattaagttactgaaagaaggcaatggtgggatcacactagtgcaatcccattatgtggaaaagattttgagtcgctttggttatagcgaatgtgaacctgctc

SEQ ID NO: 139071 - DNA, 586 bp, Zea Mays
agcagctcgtcgtgggcggacagaaccgggcgaccccgcgccaaccaaatccaccgcaccaccttcgccattgccgcattgctcactcctggcatttccttgggccatcagggagatattcgcggccggggtcgggggaattgtgcacaggttgcggcgaatttctaaaccgtgcggcactgtcgccaggctcaccctacaccgcgctcggtagtggctgcagggatctctggtgagaggttttccctacttttttttctgtattgattcactgcgttactgggtgtcggccgggtgattggttactggcgttctgggttgccgtcgttggtgtgcccgccgccgtggcgaggagtccgccgccgtgtttctgcgtggtggagaagagatggcgcgaccgtcgacttcttgatagatggctgcgattaggtaggattgtagccgtaggatcgtaaatgcacgactgggattagaaaccagatgccgatgcgcttgagtcaaggctgactgtcgattgttgatcgtaggggtcgggtgcggttcaggtttcattaaatccgcgccgttgaattttaatcggagggcg

SEQ ID NO: 139072 - DNA, 703 bp, Zea Mays
ataaattctatatgtgcaatatattaatattgttgcttcgatgttgattgctttacaacagtttactgttgctcaagccatttattttcttttcgaaatctgcgctttcatacatattattagttgttggccacttactgttagcaaaaaaaacttacctaaaatctaagagcttagttgattgtattattaaccatacatttattgtttctctttacatcaagaattttcacttatgtgtgcttattaatttgcacagttgttagcatggcttttttatttatcttgctccctacaggtgagttgtatgtactatctacctgaccaacaacatttacgcttacgaattatttctatgtgatctattagtatttcttgttcgctattgattgcttcacacatctttgttgttgctcaggtcatatttttcaattgtacgtttgcatacagactaatagctacgcacagtccatttgttgttatcagaacaacaaaaaacttatatgtgcaccgatatatttattatttgtctttgcatcgatgattcacatggatatacacttattgagtttacaattttccataagattgttttattcctttgcaggtaagttctaaagcatgtctctttaattgacactatatacgtttatgtattttccaaacaagtttaaagtcatataggttactttgtggttgatta

SEQ ID NO: 139073 - DNA, 1062 bp, Zea Mays
agtactgggtgtaggcggcgaagggtgatgggaaaacaaagtgtgggtgaattttcgcgaagtggcaggcgtcgtcgcatggggatggagcgtggccgacttcgggtagacggggttagtaaacgagaattgttatcctcgccgattggggtgggcataggcaagggggatctttgggggctttttgagggtgaggaattgaggatgatgctgcttaattacagagagatgggtatcattccgaaggttgagccgatgtaacaggcgatgccctcgctgtgtgtatcagtgtatgtaattgtaatttgtatggtgatgtggcctgttggttgtattcatacgcttgtatttgtccggctgcgtacgtgggcgactttgtgcggagcgtctttgtagtgatagacttcgattaacgcacttgttgtgctattccggctgcacccttaggcgacttttgcgtggagtgtcgcacgcgagggtagtctgcgttgcctctcgcggtgacttcggagtggtcgaatgccgaagaccgttgaggcggtctttttcgacatgttgcatcttagtttttgcgggggatttttgcggatatattacatggcgccgccacgttaaaaacctcaccccccgggaggaaaagagtgcgagcctgaataatgttgtttggtgaattacaagggcacataggccctgaggacttagacaaaaaaaattgcatagattgtcaatattccaggaatggtctaggtcttcgccggatggcgttgttagcctgtatgcgctgggggacgcctttgacttgacgatgaatggatcttcccactttggctccagcttgccccgtgactctgtccgggtggttcggacgagtacgaggtctccttcgttaaattctcttgggatggctgcgtggtcgcgccaggcctttgtttgagcttggtatttgttgagggcctgcagggcgaagacgtggtctccgtcgatgaggtctttggacgttggttcgtcgacgtcgggggtggttgatgcacttgttcgaggtgacccgtgctttatttcttg

SEQ ID NO: 139074 - DNA, 459 bp, Zea Mays
gggaaacggcggaaacaggccgacccaggagtgcaatgggcccacacccatattaatcgcggcttgggcgtgatcgcgttgaggctattcgtttttcccgcgcctgacatcctcaaacaccggagatagctcagagcagaggcaccgggttttccttgggacaacgaagtttgttcgctattagctaggagataagcagggaaagtgtgatcaacatgtacgcgggaagagccctatgatcgtgtatataaggccaagggggtccccttcactttcatctcattgagcatctcacaacttggtagactctagctataacaccactcatatacaaagccaccccagaagtagggtattacactcctcaaagcggcccgaacctgctaaaactcgcttgactctctctcgtgtccaggcgcgaaccatcgagtcacgatccacgacactgtcctacgcaaa

SEQ ID NO: 139075 - DNA, 383 bp, Zea Mays
atttaaaaggacggtggcaggggcaagatgtggcttcccccgagttcaataacagcggtgtatggtcagatatatcacggttgagggcaacaaccgaagataatgggaatttctgatcccattccgttgttactagtacctggtctaacttctcgaaagtgggattcggaaggttatttgcccaagtaaactggcgacccgacatctctatctcttttaagttaagaccatcaattatggcattaaaaaggaaaggccaacgatggtcaactaaaggtttgtttttctcattttgattcctaagaatattaaaatcaccgcctatgactaggggtagagtcacatgactagtaaactgcaccaactcagccaaaaaaaaactc

SEQ ID NO: 139076 - DNA, 356 bp, Zea Mays
ccttgctccatcctatggccgacgtgttcacatggtgatgaagccgagcgagaagcgtcgagttaggagagagagggcagtgagatctgtcgtgggctagatgagagccatgtcggtgataggcccgtggcgggctcaaggttaatcccgggcgtcctcggcgctgctccaatcgctcaccggagcgcggcagtcgccgtgggagcgctcctcgttgttggtagacctactcgctacacggtaagtcttccctcaaacggttcaccttcatctctagctcgcgtagcagcggtgggagtcgtggtatggtgttggggcgcctgtgtgctcatcgccatgggactagagatggccaa

SEQ ID NO: 139077 - DNA, 285 bp, Zea Mays
agtaggtaaatactttcaagctctatgtccgtacgttcaagctctatgtccgtactctaccaatatcctttcaagctctatgtccgtactgccctataatcggagcctagacttcaagctctatgtccgtactctaccaatatcctttcaagctctatggtccgggtgcgtacggagatgggtaaactactggagatagtctaactgtaggtaaatactttcaagctttatgtccgtactgccctataatcggagcctagacttcagttactagcataatcctcg

SEQ ID NO: 139078 - DNA, 309 bp, Zea Mays
gtacgtacagtatatatagtattatagcggtgcggtggtgcacgctcgcagttcgcttgcttgaattcaaagtgggggacccttgaccgaatgcatatataaagaaaataaaagaaagcaaacaaagatctctctgaaattaagtaatgccagagtgctcacgacgtgggtgttccgcgtaaagttttcgagttgcagcggtttggtttcaaacacggaggagaccacaataaaaaaacagctttgagatcctccagtagtgttagtgttacggtggttccggtactccatccttctctcgcccttgtt

SEQ ID NO: 139079 - DNA, 723 bp, Zea Mays
catctcttgcccaagaccttaaggtaccccttgcgtcagtcctgaggtagctcttgccccgacagttggggcaccccattcatcggctcttagagcacctcacacatatgcccctaaggcacctcttgccccgaccctccgggcaccccacatatcagtcctcaaggcatcgcttgccctcgaccatctagggacctcgggcatcagtccccaggacacctcttgctgcaaccctcagggcaccttgggcattagctcccgagggaacctcttgccttgatcctagaggcaccgacacatcggctcctagggcaccctgctcatcggccacagaggcacctcttgccttggtccttaggcaccttgcgcgctggctcctagagacacgaggtgccttgcatggacaccccgcacatcgccccaagaggcacctcttgcctcggccctctaggcacctcctacactgtccctggggcacctcttgcactagcccttaaggcacctctctcattgacccctagggcacatcagacatcgaccttggggcacctcttgctctgaccttggggcactttgcatgccagccttcgggacacctcttacccccgaggcacaccacacaatagccctagggcacctctttcttggccttcggggcaccctgctcatcagcctctagggcacctcttgccccggtctagtccactatcgatggctttctct

SEQ ID NO: 139080 - DNA, 547 bp, Zea Mays
ttctatagcacacccgagagccaacgggcaagttgagcgagccaacgggatgatactggaggcactcaggaaaaaggtcttcgataagaatgaaaagttcgcaagaaaatggataagagaattgccctatgtcgtctggagcctaagaacccaacctagccgagctctgcatggaaatacccctttcttcatggtctatgggtcggaggcagtgttacccgctgatctcaaattcggagcaccaaggttgatcttcaaaaacatagcagaagtcgaagccactaggctggaggacattgatgtacttgaagaagaacggctgaacgcagtaattcaatcagcatggtaccagcagactctgagacgttatcacgacaaagccgtgcaacaacaatccttctcagtaggagatctcgtcctccgccgaattctaacgggggagggacgacacaagttatcgcccttatgggaaggacccttcgtggtagcagaagtcactcgaccaggatcatatcgtctcactcagatggatggcacagaagtcggg

SEQ ID NO: 139081 - DNA, 903 bp, Zea Mays
tagagagtaaacttcagttagatgcaaccaaaaacccccaagctggagagaggtagttgttgttcctcttgtagaagaagcttcaccccgtctgacaaaggttggaccaagaaatagcttgaaagaagatagtatgcagatgaatgaatttggacttacaagatcagggccctctatagatggaccgccaacaaatgccattatcctagcaccagatccacgaacacaaaccccaaggagactgactgcaacataaggcaactccagtgcacctagatgcacgctaatcaactggaacatgccaaaggttcttttgtatttcttccctaacacgcatacaataaaattttatgataaattattaaaattcaacacaaggctatgctatatgaaatacagtgatatctcctattttaattgtaattaatgtaattggtccttaactaagttcaatacaaactctcattcaaaagcaggcaaaagaaacctagaaatgctctcagatgaaaggccatctctggtaccagcgatcacgcctgtggtagtcattttcttccctacaaaaaagcacatttgctccagtatccgttccttagtgacctcctttgttccttcgaatacatatgattttggcaacaagccaaaacccaattcatgaacatgaaaatgaacaagccaaaacccaattcatgaacatgaaaatgcagatggtatacatgttactaaactaaccaattacatatcaaaaagaacaactatatggagcattagaaagaaaactatgggcttttacctacacatatgtcgcgaacgtaatgaatccaacatgagaattatctggtaacagctcaatagtttgtgctagtgcagacttcaaataactgacttcttcaatcatgcaag

SEQ ID NO: 139082 - DNA, 1453 bp, Zea Mays
ttaaagatgaataatatttgagaccgagcccatcggatagatgaaaattaattgtcataaatagatgcgtgatttaaatatgacagcttagctttttgaggaacaccaaggatagccggttccaactgctgcaggtaactcggacatagtggaagatcttcacttgtgtgtgtatcaacaaccactaataatgattttttttcttcctcgccgtgcgggaacaggggcaacaacatgcatgttgatccaaccaaagaaatagatcggtgcagagcagcacttctcgacggacgacaacaacaagaaagcatattgattttctcctcttctcgatccacgtgcaggagagggatccaaagtggaaaacctccccaacgttgaagatgatcagggttttgaagacgatagccatggagtcatcgtgaatcaacgtcgcacccactacctagcgtgccagctatcgtgtttatgacccgactacgcaccacgtggttccccacgtgacgcttttgagtaggatagcatcgttgattgcgactcgatggtacatgtggatgcacgtcggatcacacgagggtttatataggtttgggtcgctagaatgtgtaacaccctacttcctgtcgaggctgagtatttgagtatcactggtgtacaaaggttacggacaagatgtgggcggtggagggtgagttctcccgtcgatctagtggcggcgtggttgctgtgagagggctaatgagctataaggtggtgatgggatgtgacgagctgagagaggtgagatgagacgagagagatgagatgagacatcccttcgcagggtaccccctcatccttatatagatgaccagtgggttatccctttacaagtcgtgatgactatctgactctatctgagtctgtccttttaatgtggcatgcattcctacttatccgaagttcagtttcccttcacctgaggtattttcgagtatctagcactttgagtacgctcaacctcattgcccgaggcatcagcgcaagacttagacatccggtcttcgcctccccaggtcgagctcatccagcttggttgtggctcgagggcatgccttgctaggcatgtcattggaaggcccatcaagcggcccatgaagcatttctgtgctctcgcctgagatcagccttaggcgagtcgtgactgcatctcccgtccgaggttggcctcggacgagtcgtgtctgcttctcccgcccagagctggctttgggcaagtcatgactgcatctcccaaccagagctggcttcgggtgagtcgtgactacatctcccgcccagagctggctttggacgagttgagattgcatctcccgcctagagctggcttcgggtgagtcgcgactgcatctcgcgcccgaggttggcctcagacgagacggaacaacgtttctcgtccaaggttggcctcggg

SEQ ID NO: 139083 - DNA, 406 bp, Zea Mays
ggggggcaagtaaagatgtcagcatatagacgctcactatttacagaatttcccaagcaaataatttcacttttatgaaagttaatcttaagacctgacatctgttcaaaaatacaaagaataaacttcagatttctagcattttcaagatcatcttgcagcaaaaaatagtgtcatcagcatattgtaagcaacaacaaccaccggagataatatgaggaatgagacctttgataataccttcatctttagctttttgaatcaaacaagcaagaccatcagctgccacattaaagaggagtggggaaaaaggatcaccttggcgaacacccttgtgtgttttaaaataggggccaaccacatcattagttctgatagccactttaccacctttcacagtcttcag

SEQ ID NO: 139084 - DNA, 507 bp, Zea Mays
gttaagttgaacggaattttcttaagtgcatgccacgatatggttgtatttgagatagtaaattagaagtgttgcacgatatgaggttcgatcaatatagttaatattgatttggtctgtagagaggtggtgacatgccgaagtagtcatcgcttcctctacggttaagttgtggttatgtgtgatagtgttgtttatgtggtgaatgcgtagtgaaatttatttatgtcgtgcaatatgattagaaatgtgaagaatggatagggtgtttcggaacggttagccaataggttcagtcaagcatggtagaggttgaatcgcttatcttgtagaattaatgctcgacatgttagatctcataaaatgtggtgttttatgtgacttgtgcgttatccaatttaagttgagaaaaagttaagagaagctaattaatctgctcctacccatgttttgagtgtagtgtctaaaatggtttgttaagttttatactggcttagccaactcttg

SEQ ID NO: 139085 - DNA, 582 bp, Zea Mays
ggaacaaaaaccaacagcaagtttctgcaacaaagtaaacaatgtagttaataaaacaaacatgccagcataacagcaattttctaaaacaaaattaacaatgtagtttttgcaatattcgacaattatgttgtgaacactttcattggaaagcaataaactaggaacaagaaggcgccagcagccaccagtatctaattctgggccatagttatctgttaggggagctgctactgcaagttaggatctggagagtaagaatagggggattggtcagagtaagaatagggggactgggcagcagtttgttagtagacagccagcattaggcgatataactaagggccgcctgattgtgaggggcatgcagaagtagaggactgtcgatcatagccttttgaccctaactctaataatgttagtttgagtatcccaactttcaattcagtttagttttggcccctaaggccagttaaagtggttctggctgatgtggcagcggtttttggattgaggaagaaatactcaaacagctctatttttttggaagaaacgaatgttttcggacacagggaaccccac

SEQ ID NO: 139086 - DNA, 304 bp, Zea Mays
aaatcccccgcaaaaatctacgtcgaaaaaagaccgcgccgacggtctcccacattcgaccaatacaaagtcaccgcgaggccgagcgctagctaccctcgcgtgcgacactccgcgcaaaaagtcgcctaagggtgcagccggactggcacaacaagtgcgaaaaatcgaagtcttccgcgaagactatccgtgcaaaagtcgcccaagggtgcagccggactggcacaacaagtgcgaaaaattgaagtcttccgcgaagactatccgcgcaaaagtcgcctaagggtgcaaccggactagc

SEQ ID NO: 139087 - DNA, 1444 bp, Zea Mays
cccaggtgtgccttctttgccgagtgctatgacctttacactcggcaaagtaaccagcataccccttttttatttgtttttgctattcaatccaagcaaacaaaagatatcacataatcatcgcagatatcacatatacatcacatatctcacaaagaccataaatctcataaatcaaacaagatcgaacacaaacataagtatccaacacttaagaacataagtctcaagtatctcacaaagcattaccaacatcaacaagttcagatcaagttatctcataaagtattaataacactaacaaagatatatcatgtgcacaaagtatctcatcgaggtggacggctggactggcccgacatcacggagattccacaagacctggtggggcttcccttgtgttggacgtggttcgacaaaggctatcgtaggcagggcaaagccaaatttgagattgggaagaccaataaaattagggggctgctgagaaggtactttgcactatttataaggggattagctaaataatataatggctcctatggaattagcagagcattggggggacattgcctccgtgcccctgtctttgccaatgatcttaggataatgttcaaggggttgttcatcgaagtctaaatccagtctaccggcatgacatcacattgtcttcgcatagatctggccccatgagcgttgggtgccattgtctcgattactcttaaacacttctgtcagtttagttttcatttcagtcttatgtcatcgttttagttttcaatcagagcatggtcatgtctatcagtttggtcatgttggtcattgtaatatctgagatgcagacattcacattgtgagcgagttcataactggtagaaagtttcagatgccctgacgtgtgggatggtgcatgatttggacaagcgatcaaaactgttgtgtttaggtttttatcttgagtaatagagtaaaaatgttgctcagtttatgtagcaccactctgtagaagaataatttgtagcgctggtgtctagattttttagagtctaaagttagttgggttagtggtcagcacgttgtggccttctcgcgcggtcgttgcggaagtgcgttgagtagtctctgcttgcatgtagagtcaaatggtggaactagaaaactgggcatagtggccacgattttggctgtgggatggcacagccgcttagggagcatggatacatgcaaccagggactcagctccacctgtaaatgcgtcaaataaataggaatggaaatcagagaagcagacatagtacgctgcgccaaaagactcgtgtactcattgtcttcctcatttttcagttaatcgtattcgtagagaggaagagacagttcgggtgttctagcgacggattggtccttgcttagaagccaacatttggtaccagagccgaggttcgtc

SEQ ID NO: 139088 - DNA, 884 bp, Zea Mays
atcggctgtcctgtccttccttgtttatccccacagcaataacttcctcttctgctgacactggcctgggaagtgggattctgatgccaatttaattggccaggtaggcgccctgaattgccacacctaccggcccgccccaacccaatcatacatccatacggctacgagcgacggagcgagcgagggaagttgatgttgtagatgccatccttcctctcctccttccggatcgtagtcgtggcttgactcagcgtagcggccagggcagcggccatgtcgtcgtcggtccggcacggctcgtcgaggggccaggcatggtgagttaagtagtgagcgccgctggctgtactatttgaattgcggccggtgtttcgattccatgcaggattccgttgctttcccctcgcgtgtccgtcgtgttgacgatgcgttccgtatctcgcgccaggttctgcaccacgggcctgcccagcgacgtcgtcttcgaggtgcacgacatgaccttccacctccacaaggtgagttcttgggctgctctagtcgtcgggggctgcgtcttgctcgatgaaattccgctgaggcgtttcccgcgcagttcccgctcatgtccaagagcctcaagatccaccgcatgctcagcgagcaggaggaccagcgtccgacgcggggacggcggcagcggaggagacaggtgaggagcagtgacggagacgatgacggtgctgcggaaacagagatcgaggaggaagaagccgagcctgagcagcagcaggttaggacggagggggagggcgacgggcagccgtactgcattgcgttccccgacttcccgggcgggccgggcacgttcgaggcggccgccaagttctgctacggcgtcc

SEQ ID NO: 139089 - DNA, 650 bp, Zea Mays
gcggcagcttttttaggcaaaatctgctctataccttcttcttccgctgccttttctctagtttccgaggatttctccttggcgggcactgaaggcccagcttcggcgttagcctagctcagtatagcttctgcttcgatcagctttgtcttggtttcaatctgtgttttcgaagccttgacaatttttcctggagtggagcttgaagcttttatcgtctccagcacatctaatacactagccatcctttttctcttgggggttgctgttagacctttttgtgtcttcggcacctccattcctgccgaagggcttagaacttctaatgttttcgtcccttcggttctcggttcttcaattttgtcagtcttcggcattgcagccggctcttcaatcttctgcataagagcatgtcctttgacttcaatagctgaagaagtctcaccaccaaattcaggcactgtggccagttcaatgtagcgcggacggtgagtaaggaccttcagttttttcctcttcggcgcaggctcgcttggagcagctgaagcagcagccttcccagaagttgcgccctttcttttctgcccccgcggcgggtaccgatagtcagggtacacaaatccaatagcgtcaaaaaccctatttagtct

SEQ ID NO: 139090 - DNA, 470 bp, Zea Mays
agaagaggaggagatccccttaattcggaagaatagtcggcgttacatagtcaatggggagagtagtgatatcccttctccagctttgtctgctctcatcagtctgcaagaattatccctagcaaattttgatcaggccctcgaggatgttgttcctgaagacttgctgtccgagcccatagacggtggtatgatggacgtttgctttgacattccagatgtggggttagagttatcccgagcggcgtctcgtgcctcgtcgaccttggagtgcagtcttcggggccaagaagctagtcaaggttgttcaattcccatggaggtggctgctgcagagaacccgatccctaaggatagcgccaacggttacccagcccccgagggtgttgccggtaatgatccggctcgggtgggcagcgcgagctacagcctagccccgagggtgctgccgggggtgatccgactccgat

SEQ ID NO: 139091 - DNA, 549 bp, Zea Mays
tttgagggagccgaccatggcaccaccgcaccgggaggctgtgtcaccggtgagtctagcggatgggggaagacaactttcgtgccatcggatccggaacggacgggcacgattagaagtagagtaccgtttcgttctgggaaatcttagccgtcggatcggacgcgggcggtcaagattagatcacgacacactagttcgcggattaacctgatgtcgtccgatttccgtcgaatgtctgagattggtggctgcataccccttcacggcttttgatctggaccattgtatatgaaatcgtgtggttggcgcggttcataggtttagagcgcattcggttcacagatctcggatccaacgtctctgagtgaagtggctttaagtgccgggatgatttaatctgagtcgtaggatctagatcctgcaaatgataatagatggtaccccttcgaccgtgaatctttgcataagagaccctagatttcttgcttatcaacccgcggtccaggacattagtaagatccttatagagtgacacgagaatttgca

SEQ ID NO: 139092 - DNA, 648 bp, Zea Mays
gtgggattgtcagcttcaggaggctctgatagaaggtcctcaaggatgatctcttccaactcttggtcaaaatcagatattgacaacccctggaggctgacgagcgctaacaagacttgtgtgggaatgtcgttgaccctgtggcgatggctattcttgcggatcagcggaatttcttcctcttcttcctcctcttcctcatcaagcgctccgccggcaacctgaacatcgtcgcaacctccgacattgtcctcgaggatggtgctctctaggccatcgccaaggaataacgtggaggggccagtgtctcgctccaagcatgacaaccgccgaagtcgccttttcttcttcttctcctcgacaggtgcagctggatggttcactcggcgtgaacacttgcgacgagcaccctctggtttctgaatctcctcgccttcaccaaagttttgcccaatcgcaactgccattggcttagtgcgggcagagtcagatgattctctggccagcaagttaagaacaacattcatctcaacatcatcagtactggacaacatctcaaagtaagtctgcttctcagcctcaggaagatttcggaggggagcaatcaaggcctcaatgtcctctgaggagggtcgaactctatggccc

SEQ ID NO: 139093 - DNA, 658 bp, Zea Mays
tgaggagtagaaaatattctagggggaatggcctatttattaatgttatatttttatgctcttatgaccatcatttcataagaccattgcactcaagcaaaaatccaaatcaaacattgcaaacaacaccatcacatggttgttattattataagtgtagtaatagataagtgttcttcgtctaacgagaaactaacttattacaacataaatgaaaaatctaaagcagcctggtgatggatcctggttctccatagcggatcctcttgcggggaggggataacgccatggcagggacttgaacttcaggaggattccttccatcaagctgagcttccagggctgcgatccttgcgtgtgcatcctccagctccaagtgtaccctagagaggtccagggtagcactatccaggtcggtcttaagacctaccaccacaccagctagggtgttgaggcgatcttcttcagctccacctggaacaatgctggtctggctttctccacgaatgcgcagaggaagatggttgtacttcatgttgtgcagctgttgtcggtaggtgtggctgagggaccacagagttagcctagcagcatcgctgaccgaagtagcgtaggtggatagcggcgtcagagactcatgagctgatagagtcctgaa

SEQ ID NO: 139094 - DNA, 968 bp, Zea Mays
gctgggtcatcctcagcaccaccctcgggggctgggttatccttagcagcacctttagaagctgaagcactctcagtcgtatccacaggagctgggtgaccctggctagcaacatcaagagccagtgtgtccccacaatctagatcgccctccaaggtcgaagaagcgtgagaaactgtctgggttatttcttgcccgacaggattaccagccaaagggacgtcatccgggacctctatacggacgacagaactttcagtctcaggaggctccaataaaaggtcttcaggaataatttcctctaatgcatggtcaatggcagacattatcaacccctgaacactaactaaaacccgacaaagcctgcatgggaatgtcactgctgctatagctgcggctgttcttgcgaatcaaagggacatcttcctcttcatccttatcaagcacacgaccaccaactctgacaccaccacaaccttcaatgtcatcctcgaggttggcgctcaccgggccaccgccgaggactgaggtagcaagatcagcatccaactccaagcctgatgatcgtcaaagtcttttatttcttctcttcccctcagcaggcgcggctggatggctcgtccgacgcaaacatttgcggcaaacactcccagggctctgaactccctcatcctctccaaggccatgtcaagttgcaatagtcaccgactcagtacgggcagagtcagacgattcaccccttagcatactgagaacaacgttcacctcaacctcatcagcggttgtcggcatctggaagtgaatatgtctctcctcttcagagagatttcagaatggagcaatgaaagcctcaatatcctcaggggagggtcgcactctatggcccggactgccatcttgaataggagggttgggaacgaactcagaaaaggggctctgtcgaggaagattttaggcagaatacgaca

SEQ ID NO: 139095 - DNA, 653 bp, Zea Mays
ggggtggggtttttaacgaggcgaattcatgtaataaatcgccacaaaaatccccccaaaaatgaaagcagcaccacgactatggatgtcgaaaaagaccgcagagtcggtcttcggcattcgacgccaaaatattcaccgcaacgcctcggcagccattacgtgtgacaagcaaagttcgagcaaaagccgcgtaagggtgcaatcggataagcacaagtgtgtaacaacacccacagggtgcgaagtcatctataagacgcacacttttatccgagaaaaatccacctaagggtgcagccggataagcacaacaagtgtgtaacaacacccacagggtgtgaagtcgtccataagatgcacatttttatccgagcaaaagccgcctaagggtgcaaccggataagcacaagtgcgcaacagcaccaaaagggtgtgaggtcgtctacaacacgcatatttctatccatgcaaaagtcacctaagggtgcagctgaattaacactaggcgcagcaagcaaagtcgtcacaaaagattaccaacaaatcaatataaagcgcacgaagatgccaccaagtgcaattcagcgcaaaacacaaatgaaacacattatgttacaactacacgatgtacactatacacaaggtatcca

SEQ ID NO: 139096 - DNA, 384 bp, Zea Mays
aagatataaaattgtaaaatagacgtaaatagctgtgtataagaacggatggctatatgcccatactgatatcttcgaggggagattcagcttccaaaggtgacagtaacttaatactaacagtttcttgccaagataaaaatacgaagatggatcaacatcattaataattgactggacaccgggtccaggtgcgagcaataatctcccaagttgataagccagctggtagcaaatgacactgagtcgacatctgacgtggcaaccaaattattgtcctttgctagagaagctcatctagaacgacacggaagcgctaggaagctagtagagaacttgaacaacttgtcttttttttccctgtaacggtggtatctcgctcgc

SEQ ID NO: 139097 - DNA, 626 bp, Zea Mays
aaccgctttgctccaccactcatcaaagttagtttcatcattgccaggggagagggttggtagcccccaacttttgcagcaacaagaacaaggattgtattgaaaaagacacatgatactaagaggtggtggatgatttccccttattgatcacagaaggggtcaacacacagggtgagggaggcccccttttggccaaacggtccactgtccaacacctattatacatgaccaaccataagaagaagctgcacttggccagagcccaggtcttccaaattctctcatggcccccaaggaagttgagccactaaataacaagtcatatgctgacttagccaaataatgactaaagctagaaaacctccaaacatgtttatcaggggttcctgcatgacgcaccacataagaaatagcagcccacaaggtcaaaaaatatgaaatgacctcctaggtgactaaacctctcaaatctctgatccaagccatgtcatcaaaggactctgcaccgttctcttattagagatcctatgtggaacaagcacatgaacatggagagccatatcctccaacctctaacccatgagccacctgtctcgccaaaagagggtactacgactgttggg

SEQ ID NO: 139098 - DNA, 397 bp, Zea Mays
tttaaacagactagctggatgctggtttttacaacatttattgctttcatgccgccttgctgccaaaatttctactgcctccaaatgtctttttcacacttgaaagctttatgcaaagcttcggcttaacttgaaatggctagaattcgcacgaccgctaaattgatcaatgagagtgagcctgttgacgtgactgagacggcttcgatttcagaagtgatgagagaaacagacattgttgagccgaaggatggggtagaggtggctacatcggagaaaagtaattccgaagccaaaggtgacaatgttgaagaggatcccaatattctttatcctagtaaggctagccacattgggtttgggaaatcaaatgtgaaggctaaggatttggatgtgc

SEQ ID NO: 139099 - DNA, 623 bp, Zea Mays
cggctggccacgacgagatgctaacggcggcacggagaaccgatttgggggaaatcccaaattagggcgctgtggtggatgattggaggcgaggaccggtgctcgtggttcgtaacacgctaacggagcaggttgggccatcaatttatagtgattaacagcggtggctccgaatttggggaaagaagctagcgaccggagagatgcacgagctaccgtggcggtcactggctaactagctacgacgatcactgctgagtccttgtggcttgcatcaacgtggtgaatcgattacggcgtggcgcaatcgcggtgaacggcgatctccacggtgatgatcgtccgaccacgttgcagcacaagtgggtacggcgataggacgaccacagtgctctgacttcatccctgcgcaagatcttttcaccggcgaccgttatccgctcgccagggcgcacgaatcacagcaccgacgaggatcgcgacgccaattcaccgacggtgagatacactgaacctgatcttgttcagtcactgtaccatcgcaatcattcatcagagcgcctgacagagcaacttgcaatgctttgtcctcaaatttttatgtggcaattccctaatctatc

SEQ ID NO: 139100 - DNA, 562 bp, Zea Mays
agagactattagtcgatatttcaatcttgtacttgaagctattgtctcattatcatctaggatgatacaactgcctccaatcattaccccagttgttatatctagcaaccccaagtttatgccatactttaaggtaacttatgccctatttgattttaagtaactcatgctatacgtgaaggcattatactttaacagttatattttttaggattgtattggagcgattgacggtactcatgttcctattactatatctcctagcttgcaagacccatatcgaaatagaaagggtggtctatcacagaatgtaatggtggcgtgtgacttcaatagtaaatttgtgcatgtcagtgctggatgggaaggatcaactgcagacgcccgagtgttacaggatgcaatggctcatggtttctatgttcctacgggcaaattttatttagttgatgcaggatatgcaaatactcctaattttatagctccatatcgtaatgttcgatatcatttgcaagagcaagctagaagtaatctaaggccaagcaatgcaaaggagttgttc

SEQ ID NO: 139101 - DNA, 2759 bp, Zea Mays
cgacaactgaaagcgagttatgtgatttcatttttccccccccttcatgtttctaatgctatttggatttcaataatttgacaggagctatcagcagagcttgtctcgttgcagggtcaggtggcggagcttcaaaagcgtgtcaggtgaataacatcagctcataacatattcagcataaggaactatattgataaatgctgtaggaatgcatatctcttttgaaatctttccacttagtgtcgctgtgattttcctttcatgacacatgatcctgttaaatgttctccacgttgtgaatctatggcattgattagcctgtcacagaaataatgggcaaaccaaaaaaaatttgagagaagtgtaacggcaaggcgatttgttttgttcttcagtgattggagcgatcctgagaaagttgacaatatcgacaatataagagcaatggagcaatctctcaaagaaactattaatcatatccaaatccataaggtacacatctgtaaccttatggttaactactttataatctcaatatctagttaacattattatctgaattttcaatatcaaatcagattagttctgacctttgcatctgtttgggtctctgcctctccaggggaacttcggaaagcaacatctaatcgggctacagtatgctgctacccaggtaactaactaactaacctaccacagcttcaggtgcatgtgacatgagacgttaattttgttcagattaagatgttgctttcctgtcatgccatgtttcagttccagaccgacatgcagttgcctctaggactgcccggcgagtcaggcccttcgtcgtggttccaaaacggcggcgctgatgggcaacaagccatgatgctaacggacgagtccggcctgctccatcagaggtgaattcaagctccgagttgtgcattgctctgacgaacaaactgcccttcgtcgttaactgacgacgagcaaactgatcttggcgcagagacattgcgcagggctatccaagctacttcagcacggtcaagcaggatcccgacaccggtggtagcagcagtgatcacgggcaggtggtgcttcaccatccgcagccgcccgacttcagccagaccgagtgcctgacgtcgctgcacctgccgtcgcagcagttcccgtacccacccttcgaccaccacggcctttacagcgaccgaattttcaggccagacgcagttgagctgcacgccggcggcgtcgccagtatggactttctcagcggtcagtacgacttgccgaggcctggcgatgatgccagcttccataactgggcgtcagctgcagcatgtagtgcaaccatgttcgaccagcaacagcaacagcagcatcagcatcaccagcaaccacaatcttcacctgcacaagtgagtgcataattacaaaaccaatctttcgactgttcgttctgccgcatgtgaacttgcttatctatctatttgctgtcacaagtttatagctccgctgaaacattttccgatacatatttttttttctcatctcacattagttgacccatttttatccatgtttattaagacttaattcaatccacagtccatatcaaactgatttaagttctgagcaattctatgggcgatgagagctttccaatcattgtttaaattcatttattaaaatttaaaatcatgcagaaagaatgtgcagttatgatttttttttttttttttgcctttggcattatatgttttactgatttcggtatctcttgtggaccatgactgaatctctaaccatcagcttcctgcagcaacaactctagcaactgcctcgttcgatcacgccgtttatcacagttcatctcagcaccaacaagtcatgatcggttgatcctatatatggtaaaaaaatcggagataatattgccctccaaaaggtgctaccctaaactaatcatcaatgcaaaatgtgtataggcaacactgtcgatgtaaaatatatatttattgtagctaattctttcttgtaagtatctatctgtctcctgtatactactggtatagctttcataaaaggattgggcacttaactattagttcataggcattcatctttgcatgaatgaatatatttgaaattttggccaccatgcatggcctttcctttattgtactggttcacttgaatctctctttttaatataatgatgatatgcagttctcctgcatgttcgagaaacaattaccatggttaaaaatgatattgtggttttctaactcatttctatacgtatggaaactaatcattgtattcatttgtcagaacagtcagttgcatcttggaaaaaaaggagaccaactagaatataatgctactatagtatactatgaggttctacggcatagaccaatgcaactcgaatcaaatatcaccaggagtgtgcggtcaacgagttagctagtgtacactgtacactcgtaaacaacaagttccttggatttactacacccgtaggaagctcaaatattcagggacaagagttttttttattattttggttttttattctttttggttgggttgttttcaccattttttgtaaactatagctaagtggttttaggtgtttactagattatgagaaaactgactcccaaatattcttaggccaatattaaggggcggagctctcacagctccgcttccgatgagaatcactcccgtagagctaaatagtaaaaatctgaacagctcca

SEQ ID NO: 139102 - DNA, 307 bp, Zea Mays
gtgcaggagggcacatggcagcgtccacgacggtgagggaggcgacttacaagagcaagggggaagaggggtagagaagaggcttgtgggcacaagtggcaccaatgggaagctcatcaaagtgacgaattgggtggaggaggactagaagaagaccaacaaggaagaagaatatgatggcggaaagggagaacgagagtaggagcaaccgtgaaggaagtcgggagaaagttcagagagtggtagattgaagggagtattgggaaggaggatttaaagtggtgtggagtcctagtagcggcaatga

SEQ ID NO: 139103 - DNA, 362 bp, Zea Mays
tcgaacatcttgttgattggcaactggcaagtacaaaggcggatcgaaggctagtttcgtctttactccacagccgccaggctgccgatttcatccatgtcgcactgccctccatcattgttctgccatccatgctgtgctaccctccttcgccattgcctcgtcgtccccatatcctaacccaagctctgctttctccagcacatcgcacgcagcaggtatggtgccggtcattgcctggccctcccctctttcttacccttcaaggatgagattgtctaacttgcgtaactctagatattgatggcactgtttgatccatttctcatatgtgttaaaatgttaatatgtgttaacatgtc

SEQ ID NO: 139104 - DNA, 381 bp, Zea Mays
cacataggctcctcctttgaaataagacatgcctctcgaaaattgaacaacatcaacctcaactcttccccctcaaactggtcctgcaggtccccttctccgatgcaccacccagacgtcgatgaaagtagctcgcgctgagtaccccgatccggtcgtggaccacttcgaagacgggtcctctccatacccattcggtgatctcttcttccacttcacgaagactcatcgatgccttgtttcgacacgtccatcctttttcgtcgcgagtctcctactctcgcatcaatcgaggtcgccagcacctcgtgagggacggatcacagagactccgacgcagccagatccaacgctgcaaaataatctaagttgtcctcaaaa

SEQ ID NO: 139105 - DNA, 1108 bp, Zea Mays
ttgaacaattactttactagaaaatcttaggtgctagaaaataaaatctaagtgaggtgcttataatcaaacaaggtgtatgcatatgatgagaaaatctaggggagttttgggatagataataagaaggggggttagattagggttccaaacctgggttaaaaattgggatgttacaaacctaccccacttaaaggaatctcgcccttaagattcagacggggctcgagaaaaggtaagggtattccctcctcagagagtcctcactttccgaggtagcttcctcttccccttctctgctccactgaaccttacagagtcttacttctgagttgcgggtcttccggactgctgagtcaagaatctttattggcttttcccggtactagagatctttttgaatctgaattgtctctgcctcgatgtggttctctggtacttgcaagcatttacggagctgggacacatgaaacacattgtgaatatctgacatggattctggtagttcaaggcggtatgctgcgggtcccactctgccaatgacgggatagggacagatgaatcgcggtgctaactttcctttcatttggaaccttttgacaccacgcatcggggagaccttgaggtatacgaaatctccttcctcaaatccgagttctctccgtttgttgtctgcataacttttctgtcgactctgagcttcaagtaacctcttgcggatcagggcaactttctcttcggcttctttaacaaagtcgggtccttctagtatcctttcccctacattggaccacattaggggggtttggcactttcgtccatacaatgcttcgaacggtgacattttgatactggtctgatggctgttgttatatgagaattcggcatacggcaaactggactcccaattcctgtcgaacgtcaacacacaggctcttagtaaatattcgaggaccttgttgactctctccgtttgaccatctaactgagggtgataggtggtgctgaaatctaacttggtgcccatagcttgctaaaggctcttccaaaattttgaggtgaactgcgtccctctatctgacactatcttctgaggaataccatggag

SEQ ID NO: 139106 - DNA, 291 bp, Zea Mays
caggaatggaaggcttcgcttagcggactgtgagataaatctgttcagcgctgctagtcttcctgtcaaccgttggatgtctcgggtcgactgtggtggaaccatgtccattatagcatgtatcttgtttggatttgcttcgatgcctctgtgcgatacaaggtaaccgagtattttgccttgtcggactccgaatatgcatttctttgggttcaagcgtagtttggctttacacatgttggtgaatgtctctgcaaggttggaaagatggtcttctttgttcttgctcgg

SEQ ID NO: 139107 - DNA, 1332 bp, Zea Mays
cagctcgcatgtaggtgcgactttttctgtttccaaaacaacctgactcggttgcatctgtccaacatcagccgcacacacaccctcctccccgttcaggttctgcacatgctgattaccttccttatacctgctgttgtttcctccattaccccctgcctccttttcctgattgttacccgacacatgattatcatcaagcaggtcatcttcctctccatcgtctccctcctctttcccatcctcatcgataaaaggctcctcaggcttagtcatcggcactcctacagctgatccaccctccacccaaagatgcacctcataaataattttatcaatttccacatccacagatatcggaatggcttgcggatcgatcacgctggtgagcatcctacaaataccaaacctccgaaagaaactcatgtcaacatccactgtcacaccgagagatgagcctactccccaaatatgcgggtatgtgcacaacttatgcagtaaaccatcaaattgtacccatacatctcttaggacagtcttaactcgccccccgcactgttggccttgaactcaagggttgctttctgagattttgctttcaccggcccccattctatcattctcatcaactccgcagctgaaggaaaaacggtcttgaatgttttcggatcaatttgctcaatagcccatggagttccacccggtagaagcctttccaactccattgtaacattagcactgccaatttccccttcaatgacctgaattaaagccaccctggaatcactcttgctcttgatcagtttcttgttcgtcgggatatgaaaaaaaccaccattgtttattccaaatcccgccggaatagcatgtgtcttaggagcgttaaccaccggacatctagccttgatgtgggtgtttgtgccacaaacctcgcagaagagctccgtagtgcacccactgatcacatgcccttttgcaaaacatcggtggcaatgcgctttggcattagcctttgctcccagaccctgatcatcctgcccttccttcttcttggtaatttcaatcaacgacactggtttggatttgtcaccccctgacgatgcacctccggcctgaacctgctgaccggaaacgccaacccccttctcagcgttgaggttctggatgacattcaacgcctgttggagaagggcctccgccttggctgccttatcatccagtccggtgccactcaccgtcgcacctacaacatcattgctagaaggcctcggcaagtagttacctgtacctcttcctgctggaggtggcaaaagatctcctcttcctctgaac

SEQ ID NO: 139108 - DNA, 327 bp, Zea Mays
caagtgcagttgggcggccctactgcccggctgttcaggagcgcgtctgaaagcgaggtgatcagtgagctaaccacggcaacgggatcggttgatcattgagcgaccttgagacaggacgaagcaagtcgctctgtcagacgagaggcaataatttgcccttttttcacttttcatgcatttcagtcgtgtgtgggtgtgttagttaattcgggatgcagtcatgcatggccgcaagcccgttggcttgttttaatctataccgatttttaatacttttagagtgtgttcgtttgtttcggaatcatgacctagaaccaatccaac

SEQ ID NO: 139109 - DNA, 305 bp, Zea Mays
aatggatcgaagatataaattatgagacatgtgattagtgtttttaagatgagatgtgcgaatgatcggttagtgtttcacttgtctagtcgataaatgttgtcataaattattatgctaaaattggtcatgagaatgcagtgggcacgtggtgtgtttggatgtgacaagtagattggaagtgtggggtctgtcgaagcactatgatgtcgaaagtgtatatcgaagtgcattgtagtgataattgtgttaagttaatcggtagtgtctcgggtccacgccacaacatggttgtatgcgagaca

SEQ ID NO: 139110 - DNA, 388 bp, Zea Mays
tattctgcagtgatctgggtccgattccaaacagaaaacgacgaaaacggccgcccactgtgtgtgttcgttgctttgcccttaagggcgtgattggttgccggatgaagccaacctggctcggcccccagatccaggctcatgggagcctggttccagtggtgcaagggggtgtgattggttgccggataagcacaaccaggcccaacccagcagttgattggttgcacagttgcattagcaaattcaaacacacagatgcaagtagagtgattggttgcagctacatacaagtggtatggtcaccaatgcatacaagtggtgaggttacccaaaccaaatgatcaacaagagcacaactatcagtacaaactgagagagaatcaag

SEQ ID NO: 139111 - DNA, 385 bp, Zea Mays
gttatagttactggttgcaaggggtggtgactcgatactagcttccgtccctcccttggctacttgtgtcaggtggttctctcttggagtttgtgggtggactgctctactctgtagaagaagcgtctgggcatggaagcaatcttttctttggaacggaacctcttggagtggagttatgtggtgaaaagccatggatcagtgaagaagaggacctggagaaggcaatgtcgtcgggcctttggatctagccccgaggatgatggcttggttggtcaggttcaggtgtttatttcgtgcgtggagctgtgcggttacggtgggtttgattctttttgtgcttggaattgtaaagacgactaggcttagtgtgtgtttgtttcgc

SEQ ID NO: 139112 - DNA, 396 bp, Zea Mays
atggctggaattgatcaaagactatgagctggagatttacggctgctagcttactgccctgaggtcgaatccatcgcccaggaggtatgatcgacagatcgaattgtttcttgcgcccaggaaacctataattaacagactggatcggatcactgttgaacagttgcaccagatcaatttaagtcgtcaatcctatgatctgtggttaccctggcattttcaacctcacgacaccaggctcagccgatcgcgcattaatcaccccacccaccactaccggccaaccagcgctcgcccaagaccctacggggatatcccgacggttcgctggcctcccaggaccgccctaccatgccatcaacgcctgcccagaacacctgatgcatacacggatat

SEQ ID NO: 139113 - DNA, 614 bp, Zea Mays
aattgtgttgccccgttttgttccctcacaggaatctcaacaggtgaccaacagacggccatggcgacaatttggggatttagcggcaatagagaggattaggtcaagacggtgcttagaaagacaaaggagtagatacgatatatgctggaaagtaacaatgcaaatggatgacccaagaagtccaagcctgcgagatgatcttttttggagcaggctgcgaaagcttaagcgtcgcagggttttttcctttacgaagcgactagagaagtagaagtgacgcaaagttgcataatttgaatcgccggtctgataaagtagtcgagtcttcaacagtaagctgagtctatagactcagcgggttgcatgacatagtttgggacttgactagaagacagaagaactcgaacatagcaagatcatgaagattcaagattagaatttcatttgcctgattcaatgactcaaccaaataagactcgggtgctactgttaataatatatactagtgattcccaagtcaaattagacgagaagacacatacgatgggctctgagcccatggactcgacagtcacgaccagaaggaaggcctgtcggcaaaggaattctag

SEQ ID NO: 139114 - DNA, 404 bp, Zea Mays
ggtatttctgaagcttaagtgctacccgctgcggatggcagagagcaaggagacgtggtgacaggtacgatttcagttgattcgtttgcggcccatgctctttttgactctagcgctagctattcgtttgtttcagaggattttgtgtcgtgggctggtctttcggtgcagaggttgggtcacctaattttggttagttctgctaatggctccattagtagctgttcagtttgtcaggggtgttccatcattcttgctgatgaggtcttttcggccaatctggtggtgatttccttgggggcattcgatgttatcttgggtatggattggttatcccagtatcgcgcagttatatcctgtttttggaagacagtgttattgcaggcgtcgtcgggtaaggaggt

SEQ ID NO: 139115 - DNA, 339 bp, Zea Mays
cgccgagctaaagcggtggaagcggaggggatgaggtgcgcggttttctcttctctgtctactctcttaggttgcaaaaacaaaagcagaagacaagcgcaagtggaaaggtaaagaaccactgtcggcccctcttccgggtatataaaggcccgggcgaaattcacccgaaacttcgcctgaacccttcgtgaatttcaaactcaatggcaaaacgattttcccgttcctcaaccaactcgcgcacacgcaacagataccccgcgagtcgcccgtccgatcgcattaactccctggcaggacacacgtctcctctggcagatgggcgggcgccgtttc

SEQ ID NO: 139116 - DNA, 325 bp, Zea Mays
taccaaataaatagcgtagagagcatatttagagccgaaatgcaatactacacatgtgcgatcaacttcaagccacgtttgagagatcgatcacattcatttcacttcttagagtacaaatctcgtttcatccaatggctttgtaaaaatgtcggttaattgatcgtccgtaccaatggaataaatagagatatctccctttccaacatgatcccttaagaagtgatgtcgtatatcaatatgcttagttcttgagtgttggaccgaatttgtagccaattttaccgcactctcattatcacacatgagaggcacattcttgaaa

SEQ ID NO: 139117 - DNA, 368 bp, Zea Mays
gcgctgtcatgcttggaccaggatgcaggtccttctgccctggctcgtgatgaagtgccagcagaggtccttcctgaggttgatcccaatgggtgtgatcgtgcaccagcggttgtctgtatatttgatgaagatcaagaagaagaagaagtcccgctgattcgtaagaacatccggcattatagaggtagtgaggggggagtgatattccttctccagctctgtcagctcttgtcagccttcaggaactgtcaatattggattttgatcaggcccttgaggaggtcgtccctgaggatatgctatcggagccaattgcagatgacgtgatggctgtttgttcagaaattccagacgtgggattggag

SEQ ID NO: 139118 - DNA, 638 bp, Zea Mays
gatcggacttatggctgtcagattttaacacaagtaagataataaagttatctacaacttttctatatggcttttctacagaaaacatgatttgggtcatcaaacatataacacgaggaaatcactgtgtgcagcccaaaacagcaactaataaaattcagcttctatttacttcaaaaattgtcgcgttctggagactcaaaccattctaacactttaccctttgttagtgttaaattaatcaaatgaggactaataataataagtagacttactaattttatacaagttatttcgcgtgttagaattaccgtacacaatcaacaagcacattcaccacaataatcaaacccggtataaatgtgtatatcgattgcgcccttcacacactaatttgcattttaacttatacatcacatgaacacccctaattttacccgcgaccataaccatgcacatttaggccataacaagcaaatcatcgtgattacgagcttaactaaagctgtccaacaattcggctaactagagtaacgacatagcccgctaaataacatacacgtcggctagtccattattatcgcaatccgagacacaacatacactacaacaattttataaacaccatattcacaagt

SEQ ID NO: 139119 - DNA, 460 bp, Zea Mays
cgggctcatttggacttaatatgaattttctatggatttaacaagattctggaattgtttttatataagaaattcattttctaaatcatttcctctgattttccatttccctggactgcgactactaatatcaccaagatcaggggctaaagcataaagcttacgcagactcagaacttcccccgctaggacggcgggtttatttctaaaaatcgtagggtctctttagcataaatgccaaggcgaaggggtattggttgatctgcatcgttggacgcgagatcgacggtgcaggatagattcgtccatgcctgaaccgatatgctatgcgaaaccttggatccagatcagacggtccacactcaatccgagcacataaacgcgatgactcaatcccacccgtctgatcatagatccacggttcaaactctcccacacccagacccgacgggagcccttg

SEQ ID NO: 139120 - DNA, 700 bp, Zea Mays
aatccagcttcaagttgctctgttagacaactgaagatgaatgccattttacagtgacctgaacaggatcagatcgacaacaatccctcgtcgccgacgatctttacgccgtgattcacgctgtcgccatgattcgtgttcacttgcgaggggataactacggtgagataaagatcttggcatgggatcagcttgagctcggttgcggctaagcccgccgtacccccttgctcatcggtcgatcgggataagagctcgccgccgttggtcgatcactgtcgtgcgccgcgtgtccaggctctttaccacgtcgcgattagtcacgcttggggatccagtgatcgctggaggaagcgccatggtgaaaaccactatacacttgcgccagtgctcctccccttctccgaccgccgcccatcatcgctcaaattcctggccaccgctcttgcctagtataaattaaagccaccgtgagctccgtaggatcattacgtatccagccaccaagcatttccctcaatcgatcatcagtgagctccaattttggatttccccaaaaatactcaagaacaccgtagcaaggacctcaccgtggccagctcgattcaggtctgctcataccttctgctccctcgtttcagtgttcttatgtacccttgatgctcatcgacctatccaattgaactagaatcccttaatc

SEQ ID NO: 139121 - DNA, 679 bp, Zea Mays
ggcgcaccgggtctctctggttgggattgccgaccgggggccccgcgattccttgccagagctcggccgccgccgtagcaccgccatacgccgtggtcagggattatggctacgcgactcacggtaagctctccttccctcgactcgcgttcatctctatcttgtgttgcctcgtccgaatttaagttttgggggcaaaatcatctagagcgcccaggaattcttcgccgcgttgtggctctgtcgtggcgccattgcgtgtcgaggaccagctctggtgtcaactcgaccgctagtacgttgctttgattctactcattcgttcgtccgcatcgcgttgcaccgattagcacgatgaaggggtgtcggttctgccttcaccggcggggcgtcacggccaaacagtgcgcgccgccgccctgctgcggtgggagaaggaagacgaggtctgtaccactggattatcatccaacgaacacgattgatcccgggttgatgtcgtttcagccgttagatcgggatgaacggttgggatgggatctggcgtacccgttcgcataatgggttcagcgccgttggatcaaatctcaacgaatagtaacgaatagtttcatgcattgaaaccctgaccgttgatccctgggataacggttcggattagatgtaacataccccttcg

SEQ ID NO: 139122 - DNA, 394 bp, Zea Mays
ggagccgagccgccagcgaggggcagacaacatgggctcgcgacggaccgtggagggaggcaggaagcagggcacagggccataggttgtgaggaggttgccaactgcctagctcgctggttgctagatccatggagggcgtgcagcggccgtcgagctcgtcgtagtgggcaccggcgaccaaccatcgacctcgatcctcgagcaagaagtagcacgagaacgccaccgccacgccaggttaaggctaggtcgagcagggttgcagccgccatacgcccaggctgcaagtggataggaagggtaatgggcttggtttttttgggcaaaaaaacataagtataagtgaatatttgggccacgactcgggccacggcctaggtggcccggggcc

SEQ ID NO: 139123 - DNA, 598 bp, Zea Mays
caggaatttcagtttgctagcacaagagcactcaactcaatcaccaaacaaaatcataaagagatactaccaccaattctcagtctaatttatcacgacttagttatcgacttataatctatatcgagttacacttaagcatggtcacacaacagatgatgtggtggctacgtagtcatgccatcacttcaccacacaatccaaggtgacatgacaactctaaccgaactcgttaactactcgaaagaagtccaaatccatttctcctataaccttgcatctcacctaggcttcaccgaacaaggtcgatgcgtctacttcacctctacgaacataaccatacactatatatgaagtgtaattcaacgaacatataacgcgcattgatccgacttacaaacatagaggaagcgatgactaattcggcatgtcgccacttctctatacaagccaaatcactttctaaccacaccgaccaaaccttcttaattatcgagcaaaacctaaacttctctgtttcgaatacaaccatatcatagcatgcattcgaaacacttgatcgaacttaacacatccaccaaaataatgcacttcggca

SEQ ID NO: 139124 - DNA, 735 bp, Zea Mays
aaaacggttgtagaacttcgttcttcaaaagaaaaatgttatgaaaaatccatagaatgcgtgggaaaaataaaaactagcttcaccaatgttggcgcatactccagcgaagacaacttcgtaagaggcgatcctgagggcccaattgactggatcagcaacgaagccgaagcttttgaggaaattttgagtggtcgtggagatgtctgtgccttctcaggtgccaagggaattgcggctattttggagaagtcaggttgcaatcatgtgaaagctttggcccaaaccgaagctactttatctattgatgacacgaaggatccttcggctgaagcgagcttagttggcggaaaattctttactgacatctgggagaatggcggccgagggatggcccacgagataataaaaaagagcgaaaaagattctcacgatacaagagaagcagcagaggcagctgaaaagactgcagaactcgaaaggcggataggtattgcctaattgtttttaactttatattttatttttgtgacttcgaacttatttacgttttgtatcgcagctgaactatctcctcctccagagcctttcgagtcaatggccgacctagaagcagagaaagaagatgaaattactaaagtggccgaagctattgtggacgaagctgtttctcgactgctaaacgaagctgcggaaatagttttaaaagaagaatagctgttattgtaaaaacat

SEQ ID NO: 139125 - DNA, 803 bp, Zea Mays
gtttcatattttttatttaaccacgttttatgattttttaatatatattgatgctcaactttatttggatcttgctcctgtttctagtgttttacagctcgtagtcatgaccattatttattaaaaagctatcattttgcgctatattaggcgaagagatcaatggaaaggatctaatggattccgatcataaagatgatgccaacctcgcaaatgccatgctcccccacatatagatccggcattgcatagctactgtttggttgcatcactaggtaataggtttcaaataaggcaggggctcaaacatcatgcaatcaactaatcaagcaatcaacgtaaactaaatccgaaaatgatagtttaaacaaataacagttgtaactacgactctacgagcaataaaacaataggtacaagaacaagtataagattcaagtaaccctttttctcgaatgtgcagaagagttgtgtatcattatattaagaaaaataaggtttaaaatagaccgatacaagccgccggtaaaagtgcggaaataaaataaaataaaaaggttacaagacagcaaagagaacccgacccacagatagaacaccaatagatagattgtatttctagaaagagatcaagtaccagttttgttaattttcaatttaatatgaattatttatgaattttcgagaatgaaccatatttttattattttaggaaaacacatatataggtaaaccaccttgaaacatggtcgagggccaaagttgtcccacttctagtagttccatggccaaaaatatctgtt

SEQ ID NO: 139126 - DNA, 537 bp, Zea Mays
gaagctaatacaaaaaaaggggatctaggcgtatgatagagttgagagtggagtgaagctttctagagactaattactatgagaacgttggcttcgatgagctatggattgggctgtgtgaccactcttattaattaatatatataaattgaacgggtgagttttaagaggactgaggcggggtgaccatctctttttactctatgcgcgctgaagctttgttcgctctgctaaacaatggagggagagatggtgtcgaactatgtcacacacgattcctcgagcgcaaggaaacaaaacatacaaaacgcacgggggaagctcatctactccaacagttcgagaactactctcaccacccccaagcaagttcactacacgctagattgtatctactgtccagtcctatgtggacttggatcctacatcatgtacaagtaagtctattatgcaccagataggatctactactcgatcaaacgcatagttaaattctgcatggagaatgaccttatcaggttacaaattcaaaatggt

SEQ ID NO: 139127 - DNA, 598 bp, Zea Mays
ttactgtgccctcggaattgcactcgtatgcttctcggatggggagctgggcggcgttccgtgcgtggtgggtggtcaacagaccggttgccggactggcgccgctgggggatggccctgtgccgctgtgccggtcgcctggggagggagatgatacgtaagccatggagtggtaaacggacggctgggattcggtcgggggtgtagttcggtgggatccgatatccaccgttggatcggtaatggatgggcaaggggtcgcggaccggtgatccatccgtgaacggtcgagattaaaacgtcgacaccgttttgggtagatcgcttccacaccgttgatcatcacgtctaggggcgagtcaaaacagtaccaccggtcttcacaaggaagaagatgcactgggatcgtagatgtgtggatggatggcccagattgaagcaacatgtacccttttgagttatttaatcacagccgtcgatctctggttgtgtggctcaggttatgtactcgagtccgatctaatctaggccaccgaatcgtgatcgtgcggatgtcgtttggccgtaccccttcgacctctgcatttttgcagaagag

SEQ ID NO: 139128 - DNA, 368 bp, Zea Mays
ttccgatatgattgccccccagggatcatgcttactccgagcttatctcggaacaccccggctatttcttccctcactatatcaacggcagccggtgcaagaccaccggctctctcgtcaaacataggtggggttggttgcatgttagtatgttgtcgttcccccattggtttgagctacgtggtgcatttccattttccctatatggctcatatgtttgatcgtttctttttggccttctaggtggggccggaaagctttcctgggctctaggtcttgaattaatgggctggtgcattgcatattgtgattgggagtgttgctgggatgggtgaggattcaagtaacaatcttcctcaaaaaggtca

SEQ ID NO: 139129 - DNA, 573 bp, Zea Mays
ggttgattcactttggtggggaagaaactatcccaaaaccataaaatgatgaagtggtggtctttaagagcttcttcaaagcagggctgagatttcctctgcacgggatgattggagatgtcttggaaaattttgagatttaccttcatcagctgacccctaacgccattgttaggctcagcgtttacatctgggccctccgaagtcaaggggtggagccactcgccgaagctttctgctgagtacatgaacttcactatcagacgaaggctagggaagacggactgcatgagaacttcggctgctacaactttgcttatcgcaaagacatgaagacatcggtggtcagctatcgcactaaatggccgaccggttggaaatctgaatggttttatgttaagattgatgagaaaaaagagaagctagtacagagcccgctggagttaaccttcgggctgactaggcctcagtgcaacatgacgccggggggcaccatgcccagatgctgtgtatgagtttagagttgtatctgaacacattggaactagggatttagttcaagaatacttggcc

SEQ ID NO: 139130 - DNA, 689 bp, Zea Mays
aaaatttacctaagattagagttatgcatcccaacgccgtttaaaaaagcatatagatctattggctggaccgtttaaattagtatctgatcctaatgttaaactattgttagttctttacgccattgatcctatgttacttacagtacgcccgagatccgaaaacttcctagcgccggtcctcgccgctcgctcggctgagatggcggctttaggtcgcctttcacgtttgcttagttctaccgtccaccgctctggaggccttgtgcgcgccttctccatgttggccgaggtcgtcgatgttgccgatgtctccgatctgtacctcccacgtgacgctcattgctactacatcttgtatgtgtaccatttctgtattcatattccttgtgagattgtttctgttcatatattttggtctgcttaaatcataaacatagtttatgtttagttcggtatataaatttgttttagcttgtggtcattcaaatttagtacattgtttgaattttgaatgcatctttcattgtgtttggacgaagctttagccaatgattacttaattaatatgcagatatgcttttgtgatacaaaacataagtttcttgtcatatgaacctagtaacattcaatgcatcttttttgtggtcttctaaatgtgatttcttttaaactaactcaattaaaac

SEQ ID NO: 139131 - DNA, 707 bp, Zea Mays
tttacaacaggtacatgtgtcgtacgacggagggggtcctgtcattttatagttcaagggtaggaccttacagaggggacatgttccctattggtaagagtgtgatatgttttcctcggttgacgtcgtctttatggttgtgcgtatccgtacccccggcatcgcgtaccactttgtctgtccagtatacgggtccatgtagtgagttcgatgttgatgtccttgtagtggtgtttgtgggtcccacggggtagagtcgtggtatgtttcagggtagtgcgtggggcaaccccgccttttgtcatgaacctcgtgtcaccctacaacatgcataagcgtacacccggtatggtgtattgtcttgtccttcccagtatgcgggttactatggagactccggtgcttaggtcgccatggttggtcctgcaaggcagagacagaatacaccagagacatgatgtagtggcatacagtcatgttgacagggattcccggcgcccttttgctatgccgcactgagagcacctagagggggtgaataggtgattctgcaaaaatcaactctaaacaagacaaacttggtttataatgagtgttagtcaaagctaaaaccaagttgttatgagtagagatggagatagaagaactcttcacttgatttctcctttgagatgtgaatcaaacttaggagcaataatgttacaagt

SEQ ID NO: 139132 - DNA, 351 bp, Zea Mays
cggtggcatcttttggtcatccaattgacgagagtcaaggctgcagcacggtagcagcaattgcgctgcatgcttttatcccttccgctgagagccttgtttgtagatggatgcagttggaatctttatctctgctctgcctgctgtggtgctctgcctataaaagctgagggagcatagttgaccgggcccctgacaccaaccctagccaacacgagaagctgtcgtaaaaagaaaaacacagagaagccaccaggccaccacgcctccagccaggagagagagatgcacgcaggaccgaacggacgaacagttccaagcgccaaagccatgagagaagtccaagcccgc

SEQ ID NO: 139133 - DNA, 942 bp, Zea Mays
cttggtgaggcaggcggagacaggaaaagagatgtaaagttgggggttaatatactatggcaacaacgaggaggaagtgctcgtgatggttgcatggttggttacacatgcaatcaagcaatagataaaggcttaggcgagaagcggtggacgggaacgatgaggaggaagcgctcgtggtggttgcatggttggttacactagtctggtttgttaggcgagaagcgtgggaggggaatcaacttatcgggtggaggggaacaaacttatgcgcttcgtgcgtgatgcaggacgaccatcgaaactggtgctttataggagtagtgatagagatttgtggactaagagtatcaagcttaacaccagatggcaaacatatgactgtagaactcatcaactgtagaatcacctcgtcgtaaggagtgcttctaacgaatgacaacaagatgagtgactagtacgtttgtagtgatcacgaagaagggttcacatcagatgagaactgtcacactcaataacctttgcaacaaagtgatcatccatactagcaataagaatggaaccagctcaagcatcctcatatgatgccaactgattatcataatatgtaagcagctggtcctttgccttaagagtcaccatgttcaatatcacatgtttggtagaagccttaggacaaggaggacagggaagctcgcgagaaagaaaattccatagacgaagaccttgcatgtcaccacatgaaagaaaattccatagacgaagaccttgcatatgtcaccacatgtgaggaacccaaacacgataattggtgccatcaaagatgagcagacaacttgtaatggggcacccccgtttggtgaagacgaagatggtgccatagctgagcaacaataattgacgacaggagcgtagaggaataagcggcgaaagtagtttttt

SEQ ID NO: 139134 - DNA, 358 bp, Zea Mays
acgataatctgtactgcgaatcgagtcacgaggtcttgtgaagcatgccggaagttttctccccgctcgagcaacccttcgcagttcaccaagctaatcgcccacacatggccacttcaacgctaggggctgggtattgtcggaccactgcctacggctcaagggaacctcaaattcaccttcgttgccgtcgagtacttcaccaagtggatcgaggctagagcagtatccacaataatgtcgaagaccacccaaaagttcttctggcaaaacattgtctgccgattcgaagtcccatccgaactcacagtcgacaacggcaaacagtttgatagccaggacttcagggatttctgtt

SEQ ID NO: 139135 - DNA, 285 bp, Zea Mays
gacttgctccttaccatcgatgatgatgatccgaccatgtttgaagaggctcgaggcgatgcccgctggcgcaaggcgatgatagaggatatgacatccattgaggagaataagacatgggctcttattgaccttcctccaggccatcgcccaattggtctgaagtggatgtacaaactaaagcacgatgagcatggcgtcgccgttaggcacaaggcccaaattgtcaccaaagggtacatacaacaaccagggatagactacgatgtggtgtttgcttcggtc

SEQ ID NO: 139136 - DNA, 533 bp, Zea Mays
tggaaactcggaaatgggctttgttttcagaaagtaggctggaaaagcatggagatgcttctacacgggattgctgggttaccacagaactgagcaattccgttcacaacagaatagaacgagtgatagaagagtacggtggatgagattaagccgtcaacaaagaactatcttattgctgcccaactagagcttggaggctttcaaaagcttcatcttggtgtggctggaagagatcaagcctgcagtggtatggtattgacaagaatgccgctgcgtggtcagattcgtcgtgctgttagtggaagtctgtgaacatctcgttggagtagttgtaaaaggattttttctgtttcgatgcaggctttgttgagttgggttctggtttgagacggattttatggcctctggggttagtgttggtgtaaggtttatgtgcccggttgttaggtttaaacttatatttaatctcacctatctaacaaaacactctagtctattttatattctatagttaagtataaatagaaacc

SEQ ID NO: 139137 - DNA, 851 bp, Zea Mays
gacaaaagtcgacgagggcctgggacttgatcacggttctggcaatgtagctgatgtcgagttcgttgagctcgagggaccacttcgtgatgcgcccggacgcatcccgattccggacgatctcgccaagggctgtcgtggacaccactgacatagggtgtcggtcgacgtagtggaccaaacttccgcttggcgatgaggaccgcatagagcagcttctggatctgagggtatcgtgtcttggactttgtaaacacctcgctgacgaagtacacaagcctttgtaccttgagtacatgtccctcgctttctctttccactactagtgcagcgttgacaccctgggtggtggttgcaacgtaaaggaggagggtttcacctggatcgggcgcaaccaaaaccggtggcgaggtgaggaacacttttatccgatcaagtgcctcctgggcttcggtcgtccaagagaaatggtcacttttcctcaagagcttgtagaggggcattcctatttccccgagttcggacacaaatcgactgagtgcggcgacgcacccgaccagtcgttgtacccctctggatggggctcgtgcgtcagatggtctctattttttcttgattagcttcgattcctcgatccgacaccatgaagcctagaagctttcccttggggaccccaaaaacacatttctcggggttcaacttgattcggaaccttcggaggttggcgaacgtttcttctaggtctgtgatgaaatcattgaatttttttggtctttacgatgatgtcatccacgtagacttccaggttacgcccgacctggtatgtagctccgacgttctccaagccaaac

SEQ ID NO: 139138 - DNA, 1164 bp, Zea Mays
aggggtttggacgtttggtacaatggaaattacacaacaatctctccgcttgccacaaaatataaatgtacatgatttcagaagacccatacaaagagactaagggaaaaatggtgctttcatgcccacctcaactcttatggaaggaaaagggaaaagtggaacacttgggacatatctctactacttattaatactgcaatagtagtctgcctctgacgtgttctgcctccgacgcgttctgccaatggttattctgcctccaacgaccgcaccatacagtcccgcgcaacaaaataaacagtacatacacaggtttatgagccacgttccgttccatctttctcagtgagcaacatacaatacacagttgtgcttataagccatgttctgtcactctcaatggccgatgtggcactaataaaatagatggcatacctggcagcggttcgtgcggcccaatgatttttgtgtggacctaaggcccatcgtcctagcgtgcagcccaccgtgcggccgactgcattctcgcattcgacctaatcaccgtcgacggctcttcctccactgcgctcaactccagcggcctcccctccctctcctccaccccaccatcggactccacctcctcccccaccgcaccgtcggactccacctctccaatggcggcctccagcccactgccgtcctccaactcctcccccatcggctaccttcacccaaccctcatcttcatgcgtagcacaatcgtccccaatcccggagatgaccgtcgttgcctgaaccaggccggccacctatacgctcatgcctctcacgtttccggagggtgcagagtagccggtcaactggtcgagctccctacgcctcctgcgcacggcctaaaactccctgctctcgcctgcacgcctcgctctgcttagcatcggagcgcacgaacgtcgcagccatggttgccagtagaaccttgacggttgttgctggtttccctacccctagctcgagcgcgcatagccgatgggacctccactgtttcccctcctcagcgcgctccatgctgagctccggcaggccacaacggccgggtgccgatctccatggccgctgaccaccggacagaggcacaatcccgtggacctccaaccctgccgagccctctcagcc

SEQ ID NO: 139139 - DNA, 505 bp, Zea Mays
ctagggaataagtaaatgagcaaggtccctataacagaattgcagctggtgtatagagctacaagtttgttacagatggattggcaagttctcacacaaaaatctgagatctaggcatttcaattatgtctgtcagacactctgaatcaggattccgatggtacagtgttcggattagatcgttaggttcatttcatctcgccgccggcgaccacacgctcggattcgcgctagacgctatgattcgtgctcaagggagtactaataattgctcgaggtagtaaatatcgccgtgtggatgaacttgagccactgtttcactccggccgccgtgtccgcctgactcacggccgattcggatgaactcaccggagttagccacctatcagccatgcgccacgtgccttggtgtcttaccacgtcgcagtagctcgtattacacatgtccggtgatcgccggtgagctcgccacggtgaaagccaccaatctcttgcgacagtgctc

SEQ ID NO: 139140 - DNA, 795 bp, Zea Mays
tgcggggatttttgcgtgtatattacatggctccgcctcattaaaaacctcaccccccgggaggaaaagagtgcgggccggaataatactgtttggtggattacaagggcatgttaaccctgaggattcaaacaaaaaatttacggagattgtcaatattccaggaatgctctaagttttcgccggatggcgttgttagcctgtacgcgctgggggacgccttcgtcttgatgatgaagggaccctcccactttggctccagcttgccccgtgactctgtccgagttatccggacgagtacgaggtcccttctttgaattctctcgagaggactgtgtggtcgcaccatgcttttgtttgagcttggtatttgttgaaggcctgcagggcgaagacacggtttccgttgatgagatccttggaagttggttcgtctatgtcagggacggctgaagtgcttgtccgtggtgacccatgtttgatttcctacggggtcatggcctccgatccatatagcaggcggaaaggtgtgaacccagtcgcccggcactcggtcgtgttcagcgcccagactgcttcaggtagcaggtcggcccatttgcccttcttgtcgtcgaggagcattttcttgatggccgtgaaaattttaccgttggcgcgctccaagacaccgttggattgtgggtgatatactgaggcgaaggcaagcttggtgccaattgagaagcagaagtctttgaagtcctggctgtcaaattgtttgccgttgtcaaatgtgagctcggacgggactcc

SEQ ID NO: 139141 - DNA, 436 bp, Zea Mays
gaatttataactttgttttgttttgtataatatttctttctttctttcctatttccaattcaaatcaaaccaagtttcaaattctagatttcaaattttatgcacaagttaaactttcacatgatgcaaaattactacatagtgttttcttcatttattttattatgattatttacctttaaaaagggtgaactataaagtttaatcacttatcaatggtactttgctcaaatttcttctaccaatcccaaattcagaatttgggtgttacatgaacctacatgattcaaagctcgtttagttgtgaaaggttttgaacaaagggaaggtattgatttcaatgaggtgttctctcctgttgttcgtcacacttctattcgagttgtgcttgctattgttgctttatttgatttggagttagagaaacttgatgtta

SEQ ID NO: 139142 - DNA, 523 bp, Zea Mays
ctggaccgagcaccaaatacagagaaacataggggcagaaccagaagttttccccagactcaggcttcccacatatggacggcgggttggtttggataaagatcgggggcctttatgcaaacattcttcggtaaagggggtacgcgccgatctgcgccgtccgattcaaaacatacggatccgattagatcgcacagcgcgcgaaccggtacgcgttcaataccgcacgattccagatctacgggtaagattttaaatgggcgagattgaccagggaccgcccgatccaaacccacggtccagattcgttcctcaaagcgatacgtgatttatctaatctgaaccgttcccctccgatctaacggccagaacactcccccagtcctccggccgcctgagcatcagaccgcggcggcgcacagggataacacggcggcgcgccatggccggagttggtcattcccgcacacaagcgcacaggcttcgattccctagcgctaattcgaagaagggttaaaagcga

SEQ ID NO: 139143 - DNA, 313 bp, Zea Mays
gggtggctgtgattaaaaccacgataccccttcgcagtattaaaatctgaccgttgaaacacgatctggcggtccaaattgagcgtaccccttcacaatgtaacaattgcaaaagagaccttgtggtttggagttatcaacccgccgtcctggggcagtagcagtgagttaaatagggtccctgacaattatagttcagcccccaaacttcttggtaatggtgtgcgcagtccatgaaacaaagaaaataggaaaaggaatttagaaattgattttgtgtgtaaaaataattgcagaaactcatagaaaattc

SEQ ID NO: 139144 - DNA, 743 bp, Zea Mays
cttggagaaggtgaccacgcatcgcctgcggacaccgacagcagaagatgcacatcatcgtcaggtaggagtcgtcgtcgagtcgtcgtcggcgtacaggccgctgggcgtgtcgagaggcacgcacgagttcaccatcttcggccacagcggcgtgaagaagatgcacgtgcgcgacctctcctactgcatctactcgggccgcttccgagtcggcggccaccactggcggctacgctactacccgtcggaacatgcctatgacgacgactacaggaaacaggtgaaagcaggcaattacatgtactccatctacctagagctgctgtcaccaccgtaccccgaggctcccgagccccagctggatgacgatgatgtagtcaccgccgctgccaccttcaagatattctcccacgccgacaccgggggcgaggacgatacgtgggtgttccgattctgccatgacttccaccacaacgacttactatatggctgcttcccagtggcccagcaagcatggaacgcgggtccatataaccgcctcatcatacgctgcgagctcgatgtcaccaccaccccatccgccggcggtactggatgcggcggcggcgtggacatcatggatgtgccgacggcgtcaaacatctcctggcaccttgagcttctcctccgtagcagcctgggctccgacgttgcttttctcgtggaccaagagaagttctgcgcgcattcacttattctct

SEQ ID NO: 139145 - DNA, 881 bp, Zea Mays
atggaactcttcagcctccagaattttattataaaattcactagatttttactgttcatggtccggtggtgtaccagactgtgggctccaatggctactttggcggcaacgggaggctaccaagtggcggtccgatggaggctaccatgggagactaacatgtgtttgtagaggcaaattaaagttaggtaatagtgatggagataggtttgagcaatatatggttctcatgcgactgtctattgattttgttgtgatttggaaatgatggaagacaaaattaaggatcgactagtcctaagtgttgtttggagttgaaagacacttaaaatattttaggactttgtttttccttttacaacactataaaggagggatgaactagtaagttgacctaaataagtctaatgagttttgtcgggtgcacactagttgcctttagctctagatggcttaggagaggccaaaaagaaggatggatcaaaacacaattcgaaagtttcaactttggagaagttttgaggtgttagaccctgtgttttagggttatcagactacagtggactggtctgatgcctccacatagacaacccaagagagatcaatcatcgaaccatatgaacagtaggatatcaaaccaatgcattgagtccgatgatctaggtaaatagactatagagttcttggggggacttttgactgatccgacgacatgcgtcggaccatactacgccactatgtttctagggtttcttctacaaggtcgttagaccctatgaacagtgacaccattggatcaatgtggatgggtccaacagcctctgttcaatgaccaaagcgaacttagaggcatcaaactagtcaaatggtgggcattggac

SEQ ID NO: 139146 - DNA, 514 bp, Zea Mays
tcgggtgttcctgctatggtgttctcgtggagtcgtagtacatcccggaaattgcgctggttatcgacccggcgggacgtcttacctagttacctttaataaatgaagaaaccacgaaggcacgtagtggtacagtggcacttttctcccgaatgaacagctaggtagaggtaaagcgatttgattttgacatccattttatattcctaaaaaagcgtagcttatgtttaacaagatcgtagactccatccactgtaaatagagggtacatctctcattttatacaataattatagtaatcctattttgagatgagatgcgctaacagtattttatataaatatatagcttaatttaaatcggtgactggtcgaagaacaaaatgtgtttttttacacatggagtaagtgatctaacgccatactgtacctcagggaagcggttggtaaaaaggggggaaaaacattcgatcctgtaaatcgccggtcgtcgactatgcattacagctcataac

SEQ ID NO: 139147 - DNA, 418 bp, Zea Mays
agggccgccgtgggtgaaatccatggtggttgccgttcggggtcgggaattgggccgagtattttcgcagtgtcgtacggatgatgtgctcccgctcacctggcggaatcggcggcttgggcgagctaatctcctcgccgtcgtggatattgcgccatcgtcgacacttcaccgtggctgggccgctcggacttcgtcgccggtaagtgtttggtcccatggtgtttgccttggcctccgaaatgcgtagcataatcgggatgggagttctcgagtctgtgtggggatgggactgtctccgtcaatggcaccgccgtgcctcagccttgcgccgtcgaactagcatcggtgggagagaagggaacaagggaggaaagcctttagccgttagatcaacgttatgcggtttggattagat

SEQ ID NO: 139148 - DNA, 355 bp, Zea Mays
atctgatctcactcttgtgcttgcgacatctttgtagatgccccctgaccataaccttcttgtctttttgggattctttcctctttcgtcattaaattgctaccatctggcgaactctagtcctttggcattgacatgcttgtacccctttaatactcttgttttgaatacttgcctctaaatttctactgcctacttagacatttcagtttatatgtccatgatcttcctgtcttttgagaccctttccttttctgttgttaagtcgctgtctttcagcaattttttggctcttggtatttgtatgctcatcttcttgaaatcttgcatactctcatcttttttatgcttatct

SEQ ID NO: 139149 - DNA, 690 bp, Zea Mays
acggtacaggacctggctgagcggctacacgggctctggactaccctatggaacggggtcccattttctagagccgacccccaggctgtcggacctccctactttcgtgtcaggggccctaaactgcaagcatggctgttcaatttggatgtcgccatgtcagacagatggaaaccatacgggtgggtcagttgaaaggtattatctgagagactgcaaggtaggaccatggagcagcaagatggaactatcacaagagcacgactgaggggggtagtttcttcttcataacttgtcgtgcatgtgtgcagaccaatagtccgggttcatgggggtagaccccaccgggttgtcgtacacgtatgcgtcatctagttacaaaaaaggaaacagactcgaccccttagtcttgctctatggatagaacttacagagatatttggcatcggggtaaggtactcctccagtcgtagctagatggttgcccctgggtcggtgcactcccgttaccttgaagggtccttcccagctgggggagagttgcggagcccctcttggtatggcacttgccgtggggctaagccccgacccaaggttcccatctgcatttgacacgggagccctcgtctctggctgtgatcacttctgcatgtacctgtctgtagctcggacccgtgggggtccggaagg

SEQ ID NO: 139150 - DNA, 641 bp, Zea Mays
atgatccatgggaggggagaccctccgccaaaccagcctccgcttagagaacggaactgaaaccgccactggttgactgcctaagcgctcccacacaggacggcgggcgacgagtggaagcaggactggaccgccagacggaaccttggtcacgtcgtgcccacgatcggcgcccaggacaatcagcagcacggtggcccggccgtcggcaacgcaagcagcaggacggacgtcgacatgcagccgcacgatgggacgtcgccaagcagttgaaacacctcccccggagatcgtgcgggaccggtcgacggggaaggggaaggcgggggcgctcagccagacgacgacgacgacgggaccacctagtctccacttgaatccagccctctgcgtctgatggcggcgagatcccttgcagacgacggtcaccagggcagtccttcaacctcacaaccgggacggaccacgccgaagagacgcgagaagaggtcgccggcctagcacgagctgccggccgagcacgaaccgccggctgggagagcagagcagcacagaaggtctttgcagcggacgtcctaccaagcccacaagccggtgagagagggccggagtccgcccagcgttgtgccttggatcgcccg

SEQ ID NO: 139151 - DNA, 345 bp, Zea Mays
tgctactacagcacgaacaaagtgtgcagaaattcaggatgggtgattgggtgaagctacattattagagggtgtttaggactgctacacgatattgttcggctgcaagtactgtagcttcctctggaaatgccgcagccacagcagctttcagctgtagcgaacggcttgctagttgctacagtgttttatttttatgtaatgctgtctaaaacatcgaactatctttatgatctcgcaaacaaaacatgggagtcctccagccattgtcctttccattttccaaattctaaccccctcgccctccctgctcttctagtttcaactttcatccgtgacctttgg

SEQ ID NO: 139152 - DNA, 591 bp, Zea Mays
agaattcggacactttggagcttcagaattcagatagacaatatctgtatgtatcacgcgaatggtttggtttgtaactgaccacacgtgcttcaggaagaagaactgatctgacatacttgcagaataatgcaggcacaagagcaagctgcagacaaggtgaaaaggattcagaaatcaggcaagtctcctgtgcgctcctatcataaaaaaaaatacgcacatcttgacaacgtctgctgcagtcactagccactaggacggaagatagagagagcagccaacccaagctagctcgagagaaatcattggcgagaatgatgaagcgatcagtgcgggcagccgccagccctccacgggcgccagaacggcgtcaggatcaggcaggcaggtcgcaggtgtcgacctcttcagtccggcagtaaaaagagagaaggctctccctttgcacccgtaattcaacggacgcattattcaccgcctgacagataggctagcttctaggtcaaaaaccagcaaggttctcgcaatcaagcatccgctatcgcatgtcaacctctctgtctcatgtcgacattgctcacaccctct

SEQ ID NO: 139153 - DNA, 730 bp, Zea Mays
taaccttgggggtaaaaactgggatgttacaaacctaccccacttaaaggaatctcgccctcgagatttagactgggttttgagaaaaggtaagggtattccctcctcaaagagtcctcactttcccaggtagcttcctcttctccttctctgctccactgaactttacagagtctcacttctgaattgcgggtcttccggactgctgagtcaagaatctttattggcttctctcggtactgaagatctttctgaatctggattgcctcttcttcgatgtgactttctggtacttgcaggcatttgcagagctgggacacatgaaacacattgtgaatatcggacatggactctggtaattcaagatggtaagctgcgggtcccactctaccaatgatgggataggggccgacgaatcgcggtgctagctttcctttcacttggaaccttctgacaccacgcatcggggagaccttgaggtagacgaagtctccttcctcaaatctgagttctctccgcctgttgtccgcataacttttctgccgactctgggattcaagtaatcttttgcggatcagggtaactttctcttcagcctctttaacaaagacaggcccttccagtgtattttcccctacgttggaccacatgagaggggtctggcattttcgtccatacaatgcttcgaacggtgacatcttgatactggcctgatggctgttgttatacg

SEQ ID NO: 139154 - DNA, 394 bp, Zea Mays
tatctgttgttctaatcttgatcgtaccttaccgatctaacggtcaccgtttccaacccacgccatcatctccaaccagccacccatagtcaatcggacggccagggggttttcttccccacgacagtccccagatggcggtgcgcgagaaccatggcggtgatgcattccggtgaaccggtgacccgaggttatggcaccccaaatcggtcgtagaccggcgctacacgtatagaggatgagctgagtcaacagagtcgatcctcaccgatgaagaaagcaggagcagggccagccatggcgcagggcggattagcagccgcgcccgtactccgatgaggaattctagcgttgacgccacccaatcacgccgatgtggccaagaacttattcc

SEQ ID NO: 139155 - DNA, 746 bp, Zea Mays
cgaccatcgaaactggatttacacataataaggataaatgttaaattgtgcagattcagagttaaaagagcatgtggccaatgatgacttgaaggatttagaaactaaaagaaacattaccagctcgtgcacggaaaacttgtcaatgtctccaaaatcaattatcctgcagacaatggtatagagcataaggaatttgatatgattcgacacatatagttggaaagctcggaaagtgcactcgtctgtgtcatcgactaaatattataagtacattaagataatctagtgttgactaaaatgcgtctcgggtggggcaccagaaaagcgcggacacgctggttggtagggctaggtccccaaacattgtgttatggaacaatagacgagaaacagtgatgtgagttgccactcgatcttgcgctaataatatgaatttatgcatctctgtgctaaatctaattattacaagggaacccaaggagaagtaaatctcactgcatgaatataaaaaatatcccagaaatagtatataaaaaagaagccaggattcaacatgaatctgatctaatatggatgaaaaaggtaacacatgttatcaaggtttgactaactatcctagggaaatgcagcagtttaaactctttctgtaagattctaaaacaaaatatggatctacctacaatgctttgtagtagctacattctctgtcacaacctttctcaaaacttcaaaacaaaacttat

SEQ ID NO: 139156 - DNA, 349 bp, Zea Mays
ggcggagcagctcccttcacattgagccgcaccaccttagcatctcggcatgggtccaccagccgaagaggggccttccgtttcttccgctgggcatcttggtgatctttctccatcactgttgacacaacatcaccaatatttctctcgtaaagaaagattctcagctcacgagccaaacaggatgtaagtcatcatcggtggcccgggtatagggtcattcctatgccatcaacccccggtaaccttcagcatatgcggagatgtttcccggagctcgggcgaagacatcacctccccgggacccacacacatccccattaactcctcaacaaaaatcctagaggcc

SEQ ID NO: 139157 - DNA, 409 bp, Zea Mays
tgccgccttcaatatttaatatatcttctcttcagattctgaatgtacaattcaataatttgactggaaagtttccacctgatatgggcagcatgctcccaaagctaaatgaatttcttatagcatataatcaatttcaaggcatgctcccaccatccttgtgcaatgcttcgatgcttcaacaaattcaagcaacaaacaatgccttgtcaggaacaataccccaatgccttggaacccataaggacctgactgtggtggcgttagcaggaaactggtttgaagcaagaaatgatgctgactgggactttcttgcaagtctaaccaactgtagcaatttgaaactcttagatgttaataccaacagtctccaaggtgcgctccctaattcaattggtaatctctcgac

SEQ ID NO: 139158 - DNA, 569 bp, Zea Mays
ggcatcgtggcaaaaagttaccgaggtggcgaactcaggttaagcggcaaccccgtgccctcaccggaaaccgccgcgcggaaggtttgccagcgtatccgcagctcgcgtttcttctccaactctggtcgacggtcctccgccgcgtggcctagcttttataccgtgtcgctgtgactcgcttgggccatcccatcatcgtcggggaggttaccacgccgttggccacgtaactacgcgtgccaggcttcttcctcacctccggctgccagctcgccgtgagcaaattgggagccaccgctctcggagtctttaaattgagcccaccgttagctccgcaacttcatcacgtaccccatcgtccagtatcacccccagtcctgccaccgtgagctccaattccaagttttccccaaaaccgttgaagaacaccgcgaagaacacctcgccgtggtcagcccgattcaggtccaatctcaccctcggtttccttgtttcaacatccttgcttgctcttgatgctcaccgacccgttaaatcgaactagaccgccatgaatcgacgggaac

SEQ ID NO: 139159 - DNA, 558 bp, Zea Mays
gaaaatgggaaaagtcatccaaaatcaccaaatagtatttataaccagaaagactgagtacaggagaggtccagagatcacaatgaatcaggtcaaaagcctgctcagcctgagaggaagaagtggtgaatgggagacgagtatgccggcctaactgacaagcatgacagagaccctcaaaatgtcccctactacatgagggatctaggctactggtaatcttggtcatggcgtcaggtccaggatgtccgagacgacgatgccaagtggtggaggaggtggtggagaccagggcaggaggcggagacgcgccggaggtggacgaccggagcgtgtagagggaccccgagctgtcacagcgggcgaggggagtcctggtggccagatccttcacagagaaaccagaggggtcaaactcaatggaacaagagttgtcagtggtgaaacgacgaacataaaggagattatgagtgatgtggggggctacgagaacgtcgttgaggtagaacggtccagggagaaccgaggcacctactgaggtgacaggcagagtggaac

SEQ ID NO: 139160 - DNA, 307 bp, Zea Mays
gacctagagttcgtagggatggtcgatagcgatggggaactcgtcttcgacacactttgcttggactcaaactcaaacccaggctccccaacgagcagagaggaaggcccccaacgataggagaaacaaaggacacttgaccatcgcgacaactgccctatcgaagggataggcgccactagcagtaccagcaaaatgggtgccacacgcggtaggagccaaagggactatcggacatgacgccttcgatgagagaccgttgtagtttgcatataggagcgggaccaaaccccatttgtaacccctc

SEQ ID NO: 139161 - DNA, 597 bp, Zea Mays
cgatcgggagatgcatttgtgaagtgaatagggactgttcttgcggcatatatggaacggtttcgcggagatggaatcgtgtgtatgagaaggaaagaaaaagaggtatagcaagagctggaactttgtgtgtcacacgcatgcatgcatggaagtggtagctagcacgggacaaaccaacccatggccatgcgtggcctcctttggaacggtttcggttaccacgcaagctgatggagtgatgggcgaggagagggatgatggcaaaagggtttggctgcgcgcgcgtttgtttggaggggcagcagagcggaactgacacggaggcgcgcagtctctcggagaggcgaaggagcgcaagcaaaacccgcctgaagaaagcaaggatatcgcaagatatacatgtcttacgcagaaagcaatcgaagcaatagtaaaacaaatctaaccatctttctgtaccggctattaggctatcttagccgcttattagtgaaccactcatcttttattctaaattgaactccgtgaattgtacagtctatacagtgtaagataatgttttgtacgacgcacgatcggctggtcatagcctct

SEQ ID NO: 139162 - DNA, 412 bp, Zea Mays
gtagtaatgtatctctactttagtattagtataacaggtacaatttatgaaagaattatgcatagttgacatggttagatcaaagcaataattcccatgcaaagcattccctaaagaatgtaattgtttgagagcagaaagttcatttatatcactaatgaagattgaatgcccatcctttgcaaataattttattccaacttttcatcacatcaccaagaggcctggagccctggacacaactttgccttttctatttcctcttatcattataaggatagcaatatcaatatataaatataacctcggcaaaacacatttgattattgtctcatgcctgaaaaatcactctataaagtgtaacattttttacctcaccaataatgaatgaaattagaaggcttgaaagtta

SEQ ID NO: 139163 - DNA, 525 bp, Zea Mays
cacaaagcaagttaggtctgcaaggtttttcttcttcttcttaaaatcagtgttctgcttggcctttggtttccagttcgtcttgtttttgtttttgccaccagatttgccttcaaccacgttggcattagaggtaccactatccattggaccaaaacggggcacatccttagatctcgccttctcctcaacatcaagagtagcaattagactttcaacagtcattgcctccttcttgtgtttgagagccatggcaaaattcctccaagtaggaggtaatttggcaatgatgccaccaaccacgaacttgttaggcaagacacagtcaaagtgtgcaagttcccccatcaaaagctggatttcatgagactgttccacgacagaatggtcatcgaccgtcctatattcatggtactgctcattaacataaaattcacgtccagcatctgattcagtatacatccggtccagggtctcccataaatcacgagccacttcgtggtgcatgtgtatgtcatatagttg

SEQ ID NO: 139164 - DNA, 741 bp, Zea Mays
gatctctctcatgttctagacggaaacctcgtgcactcacgatcatgatcatggcagagcgtttcttggctgctgccaataaatgagcacagctatcgcatctgcccggtcgatgaaaaggcaccatgcatggactgtactactactaccgtgtatgatcttgggtcctaaaaaggaccaggtatacgtgcctaccacgagcatcgcgtactagcttacaggtgcatggagtcgatcagctactccttgacccgccagccaacacagtccgtccgaactgccgcaacgtttgctctacttctctacacgtggtatatagatagcttctccaccgtgtcacgcatcttgttcgctcgtcacgcgcacattgttcacgtggccgtatttttttttactccgcatcgatgcacatgcaccccttttctgaccttgcgagtcgattgcgaggcaccgctttattggtcacgccgtagcgtttaaagtaagtacgtccgcgcatcaggaacgaaaagagttggaccaaaaaaaaatgagccatgtcctccaaggccgccgtacgtaccccgcagcgtgcaagcggttgccctcgatccggcgcgcggtaagacggggcgccatattatacgcatggtacggagtccaccatgagtgctgtactgctgctgtactgtagcgtgcgtgatgcgccgacggggggcgggccgggccgggccggagcagataaggtttggtggccagagg

SEQ ID NO: 139165 - DNA, 733 bp, Zea Mays
taagtttctccctcctcttctcatcagcctttaaataaaaccactcgtttgtccagccattaggccacttggtgcggtacccaatcacaggagccttcgtatctttttgataggcaaagttgtagcatccaaagtttctatgtagaccatctgctctcgctttggtctggaagtggagttcatggactctgtaggatccttcagcattggtactattttcctggcttcggagagcccatatgtagaaactgagcctgactatggcatttggtgtcagctgatgaagatatatctcaaatcattttaatacttcaccaatcatctcatacaatgggaatcgaagcctggcacggaataagctcttgaaaaccaccacctcattatccttcggctctggaattatttcttcacctgcgaaccttatcgagtcatcattgtcctttccaaaataaccaagcttcttcattaaaactaagtccttaggtttcactgtggatctgccaaactcgatatggttggccttgcttggactcagtatgccatcatcttcttcgtcatcacttccagcttcggcaataacattttcagcttcagcattagcattatccttctcgggaaaagttattcttcctcttgaataaccaacccagagcgcctcataacttctgaaattggagctgttttagtagccttagtctccccacccttgtttgtcagccttgaagtggatcta

SEQ ID NO: 139166 - DNA, 406 bp, Zea Mays
cagagtccagccaccatctcattgtcacccccacatccgaacaacgcgtgtcttactcttcaaaccagagaacaagccatcaccgtcgatttgagccgtaggtgagcatgccatgatcttcgacctcttcctccatcgaagtcattcttaaactatagaagttatgaccttagcatcgattaagacagctttccccatggccatcacttgcccattgaaaatatgcaaggaaaacttcgcttaaacaattgtcatataataagcataaccaagtttctagaagcttctacaatattcatgataaattataatcataagcaagacaactttctaggaacaactatggataaccatgatgtacatagccttctagaactccctacactaatcatgataagtcatggag

SEQ ID NO: 139167 - DNA, 554 bp, Zea Mays
tgccttcggttggtttatggatagcgccagaaggaaatggaaggattttaagtcaacattaaagcatcaattttttgatgaaaacatatcagatgcagacctaaaggaaagacataaaggcagagttaatgatgatgattggaagtttctcacagaatattggaggtcatctgaatctgaagtaagtataaactaatattcccattgagatcacattatttgctcttcaatagttaattgcactatgtaccttgtactcagactcgctcagaaatagcaaaagattgtcgttcaaaggtgggaaatcatcacacttcaggcagcaagagctttgcttgttctgcgcatgaactagtatgtgaaactttccatgaactttttaaaacattagtttatagatatctcagtgctgaaatttgcaaaacttgcaggctaataaactaaggcgttctccaagaagagatgaggtctatatcaagacacatacaagaaaaaatggagttccatcaagacatgcagaaccaattattgtaagttcattcctcgaagaagaa

SEQ ID NO: 139168 - DNA, 627 bp, Zea Mays
cacaaatctcttagtagtaaggttcattaaggagatccttattctacatggacttgtcaacttggtgctaatgaagataaaagaactccaaagaatgttggatgtgtaaccactatatggacctcaataggctttaccttctttgggatacctcttgccgaccaaaccatggatacactagccatgccctactctacttgattgctactcaggctaccatgagaacgccctcaagaaataagatcgagcgaagacttcatccatcatgccctttggtgcatattgttacacatgtcctttggattaaagattgttggtgccatctaccagcatgccattcaagtctacttgagtaatcagatcaggtgcaacacaaaagataatgtggatggcatggttatcaaaatctaactattgaatccttacttcaatacctaaccgaggcttccaaaaatctacgatattttggtggaagcttgatctgactaagtgcaccttcggtgtatcactagggacattactcaggtttaccatcgaccatcatgggaccaaagcgagccaaagtggaccaaggcaattactataatgcccccacaaactgtctaacatattcagaagctcattagg

SEQ ID NO: 139169 - DNA, 347 bp, Zea Mays
gcaggtcacgctgctttagaaaatcacgaaaaatccgggtggtacacccaatgggtgtatacccattgaaaagtgtacattgtcatgtccagaaatagtaaactaacatgacggggaggtgtaatgctaagtctgagcggttgacattgctttattctggtgccatgttacgtgaatttgagtcagcagtctgtcctctttcttggaaacttaagttgctattgaagtcctacgactgtttgctgaacaggtgggaaacgaagagtcgccctttgccctctttaatagtctgcttgcccttggtcgtctacctcacttgctcttgttcttatgcgctccacttctcc

SEQ ID NO: 139170 - DNA, 891 bp, Zea Mays
cacggcaaaagttaccggcgacgtgtcaaagtgtcactgaggtggcaagccccggttaatcggcggccaccgtgccatcactgtggttctgccgtggctaggctcgtcgtatgtcccttgctcatcggtcggtcggataacctcgccgtcgtcgagctgtcgtcgttgcgtgccacgtgcttaagcgctagcccttatcgtggtgactcactgggtgcatgtccggtgatcaccggagtaactgccacggtgaaagccacttattccacgcacagagctcgtctctcctccggccgccacactgctcggccgaattcgtcaccgccgctcgctacgtctataaattgaccccgccgcgagctccgtaaggtagttaagcgtccagccaccaaaaattagcctcgatcgttcaccagggtgtgcgaatttggaactttccccaaatctgcgcaagaacaccgtaggaaagacctcgccgcggccagctcaactcaggtcagtccaagtccctctgttgcttgttctagcgtccctaggccctcctaaagctcttagacccgcccaattgaattagaccgccacccatcgccgagaacgtttatgatcatccgcctcacccgcggtcaccatggtcagggcgtctctgtgtgtcgttcctgaaattaacctaggggaaacgttctctaggtcctgaatctggtttaagccgaagttgggcaccggtcatagccccaatcggccggtcctggagctcgccggacttcggccgcgcgtgaacgccgtcgtggaccttggtcagcgaagaaatagaacttggaggaccccgtgtaaactgtcagtgatacagaggaacagtgaacgaacgtgtatccagttagtctataacccgag

SEQ ID NO: 139171 - DNA, 421 bp, Zea Mays
gggaattatagcatcagaaacacattttaagccctctaagtctctagctgtgtaacagcagattatctgtaaactagatcgaaatggacgactggagaaagccttacatagtggccatcatcgtacgggtgatcatcaccggcatgttcgttatcaacaaggcagcaatggaccacggattcaacagcttcgtcttcgtcttctaccgccaggtagccgcgtctgtcctcatggtgcccatcgcagtccttctcgagaggtaactcgatcagtcacccgctggctgctggccgactaaaagccacaaaaacaatcaaaaccatgatatgcagatgtgatttgttcaatctgtggcaggagaaatgcaagatccatgtcgtccgtgttgctcttcaagatctttgtgtgcgccttgatcggg

SEQ ID NO: 139172 - DNA, 285 bp, Zea Mays
tgttgctcattttgtgaactctgattggtgtttagaaaagaggttgctcggtcttagaccaattgaggtagctcatacaggtcttaacattgttgagcgggttgaaatggttgctactgattatggaattactgataaaatctttgctattgtgctcgataatgcctcatctaacaaaactgctatggaagttctaaaaccagtattttctggttacattggccatttgattcctatgcctagtagaaatgaatatgatttgagtgctattttcttgcatcagcg

SEQ ID NO: 139173 - DNA, 680 bp, Zea Mays
ttgatttaaagcacgataatccacacaaaacctcttgcttttatccttcttctcaacaaacaatactggggaagcccatggtgacctgctaggcctaatgaaacccttagccagcaaatcatccaattgtcgcttcaattccacctgctcttttggagccatccgatacggggccttatgaataggctgcgtacccgaaatcagtttgatttcaaaagccacaccgtgctctggtggaatgcctggaagctccacgagaaacacgtcggcataatcacacaccacacggatgtactgcacccgcaaggcagtcccactctccaccaccatggagaagaaaatttccgacttccttgaccgacgatccggaagtaaatgggtcaatagggagagagtgaacttcggagaactccccaagaataccacctccctacccgatgatgcctgcaatgacattatcttccaaaaataggatataactacacgatactgagtgaaccaatccatacccaagataacatcaaacgaccccaaggaaatcaccacgagattcactgaaaagaccacatctgcaagaatgacagaacaaccatggcagactaaacagctataaatggagccattagcagaactaaccacgattgaatgacccatcctctgcactgaaagaccaacacgtg

SEQ ID NO: 139174 - DNA, 825 bp, Zea Mays
tgatcgcctagggacgttggatcggtagccaacgacccagatcaacccgggacgccagcgaacctgtaagcgctattatccgttggattaaaatccgatggccaagatcctataaaccctgatctaaccaacaccgcatgatctgagatctatggctcccgctgcccgatatctcgctcccaatccacatcgttgattagccgatcgatggtcactggcccatccgcaccccagaccagagacggcgactacacaaggtaccaggcagcggcgagcacgcggtggagccatcgccgaccgtttctaaccatgatttcgagcgcggtgcttcagtctgaagggcgatactcgaaccggaatcaagaattatgctagcagcggaattcttaccgaaaatcatgtgcgcagaatctccgtccacgatgctctgtgatttggcggcaatgtcgatcgtcggtgaagaattccccaccagaccacgacgttccccgccaaattgagggttgtcatgtctttctagcgcgctcgtgaagctccctaaccaactcccggtcactatgtggcgtcacaggcatcagacggcgacggcggatttccccttccttccgcccccctctgaagcaccaattctcttccctggcaatggcgctctgctagttggcggggttgtagatgtggagaggtagggagatggccccggcttttatcccccggccacgaatccaccgcgatggggcggcggtcgttacgcgaggccgctgcgtacagccggccacggactcgggttctgttacacggggagagggaaagagctgacgcgcgggc

SEQ ID NO: 139175 - DNA, 301 bp, Zea Mays
gtgaaattgacaagtactatgagggaggaacatgagagggcatggaagcattatggttgcacgcttatgtcggatggatggtcagatagaagggcaggcatttgatcaacttccttgtgaatagtctagaagggacatacttcttagagtctgtgtatgcatcaagtgaagttcatgatgcatttatgttagctgattaattagggaagaaaattgaagagattgggaaagaaaaagtggttcaggttatcactgataatggggctaactacaaggcagcaagtaggatacttatggagag

SEQ ID NO: 139176 - DNA, 421 bp, Zea Mays
accactctgaagctttgacagtcgatcttcggacatggtcattagaaactctaaaatcgggtatgtggaaacccttacatgattgcacccggctttcagcaaaactgaagcagtgcttcgggcgcctatccaagcataatagtcctctcgtgctgacagaacacttttgaaagcacgggtctcactaagcacccacctcatttggccctccaaatcaccatctgaaaatcttctctttagaaagagccccgacagaggagaagttttttcaacaattcattatggcatctgtgccgagggtgtgacagttggctaataggattcaatagttttcattaagtcctctcgcatgactcatttcatcttgcatcagcttcgttgtttgagcttcgtgcttttctcttactctcttcagttcgac

SEQ ID NO: 139177 - DNA, 564 bp, Zea Mays
ctcctctcctcggccgcgccttggacgcgtccgacgccgagccttcctttcgttcctctccaatcgagccaaaaggactcccgtctctttccctcctcctttctcgcctcgccccccttttccagcctaaaccccctcgcccccgcacctctttcttccccatatggccatactatcacactagactcctctcctctccgctccgcgccggcatggcctcctgttcccagcgcctctcacctaccgtgtgccagtccccctcacgcgccacgccccccctcggataactactagttgccgtaccgtgggagcgccgcctcgagtctcaccaacaacacctgctggtgcgtagccgcgcccgcgcccccgccgcggctctctggttggattcccgtgcgggatcggcgggcgaacctccgactcaccgccgcgaccgttcccgcattacaggggcgtccgtgcgtgcgtgctccggatgggggcgtcccacgacgacgaggcggggccgctggcgagcctcctggcggcgcgccgcgcgctgcgggccggcctggacaagtcgcg

SEQ ID NO: 139178 - DNA, 453 bp, Zea Mays
cttccccttacgtggtcgtcatgcagtagatatgtggaccatattagcctttgttttcctctgcggtaagcctagtaaagccacaacaatccaattacttatgccttcttgccatggtagtttgaagcccaaactgaacttggttatgttcccgtcgctcccatggcctgctcaccgtgcctaaccctccctctacacctaggttaaaccctcacccttccctagacctcttgttgctttatcaaggccggaacatgaagttctccctgtgtgtggtgaccacgccgggtcgtcggccaactgtccacctcaccgtggccaacatcttccaaggtctatctcgtccgacttgtttgtgttccttgatcatccagtggtagtgatgcttgcagagcttttcgtttgaatgctaccgtagcctgtccctaggaatgccaggccgtaaactacctt

SEQ ID NO: 139179 - DNA, 357 bp, Zea Mays
caccgttgtcttcacatggtgctgcaacgaggagggggagggtgagggtgacctcaactacaaatcgtgctggtgatgctgttggtacacatacatcgacgccgacgccgagtgcagacccatcaagtgtcggcgatgctactgctagtggcacaccatcatcaagtaccaatgctccacctgcggcagcagcaccacaatcaggtatagataatgtcattgtggaagatgatgatactgttattgttgggacgaagaggaagctgaaatctgatgtttggctagagtttgaacaagtaactgttggtggtaaattaaaagctcaatgtaattggtgtaaaaagcaattagttggag

SEQ ID NO: 139180 - DNA, 374 bp, Zea Mays
tgcaagttactatatttgagagtcggtggactttggcatattttcctcttcattcagagactcatgtttcttcaggaaacaataactcgtgtttataatgtcgtgcaatacgaaacaggttccaggtcaagggaactcgagatccgctggtatagcaggatgctgagggtcaacaccgaggatgagggagcgtggaggatgtgggaaatcaacagagggagattcacgaatgccagggagggcgccaccgcggagatccagatgcggtcgccccttcttgtcgcaaggatgatcccgtccttccgtgactccgatccaaataccgtgccgtcaaccgaacgcacgcaaagccactgaagcgcgaccggatggcg

SEQ ID NO: 139181 - DNA, 301 bp, Zea Mays
caaagatcagggtcaagtcttccactagagtctaccctctcttagtcttgaccacgatgtcatcgacgtatatctctatctatccctaatcaggtccccaaaggtcttactcatcgcccgtacaaatgtcggcaaggcgtttttcagaccgtaaggcattacaacataacagtaaagcccatccactgttacaaaagcggtatgcttcctatcttccctagacatctggatctgatggaaactagagtaagcatctaagaaggacaagaggtcacacccggaggtagaatccacgatttga

SEQ ID NO: 139182 - DNA, 700 bp, Zea Mays
ggcccaggtgtgtatcgctcacggtcctacatctccaaacccccttgtactgtactatgcaatgttgtgcttgatacaaactgaagcctaaaatgtaaagtgtacgcgttttgaagaagactgaggagctcttaagtaacaactgcttggtatgctgcagtttcaagacatagctcacaagtttcaggatgcaggaacacaagatgtacctgctcgttcgttatcttttttgctaacatttttactagcatcagtatgttacttgggtcacaagaatttctacaggtgagctcgttttcttgattaagagaataaatctcggcgcagcccctcggcgtcaaccagaagatgccacccatcactcccctctccccccttggaacaacaacatcgaaggttcctgcaaaaacggggtcgacgaccagttcccgggccctcccctgaacgtaacaagcatttaggtatatcttagcattttgttcctattagtaggttggcacataggtaatgacttttttacatgcctcaacacagttgtacaaatccattgtttcttggtttcggtatccaccccaaaacgccattcgtacataaagtgtgaaccttgaaccttgcatagagcttcatgctgagaaggagcccaatgtggtatacaaggggaagctcgaagcccagcaccacatcgttgttaagctctcca

SEQ ID NO: 139183 - DNA, 764 bp, Zea Mays
atcatcctgatccaagcacgacagtcgctgaagtcgcctcttctttcttttctcctcgataggtgcagtcggtaggttcactcgatgtggacgctttgggcaggcaccttcgggtttctgagtttccacctcttcaccaaattcttgcccagttgtgatggccatcggctcggtgcgggtagagtcggatgataccctagccagcaggctaagcacaacatctatctcagtatcatcagtgttggctggcatctcaaagtgagtatacctctcatcctcaggaagactcgaagtggagcaatcaaagcctcaatatcctcaggagagggtcgcactctatgacccagactaccgttgcgagcaggagggttggatacaaactcagagaatggcctaagtggcggtaggttccatgcagaataggccacaggagcaccagcatttgaaaccctgcccctcaagatcatgtatagtcggctcaacaaatcttcagggaatccttctgttcgtgacccgggtagaatcgttgacaccgctatataagtaagcggggtaaaccctgtcctttaaggactgaatgttcttgaatacgaagtcagcaactacgacctcagcagttagacccccatccttcagcgagcagatctcggcaagcagcactttggcctctattatctccgaagagattggagattctatccagctaggtgtgcgaacatctggctgcctccctgaccgaggggggagagatttgcagtggttct

SEQ ID NO: 139184 - DNA, 438 bp, Zea Mays
caccaacaagaaaattcctactgaggatctggtgagccgactagataatcctgaggggcaaggtaccaaatgttggtgctcctgttgcctattctgcttggaatctgccacctcataggtcatttttcaacttcgtgtccaaccctcctgctagtgatagtggtctaggtcttagagtgcgaccttctcctgaagacattgaggctctggtttctccccttcgtgattttcccaatgatgagagacaagttcactttgagatgccggcaagtccagatgatgcagaaatagatgttgtactcaatatgttggctagagaatcttctgactcggccatgctgaactgatagttgttacggttggacaagagcttaacaaaatagtggacacccgaaggcctgaggggactcgcccaaagcgtcatggccaagttagccg

SEQ ID NO: 139185 - DNA, 620 bp, Zea Mays
tcaaaatacactgataagttattcacgacaaaagtaacaatgaagcagataccccaacaggatgcctctattgacagaaacacacaggtcaaaaaggtttaacataaaagttgagaaatcttatttacctggaattggcggaccatttttactgataatgttggctgtagcatatttagtaacatagtaaggtaagctcaatctgctctctactgtcttagagatttctgcaatgaaggatgtcaaatataaatactttctgtgctatctgctatatcttcctctggtccgttgcatctcttgctatactcagaaatttctcatcaatagggtgggcatacaccatgtaccataccataacatatactagatagaactgtgatcacagagcttatttgttcttgtaaaattactaaggttgttgatttttctaaccacctataaaacctcagtccctaccccaaattgcttgaacctgttgtttttatggaaacgcagtaaattcttaaatgtttaagaaggtgctctggatgtctcaatgggcctgctcagctgccctttggtctgcagctgcaagctagttagcttatgacactggagaggtgctgtttggctcctgc

SEQ ID NO: 139186 - DNA, 788 bp, Zea Mays
cgaaaacaaatcaagtgacctcctgcaactgtatttgatataaaacgactaatcagctctgatgttctaaattgcaaattaattaagggagacgaataagataccacagttaaatcattatacaatttaccctgatttcatagcatctacaggaaattttagataatagtaaggtacagctggaggcacatggaaagcaggacagcgaccacattgtcaagagaagcacgcccccgcacaacaattggccatattcaataggacctatgtcaaattgctcaatgcaacttggagaagttctgcattataaaagagtatccatttccacgataactgtatctgtatagttctgctttaatgggacacgctacagtaaacatcaaagtttagctaggcagtatcctaaaacaaacggaatcagctcagccgtccttttctaagtgaaggagtccaagtgctactctgcaccccccgaggcccgagggcatgcggtcttttgtatggttagaaatgatttgaacgctagtaacaccatgttatgagaccatgtgagcaagaatatttgacaaaggtgcagcaaaatctgcagaactatatgtctgtatggaacatcacggtatgacgctgctaccatacggaagttttccgaaagcttggaatttcaacgacgactgcatttggaaacccaaaattccaacatatattccacagaagcatcgtgcacgattcaatcaacaacagtcatgggcaagaaaacgtaaggaagtttaatcgttggtagagcgatc

SEQ ID NO: 139187 - DNA, 292 bp, Zea Mays
cctgggggtgcattcaatcggaggtccgaggcgacggaggcagtctacccacaggcgcagcggttccgcgttcaacatccactccggcgagcaattctaagggctccggtcatctatagtctagcccgatcgatgctacgtggcttctaggtaatcgcaaatcgagcgggagtgcatacctaggatccctgagcgaaggcgagctcggccacacgtgaacgaagtcccgccccgatgacgaaatccgtgctccactcgttgtcgccagtcccatccaatcccgcccacaggg

SEQ ID NO: 139188 - DNA, 426 bp, Zea Mays
ctatgtgtttggtggcgtgtttcccccgaggccgcacactagccgtgcccacgcctcggtgcgccgtgtcttcccctccccggcgctaggccctaataaaaccgagcactatgcatgccttgcctcctcgctgcttcaccctcacctccccgcccctctttcgttgccctccttgccaacagagagcgcacgagcacccaccattgcctccatccacctacatcgcgaaatgagctcaccattgtcctcacctagtcctgtgtagtcgcacgtgtagtttccctgaagttcgatctcactggaggagccctgacactgtcactaagcacgccaagccatcatgcctgtggccagtctcctttgggttgcctccacaccaatcaaaagcaccattgtgtctaccggcgaccgctgcacatcctcgac

SEQ ID NO: 139189 - DNA, 1007 bp, Zea Mays
cacatatgcattttttaagatgtttcaaaaaaaattaacaaaaaagagaaaaaaaagtgagttacatactatctagaagtcataaaactaatatttataaaatcataggataaaacttcccattgaaaacgagttgtttcgtcaatgttttattttattttattttattttgtatgatatgtcgaccagtcataaaactctccgtcaagacttgtctaagagccatattaggatacagcggcaacttactaactagcagccaaaactatctccagcgtaccatggtaaaaaacatgtgttgaacttgaactactacggcagctttattttgcaaaccctaccatgtaatagcagctagctccatagattcctgaaacatttttagttagagcagagtttatggagctacatctgttaaattgaaacatttttaagtacagcagttccaaatagacctttaaaaggtggatgttttttagctaaacattcaactagtggttagccaactagctagctaagctaagaacacagtcgatttattaaactacacgacagatgacagaacaacaaatttcttaggtgacatcatccgatattaatacatattgatggacacactactccacgttatgtgttgctatatggtactgaatccgttcttgaatatctgtcgctctcaacaaaaaaaaagaatagagggagtagtactttccaatcgtgttttcatgttaaagttgacaagatcatcttgtgcgatcgaccacgacgttgcgtacgatcgcaagaaacaacgagataaataaataaatatcagcattgctgaatagtgacgtttcgtacgcttatcctccaataaacgactcctgcaacccaaggatcatcagtggcctactcggctttacagttcagaatgtatctcttctcccaccgggtgcgatcagccttttgtttacttactttatttatagccacgtggttcagccacgcccgcgatctgagcagtgcag

SEQ ID NO: 139190 - DNA, 552 bp, Zea Mays
atttttccattatcagctttcttcttcatgcggtcctcattaagtacattgtaaagcgtcgggatggtttgccccaactagctgaggctgtagctgtgatgcctgtgagctacaaaaaattaaaaaggaagaagtcatcggttaaatgcgtaaatttgtatctacaagatagaactgcaatcgatgaccgtttttggtcgaacgagcatatgaatctatataacaatatatatatatatagcgagaagcaatgtgctgacaataaatggatcaattgggaaaagatcagataaattcctggaatgccagatgttgagaaagcatgtcatgacattggtcttcatgaattgatggctataaaacagaactggcatgaagaaacaatcaaacagttgtactccacattgtttgtaaatgaaagtaggacctcgctgacatggatgacagacaaaaatatgaagattactgtcacaaagaagcgaaagctgcagatagggagatttgttgtcacaggacctgagaagtgcaagatcgagagactgaggagaggag

SEQ ID NO: 139191 - DNA, 464 bp, Zea Mays
actaagcctaacaattacatttggagtcggttgatgaagaaatatctcgaacttttttagcacctcagcaatcatctcgtaaaatcaggaatcgaagcctagcgcggaagaagcttttgaacaccacaacttcatcatccttcggctctggaatgatttcattgctagcaaatctaattaaattgtcatcattcttcccaatgtacccaagttttttcatcacgtccaaatcttcaactttcacagtagatttcccaaattcaatattattaggtttactcgggcaaaggacattggcatctccttcaatgtcttcaccatcagtctcaccctcgacttcagaattactttccaaagtgcacatttcttccctcagcgccacaatggtagaatccttcatcacttctaaaatcagagttgtctcagtcatatctgcctcctaaccctcgtttaccaatctaaca

SEQ ID NO: 139192 - DNA, 549 bp, Zea Mays
ataaaaactgcttcgaattgataaaatatgatctttccatggcaattaaggattttttcctgcatagatccaaaagcctgcacctagtcaatgaagcaaacatcatcctcataccaaagggggaaaatgcggatagaattgcgaggtttaggccgatcagcctaatcaacagcttcatgaaaattataacaaaaatcatggcaaataggctggctccaaggatgaacgaaattatctccagtgctcagaatgccttcatccagaaccggtcaatccacgacaattttctgtatgtgcaaagggtgattatgaacctgcataaaaagggtaatcctgctctcttcatcaagcttgatatctccaaagcttttgacaccctgaattgggcatacctcctggatgtattaagggcctacgggttctctcagaaatggcgcaattgggtggcggacattttgggatcatcctcctcaagaatagttatcaatgggcaacgttcaaatgcaatcaatcacaggtgtggggtgcgacaaggagacccactatccc

SEQ ID NO: 139193 - DNA, 720 bp, Zea Mays
tgaagaccaatcataggagaacaactttgtttaaggattcaagccatgttcttatgagaaatgtggagaaaatctcaacccaagttggacggtcaggctggttctgtctgaacatcagactaacagattcatgccctgaactttaagcccaatttcaaaccagatgcagtggctttttggggcaacatcatatggcaatattgtagatggcatattgctctacaactttgctgcagagcttggtatgagttatcatcagaaatcatgagaaaacttggcttcaagtttggctgtcaggttcatttaactgaactcctccatggtacagtgctatcgggagggtcagaccgtcagcgccaaaagatctcgccgccggtggaccgtcgccgttgatcgattgtttgctacgattcgtgcgccgtggccatggataagcacaaaccagtaaacatctcagcgtctggtccactcgagctcggtcacggctaagcatgccgtactttcccccagccgtcggtcgctcggataaccctcaccgtcgtcgtgctgtcaccgtcgcgcaccacgtgccttagcgctggctctcgtcacggtgaatcatgcggtgcatgtccggtgatcaccggagttactgccacgccataggacacgtaaccgcgcgccaaggttcctctccagctccggccgccagcacggcccggccgaattgatcaccaccgc

SEQ ID NO: 139194 - DNA, 408 bp, Zea Mays
ctagactcagagaaactcgagggttgaccgcgggttgaatacctcaaaggacaagggctcattagcaaattgacatggctgaaggggtacggttatatcctggcagttggatcaccgatctacggatcagattagatccaaaccattctgaaccggtacgcgatctcgttcctccgatcagattctaacgatgcagattttaaattctagagattccccagagccgctcgatgggagattaacgtcccagatcgcgcccaatctaagcggtattccccaactaatcctagtcgcccaaacaccgatcaacggccagcgcacatctcgctctctccgaccccgaccacggtggtgccgcaggtcactgcgacggagttcttgccgacgatcgccaaaccgcggccctcg

SEQ ID NO: 139195 - DNA, 598 bp, Zea Mays
cttctactgtgattagccaactcatgttaaataggagtcgatttcgttaagtgtttgttatacatgttgtgtctcggatttcgataataatagactagccgacgtgtgtgatgtatagcggcctatattgttgctctagttagccgaattgttagatgacttggttaagctcgtaatcacggtgaattgcttgttgtggtctaaatgtgtatggttacggtcgcgggtaaaaagtagtagtgctcatgtgatgtctaatttaaaacgcaagtgctgggtgattatcgtggtgaatgcgttgttaattggttgtagtaattttagtgcactaatgatttgaataaaatttgcaaagtcgaattgttggttctaatttgattgtcttaactcgaacaaatagtaaagcgttagagtaattcaagtctctcgaacgcggcgattcttgaattacatgtgagctgaaatttattgattgttgttttggactgcacgcactgttgtagttgtgctgtatgtttgatgaactaaatcatgttttctgtagaaaagtcatatagaagagttgtagataaccttattattttgtttgtactaaaat

SEQ ID NO: 139196 - DNA, 274 bp, Zea Mays
tgaagacttatattatgtgtaggttaaccttactagtttggatatttttcttagttgagttttggatgaagtatagtgacattggttaagcaagtatagtgttgttgttgtgctgtcagtgctctttgtggagttttggcatttcttcgatgaattgtgccacgtagaatgttattggcttcttgccggctttattgctccattagttctgtagactttctcccttttgtggggtgcaaagaatgtgagattacatgattatcttttcatgatg

SEQ ID NO: 139197 - DNA, 358 bp, Zea Mays
ctagtaccttagcaacacgaagttgcgagtacatcgaaaggtaattctgagaattttttcacaacgttggtgtgaaaaaacattgtgtgttctcgtcgaaccacttaactcggtctatctaggacctctatgcttgtgttgcatacatctctcataatttaaatacttatagccgctgaattgacttgggatagtcctttgactggtatggtatatactataaaccaaatggtaaaggtcgattctgaatagacatatatctggggtttatctagcagaactacattttatttcaccccttggcatgcttaccataatctataccttatctaccagaagtaagaagagtacaaaaata

SEQ ID NO: 139198 - DNA, 761 bp, Zea Mays
ccaacatctccactgtctctgcattcaagcgctgtcgccgatcctcaagaattctgccatacaaactaaaagtagactccgaagaagtagttgaggcaggaacagacataatgtctctagccataattgaaagaattggataggttagttttatgctcatgccaccaatttaagatatcaaaatcatcctcataggcagccacattgtcactgtcaaggtaaacagttagctcataaagacctacaccaggtccactactacctgaagaacctgatgcagttgaggatctagaagcacctgttcctccaaaaattttgccccatgcctattttctcttacctgtcatacctgattgatgtgtggttctagatagcctagcagcaccaaacttagtttcatacttggcatatagcttatacaactcagtcttaacatcagcaaaataagtactgtaattataattgttcattagagccaacagcatcactaaccgacccgacaggtgccccctcagggtcgatggcagtatgactgctaccgacaccaaaaagggcagcagcagcatctcccatgtcgtcgacgtcatcgggaagctgccctaactcaacgagctcgtcgttgatggttctagggtacccgccgttgtcgtcatcgtcatccatgtcccccttctcggcaccgtacctcaacggccctggcgacactagcacgaccacgacgtagtcggccagcgacctaccaaagcccacaagcaagcagc

SEQ ID NO: 139199 - DNA, 687 bp, Zea Mays
ggcctggctagcatcgacagtgcgtcgctcgagcacagcaccggctccaactccgtcgtctacaacggcggggtcggcgatagcaacggcgccagcgccgttggcagcggcggtggctacatgatgccgatgagcgctgccggagcaaccactacatcggcaatggtgagccacgagcagatgcatgcacgggcctacgacgaagccaagcaggctgctcagatggggtacgagagctacctggtgaacgcggagaacaatggtggcggaaggatgtctgcatgggggaccgtcgtctctgcagccgcggcggcagcagcaagcagcaacgacaacattgccgccgacgtcggccatggcggcgcgcagctcttcagtgtctggaacgacacttaagctacgcgggccggcctggctctccgaatccgaaccgatcgatgcgtcgtaaaacgtacactgacataagtaacaacacttagggttcttcatggagttgttaccagtaagttgttacttgtcatatgttttaagttctcaatttgtagctggaaggaaagctagggtttcttctgaagggtagggtgatggcttgtgaagagtgccacgcatgcacggggttttctccatgatgacggtaccttcacttgctgccattttggggttcaggttcagaagatggataccgag

SEQ ID NO: 139200 - DNA, 774 bp, Zea Mays
atccagtgcaagtttgagcatgattcccataacaaatttgtagctggtatgtagcactacaactttgatgcagagactcggggatgtttccatagaaaattgggaggaatctggccctaaatcttggctatcagacacactgaataagcatcgccatggtacagtgcctggacagatcagatcaaccgctcccctcgccgccgatgacttcgcaccgggatcgttgccgctgttaagattcgcactcactggtaaccggatagcactcggggtcgcgtaaatatcctcgccgtggatagactccggccattaaacaactccggccaccgtaccatgttcaccgcagcggaatccgataacttcaccggtgaccgccgcctttcggccttgtgccgcgtggctctgcctttccaccatgtcgccgtgactccctatagatgtcccatcgtcgctggggaggttgccacgacggtggacacgaattcactgcgccaaggttcttcttcatctccggccgccagcacggctcggccgaattgatcaccaccactcgctctccctataaattgagccctccaccagctccacaaggtcatcagctacccagtctccgagaatcgttagcaatcattcgccagagctcgcgaattttgaattcgccccaaatcagttctccgccaccccgaaacccacctcaccgtggccagccccattccggtcagttcatcctcccctctccctcgtttaagctttctcatatgtctacgatgcttg

SEQ ID NO: 139201 - DNA, 517 bp, Zea Mays
cggtccgttggtcgctaaaactgtataactttagcgacttacggttggtcactataaaggcctgtaagaactgatggtgagtcgctatagagacaagttaaataatggatatacaacgacacattgacattacgctacaaaccctatcatctccgctcacacttacacttatagtgtcacgcttgtggccgacggtgtgctcatggtgcctccctctccatctccaacctccgacgcgctggctctatctccatctctcgtctctatcgctgtggccgtacctcaaccccccattcccaagagttgcacagtgcatagccccacgctccaacccgacaccctgcctaccccatgcggcgatttccgtcgtcgcttggccgcaccctactccagcaacctaccctgcctccctctatcagcccctccctgcctcttgcggttcaaccatggccaggtcctcacgcgggcatgcggtcccgtggctggtggcggctccctctccaactatgcctctcca

SEQ ID NO: 139202 - DNA, 544 bp, Zea Mays
ataacttttctgtcgactctgagcttcaagtaattttttgcggatcagggcaactttctcttcagcctctttaacgaaggcaggtccttccaatgtcttttcccctacgttggaccacattagggggtctagcactttcgtccatacaatgcttcgaatggtgacatcttgatactggcctgatggctgttgttatatgagaattcggcatacggcaaactggactcccagtttctgtcgaacgtcaacacacatgctcttagtagatcctcgaggaccttgttgaccctttccgtctgaccatctgactgggggtggtaggcggtgctgaaatctaacttggtgcccatagcttgctgaaggctcttccaaaattttgaagtaaactgtgtccctctgtctgacactatcttccgagggataccatggagtctgactatttctttaagatatatccgggcaagggtggctcctccaaaggtggttttcactgggatgaagtgggctaccttggtaagacggtgttggggacttgttctcaaat

SEQ ID NO: 139203 - DNA, 485 bp, Zea Mays
gttggatttatgtgggaatgtcaaaggcttggccggtatttctcaggactgtcgttggatttatgtgggaatgtcgaaggcttgcccggatcaggatcgttttttatatgggctactgtgtagctgccaaagcataggactaaggctcagttctagttgtggtcgttcttgctggacatgtgttctctggcatggtcaaggagactgagcttgagtctatcttcttctaactgattcgcgccgtgattgggagcgtaaatccttatctcagatcacaaggacgctgtataaatagtggtagcatcggcacggaagtcaatgcttcctgcctttgtaaacactagcccctatattacgtaggtcctaatcaacttgtgccctttagtgtccgcgtattctcctctaaccatgtcattggtttagccaagtgcacccactgcatcacccatcgaaacccccacatatcctagctatgcaggaacgag

SEQ ID NO: 139204 - DNA, 730 bp, Zea Mays
tttgtgtttttgaagcctcggcgattttccctgaaggagtggagcttaaagcctttactgtttctaacacatctagtatatttgccatccttcttcttttgggagttgctgcaaaacttttttgtgtcttcggcactgttactttctgccgaagggcttaaaatttctaacatttttgttccttcaatttttggctcttcagccttatctttatcagtcttcgactcagctagctcggctaacggtaccttcggcattatagccggatcttcaaccttctgcgtaggaggaatgggctcttttggttcagcagctgaagaagtctccccgccaaactcaggcaccacggccggttcaatataacgttgccggtgggtaagggctttcaactttttgctcttcggcgcaggctcatctggagtggccgaagcagcagttttcctcttcttgccccgtccccgcagtgggtagcagtagtcggggtaaacaaaaccaatggcatcaaaaactctgttcaatatttttttccccggcccccgaaggatgtggataatgcattatcttctactttggaatatggcccaaggagttcatcgcttgtagcttcgatacatttcagtcagtcatcatttggttcatcaatattatctccatatctgaaggtgtatttcagtcgaaccaagacaccttcgctagactcggtgacagtctccttcggcatttcccagtt

SEQ ID NO: 139205 - DNA, 712 bp, Zea Mays
agagatctgtggtgaggatttaattaaagcgagatctaaccgtgcccgcacgatgtggatccaacggtcaagactccaagccgcaaggggtatgccatgatctattctacaccgaccatttccagatcaccggtctaagaagcgtctccttccttgagtcacgccgcggcctagcgagcacccggtaggggcgttcaacaccgccggcgcgcccgatcgctgcatctgcgcccacggactcaattgcgcagcccgcaaatggatcgagaacttgactaccctgatttcgaccgccctcttcccccgcgatgatcctgcccccaagcctgatggcacatgctacgcgcggtaagggcggaggttcagagggtcacataccagaagacgtcgcacgagcccgacggtgtacgcggaggacgatgatggccgccggtggtctgacacgtcgagatccgttcgtccatggttgctacggcggaggcgagaagggccagtgcgtcgagtactaatggaaaggacctgggcaccgcttgctggagatcggaatccacaaccatggcgtggatggtccgggtttgtgcgctgacctgatgggagaaggggtctaggggggtgcttatatgcacggatgaagccgcgagggcggcgggcggaacagcccaggaatccggcaagcgcgcagctagcacgcggtagtttcgccgccgaagtc

SEQ ID NO: 139206 - DNA, 462 bp, Zea Mays
cactcggacaccctcgggggctgggtcatagctcgcgctacccatccgagccggatcatctccggcaacaccctcgggggctgggcaagcgctagcgccatccttgagggtcgagccctctgtaacagccacctctaaggctgaaggaccttcaaccacttccatgggagcagagcaatccagaccagcctcctgacccttaagaccgcgctccaaggtcgatgaggcacgggacgccgctcgggataactccaacccggcatcaggcacatcagcacaaatatccatcatcccaccatctgtcggctccgacaacagatcctctgggaccatatcttcgagagtctgatcaaaattttccagagacaattcttgcagaccaacgagggcagacaaagctggggaaggaacaccactactctccccgctggctatgtagcgccggctgttcttccaaattag

SEQ ID NO: 139207 - DNA, 308 bp, Zea Mays
accaaaacaagctagattttcatttttccctagtttgtttgcgtcttgttgcacttggctattatgaacatgttgcttctagcttaaaaaaactagaccagcgggaggagacatctcctaggcattttaactaaaacatagcgtcagagcctagactcttgatgtgtttggttgaaggaggatgagatgtgttgggtccgatacgtgggcagaagcactcgagagcaggtgagagcgacaatgcatgacaaaatgggaggctagattgcttgggtgtcttgtcaagcacgtcctgttcgtggacgtga

SEQ ID NO: 139208 - DNA, 450 bp, Zea Mays
tttaaaggctggtatcagataaacatcaaggtaagatatagaggtgataagggtaaaggtggtaatgatgaaaagcataatcatggacagagttaaggcaatactgataaagtggagaaaacaagcaagggtaagataggtaaggttccaacaaaatggttgaagtaaagaaaattaattaccaagtggagttacaaggagacaacgagattagcaaggatatgcaaaataaaatgaccgctcatggatcattaagaaacaatggtggtcaagggcacgttaactgaaatgtcttaaacagatattgagatataaaggtaagcacatataaaaataagagtatgcaagattccaatggtacgggcataccaagacgaagagagtacaaattgccaaaagatagcgacttaacaatagaataggaaagggtctcaaaagacaagaaggtca

SEQ ID NO: 139209 - DNA, 993 bp, Zea Mays
aacgggttgtgttttacttgcgaggacaagttcgagccagggcatcaaaacaaatgtcctaagaaggtacaaatgcagttgaatgttctgtcaactgatgaactgaagatgactttgacagacgaagtgctggacagattggagcaggaggagctggtaggagaggagtgtttcaagttgtcgttgcatgcaatcagtggcactacggctgaatattgtatgggggttagggcactgttgcagaaccaagtgttactgatactagtggactcaggaagttcgactagtttcattagctagactatggtggatcgagtaggattacccacacaacagtgttcattggcgaaggttaaagtggcaaatggggagatcttgaaaagtgttagtggtaaaatcgatggaatggtgggctaatggacacacctatagaaatgacatgagggtgctggagttaggagcttatgatgcaatattgggatatgattggttaagaagacatagtcctatgcaatgtgattgggaagggaagatcataagctttgaggataatggggaggaggttcagttgatgggaactgttggtcagcaggaagaggtgatgggaatttctacggtgcaattggagaagatgataaagggtaatgatatttgggcttttgtagtattggagacagtcacagaagtggaacagttcaatgaaggagaattacattttttactggaggaatataaagatgtgtttgatgctccaacatctttgcctccatcaagaccattcgatcatcatattccactactcccagatgctataccggtgaactccaagccctatcgatattcaccattccacaaaactgaaatagagaagcaagtctctgagcttttgaaaagtggacttataattcccaatgtcagtccatttgcttcaccagtattgttggtgcaaaagaaagatgggtcatggcgattttgtgtggactacagaaaatt

SEQ ID NO: 139210 - DNA, 648 bp, Zea Mays
caacgttttaccctaggtagagctacatgtacttatgggcccgaggctgcctagttttctcgtatttactgtggcggatgacgtgggggcggcgatgatcccagacagtggcggacgcagggggtgggcaataggggccactgccctaccttgatttctataaactcttatacatagacttagatatataatgaaataaataaatttttatatagtaggttggactaaatttaatgaagactagactttgatctaactttttctcggtgcttcactacttagcccgctccccacctgaatcgtggtgcttgtcgtcacgtcgggatcctgcaccagtacaactattttgccttctaatccgcaccggcggatggatatgatattagtgaaattctaccttggcatcacaacaccactcgccctcgctatctcataagggtcccatcacaacgcgacaatggctgtcgcttgctaccaccgccttttgccttgtcgtggccatctatcgtcgcatcgtcgcctgcactcgctatcccacgcctattgtcgcctcaccgtcgtcattttgtggtggagtcgctgactctccacaccgacatgctgatgcgcccgctttgccctaacgtccagtccgcgccggttcatccc

SEQ ID NO: 139211 - DNA, 537 bp, Zea Mays
atcgatattctggaccaaactattatgtctgactgcaagccttgctccactcctattgacacacatgtgaaggtctccgacgacaatggcaccacggtcagcaacgtgactacctaccgaagcctcattggggctctatgctaccttaacttcacctggtttgacatctcctacagggtccaacaggtgtgccttcacatgcacacaccatgggagccccacctcaccgctgccaagtgaattcttcgctaccttcgcgtcactcttcttcggtcctgtccaatttctaagttggtcatctacaccaatattgattgggtggtctaccccgacacgcgcttgtccacctctggctacgttgtgttcctaggtgccaaccttgtatcctggccctggaagcgacagcttgtcctctcatgctccaacgttgaggtcaagtatcatgttatgaccaatgaagtggctgaggcatcctggctccatcagttgctctaggatctccacaaccccctagtgcacaccacgctcgtctactac

SEQ ID NO: 139212 - DNA, 453 bp, Zea Mays
gctaagcttgagaagggtgctgctctgcgaggtggttaagatcgcgtgaaccgtgtttttatcttgatggggctcgagtatgaggagcacaaggccaagccaaagagggggagtaggacgtcgactggggtccctgcccagtcgcaaacgtcgactgagactccgtcggtctgctcgaaggaggtgaatgcagcggttgcctctgaagccttcgtcgtgaatcttgccacaatgagcaagccgccccggtcattggacaatgcaggagttcaagctgcggaggacttcgttgaacaagtcacaagggtaagttaggaaaagatttgattccaatgagggttggcttgggtagcacgaaatggtgggtggtgagagatgtgaccgcgacattcggctgcgaggatgtggcgctggctcgcatggcaagggagttgcttatcttcccttactcgc

SEQ ID NO: 139213 - DNA, 499 bp, Zea Mays
cggtgaatgtcgcgcccccgtgatgcactggcgtcgctacctcaactcctttcggtgcgaaaatagggcagcagcatccccggataacaaacctcccctctttccccgtgatcctatctgatatccttctcgagtcggactcaccgctgagaacagaatccgcgcaaatgtcgcgggcaccaacaaatcgcgtgatcttctcctcaccatgcgctcgtccaacctcgatctctgggtatataaacaagtcgtctgcgctcctcctttgggccatggttcagctggggtgaatggagctaaggatggcgccgccgcaggaggggaaaccattatacctggcgttgggcgatcggaatcgaccgggggcaatcactggtcctctctgatgctcatcgcggcttctcctgggcggaatcacactctggaccaccggaatgcctcgccggagtgggaactccgccatgctgtcgcgcgtaccgtgggcagtagtcgtcgcggc

SEQ ID NO: 139214 - DNA, 832 bp, Zea Mays
gaggtccttttacctctttgtgctaaggagtagaggcattggaaccattgtgccctttcttttctcgtaactcgaaagggactcaatcttagcaatctatctttcaagttcttactaacttgaggataatattggtgtctgatgcaccgatttatctttgtttgattgttcttttaacagaggagtttttaaaaaaggattaactgaggaccttgcatcgcacttccagtcagtgtttttaaggcgtcgcttaggcggccagacgcttgaagaattatgctcgcctaggcgtccaggtggcagtccaacgcctcgcctcgccttaccgccttaagaacactgcttccagtattgccttcaagcacgatcacaaacaatttggcatggtaatacataaaaattgcatactattatcgacactgttcttttactatttctgcactcatgtgattcatcatgtcattgtaatttcagaaccagtctagcacccactgtttaaaaggcgtcgcctaggcgtcgcctaggcgtccaggctacgagtggagctaggcgtcggcgccgcccaggtaaaaatgcgtatggcgtccgccttggcgaggtaggcgtccgccttagcgtagtaggcgtccgagcgacgccttagcctccctgggcgacgccttagcatctagggtttgtattgggctagggtttgtattgggctagggtttgtactgggcctcgcgttttgggctttctgtgcgcgcgcggctctccctgggcgccgcaaatttggctccctcttccctgcgcgcgacaaactcttccctgcgcgcggcaaatctgtctgctc

SEQ ID NO: 139215 - DNA, 273 bp, Zea Mays
caggcctattcactccccctcaaattgtaacttaaggaatcatcatgtagtacatttgtacttgaatactcaagggtgataacaaacttaccatgtccaatcacatcccattttgagtggactctaaagacaatatttccatttgtggatggcattagtgaataagatgaaaacatactctttcctctagccatgtgatttgtacatccgctatcaaacatccaacttgatccactagaggagtattcctgcaatcacaagtttagtttctag

SEQ ID NO: 139216 - DNA, 692 bp, Zea Mays
caaaaggggtgatagtgtctctaacaatgggacgagacatcgccacgcacggcctcagtatcccttgactctgtctagtggtagtggggtcttgccaggcgtcgctacaaaggatctcagcaccagagtcgctacagtaacctgtatactagttagatggggggattgccaaactaggcgtatgactatgcatgaaccagaatacgacatctggtgaacaacgtcagcaagactactttagacaataggtcgcgtcctccttcggacaacaagtacccttgtaagaaccccccttgaactgtaaaagggggactctcctcttattctcacacgagcaccctttgtaatgtgatccttagagcaatactcgagcaccctttgtaatgcaatccttagagcaatactacgatcaacagtacactgactagggcacaagcctgaaccactataaactccctattcgaatcccttgatttaccattcggggtgagtccacgctagcctcccacaccgaacacaaattctattgtgtccctagtgcccgaaacaacgatagttgcacctcaatttctatgattttttagcctttcttctcgatacatgttgtagttgcaacatctattaatgcagcacttgttgtcgatccttcaaatgcagactttagtgtctcagaggcttcagccatggtgtcc

SEQ ID NO: 139217 - DNA, 428 bp, Zea Mays
tttcgttttatttttacatgatatagcaactgaattttggtcggttgcatccatcgattagaccaatcctagccaatagtaggacatgacttctattcatttcaccatagcagtttcatcaccatttcctatgataacaatttgtaaatccaataagcaattggcagtttatctgcagaactcaactgaagcgtactatccccagggtcttccctaatccctaccaaataacaaaaacaaatacttctaattgcacaacatagatggtgttcattcccatggaactccatctcaaactcccagcctcaacccttaacaaaagccctacaagtcaatcgagacgctttaaaccctagaagcatcatcccctcctgattcagaataggacaaacagtagcatatttgagcaataacatgcaataggagca

SEQ ID NO: 139218 - DNA, 278 bp, Zea Mays
gaccgatacggagtaccacctgacgacctggtcaaccatgatgtgcatatgaagtggtcggagttggtgcgtgtgatgctggtgggtggtgctaggcatgctccattcctccctgtgttcctactgactgactgatgctgcagagatcctgctctgctcttcaccattgtgatgcactggagtaaccaaacaatagagagtataaagtcatgatgagcgaagatgatgtatctgtcttccactgaaaagtgcaattgccgctcagaacaaaattcggg

SEQ ID NO: 139219 - DNA, 501 bp, Zea Mays
actagttgaggtagatggctctcagctggacatcaccctgctctgtgcttcattgcttctattgattagactcacgcttcagtagccacatttggatttcgttccatcttagacgatctccttcttttgtcgtggtacattcattgcgtatattttgtggatatcacttcttcagaaaatctttgaaaatcctgggcgacacacccaatgggcgtgcccaaggggtgtcttggtgtgcagagtgtttatcatggtgttctggagtagtaacttgatgtgacggagaggtgtaatcattttcctgagcagttgacttaggtccaaccggtgccgtgttatgcgaagcggcgcctgttgcctcactcattttcaggcggcttgaattgcttattgaatacttgtgactgttcggcgagtggggtaggaagtggacggtcacccccggcctctataaatagtctgcttgccccgactgttctcttcacttgttctttgatcgcc

SEQ ID NO: 139220 - DNA, 850 bp, Zea Mays
cttttacaccggctacatattgagccgagcctttagaacattgcaaaagaagcttcaccacctctaaatccattatgaaactataaaaaatactgatgttaattctactataaataatctaaaacttatttctcaattgtattagtatattgatttctagatgtctacaagtaacacaataatagctcaaaattctatttacccagctagtctatacataaacaaatatcatgttttagatatgttcagaaaattttccataccttactcttctgattgttagaaagtcgataaataatggtactagttcaacctttcatgcactccctaagaaactgagacccggatactggttcgaagcgcatccctagtgttcgtcgatcggaggcaacaagaagaggaaatcaagaaacgtaccggatgatgattggcttctccccctctgacttatgtcgttgtgctgctaggaactatgcagggaactatccagaatatccatgccaccaggaacttcgatgaagggaagaggagctatggcacacagagacgaagagaagatgagcgagggcgcacagagacaaagggaatagcgagggcacactgacctccctaagatctgcgacggcgcacaggacctttgcctgactctatgacaacggggaagaaaccacaagcggcgaggaatcaaatggggagacgagcagagggggaagaaggaagagctcaggtggaaccctagcgtacctccggtgtgggacctggatccgttttggaagaagaacgggaatggccggatggggctcctacgggccaggtcgggctccaccgcgttaagaagattgaataagta

SEQ ID NO: 139221 - DNA, 594 bp, Zea Mays
cccaatgactgttcaaggtatttcagttaacatgtccttgaccacccttgtttcttaatgatccatgagcggtcattttattttgcgcatccatggtaatctcgttgtttcattgtaacttccttcgataatgattttttacttcaactcttacgtcggaacctcgcttagcttatccttgattgttttctccatttcgtcactttgggagtcttgccttaactctgtccatggattatgcttttcatcattatcacctttactcttatcacctcttttaccttgatgtttatcttataccggccctttaaaacctctttttccatctcaatctgagtgtggtgctttgcctacttttcccttggtcgtatcctcttcctcatcgcttgtgagctttcaactcccccctttttgtgcctctgtttagtgtttccttgatctttcccatctctcgaccataccccggtgattgcattatgtctgttatctaaaatttccaatctccaatctcctatcccaatttgagagcggtgttctgcttatcccacccttggcaatatcctcttcttcacctcgtgcaagcctggacgtaac

SEQ ID NO: 139222 - DNA, 313 bp, Zea Mays
ggcaattgacagtatcctaatgaagcaacacaacaagtgaaggatcacacatgtagtgccttcttcagaaatgtgcaaaatcatgttgacatgaaaagataggaaacatgtgatcgatattgccacttgatcaatggctattagatcgattcacagcatggccaacgacataaataaacagtccaatcatgagcaagctttggaatatctcaagatcaactaaactataatgatactcacagaatgaaatgcatttttgatgtcatcctatgatgcatccttgggaacgtcaggaattttgtagtagaccttg

SEQ ID NO: 139223 - DNA, 584 bp, Zea Mays
ttcaactgttctgctatcttctctcatttcagctcttcagtcggatttgtactagcctcaactggcacagcataacctggctctatggcaggagtgacccctgcacgctcaataagcttcagcacatcggccgtctcaatacgtcgtggtctatgtgtcaaaactttctctttctttgccttcggcgcactagaagacgccgaagcggcagttttccttttccccttttgtttccgagcagaaaaacagtagttagggtaaacaaacccgataacatcaaaaaccatattcaatctcttttccctcgagtgtcgaaggccattgtcatagcttcgtcttcagcccttgagtaggccccaagcagctcatcacttgttgcttctatggcatccaaccaatcattattcggctcgtcaaaccgatccctaaaccgaaatgtgtacttcagatagattagaccactttggccggagccagcggcagcctcctttgacatttcccatccactcgcaaggggccatactctgtaagcaatatgcgcttgaatcaaatcccttgtgtcgatgtaggtgcatacggtattg

SEQ ID NO: 139224 - DNA, 392 bp, Zea Mays
aagtagtccaagagggcacactcacaaacacgagaatacattaagctaaaaaaacaacaaaaaccctcccacttacttatacggaaatgcaggagaaaaggcgaacacctagatgctgtggaccctccacaaaatcagcgcgagggatcccctttaggccaatggtcaccttggccaaagagaatctttgtgattttgtgcaggaccccgctacttggggcaaggcgtgaaagaatgcgcgctagaggtcaatccagtaataagcaagatcgttagcctggtcggcacactacctgggctcaacacgacaagcgggtcgttccacgtccaatcaggccatccacgcctagcaaaataatgatgaccatcccacctcaccacgtcgagcaaaa

SEQ ID NO: 139225 - DNA, 479 bp, Zea Mays
gccaatcagtcaaactttggccccacctgcaggctcgtatcctcccctaaggcgggcccgggggccactgtcggtaccctaaatcaggggtaccccttactacagtatgaagacacggtgcccgtacgacgatctctagccgcacggagaacagcacccgaccctgccacgtggacagctcaaggggcaccacatggcgagaaaacaagaagcatcccaggatgtaccagttggatcggacctccgcgaggaagcaccggacccctgtacgcgcaacccggacccccgattacggtccgggactcccaagtaagcatgccgggtcccttggatggggtccagatccctccgagtaaggtccgggccacaacggggtcccgagacaggggataccctggcataagcaagggtccggtactgacacgtgtcaggccttatcctatgcgcttgcgctccccgctcaggcggagacccgctgc

SEQ ID NO: 139226 - DNA, 506 bp, Zea Mays
cgacgtgttctaccacgtcattggcacaccagccgtccgcaacccagagggcttacaagtaaccaacgacgccgaaggccatcgcatcgtcaacctcattatgactgaagattggcgagccccaataaccctttttctgcaaggatattaccacccaactaacgtcaatgaggctaagcgcctcatgcaccaaagccgggacttcgtactaatcgagggccagctatacaagaaggggatcagtcaacccatgctaaaatgcgtgactgaaaccgaaggcattcaaatcctccgcgaagtccacagcggaacttgcggctcccactcagggcccagggccctcgctaccaaggtgatccgtcaaggattttactggcccgcaataatctgtgccgcgaatcaagtcacgaggtcctatgaagcctacccgaaattttctccccgctcgagcaacccttcgcagttcaccaagctgatcgcccacatgtggccacttcaacgctggg

SEQ ID NO: 139227 - DNA, 797 bp, Zea Mays
ggagagtcgtataggacgtagagagagagatggagagtcgtatagaacgtatagagagggagagagggagagtcatatagaacatagagagatggagagtcgtatagaacgtatagagagggagagtcatatagaacgtagagagagatggagagtcgtatagaacgtatagagatgaagagaggaggattcatataggacgtagagagggagagatggagagtcgtatagaacgtataggaggagtcgtataggacgtagagagagagagatggagagtcgtaggcagtcgcttgatgtgcggcccacatgctgtgtgaagggaaggggtgccaagtaggctcgcccgctactctccgtgtgtccttctcacccgtctgcatctctttacttagtcttttttccgcgtctcactaaaaaaccatatcagagatcatgtgctaattctaatcacaattcaagaaataaatgctaaacgtacaccgtgaaggcgattatgaccacggtaacacggtaactatggcagaggaaatggcgttgtatgcatgcttctcatttgtgcgagtggcaactaagtaaacaaattgaggaaatgtcgttcggtgtacagtaatactttctatacactccctctccctcctctctcttctctctctccctccctccactctctttcctctctcttccctttcctctctcctctcctctctcttccatctccctcctctctcttccctctccctctctcctctctctctccctccctccactctctttcctctctcttccctttccct

SEQ ID NO: 139228 - DNA, 315 bp, Zea Mays
tgggagtagtttttcagattttgactacatgcagatctccagactggataattcatgaaggcaacgcatgcatgtgggctccacatgagatttctcctccacgcacgtcatgggactatgggagtcggcatgcagcatgcaagcggagcccacgcgcaccaggcggtttcttcctggttcctagaattgtgcgctggatgtggacgtgaggaggctttgcatggcgctgcagcagagggcgagagggttgtccggccagaccttaggcgaccacggccagctgaagaagggcagaggagtctggggcatgctgca

SEQ ID NO: 139229 - DNA, 557 bp, Zea Mays
aaaatgcggattatgttttgagaaatgcatcgatgtgtgtttatatgaaaagtataattgttttacgcaatgtgatgggattcgtgattttagaggggatatatttattgatgtgacgagtagtttagaaaatgctagttgcgtggaggatgtattgttaagacatgagtgtcagagttcatatactagtggttacgctacgatgatcgaagtgtctcgagtgcacgccaccatatggttgtatgcgagacagggttatgcgcatgatgagtttagtaaaaatccactggtgtcactggtgttaagttgaggtttaattacgcgtggaaagtaataatgggtttaatacttagaactcttagtcgatagtaaaaattgttttggtttatatagacaggtggtgacatgcccaagtagttgccgctttctctatatttataagtctagtcgagacgatgcgtattgtgcgttcgataaattaggcttcgcatatagtgtatgattgtgctcacgattttgagcggacactccaagtaagtcaggtaggtttgtgatac

SEQ ID NO: 139230 - DNA, 628 bp, Zea Mays
gtgagtttatatggctcataattttatatgtttatgcgcaccgtgtttgtattcggatgagcttatagttttacgagattaccacaaatatattaatatgattatggtgtactcgaaagaatgagtttcagcaaaaaaaaaaaaaacccaacagtgaataagacgcaaagtcttttactttacatcgaagcaatctgctcaaaacaaaattagcgcgcaggggactgatggttcacatcagggattgctaatgcctatctatagaggacttcaatcgtttggcaggctagcataaattcataattcatatattgaaattgttctattttgataataaaagaatatcggtggttcttggagaggtactgtaatagttgatggttcatataaaatcagtggcatgtatttttctattaaaatgtcaataccgaggttgtgttggtgtacacaagttgaagaataaaaggaaaattgagaaaggaaggtagttatggtggttggaagaaaaatgatattttatagtgtaagtgggttttagaggggtgatataagggaaaccgttgcggatgatagtgaaatgcggcgaaagagaatgctggtgtggagggcaaattggaaataggggata

SEQ ID NO: 139231 - DNA, 279 bp, Zea Mays
agctgtagccacatgaagcaactgtagttgtcgactagcaacaagtagtacatccgccctccgtgtgttgctagagtcattggctcgcagaggtcgctgtggacgagcttcaacatgtcgctggagcaatacttggtcgccttgggtaagggtagcctcccttgttccccattaggcacctgtcacacagttcgcagccttgggtaagggtagcctcccttgttccccatcaggcacctgtcacacaatttgcagatatgcttgatgtgccggagccca

SEQ ID NO: 139232 - DNA, 661 bp, Zea Mays
gtttctccttgcgaataatacccttgtgcagccaataaccagcctcatctggactctgaacgcacaactgagctagcagaatttgagcttcagaatcagtctcgtaggagttcagtatctcctgaatccagaggggctgaacttcagtaatagcctgcaaggacatcaactgacccacccgagacaaagcgtctgccaccaaattctccttgcccggcttgtaaaccactttaaactgtaaacccatgagttttgccattgccttgcgctgtaattcagaatgcaacacctgatcacccaggaaactcaaggacttgtggtctgtacgaatctcaaattcggccctctgtaaatacggtctccacttatccactgccatgatcagtgctaaaaactcctcataaatagataggtgtctgttctttagtcccagagctttactcaaataagccaaaggtctcccttgttgcataaggactgcccccaatccatcatcacacgcgtcagtctcaatcacaaatggaagagcaaaatcagggagtgcgaggactggtgtcactgacatagcgtgcttcaaagcttcaaaagctttctgtgcatcctcagtccaccgatactcatttttctgcagcagcctcgtaagaggtttagcaattactcc

SEQ ID NO: 139233 - DNA, 496 bp, Zea Mays
ctgaaggatgggggtctaactgctgaaactgtggttgatgacttcgtcttcaaaaacattcaagccttgaaggacatgatttaccttgcctacttgtatagcggcatcaatgattccacccgggttacaaacaggaggattcctaatgaagacttgctgagccaactggacatgattttgaggggcagagtctcaaatgttggtgctcctatggcctattctgcgtggaacccgctgccaaataggccattctctgaatttgtctccaaccctcctcctcatgacggtagcctaggtcatagagtgcgaccctctcctgaggacattgaggccttgattgctccacttcggagtcttcctgaggatgagaggcaaactcacttcgagatgccagccaacactgatgatgctaagatggatgccatgcttagcctgctggctggggaatcgtccgactctacccacactgagccgatggccatcacgactaggcaag

SEQ ID NO: 139234 - DNA, 430 bp, Zea Mays
gtctttttcaatttatcgcattgcttgccttttcaaaatgcttacaattctctttttctttgctcccccagcttcttcatcaagcctttcatagtccggatactcaaagccaagggtgtccattacccggttcagccttcgtttctgccgagtaccgaaggcagctgtcatcaattgatcctttttcttcgtatagttcccaaggatctcattgcacattttctctatcatttccaaccattaggcacagcggtcgctgaaagtgttctaaaacttgaaccggtatggcaatcgaacaagctcaaattttttcccttcttccatcttctccggcattccccatccaccaaatgttggaaaggttttgttagccagatattcttccaccaaatctcgagtacaaatgtgctctgtcacaactctaaattcc

SEQ ID NO: 139235 - DNA, 400 bp, Zea Mays
gttgggcaagccttcacagggcatcagggtcccccggaggcatcgccgtatgggaatggagaaacacttgtgctgatccagctaaacccttaggcagctttttcttggatagaaacatgtgtctcttggacgacttcacacccttaggtgttgtgatgcacttgttttgttgatccagctgcacccttaggcgacttttgcttggatagaaatgtgcgtctctcagacgactccgcacccttaggtgtcgtgatgcacttgttgagttgatccagctacacccttagacgactttcacttggatagaaatgtgcgtctcttggacgacttcatacccttaggtgtcgtgatgcacttgttgtgctgatccagctgtacccttaggcggtttttgcttgga

SEQ ID NO: 139236 - DNA, 545 bp, Zea Mays
caatgcttttgggaactgttctgagcttactaagacctaatctggtgcctgcaacagtaattttgatagcttccagttcaagacttgaagtttgaagcaggtccacgtttaggcctttagtctgaaaaagatctacaggcagagaagtgtagctcttaatgctaagtaaaaatataaagacacttggaactgatgagttgtttgtcatgttcagtatttgcactctgcgctactgagaaaacttctatccacgtaagtaaaagattggaatgccatagcttaataactttcttgtgatacaaagatgtgaacaattgattgtacacacaagactaccgaagcaagagcaaggtaaaaaaaatcgctcaggtagtccatactggttccatacaatgtgtcacctgagacaactcgatcagtgcaatcctgtgatttggacttgtgaccactagctccatgcaaacgaacaatcacaagagcagtagcctcttcgcagagaacgattccgaagacagtgcgaaggccaatcctagggcaaaatctac

SEQ ID NO: 139237 - DNA, 491 bp, Zea Mays
aagtccagatttgttgtgatatcttacccgtttcttgcaatatcttgttggacttcgcctaggataaggtctagccctcctcccatgtaaatatgaaggggtatgaccgattaagaacatacacaatcgaatcgaaataatctatttacattacttatcttcatgcattagatttagatgtagcttagctttagttgtagttccccaatctcaatcttcacttttcttcggctctaagtcatctagaggcgctttgagtggcctaccaaccccgaagtaaacctatgatccgtcctctctgatggggtcactccccggaggcaagatctaggttctacactatgtattgcggacgattcatgcacttgtagagaagagtgtagttatctacgcgcacgacggacggtctggtgacctaatgcagaattgcagacaatatggtgaccgaccatggacagtacatcaccccgcagagccaaccccgaggttct

SEQ ID NO: 139238 - DNA, 336 bp, Zea Mays
acgataactcctggcgccacacgctccaataacccaaccagccggccctatatgatcgcggggcaaggccgccatccctttacctggtgaccccgagtgactccagcgccgtcatgagttcttcatcgccgtgcagtgagggtcgagcaatcgaagggaggggtccttgcgtggtcttccagttttgtggccgtaccgatcgagcgcggtatccctgggccacctggtgtcatcgccggtgtccataccctcggccgggtcgctggtcaacaggggcgggccgctcctcctgtcgcgccagatctcggtgagcaatgcttcctctccgtgtgcttt

SEQ ID NO: 139239 - DNA, 372 bp, Zea Mays
gtccgaacctcgaacagttcataagagtagcctggacggttcaagattagattagtttaaactggagttcttattccttacatggttatcttaacaactcacggaaaactgttggttttcgcctaggaatgggtacaaacccccatgtatatatacacgaaggagtatggccgattaaaacacacaacaatcgatatatcaaacctattttacctcatgcattagatcacggagccctctgtgcctcgcggacggtccaccacctccccgtagacggtccgtgcactcacagagaagaatgaagctctttatgaagagtcgcacatattttggtggcctacaacggacgtttacgctcccaatgagagatcc

SEQ ID NO: 139240 - DNA, 498 bp, Zea Mays
cagtatccactatttcgcgcagccctgacaaacctaggtttggaagtgttttattcaaaaccagcagcctaataaccctagactctataacgaaattgtatccggtagagaggagcaaatcagctgaagtgggtgatgcttcgagctctccattttgtccctagcgcacctgcatggaactcagatcacattcgccaggtggtgcacgcccagacacgtggtcgtcgtgccctgtagcgcacatcgcgttgcctccgagtgtgggcaagctctcagccgcatactcctcatttcatcgagcgcatgcccatctccactccttcctgcactcgccactctttcccctcgcgctcatgccctcttcttccacctcaacaccgcgtcgccatgggtgccggtagatagcttcgtggccacgccttctccatcctcgtccgcgtgaaccttgaccactgttgccttcctcaagcttccccgaatgacgtgtgtgcttcccca

SEQ ID NO: 139241 - DNA, 458 bp, Zea Mays
ataggtatgtgagatataggctggacatgttgaggtgtgaaagattatggcaaggaaaatacttcatcatgggtagtggatcctgactcatctggtgatcccgcttggtccttgaagacttgaattggtgcttatcctttcttgatgaggttgatcatctttggtctccaatcttggtgtctccatctgagctagggagatatagttgagatagttggggtctatgggggatacatttttttaatcgataggttcacatagatggattatgtaacttattgggagtgtatggctgagttgatctacggcactaacttaggcttaagtgacctaggggtatggttttatccttcgtaccagcattaagtaacttacactagattagatcatattagattagatcagatctcgattagattagatatgattagattagactaggtaagatctaaataaac

SEQ ID NO: 139242 - DNA, 607 bp, Zea Mays
gtcggcgtcttgtggattccaacgcctcttcctgcacaagagctagagcgcaggcagcatcgaggtttggggggcgctgaaccataattacagccttaatgtcatgcctaagaccatcaatgaaacacatagtataatacaatggatcggtgcgagattcatatgctgctaactcatcaactagtgacacaaattgttctacatactcggacacaggacctagctgcctgatatgaaacagctgtctaatcagtgattcatgttgctccctaccaaatctctcatgaatgagctcacaaaattcttcccatgacataaaacgtaaacgacgctctacggactgcaaccagcgatgagcctttccctcaaagtgcattgacgctaccttgacccacatgtggtattctgtttcgtacatctcaaagtaattctcagcttgaactcgccacagttgttggtgtgaaccgtcaaagcgaggaaagctaatctgaggcaaacgaccaggcgtcgggcgtcctatgtcgcgtcccgattcatacggataatactgctcaggcatgaatccagagaggcgattaggatggggaggatgcgtacccttgaccgg

SEQ ID NO: 139243 - DNA, 431 bp, Zea Mays
tgaaactgtcttttttattctcttttttatacatgagctcatcacaaactattaccagttgcttgttgtaatgtctgctacattcttttgtaggttactgttgcgggagtcttcagcaggtcacttgtgcctttcagcatgttggtcagttagcacctttgcagacttgtacctcccattttttgagtttacatggtcgagtgcaccgtgtttacagaaactataattcaggccggcaatgaagcgttgcttgctcgctcctcgatgaccaaggagcctaaaaaactgctagaaaaggcatgtctcactaactgaaactatacttcttgcgtgaaatatggcaagcttcacatatgaaaactaccagttacacaatgacaaactgtagatttcactgaacatatgaacataatagcctttattatgtgccc

SEQ ID NO: 139244 - DNA, 472 bp, Zea Mays
atggacggaaatgccagacccctctcatgtggtccaacataggggaaaaagcactagaaggacctgcctttgtcaaagaggcggaagagaaagttgcactgatccacagaaggttacttgaagctcacagtcggcagaagagttatgcagatagcaggcggagggaacttcgatttgagaaaggagacttcgtctacctcaaggtttctccaatgcgtggtgtcaggaggttccaagtaaaagggaagctagccccgcgtttcgtaggtccctatcccatcattggcagggtaggacccgcagcataccgtttggaattaccggaatccatgtccgacatccacaatgtgtttcacgtatcccagctccgcaaatgcctgcaagcaccagaaagtcacatcgaagaagagacagtacagattcagaaagaccttcagtaccgtgaaaaaccagtaaagattcttgattcagc

SEQ ID NO: 139245 - DNA, 396 bp, Zea Mays
caaacttccatttccgagatttgctgagggtgatcctgtggtttggttggacaagtgcttggagtatttttctgtctaccaagttccagcatctatgtgggtgtctgttgcttcgatgaatttggagaatattgttgtgcagtggtggcactatcataaactgaagtatgggttgggtggttggcatgaatttgctgcaactgttgtcagtaagtttggtgccgaggcttatcctaagcgttgtgaagactgttttcgtcgcgtcagttaggcacgctggataactatgttcatgaatttgagcaggctcggtatggagtggcggtgcataatgctcaatatgatgaaacattctttgttacccactttgttcgtggcctcaaatttgaactacag

SEQ ID NO: 139246 - DNA, 536 bp, Zea Mays
tgaaaataagggggatagcatttcccgctaatcttatagtaatggatactcagggaatagatgtcatcctagggatgaattggctagataagtatcagacagttatcagttatgataagaggacaatcaagttgatgtccccactaggagagaaagtggtgaccgagttggtcccgcctgagccaaagaaaggaagttgttatcagatggttgttgatagcagtgaagtagatccacttgagattatcaaggttgtgttcgagttcccagatgtgtttccaaaggacttaccaggtatgccacctgatcgagaagttgagtttgctatagagctttttcctggaaccgcccccatctttaagagagcttacagagtatctggaccagagttggttgaactcaagaagcagatcgatgagttgtcagagaaaggttacatccggccaagcacctcgccttgggccgcccctatcctatttgtggagaagaatgatcgcaccagaaggatgtgtatcaattatcgagctctgaatgag

SEQ ID NO: 139247 - DNA, 719 bp, Zea Mays
gttggtctcgaaccaggtgcgagatccactcgagtggtttcccttatgcatgctcagtccccctgttaggttccaccacgcccgaccctaggctcgatgttgtggggttcgtccgggagcgggttccaccagggtggtcgttacctatctcctccagctgaccaataggccccagttgctagatgcctttccccagtgcgcttagacctaatcatgggccacccgacccaaatcgcccgaaaaaacccggctcgacccgacctaaccaatacaatggacgggtatgggtcataatttctgactcgcaataattcacgtgctaggtatgtgccatgatttttaacacaaaaactgacccaacctaaaaataatccgactcaactaaaaaaacccgacccaacacatcaaacagggagtcacgggccaacctgacatgacccgacactaggcacgggtcaggtacgggtcatgctagatggcccacgacccgactgtgaccccacccgaacccgacccagcctgacgtttgaacacgtcgtcgctcgctgattggtgggccttagaggccggggatcttatccccgtcgcctatctccaatagtattctctatatctcttctctatatatgtcatttatatactcaaattctcccctatataccttattcttctcaagcaatgttctctatatctcgtcctctatacatcgaagactcatg

SEQ ID NO: 139248 - DNA, 317 bp, Zea Mays
atatcggtgctcctattgcgtattctgcctagaatctgcctccttccaagactttcatcagttttgtgtcaaatcctcctactggtgatagtggtttgggccttagagtgcgaccctctctcgaagaggtcgaggctttggttgtttcgcttggtgaaatccccaatgacgagaggcaggttcattttgagatgcatataaacccgagcgacgcagaaataagtgctatgctggacatgttggctgaggattcctctgattcggtccctgctgaaacactagctgtagcacctatcccagagcctggaaagaccttg

SEQ ID NO: 139249 - DNA, 835 bp, Zea Mays
gaggaaagatggtgtcatacttgtgcaaagcatcattaaatactctcatatcatgcaccgatccgggccatcccgcaacaacgaaagtgaatctcatgtcgaaatcacaaatagctaacacattttgagtcggataaccgtgtcgacccacgtgttggacaacttttgatgatggtacaactactggaatgtgggtaccatctattgcacctatacaattgttaaaatgtggtgcaaaccgatcgcttagcaactttggatgaggtgtcaggaaatcaggatcactaggcttcacaagatccttagacatacgatatacacattccaacacttcacttatttttctactaatggtttctactaatgttctggagtatagtttgcaggcacatcatcagcacccaactcttcaccaggagcacatgcaccagagccatccacaacaacgcctccaaacaattgttgtaacaactcttcatgatcaggaggaccttttttcagttttttctagtgagagttgccctgcacacacgtacaataatggttaatccaatgtcattacaataactgtataaaatgaagtaattgtacaaaattaaataagtgataccttagtaacacgattccaatagtcctcaggtgcatccacagtttttaatgcagaattccatcctaatccagtatttgcatttaattgcaaccaaaaaccatataaacctttcagtaagtccaatttattcttcaattgaagccttgaatggtgcaaccttgttgctatcttgtacttttcagctatgttgttgtaaccacgggtagtcatgatgtcgttcggcct

SEQ ID NO: 139250 - DNA, 574 bp, Zea Mays
ggcgtaggtatctagctacttatcaggtaggatataaaagatagataggttagggcaagaatatcctagggtaagaaagtttacggtgagaaaggactccttgttgggtggtaatgcatctgaagatcgagtttgacttctctccttccttgacgtggttgatcttctttggcctttcttcttggagttgccatccgagttaaggacatatagttaggatagccggggtacacgaggtgggtaggtttgaacagagtttttactttgctttttgaacaaatggattaggcaacctatgatgtaggttaggttgttgtttacgggcgagttagtccaaggtattaatttagggtaagatatgtttatagaattatggcctaactttttttttgtcgccaacattatctaacttatttaagtaactcaatttggattagatcatgttagattaggtaggatctagattaaattggaataagataaaatcttttcaagataagatgaatctattaagataagagagaatcttttaagatgagatggatctattagacttgatatatttttgtggggg

SEQ ID NO: 139251 - DNA, 723 bp, Zea Mays
cggcgacatgagcagactgaaagaaggaatcatcaaacttttttgcttcatcctctagagtcacaaagggcactccatactcctgctgatgccattcattgaggttctcagggtaggcaggaattggaggaggaggctgaggcatggggtgacccattgaggccgtgaagctccttatgtcatcatgaagcgcctaagtatggcggcggtgcacagcttcctcaacagcacgactgcgacacatggcgaagaccccggtgatacccttagccaggcgcacaaacaaaccctgaccatgaccttgacctctgtcctgacctctgcctcgacctccacagtccatcggacacgaggcagcggcaacacgagaggtctcatggagaggaggctgaggtggtggttcatctgaagatgcaggtcctactgacccacgggagcccgcttggtccttgctgctgggttactggaatcaaccctgtaaggtaaatagcgggaatgcttcattggcttctcaaactaagtctaggtgacagcttcaaccattttcataataaagggtgcatggagacaccacttcaatggtgaccaagatgttcgaaaaatttcctcctagattatatcaaaaacattgatccagtcagtgctggtgggagtcagaagcaaaagaagaacacgactctccccaaggacattcatctagttcccgcacttaggaaggatcgt

SEQ ID NO: 139252 - DNA, 544 bp, Zea Mays
ggacttcctctggtccgagctcgagcaggtgagcttgtcatcgcccatggccgaccatcttccatagagatcggcgcccccttgttcctgggtgaccggtgctctgtacggtttcttccccctccttcagtccttggagctcagcactcccatctcctaggcaagctcctctagcacttagcaccctctaccccagtagatcccgaaccccacacccgtgcacccttgtcctcgcgcacagtcgcagctgggagcttgtgatgcgctctgctcgtcacacacctcctattccagccatgtatgtcgaccccatgtcatcccctttctcgccaagttcagcctcaaccgccattgccaggtccgagtttgcaactcatgtctgctgtcgtcttcctcggccgggagcagtgccttcgcctctgagccccacaacaatgaacgcctgtttccctattgtgcagacccatgctcgccactcctccatcgctcagggcgatcttgctcaagttacggtcacagctttccctccgcgtcgcgccctcgg

SEQ ID NO: 139253 - DNA, 693 bp, Zea Mays
atgaaggagtcctttggttcaagaaccgtctgtgtgtaccaaaaggagaggcacgagaagtcctgctcgatgaagctcacaactcagcctactccatccacccaggaaccaccaagatgtacctagacctcaaaaccagatactggtggagagggatgaagaaagagatagtacattatgtggcccggtgtgacacttgccaacgaacaaaagctgagcaccagaagcctgcaggcctattgcaaccccttccagtgcccgaatggaagtgggaggaaatagccatggatttcgtaaccggactaccccggacgcaaaaagggaacgactctatctgggtgataatagaccgtcttaccaaggtagcccacttcatcccagtgaaaactacctttggaggagccacccttgcccggatttatcttaaagagatagtcagactccatggcattccaaggaagatagtgtcagacaggggaacccagttcacctccaaattttggatgagccttcagcaagctatggacactaagctagacttcatcacatcctatcacccccagtcatatggtcagacaaaaagggtcaaccaggtcctcgaagatttattaagagcctatgtgttaacgttcgacagaaactgggagtccagtttgccttatgcagagttctcgtataacaatagccatcagg

SEQ ID NO: 139254 - DNA, 475 bp, Zea Mays
gtgagcttattgctctgcctctgaccaccagtcttcttcttcttcctctcctcctgtttttcttttttgcttttgcctcctcatcctcttgtatagttcatactactactagtcttcttctccaccggctgactcgtccacgcaaaccctataaaaggcatccgagtcccactagctccggccccgtgtcttccccagttaactccgttgtacgtctctctccctttcactagctccgatctccttggatcgatctcctgctagctcctcctccgatccacttgtcgacacgatcgatcgtcgtcgtacgcctgcttggcgtacatactgctactaatggagacggcgctgcagcagagtgctgctactgctggcggcggcatgaggccggccggcgcggcgacgacggtgaagaaggcgaggcaggagctggagctggagcaggagcgggagttgcggtttccgcaggcggcgg

SEQ ID NO: 139255 - DNA, 301 bp, Zea Mays
tatgtgtgcaggtgcaattagcctgaaataatgtctttctaggcaatcagaaacttcgcttagctgaggcacacaagaactcgtactaatatataagtagcagcccacggcgcgtctcgtagaattaattacatttggttagccgcatctcatgaccctggtgaaggatccagagaagcaatgacattcagacaagcaacgacagattcagagaactaggaacgaaattcgattcaaccccgtacgtgtttaattacctcacttgacatcagtagtcgcggcgggttatgtaatactccca

SEQ ID NO: 139256 - DNA, 439 bp, Zea Mays
tgatttttcaccaccccgacggcgcacggctgacgccgcccgcggacacggcggagctctctccggcgaatcatgcccgagagcccgcacacccacaagctctaatcgaattggttctacgcgaagagggaagtatggggaacgagacgatgtgctactcaccccaaatctggtgtcgaggagatcgggtcgcgccgctcggcggaccagcagcgacggtgaggaattgacgccggcctggtgacaccaatgcaccccaactttaggcacgatcccccatagtggcgtggagctcccagcggcgacccagtgctgggatggctagcgtttcgcgaggccgagtcacacggcaatggcggcgcgaaaatcctcctcccaccgagcgccttcctatctgctaggtttctgtggtggcttatggcgacgcgatgaagcgacg

SEQ ID NO: 139257 - DNA, 614 bp, Zea Mays
ttcgggttacttcaggtaaatctttatgcatgagatgagagcagaggattaacttatttgtgttttatattatttcatttactttcccagattattcaagcactatagagcttgatatagctgttatggccacttggcaatataaataaatatatgatgccacacaacacaatcaaataaattatagagctaaacaagattatttaagaaggttgcgttatgatgtgacttcaggggcttgaacaacccaccacaatccacgcgagcacaagctctagtgtatctgacgtcaaagcatgtgcgaccatcagggctacgacaacacaataagccttcataacaaacgcaacaggcgcaattgtgactcgatagtcagggtacaagacaagtccacgcaacgtgcgcaataggcacaattgtggctcgaggcagacagacaatgcctacagggcatacgaaaaatacgcgactcagcgatggcggtctgactcaacaggagcgatccgattaatggagagcgcgacatagcaatcacatgacgcagccaagttcgaacggcacaaatattgtgtcgtgttgccagggctcagtcaatattcagctaatgccataac

SEQ ID NO: 139258 - DNA, 494 bp, Zea Mays
gaagaaaaagaaaaagagacgtcttcggtgagtgtcatgcttgaatgaggatgccggcccttctgctcctgctgccggggaagtgccagtgccatttttactgaagctgaacccaatgggtgtgacccgactgatgctgaccccaatgggtgtgaccttgatgatgctgaccccaatgggtgtaatccggccagagctgatcccaatgggtgtactatctgtattattgatgaggatgaggaagaggaggaggaaatccccttaattcggaagaacagtcggcgctatatagccagtggggagagtagtggtgttccttctccagctttgtctgctctcgttggtctgcaagaattgtctctggcaaattttgatcagactctcaaagatatggtccctgaagatctgttgtcggagccggcagatggtggaatgatggaaatttgtgctgatgtgcctgctgtcgggttagagttatcccgagcagcgtctcg

SEQ ID NO: 139259 - DNA, 299 bp, Zea Mays
accctgggagtactaagatgtatcaggatttgaagcaaaagtattggtggtatggtttgaaaagagatgtggctgcacatgtggctatgtgcaatgcgtgtcaaagagttaaggctgaacaccagaggccagctggactactacacccattaaagctacccgagtggaagtgggaagagattggcaaggacttcattactggattgcctcacacctcgaaaggacaggattctatatgggttattgtggatagattgaccaaagtggctcatttcatcccagtcaagactacttttgag

SEQ ID NO: 139260 - DNA, 486 bp, Zea Mays
tgaatataggtcttaagtaaccaagactaagaacaaagcacaatgaagagagcatctctatgtgaaggtacataagggtaaactacttctctcatttatacatgtacctaaatcttcctcttatatagattctttgcatatcttttataaaaggaagagaaagcatgtctattcatatacctgcttcacacctagtttaacctctcaaaaatttaattcttgcattgatgcattttttattaaaactgggtgaagtgtttttcttgtcaaagagcttaaagcttaaccttgtaacgaggataggatacctttgtctcaaagggggaagttccttaagtctctttgaaacctcaagggtaaatgcatcaaatatctataacatgctttcataagtgtatagtctgtcgtgagcatcacacttatattataacacaatgcacttcacattgtctatgatatagatatgttctcattaacctcattatg

SEQ ID NO: 139261 - DNA, 382 bp, Zea Mays
gtgcagccttcaatttccctgtcaggatgtgctgctactgtacagtacagccaagatttgaggtcccgtggccgccattgctatctccatgtacaaatgtcatcggcccccgaataaaaatgagctcttattgagttgactgttagtcacattttttataaacttaatctaattttgtatggagggatattagcatttctaactttaaataaatatattataaaaaaacaatgatggtactatttctgtccacgtggattaagatgaaaacggataaaccttgactatttcagtcgctcctgaacttttgcctcaaaccatacgttggtaatgggttaacatatattccttctaccattgccgttagtatagccccctgccc

SEQ ID NO: 139262 - DNA, 522 bp, Zea Mays
gtgacccgcaggttccgtagtggacttcgtggagaatctctaggccttcggtttcggttatgcatttcagcataggcttgctgataccctttttgtaaagctggccctcaactattgcgaagtctctgctcctgtgtttcagccttttggcctcgttgcgatcgaatggatggtaatggccctggaagtataatgttattggggctgccagtctggccattatgaggttgacgatttggtggccatcggcgtcttgcgttatttgcaagccttcgggattacggacagctagtgtgccgatgacatggtagaacacgtcagagggcagggcctcgcccttggatgctgctttggccaatgcatcggcctcttcgttcttgtttcgctcgacgtgctatagggtgaaacccttgaattgtttttcgaggccgcggacagcggtgaggtattgcattagcacagactcctttgctgagtactccttttcgatctgaccagcgacgaccttggaatctgttctga

SEQ ID NO: 139263 - DNA, 1009 bp, Zea Mays
ctagtactttgttgcacttcgcttcaatcccatacaaccaatcatcatttggttctttgaactgcttcctaaatttataattatattttaaccttataaggccccctttcttagcctctcccctcattgggctcccttcccgcggctctggcatttcccactcaactcaaagtggccaaacattgaaggccaggtgctcttgaataagatcccttgtaccaatataactgcacacaatgttgaaggccactagagcagcttgagcttcatcactcatagcacacaatggtctctttatgccaaagttaggtgtcacaaacctcttaatgatacctttaatatcctatccaagccactgaagactggagtagggacatttgtcctaaaccattacaactcttgcgtccaccacgcacaccatctaggccttgaacgtgcattacaaatttacttgcaagagctaacatgaaacacctataattttagtgccaagtaggggccttgcacatttttcatcatcatcgtcatcaggtaccaaatggatagacgcaacatcgactgggtccctagggtgatcatacactttggaagccatgaatttgttgtcactaccgagggaggagaggttagggccctggcccctcagtctcccatggtcaacaacctcgataccatcacggaggtgcttgcagacctatggcttgacccactatggggccatgttccggagcaggatccatgtcccctctccggcttcgaagagttggggcgcgagttcacgatctacatgggacctaatttgtcctattatgacccgtgaaccttttttctgctttgtcaacatgatgacatagctcgcagaaggaaggccaatctctacggacactctggccactcgctagggacatttcgactgcgttcctgctaggcctccacaatgctgcaggaacgatttgcgctctcgtggccaagggccacatgcccacacccgatgacatcaaatttgtag

SEQ ID NO: 139264 - DNA, 850 bp, Zea Mays
agcgtctgcgccacggcgcgaccaatatcatcttgctacgccgccgcgggatcgtccgaccaccacccgtagccgcggcagccggcggcgtcaacgtctgctgtgaggaaggagacggagtcctcaagccagtcgaagccgctgttggtcgtggcggcggcgagctccgcgtgctgctcctgctcgtggcagctcatgggcttcatgcatgcaatcttgcaagaagacacccgtgctgctcctgctcgttgcaagaagatgttggataagcctcgcatgtagttagttgcatatttccgttttgtcgcgatacatgcgcacgagcgccggattgtggctgccatgcgcgtaggaggtcgtgaccgcgagaatcgctcgccgcacgacctgggcgtctggggctgaacgaacgatgccgacgtggggatggacgcgtcgtgcacgcgtcgtgcggacggctaccagagctctcctctgtgtaatgcataataaaaggagaagcaaatagaatagaaaagctgcgctttcaggcagcaccaaatacgtgtgtccagtttgttccagaaactgtgtgtgtgagtgaagctcttcgcctctgctgagttcgagtgttcgccggtgccgttcagtgctgttcaggcctaacaattggtatcagagggttggtgatcgtgacccgcggcgcccatggcatctccaccgcgcccacgaggacgctccccgacacggaaggagaagggcacggactcaggcaccaagacgccgccgcgcatgcctactccgccacgccgaccacgcacgcgcgacgggcgtcgctcgcgcacccgtggtgcacgccatcagcgggagg

SEQ ID NO: 139265 - DNA, 482 bp, Zea Mays
ttatatgatttaaatgggtttctgcaattatttttatacccaaaaaccaatttctaatctcttttatattaattacccccctgactcgactacgtgcatgatttcctgggaatcccggggcgattctacaattttcccaacactcagcgcacaacatctttggattgcgggttaattcctagaatccccgaggactctttagcaaaattcgtggtcgaaggggtatcctccatccagggccgcccgatcagaaacggacgcgcctgattaaatccaggtgagctacacatccgcgtttaccgctgaccgtccgatcagatcctacgatcaggatccaaccacccgaaccggtgcacgagatctaatctgaagcgttcaagcgcagatcaacgaccgagagccaactgagcgaatgggtacacctaatctaatccacgttcattccttcatcatccaacggccgaacccccttctcccccaac

SEQ ID NO: 139266 - DNA, 361 bp, Zea Mays
ccattcttgatgattcaaggtcttagtggtcgaaccacttgcgcttccgagttgcccacagaaaaggctaaggttcgattcattttcgttaacattgtaacgagggggtggattatgcacactagggaggttgtcaccatagtatgttgttgtgaagttcgacacctcctctagaatgtatgcctctgcaatggaagcctcaattttgcatttatttctatatttctttcgaagaacctttaaacatctcatatgggaggtgcaaaatcaaatgttgcatcaaattgaagaagtcaggtggaaatatcttctctaacttacacaacaacaccgatgacatcctttccaagtctgcaatcac

SEQ ID NO: 139267 - DNA, 516 bp, Zea Mays
gggctgttgtcgagtacataggaaccgagtgcccaaaataggaccaaagcctcttaacggcctatttgccaaccaaccctccgccgagcaaccctacgagacggagcggtcgaccaaccctctgcgagcaactctgtgagacggagcgaccgaccagccctctgtcgagcaactctgcgaggcagagcggccgaacaagtccccaccaaacaactcgatgaggcagagcgaccgaccaaacccccgctgagcaatccagcgaggcagagcgatcgaccaaccctctgtcgagcaaccctgcgaggcggaggggccgaccagcttcctgccgagcaagcctgcgaggttgagtgtacgatcgagtctgcatcaagcatcttagtgaggtggagttccctgtacattactattgacccatgtcaccaccaaattatgtccggaccacaagcgcgagataccaaaggcacaccgagaggtctctatcgacacaactgtacgacaccatgtacggtctcg

SEQ ID NO: 139268 - DNA, 882 bp, Zea Mays
atcgctgacttaagctgattgctccgttagtagggtatagtggtcaccccgagttaagtaagcgtgagcatgtcgcaccgtcttaagtcatcgccgacttaagccgattgctccgttagtagggtatagtggtcaccccgagttaagtaagcgtgagcatgtcgcaccgtcttaagtcaccgctgacttaagccgattgctccgttagtagggtatagtggtcaccacgagttgagcaagaatgcagattgacaatgaacaattcctgaagtctttttattgatgatgtgtttcccggtttacagaatacattgccgccccaatagcttttgaaatatagctaaggataaaatctcctgaggtgttctatgttccatgagttcccaatttccgtaccgtccatctgagtgaggcggtatgatcccggtcgagtgacttcagctactacgaatggtccttcctatagaggtgataatttgtgtcgtccttcccccgttagaatttagcggaggacgagatctcccactgcgaaggatcgaggtcgtatggccttatcgtgatagcgcctcagagtttgctgataccgtgctgattgaatcaccgtgttcagtcgctcctcttcgagtacatcaacatcctccagtctagtagcctcaacttctgctatgttttcaaagatcaaccttggtgccccaaacttgagatcagcaggcagcactgcctccgaaccatagaccatgaagaaaggagtgtttccatacagggcttgacttggttgagttctcaggctccaaacaacgtacgacagttctctgatccactttcctgcgaatttttcatttttgtcgaaaactttctttctgagtgcctccaatatcatcc

SEQ ID NO: 139269 - DNA, 337 bp, Zea Mays
agtcccagcgcggtccaccggcccgcgagccccgtgcgcaaggcggcggcgaaggagcacggcacccccgagcgaggcagcaggccggcgcgggtcatcagagacggcgggcccgacgctgagcgggcggcgttgctgggcggaggagtaggagcggagcagaggacgaagctggcggagggcgaggaaggcgcgctgggccaccagaacccctcggtggccatggagtgcttcatcttcctctagaggctagagctggtgtggtgctgctggtggcctcagtttctcctccacgtttttgttcgtctctcgcaaattcgctagcttcgttgcttgc

SEQ ID NO: 139270 - DNA, 485 bp, Zea Mays
cggagtatgtcttctatcgggaagcctgtaaccactacgactttgtggtcgccaaagtagtggcacaactttcacgcagtgaggagtacggcgtatagtagcttctggacttgagggtatctgatcttggagggcccgaggaccacgctaatgaagtacatggggtgctggactggatgtgcatgcccttcttatgtccgctcgactactaacgcagtgcttaccacatgagttatgcacgagatgtacaacaacaggtcttcagccgggtggtcagtgatggcttggctaggtggtttgaggaccggtggagtggtcaggtatttcttgagtgcctccaatgcttcttaggcctcgagagtccattggattctatccacattcttgagcagtttgtagaatggcatgcctctctcgccgagccgtgagatgaaacgacccagtgctaccatgtagctagtaagcttctagagcttcttctgtga

SEQ ID NO: 139271 - DNA, 516 bp, Zea Mays
gtagcgtcccctgaggctctgctggcaatgatgcttgcgtgtctgcagagcaaagaggcagagagcctgaacaattcgtttggcccttttcttgtgcttggcagcctgatcagatgccaatgcgatcccatatctccccatatctgatagggaaaataaaatctctccgcgtctgctgcactaccggctggtggttgtgctcgccagcgcggttgaatcccatctcacctcccctcatctgccgtcgtccggtgactgacaggacgaggctccttttccgcaccagcagcgccctctccacttgatgatggcctggcctgctagctcgagaagaagaaatgggcaagcagtggcaatgagatggatgttcttggtttagcagttcttggtcgttgcctgaatcctgcacattttactactacagttgtgagccagaatcgcacagatctgcctgaattcttcttctgaatatccacagcaatgcgaaattggacctgcggaaaaggaatgggcaac

SEQ ID NO: 139272 - DNA, 613 bp, Zea Mays
aagccataccatcttcggaaagtcgaccattaaacaaagtcaaattgatgccatgaagggaagatactttcgtgacatgtctatcgtgagggttggaggggacatcaccgcccttgctcctgaagaaaatgaggttgttgtctatagaagctttatgaaggcgggtcttcggttcccattgagaaaatttttggttgaagtgttgaagatatttctgatctttcttcatcaaattaatcctgaggctataattagaatgggtttgtttgtttgggctgtgagaagcctaaggctggaaccgagcgtgaagtgtgtttgcaatatgcacgaactattgtacgagacaaaggccactggcaaagagcagtatcacaacaacttcggttgttatggattcattgctcgttctaatgcaagctactcggttccaacatttcggaaaaggtggcccgggtcctggatagaggaatggttttatgttaagaataatctgattgaaagggaggacataaaggggattatccaacgccccatctggtctcgcttcggccttcaaaggccgaccgtggcgattgaaaatgatgtcgaagcatgtcaaaaggctttcagcaat

SEQ ID NO: 139273 - DNA, 644 bp, Zea Mays
tgcaggtactacgctaggaagtctgcgtggaggagagataagaaaaaagaagacgtcgctagggtgcacttcatcgctatgtttgcaccatagtgaacttccttgatctatttccacagctcattaattttgttcttccttcgtttccccaccaccaggacattgtcagctagagatttgtgcaggctgttgaggacgacgccctaaatatatggagctagagcctacgtcagaacggctcaatgaggattgcagggcgcgtagtaccacttcagcagactttgtcaattgagatcataccaacgaaacagatcgatgaggaaggatgcttcaggttgccaggtccacagctcatgcatctatcccttcataaaaacagatcatgcatcatgtaggcattgcagggaccatctccatcagatttaggcagcaggccggagtggactcggcaatcatagtagtcgaggagatatgatgattcaaacatcggacacactgaaatgcaggtccctttcgtcaacaaaaagcaggatcagtagaaagcgtggctgggtcaaaagtgctcagagtgggtcccgtccagtaacaagttagatgtctggagcaggctaaccatttttttgccgtagtccagggttgctgag

SEQ ID NO: 139274 - DNA, 371 bp, Zea Mays
cattctttttggaaggctttgttatggaacccctgagtctataaccatactccttaggttgataggatagtttattgaattaagctagacgcagtagacgataaaacaatgttatcctattaataaataccaaccatgtgatggtgattgattgaaatgtttgatttggatctttgtttgagtgcaatggtcttatggaatgatggccataagaacatataaaaatttttaaacataagctatttcccctcctagaatcttttctactcctcacttttctaaggacttcaccacctaaccaatcagatggtgaacgctcgtcaaggacccaacaacaaccggaaccagcgtggtcaacaagtaccaccacc

SEQ ID NO: 139275 - DNA, 521 bp, Zea Mays
ggcgcgctggcgaccggagagaggggagagcactggcagaaaggattcgtggctttcaccgtggcaaggtcaccggtgatgaccggacacacttcaatggtttactacgatgtggtaacgccctaaggcacgtggcccacggtcggtaggcggccaactccggcgaggaccactttgcccgaccgcagcccaagtgggtacggcaagctcaccgtcgaccggatccgagcctatccagtgccaagatttttaccctgccgtgataatctccttgccagagagcacgaattgtggcgacgacgtggattacggtgcgagggtcaccggcgacgaggggagctgcatctgtgatctttttgtggcactgtaccatcaggacgatattcagagcacctgacagagcggtttgcagcgcccaaatctccaattttcatgtgataactggctaatccacctttaacaaagttttggtcctacaatatagctttaatcttactatagtaaccacactcagatactcg

SEQ ID NO: 139276 - DNA, 598 bp, Zea Mays
atgtgtatagtgtacaccatgtggttgtaatgtgtgttgtgcattgaattgcgcttggtggcgcctttgtccctttatgttgatgctcatttgtgatgacttcatgtgtttcgttgtgcctattgtgagcttgctacacccttaggcgattttggcatggatagatgtgtgcatgccatagacgacttcgcacccggtaggtgatgttacgcccgtgttgtgttgatccggctgcgcccttgagcggcttttgctcggacaatgtgcgtctcgtagatgacttcccaccatttgggtggtgttacgcacttgttgtgcctatccggctgcacccttaggcgacttttgctcggatcaaaatgtgacttgcaaaagacttcgcaccctgtgggtggtgtcatgcatttgttgtgcttttttggctgcacccttaggcgacttttgctcagatagaaacgtgtcttgtagaaaactttgcaccctatgggtggtgtcacgcacttgttgtgcttttccggctgcacccctaggcgacttttgcctggatttgtcgcacgcaatggttgtcgaggcttgccgttgcagtgactgttttggc

SEQ ID NO: 139277 - DNA, 593 bp, Zea Mays
gcggctacatcacgtgttgatcgacggaggggtcgacctcaatgtcatcagccatgcagcattcagacagatgcaggtcctggggtcgcggatggggccctctcgcccattctccagggtgggcccgcagcccgtatatcccctcgggagcataacgctcccggttacatttgggacggaagaaaacttccgcacggaaaacgtccagttcgacgtcgcggaggtcaacctcccttttaacgccatcattgggaggtcggccctgtaccggttcatggccattgcccattacgggtacttggtcctcaagatgccgtcccccgctgggatcctcaccgtgcggggcgactgcacagccgcactagcagtcgtcgagaagttacacactctggtggccgagatcgctcggccggacgacggagggagaggccccgaggcccccagtgccagggcgccctccaaggcgctgaaagtacaaccatccagagcagacggtgggcccgcgaagaccatccatgtcggcgtagacccctcccagaccacccgcatcgcggggaatctgggggaaaataggaactcgcgctcgtcacctt

SEQ ID NO: 139278 - DNA, 376 bp, Zea Mays
tgctgtgtcggaagctaacaactcggctaaattacttaggagcaaaagaagcgcagctacaagtatgaaggactctgttgctcgggccaccaaacagaaagctgcacgcaatttagactcggcgttcgctgaaggtactattccggatgacacactggcttaggtgttgggcgtttttacacaatgaggaagctaagaacaagataaatcaggcgtgtcgctgccttgagatggtggctatgcagttttattccaaatatggatggagtttttctaatagaattcagttctaataagttcttgctttaatcgtttgttattggtatgatgactttgtatcagatgtgagtcctgtaaacacaagtgtggtgttttg

SEQ ID NO: 139279 - DNA, 697 bp, Zea Mays
ccggtgacacccgtcccggccagccgacgactgattccccaaacctgctaggattatgtgcaaaagggaacacgacatatgagatgggacacttactggagacaggaatgacgcccgaagagccacccacggcacgcagcggcccacgatggcattgtgcggtctggcgagaaattgccggtgactgccggttcccgcacccaatagaacactcgagcaccttccttggtccctggcgactcctcccaccctcttgcggagcccaaagcaagcccgtggcatgaggtcgagatcggcgaccaaatctcccactcacccacgcccttctctcatttccttctctctggtgaactcgtgggctctcttctcaacgacggtcatagatggggtgagcacgacctagaatttatagccctagccatgcggactgtggttacattggggaggggggttgtgtcagctggggttaggtcgccagcgcgccgcgcactatttttgtttacgcggggtagcattgtgtgggaatggcacgcggggcccgcagcgcagtgacccggtgtgcgaccgcgactggcgcctgaggcccaccggtcggtgtgggatcagaggcgcggatgcgagttaatgcggactgtggttacctggtgtgccgacgcgaggacctagtctgtcggtgcccaggtgagtgctggatgcg

SEQ ID NO: 139280 - DNA, 393 bp, Zea Mays
atgatgctcttcagattgccccggttgatattccttcgtcgagtcaccacctggcttctcatgatttggggtttccttcattcttctccaatcttcaggtaatttggcttttcccgatctggctatactccaggcaaaatattgtctttacactcatttgttttcaatatcaggctttggtcgacgagatggctggtcagctgagatcacaaggtgcctctgtcccagaaagagctctgtctctgacgcattagaatatgatgctgcttcagaggcggatatctgatttggaaatgacaaatgctggttagtgcctttgtttcctccttggctacttgattaatctgctttttaactgaatatccttcttcaatcgtttcttgctagatatgg

SEQ ID NO: 139281 - DNA, 396 bp, Zea Mays
cttggaaggaggcagattccaggctgagtatgcaacaggagcgccgatgttcgacaccttgcctctgagtatcatctcgagccggctcaccaaatccacagcaggaatccttctgttggtaacctgggttgaatcagcgaggcctcgatacagataagccgggtatgctctgtcttttagtggctgaatgttcttgaaaatgaaatcggcgaccacagcttctgcagtcaaacccctctctttcaacaatccaacctcagcaagcagagcccctgcctcagccacctccatgtctgtgggggattcggtccaactcggagtgcgaacatctggctgtctccctgaccgtggggggagggaattcccgtgattctccatgataaaccattccaggcg

SEQ ID NO: 139282 - DNA, 595 bp, Zea Mays
gtctaccatagaggccgagtgtgttgctgccgctagctgttgttcgcagttactttggatgatggctaccttatgggattttgacttggattttcatcatgtgcctctgctttgtgatagaacgagtgccataagtgttgccaagaatcatgtgctacattcgaggaccaagcacattgatgttcgctttcactttcttcgtgatcattatgagaaaggcgacatcgaattgcgctatattgataccactcgccagcttgcagacattttgaccaaaccccttgatcaaaaaacttttgttcatttgcgaggagaattgggtgtttgtttccctttttgattagagggctcccttttggtcttttcttcttattttctgctttcactttcttttgtattatatctgcatgtcatattgagcttcacttgtataactgctagaatgtgattatgctcctagtagtatgttctttgtgtacatgataatgctatgacatgcttaggctctttttgcttatattgatacaatattgttgagctaagttgttttcataattgtgaacttgactattacttgctcaatctaaaattgttc

SEQ ID NO: 139283 - DNA, 462 bp, Zea Mays
ggatcacatgggctgaaagaggtatcgctatactcaatcagagccgtccaattccagatcgacggttgcacactcatcttcttccctcgctggccgaacctgacggagcgcaacaaccgtggcggcgccatcaccgcggagcacccaattatcatgccagggcttgattctaagcgtaactaggtgctaatcaatgcagggaaggtgtcgaatcgatccaagggggcattaccgaaggttaggaggcaaggcgaagctgtccacgcggcacggtgaacctctgtctctggcgacgaattccggtgattcccgtcgatttcagacctcaatggtaccgcgcacgcaacccgtacgtcccggcgaagccccccgaccacagttgaagttctagcattggcacaaacggggaaacagcacacggcggatttctccttccttccgcccccttctgaagctccaatt

SEQ ID NO: 139284 - DNA, 383 bp, Zea Mays
tgcgatgtcccccgagtttggacttgggctattcggtgacctgttttcatgacaaggaggctggtgggatgcagagctactacactccaggtgtatcaactgctgcgatgtgtggtcgtcgctagttttggttgcagttgcaggtgactgaagaagcaacgccgcacaggcacagccatcgagcatcgacatagcgcatgcatgcatgcatgcatccatcggtgccgaccgtatattcggcggcatatgtgcgcgcgcgccgctcgcttcgcttggcctggcggctggcccgcatgatgaactccattttttttctttctccttaacaaaacaaaaggaaaaattctcttgcgcgtgttctggacaagagaaatacgaaatat

SEQ ID NO: 139285 - DNA, 767 bp, Zea Mays
agagaatccaggccggacaggagacggctcacgggcaggtgaggtcactgaaatgacagaagaggtgagcacatattagtcacatagtcataagtatatgaaatgtgaataaatacatacacagagtgttatggcacagaaaacgagagatatggcgatcgagaggtcaaacgacgcgaaaacgacgtttgaacgagaaatagtgccataggaggtttgaaattcgaattgaggcatgaaatgacgtggaattgagccgatacttcacgaataggtttatatgggtaaatatgagtgaagtgtgcgcttggtttgattttaggcgaagaaaatggaatttgggcactcggctcggaaacgatcgctagaaacggggatttgtgtaaaattgaagcctgggatatcggattggcgtgaaatttggcgaatatgttactggaggtatggtgaaggtgcctaaaaattttgggttcaattggagcaattttggctggtttgggcatttcaccgagcacgtggcgtgcggtggattaggtttttggtgaaatgactagtttaggctgtgaaaccctccctagggagctaggaacctgcagaggtgttcaaatgatacacatggacatacacaagtgcttggatcacaagaattttgacaagaatttggaattggatcaaagagtggagcacaagctagattgactggaaaacagagagaggagaagggggacaaggagcaggggttgctcacgagagaggaggaagaggag

SEQ ID NO: 139286 - DNA, 422 bp, Zea Mays
gaaagatcgggacacgtattctatcaatatgggttatagtcaactcggttgtcatagggttttcgatatgactaccctcatgggtcatgctcacttcgagtttgtctcggaatgccccagttatttcttcccttactatatcaatggtggtcggtggtagcccaccagtcctttggtctaatggtgtgtgcgcttgtgtttcattatgtcgtccccttgcccatgggtttgggttccgtgggtccagacggtccacgccgtgatactgggccgaacagtccgcaactttgcgacaggagcgggtctccatgctctgggtccagacggtccgtgctcttggtccggacggtctgcgcgtagagggttgaagaaccctagatatcgcctcccaggagagactccgttagggaggtgagttctag

SEQ ID NO: 139287 - DNA, 347 bp, Zea Mays
atctcgtcgatcgtcacaaaaactccagatggatagctgaaatcaatttttcggttagatcgggacagacaagcagtgactcgtcgttcaagatagcaatcgaaatcagggattacaatgaccaaggccagcgcctcaagattttttcatctacaacctgaatctgaaactaattctcaactccgtactaaaactcatgacggggcaggcggctacccgacacaacacctttgcttattccctagtcacaacacgtactgatcaacctcgaggaaccatgtggcggctaaatttctcattgagtatcaaggacgacgaacacagcggacaagatttggatgtcagca

SEQ ID NO: 139288 - DNA, 563 bp, Zea Mays
gaaggggtatctcgtctctaatctgaacccccaattcggtgatcgacggctcgcattcagttaccatcagatgtaatcctatccatctgttcgccgatcaacgactcacacacgtcgtcttccccacgaccacacatgggatgatgcatgagcgtcccacggcgtgacctcgtcggcgatcacccatatctacaccgattgccccaaccacaaaatagagcggtgctacgtgaagcgaaaaacaaggcgaaataagggagaagtagctcactgtaggcggaggcagaaacagagctacccacgaggcggggtggaccgacagccgtaccccaacatcggcgacgaggaactgtgcagcgtgtggccacaaccctggcccggctagacgtcgatgacgagtggtgtgcgtcgaagatggcacaacgagcagtaaggaaggagctttggcggggaaaaaaaaggccgcttcggaaatctggagaggagagggaatgcgtcgggtcttcacagcgatggtgcccacggttcttatacccggaactgagtctgattttggggggaaa

SEQ ID NO: 139289 - DNA, 475 bp, Zea Mays
gtttggttttgctgtacttttggtgtcgtctgcatctgtagggcgcgcaacgcgtgtcccctgatctagttttttttttaacagaggataaccccataatagcaatgcggtatagtatactacagtaacaaaagctaaaaccggataggacaagaatgcgtaagccttgcaagctgcaaacacctgacgagaacgaacagctttgcatgcatctgtagacaccccccacgtccgagctaggagtacagtactagttttcagcgccgaccttcggcttggcgttgctggcgaaggccacagcggccggccgggtgacggcgttcacggtcacggccatcccggggccggagccggagccgggaccgcagcactcgcgcttgccgtcgcagcagtcaatgcggcagcagggggtcggcaggacctgggcctcggccgcgccgagcaccaggagcgccagcgcgagggcggcgacgat

SEQ ID NO: 139290 - DNA, 814 bp, Zea Mays
agggcagtgtagaaaaaggcctttattttgttggatatctgcataggccgtgaggatcaaggcttatccagatccgttttgctcagccacagccatctcattcttaaggcccatcctagttctttaagactagagatcccgagtccgccaatttcaagaggtctacaaactcttccccaagccactaaacagtgtcctcctctaacctctttccttccacgccagagaaatccttttctgatcttgtcgatagctttgagcgagcatgtgggtatgtcgactgccatgactagatatataagcatgccggtcatcacatactgaacctgcactcttcgcctgcccttgtcatgagatccgctttccacccacaaagttgatcagccactttgtcaataataggctgcacctgatttttggacagcttttttaaagacaaagcaaaccaaggtatttgcaggggaaagacgagagttcgcatggaagccaatcatggagggtcaccagctcttcctgaccacatcgaattggataaacactgcttttctgaatattagtttttaatcccgaagcttctccaaacaaatttagaatacctagaacagtatggacttcattctcccttgggtggaaaaaaaagaaccgtgtcatcagcatacagcgaaatcctgtggtgtagtggttgagaggagagaggttgtagctgcccctcctcatcagctttagccacaatgcattcaaggatgtccatcactaaaataaaaagcataggggagaggggatccccttgccgcagccctctcttgtggtgaat

SEQ ID NO: 139291 - DNA, 275 bp, Zea Mays
ttcttatgtagtccatcagctctagcctcagtctagtagtggagttcatgcaccccggcaaaatccttcagcgttggcactcttcccttggcttcggagagcccatatatacacactaagtctaactatggcatttggggtgagttgatgaaggtagatttcaaacttctttaaaacttcaccaatcatgtcgtaaagagggaatcaaagacctgctttgaagaagcttttaaaaactagacttcgtcattccttggttttggaatcacttcttc

SEQ ID NO: 139292 - DNA, 292 bp, Zea Mays
ggggaacaaaacttgcactaccagcgtcacgacgtgacacgaaccaacaacccgacaagcgttgggagaagaggcctcgtgaagaggtgcacgccgctggaccacccgtctctcgtgcccgaggggcaccccatggaggcaaacgaacattggacgacatcctcgacgcccagtgcacgtatcacaaggatatgcgccacaccctccggaattgcagagacttgaagcattccgtcgagaatgaccgacccttccaacctccaccacctcccccaccacgaggagggcccgg

SEQ ID NO: 139293 - DNA, 1220 bp, Zea Mays
taaataaaagaaaacagaaaataaaaacaaaagaaaaagaaagaaatgcgctgggcccaatctcctatccggcccacttcgcctctttttctcccggacggcccattagcgggcgcaccgttcagttgtgaaggcgccgacgactggggccgtcttgtcagccgcctagagtgtttgtcccgcttacgcacgtaccccactttgtcagcttcaacaacctcctcccttcgcgcgcgtgtgacgccgcaggaatcgggtgccgctccccttagctcgccgacctcggggggatttaaggcagttgcatgcatttgtaccctagcccattagaccaccgccgcaatcacaaacccctgagcgccgtgagctgttgtcgccgaagacctgggggaggattgaggagagccgagattggaaattgggatttgagttctgccatcggcgtaattaccaccgacgagaggggagaagcgctcgggattctacgggtgatcgtggacgctcgctaggatcgtcggtggcctcgcgacggtggtttggcggctggtgatttcgaaattcgtcgccagagtgcacgctactctgcctgtccgccgtgcgccgtggtcggggtcaccgtcatccaccagcgaggtaagagtaccttccgtaggtctgccatgttccttgctccgcatagcagagttttggccagtgttggctcgcctgggcgtagtcagggaccttgttcatggcgccgccgcccaggttggtcgagaggatgggaagcccctggctgttaaatcggccattaaattcacggcgaacatacctctgtttgaagtccggtcagtggctgggtccgtacggggggtcctcggcgtgcgtgctcgcctagaaagcgccgcggtgcgaacctgctgactcagccgtgtcgcgtgcgtagagaggaagacgatacggtagccgtcgatctcgtaggtaacggctcagattagatctgggttgtaatggaatctggtcgttggttcttcttaggacggttggattagaatgaggtgtaccctttcacggcatgtaatctctaccatcgatctatctgcgggcggccacgatttcatcgcgccacgctcggttctggaccattggatcgggatccagtgatcctggtttcataccgattcataatagcttcgctctaatcctatccgtctgtgtttgaacggacgactctcatgtcg

SEQ ID NO: 139294 - DNA, 316 bp, Zea Mays
ctttggatgaggatttggattattttgcggcattggatgtggctgcggcggaggcttctccgcgtttgatggatgctgaagttcttcctggtctgagtgctgggcgtaagcggcgaagggcggtggcgaagcgtagagtgagtgaggtggagggtggtcgtcttcgtgtggacagggctggcaagcgggaattgttgccctcgacagttggggcgagtgtaggtgagggggagttgtgaagtctctttgagggtgaggagctgaggataatgttgtttaactacagggagatgggtatcatcccgaaggttgaacc

SEQ ID NO: 139295 - DNA, 298 bp, Zea Mays
catcagttgagatggtttgtacatatccaatagagacatctagagttgctagtgcataatctagagttgctagtgcatagtaggatttcaaggcgtgataacaatggaaaaagatgaagataaaactgaagttgatatgaaaataagcaatataagaaggatatatctaagatttagtcttgaataaagatacatgaaaaacaattatctatctatatgcctgaaccgtgcattctactgagtttcttaaccggagtctaccgcagcttgcttacaataaaatacttcgctgctgctg

SEQ ID NO: 139296 - DNA, 328 bp, Zea Mays
caccactcccactgcaggcacgctctctcgctctcatcccccccttccctctcacccatcctcgatcgtcgttggaaacggctccactctgccattcgcctcagtaggtgcctcggttctccctgggccattttacctcaacgatgttctcgtagctccccacatcactcacaatcttctttttgttcgtcgattcaccactgacaactcctgttccattgagtttgacccctctggtttttctgtgaaggatctggccaccaggacccctctcgcccgctgtgacagctcgggaccgctctacacgctccagccctccaccgccggc

SEQ ID NO: 139297 - DNA, 368 bp, Zea Mays
ttggcaacactgtgtatgaggctgatggggcagaagtcgctcacccgcaaagcatcctttttttggggatgagaacaatattgcctgcattcagtagtttgaagccttgcccatttaagttgtggagctgattaaacgctgctgttaaatcgtccttaatgatgtcccagcacgccctgtagaaggtacctgtgaacccgtccgggcctggcgccttgtcgcgaggcattgagaggatagtctctttgatttcttcctaggagaaaggagcttccagggaggaaagatcaatgtggtggtagcctagcgaattccagtcgaacgtccttgctctaggggccgttgtgcccaaatgctgcttgaagtgg

SEQ ID NO: 139298 - DNA, 789 bp, Zea Mays
gagctggcggcggaaggctggggaggagggagcgatgctggcggcggaaggttggtggacacttgggcagaaggttagggataagggcagctgaggaaaaatccggtttagtccctttagccatcccttgaggaactagagactaaaaaatagcccatgtaacaaacacccccttagtcgtgatagctgaagatcgtgaggtttatttttcaactttgatacaacagaaaaatgtttctttggttaaaggagacggtgcattcagaagaaaatgtactagagtcataggagcatttttttttactttttttttatgaactattggtgtgcactgttaacagaattagaggatatctctcaggagtattatctccttaacaaacgcacgcgtatctggtgtaatctgttatgggcaaccgggagctgcgcctcccttgatcaccgcaagtcggttgtacatgaattgtaatcatctctataaatagatagagccacagccgtattgtgcgtggcgtcccaaacattttcacatggtaatagagccaagatccaaccaataaacaatggccaccctttcttctaccacctcctccctcacctcctccagcgcttccaccatacaatctactcctgctcctctccatcagatcgttaccatcaaattaaccaagaagaattttctcttatggcgtgcgcagctgcttccttatctccgaagcaacaaactcatgcgcttcctcgatggatctcaacccatcccgcccgcaatggttcctgcgtcaacaagcg

SEQ ID NO: 139299 - DNA, 1220 bp, Zea Mays
caaaaaacatgtcatcgttagcaagctgacctctgtggtcgttaaaaatagaatccaacgttgccttcacgacgaccacactgattggcgccaatacctacctctccccgcgcgtaaacagaaaaagaattaacacgatctaaaacaaccccgcctgaatcaaagcaggggcagccacaacgtcttcctcctcccctctcgttccttgttaatagatcaatctgcgcagcacggacagccacatcgtcttcctcgtcccctctgtaattcctagccagccaccacgtcttcctcctaccctctataattcctaggtcaaagggagcaggggcagccatcccccatcccttcccttccaggtcgcaaccatcttcctcctcccctctatattttttaggtcaaacagagcaagggcaggcatcccccatcacgtcccttccaggtgagctcgttttcctcccccttcctaattcttttgttcagatatctccgacggtctttcctttgcatccagaatcatgtagtaaatcatgtagtagggcgctggttgaactgctcctcctaccaatgataataatcccagaggcaccgactagatgcattcgtgccaattcaaaaaggcagcatgtccagaattgtaatgcagtggcccagaattgttagaagtggtagctgcaatgatcttccctcctccctagaacaacacccccctcatccgatgtgcccctaatttatattttggaaccacacaaggcagttcgtccaagcaaaagggtgttcctgctgtaatcttcagagaatatatgttaattagttagattacacaagtttatatgttaattgtgaggcatagtggctgatatgtgagaagtgtatacagaaattacttgtatcaaatgggaattcagaccattgtggttgtggttgagatcaaaatctactacagtattttagtttaattagtgatgctgctagaacaatttacttttcagtgttgtgtttcggttaatattattcatggatatcagtttcagtttatatcatatattttcctgttgattggcaccttactatttaaaaattgtcactccattgtttgaattataccttgagatctctgattctctgatgcatgtgttttggagctgaattcttttatggtgtttgtcaccttggaacacagaatcatattgatctttgcttttctttgcattgctcaa

SEQ ID NO: 139300 - DNA, 371 bp, Zea Mays
gacgaagccaatggcgtcaaaaactctgttcagtctcttttttccccgaccgccgaaggctgcagacagcgcattatcttccgccttggaaaatgctccaagcagttcatcacttgtagcttcgatacacttcagccagacgtcgttcggctcatcaaatttctccctgaatctgaaggtatacttcagccggaccagaccaccttcgctagagtcggtggtggtctccttcggcatttcccagctgtctataagcggccatactctgatggctatatgttcttgaattaaatcccttgtcccaacaaaggagcaaacagtgccgaaggccctctgacacgctccaactgtctcatcaatttctatctttg

SEQ ID NO: 139301 - DNA, 451 bp, Zea Mays
gggttaagtgttaaagtagcggtgaccatcggatcgtggttggagggacaggatgagagatgtgcatatgtgcacagccgtaggtatgtgcataagatacgctgccctcggccgaactggcctgcttgccaattcccctcctaggccatccaacgctcacttccacccattactctatatcatgtgggccccatttgtcatttgtttcctccacctacattgaaagtttgaatcgctctctcgccacggtcgttttagcctgtgccacgccgcagcgtccatccgtttccccaccgctataactgctggcagttttttcttcattaacggttgcagttctctcctccattaatctcttacagccgcctgttcctctcccatccttgttctctcctgtttgctctatgcacgtttgctctctgcatggggaaaacaccactgacccttcgcc

SEQ ID NO: 139302 - DNA, 357 bp, Zea Mays
tcagttattgttggctcagtctgccaccatcttgggagattctctccgttaacaaaaggaattgatcgttgctgcatcactctattattgccctagaagatgcatggtatttaatctgggtccacacatcggcctgagatagttggtgaaagtaggcccgactgccaccatgctgtgtttttgtgtgtacgagttctaggtccttgtgggctatctcctgtctgttctgctgttggttgaccccaaattgttatcgacttatgatgataggatcccaacaatgatttgcaagaattgtccctttccgacctacgcccagcagtttttaaatctgtgatgcaagtaaatggtacagtc

SEQ ID NO: 139303 - DNA, 354 bp, Zea Mays
gtcggtgtccatttcaacaatgagcactagatcgtcggcccagatatattccttaaaacatgtgtagttttccttttcgccatgttataacaaagactatgttgcttgtccatatgtgtattctttatttgcaaattgtcgtattccatttaacaaacttatagtttgtcggttttcgctcttggctaaacacatttatggattaggattttgcaaccatttattaaggacatggtagttgattgtcggtttgcacccatacaaggttgtcggtttccattttgagaacatgtaaattgtcgcctcacaaaatattgattaacaaatttatggtttgtcatttcaccctcttat

SEQ ID NO: 139304 - DNA, 411 bp, Zea Mays
aaggccccctttgggtatttcagttcccgggcatagtgtttgacttctgcaatttcttcttcagatagtctttttctcgaagcatgtcgaataataaagtcaagatcttcggacggtgcttcgggagcatgagatttagcttttttggccacatccttctccatagccatgccaacatctagagattcttgctcatccatatcctcagttgcggtaggctccgtctcagcaggcactgagggcccaacttcggttcagcacgacttatagcagcttcaacaattttctttgcaggggcaggagttaatgcccttgttgtctccatgacagcgtctagcacgctagccattctcatcctcttgggagttattgcaggagctcttgttatcttcggcaatcctgactccgccg

SEQ ID NO: 139305 - DNA, 408 bp, Zea Mays
gccggaggcagactcggcaagccttcgacatcactaggagccaaatagaaccaaaaatcccaccagttaccccatttgttcatagtgcaggggactatcttgacaacctcagccgaagtcttcccagtcctcggcgtgaaggtgcacgatccaaattgggctatcttattccctatcttcctcttttgccaatgcaggcaataatttttggcgaagatccccaccgatggctgcccaccataggaagtaactgcccagacatacttcgcaagcgccaccactccgttcagcgtcaactggtggacttgcacctcaaaccttcgcaacacctccaccacgaatcgatgtgttgggaggcgaagaccgacagcaaaaaaggcctcaaaaactatcaactcgccttcaggc

SEQ ID NO: 139306 - DNA, 310 bp, Zea Mays
cgggggttcacgcacgggcgtgctctgagcgcgcccccgagtgtcagccctcgtcgaacacgtgtgggtttgcttctgccagggttcaacggccgatttgagcaccttagcgtgcagatcttggcaaaacccccgtgtacggtctcttccctgcaccaaatcctacctttttgatgtgagttccaagcaaggatacggtcgaggtagagagatataggggtgagaagtcggctctgtcagaactgtccacaccgagacaaaagccatgccaagtcgtgtcaaacgacttagggttgggttcaaacttttc

SEQ ID NO: 139307 - DNA, 453 bp, Zea Mays
gttcattggctatctctggccgagtactggtataatactagttttcattcttcactgggcaggtctccctttgaggtactatatggcaggtctccacgacactttgggctctctacggctgatacggcgacacagctcgatctgcagacttggttagatcagcgtgagcttatggtgaatttggtacgacaacaccttcacagagcccaacaaaggatgaagtttcaagctgataagaatcggactgaacgggagttcaaagtaggcgatatggtgtatctcaagctccagccttatgtgcaaacatcggtggccactcgagcaaaccataaactcagttttaaatactttggtccgtatcccattatccaatgcattggagctgttgcttacaaacttcaactgcccccttcagctaccattcatccggtggtccatgtgtctcagctcaag

SEQ ID NO: 139308 - DNA, 489 bp, Zea Mays
gccttttgaaccaccttcatcagtgtgtacttcattaacagaacctgtaggtgtaagactacgtactggctcggtccccgcattgcctctccaggggctgccatgaaccatggcatcccatttgggttcgtttttcaggcgagtccagcagtgcatgaaatggaatggctttttctgtgatgttgcatacaaagatgcagctttcgaagtctacaaaagatgtattaccacttgtcagtgcacaaataacattacgttcacatgtaccatgaccatacatttagtttcacaactgaatataaatgtaccttgtcgttatctgtaaggccactttggttttccctgaggactcttgcgtagaatccggcaaatttccctgtttcagctcttattttttcccacctgctgctgagagccctattaagtctcaatggaaactcacctctaaggtcattgtaccttttctctattctagcccacaaaccctcc

SEQ ID NO: 139309 - DNA, 874 bp, Zea Mays
ttcacattccatgatcattttctactggttatacctaaactatgttgtcgcttgttgccaatttgcacgaggttaccgtttacataagttatccctttaggagcgcattgcactctataccctcaccgccaagcatgcactgggatgcatgctggggtatttgaaatactgaatattgtacgacagatactaacagttgtgctatttgaaatattaaagcacagtacggcctgacctggatgagtttgtcttacatgcattattttcaaagttccaatcactctgtacctacatgttggttttcttcagtgacgtggaaagcttaatgcagtgtctaaccctatggcatcagccatcataaattagttagtgccttggtttgcttcctcgttccaaatgccctcaaatgtatgcccaaaaatattaatcattgatctagcgtagaaaaaaaaagagttgtaaaattgatacttgtcagtgtcaggtaaagctgtgttgttattgctagagatttgaaatgagtttgttaatgctagccgtcaatatcttgaaggaaaaggcatcagctctcacctgctcataagaaagaatatcattttaaaagaaactaacttgtaaatggttcgaacctgaaagatgttcaacctctgacaaggacataaggacaagtgactaaggaaaaacactattagtgcttcagaaaagctccctgatcgatgcatgattattgagattaaaaattatctgtgacagcagcatatgttttagctgtttggatcctttctatcggcgctacttgctttctgtcgctctttggaaacaacaggtttcagtcaactccctgtaactgcctggtacgacaagtttcttcctc

SEQ ID NO: 139310 - DNA, 1207 bp, Zea Mays
cgggcaacaagccacgtggcagcatcgggtctccgcctgagcggggagcgcaagcgcacaggataaagcctgggcacgtgtcagtaccggacccttgcttaggccagggtatcccctatcctaggacctcgttatgggtggcccggaccttactcggagggatccggaccccatccaagggacctggcatgcttacttgggagtcccggaccgtattcgggggtccgggctgtgcgtacaggggtctggtgcttcctcgtggaggtccggtccaactgattgcatcctgggatatatcatcttttctggccatgtggcgcccctggagccatccacgtggtagggtcgggtgttgttcaccgcgcggctagagattgtcgtacgggcaccgtgccttcaaactgtagtaaggggtacccttgattcagggtaccgacagtggcccccgggcccgcctcaggggagggaacgagcctgctggtggggccaaagtttgattggcgattggcacgctgcttccgcgcgcttgctgtcgtaattactgcctgttcgcgccaactgtcacgcctgtccccgtggctgactgacccgtgacttccgtacttgatggtttcgctgggccatgcgcggggtgcctcgataccactgcattggttttgaaaattcaccttctcagtcttctgcggcggcctcgaggaggcgcggtactggcacgagcggcggtgcgacttctctgcacccaggaaccgacccccaaggaggatgacaagtgggcccgggcccttgtgctacggactaggctgttggttttggtagaggctaagagacgcactaccgtaggcggaggcgcgctcttcacgcgtcggttcgccttctcctcacacagaaaccggcgcgccaagtgcatgacatgtgggcctaggcccccatgccagaggttggaccgctggttgcggcgaagacgagggggcacactaccgcggggcggtagcacgctccttgtgcagtggttcgccttcttgaccgttggtcacggcgaagatgaaggggcgcactatcgcggggcggtggcatgctccttgtgcgacgattcaccttcttcgcactcgaagaccagcacgccagctgtatgtgggaccgggcccccgtgtcataggatggataccccggtgtgcatcgggggagacttctcgtgacgtttcgaggc

SEQ ID NO: 139311 - DNA, 465 bp, Zea Mays
caacttttcttcaactacgataggctctgtctcagtgggcactgaaggcccagcgtcggtttcagcttgaattgttgcagcttcgacttgtgcctgcttcgtttcagcttcgggttgcgccttggaagctttggcaatttttcttgtaggagcaggactcagggtttttgttgtttccaacacaacatctagcacattttccatccttctcctcttaggagttgcggcagaacccttttgtgccttcggcactgttacctctgttgaagggctcaaaatctctggcatttttgttatttctttaatttttgacccttcagccttatccttatcagcctttgtctcaactagctcaactgaaggtaacttcggcattatagtcggctcttcagtcctctgcacaggaggaacattttcttttgttttggcagccgaagaggcctcttcgccaaactcaggtaccac

SEQ ID NO: 139312 - DNA, 414 bp, Zea Mays
gcctgatgttgtcaaacgtgtatatcaaagtgcattgaagtggtaattgcgttaagttaatcggaaatgtctcgagtgcacgccgccccatggttgtatgcgagacaggaaaatataaggtgtgctcgatgggaatgttcggtcgttgtaggtggaatttgtctttacttgattagagaggtggtgacatgccaaagtagtcatcgcttcctctatgtttataagtcgagtcaaaatgcggggtactagtggtatgctaggcaggcagtgttccaaataaataaatcagtcgatgtggtagttgtcgtgcatgaattattgttagtgagtagttgaattacgagttatgcgagaatcatgttagaaacaagtgtgcggcgtgtaactgtgctcgggtggtaaacaataggtcag

SEQ ID NO: 139313 - DNA, 362 bp, Zea Mays
ggaacgatgacaatcaatatattccctctcgttgccattgtctcctctgagtagtcttcttctcttccgatagtctgcttcctcttgctacctccgatctctctcctccgttcctacatccatcagcatatcaagggttgctgacaacatcgcatgggagggagtgctcatcgccgagaaaacctgcgactgtcgctaccttagccatcttgctcactgtgccgatcagggggctctactgccgagtgtttccccaccacccaccaaatcgagagaggaataagcaccatcccgagaaccgtcgtaactcaacaccattctacgcgctcgtgattaatcactggagcggagctccaccgagg

SEQ ID NO: 139314 - DNA, 384 bp, Zea Mays
gccacaagccaccgacattcgctagctctccaaatcctctgcacgctgatgattggctgaagttagtgaagaagatgttaattattgctcagtgctctgaccgggagaatgttctttatgcttctggttgtcttactggtcctactgctgattggtgggattcttacaccgctgcccatgatgctgctgatactatcacttgggcagaatttgctacttagttcagaaactatcacattcctgtcggactgatgaagataaagaagaaggaatttctgtcaccgaagcagggtagcatgtcagtcagcgagtaccgcgacagatttattcaactatcaagatatgcactagatgaagtggctgaggatgaaagaaagcaggaac

SEQ ID NO: 139315 - DNA, 368 bp, Zea Mays
gagctttcttatagaacatgatatggatgtttcactacggtgaacttggtggtgtggccagtcgcggtacttagcttgcttggatagtaagcttgggaggacatgggaagaaagaaatcatgtagtagggttggtgaagcagaaaagatcctttggtgtatgagaggtgaagaaagaaattaggatttgcggcatgtgtaggttcaacgaatgttgtgggttgattaggttgttcttcgtgaagtccaacatattttcttcttcgatcttgtcaacaaaagatcctttgggtaataggtgtagaaactttgcatattcttgattaaatccgagcataaagtgtcccaagaatgaggggtgtgtgtaac

SEQ ID NO: 139316 - DNA, 299 bp, Zea Mays
cttcaacatagtcaacatggtctacccgtataacgccataatggggtgtggttcaatcaacaagtttgaggcatccatttgtggcctttatctttgcatgaggatcccaggcccatagggcgtgatcatagtctacggatatcagcagacaacaggaaacatcgagagagacttcattccagggcagcgcaatgttcactacctaacaatggagtgcgaaggcagcgatagtcatcgctcacccaaaagcaaaaagatcaacacccagttgcagagcaatgacgggatgaagatagtac

SEQ ID NO: 139317 - DNA, 330 bp, Zea Mays
catctaccctgcatcaaggaacttctattgacttagcccgaggtcctaaagccacattctctacctatacctgatatcctggacgcgtgcggggtgtgtgtgtctgttgcagaaatcctaggacatgacaggtggaggagcaggtggcatgccactacaggagacctaggacatcacatcccacgtcaccgatgatcaggatagaggacatgtggcatatgacgtgggtacctaaaacatggcggttcacgatgcgcaccatccatgccgccataatgccgcactggtgccacatcctagattgttggggcctgatagctaggaagtggg

SEQ ID NO: 139318 - DNA, 354 bp, Zea Mays
tgtattttcatatcgctctaaatatttgtgttgcgttgagttttttaactcacgtcgagcgattaaattgtatagtgggtactcggacatgtcgatcaggctccattatgaatcaactgagttatgacatcggctatgcattggctgtgctctggcaacacgatgcagtatttgtgtcgtacgaacttggctgcgtcatgtgattgctatgtagcactctcgtttatttggacagctcccgttgagtcgaaccgccatcactgagtcgcgtatttttcacatgccctgtaggcactgtctatctgccatgatcattgagccacaattgcgtctgttgcgcacgttgcgtggact

SEQ ID NO: 139319 - DNA, 597 bp, Zea Mays
ctgagcactatacatctgcaaatacaataagcttgagttttattttaaactaatgtatatatagagtttatactaaacaactggttttcagaactccagggtgtccatttacctcggctttgcatgatctagtcttacaggtgtcattcactcctcactggagaggattttgcatgatcacatggcatctgattggcatgcaccgcttttttattgtattaaattgctttgctatgcgctgtagctacgtagaattactgaaaagggatcgaacactacctttgcatgcataaaaggcttagtaagacgcaacagatcttaactgaatctagtttctgttcatatcacagttttttgcctagataatgcagtaatatctgttttgtaccgtagcagttcacagcaacaaaaggttttatccccttggatgactattgatgtaggtgatctgagacctttggtttatgatagaacatggtcttctacttgatctggtatgataatatggactctcagttaaagctataccaactttgagagttcatacaaagttagcttagatgacaagggatccgaagacaaatgcaattcgctaaa

SEQ ID NO: 139320 - DNA, 280 bp, Zea Mays
atgctgtctcatgagcttccttgagaatcagttcccggatcgaggtgatgttgggaacccacaacctatctttgaaccataccactccttctgcatcttcacggaaatctggacctttcccatcgatgatgagctgccggatctcgttgatcttctcatcatccttctgaccttttctgatttcttgctccagagtgggctctagctcaattgtcactccttgagtgttgttcagaaatccgaggctcaacctgtcaaattcctttgctagctcaaacga

SEQ ID NO: 139321 - DNA, 402 bp, Zea Mays
gagaatacaaagggagggagggagacaaatattcttaggttacaaatttgcatattcaaaaacaaattaaatttttttggtcaacttgaacttgatgtttttcttttttgacgcaatatgacgaaagacaggaatatagaattaaaaagcatcatgtcacaagaacctaaatatatgagtacgttttcagacttttctaggttatatccaaaatggcaacaacgaagccacccacgtcatcaaaaaaattcagactatctgatcgtcaatcaacggttgatggttcctctcgctctcctgctcccttcgtctttcgatacttcccaccggctttggatacttttgtttgatttgacgcttggccattggatgcctctcctcactccttccgcctcgtctttc

SEQ ID NO: 139322 - DNA, 448 bp, Zea Mays
tatattagtatagttctagtttatagattgatattccggaattttgtataggaccttagattttactggcccggccctgccttcacccattctttcaaaagacatgttatatgtatgcatacgcatgaaaccatctaattatttccttttcataatgatagcaacaatgtcatgcacgaaggaagccaacaatagcacaccataggctaagatgtagtaagctcacagtaaatacattttttgtaacaaacacaaaggatcaagatcaaatgccatatgcccaacaaagaaatgtgatagcaaccctaacctctttggttctcaaccacaccatcatgtcaacttcaagaccccttgtgttgcctaccctcgcctcccaactaaaaaaccaacttgcataccccttctacatgcaccgtccctttcccctctagagatagcacgaccc

SEQ ID NO: 139323 - DNA, 625 bp, Zea Mays
ctccaattgtccatcgtcgctatacgaacttgctacaactccgctgtttgttgtagctgcaagtggacgactcgcttctagttttgctgttcgaaaacggtatccattaatatcatagcgatcaaattttcttgcggtcaattgaccatgtgatatttgtagcaagtttttggagacactggcttcagatttcttacactacaaaaatgaggaaccaataaaaataaatactatgcaacatctgaacttaagttagaaaaaagataggcatggaggaaattacatgctcttggaaccactgcacgaaggacatgccactgtgtaaccctttcaagcgtaggtcatccaactgcttttgagtaagttgtttgttgggtttatatatgctatcaaagatttggaaataaggatgaagttccggcatattgacatacaagaaaagcaaggccttgttactctctatcgttcccacaagatgtgatgtgtaagctctgacacctttaccgtcccacttaaaagcacttagatcagtgattagagcttgctcggcaacatggtaccgtgtcgtttgcgcattcacgttgtttgtgtccgaaaaatacttgcttgagaataatgtgatctc

SEQ ID NO: 139324 - DNA, 397 bp, Zea Mays
gccgcgtgtccgggcgctttaccacgtcgcggatagttacgctaggagcgtccggtgatcgccggagataccgccacggtagaagccacctagcgtttgcgccagtgctttcttcttcctctggccgccgcgcgtcccgcccgattcaccggccaccgcatgcaagccctataaattgaaggccccggcaactgcgctagatcatcccgaagccatagcacccgctcccaccctcgatcattcaccagcgcccgtgaatttcaaattctccccaaaacagttctccgccaccgtaaaagcacctcgtcgtggccagccctccacaggtctgatcacgccctctctaatctcgttttagcatccttaagcttccctcaaactcgccgacccatgcaat

SEQ ID NO: 139325 - DNA, 471 bp, Zea Mays
agggagacgtgatcttcggtaccttcagattcgtcgccaacacgctcgagaaccttaggcttgtcccagattccccgacgacctcaatttccctcacccaagctctagtagatccaatctgcacttcgttttggacgtctccttgacaccatctcaaactcagaccatgcttcgacttggattctggccatgactcgaactcagactcatactactcaggagatcagttagtgtttagggcaagctctgggcactaggatggtcggtcctctaatcatgcagacaatgatgaagaccagacaacgagaatactaaagaaccatgaagagttgtggcagcgtggccaagatgcacatgaccattacccaaatggacgatttccatggccaacaagtgtacactacagcgagattgaacatcatgatggtgaaactcctttgggatagaaccaccccattgtttccataggat

SEQ ID NO: 139326 - DNA, 364 bp, Zea Mays
gccaccatcgtccttcaccgtcatggcatcacatcgccacccatgtgcgccaccctttttcacttcctgccggcatccagctggcaaccaagctccctccccgaccgcctataaaaggaccgcccaaagcccctattcacctcgcaccactcaccatccctcctccctgagctcaatctgtgcccacgcggccaccctcccccaactttggtgagatctccatatcctcctccagccgtccagagctcaatcaagctagcgcacaagcttcactgcttcctcatgaccacaatgcacctctcctcacccccaatcaaccaccaccacctcgtcagcagcattaccatcacggtgaccctccacc

SEQ ID NO: 139327 - DNA, 314 bp, Zea Mays
cctcgtgcagcatcttgactggtcgcagatggatggacggatggatcagacagagctagcttgtactccagcgatcgagttggcttggctactacaagcccttcaagtggtggtggtggccgcgctggtgccggggtgattaataatatagtaggagagcggcttggagaaggacaagagaataggagatcgaggggatgtctctcctcggaaactggctgtccacgaagcacaagcgctacggttagcacgcaagcagctcgtgctatgcgcggtgggcgtggcgaactggcgagacgctgtggctggctggc

SEQ ID NO: 139328 - DNA, 685 bp, Zea Mays
cagcaagctactgccattcaaaattcaaaggaacttcccaacacgggtgagctcagatagaataaattaatctatacatttccagatcaaatcataaacatggcactaataatagttatggcatttatttaagcctaaaatgttccaagcttttgcggggaaaaaacaggaaatgttctggcgaagtatgaagggtgaacagttgcaaaagacatctggatcaaccaagagaacatagcagcttacgtttacttgtataagcaaatgagaagcaccaacaaaccaaagtaagtctgaatatataagctcaagtgagtgacgctatctggaatacacatgtagagcaagtgagcatcagattcaccaacaagtcaccggagtccagatttgtatatcgcaccgtataaatgatggcttaggtgattaggaattaggatttctgaatgttgcaaaatcaatatcaagacaagtaacaagtaaaggatgaagcactactcctgcttcccttataaaaagaaaacccagagaagaatatcaagttggtatgactaggattgttaatatttcaaaaatcaagatcaagacaagatgattggataccatcctatagtgagtaaataactcaaataatagaaaccaaagttgagttcttacataattcaataatcacacggacaagctccga

SEQ ID NO: 139329 - DNA, 480 bp, Zea Mays
gagatgaacttcccgatccttgctgattatttgcttgattctgcttgggatatgggcagtccttgatgaaatgtccagacttgccacaattaaaacatccggttgaagagctaggcaaggcagggaatcgagtgcctggggcacccggctgatttggggcagtgggggctttattgggacgaataattatcggctgcttgaaagggaaggttggtgcacgtggaggagtctggttagaaggccggagaataaaccgttgcctttttgcctagccctggttagtcttctcaccaccaaatcccttgttctttccggatcctgcatattttgcttcaacagatagggctgtgctgacagcctttccataagtcaagtcaatacaagcagccattttcctctgtagccgatcatttagtcctctcatgaagcaatttctctttttcagatcagtgttcacctgatcaattgcatattgggaca

SEQ ID NO: 139330 - DNA, 580 bp, Zea Mays
taaaaccacgggtctacggtggtagttcggaacgatgaaacccaatcatgatatcccatccacaattagttacagaaaatcaatacaaagaattcaaatacaacacactaccaacctaataactgtgtgatagtcatgctcaatcatgcagcctccttcctttcttgttcttcgctttctctctgctcaggcaacccaatgctggtggtcatgaatcagccgctgctagccaacatctcacaccaggcagtagtgaaattgattgtgcgcaatgttctcttctcttgtgtgctcccagttttattggcgaaggcttaatcttgcatcagatgttgctgcttcccaagtcgtgggggtcatgtcaaattgtcaacgattgttggtagtcatgtactcatgttcaatgttagatgtctcccatgtctcagcaacataaatccacatcatctccatctcttctcctctcccctgtacctcactacaacccttcggatctgtggtgtactgccgagtggagtggtgacccagacagaatcgagatgttgaccttgcttgacccgacccttgatttggatgtcct

SEQ ID NO: 139331 - DNA, 374 bp, Zea Mays
aaggaaggccactagcccaatactgcaagatgatgaacttgagagagaactccactacctcgaagctattcatcagcaagttgagaagcacacagataaaatgttttggctctttgagcttcataagaagatcgatgacgcaaatgaacaaatgtgcaacatagcacaggaggttgaacatcaagaacatcagcacagtcatagagaccttcggcatgagggtcacaaccatgatgacctttgtcatgaagcatacaactatgaggacttctcgtattatgatgcctctccctaacaccagaactacaagctacacagtggccaccagtatacaagccccctagctaccaatgtatgatggtctgtcagatcca

SEQ ID NO: 139332 - DNA, 385 bp, Zea Mays
aatttctccgagcgaagcaaccaaagcgctaacttcttcggcagagggtcacactctaaggcccaaaccgccatcagcgacaggtggattcgacacaaaatgagtgaaggccttggaaggaggcaggttctaggccgagtatgccacaggggcaccaacatttgataccttgcctctaagaatcatttcaagccggttcaccaagtctacagcgggaattattttgttagtgacccgggttgagtcagctagacctcggtacagataagccgggtatgctctgtccttcaacggttgaatgttcttaaagacaaaatcagcaaccacagcctctgcagtcagacccctctccttcagcagtccaacttcagccagcaaagcccct

SEQ ID NO: 139333 - DNA, 383 bp, Zea Mays
gtcccattccttgccaatgtgtgcctcgccctttgtcctcctgtagaatttcttgttctccttcttccctttcttatcttgtacctgatgattctcattattgggacattgagcaataaaatgaccagtcttaccatagaagcatgaatgctttccccttaatttgttcttgttgggctagtccttatgtcccttcaatgtagtcttgaagcgctttattacaagcgacatttctttcggcagcctctacttgtgccaccttgtttgggagcgtatccgtgttggttgttgccttgagtgcaacgggctatggctcataaagaggaagaagttcgttggtgatgtcttcaatgtaccttgcttctttcaccatcatgtgtccg

SEQ ID NO: 139334 - DNA, 601 bp, Zea Mays
gggcggatgtggtacaatcggctcagcgaattcctcctgaagaagggatacattaataatccagactctccttgcgtattcattagaaaatcccagaagggtttttgcatagtttcggtctatgttgatgacttgaatatcattggatatgctgaggatattgaggaggccagcgcctaccttaagatagggtttgaaatgaaagacttgggagaaaccaagttttgcttgggcctgtagatcgagcatctcccagaaggaatatttgtacaccagttgacctattgtaaaaaggtccttgagagatttaatatggttaaagctcaccctcttgcatgcacgcatggacgtgatgcgttttttcgatctggtcaaataggctgacgcttaaggtgcatgcgtcgagcaggaactgcactgcacatgcggttgatggtttccgtggtcttatgggattagttactttcggccgtaataagtgtttatttgtttattattttttactgccatgtttcctctcgaccgtgcactataagaatggattcttaatgaatttgtttagtattttttaagtgcaatttaattttgtatgcattattta

SEQ ID NO: 139335 - DNA, 939 bp, Zea Mays
aaaatgggacaatgtagaagaatgaacacacttgaacaataggtaccaagattattttctccacgaatgacaaattatttttctttaattttttaagatttcaacttagggtagtcgaggaagtttttttttgacatgtaatacaacagcaatatcaataattttctacacaccaatacaccaaggaaaaacatagcgtcttagcatagcaaatagcaaaaaacggttaatcttttattaaattgaagaggactgcaatgcaccttaaatgaagtggcaggggcgcagggccactggccgcttgccgcagcccgtacgggggccggggggcagccgggcaggccggcaatggcggctgtcggctgggcgcactagcgtctggcggtcaggcccaagcgtgagcaagccggggcgtcgggcgaccgggcacggtggcgtcgcctacctaggtgcgcgattaatctgagcaaaggtgtgggaggagggactagaggcacgcacgggcagtggccaatgctgaaggcgtgggaagaggaagagcaggcagaagtgagagatcggcgttggcgtggctccattaatttatagccggtggatttccaccttccatcaattgagaatttttgaaggaaagagaatggcacatttgaggaaacatggtagaggaaaatcgaggaagggatcgcacaattgaggagaagggaacccaatgatacctcttcctcttctggaattgctggatccgttgataatcaatctaatgagagaatgcatatacgaaagaaagtatgcatacgattgatggaaggtatactccacctcgcctctaaaataacgcacatgaagattgcatgcaacagaacgtcaatcgtgcatacaacagaccctgaatatattacatggcatcaagtaaacaaacctattgcatcaattaaacag

SEQ ID NO: 139336 - DNA, 356 bp, Zea Mays
tattctttgtccatccagtgatttatgcctgcatgattgttcgtttcacggttttagtaattcagtagcaatttactaccggtggatatattatttgtgctttgaaatttgttaatgcaaacatttttataagacaaacattttatttctctacttcctctcattgcacctacgagcaatctaatatactttgcgaacctgaatatggttttgtgaacctctatttgtgaacctgacaaatgatgaagatagcaaataatgaacccgagcctgaaatttgtggatataagcctgtgaatctgaaatctggattgagcctgaacctatgagtttgaaatatgaaatctgaacctcgc

SEQ ID NO: 139337 - DNA, 500 bp, Zea Mays
ggtccaactcaacctagtggacataaatttcctaaagcactagataaaaggagctttcaaaaagattggtttaagcaatataattggttggaatacagtttggtaaaggatagggattattgcttttgttgttatctttttagaaagggtgtagatgatgacaaacttggttatgaggtatttgcaaaaaaatggctttaagcaatggaagaatgcctacttgatacttcaaaaacatgttggtggtcctaatagtgctcataatagagcacacacaacatttgaggattttgataatcaaagggcaagtgtaaaacataaggttacaactcatacaaaagagtcgccgttgaattggatgatttttctcttgatgatcaaaaagcaataaaagatcaattatcaaccttcattattcatgtaagaagacttgaggagtttaaagtttgtcatgaccttgcaagcctagcaataaaaatggttgaacttaagaggcatat

SEQ ID NO: 139338 - DNA, 337 bp, Zea Mays
gttttaaatggtggtgctatatggggtaccttggatgctttgcttggagtggtcaaattttaggacgaattctttttaaggtgggtagagtgtgacatcccaattttctgaaaagaagttaaatttctttttctccttttttcatgttctgtggcattagggcttggagtttcgggaggcattcctcagagaaacagtagatcttttggcatttttttcgctagggtcgggagctcagatgggagagcgtgttcgggcctttgatctcgatccgatagataggagtcccccttccttcccaaccctagccgaccccctctccttctcccaattgttg

SEQ ID NO: 139339 - DNA, 671 bp, Zea Mays
ggggaagggtgcggggaacccaatggtgggggatggactggggtaggggcaccagaggatgaggtccatggtggggcagcttggcggcggcactgggaactctagcgagcaatcgcgcgcaatggagaacaagggagggaaatggcgggggctggagaggttccttatgtcggtgttctcgaccgcacaccatgggtttacccttgtgatgtttttgggcaggacgacatcattgatcgtgactcgacggttcatgcggtggcacgaccggggaaacacacaggcttatacaggttcgagccgtgtgggaggcataacaccctatgtcatgtgatgatctttgtattgggatgacatcacaagctgtgaactatgagaacgatgggctgaggtgagatgaaaatggtaggggtgcctcttggccttatatacacgaccaagggtagctatccccgcacaggtgataaatgtaatccgttcgcctatttcccgatttgtagcaaactgtcctcctacatctagggaaccccctatgctcatctgcccaagttaccgccagaggcttagcctgtcgggtgggcacaaccgtcatgcccaatttactcgtgctctcgtggtgcctaactcgggcgtcggacttcgatgctcagaatgggcttgcttcgcctggt

SEQ ID NO: 139340 - DNA, 351 bp, Zea Mays
gggcaattgggagttaccttgcaccaagactaataaacttttgtttgcggcatcaacagatattgtgattggtgatggctctaaaatatcattctgggacagtgtctgggttggtgggattagggccaaagatctggcgcctcgcatatttaccatatcaagaaataattggagcaaatccttggcagatgtggtaagaagcaatgcctggatcactgatcttgacttgctcagatagaacaattacttttcaccatattcttgagttctacactctttggtcccatgtccaaaagatccaacttcgaccagggtttgaagatgtcgttaactgaaaattcactacaaacc

SEQ ID NO: 139341 - DNA, 311 bp, Zea Mays
gggataccgagggggcgattgcacctgaatcttcgacatcaaaagggaagaagactgaagaagcctctttggaaaacaaaagcttcgacttatggcacctgggaggccagcagatttccgaagaggacatatcagagttaaaagaatttgttgtatctggcggttaccagcctggatccgttctctttggcggcgtagacaaagaaatctttggtgcatccccgatcgcgccggagcaaaaattgtgaataccttggcaaatagtatcaaattcctgaagcttgaaagagatattagcaattagagaaaac

SEQ ID NO: 139342 - DNA, 525 bp, Zea Mays
attttaagttaagatgtctaaaatagtgaaactagttttgttggtctcatggtgttatgattgagaaaaatatgaacttgtgtatgaattactatttttttatgctgtgttagccaactcttgttaaatagaggaattccattgcgttaagtaattgttatatgtaaatgtttccagtacttcaagtggttgcaagttaattagtagattctctagtgactctttatcccgaaaggtgttaagtctgcgcataaataagagataagtgtattttgtgtagtgtggattgattttgagtgcatgtgtcgcaagaaaagaattagtgcgcatataggcgatgaatgagtgtgatgaaatggtgacatgccttcgtagtcatcatgtcgtcggttggtgacttaactgaaggtcgtagagaaaagtcgattgcctgtgtattattattgtcaccttgtggttctgtatgaattgcaacgtgaagtagtaggctctgtatgtgatgctagatgtctaggtagacgttcg

SEQ ID NO: 139343 - DNA, 428 bp, Zea Mays
ttcgtcatggccgccatgctccatgttcaccacaacttaaggcgccgcagtgacatcgtagccatgctccggatgcagacggactgccactgagaccgtctttcaggggaaaagaacgtatctcagcaaatcgcctggcatcaggagtggagatgaaactctacaaccaaaagtgaacaaatcggaaaacacggagatggcagctccagacagtgttggacttggaggtgaatgaagacgtactagattatatgggtccgatctgaccaaaattaacatgaaaaagtcattgtgtgcggggccaaatcctagttcaacagattaccatgttggtactaattgcacatacgtttctaacaaaaaaagcatattcaattttgttaaatttagttaataattgagatttatgcaacaaaaccacaccatca

SEQ ID NO: 139344 - DNA, 622 bp, Zea Mays
gtacgatcgatacgaaccgcctgtgctaactggaccggtggtggctgtctcgacaccgcctccacttgcatcctctgagtctctgactgatccacttggatggatggacggatggaggtcgttgccgtacgtgactgtgaacatacatgcatacacacacaagcagctagcgcgtgcgatacgacgacgagccattgagcagcagagagtagatgttgggggactagacattacacaaggaataaaataaaaaaaggcaagcgatggctcgctttagtgtcatcatccggatatataacaacctttcggagaacatcgatcgatcacgtatgttacgtacgtcgcgcttagcttgctttactagctagcgtcaacaacaacaacaacaaaaaaacaaatctaaaaagaaggcagttttggtcaaaagacgcacgcacgcacacacagcgcggccgggacgtacgagaaacatgcgtgcgtactgcgtaggcgtttagtgcggcacgactgtaccagactaatggcacacacgcatgcatgtggtaaggtcagcgacagtgtttaatctatatacggcaggtgcaccacatacatacattgctctggaagtctggacggccgg

SEQ ID NO: 139345 - DNA, 640 bp, Zea Mays
gtcgtttgcagtactgatgggagacaaataatggcgacagtgccgagttggatttaattacaagaggacacgtacggactgatcgacctctctcgatgatcgagaacgaaagttgaaagaagaagaaaaaaaagaaggcattggagtgagtcgaccgaccctcataagccgggaattgaaagcgaagcttgtagcaagctagcactagtagctaggccagcactggaaaggaagccgcgcggggatgcaagatgctagtatacgtaccgaacaaaaggtttcagctgcctcaaaagcaaaagggaaatgcacgcacgctccaccatgccatgcatgcagctgacacactactaatcccccacacgcacggcacggtgttgttgttaacacaagataaacgtagcggggtagctaggctaggttccctatctgattggctagagcacttactcgtactcccccaccatatgatataccctgctcatcgactaactcgagtagactagagaaagaaaagggctaattaacctagcctagcctagtattagactgctacgtttcgatcgttggagcaagctagcggcaagctttcgtgatgttgttgtggtcgtgtcgtgtgtggccgggaaactaaagcagg

SEQ ID NO: 139346 - DNA, 283 bp, Zea Mays
gtggtcgtcttcgtgtggacagggctggcaagcgggaattgttggcctcgccggctggggtgagcgtaggtgagggggagtagcgaagtctttttgagggtgaggagctgaggataatgttgtttaactatagggagatgggtatcatcccgaaagttgaaccaatgtaatgtgtggtgcccacgctgcacgtatgtaactataatttgtatgatgaggctgtgtgccttcgctgatccgaccgtgcccgtaggggacttgtgcatttgatctagcgcgttta

SEQ ID NO: 139347 - DNA, 1031 bp, Zea Mays
caatattgtccggctgcgcacagaaatttaacatttacgattcaatagcgactaaatttaacgtaatacgggagaacttacgtggctttgaagaatatgaggtgtgtcctattcatgtggcccaatatgtctcatggggatgtgcttctctgcgccgaccacgtctgctgtttttgtgtgctcttcgatatgtccaggtaccctcaatgccgccggaggagtaacagatacaccctctgtgtatggggcgattgcagacaaaacaggttgcatgtccattgaaacagacgtacctgctggcttatgcacagatgttacaggcaggatgtcatcgccagcgccggtggtggacatattcttcgccggccggacctctcacttccgccgccgctaaccgccgccaataattcagatggacgagcgaacgtggacgcggctgtaaagttgtattagtttcctaccgtaactgcgcctttattttcgcgcacgaaaatcatgtcttgccttatcacaaaacctgccgtgaacgtttgcatggtttacgctatcatgtatcacaacgttatgcagtcgtaaacgtctagcacatgcagatattcgtgcgcgcgagccctgggcatgcaaagattccacttatgcatgagttatgcacatttgtacacaatgctttgatttaaaccaataccatcttagccttagtgccctagcgaactgctcaaggtctaggacgcctagtccccctaagtcttttggtgtacatactattggccaacttacccagcaacgaccatcattaacatttttctatctccttgcctttccacaagaaacttctccaatatcgatcaatttttttgattaaccatttttagttgagaatataatgagatggtagataggtgcactgaaaggactgtcttcaccaaagtttcacggccaaccaatgataggagcttccctttccatccttgaaggtgacttccaattttgttgattagaggttggacatccaccctcagcttgtgggtgtg

SEQ ID NO: 139348 - DNA, 372 bp, Zea Mays
gacgtagtgttatgcgaatcggtacacaatgataaccaccagatcggtaaccgatggtgccgatcacatcttatttcataactgcgctgatccgtccgatcgctgatcaacagtgcagatcagaggaccaaagcgatatccaaccaactaatctaggcatttcatcccgatatggacggcataggagccatactccccacgacgcccaacacggcggcgccgccagccagtgcagcgacgccatggccggagtgtagccaatcggcgtctgtgtgcactatcaattgagctaagctcgctacgcaacgagaataacaatccgaacatactaattaggctctcaccgacgatagtggcagaggtgaagttgcc

SEQ ID NO: 139349 - DNA, 720 bp, Zea Mays
ccccccctgccgtggactctgtgaactccgagtgagggcagggcatggtgcggtggtgccgttttctgttctttccctgatactgccagaaacaagagaattcccttaggataggcaattcgatggcgagaggcagcagcagtgctgcaggagccaacatcatctactgctaggtacgtgtcacacggggaagggaagggacgatctgtaaagcctgaagcggcggtaccggcagggcaagcagcagcgaagacgcagctgcccgttctcgtgctgtagtaagagtcaaactgggaggattcgttacgtgcgagcccaaccagccgtcatttcgctgcagccaccggaagtcgaagccgtcgctgtcctcctgctggatctggaggctggaggagcgagcgagcgcgctccatctccattgagcggggcccgtcaaagttggacgagtggcgcccgagacctggctgaggagtgaggctgagcaccggccaggggggcggccaagagagacgtgtgacaggctgacagctgatggcaacaacaccgagaagtatacccgccggggctgaagctgaaggcggaagggtccatgctggccgcccaatttgcgacggcgacgcccacggcccgcgggctattctcggacagcgaggccccgacgcaacaggccgggtcgttgaaggggatctgtgccgatgtcgtgcctgcccactcctgctg

SEQ ID NO: 139350 - DNA, 498 bp, Zea Mays
gggttcgggagttttatcggcctggaccaatcccctcgctgtgccacacctgctctcggagaccgtaatcttgcgcgccatcctccggctggattgttgcagagtgtgcaattgatcaacccgttagtaatggggctaaggttcggggattttgtcggcccggaccatgtttcggtcttagacaatacatcttctaaatgcaagcaatgaccaatgtaccatttatgacattgagaacacactacatgtctcataattttttggaacatttaaatttcaacccctgcctaaattctttactcggttttgtcgttccaccttcacaatccgctcagaaatcccctcacgaccctattttctaccgtcaagtttcttacatgtagacccaaaaccatccacactttcccctttccccttctcttcccaaatcgtaacgagcgcagaccacgcatgcgtggtggttgaccgcagcgtcgagcgcagaccacgcacgtcgtc

SEQ ID NO: 139351 - DNA, 341 bp, Zea Mays
gcgcacagctccaggtggatggcgggttgatttctataaactacagggactcttttgaatgtttgcttggccgaaggggtacggggcgatcacagccattggattggatatgggcgcgccagattaaaacactactccagcgaaccggtactcagtgtgaccccttggattcaaatccgacgacctagattttaaacacacagatctcaccgcagccgcaggatatgagatctacgattcattttccctacgcgcgagaggttacggaagatctaatccaagccgtcgctacggagatcaacggcacgagggcaactttccccttcctagcagagccgcga

SEQ ID NO: 139352 - DNA, 378 bp, Zea Mays
gacgagcggaacgggtgggtgcagatagattgaactgggactaggagaattggcacgccttgttatatagagcttagctagccattgtcagttgccatgcacgcgaatagatagagaccgatagatactagcatcgatctagacacggggacatgcatatgctagctccacgagccctatgcatgcatgagtattgagtagtatagtctctttcggacccaggagtgaaacttaaaaagttatacatggattcattagtctaattaagtttaacgggccaaagcccaaataaaacaccatgcacgatacgtaacagaacggaaatcttgtcgcacgatgccattcttcaagtaggcaattgtagtgatgaaataaata

SEQ ID NO: 139353 - DNA, 725 bp, Zea Mays
caagagtggcctggaactaagaaggtcgaatcagatacgcaaatatgtgactgaggtagtgggcatatgggagctaacgacgagcacaaagtctatccaacacaatgttctaaatctcacatatcaggaaatccataatgtcaaatacagagtgagaaaccagggcacctaggagccagagctggatatgagtattggcctctctgtagcccatctgtggtagcaaggtcagtctcattagctcatataggaacttggccgctgtggtaaagtctataggagtgcgcctcgagtcgtctatgaaaggtggccttaatagagctgagatgtgagatgtgcctggagcaactccatcgtgagggcgacgaggtggtcgtgaagaaccataacacagactgtgaagccttgtcgttgacttaggaaatccaaacaactctttgatctgagtagtgtgtagagtgacatcctcgcgctcaaaacgaaacctcatccactgatagtcagggtcaatccatattgtagcatagaagactctaactcactcctcaatgtagcgaccaccaaacgtcagcagagagtatatgcctggtaggtaggtgatgtggccctcaaccttagaaccgactgatgtgcgaagagccgtcaaatccaaatgttggtgagccttcaaggctatctaagctatcaggtgggctctataaaatgactcctatgtctgagtgttg

SEQ ID NO: 139354 - DNA, 430 bp, Zea Mays
ggctcaccatacagaatcttaccactcatgttgtggtcacctaatgcgacatcttcggtcctttatatcctattcgcttcctcaccaaaccaccctcataccgtgttgacccaccctatgcccttgtcgttgctaccgctgcctccgcctctcaccgtcatctaggcctcattggccacgacgtcctcttcagactcttgaccacttaggccatcccctgccctgcgataacactgcctcgccttgccatgcttgtcagcttgtgcgccacactcgcttatccttcccctcttccatctctcgcatatatgcctagagttgtgaccggtggtgggtagacatgtatgtgtgtgttccaactataatgggcttaggcccaacccacatactattctatctattaatatagcagcccaaccctaattagagt

SEQ ID NO: 139355 - DNA, 705 bp, Zea Mays
cagctatgcctcaaatcaccgcgcgctggatggtgcccggtgctgccatgcgggcccgcgctccaatccttgcctgtgcacacgtttgcttccgaacagtggatgacaggtgggaccctcgtgtcggtatcttcttcctctttttgcctccgttcgcggccgccgttatcgggtttgttcggtggagattcccccgcaaccatcgcacgacctagtcagctagtcccctcgactggtatccgcgcgtgcctccaccggcctgtgaacccgcgccgaccttccctgttgccgcaaccatgccgggtcttgtgcggccgtccctagttcatcgccgccataagcgggatcaacaacaactgcgcacgcaccagccccacttccgccgatcaacaacgccttcgagctcggccgcggagatcggatctctaaccatgcgcaccgtttctgccgggggtggttaacctcgcgcttgaagctctctgctcgaccatcctcttctcctccctatctcttctctgcgtccgagctgtgcgcgggggggctccccaactaattccccacaaatcctccgtgattctcgtggatctacgagtataaaataaacccgaagcctctcctctgcgttcatcgcccattgaattcgcctctaccaccacctcgcggcagcacctccatagccgatggtttctgctgcgtcaacaccgg

SEQ ID NO: 139356 - DNA, 340 bp, Zea Mays
ggagtttagtagtttctatatcactagtgatacgttgattttttgggtagtggaatcaatgctctacctattagctcaaaagtgtgattaggttaagtcaatgtttgtgatgtgcttgtgttaacgatcatggagtagacgtagtctatatatgtgattaagtagtttctatgtatgtgaaggacagtgtttgcttaggcaaagagtgctttgggaaacgagtttgtgaggcatggttaagttaataatgcaaagaaatgtttattacttctagtgcttcatcactaataattattagtgttgcttatgatgagatgtcgtttgtttgtatggagtcgat

SEQ ID NO: 139357 - DNA, 672 bp, Zea Mays
cccaaacataatgacatgctgttttttgtttgagcagaagtatatttgtagtccacaatgcaatgtccaaaccaaaatgagtaaaatgaacacaaaacaagtaaatatgttctaatggtgatttcagatgaagactatggaatcccctctgctgcattcaattaactgccccaaaaagacaggtaaggtatgacattggatatcaaaaaggggcagtggatattcccctatacatcgcgggttattgtttatttttctcaccacaagtatttttgtagtccagaatgcaatgtccaaaccaaattgagtaaaacataacacaaaatgagtaaatatgttttaatgttgattataaatcaagactatgcatccactttgctacattatgttttctgtgattttttgtttctacctataggtcatctattgtgcctagctatagcctgagtgactacaaagctatgatgtatgggaaatactgaaattcgaacggtaaatttgaatgtattgtgttccctgaaaacatgtatacctcaaatagctgcttttgtaacaatgaatatttacttgtgttcctagcagcctgtgatgaagatggatatattttcgtatgactattcacctgattttggtagcgtcgcccgtgagctgcttgtacctaccaaggccttt

SEQ ID NO: 139358 - DNA, 952 bp, Zea Mays
gtcataccttccagacttctggttggagctctattcagaatgtatactgctgtgtgaacagcctctccccagaattcactcggcattttcttgctctttagcatgcatctggccatctcaacaatcgtttggttacgtcgttccacaacaccattctgctgtggtgagtaggggggcggtagtaaaatgtttcagccctctctcattgcagaattcagtaaaccaaattgagttgaactcaccacctctgtcagagcgaaatgctcaaagtctgcacccactttctacttctaccaatttcttcactcgcttgaaacactcaaatgcctcagcttttgtcatcaggagctccaaccacatgtaccgactgaaatcatccacaacaagcagaaaataattcttacctccaagtgtacttggtctgatctgaccacacaaatcaatatgcagtaagtcaagtggcttatcagcatgatagtttgcaatctttggaaatgcatgacgatgttgttttcccaatgcacaaccatcacaaaattcctcaactcggtctatcactggcatgccctccaccatattcttggaaccaagatcacgcaaggttctgaaattcagatgaccataccttccatgccacagacgccttgtcttctttcattgccaccagacaaacaggagtggccagctgcatcttcaacagatagagacggttcttgaccctaggtgctctagctagtagacaccgatcaacatcatacaaattgcagaaatcactctctatcacaattttatagcctccctcctcaagttgaccaaggctaactatgttactttttaacttgggtatgaaataaactaatgtgagtaccttgtgacctttattcctggtctagagcagcaccgatcccatgcctttgatctcgaccaaggaaccatcaccaaaacaaactgt

SEQ ID NO: 139359 - DNA, 461 bp, Zea Mays
ggaggagctaaagagcacggtggccggcaacagaagggaaagacaaagggtaaagacaaagagaaagatcagcaagaaaggaggcagcgagctgggaggccatggcgccggctgatctcccaccaggctttaggttccatccaactgatgaggagcttgtgaactattacctcaagaggaaggtccatgggctcagcatcgagcttgacataatccctgaagtagacctctacaaatgtgagccttgggagctagcaggtaacctgaaatccaagttcattcagttgttcatcctgagatttcatcactccgaactgaatttttgagatatgtttgttttggaagagaaatcattcctgcctggtagagactccgagtggtacttctttgggccaagggataggaagtatccaaatggatgccgcacaaaccgcgcaacccaggcaggatactggaagtca

SEQ ID NO: 139360 - DNA, 477 bp, Zea Mays
ctcgtcctccgccgaattctaatgggggagggatggcacaaattgtcacctctatgggaagggccattcatagtagcagaagtcactcggccgggatcatatcgtctcactccgatggacagcacagaaattgggaactcatggaacatagaacacctcaggaagttttacccctagctacatcccagaagctattgggacgatgatgtattctgtatattgagaaatatatcatcaataaaaaggcttcaaaggcactcaaactgttcactgtcagttggcatacttacttaactcggggtgaccactatgccctactaacggagcaatcggcttaagtcggcaatgacttaaggcggtgcgacatgctcacacttactgaactcgaggtgaccgctatgccctactaacggagcaatcggcttaagtcggcaatgacttaaggcggtgcgacatgctcatgcttactaaactcgg

SEQ ID NO: 139361 - DNA, 854 bp, Zea Mays
gggagatgaaactgaagtgattgagacaatgcccatatcagaagtaatgaggcgctcaggtctggttgtgcaagagggagctactgccgaagggacccccaatgtcaaagctgaaaagactaaggctgaggccgggagtgacaacgagagtgaagaggacaatagaattctatgcccaaccaaacctagtcacattgaatttggaagatccaccgtaacagcagaggacttggttgtgatgaagaagctaggctgctttggagaaaatgaagatggattgattcgctttgctggggaagaagtaattccatagccaaaggaagatgaggttgttgtgttcaagagcttcttcagggtggggctttggttccccctgtacgatatgataggggaagttttgaagagatttgagatatatctccaccagctgaccccaaatgctattgttaggcttagcatttacatatggactctccgaagccaaggaaaaagtgtcaatgctgaagggttttgtcgcgtacatgaacttcattatcagacaaaggccagagctgatggtctgtacaagaacttcggatgctataattttgcatatcaaaaagatacgaaggcccctgtgattagataccgcaccaaatggcctactgctgaacaaatgagtggttttatgtgaaagctgacgagaagagaagagagaatcttatgagtatggtgatgagtcccttgaaattaagcttcggcatgacgagaccactatgcatcatgcaactctgctctccatgctaactggccgaagtagaatttagggtggtggctggtcatattggcactagggatttagtgcagaaatactt

SEQ ID NO: 139362 - DNA, 567 bp, Zea Mays
tttaatatagggacatgacctaatcaagtgcccattttcaaagcattcactacacttcttacttttcttagcgcgaagtgtgacttgatcattaccttggatgttgccttgtatggaggcatggttgaggcttttgacagaggtattttttttcttttgttccttcctcttgacaatcctcaagtccttgacattttcttcaagggattttgtgcatgcctcggttgttcccgtctcaagcttcttcaccatgtgatcactgttatcttgagaaggttgagcagtgcacttcccttttagttgtggcaagctcattcttagcctctcattttcttccttgagttcttgacatgaatcatcttttactcctgcaaattctagctcaaaggaagattcgcttgctgacgagcaacaagcattagcacatggtaatacagtttcaatttgaatacatgtgcatgattgaggttgctcggattttaagttttctatcacaacctcatgagcaatgtttaacatgatatgatcatccataagattttcatgagaatatagaagcatattatg

SEQ ID NO: 139363 - DNA, 562 bp, Zea Mays
tcatcagggatttcaccaagtgaggcaaccaaagcactaacctcttcgggagagggtcgcactctaaggcccaaaccgctgtcaccagcaggaggatttgacacaaaactggtaaaggccttggaaggaggcagattccaggctgagtatgcaacaggagcgccgatgtttgacaccttgcctctaagcatcatctcgagccggctcaccaaatccacaacgggaattcttctattggtaacccaggttgaatcagcgaggcctcgatacaaataagctgggtatgctctgtctttcagtggctgaatgttcttgaatacgaagtcggcaaccacagcttctgcagtcaaacccctctctttcaaaaacccaacctcagcaagcagagccccggcctcagccacctccaggtctgtgggggactcggtccagctcggagtgcgaacatctagctgtctccctgatcgcggggggagggaattcccgtgattctccgcgataaaccactccaggcgccatcctttaatgctgtccttgagtgggatgtcgaggtagtcggtct

SEQ ID NO: 139364 - DNA, 397 bp, Zea Mays
ggggatcgatctagcaaagaatgagagttggtgttgtaccagaattcagctagcggtagccagtgactccatttgctggggcaagcatggacgaaacatctgaggtatgtctcaatacattggttcaccctttccgtctgaccatccgattgcgggtgatacgatgaactcatgcaaagttgtgtgctggacaatgtaaacagttgctgccaaaaggcgctggtgaagacacgatcacggtcggacacaatgttgtctggcataccatgtagtcgataaacctgatccaaaaagagtttggcgactttgggggctgaaaaggggtgagacaaagctagaaagtgtccatacttggaaaaacggtccactaccaccagtatacagtccactgtaccag

SEQ ID NO: 139365 - DNA, 740 bp, Zea Mays
gattttgaaagttgcaaggttcaaattattatattgtactattttttgtgagttttttcccctctcatataggtatcttgtaaaagatttttaatgaggcaatatcaatacaagtttactgcatcttctcccaatgcaccgaacactgttgtcacgattgaggaccttgtcaagaccggctaattggaagtagtatactactagctagtagcaggtgcacgatttgccaattccaacattcgatagatgccaattccaacattcgataggcacgcaagtacgctataaaatggatgcatggaaacgcacagaacctcacgacaaattcagatcgaaaagcagcaatgcaaagcttcaacttctccatgctgacaacacttgtgccattccttcttctcgcggccgttgccgtggtcgccagagatgagctcaccacgttcatcgtccacgtgcagcccctgcaggagaaccggatgctcgctaccgacgacgaccggaatgcgtggtacaggtcgttcctcccggaggacggccggctcgtccacgggtaccaccacgtcgccagcggcttcgcggcccgcctcacgcggcaggaggtcgacgctctgtcgtcgatgcctggcttcgtgacggcggccccggagcagatatacgagctgcacacgacgcacacgcctcagttcctcgggctggacgcccgggaggccaggaagtcctaccccgtcgctgaacgcggcgct

SEQ ID NO: 139366 - DNA, 728 bp, Zea Mays
cgtcgcccaaccagaaagtcaataaaatcaaccaccagcaacaatttgaggaccccctcgcaactatgaccacaaccagcaatcaggaataggaggtagagcaccaagcgatagggcgtggtcgtgaccccacctgtgatcgcaatccctactgtgttttccacggcgaagacgtcagtcactcaactagggactgtcgtgccaccaaagaaatcaaggagagaatggatgtcgaaaggacagtgaggggtcaccaagaatagctacataaggccataaaccataacatccaaccacaattccaccacccatacaaagaaaggtaccaaccctaccaataataccaacaacactacaacccctgcccaaccacctagaaaggctacaactcccaccaccaccacaaccaatccaacatcaaaggaagctccctctttttccactaaaagaggaggagggttaccccagcctccggttcacagcataatcaacgttgacaccagcgcagacttcaacaccaaaaggcagagaagatattactatcaaagtgtcaatcatgtcaccgtcaacgggccggttgtccagacaaaatggccacacgtccccttgaagtttgatgcaagtgatgtcaaccttcacaatgcctcacacacgatgcaatggttgtaagctgcaacatagcagactgagaaatctgctagcccctcaaggataatggcagccatgcc

SEQ ID NO: 139367 - DNA, 321 bp, Zea Mays
acaatttgttaatctccctttgggtggccatcagataattgccctttataatcatatgggactaattcttgggcaatttcttttttgtgtgccaagatatgctaggcatactccaagcttatgttcaaggttttggccagttgcatggtctctaccaaataaaaagtgtgttcttctcaaactttacctttattatcagtgtttttagtttgccttcacatttagagagaagaggcttagtgggtgtgcctaattggttccaaaatttttgcttttattccaaacttggagtgctgactcttttagcttattcgtcttgat

SEQ ID NO: 139368 - DNA, 390 bp, Zea Mays
cagagactccccagagccgcacgatcgcaaatctacgatccagaacccatcacgtgaaagggtacgcaggatctaatcgtagccgttcaacaaagatcgaacaaccctggttcgtcccctacctcccggtcgagcagacggcgccgccgcccacggtgcacggtggcgtgcccgccggagtaaagcaatccgcagatccgctgcgctatttcctaccccgataacgaatacacgaagcactggtgattgcatgcgcaaagaaggaggtctcaccgattgtcgtggcgtggagagacctgaccacaagcagcgtggcccgcggcggatcctggaactctagcgacgaattcaccgctccccgactgccaaatccgcagggtaaggccgcgg

SEQ ID NO: 139369 - DNA, 288 bp, Zea Mays
ggcgaggtttgtgacatttacaccaatcataaaagtctcaagtatattttcactcagaaggagctgaatttgaggcaacgtcggtggctcaaattgatcaaagattatgatttgtccattcattatcacccggggaaggcaaaagtggtggctgatgcccttagcaggtccggggttccaaaagtggcctttctgttgatcgctgatctggaccgtttggggatcgctttgtgctatgtcggcaccgctagtgaggagactcgtatgcttattcaatcttccctcatg

SEQ ID NO: 139370 - DNA, 304 bp, Zea Mays
ttttgttcttagctaatggaaataagcaattatggtagacattaattctaagagcatttcagaagttgaaaaacagcaatactaaaaaacagaactcatcatatacaaaggaatcattgtaagacatgaacatgcttacctagaagaatccagttagtccttctgacagatccttggccagcctctctatcacctcacgaaacctgctcatgttccttggttctctcgatgccttccaactctagctactaatagcacatgaggcatttaactatacaactttctaaaaacaattgtccacgta

SEQ ID NO: 139371 - DNA, 557 bp, Zea Mays
cagcagcagcatgatgaaaaaagaataatgaagaaaacaaaaccttcatgaagcaccatgaccagcacgccatgcaccgaatttaacaacccaatctccctcgatgactgatattatttgcatcaatgtagcacttcagacattttcacatacatgccggaatgccagcaatcgcatttctaggataatcaacgacaaatcagtaacgactactcgataatcaccaacagctaaatgtgacctgccgaatctcgcaaccaccaaataactatttaacaactcaacagaaacagaaaattaagagtcgggagctccttctcaaactactatgcagcaacccaaatctacccctactggttgaacgaccatggcagcagcgatggatcggtcatacaaaaaccactatgcagcaaccctgataaggaattaaaaaaaggaagcgaaatagcgcaaaggaagcgacgaggatacggagcttgtaggcgtgcttggtgttggtcgtcatggcgcgcttgagatatagaaggaccaattaacattctatgctcttgttagca

SEQ ID NO: 139372 - DNA, 339 bp, Zea Mays
ttcaatccaaggactcagaacaaattagtgacctactaggattatgatgcttgcgcaaacttggatggaggcaacccggaacggccgatcgacatgaacaatgtccacggcggcgttcccacgtgacgatgcggcgttcccaagcgatgatgctgtaacaccccaagtgttacttagagttttcactcaaggctacaccagcaaagaccatcatcacatgtggtttagtttgagcaaaggactccaaacatggaaatcaagaccctaagtaagtgcaacccatcttaaatgtcatgccttggcttatcatgcacatataatggggagaattgcccaaac

SEQ ID NO: 139373 - DNA, 639 bp, Zea Mays
actttgacgagctgcctctgtatacaattttttttccgtcggtacgaaaaaaaacaaagaagtaaaaaaggacggcagagattgggggataaagacgcgtccaaagcaaaactgcaaaagcagaggcgggtccgggacggtcggcccgcgggctccatccattgatgccgctcctccccacggctccttcctgcagcctcctccttcctccctcgccactctcccctccaccgctgcctggtgtgtagcgtagcgtagaggcgcggcgcggcgcggctgactggttggttccagttgttctagacaacgctggcttaaccgcgcgaggcccgaggaaagttagcttgtttcttgcagctgaatgcgggaagcaagcaactgcattttactaacctcaccacaccagacccaccactgacttcccggcctccggctctggagcagagcaggtggcagcactagcacggccacgtgcggcatgaaggggcaccagcaccagcagcagtcgtcgtctccgctgctgccgatgccgccgcccagcaagcgccgctgtagcgcgctggcggcggccgtgccggcgctcgtcgtctgctccacgctgctcccgctcgtctacctcctcgccctgcaccgccccgc

SEQ ID NO: 139374 - DNA, 822 bp, Zea Mays
gcatccttgtgatgtttcctttttggaatactttgcaattcatcaactgacaatgcgttaggtatgagagactctgctattacttgttcttggggagacatttgtctgtttatgccagaaaataaaattcggttcttctgttttgtactttcactttcgtttgtactgatctggcgacaaggaattccatagtactcacaacaacaacattttccaagatcacttgtctgttggtttggttgttcatccttttgtgtcttgaaggtctgttcatcagttgtttcatttatagtgttgttttgacttgtcaacacaccgcattctttgcatttagtgacatcacttgtagttgacattccaaggtctgacatctgtatgggtatggaataatggaagggacgaaagggttgagtaaagacagattgtagagagcagagataacccatctatctaaggtttttcctagctaattgatgccattgtggacaaaagtcacacaatacaccaacaatcatatcaaagaagcaaatcaaacaagggcacaaaaacaactaacatgaactcaagcataccagcacaacacaatccaattctactcattcaaccaaacaaaaggtgagacaaggtttggaataagaaagatattataaagtcaaggagttaggtaagaattatcaaggagttagacaagacatatttgttggtggccaagagtgaaataagataaccatgaattattaaagtgaggataaatgatacaaccaaggatatgaagtgagttagggagaaaactttatcaaggagacaaaatagagaggcata

SEQ ID NO: 139375 - DNA, 437 bp, Zea Mays
gttgctgcccacggaaagaaaaaggtgtagaccattgtattttaccggtattagggtcgtcctctctgaaattgaaagcgagaggtgcatctgttcagcacgccaaaaaaagacaagaggggaacaattggcatgaaggtcaggtgtaacagaaatctcctgctgccggccggccggcctgcctccctgctccatgattgtgcaatgagcagcatgcatcttcagttccgcaagaccgcaacaagcatcaagagtggctataaatttggctgccctcctgctgaaagcaacagcttctctcccagctgtggatagttatttcctttgcactcatatttgttggttttcacgagggctccgagagaaatacaaactggtgcagaatcatgatcaaagacttgtggtccttgaagtgaatcggctcgttttttctgcct

SEQ ID NO: 139376 - DNA, 614 bp, Zea Mays
tcatgattagtcggacgacttgacgaataatcacgacctgtccaaaccgacttggactcggggtccatgaattttagcagcatcaatagcaaagaatgttttccttccacaaacatgcatgcgatctgcacgcttattgaactggtagaggggcagaaaaatttccccatgcactgccacaggttatggccgttaatgtataatatcatgaattcttatatgcatgagtttttgcatagatgtaaaaatcacctggttcatcttttgcagtgaagttccaggactgaatgtcagagaaggttaatgtaatgacccacccattttcaaatttttggtctatttcttttttgaactgcaaaatacaacatacaggatgtagctggaaactcgcggtctgagttttttagtggcctgacacatgtgatggtgaaactaggatttgtcagttaaaatattgagagcatcaatgctaaatggaagaaattgttgggcttggatgtgtagcttaggcagcttacttattatatatatggcttaaaggctaactggataaattgatttgtaaacctctgcatgagtaagttttgtggaactgaatatgtatttaccttttg

SEQ ID NO: 139377 - DNA, 404 bp, Zea Mays
tggactgcggacaggaaaacaggataatacagggactagggcataaagttctgggctcggttgcaatttactttggccagggtggtatggcgtgttaattcctgtaaaccctgagggttctggtgtaaagtggctggccgaaatggtattagaccctatgaaccgcatgatcaccattgaacggcctagattgcatctcgttccacccaattcggtaatccctcgcaacccttggatcagagaccgacgctgtggatttaaagtaacgtgaccccttcccgcacgtcggatctagatcgcatggtctacaacggatccacccaaactggtacgcatcgcctaatcgtaaccgtcgcctggaaaatcaatggtgcacgacgccccagccctagacttcgccgacg

SEQ ID NO: 139378 - DNA, 922 bp, Zea Mays
aaatctaccagactcagactacatccgcgaggacggcggataaattatagggttttacggggtctcatttgaaagatagccttggcgaaggggtatggtgtaatctgggccatcggatcatctttcaagcgcccagattagatcgctcttcttatagatcctgcactcactaccggtcgtcgaatcagaagatcagtggcgcagattaaattgaagcgaactctaatctcacccctccatccaccgatcgatggccacaaagccaccccgaccgaaccggtatgccaagagcgatcccagtcgtctgttacggatccagcggccgtggcatcatcttccccacctgaatgcccagtcacgttggcgcccccagaaattacgcagatgcctacggcggcgagaagcgccacccaccgaccctcacccctgcttgccccagccaccatgctaatcggtgcaaacgtaagtggagaaaatgcagaacccaatggagaccaacctaccagaaacagtggtgacagtggtgttgtctacgacacggggcggactcatggcgacccgattgcatcggcgagcaattcgtctcgcccgccaacttccttgctctgctgaccacacacacaatctgcatgacttggtgatcccgctcgatcccccaacgatcgagaggctgggcgatggtgaacgcaaggtgtggtcgcagcggctctattctctctctcctactcgtcgttgggcttcagcgtaatcatccatgcaaggttgcgctagctcccaagcctggttatggcggaatgcacatgggggctcgtaccatgggagcagaggccagaggagggccgaacctgagcgtccacacgccatggctggagccgagcacgctaggggaaggtgctgcgcggccctaacgcctgctcgttgg

SEQ ID NO: 139379 - DNA, 500 bp, Zea Mays
cgctcagccgcaaaaagggagagagatccacggtgatgtcaccggagtgacctccagctcaccgtcggtgaggggcttctatcgcacgacgttatccacccaccccgagcatgaatccaacagcggtggcgtgaatcacggcgaaggtcatcggcggtgggatttttctgcggccgatctgatcctctgggtactgtaccatcgcgctacaccatcagagcttctgacagtcaatgtttgggctcaattatctccaaattttgcttgacaactcgcccaagtctctgcatcaaagttgtagtgctacttaccagctacaaatcgattatagggattacacttattagagcactgaatcaaggtcaaactggctctcaaacttgggtcaaagtcactgtccatttgaagttcagtctataccagcctgacagtccaactttgggcatgattatcttccaatttttcacaagaacatggcttgcactttcaagcaaacttgt

SEQ ID NO: 139380 - DNA, 361 bp, Zea Mays
gtggtaccaagccatggttatgggcttagactctaaccttatatattggtttacctccggttttaggactaacccgagaaaaacctcccacaagccatgtattcgtgtttctactcattagaacaatgaataaaagaagggagaaaaacaaactattgccactaaattctaaccggatcagaacaacaagaggatcaactgttgggcttaatgggtcatgtgctttaagtcggtgcatcaattggcccgacgaaccgagtatcttttatagtaaatttagtgttagttagattgacacgatgcgtgtttcaagtctccggaatataaatatgtaatctttcctcataatgagaaggcatac

SEQ ID NO: 139381 - DNA, 404 bp, Zea Mays
ctcatcggagttccgtctgcgtggcggaggcgcttctctccgtagtctgcgtcaccgactccccgttgcatggtaatatctcgcccatgcggtttactttgttctgttcttcgtgttggcgcgttaaggatggctcgtggagccctgtcgcgaacgccggcgcgctcgccggagttccctgttgagaactcgccgtcgtcgcgtgcggaccgcgtgatggggacgatggggtcctagccatcagatcgtgtctgtgcggttaggattgagtgtagcgtaccagttcaggggatttagatctaggccattgatccgtgggcggacgcgagagattagtccgcgtgtgaaagatcactggaccgttggatttggatccaatagcgtggattagatcgcgggttcgg

SEQ ID NO: 139382 - DNA, 276 bp, Zea Mays
atcaaaatggacgcagacatccaacgtcagtgaggttcgaagctttctgggaatggcaggatattaccgtggctttatcaagggattctccagcatagcaagacctatgaccaaactcctcaagaaagaccataagtttgtgtggaccccgaaatgtgaaggaagtttccagatcataaaggagaagctcacgaccgcacccgttttgacactaccggatatacatcaggatttcgtcgtcttctgtgatgcctcgaggcaaggcttagggtgtgt

SEQ ID NO: 139383 - DNA, 473 bp, Zea Mays
ttctatattttatcccctaactggaccgcgtgcacaaatgaaccaaaggccaggggcttctgtgtgaaaaattccgagacacaaggttaaactacggtggacgacatgttagtttagcgaaaacagagggtcttatatgcataactgtcgcggccgaaggggtacgagtgtttttcggctgttggatctcagtcagatggcacagattagatcgctacacgctacaaagcggtttggaactgggccatcggatcaacgttcaacggttaagatttaaaatacgcccgatccgatcctgcccttacgtcgacgatcctatggttagcacgagatcaagccgaggcggtgcaatctccctaatctacaccgtccatcccaaatcagacggtccgaggccatctccccaaacgatcccgacggcggcggcaccaaccccttgcacgacggcgccctggactggaaatccaatccgc

SEQ ID NO: 139384 - DNA, 450 bp, Zea Mays
aagccacgagagcgtcggcgcctgctggtcgacatacggaggaagaagatgaaggcaggtccgttcgatccatcacgggcagataggattagatcaggggtgttatgttcatggagcagattgggaccatcgatgtgtagatgagcgagcgggactagatgatccataccctttaacgttttaaaacatgtgtcatagatctttaatctggcggccgcagctgtatgtccttttggcttctaatctcgaccatggatggtagatcgaacggccaccattcaacaataccccttcgtgtggcttatttcctaaagagaccctggattattttagaatcaacccgccatcctgttgactgtgccctgtgtcttagaaattttacccagagacccctggactttccagaaattgaggcccactccagaatagtattaaaccagagaaaacaaa

SEQ ID NO: 139385 - DNA, 342 bp, Zea Mays
agtagaggtggagctaggactccgcttgaaagcggatgtaatacttttgctttttgtaaggtacttttgagtactatttatcaagtagtattagcacttatctgtgtaccacttgtccctgttgtgcatggtgttaccgattcctccttggtacctggcccccctaggacgtaggctcgatttgtcaaggatgcagaccaacatacctaagaaagagtttggcgatggcccccaggaggtagccttgactgggacatgggcctgcacacagcttcggctagggagcattagtagtacacccacaggacccgccatctgacactagccatcctttgatacatg

SEQ ID NO: 139386 - DNA, 479 bp, Zea Mays
cgaggatagcaaatctgattagccgccccgatctagccaaagacgggatcatatcatccccatccgtcgatgccttccacttcgcgacatctcgccaacattgtgcttcaacaccacccttcgctggcggtgctcttcggccatcgccccagccgggggagcagacacttcgcgcacttcaggctgcagcaaggactccaccacatccacatccaacgcaacaaaataatctaaatcttcatcaaaagactcctcaatccacgaaaatgaactctcaaaatcacccccgtctgacgaccaagactcagtttccgaaccaggcaaattcccattaacaggcaccgcattcgcagccgccacaaaattaataccaacatcagtaggggttgcttgcgcaggcccagatgtcggaacttacggagcaaccgaccttcagtatcacaaaaataaaaccgtaaacccaactcccataacacgac

SEQ ID NO: 139387 - DNA, 345 bp, Zea Mays
gcccccttcggatactgcaattcccgggcataatgtttggcttcagaaatttcttcttcggatagtctttttcccgaagcatgtctaacgatataatcaaatcttttggagagtacttcaggagtaagggattcgacttctttggccacacttttctcaaaagctatattagtatctggagttattccttcagccctctgctcggttgtggcaagcttcgtctcagcaggcactttgggccctgcctcggtttcagcctaggttattgtagcttcaacttctatttgcttagtatcagctttgggttgcgttttgtcagcttcggcaaccttccctgtgggagcg

SEQ ID NO: 139388 - DNA, 605 bp, Zea Mays
ggggtagccatgcttgccgaagaggtaattagctattcaaagcactaatcatcaaagtgttcctaccgtaaattaaggcagacggctgtgcactttgtgcttgacctgctaatccaatgacctaacgtacgttccaaacgagcacatgcggaataaaataatgccatgatctaatcatcaaggagttgtagtaagtgcagttcttagggtgaaaaaggtggaggcgaccaccaagagcagataattttattcatacgaaccatcctaaaaccttagtgcacagtgacgtatacgtagatactccattataaatttcattctagtagctaagaattattatattgttagctgctacagcatgcaatgattcgatatttagtgtttttctataggtaaggtcataaaattcaaaaaaattatttttagcaacttcagtgcaacaatgctaatattgtgtttttctagtcatgctaaaatcagattcccctgttcaatgttgtagcagcattaaatatcgataactgcaactggcgtatatgtataatgaacaggtaaaaaacaggcaccatgcatgcagtgtcaccgcacaactggtgacgaagagt

SEQ ID NO: 139389 - DNA, 966 bp, Zea Mays
cgaacctgttccagatcttgtgctctttttcgcgagatcattgaactgctccttctcacgaacgacatgttgctcgcgtcggcaatcctcgtctatccccgtctaccccttcggcgtccacctcgttatcttgggcccatgagtcaccgctgaccgtcttcgtctaattttatctaactctgtttgccacccgcctaacccagtcttcgtcgtacactgtgtcacataactcgtcgcacaactgtctctttcgctcgaccaggacgtgatctgcgacaaattttgcaaccgcctttcgcatcctatcttgtctataaaaacatccctagccgtcgcataacccctcgtctcgcctagatccagatcgcaggccgtgaagggcaacacttaccaggtacggggacatccctcctcttgtttccaatcgccaaaccgcctccgatttcccgagacccagatcacacgagcatgcccgttcggttaccggcgacgcaggtaagccttctcttctcccttttccttccggcgacgtgtagcagccctttcccccaacgaagcccctcccacggacgcctgtctcgaagcccattgccgacggatccgtccagccaacccccctagtctcattcccacacctcgccgaagccccttggtacaagcacgagcctaggccatggatgtcgtctgcacgtcccaaacctgcattccggccaacctcgctgtccctcgcagtgcctgcaatgcacaacagggagccggccatggcgagccggcatggcccctgctggccgagcgacccccctgccgttggcagacaaaggtagccgagtgttgtatgtactccatatagatacgtatcggcaagtctcaggcaacgtgataatttcctgttgatagcttgctgcacaatggtataagagacggggtatttgtatacgtatcatgcacatccaagtactctatccg

SEQ ID NO: 139390 - DNA, 648 bp, Zea Mays
cacgtttttcatgttcttcgttcgctgtttcgtctaatccaaattgttcctgcataatgaagaagcaattaaattcatttatagatgtccacggtaagtaaatttaaaatacataataaactcacccaaaacgatgaccacactatgtcttggtgagcacggtcgggtccatatgatttgaggccccagtgagcccagtgatacacccctatctctgccccgttgaattgtaccacccctggatagtgaaaacgagctatagatcccaacactgtgttgactggtgtccggtgaaatttgccactccatgccacctccacccagctcctctctactgcagggtttatgaccctacgttggtccaagggttgtgtcggtggaactctaagggaccgccgaaacctacaaaattgtaaattgtgcactggtaataatatcaatccaacaaaaatagaactcatcgtcaaaataaaaatacctgaagtttgttgcctgtgtcgttgtaacaacctcgtcatcggcctctccatcgtagtcctccccatagtcatcatcatcacgcatcggtgaaccttggcctgccagctcgtcctcctgcctaggtgcattgtggtctgccgcctcgcgctcttgctcaagtgcattgtg

SEQ ID NO: 139391 - DNA, 874 bp, Zea Mays
aaaccataagcgcggaggaaacccccaggaggccttcgcgaacttatcgggaaaagagacaaccggtcgattgcacttctgacccgataaaccaaatatttgagaattatttccagagagagaaagatcccggaaaaaccggtcacccgacgccgcagggacagaagagccattaatgccgggggcagaatcctgtccaaaattctccgggcactgttccaaaatcttcttgggcctccaaaccaacatccgcggggcccatgggggaacgtgaggggtctctagcgaagaccgaaatcctgagcgaaccatgcggccaattctgcgatttgaataattttgaaaatgcggacgatcaacagcaacatgattacggacagagcggcgggagaaggaaatccgatcaaaaaccgaacgctgctgcatctgcatcaatccatcaggggtacgaatagacctctgtcgatgtcctaaaggaaccaaatttgcacctgtcagagctggattacgagacatattcacattcggggccggagaagagcggcgatgggccagagaagaacggcgatgagtaaccagtttccaggaattggattcctccgcagaataacgctgccactcaataaaccaattagggccgccagaattccacaggtgcaggtacgccttgaatacggagcaagagtaggagcgtagatgataaactgcaaaaccaacaactttgcaagagatcgaaaagcgaaacacccggtccgccagctgagaaactctgaataaaccagcctcgccaccaacaaacgattgaagcagaaggcccacagaatcagggcacaaacgcatggagcatctgccaaaggagacgactaaaaagaac

SEQ ID NO: 139392 - DNA, 862 bp, Zea Mays
cgcggagccatctcctgtatttatacaccagagatgatcaatacaatacaagttgcatctctcatactctttcatggtatcattcgtctactgatccttctgtctcttccgctgcctatcccttcctcgtccattgccatgtcagccagctcgagctcgtcgggcaccaatctattcgccgctgctaccgcagtagagatctcggctgccaccgctcaactaatcaacatcaagtcccacgttcccgtgacgcttgatctcggtgactccaacttcggcacatggcgcaccttcttcctcatcgctttccgcaagttcggtgtcctcgaccacatcggcggcactcggttcgctaacctgatgcttgacgacgccgagtggacgcagattgatacttgcatcgtctcctggctctacaccacgctctcctccgacctcctctccgccgtcatccagccggccgacgatgcctacaccacctggaccgccatcaccgaccagttcctcgacaacgttgtgtatcggactgtccaggctcgtcagcagttccacgggcttcaccagggggacatgacgatcacggcgtacagcgggcagctcaaggtcctgactgacacgctccgcgacgtcggtgctcccgtctccgaccccgacctcgtcgtcagcctcctcagcggcctcaacgacaagttcgccaactgcgtcacaaccatctccgccgcgcgccccaggatgacgtttcgccaagcccggtcgttcctcctgcaggaggaaatctggatgaacacacgggctcagaaggttgccgccaccgccctgctctcttcgtcgcgttccacaggcacatctcccacaactcccg

SEQ ID NO: 139393 - DNA, 465 bp, Zea Mays
ccgcaatccctctccccttgctcaccgcccttggataaaggttctcaccgccgtcaagccttcgccgttgtctgccgcgtgtctcaggctgtctaccgcatcaccatgactcacccttgctctccgtcgatcaccggaataatcgccacgacggttgacacgagttcacttgcaccagtaacctttccctctccggccgccactgcgccatcttcaattcaagcgccaccgcccctgggatctataaattgagcctgcagcgagcttcgcaacatcatcacccacccagccaccgcgtatcgctagcaatcattcgccagagctcgcgaattttgaattcgccccaaatcagttctccgccacccgaaaaccaacctcatcgcggccagccctccacaggtctgctcataccctttttgttcctgttctagcatctgtgcatgctggtgatgctcgtcgacccac

SEQ ID NO: 139394 - DNA, 432 bp, Zea Mays
caatgacccaaatagaatcatggtgtcgggatgtgttgggtaaacccacaataaaatccatgctgaggtcctcccatttccaagatggtatgggaagaggttgtaaggtacccactaccttcaaatgactagccttgattctctggcaagtgtcgcattcagatacatacttagcgatttccctcttcattctggtccaccaatacaaggatctgagatcatgatacatcttgttactgccggggtgcatggaaaatttggaaagatgagcttcgtccaatattttcttcctgagttctggattcttaggaacaaccaatcggtcttcaaaccatagaactcccttgttgtcctgacgaaaacatttgtacttatccaccttttgttcgaacatctccttaataacttgaacacccttgtcaccaatctgtg

SEQ ID NO: 139395 - DNA, 320 bp, Zea Mays
taaaaacagaaaacttcatcgaagatttgtagctggtcttcaacggcttgaggcgatactggtggaagctcaattcggagaaatgtgtcttcggagtaccagcagggaagttactcggattcattgtcagccaccgaggaattgaagccaacccagaaaaaatggaggccatcatgagaatggaagcgtcgtgatcatagaaaaaggtacagaggcttactggatgcatggcggtcctatgtaggttcatatcaaggctaggcgagaaaggcatgccgttctataaattgctcaaaaaggtggacaaatttcagtggacc

SEQ ID NO: 139396 - DNA, 603 bp, Zea Mays
tgtgctgcacagaatgttattggcttcttgtcggctttattgctccattagttctgtagactttctcccttttgtggggtgaaaagaatatgagattacacaattatcttttcatgatggcaagaacaaggtttaggaagattaggagttttgtttcaatagaactacttgttttgtggtgctttgaggtgaggtgtttgatcttcttatacattcatgtggtgtggatgtttcaccattgaattaaaatgaattgttgaagctggtaagggttgtgcttagtgcatattaccccttcataaaagagtgttgttttaatacattgatgttgatgtatagctgcatccaaattcgttggtgtgaaatcgtagtgttgattgcatctatgacttgctttgagcttcattgcgtgttgtttcatgcttgatatcaggttgtgtagtttccttagacaattagtccaaggtagaggttcttgtgttaattaagaccaataatggacccatgttttgaatggtggtgctatatggggtaccttggatgctttgcttggaagtggtcgaattcgaggacgaattctttttaaggggggtagagtgtgat

SEQ ID NO: 139397 - DNA, 554 bp, Zea Mays
atcaattgaagggggaaccgaaatgggagagcatatgtcaaggacactcgtttagaggattacatgcaagatcaataccttcttcggggtgtccatcagtggaaacaccggagactgacagtggatccgctgggctctcaggaaaaaggccccgtggccgtgattacagtaaagctgagagaaagaaagctggttcttcttcgtccccggagtacttaagccgattacaagaaattactgagaaacaaatacagaggtccatagaaaaggggaaaaaaagaaaagaccactgaagaagacagggagatacagaagaagagattggaattggaagcccaaaagttaagcattagacaaagggaactcaaacttgaagaactcaaatcggcagaacaacgtttgcagatgctgttgtcgacaaacgaagaagatgtagatcctgaagtttgggttgtgatgaaggaacagaaaaaaaattgcagcagttcatatttacttttgagcaatcgtgaacggttctgttcgatgtgcgcatgtgctgttgagacatgttg

SEQ ID NO: 139398 - DNA, 554 bp, Zea Mays
cttgacttgcttcagggcttcaacaacaatgacttcacgactttccaaggcagctacacgggcttgagttgaggtgaaatctacatggagctgacggttgcgcttctctgcatcttatgctcgggcaatcatttgacggtggtgccgagccgagaaatcatattgtgcatctagggtgagcaagtatgcagtgaggtacacgactgtggggtcgtcctcaagcagctgctgcccttccaatgcacgcatcctggccatccaaacgggacagcttctctgaaagggtggaaagaatctgaacggggtgtcagccacttcttcttcataaatttgacacagggccctcaatgccttacgagcgacgagttggcaggtgtctctgaaatttgtgccccgcggcagtgacactccattccacatggtgtggacaggatccaatgtatacagtcacgacacacttctttgtgccatgctcgacgaattcacgaccatcatactctggctggctcctaattccgaggcgaactgtgcatgctctcaacaacttggggaaa

SEQ ID NO: 139399 - DNA, 712 bp, Zea Mays
tgcgtctcaaggtacctggtttttgcctcatggaggacctcgctgacgtagtagaccggcttctgtatggtccggacccctacggttggccccgggtcctcaaggtccgtggtggtcggaccaccaccttctcctaggggaatttcctgactcccctggagatgttgcaccgtcctttcgacgaccaacaccatgctcactacctttgtagccgctgcaatatataagtacagcggctcccctggctccgaagctaccagtattgatagggacacaaggtgctgcttcaactcttagaaggctcgctcttcctcctcggtccaagagaatggtccagacttccgtaagagcttgaagaagggtagcgccctctcagccagccttgagataaagcagctgagggcggccagtgaccccataagcttctggacgtccttgatctgggccggaggcctcattgcctcaattgccttgatcttctccgggtttgcttcaatgccccggtgcgaaactaggaatcccagcaacttcccaggagagacaccaaagacacacttgtccgggttcagcttcgtgcgcgttgcccgcagcttgtcaaagaccagggtcaagtcttccactagagtcgaccctctcttagtcttgaccacgatgtcatcggcgtatatctctatcctgtccctaatcaggtccccgaaggtcttactcatcg

SEQ ID NO: 139400 - DNA, 491 bp, Zea Mays
agaacgtgagcaccagattagatcggcctcccccaaagcggtacactccatcggccacatgattaggatccaactgctaggatttgcgtaaaccggagcccttggatcgttgatcggcgcacacgatttaattcatcgaagagttacgatcggtctaatcgcgaccgttggtcaaggatctaacggttcccatgccacggaggcatcagcggcctagatccaatcccagccatacatctccgtttcaacggcccacgtcctttcccccaaactctcctctccctggtcaatagagcggcggcgccactcacgagcacggcagaggccctcgccggccacagcattccccgcatccccgttctaaactccgatccgaggtgttcactacgcagcagatacatgggcgaactggatggggaatttcttaccgcgaattgccgcgacgactgacccagtcacggtacgatgtgggccgcacggcggtggcgccc

SEQ ID NO: 139401 - DNA, 447 bp, Zea Mays
tgcaaggcagagtggacgaccaagtcccccatcgagcaagtctacgaggcgcgagtgggtgaccaagtccctcgccaagcaagtgtaagcgttgagccagagccgcaagcatacatcgaccacgacagtgtgacgccatgagcccatgtgataagacacgaacacaactctcctatcagggatgatctcagcaccggaacctctacagtgaccggtatggcagaaacgacaagacatgacgccatatcgaataaaccaatccacacacacgaaagggcaacaccgagcctacaaaggtgaaggggaaccatgccgtgtcagtcgagtcccaggcttgcaccatgggacccgccatgcatcaccacgaggacgtcagccacgaaccactgcagggataagaacaacaagtggcatggagcgctacttcacgcaaccagaagaaggggg

SEQ ID NO: 139402 - DNA, 709 bp, Zea Mays
aacagtacgacgagaagtcaccctcggagcatgaatggctacgaatatggagtctgctaccgtccgtgtggaggtggagtcgtcaccatcgcccagatatgggatagtctgggtatctcaacttctctgaaagacctgtgcctgtcctatgccttgtttgtgcagctcattcacaggcgtttcttttgccgagtccatcccatggcggccagctctgtaacaagagaccatgactttgtattcaagaaactgctgccctctgaacgggatttcgaaagagcgttcaggattgttgaggcagagctgggcttctgctacgatttcttcttcacaaagtactactacaccttcgtaatcactaatctgctaccggtgccgttcctccagtctctggctttagcaaagatcactctaatcttaacagtaggggtgtttgccgtcaggaattcactgctacttgagacgccaaatccgatcatacaagtacgcatctcaagagctgacaacatcatcactctgctgcttctgggtatagccctcatagtggagctggtgcatgcggcattttatctggcatcggactgggcccaggtatcagtagccaccatgtatgtcaagagatactggtacgaaatcagcccatccatctttgcaacagtcatcgctttccttagaagggtcacgttttctggacagctgatgagaaaca

SEQ ID NO: 139403 - DNA, 402 bp, Zea Mays
tgtggtctcattttgctgatgcagtgactacatgggaggactatgatgtgctcaagaccaggtttcctactgattttgattgggacaatcaaactccaggcatggggaagatgttaggagccaaggtaatacaggttggagattaatgagctgtcagtaagctgttagttaactgccaggaagaatagctgtcaggggttaatgagctatcagtgagctattagtaactgccaggaagattagctgtcagcaagctgtgatttgggcctgttaattggccttgtaaggaggaatcactcctataaatacttgtactaggtgattgagaaaaggggagaaaatataactgaataccagactcaaaatccattttcccaactgactcacctgctgacgccctca

SEQ ID NO: 139404 - DNA, 280 bp, Zea Mays
tgcgacaactccgtgcaaaagtcgcctaagggtgcagccggactagcacaacaagtgcgaaaaatcgaagtcttccgcgaagactatccgcgcaaaagtcacctaagggtgcagccggactagcacaacaagtgcgaaaaatcgaagtcttccgcgaagactatccgcgcaacagacgcctaagggtgcagccggacgaagcttaacaagtgcgaaaacgactacaccaaactgtctgcacaaagaccgactacatgcgcaccagaccaacataacaaat

SEQ ID NO: 139405 - DNA, 307 bp, Zea Mays
tggcgatcggcgctggcgatcggcgcgtgtgctcctcctcgtccccgacgattcgattcactggacgggcgggctgcttctcgtcttcggcggcggccgatgtctattgtgttgcccacgctcattggccggatagcggacgcacaaccatccgccacaaatagcgtgcgcaaggaccatcctctactttaccggaacctttacatccttgttggacacgatacaggatgtttggttctctaaatttggcgtacaggacggtatagcggcccttgctggagcaagtcttatatattagagagaaaaa

SEQ ID NO: 139406 - DNA, 349 bp, Zea Mays
ttgttgcgccgaccagtgccttgttgcgccgtccagtacccaccagcagctcgcaatccttgttgcgcttgattcactcccagagcttacaaacgcgtggaggatttgccgcaaggagaggaactccagtttggtggccttgatatatatggtttatggtggcgtgtatggaggatgggtatgggtttctcgatggtaggggatcccgttcacctcgcggcgtaaggaagggagacggcgaagattgaatggcggatttggcgcggactccatctccggcaccgttgaaggaaagggaggcggcgatggatgagattgaagagcgttcccctctcggtgccgaagggag

SEQ ID NO: 139407 - DNA, 398 bp, Zea Mays
ctgggattggttggtgcgctaatgggtgacgaggctcgtcgccggcgcagtcgctgtggtggttcgtactcgagccaccgtctcacgcggtgggaggaagaagacgctctggcgccgtctgatctacgcggacggccgagattgggccaaggcccccccttcgcgctagtagttctggaccgctggatgtaaatcgtgcgggcgagggggaggaatcaagggcattttggatctggggcgtaggtaggtaatcctacggtcgtgatcgcgtacccgttcgcgaggtcactggtctaatcgggtgcgtccattcttgatcggacggccctgtgcgctcgcgggttcataatggacgagatccgatcctggcccttggatctgatctgaacggtccgaat

SEQ ID NO: 139408 - DNA, 943 bp, Zea Mays
aagttttacaactatttttatactcaaaattcaatttctaaatctatttttcttgttttatttaattcctggactgcgcctcaaatacaggaaagcacaggggccaaatcagaagtaatccacagactcatcctagcccgagggtggacggcgggttagataaccaagactccgagggctcattagtaaaatgtacccacgaaggggtacggggtctttacggccgttggattgtaagcggacggtgcagattagatcggtataatcccgaaccggtacgcagcgtggggcatcagattaagatcctacggctagggttttatgaagatgtgatctaatcctgcgcgttcatctgcaaatcaacggccaccgatcaaccatcgccagatccgatcggagccataaatccaagatccaacggcgcgcgcacgctcttcctcctccgacaaccagcgaaggtggagcagaggcccgcggcggagctcaccggcgagcatggccgaacggcaccaaagcacccatatcaccaacaaaaacggctacacgatgcggacgtcctagtgaacagtactagttcgacataccaggatttagggcacggacgaagcctgcccacggagacgcgtgacccgcggcggccatggagctgcggcaagcaatcccgggccaacagtggacttccacccgattaaccccccaagcaaccttgccagggccctgaacgtcgcggtgccggccttcggggaggtcgattcccaccaccggcgaggatccgcagcggcgaccggcttctagtttctctcactggtcctctcgctctccgcgctctgacgtcctctgcgctccatggatgatggggcaaggtagggccgacggaagtgtttttataccccaagaacggatagagtccgagcgcggatcaaggaatcggatctgcagcccc

SEQ ID NO: 139409 - DNA, 402 bp, Zea Mays
tatcctccttgagctttcttgaagggtccaatcatatctagtccccagcacgcaaagggccaagtcactggtatggtctgcagttgttgtgctggtagatgttgttgctttgacaagtactggcaagcttcgcacctctaaactaactcggctgcatcactcttcgctgttggccaatagaatcctgacctgaaaaccttcccgactagtgtcttggacgccacatgtattccacattgcccggcatggacctcctccagaagtcgcttcccagtagatgagagaatgcacttcatgaggacgtctgatgcaccccttctgtataatgtctccccaatgagtgtgtagtgagccgactatctggcaatgcgctcaactgcatttttatcatctggttcctct

SEQ ID NO: 139410 - DNA, 541 bp, Zea Mays
caatgtattcaatggctgagaaatgacaccaaaatgtcggatgaatttgcggtaatatcccgctaagcccaagaagctacgcaattccttgatattggtcggtaggggccatgctgcaatagcttgaatcttcactggatccgtcgatactccgctggaatttataacatgaccgagataagcaacttgttgttttgcaaatttgcacttggatagtttaaccttccactcatccttggccagtaactgaaagacttgttgtaggtggctaatgtggtcctctagagaggcactgtaaattaggatatcatcaaaaaataccagagcacatttacgtaatagtggagccaaggtgtgattcatcgccttttgaaaagtgcctggtgcccctgttagcccaaatggcattactcgaaactcatagtgtcccaagtgagtttgaaaagctgttttgtgtgcttctccatcacgcagcagtatttggtgaaagccagctcgaaggtccaaaatagaaaaccaggatgctccaaataattcatca

SEQ ID NO: 139411 - DNA, 491 bp, Zea Mays
atacataaatttcagggcctctgcgtaattaacttataacagattaggactccgggttaattctgttagaacacaggggctagcttgcaatttgtgtgcgggtcgaaggggtacgcatctagagccctaggatctgagatcaatgcccgagattttaaaacgccaggatcacctcacgccccaccatccatcgatcaacgacccatattcatttgacgaagagataccttgggatcaaatctcctccatcggtcggagatccaatggtgcgagtactttcttcttcccccaaatcagccgtgcggtggctcctcccatctggcgacgaaatccgcgcgcaccccggcgagctactcatgacggccccacgggtttccccaacggcgccatcgagttctctctctctccctgctctccttctcgctcggcttcgacgcggcggccacgactttcttccccgcggtgcgtggcgaagctaggcgatggcgcac

SEQ ID NO: 139412 - DNA, 576 bp, Zea Mays
atttgcgcaagaaaaatatcctcgaagatcaaacatgtaaagtctgtgccctggcctctgaaaactaactcccacatcctattctactgtagctttgccagggctttctaggtagctgttggcgtcaacatccccgatatgcactgctctcgcctccgccaccccgtctgcccttcggccctccatgataggggcttcaacgacttcgtcccgctctactgctggcacctatgaaagcgtcggaacgcaaaggtcttaaggccccgttcggcagaccagcgtccaaaccaggtctggatcgaaagcagcccaggatcaagtgatacatatgttgtcactaattcctagtcactagcccaggaaccaatccggaaggtagctcaccaggacttgttccagaccaaaaattgagtgaagggaattcaaatcaggtggttctgtttctgatccagattaaaacgaacggctctagtaaactggaccagattctaaaccgggttgattcatcccgcccggaaagaggccgggaataggccgtttcggccgaaacgaacgacgtctaagggatgaaccaaa

SEQ ID NO: 139413 - DNA, 403 bp, Zea Mays
gtatttcttcagctggagtctatggttctactcttgatgtttatagtttataatggttacccaccatcgcttaacgtgccacaaaatgatccgtgaaaaccatgatgaagctgtttgatttcgcgcgctccgtttttagcaatttcgcatgctagatgtcattctgaagtagtggatgcaaagagttcatcaggagcttgctaactcctacgattgtgctcttctgcagttctccttttctgagacggtccgaatttggatgtgtgagctatacagatttctttgggatgggtaaattcaaatggtagcgcttgccgtataaaaataaaagtatggttatgttaccaaatgaacactttccggattaatctagctacttgtagacgggaagcagttgcctgac

SEQ ID NO: 139414 - DNA, 689 bp, Zea Mays
caccaagcagtagagcaatcgtatcacataaacctaggattaatacttctgattcaaacgcacaaagcaccttcacttaacgcgaagcaccaatcatccaaactaactaacaaagtggaacacacaagacaagaactcggaattaatgaaggtgtatcaaaaaaacttgaacatgaatgtacctaacttttttgtcgcctcggattttcaacggggattacaatttgagatgacacattgataggggaaagaggaaaatgtgtgaacaatatgcaacatcagaacagtatcttagaatcatatatactaaattgatattgtataaaccatttcattgagtttgataatactttttcttttcaattgcaagcctagttcaccatgtgacaatcatgcatcctaactcagaatttaagtacactatatctgaagctaagtggcaacttgcaagtatgtgtaatggttcataagtaaaacactctttcatgcagcatagctaaatggagaaatttggaacaggaacgtacctaacttttccgtcgcctcgaattttcaaggtgattacagtttgagatgacacatcgacagttgaaagagtgataaagtgataatacaaacatatcatgaagcacataggaaacctatgtgtatgcgcacatatttatatgttgcctagatgatctataaag

SEQ ID NO: 139415 - DNA, 291 bp, Zea Mays
caaaattaggcttacatggccgattctaaagatctcaatagtgcttctccaaacagcgacacaaggctgactaatttatcggccgcagagcatgaaaacttaaaagatgacatgaagaagatggatgaggagatccaacgacaacaagatcagatgctcaaggtggcgaaaaagtggtacctctcgcacttcaaggtagatcgccaccagaaggtcgtaaaggtgagggaaatagacgccgattacatgtcatccgtgctgcaacagctccccacgataggtgatgtcagg

SEQ ID NO: 139416 - DNA, 495 bp, Zea Mays
aagcttccgaagtcattagctttcggcgctccagaacaagcttcagttcattagctttcggcagtatcaccctgaaaaatgacaaaagcaagggtattgaagaatatggcaaggaaaaatataaaataaatgacaaaagcaagtaggtttcgagcttcgtcctttgccctgatttgagtgatcaatctgttgcctatgctttgagcttcggccgaaatatcaactaggtcagatggcgagaggatgaagtttggcctattaacggctcttatatgattacacccagctttgatgaaagcagtagccatgccacgagaagccactagcgcacagaaatcaccatggccagttataactttgtcgagaacatcaacctctttctcaacacatccaagagccccaggaatatcttcagcacaaaggttaacttcttcagatatgtatccaacagaattgaagatacccttcagtcgggcgatgcattgagtagcaaag

SEQ ID NO: 139417 - DNA, 470 bp, Zea Mays
gggctccgaggtcaccggagttggccaggaccggcgagaagggcccgacgaactcgctggtggggttctagccacgagaccgagaccaggggcgagagaacggcagagggaaagctccgcgcgggtcggggtaactacggcgaggaatcctggaaacgaggagggggaatcgggtgtgttaaggctcggactagctctgacgagggaaggggaatgctatggaccaacccagtggcttgggacgggatcaatttggccagacaccgtgtggggcacagcaaactggcgtgtatgaacaccggcgaggccaaattggctaagatgtaacatcccaaaatttcaacccaaggtttggaaccctaatctccccccttattttatctccccctaaactccaccctttaggtcatctcatcatatgcatacactttgattgttagagcacctcacatagattatttttaacacct

SEQ ID NO: 139418 - DNA, 648 bp, Zea Mays
gataaatatcagcaaatgttaccacaagagatataataaaacttatccagtaacatatactgatctccttattatttcacatgaaatggtggcaaaataaaacgtatccaggatgaggatggagtcaattcaaaactgctgctgttccctgcatgcataactcatctcccagcacccatccggtagaagtactggcggtataaacacatcatgacaaagctttcatgagaagatctttgaccttccgactaaagttgtctatttgaatctgctcacattgagatagttctatttgcagacaacaaaagattgatatggagaaagggctccttgaacttgtagccaatggtttgtgacttataaagacaattatgcatcatggacaaaattttatctagttcttagttttgatcattcctgaatgttcttgtttctaatgagagctatctcactgagtcaccaggtcgtgacttcaaagcaatctctccatatttgcgagggaagacttttttgcctcattctctagacctcactcatgttggagcctccgacattgggtctgtcctgcctcgaatgttcttgtcttagagccttcatagatgaagggtatttattcagtgatacagtagtggggttcattatctacac

SEQ ID NO: 139419 - DNA, 405 bp, Zea Mays
atccgtttcgaccaacggattccccgattacaaccccaattgaactccactcgttaagggaacataagggaacaaggttctcaccggggaataggtcgtggacggcgcaatccgcggtaccacgcaagggggcggggatgatggagcccgtcgagaaattgtggcccgccgaacgccacacgctcctaagccaatagatgagcacccccgctacggcttaaggaagctcccgtacacaggccgcggtcccttcgacggtgctttggcggcaatcgacgacgacgaggtgtggagggaaaggcggcacgagcgcggaaaagaggaagcagggaagaggtagctgcgagagggataaatactcccgagatggtgctacccaggcgtgatacgcgcggttggttactg

SEQ ID NO: 139420 - DNA, 442 bp, Zea Mays
ttggagtactgtatagtgggctggcgacgactttttttggatcttcaagcacatggcaggataacaacgaagaacgtcactggtcaactcaactgattcgcttaggactgaagtagctggcagatggcaggctgagagttgacggaagaactttccctgttcattctataggaatatataagattcccgagcctgctcctgtttgctgccacaactccaatcatcttcctgctggcagcttccctctccctccgctgctgagcaagctgatccaccgccatggggctggcgatggggaggcttcttgggtggaagaaggaggcgcagatcgcgctgttgggcctcggcggcgctggcaagacggccattctgcacaaactcaagctcggccacgcaatcaccaccggaccaacgataggtaaacacgcatcatgctactgta

SEQ ID NO: 139421 - DNA, 449 bp, Zea Mays
taaaatgggttgaatgaacttgagatgtattacaatagctgtgtgtcgtgccggtcatccaaaaatggcgaaaggtggtgtgtgatggtaattgggaaatagtcatgtcattagctaactcatgtcaggtaggagttgattgtgttaagtgattgttatatatgttgtgtcacgaattatgataataatagacaagccgacgtgtatgctgtctagcgggctgtgtcgttgctctagctagccgacttgttagatggctttagttaagctcgtagtcccgatgaattgcttgttgtagtctagatgcgcatggtgatgatcgtgggtaaaaatctgtactgctcatgtggtgtctaaactaaaatgcggactagtgggtgaaaagcgcttcgatataaatatatgccggatttgatgattgtggtgaatgcgtttgttaaatgaatgtg

SEQ ID NO: 139422 - DNA, 471 bp, Zea Mays
gtaaaggtcccttttatgttttgattatttgcccatccttaccctttgaatcccatggttagggtttaagggcttaagaaggaattagggctttagagtcttgtttgtgggtgaacattgtatgaaggatagaatttctttcttgttgtggataatgcttatcttaaccatgattataaaacttttagtgccctcactctccattttagcacaaagtttgagtaggacataatgtgcttctttggccagggctttgggtaacaccaggggtgttacagctttgtacatcctgatggtgcttctccgagtgactcgatctgctgtctccaggatctgagttggcttctcaatatatgtcagatcctcttgaacttcaaggtcctccgttggcaactactcttctagcactctcaagcatttcttcagctaggacacatggaacacatagtgcacagctgacagactctctgg

SEQ ID NO: 139423 - DNA, 662 bp, Zea Mays
tctatctgcagttaggaccataaggatgtggtgtgtaggaggaatcctaatgggaagctccgatgggagccggtgacttcctcctcttctcagggcaccatcaacatgatgtcaagtgctgagcagcagttttcagttcctcttcctccgcagcagctctatgtgcctgggacttctcagttcatgccgatgcagggttttcctcagtatcaggccacgcctactcctgcaccgtctactcctatgctgtctcagtttggagctccgcgcctgcctcatccagtggctcagtggggttcttctattaatttcactctgggggctttctcttctgcgggtatttctggagcttatgtgctacccgctatggatggcagggagcaaggagacgtggtgataggtacgatttcagttgattcgtttgcagcccatgctccttttgactctggcgctagctattcgtttgtttcggaggattttgtgtcgcgggctggtctttcggtgcagaggttgggtcacccaattttggttagatctgctaatggctccattagtagctgttcagtttgtcaggggtgttccgtcattcttgctgatgaggtcttttcggccaatctggtggtgatttccttgggggcattcgatgttatcttgggtatgga

SEQ ID NO: 139424 - DNA, 345 bp, Zea Mays
gcctcttgcaatgaaaggaaaccgctccatctacggaggagaaggccggggcagaagaaacgacggatgatgaatgtgatgcaagctattgagtagacatcgcccccatcttcggtggcaaaagcagctatgtctgttgatgccgaagataccacaagagccaaagctgatgaactcgcaaccacaatttcggaaatcgacaaactcatatcggatgtggttgccgagaaggacgtagtcatagcgccttctaacaagggaaaatgaattgaagatgcctcttcacaagataaggatttcgaccttcagcaccttggtggccaactactttttgaagaggacaaa

SEQ ID NO: 139425 - DNA, 508 bp, Zea Mays
gttgatttgtaagtactgttacttccccttaatgaagaatgatattgccttctctgtgccgattgttctgcttcgtaatcagttaacttctgctgtgatattcattgctcatgatgctctctggttgtagcataacttagagttcttgaatcattcctccgcccaccttatttgcgaagttgatttccttggaatagtaagtaaataactcgagcatcatattgacgcttttagaggtagctgccgagtgacttgaagacgacgtcggagttttagagataactgtcgagcgaccaaagacgacgtcgacgtgtcagaggtaactgccgagcgaccgaacacgacgtcggtgttttagaggtaacgccgagtgacttgaggatgacgtcggagttttagagataactgccgagcgattgaacatgatgttggagctttagaggtaactgtcgagcgactgaacacgacgtcggagttttagaggtaacgccgagtgacttaagaatga

SEQ ID NO: 139426 - DNA, 548 bp, Zea Mays
tgaagattgagattgcaacacaaataaacactacctcttatttgcatgtgtcccaagattgcaaccagatttttacaaataaacactatgcaccaaatgcaccagacaaatgtacatttgtgtgaaacagactacaagaaacaactgaaacaagcacattcggtgactcgctggacgcaccatttcacattaacagaagcagaattatcagtcaaagcacacattatagtctgaacctctccaaaccgcctcatgttggctcaagtccaggttccccctaaacctcccctcataacaaaaacaggagataaggagaattgagagagctaagagttcgtgacgatcaattttagaataccagcttataatcttcttcatatttgtattcacagagtattgcgcactgatcagaacctctctaaaattgttatcctgttgtttcccgatcgtatccaaattcaacacaccagtggccagcgtatgtacaggacgaactcaccattgcctagctcactgttacattcatccattacatctatccatgcccg

SEQ ID NO: 139427 - DNA, 437 bp, Zea Mays
ccagacatagggggagaatcttttaatgcgagttataaaaatatagcagaagacatagggggagaatcttttaaggggagttataaaaatatagtagaaagtatatataaggggagatggatagggaaaattgttagagagaccgttagactattgtatatggttagggttaccctgtattttcctaattatccctattgtaatgggcttggcctacctaactcacctatataatatactcctaaccctgaattaggattagggtttcacatatttcaactaatgcctctgacctctacctcgtcgattattgacttcttccgcttctacgtggactcaacatctccttcctctgctcaattccctgccaacatcccaagatcctccacttcagctcacaagtacctcttcttctcccctcctttgcttttcatctc

SEQ ID NO: 139428 - DNA, 414 bp, Zea Mays
gagaaaaaaacaaaaaactgatattacaataacatttccaagatttcttacgtggcttcgacctcttaagccagcccctcaagtgcttcagtagatgtgcttcgactctgaggcaacgctgttgactgttttggcttcggactgttctcttgcatcgcgttgtggtgtgttttgcatagaaaattgttgttgaatctaaggtggtcctagaagatgtaggtcatatgatgaaggttttggtgtacaaggctgagccacaatccaatgagttgaggactgacttgtcgaagcgacaaaccctaaatgttgtgtggttggctgttgacgatgaacatactctaggatgtatggggagtagtatgaggaagtgtgaaggacttgctttggttggttttgtcgtgtctcagttttagc

SEQ ID NO: 139429 - DNA, 359 bp, Zea Mays
aactgacacctaaccttattcaaggaacactcgcacctggaactcaaaaacgtccaagcggatcaactaaaacgacctttaggaggcagcagacaaaagctggaccaaaccttcagcagcagccatacaccacagtttggctctttaaaaattcttgtaagaatctagacacacgcttggtgcagcgccctacctgcctaccattaaacaaagacactcatatctgcgtatccagatcattcatggtgtaaaaattaatgtgtaactacaacaacagttaaagctggatttgtacagtttgtgtctattcaattatatataattatccatatagcttctctaaatataaaatttgtctt

SEQ ID NO: 139430 - DNA, 1276 bp, Zea Mays
ggcatgccagatttgggcacctgaatttcaggtcacttagagaactaggtagattgaagatggtggaagggatgcccttagtagacagggtggaataggtctgtgatggatgcactttgggaaaacaacatacaacaccatttccaaggaagtctgaattcagagctcaaaagggactagaattgtttcatgcagatttgtgtgggcagatcagaccaaagacagttggtggaaaatcctatttcctgcttgtagtagatgattacagcaggtatatgtgggtagatctgttgaacacaaaggatcaggcattggcatcactacagaagataaaacaaagagctgaaattgagttgggaggtaatttgaaagctttgaggacagatagagggggagagtttaactcagggtccttcactgttttttgcaatgagcaaggaatcaaacattacaccaccactccctattctcctcagcaaaatggggttgttgagagaaggaaccaatctgtagtggagatggctagatgcctgctcaaaggtaagggtgtgccaccaagattctagggagaagcagtaacaactgcagtttacctgttaaacaggtctcctactaagagtgtgcaagggagaacaccatatgaggcctggcatggcaagaaaccacaagttggtcacttgaggacttttggttgtgtgggtcatgtgaagaagattggtccaggtgttgaaaaattgtcagacaggtccacaaaaatggttctgcttggatatgaggcagggaccaaagggtacaggatgtatgatccttcagctgggagactgtatatcagcagagatgttgtgtttgaagaagaattggggtggaattgggacagtgatgaaaatgttcagcaagctgagacagaatctggtctttgtgaattccagtttcagtacactgtgcctggtcaggtgttgcagcagccaggtgttttaggtggaagtgttgaagattcagggggtgcacaaaattctccaccctcacctcacacaccagtgacaccacaaataacagtaacaccacaagtgtcacaggggggattacaggggtcaagttccagtgcagctactaacaatagtcctcagaccccgagcactcaaagttcacaacatccaccattgagatataggtctctaactgatctgtgggatgcaacagaggaggtacatgatttccaatatagtgggctatgcttgttggctgcagatgagccagtgaatgttgaagtagctct

SEQ ID NO: 139431 - DNA, 414 bp, Zea Mays
gggaggcgatgtcgagttgtgccagccatggagcagagctggaagagcgcgttggagcagcactgaagaggagggcgcgcttgtagcggaagaggaaggaacaaaagtctagactcgtgataccatgtaagtaaatagaattgcaggaattatgtcttgtattgatagagaagaattataggtacatatataggggaggagtgcaagaggcaaaaggaaatctcataaacagggaaatcggcaggatcctaattgatccatcctggactcctccccaaaactctctatcctagcctgctatacaaggctcaccggctatagaagccaagcatcaggctgctatacaaggcaatgaatattgttgtttaatagcgacgacgacggctggcaagttggagtccagcaggatagcct

SEQ ID NO: 139432 - DNA, 421 bp, Zea Mays
ccctctattgcgagcaaccaaccaccggcaaatgcctgttggcactgcggagaccccagtcacttcaaaaataactgcccctagttgaaggcaaccggacctacctactccaactcggtgaatggccccaagattcccttggcacctacctccaaggcacctccttccaacagtcagcagagcaggactcagtaccagggcagagcacgagtcaaccacgtcgacactcaagaagcccagcaagctccgggagtagtgctcggtgagttccttgttgaatttactcccgctactgtgctttttgattcaggagcatcccattcatttatagccactaagtttgtggaaaagcatggcatcccctctacacccctagctatccctttggtcacctgaacccctagatcagacctcctatgcc

SEQ ID NO: 139433 - DNA, 822 bp, Zea Mays
ccaacagatcgcgaaccaggcgggcgaaacagaagccgcgcggtcctcacggtgctccctgaaccggatccgtaataatcttaactaatcatctgccctgagtatatatatggcccatcgttaccctgctatgtccatcatcggtgaagccgtaggcgccatcgggtcttgctgtgtgcgaatgtggtgattgtgccgccggcgctggacaacaccgcacgtttgtgccgaccggggaagtgagggggcccctgcagccatggtgcccgtggtgcgaacttcgctgggtcaggggctctggtgtgtccgtgtcatcgactaccggccgtcggcgccaactcttctccacggaaccacaccacggcgtggccgagtctccctatggcgtaattcgtggtatgtcggctcggatcatatccgtctctgtcccctgtatccatagctatagttagtagtgcagttggatcaccatagggttggtcgagcgttgctccggtggcctcgccgtcgtgcggtgcttgctgtttgccgtgacccagcgcggaggtaggagacgcgccctgggccgttggatcgggcgtgttcggacaggattagaagtagccgtaccctttcgcttggacgagtatcgatcgtcgatttgatatcgtgcgggtgagatgagataggactataattaaatcggggcctttggtctccgatcctgtggatctgggcaagttttaatctgggccgttgatggatcatcctgtggccctcactgcataccggttcgggttgatcggatttaatctgggacgtccgtttctaatctgacggccc

SEQ ID NO: 139434 - DNA, 462 bp, Zea Mays
atcatttgtggcccctctgcaagtgacattgtagatttcaagcaacagatgaagaagacttttagtatgagtgaactggggctgcttagttactacttgggtatggaggtaaggcaagggacaaatgaaatcactatttgccagaggtcttatgcagccaagattgtagagcagtgcaacatgggcaggtgcaatccaacagacaccccaatggagcagagggttaagcttgtaactgctgaaaagggaacaaagagtgatacaacccagtatagaagtgtgattgggagcttgagatacctagtaaacacaaggccagacttatcctttgaagtgggtttggtgagcaggtttatggaagcccctggtaaggagcactggtgtgccattaagaggatcataagatacatagttgggacacttgattttggtgtaaaatttagaaaaggtggaacaacagat

SEQ ID NO: 139435 - DNA, 2306 bp, Zea Mays
ggtgctcggcggtgctcaccctctgaccaacttggaacacaagtttgtggagcaggtaattctatttctttttctgtccgtcccctcacacgaggttcaccttatacaagtcttaacagaaagcctacggcctgacagtggaccaacctcattacaaaatacgtaaacgataatgaaacgcgtattacacttatgccgtaactccggtgatggttggcgccggtgttacatcaccccctcctggaatggaagcttggccccaagcgcttgaatcagggaaacgagcttgcatcaccatccagtcttcccatgtagcggaatcagctggaagcccttgccattgcaccagcacttgtacaatagccgcaccacctttcttgaccagtaggcgttggagaatgcattgaggctgcaggtccctttgagtaagatcaggtatcttgggaagttcagcatatactggagagtagttagcagtatagggcttcaattgggaaacatggaaaacagggtgcaccaaactcccagccggcaactccagtttataagttgccacgccaatcttctgaagtattttataaggaccaaagtatttgaaggccaatttaggaaagggtcgactggccacagaggattgggtgtaaggttgtagtttcagaagtaccatctcaccttctgcaaactgccgatcaatacgcttcttatcagcttgaagtttgatacgagtttgtgcagccagcaagttgtgtttcagtaattccagatgaagatccctttccttgatcaatgagggaagatcagtagtggaaacatcagccagcacaggaaaagaaggtaatttcggttcatatccatacaacgccttgaatggggagcattgcaaggatgagtgatacgaagagttgtaccacagctcggccagaggcagccatgccttccacttggctggagagttgtagatagtgcaacacaaatacatctccagacattgattaacgcgttcggtttggccatcagtctgtgggtgatatgctgtactgactaacagctttgtgtccaaaagtttgaacagccctttccaaaaagcactagtgaaaatccggtcacgatcagagacaatagaagcaggcacaccatggagtttaaccacatgagtgagcacggctgaagcaacttgattggcagtgaaagggtgacgtaaaggaataaaatgggcgtacttagtgagacgatccactaccaccaaaatgcaattgaagccatcagagcgaggaagaccttcaataaaatcgagagagatgtcctgccacacaccttcaggaataggaagcggctgcaataatccagctggatgagacttttcatgtttggcatgttgacaagtaggacactgcttaacaaaagaatcaacatcctgtttgagccctttccagacaaacatacgtttgattcggtggtaagtagcatcagtaccagagtgacccccaagagcactagtgtgacaagcagcaatgagtttggtcttcaaagcagagttatgatcgatccaaatcagtgtaccaagcctgatcacaccatcaaccaaggaataaccatcaacatttggactgtgcaaagcaagctgctgcaataaatgttgggctgcggaatccgtagcataggagttaataacctcttgaagccacaagggttgcacagaagaaatggcatgcaccgacaggtggtgattgacgcgggataaagcatctgcagcaatattttcagaacccttcttaaacacaatcttgaaatggagacccaatagtttactcatggctttcttttggagctcggaatgtaagtgttgagcatccagataacacaaactctgatggtctgttcgaatgatgaactcttggcgttgtaaatactgcctccaacgatccactgccatattgagggccaagaattctttgtcatagatagacaaatacttgtgtttgtcgcccaaagccttgctcataaaagctactggctggcccttttgcataaggacaacaccaataccgacagcacaagcatcagtctctaacacaaaaacctcattgaaatcaggtaatgccaacactggggtacaagacatagcctgtttaagagccagaaaagcctgttgtgccgcagtatcccactgaaattgctgttttctcaggagattagtcaatggtttagccaacaatccataattcttgacaaatttgcgatagtagccagtaagacccaaaaacccacgtaactcagtcacattagaaggtggcggccaatcctgc

SEQ ID NO: 139436 - DNA, 478 bp, Zea Mays
tcacgatgacggcaagacccaagggaaaatcgagatgttctcattgactaggcgcggtatagtttaattggcagggtcgacgagtatcacaagcatgctagagtactgaaacaggaaccaggagggcgagagcggacctgaggacggctgaccatgacgaggtgacttgcggtggcgcggagagtggatttgggggaaaacaaaattggggcgctacagtggatgatcggaggagagggctggtgctcggggttcgtaacaagtagacggaataggccgatgcatcaatttatagaggacaactgcgaggagggcgaatttggatggggaagcgctcaagatgagatggggaagaactctgatacacggttttaaaagggtaagttactaccagaaagtggcaagataagaataaaagaatattttaaggtaagcgtttaaaaattcttttgaagtactacgtaatgtctgaagagac

SEQ ID NO: 139437 - DNA, 550 bp, Zea Mays
aattgccattgttttttgccataatattacctgttgcagtgaatgtactgtcacatgctcctcgttatcacattgcgatacatgttcaccttcatcgtttccaacggcatcctcttcgccctggaacgtttaattattacaattagcaataattaagttctgaataaaatgtacaataattgtatataaaacaacacctacatggttgccctctctagtacttgcaccaccagcatcatcacatcctatatctggctccaaacgcccaagcatctccaatagtttatccattgtgtccaaggccttatcactccctgcctttgacatactagcatggtttaccaccttcattgcctttttaagcatcattttctgcctatatgattttgtttctccatcctttccactcatttccctgtcatctcttgaaaataccacatcttgcctagctgagtatgtgtaacgatgtaaaatgtatttcttaggtatcctttctagctgaatgtgcatgaatgtttggataagatgcacacaaaataggcctacattt

SEQ ID NO: 139438 - DNA, 529 bp, Zea Mays
ctgtactagagctctctaacgtcaacatactgggcacgaaggatctctgatttctgccttctaagcctgcatggtgcagccttcatttgactctctgagtggcaaagtagattacattagcatacgtacagggcggcacgtagaccaatgaacgacgaccacaatctaaaaggcactccatcccgtgagggagttattataccagtcagggaggataccacattaccattgctatcaaatgatcaactacctttaactctactatagtcaggtgcccgtacattgttacttcacatcatgcttgttaagacgcataattgcatccatgttttctagtagaaacttctccattttgaagtatagtgaatggtagttgcaattctttagtattcgtcaaaataaatatgccatgaatttttagatcgaggggtttgtagactcactcatcttggtcaataccagagccattcattgttggtgtgtgtcactctcggattgcgccgacccagagatgaagaaatatgagagt

SEQ ID NO: 139439 - DNA, 465 bp, Zea Mays
aacgtgtacaccaaagatagaagaggcaaggagatatggtagctagcgctgtaaaaggaaaagagataatctgttactatctttacctccttaattatctcctggccgttgtctaggtgctacacctcccctatatgtaagccacggctggggcttttccagtcatcaatccatcaacacgcagcacgcctgtgacgacgtttctctccttccaagcgcctctgaatctctcacatggtaatcagagcttagggttccatggcaacgagttcaagcaccatcaccaatccattcttcggcttccaagtgaccgagaagctatccaagaacaatcatgcgtcatggagagcgcaggtcctcgccgcgatccgcggtgctggctacgaggggcatctcaatggcaagaccaaggctcccgatgctgaaatcgtcgagaagaagaccgacgacacgatcgtcaccaat

SEQ ID NO: 139440 - DNA, 391 bp, Zea Mays
aaagagcgggggtcgagtctcagagaattcctgatatgtagtttcacgcggtccttgaggaggagctctgcctccgtgctgttggaactgattgcccgccatttcgcgcaagaagcgtgtattatccgcagtggcattgaccagggcagcgatagcctcgaccaaagtcggtggtactggtggcgggttaggagtatcttcccgactgcgggaagtccccgcaccatcatgtgggcaagtccgtgatggcatctaaggcaaagaaatatttggaaaaaaatataacatgccagcacacaccatcatattacattaccaaaatgtaataattatacagactccagcgtacaacttgacttcattacttattttacataagtataacatctaa

SEQ ID NO: 139441 - DNA, 430 bp, Zea Mays
tacttcaaccctagttttgtttgttagcaggcgaggtattaattcgtttcaattactggatttaagtagattgtccccatgtccagtttattcactacatcacaacgggtttcgatcgacgtactaacgattttgttgtgcaatgtggccttcagatttccgcatcaactcgggttcttcgtcttcggttccaagatccactgcagctagggtaatgtgaatatcaatttgttggttaattaactgtgagcatagatgaggttttaccaaaatttgttctcggtgaacgggataccattgatgtgttttagccctattatttgttcagggtttctttcaaagtttgtctatgtcagtacctgtatgttagtagcctgaaccctagtttgtctatgttagcacgcaattcatgtcaatacatggatgtaag

SEQ ID NO: 139442 - DNA, 392 bp, Zea Mays
ctccagtgtgagtttgctatgacggacatgggtcagcttcaccattttttgggcatttctgtgacacgctttgtcaatggtctgtttctctctcaatgacagtacactcaggatattttggagcgcgccgggatgagcgtgtgcaagtcgtgcagcacacctgttgatctccactccaaattatctgcaaatggacctcccgttgatgacgctactcagtaccgtagcctggcaggtgctctatagtatttgactttcacccattcggacattgccttcgctgttcagcagatttgcctctatatgcatgatccacgagagccccacctcgtggctctcaagcgcatcttgcgctacctgcaaggcactatgtctcttggactgactatgcg

SEQ ID NO: 139443 - DNA, 554 bp, Zea Mays
caattttgggattatcatttaatttctaaaaatccagaactgttagtttaagctattttaaatgcctcaaaatttcttatttcccctaaaaatcacaaacttatttttattaaatactatggaaaataagaagcctaggaaaattggtctcatatttttaggatttttctgtaattttctatatatttttaaagatccactgaaaaagaaaaaggaaaaggtgtaacagtattgggctcaaactgacttaggcggcccaaccccgcgcagaagcgcgcccgtgcccacgtgctggcagttttgtgtaaaagcccttggggttttcactaactgggaaccggtctctttactgttacccagggtcactgacaacttacggaaaggtccttaaacttctatttctttgcagatcaaggtccacgacgaggatcagccctcgccgcaccctgacgagccaattccggccggccgccgccatggctggagctcccgggcgacaggaacaccatggaacctccaccgaacacttcccctaagttaattccaggcacggc

SEQ ID NO: 139444 - DNA, 421 bp, Zea Mays
gttcaactcaggaaagaagtcaatggtgggctggaagggactcgtgaagggaaaatccgtcttgatgaagatgtcgtgttgggagatcaataggcgatgagtggtgaggttaagacattgataccctttgtgatccgggagtaaccgaggaagacacaatggttggagcgagggttaagcttatggggagcagtgacagaaaggttggggtagcatgcacactcaaagacgccaaatggtcataggatggagtggcgctaaaaagagaaaagtggggtgtgcagatgcaaatcaacccagtaggaagcaagaacggatgcctaaatagcaaggagcacatgatattgttagtagtgtgaatcaggcacgcaaccttgacattctgagaagtgtaggtgctagacattcgaagttgtacacc

SEQ ID NO: 139445 - DNA, 296 bp, Zea Mays
agtgtccatgaatgatttgtagcaagtcttaagtatcaaccatctggaccgatcctgttgataggtaaacatgggctgtttggttcgtggtcattatgactgactttggacaattgtgcctagacaatttaaattcatattttgccatgtttaagtgggcataatttgccatgattaaccttgaacaatcgtggctagacagtttaaactcacattttgccatgtcttgagaaatcttgtcgtgtttctcagtttgatgacatagaggagccaaaagaaatttgtctatttttaac

SEQ ID NO: 139446 - DNA, 367 bp, Zea Mays
cgacggtggtgttcctttgcataggagctgggtatgactatggtcacaagcgaccagagatttatagacgagggaggctaggggctcaagccgagtccgcacggatggcgagaaacacggccgggatcggttgttgccgcgctcagagttcggcagatttttgtttccgcccgacgctgcgaacacaaagaagatggagtccgatcagcgggattcggccagcagcgaattctacggcgaggggatccgcgcgaaaatcgcgcgcttgttgcgttgttgccgcgggtgccgtgcggcctgttgagggaagaagaacgagctgacaacgtgcccccacctggcagcggcgcaagcgcaggtattcatt

SEQ ID NO: 139447 - DNA, 458 bp, Zea Mays
gccaacttgtcgccttgcgcccgccatatatcgtggccagcaactcctgctctacaatcgctggaaataccgccttcagcaggttcgtcgtagccaccactttgttgagccggttttgattcgggtttcatggcacctgtgcactggattgggaacgcgccggtgatgccgtcgttgtgcgctctacgccgccatgggtgaccagcggattgggggaagaatgcgtgctgctgttggattctaatcaacggtggagattaggcaggagagtaactcttcgtgaaatagatctgggtcgtgtaccttggatcgtgcgtacaagaacggatcgggatcactttaaatctggactgtggatggtcaatccaatggaaccctttagcataccgtttagggcgggtgtgggcgttgatctgcctcgtccgtttttaatctaacggctggcatagcataccgct

SEQ ID NO: 139448 - DNA, 478 bp, Zea Mays
cgactgcgtggaagtcgcagccgccaccagttcaacgcgacgtgcgccgtatcgtctacgcgttcctgcagtcctcatcaccgcctctaccaggtgactggtgtccttatcaacaaacaaagtgcatccgacatcctactcagtgttagtggtcacggctagcaattctgaagccaagccagaaatcatcgtgacgtgtgctcattctgagtttaaaggtgaaggttttattgttcgaggtagaactcaacaagcgggtaattctaataaaccaaaatcaaggtctaagtcaagagatagtaaacccaacaatttttgttgttattgcaaagctgataatcatgtgatctcccagtgtcctaagttgaaaaataagtaagaaaggcaaaagaaaagggaagttgataaatcaactgttgaggctagtattgttgaaaataatgatggtggagaagctcttatgatcacttctaataat

SEQ ID NO: 139449 - DNA, 481 bp, Zea Mays
acatttcaaaaaaataaaatttgcttagaaaacagtattggaatcatcaggactagaacgctagacctaggacgaaaggccttaggaatagtggggaaaacaggtggctaattaagtaggccatataggccagtcttaggattgtaaggatgccttaaaagcacccttctgattggtgaggagacgttttttctagcatgcatgcatcataaaacatgaaaagactagaaatcaaaggaaaatacatctaattaggagtgtaacaaataaggttaataataaataacataagaagtagaatctaatttaacccacctcctgttaataacccgggcaatgtgttttcctttttccaccaccataacatttatatctaaccctctttcacagattacttgacccacccccatcaatggaggagacactcgtttcagctccgaccacctttcccacgagggtttcccttccatcttgtgggagg

SEQ ID NO: 139450 - DNA, 1165 bp, Zea Mays
tgttcattcaaatggactaaacttctctgatccgtgtgaataacaaattgcgaatgctacagataagctctccaatggtcgacgaccattaatattgcgaggtattccttttcgtatgtagagaggcctcgagtttgtggtcccagtgctttactgacataggcgagtgggtggccaccttgcattagcactgccccgatgccctggtcacaagcgtctgtttcaagcacgaaaggcttggagaaatcaggcaaggctaaaactggtgcttggctcagcttggtttttagacaatggaatgcaatgtcctgttcttgagtccaaagaaatctgctattcttcttgagtagtagggttaaaggcttggagataataccaaagtgttgcacgaatttcctgtagtatcctgcaaggccaaggaaactacggagttctttgacattagaaggtgttggccaattgaccactgcagtaactttgttgggatcggtctgcactccagcttcactgatcacgtgccccagataggagatagaacgagtggcaaaggtacatttggacagcttcactttccattgatctttctgcaagagagatagtaccacggacaggtgctccacatgatcgttcagtgttggactgtatactaatatatcatcgaagaaaacaagtgcgaacttgcgcagaacaggctgcaaggtagagttcatggcgctctggaacgttgctggtgccccagtcaaaccgaatgccataacgcgaaattcatcgtggccactgtggttttggaacgttgttttgaactcctcgccttctttgagcagaatctgatggaaacctgcccttaagtccaaactggaaaaccaactagccccttgcaactcatccattaactcctcaatgataggaacagggtatttccgcttaaccgtgagggcgttgagatgtctgaaatcgacacaaaaacgccatgattgatcctttttccgcactaacaagaccggactcgagaacggactgttactgtgctgaattatgccagacgcaagcatctcattgacttgtcgttcgatttcatctttgacagctggggcataacggtatggcctaatgaaaactggctggtaaccttgaattagaggaattgagtgatcacaagaacgtg

SEQ ID NO: 139451 - DNA, 438 bp, Zea Mays
cctcggtgagcagaactgttttctccccctcccctgcctctctatccctctgtcttttaggcagtgaaccacccttttgcaaatccttcaaaattctgtgaaatccgatgaatccagttggtggactatcttcctttgtccctattacatatccctgcaggtccttggctccttcgggagggtttttccaccccaaataagcttttcaccaaaaccctaaatccccgcacaccacgtgctcggtgaaatgcccaaaccagccaaacttgctccaattgaacccaaatttttcaggcaccttcacaacacttccagcaacatccttgccaaatttcacgccaatccgagatcccaggcttaaatttcaccaaaattcccgttttgagcgatcgtttccgagccgagtgccctaattcctttttttcgcctaaattcaaa

SEQ ID NO: 139452 - DNA, 527 bp, Zea Mays
gctgacatcccatccttggcacgacagatgctaggacctaaaccggcaaccatatgaccctcaccacgactagggttttagtattgagctattttcggcccatctataggatcttttagcctggtctctcgtctcttctgccaatatgtagctaccaaaaagtttggtctatgcctcctttcttttgcccgacgtccagcaccagcggttgtgccccaaatctccagcaccagcggttgtgccccaaatctccagcaccagcggctgccctagaagtgcaaaactccagcaccgacagttgcgccccatatctctagcaccggcgactgctcacttgcgcccccagctgtcctgctccattcaacggcgcatacgctcctctgcctgctttgctactcacctgctccagtccagatatcggttgcgcccctctgcctgcttggctgatcgcctgctccagtccagataccaacggctactccagcatcattgacgagatgagcttgtcatctcaaggttcctcctcc

SEQ ID NO: 139453 - DNA, 783 bp, Zea Mays
aatatatattgcatcattctgggattatacttgttgttgcatataaactgggctttgaaattcaaacagatttgaattagtgactcatttaaatttaaaatagttaaaacaaatggaaatttaaatcagaaaaggaaaaagagaaggaaacctgcgcctgggccaaatctgtccctggccggcccagtctctcttgcccttcgcggcccagctattgcgccccctcggcccatccggctccttcctcccaccgcgcacttgcacgtgacaccggcgcctgggccccaccacacaggattaccgggtttacctccacgcacgctcttcgctctctgaatggtaggacccaccggtcaggtttatctctttcccctcacccataacagaaccaagctccgttcccccgccgaaatcgccgtgatcatctctgatggcggcggcagattctcccacaaaatgcaccaatctcggggcgggccaaccatgcgggtcctcatcctcgtctataaaaccataccgtgaccctcttccccaccatctggagcgctgagatcggagcagagagatggagaagtggaatcgagggtaggagagagaatttggcgccgcctcttgcaatttactcttgcgcggtggctcgagggtttgggaggacttcgcaggagcaagccagtggccgaccggtggacttggcgtggtcatcggtggcgagctcctttccccttgccgccgtgccgtggactgagttcaacactgctcgatcccctgtaagttgcccaccat

SEQ ID NO: 139454 - DNA, 870 bp, Zea Mays
ctaccttggtaagacggtatattatcacccagatagagtcgttccctttttgggtccggggcagtccggttacaaaatccatgcctatttcctcccacttccattcgagcactggaaggggttgcaatagatctgcaggcttctgatgctcggccttagtttgttggcaagtgtcgcaccgggccacatactgtgctatctctttcttcattcctctccaccagtatctggttttgaggtctaggtacatcttggtggtccctgggtggatagagtaggctgagttgtgagcttcgtcaagcagaacttctcgtgcctctccttttggtacacacagacggttcttgaaccaaaggactccttcctcatctgtcctgaaatccagaagtggttccttgcgagctttttccaaaagacctgctgtctcagtgtccaggcgttgagccttgcatatgaggtcttctagcattggcttgacttctcggctgccattgtctcccagacatgcattcagctgagctgattctttcttccaatcttctaagaagttggttcctttcttcccgaaaggttttcggctgagggcgtctgctaccatgttggccttcccggggtggtagtggatctcaaggtcataatctttgatcaattcaagccatctccgctgatggaggttgaggtctagctgagtgaagatatacttcagactcttgtgatcggtgaagatgtgacatttgttcccaattaggtagtgcctccatatttttagggcatgcactatggctgctaactccaaatcgtgtgtgggataattctactcatgcggcttcagtaagcgtgatgcatatgcaatgaatttctcattttgca

SEQ ID NO: 139455 - DNA, 1111 bp, Zea Mays
aacaaatctcatggagtttgctaataaatccgaatagaaatcaggaaccctaactgaatttgttcctgcgcggatcgtccacgccaccacaccaaaccatctgcggtacagaccatccgagctctagagctggattatccggtcacttttgttattcaacacatgctcccctgcctttggtggagcttggcgaaccaaaagcacctgcactaccagcatccttcgagaaataataaatctcacaagtcattttgttcccaaagtaagaactcaactcgatgcaagtcatcggctttttcagtctaataagacaaccatttaatagaattctaaagcataaaggccatttatgatggcatctttctcggccatgactatttgatcaatgggtgaaaaggcatagaattgtgatgccctttagcccaaaaagcaaagagattacacatgtaatacgggttcatcgtcgtactattccatattttaataggacaacatattgacggtgagtaggctggtgaaaactaccctcacaccacttgggatggatgaacaggcgacacatgttgtgttgacttttgggtcgttttattggaccatgttgcttttgtgggtgactgatgttgctttgctagtagaccgtgtgtgacagccttctcactaacatatttggcaagtaattgatcaaaattaagaccgattttaaccaaccggccagatgatttagatgtattttgcttctacatacctatttctggttgtcgaggcttgaaggtgtgtgtggatgttgtggcctcaagttgctgccagatcatctagccaaatgagctagaccgtgcatgcgcatgcgtcgaatcatccgtgatgcgcatgacaaggagatctaatcgactgtctagtcgcacttacccccgacgcgttcggtcttattagttcttctcttgttcacagcctttcgagtaaccacttcttgtgatatatttgatgtgcgaggattatcaatgataatgttcttgcctttgtctttattggccacatccggtcgtgaaagttgcctagaggggggtgaataggcaagtggaaactttttcaacaaaaactagaaacgaactgg

SEQ ID NO: 139456 - DNA, 468 bp, Zea Mays
ctctaagcgacattcagatccgtgttcctgggaaaagggaactttcacctatgtatctcaacataaacacatattagtccacctaagttgtcactcaattaccaaaatcaaacaaagtttttacaagaggtggcttgatatgaattggttcagatgcacctcccacccaagcaccacaatcagaggccacaccgctcaaatggtcgacatgccctcgtgtccacatataaccttcagatagttagtcttaggcatagcctagagctactacaccaacagagacacatgttaatgagaggggtgagtttgaagtggagcaggtctaagacgtcccactattgtttgatcttcatagagccatagctagccatgtttgttgatatagacacatcacaattgtcaagtagttgctagagtagaggggccctaaatcaagagtactattcagcaacaccatattgaagttct

SEQ ID NO: 139457 - DNA, 646 bp, Zea Mays
gctcacttctactgtcttataaatgctcttgcctgatctgtccgagattttcagcaattttgttggtttgttttcattgccttttccatgtgtagtgtatcgtcatttgtttagcctagtttagaccttagttagagttgctctgcctagtttagttggtcatgcttatgtatcatcattcaaaattttatatcctgcagtaccaaagtaggaaaatacgtaagtttcaactctatcatttctttttattagaatccaaattcagttgctatcttaattttttctacatattttatatggtttaaaaacacccacaacaaattatttcttgtagtaattttgccttctttaattatcataggcatgactgcggtattttcacacttcaatacatggaatattgggatatatctgttgatatgatgctcaagttccgcactgaggacatccctcaaattcgaatcaccttggccaacgatctctattttagtgagaagaacactgaagacaagtctctagttcgcaacatgtttcttcaggttttttgtgattcaatttgtgttgttttttgggcgctcttattattttgttttttctagttttttcctttttcgtgggtggtgtgtgcagtgctgatggtggtatg

SEQ ID NO: 139458 - DNA, 357 bp, Zea Mays
agcgagagtcgttgttacatggcaaattttgatgggatatgtcatttctcgcatgtggtcgaaagtcatctcctatgatcctgaaggttgttgtggctggcgcgtccgctcgcaagcctttatcatttttggtctgattagactaggggacaaataggtcttgcagacatctagagccttgtcgcaaggtacatctcccgaagtcgtacatgtggttttgcctcatagttcttttcttctgctcatgtattctttggctcttttgactttcttacacgacacgaggcgaggctcgtcgtgaaccgctagttcttgttgccctttggtgagccaagcaatcgaaaaagggcatcttca

SEQ ID NO: 139459 - DNA, 490 bp, Zea Mays
gtcatacttacgtttcacaatgacacaagaaatacttaatgcattggctacaatagtgattgagtatgaaatgctagagaagattagctacaaaaacatcatcgatgattttatttctaagaacaataagagaacaatgctttccaaataaagattatgtaattggtatgatgcatagtttgtatgcatatatacatagttttgctaattttataccctaaaattcgtaggacacccctaaaactaaggaatccaacaacctgcttgctactaaactgctgtagaaccagaattggccaatcatacaacaaaaaacatgtcgttcgagtcaatttctcaaccaaatgatgtataatgtagctcacaattcaatgcaaacgatcagttagcagacgacgaattaagtttggtagagggtatcccatgatagttagttcgcctccaaatgcttgccaaaaccgttgcccatacccaaaataggtaacattta

SEQ ID NO: 139460 - DNA, 352 bp, Zea Mays
agatagggttggagcgaactcgtcttcgtgtagatcggagtaatcaacgcgacttgttgtcttcgtcgtttgggacgagtattggtgagggggacctatggaatttgtttgagggtgaggaattgaaaatgatgttgtttaattatcgggaggcgggcattattccgaaggttgagccgatgtagaatgtgtggtgccctcgcttgtcgtgcggtagtagagggcgcaattgtatgtctttgtgcggtgggtctggtgacccttcgctgtgtgtatgtaatctgtgacttgtattgtaatgtggcatgttgccattcgcttggcagtgtgatgttgtaagtgtccggcggcg

SEQ ID NO: 139461 - DNA, 528 bp, Zea Mays
ggaagcttgtgccaaccgccaaacggcagggaatggaattatggagtgcatcgccgacatccagatcgcagatccaacagttaaggtggggttgattgctgggcgtggtactgcttccgaatcacacgctcaacacaaggcacacatgggacacaatcacaaagggaaaaccaacccgaacagcaagcaatcaaagactgtaaggccgtgttcagcaggtcacccaaaacaatgttttgcactgtaaattacattattggtcgagtgaagttcgaatatagggtttagcaatgtataagctgcttgagcctaaatataacttctgaaatctggtacgaaagttccctgcaataagctcccaagaaagtttcaaacagatagccgaagaatttcaaacagatagcctaaggcactgtgaccttgtatcaaataatgcatttacatctgtggttgtggccgcatctacatcagaaaatctattgccgacattctcactttgactgtgcccatgggtcgcatttgatcgtg

SEQ ID NO: 139462 - DNA, 413 bp, Zea Mays
ctcaacccgggttaccaacaggaggattcctgctatggatttggtaagccggctggagatgatccttagaggcaaagtgtcgaacattggtgctcctgttgcatattctacctggaattagccaccttccaggacctttttcagttttgtgtcccatcgtcctgctagcgacagtggcctgggtcttagagtgcgaccctctcccaaagaagtcgaggctctagttgcttcacttggtgatctcccccacgatgagaggcaagttcactttgagatgcctataaacccgagtgatgcggagataagtgccatgctggacatgttagctgaggattcatctgactccgtccctgctgaaactatagctattgcaactatccccgagcctgaaaagacattgactgctcaacaat

SEQ ID NO: 139463 - DNA, 669 bp, Zea Mays
agtttttttatctgaaggacgctaacctccgagcgtgctgctatttcttctagatgggaggtatagatgaatctgcgttggatcgtctctcgctggtcacagatatgacaaagcacatacgtgtccaggcctcaggtggaaggtccactacatccgaacttgggcagttctcgcctgtctttgtttggttgttgcgagtaatatatttcattccttttctcctatactaattatgtatactgaacgttgaacgctttggctattccctagctgcacatcatcttataaaccgtcaaacataaacctcaggggccctgttatgcatcagacacctttggtgtgcgacgagccgatgacaccgtgcttcctttactacaggaattttatctagatttggcagaagacaacagaaaaattactccacgagattacctagagctagcattgaggcctgttcaaggtggaggaagggacatatctgcaaagaatgcggtatgatagattttcatgggtgaaacgtagctttgtacttgtgcttggtaactatacgtatggactatacttatacttcttttgttgttctggaagatacgggactccatccgtgcactttttccggacagggaatgttttacacttgtgcaacctgtgaacaatgagaaagatctc

SEQ ID NO: 139464 - DNA, 293 bp, Zea Mays
cagataaggccaagcctaagggaagaacgatcaaaagtagtgagcaacaagttcttaagttgggtgcgaaaggagcgaagaagatgagcaggaagtgccaatagtgtggcatcgctaatggtcacaatagtcgtacgtgtttaactgtggaggataatagggttcgattggctaacctagctggacgtaagagaggacgacctcctggttcaaggaacaaaatcggaggtgcagcaccacagtggaatgagacatcaacgtcaaaaaaacgaacggtgtatgtaggagatgat

SEQ ID NO: 139465 - DNA, 340 bp, Zea Mays
ctttctgtgagattttgagctgtgcttcagggggagatgtttttgtcgggggagctgttgagcttttcagagcttttgctagttgtgttgagcctttgcctctttcttgaggaactagctttggtttcagcatttttctgttccttatgctctgatttggctttgattgttgactagtggtgttgagccccttttatgcctcttcttgatgactagccttttttgcttggtcgtgttgagtcgttgcccatttctttagggaccaagctttgctcactctggatgacatgttcttgtcttttatctggcttttggtcatttaagtgagtttcctttcttc

SEQ ID NO: 139466 - DNA, 342 bp, Zea Mays
cgcttaagacctatactcaagacaatatatggaaatattttgcacaagagagagttctacaactagtgatccttttctaaatcattgtaagcatatatcaaatggatcacaaattgcatagatgtatcatgaattctccttttaacttagtgcatatcaagagatattgattgatagaatatgcggcactaagaaacataagtgttcatccaatgatcaaacaaataacagatgtgatcaaaagaacaatatatgcaatagataagctttgaaataggagaatccaataaatatgctattttgacaatgaaagcaacaatccttgataagagcgacattatt

SEQ ID NO: 139467 - DNA, 593 bp, Zea Mays
agagcgcgctgctcacgcagctggacgcctgcggcaccgaggccgacgacgtgtgcggcttcagaacgaccacaaccaacaactccacgtccatggaccgtgacgacaaaggctccccggatactgagaacaccagcatcggcggaggggccagtgattcgcgctgtttcagccgtcgctcacaggcaagcagctaagctaagctagttatatacctataagtaattcaccagctcatcatatttatacacacacctctatagtttctactttctagctggctagctaggttcacgcacttcacatctgaaatgctccatgctaagctacacgctacatatgcatgcatgcagggatatttcattacaaaatatgcttatttttctacgtgtccgtgcgtgcatgttctggcaaaaataactaaagagagacggcttatgcgacgacgacgaggagaacgtggtgatcaacggggacgacggggcgatgaggtcgtcgatttccaccaagaggagccgggctgctgcgacccataacgaatctgagcgtgtaagctactagctagatccccattcctgcactcgtcatacgcg

SEQ ID NO: 139468 - DNA, 346 bp, Zea Mays
attgttttgccgagggtacttgaaacatcgtggtctgttacacacttagacacttcaaggttacaaggcattttacttcatggttgatattacaaggcattttactttttagttaataaaacataccatgcccatccttgagtccactctcgcatgtaccaatgtaacatgcccttgatgcatatttacaaaaaaatcatacaagtagatgcacgtgtgttgctatggtttttatatatcatacaagaaaaaatatagcctgtgggtctccagcttcacacaattttgtaggactttgcacttcatgtacaggaagatcctaccaattctgacagtgatgctaaga

SEQ ID NO: 139469 - DNA, 666 bp, Zea Mays
aaaacccaagcgcctcagcggagaagtgagttgtgtgtgccacagacggatctcgccatggccgcggactcgcgcgttgccgagggcactcttctacattggcgattgaggcgaacgcaggtctgctggagcttcataacgtcccttggaatggggtcatggccgtatctgtcgaagtgatgcactgaggcttcaataattgctcgtcggagcttgtccgtccccgccaggttgctgcgtgccgtgaacagctgaccctgctccacagtcgccggcaagacccttcccaaaggctcgccttctccttcctccatgcgtagctctggtcgaagccaggttcatgtacctgcgcgtctgtgcggtggtgctccgtcgggcgtggtggcgccaccgtggatccctgggcgccgtgcttttggtcgggggaaagaagacgtctgtgaaccgttgattgctcgttgggcggtcacgatttaaccagaagcgcatcccctcgttcgtgtaatctgagccggtaatcgggtgatggatggtcaaaatgagcctagggttatttaaaacgctgggcgtcggatcttgatccgatggctaccattggataccggttcagggatacccaatctaatctggatcgcccagatctgatcgtgcggccgtgacttcaaa

SEQ ID NO: 139470 - DNA, 514 bp, Zea Mays
tgccccataacatagtagatgtttcaatggtgcataatggtcctcatttggctcctccaagaaccggctcataaaccccaacgagtaggcaggcaagatctggccgagtgttcaccaaataccggagtcctccaacaacgatactctattgcattaactggggatgtttgtttacttgtattgcagagcttgggcagcttcaccattggcactacataggcgttccatccttccataccacttcgtgcaaacagttttggctgcatatggtccctgggaccctggccagtgttgactcccttagtttgcttcacctcaatacccttacccaaatattatgacaggagccccaggtactcatcttgaacagtttcatcatctctcatttgaactggacaataccgccacacccagtgatcacaagatcatccacataaacccccacaatgagtcgatccttccctgacccacgtgtgtacacatcgtgttcagctgtgctgttctagaaatcaag

SEQ ID NO: 139471 - DNA, 345 bp, Zea Mays
cgcgagcccagcccgcggcgaacggaggatcccccggcgacaggaatggaggaccaaggggagcggcggcgccaatcgccttcatcgccttccgcccggttatcgatcttcacaaggcaagaaagaaagaaagaacccgatgagcagacgattaccggccccattagttacaatttcatgattataatttaagtgttgatggagatccgacgagaatttatcccacggggaaaagggggcgtggaagaaatgccaccgcaaccccccaagagttcataagcatcccgttttttttttttttttgtcgcggttgccatcccatcccaaacccacgccgcccatcag

SEQ ID NO: 139472 - DNA, 474 bp, Zea Mays
ctcgggggctaggttgtagctcgcactacccatcggagccggatcactaccggcaacaccctcgggggctgggttacagctcacgctacccaccagagccgggtcattaccggcgacacccttgggggctgggtaaccgccagcatcacccttgggggctggattttctgcaacagccacctctgaggctgaaggatcttcagtcacctccatgggagtcgggcaatcctgaccaacctcttgacaccgaagactgccttccaaagtcgacgatgcacgagataccgcccgggatacctctaaatccacgtctggagcgtcagagcaaacattcatcatatcatcaacagtcggttccaacagcatatctttaggaatgacatcctcaagggcccgatcaaaatctgttatagataaatcctgaaggctaacaagagcagacagagctggagaaggaatatcactatcccctct

SEQ ID NO: 139473 - DNA, 500 bp, Zea Mays
tttcgatgctattggattcgtctatcctaactaccgttacccgctatggggtcagaaaagaaaaggtgcagtttctgtgaaggaagttgcttcgaccgcttctagtgagcctacaccgaagagaaaaaaggtgaaggtgttcttacccaccggccacactacattgagccagccatagtgcctgattttggtggtgagacctcttcggccactaaagccagagaacctacacatctgcagaatattgaagagccggctgcaatgctggagatggaaaaaaattgaagaaccgagggctgaagagacaaggacatcggaagttttaagtccttcggcaagagttgaggtgtcaatgtcgaaggcacaaaaggatcttacaacaactcccaagaggaagagaatggtcaatgttttagatgtgctagaaacaataaaatcttcaagctctactccgaagagagctgccgaagcttcaaaaacacaaattgaggagaccgaaa

SEQ ID NO: 139474 - DNA, 288 bp, Zea Mays
ttcatgctgtagaagagggtacccctaattcagggtaccgacagtggcccccgggcctgcctcaggggaggatgcgagactgcaggtggggccagagtctgattagcggttggcctgctgctcctgcgcgcctattggcacaattactttcggcctgcttagggtcatgccgactaccacacctattcccacggttgattggcccgtgattttcgtacttagtgccaccgctgggtcatgcacgggctgcctcgactcgctgcactggttctgaaaacttatcttttc

SEQ ID NO: 139475 - DNA, 907 bp, Zea Mays
ggcaatgacggggtagggaccaacgaaacgtggtgctagctttcctttcatttggaaccttttgaccccacgcatcggggagaccttgagataaatgaaatctcctttctcaaatctgagttcccttcgtctattgtctgcgtaactcttctgtcgactctgagcttcaagtaacctcctgcggatcaaggcaactttctcttcggcttctttaacaaagtcgagtccttctagtgtcctttcccctacattggaccacattaggggagtttggcattttcttccgtacagtgcttcgaacggtgacattttgatgctggcctgatggctgttgttgtacgagaattcggcgtacggcaaactggactcccaatccctgtcgaatgttagcacacaggctcttagcaaatcttcgaggatcttgttgactatttccgtttgaccatctgactgggggtggtaagcggtgctgaaatctagcttggtgcccattgcttgctggaggcccttccaaaattttgaagtgaactgcgttcctctatctgatactatcttccgcggaatgccatggagcctgactatctctttaaggtatattcgggcaagggcggctcctccaaaagtggtctttactggaacgaaatgggccaccttggtgagacgatcgattattacccatatggaatcatttcctttctgtgttcggggcagtccggtcacgaaatccatgcctatttcttcccacttccattcgggtactgggaggggttgaagtaggcctgcaggattctgatgttgggcctttgttcgctgacaggtgtcacaccgggccacatactgtgctatttccttcttcatccctttccaccagtatctggttttgaggtctaggtacatcttggtggtc

SEQ ID NO: 139476 - DNA, 688 bp, Zea Mays
agagaggctgagaggatgatggcgaggtcgctgcgtgagctcggcgtagggctttggcgagctagcagtgttggacgacaacgaacagcgatcgacagtgcggtgttcggtgagcaagacgtggtgcagcgtgttttttgggcgagctccggcgacaaaactcgaccacgctggcctggccgcgcggcacaagtagctcgacgaggagggcgcaacaaggggactaggtgagacaggggaaactccatgacatgctcgccagcggcaaaggaggactcaggtgttccaaattgagtaccggagagtggctacgcagcaggtgcttatggctcttgcgagcaacatggagtgaaggagagcacgggcgcacataaataggccgagatagggagtcagggcgccggagaagggaagaggaagagttgctggaagggagagtaaattacagctaaagatttgatggtcattgaagttgagaaactgaagaatttagaacgccattaatggtcgccttaacttcaacgagaaacggctgggagataatgctgggcagcgcgggcgtgggtggaagaagaaccagcgtggggagaggaagggaggattcatggcagttgagtgccgttcactccgacggggaggcgagcagacgaagagcgctgtgcaggtagcgcgcgcacaaacaacaaag

SEQ ID NO: 139477 - DNA, 417 bp, Zea Mays
attcggtcaagagcggctcctccaaaagtggtctttactggaacgaagtgggccaccttggtgagacgatcgattattacccatatggaatcatttcctttctgtgatctgggcagtccggttacgaaatccatgcctatttcttcccacttccattcgggtattgggaggggttgaagtaggcctgcaggcttctgatgttcggcctttgttcgctgacaggtgtcacatcgggccacatactgtgctatttccttcttcatccctttccaccagtatctggccttgaggtcttggtacattttggtggtccctgggtggatagagtaagctgagttgtgggcttcattgagcaaggtttctcgtgcctctcccactggcacacacaagcagttcttgaaccagaggactccttgc

SEQ ID NO: 139478 - DNA, 418 bp, Zea Mays
tgcagtgtactagcatcacgtgtaggcgatagacggatggatggatcggacatgatcggccgaggtaacgataaggattctttatgtgcatgcgagaggtcaattcctggtcctgtgggagctaggaatcgtcagacaaggaccggcggacaggttccaatacaatgggttgtccgttgccggtgccgttgccgttgccggcaagcataaagaatccttatcagtcagatcagttcattttttatatattactacaacaagcctccgccctccgttgtccgatgatggatcgaaacgagagtgctctagtatatagctgctagctagcttcgctgtaaccgcgcgcgccatgcagctgattgatcaaccatgatggaacgccgtaactgtgcgcgcgtagattcgagctagcaacgac

SEQ ID NO: 139479 - DNA, 357 bp, Zea Mays
ccaaggcccaattctttaagatatttcatggcctcattatatgattttggcaactcactgttagggtatccatcggacatcagcttcatcattgctgaaaatgctgtattgctgattcgataacgagacttcatatacaacatcctcaccataaaagaaaattttgaatggctagaacccggactaagcgccttctttgaatctccaagaactcctgcaaatcttggctcttctcaatcagcctctgccgctgcaaacagttcaccgatcatctcaggtactccatgatcatcatcataaacatcaccgtccacatccatatgtatcccaaagtcatgctcatatccttcgacctcc

SEQ ID NO: 139480 - DNA, 3261 bp, Zea Mays
caaacggacacgcgacgggcgcggccgtgatcgtcatcgcgcaggcggcactttcggagccaccaagggaaggaaagagacgatccgctgatcgccggacgactctcatccgttctccaacaaagcgggctgattggcactcctgctcccaagttccccactcccttccccgaattccggaccgagtcgatggcggcgacggcggagagcccctcgaccggcggcttcgtgctgtggctgcacggctccggcgggtcgggcgacgagagccgcgcgcaggtcgcgccctacttctccgacccgggcgtcgcctcctccgtccggctgtccttccccaccgcgcccacgtccttcatcccttgctacggtgagcgccgccgccgcacctgccatcccatccagcctataatgtttacttatttttcctggcgatgaactgatggtccgtgggcctcgccgcaccgtatgtttctacgcgcttcaaaggatgcgatctgctctgttgcttcgcgctatggctgctttgcaaggctcgtaagtggatgaaaggaaaggaaatccgcgggctctcctttctctgactcggttgctcaattcgcgatgctgttgcaggtgatgtggtgatcacggcttggttcggcatctcggaggttcctattaccgcggtattgtattcaccaatgctactcattctacaagcatttactttttaattgtgctttcacttaaaatgtaattttgtcagttcacagtaccctgtactaccacactagcgaaaagggttttgctcttctttgagtgatggcatttacttgagtatgtagtgtacacatttttgtttatgtttcagagagatttattcatcagtgcttcacgtatttgattctgctagtccttagcttaaaacggtattgctgtttggaagttaatttgggaagccgtcctggaaaacgatacttgcgagctctacggcgatgcacaagagtgacatgagtcacatgaccacctcatcttccactgtaccgtcgcccgctccttctgggaacacatcggctgggcggctggcaacttgaccacttgccacccgtcaccccggctgtggcctgtgggagatgcctagtcctgcacacgccccttcagaaattttctcaaccttgttgctgctatgctgttggtggcgtatataaaaccaccggaatgacgtggtcttttgtcactagcaaccttgcctgcggagactcttagtggcctgcagagatgattgtcgtctctggcgttatcggctgcgtttacatgatagctggatcgtcgacgattggtgtcaattgtttgtcatggcctacaggcctagtcctcccctcacctctgcattgtattcccatggatcccaacccaaaacaactgcaggtgcctatgaaccctccatccctaacataccagcatcaatagaaagtatttagggaggggggggggggtatttggaatttttatttttggaaaaaaataaattcgttcgcactagtctatttggcttggaatttattattccgtaaccttttgaagttcacatacaagcttatcttaaattcgtggggtgtgatatgaaaattgattacatagattcttctgctatgtttctatgctgtaatttactgcacactcttcatcttagcttcctgtagcagaagtgaacacataagtatctcctccatatgagtatatgaccattgatgaaatacaaataaattttgcatagaactatattagcttaattcatttatgcctatattatgattaaggacagacccagtgctggcggctctcatgtaagtggagccttttttcgataagaagcgctgtattaaattcaagagttagcatcacgccgatacaacatcgaagagttcatgcccgacctctgcataactagggtgcacacaacctgatataagtggagcctagagaaggaataatcaagacaagtcttaaccctgcattttgcatagaggttgcatcaaacctaggaccttagtagaaagacttctcattgtgtcaggcctatcattctgtgcttaaactatggttattggtatgaaactcattccaaggacccaaacggtacctacatgaaaaagaagaacaatttccatctacattctgtacaacgaattgctttcttttgctactactaattttaattttgttccatgattcctacctcttttcttgtagaaaactgttagagatgagaaagaagtccttaaagctgttgagtatgtgcatgaattgatagacaaagaagtagctgcgggaacgagcccgtcaaacatattcgtttgtgggatgagccaaggaggtaaatcaatgagcttaatctgcattttatttagtattctaggccataagatagtaccaatacagatacttctgtttattttcgcaggtgctctagctatagcgagtgctctactctacccaaaaactctgggtggctgtgctgtcttcagtggctcagttccgccgaataaatcattcgccgataaggtgtcacctgaagctagaaaggtaataagctgcagctatgcttatgttttcagaactgcatcttgttgactcttgttacctaaatacgaactcttgtttcagacaccggtgttatggtttcatgggatggcagatggggtggtcctatttgaagcaggacatgctgggtgtgcatttttagaggagcttggcatgtcctgtgaattcaaggtaatacaggaagctgtagtcaatgctcacttttaaaacattttgcctccctcccaacaagtggctctgcaaacatttgagctcgttttcaaacacgcctgacttcagctatatgtctgttttcccaattgattttttgaccagttttcccaatcatctactcaggcttatcctacccttggacattcattggttgacgaagagcttcaatactttcagcaatggatcctgattcgtctagggatggctgcatctggagcggctgaaaccgcaaggccatcatcgtcatctaaccacaacgaccatctccaatagctgttttttttgtcattgcttagtttctagtacaattcattgctgctatctttgcgtggcacatcagttctcgttgtgacgaacataaacatctttcttaatctccttcacattatttttttataatagcagtaattgacttaacattattcaactaaggaattgaaagcctcacgagttctaacgtgatcc

SEQ ID NO: 139481 - DNA, 411 bp, Zea Mays
gtctatttgaaggtgtcaccactccggggtatgaggagattcaaagtcaaaggaaagttgtcccctcgctttattggacccttcttaatcttaaagcgagtgggagaagttgcataccaattggagttaccagatcatcttgcggatgttcatgatgtatttcatgtatctcagctgaagaaatgtctcagggtacctgaggagcaattaccgatggaagaccttaatgttcaagatgacctgacttatgctgaataccccgtcaagattttggatactttgactcgagttacgaggaataaggttataaagatgtgcaaagtgcaatggagccaccacagtgaagatgaagcaacttgggaaagagaagaagagcttcgtatagattttccccaccttttccctagatct

SEQ ID NO: 139482 - DNA, 299 bp, Zea Mays
attgattacaaaggccctggccttataggcgccggcccctaacagaatcccccctagataggagatctaacagctaatacttatctaatgactgggactttatcccaacaaaccagactgcacaatatcctaacagattgaccctattaggcagattgcccctagccatccttagtccttctattgtagccctttccagtcataacactttatctttgagaaaagataatgcttgataggacgaaggtcatttaatgtttaacattgtgttgccttgtttttaattcacagcaattgaa

SEQ ID NO: 139483 - DNA, 402 bp, Zea Mays
tgaatccagaagtttcacccaagagataatctaaattcatggatcgaatgctaaggggcattatgggttgttgtactgtcttatgtagtctattcattttattatgcacttgtttgtagtttagacaatgtatctggtgtcactactcactatattatgttgttcccgacaagttagttgagttgaagcttgtgtcactagattatactaagttcaagctataacctgctcagtcattgcacatgtcatacttgcacaagattgcaacaccatgcatcaacacatacagtgggcactatcttgtcctaacacaaaaatattggtagcttctgtccaccttggaccagttttatgtgaatttgcaatagtcaactgattcttgtgtcacaaatattattattt

SEQ ID NO: 139484 - DNA, 657 bp, Zea Mays
cgaagagcaatgcagcgagtgcgagggggaggtgagatttattgcagggccaagggggatttggggaggagcggggatccgaatgcatgcggctgcaaagatggaaggtgttcatccttgcaatgtggaatttccctcccattaattcctgccttcagttatcttgtgcttccaccaccagctttgctgggtttgctcatcgcttgtgtgctgtggttcgcttcagtttcatgatggatggaaaactagccaaaccacacacgactcgcccatggtttaagaattgcggccggactcacactcaaccgtcttcgcgagggccgttactgagattttagggaattgggtggaattataaatctctactaacaattaagtcaatagtgtagaccatctcctgtgcctcgcctctccctctgcacgcacgcctccatcttcccttgcgaaagctgcaaccgccacgcccccaacagctgtcgtccagtcccctccctattctgcgtccgcgatgctcgaggtccgcaaccacgcgcggtaatcaacgcgccggcgcttgcggagggccggggaggcggaggaggtggaggtggaggtggaggggagaagcgaggaggactaggcgaggaagacggcgtggtcgaagtcgggatcgtagac

SEQ ID NO: 139485 - DNA, 426 bp, Zea Mays
gcgagctatgacccagcccccaagggtgttcgagtcggttctccctctcacacttccatggacgttcacgtaggatcttctcctccgcattctggttgcatggcagcagcccaagcttcgggtcaggaagtcaccttagaggccagcgctcttgatgacagagttttgacctctgctgatgatactgatctggtccccactgatgcattgcgggttgtttcggttggtgatccttcatcgagccatcagctaacttcccacgacttgggagttccttcatttttattgatctagttgtaccccaggcgtgatattgctctgatattcatttgtttttaatgtcaggcgttggttgatgaaatggttggtcagctgaggtcacagggtgcttctgtcccggaaagggctctatctctggcacattgg

SEQ ID NO: 139486 - DNA, 401 bp, Zea Mays
ccacccctactgataccctgtcgcgcacaaggacgagctggaatggaatgtcagtgcgccgccatgcttaagcagggcatcatccgcaagagttctttggcgttctctcctatgctgatcgtgcggaaggctgatggcacctggcatttccgcgtcaactatcgcgccctgaacacaataacggtcaaggatgcatacctgattcccgtggtcgacgaactactcgatgagctccatgacacccggttcttctccatgctagatcttcgctccggctaccatcaggtctagatgcgcgctgaggacattgctaagacccgcgttccgcacacacgacaacctctacgagttcctggtcatgccgttcgggttgtgcaacgccccggaatgtccaggtgctc

SEQ ID NO: 139487 - DNA, 417 bp, Zea Mays
gttgggtcacacggccctcaaatgctggcatcgcatggacaaatcttatcaacacgactctccatcagctgcagttgctgcaacatcttcttatcatgtcgatcctaactggtatagtgacaccggagcaactgatcacataactagtgagttggatcttctcgccgtgagggagccatatcgtggcaatgacaccgtgcaagtcggcaatggcgcaggtttgcaaattaagcatcttggttcttgttccattaacaatgatactcgccctcttgcattaaataatgttcttcatgtccctcaaatatctaaacatcttttatctgttcataagttaacccgtgataatgatgttttctttgaatttcatccctcccattttttcatcaaggatcgtgccactcaaaatcttcttct

SEQ ID NO: 139488 - DNA, 677 bp, Zea Mays
gagtctgaagtacatcttcactcagccggacctcaacctctgtcaaagaagatggcttgaattgatcaaggattatgacctcgaaatccactaccaccccgggaaggccaacgtggtagcagatgcccttagccgaaaacctttcgggattaaggggaccaactttttagaagattggaagaaagaatcagctcagctaaatgcatgtctgggagacaacggtagcctggaagtcaaaccaatgctagaagatctcatatgcaaggctcaacgcctggacacagagacagctagacttatggaaagagctcgcaaggagcaacttccggatcttaggacagatgatcaaggagccctttggttcaagaaccgtctgtgtgtaccaatgggagaggcacgaaaagtcctgctcaatgaagcccacaactcagcttactccatccacccaggaaccaccaagatgtacctagacctcaaaaccagatactggtggaaaggaatgaagaaggaaatagcacagtatgtggcccggtgtgacacctgccagcaaacaaaggccgaacatcagaagcctgcaggcctgctgcaacccctcccagtgcctgaatggaagtgggaagaaataggcatggatttcgtgaccggactgccccgaacgcagaaagggaatgattcta

SEQ ID NO: 139489 - DNA, 355 bp, Zea Mays
atggttttgtctcaatttgcgtttttggcgcttcggcagttttcttcggagtggtgcttgaagactttattgtctccagcacatctagtacattgaccatcctttttctcttgggagtcgccgtgagatctttttgtgccttcggcactgtcattcctgccgaagggcttgtagcttctaatatctttgttttctcggcctctatttcttcaatattatcggccttcggcatcatagccggctcttcattcttctgtgtaagagcaggtcctttgacttcagtagccgtagaggtctcaccaccaaattagggcattgtggtcggttcaatgaagcgcgatcggtgagtaaggac

SEQ ID NO: 139490 - DNA, 489 bp, Zea Mays
agactccatctaatctactatgatccaatctaaaatgagttacctaacaagatagtcaatcctggtggaatacattagaccctgcctgctcctttaaacaagtttgagatcttagatcaactcgaccctacccaacaacttgatctacaaaacaggttacacaactaattccatctagcatatagctcttgaaccctctacccatcttgtcacgaacccggatgaagacaccaaagctcaagagaagaaaagatcaacctcgtcaagggaggagagaagtcaactcaaccttcagttgcattgccactcaacacggagttctttctcaccataaactttcttaccttaggctattcttgccctaacctatctttcatcctacacaataaggtgactatacatatatatacccatgctttcataaccactttctaaataacatgacacttcttagaagttaaaggctaatctataaataaagctttttac

SEQ ID NO: 139491 - DNA, 539 bp, Zea Mays
ccgaggatggcgggttcataacaccgaaccccaaggactcatatgcaaaaatgcagccacgaaggggtatgactaagttctggctattcgatcagaaaccgacggccaggattagatcgcagttctcatagatggatacgataagctcaccatggggtctatattggatggttcacgttttatgaagcctgatctaattttgcccctccgattagatctcaacgacccgagtcccacccaagtgaacgggtacacacttcaattttgtgcgttgatgatagatcagacagtgcacgacaccgagacgaagggggaagtccgcttttaatcctagacgtccatccccagatggacggcagtcgcaccatcttccccctctcgccagcacccgagctccacatcggtgctttgaatcccgcgacggagcactgccggtgagatgccccaaccacccaatcggatgcaattacactatgtgcacaccaatgtgaattacatggagaggcccttaccgtctctggtggtgtaagtagcaatgc

SEQ ID NO: 139492 - DNA, 295 bp, Zea Mays
ccgcgaaggggtatgcacggtttctggccgccagatcgcgaatcaagggccacgattagatctaggttatcatcaaccagtacacgatgaccgccctcggattgaggatctacggcccagatctactcaccccatcttcctctctacaccgttcatcacaaatggatgcatcggatttaatcacgcgaaacggtatgatttggtctaatctagaccgtcgatggacatctaacggctgagcgtcgtctcctacatcgcccatcacccgaccgaacacccagaccgagccgcggcg

SEQ ID NO: 139493 - DNA, 510 bp, Zea Mays
gcggaggcaaagtagtgtcccaagtgtaaatcgtctaggttcatggaggtagactctggtgatggacagaagaggcagctcgacatcccctttacaatcctacgacaccttccgttcatactgaggatccagcgtctgtacatgacagaggaatccgcgaaacagatgacatggcacaaaaatggaaaacgatacaatcctgacaagatggtgcacgcatccgatggtgaagcatggaaacactttgatgccattcactgtgagaaagccgaagaggctcgtaatgtacgtgttgcgctggccacagatgggttcaatccctatggaatgagcgctgccccgtacacatgttggcccgtgtttgttatcccaataaatatcccccctggtgtgtgctttcaaaggcagaatatattcgtgccgttgataattgccggacacccggggaataaaatgggcatgtacatggagcctttgatcgatgaattggtacgtgcctgggaggaaggg

SEQ ID NO: 139494 - DNA, 460 bp, Zea Mays
gggatatttaagctggcttggctattaaatcttctttggcgccaacttctagagttgggtctgcttggttgattcctgctcatatggcggacagttggagtctggctcattgctggctagttctggtttgaggatgcttaaaactaggatatcctttgtgttgcttctgtgggggcagtatttggccttgaatttggctatggaagccggagatccgtggccaagatgccacctgaattgggatctaattccgccgcacacgtgtgtaggctcttgggttttttgtgatgaacatgaaaatatctctttccaggatgcaagaaagtacactaaactgtttgattcagccctttccaaggagcacattgctgctttggtggccttgtttggttgggaggtgcctccactcgggtagacttgataagtgtagttttgttcgagctggtagctggtctatttt

SEQ ID NO: 139495 - DNA, 971 bp, Zea Mays
atatctccaaatctacaagggtttttcttgaggtcaatacatcaaacctatagagctaaaatagcagtacaactttgcttaagtgattaaaccttggtgtcatacaaaagttggagataaatagacctaaagactggctatcagtcaactcagagtctgaattttttctgacagtgacttggatgaactttgggagctcttttgagaataatccagtgagtatctgagtgtggttactatagcaagatcaaagttgaattatagatcaacaactttgtcacaagaggataaacaagttatcacataaaaatttgagatctgggccctgaaacttgctctgtaagacgctctgatggtgatcaccatggtacagtgactaaataagatcacagtttcagccccctcactgccggtgatctcgcgcccggattcatgtcggcatcgtgattcacgcccggtcgaacgcggatgacgatcctcggtgaaaaatcatgcgctagggatgagcttgggacactgttccaccctggccgttgtacccacttgcctcacggtcggtccagatagcctcgccggagttggccgcctgccgcgcgatggccacgtgccttgaagctttaccacgtcgcagtaagccgctttagatagctggttcgtcgccggtaagcttgccacgatgaaagccacgcatcccttgcgccagtgatcttcttgctctccggacgccagcacgtcatgccaaaattaggagccaccgctctgggatactataaattgagcacacctccagctctgttaagtcatcacgaagccagggcacccgctacttcctccaattagccaccagagagttcgaatttctttgtctccccaaatcagttttccgcacccgtgaacaccgcgccggggccagacgtctacaggttagctcatgctcttctgcatgatgttctagcctctctcaagtcccc

SEQ ID NO: 139496 - DNA, 337 bp, Zea Mays
aaaattattgaatgctgattccatgatatgttcccattcaaaacaagggaggacaaaagtgctgcattctggaataaacacatgggctagagttgttgacatatcattgcatgacaacaacaaagccatccaaatcaacaaaaataatctcattaaagtggtgcctattttgtgcctgagggatccattagtgttaaagggaggtttggaagcctggaaggaaacacaaaagtatgaagaggtttgaattgggacatgtactttgaatgttagcatgagatgggagggaattgatggtaaaccttgtttggaaccaaagtatgtaggttgtgctcaa

SEQ ID NO: 139497 - DNA, 727 bp, Zea Mays
tgctctaggcttggttgacggtcgcggggcgcataactactgccgccttccctgggatcgtagcccactctaatttctcccacgctccaaccctttcgaccgccgccgccgtaggaaaccatgtgccgccgccattacagctgggaaaactgccaccgccgcgggacctcgcctgggtcgtcggtccagcctcggcaaccggtttgagacggagagaagggcacgtagaaggtatacgtgggcaacagcgggcacgaaatcgggcggccagatgccaattcgtcaccggtggttgaaatccgccatgaatctacccttcggcgcggtcagggacctcgacaccactattccggtgaaattctcctccctattaaattgccttcgtctctaggtcatgctacacctatcgaatttgagtttggagccctggagcatagcattgccttcctccggcggggtcgccgccgtggccaacgcgggggccgtcgcggcgttgggggaagatagtgttgggagtcctagctgtaagatttgtgatggacagccttgattagaagatagggtaacgattcgaaccagtgaatcgtggtcgttgatctacctgcgtacgaataggattagatcaggttaagatgaaatcgggaccgttgtttttaaatctggtggtatagattgcgtaccgcttcgtgaagtaatctgaaccctagatctctaatccaatggctcg

SEQ ID NO: 139498 - DNA, 378 bp, Zea Mays
gccgcagggaaggggcgcggagctgggtggccatgactgccatgggaagaagcacgcccaggaagaagataggcgagatagaaagagaaggaaaggaaaaaattggggaaaataacttggagtacggtgaaatccgaccctaggattgtgatgagaacatctattttacgattccgacgagggaaggggacaaaaccaggttaccggttctacgctaccgaatgaaacacgtcatagagattagacatcggctacaattgattcatggtgaaacatggaagaccgaggggtttctcaccaaggggaaaggaaggacagccgatgaaccatcgatggtgaggacgttgatgctccagggatggcgacgtagatgacgct

SEQ ID NO: 139499 - DNA, 384 bp, Zea Mays
cgaggatggcgggttatttttagataaaaagagggactcatatgcaaaacttacaggccgaaggggtatcgtccgtttcaggccacccgattacaactgaacggctcagatctaatctgaaccggtacacgctcctgaccgccagatctcgatctaacggctacgagttcagaactacgcgatccaatctaacgcgtgagatctcaatccaacggttcctatttggctacccccagatttaatccaaaccgcccaatcgttgatccgacggcaagcggcattcttctacatcagaccgaccgaccgccatggcgttcaccagcccacgacggcgctttccagacgcgatgccccagaggtgcgctgagagtgcgtccctattcc

SEQ ID NO: 139500 - DNA, 455 bp, Zea Mays
ttttccttccccatggagacagagtatgatccatactctatccccatcagctcgaacacctggttcaaccgtatgttgccctcgcagatttcatgacttcttgaagtctcaaggtccatgtattttccaacaagtttgcatgcctcttgtttgacttctttgatgatgttcttcctggctcttttccccaaaacgatcttgaagggggactccataccttgaccccaatggcccagtcgtggcttagtggccatatcccgcacgctagaaactccttgacaacatgcctggcgctcctatgtattaccacatggtggaaagcaacttcatcctgatcaccctctacaactttgtatcagggaaacatagtgtactagtgaggtagcatctcaccaaccctcacaaacaaccggtgtcttcacccttgttaaccttcacataaaaccaactttccg

SEQ ID NO: 139501 - DNA, 375 bp, Zea Mays
tttatcttagctaaaagtctaaaaagatatgagtttaaaagtaactcgatctcttttttatagctttctccgtcgctcgtactccttcagctagcgggtggtactacgtgtgagtgttgcgttgtgtgtggcttcctatcgtgttgggtttggtggtttctcatggcctgtgaggtaatagctcactgatagacgagaagcgaggaagatgacacgctcgtgttgggtttgatgatttctctcggcctatctattaggtagcgacacactagtacacgacaaatggaggagagagaatagatctatgtacgatgcacgaaattcgtgttttaaaagagtaaagattgaggtattccttctatattagttttgtag

SEQ ID NO: 139502 - DNA, 672 bp, Zea Mays
gtgatgatgagatagaattactcctgatttcgaggttacagaatacctaagaactatgctctagctatgcctatctgaggatccaatcattttgtagggatccataacccgcattatatatctcgacgaggttagggttacatgggaccaaacatattactattgatacgtctatatctgtggcaccgactctgactagcatgcaaacatgtgattctgttgacttatcttctctgcctgtgcggaagttagttacaaaatagtcacaccattgtctttgagctccgcattgttatcctctagtttgaacttactggttagtctacaaggcctgctcatctgacctgttgaggtcatttggaggcctgtaaactgaatctggcccatggatacctaggggatatctatccccacaaccccgtgttgagtgtagtatccattctagcgtcgtcgtgtcacccctatcgccctcacacatccactctgccagcacactcttcgcgacctcatttttccggagacaaggtctagccacaggaatgttggatccaatagaatgatagatataaaccagagaatcgccatcccgccaccgacacaataaccagccacactaacaatgacgactcaaggcaaggttatagaaccaaccaagtgaacgatggtttaaca

SEQ ID NO: 139503 - DNA, 382 bp, Zea Mays
gtggtggtggtggcaaagcccatgcagctggggtgtggcttgccgaagctactaatactatgggttgttgattgcccacatactcaggaatgtacgaggaataacatgaagcagtatgcatgacttgctttggttgattttgtcgtgcgttagcctcagctatttccttttgcttctgtatcatgacttggcatgtcctggttgtatgccccttatcttctccacagaacaggcaaaacaaccttcttggctgcgagctgaatcttcttttgaagcttcgacctcctctgcctcttggggctggtggccagaaggagctttgttgtgttcctgatgattaggacctgtgttgatgcccttgagtatgatttcccctatctcc

SEQ ID NO: 139504 - DNA, 439 bp, Zea Mays
ataccaccaattttgaatccagaactgtgttggtgtgccagaaaggccctggtgtttcttttcccttttgggctcactatgtacagagatgctctgacgccttgttgggattggagtaaatactcgaggttgaggggaatcaatccttgaatcttaagcaggagaaatagcacgaagcatggtatttggttcaggcactgcaacgcgggactgcaggccatatgccagtgaccatgctcctgcagtttctgttctacagtttttaaagcactatggcaaatctaatttgcaacacatacttatacttaattactttatcctgttccacacttagtgtggaaacatacacagcaaattgttataggaagtgtttgacattagcatatatttacacatgcatatacttaattactttatcatgatcgtgtgtcaccatgat

SEQ ID NO: 139505 - DNA, 354 bp, Zea Mays
ccataacccaatttaatggtcctttggtccgcattgatgatggctttattctgggctaaccagttcattcccaaaatcacatctataacttgtccctttataataatcatgtttgtagggaactcacgaccagccaaggttacgggtatgtggaagactacttccttagtaaatatctgactcccaaataagtggataacaaatccctcccttgattcagtgctatgtatgcaatgcttatccacaaaagtcttgctcataaaggtatgcgatgcaccagattcaaaaaggatagctgttggatggttggcaatgagaaacgtacccattatcaccggttcgccttccggtgta

SEQ ID NO: 139506 - DNA, 580 bp, Zea Mays
gccaatgtaacacctggggtgttacaattttcctagggccaactcatcaaaagtctagagctactaaaggagaacaactttgcttaagtaactaagctttgatttcataaaaagtttggagaaaaacaagcttaaagttgtgctgtcagtcagccttaggtctgaattttcagaaacagtgaagtcagatgaacttagagctcgattttgagtaagatcctgtgactttttgtggatgcacaatgtaacaaatttagagctggtctattaggctacaactttgctgtagagcattgatctagtcaccatacaaaatcgggaggaaattcgccccaaacatgatatgtcatactaactgaagaagcttctgatggtacagtggccagaaagatatgttggttcagtgaaccggccgccggcgaccccgcgcgtggattcacgtcggtgaggtgattcgtgctcactggtgcctggataacgtctcacggtgaaaagatctcccccacagatgagcttaaggcactgttctatccagccgccgtgtccgctcagccccgatcgctttgaatctaccctcgct

SEQ ID NO: 139507 - DNA, 737 bp, Zea Mays
gtgacaggtacagtcttagtcgattcgtttgtggcccaagctcttttggactctggcgctagctatttgtttgtttcagagaattttgtgtcgcgggctggtcttttggtgcagaggttgagtcacccaattttggttagttctgctaatggctccattagtagctattcagtttgtcaggggtgctctgtcattcttgctgatgaggtcttttcggccaatcttgtggtgatttccttgggggcattcgatgttatcttgggtatggattggttatctcagtataacgcagttatatcctgtttttggaagacaatgttattgcaggcactatcgggtagggaggtggtattcttgggaagttccccaaagttcacgttatccttgttggcgcaattgcttccggatcgccggtcaaggaagtcgggaatttttttcctccatggtggtggagggtgtgactgccttgcgggtgcaggacatccgagtggtgtgtgactttgccaatgttttcccagcaaagcttctaggccttccactgaatcgcgatgcaactttcgaaatcaagctgattccgggtacgcaggctattcataaggccccgtatcggatggctccgaaggagcaggttgaattgaagcggcaattggatgatctgctggctaagggtttcattgggcctagcaggtcgcgttgggcttccctagtgctgtttgttgagaagaaggataagagca

SEQ ID NO: 139508 - DNA, 773 bp, Zea Mays
ctcatttcgagatgtcagctagcacggacgacgaggagatagatgttgtgctcaacttgttggctggggaatcatctgactcgacacatgccgagccaatggctatcacagacgggcaagaacttgttggaatggagaggatccgaaaacccgaagaggtccgtccaaagcgttcacaccgagcgagccggcctactgcacccgttcaagagaaaaggaagaagaggcggcttcagcgactatcgagcttggatcatggcgtgggtccttcagcgccggtttgtgatgaagtgccagtagaggtccttcctgaggttgatcccaatggttgtgcccatgctgaagttgatcccaatgggtgcgtacatgctgaagttgaaaccaatgggtgtgaccgtcttgaagttgatcccaatgggtgtgaccgtcctacagttgatcccaatgggtgtgaccgtgcaccggctgttatccgtatatttgatgaagatgaagaagaagaagtcccgctgatttgtaagaatagccggtattacagaggtagtaagggggatagtgacattccttctccagctctgtcagctcttgtcagccttcaggaactgtcaatattagattttgatcaggcccttgaggaggtcgtccctgaggatatgctatcggagccgactgctgatgacatgatggctatttgtttggaaattccagtcgtgggattggaggtatccggagcagtgtctcgtgcgtcgtcgactttggaaggcagtcttcaa

SEQ ID NO: 139509 - DNA, 393 bp, Zea Mays
gaagccattcaggctttgttctaccatcgctgcaactaggggaagatctaattggaagggcaccagctgcaatcggaggaattactcgctgaccggccaacctcgccgccattcgcaactcgccccgcgcagtgagcttcgcgccgtgtctgccagtaactcccttcccttagctgcgtcacgttccttgatcggtagcaaatcacctcacacccgaattttactagcatagacttcggaattgctcgacgacatcacatcccgtcgtgaaatcgccccatccatggttgagaacctctgcggcgggtaacagtgggcaaagccctcggggcaacccccatcgcgcccacttccattcgcactagtttgcacaggggattggctccgggagtc

SEQ ID NO: 139510 - DNA, 436 bp, Zea Mays
ggggtaccatagtcgaagcgaccatggggcggtgagcggtaagggtgctgaatcccgacagcggcgggagaaccaccatccagatagtggcgtgctgcgtagtcagcacacaattccgcaacctccgcccgaaccttgcccaactcatcaagggcgtgatccaactctgtgttgagcacggcggccaggttgaccatgatgtttagcctaggtttgccctcactaacgggcaagacaatcacaccaccaacactgccggtcaaacgacgagggtagtacttcaggtcaaggccatcatctaccccactgaacaacgagcaatactgagaaagtgcccgtcgtgctgcatcttccatggttgcctcggcagtatccctctcagtaatagaatcatgctctaagaaggcctttgcacctcagagatcatggtctggac

SEQ ID NO: 139511 - DNA, 278 bp, Zea Mays
ttatcttttttccccaatgatctgttgccttgcccttgcccttcctaactagacactactagcaataagcaacgagttagttaaccctaacaaacgaaatgacgggctccaatcagtcctcgaacaggcagtaaacaagtggtttttgcacagtgccatgtcatgtgttccactgctcctgcagttgcagggtgcagggtgcacacatatccaggcacaaggcaagggctgggcttttggactggggctgtggatggagcgagcgagaccaggccaaa

SEQ ID NO: 139512 - DNA, 664 bp, Zea Mays
gcaaagatacttccattaaatgacaagtacgatttagaaactattgtcaacaggaaaattgtgcatcaagtcaacttatgccctttttagattcaatgagagataaccaacacctttagctctgttttaatgttaagattattctgaatttaattcagcactctggccaagatatgccaaacaattactatacattgcaaagctccaaccatcattacaggtatagacgcctaccaaaatcagaagggagaaaggaaaaacttgaaaagtttagtcaagctggtaaaggtacatcaaatataactaccatatcatattctgtgcagaaacaatttatgaacagagaatgtagcaaacttcactggcacatgccacaggcatgtcaagacctttgtatgttcattatatgtgcacactggtatgaaaactaaaagaaaatgtgagcaagcaatacaatattggcattcatatcagtatatcaccactaataacagggatatttcaaatgcaactatagattctcttagttttagaagtttagaccttttcaataagatccaatatatcttggttatcaacaaagtcgatgtagctccaattaatttcttctgttttatattcctcctgctccatcttgaaaacatgctggatcaagaaattcaaa

SEQ ID NO: 139513 - DNA, 870 bp, Zea Mays
tctgatggggtccgagggctcgatgcctccctacgatgggacataatcacgaatcgctcctgggtcttggatgtcttagggtacctcaggtcgcaacccgagccatggccatgtatgggcctactcatagtcattcctgactctgtgacctggggcggttatgaagcccttccaaggagccaacctttgaaccccatatcagtaatgggctcgtggccctgacgtcctgaggtggtctttccgaaccttgccgagggcctgaccttcaaacctctgaatagtattccgcttcaccttttttcttcccgaggggggacgcccgaggtagaagatgccttctttcgttgtttgtgaggggacaaaaaaaaggaaagagaggtagagggaggagggcgttccttttgaggtataatgcgaaacgacgctcgttgtctgacgtttccacctggagggggcatggtcatttaatgcgatgggatgtcccggcttgccagtcgaccgttatggcgcgcgtgcgcgtgggattcgaagcgactgtcgaatggtctgttttgacttggaatggcgtagcccgtgcctcggtgactccgcccatccctataaattcgcccgagatggacgcttcagatttttaccttgtcgttttagctttcctgccttagacgtcgtccacctcctctacacaaagagctcctcgcctccttgctttctctagaagtctcaatggccgagaagccaaacgttctctgtcccaacgacccatggcccatctcctatgtcaccgacgaggatttggatgtgttggtggatgtcaggctgctttgccctcgctcccacgggacgcagcccgagtggttcatgtcgggcgat

SEQ ID NO: 139514 - DNA, 1082 bp, Zea Mays
atataatatgatatatgtatatataagcaatactgcaataggcattatataagtttgaaattgaaactgagtaacagactgaaaggcaatatagtcatatagcactatagcagaactgaaactgaaatattgaatacaaggctacaagcagtacctactaccaagagcatattgaatgcagtacctactacctagagcatatgttatagatacttttgtggggcgccaataatcaaggagaagggcggctaagggaccgaatcccagcagggacagttaaggaaagacaataagcaaataaggagaaaaggggcaggtaacaactgtggctacaaatcagggatacttagtttccttagctagttggttgccaaataatagcagattagttccttaagatttttgcttgttttcttgagctgtaagtcgtctgcctctataaaggtgcaggctgtagtttgtattagacatcgaagaaataaagatcctccttagggcgggatcatcttgggtcatcctggctgggcacagcgccgacacagggaacctgggtggttagcgtcctctcccctacgcactgtgtcattccaatatccccctccactcacctttgagagacaccaggaaacacaagttacagacttaccaaagggaagtcggtaacagcatatcatcatccaagcaaaaagcagcagcagcttctccaatagattcatcagaattcagacaataggaaagataggaagggggagatggggggggaccttgagatgaggagttcatctcgtcgctagtgttttggagccaccgccggtgttctggagctgctggtggtgttctagagccgcagcgtgtgttctagactcggcagagcagaggaaaagtttcaagggctggcggtgcgttgcctttattttactgtagatgggctgaaaaaatagaagcccagtagcccactagaaaaccttagctgcctggacaaatcctagtcgatttaccatctagtcggacgactaatcgcgcttagttgacgactagtcggacgacctggacgacttgatactctagtcgagtcgtccggc

SEQ ID NO: 139515 - DNA, 696 bp, Zea Mays
ctaaaagataataataataatagtaataaaataacaaaaatattcattaccttgaagttagcataaagcaagcttccggcgatgtggtgtcgttggtaacggcacaagtcagtttccagcttcggcaagccaatgcttttggagagggttctaacaattttgacctcggtacagttccgaaggcatcttagtttcccttcgttcaccccaccaaatagcatagcccctgatttatatccgcaagatatggcatatcttttcaactcctctttctcagcgtctattaactcttctccaagcaaatcttgaaagttaaaatcttcttccgaaatttcatcaatttgctctttccccttttcagttgccgtgctcaccgcagctgtagtagtttcttcttcagccattttcaagagtatattgtcaataacctcaagtgtggtttccaggttcgactcttcagtggtcccggcttcggccccggtagctttggcttcgccgatctcagcttcaatagtttccactctagtagcttcggttgtggcgccttcggcttcggcagtctcggcaaagacaatttgtgacaccgtcgcaggtggcggtgtctgatggatcacatccgtcacttgaataattctccgttttttcggcttcacaggactttttgctgccgaagctgccttgtccctctgaaaaaac

SEQ ID NO: 139516 - DNA, 395 bp, Zea Mays
ctgggagcgctgcgtagcggaagatattttgcgggggcagatccgatccgattgccgtggctgtggtcaatttgatctgtgcaacttccattcagccggaaccatacgcgcgcgccgcgcaaatccacgagcggagaggcttgtttcctccgctgccgcatgctccgctgtactccctctccctccccgcgactactgtgaaactttgcggttgtttccagttggagctcatcactgcttacgcacttgacactctatttggcagcatttgtttttttggaaccgaaatagtaccgccaccacgtttgtctcgcgcgagctagagtccaacggagcagggaagaaccgtagagtcctttcgtactggcacagtattatagtaaaataaaggcaac

SEQ ID NO: 139517 - DNA, 462 bp, Zea Mays
cccagctcagtacactccacaggggtctccacggacacctcccactcatcaggctgcccccactggcacctcggcgagacctataggatagaagactggccctacatgcttcaagtgtagtcagattgggcactatgctaatgcttgtccggtggggaattatggtacaccagctcagaacaggcaaccgactcctggcaaggggtattctattgccacggttaatcaagtcagcgttgatgctaatcctgatggtgctgacatcgtacttggtatgttttacgttaatgccattcctgcaaccatattatttgattctggtgctacacattcatttatgtctgctcgatatgcccatacaaatgagataccactgctaaatatgagaaaaccaatgatagtaattacacctaaagggcctattgaggcaagtcatatgacacgtagattgacattaacaat

SEQ ID NO: 139518 - DNA, 311 bp, Zea Mays
gtgcgagtctggagatgcgccgtgggaggaaaatggaataccttgacatcccactcaaggatagcatgaaaggatggcgcttagagtggttcattgtggaaaaccatggcaagtctctccccgctcggtcagggagacagccgaatgtttgcgctccaagttagattgagtctcccacagacttggagatagcagaagccaaagttatatttgctgaaatttgcttgttgaaggagagaggtctgaccgctgaagctgtggttgcagactttgtttttaagtatattcagccactgaaggatagagcatac

SEQ ID NO: 139519 - DNA, 384 bp, Zea Mays
cctaaaccaataccctgaacccaaaacccttccgatacgctaagctacgtgaggggctcaactcatgtagttggctattcggacgtgaaggctacaaacaccaaacgacgtggtgcttgtatgatagactcaaacaccaaccgaaatggtttttgacttataggtagcaaaacccccgtcacctgtgtttagaacccacctaaagctgttcatcgcggtctagaggccattttggagaagggtttacctggatccgctcttaacgtagttgtcacaccgcgtacatggcagtaggaggaattaaatatagcacatcgtgcatctaggaatagcagatgggccgtcggtcgtgggctgccacgacatataactagcacgtccagg

SEQ ID NO: 139520 - DNA, 633 bp, Zea Mays
gaaatatcttacacagaatgatattaaaggcgattctggttagtatactatagctaatgaagtacttatagatgaggcaaatttggatgcattcgcctggctgccaaacattaaggaaaggatgggtttcgtgcttcgaacctggaacgtaaaggtaagccaggcatctaatgtgttcatttttttaatttttcagttgtatctattcaaacttactgttctcaaagaaggtgcatggtagcctgaacgcaggggaaatgaactcttgagcgcctgcctgctggtaagccaatgtcttgctagcattattttccctgctgatcctttgctagtatttaggttctgcagttgcagccctcccatactgcagctcatcatttgtttcttgtcgctttcttagttcctttgcattttagtttcattgatgattagtagctcagtgctttggttgatatgcaggccaagcccctggcgctagcatatttgcatttaggccccaagcgcgcgttgccgccattgctgtgaagctttgcccccatagcttcttccacacctacgacctatgggtggccgccgttgcatccaatcgccattcctcttcgtcgctgacaacagccgcctgaaacaacctca

SEQ ID NO: 139521 - DNA, 409 bp, Zea Mays
atccctatagaagaaagaaggcccgcccttttatagttcaaggataggaccttacaggggtgacttcctctctactttgtatgaggttggcccattgccttgtctttttgttgtgcacctggcgtcgcactgctcgtagggcgtgggtagccattcctctagtatggcacactgtctcattcattcgtcatacgaccccctgtagcgagaccactgctgatatcttcgtagtggtgcatggtgggtcccgtgggtcagacccacgacacggtagcacgtagcgtagcttcacctatcatcatggtcctgcgtcacttgccatcgtgcataggcatacacccggtatggtgtatccattacatctttccaaatatcctggtcactatagacatttcgatgctgagatccc

SEQ ID NO: 139522 - DNA, 316 bp, Zea Mays
gttgaaagacagaggcttgactgctgaagctgttgttgttgattttgacttcaagaatattcaatctctgaaggatagagtctaccttgcctacatgtatactagggtcaatgatcctacccgaattaccaacagatggatttctgaagaagacgtgttgagctgagttgatttgatgctgagaggcaagatttcgaatggtggtgctcccttatcgtattctgcctagaatcttcctccaaagagcccattttctgagtttgtttccaaccctcctgttcaagatggcaatccgggccatagagtgcgaccctcc

SEQ ID NO: 139523 - DNA, 531 bp, Zea Mays
attaccttgctggcggtgtggcataccttctgtgttttgatgaagacgacgacggaggcgcaaatctctggtggccgcttcatcataattaccttcttcatcaaccatcgcatcatcgggaagacgtggacgaggaggtggtggtggcggcggtgcttgttgttgcgtctccaacacagcaagtctatcgacgatctgggacaatcgtcgatccagcctctcgtaagtcctgccaaggtccatgttaatgaaggcatcatgcactgatttgtggaccgtctcctccatttgctccttcaggagcttgttgtttgcctcaagatcttggcggctaacacattcattgaagtctgtagggatccttgcttcttcgtcgtcgcctgccatcaaaacacaaaaacaggaaacaaacggtgaaggttatccctaataatctcactacacgatcctctcgggtggaacacaggaacacgctctaatgtatcttaccaagctcttacaagtgtctgacgaaatacaagcaaagaatgg

SEQ ID NO: 139524 - DNA, 607 bp, Zea Mays
gagtgccctggcggttgggtggcatctaatctttgactttctgtggcgtgtacgtgagtaccagttagctgggaatggggacatctatctctgactttctgtaggggacggcaaggccgaatgtagcagacggttgactatgtgatcccagttcaggacgtctttgaaacttgtttctctattgaaagtctaaattcttcagtacccattctgtagccgccatacagaatttgtcaaaatgtttgtttttgcggttcttccataatccatacagtgacattgccgtagtatatctgtcgtttctcgtttcttagccttgcaaacattcttttgtaatcagaaggattcttggcacaatctcagaagttacgatgcatttaatgttgcagacagtttacttcatgcgtgaacatgaacttcagcaaatagccaacatagaccggaatcttttttattggaccttgcttaatcttcctaggtatgacaccgtctactacgtagtatgtgtaccttgaattgacaaaggctagacaaagaatgagcaggtctacagttgtgaccttttactatggccaggattgggacttcaccaatgcctcagtgaccg

SEQ ID NO: 139525 - DNA, 277 bp, Zea Mays
gtttagtttatagcaaacagaacgagaatgtgtttttgtacagtcttgttaattatttactcaagtggaaagcgggttcaagtgaagaaagaacaagcagaacatgggaaggcaactaatatgaggactttatttgaacagttaaactggatgcgaaactcaaacaggggtatttgacaattgaatgatgtggactgtggagcttgattgattaggaagaagaaaaccagttcacttgtgataattggtagttagcgaatatttaaggaacgaggcg

SEQ ID NO: 139526 - DNA, 456 bp, Zea Mays
cccgattaataaaatatattcagccatgtagtgggtgacacggcagttttcgagaacaggcaagcggatacatgtaaagaaaaaagagagacttggagtctgaaatcttacgtgtagttgtctgttgttggagagatgccgtagcagaatccttacttgttctgtacgcatccttggattgttgacaaatgacaatgcaaaataaaaagtcgggctacgttacgtaaggcgtcgcgtttggatccttcgaatctaactccactctaattatcctacttgagatgtgagtcggctcagctaatatgattctacgcggaatatatttgtatactacagttgttggatatttatgtgatatatttctaccacatctctactacagaagagtgggctgaaagttgcgttataaattgtagagtagaaacatagattgacaacatgtaaaatcaattccta

SEQ ID NO: 139527 - DNA, 325 bp, Zea Mays
tctgctttgcatctcagcttcgtactaacaatagcgactggtgccggacttgaaaagacattgcctgataaatgacacccgcccatctacctcaaataaaagaaaaactttgcatgcaccaacagatcagatgttgctatccaataatttggggaagtgaaatcatgctacgagagagtctgctgctaaggtacagtagcaagatatcttaacactgaagttgttctataccttactgttagcatccaaataaagttttgcccatgtttgtcatcaagatcctttgcagcctcctgctaaaaaaaatgagttcacaggttacgag

SEQ ID NO: 139528 - DNA, 545 bp, Zea Mays
caagcacaaaggatggcgagcagtagcaaggctggcatttggtggcactaagcaaggaaaatcggcgagggagggtgttggcacgaaacccataaccatacactcataagcgaggaagaaaatagcacgacaaaagaataggatgtaagcttaattgtattgccaagcaagtcatgtgggctataggaacgaggtatatatagggttagccgggggttggtgaaatatgtattgtattacccccatctaccaactatatttgcactatgcactgtacaactaggtaattacaggatttatgacataatttcctaatacattagatttaataccctctagagtcacttgcaagtgggcccgcagagggcgggcgctgtttacacggagattgctctaggcgaagtctacttgccatcgacatcacgggccgcctttcggccatgttttgtattcgagcttccaccaactatgagccccctttataggtcaactttcctggttgactttgctgccaattagagaggtcgtgttttcgtgccttcgat

SEQ ID NO: 139529 - DNA, 429 bp, Zea Mays
gtcacatgaaaattagagaaagaggccctgcaagttgctcggtcagatgaactgaagaacatagccatggtacagtagctggaaagatctccagtgccgtgaacctgacgccggtgatcttctgccgcaattcgtgctcgcctgggagattcatgctgtgtgagaagtagataacgtcaggaaggggtgaaaagatcctgggagaggtggagccagtcactggccggttcggccatcgtgtcccaccgtagttagtcatgttggcatcaccggagctcactgtttccccgaccgtgacactcagcgatctatccttcgggtcataaagatcgtggcaagcaaccagttatcatccctgaaccatttccctctcacgcgccacggtgagcaagccaccgtaaaaatatcctagccgcggtaacctcgatc

SEQ ID NO: 139530 - DNA, 364 bp, Zea Mays
ccggccgagcacggactggccgcggcagcgtgcgccccgcgcgtggtcgccccgccccatgtgcctgtgccttgcccttgcctataaatgcctccagaggccttagccgttggcacttgcacacccagagcctcgcccgagccagagatcaccggagctcgccgtgaaaagcaagcaccgccgcccgccatctctgcccaagcacggccgtcgtggccaacctttcctattgaaccccagcctcgccctagcccctggatcgcttcccaatgaagccatgaagcttctccaagcttgagccgaggcattgcctcaccggagaggcggtttcaccctcgccggacttcggtcttccgccgccgcg

SEQ ID NO: 139531 - DNA, 468 bp, Zea Mays
ggactcaaccagatgaattaattctgcgttccaatggcaaagcaatgaagaattcagaacactagaccgataatctatccaaggaacaaaacaagacaaacaggatacagcaggctaccaaattgaagaacaattgggttattgttcggcctggtatgaagtcgagggaattagacaaattactgactagtcagctgggaaacagttgattgacaacaagtacaccttagagacgagcactacgaaaatattgtttgcaactactaaaatattgttgtaaagggttggacaaaaataaaggaagataaaagcacggttactttggtcacaactagtactaaaaggtagtgttggctctgaccttgttgggcgatcctcctaaatacaggcaagtaaagtcacatggaagttgcctagagaccgcaaattgccagatgctcaaagccagtacacagactcagcacataa

SEQ ID NO: 139532 - DNA, 582 bp, Zea Mays
aaagcgatctacaacaacaaaaataaaatccctccccctctaagaccaaggtaaccccagaacaaagtccatagatatatcttcccaaggtacatgtggaataggtaatggagtatataaaccatggggattgaggcgggacttagctttcaagcaaacgatgcagcacccaacgtgccgctggacatcgagtcgcatgtgtgaccaaaagaaatgattggagagcatgtccaatgtctttttgacaccaaaatgaccagctagtccaccttcatgtgcttcctgcaaaagaacaggtcgaatcgaacaagttgggatgcatattttgttagtccgaaataagaagccatcatgcacataatatttatcccaaccttttctatcaatgcaatgagagaaacgttctttaaaatcagcatcagcagcataaagtgttttaatggattccaaaccaagcacttttgtatctagttgtgtaatcaatgcacatcttctatacaaggcatcagcaacaatgttatctttaccacgcttatgtttgacaacatagggaaacatttcaatgaactcaatccatttagc

SEQ ID NO: 139533 - DNA, 313 bp, Zea Mays
aatgccttacggtctgaaaaacgccttgccaacatttgtacgggcaatgagtaagacattcggggacctgattagggacaaggtagaggtatacgttgatgacatcgtggtcaagactaagagagggtcgaccctagtggaagacttaaccctggtctttgacaagctgcaggaaacacgcacaaagctaaacccggacaagtgcgtctttggtgtctctgcagggaagttgctgggattcctggtttcgcactggggcattgaagcaaacccaaagaagatcaaggcaattgagacaatgaggcctccagcc

SEQ ID NO: 139534 - DNA, 353 bp, Zea Mays
aactagcttaactcatcattagcccagcactctaattccattctatcaaagtagcaagtagctagatcttgcactggctgatgagctgtgttctggcattggctggaagaggctgtgagttggagttcacttttggttggttttgctgctccacaactcataatatctcccagccaataggttacaccatggactaggctggaatggggcctctgctgtgtcgtcgcctactattccttagctgtttctctttgtgacagctgtgccactgagtatatattatatgtatatttgcttgtggccttgaattaaaagcaggggctgccggatataaatggaccgggagatgttta

SEQ ID NO: 139535 - DNA, 685 bp, Zea Mays
gtctgactatctctttgagataaattcgggcaagggtggctcctccaaaggtagttttcactggaatgaaatgggctaccttggtgaggcgatctattactacccagatagagtcattccctttttgcgtctggggtagtccggttacaaaatccatgcctatttcttcccacttccactcaggtacggggaggggttgcaataggcctgcaggtttttggtgctcggccttcgttcgttggccggtgtcacactgggccacatactgtgctatctctttcttcatccctctccaccagtatctggttttgaggtctaggtacatcttggtagttcctgggtggatggagtaggctgagttgtgagcttccttgagcaggacttctcgtgcctccccttttggtacacacagacgatttttgaaccaaagggctccttgttcatctgtcctgaggtccgggagttgttccttgcgggctttctccacaagtcttgttgtctttgagtctaggcgttgagctttgccaatgaggtcttctagcattggtttgacttcgagactaccgttgtttcccaaacatgtattcagttgagctgattctttcttccaatcttctagaaagttggttccctttgttccgaatggttttcgactgagggcgtctgctaccatgttggcctttcc

SEQ ID NO: 139536 - DNA, 393 bp, Zea Mays
gggatgtagtacggaggtatagctaggagtgtctatcatatcttccttcattgcaagactattttatctactaaatcttcttaaggcgcttcatttggctccaggatcattgaccggcctgctagggaagaagtggagtgagaacaaacttaattcagtttgttcttaactgtagtcctaatggttccgttgtgcattaggagtatattctgctcctctactacacaacagacgtggtgtggaggttttgtcatacgttaaggactaaaagctggcggacttacataaccagcagcatagtgtggagaagaaaaccaaggaccttgaagcatcctttgaagccatgcaccttgatgatgaccaagaacaagtacactagggatcatgagaaag

SEQ ID NO: 139537 - DNA, 487 bp, Zea Mays
ctcatcccgaaagggtagcctaggatctaatcaggaccgtccctaaaacaatcaacggcccatgtttgttcttccctacccacgcggccggtaggcgacagaactcgccatcacggcggagctcgccggcgagctccccaatctcggtacaaacgcggccctacgcatcgcggaatgggtgctatcccatatcaagggtttggaggagacaggggagagattattaccgtgatttgtgaagcagttcaccacgcccacggagatgcgtgaccccgcggcggccttggagctgcggcgagcgattcactagacaccgaatgccaccgcggccaagcacatgcccggtcacaatccactcgccctggagattctcccagaccccaccatggacaccgaatggaggcggagatgtcggaccatggttgcggcgttacctcgctcccccggtggcggtggcgagtccatagacacggagcacttggaggac

SEQ ID NO: 139538 - DNA, 520 bp, Zea Mays
aataaactaacctcgccatcaatgctggcagagtgctgtggggaatcagtcaacacttgggaatccatcatttgcaagatatcatcaacacttcggaatgccccacgtaaatcacaaggtgctgccagagggaagaataaaaaatataaataaaaaatgggaataatcaagatgagagaaaacattttttaagcatggaagacataggtaggcttacttctattcaaatttccctcttgcagatcaatgtcatgaccacacgatggggttctcataaaatctctgctgtcatcaagatctccaccactgcgatccaactggatttcttcactatcacctcctccagattagtcttctggtacatttgaagtagttcctgatcctgcatacaaattttaaaaagtgattgaaagcacagagtgatgtgtatgggcaaaattgcaacttgtatggtgggtggttgcaacaataatattatgttgtatgcaacaaaaaatacctgctcctgctctagtgtcaa

SEQ ID NO: 139539 - DNA, 528 bp, Zea Mays
ctctctatatctagaatcatggcaacaacaagataattagaggaaggatatgccatgacatactagcaataaattaaagcatgtagattgtcatagtatggaaatgatgaaagtgcaaactaccatatgagaggaaattcttcaaagaatggtaatatcaatttaaagacatttgaagtgcttcaatttttctatgtgactacacaagacacataagaaatgatattttaaatacttgcacttaaaagatacgtgttaccatcctttggttttcctccatgttgtaggccttgatttttccgcataagataattctttatttcctacaacatcaataacttcctcgagatgatatgagtctaagatgtagtagtttgaagaataaccttgggtcaatcacggatatagattattgaagattgatagcttgaatggactctctcaagcaccccaaggcttcatatcatctcctcctacaaatcttgtcaagcatattttggtccccatcgcttgatgggtccatcatgg

SEQ ID NO: 139540 - DNA, 524 bp, Zea Mays
ggaggacaagatctcccaccgcaaaggatcgatgtcgtatggccttatcatgatagcgcctcagagtttgctggtacctggctgactgaatcactgtattcaatcgttcttcttctagtatatcaacatcctccagtctagtggcctcagcttcagctatgttttcgaagatcaatcttggtgccccaaacttgagatcagcaggtagcactgcctctgaaccatagaccataaagaagggagtgcttccatgcaaagctcggctaggttgagttcttaggctcccgaccacatacggcaactctctgatccactttcctttgaacttttcattcttgtcaaagactttcttcctgactgcttccaatatcattctgttggctctttttacctgcccgttggctcttgggtgtgccactgatgcatatttgatctggatgcttttttgtttgcagaaatcaaagaactttgaactagtgaaattggatcccaggtcagttatgatgctattcggtattccgaac

SEQ ID NO: 139541 - DNA, 405 bp, Zea Mays
cgcgacggtgaggtcacgggtgaggccttggggtgtgatagggggtgggatgtggtgttctatgttcgtggtgatgtggtgaagttagtgagctagcttaatttgacccttggctactagagaggggagggggagagctcaccagagtgaagggagatggcgacgctagctcgattgagctcaggggagagggagggagagtggccgaggccggtgcgaggagaaagggagctcgatgaggcctttttataggcgcctgagggaggggagcggctggagcgggctggcgccggtgatgtgcacaacggcggcggtaatggcgcacagcgccggggacgggatggttcggggaggtgtcatgtgagggtgcaagcacagtaggcaggggatgaaacggtgcctaac

SEQ ID NO: 139542 - DNA, 304 bp, Zea Mays
tgctccagtcgggcgcgtacatcactcaagaattcttctctttctgtcatggactgggtaactgctggtactcggcactcttctaggtcatactctcgtaatgctggtggatccctaccatatatgatgcggaagggagtctccttgagggcagtgtggaaggaggtgttatagacatactctgcccaagggagccatcgcagccattgtcggggacggtcacctgtcaaacaccggaggtacatgccaatggtcttgttgactgcttctgtttgaccatccgactggggatggaatgcggaac

SEQ ID NO: 139543 - DNA, 473 bp, Zea Mays
atacgatgtcttcttgaggaggcaatgtaggtacaaccggtttatggcatggcaagctgtggtcgcagctttcaagcatcattcccgccatgtcaataagtgtcatgttctttctttctgtcatgtcattctgttgtggtgtgtaagtggtgatgaactcatgtttgatgccttccttctcaaggtacccttctacctgcaagttctagaactttgtgtcgttgtcgcttcagatcttcttgatcctcaagtcgaactcattttgagctcgacttaaagatcgctttagagtcccttggatttcacttttatcctacaagaaaaatacccaaataagtgagtaaagtcatcaacaataacaacaccatacttactccagccgatgctaaataagaaacatgaccgaaaagatccatatgtagaagctccaactgttttgatgtcgtcattatgtttttggatgatgactctag

SEQ ID NO: 139544 - DNA, 476 bp, Zea Mays
tataaatagggtatgaatccttcccttgcaaggttgcttcactgtaaggccgggggtattgattcttgcatgatgcatgacccttagtgcatgggcagttagggtttagcgaaccgcacggaccatgcatcatatgcttgataaccatctttcacagttcaggatacttgttggatgggatctcagctgagatcaaaaggtcgtactgctcagggaacgttagcttgtacttcctctgcatgatgagtagaaaatggggcatgtggcaaacctcgcttctgaaactccacgacatagacgtaggcacgaaccttaccgagaatatcctgtttagtcagcctatgctttaactcctgtagtttcgcatgaaagacacgcactacaagatctggacgatcctgtggtgtctgatcagggaggagctccctccttatctcatcccagttggggttacatgtcatggtaagaaagatgtc

SEQ ID NO: 139545 - DNA, 495 bp, Zea Mays
ctggcattggattcaacctaaatgctagtgcagtagggacccttacgctcgataataaaggtgtttagctagatgtcctcgctctatagtagaagaaaggggatgaacaaggttgagagcgacgctggtcatcgtcgtatagggttcaatgtaggagtgttggcggcttgatatcctcctctttgttctccctacgtgttagtgtttggtggcggcacgtcatcagccgtgcagggggtgcattgggctttagtggagttttataggctcgagggcggtagaagtgctcaagccacacccgcctcaccacaagaaccatccctgagacaactacttgggagggtatgtttggaactccttcgaaaactctcatgtttctttccttcaagttgttctaagctatatatgaattgtcatgtttctttccttctagattttcaagctctatacatgagcaaaacattcttccactcgtacctactccaccgatcggcc

SEQ ID NO: 139546 - DNA, 464 bp, Zea Mays
aaagattccatgcgatgatcgtgtaaaattttctatatatcttgagtcgtaggatctaattcttccttggtagttttcgcacatgtaatggtgtttgatattgcttaagcctctaaattcaaaagctaattttgaaaaccaaaattctttggactctttgtgtgtaagggtgttgtaaggattgagaaatagagagtgttcctgttgaaaagtagctgaacttgacttcagctgagttgagcttttattcagttgagttgaatttgacttcagctgagttgagtttttcttcaactgggttgaacttgacttcagctaagtcgagattttcttcaactgggttgaacttgacttcagctgagttgagcttgacttcagctgagttgaacttaacttcaactgtgaaactctctggtcaaagccagttgaacctgcctctaggccagttcaacctaggttttctc

SEQ ID NO: 139547 - DNA, 363 bp, Zea Mays
ttggaatagttcctgttggatgtgcgtgtgtcttaatgtggccgctgaggcctgaacactttgttttctttcttgcctgaagtcgcactcttatttccttcattttgcatgtccggcttagcctgtcaataacagggtggcttcccaagttgggtcatttttcgcggcgggtgatgagtgaggtgtccttaacccggaggcataggaattcctcggctcagtcggcctcgccacttacatgtacccacgttcgctcctcggggccctgcatccgacatagctaggagaacgcaaaaaccttttttgatcgaaaattttggatgcggagaggtacgcccaatcttgacgcagaggggttccccc

SEQ ID NO: 139548 - DNA, 293 bp, Zea Mays
gggttaatcctagatccatgacttcgtgtttgtgcatggtcgttgtcgtggactgtggtgactcggtcgtggtgtggtcactcttctctagagagactcgcgattgtgttgattctcagttggggatttgtcgtttggtatgcttgagccctctggaacctgatcatccatgttttaggttcatgacttcgtgtttgtgcgtggtcgtggtcgtggtgtggtaactcttatctagagagatttaccattgtgttggttctcagttgcggatttgtggtttagtgtgtttgagc

SEQ ID NO: 139549 - DNA, 460 bp, Zea Mays
ggtgtcacctaatcagagcgcatttataaaagggagattcattcaagacaatttcatgctggttcaacaaacctccaggctgctgcatcagcaaaacaaggccagcttgctgctaaaattagatattacaaaagcttttgattctgtctcttggccttttctgatcgaagtaataaagaagttgggtttctggcagatttggagggatttgatatgtgggcttctggccacctcctctactcggattcttttaaatggatttccaggtcgtcatattaagcatcgcaggggacttcgacagggagaccccctctcccccatgctattcattttagttatggatgtccttgtctacatgttctcaaaggcagaaaatgaaggtttgctccagcagctttctagttcaaaaaagctccatcgagtctccatgtatgctgatgatgtagtccttttcttatgc

SEQ ID NO: 139550 - DNA, 546 bp, Zea Mays
atccggagcacctccgctccccactcggtcgagggtctaatgctgccacatggcttattgtctgtgacgtaggccagcgagcgaagcatgacgtaagggctctgggccgcgcggccctcgcatttattgcggagaggacacgccgcctgtcacccttctgacaggcgatgtgcccccacggcatttattgcgtcctatccattccactggcaggcggcgccagggccaccctgcagacggcgcacatgtccagtccgttgccggaacagtgtgcccgtgctgcgcggtgcactgtactcatcccttatacgagaagcttccccctgcacgccgaggctatacagatcttgggtgtcagggcgcaagaagatcgctccagcagcaagtattagtagctacatccgccgtgttcctgggcccacatgtcggggctcaatactcttgtacatgtccccctttagctataaaaggggaggcatgcgacgttacaacacaagctcaatctttaggcttagacccaagtcatccaagacaactcaagctctc

SEQ ID NO: 139551 - DNA, 399 bp, Zea Mays
aacaccccttaaaaataatctcgtcctcgagatttaggaggaacgaggaaaaagatggggaaaatctatgcgaagctcttcttctctttcccaagttgcttcatcttctccgtggtgactccattgaactttacacatctttataaccttattcctcgtgactcgagtcaaagtatccaaaatcttgatggggcactcagcataagtcaggtcatcttgaacactaaggtcctccattggcaactgctcttcaggtaccctgagacacttcttcagttgtgacacatgaaagacatcttgtacatccgatagattatcaggtagctcgagtcgataggccatccctccaacttgcctaaaaactctgaagggtccattaaagtgagggaacaatttgcc

SEQ ID NO: 139552 - DNA, 354 bp, Zea Mays
ccgataagatgtgcccgaatctaaggattgaaataagggggacagatttccccgctaacctagtagtaatgggtactcaagggttagatgtcatcctagggatgaattagctgcacagaaacaaagcaaccgtcagttgtgacaagaggacagtaaagttagtgtccccatccaggaaagaagtagtaactgaactgtaaatgcacgatctagaagaaggagcctgtcaccatttgtctgtagatggtaaggaggccaacctgcttgaggatattagagttgtgtcgaaattccccgacgtgtttcctaaggacttaccaggcatgccacccgagcataatgctgagtttgcca

SEQ ID NO: 139553 - DNA, 464 bp, Zea Mays
tggggtcctcggctaccggctcggcaactggctcggccaccaccttcagggcatcttcgccagtcggcacagaggctggtgcggggtcttcgccggtcgcagcgagcgtaggggtcgccgaggggccttcaccggcatccgagggcggcactggatcgacctccgcggccttgagcagcgcgccatccagaccaataaggccctcgacatcttcggcatgagccatctgcagcaacagcacactcattcagcaaagccacacatacccacacatataaccacacaaaaaacagccttaacctgctctattgcccggtcggaccgctccctgaccgcctctcggccgtgtagaccccacatcctatcaaagagtgcccctgccgactgcttcaccatggggtcttcgaccttgaagatttcacgttcaaagttttcgtctgcttggtcgaagacctcgtaatgcc

SEQ ID NO: 139554 - DNA, 605 bp, Zea Mays
gattcataaatgaatctcaggttgttttgcctctcttggcctctttggtgcattgggccacaagtgatacacctcctagcatgcagttggtgcctcaaccatgcatccaaccaggctgacataactgctacaaggaccactgcttttgcaattagccgacggcgtgcaatagcaggattcattgctagagtaataaaatagaaaaaaatgagattagacatctaagttggctcagaacattgatatatagctcagaggcatattaacatcatagaacattgatctatagctcagaacataacagttttaacatagtgatgtgctagttgcaaatatatgataacaaattcttacacgagccacgactgcgacatacaagagatgcgccacctagaggtattaaaacatcacataccattgatcgatagctcagagtaagtatgaatataatcaaaagtaaccatagaactcagctcaacatcatcggtcctagataattaggactaagaaaggtgccatgttgatcctagctaattaggatcaaacaaatagcctaaaccacggctgcgacatacaagagatgcgccacccagaggtattgaagc

SEQ ID NO: 139555 - DNA, 444 bp, Zea Mays
ctgagatgcctcgattaagccgagagatcgtagagcattggctgcctattaagtccggtttcagacctttcaagcagaaagctagaacatttcgtccagatcttctcccacaaatcaaggacgaaatcaccggctgctagaagctaagtttattagaccttgcagatacgcagaatgggtctccaatgttgtgctggtagagaaggagtcaggtaagcttagagtatgcattgattttcgcaatttaaatagagcaacccctaaagatgagtatcccatgcccatagccgacacattaatcaataatgcatcagaaaatagaattattagctttcttgatgataatgacggatataaccagatcttcatggccgaagaggatgcgtctaaaatggcctttatatgtccaggcttcattgatttatttgaatgggttgtcatgac

SEQ ID NO: 139556 - DNA, 586 bp, Zea Mays
agtcactttacctttccttaatttccaaacaaaacgcggaccgccttcgccgccaccttcgccgtcttgtccttcagcctatccttgactgcctgcgtcttactgtggtcatccatgggcgctctagctggaggagcagcaggcgttggccatgacgatggctgctcctcctgttcttgctggccaagatcggggttggagaagacagggatgtgatgttcctgtcctgccgcctcttgcttgctcctttcttgtgccggcaacgccctctcggaggcaccactgaccggtggaccagctgggatttcgtccatcctccgactccgagcagcaccgcgggcgaactgttctctggtgcggaggcgatgagcatcttcgaaagcaaacagccgattttaattagtgtgcaagcagtaactaaattaacacatcagcaaatggaatagaaatggtaacaaatgacgtcctagcttgtgtagtagtagtcattattacctgcttcttcagcaataggggcgacggacgtctgctgcttagaattagaatagaaggaagtggccatttcgtatgtcctgtccatgtgtgc

SEQ ID NO: 139557 - DNA, 575 bp, Zea Mays
gtttgtgtccttgaggcgacacgaggaaaacgcacgtgccgcttccggtcttgaggtaggatccgtcgaagtacatgggtccagtattctaggtcctcgactcggggtggctccttcgcttctgtccattatgcaacaaaattggcaagggcctgggacttgatcgcagtcctggagacatagctaatgtcgagcccattgagcttgagggaccattttgcaatgcacccagacgcatctcaattgtggacgatttcgccaaggggtgttgtggacaccaccgacatggggtgttagtcgaagtagtggatcaacttttgcttgatgatgaggaccacatatagtagtttctagatcgaagggtatcatgtcttagactcggtcatcacctcactgataaggtaaatcagcttctgcaccttgagcacgtggccttcgttctccctctccacgaccagtgtgacactaaccacctagatggtggtcgctatgtaaaggagaagggttttgccggcgaggtcaagaatacctttattagttcgagggcctcctaggcttctgtggtttaagagaaa

SEQ ID NO: 139558 - DNA, 345 bp, Zea Mays
gtcggatgaaactgtgccaaagatgggacttcgaacttcgatgttgaataatctggaaatttgctcttgaatgtcacagattctgtaacttccccttttgaaaatctgcagttttgctcttggaagtcaggacgtagtaccctctatctccagcgtacatagtcgtcaaagggactcggtttaaattgttactacaacatagacaaaggtagaacgactttagtctatataatatatgcgtagcctgcaaccgactcgtaagttcactcaacaattggacactcgctaggacattgcagggttatgtaagctagatatgaggaaatggatacataggaggtagga

SEQ ID NO: 139559 - DNA, 697 bp, Zea Mays
ttgaacaatatcaagaaaaagcatctgatgcttaaatcatcgtcagaccctttcctcagacgatcttgaagagctgtaaccccaaaatcttctttcaatagaccaagttcagctcttaaattgttggcagcaacagcttcatcgatgcccaatgcagttcctcccccagcattcggtaaccccaaaattaggtgcaccgtatcctttgtaattttcagctccttccctgggccagctcgaattgtcatgtcattatggtcgagcttttccatcagccaagctaaatgtgatctgctgccgagtgcgtccagtctcatatcaagaatactagaaaatcccctacgtgcaattgcttggcgctgtctgtcatttaatatctggatgcttactaatacatcttgggggttgcatctgacattaagcctctgctgaaaaaaagtatacaatgaatatcgtaaacatttacatctgcataatcgcaactcaatgtttaactcaaacatcaacacaacatgatttcacgcataaaatgatatattgccatagaccataaatctctaacctgtcggggggggcactactttcctccgctttgtgactagcttcttcaaaactttcccaggactgtcgtccaagttacgcttcttggataatggcataaagtcatcatcctcatcagcagcctgccttgtttcgg

SEQ ID NO: 139560 - DNA, 300 bp, Zea Mays
ttgccattctacaaaacgcatgcttctaagtacaaaaaaccactgtgacaaaataaagacaaacttatgatgccagggaaaagttgcaaacaacaggaggctgtggaaaagtatcatatgacaacccgtcgttgggtgctaccacgcaaatccaacattgatcagtttcagtcttttggatggatcatatttaggaagagattagaagagttcaaatcctttattcctatatggttcacgtatgctcgagggataaaggtgcaaatgagtgcccctaagggcgtgtttgggagcacgggg

SEQ ID NO: 139561 - DNA, 359 bp, Zea Mays
ccctgagatatattcagcttttgatgacgacttgttctacgattccgacatggaaaccagatacaacatctggcgctagacgtactatgtggacctaggaacatgtcatcgtcctgactgcttttgtgcaagtcgttgttctaccgttcaaataatttgtaattgtcctagtcgaacttcaaactttgttgtccaccacttcaaactttctaagttgaagttatgtattgtgtccacctaagtttggactcatttgtgtcctgtatgttgaatttgaatgaatctgatacaatatttgcatgtttaattattacttcatgtgttacttgttctcctcgttgccatcttaataatgtgtt

SEQ ID NO: 139562 - DNA, 322 bp, Zea Mays
tggtcagatgcccctaatgtaagccaccggatgatgcctaaagaaagcctctaacatagggcccaccagcattgagtgtggatgggatgtatatttgcccgtgtcagtagcaggtagcgtatccctgacatgaaatgcatgtggtgtgctaggcttgtaacattttacggttacatgcacattaccgaggcaagataattgacccaatgcatcgtttgggcgcctttaattatgacttccactgtgcttcgtgcgatcctgaggcatgaagggatgagcagaggagacgagatgacaccgcccacacctatgcacgacatcg

SEQ ID NO: 139563 - DNA, 411 bp, Zea Mays
aggtaccatgcatgcgtatgcacatgcgtggtttgcacctttgggagttcctcactggtgatctaccatgtccttcttgttctactgctcctacatcgcatataatactagggaaggctactaatgaggagttgcttccatactatgaggtgttgccgataagtttccattagcgtccccacgatgtctctctcagggcagcaactatggtcatggcgtcagtgacggcaccaactttcggcggacaccactactactgtgagccatggtcgccatccgtgccatttggagctcaaatttcctcgttgtgatgagaagtctgatcgcttgccttggctcaacatctgtggctaatggcaacttctttcggggtcaccgaaccctggaggatgaaaaggtgtgtctcttcac

SEQ ID NO: 139564 - DNA, 349 bp, Zea Mays
cggcccgatagcttatgtcatgggccacaagcagcgggtctccgcctgagcaggacgtgaagggcaaggcccagacacgtgtcagcaccggacccctgctcataccagggtcctcctcattccgggaccctgctgaggttcggacctgcctggaggctctagacttatatgtataggggtccggtgtccttcggtgggggtccggacttaccgggatgtgttgtctttccttgccacgtggcgccctttggcttgcccatgcggggggtcaggcgccgtccctcgcgtggctatgagacgtcgcctgtgtgcggtatcttcatgctgtagtagagggtacccctgattt

SEQ ID NO: 139565 - DNA, 455 bp, Zea Mays
attaaatcaaatcatccgtctgggatccaacgttcttccacacactccttgttttcctttttttcgaagaacatcttccactagatctggacataaaacccgagcctaaagcctaaaacccaaattacccaagcccgtacccgtttagcccaaagcccggtgcccgaatgagcctaaatacctgattttaatatgggcctaatcgggaacaccccgcggtacccgaaataccactagtgtgccaggccgcaaccagtcacggagtcgcccatggcccaaaagcccagtggccaagagcccagcaaagcaggcactagctgacagccacacaggttctccgctcccagccgcccacaacccctgccccacaggccagaggccacagcactgaggaccctagttgtcgcgcccaatgccaaatgccaagaattgaaccctagtcgtcacggcggcgg

SEQ ID NO: 139566 - DNA, 828 bp, Zea Mays
ggttggggcgagtgtaggtgagggggagttgcgaagtctttttgagggtgaggagcttaggataatgctatttaactatagggagatgggaatcattgcgaaggttgaaccaatgtaaggtgtggtgccctcgctgtacatatgtaactatagtttgtatgatgaggctgtgcgccttcgcgcgtccggctatgtccatagaggcgttgcgctcttggtctagcacgtttattatgtcggtccggctacgcctgtagtcggtctttgcgcggacggtgtagacttttgcacggatagtcttttgaggaagacttcgattttgcgcacttgttgtgctagtccagttgcacccttaggcgacttttgcacggatagtcttttgaggaagacttcgattttgcgcacttgttgtgctagtccggctgcacccttaggcggcttttgcacggatagtcttttgaggaagacttcgattttgcgcacttgttgtgttagtccggctgcacccttaggcgacttttgcgcggattgtcgcacgcgagggtagctagcgctgcccctcgcggtgactttgtattggtcgaatgtcgaagaccgtcgatgcggtcttttttcgacgtagatttttgcgggggatttttcgcttgtatattacatggctccgcctcgttaaaaacctcaccccccgggaggaaaagagtgcgggccagaataaaattgtttggcgaattacaagggcgagctggccctgaggagtcaaacaaaaaaattgcgaagattatcaatgttccaggagtgctccaagtcctcgccggatggcgttgcgag

SEQ ID NO: 139567 - DNA, 280 bp, Zea Mays
tcaagcatgcttgcactttgttcacactcgcgacagatggcctcctgatgccgaagcgtgaccatatgggacgctggataatacccctcacatcttccctatgactcagatcattcttgacatagaaccattgcttcatccaagagcgcggccatttctttcagaacattgctcaaagttgtaacatccgaagttgttatgatattgctccttcccaattgccttcgtctggtaggacaactcatggatgttgcagaagcacttggcatctggctctagc

SEQ ID NO: 139568 - DNA, 521 bp, Zea Mays
ggagaggggaggagatcctcggccaccttccgttgatggcggagccgcggaggagacgagatctgcgcgtattggctgggagaatcgcggagtagagcgggggcagaaccgtacgccactcagttgtggacgcctacagtacaaccttatagagcagtagagatatatagtgctatatatgtcatggaaatatataggatgaccaggggacgatcagggatgactaattgtcctgattgtcgcctaatcgtgactaatcgtctgatcgcccagtgacattgatcagacgatcaggcgatttgaaaataatggacgggattgagggctatctgcctacctcctgaagtcctgggccggcagccgtgggccacgagaaggatgcaagcagcaagccacagctgacctggcgtgagaaggctacgagcagcccatgtgcgggatgaaggtgctagatgcacatttggactgaaatagaattctgagtttgtgggctaacaattcgttttttttgtttaaatgga

SEQ ID NO: 139569 - DNA, 391 bp, Zea Mays
attctccaccagagatcaacttccaactgtgcattcctgatactactcagaaatggcttgtgagttgtgcagattccataactggtcttctttgactaattttacatcgataccggacatcacatcactgtacatgttcatagttgtaaagttctttttaagtttctgaccacatcgctaaaaaggtgtttctgatcactgtcacccccaggacctatccaagtcgctttccaatgcagttagacgacagagaaggcatgactatgatgtcataatgctgaaggaccccaagaagagactatggcctgtcgtttaccacgacagcctgttatttgtgggattcaccgcgggctggaaacatttcgtggcatcaaacgaccttcgggctggg

SEQ ID NO: 139570 - DNA, 421 bp, Zea Mays
aactatccgagtcatatacaattctgctaatttggctcctgtgtaattagtcctcacaggtatgaaatgagtcacttttgtcaatctatccacaatcacccaaatagagtcatatcctgctagggtgcggggtagtccaacaatgaaatccataacaatttcttcccatttccactcgggaatcttaagcgggtgcagtagtccagctggtctttgatgtttggccttgactctttgacacacatcacacttagccacatgagcagcaacatctcttttcaatccataccaccaatacttttgcttcaaatcgtgatacatcttagtgctaccagggtggatagagtaatcagaatcatgggcttcttttaaaatagtctcacgaaggctatcaatctctggaacacatatccgatccttg

SEQ ID NO: 139571 - DNA, 330 bp, Zea Mays
acgcctctgaaaatcagcacccaataggttggaaaagaaaccatccaggacttcctgtatgtcatcatgatttgtaatcacccttccatcttcctctagctttgaaataaaattccgcttcttacggtaacaagcctgtcggtggaagaattgagtattggcatgaccttcttttaaaaattgaatacgtgaccttagacatgcaactgtcctttgcaaagaagccaggaccaagcaatgttgttttagctgtctcaataaccaaatttcctccctggacaaaattctgctatcttgcgccatctccaatctaatgcagtacctcacgag

SEQ ID NO: 139572 - DNA, 551 bp, Zea Mays
tcgattgctccgttagtagggtatagtggtcaccctaagtggagtaagcgcgagcatgttgcaccgtcttaagtcgtcgcctacttaagccaattgctctgttagtagggtatagtggtcaccctaagtcaagtaagtatgttgattccaagtctaatcaaatcgaagtcaattgataaccaatagtttgagtgcctttgagaatgaaatcttttattgatgacgtattttccaattacagagtacaacgttgatccgatagcttttgaggtcttgctaagggtaaaactttctaagatgctctatgttccatgagttccccacttccataccatccatttgagtaagccgatatgatcctggccgagtgacctccgacacaatgaatggcccttcccatagtggtgacaacttgtgccgtccttccccgttagaatttggcgaaggaccaagtctcccactacaaaggatcaatgtcgtatagccttatcatgataacgcctcaaggtctactggtatctggctgactgaattactgtgttcaatcgctc

SEQ ID NO: 139573 - DNA, 587 bp, Zea Mays
tggtcggaccaccaccttctcctaggggaacttcctgactcccctggggatgttgcaccatcctctcgacgaccagcaccatgctcatcgcctctgtagccgctgcaatatataagtacagcggctcccctggctctggagctaccagtatcggtagggacacaaggtgctgcttcaactcttggaaggctcgctctacctcctcggttcaagagaatgggccggacttccattagagcttgaagaagggtagcgccctctcagccagccgtgagatgaagcggctaagggcggccagggaccccgtaagcttctggacgtccttgatccgggccggaggcctcattgcctcaattgccctgatcttctccgggtttgcttcaatgccccagtgcgaaaccaggaatcccagcaacttccctgcggagacaccaaagacgcatttctccgggttcagcttcgtgcgtgttgcccgcagcttgtcaaagaccagggtcaagtcttccactagagtcgaccctctcttagtcttgaccatgatgtcatcgacgtatatctctatcatgtccctaatcaggtccccaaag

SEQ ID NO: 139574 - DNA, 446 bp, Zea Mays
gtccggctaccaaacgcggactgtctggcttcaacgcatggaagacccacctctacgccaggtcgcaaaccatccgaccctaggtcgtggactgtccacactgtcgcagagagcaccgccatcgatacacctcacagtgattggcgcccagattagcgccaacacacttttggcgacttcatggggacatcacgtgaagatctatcaagtcgtccctcaatggctggttcaaagaatagttccaacgactctcccagcaacatcattgagctgactatggagactttgtcggttgaagatcagcaggagtttgaggaacacaaggagcagctgatcaatgaagcgcaagcaaaattcctagccaacttcaaggtggataggaataacaagggctttcctattttggaggaaggctaaaagcgatgtgtaccgcctgcccatcggcg

SEQ ID NO: 139575 - DNA, 291 bp, Zea Mays
aggtttctatatcagctcatgagacagacgcttctgccacggatgggttacagggaggctgccactcatattcagcttttggctccttggtgccctagtttctcactcagagtttgatgtcatggattttctcatttgagagatcgaggacaccatactggatggtctccgtgctcgtcgatagctgccttatgctcactatctgtgtcacatctttgctcagctgattcggccccctcagttccaaggtactcttgaggcctctcgcctcatctttgggtcgtaccgtcc

SEQ ID NO: 139576 - DNA, 549 bp, Zea Mays
gtgatgttgttttactgcaaccaaaactctcccgagctatcggcctgcccctttgtgcccgacttagtaagccaacccatacttctgctaacgtcctcttgagttcttgttttttcctccgtcgctctctagctttctgagttcccgaatccgtttgcgtcgtttgaaaaattgcgatggcacctaggaaaataaaatagagtgctactatcccagacatccctccgatcgatcccagtagccaactccctttcgttattaaccatgtttttgtcgtttctgaggctgaccttctgcatcttgttgagattggtgttctaccgtcgaaggaactatgttcctggcagatcttgcgtggacttactgtcccgatagaggatactcatgaggcaattatctttgtgccttttctcatctggggactggccctaccagtttctcccttctttcgcggtcttctcgatttttactctctgaacctcaataatctgaatcccaattttgtgcttcaaattactgtgtttgttcatctttgcgaagctttccttg

SEQ ID NO: 139577 - DNA, 275 bp, Zea Mays
tcttgcaaattctgggtcaaaacgatccagagccttccaagcatcgccatctgatggatgcatcataatgtctggatcttggctcttacggtctccttccttatgccacaacattagcttcgcattttctggggttaaaaacagacatttaagccttggggtgatgggcatatattgaagctgtttaactgccacttttgtagcaaaagtagctccatcctcttttagtacctccgcatatcttgatttaccgcatatctgacaatgggtggccg

SEQ ID NO: 139578 - DNA, 666 bp, Zea Mays
accagctgccgtttaacatgcccaacccttttgctactccaagattggaggtgtttagatagcctttttaatttatctgccatccgctgcaaaggacaaaccactgcaattggttgacaccaggaattttctacttctgtcatgaaaccttccaacttagtccaaaaactttcaaaatgaaaacgacgtttgccttgagtgaactcgtgcaaacccaccaccagtggacagtgatcagagattgaggaagaggaactttgcatcaaacaatcaggaaataaatcctcccagtccctggaatagaaaaatctgtcaagacgcacaagggtgggggatgacctttcgttggaccacgtgaatttccttcccaagagcgggagctcaactaactgcagatcattgataatcctctggaatctccccatcatggccctatcaaggttgttgttatttttgtcttcagcccgatagattagactaaaatcccccccaactgcccatggcccagcacaaatagactggaccatgcggagctcctgcagaaactgcaactttttttcatcagattgtggtccataaactccagtaaaccaccagggaaggttactatcatgattgaactgaactgaaattgaaaattcatccacccttgtctggagagcagag

SEQ ID NO: 139579 - DNA, 475 bp, Zea Mays
agggtctctccctgacagggcctggagtcttttcctccaggtgggggtatttttgttgctaggtgggaagtaacgaagggggtttcaaagatctctctgctgtagttttggcatagctgtttaagggattttcgggcaacactttggcaaatgtctgggaagcggtgcccgatgaaggtgacttggaagggagggtggtttgggtaactttggctttctcccaggtagaccgccatagagcacttctccactccattttcgcggtattctttccagacatattcgggcttcttgcggatccccatgcgtagtgcgcaacttcgtaggaggtgaggaaatccttcctcgtctgagcagtaggatgtcctaatgacccaagagccttccatctggtaggagaaaagaagggtccgttaatatcggggaaaggagggaagatttttcttaggggtaagaggtgttttcttgttaagac

SEQ ID NO: 139580 - DNA, 351 bp, Zea Mays
caggcaccatgacctgttcaatataacgcggccggtgggtaaggactttcaactttttgctctttggcgcaggctcatctggagtggccgaagcagcagtcctggccgaagcagtgttcttcctcttctttcctcgtccccgcagcgggtagcagtagacggggtaaacaaaaccaatggcatcaaaaactctattcaatctctttttccccgaccaccaaaggatgtggataatgcattatcttctgctttggaatacggcccaagcagttcatcacttgtagcttcaatacatttcagccagtcatcattcggttcatcaaatttatccccatatctgaaggtgtattt

SEQ ID NO: 139581 - DNA, 576 bp, Zea Mays
atgtcgagcttcatgaagagtgccagcggcttatgcatgtgcatttccctaatggtggattgcacataaaggaaattatcatggatgcttctcttcttgacgaaagcactctgacagttggaaaccaaagcatttaggtgggggcgtgttcgttggccagcaacttggcaaaggctttagcaatgctgtgaataaggttgataggcctgaaatctatgatcttgggagcaacagttttctttgggagcaggacaatattagctgagtttaaaagctcgaaaccttgggagttgcctttggtatgaatgtatgtttacttagggttttgagttttgactctcttctttaatacaatgatatgcaactcccctgcatgttcgaggcgagaaaaaaggaggtccaaaagaaaagaagttaaaggctttctaccctgcattaaacaagagggagaaacagataaagttaagcttcagttcatcttcgttgccattttcgaaaaaaaaatcatcttcactggttagagattacagaaaatactactttttgtgctattttattttatatctaagatgtgat

SEQ ID NO: 139582 - DNA, 504 bp, Zea Mays
caacgcggcagtccctcgctgccgacggctctctccgccgtgattcgtgtcgccggcgtcgagattagcgcctgggtgttggatagcactgcggagtcgcgaaaatatcgtcatcgtggataacttcgggcggtaaacaatcccggccgccgtaccgcactcaccacggcggatgtggatatgctcgccggcgacagccgctttccggctttgcgccgcgtggctcagcccctccactacatcgccgtgaacccttgtgcctcttcgtggctcgtcggagtaactgccacggtagatgccacgaattcacgtgcgccagtaccttcttctacctccaaccgccagcacagctcagtcgaattgatcgccaccgccccgggagtctataaattgagcccgccgttggctccgcaacctcatcacgtaccccagcatccagtatcgcccccaagcttccaaccataagctccaatttcaaatttgccccaactcggttctaaaaca

SEQ ID NO: 139583 - DNA, 277 bp, Zea Mays
caaagcccaagagcttgcccagccagtggtgtcgcgggattgtcacaagcctctggtccagcaggtacgtgaggctgcagtggtctgttttgacgacgaaccggcgaccccataggtacgacctccagtgtcggaccgcatggatgaggccgatgagctcccgctcgtatgccgccagtgcccggtgtgtatcgagctctctaaagtcaatgtccatattcaaaacctaaaaacaagagccaaaacgaatactagtttgagacggagggaatactca

SEQ ID NO: 139584 - DNA, 896 bp, Zea Mays
cagtcaccacttggacaacattttcttcccctatctcttggatgcatctgtccacaaggtcaaacacatattttccatctttctttacagctgagcagtccactgaatccaagaaacaaaccccatgtgcactatggacaaccaagttcatcactcccctacccttcctgtctgtccatgcatctgtcatcaccgagcaacctgtgagctgccatgattcctggtgattcttgaatctatccaacaccttttgctttgctctcttcaagaatggtccactcatctcataggcactaggacctctcagacctctaccaaaagctccaattgcctcaagcatatggccaaagctcgggagggttactgtattatgtgcaatgccagcttcataaaaaaattggcatatatactcacatgctctatctcttctgtcttctcttttctgggttgacaactttgtttgaattttgttcttgtgggcagactcttcaacagattgtggcttgtagaagttgtcaatagtgccactgccaccatttgttgagggtctagagctgctgctattattacttacccttgttgatttcagcacaacaatatcattctcatgctcattgtcttcttcattggatccatctgatttatctagatcaatttcatccctttctctttgcttttccttctttctctgttctttttcactagtcttctttgtaagcaaggcctccatctcttgattaacaggtgccggaactttcttgcactttgtaacattgaaacctccaatgtttgcaagatgatacttaactctagtaattccaccatggatcaccttgtcacagtacttgcactgtattgcatgcttcttactcatatccgggacaaagcaatgctcc

SEQ ID NO: 139585 - DNA, 416 bp, Zea Mays
ttttactcgcgagctctgagctaaattgatgcagaaaatatgatttagtctcaatctgtccctgtttttgttacgcgtgcgtgactctggtgcctgatccgttactgtcattagataatgcataaaaatctcatagaatccctgattggagcacgtcgtttttaagtggaggtgatgtctgacctgcgggtttaattgggtatggaggactagtggactttctaagaatggacaccaatcctccacgtcccgcgatagcgttttttatttatgcctcgataacctcgtatggtgtgtgtgcggcacatcatcacgtttccgctttccgttttttccacccacggaaaagaacaacaggaattgctgtcacaccttgtggcaccagcaccagatggtccaaatcctttgaatacttt

SEQ ID NO: 139586 - DNA, 412 bp, Zea Mays
attcaaacagggttttgaatttgaattggatatttgagacttgaaataggaagcttgaattcaatttgaatttgaagcacaaacttgaattgaaatgagaattagaaaacaaactagaaaaaggaaaaaaagggcagaccagcgcttgggccatttctgctctccactcggcccatttcctcacccgcgcagcccacataactccgctcgtctctatgtcaagtgggctccacttgtcactgcgcaccggcccactctcatctcttgctgacactgccgcatcgggcccgcgagtcagtctcgccgtgctttcgcagcgcgcgcgccgtgtgtatcaaacccgcaccgaaccatgggccccacttggcatccactaacgcacacctccccacagtggcttgtttcactgaat

SEQ ID NO: 139587 - DNA, 581 bp, Zea Mays
cttaggccttctccacgtctttccgccacttggtggcttcatctctaggtttggtctatcacataatgctgccagatccactcttgcctttacgttatcctttgacttatcaggaatgtccataattgttgcccatagtgcctcgacaacattcttttcagtgtgcatcacgtcaatgttgtgtggaaggagtaggtcatcataataggggagtcgagtcaagccagacttaagtgtccacatatgctgctcaccatatcccacaaaaccaccttctgtattggccacgagcccatctatctgttgatgaatttcgacaccagtcatcgttgcaggtgggcggtctgtcactacgacacctttcgtaaagttcttgatgtctaggcggaatggatggtcagaagggagaaattgtccatttatcgaaggacgaatatttgccatcctttttcaaccaaatgaacctgagagcttccttgcaaactgggcatgggaacttaccgtgaacacaccaggcgcagaatagccatacaccgataagtcatgcatggagtactggtaccaaacatgcattctgaagt

SEQ ID NO: 139588 - DNA, 448 bp, Zea Mays
ttttgtttttgtaaaaccaaataataaccaaaggagtacaacaactgatgtgggtcaaaagctacttttactctactacaaaactaaaagcaacttccccctattttacccaggtgtgaaggtggataatttttaaaactgacacacctatcactggttacgaagacatcaactcatttttcttcttttccctcttcaacatctttctgtccgtgagaccgtgatcccctttttcatcatgtgcgatgtctctggcaagttcaggcactccttcctctcccgcgatcacctccaatgaccactccctctctagcctctatagggtgtggctcttatctcgagcatgtgtggctccatcctttgcactagtgacgggcatggccttggcaaccgcgcggggcctcgatcgccatgtaggcgagtgtgggacaacgatcgctgatgagca

SEQ ID NO: 139589 - DNA, 390 bp, Zea Mays
attcaacaatgtctgacgagtaattgccaaagtgctactctgttcatgttcgttttcccctacattccaattgttttggggcagaaattcctctaatctcttgactctgttttcagagattcggtgtggttcagattctcatgctggaggaaaaggagggtgctcccaatcagatggagctcattaccttagcaacaagcctgtgaatggtctgtctcgtttccctctcccatttattatttttcagaacaacatttttgcactgtctgactactgattggcaaagggctactcttagatcatgtcttattttcttttcgctccaattgttttcgctccaattgtaatggaatgagtgtgagtatggggtagtgtaatcctgtaacttat

SEQ ID NO: 139590 - DNA, 920 bp, Zea Mays
gggatggactctgccaagcaagagatcatggactcaaatccttgtggatacaatattgttgtaaacaaaaaagaaggttcttgcttgtgacacacattttttctactttttggcacaaattaatatttgtttttaaatgttcaataggcggttgacatgaaattttcaaagacaaatgcaaatgcctcattcctataattattggaattgtagagattttgaacctctttaaaatggattttgatcgtgtcatcggtgtgcgacaccatggtaccgaagataccagagaaaatcaaaggtaaagagagagggtgtagacttgggaccactggatcaaggcgtcgacttggttgtatgcacacacacacacacacgatgtaaacatatccgaacaccttgaatgtaatatcctacatgttctatgcgataaatgattagatgcaagtattggtagagcctacaagctcgtatgatgtctgtctaaccagccttggagttgagaaaggagaatcaacatcaaccaatacatttttatgttcctctatatctttattttacatcacaagcgagaagggagtacactcctacataggtgggggtcatgctcaacagaagtccaactactcctatcttgttatagttattataccatatatgtatcaagtgtctaacaagctacactggtgagtattacacaccatagtggcaggtataggtgcccgtgttgtagttggtatctacaggcacagattcaacgtaatgctagtgaatacacttgcagccttatgtgtggctacaatgacttcttttcaccactacaatagctttagtaaaacttttgagtgctacattgcctcttacaaaaaatgtcaaggacaatagccttaattatcttagtatcttgggcttagccgacctag

SEQ ID NO: 139591 - DNA, 478 bp, Zea Mays
tttggatctgaatggtgtgcttagtggggtgcaagttttatattggttcagactgaacgtccctacttccagtctgtggtggcatgcgctaccgagacctgattgctcgtagtgggggttacaagcgggtgagagagggaaggatcccaagtctctatggattgcactgctagaggatctacgtttcgagtgttggctctcgagtttgtctctttctttttcgagccgaccccctttttatataccaaggaaggaaccgattacagatggcttctctcggaagggatcgttgtgctgtaaaacgaaatagttttccctcgataaaccccttctcgtgtgtcgttatccgtcccatataactcgcctgttgtgcttcctcatgactgctggtgaagcatgtcgatgacgggagtccgagtgtcatcattactccgtctgtccacctctgccgacaccgacccttggtcttcgtagcctg

SEQ ID NO: 139592 - DNA, 607 bp, Zea Mays
ctttccacaaactcgggtaatcttgtttctgaaaaaaaaagcagtgcaccactgtactgaatttgttggcagcccagaccgacaaaaggttttgagagcaaaacgtagatgctcctgccattctttgtgctgtaggcctagactttgatctgtagtgccaccacttctagcaacaggctactgcaaataaggttgttaagttggagggggcatctttcagtacctccccgctagcagtccctctgccctttcccctctgttgcgcttcatttgtattattgcagtgtgacagaggttatcatcaaaactggttgcttggtgctctggttagattagtatttggtacacgttgatctagttttcacatatttccttacagctgaagttcttgatccagttctttatgattgcgttcccagttttttacttgcagatattgcatgctttacatctgtaggtgttagtaacattgcttacccttgacggatatgtgatgttaacctaattcacatcaccgcctctcatcttgccgtacttacttttagaacatatatcgatttcactatttccttatgagcatatagtttcgtaacttccaaatgctgag

SEQ ID NO: 139593 - DNA, 616 bp, Zea Mays
ttgcgatgcatcacatctaggacttggatgtgtgttaatgcaagatggaaaagtgattgtctatgcttcaaggcagttacggaagcatgagaagaattattctatgcatgatttggaattagctgtcgtagtgcacgctttgaagatttggaggcactacatgattggaaacaagtgtaaaatcttcacggatcacaaaagcttgaaatatatcttcatgcagaaagaagtcaacctaagacagagaagatggcttgagttaattaaagactatgatttgaaaatacaatatcacccaggaaaagcaaatgtagtggcagatgctttgagccgtaaaggtcaagtgaacagcatcactactcatttgatgtcacatgaattgtgctgggaaatggaacaactcaaccttggaatgctcaataatatggaagcaacaattatggaagttgaatctactttggaagaagagattcgtaaaggacaagagtctgatgagaaaatcaaagaaattaagacgcaaattagtttgggaaaagccccagatttcacagaagatgatcaaggcacaatatggtttaaaaagagaatttgtgtatcagaaatcgagcacctacgc

SEQ ID NO: 139594 - DNA, 491 bp, Zea Mays
ggcggggtgtgttccacggtggcggaaaccgaattgggggaaacccaaaattcgtgagctctggcgaacgattgagggtgggagcgggtgctgtggctttgtgatgacatagcgcaactgacccggccatcaatttatagagggcttaggcggtggcgctcaatttgaccgagcggtgctggtggtcagagataaggaagaacactagcgcagtggattcgtgtcttccgtcgtggcgacttcactggcgatgagtaattatcgcaagccaagcgaatgcgacgtggtaaagtgcttagcacgtggcggacgacggtgatggctccacggcggtgagaatcttatccgaggggtggtgagaaagggaagaggcacggcggctagccggagtggcgtccagctcaccggcggcgaagattttcctaccccacgatgttatctatccactcctggcacgaatcgggacgtcgacggcacaaatcacggtggag

SEQ ID NO: 139595 - DNA, 629 bp, Zea Mays
gtcaagaacccacataccttcaagaactgaaattggtacagtctttatcagatgaacctgctgaaccacatcgtgcactatgtcacacgtggccagcattagagcaccattttgttcagctgcaccagggtcaaatttgcctccggtaatggcatctccttcttcttccccctcttcagacgtttgcagtcctccgcccaatggccatagatgccgcaatttcgacactagcctttacaccgcgaagtgccctgggaggtcagcctgaccggtctagaggcattcccgtcgtgatgcaccggtgacttgccttttgatgaaccagtgttggagtcgccgacaccgtccttgtgacttgaacataggtggtgtttgttcttctcaagccagtcctcctcggtgaggagaagacgtcccgccttgtcgatgaggtgtgcgcccttatcattaaaccgatcctcgacggcgcgcagacaccccaccagttcatccaacgatagctgcttcaaatcacaaaacatttcaattgttacaacaacctgggtgaagcacaccggaaccacccacaggaacttcttgatgacgcgaacatcttccacgttcttgccaagcgctcgaaggttgccgac

SEQ ID NO: 139596 - DNA, 1271 bp, Zea Mays
cgctccaatatattagagaggagaaacatttacaagacactcacacgaagacaaagagggagaaaaaagagagcagaagggcaaaaactcaaacgcctactgaggttaaacacaacactgagcccaacaggccccaactaacccaaaatggcaccaactagttctttcactaaagaagcgacctggtctggattcttctgttgattcctgaagatcctgttgtttctttctaaccataagctccaccaaaaataaatcagaagaccgtcgaattttttccgagattgcctattacagagccctcttagcttcctccaccaaccatacagcgactcggatgtctgatttcctctcagaaaagaacagttcccccatatcaataatctattccacacctctctactgaaggtgcaatctttgcataaatgagttaccgtctctagcgctgagttacaaagacagcaaaccggattacactgccaatgtctcttctgaaggttgtcagcagtcagcactttattatgcaaaagagtccacgcaaaaaaacgacatttaggttcagcttttgctttccaaatggggttgatattcattgtgcaataatttgttgcaaattggatcttatatgcgctgctagcgctatactcaccatcttccgtccatctccaagaaatggagtcttctagatcattcagcccgtgtgtactattgatagcctgccaaagggaaaccaattctttgatttcatctgcatcaccaaagggagagcatagctggatccaacgattatttctcagggcctggaaagtcgaaatgttcttcctttttgctttttggaataagcttggtgcaatgttttttggtgcttgaccatggatccaactagatttccagaatactgcagttttcccattgcccaccgtcacacaggtggaagcgtagaaaagatcttcatctgttttatcacatggcagctgcaaatccacccatgctttatctttggctttccaacgcaaccacaaccatctaagtcttaaagccctcgcaaaacgattcaggtccaggatacccaatccccctttgcactttggcaggcaagtagtagaccaattgatcaagcagtgacccccattgcatgactcaggattacttcctttccagaggaagcttcttcttatcttatcaatttttttcagtagccatttttgagccgggaagaccgtcaggtgataaataggttgtgcggataacacagatttaactaatgtctc

SEQ ID NO: 139597 - DNA, 396 bp, Zea Mays
gcacggttcagctttggagtttcagctcagagtcagagacgacttgatcgaaggagtgccagacaacaggtcgccatcagagctgaagaaatctgtcctggttaaaaaaaaccctactacatatgaaggagaatcatgttcatgaatgcgatcaagctagtaccaattgctgttgcaatttgcaaaccctgttttgcaggaatgagcagcgaaggttgcgcagcagagggcatctttgtcaacgtcgcctctgcatgcacatgtttagggccagtttgcaaatatttcttttctgatttatgagctttacttcttgatcttcccttccaagagtgtttctgacgagagagcctataagaattaatttgtcaaatatatatatacaccataagttag

SEQ ID NO: 139598 - DNA, 325 bp, Zea Mays
ctgggaacacatcggctgggcggctggcaacttgaccacttgccacccgtcaccccggctgtggcctgtgggagatgcctagtcctgcacacgccccttcagaaattttctcaaccttgttgctgctatgctgttggtggcgtatataaaaccaccggaatgacgtggtcttttgtcactagcaaccttgcctgcggagactcttagtggcctgcagagatgattgtcgtctctggcgttatcggctgcgtttacatgatagctggatcgtcgacgattggtgtcaattgtttgtcatggcctacaggcctagtcctcccctcac

SEQ ID NO: 139599 - DNA, 463 bp, Zea Mays
ttcaaatttttgcccattgaagagttggtcgtgttccactttccttagtttgagttcccagaagtctgctgaaagttggatttgttctacttcggatatgggtagtccttgatgaaatgtcaggactttccacaattgaagcaaccactggaggaaatgggaagggcagggaaacgagcaccaggggcactcgactgattggtctgggtgggggcaggagtgggatgaatgaacataggttgtctgaagggatatatgggtgggcgaggagaagaatgatttgaattgaaaggtcggattaccaaccttgtcctcttttcaggtacctaagttgatctttcacccgcatatccttttgactttccttgccccgcatttttggcttcaactaacagtgatgtactgatagccctgcagtatgtgaggtccagacacgttgccatcttgcgctggagtctgtcat

SEQ ID NO: 139600 - DNA, 846 bp, Zea Mays
ggaagaagtcccttcaccaagttcaggcactacggccgtttcaatatatcgtggccggtgcgtcggaaccttgatctttttgccccttcggcatagcagagatggctgaagctataattttcctcttttttccttgcctttgcaaggtgttagccataatcagggtatatgaagccaattgcatcaaaaacaaatcttttcttaccccggcccccgaaggctgaggataaagcatcatcttcggctctggtatatgccccaagtaattcgtcgctagtagcctcaataaattttagccagtcgtcatttggtttgtcaaacctgtctctatatctgaaggtatatttcaaacgaattaatccaccttcactggacccggcaatagtctccttcaacatctcccagctatccacaagtggccataccctataggctatgtgctcttggattaggtctcttgtgccgatgaaagcacagatgttgctgaaagccttttggcatgcttcggcgtcattatcaaccgccacgatcggccttcgaaggccgaagcgagaccagatggcgcgttggatgatcccctttatgtcctccctttcaatcaaattgttcttaacataaatccattcctccatccaggacctaggccaccttttccaaaatgttggaaccgggtagcttgcattagagcgatcaatgaatccataacaaccgaagttgttgtgatactgctctttgccagtggccttcgtctcatacaacagttcgtgcatgctacaaaaacacttcgcgctcggttccagcccttggcttctcacagcccaaacaaacaagcccattctaattata

SEQ ID NO: 139601 - DNA, 371 bp, Zea Mays
ccttgggcgagtcaagactgtgtctcccttccgagtttagcctcgagcgagtcgtgacgagtcaggactgcgtcttgtgcccaggtttggcctcgggcgagtcgtgaccacgtctcctgcccgaggttggcctcaggcgagtcatgactgtgtctcccgcctagggttggcctcgggcgagtcgtgacgagttgtggttgtgtctcctacccgggtttggcctcaaacgagtcgtgactgtgtctcctgcccgaggttggcctcgggcaagtcgtgattgtgtctcccacgcttgggttggtatcgagcgagtcgtgactgtgtctctcacccgaggatggcctcgtacgagtcgtgaatgcgtcttccgc

SEQ ID NO: 139602 - DNA, 468 bp, Zea Mays
gatctcgccctggtagatcaggtagtagtccttcccttccctaatgatcctgacacccttgggaaggacgcggcgcggtcacacacacacactcacaggccaaacaaaaacaaaggaggcggctagcagtaacaccagctgctgatggcaatcggaagcagtggagctggagcagatgggcgagtggcggcttacagtccgtatcggtcgcaccggtcctgcatggcgaagacgtccttccaagacttggatccctccggcgtgtagaacgctgcggcgtccgctccccacctgtcgttgaacagcttgcgccacagttcatcatccgaggtcaacaccctccatttcctgcaaactgatgagccaggaacagcaccgtcgcagttaattggtatgcgtaactgcccaaaacaagagatcgctacgcacgctatctgcatgtcgtaccaactactcctctgtatcaag

SEQ ID NO: 139603 - DNA, 940 bp, Zea Mays
ttggaaggcttgctcagcctcttcggtacaagagaatggacagattttcgcaggagcttgaagaaaggcagcgccctttcagccagcctcgaaatgaagcggctaagggtggctaacgaccctgtcagcttctggacgtccttgatgcgggctggaggcctcattgcctcaattgccctgatcttctttgggtttgcttcaatgccccggtgtgaaaccaggaatcccaggagcttcccagcagagacaccaaagacgcatttgtctgggtgcagcttcgtgcgcgtcgcccgcagcttgtcaaagaccagggttaggtcttccaccagagtcgacccctcctagtcttgaccatgatgtcatcgacatatatttctaccttgtccctgatcaggtccccgaaggtcttacgcatcgcccgtacaaatgttggtaaggcgttcttcagactgtagggcattacaacatagagtagagcccatccactattacaaaagcggtatgcttcctatcctccctagccatctggatctgatggaaacccgattcggcatctaagaaggacaaaaggtcacacccagaggtaaaatccacgatttgatctatgtgtgggagtggatacgagtccttgggataggccttgttcaggctggtgtagtcgatgcacatccgaagcttcccattcaccttggggacaatgactggactggccagccacattgggtgatggacctcttcgataaagccggcgtcaagcagcttccggacctcctagcgaatgaagtcctgccgctcaacggactgtctctgaggcttctgactcaccggcctggcatcggggtgaatcttcagatggtgctcaatcacctccctagggatcccaggcatctgtgatggttcccaagcaaaaacgtcgacatttgcccggaggaaggcgtcg

SEQ ID NO: 139604 - DNA, 585 bp, Zea Mays
tgctgaccgagcaggcccagcgccagggggtttgggcgctgacaggcgggccaggacgtcagggcgcgcgtgagcgaagcggtacctgcggtctgggccgtgcgatcaggatcggacggaggggatcagaggcaggaaaagggcgcgcgtgcgcgaagcggtacccgcggtccgggtcgtgcgatcaagatcggacagaggggatcagaccggggaggggtgaacggctgcgggcggcgttgctcctctccgcggcggtgaggtcgttgaagttcaggctggcgcaagctagggtggctccggggtcgcgggagttgggcagagaggaagagggcaatggcggggaagtgccatgaatccacgggcagaaaggggggaacgacggtgagaaagcctcgggcaggccggagcaactccggtgagccattccgaccacggggaggggtcctaaggcgcgctaaggctttggctaacttcagcagaggcaggggtgacacagggacctactctggtgaactagaccaggctaaatcaaccggccaccgcgcgagcacggcggactgccgtggccaagcaccggcaaag

SEQ ID NO: 139605 - DNA, 545 bp, Zea Mays
cacggcagtagctccagcagcggcggcaacccaggtggtggcggcggccgctggaagaagaagggcaagggcggacctcactccggcggcggtcccaggttcccagccgccccctggtactgctaccccccttggaccgtcggggttcatcagcagccctggcgcccaccggcgccaatccctacctggcgcagtcctggcatcctcggccccttcactcaggctcaggcgcacactgcgctcgcccctgttcagtcctccgacaaccctgctccaccaatggcagcgcagggcggttgggatcaggctggcctcatagccgcactgaatcagatgtccctccaggggtcctctccttgggtccttgacactggcgccacagctcacatgtcatcttcggctggtatactcctgtcccatatcccctctccttcattcggcatcaccgttggaaatggcaccaccatacccatcacctgccgtggcacatctacactatcctcccccacctctacctatcgtcttaacaatgttctagttgcacc

SEQ ID NO: 139606 - DNA, 679 bp, Zea Mays
attttcgtctagtccaacgattgtgaggtcagttatcaggcattgaagaacaagttggtgaacgcccctatcttagccttgcttgagagtggtaagtgtttcacagtttatacggatgcttctcgtattggtcttggctgtgtgttgatgcaggaaggcagagtgattgcttatggctcaaggcagtcgaggaagcataggggaattatccgactcatgacctcgaattggtcgtggttgtctttgccctaaaatcgtggaggcattatctttatggtgaatcttgcgacatttacaccaatcataagagtctcaagtatattttcactcagaaagagctgaatttgaggcagcgtcagtggcttgagttgataaaggattatgatctatccattcattatcacccggggaaggcaaatgtggtggctgatgcccttagtaggtccagggttccaaaagtggccatgcctttgattgcagatctggaccgtatgggggtcgctttgtgttatgtcagcaccgctagagaggagactcgaatgctcattcaatcctctcttctggagagagtgtgcgtggctcagcagcaggatcgtttgttgcaggaagctcgaaagagggtcggcgatggtaaaccccgtgagttcaccattgatgagaatgatttggtttgtttcag

SEQ ID NO: 139607 - DNA, 480 bp, Zea Mays
caagtagatcatgtagtaattgtaaaagactaaccattatacatatccactataagatagaccgtaaagttcttatagtggttatattattaaacttatctaagagaggttgaacgccattttacgtgcagacggttacatttactttcaattttaagccgggagaaaagttactggtggttgtttaacaaggtgtgtaggtggttttgttcaccatgtgactggtggttgatcgagcgttttttctttgatctatcatagtaatagtaacgggtacccaatgtatgccagtggaataatccttcagatgcattgcagtttgagatcttgggaatccaagatttgccgtcacctgtattggtggtacatctaggactgccggattttttccccccaacgacacatctaaacactgtcaccagcattattgtttattttgctagctgtagcaatgccagtgtcccgagcagagcagtgccc

SEQ ID NO: 139608 - DNA, 297 bp, Zea Mays
cgactagttagatggcgttggttaagctcgtagttacgatgaattacttgttgtggtctaaatgcgtatggttatggtcgtaggtaaaaattagtagtgctcatgtggtgtctaagttaaaatgcggactagtgggtgaaaagcgcttcgatataaatatatgccggatttgatgattgtggtgaatgcgtttgttaaatgaatgtggtaatattagtgcactaattgatttggataaaatttgtaagtctacttgttagtcctcatttaattaatttaactctaagaaatggtaaa

SEQ ID NO: 139609 - DNA, 616 bp, Zea Mays
tacgtgtcatttctcatccgcggacttgctcttcccatctctccttttttctgcggtctccttgatttctatgatttgaatctgacacacttaaaccctaactccattcttcaagttgccattttcgtacatctgtgcgaggcttttcttgtaattctcccccatttcggactctggaggtacctctatcactgtcggcccgggatggctggagggcagcattagctcgtcggcggcgcaagtttagaacttcgctgggggaggaaagtaaagtacctcgtcatcccccttaaggacagcattaagggatggcgccgcgagtggttcaccatggagaatcacgacaaatccctcccccctcggtcaggaaggcaaccagacgttcgcatgcctggctgggtggagtctcccacttattcagaggtagctgaagccaaagtgctgctcgctgaaatctgctcattgaaggataggggtctgactgctgaggccgtggtcgctgactttgtcttcaagtatattcaacctttgaaggacatagtttaccctgcttacttgtataccggcatcaatgattccacccgagtcacaaatgggcagattcccaatgaggact

SEQ ID NO: 139610 - DNA, 326 bp, Zea Mays
gttccgtgaacccaacgccggcgatctcccgccatgattcgcactcacctgagaggttcgtgcccagtggagagtggaaaactttggataggttcactgctttgcggattgagccaggggggtaaaacatctggccggcgtgcgacactcgcttgagtactccatgccgcggtgtcattggcgaccgagttgtccctcattgtgtctccttattacgtggtgtccaagcgcttgtgtcgtactctcatggccgtagatacctagccatgccattgttcctttaagaccccatcgagagtgacggtgttgagcttagtgccttccgg

SEQ ID NO: 139611 - DNA, 465 bp, Zea Mays
ggaactggatggcttgcattggatcgagcaatgaattcgtaacaaccgaagttgttgtgatactgctccttgccggtagccttcgtctcatacaaaagttcatgcatgttgcaaaaacaccttgtgcttagttccaatccttggcttctcacagcccaaataaacaatcccatcctgattatagcttcaggggtaagttgatgaagaaagatctgaaacgtcttcagtacttcaaccaagaatctgctcaacgggaaccgaagccctgctttcaaaaagcttcggtaaataaccacctcatttacttcaggagtaggagcagcgttatctcctccaaccctcacaatagtcatgtcgtggaagtatctccctctcatagcatcaacatgactttgtttgatagtcgattttccgaacatggtatggcttggtcgccacgatcgatcttcagaatcttcgtctcca

SEQ ID NO: 139612 - DNA, 362 bp, Zea Mays
gaaaagcacaaggactcttatgcaagtttctagggccgaaggggtatcttcaaatcgaagccctacgatcgcagatggacgtggcagattagctccgagccacggtgaatcggtatccgaacacaaccatccgatctgcagcgaacgtcctagatttaaagcaaccagatccaatcgcgcacgcccgatcacaaacggacgcctcagatcgatcctacgaaccggtacacacgcgatctaatcggagccgcacctggaggatcccacggtcagccataactccccccaatacccactcccgactgtcggacctgagcggcgccgccacgattccacggtggcgcgcacaccggagtttcccc

SEQ ID NO: 139613 - DNA, 1187 bp, Zea Mays
tctcttctcaggtccttgattggacctttcacctccaaacccctttgattttccatgtcctgcatttttggcttccactgccagtgctatacttacagccttactgcaggtgaggtccaagcatgttgccattttctgctgaagcctgtcattgagccccctcataaaacaattctttttctttatgtcagtatccacctggtcaatgcatactgagagaggtggttgaatttgttgagatactgcatcaccgtatctcctccttgcctaatccggataaactcttctagcttcatctggagtactccctctagaacataatgctctcggaatgccaacttgatctcatcccaggtaatctgatgtccaactggctggattgctgagaaatttgcccaccaagtactggcaggccctcttagctgttgtgcgacgaacaggggcttttgcgtctctatgcatcgaattaacccaaacttctgttccgtcactcttacccattcatcgacttctaaaggttcctcttctttaatgaaaagcggtggtcgagtctcagagaattccaaataagtagtatcacacggtccttgtgggggaactctgcctctgtggggttggaattggttgctcgccattttgcgcaaaaagcacgtattatcagcggtggcattgacccgggcagcaatagcctcggccaaaattggtagtactggtggcgggttaggaatatcctccccaccatgggatgtccccgcaccatcatgtgcgcgagtccgtgatggcatctgaggcaaagaaacatttgaaaaaatataacatgccaacatacaccatcatattacattactgaaatgtaataattatacatactccagtgtacaacttgactttattacttattttacataagtataatacctaaattatactactctagttttcttcatcctttgtagcaaaatttcctgctgcaggagaccgttcgtcagcaaggttcatggaaggagggggcctaaaaaggtgtagctccccatcaggtccttcattagttgttcccgatggtccggctcccattgcagcgacgtctggtggcacgtccgggtgcagccgttcatacactacatgcacttcttcatgtaaggtattatagtatgcttgcatgttctcgagagatccactaatttctg

SEQ ID NO: 139614 - DNA, 631 bp, Zea Mays
ctatggtggctaatcagaggcaggagcgggtgctctggcttcgtgattacctagcggagctcacggcatgctcaatttatagggcccaagggtggtggctcttgaatttggaatggcgcgctggcgaccgaagaggaagaaggtcactggtggctcaatcgtggcgttcaccggtgcagcggttcagagattgtaatcctaggtgtgccacggttactaccgcgcagtaacgagtcacatcgtggcataactgaggtcaccgaagtctccacaacgacaccggcggtccggccacgtcgcacggctacaggcgcggttgataagcttcaccccgcgacccaatccgctccccttttgatcttttcaccctcccggcactatcctgcccgagtctagcacgaatcgccgcgatcagcgcgaatccttgcgcaaaggtcaccgacggcgaggggactgaacctgaatatcttttgcgcactgttccatcagaacaccattcagaatacctgacagagcttatttgggggtgatttgctccaaatttcgagtagaaagttgaccattcatttgtatcaaagttgtagctctataatccagctacaaatcgactatagagacctggctcatttac

SEQ ID NO: 139615 - DNA, 302 bp, Zea Mays
cgttaggcaaagtaaactttagaatattcaatttagaaatcaaatcatttaactcaacatcacatgaaccatcatgagagaaagtgtttgcaaatttagtgcaacacacttcaagttctctatcgtttagtgaccttagtgtgcttgagctcaataaaaacccagatatacctttaaacatggagagttcttcaaatctggtcctcgaagaagtgctcgccatgtaaactaataccaaaaaatagttgacttcaaaagctctctcattttctagaatttcttcgtggcacctactttcatcc

SEQ ID NO: 139616 - DNA, 535 bp, Zea Mays
ggcggcctctgttagcgtccggttagggtttggtatgatgtaacctccgctgctttgtcagcctatataaatacacatccgcggctgcccaagggcagtagagaacgcttcctaattccttcagtagtatctcctttcttgggaagctacctataaccgacccaccttggccagtcagaacatgaagagcgcgcggatgtatagaagagatgcacacgagacggcgaacacacactctcgatgagaccagaagactcagaggccgaagccaacgcgcgagccaccgcgacatccaaggcttagcttagaactccagacccttagtcatcttcaggtccacccacgtataagagacttgtgagctcctccctcttgcccgtttgcgacccctagtacgagctttgagtaacaaggtgtcggtagcgcgagctgccaaagactggatgtaggaatgttctccccaaactagtataaattttgcgtccaccaagcacatcatccgggccatagaacacacatacaaatttaattgtcg

SEQ ID NO: 139617 - DNA, 517 bp, Zea Mays
ggtttgtttacgcagtgccaggcgattgctgcgaagctttcataggggtgtgcggactgattcatacggaggaccgacttatgtttttctgattattatgcacatcggatgtttaaatactaattataagtattaactatagtctagttataaatctaattaaaaagtaaaccggatttattaaacataattaatatatgattatcaaatgtgtagtatcacacgagtgaatcatgtattactagtcaatacctatgtgtggcagtacataaatcggagatattaaaacctgactccttttcgagctctccccgcgcttcacgggttctcgacgctgctcctcgcgacacgtgcgctcatttgcggacgcgaaaatttgtctaccgcggacgcagagttttcagccaagtttctaaccagtctctctctcgcctttcctctctcagtctctccccgattccttccccacacggctgcttcgctcgttcccctctcgctcctcgtcgcacacgcacga

SEQ ID NO: 139618 - DNA, 407 bp, Zea Mays
gattaggctaaggtggaggcaatacatagctgggcagtccctaccacggtcatgcaagttcaaagctttctcgggcttgctgggttctatcgtcgatttgtgaaagatttcaataccattgcagggccgctacacgagcttacaaagaagcgtgctccatttgcttggggcaaggcgcaagaggttgcatttgagactttgaaggataagttaactcatacaccccttctccaattacctgatttcagtcagacttctgaattggaatgtgatgctagtggtattggtttgggtggtgtcttgttgcaagaagggaagcttgttgcttattttagtgagaaactgaatggacctagtttgaactattccacttatgataaagaattatatgctttagttcgaacttt

SEQ ID NO: 139619 - DNA, 407 bp, Zea Mays
cgtgcgccctgcacacctcacgtgcgggcccagctaccagccatcccactgctccgcgcgaaagccgtcgagctcctcctccctgcgcgcatggcgggcatgccattgccaactaaccgccgcgtttaccggggaatcgggtagagatttgcccccctcgacctgggtataaggcccttgggcgcatccgctacccctacctatccccacgtgagcagtgtcgagatcggtacaaccggagagaataggttcggagatcgccgccatggccgacattgtctacactctcagccaaccagtgcctgggcctcggttggtcgttgtggggtacccacggcggaatccgcgcgtcttcatggccttgttggatttgatcggtgaccaggtcgccctgatttccttcccgg

SEQ ID NO: 139620 - DNA, 454 bp, Zea Mays
actgaactttacagagtctcacttctgagttgcgggtctttcggactgccgagtcaagaatctttactggcttttctcggtactgaagatccttctgaatctatattgcctcttcttcgatgtgattttctagtacttgcaggaatttgcggagctgggacacgtgaaacacattgtggatatctgacatggattctggcaattcgaggcagtatgctgtgggtcctactctgccaatgataggataggggccaacgaaccgcagagctagcttcccttttacttgaaatcttttgactccgcgcattgaggagaccttgaggtagacgaagtctccttcctcaaatccgagttctctccacctgttgtctccataatttttctgccgattctgagcttcaagtaatcttttgcggatcaggacaactttctcttctgcctctttaacaaaggc

SEQ ID NO: 139621 - DNA, 513 bp, Zea Mays
cgagtatccagctttgatcaggacgttggtacctcggttcctgctactgaagaaatgcctgcgactggacttattgatgctgaccccaatgggtgtacccaatcggctgctgatcccaatgtgggtgctccacctgctgctgatcccaatgggggtgctgcttgtgttgccaatgtggatgatgatgaggaagaaaatgaagctcctttgactcggaaaaacagtcggcaattcatcgccagcggtggaagtagtggagttccctctcctgctttgtctgccctcattggtctgcaagaactatccccagccaactttgatcaaactcttgaagatatggtcccagaagacttgttatcggagccagtggatgatggttcaatggaggcttgcgttgacgtgcctgatgctgggttgaggtcatcccatgcctcgtcgaccttagagcgcgatctcgagggtcgggaagctggcttggactgtcctggtcctatggaagtagctgagggcccg

SEQ ID NO: 139622 - DNA, 652 bp, Zea Mays
gcggaaaaagggagagatgggaagagcaagcccgcgaatgaggaaaggaatgtaaacgacagattcatgggtatcctctgtcggaactgtgacaccgcggcaaatccgccaagagcagagctcttttggaagcgaaaccccaacttcaacgagatgaaggaggtcggattcagaaatgatagacatatggttaccagcgaatggcagctggctgttggggtagatgggcgggatgattgcagcaacggtgctgtgcctcttccgctttggcgccatcgcgatcttctggcagaacgagcaggatcgaaatcttagggaaacagaggagtggttcgaagggaaaaggtgaagttagggctcagaaatcaaaaaagcgcgtcgacgcgagtataaatggagtttcccgggtcgggcactatttctaaagtgtcaagtcactactcgggaaagcaaagtttcaggcatcactcggcggttacctctaaaatgccggttgtatcaggcatatgggcgaactatcaagcgcgtaaacagaacaagcagcaaaagacaacaatcacttggagcaactaaagttcttcattaatattggagggggttacacaaactcaaaagctgactcattatgagtcgacctttcccccctttttta

SEQ ID NO: 139623 - DNA, 637 bp, Zea Mays
aagccgttggcgatctgagccagggctccaccaacttcactcggcgtgttcaatgctcgagtgaaatcgggtagcaggttctaagggagaagcgggttcttgtgtcggagcctggcgtcttgttctgcttgttcccgctcgtgctcctcagcgtggcgaatatcacggcgtcgggaattgcggcgctcacagagcactctgtcattaggggtttcaacgacttcagaggctttgtctcgggagtcgggttgagcaggatcccgttcctcggcctcgtggtgacgctggatgttacaccgcctattccgatgttgacgtgcctcacgctttgggggcacctccctccgtacagtgggctcatcatcggagacgggtgcatcctctattcttccctggataaacagtacattcaggaagaaatagcttggtgtggcgttttgtgctctagccatctcccttgagagggagcagtcagaacaatcatcgttcatgttcccacagctacatcagtggcggggttacccgcttctttttgcccagtgatctgagtccatgctcgagtgagtgacgtggacaaaagggtctgtcgcggtagaggtgcagcctcagccgaccgagtcataggtgtcacaatggt

SEQ ID NO: 139624 - DNA, 361 bp, Zea Mays
tcctgccccactagaatcatcacccacaccctcttcagcgacgagacaatgcagttaggccattcttaatgcacaattttcagttttcaagataccatgttaacatttgtctagaaaatagtgtatatcgagtttcatctctatgaaactctctcatctcccataaaactctctcatatcattgcatgtcatgtcaccctgcttgcctatgtggcatgtcatttaattagaatgaaactctcatgaaatacccaccgtgaccttatagtcggagaggatgcacacgaagccttgagcatttggttatatagatagtgtcatcttcacaggccacggtgccaggcacgtagcacgcttcaac

SEQ ID NO: 139625 - DNA, 509 bp, Zea Mays
ctttagtatttttcatttgttgttttattgtattgcactcttattgttattcatgaaaaaaattcataagagtttcccttgttttagtaataaccacaatcataataatcacatccaatatgatatcagcatatatatcaccaaatagcatatcacacaaccagataatatcacacatagtccataacatcaatagttcatagcacaaataatccaaatcatagtatgtagcacaaatagtccaaatcacagttcgtagcacaaatagtccaaatcacagttcgtagcagaaaaagtccaaatcacagtccaaatcataagacatgtagaacctcactttctcctagtcttgcccttgaccccaagagcgtcggtgactagactataagggttacgtagccgacgtcgtatggatggagtaggttgtgatgactttgccgaagcagcatcctataactaggatagtccaatcatgtcgtgaggaacctcaatgtcatccttgtccccct

SEQ ID NO: 139626 - DNA, 346 bp, Zea Mays
tgctgcatactagacaatgcaaaagccctttgaccagcgaagccctttgatcagcatgccatgtcgtcgatcctgctccgtatgattgcccacaaaaggcatccgatgcgcttcccacatccagcttggcatgcaaaagaggagcgcggaattattccgatcaatttatttacaacggtagcacagcacagtataggcatcacgcagtatagccactgcgccatactaggtcaaaactcatatgccgctcttggttgtagtagtacgtatagttatggagcatagcatggggcaaactaattggagcactaacgcgcaagcatcatttttctattacaaggaaaac

SEQ ID NO: 139627 - DNA, 361 bp, Zea Mays
gggagggtgaggttgtccgcaactgtcctcttccctatcgttgttcctgttcagtgtcactttgctgctgcatcgctcgtccctatgcttgtctctacgccctacaactctacatgcttgtataggaccgcgccagatgtggtgggctgcaagtctgcccccttgccctcgaaacccgcgcacgacattgttttttatagtgaaaatggtaatataggtgatgaaaagtacgagaaataatattttatggttgtagtggtgtatagaggaaaattttaagggaatccgctgcgggagagggaaaagcaaggaatgaaatcttaatgatgtggcacaaaagtgatatatagagaaaaaaatt

SEQ ID NO: 139628 - DNA, 300 bp, Zea Mays
gtgatcaacaaggcactaatgtgctacgtgcaatcactgtaacaacagtttgaggtaagtagtagagttcgtttgaagctaatcatgtgccgtaggattcatccaccaaccaaaagtcctacgaatttcactcttttttggcctcacatcctccttatcaagcctgcgaccatgagctcgctcgactttagcaacctacctaccctcgtgcaagaagttgtaagtctaaactttccctttctgagcatgtcctataatggatcaatacatgtagctgcttacacgtacacacggtgcccc

SEQ ID NO: 139629 - DNA, 338 bp, Zea Mays
ggaaatgcgtcaggaaagagaggatgcacgtcgggagatgcgccaagagcgagaggagatacgtcaagaaagaagggcgcaacagcaacaacaacaagcgccactgcctccacctccaccaccagttccacctcgggacaagcaccgagaattcatgagccacaaaccaccaaccttctccaactccgcggatccgctgcaagcagatgactggctaaagtctgtagaaaagatgctcaacatagctcagtgctcgaacagagagaaagtactctacgcatcaggtcgtcttgctggtcccgctgcggattggtgggatgcgtactgtgctgctcatg

SEQ ID NO: 139630 - DNA, 467 bp, Zea Mays
acgaaggggacctcgtactcgtaagaaccacccggacagagtcacggggcaagctagagccgaagtgggaaggtccattcatagtcaatacgaaggcatcccccagtgcttacaggttggcaacatcatccggcgaagacttagaacattcctagaacatcgataatctctggaatttttttgtttaagtcccaaggcctacgcgcctttgtaattctacaaacaatgttgtttaggcccgcactcttttcctcccgagggtgaggtttttaacgaggtagagccatgtaatataccagtgaaaagcccccgcaaaaaaatttcaagaatcaccatgtcgaaaaagaccgctccgacggcctttggcattcgaccgattcaaagtcactgcgacagatagcgtagactaccctcgcgtgcgacaaaatccacgcaaaagtcgcctaagggtgcagccggacaagcac

SEQ ID NO: 139631 - DNA, 673 bp, Zea Mays
tgttctggccctgcgccgcgtgtcctaaccgcgccaccacatcaccgtgactccctctagcttcccgtcgaccaccggaactaccgccacggtagaagccacctagcgcttgcgccagtgccttcttctacctccgaccgccacgcgtctcgcccgattcaccggccactgatgaagccgcctataaattaagcccgtgaccagctccacagggtcatcagctaaccagccaccactaatcagccatgatcgttcgccagagctcgagaatttcttgtttcccccaaactagtttccaccactgcaaaactcacctcaccgcgaccagccctttctaggtcagttcatccctcactctcctttgtttgagcactcttgtcgctctgtgatgcttgtcgaaccgccaatttgtacggaatagctctagatcaccgggaacgcactcatctgtccgccacccattcggttcacgcggacagagcttaataggttgccatttgtgcaattaggttgggggaaatactcggggtaggtccgatttgatgtccgccgctcgggagcgccagtcatagccccattcggtcggtacagacgctcgccggagctcggccgtgcatgaacgccgtcggggacctcccactgcgaagaaacagaaaccgggggtctcttttgc

SEQ ID NO: 139632 - DNA, 272 bp, Zea Mays
gacgagcgctgggacttgacatagggaccagagaagccgagtgactagccttgatggttgacccttagaacacacaccgacacaaggacgtggcagtgtggatcatgtcaccagtgcggtcatggactggcagggcagatgtctaggacgtggggactcgtatgtggtatgttactcacgaaggtttcaatgattgagcctcaaaatcacctagctctacggatggcgtgctccactgagtttaggcctcaaaactcggtggtgcggttccg

SEQ ID NO: 139633 - DNA, 371 bp, Zea Mays
cggtgaggtctttgagtgcaacccccaaggctaggagtgtccgggggaaggtaatgttaatgctacttcccccgtccactattactttctttaccctgctctctcgaatcaccggatcaacgaggagtaggtacttgctggggtggtcgaagttgagccactgattcgtccggctgaaggttatcacgtgctctgaccaccgataaggagctggggcaatggtggttgccgccaggacctgtcggtcattgagcttctgctgccttctattctcctgcgacccatgtcctccaatgatgacgttgacctccctgtcaacgtgtgggaatgctccactccttcccccttctagttgctgaggctgcctaggc

SEQ ID NO: 139634 - DNA, 451 bp, Zea Mays
gaatcaacaattatgagtggtcaagaacacgaactacatcagtgatattgactcgatcagacttgggggagaagacactacaccctcgctaaaggaagatgaggtggtgattttccaaagctttctcaaggctaggctttgattctcgctacacaagatgatagcggggtataaaagaggtttgatatatatatctccatcagctacccccaacgcaacaatgaggcttgaggtttttatttgggctgtgtgaagccagggcatacagccaaatgcagaatgcttttgccaaatccactagatgcattaccaggcaaaagcgtctcatattaacatttataaattttaatataattaatgatgcttcatctattttattcatagaccactttgcagcaaatggagataaacattagtttccccatgttccagatgttgccaccaccgcaat

SEQ ID NO: 139635 - DNA, 302 bp, Zea Mays
cccttggggcacatgatgttctcggaaagcagtttcaaattctgcccaggtagcatctctgacggcagtgctgaaggtatcccaccatgatagggccatctcggaaagttgatgagcaaccaattgaacacgctgattctcagggcatccaatggcttctaacttcctttttatcgtgtgcaaccagtcattagcatcgaggggattgctggatccagcgaatgtgggaggcttgagccttagaaaatctcccatcctgtcttgtggtcttccaccattcgggcgctgattctccagacttc

SEQ ID NO: 139636 - DNA, 581 bp, Zea Mays
taaaggagtagcatgataaacattaacattaacacctagagcacgatgacacgaatccaatgctagtcgaatcacccataacggacttaaaatgaataaactatgaattaaacaagatttcctattcaaaagtaattagagtttaaacctaattatgaatttcaaattaagcggtggtgaactcaccggaaaaattccgatctcctgctgccgctcactaatcactgccggatctagactaggagcgagaggaaggctagggctctttacctgactagataagcacgacgcggaagacttgttgagacctgaagacagcatacagcgaaaatctggcactgtaaactggaagaggaccaaccagtgcccaaaatttccgattacccgcgggaaaaactccatgagattcttgtgcaactcgcgaaccggctcacaagagtagcaacgctctgatctcggcgagattcggtggcgggtgaaactcacggtagctcgcggattcaatgaacaaagcacggaaacaagagctagcactagatacgagttgcgtaaggtgatgcgggggggcctggtcctcattt

SEQ ID NO: 139637 - DNA, 365 bp, Zea Mays
atggtagatgtgggtggcagcaaggctgaggttgtcggtggaaggttggttgaggtggatcggagtggagcggctgtggtggtgatcggcgctgatggttatgggtggcgcgacggggtttgacaagggaggtatcccaccataacctggcatgccatatgggatggaagtagggctggtggatgctgggggcggtggtggtgttggcggcctactgatcatttgagtgatggcggtggtgagatcggcaagggccttcgtcatggtgtcgatcttttgctctagcgccgcgttggcagaattggtcgcgacagcagatgcgacatcgctggtgttgtcgtcgttgcctagcatctctgatacca

SEQ ID NO: 139638 - DNA, 684 bp, Zea Mays
caatcatgacaaaaaagcaagtgtggatgatctgatcggaccatatcagttcggacctacaggagggggcaacttcggaagaccataactcttagctctgaatattatttgaagcccatgagtacttgttggaaagctcctgaagtctactttcagaaggattcaacctcaagacgaaatttcaaagaagttaagcagaattgccaaaatgacgttcagtcttccagtcttgggctaagacctagtcttgggttgaggcccttgtatctagttcagaccactaggggcccattccaagttacacccctccatgacgcttggttgctcccccacctatataaaccaccaggagccaccatttgagacttgggttttgtttgcttgtaagtttagttgctgctacttccttgcaaacgcgtgtgtcaattagaccacccgatttgctcgattcagaaacccaacttcatgtgtatcagatttctcctttgggcaaggtctatgtgctgtttgcttgtccacttgttcttgcttgttcttcgatttgcttgcaggttcaaagttgttcttggcacagtaagaacaacacaaattggaggcggtgtaactgtcgttaaggcgcagcgcagcccttgtggtgttgtagtcgggcagcacaacgtcgatcctcctcaaatcgcgttatcc

SEQ ID NO: 139639 - DNA, 297 bp, Zea Mays
ccaacttctgctgcgcacaaaactgcagcctccataaatgcgcctggaaacagcagcacgcaataggagaccgaacagcaaaaagtgccagcagaccacacacacctgttcttcactaatcacccaaaagaacccttgacctaaaaattccagcaccaggaaccaaagcctcaagatgcctagcaccggcaagcctccagaattcaacttcatccaaaaaattgcctttatgccaataattgaaggactgacaccatcaaaaaccaccttattacgatgaagccataaacaccaagc

SEQ ID NO: 139640 - DNA, 524 bp, Zea Mays
gctgaccccaatgggtgtactgtccgtgttgttgatgagggtgaggaggaggaggatgaaatccctctaactcggaagaacagccgacgctatattgccagtggcgaaagtagtggtgttccttctccagccctgtccgctcttgttggtctacaagaattgtctctagccaactttgatcagactcttgaggatatggtcccagaagacctgttgtctgagccagcagatggtggcatgatggacgtttgcgctgatgtgcctgatgctgggttggagttgtcccgggcggtgtcccgcacctcatcgaccttggagcgcagtcttaagggtcaggaggttggcctggcttgcactgttcctatggaagtggttgaaggtccttcagccttagaggtggctgcctcggagggctcgaccctcaaagatagcattggtgcttacccagcccccgagggtgttgccggggatgatccggctcggatgggtagcgcgagcgatgacccagcccccgagggtgtccg

SEQ ID NO: 139641 - DNA, 305 bp, Zea Mays
tagatttcagagaaatcagtgtaaaatattgtttaaacactttataatattaatgccaccgatgcaagatgatgctgatcccgatgaacgtgaaagctggcttcgctcctgcataaaaaccaaacaggctcctagaacagtaaggcgatgatcaaatgaatgtaatgcacactaatgctagcttcacctgcaggtcatcgttctctagatttttttccctctcccttgatcataagctcctttggtaccctgaatgcaagccatgagttcagcatgcatatcatttatagaatgctcaattctgc

SEQ ID NO: 139642 - DNA, 538 bp, Zea Mays
gggggcgccgcgctggccgggcacctgggcgggcaaggccgcgagaggagaggggctggacgcactctggggtgctgcggagcggcgacaacgtaacagcgaggtcagttcagcctggagcgcgcgcgcagctttgcaggggctcggacgaggaacgagcgggggctttgggcgccagcactcggcaccaggggctgccatggctgaagtgtagaggaagaagaaaagcctgtagaagaggggagaaggagatgatttgtcacctgcgcatgaagaacaacggagcaggcacgcaaggaagagggtgacgacggggctgctcctctagcgacacgaggaagatgacgaggcggctcctccaaccatggcgacacaacacatagaggagaaagggcgtaggttgctgctgtgcgagaaggaagagggagggggtgaggttgctgtgcgcagacggttttgcgcgaatccgagaaaaatgggatgaggcgcgtgcatcgtgtgggagcagagggaaagttggggaagagagagatggcag

SEQ ID NO: 139643 - DNA, 848 bp, Zea Mays
ttcgtgcacctcacttctgcatgtgcatgctcccgttctgggcgccagcgccatgttctgttcaatctgggtcggattctgcttgatgcggttccggtgagtccgtgcatgtgccgtgcccgttggcggctatgggaaatcgcttcttcctggattcgtcattaatcgattctcggtctgcagggatacattgatgctcgtttaattcctcgttttcacagcaaacgtttaaattgcggcatttgaaggtgctaagaaaatgcagtttgtgaatgcctcgtcattattcctaactcatgatcgataagcggggttgccccacagtatttgctttttgggtacgcctggccttatccttttgtacatttctgggaggaaggaaaccgcacttttggttacctggttgtgcatgctttgtgccttttttggtaatgctgggttttgcagtgtaatgccatgccatttctcgaagcttgtaccgttccctgatggaaggggaaaaaatgatgtccagtgctgctgcttgttggtgttggagatttgtagtctcattcggtctgtcttcacccctgagctccccattagtgtggattttggagccatgacagaaggtggtagaaaaagctagatttggcttgtgcgcattgcatgattgttgtattgtctgataggttgtttggaatggatgataaaaaatgatcgagtgcattcttcaggtatgtagctggattgcatttttagtgcttagttgcatccaggaaattctggtgattgtttggatccctactaaaactttgcatgtacacatgtcttgtgaactgaggaatcgtagctgtattacattatcc

SEQ ID NO: 139644 - DNA, 495 bp, Zea Mays
tgacaccaaaccggtgagtcagaagcctcggagacagtccgttgagcggcaggacttcatctgaaaggaggtccggaagctgctggacgtcggcttcatcgaagaggttcatcacccagtgtggctggccaatccagtcatcgttccaaaggcaaacgggaagcttcggatgtgcatcgactacaccagccttaataaagcttgtcccaaggacccgtatccacttccacgtatagatcaaatcgtggattctacctccgggtgcgacctcttgtccttcttagatgcttactctggtttccatcaaatctagatgtctagggaagataggaagcataccgcttttgtaacagaggatgggctttactgctatgtcgtaatgccttacggtctgaaaaacaccttgccgacatttgtgtgggcgatgagtaagactttcggagacctgattagggacaaggtggaagtgtacgtcgatgacatcgtagtcaagac

SEQ ID NO: 139645 - DNA, 393 bp, Zea Mays
gcgaaaacgagtgaaatgggaatgaacaccagaaggatccagcgcgagaacgcgaggatcggccaaggatcgttgaatctgataccactgttaacaactcggtatggatacaaggtagaagtagaagagaacagcaattaagagtagcagaggacgattaggagtagcagagggtaaagaggaagaagagtggcagcggacgagcagtagaacttggagaagaagttgtagtgaataattcttacatgcccttcaccaggcaactctcgttctacttattcgcaaagcgagcacagctgcagcccattcacccaatccggcccatacacctttgtagatttcttggtcggcctgctaacccgttgtgccacaatggtcctagtagcagaagat

SEQ ID NO: 139646 - DNA, 511 bp, Zea Mays
cacgacatctcaggaggcggatgagctggcgatattagttgcaccacttttcggtccggtttagttagcctttgcctttgcacatatcacctcttggactttggttgttttattgtctggttgtgctaaacggccttctccttcatatatttggagagcagctgatcaaaagttggactgacactaacgagtcggtcagatgcttagatgagatgtattttgtttgtacgttcttaattacttctggatctcgtgacctggaggtatgagatcgctgctgcttttggttgtctgtagaccgttcggccttcatagtcagactgtatgcatctgttccgggctgttcggccttagggcccgaaccgtccgacgtacgcgcatgatagggtattcaatcgtgcttgcccccatcgcctttgatcttattaacctttcttttgtctggagccttttaagtaaccactctgcgtgatagatttggtgtgcgagggtcactaatggtaatattttt

SEQ ID NO: 139647 - DNA, 439 bp, Zea Mays
actatatgataatctatcggatgtgcataatgtattccatttgtctcaacttaagaagtgtctccgtgtccctgaggaacaattaccaatggaagagctcagtgttcagggtgatctaacatacacggagtatccagtcaagattcttgatacattgactcaaattacaagaaataaggtgataaagatatgcaaagtgcaatggagtcaccatggagaagatgaagccacttgggagcgagaagaagagcttcacatagattttccccatcttttccctagaccttcttaaatctcgaggacaagattcttgttaagggggtaggatttgtgatactcaaaagtgtaataaagagaatagagataatctcaatagtttgtggcctctactattcattacatgtgatcaaccttagttaaaagtggaacaagaacaagg

SEQ ID NO: 139648 - DNA, 578 bp, Zea Mays
cgagcccttcatccatcttgcacaaccgagcgaaccgaggagggagagagagaagatgccgcaagggagaaaaggttgggaggtgctcgcgaggctgccattgaatcgagcttagaagccccgtcgcgtcctaaggatagtatttgggctcggtggaggaccatggcgccgacaatggctcgtcgggggtagcgactatctccggtccgcaagaactcggcgacggaattccctgtttcactgctgaaggtaacgtgccttccctgaagttcgcggtcgcctgcgctctgtgtatcatcatttgggaggggagttagggcaatggatccctgggtcacttcgcgctggctatggcgccgttggggtggacgttgtgtgccactgctgctctggtcgagggaagaagaagagggcgaggccgtcgatctagaattccccggccctggttagggctgggagttcgaagggcgctacaccgttgatcgactgctctgcggttaagattagatcttcaggaaacgattcagtcggtcgatttttcaaaagagccctcctggaattttaaaaccaacccgcag

SEQ ID NO: 139649 - DNA, 560 bp, Zea Mays
tatacatgcatcatgctaagcactatactaataacatttttccccttaaaaagatgccgccacgcacaaggctaacggcacgcaagtctacgggaccaattggggtgcctcggcatcaattggctcccctgcatgaaagcagcagcagtggaagtaaagaccccatcggagaccttgaagcccgagtgagtcgacttcaagcagcgctgcaacacaggaccgatgcttgggtcgccgacggagatagaatcaatgaactgagaagggacatccgacatctgcaggatcagctcactgatcgagacctagcacttgactgggccgtacagtctcgtttgctaatgtgtgctaaggaagcaagggctcaggcccgaattaaagaacttaacacaactgtcgacaacctgcaggtttactgcaatacgttgcatgaggaagtccatatactatactcacaattacaccctagtgagcctgcacaccctgctgaggcggaagccggaccatctcacgttgcgggacacgcgctaggtggggagttagacctttttgagccccct

SEQ ID NO: 139650 - DNA, 422 bp, Zea Mays
accgaggtgttcccggtgattgggtgcggtctagctcaattgatcaggtcgacaagcatgccaagcgtgcctaagtgctaaaacaagggtgaggagggcgagaacggacctggagactgcggtccacgacgcggtggctcatggcagcgtagagaaccgaattgggggaagaaaggaattgaggcgctacggtggttaatcggaggcgagggctggtgctctggcttcgtaacaacctagcgaagctcactgtggcatcaatttatagagtgcgatcaggaatacgacgaatttaggcggggaaggacaggcagtgagaaaggggaggagtcaccggatctatctatcgtggcattcaccggggcactatcataggcgatggatatactacctacggcggtctactgcgacgtggtaacacc

SEQ ID NO: 139651 - DNA, 577 bp, Zea Mays
tgaagctacatatttggaattctctgagactcgaccctcgctcttcatcaaagtagaagaacctctagaagccgatgagtgggtaagagtgatggaacagaagtttgggttgattcgatgcacggagacacaaaagtctttgtttgctgcacaacaactaagagggcctgccagcacttggtgggcaaatttttcagcaatccaaccagctgggcatcagattacctgggaagaattcaagctagcattctaggagcattatgtttcagagggagtgctccatatgaaacaagaagagtttatcctgttaaagcaatggggagatactgtaatgcagtatctcaacaaattcaaccatctctcccagtatgccattgaccaagtgaatacagatctgaagaaaaagaattgttttatgaggggactcaatgacatgcttcaacggaaaatggcaacatgcttggaccttacctacaatagggatgtcagtacaacactagtagtggaagctaaaactgcaggacatggaaaatcaaaggggtttggaggtgaaaggtcaaatcaaggacttgagaag

SEQ ID NO: 139652 - DNA, 950 bp, Zea Mays
atattggctgtttatgttgatgatattgtgatcactggagatgatgtggaagagatcaagtggttgaaggagaagctagggaaagcatttgagataaaggatctgggactacttcagtatttccttggaattgaaattgctcgatcatcgaagggaattgttctctcccaacgaaagtatgacctcgacttgttgacagaaactggaatgttggggtgtcgtccatgttgctctcctattgataaaaatcatcaaatccatgccgagttaggggatcctgtcaatagagatacatatcaaagattggttgggtgattgatctatttatgccacacaagacctgatatatgctatgcagtaagtgtggtgagcaggtatatgcatgatcctaggataggacatatggatgttgtttatcgcatcttgagatacttgaagggaactcctgggaaaggattgtggtttaaaaggaacaagcacatgaacttggaagggtattgtgatgccgattgggcaagtagtagagatgaccgaagatctacatctagatattgtgtgtttgttggaggtaatcttgtctcatggcgaagcaagaagcaagcagtggtggctagatcaactgcagaagctgaatatagggcaatggcattaagcatatgtgagatgatgtggttgaagtgtctattaggggagttgaaagtgttgaggaatggaactatgagactccactgtgacaatgttgctgcaataaatattgcaaacaatccagttcagtttgagcgcactaagcatgtggagattgacaagttctttatcaaggagaagacatatagtggggtattaagattagagcatatctattcttgtaatcaattagctgattgccttacgaaaggtttaggcccaagtgagaacgggtcaatatgtaataagatgggcatggttgatat

SEQ ID NO: 139653 - DNA, 629 bp, Zea Mays
gagaattacagaagaaggtccaaggctttgatgcagtctatcatgattgtgcatgtgaacaaggccactcatagcaccgttcagcaacttaagaacaaagtatctccttaactccaatttgtatgctcgatcgaaagggttccagaatggcgtccctccagatttttccttcaattgccttgcactagttacatttgcatagtctgcagcactatatctcccgtcatcacggaaggcgagccactgtcataaagctaagtcagtcttgcatgcattctgtggggagcctggcaacgaggtagttatgagtaatatacctgttctccagttgctgtctcgaaggcccctaaaagaaactggatgttctcgcatatgtcactagcatcactctgtaaatagaggccaaggaatagttttgtgtgcgtaaatatcatgtgtaagataatagttcaggcttgcagtttctattagcagtttatggtttacgtaacctgaagaaacgcatgagtccttaactcattcagtgccatcaaatcagcttcagaagcatcagcacgggctccagggtatacctttgtttcaaatcctatgtcttagcatattaagactgttaatatattcatgtacct

SEQ ID NO: 139654 - DNA, 300 bp, Zea Mays
cggtgaggcactttccatcaagtttacttctcttctgctacggttagcgctcctcagataagtgcgggcatcctcggggcagggattggcttgcgcggcaatgggttgccgcaggtgttcgctgccgctgtccggcaaccagggaggaagaaaagccggtgccgttcgatctcaatggatggctcagattaaatatcaaatccccttttgctcgttttcgatcggaaccgtagatctacaaacggacggatcagtggtcgtctcgtatctttaaaatatctaccgtcagatttgaatctg

SEQ ID NO: 139655 - DNA, 525 bp, Zea Mays
cttggccatcctatagatagccttttctccctgctttgtgtccaaccgttgataaaggtcgtcataggcttgaccctgggctctactaaccgctcgctttgcagacttcttcgctatcctgtacttctctatgttttctgcacacttgtcatgatgtaagcgtttgtagcaatctttcttctccttgatagccttttggacatcttcgttccaccaccaagtgtctttaacttcccttctgttttcttgactcaacccaaactcttctgaagctatctttcatatgcatatcgccatcttcctccacatgatatttgcgtctccctcttctgcccaagggccctcctcgataactctctccttgaaagtttgggccacatcccctttaagcttccaccactttgttctagtgaccttgttatgcttattccgttgtaaacgaatcttaaaacgaaagtcagctacgacaagcttatgttgggttaccacacactctccaggtataaccttgcaatctaagcaggc

SEQ ID NO: 139656 - DNA, 383 bp, Zea Mays
gggagatcatggagggagtgggcagtttggagggagatcgtgggggaatcctttgcgtgggcgtctaggagtgagcgggtgctcctgagatggctaagatcgacgatgaacaggagagcacgggacggagacggcgctagcaggaagagctagagggcgagggctcgctgggcagagaaagcaagggagactgaccctaaagccaagttgggtcagggtaagaagcgtgcggcctcctggcagctacttgggccgcaccaaagaaacacagcccacgcgacctatgtcgttgtcacggcttgcacatttttatgaccataccggccagccaacatagcttctactgccttataagccttccttcttcagagaaagcaatcgtg

SEQ ID NO: 139657 - DNA, 541 bp, Zea Mays
agtacgagatggaatacgagaatgaagcactcaagagatcatgattaatgagcttttatagacatgagagaattagagtcaacagcataatccattgaatcaaatggatccactgcttagagataaaatcgataaaacgtcatgatcctcggagaagggggtacgagaatgatcagaaatgagagatttaggcgagatcaacatccggtacttgagaacgggttatagcagataaccagataacggggcagaatcattaaaggattagagattcggatgataaagccaacatgattcacaagaaaaaggattaccagatccagacaaaaggagaggtaggcaaactggatcagctaggatgattaacagaaatgctatgaagttttaggagcaaggatttatggaaagaaacgtggccttgatagggtttgcgcaactagacaccaacaacaatttttttttgacacaagtgcacaaggagacttgggttggtctagcggtcaagttgtgggggtctataagctgtgcaggtgcatgtcag

SEQ ID NO: 139658 - DNA, 323 bp, Zea Mays
cgcaagcaatctccgggttttaatgccctatacttcgttccgagatgttctctacgcagaggaggatagggcgagcaagttgggtgacgaattaccgaaggtggggcggcgaggtcgtctgaccacagagcaggcgggttcacggatgagctgcaggtacggtgagaaatcgccgtcgatgggcaagcgattccacccccggaagtcggtccaacacacgcggcggggcccgctgatgcacccggggcagttcgccgcgactggaaagctggcctaggatgaagtctacggtggtggcgctacttcttctttctcgctccgtg

SEQ ID NO: 139659 - DNA, 499 bp, Zea Mays
agatccattaccaccccgggaaggccaacgtggtagcagacgctctcagccaaaaacctttcgggataaaggggaccaactttttagaagattggaagaaggaatcggctcagctaaatgcatgtctgggagacaacagtagcctggaagtcaagccaatgctagaagacctcatatgcaaggctcaacgcctagacgcggagacagcaagacttatggaaagagctcacaaggagcaacttccggaccttagggtagatgaacaaggagttctttggttcaagaaccgtctgtgtgtaccaatacgagaggcacgggaagtcctgctcaatgaagcccacaactcagcctactccatccacccaggaaccaccaagatgtacctagacctcaaagctagatactggtggagagggatgaaaaaggagatagcacagtatgtggcccggtgtgacacctgccagcgagcaaaggccgaacaccagaagcctgcaggcct

SEQ ID NO: 139660 - DNA, 468 bp, Zea Mays
cgcaagatagccgccgcattgttgaactgttagcggaagttaatcgcttgcaacaggaaattgtggaacgcgacacggccgttcactgggtcgtaaattcacgctctttcgtctgggattgtgaggccaaggctcttgcccgggtagcagaactaagcacatccttggaaaatctgcaagcgtattgtaacaccctacattaagaggtgcacatgttgtatgactggctgcatccgaacgtgccaccagaagttgcagcaatgggagccggaccatctggaacaactaatggaggacctgatggggagatggaccttattggagcccctccttccatgaacctcgcagatgaacgttctcccgatgttggcagtggtgcagccaaagacgaagataattagagaagtgtagtttaagtaatgtccttatgtaaaataaataaggaagttgagttgtactagtaagtat

SEQ ID NO: 139661 - DNA, 284 bp, Zea Mays
cttgtaattaattaactaacaagataagatgggtataagttgccttaaaggagacatgaaacagtaagctaggtttaccctatgtcaggactcaggagctcagggttgttcaggaaaaataagaggcccattgtcatattcctatatataaccacccaactaagacgctaaaagatattaattttattttatgatgttactacatgcaatccgacttaaaacagataaaaggattgttgatacgcctttcatttacatgccaaaacgtcttgaaacaagcaaat

SEQ ID NO: 139662 - DNA, 439 bp, Zea Mays
aaggacaataaaccatgaataccaattttcaaaatctaaaacttgcctagaaactactacgcaccgtcaagactagaccgctagacctaggacgaaaggccttaggcatagagggagaaataggtggctaattaattaggccccgtgggccaatacttatatttttaggatgccctaaaaaggcaccctattttctctttgagaggcaacgtttcttccagcatgcatgcattataaaatataaagaggaattaaaaattgagctaacccccttttctttaaaaccatccgggctctctttttcttttttccttccaccataatctatatctttgattcccttccgcagatgaattcacccacccccgccagcggaggagactcttgtttcagttctgacttcctttctcgcgatggctttccttctatcttgtgggaa

SEQ ID NO: 139663 - DNA, 500 bp, Zea Mays
accacgatgaccagaaataggtacgtggaaaactaacacgttcaaggccgctggtcagttggtaaaatccagcccgatctttgatcaattattgtctaaatatgtgaaaagaaggccggccccagtgatcggccaccaaagcggtctcgtttacccacccaggagcgacagcaggttaggtcgattggaccacctcgctaatcagaaaggacgagaggtcataatgtccaactaagacctaacgtatatgcatggacacctccactcccatacacacctatgtcatacctttatacatacataccaccaccaccatatatcccgaatcagatgtggggtatgccaccatatcctttcgagacaccacaatacttcgcttggggggcaccgcagtcatctgtctttgccaggttgacgcctccagtacaagaccgattgagagccccttaatctggtccacgagcacaggcccaacaagattgctgaaccactcgtcccca

SEQ ID NO: 139664 - DNA, 373 bp, Zea Mays
ggtccatgtattgtatgtattgaagtgatgtcctcatcagaagggagagtggggagtgagggaaatagagcagtggagtgtggagaagagctcggcatgctccacaagggattaaaggcgagtgggcgccgcacggaggcgtgcacgcgaggagaacagttgcacacgcctagagctcgatgaccacgtgtccaggtgcttgacacttggtggtgttgtcagggataatttcaaatgggaaatgaccacgagatcgtgcgagctgggtcatgtgcaccatagcaaagttattctccacacttttggctacaagttctatacaacacttagggcgattaggggtgttggtcacttgttttttattgctgtgaat

SEQ ID NO: 139665 - DNA, 458 bp, Zea Mays
cgcagccactattgcgctcctggacaaactccccgaggcagaaaccccaagcaaacaaaggtcaacaagaaatccgagtccccctaaacctcaccatgcatcagcaggccgagagttccatgttgcgacatcaggagccatggtctgaccagtataccgcgtccacaccagcgggagacgacaccttgatgggacaactgcccgagcctaaggaagacacaacacgggcctcaccacgtcggcacctaaggttaggagaaagagcatggagcgcgcctgacctagggaactgtgagggaatgcagaagggctcggagaacggccattgatacaaccggcgccgcgagggccgcttcaacggcgatgaggaccgaagtttgagcccccactaccaggacctcaggcctttagctgtcacatcctctgggtgcgagtcccacagcggtatagggcccccg

SEQ ID NO: 139666 - DNA, 920 bp, Zea Mays
gaacaactttgcttaagtacttatgccttagtattgtacaaaattagaagttaaaaggaccagaagtctggctgtcaaaccactctgagactgaatactgactaccagtgagttctgaggaactttgggctcgattcatgctcaaaggaataagcaaatgggcaagatccctatagcagaattgtagctggtgtatagggctacaagtttgtaaaagatggattggcaagttcttgcacaaaaatccaagatctaggcattgcaattctgtctgtcaggcactctgaatcaggatttcgatggtacaatgttcggatcagatcacctggttcagttcatctcgccgtcggcgaccacgcgctcggattcacgcctgacgctacgattcgtgctcaacgaagtactgattgttgctcggggtagtaaatatcatcgtgtggatgaacttgagccactgttcactccggccaccgtgtccgcctagctcacggccgattcggatgaactcaccacagttagccgctcaacgatcgtgcgccacgtgccttggtgtcttaccacatcgcagtagctcatattacacatatctggtgatcgtcggtctgcccgccacggtaaaagccaccaatctcttgcgatagtgctcttttctttctccaaccgccaccgcgccatctcaaattcacgggccaccgctcggggatcctataaattgagcatgctgtcagttccgcaaggtagtcaagcacccaacccatcaactcgtgccttcaattgttcaccagagccccctaattgctcacttccccaaatcagttttccgccgccgtgaaaaggctctcaccgggcccagtgcgcttcaggtccgatcatgtcctcttctctcttgtttcagcacccttatgtgcccctgatgcttc

SEQ ID NO: 139667 - DNA, 291 bp, Zea Mays
acgaggtgttgggggcattgaacatacatctactattgttgtcagtgttcacgcgtaagaatgtgagtaaccactgtccactgtgcatgtcgcatactactgcaacagacaaggaaaacttcaccacaaccatgttgattgcaatttcctttttacatgattagctaaacgtgccaagtacatgtccatccagtcccacttatccctcaactgatcatcttccagaaaaaatatcgatagcatacttggacacggtcaagtcaaaagccaatcaacataatttaagaaaac

SEQ ID NO: 139668 - DNA, 313 bp, Zea Mays
ggatcacgaccaagaactacactgtaaggggcgtacgcagtgatccaaagagtctatctcctcaaaccaatccccaatagcacccatatcacaagaactcaaaggttcttcacaaattcacgagagaaggaaagggaagaacatgagatcgtaacaactctaaattttagcaaggatgcaaaactgagatgtagaagtgaccaaaacccgtgggatgtaacggtgatccttcctcggattaaactttgcaaagcaagagcacagtcgacaattacaaaattgcggatccctcggctcaactggtgagaggaaa

SEQ ID NO: 139669 - DNA, 479 bp, Zea Mays
gaccgtaaaggactatggtttcaccgtgcactaccaattttgggagaggtggagaggattccacgaatttgggcttcaactgagctcactgatggagatgtgaatacctcgtcgtggtccatggtgctatttatagccacggcggtccggctaacgattagcgaccgtggattgcattgttcacgcatggataccatgtagagaagaggcacaataagggaaaaatgaggcatgggtgacaccgcggcggaagcgaccgagccacggcgaccgccggtgggatatctccggccacgcacgactgagttcgcgggatggtgccacgtccgaagttatctctccgcgatcaaatccctttcaccagatcactcgagcacatctgattcaacagtgccttagatcttttatctgcgttcttcagatatttgcagagttttgatcttcagcgttttactgaaccgaccaccttccatcctctc

SEQ ID NO: 139670 - DNA, 424 bp, Zea Mays
ggtacttcttcaggcctgatatggtgaaagagaccgaagaaagagttcaaagaataattcataatttgaagaaagctcaagctcgtcaaaagagttatgcggacaaacggcgaatgcccttatatttccttgagggagactatgtctacctaaaagtttcgccaatgaagggggtatcacgtttcggcgttaaaggaaagcttgcaccccggtacattggtcctttccctatacttgagcaatgtggaccagtggcataccgactccaattacccgaaaccttgtctgttgtgcataatgtgttccacgtgtcacaattgaagaagtgtcttcgggttcccgatcgaaccattgaagtgacagatgtagtccttgaaccagacttgacatattccaagcatcccattcgagtcttggatcagaa

SEQ ID NO: 139671 - DNA, 605 bp, Zea Mays
cttcggtgaagtaaagatctcgcggggaggagtggataggatcacacatcagagcttatcgttgtgattctagttactgcgacgtgggcggtctgcctgcgccgccgtggaaacgccggtgaccgccgccctccggccttgtgccgcgtgtttaccctttccaccgcatcgccacgacttacccctgctcaccgttgatcgccggaacaaccgccacgcctctggacgcgtattcaccgcgcccagtgttcttcttcacctccgaccgccgcgcgtcttgctcaaaattcacggtcgccgcctctgggatctataaattgagccccccaccagttccacaaagtcatcagctagccagcccccgctaattgttagcaatcatccaccagtgagctcgaattcgagttttcccccaaatctctttccgccaccgtgaaacgagcttcaccgtcgccagccctttttccggtcagtccaaccctccctctccctcgtttaagcttcctcacgtgtctgcgatgcttactgaccctccaattggactaggggtcctctggtcgccgggaacacggcagtatagccgcgatactcacggccaccgtggc

SEQ ID NO: 139672 - DNA, 562 bp, Zea Mays
gagggctataacggcggcgtggagtttcaatttggggaaaaacctaaattgcagcgctacgatgaacgaaaagagatgagagtgggtgcgatagcttgcggattacatggcgcaaccggcctggccctcaatttgtagaagggcaaagcgggggccacgaatttgaggaggacgcgcggcggccggaatgacatggtgagtcatcggcgcggcagacagtggcatttaccggttgagaagctacggcggtcatcgtcgagctagggcggcaagtaacgacgtgtttaacgcagtggaaacgtggcaccatcgcggcgcagaacggcaactccggcgatggccacgaagccacgtcgccggcgtaaaaggtgaagacagcgggctacagtagttcatacccatcggcaaggagatctttccaaggtcagcaaaatccattcccccgcgacacgaatcccatcgaccaacccaactccggtcacgcggaccaccggcgttgagctgtccgagctggcatcctcatccgtgtactgtaccatggggaaaattcagtccaatgcac

SEQ ID NO: 139673 - DNA, 875 bp, Zea Mays
cccaagttcatcccccttcgccgccggtgaccgtcgcaccgtgattcatgccggccgctgtgattcgtgcactgtgacttgcggataaccgtgggtgagtaaagatcttggcgcctggatcgactcgggctcggtcacagctaagctcgccgtacccacttgctcgtcgatcggtcggatagacctcgccgccgtttgtcgattaccgtcgtgcgccacgtgctaaagcgcttgaccacgtcgcagtgaatcacatcgtgcatgcccggtgatcgccggggagcttgccatggtgaaagccactaatcccgagcgccagtaaccttcttcctctccggccgccagcacatcttcgcgaaattggacgccaccgccgtgggagcctataaattgccgaccccgcctgctccgctaagtaattgtgcaaccagtgaggcaactcgtgcctcgaatcatccactagaactccccaatttgggatttcccccaaatcaatcaagaacaccgagcggtgtgacctcgccgtggtcagcttgtctcaggtccgctcatgccctctgccctttcgttttagtgttcttgtgtgcccctgatactcctcgaccaactcgattgagctaagctaccttagaacaccgagaacacattagaatgtccgttgatgatacggtcactgtggacagagtgagttagaggtccaatggtgaaattagttgaggggaaacgatcgttaggcctcgaatttggtttcagctgaagtagagcatccgtcatcaagtaatccggtcggtacaagctcaccgaagctcggccccgcgccgttcaccgtcgtggacttaaggttgtgaagaaaggaaagcgcgggggtgttctta

SEQ ID NO: 139674 - DNA, 515 bp, Zea Mays
ccatagtacaactctcgtcttcggcattcttttgtgctcttatggcgttgctaagtattaagccctgcaagaaagaataaaagattaaaatgataacaaaaagcttcatttcagagtccataaacttcaaaattcacaacttttgtaccttcagactgttgtacgcaaggctgtctgccaaatcagcctttgtcatggcgcaaaggccagcttcgagcttccgaaaacccatacttttgacagacggataattctttgttgtccgggaggcaatacaaaaagtcatcttcgttcataccattaaacactagggcccccttcggatactgcaattcccgcgcataatgtttggcttcagaattttcttcttcggatagtctttttcccgaagcatgtctaacgatataatcaaaaccttcggagagtacttcgggagtaagggattcggcttctttggccacacttttctcaaaagctatattactatctggagttattccttcggccctctgctc

SEQ ID NO: 139675 - DNA, 277 bp, Zea Mays
tggagaaggaggtggtcgcgacaatttcagacaagggaaagaagattgttgaaacctcttcagagggagcaaattttgacctacgacaattgggcggccaacaactctctgaagaggacaaattggagctgaaagaatttgcgatctcctttggttaccagccagggtcaatgctctttggggggtcaacgaagaagtcgtgggatgcatccgtgaccgtgctggtgctaaaattataagtacactgtctaagagtgttggattcctgaagctcgag

SEQ ID NO: 139676 - DNA, 444 bp, Zea Mays
aaacgagtaaaatttgctgggcacgtagtacctaacctaccttcttctctaccccaccaaaccaatactcaagactacattttcgctgggtggatactgtggttagctgcattggtgacgggcgcgtactagtgcattcttgactcaacgcaaccacatcaaatggcacgacgtcgtgaagacagatgcgtgtctgcatcgttgaataccttgcatgcatgacacggtccttaattatgttgttggaagatgaaacgtcaagtaggtcgcctccgcgttgttgacccttgtcaagcacgtctacgacctagtgttttatcactatgcaggaattggagaacgactattttctttcggggtatccgatagctccttaaaacctggtctcaatccttattttagggagattgagaaaaaaacacgtccaacaatgatctatctagc

SEQ ID NO: 139677 - DNA, 538 bp, Zea Mays
gcctagtgtcagcatgattcattagagaagtattgcaccctgagtggctagcaaaccctgttcttgtactaaaaaagaataaagttgattggcgcatgtgcgtcgactatactgatctcaacaaacattgcccaaaggatcccttcgggctccctaggatagatcaagtagttgactcgactgctggctgctctatgctctccttcctagactactactccgggtatcatcagatcagcttggcaaaagaagacgaggagaagactgccttcatcacaccatttggagctttctgctatacctccatgtcgttcggccttaagaacgttggagcgacttaccagagagccatccaaatatgcttagccgatcactggggcaagcgggtggaggcttacgtcaatgatgtggttatcaagacagaaaactcggaaaacttcatcgaggatttgcaactagtcttcaatagcctgaggcactaccggtggaagttgaacccaaaaaagtgtgtattcggagtaccagccgggaagctgct

SEQ ID NO: 139678 - DNA, 612 bp, Zea Mays
tgaaaaatggttgttaaaaggagatggaaataatgagttttttcatagaattgcaagtggaagaaaaaagaaaaatgatatcctcttctttgaagacaatggtacaaggattgaaggagatcatatgcttgaacatgctactaattattatgctgatctctttggcccagcacctggaaacctcttccaggtggatgactccatttggaacaatgctgagcatatttctgacagtgagaatcgcacactgtgtgagttttttacaatgaaagagattactcaagccttatttcaaatggaaaaaaacaaagctgctggtcccgacggcattccaactgaattctatcaaagttgttgggatactataaaagaagatgttatgcagatgtttcaggaccttcatgaaggaaaattgaatgtgagccgtctaaattatggaattataactctcattccaaaaatcagagatgctgcaaagattcaacaattcagacctatatgcctcctgaattgcctatacaaacttatcactaaggtgctcactaatagaatggaaccttttgcccagaaacttataaatgaacatcagactgcttttttaaaaggtcggag

SEQ ID NO: 139679 - DNA, 1791 bp, Zea Mays
aattattccacgtttcatgcactagataaagttgtgcttttgttggttagttggtcttggaaataacatgtagctgccggtgaactttgggattacttctgggattgttgcttaaaaggaattcaatgattgataaccaaatgcatatttctttaatcaacttcctaaggggaacgaataaaaaaaatcatcaaacttaggaggaacttatgtggcactgtaaattagaagtagggacataaatttgagtcaaacaggactaaagctatgaggcacaaagtttcaagatagctaatgagtgagcaggactttcactgttctgttgaaagaagaactagcagcatgctgaccacttttatcttttctccgctgcagctactaaacaggacatctcagttgtgaaggtacattttggcaattatatttattttgtaaggcaaatccctctatgcatggccaagaaacaaaagtgaaaggtggtgtctatcttttgtagatcataaacttttcaagaaaacaaggtccgtggatctctaacacaatggaaagtcctgagtactgtgagataaactcaaatatgactcttgactacataaaccgactgttaatggaggagggcactgatgagaaggccagcatataccaacaacttgatgcacttcaggccatggagaagccattttatgatattattggacagacatatccatcttcacctatggagacaatgatcagtagagataaccaagtagattgtcctcaagacaattatagtaaacaggcacgccgtggttgttttgtcagtgatattctagagccacaaggtgtgcacctggtagccaatgattggacttatgaatgtgatcatttttctttgcaatttgagagaggtgctgaagaagcaaataagttagttcccaatattgcaaaattggctgatctggatagtaatggcctttctgattccaatcgaatgatagaggcaacaattggacaaaagggcaagcatggaagcaaaatacggagtcatcctcatgtggacttggagtttttggaagcgaggaacagtaagcatttggccatctcagctagtgaaacaacccgggatgaaatgtttgacagtgttctgctctgtgattgtcgatttaattgtgatgctgctcatattagagaaatcaaggcaaaagaagcaaacaacagttcacagaatgttcggagaaaaggatatggtcaacggcaagtgaaatcacgaggtaagaagaaagaggaggaggttgacctcagggctcatctcatgcagtgtgcacaagcaatagtagtaaacaaccttccatttgccagtgagctactggagaagataaggcgtcacgcttcaccatatggagatggctctcagaggctggcactttacttggcaaatggtcttgaggcacgcttggctgggacagggagccaaatgtataaagaactgatggagaaacaaacaagggccacagacatgttgaaggcctaccgccttttcaatgcagtgtgtcctttcgctagggtagcatactacttctccaaccaaacaattgctgacctatcgaacggacaaccaaaggtgcatatcattgattttggcatcacacttggctttcagtggccatcattaatccagcgctttgcgaagcgagaaggcgggccccctaagcttcgtatcacaggcatagatgtacctcagccaggttttcgcccccgtgcaataattgaggcgacaggaaaacggttgactgagtatgcagaaatgtt

SEQ ID NO: 139680 - DNA, 540 bp, Zea Mays
tgtatactcatattgttctcggaacatatgcacaatcaaagaaatctcggcatgatgcataattctttcacaaaacatagggtcaataaaccttattattaccaccaaaatagtaaaatactactaatagctaaactaatatttaggtcttacaaatagtgaaatatatatctgtatctatatttatgtttatctctattcttgttgctcgttgacttcttccccgactacttcatcttcaactggctcttcttcttgaatttcaagttcacctggttcaacctctacttctgcatgatgggcatgtccccggttgatagataggggctgactctttcctgctgaggcttgtccttgcttcatcggagtcggtgtagtgtaggcggctctgttgggacagtagttggcgtagtgtcccggttgtccacacttgaagcatgcccggttggtggatgtgttgggagcaacgggtcctgctggggtgcttgcttttggaggagcagttggtgcctgttgagtttgttgtccagaactgccact

SEQ ID NO: 139681 - DNA, 930 bp, Zea Mays
taataataataaaacagattagataaataatatgaaataatgaagagagaacatgcgtattactctcatacaaccgtcatagcctctagccatgaataaatttttttacggatacgtgcaatagtggtgaatggattggtctcccatcaatcaactatgcattcccatcaatcaactatgcatttgcatgtacgcatgcatgctgctatattccattctcacacacatagcttttgagtggacataattaagtatttccttaatcacatgataaaaaaaagggagaaagagaaagctactagcttgcagctttttgcatgcttctcccgcatagatgcagcgcatgcagcacgcgcgcacgttctttgtcccacgcacgtctagtaaaaaagcatgcctcgcgccagatctgggacgacgtgcgcacgactgctacacgtctctgcatcccgcgcactcgctcgttttttttctctgtctataaatgaaaggtcacatcaacgcaggagcagaggggataggaccgtggtaactgttctgctctaggctatcgcgctcaccgtagacgccgctaggctgcctcgctctcgcgtttgcctcgagaaacaaaaggctgctggggaagtgcaccatcaagctgctgaagcctctcatctaggaattgctgcttcgccgggcgtcatcggcaagaaaattctccgtcaaacagctctctagggcataccctaaagggaaaattgtttcagaaacctcaagggcatacccttgaggaagatcacgtcgccgggttatacacaatctcaagggcatacccttgagagagatcacactacaaggacatatacgccgttctggcccgtcggaaaggtctactgcaaggtaagaagagcccccatgtcgctatactgttccttgtcttctttctcatca

SEQ ID NO: 139682 - DNA, 351 bp, Zea Mays
gtcggatggttcgtccttagccgcggacggtccgcgattaaatataaagtggaacgaccgattgcgatcacaaacaatcgaactgcaatattctgttatttaccttttgccctaggagtagacactaacatacatttctccctctaatgtccacctctcttcggctctatgtcggatagagacgtcttgggtggtctgccgatcacaaaacaaaccttgggatctcttctccctgacggggtctatccaagcagcgagatccagatatgttggcgaacgccgccgcccctgtgcacgcgcaccgtacaaccaccaggcgcggaccgtccggcttgtcaacagggaaacctc

SEQ ID NO: 139683 - DNA, 373 bp, Zea Mays
gtggaacagatgaaccagcgcatcctgactttagagcagcaggtggagatccgagataacaccatcgatatcctggagatccagctccacgatgtgcaggaagagcttacggaggccaacgatcacctggaaatgcaccaccaagacatggaagctaatgaggcaggcagcgaggcagaggaggatcttgaggaaatagagccagcttccggaccgaatgcggcttcctctggagtgccgccttcacctgcatccagcgttgcctctaccaatcatggttagacgagttagttttaacatgttaggaggacaggaaaccacataagcttagttttggtaccaacttttggactaggctttaggatggatcccc

SEQ ID NO: 139684 - DNA, 674 bp, Zea Mays
cgtgcgcgcaggcgcaggtctattatctcgtacgcgcgcgcgcaggcgggcgggcggtcatgcacgcacgtacgcgcccccaccacgatctcgagtggaggagaaagccgaccgccctatctaaacctggataccgcagagaagagataaataaaaaaacaaacacgggcagagttgatacgtgaaagaaaagaagagatcaaggaatcatcatcacctactcaacccaacccaacccaaggtcccaagcgttccagactacatgccgtcgctctcagccaaaagcggccagcagattcgattcgcgccatagtaaaaaccccacccgttcaaaaaagaggagacgctcaactcctcgtaggcaaacagcagagcagctcgcggtgagtgctcaagtggagacctctcgatcgatcgagatggttcatgtaaagcagcttgggcgctctcagcctcccgtcccttttgctgcatgcctaatggcaattgaccgcgacagcggagcactatagagtccgctgctgtaaagttagtcccggcgttgttcagccatttgacttttgccgcgatggatggtggatttcgatcaatcgggccctgcccgcccaggcccaggcccagggccgccggtccccatccacgcacgctcactctcgccgcgtatcttgctcttt

SEQ ID NO: 139685 - DNA, 587 bp, Zea Mays
tggggaatcttcctattattgattggattgggggagttggtaacaaggtttcacgtatccaggagcgtggtttttccccaacttataacatggaaaggagtagcatgcatgggtgcgggactgaggtgattaacaagcgagctccacccaagcttgcaaaggaatccatggaggattttctagatgctagtttggtcagggagacgatgatggaagggacaaaggaggaagtctgggagcgggaatccatgagcgggttaccgacgaaaaaaggcatgtcatcggcccaagtgtttgggcactcctggaggcccatcaaccccacgtggtgctgggttccaagaagcggaatccacactaagtcatgctaccctgctcgaccggacgaagtgcgtaggcttcggctctctgccaagtccgtgtctagggttagacatcaatccttggaggctcgttcctatgcccaagtagtgagggaaggcagaatggcttggaggagggatcatggagggagcaattggaaacggcgccaagatgaatggatggaggaagatgaccttctggaaggggatccctgcagagaacaa

SEQ ID NO: 139686 - DNA, 666 bp, Zea Mays
actgggggtttcttaagtaaaattcctaggccgaatcggtacaggtcaatcccgaccgtccgatccgatacgggagagcacgattacaccaagttcgcccttcaaccggtacctggtgataaccactggatctacatccgacggtgctgatcacgccaacacccataatcgccctgatccgtcagatcttatcactacgacctagatttgatcaagcgaaatggtaagcggccctctaattgccaccgtccgttaatgaatcaacagcgcacggtcatcgcccccatccgtcaaccagcacagccagcgccgccatggtagcgacggacttctcgccagagtaatgcccgcaatcgaacgagtgcgccaaatctaaagggggtaggtgcaatacgcaggcggggacaatgcgaacaacaagaggagcaccacaccttcgattcgggtgccgagattcctagcgacagtggggtgcggctccatggcggaggagacacgccgacgagcaattcacggcgacggggagctccttcccggtccgggtggccagagctcgatctaagggttcctgataaagcctcacgactactttcgggtcgccaatttcaggggagcacggatgtccgccgcagcggcgacttgggtggcgcagtggcgacttctttt

SEQ ID NO: 139687 - DNA, 695 bp, Zea Mays
gggcaggagtaggagcgatgaccaactgtcttgcaacgaaaacaccttggctctaggtggcagaaagcaacgaggtgatcatccgtgaagcaattgaaacaacgacctttcaagtcttttggcaccaggcgacgtgcccgcagtgcactaaggcgatgcttcttcgccttcctagattcaactctggtccacccaccaactgttgtcttcggcgcactctccaacccacgaaaccggctatgttgatgctcgtgatgagggttaaacgtcctggtctcaagtggggagggctccctcggagacgaaatagtctgtgctggaacaagcggaacccgcgggtgaagcagaatatcacggaacagaggccggccagcccaagaacgtggttgtagaccgtcgtcaggggaacccgccgcactctcaactccatctctagaacttggaccgtccctgggtggcagaggatgacgatttcggggaaggggaggaaggggcagatggtgaggcgacctagcggagggaagtagcggtggcaccggatatggtgtggacggtggtcggagtgggatggcaggcagccgaccgtccctgggtggcggaggttgacaattccggggaaggggagaaaggggcagatggtgaggcgacctggcgaagggaagcagcggtggcgccgtttatggagtgtatggcgg

SEQ ID NO: 139688 - DNA, 3281 bp, Zea Mays
tcttggcaatagacaacgtgaagcggccagcgctgactcttggaccttgtcgtgcatacctacctggtgtgctcttctgcttcgccatgattaatgtggcatcgatcttgctggctacctaaacatggatggcacctgcatgcaccactgcattgccggcaacaagcaaggagccatgacacttgtggatcgagtgtggcaatctgatctgttacgcggttgaagagatttatttggtaagattttggatggaagaagaccgcgcccctgcgtgcgcccatggatctagggggaaatgaacactagccagaggagaggagttaagttaccagctgcttggccaccaccaccattctcatggatgatggccaaaggcatggcggctagcttctcaaacttgcaaggtcgatactacttttggtttagtgcaatggcggatgaaggaggtggaggaagaagatgcgatggcgtgcgtgatggacacgttgcatggaaacgcaccattgggagatccatgctaggatctttggcataattcaattgttcaacttggtaagccttccttcaaccactagttagctcctaccaattcctttgtttttttttcttgtcataatataatatatatgctactattacaagtctctctctttctctctctctgcctcacacggtacatttggtggagttgttatagtttgctgaccattttgatatggctatctaatgctgccaatattgtaatgggtaaagcgggatatgctcatttgcatgctcctgagaaaattaggtcaagtccctagataaagctgatttgttcgctcccaataatgaagaggatcttgaagttcctgcacacgcctcagtagtggatcgggtccatctttttaaaagtttatcctgaaaaatttcgcttgctcttctatatatcttgctgtttgttgcggttgtttgtattataactaatcgtgctttggcctccactggtaataagttaatgccccatttggttggtcttcttattttactctgcgtaatcatcactcttgtgtgctacggaaggccagctagcgtgcattcccagcgcatacatatatatacaccgccatgcgcatatagtatatagtacacatataaaggaaaaatgtatacaaagctagtactctcttgcatgtagctaataatagagaggttccctagctgcctgaggacgaggaggatgtggttcttgttttctgcctcatgtcgagcacaggctacacagaaatagcacgatcccatgcatcagtggctagtgctgcgtgccctaattcctgctcactgtcccctcaagcaaaatcatgggacttctcaaaaccaggcacccctttttggtggccagcctgcagccctgaatctctctcctgttgagttgtcccctctcgtcctatctcagagcaaaagatcattctcttttggatgcgtgtcttgacttgcgtaggggatctttgcgtgttcgtcattggcacctcactcgatcaaagtgagccatgcatgaaattaaatgcagcactagctatagtttggtactacttctagactatattactggctgttatatatagatagaagaagatcttgctccgatccatcgctagcggctccatcattctttgttgcatcacggccactgcattattatttggttggatgaaaagggagagcaaaaaggcgacaatcatattgtctcccttccttccgcttttgagtgccgtttagttccaagcgtaacttgaatccttttttcttctttttttgaacaacggaacggaaatagtattttgtagatgtttcaaagcatttctccacccgaatcagtccttgtgcattgggcagcaaaatttggaaagtcgtggaatataatagaagttccaaattttgtcttttttttttcttctttcaacggtcgagtcgatcgtcgtcatgtttacattattgattcttcttttcgtgacgaaataggaaatagctagggaaaatgcctggaataatactagtttattgcattgctttcttccatcagtatcgcgcctttagttggtttaatttaaaggcatcgccagctttagtttaaccagattaattaattactagctattagtagctagatatcgtatctaatgtagaaagatcgaccggggagatgatttgctatgattcttgagctcacctatttgtttccctcatgattccttttcatttcatctgtaaagccccagcactctggtaggcaacatcgatcgattccaagtcctttcagctggattgcgcatgcattagcaaacgtcacatttcccttgcttttttttttttgtttgattgatggtttttcatgcactttttaggatatatttgaggaattcaattcattatatttgctccggcctcttattctctttcatctatcgatcgagcttattaagtcgaatttctctccgagcaataacaagatgagtcagcaatgtcgtttttcgctttaatggttatatataagcgagtgataatacacagaaccggtaccatatatatacgttatctatatatacatgtattttaaccggagatcgagtatatatggaacgggaaaaattaaagacggcagaaaaataaacgcaagcagcatacagttatcagagctagtacttctcccatccccagctagctagctactcgatttaggtgtaatgttgagatgtaatatcacatcacacacccggcggctccagctaagcctaaacgtagctcgctcgttctatcgacatcatctgcatcgatcgatcatgcaggattattgattattacagagtgagcaaacagtagtagtacgtgcaatacatatccaccgtgtctctcgtgccttgcattcgcttgctacactccgactgtgcatgtagagactacatgtatccacagaaccacctagctagtagggtttgcagtttggttattattgacataaactgttgatggtcttttccctgctagctgttcgatcggttttaatttctgaatcattattatggttgtttaattacatactgatctttgtgcgttttattttaattattagctggtcattctcgtgatctgtcaagacaaccagacaaaattaagcagggctgtctttggtactgaacagtgcgtgcagtctgtatatatgcttcgtttcttatacggattaagcatgcatttgcaggggccggccgggcacgacagccgcatgactgcatgcatgcgctgat

SEQ ID NO: 139689 - DNA, 679 bp, Zea Mays
gccactttagtaatttcatcttcttcctctacttctgggtcggccattgactcgaaaggctctggaggaggagatagttcagctgcaatacaaaacgtaaataagttcgaagtcacaaaaataaaacataaagttaaaaacaattaggcaatacctatccgcctttcgagttctgcagtcttttcagctgcctccgctgcttctctagcatcgtgagaatctttttcgctcttttttattatctcgtgggccatacctcggccgccattctcccagatgtcagtaaagaattttccgccaactaagctcgcttcaaccgaggggtccttcgtgtcatcaatagataaagtagcttcggtttgggccaaagctttcacatgatcgcaacctgacttctccaaaatagccgcaattcccctgacacctgagaaggcgcagacatctccatgaccactcaaaatttcctcaaaagcttcggcttcgttgctgatccagtcaagtgggccctcaggatcgcctcttacgaagttgtcttcgctggagtatgcaccaacattggcaaagctagtttttatttttcccacacattctatggatttttcataacaattttcttttgaagaacgaagttctacaaccgtttttcccaataatttttccagtaatcactggcgtctcg

SEQ ID NO: 139690 - DNA, 483 bp, Zea Mays
tatggctttgtttgagaggtgcgagaagctgaggaaatcttggctggctaggatggtcttgagttctggtctgagccccttcaaaaagcgggccatcttcttgactttggtgctcacatcatctggcgcgtagcgggccaattatgtgaatttgtgcacgtattcactgaccgatcttccatcttgagttagttcccggaattcatcttccttgagctaaatgatcccttggggtacatggtgctctcgaaaagcagtttcaaactctgtccaggtagcatctctgatggcagcgttgaaggtatcccaccaagctaaggccattccggaaagttgatgagcagccaattgaacacgctgattcttcgggcatccgatggcttccaacttccttttaatcgtgcgtagccaatcatcagcatcgaggggattgctagatccagcgaatgtgggagacttgagcctcagaaaatctcccatcct

SEQ ID NO: 139691 - DNA, 339 bp, Zea Mays
tcacgaggtcttgcgaagcatgccagaagttttcaccccgctcgagcaacccttcgcagttcaccaagctgatcgcccacacatggccacttcaacgttgggggctggatattgtcggaccactacctacggctcaagggaacctcaaattcacctacgtcaccgtcgagtacttcaccaagtggatcgaggccagagcagtatccacaataacgtcgaagaccgcccaaaagttcttctggaaaaacattgtctaccgatttggagtcccgtccgagctcacagtcgacaacggcaaacagtttgacaaccaggacttcagggatttctgtttctcca

SEQ ID NO: 139692 - DNA, 831 bp, Zea Mays
tgcgaagtctttttgagggtgaggagcttaggataatgctatttaactatagggagattggaatcattccgaaggttgaacctatgtaaggtgtgatgccctcgctgtacatatgtaactatagtttgtatgatgaggctgtgcgccttcgcgcatccggctatgtccataggggcgttacacacttggtctagtacgtttattatgccggtccggctgcgcctgtagtcggtctttgcgcggacagtttcttggtgtagacttttgcacggatagtcttttgaggaagacttcggttttgcgcatttgttgggctagtccggctgcacccttaggcgacttttgcgcggatagtcttttgagggagacttcgattttgcgcacttgttgtgctagtccggctgcacccttaggcgacttttgcacggatagtctttttgaggaagacttcgattttgcgcacttgttgtgctagtccggctgcacccttaggcggcttttgcacggatagtctttttgaggaagacttcaattttgcgcacttgttgtgctagtccggcggcacccttaggcggcttttgcgcggagtgtcgcacgtgagggtggctagcgctgcccctcgcggtgactttgtattggtcgaatgtcgaagaccgtcgatgcggtcttttttcgacgtagatttttgcgggggatttttcgcttgtatattacatggctccgcctcgttaaaaatctcaccccccgggaggaaaagagtgcgggccagaataaaattgttttgcgaattacaagggcgagctggccctgaggagtcaaacaaaaaatttg

SEQ ID NO: 139693 - DNA, 439 bp, Zea Mays
tgcaatcattccgtgcagaggaaatctcaaccctgctttgaagaagctcttaaaaactacaacttcatcattctctggtttcaggatagtatcttccccgccaaagcgaaccaaccccttctcggcttctctgaaatagcccagcttcgtcatcatagtcatatcagcttcagacacagtcgatttcccaaaatccagatggctaggcttcgatggcataatgatgtcataatcaatctctccttctctagcatcaccctcttcaatatctgtctgctcggcttcagcagtgggtgcttcttcgtcagaagcgccttcagtcacaaccaatcccgactgcctcataacttcggaggtggcgcagtttcagcagcttcggcttcctctccgtcgcgagtaaccctagctgttgagcgtaccctggccatttgatgttgaa

SEQ ID NO: 139694 - DNA, 477 bp, Zea Mays
aaaggcatacctatgagctgctgagagctcaacaacgaagacttgctttgcagcaattagtgtgctgatcatacacagttaacagagcagtgttgcaattagacctacacgctatgggactgcaagctgggttcacggcaaaaaaaaaaaaatgaacaggtacagaagtccatgggcgaagctttcaggttttgatcagtgagtaacttcagcttaacgtgttccacacaaatcactgccccatcgaagtcccataagcgcgcctggctgcaatgtaaacaagccagctgaaatgaggtcgtcgatcaatatacctagtgtggaccgagcataccaacaccaatagaattcaatctataccaacaccaatagaattcaatctacactgactagacttcacccagcgccaaccaatagaagcttcatgtttcgccgctaagcgtcaatgcagcaatgcggacccaaccccgcgagagc

SEQ ID NO: 139695 - DNA, 324 bp, Zea Mays
ctcgtcgatcagctctataaagttgtctgctatatcatattgcttctcaacaattttgttaaggctgtcttttatggctaagcatgccttgtcaacctccaagtcatatccagcaagtttctctgtgaatttagtacggtgacggggtgggagctggttgatcttacttaacatcatatccttgatcgatggaagttggatgttaatgttgggccgaggagtaggtgcggggcgcggtgcatcaaaaatgttggtcctgcacttcggctggttgttcagaaaaaagtaagaatccatcaccacaatcctaatccattagtttca

SEQ ID NO: 139696 - DNA, 376 bp, Zea Mays
ctcatgttttgaaaaagctttaggtggcacatggattcccagaggtaagaactccgtagagaggcagcaactatctgagcccttgaccccttgcgtacaacaggaagtacttgtctgaaatcaccctcgaacacaacagtcttcccaccaaagggcaacctagaccgtcccattatatcatgcatgctattgtctagcgcctcaattgcttgtctcttagtcattgatgcctcgtcccagataatgagtgatgctttttgtagcaactttgctgtcccgctttgtttcgtgaagctacatacaacaccatcatcaatagtaagtggtatcttgaagcgcgaatgggcagtcctcccccaggaaatatagaagccgc

SEQ ID NO: 139697 - DNA, 591 bp, Zea Mays
ggcagacagagaggactaatcaagtgctggaggatatgttaagagcttgtgctcttaaacatggtggaagttgggataagagcttaccatatgtggagttctcatacaataatagctaccaggccagtttgaagatgtcaccatttgaggctctatatggcagaaagtgcaggactcctctatattgggatcagactggagaaagacagttctttggcctgagcatattcaagaggcagaagaacaagtgtgaatgataagagagaatttgagaattgcacaatcaaggcagaagagctatgctgatacccggagaagactactggagtttaaggagggtgatcacgtgtatctgaaggtgtcaccactccggggtatgagaagatttaaagttaaaggaaaggtgtctccccgcttcattggacctttcttgatcttaaagcgagtgggagaagttgcatatcaacttgaactacccgatcacctggcagatgtacatgatgtattccatgtatcccaactaaagaagtgccttagggtacctgaggagcagttatcaatggaggaccttagtgttcaagatgatctggc

SEQ ID NO: 139698 - DNA, 502 bp, Zea Mays
ccacttattattgttcgtatactttcatgtttgtttgtagatgttgtagcctgatgatgaccaaaatggtgatgatagggatgaggaattcatagttgctctagtttctttggatatgtgggggagctcgtcaagtggggtttcaaaaagagccatggcgaaaccatgtatacaatgggttgagcggaccttggagagtagtgatgattgctacgacatgtttcacatgtgccatactgtgtttcgtcatctccatgaaacattggtcaccaattatggcctcgcagcgagttgtggagtaagtacaaaggaggcacttgctatgtttctatgggcgtatgggggaccccaatcttttcgacaaataagaaataagtttggtcacttgttggaaacaattagccagaaatttagtgaaatacttaactccatatacaagatgtcgaacgatgtgattaagcccaaggatgttcttttctctcatattcaccctagactacaa

SEQ ID NO: 139699 - DNA, 413 bp, Zea Mays
gcgagagttaactgagtcacggtggccgctggtgaagactccggctgggcttgggagatggcgccacgtacgggttatccctccccggcgttatccaccccacaccgcgcatgaatcaggacgacggcggcacgaatcttcgcacggagaggtcgccggcgatgagtttgccgcgctcgcgatctgatccacgttagttactgtatcatggcgtttgttcttcagtcacctcaaccatctaccttcttccatcttgatctctggattcttgtcaagaacagaacaatctctcctaacaaaatttgtttaccatacatcaagctacaaacttactataggattcttgggttgaaaccgaatgaatccaaagataaggctcaccagatttagcctcatctcactgcgaccacttc

SEQ ID NO: 139700 - DNA, 560 bp, Zea Mays
gaaaaaggtaagtgctagcttctaggctgtgaatggccaatgggagcaagaggaacggtatctatctctatctgaaccaatgcaccgtgctgtgcaatttgcatgcctgatcgatcagtcaaagaagcgcgatgagataagttagtttaatgacagcgtaatcttcatatacaatctcctctgcgcccaaacactggacgagagacattgaatattacctgtcgtcgcacaagttgttggagtcctctgatagatctctctgcatgcatatacacattcgaaaaccaagatcggcatcctagcttgtgacgtatgcttgggtaacaggattagatagctgtagtacccgctactaatcttcttgccctggtagccagtacaagtgcccggcgagaggttttttaaaggctctgatcgccttgttgtacctcaagattctgctacactggtacccaaaattacgaagagcgcaggcatgcaggcacgcgctacctcatgccgtcatgcgtggatggtcccatgcatgcacgcgcccgctcaaacgcttagctgctgtcgtc

SEQ ID NO: 139701 - DNA, 337 bp, Zea Mays
gcttcagtgagatgattgtgatctgtgagcatgcacagacaggatcggttgcatttatggctgcttgctaaactcatctgagctaagctaagtaaggtactaaacacgttaacccccaaatccagaccaggcagcaggtagtaacctaattacctaccccacccccaccacctgtatgcccaaacatttgcaaatttattatactcgtgtacttttattgccgatgaagtctgtccaagtaacccggaggctagctgttacgtgctgaagctgacgcttagttagttaactgaatctgttgtttatatagctgtgagtagttaaccctgcacactcc

SEQ ID NO: 139702 - DNA, 592 bp, Zea Mays
ttgagctaatcgaatgtaagttgcttaagcaagttggataatgctggtggcataaattagaccctactcctataaacatgattaacctaaactggccccctatactagctcagccatatacaagtacttgacttaggcgttgggttgcaaaatctgtatagaccgacataaaattataatcacccaagattttcaactatcaaaacttatccaaccaatctagaagcaaacaaccaaactatattctgactcatctcgttcaatttatagctaccttataaactagctactcaacctactaatgtgtaccctacagacctatcttaacctcctggccctcaacctatcttgtatatggctactcaacctatcttaaccacttgtccctaatccggatgaagacacaagactcgagaagaaggatatcaaactcgttgaggaatgataagagtcaagccatacctctaaaggaatcaagatccaggatggagtctttctttaccctacttctccttatccaaacctattcatacttctaggacatcttttaccctacataatatggtggccatatatatgccttcctaatcac

SEQ ID NO: 139703 - DNA, 460 bp, Zea Mays
aatctagcgttttttcgttttcattgttgttattctgcaaattcatttttgggttacctcgggctcttgttgaaaagatttagagtgtttgaatgtagatattggagggtgctggaatggaattgtatacagtaccaaattagccttgttttggaaattgcttacagtaccaaattagaccctctccactgtacacattgttagcaaaaccagcacttccttcccctcatccacaccatacactgcctttggatgaagtatagagctgtttgatgtagaagtcatacttcacaagcttaatatacatgatgggtacatgtctatttgccggacttgtaagggtgggcgctacagtaaccttacatgctatttggcagcttgactactgcttctagctagctgtaagtaacagttgactatctagaagtctaaggctgtctctagcaactatcccatctta

SEQ ID NO: 139704 - DNA, 305 bp, Zea Mays
caagaagttcatatcgctcaaatcacagttgccttcggtcgatgattagatcatgatccattacgcgataaacggtcttcacacaaggtagctatatagccattgcacaagagacccttcgccaactcttcaggaactgtattaatgcttcgagaaatatgctcgctccgaacagctgtatcacgacaaggtagagttacaacgcaaaccaaaggcaggctcacagtcaagcaaatcatggacccgggaccaacaacaggaatacccccatcaagaccacggtcagctgcagccccaggtccaca

SEQ ID NO: 139705 - DNA, 555 bp, Zea Mays
gattcgatcgacggttaccactgcctctggtctatcccgcgcccaaaacagagttaacgccggcggcgaacggaaccccgacggcggcgacattaccgtggcaccagtcaagcgcgcgaaagcctaaggccctcctccgaacgactctacacgacactgggacgacactgaatccgatcggaggtcttaccagggattgggagttgcaggagacgctggccacggaggatggcgggtccacggcggagcagcgagtacggtgaagaatcgtcggccaccaagtggttatctccctctgcgaaggtaaccgacaacaccgtggaggcgcggcgaagttccccgcccaggtgcagaaccaatcgcgcagcgtccgtgcgaatcaagcggcgacggcgaaccttctccaccccagctaatggtgtgcggcgatggtgaggtgcttctttgctcgggtccgcgtagggaggataggtgcgggaaggagaagaaacggggctctagctttatacaccgagggacgcgaggacttcggtagggagcaacgaccagggctgg

SEQ ID NO: 139706 - DNA, 642 bp, Zea Mays
ctaaataaccttagcttatgactgcaataattggacgcccggtgggaaatcctctcagtgccagatgtgatggaccatcctgccggtgtcacctctagccttcgcttggtaattgtaattcggcagcgactgaaaccatggctcaattgcagggccgacatgttgtgttgggcgcctttccatggttgcagggccggcacggatgtatggttgtcgtgctgagtgagcaggccggaagatgctcttttagtactttgtctgatcaagtccatttagattttccctatgtcaaactattttacctttgactatcaatttttaaacttgacaggctgatgacacaattcacattattactaggtttattatgaaaaagacagcatattcttgacgatattgctatatgaagtgtcatactaagagactactgatcggatggacgagtgtattattttagtagttagtggtgcttgtttagaactaagattgcaaatacactgagatgatttgggtattataatacaagccaagctgcaaatatggaaccatgcaacttccacaattagtcaagttatctttgggtcctgcttttaattcttgggattccaaactcatgtttggtcaagacaaggacattacgac

SEQ ID NO: 139707 - DNA, 688 bp, Zea Mays
gctccctggactgcgcacataaaacaaagaacccaggggtctaactcataaaatttcctatgactcagatattccccgcgggggatgccgggttgaatacccagaaagacaggggctcatatgaaagaccgctagccgaaggggtattggacgatcatggccgtccgatcttagttcaagcgctcagattaggtctgagccctgagagccggtacgcacatctggccatcggatcaagatcctacggtccggactcaattctacgcgagctaatcacaaccgtccgttatgatcaaacggcgcagagcgcatcttgaacccccgacactctctcctcacctcctaccagtctaaccctagtggcgcgcagtaggcatcgcggtggcgccatcactggtgtgtagcagtccaaggcccaggtgtcccaaggtgtgattcgaacggctctacacgtggatgagaagaatgcgatcccaaggaagacaatctcaccagaaatcatgcagtgcagggctttggcgacatcacatggcggactggcgacgccgtgtatacaccgacgaggaattacctcgccaccacacactctcgaagcttggaaacacgacggaagcgatccccatggtccggcgaagccccctggagtactcccgcaggcaggcccgcgacgccggcgtgctcaactatg

SEQ ID NO: 139708 - DNA, 515 bp, Zea Mays
taattccggcttccagtgcgccgacctctaaggcgactccctcacttgaagctaaagaaacatgcgctgctatcactccaccagaatgtggtggagacgacccgacgtggacatccatggaggtatgagaaggggaactcgctcggacaccctcgggggctgggtcgcagctcgtgctgcccatcggagccagatcaccatcggcaacaccctcgggggctgggttatagcttgcgctacccacacgagccggatcactaccgacaacacctttgggggctgggtaactgccagcaccgcccttgatgactgagttctctacaacagccacctctaaggctgaaggattctcagtcacctccatgggaatcgagcaatcttgaccaacctcttggcaccgaagatcgtcctccaaggtcaacgatgcgcgagatgctgcctgggatacctctaatcccacatctggagtgttagagcagatgtccatcatatcaccatcaattggctctgacagc

SEQ ID NO: 139709 - DNA, 1170 bp, Zea Mays
cttcttgaatcgtgagataacctaaattgacattgtttttggtcgaataagatgtgcagcatgcattaagagggctaatgggggtgatgttgagcttgaggacttgaaagatatgttggcaagtctagttcctctcttcagaagagtcttccatttccacgattgcttgtttgtattatttttgcatactacatgtcttgcttttctggtttactgtggctagaaatcctttgtgcaacacatgtggataacacagaaactgtacttttactagcaacgtgcaacttaagaaggagcacttaaaaaccttacacagcctctattgggataataaatctgtaccttgtcacttgtattttcgaacacccagctccatccacatatacttctatttatctgtttctgatgtgctcaagcttatgtctaaatgatgcacaaatggtgattgcatggcaatgtgttttaatgcacaattgattgtttcatgcccttacctttactccgccatgccctaagtttaagtaggtctacaaatagtaaccgaggggcaacattcacatatggagttaaagtgaaagctatttttaggaaggatgcaatgttccaattaaattgcactatactaaatgataatattttaattgtcttttcagggaaatttccaatcagaaaataaccttcttaaatttcgaaaagcaacagaacaagctgcaatactcaagaaggaagcttctgatgagcgtttgaagcgtattgaatctgaacgaatggtaaatttttagctatgattcacttaaaactattaccattgtaattatcttttgtggcttaaagttatactctggatagaggtaccatccattcttttattttcccaataatattatcatgtagagggtttaaggttgtgtgttttactgtttttctttgttttacagtagtgctagtgctgtatatggctggtgggtggatttagtaatctgatatatttagtgcaatgatatgtagctatcctgcaatattcgagacaatttctcatctggagtaacagaacaaagatattctcttatgactaacgatgctctttctaagcttggaacagatcactgccactatattcacagttcaatgctacgacagtcttatgaacatatttttatccaaaaaacc

SEQ ID NO: 139710 - DNA, 998 bp, Zea Mays
gccctgtaatagcataaaaacattaggacataaaaacagcttatgtcctaaaccctaaatattgaagatttcaatagaagtgacactctgcaagagaaacaatcgttcttgtgtgcacttacatcaatcaggatgtttcaggttattcatgaataaaaggatgctatcgacaccccttctctggttatttcagctctctagataagaaactggtagcaataaagtttatagatataaggagtaaatcaaccttactttcttacaatcggcagtagagattgtaaggggatggcttctctttatttatcagctaggataatatgaggacattgcctggctacccatctcatgtcctactgcaattgtcttagattcacacctgacaccacttattttaataatttgacatgctagagaaagattctgattccagatccagctacagcttccatgttgtctacaacatcacaacctgactgatttggacaccttccataaacagcagtgggtacatataaattcaccaaactccaagacccaactcgctaaagcacacttctacttgggccaaaataggagactgaaaagaactcgccctactcgctccttcttcccctctcctgtctcaacccttgatctcaacacagttgacaccagtacggtgagatgaaggtcatcatgaagatgctaagggctccagcttccagatcgaagtggaccccaccaacaaggaaccaatctatcgctatggttctagttgaacattaatagaactcctggcaagtgattgctagaatacctaaatggtttcctcaaacttagattacagttaagattatattcttatgctaaacaatttggttattgcggccctttgttttgaaatccctactactattaagaaagcatcgtggggttacaggggttcaaacatgcatgcatgaagttttccttttaaatcattttacaaaatgacataaaccatacataaattgata

SEQ ID NO: 139711 - DNA, 467 bp, Zea Mays
aaaaaaaacaaacttttgatgacattatcacgcgtccaagtgtcggtgggtgttacagtgtcatgtacagaagcgtgtcctagtggcataagaaaagtgtgccaaacactcatcagttcagaattttggcggcaatcatcgatgcaaacatacactaccgcgctaatgatgatagaaggtaaggttgttgtagcagtagtagtaggccgcggctaggctgggctctcacttggacagttcaactgtgctatgtgaagcttggcctttcattgggtaaatccaagccttcaattctgtcggccttgcaaacaaaggcgggtatcgtccacggacgacaaagttaagcctgtccagcgaagcgacccggctgttcctcagttgcttgcgtgcatccaaccacgcacatccaccgtggacccgaagacataaactagaattccaccccttcccggccccgtcacctctgt

SEQ ID NO: 139712 - DNA, 389 bp, Zea Mays
ccacctatctcctcgctcgccgccaataatttctccgtcgcgggtgagctcgagtcgacctgctgccagggaggagaaatccttgagttcggtcgtagacctcagtgctccaagccaaagaggttggtgaggtttgcggcgaattagcgagcgcatccgcggcatctgcacgggtagtggagccctgggcgtcagtggattcctcaccggagccgtgaacctccgtcgggccgcaattcctcgcagtcgtcgccctgggacacttctaccggaggtatggtagccctagcgtgttaattggaggttcaatttccttttgcgctcacaatgacgggatttggagcttcagggcggggaatgggggttcaccggtgaggtctccgccgtcg

SEQ ID NO: 139713 - DNA, 546 bp, Zea Mays
tgttcatgctagagctggacaaatttgtggtggttttcattgatgatattctggtctattcaagaaatgaagttgagcatactatgcatttgcatatagtacttcagcgactgcgcgatcatcatttgtatgccaaactttcaaagtgtgatttctggctgagggaaatcaaattcttgggtcataccatttctcaagatgggatatcagttgatccggagaaggtgcaagaagtgatggattggaaacctcttaccaccgtgcgacatattcggagttttctgggattcgcaggatactatcggtggttcattccggatttctccaggattgctaagccaatgactgaactattgaagggagtaaaatttgaatggagccagaagtgtgcggatgcctttcatgcattaaggcagcatctgacaacagcactcgtgctagcacagcctgacaacaccaaatcttttgatgtgtattgcgatgcttcaggcactgaattgggttgtgttttgatgcaagacaaccgagttattgcctacgcatccc

SEQ ID NO: 139714 - DNA, 671 bp, Zea Mays
cctcaaactgatgggcagaccgagaggactaaccaagtactagaggatatgttaagggcttgtgctctgaaacatggtggcagttgggataagagtttgccctatgtgggttctcttataataacagttaccaggccagtttaaagatgtccgcgtttgaagctttatatggcagaaagtgcaggactcctctatattgggatcaaactggcgaaagacaattctttgggccggaaattatacaataggcagaagaacaagtacggttgatttgggacaacttgagaactgcgcagtcaaggcagaaaagctatgcagatacccggagaaggcagttagagtttaaggagggtgatcacgtgtatctgaaggtgtcaccgatccggggtatgaagagatttaaagttaaagggaagttgtcccctcgctttattggacccttcatgatcctaaagcgagtgggtgaagttgcctaccaactgaaactacccgaccatcttatggatgtacatgatgtcttccatgtatcccagttgaagaagtgtctcagggtacccaaagagcaattgcatatagaggaattaagtgtttaggatgatctgacttatactgagtatcctatcaagatccttgatactttgactcgtgttacaaggagtaaagtgatcaaa

SEQ ID NO: 139715 - DNA, 648 bp, Zea Mays
ccagaaaccagcaggaaataattctcaaaatcagaacaagaatacttctagcaacagtgcaaaaggaagggacaacagaaaattcgggcgagtattatatactcaagtggatgtgactccagaggaaaatcctatgcttatgggtacgtttcttgttgcccatcatcctgtcaaagtactttttgatactggtgcatctcacacattcattagtagaacttttgcggtgaattatgatgttccaattcaagaaacaaatatgggagttattataaaatctcctgggggaaagttaggcacaaaggaggtagcctttcatgtgccagtagaattgggtgggcatatctaccccaccaatatgatagtattgaagggacaggacatagaagtgatcctgggtatgaattggctagctcaacatgaagccattattgacacgaggaaactgactattcagataaaaacagtgatgggagaaagtcagttgacaattcagttgtcctctttagaagaagtgctaggaagggcttatagtgtggtagttgaagaattaatcaatattccggtggtgcgagatttccaagatgtgtttccagaagagttgtcaggtttgccaccagaacgtgatgtggaattctctattgaatt

SEQ ID NO: 139716 - DNA, 354 bp, Zea Mays
atgacgaacgacaggttcattttgaggtgcctctgaaccctagtgatgcagatataaacgctatgctcgatttgctagctgaggattcttccgatgctgctcctgctggggcgttggcagtggtgcccctcccagaggttgatacgactttggatgctcagaaacctgtccgtacttgcctgaggcgcccttgccgagccaatcagcctgatcctttttgttgatgagcagaagaagaaaagaagacgcctccggcgagtatccagctttgatcaggacgctggtacctcggttcctgctactgaagaaatgcctgcgactggacttattgatgctgaccccaatgggtgtccc

SEQ ID NO: 139717 - DNA, 490 bp, Zea Mays
atataaaggttcatgattaatgtaattaatgtaagagatgaactataaagaagttaagcattcatgctagatgttttcttgatttatacatttaaaaaaacagaaactctcatttaggtttgaaatttggattaaaaaaaaagaaaacctctctgcggccgactgttttttttggttcgggcccagaaccacatgggctctcgctttcccctagcgccgttcagtggaccaactaggcaatcgtggctcacggctttggctggtgctcaatcactgaattgtggtccccacatgtcatccctttcttctttcctcctcaccgaaacaagcgggcggtgccatgaacctcagacgactgtggaaacctgattctgggagatggggctctgcaccgcgcggcctcgccaccaaccgtgcctggggcccagggatttatccgcctggtgtatttccctcgcgaaaactctcccagagccatgcacggagttcg

SEQ ID NO: 139718 - DNA, 292 bp, Zea Mays
gcaagatatgatagaaaaagcaaaatctcctgcccccaaagctctggccgaagatgttgattacattattcgacatgcttcggggaaaaaattatccaaagaggaaatcttagaagccagacactatgcccagaagctaaaatatccgaagggggctttggtgttcaatggcactgacgaagatgacttcctatactatctcctggacaacaaagaaatattcgtttgccgggagatagccaaaagtatgggatttccgaagattgaggacggcctttcggccatgtcgaag

SEQ ID NO: 139719 - DNA, 738 bp, Zea Mays
tatgcattcgcgacaggatatgaagcatctcgggccgttcgatctactccttacggtccagattagactgccacttatctgaaccggtacgcgttaaggatcgcaagatctgagatcgacggttaaggttttatgaatcgtgatcccgcgcctggcctttggattcaatccctacggtttctagcgcccatgacctgatcaatactgagccgcacgatacatgcccgtcggtccagattttaagtatgcaagggaatcggtcgaatctaatccaaaccgtctgttagccgatcaaaggccacggtcgctctcccccaactctttctctcctccggcagactgggcacggcggcgcccgcatggttccgcggcggagccatgactggcaagccccaaagctccaaattgcggacacgcttcgaatcctagcagcctaaaatgatgtcctaaggaagagaaacacgatgaacgtagtcttaccttactgtgtgtcgcagggaaccctggccacggcgggcagcggattcaccaacaccggcaagggattccacggtctccggtgatcttccccttcaattgcgcccacgctcgacttcaacgcagtcgtagcttgtccacacgaacctccccgacccaactatgatcgcgcgacgatggtgagggcgtggatcacccctgacggcgcaaggtcttcttcgccggtcagagacggtggaggtggtccccaggcagtccgtg

SEQ ID NO: 139720 - DNA, 1138 bp, Zea Mays
aggggtttctttgcaagttgacgcgcgtgaaggggtatcctattatctgggccgtcagatcgcgagtcaaaggttcagattagaagccccccctcaattgaaccggtatgcattccagtccacaagatccaagatcaacggtgggcacttaatggcaaacgattccatcccgagccgcaggatcacgatccaggggctgtgaattatccacccaatcggtcatccccctgttgatctcacccgctcaaacctcatcaaacggccataaggccatcttccaccccacgacggactgggcagcagcgccgctcacctcccgacggcgaacacaccggagcagcatgctcccacccaagtgcatagcttcccacacaatcgaatgctacacgagccaaagaacatggcgcattgaacggagaccttaccttgagcagacatcaacgcaggaagctcgaccacgtcgccatgcggcttggtgatgaccagcaaggtccgacgagctatcccgggcgtccccggtgtctatcccattcgataaggccatggtcgtcatccagctgacccgcggagcacccccagccggacgtagatgccacaatgtcgatgcccgcatggattaacgaaggcggccacggcttctctctctctgcgcatggtgacggagcttggcgatttgttgatgcgaggcggcgctagctcctactggaagggggaaggaggtatacagcccgccaatatatatcccgagaggatgaccggaacgccataatcgcggcgaatttcacgggcggaacacgccgatgcctacgcgcgacaggaaatcggaacggagattggcaagatttggaggggataaatccgacagttgggtcccacctgtcatcaacacaggctttgggagaggcgcggcgtctgtgtctgcggaacggggcccaagcgacagcgtcatcacggacgattcacggctgggcgcccagtgcgtgaccccgggctgacgagtggggccctgaactcagtgaccgcacgcagggacaagggcaagtgggccgacgtgcgtttgagggggaagggaagagatgggccgagacagatgagatttggcccaggcgcaggtttccttcactttttccttttctaa

SEQ ID NO: 139721 - DNA, 666 bp, Zea Mays
cgaatcttccacgccgccggagtatcctgtccaagaagagtgccgtcgctaggaacatgctgctacaggcgcccgtggagcgcgctgccgttgagagcccgctgctgccgttgcctgtgtagagtggtgatgtttggccaatgtacgtttggacttgtggactttatttggattgtatgtgatgatgtttggactacatatttattgtataagatattgtgtgtatgtgatgatgtaggcttaaaaatataaaacatgttctgaaggcttctcatctagggagtgacgagtgacctagaacaggttttatattttttttaagaaacaagtaagaacctcgatttgactaacgtacttattagtgccatgtaggatatgtttgccgacactctgatatacttaaagtcatgtggcaacgccaacgggtccacgggaaataccacatggccttaagaacgtcggccacgcatgcctacgtacttaatgtcataagtacattggtccccgacgttcttccgagaagtgtgtgttagctgccacgtggccagattttaagtagacttcctatcccactcactagcttacttcatatttcaaacttcactttataaacagtgcaaaacaatactttacacgaccaaatacacggccagctggagatagcct

SEQ ID NO: 139722 - DNA, 754 bp, Zea Mays
gcgggctgcaccaccggtgctccttcagggagcatgagcctgcctgagatcatgccacctctgagcggttcgacgccacttgttgagcggccggcgcctccaaatgtggtcactactcagcctctagccaatgaccacagcatgctaacgcgtggcaaacggggctttcgtcaaccaaaggtacggcttgatctgcatgttgctcctttgtctcccgtgcccaaatcctaccgaggagcattggccgatcaaaattggagagctgctatgtctgaggaattttttgcacttcagaagaataacacctgggacttggttcctcgtccctcgggtgctaatattgtgactggcaaatgggtttatcggcacaagtttcgctctgatggttcactagagcggtacaaggctcgctgggttcttcgtggtttcactcaacgtcctggaattgattttgatgagactttcagtccggttgtcaaacctgctaccattcgtacagtactcacagtggctctcttccatcgttggcctgtccatcagcttgatgtgaagaatgctttcttgcatggcacccttgatgagactgtctattgtgtacatcctgctggtttcgttgatagctctcggcctgatcatgtctgtcgtctgaacaagtctctgtatgggttgaaacaagctccgcgtgcctggtacagtcgttttgccactcacattctctcttttggctttgtgagtgccaaatctgacacttccc

SEQ ID NO: 139723 - DNA, 370 bp, Zea Mays
ctagatttagttagtccttgtcttgataaatgaagttgggtggctaattttcagatctgcacctgttatggctgtagtggattgagctaattgtattggctaatatagtgcaacaaaaatcatcaatgggttataagtgtttggtagtgttgactgccttgggcatgttctcaattaggtttattgtcttctttgctgtagaatagaatcgtgactgtagttgactagttttgtttttataggtatgatcatgtaactccattattgataacccattggtcatgatacttacaacctagaattagctttaccagtgttcttgtgtccttataattataaataatgggttgttcattagtgctaataatag

SEQ ID NO: 139724 - DNA, 425 bp, Zea Mays
cccgataatagagctagaatcagaaaagacagtagaacatccaaaggtgttgagccctctagctgtaacagggctgccgaagccatcgagtactgcaacagcaactcctatgaagagaagaatggctagcgttttagatgatgttttagaatccatgaaagtgccagttcctgtttctgccaaagcatctagtgaaaaagctggagatgtagaagaagcaattactgcaagcacgactaatgttcttgccgaagccgggccaatagggctggtggaagagagtgttcctgaaaaatataaatcttctactcccgaagcacctcctcatggtgacttggaatacattgtttgacacgcttcgggaaagcagttatcattagaacaaattgccaaagtagaacactatgccaaggacttgaaatacc

SEQ ID NO: 139725 - DNA, 726 bp, Zea Mays
cactccaacggccgaaccggtatgccaggagcgatcccagccgtctgctatggatccagcggtcacgacatcatcttccccattcaggcacgcggctacggcgacgccgccccaaaaccgcggccgagccagtgccaggatacccccgccctgttctagcccctagcacctaaatcgaccggctcaacataaatcggaggtaaaagcgaaccatcagagagagtccttatattggtcaatggcgcagacatttctgcccgcgatgaggggcagcaccgttgcgaaccagcaaccccggtgagcaaatcgaagagctttggcgcacaataccaactaggatagcaaggatcaccatcccccggatgacctgaagcacacggactagcgcacaagccccaaatgtcaccatgggcgagtgtccacgacagcatgcggatccaggccgagcaccacaccggtgaggaatcgacaagcgtcggagaccccatctcaccccctgattccatggacggctcaaccctgcaccggaaaacccccaacggtgccactgccgagcccccagcgcagccgttttacgaatggtcgacggtgcggaccggagttcacacgccaccgcgcgattctctctctctcccgattggtgaatatgaggcggccatatctcgataggtggccaagagggggaagaacatgggttttatatcaccacggccgacagtccagatg

SEQ ID NO: 139726 - DNA, 638 bp, Zea Mays
tatttaaagtataatttgaacatactagtcttgcttttatttataatatttattttgtatatattttcctttttagtaattcttttcctccccctccatatttctttggagttttgttttccaaaatagagtttggattccatgtggctattaacatatcaatgattcctttattttattagccataaatgcacaatcaagtaaaaactcagcatgatgcatgatttatttaggcgttatcaattatttaatccccttttatactgtttattctcatgcaatagtaactagagatggtacacacatatatatatagagggaatattctattctcatatgagttacaaatctgggtattacaggggccgagtcagaagattctccagccaacatatcgagcacaacattcatctctgcatcatctggactcgctggcatctcaaaatgaactcgcctctcatcattgggaagatcacaaagagaagcaaccaaggcctcaatatcttcgagagagggtcgtactctaagacccagaccactatcaccagcaggaggattagacacgaaattgaaaatggacttaggaggtggcagattccaagcagagtaggcaacaggagcaccaacatttgatactt

SEQ ID NO: 139727 - DNA, 762 bp, Zea Mays
tagagggttaatttattgtttttaatagttcaaaggatagaatgactgattttatgggtgagaagatgaagtaaacaaccatcaatagttggggaaaggtttaagtagactttttccttttttacgaaaagtcggtgcttgctgattatacaccaagaaacatcctttcacagccccattaaccatctccatagcagccgtagacaaaaaacagtccttgaaaatttagaaccttccttcagttaagaaatatgtccgttactgaaatggagaagggttgtacacatagttcaatgaatcaaaaggaaaaatgtttaggtgccttttctgctttagatgttgtctctttgttatttctctctatatcatcatgttccacgcaagattttccctggcttgcttctgattttgcaatgttgtctttttggtttcgttataagaaagtagaaagacatgctcctcttttgcctgtttcagcactgatagtggtttcacttcttgtagcaggctatgcacccagcaacacaagcaaaggtggataatgcatgagatattctccctagattgttctggtaagtttctgaattttatctgtagtagagtagttatacatatttttactgacacaaatccaagcatgtgagctaatagtggttaagtttgagcattgtgcagcagcaacatgtgtgaatttcagtttgtgttgccttaagttactatggcgttgcgatgattacccccacccccaccctgaccattacg

SEQ ID NO: 139728 - DNA, 310 bp, Zea Mays
gggaaacgagtaccaggggcactcggctgattattttgagtgggggcatgagtgggacggataaaaactggttgcttgaagggataggcaggtggatgaggaaaagagcaatttgggttaaaaggacgaatcaccaacctcgaccgcttctcagatccttaagaggatccttcacccccttcacgcccatatctttttgtctttctctgccccaaattcatggcttccactgaaagcgctgtgctcacggccctgctataagtgaggtccaggcaagtggccatctttcgctgcagtcgatcatttagag

SEQ ID NO: 139729 - DNA, 341 bp, Zea Mays
atgccatcgaagcccagccatttggattttgggaagtcaactgtgtctgaagctgatatggctatgatgacgaagttaggctacttcagagaagccgataaggggttgattcgttttggcagggaagagactatcccaaaaccagaaaatgatgaagtggtggtttttaagagcttcttcaaagcagggttgagatttcctctacacggggtgattgcagatgtcttggaaaattttgagatttaccttcatcagctgacccctaacgccatcgttaggcttagcatgtatatcttggctctccgcagccaaggggtggagccgctcgccgaagccttctg

SEQ ID NO: 139730 - DNA, 335 bp, Zea Mays
ggggtttgtcagtaatgagggagcacaagtcctcgactcctcccatcgtcatgaatagagcacgaatgaatggtgccacaccggcgagggaggctcccaaatcgaggggtgcatatgaggaggtctatcaatggggaagtagaagaggagtccttgctgacagatccttgcttgggctggagggagaaatgtcacacttagttttaaactagtcagttgcctgtttgccatagtttctatttgtcatgagtggactctattttaagcgagaagggtgatgcgatatagtagataaatataatcaaactcgccatatgtgtgcctagaaagttcac

SEQ ID NO: 139731 - DNA, 531 bp, Zea Mays
caggttaatccatattatttggtctgcgacccatgtacgccccgttcgtggtttcgacagtgtaactccgttgttttccaacattatgaaaacaagagagttatgctacggaaatcatgagcggaaggtacacgaatcagaccaaataacatgcaatgactgccattcttgggtgtgtttaggacctatcctctttctaatatggtttgtagttgtgaattggttaatagcactgcacactacatacgtcgccatgaccaaatctaggggccatgaccccactttgccccctgtgcatccacccctggctgcgtggtctgcactacatcaagcgaaacgcctacgtcaaccagcataatctatgctccatggtatataataggtatgtccaatggttgataattatatttatcaatgttatattttctagaccaaaatccaactgaaaaagcctactttattgatgcaaatgcttggtgcttaaattacaagtcatatatgctatgtcatttatttagtaccacatgacca

SEQ ID NO: 139732 - DNA, 371 bp, Zea Mays
ggggcatagcccgggccttgagaggaacaaccttgcaccggaagtaggcaccaataacgccagcgcaagacatacctttctctcagaggataaccacaccttctagatgattgcggatgcgaaccttctcgtcgggtgtgatgtcgcaactccaactgacgggagcctcgaagggaatgcctagatcaaagctaggaagtcatggccctagtagggtctcctaaactgcaacccacaaataaaaccattgttgatgccagcccttcttggatagggaaagtgaaatcgagatatactcgagtgacctcccattgcagagacgaatactcgtgcacccgattggccatgcctctaccattcttcgctcctcc

SEQ ID NO: 139733 - DNA, 625 bp, Zea Mays
gaggagctgttcagatatggaagcttatggggataagccagcatctcagagtcactaacacgtttagtcacctcattcacgacggacgcatacccacgcccaagatttggtggacctctttctttttacctcatcagatgcattctatttctacaactcgccgtataagagagaacccagcccagagaagcaaaccgtgatttgcacgcaattccgtgatcttgcattgtgccccttaatcagaactccacaaaaaaaaacaactcatgccatgataaaagtagcattcacaccgctccaatactctaccattttcggtgccgaacaagtagactcgcacaagtttctttattatttcaccatatgattattccaaccccctttagcttagctatacaaggcacgcgtatgtgcgcgggtatctaactgtctgtatatagtatatatagttcaagtttacttactgactaatgagaagcagtcaaaaagggcatgcattatgccatgtaaaagcgtttctaattctactcacgtgaaaagatctcacttgcacagttcaagctctacctaccgtgctgctgcctgcagggtacaggatacagttcccagtacccacagctgggat

SEQ ID NO: 139734 - DNA, 639 bp, Zea Mays
gggaaaacagcgtcgcggcggctctgggtgaaattgggggtggagattgaggctatacggccgtaagaggctgtggtttcattgtgcgcaatcaatttgggcgaagatggagaggacagtgcgaatttaacttcgactgagcttcactggtggagatgaaagcacctcgccgtggctccttgctcaatttataggcacggcggtccggtaattgattcgcggccacgaggtgggctgttagcgcatgtcgaccacgtaagaacgaggcacagtaagagagatcgacgtatggtgacagcgcgacgaactgcgatgagtcacggcggccgccggtgagtaactccggccgagctcaggagatggtgccacgtacaagttacccttttcccggcgttatccatccttcaccgtgcatgaatccgggcggcgatcaacggcggcgagctgagctggcgttctgatccacccaaaacactgtaccatggcacatcttcttcagtcgcctgaaccggccacgatccaacccaattttctctggattcttgttagcaacagagcgatctctcttaataaaatttgttcactaaacatcagtctacaaacttactataggattcttgggtcaaaactgaacgaatt

SEQ ID NO: 139735 - DNA, 449 bp, Zea Mays
gcagtggcagggcagataaatacaggttgtttaaaggggttggagggtggacgaggtgaagaacgattttgattgaaaggtcggatcaccaacctttgtcgcttttcaggcccctggttggacctgtcacctccaaagccctttgacttccgtgagcctgcatacttagcttcaactgtcagcgccgtgctgatagccctactgtaggaggggtcgaggcaggtggccatctttcgttatagccggtcattaaggcctctcataaaacatttcctctttgtcaagtcagtgttgacctggtcaattgcgtactgggacaaatgattgaacttgttgaggtactgtgtaacagtatctccaccttgtttgagtttcatgaattcttcttgcttcatatggagcactccttctggaatgtagtgctcctgaaatgccaatttaaattcgtc

SEQ ID NO: 139736 - DNA, 607 bp, Zea Mays
acatttcttcaagctagcgggtgccgagctgcgcatgagttcgtcctaccaccctcaatccgacggtcaaacggagcgagttaatcaatgcctcgagacgttcctccgctgttttgttaatgcctgcccaaagaagtggtcctcttggcttccaacagcagaattctggtataataccagtttccattcggctttggggcgttctccttttgaagtactctacggtcgcaagccccgttctctaggcatttctgttgatgacgctgcccccgcttcattgtctgattggctccaggagcgttctcacatgcaggatctcatccatcagcacctggttcgctcgcagcaacggatgaaacgtcaggctgataaaaacaggtctgagcgcttgtttgctgtcggagactgggtatatttgaagctccagccatatgtgcagtcgtctgtgttgccgcgtgctcaccacaagttaagtttcaagtattttggaccttaccaaatcactgctacagtcggcaaggttgcgtatcgcctggcattacctgcagcaagcaagattcacccagttgtgcatgtctcacagctcaagttggccgcaggatacaag

SEQ ID NO: 139737 - DNA, 655 bp, Zea Mays
gtgaatccaggggcgctcgaagaccagagcctcggcgattgctcgccggacttccctacagccgcaaagccgctgcgcgtcggggaccgactacaactcgcgctcgaggccggtaattactcatctctgctgtttgtatcgaccctcactatgcatagcatgtctcggttaggcttgtggggcagtgggcggcccacgggggctcgccggagttactccgccgtggggaagaattcgtcaccgtcgctcagccaggtagggggaggaagacctgatgcgcgctgttggatgtgtgttggacggctcggattagagtctcataccgattcagccgcgtctaaccacaaccgtagatcgtgaatccgatgggcgcaggacgatctcagttagagagaagaagtgaccgttaatatctgatcagagggtcagcgttgcttaccgcttcatttaaacctagatctaatctgggccgcaagctggtgatccgacggtctagatcgccagataccccttcggccctggaaccttgcataagagcccctgcgtttagtcgaattagaacccgccgtccagtggggagttttctgagtctagagtattcttgcgccaagccccctgctgtctctggtaatcttgcgcccagtccagagccgac

SEQ ID NO: 139738 - DNA, 922 bp, Zea Mays
cttgggtctcggtgcgcgacccaggttaggtgctacatgctcacgctaaaccagaaaagggtacctcaaaacccttcctacggggcaatcggcttgggtctcggtgcccgacccaggttcggtgttacatgctcacgctaaaccagaaaagggtacctcaaaacccttcctacggagcaatcggcttgggtctcggtgcccgacccaggttcggtgtcacatgctcacgctaaatcagaaaagggtacctcaaaacccttcctacggagcaatcggcttgggtcttggtgcccgacccaggttcggtgttacatgctcacgctaaatcagaaaagggtacctcaaaacccttcctatagagcaatcggcctggcaaaccgacactctacgtctttgctatactcggaattcaaacatggagctcactttacgccgcaccattaactcgggggctgggttgtcacccgcctcgccgactcactacttcgacagctcgggggctgggttgtcacccgcctcgccgactcgctacttcgacagctcgggggctgggttgtcacccgcctcgccgactcgctacttcgacagctcgggggctgggtcgtcacccgcctcgccgactcgctacttcgacagctcgggggctgggttgtcacccgcctcgccgactcgctacttcgacagctcgggggctgggttgtcacccgcctcgccgactcgctacttcgacagctcgggggctgggtcgtcacccgcctcgccgactcgctacttcgacagctcgggggctaggccgttgtccgcctcgccgactcgctacttcgacagctcgggggctgggtcgttgtccgcctcaccgacttgctacttcgacagctcgggggctgggttgtcacccacctcgccgactcgctacttcgac

SEQ ID NO: 139739 - DNA, 314 bp, Zea Mays
tgagggttaattcggtcggtggtaaagtgcaagcagataagatatgctcaaatgtaagggtggaaataagggggatagggttccccagcgacctaatagtaatagacacccctggggtagatgtcatcctagggatgaattggttaatgaagtatgaagcgagtgttatctgtgacaagaggaccgtaacattgaagtccccgcccggagagaaggtagtgactgagctaaggatgcctaaaacagcgaaaggtgattgtcatcagatttcggttgatagcaaggaggccaacccgctcgaggttattagggtt

SEQ ID NO: 139740 - DNA, 508 bp, Zea Mays
cagaaatttaacatttacgattcaatagtgaccaaatttaacgtaatatgggagaacttacgtggctttgaagaatatgaggtgtgtcctgttcatgcggcccaatatgtctcatggggatgtgcttctctgcgccgaccacgtctgttgtttttgtgtgctcttcgatatgtccaggtgccctcaatgccgccggaggagtaacagagacaccctctgtgtatggggcgattgcagacgctacaggatgcatgtccattgaaacagacgtacctgctggcttatgcacagatgttacaggcagaatgtcatcgccagcgccagtggtggacatcttctcgccgcccatcgccggccggacctctcacttccgccgccgctaaccgccgccaatatttcagatggacgagcgaacgtggacgcggctgtaaagttgtattagtttcctgccgtaactgcgcctttatttacgcgcaggaagatcacgtattgccttatctcaaatccg

SEQ ID NO: 139741 - DNA, 462 bp, Zea Mays
cacggatgtcttcaactgaggacaattattcttgtagtgactggggtctccgcagtgccaacaagcattggctggaggttggttgcttgcaacagatggggtatggagggaactttgaccctgctggacgaaacgtgacggagcggaccctgctgtcttgttgaagcttggtcctttgggaggaaacccaaaagatcaaattctctggtgcctgtcctgctgctgagctcggagaacttgaaactccctcttgaggtgacccttttcttcttctctagccctttccacttgtatggccttgtttgagaggtgcgagaagctgagaaaatcttggctagcgaggatagtcttgagttctggtctcagcccctagaagaaacaggacatcttcttggcttctgtgctgacatcatcaggcgcatagcgagccaattctgtgaacttgtggacgtattcactgac

SEQ ID NO: 139742 - DNA, 306 bp, Zea Mays
cagggagatggcgcgcgatgaactggaaccaagcacagacgtgactgaggagggtttgacaccaacgcgagcacgagaatcaccacgctcactggctagacccgaagatagaggtagggctttaccgaaccaagcttatggcaatatggaataagatcagatgctggccgagctcgatcagaccatggcaaggaaaggactctgagggcgttagtggctgcatggccatggttacgtggctttacttacaggccccacgccgattcacagcataggagatcagtgcacctggtcgacccaccccag

SEQ ID NO: 139743 - DNA, 514 bp, Zea Mays
tgggatggatggacttggttcattggtcgacggcgagcttcgatgcttgcgttgtcgtcggggggcggagaaggacctcgtggccactagaatttctcacccatgccgctgctccgccgtggaaccacaggcgccgtggttggagaacatcagcatcctcaccattggtacgtgaaccctatatctgttgttgggatcccgtctccgtgtagcgctccctggattgggatctagagcacaggaccgccatccagcaggctcaccggcgatgccccaccgtggccacaggcagcgccgccgttaccaggcttgggcgatgggggtggaatatgggccgtcaatcccagatgaagggctgggatttgatcccggattctggtttggcctgaactcttctcggccgtctgatgtggatccggtgcgtgataatcgacctaaggacttataatccaggcgcctggtcgaagatccaacgacaaggattgtgtaactcttcgcttaaaggattcattta

SEQ ID NO: 139744 - DNA, 361 bp, Zea Mays
caaccttcgttagagagacagtggttgaggcagtaaaaattgttggtaaatattcagcgaagactgagacaccaaaaatttaggatatacatggttcaaatgttagactaaatcgtgtatttgagctgaacaacgtccggtacggaccgtatcttgaggaaggatcctcttatgttggggatgtagaggggtggaaaaagaaaggtggaatcagacatggtggggtgaatgaaggatgctccgagggtaaggctgagatgccgccggtgacaaagaggaggaaagtggaagcaagagcaaaggggccgtcgagggcacctaggatgacggaggtgtccgacgggtttgctaaggagctgga

SEQ ID NO: 139745 - DNA, 314 bp, Zea Mays
ggcacatgagggcagggaggaggaagcaacgaccctcccgcacaagatgacacgatcggattgggggcagcaccaacctacctcacgaccatcatgaggcgaccaacaatgaccggggtgctgacagcaccggccggcaaaaccaacgatgtaggttcaccgccacaagggccagccttcgactccccgtctagcgagctggaagacgaaagggatatgccatatcctctgatgcttgagccgaccgccccacgaggaaagttaatcaccaatacgatggaggggtcggagtcaagtgagtgcttggtcactac

SEQ ID NO: 139746 - DNA, 376 bp, Zea Mays
tttcaataacatgcttggggattcgaagacatttctttaactgggacacgtagaacatgttgtgcactgttgacaaattctttggcaactgtaccttataaactactagtccaccaaatgaactgagctccaaggcttcacgaataggaaaaggtagtatagaaaagcaaagataggtaccatgaatagggtcgatgaaacacatactataatagctacacaaggggtttaacttaaaattgtatgtcatgatgcatgctcgtcctatacgtcctcacaatttttgccaacatatagtggcgttcatgctctatggcggtggcatacctacactccgtcattgaatactagtcgcacttttctagggtttagttag

SEQ ID NO: 139747 - DNA, 501 bp, Zea Mays
acaatattcattaccattgcactgttgtgctgttaaaaatttaaccatagccgaagctttctgcactgcgctctcaagcgagcacttcatcatttaaagttaactttgtcagacgagttagcttcgtcaaattgtgaaaaccatccaaatggccagagtgcgatcaactgcaagggtgtctcgtgagggagaagagactgaggttaccgagacaacaccaatttaaaagtcatggaacgatcaggtctagttgtgacagagggagctattgacgaaggtgctcccgatgccaaagctaaacagactgttgctgaagaagaaaatgttgatgaaagtgaagattacagtattttgatcccaacaaagcccagtcatttagattttgagaaatctagtgtgtccgaagatgacatgcccatgatgatgaaactaggttattttggggaagctgaaagcaaacttgtccgatttgtcggagaagagactaccccagcaccgaag

SEQ ID NO: 139748 - DNA, 416 bp, Zea Mays
ctcctaggtgaatgaagagtggtatagtgcaacatatgtgttttatctgatttcttttttgcaggttggtgctaatatcgatgacactgaagttgcgacagttagttcctctataaccaaggagcggaaaatggattaaagctcatttctctttcacataacgagggatgtctcactgaaactggtgtagcaacgtgcttggcccacggcgcacggtggcacctcgccctcattgctctccactccagtgagcaaatctggatgccctgaccacttgccttgcttggcgagaacccgagcaccgtccgagcaacccactgatgctccctagcccgccctcgcgtctcaaatgaccacgcatgcggttcgacaatggcggaaggtgaacgaagattctagtacaccggtcccacgcg

SEQ ID NO: 139749 - DNA, 591 bp, Zea Mays
ccactattgttggcaaccgtaactgagccacctctctttctctctttgcgctaggctaaggttagcaaacactaaaatgtggcattgtactactgccttccaaagtatgtcaattgtaaacttccaagagtgctgatctctactactataatgtggggtttctccttcgtacgtcgtcctccttttcgcatgcgctcgttcgcctcccacctgccaaaaataatttttgaacccaggtcgcaaggaacaaaatatctccttctaaccacgacatcacttgttgatttgtgatatataaaggataggtactataaatatatatactaataattttaacataaaaattgtaccagaccgagccgagcactatggccgtgaagacgaccgagacacgataagagcccactttaaattgtatcaagccgcgcggtgacactattaaatggatcgtgccttaggttggcatgctagacacaacccatttgattacctatagttcaatacctccatcctcagtgttcgtgatctctcaagcgtgaaaacgtgagagaaaaattttgaacttgtctaagcccgcaccacatatctcgc

SEQ ID NO: 139750 - DNA, 555 bp, Zea Mays
tccggcatgaggccagcaaccattttttttcgctagcgcgcgtgaccggaggtaaaagctatggccgacgtgtgggcccatacatgcagttctgttcttctagctcaagtcggaatcagccgatagagtcggcttagctgttgtagcgaacaggtcgcccctatattcgcatctattccgtcacccgcataacagaacacccatgagtttgttagaaaaatccggatgcttggatcaggcgcccctgggatatatatatttgaatgtcgtggccctagtcccatggattcgataagatggaagcatcgcgtcgccgccggtgttgagcaggagagcagcctagtgatcgaggggcggagcgatgatcaccgggaccatagggggttgtgcgtagctttctggagcacagggtcgatcgtgaagccagagatttctcgccgaaggcgagcacagccacatagccatgacttctcgcgggcagaaggggttccacactgcaaaactttgtgagtatcagtcttataggttcgtcgtggtctacgctttgtgtatcac

SEQ ID NO: 139751 - DNA, 681 bp, Zea Mays
gggaacttgggttgaccagtaggcacttggtcatagggaggtggtcctgggacaaataaagaagatggtgaccacgcactcattactggattacttgaggcatttgaggctaaatgtaaacttaaccgtgactcctgtaactgaggctggacatagtatgggatataaggtgaacattatgaggatgtactacacacttcttttgactgggagggttgagtggctgatgaagccaattccttctacttgttgatagtatgatggcatgttgttgtggtgtggcctttgtcctcgccacaaaacaagcataatggtttccttggaggtgcattgaatctaccaccaaaacttcagcctcctcttccgcctctctgagaatgtgaatgaaatgtgctgtgccaaggttgctgttgagagcttgcttgctattgacccgactgaccctgaaactgggccatcttttcctcaccctgcactggcttgtggatgcttcagacatgccttggatggaaccttcctctaatgcccctgatgactttggtgtatctgtgtaactcttcccttctttagcgaaaatcattgtcagcccttatgtactcgtccatcttttgcagtaatttttcaagggaatggtgaggtttcctggcaaaatactgaggtgctggtcctggcctaagcccc

SEQ ID NO: 139752 - DNA, 275 bp, Zea Mays
gggtccagtcaaggtggtttggtttacttgaaatacaccttcagatacagagaccagtttgacgaaacaaatgacgactggctgaaatgcgttgaggcgactagtgatgagttactggagcgtatacaagagccgaagatgatgccttgacctcaacctttggaaggcgaggcaagaaaaggttgaacagagtttttgacattattggctttgtgtatctggactacatttacccctcgcgaaaacaggggaagaaaaggaaagctgtcgcctcg

SEQ ID NO: 139753 - DNA, 1052 bp, Zea Mays
gcaatgacagcaggaacagtgctggttcccaccgcaaacatttgacggttcttcaaccaaagcaccaagagttcctctcaggcttaggccagtcacgtgcaggttgtcacattgtggagctgcatcagcatggttgccggaactcaaaagtactctgaattctcaagctggcgatcccgaatcagctgggatccatgatacaaataagaagtcttgactgtttttagaatcaagtgtatttctttggaaacaatataactgtgttgaattaatctagtgttcaaagacaaatacaagaatcatttgtaatcatctgtctgcaacctgactctagtggggtacagtcatctactgaatctactgacataggaaaccagaaacccaaatgaggttagcagttagcatactttttgctcttcagtgtgtgtgtgttcatggggaattaggagacatgcataacaggacaagcaagcctcggtagagaactaaatacaacagccaaagttgagctagatcaaacagggaaggggcccatatgtagcttgcaacaccaggcatgctggactacttttctcagcacgactctctagtttgccaaaaaaaaaatcaaataaaacgccatcatatacaccaaactatattgcagaataagctggctaaggaaagcaacagagggctttattttatcagctaatttgatggggcataatagaataagagaatggatgatcttccagtgtctcctttacagttagaagccgacaaatactatataacaagctgtcgttgataatgtatatttcaggttccagttctccatatagaaaataatctctgaagtcaagctttcaccgactccaaaagtctaatatacagcctacctggtatacaatgtgaacgggagaccaatctgcttaacaatgttccctcccaatttcctagaacgattagattacaaatcactactctgagcttaagtgcgaacgctggttaagccctaagtggtttgctcttctgacattattttcttcaaatttatatctccatgatag

SEQ ID NO: 139754 - DNA, 474 bp, Zea Mays
ttatttctcgtaactcgagtcaaagtatccaaaatcttgatcgggtactccgtgtaagtcaaatcaccttgaacactgagctcttccatgggtaactgttcttcagggacacggagacacttctttagtttagatacgtggaacacgttatgcacatccgatagactatccggtaactcgagttggtatgccatctccccaactcgcctaaagatcaagaatggtccaatatagcgaggggacaatttgcccttaactttgaatctcctcattccacgaagtggtaacatcttgaggtacacataatctccttcttcaaattccagtggtcttctattatcagcatagctcttttacctggtctgagccaccctcaggttctcccttattatacagacttgttcttctgccttttgaataagtttaggtccaaagaattgtcttcctctagtatgatccaatataggagtcctg

SEQ ID NO: 139755 - DNA, 306 bp, Zea Mays
gtttcgcgcacacatatcaacaccaccacccacaaccatacaaccacggccatgcccagcatctacccaaccacgcatatcagcaccaccaggaggtacaagtcgtaccacccccactcccgcctccgtatcaaccaaacccacaccaccaaaatcaccccaagcaccaaaataagaagatttcgccgatcagccgtatcgcggagtcattcacatgatcaccggagggtccagcgttgacttcgaaacgaagcggcaaaagagggatcactaccgaagcgtcaaccacatcgccctcaccggccc

SEQ ID NO: 139756 - DNA, 609 bp, Zea Mays
gcgtaactttttagtagcctttcctatacgatagcaaaaggaccatattcttgagctcttggcggtggttaatggcgacgggaggacatacagaggacatagatcaaccaagtatgtttactggcatggacatcgtagttgtacctaatgttgtaaccgtagacgcagacagtgtagctgttactccaccggcggcgttgagggcacctggaaatattgatgacaacacaagattggcagagatggtaggagcagatcaacgcatccccatgagacatattggggcgcatgatcaggacacatctcacattctgcaaagccatgtaagttccgataagatcataatatcatttacgtacatacttttgtagtgctgtagcagcaccacagtaagtttgggcgtcattgattcataaatgttaaatttctgtgcacaaccagacaatattgatataagattgatacctaaatttggtatgacattttgtaatgtggacgaggcgtataatttttatagtcgatatgcatatgaggttggatttccgttgaagaaatatagggagcggaagaattataaatggttgaattgttcaatggaaggaaagaatg

SEQ ID NO: 139757 - DNA, 432 bp, Zea Mays
atttcggttctcatttttcataacccgaaatttcaaaaacccgaatagatagaaccgaattaccctaatagaccgaatgcccagccctatcctcggccacggaaatttcctgacaccgacgaactcccgccaaaacctgatggtttatcacctgcaatcttcagacgtgaagttatcttggcaattaactcatcctctgtgagatttagtcggggcagggccactgcgcgctcctgggcgagtcgctcctcagctgcctttagacgctcgattagctcatcaacggacatctcgctcaagtcaagtagcctctcaattgaagccgctatctgatcaaaccgagatggcagggcctgcagaaacttcctaacaacttcctcctcggtgtattcatcaccaagaactgccagttcacctgtgatgcgtgtgatc

SEQ ID NO: 139758 - DNA, 547 bp, Zea Mays
gtgctcctctgtcagacacaatggtcttcgaaattccatgcaaatgcactatttgatcaacatagatttctacatatttctctgtcttgtgggtggtatgcactggcaagaaatgagcggtcttggccaacctatccacaatgacccaaatagaatcgtggtgccgggaggtattgggcaatcccacaatgaaatccatgcaaatatcctcccatttccaagatggtatgggaaggggctgtaaggtgcctgctaccttcaaatgactggccttgactctctggcaagtgtcgcattcagatatatacttagcaatttccctcttcattctggtccaccagtacaaagatctgagatcatgatacatcttgttactgctggggtgcatggaaaatttggaaaggtgagcttcatccaatatcttctttctgatctcggggttcttgggaacaaccaatcggtctccaaaccatagactccctttgctgtcctgacggaaacatttgtattttttcaccctctgttcgatcatatccttaataacttg

SEQ ID NO: 139759 - DNA, 447 bp, Zea Mays
gtgtttccccgtcggggtaccgccctgggggagctaccggcgaggtgggagcagcaatgtctatggcgccgtcgtccctgcgctggcgccgccgtgttgacaaccaggggaggaaagagatggccctgtagccgttagatggggttgacggcagggattagatgtgggttgtccaccgctggatctttggtgaacggctcggacttgatttcgttgggttaaagtgtaggccgtagatttcgaatcgggcggtcatggttggtttgggtttcataaaatttggaccatcagatctcgatctagtggctcatagcgcataccgttttgagtagcagagatctaatccggggcgtagatttcttatcctacggctggggcattccgataacctttcagtcgtgtacttatgcaaaagaaaccctatgaaaactgtgaatcaacccgccg

SEQ ID NO: 139760 - DNA, 301 bp, Zea Mays
caaagggaggctctggttgggtaacaatgttgcgttgcatcataagattgtagcatctctgcctgacagcactgttggaggtcactctaggttcccaatcacttaacgacgcactaaacagttatttgcttggccagctatgaaatcttgaggtagatagtttgtccatgactgtgatatttgctcccatgccaaacctgatagatccaggtactcgggcctcctacaaccactcaaggttccttctcacgcttggcaggtgatgtccatggacttcattgaggggttaaccaagtcgtgc

SEQ ID NO: 139761 - DNA, 560 bp, Zea Mays
aaatttaggctcttatgaacatttccaatactttttgagataacactcaatttggcctcaccacacccatataccctaatcccatggttaagtaccctactttagggttaagaagcacttcaagtcaccacatcacacttgttttgaagtttttgcctagtggatgcattctaggtgtaacaaacataatgacatgtcaatgcatatgatgtcatgctcaaattttagttgtggtaacaccaggggtgttacaatagttgtgcctcgatggccttccatgtgattatccaacatgtgtgattaggtggagtcgcactagcgctagatgaggttggttcattgcgaagccaatgtttgttgataatcttcactgatgttttctcgagtctccatcttatttcttggacttagagtctatgactaactgcatgtcgatcatggtgttgttcgacatccacacccgtttcatgtgctatgaacttcccatgacaacttgctgataaacatctttctgtgtgttttactcaagaggttgcatccaacttgttttggataacttc

SEQ ID NO: 139762 - DNA, 388 bp, Zea Mays
aaagtgttagtcttaacatgattaagatatagaaatagactccccctaaagatatgcatcaagaatttgaatgagatgaatagatgcattcatttttagagacatgtagggagaagcattatacatcttgatcaaggcttataagatttgcaataaacaacttatgcctgatattctcacaatgaaaaggatttagaatactcacaatcacaccattgattgttttgtagatcttactatccaagtaggtgggtgttattcttgatgtcctcctctttcatttgagagtcctccctttgcagttttctctttttccttccaaacttattgaaaatactcaagagagatgttagtaacacaggagagtatatgatgaaggatgattctt

SEQ ID NO: 139763 - DNA, 415 bp, Zea Mays
ggacaatagaatttgtgttcgacaagggatgctagcgcggactcactccgaatggtgaaccaccagggcttcgagcaaagggtttgagatagagagttatactggttcaggctttcgccctagttcattgcaatgttgatcgtagtattgcttgaggactgtattacagttggtgcgtgtgtggaaagaaggaaggggcctatccatttatagctcaagggtaggaccttacagagtagacttgctacttgcttcctactgctaagagtgtgatcagttgacgtagtccctctgacatcatccataggtcgtgtgcagctgtattcccggcatgacgtactgttcttttcgtctggtatacaggtccctatagcgagttcgatgctgatgtccttgtactgacgcctgatgggtc

SEQ ID NO: 139764 - DNA, 678 bp, Zea Mays
tgctcgtcggcgctcctcctcctgttcgtccttgtgggttcatgttcctctgaaggcgtctggttgcctaagagctctctccttttaatcctgtctgatctatcatcccatccccttgccctgagaccagcctctccttttaaaggttgggagaagggtcagtcagcggtggcttcccttggaaggagccacaaggcaagggtaaaactagcattttaccctaggtggagctacacatactcgtggggcccgtggctgcatggttgtctcatatttaccatggtgaacgacgtgagagcggtgatggtcccaggcgtcatcattattgctatatcgaccccttatggtggtatttcttctacatcgtgctattgcggaagagggaggagcaaggggtaatagaaatgtagcctatcgggtgcaccagcatccgcctccacaatgaaagttcgcgcgagtacatcctgatccctctttccatgtctaacaagggctggcacaggcaatggttctatctttgggatgtcggttgagggccttttctaaggccgcagctaattggcgtcaatcgaagcactccatttgaggctccgtctaattggagttgcgctgtcacgcttgaggagaaaatctgagtccaaagccatttggcgggggtgttcttcttctgagagaaag

SEQ ID NO: 139765 - DNA, 596 bp, Zea Mays
cggagctgaggaggtgctcaatttatagttcccgttgtcggtggtgtccaattccacgaagttgtgctggcggccggaggaaagcaggggtactggagcaggggatgggtggcgttcaccgtggcacttcctccggtgagcaccggttgaggagctacggcggttatcggtgagctggtgcggctagtgacgacgtggtgaaaagctcggagcgtggcacaaccgcggtgaagcacggcaactccgatgacggccatacggccacgtcgccggtgcgaagggcagggaacagcgaggccacagtagttcatacacatccgtgactagatcttttcatggtgagcgaactccacacgcccgcggcacgaatcccggcgaagaggtcgttggcggtgagatttttgacgctggcggtctgatcttcaacagagcactgtaccatggctaaaacttgattcagtcgcctgacaacccaacttggagcgagattttctcttaattccttgtgacaacacaagtcaagcattgcagcaaacttggagagcattataccaactacatctttgctatatggtgttgtcacaaaaggccagtag

SEQ ID NO: 139766 - DNA, 286 bp, Zea Mays
cgtggatacccacaaggtgcttttgggtaggatggcttaattgattacgacccaatggttcgtgtggtaacaagacagaaagaaacatagacttatacaggtacgggccaagggagttgtgtaatccgtacttcatgttatgatcctagtatttaaatgaagttacaagttgtgaactatgagtgtgtcaggccggatgagatgaaagtggtaggggtacttcccggccttatatacatgaccatggagagttatccccgcacaagtgataaacataatccgctcg

SEQ ID NO: 139767 - DNA, 396 bp, Zea Mays
gcaagccctgctccatgcatatcgacactcagacaaaattctccaatgacgacgatctcccagtcactgatgagaaagcctattggtgcctcactgacgcactctagtacctaacattttcttggcccaacatcgcctacagcattcaataggtgtgccttcacatgaacaacccacaaaagcccccacctcatcgctctcaagcggattctacgctaccttcgtggctccatcaactacgaccttctccttcgaccctccccaacttcagagctaatggtctacaccgacgccgactgggctggctgccctgacacgcaccggtacatatccgactatgccttattcctgtagggcgccaacctcgtctcctaggcccgaatcggtagcctgtcg

SEQ ID NO: 139768 - DNA, 305 bp, Zea Mays
ttcaagttggcattccaggagcattatgttccggagggagtgctccagatgaaactagaagagtttatccggttgaagcaaggaggagatacggtgatgcagtatctcaataaattcaactacctctcccagtacgccattgagcatgtgaatagagatctgaaaaaagaagaattgttttatgagggggctcaacgacaggctccagcaaaaaatggcaacatgtctggaccttacctatagcagggctatcagtacagcactggcagttgaagctaaaaatatgggacatggaaaatcaaagg

SEQ ID NO: 139769 - DNA, 697 bp, Zea Mays
cacaacccttgtctacccccacttctctgtaccacagccgctcttcctctcgctcttgccatcgcgtggtgcctcggcctcgtagccgtgtcatcaagcagggaaccatcgcgcctcgccgtcgttgcacccgtgtctcgccgactggcaaccgtctatgcttagagcctcgttgtcatctgtactgcaccagtgccgcccaccgccgacctcttccattccctgttgagccatgctcccgtgccatctccgttgagctctgaggtgagcatcctccccatcgcctctcccccctctcctctccctcgtgtatcccccgcctccgactagagccctgcgtcgtcccgtggtggcccgtggccagcgcacggcctgcctgtgacgccttccctcgcgcagcttgcgaggcgagagccttgccccggccggtgagcactatgtcgctgccccatccagtgtggcctatggcgtgccgtcctgagtccctcagaccaactccagcaagggcccatatacgggcacgctttcataaaatacgcggccgaggctactgtttacgtggctagcggactccgtatccgggcgcggagaacacgcggcaccgatgctcgctcccttttctcgcgtcctctctctcttccccgcacttcaaccgtcgcttttgcaaacgaggtatgtctccgcgagttcgttcatc

SEQ ID NO: 139770 - DNA, 288 bp, Zea Mays
gtcgttgaatagatttctttgacgacacgagatttgtatttggtgtcgacttctctgacaacattaaatttgtgtttagaagaagaagaaaaaacaggaagggacgacgacgacagcgaccgtggtgtatatatatccgactactatagtacgttacgtatctgtctgacaagtcatagactgcagcagctcttcctgcctcctcgtctgagaaactcaactctttcactgttcttcagaaaacggcttctttcaaagtttggactcggtcgccacgcggcatgtgtg

SEQ ID NO: 139771 - DNA, 590 bp, Zea Mays
ttcctcagtagcaaactctaaaaaacaaataaaagttagaatacccaaattaccacgaaggtaccaatagagagctgtacaaaagtcttactttgaagtttgagtagaataagctgccaataatgtgttgccgcctatagcaactgatgtctgtttccagcttcagaaatccaacactcttggataaggtgcttacgatttttaccccggtacggtcgtgaatgcatcccaaaacctcttcgtcaaccccgccgaagagtatggatccgggctagtaactgcaagatatagaaaactctttcaattatgatttgccctcttcggaaagttcttggccacccaaataccaaaggtcaaaatctttctcttccgaagaggcatcttcaattctttttcccttgtcaggcgctgcggttacgttttcctcagcaaccacatccgatatgagtctgtcgattttcgacattgtagatgcaagttcattagcttcggctccaacggtatcatcggcatcgaaaggcatagctgcttttgccaccaaagctgagggcagcatctgttcaatagcttgcattacatttatgatccac

SEQ ID NO: 139772 - DNA, 347 bp, Zea Mays
ctttgttggacgatgtgttgcttctccgactagctactgccatgtcttgtcgtgtccgcaggtgggtgatggcttgttgcagtagaatacggagtagcctggtacgcctgttgtgcgtagaggcatatagacagagccgtttagattccctccgccttagtaacgcatgagtaatcagcgggagtcatgatgactgcagtccatgcagcattgataggcagtaacccttttcttggaaatgcgcgagtaatgatgagccattgtctttgctatggtaacgtgtgagtaacagcacggcccacgaagcgtggactgggcacgccgcctgtcactggaatggacatgca

SEQ ID NO: 139773 - DNA, 337 bp, Zea Mays
aaaacatgtagaaatggttatctaacacatttttctttcataagtaaaacaggagatttatattgtagatgttattgtttgttgatgaaatttgaaataagagatataagagcaactcgaaaagcctagctaaatcgatttgtatcggtaaaaatagaaaactgatgattaaaataggatccaacaaactctctttgctcctctctatgctatcctgctcagcatcacgtcgaggtctctagccatatttgctgagctcacctgcctcgccatcttcattctctcgtgcatcctcaccgtccctgcgccttgccgtcgttgcagctcactgtcccac

SEQ ID NO: 139774 - DNA, 336 bp, Zea Mays
gcggggttggggagcatgaggggcacacaagaacactgaaacgaaagggcagagggtatgagcggacctgagacgagctagccacgacgaggcctctttcacggtggcggaaagcaggtttgggggaagtgggaaattggtgagctctagtgatcaattgagggcacgacttggtggcttggtgcttgactaccctacggagctcatggcgtgctcaacttatagagttcgtgagcggtgttgcttaatttcgacgaattgcgctggcggtcgagaggggaatgagtcacggcggtgatctaccgtggcaaccgcagagcgactgaactacggcgg

SEQ ID NO: 139775 - DNA, 702 bp, Zea Mays
gtattgtttcagcacagcgatgtcctttggaatattgcataccacacttgtagcataggcctttggctttacgataagcaaataaggaagcaaccttatcctcagcatacacccctttggtcacttgcccagacaactgctcagtctgtcgaggagaagaagctgaatgtggaggtaacggcaacggcaagggattcttgctcaatgtcttggaaggaaacgacgcctcatatcttctggaatcctttctctggccagcagcctcctcctgcaattgagcgagaacaaaagcagtatccaaatctcgagggcgctgcaccataaccacagaacgaatatcttcgcgaaggccatcaacgaaacacatgatatggtagagaggatccgaatttggacaataagcgcgcaactgatctatgagctgtgaaaatcgttccacataatcagcgacactggaagtttgcctaatatggaataactgtctaactagaacagcatgttgatccttgccgaaccggtccctaaccaagtggcaaaagtccaaccaagaaatatgagccagctgcacttcaacagattggagccaacgagcagcggcacccgtgaagtacatcgtggataccttgatccacacagtaggatctaccgaatacatggcaaaataatcttccaaacgtttctgccaaagcttgggactatcgc

SEQ ID NO: 139776 - DNA, 569 bp, Zea Mays
agccggtatttaacaatgcatgttggatcggggatcagtggtcaggattttatgaaatgcgatctacaactgtccatcggatctaatttcagcggtcctgatttaaatcagacgaatgcggcgcaacatctaatcgtggccgtccatagtgatcagatggttaggatttggggcaatggggcgattttcccaatcccacatccacccggctgcgcgcggcggcacaacgcagacacggcggcgccatcgccggtgttcttcaatccttaatctcttgctctcgaacttcgatcgggacactactatacaaagaggatattgttgcgaatgtattgacgaggtccatacccggatccgagtggtgccctgccttgcccgcggctcatagcagaagtgcggcgacggtgataaattctggggtcaacagtgcactcccgattccaaactttcgcgtgtctactccacaggacttcggcaaacactaatgctcccacctcgggccacaggtcatcggcaacatggagaacagcgttggcgggagacgacacgatccgctcgagcgattatcg

SEQ ID NO: 139777 - DNA, 459 bp, Zea Mays
ccggacctgcgctgaatgccgcaggccgcgtaacggacggaatcaccggagcgcctttcctctctgaccgtcttggccttggccggccgggacccggacatctaatctaatctaatctaatctaatctaatcccgtgtcaatgattgccctcgctaaccaccgatcccatccccgcgcacgcatgcgggtcttgggtcttgggctaatactaatcgctgctcgtgctcggcctcgctcgctctcgcgatcgcaatctaatccgcagtgctgcctgcctggctcccgctcccctctcacacgcacgtacgcccggtcaagatctaaccaccgctcgctaatcgctaatcgctaatcgccgtcgccatcggcatcgccaccggccaccagcacccccgccacaatactcccttcattctaggcagcatcatgcacgtacgtacgtacctcgtgccccagcc

SEQ ID NO: 139778 - DNA, 310 bp, Zea Mays
catgtacgagagcacgcttagggaacttgagtctgctagagcttcagttgaggtgtccgacgagattgaatgtgatgagtgcactctacacatgtcgaacatcaccactttgcagaccaagtactccaccttgctagatgagcatgacgagttgagatctaggtctatcctgttgggtgcgtgtatcgtttgtcctggcttgcagtctgagctagcagagagagacgctgggatagctttgcttgagaaggctagctcagtgagtgcccctgcacctgcgcagtgtgcactttgtgagggtttgcaatct

SEQ ID NO: 139779 - DNA, 416 bp, Zea Mays
gcgatgccgggctccgggctactgggattgctcgccggggtctctgcgctgccgtagatccgctctcctccgtgggcgagctcgcaacctcctccacagccggtgagacccctctccgcagtttcgccattttcccctctcagtgtagtagcgatcaatttctagatggggccggtttggcaccgaatttcgtgctcgccggcgaaccggccaccgcgttgggctcagtcccgtccgcaagcactcgtgggccaggctccatgcggcataatcgaaggtgagaccccctccatgtagttcgcgttgccttcctgcacgtttggcactagttcgtattaggattcgtgctccggttgccgctcaaggctgtagccgtccatggcgccgccgtgggcagtgccctccgccgtgttggg

SEQ ID NO: 139780 - DNA, 372 bp, Zea Mays
aaaggcaataagaaacaaaagcacaacaaaggataaggttccaaactcgcgagccaaagaagaggatacgaccaagagaaagaaggtatgagacggaagaggggcgattttaaagggcaggtatgagacaaacatcaatgtaggatatagaggtgtcaagggtgcatatgataatatttaaattgcataacaaaggatatagctaagacaagactcgcaaaacgacaaagtggagaaaacaatcaagggtaagattggtaaggttccaacagaagggttgaagtaaagattcattaccgagtgaagttacaaggagacaacaagatcaacaaggatctgcaaagtagaatgaccgctcatggatcattaaga

SEQ ID NO: 139781 - DNA, 544 bp, Zea Mays
cagggcttcgcctcgcccgaggtcgacaccactcacttcgcctcgcccgaggctgcctcagcccagtctgtctcgcctgagccggcctcaagcagataggataagggcactcgaaaataggcgggggacaggtgcatttaatgcgtgtgccaacccgcaccgtggcagcggagcacagttgtggacaagacaacgatcacgtctagcgcagcagtatgattacgcatatgccaaacagtgtgcgcacgccgcctgatgctctccgatgggacacccaatacaacaagctgagcggacgagccttcgggtgccacctcttcatctcgcctgaccctgagctcagccctcgggcaagttctccgcctcgctcgagctcagcctcggccaccgactacgctgcgaatcccacagacggccactttgcccgactgtagcgcacatcgagagacggttcagctagcacctcgggaagatttctgcatcaaccaagcaggggctctgatgtcgatgagtgctgcagggaatctcgacatcatcacgcgcc

SEQ ID NO: 139782 - DNA, 325 bp, Zea Mays
attggaagcactcaggaagaaagtcttcgacaagaatgaaaagttcgtaggaaagtgaatcagagagttgccgtatgtggtttggagcctaagaactcaacctagtcgagctttgcatggaaacactcccttcttcatggtctatagttcggaggcagtgctacctaccgatctcaggtttggggcaccaaggctttccttcgaaaacatagctgaggcagaagctactagactagacgatattgatatattggaagaagaacgattgaatacagtaattcagtcagctaggtaccagcaaaccctgaggcgctatcatgataag

SEQ ID NO: 139783 - DNA, 695 bp, Zea Mays
catctgtctggggatgaaatgctgaactaagtaacaacttgaccccagcaaggtgaaagagctcggaccagaaagcactattaaaaactgtgtctctatcactcacaattgaacaaggaataccatgaaggcgcacaatcccttcgaagaatgcccgagccacggacactgcggtatatggatagccaagaggaataaagtgagcgaacttagagaacctgtcgaccactattaataccactgtcttgccaccaaccttggggaatccttcaacaaagtccatggagatgtcgctccaaatttccgatggcaccggcaggggctgaagcaggcctgctgggtgtagatgctcagttttatttcgttgacaagtgaagcaagcttgcacaaattctctgacccgtcgtaaggcccaagggctgtagaaggatgctctccatcgatgtacagtcttctcaatgccctcgtgaccacaattatgtgctgctgctaagatttttgtccaaactgctgaggcgtcagagatgaagaccttcccctgaaagagtagcagaccatccacttttgtccacccaggctttgctgttccagctgcaatggcagcccacaaacttaggacctgtgggtcagtggtggcttcagtgcgaaggatgttaaacaactgaaactgtggtgcagaaatactgttaatttct

SEQ ID NO: 139784 - DNA, 788 bp, Zea Mays
catcagatcttcgggagagcctagccgccgctcacatagccctcaaggctactgatggtgaggtggcaagtcttcgtgctcgcctagaggaggcagactgctgtgttgcaagttagtggcgtttttctttcccatggagattcttctcggctattttgactcccttttttacgccttgccttcctagaactggagctggaggtgtcgggtctccgagagggcgtggacaaggttattgccctcatttgtgcctaaggcactgatcgggaagagcgcatcctcaatgtcctgaaccagattcctcaagtcgttcgccacattgctcgtcgatgtgttgtcagcgccctggctttcatccaattaaggccgggcttcgagttacatggtgtcggtgacctgttggaagacattgctcatgacgatctgagaatatggaggacgactttggtgtagctaacgaggccatggtcaccctcgttcagctagaagatgctatcaattgttcccctagccaggtcgcgatattaggtagccacgattacgggattacccatacatatcttggctcttagcgagccttgtaactactaagtgttttatgttgcttgctttattttagtcatgcagtgggggaccccctgtcttccttctattttcctttttgcgcacttggggttggcatggaaatgggtttcggtgtttgaactctagggccctgttcgctattcaaatggtctcccaactacgctctattcgggggtgtcgagggcgatctgtgagttttagtg

SEQ ID NO: 139785 - DNA, 768 bp, Zea Mays
ctttataactaaggtgttggcttgccagaaaagatcatttgactagtcatcgttgcctctcttatggttgtggggcgcctccgatttgttgccgccttctctcttcatttgcgcagtgatcgcacactagcatcatggtgtttcatccgcacatgtgtgataccatagagacactgatgttgttgctacattgttgattagcactaaatttgaaaaccacaggtgaacgtgttgatattgctggtacgcgaggacgactcatgactaatactacatcgacgcgctattaattctgttgtgttgcgcgtctacagtaatgatataggatcatctatttgcatgatatcttacttgaacatggtagatatgctagtgtgtaacgtacatgtttccctgcaatggtaccaagtcaggacatgcacaattttttatcttggtgctttgcatatatgcgatatgtctagtagattggagctactttttctttagttgtagcatggattatggtggatgaggtagttgtcgatatagtcacacaacttgtttggcttcaccggctgtaatcaccatcgaagcataggatcagtttgttgtccctgctgatcactcacacaacttgcctctacagacagtatcaccaccgagactaataatgcatgtatctttcaggttgggaaagtcaacagatccctattaggtgtattgttatagttctacctcgtatgatagtcaatataattgactgtaaaaatagtcgtgtttggaata

SEQ ID NO: 139786 - DNA, 542 bp, Zea Mays
gagatcgtggtacaccttgtgatgtgatcgagcaagaggattggcgcgaggatgactagagccccaggaatttctcaccggagcagtacacctccgtgaagccgtgtcgtgcagtggccaacatcgttgagggcttgctcgtcggtatgtagctatctaccaagttcgtacggtcatccacttcgtgtagcaccttctgttggtcgctttgggggctcggaagggcgttgtagtcatgcgctatcaaaagtcacctaagggtgtagccggataggcacaacaagtgtttaacaccacccaaatggtgcgatgtcatctacaagacgcacattgtgcgagcaaaagttgctcaagagtgcagctggatcaacacaacacatgcgtaacaacacctaccgggtgcgaagtcgtccatggcacgcacacgtctatccacaccaaagtcacctaagggtgcaacaaactcacaataggcacaataaaaaacatgaagccatcacaaaagaacatcgatatatcaatataaagggcacaaaggcgcc

SEQ ID NO: 139787 - DNA, 575 bp, Zea Mays
tccaaacatgaggactaataggtgggttaattttttagataagtttgaaactacttgttacttgttagccaactagctagccaatcttatctaatttgagctatttttagcccaactactaactagccctaactcatccaaaggcgctcttactactgctagtacactctgggcaagtccagcttggtcatctgtgccgctctagcctgtccatatcatattcacttattgtactgtacatgctgctttcgttaggaagagttattagtagcattatcaagggaagcagtcgggcaggagaggcccacagcccgcatttcttctgtgtgatcaatcaagaagttaaatggaaaggaagaagtagaacagacaattgttatgtgctgctttcctctcttttccatttggccttttgtttctcagaaatggtccatgttgttttgtggtcttattgatgtgtagtttgggtccctccacaggggattagcaagggacctgtctgtttgacagtgtttttcctatggatatcctagccaaaataacggtgttagcattgttagatgatcttacaaacc

SEQ ID NO: 139788 - DNA, 672 bp, Zea Mays
tgattcttgaatctatccaacaccttttgctttgttctcttcaagaatggtccactcatctcataggcactaggacctcttagacctctaccaaaagctccaattgcctcaagcatatggccaaagcttgggagggttactgtattatgtgcaatgccagcttcataaaaaaattggcatatatactcacatgctctatctcttctgtcttctcttttctgggttgacaactttgtttgaattttgttcttgtgggcagactcttcaacatattgtggcttgtagaagttgtcaatagtgccactgccaccatttgttgagggtctagagctgctgctattattacttacccttgttgatttcagcacaacaatatcattctcatgctcattgtcttcttcattggatccatctgatttatctagatcaatttcatccctttctctttgcttttccttctttctctgttctttttcactagtcttctttgtaagcaaggcctccagctcttgattaacaggtgccggaactttcttgcactttgtaacattgaaacctccaatgtttgcaagatgatacttaactctagtaattccaccatggatcaccttgtcacagtacttgcactgtattgcatgcttcttactcatatccgggacaaagcaatgctcc

SEQ ID NO: 139789 - DNA, 617 bp, Zea Mays
gactgaactgcgcattaatttcagagaagcacaggggcctcggagtaattctcctaagacacagagcgcatgcggcgtggatggcgggttagttctgcagaactgcgagggctcttttgcatatcgcatctgcgaaggggtatcgcgatcacacggccgttggattagagattcacggaggggattacatccatttatttgccgaaccggtattaactggtgaccaccagatccaaaatcagtggccatgattcaaaaccacccagatccgttcatccagtgttcaacggtcctgatttaattacagggaaaggggtatctagcacttaatcagagccatccgcttacgatcctatggctaacggtcccttcccagctttccccctcccagcttgggccatacggcgacgctgcccaacggtgcacggtggcgcacccaccgaagaccccggaatctacaacgcacgaccctaattccctaatcgagcgaagctacacgatcctgggtgctcgacgaacatggcaaaggacttaccggaggcagatacggtctcagcggcggcgcccacgacgcgaggcggactggcagtcgattcatggtacggcgagcaatccgc

SEQ ID NO: 139790 - DNA, 505 bp, Zea Mays
caacaaggtcctcgaagatttactaagagcatgtgtgttgatgttggacaggaattgggagtctagtttgccgtatgtcgaattctcatataacaacagccatcaggccagtatcaagatgtcaccgttcgaagcattgtatgggcgaaagtgccagactcccctaatgtggtccaatgtaggggaaaggacactggaaggacccgactttgttaaagaggccgaagagaaggttgccctgatccgcaagaagttacttgaagctcagagtcgccagagaagttatgcagacaacagatgaagagaactcagattcgaggaaggagatttcgtatacctcaaggtctccccgatgcgtggtgtcaaaaggttccaaatgaaaggaaagctagcactgcatttcgtcggcccctatcccgtcattggcagagtggcacccgcagcatattgccttgagctaccagaatccatgtcagatattcacaatgtgtttcatgtgtcccag

SEQ ID NO: 139791 - DNA, 393 bp, Zea Mays
tctaacacataaaacgtcttaagactcagaatcaagccagatggacggcgggttgattcataaaaactttaagggcctctctgcaaaatcgttcggtcgaaggggtatccgcaaacctcggccgttggatcaccagccgagggcacggattagatctggagtgcgccgaaaatggtacgcaatcctggctgtcagatcaaacatcgacggcgcagacacaattaaggcgtggtccgatctacaccgcacatccaccgatctgtggacacgatccgatcccacgaaaaggtactcccaaactaatctctaccgttgaacgagagtcggacgaccctgaggtaaacttcccctgagatctaatcttacccctccgtttaacatccgacggcttag

SEQ ID NO: 139792 - DNA, 356 bp, Zea Mays
gttttaggtagtgttaactattgtaattatagaaagcctaattatggtagtcagcccttgattgtaggctgcccttgattggcttgtacgcctgtgcggttgccttgtgagcaaccccgacctctcctatgtatacgcacacattgccgtggaatagaatcaagtcattcccacaattactctttcatggtatcaaagctccgatccaccacacttccgcaacccaagaccgcgtcgtcgccgatctgatcgccgctcctgcagacctcgtcgcctggagcgtcgctgatcccatcgcctgcgccgtccgttcgatcgcccgccccatcgctgttgctgccgggtgcggccgctga

SEQ ID NO: 139793 - DNA, 1678 bp, Zea Mays
gtagattcgtattggaaagcatttgcaaaatctcataaattcggaagatttaagaacaaatgctagaagatattactggtccaaggtatgcatcgaagatactgcaaagttatatttgtcagatatttttttactggagatagtaattgacagtggcctgtttatgtaacctaaatatccagaaactgtaaaattcattaataaaacaggaatagataactactaaattagtaatgtcccttaagaattctgaaatctggacataagatgctacaatttgaatttgagtattaccatactaattactaaagatttaataccacacggtggaagacgaagtccatctttggggaatttgactatagtaatatccaaagtttgcattgtataccctgtaggttctaaggtgtcaaaggaaaatgaataaatggatgatgctcaatgaacaaggttttaacttcaacccattttacttcaattattctattgtgctgtactatacagtattactctcttatttcttttctgttcttttgtgagattactagacactgtttccaaaggcataagcatggtacagttgtagcctatacatgattctgcagctactattactataaatgttgcttgtgccctagagccaaatacatgcttaagctttacgaaatattcagttagtggaaattaagggcatgaatgctggttcttttttttctcaaatacgcaggtgagctgtgcagtgtgcactaatatattaaaaagagagaaaaaaaaccaaagggaaaaagatccccggtacagcagagctcacacaccccacctaggattacataaaataaaacaacgacctagagctctgttacacaaacagttctccaacctggtgggaggacagagcttttgctcctgccaaggaccaatacaaagcctcctcccttgccacccgtagggcgacagctaaactaggactgcacccataaaaaacacacttattcctatgcttctatacaacccaggcacctaagatcaccaatgagttaaaacatttttccatctgatcaggcattctagagctgctgctcctccaccaagattcaaaagagagatcatccttcagcggacagaactcctgcaaaccaccatctttgagaaactcaaaccagaattgcttggtgaaaacacaagcaaccaatagatgattaatattttcaggtttctgatcacacagcgggcagcgttccggatgtgatagcccacgctttgcaagcctatcagctgtccaacatctgtcatgctccacaagccaaataaaaaacttgcattttcctggtgcccaggttttccagaccctttttgttggctcaaagcctactgatccttggaagagggctttataagccgagctagccgtatattcacccgaagtgctgaatttcgaaatatgctgatcctgaataccatgctgcaaaaactgctcctcaagaacctaataaaaatcaaggatttcagcaattaaatgccttggactaggaagccatcaattatctaccatcttcctttcaatccttccctacttttgcttcctatctttaacttccaaccaagtccataatgtaactgatccagcaaacatacaattttattttcttgggactgcttgtgctctttctgccttttc

SEQ ID NO: 139794 - DNA, 584 bp, Zea Mays
ggcaaccctttaggcactgcaaagacagactgatactgagacagcaaagactgaagatcagctggtaatgtagaaagaatagtttgatccttttcctgcaactcagtgatatggcacatttcaattactgaatattgttctctggatgattgcaacccaaacaattgtcttgcagagcctttataagaaatgatcagagacttatctgcccaatggacccacatagggttgtactgttcaagccagtccataccaacaatcaagtcataagtctggagtggtaatacacgcaatgtagtttgaaactcacaaccaccgagggaccaagtagtttgtaccatttcatgagtgcactggagcctagaaccatttgccacctgaaccgacaatacttggggcaagagagtgaggccctgcagctgatcagccacctgagagctgacaaaggagtgggaacttccagaatccagcaataccaaaagatccacaccctgaatactgcccaagaactgcattgtcttaggattatgtgccttttctactgctgcctgagatagactcataacatggagttctcctgaaac

SEQ ID NO: 139795 - DNA, 479 bp, Zea Mays
agccagatgacaaaaatgcagccgagcgtatcgccagacagtcggctcattacacactcattgggaagacattatacagaaggggtgcatcaggcgtcctcatgaagtgcattctctcatctactgggaagcgacttctggatgaggtccatgccgggcaatgtggaatacacgcagcatccaatacactagtcgggaaggtcttcaggtcaggattctattgaccaacagcgaagaatgacgcagccgagttagttcagaggtgcgaagcttgccagtacttgtcgaagcaacaacatctaccggcacagcaactgcagaccataccagtgacttggcccttcgcatgctggggactcgatatgattggacctttcaagaaggctcaaggaggatacactcatgtactggtagcaatcgacaaattcaccaaatggatagaattcaaacccattgcttccttaacctcagctaaagcc

SEQ ID NO: 139796 - DNA, 695 bp, Zea Mays
gagtaaagtagtgaatatagtaaaataacaactcttaatctcggtgttaattcattcattttatgttcataccagggaagtctataccaggtttacaaattgcttgataataggtgatcgcaagagctagtgaaatgagggggaaataacataatagctacctagcactgccacattgtgagatcaaatgcaagatgatgatgttgatatgataaagcttaatcaacattgtacatcggtatattgagaccctccgttcggttgcgcatgatgtggtggaagacctctcggacatgtctctagctggtgtagcccgtccttcgtggcggagcagacctcagcgagctagcctgcagcctcccgcacctcagcttcccgcttgccggtgagtgggaccgacgaactaactctaccataatagttcagtggatggattgtacttagcctggtgctgtcaatgcctgctaccaacttacaaacttacaaggaaataatcaacttgacttcaaagtctcatgcgacaagactattctaataagaaaagcatttagtgagcaagattttgtagactattcatgacgagtctttcatgtgaactgtgctgtcgacattgtttattggcggtcctcatgacatgagacgtcggtatatggatgctatggctctggtgcggaagtttggtaaaccagacatat

SEQ ID NO: 139797 - DNA, 538 bp, Zea Mays
aatcgatcaaaccatattcctggatcactatcttgaaatttggggaatgtccactttagaaatggccctgtcctaccctctcttccccccaccccactgctccctacgatctcttccacgctcctttcctccaccccgatgatcccatcaaggaacacacatctctcgctcagagtttctttcattaccttccaactccttcgccagcaactcgttaccttccaactccttcgccagcaactccagtcgcgcagtggttcgctcgttctcctccatgtgtcgagccatcagtgctcggtcttcctctgccttcttctgtccgatctccatggtttccatcttcctagtcatctgctccaccgccagcatcatccgctcccaatgcccctccccattttgctccacgcctgccatcgcttccaggatcaactttgtctgaacggacggcttcgtggatggcgtcgtgatgcccaccctccgaggatcaacacctctgataccacttgtgatgacccttggcctcagcggcggatcgccg

SEQ ID NO: 139798 - DNA, 674 bp, Zea Mays
tgggtctaaaaatgctaatgcatgcttcaaagaattggctgaacattgcaccctgcataaatacttatcagatccaacgtcaagtgacattcagagatgagagattgcctggatttctagcaaggttcatgcaacgtcgggaggtggaaatttttttttgtcaacctaaaagtatgcttcttattaccaactaggactacatcccagttaggttcagactctgtaaacaaaggccaataccctgtcagcacagctcacactactccaggtatatgcacaatgttaccagtgaagtataatttcagacaggtatatgcacaatgtggcacctgatagttcaaagaccatcatggaaaaaatcagtgagtatgacgagaccctgtttttcttctacgaaacaataggttctgatgcatgtgtgatattgactatgctttagatattagttctttagttcaaagatcacacattcttttctgatagttttgacatttcatcgaagataacttttttactttgtttcagtcttgcgggaaattagttcatttgcaattcgtcgtcaacgacgtcaagtggagggagcagatgtaggagacttttacaacgtggtggtgcaaaggttgggctactacctctttgaaaattaatagatctaggtttattatcaaggaaat

SEQ ID NO: 139799 - DNA, 289 bp, Zea Mays
ttgtaatgcaaaacaatgttttatacggtcatatacacggttcgctagccacagcctaaggccaactccaatagactgttctgtactgcagacgacaatgtttacatagtaaagtttgaaatactgattgaagtacgtagtttgctggagatagcataagcctccttgataaggctctttcaaaggctcctccaacaactccttaaaaaatctatgaaacgggggctattccgctagcttctcgttgaaaatagcaaggagctgcttccaagaaacgagcaaagtcggg

SEQ ID NO: 139800 - DNA, 499 bp, Zea Mays
gggaaaagcattaagtcaggcacactaagttggatgagttaagtcagatgggttctcagccggacagactaagtcggacaaacgaccgttatgtgcaattagtcggggtatatcagtcggaatgtaagtcgaatagaacaagaggctcaacactagcaagcaagatctcaaacgcggtatacatatcaaagggaactcagtataaaagagcatgtgcagcaatcagacttcattcatatgtgaaagggaccattatagaagaaaaagggtcggttcattatgaaccgaccctaacaaaatacaacctccacttacacttctatttctactacttctactactacaactacctactactacactatactaatacttatgtcagtggcgccttgccatcggcgttgccactgcctttgccaccactgctgccctgcccccaccgctcttcctaccattgctcctgctccatccatcgccattgtcgttgctacaatcgccc

SEQ ID NO: 139801 - DNA, 348 bp, Zea Mays
ccaaggccaccaaacacaggatggccagaaatcagccagccgacaatcagcgagttgtcacgcatacttaccacccctagcagtaccaccaacaacaattccacaatgagccgatccttcatcaacccaatcacatgtaccaccaacatcaagaggtacaagtcctccctcctccaccacatcatcaaaatcctccaccaccagcacccaagcaagaggacttcgccgagcagcctttctgtggggtcatccacatgattaccggggggtcaagcgcggacttcgacaccaaacggcagaagaagggtcactaccgcaacattaaccatgtcactctcaccggcccag

SEQ ID NO: 139802 - DNA, 380 bp, Zea Mays
ggaccgtccagtcggatacgcggactgtccagtcggatacgcggaccgtccgatcggatatgcggatcgtctgtgatcatatgcggatggtctgtctgggtgatttagggcttgtgcaacatgtggcagctcggacgcatatctcggtaagtcattaaaaatgggaccggcgttgctggcccggacggtccacgctcgtgtgcggacggtccgaacatttgcagatcggctaatttactgtcgattcatggttgctcagggtatgtgtccatcggcatcccataaagggccggggttgtgactggtcgtgacaacctatagccgatgaattacgtgtattttccccaattcaacctcgtgcgaaggaaaatttgcaacag

SEQ ID NO: 139803 - DNA, 1768 bp, Zea Mays
attggagctggagtggtgtaggcgtccttgttagggcagttgttggcataatgaccaatttgtgcacatttcaagcatgccttgtttgttgaagtattagggccaactggtcccaccggaatgcttgattggtgagggactgacttctggaattcggttgcctaggactgccaagcattggggtgccttgcgatgaagcataacagggacaaacagggacgagtactaataccagcatgcccttggttggtagccttcctcttcatctcacctagctcaacacgcttgtgttccagagctatagccttgtttagaagtctttggaaagatggaaaggagacatcaactgatattggagtggcccaataagtccctccaggaataactcctgcttcttctcgttgtctgcaacctcctcaggagcgtatctggacaattgggtgaacttgtctctgtactcgcttactgtcattcctccctacttgagtgaaaggaactccttgatcttcattaggccaataggaatgtggtaatttatgaagtttgttgagaattcggcccaagtgatggtgtctgtgctgcacaataggcatcccacgaatcagcagcgaggccagagaggcgacctgatgcataaaagactttatcccgatcaatgtattgtgcgatattaagcatcttttccatagctttcaactagtcatcagcctgcaatgcatctggggagttggaaaaagttggaggcttatgactcatgtactctctgtgcttgtccatgggaggttgctgttgttggtgctgctgattgttgttgagctgagcctgcatgttggccataatgttcgccatattctgcaacaactgggtctaagcgacgaggaacgcttccaacccagcaggtggaggattcatttgtgattccgaactgttccatgatcttccttgacgtatgcgtgcaggttgatcaattcctcctcctgtcctggttttcaccatctgggcttagggcacattgttaagataaatagcttagtaggtagaacagatagcttagttgaaagttgccattcaggatgaagaataacatcacgataggaagttggctcagaaagaacagatccggtaaaaccttgccatgtaatgaggccgaaaccatagaaatctacaggttgacgagtacgaagaccacaatgagtaatgaaattaggagagctatcaccagaagaatatggcctagccgaagaagatgaatcaacagagaggctgaaacatcaagagaagaggacacaccagaggaagccgatggagtagtcaaaaggacgtcttcgtgtatagacctttgtcgcaggaggtttgacaatgtagtcaggaatcagaacaaaagtctatgaataagtcatagaggggcataggaggaggcgcaacagacgagggcacattgaggagaaggcacaatagtggtaggtgggagacagacacaatgctgtagcagagtcgttcatagacaggaaagggaagacagaggatcaaccaaagatcagacatgtagacggactaggatagaaaggacgaatctcaataaagacaacattccgagaaatcctcttccgacgagcaaccgaatcccaacaacataacccttatgctcaacactgtacccaaggaagatgcacttagtagactgtgcattcaacttagagcgctcgcgatccacaagaggcacataacacaagcaaaaagacgaaggctggagtaatcagcatcttgc

SEQ ID NO: 139804 - DNA, 1148 bp, Zea Mays
gttaagtgcatgttggacaacactgtttttaaaaccacagtttgtcgaatgccatgacacaactatgatatattttacatcagtctaatccagcactctttggagacacggtattttggttgcagcgtaggaggggaggagaaatggcaagattatggccgagcaccagcaagaaactttggtccagatcaaagttttttagatccaaaaatatcgtggtattaataaaattatggtttgaaatacatagttttagatgtgctcccaaacaccttttggcctagaacaccatgatatgctcaaatatcataatattatattgagactaggaaaatactatattcccaaacaggccctaaaggtacattcaattgagctgtggcttttaatgtgagttgtggattataaataagtttatatgagatatgcttagtgagaaggtgaaagtcatttgattcaacaaccgtggttttcgaataaactatgctcagtgtaactcacttgcgaatgaacccaacatgtgatccacttccttcctctcgcttatgagaagacattgtttgttagactcacacattcatcttcttcctctcatcgtactaaggcagatacctcaccaaaactgaggccaccactagtcatgctcgcgtcagccatcggataacacccacacatcggtcatgtgccattgtggtggccaaggttgtgcctgaatgttggccgcgcatcgccatcgtatctaggagtgatggagtgggaaggggagacatgtcctcatatgaggcgcgtcatcactggagtcgcgcccgcacagggccaactagaaagaaaaactttaagcctgcggtgaggtctaatttttacaggcggattcggttattaaacgccaaggcatgcggttccttaagaaaattgccagtacaaatcatatttctatatgcggttcgttaaaaaaaccacctctagaaattcatgatttttgtacatgtggttttcttaagaaaccgcctataaaaattgatttctacatgcgattttcttaaaaacgtcgctaaaaatcattttatcctctcttttttttactttttcaaatgaacttgtatgaaaaaaccaccaaaaaaagttatacatctctaaaagaaactttg

SEQ ID NO: 139805 - DNA, 1124 bp, Zea Mays
caggcatccatgcaaaagcatccttgcgcaacaaccgcgtcagggatgtgacgatagtgtcaaagtcccaaatgaactttcggtagtagccacacggccataagaagccacacacatcttggggcaagcaaggctctatttaggatgagatgatttccaccttttcattgtccatggcggcactatcgatggagataacatggctgaggtaggcgacctatggtgcctcaatggagcactttgagcacttcaggtggaggtcgtgtgtgtggaaggcatcaaggatgagacaaacgtgttgcaggtgctcaaaccacaatgaactgtagatcaaaatatcatcgaagaagacaagcacgaacctacaaaggagggtcataggattgtcgttcatgagcacatggaatgtggacgatgcgttagagaggctaaagggtatgatgaggaattcgatgtggtcgtggtgggcatagaacactgtcttatcaatatcattgggatgcatccacacttggtgatagctggaccacaagtctagcttggtaaagtacttagcgcatggagctcatcgaccacagagatggagaacttgtccttagacgtcttgttgtttagcatgtggtagttgatgcaaaaccttttggagctctctactttcttgactagcagcatcggtgccgagaacaaagtgcttggctgaatgatgccttgctccagcatggctgcgcactgtatctcaagcttgtccttctatagttgtgggtagcaataagggcagacgcccaccaacgatgtacctggcagcaagtggatcaagtgatcatagggacgcgcaggcgcctgtgaggctcgtcgaaaactgcacagtactattagaggaggcgagtctaacaacggttggtggtggtcaccggtgatggagcagagcaccggttgtggtgtgtcgtcgcgaggggagcctatgcccttctagaggacgcgttgatcacccctccagaataccatgtagaggacctcgaaatcccataggatgggccccaagctctagaggtagtcgatgtccaagacgaggttgaacccatctaggtggatgtcgaagcagctggtgatgaactcctaaccac

SEQ ID NO: 139806 - DNA, 372 bp, Zea Mays
gcctttgatgcatgtcctcgccgccatcactacgacacaccggtcgattcggtccttctgcatgttgccgtccagtacagtacgacttcatcacttgaacagcacgatctagccatgttgccactcccacatgtctcaagtgtgagccaccacacttgacactagtcattgtgtttaaaagatataactactttttgcataattagcttctttataccacggccgtggcattattttgtttgattattgttaggtagaaatcatttgtgaagcattcacgtttgtactggcagtagatagcacttgccgccttgcgttgactgcgatgttcttgtgtgcctgctctgcttcgctgctgctgacggagacagt

SEQ ID NO: 139807 - DNA, 451 bp, Zea Mays
ctaaatgatcgactatagcgaaagatggccacttgcctagacctcacttatagcaggaccgtgagcacagcgctttcggtggaagccaagaattcgggacagggaaaaacaaagagatatgggggtgaaggatcttttcaaggatccaagaagcggtcgaggttggtgattcatcatgttaacccaaatcgctcttttcctcgtccacccgcttatcctttcaagcaacaagtttttatccgtcccactcctgcccccgctcaaaacaatcagccaagtgcccctggtactcgtttccccgccttacccagttcatctagcgaccgcttcaattgtgggaagtctggacacttcatcaaggactgtccctatccaaaacaaaataaatccaatttccaacagacttctgggagcatctctcaaggcaagggaaatgtggccaacactccag

SEQ ID NO: 139808 - DNA, 441 bp, Zea Mays
caaaatggaaagacaaaccttttggagaggtggattcatcgtttggtttccatcgttcattttcctcttcctctttgcaagggttagtatcacaagaactaaaggaagtagaagcatcaaatgaactattatgtttggactcatcaaatttagttttaattctagtccaaatatcatgcgcatcatgaatggattcatcatagtttgatatgaaggcacgataatcttcattgctaagagaattagttaagatgtcaaaaagctagatagtttaagcgataacatctttgatcctcctcggaattaatttttccattaaaactagagggaaaaatactcttgtctataatttgttctagtcgtggatctacggttttaaaagcatttatcacactagtagaccatgaatcataattagaacaatcatcaaatagtatctca

SEQ ID NO: 139809 - DNA, 416 bp, Zea Mays
ctgcaatccaattgattagatgttgcgtatgcgattgggtagaggggctgtccagaattttaggtggtggacgaacagcagtagttctagcagtttctgggcatttttcgtggggaattaatgggaatcagtttgggaatcatgtagaactttggcatacctttccaacgagtatttatgcgctcaattcggagttataaattaaatgatatcgccatttgaatccgggtatgtggctgtccaaaaaaacatattttcaggtggacgaacagcagcagtattagcagtttctggggatgtttcgtgagtaattagtgttaatcagtatgagaatcatgtagtgctttgtcttacctttccaacaagtacttatgcactcgattcggaattatattttaaaagttatcgctgtttga

SEQ ID NO: 139810 - DNA, 937 bp, Zea Mays
atggacacccaaccggttgatcacaaatcagcgactcagatttgaatgggccaaaatgttttgcgtgtgtaatcctgaccacccatcagagatcgacggccgccaggtcctctctcagccctagccggaccccggcggcggagcaaggacgccacgacggcgccattgccgaggcaatccgtccccgtgataccctacactatactacgattcggtggggcaaaacacagagaaacgggagacgaaccaagtgggcacttacctttggcagtccgagatggggtggtgcccgaccacgatgaagagaggtggtgagtatgcgcttgcgctccaacgaccaattcacggcactaccgtgcaccagccgtcacgggtgcggcgtgacacacaccccgggggtctgtgaagctttggtggctcaaacccaaccctcaatcggcccgtcgcaagttttcgccaccggcagccctcggtcctctctcaaaatctcccccggacgccacagcaaagagatgcacgatgggttgagatggtcatgcgggagagggtccgactttatagcaccaaggaggtcgagcccgaggcgatggaggagcagcagtggacgcggttagttgcaacggaccgcaatacagagctccgctgccgatggaagggaacggcttgacaagagggtcccacgcgccaggggccaggctgttgcgcttgctgagtgactggtggaatgggcccacccgtcagcgaggttagcgcgcgggtgaagggaactttggcgcgcgtgggcccacacagcatagactacggagcacgcacacacgccagtgtgggggctaacacgtaggcccagcatatcggcgcttcacccacgccgggcccgtgcttgtgaccagaagatgggccgaatggaggagaaaacggcccaacgcgaggtttgttc

SEQ ID NO: 139811 - DNA, 316 bp, Zea Mays
gtctgtcggcgttgggggatgtttttgtcttgacgatgaagggcccttcccatttgggctcgagtttgccccgtgactctgttctagtggttttgatgaggactaggtctccttcctcgaactctttggggatgacagtattgtcgcgccatgccttcgtctacgcttggtatttgttcagtgcttctagggcaagaacacggtctccattgataaggtccttggaggttgactcatcaacatcgggagtggttgtggagcttgctcgtggagatccatgcttcagttcttgcggcgtcattgcttcggatccgta

SEQ ID NO: 139812 - DNA, 496 bp, Zea Mays
aagttattcttgccttcggagcgtcaccgagatcaaccaagcatgaggtcgacggtatcatgacacgtcgtcttcgtccacgccattccacgggcacggctcaagaggggtcccacaaagaggcgagcgaacatatgcgtcagcgtcaccaaccaccgcactacttcgagaatgaacgacgggccattcgcatcccgtcccgtgtcgcgtccgaacaaacgcaaaatccctccaccagaccacacgcaacgcaccagatgcaccgaactgaagagacatttcgcatgtagtatacgtcagcacagcaaacgttcgtgaacgaatcactgaatcgtctgtactgatcaaaatgtggttaacgtgtgtaaccaatgaacacctccatctagtttcccagaaatggaaacagactgggtcaccaagctctacgaatgatgtcatccgcagacagtgcgaccacaacacgatcaggcgcctcatcttaacactccagcat

SEQ ID NO: 139813 - DNA, 397 bp, Zea Mays
gctgctcgctggtaaccattgttaaagatattgcaaatgatttttgtgtaaatacatcatttccaataaagcgtaaagcggtgagaaagaaacaatttgatgaaagtaggtgccacgaagaaattctagaaaatgagagagcttttcaagtcaactattttttggtattagttgacatggcgagcacttctttgaggaccagatttgaagaactctccatgtttaggtatatttgggtttttattgagctcaagcacactaagctcactaaatgatagagaacttgaagagttttgcactaaatttgcaaacactttctctcatgatggttcatgtgatgttgagttaaatgatttgatttctaaattgaatattctaaagtttactttgcctaacg

SEQ ID NO: 139814 - DNA, 284 bp, Zea Mays
gtgttcccgtgtgccaagtcgccgatgcacttggcatccttgaccatcatttgatggcttacaaacttgccaagtacctcctcgtgcaccatcttcttgtacctgggattttcatgaattaaggagacaagagtaggacctataacagtaaatgaccttaacattagttggatgacttcatgatctgtccacttcttgctcccataattgcgaacttgattcatcaaggacttgagccaagcttgtggcccttctcctttcttcatggcaaatcttccaagttc

SEQ ID NO: 139815 - DNA, 314 bp, Zea Mays
gtctggttaaacgtgggtgttccatggatagtttttaatcccagccgttggagtctgatctggcgtccggaactcaacttggccatattaaatccggtccattgattctagatctgagtgctcagattacataccggttcagtggggtctggatttaatctcgtacgtccaactctaatccaacggcagatatccacccatacctcttcgcgcgcgtcaacttgcaaagaaacccctctgttttcacaaaaacaacctgtcgtccaccgtgggtagaactgagtctaggaaatcttatagattaaaccctgtgc

SEQ ID NO: 139816 - DNA, 685 bp, Zea Mays
aacagagcagcgagggcaacaaaaatgtcacataggctcctccttcggaataagacccgccccccttaaaaaagaacaacatcaacctcagctcttccccctcaaacaggtcccgcatgtccccttctccaatgcacgcgctgagtaccccgatccaatcgcggaccaccccgaagacgggacctttccatacccattcgacgacgtcttcttccacttcgtgacgactcaccagtgctctgttttgacacacccattcattgcctttgcaagtcttcaactctcgcatcagtcgaggtcgccaacaccttgcgagggacagatcacaacggagactccgaagcagccaaatccaacgcagcaaaataatctaggtagtccacaaaagattcgtcaacccacgagaaagggctcccaaattccccttcatccgaataccacgacccaaactcagacccctcagacacattgccactaataaacgttgcatttgcatccttcgaaacatcattaatatcaacatcatcactgtttgcttgcgtaggcccggacatcgaaacttgtgcagcaactgaccttcagtatcacaaaaaattaaaaccaccaaccctaaacccctaatgcatctcttcaacctgcgccggagcagacgccgtcgcagggtcttcgctggagccgcccggag

SEQ ID NO: 139817 - DNA, 360 bp, Zea Mays
gcggtaccaagctacagatgaccacgacatttcatccccagtcagacggccagtccgaatcggcgaacaaggtcatcatcatgtatctcaggtgcttgacgggagatcgaccccgcgactggctgcgctggctcccatgggcggaatatatcttcaacaccgcttttcagtcatccctgcgcgacacgccgttccgcgtcgtctatggccgcgaccctccctcactacgctcctacgagcagggggcaacgcgggtgcctgcggtggccaggactttggaggagcgcgcggagttcctggcagatatccgtcaccggctggagcaggcccaggctgtccagaaacatcattatgatcgtc

SEQ ID NO: 139818 - DNA, 963 bp, Zea Mays
gggattaaacaagttctaggattatttttatccttaaaaattcatttcttaaatagatttcctgattaaacctctgtttggaccgcgcacataaaaatagggaaatgtaggggccaacgtgtgaattttcctagacttagtcaacacctgtgatggacggcgggtttgtttccctaaaacagagggttctatttttaaaatcagctggctgaaggggtatcagccaagatgggtcgtctgattagatgtgagtgacccgtattaaatcggtgtgaattatgaatggttacgcgctcacaaccgtgagatcgacgataaagcgcttggatttaaaactacccagattgtttgccacacgcatgattcgcatcgaacgacggggatgagcttaggccgaaccggtacccggtgttctaatcatagccgttcatcaaccgatccacgttcgaacttcgccctccccaaaccagctacccgacggcggcgccgccaccatccttgtcggggatcgccggagttaggcgatttggccaaatcgtgctcctattatatcatggctcggggttatacggagtacggaatatgacgaacacgctggtatacatcatatcgcggatggacgcctgattgctgttggtcgcggcgatgggcagatctgtcgtggtccttcgagtccgatgaacaattggtgctaccccagtgaacctttctgcccagacaggtccctcacacacgcggccagagcccgccgatgtccccggccaagcacttgcgaatatggtggtgttttccgtggattcgcggtggcgccacctgttcccccttcaagctctcccaggtaatggcggtcggttcttttgagttctagaggacgaaagatggtcaagtgcttcgggtgatggggacgtggccttaagacgtgcaggtgcgcggcggtcccgtgaatttcgagtccaccggcga

SEQ ID NO: 139819 - DNA, 1343 bp, Zea Mays
caggccataatctcaagctgatatatacacctagtgtccaagagctaaaccatcaagttttctgggacggtggaagtaaattgtaagaaatgctccaactcctaaccaaggtcattgggacttctttttttaagaaaccatcagcacttcagcattagcacaggctatattgtgttaattcagcaacaagatgggcagtgttccggtaaaaaaaccaagatgagcagtgaatctgcctttgctaaatgatgcagttacctccaaagaagagcagatcgaggttttcttggagatgaataactgttgccatcaaatggcatcacacttccagcctggtggcccattccttctgataccacatcctttatgctaacatctttcgtaaaagcatcgccttcaccattgtcgtcctccctcatcgaaacaagaaccattctgagcatgcaaagaaatggttgatcgctatctagcaactgatagagggcagtcataacccccataccagggccagatccccctccaataccaagaccaccaccaagtccagattcatctaaaagaagtgcctgcagcacagcaactgatttcttcacaagtggaaattcaatccaaatcccatttgaatccttctctagaatagatctccaagattcccaaccacttccaccaccaccaaatatatcagatttgggtggaatgccaacaccataccacaaacggcttcggtacttccaactttctccaagatcagttatgcagctcccataagacacaaatgcatgcttgacagaatcataaggttcagctgctgttgctgctgtaagacgttccatcacggcagcagagatttgtccatttgaatcagccatagaagtaagcaactgcttcaatcacagcagacaaaaataaagacagtattcataagaataaagttcaaccatatgttggcaaatagaatatcagcataagccatgaatgcatgaaggaacagtcaaaagctaattattttaactttcactaggtagtaggtaccaagatatgtacaattaaaagcttttttcaaatccaggaattagatgattagattgtccaccaacaccttttgatttcgaagtatttcacactgtaacatttatgcatttaggactttattgctgagttcctttccaaagaagaggcatgtatggtataatctgttgaccgaagtaccaaacaccaacttaccctagagtccatttattttgccaataatttgttcacacctcattcgatgaactagcaagaccaggtagtccaagcgattaaggtaaataagagttctactgaaatattatggcatgatt

SEQ ID NO: 139820 - DNA, 790 bp, Zea Mays
ccactactcgaacaaaggtaataatctacctattacctcctccttcatactctcttcgcgatagctccgtccaatttgaattcggcgggctggggtgctagattgtgtgtcgccggtagggggctccgccgtgggatcctgacggcgcggccgtgttcgtctgagaggagggtgatggccttgtgaccgtcaattttaggatgaaccggtggttgtccaaccgcatggaaatagctccgatcgaatcatcacacaccgggctgcgttcgggatttgtcgcgagtttgtggagtttggttatgggccgaatcgctgaccaccggtgaagttcgccattcagataagtgtacgccgccgagttagcttagggctagagatgggggcgtgttgccgtcgttcctgttgttcgccacggcaaggaagaaggcacctggtgccgttgatctgcgagtggatgtgtgggattcgagcgcgtggtagcgaccccgagccgtcgattggtgagtgaacgactcggacttgatttcgtcgggttaaagtgtaggccgtagatttcgaatcgggcggtcatggttggtttgggttttataaaatttggaccatcagatctcgatctagtggctcatagcgcataccgtttcgagtagcagagatctaatccggggcgtagatttcttatcctacggctgggatgttccgataacctttcagtcgtgtacttatgcaaaagaaaccctatgaaaactgtgaatcaacccgccgtcctcgtctgcggcgctctgtgtcttag

SEQ ID NO: 139821 - DNA, 294 bp, Zea Mays
ccagaagaatgtgaaaaatcagcactgaaaactcgaccaaaaggggaaatctggcaaataagatccccatgggcatccaaagctcaagacaagccctttttaaagtgcacttcatagtcatcctcaaggagttgcgaaactgaaagcagattgaaatgcagattcgagaccaaagcaacatccttgagaataaagctctcgttcacccgaatggtgccacgagaaacaaccttacctctcgacttatccctgaatgtgatgtattccttaccaatcacggggtcaaggatggag

SEQ ID NO: 139822 - DNA, 307 bp, Zea Mays
ctgagatcccttcctattccactattgagttgtcatcctttagccttttctattcccttgtcttggtatgcccgtatccttggaatcttgcataccccaatgactgctcaagacatttcaattcacatgcccttgaccactcttgtttctagacgatccatgagcgatcattgtattttgtacatccttggtgatctcgttgatccttataacttctctcagtaatgaattgttttttacttcaaccactctgttggaaccttacctaccttacccttgattgttttcttcactttgtcgctttgcg

SEQ ID NO: 139823 - DNA, 522 bp, Zea Mays
ctgcgaattgcacaatctacagtgcaaaacagtgtattagatgatcatatgagtgaattgttagacaccgtcttatggtttgccagtaaacaggaacctataggattgtcaggacgcaagtataatatgtagagaaagcactcacatgaacagaggcgcaaaaatgtaacacctgcagaagtgtgtacaccatacatgaaacttaaaactcttgaaaagatgaatagttgcataataacgttgaatttaagagcaatggacaagatgtcgaacttgagaaaatagtataaatacacgtttttacacaaactccagattaaaaatataaaaatttaaaagcatgcgagtgagaaaaagctagactaaaaataaccaacaaaggctaccctcttgtttcattttgctctcaggaaaatcactccaaaactacataaaaaatgttatcaagataataaaaaatcgttggaaaacagctctgctttttcctctcttcctcagatcgaactagacctaagcatgttg

SEQ ID NO: 139824 - DNA, 458 bp, Zea Mays
ctgcagcctccctgccatgcacccgacgcctggagccgcctgcaaccgagacacccccgcgcgacgcccgtggagccgcctcgacgcgctgccacgtcctcgaccccgcgcgaagcccaggccgcccacgccgcaacctgcccgcgtcgacagtttcttccccttccccataacagtcgcctcctccattaaacgccattaacggccagcgccgtttcttcgcctccctccattagcaacgtagacggtttctccatcaatggtggccggtgcttttcatctccctcgatgcctttccttctccctccccctctataaaaccccagtcgacctcttttctctccttacccgaagctcgctctcttctcgcgcccttcttccttgccaaaacttcgccgccagagctcgcccacagtgcctcgccagaactcgtgcccaccgtgccagagctcgtccac

SEQ ID NO: 139825 - DNA, 697 bp, Zea Mays
gtaagatatagtggtgataaggataaagatgataatcgtgaaagcataatcaaggatagagttaaggcaagactcgcgaagtggagaaaacaatcaagggtaaggtaggtaaggttccatcaaaacggttgaagtaacagaacatattaccgagggatattataaggaattaacgagattaccaaggatgtgcgaaacaaaatgaccgttcatggatcattaggagactagggtggtcaagaatatgttaactgaaatgtcttgaacagtcattgggatataaaggtaagcatatataaaaataagagtatgcaagattccaatgatacaaacgtacccagacaagggaatacaaaaaggcagaggataatgacctaacagcagaacatggagggatctcggaagaccagaagttcatgtatatataaactagagtgtttaagtaggtaggagaaattcagatgtaagtatttgaaacaaaagtactgaagaatctaggagtatgaacatgtcaatactaaggggaaaaaagatcgtcaaagggtagcaatttcgtgatggaagagggaagaatcccaatagacaaaaaggttatggtcaggggccaatctacaaagatgtcgcaagcacaagagtgagataagatctaatagattgagagaagtatagaccataatagaataaaatacttttggca

SEQ ID NO: 139826 - DNA, 753 bp, Zea Mays
atcttgactaggagcgagaggaaggctagggctctttacctgactagataagcacgacgcggaagacttgttgacagctgaagacggcatacggcggaaatccggcactgtaaactggaagaggaccaaccagtgcccaaaatttctgattacccgagggaaaaactccctgagattcttgtgcaactcgcgaactggctcacaagagtaccaatgctctgatctcgacgaattagattcggtggcgggcaaaactcgtggtagctcgcggattcgacgaacatggcacggaaacaagagctagcactagatacgagttgcgtaaggttctgcggggggcctggttgttagcggtactacatcttctgctactgggaccattgtggcgcaacggattagcaggccgaccaagaaatctacaaaggtgtatgggccggattgggtgaatgggctgcagctgtgctcgctttgcgaataagtagaacgagggttgcctcgtgaagggcatgtaagaattattcactacaacttcttctccaagttctactgctcgttcgccgccactcttcttcctccttaccctctgctactcttaatcgtcctctgctactctttattgctgttctcttctactgctaccttgtatccataccgagttgctaacagtggtatcagattcaacgatccttggccgatcctcgcgttctcgcgctggatccttctggtgttcattcccatttcactcgttttcgc

SEQ ID NO: 139827 - DNA, 922 bp, Zea Mays
cgagatgcaacccagcccccgagggtgtccgagcgagctctcccttcccatacctccatggatgtccacgtcgggtcgtctccaccacgttctgatggagtgatagcgatgcatacttctttagcttcaagtgagggagtcaccttagaggttccattttcttttgttaatttgaatatttggttaaaacgtccacgctaaaatatccaaacaagcaatttttagctctcgtatttatatgagtttatttactgtcatccagtattttctaaacttgaaaaacttgtctggctcttagggttgatgaatacacatgtgttgctattacttgcttgctccttgtcggcgatggtatagatagcagtagcactgtacacaagcagcaagcaacaccccacctccttgcattgactgttgcattttttatgaaacctaaagccgtgtttccatctaattgtaggcccatttgactctagtctccggtctctctccactctaactacagccggctcgcgtctcctcgaccatcaccaccttgacggtctccgtgaaggtatttttcttctttctttgatgcatattattagaattagtttgttagttaaaatttgatgcatgatttttggttagttgttacaattgatgcataatttcttgttcattgtaaattaatcaatgttaggttcaatgtttggttaaatgtttttatgtctagtgatccttcctaatagaagaagggcttaatgatgtttgtttacacattttttatttatgtttgtatgcttaatgatgtttatttacacaatttttatttacgtttatatgcttaattatgtttatttacacattttttatacattgggttatttagttttggaaatggatgacaatagaagaagggcgatgtatgatggattcaata

SEQ ID NO: 139828 - DNA, 388 bp, Zea Mays
gcgggatgctaggtggcaattactctttggtctttattccgactgacggtgagatgctattagcgagaattgccgaccgacgaagcgtcgctattcatatataaatataacgactgatacttagttgaaatatagatatatgccgactcacaatctgtggcaatatataccgactaacagttcgacgggaattctctatttatagcaacagtcgtccgacgctaatttggtgttgtggtatagtggtggtttttttgacagcccggctgcagtgtcgtcaaaccccggtgagacctcactgtccctgcatgccttgtgtttgatgtaatgtcaaacctataaatcgatgtcgtttcttgcagccctctgtcgatgacgcgtccgctcc

SEQ ID NO: 139829 - DNA, 783 bp, Zea Mays
gagccggtaaggctgtttttggtctcccgtgacaattagcacacgtttttctggccgaacaaccatttttcatgactccggtccggcacccacgttttcagcctagggagtcggcaaggctgtttttggtttaccgtgacctatagcacacgtttttctggccgaacttccatttttcttaaccccggtctggtacccacgttttcggcctctggagcccgtaaggctgtttttggtctcccggtagcaataacacaaaattttcaggccgaacaaccattttttatgactccggtccggtacccacgttttcggcctcgggagctcgtaaggctgtttttggtctcccgtgaacagcacacgtttttttggccggacaaccatttttcatgactccggtccgacacccacgtttttggcctcgggaggcggtaagacagtttttggtctccggtgacatatagcacacggttttctggccgaataaccatttttcatgactccggtcaggcacacggccgaagaaggaaaatcttcagcatgccttctttctcaaatgaagggcatgggccacacggccgaagaaggaaaagagatgggccacacggccgaagaaggaaaagagatgggcccaaatgaaggtatgggagaactggctgcgggagatgggtcgagaggccatggtttcggcccagcacatgccttctttctcttttcctttttccaatttctgttttctattttcatttcccatttcaattctaagttccaattttaaatatg

SEQ ID NO: 139830 - DNA, 314 bp, Zea Mays
cgatgtcatatagccttatcatgatagcgcctcagggtttgctggtatctagctgactgaattaccgtattcaattgctcttcctccaatacgtcaatatcctctaatctggtagcctctgcctcagctatgttttcgaagactagccttggcgccccaaacctgaggtcggtaggtagcactgcctctgaaccatagaccatgaagaaaagagtatttccatgcagagctcgactaggttgagttcttaagctccaaactacatacgacaactctctaatccattttcccgcgaacttttcattcttgtcaaa

SEQ ID NO: 139831 - DNA, 403 bp, Zea Mays
gaaaaccccatttgtaccgcgctgttgtatgcttctgcattccgagccctagttctgcttttttgcctccaagccttctctgcttccttgcgatcttgcttccgctcagctcatcagcgagattgggatggcgcccaagtagaaaaaccagaattcgtctgctgcgatcattcctcctatcgaccccaacagtcagttgcctttcgtaggtaaccacatgtctgttgtttttgaatccgaccttcttcaccttgtctctatcggagttcttcctccaaaagagctttgttcctggcggatctgccgtggggccactatcccgacggaggacacccacgagtccgttattttcattcctttcctcatccgcgaccttgctcttcctatttccccttttttccgc

SEQ ID NO: 139832 - DNA, 642 bp, Zea Mays
agctagagggacaataaaaatgaaacagaagagaatgtgttctgatagctaagcattggttattcgcttaaacctgacattggacctatttgaaagtaccgataaatattttttattccatacgaatggaatgtgtgagaacaaaattctcttttgtgaagcaaagtcattctatggatcatatagtgacatgctagggaactcaaaaaatgcaggcactagcttctgcaagcccctacgaaaccaacaggctgcaagcttgaaacgaattgttgaaaataataaaaaataaagcaatgcagtaatgcacaacaaccttatgtattccaacaaccatgtccgtgttgcagtactcataatagatttttgaaaacggaagataattttattgctcccagttttactgctagctcacccagggttatcagagatgagagatttctccaaaggctccgagaggtaccatacgcccatctcttattgcggtaccacactagcacttttcaaattgtcgatgcacctctttacagctcttttaggttatgtgccaatttctcgaggcttataaggacatttctactctatatctagaatctagtccttccatttgtctgaggtactgaatttagtgctaccaatccc

SEQ ID NO: 139833 - DNA, 446 bp, Zea Mays
gtctttctgactgtgggcccaagtggcattctcgcgttctccgcgcggtgactgacaggtgggaccgctcggtcagcatcgcccctaacagaagcgcctgcgtcttcaggacggccggcgtgtgcgggcgagatactcggtcgtggcctccccagctctctggcctcgtcctgggtatataacccgacgcgctgcgacccccttttgaccttactcggccatctagacagctagagcataaccatcaccgtgtgaagttggtaggagcatttgggcacatgggccagcgccatccgccagctttccccaccgcttgaggtactcggttggtcattgcagaagtgtggaagattgttgggggagcagaagggcaccacgactccggcaattgctcgtcagaagtacagtgccgccgcggatcgccttctgccgtggccggacaccac

SEQ ID NO: 139834 - DNA, 1633 bp, Zea Mays
ggatgacgaagcttacaataaaagaatggaagcaagagtacgaccatatgtaattatagaaggggagttatacaaaattgtgcacgcagatcatgttgctgacgctccattttagtgaacttgaagttcaggttgtcccttttatgtctagctaactgtgactccattggctcaatgaactcagcaagcaaatgaaaaagaaacagcttggtagggcctttatttatcatgtaatgatctaggaacaatggcctagaattatgaatgtgtgcagtattagccttactggtcatcagcctacgaacatccgcatttgagaccaccacatgcctttcttcaaattcttggtttgacccctcatcaaatattttatcaaaaaatgcatggtctgcagcaaccgtatggatctcatgccagatgagagctgaataagacgtttccctagatactttgagaccaccacaaacagacagcactaatgcattgttatgcacctgcttgcactgcatctggtcatccatctcttcaactagctgctctcgtaagccatgtgaattactgaagccatcacactcacagaaaactggcacatcatgcacatggatgagatttagaacatggacaacaatctgatttctatctagaatcaactcattgctatctaaatactcttcccccccccccggagttgccgagattgcatgcatttgctcaaagtagtcacttcctcatcccagataaccacgtcacatagctcagcattcgtgtctgtctcgccaaccatacactctccttgagctactagtttcaataaacagttatgtaactgaagaccttgcggtaactcatcatcccacagaatagggctagaaattgcatcaaacactctatgggcttcactcatggatgtcatgggtaccttgaacaatgcctggtcatgctgctgcaatagcacatgtggatcagaaccatgctgcaattccatagcaagctctagaaacaatggcgcattactggaaggaataagcacgacattggcatcaagctctgcagtatgctttgtcttctcgtaatgcacatactctgcaccacatgctagctgttgtcataagccatcatgcgccacttgagttgaaatctcatcccacactacacctgtaggatatatttcctccagtgtagctgcatcatcccgaaaagacaattcatcaaacagctaagtggaagcaactggcgccatccttaaatccttgaacatcaccatattaggacaggccacatcatcatcccaacggggcatatcattgcatactttctcgacaactacttccgccatcgcagtagcagccatatgtctgtctgtcgcccatgacggagtcacgatggctgcaatccacagccaccaaacgccgcctagctccacctgaagaagttcgccgccgcctagagagctggcgcgacaaactggattgaagaaaaccagaggcaccttgtgtcgaacagctgagatgcaacaagtctaccgccgccacacgccaccggaattccaatcactgtcgccaacaccaccaagtcgaacgcccgccggagatcgacgaacgttgatgacacgatgccgacgccgagagtcgtt

SEQ ID NO: 139835 - DNA, 1025 bp, Zea Mays
tgtcaatgtcggagtggttaccaccagtgattactaagtcgtcgacgtagactcccacactgagacgtcgttctccctgacctcacagatacacaggatgcttagaggcactccacgcttgagcgaggcgtctagtttcgagtatcatgcacggaggggttgacggagaccatagagcgccttgatcaggtggagctccttgtccgcacgccctttgagcacgaaccaggcatgatgcttgacgtacatcctgcaactcgcctttgagaaaggccaacttggcgtcatgtggtgcattggccagccttcactcgtggcgtaggccaacaacaatcacacagagtcaagtcacgccatcagagcaaaaatcttgtcggagtggacaccttgacgttgtacataccccttggcgacaagtctggctttgaacttggtgatgattgatgagcctggcttcatcatgattggtgctgtagccccacttgaggttgatcggtcagaccctaggcggtagttcgacaagctcctaggtgtcattcgttttgatggaggtgaactcattgagcatggtttggtgttagctcttgtgtctcattaaatgtcgtcggcttagcttcatttgccagcaacaactgctcatccaactcatgtgtggtgacccccggtggcatggccgaccctagtacattatcaatgtcacggtaccggagcgggcatcgttgttgtggtttgcgtctagctgctgtgaagtgtcaacaccgggtggcgacacaaactcaattagggacgtgtccttgagtgtgtgtgtgctcagcgtcgcactcctagtgtcatgcgctggtgaggtgtgggttggcggtgctgatgaggtcgtaggtgaaacatcaaccccaattgatgtagttgcgctcgtcattgttgtggtggtgatcgacctagacaacgacatgttaaagttctcgacgatgaagtcttccacttcgacgcatcgtgacgctaggtcgtacacctggtacgccttggag

SEQ ID NO: 139836 - DNA, 865 bp, Zea Mays
cccgtgggtcagtcccatggcacggtagcgcgtagcgtagcttcgattgtcgtcatgggcatgcgtcacttgctggcgtgtgtaggcatatacctaatatggtgcatctgttacatctttccagatattatggttactgtagagactttgatgttgagatcccttcaactcggattgattggccctattcgctggtggtggttcgtctaagatagtacatggcgaggtgacgtccgtcagagacctctcgacgatgtacccaaggttcggatgtagtttggtgatgacccgtcttgtcctgccgacgtgggtttatatcattgggtcggccttctcttacgctagcctctagtaaggttgctcgacatggacctggctgctcgacatggacatgaacttagtcgcctgctccgcctcacaaggttgctcgggagggacttggtcatccgcttcgcaaggttgctcggcagggacttggttgctttcaaagagtcttcttgggctttgtttgggcaccccattcctgggtgcccaacaacagccccgagcctttacataactccttggagttgcgtagaggcttttatctgaaaggccaaattcctcgttgcgtgcaagcgcatctgctagatgcagccctcgagccccgagtaatttgtgagaattgcttgggggtttaccaggttaagcctacagtctaggggctgacccttcctgcggcggtcgacacgctgagcgtgggtccatttgttattttcttgctccctacttacaaccgatgtgcggggcgcgtgaacgcttcctcggtgcgcgcaagtgcatttgctagatgcaacctgagcccctgagtaatttgtgagaattg

SEQ ID NO: 139837 - DNA, 730 bp, Zea Mays
cgtgagcatgtcgcaccgacttaaggcgtttccgacttaagccgattgctccgttagcagggtatagtaatcaccctaagttatgtatgcgtgagcatgtcgcaccgacttaaggcgttttcgacttaagccgattgctccgttagtagggtatagtaatcaccctaagttatgtatgcgtgagcatatcgcaccgacttaagtcgattgctccgttagtagggtatagtaatcagcctagttatttatgcatgggcatgtcgcattggattaagtcgttttcgacttaaactgcttgctaattgagagtttgtatgcggacgaacgcagaagctttattgatagtgaaacctttcgtttacaatgtgcaacttgtcgactggagtttgatgtactgctacaggtagaatttcctgaggtgctcaatattccacgagtttcctacttgggttccatccatctgggtaagtcgataggatcctggccgagtgacttctgatgaatggtccttcccacggtggtgacaacttgtgttgcccttctcctgccagtacgtggtggagcactaggtctcctattgaaaaagatcgatagcgcacggctttgtcgtggtagcgccttagagtttgttgatacctagccgattggatgacgacattcaaacgttcttcttccaatacgtcaacatcttccagactggttgcttccgcttcagctatgctttcaaatg

SEQ ID NO: 139838 - DNA, 672 bp, Zea Mays
ggacgattgactttggttaaaactgtgctatcagctcagccgatttaccacttgactgtgttcccagaacagaggtggattttcaagcaaattgacaaaattcgtcgtagtttcttgtggaagggagaggaaccagaaaatatttctgggggcactgccttgtcaggtggccgttagtgaagcgccctttgaacctaggtggtttgggaatcgtcgatctggagcgttttgcaagagctttacggcttcgttggctttggtttgaatggaaaaatcaagaaagagcttgggtcggtttggacattccctgtagcaaggttgatcgggatctctttcatgcgtctacagtggtgacagtgggcaatggggttaaagcatctttttggcattcgtgttgaatcgatggcacgtcggcacgattgatagctcccacgctctttgccaagtcctcacggaagaatatttcagttctaaaagccacaacaaataatagatggatctcccacatttctccagttgttggggccaaggaaattagagagttcgtggctctttgggatgctctgtgcgaggtgcaactaaatccagggattgaggacgccatttactggcgctggaccaatgatggtgcctactcaaccaagagtgcctatttggcccagttcattggag

SEQ ID NO: 139839 - DNA, 381 bp, Zea Mays
cagaaacaacaattcaaagaaccaatccagcaccttttcttcaggttgtccttagtaagaattttatttcttaccactaaccagaagaaaaccttgattttatgaggcaatttagatttccacaaaaacttatatggaatcaaagtttgatcttccattttctttttgtacaaagaattaactgaaaagccttttttcccagagtccacacaattttatcctcttgatcagatagtattacctgattacagcaatttatcaattcatcgaataacaacctcaaattacccacaatccttcttctgaaagtaagagactcaaaattcgatgtgaaaacctcattaacagaaacatctttgtcataggtcaagtcaaaaagaa

SEQ ID NO: 139840 - DNA, 644 bp, Zea Mays
ggacttaaaaccctagggacaccctcgaagtacgtctcccgaggaccgggaatcaataactccgcctcgcccgaagtcaccctcgagggtttgcccaaaactccgcttctcctgagttcagtctcgaacagggcgtaaatgcgggcagatctcccgaccgaggatcccctacccctgagaagctatgtctgcctctgtcgatctcgggcgagagggacaagacccgtggcaagcctcccaaaggtcaccagggggcaaccgcatttaatcctcgcacctacccgacgcagggttgtaggtgtatagtggtaacaagaccacagtcttgtcaaagattcaccaatatgattacgcacatgacgctgtacatgcacgccgtctaccagcccctgacgggacatgtaatacgacagaaaagcagaccagccctcgggcgcaaactccccctcgcccgacgcagagctcgccctcaggacagaactgcgcctcgcccgagctcgccctcggctcccccgcgaaccctgcgaagggccactccttcgaactgtggcaaggacctccgcctcgcccgagcctggttctgacctcgatatctgtgacggaggacaacccgacgtcatcgattacagtgaagctgacgcgtc

SEQ ID NO: 139841 - DNA, 277 bp, Zea Mays
tcggcaccaccgtcagatgattgcccgagcagaagatgcagagaagcgcaaccgtaagctccatgagagatctcacctcaactcaagcccgtgtagcttccttggaaagtcgtgaagtcattgttgttgaagccctgaagcaagccaaggatgagcatgtccagaagttgatggaggcctacttggtaacccataaccaacgtagagccctgcggatccaagagtccgcttcatccaacccagttcaacccatgagaactgaagatccccagattcg

SEQ ID NO: 139842 - DNA, 433 bp, Zea Mays
ccaacgtcgaagagctgttccgatgaggtaacagtgctgacattaaattaaatggatcgatgagcatccatagcaccggaggaagttcgaacggtgcagaattaatggaatacttgctctatctgacctggccacggagagactctccacggcggcgacgatgaccgtttctagggaaatccggtgatctcggtcgatggtggacaaaaagggatggttggtgggttgttagctctgtaactgggaggtggagatcagtgcacggtcaatttggatgacggggatagggacacagtgaattttaaagggccgatgacccacggtgaaaacacaggcgatgagcttcaccgagcctcgctggccttcacgggtgacgccgagcacgattcttttctagagaccagacacgtctcgccatggctatgatgtggtt

SEQ ID NO: 139843 - DNA, 439 bp, Zea Mays
gtttggcttctacttcttgatgtcttagacaaaataatgagacttcttgtcgtctacttgtgactattactgactattggagtgttactgatgaatgttactgatggatgttactgatggatgttactgatgatacatgaagtatacagtgttatttctgactatcactgagtgactattaccggtaattattacctctattgttgtttggcactcgtttgtttcttgctcctttgaatctgttacgtgccatagatccattgtttgttcatcagcatttgtttgttccacctctggttgaggtgtgtgtgctctagctgagggggcatctggagtgccagtgtcctcctgtgactcaactgatgcagccagatataccgcttcgtccgccgatgtcggttcttctaccgtatcagcatgatcagacggtgcatcttct

SEQ ID NO: 139844 - DNA, 563 bp, Zea Mays
aggcataacgaccttctcctgacatcaataacacggactggattttcattaccacttagccagcagcatggccaagctccacttccaaaccagcagttaccttctagtcatcaacatcccagggcccttagtagccagccaaatattcctggagttggtgggcctttatatccttccaagcatctgcctggtggatcattctctgctgagactaataacatgggttttatgaactcacctgctcaaatgcatcaaggtggagcaggtacaaactaccagcaaaagtcagttagtggtcatgcagttccaaatcatgttggtccatcaccaattcgacctccaatgggttctaatatgggtaatagtgatggacactttgaaagagatggccctcacacttatggaaggtttgatggagcaaaggctctccagcagcaaccaaagcttgctgctctctcaacttcacaaaatcccatggtaataatcttggtacagtagtgttgaatcttaatgaagcgaatagttcactcttacactgcctaaatttatgtcctaccataaca

SEQ ID NO: 139845 - DNA, 454 bp, Zea Mays
aatttatcgaaccagacgatgactggttgaagtgtgttgaaaacactagtgatgaactacttggagcatactccaagtctgaagataacgcactatctgcggccttcgggagccgaaaaagaagaggctaaatagagttttgatgctattggatttatgtaccctgactaccgctacccgccacaggggcagaagagaaagagtgtaacttctgggaaggatgttgcttcagccgcttcaagcgagcccgcgccgaagaggataaaggtgaaggttcttactcatcgaccgcgctacattgaaccggccacagtgcctgaatttggcggtgagacctcttcggctactgaagccaaaggatctgctcttacgtagaggattgaagagccggctgcaatgccgaaggctgacaaaattgaagaaccgagaaccgaagagacgaaaacattagaag

SEQ ID NO: 139846 - DNA, 419 bp, Zea Mays
aggaagtgcctgtgcctgaatttaccgacgctgaccccaatgggtgtgacccatctgacgctgaccccaatgggtgtgctgtccgtgttgctgatgaaaacgaggaggaagaagaagatgagatccctctgattcagaagaacagtcggcgctacatagccagtggggaaagtagtggagttccttctcctgctttgtctgccctcattggtttacaagaattgtctctggcgaacattgatcaaactcttgaagatatggttctagaggatctgttatcagaaccagcggatggtgacgcgatggatgtttgtgctgatgtgttcgacgtcgggttggggtcatcccgggcagcgtcccacgcctcattgaccttggagcgcggtcttgagggtcaggaagctgacttggattgttct

SEQ ID NO: 139847 - DNA, 495 bp, Zea Mays
ttcttgatcaaacctccaagtggcaggagcttccccatgacatgcttgcaaggtgccttgcttcgagtccttgttgaaaacatgaggattgtgtttgcatgtaccaaagtgtttcttcaacgcaaatgttccatgcccccttgtgtcagccttgatttcacggtggcaatatttgcaccttccagcctttagagaccctttgtcatccttgatcttgataaaatgttgccacatctcagaccttgaagccacctcctctcgactttctctttctccttcttttccacattaatgaccattttttattgtcgtcagttttgtcttgcacctgagtctctacttgcaccattgttgtctcctgactttcaaattgagccccgttagctagtgactcaatattatcctctagttctggcatctacataaatcaaaattgaacactataatcaattaatcattcactaatataaatacaataagaacatatcataaaat

SEQ ID NO: 139848 - DNA, 474 bp, Zea Mays
atgactttatggtcgtgttcctgtatgatattctgatttattcaaagatcgaggctgagcatgaggagcatctccatctcgttctgggttcccttaggaagaatcagttctatggcaagttgaagaagtgtgccttttggctgtccgaagtggctttcctggggcatgtgattaatcagcagggtattgcggttgatcccaagaatgttgcagctatggtggagtggaagagaccctctagtgtctctgaaatccgaagtttcttggggctcgctggatattaacgacgcttcgtaccaaatttttccagcattgctaagcctttgactagactcttggagaagggtgttctcttcgtctggtccagcgattgcgaggtcagttatcagacattgaagaacaagttggtggatgcccctatcctagctttgcctgagagcggtaagcgtttcacagtttatacggatgcttcgc

SEQ ID NO: 139849 - DNA, 1102 bp, Zea Mays
gcattacacagtccaaaagccatgaccaagaattcaaaatgcccatggtgagtgcgaaaagccgtcttttccacatctgcttggtgcatccgaacctgatggtacgctgatcgcaaatccagtttggtgaagaattgagccccatgcagttcatcaagcaattcttctactactgggattgggaatttatccttaatagtcgtggcattcaactcacgataatccacacaaaaacgtcaagacccatttgccttgtgcactaagagcaccggtgaagagaatggagaacgactaggccgaatgataccttgtgccagcatctcaatacactaacgctcaatttcatccttctggcagtgtgggtaccgatagggtcggacaaccactggatccgacccttccttcaaacaaatgtgatgatcacacggacgggagggtggtaggccctgtggctcgtgaaacagatccttaaatgtgtccaggatcccctgcagatgaaggtcatgttcaacttccaaagtgcgtaactgaactgacttcccatgatgtagaaggccttacaaactgacatgtccaccctcgaggaaaaaagacatttggagggagtcaaagttccagctgatatcacccaatttctagagccattgcaccccgagaactacatcaaacccttccatgggaatcaccaagaaggaatctgagaaggaatgatcctgtataccaaactgaacggccgacagacgccccaaacatggcaatcgagctccattggccacctacacctgctgcttggttcctaacagttgtggaatctggagcaaggaagccgcatggctgctaatgaaattgtgtgtgcttccactatccaccaagcccactagtcgatgttgccccataatcagaatgacctgcattgtgcggctgaccttcaacccatttatggctagcgcagaaagggttggttccttctcaatcacatcatcctcttcatcctcgttgagcactttgagatcaaacaaacgctggcagcgatgtcccctcgagtatacctcatcgcagttgtaacaaagacccttctccctgcgttcagacatctcggcta

SEQ ID NO: 139850 - DNA, 492 bp, Zea Mays
ctagatctttgttgactaaccatgatggacccatcaagcgatgggtaccaaaatatgcttgacaagctctgcaggaaaacaagatgatatgaagccttggggtgcttgagaaagttgattcaatttaactcaagctgtcaaatcttcaatgatctttatccgtgactggcccaaggttattcttcaaattactacatcttaaactcatatcatctcgggaaagatattgatgttgtaggaaataaagaattatcttatgcggaaaaatcaaggcctacaacatggaggaaagtcaaaggatggtaacacttatcttttaaatagtttagaatatcatttcttatgtgtcttgtgtagtcacatagaaatatatatagcacttcaaatatctttaaattttatttgctatcccttgaagattttcctctcatatggtagattgcattctcattatttccatcctatcgcaatctacatactttaaaatgttgc

SEQ ID NO: 139851 - DNA, 625 bp, Zea Mays
tagtcacagccttgtcatacatgttcttgatgagtgtaacatactttgttgggactttatgcttatccaatgcccaccacatgagattcctgggtattttatcatagtccttttccaagtcgatacaaaccacgtgcaagtccttgtgctccttatatcgctccatgaaactgccttatttagaaaattgcttccatggttgaccttccaggcacgaatccaaattggttcatggtgatatgtgtcattcttctcagacgatgctcaataactctctcccatagcttcatagtgtgggtcatgagcttaatccctcgatagttggtacaactttgaatatctcccttgttcttgaagattgatactaatgtactcctccactcatcgggcatcctatttgatcgaaaaatattgttgaataacttggttagccaaacaatagcaatatcctcaaagcatttccacgcctctattgggataccatccgggcccaccgccttgccccatttcatcctctttaaagcttctttgacctctgattcttggatcctgcgtacaaagcatctatttaaatcatcaaaggagtcatccaattggatgtccatagtctcattctcaccattga

SEQ ID NO: 139852 - DNA, 275 bp, Zea Mays
gaaccggtacacttaacaagatctgggccatccaataacatatctacgatcccagggtgctcgcgaagggggctactatgaccaaatcagagccgccgattcccagatccacggccgcgacgttgtcttccctcacccgagcacacgcacggcggcgctggacagagccccgcgacggcgtctttgtcgcgcatggcgcgaggtcgtcccggcacaaaatggcaacctagatacattatattcgatgctcacagtgcgatgaaactgatagaagc

SEQ ID NO: 139853 - DNA, 609 bp, Zea Mays
cgggtacgggtactacccggatactaaacctcggatacgggtaggatacggaatcacaaatacccggtcagtacccgaaaatcccggataggatacgggtactattcgggcgggtacccggattgtggattggcttgggcctacttcctgtcttcctgttgggcgttggcctgcttctgctaatctggttgatcggcccggcccattaattaaatctaacacctaacagcagcgaggcagcgagcagcctgcagccgcaccacgtgacgccaggcgcctaggaagccgcacccgcgcctcacagccgtccgcggtccgcccgtcccggccgcagcaacccgcacaggcgcacagcacagcagtcagccgccggtcgccgcccatcaccgtccacctcactgcctcgtcgtcagccgtcgcggttctacttctgcactcctgcttttgcttcttggtctcttgcttctgcttgtgcactttttgcggctgcacggcgcggcacagcagccggtcgaccaggggcaggggccagcccagcgtccggctaagtcgcgaggggcacagaggagccggccagccggcagcccctctgctgtactcggcgcagct

SEQ ID NO: 139854 - DNA, 807 bp, Zea Mays
attttatatgaattaaactagattttggaattgtttttatactaaatatctattttctgtatttatttacttattttccctgattcgtggactgcgcgcataatatagagaagttcgggggctgacgtataaaaataccttagactcagatttaacccacggtgcacggcgggttaattcatcgaaacccgaggggctcttttaaaaagtgaccacggcgaaggggtatgcgcaaatctagccctccgatcaactacgcacggtaccgattagaatcgatctcctctgaatcgatatccaaccccggccaccggatcataatcccacgaccatggcttaacgcccccatgctctatccttatacgcccgattagaaaccgatggatatgatttgatatgaccaagcgctatttaggttccgaactggaccatcatcgcgaagacaacggccgcgagcacgtcttcttcccccgaccaaaaagcacggcggccagggatccatggcagggcatcccggtgaggtcaccaacccgaggcgcctgcccctaaattcaactcagcactctcgacgcaaggtaataatgatcgccgaccactgggatgaaggcactggcagtgctgcacacgagcacattggacccgcggtgaagctccttctccggcgaggaatttcccatctcaggccgccgatcaccgcctgatgatgccacgcgcaccttccctgctcactagcaaaccctatacttccacatccagatccgtgccacggcgttctcatgtttagccatggcggcagacatgcctgag

SEQ ID NO: 139855 - DNA, 968 bp, Zea Mays
ccagtttccaaatagtccaacacttcatctagaattggacccccatcacccccttcctctatggcaataacattcagctgtggttggaatgcagttttacacttgtggcctggcataaacttttcaccacacttgtaacatagtccattaactctcctatacttcttcaactgtttggccttccaaacctctccatgcaaatcagatgattccttattgttcacatgaaaaacaagtgcaggtttcaccaggccaaacctcttgttccttgttccctgtctagactaaaatgcctcatgttttagtgcaagttgtgctgccatagagaccgacttgggaaattgtactccaacacaagcccttaattccattttgagacccaacacgaactatgtgaccaagaatgtctcgctaatggatttgtcaaacagcctgatgtgatacaccaacttttcgaattgaatcttatattccaatgcagttccagatagtttcagagtgagtaactccaacatcttatctgtatgcgtagatacttcaaactcattaagaacaaccaacctgaactagaaccattcaaacaactctacagtctctctacaagactggaaccaatgtgatgctctccctttcaagtgcaaagaagcaacactgactttacactcctcaggaatcaaatataatgcaaaataagccttgcaatgatcaatccagactctagcatcctctccttcaaatatggggaaatccattttaggtagccacacccttttgtttgcataatccacttccccaatattccaatgatcttccacccttttaaatcctccttccacattgagtgtctgcttgggtggaatattctgccatacctgagggcctatgggatgaactcccatcaatccatctccagcagggggtttcgaggttgattccattcctcttgcagcattagtcaccatattcgc

SEQ ID NO: 139856 - DNA, 1065 bp, Zea Mays
ataataggtcacgagaacattaaatagtataaggaagcttacatattgcaagacaacctttcgatcctttaagctttgaaattgagtgataatgtcctcatccttgacttgcaagaagaattgcctgtcaaacgagctaggtattgatccttatacaatgaagtatttgaggcaactgactcacaaattgatgctttaggtgtcaaaaataaattatatttctcctcagcttcacaatgagcactatcaacaacaccaacatgcttaagcaatctagctttaacattccaatttctaaaccttcattaacgaaagcatctccaccagagaatttgttgttatctttgaacagatagcaaacaaaacaatacaacatctttatccatactatactcaagccaattaaactcggaaaaccactttggtaggaagcgacttatgcctccacattcatgttggggaaaatcatccttctttatatttggttgacatggccccaatgcaatataagcccttctaaccgcatcttggttattaataaaatagcttgagaatggagtcctgaatccaggatcatgctcaatgccataaatatcattatcatcactatcattatcctcactcgatgttgtcccattcaagtgcactgattcaaaatcatcattgtcttcaacatcttctattattggaggttcaggctcaactctctcgttctgcgggcgttgcattattagtttcagtctgtccttggaatatcaccaattgcatctctctttcattagaagatggagcagcactatctttcttttttgcagcagctcttgctaaaaaagctctcaaatcagtggtagcattgatcttcctcttcattttcaaatctgcaaataaatcacaatacactcaattcaatgcctagtctaaaacaaattaagacacactcaaatcacaaattagtgaaaccactcaaacagtcaaaccaggacctcaacttcaacttcacaaatcggcggacggctgcctcctgggatgagcctcgaccttgatggcggacggggtgacaccgcg

SEQ ID NO: 139857 - DNA, 522 bp, Zea Mays
gtcaatccgggagctgagggtgcctgcaatcgtctcgcgtgcgaccaatcactcgtcagagcccatctccgccgcggatcccgctcgtctcgtggaccggccacgccacgggacaagctctggtgagaaaccaattcgctactccctatgttcccttgaatgcgtgggaccgtgaatcgtagctcgtgatttcttttggacggcgtatcgggtggccggagttatggcgccgccgccctgttccgtccatctcggctggaggtgggtgatggcgtgccagccgttagatccatggtggatgcgtgcgattagatccgggtgggtgatgatcttcataccgttggttttccaatgggcgtatgggatcgaatccagggcgtatcgcttcaggatgtgatctggaccatgaatcccggatcctgtggcccggattgattacgggttcacatatgataacgatctaatccgagccctcaaatgtcgatccaacggttgaattctacccgtaccccttcgtcttgg

SEQ ID NO: 139858 - DNA, 416 bp, Zea Mays
atttaataagtttttgagaaaaactcttctccaatagttatgtaaatcagttccctaaatatacaaactccctacaaaacacaatttcatccctacatttaccaaccttgttggaactccctaaatcaatatggtactaaatccatcatgaaaataatacttttgccactgttttttgcgctgtcccactgtcatgttgaccacaaatccatctttaacgcctagatgtcttgatgtcgccactgctagaaaacctcttttgctagaaaacctcttatgtggaggcgtcgtcagagcacatcctgtgatgtcttcacgtcatcgccgcgaccgtatggtcttccatcgataacttcgacatcagggaaggttgttgttattgatttctaccgccgactcaattaaaattagaaagc

SEQ ID NO: 139859 - DNA, 544 bp, Zea Mays
tctaggtcttttttgtctgatggtgagtttgggagtccgttttcctggaccgaagagtcttcggatgaagacttggattattttcctgcgttagatgtggccgcggtggagtcctcgccacgggtggaggttggtgaggtgtctgatcttcctagtgcgaggaccaagtgccggcgacgaagggtggtgtcgaagcataccgtggatgaggtttcgcgaagtggtaggcaccgtcggatggggatggagcgggaccgtcttcgagtagatcggtttggtaaacgagagctattgtcttcaccgattgggacgagcattggtgagggggatctgcggaatctttttgagggtgaggaattgaaaataatgtttttcaattatagggaggcgggcatcatcccgaaggttgagcggatgtagtatgtggtgccctcgctaagtgtatgtaactgcaacttgtattgtaatgtggcctgttggccgtctttgagtgagagtctggttgtcgcgcacttgttgtgctaatccggctgcacctttaggc

SEQ ID NO: 139860 - DNA, 312 bp, Zea Mays
gctagctgctcttccagggctgtccagtgaagctaccatggagcacaacatccaggtggaaactatgcaggtggtgcaggaggaaatcaggcctaattcagaggtacacaacattgatgatttcctgatttccatatctaaacctatcccagtaccattacttatagagcaaccaccaggtgacaattctagaaatgctgaacacatcaatgactttcctaaccacactccaaacagcgagagccacatgcatcataacatagacaatactaaccacagctctcccatgcaaaagcagcgtagaagctccag

SEQ ID NO: 139861 - DNA, 326 bp, Zea Mays
attttaactaagactagggtgctctgtgcaaaattccgggcctgttttataattcctttacacgcatcaggacggcgggttgatttgataaaaggacaggggctctttaagaatttgtcacagccgaaggggtatcagctgccgtgagccatccgatcgcccatcaaccgacgggattagatccccccctaaagtgaataggaatcacccacaacccttggatgcggcatccacggttccagacgatttcaaaccccatccactcgatcaggcgccaaaggcttggattcaatacgcgaaggggtaaatgctacttttaatcccag

SEQ ID NO: 139862 - DNA, 601 bp, Zea Mays
cgccacacttcaaggaaaccgagagaggaaatcactgccgcccaaccaatccattgccgccgcggtggaatccccagctgtgctgccatccgcgcctcgtgtggagtccgtgcccttcaccaggaccgggggaaggtccatcatagcaccgcgtgcgggtctatcctctacaaccccgggaagtcgtcgtcggggatctccatcgtcgcttcgtcgtgagcgtgggtctctgcaccaccatcaggggtaataacccatccattctcttcgtatcacattgtgcttcgtgtagcgtgtctccaattcgagattagctcacttggcgacgatcggggcgctggaggaaggtctccgccgtggggattttgcgctgctgcccggggtttggtcggaggttgaaggcgcgccgtcgaccgtctgatttggtgggcggtcaggatttgataaagggctgggtctgtgtgcgtcgttgattttggagtgagcggtagagattagaaattggcataccctttcggcgctttatcatccgaccgtcgaagttgaatcggatggttgcgcgaggttgtagacgtggccgaactctggccctggatctttg

SEQ ID NO: 139863 - DNA, 450 bp, Zea Mays
cagctcctatcatccacaatcggacggacaaacagagagggtcaatcagtgtcttgaaacctatcttcgctgttttgttcactcatgtcctcgacaatggcccatgtggttatcgctggcagaattttggtacaacacctgccatcactcatcccttggtaagtctccatttgaagtgctttatggccatttgccaacacaagtgggacgggtagctgctgaacagtgtgaggttccagatcttcagcagtttttggaggacagacagaaggtgctgcaataggtacgcatgcatctccaacgagctcaagcacgaatgaaaaggcaggctgatcagggcagaactgaacgatcattttcagttggggaccaagtgtttctgaaactgcagccatattgtcagtcgtcgataaccgagaggcagaaccagaaactgtctttccggttctt

SEQ ID NO: 139864 - DNA, 483 bp, Zea Mays
gcaatggatgatgaggcgctgcaaaaacatgcccggatgcatgtagaatcgaaggagaagtgcttgtcacatttcatggtgcatcggtactagaagattatcaagcaaggggagatcaagcacgactccttcataccttcactctaaaataacaatttaagtaattctaatgataatcaatctattaagcattatatagatcagaaaagggatcaattagaacaatgtatagggtgtataaatattgaagcccgcacccgcttgatcctctacgacataggaaccattgagattaccaagtacggagaaaagcagggaggacttggagccgtcaccgccatagctcatctccgctattaatcggtgcccagggaatgggtaatggcctctccaagaaccatggagtgtacgcatgtggttggtagagcatgggagttctcgggttcaacacaattgttcgtcggagagcacaagtccgtcgct

SEQ ID NO: 139865 - DNA, 339 bp, Zea Mays
atactgtcttgcttttatgtgtttaaactaatttaatcatttatcatttctcttttttctttattctccaaactggaaaacacatacagttcaatgtctcaacgtgtgaagcagtactcaacgctgataaatctgagacacaagacttcatacatgtatggaatcatctgatgtctgagtgcgaaaactatgatttgtcaagaccaaattggttagcagaccttttccccaacccactctgtttttcgaacccactttttcatacctacaattttaactttccatcatcagcagttgcaatcaccagtacacatactttgcaactgtctatactttttt

SEQ ID NO: 139866 - DNA, 438 bp, Zea Mays
aacacagacaaaatttactaactaccccacacccactaagccacctgcaaaggccccaccgccatgggatcctctgctgccagctcctccaacaccttgggggggtcctccaccatcggcgcaggggctggcaaggagccttcaccggacaaagtagacacaggtgcggcggaggagccttcaccagcttccgagggcagtgtcgggttgaccttaggctcgggccacgcgccgttcagatctccaaggtcttcgacatcctcggcacgcgccatctgcagcaatagcacactcatttagcaaacccacacgcacccacattcaacgacacgaaacaaaggacaaactttacctgctctctcgcccggtcagaccgctccctaaccgcctctcgaccatgaggaccccacatccgatcgaagagtgcccccgcggaat

SEQ ID NO: 139867 - DNA, 757 bp, Zea Mays
ttcggaaatgtaatgtttgtttctgggtttcagactttgtaagaaaaccaagtctgaatttgggtatttgatgcaacctttggaatttggtagtttggaatccatgagtgttttgagaaaggttgttgtggcaaacttgtagagtaggtattggagaacaaactctattaggtgggatgcccctaaaaccatatgaaattaggagaaaaggtggtcaaaagtggagctgacagatttggatttcagacttagtgcagcttactaaatctgaattttagtgtttttggtgcaacttcgttgctccttggtggtcaatccctttgtttttaggctgtagtttctgtagaaaacttggagaccaatattgggggagtaatccctagtgagggacatacccttgaaactgcttaaaaatgagagaaaacactgcacaaagttgtgctgtcagataaaagagtattgactgttgtgcagtagcctaagtctgaaatatgtgtgtctggttaaactttggagctttgtggtgcttgatctatatggttttggactgaagttattgtggaaagtttgaagaccatatgttagtgaataagttcctttaagtgtgttgggcgtgaccctacacaaaaagtggtgtaaatattgcccaaattgggactgtcagtcacacaaactgaatttcattcagtccaatgaaaactgaatttcagtgcaattagctgaacttcagagctcttttgtggctaatccataaaat

SEQ ID NO: 139868 - DNA, 448 bp, Zea Mays
aagaaaacgaatttttggcactcggctgagaaatgatcgctataaatggaaacagtggtatattcggtgtctgggatatcggataggcgtgaattttggcgaggaagttactggaggtgtcatgagggtgctggaaaaatctagtgtcgatttgagcaaatttgagtgatttggacatttcaccgagcacttggtgcgcggggttttatagaagcgatgaattggttgttctaggttttgaaacctcccaaagggagagatgaacctgcaagggagctcaagagacacaaaggcacacttgtaaccacaagttttcacagaatttgcgagatttttcacaaagggtggtggagctccattgcatagaccagcagagagagagattaaagggagacctcaccagagagagtggaggaagagaagcacaggcaggagcacctcgatggag

SEQ ID NO: 139869 - DNA, 334 bp, Zea Mays
gctgatcataataaggtttatgacaattataactagcatagtaagctcttctacatgagtcctgcacgtgcatagtgtcgcttcaaccaaggaagccttccttcatctgtctcaaatgccttaaaggaggaccgattctcagctttccaaaaaagttcagttgccatgaagtgttcagctgatccttcctttgccccacatcgaaccgccatagactgaacttccctaattacttcatctagatgctcacctagcacgactttgtttgcaattttacaattttcttttagagtggcatgaatattctgcatcactttgaccatttggttcttgg

SEQ ID NO: 139870 - DNA, 697 bp, Zea Mays
cctcgacacaccagtagatgtcgaggtagcggctttacttttcctcccttgcttccgcgtgggatagcagtagtctgggtatacgaacccgataacatcaaacaccctattcaatctcttcttgccgcgagcacagaaggcagttgtcatagcttcgtcttctgccttcgaatacgctccaagtatctcatcacttgttgcttctacggcatccaaccaatcataattttgctcatcaaactgattcctgaaccgaaaagtgtacttcagataaaccaggccaccctggctggagccagcgacggcctccttcggcatttcccactcgctcgcaagaggccatactttgtatgcaatatgctcttgaactaagtgtcttgtgccaatataggtgcacactgtgttgaaagccgcatggcacgcttgcacatcatttctaagtgcagtgggtggcctcctaatgccgaagcgagaccatatagggcgttgaataatccctttcacatcctccctttgagtcatgtcatttttcacgtaaaaccattcctgcatcgaagagcctggccacctcttccgaaacgtgggcacatgataacttgcctcagatccacgaagctgtaacaaccaaaattattgtgatattgttcctttctagttgccttcgtctcataagataactcatgaatattgcaaaagc

SEQ ID NO: 139871 - DNA, 483 bp, Zea Mays
accgggacacgatcttcaccagcagcttctgggagtcgttcaagctagcaggtgccaagctcctgcacaactccgccttccatccgcatacagatggccagtccaaggtgtagttgcatcatcgtcatgcaggctacctgcattggtgtcctacatccgcatacagatggtcagccaatagctctggcaccatgacaccttcatggcattaatttgcaagtgtctcttgctagcccaggacgtcatgaaggaacatcaggacaagaagcggtgcctagtggagtactcggtcggcgactgtgtttggctccgtctgcatcagcatacaactgtcgacaccacgacaacttcctccaagctggggcctcactactttgggccctactagatcaccgagcagattgatgccgtcacataccgtctatgtctccctcctaatacctgcatattagattgaaaccctaaccataaatcagggtaggc

SEQ ID NO: 139872 - DNA, 1726 bp, Zea Mays
ttgatagtgatcatgtcaaacagctgattgccatttcagacggtttgtcgagtgttctttgctagaataagtttttccttatcgatgaacagcctaatgctggctatgtatgagaagtttatcggagtcacctgctcagccaacctcctcaatcttcgtatatgcatttgctgctagtctgctactgctacgtttacacaggagtaaagactaaagaatatcaccgtgcctgtctagtgtctgtaccagcttgcattgcattccaagttatgatcgtggccgtttcctgaggtagccccccctcggtttctggatcttggaccatgctatgtctgcgccttgagacttgattcttcaattgtggttcagaggcgcagcacatggaacacgtcctggcatacccaggctgtctcctacggacaccggtaaggccatctatttccaattggctgtgtaaacggtcttgtaaagtattgtttgcaccgtggattgtattatttgcataatgaagttttaaatagagagtgagatatgaaggaagataaggagtctgctgaagatagcctaagaccatcttcaacggttcccatctcgtcccccctcctctcagatagtggagacagtagccctctaaaagctacaacgatgccctctactcttgcctctacgcaagggaaatcgtctctccccctagttccagggacatgctatacactcgtgtcggtgtttggaccgcgagtccttaaccaataagtaatgtgccgcgtggccggctctagattgtgcgcgagatgacacaagcgtttatcctattttgggcttctcgaggccctacttccagcagaggggatgaggcttatactactcgcaccgtggtacctgtagtggggggtttacaagcacagtgggagaggggcagtccccaagtccctagagtgattgaggaaagtgccgatatctaagatagagtgagaaggcaagaactcgtctacgtgtgtcctcctgtcccgtggagggaccactgccctatttatacaccaagggaagcgtccgcagtgaagctgggtcctgtattcgaggagggatgtcctggcgtatgacgtgacggggatccatgcagtagattcgcgctaactgattctacgtagaatgccggggccgagggtttgtccgtacgcccgagcccctaaggcagaggccgcccatgccgtagtggctgtaaacagcgtcagggtatgggccaaaggttgcttacagggtgcgtcatcgtcctggcgcgtgatgacgtcgagattccttgcagcgctcattgagatcagagtccctgtttggttgatgcagaagtcttcccgaggcgctgactaagtcgtgcactacaatcgggcggagtggctgtatgtgggatttgcggcacagtcggtggcccgaggtcgagctcgggcaagatggagaacttgcccggggtcgggcaaggcagagcggttgcgcccgaaggctcgtctgctcggtttgtcgcgttaggcgtcccattggagggcgtcaggcggtgtgcgcacaatttgatgtaggcgtaatcataccgctgtgttggacgtgattgttgtcttgtctgctactgtgttttgcttccacagcgcgggttggcatacgcattaaatgcacctcccccgcttgttttcgagtgcccttttcctattcgcttgaggccggctcgggagagacggac

SEQ ID NO: 139873 - DNA, 2072 bp, Zea Mays
ttctctgtaattgtactttattacagggattatggtactacctctgttcataaaaaggatacaaataccaatactccaaaggtaataacatatagctcactatttttttgtgattcatcaacatgttgaagtaagaacccttggcatcaaagaagaaacacataatgctttcaacgcgcgcgggcgcgcatcagttactagttcataattcacacgcaaaaaaagccacgaacgggaggactgatccttgtgaagcaaaaagggagaaccggctacacgacatttgcaacgcgcgggaaactagttgggatacacttttctatgatacccaaaaaaaatgagagagatttgccttgaattttatagggaataatagtcattgtacgacaactagtagagactattattgcttcgtgctcacgaggtttcttaggaatcatgcaatgttcttgagcctttcatgtttaaaaaaattagatctagatattctctttctctattattagtttctggaccattaaagatagagattggagctagtgttttttaagtgacgggtaaaatataaagaagttgttagagaacgagaagatatatatagaatcaataacttttattaaaatatgcctctacatgaagacttaggtcattctcagtggatggttttaatgcactatttataaaactgccatatcaatatttatttaaaaaaagtgtatacagagttttatctccacgaaacttcgtcacctccatgaaacttcggcaggaatcgcccggcacccgccgatctgcctcatcgatcctcaaatcagcagctgttctttttcagtcatattgcgagctgagagtattcagggcaatggatttggcgtgtcgttcttccttctctttctccacagcttcgttaacttgttcctttcctcgcaatgactgaaactgaactgattcatgacaaatgaagtgacatgattcttccttctctttccccgtagcttttgtctgttcctccctcgcaacacgcaattcgtgctgtagaagtgaaacaagcacacgacaggccgaattccaaaaggatttcttcccctagctgggctacgtgcctagcaggagactttctgtgttcttctgtccatatgtatgtgtccatggcacacatcgttcgttgcgcttttatcacctgagtgagggaagccgtgtgcgcgtttcacgtacgtatcggtgtcgctgccgttttgtcaccgcgcgcccaccacccggggccgggtcagagcatctcaattcgcagccctgtgacgaagaactgatgaattgatggcatcatcagcaacaatcgcgcgcggcttctctcatacgagtcaaaagttggaaacatagaaaagttagaaaagttgggttgttcacttcggattagagtcggctgtttggactgctattttaatttatagagacaaaaatattgtagaaacagtagaagcatgagtactatattgtagaaacagtagaagcatgagtacttttgttcttttcgtggactacatctcaagttcagacacatattcatggtgtgctaatttcgacctttatgtccccatttcacgtgaagtaaggcctaccagccggcgatgttggtggtagtaatttcgaggaccctactcctcccttggatcgagcttcatgccttcatcagggcctacattttgtatgctgtgcagggtgcagccaacactgtctgccttgttcttggttcatgctttcgttcgggctctaggctagaaattcagcactgctactgcgcgctggtaatagtagtacacaatggttggttgttgttaaaaccaaaaagtctacaaagctctatgacacaatggttggagtggagcgtgaactctaatgattgtgcccttgtctggcgctggtcgccggatccccggcctggcccctcgctccatgccatggtttggtctgccctcttcaccgcagcagaacctagctggtccctcgctccgtcgtccatggcacggtcgtctctcctcttcgccacagaaagacagagatgcaggtgcagccag

SEQ ID NO: 139874 - DNA, 331 bp, Zea Mays
gcggaacggacctggagtcaggctggtgcatagcttggaagattcgagcagtggtttcgtcgatgaagccgcgcaggaagcggagtttgttgtgctcccccggtgttcagttttaggaggaagacgacttacaacatgggctcgccaggtggtgaacgggaggtcacgattacggagcggggacgctggtggtgagggcccacgcgatagtgtcacatcaagagcaggcgcgcgtgcaacattagatcgggcggcccacgcggtgccagcgttaggtgggccagaaggtgagctgagctgggccagaagtagggagctcggcccaagcaag

SEQ ID NO: 139875 - DNA, 541 bp, Zea Mays
ggtattttcgtgatatctcaatcgtgaaggccgaaggggagaataatgttcctcttcccaaagctgacgaagtcgtggtgtacagaagctttatgaaagtcgggcttctattccccctagacaaattgttggttgaggttctgaagacctttgaaatttaccttcattaacttactcctgacgccatcattaaagtgggaatctttatatgggccatgaggagccaaggactggaaccagatgcaagatgcttttgcaacatccatgagttgtcttatgagacgaaggctatcggaaaggagcagtatcacaacaactttggttgttacagtttcgtgccttgtcctgaagcgagctacccggttcccacatttcggaggaggtgtccgggctcctagatgcaagaatggttttacgtgaagaatgacctaagtgaaagggagggtgtgagagggattattcaacgtcctatatggtctcgcttcggcattaggaggccagccactgcccttgggaatgatatacaaacatgccaggcggc

SEQ ID NO: 139876 - DNA, 565 bp, Zea Mays
ggttcatgccctaaaaatatggcgtcattatttgctggggaatgtctatcacatttatacagaccacaaaagtttgaagtatatctttacctagtcagaacttaatatgagacaaaagagatggctcgagctgataaaggattatgaattagagattcattatcacccaagcaaagctaatgtagtggcagatgtgttaagtcgtagggctttctgtcattgccttaccatgaagacttctgacattacgttatgccaagaaatggagaaattgaacttgggaatgattcagcatggaacttcaaatcatttgaagcttgagtcagtcatcctgcaaagaataattgacgcacaaagaaatgatgagggaatgaaacacatccatgagaaaatagaagctggaaaagccatctgcttcagaagagatgatcaaggcattgcatggtttaacaaccgcatagctgtgcctaaaaatgatgaggtccgccagcaaattctagatgaagcacatcttagtcgctattctattcatcccagaagcactaagatgtatcatgatctaaaa

SEQ ID NO: 139877 - DNA, 485 bp, Zea Mays
attagcggggagcaggtaaccgaggttgggctcgggcgaggcagagtttgtcccaaggatcaggtcggctttgggcgagctagattttgcacccgagggccagcctgcactcttgtcgtatgtgtgtcccattgggagttagcaggcagtgtgcgggaacagtggccgcatgagtcatcgtagttggtgaagtccgataggaccacggtcgtgtcgctcctgttcacctgcaacgctgtgaggggtaggtgtgcgcatcgaatgctactatctcctgcgtccttcggctgaggcctatgaggccaggacgaggatcctcccgagaacgtaccttgtctgagggcaggctcgggcgaagcgtggtttatgatctcttgacttcgaggaatgggtctgatggtggtcttggggttaagcgtgtatttagggacgtaatataggtacccctaattatgatacctgatagtaacattacacaaaatcat

SEQ ID NO: 139878 - DNA, 532 bp, Zea Mays
aagtttatgggagcaacaactccaatagaatgcaagagggagaagtagaatgcaacacaaagagcaagcacgcaacacacaacaccaaaaagatcttagaagcacactctccctaggaagtctaattctactcaaaatggtgctcagatctctcaagaatgaatctattatgttgtgaatgtgtatgggagtgatcacttgctcttagggtgtttgggttctcgtagaggctgataggggctatttatagcccaaatggccaaaagagatgttgatgaattgctagaaatttgacttctacaagcgcaccagactggtccactgcaccaccggaccaggtcctgtagctggtccttccggatcctaattgtcgccttcctaactttggtggcagtggcaccggaccgtccagcacatcagttagccattgcacgctcatttaagactgaagtagtcgttggactccgaggtctggtgcaccaccgaaccatggtctgatgattttttaccaaaaccgaggctgggcagttcc

SEQ ID NO: 139879 - DNA, 431 bp, Zea Mays
ggagagcaattggattggatgcttgtggtggcaaattcaggatacgccacaggatcgatcggatgtcactgtcaaggtgaccacattgccagccaagctttgacaagtcagaacaggcatcaacgatggttcctcttctaactcagtcaattcgttcgtagagcgagggctggcaaagagctaagaggaacccaaaaaaagccttaaacctacccaaaaccgatattaggaaagaaatatgttttttcttgctccaacagtttctttatcattgtcccaaaagttctgcatcttgctccaacagtttctttatcattgtcccaaaagttctgcatcccccatccgcttcctctcctcccgcatatttgcgtgtgagtgatagcttcccaatccatacgcgcgagcgtattcttctccatcgcgagttgctg

SEQ ID NO: 139880 - DNA, 344 bp, Zea Mays
ggagggatgagcttggggcaaaaccacgtggcaaggccccaaaagcgtttgttggggcagcgaaggatccatgggcgaagtttgctcggttgttgagattggaggggacccgaggggtgttgcattgagtgtagtcgctggcacggccgccgcgacattgcgaatggctatggaagacatgctagcagttgctgaggtagcgaaggctacaggggagcagctacgctatgtgagttttaatcttttgcgccattggcttgcataggccgccactgatgtttttttattgcacacaagccctagcttttttgctaactatgttgcggcgggggcatacgtggcct

SEQ ID NO: 139881 - DNA, 507 bp, Zea Mays
gtttgttcctccctctagtgccatgagtttgttcctccctctagtgccaaatctaatgtcgtcggtcctgttcatggatcgacatttagcgcgctaggtaggggggaatctagtatatgattctcccagcatgccgatgaagttccaacttagatattcgatgggcgcgaggcagaggcattcctcttcttggtcggagttggcactcctccctatggtgtttgggggtatgctgcatccgtcacatgtcgtgctccatggtattcgaggatgccatcgtcggccaccgtcaagctctgccctttgctatagtcagggtagaacaggctgttgctttcccttcgagtctaacgttcaatgttgctcgaggggttaggtcatccatgtaccttctgtccataaggtagcatgagaatggactcttcctttgtataggatagcatttatctatgatccagtctggtgaggctcaccctcataaactcggtctggccctgtgaggtccgc

SEQ ID NO: 139882 - DNA, 302 bp, Zea Mays
ctgctgcttcgctgctaaggtctgaccaattgcctgaactgcctgagtttgcatcataaacatctgctcaactgtcatcgggggtggcggtggcaactgctgctgttggactgcatcctcctggggtgcctgttattccgctgagcatgcctcgcacctctgcgcctgttctcagacatctgtagaaaccacacacatatcagatctgactctctagtctttcagcataagaaaagatatacagaaatcttcatagcattgaacaattgatcatcttcactgacaacttctcagataaaaag

SEQ ID NO: 139883 - DNA, 392 bp, Zea Mays
gtgaacgatggggttgtggctgttgatggtgtgggacaatggcagtgcctagaaaggggctaggcgcgggcgaagggagagggagtgggatggtgtcagctagagagagggagacattaatatcgagattgagaaggtacaaggactcagagttttcactctatttctacttattgaaaaggttaaattggactctcaattgggaggcgtaccgttcaagttaggccctattggttagtttgggtccaacatggcaccttggctgaggccttacccgattaggacccttctttgggcttcattgggcttagcaagggcccatatttaggcctatgacatcactcccccttttcgtataatgtcatctggtctaatggtagacatcaaactag

SEQ ID NO: 139884 - DNA, 322 bp, Zea Mays
caaatatatacgttgagcctaacaatggtgttgggggtcatctggtgtagatagatttcaaactttttcaaaacctcaccaatcatctcataaaggggaaccgaagtcccgccctatagaagctcttgaagactacaacttcatcttctttcggctctggaatcgtctcctgtctagcaaaacaaaccagttcatcatcattttctccaaaatatcctagcttcttcatgagaactagatcctcagctttaactgtggatctcccgaattcaatatggctggacttagtcggacataggatactatcatcatccttgctttc

SEQ ID NO: 139885 - DNA, 292 bp, Zea Mays
tgtcaaccttcattctcttccaccagaagttttgcttcaaatccttgtacattttggtttcgccagggtggacggtgtaaggcgttttatgagcttctctcaagatatccgtcttcacatctaatttctgtggcacacaaaggcagcccctaaaacgaaccaaatcattctcatcaatggtgaactcacggggtttaccatcgccgaccctcttccgagcttcctgcaataaacgatcatgttgttgtgccacacgcactctctccagaagggaggattgaatgagcatccg

SEQ ID NO: 139886 - DNA, 387 bp, Zea Mays
ccctgatctttcttgaaggtccaatcatgtccaaaccccagcatgcaaatggccatgttatagggatggtctgcagctgctgtgccggtaaatgttgttgctttgacaagaattggcaagcttcacatctctggactaactcggcggcaccactcttcgctatcgaccaatagaaaccacatctgaaaaccttcccaaccagagttctggacgcggcatgtactccacattatccagcatggatttcctctaacagttgcttcccaacggccgagtgaatgcacttcatgaggactcctgtctcacctcttctgtacagtacgttccctatgagggtgtagtgagctgattgccttgcaatgcgttccacagccgtcttgtcatccg

SEQ ID NO: 139887 - DNA, 327 bp, Zea Mays
cgacgtcaagattttgtttctagatacgccaggtgctgtccattcgccatttcctagaatgaagaggtcacagtacagagaaaagcagcaatgggatggatgcaagaaccgccccaaatttgtctgctgatttatattacgtatctgtcaggtgcatgcttgattgatggatattatttaggaaaaatggtcagattgcaatatccaacattctcgatattttttaatgtcactagaacaaaaccgagaggtgctagctttttttatctcgaacaaagcatcgaaatgtatacagagaagcctgctaagcctgctggaacaaaaaag

SEQ ID NO: 139888 - DNA, 411 bp, Zea Mays
cgtgttcgatggtggcggcaacctttatcccgcagccatggtggtgctcgattctctctctctctcttttcttcaccagcgcgactcggacgcaggggatttttgcacgcgagggcaatcgggtctgagagcagagaagggcaagaaattagagctggactccatggcgttgcgtggttgagtttggcgcccacagagggagttgatggtggcgacgagtttatatgctccaagaaggcagagtccgcggaggttgcaaatcctgaccatagcgtgatttgggagagaatctgttgctgccagtagaggcgagaggaaaacccggcgaaaggtgcggcctccatggatttggccgtaacagactggggatacggatgggacttaccaatgggtcccacacgacagaagcac

SEQ ID NO: 139889 - DNA, 633 bp, Zea Mays
ttgacttggctaacactgatgcagacagcagattcaccttgtactggattccacagaaaatcttgttgaagaaaaaggcgtacagtagtaaatgagacaggtggaatttcgtgggactttcaaatgaaacactttgtaaaagttgggtggatgcagtcaaaaccagtgtttaaaatagcgggctaacccatttatccccggccttcttcagtggctacaaaaggatatatcgggatatatctgcagctaaatgttttagcggttttcactagacagtacacagtagacacttagacagatcctcccatgatcccaattcccagacctcacactagccactgattgcaacaagcaaagcagcccaaaatacatttatctcacaactagccgctgattccacaaacatccaagtcattgatctcacaactcacattctcacctacaatttaaaatgcacctcgaacaaaaacagctagccgctgattgcaacaagcaaagcagcccaaaatacatttaccattcacaaatgtaaacagctagcaaaacattcaccagaaaataatatacacattcagtcagccattcagcaagcaaaacagctagccgctgattgcaacaagcaaagcagctagc

SEQ ID NO: 139890 - DNA, 526 bp, Zea Mays
caattttggtagagggaatttagatttctttgattgtcgtgaatcccttgatggctgtggagaaggtggtggtgtccgaaatgttgatgcttgtggtggagacggtggattagaaagaggatgaggagcagcatgggaagattgtggaggtgatgatggatgtaaaggtactaaagtttgaggaggcggagatggttggggatgagatgacgacggcgtcggtggatcaaccaattcgacatcccttcgaggccaaaggatgaaatttttgatggcttgtccaagtgtctcgattccttcaggcccagggatgtctagcatgtcgtcctcagatccttggatgaccatcgtcacttctaccctgcgataatcatctggtatgtcgcttccatgaaacttacgtcctgggatcgcaatgcatgttcctactttcttcgtgtgattattgttaataccatatcttataaccagtgtgcacgtcactggccttgttatgtcatcaactggataacggaccttatttccc

SEQ ID NO: 139891 - DNA, 896 bp, Zea Mays
tatggatgttggtttagactaagattattattttgtaaaacaagtcacttatatattggtatcatgagctaactaaaaacaaaatagtcttcttttccattgatgcggtgggcctgacctgttctagtgctaatgttttatacatatttgcttgcaacttgacatatatggagtggttaataatggaaaacgaagatggaatcatgtacagaggagatcgatcgaatcgatggtgggtatatatcacaccttgttgtgcgagtgatagtcgtagagtagcgtcggcgtcaccgcctaaggactgagccctagggctaagggtgccgacgtgtcatcgaaaaccatcatcgcaagccccaggcctagcaataaggtcgtgccacacggtggggactactacgaggaggaagatgacgatagcgacttcaggtcccaactgctattggaaaacaactatacaatgttctcgtcaccgacgctactctacgactatcactcgcacaacagggtgtgatatatacccaccattgattcgatcgatctcctttatacatgattttatctttgtcttccattattaatcactcaatatatgccaagttgaaagcaaatatgtatagaacattagatttaggactggtcaggcctgtcgcatcaacgaaaaagaagatcgttttgtttcttagttagcttatggcacaactatataggtgatttattttatagaataacaatcctagtttaagtcatcatgcgtatgttataagcattagaagttagtttattattattagaaaaaacatgtacactagttgtagatcatgtcactaccatatctgattcttaatgaactactgtatactcatgcagtcatgtttgtttgtatatgcacacct

SEQ ID NO: 139892 - DNA, 895 bp, Zea Mays
attggatatggttgctatccctgattttgctgctggagaagggagaactatgggcttgttactttccgcgaagtggctttgctttttgatgaggagtcttcaatggaatccagcaaacagagtgtacctttcgttactcagactctttgttcacaactttccaccatctagctttcacttgttataaatgacaagttgctaccatatttgggaatcagataatattatttctgtaataaaaatacaggattgcattgaattcatagttagattggtcatttcaggcgatcaaataccagatgtagagaagtccttgctttaaccacctcaaatttctttgttttagattgcaattactgtagcacatgagctggctcatcagtggtttggcaatcttgtaaccatggagtggtggacccacttgtggctaaatgaaggttttgctacatgggtaatcaattttagaacctaacatttcgatgtttcagttcgtaggctgccactatatattgagtaaatagaattttcttttaacagatgagtaatctagctgtaaattctttctttccgcaatggaatatctggacacaatttcttgatgacacaaccgctggtctcaaattggattcacttgaagagtctcaccctattgaggtaaccctcctttgggatttactatgagctatggccctgtccaatagtttgaaagttaactgtttttcatacgttctgctttttcatcgctttgtatacaactaaagacattacatgcttttaagtttgaccacaatctagtggtaaatgtttactgaggtccagcagaaatatacgagttcattgtggtgcacaattgttgataattaaaataacaaggatatatatgataaactcctgt

SEQ ID NO: 139893 - DNA, 413 bp, Zea Mays
cccatgcgcctatatgggcagcaggtggctatctaacaagtttagagagtgcatgatatgcatgcgcattttcggaatctcagatgatattagattgcaaattatatattgtaggagattttaaagattatagtcttatcagtcttgttaattattattctgaacattgtattcaaaatttgccgtattacctttttaaaacaaacatgataatatcatgcatgtgcatctcatatggaaacaccaatattggaaatcttttaaaaatagtacttagatgttttaaattgttttaaaatttggcacacctataggcgagactgttataaatctatacagaatttaaagttcaaagttgatctagttatttagttaaatagataagatatgaaaattttcatgaagcactggag

SEQ ID NO: 139894 - DNA, 342 bp, Zea Mays
gtcgatcgaggggcatggaggaggagaagggagtttagggttagggttcatgggggcgcttacgagttaccagaactcatagaggaccttgacatgccacttatgggagcttacgagttaccattgtgctggcgcttgtgcactgacggcgtgacatcgaatgaaggaagcagagggtgagattcagagatggaaggagggggtactgctcaatctggggtagggattgggatggcagggtgtaccttgaagaagatgttgatgcatagacctcaacacgagttcccccatgccctccggcctccgcacgtcctccgagttgtggggggcggagcctccctg

SEQ ID NO: 139895 - DNA, 811 bp, Zea Mays
gagaattgtgcgatgtcatcagctttcctttccgtcaaattggagcgtgctttccccgatcaaaaaagcttgagctctcaccaccagctgcccactccagacaaaggggcgtgcctctttatttgatgcctactgtttgatgtgttcacagatattcctccgacactgatactggacaaggagacctctgcagtgccaaggttagtggaactacgaagtatccaaaggtgtaatcatgcaatacaaggagccactctgggtaactaaaatggccaatcaccgtacgttgcataaatttgggccagtcgtacatagaacatgcacaatggagtcgcccccccgaatggacagtcatctagatccttgagcccaactgatagacagatgagtgtttatttggatatgctggatacagggcaatcacctctgcactgaacagagaggtcttcgtagttctgttccaatccgatgatctagtgtaatcactttttgcagtcttgtggtttctaacaaaagaaacctatttatcttccccgcatgttaggctcgaatagttagccctcaaacaacacattcagttgcatttcttggtcgccagagaggcttcaggttcttagcaaaaggagagatgcagcttccaagaaaacagtgcaatacctgccaaagacatgaaaatcgctcgatcagtttggttcgggagcactcccataaagcagcaaggtggggcaacgtcttccagatgcaataaaagatacatgaattaacaacaaccaaacaggagcaatatcctcaaagaaaaggtaaattttaa

SEQ ID NO: 139896 - DNA, 285 bp, Zea Mays
gatattcccgagtcagataccgtttccaaaagcgcccagtcagcacccggcagttacttctaaaacaccggcgtgccacgttgtcacccggcagctacttctaaaaccccggtgtgccacatcgtcactcggctattatcctcaaagtggtcgacacggcccgttctaactcggttgttatttctaaaacgccaacgttatcaccagtcgctcgacatttatctctaaagcgccgacgatgtcttcagtcgcttggcggctatctctaaagcgccgacgatgtct

SEQ ID NO: 139897 - DNA, 342 bp, Zea Mays
gtcagaaacatagcagttgtttaaagacttacagaagtgggcaaagttctctcgcatctatttttcccagcaggcacaagcctcagagattctatacttgcgagtagcgaagcaaaagaatgaactagaagaaaagttgacaagaatagcagaagaaattgggagtgtcacagtaaggactggtgaacttttgcttaacaccttcaaggtgaacgtgagcaaagaattgtcctggagagaagagaggtgcccgttctgactgtatgtatcatcaaggacttgatgctgcagcgtgataaagcgctaagagaggcagaaaaactacgtgcaatgaaagtagag

SEQ ID NO: 139898 - DNA, 805 bp, Zea Mays
agcatggctacgatatgagcagtcaaccggttattattgtaagtagtatgcttatcagacttgatattccttgaactctacaccaaccaattaagatctcaactgtaacaacttgcagtttctggagatattgcgagagtttggaagagaggagcagcgggctttcacacaattcagcactggagcccctcatctcccacttggcggcctagcttcgcttgatcccaagctcactgtcgtacgcaaggtttgttagcatagcaaattatacataccactagggcacagacctattcttttgttgaatacttatctgccatgcatcttgcccgacagcaatgcgatggcaatgtagacgacgaattgccaagcgtcactacctgccggcactttatcaagctccctccttactcctcgaaggtaccaaatatgcctgatatagactttatcaagcgtcagtatctgatggcaatgtagacttgatatacctgtttgttaatctgtttttatttttgtgaagatgtaaaactaacacctatttacctttgatatctgttttgatcgcaggagataatgagaaagaagctcaaatatgccattacagagggtctaggccctttccacttatcatgataacaagactgaggtccaccagatggtggaagagtagtgtacattattgtaggaggaggtagatagcaactgattgttgtacatttttgtgaatcacgcgacagctccagatttgatgtaaacagccatttagacctctcagtattctgatttagctctctttttttaaact

SEQ ID NO: 139899 - DNA, 495 bp, Zea Mays
aggggcttctaagtctccgtgcatcagatcagtccaaatttttgttccatcatgcggatccattcatccaccaccagaggttcttctcctttaatgaagatagggggacgagtttctgagaattccatataggttgtgtctcttggagcttgattttggccttggcctctttgtggatgcatctgatttcctgccatctctcggagaaaccgggtattgtcagcagtagcgttcagcagggtagcaatgacctccgctagagttggaggtacagatggtgggagggactagggtctcgtccccactacctcgagaagttcctgccccatcatgaccatgggtccttgtcagcatctggagaagaaaacatgctttatgactatacaattcagttacacaacctttgttacattattccgagctcttacttattacacatactcagtccatacaaacccactttcgtaattaagtctaatcaaggaaacaacccac

SEQ ID NO: 139900 - DNA, 450 bp, Zea Mays
acctggacttgccgccgccagctccggcgaactgacaccgtgacacggtgcgaaatgcacaaacgatctcacaaagggaaaaaaaacatagctgtgtatacgtagatacaatacaactcgtagaagactacgtaaaaaaagtgcgtgtaaaagtgaacagtgtaatcaacttttggggcaaagaaataaaatatcgaccgctgactctctgataagattctatatttctattgcctgcgcagctgcgctcgtcacgttgtaggtggcagtggcaccgccgtggtaccctattctgtattgtccgcgaggcgcgagcgcgacctcaatttggccgttcgaaagccgctatctgattgcgtctcgctgctgccggaattaactagagcaggccgctagctcgatcatcgccgcgggctggcagctacgactacttaacaatggctcgcgcgg

SEQ ID NO: 139901 - DNA, 544 bp, Zea Mays
gagttaattaattatgaatttcacaagtttctagagttatttttgaactaaaactatttttctttattaattacttgatttaatccattcctgggttgcgtgtgcaatttaccagaagctcggggtttaattcgcaaaagctaccagacacaggctaacccccatatggacgacaggtttatttcaaataagcgcaggggctcatttgaaaagctgcagctgtgaagaggtacggttaactctcggccgtccgatcaaatatcgaaggctaggattagatcttggctcactgaaccggtatgctacgctcgtgcttggatcgcaatcctgcggtccagattttaataacccgcggcaatccaggatcgctagatcccattccaaccgcccggatcaatccatcgaagcggtatgcgttgtttctaatctcagccattcccctccgatccaacggctcttgctcatctccctcatttcgaccaccaagacagcggcgcaaggccttccccacggcggaggtcccaccgaagtcggccaagccgcc

SEQ ID NO: 139902 - DNA, 295 bp, Zea Mays
aggggttgcccgaatggggagagaacttctggcacgcttcgcacgacctcgtgactcgatttgcagcgcagattatagcgggccagtagaaaccttgacggatcatcttggcggcgagggccctaggccccgactgagagccgcaagtgccgctgtggacttcgtgcaggatctagaggccttcggtctctgtgacacatttgagcatgggttgactgatccctttcttgtatagctggccctcaataagtgtgaaatcccggcttcggtgtttgaggcgcttggcctcgttgac

SEQ ID NO: 139903 - DNA, 711 bp, Zea Mays
gcagaacgcaaacatcgccacattgttgaaataggcctcactcttttagcacatgctgccatgcccctcaaattctgggatgaggcctttaccacagccacatatcttataaacagacttcctactagggtcattgataacttgtcgtctctacaacgtttattcattgctcaagatttttggttgtgcctgctggcctcacttacatccctacaatcaccacaaattatcctttcgttctaaaccatgtgtcttcattgggtatagttcacttcataagggctataaatgtttagatatgaattcaggtcgagtctacatttctcgggacgtagtttttgatgaggctctatttcctttttctagtccttcatcccccgttgcggaatcatcccagggcagtacgagtgctatttggaacaataatcatttgcatactttgtttcctgctaacactgtggctatagaccggtatgctgtcccacctccgaccgaccttgcacaagactccggataggtgccacatgctgaggaacctgcgccagacttctcccatgacgtggtcgccaatatggtggcagctggcatggaatccatgtctggcgtccaacagcctgtactggctcaggaaatgtcatcaacagcggtggagccttcataggcaatagcggcggattcattagcatcccctgctccggaccttgcaccatc

SEQ ID NO: 139904 - DNA, 299 bp, Zea Mays
agaaaaactagtgaagagaaaatatttctggtgttttcagtctgcacttaactgccctgaacttcttcagtttactgcagaagcaaatccattcctctatttctcaaatttctccacacaaacaaagctaccctcccacatcaaatctgtttactggacattagtctttcactgttggtataaaatttccttgcatcatatgattcttagacgaccaaattattgtcattgattggtctgcaaatacatatggactgttagtattttccttccctacttgtttttaatttaggtcattg

SEQ ID NO: 139905 - DNA, 541 bp, Zea Mays
tgattctgtgagttttttgagtctgatgttctaggagttcggtggtgtggacggaggagtcttcggatgaggatttggattattttgtggcattggatgtggctgaggcggaggcttctccgcgtgtgatggatactgaagttcttcccggtccgagtgctgggcgtaggcggcgaagggcggtggcgaagcgtagaatgagtgaggtggagggtggtcgtcttcgtgtggacagggctggcaagcgggaattgttgtcctcgccagttggtgcgagtgtaggtgagggggagttgcgaagtctttttgagggtgaggagctgaggataatgttgtttaactatagggagatgggtatcatcccgaaggttgaaccaatgtaaggtgtgatgccctcgctgtacgtacgtaactataatttgtatgatgaggctgtgtgccttcggtgacccggccgtgcccgtaggggacttgtgcactaggtctagcgcgtttattatgtcggtccggctgcacctgtagtcggtctttgcacggatag

SEQ ID NO: 139906 - DNA, 387 bp, Zea Mays
tatgtgatagaccaaaccaagagatgatgccgcctagtggtggaaagacatggagaaggcctaaggtcgatttcgtcctaagcagggcccagaggaaggaagtacttgagtggatcaagatgttgatgttccctgatgggtatgcagctaacctgagtaggggtgaacttatctactctgcgagtcttagggatgaagagtcatgatttccacatatggattgaacggattcttccgacgatggtttgaggctatgttcatgagcatgtctggctagtgcttacagagttgagctatttcttccgccagctttgtgcaaaagagttatcttagaccttgattacagacttggaaagattgacacccgtgttactatataagcttgag

SEQ ID NO: 139907 - DNA, 648 bp, Zea Mays
gtgcaaggtgatctggcttacactaagtatcctatcaagatcattgatacctggactcgagttacgaggaataaagtgattaagatgtggaaagtacaatggagtcatcacggagaagataaagccatctggagcaggaggatgaactacgagtagaatttccccatcttttccctagttcatcgtaatctcgaggtcgagattatttttaaggggggtagaatttgtaatcacatgtaaagtaaatacaaataaatcctgcttatcatgctgatgtttttgttgtatgaggtccatctaaatgggaacctgaatatccaaacactacatggattcaaaactcaaaaaggaagaaatgggaaattaaaatctagaaagaaaatgttaataaactcaattaccccttcataattaaataataggaagaaaaataaataatactattgcaaacagtacaagttaaattcacatttggattatgttcgatatctgaaaatatgaagttcaaaacaagatttaaatttagtttgaatacttgaatttagaaatagaaaaaaatggaaaagaaaacaaaaaaggaaaccaaatgtattgggccgcagaactggagttcgtcccatcccccgcttcctctcgtgcgcgtgccgg

SEQ ID NO: 139908 - DNA, 337 bp, Zea Mays
tggttggagatcgcatcgctatggttgcctaggaggatgaaagggagcatgggcaccatatgtatgaggagcaccatatgggggagggaatgcagccggagcaccataagaaggagcatatggaggaggagcaccatatgatctataaggaggatcaccatattgatacccttatgggtacataggaggatacaaataagttaaaggttgtagaggaggagcgtcggtggattgggttccatcagtgctaagaggagtgttgatcgttagaagctcagtaggaggaggagcatcgacacttggtcggtacgaatatggatgaggaggatacatataa

SEQ ID NO: 139909 - DNA, 892 bp, Zea Mays
cactgacacggatgtacaccatcgtcggccgcgaaaagctcacctgttacagcacccgacgggaagtttctgtttgcgcggagaacacaggaagcggagctgagtgaacaatggatagcgagtggtagcggggtccaccacatttgccggatcacaaacgcactctataatttatcgaaggtcataccgggtgttgctgaaacgaatagattcatccgatatatttagcgtagagaatgcttcaccggcccttgttggagcccgtctaagcgatctatctcgcacgcggcgaagcaatccatcatctaccgaccatggccggaggaagcatccgcgcggccgccaaggccgcagtgatcggcggctaccgctccgcagcctaaatgcggcgtgctgtcaccccatcgtcccatatttcctccgccgacgatccgaaggcttccacgttcgcggtggacgactgggtcatcaccgtccgcgaggtgttcggccccgtgcccactcatgaggaatccatggctgccacgctcgacctcaaggacgccttcgagatgtgggtgctctttctcttttttctcatcgacgtctctcttctctgttgtttttgcaatatgttggtatctctttactctgtctttattttaaggaaaaagccagatgattcaatcaaatattaagtcagttcagtatttgttattattttttgcaatgttcgtgggcacatggagttgcaacgtgcaaattgtttgtgaattgcttaagcattatcgttagctaatagcatgctatcaacaatacgttttattttgcatctttcgattcgtagcaaagtgataagtttctcttctactacgctgcactttgttgtaaacaaaatgatctgttagttggc

SEQ ID NO: 139910 - DNA, 652 bp, Zea Mays
gccagaatcccaaactctagatccgtcagagtcatgattactttgatatgtatgaagtggagtcccatctctggattaggttggcgatgatgcatttcattggtttagccactcgctggttgtcctccttggatgacaggttcagagcgtggccatggtccttgttttgtcagtcattgttggagcgatttggtaaagatgaacatgagtcattcatccgtcaactgtttcgcatcaagcaaacaactacgatgcctgattatgtgtaacggttcacgacattggcggacaatctggtcatgtatggtcgttccgttgatgggatccatgatgatatacgtgctgctgttatagtgcaacagtcatcttctttgaactctgcctgtgcccttgccttgttgcaggaggaggtcacgacaccgacaaggcggacggaggctcgacgttcggaatcatcatggttggggaaattggttagtaaaggaccatttcctttgccaatatcgccatgcatcgacaagccattcatgcaggaggatggcggcaagaatgtcgaaccagcacggtccaatgtgtttgatgagaaattggcggccttgcgtgcctatcggcgtgctcaaggcctatgtcaacaatgtgcagagaaatggtc

SEQ ID NO: 139911 - DNA, 593 bp, Zea Mays
gtgaaaagatcgcatcatggatgagtttggactactgtggcctcgctgttccccgaccacttgcgccggcgatgtggccttacggccatcaccagagtccacgtcgttcaccgcaattgcaccacatctcaggcctttaaccacgtcgcaatagctcgggtaatcgatatcgagtgatcgccggagagctgccacggtagatgccaccaatcgtttgcaccagtgaccccctctttctccggctgccaccgtgcgagaccaaattcattggccaccgcttaaaggccctataaattgatggcccggtctgttgcaccatgttatcacaaagctagagcacccatccccaccttcaattagccaccatagacagagaatttcattcttcccccaaataatctatctgcgccaccgtgagatgtcgcgttgtgaccagccgcctctaggtctgccctcgctcttcttgtccgtgttttagcacccacacatgcttgcgatcgtcgtctgctcgacccattgagcttaacctcacttaatcaaccggaacatcttgatctgtgtatggtgttcgccatcaccgtggtcaggctaag

SEQ ID NO: 139912 - DNA, 445 bp, Zea Mays
tctctcgtactggagctgcggccatccccgccgtgcctcggcgaagtcccccggctggttctcgaggtctggacgacgacgcccaagcgattccaggcggcgacaacctctctttctctcactacctctgacctatttgcttgcttctagcgggatgctcatgggtttcatctggcgacccatcttgaggtcaatggatggcggggcctcgggttttatacccccagaccaggcggataaggatttagccagtgatcgatctccgatgattaaggatggtttaggtgcgatttggtcggagatcggcctcaggtagaagaaggccctgtcgggttgtgcccaatagcagaggcggaacggacctggaatcaggctggcgcatggcttggaagattcgcgcagtggttttgtcaatgaagccgcgcacgcaggaagcggagttcgt

SEQ ID NO: 139913 - DNA, 336 bp, Zea Mays
gggaacagggtccctggacggcgggttgattcctagattttgtagggtttcttttacaaaacgcgcaagccgaaggggtacggggacgctacggccgttggattagattggaacggccgggattaaaacaattctatctgaatcggtacgcaatcgcaaccgtccgatccccagcgaatgcacccgatttaaattcaccagattgaatcgcgttcgccagatccgaaacggacgtacaagatcaagacaccgcgaatcggtattccaccgccgatcccagacgttggctacacatctaacggctgtggcgcttcccccaattcgcgacccccgaaa

SEQ ID NO: 139914 - DNA, 355 bp, Zea Mays
catggaggtctgcaagggaccagtgttgtgctgattcagtcactgttggcttggtttagagtttttccttggatttttggagctgttttgtgtatgatccaaggggtataagactaaggtccccatggaacattgttagagggttagttggtgaacaaagttcattaaggttgatcccacgataccaattgaaatcatgggattaggtggtagtcgagatacaagttcagttcggtggtgtaagttcagttgtaggtaactgaagaattgccagttgactgaatttgtctcagtttggacaggcggctgcttgcttgcttgtttcctgtgtgctcggcgtgggtagcaaaaagag

SEQ ID NO: 139915 - DNA, 525 bp, Zea Mays
taaaatatgatttcatggcagcggtgaatgctttctacaaccttcgttgttgcaaccttcatctaataaattcggccagcatcatcctaattcctaaaaaagatggggcggaaacagtcgtggacttcaggccgataagcctaattcattcctttattaagattattaccaaaacacttgctcttcagttggctttgagaatgaatgagattaatcttgctttttcaaagcgcctttattaaatcacggagcatccatgagaactcccttgttgtgagaagcacgattaggcatttctagcgtaacaactcaccaactctattcctcaagctggatattgcaaaggcatttaactctgtgcgatgggactacttgatacccttacacgacaacttaggctttcctatgaggtggatttactggattgctacaatcctttatacttcatcctcaagagtaaccattaatggggtgcctaatcctcctatacgccatggtagaggccttaggcagagcgaccctctc

SEQ ID NO: 139916 - DNA, 837 bp, Zea Mays
aaaaccttcttgacctcgccctcccctgcgcacttgaatccaccagagtctccgtgagatcgtacacttgccgttgcctctgaccgagaagaagaagagagagaagcgagaggcgcggcggcgattgggggttcgcttccaccgccgattaacccgaaatatggacctgggggaaggaggagttggatgtgtggagggtggacatcgtgatccatcggctcggagggactcaggtcaccggaaaatccccgtcgttcgtgcgtaccgcggcggagctgcttcgctctatggtctgctccgtcgtcaactcaaccacgagtaagtactcccttccagaatttgtcgtggcctcagcatcggttagcaactagcgcggcgagaaatcatgcattgtaggccagcgggggaattccggccatggcgcgccaccgtgcggggcggcgccgccgtgcgtgttccgttgggggaagatcgtgcaccgtcggatccactgggaacggctccgattagatctaatgtacctattcgcgcttcaggttatgcaccgtccgatcgggatcgaatggtggacactcgtagctgggttcattaaatctgggccgttgatggttcatcctgcggtcctcactgcgtaccggttcgatgtaatgcagatctaatctgcgcccttcaaatctaatcagacggctcacatccaaccataccccttcgggcgccattctttctaaagagaccctagaaaatagggaaatcaacccgcagtactgcaaatagaaatctgtgtctcggtttattttgcgccaggacccctgccttcctctgtaatattgggcccag

SEQ ID NO: 139917 - DNA, 341 bp, Zea Mays
gttgaggggtgatttcttagcagcttcttatggactctggtaagcgcccagtggtagagcaccccagtgtcacgtcctctctggcaaaagatgacttactcgaggtacatacccttcttccttctgcttccagattctcaagactgcttgcctcatcttgtttcgtgtgtagccatgtgatctcaatgggtcaaaggaaagacttcgagatgtcattttttagggtgggatctcgaccctctcatcgccaacctcctctgacctctaggcgtgtttggcccctacccacgtggcgctcgagttgccgacggcgaggtggacggtctctgtgcctgcctggt

SEQ ID NO: 139918 - DNA, 344 bp, Zea Mays
gtttgatgaaccttttcgttcaatatctattttcctgttgcaacgcacaggctcacaactagttctatgggaaaaagtactcttttggtcctcttaagtgttgtgcgaatctatttttgtgtctgctgcacaaaaccaggtacaactactagttttttaactttcaaaaccgtctgattttgatccctcagacgattttgcaggcagtttcgcctaggtggcatcctatgtggcgttgtgaagaggctgacaagtgggtcctatcaatttttttaactaaatatctggtccttgttgactgatagaactattcattacaattttacttttgaacacttttgcta

SEQ ID NO: 139919 - DNA, 374 bp, Zea Mays
ctcggatgagatcaatgtagaattctacctctctttccggaggcattcctatcaattcttccaggaacacatctttgaattcttctaccacagatatacttgctgctgctaggctaaacaccattggatcttgggttggtggctgagccttacacgcaacttatgatgccattgtgcttggtcaaccaatccattcctaggatcacatcaattctgtgggatgggagtacggctaagtccgccaagaatactaccccacttaaaagaatgctgacttgggagcatttgaggtggcatagaaggtctgaccctggggttcgggtgaccaaaggggtttctaaagatgcagtgggaatgccatgcttttccacaaa

SEQ ID NO: 139920 - DNA, 1078 bp, Zea Mays
ttggaggttttagtgaagttttggaaagaaagctaagattgcccttgagcaaagatttttattggcttccattcaccccctctagtcacctagtttgacctttaggtgcatgggtcatctaaggttttttacaagatgtttcatatgggcatcgagattttcatggcacttcataacttgctagtcactacatgtgaattaacctcaactaacaatgttcttatggactgttggtggaccacaaccattttcataagatgaaaatcatttcacatggtcactttggatagtttagaacaagtttcatgaagtattgaagtgtttgtgcaaactagccaaggacaatattaagtcgagagatcctacttttctatggagcatggaacggttaaataggattgtatttggccatacctcaaagacataattggagcaatagatggttcacttgttcttgtggtagttctagtggaggaaatggtcaaccacacatgtaatcatatatatacatcttagaatgtgctagctatttgtaactcagcggtggactcaccgctcgatgacctcagcagttgctcgggctcccctctagtatgtatgtgtgtatatgtgtgtatatatatataggtccaccactgttgtgactttgacatgagatttacctttacggttattggctacctagtatttatacatgacatgtgtatcctcaatcatgcattagcaaattttcttcatttcttatgcctcctaaacgtatacgtggttctttactagttagcaatacttgtattattatttgcttcactgacttattttttagagaaatatcatctcgtggactcaggttatctaaactgaatagggtattttgcacctttcaaatgaagcaataccatataccagaattttgacatcattcatggattcccaaaagaaagtatggtgtgtttaatttattgcatttgtcccttcaaaatgtcattgaaaggtattttggagtcttgaagtagaagtgaagtattttgaacaggatgccaagtttctcgcctcatactcagaaggatatcattatggc

SEQ ID NO: 139921 - DNA, 501 bp, Zea Mays
ggaagcttcagtagaatgacatcaaaagtgttgagctcacaactgggaaggaatgttttgacttatattgatgacattattgtaaaaagtacgaagcaacaagattacatttcagatcttcagtaaagcattgctaatttccaaaaggcaggtctaaagttgaaccatgagaaatgtgtcttcggagtaaaaaaaggcaagttcctaggttgtcttgtgtcaacaaaaggaatagaagcaaacccaagcaaaatataagaaatacttcggatggagccaccaaagtcaagaaaagggtctcagaggttagcagggagactagcttctttaaacagattcttaacaagatctgttgaacaaagcttgacgttctcagtagaaaattttcaatgccccccttagcaacaagcctttgaagaattgaaggactatctaataaatctaatgacattttctccaccttcgctaggggctcctctattactctatgtatcagcttca

SEQ ID NO: 139922 - DNA, 740 bp, Zea Mays
attgggacttgtacgtggatataatcgaataatcgtgtgcttaagacttatatattgtgtagttaaaacttatgagtgaacatgtatgctcaataaccactagtttttccattgtctcctgggtcggataagttttaaccaactcgtaccagaaacaactaggtaagtatcgaagtacacataacagccgtattaagtaaacgcagttagtgtttatgaacgggtaatgaccacgacattcgtatggataagactatgtattatgcatttatattgagacttgtttgtggatgtaaatgaacaattttgtgtggttaaaactcattcagtgtgagtttttctgatttaagttatcattttccgatcaattccgagatattttgtctagatttatatgttttcggtataccagaatttaccgatcataatccgtttccgactttctcgttttctgatttcgaccgaacaaaaattatacgggtgaaatggcgagagggtttttccgactgttaccaacctttttcacccttagtacgggtcaagttgtttgcgcttattgtttaattcgagtatttcattgtatatgcattgtgctcatatttgctatgccacttgtaacacaagtggttctggaccaatatatatcaaagatcctagttcttcctccaattcgatgtctgtgcttttttcacaactctctcacctctcaactgggcttgagctatgcttggagaactggc

SEQ ID NO: 139923 - DNA, 477 bp, Zea Mays
caaatagcactggggctacccaaggcgaggtactcggtctgatgtagcctttctctaacaactcatcaatctgcttcttgagttccaccaactctggtccgtacactcgataggctctcttggatatagggtcagtgcctggtataagctctatggcgaattcaaccttcctttcaggtggcatactcggtaactcctcgggaaacacatctgggaactatgatactacattgatagcctctgatggtttaatctcctcaatatgggcggtgccttggtgacaacttcctttccttggtctagacaagatcaactccactaacacttcttctcctgataaggacactaacttcaccgttctcttatcacagctaagactggcttgatacttggttagctaattcatccctaggatgacatctatagttgtatcctggttacccataactattaaatcagtggggaattctatccccc

SEQ ID NO: 139924 - DNA, 375 bp, Zea Mays
gccatcgtgaacgggtactggatcgcagccgctggatcacccatcggcggcccagatctaaatacccccaaattcaatcctatcctaccaattcgatcggacggccagggactcatcactccccagattctatccccgccatcggacacagatcccatggcccatatttcatcttctaccccagacagctgagcgcggcggaatacattccctacagcggcgcccaaaaaccggcgaccggattgacgcccaagagccccaacaactaccccggatggcgctacacgtattcgagacaaagacgaaacgatggaagcagttcttaccaagcttggcggcgtggaattcctcggccacagagaaggcggatctgcg

SEQ ID NO: 139925 - DNA, 397 bp, Zea Mays
cgcagggaggagcgcgtggggaagaagcgcgcgccgcgatggagagctccttgacgcgcggccaggcgagcaggaagccacgtgaggaaatagagcacacgcagggagctagagcatcgccggccatgggagagagaggcagctgggcgcgcggcgagcaccagggtggaagaaaaggagcacgccgtagtgaccagccgcatcactgaatccaggaagagcgcgcacaggaaatggaggttgcagcagctccaagaagaatctagagaatgcttcaggatgacacttgggcggccggaaaaatcaagggcgcgtgggatgggagctcgagcggctggaagaagataagtaccggcgactggtaaaaaaaatcggaaggagcaagataagatcaaag

SEQ ID NO: 139926 - DNA, 720 bp, Zea Mays
tatggcgttgaaagcaaataaaactggataacttaaattgttcaatcatgatatattgcattggtgcctagttttgaatggtcagctttaccaaaaaaaagtctgctgatatggagtagtgcaacagtacaagtaaccctgaccgcggtaagcagccaagttaccactaagaaacaacgaaaatgatactccaaagaccatgcattagattttaggacaattggttgctggatccaaaggccatacaccagatttccaggaaagcacgtagtttaagtatggcgttgaaagcaaataaaactggataacataaattgttcaatcatgatatattgcattggtgcctagttttgaatggtcagctttaccaaaaaaaagtctgctgatatggagtagtgcaatagtacaagtaaccccgacggcggtaagcagccaagttaccaagcaaatgaaatatatgttgttacattgaaggcgtactataagcttgggattagggagaccttaaatctgtacatagctttaaaaggataagttaaactgcttctcccatgtgttaccggccatgcaaaaaaggataagaagatggcaagtcttgtcataccccaatgtctcaaataccaccaaccatagttaccatactactgcattatttcctaaaattgaatggtcactttacagaaggctaagcttgcttgcatgaagtagtgtcatacaagt

SEQ ID NO: 139927 - DNA, 315 bp, Zea Mays
caaagggcttgctgttgtcgggttgcgctaacaccggtgctgtggttagatgttgcctcaatgcatggaaggcatcttcgcacttctgaccccaaacaaacttggcttctttcttcaacaattcagttatgggcttcgcaattcgagagaaatccggaatgaatcttcaataataatcaactaatcccagaaaacttcgaatctaacggacagtcgttggcggcttccagttcatcacctcttgcaccttattaggatcaacaagtatgcctacctgagagatagtgtgacccaataatttgatttcctttagcc

SEQ ID NO: 139928 - DNA, 457 bp, Zea Mays
ccaggaatttaggtgggtgcagtgggagaaaaggtcatcatagtggttgtcaagggtgtggagatatctggccaagtagactatggtagggtcatcttcattaggatctctccctggcaaggcctgaagttttttcctccagggaggagtatttttgttgctaggtggaaagtagcgaagaggtgtctcagagacttccctactgtagttttggcatagctggcggagggcttttgggcagcattctagcaagtgtctgagaagcggtgtccaatggcggtgatttggaagggagggtgatttgggtagtttcggctttctcccaggtagactgccatagagaatttctcaatcccgttctcgcggtattctttccaaacgtactccggcttcttgcggatccccatgcgaagcactcaactccgaaggaggtgagggaatccttccacctccgagc

SEQ ID NO: 139929 - DNA, 713 bp, Zea Mays
caaaacatgctgctcgaaacggggtagcacattcaccacactacatcttcttttctgataataatggaagaaataagtttttttaaaattaaggtatggctcatgccacaataagccataatggctcctccgccactgtgaggtagtcagacaggagagacttcggagtgctttacactgtactcgcctctaggcgtcgcatgcctccatcaggggcatgcgccaaagggtcacagaatcataaatgtggtatccccttcgagaggttcacgctacccctaggctatggctattatcactgatatatgacttagattgacgtgtcacatcgtaattgaggttagggccgactgaccaaaatgatttgattcgagatgttcggggttgggaccggcctggtcgaggatcctagctgggcaaactctagatacgttcaacctggttagggtgacttggttagggggttagctcaggaagctaggttgggtctactatggttgggctcaacttagtcagggagctagactaggtctaatgcggttggatccgtcgtgttaggtcggagcgtgtgtgatcgaggatcggctttagttacgcgaggcctttatctccaggagtgatcttttatgtttttcttggatactttgtgtacatgtacttgtcgcttttaatgcttgagttatctactcaacaaaatctcatcaagagcttag

SEQ ID NO: 139930 - DNA, 442 bp, Zea Mays
gggattcctccccccgtcgtccgggcgtgcagcttctgccgccagggcatgcagcttctccaaagccacaagcgcagcggcgcagtcgccccgcacggtgaggaccccagctggggatgacatcttgtggaccaaatacccgtaatgggcaatggccatgaaccggtacagggttggcctgccgatgatggcgttgaaggggaggttaacctccgcgacgtcgaactggacgttccccgtgcggaagttctccttggtcccaaatgttaccaggagtgcgatgctcccaaggggatacaccggttgtgggcccactccagagaatgggcgagagggtcccagccgggaccctgggatctacagctgcttgaatgcagcatgactgatgacgttgaggccggcccctccgtcaatcagaacatggtgcatccgcatgttggcg

SEQ ID NO: 139931 - DNA, 307 bp, Zea Mays
ctcatcttttagagcaggaggatatcgatagggacgaacacacacaggtcgggctccagcgaccaagggaatagagtgatcacactgccggacaggaggtaatgaatctggcaccgtgaacaattgtgagtaggtgtcgagcagggtggctactgccggatgcaccaccgtatcctaggactgtttaaccactgcaacatgaaggaacaaatcatcaggcataccctgtccgcatccttgcaaaagcaccggagtcccatgaaactgaatgagcagccatttagctttccaatccactctcatcggg

SEQ ID NO: 139932 - DNA, 620 bp, Zea Mays
tgcctgctgattatagtgtgtctggttctgaatctgagtctttttcgtttgatgatgagtttgggagtccgttttcctagagcaaagagtcgtctggtgaagatttggattattttgttgcgttagatgcggccgcggtggagtcctcgtcgaggtcggaggttggcgaggtgtttgatctccccagtgcgaggatcgagcgacggcgacgaaaagtggtttcgaagcatagtgttggtgagatgtcgcgaagtggtaggagccgtcggatggggttggagcggacccgccttcgagtagatcagtttggtaaacaagatctaccgtcttcactgattgggacgagtattggtgaaggggaattgcggaatctttttgagggtgaggaattgaaaataatgttgttcaattatagggaggcgggcatcattccgaaggttgagtcgatgtagtatgtggtgccctcgcattgtccagcggtagtggagggcgcagctagttgtatttatttgtgcggtgggtctagtgacccttcactgagtgtatgtaactgcaacttgtattgtaatgtggcctattggccttctttgagtgagagactttgtatcgcgcacttgttg

SEQ ID NO: 139933 - DNA, 406 bp, Zea Mays
aaagcttttatgccatcatgtgctcaaaaatgacccgttcatgtcccaatcccattccataatctacgtgcccaatcccatttttacgtgcatgccttcattattacacactgttttgatgaggaaactaatccttataatcacgaccacctcctttttatgcccctgttgttttgacccagttggttatgccttccaccatgtcgtgggcccgtgtacgcgcgtcacggcgtcatccaggccgcatgtggtctcgcgcctgatcgctcaatcatccggtcggctataacggggggcgggggaataccgactcaggcttcctataccatccaaagcccagggcttccaatataggacgggggaataccgacccgggcttcctatatcatccaaagcccagggtttc

SEQ ID NO: 139934 - DNA, 536 bp, Zea Mays
gaaccaggagaagctccagcctattctgcatgtcttgcagaagttacgagatgagggccttactgctgcgggggtcgtcgccgctatccatcgctggagggtgctccctttggtagagcggcagttgcggctctcggagatgaagccgagggtcgatttggagggctcgtggatgtcctcgacctccctctccaccgacgacctcctcaagcgggtagcgggtatggtagggaggctggatgttggcgcccttagccagcccgtgatgcgtcccgaccgtgggtatgtgtccctgttaagtgtccgatcctccttctattttgcgccgagttttctacgcctttgattcttactgttgggatttttgttcgtccctaggggttgaggagttttaaactctcccttccaccggtcccggaggacgcggcggaccgaaccgcgcgtaggctcgccgcagagaaggaaaaggagaagaaggacgcggaaaaggcccgagctcgtgagaggatgcgagctcgggaagccttggagaagcg

SEQ ID NO: 139935 - DNA, 449 bp, Zea Mays
ccataacgttctggagctgcaatagtgccacggtcacgaagatgataaccctgattaaaaacaacatgagagtcatcattgttagtacaagtatcaacaacaggatcatcgtcaggactggccgtgggagtagagcgaggacgacgaatgtaagtctgagtgacatgtggtttggaagagtaagactgagatggtggggaagtggaaggtgatgtgatgggaataagaaaatctggggtagaaacagtaggtggtgatactgatgaagtttcagaaattggaggaaagctcatgaaggaggtagactttgtggaataaaaagaagaattagtggaagagttgtaaaagaagggtcgattttcattaaagctcacatctcgagaaatacgcatgtgacgagaagatgaatcataacgccgatagcctttatgttcagggctgtatccaag

SEQ ID NO: 139936 - DNA, 414 bp, Zea Mays
ggaataatcaaaagagtagttttgtttaaccgtcttttttcttgaaagaagagtcgtcgtccacctcctttggtgaagatgaagaaacatcactgtcgtagtacactataaactttatgcgcttctttttcttgatgtccttcttagtattgccgaacctggagtcgacagtctatgcttcctagccgtcgaggaggatctctttctggtccgtcacttttcccttgccttctgaatcaatctcttcgaacggtaacttaagtcgatcagtcagcaatggcgactactatttcgtgtggttgggggaagtcgccatatattgttgctgtgttcttcccgtggttgtgggggatgcgtggctcgaccttgtggtcgaggcgttcctttgcctggtcgctgaagatagcttcggcc

SEQ ID NO: 139937 - DNA, 319 bp, Zea Mays
actcccttgggccatcccatcatcgccggggaggttgccacgccgttggccacgaattcgtgtgcaccagtactttcttccacctccgaccgccgcgcgtcctcctcaaaattcgcggccaccgtcttacccttctataaattgaccccacagtgagcttcaccccatcctcacgcactcagccatcgttaattgttagcagttcctcaccagagttcgagaattcctagttctcctcaaaactggtttccgccaccgcaaagttcaccttactgtagccagccccttttccggtcagtccaaccctccctcttcctcg

SEQ ID NO: 139938 - DNA, 757 bp, Zea Mays
cgttttcccagctaggtgtggtctcgagtgctttccatacgcgtacgcacgcacgcacgcacgcatgccgtcatcgccacctaggacttgtcgaatgtacggtcgcgtagcattgctagaaacgtactgcgtactcatttcgaaccccacccccgtaaagtttgttcaaactcgcggtcagatgagccgatctgaatctgatgttgttgctattgcacgttggcccggcccggacgtactggtactgggcagagcaaccccatttgctagaggccagagctgctggacattgcaacggacaatgatgccgcagcacgtagcatgtacacgtctgctccagtcccagtgacagcacaagctcatcatcgcatagacagacagatgcctgttgtgtcagggcatgtcgatctccgcttgcatatactgtcggcaggacagagcaggcaaatcgaacgtccacgcggagcagagggtatcatgattcatgagggcagcggtgtcgtgggataaggccgagcggtttcgctcatcgggagatttaggcgccggtcactcagtacacgcagactcggaggctcaccatcaatggccgtggcaacatcatgtcgccgcccgggagcgggaggggtctcagggtctgtaattagcgcaacagcaggcagcagctgcgcggaggatacacacgcgtaggcgcttagcgcggggcagcgtgcgtgattaggggtcggccccagccggccggccggccgtggtcctt

SEQ ID NO: 139939 - DNA, 348 bp, Zea Mays
cttgtgtacatgccaccgccgaggggcttttccttgtgcttatataacacgcaaccgtggacctgagaaggcaccacgttacaccaattctcacatggtaatcagagcatctatcctagcggaaaactatggcgctcacatccttttccactgccgccgccctagccgcgttttctcccctcggcatgttcccagtcacggagaagctgaccaggaataatcaccccatgtggaagctccaagtcctctccggccttcgtggtgcggagatggaaaagttcatcgacccggtggagaagccgccggagaagttcattccccccaaggccgaggcggacaatgagaagc

SEQ ID NO: 139940 - DNA, 661 bp, Zea Mays
ctgggcagcagagtttactcagaacacccagcaatctgaactgggcactttacaatctgaaaatgcagaaatctgaactgggcagcaatctgaactgggcagcaatctgaactgggcagcagagtttactcagaacacccagcaatctgaactgggcactttacaatctgaaaatgcagaaatctgaactgggaagtttacaatctgaactgggcattactgtcaacagttgatgcttaactatggactgggcagatctctgaactgggcataacaaaaaaatgcagaaaatctgaactgggaagtttacaatctgaactgggcattactgtcaacagttgatgcttaactatggactgggcagatctctgaactgggcataacaaaaaatgcagaaatctgaactgggaagtttacaatctgaaaatgctataatttgccactgtgaacagagaacagtttatgcttacatcctagacagagaacagtttatgcttctaatgaacaaacgtgactggtccaatggtaactccttgctactgtgcgctctgttactgggtagaaaaatgcagaaatctgaactgggcgctcggttacatcctggacagagaacagtttatgcttacatataactgctctctgttactaatgaacaaatgtg

SEQ ID NO: 139941 - DNA, 988 bp, Zea Mays
gctccaggatcacattctgcaaaccggcttcaggaagtccatgaatggatgatgaggtgcgggcagtcacaaatgtcggaactatgaccgagccatggggtggctcaaggttcacgttctgcacaacacaaggatccccacatctagcttcacgaaaaccatggtaggaggacgaaccctgaacataatgatttgtgccttgatcacgaccaagggaagctccactacactgacccctgtatgctggcggagaacgggagcgcaaatgacgatgaggctctgtaggaatgatcactgaggatggagggggcgggaagctgaattttcagtgccagcagcagccttccaccaaatgttaactagatagaccagtgatctgacacccgaaccttccctgatacccagttgcagaggctcaacaacccaaagatctctagcaggaggtatgctgacagggtccagacaccaaatagagcaacagaagctgctgagatttcttagttgcaatgtatcttcatgcacactctctatccatgcaaaagggctgagcaaactctccacggtgggtacttcccaggcatgtacagggatgccatccagttcaacctctaacaactgaggaagagtgcttccagaggaattcataaggcgtgaccatcttttgcaagaaagtgagaaggaattagcatgcacaactgaccatcttccacacaattgttgcaccaatctatcagaaagcagcatcaacaggaaagaagcagagagctgcctaataaccaaggatccttcatcaacctccagacgtgatgccagggatgccgcaatatcattggcagacacaacatccaaattaccgaaaaccatgatgacaaccgccgtagcgagatcttcctccgcccgcgacatattctagttccaaccaatgatacaggggaaagaaggtggggaagagtccaccagcacaagtgaagtagaatcttggactagg

SEQ ID NO: 139942 - DNA, 298 bp, Zea Mays
catatgtatctttattcagtcccaggagtaattagattatgttacattccaccgacccaagtgctttggaaatgccattgaagtttttcatattaactttctgttaaatatattaagcacttgtttattgctgcacattacaagctctggagatgtttagtcgtgtacggaaagtaggcattacgagaggaatggaaattgttgtgtgacatgtctatttaagtttttggagtttgttgaggcaaggatactcaatcaattttagttatctattgcaaatgtaatttaaatggcactt

SEQ ID NO: 139943 - DNA, 448 bp, Zea Mays
cagaaattcagaatccaacttgcagaagagtaacacagtgtggtgtgaaagaaggatgcatgtctatgtaataacaaggcaagtaccccgtgagttatctccactcttcatgaatcaacgtatatatttccaggtgctcagactctcgaacaagggtcacgagttagcaaagctgagagtgatgcagggatcaaaagcaaccaaatggatacatgtgatgaagctaaaaggtactagaacagatgttggcggcccagtatacaggcttctagttctagcgaaggtgcaaactcacaggcagcatgtgacaaaagttcagcatctggaaggcaacgaatgcattgtaagaaaggccaagctgaaccccgcaatcggaatatttatatttcttcacaacggattaagtaaactcctttttatttatatatctgtccatacaacttcattg

SEQ ID NO: 139944 - DNA, 482 bp, Zea Mays
ctggtgggtggtgctaggcatatgctccattcctccctctgttcctactgactgactgatgctgcagagatcctactctgctcttcaccattgtgatgcactggagtaaccaaaccatggagagtataaagtcatgatgcgcgaagatcgatgatgtatctgtcttccactgaaaagtgcaattgccgctcagaagaaaaatcgggtccatgagtgatgcatgagcacacattagaagtcactatagattacagccaagggaacatgtatgacttaaatcttgccttcagcctttttggatgggagatcatcgaaaatgtttacggctttaattcttggtgatgtcaacattagctgtgcgtgacatcgatttgaaaacgtgtgcacctgagcaacaagagcagccacaccagcttttactaacttactgtttctctacggcactgtgaactcgaatcgaattacttccagttaaaagatac

SEQ ID NO: 139945 - DNA, 355 bp, Zea Mays
cggtcacatttatggtgtggttgtcatcgtgtaccgaagggaatgatactcctagtggtttagccagaagcttgatagtgaagatggtggggagcgatttaggagagtcaatcttggagtcccacttgaatgtgtggaagatccaagggccatccatgaagttacctgacttagagcttggcccttgtgtggggctccaatgaagactaggggaagcatgagctccctaaaccctcaacaaaaatattggagtcatcgataggagtttttctactctttctcatttaatattcgacactatatttagttcttacataggttgtgtgcttactttccaattttagcttgctaggct

SEQ ID NO: 139946 - DNA, 310 bp, Zea Mays
gctgcggtgaggtggatttcgcggtggcggagaactgatttggggcgaattcaaaattcgcgagctctggcgaacgattgctaacgattctcggaggctgggtagctgatgaccttgtggggctggtggaggcttcaatttatagggctcaacggcggtggctggtgaatcgggcgagacgcgcggcagccagaggaagaaggcactggcgcaagcgctaggtggcttctaccgtggcggtatctccggcgatcaccggacgctcctagcgtaactatccgcgatgtggtaaagcgcccggacacgcgac

SEQ ID NO: 139947 - DNA, 397 bp, Zea Mays
tgttctttgccacgcggcgagtgcctctcggcctcccgtgctcgtgttataaacctgtccaagacgaactccctttctccacagctagcgcagcttcacgctcttagtctgtcgcctcaccagttcactgcgtcgatcccttattcatgtcgtcatgccgtcatcgaagccggagactcttgtgtcaccaccgtactcgtgctgagcgtcgtcgcctgcgctcatcatcgtcgtcaccagttatctgcccctacgtgatgtcgacatgctctcctactccctcgcgttgccaaaggtagaaacaccattttctgatctattcctcagtctatccctttaatttcgatctagccctgcgatagtttcctattttaaatatgtactacgtaattgaaat

SEQ ID NO: 139948 - DNA, 897 bp, Zea Mays
tataaacacgcacgcgacccctaatagggtaagacgcttcacctgccctctgaatatttacatgcacatccgtcaaggaaaagttgaaggagaagaaggtggaggtcaggccacacagctagagcaacatgtgaagtctgccaattcagaggtgactttttgaggaaagagcttgagactactacgaacgagctgtcagttgagtgccttcgctcggtagggttcgcccacagcgtgcaggtacatgcgcgggatgtatttaatgactttagccaagtgtatgaggaattcggggcgaccattcgtccattggacctagagcggaaaagcatcttcgatcattgatcaatgtggctgtggacgcaggccacgatgctgcccgacgtgattcaagggttggtgatgttttctaccctcgttacgtacgagagtggattcgagtcattagtccgcgaagggtgtgaccatgttgctcgtttggcctcgtttgacttcgttgccaacgagaatttgtacatcgaggttggcgaggttgatggtgcggttgcggatgaaatgctcgatcgcacgtggagccccttcggcgctgaagttgccctcaagtgctctatggcagagcaggagcaggtaagtgcttagtgctatactttataggttgtttgcttagtcattttctgactattttcgaataggcgaggaaagcatacgaagataatgcaaaaattggggtgccagaagctgtggaggctagtcctgttacagccgagctagcacagccgcccgcagagtccgctacgcctagtgccgcggcacctgatgaaacgaaggagtagatcggttccaagaggttcattttgtttatagggtagaagagcctgatacttgtgtttttcgaac

SEQ ID NO: 139949 - DNA, 433 bp, Zea Mays
aatagtatcatgatcataacatttcaatatcatccattatttatgtataaatgttttacaatcatgtcaaattatcgtcatccgaaccatgttcttcagaatcagtatgtttatgtttttttgatgtggatgtctcattccactgcggggccattgttgaatttttgtttctagacccaggcagtcgtcctctgtttctatcagcaaggctagccaattttaccctattttcctctatagacaagcaggttcgactgttgtgtccatcagcaatgccatatttttggcactttcgagtcttcttcttttctcctttcgcacccagtttcagaactctttgttcactagattttatcgtccttccctttggccttgcattatttggacgcactaagcttatgccatctacatcatattccagtctctacatgcc

SEQ ID NO: 139950 - DNA, 439 bp, Zea Mays
ggttgcatctccttgacatcccggaacgcgttcacgaggctgtggagtttgggattcactggagtgcagcatcggccttcgtattgcgcaattacactatggtggccgccttcatgatgttgtatggctgtctaccgaaacaacatcaacggacttggaagtcctaacaagcgaatttgatgtcgtgtcgaacgctatgcttggggtcgtgtcggtgtaggaaataatatgtaatctcccataatcttgttttgtggcccgtttgttcttataacgcgtatggtccttgggtccctcaacccctgattgatcctaggattgctcttgttctgaggggcgctattcgtgcgactttctcccattcaccatagtcatgcggggcaagcccccgagcctctgctcgattgtcacacccgtttccaaagggcagagccgggtg

SEQ ID NO: 139951 - DNA, 343 bp, Zea Mays
cacaagccacgcagcagcagcgggtctctgcctgtgcggggagcgtagggcagggcctggacgcgtgtcagcaccggacccttactcaagccggggtcctccccatcccgggaccttgctaaggcctggaccttactcggagggacctggggcctacccgagggacccgacatgtctttttgggagctccggacttgtatgcactggggtacggtgtcctactgtggaggtccggacccaatgatgcatcctaggatgtattacctttccttgccacgtggtgcctttagacctgcccatgtggtggggtcgggtgccgttctccgtgtgacctggagacgtc

SEQ ID NO: 139952 - DNA, 311 bp, Zea Mays
agaggaccacaatatccatccaacgtcgggaggggatatcagggaacacagtgtgggtgagggtatggtcgtcgagcgtgtagcgttacagggtgaggaggacgaggttgcgccagtgggtgcaggaggaggaagctaggtcaaggagaacagaaaccatggactagatgttctagacaccagccgcatatgcatggaggttggcgatgatggcagtctcgtatgccgggggagtctcaaccatcggtgaagttggaggtgaatcaatatatgaaggaccactaaaccctaaaccctctgtgatcttggag

SEQ ID NO: 139953 - DNA, 588 bp, Zea Mays
tagtggctggaacggtcggccatgcccaacagaatgtttgaagtctctgcagttccgcagggtgtggcgcatgtccttgtggtacacacactaggagtcgaggatttcatccagtgtccgcactcctccgctaggtgcgctgcgagctcgagcggtaggtggcccggtggtgtgcacctccttgcagggccttttttccagcgcctgtccggctgctggttcgtatcccgccgtggtgcgggtggcgtggattttatcccaccgatgaggtcctaggcccgctcatccgtagtgatgtagatgtctgcctcccagaacaattgttcggaggtggttggcgccttttggagtatggctcgaacgaaggccgagtcgttggatccccgatagaagtcttcaattacatccgcctcaacaacttcggggatgcggttcctcattgtttgaaatcttttaaggaacgatcggagggtctcatcattctggcgcctaatggatttgatgtcccatggctacaccggcttatcgaagagagactggaagttcgcgataaaccgacgactgaagtcaccccaatcgtcgatgcag

SEQ ID NO: 139954 - DNA, 395 bp, Zea Mays
gagattttaacgggtgtggttgcggcggggatgagatcaaaggtggctctggtgtcttggttattgtggctatgaagtctatcaatttggtgttgtctgtcggtaggttctctgatccgagggaaggtagaattctcacagcttcctgattgtcagtgacaactggatcgtgggcgactgagccacctaacagcccacccagatcgggagcaggcatgatgaggtcaatagcgcgattatcgttcacaagatgtaactctgaaagcaaagtctgttggccagataaacaattgcccggccaagcagggaccggaacagcgcaggggccactctccaggacactgtctaagcaattggtatgtgggcactcaatcggatgggcagctggggcagag

SEQ ID NO: 139955 - DNA, 546 bp, Zea Mays
ttggtggggaagaaactatcccgaaaccagaaaatgatgaagtggtggtctttaagagcttcttcaaagcagggctgagatttcctctgcacgggatgattggagatgtcctggaaaattttgagatttaccttcatcagctaacccctaacgccattgttaggctcaatgtttacatctgggccctccgaagtcaaggagtagagccactcgccgaagccttctgccgagtacatgaacttcattatcagacgaaggctagggaagacagattgcatgagaacttcggctgctacaactttgcttatcgcaaagacatgaagacaccggtggtcagctatcgcactaaatggccgaccgattggaaatctgaatggttttatgttaaaattgatgagaaaaaggagaagctagtgcagagcccgctggagttaaccttcgggctgactagacctcagtgcaacatgacgccgggggcaccatgcccagatgctgtgtatgagtttagagttgtatctgaacacattggaactagggatttagttc

SEQ ID NO: 139956 - DNA, 409 bp, Zea Mays
caatgaggttagacaccctcaaacctttggtgcttgcatgcactagcgtaatccatcaacatttgtgtgttggaccgaagacaagtagggatcatatgaagtatataggtgtattactaccactcctttgtaggactgtaatcggatcgggtacgaacaaatattactcgttccatatttgttttcatttattctcttcggatttagatcggatatgcatattatcgagttatgtggataaaatgtgaatgaatatggacaacttaaacatctaactttgagtatacggatactgatatagatcggttacagattgaatactgaatactcggactcagatatagatcgaatcttggccctcttagacaaatcgaattcgaatgcggatggataaaatccataccattta

SEQ ID NO: 139957 - DNA, 822 bp, Zea Mays
gtcttaagtcgttgccgacttaagccgattgctctgttagtagggtatagtggtcaccctaagtcaagtaagcgcgagcattttacaccgtcttaagtcgtcgccgacttaagtcgattgctccgttagtagggtatagtggtcaccctaagtcaagtaagcgtgagcatgttgcaccgtcttaagtcgtcgccgacttaagttgattgctccgttagtagggtatagtggtcaccctaagtcaagtaagcgcgagtatgttgcaccatcttaagtcgtcgccgacttaagccgattgctccgttagtagagtatagtggtcaccctaagtcaagtaagcgtgagcatgttgcaccatcttaagtcgtcgccgacttaagccgattgctccgttagtagggtatagtggtcaccctaagtcaagtaggcgcgagcatgttgcaccgtcttaaatcgtcgccgacttaagttgattgctccattagtagggtatagtggtcaccctaagtcgagtaagcgtgttgattccaagtccaatcgaatggaagtcaagtgatagttaacagtttgaatgcccttgaaaatgaaaactttattgatgatgtattctcccattatagagtacaatgttgctctgatagctttcgaggtcttgctaagggtaaaactttctaagatgctctatgttccatgaattccccacttctgtaccatccatttgagtaagtcggtatgatccttgctgagtgacctccgatacaatgaatggcccttcccatagtggtgataacttgtgttgtccttcccccgttagaattcggc

SEQ ID NO: 139958 - DNA, 844 bp, Zea Mays
atttttgcaaggcctcctgactgacgccttcgttcacatcgatcacctgcagtgctctcattaccttcttcctgaatctgttctgaccatcaccaaagacagactgaaattccactccaataccagcaatgcgcctactgcggcgtggaggtgcagcagaagaattatcgttccccggtctgacaggaagaggagccggtaaaatgtgatccgtagtccttataaccatggaactgaaggaagacccaggatgaataggggtggccaagtcaggtgtctgcgaaggttcatcagccagaccaatgtccgagatacagcaaggaacagaccgaggatctgccaaggtatccaaccgatgatgttgcgtcctccggccccttctaaaataaaccttcacaggcatgcagtaccgcggttgagggggagctggtgaaaactgggacaccgcgagggaaaattccaccaaaccggaagcaggcaaatcttcagtcacaacagccggatcatcagaaataaatgacgtaataataggatcctccagtgttggatgcgggggagacataggcgccgcctgctcatcaaccgaagcaataggagaagctggcgcatcaactggtctcgcccgcacagaaaccaaagcatcatcatccattaatgctgaatccgaagagattgcaggcgcatgtcccaccagatctggtgcaataacaggcgaaccagccgccgcattaacactggcgcgcggcaaacaagacggctcttcaaggggtgggattcgaggcgggggagacacaggcgccgccggctcaagaaccgaagcagcggagagggctggcgcatcaac

SEQ ID NO: 139959 - DNA, 324 bp, Zea Mays
ccgttctcgggtgagcgaaaggaagataaggccagacggttgatatgggaatggacgattcagattaacctgagccataccggtttgctaggggcgcggttgccattggatcatgcatcaacggtataaaatggatctcggggatttaaaatccgtaccgtgagatcttgatccgacgttcggtagctgcgtaccgtttcggttttagatgagtctaatccgggccgtagattggcgatctgatggccacgacttcataccgtttcgtttaaaattgtatctaatctgggcggtccgttttcaatcggacggttgcagtaactc

SEQ ID NO: 139960 - DNA, 598 bp, Zea Mays
ctccgcctgaaatgagcctgacacgtgtaagcaataacttgccatgtcgtggactaaggactgagctcttgtgttggcccgacacgacccatgttaattacgagtcatgttggctttaaatttaaacgtgctaggccttttcattcttgggtcatgccaggatgggtggcttgaaagtatagctacagtctcagaccaatgagttgagttcgacgatttgtggaaatagaccagagagttcttaggcacgttagattggtccagtggcatgtgttagaccatatgtcgcaactgtttgggtttgagttctttctataggatcatcaaacctttaaatagtgaaatcgttggaccaatgagttgggtccgacaacctttgttaagtgaccatttgactagttcgatagtgagcatcagaccatatgctcgcaatagtaattcaaatggatagttctgacatagcaagtacacaattatcattatcactatgtctcattggaccgtgtgatatggtcctatgggtgcacatcagatggtctgacacatgaattttgcccagagttattgtatcgcctagttggctgcttgaaggctataa

SEQ ID NO: 139961 - DNA, 517 bp, Zea Mays
gattagtccataagaccttgacatacttaattgatctcttcctcaatacacgctccgagaattccaatatacgcaccggacgacactctaaagtcagatcctgctgcaccgcaattggttccatctcaatctgatggtccggatctcgcaagaacttcttcaacatagagacatgaaaaactgggtgtacccctgccatggaatccggcagtagcaagcgataagccaggctgcccactcgggccaagatagtgaacggtccaatgtatctcgggctgagctttccagagacaccgaaccgaacaactcctttagtaggtgataccctaagaaggacttggtcacccacaacaaattccagatcccgcctcctcacatcagcataactcttctgatggctctgagttgccaaaatattctgatgaatttcgcgaaccttttcagaagtctgctgaacccaatcaggaccaaccagggatctctctcccaaagtctcccagcacagaggggagataca

SEQ ID NO: 139962 - DNA, 417 bp, Zea Mays
gcagaggctatttgttgcgcccgcacggcgcacgcacaggaatcgtaggccgcactgttttgtcggcctccgagttttccagctgtggtgatgtagacgagctcacgagtctgctgctagtggggtccggtgccgttggtcgccctcatactgtgtggaccgtggtcgtctgtgttggctacagaacataaaaagatgggagagatttgtgtcacagatcaatgagatgcacgtctgccggtcaatgagatgccggtggcaacttgaatgctacgtctgacggatcataactgcacatagaacgtactatagaagcaccagaagacgttgccactgcaactgcaaccttaccctgccagcattggacttttcgtgacgagtatggtgtccgatccgaccgtgtcttggtttcctgtc

SEQ ID NO: 139963 - DNA, 488 bp, Zea Mays
ttccgctctacgcctccagtttcttaccataatcatttataccttgacacgtcgttaagatttaggttgtaacatagccaactttctgttttttccatgatgtttctggagaccagagagagatgttcagcgcatcaacttataccatactctgataattgaccattgtatatggaacgggggaaatagcagtagcaaaatttcacctgtagggaccaaataatgtggctttgtctctaggacaacatcatgttcaatgctggctgtaggacactgagaatttgcaggtttatcattagcaaaacattgcgaatatacctatttgacatctgcaagtacatctatgttgtacatccgtacaggcttatttgttctcctgccactcaaagatgcaaaatggtcagtattgctggacatcgaatgctgacaagcatctctgtgtttaaacatacacctctttgtttccctggacagctctttttatttct

SEQ ID NO: 139964 - DNA, 284 bp, Zea Mays
aaagcttagtattatctactacttactatggtgcaaacgccgatagcatagtggttgagcacgctagtgtggagctccccatcgcctgagaagcatccatctttgactctgtcttaataaagcaaaaacaagtgttcaaagcagttgagcccagtggcatcaaagtcgaccaaaactatatgtagtattgataaagaagagatttagctaactactttgtttgacacccactcctagtaccttgtgaggtgaataagttaaatggtaacatcctacaattgaac

SEQ ID NO: 139965 - DNA, 1047 bp, Zea Mays
gggaaccatcaagcttaatcacaactcgatgaagagaaatcccaaagatgtcagcacaacaaggtcaccatacgtggccctggcatccacacccacgtaagggcaagttacagcaaggcaaaccgtaggagcagtaatattttaatagaggtgcataccactggttaaggcagcagttagaatatactttagaactttctggtttcagatatttggagtacaaagtttacccttacctcctcaccgatgctcacacctatccacaactccactggccaaaaacaaccactaacaacagtaccaaaatatcttgttcagagttgcagattaacactgaatttcactgattccacgccctactgtccacctgaacccatcctgttcatgcccctttatttcgtcatttcatatggcaacagaccaatgcttcttaacaaaagtcatacattaatgtatgatctataactccatggatttaacactgaatcagattttacggcacaacacagactgacagcacacatttaaagacattttactcccatctttatgtagcatcagaccaaatccacttgtgattgtggataggctcaaagagatccagagtaaatattttcagttggaagtgaggcctctaggcctttttcattgtactccatccatatctccaactatacacacaagtgcaaccacagcagggagattctccttcagttaccaaaccagacactgaatccaacttcatcagtcctgctgttccatcccactcttctcggtttagtcactagtatctcacaattcccttcaacgacaagcccacatttcttaaccaaaattactctacaattatagctatccctatttggtataacactccatggatgaagatacccagaacaatatttatgaagcaccaaagtggagcaaaatcactgaaaattcagtttcagaagtctgaacagcaccacagagtctgacagagggttttgccacccctttttctctaaatcatacacagtagcaagccaactctctgcattaaacatg

SEQ ID NO: 139966 - DNA, 740 bp, Zea Mays
ctaaattatgtgggtcagcgagcatcgtagacacataagaatacttaaacggggaagcagaagacatggactgacctggatcgcgctggccgcggtgaggtgctctttgcggtggcggaaaccgatttggggagaacccaaaattcgtgagctttggtgaatgattgagggtgggattgggggctctggtttcgtgatgatgtagcgcagctgcctcggccttcaatttatagagggcttaggcggtggcgcgtaattcggccgagcaattctggcggccggagaaagagaagagcactggcgcagtggattggtgtcctgcatcgtggcaattgctccggcgatcaacggggagcaagagtgagtcacggtgatgcggtagacaggctagagacacgcggcggacaacgacgacggcttaatggcggtgagagtccttatccgagggcggtgagcaaggggagaggtaccgcggctagctggagtggcttccagctcaccggcggcgatgatcttttaccctgcaacgctatccatcaactccaggcacgaatccagttgccggtgacacgaatcgcggcgaagaatcggtcgtcggcggtgaggatcactgaaactgatccaggcggttactgtaccatgggatactccttcagtgcacctgataatcaatctttgggctggattttctcccatatctttatggcaaatcataccaagttctgcagcaaagttgtttc

SEQ ID NO: 139967 - DNA, 553 bp, Zea Mays
taagcccatataaggactctaggtagcttagtcattactaactatgggggtccatgcatcatcattttattctgtcaattttatgttgctagtataaaatgtcttcttattattgacaaggtaagaaacgtcagtgtaggaccatgcagaccgggactagtcgactgccctcatgtgtggccaaccatacatgttgtataaggaccggtagaattactttcagcaatacatgaaaaatagttgataggttgttcttacctttcaaataaaattgtgcatcatgtgattgggctggagtggaattttctgtggttacactaactgcgaaacatgtagttcgcttagttgcacatctatgagtgaacgtgtatgccaccgcttatgacgttagcatgaataggatgtgaggtcgtaagttacacgcatgcatcatgacattaaacatcattatgatcattcattgcatcatatccccttaaaatgtggataaaaaatatttgctaatttgagtcattaacatcttttcccaaattctcacgagggtataacattg

SEQ ID NO: 139968 - DNA, 329 bp, Zea Mays
ccggggacgtgcgcagcagccgcgcatattttactgcttgttccacggcgaagactgcgcgcaccctacaagagactgcccagagacgaaggccaccagagacaggatggcacgggcgcagccagccgacaatcctagagttgtcgcacacacatatcagcaaccccccaaccatacaaccacggccccgctccgcatccaccgcaccacgcataccaacaccaccaggaggtacaaatcgtacctcccccacacccacctccacaccagcaacagcaaaacatccacctcccccatgccccaaagcaagaagacttcgccgatcagcc

SEQ ID NO: 139969 - DNA, 568 bp, Zea Mays
gtgctcaaatccctccacttcagattgaattccattgaattccatgattcgaacaacaaagcctgcaatgcattgttctcttgtctctcgctttttgagtttgaaagagttagacatttggatatggctcatgatatttggactaccctagagaaattttatgaggataccgaccacgtgaaaaccagactctttgaaacctactgtcgagagtatgagaactttgtgcagttgactggagagaccttcaacaccatgttttctcggttccatgcgattgtcaacaagatgcccacgaacaaggcccaattgccctatgacaataacgagagagcactcaagatacaacatgctctagatcagagggtttgggagatgaaggtctcggtgatcattgagtcccccaaatatgagaccctcaccgtggatgagctctttagaagctcaaatccactaagattgaccaccacacttgggccaagattaagaaccctcgtgcacccaccatggcccttgtctctagaggtgggtcttcctctaacccttcacctgctctatttgttttgtc

SEQ ID NO: 139970 - DNA, 592 bp, Zea Mays
tgggcatagtgatcaccctcaattaagtaagcgtgagcatgtcgcaccgacttaagccgtcttcgacttaagccaattgctctattagcacggtatagtggtcaccctaagtcaagtaagcgtgagcatgtcgcaccgacttaagccgattgctccgttagtagggcatagtggtcaccctaagtcaagtaagtgtgagcatgtcgcaccgacttaagccgattgctccgttagcagggtatagtggtcaccctaagtcaagtaagcgtgagcatgtcgcaccgacttaacccgtctctgacttaagttgattgctccgttagcagggtatagtggtcaacctaagtcaagtcatgccgatttcaagtcaagcccaatcgaagtcagttgtaagtcaagagtctgaatgcctttggaaaatgaaagctttattgatgatgaaatcttcgggttatagagtacaatattccttaaagagttttttgaggcattgttaagggtaaaactttctgagctgttctatgttccacgagttccccacttctgtgtcgtccatctgagtaagccgatatgatcccgaccgcgtgacctc

SEQ ID NO: 139971 - DNA, 506 bp, Zea Mays
aaagcacctaggccgaagaggcaaagaattgttactgtgacagaagtcattgaaacaacaccaccaagggtttcagctccgaaggtgccggctattgaaagcacgacagctactgaagctgtaccttcggaggccgccgcagaagaggccagagccgaagatgccaaatccgaagatattaatttagagagcatagctgctgatatagacaaaatgctactaaacatggccacggaagaagctgtcgtagccaccgaagagactacggccgcaaaacccgagaaggaagagatgaccgaaaatacttcggaggatgaagcttttgactttcaaaacttagttggccaagagctgacaaaagctgagaaagaggaattaaaagaatatgctatatcctgcgggtatcggccgggagcgcttctcttcggtggcattgatgacgaagggttaggctgcatacgagatcagactggcgcgaaggttatcggtactctatcaaagagtat

SEQ ID NO: 139972 - DNA, 569 bp, Zea Mays
taatgacagcatgtgtaattcttctgtaggtttggatgcgggtgactcctcttcgtcaggaagttgaaggaattgccaaatctcatcgaccacgggaataagctaagccacacttataacagaggccttttgctttcctgtaggcataaagggcagcaagcttgtcatccatagcaggaggcttggacactgtcatagctggtcggtcatcagtgtgagcagctttactgaatgttcgactggatcccttaaaatcccgctgcttggtcgcctcagccacctcttcctacaattgagcgagcacataggcagtatcaaggtctcgtgggtgttgaatcaaaacaatagatttaatatcactcctcaagccatcaatgaatttggttgtgtaatatagcgggtctgatggcagattgtatgcattcagttgatctaccaattgagaaaagtgctctacatactcaatgacagaggagtgttgtctaatgtgtaagagctgtctaagtaggtactcatattggtttttgccaaaatgctcactgatcaacccaccaaattcagaccatgtg

SEQ ID NO: 139973 - DNA, 1171 bp, Zea Mays
gctatctctcgtcttgacctccgtaatccattctccttgtcctgatctatgcgaaggattcagatgttgtgatttgtgtttggagttagtgggttggatggtgaaggctccggcttcagcttgtgaaacttatgatgcatcgacctggaatatccgaaagaattggtctctgaagtaatatgcacaaatgtcatagaactagagagggaattgtgcatgatcaagggtgaccactagagaaggatgcattgtccagtttccccctcccatctgacctaccattttttggaagttttacttgtctgcccaaaccaatttccttattacttcctggtgcaatggaagatttgaaagtgattcaggcacttttgggaacacttgtcattgatatatatattcttgatgattgtaatgtccaaaccaacataatttctggtctgcccaatgcatagcgagctacaatttccaagcttgtctcacaagagaaaatgggcctactttgtactcccttctatcagtgcaaactattggaatggcgaatgaggtgccaccatgccagcatgtttttcctgccatttagggcgtgtttggatcttttgctagtgtagcttaggcaggttgttggcaagcttttcccaacctagctgagcaaggcatggcaagtaacgttctcatgtttggttcctaacccttttcacatctctttccctttgcttcaacctcccaccaaattaaatcccaaattaaatggagcaccaaaacggaccatgggtatgtgagcatgggaatgatgacaagcatggccagcagcatgcctccactatctgcgtggcctcaactttcccatgtgcttcttcactgattctcatgcatccctccaaagactgattctgacacacataatggtagcagggcagagaccttctccagtctctacgatttgtttacctgatcattgttttgcatttcaatctgggctacatggcttcgctttttgctcctttttgtgtaacagttcatttttgtgtgtttcaatctgggttacatggcttcactttttttttgcttctcttgtgtaacagttcaattttgttgcttcggtatttcgagagatggctgagcttcaccgctgcgagatcatgctggagcatatgaagtgtggcactcgtgc

SEQ ID NO: 139974 - DNA, 413 bp, Zea Mays
tagatggctcacccagcgcacagcgtggtcagagacgataggcacgcgatagagagcggcctggcagagctctggcgtgatgacaaggcacgacgggggcgactccgagcgtggacacaactatgacggggcactgtgaggggtttgaaagggttgggtgcagtcggttgggcgggggagagcgatgtgcgtgcaaactaagcgaaggaggtagttggaagaaggggggttgggctgacatgcggggcccgtggcgtggtgacctaggaggttgatgggttgggcctgcggtgcagcagcagaggcgtggtgcgagtgcacgaggggatgtggccaagtaggcttgggtggcggggaagcagggccgggtagaattgctgggccgagagggagagtgggggtgcacgaccgag

SEQ ID NO: 139975 - DNA, 416 bp, Zea Mays
aacctgggcggacagcttcctgcagtcacgtttcctctcccttctttttgtctctcttgcttgtggaccccacacgtcaaggctattttcttctccatcgttgcttccagttccagaccacacgaacgcgccgccgctcgcatggactcgtcacgcaccacgctggctcatccctgcgtctcctcgactgctcgccttacgtggagcgccttcggctaccgtttctcctcttctctccccactcacgtcctcattcaagcgaccgttcctctgcagtaacaccgccaccgcgccattaatggccaatgaagctctaccggcgtccgttacaccttcccacacctctacaaaactcgaccgtgcccccatagagccagtccccatccgtcctaagcccactccgagctccccagccg

SEQ ID NO: 139976 - DNA, 478 bp, Zea Mays
gccgtgttccgccgcgtgcggctaggagggcccgagccggacgtcgcgtactacaccaccatcaccatcgctgggcacgtgttcaggggagtcctgtatgacgtcggcccccacagtggcagtggcagcacggctgcctcggatacggacgggagcggtgaagaagtagggtcgtcgctcaccacggccggcggcagctgcctggatctaacgctgggaatgtgaggcacgcaaaaagccacgccattttgtcatgctagctactaggctactaccatccgctttgcatgctcaatcactatcttgctttccatcgattgatggtacaacctgagagctgagataggattaggctgtttgttccctgaccgtttgtggagaacactctgcattgacggttccactgtcatcttactagtagtttttctgatttccgcctgtaagaaagtccgaatcgagatcttattcactggcgaca

SEQ ID NO: 139977 - DNA, 372 bp, Zea Mays
agagaggagagagttcttgttgttcttctaccttgatttcaaattgtttgtgttgcttgagctggtttggttgaggtatgtgagtagaggtggagtgcaagggggcaaagaaggggatatgacccctaaccatatcctgttgttagagatcgcagtaggtaattgttggagggacaaagagtagaataatcaaagtgttcctcaaactaactgtcactgtaaagtctgacagtgctagagtaatgtccagcggtgctcgagcacggtagtgccgcacgcctgcccgatagtgttgcgtaggccataagaactcaattgaattttgattttagcacattgtttgagtttgagcattgatagacattaaagtac

SEQ ID NO: 139978 - DNA, 305 bp, Zea Mays
tgtcattgagcatagtttacacatcaatcccttgatacgcctcaagaaacaaagacttctcaagatgtcggacaagaaaacagaggcggccaaggccgaggtccagtggctcttggacacaaaaattatcgaactaatcgactaccccacctggttggcaaatgttgtctggtgaaaaacaagaacgacagatggcgcaagtatatagactttaccagtctaaacaaggtctaccctgaagatgagttccccctccctcgtatagacaaaatcatcgattgtgcagcaggctgcgaggtaatgtc

SEQ ID NO: 139979 - DNA, 863 bp, Zea Mays
cccgcctccatccatgatccatccatggcgctagccacagggggcaccttcttcctccccacgatgcctccccctgttcctctctattttgggttccgtccaacaccccctccacccactccatcgtcgaaacgagcacctccccgagtaggcgccctgcttcccctcccaccacacacacacatggcgctcggtctcgccctggcgtctagctcttgcaggggctctccaagggccgcacgcagtgccacaacccccatgtcaccgggtgtcagtccctcaggtcgccggagctctgcttgaccaccctcttccacaccttgggaactgagctcgctgtcatctaggccatgttcgtgcccccttcgataacctccagcagatcgtggcactgaccttcgttctaggagccgttggccacctccaggttgccggtaagctcgcccttagccaatgtgccgtggcctccccagggtcagggtctgtggcagcaagttgtgcgctacatgttcggtgatatgagtggtagccgcacgtcacggtttccttgcagtagcaaacagtccctgtagcatgccatcgacgtccgccaggtgttcgacggaatgcccaagcgtcgtccttctccttgcgtcacatcgtcgcatagtcgttgttgctcgtgttgtttgtcctcgctgcgcattgttcaccgtgacacgcgtcatgtgctcggtggaatgaatgtgtcgcggtagcatcctcctcacgccatgcatcgtcactgcgcgtcatccccctcggcgctcagccttgcgctctttgatttccttgcatcgagtcgacaagcatagctccctcctgtcgtcatccccacgacccat

SEQ ID NO: 139980 - DNA, 469 bp, Zea Mays
gttcgatcgggtgggttgatgagcatcacgaatgcatacaggtgctgaaacagaaccgcagagagcatgatcaaacctggaagtggctggccacggcgagggtgcttttacggcggcggaaaactgatttgggggaaaacggcgattctccggctaggggggctaatcggggacaggagtggtggctatggcttcgcaatttggagacgaaggtcggagcttggttgatttgagcgaagggagtgaggatgtggtgaatttatagccgcggtaagtcactgccgcggccatggtgataaccatcgccggccttagctggcgatcaacggcggcgtcgagcgatagccattctcacgggcttgccacgtccccgccgcgacagtaacgcagtcacatcagtgcggcgtggatgaacggaggggagcggcaccgatgaccggatatggccggaatgagaagtggtcgcgtg

SEQ ID NO: 139981 - DNA, 282 bp, Zea Mays
ttcttagccaaaacgcaggttcagcaattatttacacacttaagtaaaaaatgtgcatagctaatctgaaatctttgttatcatgtgattttagtttaataaagaaaaagatatgaactattttgctgaaagggtccacaggttcagttcaagacaaagcagcatttacaagtcacaccacctgaacagatggggaatgatggaacttctctggaaagacaactttagaggccatcgtatgatggaacttctccggaaagcaagcaaaatgcggacgaaaaa

SEQ ID NO: 139982 - DNA, 348 bp, Zea Mays
ctggagacctcccttgaacagctggacctgctactcttctgcgaggggaccggcacgtgggaggagcgcatggaaccggtcctgatattcggtgaccgtgcccgtgtgccggcattccgccaattcggccagcggggcggatcggagcggcggcccatagcgcaggtgtagcagttccttgaaacggcgccaggacggagttccctcgttcgcctggacttggatgaactacatctgcgcgccctcctccaaattgtagctcgccatccacacctcctcctccataatccgttgttgataaaagtacgactcacaacgacttatgaagaggaggggtcagacttgccg

SEQ ID NO: 139983 - DNA, 432 bp, Zea Mays
gcagagactaaatcgggtgatggatgccctaggcttcgagtaccctgactatgaaaggcttgacgaagaagccgggggatagaagagaaaaagggttgtgagtcgagcagtcccagtctttgtttatctggcttatgatcactagcgagtcaccatataccatcagtttcttgatgtcgagtgatacgacgatgcttagcccgtgaatcagtgcttcatactctgccgcattatttgacgatggaaatagtagctggagtgcgtacttgagttgctcacctccaggagtaataaagagaatccttgcacccactcctagcagcttcaacgagccatcaaagtacattctccacacctcagtaacttctaggctgtccaggacctggtgctcagtccactctgatacgaagtcaaccagcgcctaagtctttg

SEQ ID NO: 139984 - DNA, 393 bp, Zea Mays
attttctcacctcacatcgattcatcatgggagtgatgagcatgtccttttatggaatgttttagatacattaagaatcaatgctttcatttagcaatttctaaatgagatttgactatttaacaacccacattctagcattaaagagaagtttgagaactatgagtttcatatcattaaccaattgttgtaaaagctcgttaaagacgaagctcgtttgaaagtctcatgatgttcacttgtcacattgtccaaatatgcatgtcatagaaagcaatttggatagctcggacggtgaaggtaaataatgttgtgttgctaattttattttagactgcacaaacaaatcaattaatggtccttctcttaagccgattcataagaataggcaag

SEQ ID NO: 139985 - DNA, 542 bp, Zea Mays
tgaagtactaacagtttgttactgagagattagcaagttctcatgcagaaattggagttatgggtcctgcaagttggtcggacagaggctctgaattggagttctcatggtacagtgaactgaagaagatcttcagatacatcgcctcttgccactggtgaccatcgcgccgtggttcgcatcgtcactatgattcgtgccctctggtatggagataatcacggtcgcgtaaagatcttggtgccagataaactcagacccgatcgacgaggagttcgccgcacccacttggattgcggtcggccgaattggtcctcgccggcgctggccgcttaccaaccatgcgccacgtgcccgagcgtcttaccatgtcgcagtaggtcgcgttaagcatacccggtgatcgtcggtgagtccgccatggtgaaagccactaatcgtttgcgccagtgcccctcctcctctccgaccaccgcacgtctccatcaaattcaccggtcaccactcaagcactctataaattgcaggcaccctcggctccg

SEQ ID NO: 139986 - DNA, 395 bp, Zea Mays
cgccaacctgccccaagaggaggaagagggggacaaagcttcaaaggaagattcaactcccagccaaggaagttattcttgctcttctatggagagtacaagggccataccacaaggacatgtaaagtaacaatcctaaagcaaaaggaaattgccgaagcataataaaacaaaccaaggaaagttctctacacatcctcaactactcctcgtacattctagagcatgtccaccatcaatagccaagcccacaaccttcagtatccattgcttcgacaagcccatctccaactcactggatcatgccccaacctttcataatagcaccttcgccatatgagcaacatcttgtaggtccatcacagatccaacaagaatattctacaaaaatatgc

SEQ ID NO: 139987 - DNA, 950 bp, Zea Mays
tgaagatcctagaccccgtggagtcatcacaatttttgaagatcgacaggtggcccacatcatagaatgggactttgtccctaggaaacaaaatcttcattgcttgggcgccagtacatagacacataacctagagccgccagccaagattgacaagcaccagaaccccacctaaaatgacgaggggaccaagaaagtacccctcaatactgctttcccaaccatgcagtattgaatggagaaggcctagctccgcaggaagcagccagcttgctcgactgcctgcgtgggaacaaagacgtcttcgcctagtcgtcatatgacctggtgagagttagccaaagtatcattgaacacatactgtctatcaactcctccgctcaccccaggaaagagtgactctacaagatgttagatgagaagaaagaggtagccaaggccaaagtccagcggctcttggatgcaaaatttattgaaccaatcgactaccccacttggcttaaaatgtcgttatggtaaaaaagaaaaatggaaaatggcgcatctgcatcaacttcaccgacctaaacaaagcatgccctaaggacgagtcccccctccctcgcatcgacaaagttgtcgattctacaacaggctatgaggtcatgtccctgcttgattgtttctctagttaccaccaaatatatctcagcaaagaggacaaggtgaatgccagtttcatcacacccttcaacacctactgtttcatgaggatgcccgatgggcacaagaatgttaggtccacattctcctgcctcacttaatccatacttaaagactaggttggtcgaaatatattcacctacgtcgacgacatcctcgttgtgagcaaaaacaatgtagaccacctagcagatctggcggagacttttgctaacatgagagagaccagacttgggctaaatccaaac

SEQ ID NO: 139988 - DNA, 1137 bp, Zea Mays
gcgcgcccgcgcgctcaggcgtatttgcggaaaaaacctcagggtttgcactaactggaatccggtttctttactgttgcccagggtcacagacaacttatggacaggtccctctactttcttttcttccccacgagtacccctggccatggcgtgcacacagatcaaccctggtgcaacccgtactggtcatggcgggtgttgaatactacggctagcgatcgggaaggcattagcgactaacagggacctcggaacacccaacaatttggcacgaacaccctgagaacggcttgtccatgtgcacggcggaaaccgtgagcatgggcaaacgttcccgctcatccggggccggattgagtagtcgggcgtcacggtgagcatcacaagcttatggagttgcagaaacaacactcaatttaagcagagccttaccagagcggttcggccacggtggggtgggttttacggtggcggagatcgatttgggggaaacttcgaattcgcggatctcagcgaacggtcggggctaattcgaggtggctggttagcttactaccccacggagctcggggcggtgtcaatttatagacgtagcaagcggcggtggcgaattcgaccgagcagtgctggcggccggaggagagacgagctttgtgcgtggaataagtggctttcaccgtggcaggttctccggtgatcaccggacatgcaccacatgattcaccgtgacgagatccagcactaaggcacgtggtgcgcgatggtgacagcacgacggcggtgagaaccctatccgaaagatcagtgcgcaggggaggggcacggcggctagccggagtggagtccagctcaccgacggcgatgcactttcaccccgcgacgttatctacttgccacccgcacgaatccaaacaccagcgacacgaatcatggcggaggtatcgtcggcggtgagagttccgcgctggcagcctgatccaatccaggctactgtaccattgcgagtttcagtcagatgaacctgacagccaatgttgaactcgaatttcctccaaatttactgtggtgactgatttaagtctctatactaaagttatagacctatagttcatcttcaactttgccacggagctc

SEQ ID NO: 139989 - DNA, 879 bp, Zea Mays
gttagaataggtagaaattgttttggcttaagtagaggggtgatggcatgccaaggtagccgttgcttcctctataattataagtcgagtcaaaatgcggggtactagtggtacgctagacgggtggtgtccaaataaattaactggtcgatatggtagtcgtcgtgcgtgatttatggttagtgagtagttgaattacgagttatgcgagaatcatgttagaaactaatgtgcggcgtgtaactgtgctcgggtggtaaaccctaggtcggtaggtattattggtgtcgttggcaaatggggatgattcttgttgtgcgataaaattggaaaggcaaagaacaggggtagtgtgtcgatcaagttaaccgataggttccgtgaacacgcttgtgatgcttttatatgcatgataagatcgatgccttgtcgtcgtagtcttagaaaatttttctgaaacgcgctagcgctctactgatgggttgaatgaacttgggatgtattacactagttgtatgtctcgcaggttatgcaaaaatggcgaaaggtggtgtaggttgataattgggaaatagtcacgtcattagccaactcatgttaagtaggagtcgatggcgtaagtgattgtgatataaatagatgtggtgtctcggactgcgataataataggcaagccgacgtgtacgctgtcgagcggaccgtgtcgttgctctagttagccaaattgttcgatggcttaggttaagctcgtagttacgatgaattacttattgtagtctaaatgtgtatggttatgatcgcgggtaaaaattagtagtgctcaagtgatgtctaagttaaaatacaaactagtgtataaagggcgcgtcgatacacgca

SEQ ID NO: 139990 - DNA, 506 bp, Zea Mays
ccagccgtacgtggacgaggccttcgcaggcagactctggtcgggacggccgcagtcagcaacaggtacacaacatcgccaaccagcaccccgctggtgaggcccctcgctgacaagagtatccccccagggccgcggaaacgaaactagtggtcggggccggggacgtgcgcagcagccgcgcagattttactgcttgttctatggcgaagactgcgcgcaccctacaagagactgcccagagacgaaggccaccagagacaggatggcacgggcgcaaccagccgacaaccttagagttgtcgcgcacacatatcaacaactcccccaaccatacaaccacggccccgctcagcatccacctaaccacgcataccaacaccaccaggaggtataaatcgtacctcccccactaccacctccacacccacaatagcaaaacatccaccacccacaagccccaaaacaagaagacttcgccgatcagccgtatcgcggagtcattc

SEQ ID NO: 139991 - DNA, 560 bp, Zea Mays
cacagcatctagcacgctggccatcctcctcctcttgggagttgcggtaggagccttttgcaccttcggcagttttgtctctgctggagggctcatagtttctggcattttcattatttcttccacctttggctcttcggccttaacatccttagcttcaactagctcgactgtaggcatcttcgacactacagttggctcttcaacgctctgcacaattggagcagcttgtcttgcttcggcagttgaagaggccccttcgccaagttcaggcactacggccggttcaatgtatcatggctggtgggtcagaaccttcacctttttgcccttcggcacaactgtggtggccgaagcggcagtcttcctcttttttccttgccctcgtagcgggtagcgataatcagggtatacgaagccaatcgcgtcaaataccatgttcaatattttcttcccccggccccagaaggctgcggacagggcatcatcttcagccctggaatatgtcccaagcagctcatcgctggtagcttcaatacatttcaaccagtcatcatctg

SEQ ID NO: 139992 - DNA, 569 bp, Zea Mays
ctggtgagggcaagacatagcattgatgtgtggaaactgaaaatgaaacgactgagacaaatgcttaaagggtggaatattaatgttgtaggccactacaagaagttgaaaaaaaaccttatttcaaaaattgacatccttgacaaagccagtgaaatctcaggtttatcagaggtagatagattggagaaacttgacttggaatcgaacctcagaaaaatagttgatgaggaaatattagcctcaagcagaaggctcgggataagttcatgttggatggtgatgagaattcaaaatactttcatttgctagccaagcataaaaaaaggaaactcaaaatcttgactctttcacatggtgatagtatggctcaagatgaaaatggaattaaccagcttgcgacctccttttataaaaacctctttggcccttctcaggattcaagtatttcgttggataatttgtacatgaagtggcttgatgatgatgaaagagaactccttacaagtcctttttctatggaggagatcaaagatgtggtgttttctctgaaacacaatagtgctcct

SEQ ID NO: 139993 - DNA, 371 bp, Zea Mays
cggaagagtcttcagatgagggcttggattactttgcggccttggatgtggctgaggcggaggcttctccgcgtgttacggatgctgaagttttgcctggtccaagtgttgggcgtaggcggcgaagggcggtggcgaagcgtagagtgagtgaattggatggtggtcggcttcgtgtgggcaggactggcaggcaggaattgttgtcctcactggttggggcgagtataggtgagggggagttgcatagtctttttgagggtgaggagctgaggataatgctgtttaactatagggagatggggatcattccgaaggttgaaccaatgtaaggtatgataccctcgttgtacgcgtgtaactatagtttg

SEQ ID NO: 139994 - DNA, 2194 bp, Zea Mays
tgccggagagcgaggacgactgaaatcacatagaggtaatactctttgtagctttatttgtatgtctgtttatgtatgaaatatattattatgttgagaactaattagatagccttatagtaccgaagagcgcatgctttgttttatttgaacattacagtgacaacatccagtataatggttgcctttcatacttgtagtgtaactgctaaactgttctgtaatgaattataaaacatggatttaaataaactaggtggagcaaaggcttccttttcattggatttaatccatgttgacattttgtcaataaaaagtgaaaaggatgaaccaattgttaacaataccttccgaaataatgtcgataagtatctgattgttgtttacagaacagactagcttattcccttctttagatgccatcattgtctcatgctcaactataccagtctgaccttccttcacagtttgttgaattcgtgttttcttaaaatgttgttgacacatcgctatgtccccatcactggtataagaggagtactggtcagtctgacagcatgatttttttgtatctttgcaataatagctacaagattatatgaatttcgcctcatgttttaataaaaagcaatctgtttatagcatagtttttcttcactctggaattgacttgtttgtcttctatgtaaggtcattttaatctttctgttttgtgattcatcggactaaataaacactgcagacatgagtccacaaccatgaacgttttgttaatctaatgttaatgtagagatgatagaattcaatacttttaattttgctttgaaatacatgagttatgagtccatgatttcataaattgcagttctcttggtcttgaaataacagtcagtcagtgtttatatacgtgtgttggtaaaaaaataagaaactatcaagttttataacctttacaattcacttcttttgtcttgtctattccacattgcattttcatctcatcgtgttttatgattcacttgtttgtatgaaattgtgcttctgagcctaagagctcccaactatgtcacaatgacccaagcggctctaggttggacgatgtttgatggtagaaacaccgtcatcactagagtacaacctccctttcttttgggacaaacacagttacattttaaagttggtgacatttgactgattattactctaatgttatgtagatagtgttataataatggttactgttgcattcatatttcaaagtactttactattatcatgattttattgttgtgaacaacatggtattttttttaaagttagctttggagaactacactaagccaagcaagcttaaatcatgaaacatatgcttgcagtttaaactccaaacattaaagcgctattcataacttttcagatttctttgtcatagaaggctaaaccttgaaaattggcgatcttatgtcttggcacacttggccagcatcttgagtacatcatagctggtatttttgaatttcctgccttctaatcgttgctagctgctgcatggttgctaaatattaatgttttctctattactttgaacagacgtttgaacttgaattgtgttgctgagtggtgcttgctggacattactggatttttaggtaaccactgaaacatcagcgccttctttctctaataaaactctaatgttcaccatctattgcattttgacttactatggtatcctagaattggttatagatgcttgattcaataggatatctctcttttcgttatagctctatggcatgcatgatttatggtaaaatgcatatacagggacaactataggttcaaatgttcaaaaacaaaaaacttgaaaagaagaccacctagagaacaaatttgcagctgaaactacttatagccagttttactttagttgcaaaataattcactgtaactgttaagattatcttgattaaattccttgtgtggtgcttgatcatagctttagtaattaaaatgttgttcttttttattttgtttatatctggctgcacgagctgcactttgcttctgaacgatcctgtttgcctgcaaaggacgctgtacaattttctgccccgttggaaaaggtatgtttcccctctactcgtttaatctgcaatggttgtatgatccgttgtgtaattgtctgccttgg

SEQ ID NO: 139995 - DNA, 325 bp, Zea Mays
cgggagatggtcgcactctaaggcccaaaccgctaacaccagcaggaggatttgacacaaaactggtaaaggccttggaaggaggcagattccaggctgagtatgcaacaggagcgccgatgttcgacaccttgcctctgagtatcatctcgagccggctcaccaaatccacagcaggaatccttctgttggtaacccgggttgaatcagcgaggcctcgatacagataagccgggtatgctctgtcttttagtggctgaatgttcttgaaaatgaaatcggcgaccacagcttctgcagccagacccctctctttcaataatcc

SEQ ID NO: 139996 - DNA, 457 bp, Zea Mays
gtagtagtttcccctatgatgtgtctccaaggaagtatgtgttcatggcttagtgttcggtggtctgttattgccaatagcgagtgtttgtgtcctttgtgtttctggctttggatttggatggcctgctttgtatggggctccccagcccggcacgccccccctctcccttctttgtatggcaccgtagttggtattttattttcaatgaatagatcagactgcaagattttatgctggaatgtgcgtgggttgaatggtgctgcaagacgtgccagtgtgcgtaatcttatttcttcctccggggcatctgtggtgtgtttgcaagaaacaaaaatctcacaatggaatgacttccttctgaaggaaactcttggtcaagctcttgcctcccagatagtgtgccttccggccaacgggactactgggggtgtcctgattgcagcctctaaccagc

SEQ ID NO: 139997 - DNA, 416 bp, Zea Mays
gtaataattcaatagaaaactctatatcacggtcaggtggcatacctggtaattcctccagaaatacgtctgggtattcacacactaccttgatattttccaagggtttttcttccaagtgattgatcactgttttccctttttcatttgttgacttctctatgttaacttggattctttcaccttgaggacttgtcaacataattgttccattggcacactgtatcactccatcacaacttttcaaccagttgcatccaagaatcacatcaataccgttggatcctaggaccattgggttgactgaaaaatctatcccttgaatcttgatattaacatgggggcatgagtgtgtggcctacatgtcacctcccggtgaactaatatgtaatatcttcttaagggggtacttaggt

SEQ ID NO: 139998 - DNA, 361 bp, Zea Mays
tttgagcttgtctatgagcaggaagcagtgttgcctgtggaaataagtttgaatgctgtcaggtttgccagacaaaatgatctaactgttactgactattataatgcaatgatggataatattgatgaagtgaccgacaagaggatgatagctttggaggcaatagaaaaggacaagatcatggtagccagggcctacaacaagaaggtcaaagcaaaatcatttcaagtaggggacctggtgtggaagaccattctgcctctaaggaataaagaccggaagtttgggaaatggtcgccaagctgggagggcccttataaagtaagacaggtgatgtctggcaacgcctatttgctacaaa

SEQ ID NO: 139999 - DNA, 658 bp, Zea Mays
ccgagttggagtaagttggttcgggtgccttcaactgagggcagttgttcttgaagtgactggggtctccgcagtgccaacaggcgtttgctggcggctggttgcttgcaacagagggtgcctgaagggagctctgactctgctgactgtagcgtgatggagtgggtccagattgtttattgaagcttggacccctgggtggaagcccaaatggtcgagctctctggtgacgttcttgctgttgcgctcggaggacttggaatttcctcttgatgtgccctttttcttcctcttttgccctttccacttgaatagctttgttggagaggtgagagaagctgtggaagtcttggctggcgaggatggtcttaagctcgggtcttaaccctttcagaaaacgggccatttttctggcctcggtgctgacatcctcgggcgcgtagcgggccagttctgtgaacttgtgcacatactcactgactgacctttcgccttgagttaactcccggaattcatcctccttgagttgaactatcccttggggtacgtggtgctcacggaaagctgcttcgaattctgcccatgtagcatctctgacggcttcactgaaagtgtcccaccaagctaaggccattcctgaaagctgatgagatgccag

SEQ ID NO: 140000 - DNA, 361 bp, Zea Mays
tgaagttggagccaatgcaggtggttgcggtaaggcccacccagccggagagtgacttgtcgaagcaaccgaagctgtaggttgtgagaatggttgttggttacccacatactctgggatatatggggagtagcacgaagcagtgtgaagaacttgcttcggctagttctgtcgtgctttggcttcagctatttctttctgtttttgtattgtaattggcagattcttgttgtatgccctttgaccactccgcagaatagacagtacaatcttcttggttgagagttatatcttccaccgaagcttcgtcctcctctgcctcttggggctggcggtctgaaggagctctgttgcacttctg

SEQ ID NO: 140001 - DNA, 574 bp, Zea Mays
agcatcgaggtcttcgatcgcggccttcagaggggacgaagcgaagggctacactagtcaagggggctcaccacagccccgcatacgcatcccaaaggaccaaactctttccccgacaagcgaagtccaaatcctgatgatgtcaagggcacgactcgtggagtcaagggtgcaacacataagtgaaggccacgccatatcatagtgggacccaagctgcgccctgtcaccatctaggcccatttgtaagccccttcatggggtagattttagagtatgtctaatttagtgtacttcacccaactgtaatgacccccattgagaggaatattccgggaatgtagcagggtataatggtacttggggacccacatacccgcccagttacctataaataccccgacactgtacacaaatgggacacacataacaagaaactacagttccccagtatttgtcttgtcgtgctcctgagctctcacctattctctgagtttttgggtccacctaactgtaaagcctaaactttgtataaagaatataaaataaatagataaataaatttataagtgga

SEQ ID NO: 140002 - DNA, 782 bp, Zea Mays
ttacatgttgtgtcttagtttttgcgggggatttttgcggttatattacatggctccgcctcattaaaaacctcaccccccaggaggaaaagagtgtgggccgtgaatgatactgtttggtgaattgcaagggcgtgttagccctgaggattcaaacaaaaaatttgcggagattatcgatattccaggaatgctctaggtcctcgccggatggcgtagttagcctgtacgcgctgggggacgccttcgtcttgacgatgaaaggaccctcccactttggctctagcttgccctgtgactctggccgagttgtccggacgagaacgaggtccccttcatcgaattctcttgggacgactgtgtggtcgcgccaggccttcgtttgagcttggtatttgttgagagcctacagggcgaagacacggtctccatcgatgaggtctttggaggttggttcgtctacgtcggggacggctgaagcgcttgtccgtggtgacccatgtttgatttcctgcggggtcatggcctccgatccgtatagcaggtgaaagggagtgaatccagtcgcccagcattcggtcgtgttcagcgcccagactggttcaggtagcaggtcggcccatttacccttcttgttgtcgagaagcattttcttgatggcagtgaaaatcttgtcgttggcgcgctccatgacgccgttggattgtgggtgatatactgaggcgaaggctagcttggtgccaatggagaagcaaaagtccctgaagtcctggctgtcaaac

SEQ ID NO: 140003 - DNA, 358 bp, Zea Mays
tttcaacggtcgtcctgcgtcgtcttttttcaaaaaagtccctacatttcttctaaatcaactcagcgtaaaatattaaaaaacaatgcagcaggtggagtatgttaaaaagcgacgcaagaggtggggtttgaactcacaccctgatggaagaagggcgaaagacactaagcaaaactgtctaaccaatataacatcatgctcaagtgtttataatattgaatatatactatacttaaagcactcatttcaatggtgtcccgcgtcatctttttacaaagtccctacatttcttccaaatcaactcagcgtaaaatattaaaataatggaagaagggtggaagacactaggtgaagc

SEQ ID NO: 140004 - DNA, 349 bp, Zea Mays
aaacattgagacggccatagtgccgaagcttggtgaagggacatccttcgctgctgccgaagcagagcaacctgctcccaccatccctggggaaacctaactaagttgccgaagattcctgaagccggtctagccgaaacaacagaacatgatgccgaagccaaagataaggcggtcaaagagctagagccaaagctgccaaaaatcttgagcccgccagcagaggcggaattgccgaatgttgcaaaggctcccacaacaactcccaagaggagaagaatggctagcgtactagacgctgtcatggagacaacaagggcgctgactcctgcccctgtgaaaaaggttg

SEQ ID NO: 140005 - DNA, 515 bp, Zea Mays
cgccgtgatcctctcctggtgatttctgtgaatctcgactatgcggttccctggccgaagcttgcccatataagaagccctaacttcgcctcgacctatcgacctaatctacatcgccacggggaaggaagctgatggtcgccgttgtgggcccatgtcctcatctcggtgccaacctaggtgcttcaccgaaccttgggggtcacaaccatggtatcacttgggcggattaagctccggaccgcctagtaattgctcaccggagtaaagattagccatctagccgcaagaactcgtgggagggccactaccatcaccatgtctggtaagggctacctcgctagcatcgttgatctctccgcttcgtttagctcttgtctgtatctacaagggagggctgggctgccggatcacctaaacgctggtgtgcatccaccgtgggagctcgacggcgccgccacgtctggctggcctggggggaaatgtgggtcctggccatcgatctatcatcgaac

SEQ ID NO: 140006 - DNA, 508 bp, Zea Mays
gtggatgatgtattgttaagacatgagtgtcggagttcatatattagtggttacgctaagatgatcgaagtgtctcgagtcacgccccaatatggttgtatgcgagacggggttatgcgcatgatgagtttagtaaaaatccaccggtgtcactgatgttaagttgaggtttatttgcgcgtggaaagtaataatgtgtttaatacttagaactcttagtcaatagtagaaattgttttggcttatatagagaggtggtgacttgccaaagtagtcatcgctttctctatattcataagtcgagtcgagacgatgcgtagtatgcgttcgttaaattatgcttcgcatataatgtgtgattgtgctcacgatttggagcagacacttcaagtaagtaaagtaggtttgtgatacaagtgtgtaatggagttagttgttttaggataattattgaaatactcggttcatatgataaacatgtatgcgttcataatttgggaagtaaatg

SEQ ID NO: 140007 - DNA, 335 bp, Zea Mays
caggtctggttacaggaatatataggcccctaggcctaatcgcatggagctaactgctccctaattctaggcatgcaaacaacccttaaatctaggcatgcaaacaacccttaattctaggcatgcaaacaaacttatctagtttctgggcgtgctcacgctcgcacatcccgggcgccgttgcctgacgtagggccggccgtacatgacagtagaatgcatgaaactggggctggtgtaactgcataatttaactactgtccgtttgcattgttgccacatttgtttaatatttaatgtgtcatgtatgtgtcagattgtgttattagttggtt

SEQ ID NO: 140008 - DNA, 723 bp, Zea Mays
caggagttcactattgatgagaatgatttggttcgtttcaggggccatctttatgtgcctcagaaatcaaaggtgaagatggatatcttgagagaagctcataaaacgccttacaccgttcaccctggcgaaaccaaaatgtaccgagatttgaagcaaaacttctggtggaagcggatgaaggttgacgtttctaagtatgtggccgcctgtgaagtatgtcagcgcgtgaaggccgagcataagaggcctgcaggtttactgaagccattggaaatttaggagtggaagtgggagcatatcaccatggattttgtggtgggcttacatcattctcctcgaggcagggatgctatatgggtggtagtggatcgcttgactaagtctgcacactttattcccatgaagactacaaattctgtttcagagttggttccctttacatgaaagaagtaatcaggcttcacggggtgcccaagtccattgtttcagatcgagacttcaaatttgtatccagattctgggagtcttcacagtgcattgggtaccaaactctctcttagtgtcgcttttcaccctcagactgatggccagtcggagcgaactatccaaaccttggaagatatgttgcgtgcttgtgttctatcttggaagggtagctgggaggatcatctcgctttggccgagttcgcttataacaacagctaccaggctagcatcaag

SEQ ID NO: 140009 - DNA, 658 bp, Zea Mays
aggactggtcgtaggtcgcagccctaaccctaaaacttgccctaaaaaggaaatacctcttaccccaagaaaagtcttctctcctcttccccgattttaacagacccttcttttcctattccagatggaagactctctggccattaggacatcctactgctcagaggtggaagggttcccacatctgttgcgaagctgtgcgcttcgcatgggaattcgcaagaagccggaatacgtctggaaggagtatctcgagagcggaatggagaaatgctctatggcagtctacctgggagaaagccgaaactattcaaaccatccttctttccaagtcactttcactagataccgctttccagatacttgccagaatgttgcccgaacagccctccgacaactatgccagaactacaacaaggtgatctttgaaaccccccttctctactttccacccagcaagaagaatacccccacctggaggaaaagacttcaggccctgtcaggaggagatcctattgaggatgatcccaccatcgtctacatggctggataccttcacacccttgataaccaatatgatgacctcaccctccactgcacccacctaacctcccgggtggaaagcctggagcaaaaagtcagggaactttcaagggaa

SEQ ID NO: 140010 - DNA, 483 bp, Zea Mays
tggaattacaagccatatgcaatatatgtgatcgacagactttgttaacttacaagacaagaggaaatatcaactatcaatcagatacaacaacagaagataaaagcaccaagctgtgccagtcacggatttacagctgaaagatctgttacaattacttcctattctaacagcccctctttgatcaccccatttgatttaggtagaaattatacgcttcaagttctctaattttctcgccaataatatcttggtaaactcatctgcaacttaaactcgtgaaaaaacaaagtcaattttcagtatttttcttaacatgcattctttaacaagaccacaaccttttactggaagatcacacacgatctcaagtgctccggtcccaaacttcaactctcataggtgcttcacatctacaaacaaattgatcactttatatcattacatgtgtttatctcataccaacacggcaacacatatccc

SEQ ID NO: 140011 - DNA, 753 bp, Zea Mays
gtggcatccaatcttcaagtgtgccaagtggagaaggtggaccatccgctgttttagaaacacaaggtgcagctcctagtggagaaggtggaccatccgctgttttagaaacacaaggtgcagcgccaagtatagaaggtggaagacctcttttattactaggaccatccagtgtagcgccaaatcttccaactactccatcatgccatggcactggtcctagaatgcttaaaaagaagttcacaccaaaaaaaaaggaaggcatgagtacctgatatgtaagatttgaaatatgttgtgtgaactatgtgttatttgagaccatgtgaagtgtaagatttgaaatatgttgtgtgaactatgtgttatttgagaccatgtgaagtgtaagatttgacatagaactgttgagctgcattcccagttgagaccaacaatctgttcatttgttatctgttttttgatctgctgagctgttcatttattaataactgaactagagcagttgttaacagattgacagattgtgagcagttctggaagttctggacagattctgaacagattgacagattctatcgtatttacaatgtgttaactgacagttctggacagttcattatctgataactgggagcaagtcgatctgttaacaactgtttggagcaactgtttggagatgtttgggagctgagcctgtttggagcaagtccaacaacaggcgtccttgaatttacactgttgtcatctcca

SEQ ID NO: 140012 - DNA, 612 bp, Zea Mays
ctctagccgacatctccgacgaggttgagacttcctaatctagtgcttgttcttgtgatctgtgcttgtgatctgtgctcgaaccccaaaccctaatctactctactgccttcttgctctgtgattgtacccgtgagggaccgatctggtgctccggctttggtaagtgcttaatctggtgttagttcttgtgatctgttcttgtgatctatgtttgtgatctgtgttcgaaccctaaaccctaatctactctactaccttgtgttctgtgattttagccgcccgtgagggaccgatctggtgctccggctctggtatgttcttaatccggtgcttgttcttgtgatctgtgtatcgtaaccggtgcttgttcttgtgatctgtgtaccaaccctaaaccctaatctactataataccttctctgattatagccgccgtgaggaaccgatctggtgctccgggtttggtaagtgcttaatccagtgcttctatttctgatctgtgttgcttcaaaccctaatctactctactttaccttgtgttctgtgagttgagccgcccgtgaggaaccgatctagtgctccggctctggtaagttcttaatccagtgt

SEQ ID NO: 140013 - DNA, 552 bp, Zea Mays
ctctgttgcgtcgccgtgactctctatggcctcttatcgtcgccggtgaagtcgccacgacggtagacacgaatccactgcgccggaattctttttctcctccggtcgccagcgctgctcgaccgaattgatcaccaccactcaagtatcctataaattgaagcctcagcatgttccgctaggtaatcgtgcgtccagtgaaccaactcgtagctccgatcgttccccacagctccccaatttgggatttcccccaaattggttgaagaacgccgcgaaatcaagctcgccgtggccagcgctcctcgggtcagtatctatcaaattactccctgttctagcttgattgtagcctcctattgctctcagtgccaaccaattgaaattcggctgaagcctttcaccggaacacgcgcctgctctgtagaacgccgctatgccaccctcaccgtcgacccgctcttcggttcttattctgcccaaaccaatgtgtgtacataacccctggtgaacccgcgaacccttccccagcctcaatttggtcatccccgc

SEQ ID NO: 140014 - DNA, 1025 bp, Zea Mays
actcaagatcacaaaagagacggttcgcctcatattgggtttgccaagcactggaggtggcagggatttcattgattggtatggtaaaattgatgctgcttcaaaactgagacgggatctcaacatttgcaaagaagagtttgatgtcgttaagctacaagacaagctagttgttgggaatgatgatgagttatctatcagatgttttttttctgattttattcaatcgacttctattcccatctgcttcatgggtattactaacaacgaggtcctaatgacaacaaacatggactgggtggctgatattgattggtgtcaattagtatatactgatttgtgtgatgctgtcagtcgttggcacaggaagaacacaacaaaacataactgcaacagtttatggatgttcactcattattcttgtaagttactctccgattaccaactccatatatgctatccaaatatttgtttgtacttgcatacataatcatttattacattcatactaaagatctatgcttgttttctatttggttctcagatatattaccttgaccatttacaccaccctgcatcacctcagaacaagtatgatactccccgtatcaagtattttgataatgagaaaataagagatttggctaggggtgacagacgtggcccccaccaaactggagaaccatttggtcatgcagaggttagccataaacatatttttttgttgttcatgcagatgttataattccaatacatgctaatagttatcactgggatttaaacagtttcgtagccgcacagagacttgttatgtcatagctccagaatggccgatttctgaagtattcaacatatatgtcccacgcatcaaacatttgattggcaacaagctaaattgtctgccctcccagcatcgccccatgttcgaatcactatttgatgcacatgacaaggaggttgataagtaccgtgcttctcttcagcagagccatcagatgcttgtgtccaagcagattgaactatct

SEQ ID NO: 140015 - DNA, 314 bp, Zea Mays
aagtatatgcagcatgcaatggattttggaaatgtcgagggtcaatgtatttctattgtcaacaacaaccttctgctttccagtggtgtacaaggatgttttgctctatctcggtaggttattataacacccattttgattttccgtttcctattgttcaactcccttatgtacctccttggcatttaagtactaattctttagtcctaagatattgcaacattttagatgctatgtactgctttataagtaattatagcatgcacataattggtactttttaatgaaggaagaattttattaattcaccgtta

SEQ ID NO: 140016 - DNA, 534 bp, Zea Mays
cgccgtaagtctaccctgcggggcccaccaggggccactacatcagcattagactcactacagggacccgtatatcgggcggacggtacgatacgccatactggaagtacggttgggcacgaccctacagacgacgtcacaagagctacaccacccaagggcaaccgtcgggcaccctccagaagaacacgagtccccactgtatagacctgtccttgaactataaaagggcaggccccctcctcctttcgacacaagcacacctattgtaacgcgcccctcagcaatacaacgatcagcactatactggactagggcgaaagcctgaaccagtataaacctattgtctcaaaactaaccctcgagtcccagcgattcaccattcgaagtgagttcgcgcttgcatacccaccaaacataaatcttattgtccaccggtttctgaaaccacgacaaaatgtatcgaatgcatcagttgtgtctataacagataccaatgaaaataaatggacaagttcaaaagaatagaatgac

SEQ ID NO: 140017 - DNA, 402 bp, Zea Mays
gttgcacaaggaggggttggaagctgatgcagagcagatcgcagggaacaagattgatgaagctgaagctggagcacatgacaacaagctgaggaggggtgatcggacaaggcagctgaatcccaagtactatggcgccaactggctgtaatagggcccacttagttttgattctcagtataaagagatacacctgctctattgtaaagtgacttttggctattggcaaacttcaacagaaagaaatagaaaaccacaaacctgctgccgagagaaatacagagagtgcttaacaggcggctacacggacacacggttaaaggagcagaggagacgctggaaattgaagaaacatagtgtcaaatgggacccaccactatgtgatcaagagagagggaaaag

SEQ ID NO: 140018 - DNA, 401 bp, Zea Mays
atttgctactagaataatgcagtagaggttgcattaaagtgattagactagtctcgtagtggtcactaggattggattgtctctagcaccgatcatttgcattaaagtgacttgttgacagccttttcacccctctagacattataaatcctttcaactgatctccttttggtcttatattcgtttggccaccgatgatgacgacatatgtgattgggtatcatttgctaggagccagcacaacctaacgttcttcgtggaaatcatgttcatttgtaagctaggaataatctgggactagaaacaacagggtcttagaaaatgtacgaaataggccggaatcacgcgcattgcaggctgggaagtcttctgaatgaagcacgcgatctgtagaaatggac

SEQ ID NO: 140019 - DNA, 353 bp, Zea Mays
gcgggagtgtatgtgtatcactacgctacactattgtactgctaggactagtatgtactgatctattggtatagtatcttttcttcgtgctagttgtcgatgcggtgttctttgtgttgcgtaattacactattaaaactcaagatctcgtacgctacattatcaccggaaccctcacaatctcgtcagctcaccgatggccaacaccggcaaacaatgcgtatatccaaattcagagaaataaactaggcggcagaacaagcagggaacaactagatgcagctatttacgccccagctctgcagctcataatcattttggacgacgtcttctggcggtacggtagtttccag

SEQ ID NO: 140020 - DNA, 358 bp, Zea Mays
tgaacgacaaacaagttatcaatgacgaagttgtagaagcatatggatccatgtttatgacaccataaaatggttatccatatgttggatcgggtgtcggatgtgagtatgcatatgcgaatggaggaggtggttgtacataccccatacatgactgatggtggtattggatcgggtgctggtgcccatgcatcgtacaagttttggtcacgtcgaggtggatagttgtaactagagctgacttagctatggctaccatcatcaacaggtctgcaagtcgaatgacgcaggttgcttcttgtctcgcgttgtgaatgaggcgctccataatctaaatcttgggaggaatgggtgaagt

SEQ ID NO: 140021 - DNA, 499 bp, Zea Mays
gagactccccgtgcaaaagtcgcccaagggtgcagccggactagcacaataagtgcgaaaaatcgaagtcttttccaaaagaccctccgcgcaaaagtcgcctacgggtgcagccggaatactagtacgaaaaatcgaagtcttttctaaagaactccgtacacaagcctacgggagcggcctgatcaacgaaaacgcgcagcttcatcacacaagagtatggttacatacatacaagcgagggcatcgtacattacattggctcaacctttgggatgatacccatctccctatagttgaacaacattatcctcaattcctcacccgcaaaaagacttcgcagctccccatcacccacactcgccccagccggcgaggacaacaattcccgcttgccagccccgtccacacgaaggcgaccacctcccacctcaccacgaggacgcctatcacctcgcggcaactcactcacccttcatttggccaccgcccttcgccg

SEQ ID NO: 140022 - DNA, 322 bp, Zea Mays
caggatactatcgacgattcattccagacttctctagaattgctaagctaatgactgagttgttaaagaagggagtgaagtttgattggggtccgaaatgtgaagatgcctttcacaccttgaggcaatatctaacaaccgcacccatactagcgcaacctaacaacgccaaatcatttgatgtgtattgtgatgcttcgggcactggactaggttgtgttttgatgcaagacaaccgagttattgcctacacatcaagagcactcagacctcatgagcagaattattccacacatgatctggagctagcagcggtagttca

SEQ ID NO: 140023 - DNA, 523 bp, Zea Mays
caacgagctcctcgttgatggttctagggtaccgaccgttgtcgtcgtcgtcatccataaccgacttctatctcggcaccgtacctcgacggcagtggcggcactagcacgaccacgtagtcagccggcgacctaccaaagtcacaagcaagcagcgagggttagggttagggattaggacggtcgactggtggtgatgaactgaggaagagtgagtgagtgacataccagccaagccggagcccggagccggagacgagggtaaagtgcacgacgacggacgacgcgagagggagagccggagaagaggagattagggttagggttagagattaggatggccgactggagagagagagagagccggagagggacttatctgccaagccgcagcccggagccggagacgatgacgcgggacgatgggagggagagccggagtccgaagagcggagattagggttagggatttgtgattagggttagggatttcaccgatgcagagccggagcctggagagcgg

SEQ ID NO: 140024 - DNA, 695 bp, Zea Mays
tagaaagtaagagtttcacctccatgaaccggaacaaatgcttccagaaactgctggtgaagactttgtcgcgatcagatacgatagatttaggcaccccatgaagtttgatcacattgtctaggaaaacctgagcaaccactttggcggtgaatggaagcttcaaagggaaaaaatggttgtacttagaaaatctatccaccaccacaagtatagtatctaacccctcagatcttggcaacccttcaataaagtccatagtcacatcctcccacatcccttgaggaataggcaatggctgcagcaagcctaccgaatgatatctctcactcttagccttttgacaaacttcacactgctgcacataatggaaaacatcagttttcatgcccttccaccaaaaaccttcttcacatgttgataggtctccttaatacccgagtgtcccccgagggcactgtcatgtagggctgcaatcaactttgtgcgaagagctgaattctaccaacccaaatgcgatctcccttccttatgatgccctgatgtaaagaaaactcgtgttcatctagactgtgaactagcaacttagttgccaactgctgagctttgacatcagtagcataggagttaactacttcatgtatccacaagggttgcacttctaacagcacagtgagcgtcatcatagagccaac

SEQ ID NO: 140025 - DNA, 851 bp, Zea Mays
ttcggtggctcgcgctactcgcaccgtttttgctcaatgctcatagtaggggttacaagcgggcaagagagggaagaatatcccccatgtctcttatgcgtagctatacctaagaactaccggaatagagatttcaactaaaccttgggcatcgcagtggttcactctggcctccgtggtcctccgggtgttgtggttcgtctgtgtttcatgtgtgtcttgcgtgtatgtgtgcttctcttccttgtgtccatatccgacccttcccttttatagaccaaggtggggtcggttatcggctccttctcttagaaggagctataaagtcgtggtaaaatgagtcattccaccttggtaaatcatgcttgtcatcttgcgccctggtcgtctaggcttccctagctgtgtccttaatggcgggtggtacgggcggtgtggagccctagtaccatcattacctcctttgtgtcgtgctgacccttggcctccgtagcctgggtcttggcgtggctcatcgtgttgcgggtcctgtagatggcctgtgctaagcctaggcttaataggtcatgagtgcgccataggccgaggggctcataagtcatgagtgagtcataggtcaaggggctcgcaagtcatgagtgggaggtgtactgactctcctactgtggcttgtcgctaggtgtagttaatgtgttcggtcatttgtggtgggtaaatattgggccaggcgaggaacccactcgagtggcttcctcttagttcgcttggccctcctctctggctttgccttgctcgaccacaggctcgatgcctcgggatttatataggggcaggcgcttttagggtatacg

SEQ ID NO: 140026 - DNA, 593 bp, Zea Mays
cgcaagcttctcgctcttgtcgaatacctttttctgagtgcatccagtatcattctgttggctctttctacttgcccattagctcttgggtgtgccactgatgcgtacttgatctggatactcctttgttcacagaaatcaaagaactccgaactggtgaagttggatcctaggtcagtgatgatgctatttggtattacgaacttgaacattatctcctagataaactccactgcttttgctgaggtcaaggaagcaattggcttgtattctatccactttgtaaatttgtcaatggcaaccagtatatgagtataaccttcctgagctttcttgaaaggtccgatcatgtccagcccccagcatgcaaacgaccaggttggagaaatggtctgcagctgctgcgcgggcaagtgctgctattttgacaagaattggcatgcctcgcacttctggactaacttggcaacatcactcttcacagttggccagtagaaaccggatctgaaagcctttcccacctgagttcttgatgcaacatgcacaccacactgcccaacatgaacttcatctagtagctgtctcccggtggc

SEQ ID NO: 140027 - DNA, 844 bp, Zea Mays
tgtcctctacctctaaaggaaccttcatcgacaactactacaacaaccacaccgtcatcatcatcgataacatcacccaatgcaccaccttgcactttcaagtgcctcattaccaaggggatgatagagtgatgccacatgaggctatgcatcaactatgatgagtagttcactagtgatcataagtgcaagtacctctttaacatcacactcatcaatgacttcgaagatgatgaagctgacccttgatcatgatgatcatcgattcctagaacttcaatgtgtgtggttggtgcaccatgttctaggtaggcatcgaccttgggcaatgcatgtgcatcctcatttacactagcaccatgcactagatcatgatgtcaactccacccgattagagggtatcatggagcaacacatcaacactgcaatcctagtcatcgacaataatgaaattgcctttcgaggagctttcttcaatgtgcgtctccacattgactcagagacaatctagatttacgcattctaggtggacctcaacatcaatgtcaacatcatccgaaacacacaattgatggacaaccttgctaatatcctctagaacttcatatctctaaagatacaattccaacgaggccagtgcattgtcacctttaccaatgtctccaaatgctgagcaccacacaacgtgcttggacttcctcccgaccctttgccaccatgcctctgcaccatgcaccaccacagtggacgttaccacaaccatagtctcaacactagaccacatcagcccaacacacctggctctatctacctatgtgtcattatctttagacacatatgacac

SEQ ID NO: 140028 - DNA, 287 bp, Zea Mays
gataagtgctcccaggccccagcatgcgtaggaccactatgaacaaagcctcaccgggcctgtaaggctgtaagcacagatccatgcatggtttcacatggcacacagtaatgcagtaagtatagcgagaggggagttaactcgtgtaggcggtgtagctgatatctgtgccttcaacttcggccatataatgtcaatcgtgttcagttgtatatcatcatgtaaaatgatttgaacttggacgacctgcattattataggtagctacagacacagtatttttctcg

SEQ ID NO: 140029 - DNA, 459 bp, Zea Mays
aagcgacacatcagcaatctagtgggagcggaaatttatagttgtgcggtcgtgctagcggccccctccagacggttcaccagatgatcgaggacatcgttcgtccctgtctaagcaaaggacttcgggattggcccatcaggatgaaccattcccccgggggggctactattggggcagaggccgaacttgatctcgatcaacgatgtgaagcctcgacacctcattttcaactaagcacacttacacaggaccatgggcggatcagagacttcgctacatagcaattctgatggaaccaccgactcagtagatagcgactaatcattatgaaggcaagcatcctaacgaaggcccacatacgggacacaccgaagagaaggactttgtcaaccacgactcatggaccttcggcagtaacaacccttctaaggcggtgaagggtccatggatgacaac

SEQ ID NO: 140030 - DNA, 606 bp, Zea Mays
tggataacttccttaatatcctctctttcaatcagattatttttaacataaaactattactccatctaggccccgggccatctttgccggtatgttggcaccgggtagcttgcattagagcgagcaatgaatccgtaacaaccgaagttgttgtgatactgttctttgtcggtggccttcgtctcgtacaaaagttcatgcatactcacgctcggttctagcccttggcttcttacagcccaaacaaacaagcccattctaattatagcttcgggggtaagctgatggagaaagatctagaatatcttcagcacttcaaccacaaatttgctcaacatgaaccgaaggcctgccttcaaaaagcttcggtaacaacaacttcattttcctcaagagtaggggcggtgctgtctcctccaacccttagaataaacatgtcccgaaagtatcttcctctcatggtgtcaatatgactttgtttaatggtcaattttctgaagatggtatggcttggccgctagggccgatccttagaatcttcatctccactttctacatcataatcatcattgtcatcagaatcttcagacaaatcctccattttct

SEQ ID NO: 140031 - DNA, 304 bp, Zea Mays
atttttacataccctcattgtgcactagcgccttctcacgggaatggagtcttaatagctggtgtatgatctattgatctgtgccttgccaatagccatgagtcaatgacgtcgattgcgcggtgctccattcatatccattctgaatttctgatttgattgtccttggagtaaatcttggactgtcttcatgtgtccgaatccaaaatagtcctgtggttcgtctgcctttcagctcatttggaaggttctcagagttgctgatcccaccattggcagttcaagtatcaagaggccattggtg

SEQ ID NO: 140032 - DNA, 272 bp, Zea Mays
ctgggcctcaatatctgagaacagcaggggtctcggggtaagtgtttctaagactcagagaaccccaggcatggacaacgggtttattctataaacatagaggggcgcatgtgcaaatttgacccgcgaaggggtatcgacagatctcggccgcccgatcaaaagaggacgctacggattagaccctcatccttataaactatcgtgcgatcacagccatcggttacagacctacggttctgatttaaagccctacggtttgatcacaagcg

SEQ ID NO: 140033 - DNA, 1661 bp, Zea Mays
gaacgaatgctatgttccattgccatcctcatcaagttgttgtgcaaatagtattgcaggaaagcacaaagtcaccaaaaacccccacaggaaccttttccactcctaaagtgatggaacctgttggtatctctaacagatatctccctctcctcaaggaaagcacacataaagtcaccaaaaatccccacaggaacattttccaccactgaagtgatggaacctgttggtatctctaacagatatctccctcccctcaaaagatgatataaatttcattgcctcatggcagtcgccacaaattcggaggttctttatcacccgaagggttgttcctgggctagtgcttatgagtcccaaagcgacagctagcttctcactgtgaacagcaagaatatcatctttctcttgttcctccacatcatgtaggacaaaatctgtgcttggtacaaagcctagcttcctcatctgaatattaagctggtttattttctcaattatcgcagtcatcatagggtgtgaatcatcaccagccaacaacatatgcaccttgttcttgatctcaatccagctacagcctttttccttcttcaagcctacatccttcatcatctctctaaccctattaacccgatcccacattttcttagaagcataaatgttagagagaaggacataattaccagcattttctggctctagatgaaagagcttttctgctgcaacctcagccagatccacgttgccatgaacccggcaagagcctaataatgaaccccaaatataagcatctggctcaaagggcatgtcacttatgagatcatatgcctcatcaagcttgccagcacgtcctagaagagtaaccatacatgcataatgttccatcctcggagaaacaccatactcattatgcatttctttgaaataatgacgcccttcctctgtgaggccagcttgcgtgcaagcagcaagcaagcaggtgaaggtgaccatgtcaggcttttgtttgcacttcagcattgagtgaaacatccaaactgcattcacagcctctccatacatagcatagccaccgatcatcgcattccatgacaccacattccgagataccattgtatcgaatattattctcgcatccttaaccctgccacactttgcatacatgtccaccaaagcactgctcacataaacatcatggagaaagcccttcctgagagcaaaacagtgcgctgacctcccatgcatcagagctgcaacattggcaaacgctggcagcacacaagggatcgtgacagagtttggttcagtcccttgtgcctgcatctccctgaaaaactcgacagcttccaaatccttaccattctgcacacaacaagcaacaatcgaggtccaggacacgacattcagctcaactccccggtcaacaaactctttgaacaaccttagtgcctcgcagacttgcgcgttccgagatagtcccgcaataagggcattgcaagaagcaacatccatgtggctggactcatcaaacacccgaacaacctctgcagcctggccgcacttcccgtacatgtcgatgagggcggtgaccacgcaggcgtccgccctgcaacctgccttcacagcgtatccgtgcagctgttggcccaccgaaaccaaac

SEQ ID NO: 140034 - DNA, 630 bp, Zea Mays
gccagaggggaaatggatggctacaggggtccgagggggtccgagccgttcgatcacgatccgacggggaggggtccgagggggtccgagccgttcgatcaagatcggacgggagaaatcagaccgggacggatgagcggctgcaggtggtgctgataggtgggctagggtgtcaggcgcgcatgcgcaaagcggtatcccgcggtctgggccattcgatctaaatcggacggaggggatcaaacccggggaaacagacggttacgggcggcgccgctcctctccacagcggtgaggtcgccggagatgaggcaggcgcgagctagggtggctctggggttgccggagttgggcagagagggagagggcgccacggcgaacttaatggcggggaagaggccacgaatccacgggcagagaggggagaactgctgtgagaaggtctcgggcgggccggagaaactccgttgagcgattccggccacggggaggggacttaaggcgcgctaaggccttggctaactttagcagaggcaggggtgacacagggaactactccgatgaactagaccaggctgaatcggccggccatcgcgcaagcacggcggaccgccgcggccaagcaccagc

SEQ ID NO: 140035 - DNA, 339 bp, Zea Mays
caaaaggtaaagccttaaatggcaaatattttgttagtttcaataagtactgctaaatatgcttagccacatgtcgggtaatgcctatggaaataaggctttaccttttgggaagttttgttgcttcctcacaccttaaaagttcagcataaaggccatccaagtttagaagttcataatgtgtccccatttcaacaagatggccctcctccattgcagctatataatcagcatttttaatgaggcaaagacgtctagcaattataatggttgaccttcccaacatcagaacatctaatgcttcttgtacagccttctcagcttcaaaatcaagtcctc

SEQ ID NO: 140036 - DNA, 575 bp, Zea Mays
ttatatcttcactcagccagatctcaacctctgtcagagaagatggctagaactgatcaaagattatgaccttgagattcattatcaccccagaaaggccaacgtggtagcagacgccctcagctgaaaaccttttgggataaagggaaccaactttttagaagataggaagaaggaatcagctcaactgaatgcatgtttgggaaacaacgacagtctcgaagtcaaaccaatgctagaagacctcatatgcaaagctcaatgcctagactcaaagacaacaagacttgtggaaaaagctcgcaaagaacaacttccggacctcaggacagatgaacaaggagccctttggttcaagaatcgtctgtgtgtaccaaaagggggggcacgagaagtcctgctcgaggaagctcacaactcagcctactccatccacccaggaactaccaagatgtacctagacctcaaaaccagatactggtggagagggatgaagaaagagatagcacagtatgtggcccggtgtgacacctgccaacgaacgaaggccgagcaccagaagcctgcaggcctat

SEQ ID NO: 140037 - DNA, 596 bp, Zea Mays
agggaaagaagaggaaaactgctgcttcggccactgcagacgagcctgcaccgaagggcaaaaagttgaaggtccttactcaccgaccatgttatattgaaccagttgtggtgcctgagtttggcggggatgcttcttcagctgctgaaccaagagaacccattcctcctacgcagaaggctgaagagtcggctataatgccgaaggcacctttggttgatctagctgagtcgaagactgataaggataaggctgaagagtcaaatattggagaaacaaaagtaacagcgacgaaggcacaaaaaagttttgtggcaactcccaagaggagaaggatggctaatgtactagatgtgttagaaacggtaaaaactttgaaccctgctccttcaaggaaaactgtcgaagcctcgaaagcgcaaaccgaagctgaaacaaagccgaccgaaattgaagctacggcaacccaagctggtaccgaagctgggcctttagagccctctaagaaaaagtctgcggaaattgaagaaaaggcaacagaagaaaaggccacagagcaaattccgcttgaaaaggttgtcactcctactcccgaa

SEQ ID NO: 140038 - DNA, 460 bp, Zea Mays
ctcctgaattatcaactacagagtcataccttctctaacttccagactctgttgaacaaggcaattagccttgaaagcaaaagaagggaactgtctgaccacaaaaggaagttccaaggtcagtccagcagaaacaccggcccgaacaatgcgcaaggttctcagtaccgctctggaaatcagggtggaaataattattaagtgcaacgctctagacagtaaggccagagaaacaatcaaagtcagaaccagcagaggaacaactctcggaccaaccaaaggtctggtggtagttcgcagactcgacaaggtggtgtcgtgaacacgcaagccaaaagcaacaacgcaccagtccaacccaatggttgtttcaagtgtggtgagcttggccattatgctaacaactgccctaggcgcaaccagcagacacctcagaagagcaacaatcagaggaatgacc

SEQ ID NO: 140039 - DNA, 628 bp, Zea Mays
gtccttctagtgtcctttcccctacattggaccacattaggggagtctggcattttcttccgtacagtgcttcgaacggtgacattttgatgctggcctgatggctgttgttgtacgagaattcagcgtacgacaaactggactcccaatccctgtcgaatgttagcacacaggctcttagcaaatcttcgaggatcttgttgactctttccgtttgaccatcttactgggggtggtaagcggtgctgaaatctagcttggtgcccattgcttgctggaggcccttccaaaattttgaagtgaactgtgttcctctatctgatactatcttccgcggaatgccatggagcctgactatctctttaaggtatattcgggcaagggcggctcctccaaaagtggtctttactggaacgaagtgggccaccttggtgagacgatcgattattacccatatagaatcatttcctttctgcgttcggggcagtccggtcacgaaatccatgcctatttcttcccacttccattcaggtactgggaggggttaaagtaggcctgcaggcttctgatgttcggcctttgttcgctgacaggtgtcacatcgggccacatactgtgctatttcctt

SEQ ID NO: 140040 - DNA, 516 bp, Zea Mays
aagattagacaccttgtttcttaaaccaaacaccctcctaatttacttttatgggtcgtggagtagactggtcagattgtaatcgatgctagaggcgaaaaagatacgacgaagtttctgcttgatactagtcagtgtcttgataagattgtaatcgatcggtgcttgatttaattgaaatttagtgcttaagttatcgtagattttagtcagtgacttgatgttatggtaattctgcttgatactagtgacgggcttgtattggttggtgcttgctgcaagatactatccataatcctatcgctccgacattgcaaattatgatttaaaccactgtcgattttcttgtttagtcgaaactgagagttgagacagatactctctcgtctccctcgtctgctcacaagcggccgagatccaactataggcggctgagatcccgcgctttagactcacttctctatccgccgtgcggtctccgccacccttgcacctcctctgcgtcgccgcctctgc

SEQ ID NO: 140041 - DNA, 1300 bp, Zea Mays
gagtgcaacccccagtgctagaagcgttcgggggaaggtaacgttgatgctacttcccccgtccactaatactttctttaccctactttattggatgactggatcaacgaggagagggtacttgtcggggtggtcgaagttgagccactgatctgtttggctgaaggttattgcatgtttcgaccgccgataaggagctggggcactggtggttgccgccaggacctaccggtcattgagcttatgttgccttctattctcttgcgatccgtgacctccgaagatgacgttgacctccctatcaacgcgtgggaatgctccacccccttccccttctggttgctaaggctgcctgggcttgccaggccctcctcgtggtggggggggtggtagaggctggaacggtcggccattttcgacgcagtgcttgaagtccctgcagttccgtaaggtgtggcgcatgtccttgtggtacgggcactgggcatcgaggatgtcgtccagtgtccgctcgcctccacggggtgcccctcgggcacgagtgacgggtggtctgatggtgtggacctcctcacgaggcctcttctcccaacgcctgtcgggttgctggttcgcgtcgcgccgcagtgccggtggtgcaggtttcgttcctccgatgagttcctgggcccgcttgtcagcggtgatgtagaggtccgcctctcgaaacaattgtttggaggtggtcggcgctttctgcggtatggcttggacgaaggccgagtcattagatccctggtataagtcctcaatcactgctgcctcagtgacctcggggatacgatttctcatggtctgaaacctcttgaggtacgaccgaagtgtttcatcgccccaacacctgatggatttgaggtcccatggctgcgccggcttgtcggagagggactggaagtgggcgatgaaacaccgactgaagtcgctccaatcatcgatgcagtgtcatggcagatgtcgtagctactgcaatgcatcctgtccgaggatgatgggcaaatatgcggtcatcacgtcttcggttaccccaacgggccaggcagcggtcgtatagacagccaaccagcctcccgggtccttcttaggctcatacttgtcgacgttggagatcttaaagtttgggggccactggatggccctgagacgcggagtaagcgcggatactccacatgtgtcttcctatcgatgttcatggtgttggtcctagggaggggagtcggtgatgtgtcgtctcgaccgtccccgaatcgggccactggttgag

SEQ ID NO: 140042 - DNA, 509 bp, Zea Mays
gatggacgctgaccgcgtcaaaccaggctccgagtgcgagtgcgtgaaccacgcaccacagacacatgtccggcccgacgacgttcggtctcagccgctcgcttgcttcatccggacctcgccaccatgtcggcacagcgtaatccaaatgcatttacgggttaatctctggctaatctaattatcagaaccacgtccacgagaattcatctgtcatctgtatccacatgtactaatccatccagtacggcagcccgtagacctacttgccgacttggtaattagtaaacaggggtgctgctgtgctgcatagccgtaaaagttcggcaagattaacagccattgctgctggcatccatcgattgggcttgggcccgtattaaaccggcagcttctttttttttaccgtgcggtggccggtggcacgtatcgccccagtttgaactcaacttttgaagacggctattctgtcacgttgcctccacggggcctttcttttcatttttttt

SEQ ID NO: 140043 - DNA, 1404 bp, Zea Mays
ccatgtatgtccagttctgttgagttttgcctagcctgagatggccaggtggtacggtgttcaatggggatccaacgctgacttcttgtgcctgatatgcaggggcttagtggttggtagtatggtgattctggatcatggccacatagctcaggcccaaattttctgtaaaacaacactgtaagttcaccactagactaaatatctgttattataaagtttgtagttgttgataagcactacattaccttgatttgtaacattcccttttattcgtctttttccatacaattgtctcatcttgttgtgacagcatctcccaacaaaggccctcagcgtagtcacgaatggctgtccatttcttttggttttctttgtctcgcaaggccctatgtgtattcaaattcgatgtccatacaaaatatccaccaggcctcaaaagcctgttcacttcaaccaagaaaatgccatctgcagaattacagagaaaacaacgtttacatatttagtaagactgtaagagatactactttatagccaaattaccataaatgtgtctttgcagaaatcagatgcatgcaaagtttgcagtgacaagggttacaagtcaaccaaaagtcacccacaactgtatatccttaaatatttaatattcagctaggcatgtaccgatctttacatgtgaagtgccaacttaagacattgctgaataacattataatcgtcaatgagggccagggcatgtgaaagaagactttcacacataccatttttgtaccattcaatattgcatttagcacaatgcaccatatcaaaggaaagatagggatacggaagctgcttcgttgcaaatgaaccaatcattgcaggaatgcctctctccagtgtaatttggacttggctacctgatgcttcatagttagcaatgcacatggtcaagagatctctctcaaaaagatgcgccccaaaggtaccaaatccacattctatgtcaaggactgtcctaacctgaaaatggcatagcaagaaacaccatcagaaataagagttcctgtaaacataacaattacccaaagtcttacttcagccaatcagagcataaagtgatctacatagtatgtccagatgtattttgtatgatgatctttaaaaacaactgtgctttaataatatatcgtagtggagatcctaaggtcctgccaacatacttttgcaggcacagtagtaagctctgatatacactttccagcacattgggcatgcagagtttcccaagtcaaattaagtagaaatagaccggcactttccagccagcccactcaacatgcaagatttctaaagtaccgccaagtggaaagaccacgacagacaagtgttgctgaataacaaatcatgatgtgaagg

SEQ ID NO: 140044 - DNA, 272 bp, Zea Mays
gtcgctgtgcgccgtggaggttaaccagcgatagccatacgcctatgtccaatgaatgccacggtagaacgtcacggtgactcagtccctcttctcggccgccagcgcatcttctcaaaattggacgccaccgctgatggactctataaattgatgccccagtgagctccattacgttgttatgcgtccagtgcaccagccctcgcctccgattagccaccgtagctcgcgaatttcaaacttcccccaatttggttctccgcgacgccatg

SEQ ID NO: 140045 - DNA, 646 bp, Zea Mays
gataattttagctgtagtattggcaatttctttgtactcagcttctgtacttgagcgagatacactggagtgtttacgtgaagaccacgaaattaagttgccgtaaaaaaagatagcaaagccaccagtgtttcggcgatcatcaatatcaccagcccaatcagcattagaaaatgcactcaatagagaagaagtggtcttagtaaaacatagaccaacatccagtgtagtcttcaaataacgcaaaatcctcttcacagcaacccagtgagaggtggtaggcgcagataaaaattgacacacccgattaacagcataagatatatccggtcttgtgaaggataagtattgtagagcacctacaacactctgaaatcttgtggtgtcttcaggagacaatagctcaccatcatgaagagaaagtttgtccgtgggtagcatgggtgtgttgacgccattagaagtttccatgttggtgcgcagcagcaaatcattgatgtacttgtgctgtgtgagtaaaagaccctgagaagttatgtgaacctcaatgccaagaaaataactgagggcaccaaggtccttgactgcaaattcagagcatagctgctgtagaagcttatcagtagctgaggtagatgagctgata

SEQ ID NO: 140046 - DNA, 485 bp, Zea Mays
tacctgctgacctcaagtttgggcaccaagattgatcttcgaaaacatagcggaagctgaggccaccaggctggaggatattgatatacttgaggaagaacgactgaatgcagtaatccaatcagcacggtaccagcagactctaaggcgctatcacgataaggctgtgcggcaaaggtccttctcagtaggagacctcgtccttcgccgaattctaatgggggagggacggcacaagctatcacccttatgggaaggacccttcatagtagcagaggtcactcggcccggatcgtatcgcctcacccagacagatggtacagaagtcgggaactcttggaacatagagcacctcagaaagttttacccctagctgtatttcaaaacagccagggcgaccacgtactctgtaaaagtggaaatatgtcatcaataaagatagatttcaaagatactcggttcgtttatgattgacttgcattctt

SEQ ID NO: 140047 - DNA, 637 bp, Zea Mays
aaagctgtgaacttttgtgctactgttaccactgcctgtttaatcatcatctcgtctattgtaatagttccgtttctctagttgttgaaagattatatttctaaatatcattgctcatatgacattttgctgttagggccgcaatttgagcatcattggacaatggtcatgtgactgattatggtggtatttgtgatgtgatatatgtttcttaacatcattgttatgatgctatttgcattgtgatttatgtttctgaacatcattgctcatatggtacgttgctgctagtgccgcaatttgagcatcattggacaacggtcatgtgatcatgttggtatttgtggtgtgatttatgtttttgtacagtctcgtgaatacttagctttgtcagcacgcagagaatgtttgttttctggattagggtacacttgttgtgctgatagtttcttaggtttaggtgcccatctctctcatctgacatgaataatgtatgagtgtcgtgttgtagagtattatgtgaagccatcaacctgtaagctttcataattatccgcacgcaggaggacgtccaactgtgcccagaaaacattgcagctcaaaattgctacacccatatcaaaattgcaagtactcg

SEQ ID NO: 140048 - DNA, 1705 bp, Zea Mays
tagcagcttgttcgaggccatcacagaacagatgaaaatctgagcggcacggagaactgcatttttgttgtcgccaaccttcaatgcaaagatcgccacttatctggcccctttgctctgcaaattggcttcaccactctgaaaccatattcatcaaaactgattcaaagcaacaaatcaaaaaaaagcaacaacagaataaaggtaaccccgataaccacaagcagcaattagatttgacctcaaataaaattcagttcacatcatagttggatctgtcgacccacatcatccaattctcaagaatcactaactccacaaaactcaacgaactaagtatcacattaagcagcacacaaaaaggagacagaagaaagcacacaggtaagtaaaggctcagataaacaatgggtagaaagtttgcttgtcagcccaaagagagaaaaatccctcattcagagtggtgcatgactttgcatcatcattgcccttataacctagctttcctctgcatcacagaaagaaaggggaacaacagaagagataacagataaaaaatcaagcagtaacacacgatggcaatcaaaatataggacacaaaagagaaaacagatccaaatcaaacaataaaaacacatgcagaagaaatgacgacttggccggctccaccagacagacatggtgacgtgccgaggcaaccttagccgctgtaacataatagcatgagtgtattgactacctagtaaagcagaatttaaacaagacaaacaggtatataatacagtttgcttgcccaaatcaacgtgtcaataattttttcaaatctgtaacatagtctaacactgttcaccaacctagcgaaagatagatacagaatcacctaaatagaaaggcatataatgcagggcccaatacaattacacaataatcaaacagaactatctcaaactccaaacatttgccacgcgagagaacgcaaatttaaaagacacaaataatgaatgttgtggtcattggaggcaaggctgtgaggaagcgattgatgagagacccatcagccaaagtacagcctcgtactatgagaccactgcatttactctagggccccaacatccgagcaccccgcagagaacctgcgggcatttcgaagctaaaaggagagcttcccccaaatggcatggaacccttagacataaacaacagaagcatcaaatcaaatacagaacaacataataccgcagcttcaaatcctgattagatagcccttgaaggtttgcatcaccaacatacaagacacaaccactagcttgcattaaaactgacagaggtgtgtccaacctgacatctaaacactcgcatcatgtaacactgttagatattcaagccagtatttgcgtcactgatagagaagcattcaagctgacatgtaaactggtatgatatccaacaaccagcacaccacacagtcgaacggctgaggtgagcaaggcattctacctcggtctagagtcggacactgctggggtcgcttgtagccaatgatcgtgccccgcacgcacgtcatgcgccagaaacaaaacggcggcggggtgggatcacatggctgcttacccggcgggaggaggggggacgtaatcatcgccgccgccggagtgccttacgacgcggttgcgagtaaggggaggggagtgacggcgcggcgaac

SEQ ID NO: 140049 - DNA, 474 bp, Zea Mays
gatccacttggtaaaatactcgacggcgacgaaggtgaacttgaggtttccttgggccgtgggtagtggcccgacaatgtctagcccccagcgttgaagaggccatgtgtgggcgattagctttgtgaattgcgaggggttgctcgagcagggagagaacttctggcaggcttcgcaagacctcgtgactcgatttgcggcgcaaattatagcgggccagtagaaaccttgatggatcaccttggcagcgagggccctaggccccgagtgtgagccgcaagtgccgttgtggacttcgcgcaggatctggaggccttcggtctctgtgacacatttgagcatgggttgactgatccctttcttgtatagctggccctcaataagtgtgaagtcccgacttcggtgtttgaggcgcttggcctcgttgacatcacctggatggtaatatccttgcaagaacagggttattggggc

SEQ ID NO: 140050 - DNA, 507 bp, Zea Mays
ttggaacttgaacagaagtcgcagggcacccccactgctccacatgatgctcatgatcactatcttcgtcgataaagcctgaagggggtggcgaaggaggatccacactgaaagctaaaattccatcagaatgaataaccaccacagaaacagggaacgccaacgtgcaaggagcccagctcccatcctctccaaagacaatcggctctttagcaaggagatccaccaccaccggcagcagctcaggtgaccggcaccagactttcagtatgagaacagacatgtcttcctcctcgactgagccaggaaataatccatgaatcaaacagaaagcaccaagcacagcctcaacagcctcaatcccctagagatgtgcaggaattccacgtagctcaacgctaacgggcacgtggctgaccacttccaaaagtgaaagcctgacgagaccaccttcgaatatgcaacctgagcggagggacatgaagagattgccccccaaccacccga

SEQ ID NO: 140051 - DNA, 879 bp, Zea Mays
ggggtaactagccattttctgtttcagggcaaccggaccaaggtcggttgccaaccggaccatcaagcctcggtccggttgctctccgtcagcttctctgagctcaccacgtatgcttgaccgttacctctgcgcgcgaaaaccaaccggactcagggtccggatgcaaccagactaatcagccctggtctcgttgctccccttcaactccacgcgctctgtgcaaacaaccggacgatcaaccggacttagcacagtaaccagccggaccaacaaagactagagtccgactgggtccagagaggttccagaggactaaaaatcaaccggactaacaaccagggtccagttgctcctttgaatttttcccgcgcacacgtacaccaaccggactcacactcaatggtctggttggcaaccagactcagggtccggttgtcctagacaactacggcatgcaaccggacccatgaaccatggtccggttggtccgtctctctagggtccggttggtgtttttcaacaccaaccaccctaaaaattcgctgaatctttctccacacttctaccttcacccctttagcaaatatgccaactctaaagtaattcaccaccttgtgcacgtgagtttgcattttcacaattattttcaaaaagggttagacggttagctcactaggttctaatgcatgtgcatgatgaagttcacctagtagcacttagacaaccgcgttgcaacgagaattcccctcttaatagtacggctgtctatcctaaacgtgatcacactcgctaaatgtcttgatcactaaacaaaatggccctataatgtatgcctttgccttgagctcattttgttattctcctttttctttttca

SEQ ID NO: 140052 - DNA, 561 bp, Zea Mays
ctccacgcccaccttggaccagaacacgtgcactcgcgccgcacgctgagaaccctggccacgtctcccgcccacgcaccccagctcctttttgagcaccgcccacgcccgcactcgctcccccatcccagtttgcacaacctcgctctctctcgcgctctgcccatgccgctcaacctcgccagagacccacgcccgccgtgccggtcatccagcccgccggaagacacgctaggccaccccgagctctgccccaaggtgagacatctgttctcgtgcttggttttccctattcacgcctacctgtagccaatttggcctcgccggtgtgtggccgcactttctcgccgtgcccgcacggtgtccggccaacccaacctcgcccagtgccccgacgttgggccatatcactccccacctccactggaaccagaccgagccctatcgcggtcgattgcctctcctagcggtcggaattccacaccagaattgtgccgacccgcccagagcctttcctccgtcgttctcccgctctgaccctggtctcgtggccacaacccc

SEQ ID NO: 140053 - DNA, 355 bp, Zea Mays
gagttcctaggtattgtatgctagtcaatctgctccaccaaagattttggagtgtaggattcggtctatgggccatcatttgttcaggacaatcagtgacccagctgagaaagccatatttgtagagctacataagctaatttgtattctaatatgttggtcgagccatattttctaacttaatcttaggcatagcgatagcctagatcactctgtctctccctaaaaagtacagctccaagaaattgatgtgcgacataatgacagctaaggaagcgccacacgaccacacctaatctgaaaagtctacttgaattatttgagtgtgtcatatcttatctctgtttttcttttc

SEQ ID NO: 140054 - DNA, 373 bp, Zea Mays
ggaggcagtggtacttgttgctgctgttgctgctgttgttgctattgcatttgttgttgcagctgctgttgttgtgccctcctttcctggcgtatctcctctcgctcttggcgcaactcctgtcgtatatcttctctttcctgacgcatctcctggcgttcttgctgcatctgggcacgcatatcagccatagtgtccgccatttgctgcatcaccgccatctgagcagcaaccagtgggtcaactccgcctggtggaggattcatctctgtaggctgtggctgaggttgtctatatatccttcgagtgtgtcggttaggaggcaaatcaattccaccacccctcctggtattgaccatctgagttagataca

SEQ ID NO: 140055 - DNA, 370 bp, Zea Mays
gaagcaatgggtttgaattctatccacttagtgaacttgtcaatagcaaccagtacatgagtgtatcctccttgagcttttttgtaaggtccaatcatatccaatccccagcatgcaaatggccaagttacgggtatgatttgtagttgctgtgccggtagatgctgctgtttcgacaagtattggcaggcttcgcacctctgaactaacttggttgtgtcactttttgctgttggccagtagaaacccgacctgaagactttcccaaccatggtcctggatgctgcatgcactccacattgcccagcatggacctcatctagaagttgctttccagtatctgaaagaatacacttcatgaggactcctg

SEQ ID NO: 140056 - DNA, 535 bp, Zea Mays
gctgcgatacatcgaaccggccgtgatacctgaatttggcgaagggacctcctcagcctccaaaacaaaagaagttgttcctcccgtgcagcggactaaagagccggctataatgccgaaggtgcctacagtcaaggtagttgaaacaaaggttgataaggctgaaaagccagaaactgaagaaataacaaagatgccagaggttttgagccctctagtaaaggcaacagtaccgaaggtacaaatgggttctgtcgtaactcctaagaggaggagaatggtaaatgtactggatgtgttggaaacaaccgactccataagtctcgctcccacaaggaaggttgccgaagctgacaaaacgcaacccatagttgatactaagcaaatagaagttgaagctacaataacccaggctgaaaccgaagcagggcccacagtgcctgctgagacgaagcttgccacaaccgagcagagggccgaaggaataactccagatagtaatatagcttttgagaaaagtgcggccaaagaagcc

SEQ ID NO: 140057 - DNA, 550 bp, Zea Mays
ctgaatacatgtatgggagacaatggcagcctagaagtcaagccaatgctagaagacatcatacgcaaggctcaacacctggacactgagacggcaagtcttgcagagagaactcataaagaacaactcccggacctcaggacagatgaagaaggaatcctttggtttagaaactgtctgtgtgtaccaaaaggagaggcacgagaaatcctgctcgacgaagcttacaactcagcctattctatccacccagggactaccaagatgtacctagacctcaagaccagatactagtggagaggaatgaaaaaggagatagcatagtatgtggcctagtgtgacatttgccagcgaactaaggcagagcatcagaagcctgcaggtctactgcaaccccttccagtacccgaatggaagtgggaagaaataggcatggattctgtaactggactgcctcggacccaaaaatggaacgattctatctgggtgataatcgactgtcttaccaaggtagcccatttcatcccagtgaaaactaccttcggaggag

SEQ ID NO: 140058 - DNA, 418 bp, Zea Mays
atcgggttgttcagagttggagctgtatcaaataggccctaactctgttaacatcattccttgctctttcctggatccgccccattcccactcaagccagtagcctatgtaagccatccgctcccacctaatatcaccaacaaccctcctaatgcatgcacaactcccaccatgccaaagttctctttaaagatgaataaataaataatgagggaaaggatcaaaggagcatcaaatataaccccgcactcacgcacccagccacaaacgcatagttgggcgcacaaaatgcttgaatcatggccattaaggattcaccatcacacaaccgttcctaatctaggacaaaaggcacggtgtctactcaaggacacttggatgtattgatgcaagtgcaaactaggtggcaccattcaac

SEQ ID NO: 140059 - DNA, 498 bp, Zea Mays
tgcatgatgtgatgcataatcctgaatatatagaatagcgggacctggatagaatagcacctgagaagagaagtttgtgataagggttgttgagatcgactgcagtaacgtacgtacatgtctgaatgtctctgtgcgtgccattttgtaacagagaaagccctaacggctatggatcacatcaaagaggcttgtgtcttctttgaagtttgaacggcttcgctgcttgccatatggctggtatagaccttgcgttgtggtccgtgtcttttcgtatagtatgtttctataatgcctcttttagagcgtgggcgaattaagacaggggaaaaagaaagggtaacccacccaggatcatgcttcggattggtcgttgtcccccaacaacattcattcattcacagctccaaatggtgcttttttttcagtcacgagccgcgtgtgcatgcatctcgttccagcagcttttgctttgatttcctttcaccattgtaccag

SEQ ID NO: 140060 - DNA, 372 bp, Zea Mays
gtgtggttcttcctccctggctccgctaccaaacgaggagcacctttattaagtagtgagaggtacgttttattttatttccacccacacacacgattcaccacacgagacaattctacaaatggcccctccatcatgccctttctcgaccggttcagtgctcctcttgacactccaccagtcaccactccagctctagccgcccatgaacaaatcaagccacctatctgttccagcgcgatctctcggtttaatttctagcaaaagtcagcacagcaagcattccacttgtttgctaagtaccatgcaactctctgccctatagcagcctagcactagcagcatgtggatcttcatgacgatatcatatca

SEQ ID NO: 140061 - DNA, 354 bp, Zea Mays
ggagggcctcactgaccatcaggcagatgacatgggtacatattgtagtactaagaactgaagttgtcaaagatggctaaatcattctggagctgatgctgccgctaatcaagtgcatgaatgttgtcactggtagatagtgtctcaaactagctatagagagcacccatgttgtcctagaaactttgttgcatggtgttcatcctagacatgataggatcatgaacattctcatggatatgagaacgaagatcagagaactcagagaacaccctatcaaattgatcattgatagagcaaagccttgatgtcatcgatgagtattgtccatccacatgagtctgcagagcatcc

SEQ ID NO: 140062 - DNA, 476 bp, Zea Mays
ggggcctttgccaactcatgagtttggccacagtgttttgcggcgaattttgaaaggctgcaaatgaacttaaattttttttggatatcagttctttctttaaaaaaacgtgagaagattaggataaaccacgtcactatgttggtagacgctttacaatcacccaactgcaaacggcacgtctttaattaatcacctctttttcatcgtctttctttgtcatggtcgatatcgactttcgcatttgtgtcgctaaaagttagtgggcgaaactctgtaacacggacgttcttcggtgtctgctgtggaccctctgatattacttcgagtctcgagtttttacattcaagaccctgcaagtctgctgcaccttcacgcctccatggctccgtcgaaagaaacttaaccagttcagttgcgctatcaagtactaactcagacaatccacacaagtaatctgaccaattgattctttc

SEQ ID NO: 140063 - DNA, 512 bp, Zea Mays
atggatacgaagttgaattttagttcggcctaccatcatcagactgatggactgatcgaaaggactaaccaagtattggaagatatgttgagagcttgagcccttcagcatggtagtagttgagacaagagtctaccttatgctgagttctcatataataatagttaccaggccaatctgaagatgtcactgttcgagactctatatggcaggaaatgcaggattcctctacattggatcagactgggggaagacagttctttggatctaaacttattcaaggggcgaaagaacaagtccgtataattcgggagaatttgagaattgcacaatcaaggcagaagagctatgctgataataggagaagactactggagtttaaggagggtgatcacgtgtatctgaaggtgtcaccaatccggggtaagaggagatttgaagttaaaggaaagttgttcccttgctttattggaccattctgagtttttaggcgagttggggagatggcatac

SEQ ID NO: 140064 - DNA, 399 bp, Zea Mays
ctctcgtgtgtcgcgctgttgctgagcttgacgatgcccttctagctgctgactgtgaatcaaggttggtgccataggtggtggtggtagctgggcccatgtagcttgagaatgacttgccgaagcaactgatgttgtgggttgctggttgcccacatactcagggatatatggcgaataacatgaagtagtctgcaagacttgcttcggctgattctgttgtgcttcggcttcaactatctccttttgcttttggatcatgacttggcacatccttgttgtatgtcccttatcctccccacagaataaacagatcaacctcctgggttgggtgccaaaccttcctccgaagcttcttcctcctctgccccttggagctggtggcctgtaagaggtttg

SEQ ID NO: 140065 - DNA, 748 bp, Zea Mays
cagtaatattataacagtggttttggttagcgttatgacggtggttaggtcagcactcgacacacagctcctgggcctggccgcctgggccattgccgcgtgatgcctacaggtacatcgacttgaataaaagggatcaggcattcgggtttgtacggctggtacccgtacaatagaggttggtgaaaccctataaatttaccttggtatgacaggaaggatgctttaacgacgtgttttaggatctggagggagtatagtgcagttgtatcgtttaacttgcaagcaaggccgggatcggggtcttcaatcttgctcggcttgtgcgttgacagttgcttcgagccttcgacgacgctgtcggtgaagctgtttaagcaagtataataagagggtaaaagcaggataaatgtggaggtggaggacagaatagagaagagagaggaaaagcgggttgtaaactcgtagttggtttagacataagaaccaaaaaaaactttgtgtaggagataagtgagatcctacatctattactacttattaaggctaaggggtagcctgcctctgctttgttctgtcttccgacgatctcaaccgtccaatacgccatagagtctctcccgtccgatgcgcacactctctcccccacgcacacccgctcgcgacccccgttccacatccgctattctgatccaaaaccctatacgacacccgtagcccggatcccatgtcccgctccccccgtcaa

SEQ ID NO: 140066 - DNA, 791 bp, Zea Mays
tggttccaaacttcgcccgaaaccaaatccgagtctgtatgaatgtttcccccaattaaatttcaagaatggtcaactggttagctctggccacggcgacagtgcggctgaccaaaagaatagcacgttcccgatgatccatggcagtccagttcaattaaaggggtcgaggagcttgaggaggacctaaggatgctagaacaagcaacagagggacttggactgacctgagttgagctggccgcggcgaggtctctcctacggtgttcttgtgcggatttgggggcaattcaaaattcacacaccctggtgaacgatcaaggctaattcttggtggttggatgcttaagtaccttacggagctcgcgacggggtcaatttatactacgggaaggcggtggctgggaatttgagcggtgacacgtggcggtcagaggagggggaagttactggcgcacgtgaattcgtgttcaatgtagtggcagttactacggcgatggacagaggactacagcggttcacggtgatcgggtgaaggtgccagggtacgtggcgccaagccgtgcgacggctgtcaccagcgagcttatcttcccaagccgcaaagcacgggggtacggcggtgagtcaccggagttatctccaggcgaatagctattacctggcagacttatcgggtcaccggtggcgtaaatcgcaacggcggcggcgtgaatcgcggcggagatcggtcgtcagcggcgagcactgtgtgctagcgttctgatccttatcaggtcactgtaccatgg

SEQ ID NO: 140067 - DNA, 331 bp, Zea Mays
gtgtctgtggtacttctgttgtcaaaattgcaagaactaagctgcaatttaggtactgaaatgacaacaaagttcagttatatatgtactgaaatgttatgttatatcctgggcatatcctgttgaaatcatgtcctctttatttctgtaatgttgctgaaatgagagttgcaacgcatctatattactgctggaatgattatggattgtagctatatttactttttctcaccaaggacataatggtcacagataactgagagataacagagatggtaaacagctatgaagtgctatcttttaatggtatatttcaatacatcaatctttt

SEQ ID NO: 140068 - DNA, 476 bp, Zea Mays
agcttggttggtcccacagtgcagagtcaggggacgttaagggacgtggatgatgacacctcgtctcgttgatggagactccccttcactcgcctgacatgtcgtggcgttagtcaagatatttggtggcaacatgccttatcgtggttggcgtgggtcagcaattcacactagaacatagtcatgacataggtctctcacacaatcacactagaatcactgatgtaagcatcttatacccattgatcttgtgtgtgcctcatgttttgcttgtgaaagaggtttcatcaatggatctgcaacatttgaattcgtgtgcaccttgaaaatcttcacatcacctcattctatgatctctcgaatgagatgatagcgacgtagtatatgtttggtcttttggtgtgatctaggctccttttcctgtgcaatggatccactattatcacaatagagatccactagactggacgcactag

SEQ ID NO: 140069 - DNA, 552 bp, Zea Mays
gcttcggcgagaggatccaccccttggcttcggagggcccagatatacacgctgagcctaacaatggcgttaggggtcagctgatgaaggtaaatctcaaaattttccaagacatctgcaatcatcccatgcagaggaaatctcagccgtgctttgaagaagctcttaaagaccaccacttcatcattttctgggtttcgggatagtttcttccccaccaaagcgaatcaaccccttgtcggcttctttgaagtagcctagcttcgtcatcatagccatatcagcttcagacacagttgacttcccaaaatccaaatggctgggcttcgatggcatagcggtattataatcaatctcttcttcaccaatatcgccttcttcaatgtctgcctgctccgcttcagtagcaggggtgccttcgttaggagcgccctccgttacaactagtcccgaccacctcataactttagagatcggagcagtttcagtagcttcggtttcctctccgtcgtgtgtaaccctagctgttgagcgcactctggccatttgatg

SEQ ID NO: 140070 - DNA, 329 bp, Zea Mays
cgcgggcaattaatgggattcgtaccagggaaaacaatcagattggagaaccaaccgcgagtgattaacatgaatggtctgtctgtcgcctgcaacgcacaacatcaaatattcagccatctaaggttttgttcgatcgtttaagggttactttaatcatttaaggtttacttgaacaattcaatgtttacttcgaagtacaacagaacaaacattcaattattctaggtttgcttcatccattcaaagtttacttaagccattcaatatttaattcaacgtaaaataggcacaaatattatgctattcaagatttacttcagttattc

SEQ ID NO: 140071 - DNA, 409 bp, Zea Mays
gaagaagagaaagaagaagtcccgctgattcataagaatagccggcattacagaggtagtaggggggatagtgatattccttctccagctcagttcgctcttgtcagccttcaagaactatcaataacggattttgatcaggcccttgaggatgtcgtccctgaggatatgatatcggagccgactgctgatgacatgatggttgtttgttctgagattccagacatgggattagaggtatctcgagcagtgtctcatgcatcatcgactttggaaggcagtcttcgatgtcaagacgttggtcaggattgcccgactcacatggaggtgactgaggatccttcagccttagaggtggttgttgcagaagacctagtcctcgaggatggtgttggcagtcacccagccc

SEQ ID NO: 140072 - DNA, 437 bp, Zea Mays
aacccaaaagagaaggctctcagctgaagcaagacaaaacaatcaacacacattgaagtcttctaagtcaattgcatccatgcttcacaaagcacctgaagatgtggttcgtgagaggcatagcaaggtcaacactcaaactacattgcagcgaaagagcaaggaggagaaggaaagaacatatatgtatgttgttgattttatttatgagtgtggcttacaacctaatgtcatcaactcaagggcctttgagatcatgcttgaggtggttgggcaatatggtcctgggtatgtgaaaccttcatatcatgatgttagggtgtcgttgcttgagaaggcaaagaagagtgtagatgagataaaaaaagactcatgagttggcttggactgaatttggttgcacacttatgtctgatggttggacagataggaggggt

SEQ ID NO: 140073 - DNA, 658 bp, Zea Mays
tcacggtatctggcccggcggcgacgcaggtcatcgcggcggggcaccttctatctcctcactgttctggttcacgccgataatggtgaggtcatgggatttgggcaaggaaaagggtcacggcggcccgagcatggtccgacaatgccaacagtcaccagcccgcagcggatgcagctcgaatcaatggcggcggctggagctgcttcctctctctctcgttcaaccactgcgagcgcggcttacggcttctggacgtcttgcggctggatgagggcacgggggatgggcgctgtctatcatataataggagcccgaagtcgccatgcacgttcgtaatgcacggccggagatacggagatcattgagaggtgggcgagatgcaggagggccgctgaccccgcgccgcgagcggaaatcagttgcacgggagaagacctgacgcgctgggtccacacgctagtgggacagatgcaagacgcggcgttggtgaccgcccgctgggcccataagtcggcgttgttcttccgctgggcttcatgcgcgagattcactaacgggccaaaacgtggaaaagccgacccaggtgagttcttcactgttttcttttcttttctatattcttttctcatttctaattccttattttaaattcaat

SEQ ID NO: 140074 - DNA, 1360 bp, Zea Mays
tcctcttgatgagagttagagtccctctacttacatacatcatccaaatgaatgaatgaatgaatggattaaaaactgagctaaatggaagtgtagctcaagtagccgttagttgattttcaatagtcccatgcatccagcagcacatgactccatgtcgtatcccacacgtatatgtggatatatatccaatatgggtataaggttgaccttacctatccatacaagacagcctatatgcttccatggatagcaaggtctgctttgtggtgaagacattatggggtatacaaatgccagaaagagtgggtatggaggagatgcactcctaaatagcttgttgctaaatacattgactccttcagagctaatgattagtatagccagcttgttcaaaaagattagaacctgacacccctccaagagcaagttggcacaagccaaaagactgaagttgaaggatgtaccgtacatagagatgatgttatgtatggccaagcatatgttaggcgcaatagggccaaggctgcctaggtggggcccaaggcccaatagttaaatagatcagctctatctagttagttatacttatccaaagttagtagatagacttgagatagctctatatatagatctgtaaactcttgaataaagataagcataataccaatttattctggcttcccagagggagccacagtctcttgtgatcttctccctgcgcgcgatcagccagcatcacgacggcgcccagcgccgccgccctggtcgcgcccaacccccaccctacaatctgcgagatctgcccggtagaatccgtagttctaccaatctggtatcagagggctcgacgatcatgagttcctccaagtcgccgtcaccaggacagcagccgccgccagccacaagcccgcacgcagcaccggtcgtctccctggccgcggtccctgcgccgtcgggaggccatggcgctcggccctcccggcgcggccatcaaccagcaggccgcccccgcgctcacaccggcccagatcgcggcgtcattggcggatctcagccatgccgtgcgcgatatgcagatcaccatgaacgccatgctgacaggccacctcgccttccccaatccacaagccgcccatccaccccagccgccgcacccgtccctgacggcgcagccaccgccagccgcactgcccccacccacgcagccacctgtgccactccctccactcgcccggcaaccaatctcttaccagtacgacatgtcgatcgaccccgggccttcatccaccgcaccaccgaccacagcccccatccatatgatccgcttcccaccatccccatcccccatcccatcttg

SEQ ID NO: 140075 - DNA, 437 bp, Zea Mays
ggggggtgaggtttttaacgaggcggagccatgtaatatacctgcaaaagcccccgcaaaaaacaaaaactcagatacaacatgtcaaaaaaaagaccgcatcgacggtcttcggcattcgaccactccgaagtcactgcgagaggcagcgtagactaccctcgtgtgcgacactccgcgcaaaagtcgcctaagggtgcagccagaatagcacaacaagtgcattaatcgaagtctctcattaaaaagacactccgcgcaaagtcgcccacgggcgcagccaaatcaacacaggcgtacgattacggccaacaagccacattaccatacaaattatagttacatacacacggcgagggcatcacatattacatcggctcaaccttcgggatgatacccatctccctgtaattgaacagcattatcctcaattcctc

SEQ ID NO: 140076 - DNA, 386 bp, Zea Mays
aaaaaatttaaccatagctgaagctttgtgtgctgcgccttgaagcaaactctttcatcatttaaggttaacttcgtcaaacgggctagcttcgtcaaactgcaaaaaatccatcaaaatggctagagtgcgatcaactacaagggtgtctcgtgagggagaagaaaccgaggtcactgggacagcactaatttcagaagtcatggaacgattaggtctagttgtgacagagagaactattaacgaaggtactcctgatgccgaagctgaacagactattgttgaagaagaaaatgttgatgaagatgaagaagattacagtattttgatccccacaaagcccagtcatttagattttgagaaatctattgtgtccgaagacgaca

SEQ ID NO: 140077 - DNA, 1132 bp, Zea Mays
ccgcttctctgtctggacgtgctcaggtgtggcgtccggtctccagggagtcctcttcggtggcgactcctcccggtgcgatggaggcagtcctttctagtgggctgaagaagcgcactcgtcgaggacagaggaggaggaaggttgctggtgttgtttctggtcaggtggcatctgatcattcgcctggagggcctgctcgtattgtgaagttccttcgtcgctccagggagccctatttaataagtcaaccttccagttaggtaatctgtcagcaatcttatccaccaggggccagagttgttggttggataatctatgaagggatagaggaaggcccagatatttgcaggggaaggaggcaatatcacaaggtaacatatgctggacgtccaagatagtctcctcagagcaccttatagggtaaatattggatttatgagtattgttatgaagcccagaggcatctccaaagagttcaagaatatccagagtaatggagatatccgactgaatggggtgcaggaacaagactacatcatctgcataaattgaaattctgtgaagatttttccccaaataaagttgttgaagtaaaccagcctcctcagccctggagaaaaggacccctagaacatcctgcttcgacgaggagcagccaaccctaaggatgtcactttcctccgactgggctttggaattgggagaatttcagatggccttttactgattttgttgaagaagtccacccttcttgcttcgtcttgtgcctggtcacttagggacatatcatctgaagcaaggaccataggtccaagaccaggttcaggcagggccagcattggtggctcagcacctggaactaaattggaaaccagagcatccaccatccaagttgtcgagttcctttggttgtcaggcatctgtcctgtcattgccttcctacgtgagtagacctttagattgtgtgaaacaggaggtgggacgtcgcaaattcctgtctcaggctactcagaagtaggctgaggcgagacaggcacatgcagggtcctctcaagccatccaacttccaaatggggcgagacaggcactaggggcgtcgtctctggcgacccaggtgtatgctggggcg

SEQ ID NO: 140078 - DNA, 446 bp, Zea Mays
caagtccgagccggggcgagcagcgaggatcgcgcccgggagcacatccatccggtggatccagtcaacgcgggcgagctccgcgccttcggttgcggaacagaccagaggatagggacgccccagacgcgcggggtccacaggcagcgagtgtgcttgcgcaaacgacaggagtggccagaggctgacaagcaggacccgtgtgtaagtgtcaccggtaaaaaggaaaaggaggtagcgtgggccgaacagggggaaaggatctgtgggtggtgggctggcgcgtggagaaagtgggccggccaggaaaaatggcccaagcgcaggcttccattaatcttttacttttcctttttctgatttatatttttcccatctcatttgaattcaaatttcacacttaaatcttttggtgaattcttcttagattgaaagtataatttgaa

SEQ ID NO: 140079 - DNA, 706 bp, Zea Mays
ctttttctgttttttttcatgatcaacacaatagatgaaaaatagaagaatatataaacacaagatgcagtgattattgtttagttttctaaacattgatgattacagtatatagtttactaatatctcacacaaaaacagaccatagttatggtttttcctcatcattttcttctaggtttgagtctactcctctttatattttcagctctctatgccttttcaacaaacagatgtaactccacttcagggggaaaaaataaagatatgagaccatctaacatagaaagtacatcaagaaaatctagttttttttaatatagagctgctataagatggaggctacgaagcagattttatagagcagtcactgacagaccccctaaacacccggatctgtcttttgaggcgccaaagattcgctggccgaaagcccttgactcttggatgcatggccacctactagctggctgctgcatcgctaataacaacgcaggatcgcgtagctttgttgcattcagaacatggctagctagtcgctggcattttgcctagcctagctcctgatcggagctgactgtaagcgggattagtttaagcaaaacgcggtcaagagaataacaggaccaccgcctaacacgccaatgacgtcatgcatgcaaactaacgccaatgacgtcttgcaaaatactgtattgggtctccg

SEQ ID NO: 140080 - DNA, 647 bp, Zea Mays
gtcgggtccttctagtgtcctttcccctacattggaccacattaggggggtctggcactttcttccatacaatgcttcgaacggtgacattttgatattggcctgatggctgttgttgtatgaggattcggcgtacgacaaactggactcccaattcctgtcgaacgttaacacacaggctcttagtatatctttgaggaccctgttgactctttccgtttgaccatctgactgggggtgataagcggtgctgaaatctaacttggtgcccatagcttgctgaaggctcttccaaaatttcgaggtgaactgcgtccctctatctgacactatcttccgaggaataccatggagcctgactatctctttaagatatatccgggcaagggcggctcctccaaaagtggtttttactggaatgaagtgggccaccttggtgagacggtcgattattacccggatggagtcattccctttctgcgtccggggtagtccggttacaaaatccatgcctatttcctcccacttccattcaggcactgggaggggttgcagtaggcctgcaggcttctggtgttcggcctttgttcgctggtaggcgtcacaccgggccacatactgtgctatctccttcttcatccctctcc

SEQ ID NO: 140081 - DNA, 434 bp, Zea Mays
cgcaacgcacaacgaagcagccatcaatccttccgtatgaagagaagctagcggctcattgcatgtatgaatcactttctgcacactgtttccaaatcatgtcaacatcgactcttctgcttggctctgagaatccccaaatctcatcagcaccagcacccactccaccctcccaatcctgtcaacccaaacttccctcaaatctgaatatcaaatcacctctccaatcctccccaaatcccgctttgccctgatgatccctaaatctcatcaccaccagcacccactcccctctccaaaaactatcagcccaaacgccccactcaaatataaaggtatgtgcaatttttctttcttgcacgacgggagcaagcttacgcaggataacgatgctctgggtggaggctggggccgagtgaatcaaataaagaggg

SEQ ID NO: 140082 - DNA, 356 bp, Zea Mays
catttctgaccccaatcaaactttactcccttcttcaacaactcggtcattggcttagcaattctggagaagtctgggatgaatcgtcgatagtatcctgccagtcgcagaaaactctgaatctgtcgaacggtggtaggaggcttccaatccatcacctcttgcactttctcaggatcaactgctattccttcctgagaaattgtatgacccaagaacttgatctcccttagccaaaaatcacatttggagaatttggcatacatgtgatgatcctgcagccgctgaagtactatgtgcaagtgcatcgtatgctcgttttcatttttcgaatataccagaatatcatcaatgag

SEQ ID NO: 140083 - DNA, 371 bp, Zea Mays
gtgtgtgcaggaacatgttgctgctgaagaatgtgatcagcctgaatcctaacgcggaggacgtgtcacagcagaggttgctcttgctcgtggccgagcgcctcgtcccaacattcctggacaggttcggtcctaaatctcctgagatctggatgttcgtgttctatgcgtcaatgcgggaatggcgttgtgttaggatgcagcgacagtttgtgagctggcatgtaatagtttggtttgttgtttgtggcatttcctggcgtgttaatcattttgattcaaaggtcaaggatgaggggtatgttaacacccgggagcagaacatcacagatgctattgatcttttcctgcacctcacgacaggcattgcg

SEQ ID NO: 140084 - DNA, 570 bp, Zea Mays
atatggagctgtttactgtgtttgctggagttggtcttaagccttaacacgcatgcactgcttacgtataatacacgccactggtacgtgctttacgtacatgcagattctttgggcactgggtgaggcggccgtgagcccgtgagggtcacccacccaagtgaatgggacttgtaggcgtagctcccatcaggctcttcagcccgggtcaccttccctccgctcagaacaccagtaacattcatcccccttcctccccgtcgctctccgacgccgctcccttgtctttccaacgtcacatcccgatccgcccgtcgcggcccccagatctctctctgctttagcgcaactcgcgctccggtgcgcgtccactcatcgcgatcgcctgctcgaccgatcgatagctcaagcacgacgagaggagagctacctatcgcagttgcgcgtcttccttcttgctcactctcagtctcttgctcgctcgccagctctttcccacttgcatggatccctccgggcctggcccgtcgtcggtcgtgggggcaggaggcggcgaggcaccggccgtgg

SEQ ID NO: 140085 - DNA, 486 bp, Zea Mays
cgacacttctttgacatcaataagtcggtaaaaaagcatctcgttcgatcgccatacaattaaactactaaaaaacatatcccttcgctacaaattgttgggccgtctttgatgaatcacataaaataggagatgcaacactttagatgccattgtttttgtagaatgaagtttgaaataggtaatgcatgttaagtgcccgcaattgcaacaatgaaccaaaaattaaccatgctgatccccacaatttccgccgttggtaattaactagtgttatgtcaagggatcagagtaaatgtcaagggatcagagtaaatgtcaagggatcagtcataggacatgaatgtcttgtttcaattgaaggtaacggtggagaggtcggaaaactaaacaaacgatgggacttttgaaggcagcagcagtatgagaccaaatcaattataactgcagtttagaaactcctatatatttgatatggttactgat

SEQ ID NO: 140086 - DNA, 377 bp, Zea Mays
gtcgagaaccaaacaggccctagccatcatacaacaaatggctcagatcatccgaggtaattcaagcttgatatagtatatcggccaggtttggtcaagtaggagaaacaagagtaaaactcctttggatatgcagaaagaagatttagggaccataggctagaactctcaccagaataaagataggagggagagctatcgagtcacgatgatcagtttataccacaagttgtattcctcttgtccattatgttcgacaatcaccacatacaagagcatatagcgcattaagcagaacgtgacctaaacggtcaaacccttataaattgtccacgtgctggttctctatcattcacaggttcaaacacaccgtcaac

SEQ ID NO: 140087 - DNA, 2123 bp, Zea Mays
ggggcttggatgatttggaaactcagaaatagagtggtgtttgatggtgtgacacctagtctctccctgctgctggaatctgttcatgaggaaagggagaaatggcaagttgctggagcaaggggcctgtcctttttagctggctctagtactgctcttggaggattgtagttgtttcagccaggattcctccattggctccagcagagggggaggaacacaaaaccagagaactccactcccaacatagataaaatgtctcctctactaatatattatatatttgtctcctgacagcatacaacatccacctgaaaggtgtcctccatttctctgacaacatccttcctaacagaagaaatgagccctctaacattccaaataagaatctttgaaggattcgtaggaagaacaaaaacaacaaacaaccacagggggaatgctcctacagatctactggtattgaccagccaaacaaggcagcgagggcctccacctagatctggttaagagggtggttaaaaagaacaccatatttctgcaaggcttccttattcatatcttcactttctgtgatgatttgcaagaccctcatagcttttctggaagtcctgcttctgcaatcatacatttcaaattccacactaatgccggcaactcttctgctgcgcctgggagcattaatcacctgagatgatgcagtcttcagggaaggcttgggagctgggagaagccctgccgtcttcctgctgatcttgcagataaaagcatcaatgccactatcgatgcagcagtctgaagcttggtcctgattggtatgagtttgagaatccagggcaaagtccacgctaagattcttgcccaagtcattgcatcttcctcctgtcaagccaacatccacatcttgatcctgaagggggttctgttttcttcttgtatagactttggttatggaggtgtgtgtctgcatgacagggagtgggggggtggaggctctccactcttctcactgtcgcatgcgacttagcagcaggtcaaggcgagacaggagggaggggcacaagtgtcaactggggcgagacatgccccaactcatgcatttctagcgacccagcaggctgaggtgagacgacatgagggcgggccgtctccggcggcccaggaaggtggtccaacagtaaagcatcagagggctggggcgattcccgccagctggatccagcgacccagttgccgggtattaggcatatatctatagccggctgtcttaccttgtaggcatatatctatagccgtctgtcttaccttgtataggtgacagccttcctagtttagccttaccttgtataggtgacagccttcctagtttaggagattgtatccttgtacaccaggccacttggctatatatatgagaagtcacccacctgattgggtgtgcggtgctttcccctaaaccaactctctacatggtatcggaggaccaggatcaattcgatccaggccttccttccgctgccctctgcttcctctcctctcctccatgtctgagccgaccttaggcgccagcgccgaccttgacgccatccagcagctcatggtgccctcgtatgcacggttttcggttcaatctcatgtaccgaccaagctggagatgaaggcctccaactacccccggtgggcatccttcttcaaatcgatgtgtggcaagttcctccttcgccaccacatcgacggctctgctcccccacgcccgcaagacccgatctgggatcaagcggactgctgcgttcgcagctggatcttcggctccgtcgacgactccatcctcagcctcgccgtcgacggtgacaaccagaccgcccgcaacctttgggtcgccatcgagggtctgttccgcgccaacaaggccccgcgggcaattctccacctccacgacttccattccatgacccaaggcgactcctccatcgacgagtacgcaatgatcatgaagcggaaggccgtcgatcttcgggacgtcggccatcccgtcgaggactcgcagctcgtcctcaatcttctccgcggcgtcaatccccgcttcagcaacaccgcagacgacatcgccaactccaccgtcc

SEQ ID NO: 140088 - DNA, 994 bp, Zea Mays
gggtcccaatcataaatattaggacttataattccctatagcactccccggacgacaggtttatttcgaaataaggcagggtctctttaataaaatcgcccgcggcgaaggggtatcgatgatcgcggaccgtagatcgcttgatcagtggtcgtgatcagattacgaaccggtataccacgactgccctcagatctcgatccgacgcccgagacctaatgaaggcgtgatctatttcgaaccgtaggatcacgatctaacgactcccttttttaccaaaacgaattggtatcatctgatctaatctccaccgctcatcacccgctcaacggtccaccagttgtcttcttcctccatcagctcagcacggcggtggacgcagagttccacccagaccgcacaccgacacttgcgaaacattgacctacacacggatcctggccccggacccgaattaatcgaagtcccgaccatgctgaacctattgacctccatcacgccttggcctagcatgctaaaaagtcttgcacaacgcaccatggctccgcatagcgaccatgatggagagccccgacacagggcccccggcgccttcccaatttaatccaaagggcactaatcgtggcataggtgaactcgaaccgcttaaggagatggttaccgtgattatgggtgatggtgtggacacgagcccaaccgcggccatgcagtcccctctcttttcttctctgcgcttggtggcgaggcgtattatgggtcgaggtagccgtgatgcttgggttaaatagacgagcggagcggattagggaatccatgcatcgtccataaccataccgcgatgaatcccatcggatttcctggaatcacgcgtggtttgttacggtcggctttgggaagaagacgactgacagcacggccccacccatcagcgagacggtgcgcgcgcggaacgggagggactgacggccgggccccatgcgtcatttgcaccagg

SEQ ID NO: 140089 - DNA, 533 bp, Zea Mays
aacccagtgcctgcatcgtcgccaaaaccaagtccttatcgtgcaccacgtggtgacatcgaacagagagaatggcacagggagcatgctgtcgtagccctcgcctgcgcgaccgataggaggtcgtgtaaggaatcaggatgtatcacgtgcatgcaaggattgtgcccgggggagcatctgggcgctggagccttcggtggcgccaaattgattcctcggtgcgactcagccacggcggagccgcaactcaccgtggaactcgcacaaggaccaacgtcgaggcctccgtgttagcctcgggagcttcaccaagtgacggggggttccgtggtctctcctggtgggattagctagtgatgcctcgggaattactcactggagcaattccgccgccgcggatctgcctccgatcgtggatggatccctgcacctcgtcaatcaccagtaagttgccctcccatgggttcgccatcaactgctatacgtgaagcgccccttttattcggagtgttgtgcgcagagtcgggttc

SEQ ID NO: 140090 - DNA, 323 bp, Zea Mays
gtttaaaaatgatgcagatacaaatgtattgtttaaccaccttgctactaaggaaataatcctgctactgaacaaataatagatcacatcattcacctagaaaaacagatgatgtcccagaatctaatacgtctagggataagggtcgaatctattcaacatagtcgaaaatgttaattcccatatactgacatactgtattgtgaacaagagataatgtaatccatagtaagagggacagataggagaaacttagaaacccaaagctctaaatggtaattcaatttaacatggaggcacaggatcatataccacacatcgac

SEQ ID NO: 140091 - DNA, 471 bp, Zea Mays
ggatagaattcctcgctgatctgatagtaatgggtacttggatgtaaacatagatgccatcctagggatgaattggttgaccaagtactaagcaggccttagctatgacaagaggaatgtgaggttggtgtccttgtcaggagaagaagtattggtggagttggtcttgtctaaaccaaggaaaggaaactgtcaccagatagcttctcatagcgaggcagtcaatccgctcgaagtcatcaaagtagtatcagaatttccagatctgttccccgaggagttatcaggcatgacacctaagagaaaagttgaatttgccatagagcttatcccgggcaccacccctatttctaagagtgcttatagagtgtccggactggaattggtggaactcaagaagcagatagacgagctgttagagaagggttacatcagacccaacacctcgccttgggccgccctagttttgtt

SEQ ID NO: 140092 - DNA, 319 bp, Zea Mays
tttaaatattagatagtacttcttctcaaagaaaaacacatgtcctaattaaagtgcacatgcaccttaaagaattctattggaaagaccagcttatggtctatgtatgtgattgaaaacgtctcctctctgttttgtgctaacacggagtagcatcaaatttgatgacagatttaaagcctcatcccatatacaaattccaattcattgttcacttttaaataaaagttatgcatgggtggtgttgtactgttggcaaaagagcccgggcgcctgtctgccccgctcaggagctcaatcccccacaagaaaatatgat

SEQ ID NO: 140093 - DNA, 642 bp, Zea Mays
aatgtcaagctcgcacttagacaatgctatcatgttcctgcataaaaatcatggcatgcatgaattccagaatgaacctttgggaagtttcttccatcacgcacagtgaaaagcctactcctttgctgaatatagctaggagggctattcgtgcagctgtttatccgacggctgtttgttgaattaaccagaagtaaaggggtcgatggtgctgatattagggctgtaaggcctaaataccaacattcagcttgatctctatctttgcagacctggattaaatcatccccaaataaaaggttatgtaagttaaataagtaaagaaattacaaaatttaaacaacactgggctactccatagtcaataccaagtcaagcgaggattcaccattcttgtatataattgacaaggagtgagattccttttctggccaatgcagacgcaaaagttttgtctgcaaaatattgaattctcagtaaatcagtgtcttaggaccctaatgtgttactactaagagctaatagcatatatttggaaagggaaagttgcatacagtcttctgtccaagaactacactgaacactgaattcaagcttaaatgtttccccctatttttggagtaccatattagtgctctctca

SEQ ID NO: 140094 - DNA, 542 bp, Zea Mays
agccactgaaggacagagcgtacccggcttatttgtatagtggtgtcactgattcaacccgggttaccaacaagaggattcctgctatggatttggtaagccgactggagatgattcttaggggcgaagtatcgaatattggtgctcctgttgcatattctgcctggaatctaccaccttccaagactttttccaatttcgtgtccaatcctcctgctagtgatagtggcttgggtcttagagtgcgaccctctcccaaagaagtcgaggctctggttgcttcacttggtgatctccccaatgatgagaggaaagttcactttgagatgcctataaacccaagcgatgcagagataagcgctatgctggacatgttggctgaggattcttctgactcggtccctgctgaaaccatagctgttgcaactatcccagagcctgaaaggaccttgaatgctcaaaaatctgatggtgctcgcccaaagcgccttcgcccggccagtcatccaactgctcctgccgaggggaagaagaagaaaaag

SEQ ID NO: 140095 - DNA, 460 bp, Zea Mays
cataggcgggccggcattaattgcaccaacaagcccgctagagcagcaggaagattgccattcagactctagccccacctgcaggctcgtctcctcccctgaggcgggcccgggggccactgtcagtaccctcaatcaggggtaccttctgctactgcataaaggcgccgcacccgtgcaacgcattaagaccacgtagagaatggcgcccaatgggcagctccaagagcaccacgtggcaaggaaagagagtacatcccggtgttcatcgctaggtccggacccccgcagaaggacaccggacccctatacatacaagtccagggccccaagaaggtatgccggatcccttggaaggccccagcattggcaaggtctcgggactaggaggaccccagcgtaggtaggggtctggtgctgacacgtgtccagaccttgtccttggaccgcccactgctgc

SEQ ID NO: 140096 - DNA, 756 bp, Zea Mays
ctagtgcatggagcatgtagtacagaagtagcaaccagccaagctactctccacggaagctctactatcatcaagctcaaccagctagccactgtgtgtgagctcatttctagacacgtaccacagtgtgtgctattgtgacgcagtggatgcgtgctagaaagtccgtgtgtggctgtgtgtgcattgcttcgaccgaggcagtactggtcataccgtacctttcttggatctgaagctcagaagaagctagggttctctcatcaggttacaaggtatgtactgcatgatctgataccacccttcactcacttagcttatcggagatcgagttcataattgctacgatgatgtttgcaggctaattaacctgaggtaagaaactgaagatctagacatcagcagctggtgcagctagtagcagcaagcagccaggcaccgtcacttcactagcacagcctaagaacttcgaaaggccagccagggcaggctgtgttgttgtcgggagcagcaccaataaacggttgcgcctccgatcgagagcccacacactgatcgggagatcggccgctacggcgctatacctctaactgccgggcgcgaactacgtgcatccatggcgccgccgagctcgtggtggggcggcgaggaccaggacggcacgccggtggtggtgaagatggacaacccctactccctggtggagatcgacgggctcggcgtgccgcccgccgacaaggcccggggcaagaacgc

SEQ ID NO: 140097 - DNA, 515 bp, Zea Mays
caagtattgtgttgtcgttgggctgtcagtgctctatgtggagttttttgcatttcttcgatgaactgtgccacacataatgttattggcttcttgtcggttttattgctccattagttctgtagattttctccctttcggtggggtgcaaagaatgttagattacatgattatcttttcattatggcaagtacaaggtttaggaagactaggagttttgtttcaatagaactaattctttcgtggtgctgtgaggagaggtgtttgatcttcttatacattcatctggtgtggatgtttcaccattaaattaaaatgaattattgaagttggtaaaggttgtgcttggtgcatattaccccttcatcaaagagtgtcgttttaagacattgatgcagatgtatggctgcatccaaattcgatgttgtgaaatcgtagtgttgattgcatctatgacttggtttgagcttcattacatgttggttcatgcttgatgtcaggtggtgtagtttcct

SEQ ID NO: 140098 - DNA, 577 bp, Zea Mays
gtccctaagtccattgtttcagatcgagactccaaatttgtatccaaattctgggagagtcttcacaatgcattgggtaccaagctctctcttagtgttgattttcatccttagaccgatggtcagttggagcgaactatccaaaccttggaagatatgtcgtgtgcttgtgttctgtcttggaagggtagctgggaggatcatctcgccttggccgagttcgcttataacatcagctaccaggctaacatcaagatggcaccatatgaggccttatatagcaggcggtgtatctcccctttgtgctgggagactttgggagagagagatctctgtttggtcctgattgggttcagcagacatttgagaaggttcgagaaattcgtcagaatattttggccgctcagagccgtcagaaaagttatgctgatgtgaggaggcgggacttggaatttgcagtgggtgatcaagtccttctcagggtatcacctactaaagaagttgtttggttcggtgcctccgggaagcttagcccgagatacattgggtcgttctctatcttggcacgggttggcag

SEQ ID NO: 140099 - DNA, 320 bp, Zea Mays
gtcgagatgtatgatggatacactaatccagtagaatggattgagatttactgtttatctatcatggaaggaggaggaaactcttttgtcatggcaaattattgtatgcatcggggtttatacgaggaagtggttgtttggactcccagctaagtctgttaactcatgtgtaaatctaactcagtagttcatcaacaatttcagcataactcaagacccggtgacaacttagcacaatcttgaacaaattatctagatgaaagactagtccttgcccgattacattaagaggtgcataatgtgaagccatcatttacggc

SEQ ID NO: 140100 - DNA, 514 bp, Zea Mays
ccgggggtcagtaaatatcacaccgtggatatgctcctgccactaaattactccgaccaccgtacctgagctagtcacggttgcttcggatgagttcaccggagatagccgcttcacggccttgcgccacatgccttggcacatccaccgcatcgtcgtgactcgtattagccgtccgttcatcgccggggagcttgccacggtaataggccacgaatcaccgcgccagtgacttcctatttctccggtcgccgcgcgtcttcatccaattccccgaccaccgctcatgactgctgtaaattaagcccgccgtgagctccgtagggtaattacccatccatagcacccacgcttgccttcaattgtccaccaacaaccgcgagttgctctttgcccccagtctatgtttccgcccccgttgaaacacctcgctgtggccagcttgctccaagttagttcaagctctctggtcgtttgttctagtctccttaagacctcctaatgctgtttgacc

SEQ ID NO: 140101 - DNA, 659 bp, Zea Mays
agaacttgttgcaagatgtaggtctctagagcctaaacaaaggtaaacccttcatgcattgagtgttaaccaccaaagtcccacacattgaccaatcgatcgatcaactaattactcatcatggttacaatctcataacaccgagcaatgaaaaaccttgatgcctaggtgaggcaccttaggtcaggctaacaaccatgtccctcactcggaaacctagaaaattaccgagcagtcgagcccaagctctaacactgatgcttgcgatcgatcaaggatgactcaagggaagtggacccatagcaacgttgggaatctttttggcaagctctaatgagcgtcagatgcctgacatgtgggtagagccacatcgcccatggccctagtagagctatatcccctcaccttagtgaggacttatcgatcactctagacaaggggtcacacagtgggcatgatgcaacatgacagaatgattgtgtggcctctccatgttgaagaggagatgagactgtgggatctatctcccatagggaaacttctccatcattgacataggttggttgctaagaggaggaaaaaccagatagagacaacaccaactctaggctctcatgaccggttttagacctctacatggatgccatggatggttccag

SEQ ID NO: 140102 - DNA, 536 bp, Zea Mays
agcgaatgcgtgttggcactgcggagaccccagtcacttcaagaacaagtgcccccagttgaaggcactaggacctgcttacttcaactcggtgaatggccccaagaatacctcagcacccgcccccaaggcgccctcctccattagccagtagaacaagacccagtatcaaggaagggcacgagtaaatcacgtcgatgctcaggaggctcaacaagctccgggagtagtgctcggtgagttccttgttgaatttactcccgctattgtacttttcgattcaggagcatcacattcttgtatagccactagttttgtggaaaagcatggcatcccctctacccctctagagattcccttggtcacccgaaccccagggtcagaccttctatgccagctcaaatgctccaaagtcagaatccttttaagtggggtagtgttcttggcagacttaaccgtcttgccatcccaagggattgatgtgatcttaggaatggattggttgaccaagcacaaaggtatcataagttgcgcaa

SEQ ID NO: 140103 - DNA, 334 bp, Zea Mays
gtttaagattagagaaaattctgacagtaaaaggtaaagtctacttatgcactgacagaactcaagcatttgagtaagttgtaacaatataaatagagttggatagctagagcgactctcttattcactgtgcacgatatctttattgtgtgaacattcacttcctctgaaatgacattcacatatgtgtgctaaactgctaattgtcttcactggtattgattgttgtcctaatttgaccaacgtatagcctaatggagggcgcttgagtcatgtggttgatgacaatggtttgagttgagtttgcagtggattttattggatttcgtcccgt

SEQ ID NO: 140104 - DNA, 584 bp, Zea Mays
tttcagtcgtccgatcgggcacgaatggcccagattagattggccctgattaaatcccgctttcactcatcaccgtcggatccgagatccatggctcagccccgtacacgcacaacttgcgcccgagacattcgatcgaatcacgacggttacgatataacataccaaaacgatacactggttttgatcctgacccttcgtttagcatccgatggctcgcccgtgtcttctccacaaggcggcgacgccggcgtcagctgtgctcagccccgcatcgccccggtggagattcccccctccggcgaaccccaaccggtgttctagagcctcaaacccgaatacgattgaacaaacgcaagctatggacagctataatccaatcgagaccataccagcggtttggagcagcggaggcggattggccgcggtgggaggcgattagcgaggcgcaaagaatgtcgacgaacagttctccacccaaggctcgccctacacacgtcgcagcaccgcaacttcctccggcgcgcccccgcgacaatcccattgtgtattacgctctccacacaccaacgtcggtggtaaac

SEQ ID NO: 140105 - DNA, 384 bp, Zea Mays
acctcaccagcccaagtatcttaacattccactggcaggaaacgtacaaccccaatcatcgaaaagcagaagcttctgccacagtggcgtcacagctatataggggcagggcagggcagggtcaggcaggccaagagaatcgaatccctgcataaaaggggaaaccaatccttcaagcaagaacgcgcggtacaatcagcacgcgtccttgcgggggcccccacgcgaggccaacttgcaagcacagcacagtgcacccgatccgatcaccgtcatgccagaactaggccagtgcattgacgcgggcaagtaagcgtactgtcctatactcatgtgtgcgcacctaccagagcttaattgacgccgtatcttctactcatggac

SEQ ID NO: 140106 - DNA, 375 bp, Zea Mays
gtggactaacagtccttggagaaataagaatgcatggttggaccacatagaacagaaaatcttggagatttataagcattggttgtggatcaagtgaaggcaaaggtataacataggttttgtttttgccggtctccaggagtttagagaagttatttgaccggattagtaggctagatggtcgtactattaagaggggtcaatgacgtttgtctgtgtaaaacttagtgcctcatagagcatctagtggttgcatttgcatgaggactaacaacgcttccaatttcaagagttaaaaatattttcaaaagcgtgtttgaaaattgctaagtcttgggataggcggaccatccgggccatgtgggtggaccgtcc

SEQ ID NO: 140107 - DNA, 706 bp, Zea Mays
ttacaccagcacattacaagcataagactactacaggtagaactacgcgagagcgttccccgaggtactaccaaactccttctctaagatatccccaaattccttgagaagatcatcaaggcttgctagggatatatcctcggcgtcggaccaatcatctactctggggggaggtggggctggaggggtcttcttcttctctatttggcatcctcggttggtggtcttcttctggattttcttcttgggagcgagcttccttagcttcttgtcatagtccatctttaaggtccgataggcctcacgggtgttggcttcctcgccttctgctatgtcgagactctcctggagggatgccttctcttgcttaagctctttgacctgctgctctaggctttccactcgagagtttaggtgggtgcagtgagaggagagctcatcgtagtggttgtcgagggtgtggaggtatccagccatgtagacgataatggggtcatcttctgtgggatctcctcctgacagagcctggagtcttttcctctaggtcggggtgtttttgttgctgggtgggaaatatcggaggggggtttcagagatctctcggctatagttttggcacagttgtttaagggcttttcgagcaacgccctgacaggtgtctgggaagcggtgcccgatgaaggtaatttggaagggagggtggttt

SEQ ID NO: 140108 - DNA, 569 bp, Zea Mays
ggggaggggctcggtcggctgttaggggaggccgatggggcgtgctccagttcttgtcgtcgggggcgcggcgtcgggctccgggcggttctcaccgacatcgaacgacggcattggggctctagcagtggcgagcttcgggcggcggtggtcggtgtgagcaaagaggtgggagcgttatgagaaagctcggggaggtcgggatcggatccaacggggcgtgtggctccattttatagagaagagggaggatagaggatgccaaggaaggataaggaaggttagcggctggccatcaagcgccattgatggcgttggtttggtggggagagagtgggggagaggaagagggacgactggccgtttttggcacaatgacacgaggcggtgagggaggcgagtggccggggagagggagaggcatggggtaggctacgcagcggggcgacgctgctacatgctcacgcatgagtgcctaaggctggggtcaggaccgaggagggcacgaggccagggtggggcccgctagcagtgggagaaggggagatgaagggagggagtgggagcgt

SEQ ID NO: 140109 - DNA, 404 bp, Zea Mays
cagactaacactcgagtactcgacaaacaggcatgccgacatgcagttaggagccttttttctgagtattttgtctctagtagtgttttggtttttgtccaaccaatgacaagaattgcgtccgcggccgtgactacacgtgtccaaatggatcggtccgatagtgggcccgtgattcggcaccagcatggttcggctcgactagaaacgtgtctggcccggcctagcctggtaatcgtgctgggcttgagtcaccgtctggcccacgatgcaggtataggttcgatccagttaaaggatagacatggtaatggctcgcataagagactggtttggtaacggtcagtctgttcttagcaacaagactgatgattctattattattatacgagagtattctgaat

SEQ ID NO: 140110 - DNA, 507 bp, Zea Mays
aggaaagaaaagaaaaactgccgcttcggccaccactgctgtgccgaagggcaagaaaataaaggttctgacccaccgaccgtgatatattgaaccggccgtagtgcctgaatttggcgtagggacttcttcaactgccgaaacaaaacaagctgctcccattgtgcagagtgctgaagaatcgattgtagtgccgaaggtgcctacagtcgagccagccgaagccaaggatgatacgaccagagagccagaattggggaaaacaatgatgccaaaaattttgagcccatcggcagaggcagaattgtcgaagatgacgaaggctcctgccacaactcccaagagaaggaggatggccagcgtgctagacgctgtcatggagactacaaaagccttgacccctgctcctattaagaaagttgccgaagttgcccaggtccaagccgaagatgaagctgggcctacagtgcccattaaaacgaaggctgccacgcctgaagataaagc

SEQ ID NO: 140111 - DNA, 547 bp, Zea Mays
ggggtccgggccactctcagcagggtcccgggattctaggacaaagaatacccaggccttaatcaaggtcgggcgggggtccggagccgacacgtgtccggaccataccgtgtacgctactgctccccgctcaggcggagtcccgatgctgccacggggcctaccgcccgtgatgtaagccggcgggcggagcctgacataaggcctctggggcgcgcggccgctgcatttatttgcggataaggtgcgctgcctgtctattctactggcaggtgatgtcccgtctcagcatttaatgagccctgccactccgctagcaggcaatgtgccgcctcagcatttaatgtgccctgtccactccgctaacggacatcgaccaggccatcttgcaggcagcgtgcctgtccattccgttgggaggcagtatgcccgtgctgcggcatacaatgtactcatcatggcctgcgtgttaccaaggaagcagccgcgagatattgatactatatagactacagacattatggcgctcggagatctgctgggcgac

SEQ ID NO: 140112 - DNA, 716 bp, Zea Mays
ctttctactgatacttatctatagatacacaggtcattgggccattttttcgcaaggccgattaacttctagaaaatgttaaaccaatccggctaggatttggcaacaacacatgcctctagtttcagtaatatctacttgtatcagaacaaaatcattactctgtgggaagttttcaaataggcaaatcacattggcagtaaaaatgtacttgctctagtaatcgtctcctcttccgcaacctttcctcagggctcacatcttgttgcttccacttcactgcaccattggcgtccttagtagtactagtttgaaccagcgatgcaatcatcttctatgtgagaaaaccgcattttaaaccatggtggtctcttcttcttcctcaatggggaatagttccccttcttttgatctctcgtctgctttttcctgcacttcaagttcctcacactccatttgacgtacccctataccaccaccttgtcttccaatgttgaggaaccataggattacctataggacaccgacccggaggtaaccgactacacctagtcggacactaatgagtccaacgcggacgcaatagttgatgggctagattccctcctcctcggtcccccatccatttagattcatatgatgactggagttgggacaaatctactgatgacttcgaggaggaagttagcccctccgaggaagaggaggaggcaccg

SEQ ID NO: 140113 - DNA, 719 bp, Zea Mays
gactttttgtgggtgcacaatgtagcaaagttgtagctggtttattaggctataactttgatacaaagagttgattcagccattacatgaaatctggagcaaatcgatgccaaacttggtctgtcaggctacctgaataagctacacgatggtaaagtgtactgatcaagacgcctactcagagatctcaccgctggcgaccgtgcgcccggattcacgccaccgcggtgattcgcgctcggcgcagatggataacgtcgcgggagtaagaaatatcgctcagggatgaactttagccactattttactccggccgccatacccgagcgtgtcacggccaccttgggtaggttcaccggagatagccacttcgcagccttgcaccacgtgccttggctcgttaacctcaccgccgtgactcacattagtccatccggtgatcgccggagagcttgccacggtaatagaccacgaatcaccgcgccagtgactcgtttcttctccaaccgccaccgcgcccaacccaaattcactagccaccactcaagcactctataaattgagcacaccgtgagctccgtagggtaatcatccatccacagcaccagcaatttcctccaattgttcactagagagcatgaattgctcatttccctcaaactgtgtttccgccaccgtgaaaaagtcctcagcgtgatcagcccgtctgaggtccgctc

SEQ ID NO: 140114 - DNA, 478 bp, Zea Mays
gggcatatctcattcttaggcgacagagactcgctccatattggatattacagcatgagcagagcacgatgagatatcacaatttcgtccacagtagctacatgaaacgccgaattctaaggaatctattcacctactaatcattgtaatattggaaaagaatgttgccctagaagaatagatagtagaaagacaataacatgcattggcttaaatacaagatattcaagagtgcattgtcctgaaaaaattccagtggattggtggttgtgcctgatgcaagcaatgttattttcgagatgaagtggactacctggatgacataagaacaattttttgacaagagtgttgctgaaagtttataaccgagatgacatatgacacaagagcaaatgaggcacacctgtgagaatgaaaaaaaacaaaagatataccttctgagtttcaaagattatcgaatagcacactccatagcaat

SEQ ID NO: 140115 - DNA, 383 bp, Zea Mays
cgaagcatccgtataaactgtgaaacgcttgccgctctcaggcaaagctaggataggggcgtccaccaacttgctcttcaatgtctgataactgacctcacaatcaccggaccagacgaagggaacacccttctccaagagtataattaaaggcttagcaatgctggagaaattttgtacgaagcgccgataatatccagcgagccccaagaaacttcggatttcagagacactagagggtctcttccactccaccacagccacaacattcttgggatcaaccgcaatgccctgttgattaatcacgtgccccaggaaagccacttcggacagccaaaaggcacacttcttcaacttgccatagaactgattcttccttagag

SEQ ID NO: 140116 - DNA, 509 bp, Zea Mays
ggcgaaggttgtgagcgtaggaaggaaacacacacacaaaaaaattatatgcagtagatgatgatgctactagttaagcgtcgctagatgcacaagcagtcaagcacattctctgcacttgcctgaagcgaaagaagcttcgccttcacttgttcagacgagctatacacatggtggctgagtaatctattcactagtatttttttctgtcaaactttggatcggttcctgctttccttttatttgacctcgattgatcaagatctgagtaactacttgttgaccaacgaatcacaggcagcaagggtgtcatgttttgcacctgctgatatgatgaatgagattgtgcaaaagcagaactgttctgtcatgtgcagaagcagaactgatgcaattcatcaaataggattctgttctgttctgttccaaacgctctcgtcctggcttcctggctgatgcaattcatcaaatagcagaactgatgcaattcatcaaatagcagaattgtt

SEQ ID NO: 140117 - DNA, 520 bp, Zea Mays
ggccacccaagatggatctacacgatgtagaatcgaataggggtggaggtggatatatggaaagatgcaactgaagctatgctacatctacgaccaaccgtaacaaaaaggatgacgtcaagcggaggcccctaaacgattgacactaaccaaggcctttgccacgacatcaccctagagccatttgtgacatacatccgcctgaggagagtgaagggcaccgagacgcgaaggtctcggaggtggtagcaaaggctacgtagtgatcaacacattgttggtccaccaggagatgcttccggaggcccacatgtcaatgtaacacatgggtgtattatttggtgtgcaccgtaggttgagagcacggtgttgtaattacctcgttacgcggaatattcctcggatatagttggtggatggtggtaggaccatactttggaccacctacccccaaacgaccctataaataccctcgtcctatagctagtcaggacatgcataacaagatgctacagttccc

SEQ ID NO: 140118 - DNA, 358 bp, Zea Mays
tcagttcatcttcttgcaacacctgtgtgagtcctccctttttctgaatttctttacggtgtaaaacacacgccgccggggtgcgaacaaacctacctagcagactagctagcagattgttttattgtccacaggttcttggtgtctcgcgggaggtaagcacgcaaatgattgataatagcaacctgggatcacgtcgagatcttttgtttgctttctgtcccgttgaattggcctcttacgttcgtggggctgggataaattaaaccacacggaggaagttccatgggcgcaacaactcaatgataagaaaataaaccggccaatcatttggtcatgcatgcaatgcaaagcgccg

SEQ ID NO: 140119 - DNA, 413 bp, Zea Mays
caatagcgtagttgggatctatcgattaaaaccagtccttggccatctggtggaggctgttgaatagctgcggtaccagatgtcgttgtcgacttcgccacactaccagcgtaatgactgaatgccgctggaggtgtattagtttatatttatacattaattcgtgtctgatttaaaccctaccctgcttcctcttaagaaaacacgcattgctgttctacacagtgacggagctagtaattttttcaggagggattaaactaagctgctatagtatataagactcttctttattatacatttatactgtgtaaattttaaattctagggaggttccagttactgaagttatatgaccagtagggaggtcgagcctcgtctactgccttcgtgcctggttgtagagacaaaac

SEQ ID NO: 140120 - DNA, 1448 bp, Zea Mays
aagaattctgacttgggagcacttgagctggcatagaaggtctgaccccggggttcgggtgaccaaagggatttctaggggtgtagaggggatgccatgcttttccacaaaactagtggctataaatgaatgggatgctcctgaatcaaaaagcatagtagcgggagtaaattcaataaggaactcaccgagcactactcctggagcttgctgggcctcttgagcgtcgacatgattaactcgtgctctgccctggtactgggtcctgctctgctgactgttggagggggtgccttggaggcaggtgctgagggaatcttggggccattcaccgagttggagtaggtaggtccgggtgccttcaactgggggcagttattcttgaagtgactggggtctccgcagtgccaacaggcatttgctggcggttggttgcttgcaaccgagggggcctgaaaggagctctgactctgctgactgtaacgtgacggagtgggtccggctggtctattgaagcttggtcccttgggtggaagcccgaaggatcgagctctctggtgacggtcttgctgctgagctcggagaacctggaatttcctcttgaggtgccctttttcttcctcttttgccctttccacttggatggctttgttggagaggtgcgagaagttgaggaaatcttggctggcaaggatggtcttgagttctggtcttagcccttttagaaaatggaccatcttcctggcctcagtgctgacatcgtcaggcgcgtaacgagccaactctgtgaacttgtgcacgtactcactgacagatcttccaccttgagttagttcccggaattcatcttccttgagttgaacgatcccctggggtacatggtgctcgcggaaagcagtttcaaattctgcccaggtacgtccctgatggcctcgctgaaggtatcccaccatgctagggccatcctagaaagttgatgagcagccaattgaacgcgctgattttcggggcatccaatggcttccagtttcctcttgatcgtgcgcagccagtcgtctgcatcgaggggattgctagatccagcgaacgtgggaggcttgagtctcagaaattctcccatcctgtcctgtggtctcccaccacctgggcgctgattctccagacttctagtgaggacttcaatgagtcgggtctgattggctagaacttgggacaaatctagtggtagttccggaggtgcggggaggtgggtctcactcccttctccgccagcttctccttctactcctaggggaaatcctgctccaatcccggaggcggtaggcgtggttttatccgaagccatctgccaggggaaaagagttactaccatgcacatgccacatttttttcaacaagttactttattcattacaccagttcattacagcacacaactaccataagtt

SEQ ID NO: 140121 - DNA, 761 bp, Zea Mays
gttcgcgcgcggacgaatcgctgatcactgggatcggtgtgtcagctccttcttcttcgctgaccgccgaaacagaatcccctaaatccgcgccgcccagctgccgttcctctcagcgcggactcactccatgcctctcaacagcgcaacgcggtgtttgcttgaaactaccgcgtggggccacctcgtcggatgaatcttcttcgttctgttaggattgtgccgcaaatccccattgccgaatgacgaagcaggatctccgtggctctagggtatatataccggtggcactcccctccttgaaccccaagtctcgacggttagtatctacgcctcgccatgacctccgagcatgaggaaacgctggtgggagatcgaacgggaagcagagaatgggatgaaggggggagtctcggattggggcaggagaccgtagcatcgtggcctggatcatgacttgagcttatgggatcatccgtgtcgtgccgcgcgttcctagcggtttgccggccgaggtcaacccctggagcttcatggcgcgtgccggagttggtggtcggcgtcacgccgtggaccgggtcgatcagcccccttttgcatcggtgagcccctttaacgtgttcaccatcttctatgccctctaatacgcgttactgtgtctcaaattgggggcgtttgtggtgctagcccgtgttcaccagaaccacaccatcgtggtgccgcacccttgctgtgggcgggagtctcactgccaccatcgt

SEQ ID NO: 140122 - DNA, 313 bp, Zea Mays
ttgcaaatggctcaaagcagttgaggaagcatgaggggaattatccaacacatgatctcgaattggccacggtggtctttgctctaaaatcgtggaggcattatctttatggcgagtcttgtgacatttacaccgatcataaaagtctcaagtatattttcactcagaaggagctaaatttgaggcagcatcggtggctcgaattgattaaagattatgatttgtccattcattatcacccggggaaggcaaatgtggtggctgatgcccttagtaggtccgaggttccaaaagtgaccttgcctagatcgca

SEQ ID NO: 140123 - DNA, 632 bp, Zea Mays
gtgctagctgcgtccctggtgctggccgccggcgtgatggtctgggcgaggcagaggaagataggggagctatgctcggaggtgatcatcgatgcctcttcgtcgtcgtcgtcggacaagacaacgatggatagcatagtggaggcgcagcgaagcctgcagaaagtgcacaggtacatcgtgaccgcgaacgttgccatcctcaggctgtggtcgattgcgctagcaaggtcgccaaaggtacactccctctccccttcccccttgtcaattgggtccttctgagctgagcatcttctggtcttgcgctttgctttgcagcacacagagacggtgatctggatgctggccgtgtccgcggcggtggtagccgtggtcccgttcaggtacattctgatcgggctggtggcggggagcttcgcgttgaacacgagggtcgcgagggccgtgatgaacccgcagggcggccggcggtggagggagtggtgggagtccatacccgccgtccccgttcggacggtgcacagttgacaaaagtatattttcctctactacgtgaaatgatcgcagaaggaacccgttatagaagcctgtttgttcaggaagaataatgaagtcaataagaaactgtt

SEQ ID NO: 140124 - DNA, 301 bp, Zea Mays
ggaaaatcagctccatgacgtgcaagaagagctagatgaggccaatgctcatatggatatgcaccactaggacatgaaccaagcaatggaggcagacagaaacaacaaggaggaggaggaacccgaggagattgagccagcttccagtttggacacggcttactctggagtacccccttcacttgcagccagtgctgcctcttctactcagggttagatgggtcgggaagaagcatattaggaagatgggaaaactacataagcttagcttttgtcacagactgatgtactaggctataga

SEQ ID NO: 140125 - DNA, 750 bp, Zea Mays
agacgcttgaagtggcggagtgttgttgttatagtgtcagatgttgtcgctggagttggtgtcgttgttgcctttagtggtgctgggagtccaggcttgggcgccatcacattattgctttccacgatgattgctagacatcgttcgtacgcccgggcaagcgacatggtcgtctccatgtcctttgcatctagcatctcgacgtccattttagcggttgcagtagtccgttggtgtagatattgacttgttgtcactcgttgaggtagccgacgtgtgccacatgcgctagaagcgctctgtttagtcgttaatggtgctcgtcttccttagggaagccaattcttccaaggggttatgcctggttaggggtccaaagtgctcgttgacgcaccaagcaaagtacgccagtctgtcacctcgttgtcctacgagagtctcatgtaccactgttgtgcagtacccgttagatggtaagtgtgtagcatgtttttttggtcgtctggagttcgttggaccttgaagaactgctcacaatggttaagccatggtagtggatctttcttgtcatcgtaggtcgagaaagagagcttgtggggtcatatgttgagggcgttgaaggcgcccggtgttgcccctcccggtgatatttctgattttggctccactatcttagtggcaatctctgctattgtttgtgttccagagccgctgacttgcgatatgaggaatttgcggctagctttctcc

SEQ ID NO: 140126 - DNA, 818 bp, Zea Mays
aacggatccaacccagtacattatgagctaccagatcatcatcatgtccttaggaggagatgactccaccatggctaacattcatcgttgctctcgaaggccccaccctcatgtggtactcaaggctgccaccgctatcgatcaattcatgaaagacccttcgcgataattttttgctcaatttttaaggttacagacctgagacagatgcattagcataattgtccctccgcaagcagcaggaaaaagagtcttcgtgactattataagaaattcctcctattgaaatcacaactaccctcagtttatgaaaaagattgtcatccattatgcaatcagcagccttcacgatggtgtactatacaggcattgcacaagagacccccaatccaacctctaggagttataccatctctttgaaaatacacccgttcagaggagctccatcacatgaaagttgagtcgcagcgaaagataaagagacatcgcagtccagcagaacgtggaacagggctccatggtaagatcacccccaccaaagaatccaagatcgcgatgactagctctaggtccacaatatcgccaatcagcacaaccagtcgaaggccccctcgacgtcgggactaccctacgtagcaaggctacggtggtggcgcgccaagaggaagaggcccccaacaacctagagggttctattgtgtgttccacggtgaagactcagctgatccaataggagattgtccagaaaccaaagaaaccaaagagcgcatggctatagcagcccacacaaacaatcaaagagccatcactcacactta

SEQ ID NO: 140127 - DNA, 671 bp, Zea Mays
atttgcagaagtaagtgtggcatgctggtttttggaatcttttcttaatttatgccaattgatcagctggtagggcatagagatcgccctatgacgagtaagcgtgagcatgttgcaccatcttaagtctttgccggcttaagtcgattgctccgttagtagggtatagtggtcaccctaagtcgagtaagcgcgagcatgttgcaccgtcttaagtcattgccgacttaagccgattgctccgttagtagggtatagtggtcaccctaagtcgagtaagcgcgagcatgttgcaccgtcttaagtcattgccgacttaagccgattgctccgttagtagggtatagtggtcaccctcggttgagtaagtgctctgattccaagtttaatcaagtcgaagtcgatggataaccaatagtttgaatgcttttgagaatgaaatcttttattgatgacgtatttcccaattacagaatacaacattgccccgatagttcttgctaagggtaaaacttcctgaggtgctctatattccatgaattccctacttccgtgtcatccatttgagtaagccgatatgatcctggccgtgtgacctccgacaccatgaacggcccttcccataacagcgataatttgtgccatccttctcccattagaattcagcgaag

SEQ ID NO: 140128 - DNA, 565 bp, Zea Mays
gtaccacctacatcacccacaataattcatattctacagctagcacatggcgcgagacatgggggttccaaaagacattacacaggcttcgcgcagacttctacattccaaatgacagaactctggttcgtgactttgtcaaatcatgtacagtctgcgagaaaaacaaaactgaggccttatacccatcagggttgctgcaacccttagaagttccctcacaagtttgggcagacatagcgatggacttcgtggaaggcctcccaaaggtgcacggcaaatcagtcatactaactgtggtggatcggttctccaaatatgcccatttcattgccctgggacatccttatactgcagcctcagtggcacgagccttctttgacaacatagtccgtcttcatggatttccactttccattgccagcgatcgtgatccagtctttacaggcagcttctggcgcgatcttttcaaggtggctggggtcaaactccacatgagcacgactttccacccccagacagatggacagtccgaggttgtcaataaaactatagccatgtacct

SEQ ID NO: 140129 - DNA, 424 bp, Zea Mays
ctctgtctactgaacaaaatggatggggatttgtggaacactcaagtacgttttgcagggtttagttctcaagaacatggaatattcagatcatgagttaatgtggactatgggtttactttgacaggacgttaggctacaggttgttaggctgtgtgcaaaatctagagaagctatttcgtctcctgttcagcatctcacacttcattatcaggtacatcctattgttgcttttgtggaaattaatcttgctatgaatgtcactgatgcttatgttaactcttgcaggttaggcaccttgatacctctgaaaagagtgaatttcacaagttatagcaactgaaagatgaacaaggtaatccatgtttaactattgtgataccattatgccacaatcaagcattgtcgagggatgtgatgtgca

SEQ ID NO: 140130 - DNA, 633 bp, Zea Mays
gccgagctccggcgagctagcagaccggccgaacggggccatgaccggcgctcccgagcggcggacaccaaatcggacgtaccccgagcatttcccctaagttaattgcacagttggtgagctatcaagctctgtccgcgtgaaccgaatgggtggcggacaattggatgtgttcccggtgattggtggtctctcagttcgaattggtgacacggtaagcatcacagagctatgagagtgctcaaatgaggaagcaggggacagggactgaccggaaaggggctggcggcggtgaagctattcttcgctgtgcggcggaccaatttggggaaattcaaaattcgtacgccctggtgaacaattgagggtgggattggagctctagtttcgtgatgatgtagcgcagctaaccgtgggctcaatttataggcagcttagacggtggccgggaatttgaagaaggacgcgcggcggtcggacgtagaagaaggcactggcgcacgtgaatccgtggctaacgtcgtggcaacctcaccggcgacgatgggacggccccagagagtcacggcgacatggtgtaaaggcagagccacgcggcgggcaacgacgaaggcttgacgacggtgagcccct

SEQ ID NO: 140131 - DNA, 428 bp, Zea Mays
tgcttgaaatcatacatgttagatactatttgtcgtgcattctaggtgcttgctctgtttattatatgtatttgttcctacatgtacctaaaaattcctatttatgctctatgtttctgtatgcaggatagggcaaggaggctcctttctaagcctatcaagtttttcaatgaaatgcaagagttgtttattaacagcagtgctgatggctctctagccatggaagctacaacttgcatgaatgaaactcatcctggagatgacagtgacttcaatgatgatgtgtgcagtgacttctccaactaccctcagcctgtgcatgatctaggtgatgattctgacactttaccatctcccaatcatcatccatctcaaagtgttgatcatagctcgtcaagttctggactgaagcgcccacaaggagaggg

SEQ ID NO: 140132 - DNA, 658 bp, Zea Mays
tgctccattcattatgaagatgattgaggtcgtgacccagttcagatttgacaaaggtacccgacatcagtcatacactcctttctggattgatcccaacaatccagccaagcgcctcaggaaagccccctccagttctcgtgctcatacatctgcgggtccgtctgctgctgctggtgcctcgcgcccttcccctggccgcagatctcccacaccacgtggtcgtggtcatggtcgaggtcgtggtcgtgggatgggtgcccgcttggcccacgggtttgcggctttcttctccatgtgccgaaatattgctgcagatgtccatgaggtggctcgacgtcagcgggagaccgacgacaacctacgtcgtcaagcttctgctttgggtactcccttcgccccccgttctcctgatgtacctctccaccctcctcctccagatgtcaacgagtggtaccagcaggcatatggggtgcctttttcaacagctgatgacgtcgaagaagaagaaacctattttgatgatccggagcagtttgtcctgcctccgtctcacggggatccgagacaatcgtcctcttaccctccgccccaggacccgtctggcagtgctcctcctccagcccagtctggagaggaacactttgcctctgacctg

SEQ ID NO: 140133 - DNA, 513 bp, Zea Mays
attatctccaaatgtgatactatcataacttgagcaatcttccacactcatttgggtgaacattttcatatctccggtcatctgttgagtgcatccactatccaacacccaatgattccctcccgccttgtagttcacctacaaaaggaaatcaatctcttttaggtacccaaacttgcttgggttcttggatgttagtgaccaaggtctttggcacccaaatggctttcttcttattgccaacaatggaagtaccaacaaatttagcatgaacaccttttgcattatgagaaagaacataacaatgctcaaaacaagtggaggatatattcttgagcttaggacaattcttcttgatatgtcccttcttgtgacacactttgtcacattctttcacaaacaatgtcttttgctttacaaaagcattctttcctttcttgggaacatatccaagaccctcacgattaagtgagcaccgttgacttcccaatatgaaatccaatttagcctttc

SEQ ID NO: 140134 - DNA, 924 bp, Zea Mays
ccgaactaagttcaccgcactatttctatgagtcgctgacaattacagttagacccctgaacttctatttcttcacagtgccaaatccatgacgtcgcacggcggagacccgagcaccggcgagtctattctggccggatcacgcaaagaccggtgctcccgtgtggcagacaccaaattggattcctcctaaccatttcccctcactcaatttcactaatgagactctaaatcattctgtccacggagacagcgcggacaatggatgaacacgggcgttctcggtgatccatggcggtctagttcaatcagaggggtcgaaccacattaggaggtcttaaggagactagaacaaacgactagagagcttgaaccaacctaaaacaagctggccagggcgaggatgctttcacggtggcggaaactgaattggggagaatgggaaattggagagttctaggggatgattcgaggcacgggttgctttactggttacccaattacatagcgtagtaggcgagggcagcaatttatagaatccatcagctgtggcgcgtgaatttgagttagcgcgatggcggccgaagagtgaaaagagtactatcgcgagagctcagtggcatctaccgtggcgacctcaccggcgacgaaccagtgctaccgggcggtttctagtgactcaccgcgacgggctaaaccgtcgaggcatgtagcccggccggataacagcgaacgccggtgatgccagcgcgactaactacggtgagacacgacggcggtgagaacagtggtcggagtttatctccagcgtgatacttcataccgaggagtgcttatctgagttcggtcgggcgtgaatcgtgacgccggcgcgaatctaggcgcacaagtcgccggcggcgaggttctctgaacctgatccat

SEQ ID NO: 140135 - DNA, 665 bp, Zea Mays
ccacgcgttggagcccggtctgtcaccgttcggcgggccccagctgccagtttgattcgctcgcgctcgctaccctgggtcgctgttagtgggccccactggtcggatctatctcctccactggaatgtcgcgggcgccgtcggggaatccgcgtggtaaccactggcgatcaacggaactcggacttcccttcctacctaacgcgcgggcgtcgcgggataggcgccgcttgactcgcgcaaatcattgggagcccgtggccggaaaccgcgcgcatggcggacttcaccgaattgcgcgagatgctcggcgcaatgtgtggcactagctctgaacccccttgtttcctccctgcgtggataaagggatcgtagtcgagccatatttttccctttccccttcgtcgcaatgcctcagccaccatcgccttgggcgcccgtagggaaaggtttccgccgccgtcgtcattcgtctgcattggtggccggtgttaggtctgagtgtcatgagtgtctcctggattcgaggaacgcttgagcatcgctttcgaacactgcggggcagtcggggcatgggaattcgtcgccggagttccaggatccgccgcgggccgcactgcttgtggtcgggtgctctccacgccacgacaatcggtgagacttcc

SEQ ID NO: 140136 - DNA, 829 bp, Zea Mays
taaaacacaaaaatatatgtattcttttggctagatagatgtgaatgtgaagccaataattaaagttcgaatcgccatttgtacacaatctctattattataaagcattaatttcaacggtcaccgttacctcataaataggttataaaaaccacctaaggtcatataatgggttgttaccctacaaatgagccatgaaaaaacacataaacccaacattacaataagtccatagtaccacctcgctatataaaagaggacaaatgacacgaggaagctataaaaagagagttaagcttttttcaactcatacttttttgttaagataaagtgtaatattatgtcacaagcacgagcattttactagttttaccttattttacccacgaccactgtggaaccatgaaagtttgaaaagtgatgctttatgtagtagagattttatgctcatggatagtagatatggtaggttgttatagaggtcctcaccttcataattgactatacgaagtctatatccctagaatgttaaaatgttcctgcctgtgtctataggttgtggacttttggtcttaagttgtggactttgctgcgccatttggcaaaactgattgctggcaaagtctatatccctatgatattgcaccctgctccctgcggtacctaagctaactacaaaacaaataggacaagcagaaattaacgattgagaaggtcaggtttctcacacggatctcaataacataacaggataggccttacattttctgttttttggtaattaagtcctggtagtttgtgtgtttgggtcgttgtatgactcttcttt

SEQ ID NO: 140137 - DNA, 584 bp, Zea Mays
gcggtgtcgtcccaccatcaaaatggcgggaaaggtagaatgggtggcttctttcccgcggatggacggaaatgaaaagaatagcagacggcgccgttggactgaaacccatttcaggtcacttgttggagattcagttttttgcttatccattttaacagactggggtacctatagaacgttttgggtctccatattttaggttcattgttggactcagtctaaggccccacgttcactctctcctacttcatgttagtctcttccaagtggtgggacccgcgtgtcatgatgttattctacctctcccgcgactttctctctcaaacgcctagccgctcgaccagacaagccgccgccgcccgagtgaatgagtgattggagccgaacgccagccgccgccatttcagcctctctggcccctctccttcaattagagctgcgtcccttcatcactcagtgcgcctccagatgtcgcctgctcacctcctccgtcggtgtctctttctccatctctgcctatagatagaccagggcatgcgagcttctctgctcactccctcgctcctcatctttgctcatcc

SEQ ID NO: 140138 - DNA, 380 bp, Zea Mays
ggttaagctcgtaatcacgatgatttgcttgttgtagtctaaatgtgtatggttacggttccgggtaaaaattagtagtgttcatgtgatgcccaagttaaaatgcaaattactatatgaagagcgcatcgatatatatgtatgccggatttgatgattgttgtgaatgcgttgattaattgtgtatggtagttttagagcgcgaaataacttgtataaaaattagtaagtctaattgttagttctcacttattcattttaactctaacaattgtcaaagtgttagaataattcaagtatctagaacgcggcaattcttgaattgtataggagctgaaatttattaattgctgttttggactgcacgcagtgatttcccc

SEQ ID NO: 140139 - DNA, 380 bp, Zea Mays
gtgtgttttggttcgcacctaataaacgtgagaaaataacccgtctttggttgcaggcgagggctccatgtatccatctgaccatatttttgtagcgatattttgtaggggagcagcgacctgcgttgttactttcggatagttcgttttgcagaaaggacctgcctacctgattcacttgcggctgtgaaaattttggcaagtctgcacagtgtgagaccagtcagatttgtgccttatgttcacgtgccatatcacgttgcacgtaaatctcaagcactgaaactgctccgtcgggtcaccttttggtcctgagcgttgtcgtcatttgttttgaaaccaaaccatggaaatctctgcaagaccactctagaagctca

SEQ ID NO: 140140 - DNA, 344 bp, Zea Mays
aaaagtgaggctagggcttggaatgcagaggcgtccggcgacgagatacaaatgtggttttcccgggtcagacaccgtttctaaaagtgcttagtcatcactcggtcgttatttataaaacgccgacgtggcctgatatgactcggctattacctctaaaacgctgacgtcgccagtcgtcactcggcagttatttctaaaacacctacgtggtcgaaacgactcggttgttacctctaaaacgccgacgccgccaagcaccactcggttgttacttctataacgccgatatggctcaacagaacttggaggttacattctaaaacgctgatgttgccaagaac

SEQ ID NO: 140141 - DNA, 701 bp, Zea Mays
ccccattaaagataatctcgtcctcgagatttaggaaggactagggaaaagatggggaaaatctatgcgaagctcttcttctctctcccaagtagctcaattttctccgtggtgactccattgcactttgcacatctttataaccttatttctcgtgacacgagtcagtgtatcaagaatcttgatgggatactcagcataagtcagatcatcttgaacactaaggtcctccattggtagctactcttcaggtaccctgagacacttcttcagttgtgacacatgaaagacatcatgcacatccgcaagatgatcaggtaactccaattgataagccacctctcccactcgctttaggattaagaagggtccaatgaagcgaggggacaactttcctttgactttaaatctctacataccccggagtggtgacaccttcaaatagacatgatcaccctccttaaactctagcagtcttctccgggtaccagcatagcttttctgccttgactgtgcagttctcaaattctctcttatttgatggacttgttcctctgcctcctatataatctctggtccaaagaattgcctttcaccagtttgatcccaatacagtggagtcctgcacttcctgccatacaaagccttaaacggggacatcttcaaactggtctggtagctattattgtaggagaactcca

SEQ ID NO: 140142 - DNA, 616 bp, Zea Mays
aagaaggtgaggggaacaagtaaatttgacggattaagaagcacctgtaccaacacctcaagggacaacctctcgaaagcccacccacgagatgggggcatccctcgacggtccactctgatccatggcgacgaataaaaagacaagggagagcaggggtcgagaaagcgacacagggtaagagaacttgcactgtctatttgcaaggatagtcgattagagactcacatctttaagatggttggtgacctatggacctaacaagttgggcctatgaacctctgaaggaaatcgaaccaacgtaagatcacgaagcacaactccgcaggcaaacaacaggggagcaatacaaatattgaaacttatgttccttttcaaaagggaaacaacaagacatattatacaataggctttgcgaatggtatcattcgcagatagcctgtccacgatgggactgacaacctcatcgaaaccctccaatatgtcttccagcccatcatcaggaatgtcctaaggaagaccaatgacgtcctagagacagcatccagaccgaagctcctcgacgaccaaggctacgcccacccctcggtgaatgctaaaatccataatatctcgg

SEQ ID NO: 140143 - DNA, 525 bp, Zea Mays
agatcccaatgactggagagaaccaatcatcagatacataaaaacgaggaagaaccagagaacaaagccgtggcggagcggatcgcgagacagtcggcccactataccattataggggtctgctgtatagaagaggtgcagggggtcctcatgaagtgcattcactcggctactgggatgcacctattagatgagattcatgccgggaagtgcggcgtacatgcagtgtcacagactctagtgggaaaagcttttaggtctggatcctactggccgacatcaaagaatgatgcagccaagttagtccagaagtgcaaggcatgccaattcttatcaatgcagcagcatctacccgcacaacagttgtagactattcctgtgacctggccgtttgcatgctgggggctagacatgattgggtcgttcaagaaagctcaagggggagatacccacatactagttaccatcgacaagttcacaaagtggatagaatacaagcccatcgcctctttgacctcagcaaag

SEQ ID NO: 140144 - DNA, 298 bp, Zea Mays
gtgtaaagctatttttacaagtttattaaccacatttcttgtcacgcgcagggcaatttttcccaatcactatatgctcatatactcttctcaaatattgatgtggtatgcgagtaacaaaacaaaattaaaggtacctacaagatattgaccatggatctctattgtttgtagcatgatatataattcgaatgtgtgttaatcatggccaggtcgcacaatgtgtcatgctatatagtaaatatcaaataattgcaattgagcttcttttctgtgaataaaattcagctcaacataa

SEQ ID NO: 140145 - DNA, 271 bp, Zea Mays
gggggatccatgccaagatgttgtgtactaatttagaactgtgtctgaacatattggaactagggatttagtccaggaatacctagccaacagagtattcccaacgctgagggagtggagtatgctgaagcttgaaggagagaagaagagtgaactcgttcggctgccctatcactttaagttcaaaaaacacttcaaggaaccctgccaagaatagttggatacgatcaaagttatgtgcaatgagattttagggaactatacgaaaaag

SEQ ID NO: 140146 - DNA, 293 bp, Zea Mays
cctatgcttccacgtctactctaaaatttttagccgttcgattatattttagcggtgctccctccacgtatcagatgagcggtgtccagaaaaggtgaaaggtctcagtgaatgactcctcgaatagctgcgatggttcgcgatagcaaacagataggcggtgggtaaaagtgaagacagagagagcagtgcgcgccagtgaggatgggcagcgctccatgtccactcctcccactgccccagtagccacgccgccgcgcaccgccgactggtgctgcgtcgccacgtctttc

SEQ ID NO: 140147 - DNA, 305 bp, Zea Mays
gattttcaatctagccttgctaaactcgccagaatgctatgtctagaacaaaccaaaataaccagaaccaaaaccaaagtaaaatcggttcccaatatgttcaaaccaaaataactctgcccaattcagttcctatgtttggttaaccgaaggaactgaggcccagtagataggaggcccgtgaatgaagaggcaacccaaataccatcataaacaatgcacacttcaaaccctagagacatgcacatccacctcaaactaccatacacacccatcaccacactagttcccccatccgacttccc

SEQ ID NO: 140148 - DNA, 525 bp, Zea Mays
gtgccttttcaattgggcaactatttttttacatccttaattatgtgtgaatcgaatcgattatcaatagtcaggaagacaagacaacgcaatcaaaaaaaggaagacaaaacatctagcatccacgtgttcaaaataatccatgaaccacaaaggataagaaaaagaaaagaaaactcaacggactagagagtcaagatctcgaccttcttctccatgacacggacgccaatcgtgatcttactggcgccgccactaccctccatcaccaccattgcagcatgcccctatcctggcctccttcgtccccaatctgtcccacagtccgcgcatgtgaatccgaggccatttcccacatttttatgttaggaggataagaggcgtttggttgttgacgatggctacatcgatggagcaaccggccactagcccgaccatgattttgagcttgatcatgtcgtcaactaatgccaggtacaatcgtatctccctcggtgccgacactctaaccaccggcatatgcac

SEQ ID NO: 140149 - DNA, 931 bp, Zea Mays
cggggattaactaattcccgtcggctgatgatggggattaattaagtctcgtcaaccttcataaagtcgatgagggttacctaattctcgtcggtcacatgctagcccatgggaattagcgggataattctcgtcggtcgattaactcccatcggcctactccctagcccatgggaattgtagaattaatttccgtcagcctactctctagcccatgggaattatcggcttaattcctgtcggctatggtcaaatcgacggggattaacgattcttgctccaaaacagcactatttaacatcgatttctcatccaatttttatacaacaacaaatatacaatatatatcaacaacacagctgacagacatcacatataactcacaaacatcacatatagctcacaaacttcatattacaaacatcacacatagctcacaaacctcacattacaaacacataaccagtcacacaccttacaaacttctcacatgtccaacactgatcacataaccaattcaaaccacaagttaagaaataagttacgaacacacatatcattcaaactttgaaacaagctatttcatagacatcgtcgtccacaagtaaagaaactaagacgaccaaaagcatcatacttagggataaccaccatttggatggtttgagctttgcccgctgccaccaccagaaggagtgttcgtgaagaggcagtcaacaaatccagttcccatgggttcagactcactcccacccgttgtaggtgtagcctatgtaagaacacaaatatcaacaagttaaatgcaaatatcatcaagtatacaaatgtacaaaatcatcgagagttatcaaacgtaccctatctctaggtgtagtatatgtgtggggtgtgttgaactattgagtccctagtccctattaatggaaatttg

SEQ ID NO: 140150 - DNA, 404 bp, Zea Mays
actaacgcggtgctcaccacgtgagtcgtgaaagagatgtataacaacatatcttcagccggttgactcggtgtggctcggcgcgacggttttagcactagtggtgttgtcaggaatttcttcagtgcgtctagagcttcctgagcctctgaagtccactggaatttgtctaccttcttgagcaacttatagaacggtaggcctttttctcccagccttgatatgaacctacttagggctgccatgcatccggtaagtctttgtactttcttctgtgatcgtggtgcttccattctcatgatagcttcgatcttttctggattggcctcaattcctcggtggctgacaataaacccgagcaattttcctgctggtactccgaagatgcattttttaggattaag

SEQ ID NO: 140151 - DNA, 1332 bp, Zea Mays
tgtaattttgtcgactcgatgtctcaatcaacatgagttttgaaatttagagaaatagagaaagtgcacctccttgaactctcctaaagcagcacgagcttgtccccgtcgcttccatgcctccccagccgatgggctagattgtatagcctgcaagaaaagaggaggccattttacattttactataacagacactggaggttctcaatatctaaaggtctaccttggtgaaatcagaaatagcagaatccaattctctttgaaatgcataagctgtgccccttccaatcagtgcttcaggatacgtaggagtttcccgcaatatctaaatggtcaatagcaaattatcaggttccctctttgcatcaggatacataatggagaaaaaatcatggtaaaaggtcaaaacctgatcaaaaatggatatcgcctggtcatatcttccttcatttacctgaaaatatgtaattcaaccaattatgatcaatataataataatagcatctccttctatatattgtcagcaccttaccaaatattttgtgagagtaaaatcattttgaataaacaaatgtagctaattggttgtaatgtttgttttctgcagtcctaaacaagcattcaaaatacagcctcagcaagcttttagatgttactaaaaatattttttaagcaaagttccttcagatacaataacaaatgccattgtgctgaataattggatgatacctgtgcaatgcctcttgaaagtcggaaatccaagcttatagattttgatgactttgaaatttttgtagcaaagagtgcttgatccagtgaaatagtttcactttcatcagtactagctctgccagttacaccttcagctcggccatttatttctttcacagcttttgctttgtttttcttatctagcttcggtgccttcttgggagcttgagtccctgtgatgtctttcactgaactgctagagactttattatggtccgcttttttattataattcgtcaacttggtatcaccatttgatgaaactttggaactgccaatggcctcttcacagacaacagtttttgtatcagccattgtagttgcagcgaacgacgtgtcagcaacacgatcttctgagataacaactttggtatcacaagttgatgcatccatgacatggtccgcagactgggttgtcccgcaaattttaacagaagaaaccaattcttccagatcaagcaattgtttcaagtctgttgtgtcacggacagcaatttcatatccttgcttccaagcagctagagcatcctcttttttatctaatgaagacagtgccttgc

SEQ ID NO: 140152 - DNA, 384 bp, Zea Mays
gcagtctggatatttgtattgcacctgtgagccattcccaataaaatgtattgggctatgtttgtatgaggatggagtgactcagattatagagatctcacccctgctgcaaatatcgatctaagtggttaggcaagagaaagggggggttctgaaccttggatcaggttggaaaggaagaaaagatcttgtcactttgttgtacctaactggtgtgctcgagttaagatagaggtggagtagataactgaagtctagagtcctcttttcctgcagaaatatcaagaggttggatatttggcttgtgacgtagaccaagttcaatgtcctgggctgagcttgtgaacttgtgtggactgtggagtgagcgcatggggcacacgt

SEQ ID NO: 140153 - DNA, 574 bp, Zea Mays
atccctatggtggagcgagctacgcctagatccctctagagatcttccatcgatgtccataggggccaaagaactagacaacctagacggaagaccatgatctccccccggggcaaccaccaccctgagaaaggacaaggaagattgaaagggacaagagtgatacgacctaacgaaaaggaagaaggccactcgaaccaccgcctcgaagggccaccccttgaaaaaccacctcgatccatgacagcgagcgactgatcgagagccaggcctgctaaggaaacccacggggtgcatgagcatgtggtgcttgccccacgaaagtgagtgatccaggaacccattcctctttaaaaggataacaccctacgaagctagcaggaatgggcctatgggccccggtaaggggaatggatcgacaaaagaaacccccgggcctcataaacatggttgcaagaggtcgaaagatagcatagacaaagaaacaacttttcttatattctctcacagagaaacaacatcgagacacaatacatcatagggtactgggtgttgcggacgacgtcatctatga

SEQ ID NO: 140154 - DNA, 1287 bp, Zea Mays
ggttaaccaatccattcctaagatcacatcaatcccttgggatagcaagacggtaagtctgcaaagaacactaccccacttaaaagaattctgacttgggagcatttgagctagcatagaaggtctgaccctagggtttgggtgaccaagggaatttctaggtgtgtagagggaatgccatgcttttccacaaaactaatggctatgaaagaatgagatgctcctaaatcaaaaagtacattagcgggagtaaattcaactaggaactcaccgagcactactcccggagcttgctgagcctcttgagcgtcgacgtggtttactcgtgccctgccatgatactgggtcttgctctgctagctgttggaggagggtgccttggaggcgggtgctggggcattcttggggccattcaccgagttggagtaagtaggccttgatgccttcaactgggggaagttattcttgtagtgactggggtctccgcagtgccaacaggaattagctggtggttggttgcttgcaacgaagggggcctgaaaggggctttgaccctactgactgaaacgtgatagagtgggtccagctagcttattgaagcttggtcccttgggtggaaacccaaaggatcaaattctctggtgcctgtcttgctgctaagcttggaggacttggaattttctcttgaggtgacctttttcttcttcccttgccttttccacttgtatggccttgtttgagaagtgcgagaagctgaggaaatcttggctggcaaggatagtcttgagttctggtcttagccctttcaagaagcgggccatcttcttggcttctgtgctgacgtcgttaggtgcatagcgagccaattctgtgaatttgtgcacgtactcactgacagatcttccaccttaagttagttctcgaaattcatcttccttgagctgaacgatcccctggggcacatgatattctcggaaagcagcttcaaattctgcccaggtagcatatctgacggcagcgctgaaggtatcccaccaggatagggccatcccggaaaattgatgagcagccaggtaaatacgctggttctcagggcatccgatggcttctaacttcctttttattgtgcgcagccagtcatcagcgtcgagcgggttgctggatctagcgaatgtgggaggcttgagtcttagaaaatctcccatcctgtcctgaggccttccaccattcgggcgctggttctcaaggcttctggtgaggacttcaatgagtcgggtttggttggcc

SEQ ID NO: 140155 - DNA, 642 bp, Zea Mays
gcaaaatatggctttgaatctcgaagccggacgtgacaaaaccctgccctcaccacgggaagacgcctgctggacagatcacacttgagtgggtaagatctgcttggccagtggacaaaatccgtcgacccccacacattatctctagcttatagtgtaagcaacagatcgtatacaaagatttcactgagatagggcttgagcaagcgacaaaatggctaggaaaggggatcggagaacacttgccaagtgttcgacgccggttgatagaagccaagcgggctctgtcttccgcaattgcaccaacccacgcgcctgcccccgcctgcaccacgactagggaaactgcaacgtcatgagcgccacgcctataagtacccctgcgccctcagtctctcccggtgcacccattcaagccttcttcatcggagttcgcgaccgctggagtacgccccacccgcctcaccagccacaggaccgaccaccgtggcccgtctaacaccatcttccacccctcacgccaacgccaccaggaggttccctagcccccagtaaacctcctcagccaccccatttcgcctggacgcctcgccaaagtagcgccaccgctcgctggatctcaaccgagcgccggtgcacgtg

SEQ ID NO: 140156 - DNA, 290 bp, Zea Mays
gaaaagaaattaaaaaaaagaagagaaaattcttaccgctcaaatcctcttcttccttatcctcgggtgggatttttgttgatgccgctcaagctcgtgaacaaatccctgcgccgctttctagcaatggataaattccagccgtggttatctccagccgctgcagaggaaaatctgctgaagtcgtccagctccttcttcttcccagccaaatggctcttccccgcgcagcagcaaatcatctgcttcctgatttttgttcctgacggcgtgccatccctatcctctcc

SEQ ID NO: 140157 - DNA, 416 bp, Zea Mays
tgttgtcaggttgagccagcacgggagctgttgtcaaatgctgcctcaaagtgtgaaaggcatcctcgcacttttggctccaatcatacttgactcccttctttaacagttcagtcattggcttggcaattctggagaaatccggaataaatcgtcgataataccctgccaatcccagaaaactccgaatctgcctcactgtagtcgggggtttccaatccatcacttcttgtaccttctcaggatcaactgatatcccatcctgagaaattgtgtgacccaagaatttgatctccttcagccagaattcgcatttagacaacttagcataaagacgatgatcgcgtagtcgctgaagcacgatgtgcaggtgctcagtatgttcgtcttcattcttggaatagaccagaatatca

SEQ ID NO: 140158 - DNA, 435 bp, Zea Mays
gcaatataaataaatatatgatgccacacaacacaagcaaataaaatatagagctaaacaaaattgtttacgaaggttgcacataatgtgacttcaggaccttgaacaacccaccataatccacgcgagtacaagctctagtgtatctggcgtcaacgcgtgtgcgaccatcagggctacgacaacacaacaagccttcgtaataagcgcaacaggcacaattatggctcggtaatcggggtacacgataagtccacgcaacatgcgcaacaggcgcaattgtggctcaatgatcacggcagacagacagtgcctacatggcatgcgaaaaatacgcgactcagcgatggcggttcgactcaaggggagctgtccgattaaacgagagtgctatatagcaatcacatgacgcagccaagttcgtacgacacaaat

SEQ ID NO: 140159 - DNA, 297 bp, Zea Mays
catgcatcgattatgatctgcttctaaaagaaatgggatccactcctgtcttgatttccggcaggggtcaatttgtccttttatctatgctgtgactctccaagtccgtccactgtctttgcttcgcactaaagcacaaagaaatttgttgttccagcctgcagacgaaagcatagttgtccaaggctttgcatgcacattgctcttcattttcgtatggtcggtacggtaacgacggctacggcggggcataagcagcaggctgccagatcaagatcagcttgttctcactgtcca

SEQ ID NO: 140160 - DNA, 646 bp, Zea Mays
ataataagctacaaataaaataatataatcaaatattggtatgtcctaagaatggttggagaccatggatgcgtacacctcatcttgatgattttgttcggttgttaacttgttccatttggattctagatgagttgtttttggcatcatgaaatctgagtcgttcgatgttagggttgcaaaaagtttctttttctctcccttagtcaccgcttttcgtcatgactccttctctctcgcacattcttcttccccacatgcctccttccctggccatacactccctccatcctaggatgtcgtcccctcttcctatctccacaagaccacaaccctaggtgtcgccctcatcccaccatctcttggtagcgaccattcctcttcctcatttctttccctagtgctgcccctcttcttctccctctccaccgtggtatccatgaccatgccctaggtcatcctccctactgtggaccaccttcttcatgggattgaagagctggaaatgaaagagaaggaaggggataagcaggatttgttcatcatttctaggatagtaggtataattcaaaaactagtatggatcatttaagattttagtaattccatgaattcaaaagttgtaggttttgttgttatctttcaa

SEQ ID NO: 140161 - DNA, 537 bp, Zea Mays
gggtagcactagaactcctagcctcatgatcatgtgagcgtggaggcataggaggcggaggcagaggaggaatcccaaaatcataatcatcatcatcatcatcatcaactactgcatcctgagcttcgaactaatgaagagcagcatcctcagtctgagagtcaaaaactggagtagaagctggcacatgagcctcaggcgcaggacggtaggacccaaagacaaggcgtgaggcctcaagtgtaccctggaactgtggaggccgaatcagctgcacaaaaatgtgacacaggtagtgagcatatggcaactgtcgacgagcacgtatgccatccaaaacggtgtcctcgatctcacaaataaggaaatccacgacgtcaaactcagagtgagagaccagggcaccaaggagccagagatggatatgtgtggtagcctccctgtatcccatcctcgacagaagagtccgtctgataagctcaaataagaacttggctgctgtagtgaaatctgccggtgaacgtcgcgacccatctg

SEQ ID NO: 140162 - DNA, 385 bp, Zea Mays
gggatctgctatgcctaacatgaacttcccaggttttgatgggtcaaatcccaagttatggaaacatagatgtgaaacctactttgattactattctgtacctgttgaacgttgggttaggatggctgtcatgcattttgaggggtctgctcagtattgggttcaagctatggaatctcgggttagggaaatgaactgggagtcattatgtgctgctttaaacactaggtttggtagggatcaacacaataccctgattagacaattttatcatacacgccaaaccaattcagttgttgattatgtagagcagtttgatcagttgatgcatcagttgttagcacatgaaaaccagctgacctcagctatgattaccactagattt

SEQ ID NO: 140163 - DNA, 297 bp, Zea Mays
tgggcttgtcacagcacagagctcataacactgataaatatgctgatcgctccaagcagtgaatctgaaacacagtacctccagcatctggtagtatgcaggcaagatctgaaaaatccttttataacttcagtattgcaagtgtttcctttggagtgcaagccgacactgtgacaagaaatacatcagttcacgtaaattattttgtaatatatctagtacgacgatgttcagtatttaggagagtttgtttaggtaatacaaagaaacaagaacatgaaaatagatatctaggcc

SEQ ID NO: 140164 - DNA, 622 bp, Zea Mays
gaagactactgcaattagtggaaccaatgagaggggctctggcataattgagatgagacgagacgtgtgacatgccatgccaccaccagtaccgatgtctcctccacagaacagaagccgccatgcggcggccggtagcgagagcatatatctctgtcatcgtggactcatcctggacctgggactcgctccggctagctactcgcggtagtcctcctagtgtttggtaccggggcattttcctaagctactcgcagatcattcagctaccaaactggactgtctactccttgggcacaaactctcacagaaactctgggagggtatcttcgagtgctgtcagctcagctgcatgattcgtcaggcttcggggcttggaagtcatgaggacttgctgctgctgctggcacaggactgagtggaggcctgcaggccacaggagctggaggaatcttgcgcagaaagatcgtttgagatcggagctgacgagctgctatagagcatgcgcacagcaccggttggacctcaggattttccatggagggatagagagcatgcgcacagcattaggttctggttaggtggtcatcagtagcaatttcaggcccatgactgatttgcg

SEQ ID NO: 140165 - DNA, 892 bp, Zea Mays
agcgtggagaccaccttagaaacaagtgtggtgtcctaaacaaaattatcgcaggaacacacttgacacctagcttgacatctctggggattcccttcctagagcaccttagccacctaagaagacccactcccacaaaatagattccactgaagagaggtgaggtactgttgtgagtattgtgagagggatggtcacttagctgcgttttgctttaggagaaatagagatgagaggcagggttctaaggtgagcagaagggacaagcaacccccctctcatggtgtgtgtgatcctcctgctcagagacgcgctgttatgcctataggtgttttacctcatgtttctaggccttaggcagtgatacaacatggtggttgtgcccgacggggtgctagtcatgtgccatatggccatgaaccctcgtgttagaggctttggttcccacatctctagtggaccacagtttccatctcgtggtgatcactaccccctatggactaggtatatttggtgtttttcttaacacttttcaggggcaaattccacgacactagtattattcacagtatactaacccctttttatgtcatttgctcaccccatatctttctattgatacaggacgaaggccagaagaacacgtggctcgtggattacggttgttcgcgccatatgaccggaagatctagatggttctatagccttggccccgtgattggcaaagagtacatcactttcaaggataagtctagaggtaaaatggtctctcgtggcaccattcagttgaatgagactttatgctcaaggatgttgctttggtttcaaatttgcatttgaatctgctttctgttttgcaattccttgaggatgattatgaagtgcgctttag

SEQ ID NO: 140166 - DNA, 332 bp, Zea Mays
ggattgccggtgaaaatattgttccgcttcctaaaaaagatgagatagttgtttttcaaagtttcatgaaggttgtgctacgattccgcttacacaagtttgaagttttgaagaagtttgaggttttccttcatcaactcacccctgatgcattaattaaggttggggttttcatttgggcaataaagagccaaggattggaactgaatgctgattgcttttgcaatattcacgagttatcttatcagacgaaggccactaggaaagagcagtatcataacaaattcggatgtcatacattcgtgtaccggtctgatgcaaggcgtcccgtg

SEQ ID NO: 140167 - DNA, 466 bp, Zea Mays
gctcggggagcttcacgggaagtcagtggtgccgtgggtgcaaggaattggaaagtggctcaccgtgcagttcggtccatgcacggcgacggtcggatggagtccggcgatggcaatccagtgcctccggcgaaatggtgttcggtctgagggctcaggaagctttacggggctctagggaagctagctgaggagttggattggatggaggtggatcggagtggccggtccacggtgggcgggctcgggcggccgctggcacgctgtgcgtagagagaactccagcgaactcgtgctcgggcagggctgagagcgtgcgggggagtacggtcatggcctcaggctactttataggcgcaagcgcgaggttgggcgtcgcttggcgcgggcgcacgaggccgagcgccggggtgtgctctggcgcgccagaacaggttcgaacacgtggacgtttgcttctgccctg

SEQ ID NO: 140168 - DNA, 399 bp, Zea Mays
gcacaaactaccctcgtgcgcgacactctgcgcaaaagtcacctaagggtgcagccagaatagcacaacaagtgtgttaatcgaagtctcttatttaaaagacactccgcgcaaaagtcgcctaagggtgcagccggaatagcacaacaagtgcgttaatcgaagtctcttatttaaaagacactccacgcaaaagtcgcctaagggtgcagccggaatagcacaacaagtgcgttaatcgaagtcttttatttaaaaggcattccacgcaaaagtcgcctaagggtgcagccggaatagcacaacaagtgcgttaatcgaagtctcttatttaaaagacactccacgcaaaagtcgcccatgggtgcagccggatcaacacaggcgcgcgaatacggc

SEQ ID NO: 140169 - DNA, 311 bp, Zea Mays
cgcctcccccggagatcaatgagtggcaccagcaggcctacggggtgccctttatgtcagcagacgacgaagaagaagcctactttgatgatcgcgagcagtttgccccgcctccctaccaaggggatccgggtcaatcatcctctcaccctccgccccaggatccttctggaagtgctcctcccccggatcagtctggggaagaacactttgcatctcacctggcgcatcatttcttcgctccgcatcagcctcctcctaactggtgatctttgtgttggtggctctctccttttttggttcttgttgcc

SEQ ID NO: 140170 - DNA, 413 bp, Zea Mays
aatcggcaataaggagcggtgcactggcttcataacaacatagtggagcaggccgaacactcaatttatagtgatcactcaagtgtttcgtgaatttgggatgagatgagcttgcggccggaggggtggtgagtcaccggagcacaactatcgtggcgctcaacaaggtaaatactcaagcagcagatgggctgtctactgcgacctactgtgacgtggtaacgtccccaagcacgtggcatccttgcggcaagcggtgaactccggcgatggcatctcggctggtcgcgaggcaagtggttgcagtggctagctcaccatgtcatccgcggtcacgatcttttcactggtccggtaatatccacaccgcgccgtgcacgaatctttacggcgagctcgaatcactgcgctcg

SEQ ID NO: 140171 - DNA, 279 bp, Zea Mays
gcagtcaccgcacacccaagagtgggagacacagtcaccactcgcctgaggccatccccggacgtgagacacagtcacgacttgcccgagggcgggagacacagtcaccactcgaccgagggtgggagacgcaatcatgactcgtccgagtccaacctcaggtgggaaacacagtcacgacacacccgaggccaaccttgggcgggagacacagtcacgactcacccgaggccaaccccatgcgagagacgcagtcaagacttgcccaagaccaacctc

SEQ ID NO: 140172 - DNA, 354 bp, Zea Mays
caaggctctccacaatttggaggctcttgcctgctttacaatttcaatggaagcttaactctgagattcaattatcacaacacactccacacttcagctcaaaacaagtgttcaaccccttttctcacaaagcatggctatcactaagctcactacttattttgaggcacttgggacacttagatcacctagatgtgttgctctagcttatatgctttgtttctcaactcttggatgttgtatgaactggttgaatttgtatttataggctcccaaaatccatatagccatttgaaacccactacaaaaactgctcaaaaataagtcacaccgaacctctatctgatgcaccag

SEQ ID NO: 140173 - DNA, 712 bp, Zea Mays
agaatcccggtacagaacacacacacacaccacttataaactaactaaggatcaccgactatcatggaggaaacacgacccacaacactgatctaagctagcaactcatcaacttggaggaaggacagagccttggctccagtcaaggaccatagcaccgcctcttccctggccactctaagggcagtgaccaggctgggattacaaccatcaaaaacgcatctattcctatgtttccaaatggtccaagcacctaggatcactagagaattaaaaccttttctcaaaaaatcagatgcccgagagctgctagacttccaccacgactcaaaggaatcctcatgagttggacatagaacctgcagccccactaaactaaggaactgaaaccagaactgcttggcaaaaacacatttgaccagcaaatgattcatggtttcagcctcttggtcgcacagggggcactgctcaggtcggtctagtcctctttttataagcctgtcagcagtccagcacctattatgttccacaagccatataaagaacttgcacttgccaggagcccaagatttccacacacgttctgctggttcgaactgaaccgaaccaaggaagagagctttataagcagaactagttgtatactcccctgaagtgctgaatttccataagtggcgatcccttattccaggttggagctcaactgcatcaa

SEQ ID NO: 140174 - DNA, 313 bp, Zea Mays
gacgagtcctagcgctcggaatgaggaagacacatagcttcgttctcgaatacccaaatgttcaggcctcgacagccacaaagaacaaacatatacctggggtaactatgctacacgggcttagacgtcggcagaaccctcggcggttctctcaacctacgacaaatgtctaagtacttgaagcggttacattttgctccggcaaaaacccggtatatctccttacaaacggaactctggttccgctcccgcaggaatgaacaacctccataccagggggcccgcaggatgatgaactctgagcggcttgcca

SEQ ID NO: 140175 - DNA, 365 bp, Zea Mays
atccctggcggcgagaggcaggttcatttcgaggtacctttgaatccaagtgatgcagagataagtgccatgctggatatgttggctgaagattcctctgatgcagcccctgctgaaacactgcctgtagcacccatcctagaggctggcaaagctttggatattcagaggtctgatagtgttcgcccggagcgtcctcgccgagccaatcaaccaacttctcctgctgaggggaagaaaaagaaaaagagacgtcttcaccgagtgtcatgcttggatcaggatgctggtccttctgctcctgctgctgaggaagtgccaataccagtttttgctgaagttgaccccaatgggtgtgacccgac

SEQ ID NO: 140176 - DNA, 394 bp, Zea Mays
cggcccactcctgtcttcggaaccggccaattcgatcccgcgcagcccatctggcgcgctcgcttaccagccactgccgtgtggggccatctggtcggcgtcatccgcatcttcctcgccacgacgcaacgcaacaaccagggagtaccgaacccagccgtaagtgcggtaaaacgccatgattctcggggcggatttgtagctgatagttacgatgtggacttcggcctcgtttccccctttccctggcatataaagctcctgtgtggctgcgagttctccacccgtgccgcgccgggcaagtaatatcatcggcgtcgtccgcggttcaaggttcgtggtgccctgccttagcaattggggtcgcgtgggcctgcccgtgggtgctagcgac

SEQ ID NO: 140177 - DNA, 863 bp, Zea Mays
cggaaacggaaacgatatcggtatttcagaaatatcgaaaacgaaagtttagtgcggaaatacatcggtaacgatcgaatataaaatacgatcggtaaacatatcaaacttcataatacaacaaagttgataaaagaccacaagttcacaattcatgatataacaagttcacaattcatgatataacaagttcacaatataaaaagttcacaaggatcacaaatttataatataacaaattcacagtataacaagttcataaagatcacaagttcacaattcacaatatccactcgatctagctgacatgtcatgcttacttataaaatattttttcctcacataaagaatttttcgcaatctcacaagaaaaccctaaaacctagtgtgtggaaaagaccaaatcgttaatctcagctgccttccaataccatctattccaaaaaaaatcttaagacgtgcaaaaatacaaaaataagtaatccttatctagaggcgtataggcgatgcgaaaaatcacatcctggaaaatttcgaaaatttttgagacacaaatccgaaaaattctgagacacaattccgaaaaattccgacaaaaaccggtaatcgaagaaaacggtcgataaaactctacgtcgattctgatagaaaaatccgaaaaccgattccgttttcgaaaaataccgttaccgatgaatcggatcgaaaaatttcgaaatcggtttccagaataccaaaaaaattcgaaatcgttttcatccctacccgtacatgctgtcggcgtctattcctaaaacatccgacttatatgacaaatctaatattttaacatagatatacataaaatttaaagctactttttt

SEQ ID NO: 140178 - DNA, 330 bp, Zea Mays
aggttggtcttcggttccctttgagtaagtttgtggttgaagtgctgaagatttaccagatcttccttcatcagatcacccccgaagctctaataaggatggggatttttgtctaggctgtaagaagtcaggggctagagccaagcgcgaagtgcttctgtagtatgcatgagcttttatatgagatgaaggctactggtaaagaacagtaccacaacaacttcagttgctatggatttattgttcgccccaatgcaagccacccgataccgacattccaaaaaagatggcctgagtccgatatgggagagtggttttatgttaaaaatg

SEQ ID NO: 140179 - DNA, 474 bp, Zea Mays
cgggagagcaggtggcatttaatgttcgtgcttctctgtaggggcagttggccgaggtcaggctcgggcgatgcgaagatttcttctaaggccgaggccgagattaaacgatgtatgtagtcacgctctcgatggttgaaacagtggccagagtggggaataatatcctgtatttacgctctgaccattgtcgtgggtggtaaaagtagattagaccgtgatcgtgttatcctttgttgacttcggcaccttcagcaggacaggtggtcgtacgaactacattagatacacatgctccgagacgtcctttggcgaattagaaatgcatttcccgcccgaggttggtctcggacgagtcgtgatttaggttttgtgtggtcttggtaaggttgggagcgtgttttctcatgaccccttcttaccccaagcgtctaggcattttagggttctgatctgggtacccctaattttggt

SEQ ID NO: 140180 - DNA, 828 bp, Zea Mays
gtgcacaattagcttttagccaaaacagacatggctgctagccgcttctttcctgagccccttgtccactataatcctccgcgattcatttgattgaggccattgtctcagagcagcatgaaaattcgatatcaacacatgaatcccagggtttcgtggatcagcctccagcatgcgcacagccacctcctttcctcttgcagcatccacgtttgctctgcacgcgttcagcatagcgacactgatagcgctggaaggcttatttcgacttgcggttagaagactagaatacagatcccaagcctcgtcaacacggcctgtacgtccgagcatgtctatcacacatgcgtagtgctccggctgtggatcgatcccgtacttgctcttcatcaaatgtagcatggactgagcttcgtccaccagaccagagtgtccgcaggctgacagaaccgccaggaatgtgattgcgtttggcaggaccgttggcgcagcctcctccattagcttaaacaaatccaaagcatcaacgccatgtccatggcgactataagcgcccatcatacttgaccaggagaccacgtttctggtagccatccggtcgaacactacgcgcgcagccgtcgccctcccacattttgcgtacatgtcaataagcgcattgcatgtgatggtgtccgaatcaaagtcgccacggagagccttgcaatgcacctgcgtaccgtaggccaggtttgctgtggccgcgcaggccgtgagagcagccgtcagcgagatcccattgagctccgtccgccgcctcagcgtcgagaaggcgtcactgaaccgtcc

SEQ ID NO: 140181 - DNA, 386 bp, Zea Mays
gggataaaatatttacaagtattttctggagtcaattattcaagttgttgggcactaagctgaacctgagtacgacatatcacccacagacggacggtcaaagtgagcgggttaaccaatgtgtggagatgtacctgcggtgtgcagttcatgcccaacctacgaaatggaagaattggttgcctttggcggaattttggtacaataccacataccacacttccctagcttgttctcctttcaaagtgttgtatggttatgaccctccgtttgcagcagcacctcatattccttctgatgctgccgttgatgtggcacaactgttagcagaaagagctcagtttaccgtgatgttgagggagcagcttgcagcagcccagaaccac

SEQ ID NO: 140182 - DNA, 479 bp, Zea Mays
aaaaatagttaactgtaacacaaattacaaaatgacaagccaaagtatacaaaccttcaggctgttgtaggctaggctatatgcaagctgatccttagtcatcgcagacaaaccaagttcaagcttcggataccccatattatccgtcatttcacggcaaacattgatctctttactgtctggtagacagtagacgcaatcatcatcattatctcctccgtgttctaaggacccctagggatacttcagcgctttagcataatgttcagttttgacaaattgttctgccgatatctgttttcccgaagcatgtcaaacaataaaatttaaatcactctagggaggtgcttcgggcagatgttgtgggtttctctagaaggctttcttccataagtttttctggcacaacttctaaaggtcccgcttctgcatgagcagaagaagtgcttgcagcgaccatctctctggcatcttcaatt

SEQ ID NO: 140183 - DNA, 624 bp, Zea Mays
ctcgagttgatccaaactcgcgtcaatccactctgccagacatacctccccatgcccacgaagggatggctttgcgaaacaatgggcccaaggcctttcacgagaccttctagccttctagtggaccgggggatatttgtcccccacaaaccctaaccctaaccccttcgctcctcgacgtcggaccgtcgctaccggctccggactccgatactccgtcctcctccctcgtccctccctccgtctatgtatgttcgcttgcttgtagctgtgcagaacacatcttgtagctgtgtagaactcatctagatttggtgtagtacctgtgtagctgcctgcctgttcgctgttcgtttgctggtcgcttgctggtggctcagtggttgtggttgtgctatgcttgttcgcttgctgtacgtcagtatcagtgtgattcactgatgggtgatggttcactgtggtggcctcctcaccgtcgcttgtttggacatctatactgataactcatcctcctcctgacctcctcactcgccctcctaattcctattcccatcttgcagtctcccagtcccagaatcctcacaagctagcacctagaatctagcctctttgttgtcgtctctg

SEQ ID NO: 140184 - DNA, 329 bp, Zea Mays
agacacttctagcgagttcactgcctttcaaccagactcctctgtacttctctcacaatagctgctctctgctgatagaggtcccagctgtgcctctgttgatacgaacgcttgatgacctcgacgaaatactgcacaacgctgaagccagggaaagacaccgtgtccctagaaggatccgaaaccgtcccatctacgtgcaatgccaatgtgtggcgacccagcttgttcgctgctgtagcttgattaattgcagcggcgtcggccgagtcgaatggttgtcttttgacctgtgcggttccttggttgcaactccacgaatactccac

SEQ ID NO: 140185 - DNA, 619 bp, Zea Mays
gcggggaaaaggccacaaatcctaggatagagaggggagaacggcgtggagaaagcctcgggtggaccggaggaactccggtgaaggattctggccacggggagggggtttgaggcacgttaaggcctgggatagcttcagcagagggaggggtaccttagggactaacaccggggcactaggctgagctaatttggccgatcaccgcgcgggcgcagcggaccgccacggccgaactccggcgaagccgaaattggccgaccacagagcgcaattgggaaaactgggcacgggtacaggtgtctcacctcggggcgaagctcggggtggcttggcgtggtctccggcgaagtagatggcctgggaggtgggcacaggtatccggtgaggtctggtggtgtgagcagagcgcgagcgagggcgggactgcatgaaatgaggcgggggagtgagtgcgggcatgggcgggggctcaaaaggagctggggcgtgggcaaagcgacgtggccgaagatcctggcgacgtgcgcgctctgtggttggctgggccgagctgggctggtttgggccagaatggcttttcctttttcctgaatttcctaattccttttctatttct

SEQ ID NO: 140186 - DNA, 364 bp, Zea Mays
gtggagaggtggcagagtcggatccaagattcctgacagatttagctgcaacaaccgagcaggaaaacggttctagcgagaatcttgcgcaggatttgcttctggtttgttgagctttgccatcgaacggacgaactccagcggatgcggggaaacctgctaacgccgccagggggatacgctgagcaatctccaactgagaagggggagaagaggaatagtggttctgggtcccacccaccagcttcctgcacgcgatcaaggtcaggctgggctccccatgaatcgcggtggagtttgttgtggctacagggtcggtggcatgtgcatctgcggaacggggcccaccacgaagccacagcgc

SEQ ID NO: 140187 - DNA, 414 bp, Zea Mays
gagaagaccctacgtgaacatcaatggaagtatgagagggagaaccaactcgaacaccctcgggggctgggtcatagctcaagctacccatccgagtcggatcatcttcggcaacgccctcgggggctgggtaaacgctagcgccatccttgaggtccgagccccttgtaacagccacctctaaggctaaaggaccttcaaccacttccatgggaacagagcaatccagaccagcctcctgactcataagaccgcgctccaaggtcgatgaggcacgagacgctgctcgggataactccaacccggcatcaggcacattagcacaaatttccatcatcccaccatctaccggctccgacaacagatcttctgggaccatattttcgagagtctgatcaaaatttgccagagaca

SEQ ID NO: 140188 - DNA, 548 bp, Zea Mays
tttcatttcgatttctatgtaatgctattatgcttgtgattgtactaagtccatgattcactcatgtaagttgggtaaatttgaatctgtgattgactctagggagctaagacgtcgaggacaaagttctatatcatcggcctcacaggcgtctaattctcactcctccgcctaggacatggagattgccaggatgcatgaagttataaggcagcaagctgagcaccaaaggtagaacaatgatactatgtgaacctctaggcccagcaacatgctttcctctcagtaagtcgaagtaatgtgttattcgtaacaagtacaagcttgtttggttttgtgctcctcaaaagatacttgcatcaaaattgtagcaagtggcacaacaaacgggtgtcgagatggcaagctttgggatgctgcctcccgcacttccgccgccgcctccacccccgccacttgtacctttagttcgtccagattaggtattcgttggttcatacatacatatatgcatgcatgatagaaatgaagaacttagcatttaatgt

SEQ ID NO: 140189 - DNA, 1156 bp, Zea Mays
cagcacagaagattgcacatatggttggagtttcatgtagacccagtcatcaatagcaaaggagcgttcagacctgtgtttgtccgcttggcgctgcatgcgagcctgagcacgcaggaggtgttgatggatgagttcctgcatgtgggagcgctcctggagccagtccgaaacagacgctgggatggcactgtctgaagaaatgcccaaggaccttggttgacggccatagagaacctcaaaaggtgaacagcctaaggaagagtggaggcttgtattgtaccaatattcagccgctggtagccaatcaatccatttctttgggcaagcgttgacaaaacaacgaagaaatgtctctaagcattggtttacccgttcagtttgcccgtcggtttgtgggtgatacgaagaactcaatttcagctcagcaccaacagacttgaataggtgttgccaaaatgtgcttgtaaacaccgggtcccgatctgaaatgattgccactggaagcccatggagtctgtagacatgattcataaacagcttggcaactgaactggcagtgtaagggtgtgaaagtggaatgaagtgaccaaactttgtaaacttgtccacgaccactaaaatacagtcggaggatccagaccgaggaaggccttcaacaaagtccattgacacggtgtgccacgcagaagacggtactggtaggggctgcaacttgccggggtaagcagctctgtcgggcttagcctgcaagcagatttgacattgttgcacaaagttcttgacgaaggacttcatattggtccatgcgaataatcccttgacacggctgtaagttactggaaccccggagtgaccccctaccgctgaagaatgcaatgctgacacaatgcgggactgaatggttgtgtcgtctcccacccaaatacgacctttgtatctgaggatgccttcggttagagtaaaattggaaacaacggatggatcgatggcaagcttagccaacatagattgagctgttgggtcgtggctgtagctgttttggatgttcaacaaccattgtggtaccactactgagacagcatggacttcagctggagcacaacgggacaaggcgtcggccacacggttctctgagcctgggcgatactgaatc

SEQ ID NO: 140190 - DNA, 764 bp, Zea Mays
ggagtagcggagagaggacggacgcgcccgcgcgcgcgagagagaggttgtctttaatttcgtcggcaccgtacgtccatcgtccatgcatgcaggcacgcacacccaccggcaccagacaagccaggggcggtcccactcgatcgtccatgcactgtgtatgtaatcgtgtcgcgcatgctggatcgccgacgtattcacctactcctacgtgtgagcgagcgagcgagcgcatgagacaagacgagacgagagcctgaggaagtgaggaggacagaaacagatgctgctgtgctgcgctgcgcgcgcatatgcaatgcacggtgccgcgatcatccgtcgcacaccgaattgctacaaacccattagtcatggactcagtcgctaagccgcccgtacggacaaactcacagacacacagagatcgcggtaaagctagcgttgcggtgagggagactctgagacgacggcgtcggcgtgcgtgctccacgcaacggctcatggctctagggtttcctctccgcctacgcctatatagcggcactctctccccgcccacctgctcaccctctctcctctgatctccctggttcctacccactgccaaggaaaaaccaccaaccccagacccagccagaggcctctgcctcagcccgtcttcttcttcttctcccatggcttaccgcggcggcggcggccggggaggaggaggccgcgacggggaccagcagcgcccgccgcacgtccacggacgaggagccggg

SEQ ID NO: 140191 - DNA, 494 bp, Zea Mays
ttcgatagcgaagaaggcagctgggccgaaaaaacgaagaattattactgtgacagaagctattgaagagacaccacgaccagcttcgacttcaaaggcaccagctgttgggagcgctacagctaccgaagttgcacctactgaagctgcaactgccgaagctgaaccgaccgaagatgcaaatctagaaagcacactttctaatattgataagatacttctggacatggccgcagaagaagctgctgcagccgccgaagaaaccacagctacagtgcctgagaaggagaaggaaatagccgaagctgcctcagaagaagaaaattttaactttcaaaacttaattgggcaagaattgtcgaagactgagaaagaagagttgagagaatacgccatatcctgcgggtatcaaccaggggtactactcttcggcggtgttaacgatgaaaggttaggctgcctccgagatcaaaccggagcgaaggttatcggta

SEQ ID NO: 140192 - DNA, 556 bp, Zea Mays
aattctgggagctaactcaaggcgggagaacagtcagtgagtatgtgcacaagttcacagagttggcccgttacgcgcctgacgatgtcagcaccgagtccaggaagatggcccgttttctgaaaggactaagacccgagcttaagaccatcctcgctagccaagacttcctcaacttttctcacctctccaacaaagctatccaagtggaaagggcaaaagaggaagaaaaagggcacctcaagaggaaattccaagttctccgagctcaacagcaagaacgtcaccagagagctcgaccctttgggcttccacccaggggaccaagcttcaataaaccatctggacccactccatcgcgctacagtcagcaaagtcagagctcccttcaggcaccctccgttgcaagcaaccaaccgccagcaaatgcctgttggcactgcggagaccccagtcacttcaagaataactgccctcagttgaaggcacccgggccgacctactccaacttggtgaatggccccaagattccctcagcacctacctccaaggcacc

SEQ ID NO: 140193 - DNA, 694 bp, Zea Mays
acttatgtgctaaaaataggacctatatgcattgttctctgaaatgtgtgggaggacgggtttatatgcataaaacgtgggggctcttttgaaagattgacagtccaaaggggtatcgtccacactgatccgtctgatcttaccccgatggtggggattagatcagaccgaggttatattccacttgcgccatgaccgcttgatcaaaaatcaagggccaagattggaccacgacttttatgaacctgtgcatggtttgaaccgtcagatcctgatacgagggctcagggatcacggccgaagaggtaagtatttgatctaatcacattcgtcgtttactagctcggtgatccataggccttctctccccgctggtggcgctgcatgcccacgacggggaactcgccgaagaaagtgatgtcgtgctcccacacccaaaaatatgagaataacaggtgctacgcgaagggaagggcaggtcaaacaggctgggagagtctcttaccagaatcagaggcgacaaacaccctattcatagcgcgaggcggatccgtggggtccccgaactccggtgaccaattgtcccccccatcgatgatcttgtcaggtgaggccacatccacgtttggcgggatcacgcaatgctcctggaccacctgctggggttggagggtcgccaatggggtagatcgac

SEQ ID NO: 140194 - DNA, 602 bp, Zea Mays
cggagactgatgaatgataaacagcctgctgctgcctacctgcctgcgtatgaaaagcgacgagcgacgaggatcatgaaccaccatgatggcggcgtcgagatcgggatccatatgcatgtgagagcaagacgtgaccatctcctaccttttacagctcacaaagacgaagctcggaggagctggtgaccagaccttggggccatgcatggatcactttcccaacccttgttatcgagtatagagtaggacgggcggataaaatactagatcccgagctcggaaaatatggcgtcggtgcaagtggaggccaatcatggccacggtgctgccggctctccaccttggaagctttatcacaacccccactacaccccgcggggcaggggcacccatctctcctcatcctgctgctcgccctctccttgccaagtccgcaggagtcccgagccccctcctatgatcattgcgctggacgacgaggaggtcgaccaagggtacgggtacggcgccatgtcgtcggagctggagctctgcgtggcacgcatcagggacctgagggcggagctggagttcgagcggcgcatgcggcgcaaggcgga

SEQ ID NO: 140195 - DNA, 321 bp, Zea Mays
aaaatttcacgctgaacaatttctaatcaacagtcagggcatcgtctaagctcctgtgatttatcttccatacggctctcgaacattcatccccatctgttctcactctctcgcccaacacacccgcccctgcgctgcaggacatggacaacactgctcgctccactacctctttgtcgtagcgtcatgagtcgccgcgcgcccgcccttatctggtccttctcctccgagttccctcctccgttgtgtgctcctcgttgctgctgatccgatttgccgccattgtttggaacaaaagtttggttgccccttcattttagg

SEQ ID NO: 140196 - DNA, 929 bp, Zea Mays
gcgactgatgatggcgttggggaaattcatgagcaggcatcaggaagcggctcggcgagcatcagcgtggagctaggaacagcatccaggcgagcggccatgggaacagaagcaaaggcgcgggtgctccggtgccggcgagtgcggaccagacgaagtcccatgactatggcttggtgtgctggtgtagaggagaaccgagacgctacgatgaggagtctggccggcggagaaacacgaccacgccgctgaaaatgacggcgtacaggagctgctcatgcacaaatacgagggaggacgaagcagggacgtgagcagctcggtgcggtggggagcagtgatgcgagcagcttgacgctgatgatgaaggccaggacgaggtcgtcggcgctgatgtgttgagtacaagggcaaggaggaagcaggaagggacgcttggcgttgtccggcctaggtgagcggcacgatggcgggcgaggacgttacgaggatgctggcggtctgcgtgagagacttccagcgatgcaataatgcacaagataagagcaaggctggcaagatttcagagggtacgtggttcttctaagccacgtctggagcatgcactagaagaagataagaacgtacacgttgaggagcattctctggaagaagatatttcacaaacgttctcaccaattgcaagttctcatgaacgtttattttgtattttttttttctaaggagccgacatcttatctaggataagggtttaaaagggataacaagggattgacccaaaataatatccggcaaaataatttagacagttcagacaaacagaaacagataagatattgaaaatcgtaacagacgaagacgactaaaatttagtgactattatattcatcgatatcccgtacttaagtccatagtcgatatccaacagg

SEQ ID NO: 140197 - DNA, 841 bp, Zea Mays
aaaatccaacgcctgagatctgtgcctgggctaggcaactttagctggctttaaaccaaaaaagcccttagaccctctcacgctttgagaccctctctttgaacttctatagtttttcaatatgaaaaaacagatattcccttcgggaccgtatcgtatgcacaaggacgggtctgtgcacatatgcacatgtgcgatcgtggcctttctaagttgatccgacggtgaccaaattttttacattttaatcctcccgcagctgtccttgtgctataattttgtttttcaaacaccccctcccttcccagttcccacgttcgttggcagagaaagcatcgcctgtaggctgtaaccgctgccgccgcttctcgtcgtcgtctcggcatcttcactcaccaaacgccgtcactaacgtcgcggggctcgaggttgctgcggaatggtagcgccgccaacgacatgcccctggccatggtggcttcatggcgggtttagggttccagccgggtgtgatggccgtcatggtggccgggaaccttagcacctcgtcgaggtgtcctgcggcgtttgtcaacgaagtactggcggagggtggcgaggtcggaggcgacgaccggcaaggacgcaggaggccaccggtgagactagaggcggtgaggacgagcgaagacggttgttggcgtgcttcaatctgggaagaagggaagcggaggtgtttgcaaaaaaaattgcattgaaagaacagctgcaggagggttaaagtgtaaaaaatttggcgacagtcggatcgacgttgaagggctaggattgctcatgtgcatatgtgcacagacatgtcatg

SEQ ID NO: 140198 - DNA, 286 bp, Zea Mays
cacgagggccggagtgtttgttgcccatctgcccatcgtctccttcgcttcctctggccggtcgattagttagttattctgccgctatcatatgctgcctacatacggcgtaacatatttctgcggcttgctgaaacttgcgggcaaaggaactcgggcttccgaacccaatgattagagcgtcaaatccatgacgttttagacgtacgtacgtacgtaccgcgtgctagctcttttttccccttcccctgcctatgacgaatcgttggcaagcataataataaac

SEQ ID NO: 140199 - DNA, 358 bp, Zea Mays
gttggtgtatttggggcatgtaatctctacccaagggttgtctatggacccagccaaagctgctgccatgatgcaatggcctcaaccttgtactcctactgaccgcaggggtttcctgaggctgattgggtattacatgcgttttgccaaaaaatatggcactattgctaagcctctcaccaagttgctgcaaaaaaggtcagtttgtatggacaaaagaagctaatgtggctttccagactctcaaacaagatatgagtgctaccctagttctagccttatctgattttcaacaaccatttgtggtggagactgatgcaagtgaccaaggattgggtgttgttttgcttcaacaggg

SEQ ID NO: 140200 - DNA, 327 bp, Zea Mays
catgaattgcccacgactcgtatatagtcggtgagtgaggagtacttcacgtaagcaggttacttgctgttatgcgttgggggggcgcatctagattgattctagttcgttccctcgtctcgtgttcagacagcaaaagaaaaggtttcagaaccaaacacagctagcctcgctcgtcgctcgtcagtgcctgccgcccaaacgccctttacacaacgtgctgtgctgggcttgcactgccctccggttcatgtcatttagcgcaataattctcgaaccctcactatagttctgaccaaactcgatcgatgtgacatgggtggataa

SEQ ID NO: 140201 - DNA, 543 bp, Zea Mays
taactttgaacaatgtgtaagcctgcataaagatttccacggacaaccaaaacacagccaaagtgcaccgcagaagcctagatacatgctaatgcaggcaatcaaagagttccataataaaatattcctttacttagaagcatcggtacaatcataaaaaccatcttttaggaaaatcacaatgactgaagccaacaattatgtagatttggggaagcctacagttatagtgcaaccacaatcatgaaactgcataatcaacaagcttcatcatgactgaacgtttaatcactaaaaagccacatataataccaataaaggggtcgatggagtatcttaacaaaacatgtgaacaactataagtgcctcaacagtaagcattgcttcatttggctcatgtctgtaatcagacaggtaagaaagatatttgtagtgcctaaactaaaccatatatcatttgactgactcaaaagttcaagtgataccattcacaccaataaagtactccctccgtttcaaaatataattcgttttagattaatc

SEQ ID NO: 140202 - DNA, 308 bp, Zea Mays
gtcatatcatcctcctccccttgaaatggagtcatcctcgactctgaagtgtcttcactcgtatatggttagaggtcagcaaaattgaacgtgttgctcacgccatagcttggtggaagatctatcttgtatgcattatcattgatcttggcaagaacacaaaatggaccatccccttgtggcatcaatttggatttgtgctgatcaggaaaatgctccttgcgcaagtgaatccaaaccaagtcccccggttcaaataacattttcttcctatgcttgttcatgcttgcagccttgtgtactgcttt

SEQ ID NO: 140203 - DNA, 466 bp, Zea Mays
ggagaagttggatgactagcttggtggagacgttttgggtgaatagtatcaggtctctgaatgtccaatgtttttccagactctaggatgagtgctacagctagtgtttcagtaggagccgagtcagaggaatcctcagccaacatatccagtatggcacttatttctgcatcgctcgggctagtaggcatctcaaagtggacctgcctctcgtcattggggattccaccaagcgaagcaaccaaagcctcaacctcatcgggagagggccgcaccctaaggccaaaaccactatccccagcaggaggatttgacacaaaactgatgaacgtcttgggaggaggcagattccatgctgaatacgcaacaggagcaccaacattcgacaccttgcctctaaggatcatctcaagccggcttaccaggtccacagcaggaatccttctattggtaacccaggtcaaat

SEQ ID NO: 140204 - DNA, 317 bp, Zea Mays
gatcattgccaccagacaatggcgccgtacgtgcatggcgtaaaaatcgaacagaaataacctacggatcggagaatgtagatcgcatgcactcgaccggctagtgtcgtctgacgcgcacggtgactggtgactggtgaatgttgagcgcctatcgacgccagtgcatgccgccgcgccagatcgttggacgagccatagcccgcccataggccaggtacaagccacgagcgcaccaatacgaacaagcagcgctgtccctgttccattaccacgccgcgtcccgtccctctgcgtgcactccagccgcagggaaa

SEQ ID NO: 140205 - DNA, 1303 bp, Zea Mays
  misc_feature (579)..(678): n is a, c, g, or t
caaggttgtaagctcacttgttgagaaaaatccatagatattcaagcctgaagtcaggctgtcagactggtttggtctgaattttcagactaacagtggattaccaccaacttcaaacccaatttcagacatgattcagtgactttttgtgacaacaccatgtagcaaagttatagctggtttgtagcactccactattgctgcagaactttaagtatgttaccataaagattcgtgagcaaattgggcctaaatattggctgtcagatactctgaataggtgattgccatggtacagtaaagggtaactgaagaagatttcgttccctgctcgccgctggtggtccatcgccgtcgattaccgctcgccatgattcgtgcgccgtggacaccagataaacatcagccagtaagaatcttcaccgccgtgagctgggctccactccggtgacccctcccgtgtctccccctctgctttgcggtggagcgataggctcgccgtgaactgccgcttcccggcctcacgccgcgtggtttttgcttttccaccgcaaccaccggtgactcggtacgggcatnnnnnnnnnnnnnnnnnnnnnnnnnnnnnnnnnnnnnnnnnnnnnnnnnnnnnnnnnnnnnnnnnnnnnnnnnnnnnnnnnnnnnnnnnnnnnnnnnnnnacgaatctagagattcgtcgcttatttgcaaaatcaccttttaagcactatagagcctaagtctgaaattcagttgagttggttcaactttggagccctgtatcttttaaaatataaggattttgcccaaagtgaccacaacaagtttgtagaccaattaatggagaacaactttgcttaaggttgtaagctcacttgttgagaaaaatccagagatattcaagcctgaagtcaggctgtcagactggtttggtctgaattttcagactaacagtggattaccaccaacttcaaacccaatttcagacatgattcagtgactttttgtgacaacaccatgtagcaaagttatagctggtttgtagcactccactattgctgcagaactttaagtatgttaccataaagattcgtgagcaacttgggcctaaatattggctgtcagatactctgaataggtgattgccatggtacagtaaagggtaactgaagaagattccgttccctgctcgccgccggtggtccatcgccgtcgattaccgctcgccgtgattcgtgcgccgtggacaccagataaacatcacccagtaagaatcttcaccgccgtgagctaggctccactccg

SEQ ID NO: 140206 - DNA, 693 bp, Zea Mays
ctttgctgcgttggatttggccgcatcggagtccccgccgcaatttgatgcgcgcgaagaatctacttcctcggccagggcgatagccgaagaccaccacaggcaaaaggtggtgtcgaagcagagtgttggtgggatgtcacgaagtgggagacgtcaccgaatgggtatggagcgatcccgtcttcgactagatcggggtagccaacgcgatctactgtcctcgacggccgggacgtgtattggggagggggacttgcagaatctatttgagggcaaagagttgaggatgatgttgtttaattttcgggaggcggttcttatttgaaggcggagccgatgtagcacttttgctggcctcgctcccgtgttgcgatactgagagaaaacgctgcccacccccgcttcgcaatagagagggagggcgacaaaatatgatttgtattatttgtgcgatgtggccgacgggcccgttgttttatgtatgtaaactacgatggcatatcacgtgctgcatttattgcatgattgtgtctatttgtaatcgtgttggtgcgacacttaggtgggatgaggacttcgcttcctgtgggtgatgtcatgcgcttctggcgcatgcccggctgcacccttaggcggcttttgctcggacgtgtcttatagtaaagacttcgcaccctgtgggtgatgtcg

SEQ ID NO: 140207 - DNA, 424 bp, Zea Mays
gtgcagatagcaccgattttactagagtttccctaccagccttggacagtagtttgcctttccagccagccaacctgttattaattttttcgattagtggttggagatcaatcctttttatgttcctgtaataaaggggtaacccaaggtacttcctgggtaggctagtgtattttccaggaaacacgtccattagtgttggccataatgatgctggatatcgaattgggaaaatttctgttttgtcatagttgatctttagccctgaacacccctcgaacgcgttgagaatccctttcagcacctccaagtctgatttgtcagctctaacaaacacgcccgcatcatccgcgtagagagagcaccgaagcttagcccctctaggcagcacccgtccaagcagtccatctttagtggccttctc

SEQ ID NO: 140208 - DNA, 489 bp, Zea Mays
aaacttccgaaactgggggatgtattctctggagccgccaaggtagtattaccttacccttcttgttggtcggtcagattaattgactgtcaatggaatagacacatgcatgcaacatgcagggtttatttattaattaatagctctgcgtgtgcttgcctgcctgcctgtcttattatatatatgtacagtttgtgaagaaacatgaaggcggtgccgcaaagtctgggtctggcagcagcgataatcagaatacttctcagcagttgctatctcaggtttgtcgacttttgtctcgctcgcagtcgcaggatatatatatggggaattctagctcataatctatgatgtttgataatttttcgttaataatggggtggaccttatttgatgtttcagatcaactatatcagggaagagctacacaccctacaggcctcaacaccaactacagtagtgacatcggctgtgaaatctggtcagtgctcg

SEQ ID NO: 140209 - DNA, 508 bp, Zea Mays
gcgcgaagcaaatgatgttggaccactcagagcataagatccctcttagaaagccacgaactgaggtcagcatgagacaccgaatcatcaactgtcaggccaaagtgtctaggattacgaccatagaggatctcaaatggtgaccgacccaatgaagtatggaagcaggaattgtaccaatattcctccaccgacaaccatgaagaccatttggacgggcaggcctgcacaaaacaacgtaagaatgtctccaggcattgattaactctttctgtttgaccatccgtttgcggatggtaggaagagctcataagcaattgtgtgtccgacaacctgaacaattccctccatagtgtactggtaaagactcgatcacggtcagacactatggactctggcatgccatgtagtcgatacactgcatccataaagagctgagcaactttaagagctgtaaagggatgacgaagtggaatgaagtgtgcatacttcgtcagccggtcaacaa

SEQ ID NO: 140210 - DNA, 398 bp, Zea Mays
gtttgtggtggtcggagtcgcttggtccacggacgcaggcggggatagtcggcggcgacttcgattcctgatcaacggcggcggttgtgttcgattccaccggtgaggaagcttctcgggagaacaagggtccggctgacgtaaggaattcggtggaggtgcacttgtgggggccgacaacattcaccggcgcatgagtgcggtccggtgaccaatggcactactcctgtggggtgtacagacgaattgggcttgccgaggaggttcactggggtttaaggaagctcctggtgttggttgctcggtggtttgaaggttgtgccggtcgggccacggtggccgactctcggctggcaggacgagcggtggcatcctcggctgtagtgaactcctgcgaa

SEQ ID NO: 140211 - DNA, 351 bp, Zea Mays
catgacccgcctggtgcggtggtgcctgcatggctggccgagtggccgtagtcagatccgtgactcgcctggtgcgacggtggtgcctgactgcctacacggctggccgaatggccgacggctgttcgactggccgtggtcgactgtgagcctgtgagctgcgactgcgaccgtcgtcttccgtcttcctcaggccgcgacgctcggattccccaactccagcagccgtggcgccacctccacggcaacccgtctcatcgaccgccgcgaggatggccggagcagctcctgctccttcccgacctccaggacagggagtctctcttcctccccgacctcctttatgtttgt

SEQ ID NO: 140212 - DNA, 681 bp, Zea Mays
ctgtgttgccctatcgccatgccaagctagtactgtgtctctacactaaacacatgtcacaggctcacagccaggtgaccatgatttcagttcaggaagctaggaattcactttaccaaatttgtaaagcgacaaacctaagaaggcataccgtgtgcacatcatcctttaagatggcaagcaaaagaaattgtaataatgagtaagaaaaaataggcaaaccctgagaacttctttagatcccatatcatcgtcgccataaacaaaaagatgccctcctttattagaatgtactgctgacccagcagaccaatgcaagacaaaaacaggaagcctacgactccctgagaccagctgtagcttaataacattagagtatttcacctgttattaatgcaagacaagaccatagaagtatgcccaccgcaatagttgagccctctcttgaagcccaacaaagagagcaaatttctctttcttcttcactgtcatcaatagtagtatttagttgatcttcaccagaatcccctgagcaccattgatttgacccttcatgcgtaaatccccatagcctctgacagaaactgcatggtcctcagatacatcccaaagaaccaacaacccgctctcatatgcaattagcaacatgcataaatgctattattcttaagtgcctatgaa

SEQ ID NO: 140213 - DNA, 787 bp, Zea Mays
ataataaagcaaaagggcattaaatataggtacctataatcaatgcacgttcgacagcttcttcagcttcctttgcttctactcgggcatcatgggattccttttcactttttttattgcttcgttggctatctcatggctgcccttcatccaaacatcggaataaaatttccagctcatcagagtagcttcggctgaaggttccttcttgtcatctatggacaaaacaacttctgcctcggttgcagctttaacatgttcacagccagttttctccaaaactgctgcaacccctcgggcaccggcgaaggcacaaaagtccccacagtctctaagtatttcttcaaaagcttcaacttcttcgtcgatccattgaatgactccttcgagatcggctcgaataaatttttgctccgatgagtatgcacccacctttgcaaaactgtctttcagtttcgttgcgcaatccaaggatttttcataacatttctccttggattcacgaagctcctccacattcttttgcaatcttgaacatgtccattcacttatttcttgttttgcctttgcaacttcaaaattttcattcatttcaacaagttttttctttaggtcttcgacttcggctttgtgagctttggattgtgcattaagtttcgcctcgctgctcttcagcctatccactaaggaaagcaatattttatcttttttaagggctttgttccttagcgtaatgacttccgactgaaggttcccaagggctatttggcagcttacatcttttgcg

SEQ ID NO: 140214 - DNA, 312 bp, Zea Mays
cactccagccacctcctcctccgcaccagcagccctctgcgaaagcaaggaagcaaaacccagcaacagcattagagaacagtaccgccaaccatttccataaaaaaatgaacgcacggagcatttccacgagcacttggggctcggataaagagcgacgagggtactgccttaggaaggggagttgagagcatcgagtccttaccccgagcgcgacgtcaagacgggcaatgagatcggcgttggagcccctggcagagaggccgtgccgcttgcagaacgcctggagccccactggatcggtgttggagc

SEQ ID NO: 140215 - DNA, 310 bp, Zea Mays
gttttcaagaacattcagccgttgaaggacagggcttacccggcttatctgtaccgaggcctagctgactcaactcgggttaccaacagaagaattcccgctgcagatttggtgaaccgacttgaaatgattcttagaggctaggtatcaaatgttggtgccccagtggcatactcggcctggaacctgcctccttctaaagccttcactcattttgtttcgaatccacctgttgctgatggcagtttgggccttagagtgcgaccctctgctgaagaagttaacgccttggttgcctcgctcggggaaa

SEQ ID NO: 140216 - DNA, 532 bp, Zea Mays
cggaagaagaagaggctgaatagagttttcgatgctattgggttcatgtaccctgattaccgctacccgtcgcggggcagaagagaaagagtgcaacttccgggaaggatgctgctccagctgctccaagcgagcccgcgtcgaagaggaaaaaggtgaaggtccttactcaccggccgcgatatattgaaccggccgaagtgcccgaatttagcgtcgagacctcttcggctactaaagccgaagaatctgccctcacacagaggaatgaagaaccggctacaatgccgaaggcatcacccgccaaattaggtgagccaaaggccattaatattgaagaggcagaggtcgaataaagaaaaatattagaagttataagcccttcggcagaggtgacagtgccgaaggcgcaaaaggatcttacaacgaccccaagaggaaaatgatggtcaatgtgctggatgtactggagaaaataaagacttcaagctctactccagggaaaacagccgaagcttcaaaaacgcgaatt

SEQ ID NO: 140217 - DNA, 305 bp, Zea Mays
aaggtcattagctagcccaataacgtcttcatccactagttgtactctaatacactctcgtgcgaatacaatgcccttgacattagggaaacatcatttttagtttaaaaggtgatctattgctttgaattctctacatttctactttttagcaactgtatggtggaaaaaggtgccttaaagccttaacttttgtttggatagttctcaaacgcaatttggctaaatttcccatggtctttattttatttttagaaacgatgtggaataatgatgtgcgatgttttacttgagtggacataaac

SEQ ID NO: 140218 - DNA, 362 bp, Zea Mays
tttcccctgtcttgctttaacctacccgtgattgctcgccggagtatcccctggtccgccgaggactcccctctgccgtctggtcgccttagtcccgttcacacaaacctgacccccgccatagtgtttgccagaccctccacaacctctccagctaccttgatcgacctctcgcaccctaggagacccagtctgcctcgcttccggcaatggcgccgcggtgcccatgaggagcgctgcccctggcttcccggcggagacaaagtcccctggcgcgtatcatgtccgcccaaccctaatcggacgacccgattttaattaggctcgatctaatcacaaccgcctaatccagatctgaccgc

SEQ ID NO: 140219 - DNA, 1238 bp, Zea Mays
taaattacatgctcagaggaacaacaaaagagagaaggggacactcagcaggcagcagcactatgcgatggagcctctgccctcagctcatctggtaccttccacccaaagaaggctgcgagagcctctatgtgattgaggggaagtctttcagagaatattttttcataatcttttctggtttgctgatctatctcttccagttcccccaccaccttgagagccttcataactttctttgttgctcttgaggaaagatcttgcttgccaatttctgctcgcattccagcaatgcggcggctgcggcgaagggacacagcagtagaccgctcggagattatgggctttggagttggatttgctggtgctggcagaataccagatacttctttcacaatttgtttaagaaatacctcttttttggctgttacagggtccacgccatccatctgcagggctggaatggtattattttccgttgtttcctcagcaatttcaactagcggcttattatgcttcttttttctatgataaacgagcaggtttggtgcctttatgagccttctttctgatgttgcagcgccctggctttggaaacaatgctgatgggaatgttcctcaaagtgcaccggagccgaggcctctcctaagagagcctcaaggcccgcacggtgtttgacacttggtaccgagtacaaatctctattaatactctgctgcccactaggattgcagtccaactggtcagaaaaaacagcagcagcatgttgagcttgctcttcagtgtgcaccggagccgagtcatcctcgtggggattctcaaggcccgcacggtgttcagaagtgtggtcgctgcattggttttcaatgtgcaccggagccgaagcctctccaaagggagcctcaaggcccgcacggtgattgagatttggacccaagcacaaatctctagtgaaattctgctgcccaatgggattgcagtccatttgatcagaaaaaacagcatgttgggcttgctcttcaatgtgcaccggagccgagtcatccccgtggggagtctctaggcccgcgcggtgttctccgttgagatcgcagcaagggccatccacagaattgtccagctcagaagggttaggattcatttgtttggaatccaagcatctgggacccagtctttctttggctgaacgacgctgctgtctcagctccccaagattgctagcgttgatgtcttcccg

SEQ ID NO: 140220 - DNA, 362 bp, Zea Mays
ctcctctcatatacctggattctcttccattctatccattgctgctagtggttcgagtttgagagattagagttgctaacacagcgctacactctgctacctccgtaggtctttgtggttgtgcccgtgctcgcttgatagacgacctgctgtttagtttagtcagaattttgtatatcaattaaaaagactaaatatgcattaattataaaactaattgcataagtcataactaattcatgatatgaattcattaaatccaattaatatataattaacacatttctattgtagcaaatatctctaatatataaagaactagttttcacattttcacgattccacaatcactttcctcttcc

SEQ ID NO: 140221 - DNA, 499 bp, Zea Mays
caaagatcgctcatactatggtggcccatcagacgagtgcccacattgtggcgcagttttctggtttcaggaacgggtcaaaagcgtgtctgctgttgcgcagcgcaggcttgtgtacaacctttgttgcagaggaggtaagattgttttggagccttacaaatgtccaccggctcccttatgtgacctactgcgattcgacggtgataatcgtgccagaaggttccttaggcaaattcgctcatacaattcccttttcgcgtttacctcactgggtgccgtagttgatagatcgataaataacggtacaacaccttatgttttcaaaatcaatggtgtcgtacaccatcgcattggctcgctactacccagtcatggattacgaccacagtttgcgcagctttacatatatgacactgaacacgagatgcaaaataggttgggcatgttcgagagtgaggctgacgtccatgatcgtccagacccagaggtggcccgt

SEQ ID NO: 140222 - DNA, 343 bp, Zea Mays
caaggaggtcgatctgttagtgagtacatccataaattcacagaacttgctcgttatgcaccagatcatgttagcacaaaagtcaagaagatgccccgtttcttgaaagggttaagaccaaaactcaagactatccttgccagccaagacttccttagcttctcgcacctctcaaacaaggtcatccaggtggaaagagctcgagaagaggaaagaggtcacctcaagagaaaatttcaaattcttcaagctcaacagcaagacaggcaccagagggttcgatctttcgggttccctcccaaggggtcaaacctcagcaagccagcaggatctgctctgccac

SEQ ID NO: 140223 - DNA, 693 bp, Zea Mays
gcgggttcctcccagaccactcgcattgcgggtgatctggaggaaaaataggaactcgcgctcgtcgccttcctccaggcaaatgccgacgtgtttgcatgggagccatcgcagatgcctgggatccctagggaggtgatcgagcaccatctaaagatcaaccctgacgccaggcagtgagtcagaagcctcgcagacagtccgtcgagcggcaggacttcatccgaaaggaggtccggaagctgctagacgctggctttatcgaagaggtccatcacccagtgtggctggccaacccagtcatcgtccccaaggcaaatgggaagcttcggatgtgcatcgactacaccagccttaacaaggcttgtcccaaagacccgtatccacttccgcgaatagatcaaatcgtggattccacctccgggtgcgaccttttgtctttcttagatgcttactatggtttccatcaaatccagatgtctagggaagataggaagcataccgcttttgtaacagtggatgagctttactgttatgtcgtgatgccctacggtctgaaaaacgccttgccaacatttgtgcgggcgatgagtaagacttttgggggcctgatcagggacaaggtggaagtatacgtcgatgacatcgtagtcaagaccaagagagggtcgaccctagtggaagacttgaccc

SEQ ID NO: 140224 - DNA, 661 bp, Zea Mays
ctaagtaggtgtaacccatcttagaagtcatgccttggccttatcatgcactaaagagaagagaatgactcaaaccctaattcaaatcccttataggcaattggagccctagagtggattatgggaaaaagtctatgtaaatcacattgtcatgacttggactaattataaaagttatagtacacttaataccctacaaaacatagaaagagagtgaccccaaaaagaattcagaaaacccccaaaaaggccaccaatgagaaagacataaaggaaaaatcagatttttctcaagttcaaaaccgaccctctttcaaagatcaaacatgttcaccttgttcccgacctcaaatccttatggcccaattgacaaaatggcgcccaaagacccctagaacaccctggaaaagtttgaacccaaccctaagccatttgacacgacttggcatggcttttgtcttggtgtggacagctcggatagagccaacttctcacccccaatatctctctaccccgaccatatctttgcttggaactcacatcgaaaaggtaggatttggtgcagagaagagaccatacacgggggttttgccaagatctgcacgctaagtcgaccaaatcggacgttgaaccctggcagaagtaaacccccacgtgttcg

SEQ ID NO: 140225 - DNA, 407 bp, Zea Mays
ctctacacttgctcgatttgacccctcagctccagtccccactaccactccaccttcctccattaccctaggttctaccactcctgagcctaccaccacacctcctatgcctacagcctccaccacacctgcttccaccgctcttgctccctctgccactccactagttcctccaccccgttttcgagagcgagatgagacagaggtgcggccacttgctgagtaccctcgactgtttgaccttcagagggccactgctgccatagttcgccgcttttgtcacgtgccagtggagtcctggcttctagcttagagagatctagcatcagctcctcttttcaataccaagacttaggagtccttctaccatgctcatttgacagctcagatagctttgtgggctcacc

SEQ ID NO: 140226 - DNA, 408 bp, Zea Mays
tttagcctttgagccaaaaccgagcgcgttcaccttgatccttagctctaatcctaatgctcccattgacaaaaacgtgtctaactaactcctatgtcacatgccaaaagatggcattgggacgcgagccctatacacaacaaaaccgaagatttgcctcaggctcgggctgggagacagacgagacttcagagctccaaatcattgaaaccaggaggccaaatcctatgacccccacacaagatcggtagcttatagggaggagaagaggttttgtgcactgaccaaggcaagagtaggctcagatgaatgaccacacgtgctagaactcgggcagaatgaacgtgcacacatgtttgaccctggtcggcacgccggcgttcgcccaacccgcgcgcgcactcgccc

SEQ ID NO: 140227 - DNA, 374 bp, Zea Mays
ctgacgacgtcagcacagaagccaagaagatggcccgctttttgaaagggctaagaccagaactcaagactatcctcggcagccaggatttcctcagcttctcgcacctctcaaacaaagccatacaagtggaaagggcaagggaagaagaaaaaggtcacctcaagaggaaattccaagtccttcgagcttagcagcaagaccgacaccagagaattcgatcctttgggcttccacccaagggaccaagcttcaataagccagctggacccactccgtcacgtttcagtcagcagggtcagagctcctttcaggccccgtcagttgcaaccaaccaaccaccatctaatgcctgttggcactgcggagacccc

SEQ ID NO: 140228 - DNA, 1149 bp, Zea Mays
gctagtggtagtggtttgggtcttagagtgcgaccctctcccgaagaagttgagtctctggttgcttcacttggtaatcttcccaatgatgagagccaagttcactttgagatgcctataaccccatgtgatgcagagataagtgttatgctggacatgttggctgaggattcttctgattcggtccctgctgaaacgatagctgttgcaactgtcctagagcctggaaaaaccttgaatactcaaaaatctgatagtactcgcccaaagcgccttcgcctggccagtcatccaactgctcttgccaaggggaagaagaagaaaaggagacgacttcggcgagtgtcgtgtttggactaggatgctggcccttctgctcctgctgctgaagaagtgccagtggaactttttactagagctgatcccaatgggtgtgaccctgctgacgctgaccccaatgggtgtgaccttgatgatgctgaacccaatgggtgtgatcctgctcgagctgatcccaatgggtgtgatcctgccagagctgaccccaattggggtattgttcgtgttgttgacgaggatgaagaagaagaggaggaggtccccttaattcggaagaatagtcggcgttacatagtcagtggggagagtagcgatattccttctccagctttgtctgctctcgttggtctgcaggaattgtccatatcgaactttgatcaggctctcgaggatgtggttcttgaagatttgctgtccgagccaacagatggtggtatgatggacgtttgctctgacattccagatgtgggattagagttatcccgagcaacgtctcgtgcatcgtcgaccttggagtgcggtctttggagtcaagagcctggtcaaggttgttccattcccatggaggtgactgagaatccttcagccttagaggtggctgctgcagagaacccggtccccaaggatggtgcaagtggttacctagcccccgaggatgttgccggtaatgatccgactcgggtgggtaacgcgagctacaacctagcccccgagggtgctaccggtggtgatccggctccgatgggcagtgcgggctgcgacccagcccccgagggtgttcgagcgggctccccttctcataccttcatg

SEQ ID NO: 140229 - DNA, 284 bp, Zea Mays
aatgagcagaagcgcgcccgcaccaactttgcattgagatccctgtccttttgaatatcccgaagcaaggtcaacgcactattgagatgagtcactaacggtttacaaagaggacctccaccttccatccatttgcagactaaggtccacgacgatgaacagacctcgccgcactccggcgagcctattccgaccagacgacgctacggctggagctcccgtgcgacagggacgcgattaaacccctaccaaacacttccccttcatcaatttcatcaaggggg

SEQ ID NO: 140230 - DNA, 355 bp, Zea Mays
caaagaatacccaggccttaatcaaggccaggcgggggtccggagctgacacgtgtccggaccgtaccgcgtacgcttctgctccccgcttaggcggaaccccgatgctgccacgtggcacgctgcccatgacgtaagccagcgggcggagcctgacgtaaggcctctgggccgcgcggcctctgcatttattgcggataaggcgcgccgcctgtccattccactggcaggtgatgtgctgcctcgacatttaatgagccctgtccactccactggcaggcgatgtgccgcctcagcatttaatgagccctgtccactccgctgacgggcggcgacctagccatcttacaggcgg

SEQ ID NO: 140231 - DNA, 286 bp, Zea Mays
ggacacgtccgtcgtgtcgccgtgactcactataaccatctgatcatcgccagtgagcgctgccgcgattgttgccacgaatccactgcgccagtaatcctcccactctccggtcgccagcacttctcggccaaattgagcgccaccgctgttgcgctctataaattgaatcctcccagagctccgtaggatcatcacgcacccagccaccaagtattgtcctcgggtgatcaccagtgagctccaatttctaacttcccccaaaatggttcgaatacaccgcaag

SEQ ID NO: 140232 - DNA, 632 bp, Zea Mays
cttttattcaaaagacactccacgcaaaagtcgcctaagggtgcagccggaatagcgttaatcgaggtctctctttaaaaagatactccgcacaaagtcgcccacgggcgcagccggaccaacacaggcgtacgaatacggccaacaggccacatcaccatacaaattacaattacatacacacggcgagggcatcacacattacatcggctcgaccttagggataatacccatctccctgtaattaaacatcattatcctcagctcctctccctcaaaaagcttccgcagatccccctcgcctatgcccgccccaaccggcgaagacaacaattctcgttttccaacccggtctactcggagacggccacgctccatccccatacgacggcgcctgccacttcgcgaaaattcacccacactatgttttcccaccacccttcgccgcctacacccagtactcgcaccaggaacatccccagcaccctccacacatggtgaagtctccgccgcagctacatccaacgcaacataataatccaagccttcattcgaggactcctccatccatggaaacgagctctcagattcaccatcagactcaaaacattcagacacagaaccaaacaaac

SEQ ID NO: 140233 - DNA, 341 bp, Zea Mays
gcttcgtgtaagtaagggcttagaggccacccatgaattaagcgaggcatgtagcaccgaactggggtcgtacttcgtcgcctgcgctgactaccttgtgtaagtaaaggcttagaggtcacccatgagttaagcaaggcatgtagcagcgaactagggtcagactttgccgcccgagctgattgcctggtgtaagtaatggcttagaggtcgcccatgagtcaagtgaggcatgtagcaccgaaccagggtcggactttgctgcccaagccaattgcctcatgtggtagggtatggtgtgcaccttttttgtaagcgtgagcatgtaacaccaacttaag

SEQ ID NO: 140234 - DNA, 865 bp, Zea Mays
tctatatccatttttatattcttttcttttgaataattaatttaatagataatcttaggtgctagaaataaaatttaagtgaggtgcttctaatcacacaaagtacatgcatatgatgagaagacctagggagatttgggatagataataagaaggggggttagattagggttccaaacctgggttgaaaattgggatgttacaaacctaccccacttaaaggaatctcgccctcgagattcagacggggctcgagaaaaggtaagggtattccctcctcagagagtcctcactttcccaggtagcttcctcttctccttctctactccactgaaccttacagagtcttacttctgagttgcgggtctttcggactgctgagtcaagaatctttattggcttttcccgatactggagatctttttgaatctgaattgtttctgcttcgatgtggttctctggtacttgcaggcatttacgaagctgggacacatgaaacacattgtgaatatctgacatggattctggtagctcaaggcggtatgctacgggtcccactctgctaatgacgggataggggccgacgaaacgcggtgctagctttcctttcaattggaaccttttgacaccacgcatcggggagaccttgaggtatacgaaatctccttcctcaaatctgagttctctccgtctattgtcggcataattttctgtcgactctgagcttcaagtaacctcttgcggatcagggcaactttctcttcggcatctttaacaaagtcgggtccttctagtatcctttcccctacattggaccacattatggggggtctggcactttcgtccatacaatgcttcgaacggt

SEQ ID NO: 140235 - DNA, 387 bp, Zea Mays
ggagccaccagcctcatgatcatgggaacgaggtggcacaggaggtggtggcagaatccccagatcctcatcatctgaagaggtgtcagtagtggcaccctgatcctcaaactgacggatggcctcatcgtcatctctgaagtctggtgccaatggatctactaaagccggaactgtgtcctcaggggctgggtggtagaatctgaactgaagtctggaggcatcaagggtgacctagaactaagagggactgatcagctgcgcgaatatgtgacagaggtagtgcgcatagggcagctgacaccgagttcgcagtccatccaacactgtgtcctcaatatcacagatcaagaagtcgacaacatagaacacagagtgggaaaccag

SEQ ID NO: 140236 - DNA, 729 bp, Zea Mays
cggcgcagacactcgaatgggtatcgtgttcccggtgattaagagggactcagtgtaattgggttggttgaggagcatcagggaagcacactaatgctgaaacaatgcagcagagaccatgaacaaacctggaagtggtgcaatagatgcgtgattaccctatggagccacgggtgcactcaatttatagtgatcatgagtggcggccagtgaatttgggttggagatcagctcacggcgacttggatattttaccgtgctctgcgtatcgtggtgcgcgtggagaaaacggtgccggaggggtaactggctatcctccacgatccctacgacgtggagaatgctttgcggcgtggcacggttgagtgaaacggcgagttctggtgaggataaactcggtcggccgcgcggcaagtggacaggatggccggaccagctagcaatcacaatccatcccgcgcccgatctttttacccatccccggtgttatccattcctccccgagcacgaatcgagacggcggtggcacgaatcgcggcggagaggtcgtcgatggtaaacagctgatctgatcttattcagatctgtaccatggccattcctcattcagacagtgtgtcagccaaagtttagggtgaattttctcttaattttatgtagtaacatgatcgacactctttagtaaagttatagctctaggatccagctataatcttggtatagcaaccc

SEQ ID NO: 140237 - DNA, 480 bp, Zea Mays
gacacactcaggcaccacccagggtattctataccggaagcagtagtaatagtagtatagctaatctcatctcatcagacagaaaaatatcattatatcactgaaacaaaactcggaacaatgattgcgaaggcatgctaaaatcaaatgcgcctttgctcagacagttggcatgcatgccctactccagaagcaattgtacaaaagacaaacgtttcctgaatatgcatgaataacggtcaaacttggttgaacttaacttctgttcaaaccgcacaaatcataaaaggtgtcagctttcagtacatatgaatcagcaactggagctcgatgaaccaggcatagccgcataggacaacatatcgactagatttgtaaccgactggtgctggtttttggcagcagcgtgacaatggattctcaaggtcagggccgtaccggaaaaaagtgaggccttgtacaaaattatcgaattgaggc

SEQ ID NO: 140238 - DNA, 518 bp, Zea Mays
gaacagaacactgtacgtacggacacggtcattgcactgctccggcagctggagcagcacagctgctcggcaccagtgacacagtccacactccacagctccggttgtcgagagaaggaagaccagttgccacaacaccttttgtcgacaccgtacgtacgatgatacaaatacacgaaacttttgcctcgtcggtcgcgttctctaaatcctattctggtttagcctgacctcacaaaccaaagggacaaaaaaacggtgtctgctggtattttaagacccggggcggcaaccatcgatgcgttggaaaggccatcagaacattcgaaaccaaacagtattgtttaacatgagtaagtgcacatccacatcagaaaaaaaaagagagaaaataaaacaaattaccacgtcacgccttccacgatcagacagacgactggttccacgcatcattcatcaagcagcgtggatgagaatgacagcgtctgctaccctcatcaacacgccaaataaaatgt

SEQ ID NO: 140239 - DNA, 547 bp, Zea Mays
attcaacatctctagatgcatcatcttgataccttcctctttaaatacaaacttttttagggaatgtgattgtattggtcattataaacattaaatatcactcctacaatcaagatctctaagtgtaccatacttttgaaaaatattttgatgttcttgcttttgttgacacaaacaatgaaaatgagttgctttttcaacaatggggcaatatgccataacaaccaatttgtaacaccctataatagccagttttgacacatagcggtgaattgtaatggtattgaccacaacattatttttcaaccatcagtgatataggttatcaccaacgattggtaacacacaattgttggtggtgatggtttctagaaatctaatatataggccaacatagtaaaatatcactcccaagaagccccattagtcataagtcaaaaacgtttttgcacgtgaaagtctcctagagggggtgaatagtcgaaacctaaaatttatcacttaatacaaaaactcaagcctcggttaggcattaaaacaagaagaa

SEQ ID NO: 140240 - DNA, 349 bp, Zea Mays
tggttgtcatcagatggctattgatagcaaggatgcagattcactcgagactatcaaggttgtgtcagagttcccggacgtgttcccgaaagacttaccaggtatgccacctgagcggaaagttgagtttgccatagagcttcttcctggcaccgccccatttctaagagagcttacagggtatctggaccagacttggttgaactcaagaagcagatcgatgagctgtcagagaaaggttacattaggccaagcacctcgccttgggccgcccctttcctattcgtggagaagaaagatgacactaggcggatgtgtatcgattatcgagctattaatgacgtcacaa

SEQ ID NO: 140241 - DNA, 431 bp, Zea Mays
catacagaagagcaataaaccatgaataccaattttcaaaaaactaaaacttgcttagaaactagtgtgaattgtcaggactagaatgctagacctaggacgaaagtccttaggaatagtgggagaagtaggtggcaaattaagtaggccctgtgggcccgtctttagatttttataggatgccctaagagcactcttttattcggagaggagacgttattttcagcattcatgcattataaaactaaaaggattagaaactaaagaagtaaaaatttgagctaacccgcttccttttaaaccacccaggctcttttattttttttcttcttccaccataatctttacatctgatacccttccgtagatgacttcacctacccccgctagtggaggagacactcgttctagttccgatttcctttctcacg

SEQ ID NO: 140242 - DNA, 990 bp, Zea Mays
ctttttcttcacagcaactgttcctgaactagaactggatgatacttttgagcaaaagaaatgaaatagttcggaggatgaccttgaaaaggcaatatttacttatggttatgagattgtgcaaacactcattgttgataccaaaccagatgaaaaggattaaaagagctatgaatgaaatcaatgctggtaaatgtccgtctacattggtgaatcttgcttctgtgatgtatgaactcatgcaatttgcatatagctcaagaaaatttccattcacacgttgtattctctcagtttctttttataaggtatgatatcccttccaatattcgaaccttgtcatatttgaccaactattcctctaatggtatttaaacactatgataaacaatggcatcactggattggtatttgaatgtacatccaaatgatcataattttgttgcaatagacattattctcaacgaatcagtggtcaatgtgaaaatttggagactgtgcctagtcaaaccacactttattttgaaactaagtataattcaacatgaagaggtgctagaacttgaggaattatagtaattggtcatccataaaaatattcatactggtttgtaacgagcgagaaattaatcacattgatatcacaataatatactgcagtttgatgcttactactaaccaatttttccttttgttcagctgcgcgttgcggcaaataagaaggcagatgcaacgaaaatcattcagatcaaaatggctgagggcgagatatagcaggggagacccagacccccactataaggattttattaaaaacaaaaggaacttcaccaatacaaagagggagggggggacaagaggagtcagggagctatgactaggagaactgcacaggctacggagaaacaacaccaacaaagttaagctagtccaataagaaggaagagtaaactaggtactccttccgttcttttctatttgtcttgtttt

SEQ ID NO: 140243 - DNA, 285 bp, Zea Mays
ctttggaaacacatccgggaactcggacacaaccttgatactctcaattgggtctgcttcactgctaacaacagccatctgataacaacttcctttcttcggctcaggcgggactaactcggtcaccacttcctctcctagtgggggcaccaacttgattgtccttttatcacaactgataactgcctgatacttatctagccaattcatccctaggatgacatctattccctgagtacccattactatgaggttagcgggaaacactatcccccttatttccac

SEQ ID NO: 140244 - DNA, 715 bp, Zea Mays
ctcgcatcgatttccatagagtccaggggttcatctacaattctcccaagacacagactacctccctataggacggcgggtttattatagggatctacggggtttcttttgcatgatggcatggccgaaggggtatggagagatcctagtcgttggattagatacgggcgcgccagattaaatcattattcctgcgaaccggtacggaatcgcatccgttggatccgaatcaaacggtgagggttttattactctggatctatcgttgtccgtccgatccagatcgacgaaccagatcgaaacgtggtgaaagggtatgcgcggactaatcacagccgttcacgccgatccgacggcgcacgatctccgccccaacagggcacacacgcacggcggcgccgccccacggtggtgcgccatgaccggtggagctaaactccgtatacacacacctgttttctaattcagctcagatactcaatgcggaaggcttaatgaagatgggggtaggtttattaccgcgaattgatgactcgacggcgctggccacggtgtacagcggatttcgcggcagtgccctacgacggcgagcaatcgccgatggtgcagtcgatcagttgtcgcgctcggtgctcggtgagcatcaacggtgtccaccgaagaccctggacctcttcccagagctcgggtgatgcctacggcccaaggcagcgac

SEQ ID NO: 140245 - DNA, 442 bp, Zea Mays
ccaatcactaccatgtcaacccccatccaaattgactcagccggtggtagaattcgagccgatagcatttgcttgaatgtaagtgtggaaataagggggatagtgtttcccgctaatctcatagtaatgggtactcagggaatagatgtcatcctagggatgaattggctagataagtaccaagcaattatcagctgtgataagaagacaattaagttggtgtccccactaggagaagaagtggtagctgagttaatctcacctgagccaaggaaaggaagttgtcatcagatggctattgatagcaaagagccagattcactcgagattatcaaagtggtgtccgaattcccagatgtgttctcagaagacttaccaggtatgccacctgagcggaaagttgagtttgccgtagagcttcttcctggcaccgcccccatct

SEQ ID NO: 140246 - DNA, 287 bp, Zea Mays
gcccagtgatattgagtcaagaataagagcaatgaccatacaatacattaggcatctaagttgtattatcttcgttgtttctcctgcaaatgctgacttagctcattctgatgctctccaactagcaaggcttgctgatcctaatggtacttaatcaacttaaataatgtgttttattactattttctttgtagtagattgctagctatgtgtaaacatttaactccttgttttactggcagggtctcgtacaatccttcctatcactaaggtatttatttactgta

SEQ ID NO: 140247 - DNA, 880 bp, Zea Mays
cccgcactgagctcgcctcccctctccggccgccagcacccctcggccgaattcgtcaccgaccctcgatgcgcctataaattgcgtgtgccaccagctccgtagggtagtaagctaaccagccacctcgaatcagcctcgaccattcgctgagatccgcgaatttggagttctccccaaaccggtctccgccgccgtgaaacccaccccaccgtggccagaccactctggtaaagctctgcacctctcaagtgttgttctagcagctatgtgggcacgtaaagctcaccgtagcatccgcttgaccaattcgggcctggataattgagaacatgggatcgacaccgcggtttccgccgtgcacgtggaccggccgttctcggggtgttcgggtcaaattaatgtgtgttccgaggccgtcgtaggtcagtgatgcctccccggtagttggccgtaaccgccgtcgccggccatggcctgtacgaaccacgtcgaggatgatcggtgtgcgcgccgtggtcaggggcattcgcggggaagagatagaagatggagggcctttctgcaatttgtctgtggcacagaggaacagtaaacaaacccacttcgatttaactaataaaccgagggcctctgtgcgaaattgccgcgggcgcgcgcgcgtggacgtgtttctgctgtagttgggccgacttgggctgatttcggcccgagtctgttcattgtttttctttttctatttctagcaaagctttagaaatgtgtagaaaattatagaaaaatcctaaaattgtgaaaccaattttccaaaacttcttattttccctagaatttgataaaaatagtttcatgatttttaggttaaattaggaattctaag

SEQ ID NO: 140248 - DNA, 857 bp, Zea Mays
ctatcactttccatttgaaaacctcgtgtttaccaaacatttctgcagcgctatatactatggagttccggaaacgtggcctacccccacatccattgccttgtttggctggcaaaccgctcctccaactttgatgcctccactattgatggatttatctatgctgaggtacctgattttaggactgacccattgggatatgcattggttgacaaattcatgatgcacggcccatgcggtcaacacaacaaaagatgcccctgtatgaagaatgaaaaatgctcaaaaaactaccctaagtcctttccaggctaagactatcattgacgattttggattcatgatatataagagacgcgatgatgatagatacattgttaagaatggggttaagctagataacaggagcgttgttccttataacatggtgttgctcaaaaaatactgtgcacatatcaacgttgagtggtgtaacaaatcaaacatgattaaatacttgtttaagtacgttactaaaggaagtgatcgagcgaagatatattttgaggtgacagcaaagacagccaacgcgtcacctgaacctcaggtagctcctcgcaatgaaattcaagagtatattgatgcaagatacctatccatatgtgaagccatctggtgtatttttgagttcgacattcattttagaatacctgcagttgaatgtcttgttgtccatttgcccaacaataactatgttcggtatgaaccaggtactaccttagcgtctctcctagagtcccccgcagcaaaaagttccatgctaactgagtggtttaacaccaatgcaagaaatcctggataccgacacctaacatact

SEQ ID NO: 140249 - DNA, 697 bp, Zea Mays
gacttattatgtggttgatatagtaattgcaatattcctgatgtaggccttttttatagcttataatcaccgacaaggcctgcaatggctcctaggattagccttttactattctagtattcacacttaacccccatgaggaggatacccctgctcacatcatgtccttctgcttgtatttggcctaaattgcaaactgtgcatggtcactattcctggttgagataagctgcaacctatgtgtcttctctgctccgtcaatctgcacgttcatgcttacattgtgctgtgtaactaattgtacactgttgggattgtgaggagtgggtgagcagctatatttgagaacgatgaataggatagctgcaacaatggatttgctcatgacagctttgttagtgaatacatctatggaagctgagaggataagctgataaagatgatgagaagtaatggtgatatgtggaagttattggatattagaatgaattttcttaaggtaattcatttgtcggtgagtttttctctttttgttggaggtttttggagatgtgaaagggaggcgtgagattgtgaggacatgacatacacataccatcactcaccagccaggttttttattgtaccattgtagtaaaggcacatcaagccggcatctataaagcccgctatgtccctggaaatttaaggtgaagcc

SEQ ID NO: 140250 - DNA, 441 bp, Zea Mays
cgacgaggaccctcctcgccccttcaggcaggtcaagggcaagacaatatatctagagcaacaggaaggccggaagaagcaccgtatggatagagccgcccgtgcagcacttgcagcggcagcatcggtagagcaagcagagcagggtggctagttgcagatctcctcacaccagattgcctatagggttcgtcgcctcacatctggacctcgctcctccgctccctctacacccgccacagcaactactccacctcccacttcgctagcccctgtcgctacagagccatccaccacttccccatacacaccacctccaccacacccgcttccactgttccccctcccgctctcatttccactccacccattccaccagcccactttagggagcgagacgagacagaggtgtgaccgttagctactaatcctcgactgctt

SEQ ID NO: 140251 - DNA, 307 bp, Zea Mays
gcacggatatagatagacaaaatgtatacatgaatactcttaaaagcacttgaaggagttgcacctagatcaaattttccccaagctaagtgaaacagagagttgagtcagtgcatcataaaaggagtatgagcaattaaccacatgtgaatataacagtttatcctagtgcatcaagttggtataacaccctcagttgcaagcgatgtccaatccattgctagagcttaagacccaattggtcggcatgtatatagtcgttctcactgattctttctccatattgttcgagtttgtgttttttatt

SEQ ID NO: 140252 - DNA, 340 bp, Zea Mays
ctataaaacttgccttttgccttatgtggtaccctcttgtcacacagaacgccagatgcttaacaccatttcattctatgctaacatcttcatcaatatccccgtgtagcattgatcatgaatactgaaaggtatccttcctgatcactatttgaccttccaaactaacatcctcttcctcatgcgtagtagtgctgaagtctcatctcatatagctattgttctactaaatctaaaacctttgtactttagcgtctcctgccacaactccagttttctatttactccttcctgactttgatcaactagcactacatcatccgcaaaaaaatacaccaag

SEQ ID NO: 140253 - DNA, 522 bp, Zea Mays
ctaccacccacaaaccgatggccagagcgagcaggtgaaccaatgtttggagacctatcttagatgtgcagacaatactcagccatctacatggaaattatggttggccctagcagaattttggtataacaccacataccataccagtctcggttgtacccctttcaaggcattatatgggtatgatgcgcctatgttggctttgcctcaatctgaagtaccggagcatgggcctgccactgaatggttggctgacagagctgttttctcggttcatctcaaagaacatatggctcgagctcagaatcgcatgaaacaattggctgatcaggataggactgcaagagaatttcaggttggagagatggtgctactgaaattatagccctatgcccagaaaactatggtgaatcgtccatgtctgaaattagcatttaaatttttcggtcctttcaatatattgactaagattggtcctgctgcttacaaattggatttacccgacagtgctcaagttcatca

SEQ ID NO: 140254 - DNA, 363 bp, Zea Mays
gccaaaaatgattctgatgattccgtgtctaagtgttttgagtctgatgattctgggagttcggttgtgtggtcggaagactcttcggatgaggacttacattattttgcggccttggatgtggctgcgccggaggcttctccgcgtgtgatgggtgctgaagttcttcctggtccgagtgctgggcgtaggcggcgaagggcggtggcgaaacggagggtgagtgaggtggagggtggtcgtcttcgtgtggatggggctagcaaacgggaattgttgtcctcgccggctggggcgagtgtaggtgagggggagttgcgaaatctttttgagggtgaggagctgaggataatgttgttcaac

SEQ ID NO: 140255 - DNA, 488 bp, Zea Mays
cgccttggcggtttgacctttggacgtctggagtctggactataaattctagtagaaaaattcagacaacaagagacacattgtgattttatatatttcgggtaaattgggtatacccgaacccgaacccgaacttgcgggtacccgaacttgcgggtagcgttttttcttggctgctatcgggtaacaatttccattacccgaatttaacaaaacccgaactacccgacccgaattaaacgggtaacccgaacgcccagtcttactcccagtcacttacaagaggccatactctataggcaatgtgttattggaccaagtctcttgtgccaataaaagtgcacacagtgttaaaagttctctggcatgtttctatttcattcccaagggcaatggctggccttctgatgccgaagcgataccaaatagggcgttggataatcccctttgtatcttccttctcaactaagttgttctttacataaaac

SEQ ID NO: 140256 - DNA, 475 bp, Zea Mays
gaaagatgcatgtgccttgaattgccatgacgacgcagcaactaaaaggtctgggcaagctaggagggtggtgcagctaggggaaaacacgacaactagggaagggcggtgcagcaatgaaggactacaggggcagcccttgctgtgcgacggaagtagcggtccttgctgggcgacgcaagcaagatctatgtatgaaaaatttgtcacttaccaccaccaaggtctgtgcgtgttgtttctccaaccatccttctagggggcatcttgatctcggcccggcagcgaagaacggatcgacgacgatggtggatggggcgacgacgaggaggtggacggatggggcaatgctgacgaggatggggcagtgaatacagcagcgagttggatgatggggctgtggcgacgaggatggggcggtggatgcggcggcgaggtggatggatggtgcggtggatgcagttggctgcaaaat

SEQ ID NO: 140257 - DNA, 434 bp, Zea Mays
ggtacctagtgcacagctggttccatcaataagggaacttggagaaaaggtgattcaaaagaaatcgagcccaaacccgcctccgtgtccctcctttcctccccaaacaggaaggcagaatgtctagtaactgtgaggtcctagagtctttactgcctacgaaggacgaaattccggagcaggatcggaccgggaagcacagagcagatagaagtgcactttccaatgcagttagacagagaaggcatggatgtgatgttataatgctgaaggaccccaagaagagattatggcctatcatttaccaccactacccgttatttgtgggtttcaccgagggctggaaacatttggtggcagcaaacgatcttcggactggggacgtctgcgagcttgttaaggggccagacgatggtgagccgatgtactatgtc

SEQ ID NO: 140258 - DNA, 423 bp, Zea Mays
gagcactgacctagggcacatagaccggatcgaaggcgatgaactcattgatgttggtgttggacaactagaggaggggctcagcgtggcgcggatatacaggtgggatgggcatggatctctagtcgtcgggggcacgaatctctgaccattgagagcatggaaatctcggggatcctccgaccatagctggactcgacctcagatttgacgacagccgccatagccactaaagcctccatctcagtcgcacaatctactgacttcacgtggcacgtgctccaccgtattcacctaggtgcgctccactgcagcggccaaggcgattcaggccctgggctgacctttcactccttctacataactgccacgtgtccgtcgcttgcctcttcgacgggggtgttgtggcctcgatgtcctcac

SEQ ID NO: 140259 - DNA, 506 bp, Zea Mays
cgcggcaagagggcgatcttcggcgcagggaactccggcgcgggcggcggctgggtgcccgccggaaacaaatagatcgctcaaagcaaagtcaggggtagcattggaaatagaaaaatacgaatacttgccggtgcacgtgattctaaaaaccagcacaacatacaacatggtatattctaaatctaagaaaagtttaatggcaaaattaaaagcctaaaaagttcaatggcatgtatcaaaaccagaaaaattgtaatggcacacgtcttgcacgtgattctaaaaaccagcacaacatggtatattctaaatctaagaagaagttcaatggcaaaattaaaagcctaaaaagttcaatggcatgtatcaaaataaaaaaaaaaatgtaatggcacccgtctaattaacccttgttacaattaataatactctctctctcggataacaagaccggctggtatatgatgagctttcacatgccaaggtacatcactccatgtttt

SEQ ID NO: 140260 - DNA, 852 bp, Zea Mays
agtcctaggaatttgactggagatgacaagggcatggagttaaatacggtgcctagccttttaaagaatgtatgacactgtagtcattttcctctatttatttgaagtttgacaaacaaattatgcaagtataaacaaaataggtgactaaaaatggcttaccagaaaaggaacaaatgaaactatcacctcgcagaactattcccaacaaagttaataaaatagaaatgtaatcacctccttttggtctgcagtgctagatggcatggatgatagcaccaggccaagaatcaatagaggtgcacgttgcagctcttttagagcattctccctagaattttatccttcatctgtgttggttcctcagtgcaccataaaattacaatttatcaaaagtgaaatagttaacattgaggtcacaagactacaaatcgaaacaatgtgcaaaaatcaatacctatttctactccaagaggagttcagtttagtttatatacccagactcatccacgtctaatagtggacaaccatgcattcattccattgcaatgaataactacaagatgaatctcaaacgtgaaaaaatataaaaactgaaaattctatagctaacatatgttaatttctttggattttttttccaataatcaattatgcagtatagctattttttcttctcataaccaggtagataaggaatcttttccaatgatctcaaacaaagaattacatgcaaatttatagagggcatagaaaatgaatttatagtcctatactataaaactaatgcaaggtgtattaaatcatattataatatgaccacatcagaaaatgcaaaagtataaacaagac

SEQ ID NO: 140261 - DNA, 449 bp, Zea Mays
tattcttagtttcatggcacttttgatgatgtgacagtgttggaaagagtgttatgaaattcccattgagaatagcctaagtggtagtagtggatttactgagctgttatgacgtgtgggccagtgattggcatgtaatcgctataaatactgatcggccgtatgggccaagacaactaagaaataacagaaaaaagaaacagaaccaaatcatacctgagttattcctgtccgtggttgcgacctcgaggagaagatcgtttcgtacctccaggaaggtaggaagaggtcgcccacgttgaagatgaagaccgatgctgctgaaccgttcgttgaggccacaaatgacattgatgacgagagtgcggtcgggaacgggctcgccaagatcaccgagggcatcgaccatccctttgaacttacggcagtagtcggtgatggagaggtcg

SEQ ID NO: 140262 - DNA, 1438 bp, Zea Mays
cctcgctagcactgtcaacataaaccaatgttattagagccaatttccgcgctgctgaagaatgaagactgagcttgcacatccagaagcatccatcacatgctttgttttcttcttcttacattttcaagtcctcccaactcactcccattccgaaggacgctaagttagtataccttaccaggcttcaacgtccttaattaagcccgaccaggatagcaatccgtcgattaaaccataccttacgtcagtaaataacgctcatagaataaaatacaacacgtctccgcacgtagaggagtagcacagcatattcgttgcttgctcttgacagtggtgtacggttcacaggcagccgccgagagtgagcgcggcctgcaggtccagccgccaaaggtagctgccggcggcgtccagacgccacacatcgcagggcgccaccacgggggaaccgacgcgccgggcgctccagtgccgggcgcggacgcggcacgtgaatcccgcgcaggtgccccacgccgggagggcaccgccgagcaccacgggcgccgccgcctcgtcgccgtcgtccgcggatgcagcgcggacaaacgcggcgttccacaacgtgacgcggccccactggtccgacacgaacgccggggcctcgtcgtggcccgtcgcggaggccggcgcctcgccgtcgcgccacgtcgcggtcacctcttccaccgtcaccaagtaagctgcagcagcagcggggcgcatcgcgcgcggagccaacggccgtgccgccgtagccacctgagacggcacgagctccggccccactgtcgcaggacaagcagcggccttatcctccgccgccgtcacgggcatgagcggcagcgttgcgagctggcgctgctgcggccggggtggcggcgacgagtccacggatgacgtccccgacgaggacgaggacggcgacgaagacgacttctccttgtcgcagtgctcccggcagtcgcccacatcttgcgccgccgccgtcgccgcaggcgctgcagtcaccatcgcaactttggccgccttcttgggcttccggcccctcctcccgccgcctccgcacgcggcctttcgcttccctctcccggcaccggcggctgatccggtcaccggtgccgatgccggtgccggcgcgggcgccatggccgccggcttaggcgcaatcgggcggaacttgagcatgatcctccccatctgccaggccgcgcctgcctgctgcgcggccgcggtggcggcgtacctcggcgcgaggcagcaccctccctttctctccatcccctctcccgaccgcacacgtctcaaaaaccaaccaacccggtatgagtacgagtacgacacacttccttctactttctcgccgctcgcacgatggcactatggcagtgagagagataagatacgaccaccacca

SEQ ID NO: 140263 - DNA, 932 bp, Zea Mays
aaaaattgtaaaatagggcactattggagatattttttatgtgttgaaccttatatttcaagatagaccactattggatatgctcttaagtatagaaaaataaaagttttggatggactaaaccgattccatcctgagcctacttgtcggattggccccgtcctcctaactcgtctcctcttccttgatctagttcgtgcatttgtccgttcgatcccattctttcttatgccacacgaatcggtccgccccaatgtcgctcgatcccgccccttctcgatgccctcaccctgctcgtcatcgtggcgacgccggcctgcccaacaagtccgatctcgctcgttgcaatgatgtgacccatctccaacgaccgacgagcttaaagaaccagcgaacattggctctttgtcggcgatatgacctaaccccactcccttcatggtgcccccgccattcgagaagatcgacattggacaaggtatgcatggtttcaattcggcaagaaaaaaattagcagtatgtttgcttctttagtttatatagttttttcttctttgaaattgatataaaacttgaattttatataacactagtttttcataggtttgcttgattttatcatgcggtcgttctgcgtccgtcacctaacttccatttgaaacaaatactgttactagcccatataaattctaacaaatactactccacagcagcgtagaaaattcaccacgctacgtatctgccacactgttattttcaaacattggatccagcattgtttttatactgcggcgataaaaaaaaagatgggtgcatgcctgttaatgcaaaatccgtcaatttgtacgcatgcaagaagacattgcaggcaaagcatagtaatgtagtattagagaccttcccggtctatcttacacaaaaatcaagccaat

SEQ ID NO: 140264 - DNA, 362 bp, Zea Mays
gcaagttgcaatgtttctacatgtagtaggccacaaccaaaggtttagggtcattcaccaaacatttaggaggtccatggagacaatttgtaggtactttagggaggttttgtatgctactggtgaactaaggcaggagatgataaggccaccctcacttgaaacagctagtaaaatcaggaccagcccaaggtggtacccttattttaaggtaaaaacataacaactaatcaactaaagtgacattttggaatatacaaatggtgatgacagttgttggtatgatgtaggactgcattggtgcaatagatggaacccatgttcatgctagggttccaacaaagatttctgcagcatttagg

SEQ ID NO: 140265 - DNA, 276 bp, Zea Mays
cccatccgagccgaatcatccccggcaacaccctcgggggctgggtgagcgccaacaccatccttgagggccgagttctctgcagcagccacctctaaggctgaaggtccctcagtcacttccatgggagcaagacaatccaagttagcttcctgaccctcaagacagtgctccaaggtcgatgaggcgcgagacgctgcccgggatgaccccaacccggcgtcgagcacatcagcacaaacatccatcgcgtcaccatccgccggttctgataac

SEQ ID NO: 140266 - DNA, 526 bp, Zea Mays
ggggtggtccgggtggaggtgtgtaggtgtagcgccgcgctctgctttgttgtggcgtgcgatggggtgaaggggagggatcaggttgttggggcgttgctttcgtccgcccgctcgcacacccactcgtctcgcctgtagtgtagtcctgtgtcgtcgccgctggcgctgcgctatcgcctatcgaccgacgggcgggtgagtgcgccgcgccgtgtggggtctgagcctgtgcgcgtcacggttgggttgcccacttgggggcactgatttgtacggcacaagatttgaagctgaccaacttaattgtttgtctataatttgaaccgcctcctactacttttagaattagtttgggagtctaaaatagaagaaagttagaaagataaaatctcattcttattctaatttaaataagaatggaaatttagtccctaaaatctcatttggtttttggactatcaaactagcccttacagtgttttgtctatagattacaactgcagaaatataaataagtgacttt

SEQ ID NO: 140267 - DNA, 542 bp, Zea Mays
cttcatcaatgtctaatgcctttcctcccccagcatttggtaaccctaaaataaggtgcaccgtctcctttgtaatttttagctccttccctgggccgactcgaattgtcatatcattatggtcaagcttttccatcagccaagctaaatgagatctactaccaagcgcatcaactctcatatcaagtatactggagaaccccctccgtgcaatagcttgacgttgcctgtcatttaaaatctgaatgcttactataacatcttggggattgcatctcacattaagcctctgctgaaataatgtaaacaatgaataacgtaaacatttacatctgcataatcgcaactcaatgtttaaatcaaatctcaatacaacataatttcacgcaaaaaatgatatattggcattgaccatcaattctaacctgtcaggggatccactgctttcctctgctttgtaactatcttcttcaagacttttggaggactgtcatcaaagttacgcttctttgataatggtataaagtcatcgtcctcgtcac

SEQ ID NO: 140268 - DNA, 579 bp, Zea Mays
cggaaaggtgtgaacccggttgcccggcattctgtcgtgtttagggcccataccacttcaggtagttggtcggcccatttgccctttttatcgtcgagaagtcttttcttgatggcagtaaaaatcttgtcattggcacgctcaacgacgtcattggattgtgggtggtacactgaggcgaagacaggcttggtgccgatggaaaggcagaaatccctgaggtcttggttgtcgaaccgtttgctgttgtcgactgtgagatcggacgggactccgaagcggcagacaatgttttgccagaagaatttttgagcggtcttcgatgttattgtggatactactctggccacgatccactttgtgtaatattcgacgacgacgaagatgaatttgaggttcccttgagccgtaggcagtggtccaacgatgtccagcccccagcgttaaagtggtcatgtatgggcgatgagcttggtgaattgagaaggactgcctgagcgaggggagaacttttggcatgcttcgcatgacctcgtgacgcgattggcggtacaaattattgtgggccagtaaaatcct

SEQ ID NO: 140269 - DNA, 340 bp, Zea Mays
atagagaaagcgatgactactttggcatgtcaccacttctctatttaagccaagacagcttctatctacaacgaccaatcattcatgtcgagcacactttattttaccatgtcttgcatacaacaatatgttggcgtgcactcgagacacttcaatcaatgtggcgcgaccactgatatataaactccgatactcatgtcttaataacacatcctccacgcaaactagcattttctaaactacttgtcacattaacaaatatatcccctatataatcacgaatcccatcacattgcataaaacaattacacttttcacataaacacatatcgatgcattt

SEQ ID NO: 140270 - DNA, 298 bp, Zea Mays
aaagcgtttgagacgggatggatcttggtaatacggtttctgatatgctcatggggaatttttcaatcgtgtaaattggtttagcttaattaatctgtcaaaggaaaagaggtctagtgacagtgttagtagtgtgtgagaggatttaaattcgtgtcttgtaattgcgattaattcgtacaaatccatactattcatactcaaattaaaatcatgttagaatatatacatactagtgtttagatgtttctcgaataatttcccaagtattgttttttttagtttgcttgtgtgcttc

SEQ ID NO: 140271 - DNA, 428 bp, Zea Mays
gcggctttcagagatcatatatatacagtggttagattgtcacgtcacccgactgtgaacaagcagctagagctaggttctagtcgtgtccgtccaccagtgtccacgcaagctagtttagcgtggtagcataattgccatgcgcgtacgtgaagctattgcaagatgctaaccgtcaaagcatggatgtggatcagctgtcagtccattgatgatcagtttatttcttttatttgttgccccgaccatatgattgtgagtagtactgaattcatcatgcatgtgggttggccaatgcaaaagaagcagtcatacgtactacttcacttgcatgcgacaaggggggcgcactgaatgaacgacactactagatagcgaacaaataaatgctaaaagcttacacgaaatataatgcatggagagatgtt

SEQ ID NO: 140272 - DNA, 904 bp, Zea Mays
tgttgctagccatccagagcctagagagttcgtcgagaaagagcaaggaccctacctggcgtgacagctgtcgttgttttgaacctttgctctgcaaggaaattactatgtgtgtgttctgggctctaggcagtgtgctcggtgggcgcaaggtttatactagttctggtagaacgtccctacatctagtcttcggcagctcgcactaccggcacctttgttgcttgatgctcgtagtaggggttacaagagggttacaagtggaacatagagggaggaagggctcccaagtctcttacgcatggatggacctaaagactatgagactggtatcatatgctaagccttggctctagcctctaggtctttaggtcttgccgggcggctgcggttgccttctgttgagtgtcttctgttccccatgtccatccatctccttttataggtcaaggtgggggccaaccatcagtggcttccttgagaaggggcctcaatatcgtggtaaaatcaagtattttaccccgacaaggtcgcgttgttcgtatgggtcttgtcgcttggtcgcctccattcgtgcacattatgacggatgacgtgggtggtgtggggtcccagcgtcaccattactacctctgcgacacgccgacccctgccctctgtagcctgggtttcggcgtggctcgtcgtgttggaggccctatggatggcctgcacactcagacctagacttgataggtcatgagtgtgccgtaggccgaggggatcgtaggccatgagtgggaggcgggccaacctactactgcagcttggtgctagacgtggttaatgcgactggctacttatggtgggttagtctcgggccaaccaaggaatccactcgagtggattcccttcggctcacccg

SEQ ID NO: 140273 - DNA, 306 bp, Zea Mays
aaactcatatcgaactccaaaagaaaaatatgcttgtaatcatcatgcataaaaacccctatggggaaaaatcaatgatgaagcatatagcttagttgatattacctcattaaaaactttggatgagaaaacctcaataaggcaaaactcatacaaagaaaagagtgtaatatgatggacaaaacaggtcaaatatcacggagaatttctccccctgattcttgcaatcacttaagtcttctcataccaaccactttaacatatttctgaaacgtggagcatggtagagattttgtgaatagatca

SEQ ID NO: 140274 - DNA, 1393 bp, Zea Mays
tataggaggagcaagttggcctagcccaattggaacaccagctggctcgtgtggacatatagcagctgcagtatttctgccccttccattgtgatcactttcatcatctgtaatttgaaggtcaaaaagacccacaggtgagaaaagctttgtacgtggaaagagacccaacttatcagtttttgagtaatggaatcgcttgttgagaggatgagcacactctacgataaaaaaataaagaaaaaatagacatacatcagattcggattaggtttacactacgacaaaaaaaacagagcaataataacctaaaaatgatgctaaagcaagaaacaaaaaaaggagtttagtggcacctaccaaaatcacgcaagaaaaaaaagtatgcgttgaagggcagtgattgcttgaaaaataaatagagtttcatattctacataattaatcacatgccaaggggtcgcaaccaaaaggttattgtattatccaatcaaggtgcaaaacggtggactcaggtcatgagactgagtttgacgcaagatcaatcaaacaactcgcacatgtcacatgtgaaggagcttcgaaacaaaaaattccaatgcaaaacacagcaaaaaaaccacctagtgtaggcacaataagcaagtcacagcgctgccccccttgatgaaagatgatgatttataccctccttttctccccaccaagtgcaatcctggcttttgcttttgcccccgagagaggcaagacaacgacgaccatatacatgatagggcatggaacacagtacagttccataccctgacatagacatctcctccatcacctacaatttcccctttccccagacatgcccacataggtagcacatagaataaaaaaatgcattgagcaaacacaatgaagtacaaaatgcaaaaaaaaggaaaacaaaaaaaacattaaaaacagattttaaaaagcactaacccgctggtggattcaaagatgttccattatttccatccagcctattaacgattggtgtctccaactgtatggacactgttatcagtggatttgtaataaccacatgaccttttccatgagaagcctcaacaatgcccataccagcccctttctcattcgacttaacatcaactggctacacattggtatcaattttggtagctttctcatctgacttaatatccatatctttcgccagaaggttgctggaattcaaaaacttctgatgcttaatagtcattgcttcagccaaaaattttagagaatcgatgatagcttcagtacaccttgacttgcaaattgaacaacaacccctgaccttgtcacacagaacttggcaagtactatcaatgcattcgacatccactatttggccaaaatcaac

SEQ ID NO: 140275 - DNA, 609 bp, Zea Mays
tgattctctaattcgatcgatgcgtgcgcgcaggagcccgaggtgttcctttccctcggcgccaccgccgccgggactggcggcggattcgcggagccgaagcgcaaggagcggcaaacagtgcgtcggccatctgcggggagcgatgacaccgacgacgacaccaaggaggaccgtcttgggctgtccctgagcctggcagcatcgtcgtacgaggaagagaagctgggagccgggccagccggccacgacttggaagaagcctccgtggccggcgccgaccgcaaggcgaagggctacgcgctgctggagagtagcaagctcgaggcaccggcaccgccggccgccgccggagaccttgccgcggccgggatcacgagccagagcgtcaacccggccaaccgcaaaactagggtttccgtgcgcgtccgatgccaaggccccactgtaagacgcatgctgctgcacactgcacgtctgcacctcgctttgcagcgcgtgatttcacggccaattgatgacgagtgatccggttcgtgtgcatgcatgctgcagatgaacgacgggtgccagtggagaaagtatgggcagaaggtcgccaagggcaac

SEQ ID NO: 140276 - DNA, 293 bp, Zea Mays
atgttattggacataggctaaccagtacgcggggcttgcattggcctctggagcacaaggtcctaggatgactgactaataccatgcatgctacgctagctattgtgaatctgtcttctactgatgaattcttagaccgttttgccaccatgcgagagtatgcattttcctgaacatgagattattgccaaactcctggagttaccggcgtgacacacttgaaacaaaaaacaagaacgaggactagaaataacagtcaaagatatacacaattgtcgctgcttttctcataa

SEQ ID NO: 140277 - DNA, 728 bp, Zea Mays
ccttatttacaatttgggtcttacaaatcctaccccccttaaaaagaatctcgtcctcgagattagtaagaaaagggatgagaaagaatggtttgcaattgagatttttggttcaaaatttaagagtctttttttgtctttaatactgattagcatgtgattagaaaagcgttagcatcttttatttctggccatctagtagacaagatttggttagagcaaggataggttgaggcaataaaggaagggcaagaaaagacttcatcttggatggtggatcttgattcatgtgaagttctgattctattcatatccttccttgtcgatgttgatcttctcttctccggtcttgatgtcttcaaccaggttagggataagaggttaagatagatttgtaggcagtgacttagtaggtagtgtagctggtttagtaggtagttataagttgaatgagattagttagaatgtagtttgattgtttgcttctagattgggtggataagttatgtaacctgttatataggtcgagttgttgtgtatggctgagttgatctaagtcaccaatttaggcctaagtgaattaggagtatggcctcatattttgtaccaacattaagcaacttacattagattagctcaacttaaggttagccttcgttaggttagactaatctatcacattagatcaggtctaggttagattggtatgactagacagactagataag

SEQ ID NO: 140278 - DNA, 478 bp, Zea Mays
agcatgtcgaataataaagtcaagatcttcggacggtgcttcgggagcaggagatttagctttttcggccacatccttctccagaatcatgctagtatctagaaattcttgctcagctctctgctcagttgtggcaagctctgcctccgtgggcactgagggcccaggttcggtttcagcacgaaccgtaatagtttcggcaaccttcttcacaggggtaggagttaaagcccttgtcgtctccatgacagcgtccatcatgcttgccattcttctcctcttgggagttattataggagtttttgccaccttcggcaattctggctccgatggtcctgttgattcctctcggtttggcttctcaaccttttttccttcagcttcggcagtttgtatcagcacctcggtcggtccagttgcagaaaccttcggtactgcagccgattcttcggtgctccgacaggtaggagcaacttgt

SEQ ID NO: 140279 - DNA, 337 bp, Zea Mays
aacagggataaactcgagaggaatctcacggacaattgaagcgtctgggatggctgtccacaaggccacggcggtgacgactccactgcgtgaagtcctacgcggtcacagaggttccacgcttctccaactgtcacggacgagctcgttgtgttccgacgaaatagcccaattgatcaccgagcacccgccggtgacatacgtggagaatgatggcgatggcgcacttctgttctctgctcggtcttccgctctctctccgatcggtggggcatggttgggaaggatcaatgtgagggcaccacacatatagccgaggcagcatatcacctaggac

SEQ ID NO: 140280 - DNA, 316 bp, Zea Mays
gttggcggctgctgagttgccttctttggacaatgatccacccagtgaccttgttccccacaacggaaacatccgcagcctcctccttgcgatggtgctgcctagttgttttggttggttgctggggcaggaaggcgaggtgtctggttgttccatcgctggtactgatttcctcttggctagttgctctgacggtattgcttctgctgagggaactgcctctgatactgttgctggtgctgacactgatgcgagtgctggtgaccttgcttgaactactgagttgggttgcccgagtagcggggacagttgctac

SEQ ID NO: 140281 - DNA, 277 bp, Zea Mays
ctgggatccccagggaggtgatcgagcaccatctgaagatcaaccctgacgccaagccggtgagttagaagcctcgcagacagtccgttgagcggcaggacttcatccgaaaggaggtccggaagctgctagacatcggcttcatcgaagaggttcatcgcccagtatggctggccaacccagtcatcgtccccaaggcgaatgggaagcttcagatgtgcatcgactacaccagccttaacaaatcgtggattctacctccgggtgcgaccttttg

SEQ ID NO: 140282 - DNA, 508 bp, Zea Mays
cgcaaaagtgctatttgatactggtgcaactcattcatttgtcactgcaacatgggtagaaatgcataacatctcagtagaggcaatgatgccgcccatgaggattaattcggttggtggcaaagtgcaagcagataaattatgctcaaatataagggtggaaataagggggatagggttccccagcgacctaatagtaatagacacccctggggtagatgtcatcctagggatgaattggttaatgaagtatgaagcgaatgttagctgtgacaagaggaccgtaacattgaagtccccactcggagagaaggtagtggctgagctaagggtgcctaaaacagcggagggagattgtcaccagatttcagttgatagtaaggaggccaacccgcttgaggctatcagggttgtgtcggactttctagatgtgtttcccgaagaattaacgggcatgccacccgagagaaaggttgaatttgccatagagcttatccctggtactgcc

SEQ ID NO: 140283 - DNA, 559 bp, Zea Mays
tgtggagatcggcgacgtcgacgaccatcacgatcggatggcgctcgacgtcatctgcagcgccgcgccgccggagatggtctccactttggccgtcaaacagacggcaaaggaggcctgggaagctctgaagacgatgcgaatcggcgacgaacgcgtgaggaagtcgacgacacagaggctacgtcgcgagtacgagatgctctcgttccgggacagcgagtcagtggaggcattcgcccttcggctcaccgacgtcgtcgcgcagctcgccatgctgggtgacccggagtcgccagagaaggtggtggagaagtatcttcggatcgcgcgttcaaggtacaagcagctagtagtttccatcgagactctactggatgtgtcgaccctcacggtagaggacatcaccggccggctgaaagcggccgaggatgctgacgatgcacctccaccgtcgatggggggtaaactgtacctaacggaggagcagtgggaggcgcggtggaaggagaagaagggagtggacgctggcacgtcaaaatccggtgaccggcggcgg

SEQ ID NO: 140284 - DNA, 680 bp, Zea Mays
cattcgcgcgcagaggcagcgttgtgacgctggcgtgtggggctccggtgtcgggcttgtctcccccgtatcgcaagctacgaaaaaaaaatctgccatctgcgcgaactccgcggggtcgttccaaccgaatccgcgcttctttctagctcggcttccgagatccggctcgctcggggctatataggggctggagcgccgcctctctcttcgcttgcgaccacccaagaatcgcagcagaccaccgccggagaggggagagaaggaggaaagctgccgcgcgctctgattgccgcgccgccgcagtgaacctcgccattactaccttgctaccctcggagagttgcccggggtcatcggagtgaaactaccgacgttgcttgggctctggtgcgcggttgacggagtcaccgggaaccaatttctcgccgctgggacgtgggcaccaccgtactcgccccagaccaccgcgccacccgtgcccgttttggtgtgcggggagtctcgcctgacgccactgaagcttctcatcgcatcgctagtcgagaaggacccctggacctcggtaatttctcgacggcgaccgctacacccccgccaatccgctgctcaccgaggaccgatctccagcgcacgccatctccggtgagtacctgtccaccgtgttcgcgcaaccttcc

SEQ ID NO: 140285 - DNA, 551 bp, Zea Mays
gttggtgcctaccagtatatatggggccgtcctcatccctcagttctcgatagcacccgatagcacgcacgccgaagaacttcgacatcgagaagatgagagggagaaccgtcgagtcgctgcaaagccaccgcggtcaatcctcgattgtgtcgctgcttggcccatggagaacatctcccggcccttgctagcacgtgatgaagttgtggcaactctcaaatcgaaggaagccacggtgttgggggaattcctcgctgatgaccgcactccgccgtggagccacacgtgactgtggagagagctttacgctgcgcaatcggcgttgagtagttccctatcatacatgccatatcctccactttcttttacgtgtcgttgttcttggtttgtttcaccggatcacaaggcgagtgtcgcgtcggtgaggcctctaccgaaggctgcgggcgacgccgccgcggcttgcgtcgggaggaagcaggagcacgtgtagccatgggttgcggtgtgagcggctgagacctgagattagaacaggagatacccct

SEQ ID NO: 140286 - DNA, 414 bp, Zea Mays
gttaagtcattatcttttggcaatttctattctcttggtatttgtatgctcgtatccttggagtcttgcatactctcatattttcatgtatgcttaccttcataccccaatgactattcaagacatttcagttagcatgcccttgaccacccttgtttcctaataatccatgagcggtcattttattttgcacaaccttaacaatctcgttaattccttataacttccttcggtaacgagtttttacttcaactcttctgtcggaacctcacttatcttatacttgtttgttttcttcacttcgtcactttacgattcttgccttagctctgtccatggattatgcttttcatcattatcacctttatcctcatcacctctatatctcaccttgatgtttatcttataccaacc

SEQ ID NO: 140287 - DNA, 431 bp, Zea Mays
ccgaattcacagttgacaacgacaagtagttcgacagccaagacttcaaggatttctgcttgtccattgacaccaagcttgccttcgcctcagtataccacccgctgtccaacggagttgtggaacgcgccaatggaaaaattttcacagctgtcaagaagatgctcctcgatgaaaaagggcaggtgggcagatttgttacctgaagcggtctgggcgctaaacacgactgagtgcagggcgactcggttcacccctttccgccttctatatgggtcagaggccatgaccccgcaagaaataaaacatgggtccccgcggacagtttcgtcagctgtccccgacgtggacgaacccacttcgaaggatcttatcgacggagaccgcgtcttcgctctacaggctctaaataaataccaagcccagacaaa

SEQ ID NO: 140288 - DNA, 829 bp, Zea Mays
caaagctgcgcagaaatgtttccaagcattggtttacccgctccgtctgaccgccggtctgtgggtggtaggatgaactcctctgtagctgtgtgcctgacaaacggaacaattcacgccaaatgttgctggtgaaaatgcgatcccggtcagagacgatagacttcggcataccatgaagtcggtagacattagacatgaaagcttgggccactataagagcagtaaaaggatggcgcaacggcacaaaatgaccatatttagtgagacagtcgaccaccactagaatggtgttgtattggccagaggaaggcaatccttcgatgaaatccatggagatcgcctgccatgcctaggtaggaacgggcagaggttgcaacaatccagggtagcgagtccggtctggtttggcctgatgacatacagtacacgcagccacatagtccttaatgatttgtttcatgtgaggccaatagaacaactgtttgatccgggcgtacgtgactgggaaaccggagtggcctcctagagcactggcatgaagtgccatgatgaccttggtttgcaattgagaattattatcgagccaaatacgctgcttgtaccgaatgactccatctttgagggtgtagtgcaactgatcagacagcgccagagcagacaacaacttcatcgcacgagggtcagagatgtagccataaattacctcctggaaccaagcgggagaagccactgacaaggaatagaggtgaccagtaggatgtggacgacgcgaaagggcatcaacagctgtattatcagtgcccttcttgtattgaattcgataatg

SEQ ID NO: 140289 - DNA, 584 bp, Zea Mays
ggacaagacaacaactacacagctctctacaggtacggtagacagtcccgttgttgaatccggaccgttggcatccgtcgcagaccttccgacccttgaatccagaccatacacgctttgccagaatgcctccgacgacgcgccaacacctatggaggaagataacatcgaggtggacgacctaggagagaatttggtcgactatggagcctcgctagagcacccaggtatggatgtaaatgtgattatgttcccagtcgattgcactattgtcggtgatgataaacttgtcattgctcaatttgattttggtgctaaagaagccgccttcactaagccaaaagaataggtcaaccacttaaacccgctcttttgtgtgtggtcatatcgatggaatatcgattgctagatgttggtaaacggtggagcggccatgaatttaatgccttactcattgtacggaaaattagggaagcaagatgacgaactagacaagactaacatgacgctcagtggtgttggatcgatagttcgattaaggccaagggattcatgttcgttgaattaaccaccgagaccaagac

SEQ ID NO: 140290 - DNA, 302 bp, Zea Mays
tagctccaaatctttgagattatggccataatcttgttgagagatctcttcccctgacattcctttatcgtttgtgtgtggaggcttgcaggttttgctgactggatcaagagatatggaggggtgaagttgggtttgtctcactgccgagcacagagagaagatcctgggtttgacgtgtccagagcacgcgtcccgatgccatcttctggtatgaggtagaagggttagttagacacatttttgtcaatgggagcttagagttttgagatagatatcaaggtgaacgcgctcgattttgg

SEQ ID NO: 140291 - DNA, 527 bp, Zea Mays
agggatgacaacgaacatgatcgagcaaccgtacaagaggaaattcgtcgcgcagggtaccggtcacaggcaagcggcggatggaagtgctacggcgagaaattgccgatgatgcagtcggtctgttgtcgcgctcggtgctcggcgagcatccacaaatccaaacgaagcccctggactccctctcggagcacgagcgacgctgacggcacaaagtgaccacggcggcggcggatttctctagtcctgcgttcggcgctcacgagaacggtgtggtttgaggggaggaataggatccagctgggaggagatgagtttgccctttatgcgcgcggaagagtccgcaccccggtcaatccccccatcacggacccaccgaatcgagcggactccggtggattcggctggctgcaacagactcctaaacgcaggggaaggagacgcacctgacgacagggtcccgctgccagtgtcaacgagcggatgcaggcgcgcaccagagaccgacatgcaggccccaccagtcg

SEQ ID NO: 140292 - DNA, 642 bp, Zea Mays
gcagaaaacatgaggtttactatttttgtctgatagtgcatatttcacagagcctaacaaaatttgtttgaccaaattcggatgagtattccttaagttatgcatttaactattttgctgcagatttaaagaattgaattttaaatggaaaaggaaaatctactttgcgctatcgtccctagtaaagttttcctgcatctcttacaaacatttcctcaggctaatattcaaccgagtctctgacaatgcagaaaaccccttgggttaacctaaatctaacccgcggtcgtagccttattggaacagtacccgcggcagagaaaagggcggcggggcttaccggcggcgatctagctccagtgaggtgtccacggaggtcggggaggttacagtggtcacgtcgaggtgcgggtcggcgtcggagatggccggagtcggccgatcctcgtgctcaggcaggggagttcatcggcggcgagtgttccagcctgctcacagcgggataattcaattggttggctcggggagctttaccaagtgacacagaggcgatatatgcgaggaattgggaaatggtgcagtgacttacccggtccacgctatccggtgaacggaagaagtccggcgagggtgattcgggtt

SEQ ID NO: 140293 - DNA, 630 bp, Zea Mays
aacaacatcaacatgtattgagctatttgtcgttcttgaatcattggagtaggaacacaatcccacttctcttcaagtcttaggtttctatatacatgctcccccagattactccatcttctgtaaagatggtgtatcttcaaactttctcaactttgtttgggtttattcttttagaactcatatggcaccttaagcaccatttctaaactatattcttttccagcatgaataccggttgactatgctatcttcctatcagaaccacaaaatgtccgcttagaaatttagccatttctttgctttaggggtatcgttattatgaccgtcgtactcccccgacgaccacattcatctttaatagatcactcttgccttcaatgcatagtatgcatttcattatctgaagtataggggagtatctttcttaattgatcccacatatctccccctcgaaatgttgcatgaacttttctgccacaatttcgaaaccatttagaactcttgtgattgaggaactttgatcactgcatccacatgattacatcatgcataattcgtatgggagtattttttactcatttcacttcaagaactcatacagaatcctttatcattggtacttttgca

SEQ ID NO: 140294 - DNA, 477 bp, Zea Mays
tgaataggatagagagtgggaaagagttgtcgcagcgagcgaccacaacacgagtggtaagatcccagatggtgagcctccggggatcaaactctatggaacagtggttgtcagtggtgaagcgacgaaccaagagaaggttctatatgatgttgtggacaacaaggatgttgttgaggtacattggactaggaagaatcgtcgcttactgaggtgacaggcagagtcgacccattaccgacaatgatggaagaaggtaaagtggggctgtggggatggggtgaagaaacagtaccagggtcaggagtggtgtggtacgaggcgccgcagtcagcaacctagttggtgggagtaacatgagtgggctacgaggacatgtggtggtacgaagagagctatgggaggcacctccacagagacatcgggatgggcgtcgagaccgccagtgacgagcatgagcagtggagacgacaaggc

SEQ ID NO: 140295 - DNA, 372 bp, Zea Mays
gttgatctggccatggatgatcacgattagaccggccacataccgcttcgtgtgtcaatatgagtcgttgatccatggatgaacgactctggtcacatgttaatttcgctcttgatccgacccatgggatcttgatcgaacggacaaaatggcacacttgttctttatacccgtgatctcatcctggccctggattttcaatcgaacggcttagattagaagataccccttcggccaggctgttttgttaaaaagaccctaaccttttattaaataaacccgcggtcccacctggtcttaagaaccatcacggctaggtcctgaaaacttgcttgcgaccccctgggcttcgctggaattgtggcagcgtcc

SEQ ID NO: 140296 - DNA, 449 bp, Zea Mays
gcagaaccagaatagaggaagggttaatcacgtgacagcggaattagttcctgaggatgtcaacgtggtgtatgctatgtttcttattaactccatacctgcttcagttttatttgactctagagcatctctttcatttataactaagtcattcgtggaaaaacataacataccaaagtagcctcttaagaagatgttacatattagttcaccgggaggtgatatgaaagccacacactcatgcctccatgttaatctcaagattcaaggaatagattttctagtcaacctagtggtcctaggatccaatggtattgatgtgattcttggatgtgactggttgaaaagttgtgatggagtgatacagtgtgccaaaggaacaattatgttgacaagtccacaaggtgaaagaatccaagttagcacagacatgtcaacagatgcagaag

SEQ ID NO: 140297 - DNA, 359 bp, Zea Mays
caatgaggtgctatggaagatggttgaagattatgaccttcaagctataatcagtaaacaagctgatgagtatatgaatatggctggccatgccttctcatcgccattagcaattagagaatagcaaaaaaagagccccaataagttccattacctcattaatcatttaagttttgtatggctggcaacactaattcaacttctcttctcttttttagtttgttggtgggatgcatatggtggccttgcatttgagattcaatcctttgcaaagcgcattgttagcctttgttgttccgcttccggatgtgagcgcaattggagcacttttgaatttgtaagtaaaaattgtcatttca

SEQ ID NO: 140298 - DNA, 556 bp, Zea Mays
ctccctcgcagcctcgctagcgctaaaactctaggacgccggccggccgccgtgcgccgtccctctcggcctctcccagcctccctcactagcacgacggggcctccctctcggtcagggagtccagccgtccagggagcagggagtccactgtccatccgtccgacctcccactccctctccctcttaggaagtccagtcgtttgcccatccagggagtccaggacagcggtcccatctcccactccatctcctagcctccacgagctgccgtccaggggcctccctcgatgccggccacaggctcaggcttccatccacggccgcagactgccctcagccgctctcgctcctcgacagctcgacgtcggccaccgtccctctcaactgtgtcatgcagcacgacagtcgacactcgacagcaactctctctgctcctcgtagaacgacagcaactctctccacaggccacgagtccacgaccacgacgccggccgcaggctgctgtccagaataaactagttggtttgttttagttgactaaccaaaatatttc

SEQ ID NO: 140299 - DNA, 293 bp, Zea Mays
tttttgctgaaggacttaaaatttcatatgtccttgtttctgtagcctttggttcttctatcttcttcatttccggcattatgattggctcttcaacattcggtagggggctcggttccttggcttcggtggccgaagaggtttcaccgacatattcaggcactgtggccggttcaatattccgtggccgatgagtaagaacctttatctttttcctctccggcgctggctcactgggagcgactgaagcaacttcctttactgaacgcagtattttttcttttctgacctcg

SEQ ID NO: 140300 - DNA, 663 bp, Zea Mays
ttttcccaacatgtgtcgtgttgtgcaggaattcgtcaggacgtgccaaacatacaagtcagatcacctgcgaccggctggtctcctatagcccctgccgatcccagctggggtgtggtcggacatcggcatcgacttcatcgaagctctgccccgcgtgcaaggcaaacggtcattctcactgtcatcgaccatttcagcaaatactgccacttcatcctgctggcgcacccatacacggcggaatcagtggcgcaagcattctgcgccgaggtggtgaggctgcacggcatcccgcagtccatcctctcggaccgcgacccgtcttcacgtcagccttctggagggagctgatggccctgaccggaaccaagttgttcatgacctccgccttccacccgcaaaccgacggccaatcggaggtagccaaccgcgtcatcgttatgtaccttcgctgcttcaccggcgatcgaccccgacagtggctccgatggcttccatgggcggagtacacctacaacactgcctaccagtcctcgctccgcgagatgccatttcgggtggtctacgaccgcgacccaccgaccatccggtcctatgagccgggtgacgcacgcgtgcccgcggtggcgcaggagatggaggaacgggccgccttcctcg

SEQ ID NO: 140301 - DNA, 433 bp, Zea Mays
cgatggactagggccgcccgatttatgatttgtgtttaggattagagcttgtataacgtttcactgggggcgcctggaccgtagatatcactgcgtgcggctaagattttatcatgggtacatcagcggatggccgttgcatcgcagatgtagggcgaggaatagatcacgtacacattaaatctcagccctttatcggggatcttgtggatctcgtgcgtcccagttcacaacatctgagatctaatcgtagccctagattcatgatcgtgcagccagaactatccgataccccttcgaccaccactttgcaaatgagcccctatgttttatacgaataaaacccgcagtacatagccaggtagttttgagtcttaaaaacttttgcgccgttgcccctgatttctctggaatttgaggcgcagtcctgtcc

SEQ ID NO: 140302 - DNA, 322 bp, Zea Mays
ttgatgagccagacgatgactggctgaagtgtattgaagctaccagtgatgagcaactcggggcatactccaaggctgaagataatgctttgtccgtagctttcgggggtcggggcaagaaaagattgaacagggtatttgatgcgattggcttcgtataccctgattaccactacccgctacgagggcaagagaaaaagagaaagactgtcgcttcggccaccccagctgagactgccgcttcagccatcccagctgagccgaagagcaaaaagatgaaggttctgacccaccggtcgcgttatattgaaccagctacggt

SEQ ID NO: 140303 - DNA, 610 bp, Zea Mays
ttgtatattacatggctccgcctcgttaaaaacctcacccctcgggaggaaaagagtgcgggccagaataaaattgttttgcgaattacaagggcgagctggccctgaggagtcaaacaaaaaatttgcggagattatcaatgttccaagaatgctccaagtcctcgccggctggcgttgcgagcctgtacgcgctggggggacgccttcgtcttgacgataaaagggccctcccacttgggctccagcttgccccaggactctgtccgagctgtccagacgagtatgaggtctccttcgctgaattccctcgggatgactgcgtggtcacgccatgctttagtttggacttggtatttgtttagagcttgtatggcgaagacgcggtctccatcgatgaggttcttcgaagtgggctcgtccacgtcggggacagctgacgggactgtccgtggggacccgtgttttatttcttgcggggtcatggcctccgatccgtatagaaggcggaaaggggtgaacccagtcgccctgcactcggtcgtgttcaatgcccagaccgctttaggtaacaaatcggcccacttgccctttttatcgtcgaggagca

SEQ ID NO: 140304 - DNA, 791 bp, Zea Mays
gcaacacaagcactagtttccatttttgtaatcattttgataaggaatgggaagctagattactaaaacatggaaacttcatagcatgaactagattatccatagatgatgttatgctcaattttaactcataaaacaagcataaacaatcctttaagattgagggaataaatctaattcataatatggaaagcgatagatgtgaaagaatcaaatccaattttaagcaggtagaagtacattataaatcattggattgatttttcttttcatgttagattacatgcttttccaaagagaaacctattctctataagtaagactatttgggttacttagataaaaacataagtcccacttatctagttatagagagagttttccttttataagtatcctaaggatttgaattccttacatgacaccttattcctttaataacatgaaatatctctctatatctagaatcatggcaataataggaatattagtgtaaaacatgccatgaggttttgcaatattgaagcatgtagattgccatagaagggaaatgatgagcatgcaatctaccatatgagaggaaattcttgaaagaatggtaatataagtttaaagacatttgaagtgcttcattttcctatgtgactacccaagacacataagaagtgataatttaaaatacgtgcactcaaaagcataaatgttaccatcctttggctttcctccatgttgtaggtcttgacttttcggcacaagataattctttatttcctacaacatcaatatcttcc

SEQ ID NO: 140305 - DNA, 731 bp, Zea Mays
gtttttgttttcctcacaggggagattccatcatttgtttttagtcttccagtattacgttacctggatctttccaacaaccagctttctggtcttgtacaagattttgacacaagaacttcacaattggagagagtggacttgagcaacaatgcattgtcaggttttattcctaaagccttctttcaactaacaagccttgtagctttggacgttagctcaaacaaattcatgggttccttggaccttacacagttttggagacttcgtgagctcactattttggatctttccaacaatgagttgcatgtcacagatgcaaatgatgataatatagtacataccaaatatctaaccagacttcaacatatagggctcacatcttgcaatattactcaatttccaagatttctaaggcatgttaaatatataacatatttggatctttcatgtaataaaatcagtggcaatgtaccaaattggttgtgggacaaaatatgtagcattggaccatattcttatctaaatctttcacataacatgttcaccagcatgcaacacctcaactctgatattctccctttcaatacatatgtggaagtgcttgatcttagttacaatagattttctggggcgggtccctatgccaagctcatcaggaatgatcttgaaatattccaacaatttgttctcttcccttttgccacactggactttgtatcttacgggca

SEQ ID NO: 140306 - DNA, 769 bp, Zea Mays
gtagaggcttcttccttctcttgggaaaccgtggagttggcagcaaggcatccaccggtttagtgaccaaacactggaactcgcacaagggtgaagaaattaccatagaattatcaaaagttgactgaaccaatgtgtcatcctgatcatccgaattagatggtctcaacctcctagagtagaccttgaaaactggtggcttaaaattccatctagcagaagaaacactgtcaacacaactcactgccaaaatcgaatcctccctcaatccagcagccaaaacatcagtggcaccatcaggagaataatcgagtaccataacatcacacaaggccagaacaccaggcgccgccagctcctcaactgcaacacacgggagagtaggggcatcaactggtcctgccaacaaatccaaagagacaggctccgccaaaacctccactggagttaaagggcaacccggatcaccagtagccatcaaccccacatcatcagaaggtccatcacacatcgacgaggaatgaaaacgagggcccagtcacgagtgcaccgaagtccgaggcaagggggcctgatcacccagcctccgcacccaccgagcccgacgaccctgctccggctcatcatcagagggatccgatggaggtggcggcagatgcccctccacaagggcaccctctagaccaataatcttcacgatcacagggaacaccaacgaacgtggaatccaaactctgtcttcatcgaggaccatcggctccacagtgtg

SEQ ID NO: 140307 - DNA, 423 bp, Zea Mays
tgaacatcatgtgttagagaaggagacggaagggagataggaatagcaggagcgacggggaggaagctgggaggggttctattagagtttttctcagtttttgcttaaccctgatacaaagacacccactaccacttataccacacataccttacacccacactggatcgtgaacccgggtatgggcgcaacgttggcgacatggatgagtcggacgttgggcttcctcttgtgcaggctgagccatctcctcttcagttgtatgcggcacatctagcataggagcagagctcacattccccatcccttgaagtcctgcttgaccccaaacaggtgcactaggataacactgctagagtgcttccttgttttcccaggtagctaaatcgcgaggcagacccgctcattccaccagtacctgtt

SEQ ID NO: 140308 - DNA, 1491 bp, Zea Mays
aagggcataagggaaaagacgaaggcacataagagccagtggtataagtacaacaaagaatggaggtatgttaaggcttacgcggtaaagaagaggatatatataaccaagggtgagataagtaaaacatagctctcgaattgagatcgaaaagaggggatttcaacaagcagacctaagataagtatcaaggcaagatctacagcttatgaaggtaagggatgatatcaaacaaaagctcaaccaaggatgaagttaaggtgaggcaagactgcaaagcgacaaagggaaaagaaacgaacaagagcgggatagggaaaacaacactcttggattgaaatggaataagtaaggctaagaaaaataggtaaacatcatggtaaatatggagagaggtcaagggtcaaaggtgataataggcaaggatataaaggaagaggtaaatgtgcataaaaaaccatgaatctaggtacaaccaagaatagagttaaggtaagtcttacaagtggtaaagtataggatatatccacaggtgagataagtaagagaccacgcttgaactaaggtgggagattggaggttttagataacgaacatagcgcaatcgccaaggtaagattgagagatgagaagggtagaggcaataagaaacaaaagcataacaaaggatgaggttacagactcgcgagccaaagaagaggatacaaccaagagagagaaggtatgagacggaagaggggcgattttaaagggaaggtatgagatgaacatcaatgcaatatatagaagtgtcaagggtaaaggtgataataacaaagagcataggaaaggatggagctaaggcaagactcacaaaatggcgagatggagaaaacaatcacgagtaaggtgggtaaggttccaacagaatggtttagtaaaagaaattattaccgagggaagttataaggaattaatgagatcaccaaggatgtgcaaaataaaatgaccgctcatggatcattaagaaacaagggtgatcaagggcatgttaactgaaaggtcttaaacagacattggggcatgaagataagcatacacgaaaatattgagggtacgcaagactccaaggatacgagcataccaataccaagagaatagaaattgccgaaagataacgacttaacaatggaatggtaaaggatctcaaaagacaggcaggtcatggtcatataaactcaactatttaaataggcagcagaggtacaagggtaagtactttgaattaagggataaggatattaaaaatacaaggatacgagcatgtcaataccaatggaatagatattgtgaaatgatagcaacttaatgatggaagaggaaagaatcccaaaaaaacaagaaggttatggtaagggggcatctacaaagatgtcacaaacacaagagtgagatcagatctaatggattgagagaagtatagaccatactagaataaaatacttttgccaa

SEQ ID NO: 140309 - DNA, 457 bp, Zea Mays
cgtcgtcctggtttacttaagattgtgtacccacccatttgtgcattttcaattccattaagatagctgtggattgtatgttgtttgctgaatgttggtgggacagaattgcatattaatgttggtattcgaagaactctgtagcgttaccgttgaaagacccaaacagaacaccttgttccttccatatcgagtactttcaattggacttagttcgtgtgtctacgaattggactcagtgaccctttcatttgtatttgtctttcattacatgaccaaccattgtatgcaactaacgaaacctttacttattatgcagcttgattaaattatttgattgtttgacgtcctcttcaaataattaaggttctaaattctttttcgctatagtacatagttatttatcaattgcataagtctgtctccatgagttctgtctgtgctttcatgttttatg

SEQ ID NO: 140310 - DNA, 379 bp, Zea Mays
gctatatggttttaatgattaacctgtgtgcaaatatgacatattgtttagtttatgttcacatgattactctagtctggtattgtgtgaataccaactccatgttgtgcctctaatgcacccttttgagctaaggcgcatgagcaaaaggagccctcaattagtgacaactggtgctctcatggcaattcaggaaaaggcaaaggtatggagaatggaactatgcaatttcattgaatatcttgaagttccattgatcgtgatcacagctatggtcttgcctctgaattggtagtatcttggcttaggtgctccttactttaaaatgttgtttcttctggtgtacctaaagaaccttctaaattatgatgtgcttaga

SEQ ID NO: 140311 - DNA, 590 bp, Zea Mays
cggagacttcagagaaggtcacggcgacacggtaaaagagttgagccacgcggcgcacggccgggaggcggcggtcaccggcgaggtaatccactcggccgcaaagagggagagagagccacggaggtcaccggagtgatcgccagcgcacgggcggtgaagatcttttaccccgcgaagttatccattagttacgagcgcgaatccgacggcggcagcacgaatcacggtggaggaagccgtcggcggtgaggacagctgcgctggcggtctgatcctttcaggttactgtaccatggagcatcggcttcagtcgcctgacagacaaggtttaggaccaaatctctctaaagtttctctagtaactcactccactctctgtagcaaagtttcaaagctacaaaccagctacaattcgactatagggatggaactcgtttgagcactggatcgaggtcaaactggctctcaaacttgggtctaggccactgttagtctgaaattcagacaatactagcctgacagcctgacttcaggcttgattatctccaaaattttcttaacaactgtgctcacaccttttagcaaag

SEQ ID NO: 140312 - DNA, 330 bp, Zea Mays
gacggctccgcttcgcgcgggccggcgagaagagggcgttcaggataaagttggaggcggccagcagggggaggagcggcgcacgcgtggcgagagggcaggtcgtggccggctcgtacgcgtggagcgacggcggcgcccatgtcgttaggagccccattgttgttatcttcgactgatcatcgttcggtaagctagtggctagcctcgcgcggacagacaactctggaggaggataggtgtttagccataccttgttcgaagcaggggatgcaaggcaatgaaaaccttcggctatgtgtggaagaataatcatcacatcaagcagaa

SEQ ID NO: 140313 - DNA, 630 bp, Zea Mays
ccgggttgtgcgcgtgctgcagcaggtaggggctgtgctcggcggcgaggcggttcggcttccggccgccgtgaggcgcggacgcggacgacgacatggctgcggcgagggggcgcagacggagaggcgtgctgtgggtcggcgacgaggaggaggcggcggcggtgaggcggtggcggagaagagtggagagcattggagttggaggagggatgagggggccgaggtgggagaagaccggtgcggaagcggcgggggacatgtgggctgcgcgcccagcgacacctgcctgcctccgctcggcacacgctggcgtccgcaaggcccgcgcgcctgctgctagtgtgtgtgcgccactttgttctgggcttggccagtaggccttgtgggctgctatgctccccttatataagggaaaacaagcaaatgaatttcaaaagattttcacctacatacagccgagggtaaaaacttggacagaaaaaagtcctacttctgttttgatatttagttgttatttaaatatactagctaactagctaacaaattgctagctgaaatagctgattaagaatagctccaacaacgaattttatatggttctaaactctaaaatatagcggttgcagc

SEQ ID NO: 140314 - DNA, 597 bp, Zea Mays
ctggtttgctgctgaatggaaaaaccaagggggccccgaatatcctagagagtcctccattcgctcagaattactacctctagaagtttgtctagaagcactacagcggccacgatgttctggcttgccgagttgtcaacgtttgtgatccgaccgcgcaccacggggttaccccatgtgatggttttgggtaggacgtcatcgttgatcgcgactcgatggttcgtgttataacatgatgggatgacacatactcttatacaggtttgagccacgtagagttgtgtaatactctattttttgtggcaattctattattgatgtgaggattacaaactgagaattgtgggtgctaaagtctaggatgagatgaaatggtaggaggtacctctcgaccttatatactcgactagggagagttaccccgtagagacgatgatggctatctacttgtctgtctcctagtttgtagtagactgtatccctacacatccggagtccttgtcgcccatccgcgcgagctaccgctgagggcttagcttgtcgggtgattaaaattgtggtggccgatatgtccgtgcccctatagcgcttaat

SEQ ID NO: 140315 - DNA, 470 bp, Zea Mays
ggggatgagaacatccggtgtggatgtggaagatgatggttcagatggaaaatcaggaatggaaggaagacacatgaaagaagtggattctatgggataatatgagtgagtggacttgttgtgaaagaagggacgattttcattgaaactcgcatctctagaaattcgaatacgacgagtagatagatcataacaacggtagcctttgtgttcaggactgtatccaagaaagacacactcgacagattgagcagtcaatttagtccgttcacgtggtggtaacaggacataacatagacatccgaacacacgaagatgatcatatcgtggagatgtcccaaaaagaactttacctggtgttttgccagaaagtttagatgatggttgtctattaatgagatacacggcagtggaaacagcttcactccaaaagtgtgaaggaacaaaagaagatatcaaaagagtacgag

SEQ ID NO: 140316 - DNA, 548 bp, Zea Mays
cgggtcatagcttttttagcaaactcgtgtctaggtcagatcgagttgggccacgcctccatgttaaacgtgttaggtcggggatattttcatgtcagatcaaggttttttggctttggattggactttggttcaaaaatcatggaccatggcttttatacatttgttgcattgttcgggttgggtttttttatatgagtcgggtcaggtttttttggacgggttggacgggccatgcttgatcaggtctagttaggatttgggggcaacaatgtttgataggcagagtaggaaggaatttgatagcctcgtaccaaaatccgtttgggaccaaattcgagaagaaaaaactaggtcagatgaggagaggcttaaggctggttctaacactgggtgctaaggctaggtccaacgtgggtcggtactgaccgttgaggtggtgaaccaggtgatcgataccgaaagagacgatcacaacgctagtcggccagtcgattgggctaccgatcaatcggttcgagtgataccacctgtgttggagcccgtgt

SEQ ID NO: 140317 - DNA, 371 bp, Zea Mays
ggttattccgagggtaaagaagtttctgtatctcctcctgcgggtaggagaaactttgataataagctgagagcatggaacgagagacttggagctcccgatgggttacctcatgggttttcttttccaagtcaagtttcgcatgcagggaggaattcattacacgggcgccgtcaaggaccatagtcacctaatcaagatctgcctgaccctatgcacacctctcctcagcatcagagcaccaccaattcaaggttggaaaaataatcaacaacagtctataacatgaacaagaagacaaactgcacgagaaacatcatcaatcgactcaccggcatttgcagatttcaggtcatctatctatttctgaa

SEQ ID NO: 140318 - DNA, 1103 bp, Zea Mays
ctttcggcccaccgggggaaaaccctcgccctggcccaacttccacgcgcgcggggacctgtggcttccacgttcactgacgggcggagcccatcgctcagccacacccctccctccgcgcggactcgttcgctgtctgtctctgtcgtgtgggcccctttggtcagcactttcttctccgccgcgagcttcgcgcgccgttgtaacagccgccgccgaggaactcgggaccccttcaaccacctcgcccacggacattgcgcggactcggactcgccccgcccctatataaacccggtagcgctagcttctctatccatctcgacggaccgtaggcggaaaggaaggagtgtgtgtcgtgagcatcggcgtgggtttggccggcgatttggtccttcgattgggaccgggttggctcggcgacgtcgcggggcagccatacgaagcttcggtcgacgttgggggccttctcgggggcgggaattgctcgtcgtcgtgcaagctccgccgtgaatccgctctcttccgtgggcgggactgcaacccttcaatcgccggtgagacccctctctgtagattcactatcatcccctcttgattttgcaccgattaatttctagttcggggtggtttggcaccggattgcgcgttcgccggcgaagctccgccgtgggtgcgccaccgccgccgctcggggtgctgggaattgggggaagggctcctgaccgttggatctcgttgtgcggtcgagattagatcgtgaggataccccttcgccccattaaaaaccagccgttgatctctaatcgtgcgactcacggcgcgtaccggttcggtcggggggaagatctaatctggccccttgattcaagatcggacggctctgatgggtccttaccccttcgctgtggcgaattaacagaagagcccctccacttatttgaaataaacccgccgtcctatgtgactgtgctttgagtcttagaagatttacccagagccccctgacctttcttataattgaggcccagtccagtgaataggaaaatcatagaaaatgatttagaaaatgatttttagtattaaaataaatccagaaactt

SEQ ID NO: 140319 - DNA, 1099 bp, Zea Mays
cgccgtctcgcatacttttttttattaaaaaagggggattttatttatatgtttgactgtaatcgtcctagatgcacccattaacatcctcatgaactttttcatagaactattttcggtcaatttggtggcttaaaattctctcgtcttccattttatttcctcttatttcatgtgactatggtggtgttgttttagctttctttgccgactgtactgccaaacgttcagctttttaagccgttaagatgagaatcactttggtgaaaatcgttcagaatcaacgtgaacagaaaatcagtcgtgtcatcgggataggagcaatcgtcgctttctatatcttaaacactatggaccacttcaccttacttcgtatataatccccacgatacttagattctctccgcaaccagattctgtccataaccagaacgattctaaaaaaaactcataataaaaaagccgaacatcaaacgggctgtagctaggttgtgtagtttccgtacagtccatattcacataccatatgtttggtttccccgatgcagacgtgtagccccatccaaacctacatggtgggatacgggaccttacccacatctccgcggtgcaacccatgtctcctaaaatggctttctttgtatccgtgtgcgcagttcagagctccatcatacaaccaaccatgcaggtgcacttcctcggtcaacggatgacacagacctagacgcgtacatctaagaaaccaaatacacggatatagttagcgagcttcataaattcgttacccagatctctcacaaaaattcaaatatttagtcgacttataaatttaaactttggatcattttgtaccataattacatcgctacaaaaaatcaagaaactttctttggtcatattaattttctgcgctttccaataatgacgccgaaaattattcggttgaacctcttttgaaaaccggttgaacctctttggcagacctgtcagtcagtcttgccagtctggctgacagattgttgtgcagtctagccaagttgaccaaaccgattgaaccgccctgggggcgattgaaccgcccctaacgactctgtcgacc

SEQ ID NO: 140320 - DNA, 285 bp, Zea Mays
aattcatgtccaacttcaaggaaactcactctcagcccaacatggaatctaacctccacaacaccatccaccaataacctcgtaagtccccacatgtctttgtgtggtggttttgctaggttgggaacaccatcctctatgtcatggtagcatccattgtcataatctttcgatagggcatccacggtgagaagatacttgagaagatagccatccacaacctccaggatgcggggaactgctctctttggtggaaaatatgcatgagttgttgagatagagctt

SEQ ID NO: 140321 - DNA, 772 bp, Zea Mays
ctcgttctgggtgccctaagggagaatcagttctatagcaagttgaagaagtgtgcattttggccgtccgaagtggctttcctggggcatgtgattaatcagtagggcattgcggttgatcccaagaatgttgcggctgtggtggagtggaagagaccctctagtgtctctgaaattcgaagtttcttggggctcactggatattatcggtgtttcgtaccaaatttttccagcattgctaagcctttgactagacttttggagaagggtgttctcttcgtctggtccagcgattgcgaggtcagttatcaggcattgaagagcaagttggtggacgcccctatcctagctttgcctgacaacggtaagcgtttcacggtttatacggatgcttcgcgaattggacttggctgtgtgttgatacaggaaggcagagtgattgtttatggctcaaagcagttgaggaagcatgaggggaattatccaactcatgatctcgaattggcagcggtggtttttgctctaaagtcatggaggcattatctttatggcgaggcttgtgacatttacaccaatcataaaagtctcaagtatattttcactcagaaggagctgaatttgaggcagcgtcggtggctcgaattgattaaagattatgatttgtctattcattatcacccggggaaggcaaatgtggtggctgatgcccttagcaggtccggggttccaaaagtggccttgcagttgattgctgatctggaccgtttgggga

SEQ ID NO: 140322 - DNA, 841 bp, Zea Mays
cgcgtggagtacgcatcccctgtgatacgaggatgccaggcctgtcacctgtgcgaagcaaaccaacaggccgattgaggggaactgacaactgaattgaactagctgccgtttatatatagctcttctaggacaaagtggcatgatgtggcgatatccatccatggatcggagttgttgtggctacatgatggcgacagttaagcatggcactagggagagaaaagtgaggtggtcgagagagagagagaaaggggccaagttgacaaagacaggagatgacttcatgtgcacttcttgcacaacatgcaccaccaagacggctatcatgctacagcatatgtgaagtctctagctaatctggtgctactactacgcacgcatgtgaactcccattcatatctttttgtcttactgggccaggtaaaaactcccgttcatatctttttgcacgtacgttcatgagagttttgtggcattaaatatactgatgatattatatggaataaatggaggaagagatgatatataacaattttatgacatcaaatgaatttttatactcttgaaaactgggacgaaactgcttatagcttagtctttctatacatatatactgctacgtaccagccattcagtcccccacaggtccaccaacacacgagtccttcaagatgaagttagcttctgcgattagcgggtcggtctttttttagtcttgtcaacctcgaccaagatctattcatatgcccgtatatatatgtctataattgccacatatatatagaacctgcgcccttgatctcgatgcattggttcgaaggctctctgttcgtcgcag

SEQ ID NO: 140323 - DNA, 637 bp, Zea Mays
gaaactgaaggcacgttcaaatctccaaaaaaaagaagagccaaattagcagactacacaagcaacatcgtctgtgggggagcagcgatactcaagcacgcgcggatctagttgtagatgtcgagggagaaggccacgttgaacgctcagcttggggcagcagagcgaatccttgtgcacgacgacgaagggcatctcggtcgcggattcgggatggaatcaccacctcctcgctggatctttgccaacagtcttcaaatccaccccgagattcccaccgggcaaggaatcgccctctgctgaaggtcacttcccggcctcagtcccaacttcatccctcggacgacctaagtcttctggaatgcaaacctaagtctttctggaatgcaggagatgaagaggtcgggggatcaagatgccaggaacgcgggagatgaagagggaaatgggacgacctaagtctttttggaatgcaaacctcagtcccaactggtcacgtcgaccaatctttcctctgccctcgatgtccactaccaccctattgtctaaataggaggaactatgggagagcaaactatttttactactaatagctatttggcaacttactaaacaaaagtttagatagcttttttcg

SEQ ID NO: 140324 - DNA, 840 bp, Zea Mays
gcttgacaaggccactattttctgtttctgtgattgctaagtaatgagactgtcaccaaggaagaagaccacccctgtcgtgctcttgcgagtatcaacatcacccgcatggtcactgtcactgtacccggtcaagcctgctggtttcttccttctctgatagtagcagccatagtccgaagtacctgctatgtatctcagcactcgctttacagcaagcaaatgctcggtagtaggcttctccatgaaacgtgaaacaaatcccacagcaaaggctatgtccggtcttgtgttcactaggtatcgaagtgcaccaactatgtgccggtatgcagtagaatcaatagtaggacaggtactcgacttacttagtagtaagtcctaggcgtgtctccatgggcgtggcactcggattacaattcttcaggcctgcttcttcaacaatcttccgagcgaacgccccttggctgatggcgatcccgcccttgccttgctttacttccagcccgaggtagtaactgagcaatcccaggtcgctcatttgaaatgtgctcttcatctcccgcttgaagtgcttgatcatggccacatctccaccagtgatgacaagatcatcaacatatacaccgacgatcagtcggtgttggtctttccctcgagtgtacacaacatgttcgttaatgctgcaccaaaagccaagagatgccagagaagcatccagcttggcgtaccacgcgcgtggtgcctgacggagaccgtagagcgccttgacaaggcgcagaaccttcccttctttgccggagacgacgaacccggaggctgagcgacgtacacctcttc

SEQ ID NO: 140325 - DNA, 721 bp, Zea Mays
ctaaaatatattatgaatttcctcaggcttatggactgcggacaccattttccagaagcccagggggctctgcataatttctaggactaaacggtaatggtcttaacactaacttggacagcgggttagtttaagaaaagccgaggggcctacttgcaacatcgcacggccgaaagggtacgggccaactggggccgcccgatgaaggctcaagggcccagattagattcagaactttaagcgaaccgttaagcgttggtggccgcccgatccgagatctacggatcggatttaaaatacccaaggtggcttcgaatgcgcccgatccccatccaacggtccggatcgacctcacgcagaacgtttactcagatccaatctaagcctttgatctaccgattggtggtcacgatttaacgcagcaggaggtatacacgactccaaatctggtgcgcccgttgagcatccaacggccgaggtcgaaccaacctcccattgtcctgagtccggtgccgccgacgaccagcgcggtggtgccatcgccggtgaaggtcaggacacgattctagcgcgtaaactctcagagtatcggtgttacatgcgaaggagacgatggcgaactcaagagaggggcacttaccgactgtggtgatagagacgaggtcagccatgacgattggcggcacccgagctacggtgagcaattcaccgagacttggtt

SEQ ID NO: 140326 - DNA, 419 bp, Zea Mays
cgaaacggggaatttggtgaaattaaagcctggaatctcggattggcgtgaaatttggcaaatatgttactggaagtgttgtgaaggtgcctgaaaaatttgggttcaatttgagcatttttggctggtttgggcatttcaccgagcacgtggcgtgcgaggaattagggttttagggaaatgactttttgaggtatgaaaaccctcccgaaggagctaggaacctgcaaggatgtttaaggcacacataggaacacaaatggccacatggtttcactggattgcacagagattcgagatttgcgcaagaggtgagaaagaagggcttcactgcctcagagacagagaacaagagagaaagggagaggagagcagagagcagctcaccgagcgagggagaggacgagcgcaggcacagg

SEQ ID NO: 140327 - DNA, 477 bp, Zea Mays
ccgataactttttccccgaagcatgtcgcacgatatagtcgtatattttggaagatgcttcggggacggcagtatcaatttcttcgaccaaagttggctttgacattttcatttcttcggttgcctttgcaatttttgcttcttttgcttccgaaggtattaccttggttggttctgaaggcccggtttcaactccagtctgttgcttcggagcttcagcaacggacacttcagcaagcgcctcaggagtttcagtagtcttctttggggttgtgtttggaagtttaattgtttccaaaacatctaatacattaaccattcttttcctttttggggtcactgttggcccctttttaatttttgatgcttcaatttcttctgaaggacttaaaatttctgataccttcactccctcagctgatgttttcacttcttccgtctttggttcttccatcttttctgtcgctggcacttcgg

SEQ ID NO: 140328 - DNA, 412 bp, Zea Mays
gacatcattgtaaaattttccgcccatcaaggttgcttcagctgaaggatccttcgtatcatttacggagagggcagcttcggcctgggccatgattttaacatggtcacatccggccttctccaagatggctgaaatttcccgcgcaccggaaaacacgcaaatatccccgcgatcacttacaatttcttcgaaggcttcgacttctccacttatccattcaatgacaccttcggggtcacctcgcgtaaagttttcttcagtagaataggcacccactttggcgaagctagttttcaatttcttcacacaatccaaggatttttcgaagcacctttccttggatttgcgaagttcgtcaacatttttctctaggtgatttttccaatattcgttgatctcttgattagcc

SEQ ID NO: 140329 - DNA, 411 bp, Zea Mays
gcgagggatgatggcattccactgcagcatattacttgagtctttacccccgcatgagacgtaagacataggtaggtcaaaggtagtgttccttgaaaccatgtacacacataggcagcaaacacctttttccagttcatgaattggccagatgtcgatgcaatagaagagggcatcgcagcatgaggcagtagggttttgtggggtcgtcccctagcaagagagcagtgccacgctggtgaagtcaagcctgcaactcagtgaggagcaagcaagtgacggcggcagcaacagcagcagcatgatggtgacgagcagcgaaacggtggaggaggccaacggttgctctaatatgtactagtgggtacggtagtggcgattgtgacccggccgtccctatcgattgaggtg

SEQ ID NO: 140330 - DNA, 539 bp, Zea Mays
gtcgcgggttgttttctaattttcagaagggctctttagcaaaaaggcaacggcgaagaggtataaatagatttcagccgttggatcctagttcaagcgctcagatcagatcttacttaaaacgatccggatttcttcaggagcccttggatctgtatcaaacggtccatagcctatctgcgggttggatggcagggactgatccatccgtcggtccccagatcaacggttctgattcactgcaaccacacgacgccccagcttctaatcccaaacgtccagcagggatccaacggcccaggtaacttctcctacctccagcttcccaggcacagacaccacgtcctccccaatgctctctctctcccccgttgatccatcggcgctagccaagacccgacaggggcaccccggcgactcgccggcccctaggaccgcctccttaccatgaccgccacacccgcacccgaactcccgatgcgcacctaacataacgcagaggaaaaggaggctcaccagcgatggtgtccggcgttaac

SEQ ID NO: 140331 - DNA, 668 bp, Zea Mays
aagagcaccgttacttacatgtagcgagcttagtttaacaagacctacatttctactatatatgtgacacgacgcataatccagaacaggttagatgacttgggtctgacatcgaaattctatcggagtccataagaatcatcgaaacaagtgagtgtccaaaaaaagttgttaggtgctaccctcgggggcatgaattgggggttctttgcatctatgttccatatactatatgatcaacagtcagtagcagcctgtggtagagtttgagttttgctttattatatggacctagtgtcactgaatagtcgtcgttattggttgtaagactctaactttgagtgtttgtgtttaaccatgcattcatctgcaacaaccgccccttaattgagttgcactttaacatgttgtttcttgtgcatgcggcaagtgattagtctcatcggcgatgtcaatcatatatcaaccagaggccgggaacgttgtgctaaagttgtatggttcgtatctttattattatatatgatttggagctggactgatatgccactctgttctgaactgaatcaatcaatggttgtcttgtatccggtgaagatccctattgtgtatatatatatgcaccgtcagagctgcgtgtccggacgacgcacacgcacacccggtag

SEQ ID NO: 140332 - DNA, 462 bp, Zea Mays
ctttgcggcttatctcgtcaagaaaagattatagtgccatatcaatggcacttttcaccagtgctacttgatctaatggtgagaacttggaactgccatggttgccattgcttgaattgctttctctgtttttgttttatgttttatgggatgactctttctgtttcttcccttggagcatttgttgtttcatcatgaaggccgacatctctcatctcatgatcctctccttcataatctagatgatgatcatcatcgaggttcaggtccttgcccttcttgtccaagtcaccttcacttacgatctcatcaatattgaaaaagatctcatacatgcaatcacagtaaactatgtctgcatcatttgggatttcttgagcgtcgagaaccaccactagcaatctgacaactcatgtctgcttcaaataagccatatccaccctaaaccctaaaatagagcca

SEQ ID NO: 140333 - DNA, 746 bp, Zea Mays
ccttttgctccttcacgcgccagcccagtctaatttcgccaccggtcgcttacacgtgggcccgggacctgacgatcttctccatctcgcaactgcgcagcgtggtccgagctcctcgccgtggaaatcggaccttcctccctacaagttcggcctcaccattgcatccttgaccggttcggggtacatatggttcacgccctccgtgctcgttgagatccctggatcgtgaaccagtgccgtgcaagcttactaaccgcgagagagaagagaggagcggccgccgcgagtaatccctgcaaggtcgtcgatccggtcctcggtggggtgtccgcgggcttcatctggccggtagggaggcatccgtggcaaaagcactcggaatccgtcgcgggcctcgccggaattcctcaccgtgcctcgtcctccactgcgcgccgcgagcaggagtctaccgccattcaatcgaggtactaacgccatccacgtgttcgcattgttgttcagtaggtttagcgttagctaatcgcattttggacgaccctagcgcgtggaattgctcgccggcgttcatcgccgcggcgggtgagcggcgccgccgtgtccagggttgggttggggaagaattccccagcaccgttagatctggctggtgcggctctgattagatagaagatgccctttcgcgttgtgtcgatctggtccgttcagttggatcggacgggtggaaaccaatctagtgtaat

SEQ ID NO: 140334 - DNA, 418 bp, Zea Mays
caccatggtgcctctttgctctcgtggcttcatgtgcggctgccttgacatcgacttcctcgggtgctatgttgaccatggctatcaacaacatgacattcgcaaccatgactcctccaccctcactcttggttaccttgacatcgacacaatgggctaccactttgcatgaggacccatcgacttcttcagccacaacatacacgacacatcgactcttatagttgtagagagatgttagctgtcagcttcttctccagtctcaccgctcctgctgtgatattgtgtgtctgtgtgtgtgggggggagggtatgggggtatgttagcttatcttctcctccacgtctcgtttcatgtggcttgactgcatcgactttcgacccttgcattccacctcgtttgtctcggttgtgtaag

SEQ ID NO: 140335 - DNA, 498 bp, Zea Mays
tggacggtgtaaggcgttttatgagcttctctcaagatatccagcttcacctctgatttctgaggcacacagagacggcccctgaaacgaaccaaatcattctcatcaatggtgaactcccgcggtttaccatcaccaaccctctttcgagcttcctgcaatagacgatcctgctgctgagccgcacgcactctctccatgagagaggattgaataagcatccgagtctcctcgctagtagtgccgacataacacaaagcgatccccaaacggtccagatcagcgatcaacggcaaggccacctttggaaccccggacctgctaagggcatcagccaccacattagccttccccgggtgataatgaatggacaaatcataatctttaatcaattccagccgccgatgttgcctcaaattcagctccttctgagtaaaaatatacctgagacttttatgatcgctgtaaatgtcacaagcctcgccataaaggtaatgc

SEQ ID NO: 140336 - DNA, 571 bp, Zea Mays
ctatcagaatagtgttgaataactgaaactgaatttaaaagcagaaatggtcagagtggaatggagccaatttggacgcaccatatctttggatttactcgattttgacccaaatatcctatagtaagtttgaagacggttgataggtgaacaaactttattaatgaagtttgctttgtccttaacaagaatcaagagattgagtggatagaagggggtcagttcaggcgaactctgaagatccagtgcactgaaatatctgaagaacacagggaaaagatctacggcactgttgaatcagatgagctcgagtgatccagtgggggggaatcgatccgggggaggataactttggacgtggcatcacccagcgagctcattcgtgcgtggctggagatattcaccggcggtcgccgtgactcagtgttttccgccgcggtgtcatccatgccttgctcctccctttactgtacctcttctatacgtggttaccatgcgcaagcaaagccttccgcgatcattgattgttagccggaccgccgtggctataaatggcgccatgaaccacggc

SEQ ID NO: 140337 - DNA, 303 bp, Zea Mays
cggtgcaacatgctcacgcttactcgacttagggtgaccactataccctactaacagagcaatcagcttaagtcggcagtgacttaagacggtgcaacatgttcacgcttactcaacttagggtgaccactataccctactaacaaagcaatcggcttaagtcggcagtgacttaaaatggtgtaacatgctcacgtttactcgacttagtgtaacatgctcgcgtttactcatcttagggcgatctctatgccttaccagctaatcaattaacataaattagggaaagattccaaaaccggc

SEQ ID NO: 140338 - DNA, 280 bp, Zea Mays
gaggcgcacggcacgcgtccccgtgtaaacaagccgagattcccatcccctctccatgtgagggcggggcacgcaccattcctcggcgaacgggctaggggctcccaaagtagggttaaaaaggagttggttggcgcaaacaggcacccgcctacaatcatgtcttaatcctggctactaccagtagctactagggcttgcgtgggatatgagccaaagaccggtcgttaggccatttcccgcgagagtttttatgtagatgacacgtcaccatatttat

SEQ ID NO: 140339 - DNA, 976 bp, Zea Mays
gtccccgacggcgctcgcgcaccgccgcgctccggcgagcatctacaccggcctattggggctatggctgggttctccgagcggcggacatgaaattggggtcagcctgaccatttcccctaacttaattgcactattggtgaactatcaagctctgcccgcgtgaaccgaatgggtggcggacagatgagtgcgttcccgacgactagagggcttctagttcaatttagtggttcggtgagtatcacggagctgggagggtactcaaacgaagtagcagaggaccggagctgacctgtggaggactgaccacggcgagcttgattcacggcggcggaaaatagatttgggggaaatccagaattcgcgagttctagcgaaggacggctagcgattagtggtggctgaatgcgtgaggatgtggtgaagctcacggcggggtcaatttatagagccccgaggcggtggcgctttaatttaagcggctagcggaggtggccggagataaggaagaagacgtcgcggtgaaatcgtggctaatggcgtggcaagctccccgtcgacgatgggatggcctagaggagtcacgacggcatggtgtaaagacagagccacgcggcggacgccggtgatggctcaacggcgttgaaatccttatccccgagcggagagcaagggaaggaaagcactacagctggccggagtggtttacagctcaccggcggcaagggttcataccggctgtgcatatccgatgaccaccgagcacgaattatgacgagccgcgatcaacggcgacggctaccggcgatgagcacggaacgggatcttcttcagttatccgttactgtaccatagtgaacatcaattcagagcgactgacagagcaccttggatcttctttttctcaaattttcgtgtggaacctgagccaactttctgtagtaaagttgtagaactataatccctctacaac

SEQ ID NO: 140340 - DNA, 410 bp, Zea Mays
ggcgcgggtgcgcggcttcggagtccgctagactacaccacgcgggttcggcaaatggggatggcggcggacgcgacgacggccatgaccatcgacttcctccgcgcgcgcctcctctccgagcgctccgtctcccgcgccgccaaggagcgggccgaccaccttgccaagcgggtaaatgcgcgcgcatttcgttggcttcctgcctcctcgcattcccggcttagtcaatagtcaccgagcccgtcgccgcagtgcaggttgtggagctggaggagcagctccggacggtgacggcgcagcggcgcaaggcggagcgggcggccgcggaggtgcttgccatcctcgactcccagggcttcggccgcctctccgacgccgcggacgattcaggctcagagtacgaggcc

SEQ ID NO: 140341 - DNA, 399 bp, Zea Mays
gcttggggtagacatccacattgcatatcttgtattgccttgtcatgtgcaaggtatatacattattacgctcctgatgataaatgaaaagatgcgtaccacaccttttcattattgggatccaatgtccttggatattatgggtgatgatgtcaaccttaagggccacaactagtgccttgatcttggtgacagctatgggaggttgtcactattgttggccattgatgagtgtagattgattaagcaatcatagatttattggaaggaggttagagggtgacacaagagaggctaacaacctaagaaatagcaacataagagaggctaacaacctaagaaatagcagtgacacaagagaggatggcatgcaacacatggatagataggaagaaaagc

SEQ ID NO: 140342 - DNA, 728 bp, Zea Mays
ttagagttgctacgtagtttatttagttgtttcttctttccattatataattgttttgccattgtcctctttgaacaactcaaatggccgcggaaatgcggattgagcagcaagaaaatctattcatttcacacgtctccatctcgttgagcatttaattatttttgggcaggaaagaacacataccagagatgaggttgttggtttaatttgattctaagtcctaatgaagaagattgtgagctccggcccggcggtgccgccctcggggttgtgcatgtagtacgtctcggagtccttggaaccgacgaggcggtcgaaatgcgcgcgcatgtaggtgagctcgccgtcggacgggtgggacatatcggacggcagcacgccggcgcccatggacgtggagtggagcatccgcatcacgcagtcgtcccgctctgtcgcctcccgccgcgacgcgtgcccgacgctctcgccgttcacctcggccgtccagaccggctcatcgagcagcctccgcgcccccacgtccaccgtatggtgctgcttctcgcactcgagcgtgacgcgcaccatccccgccgcgctcacgtcctggatgaacttggccgtgggcacgccgacatccagcagcacgcacggcgggctaccggggctctcgtgcagcgcgatggtgatgcgcgcccggcggtggccgtacagagtccccgtggcatgcatcgcgccgtgga

SEQ ID NO: 140343 - DNA, 438 bp, Zea Mays
ccgccgcgcccgcgcggtgaccggccaaattagcccgacctagtgccccggtgttagtccctaaggtacccctccctctgctgaagctatcctaggccttagcgcgcctcaagcccccccctgtggccgaaatccttcaccagagttcctccggcctgcccgaggcaatatccccaccgttctcccctctctgtcctcggattcgtggtcatttccccgccactgagttcgtcgtgtcattctctccctctctgcccaatcccgacgaccccggaaccaacttagcacgcgcctgcccaaactccgcgacttcaccgccgtggagaggagcggcgccgcccgcagccgttcaccctcccccgatctgatctcccccgtccgatcttgatcgcacgacccagatcgcgggataccgcttcgcgcacgtgcgccctgcgc

SEQ ID NO: 140344 - DNA, 451 bp, Zea Mays
cgggccccgggcgtagacccctcttccgaccaggtgctcgtctctctggagccggatcccacctatcatctcgctgcgccgtcagctgcggtaatggccgaacggcccgcgcgatcccgccacggtcgctgtggtagttgcgtcaacaggcgaaacccgaggataaatccccgcatcacctcctcgaccgcgagccctgaagccctacactctcaccagacctgtcgtccctctccatcatcgcgaaaaccacgcatcaaagagacaccgtcgtccgccgccgtgggctcgtgcctataccgacgattggaggccagtgtggagtcaggatcgttcatcggcatgtgtggatcgctagcatgaagtattgagctcggaggcccgtccaagcgccctagatttctcgccgttgtcggattccgccgcgcgccacgaatgcccctgctcggcc

SEQ ID NO: 140345 - DNA, 712 bp, Zea Mays
ctccaattcactggtcaccaaaccagccctaatgtttcggtaaaccctccagtgcaattatttgtcagcttccattccatgcaagtaactgatgaaaacatatgtacctcgtctcagcgattagtagatcaacataacagcttaattagcgctagggtgtgaactaacaaaacgagcagtttaagaaagtaattagctgcaaggctcagtcgaccagtctgcagtccacatggatagagggatgattcccttacgttacgtctgtccacactcagtagttgtatgtatggtgaccaacgaactagacgcgagctgtaataatactgacctcatgtcacgaggaagctagcagttctttaatgagtggctgatgccaaaaaacccgctcaatcagtcagaataagcacaaggggcatcgctgaccttccagaaatactaagtcctgactaaaccaaaacaagcaattaataataagtgctcatcgaattagttcagttcaataattttacataccttctgcagaggttgcaactagccaacgtacgtacttctgtagcagaataagatatttgcatgtgctatcacagggagacagttagcatccaccgagtggacctggaattctggacagtgcaagaatattctgctcagtgctcctgaaccgtatggtgcatttctcattttataggacgtgagtgcagtagagacacgc

SEQ ID NO: 140346 - DNA, 278 bp, Zea Mays
gtcgatgctcgcgggcaagcaactaaatccgctgaaatcgcgcggacgtcgtggaattcggctccctaactcacctagaccacagacaccatgggcgcatgtaccttgttccgctgtcggacaacctcgccctgccagttttcccctttccatgcgcgctctcggtgagctcatagcgaccgtgcgagattatcggaatccgagggctcctcaaccaaattgccgaggttctcggccgattgcatcgctccgcccctatataacccagtcgctcctgc

SEQ ID NO: 140347 - DNA, 297 bp, Zea Mays
ggagattagggttccaaacctcaggttgaaattttgggatgttacaaatctaccccacttaaaggaatctcgccctcgagattcagacggggctcgagaaaaggtaagggtattccctcctcaaagagtcctcactttcccaggtagcttcctcttctccttctctgctccactgaactttatagagtctcacttctgagttgcgggtctttcagaatgctgagtcaagaatctttattggcttttcttggtactgaagatctttctgaatctggattgcctcttcttcgatgtgac

SEQ ID NO: 140348 - DNA, 536 bp, Zea Mays
tcgtcacaccatttggagctttctgctatacctacatgtcgttcggtctcaagaacgctatagcggcgtaccagagagccatccaaacatgcttaaccgatcactggggcaagcgggtggaagcttacgttgttgatgtggttatcaagatagaaaactcagaaaacttcatcgaggattttcaactggtcttcgacagcctgaggaactaccggtggaagctgaacctagaaaagtgtgtcttcagagtaccagccggaaagctgctcagattcattgtcaaccatcaaggaattgaagcaaattcagagaagatcgaggccatcatgagaatggaagcgtcgcggtcacagaaaaacgtgcaaagactcactagatgcatggcaactctgagaaggttcatatcaaggctaggcaaaaaaggaatgccattctataaattactcaagaaggtggacaagtttcagtggaccacagaggcacaggaggctctagaggcactgaagaaattcttgaccactccgccagtactcaag

SEQ ID NO: 140349 - DNA, 1082 bp, Zea Mays
gcaaaaacaatgttattctggcccgcactcttttcctcccggggggtgaggtttttaacgaggcggagtcatgtaatatacaagtgaaaaatcccccgcaaaaatctacgtcaaaaaaagactgcgtcgacggtcttcgacattcgaccaatacaaagtcatcgcgaggcccagcgctagctaccctcgcgtgcgacactccgcgcaaaagtcgcctaagggtacagccagactagcacaacaagtgcgaaaaatcgaagtcttcctcaaaaatactatccgtgcaaaagtcgcctaagggtgcaaccggactagcacaacaagtgcgaaaaatcgaagtcttcctcaaaaagactatccgtgcaaaagtcgcctaagggtgcagccggactagcacaacaagtgcgaaaaatcgaagtcttcctcaaaaagactatccgtgcaaaagtcgcctaagggtgcagccggactaagcacaacaagtgcgagaaatcgaagtcttcctcaaaagactacccatgctaaaccctacaccaaacggtccgcgcaaagattgactacaggcgcgccggactgacataataaacacactagaccaagtgtgcgacgcctttatgagcatagccggatgcgcgaaggcgcacaacctcatcatacaagctatagttacatatgtacagcgagggcatcacaccttacatcggttcaaccttcggaatgattcccatctccctatagttaaatagcattatcctcagctcctcaccctcaaaaagacttcgcagctccccctcacctacacttgcaacggccgacgaggacaacaattcctgcttgccagccctgcccacacgaagtcgaccgccgtccgcctcacttattctatgcttcgcaaccgcccttcgccgcctacgcccagcactcggaccaggcacaacttcagcatccgcagcacgcggcgaagcctccgccgctgccacatccagggccacaaaataatccaagtcctcatccgacgactcttccgtccactcaaccgaactcccagagtcaccaaaatcagaaaacttagaagcagactc

SEQ ID NO: 140350 - DNA, 572 bp, Zea Mays
gtcctcaatcatgtcagtaacacgattctatcctttgtgtcttcaagcctattgatatctcaaggtgtcaggcattgcaacttgtcactcgacttctccaatccctcaatcaagacacgagccatgtccttcatcgtggtccgtcatcacgaacctgcatgacctcaccttcgccatcgccactgcctccggactccacatcaacacatcataagccaagagacatgatgcacatatactcatgtcccagttaatccacatgactcaacccaagacgctactatgttgacaaccacttatcataaacctaaaccataagggcacacctcaaccttgtgttcgtaatctctcccttgacgagtgcattgtcaacaccactacacaaacgcagcacaaggatcaacaagaaagaaaagaaggaagaattcattccaatgacaaaaggacaaacaaaagttaaaacacaatcacaaaaaatgaacaaaacttagttcccaaagacatgggcaatgggtcaacacaatcaaggaaaaatggctagcccttaagaagagatagaaaaatggatcaac

SEQ ID NO: 140351 - DNA, 360 bp, Zea Mays
gtccttcttttgcccgctcgactactaacgcggtgctcaccacgtgagtcatgcaggagatgtataacaacagatcttctgccggctgatttggtgtggctcggtgtggtggcttcagtactggtagcgtggtgaagaactttttcaatgcgtcaagagcttcctgtgcttttgtggtccactgaaacttgtccaccttcttgagtaatttgtagaacgataagccctttttgcctagcctcgatatgaacctgttcaaggctgtcatgcatccagtaagcctttgcactttcttctgtgatcgctacgcttccattctcatgatggccttgattttttctgggttggcttcgattcctc

SEQ ID NO: 140352 - DNA, 273 bp, Zea Mays
ctgggggtagcgtctctatggacacagaagatgttccgcacactcatcctaactatccgattgacatcacaggatggacgtatccaaagaggagattctctatggcagaatattgctccaggaggactgtcaatcaatatggtctgccctcaaacaccaatattcaattctttcacactcagctccaatttgatgtcttttggggcacactgatggataccaactttcacaagcatcaagtgatagattggacttttatgctgggacaatcag

SEQ ID NO: 140353 - DNA, 627 bp, Zea Mays
gttatatactcctgaaaagcactagattcaccaaaacaaagtggcaggtctagcctagttattaagcgacaaagctcagttctagcaacagaaggggaatactcccaatgattaacagatccatctgaattatatttaagcaaagactgagatttcccagatctatccttctctttcttagcagggcaaagatccaagtgtctgatcaaatggccagttctagatgaagatttagcagacatgctattcttgcagtgaagacaaatggcagatactcttacctccttaccattttgcatcgcagttacctcctcaaagtgtagccataccttagaggtcagagctctcctcctagaacgtttaccaggcacagggacagagttgctcacgtcggccattgggcttgtggagcccatgtatgttcgggtcgtttgggccccagcgccgtccagatcgatggtagtgggaccaaggaggaggcaccgggcatcctctacctcattatgtgcttcaagtcgctgctcctcgaccatgacattgagattgagctcatcgtcagccgagtccgtggacatggccaccgccttagtcggcttctccggctcctcacggtgcgtggcgcacaca

SEQ ID NO: 140354 - DNA, 546 bp, Zea Mays
attttcttccattgcacaccaccgatattgaccgaatcgtgtgtttgcacgggttaccccggaccattgtctctaaccgaggagcccaattcgttgccagattttgggaacaactgcaagagtctttgggaaccaagctaataaggagttcagcttaccacccacagactgatggtcagaccaaaagggtcaatccaattcttgaagatatgctaagggcttgtgcgatcgattgcggcaagaactgggataagtacctctctttggcagagtttgcttataacaacagttaccaatccagcctaaagatggcaccttttgaagccctatatggaagaaggtgtcgaacacccctcaactggtctcagcctggagaaagagaaatctttggacctgacttagtgactgaagccgaaaggaaagtcaaactaatcaggaagaatctagaagctgctcaggctaggcagaagagttaccatgataagagaagaaaactcctccagtttgaagtggaagatttcgtatatctaaaagtatcacacacca

SEQ ID NO: 140355 - DNA, 427 bp, Zea Mays
ctccagtcaggcacggaagaatcgaatgccacctgggaaccgatgtagcagttcaaatactcttaccctgaggttcagctcgaggacgagctgttcgcggaggaggggagagatgcaggggcggatgaacaatgatatatggtaaatttggtccacaaaaatctaaaaagctaggtcagactctcacaacacctctctgcacgcacctagccgccgctgaccgctcttcatccctccgcactgcacgtccgcgctgcgcccatggctcctcccgcacacgctgcgacacatcggcagtgtagcctgcgccctcggttcctcccgtcctcccccacaccggttgccgccctcagtcccgctccctcactccatcggggatcaggactcagtcaggtgtcgcctcccccactggttgctcgcctactcg

SEQ ID NO: 140356 - DNA, 711 bp, Zea Mays
cattaaggcaccgatccttgctctgggtaggaccttagtaggtcacctcaagaggtatgattagaccaacgcacacccgacacatactacatgcttacaaggtagggaccctgccatgttacaaggttgtgatggaacgtgggcaattggtcctatggcagtagggcccctaggtatagaatgtgcatgtaagctcattgctacattggactataaaagggagtttcataaaaaaactataaaagggagagatagagcaatatttaagggggtttcattcagacttcatctccaacgtaacaccagccaaggaagattaattcgatctagccaaagaagcatccattgtggtagtctatcttgccacaacacactccttacttagaaagccttgtagctcaccagtattggagcttgtaatcgtttcgtcatctatattcaccaatcaaatgattaggcatagggtgtagaatgccatgactttatatgcatactctaaggtaacaggactcactccgtgtcccccttctattttctttggtacttttggtaccctattgtctttgctatgagagagggtaatatagccaagagtgggaaggagagagagcaaaaaggatagtgagtggttcagaatcttggagcgtgccttttggatctgttttctaaacttcatgatagaaaaaaaaatcgtataaaaacccctttgag

SEQ ID NO: 140357 - DNA, 636 bp, Zea Mays
caaagctatctcatccagacgccatgctgttgttaactcatttccaactagtgtcgcttacatgtggggccatgtcgtcagctgcacctcctctgggtccaacagatcgcatctgcctgagttcggcggacgttggatcccttcgtaaccaccgccgcacaacaaacaacgaagatatctggtgaacgctgaaccgccttgcgctgccggtgatcttcccggattgtcgcccatgatccacgcactgctcgaccaacccctcccctgattttctcgctgacagtccggattgtgcggagggcagctaacagcttcgccaccggccgcggaactgtaccccgagagctcgggaaatcaccctgtgattcaaaaaacgaccttctggcgctatataaatgaagtcggggttccgttcttccccttcatatcctcctgaccacgccaccaagcgcaggaaatcgagaaaagcagtgccacggaggggagatccatgtcgctgtcgtggccggcggtatgaaccaccgttcggggtcctgtgaggggtctgggtgacccatcctatcctggcggagattactgtggcatctacgggaggattgggctccgtgatccgactgaattgctcgccggaatagc

SEQ ID NO: 140358 - DNA, 478 bp, Zea Mays
aaatccagagataattaagcctaaagtctggctgtcagactgataaaggactgaaatcaggctaacagtgaactaccaccaacttcaagcccaatttcagacatgattcaatggctttcagtggcaacaccatatggcaacattgtagatggtacattattctacaattttgctacagagcttgacatggactaccattaggaattgagagaaaattgggctccaaacttgactgtcaggctgtctgaaacgagctcgccatggtacagtgcctggggggaaataaaaatcagaatgccagctcagacgctcgtcgccggcgataagaacgccaccgcagcgtgggatggtcgtcggtggccgcggtaatatcctcggcgtcgtggcagaaggtcactgaggtggcaggccccggttaaacggcgacccccgtgccatcaccggaatccgccgcgcggaaagcttgccagcacatctg

SEQ ID NO: 140359 - DNA, 324 bp, Zea Mays
ccccaccgatttgatagttatgggtaaccaggatacagctatagatgtcatcctagggatgaattggttaaccaagtatcaagccagccttagttgtgacaagagaacggtgaagttagtgtccttatcaggggaagaggtgttagtagagttgatcttgtcaggaccaagaaaagggagttgtcaccaagccaccgctcacattgaggagattaaaccatcagaggctattagtgtagtatcagatttccccgatgtgtttcccgaagagttaccaggtatgccacctgaacggaaggttgaatttgccatagaacttattcc

SEQ ID NO: 140360 - DNA, 434 bp, Zea Mays
cacgggtttggtagattatattatggtgttggtgtgtcgtatggtgagatggggagtctagctaggacggatacggagttggatatccatcctcctcaaaaaactttgtgccggaccgtccggttaaatatgcggaccatccggctccatgcacggactgtccggctatgtggccggaccgtccgacattatattcgaactgtcttgcgtcatacgcggacggtcctaatgggttatctagggtttgcatggcatgtggcggcttgggtgcaggcctcagtaattcgcttctaaaaatgggatcggccgccgctggcccggacggtccgcgctcacgtgcggacggtccggacatgcgcagatcggtaaatttatcgtcgatgtgcatgggaggctgttgttgcccaaggtacaatgtctatcggcatcccata

SEQ ID NO: 140361 - DNA, 364 bp, Zea Mays
tattagagttgttggcgaggtgagtgatgaatgagtttggtttatggatagggtcagctttgtggatgagatcgatttatcgagattgagtttgtgggatggtagcagatggaagggattaaactaaaccaaaacaaatctaaagcagcaataagaccttgaactaggacacaaaatcagtatgacggaatctgaaaccaaattgtgcaaaggctaaggcgaaggttgtaggtcaagatattaatgattcttaaggttgtgacgaagtttctatgtcaacaatgatggttttttggcttttttgggttatgggatgaacaaaatgaattgtaaggtaggattatacgtcgcgggcaacctgaat

SEQ ID NO: 140362 - DNA, 508 bp, Zea Mays
ggttgctgaagatgaaaagaagcatgagttgttcttggaggaacacattgggccactccaatactagctgatgtctcattcatttccatctttctagagacttttggacaagaccatagctcttgcacacaagcgtgttcagctaggtgagatgaagaggactataactcagggatagggtgacaacaatagtcgtccttgttacactcagcctcagggtacactatctcgttcaggaggagagcaacagtcataccagtaccctgttcagcaaacaccgcaggccacacctcagacaccacgccctcatcaagatgccctagctagcacccaagcgagacctataggctagaacatgactacagacaactcatgcttcaagtacggtgaagttgggcactatgccaatatttgtcctaagaggaacaccaatactctagctcgaggcagtaatcccagcaagcagaatcagactccagccaacaactgtggattcagtattgctagg

SEQ ID NO: 140363 - DNA, 471 bp, Zea Mays
gatgctctgctcggcggcgcggcgcacggcggcgtcgggtgagagcgactgcccgaaccagcccgcgagggcgtcgagcatctccggcggcacctccatttcgcgccgccgcgggccggcgatctgggtgggggagggagatcggggtgtgtgcggagtagggtagggaggtagggtttttgaaatcctgcttccgctttgcgctgcgacttgcagaggaagtgggagcctgggaggtcggaaccggaagcgaggcagacaggcagagagaaataggggcgacgtgtcggaggaaagggaaaatgagtaaatggtggttatgggccgtagtgttgggccaactattcgtcggcctagactttatggttggcaaagttgtaccagggccgaaggtgatttcaggccgctccggcctatcttttttctcttttattatgaagccaacttgccaagaacaaattcatcaattgc

SEQ ID NO: 140364 - DNA, 719 bp, Zea Mays
aaaatataataaaccatgtatttcatgttgagtttttttaagattgtgcatttaatattggtaatcagactgtatttgaattttaaaccaaagacgaaataaattaataacaaaatagaaataagcaaaaaaaatgaaagggaaaactcacggtcggcccactatcctggaagccagcccacatccctctctcgtgctcttcttttgtttattcttcaatccagttgctgaagagaaagtaataaaaaaatcaccctgtgtcatcctgaggtcagcaatgacatcagctaccctcaatgacgtgtgggccatgggctcaagaaatatctccttgactacgaactcttagccatggcgatctgaaacagaagctccataaccaccaacggatcgcaggctagcgttagttgcgattcttgcgggttgataggatggtcgcccagctccgcccgcgtatatatgtgtgcgtccaccgcgccctgctccattatcatctgctgcctagaatctagcggccaagaactcgagagagagaagccggggccccttcgccgacgacacagagtaccgcgggcggatttagacggaggagaaccccacggcgttgtgcacaagtcggcgggctgctggagatctctccggcccttggggagcgccgacaccacggccagacgtctcctataatcttggtgagtcctttaccaggcggacgcctttac

SEQ ID NO: 140365 - DNA, 392 bp, Zea Mays
cctcgctgctatccacgcctcgcagcaatccagcctgtaggaatcccatcgccgacgacgagtaggaccaccccgcccaatcgttcttcccatgcaccacggatgccccgcccatatcctccacgtcccaaatgcaatccatgcctcactgctatggaaagaatcgcaacccaatcccctcgtcgccatccagcgcacaggaccaccatcggcccgcatcccatcgcaagtgcatgaccacctcaccatctcattcttcccattgtacgcaccagccacgcccggatcttgcgatgctcgagtacttcccattctacgcgccagccccgcccagatcttgtgatgcttgagtataagatggaagacacctctctgagcgctcaaatctgaac

SEQ ID NO: 140366 - DNA, 273 bp, Zea Mays
gtgactcatgaactcgcaatgcttatctctgggtggtggtggtagtagtgggtgttgctgattattgtggagttgagcttgcatgtcggccatggtgttggacatctgttgcggcagttggatttggttggcaaaaaaggctttcgacccagcaggcagatgatttggaggattcatctctggttctggattagctactgtcctccttcggcgaatgcatgccggtagattaacacctcctcccttactggtattgaccatctgggttagaga

SEQ ID NO: 140367 - DNA, 485 bp, Zea Mays
gtggaggatctgaagcattgattttgatgaatgaagccgatgctgctctcaagtctatactttagtgaagaaattggccaactgcagctcagaaggcacgtagtgaagagcaaatgttttctgatgacaacgaggcagagtaaagaaggcatctacaccaatatgtttagtaagttcatgcttcataggatcattggcaacttgtataggtcctgcattatcacaacaaagaggtgttgtgacatcacaagaaatcccaaaatcatccaacaaccatcaaaccatacaatctctgaagtagtagtggcaagttcttgaagttctgcccccgtactagagcgagaaacatttggctgcttcttagacttccatgcaataggagaggagccaagaacaatttgttgggtcactcgcccaagtggagtccgagtaagcatggagccaaagcagactattacaagcatagaataaacaacgagataatg

SEQ ID NO: 140368 - DNA, 429 bp, Zea Mays
ctctcctaaaaaaggaggggttctcctggaacgacgccgcgaccgcggcttttgaagatctcaagtctgcagtcacttcagcgcccgtcctcgccatgccagatttcgccaagtccttcaccgttgagtgcgacgcttcctcttttggttttggcgcggtcctcatctagggaggccacccgatcgccttcttcagcaggccgatcgctcctcgacatcgcgcactcgctgcctacgagcgtgagctcatcgaccttgttcacgccgtgcgacactggaggccgtacttgtggggacgccgttttctggtgaagacagatcactacagcctcaaatacttgctggaccagaggctctcgacgacgcaccagcaccgttgggtggggaagcttctcggcttcgatttcgccgtcgagtacaaatccggag

SEQ ID NO: 140369 - DNA, 508 bp, Zea Mays
cccagtttctgtcgaacgttaacacataggctcttaataaatcttcgaggaccttgttgaccctttctgtctgaccatctgactaggggtgataggtggtgctgaagtctagcttggtgcccatagcttgctgaaggctcatccaaaatttggaggtgaactgggttcccctgtctgacactatcttccttggaatgccatggagtctgactatctctttaagatatatccgggcaagggtggctcctccaaaggtagttttcactggaatgaagtgggctaccttggtaaggcggtctattatcacccagatagagtcgttccctttttgcgtcaggggccgtccggttacaaaatcaatgcctatttcctcccacttccatttgggcactggaacgggttgcaataggcctgcaggcttctggtgctcggctttagttcgttggcaagtgtcacaccgggccacatactgtgctatctctttcttgatccctctccaccagtatct

SEQ ID NO: 140370 - DNA, 529 bp, Zea Mays
ctccatcggataagcacctgagacactgccttgtttccctttttgaccaatctgcagtctaaaatctccaaaggaaccacaccttgtttactcaaatcctcatatctgggcaaggtggagaagacaggcacattgttgggagtgaaagctttgagctgagaaatgtgaaacaccgggtgcacctgcgcgtcggctggcagttccaatctataagccacttccccaattcgttcaagcaccttataaggaccataaaacttgaaagccaacttgggacatgatctgttgaccacagaatgctgagcatacggctgtagtttcagtagaaccatttctccaacttgaaactggcgtttagtcctaatcttgtcagcatacaatttcatgcggttacgagcctcaaccaactttcccttcaacagctcagtaaaccttgctctatcagctaatagagctgatacatcctcatcagtcccaactggaaccatcggtgcagcagcaaatggtggatcatatccataaagaacct

SEQ ID NO: 140371 - DNA, 288 bp, Zea Mays
aggatcataccggcttactcaaatggatggcacgatagtggggaattcatggaacatagggcatcttagaaagttttacccttagcaaggcctcaaaagctatcggagcaacattgtactctgtaattggagaatccgtcatgaataaagttttcattttcaaaggcattcaaaatgttgactatcaactgacttcaatttcattggacttggaatcaatacgcttactcgacttagggtggccactataccctactaacggagcaatcggcttaagtcggcgatgac

SEQ ID NO: 140372 - DNA, 851 bp, Zea Mays
cttttgtcgtaaccgcctaccaattttccctcgcatagctgacgctgccggagtcgcggattctgttgtaaccaccacagatcgtcagcttttactccaaggcgaactccttaggctctaggtttatataaatcaagctgtcgcatgaccctccacctcacccaagtctcatactactcctaattctacggccgtcctgctacccaagagaacagggagatacagagcggggcgaggagagatgggtcaccgccacggtcatctcgtgccacaccattgcttcatccccgacgaacaggtctgggcgttgtgcgagttcccgggagcgtgctcgtggtcttctctgacggaggttacattggagctccaccaattactcaactaaggcgagcagcatcgcgggggataccccgtcgtgggcagacgggtcagcgcatcaaaccacggtgaggtgtctttcatctggttcaccataatctccacttcgaatatatatcatcggatgttgttataagttgaggagggcacaccgtagctcttgattgattaaccggtgtgctgagtggggtgtttgtcggccatggcaccgccgcttggccttggggcgccgtcgtgcgctgttgagtaatggggatgtgggtgaagggcgctggccgtcggatctccagatggatgcgctagattcaattcttcattttaagattttgatcgttgattcttgatcggtcggctgaatacagttctgatcccataaaatcttgtgcgctaatcctggatccaacggaccacgttgcataccggttcagatgacgcttgatttaatctgtgccactcatccaggatcgtgcggc

SEQ ID NO: 140373 - DNA, 536 bp, Zea Mays
ttgtgccgtccctcccccgttagaattcggcggaggacgagatctcctactgaaaaggatcgttgccgcacggctttgtcgtgatagcgtctcagggtctgctggtaccgtgccgattgaattactgcgtttagccgctcttcttcgagtacatcaacatcttccagcctagttgcttcggcctctgctatgctttcaaagatcaacctcggcgccccaaacttgagatcagcaggtagtactgcctctgacccgtagaccatgaaaaaaggagtgtttccatgcagagctcggctaggttgggttcttaggctccaaacgacgtaaggcaattcccttatccactttcctgtgaacttctcatttttgtcgaagaccttttttctgagtgcctccaatatcatcccgttagctcgctcaacctgcccgttggctctcgggtgtgctaccgaagcatacttgatctgaatgcttttttgctcgcagaaatcgaagaactctgaacttgtgaagttggatcccaagtcggttatgat

SEQ ID NO: 140374 - DNA, 418 bp, Zea Mays
gcgataatgccgaaggtgcttacagtcaagctggttgaaacgaaggttgataaggctgaagagctaaaaattgaagaaataacgaagatgccagagattttgagccctctaacagagacaacagtaccgaaggtacaaatgggttctgtcgtaactcctaagaggagaaggatggcaaatgtgttggatgttgtgttagaaacaacaaaaaccttgagtcctgctccttcaaggaaagttgccgaagcttccaaggcgcaaaccgaagctgattctaagcaagcagaaatcgaagctgcaacagttcaggctgaaatcgaagctgggccttcagtgcccaccaagatggagcatgttgaccctaaagaaaaatcaacagagcggattgcaactgaaaaaatcgcagctcctggtcccg

SEQ ID NO: 140375 - DNA, 601 bp, Zea Mays
ctgcgttagatgtggccgcagcggagtcttcgccgcgtgtggagggtgccggggatcttcctagtgcgagtactgagtataggcggcgaagggtggtgttgaaacacagtgtgggtgagttttcgcgaagtggtaggcgccgtcgtatggggatggagcgtggccgtctccgagtagaccgggttagtaaacgagaattgttgtcctcgccgattggggcgagcataggtgagggggatctgcgaaatctttttgagggtgaggaattgaggataatgttgttcaattacagggagatgagtatcatcccgaaggctgagccaatgtaatgtatgatgccctcgccgtgtgtatgtaactgtaatttgtattgtaatgtggcatgttggtcgtatttgcacgcctgtgctgatccggctgcacccgtgggcgacttttgtgcggagtatagattgacgtacttgtgctgttccggcggcacccttagacgacttttgcacggtgtgtctttttaataaaagacttcgattaacgcactttgttgtgctattccggctgcacccttaggcgacttttgcgcgcagtgtctttttgataaaag

SEQ ID NO: 140376 - DNA, 332 bp, Zea Mays
aaccattctaggaaatcctttttgccatttgacgtgcttgggccataggtataaataaggagccatgactgatttattaatttggtgcgaaaacaaattgtttgggcatacacattttagaatatttgttccctagagaatttagagctttgtgagaaggttatcatgccaccagacgaacccatagtgggatgaaaacaaaactcatcaaagcttctaggactgaaattccgaagataagtagcatcaaaactatctcgttttgtttcttgtacgcagactatgtcacacttagattctattattttgcttctcaatgaattccatttttc

SEQ ID NO: 140377 - DNA, 359 bp, Zea Mays
ctagatattatcatttaatattcatgttattatcattaatctacatttatggtctagtctggtgatttatctcttgcgatgtcggccccacctagaattttgttctgcgtccgccactgtgtgaagctgcgcgcatgcagagacatgacctacaggctccgtgacgttggacaccaggatgatggcccccatgagcatgaggtctgatggcgagtaatacagggaggcaaggagggaggcggcgagagtagagacaatatccatgtggagcggtgtgagcacagaactgtcgacggagacaaggagtgcgctggtggtggagctgaagatggagacgacggtgtcgacggatgggagag

SEQ ID NO: 140378 - DNA, 521 bp, Zea Mays
ggggccttggcgagctggtttgccgttcaccggcgggagcgccgccacgggatggccagctccaccatctggagtctcgggtagggaagatggtgctgccaccgtcgatttggtaatgggtgggtgagattagaggagcgtaccgcttcggcaggactcattctgggccgtccatagcgtgatatgtggtcgcagattggatcatggcgccgggcgctactgaccgttgatattggatctgtcggccatgattaggtaccggtttgattaaaaatgcgatctaatctgaaccgtccggatcagatcatgcggttgtgtgatgtccatacctcttcatcgtgtaattattgcaaaagagaccttggggttctacctattcaacccgccgtccacccttatgctgttaatattacggattggtcctgaactttatgagttagaccctaggcttctgcaaaattgtgtccgcagtccataaagtgaataaatggaataaaataattcagaaaatattttctaat

SEQ ID NO: 140379 - DNA, 549 bp, Zea Mays
agctcctaaggatggaatccgcagaaagtggtcaacccgtgctgagcgatcgcctcgatcgtgtcctcagctcggtatctaaaagagtcggagtccaatgagcgccagcctggctgcaggggatgaggctccaaggtcatcctcaccctacagcagggcactcggtgcttctcgaactgctgcaccgcgtactgaggggtgtcgtgtatccagccccctgaagtacctcccacaaaatgcggggaaagccgtctcgtgccagcgcgtcagtgtgggatagtgcatttccgtcctctgaggatccatgggaagtcatctgtgtacggttaagcgtaagtaaaagaaaagaattataaaaagaacaagaaaaaataaaactcaacctttctctagttaaataaaatggtactggggacttatttggttatcatcttgtttttaagtctttactcaatatccatttgtttaatttagaaatgcatgcatgctcgtcctgaacgacctcaccaatataaggggatagggaagaactcccatcccttaaggtgg

SEQ ID NO: 140380 - DNA, 339 bp, Zea Mays
acgtacgcttcaaggagagtagaaactgatttcaggtattcaaggagcagatagcacattagtacaataccgaggaaaccgtcctatcacgatgccccctacgcccgtcgctcctgccataaggtgtgatgctgatgccctcggccaagatagcctcttcctcctctgtctcgctcgtgcgaatccacatcgtcctcaatgaccctgcctctccttccttccccccgctctacagcgtggagctccgtcgggtgtcgaccctgatgcggctctgctgatcgttgtgccgtccctttgtcgtctcccacgtgcaccttcttgaccgcgcaccgccgctgc

SEQ ID NO: 140381 - DNA, 1111 bp, Zea Mays
tatagctttatcatgatagcgcctcaaggtctgctggtatctggctgactgaattactgtgttcaatcgctcttcctccagcacatcaatatcctctagcctagtagcttctgcttcagctatgctttcgaagaccagccttggcgccccgaacttgaggtcggcgggtagcaccgcttccgaaccatagaccatgaagaacggggtatttccatgcagggctcgactaggttgagttctcaagctccaaaccacatagggaaattctctgattcactttcccgcaaacttttcaattttgtcgaacaccttcttcctgagtgcttccagtatcattccattggccctttccaccttatcattggctcttgggtgtgctactgatgcatacttgatctggatactccgttgttcgcagaaatcaaagaattcggagctagtgaagttggacccaggtcagttatgatgctatttggtatcccaaacctgaatattatgtcttgtatgaactccactgccttggctgaagttaaagaagcaataagtttgtatctatccatttggtgaatttgtcgatggtgaccaacacgtgagtatagtcttcctgagctttcttgaagggtccgatcatgtccaatccccagcacgcaaatggccatgttacaggtatggtctgcagctgctgtgctggtaaatgttgttgctttgacaagaattggcaagcttcacatctctggactaactcggttgcgtcactctttgctgttggacaatagaaaccagacctaaaaactttcccaaccagagttctggatgctgcgtgtattccacactgtccggcgtggatctcatctaatagttgttgcccagtgaccgaggaaatgcacttgatgaggactcctgtcgcaccccttctatacagtacgccccctatgagggtgtagtgggctgactgtctcgcgatgcgttctgctgcagccttatcatccagttcttcttcattccttatatacctgatgataggctctctccagacattagggtccgattctagttggctcagggtgttgcactcttccgcctgatctgagggaatacttgggcgtggcac

SEQ ID NO: 140382 - DNA, 4062 bp, Zea Mays
aaccaatgaaacagtgtgtgtaacagaaacaatcaaatatctcgccgactaataatatatgaagtggtttaggatttgatggagttgttttctatcaaagagccttgttcgattataatgacaacgatatgtcgtaaccctatgcacagtatcacatattatactcacccactgacacttgtctcgtccacagcaaaagttttcattgctccttgcatcctatcaaaactggtactcttccaaacgaaatcaacactgaatccaacgtttagctcagtaggcaccccctgaaattcaaggaaattgttaaaataggctgagtggatgctaaaaaggaacatgagaaaaatcatactgccttatacggttatacctgacttgcacgaagctcaagtgccacctcctcttgtgcagtgagcttaatctgaaagaacaaatgtccttagcatagccacaaagataaaactggcccaattaagattatcagcaggtttctaattaccacatgtcccacagattgccatgtgggatgtgagctatcaccaggatatctcaagcgtagctcatctccaggcacaagcctcaactcattgtcttcctaaaatacataattgtttcccgtgttagacaatagagtatcacgaagcaataccgaacatcatcaacaacagataactatacaattatggtattaattcactaatcccatatatttcacttcttgaacagacctttggaaagacaaagtaagctacacgcttcttgttcaacccaatatcccaccggacagttacattatccttgctctgtgactctttcgtcatctacaacaacatataaaacagtaacacaactcagttttgtgatggaaaagataaaaaacatgatctcttaatcagaacacagtaccttgtcataatcagcctcaagttttatcagtggcgcaaaaacattttggtactggcaaaaaaaggggggcaggatatgctagttaggtcttagatgcaaggtaaaaatatgggctttgatatttgagagtaggaagtaaagcaccaacaaaaaagtaaactcaagtaacagaatacagaactttagaaagttttaacctggtaagcatcttcatacttcaaaacaactggctgaggttcatcatctacgccaggcttttcaagatcttcaagagatgcatcaggatttgtcttccaaagctcttccactttgttaatttgctgtgcactaatttgccgagctcttagctgctcctgctctgaaggtacctgaagaaagtaaattgtccaaccatcagaaagttcctagctatgcacaaatgcatgacagaacaacctaagaaatcatcatgagacccttgcctttacaagccatgacaagaaacacctgtcatcaataagagggcaccactggctgagatcccaattcatatccttcagtgcattaacacttaaacacggctctctgcataaaagaacgacaacattctccaattttgctgagataaacccaagaagaaatacattccgacagccacagttgtagcattcaaggattgtttctcccaaagggctatccttgtgaaggcacacttccttatgctttgccctaacctgcaaatgataaacatatggttatgaccatgtatactgaatttgtttcatttaaatgggtaaaggtaggtggattcttacacaataacacaataagcatatgattcagaatgagtgatctagcctacactcaatgcatttatttgtatacaaagcttatgggtgactgtaggtagcaagtatatgcttataatcaactaggccaaacgttcactgttagagcattgacatttgacatcgtagatcaagctagaaattttgacgcattgccaaaccactgaagcttggtttacatatatatgttcttttcggtgagaagaatcatagtctttctagaactagataaacttgataggatatcatcactgttctcccaccagactctctccatccttcatttcacttctaaatggacccatgcctcagcttttgtactaagcatttttcaggatgtacttgtaccagtccttggtttgcttggacaaccaccacaacacaatgccaaaacatcaaaagtgtgtccactgtccaaggacaatggtgtgcttgcatgctgcgagttgcctaaaggatagcaaagctgcttatgaaacaccacagagcctctcaataaggaatcagggttgcaatataataagttgtagaaacagatgtgttgacaattttttttaacaaaagttatatccatgttgctgtcataatgttgtgttctacactcctactcatacggtttgagatggtcttcactgaaaattaaattaaactgatagcaaactatttagacagtataagtgacaccttgcaaatgggacttaacaattaagaccctagataccaaataggaacgaaatgtcttcactgcaaatacagctagcttcctaaccaactatttaaacaatatgtccaaggaccctttgcaaatgggtctgaacaataggaaccactttcacaaaatgtatcaaccattccattagcacaaaaaatcaaaagttaatactgctactgcacaacaaaaccaaatacgcacatctagcaatcgtcgcattcccattgcaatgtctcccacagatacaacagtatactacaaatttgcttattctcaacctaattcaagagataattaacatgacattctcctcagagttattttatctatagttctatacttatttccaccagaaaaccttccaagtctaaagccacatcaatgcagcatggctaacaaattacagcaactagatacaccgacactatggcataccatgaaaaatacaaaaactaactaaccgactcatggcatcaatttaccaattttaagatggtaccgatcacctccttagccacccccgcatataatacgaaagacatgctgctacttgctacaacatctgagcaatagtttacttatagagccataaagtgcaccccaataaagcatgatgtcttcttttaacaactaaaaggcctagaattgattcaaagcagactattgtgaaacagagcccactaagttcgttcctaagcaattatcaacaaatttgtacgacaaaatctcactcgttcagtttctaaaaaacaattatcaacagacttgtatgacagaactctgattaatcagtttttaagcaattctcaacaaattaacatctgagtagtcttaaattctaaatgagctatgccatgaaaaaagataagtaaacaaaccaggtggttgacaatgtgggagccagaggtgttcccccgcgagttacagaaccacttgcggcaggagggcacgttgcacctcgccacgcatgcaggattgtggatcccacagtaccggcaggcgtgttccacgaagtctcccttgccgtagtcgtacccgtcctctccggcgccggctccaacaggatcctcgaagctgagtgcggctaccccggaggcgagcccatctgccgcagccaacgagcgcgccttggaggcagaccgcggcgacggcgaggaggaggaggccggcggggtggggacgtccagagacgtgagatcgggttcagcggaggccgcgtcggagggcggcggcggcggggcaggccacgacgaggacgacgcgccagcgccggggatggaagacgtcagcggcgtcgatcggggcggcggttgagaaagctccggaaagtcggggtagtcgaattcgtcaccctgagtgttgaactcaaggaaggtgtaggcgtcgccggcaacggaggcgtccggctgagaggccgtctcatacatgtctatcgcggcagcggaggaggagtgcgactgcgtcgccatccccgcggttagggttagggttttgtcgctagcggcaaagcagggcttgggaagacagggcgaatcgggaaaaaaaaggggagaggtagcatggtgaaggtgtggggccggggtttggtttgttgaggttgaggattccactgtg

SEQ ID NO: 140383 - DNA, 999 bp, Zea Mays
ccgttgggtctgggttagacttggtagggagatcccatccccaccccctgttgcgagacattgctccagactttagtttgagcgagatatttgcctgttgtcccagagctgaaacccgatgtgaaatttgtttcgcctgtgtccttaatttcaccttcagccgaaggctacgtttgttttggtaggatgctgtttactgttgcgagagatccctgactgtcactcccaagtgccaatttgattgaatttgaggtagggtgtctccggatggggtctatggttatgtgggtgctatagcttgaacccagttagatctggcctgaacttcagcttgaaccatcaaggttgtatgtttttcatcagtagttctagccttcactgttacacaaattgcttttggtggtttccagattataggttttaatatggttgcacgatacctttatgctgactcatctactgtcagctgcatgtgcatcacaagttgatgcaaagaaaaaaaatcaagggtaatcgatcacatgattggttgagaagttgtcattcagtaagacaaaatggactttgataatttgttgccatcttttgcactaagagattgtgacaaacaaatcaagttgcggttgccaaagtttatttgcggttctctgtaattgcttctctattcaagaggacaagataacaaggctgtggctgtgctttgttttggtcagtaatgatatctaagtgctctattgctatagatacagatggtgcttttggtcttggtcattgtcatgtggagtagcgtgcacagatgtgattctctcaagattgcttgtgctcatattgtcgtgggactattggtagcttttgtgttggacgtttctcatcttagggtatatgtaggttccttgtgttaccttactatgtctgttgttttctcccatgtgacggtactgagttttacagctgactttacgctaaactgaaaacatatgtccatagagagaaccttgc

SEQ ID NO: 140384 - DNA, 866 bp, Zea Mays
caagtatgataagaaatatctttgcaactatttgtctattgtatgctcatataggcaatgaatttgcgctcctaaataaatatacctacaatattcaaagaccgaggcaactaaagaaacattaagcaaattactatagaatgaacctactgttattgcaaaacaaatgtgacgagctatacgcgtgaaccagaaacgctacatgatctagatgcatgcggttcagaaacagatgtccaatatgacaggattttagggaaatgtcaaataccaattgggatccaacactggtgcagggtatctgatagctacctcaccggtcaccatctcctcttcctcaacatagtgccactccaagtgtctccagctcctccggtccctacaatatccaaagactgaagcaactaaagcagcattaagaaaatgactctagaaatagaataaacctactacgactctaaaaataaatatgacaggctacacacatgcacatgaaacagttacatgcttgtggtttggaaataggtgtacaatatgaatggattttcttggaaatgcaaaaaaacaactgggatccttatcactctcggcacgacaagcccttgaggctcctcgactaatttcaaatatgaaaaatgaagagttgtagacaccaaatcctaaaatgtaggaaaaataagaggttacagttagcaagttacctttgatctccaggacaagtccttcaattgatgccttttgggagtacgaggttctgaaacacgactgactacaacatgatggatgacagcaacgtctcgctgtttgtactctcctaatacttacctctactttaaaggtgtcattgtttagttaaattaaataca

SEQ ID NO: 140385 - DNA, 597 bp, Zea Mays
gaggatgacactctcactcctccacccatttgcagccgccaccccacctcccccatcaaaccctagccgccccctcctcaagcccttctctccaaggtgccattcctttcccgctcgaatctatgtcgcgttggtgcatgtctccaattggattttggtggagggaagaagaagggaggaaagggggaggattcaaggtgattttgagattgtatcttgtttaattgtgttgtaatccaattgattatatgtttacctatccgaatcggtagaggtgctgtcctgaaattttgtgggtgggcgaacagcagtagttctagggatttctgggaatttttcgtgggtaattagtggggatcagtgggtgaatcatgtagagctttgtcatacctttttaacgggtacttatgcactcgattcggagttataatttaggagatatcgttgtttgaatccggttatgttgctgtccaaaaaaacagattttcaggtgggtgaacagcagtagtattagcagtttctgggcatttttcgtgggtaattagtgttaaccagtatgataataatgtagggctttgtcttatctttccaatgagt

SEQ ID NO: 140386 - DNA, 818 bp, Zea Mays
gcccgcgacggacttctccagcgcagagaagcgttgctcccatttggtgtccagcgatgagatccgcttgtcgaactccgtgtcgatcgctgctatgactatgaggttgggatcgatcggggagggggtggatgacgccatcggggagggatcgacgaggtctttgataccaattgttagctactgggaaaggaaggaagggaaagtggagaacagagaaggataggacagcgaagctggagattacttctcagttcaggtttacaaaatgcataaatatctctccctcagctaacataatacaaatactttacttcagtccgccgacatatcttgggttgggcttcatgggccgcgtgctacagcatggaagttgggcctccgcttcaggatttgtatctgctgatgttgtatggtttgccggagctggacgtgtaacagtcactctcctggattagcagggaatggaatggaatggaacggagcggagcggagcgagggttacctggattttggggcggttccgcttccgccgagagagaaatggaagctgatcagacggagcgctacatgagagagagaataatgtacgcgaaaaagacggaaacaccctccttgatgggcccgcacccgctcgagcctatcctacaggaaggcgcatgacgttgtggattcacattcactagggtgttggcaccaagaaatggaaaggatgattgcgatcttcacttctcgagggagaaagcagcatatatgcccaagtccgtcaaggtccgcaccgatttaatcgagccgagacacggtacggataaatagtg

SEQ ID NO: 140387 - DNA, 282 bp, Zea Mays
tttggacattaatgtagtggcatgaatactacatatttatccttcaacatgaagggttagtctcaacatccagcgagacacgtaacaacaggttgcttcatggttacaattctgcaaacttattgttaatattaccaagtgcacagtcaatcattaagatttagactgatatgcgcaacactattttatccatacgggtccttcaggggctcatgcataccattcgtcgtttggagccagtagttgacttcagatcaacaactaaaatgaccatcagggtct

SEQ ID NO: 140388 - DNA, 745 bp, Zea Mays
gggggatgaggaacccggagagaagattccacaaggagtaaaaagcagatgacactactgctgcaacttgttgtgttggggtcaagcctaccgccaccatcccgtagaacgtgaagtaggtgaaagtaaggaacatgaaaagaagatacagaagcagctttcctgtgacaaaaatgtttagtctatcagaatacagcgaacacacaagaaacaacatcatgtgtagaaagcatgaagtcctttgatgaagaatggttttccttgatgacatgtgacttgcctatgttcctctcgtagttgatcatgaagtacgtgatgaggccaaatatcagtgtctgaactgcaatgtaaggaatctctacaagaccctattggttttaagaaatattagaaactggaatctctagagaaaaaaatagatgtgagcttggctaacctgtgctgcagcatatgggaacgatgagtacattttagcagcacgttcccggtagtagacagtcctctcagttgatactacaggctgcacggatgaggcgttatttacaccaagaaacaggcatgccgcgtaaagagatcccatgacaagcatcaaatcttctgttgtgtctctgcatagttacacaggtattagcctatgaatcgtgtgctctaaactgaatgtgtaaattatccaagtgtacatctcgatgagggagtaaatacttttatcccagtcattaaaaccaagtccgaagtcaaattattt

SEQ ID NO: 140389 - DNA, 867 bp, Zea Mays
aagctttagaaccatggctaaactaagttatgatcatcatgggagggataccctagccttcatgtatcttcacctatgaaaaaggttctaaaaacctaatttcccctcttgggccattaaaccaccaaacattggattaaagggaaaactatgcaaatggccaattcatggattgaaccctttaccaaagttgaagtacattaatatacctacaaaatatagtaagggaggtattacaaaaaggtcctacaaaaaccccaaaattaagccccaagtggagagcaccctagagcaagccattttcctctaagtcaaaaatcagccctagtctaaagatcagaagtgttcacccttttgctagcgccaaaaccactaggtccaaataacaaaaagtagccaaactacccaaggcacacccctaaaaatttgaaaccggaccagggtcgtttcacacagtttggcatctgttttgtcgcggggtgaacagtgcagaaagacaagacatggcgccaccatatcttccaagccaggcctgatcaccccttggaactcacatgaactagatagctctaggtgcagggaagaaatcttacacaagtcatatggcaagattcgcacgtttgggagctctgcaggcgcaagaactcgggcagattaacacgaccacgtgttcgacacgcccctgcaacgccagagcacgccccggtgcttggccccgcgtgagtcgcgtcgcgctgtgtcaaccccgcgcccacggctataaagccaaccccggtctcgaccgtacaccgccgctcactcccaaccccacccgagcacaagttcatcggcgtttgcccagagaacggcgtgctagcggccacgcga

SEQ ID NO: 140390 - DNA, 522 bp, Zea Mays
tgaggggttgtcctcaagcagctgctgcacttccaatgcacgcatcctggccgtccaaatgggacgatctctctgaaatggcggaaagaatctgagaggggtgtcggccacttcatcatagatttgacacagggccctcaatgccttgcgagcgacgacttggcaggtgtctttgaatctgtgcccagcagcagtgacactccattccaaatggtgcagactggatgcaatgtatatagtcacgacacacttctctgtgacatgctcgatgaattcacgaccatcatactctggctgactcctgattctgaggcggactgtgcatgctctcagcaacttggggaaaccatcttcattctagcacaagctggtttggcagcggacctccatctgacttctaagagaaggaaagggggaaatcatttttgaaatgaagggatgagagcaagaattttataagaaaatagttttgactcaaaaacttttggatcaggctaagggttacgtcctgcggccaacctg

SEQ ID NO: 140391 - DNA, 397 bp, Zea Mays
cttggattctctagataatcacaagtcgaccgtgaggctgttcgacattcacaaccgtctcctatgctatggatttgcaatgacgccttaatgacaaatctcattttgtgtgttttacccaagaaggtgcatctgattctgcttggcaactcccatatctaagaaggtgcatctgattctgcttggcaactcccatatctattattcgcccagcaaactcaagttgtctgagaaagcaaaccgcacacatgtaaccttatgtgttcttttgtcaattatagcttgtttgttgacgtctctagttaaactaaagtggtatgtgctatacccactagagaagcaacattatgagatgctcgtctttgcttggaattagtttatgctatcactattatgg

SEQ ID NO: 140392 - DNA, 377 bp, Zea Mays
caaactctatctgtgatgtttcggcacctttgcacatgatcggtatgacactcctccgatcatgaatagtgggatcatatggttcgacaccttctccactaatactattggtttgatgcttctgttgatgttggttagggtatgcttggttgtatggtctgatcccgtctcaggaatagcctagcgtctcagttcacatttatagaacctttttgtactttgtttcttcatgatcaacatgatcgactttgttctacctttatttcttagactttagtttgtttttctagatcttcgatatgtttttaatatctttcttgaggtgatgatcatcctcccgatcggcactttttgctaagtcaaaatccacttgcgag

SEQ ID NO: 140393 - DNA, 614 bp, Zea Mays
tggttcaccagttttacggggggggcgtctgtcacccctagccaactctcttatggtctcattatcaaaaaacttaatgcgtggagtaccatatttgttatcaggagatgcagggtgatgtaggtgatcaagatagtaaatctgaaaaaggaatgcacaaatatataaaattagtacataacaaatatttgcatatcatatatatgcacagtaaacaaaaaaaatttcttactagaacaatgagtgagcatccatatattgttgctgtgatgtttgttttgttccttttatgccaacgtgcggcagcatcacacaaatccgtgtaaactagttgacaccagtcaatattagccattcgggccatgtttaaatcatgagtacctcattgtttgtaatgccccaagaagtagaaggaaaaagaagttgattgaatagaatcagaaaaaagcatctaattgatagctcatcatcattgccaagcactatcttgtcttgaagcttgacaacatcaaattcttctttaccaacattgagatcacgtctcagttttgcagcagcatccacttcaccgtaccaatcagtaaactccctgcctcctccagcacatggcaaac

SEQ ID NO: 140394 - DNA, 379 bp, Zea Mays
aaaggtgataatagacaagggtatcagagaaaagatgaaggcattgaagagccaatggtataagtacaacaaagaatggagttaaaaactcgcaagcgacaaggaagaggatatgaccgagggaaaatatgtaaaatacaactataaaattgagaaggaagagagaaggttttaaaggacatgtataatataagcatcagagtaagatgtagaggcgacaagggtaaagatgacaatcgtgagaagcataaccaaggatagagttaaagcaagactcacgaagtggcgaagtggagaaaataatcaaggttaagataggtatgattccaacagaagggttgaagtaaaaattcattaccaaaggaaattacaaaagaat

SEQ ID NO: 140395 - DNA, 458 bp, Zea Mays
tggagttgtgcaattgtgttgcatatcctagattgaactataagaatgcaccacgtgagcgtgttgcatatcgattggcaggtcataaatttacgttttgttggttgtggatgcatatctgaaatatttgaaattcgtgcagttgtgcacagaaggctcactatcttgtaacgaccaaactggtaacaactttgaccaaatcgatcattggatgtaggatagaatcgtcgaaggatcactcctgtgatgagggttgtgatgagagttggactacggatgataacgagaaagtcctcgaggaatggctccccatccccgtcctcgcgggagaagatttttccatccttattcccgcgagcactcatgagaaggctttttcttccatcccagctcccgtctgggaatttatccttgcggaaaatatacctctattagaaaatactatattttaaggaaat

SEQ ID NO: 140396 - DNA, 605 bp, Zea Mays
agaaaacgagcctcgtaggccaaacttttctattccagcccaacttcaccttcccttcgcgccagcatggcagcacatctccttgtcgcccgacccaaacaccctttaccgcgaagcccagtgcggttggagccagacgccgacggccagggcccactcgccagcaaactcccagctgcacccgcgctctcgaacgtacatgtcgggcccaactcaccagtgcctcaaccagacgcgcttcaccaggtaatgtgcctctgacgggtgggacacaatcgcaagaagctttttcccaacaaactcgcaacagaatgcgatctccgtcagatccttgctagtcggcgcaacaacttttacccaaatccaatcggacctagccgaccgagctcatgtataaaggcccgagcgtccgccccgagtatcccaaccgcaaaaggatcctatggtgccattttctctcgtgcctccaattttaagggataaatagagacgatattgatatagttatgtctcaactctttactctgaaccaaacaactttgttacaaaatattatacagtgatcaaatctcatacatccatttggtcagttattcccaagggac

SEQ ID NO: 140397 - DNA, 1445 bp, Zea Mays
gcttttctctctttagacgttccacgagcattagatgtgtccaggataagtcttttttagcttcagttcatcctcctccaactgaacaattcatgctttagcgtcactcttagctgttagctccatacagtcaaattagctccatacagtcaaaattaagcagtttaaaaagtgcatacgcaccctacttcacaaagttaggaaaccatacatgattcacttcttcagccatagacaatatgtggttcaaatggagtgacataatagatacttatataccttagaggcaccgacatgattaagacaaatgcccaccagaccaacaccggaacctagctgcttatcatgcaaaatgttagagcaataatcagaattaacaaaacctgaggatactcctcaattgcaaacaaaaaaagtaagcaccaccacctaactatttttgcaaagaaaatatgtaggtaattttgcacataaataaagtccaagcccacaagttcttgtttcgggtggagattggaaggacttctcgtttagaccaaattgacgcattaaggcctcagtttcttcgtcttccagcgacttagctcgaaatttggtatcaatgggttggcttccattctgaagctcgagctcaacctcatgtatcattgcagagagattaaaatcctccacaacattatcacaaataggtccttcaattccatcgtcaaagcccaagccaagaatagcattgccagatgctagggcttccttttcaaactgcttccaaagtcgttctcttggcgactcggaatcactatctgagggttgcccaactgggctatgctctattccaagcatatccaggaactcattagcaacagaatctgttgaagcatccatgctgcgtgatctgcccttcctactggcagacttgtaactatcagtcacccctgtgcagctcaatcggcgagaatgcttatcttctacaactggtgattcaaattcctctggctcagcaactgagagctccttcaaaatacatttgtcctccagttccgcatctgctccaaactgaccctctgcttcaagagcagcggtaggcagtgatgaagcagctttgactattccatcctgtttatcttccacattctccatttgaacagcaacgtcactgaagaccacctcagttttcactccaacagtctgatcttcagcgacatccccttcttaacctctaccgatgtgcagtgctttgcctccggaaacccctcttccgtgcagtccggtgctgccacctcctccttcctcgcatcaggacccccgtcagcaatagaagaaggcactggcctggtagacctcaagctgggcagcaccttgtggagaaccctcacgtccctgctccgcgcgggcaaaggcgtcggcgcttgcactgacactgctcgcgccatcgagccgcgccgcag

SEQ ID NO: 140398 - DNA, 1026 bp, Zea Mays
tcaaaaagcgggccatcttcttggcttctgtgctgacgtcgtcaggcgcgtagcgagctaattctgtgaatttgtgcacatactcactgacagatcttccaccttgagttagttcccaaaatttatcctccttgagctgaacgatcccttggggcacatgatgttctcagaaaacagtttcaaaatctacccaggtagcatctcttacgacagcgctgaaggtatcccaccaggttagggccatcccggaaagttgatgagtagccaattgaacacgctgattctcagggcatccgatggcttctaacttcctttttatcgtgtgtagccagtcatcagcatcgaggggattgctagatccagcgaatgtgggaggcttgagccttagaaaatctcccatcctgtcatgtggtcttccaccattcgggcgctgattctccagacttctagtgaggacttcaatgagtcgggtttggttggctagaacttgggctaaatctaatggcagctccagaggtgcggggaggtgggtctcactcccttctccaccggcttctccttcagctcctaggggaaaccctgctccaatcccggaggcggtagtcgtggttttatccgaagccatctatcagggggagagaattactactatgcatatgccaattttttcaaccaagttattttattcatcacacaagttcattacaagcatacagttaccacaagtcgcactacacgcgagcgctttctaaggtacttccgaactccctttctaaagtgtccccaaattccttgagaaggtcgtcaaggctagctaaggacatatcctcgacatcggacaaattctctatcctggagggaggtagtgctggaggggcttccttcttccgctcagtctggcatccttggctcttggtcttctttcggattttcttcgtgggggcgagcttctttagcttcttatcgtaatccatcttcagggttcggtaggcttcacgagtgttggcctcttcaccttctgctatt

SEQ ID NO: 140399 - DNA, 401 bp, Zea Mays
ctagggctgggtcgctaccagcaacaccctcgggggctgggtaactgccagcgccaccctcatggactgggtcttctgcagcagccacttctgaagctgaaggcccttcagccacttccatgggagtcagataactcggatcagtgtctttgcatgggagactaccctccaaggtcgacgatgtgcgagacatcactcgggttacctcttgcccggtagaatcaagtagtgaaagcccaccatctgggacctctgaacagatggctaggatatcagtttcaggaggctccaataatatgtcttcaggaatgacttcctccagtgcttgatcaaaatctgatatcgaaagcccctgaagactgacaagtgccgacagagctggagagggaatatcgctaccc

SEQ ID NO: 140400 - DNA, 480 bp, Zea Mays
gcggaaacaaataacagcgatggagcggttgaactacgatgaagacacgacctaaaccagcaacaagactcgacacggacacaaactcaacaaagcaatctgaaacgaaattgcaaggctaaacaagggttctaggacatcggaatatatttttttgtatggcaattatctggagttataggatgaaaaacctaaattaaactagggtaagcctgacgataatacctgagtctttgaataccacttgataagaacgggggtgcccgttcttctgtcaggtgaagataactatcgatttggttgagatgtcacacagacgatccggcttccaatcaacaccactagaacccctcaatcgcagcaccacttctcctctggttatcaaccatgtactacgcgattgacctcgccacgagggctaattcctgcctgagaatcaaagacacaagcaagaacaagaaagaacacaatctggaatat

SEQ ID NO: 140401 - DNA, 822 bp, Zea Mays
catctctccaacttgcctaaaaactcagaatggtccaatatagcgaggggacaatttgcccttaactttaaatctcctcattccacgaagtggtgacaccttgaggtacacataatctccttcctcaaattccagtggtcttcttctattgtccgcatagctcttttgtctggtctgagctaccctcaaattctcccaaattatacggacttgttcttctgcctcttgaataagttcaggtccaaagaactgtcttcccctaatctgatccaatatagaggagtcctacacttctttccatatagagcctcgaatggtgacatttttagactggcctggtaactattattatatgagaactcagcatagggtaaacttttaacccaacttcctccatgctgaagagcacatgctctcaacatatcttccaatacttggttagtcctttcggtctgtccctgagtctgggggtgataggccgtacaaaaattcaacttcgtgtccatattctcatgaaaacttttccaaattctgaaggtaaattgtgatcctctatccaaaacgatcttctttggtactccgtgtagagacacaatccaagccatatatactctgccaattgagatcccttataagtagtcttgaccggaatgaaatgagcaactttggtcagtccatccacattaacccatatagaatcgtatgctttcgaagtgcgaggcaatccagtaatgaagtccataccaatctcttcccacttccactcgggtatctttagtgggtgcagtagtccagctggcctctggtgttcagccttaactc

SEQ ID NO: 140402 - DNA, 344 bp, Zea Mays
cttcggcattcacacttttaccttggcttcggagagcccatatgtaaatactgagcctaacaatggcattcggtgtcagctgatggagatatatttcaaaccctttcaaaacctcgcctatcatatcgtacagggggaaccgaagccctgccctgaagaagcttttaaacacaacaacctcatcttcctttgactctagaactacttcttccttagctaaacgaatcagttcatcattattttccccaaaatagcccagcttcttcatcacaaccaaatcccctgctgttacggtggatcttccaaactcaatatgactaggcttcgttgggctcagaatgcta

SEQ ID NO: 140403 - DNA, 607 bp, Zea Mays
gtcaaatctggataaatggacaaggtattggaaggtactggcttggctacaaagcttctggaacctgtgggatctgtgattaccgtggagagtatgatgaaaagaagtgccaaaccaactgtggtgactcttctcagagatggtaggcgctttgtatatcaatgcagaaatatctatggaaagctcacatttgaaagcctttatattcatgccatgctcgctcaggtacaatgttcctcgttcatggcttaatctgatgtacgtggagaagcgctgatatagatcggctactacaagcacagaccacgccagaacgaacatccgctgctacagaagacgatgtggaggcgagcagcaagcacggcatgtagacgcaatgcaagcacaacgtacgtcgctacagatcacgtggaagcgagagcgcggactgcagatctatatacaatgttggatatacgatttgcaactgataaaacccattgaatcctgctagtgcgctgacagcagaccgatgccctaaactgatacacaggcattagtgcactaactaatacaggttgataaacttctgagcatcagtgcactataaactgataacacgggcatt

SEQ ID NO: 140404 - DNA, 518 bp, Zea Mays
gctgatcgacccctctttaattttttgctctggtggctgtcggcatcgcccgtcgtggttgctgctgccgcctgccggtagcagttcggcagctggctggtgcaaacattttcgcagtggctgcatgtatgtatgaatatataattaagcgtgcttgtaactttgtcatcgtcgtatgtttcgtccccgcacattatttcggtacaagttctaacagattgtcagccgataaaaaacatatgttagtcggtatattgttttagcgctaaaccgtgtcggtataaatatgctctgccgctataagtttatgccgacgctacttaggccctgtttggttccataggactaatgtttagtccatatcttttagtcctttttagtccctaattctccaaacacaaggactaatagagggactaaaccagtttagtctctagtcccttccagggctcctaaatgggactaaacgcaaaaaattcctctcctgccctcgagcagccgcagcagcccgcgcgcag

SEQ ID NO: 140405 - DNA, 526 bp, Zea Mays
caaacatacagcactagcaaatcactgcgtgcagtccaaaacagcaattactaaatttcagctcctatataattcaagaattgccatgttttagagacttgagttattctaacacttaaccatttgttagagttaaattaatcaaataagcactagcaagtagacttacaaattttatccgtgtcattatgagcacaagaagtaccatatttaattaacaacgcattctccccgataatcgatatcgaagtgatgttgacaccataatttgcattttaacttagacctcaaatgagcactaatacttttcatccgcgaccacaaccatacgtatttagactacaacaagcaaatcatcgtgatcacgagcttaactaaagtcatctaacaagttggttaaccagtataacgtttagcaaagtattttagatttcgcaactcaaaaacataggtgggagcaggttaattagtttttcttaaccattttctcaacttaaactggacaacgcaccagtcacttaaaaca

SEQ ID NO: 140406 - DNA, 431 bp, Zea Mays
cggtccgaatgggttatctagggtttgcatggcatgtggcggcttgggtgcaggtctcggtaatttgcttctaaaaatgggatcggccgccgctggccaggacggtccgcgctcacgtgcggacggtccagacatgcgcagatcggcaaatttatcgccgatgtgcgtgggaggctgtcgttgcccaagatacatgtctatcggcatcccataaagtggttgtgactggtcgtgacaccctatagccgatgaattacgtgtatattccctcaattcaacctcgtgcgaaggaagatttgccatagtagacttatcaagcacacacactagccttttatgatcgttttgtatatcccctacgatacgttgcaactgctctcgctgttcgtctatgtaagctttaagagattggagttgaaagggaaatgtac

SEQ ID NO: 140407 - DNA, 434 bp, Zea Mays
cggcctggtctagggatggccgacgatgggggcccgacacactgaggaggccaccggctgggtaggggcccaaggaaccggcgactttgggtgtgagagggtggggaagagagagagaaactggctctgatactaagatagaatgaaaaaccttaacttagggttgagagttgtattaatagacttagattgttgggtctggcccattacacagggatataactgtgattaaggggctaactccaaaaccctaagcgggtaccctaagactgtctccagtggttcgcgtaaaatagggggacgcggaactgtatatgacactgtttgcatagtaaagtttaaaatagtgaatgccattggggattgaatatgagatttgatggagatagcctaacaccacctgtcttttattttttagtgacacaacgtcatca

SEQ ID NO: 140408 - DNA, 680 bp, Zea Mays
cctcctgcgcgggcactaggcccctagactcctcgcgcacgcgccgatccgacttgacgatggcaagtgggacccatgtgtcagccccgtccgcctcaccccgctgctgtcgggcgggacccgctcgtcagctgggtcttcccccttgcaaccgacctcgcgcacggcatagcgtcaacagaattccccgcatccgcgggagttcgttcgttgaccccccttgagtccgcgtcggccgcgatattagacccggcgccctcccttcggggtgattcacttccgtagttcgcctgcatgcgatagcccaatcttcacggaaccaggggagggaatgagtgccaccgggtggggtcacgactgtcgcatgggcagctcaccggcggcacaactctgggcctggcatgcgacccaggcaggtcgcctggaggagtattacatgttcgaggtcactatcgtgcgttggggtcgtgaatcgacggcaatcgctcgccgtccagggtcgcccgccatggatttctgccccaactcgtggacgggacggtctgcccccgcatcaccggtatgatgcccttccacgtgcccatccttacttcatgatcgcgtatcattcaaccgcgcttcgaatttggccctctgtgtcgcggaattgctcgcctgagttccaactccgcccatccccg

SEQ ID NO: 140409 - DNA, 588 bp, Zea Mays
gtaggacttctcgggcctccccttttggtacacacagacggtgtttgaaccaaaggactccttggtcatctgtcatgaggtccgggagctgttccttgcgggctttctccacaagccctgctgtctctgagtctagatgttgagctttgcagatgaggtcttctagcattggtttgacttcgagactgtcgttgtttcccagacatgcatttagttgtgctgattctttcttccaatcttctagaaagttggttccttttattccgaatggttttcgactaagggcgtcggctgccacgttggccttcccggggtgatagtgaatttctaggtcataatccttgatcagttctaaccatcttcactgacggaggttgagatctggttgagtgaatatatacctcagactcttgtgatcggtgaaaatgtggcatttgtttccgattaggtaatgcctccatatcttcaaggcatgcactatggctgccaattccaaatcatgggtggggtaattctgttcgtgcggcttgagtaggcgtgatgcgtaagcattgaccttctcgttttgcattagcacacaccctaagc

SEQ ID NO: 140410 - DNA, 684 bp, Zea Mays
cggccgtgcacgccgcggcaacttgggtgggtccggcaagcagaccacatgcgccggtcggttcggtccggttcgatccgatccggtgcgctggactggatggactggatccgtttcgtctgagcgagaggaaaggaaaaggggtggacgggtggtagtggtagatcgtagaccgacgggctgccccggctccagtcgttcgttccctggcgtgcccaccttttgtacgggctcggaatgactccacggcccgcggcatgtgtctttgcctggtttcgtcggacccgacctatcgggttggtgacgatgcttcggtttcagatcgactccttttcctctctgaaaaaatctgaatcaggtgcagcagcatatatatcggggaggaaataccgaacgtgagattcctggcgtctttacaaaaacattcacaaagattaacaagactagaagacccgtagttgccatacattttcccaacgcgtcgtccgccacgagtgaagacaaaaaggccacgtcttatagacgtgttcgacgcgcataatatatcgatatgtgtatatgtagaaaaggcagtcaatatcacgtaaatcagatgtcccgtttgcgtcgtgcactgaccgatctccggaacgaaccctatttgttcagttatataacttttgactaaaacttagtccatcatca

SEQ ID NO: 140411 - DNA, 478 bp, Zea Mays
aggggaccctatgggtgtactgctaacgctccctagctgaagctatgtacagatctagatctcggtcgaggctgcctcccgagagttgttgaaaacccttccagatacggtggtatccaacctcgacacatcaagcttgcatcccaggcgggggccaggtaccagggaggagtcaacaacatcacacacagcaggaacaggcggtacacagataagtgctaacactgcttgataaatagtactcaaaagtaccttacaaaaagaaaaattattacatctgccttcaagcagaatcctagttccacctctactctacaggtataaactactagacggcagcagagtcacgctagaaagcccgcagccatagtccttgtggaatcctccagaatggcgtaacagcggtgatgggcgcctcaatgcgtgcgccattgcgaagaggtcctcgcccccatcctcctacgggggcgacaacggg

SEQ ID NO: 140412 - DNA, 446 bp, Zea Mays
acaagaagagcttcggaaaaaaggtcattaatttcaaaaaaacttctagaagttcataatcaaatggctagagtgcgttccactaccagggttgaacgtgagggagatgaggccgaagccactgaaaccgttccaatttccgaagcaatgaggcggtctgggctggcaacatcaggggatacatctgccgccgaagcaaaacaagctgacgttgaagaagatgaatttgaagatgagtacggtgcaacgccatctaaacccagccacttagagttttggaagtcttctattactgaaggtgatatggctaagttactgaagctaggctattttagcaaagacaaaagagagctgatttgcttcgggggagaggaaattaccccgaagccagaaaaagacgaggtggtggtttttaagagcttcttcaaagcagggttaaggtttcc

SEQ ID NO: 140413 - DNA, 328 bp, Zea Mays
gagaactgggaaattccggaggagaccatcactaactctagcgaaggtgatttggtccggctgaagtatacattcaggtttggggataaatttgatgaaccaaatgatgattggctgaagtgtatcaaagctacaagtgatgaactacttggagcatattccaagccataagataatgcactgtccgcagccttcggaggtcggggaaaaaagagactgaacagagtttttgacgcgattggctttgtctaccccgactaccgctacccgctacggggacaagggaaaaagaggaaggctgcgacttcggccaccccagacgagcctg

SEQ ID NO: 140414 - DNA, 327 bp, Zea Mays
gctactgggaccattgtggcgcaacgggttagcaggccgactaagaaatctacaaaggtgtatgagccggattgggtgaatgggctgcagctgtgctcgctttgcgaataagtagaacgagagttgcctggtgaagggcatgtaagaattattcactacaacttcttctccaagttctgctgctcgtccgccgccactcttcttcctccttaccttctgctactcctaatcgtcctctgctactcttaattgatgttctcttctactgctaccttgtatccataccgagttgttaacagtggtatcagattcaacgatccttggccg

SEQ ID NO: 140415 - DNA, 624 bp, Zea Mays
ccaagatgtcatcagggaagactgttgacatcagtgcgacatttaataagtccagcgacgacacctccaaagacggagcagtggtccaacgagtaatccgtgaggtgagtacagggtgtggatatcccacactcaccaagaccaattactcggactgggcgctcctgatgaaggtgaagctgagggcgaggatgctgtgggacgtcatcgagcatagaggagcagacattcatgaagaaatgatggcactcgacgctctctgcagcgtggtgccaccagagatgttgtcttcgatcgctgataagcttacgacaaaggaggcgtggaagaccattgcagacctgcgtgtcggcgatgatcgcatgaagaagactgttgccatgctacttcagaggaagtttgacttggcgacgttcaacgacggttggtccatcgaagatttcacgctgcgcctaaatggcatggcagcggaactctccacccttggagctggcgttgaagagaagatcatggagaagattgctcgcagcgttccgtcgcggttcaagcaaatcgtcctctccatcaccactctgctcgatctgtcaaccttctctatctctaacatggttgggagacgccttt

SEQ ID NO: 140416 - DNA, 400 bp, Zea Mays
cggccgggcccaaagcttttccatgccagggggtgcatcagggagaccctctctcgcctttgttattcatcctagctatggaccctttgcaacgcatacttgaccttgcaaccaaccatggcacactttccacgttgcccaaagagacggctagatggagaaccttgttatacgtagatgatgctgccattctcctaaacccggtcagacaagacatgcaggcggtcgtggagattctctaggcttttgggaatttctctggtctctgcataaacctagaaaaaagctctgttcatccaatacgttgtgaagacatcgagctagaccacgtccttgagcccttcaatgggatcaaagaatctttcccatgtcgctaccttggcctgcagctccatacacg

SEQ ID NO: 140417 - DNA, 464 bp, Zea Mays
acatcaggggctcttttacaaaatgggatcgacgaaggggtatggtcgcggctgagccgttggatcagaaatcatgggcacagattagatcatgaagcggtatgccccacggaccgctggatacatatctaacgatccagatcactctagccaaagtgttagccacaatttaatctgggccgccagcagtcagatcaacggtcgggatctaaacaccaaagaggtatgccccgttctaatctccatcgtttattttgtgatcgacgactacaggcccttcttcttcccttgccaacctgaggcagcgccgccgtaggccttggcggagccatgccggcgatgcgctcatcgtgaccacccggggatcctaccctgcccacgacacgcctacgcgcagagatgacttaggtgaactcaacggcggtctccttaccttcaatcggtatggccagatttgatcatgg

SEQ ID NO: 140418 - DNA, 280 bp, Zea Mays
gccggactatcttggctataaatagcactatgaactacggcgagggatgcacacctccactcagtgagatgatccaagcccaaattcgcagcctctgccccctcctcccaaattgattgcgcacggtgaaactacagtctcttacggccatatagccccaatctccacccccaatttcacccagaatcgccgtgacaccattttctcccttttctctgtcaccagcaagccaaagttcaccgcgccccgtggctagcccactctagtaaggctctgcgcc

SEQ ID NO: 140419 - DNA, 780 bp, Zea Mays
ataacctttactgtttgttcctgttttggtgtttccaatggcaggatccgatgacgagattgaggtagtcattcccacacaattttctgattgtgtcagccgtgaagacttcgatgttatttgcaagcgtatggaggaaaatatggaggaaacggtccacaagtctatccatgacaattattgcaatggatcttggcaaagtgctaaatagggtggagagacggataaccgagcttgtcgatcgggttgccacattggagacacgtccactacatcagcagcctcctccaccaccacaaccccagcagcatccaccacggcatcagcaacctccaccacaggctcaagatgatgccattttcgatgcacgtggcaattttgatgaggcagctaccagagacgcccacctacgacgccatcttcgtcggaatagggtaggtatgggtgacaaccagcgaggtaataacaatcttattcccgatgacccttttgctaagattaagttcaacataccttctttttcgggtcattatgatgctgaggcatatcttgattgggagatgacagtagagcaaaaattttcctcccatcttgtgcctgaacaccatcagattagacaagccactagtgagttcaaagattttgctatcatttggtggactggtttagtaagtgatggtagagaaccaactacttgggatgacctaaaggatgctatgcgtgatagatttgttcccccatcttatcatagagaattgcgtaagaaaatgatgcgtttag

SEQ ID NO: 140420 - DNA, 442 bp, Zea Mays
atcttctagtctggtagcttctgcttcagctatgctttcgaagaccagccttggtgccccaaacctgaggtcggcaggtagcactacctccaaaccatagaccatgaagaagggggtgtttccatgcagagctcgactgggttgagttcttaggctccaaaccacataaggcaactctctgatccactgtcctgcgaacttttcattcttgtcgaagactttcttcctgagtgcttccagtatcatcccattagccctttctacctgaccattagctcttggatgtgctactgatgcatatttgatctggatgctccgttgctcgcagaaatcaaagaattcagagctagtgaagttggatcctaggtcagttatgatgctattcggtatcccaaacctgaatattatgtcttgtatgaattccactgccatggctgaagtt

SEQ ID NO: 140421 - DNA, 274 bp, Zea Mays
caggaagaggtactggcgaaactgctgatgcccttgtcaggcaatgcgcgttaccctctcgagtatgagctgctcatcacaattgcttctatccatccttggcttataaacacaaccaagtgtgctagcacttacttcaccccagcagaagtagctagcgttgacaagtacaagcggaactttgctgctggttgcaaggcaaagtttgtgattgatctgttgcacaagtcctcgttcagaggggagagggttctggtattttgccacaacgtgg

SEQ ID NO: 140422 - DNA, 804 bp, Zea Mays
gaaagtgagaaaacgcatccttgcttcagacgtcatcaaatgttgataattaagctgaggtttaatttgcaaagtggcaaatatagttggatcctttgtcgtggccacttttaacattttgagcaaaactgacaccccaaatggaggatttcgatcgaacactgagaccgagtttcatcatgacagcggcatagtaacgagggatcaaagaaaactaaaaaggctatgcatatatacatggtttaattttctttctttggaaccaaggtggctgtgcatgtgatttaatttgagcgctagcttgttggttcatgcagtggcatggaacgacgacggaggatctcgtgacgaagctaagttcacgcagtggcaggcatggagcacgggaaaaaaaatggaaagccatgcgcatagaatgagattactaccctacctagctagttctctcagttcatctcactgtgtggtacgtaacgagacccttggattgaagaaattcttaatgaggaggcgaggcatcaagtaagcacatacctaatccattggctccagaagtgagttttgcccatatgttcttgcattgtgtgtgaagatatcttgaactttccatatagatcctgctgcagctggcaaaacatacattcttgcttgcgattgtgcatgttcttgcattgtgtgaagaagatatcttgatcctgctccaggcaacagacgattcttgcttgcgaaagacgattgtgcatgttcttgcattgtgtggagaagatatcttactcttcggcaggtactccgatccctccgttt

SEQ ID NO: 140423 - DNA, 516 bp, Zea Mays
ggactataactttttaccggcaataattcacggtcatgattttcaaagcccaaaaaaaaacctaaccggacatacctgacggaaaagctcgggtcgatccgacgctagacacgggtcaaatatgaaccataccaaatatcttactgcctgactttgatgtgacctaacatttaaaccgacatcttcaccgagggaggtccttcgcgccgcacgataggataaatcagtatgtttaactatcctgcagccgtaactacgatccataaaatcaaaatactgtagaagtagtcggagcgaaggaatgttttaatattctcaaacaatatgcatttacgaaggtcggcgattggtttgggtgaaaatgtgccaagccctagacgcgatgacttgctgaacggaagttaccgagtctgagttacgcggaggacaaaataatgggccaccaaataaaatgttagcatacttctataagtatgttgggaaaaaaactatatgtttaactctccaaggctaaat

SEQ ID NO: 140424 - DNA, 429 bp, Zea Mays
gtagggtggtatcagggttgcgtcgcacgtttcttgggcaccgccgggcaagaagaatccgggggcaacccggaattgctcaccggacttgggtttggccggggagtcgcgccagcacgtcgccagtctcccccacacgtcgattcactagtatgattgccctggcgagttcaccttctccttccctttcttgtggattaggtctcgctcgggctgggtcggcgaaacaccggttgaccatgcaccggttatggtgtcgccgcactggtcatcggcaccgccatgtcgggtcatcatggggggttgagtgtgcctcggtcgttgatcctggggtggacgactcggattatcccgggcgtaccggttcggtttgcgtaaagctggggtcgtccgattagacccaagagttagtttttgtggaagttctcc

SEQ ID NO: 140425 - DNA, 367 bp, Zea Mays
cgtcaacaaagtcttgtggtcatggacagataagcaaaaaacataattcgccagtgcaaacgataaagagcaaaaaattgactcacctgaagattggaaaggaatagtggaagacccaacacaggaagggccggtgcatggctcgatgagggaagatcagtaggaacaatctcaagagcacgactcggggtaacttcagccccaccagcaggcggcaggctcctgatgtctggctcgctggcctctaaagcgacttgaccagcaagggccatagaagcgtgagtcaccacagcctcctcgaaccagattaggggcgatccaacgtggacgtccatggaagcagcagagagggagcatgctccaacac

SEQ ID NO: 140426 - DNA, 483 bp, Zea Mays
gagcaccaagcccaaagatcgaaggacctagtgcgatccctgcgccttgagcgctcctgaacatagtgaatagcacagctcctgcccaaagccctagcagccacaacttcaccccaatagtgaactggaatcccctcaaccctaaccttcactctgaattcaaagcaagttttcctggcataacactcttcagaccagtccccaaagtgaaaaacccgaccacgataggagaccgacctcctatccagagcccactgcttggttcttgaatcagcgaagatgataaagaactgttcaggaaaatgcttgacaagttgatactgactgtgatgaagaaaagaatccctcagcatatcccccgctgccagcacgtccacctcatgactgttcccatcaaaggagcaaaccactgccttactgattaactcatccctacgtcgatggatcaaaccagtcgcgatgatggcacagacagctcttgca

SEQ ID NO: 140427 - DNA, 651 bp, Zea Mays
ccaacgatgcagagcatcacggtaagaaactgcaacaaacttagtcaaattccttactttgtctctgtcaggaatctaatgataataaagtcagctctaattggtctctagctttcggcatctaacgaaccttctcaactgcagactcttgatatcagttactgtaagaacctagaatccttgttggcactcgaatatctttgttctattggaagcttatatattgcccattgtcataaatgtattgttctgtgttaagaaaaacttttgtttaggcctcaaaatatattaattgatcactgccctggtctgatcaaatggtgtgatgagcaagagctcttctgtcaggtgaggtcttatgttcttctaaattttttattttaacattagtccattgtcttgtgttctcgcaatagtttttcagtaccatactgcataaaaggtatagtccattgtctgccaagggtttcttaaaatttgaaatgtttaaatattttattcttggtattgtgctacataggttagcaatatttaaagaataattgtttgttgggacaggaatatctttgttctctcggaagcttgtatattgcattggttagcaagttttaaaaggtatagtccattcgtctcttcgatagcaggataagt

SEQ ID NO: 140428 - DNA, 1320 bp, Zea Mays
aggctctaatgttttatccaaatctctgttggtgtaataggttcaatctgaagtttgttgtaatgagataagagtacgactcgtttcttggattatccataaaaacaggagcctaggggtcgacggcttaggccaatgcatttgctgccagccaaaaccctaggccaacacacccacgcgatccgatctagcacccacgcttgtagtgaatggaagagctttgactaatggcgacaccaacaggctcggggttcgatcctcctcctctgcaagacaatggaggcaacaccggcgacaaggatcctcgaccaccatcgcgacagaatatggcaggaggaggtgggactgtgatgcgatgcaagataccgtcgcaatcgtgaacaacaactaatgtatgttcaccaaaaactctcagtagattagatctactcatcgtcgagggtatttactaatacatattgatattttaggggtttaggtgtgatcctagacacccacagtttctatcacaaagaacattttcataatgttttaaatgcagtatgtggaacattttcatgatattttagtggttatttctgatatgcatgggtaacatggttacactgataagaaagataattagttttggaaccttcaaactatagggtactagttatcaacgtactagtggtatagtacaaattaggacacatatcagcgcttgatcatcagtttcttcaatggttttaggggaaccgacataacaaaatggtacatatgtttgcatagtgggggagatggaattacagctgcttgcctagaggagctttgataacaaaatagcattacctactcactatgaactcagaggtttcaatatcttgggctttcttggtgcttgtattagcagacaagagccccaagaaggctggctacgtcgtcatcctcgtggagttcctgctggctcggctccagctcctcttgcactagtagtgaagaagggtagtgtcaaaatattcagagattgttgtatatccatcacctctagtgttagcatagccgtatgccagcatttttggtattatcgtctgttgtcggaaaccaaagagttgatttttcatggataaaagatgaaatatagataccgagctagatgtttttgtcccacctagattttttgattttatcggtacttttgaacttttgtggtcttgccttcccggcggcgacccatacgcagactagccaaagaaacctgagtatgagtacaacggctagtttgtctcttccaatgttgtggcttttcttattttagatttaagtttgtcattgttgtat

SEQ ID NO: 140429 - DNA, 510 bp, Zea Mays
gcatgtgtgctagcttttgatagaagttgggaatccagtctaccctacgcagagttctcatacaacaatagctatcaggccagcatcaagatgttgccattcgaagcactatatggacggaaatgccagacccctcacatgtggtccaacgtgggggaaaaagcactagaaggacctgcctttgtcaaagaggcggaagagaaagttgcactgatccgcagaaggttacttgaagctcagagtcggcagaagagttatgcagacaacaggcggagggaactccgatttgaggaaggagacttcgtctacctcaaggtttctccaatgcgtggtgtcaggaggttccaagtaaaagggaagctagccccgcgtttcgtaggtccctatcccatcattggcagggtaggacccacaacataccatctggaattactggaatccatgtccgacatccacaatgtgtttcacgtatcccagctccgtaaatgcctgcaagcactagaaagtcac

SEQ ID NO: 140430 - DNA, 402 bp, Zea Mays
atctcgtgcgcgaatactgtttacgtcacatcacgcccccgtttgttcaccttgcaccggagagcaagtcccaacaatttccaacaaattttggagcaccctttttgcttagctcttgtgcagacctgttatctataagaagttcgaacttctttgccttggtgcttgttagatctcccaacactctaaacattttgaatacccatgcaccaagctgacttgttaaatcttttgaatacttacagccaagctgacttgttcctgcaacataatctgataaccctcttgacatcacaccaatgttcagctgataaccctttgaatacccaagcagttctgaatctaaaccttttgaatacttacagccaagctgacttgtcctgcaacataatctgataaccc

SEQ ID NO: 140431 - DNA, 540 bp, Zea Mays
aattgaagcacttgataagagcatgagagataaaatggatagacccgatttgctgtttggaggaaaactatggtatttggtggtgactttaagtaggtccttccggttgtacaaaaaggtacaagggctcaaattatatactcaacgttgtgtagatcttccctatgggataatatgcaacatcttagatttgtgcacaacataagggcgtagtcagaccaatggtttttcaaactatcaactatgtattggtaatgggatcgaagagacatacgacgatgacactgtgagactacttgacgagatttgcatcccttgcactggtgaagatgatgatgttgcgagactaattaaagaggtgtttctagtgctagagatgaacatgaataatcaaaactacatcacatttcaagtgatttagtcagcaaaaaatgagaatgttgacaagataaatatgaagttcataaatcgcttctcagggcaagagatggtttactgcattttttatattgcagtcaatgatcataacaacaactatcc

SEQ ID NO: 140432 - DNA, 556 bp, Zea Mays
tccatggcgatgttcaggtgcggctctctcattttcaggtacgtatgccctgtacggctgtgtaccctgcactcctcattcgttgtgctctccatttttattgttcacgccatgccatgttggcggatccagaaacaaatcaaaagaggagctgaatcagtcgacgcatctagacacaggtacccgacgcttctatatgtatcagtagttatttacaaatatgtcgtctcgatgtttcttgctatttcttataaactattaatgagattgtggcattgttttgtttaggatttggagagatgcaactttttaagtggatcaaaatggtcctcaaaagtttgacccaaagggtgccttctttctaacgaccggtggacgttggtcacacgagcacactcaacaataagttccacatcccgcggagaccaaagacaccaacgaactgattgagaacccttctctatgtgattgtagagattcaacggtccttacacctagagttttgcttgagttagagtatgataacaacagtgaagtaagtgcatgtttgtttctc

SEQ ID NO: 140433 - DNA, 770 bp, Zea Mays
atctgtcagcgaatatgtgcacaagttcacggaattagcccactacacgccagatgacgtcagtaccgagagcaagaagatggcccgtttcctgaagggactcaggccagaactcaagacaattctagctagccaagacttcctcagtttctctcacctgtccaacaaggccatgcaagttgaaagggcaaaggaggaggaaaaagggcatctcaaaagaaagttccaagtcctccgggctcagcagcaagaccggcaccagaagactcgatcatttgggttaccacccaaggggccaaacttcagtagaccagctggacccactccgtcacgattcagccagcaaagtcagagctctttccattccccctcagtggcaagcaaccaacccccggcaaatgcgtgttggcactgtggtgatcccagtcacttcaagagcaactgtccgcagctgaagccaccaggacccgcctactccaacttgatgaatggccccaagaatacctcagcatccgcccccaaggcgccctccaccgtcagccagcagatcaaggctccgtaccaaggaaggacacgagtaaatcacgtcgatgcccaggaagctcagcaggctccgggagtagtgctcgctgagttccttgttgaatttactctcgctaccgtacttttcgattctagagcatcccacaccttcatagccactagttttgtggaaaagcatggcattccctctactcctctggagattcccttagtcacccgaaccccag

SEQ ID NO: 140434 - DNA, 962 bp, Zea Mays
ctggccgcaaggcgatcccaagagcacggtctacgtcgcgccgcaccaagtcaggctattcagtccgtctccatcgccgacgactccaccgccgtccctgcctccacccaccgccactgccgccgcgactactaggaagaaggacaggccgaggccaaccacggcagggaagagcctgcgcctcatgcgcagcctctttccggagatggagttccccacccgggcttgacgatttaccactgctgcgccattctgtattggacctggacgtgatgcgttgctttgcttgttcgttcatgggtagtcgctgtttttgtttgattagttcatgaatcgttcaagtcgatcccaagtcaccatgcatgcatgtgttatcggcgaaactaaactgtcagcaatcagcatatggttggtgtcaaaacattccccttttggtaattttatgtattattatatatatatttgtaaacgtatgttcttgaattttgacggctctgtcgcctccttcaacgtaacgttctctgcaatgacggctccgtccgtccgtcgcagcacacgtccttcatgtacaactcgtttctccatacggcccccaccatccggttgttgatctgcttgaagaatggccaggactccatgggcacgcgctcgacgatgccctccacagcgtcgagttccattccacccagcgtgcgtcaggaagcacctggccgacggcgtggtgccgaagcacgtctctgcgatgttcgtgtgacggctgagcttttcagggaggcggttgtgttccagtttccgtggccgtgctatgactttgtatgcgatcgacgtcgatgacttgctttgatggctcagaataaagatgtatgagttggcgagccctgacgacggctgcgtgcttggcattgctatactcgccgttatctgttactattacgagcaattcaccgagttcatgcgagtac

SEQ ID NO: 140435 - DNA, 443 bp, Zea Mays
gactctcagtaggaaatcaacaggcaagtcaacaatgcattgcatcgtcatatcaatcacacgacgccaaaacatctccccttggaatacgatgacctccagcttcgcagcatacatctcctaagtgtataaatagggcagcgtagttcttacaaaggtcaagcaaacacaaaggcgaacactcagtcgtttcccggtatgtcttaggatattggcacttgcctcaatcagtttcagggacctgaggacttcccttctcccgctgacactcaggtgcgagtaatataagcctcatccccctctgctggaagtgaggctttatattgcttgaactaggataaactgcttgtatcagctcgcacaccatctagactctaggcacacgacatcatttactagttggttattagaatctatagtccgaacaccgacacttacaaaca

SEQ ID NO: 140436 - DNA, 631 bp, Zea Mays
cgtcaacattttgaccttctccatgttcatcgtggactgcacgagattaaatgaattgttcatttgagtagcaaaagacaactagagaaccatgaggtagtgactagtgaacgtaattggattggcctaccttcatccactacgacgtgaagatcttcacctggaccaagaagacacgccaggagcagcatgcatcgtgcaaagagggccatgaggtagtgactagtgaaacaggaagcgaatagcgcatcgttcttcatgggtatttatcgctaattttccctccaaatttttcaccggccagcaccacgcgcgcgcaattcctttgcccgccaccgcataatgagccacgaagcgcgcccaaaattccttgcatgcatggtgctaatatatttccatccatgaagtttcctgcatgtgcatgcatgtccataattagctgcccacgattctctctcacgcccacaaatttctcctccacgcttgcagccaggggcaaccagggaataaacaaagttacgctaatttccgtgcaaagcctttagacgccttttcatgggaaggagggagtagtatataagtcttaaacacacgatacataaactagaaatcatatggcatgtcgtccgga

SEQ ID NO: 140437 - DNA, 409 bp, Zea Mays
agggaacagggtccccggacggcgggttgatttctataaactacagggactcttttgaatgtttgctcggccgaaagggtgcgggccacgatccaccgtccgatctacaacggacgcatcagattagattgcctactctgcgaaccggtacgctattcccgcccgcaagattaggaatcgacggcacagattttattcaccccaaagtcatttgatccgcccgatcggatctgaacggatcggatttcttgacctaagcgtaacaccccagggttccatcgtagccgatcagagggcatccaacggtcctaaacacgccatcgtcctcgagctcccgtgttacggccgcgcacccagagccacggcggcgctcgctaccggcgggcatccaccccgcgctcccgcttcc

SEQ ID NO: 140438 - DNA, 644 bp, Zea Mays
gtctattgaagtagtttaacccatctgttgtagcgtaatatgtggatttcaggcaatagtagtctcctggctccgtctttgaagaaataaacctgcatgaccacacacttctggcagtagtgcaacacatgccagatctgcagttgccaacttgactcagaggtggcaggcaatcctgctcgaccttgccctaagcacccttgagtagaaggtgggggagcagacatcgaaaaggcatggtgcggggttgcagtgagggttggtgcacgatagagatgggtgtcgcaggcaatagagaagggcaagtagagagggctcagtcaacgcatgaatgcagagtgaataaatgggagtaggtattctgtttcgtgagttcattccaaatatggtgaatcaatacatgggtggagattgagcagccaatttagtgctctttttggttgcttgatgtgcctgtagtttgtgtggatttgaaacaattccttcactgactgttgaactgatgcaaaaatatgagagccctattgctctttgattttgtggatcttccatggtaaataattttgcaaaggttaaactaaatttatagcttgcaaacttaagtacagctctgatttatgcaagtatgtgtgtctgtgttgttc

SEQ ID NO: 140439 - DNA, 425 bp, Zea Mays
tcagctttagccattcagtgcacggtttgttgaatctcttctagaatttaaacttataaggaagtcgaacaagttcatacttctttccttcctcctttttcttcggcattccccaaccaccagaggttggaaacgtcctgttcgccaagtattcttgcaccaagtccctagtgctaatgtgctcagccacaactctaaactccacctcagcaagttggcatggggaccccagctacatattgcacaaaggtcgagtcatgccgaagttcagtctcaagggactcattaccatgctcatgagcttctcccttttcttttcatcggccttcacgtaaaaccacttgtttgtccatctagtcggccatttggtgcggtagccaatcacaggggccttagtgtccttccggtatgcaaagttgtagcac

SEQ ID NO: 140440 - DNA, 378 bp, Zea Mays
cctaggtattttatcataggccttttccaagtcgataaaaaccatgtgcaagtccttcttctgctccttatatcgccccatgacctgtcttattaagaaaattgcttccatggttgaccttccaggcatgaatccaaattggttcatggtgacatgcgtcattcctctcaggcgatgctcaataactctctcccataacttcatagtgtggctcatgagcttaatccctcgatagttgatacaattttgaatatctcccttgttcttaaagattggcactaatgtactcctcctctactcatcaggcatcttgtttgatctaaaaatatggttgaacaacttggttagccaaatgatagcaatatatttaaggcattt

SEQ ID NO: 140441 - DNA, 506 bp, Zea Mays
tgtgcttgacgccgggttggggtcatcccgggcagcgtcacgcgcctcatcgaccttggagcgtggtcttgatggtcaggaagctgacttggatcgccccgctcccatggaagtgactgagggacctttagccttagaagtggctgctgcagagaactcggtcctcaaggatggtgttggcgctcacccagcccccgagggtgttgccggggatgattcggctcggatgggtagcgcaagctgcaacccagcccccgagggtgttgctggagacgatccggctcaaatgggtagcgcaaactatgacccagcccccgagggtgtccgagcgggttctccctcttgcacttccatggatgttcacatagggtcttctcctccacactctggttgcatggtggtagcccaagcctttggtcaaggagtcgctttagaggccagcgtacctgacgacaaagttttgggttctgctgatgacacagaattggttcctgctgattcattgc

SEQ ID NO: 140442 - DNA, 296 bp, Zea Mays
ccggtggcttgcactaccgataccttgttgctcaatgcccatagtgggggttacaagtgggtgagagagggtagagttaccaagtctctatgcgttgcattgctaaggattctacgtatcgggtgttcgctaccgactaagttgttgagtatcgtggtcttctactcttgttggtcgtccccctcatctgggtcgaccctccccttttatagactaggggcagttacaagtggcttcacatgaaaagagttactgcgtcatggtagaacgaagtgttctacatctggtagaaactt

SEQ ID NO: 140443 - DNA, 303 bp, Zea Mays
tcgagtacttcagttctcgggcatagtgtttagcttcaaaaatttcttcctcagataatctttttcccgaagcatgtcgaatgacataatcaaggtcttcagaaggtgcttcgggagtaagggattcggcttctttggccacacttctctcaaaagctatattagtatttggaggtacttctttggccccttgctcggttgtggcaagcttcgtctcaacaggcactgtgggctcggcctcggttccagcctcaattgttgcagctttaccttttatctgcctagtatcagcttcagtctgcg

SEQ ID NO: 140444 - DNA, 423 bp, Zea Mays
ggaagaagatagcgctctacgctgttggatctagatgtacggccaatattagaggatcacacaccttttcgcgcaatagattagggccgtggatctaaaatctgatgatcacgagtcgatttcggttaagagaactctggtccgtagatctagggatcaatggtggttgtgcgtactggtttataatgttggggttttaatctgatccatcagtattgaatcggacggccagatttgatgcataccccttcacggatgcaatttgctaaagagtccctggccaatgttaaaaccaacccgccgtccattgaatcagtggactgggtctaggaaacactttcacgctagaccatgtgttttccagtaattggcgcgcagtacagaagcataggaaaattcagaaattcaattagaaaataattt

SEQ ID NO: 140445 - DNA, 282 bp, Zea Mays
cgcataataacctccttaacatcctccctcgctactaagtcattcttcacataaaaccattcttccatccaattccctggccacctcttccaaaatgttggcactgggtaacttgcgttgggatgggcgatgaatccgtaacaaccgaagttgttgtgatactgttccttccccgtggccttcgtctcatacatgtgttcatgcatgctgcagaagcactttgcactcggttctagcccctgactccttactgcctagacaaagatccccatccttaatata

SEQ ID NO: 140446 - DNA, 273 bp, Zea Mays
ccgaggtttcctgccacctctttgacctcgggggcctcgtcgcgtgatcttcatcgtgggattgctcctccggcgggttttcccaggcttaacgggtgcaggactggacgcggatgtcggggctgtgatgattgctccttttcaaattcaaagtcaatttcaaattcaactgttgggcggccttggtctcgtaggttgcagtggcggactattctgcgtaatgggcccctcaggcctgggcttggtcttggaaggctggatttgtcgggctca

SEQ ID NO: 140447 - DNA, 578 bp, Zea Mays
gactacgtagtcggccggcaacctaccaaagtcacaagcaagcagcgaggcttagggttagggattgagatggctgactggtggtgagaaactgaggaagagtgagtgagtgacatacctgccaagccggagcccggagccggagacgagggtaaagtgcacgacgacggacgacgcgagagggagagccggagaagaggagattagggttagggttagggattgggatggccgactggagagagagccggagaggcacttatctgccaagccgtagcccggagccggagacgatgacacaggacggcgggagggagagccggagtccggagagcggagattagggatttagggttagggatttgtgattagggttagggatttcaccgatgcagagccggagcctagagagcggcgccgcacggaacggatccggcagagactacggcgacgggcgacggtgaggcggtgagcagcaggcggagcgagcagcgacggagaggtcgagggcgagaggcgactggcgagcgagaccgcgagagggagagagccgagcgagcggacaacagagagaccga

SEQ ID NO: 140448 - DNA, 702 bp, Zea Mays
cgctgcggatggcagagagcaaggagacgtggtgacaggtacgatttcagttgattcgtttgtggcccatgctctttttgactctggcgctagctattcgtttgtttcggaggattttgtgtcgcgggctggtatttcggtgcagaggttgggtcacccaattttggttagttctgctaatggctccattagtagttgttcagtttgtcaggggtgttccatcattcttgctgatgaggtcttttcggccaatctggttgtgatttccttgggggcattcgatgttatcttgggtatggattggttatcccagtatcgcgtagttatatcctgtttttggaagacagtgttattgcaggcgccgtcaggtagggaggtggtattcttcggaagttcccctaagttcacgttatccttgttggcgcaattgcttccggatcgccggtccaggaagtcgggaatctttttctccatggtggtggagggtgaggctgccttgcgggtgcagggcatccgggtggtgtgtgactttgctgacgtgtttccggcagagcttccaagcattccttcagagcgcaatgcagcttttaagattaagctgattccgggtacgcagcccattcataaggcgtatcgaatggccccaaaggagcaggttgaattgaagcggcaattggatgatttgctggctaagggtttcat

SEQ ID NO: 140449 - DNA, 568 bp, Zea Mays
ctcgtactcatccagacaactcggacagagtcacggggcaagctggagccaaagtgggagggtcctttcatcatcaagacgaaggcgtcccccagcgcgtacaggctaacaacgccatccggcgaggacctagagcattcctggaatatcgataatctccgcaaattttttgtttgaatcctcaaggctaacacgcccttgtaattcaccaaacagtatcattttggcccgcactcttttcctcttgggggtgaggtttttaatgaggcggagccatgtaatatacccacaaaaatcccccgcaaaaactaagacacaatatgtcgaaaaagaccgcatcgacggtcttcggcattcgaccataccgaagtcaccgcgaggggcagcgctggccaccctcgcgtgcgacactccgcgcaaaagtcgcctaagggtgcagccggactagcacaataagtgcgcaaaatcgaagtcttttccaaaagactctccgtgcaaaagttgcctaagggtgcagccggactagcacaataagtgcgcaaaatcgaagtcttttccaaaagactct

SEQ ID NO: 140450 - DNA, 680 bp, Zea Mays
aaagttttaaatagccggctaatagcggctatttagccagctatagcctttcaagaggtctggagctaagagatgcaccatttagcgctaaccaaacttagccgctaatagccttatttagcccgctaaacacacaacattagctcgatttagctgctaaacaaaaatcttttttaccgttcgaacctttgaaacattgaggcccaaaaacaaaccgtgggcagacccttttaacttaatgtttgttaggtagtggttaaataccttttacatgtgtcgttgaacgttgaatttgcatgtatgttgatttattattgaacatttgaactactagtttaaattgtaaggtccaaatattgaacatttaatttatttataaagttatgttatgtttttttaaaaaccagctaaatagattagcttgcagctatagccggttatagcctttatagcttatctaaaagctcaccgctaaggcacttagccggacatttaaaacagtggctgtgataagtgaccgatttgacgtgcacagaaaggctagcactagcagctccttgtgtattgtatatggaaggcaacctgaaacgttgcagtagcctgatcggcggcgaccgacgctttcgcacgacggaagaaaaaaaaacagttttttcgcccccacatcacacacatccggc

SEQ ID NO: 140451 - DNA, 281 bp, Zea Mays
atgacatcaaacaaaggcagggataaagattgaggaacaaggagggcggggacgacaaggagagaggcagcagcaaataaaaagaaaaaggcccccaccaccggcttccatggcaagggttagatgacaaacgccatcgcaaaatcctatatggccatattcccgcgcgcgatctcgcgccaagcgctagcctccacgctggttttgtactacctccccgccctctacccagtactaccttttaaaagtggcgcctcagccttcacatccaatcaccaaac

SEQ ID NO: 140452 - DNA, 306 bp, Zea Mays
gtattcttagagatgaacaaacgtttcaaccgaggtataagaggcatgtaacgaagctgcttacgtgcaatcttcgtagtcacggtcaaaccatcgtcattttcaacctcaacgaatctacgctcaccacaaacagtacacttcttctcacccgcggtctccttccagaaaagcatacaattattatcacagacatcgattttttgtagtccataccgagcccagataacaactttttggactgatacatgtcctttggcatcttgtgattctccggaagtatatcactgatcaagttcaaaagct

SEQ ID NO: 140453 - DNA, 594 bp, Zea Mays
cacccttgattcgcacatggactaagtgctcactgcaagctagttcttttccactgcatcacggtgaactgctcacaaccatatatagtttttgagttgggccacccactatctctctagatgatcattgcacttcaagtgccaccaaaccatctaggtgatgctagtcatcaagagtaataaacataaattatcacttgtctctaaaaactgatgagattaatgggtgcacactaatctctcttgtttgcattaattaggctgataaacttgtgaatctgactctcaagtcccccactatgcaatgactccttatctcacaatatatgggttgctttggttattaaatgaaggcaagggtaggtgtgctggccatttgatggggtatttatagcccctaaccagccaactaaccattactgccaagttaggctaaattcaccatcgccataccatccaatgatcattgtcgtaccagaatgtagggtctaatgagacacaatggtaactattgtactgccatgttagaactggtcgtttaaaacgtagccttcgacgtatgatcctatacccattgtcggactagtatgatgc

SEQ ID NO: 140454 - DNA, 296 bp, Zea Mays
gttagtttgttgcgatccatcgtgcggcgtcgtgcgcgcgcgacaagctggcaagcgtggagtttgtgctagcatttccgtccagctatataatcctgtgtactgctcgattgtggttatagaaaacaatacagaggctgcgtttgtgtgcagtcagggagtgtgagcgtcatagccattatttgttctagctactgttcatcttcctttagcgtcctgtgttctcgagtgttttgagcgcctgagattcccaacatacatttctgaatggcacaatctttcagtgacattaaagt

SEQ ID NO: 140455 - DNA, 450 bp, Zea Mays
gtctctggcagtggtacggtgaccgcgccggccggttttccctttcgctgtggccagagcacctcgaaggttgtcacaccttagtactgcttgttcctacttctccttgaatcagtgaagctcaccaaagaagcctttcaaactcaaccgttgtgatttgttcagaacacgacctcaacttcgcgaaacgccactgtgacatacctcgacgccgactgaccactcagctccttctccgagcaaacccatgtgagcatcatgttcaaaatggatcactggtactcgtcatagtctggggctgagcgctaccatgtcctagcctcctaggtcatagccagggctcgccggagtctggtgtgtcgccatcaccatggcctgagaggtggtaggttacctcggttcgattagttgagggttggccgagactttacttgccctagggcataaaag

SEQ ID NO: 140456 - DNA, 438 bp, Zea Mays
gaagatcgatgctttcactcctattcttcggcttaaaatgatgttgatttcacttgggggacagaacaacaggaagcatttgatcttattaaaaactatttgtcttcagttctagtattgaaaacaccgcaaacaggagtaccattcaggttatacattgcagccgaagataaagttatcagagtttttcttacacaggggatcgaaggaaaggagcatgttgtgacctacttaagtgggaggctggtggatactgaaacaaggtataccttcgttgagaaattatgcttatgtttgttttatgcatgcaccaagtgtatgtgttatctattgtctagtccttgcactgtttctgatcaaaaccgatgtgattaaatacatgttgcaaaacccaattatgagtggtagagttggtaaatgggcttatgcacttataga

SEQ ID NO: 140457 - DNA, 369 bp, Zea Mays
gagcactttagctcctcatgttctttggtcatcttttccaggctgttgttggttttgatgagggactcctctagcctgagaagcgtatcgccttgttccttgttccttctcaatagcttaaccaagagtgccttgtcctctttgttgagatggatgtagaaacggcgaatctcctcttcttccacatcaccggtatcattttccctgtcattaatgtcagtggaagccaaacaggaaaatgtaccttgaggtgatgaagactcatcctcgctatcatcctcatattcctcatcatcatggcttttgtctccaccgtcattgttagcaacaaaacacttattattagtggagaccaaacctgtcgacgag

SEQ ID NO: 140458 - DNA, 377 bp, Zea Mays
gtcctagcccgcaaaaaggctgaatgtgagaaaagtgctctagaacaatgcatagcagaaatggaggagaaaatgcaggaccaaaggatggctcatgaaatgagagatgtggaaatcatctcgcatgatggttctaatacacgacaccatccggtaaagtagctgaacatcttagagtcattttgaaatctatggaatatttattacttattaccctcatatttattttaggacacgaggtctggacaacatattgatcaaacacataatattgctcagtttcatgaagatgaagcttatgtggaggatgaaatctctgatgagggtgaaaacttgcttggcagcaatcatgttagtgttactcctgcagtacatcc

SEQ ID NO: 140459 - DNA, 811 bp, Zea Mays
gccgaagttgacatgggaagagatactaaacgaagacttaaaaggatgatgagcatcaacaagagcatccaccagagacacaagggtgattagcaagtacctgggcacgaagaggctcaaagtcatcacgtggacgagtcaagaagtcatttgtgcgacgaaactcaaggttagtcttctgagtgggatagaactcacatgtgctaggagacatatgtggaccaaagtatcaagttgacgcctgacaatagacatccgactgtagaactcatcaactatagaatcaccctaacataaggactactgacgaataccatcaagataagtagagtgactcaagataagtagagtgaccagtacgctcctagcgattttaagaagggtccacatttgatgagaactgtcacactgaataacctctgcagcaaagcggtcctccatactagcagtgagaatagaaccagctcgagcatcctcatccagccatatccaatatgcactatactgagcctcatatgatgccagctgatcaccataatatgcaagcagctgctccttagcctcaggagttaccttatctgatatcacagattgggctggagccttaggacgatgcgggtagagaagttcgccagtaagaaaatcacatagacgaagaccacacatatgccaccgcatgtgagaaacccaaacacgatagttagtgccatcaaagatgagcagacaacgtgtaatggtacacccccgttcggcgcagacgaagagcaacaatcgatgacgagagcgcagaggaataagcggtgcaagcagc

SEQ ID NO: 140460 - DNA, 362 bp, Zea Mays
ttaagcaaagttgcactcctattatagctctacaagtttgatgtgttgaccctaggcaaattccttgtatttttagaaatacagagctccaaagtcagccttatgcaactgaattcagacttagtcacatatggtttataaggtgctttttgcaaatgggtccaaactccactattcaacttgcaaatcttcaaatgtgtgaaacatatgatttatggtgctctaatactttggtttttacacttgggtccaaaagtgcacaaattttacacttagccccctagggttccaatttagggttttccacgggtctttttgtaacaccccacgtgttaccaaggccctgactccctacttgcact

SEQ ID NO: 140461 - DNA, 308 bp, Zea Mays
cgtaagtatgaaatagttaggtcgtgtgaagtctaggttgagatgcaaattgtgtgagttattggatggatatatatgcatagtataattaaaaaaagagttcttctatgggatgatataatgtatagaatgtgcttggatgaatatatgggcaggcatggtatgcttaaatcgattcttgcttgcatgatgtgagatcaggcttagaatgattttaaaagttagcatattgcttttatccttatatttgttctaagtgtctcataatgaagaaccttaagttattagtccttcgatgaacgcttaat

SEQ ID NO: 140462 - DNA, 322 bp, Zea Mays
caaggctatctgcgagatcttctttcgtcatagcgcataagccagcttcgagcttcgggaaccccatactcctagccatctcccgacagacggataattctttgttgtctgggaggcagtataggaaatccccttcgtccgttccattgaatactagtgcccccttcggatatttcaattctttggcataatggttagcttcataaatctcttcttctgataactttttccccaaagcatgtcgcacgatatagtcatatattttggaagatgcttcggggacggcggtatcaatttcttcaacccaagctggctctgacat

SEQ ID NO: 140463 - DNA, 507 bp, Zea Mays
gccaattctccaacatatcttggctaatttttgctacctaattatttgcttgctaaatattagtcactgacaaacaataaacaaggaggatctagataggattatttgttggctaattattagccaccaacaaataattagccaggaggatcaaactgggccttagttgcatgcatgggtcgcttctagttggatgtaggtgtctagtgaatgaaggtaataacagggcggtttgcggcgttcgttgccggaaaacactgttcaatctttttccttgtgtccgcgcgtgagcttagttcttgagaacgagagttcctgggatgtaccaacaggctcatagaagaagcgaacctatatataacattgttggctttcattgatggcactaaaagctagttcaaaaaatgtcaattacaaattaaatttatgaagaatcaaacgggcgaagggtaaacgtgagctaataaactttttttatgcggaagcactcttggcataatttacgaa

SEQ ID NO: 140464 - DNA, 804 bp, Zea Mays
tgtaaaagcgtaggatggagcataagtataacttttgttgaagaaacgacatctaagaccaaagggaaaaactgaccataaacccacccacatctagatgtcactcttctaaaggatgcaaacccaccttaactgctctatacgcacatggcacccaagtatcgaaacaaagtaacaaactgtgtgaaccaaagatgcactatgcatagcccgtccctcacaaatctgggtatctagaacccatcccaacacagacacacgcaccaaagagtaaaaatccaccaaccacacagattctgcaccggatgaccgacgataacacagttcttgcaaagaacaaacaccctaatgcagcaagcaccaacggagccgaccctaatgcagatgcagacgacatgagggggtctagcagagcaaacatgtacttatggagtcacagacaatgtctacggggcggcgggcagcaggagcagaccacacgctcccatgacgacggtgggtgcccaaaccaaagtggcgaacaacgacaaagacgggctggagaagctatcagttccaggacctaataaggcgaacatgaattgaggagagagggaagaaaatattaaaggggaggaaagtactcactgtcatgcagcacagagcgcggtgttgttccagacatgcctgtcactggtgaggcatgggagcgagggagatgactactggtatggcgacgatggctacgcgccgacccgctcttcccttataggctgcacgtggacccgcacggcgtcacggaccacataagcagcgtcatccgac

SEQ ID NO: 140465 - DNA, 394 bp, Zea Mays
gccaaagtgtgttaatagccctgtaggtgttcttaaatcaagcttggtgtgtatatataagcgatcaccaaaacgcgcaaaaggcttgctaggatgatttttgttaccatgccaggcaagcttatgttcttttagaagtactgttatgctgacttttgtattgcaatcttccattaacatcgtgacgagtttaccttaacagcacttcttacagtggaatgcgactgcaactggttgtagtcaatgcagtgacatggtgctgttagcttggcagggatttcttgatattattatcgtcggaagattcgacaacagttccttggtttcaaaattgatcgctactgtcgatggatttgtatggtctttccattaccggggaatagcttgcctatca

SEQ ID NO: 140466 - DNA, 350 bp, Zea Mays
gccacttgaagtctggttgcagaattgggcagtgtggaagcatgactgcatatatgagtatgatgactgctaattgggttgttactcaggatggcaggattccaggttcagtgattcgtgtctggtcgtcttgcatgtttcatctcccttctttttccctccctgctcttgtttttgactagtctccgtcggcaatgcgtcagatccagttcaaatcaggtcactggtcaccctagagttagacctctaaaagcagtgcaaactatttacgattctgcaagtggctgcacactcggcgtctggaagcagttctcgttggctatttgcacaggcgtctggaagcagttctc

SEQ ID NO: 140467 - DNA, 375 bp, Zea Mays
gtgggataattctgctcatgcggcttgagtaagcatgatgcataagcaataactttctcattttgcatcaggacacaccctaagccttgccttgaagcatcacagaagacaacgaaatcctggtgtatatccggtagtgtcaaaacgggcgcggtcgtgagcttttcctttatgatctggaaactttcctcacacttcggggtccacacaaacttattgtctttcttgaggagtttggtcataggtcttgctatgctggagaatcccttgataaagcggcggtaatatcctgccattcccagaaagcttcgaacttcactgacgttggatggctgcttccattttgatattgcttctaccttggatgggtctacc

SEQ ID NO: 140468 - DNA, 291 bp, Zea Mays
aatttttgtccttagggcagaattgttagccacccaaacctgatctcccctcctgataatcccttgttgcaaggaaaacccctcttcattagtactatgtactgccaactgagccagtaatgtttgagcctcagcatctgtgatataagaattcatcacctcttgaagccatacaagttttacttccaccacagattgtaaaaccatgaaatgtcccaccctagacaaggcatcagcagcctgattctctctacccttcttgtactcaattttgaactacagacccatcat

SEQ ID NO: 140469 - DNA, 300 bp, Zea Mays
ccaatttctgtgacaagcacagaagagaagagggctttagcattgctggggacatgaacaggaagattattccagggacgggtagggtcggtcctttgcagccatagccatctcatcctaagtgccaacagagttcagggaggctggaaattcccaaacctccaaagttcaagggtctacacactttcccccaagccaccatacaatgccctcctttaacctctcttctgcctctccataagaaacctttccttatcttgtcaatttccttaatgacccacatagggaaatcaatagcca

SEQ ID NO: 140470 - DNA, 595 bp, Zea Mays
gtgccacggcacgcaagccagcgaagagtgacttccaagcagcaaagaactgaagtcttcaagtcttgatgatcacctgagagtcatctttctgttggacttgctggtggaattgcaaagccaccgatttcagaattgctgccccctgttcccatctgactcgtaggctcttgtttctgaagccctacccaatatacatgcatagaacaaatcaaacataaaatctctgtaggagtctttactcttcccatcaaagcaaatagagtatggaattagttacttctaattgggcttgtgcaactgcagcttgcattgggccagctcatgtagtatgtgatcaaaccatgctttccttccaaacagggattaggttgcaccaatgttcacggtattttcatttcagaacactaagaagtacataaataattcctgaaacttggcctagcatgatgctggtttttgttttaaactgttaattttttaaattctggctttgatggaaatggtgaatatatcaagggttctcaaagttttgtaggtcttctgtggacaaaacgtgcaatcaaataatacaaccaaaagttcaaaactttat

SEQ ID NO: 140471 - DNA, 356 bp, Zea Mays
gtggtgtgtcaccggaccgtctccaacggtcgggcatgggcgggcgccagcgcgccaatggctagctaacgtggtccccgatctggaggtgcaacggactattccagttccacacagctaaggaaattgaccaatcagatatcggaccgagggcacgtggacccggtttggtgccccgtagtaagcagaattttggcagtttttctaaggaaggaggcaacgactcttggccccttggggctataaaaggagtaccatggcaccaccattcaatacacaagcatcccaagggacacacaacactccgacactctgctacaactcatccgtgcgattctagtgaggagatctaagcg

SEQ ID NO: 140472 - DNA, 437 bp, Zea Mays
atcttgttgaagcccacttcatactctgtgacagacttcttctcttgcttgtaggactgcaaatcaatcttcattttctcaaggaaggtgaccgggtagaacctcctctcaaactgcctgatgaaaacatcctaggacaggactcctggtgaagaggagtgagctgcctacacgcctctccaccaaatctaagcctctcccttcagcagctgtgtgccaaagcgaacacgatccccatacacaatctcgaagacattcatcttatcctccatgtaagttagccaatctgccgcttcgaccggagtaccactaccatcaaaagtgtccaacttcatggccatccactgcatcagagaaagaccactgacgggaagaggcacctcagctccgccacctgaagcagcacccgcgggaatagcgcccccgagcactcctcc

SEQ ID NO: 140473 - DNA, 534 bp, Zea Mays
aacccgagacactaactctcagctccgattagccaccatagccgtagaatttgggttttcccccaaattgatcatctgcgccgccatgaatcaccccgtcggggctagccgctctcaggtccgcactcaccctccttattcgtgttttatcaccctcgcatgcttgtgatgcttgttggctcaactaaatgagctagacggcgcttactcgtcgggaacgtcttggtttgacctcggtgatcgtcgtcatcgtgggtaggtgaatccagggccgaattaactcaattaaggcttgttctaggttcgcctcaggtcagtaatgcttgccaattagttaatttgggcagccaacgccggtcatggccagtccaagcaacaaggtggtcgatggcgagcgcgccgtggccatgggtcaggttggagaaggaacagaagtcggaggacctctgtgcatttgtcagagagacaacgaatagtggctaggggttcttcaccagttatttgattaaccaggggccttttcgcaagaccggg

SEQ ID NO: 140474 - DNA, 521 bp, Zea Mays
attacgtcagaagacatcttatatagtgcattaaggacttcactatacttgcgactaatagtttccaaagagtgaccaaacttattccgtatctacctaaatgattgtggacccccacatgcccacaagaaaatacctaaagcttccgttgtactgacacctcggcttggaagcagaccataactttccaccaacgtatcatgcaaacgtcgaaaaacagtacgcccatgcgaaacatgtcaaagcagtcgtcactattctccaatgttcgctcaactcattggatacctgtttcaaccattgttcttctagaaaccccactgggagagctcccccaaatgtctacagcacatagggcaacaagcaattctccagccctctcatcatcagatgtgtgtgtatcaggttcacacatctgcaaacacagaaacaataaccacatttcttgaataagcacaatatattacacacatattcatgtatcataactcaaacaaggttcacagattgacattattcac

SEQ ID NO: 140475 - DNA, 553 bp, Zea Mays
agacattatttgatgcagtcgctgacatttgctaataaacccctgcgcttctatctcttcacactctgaagtccacgacggtggacggcgacgcgcagatttccggcgagcttgcaccggctaggatacttaatgaccatggacctaacgtggccgacactgaattctacctttggcggccatttcccctccatcaattgcataaatccgagttggactctccctgtccacgatgacggcggaaaccgagaacattttgatgtgttcatgacgactcagggtagtctagcacaattggataggtttacgagtaacaggagacttaatggaggctagaacattaagtaatttggtatgtactaacccaaggagtgctggccacggaggggtcccttgcggcggtggaagagaccgattccagggaactccgatgatctctaagggtggtggaccaaacaaggtggctagtgattcgttggcttcgcaactaagggacaaagagctgtgcttggttgatttggatgaagggggtgagagcgtggtgaatttatag

SEQ ID NO: 140476 - DNA, 330 bp, Zea Mays
gtgacatgtgattagtgtttttaagatgagatgtgcgaatgatcggttagtgttgcacttgtctagtcgataaatgttgtcataaataattgtgcaaaaattggtcatgagaatgtcgtgggcacgtggtgttggttggatgtgataagtagattggaagtgtgggtttgttgagcactgtgttgttgaacgtgtatgtcgaagtacattgtagtagtgattgtgttatgttaaatggtaatgtctcgagtgcacgccacaatatggttgtatgcgagacggggttatgcacatgatgagtctagtaaaaatccattggtgtcggtatga

SEQ ID NO: 140477 - DNA, 432 bp, Zea Mays
gcggccggtgggtaaggactttcaactttttgctcttcggcgcaggctcatctggagtggccgaagcagccgtcctggccgaagcaacagtcttcctcttctttccccgtctccgcagcgggtagcagtagtcggggtaaacaaaaccaatggcatcaaaaactctgttcaatctcttttttccccgaccaccaaaggatgtggataatgcattatcttctgctttggaatacgacccaagcagttcatcacttgtagcttcgatacatttcagccagtcatcatttggttcatcaaatttatctccatagctgaaggtgtatttcagtcgaaccagctcaccttcgctagacttggtgacagtctccttcagcatttcccagttctctacaagtggccatactctgaaggctatatgctcctggattaaat

SEQ ID NO: 140478 - DNA, 618 bp, Zea Mays
cggaagtggcggcagctctggataggcttgccgggacgtacgagcgggtggaggcgtcgaagcagagggaggcgatgcgtgatctcgagatcgagcgtgtgcggctcctcgtcgacgtcgaagtcaccgcctccgccggtgtcgatggcgccgccgctgccacaaccgcagccggcgacatctagttggtgagttatggttattgctctggttagacgcgtgcttgcgctagcggcgaaacgattattgcggaattcatgttcgaaatcattggtttcatgttggaattgtgaggcatcgtggctagaaatttccacttcactatgagaacaccaactaacacatgatcattcaatttggctaggcattcttaattttcacagtgaacatcgaattggttgctcagatcgtttgttatgtagtataggatagtgaacaagcaatgtggtctttctgatgaaacactactcgttatgcaagcttgcccctgctgaaatcccctgtcgcgcctcttgccaatagagtgcaagttacatgattcaaaatttcataatcgcatgccattttttcataatctgtttatttgtgtgaatgcatgagaagttaatcacgtctgac

SEQ ID NO: 140479 - DNA, 405 bp, Zea Mays
agcgcttttcaccaatagtttgcattttaatttagacatcacctgagcactactacttttcattcgcaaccataaccatacacatttagaccacaacaagtaattcatcgcgactacaaacttaaccaaagccatctaacaagtcggctagccagagtaacgatctaggccgctatatatcctacacgtcggcttgcatattattatcgcaatccgagacaacacatatactacaacattttataaacacacagattcacaagtatattcgcacatcgaccaatttatatgaatcgtaaaccactaatctccaaatcgcaatcaccatgcatttacttctccaatcatgaacgcatacatgtttatcatatgaaccgagtacttcaataactatcctaaaacaac

SEQ ID NO: 140480 - DNA, 447 bp, Zea Mays
aaatcggttgtcataaggtttccgatatgattgcccctcagagaccatgcttactccgagcttatctcggaacgccccggctatttcttccctcactatatcaatggcagccggtgcgagaccaccggctctctggtcaaacataggtagggttggctggatattagcatgttgtctttcccccattggtttgagctacgtggtgcattgccacttgccctatatggttcatatgtttgatcgttcctttccggccttctaggtggggccggaaagttttcctggactctagacctcgaattaatgggttgatgcattgcatagtgcgatgagaagtgttgctgggacgggtgaggattcaggtaacaatcctcctcaaaaaggtcatgcgcggactgtccggacattggcccggaccgtctgtgattatatgcggactgtccgtcg

SEQ ID NO: 140481 - DNA, 603 bp, Zea Mays
tgtgaattttgttatgacgttagctaagctttagacaacattttttttagattttgtgtttacgtctcgagagctagaatgatataaactcaaatggataaagcttagagataaaatgcaatcttcgctataacctacgtgaactgaaatttcgagtattcgtgaaagctagcgtgcaagcaacaccatcgtttgctctctgccactgtacagtgtcaggtagtagtcaaattaactagtacaaccttatgtaccacttcaataatgcaactccatcatatatatcagtgcaatttgttggcacaatccgaattaatctccatcatcgctccatccacatcaggtcgacggacaattggtccttgtctactggagtagtagtcccgcacatggatagatgttggtgcccccctcaattgcagaatgaagcatgtgatatcctagtccggtggagcgtgatattctggtacaaattttaataaaattaatagagtactaatataaataaggtgtatctttttttcagaaacctgtaatgaaagaacgtcgagattaaatatatttgacatagagcaattttagaataggtgaccaaccgaaaag

SEQ ID NO: 140482 - DNA, 406 bp, Zea Mays
cagaagtcgaggccaccaggctggaggacattgatatactcgaagaagaacggctaaatgcggtaatccaatcagcatggtaccagcagactctaaggcgctatcacgacaaggccgtgcgacagcgatccttctcagtaggagatctcgtcctcggccgaattctaacgggggagggacgacacaagttatcgcctttatgggaaggacccttcatagtagcagaagtcactcggccaggatcatatcgtctcacttagatggacggcacagaggtcgggaactcctggaacatagaacacctcaggaagttttatccctagctgaatttcaaaagctaccgggacgacgatgtactctgtaaaatggaaatatgtcatcaataaaaaagggcttccaagatact

SEQ ID NO: 140483 - DNA, 532 bp, Zea Mays
agggaccgaggctcgaaaagaagcaatggagagctaagccgtcgttggcaccggaatttgagcctgtgttaggcaggatcgaatctctggcgtccggtggtctgacgtcgatgcacgtggtcggcgacttcttgcagcgccggatcgtgccgctgcaggcaagggcacgcttgagctgctggttttctggcacgaacgaccccaaccgagtccaacgcggcccaggcaccgacctatcttgggaggagctagaactcttggtgaaggggatcattggtgagtatttcattgctgagtccttgatccttcccgaagacatttccccgctttgtgacgatccagggttgaggacaacgatcttggattcgctgccgacccttgacgaaagcggcgtagcggttcgccaggatggcggccgggacccccgtcgcgggattcagatccccgacataccgggcggaggctctcggcccgccgatgccgactccagatttcacccggcaactctcagtccctcgggcaagggcaaggg

SEQ ID NO: 140484 - DNA, 1366 bp, Zea Mays
tgtaatttgtgagtggatcgtgattgtatccactgcctccggaagcaaaggctacaccaatgatgttgtcaaaatctgcaaacatgtttttttctaactgaaatttcacttattctcagattaaaattttaaagtggcaagcggtaacaaatcagatttggtttttagattaaatatcatttcggttttatttgcagaattggaagggtctatttattccgtggaaggtcttacggataggaattatggtttattttattcagcatgctaataagaacaaagagcactgtcaaactatatgaaaaagtaacacttgcataaaacagagaagaccaagaagtttgatagcatgttccctaacaactaagcaatctttgttgttattcatatatcacaactacatatttcctgcatgtttccaaaacacatacattgtaccattattaatgttcacaatcctcttatgttccaaatattttgtcctaatttagtagctacaacaacatcctataaatgattcctcctataaaactcagaaagaagaaatatttgaagtatcgatatatttccatatgagctgaagcagtttcagttatgaatgagatgggacttgcaaggatacaattggacgattactttgtagtgaggcataagaggcacattattttgtcatttcaatgaaagctgccaaagagttatacacaattatttttctttgtgatgctaaggttgagttgctaatcctacatggcacatatacttatttcaatttgctgatgcaacattcaaaatctggttgctcagtttgatacaagccacaactttagcattatggagggagaggaatcactgccacacaactcacttgaaattattgcccaaaaattaagtgcagaaaccatatctctactatctcagatcgtcctgtttcaacaatagagaagccatcaccactgattcatggatcatccaacattccaacacaagcaattcatacaccattgaactatgcaatgcaatggtgcacacagcagcaggtgagaggaattaccctgagagaggctacatttggtagcctaagcatcctgctcacccttttgaatccgaagaaattaacgatcttagtctgcgtcatcgaaaaacctaaagatccccacaaagaaaatagaagggaaaagtgagatataataccacaaggctagaggtaagggacaagtgaaggaaaatggtgagatggaggcggcgaggagggcgagagaaagacgcactcttgagtgccttggcgggtgaggcgcagacggggcagaactgggtagatccgcggatggagaccttggcggcgatgggaggaggcagaagatgtgaa

SEQ ID NO: 140485 - DNA, 1132 bp, Zea Mays
gatttagtgaaacccgaggggttcttatgcaaaagtctcaggatgaaggggtatggcgatcacagagccgttggatcacattccgatggccccgattagatgacacattggtgaaccggtacgccgctatccgccattgattcagagatctgtggtgaggatttaattaaagcgagatgtaaccgtgcccgcacgatgtggatccaacggtcaagactctaagccgcaagaggtatgccatgatctattctacaccgtccatttccagatcaccggtcaaagaagcgtctccttcacccctatccgagtcgggcggccctgtgcgcgcaccacggcggcggcggcgccatggccatgaccgagcgaggagctttcccccagtggacaccttcaaatcgaaatgaatctacgcgttgttgagacttcggcgagcaggtctagggcacatttacctgtggttaggacatcgaggtaccccgtccacgggtgaggggcggatccatggcggccacgaacgacggtgagaaattcctcgattatcagccggtttccgtccctagcgccgcgacgagtatgaccctgagctcccgacgaagcccaaggacccatcatcgcgccccaaacggccgtatgtgcttgaatcaatggtggcggcggtgattccctgggctcccttttataccccgagccacgcgagattattggggaaaggatggtcgcgccgagcgcggaatccgcgggtggttgtggatttcaacggaatcccgagcatccctgttgcgtccgttgccgagcacgcacgatttcgttccatccaacagcaccagctgcggtgaacggaggaggaaggagggaggaggctgttacgtgggccccgccatccagtgacgcgcgcacggggcgagatggcgcacgagaggcaaagcgaggctgacggggtggccccgcctgtcggcgccgagtggaggtgcaatgggctgcgcggtatgattccttaagtgggccgaaaagcgcgatccaggcccaacagcaggttttattctttttctttttattttctattttcttttctccattttcaaatccaatttgagttcaagtttaaattcaaactttgtgaaataacttgtcc

SEQ ID NO: 140486 - DNA, 491 bp, Zea Mays
ccttgttttaagttcctttgtctccaggttgaagcgtcgtgaactctcatccaaaatcatttgagcttcgtttagttcctcacttaacttggtattttgggattgtgattctacgagggaactttcggctgtttgcagcaggatgactttttctcctagagaagtttcaagttcctttattttttcctctaaacctttaactatgacttcatgttttctgtcctcactatcctgctgcattttcagcgctttgcatagcagcatgctctgcaaaacaaattaaagttagagcactcaatctatcacgaaggtaacaaaaatctagacgaagatctcaccttaaaattggagtaaaataggctaccgacaatgtgtttccatcggtaaccgctgatgtcggcctccagcttcgggaatcctacactcttagacagagtgtcgattatcttcgccccggcgcggtcgcgaatacatcctaaaatttcttcatc

SEQ ID NO: 140487 - DNA, 557 bp, Zea Mays
agcaggggtagcactagaactcccagcctcatgatcatgtgagcgtggaggcataggaggcggaggcggaatcccaaaatcatcatcatcatcaactgctgcatcctgagcttcgaactgatgaagagcagcatcctcgacctgagtgtcaaaaactggagcagaagctggcacaggagcctcaggcgctggacggtaggacccaaagacaaggcatgaggcctcaagtgtgccctagaactggggaggccgaatcagctgagcaaaaatgtgacataggtagtgagcatacggcagctgtcgacggggacgcagaccatccaaaacggtgtcctcgatctcacaaataaggaaatccacaacgtcaaactcggagtgagagaccagggcaccaaggagccagagctggatatgtgtggtagcctccctgtatcccatccgcggcagaagtgtccgtctcataagctgaaataggaactttgctgctgtagtgaaatctgccggtgagcgtcgcgacccatctgagaagggcggtcggaacagagccgcgacgtgag

SEQ ID NO: 140488 - DNA, 410 bp, Zea Mays
tttgacatgagaagtaggaatatgtatcacactcttcatgatgtacatgtccctcctaattagaggccgactgctaggtctagaagtgctttgcctaaggttgctaggcctcaagtagtaagaccacacggtggttgagctcggcgggggctttgtttccatagttctaggccttgtggtggaggctttgttcccatagctctagcggatcatgacttccctctcatggagctcgctacccccctatgggaccggtgatgtttggcctccttctaacgtttttaggggcaaatgccacagtactagtgatctttatagtttactaaccccgatgatgtgccatttgtccaccctatgtccttcaattgatgcaggacgaagggctggaaaacatatggctcatggatttt

SEQ ID NO: 140489 - DNA, 310 bp, Zea Mays
gaaaacgattttggtgatgtgtgcgtccaggtccaggtccatgtccaacacaacaagaggaatagtataatcgtacggtctattcctctgacaaagactgtgatctccctgacaccattttctggatacgctcaccactgccagcctaccattgcgtggggaccgggaaacggtcgccgtctgaccaactgatctcttctggtgccaagccaacggcgctagccgctaggcacgctggacgcaccgctaagcgatggttacggaaagcactttaagaattatgctactgtagtcatcgtcggcgaaaggt

SEQ ID NO: 140490 - DNA, 615 bp, Zea Mays
ggactagcaagtagacttacaaattttatccaaatcgtttagtacactaaaattactacaaccaattaacaacgcattcttcacgatgatcacccaacaatttgcgttttaaattagacatcacatgagtactactactttttacccgcgaccataatcatgcgtatctagaccaaaacaagcaaatcaccgggattacgagcttaactaaggccatctaacaagttgattaaccagagcaacaacctaggacgctatacaacatactcgccggctagcctattattatcgaaatccgagacacaacatatatttaacaatcacttaacgaaatcgactcctacttaacatgagttggttaatcgcagtattggacttagcgaaccattttagacatcacaactcaaaaacatggattggagcagattaatcagcttttcctaatcattgctcaacttaaagttgttaatacacaggtcacttaaaatggcacatttttgggatctaacatagaggcaattacacatggcgtaaaactccataagactacatttgctactgaaggacctaaagcacttatgtgcatatcttagcggattgttcttcaattttaac

SEQ ID NO: 140491 - DNA, 553 bp, Zea Mays
ctgcgatgcaggatccttcggagctggtgcagtcacggacaccaccatagcagcagtggtaacagcaggcgctggtggcactggtgactgagcgctgatgggtccgacgaccggtgacgagaagtccaaagtgaccggcctgagcggagaagaaggaccaaacgaggaaagtgggggtcctaccggaagagttggtacgacagcaacctgaagagctagaggaggagattgtactggagggagctgaacatcggtgtgctgaaggatatgcgtgatgaacgcccgatgctcggccctgtctgccaagagctgctactgaagagtgtcatgatggtcctagatagtctgaaacatggagagcatacgttcagacatctgctgctagatggctgcctgtcaagcctgttctgctgccagatgagcccactgatgcgtaagtgactgaagaatagcggctagagcagggtcaatagctggtgggatagcaggagcagcactggaactacctgcctcgtgataatgtgagcgaggtggcacaagaggcggtggcggg

SEQ ID NO: 140492 - DNA, 983 bp, Zea Mays
aaaatgtacttaaattaacataagtaatgaacatctatcatctcgcaggaaacaaactaaacatctatgaaagaaaattgtagacccaagtaatctccctaagcattcctaaccttcttgtcgtcgagatagttttgatagagatatgaaaggaaaccccatatcgaaattagcatggctatgatcttgactccgttcatcctgtcatgaaaggccatcacaccaaaaagagggacaataggtagagcaaatgtgctgatcacattcgagaacaacgacgatacctcaaaaaccaagcccaccactccaacagaagcgagctgccaagacacggatgcccacaccagtgtcatcaggtaggagaactgtcctgattggaacctatccatctcctctcttaaatccatccattctccacttgcaaatagtccaacaagagaagcgaaagttgccacaagtgcagtatatatctgcatgttcaaaactgccgagaaggtctgtttcttgatcacatttctcgaatgtaagttgcataagggaaaggatgagtgagtaggtgcctgatgctcctactgtcaacaggaaacccagaaggtactttcctcctgagacaccaccagtaataggtccatgagtttcatggttggctccaaggagtaaagcagccaaggtgagcagcaccacggagttcatgatcaaaccggtgagcttctgagagttcaagacgtatgagaaaaagacgttgaaggccaactgactagcgcagatgagcgaaaaggtcgagactggaagaaacatcagtccgtgggaatacatcatgttgtccgcggttatgataagccccaggacagcatatatcatggcagtttttccgaccggacttccgctggacttcgaagggaaaaagaacaggccgaagaacaatagagggaagccagcagtctgcacgaacgttgatagccacttgctgttgccaccttgac

SEQ ID NO: 140493 - DNA, 695 bp, Zea Mays
ccaatcatacaacgactccgatgtctggtttcctcccaagaaagaacagttcccccatatcaaaattttgttccacacctctctactgaaagggcaatctttgcataaatgggttaccgtctctagtgctgagttacaaagacagcaaactgggttgcactgccaatgtcttttctgaaggttgtcagcagtcagcactttattatgcaaaagagtccatgcaaaaaacggcacttaggttcagtttttgctttccaaatggggtcaattttcattatgcaataatttgctgcaaattggatcttataagcgctgcttgcactgtactcaccatcttctgtccatctccaagaaatggagtcttctagatcgttgagctcgtgtgtactattgatggcctgccaaaggccgagcaattcctttaattcttctgcaccatcgtagggagagcataactggatccaacggttgtttctcagggcctagaaagtcgaaatgttcttcctttttgctttgttgaaaagacttggtgcaatgttttttggtgcttgaccatggatccaactagatttccagaatacagcagttttcccattacccaccttcacacaagtggaagcgttgaaaagatcttcatctgattcatcacatggcagctgcaaattcacccatgctttgtctttggccttccatcg

SEQ ID NO: 140494 - DNA, 776 bp, Zea Mays
cgccgctgcccagcacgccagccgactcgtggaagtggcgcaagagcgtcggtagcctcgccgcgagcccagctcctgcttacagacacaaaatcactactgctgctcctgctagcagtaaataaccgcgcgcccgttaactaacaaagaagaagcccgaaccgtccgtgtcgtcagcagcagcgacgctgctgggacgtggcgacgacctttacaagactgcagctagtagcctgcgtgcttgatgcttgttcgtcgtctagaatgcgagagttttccccacaaaattcctatgaacatagattttgcatgcttgttcgaggcggccttcatcttctggaagggggttttcaggtgtacgtgttctgaataatgaagtctagtgtacttttcagttcttgtgagttggacgctctagttcttttggtgcctctactcagagtcagagagccctcactcgatctccatcggtagtttcaatgggtgacatttctagttccagttcacaattttactccacgttttttcttcctagaaaagttcagaaagttctttgttccatttggatggggatcgatcaagacatctctgagccgctcgacatgtaaaagcagatggaacaaaagtgcagatgaggagcgcacggttgggtagctttactcgacgacttgccaactgaaatgacaaaaaaaaaggaaaagggcactctaagcggtggcagctttgcctgagtgcctgaggggccaagcactcacactgttgactgcagtctgctg

SEQ ID NO: 140495 - DNA, 353 bp, Zea Mays
gatgaaggcttggattattttgctgcgttagatgtggccgtagcggagtcttcaccacgtgcgaaggttggcgaggctgctgatcctcctggcgcgagtgctgagcacaggcggcgaagggtggtgtcaaagcatagtgtgggtgagttttagcgaagtggtaggcgccgtcatatggggatggagcgtggccatcttcgagtagaccggattggtaaacgagaactgttgtcctcgtcgactggggcaagcataagtgagggggatctgcgaaatcttttttagggtgaggaattgaggataatgttgttcaattatagggagatgggtatcatcccgaaggttgagccgat

SEQ ID NO: 140496 - DNA, 405 bp, Zea Mays
tggatttcctttgaaaaggtatagggaaaagacaaactgtaaatggttaaattgctctagagaggggagatgtgcagaaagaaaagatggtaaccctagagtccggaacaaatacacaggtcaaacacaatgcaaatcagggataaaggcttagaaaaatttatgatggtgcaaaaaaagtgtcatatctgtcatgattaaactagttaaccttgagcataatcatgattttgtaacccaagaaactgagaaacaacacctccgctgtaacaagacacgtgacccggaatttatggactttgttggagcaatgcatgacaatagggtaccacaacactgtattgtggatatgatttcagacatgcatgatggcccagaaaatgttcctattaggacacaagattt

SEQ ID NO: 140497 - DNA, 752 bp, Zea Mays
ggaggataagatggaaacaaagacttaacccattcttttacaaaagaagactcacgtggaggatcttctgcaggcgattgggtaaaggaagaaggatcctgagaaggaggaggaggaggtgaagaagaggggaaaatcacctggtacaacactaggggcaggagcagactacaaagaaccatcatcgacaaactcttcttcatcctctaaagtgataaaaggcactccacactcttgctggtgccattcattcaagttctctgaatatgcaggcaagaacgcattgtgctccgaggaggcatgttaaatcccatatgagctgcaaattgtctcatgttgtcatcatgcctgcgagcttcatgactctgctcagaagtgtttgcggcaaatggctaacataccagcaataccttgagccaggagcataaagggattgtgcctccttccacgaccatatcctcgactgtcgtggtccatcggacgagaggcgccagctgcacgggaggaggtctcatgaagaggtggcttatcagaggatggtggaccaccaaacccagaaggagatcgctttgattggtctgctggattattaggttcaatccagtaggggggtatagcgtgtatgcttgacatccttctcacatctgacttgagtgacaacttcgatcatcttcattatgtagggtgcatggagagaagccttcaatggagacaaggatgcatgcacaatttcttcccaaatcatatcaaag

SEQ ID NO: 140498 - DNA, 498 bp, Zea Mays
cgagtacacacaaaattcatgagtccttggtcacggacagttcggcttctaaagccggatggtctggtctttcacaaaatagttcggactttaagaccgaacgtctaccacatcataaagacagtattacggatgatccaacccccgagatcggagagtccgccatcacaccaagatcatctggttcctttgtgggggacatgatagaggaatttagagatctcgacaaactaggacatgggtttacatcgaccgatcctttggaagagatcgacataggagatggtaaaactccagggccgacttttgtaaacaagaccctggagaccgattctagaagtgaaatgatcggtctattgaaggaatattcagattgctttgcttagaattacactgagatgccaggattaagccgagagatcatagagcatcggctgcccattaagtccggtttcagacctttcaagcagagagctagaacatttcgtcccgatcttc

SEQ ID NO: 140499 - DNA, 420 bp, Zea Mays
gcgagcgccgatgatggcgctaccgtgcggtgctttaacgctgtcggtcgggatggcagaggtagcagacaagtttcccgccatcgatcatgatatttgcggcccagattagataaggggtaatgtttcgtccgaaaacctcgtagccattgattggtggatggacgctcaggaatcgatacggtttagtggaatctgggtcatggattgtggatctaaggaccggggtcgtgtacctattcgggtggcttggatctaatccaagtcgtccatcgtcaatcgtgcggtaccgggctcaccgtaccccttcgccgtgcacttttacataagaaaccctaggaaataatgaaatcaacccgccgtccaccatagttaactctgagtctcggggttttcacatggaagtccctggcatttatt

SEQ ID NO: 140500 - DNA, 692 bp, Zea Mays
gtccgatcgaaaatctatgtcctagattagatccatatcattataaaccggtatccgatctgagccgtagctatccggatcaacggtcacgattttaaataaccctgatctaatccgacgcacacgatacgggatcgacggcacagatcaacgcggcgaaggggtaagtcacgttctaatcttagccgctaaaatcgggatccacggccacggtaccaccaccttccttcctcaacgcgcaggcacagccgcgacccacacagacggcggcgccatggccggagttgccgtccacggtataagcaccctaaactccaatgctaatcggttcgacgcgttacgggaaggaaagtaaacataaaggcgcggttcataccggaaatcgcagggcagagatatccccacacgacgaagcgcgaatccacgacggcggcgcgcgacgcagagagttttcccggtgaccgggccggtgaatccaccccgaaacgccacgaattcacacggtgaagcaagaacgacttatcaccgttctcctggatggacgaacgtggagggagtggtgaaacctacgcggcgcgacggcgatgcccctaatggagttcttcttcccggtggtgggcacgcagaggatcaattagggcgcggcgcagttgggattggcgatgggttgctacgggacaccggcgcgagcg

SEQ ID NO: 140501 - DNA, 386 bp, Zea Mays
gcccaaggttctccactggctgacaggcgagggcccgtgtcatccactcttcctcccgcagttcactcctctccctcgcgcgcttgctctccgtcgcaccactatcgtgtgggccgctcggccggctccaattgaacgcgcgcgtcgggtactggcgggtggggccgcagggtcagtccctcacctggtgtctgtgcgcggtagtgcagtcaccctcgtgtgggccatccctgtcagttctatctcctaccacaacaagaccaccgaatcccccggaacaaactcagcgaatcccgcacgaatcctcccaatcccgcccctcttcggactcatggccgtggggatataaaatttgggctctcgcgcccctcgtgaccatatctgcg

SEQ ID NO: 140502 - DNA, 792 bp, Zea Mays
tatcaatcatatcacttagcctagcaatctaaactagaaaaataaacacacaaactagttaaataataaataaagcgtggaagcatgattaagatagagacgcaaaccgacatcaaacatcaacgactccgattttttttaatgaggtatcaagaagcgcggaagctttccctagtcgtcattgaagtgcctcgcaaggatgcttgcgtaaagacaaagctctcgatcggataactctgtgaataagacctagacattcgccacacataagtgagtcttcagaatggcctctctcggactactccccaccgttttcactatcaagttttttatcgtaacacggtgatcctcgttccttactatatgatggtggccacaccataaacacgattgatatgatctcacaagactacaagcttctttgaatacaaatattgggggggtgcaagcactcaagacttcgaggtatgcaaatatcactaaacactaggcttacctatatgtgtgttcatatccctaccgcaaccgcaaaggagtggttacacaacctatgtatcaatcatatcacttagcctagcgatctaaactagaaaaataaacacacaaactagttaaataataagtaaagcgtggaagcatgattaagatagagacgcaagacaagatcaacgactccaatatttttttaatgaggtatcaagaagcgcggaagctttccctagtcgtcattgaagtgcctcgcaaggatgcttgtgtaaagactaagctctcgatcggataactctgtgaata

SEQ ID NO: 140503 - DNA, 488 bp, Zea Mays
ccaattcctccagcaggcgcgctctcgcgttttagcggtcaccgacgcgtggggccgcgttggcagacccgtcttcttcaccggtccggtctttgcgacagcaaaatcgcgcgcgccgaagctggagaacgcaaatcgcgggggtagctcgggtcgtgcaatcgcttggaccctcccctccgcgtataagtaccagcgcacctctttaacttctcatccctgttgaactagcggctatatcccaagccctcaccaccgacgcagataatggtctagtgccgtcgccgccagtgttctcaaccgtgagtgactctgcgaccccgaagagtgaacgaggtgggccgtggagtcttcgcctttcgtgcaagtcgcatcgtcgtgagggatcggtaccgggtgatcggcaattgctcgccgtcgtagggcactgccgcgaaaaccgcctatcgccgtggaccggcttcaactctcggccagtgacggtaaag

SEQ ID NO: 140504 - DNA, 508 bp, Zea Mays
agggtgtggaaaatatgtaatctagaataaagattttcagtaattaccattggaaatgaccctaggcttcgtctggccatgcaccaccccacttccttgctcggacatgcatgcattcccatttgttgccacggtaccaccttggcatggattcctacattgtactgatggaaacacaagtttaattgggctacatgctatcgtcgtcgtgcaagatacatctctacatggttagtaattaccaatgttggtgttctctgcagtcatatgtggctgtgtccaatcgtccccttccccagcgtcaccgatagtatcatgttctgttgcataagctgttgggtgtacaaccacagaggtatatgttgggtcctctatggtgagagacaccggattcaaagtgtcagcttgtagtgctctacgtttccttatgtactctaacttcccctctttccgccttggtgtctgattatataacctatggtgttcatgcatagactccaccacgcct

SEQ ID NO: 140505 - DNA, 437 bp, Zea Mays
agagtatgaagttgaactgttgtcgtaaggagtgaaaccatcagtggacaagcctagacgaacactcctagcgtctcttgcaaattctgggtcaaaacgatccagagccttccaagcatcgccatctgatggatgcatcataatgtctggatcttggctctcacgttctccttccttatgccacaacattagcttcgcagtttctggggttaaaaacaaacgtttaagccttggggtgatgggcatatatcgaagctgtttaactgccacttttgtagcaaaagtagctccatcctcttttagtacctccgcatatcttgatttaccgcatatctgacaatgggtggccgcttcatattccttccagaacaacatgcaattgtcttcgcacacatcaatcttcttatacttcatccaagaccggacacgatcttttt

SEQ ID NO: 140506 - DNA, 423 bp, Zea Mays
accccggcaaccacctcctccgcacctcgcgtgttcccgcctgactcacctacacgtgggtccaggtagtcagggtcatcatctacctcggcagaattccccgtcgcacgaatggggcgtacttgttgccgcgaatctcgggagcctggggtcgacttcgcaggactataaaagcgtgtgcctggtgccccgtgaccttcacgcttgcaccacgccgcggaagctgcttcatcgtggagaaggggagaaaggcaaggagatctgccaccgtggtggaatctcggattgcaccaacattttggccgtgctgggtaatcgggggacttcgtcggtgatcatcgagcgcgggcgtgctcttactggcaaggacatcggcggtgggttcgacaaatcatcactagagttggagccccaccgttaaac

SEQ ID NO: 140507 - DNA, 500 bp, Zea Mays
attcaagccttatggataccgttaagattgtggctgctggggttaatgtgtcgcgcggttccaaggggtgggaccatcctttggcggctgctgtgcatgggaacgagtttttggaattggccgaggagactgtgaatgcaggagttactgtggagatgttacaaccgtgtgtctcgggaatcgaggagtcttctcggattttgcagacaccgcatttaagccttatggattccgttcagagtgtggctgctggagttaatgtgtcgcgcggttccaagtgttgggaccatcatttggcggcagttgtacatgggaccgagattttgccaaggacgcagccccgtttctctggattcaaggggacatcttgggttctgcaaccactgaagttatgctcgaaggacgccaatctgtctgtggatgcgggcgatattgagctgcacgtttccagggattgggaccacctgctggcaacccatttgtctgatcctatgcagcat

SEQ ID NO: 140508 - DNA, 359 bp, Zea Mays
ctcgttgccatttgagtaaaaatatctaatgcagcgtaattagatgcgcgagcagtttggtactggaaagcttatatagtaggaaatgttttgttccggtggttattctgaagctacacacgaacatcgcctctctcgaagtcgacccagacatgacatttttgctgttgtgtgtggcctgctacccaaccagcagagcactcatcctcatggctcacgctcactgagatcgtctggcagcaaatgcatatagacgcgatagacaaggttcccttcaccgtgatggagccctgcctccagcgtccaaccacgagcatcgcggcatgctgagtattgctcctcgacgcagtgtacagttg

SEQ ID NO: 140509 - DNA, 681 bp, Zea Mays
atagttagaattcaaaccacaaggagatggaggtgaactggtcactggtggagcaagaagtagcagtcgatagctcggcacccgacaacagtagggacactcggacagatgacaaaggagatgcttgagtggtgttacctgctggtggagtggccaagtggtggtgcgctaggcaacaacaggtagcttccgtcgagtgctggtcaatgagtcactggcagcgctggtctatgttgcctgggccttcgatccacccctgctcgcaggctcgcacccatggctcccactttcactcagtgtgattgtgtcatcatgccatgcggcctttgctgttcacactccgcccccacacattccgcacattccatttacagtccaagggcttcatgtcgtgccacactttgcaatgttagtcatccgcattgaagaactaaccttaaagcatctccaatggttatgtaaacaacttcctaaatatgaatttaagaagttttcgagaaaaaactcttccacaacagttatataaaggacatccctaaatttataaactcccacaaaacctaatttcatccctatatttaccaacctcgttgaaactcactaaatcaatgttggtgctaagtacatcgtgagaagcatactccaaccattgtttcgcgttgtcccactatcatgttgacc

SEQ ID NO: 140510 - DNA, 487 bp, Zea Mays
gaaacaccgacggttggcatgccaggtaggggccttgcaagttctcgacgaactctcttggcttcggatggccatcaacgaaattggcatagtttgggcccccggaatgtctcaacttcgtcattgatgataggggaacaatgattagggccctggaagccccattcccccgatgagcgacccactcgacattaccgaatgcttcggtggcctctagcttggttcccatcagggaggtggcgtgaggcgttgcgcactgtgacccacttgcgctgagaccatggggatgctagacctcgaccgggactcattccatgacctcctctagtcggggtcggagggtggacttagttccccatccagtgggtccagtcacaatccggtccaggagtgcctcgtagccaactcgttggagggctgctcttcgctcatgtagagacccgaggggaccaccaccattgtcacgatacatgttgcgacatccgcc

SEQ ID NO: 140511 - DNA, 375 bp, Zea Mays
caagcacacgttccagcctcctgtaatcctcttgcatacccctaatatttattgcatttgttcccactgttcatctatgtaagatcaaagagcttggacgtcagtcgtgttacttacattgggggtagccgcattaggtcggagcgaagccaggtcagtctcccctagacggacaactttctgatgcatgtccgccttgaaattggctaggtacttcgccttggtctccttgatcatctgctccttgcattcctcaaattcctgctgattttcagccgatagagtcttcatagtcgacacgatgatattgctgggggaaatctcggagttgtccttagaaactggccatatggggccgatctatgccaactctca

SEQ ID NO: 140512 - DNA, 510 bp, Zea Mays
aactccgggagtagtgctcggtgagttccttgttgaatttactcccgctactgtgcttttcgattcaggagcatcccattcttttatagccactagttttgtggaaaagcatggcatcccctctacccctctagagattcccttggtcatccgaacccccagggtcagaccttctatgccagctcaaatgctcccaagtcagaattcttttaagtggggtagtgttcttggcagacttaaccgtcttgccatcctaagggattgatgtgatcttaggaatggattggttgaccaagcacaaaggtatcataagttgcgcaaacaagacagtccttctcacagaccgccaaggaaagtcagtctcttgtcaggctcagccacccaccaatgatccaatgatgtttaatgtagtaacagaaagcatatcagtggtagaagaattcatggatgtgttcccggaagagttgccaggaatgccaccagaaagagaagtggaattctacatagatc

SEQ ID NO: 140513 - DNA, 339 bp, Zea Mays
cccgccgtcaaaaagcttttgtaaataaccacctcattttcttcaggagcaggggtagtgctgtctcctccaaccctcacaatagacatgtcacgaaagtatcttcccctcatagcgtcaacatgactttgcttaatagtcgactttccgaagatggtatggcttggtcgccagggccggtcctcagaatcttcatctccactttccacatcaaagtcatcactgtcattagaatcttcagataaatccgccattatctcttttgtggttttctctgtatttgtttttgccatggattcgtaaaacccagcaataaaagggtccacaaccttcttctcc

SEQ ID NO: 140514 - DNA, 398 bp, Zea Mays
ttttctgtccaggccagtaaaagagtttctttagtctctgataagttggtaaaatgccagagtgacctcccacagctgaggcatgaaaagctgaaataagtttggtgtgcaatccaacattctgtcctaccaccagttgatgttgtttgtagatcagaccattatataaagaataaccttgaggattggggctttgtatagcaagttcttgtaacaattcttgtgcttgtggatccagctcataagacttgagtacttcttgaatccagactggtgtagcaattgatatagcagctagctgaacacctgctggcactctggacaaggcatctgcagccttattttcactccccttcttgtattgcacagtaaactgtaatcctgccaactttgccatg

SEQ ID NO: 140515 - DNA, 475 bp, Zea Mays
ctcctcaaccgtctcccatccaaggcggtcagtcatcccactccattcttcaccctcttcagcaccaccccctccttcgagcaccttcgtgtcttcgggtgtgtctgctatatcaacacttccaccatcgctccccacaaacttgtgccccatccactcattgtcttttcctcagatattcttctaatcacaaggggtaccggtgcctagatctcctcacccacaacgtcatcatctttcgtcacgtggtcttcgaccaggacatctttcccctttttagctcatccccgacaccctcctagatgtcgatcatgtcgccatcctcctctttctttaccccaagtcccaccgacatcgtccgtgtcatgcatggccctatcacctccgtccaaaccacacacagctccactaccaccgttcatgccacacatggccctgtcacctccacctgcaccacacacaaccctgcctctcc

SEQ ID NO: 140516 - DNA, 760 bp, Zea Mays
cgagagtggatgtggtgttacaagtacactgtcttggttagagtgccatggaagaaggtattattgatgtctagctggtagaccacccagtccctagagatcagagggcgagggagaggacgatttgaacaattatagatttcacgataaggctaaaggtcttgttgtagtccactttaggagctagctgaagccctaacgaacccaatgggccttatatggatctagagtgctatcagacttaagcttgtgctgaaatatccacttactagtgaccacattgttgctagaggacacaacactaggtcccatgtgtggttggtcagcaaggcctcataatgctcctccatagcactacgctagtgggggttagcgagcgcattactaacgaaggatgatacatgagagggaggtggagcggtggggccatgagcaccagctagtctataggtcggagaacaccagtcaaccgttgcttgaccattgggtgggcgtggtatgggtcgtggtggatggcgtctagatggtgcaccaacggcttggcatgggaataggttggggcactaggtggctcatcggtagagtgaactagtggacagggacacacatgttgctagtagacattggcaggatcgatgaaatgagccatatgtgtcgagaagtatagggtcgtacgtggcatgatcagaggtgatagggtcatacgtggtacggtcgaaggtgacaggacctcacggggcactgttggactaagagaaag

SEQ ID NO: 140517 - DNA, 607 bp, Zea Mays
tgttaaggtaggaatattgtcgttggtaccatttacttcctttccattggggttggggttcatcatctagtcagagggtaaaagagttagtgagacagactgcataacaggcttgtatgacattaagataaagagctaacacaacgttttaatttccaatataagattagttaaggaacaaggatggtttcagatttctactagcttcatcatactttgagagtttacatgtgttatattccttaacaaagatctttttgaaccttatagatttcagagcatgatatccaaatcatctttctaatccaagagtattctttgagtataaattgagagaaagacttgagcggaattttagggcaactagagtatcacattgcttcagatgacaccatactttattttctttataaagaggcaaaacacaataggtgcgagagattctccaaatttattcatatatcacttaacacaattacaaagcttgaaagggcaacactttgacgttttttttctttgtgggacatactccttcttctagctaaacgatatattattcttccttgtcagatgtaccaatcttcagggctggagatcgatcgtcttc

SEQ ID NO: 140518 - DNA, 386 bp, Zea Mays
caggaggaagcttttgctgaaaggagcatgtcgcaccgtgtgatccgacccaacatgagagtggctaggccgaattggacccagagaagtgtgtgagcgttttcctttttgtgttagagttattaagaaggggtatttgtataattgtatctatagtgagaagagaggagggtgaacctgaacaagaagtaagaactggttgagccagaggatggcgacatcaatcgtctgtagcccatggattccataaatccagttcttcattttaacaggagagctccgggagctgtgctcgctatctctaaatctttgtgtgtaacagattcttccaaagaaagtgcattagggtttctattccaacatggaaatcgaaatctagaagtatc

SEQ ID NO: 140519 - DNA, 773 bp, Zea Mays
tttagatattgcgactcaaaacatgggtgggagcagattaattagcttttcttaaccatttctcaacttaaaccggacaacacacgagtcacataaaacaccatattttgggagatctaacatgaagagcatcaacacatggcataaaactccataagactacattttgctactgaaggacctaaagcacttatgtgcatatctcatcggattgttctttgatttcaacaaggaccgacttatgaatgctactcgcttccaataattattgtgctgcgataacgctcatataagacctcttatcgatcaacaagtcatttatttatccaatgggcatggaatgtaatgattgataaagagaagcctcgatctgccattcaacaaaaatcatgataacaccaatagctactattaactaactgcttgaaacactaaacttacttctcgctttgccactataccacccttcaatcacatgagcatcattcacacgatgtacaatagcaacctaaacgtcatgagggagccacgactgctagagccctgagaggcgcgggcgctgaggaccgtgctcctgggcgaggtaggcagcgactgttgtcgtaggggagagcttggccatggcacctgaggagcagtggccatggatccgagaggagaggtagaggaagctgcgtccatggatggagtagagagcgtcgagtggaactacaggtcgcccaggggaaataggggcgctcagctggagagaggagcagggaggtggagctgct

SEQ ID NO: 140520 - DNA, 274 bp, Zea Mays
cttaccaaatttcacaccaatccgaggtcccaagcttaaatttcaccaaaattcccgttttgagcgatcgtttccgagccgagtgccctaattcctttttcttcgcctaaattcaaaccaagcacacacttcactcatattcacctatataaacctattcgtgaagtatcggctcaattccatatcgttttgtgcctcatttcaaattccaaacctcctatgtcactatttgtctgccaaacgtcgttttcacgtcgtttgacttcttgatcgt

SEQ ID NO: 140521 - DNA, 600 bp, Zea Mays
tcgactaagatgagcttcatccaaaatttgctggcggacgtcggcatccttaggcacaactatgcgatcattaaaccatactatgccttgatcatcctttctgaagcaattagctttgctggcttctattgtctcgtgaatatgtttcatacccttatcattcgtttgggcatcaataattctttgcagaagaatcgactcaagctttaattcgttcaaggttccatgttgtatcatccccaggtttaatttctccaattcttgacataatgtggtgtccggagtccttactgtaagacaatggcaaaaagccttgtgacttagtgcatctgccaccatgttggcctttcctgggtgatagtggatttctaattcataatccttaatcagctcaagccatcttctctgcctcatgtttagtgctgactgggtaaaaatatacttcaaacttttatgatctgtatatatatggcagatatttcacagcaaataatgacaccatattttaagggcatgaaccacatcagctaattccaagtcatgagttggataatgctcctcatgccagcgcaattgtcttgaagcatacgctataactcg

SEQ ID NO: 140522 - DNA, 487 bp, Zea Mays
tcatagacacccggattcacgcctaacatcatccctcctgacctccctctaggtggcattaggtgccaaagaaaatcaacaccaccacagaaatgtctcaaagtggattccgagaaagatctacgacccgtttccatgagagcaataaagtcgagtctatgttctctagcaagttgggataggtaattatgtttggccaaatcccctagtcctctacaattccaaaaaaatcccttcatttcaaactaatcttggagggtgtaactggctttttggaagggcgattaaccttcccctttaaaatagacctattcgccttctttctacgcggcgccacagtaagctcacaacatcgatctaagccacacaactcagaatcatcgtcccatctatcagtaatatgggataattcatcatctaacacggcctcctcctcatcgtgaaaattattcacactaaagggtaatgtagactttgcggctaccgt

SEQ ID NO: 140523 - DNA, 699 bp, Zea Mays
tgtaaaatatacctcttatctttatctcttacaacaaccatgaataaattgtttattccattcattaaaaaatattaaaaaccaaaaaaaataataaaaaagtgtctgaagtattcttagaaacatactaaaaacacctgttttctaaaaggcaaaaaaaccattaattggtcttttagcttttttgaagcggaagcatccttaaaaaccctcttcttcccgttgctagagaacttcaccagctctgaaccggcgtcacggacatcgtcttcacttcacctcacccgcgttcctgaagagcttagatccttccgttgcaactctggggacgggtgggcccatcggaaacatggtgctttctgtacatagctagctgatgtaggcttcatcttagagcaagagcatgcaaggttaataatatagtccactgctagaggtacaaatatagtctttattatgcttgctaataggagtataataaaaggttgggtgcacatttaccttttcccacttgtctaccgcatcgtgtggagggaagctgccaggcaccaaaagtaagtgattaattacagtagacatacttgcagtggaaggaacagtggcgtgagtgacagtatcatgtcatctactatatgattgatttactgaactgtgagcctaaatggctaaatatgagcgttatctatcatatcaatgaac

SEQ ID NO: 140524 - DNA, 311 bp, Zea Mays
tcaagtggatgccactcccagccctagactaacccaccgtaaatagccgaccacattaaccgcgcctggcaccgagccacagcgtgggcatcggtctatttcccactcatgacctacggaaccgtttaggctgcatagcactatgagcccctagactgcggcacatttatggtccacacacctctcgccctacagtgcactcatgacctatcggactaggcctacgtgcgtagacctccagcagggcgctacatgatgaaccatgtcgagccccaggctacagaggtcaggggtcgacaaagccaaaatga

SEQ ID NO: 140525 - DNA, 303 bp, Zea Mays
agtggagctgcgttccgggttccgtgtcggcgtggcgcgcgctgctgtcagacgagcggacgggcgccttagtccccgtcatcgccgtggaggagctcgcggcatcgtcgcccttgccgctctgcgatctctgtcgctgcgccggtgagttggcttcgcttccctgggccatcatcgcttatttgggcgcaacacgcgcctgtttcgttcgtggggttttgaacgcttgatggatgcgcggattaggttttaatcgggagttcttcccgatttttgctgattctttgggtggattagtagaac

SEQ ID NO: 140526 - DNA, 753 bp, Zea Mays
ccgagagccttgtttgtcaaatagtgcactggcagccaccccacccctgctgtgcctggtgctgagttgaacgaagcaagtggcgagtggtttgtgtgtgcgctgcgcaccaccagcgttcatcactggctaagccacatgcagacattccctttggttctgttatgacatttcctttttcatcagcatcacactgagcacatactacatacaacttgcagggatttgttcttttttttttttgcacggcatggttgattggttggttgtacagcattagaattgcgtccctgatatattacctacacgcgtggcggaaaccactgcacacgcactgacgcacactggtgttccggatactttggatggtggggttcagctactacagagatgacgaagggcggcgaccactgctttttatttgcagggttggttcctgtgtgctggatggagggagcagagaccaaactaactaacctgcctttgccgtaaaagcctccaataattgagggggggcatccaatccaatccaatccaacccctcttttcattcttttggccagccaaagcccatgacgagaggagcccctgccccaccacacacacacgctatgtacgatggctgatgagccgatcgccgtcactgtcgccacactcacctgtttattaacctctgctactgagtaatggctgtccttgtcgtcctgtcctgtcctgccaatcaagctaagggtagagatgcatacttggccg

SEQ ID NO: 140527 - DNA, 821 bp, Zea Mays
gtaattctctcttgtaaacgattcatttccatcacatactagtgtgttgccacggctgatttgcaattttgccactattcacattaaagttcgctaatttgccaccgaacccataaattatagatataaacgacccacaaatcatgataaaacagcaaagtgtcaacacatggcgaaattacaaatatttttgccctaaacctagccgattcattcccagcggcaacaaccgcatccatcctcttcgttgtcatcgccccatccagccagcgcccccgtccggtcgccttgcttcaccatgtagcccttgccagccgtgccaccacagcaagcgcccccgccttcgcctggcagccggtcgcaatcggccagccggttagcgcctgcgcccgaacgcctcgctccagccaccagcccacgcccgctgcccaccgcccacgtcatggcggcgccagtcgttgccccactgtgttccagtagatggtagtctcttctccctgtgttgcttccatcttgcttttctgaagctgatagccacatccttgtcagtttgtagaactcaagttgtttgcttggtctggtctagttgggttaccgcagttgacctgacatgcctttaaatcataaatccattgaatttcgatcctgattttgtaagccagtaagttatagataggtgtatcctttgttgttctattcatagctatttgatccggtgctcgtgaaatagagcaccaaaaagaccctttttctgacatgttgctcctgatcacacgcatgctttgtatttttgtggctggttgactgatgcactattttag

SEQ ID NO: 140528 - DNA, 468 bp, Zea Mays
caccgatgaagtggttgcagcaggtttttgcgttgtctttgctgctgaatttgcagggttgtcacgaggcttgtcgctagatggtggggctgctgttcgagctgacgatgaataacgtgcagcagcacgcccagttgatggaatacttgagcggggctacatggaaatattcctccctgcagaaatgttagtcctggtacttgcacgtcgtccttgtacttccctttcaactttgcaagctagatggaacaaacaggttatgttattgtactctttataagcaaggatgtcctgaatttcccagtttatcccgcccaaaaatctagccgtagcagattccacagcctcctctaaattgcaacgtagcatgcccatttgcagctcttgatagtattcttctacacttttagtaccttgctttaactgctgcagttggtttaaaagatcacgtgcatagtaagatggaac

SEQ ID NO: 140529 - DNA, 472 bp, Zea Mays
gcattttcaaggccttgcttaataacatgctctgcaaaacaagttaaaattagaacactcaatccactacgaaggtaataaaaattctagacaaaagactcaccttaaagttggaataaaacaggctaccgacaatatgttgccgtcagtagcaactaatgtcggtctccaacttcggaaacccaacaatcttggatagggttccgacaatctttgccccagcgcggtcgcgaatgtatcctaagatttcctcatcgaccccgccgaagagcatggaacccggttggtaccacaagatgtagcaaattcttttaattccaacttgtcctaaaaaagttcttgactgcccaggtgccgaagatcaaaatctttgtcgtccgaaggagtattatcaattttctttcctttatctggcacttgtcttctctgcaactacacttgtcttctctgcaactacacttgtcttctctac

SEQ ID NO: 140530 - DNA, 503 bp, Zea Mays
tgaggagttaccacaacattcattgccattgcactgttgtgctgttaaaaaaaatttaaccatagccgaagctctctatattgcactttcgagcaaacgcttcatcactggtgattagcttcatcttagagaaaacataaacacaaatggccagagtttgatccactgctagggtgtctcgtgagggagacgaggccgaagctgccgaaacagcgcccatctcagaagtgatgaagcaatcaggtcttgttgtgccagaggaggctgttgccgaaggtacctcgattgctgaagctgaacagatcgcagttgaaggagggagtgagaacgaagatgaagaggattacactattctaagcccagcgaaacccagccacattgaatttggtaaatctactgtgacggcagacgatatggttttgatgaagaaattgggctactttggggaggccgagagcaaacttgtccgatttgttggggaagaggtgattccagatccaaaa

SEQ ID NO: 140531 - DNA, 294 bp, Zea Mays
taaaaccgcacgaaaacgataggaatatcattgtttcatgtaagtctaagggcatgtacaactctatttaatatcttgtctcttaagaggtctctagggatatgtttggttgcctggcccagcgcacggccaggtccatttgaaacaagcacaccatgtttggtatcctggcccagcttgggggcctggctgaggcgagccacatctgacttcgtggctaggcccaattgaaacacaggtaacttccttcgcgcatcaacttgacccgtgctcgcccactgcgctagggttcac

SEQ ID NO: 140532 - DNA, 489 bp, Zea Mays
gctaggcatatcacttcatgctctcactgggattgacatcgcagacacactgaaactgaaagtctctatcaatggtgtggctctcattgctcttgtggattcaggatccacccatacattcatcagcgatgctattgtgccaagactgggactgcatgtgactccaacagtaggattgcctatcaaggttgcaaatggtgagaaggtgttgagtgggggcatctgttcttagaccccactcactaccggcgaagagaattttaccacaacctgctacactcttcccctggatggctttgatgtggtgctcggggtagaatggttgcgttctttgggtcctttcatctgcaactttgagaagttgacgctgtctttttggcgccatggacacatggtgcgttggataggcattggcggctctccaccacgctgtaatgctctggacatggcacacaaactattggataccctgctactatcctttgatga

SEQ ID NO: 140533 - DNA, 535 bp, Zea Mays
agaacatgtaatggtcaaatctgcaacattgaatgttactgttgctccataatttgaatgcatatgtgtaaccatgaatgttgatattgacccctcagattgtaacaatttacatgaatatgaaaactgacatttaaattcttcctcaaactccatatacatcctccttgtatatgattcagcagcatacttcaacaaaggtaaattttggatgtaattaactggattcttcatacgtgatttgaaatcttcatccaactcattttcgcgaagagaagcagaaaccttctcgcattcgacgatgagttcggaaagcccaagtttcctacggaatctcttcttaaatacattattcataccttcactcctttgagtagttgtcatatccgctgtaaaagagtcacgataaacagcagcccacttttctcttaaattatatagatttagcatccacaagttctcctcaaggctatattcaatcaacagttcattccacttccttttgaaacaatcctctgatctatcttcatagaca

SEQ ID NO: 140534 - DNA, 651 bp, Zea Mays
ggccttgcctttactaagaaatgaggcttcacttggtgctaaggctttgcaaaagaggttagaagacacttacaactgtagggtcagttatgatgtgacatggaaaggaatgcaagaagctctaaaagagatgtatggcaattgggacgatagtttcagtatgttgtataggtggaaggaagaaattttgataaaatcccctcatagtgtggtggagatagacacccaagttgtagatgaaaaggtctacttccatagatatttctgtgcacttgagccttgtatagaagggtttcgtgctgcgtgtaggccttaccttagtgtggattcaactgcactcaatggtagatggaatggtcacctagcagctgcaacaacgttagatggacacaattggatgtacccggtcgcgtttgggttcatggattctgagagcaaggataattgggtttggtttatgacacagcttcgaagggccatagggaatatggagaaactagctatttgtactgatgccggcaagggtttgatgactgctgtggaactagttttcccacaagctgataagagagaatgtttcagacatctgatgcaaaatttcatcaaaagattccatagaaatagttacagaggaatgtatcctgctgcgag

SEQ ID NO: 140535 - DNA, 466 bp, Zea Mays
attttctctaggaaggtgaccgggtagaacctcctctcaaactgcctgatgaaaacatcccaggataggactcctggtgaagaagagtgagctgcctgcacgcccctccactagatttgagcctctcccttgagcagctgtatgccaaagcgaacacgatcaccatacacaatctcaaagacattcatattatcctccacgtatgttagccaatccgccgccccgaccggagtaccactgccatcaaaagtgtccaacttcatgctcatccactgcatcagcgaaagaccactgacgggaagaggcacctcaaccccgccatctggagcagcacccgcgggaacagcgcccccgggcactcctccaccaccagcaccctgagcagcacacgcaggagcaacaggaatagcttgcctcagaatggccaactcctgctacatggcctgcatcgcggctaacattgccg

SEQ ID NO: 140536 - DNA, 586 bp, Zea Mays
gttaaaatgatcaaaatacggattttagaagttctaggtcaattttgataataatcttatactctaaattccaaccaggggcctaattgcaaataccaagggaggttttgtaaaaattgaggatccaactgttatttttatgcaccaggtgaatggcgggttggttattgaaaaagtaagggtctcttttgcaaagtggtggttgaaggggtatggataactcctagccgttggatcacgatctgcggtcaggattaaatcgaatcctagataaacggatacgccctagccgtcggatccgaaaatctatggcctagattagattagccttaggcgaactggttcgtgatgtgaaccgccagatgccaatccaagggtcaggatcaaaagtatcccgcgcacacgactacccgttcatcttcaaatctacggtcgtgaggaactctagccgattcagtactcagatctaattgtagcccttcacagctaacccaacgacatggattgtcccagccgaagcggtatgctccaaccaatctaggccgcccatcactagatccacaaccccacgttcttcttcccctcc

SEQ ID NO: 140537 - DNA, 566 bp, Zea Mays
taccaatatttatcctattactcctaatattacatctaagattaggttattggaagacacactagcagtattggcactaggatcgactccttacaaaaacagaaatcacgaaagacattaaggaggattgccttccacatccgaccatgacaccctaggaccaaacctcgtagcagcattagaagctacacctgtctttgttggcccgacattgatgactcccacacatgactccaacgtagcttctcctactctcgcaccacatgtaggagaagggtcatctatcaagcgtgttgtctagccttcggtgtcaaataactcaacttgcatgtttttgactattgcacgtctggtgctggcccgacattgatgactcccacacatgactccaacgtatcttctcctactctcgcaccacatgcaggagaagggtcatctatcgagcattttgtctagccttcagtgtcaaacaactcaacttgcatgttttcgactattgcacgtctggtgcgtttggataatcattgcaacgctagtttttttatgaccgatgcggtcgagccttc

SEQ ID NO: 140538 - DNA, 356 bp, Zea Mays
tcgtcaacatcatctgatatttataaatgaatgggaatcgggtgctgagaatgtatattccaacgatgagttgcacaacaacagtgactacaggcggtaccaagcttggtaccagggtgcgactcattgtaagcttcgccaacagtggacagcggaagactacgccgacattgattcttctgacgatgaagaaacggagtatgacctgtccacaagactgggaacccaagtggaggcgacacccatattagatcgagtggtaagttttactcgattttaatactcgacatgtataaattgtatgtgtgatgcaaattgtcttgtacagggtaacacattgtgacggtcggtagagg

SEQ ID NO: 140539 - DNA, 427 bp, Zea Mays
caaagccatataaaggagtaatgctgcgaagatagctgatgagatactagccgggttgtcgcatgactccaaagacatttaagattttgatgttgacagtggtgttgatgatgccgaagatcggccgtggagaccaagttatgttaacttcggaaaatctattgtgaagaatgggcatattgaggccatgaagggtaagtatttctatgatatatccatagtgccacctagggaaaaacattgttcctctccctgaaaaggacgaagtggttgccttccgaagttttttgaagattggattgtgttttcccttcacaagatgttggttgaggtcctaaaaagatttgagatataaacacaattcatcggctgcagattggcatgaccaatcccaacccctttacaggatgtcgatagacacatatcc

SEQ ID NO: 140540 - DNA, 423 bp, Zea Mays
gcagcctttaacataggtaaatctgggctgtaagtaaccaggatcttacgacgtgaatggaaatctgcattcaccttgctttcacgaagattggcgcacaccttctcacattctacaaggagttctaaaagacctagtttcctacgaaaccttttcttgaagacattattcatgcattcgctcctttgagtagaggtcatgtcggctgtaaaagagtcacggtagataatagcccattttcccctcaagttataaaggttcaccatccagtcattatactcaagatcgtactcccgcaacaaatcatgccactttttattgaagtaatattctgatatatcctcatagacacaactcttaaaagcatgtagaaactccttatgcttactaattacatatccaagatgtttagcagcattaaga

SEQ ID NO: 140541 - DNA, 1005 bp, Zea Mays
gcgtatggcctggcgaaggtcagcgccgcagagagttcatgcagttcggctgcagagatcagacggccagctttgcaagcttcagtgacatgcacgggtactagaacactaagataaaaacgtgaaactaacccgtgttagcctgaccacagtggaggcgagacgtccgttgtcagtgtggtcacaagtttagggaaaacacgaggaacagcggcctccgacaaaatgaacggtgtcacatgacttctacacgaataggagaacaaggatagacgaaacgctcggcgagcctttctggggatcatgagacggctaagagctgtactacacgaaggggcaaactaataagagggaacaaggaaaagggttttgagtacttgctgttatcggtgtggcatacgtgatgacactggcgtggcatggactgagacacgcggctgcaaaaccatgacaccacgcggcctaagcccatgccaataccatggcacgttggaggagcaacactcggacagaaacaagtaggcagggggaattcactagagataactatgaggacctagatatttaccatgtgaaactccagtaaatctttatgctggaaacttccagaccactccttgcaatactcacccatatctcaaccttgacaaacctgtggagtacagcaagaatgatatttttttcagagttcgacaccaaactctaaacttatgaatccattgtttatcaactgacgacctcctccctcctaaccccttcaaacccccacaccaactgcagctcgaattggcaccggtgaacacaacagaggtgtgggaatgcttcactcgcctaaagactgaacccagtttcagtcatttgaactgaactcagcaccataaccaactaaacccacgtggagcacaacagacatatgaagatttttctctgctcccagaaccgaaccacacatcagccacttgagacaaaaatgcagcagcagccgactgaaccttccctgctgac

SEQ ID NO: 140542 - DNA, 459 bp, Zea Mays
gcaaggttgttgagtgcagtggcttgacacctttagagaaacctacatctacttcctagaaatgcctagaggtctatgtgtccttgtggttcgggttatgatgagtgattgtcaataagaatagtgtcttaggtgagttgagtggactaacaagggcgtgattgtgtttgtgcaacatgtctcttggcttgtggtgtaggtgtggattatagagagggtggtcgatggcaaaggtgtaggtcatgcgagttcatgccaatggactgggagctatgaaggatgggcattgggtcttgactaagggactagagaagtcgagtaactagctatggtggctgacacctagggacaacaatggaaataaggacatgatgaagtatatcgtgttgcatatgcttgaggaccagtgggacacatgtccaggacaaggggacaaacatggattacgctacccatgtg

SEQ ID NO: 140543 - DNA, 455 bp, Zea Mays
cctgagccagcactagtgttgctcctctagcaattgaccctgctttggctgccatcctttagtcgctcactcatcggcaggctcacatggccatagagcaggccaggcaggccgctatccaacagcagttgtccgaacgaatgttgtcaatgttctagaccattcaggaccgctaggacactctacaacagcagcttctagcagacagggcaaagcaccagacgttcatgacccatattctccagcataccggtgttccgatcccttcagtgcagtctgctccccctctagctcttcaagctactgttgtgctagctatttagtcaggaccctagctccactcctttggtccttccttctccccgctcaggccggtcaccctagacttcttgacccaggtcgtcggacctatcaacgctcagccatcaatgcctccagcatctgctcttaccact

SEQ ID NO: 140544 - DNA, 692 bp, Zea Mays
agttttcaaccttttcagtcaaatcttgaatgacagctttatttttctcttcctccagatcttgttgcattttcagaaccttgcttaataatatgctctgtcgaaatgatcttcattagaacacgacccaaaagttaataataacagtaataaaataacaaaaatattcgttaccttgaagttagcataaagcaagcttccggcgatgtggtgtcgttgataacgacacaagtccgcttccaccttcggcaagccaatgcttttggaaagggttctgataattttggcctcgatgcggttccgaaggcaccttagtttcccttcgttcaccccaccaaatagcatagcgcctgatttatatccgcaagatatggcatattttttcaactcctctttcttagtgtctgttaactcttgtccaagtaggtcttgaaagttaaaatcttctccttcagaaatttcaccaatttgctctttccccttttcagttgccgtattcactgcagccacagtagcttcttcttcagtcattttcaggagaatactgtcaataacctcaagtgtagtttccaggttcgactcttcggtggccccggcttcggccccggtagcttcgggttcgctggtttcagcttcagtagttttcatcccagtagcttcggcttcggcagtttcagcaaagggaattttcg

SEQ ID NO: 140545 - DNA, 657 bp, Zea Mays
ctagtagatttgtttggtggaacgattaggatggaatcaactagctactagacttgtatagtgaccttgcttgaatgaactagagctagtgcttgtagtgtttattaggattttctattgtattaaccgcttgatttagtgttgtcaaatttgtagaagaatttttggctattcacacctctctagccatctagatcctcacaactatttagcactttccctaagtttaagcctactgcttagtgaggtttccatacccttgccacctagtgcttccatgtaccattgcttgtacactagggcttgtagtcctataagatcctatgaaatgtggagaggtcattgagcgtgtacaaaatgaaatgtgtgaccaacaacgtattggtcagatacatgataataaagataatggaaagagatccgaaagaagactaccttgaagactcacttgcgcatagggaaggattgtaggctatcaatagagctacttggtcgagagcttgtccctcgcatgggcatccttgcgagcggctccaatgaggattaggaaaaaccatgagcttctcgatacctcgattaaaatcgtcgtcctcgatgtgggtctacatcatttctatctcattgatgcttttgtaggttacatgcttacatttgtaa

SEQ ID NO: 140546 - DNA, 1483 bp, Zea Mays
aagtagtaacactaaaacctctgtaagccttaatacaatcgggaaaggctcaagaaaagggcaagctgagcatagcaaacctgcatcgtcttgccaagacccatgtcatcccctaggattcctcctgttcccctgcagtgcagaacccagagccatcggaggccctcgcgctggtgggcgaaaagcatcttgaatatctttcctgggagcttgtatggcttggatgttgcagcagttccagttggatccatcttgaagtcctctgtcttctcccatccaacatcctcagcattgttctccacagctccaaggttctccttctcctgacccagctcatcgtcgctgacaccatggttcctgaatgttggggtgttgggtggtctccttgtgaatcccttgcttcttagctgcttaacagcataatctgttcttgttccttggtcctcctcgcagtcgtcataatcagaatcggaataagaatcaacaaaggatgaggcctttgataccctatttagcctcccaacatccttggtggtccctttgttcttccccttgccacggacgtcatcacaggcataatgggtacaggctgaggagactaaatcagtttcgatcttgacctcggagcgtctggtgggagccctagcttcatcagagctagaaatttgaaggggtgaggaggcaccggcgtgagcatccacatcatctgggctatggtcatctaggtcgtcgtccacggtgatggcgcacggcaaaggggtgagctgttgtgtcctggacctcgcggcggtgctgggcttctggacggatagagagtcaaatcgtgtggtgaggtcgtctaggatgtcgagtatgctttcaccgtcgtcctggttgtcccactccgcctcctcttcatccactcgctgagtggcggtggtggtggtggcaagcttgcataggcggcggcggccggcgagcttgaccttctcgacttgttcttcggcggcggcttttgcaaaggaagaaattagaaccattaagtagattgaagggcgaggaaaaacaatgaagcaagaagagacgggcgtacagtacctgggggcggaggcggtggcggattggggctagggttagggttttgggtggggcgctggaggctgcgggtgaagcggaggaggtggtcgttgaggccgttcggcgtaggggcggcggcagggagatggcgatccttggggacggcggtgacgggttcatcgatgtcgtcgtcgtcgagatcgccgcagaggtcgaagggagggggagacgccatctagccgcggagacgcccaagaggcaagaggcaaggggacggaatcgaatcgaggatgcgcagtggggatgggtgctcttcctcgtcggttcacacctctctcacttgccgaggagaggaaggagaggcagcagcgagcgtgtgtgactctctagtctctacgactctacctccaccaacattgcggttgta

SEQ ID NO: 140547 - DNA, 849 bp, Zea Mays
ggagttacgaattttctaaggttttatgtattaattaggaaataattttaaagtggctttcatgtcaaatcagtggcactatttgataaacaataatattataaaattacaggaactgaaatggactcatttggacttaatatgaattaaacaagtcctagtatttatttttaaattagaaattcatttcctaattacttttctggatttttctaattcccagggccgggcgccaattaaacagagacacaggggctaatctactaaagttcccgagactcaggtttctgtatactggacggcgggttattttctagaaaacaaaggggctctttaagaaaagtgcacggcgaaggggtaagatctattttgagccgttggattagacaccaaggacctagatgaaatgctcactttaccaaaccggtatgccatcagggcccttggatctcggatctatggtctagcttccatcgtccaaaaggggatctgcgatttgatcgtggccgttcggatcgcatcctatggccctgcctacgtttcccatcctaaccaatcgtggtcgttgattatggatcaaacggccacgcccttctcttctccacgcttccgagcagaacagcggcgcgacagctcccctgttcacccacatggcggcacttgctgatggatgatgcacccgacgccgcaaaggcctaactctatcgctgcttggctcaacacaatgagtggggcagagcgaacgcggtagccaggaactcaccagtgcgaatggcgtgtcggggttggtccgcggtgcaaatcgggatggctgcggtggcgagaaatcatcgacgattaggtgcctcc

SEQ ID NO: 140548 - DNA, 322 bp, Zea Mays
ggcatgcgtgttagccatggtatagacatttgttgcagtagctggatttgggcggtgaaaaaggcttttcactcggtaggcgaagggtttggagtattcatttgcggttctaaattagtaactacccttcttcgacgaatgtgtgcaagttgattgatgccttctcatgtcttggtattgaccatcttccaatagaatatgtacaaaacattttctattaaattataaaacattttctatttaattaagccacaaaccctgaacattttcctaaacatttccctactaagttattgatccataaaccctaaaccaacatttc

SEQ ID NO: 140549 - DNA, 375 bp, Zea Mays
ctgggaggaaagctgacaaaatgatgtcagacaacctaagatttccacccacaaacttaatggagggccaccagacgtgatggaaagaattagggacgaggtagctgggttgtttagagacaaactcggtgttagtgtgtcaggcataggacagtcgtatcggaaaccttatagtcaccgatttgacgttgtgccatatctgcaaggggttaggataccggacttctccaaaatttttggtgaaggcgagaagagcacgcatgagcacataagccagtacttagcacacctaggagaattggctgatagggaagcctaccgtgttcgtttattctcgctatctctgactagtaccgcattcgcgtggtacgcaac

SEQ ID NO: 140550 - DNA, 473 bp, Zea Mays
aagctatgtgagaattgctcaccggagcagcagggactcgtcgccagttaacctcgtcgttgccctcacccacgatcggcatactgttggtaagaatgcccctgttatcatttgcctcaaccttcactacgtaaatcaccattgggattgcatgggtgctccggggggaactggacgtcgcgtggcaggcgttcaccactgggacattgcggcgctgctgctgggcgtcacggtggggaagaaatcgcgcacaccgttggatcttggtgtgacggctaggattagaatacatgggcgccggttcagtggatgtctctgtccgttgatcggtaaacgggtcgctaggatttagttggccatgcatgggaagctaaccgttgatcggccgacgtgtggccaagattagaaataatataccacatcacgctataagatctgagccataggatttggatctgagggttgcggatgtg

SEQ ID NO: 140551 - DNA, 621 bp, Zea Mays
accttatctccttttgccatgaggcaagttgcggtgtaggagtcgtcttgtaggttggtgaagagttgcgagcttgacgtagattgaatggccacgtttggcaccacttcctcttcctcggagctagaactctcttcatcggagttccattcttcaccaatatgggcttgaccatatttcttcttcttaaagtatcccttggtattgcctccctttttgaacttgtccttcttgtattccttcttggcttcttgttccttcttgttaggacaatccgctataaaatgaccggtttggccacattcatagcatgccctcttctttcctttcctttggaacttgtcattttttcttacaaatttcttgaatgttttgatgaacatagctgtgtcttcatcacttgatgtctcgaccactttctttgctttgtggtctttgttcttcttgggagtgtcttgttcattagtgatcaaggcatgagagtctcttgtcttgataggggcttcttcggactcgtgttgttgaatctttacaaataattgatgaggcgtcatatcctcatagtcatcacgatcccttatcatccttgctagactcttatccttttctttatatgctctc

SEQ ID NO: 140552 - DNA, 296 bp, Zea Mays
tcgtaggatcaagtgcctctctatcgatcacaccagcaagcattattgtcgcggtagtatcaatgttatgccaacatacaaagcaatacattggtcacaatcagtaaagtaatatcctctaacagtaaaacaaacatcgctttgcaagttaactggttcagttacatgaatattcttgctatcctgccatgtaaacacaggaagaaaaagtaatagttggaagttctgattctttggacaattacaatagaggtgccacatgtctgcacatatatggtattataagtattagtaca

SEQ ID NO: 140553 - DNA, 642 bp, Zea Mays
caaaattgtagcagccgacgttctcatgcatcccatcttctctagcttttgtctgataatgaagctcatgtgcccgttagaagcctttggcaagcggttctgcccctggcttcggagagcctagatgtagacgctaagcctaacgatggcgttagaagttagctgatgaagataaatcccaaacttctccaaaacatccgcaatcatctcattcaaaggaaatcttaatcctgctttaaagaagcttttaaagactaccacctcatccttttctggcttcggagtaatttcctctccgccaaagcgaatcatcttctttttggcttcactgaaatagcctaacttcatcaacttaggcatatcatcttcggtaacagtggacctcccaaactctaggtggctgggtttagatggcagggcactataatcatcttcagattcaccttcctcagcaccaacctgctcagcttcagtggcaggtgcaccttcgtcagaaacatcctccggcactaccagccccgaccgtttcatcactttgaaaatcgaagcagtttcagcagcttcggcttcttctccgtcacgtgtaaccctggcagtggaacgtacccttgccaattgatgatgaattactcacaatttttg

SEQ ID NO: 140554 - DNA, 378 bp, Zea Mays
cttacaataatagctaccaggccagtttgaagatgtccccgtttgaggctctatatggcagagagtgcaggactccactgtattgggatcaaacttgtgaaaagcaattctttggaccagagattatacaagaggcaaaagaacaggttcgatagataagggagaatttgagaactgcgcagtcaaggcagaaaagttctgctgatacccggaggagactgctcgagtttaaagagggtgatcacgtatatttgaaggtgtcaccgatccagggcatgagaagatttaaagtcaaagggaagttgtcccctcgctttattggacccttcttgatcctaaagcgagtgggagaagttgcctatcaactggaactacccg

SEQ ID NO: 140555 - DNA, 330 bp, Zea Mays
cgccacaagaagacgataggataaaatcaggaaagagaaagggggagtcgaacactagccagtgccatcaaggaggcagcaaacaaacctttgccagctggtttgtttgaagttgtagacaatattccaggatttgagattgcgcacaagtccaagtattattctcatttggtttctaatcctgacattgcacatgctttcatggatgtgccattgctttacaaggtctctatgattaccgacttcgttaatgagaagttttaggctttatggtaatctaataatacatttcacaatttgtatggatctatgtaaggacctatgtttgtt

SEQ ID NO: 140556 - DNA, 531 bp, Zea Mays
tgatggtacaaagctacaaaagagaatcaaatgcaggtacaatctcaaaaagaaagcaatctttgaagatgacatctagtctatctgtgcagtagctcagaagataattgtggcatgatcctgagctgccctttggcatttgaagcagtgcatgcggaagatggggcacacgccttcataggtctcaaaaagaatgcagtgttttggttttaccagttctctgaaccgtttgtgcctagcatgatagcactggtggctatgatgttgacccagggcatgcggaagatggggcacacgccacgaagagcatgagagcaaacatagatctgccatgcacagcagctggaacaccaggtctatgtcaccgagtagaggccggtggaggacagcactgcgcccacctccatcacttgagctaatgcccaacgatcttgcgtgcgtaggcgtacatgttagttaacagtatggtaatgagcatagttgtagtttattggccaaatggctaatgatacaaggaagcaaagctatttt

SEQ ID NO: 140557 - DNA, 529 bp, Zea Mays
ccattgtaatttgcacatctttatcaccttatttcttgtaactcgagtcaaagtgtccaaaatcttgatagggtactccgcataagtcaggtcatcttgaacactaaggtcttctattggtagctgctcctcaggtaccctgaggcactttttcagttgtgacacgtggaatacattatgtacatccaacagatgatcgggtaattccagttgatatgcaacttctcccactcgctttaagatcaagaaaggtccaatgaagcgtggggacaactttcctttaactttaaatctcctcataccccgaagtggtgacaccttcagatagacatgatcaccctccttaaactccagtagtcgtctcctattatcagcatagctcttttgccttgattgtgcaatcctcaaattttctcttatcattcgaacttgttcttctgcctcttgtataagttcaggcccaaagaactgtctttctccagtctgatcccaatataggggagtcctgcactttctgccatatagagct

SEQ ID NO: 140558 - DNA, 722 bp, Zea Mays
cgggctgggtggagagcttcgccaaggtccaggtgcttccgccgttggagccctatgtgtgttggaacgacgctggagacctaggtcttccaccagtggagccggacgcgggcttgatcggcgcctgggtcgaggaggtttcactgatggagctcggctaaggcttggacgacattccagagagcaacagaggcatggcaatggggaagagatgatgctagtggcggcgacaagcgcgagagcagcgacgcgttgtgcgcagggaggggtggtggcgaagcttccgttgatggaggagggcggggatcctcggcatcttccatgctgatatcgcgtacggttcctcggacacctccgcagatggaggcgggcgttgatggcggggatcttggatcagcgtggggagatggaggcgggcagtggattgaggcggggaaggcggcgcgatgaatgccatcgccgccagttatggaatggggatcggcgtggggaggagggtggggatcctcggcaaccttcgatatcgcgtacagtccttggccgcgggcgttgatggcggagcagaggggtaggagatcctcgccatcgccattttccttcgacggcgtggggaggaggaaggggcggatcgacgtgggaaggatggctgagatcgcgtacggttccgacggcagaactgtgcaccagtagagatgtggacgtctacattagggtcttaaata

SEQ ID NO: 140559 - DNA, 639 bp, Zea Mays
gtgacaccttcaaatagacatgatcaccctccttaaactccagtaatcttctcctattatcagcatagctcttttgccttgattgtgcaattctcaaattctcccttatcattcgaacttgttcttctgcctcttgaataagctcaggcccaaagaactgtctttctccagtttgattccaatacagtggggtcctgcattttctaccatacagagcttcaaatggtgacatcttcaaactggcctgatagctattattataagaaaactcagcatagggtaagctcttctcccaactgccaccatgcttgagagcacaagctcttaacatatcttccagcacttgattagttctttctgtctgtccatcagtctggggatggtaggctgaactaaaattcaactttgtatccaagctctcatgcaatttcttccaaaatcgagaagtaaactgtgatcctcgatcagacacgatcttcttaggtactccatgtagacaaactatccgagtcatatacaattctgctagcttggctcccgtataattagtcctcaccggtataaaatgagccacttttgtcaatctatccacaattacccaaatagagtcatacccagcaggggtgcggggtagtccaa

SEQ ID NO: 140560 - DNA, 479 bp, Zea Mays
acaactttagtcttcttttaggactttgtcagcagcttcgttcaatagcttgtcgacagcttcgtcaataacctcattagcaatcttaatcatatcgagcacctccttcacaaatggatcagtttcaggatcatatggctctagagggggagaaagctcagctgcattaaaacacaaaaatctgttagtaccaaagctacaaaaatttacgaacctaagctataaaggttatacctataagtctggcctgctcagcaccttcttcaactcttttagcctcttctaaggcgtcatgagactctttctcattttttctaatggcttcatcagctatttctcgaccaaccttcagccatactttggaataaaacttcccacctagtgtagtagcttcgaccgaagggtttctaacatcgttggctgaaaatacaaaatctggctgaactacagccttggcatgatcacggccagccttttcc

SEQ ID NO: 140561 - DNA, 654 bp, Zea Mays
gacaatttcaagggccttcgcttgggaccaacagaacaacctattcctgcctgcaatttttttggttctgaatgatctttgaaaccaaatattccttcggtgttttttggcattttgggcactgtctgtgaagtgtagcaggaccgcctctgcttttatgctcggtagagttctctgatcaagtactggtaaaaggtacttgccaaaaaccatgcctttggatgctccgaattgttatatttatctaattttagttggtgcttatagttcttatgacttcttgtctcatatatttacacaaaggaaaatcatgcaggtagaacgtactttgagtacaaatgcttgtggcatgagtatgtcaaaattggcatttgcataagtggggtccaactattttcttgtttcctccttgtttgttttcttcttagacaactgtacttttgtgaaactagagtttgaaactgttcatcagagtttggaagatatgagcaaatatgtgtagtggggacttgttagtgcagaaaatgggaagcttttctgtgtttgtatttctaatctggatcctactacaacattattcttactcgcttcatgcatttcttgctttcagattataagcttgtctaaagcaagcccttagaaggaaagttatct

SEQ ID NO: 140562 - DNA, 580 bp, Zea Mays
tgaaggaggcgaatgtcaagctattattgtaactcaacatctggaaggatagcacaaccctagaaaagttgctagaagttagccataggcgactcaccccactaggaagcaatcaacaccagtgtcatagccaacgctgaaagggcaccccgacaatgacaaattgagattcactcaaaaatagcagcaaaagtaagaaaccatccaactttagatcagaccaaaggcatcaccgcatcacaccatcagagcagaattcggatgactcagtcgtgggtccccaaacaaatagaaacgggggtctcggatccatgagccatacatcccagaattcaccagaatgctcaattttcaaggtcaaatcatccatgcgacacaaactaagaatatcattgagttcaaactcttgatcaatcaccttacacccttactttctcatcccacaaattaaagaagacctggtccatgtggataacatgatggcatattcagccctatatgctagtgaagaactatgacccgtagaatacaaaggccaccaactcgagaaccacaaacacaaagcttattaggggctcgc

SEQ ID NO: 140563 - DNA, 1033 bp, Zea Mays
catgaaatgccaatgcttatgatgttatgctcaagttttagtaaccgtaacaccaggggtgttacataaacccagcagaagagggcaatgatctgaatcttgagaagctgcactctgaagtaagcaacccagaaagagatcctcccaatccgcagaaccgaacatcctatccagacgtaccaaggtggggttactctgcccgtttgaccaagtgtatttgcgaccagtcaagggaatttcaagaagagccaaatcatccttccatcttctgaatctccccatcatagcccgatcaaggttggaattgtttttatcttcgttgcttaggatcatgttgaaatcaccaaccactagccacggacccaggcaatgagctctaacagtcgtgagctcatgcaggaattgtattttttcagaattaccttggggagcatacacacaagacaaccaccatgacacgccatcctccagccgaaaattcaccgaaacacagtgatcatcaatcctcgacccaagagaagtaacatgactcctccaagcaaccagaatacctccacttgcgccattcgagggagagaaaacgaaattgccaaagtctgaaccaaaactacgacaaaccaaccacttggtaacatccgacattttagtttcttgaatacagatcacatctgctttgacgttgtccactaaacatcgaaccacatcttgtcggaccgaactattaaggcctcgcacattccagcaaagaatttttgaaggatccattgggaaaacaaaaaagcacgaccgcagaagcaccaaggcttagaccaccactgatgaaggctcccccaacaaatcctctaggatggacatgttgagaagcaacaccaaagctttgagctacagatctaagggccgctttacaaaaaccttagcgtaatcatccagaacacttggagacaacacatcgtcatgatcagcctgcagaagacccagctccttcacaatcctcagcttgcccttctgaacacgctgagggactaacagtttc

SEQ ID NO: 140564 - DNA, 835 bp, Zea Mays
acggctggccggggtggcatccagctcaccggcggcgaggattcttactgggctgtgcttatctgacggccatggcgcacgaatcacggcgagcaacgatcaacggcgggaggccaccaacgacgagcagggggtggaatcaggatcttctgcagttaaacacttactgtaccatggggaagttcagtcaaatgaacctgacagcccaatttgaagccaagttttctctcgatttctgatgataactcataccaagctctgcagcaaagttgtaaagcaatatgccatctacaatattgccatatggtgttgccccaaaaggccactgcatctggtttgaaattgggcttgaagttcagggcatccatctgtcagtctgatcttcagacctagtcagcctgacagcctgactttgggcttaattatctccaaattattcttaacaactatgctcacaaccttaagcaaagttgttctcctatgattgagctacaaacttgatgtggtgacctagggcaaaaaccctatgattaaaaagttacaaggctccaaagttgagtcaactacactgaaattcagacttagaatgaaatctcaattagggacctttttgcaaatgaatccaaaacttagggtttggcttgtaaattcacatatgagtgacccaaatgacttaagatacttatttaacttggtttttgcactttagtccaaaagtggactaattttgcacataggtccctagggtttggctttagggttttctagggttccaattagggtttttggtaccctaggggtataaatgcaattcaactttattcttgggaccatt

SEQ ID NO: 140565 - DNA, 1792 bp, Zea Mays
tgttacaactgatatgcctggcattctgtggtgcttcattgttcagcacgagcagttgtttctttgcaggaccactgacaatacataataattcgtttgtagttttcaacttttcatggggaggtggcccatgttttagttgattaggtactgagcctgttctgtcatgtgcagctcatgtgtactttgcaggagtcatgacctcatgggacccaaccctgagatgagatgttggggatgactatgaatctatgatgggctgatgactgaccacatttgaccaattctttgcaaacatgagttctctgttagaactatatattacttatgatcaggtataaaaatagaatcctagagatatagttggtttagacctactacaacttaagtaacaaagtcctacaaggacatgtaacaattgtgttgactatatataatgaacatgggcagcaacctaagggcttaagatcttaagccgttccaactatttccacactatcaatcaagcattgctgcatgatgagatttgttgcacagttcggaatagttgaagtggctaaaacttgatataattaaaactgatttagagtcctagtactattcaatgtggcaccatctctttgccactcaaaaaggcgagcatattagcggtctttatattgggataccatttgctatataagacttataagtgttccagtggacagtagagtttgggtgttttttaccaaagaaatggaatggagtgccatttgtgacatgcagaaaaggtagcattagggaacatttggaccatgtaaggtgtattcagggggtttgaggcttagtgatgttagtagtaggtatgatgaatatatgacagatgactggtttatgttagtcttgtgtggctgctcactcagagtctacgccggaactgtttgttgcatttgcatctatgtcctgcacactcctgcacactcataggtcttgtcaccaagggctgtcttactatagcttgctcttaaggccatcattgtgaactaccgcatgcactgcacttgtcaactattggtacatccaactgttctgatataactatcttcattaatactgaatatgaaactggaatttaccacttgtttcttagtgtttgtagcatatgaatctgatcatttcctccatgtcacttttacaaggcctgctctctatttatagaatctatttgtggcaagatcagcacatgattctccattttctttatgatatatttatattcacaattttgtgtttgcttccatatatcaagattacggcagtaacacaataagctcagttagtggaagctacttttttctttaccattgctgtaaaagttgtattatcaaaggatttgaaagatgcgaaaggagacatgtcacatgctaaaattattgggtaaagcaaaaaatctggagcaactccagatgatccaaagttgtaggacagttttgatgtcagcggagtcttttgatcaatgcagctgtggaagttagtgtgtgactttgtgatcacatgttggcttcatgtatattattgtactttctgttttctgatattattagctatatatatatacgaaggtgaaatgtaaaaaggcaccggtaaaatacatagccatatgctgcaatgacatcagtaaagcattggtttttgctatacaaattcaagaggtagcagcatctccttatctctggttattgatctgatggccagaggtgcaaattcaactagcagaagctgaccagaaaattgaagcattttttgttacctc

SEQ ID NO: 140566 - DNA, 597 bp, Zea Mays
cagagattcgacgatttggaaatccacacgacacgtagccactggtatggagttaaaatcagtcttaggcgctgaggacagccattaagtctcctccgtcagaataaatctacgcgggcacggcttccgtctgcatcgtcgtctgtgtccggtcaaccgacgctcgtggagaccgctcgtgagtacctccggttagctctctcgttctctctttttccttcccattctccattcctcattcctcgactgtaatctagatccccatcctccattgtgagatttcctcgactgcaatatagatctccattccacattcccgtttcttgcagtggagcatagccgacgactgaggagactacgctaaagtcatctcctccatggatggatcagacctggacaccaacgtcgaggtcgacggatcgtccccctaggtatgtctctttgtgttggttgtgataggcgtaccagtgccatgtttaagaacatacgatttgtgttgtttcttctaccatgaagcaagtttaaccatatttgtacattcatgcatgtaccagtgctaggcatagacttgtgttccatatccttagatacatttgt

SEQ ID NO: 140567 - DNA, 1297 bp, Zea Mays
tggattttggctattttaaatgccccaaaattccctattggaactaaaaatcatgaaactatttttattaaatactgtagaaaattaggagccaagtaagattaatttggcatttttagcatttttctataaattttttggaaatcctcaaagtctagaagaaaaagaaaaaggaaaacatgctacaatgattgggctgaaactggcctgggtcggcccatttactggcgaaagcgcgcccgcgcgcgcccgcgctgctggttttgcagaaaggcccctatcggtttgaataactagaaacaagtcacgaccctattgccatgtctcactgacatgttacaaaaacatccccgagttctatttcttcaccgccggaagtccacgacggcaaacagtgaagggtcgagctccgacgagcttgtaccggtcgattcacgcaacgaccggtgctctactatggctgagactaaattcgaaccctaacaagagtttcccctcaactaatttcactaacggcgctatagcctgctctgtccacggtgaccgtatgatcaacagacattctaatgtgttcccggtgatctaaggtagcttagctcaattgagttggtcgaggagtatcaggagcaagtaagggtgctgaaacaagaaagcagagggcaagatcgaacctgaatcgagctggccacgacgaggttataccgctcggtgttctgggttgatttgggggaaatcccaaattggggagttctagtggatgattcgaggcactggttgctctgctgggtgcacaattacttagcggagcaggcgaggtcagcaatttatatgctcccccagcggtggccggtgaatttgagagatatgtgcggcggccggagaagaataaggttactggcgcggtgattcgtggcctattaccgtggcaagctcaccggcgaccaccggacgagctaacgtgagtcacggcggtgagattaacgtgccaaggcacgtggcgcaaggccgcgaagaggctatctccggcgaacctatccaaggcggccgcgacacgctcgggtacggcggccggagtaaaatagcggttgaagttcatccctgggtgatatttcttacccccgatgctatccaattgatccgagcgcgaatcaccacggcgatagcacgaatccgcgtgcggctcatcggcggcgaggggatcagaatctgatccaatctattactgtaccatgggattgttcttcagtcagcgtgacagaccgtgtttggggtggattttctcttgattttacatggc

SEQ ID NO: 140568 - DNA, 758 bp, Zea Mays
gtggggtcaccatgtcggcgctttggcccgttgtgtgctcgcgcgtctgtgcctctgttccgtgggccccgctcgccagtccctccccctccttcaaccgctcgcctacgcggaccgcgtgcacgcacgccgagattgccgtgcccacgtcgctacctagctccaaaccggcaccctgaccccctctacaagtccccgcacatccccacctccccttgcctcgctcatttcgcctctgcccactcacctgagctgcacgcacccgtttttcaagctcgccggagcgtccccatcgccaggcctcctgcgcccgaacccgccgctggtagagctcggccgccgtccgtgaccgtgctccgccaccgtcaggcacaacctcgccaccgttcccgctccacctgaggtgaatttccccgccggaccttgttttctctcccccccgttttctctgtcctgttgattagtcgccggtgatcgccagtaccggtatcgcgccgtcaaaccgagacccccctggccaaccgcaacggccctgtgccttcttcgcccacgtggagtcgccgctccagccatggcgctcgcgccgtgcgcgcgaccaaggtagacggcggtcttgacaaaggaggacccacccattagtctcccccttctttccccattctgtgtcactgcctggagggccccatccgtcagggcgcgcccacgaagtcgcctgcgcatgccctctaccgctgactagcgggcccgacccccctgac

SEQ ID NO: 140569 - DNA, 273 bp, Zea Mays
tggggaattatcgagcgatggttggggtggacatggtaaatgtgtggagcaaagcggaggttccggtgttccgcagagcgtagagaaactatcgagaaaagatgccgagcgtagacgagaacgacacgagctgagattgatggatggggtagatggagggcatacatgggatagacgaagggtagacgaggtagacggggatagcaaatgcaatcaacacgctgttcgcgagaagttgttcggtgatctcgcgaaaaaggacacgagatctgg

SEQ ID NO: 140570 - DNA, 1048 bp, Zea Mays
tttgttacacctagtgtgcattcactaggcaaaaatttcaaacaaagttgtattgatgtgacatttcatgagtgaaaccctggggtacagtgcttaaccctagattgggcttaatagagcaaacaaagcctaataggggaaacttcaaaactcattaagagatggtcataaaatgtcaccatggatgaacttaagtagcatccaaaccctagaagtatcaaaaaccctaaatagaaccctggaaaaccctagactaaaaccctagggggctaagtgcaaaactagtgcattttggacctaagtgcaaaaaccaaggcattagggtaccttaagtcatatggttcacatacttggggattcccaagtcaaaaggtgtgaattggacttatttgcaaaagggccacccttgtgctcaattggttaagtctgaaaatagtgaagtagggctgactttagggctctgtagatccaaatatattgagaatttgcctagggtcaacacatcaaacctgttgagctatcataggagaacaagtttacttaagtgactaagcacaggtgctgaacagaaattggagaaaatgtgcctaaagtttaattgtcagactgtcttaagtctgaattcagactgacagtgtgtttgagccatctttgagcttggattcgaccataatccagtcagtaattggctatggttgctgtagtaagattgtacctggatcattaggctacaactttgctacagaatgatggccttgttgccatgtaaaatcaggagaaaatccagcccaaatttgatctgtcaggctgaccgaatagaggttccaatggtacagtagcagaaaaaaatctcaggtaccgcgcatctcgccgccggcaccgatccgcgccgtgatttgtgccgtgatccggttaagcgctcgacgagcatctcctcacgacgatattcttgatccgggtaagatcaccgtggtggagggtaattgtgacaccctagtgtcacctaattaagcatgaagcatcaaattaagcatgaagcatcaaatta

SEQ ID NO: 140571 - DNA, 317 bp, Zea Mays
gaaattctgcataagagttccaactagtatcacgtgaggactagggcataaatcatcagattgctcatgccagtttcttgcttggttaagcatacattcccatgatctgtgctgagaaagttccacaaccttactatgttatttgtttattttgagatcgttcttctttctagaaactaaattatgaattttggtgtttacttatcaaaccaaagtttgttttaaaggggttttcctgccaatctgcagcagattttttgttatgtcagtatgtcactcacttcagaagtgtttttatatctttccccaattgcact

SEQ ID NO: 140572 - DNA, 411 bp, Zea Mays
agggaggacatgaaggatataattcagcgtcccatacaatcacgcttcggcatcagaaggtcttcgatcgtgaatagtgataaggctcaagcatgtctagtggccttcaacactatgtggagctatattggtaccagagacttggtccaagagaacatagccttcaaagtgtggccccttgttaatgaatgggagatgccgaaggaaactgctgctagttcaagcgaaggtggtctggtttatctgaaatatacctaccactacagaagtcagttcggcgagacagaagatgaatggcttgaagccattgacgtgactagtgaggagttgctgggggcttatacgaaggctgaagatgaagccatgaatattgcctttggtgtccgtagaaagagaaggctgaacagagta

SEQ ID NO: 140573 - DNA, 458 bp, Zea Mays
ggtctaccactgttcctttccaatcttcaggtgagtcggtctctttctctatgttgtacattttagcgaattgtctttcttctgctgatctgtctatgaccacaggattttgttgatggaatatctgcccagttgaaatcctgcagcactattgttcctaaacaagctctgtctctgatgcagtggaacccattgctgctccaaaaacagatcgatgacctaatggcgtcgaatgctggttagtgatcttatagcttccctagctgcttttattgatcaacttgttcttagtcatgcattccctttcagctgcgttgtcggatatgggccaatgatgctctgaccttgaggagaagtattctgaaagtcaagccgacttgacccagacttctgcttttttagacggtgcacgttctttgaattcctctctgaatgctcagcttgactccaaaaagatg

SEQ ID NO: 140574 - DNA, 371 bp, Zea Mays
ttttcatactcatagaagtagaaaactgaggaggctcagctatagagaacaatagaggtggtggagaaaaccagatgggacgccaaggctttgcatgtactaaaacatctctatcatccgctgctgatccgccaagtgagccgcctactctgcctcccactctagccttatcctcgcgtccatctccatacgttctctgctctcttcttctagttctagccgggcctgtaatattttacctcaatgttatggtaatgcaaagagaaggtatataacttaatgaatgacgagacacaaaagcactaacctagagttcttatatgtgatgttgtgatctatcttaccgaggtcgtatggctgggctacgctca

SEQ ID NO: 140575 - DNA, 360 bp, Zea Mays
agacacccgacacgacctaaccccgggtttagcttggttctagcgcttgcggacatggaggcagtcaaggtagagggtaccttaatggagttctaggcgcaacggatgccgcccacacgccatgcggatccacgacggcaattcggacatcggcgatgaattaccacgaccctggttgaccgccttgcccgaggagtcgttcaacacctacagcaagagacggcgatcacccagctcggtttggcgctccaattcctgacgatggcagagaatcgcgtgcagtccgccagttgccgccgcaagaattccatcccccctcacgcaatttcgtggtgtatgggcgagatggatgagagtcca

SEQ ID NO: 140576 - DNA, 524 bp, Zea Mays
cttaagtcgttgctgacttaagtcgattgctccgtaagcagggcatagtggtcaccccgagttaagtaagagtgcaggtcgaccatgaacaatatgggtattcttgaggtctctttattgatgatatatttccagtttacagagtacattgtcatcccgatagcttttgaaatacagctaggggtaaaacttcctgaggtgttctatgttccatgagtttccaatttccgtgccatccatctgagtgagacgatatgatcctggccgagtgacttctgctactatgaatggtccttcccatagaggtgacaacttatgtcatccctcccccgttagaattcggcggaggacgagatctcccactgcaaaggatcaacgtcgcatggccttatcgtggtaacgcctcaaagtttgctggtaccgtgctgattgaattactgtgtttagccgttcttcttcgagtatatcaacatcctccagcctagtagcttcggcttctgctatgctttcaaagaccaaccttg

SEQ ID NO: 140577 - DNA, 392 bp, Zea Mays
acctataaaacatgcatatttcatgaaggctcagagctctggccttggtttctgttgattcaaagttcaatatgtgtgcagtaacaagacagtacatgagcatgcaaagttgcaaaccatgtcggtgctacacctaccagtccaagcagaggcagaggagcggctgccaaccgtgcggcgcacacggcgtggacagattagctgtgcacgtagctgcaggcggaaggctggacggtagcagggggcaggggcgcagcattctctgcttgcggtggtggacgagcagacgagagcaggggagcaccggagcagaacagtgatagcgttatggcagacagacagacagacacggagccgcagaacaaagaccagcacagggatgtgcccgcaat

SEQ ID NO: 140578 - DNA, 710 bp, Zea Mays
gctatcgatgttggggtttgagtttgagcagtcactgattcttctgtctgatggggcaaggggaggtttcttgtttgcttggagacgtcatattaatgtttctcgggcaactagagtggattcttacaatgtaactgcccaattaaagcaaaatattgggcagttctggtggttaacatgtgtctatgggccccaaagttttgtttataaacttttccttcctacaagaattgaggacaattaaagaaactgccctagtccatgggtaattgttgaggatttcaatctcattcttaatgatgaggacaagagcaataacaatctaaatagagctttgatgggtcgatttcggaagttggtgaatgatttaggtcttattgatctcccctgcatggaagaaaatttacatggtccaatttgcaagactctcccactcttgttaagcttgacagagttctatgctccattgattgggaagggcttaacccaaatgcttttgttgtagagtgctgccacatatgactcagatcactacccactcattttttgtttaaatgatattgtccctagtaaaagaagatttcactttgaatcatattggccgagatcggaaggatttctagacactcgtgcatgagtactactcttcgttgttgggttgttgtttggacagatctactaccattaatgttgatgttctagggattcag

SEQ ID NO: 140579 - DNA, 324 bp, Zea Mays
ccgcgcgccggccgggagcgggatcgatcgattgccaaggtgggcaccgctcagcgcatggagatgatggagagatccagccgcccaggcctaactaaccgttcatccagcggcgattacgcgtacggacgttttaggtgcacatatttggaaatgatggagaggtaaggtagccgcatgttacggagccccagaccaaccgaacaggggaacatggccgtgccttccggaggatcttttcatcagacatgtacatacattagtggacgacctccttttcccgtccagtccagctgggtacgtactactcgatcaggaggagga

SEQ ID NO: 140580 - DNA, 453 bp, Zea Mays
ctttgcgcgccgcgcgcttatttgccaaccttgagaaatgcaccttttgcaccgaacgcgtatcgtttcttggctatgttgtcactccatagggtattgaggttgatgaggccaaggtgcatgctattcagagttggccaactccatcgacggtgatacaagtgtggagttttcttggacttgcaggattttatcgtcgtttcatgaaggattttagcaccatcgctgccccattacatgagttgaccaagaagggtgtttcatttaaatgggggtagtcacaggaggattcttttgctcttttaaaagagaagcttactcacgcgccactaccccaacttcctgactttggtaagacttttgaactcgaatgtgatgcaagtggagttggcattggtgctgttttgatgcaaggaggtaaacctgttgcatattttagtgagaaattgaatg

SEQ ID NO: 140581 - DNA, 538 bp, Zea Mays
ttggaagcgtggcagcgttttgggatcgaagatgggaggtgcgcgactgcatcttggggaccgggttgccgagctcctggtcgttcttctgtggtccgatgaccgggaccgggattgcatagatagagaggaaatttagggttagggatttcggaaaacttgagaaagagatggagcgaacaataggaggggaacaagctgcagctcaccactgtgtcgttggctaccttcctccgtggtccggccaccgggcgcagactggggcaccctccaccgtgtccgttgtgctcccccgtggcaaggaagttggcgcccctccactgcgtgtagggagcatcgtggaggcccaaggcggacctccgtgcggcaatggttggggtcgacggtgcggcggctgcgtgtgagagaaggtgtagcgtgtgaggcgaggagatccaaacacgtgcgaggaccgaggaagggcaggggcgttgctggagagggagcggttgctgtgtgacgctcgtgcggaggagaggatgaggaggagcgaagcacg

SEQ ID NO: 140582 - DNA, 393 bp, Zea Mays
cgatagcagaccagggagctcctgcaaggttgccggtgttcgtgcgtggcctggattggagctattggcgctcgggtcgccggtaattgctcactggtgcttcaccaccgccatgggtccgccgcgcaccatagtcacgcttgcgcgatccataatcgttggtgagaactccactcctaccttcgccatatccttctcagtgtgtagcgctgtctaattttgggtatggggtagtggctggctgaattgcgcgccgctagcgagctatccgccgcgtgaccagagcgtcgccgccgtgctcgtcgtctgttgatgcgcgcgatctcggtcgtcgatccgccgttggatggccgggattagaagccaaataacgattcggccgaggcatatagc

SEQ ID NO: 140583 - DNA, 411 bp, Zea Mays
atgcaagctgcatcggtttcaggcatttctgacttaagttgattgctatttgagagtttgtttgcaagtggacgaacacagaagctttattgataatgagatctcttgtttacaatgtgtagcttgccgactggagtttatggtatcactacgggtagaatctcctgagatgctcaatattccatgagtttcctacttgagttccatccatctggctaagccagtagcacccaggccgagtgacctctgtaatgatgaaaggtccttcccacggtggtgatagtttgtgtcgtccttctcctaccaatatgcggcagagtaccaggtctcctactgcaaaggactaggtcaggcccaaatatttccctctctccagcttgtgaccaatttagcggtgtcctacaccttctc

SEQ ID NO: 140584 - DNA, 517 bp, Zea Mays
atttgggactagatagtcttttcctccttaagtcggtatcgaccttcgtcttcatcataatattaagccgaagctccttcagtcatgacttccgctcttgttcgcattatcttcaagttatatcttcatgtcgtgtatgtctctgtagtattttttcgaaggtgtttttcccttgaggaccttcagcgggaaagaagacccccaacagtatctttgctcccttcagctctatactcaatttctcattctaaagctgagcttcggcaagtgagccctcggttgagctgagcaaggagtcgttttccttcaacgaattttcaagttcttcaatccttttctccaagccacttataacaaactcgttttttctgtcttcatcgtcttgctgcattttcagtgccttgctcggcagtaaactctgagtcaaaagacgaagtcaagttagaccttcattaatgaaatgctaaaactaacccgacaaaggaaaaacagtagaaaaatcataccttaaaatttg

SEQ ID NO: 140585 - DNA, 420 bp, Zea Mays
tgaccgcaacccaggattgtcatagagcggcgaaatcccctggggaagcatcaaggattcagggataaaagcctcgccggtgacccccctcactaaaatttccaactcctcccaagtcagatcggtcccaggcccacagtggatcctaccaatgtcgctggggccggtaaaccagcaactcagacgtggcctcccctgcagcggcatgactcggcgcttcaagaaatccctaagtacgtgcattgaggtcaagcctccaaccgccagttccctaatcctgtccaagatgggcccgaactccggcacgaggcatggtttcaccctccattgtttccgctcgaggctgggcccgtcactcggaagagcaaggaggtcgctggcctcagcgctggcgatcacccagtcacttcgccagttctc

SEQ ID NO: 140586 - DNA, 379 bp, Zea Mays
gtcttcgtcaggcccggcggttttcactcaattattcagcgacactgattgggaaatttcagagtagcggataaactcaactgaaagcccccgtttccttttttttccagcttccaacaaatcttttcttttcttttgtttcccctgggggagaagatctcatctgcatgcattattgcattcctgcggtccaattctaccagactaccttgtaccttctcttctatgacctcttcaccagaagttctctgaaaccacgatgaaagagatgccccttcgttcatttacttcaccaacataggtgcatctcatttggtgttaattctcgcattatctttcgtcccgttgaccagctttgcacttggcactatcctaatct

SEQ ID NO: 140587 - DNA, 436 bp, Zea Mays
atttctcaattgtattagtatattgatttctagatgtctacaagtaacacaataatagctcaaagttatatttacccagctagtctatacataaacaaatatcatgttttagataagttcagaaaattttccataccttactcttctcctgattgttagaaagtcgataaataatggtactagttcaacctttcatgcactccctaagaaactgagacccggatacaggttggaagcgcacccctagtgttcgccgatcggaggcaacaagaagaggaaaccaagaaacttaccggctgatgattggcttctccacctctgatttatgtcgttgtgctgctaggaactatgtagggaatgaagagttgtgccatgagcccttcgatccagaatatccacgccaccaggaatttcgatgaagggaagaggagctatg

SEQ ID NO: 140588 - DNA, 526 bp, Zea Mays
atttggtctaaaaaatgttggtgctacttattagagggctatgaatttgatctttcacgagttgttgggaaacactgtggaagtctacattgatgatatcgtagtcaaatcggctgagtttagttctcatatagctgatttgcgctaaacctttgataaaatgcgtcggtatggtctaaaaatgaatccacataaatgtgcttttgtagtatcagctggtaagttcttaggattcatcattcatgaacatggtatacagatagaccctgaccaaattaaatccattcggaatgtgggacctccgacatgtaagctaaaaatgcagaagttcctcggcaaggtaaattatttacgcatgtttatttctaatctagccgagaagatcaatgccttcactcctatccttcggcttaaaaatgatgccgaattcacctggggcagaacaacaagaagcatttgaccttattagaagatatttgtcttcggctcccgtattaaaagcaccataggcaggagtaccgttcag

SEQ ID NO: 140589 - DNA, 395 bp, Zea Mays
ggcttatctaaagtatacctttcggttcaaaagccaatttgatgagacaaatgatgattggttggacgctatagaggaaacaagtgatgaactgcttggagcatactcgagggcaaaagatgaagttatgacagctgccttcggagctcgcggcaaaaataggcttaatagagtgtttggtgttattgggtttgtttacccagattactgctttctagcccaaaagcaagggagaaaaaggaaagtcgttgcttcgacatctactagtgcaccgaagacgaagaaaatcaaggtcttgacacgtaaaccgaggcatattgagatggccgatgtgccgaagttaattgaaagggcggaaactaccccctagcaacagagactgctcctgctatgcc

SEQ ID NO: 140590 - DNA, 333 bp, Zea Mays
tcgagaagcattttcttgatggccgtgaaaattttaccgttggcgcgctccacgacgccgttggattgtgggtgatatactgaggcgaaggcaagcttggtgccaattgagaagcagaagtctttgaagtcctggctatcaaattgtttgccattgtcaactgtgagctcggacgggactccgaatcggcaaacaatgttttgccagaagaatttctgggcagtcttcgatgttatcgtggatattgcccttgcctcgatccacttggtaaaatactcgacgacgacgaaggtgaacttgaggttcccttgggccatgggtagtggcccgaca

SEQ ID NO: 140591 - DNA, 431 bp, Zea Mays
atacaacacgacgaaaatagtacgtgcagcccaaaccaacaactataaatttcagctcctatttacttcaagaatcgtcgcgttctatagacttgaattattctaacactttgacatttgttagagttaaataaccaagtgagaaccaacaagtaaacttaccaatttttatccgagttattttgtacgctagaatcaccacacacaattaacaaacacatccaccaaaataatcggacccgatacatatacgtgtatcgatgcgccccttacacactagtttgcattttaacttagacatcacttgagcactactaattatcatccgcgaccataaccatacgcatttagactacaacaagcaattcatcgtgaccacgagcttaaccaaaaccatctaacaagtcggctaaccagagcaacaatatagg

SEQ ID NO: 140592 - DNA, 464 bp, Zea Mays
ggaattgttaaaatttgcaatgaaacctgtcatttatagaataaaagacgcattcgagaagaatgcttaagcgaggtacaaggttttcagagtttacatgtgcgcaccagcgactaataaaacctttggcaagagcagagaaacggtggcgccatatagaaagatcattgacaaccctagctaggatcacacgtacacggggttcctcattttcgaagatgagattgttcctattctcccacagcctctagagaatagtgccaaggatattctaaagatggcgtcatgagggatgataggaggaaagagggggaatccttcaacgccattaatcctaaagcccgccaatctccaggagatgctggccctggaacaagaaacgaagacgtgcaacctgtcttccacattaccgccacagcgtgaacacttcccatcaggcaggatattcttcctgcgcaggttct

SEQ ID NO: 140593 - DNA, 476 bp, Zea Mays
attctattgggatggggaccgacctcctgcttctgggcctcatagcccttgtggtctcatctgttgggtcatgcttctaggccttgtagcctccatggagtcatctgccgaggcgtgcgtcgtcgtacctctggtgtggcgtcgtctcatggccgccttcctgtagctactttgatttggacgtgacggtgcctggcaggttctatcgattcaggtaaaggagtggtttaaggatctcttcagtataacttcatcttccatcatcctcctagcgtcatctttcattacgtgtagacgcatgcctggtacggtgtattgccccgtccctttggtgtatgggtcaatgcagagattcctatgacgaggtctctacgaccgggatcgttcggtcccactaattagcaaggatacatatccgtcatcgtgcctgacatagaccccttcagcaccgcttccatagtccgagcctggctcgg

SEQ ID NO: 140594 - DNA, 392 bp, Zea Mays
tgggcgtggttgtccaatttatagagaaggagaggggaggggagaggagaagagccggcgaacggcgttgcagcagtgtggaggagaaggggcttagatgtgggcgctccactgcacttagtcaagcaggcggtgtgaatccgggcggtcggcggatgaacttccaggcgacggctgtaatacctaatacccaggagacgaacgaatgaagaatttggggagaagaggaataggccaggtgggtcccatgtgtcatagagaaagaaataaaggaaaaggcccacacgtcattgtaaggaagtgggaatgcggatgagaggcccattggccaatacctgccaaaagggtcgagagactcgtttattttttttgtgtgcgtgagtgcatgtaca

SEQ ID NO: 140595 - DNA, 785 bp, Zea Mays
gttaagaacaatcggacacctcctacatgaaacaactttggacaactaagtactaaggcctcgtttggttagagggactgtcaagggcgttgaactcttggctggctggacagcggctatggagcttgtagccgtcggccgtcatctccggtgaggttattcccctctaccgtaggcttagagagatagagagaaatatggctaataatctgcttcccttcattgtcacggttacaagaatatataaggagatagcccaactaacgggagtaacaaactcctgaaattatggaactgataaatcgaaagggaaactaataatatctttccgccttatccactcgacctgctcaagccagccgtgcgcgtgtcgcccctggccgcgcgttccgctgctcggcgaatgtctctggcccggcgcctcctggtatagacttgtccccacatgacatctccccctccgtcgagacccagctcgtccccgagctggaacgctggatgcttggcgcggaatgtgtcaacgtcctcccaggtggccgacgcagccgattcacctttccactggaccaacacttggcgcacaccacgtgcaagacgatagtgcaccgcccgttccggctccgggacaatcgcgccatggtgaatcgtcggcagaggtggaggtgttgccggcggtgtcccatggaacttcttgagaaggctgacatggaacacgtcatgcaggcgggctccggccggcaagtcgagacggacgacgacgtcgtgggtcaactcggtgacgcggt

SEQ ID NO: 140596 - DNA, 288 bp, Zea Mays
cttttaatccctcacaggtatgttatctacctaggaagcgggagatcatctaccactatgtttaagcccatcttcccatttctagcatatttatatttttccattttttgtttggtacagcttatcgtccgttttctagcacatgtttatttttcacaatttatttatggtcagatgaatcaagagtagcatactgatgattagcatgtattattgatactcatgattagaattggtcctttgcatttaccagaaaattttagcagattggttcttaatattgacgag

SEQ ID NO: 140597 - DNA, 393 bp, Zea Mays
aaagaccgaggctcaccatcgtcgcatgcaagatgcaactctcctgccagaatgcgagacgcagggcccgacaccgacgggtcgatgagaagaccctccacccttcgataccgcaacggctcgccgtcgtagcacgcgtcgacgcgctcctcgtcgcgggagagcggggtcacgagctccactgggtcgtgctcgacacgagctggtgtcggagaggacgttcccggagagggtaccgtcggtgctggagtacgtggtggcgaagagctcgttgtagccggagtcgtggctggagtgcgtggtggtgaagagctcgttgtagccagagctggagagcgtggcgctggagtcggtggagacttgggggctggggtagacctgctcggagaagag

SEQ ID NO: 140598 - DNA, 559 bp, Zea Mays
ctcatctgcgcggggagtgttcttcgtgcccgcgaccccctcctcacgaagtctctgaagaaatggcgttccacagagttatcccgctccattcctccctcacggttttgtggcgcaacaagttgatcaccgggaaatcatggtacacactgtcacccgtccccagccctccgctcatgaagattggggcatcgttcttgtgcagccgctgccagaacacgaggttaattttgacatatttgatgacattattcgtgagtaccttgtgggggttcgacacgttcaggtcaggagcattcagcgctcccatttgggtcaggcccttttgagattcagatttgcttttgacagagataatcttgtggctatgggcccgcagcaagcccttggtttttctttcactgttattaggcacaatgaggcttggaatcagcgtgcgttgtactttaaccatgagtgttggcttctcctactcggtttccctttggatttctggacccatgagcatatccagaatgcagtcgggtcttttggtagggtgctcatgtgggaccctgac

SEQ ID NO: 140599 - DNA, 296 bp, Zea Mays
catcaacctcttaatgcccagtgatatggcaatgttcaaccagtggatcaaagcttcatattctgctgcattattggatgctgagaataacaactgaagagcatatttgagttgttcacctccagatgcaatgaagaggatctctgcgcctaccccctgcagcttcagcgagccatcgaaatacatctgccatacttctatagtctccgggttatctggtacttgttgctcggtccactctgatacgaagtcaactagtgattgagtctttattgcagtacgaggccgaaactcaa

SEQ ID NO: 140600 - DNA, 592 bp, Zea Mays
accgagctccggcgagcctacaccggccgattcacgcaacgactggtgttctactttggcttagacctaattcaagcactaacaagtgtttcccctcaattaatttcattaacggagctctaacacgctgtgtccatggtgacagcggacaccacgagcaattgaacgcgttcccggcgatctaaggggtcctagtccaattggcggggtcggggagcatcaggagaacctaaggatgctgagacaagagagcagggagcatgaacagacctggaatacgttgaccacggtgagggctctaccatggtgacggaaatagaattgggggaatgggaaattggagagttgtggtggctaatcggtggtaggagcgggtgctcaggcttggtgacgacccaacgcagcagaccgtgccatcaatttattgtgtgcttgagcggtggccagtgaatttgatagagatgtgcgacggccggaaagtagggatgagtcaccggcgcgttttatcgtagcactcaccggctgaggggctacggcggttatcggcgagctggtgcggctagtagcaacgtggttaaaggcctggggcgtg

SEQ ID NO: 140601 - DNA, 743 bp, Zea Mays
cgcgcctggccgggccgcacgcctggccgggccgcaaggagagggggaggggagagaagagaaaatgtgttttttccatttctaatatatttgctaaatgtatgatttcacaatttcactcaaccaaaataaatgcatggaccggcatggtgcaacaaacaaaagaaaatatttctagggtttacttacacaaggtctcgagctaaatctcgctagaactttgaaaatgaacaaggcttagcgagaagaaaaagaaagagtaaaggtaatacccgagtttggtgagtgctagagaaagaaaaaattcaactctcgaattcggggcgttatagacatacaaccccgtgtcattcgagtcacgagcttgcgtgctcctgtcggtaccggacatgaagaaagcctcagcgggttgcttcaccaccaagaacctcacaacgacagtgagcatcttccaatgtgccttgatgttgaatgcaattagcctcgccacatagcgcatccgaccggtgctgagcctagacgccatgctcgacacgatgaggagcagctgcttcacatactcgtagtcggtggctagtttctactcttcgttggcatcattgtcgatgtccgcctgctgctcctcgatttcgtagcgatcttcgtggtgagtgtcgtgagcgtcgttagcctctgccgcatcatcatcgtttgacttcagcacgagaagatagtagagcacctaaaataggtgcatgttcttg

SEQ ID NO: 140602 - DNA, 709 bp, Zea Mays
atgccctatccgaccatccaatgagtacactcacggaccattgtgtcatggtctcatggctctcaatgactacaatgccaatactatgttagcactagttgttcttgatagttggctccatgctttatggcgtatagtatgacacctatcatcataccagtctgacgcaccaattccttctctagaacctttttatccaatgccgaactcaacgttgatggtttgatgatctcgtgtagggacggtccgatgctcctattgattacgaatagtgggaatgtatgctctgatgacatttctattatgggtcaaacacctcggtctgatgctcctgctcttctaccgaccagagtagatattgttgtatgttctgatgccccttagaatggtttgacgcctcgatttgacgctttatgccttctctttgttggcgccgactactgtgcaagcgggagaaaggtgcaagcgtgaaagcgcgcgatgtgagcctttagatgaagatccaactgtagatgcatcttttgcatttaaatccccccgcggcgtaccagccttcacaaaaaccaccctgcttttacccaccgcagcacttcctgttcccatcctgccgccatcatagcccctgacacgcgcatgcctacagtactgcccactaccgtttgcgtggagacatgaacaaggagcatgctagctcatgtacgcatgtcac

SEQ ID NO: 140603 - DNA, 336 bp, Zea Mays
ggagggtgccttggaggcgggcgctggggcattcttggggccattcaccgagttggagtaagtaggtcctgatgccttcaactgggggcagttattcttgaagtgattggggtctccgtagtgccaacaggcattagctggtggttggttgcttgcgactgagggggcctgaaaggagctctgactctgctgactgaaacatgacggagtgggtccagctagcttattgaagcttggtcccttgggtggaaacccaaaggatcgacttctctggtgccggtcttgctactgagctcggaggacttggaatttcctcttgaggtgacctttttcttc

SEQ ID NO: 140604 - DNA, 704 bp, Zea Mays
cgtcacccaaccaaacgtgctagctactccgtgtatagtgctaattaattagggtgtggccggtggtcattcttgcgttgcgttgcgttacgtgtactcatgactctgtcgccatgacatatactacggctgcttctctgacgatctttttgcctgtcatgtcgtcaattcgtgatcagtgcgtggcgtaacaagattgactgcttcggattctgcatggatacgcacgtacgtgcgtgcttgctgcacatacagagtatgtagaaaacctagttaggcacctaactgaaaactgattgatgttctactcccagctccctaattaactaggtatagccatcaaaggctaccgaattagctggagtttttgcctacaattacggcgtctccagcaagccatttaaatcggtagttcacgtgtggaggaaacacatatgaaagaaaaatagataagccatagggcaatcaaacatgtcagagcatttgctgcagagtgagtgggcacttgggcaattcacttgaactaccaatcacgagtgacgcaggccgaccatacatgcgtcatttttctcctcgtgctttatttgtctatacttatggctgtaatcaatcactaccggacacagttgttttgtctagtgctacaggcactcgacaaagtcaaaatacacttcacaaacactttactgagtgttacacactcg

SEQ ID NO: 140605 - DNA, 646 bp, Zea Mays
cacgcttggatcctgcgaaaggaactagggcttcacttggattacctcgattgtaactcaccaagcgccattgctagcccatcgaggaaagtgtggtacaactcacctcccctcatttccacaaaggggatgtgtaggggagagttagattaaaaagatgggaggacccccaaacggatctctgcattgagcaaaggctcgagggcttgccccacacgagtatggtagatgggtggaagccgcacgaaaagcaccccataaccaagaaaaatcctcagacaatctaggatcagaaggaccaaaaccccatgcacgttgcaataccgaaatggtcaggccataaacagagccatggaaggtcatggattatttcctctactaacactaccccaagtatagggttcacgacgacatcaaaatcacatggtaaaaggtctagatccgtcgtagtcgatccgtcaggcagaccgatggcatcatagaggttaacaccaaagtatagctatgaaatggcaaggaccactactgcaccttggtgaacctcgaactccatggccttgtagacacgatccgggatgtcaaggaggcgcaaatcgttattcctcccacgagcacaaacgaaccttatagcctgattcacgcacac

SEQ ID NO: 140606 - DNA, 411 bp, Zea Mays
gccttacggcgatatggaaaattaatattacgcccgcgatctacctagcccatgcatgcatgcatattgttgtgtgtgcttttttgtgcagctgcaggatccaaggacacgtgtgtacccaaagctagctagctctctcgactctggaaggtggaaataaacgggagctgacgcgtgtcatgatcgtcgagcaaagagccctgcgcgtacgtacgtacgtacaccgctcgctctcgtccaagagacgtccatgcatgcgatagaatgtagtatagtacgtgtgctacgtacgagctaggtactccaatttgaatcgatcctcagtgcatgtgcgtatacatgaacgtatgtaatggtgcacgtagtatatatatgtcctgctgagatctcgatcgataccaaaaacgcgtg

SEQ ID NO: 140607 - DNA, 605 bp, Zea Mays
gttgtttcctcttgtcacccctggtgttcctcctacccttatcgtctttctttcccgccatcggagtttctagaagaggagaagaggataggaggaaacaagaagtatgtgcaagtgaaggagtttgcggcacacagttggtctatttaaagaaatgaaacagtacctctttgtattccggtcgtacaacaaacagtcgccagccttcaagagtcgtttggattccaagaaattgcatgcttctgtcaccctttggcgtaacacaacaccaacacctcaaacaactattccgtggacaagacaacgtacacacgcattgggcacacccattgagtgcacagattagattttctagaaaacacaatatatgaaatatcaacgacagtcctacaatatgacaaactcaagatcgatagaagtttactggtcaaacctgagtcaaccagacctatatcagttgaattcagtcggtagccttagcaagcctggccagacatgccctgactagagttcagtcagccaggccatagtcggttgacccttagtcggccaaaccaccctcaagacaaagttagttggctagatgccgtcagaccagaagcatg

SEQ ID NO: 140608 - DNA, 702 bp, Zea Mays
cgccgacatctgggccccgcatgccagccattgtgccgcgcccgcatctgcttctttggccaccaatccgtgggtcccatccgtcaggatcttcatccccctctctgcgcgctccgtgaacggaatcccgcgcatggcggcggtactgcctcaccggccgtgcgaaatcactgggggaatcggcctctgctgcaccgaattcgtctgcgcacccagtaccacttcctggtgggtcccacaggtcgggccggttcttctccctaacagattccccgctatcctcggtggtcagctccctcaacccagcctgccgccgcgttttcttctctgctgaccgcaacggattcttccccaaatcgcgctgtccgtggaaatcggctctcggtttccgatctcgtccccgccactcgactatataacgcacccttgatagcaccgagccacctcgtcgccatggccggagagtagacatagaccgtgggagggagaattgccgccatggacctccatgcccgccgtcagcgaggcctcagtgtagactctggggcttcgtataatcgctggggttgcgcccgtggccgagacaaggaggttcagccactgtgacaatcccaattgctcgtcggtgttcgtgtcgacgcatccgaaaacgctgtgctcgtgggcagctcaccgctccatcttcacccaggtaaatagcgc

SEQ ID NO: 140609 - DNA, 708 bp, Zea Mays
caacagcagggacgccgaggccttgtcgacggcgtgtggtgctgcgaactctaggagtcggatctgggagcggttgagagtttgcggtgggtggccacggcgctggcgaactgagcagcaagcaacgagcaagggagcacgcggcgtggggaatctagtggtggtcttctccggcgacgagggggtgcggaagccgggtcggctgcggcgcgagctcgctggacggacggaggaaggtgaacggcggcagcgtgcgtacagactacataggagcggcatgacacaggtgagtgcgagagaacgagcagccggggtggggaaagaggtgagcccggccatggcttttatagccgaggaggagggagcgaaggggcgtcggattgaagagcatcaagaccattaatggtgctctaactgtgtgggggaagaaacggtcgtgagtaacgacatggcgtgatggagaggcgaatggtcatgggggcacagctgtagttctctactgcagcagatgggcaggcgcggacaggggaggcaaggaggccgagtggtgcacgagcgacgacggcgcaacgttactggtgagcagacacacggatgaacacgagctggagaagcatcacgtgaggaagaagaaagaaatgacacttagatgtcggccctacttgtaagagagagaagagagggagcgttaggaacacgggatgggca

SEQ ID NO: 140610 - DNA, 642 bp, Zea Mays
tgtcattcaaggtttggactaagtctaactttttaaagttttactagatttatagaaaatactatcgacatttacatctccaaatagatttattatgagagtatattccataattcatctaatggtatttgctacaacttataaatattatttttgggggttatttggtgttttttgcccctgttgtataatgcaattgtgattatacccctacttttctaactgtgattttactctcgcgatcatgtttttgaagctttcgtttgcccctagtttgtactggcacttggtactgccgcattaaacgaaaaaattagaaatcgaaattagggccacacaaaaagaccaaagtaccttatatcctttgacccatgccttctctcctgtacccgttcacctagtattgatgcaaaatcctcaccctaacaagaagcggtgatgcgtcatgcgtagggatgcaagcaaaaaggttgacaccgcagaacaaggttggtttcaacgggaggtgttaccgaacgcgttagtggtgtgcgggacgaccaatatcgattgctgcgttggacggttcggtcgttatcgacttgaaccggtcggtaacggttgtctttagtgacgtcgagccttttgatttgtccatgcgcg

SEQ ID NO: 140611 - DNA, 702 bp, Zea Mays
tgattatcctcctcagtaagcagccactggtaaccttctgtgtctagggttcgtgggaggtcgtcggctatctgtgccagtactccaacttcactcggtgtgtttagtgctcgagcaaaatcgaggtacaggtttcgagcgaggagagggttctcttgccgaaggctagcatcttatctggctagctctcgctcccgatcttgagcctgtcggcgatcatggcgacgggagttatgcctttctcggtgcactcgttcgtcgggagtttctccaacctccgagtcttcgtctcaggacacgggctacgctggatctcgttccccggcttcatgatgtcactgcacgttccgacgtctatttcttcatcgccgagcatcacattggggggttcctccccttgcatggtaggctcatcgtcgtagatgggcgctgactccaatctcccctggatgaagaggatgtcagggtagaaaggagccggcgcgacggtgttcttcttctcgtcctcctttgagggcggaggtactggaaaagtggcttaacatgttctccttccctgactcggaatttccttattccgagtgatccgtgtccactccttagtgggcgaggtggacaacagagtttttgaggtaagagaaacctcgaccgaccgatctttcttctcccgagggctcctgaacctcggtccgcaagggatca

SEQ ID NO: 140612 - DNA, 1197 bp, Zea Mays
cggatgaagagcgacggcgaggtcgccaagctgtggaacgggatgtcgcgctccgtgcggctcaccaaggtggcgttcgtggacagggccgtcgaggaggtgaaccgctactacaactcgcggtggcgcgtcaagacgaagcggttcatgcgcaagtacgtgttcagctcgtggcagctgctcacgttcctcgccgccatcgtgatgctgctgctcaccacgctgcaggccttctgctccgtttacacgtgctcccgctggttcggcacggtgacggtcgcgacggcagagtgattattgctgatcagattcttgcgcgatcgcgacatgatgtgggtgggttcggtctggctggataatgtgatcggggatgttcttttgtgttggttgctaaatgttctgatgtgtaaagtgtgattccttgcttgcgaattgtgactggtgagattaataaaacttgcgcattcgcgccatttgtttgagattgtctttattgttgtttctatgtaatatgataaccagaacacatctactgtactacagctacttcaaatcaggcgctgctatcctcggaaagacaattggtttaagctcgcaggaggttgtgccctgcgggctgtggacagtgttaaatccaacagaatctttaggagtagaccagtggggtaatatgtgtctttggagtaatttcgggttcctaactactagatcgaaacagtgttagattgttgccgtcagtaggaagccaggcgtggtggaggctatggaatctggaaaccatcaggttcgttgatgaagatctgcgctaaggtagctacggtcggtgcagcgaggttggcaacaacgccgacggcggtgtcttcgtgtgccctctagctctcagatcagtgttagggtttgtcggtgaggaatatgactctagtgaactatgtcacctgagtcatcggccccacccttttatttatagcgcagtgtgatagggacccaccaaccatgtacgattgggcgcccccgatcacggcacgatcaaagtcccaagatgactgttgggtctatcttggtagagatcaatccaatattctctcccttgatctcatatctaacttttaactttaactttagcattttactttacttgtgccatcacagataagtgcatagagcatgtttcatcagcacggtcaatcatcgatagat

SEQ ID NO: 140613 - DNA, 652 bp, Zea Mays
ctttgacctctgccactccttgccataccgtgtggttcatggcaactgaattatttgtgaactttggggggtcaaactctggtccagccagccaactcaactcgtgggcatggtctgcccaagggaaagcatatatgatagtgagtttgacttccaaaaatccggtttctttccagattgcaattattgtacactcgcaggtactagtagattaattaacatcttgactactattactactgactaaaacaaattaaagcatacatatgataaatgcaactctgtctgtgacactagtgccttcttgtatcacttataggaaacatccttcaacttgatagaccttcaacttgacaaaaagacgggagctgtgtgtgtgtgtgagagagagagagaaaccatggtccaagaaagttgagtttgactagtatgacagctgacagtaacactaacacacaccaaccaatcttgtagagaatcgtatcctcgatcttggagcaatcatgaggcagtaacataccaagacaatgaagcatgtgagcacgatcgatggtgaagctgacaaagcaactaattaccactcacaaaccacgtcgcatttttgcatatgctgattggctgcttctgatcccttccacttcgaacagtgagc

SEQ ID NO: 140614 - DNA, 554 bp, Zea Mays
atgttatttaattcaaattttatttaaattcgaataggaaaaccagtttgcgctgagacccctggttttctttattgtttctattacaactaggtcctcaaggcactattcatccgggtgactgacaatgcgaaaaaccccttaagttataccctaatctaacccgcggtccttcccctaatggaacaatacccgcggcagagaaaagggtggcggggcttaccggcggcgagatagctctagcaaggtggtcgatggcgtagggaaggtggcggaggtgatcggagttggtgggtccacgtgcgcaggcgtgggagttcgtcggcggcgaggattccggcctaaccacggtgacatagcacaatccagtgagtcgggaagcttcacgggtggtcagggaggtcgtgggtgcaaggaatcgaagaatggttcacctggtagctcggtctatgtgcagcagcggtcggccaaagtccggcgatggtgatctcgctgttccggtgaggcaggtatcgatccttgcttggggaagcttcacggctccacggggaagc

SEQ ID NO: 140615 - DNA, 421 bp, Zea Mays
caacctctaagcaccttttgaccggtaaaacaaaaaaacctattgttatacctttgccttgagcattcaattccatctcctcaaatgatgaacaatgggcatccataagtgtagccaaccatgataccttttaccatttgttcatagcatgaagttcctccaccatcatcatcaagcctcttgattaatagcccagatcaacacatggcttaataattctataatgatatgatccactccatgttatcacatggccttcttggttcatcaatctcaacatagcttgctcttcaccgttgctttatgtccatcagtgctaagcccttgctcttgcttcaccaccacgcggtccctcacacatgagcctttgacttgcccttcacactagccactcagtccatcgaagcaaagccatatctct

SEQ ID NO: 140616 - DNA, 674 bp, Zea Mays
cccaaacagggcatatcaaaatttaagagttggagaccaaatgacaccgggcaagttcaaggaccgtttgtgaaattatatttcacaagtaaaatagtgatttttcacctaaactaaatccagattcacatatccatggaaagtagataatgaactgatctaccaaaagaactacaggttgagagagagtcgaagcattgtaagccagttattgttagtagcaaaataaacagcaatgaacagaacaacctttacttttttagaaaataggttagcctgctttattgatcataaaacattcacaaatgttaatttccaagcataacagcacgtctgccacaaaacaatgcctaaaggccgatgctgtcaattataacagaagacaagtcagaacaacttttatgccaatcaaccttaagctccaaggaattgcaaacaggatgcaaccacaaacataaagttaacaacaaaaaaacatataatttcctcacccagtaaaaaagcacaagtgcatgctacacctatgcagcactaacaaaccacgggttgtgctcaaaactgagaaacaattgtcagtgtcagcagattgcatagaaggccaagaaaagcagcagatgaccagtctggaagtacaaaagcttgttgaaacccactggatggtagtatcttacccg

SEQ ID NO: 140617 - DNA, 606 bp, Zea Mays
tgagttcatcatcaatgaatttgaagatctctttctcagtgaagcaaaccattaaatcattcaaccaatcatcttcaatcttgttatgcaattctctcttaattatattaatagctaaaaatgttctctcaacacatgccgttgacacaagtaataatagagccaactcaattagcttgtagaagagtattaataatcatcaacagaccaactacttatgaacttacctaatccagttcagttatgcaaaattgcaaatctagcacaggcgtacaacttgtctgcttggttagtgcttaccttcctgaagatctggactgcttgttgatgagagcagtgatagggagcagcggcgcctgaggaaagggtgcgcgcctacgctgcgccgatcagaagacagaaggaagatggttggacgttggggccgcaggggcatgggcaacgttgcgccgggctaggacaggggcagtcacacgagtcgccggcgccgccgtgcctgggctggggttccacgcctggacctcgacgggcacaaggccacaccaaacgccacatcacacgggaagaacgaagaaaggaaccgtggcggcttgacagagaacggac

SEQ ID NO: 140618 - DNA, 401 bp, Zea Mays
gatgggacgttaacctccatcgatcatggcaactgcgatggcactgggtctgggctgcatgcatggcggccctgcgacctctcgtcgctaattacgcgagaaacacgctaaaacctccagagcagacaaagacaacggagagcgagagcttggtcggagtccatatccgatccgaacgcgagcgtccggactgtgttggcgctgtgcctgtgctgtcaggaaaaggatttggacgactccgcaacaacgccagtaccgaagcgatgtgccgccttttctcttacgtactactacttacttgcttagagaccagaccaaccacaaagtgcttgttatcaaacagaacacaaaagaaaggccgagtctttccattcagtttgcaggatggctcggtatgtctg

SEQ ID NO: 140619 - DNA, 321 bp, Zea Mays
ggtcgacatgcgcttgcgatactatcctcggccgcgaggtgatcgccggaccgccacggctataaatagccattaggttcacggcgaggctcggtcatcacacacaccagcgacttaaatcaaagtcgaatacgcactgccctctccaccttcgcccaaatcgattacgcatggtgaaagcacagcctcttacggtcctatagccccgatcccatctcccaattttgcccagagccgccgcgacacagttttcccctttctctgtctccggcgaacgtaaagctctgtgctccgtggccagccctctctggtaaggccctg

SEQ ID NO: 140620 - DNA, 279 bp, Zea Mays
gaagacgggctacatgaaaattttggttgttataacttcgcgtatcgcaaggatacaaaggctccggtcctcaactatcgcaccaagtggccaactagctggaagagtgagtggttttatattaaggctgatgagaagaaaagagggaaactgatgacgatggtgatgagccctctatccttaagctttgggatgaccagacccttgtgcaacatgaagccagggtcagcatgtccgctagccacaacagaattcagagtggtggctgaacaaatcagc

SEQ ID NO: 140621 - DNA, 706 bp, Zea Mays
acagcaacaggaggcttgagggaggctagaacactaatcaaagaagcttgaactgacctacagagggctggccacggcgaagtgtttacggtggcgtggaaaacagatttggggggaatgcgaaattgggaggctctggtggatgatcagaggtgcaagctggtgcaatgagtgcataataacctagcggagctcactagggcagcaatttatagactccatcggcagtggcatccaatttgaagaaggcgcgctggcggccgaagagagaggaagtgcactggcacgggttatcatggctttcaccgtgacaaagcctccggcgatggacagacttactactacggttcactgcgacgtgttaaagctcctaggaacgtggcgcatggacggtaagcggccaacgccggcaaggatcatctcgaccgaccgcagaccaagtgggtacggtgaactatctagtgattgggtccgagccaatccgagcgccaagatcttttactcccctcggttatccactttgtgctgagcacgaattgcggcgatcggcgcgaatccaggcgcggggtcaccggcggcgagttcaatgaactcggattcttcttcaggttactgtaccatcagaactccattcagagcgcctgacagagcatgtttgagagcgatttactccaaaaatcgttcagcgcctggtcaagcttggtat

SEQ ID NO: 140622 - DNA, 441 bp, Zea Mays
agggaatcggaaaggcagaacagggaatggtggcagaacacggaatgggcagaacaaggaatggcatactacaattgcagccttaatatataagataaaacctaatcctgaatctcttaattttaaattaggtctaaaatttaagtaccgtggactcatggtacaactacaaagttcagggaaatgtattgtggcgcgcgtgggcctatgtcattgtttgtttcggcttcaggttatattcttgttgttagagtctacttcttgcagccaaacgtttcccttctcagttttcttttgtgagaatcgtttcagtgaaaattgtccaaatcaacgtgaatgcagaatgtgtcgaattgtcacgacaagaggaattcgtcgcttcctaaaccgtaaactgtctaaaacctacaaatttacatgccattcatcacatgaatcata

SEQ ID NO: 140623 - DNA, 536 bp, Zea Mays
tgggtatggattggttaactcagtatcgcgcagttatatcctgtttttggaagacagtgttattgcaggcgccgtcgggtagggaggtggtattcttgggaagctctccaaagttcactctctccttgttgtcccaattacttccggatcgtcggtcaaggaagtcagaaatttttttctccatggtggtggagagtgagactgccttgcgggtgcaggacatccgtgtggtgtgtgattatgctgacgtgtttccagtggagctaccaggcattccaccggagcgtgatgcggcttttgaaatcaagctgattccgggtacgcagcctattcacaaggccccgtatcggatggctccaaaggagcaggttaaattgaagcggcaattggacgatctgctggctaagggtttcattaggcctagcaggtcaccatgggctttcccggtattgtttgttgagaagaaggataaaagcaagaggttatgtgtggattatcgtgctttgaatcaagtgacaatcaagaataaatatccg

SEQ ID NO: 140624 - DNA, 335 bp, Zea Mays
cttcaactgaaggatctttgatatcgttagcgaagatcttaaattcaggccaatcacagttttcacatgatccgaaccagccttctcaagaagcgagattgttccccatgcacccatacaagaataaaaatctccatgccaaataagaattttgtcaaaggcctcaactttaccttctatctattttcctgcccttcaacatcacatcggacaaactcttcctcactagaaaaagtgccaacaccagcaaacatatttctcacaacactctgctgtaatagaaaagcatcgttctttcgactcccgaagttcgtcaatattcttctgaactctac

SEQ ID NO: 140625 - DNA, 573 bp, Zea Mays
gccaagttcaaaccaaaggtgcagtacatgccagaggcagccgagaagctgaaggcacgtgatctctctagtgagaggttgatccgcaccattatgtagcggtggctacaagcccttatgacctgccagaatccgatgtggtggttcactagcgcgaatgaccccgactagcattctactgtagaccttatgaagaaggaggtcgatgctcgtgttagtggcatcactgtaggggtgatgtcggattttattaattaggcagggccccttcccctagactaggcgacattgagtgatctggtaagcctcctacgtctttccctttcttttggcagttcgctagcttttggtgtgatagccactggtcgtgtaggggcttgggaccgtgtcggcctccctttcacctctctttgaggatgccgcaatcaaggcggagtagaagaaggaggaggaggtagaggcggagacccaggtggcgctcaagaagtgtcgccagacaagaaataagaagaaggccgagtgtgtggtccttgccaggcccggtaggagtatcaccccttccaccgacatgga

SEQ ID NO: 140626 - DNA, 330 bp, Zea Mays
aacgacggttccctgatccagggttgtggcatcagtggctcctcgatctggaagcgcggcagtggtggctcctcaatccagaagcacaaagacggtggttccccgatctagagatgtcagagatggttcctggatctggtggcgcggcggcggcggcctcgtggcatcctccaatctggcgcgcttcagacatgctctgacaatggtctcctccaatccagcgactctggggcatcctctggcgatgacctcaccggatccatgtttatgcatcctcgattacattttatgccgacgactgcactactttacgtatttcattcgatggtt

SEQ ID NO: 140627 - DNA, 494 bp, Zea Mays
agaggcttcagctgtggaagcggagctcaggcgggtagtggaggagaaccggcggctgcgcggaatactggaggagctcacccggagctatggcgcgctgtaccaacagcttctccttgtcacgcagggtcagcaccaccaacatcgactgcatcctgccgatctcatgatcagtaggccatcactggctcatgtaagtgctgtttcatcggattatatggccgatctccccagcgtgtcttctttttcggtcttatttcctttaattattgttggcgtgtcttctttttcggtctttgtttcctttaattgttgttgccttctgcctggattgttgatttcaacgttgagtgggtttcaaattccaaattcaacttttcaattgcgcaattactactagcatcatcacgttacctgagtccgcatcaattgcgggattactactagcaccacacgttagctgatccatctgagtccgcatcaattgcgcaatt

SEQ ID NO: 140628 - DNA, 393 bp, Zea Mays
tctctcttttctaagaataactattgcattagcatattttactaacttgtataaattgttattttcaagagattttatgtattgtttctttacagacaatgctaattgccacatccacaatcttgcagaactttgaatggcaaccagttatctggatctttgcctgatgagattggttacctgatgaactttaatagattacaaataaaagataacaacatattaggcccatacctaactcgtttgccaacttaacaagaattaaacatctgtaagtgtcaagtatctttattttctgcccatcactgatgcttctgatttgtaaaattagtaaataattctggttccaattttaccttttagtcacatgaataataactcattaaaatccca

SEQ ID NO: 140629 - DNA, 670 bp, Zea Mays
attcggagtcccgtccgtgctcacagtcgacaatggcaaacagtttgacagccaggacttcagggacttctgcttctccatcggcactaagcttgccttcgcctcggtataccacccacaatctaacagcatcgtcgagcgtgccaacaacaagattttcactatcatcaagaaaaggcttctcgacgacaggaagggtaaatgggccgaccagctacctgaagtaatctgggcactaaacacgaccgaatgccgggcaactggattaactccttttcgtctgctatatggatcggaggccgtgaccccgcaggaaataaaacatgggtcacctcgaacaagcgcatcagccatccccgatgtagacgaaccaaccttcaaagacctcatcgacggagactgcgtcttcgccctgcaggccctcaacaaataccaagctcaaacgaaggcctggcgcgaccacgcagtcgtcccaagagaattcaacgaaggggacctcgtactcgtccaaaccacccggacagagtcacgagcaagctggagccaaagtgggagggtccattcatcatcaagtcgaaggcatcccccagcgcgtacaggctaacaacgccatccggcgaagacctagagcattcctggaatattgacaatctccgcaaattttttgttt

SEQ ID NO: 140630 - DNA, 1704 bp, Zea Mays
cgctattgtgtgtgttggggcgtggttaagtactcagtgtgggtgtcgtggagagggggatgaaaactgaataccgtgaactctactgaatatctcgtcttcctactatctcctctttcttcttcctgttgtcttctacattctctagcctgtagctaacaattggtatcagaggaccgttcctcggcttccttgctatgtcgtcttccaccccagtcaagggaaatctcacactggccctcgaaaaccagactcgagcccttttgtccgaaattgacaaacacttcctcgcgagggacgaccagtggaactcccgattcggcgatctggagtcttgcctgtccgctgtggagcaatcctagtcggaatttccctcctctcttcggtccgacgtcgaggcgcatctgacggcgaacgattcggcggtcgacgcacggctggttcagatcgagatagatacccaccccccgtgtcatcacgctggaatcattcatgtagtgcctcgaagcatggcgcccacacattgattcgttgctcgacgctctacagtcggaagcggaaggctggtggtacaatgctagtgcagcgggacttgtcctagaaccgcgacgcacgccccaacggctacttcaggccgaccggttccgcgccgctagatcggtgttagggcgtgcacccgctcctcttacgatccccgatggccctcgatttgggcaaggcttcgacaattcccataggggcagtggtttcggtcaccccggtgccgaatcccacttcccggtcacgggtacgtggaatcactaaccatccccatcatttgccttctctcctcgcagtagtggtccatgtgattttgatttgtgtgggttttcacctcatcaaatgggtagtctcctgaagttgaacttccctatcttcgatggaactaaccctaaactctggcaaaagtagtgtgagaactactttgagatgtatggtactgaggaaatcatgtaggtaaaagttgccatgatgcattttgatggggttgctggacgctggctgcagtccattgaaccccggatttcctatatgtcttggcgatagttttgtcacgctatacacgagagatttggccgtgagcaacacgaattggtgattcgtaaattgtttgacattaagcaaacaaccactgtccaggattatgtagatcgcttttctgaactagttgacttacttgttacatatgagcacacaacccatccactatatattacactatgagatttatcgatggtcttcctgatgatattaagtttgtcatccttgtacaacgtcctggggatctcgatactgcttgtgctttggcattattgcaggaagaggcggactcctcgcggagacgagaccctgtccatggagatgtgtcccggtatgatcgagcttttctgcaatcttccaaccggccggaaaaatcattggctaccactaccaagaattcagtgtcctcatctgacagcaaggtggcctccctacgtgcttatcgctgtgctcgggccttatgccagtactgtgcagaaaaatgggcaaaaggacacttgggcagctctgatcacaagaactcagaaggagaatttgaagattctgcggaacaatttgccatcctgttgtcaagagaagttgtatctcctcagaaacattccaagtcatttcgcagtttacaag

SEQ ID NO: 140631 - DNA, 301 bp, Zea Mays
ctccctcctctaacaccgctcggcgtggcacaaggtagatggcgagatggtacgggggctcggtcttatagccgcgaggtgaggacacgccaggccggcccgagaaaggggggagaaaagatcggattcacgacccgggagcttcggcggaggttgttccgaagccgcgcctgtgcccggattccgtccgtttcggtggagaggaaggagctgacgctccggtcccacccgcagcggcacaacggcgcgagagagagcaggtcaccaagccacgatgggcgcccagccaagtcgcagggag

SEQ ID NO: 140632 - DNA, 344 bp, Zea Mays
tcaaagatatatttgactgaggatcaatatcgtgaggttagtatttaatttgttttaccctttttattgattgttgtgattgatataatatgtaacattgtgtgtgcaggtgatggttccatggatggtgcccgtgtctgatgcgtactatgcttggtgtcgatattgggcttccgaaggcttccagaaagcgttagcgtatcacaggaaatgtcgaggaaccaatcctaaccacaagtttggtggtgacgacatgctccgaaaagctaaaagaatggtaagtttgatctagctatgtcgatcagcaaatagtatgattgcttatgaatgttttttgtttatac

SEQ ID NO: 140633 - DNA, 418 bp, Zea Mays
ccgccatcagcaacaggtggattcgacacaaaatgagtgaaggccttggaaggaggcaggttccaggccgagtatgccacaggggcgccaacatttgataccttgcctctaagaatcatttcaagccggttcactaagtctacagcaggaattcttctgttggtgacccgagttgagtcagctagacctcggtacagataggccaggcacgccctgtccttcaacggctggatgttcttgaagacaaaatcagcaaccacagcctctgcagtcagacccctctccttcagcagtccaacttcagccagcaaagcccctgcctcagccacctcctgatccgtaggggactcggcccaactcggagtacgaacatccggctgtctccctgaccgtggggggagagaatttccgtggttct

SEQ ID NO: 140634 - DNA, 559 bp, Zea Mays
tgagctagaactccaccgacttcactcggtgtgtgtgggctcaagagaagtcaggtagcaggttatagggaaggagtggattgtcacatcagtgtctggcatcgtgtttcactcgttcccgctcacgttcctaggcgtggcagcgatcacgacatcaagaattatggtgcttgtgaaatgccctatcgttgggagtttctcctgcttcagacgcctcgtctcgggatacaggctgagcggggtcccaatcttcggcctcgtgatgatgtcgaacgttatgacatatgttccattattggcatgcctggcgccatggagctcccctcttcattctcaatctgccccttttcctatcgaacttcgcctgtgcatggctggaacatctcccacctacctagatccatgacttggaagacctggtcagggtcttggggggaatttccggggcacatacatgtgcccttgaaattcttgggatctctggagttgtcggcagaagcaagacaagagccagcgcgaatacattcgttggttctccaagcagcgcacccagctcccc

SEQ ID NO: 140635 - DNA, 719 bp, Zea Mays
caaaattttgaagtgaactgcgttcctctatctgatactatcttccgcggaatgccatggagcctgactatctctttaaggtatattcgggcaagggcggcccctccaaaagtggtctttactggaactaagtgggccaccttggtgagacgatcgattattacccatatggaatcatttcctttctgtgttcggggcagtccggtcacgaaatccatgcctatttcttcccacttccattcgggtactgggaggggttgaagtaggcccgtaggcttctgatgctcagcctttgttcgctgacaggtgtcacaccgggccacatactgtgctatttccttcttcatccctttccaccagtatctggccttgagatccaggtacatcttggtggttcctgggtggatggagtaagctgagttgtgggcttcattgagcaggacttcccgtgcctctcccactggtacacacaggcggttcttgaaccagaggactccttgctcatctgtcctaatgtccggaagttgctccttgcgagctctttctataagtctggccgtctctgcgtccaggcgttgagccttgcatatgagatcttctagacttggcttgacttccaggctaccgttgtctcccagacatgcatttagctgagttgattctttcttccaatcttctagaaagttggttcctttaatcccgaaaggttttcggctgag

SEQ ID NO: 140636 - DNA, 2137 bp, Zea Mays
gcggactggggccgctcaccggggttctgcaactggacgggcgtcacgtgcggcggcggtggccggagccggcgcgtcacgcagctggtgctgagcgggaagcagctcggcggagcggtgtcgccggcgctgggccggctgtcttccgtcgcggtgctcgatctttccagcaactcgttcgccggcgcgatcccgccggaggtcggcgcgctgtcggcgctgacgcagctcagcctagcgaacaacctgctcgagggcgcggtccccgccgggctcggtctactcgacaagctctacttcctcgacctcagcgggaaccgtctctccggcggcatcccgggcgcgctcttctgcaactgctccgcgctgcagtacctggacctcgccaacaactccctcgccggcggcattccctacgccgccggctgccgcctccccagcctccggtacctcctgctctggtccaacgagctgtccggcgcgatcccgcaggcgctggccaactcctccatgctcgagtggatcgacttggagtccaactacctggccggggagctgccgtcgcaggtgttcggcaggctgccgcggctccagtacctctacctctcgtacaacaacctctccagccacggtggcaacaccgacctcgaccccttcttccgctccctgagcaactgcactcgcctgcaggagctcgagctcgccgggaacggcctcggcgggcggctgccgccgttcgacggtgggctcccgcatggactccggcagctccacctcgaggacaacgctatctcgggctccatcccgcgcaacatctccggcctcgtcaacctcacgtacctcaacctctctaacaacctcctcaacggctccatcccgccggagatgtcgcagatgcgcctgctcgagcggctgtacctgtcgaacaatctcctctccggcgagatcccgagatccatcggcgagataccgcacctcggcctcgtcgatttctccggcaaccgcctcgctggagcgatcccggacacgctctccaacctgacgcagctcaggcggctaatgctgcaccacaaccagctctccggcgccatcccccccagcctcggagattgcctgaacctggagatcctagacctctcctacaatggcttgcaaggcccgatcccggcgtacgtcgctgccctgagcagcctcaagctctacctgaacctgtcgaacaaccgcctcgaggggcctctccctctcgagctcagcaagatggacatgatcctggcgctcgatctgtccgcgaacaggctcgccggcacgatcccgtcgcagctcggcagctgcgtcgcgctcgagtacctcaacctctcgggcaacacgctgcgcggcgcgctcccgccgtccgtggcggcgctgccgttcctgcaggtgctcgacgtttcgcgcaacgccctgtccggacccctgcccgcgtcgctgctggtgtccacgtcgctccgggacgccaacttctcgtacaacaacttctccggagtggtgccacgcgccggcgtgcttgcgaacctctcggcggaggcgttccgaggcaaccccggcctttgcggttacgttcccggcatcgccacgtgcgagccgctgcggcgtgcgcgtcgccggcgtccgatggtacccgccgtcgctggcatcgtcgccgccgtgtccttcatgctttgcgcggtcgggtgccggtccatggtggccgcgagggcgaagcgatcggggcgccgcctcgtcgacgtcgaggaccaggcggagagggaacacccaaggatatcacaccgggagctctgtgaggcgaccggtggcttcgtccaggagggcctgatcggcgccggccgcttcgggcgcgtctacgaggggacgctccgcgacggcgcgcgcgtggccgtgaaggtgctggacccgaagggtggcggcgaggtctcaggcagcttcaagagggagtgcgaggtgctgaagcggacacgccataagaacctcgtcagggtgatcaccacctgcagcacggccagcttcaacgcgctcgtgctgccgctgatgccgagaggcagcctcgacggcctcctctacccgcggccgcagggggacaatgccggcctggactttggcc

SEQ ID NO: 140637 - DNA, 458 bp, Zea Mays
ggaagttctaatggatctccctcacattcgagtggagcatggagtcatcctagaggacagctcggaggaacttctaccgatgcccaccccgttggcagagtcactggccttcgcagctaggtcatcgacctcagcaccacctgcacgagccgttcaagctcgtgcacctggaggcgacgacccagatgactctagggacgatgatgaagatgacggcgatgaggagtatgatgaagaaaatgtcaacgaggaggccaatgatgcttagcaggactacttcttagggtttgggcctgtcaccgaactttacacatcaatgttcgagacggggcacttccccaacctgctgcaagatgtgttgcatgcgttgggaacctatgtctgacccttgtacgagacaagacgagtgtgcgagcctccctgggcttgctactacatcactcgcatccacgtcaggg

SEQ ID NO: 140638 - DNA, 568 bp, Zea Mays
gggcgatcctgaaggcccaattgactggatcagcaacgaagctgaagcctttgaagaagttttgagtggtcgtggggatgtctgcgccttctcaggtgctaggggaatcgtggctattttggagaaatcaggttgtgatcacgtgaaagctttgactcaaaccgaagctgccttatctattgaagatacaaaagacccctcggccgaagcaagcttagttggcggaaaattctttactgacatctgggagaatggcggccgagagatggcgcacgagataataaaaagagtgaaaaagattctcatgatgcaaaagaagcgacgaaggcatctgagaaagctgcggaacttgaaaggcggatagatattgcttaataactttttaactttatgttttatttttgtgacttcggacttatttacgttttctatcacagctgggctatctccttccccagagcccttcgagccaacggacgacccagaagcaaagagagaggaagaaatcactaaaatggccgaagctattttggatgaagctatttctctactgttaaacgaagctgcg

SEQ ID NO: 140639 - DNA, 296 bp, Zea Mays
gccgctggtcgaggaggtatttgaggctgaagtggttagtcttgacgatgaagtggcgcccccaccgatagggccgccagtgcttgaccgcctggaccaagccgatgagctcgcgctcgtaggctgcgagcgcccgatgtctgggcgcgaccgaccggctgaaggacactgggtgtccttcctggacaagtaccgcgccaaacccggagatgacgcgtcgcactcgacaacgaatagcttggcaaagtccggcatggcgaggacgggggcagacgtgacggccgccttgagtaccg

SEQ ID NO: 140640 - DNA, 288 bp, Zea Mays
cccctggctagggcgatgaccgaagagcaccaccgacgaagggtggtgtcaaagcataatgatggcgagatgtcgcaaagtggtaggcgtcgacggatggggatggaacgatcccgtcttcgggtagatcggggtgcccaatgagatttgttgtcctcgatgtttgggacgtgcattggggatggggatctgtagaattttttgagggtgaggagttgaggatgatgttgtttaattttcgtgaggcaggttttatctcgaaggatgagctgatgttgcatgtttgct

SEQ ID NO: 140641 - DNA, 555 bp, Zea Mays
gacggagctcgcgacggggtaggggactcggcgttcggccgccgcggtggagaagatcgaggtctcggtctctgccgagtagaagaacgcaggggcggcacaaccgcctccgcgattccaggtcccttgccggagacgaagaacaaggccacggcgtgtatgcggcggagaaggcgagtgcgggtctctgcggtggtgaaggagaatgcgacggcgggggaactgcggggagaatcctaatgctcacggcggcgattagtctagggttcaccgggcgcggaggagaagcagcatacggcggcggatttggctagggttcggcggcagcgatagttacgggagagatgagctgagaaaatgaaagctcggttccttgattcgtgggcccggtagacgtaagctgcccagattgcggggacacgatcttttcgtgggcccggatgccgcgagacgtgcacacaccaaaagagtgtaaacggtaacaaaattgagcataactcgtatttataattgacgtaactatgtattacagtcaaccagtaaagcgtgcgcgcc

SEQ ID NO: 140642 - DNA, 897 bp, Zea Mays
catagcataatacaatccacacagaacatttgatccatgctctttcggtgaaggtgaaacataacttgtgcagtactacaactccctcttccagtattgatcggtatgtttggttaaacttgcagcgaactcaggcattgaaggccgcccagatttgtttttgtacaaatttcagagccaattaagctagtttggcgcttcaggctggtacatgcacgttgttgggttgaattctagccgggtacacgtccagtgcaaggcggtgttacgtaatttatgccattgatttgccaacaggactgtgaagactggatcgtacgcatgcatgcagatgggtttgatgatgacgacaccgagccgagccgccgtcagtacagtaatcgtaaatcacgttctcttctgtaatttctcgggatatggatcatgcacatggccgcatctctccaatttgtatacaaagccaccaaactgtaacggggcgtttggctcgtcccataagctaaaacaaaaataactagtcactttatgagttaaagatctaaacataaaagctagcttataaagtgactaaaatgataaaaagatatattttttagccagccatgtttggattgatccatgagataaaacgaagtggctaaagtttagtaaaatgagataaaggtcattacaatgtagttaagtacaactcggactgatataccatcaatcgtatcctgcgctggggcttacacgtggggtcccgcttcaataacatgcgcgggtggtgactgcagccttcgtcttagggtgtcgggtcttcgggagacggcaagacgaccttcgcctgtcctggaagatccctccgttccagggccttagcttggttgaggtagcgagaagggtcttcgcctgttc

SEQ ID NO: 140643 - DNA, 572 bp, Zea Mays
gcgggtctttctgactgctgaatcaaaaatcttcactggtttttcatggtactgaaggtctttctgaatctgtactgtctcttcttcgaggtgactttctggtgcttacaggcatttgcggagctgggatacgtgaaacacattgtggatgtcggacatggattccggtaattccagatggtatgctgcgggtcctaccctgccaatgatgggataacctacgaaacgcggggctagcttcccttttacttggaacctcctgacaccacgcattggagaaaccttgaggtagacgaagtctccttccttaaatcggagttccctccgcctgttgtctgcataactcttctgccgactctgagcttcaagtaaccttctgcggatcagtgcaactttctcttccgcctctttgacaaaagcaggtccttctagtgctttttcccccacgttggaccacatgagaggggtctggcatttccgtccatacagtgcttcgaatggcgacatcttgatgctggcctgatagctattgttgtatgagaactctgcgtagggtagactggattcccaac

SEQ ID NO: 140644 - DNA, 510 bp, Zea Mays
agactctccggggccctgggccatgaacggtggtgaaaggagttctcccccggtggtcggctgtgatggagcaatcggcctccatatcgattcctttcgcttgaaaccttgagagactcctccatgcagaccgggatcctgcatctttccgagacgctgccacaccggaacacggccaacctgattctcagggtgcggcctcactgccctctgagccacctgaagtggacacccgagagcatggtagccaaatccctggaaccgaaaacagcgtgtaggatgccggcagaaagcagcaaaatgagagggagagagacaattgaagcaccgccctcagagatcctcaggggaccatcgacgaggagtgggaggaagacgcctagcacgcctatggaccaccacctaccacccaccctcagctagaggcggacgtgtagactcttggatttgcaccacctgggcggccgactaccccaccgcaccgggcagaggggctccacacgatcgagg

SEQ ID NO: 140645 - DNA, 429 bp, Zea Mays
taacactgtcttccaaaaacaggatataactgcacgatactgagataaccaatccatacccaagataacatcgaatgccctcaaggaaatcacaacaagattggccaaaaagacctcatcaacaagaataacggaacacccctaacaaactgaacagctactaatggatccattagcagaactaaccaaaattgggtgacccaacctctgcaccgaaagaccagcctgcaacacaaaattctccgaaacaaacggatagctagcgccagagtcaaaaagagcatgggccacaaacaaatcaactgagatcgtacctgtcaccatgtctccttgctctttaccatccacagtgggtagcatataagctccggaaatacccgcggaagaggaagctcccggagtgaagttaacagaagaaccccactgagc

SEQ ID NO: 140646 - DNA, 365 bp, Zea Mays
caggacaacatctgtcacttcaatggttcgatcgggaacccaaaaacacttcttcaattgcgacacatggaacacattatgaatagcagacagaatttcggggagctgcagtcgatatgtcactggtccacattgctccagtaccgggaatggtccaatgtacctgggtgcaagtttccctttaaccccgaaacgcgatacccccttcatgggtgaaactttcaggtagacatagtccccttcatgaaaatataagggcattcgccgcttgtctgcataactcttctgacgggcttgtgctttcttcatattatgaatgattttctgaaccttttcctcggcctccttcacaatatcaggcctaa

SEQ ID NO: 140647 - DNA, 371 bp, Zea Mays
gtgctccccaaggggatgagctgggacgaatgtatcccttttgttgaagatctgcgatttgaagcttcaattctgctaactcggtaggagccatgcgatatggtctcttcgcgatgggtgccgttctagggatcagatctatgtagaattccacttctctttccggtggcattcctggtagttcttctggaaacacatccatgaattcttctaccactgatatacttcctgttgctagattgaacataattggatcattggcgggtggctgggcctgacaagagactgactttccttggtggtctgtgaggaggactgtcttgtctgcgcaactgatgatacctttgtgtttagttaaccaatccatccct

SEQ ID NO: 140648 - DNA, 589 bp, Zea Mays
gccacggcggggacggatactgcccatccaacgatcaatccactggtgatgaggtcgacattgcccatatcgatgccggtgatggactccatacctcctggcgattacccgcggcgaggtcgagtacaccgaacgtcggcgggggcaaagaaccattgcggctacacctttttttcctctctctcccttctcggttcgctctcccgcggacatggtggcgctgctgcgaggcgaaaggacctgcggcacaaggtagagggcgagagggggggtcggtcctcttaataccctacagcgaggggattccggcctggtggttggaacggccagcgggatccacccgatcccggcggcggacatcgcggcgtacagagtccgagcgcgggatctgtgaggttgaggattgtgctgacaactggggcccacccaacagagacacgaagtgtgaaatgcgggcgtagagtgcggatggatggccgaccgagcggctgaggatgcgggtccacatgtcggcgcagtggggaggattggctgggctggcaacgcgagtgagatgggccgaggagggtagattcggcccacgaggctg

SEQ ID NO: 140649 - DNA, 355 bp, Zea Mays
gcggtcgttgttttgtagaaaggtccttcatcttttcgcgattcaacccatggtcctcgctcgaaccccaatcaggttcggttgggcggcctgtcgcggtcccccgagcaccagtctcacctcgcataaaccctagcttgctgccgccacctcatcctgctccgcctgcttcgaagcccttgactctcttcaccgtcgtgatgagcctctcaacaaccttcgccacagcgacaggcacgagcccctccaccgcctctgactcgtcgcctcggcccaccgctttcttactagggtggtaccgctgttcgcgcagaggaacagagatgccgcatcggcacggacttcgtcgccactg

SEQ ID NO: 140650 - DNA, 405 bp, Zea Mays
ggaaggacctgcctttgttaaagaggctgaagagaaagttgccctgatccgcaaaagattacttgaagctcagagtcagaaaagttatgcggacaacaggcggagagaactcagatttgaagaaggagactttgtatacctcaaggtctccccgatgcgtggtgtcaaaaggttccaagtgacaggaaagctagcaccatgattcgtcggcccctatcccatcattggcaaagtggtacccgcagcataccgtctcgaattaccagaatccatgtctgatatccacaatgtgtttcatgtgtcccagctccgcaaatgcctgcaagtaccagaaagtcacatcgaagaagatacaatccagattcagaaagatcttcagtaccgagaaaagccaataaagattct

SEQ ID NO: 140651 - DNA, 843 bp, Zea Mays
aatgaattatttatgaattaaacaagttcctagaattatttttatactagaaagtcatttcctatattcatttatcacattcccacggttctggactgcgcgcatgattctgtagttctatgggggtttctctgcaaaattcaggtcccaggcgcactgcctttataagggctcgggactgcgggttgattcataaaaagaatagggactcttaagcaaaacgtccacgacgaaggggtatggtaggatcagagccgtgcgattacagatagagggcttggattaaattcgccaaatgccatggcctgaaacgcgatcgccaccgtaggatccgagatctacggtccagaatctcttccctgccttaactgctctagcctttggatttccgatctacggtctagaatcaatcacgcgaaggattgtctcctatctaatcagggccgttcggcagcgaatcaacggcaacgatttgaaacggccacgatctaatcatagccgatgaattgaaatctaatggaccaaccgttttctccctcacgcagttaccaggcggcggcgccgccagctactgcccacggtggggcatcgcctgcacgaagcgtaccaggcacccaggtactctaaattccgaattgaccaaagctacgcgaaattgggaacatggtttagcaaatgggatggttctcactaggattctcagagcaattcctcctggccacgacacaaggcggagccgcgaccatccacgaccacggtgagaaattggtcctactccggccaccaatcccgtagagcgcgcccatggtaacccccagcacgacgccgtgtagcaccctggcc

SEQ ID NO: 140652 - DNA, 397 bp, Zea Mays
gtgggcccacaccctcagccgctcgaccagtggtattcctgcgcaccttcctccactctcgttggtacctggggcccactgcctagcctctggttctctgagcaggttcgcctcgttagcgctcactcactgccgtgtgggtccaccgtgtcagtaccatcgtcctcggatcgttatcggtcacggcgccgctcaacagaatccgctcgattacagccgaagctagttgttaggatcttggcgaagattgtgggattcgggtgccatcctggggtacttataggtgacctagccacctcctctcgttcatcagatcccgaccccgagtagagccaatggagagcagtctagtagaaaagaaaccaccgtcgatgtgtgctgcccgtgctgccggtct

SEQ ID NO: 140653 - DNA, 303 bp, Zea Mays
attctaaaacttaatgatcgacggagaatgaattctcacatagatccccagctttctgtgtgcccatacatgtacgctgcggtggtgagattgggaaaacatacccaatgtacgcatgggaaatctttcatggattcccacgtactaaaacaataggggaacttgtacatatagtatatgcagttcatcacaagtcagaagcatgcaaaacttcatgactccaaccataactagttggaagtgacaattcattactgatggtcattaacgatttgaaatttttgaatctatcatagattcgtc

SEQ ID NO: 140654 - DNA, 508 bp, Zea Mays
aatttttcactgaaataagtaaccggttttccttcttgtaacaaaacagcacctaacccaataccactagcatcacattcaagttcaaacactttctcaaagtcgggcaattgtaagagtggagcatgggttaacttatctttcaaagtgttgaacgcctcttcttgtgggggtcccaagcaaaagacacacctttctttgtgagttcgtgcaaaggggcagcgatggagctaaaatcacgcacaaaacgacggtaaaatcctgcaagtccaagaaaactctgaatttgggtgaccgtcgttggtgtaggccagtcctgaatggcttcaaccttgctgctatccacctcagtgccctgcggagtaaccacataaccaagaaacgagacacgttgcgtgcaaaatgtgcacttttccatgttatcaaacaagcgagcagcacgcaaagcatcaaaaacagcacacaaatgttctaaatgctcctctatagacttgctgtaaataaggat

SEQ ID NO: 140655 - DNA, 378 bp, Zea Mays
ctgttgtcttcagctgggggcagttgttcttgaagtgactagggtctccacagtgccaacatgcattcgctggtggttggttgcttgcaactgagggggcatgaaaggagctctgactctgctgactgaaccgtgatgaagtgggtctagctggtctaatgaagcttggtcccttgggtggaaatccaaaggatcgagttttctggtgccggtcttgctgctgagctcggaggacttggaatttcctcttgagatggcctttttcttcttcctttgccctttccacttgcatggctttgttggagaggtgcgagaaactgaggaagtcttggctggctaggatggtcttgagttctggtctgagccccttcaaaaagc

SEQ ID NO: 140656 - DNA, 601 bp, Zea Mays
cctcgacctcgtctactccagccactgctgcctctccggagcctgctgaggaacacatcacccgtgctcctactgggaacgcgtatgggagcgctgcccctacggcgcctggttcggccagcaccactggtgcttattcaggcgacgtgcatgggagcgcagctctgcacgacacgatacctcttctcgagcgggcatcgcctccccatgttgtggctgttcagcctccagccaatgaccacagcatgctgacgcgtggcaaacggggttttcgtcaaccaaaggtattgcttgatctgcatgctgctcctttgtctcccgtgccaaaatcatacagtggggcattggctgatccaaattggagggctgctatgtctgaggaattttttgcactacaaaagaataacacttgggactttgttcctcgtccttcgggtgctaatattgtgactggcaaatgggtttatcgttacaagtttcgttccaatggttccctagagtggtacaaggcacgctgggttcttcgtggtttcactcaatgccctggaattgattttgatgagacttttcagtccagttgtcaaacctgctaccattcgta

SEQ ID NO: 140657 - DNA, 333 bp, Zea Mays
ttccttcagctccaagtcatgtatccatcttctgaatcttctcaatagggccctgttgatacaggggttgttcttgtcctcagacctgcaaatctgattaaaatcacctgccaagatccatggtccatcacagcctgccctgacttctcttaactcttgtaggaaagcctgtttaagattatcttggtgtggtccgtaaacccttgtgaaccaccaaagtgggcctgaagcctcctgcagttgaatagagaccgagtactctctgatcacatgaatgctgtgggtaaaaactccatctctccaagccactaaaatgccccctcttgtcccctg

SEQ ID NO: 140658 - DNA, 464 bp, Zea Mays
gattttgagcttcggcattctagcaaccattgtccaaatggctgatgagaagaagatcattgacccggtgctggccggattttacgaagccatggaaaaaaccaacacagagaagatcaccaatgagatgttagctggaatatctgaaaactctagcgatagtgagagcttcgatgtggaaagtggaaatgaagatgccgaagatcgaccacggagaccgagccatgttgtctttggaaaatcaactattaaacaagggcagatcaaatcaatgagagggagatactttcgtgatatttcaatcatgagagccggaggggagaataatgttcctcttcccgaagctgacgaagtggtgatttttagaagcttcatggaagccggactttggttccctctgaacaaaatgttggtcgaagtcctgaaaacgtttgagatctatcttcaccaacttacccccgaag

SEQ ID NO: 140659 - DNA, 683 bp, Zea Mays
tcacaccttcacacttctctccaaactctctcgagagctcactcttttggaagagtggttggagatccgttcttcccggcgtgtttccaccatcttcctccatctcgttgggagttcttgacccaatcttcggatcgaggtattgtcctatgttatttccttgtactcgatcctacgcatttttgattatctattgtatcgttcgttgggtacactttagtttaagtgattgctacacttagactatcttcatttgtcacaaacattgttagagattagcgattcgatattgttcgttgcagttgaaccactcatattaacggttgaagtgcatggtcaatatcttatgcgttccttctcaaacatgtttgatccttgctcataataggttctatttcttatttcttagaatggtgcgtcgaaggaacccgtcggtggtcgaatccgactcatcggatgaccaggaaatccacggagatactccacctcgctctcgatccaagcgagggcgcggaagcggcaatgtcatgccgggtgctgaggcctccgggtctcaaagtgctcgcggtcggacttcccggaatccttccggtcggtctcgacctgcgacaaatccgcaggcgtgggagcctgcaagtgatgatgatggtgggaaggacgatgaagttgatcttcccccggcc

SEQ ID NO: 140660 - DNA, 496 bp, Zea Mays
caaggttttgcttagtagtaggctctgacaaaataaccttcattagaaaacatcttcatatcaaaacaataaaaaagttaagggaagaattttaccttaaagttagaataaaacaagctaccagcaatatgctgtcgtcggtatctgctgagatcggcttcgagcttcgggaaaccaacacttttcgataaagtgctgacaactttcgccccagtccggtctcgaaggcaacctaagctctcttcgtctataccaccgaagagcagcgcccctggctggtacccgcaagatatagcataatccctcagctcttctttttcagccttagacaattcttgcccaattatgttttgaaagttgaaatctctttctttcgaagcatcttcggcaggctccttctcttttccaggcatcttctcccttttttcaggcactgcagccagggtttcctcagcagctgtagcagtttcttcctcagccatattcaaaatcattt

SEQ ID NO: 140661 - DNA, 753 bp, Zea Mays
actaggtagggaatatagggttatcctttcttgcctctgcttagggttttcctctactccgctgtcgacaacgtcgtgtgtgcttttttgagcgtgatctcgccggctacctgcgcaactctatcgagctagcctgtgtgaaatagaccgcacgccacaaccgaaggtatgtaatggcgtcctcctcttcatcatcatgcagcatcactgagtcgatgagatcgatgttgtcgaagaagacggttagagattcacacccattcgccgagttgttactagggcacaccattgaatttgggatgtccctgatttccttgaggagcgtgcaggagttgcaacagttgggatattttggatccgtcgttgggcgcattccgggagccgaagaggtcttgaagccggatggcaaactggtggtcttcaaagcgttttagcgcttatcttcgattacttgtccacaacttcgtggtcgaagtcttggagtgttttcgagtccaactccactagctcaccaaatgctatgacggcattggcaaagtttatctgggcaaaagttatgtatggaagatagccgttggtggaggtcttcactaagaactattgcctccaatggtagaataatgttgttgatgacaagattgtgttgtttggtacgtgtgcctttacacgaaggacgggtaagacctcagccaaagtcatggagcttgtgccatgtgtgaagaataagtgagggaactggtggtactacttatt

SEQ ID NO: 140662 - DNA, 599 bp, Zea Mays
cgggtttatatcgatagaggtcaggggttcttttgtaaaacagtgcatcacgaaggggtatgagcgatatccggccatcaggttagaattctacggctccgattactcctgtccaaggtcgaattggtacgcccgaacgcctactggatcgaacaccaacgatctggatttaaaagaatacgattgaatctcgttcgcacaatccaagatctacgacccagactagatcggaacctggtgaaccggtacgcaatcccgctcactgaatatgaaatcaatggtcctgattctaatcagacgacaggtgcaacttctaatcgtagccactcatcacgatcggacgaccagaattcatcggcaacggggcgactccccaacccactgtcacacggccgcgcgcggtggtgcaaacgcgaacacggcggcgctgtcgatgtctagtgtccgaccgcacacccgagggtaccctcgcggtgcttttgggtaggatggtgtctgaaagttccctttgacccgggaacaagatctggatgtcgcctagagggggggtgaataggcgaataaaaattatcactttaaaacttaaatcttactctact

SEQ ID NO: 140663 - DNA, 385 bp, Zea Mays
gggaccctggtgatttgaaaaacccgttaatagtctcgcgcactatttcaccgtgtcactgacatttacactgaggcccttcactttctaattcttcacaaccctcgatccccgaccgtggacggcggagtagtggctccggcgagccaagaccagccaggaaacacaatgactagggttccgatgtggctgacacccaattctactcctaattaccctttcccctcactcaattgcaaggttatggctcttaatcactctgtccacagtgatggcgcaaactgaggacgatccgaagtgttcccggtgatctagcgtgatttagctcaattggtagggtcgagaagcatcacaagcacacaaggatgccaaaacatgagcgagg

SEQ ID NO: 140664 - DNA, 416 bp, Zea Mays
ggacagagcaactggggcgggcatccatcctgcttgcccaactgcttaataatcggagccacttgtggtctcaagttgcagatcgcgcgcgaggtagttttgagcacatatccatccactaatggcaggtgcttggttgcatcagggggcaagaccaattaagacgcatgatagtaggcagtagctactagtatgatacggtgcttaataatcatgacgacagctgcaacggtagacaactagctagacaagtgtatgtccggatggaatcgagaccccagaccacttggggtttggccagacctggccagctgatcacgtaaccagttgctgctgcatacggatttttcttgttttccctatggccgctagcacagcttttcctagctagttgcaggtgttatcgggccagagcc

SEQ ID NO: 140665 - DNA, 494 bp, Zea Mays
gcgagcttggcgcgactgcctcctaccgacctcatcgccatggaacccgtggccccctggactcgatccacgctaatctcgcaattgggttggtctggcgtgtcctcacctcgcgaccataaagctgagcccccttcccagcagcctccccatggcgagcaccctccggcggctgggctcatccgtcgcgcccctcctcctgcagctcgccgcgctaggcgccacctctagcgtgtgcctgcgctcctgctcccaaaccttggtcctaatttgccagcacgtgagagagaaattgggcatggtgcatcgggtgtccgccgtgggggattcatggtcaccccgtcgatctgcgcccattggtcgagccatgatggttgccggatgtctggggtgtgctcagggaatccatggcgcgcgtctgaattgggtgcggttacaacttctcgtcggcgttggggcaccaccgcgaaactgcgctactccgtgggtggtgg

SEQ ID NO: 140666 - DNA, 519 bp, Zea Mays
tctatctcattggttgttgtgtgatctcactagctggataattcacataggaaagtaagggtgaagatggaccttgtctttcgttgctagaataggaggtccaatatgcttgttgtaggtcttggtgtctgatccctgtgtctgtgtgattagtcctactctccttaagtgtgtcgtgatcttggtcttgtgtagtgtattggcattgagacttcctgcatagttatgaaaacatgattagaaatcaatcactaatttattgagaactaaatgtaacgccactaccgccgggcgccagcagtgtaaattcaaaatgatttgacgtgaaattagaacaaaccaccctaacctatctcttacttgctggccggtttaccagtatgcacacatgataaatcgatataggttagccgctcgcgacggaccagtgattagacatgggtatgcaggcgatttatcggttcaagaggcgattaatcggcgaagaacggcggtttatcgtttaactcagacaaggag

SEQ ID NO: 140667 - DNA, 595 bp, Zea Mays
ctcgagctttgtttccagcaacttttcggtcacctttcgtccaaatctgggtaacgaatctgttaccgaagcatctggattcaccaggaatattctcaaggtcggctcgagaaatgctaaaggtaggtttttcatgcttttcaagtggctgcattcagctttggcgaagattgcagcagtccctcgggcagccactagcgcgcagaagtcgccatgccctaccctaactttgttaaagtcattaacctctttctcaacccattcaagcgcttttgggatgctgtcgacagaatgtttagcatcctctgaaactgcttcgactaatttgaaaatttctcgcaatcgtgaagagcatcgagttgcaaagccaaagcaggtatcttgaagtgtttttaaagcttcgaacaatttagaactcttttctgctttggctttaaccttttggtttaattcttcggcttcacgcttaaagtggattacagtatcttaaaaggttgattttacttgatcaagttgtttgctcaaaccttccaattttttgttctgataaaaaatttgtatgacttggtttttgttctgaaggtgagcttcagca

SEQ ID NO: 140668 - DNA, 296 bp, Zea Mays
gtaaaatttagggggaacggttgcgggacgagtaaatataggggagggaatcttgctgacgtggctgcatagtaagatttagggggaaaaatttagagggaacggctgcggacagcctcagcctctggaacttcatcagctttcccgcgctcagtcaattcctcttccacgtctctgcgctctagcatcttcagtctcctgacacaaagtagcatcgttgggggtacgggatggaccgggtgacgctgctcgcctcgctcgctctgtgaaggcgtctgtgcattccaaaattctca

SEQ ID NO: 140669 - DNA, 542 bp, Zea Mays
ctggggtcctgctgttctttgtgtgagccaacaccatcgtggcgagtagcagccaccgaggaagaggagctcccccgaagctggccctaggttcaattcggatggaggagcaggaagggcggcgttgggttttatacccacatgtttcccccaaccgaatgcgtcggggttaaggagtccgcgcggggatcacgccatggttacggagctcggagttcacggcgcgctgagcggaggttgttgtgagaagggagataagtctgacgagtggggcccaccagcaggtgtcacaaggagggagcaggtgtggcgcgcagatgaagtgtggcggctagggttgggcaggcgcgctggtgagccgagtggcccgcgcaggagagtccgctgttgggccgaccagttagtttcagcccatgcacatgtttttctttttcttttatattttctttccttatttactattccctttttggtttacacatttcaaattcaaatgcaagataaagtttcagaattcaaatttaatgcacactcaaaattga

SEQ ID NO: 140670 - DNA, 687 bp, Zea Mays
tttgacacgtctaagagaattctaccacaattttatatgtaagcagggagaaaaaaatcttatcggaactatgactcaaacacatttctagcttgattaaacttgcattagacgtgtcaaattatggcaagtaacgtaacaaattaaattacccgtactactcacaacagtatatacgcaggcaggtgcagcactgtttccgaccacaacactttgcaggcggccaggcgtgcgcccgacttctccctcacgtcagggcggtcgtcactcgctggcgtcatcacctatcaactctctctccctttcatcaacgtgtagcggtcccagtgattagcttccacgttacctggccaatggggagaaagagagctctgacttcaccgcgcctccaaaaatcaaagtttccaccactcattctttatccctctctactaggaacgcctactcgcaagcactcaagctcacctcgccacagatagggattctcattattgtttagatgtgctccaccactagagatggcatacatgcaaagttcgaaaaactagaggtaaaaccaagccgggagacggagcagagctaaccatgcaataattgcccccttatataagcatcaaactatctgaaattgaaaaaaaagaaaaatgacgtgtaaagaggagaaatgggaaaaaactaactacggct

SEQ ID NO: 140671 - DNA, 520 bp, Zea Mays
ctttgttcctcaagtgttggggtcttttgctcaattttgattacatgtgaccatggtcctcagtggggtactgagaagaaccctaggtaacactgaggtgttacacttacacagatggcttcgcctacccccgccgatggtggagacacccgcttcagcttcgactaccttttcccgagagggcttttgctgctatatcttgtgggaggtactctacgcagcatgataccccacacctcctccgtacacaacacagttatacgagaagcacccgatgccatgctgtagggtttggctaaccctggagccccaccctctatagcataggtggcattcacttgattcagaaactgtcagatttagggcggacgacaccattgaggtcgcggcactgaaggccttgacgaccttctttggatactatccacttgagatgatgatgcacccactcggactcttccccgctaagaagagggatgatccgatgtggtgaccgagtgcgccatgctaaggatgtgtg

SEQ ID NO: 140672 - DNA, 353 bp, Zea Mays
tgaaaatgaaaactttattgatgatgtattctcccattatagagtacaatgttgctctgatagctttcgaggtcttgctaagggtaaaactttctaagatgctctatgttccatgaattccccacttccgtaccatccatttgagtaagccaatatgatcctggccgagtgacctccgatgcaatgaatggcccttcccatagtggtgacaacttgtgtcgtccttccttcgttagaatttggcgaaggaccaagtcccccattagaaaggatcgatgtcgtatagctttatcatgatagcgcctcaaggtttgctagtatctggctgactgaattattgtgttcaatcgctc

SEQ ID NO: 140673 - DNA, 303 bp, Zea Mays
gaaagagtagggtaagaaaagactccatccaagcttgtggctcttgattcttttgaagatcttgcttgaatcttatccttccttgatttgatgaggtcgattatcttcgatcttcgttattgaagttgttattcgaattagggacatgtagttaagataaagtagtaggtggagtagctagtttagtaggtgtctatgagttaaatgagattagtcagaatctggttgggttgttttgcttctaaatggtttggataggttatataatctattatgtaggtcaagttgttgggtatggccaag

SEQ ID NO: 140674 - DNA, 754 bp, Zea Mays
atagtgagcggttgagtcgacaaacataatctggatgaattgaatcctcgaaccctgaaggttgtgcacaataaactgtttttgacagagtgccatgaaggaatgcattgctgacatctagttgatgaatgggcgaaccatgagatagagccagtgacaggactgtccggacagtagcaggtttaacaacaggacttaaagtctcaaagaaatcaatgcctgaacgctgggtgaagccgcgaagaacccaacatgctttgtagcgctcaagagaaccatcagcagtgcacttgtgtttgaaaacccattttccactggcaatgttggagtgcgaaggacgagggacgaggtcctaggtcttgttatcaagcagtgcagagtattcctcttccatggctgtccgccaattgggatcaacaagagcagcacgataactccgaggcactggtgagagcacaaaagcttcaaatagagccgggaaccgcagaccgcacttgccacgagtggtcatgccatgctgattggtgaccgatggtacgggtaccgcaccagcggggaccgatggtggaggcgaggtcccagaagtgggaatgcagacctggctgtcgagagtagacctggccgaggaagcgaccaggaggccctaggttgacagaggggtgctgtctagcggcgggtggtgatgtgcagccgatagtagaagagcctggtggagaactgacagtggtgttcttcccaacagcagatggcgatg

SEQ ID NO: 140675 - DNA, 724 bp, Zea Mays
cactcagccaacctcgaaatgaagcggctaagggcagccagtgatcccgcaagcttctggatgtccttgatacgggtgggaggcctcattacctcaatagtcttgattttctccgtgttagcttcaatgccccggtatgaaaccaggaaccccagcagcttccctgtggagacaccgaagatgcatttctctgggtttagcttggtgcgggttgcctgtagcttgccaaaaaccagggtcaggtcttccactatagccgacccttctctattcttgaccacgatgtcatcgacgtagatctccaccttgtcccaaatcaggtccctgaaggtcttactcatcgcccgaacaaatgtcagcaatgcgttttcaggccgtagggaattacaacataacagtacagcccatccaccgtcacaaaagcggtatgcttcctatcctccctagacatccggatttgatggaaaccggagtaggcatccaagaaggacaaaaggtcgcaccccgaggtagagtccacgatctgatctatacgtggtagtggatacgggtccttgggacatgccttattcaggctggtgtagtcgatgcacatctgaagcttcccgtttgcctttggcatgatgactgggttgcccagccacacagggtgatgaacctcttcgatgaagccggcgtgcaacagcttccggacctcctcacagatgaagtcctgtcgctccac

SEQ ID NO: 140676 - DNA, 437 bp, Zea Mays
gactagtagtacaataggtacagaccttacataattcgataaaatattagtgcacaacgatcacataaaaacgagcaatacatatactaacaaccaatacagaactaaacttatgatccagagcgcatcttcctctctctctcggttgttgactcacacaacgccagcgacgtctcctttctcgtccttctcttccttggttgttttagccccgagagttgagttacaaagacgtatagttggggttaatatatgacgacaacagtaaggataaagaggaaatgctcgtggtggtcggttggttccgcgtacaaaagataagacttatcttatctagttattataactaggtgagatgtcatggcggtacacatataagatataatatttagcttatttagttgttaggcgtaaaaaaatagatctacacgcttctg

SEQ ID NO: 140677 - DNA, 800 bp, Zea Mays
cagcagattggaaatcagattgcgccaaataggaccaaaacccaactgagatattacttcaagaagaaaagcccacgaaaccgagtcgaaggctttggaaatatctaacttcaaaaatagactagcaactttcctcttgtgaagggatttgatcgattgttgcaccagcataaaattatcatgttgaccttcctctaacaaaagcactttgattagatgctaccagttcatacagacgagggcacaatcgattagcaagcaattttgtgaccaacttagcaacactgtgaattaggctaattagcctaaaattaccagccaaagaagcatccatctttgtagggatcaaaatgagataagaggaatttagcggccccatcttctgagcattgccttggtgaatgacagatagagcccccagcaggttcaccttaatgatactccaacaggatttgtagaacctccctgtaccatcaggccttggagccttatcagacgagaggccttcaatagtgtccagcacttcctattctaagaaagggcacttaagatcgctgagatccactgcatctctatgacaattcatcacatcaatagtatgttgtctctgaaaatcagcatccaaaagactggaaaagaacccatctaacacatcatgcatatcctcatgattagtaatcacttttccctcctccgattttgaaatgaaattccttttcttcctaaatcaagcctgcatatgaaagaatttagtatttacctcaccttttagatacttgattctagatctcaaacgtgca

SEQ ID NO: 140678 - DNA, 939 bp, Zea Mays
ctggccggatcacgcaaagtccggcgttctcgagcggcagacaccaaatcagatccctcctaaccatttcccctcaatcaatttcaccagcgggtctttgaatcaaccggtttatggcgacagtgcggatgatcggatggataaacgcgtttcgaacaaccgacagcatggatgaccaaattaaagcttggggaagcttcacgggttcaccagaggttatgtacacgctagaatttggactaggcaagagtagaaaagtgggtcgacagggagggtgtcgcggcggtgttctacggagcagaggagtgttccggtgatggggctctggcaaacttcaattggtcggttccaagagcaatagaaggttgaagacaagctaaaacagaacgcaatttggtaggtactaacccgacgagcgctggccacggaggagtccttcacggcaacgcgaagaacagggcggaatggatttgtggactgtgtaagctcttctggtgaaattgagttgattgctcaagtgcttgtgtgcgtgatgtggtgaagaagcagggtctgggctcaatctataggccgatggccggagttggatgagatttacggcggtgtaaccgcgctggcgagctcacccacgcggacagagccacatcgatggtctggtggccgccgacttaccgcgcaacgccacctcaacgttttgacgccacgccacggaagatctttaccgtggccatagacccatcccctagccgcggtggcaatcttatcgccggcgagatctttctgaagtccgatgaacagtgcgccaggtttcagttaaaaaaatcgcctgacagcccatctttggatcaagttatctccaaattcctcatggcaccaagacttaatacctgtagcaaagttgttcttctacaatggctctacaactttgttacattgacc

SEQ ID NO: 140679 - DNA, 322 bp, Zea Mays
ccttcctcgtggtctggactgttttggaggtcaggcaaataaccagaggtgggtggatcaagattgctgacgtgtgtgggtgtgtcgaggcttggcatgatgatgtgtcactatcttcatccttctgtgtcacgttttggtgtaggcgtcgtcgtgttgttttggcaatgtgcgacccgtctagcagagtcggagctgctcgtatcttgtgttgagcttggtaactgtaatactcaaaattgtaaacaaagaataatagagagttatccttattttatgtgtcatattcgcattatgaaaagagcatacatgtaagtaagag

SEQ ID NO: 140680 - DNA, 655 bp, Zea Mays
taactacaaaattttgtttaaagactactgggaaggaattaaagatgcagaacatttgacattggttgacctggaagaagctagtgatattctgaacagaaagcttaactgtaaaggagcaactttagagagatttccagctgatgatcacaagttagatgaaaatacatctcctgataatggtgctaatgatcaaacaagatttccagctgatgatctcaagacacatgaaaatacatctcctgataatggtgccaatgatcaaacaatttcttttgactctgagggcaaacagattaaagcaaacacatcacggaacaacaagtcaaataagagaacctatgttgggtggggttccaaagagctaattggattcttgtcaagtttgggaaaggatacgtcaaaatctcttgatgaactcgaaattattggagttgtcaaggggtacatcaaacagaagaaactgtaccaggatgataagaaacttcgtttcttgtgtgatgataagctgcaacccctctttacaagaagaaaagtgagatgtaaaatgatccgtaagttcttggcagttcatctagcttcaaatgctatttcagaggatgaaagattttgtagttatgaagatgacgatgatgccttagttattaaaaagaga

SEQ ID NO: 140681 - DNA, 546 bp, Zea Mays
accaagcttgccttcgcctcggtataccacccacaatccaacggcgtcgtcgagcgcgccaacggcaaaattttcactgccatcaagaaaaggcttctcgacgacaagaagggtaaatggaccgaccagctacctgaagtagtctaggccctaaacatgaccgaatgccgggtgaccggattcacacctttttgtctactatatggatcggaggccatgacgccgcaggagataaagcatgggtcgccccgaacaagcacatcagcagtccccgacatagatgaaccaacgtccaaagacctcatcgatggagaccgcgtcttcgccctgcaggccttcaacaaataccaagctcaaaccaaggcctggcgcgaccacgtggtcgtcccaagagagttcaacgaaggagacctcatactcgtccggaccacccggatagagtcacgaggcaaactggagtcgaagtgggggggtccattcatcgtcaaatcgaaggcgtcccccagcgcgtacaggctgacaacaccatccggcgaagacctagag

SEQ ID NO: 140682 - DNA, 470 bp, Zea Mays
gccggctggtgtagtgctcctgccattttgtatgtatttttggagtgctgcatctgtcaggaccctgctctgcatatgagcagtggatagcttggattggagctgtagagagtggcacagcacagcgtcatcaaccatagcggtgagcagcacgcacggtcccatgcaatgcacctgccaggcgaacacggaggggaacatgcgctgcacctgcacggggttggattgcctcagctttttgcctttgcctttggttggaccagtgagaccgggacgggatgagagcgagacgacacggatggacgcatgaagcacaggcaccggcaagacatctggacatgtctatgtcagggtacgtacgcgtgcgctgcggtgggggagggggagcatcctctcgctctcggagggccagccgcacagcgcctcgctgttcgtccccgctcggaatcggagccccatgccaggccgcc

SEQ ID NO: 140683 - DNA, 319 bp, Zea Mays
tgcaggccgcttatgctcggccttcacgcgctgacatactttacagacggccacatacttagaaacgtcaaccttcatccgcttccaccagaagttttgcttcagatctcgatacatcttggtttcgccagggtgaatggtgtaaggcgttttatgagcttctctcaatatatccatcttcacctctgatttctgaggcacacaaaggcgacccctgaaacgaaccaaatcattctcatcgatggagaactcccggggtttaccatcgccaaccctcttttgagcttcctgcaataaacgatcctgctgctgagccgca

SEQ ID NO: 140684 - DNA, 562 bp, Zea Mays
cggaatagcacaacaagtgcgttaatcgaagtcttttatttaaaagacactccgcgcaaaagtcgcccacgggtgcagccggatcagcacaggcgtgcgaacacggccaacaggccacatcaccatacaaattacagttacatacactcggtgagggcatcatatattacatcggctgaactttcgggatgatacccatctctctgtaattgaacaacattatcctcaattcctcaccctcgaaaaggtttcgtagatccccttcacctatgcttgccccaatcggcgaggacaacaattctcgtttaccaatccggtctacttgaagacggccacactccatccccatacgacggcgcctaccacttcgcaaaaactcacccacactatgtttcgacaccacccttcaccgcctataccaagtactcgcactaggaagatccccggcaccctccacacgcggcaaagactccgctgcagccacatctaacgcagcaaaataatccaagccttcatccgaggactcctccgtccaggaaaatgaactcccagattcaccatc

SEQ ID NO: 140685 - DNA, 636 bp, Zea Mays
cggtgacgtagtggcgagtcactggcgcagacgagcagcaggcattggtgtggtactccggcgtggggaaaggcgttcaatcgtgaactgacggcgagctacacggagcgacaagcggcacaacagcagctggcaagcagaggcacggtggcacgacgatctcatgagtagagagcagggagagaagggtgctcggggcatagtagattggtgacgatggcagacggcgaggcgtagcaaatcttcgaacgcgcgcagaagcttcggcaggcacagaaggagggagaaaaggctaggaacggttcgacgaggtcacgagcatgtgatttatagggagagggagaagaaacgggcatcggaagggcaagagaaagcgcgtcggctccattaatgatgcttcggccgagagtttgcaacggacaagatgaagctgctgagtggggagaggagaaggcgtgctgtagtggggaaggagactaggagaggagcagtgttaacaaccttcctaacagatgagctgatacaagaattccaggagaattccaggagtacagatgaggaagaacagcaggaagtattgaagaagaaataagaacttgggaaacaagttgagttctggtaaaatgattatccatc

SEQ ID NO: 140686 - DNA, 650 bp, Zea Mays
gaaagggccaatggaatgatactggaagcactcaggaagaaggtgttcgacaaaaatgaaaagtttgtaggaaagtggatcagagaattgccctatgtggtttggagcttgataactcaacctagtcgagccctgcatggaaataccccgttcttcatggtctatggttcagaagcggtgctacccgccgacctcaagttcggggcgccaaggctggtcttcgaaagcatagctgaagcagaagctaccaggctagaggatattgatgtgctggagaaaaagcgattgaacacagtaatttagtcagccagataccagcagaccttgaggcgctatcatgataaagctatacgacatcaatcctttgtagtgggagatttggtccttcgccgaattctaacgggggaaggacgacacaagttgtcaccactataggaatggccattcattgtatcggaggtcactcggccaggatcataccggcttactcaaatggatggtacggaagtggggaattcatggaacatagaacatcttagaaagttttacccttagcatgacctcgaaagctatcggagcaacattgtgctctataatgggagaatacatcatcaataaagttttcattttcaagggcattcaaactgtta

SEQ ID NO: 140687 - DNA, 391 bp, Zea Mays
gagaaacatcattttgcgagtgtgtgaaaaatgcaaactctatggtgaagaaacataaaaaaataatgcatgagtttcggatgtcctcgctggagaggtaggcttggggaaagatgaatttatagttataggggagcgaaagctgtggcgggaataggaatatctttagtacgaaaaccggtgctaatcacttcacttttagtagcggttctttttaataattgatactaaagtagtttagacgtgaacctaaaacttgttgcggggacgatggaaaatagcctcaaagtactagttctttgtaagagtcggtacagcaggctaattatttcttgcgccaagttggaaatattttagtaccgtaccggttattgtttccggtactaaagat

SEQ ID NO: 140688 - DNA, 647 bp, Zea Mays
gctcatcaaggaaacatgcaggcgaggctgcatagcataggaactgatggatgatgtccactttcttcctctagtccacaaacttcttagaggcggagatgcagatggctacgaggaacatgtctttcttgggttccactcaatggtctatcggttgaccgacaattccctcttcttgcaccaataggaaggggaatcgagatctaggtcgtcctcggtcgcattgcctaatcctgaacattgcaaagagaggagcaccacttgaatcttgcggttgattttgatctgactctcgagcgtgggctgaagattagggatagagatggggataaggatgggaggactcacaggtgccgatgcgcgacttgtgctccctaaagggcgtggatgtgccgatgcgaagatcaacaaggagacgacgaggaggaagccccccccccctcaggctatgttcgtttaagcacttcccggccgagaacagggacaaaaccccgtggacctccctcgtctggaaagaagcccagcccatgaaaaaacgtgtattcggttaacccccgtgtggaccgtatcccgatatttcctcttcgttccataccgggaaccacgcccggtccctgcggggtggaaaatatcccacacgaaggatc

SEQ ID NO: 140689 - DNA, 469 bp, Zea Mays
actatatgaaaaaagctagagtaaagctatagctaagcatagtgggctatttagaaccctgctctcggacgtgactcttgcgtcatctcttgtccgtgtcaagctgtatatagtttggcttttgggaattgttggacatgtgctaacaaactctcgaaccatgcacctaaatacatgttgagttttggggtgtgtgaaatggaagtacatacatgagctaattaagttgcactttgaacacatacccctcatatgtctttttttcaaaaggagaaacaaactctctcgccctctctgaaaaagtgcttaaaaacgagcaaaacaagtcatgaacgaagacattctactcgatcgaagtggactactttggttggtgttgcatccttatccaacgcacatttaaacgatcagactaacctctcgctctcacccctccacacatactgtaggcctcagcatcaagcagtcg

SEQ ID NO: 140690 - DNA, 619 bp, Zea Mays
ggaggcacagtagcgtacctaggtcgatggcgagttatagtatttacatgggccagcacggaggagctcatcattggtctctttgccaacaactcgacagcagcaaaggcaatggcgattgagcaacagtggcgaggaagcaattgcgaattcgaaagggacgtgtcataaccaagcgacaaggcaagcagcattttataccagcaccagcacgcaatagtgtagcctcattttttcaatagtcacatccagcggccccctcgaggcgattcaccaggtgatcgagggcagcgtccatcccattctaaatcaagagaatttgggaatggaccattgggatgaaccactcccttggggggctactattaggcgaaggccaaacatgacctcgatcacaatgggaaggcttccccttcgcattttcaactaaccaaaccacatgtgaaggggccttcgattctgcgacctaccataaaaagggatgatgtcaagaggaggcccctaaacgatctacaccaaccaaggcctttgccacggtgtcatcccagagctatatgtgccatacatccatccgaggagagcgaagggcaccgagacacaaaggatccataggtgctgg

SEQ ID NO: 140691 - DNA, 297 bp, Zea Mays
gactatctctttgagataaatccgggcgagggtggctcctccaaaggtagttttcactgggatgacgtgggctaccttggtaagacggtctattattacccagatagagttgttccctttttgcgtccggggtagtccagttacaaaatccatgcctatctcctcccacttccattcgggcactggaaggggttgcaataggcctgcaggcttctggtgctcggctttcgttcgttggcaagtgtcacactaggccacatactgtgctatctctttcttcatccctctccaccagta

SEQ ID NO: 140692 - DNA, 456 bp, Zea Mays
gcagatgggttcactaaggctatcaccgctgcaaagcttcgacagtttaggaccaatctcaaccttgtaagtggctgagattgaggaggagtgttagatggtatgaatatctgctatgcgtgtattgtagatgggaagtgatccttgattacaggatactccttccatcattgttgtatccatacttgtgtacatgccaccgccgaggggcttttccttgtgcttatataacacgcaaccgtggacctgagaaggcaccacgttacaccaattctcacagcaggaaccttgtctgctccaggctaggaaaggccaccacaaatacgtatactctgtaccttgcgggatcgaagccagcgggggagggagggggacctgattggggagagacgagcaccggtgaaggagaggaacagcaccggggagaagagacatgtcaagggcctcagcgcccaa

SEQ ID NO: 140693 - DNA, 339 bp, Zea Mays
ttcagggtctcttacgcaattttacaaggccgaaggggtacgggtgcgctgcattcgcacgatcaaaatcggacgcgtgaaattagatcaagcccatcccaaaccggtacagttccacaatcgtcagattaaagatctacggccaaatatcaacttcgccccaaacacgtctgatcaaatccttatggcatggattcaatgtgatgaaaggttatctattgtcttaatctgatccgcacaattttgattcgacggtgcaaatttaatgaggcttgacttcccctggatcgcttgattctgcatctacaatcacgattaccctatgtaatacaccagcgc

SEQ ID NO: 140694 - DNA, 386 bp, Zea Mays
cacaaatcaaactctgtttggaaagacctcctgaaccgacacgttaggcctggtactggtagaatggggaaaaggaggatgaatttgaatgtgacatatatcgagaggaccttcggggagccaacgatcaatcaaaccaaaaagacgtggaagtgccgttgtagacattgacacatagataattgacgatccagtaaatgtaagacggagagccattagagggagtgttcgataaaatttatctgggttcagtacattttatgattttcatgtttttttaatcaactgcatatattttcatgattgtttttacaaaacgtatctgtcttagctgcacgacaggtttattgttggtcctgaaaaaaaaccattgctacttgctctag

SEQ ID NO: 140695 - DNA, 805 bp, Zea Mays
cttctgtggtccactaaaatttgtccaccttcttaagcaatttatagaatggcattcctttctcgcttagccttgatatgaatctgcttagcgctgccatgcatccagtgagcctttgtacctttttctgtgaccgtggcggttccatcctcataatggcctcaatcttctctggatttgcttctattccccgatgactgaaaataaacccaagtagctttctggctggcactccgaatacacatttttttggttttagcttccatcggtagcatctcaagctgttgaagactagttgcagatcctcggtgaagttttctaagttttctgtcttgataaccacatcgtcaacataagcctccactcgcttgtctagtgatcgactaagcatgtctagatggctctctggtaagtcgctccagcgttcttgaggtcgaaaggcatggtggtatagcagaaggctccaaatggtgtgatgaaggcagtctaggaaggagagcatagagcagccagtggtcgaatcaactacctgatctatcctagggagttcgaagggattcttcgggcagtgcttattgagatcaatatagtcgacgcacatgagccaatcaactttattctttttgagtacaagaatggggtttgctagccactcagggtgcagtacttctctaatgaatcctgctgacactaggcgagctaactctgcacgaatagcctctctcttatcgggcgtgaaacgatgtagcttctgtcggatcggtctcgcctaaggatacactttaagtttgtgctcggccagttc

SEQ ID NO: 140696 - DNA, 452 bp, Zea Mays
caggggcaccttctttttccaaaattagtggtgcagtctccgaaggtcttgcttcggcaaaaattgagggtgcagcctcagaaacagcttgcgcagtgccagtttcgtcagatttctttaaaatttcgccttccaagctaggaacttcagcagaagcaggagttgatgccttcacaaattccatgacagcgtctagcacgctgtccattctcctcttcctcagagttgttgcagggatccttgacgccttcggcaattccatctcacgtggtggactcagggccttcagctactctaccgccttcttcagttttggctcttcagtcggtcttgtcttagcttcggtaggcacagagcgacttggctcagatatagaagcagacccttcaactagcttcggcacttcaactgtttcaatgcgcttgggccgatgagtcaaaactttaaccttc

SEQ ID NO: 140697 - DNA, 433 bp, Zea Mays
gggaaacttagtgacatcattatcattgtgcatgcagagttcaggagtatttcctcaacaaataaaacaattagctaacagccagttgagtgtgaagttgcctaaaaggttccttgaattatatacgtctaaaaattaagttgatctttccatgtcctgtcaaatacctgacgaacttgtgaagaatgcaagtgcgatccaactgatgaaagattcccccactccgctaatgatgagaaaagggcccagatgttcgccatccgcaccaactctactccgcttatcttagcaactaccatgcatgatttgcttcgacctcatcattggtgcagtgcagaccaattgacagttcatggattggagaaggacgcctctagtcctagctttaggtggcatccgaaactaacactgaaagacctggtgtttgagatag

SEQ ID NO: 140698 - DNA, 434 bp, Zea Mays
ggtaacttctgttgtgagccaaccgatcaaattttagtggctcagattagatcggcgtgattgcgaaccggtacgccataggggccctcggatctagatccaatagcccgggttttacacaactgagttgtaatctcgtccactcattcggatcgaatggcacagatccacccacagaactggtgcccatacattcaaatctgagccatccctccgagatccaatggcactgggcacgtctcctttcctagctacccagctgacccaaactacggcggcgctcattgttcggccactatgccccaccggagcacggtactgagccaacctggtggcctagaactaagcgaatctgctacatgatttgacgacgacatgatgagcaggttagtagccaacttaccggccgttgaagttgtggttggagcttgccc

SEQ ID NO: 140699 - DNA, 554 bp, Zea Mays
tgatgggccgattcctcctgacggcgattgcattctgctgcaggagttccaacaaagaaagaaaacaatagggggggggggggggtgccccagccttttgttgcctctttcgtgctgcagttgctctgaggaaagcagacggcgcagctatacacgaaattcacaagctttttcgtggccgtagcaggaggcgctccccggaaaacctgcctgcagcacggaagtgggtgtgggactgtgggtgcttgctcgctgcagcacccattgcattgctactcgccatcacacatcagtcctgcatgctgctgccagtcctttttctttcgtttcatacgtactccgttattattggagcgagcttccaaagctttcgatctacgctgccggtggattagggctaaaatatcgcccgcaatgattaacacacacaaaaaaaataacgataatatcgtctgccaacaattagatagataatgacgtttcccgtctcgttaattctggctccatggtagtgccctctccttgtccatctttttatttatttgttgattcgt

SEQ ID NO: 140700 - DNA, 367 bp, Zea Mays
gagctttcttgaaaggtccaatcatatccagtccccagcatgcgaacggccaagttactggtatggtctgcagttgctgtgctggtagatgttgttgctttgacaagtactggcaggcttcacacctctgaactaactcggctgcatcactttttgctgttggccagtagaatcccgacctgaagaccttcccaactagtgttttggatgctgcgtgtattccacactgcccagcatggacctcatctagaagttgcttccaagtggatgagagaatgcatttcatcaggatgcccgatgcaccccttctgtatagcgtttccccaatgagtgtgtagtgagctgactgtctagcgatgcgctcggc

SEQ ID NO: 140701 - DNA, 378 bp, Zea Mays
gatcatcaagacatttatttatccaacggacatagaatgcaatgattgacaaaacaaagtatcaatccgccgtacaacagaaatcatgacggcaccgatggatgctatcaactacccgtttaaacatattaaacttacttctcgcttcgccactacatcactcctcaatcacacacccatcacgagcatccttcacacgtttatataatagcgacctaagcatcgtgttacacaatacatgcatctttcctcgtcgcgagtataaccatattacggcatatacccgcgcacctcaaacaaacatctcacgccaccactactatatcacaccacggcactcacacacctacgtgtactaattaaatcctcgcatcccac

SEQ ID NO: 140702 - DNA, 809 bp, Zea Mays
gccgaagtgagctcgagcgagacagaggtccgcccgaggtcgcgaccgagcccgtcccgagatttgatgacgcgcaccacagttcgtaagagtggcccttcgcgggattcacgggggagcaggtggccgaggcctggctcgggcggggcagagtttttgtcctgagggtgagctctgcgtctggcgagacagagtttgcgcccaagggctggtccgctcttctgtcatattacatgtcttgtcaggggctagcagacgacgtgcgtgtacagtggcgtgtgcgtaatcatgatggtgaatctttgacaagactgcaaccttattgccactatacacctgtagcgctgggcagggtaggtatgtgcattgaatgcgactgtcccctattggccttcgggtgcactttgtccttatcgcctgagataggttcgggcgaggcggaaattggggccctatggtgagggatcctcgggcgaggcagaaactctcccgagcgtgtgacctgctcgagaccgagctcgggtgagccagagattttgggtagaccctcgagggggacttcgagtgaagcggagttctcgattcttggtcctcgggggatgtactttgagggtgttcctagggttttaagcgcgttttggggtgtagtttggtacccctaattatcataccctacagtagcccccgagcctctcgaagaagtgttttttacatttgtttggaggttcttctgttcttggtgtgtcaccttgccctaaggagtgggagattctttgtttccgatgggtgcgtgcaagcgcacccgtccg

SEQ ID NO: 140703 - DNA, 561 bp, Zea Mays
gttcgagccgtagctcggttgtctgcctccctgtagcggatggtcctaggtttgatccctgctcgtcctaggattttcccacctacccgagaattttctcaggttttagggtaacacacatgtgcgtttagcagtattgcgtgttctcatgcactagaggtctaggcctctcaatctatttatgtgtgtgttattaacgcgcacgcatatatgtgcatgtggtgtgcgttcgtgacgtccttgtaccctgataaaaaacaaagatttagatcgctgaataacttcatcttctttacgcactcaaatgcaatacacaatattatttagatcatctatcatctctctctgtccccagcgatcccacccctcccctcactcgcgccaccgccaccgtcaacctctcccatccatgagatgccagtctataccactatatagaccatcagtttaaacttcgctagataacccacctcccttattcactcaaatctagtggacaatattatttagatcatcctcatcccttccctccccctctctcactcacctcgctgtcgccac

SEQ ID NO: 140704 - DNA, 592 bp, Zea Mays
tttaacggacctacaaagtttagcccaaattctagggtgcaaagttaatacgaatcgacagagtaatcagactcggtttggacttcccatcatgtgctaaataacaacgttgttccgccagagcagatgcatggacagtattttccaaatggttcgtgactcggatgaacaaaaccctaacacatagacgagatctatgtacatgtgtggtcgtgggaatagtcgaatcgggtcctaaaatttcacttcggttctctacggaacgaaaggtgttcaatttcattcatcaaaggaaggcgcttgaagtagggataatatacaagatcacagtcgtacctcaagaacggaagatttggcccgcaacacgatgaatcgaagcgtcgacgtccggatctgaggtagccgtcgaaggttggagacggaaacgaaggaagcggtcgcgatgaacctcggcggaagtggagttgaggcctcttcgaacgggagtgcctgctcacgacctccacttcgtcttcgtcgcaggcgaccgggaccggcgccgactcccccttgcgccggcagatccgccgccgcgtcgtcggaacaaatccgc

SEQ ID NO: 140705 - DNA, 523 bp, Zea Mays
ctgcagaacacgaggttcaggcatcttcctcaacgtctgagtggaggaatccagaccagcattgtcccaggtgaagctggtgaggatcgcctcaacacccttgccggtgtagtggccggtctcaacaccgacctggacagtgccaccctagatctctacagggtgcacttggagctggagaatgcccacgccaggattgcagccctggaagcccaactgcaaggactggatccgcccgaagcctaggtccccgccccgacgttgtctcctccccgcaagaggctgcgctatggagagcccggatccgtcactaggccgcaagagtcatgatgtaataagttatacttcgcgttaaacgatgatactctctttaagttatcatattaataaataacaaccatgtgatggtgattggttgacatgcttgagttggatctttgtttgagtgcaatggtcttatggaatgatggccataagaacatataaaaattttaaaacataagctatttcccctctagaatct

SEQ ID NO: 140706 - DNA, 606 bp, Zea Mays
gattgggatctccgcagtgccaacaggcatttgctggcggttggttgcttgcaaccgagggggcctgaaaggagctctgactctgctgactgtagcatgatggagtgggtccagctggtctattgaagcttggtcccttgggtggaagcccaaaggatcgagctctctggtgatggtcttgctgttgagctcggagaacctagaatttcctcttgaggtgccctttatcttcctcttttgacctttccacttggatggctttgttggagaggtgcgagaagttgaggaagtcttggctggcgaggatggtcttaagctctggtcttagccccttcagaaaatgggccatcttcctggtctcggtgctgacatcgtcaggcgcgtaacgagccaactccgtgaatttgtgcacatattcactgacagatcttccaccttgagttagttcccggaattcatcttccttgagttgaactatccctagggtacgtggtgctcacggaaggcagtttcgaattttgcccaggtagcatccctgacggtctcgctgaaggtatcccaccatgctagggccatcccagaaagttgatgagcagccaattgaac

SEQ ID NO: 140707 - DNA, 377 bp, Zea Mays
agcgaaaagagatggctatacattttatggctccaccaagaataatcatccccatcaaagtgaggaggcttaccaagaggaattgaaagcaattggcaattcatggaatgagaagttcactagtaattaaaagggatgtgattgaaagtagttttaattggtttttgtttggaagaagaggattcatcgtccttttgcgaagaagaagtgttgctctcgtagtagacaatcttcttgatgcacttcttcttcttcccctccttgcttgatccgaagtcgattggcttctcgcctttgagctcatcatcgacggtgatcttctccttcctgtcatgttcgtcggccacttttcccttccctttggagtcttgtcctac

SEQ ID NO: 140708 - DNA, 330 bp, Zea Mays
ccggtggagggttgtacacgtcgatgccgatggtgttcttgggtgacaggccatactctgggtccgtcagccacattttattgggagatcgatgaggatgggtggcaagagtcagattgcaagggcggagcgcatgcacatgcggatcatgaaggcattttattcctatggctgatctgggcagcaatcggcgattctggattggtcggatcggagtttcttatgccgatgaatttatgttcttggatagaatatgtggccagaaggggagagatgagagtgtgggaaggagagaactccaaggaattgaaggaaggcgctaacagttgt

SEQ ID NO: 140709 - DNA, 489 bp, Zea Mays
atcatccctttaggatgccttagatcaactcgacgaggtacgcgacatcaccctcatgaagtcagccaagtaccagcaggccctacgtcgatatcacaattgtcgggtaaggggttgggcgttcagcgttggagacatggtaccgcgccttgtctagagcaacaaggatcgccacaagctatcacaggtatgggaaggcccctacatcatcacataggtacttcgaccgggtacgtacagactgcaaacggttgataagcaaattttctccaatgcatggaacatcgagcaactgtgtcgtttctatccctagaaatattatgagttttgtgctgtcgagatgtatgactaaccaaaaacgtaaaggttcacgtctcagcgctcggcttactcaagaatgaaatggtcgaccccatcgcccaacttggtacacccatgccacttttttctataggacatctaaagcaggactcggcctcccgactgacc

SEQ ID NO: 140710 - DNA, 391 bp, Zea Mays
tatgagcagtgcttaccacccgcagtctgatggacagacggaacgggtggaccagtgtctggagacttatctgcggtgctttgtgcaatcctgtccccgacaatggtattcctggatacccctagcagaattctggtataatacctgttatcacaccgcgctgggaaaatcaccgtttgaagttctttatggtcatactccttcacagcttggattgatatcagctgaccaatgttcagtaccagatctgcaggatttgctccaaaccagacagcaagtaatgcaacaagtgaaaatgcacttacagagagcccaggatcgcatgaagaagcaagctgataagaaacaagtggagagaaactttgaagtgggagattgggtttttctgaag

SEQ ID NO: 140711 - DNA, 974 bp, Zea Mays
gtcggagttaaacggcgcatacgtggcaccgttccctgagtccagccggagacttcaccggcggccaccgtgaccattgaattttgccgcagtgtcgcccatgcctccatctccctcactgtacctctttccaacgtggtaggcatgtgcttgcgctactatccttggccagggctcatctgttgggtcgtcgtgcctataaattgagcagggagccacggtgaggtgctttcatctccaccagtgaagctcagtcgaagtcaaatttgcgctgccctctccatcttcgcccaaattgattgcgcgcaatgaaaacacaacttcttacgaccctgtagcctcaatccccaaccccaatttcaacccgagctaccgcgacgccgatttcccccaaactggtccgccgcatcgcaaagaacagcccacccgtggctgggtcactctggtgagttcctattcaattcaagtgtcgtttccatgcctctgtatgcttgcgaagttcatggtggcgcccgtttgctttgatcaaccatggtctggcgggaacatgtactcccgtgctcggtttccgccgtgcacttggaccggtcgttctcggggtgttcggatcaaattagtgtgtgttccgaggccgtcgtaggccggtgaagcctctccgttagttattccgagcagtcatcgccggccatggccggtacggaccacgtccgggacgatctgcgtgcgcgccgtcgatttggaccccttcggagaagagatagaagtacaggggtgtaatcgcaacttgttagtgacactgagaaaatagccgaggacctatttcggtttagttgttagtcgaagggcctccatgcaagtctgtcagtgcgggcgcaggcgcgcgcaattctgctggtagtgggccgtcctaggctggattcggcccagtgttattcactggttttcctttttcttttatttccagagccaaaaca

SEQ ID NO: 140712 - DNA, 359 bp, Zea Mays
ctgactgaagtacaccttcagattcagggagaagtttgatgaaccaaacaacgactggctgaagtgtatcgaagctaccagtgatgagctacttggagcatactccaaagccgaagataatgctctgtccgcagcctttagaggtcggggcaagaaaaaattaaacatggtatttgatgctattggcttcgtataccctgattaccgctacccactgcgagggcaagagaaaaagaggaagattgccgcttcggtcaccccagctgagcctgtgtcgaagagcaaaaaggtgaaggttctgacccaccggccgcgttatattgagccggccgcagtgcctgaatttggcgcagggtgct

SEQ ID NO: 140713 - DNA, 1110 bp, Zea Mays
gcctggcaggtttcgactggggtttggttcgcggtttagccggagctctgggctccgatggtgtgtgtttcagtcgccgcatgttaattagtggctccatctgatcacatgttagcagtggtgtggtagagcacggattgtgccttgagaaggaagaagaagataggaagtaggaggaaggcgacgcgtgttcactattgcagtattctgttttttcttaaacgtttacaaagacctgtgcctccttatattggagcactcacaagactcacgctacaacctagttcgggtcactcacacgagtgttgggctggcgcacacgcaagccacgtcgcggcccagtagtcacagattcaggtgtgtcgcgtgcagccatctcctgaacaccatcctctgtagcctgatcaccatcctcagcgctgacatcccccctgggagaaaacctgcttgtccccaagcaggggcaccgggaaacgattgctgtagagccacaaaatcttcccaagttaccaaggaggacgacatactggaccacttgatcagcacctgcaagcggccatcaactcccagacgacgctgaagaatagcttctggaatctgtatgccagttaaggaattgggtagctgtgctagcgtgacatctgaaggaacaatgcgcttcaactgggacacgtgaaacaccggatggatggttgaagtagaaggcagctccaatttgtaagcaacactacccacatgagccaggatcttatagggaccgaagaatcgaaatgccaatttttgatttgcctgaggagccaacgaagcctgcacatatggttgtaatttgagataaatccaatctcccacaacaaaggatctctcggagcgacgcttgttggcttgcgtttgcatgcgatgtcttgctcgggcaagatgctgctgaaccaagtcaatcatgacagttttctcctgtactcactcatgcaaggatggaacatggaaaagtgaagttagatcgatccaaagtactttggagagtacccatacaatacctcaaatggtgaatagcccagagcggagtgccaactagagttgtaccaaaactcaaccagatatgtccagtccacc

SEQ ID NO: 140714 - DNA, 466 bp, Zea Mays
atcactaaagacatgtttttaatgcagtggaactcgacatcaatgtcaatttctaggttctcatctcacatacaacgctcatcgacagagatatatgggcggtgtgtcctgtgtctaaggaaagtattattagtacatctaagactgatgcgataggctttggcgttgacatcctaacagttccttcctcacgtagccttatttcctattttttcattttcattgccgacgccactcttgagtttagaatctctaacttcaactgcctccaaatttaactatgttgttccccattgacgatggccccgaagaagaccttgagcaagcgcgggaacagcatcgacgggcttccacacaatgaaaactcgcgaattcccttcccttttgctactttccctaagtcttctgtgtttgaagcatctcctccaattagtggatatggttcccccatggatttaattgcatg

SEQ ID NO: 140715 - DNA, 611 bp, Zea Mays
ggcgctccgccgagctcggggtgcagtggccgccgtggtttggttccgtggtgggtgatggacatctagccgtccatcctttccgttgtaatcgtgacactacttagtatgttgggattaggggatttgaggtccgagcgtggaattcggtggaactccggtgggtctctggcggagggagcactgcgaccgctggtgtggtcagtgatagggataggagggagcactgcgccgtccgatccggatcatgcggatgcgattagatcgcgcgcaacgcttcagccgggagtcacatgggccgttgatatattgtggacgcctcagattagtagtaacgcgttcctcttcggggggattaatcggatcccttgatccgagggcgtttggtccggattgaatcgtggcgtggtcgtgtgtgggccgctgatccatgatcctagggccgcagttgatcgctgtttcttaaaagcgctggtgtaatccacaccgatggatgatgatcccatggccaggattctaagataccccttcgcggtgcgcttctttcaaaagagaccccgagaaagtgacaaaacaacccgcggtcctggcaggagtttttcgagtcttag

SEQ ID NO: 140716 - DNA, 507 bp, Zea Mays
tgccatgatctagagatttgaattattctaacactttaccatttgttagagttaaaacaatcaaatgaggaccaacaagtcaacttgcaaattttattcaagtcatttagtacactaaaactactacaaccaatcaacgacgcattctccacgataatcacccaacaatttgcgttttaaattagacatcacatgagcactaatacttttcatccgcgactataaccatacgcatttaggatgcaacaagcaaatttactgtgactacaagcttaactaaagtcatctaacgagtcggctagctagagcaacgacatagcccgctaaataacatacacgtcagcttgtctattattatcaaaatctgagacaccacatacactacaacatttttataaacattcatattcacaagtatttttgcacaccgaccaaatcatacgaatcgtaaactactagtctccaactcacaatcaccatgcatttactccccgatcatgaacacat

SEQ ID NO: 140717 - DNA, 629 bp, Zea Mays
cggggatgtttgctggctttggcagttccgttgcgcacgatggactcaacgccttcaactgttcttccgtcttctctagtttcggctcttcggtcggatttgtactagcctcgactggcatagcacgacctggttctgtggcaggaacaaccccttcacttagcttcggcacatcggccgtctcaatgcgcctgggtcggcacgtcaaaactttaacctttttcaacctcgacacactagaagatgccgaggtagcagctttccttttcttcccttgctttcacgtgggatagcagtagtctgggtacacaaacccaatatcatcaaacacccttttcaatctcttcttgccccgagaaccgaaggcagttgtcatagcttcgtcttcgaccctcgagtacgctccaagaagctcatcgctagttgcctctatagcatctagccagtcatcattcggttcatcaaactggcttctgaaaggtatacttcagatagactaagccattttgactggagccagcggcagcctgcttcggcatttcccatccgtttgcaagtggccacactctataagcaatatgctcttggaccaagtctcttgtgcgatataagtgcacactatgttgaaa

SEQ ID NO: 140718 - DNA, 649 bp, Zea Mays
gcaacgggtcgggttcgggtcgggtggagcaaaaacccgcccgcgaccgcacccgcgaaatgtgaccaaacccgcccgcggccacacccgcgggtggaatctcgcacccgcacccgcacccatcgggtttcgggtgggtttcgggtccccgtcgggttttccattacatagcaatatagcatgttcagcaaaaatataattggaagtaaacaattacatagaaaatacagaccactgcactaatacaagtagtccactgcactaataaacaattaaacacagaccaacagtgagtcagtgagaatacaagtgcacacaaatacataagggcataaggattgaggcagcccagacgcccagtagtccactgcactaataaacaattaaacacagaccaacagtgagcccgcagcaaatagcacagcatcaaatacatcacacggcagcaaatacagaccaacagtgagtcagtgattatccatagaaccatatagctacatcacacggcacaaactccatagtgcaagtaactacatagcacagcagcaaatacacttatacactctagcagtcaagcagaagcacctggcaagcggttgagtggctgacgggcgagcacctggcgaagtggcgagcggcggagtggctg

SEQ ID NO: 140719 - DNA, 455 bp, Zea Mays
aaaaattccaaaacctagtgttggagtgggaatattagcaaatctcttagcgtcaaggtgagcatattagcaaatctcccaataacatcggccattgggtctcttctccaggtgcggtggcgattgtatggtatggtaggagcaagttttatgcgaccacggtggtggttggctgatgtagtggggcatcatgggtgcgtacacacgctattataattcagcacacgcatgtggcgcactgtgaggtgtgaccgcaatcgccaacttgatctcctccattggaggctaaagtccatagtattcgtgcaccgcgtgagtgagatattgttgttaggtgagtgagatctagctcagtcaaggagaccgagttctatcactatccttaccgcatgtgccctgattgagggcacaaccctatcctctagttgtgccccccaatcatatgtgctatatga

SEQ ID NO: 140720 - DNA, 519 bp, Zea Mays
cgaaattctaggccgagggcaccatttaggagaagtttagggtgcccaatataaattcttaggacccacccgtaacgttttataccgaaacccagactgcggcttgattcacctatattccagggtctcttttataaatctaccacagcgaagagttattaggtgatcctaccgtccgatcttctgtctacggccccgattagatctgcattaatccgaacgggtacgcgacgtggaccgtgggatttctgatatacggtgcggatcagttccgcaggagcggtatgagtacaccagacggggacccttgcttttaagatggacgctccagatttaaccaatgaagcaacatttcttagtctaatcgcggccgaccgttggccgatctacggaccagagcgcatcgtcatgcctccgccgccgtgctacgatgggaagcagagcgccgcccgagagttcaccagcgcaccccatcaggcgcccccacgcaccggttttgggctacgatcgcgtaaaaac

SEQ ID NO: 140721 - DNA, 655 bp, Zea Mays
ggcgaaaacaaattatcaacactaaataatttagtatcgggaattccttaactagcctaaaaaaaccttggctatttcagtcgaccataaataaaagtcactcaagaattcttcaaatcatgtagtggtcaaagttttttttaaaaaaaatgtagtgcaataatcatatatcattcttaaaataaatggtttgtgttgttggacttggtacatacaaatgtcgttcacttttcacatttattatgttcagcgtagagcttattaattactaatatgatgctaacaacgtagcggaaatgcacttactttatttgccactagaaggcaacaaacaaaggccagcgcagcgtagggctaaggaatcaactaaacctctttttacacaagttgattagaaagctcctccggcactatgatgatatataggactgaaacaaaactgtaccatatatacttagttgagttgtcttatatatatagccttaattattattacttccattcgattttattctgtgtctgttgcagttggctccatattgttgtgctgatgctccacacagattggaaatacaatactacttgttgaaccaacaacgaccacccatccatgcaccgacagtctctagctagctaggtttttgccggaactatt

SEQ ID NO: 140722 - DNA, 864 bp, Zea Mays
gagggggtgacattgggaggtaggctcgggtggcggggcgtcgggtgtgtgggatcgtgaattgcgtcgggaggcagattggagggcgttaggtggatggaggccacgacatgtggaacgtggcgtggttagagcgagaggcgggaagaggtggagaaggacgggtgcagacagttctgccaaagtggccttaggcgagtcgtgactgcgtctgctacccgagcttggcctcggatgagtcgtgactgcgtctgctgcccgggcttggcctcggatgagtcgtgactgcctgtcccgcccgggcttggccttagatgagtcgtgattatgtatcccgctcgagggtgtcctcaggcaagtcgtgactgcgtctcccgccgggcttggccttgggcgattcttgacagcctctcccgcccgagagtggtctcgagcgagtcatgactgtgtatcccaccggaggatggcctcgggcgagttgtgactacttgtcttgccggaggttggccttgggccagtcgtgactgtctatcccactcgcagatggcctcgagcgagtcattactgcctgtcccgcccgcggatggcctcaggcgagttgtgactatctgtcccacctgaggatggccacgaacgattcgtgactacgtcccgccaggggttgcccttgggcgagtcatgactgcatgtcccacccaagggtggcctcaggcgagtcaggactgactgtctagccagggcttggcctcggttgagtcgtgactgcatctcccgttgggggttggcctcgggcgagttgtgactgcttatctcgcccgagaatggcctcaggcgagtcgtggttgcctgtctcgctcaggcttg

SEQ ID NO: 140723 - DNA, 360 bp, Zea Mays
tggagtgcgagctgtaggtggagtgagagcgtgtgtgggactgtggggagaggatgagttatgaaggatgcatgatccaaagaacatcaaccattgatgtgagcgagtaagagattaatggacttagagtatgatctggtccgtttatttctaatgagttggttttctgggtggagttgctttggtgcatgtagggtggtccatgtctgcgggggtcatttattagggtggctctagttttatttgaagtggtgaattatatagtagtagtgatagagtattaatataatttaaatgatttgccaatgtcatcaatatatgattcgttaatggaacatttattatgattcctacacgaat

SEQ ID NO: 140724 - DNA, 678 bp, Zea Mays
ttaaaagctcaaggtcaaatccgcaaagttttggactgatctgcaattacttttcaatgtgtttggacggtgggtttattctacagaactgaaggggttcttttgcaaatgggtctcgtacgaaggggtatccatgatctctgtctgtccgatcaacgaccgaaggcccagattagatccagttttataatcaaccggtacaccaaaccgcggccacccgatttccatcaaacgaccatgattcgatgtcgcgaaaggttattctctcatctaatcgcagccgtcgatgcacagatccacggccacgacacattctcccttcccaacacagagccacgatggcgccggagaagaccgtggcggcgcggactccggtgaggtcaagatcaacgtgttgttaccctattcctcgaactaacgagcgatttatagatagcgatgcaatacgaacttgatcgaaggtatcccaccgatggtcgatgtgtcgagatccccgcccatggagacgcgtcacccagcggcgaccatggaggtgcggcgagcgattccggtggcctagagcgaaaattcgccccggcgttgccattacaagccaccatgtaccctggcgcttgccctagcctaattctcgatcgcctgccgcacatgcttggtggatgcccccgcggtagatccctt

SEQ ID NO: 140725 - DNA, 684 bp, Zea Mays
tgttaatctttcaccaaggaacaatctatatgtccttatatgtggggtctatgtcctaggtccatactacacctagtaggcctatcacatccttgtgccatgagtcaggattaggcatatctaccttgagccctatctccttcaggggatccctgagccctagagggcaaggatcccgactgacctcagaatatgaggttgggaatttatgggccctaaggctgacgaagggccattagcaactaagtgtagcatgtgttcgagggtcaatctacatcaagcaccccttacttattactataggacatgaggggtcccaagaacttataccgataggttccctaggatgcgaggggccttaggggcttataccaataggtgctccaaggtgtgagggccttaagggcttatactaacatatgccctaaggtgcgagggccccaaggtcttatattgattagtgcctcgtgacatgagaggccccaagaggccaagagcttatatcatcaggtgaccaaggatgaaggggccctagagcacgaggtgcatcaacatataccaattggtgttgtggggtgcgagggccccaagggactataccagtaggttcccatgaggcaaggggccctagagacttatactaataggtgccctaggacacgaggagcttcagggacatgagag

SEQ ID NO: 140726 - DNA, 469 bp, Zea Mays
caatatttgctgaagcggtccaccacggtgaggatcaccgacttgccccccacccggggcaaagcttcgatgaagtccatgccaatgtcggtccacacggcctgtggaatgggcaggggcagcagcagtcccgccggatggagatgctctgatttgttgtgctggcaggttgcacagccgcggacgaagtcttgcaccacccggcgcatggcggggaagtggaagtcgcggcgtagtcgatgtagagtacgctggaccccttcatggccgtccccgtgcacagccgccaccaattccagcagcagcggcgagtccgagggaacatacagccgggcggcgtaagccaccatgtcgtccaggagggaccacggcgcccccctggtacccgcggtaatctcatcacggatggcgacgagagctgggtcttgaagttgagcttgacgaagacggtcgatgaagtcgaaacgag

SEQ ID NO: 140727 - DNA, 639 bp, Zea Mays
tgcaaggttgcatgatgataaatactagaagataagagtaaagagtatagcacattacttctttttaatttccttagacgtgcacattttattcttcctttcattatatatacaaaattaaaatcataccttcggcaacacacgagagatgacccgatggtatttcgaagattgaattaaacaaagcctcaaatcctcccccaaaagttccccgtgtgcatgtcactgtttcgctatttataggcgtggagtacaacctcatcatatttacaaatgtgtcctaaacttacgctttgaactattacacatgatgagggtaaagtagtcttttccccctcgaatcttgtaaactgagttgctaaggttatccaaagctccactaagcttcatcaaatatgcatgacaattgttcgaagcttctcccttcaaacacacatgacattaatcatctttagtcgaagcctgcctttgtcattgaccctgcaacatgcaaagattaagacatgtgatagttgctgagttagtgttttgatgaacttcggaagaaggcccccaacagtaacattaggctgcctgcagtagatcatgtaaaaaataggtcgtctgcagcctccatattccaccgtctattggactcac

SEQ ID NO: 140728 - DNA, 313 bp, Zea Mays
gatgaggttgtatgccctcgtttgtctatgcctgcgaaggcattgtgtacttggtctggtgtgttttgttatgctgtgctggtgcgcgtatagtcagtcctggcgcggacagtttggtgttgtcgtttttgcttttgttgtgctagtccggctgcacccttaggcgtcttctgcacagatagtctacgcggtagacttcggtttcttttgcacttgttgtgctagtccggctgcacccttaggcgtcttctgcacggatagtctacgcggtagacttcggtttctttgcacttgttgtgctagtccggctgca

SEQ ID NO: 140729 - DNA, 391 bp, Zea Mays
tttgaaggggacgcccgattgcgcgcaccaacaatcaaaccaatcaatctatttatcaatttctttactttcttgccctaggagtagtaatagttagttgagtattagtcttccttgacctactttcttaatcactaggcgactctttgtcctctgcgaccccggagcgccccttaaaactatcctccccgatagggtcccttccgggaggcgaagtctagggttctacacctccaaaatacgctctacgccatcacgaacaatccaagccctacatgcgaaccatctcgggtgacacagagaggagacacgcctgcagcgaggtcgtggaccattcggccccgcgccacggaccgtccagcctcgtgctgcggacctgtcggcgtttcgg

SEQ ID NO: 140730 - DNA, 328 bp, Zea Mays
ggtaggcgagattatgtaagagacacaattctatcctccaaagctgatattatttgcctccaagagactaaagtggcgtcgttttcctcccatctgctcctatatgtgtgtggtttcaattttgataagttcttgaccctgcctgctgttggtactcgtggtagcattctaattgcttggaagggagcagtttgtcaagtcatctcctctcgtattgataatttctcggttttagttcagtttgctgcgatggatggtatgtattggtggttcactggtgtttatggcccgcgggatgatgagaggaaaattcaattccttcaggaac

SEQ ID NO: 140731 - DNA, 592 bp, Zea Mays
tagaaaagaaaatattcactaaccatgtagcaagcaagaaacaaggaaggaagaaatcttcaaggcttgaagatcgcctatgctacatatgccgaaaaaagggacatcaatgcaaagattgtcccattggtaacacttccactcctatcttgtcaattaattctcttgtaactaggcaacccaaaattgcaacttgtgctagaaaggtaatgagtttacctagtgctaacacaaagaacgtttgggttcctagatctttgtcgacaaaccttgatggacccatcaagagatgggtaccaaaatatgcttgacaagctttgcaggagaaggagatgatatgaagctttggggtgcttgagagagtcaattcaattcttgttaactcaagctatcaatcttcaatgatctatatccatgattgacccaaggttatttttcaaattactatatcttaaactcatatcaactcagggaaagtattgatgttgtaggaaataaagaattatcctgtgcggaaacaacaaggcctacaacgtggacgaaagccaaaggatggtaacatctatgtttttaagtgcaagtatcttaaatt

SEQ ID NO: 140732 - DNA, 393 bp, Zea Mays
ttcatgagactatattgaaggaagcccatgattctgattactctattcatcctggtagcactaagatgtatcaggttttgaagcagaagtaccggtggtatgtgctgaagagagatgtggctgcacatgtggctatgtgtgatgtgtgccaaagaatcaaagtgaacatcaaagactagctggactattgcacccgctaaagatacccgaatggaagtgggaagagattggtatggacttcattgttgggtttccttgcaccccaaaaggatatgattccatatgggtgattatggatagactgaccaaagtggcacatttcattccggtcaagactacttataaaggttctcagttggcagagttgtacatggctcggattgtgtgtttaca

SEQ ID NO: 140733 - DNA, 771 bp, Zea Mays
atggggctcaggctttggcgttattctacacaagggggctggtcccctagccttcttagcctaccttttgattccagccaccacaagctagtagcgtacgagtgcggactaatcagcctagtctaaacgacatggcaccaacgggtgtatctttggggttgtcttcctcgttcgcaccgaccactatagcctgaagtttctccttggctcgctgttatcaacaagttgttcaggtttgactttacgatggagtgcctcccgggatgcctcaacttggtgtttggcgccctatcccatcgtgactcttactcagcaaatgtgatcgccaaccccgactcataacttgcacctgccgagctactcaccctgtcgacctcctctttttgtctcctcaaggaaatttgtgttgccatgggacttgacgcagaagccaactgcatccaatggcacttgttggacgtttcccttgccctggccctcgggacaactcgtgtgctagtactcttggcacctcttgccctagcctccgaggaacctcttgccctggtcctagagcacctcacacgtcaatgcctaggcacctattgcctgaccctaagggcaaatgttgccccgaccctcggggcacccaacacattggctcatggggcaccttgggcatccgccccagggcagccaacgaagacacgttggctctcaggcacccagtgcatttgctctctaggcatccagcgcatcgaccccccaaggtacctcttgccccgatcctca

SEQ ID NO: 140734 - DNA, 746 bp, Zea Mays
ggcggcgagggctctggcctaaccagggtggtacagttcaactgaacgggtcagagagcttcaccagaggtcagggaagacataggcgcgaggaatttgaaaatggctcaccagatagctcggttcatgcgctgtggtgggtgaccgaagtccggcgagggcgattctactcctccggtgaggcaatgcctcggctcaagcttgggaaagcttcaccgcttcacggggaagtagtccaggggctacggagaggcttggggtcatcgggaagggctggccacggtggtcgtgctcgggcagtgatggcgggtggtggagagcttgctggagttggagtttttgctcggggcatgaggcggagtgaagagcaaaccgttgtgcacatgaggtacttataggcgtcctcggacatggctggacgcaggcatgggggacaagagccgaccttgcgcagcgtgcgcgtagagggcagccagtgcatggccgagcgcttgagcacatgatcgaacacgtggaagtgtgattctgcccgagttcaaacgcctgttggccgacctaaacgtgcatatcttgccaaggatcttgtgtagcgtctcttcactatgccaaggtcttcctgtcgtgtgtgagtcctgagtgaagatatggcctgggtgagaagatattgtggcgtgaagatagctctgtcagcactgtccaaacagagacaaaacctatgtcaaatcgtgtcaaacgattttggtttg

SEQ ID NO: 140735 - DNA, 817 bp, Zea Mays
taatccaaatcttgttgctacttatatacaaaaaactcaaccggtggggtaaggcagccccaagcatcgtatgaagaagacaatctcacatagatcgagaaaacccctgaaccccactacgaaatggggcagaaaatcattaatagaatgagagcgacatctgttttgaagagacatgctaacaatgtgacaatgcattagcaagagaaatatctcaaaaagcttgacaattcaccttctatccctaggtgtcccattgggaatttccacagcttgtagaggcctcacactaacgccaactggaggtgcaaaggttgaccttcctgttgatggagtgcgattcgctgcagctgagtccacaccattccgacctaactaggtaaacaacgacagagggaataaggcgcgccatttcataggcaaactgaaaacacgttgttatttgagatcaataggcttgcttcagcatctgaggatgcacgtagtttcttcagaatatttcatatttcaagttaaagggcaagtaattgtctggatcaagaattcacttctctatctccttcactattggaaacaaaaaacacttcatgttcacatgaaccataaaaataaattttattaaaaggaaacatcaaagcagcaacagcatgaaagtaaaatgtaccagcgagaagcatcaaactcaacaataccatgcttagaacagcaatgcatcaattatcagtcaccggcactgagataagctgagaacaaacccaaatcacaacttcagcaactacattctccagtgccttgtatgtcatatgctttatctcgt

SEQ ID NO: 140736 - DNA, 593 bp, Zea Mays
tcaacctttactcgaaaaacaccttttccaatatggttacttctcaatccctctaaggtgctaaaaaacatttctaagggcatttagaacacatccaagtatataaaccactcagagtataccttatccaaaatatgtccttcttaaccttagattgagctattgtgttgagttgaattcctcaatttgacacttatgaacatgcaagcacatacttagcaaattagttagatcttagggttgtgttggtcattaaccacaaaaaacaaactagaaatggcatatagcacatttttgtttcaggatgtcgaagtaggtatggacggtggatgactcaatctcgatcaatgatcggacaaaccaaaaaaaggttacaagcatcaacagattagaacaagtgatggtggagggtgaagaggtagcccaatgagaggtgtcctctagcgatgcacgcaacatgacccactggcgggctcctgcacaaatcagatagatctcaacaacgtaggagagagcagtggtgcaggggcgatgtgggtcagcgactgtgtaggaggcgccgaagcatatggtcagggtacgacctgctcggt

SEQ ID NO: 140737 - DNA, 344 bp, Zea Mays
cacgcctgcaacacatgcagacacccctacacctaccgaagctaacccggaggactctgggcttgaaggaaatccccttggcaccagccaaagaccacaaaaggcttccgccttggccaacctaacaaccacaaccaaattcggaggagttccttgaaagacaataacatttctgtgtttccacaacatccaagctctcaggacaaccagagtcaaattcttttttgctcagcccactcatacgagcactattgaagcaccaccactgatcaaaatcattctcacccagccctggatggaggttctgcattccaaagggcctgagcagctcaaatcaaaactgc

SEQ ID NO: 140738 - DNA, 535 bp, Zea Mays
cggagatgaccgagttctcgacccttcatggccaggggttggacgaggcggaattcaaggtggatatgcccttatccttggcccttcgtggtcaggggttaggcgagactgatccttcttgatgaaggtcaatcgagtccaggtgatcagatatttgcttattcctcattaatcacgcgtcatgttatatcgatgatatatgttcccgaccgaaccacacaagatgtggtaatatagagttcttgttgaggtggcgagatagtggcatatagggggacaagtttagagagaacgaccatgcaaagtcttatcatcaaatcaccacataagtggcttatttgtaatattttctaactcattattttctccatcacttacaagaccatttttagcaaggtcgtctgtgttagacggctcagctaccaatcgtgacaatacaatatcttttaacaaattaatcgatcgaatcaataacttgatgaggattgctacccatgccatgatgctaactctaggagtggaagcacaccgagat

SEQ ID NO: 140739 - DNA, 345 bp, Zea Mays
ctaccacgttggccttcccgtggtggtagtggatctcaaggtcataatctttgatcaattccagccatcttcgctgacggaggttgaggtctggctgagtgaaaatatacttcaggctcttgtgatcggtgaagatgtgacatttgttcccaatcaggtagtgtctccatatttttagggcatgcactatggctgccaattccaaatcgtgtgtgggataattctactcgtgcggcttgagtaagcatgatgcataggcaatcactttctcattttgcataagtacacaccctaagccttgccttgaagcatcacagaagacgacgaaatcctgatggatgtctg

SEQ ID NO: 140740 - DNA, 699 bp, Zea Mays
aaaggagtgagccccaaaccacccctgccttgtaccaagaataaggaaataaagacatgtcgtgtttccttttccattacttaccctaggacttttaatcttgggacgagattcttttatggggggaaggatgtaacacccctggtgttactgttactaaaatttgagcatgacatcatcagcattagcatttcatatgtttgacacacctagagtgcattcactaggcaaaatttcacacaagttgtattgttatggtattttgcaaataaaaccctagtgtagggtacttaaccttaaatatggatctgaggggtaaaacaacacccaaatgaagaaaactctaaagcttaaggaaaatagtcataaaattttactaaaaagggacttacaatatattcacacccttgaaataccaaaaaccctaaaaaggaccctggaaaaccctaaatccaaaccctagggggttaagtgcaaaattagtccacttttgaactaaagtgaaaaaaccatgataataaagtgtcctaagtcatatggatcacaaatatgtggatttgcaagttaaaccctaagttttgggtctatttgcaaaaagcaccacttaaaccctatacacctaagtctgaaaattcagtgtttgagctcaactttggagctttgtaactttcaaattctaaggtttttgcccaagatcac

SEQ ID NO: 140741 - DNA, 573 bp, Zea Mays
gatgactttgaactacagccccataagctttgccatggctttacgttgcaactccgagtgaagctcctgactacccaagaagctgagagccttatgatcagtctgtatttcaaactcgctccattgcagataatgacgccaatgatccacagccataatcagggcaatgaactccttctcatagatcgacatcttctgattggtaactcccaacgccttactcaagaaagctataggccgcccctgctgcatcaacaccgctcctaccccatcatcacaggcgtcagtttcaacagcaaatggtatgttaaaatcaggtaatgccaatactggagtggaaaccatggcctgcttcagacgctgaaaagccagttcagcttctggtgtccacttgaaagcccctttctgcagtaacttcgttagtggccgagcaattatcccgtacccttgcacaaagcgcctatagtaccctgtcaacccagaaagcctctcaaatccgtgacattcagtggttgcggccacttgagcatagcttcggttttctgagggtcagtagccacaccctcaccaaat

SEQ ID NO: 140742 - DNA, 446 bp, Zea Mays
gcttccatgaaccatggcatcccatttcggttcgtttttaaggcgcgtccagcaatgcatgaaatgaaatggctttttctgtgaggttgcataaagagttgcagctttcgatgtctacacaagaattacaaccacacatcagtgaacgtataccagtacgattacagaaaccttgacatacacaacttattcgaaattaatatcagtttaccttgtcgttatctgtgaggccactctggttttcccttaggactcttgcatagaatccagcaaattttcctgtttctgctcttattttgtcccacctgctactgagagccctattcagcctcaaaggaaactcacctctaagttcattgtaccttttctcaattctagcccacaaaccctccttcctctgccctgtgctaataactgggtcactactaatctctagccatgttttg

SEQ ID NO: 140743 - DNA, 311 bp, Zea Mays
gaggaggatgggcgcctattatggaggtagcaggccgtcaggagtccctcggcccaatatgcggggggtagggaggcatggagaagcatggtgcgaatggaattgttgagtgtgcggatgatgcgttcggctttgccattttggggtgatgtgtagggacaggaggagcggaggtgagtgccttgagcagcgaagaatttggtggtggcagtgttgatgaattcagccccgttgtcagcttgaaaacattttatgggagagctgaattgtgttttggcgagcgcaacaagctcaactaagtgttggtggac

SEQ ID NO: 140744 - DNA, 544 bp, Zea Mays
atcgagtgttggttctcgggtttcgtctccttattctcgttgggacgaccctcctccttttatagactaaggtgggggcagttacatatgccttctctcagaatggattgtctgttagaggttatacctagggtggtagtgaagtcaggctagcggtgctatggtggttcggtgcaatggcgaggtgacacagtgtaggcagacctggaacagctaggaagatctccgcaaaaaagaacacaagtcgatcaacaaaaatcggcagcccctcccccacacggggaggattccaaaacctacaaataaaagtaacggcgtgatggctgacatgcacacatgtacatcaaatgacaagatgttcgtcaatcacatatatattattaatcaatgcagaagaatatatccaaccacatcaactacttgaatcaattgaactaccaagtaaaataaaaaacttttcatttgagcacgtatagataggccaaattcttattccacaaatgtaacctaatctgtactaatatcatatgaggattatgagcta

SEQ ID NO: 140745 - DNA, 411 bp, Zea Mays
cgctccatggcctccatctctcacgaaacctgcacgtcgaggttgaattgttatgtatcgttcacatagcctaggtgtgtggtgacctaacggtgctattgtggcgtagcggatgtgctagcgcgcagcataggtgacagggtggagaagggcatgataaatagactggggctatgttgtgaggaggaagggagatatgtgtggggttgtgggagggcactgccagtggcgacaacatgggcgaggtgaagcgaggcggtagccgagccgtaggaggaagagtgaggcgacaacctgcacattgatttagtcttgagcattatggtgtctggagttgctgaaagggcagaccgaatcgtgtgtgtacatggtcgttcgatgtccatcgtacaactatggaagaaattaggg

SEQ ID NO: 140746 - DNA, 737 bp, Zea Mays
gccgctggcgatggcatccattggagacgtccaggagctagacccaatcgccgaggatgaggagaggaggctagaagacgagaacgcagccgatgatgcactccagttcctcttcagtggtgatgccgtcgttgaggcgggaaccgcgactggatccatgccgactggatccacgccgacgagccccacggtcgaggcgaccagtggctctggatcccgcatccgttcgaggaggaggggacctacatccaaagtatggcaagactttgaagaagtgactgccatggagggaggtaaggaggtaagaattgctgccgtttgccattactgcaagcaaactttatctgctaagtcttcttctggtactgggcacttgatcagacactcgatgcattgcttagctaagaaagaaaaggagaaagctggcattgtccagtctgttcttagatttaatactgatggttctgttattacatgggagtactctgctagtgttgcacgatctgagctttgtcgtttgattgctagattagatttgcctatttcatttggtgaatcagatgctttccaggaatacattacccgtgctcacaatcctaggttcattaagtcatctaggcaaacaactgcaagggatttaattaaactctttaatgatcgggctggacaactaattgaggtcttaaaatctgtatcctctgttgctttaacctctgatatttggtctggcaaggcca

SEQ ID NO: 140747 - DNA, 276 bp, Zea Mays
tgtgggacccagcccccgtgtcgtcaggtgggaaccttggagcacgtcggtggaggctttgcccgtgacgcttgggggtgcgagtgaggagatttgcctataaaaggggatcgatcccccgggcagtagccatgctttcgcactcctctcttgtatcgctcccttccaccttctgagcccccaaatggggcgtagctgtgtggctttcttcttgctgctgtttgagaagcgtgatttcatgggggttggcgctcttcagtcatcgctcggcttcaa

SEQ ID NO: 140748 - DNA, 569 bp, Zea Mays
atgatccttctcgagttactgataagcatatatttgaggagaacgtaccgagtcgagttgatttgatgctgaggggtaaaacttcgaacgttggtgcttctccttcatactctgcctggaatcttcccccaatggtaagtgtcggtatgtaagagtttttgtattgccacatgtagtgcttttagcgtttcatcttgttattgcagaggcccatttcaaagttcgtgtccaacccacctgctcaagacgggagcccaggccatagagtgcgaccttcttcagatgagattgaggccctcatgcgcataggggttttcctaaataggagaaatagactcacttccggatgcagccagttgccgatgatgttgaggtgaacgtcgttctaaatgtattggctggagagttgtccgagtccgctcaagatgagtcggtagttctattatcaagcgtgtgtgtggtggggaaaaagaacctacaaccctagtagtgctcgtcgcaagcgaacacgccaggtaggctcccctgtcgtgtccaccgatatgaagaggtggaaaataaaactttgg

SEQ ID NO: 140749 - DNA, 285 bp, Zea Mays
ccgaactttcgtgtcgagcacatcttatatttccctgtctcgcatataaccatgttgcgtcgtgcactcaagacacttccgtcgacctaacacaactctaatatagcacagtttggcatacatacgcccatcaaaaacatacaccctgcataccaacccacaatttttaaatctattcgccacatcaaacaacgcaactcgtgtgccctccaattctcctacgcaaccatgccacctttttcacataacattcttctccaatgaaaacttgatccacacactttc

SEQ ID NO: 140750 - DNA, 543 bp, Zea Mays
ttcgccgtgagggtgagcacgccgcgatgttttctgtttcagtgcccgtgctgtgcggaggtagaagaaacaccgcggccgtaggatgcaaaatgaacggtgtagattagatcaatgtgtaacccttcgctgaatcggatccttgccatcagatcttattgggcggtctggatttgaactaatgtaccggtttgacacgggccgttgatccaatatcaaacggctaggattagatctagacgaaataaatcctgagcgacggattagatatgggtggccacgatttgatttggcgtaccctttcgtctcaatgaatcgtggtcgtgtgtcgtggatcggatggatccagggagatctcgacttctttaaatctctgcccttgatttcagatccaagggttcctgctgcgtaccggttcggggtggtgctcgatttaatctgagccttccatctcaaatccagcggccaatcttcacccgtaccccttcattgaagactttttacatatgagacctcggttttcattgaaaataacccgccatc

SEQ ID NO: 140751 - DNA, 741 bp, Zea Mays
gacggagtgagtagctgaactgtaagttgtcccacatgttcaagacaatgagtctgccagctgatgtcttaagaagctagtgccatacttgaagcagagataaatccgacaccacaccaccatggtggcatcataaattcaacaaaagggaccagatcgatgagctcagatgaccaatttcatttatgcgcctcatcgtgctaataatttcctatttttgtaaacataagaaacgtcaacaccctcatggacaaactgttggttgctggggattaaagaataatgaatcatccatcaagcataattcatatatcctacctacccactgaatcggaatcagatcggatccggtaccggccgcgcgccttcatcgatcatccacactggcaattaatcataaggaacctttgtggatgaggctatcctcattcgaagccatctcgttactgtagcttatatataaagttggtgtgcagcgtgcacgctctcatctctttaggaccggcaagaaccacgtagcagccagccaacagcaagatggtgtgcaggggcggatccgttcagagaaatcggcctgctgggccggttctacatgttcggagaaattggcccgctgggccagcttccgcacgactcgttaaaattttgctccgcgccgcctgtttcctccgtccgtttcttttttttaaatagtccctccgtccctttgttttttcaaattcatcgttctcgctttttgac

SEQ ID NO: 140752 - DNA, 502 bp, Zea Mays
ggaagggaagggatgggggatgaccgctcctgctccctttgacctaggaattacagaggggaggaggaagacgtggtggttggttaggaattaccgaggggaggaggaagacattgtggccgcccctgccccgtagattgatctattgacagggaacgagaggaaatcttgaaggagatcgagtgagcttcgattcatgcggggttgttgtagatcgtgtcaattgcttttctgtttacgcgaggggagaggtaggtattcacgccaatcattgtggtcgtcgtgaaggcaaagttggattctatgtttaacgaccacagaggtcagctcgctaacgatgacatgtttttggtcgtcggctgggttggacagagcttgcactgtgccgccgagactcctcacaaccacatagtacaggtggtcgtcattttctggtcgttgataagcttttctcttgtatatatataagtgttagcttagtaaataaaaccctagagaagct

SEQ ID NO: 140753 - DNA, 605 bp, Zea Mays
atttttgaagcccacgatggacatggcaaactgcattcgagtaatgcagtccatcgctattcgctggacctctttcttatgccaggtagtccgaaagacctactccagggactgtccctatactagccataatgtcaccaaagtcggtggctcggtccacctcctctaccacacactacgctagctccatcgcgtgttcttcaaggaccaccacccactccaacaactgttcctaggctcttcttcttcttctctacagagcccaattcacatgagccctacgtatcctccctactctttaccaggtgccccattcactattggtgttggggccctaggggaggatgtagactgaggtgtcactactgtcaccaccatcgctccggctacagtctccattggtgtgactgttgctggggtgcccctgctctctatgcggtcaccgtctccagcgtcgtgaccagcacaattgttgctaggggagactattttccctacagggccaaggcagggctactttcggcctcatcattgatgccactattgcaactgatgatggggtcctccgtgtcggtgtggtggtcccatcctcgggttgctgggtt

SEQ ID NO: 140754 - DNA, 579 bp, Zea Mays
gccaaacaaccaatttcatgtctctggttcgccacctacgttttaatccccggcgtcttgtaaggcattttggctacccgtgagctataacaaacatttttatggccaaatagtcaatttcatgtctctggaccgtcacccatgttttcatcccttaaaaccaatgaggctatttttggcatccccaaaggctatttctggaggtcggtagcacatgtttttagggttgaatagtcattttcttgtggttggtctgcactaacgttttcatcccctaaggtcggtagcacacgccttcatgaccgaacaacattctttatgtctcggtctgcctcctatgctttgggcccttaggctagtgaggttgtttttggcctcccctaacttataacacatgttttcatcgtcaaacaatgatgtcatgtctctcttcagccacccatgttttggtgcctaagactggtaaggctgtttttcgcctcgtgtgagctatagcacactttttcaaggttgaacaaccatttttgtgtctccattctgcccccacattttggtccccggagcatggtaatgcagttt

SEQ ID NO: 140755 - DNA, 553 bp, Zea Mays
gcgcccgcaaacaccctcccagcgatactcgccagttctctctcgctattttcgacgtcaagctctagtcgccaatggcgattgggtcgattgtccccgccgataaccagctggaagaggtgatcggtatttatacacaagggcaaggtcgcgatggttgcaacggccccgggttttcctccgtgcattccggcaacaggaccaccggcgcccgcgcgttctgttgcggagtccgcgcgggtgaagaaggttctgtcgtggtggtcccacctggcggcgagtcaagctcaaggatccaaagccgccaactgacgacccggccccgcgtgtcagcgtaagaggaggacggcagcgtgggagttggttaaatgggctgctagagggaaacgccaatgggccgagcaggccaaattctgtgccagcgcagacttcttatttcttttctttttttcttttcttttattcccttttcttatttttgaatccacatttgaatttcaaatttgtggtgaattttcactcagattaattattaatctttaaaatactagtg

SEQ ID NO: 140756 - DNA, 426 bp, Zea Mays
cccaaccagcaggctagcgctacacggacgtcgacgaccatgatctcaggaaggttgagcaaaagatttttaggaatagcttcttccagcgtgctatcaatagcggacatagttaggccctggatattcattagccctgagggtgcgaggctcgaaatatcaccaccagccttactgcgttgttccttacgaaccaggggagcacctcatcatcatcctcctccaccacatatctaccagccctcgtaccaccacaaccctcaacaacatcctccatatcagcatccactgtattgtcaccagggttcggtgcaacaggggcggttactagctccaggcccgacgaatgacgaagccttcttttcttcctctttacctcgacagatttaccctgaaaatctgcttggcaggctcgcttgtgacggg

SEQ ID NO: 140757 - DNA, 360 bp, Zea Mays
cccgacacatccttgacggcgtccgcgctaggagccgagctccggcgagcaagaccggccggagggggccaagaccggcgctcccgagcggcggacacaaccttggatctaccccgaccgtttccccaaagcgaattgcacgggtggcgacccacaccgccctgcccacgggaacagcggaggcatcggataaaactgcgtgttcccagagattggtggcggtataattcaattgggtgggtcggtgagcttaaggaggatccaagaatgctagaacaagcagcaaagggacttgagctcacctaaaccgagctggccacggtgaggtcttctttgcggtggcagaaagttgatttgggg

SEQ ID NO: 140758 - DNA, 728 bp, Zea Mays
ggagtattggataggtgtgaaatttggtatgtgagatactggtagtagctggagtgtaccggaaaaaaattggggtcgatttgagctcgtttgatagtttggccatttggccatttcttagagcacttggtgcgcagggttttggataggtggtgaaatggtcgttttagagtgtaaaacctccaaaggggagatgattacatgcagggaaagctcaatagagtactagggactctatgccacaaagcaaatgcaagaatttcacagatttcacaaaatgggatcaaaggtgggagttcttcgctggaaaagaaaagcagagagagaagaaaagaagaggtgggcagctcaccacagaggggaggaaggagaggaggagcacaccgaagcacttacgacggtgatcaccgccggcgaagacagggcgaccgaatacctcaaatccatcaattaaaattatggtcatttaaaacctaattgaaagtaaaagtaaaaattcaaaactagtgcttgatctcatttatctttagaaaaatgattttgtttgctcataattgattgatgattttattcataaaaatcattttatgtgaagcccaattaattaaaataggaactttggtccaaaaataaatattaatcaaaagccctctctccctctcctctctccctggctctccctctccctctccctctccaacctctataaaagtcggcccctgtcggag

SEQ ID NO: 140759 - DNA, 520 bp, Zea Mays
gagacatcaaatccttacagagacccccggaatcaagggtatccatacctagattcaatcaagcgttgcctcaatgacctcatgatcggggagcgatcccctaccaaacgcttgtttgaatccatgaagggatcagggcaagggaagaaatcgctcctcctccaggtgagaaagcggcgtgaaagtagatagtcgcaaaaaggatctcctataaggaggaagccaagaagtcgaggcaacacgtcaccctaaacctgagtccaccaacaccctacgaagcatgcaagacgacgaagagaagaatgaagggtaggctacaaaggccaagggttggcatggacagaggcggacaagcggagtaatgatgtcgctcggactcctgtcgtcgacaagcttcaccaatagtcttgaagaggcacgacaggagagttatatggaacgaataacgacacacatggagatgtttatcgagggagaactatttcattttacagcgtaatgattccttccgagagaagcc

SEQ ID NO: 140760 - DNA, 689 bp, Zea Mays
tatatggaatttcataggaaaaacacagtatttaggaaaggctcctgcattccaaacaggcaacaactcatctgctgtgttcaccgctgtttcccctgtgggtttcagcttgatattgctcgtaaagaggtctcgctctactcatggcatgacagccagggttgacaatggcatagcagaaccgcacgaggtcttaggaagaatggctgattagcgctgattaagtacgaaaaccctggctagctcagcggaacgactgctggcgtttggagagaaacctccgtggagaaaggaatttagcaagaagagcttcagaccactacctggtggcacttgccaagacgggtcctggcgaggcgccttaagactgagctcaccggtgggcacacattccacctattttaaactttacactatctatcgtatgtctacaaattaaatcaagttggcaagttcatggtactgctcaaccgcatgaaatgcagtgaagtgagccgtacagaacacggagaatcagggatttttcaggtaggagtgccggatacgggataccggaggatgcattgcctgctcagtgctcaccgctcaatcccccaagcgccaccacggacatgggagggggagggtcatggtactgcgccagtgaaaacctgcagcaacaggtgattaatgacagatcttagcaaagc

SEQ ID NO: 140761 - DNA, 775 bp, Zea Mays
tgttttatcccttttattctctgattggactggggacactattttgcgagagactaggggttgacgtataaaatcccatagactcagtccaaccccacagtggaccgcaggttgatttatattaacccgagggactcttttgagaagttgccacgcgaaggggtatgcaaggatcatggccgttggaacggccatagatggctcggattaaatttgtctttaatctgaaacggtattcaatcatcactgttagattcgctatcgaccgcccagatctaaaatacctgagccaaatccactacgtacactacccgatctacggtggaggtgagcccaaactgaaaggatatgcgtgcacacatctgggctgtccatcatagatcggacggccaggagcttctctcccgtacctctctcacggccggccaatcccaggtagcggcggcgttctgcccatagaccgcggcggcggccatggccggcacaagcccgagcaacgtccacgcacgagacttgaattgaactggtgcatcataggaaggagggcaacgagaacttcatcgacgatttcttacccagggcggacatgggaatatcctagccacggaggggacggatactgcccatccaacgatcaatccactgctgatgaggtcgacattgcccatatcgacgccggtgatggactccatacctcctggcgattacccgcggcgaggtcgagtacaccgaaagtcggcgggggcaaagaaccattgcgactacaccttttttt

SEQ ID NO: 140762 - DNA, 624 bp, Zea Mays
tgtgagcatgtcgcaccgccttaagtcactgccgacttaagtcgattgctccgttagtagggtatagtgatcaccctgagttaagtaagcgtgagcatgttgcaccgtcttaagtcatcgccgacttaagtcgattgctccgttagtagggtatagtggtcaccctgagttaagtacgcgtgagcatgttgcaccgtcttaagtcatcaccgacttaagccgattgctccgttagtagggtatagtggtcaccctgagttaagtaagtgtgagcatgttgcaccgctttaagtcatttgccgacttaagtcgtttgctccgttagtagggtatagtggtcaccctgagtcgagtaagcatgcagattgacaataaacagttcgagtgcctttgagaatgaagtctttttattgatgatgtattttccaattacagaatacaatgctgccccgatagcttttgaaatctagctaggggtaaaacttcctaagatgctctatattccatgaattccctatttctgtgccatccatttgaggtcgatatgaaccaggtcgagtgacttctgctactatgaatggtccttcccatagtggcgacaatttgtgccgtccttcccctgtt

SEQ ID NO: 140763 - DNA, 482 bp, Zea Mays
ggaaggtgctgtaaagtgcctgctaccttcaaatgactggccttgactctctggcaggtatcacattcagatatatacttagcaatttccctcttcattctggtccaccagtataaagatctgaggtcatgatacatcttgttactgtcggggtgcatggagaattttgaaaggtgagcttcatccaatattttctttctaagctcggggttcttgggaacaaccaatcggtctccaaatcattggatccctttgttgtcctaacggaagcatttgtatttttccgccttctgtccgatcatttccttaataacttgaacacccttgtcaccaatctgtgccatgactgtttgctcttgtaatgtggcctccactgaaatataacttaaagcaccggaggaaacgacttctattttcaacttgcacaactcatcacatagggtggtgattcctgcatccatagtcatacaattgcactgggc

SEQ ID NO: 140764 - DNA, 726 bp, Zea Mays
gcgctaccgacaccattgatgattaaactcgtagtaggggttacaagcggttgagagagggaggagaggctgccaagtctctttattggggtggaagtggagcttagaagctgtagggtggagtcctagctaagtattgcctcgatggggctccggcttcctggtcctcgtcggcgcttctcctcctgttcgtccttgtgcgttcctgtccgtctgaaggcgtctggttgccccaatagctctctcattttgatcccctttccctaaggccagcctctcccttttataggctgggagaggggttgaccagcagtggattccatgggaaggagccgtaaggcaagggtacaacaaacgttttatcccgggtggagccatgcgtacttgtggggcccgaggctgctagtctgtctcatatttaccgcgacagatgatgtggggacaatgatggtcctaggcgtcatcattttggctacgccgacccctggcctctatagactgggactcggcgcagcccgtcgtgtagtgcccagcgggtggtctgcgcactcaggcctaatctgatatgccataagtgcatcgtatgctaaggggtgcacgggccattaatgcaccacagtacaaggggctcgtaggtcatgagtctatgcgacccgaggtgcttgtatgtcataagtgggaagcagaccgacgatcatgagtgggaagcggacaggcgtcccgctg

SEQ ID NO: 140765 - DNA, 573 bp, Zea Mays
atctttctccgaccagatagaaatgaccttgtggtgatcaataatatccttgagtgcttcgggcatgcatcggggcttcatacaaaccttgccaagagttccgggggcttcatacaaaccttgccaagagttccggctccccaattcattgcccggctgaggccctggcccttactgcagatgtgctgtcatgtcagattaaggagtttccctgcacttatcttgggctgccactatgtatccatacaccaacaagaatggggtcatgcctcgtattgataaaattgcagatcatctcccgggttggaaggcccccctaatgaataaggctggacaccttgttatggtacggacggttctgactgccaccccaatccatcatttgattgctcttgaccttccaaaatgggtgttaaaagctattgacaaaaggcgtaagggtttcctttggaaagaacaggagcatgccaatgaaagaaattgtctggtgtcatgggcaagggttcagcgtcctttggagtttggtggtctgggcattcacaacctcgaagtacttggctgggccctgagaat

SEQ ID NO: 140766 - DNA, 439 bp, Zea Mays
atcatataacagtttaaaccttttctatcaacttgaggacaagttgagtttcaaggagaggagaatgtcaagtatctagattggaatggcagctcatctacacaagatgcacatgagacgatagatgattgtttgctctgatgatcaaggactcactgaaacacaagcagcgaaggatggtgtagtcggaggaaagcatgcaagttcaagaggaggagcgcaacacaacacaacacatatttgggcctggatgggatgtgtaatgccctgctgacctgacctgtaatatcatagttaaagcatactacactgaacagagaatacacatcgaacaagagaacactaatccaattctgcgtctatctactccatttgcttctacttccccttccccatgacatcagcgacgaccgatcaatcccctacctgacgacgtcgc

SEQ ID NO: 140767 - DNA, 600 bp, Zea Mays
ttcggagacctaagtgacatagcattgccaacttcgaagacccaagtcacacatcatgccaacctcggtgacttgcgggtaccaagtggcgcacaacacaggctttggacgattttttgcagggtggaccaagtacgagtttctgattttctaagttcgatgaactaggtgtttttactacacctcatacatacgaagatgaagtgcaagcatttgtgtaagtctctcttttcactgtcgttcattttttttcctctttcacaaattcatcggttatatatatatttttaacgggaagcgtaaaagtgaccattaagcttggttatatatttttcactgtacatactgacggcattttatttttcttcagaaaccaatgggcgcacacagacaacggcccacagcttgcggtagtttttctccttcttccttctgttggtgtgactggtggacggctgcagagagaatctagcagccacatgtgtgcgattcagtgccgttctagattttgtttagcatcgttgattgactccaggtacactgcaaagtatcatcccatccatatatatggtggttcctaatcaaatcaaggtcgccgaa

SEQ ID NO: 140768 - DNA, 351 bp, Zea Mays
gttcgtccccgctacgtctcgccacagggtacaccgactcgaccaggaggaccacgcccagttcagtatgctccacaggggtctccacggacacctcctactcgtcaggctactcccactggcaccccgacgaggtctacaggacagaagactggccctacatgcttcaagtgtagtcagattgggcactatgctaatgcttgtcctatggggaattctggtacaccagcgaagaacaagcaacagactcctggcaagggatattctatagccagggtgaatcaagtcagtgttgatgatactcctgatggtgctgacatcgtactcggtatgttttacattaatgcaatt

SEQ ID NO: 140769 - DNA, 322 bp, Zea Mays
ttgaaggtctggcttgaatcttatccttccttgatttgatgtggtcggtcatcttcgatcttcgttcttgaagttgttatccgaatcagggacatgtagttaagataaagtagtaggtggagcagctagtttagtaggtggctttgagttaaatggggttagacagaacctggttggattgttttgcttctgaatggtttggataggttatgtaacccattatgtaggtcaagttgttgggtatggccgagctgatctaagttaccaatttaggcttagtgaattaggagtatggccttatcttttgtaccagcattaagta

SEQ ID NO: 140770 - DNA, 373 bp, Zea Mays
ggaactgggaagggcagggaaacgagtaccaggggcactcggctgattggtcggggcgggggcaggagtgggatgaataaatacgagttgtttgaatggatatgtaggtgtgcaaggtgaagaacgatttggattgaaaggtcggattaccaaccttgttttcttttcaggtccttgagttgatctttgacccgcatatcccttttactttccgtgtcccgcatttttggcttcaactgccagtgttgtactgacagccctactgtatgtgaggtccaaacatgttgccatcttacgctggagtctatcatttagtcccctcataaaacaattcttctttttcaggtctatatccatgtgatcaataacgtac

SEQ ID NO: 140771 - DNA, 529 bp, Zea Mays
gcggctacagccgagcaggcaagctgcgcgctgtaccagggagcaggggtgccgcggccatggggagagagaagctgggggagggagcttggagagggagagccgtggtgaaggaaaaccgagctagagtacgagcgcgtaggggagctcgtgggcccgacgaaatccgagcaaagaggagactccggccctggatggagctcggcgtggccaggcgagcaggagatcagggaaccgcgacctccatggccgagcagagaaccagggcgcgacggctgaagagaaatgaagggaggagagaggaaaccgcgcgcgcgtagcagagaagccaggggccaagctcaaggagccggccatggagcaacggcgcacggcgaggagactccaggcgcgtgcaggcacccagacgcgcggcgcggagagagatgagcgcgcgcacggagcacgacgcgcgatgcagggaggacgcgcgtcagggaagagatggagcgagggcgagcctgggcgcggatggctgcttccgcagcac

SEQ ID NO: 140772 - DNA, 422 bp, Zea Mays
acaggtgctagcaatacagggaatagcagagcactgagcaagcttggagagggtcgcatatccgggatgaccaagtcgttggtgccatagcgaggtggtggacacatggagagcagaggcagacgacttcaagggatagagttgcttggaagttggaactgtcacatctgaggatcatgcgtcgagtgggaagatccttcacagagcaaccaaacaggtcaaattccatagagcaattgttatctgtagtaaactggcatacacaaattagatctttaataagagttggagaactaagacattattgaggcggaaaatatgaggtagctggccggtgccagtggaggtaactgggagaagattctcgttaccgacaacaatgttagagggaagatggcgagagggggttgtgtgagagggag

SEQ ID NO: 140773 - DNA, 1318 bp, Zea Mays
tttttaccagtgtttcatttatccatgaattattggtgtgatcatggagtatgtgacattattagtacaataacagcagaatccatggaactgtgttagcaaatgttcatttgaaggtactatccaacagtcggtctttcaacagcaacctgaacaaacttgcatgcaacacctcattggcccaaccctggaatgaggttcctgttagccaacagtgcctcacaggaataggtaagggaaaaaaacagttacctcacaggaatagcttgaaaggaatgagatgacaatggatcaactcattccattccccaaacaaaacaaaacaaaaacatggagtgagaatatgatggatcaccctattccttaaaacaaacaccatataatgtataagcaaactgatttatacaatacaatcatttatccataaagtgcatacaaagaaacttactttcatgtaatacaggaaagagtccatcaaaactccagctttaataaagaacataatattttcaaatacatatcttgcttcataaacaaaacagactgtatttgaccatcacggcaaaagcccacatttgcattatgaaatggttcaccagaaaacagaactgtcttacgaccttcaaaaagactgtatatgcagcaaatataccgagttcatgagagctctaattctgggaaactatacaaatcaggtatgtcgaataaacgtttggatataggtaagagcgtaaatagacgtcctttaatgaatcaagcagtatttaccatcatcgatctccagagcggggaatagacttcctttagggcccgttcgtttcggcaggtttatcccattccgggtctgattccaggcggaaggaaatgtcccggtttagaattcgaccctttatgcgacagctgttcgtttgggcccagatcgaaagcgagagtgatccggtttgaagttttctcttccacaacggcccgacatgaatcctggtctaccgacctccggatccgatatcgacgagacagcgcagcactggcgcggaggaggcgaagaggcgacgacgccagtgacggcgtggcggcgcagcgcagcgttgacggccaccctccccgtcgctttctcaccggtaagcgtcaccctctcttccccaacgcacctgcccttgcgatgctttccttctccctccacatccgccctcgacgaagtcgtgtccagttgtgcctgcccttggcggcgcttccctctccctccccgcgacaaaccgccaagggcttgaccgccttgcagatgccgcacgttgtgcgaccgaggcatttttttatattc

SEQ ID NO: 140774 - DNA, 386 bp, Zea Mays
gcttcgggagcaggagcagcagctttttcaggcaaagtctgttttatagccttttcctccgctgccttctcttcaatttccgagggtttttcttagcaggctctgaaggcccagcttcagcactagcctggctcattgcagcttcggcttcggtcagttttgttttagcttcgatttgcattttcgaagccttggcaattttccctggagtagagcttgaagcctttaccgtttctagcacatctagtacacttgccatccttcttcttttgggagtggccgcaagacctttttgtatcttcggcattgttacttccgctgaagggcttaaaacttctaacatttttgttccttcagtctttggcttttcggccttatttttacca

SEQ ID NO: 140775 - DNA, 310 bp, Zea Mays
cccttagctccggagacaattcctgctgcgacaatcgaagctagtatcggtcaggcagaagagcatccaaagctgctgagtcccccaaccgtaactgagttaccaaagctaacatttgctgcaaccataacaatgcctcctaagaaaaggaggatggccagtgttttggatgccgttttgaaatccacgaagatgccaactcctgctagtgtcgaagcttctgatgacaaaattaaagatgtaagggaagtggccgctgcaagcgcttcttctattcatattgaagagggacctttaggagctacgccag

SEQ ID NO: 140776 - DNA, 515 bp, Zea Mays
tggcggtctagtcaaattaaaggggtcggggagcatcgcagatgtatgagaatgctcaaacaagggagcagaggacgggaactgaccggagttgggctggcgacggtgagctcggtttcacggtggcggaaatcggatttgggggaaactccgaattcgagcacacgagtggatgattgtggccgattagcggtggttagctagctgactacctcacagagctggacacgggctcaatttatagggctcgcaagcggtggtcggtgaatcggacgggacgcgcggcggccagaggaagaagaagaccacggacgcgatgaattcgtgtccacagtcgtggcaattactctggcgagccacggagagcgagggtaagtcgcggcggtgcggtggaaaagcttggacacgcggcgcacagccgggaagcggcggtctccggcgagttaatccgcttcggctgccgggcaagggggagagtacgacgggggtccttggagtggagtccagctcaccgg

SEQ ID NO: 140777 - DNA, 339 bp, Zea Mays
cagcaccggacgagtccaatgtggcacaggagaacaactgtgttgtctcaaagaatgataactataactagggcactagacatcaaggtttgcattatacctcaggcaccaaacacatccagtggtgcaacagaccccacatcggatagtgggacgtatcttgtgcacaagacttcctttatgcaccaatgcacaaaatcaattccttcgtccaacattcttcagcttacgtgttttacgaaaacaccttccactctccttcctcacgtgtagctacatatttgctaaaaaaatcgagtgcccggacgaaggttattagacaaagggtctagattgatt

SEQ ID NO: 140778 - DNA, 527 bp, Zea Mays
accggccctacgtcaggcaacgacgcgcccgggatgtgcggcgtgcgcgtgagcgtgcccagaaggcaagagccgccgactctagtggataggatagaaactagataagtttgtttgcatgcctagaattagggagcagttagctccatgcagttagtcctagggcctatatattcctgtaactagacctgagttggaattaagaaatatcattatcctaatctctctcaactaagccggtggtagaggggcataaccttgccggagaagacgacggaccgcggctatgatctctgtagccgagggccacctaccctagacactaaggcccttgacaacctggtatcacggtcacgccgatcctactcatccacctacgccaacgctgaatccaccaccgtcgctccgctcaacccaaccgcgccaccacaaagcccaccaccctcccgaccctcagccacatcctccagttcacccatggccgaaccatccaatgccaacctcgccaagatgattgagcaactcac

SEQ ID NO: 140779 - DNA, 432 bp, Zea Mays
gcccacttaccaccacccatggtcagggcgcatctccatgtggccgttccaggggccaggttctgaggctcgtcccccggcggccatgttcgctggtgcgcaaccggggttcgccttcgcctctccgtcgccctggagctcgacgcctgccgcttcaggttctgaggctcgtcccccggcggccatgttcgctggtgcgcaaccggggttcgccttcgcctctccgtcgccctggacctcgacgcctgccgcttcttcgtggaccacgccgccggctactccaccgtccgggctggttggttgggacgcggccgccctggctgccttccagactcccactttgactccgccgatgggtcccgagtggatcgcagacaccggtgctacctaccacaccactcccgaccctggtatactgacctctattcgccc

SEQ ID NO: 140780 - DNA, 484 bp, Zea Mays
aagcgagagtcaagtttgttatcgcgctatcgttagggttcttcttggatgaggactttccgcacccctttctcggggcgtaccgagtggcctagtgagccttcctttctattcttctctctttttgttttgatttgttggtgatgttgagttgtggtccttataggggatcgattcactagcgcccagtcttccaccgctccctgagggggtcgctgttcaggcggcgcgcaagcgcaaaagtagtgacggggagaccctggggccactcatgaggtgccttaaggtgaagaagggtaagggtgtcacgcacgggcgagggagccgctcttcctcctggctcggaggaagcatcttccacgacttttggtggagcaggaattgcggcgttggtggtggtccgtcgcgccatggtgacgccgcaaccagctctaacatcccgactgatatgagcgggtcgaccgtggatcccgccttggtcgcg

SEQ ID NO: 140781 - DNA, 382 bp, Zea Mays
agaagaacaagtctatataatttgggagaatttgagggtagctcagactaggtaaaagagctatgatgataatagaagaccactgaaatttgaggaaagaaatcatgtgtacctcgaggtgtcactacttcgtggaatgaggagatttaaagttaagggcaaatcgtctcctcgctatattggaccattcagaatttttttaggcaagttggagagatggcctatcaactcgagctacctgataatctatttgatgtgcataatgaattccatgtgtcttaacttaagaagtgtctctgtgtccctaaggaacagttaccaatggaagggctcagtgttcagtgtggtttggtttacacggagtatcctatcaagattcttg

SEQ ID NO: 140782 - DNA, 769 bp, Zea Mays
gcgccctatctggtcccgcttcggcctccgaaggccgaaggtagaaattgatgattctgtcgaagcatgccagagagccttcaacactgtttgctcctttattggcacaagggatttaattcaggagcatatagcctttagggtatggccacttgtagaaagctgggaaatgccaaaagagaccaccaccgactctagcaaagatggtctggtttgactgaagtataccttcagattcagggagaagtttgatgaacccaacgacgactggctgaagtgtatcgaagctacaagtgatgaattgcttggagcttattccaagaccgaagataatgctctatccacagccttcggaagacgggggaggaaaagactgaagagggtttttgatgccattggcttcatataccccgactactgctatccgctgcgggggcaggggaaaaagaggaaagctgctacttcggccaccccagttgagcctgtgccgaagggcaaaaagttgaaggttcttatccaccggccgcgttacattgaaccgaccgtggtgcctgagtttggcgcagggtcctcttcagcggccaaaacaatacaaactgcttcgactgcacatggcgctgaagaaccagctgtaatgccgaagatgcatatagcagagccagccgaagataaggctgaaaaggctaaagagccaaagattgacgagataacaaaaacgccaaagattatgagccttccgatagaggtagatctgctaaagatacaaaag

SEQ ID NO: 140783 - DNA, 850 bp, Zea Mays
agctgacatgttcagatggagtctgatcaaagcatggaccactgtcggggagatctgtttctgccgcttgttggacgccgccagtagactaacaattatggtataaatggattagaagtttagtaaactactaataataatatagaaaaaacaacgaggcggtgtactcatacctttatttgcggcgtcgcatcaaatatcggcgcggaagattccgtatgtggtgttgctttaggagtgacgtttgtgttggtcggcatgttctggccaccgtcaccatgtttaccctgaaaaaattgtaatggttatatgctatttaaagaaaacgatgaatacaacccttcaatgaaaaatacaagtaataagaaaaacattaccactggggttgtaggtgttttgttctgtttcgttatatttgtatgaaccagtggatcaatatcagcttcatcggggcaactttctaatagtacacgaatatgctgttgccttaacagtaattcatgtacctgtgtgtctgtaaactgtgtatcctgctgggatgctggagtatacatatcaggtacagttgggggggccggacacgtacatccttctttatgtatcatgtaaacaaacaaaacatagtttaaaataatggcatcaaaacgatatcgacaaatgattgcacaacttttttatattgacgtaaagaccataaaactgactaacctaccgtctggggaagaatatcatctgattttgtagttgttttctgcacatcataaccatcttcattgtcccctgactcagcgcggaggacctcatcaattaactcgccaaaaacatcagatagattgtattatttctcaac

SEQ ID NO: 140784 - DNA, 300 bp, Zea Mays
gccaatgttggcgcatattcaagtgaagacaacttcgtacggggcgatcccgaggggccaattgaatggatcagcagcgaggccgaagcctttgaggagattttaaatgatcgtggggacgtctacgccttctcaggtgcaaggggaattgcggctatcttggagaaatcaggttgcgatcatgtaaaaactctggcccaagccaaagctactttatctattgatgatacaaaggacccctcgaccgaagcaagcttagttggtggaaaattctttactgacatatgggaaaatggcggt

SEQ ID NO: 140785 - DNA, 513 bp, Zea Mays
ggcaggcctagggaaccacgtggcgaggaaggataatacgtcccaggaagcaccgttggaccggacctccacagaggaacaccagacccctgtgagtatgagcccggagctcccgtggagacatgccaggtccccctgagtgaggtccgaaccttggtagggtcgcgggacggagaggaccccggcacaagcaagggtccggtgccgacacgtgtccaggtcttgccctacgctccccactcaggaagaaacccaccgcggtcgcgtagcttgtggcccgtaacgtaagccaacaggccgagcctgacgaaaggcccatgcggctatgcagtctttgcatttattgcggagaggacgcactgcctgccaccacgctgacaggtgacgcgccctctcagtatttaatgcgtcctgtccaatccgccggcaggcagcgtcagcatcacccagcagacggcgcgcctgaccagtctgttggcaaatagtgcgcccgtgccaagcggcgcacagtac

SEQ ID NO: 140786 - DNA, 777 bp, Zea Mays
ccaaaggacaagggaggacttggtgtgctggaccttgatcgttttgcgagggggctaagattaagatggtcgtggctacgttggaacagcaaagatagggcgtgggctgccttgaagcttccttgtgacaaaactgacgaagatctcttcaacgcttccacaactgtcacggtaggcaatggaaagatggctgaattctggaagtctagttggattcaaggccaggcccctaagaacattgcgccatcattgttcaagaagacaaaaaggaagaacatcacagtggccaaagcgctcaataacaacaactggattcgtctttgctcaccgtatacgggggagggagagtttggagagttgatctctctttggcgggccataggtaatatgcacgagcttaacgggctagaagacaacatctcttggagatggacggcagatgggcagtacagtgcttgtagtgcttataaaatccagttcgcatccaatttcagtagtatgaatctaggccccatttggaaggctaaagtggaaccgaagtgcagattttttgcttggactcttctccataagagaattctgacggccgacaaccttcacaaaagaggctggccatgtaatccagtttgctgtctctgcaactcagccccagaaacaatcctccacttgtgcaaggattgcccctttagtagagaggtgtggaacaaagtttggattggggccaacgttcctttgctgacagggtcttccaatgacatttctttatatgattggtgg

SEQ ID NO: 140787 - DNA, 611 bp, Zea Mays
ctcgggtcgggcgtggaagcttcgcgccatgggaatttgctcaatgaagtcgatgtctaccatggagccgccgtatggaatcaccatgggtgttctccattggggattggtgcacggtcaggaggctcctgtcattcatccggatcgcgtcggggcggtggcaaggtggaagggagatcctgctgactgctattcttcgccgtcaccatggctacaccgtgcgccgggggcagggcggcacaccactggaatactggtatgagcctcgcctaagcattcgcagttgcgtcctagtcgtgtagaccttgcccgatcgaagtttgggcgcgtaggggtgagatttggttggcaccgacgatggcgccgccgcgtgcttggtgcgccggcagtcggaatcagggggaaagaagacaaccggaagaccgttgtgcgggtgatgaacggtggagattgaagagcgtcgtagccatcggatctatatcgagcggttctgattagatcgggaaataccccttcggctaatgttaccaggaccgttggattcaccttgggcggtcacgattagatcattgttatgctgttcggttatattggatctgggccatcggatc

SEQ ID NO: 140788 - DNA, 539 bp, Zea Mays
caaaacagtacttttgagtaaaatttaggtagactgctgcaaacggccttagcggacaggagagtacgttcgttcgttctgtcgtgcaatgatgcaaagggaaaatagagagactcgttagtatcattagcaagaagaaaaattagagactcgctagtatcattagcaagaagaaaaatagagagactcgttagtaccgtctgatccggaccattctgtagtttgtccccatcaatctgtgacgaaggaacaccaacatactgttcgcacgtccccttcagtacgtgctacggtcatcgtcattatttggatgcacaatcctctgccatcgacacctagcagatggcaatagtaacttgccatttgcccatttggtaggccgtacagccatacgtttggcaaatagccagctaaatctatctcatatttcaaatttcactatataattagggcaatctatagcatgaaactgtgtttgacacggccatatacacaatcagctgtccatagcctaaattcagttttctgacacacatagc

SEQ ID NO: 140789 - DNA, 460 bp, Zea Mays
agaatgaggacggttcgtgcggggtacagactcgaaatgtggtgtaccacgaagtcctcgctgtcgctgaagcggcagccatactagccacctaatttttcatccatcttttgtgttgtacatagcaatgatatgtaaatactccaacgctgctgctactcagacgattgtgtctcttctcatgcttgttatctttgttttttcttgctgcgtgtacagtatattttgctttgaggtaaaattgttctactaatgtgcagtacgtatactggccttatctacttccctgctgttgtattctctaatgtttatgccatttttggtgtcaacactgcagatgggagacgtgttgattccaagcctgcagtgtgggaacttatttgtgacgatatgcgtccgtgtttctcgtttttgggacttttctgatcctcaggatgatgcaaggctgctacactgtgat

SEQ ID NO: 140790 - DNA, 355 bp, Zea Mays
agtgggcaatttctacctcgtgttgcaatttctatgtttggatgagattctaaaattcgggttatggataaaaataatctctactggttcttggattatgtgcttgtgtgatagaaccctttagaatcatagtgtttggatgaaattccaatggatttgagcaacatttgtttctattgttttatatttgttatacgtactacactgcattaatagcatcgagcagcgatggattccaggattatgtgcttgttttattaggtaatggacccgaccattaggccagcaagccacaaccgcaagtgtacatacacggctgcagtgccaggtttgtgacaatatgcgggtacccgac

SEQ ID NO: 140791 - DNA, 271 bp, Zea Mays
gcagaatttggtcgctcggctggttggactatgggtccagttgtctgtagggacttcgcctttgataggcatacttttagtcctgcatttgttgtggatcttggtgaccgttctcgggacacctttattgtggagatagaaaaagaggcggaagagcttgtcggtccggtgactgaactagaggtagagaagggtgtatagctgctcagtggccatgtgcgcctgaaatgtgtattcagccagatggggcttgtttttgaagagcacaaag

SEQ ID NO: 140792 - DNA, 415 bp, Zea Mays
gctgaattatccgagatcgaagtggtctgtggtattggcagtttggcactgctgttctgaatgtctgacgtgacgtgtttttggcttctgtgtcgaaggaaatactgtattgaagatggttacctcttgatgtagccttatttgtgtgcactggtttggtggcctggttactgattttacatattgcttactgccatatggagtggtttgtttggttaaaggttaaaacgtaaaacagtgatgtttgatatgtagttgaaagttgctgtgcaacagtgcaagtcgcagagcatttctaccttttaagatattgtgggggctaggcgatgctaacatgctggtgtttgtagttctctaggcagttaatgctaggcagggaaagggggtgaagagggtttactgggaaaggtgcaaa

SEQ ID NO: 140793 - DNA, 1295 bp, Zea Mays
cggcgtgtgagcccgagggcgaactagcgctggcacgtggtaggggaagccaagaaatgcagtgattcggcgggggttcgacatctatgaactcgtgcatcctcgtcgccaggagcgccttcttcctcgaccacttcacctccgtcctcttgcctcgcccaacaggccagatctgggcgccgcgacgctcgatcatcggaagtggaggagcggccagccagggggaaaccaaaggggagcacgccggtacctcctccgcttcgcccatgaccaacaacaccgccgtaactgcctcctccctgacggtgacgaactggagaacggagaatacaaccatccagcgctgaccaagattgtcgcaccctgtccaatgtccatcctgccagacctgacgctgctccacagcagtcgagagggtagtgcacctccgctccttttgctgctttctttcgtttcgatttctcacgttttggttcctagctacgcaccatccccatagtcatggtaatgtgatcgatgcgttatgcgtaaatcgagcatcaagtgcttacaaaaaatgtgcgccataatttgatttgttcaatgtttactgagcacccctccttgttttgagttaggtggagttagtttatcctgatcatgtatgtaagccttggccagtggctacataggaatttttcagcaacaaaaaaattgacacagttctgaagtaggcatttcattatggtatttatgccatgttttgtgccccctccctctcctgacaggaaaccgtaaaacaagatttagaacatggaatatctttcatgaaaacatggttagcgcttagcatggctataagatggcagcagatatcttgctaatatgtctcttttttatctttcattcatgtaggccaatcatttctcgaggttcgaccaaaaccattagacatattgttagacctactacacccaaatcctctatccccactgtaagtgcatttgatagcattgaagattcagatggcgaggaggatcttgtcccagatgccaagaatgataatgcttacttggccccaagcagtgctattttaagtatcagatcgctaaacaagtgacaccaaggatatgttgttttacctgcgggtcatgccaacttgtgctagcctcattccagttcacttgattcaggataaagtggcctcaatcatgttcaggtatcccttttttgcattccattctattgttttgtcttcttatttgttgctcttaatttgtttatcaagacttttagtactgaaaaatggtgtgacc

SEQ ID NO: 140794 - DNA, 479 bp, Zea Mays
ctgcgacgtgttaaagctactaggcacgtggcgctaggacggtaagcggccaacgctggtgagggtcatcttggccggccgcagacaaagtgggtacggtggccaatccagtgaccgcgtctgagcttatcctggcgccaagatcttttcaccgccggctgatatctgcacacagagcgcacgaatcgcgacgctggcgaggatcacggcgtggagttcaccggcggcacattcaccgcatctgaagatcttttcgttcattgtaccatcaggatcttcttcggtatgtctgacaaagcatattcaggggtgtttttcttcaatttctatgtgacaacttgaccagccctctgtaacaaagttgttaatctataaaccagctataattcgactataggaaccatggccatttatttactggatcaagctaaaatcaactccaaagttcttcagtgctcactgtcagaccaaccttaacc

SEQ ID NO: 140795 - DNA, 436 bp, Zea Mays
cacgagacgagacgattgagaagtcaaacgacgtgaaaacgatgtttgaaggataaatagtgtcataggaggtttggaattcgaattgaggcacgaaacgatatggaattgagccgatacttcacgaataggtttatataggtgaatatgagtgaagtgtgtgcttggtttgaatttaggcgaagaaaaagggatttgggcactcggctcggaaacgatcgctcgaaacggggattttggtgaaatttaagcctggaatctcggattggcgtgaaatttggcaagtaggttactggaagtgttgtgaaggtgcctgaaaaatttgggttcaattggagcatttttggctggtttgggcattttaccgaacacgtggtgggcgtgatattagggtttcggagaaatggccatatgaggagtgaaaaccctcccgaag

SEQ ID NO: 140796 - DNA, 426 bp, Zea Mays
acgttgccctgggaatctttacatatatatgagttctgtgatctacgaagaatgtcgtcctggacagggagtaaatggaggctgcagtttttctaggtacggtggcaacttgttgcttacaggcaacggcattcagatggagcaacttgcgtgttttggatcaaacgtaccgttcctccgtgggagctcgtacaagatctgatcgcattttaaacgggcttatatatgtgatccaaggagctttctcaaagtcacaagcttctgttggtcactgatttatccctacctacaaactggtttgagaagaccaagcttatgcgaccaacccgcaagttcaattctgttggggaggagaaggcttctagccaaaggtccacgctgctattttagggtttgtttgggagcaataatactagagagtattga

SEQ ID NO: 140797 - DNA, 474 bp, Zea Mays
gtaatggaaaaggaaacgagacatatctttatttccttattattggtacgaggcaggggtggtttggggttcattcctctattacaacaaatgtacacattttacaatttacacgaagctaaaaagcctggaaaattcttatctaaaaaggcttgagtttcccaagtagcttcatcttccgtgtgttggttccactatatcttgtaaaacttgagagttttcctttgggtaattctgtccttttgatccaagactcgaacatgatgctctgaatatgtcaagtctggttctaaggcaacattcgttacttcaatggttcgatcggggatccgaagacacttcttcaattgagacacatggaacacactatgtacagttgacaatgtttcgggtaactgtagtcggtatgccactggtccatatctttcaaggataggaaaatgaccaatgtaccgaggtgcaagcttccctttt

SEQ ID NO: 140798 - DNA, 626 bp, Zea Mays
ccttcatatacaaggggaccaaatctgaagctgaatttgtggtcttcatgggaataaaatgcgcagacttagtcaagcgatccactaccacccatatagcatctctgccccgaggagaacgaggtaaacccaccacaaaatccatggtgatatgctcccatttccactccgggatttccaatggcttcagtaaacctgcaggtcgcttatgcttggccttcacgcgctgacatacttcacaggcggccacatacttagaaacgtcaaccttcagccgcttccaccagaagttttgcttcagatctcggtacatcttggtttcaccagggtgaacggtgtaaggcgttttatgagcttctctcaatatatccatcttcacctctaatttctgaggcacacaaaggcgacccctgaaatgaaccaaatcattctcatcgatggagaactcctggggtttaccatcgccaaccctctttcgagcttcctgcaataaacgatcctgctgctgagccgcacgcactctctccatgagggaagattgaataagcatacgagtctcctcactagcggtgccgacatagcacaaggcgatccccaaatggtccagatcagcaatcaactgcaag

SEQ ID NO: 140799 - DNA, 812 bp, Zea Mays
cgcccagccagcactgcatgtcgcgtgggtgctgtggatgacaatctgggcccacgtattagtcttcctgtctccactccgctcccactgccgatcgggacccaccggtcgggcttatctcctaaatcccaacagatcccgtcgcgcggcaaactcggagcggccggcatccggagctttgcgcggtcctcggccatgccgtttcttcagccgggcatgcagcggacttatcttctccgctggaccctcccgacgcagcctctcctccaccgtacactcatcgttctcagcagaatttcgtagtggtggcgagaaatctgggcgagatccgatcccgtcgtccactcgtccattccccctctcggccactgctagctggcccctcgggtggacagtcgcgccgcactcacgaattccttgctccgtgctcctctcaacagactccgccgttaccgcatggtcgccagcacaccacaacggattccgaacttgccgacgggatctggtcttcgaaatccgcgttcctctagctataaagcacggaccgcgacccctcctcctcatcccatccgagacggaagcaccatcgccgcggatcgctcctcctctgggaaaccaggcgccgcaccggagaaacctggtgagactcctctccttaagtttcgtcatcgtctccgtagcatgtagcgctatccgcactggtgctcggccgggaatcgaagttctcggcttcactggccatggcaccgccgggatgggagtgcgccgccgctcgggtcgccgccgagctccgccgttgggggaaaaggcgc

SEQ ID NO: 140800 - DNA, 624 bp, Zea Mays
tctcatttgccgccttcaatcttctccgctcaacatgcatcgggctgtcataaccccgtgattccgtgaacctacgcatctatctacaacgcatcttctgtcccataagtctcttcgaccttcttgtatgcatcacctcttctttatcgatgtatctcttccaactgcatttcatcctacacaaaacaaacaataagtaaggacagaagcaatagtacaactcatgcaatcaaaaacaaataccaacctcgtcataatgtaccatgtgtccacaaaaatagaccacactaagctcgtaagtaactagtacatacttagcttcaacactacatttgcagagtactggatcagacttccactcttccgctcactcttttttttcttctccttcgcctctggctcaggccaatgggacctaggcccatactaccactctctaaaaatatacttacgccgagcaaaaggttcaaaaactaaattaaattgtctagggacctaaacgatgattttttttttgaaaaagactaaaatacaaaaatttgggtgcctcgtcgcctcgatgcagatacgaacaggcgtagatttcgtggaatcaactgtcagctaagagcttttaagcatttt

SEQ ID NO: 140801 - DNA, 1310 bp, Zea Mays
ccatccatggcgagatccctcgagagctatgcaactgctccagcctcgcccacctcagcctgggggtcaaccagctggagggtgagattcctgctggccttggtctgctgtctcagcttcgcaccctctacatccactacaacaatttagtagggagcatcccaccgtcacttggtaaccttaccctgcttcagattcttgatgtccttgagaacaaactggtaggcagcatacctgtaagcctttcccatttagatcgtctggtagactttgaggtgggtagaaataatctctccggcacaattccaccactgctcttcaacaagtcatcgctcctgtatctcggagttgcatcgaacaagctgcatggaagcttgccagctgatgcaggcaccaacctgcctggtgtcaaaaagctcctcctaggtaacaacaggctgtccggaacacttcctagttcacttggtaacgctaccatggtcgaaatattaggtcttggattgaacagattccaagggagggtggcacctgagataggaaagctgtgcccgtttaatgtcgagatgagtgcaaatgaactgcaagcagaagatgaacagggttgggagttcttcacgctgttcacgaactgcacccgtcttcaactgatcgatctacccctgaacaggttaggaggagtgcttcctacttccatcactaacttttcaacacagatccaatggctcagcatcgcggccaatggcatatctggggtggtcccctcaggcttaggaaaccttatcaaccttagcaacctagacatgggtgaaaacgacctgcatggtgtaattcctgaagatatcgcaaaacttacaaatctgcaagtattgttgctagcaaataatcagttctcaggaaatataccatcctcctttggcaacctcacacagctgcagttgttttccttgtcgaacaacagccttgatggccccatccctagaagccttggtaacttgaaaaacttacctagcctggatttgtcctccaatctactcacgggcttcatccctactgagatctttggcctcccctcactgacagattacctattgctatctgataattacttatctggggtaattcctgcacaagttggcagcctaaaaaatatccaaactctcaatctgtcaaaaaacaacttttctggagaaataccagctgcaatcggtggttgtgtaagtttggtgtggcttggtttggctgacaactccttcacgggtagcatcccaaattcatttggcaatcttagaggcctcaacacactaaacctc

SEQ ID NO: 140802 - DNA, 413 bp, Zea Mays
agtatcatggggcatgaaatgcatgctttcgcatatgaaagaaatacacaatgctacaccaataccaactcaagagtcctgcaatctatgtagtaatcctaaattgacattgaagcatacttaatctttataaaagtttcaataacaggcatgataagatcaaagcaagcagtttatattgacactacacccagaaattccagaaacgatcttccttgtttacagaaacttgtctctagttttgcaggttatcttctcaaatacccccattgcctatgtacatggattattctgtagaagtgacccttccaggatttgattatggagtctttttgctggcatttgaggcaggtgggccaagttatcttctcttagcatatatgtgcacattatgtcactgaacaaattacagc

SEQ ID NO: 140803 - DNA, 537 bp, Zea Mays
cagctagagtcaatcctttgcaagcatcagagcacacagctagaggatcaggctctccaatagctttgtttagttgttccataaaccaaatccaactttctttggtttcgacttcaaaggacccaaatgcaactagatacatccaattgtggccatccacactggtagtcgaaggcatctgaccattatacttgccattcaaagttatggagtctatgctaatgtacggtccgcatccctcacaaaatccttgaaagcaagggccaaaagcacaaaagaaccagctaaaataaaccttcccatcctcgacatgtgcatctatatcaacaactgaatctagtctagcattttcttcaagacaacatccttccatctaaataaaagttggaagctatcgggtatgcgcccggtcgagatatagaattattctccattgagttaaaacctggcaccacatctatttctaaaaggcctcataggatggatgttaaggatttaggtgagctaaagaagtagatagcagaacttctagacaaa

SEQ ID NO: 140804 - DNA, 464 bp, Zea Mays
caagatgcgtcaccaccaaaccacgtctggaccacgagtacggtgccgagaagtccctgtcaaacatgacggtacgcccgcgtgtactgtcttaggaatatccccgctgacttgtagggctagtcaaccctagtcgtggggacctcaacgccgaagactctatagtgatccacataccgagaaggacgagagaatacaccattcctggtgtatacctacgcacgctagaaagtgacgcgatgctcatgacaagagacgaagttgcaccaagcatgaccctgaaccccaccgtaagtccaacctgcaagacctaccaggcaccactacatcagcgtcgaactcactatagggacccgtatgccagacaaatgaagcgatgcgccataccaagggtacgacaacccacgaccctatagatgatgtcaggaggactacaccacccaagagctacaggccgaactccc

SEQ ID NO: 140805 - DNA, 422 bp, Zea Mays
gaaatagactggatgctgtactggatatgtgtgtccttcctctacccgctcgactactaatgcggtgcttaccacgtgagtcgtgcaggagatgtataacaacagatcttctaccggttgttctggcatggctcggcgtggcggctttagtactggtggcgtggtcaagaacttctttagtgcatcgagagcttcatgtgcttctgtggtccactggaacttgtctaccttcttgagcaacttgtagaatggtaagcctttttctcatagccttgatatgaacctgctcaaggccgccatgcatccagtaagcctttgcactttcttctgtgatcgtggtgcttccattctcatgatagcctcgattttttctaggttagcttcaattcctcggtggctgacaatgaatccgagcaacttcc

SEQ ID NO: 140806 - DNA, 601 bp, Zea Mays
gggcaccatgcatggctgtccggtgacccggcctgaacctgcgaggaaaatgtgaagaccccacgcgaccaaacagcagaccacagtgagggatacagatcggacccgaatttctcctcattgattgtcctacacctccctgcccgtagagagccacgcacgcacaaaggggggaggagaggacaggaggccaagcagcagcggcagagacgcaggcgccgcaatgcagggctccaggaccaagtaagcgtccatcacacccttctcttctgtgctggttcttgatcactgcgactctgcgaggtggatccccgcgggcagcggcggtggatccttcaccgtctgattctgtcggtggttccgtttattggttggaacgcagatctggctccgctgaggcgaagggcaacggcaagccggacaaggagaagaagggtggcggcggcacgccgccaactcccaaggacagcagaccgcgcaagccggctgtgcccaaggcgagcgccgccagccatggcacgacgcgcgcggccgacaagtcccccgggtcggggtcggaccgcaaggcgcccacgcccaaggccgcctcccgcctcgccac

SEQ ID NO: 140807 - DNA, 355 bp, Zea Mays
cgcccctgtcagtcatttgtatgaaggttcctccatcttcaggcttaagaactagcagttcaaggtgacatcgtcatcgaagccatggtcaaggggctcaggctagggccagcatcccaatacttcacaagaaagcctccatattctcttgagaagttgttgtagaagatggatgagcacataaggtccgacaatgacttccgccaaaggagggaggacttacatagatacaccaaagccgccaggggcttcggtggaagatttcatccaaggcatgtctgaagcaaccataatccgatgtaggatgaacatcaacaagcaagctatcaacatcaaccttctcacatcacattcg

SEQ ID NO: 140808 - DNA, 446 bp, Zea Mays
cgtaagcctggtaattggttatgcgttttcgcaaatgtttttttataagaatcaggtgattccattaagaccgtgctccagctaaatcgctggcaaccagaaacagagtataatgattgataggtgaaaaaattcttcatgcaatgcttgtttcacctatacgacatcagtttcaagcatcaggcgcccaatggctagctctatcgctgcattgactcctttgaagcttgccgtatttctcttggcaatgatgagataacatgattaattttcccagctccagatttgattgcatcgcctttgtcatcccagatcacatgtccccagctcccagtcattttttcttttatcaaaggagtcacaacattcagcttcaggaatccttcctcaggtcttatcctggaacacctcagcctgcctttctgtcataatggccactgtttctg

SEQ ID NO: 140809 - DNA, 325 bp, Zea Mays
cggatgcatgtgtgtggcggcaaaagcacgggcatgacaagacaaagttcaatgagagcatgcatgcagtgatgcagcgctatatatatgtagcgtagcgtagcgttatgtggcgtcagatcaagagcggtcaagaaattaaggcgcatccatccggtgatgctttccaaatcctcttcctcctcaagttagggcaattaattaaaggtgttctggatagatatatagatggatatgtggatgattagcttttcccactgtcaattaatggacaaataaactaaagagatactgttcaatttgttcggtagtggtagtagacgac

SEQ ID NO: 140810 - DNA, 417 bp, Zea Mays
ggaaaacacacagcacgcatttatctctggtgataaaagtgcggctaacgcataggacactgatagatagaagacttgcgactccccgatccgatggcacagtggcaggggtggtaagcatgggcggtgctttaggtgcagcctccgtgccggcgttgtctccgtgtccagtctcgggacgggacgccaccaactccacgcttccgcaaccgccactttcggctcctacgctcacggcgctgcctcctcgccgtgggggcgtgagagcaacgcgatgcctccctgattcgatcgcccattgttttaaccgcgattgcgtctgctaccacttgcgaactttcaactttggagttctcccgtttcgccacgacggccgccgaccaatttggcaggccaaacccaacgccgtgccaccgt

SEQ ID NO: 140811 - DNA, 546 bp, Zea Mays
taacgcggcaacagacgtgttgtcaaaactaggatccagtcggacccaggttccacctggagttttcgtccaagaggtaccacgcccaagcatttcttcagatcaagcagaagagtgcaatgttttaagccagccagagtcagactctaatgactagagggagcccatcatcagatatataaagaatgaagaggaaccggatgacaaagctgcagcagaacgcatcgcaaggcagtcagcccactataccctcattggggatgcactatacagaaggggcgcaacaggagtcctcatgaagtgcatttctttggttactcggaagcaactgttatatgagatacacgccggacaatgcgagatacacgcagcatccaggaccctggttgggaaggtcttcaggtctagtttctactggccgacagcaaagagtgatgcaaccgagttagtccagaggtgtgaagcttgccaattcttatcaaagtagcagcatttaccagcacagcaactgcataccatacccgtaacatggccgtttgcgtgctg

SEQ ID NO: 140812 - DNA, 304 bp, Zea Mays
gtgccctcaaatcgtttaaatgcactggcattcacgatctgtaaattttcataggccaaattcgtgttgcctgtttatgcccttgaagtatggatacagagttagtatgtttaatgtaaaacgatgtatagtacatctattcgtactattattagatattcaaaaaaatgaatgcatattagcattagaccctttgaaccaattttattttgctatttagatctgttagaaatgggataaagactgacatgctattatactcatttccacatgagtcccctatccgagcgctcgaccactactg

SEQ ID NO: 140813 - DNA, 415 bp, Zea Mays
gttgtttctgagtctgatctcttacaccttgtcgaaaccggcgttctgccaccgaaggagctgtgttcctggcgaatctggcgtggggttaccattctgacagaggacactcatgaagttgtcatcttcgtgccttttctcatctgagggcttgccctgccagcttctccctttttccatggcctccttgatttttatgatctgaatcttacacacctaaaccccaactctattcttcaaattgccatttttgtgcacctttgcgaggcgttccttggaattcttccccgttttgggctttggaaatatctctaccactgtcggcctgggatgattggatgacaacatcaacttgttggtggtgctagtttagagcttcgtcggggtaggaaaatcgagtatcttgatatcccct

SEQ ID NO: 140814 - DNA, 379 bp, Zea Mays
cgacggcacccagtgaggtaaacgcgaaaagggaattgtatgagcgaatttgcctaaggaaccttttggcacgattatcaccatcgaatcgcagcaggtcacttaagggaggcggcggacatttgtaaggctccaaaacaatcttacctcctctgcaacacaggttgtacacaagcctgcgctgcgtaattgtagaagcgcttttgacccgttcttgaaaccagaaaacagcgccacaatgtcggcactcgtctgatgggccaccatagtatgagcgatctttgtaggtctctacatgcaaagatgggtccaggatgcatggattacttgaggaatacgtagacaaaataatctaggcaggcggaacataagcaccttt

SEQ ID NO: 140815 - DNA, 457 bp, Zea Mays
cagagagcaaggagacgtggtgataggtacgatttaagttgattcatttgtggcccatgctctttttgactctggcgctagctattcgtttgtttcagaggattttttgtcgcgggctggtctttcggtgcagaggttgggtcacccaattttggttagttctgctaatggctccattagtagttgttcagtttgtcacgggtgttccgacattcttgctgatgaggtcttttaagacaatctggttgtggtttccttgggggcattcgatgttatcttgggtatggattggttatcccagtatcgtgcagttatatcctgtttttggaagacagtgttattgcaggcgccaacaggtagggaggtggtattcttgggaagttcccctaagttcacgttatccttgttggcgcaattgcttccggatcgccggtccaggaagtcgggaatctttttc

SEQ ID NO: 140816 - DNA, 441 bp, Zea Mays
agggatgactttatatgtgagtggtgctacaggtggtgtcttccaagctgcgggaagctaatgagatgaaatggaggggatcccctttggccttatatacacgaccgtagggtgcttcccgcgtacatgttgatcatacttttcctgcttatctcctaattaatagcaaacaaccttcattgtcccaaggaaaactcggcgcctccgctccgagctatctccggcatttgaggatgtcaggcgcgggaaaaacgaacggcctcaacactatcacggccaaaccgcaactagctcgggcgtgggcccatcatgctcctgggtcggcccgcttccaccgtttccatttgcccgacccacgacgggatttcacagattggtgactaccatgtggccccgggtgaggttttcgcctccaagtggacccgggggatatccatcccc

SEQ ID NO: 140817 - DNA, 494 bp, Zea Mays
gtacgtcagtggtgtgtggatgtggcgaaatatgtctgaaacgacgctgccctcgctgatttcagaaagtttgctgaaactttttcaggctgaattcagtggatggacggcacctgctgggcaccccccactgtcagaggcgcagatgcgatctgctgtccggtgtgactgattgcaatcgcaagcaattggccaagaaagccaagatcgggcagaaagattttggtccatacagaggagctagaggagcgaggaatggggccggatatctgatgcaactgatggcaagaaagcttccgtcgaccagaaacacgactggactttgtttggggaatggaacgaccggattgccggagagatagtggatacctagcttgccaaggccgacagcagtgaactcgactgccgatgccaaatgcgtcgatccgtcaagcaccggctgccacaccaagaattggacgtcaagtccggtgtggaacttccacagaatgacc

SEQ ID NO: 140818 - DNA, 727 bp, Zea Mays
ctcgtgcactcggtagaaagcttcagcatctaggctcatcccttggcttcggaggacccagatgaagacattgagcctaacaatagcgttaggagtcagatgatgaagatatatttcaaagttctttaggacttcccctatcatctcgttcagaggaaatcgcagtcctgctctgaagaagctcttaaaaaccacaacttcatccttcttcggctctggggtagtttcttcttcgacaaatcgaacaagtttgctttcagcttctccaaaatagtccagtctcatcatcattggcatgtcgtcttcggacacagtagatttctcaaaatctagatgactgggctttgttgggatcaaaatactgtaatcttcttcactctcatcaacattttcttcttcaacaacagtttgctcagcttcggcattaggagcaccttcgtcaacaactcgctctatcacaactagacctaatcgttccattacttctgaaattggtgctgtttcagtggcctcgatttcttccccctcatgagacacccttgcagttgatcgcactctggccattttgatggatttttacagtttgaggaagctaacccgtctgacgaagttaaccttaaacgatgaagtgttcgcttgagagcgcagtgcagaaagcttcggctatggttaaattttttaacagcacaacagtgcaatggcaatgaatgttgtggtaactcttcac

SEQ ID NO: 140819 - DNA, 607 bp, Zea Mays
atggatatgtttctcagatttcacaaccctgaactacttcagtcgacagcagtaccaacctcattcgctcctttgctcccttctccaaacaatgacagacctatattactgaagcaattttgttccttaactataggtctataagtttacaatagttttccagggtcaaggatacaagaatcacaaactataggtccccaaagttggctgaaattcacaggaaccatacccagttatctaagactgagcacgaaacttatagcctgacagggcactttcaggtagttgttttttcacctttttgtgggatcacatccaactcacttaaggagattggttcatttacatatgatcttcaactttgttataaagatcacagtccaaaaccatcgagaacaggcaccacacagctccaaagtcatgccaatcactgaaattcagcactggccactattccctatctgaaaatttccaaagtctgccagccttccttctaacaccatttactccaccttttcatgtagtaccaagaccatatcccttaaacaaacttgtaccctaatagctactctacaactttattacaaggagtatggcttaatacttc

SEQ ID NO: 140820 - DNA, 513 bp, Zea Mays
gccgtttctctttcttgacccgatcgcctgcttcctaccaccggtgacgctagcggcaggcccatttaacctctcgatcgagcacctgtgcctgcacggcagatatatatacatatataggcgagaccagtcctgccaggaaccatccatatatacatgctccggtgagctttgctcgacgacagtcatcatgcatggcgcgcggcgagtgaagtgaatcggagcagtttgggtgccggtgagttcttcgtgtcaccctgctctgtttctttctagtcagacaggcgagcttaaaacctgatcaactaactcatcgtcctcccttgcagatttactcaacctgttcttgacggaaccaagccaagatctcgatcgacctggtccactccagtccagaccagaaatggaggtacagatggcagcacaaggccctaaatcgatgggacgacgacgcagcagcacgccgtgtgactctcagcacggcggcggtgccgacaccaagcccgtccccgg

SEQ ID NO: 140821 - DNA, 314 bp, Zea Mays
cgcaaactccctatgaagtttgaggccattctatgcattttagtccgagcagcattgtcgctggcccgcactgtcggaccccgagtagcactgttgcatctcctactttggtctatttgttctgaaattttgtagacaattgtgcatgtttctaagtagcaatttggtatattcaattgacactagatttagtattactgtgctacgtagttttagttgtcccgtgggttgtgttgaagttgggatcaaagtcacgatgttgttctcgatcagagaaattttagtggctcccattcaccccctctcgttgtctc

SEQ ID NO: 140822 - DNA, 1300 bp, Zea Mays
acctcaccagcccaagtatcttaacattccactggcaggaaacgtacaaccccaatcatcgaaaagcagaagcttctgccacagtggcgtcacagctatataggggcagggcagggcagggtcaggcaggccaagagaatcgaatccctgcataaaaggggaaaccaatccttcaagcaagaacgcgcggtacaatcagcacgcgtccttgcgggggcccccacgcgaggccaacttgcaagcacagcacagtgcacccgatccgatcaccgtcatgccagaactaggccagtgcattgacgcgggcaagtaagcgtactgtcctatactcatgtgtgcgcacctaccagagcttaattgacgccgtatcttctactcatggaccataatcgcgcgttgggcgcagtttgagggctgacagggccacaggctgtggagctttagcgcgaacggcaaccgcaggcaggccgccccggcaagaaccgcagttaagacgggcaccaaagacgcccgcggaagtaattgccggcgtgcggcgtgggggtcgcacatgtttaccagccgagatgacctgaccgcgcctactgctgctctcgtcagttctagcgaaatctgcgtcccggtgaaggcgcgcgtgacggggctttaaaagctcggagctactgctacctcaaactcgatacggatattgatggcagcctccgcacggtggatttggctttaaccagatgccccgctgcatcattgtacttgtattgtagtgtttttgtggcgcgtcctcccttcatctccgtcttttactaataactgccgtagcagttatccccaggggggtttcttgcacgggcaaaaagaaatataaaggagcagggtaataaaaataaaaatctagtagtgcgcgaaatgggcttcttctgatggattgaaatgtcacttcacatgtgtgacgagagagttcatcagaagcagaccagcgtggtaaggggaaagctgaagcatacagggagcacagcacgacgacttgccggcgctactatccgtgtgaaacagctgccgcgtgagcgatcctcgctgcaactgagtttatgggttccgtccagaaaggacaacgaaacacgaagcggagagtccggagggcggaacctcaactaaaacaaggcgagcggcacggccgcacacggtggggaaaaaatattcagaaactgcggagaaattttgggtttaaacatgaaactgcacagtaaattttcagagagtgtgacatccggcatgaacagaggaactccgtatgcgggctctg

SEQ ID NO: 140823 - DNA, 765 bp, Zea Mays
gtggagtatttgaggtacgggtgagtgcgctagatgtgtgattacataacgaagttgatggtgcactcaatttatagaccccgaggtcggtagctctcaatttgaccgcgatgtgttggcggtcggagatagggaagaacacggtggttgtaaccgtggcagtcaccggtgtaacggcgcaaggagaatactcctaagggttccatgcttactaccgcgtagtaacaagcttcggcgtggcgcaaccgaggtcaccggcgcttccacggcgacttcggtagtccggccacgtcgcagcgactataatcacggcgataaattccaatttccgatcctatccattccccgccgtgagatcttttctttgccgtagttatccacccgccagtgaacacaaatcacggcggcggcgtgaatcacggtgtagagatcgtcggcggcgaggttgctgcgctggcggtctgatccactcaaagcactgtaccatggcgaatggcattcaattggcctgacagaccgatttgaagcatgattttctcctatttttatttggcaacccatctgaggctctgcagcaaaattgtagtccaatataccatcttcatctttgttatagtattccaagacaaattcttactggattatggtcgaaatggctcacaaacttggttctaggccactgtcagtttgaaattcagacttcaacagcctgactttgagtgtgattatctccaaattcttcataacaaccttgcttacactctt

SEQ ID NO: 140824 - DNA, 700 bp, Zea Mays
ggctagggacatttcctcggtgtcggacgagtttcttattctggtagggggtagggctggaggggcttcttccttctgctcagtctgacatccttggcttttggtcttcttgcggatttttcttgcgggggcgagcttcttcagcttcttgtcgtaatccatcttcagagtgcggtaggcctcacgggtgtcggtttcctcgccttctgctatctcgaggctctcttgaagggacaccttttcccttgtaagttccctgacttgttgctccaggctttccacccgggagtttaggtgagtgcagtgggaggcaaggtcatcatattggttatcaagggtgtggaggtatccagccatgtagacaatggtggggtcatcctcgatagggtctccccctgacagggcctgaagtcttttcctccaggcgggggtatttttgttgctgggtgggaagtagcggaggggggtttcaaagattactctgctgtagctttggcatagttgtcggagggctttttgggcaacattctggcaagtatctaggaagcggtatccggtgaaagtgacttggaaagaaggatggttcgggtagtttcggctttctcccaggtaaactgccatagagcacttctccattccattctcgagatactccttccagtcatattctggcttcttgcggattcccatgcgaagcgca

SEQ ID NO: 140825 - DNA, 530 bp, Zea Mays
ctactaccagatagcctgctgctgcgtaagtgactgaaggatagcgggcagagcagggtcaatatctggtgggacagcaggagcagcactagaactacctgcctcatgatcatgtgagcgaggtggcacaggaggcagtggcgggatccctaggccctcatcatcatcggaagaagaatcagcaatggcaccctgggtctcgaactgtctgaaaacctcatccttagccctgatatctgatactgggcacgagaactaggtcctcaggggttgaacgatagaagcctaactgaaggcgagaggcctcgagggtgccctggaactgaggaggcctgatcagctacacaaaaatgtggtagagataatgggcatatggcagctgacggcgagcacggagaccatccaacattgtgtcctcgatctcacaaataaggaaatcaaccacatcaaactctgaatgtgagatcaaagcaccaagtagccatagctgaatgtgagtggtggcctccctgtatcccatcatgggtagc

SEQ ID NO: 140826 - DNA, 298 bp, Zea Mays
tggaggcccaatgtggccagctcaaaaaaacttaaaatatgtcgtggttgcattggaaaatactccttcaagtggattgaaacaaaatcattagctaccataacttcggctacaacagagatcaacagaggcatgtccgccaatgacgcgctatggatagtgggaggtcaaggataacaggtggggtcagggtgtcagtgagagagcgatcgcgggggacataagcgccgacacgtgactcaagagcatgggcaagtgcagggagagaagcgctgacaagcaggccccgcatgtgagt

SEQ ID NO: 140827 - DNA, 633 bp, Zea Mays
tgtctcccgcccgaggttggcctcgggcgagtcgtgactgcatctcccattcgagcttggccttgggcgattcttgacagcctctcccgcccgagaatggcctcgagcgagtcgtgactacgtatcctgccgggggttggcctcgggcgagtggtgactacctgtcccacctgatgatggccacaggcgagtcgtgactacttctcccaccccgggttgtcctcgggcgagtcgtgactgcctatcccacccgaggatggcctcaggtgagtcgtggctaactgtccagccagggcttggtctcgggtgagtcgtgactgtgtctcctgtcgggggttggcttctagcgagtcgtgactgcctgtctcgccagaggatggcctcgggctagtcgtggctgcctatcctgcctgggcttggcctcgggcgagtcgtgactgcctctcccacccgagggttgcctcgggcggactgcctgttctgtcttgccttggcctcgggcgagttgtaactttgtatcccaccggggttggcctcaggcgagctgtaactgtgtatcccacccgggggttagcattgagcgagtcgtgactgtctgtcccgcccgcggatgacctcaggcgagtcgttact

SEQ ID NO: 140828 - DNA, 745 bp, Zea Mays
gcctaggctatctttaattcatgggtctgccactgaatacacttggcgtcgagccacaatagggaagtcggtcctccttccactcatgacatgtgaacccgggccagaaccctcatcatgacctatgaggttgtagtcctatgatccacttatggcctaccaagcctaggcctaagtcctctagagatctacagactgtgcgattatggggaggctacgctagcgaaaaacaaaattttttaccccataaaaccaagaactactgcggttataggtcatggaattaccactagaagcgcagggtagcggaagacgtctcgatgtagacgaacgcgtcgagcagtgacgtgcagttgccggcgtccttcacgtcctcgcgtggttcatcctagtgctccagatgtagcacctccgaggtatccacacgtacagggaggaagcgtcatgtactgaactgctaggttcacgacggtggctacgcgagggcgagaggcgagcggcttctcgtttgctggtggcgaattagggttaacctaaccgtgcccccgaccctcattaaataggcgttatggtgggcttctgactccgaggctcatcagtaaccctaaagctcattctaatttctgacctaatccgagttaggcttccttccccttaagtgtgtgaccctatagattcacgtacaaatagatatggcccgagtactcttacttggcccaataattgacagcggtctctagcaaaa

SEQ ID NO: 140829 - DNA, 662 bp, Zea Mays
cggacagtaactggaaactttgtttgtaatatgtaatattgtataatcactcagcaaactataatattaagagtttagaacactataaatcagaaattcactagtttaaaagttggtacaaaaacatatgtttttcaaagatcaacagcttgcgcaaaggcaacacttttttcgtcaacattcttcaatcatgaaccccaaacttgtggatacataagacaaaaaagattatcggttgtaagatgctaacatgacagcatcaaagattatgcaagcgtgccttagagagtagggctactacaatatttttttatgtattgttttttgtgctacctaaaataggattctagaaaccgaaatatcccgtaaaaaacgagatttctgaaatatgggcaggaaaacactgaaccattttcgttcccttcccgcagtatatcatcatgtttccgtctcgttcctgtttttccccataaatacgaaaacggtacaggtaaaaacagaatacggtaccgaacaaaatgagatttttcgcgcccgctttcatcactactgtatagacactctccaaaaacctagtagctgctatctcgagcatgatcttcaacggacgatgtttttggggcctttttcctttttcctcgtttcactttagtttagtttgt

SEQ ID NO: 140830 - DNA, 542 bp, Zea Mays
cgcgcctgacgatgtcagcaccgagtccaggaagatggcccgttttctgaaaggactaagacccgagcttaagaccatcctcgccagctaggacttcctcaacttctctcacctctccaacaaggctatccaagtggaaagggcaaaagaggaagaaaaagggcacctcaagaggaaattccaagtcctccgagctcaacagcaataacgtcaccagagagctcgaccctttgggctcccgcccagggggccaagcttcaataaaccatctggacccactccatcgcgctacagtcagcagagttagagctcccttcaggcaccctccgttgcaagcaaccaaccgccagcaaatgcctgttggcactgcggagaccccagtcacttcaagaataactgccctcagttgaatgcacccggaccgacctactccaactcagtgaatggccccaagattccctcggcacctacctccaaggcacctccttccaacagccagcagagtaggactcagtaccagggcagagcccgagtcaaccacg

SEQ ID NO: 140831 - DNA, 427 bp, Zea Mays
atcagacgaggaatgggcgagggctcaaccgttggttgcttcccgacacacgtcatcaacagtggcttgaggcctccttagagaaggaggattggggagacgtcgccgagcgtggcctcacctaggcgcgaggagattgttgggcgacgaataggaggacaccggatctagatcttcaacacgacggggacgtcgccgtgcagccctcgatgactcacgtcgaagtttcgccgacaggatcgaggctgccccgtcgttgattttcgcgtcgcctatgggagaaccttctggagaaagtcgtgaatgggagcagatcgttgtcgtgcgtgagcgaacacgagtagtgtccccttcagatgggagagagagaccgtcaacgagatggaaggctacgtcggagacaccgatgttgtgtttcgcatgatca

SEQ ID NO: 140832 - DNA, 374 bp, Zea Mays
gaattcttatacttttgctttcatgccattgtattgccacccttgcgcaatacctaccttgatgtatgaaacctttggctctctactccttgataatgctttctccctaactcacttcatatccttggttgtatcatttatcctcactttaatagttcatggttatcttatctcactcttggccaccaacaaatatgtcttgtctaactccttgataattcttacccaactccttgactatataatatctttcttattccaaatcttgtctcaccttttgttttggttgaatgagtagaactggattatgttgtgctggtatgcttgagttcattgtcctttgtgttcatgtttgatttgtttctttgaaatga

SEQ ID NO: 140833 - DNA, 422 bp, Zea Mays
gtcatctgtcctaaggtccgggagttgttccttgcgggctttctccacaagtcttgctgtctctgagtctagacattgagcttcgcatatgtggtcttccagcattggtttgacttcgagactgtcgttgtttcccagacatgcatttagctgcgctgattctttcttccaatcctctaaaaagttggttccttttttccgaatggttttcgactgagggcgtcggctaccacgttggccttcccggggtgatagtgaatttctaggtcataatccttgatcaactctaaccatcttcgctgacggaggttgagatctggttgagtgaatatatacttcagacttttgtgatcggtgaaaatgtggcatttgtttccgattaggtaatgcctccatatcttcaaggcatgcactatggctgc

SEQ ID NO: 140834 - DNA, 443 bp, Zea Mays
gttttgtttcagctttggtttgcatttttgaagcctcggcgattttccctgaaggagtagagcttaaagccttcactgtttctaacacatctggtacatttgccatccttcttcttttgggagttgtcacaagacttttctgtgccttcggcactgttacttctgccgaagggcttaaaatttctaacatttttgttccttcagtttttggctcttcgaccttatctctaccagtctttgactcagctagctcggctgagagtaccttcggcattatagccgggtctttagctttctgcgtaggaggaatgggttcctttggttcagcagctgaagaagtctccccgccaaattcaggcaccactgccggctcaatataacgtggcctgtgggtaaggactttcaacttcttgctcttcggcgctggctcatttggagtggcc

SEQ ID NO: 140835 - DNA, 817 bp, Zea Mays
gtagtggtgttccttctccagctttgtctgctctcgttggtctgcaagaattgtctctggcaaattttgatcagactctcgaagacatggtcccagaagatctgttgtcggagccggcagatggtgggatgatggaaatttgtgctgatgtgcctgatgccgggttagagttatcccgagcggcgtctcgtgcctcatcgaccttggagcgcggttttaagagttaggaggctggtctggattgctctgttcccatggaagtggttgaaggtccttcagccttagaggtggatgctacagagagctcggtcctcaaggatggcgctagcgtttgcccagcccccgagggtgttgccggagatgatccggctcggatgggtagcacgagctatgacccagcccccgagggtgtctgagtgggttctccctctcatacttccatggatgttcacatagggtcttctcctccgtattctggttgcatggtagcagcacgagcttcgggtcaggaagtcgccttagaggtcggcgctcctgatgacagagttttgatttctgctgatgacactgaattggtccccactgatgccttgcagattgcttcggttggtaatccttcatcgagttatcaactgacttcccacgatttgggggttccttcgttcttctccaacctccaggtaatttggtttttcctgatctgactatactccgggtgtgatactgttcttatactcatttgtttttaatgtcaggcattggttgacgagatggctggtcagctgaagtcgcagggtgcttctgtcccagaaagagc

SEQ ID NO: 140836 - DNA, 630 bp, Zea Mays
cccacattgtgtaacaatttacaggaaaatggaaattgacctttaaattcttcctcaaattcagaatacatccgccttgtatataatttaactgcagtcttcaacaatggaaaatttgggatgtaattaactgggttgttcatacaagacttaaagtcttcatccaactcattttcccgaagagaagcagaaactttctcacattcgacgatgagttccgaaagaccaagtttcctgtgaagtcttttcttgaagacattgttcgttccttcactcctttgagttgttgtcatgtcagctgtaaaagagtcacgataaacagcagcccatttttctctcaactcatacatatttttcatccacgagttctcctccaagctatattttgtcaacaattcattccacttcttcttaaaacactcctctgatctatcttcatagacacattttttaaaagcaggtagaaactcatgagggtgctcatgaattacacgactcagatgtttagcagcattgagataaatgtgccacaaacaaagtcgatgccttgtatttagaaatacataagcaattgctcgtgccatagctgcgtcttgatcagtgaaaattgtatttggatgcttttctgcc

SEQ ID NO: 140837 - DNA, 404 bp, Zea Mays
tgttgtgggcttccgatgcattttcacggggaaactcctcgccgtgatacacccagacttcatagtcagacatgtagccatatttgcaaaggtgtcccgacagagttctcttgtcttgacatctataaatacgacacatactacatggacaccacacatctgtgtcagttcttgacaaagtaaaagcacgcgcaataaaatcctctgtctttcttatccactctgctgagggatcattcacacaccaaccttcatacagccatcgacggtcctcacccaccatatttgatgctaaaacagtagaacatgtgattcacccataagagaccgctagagcaacgatttatgacacataagttccgcaacattacgacaattttgcgaaaatattactaatctgtaac

SEQ ID NO: 140838 - DNA, 444 bp, Zea Mays
ggcaatgggagactatgtgtgtatgatcaagaacacaaactgcttatttctgctcctagaacaacgaataggttgtatattgcaaaatttggtatgtcttcacctgtcagtttacttgcaaaatctgaagaaaagtcttggcaatggcatgcaagatatggacatctaaatttcagggctctgaatgatttaggcagtaaaaacatggttgaaggcatcccaagtatcaagaaggtagagtaggtgtgtgatggttgtgttctgggcaaacaacatagaaaaccattcccacaggtgtcgagttttagagcccaaacaggattagaactggtccatgctgacttatgtggaaaaattactccaagaaccatagggggtgcattctattttctggtggtggtagatgaccatagcagatacatgtgggtagagattattagcaca

SEQ ID NO: 140839 - DNA, 404 bp, Zea Mays
ccaagtaggcatagggcactgcccttttggccctgcttaaggtaaatcatcagattcacatgttatagtggttagaggttaagaacaagatcgagtaggatctaacactacagtgctagtttttggcagacctctctttaattttccttttggaaaaaacgacaaaatgtagcttttcatgcatttaagtattctatatttaggttcaatgttggccaaagtacgttgcggattagttttctcaaggcttgtcgttcacaaaatttaagggagctgctggttcatatatgtaacttacacatgtaattaatttaagcggccgaacagagacatgcgcttggtgtaagtcggtacataaaatatcatcaatttggaatcacctcatcatatcaaaataatatttt

SEQ ID NO: 140840 - DNA, 495 bp, Zea Mays
atgaatgctctaagtcttcgccggatggcattgttagcctgtacgcgctgggggacgccttcgtcttgacgatgaaggggccctcccactttggctctagcttgccccgggactctgttcgagttgtccggacgagtacgaggtctccttcgctgaattccctcgagatgactgtgtggtcgcaccatgcttttgtttgagcttggtatttgtttagggtctgtagggcgaagacacggtaggtccttcgaagtaggctcgtctacgtcggggacggctgaagtgattgtccgtggtgacccatgttttatttcttgtggggtcatggcctccgatccatatagaaggcggaaaggggtgaacccagtcgccctgcactcagtcgtgttcagcgcccaaaccgcttcaggtaacaggtcggcccacttgcctttcttgtcgtcgaggagcattttcttgacggctgtgaaaattttaccattggcgcgttccatg

SEQ ID NO: 140841 - DNA, 542 bp, Zea Mays
attctttggctgaagtgcctgacttttaagaaacctttgtcgatgttgatcaaagtgatgctatcgatgccctgctatgtatggcttctactgatgctagcatatttaaatcggacaaggagcttcaggcagccagtactttgctgctgcctgtttttcttccttgcatgtatggttcctaagatgaggtcgtgaacgatgtcgtgataactattttttggatcggctgtgggatggttcatggctgttgatcggcaagggaaccagatgaagcacctaatatgagaatattgaagaagtgaaaaggtatttgtaaaggatatataccagaggcacccaaggagtgtcaacaatgaagatgttggctagtgggaccaagcaattcaggccgagtcggagaacttagactcggactggataacttggatctggctgcgggactcggactaggattctggggacttggccgacatgtcagaaccaaaccagcctacgtggacagagaagggaagagtggaagacaacattttctggcctgttta

SEQ ID NO: 140842 - DNA, 633 bp, Zea Mays
tatgagggaaaagatgaaggcattgaagagctagtggtataagtacaacaaagaatggagttatgtcaaggcttacacgcggtgaagaagaggatattgccaagggtgagataagtaaaacaccgctctcaaattaggataagagattggagattttagataacagacataatgtaatcacaaggtaggatagagtgatgagaagggtaaaggagacaacaaacaaaacacaacaaaggatagagttaaaactcgcaagtgacaaagaagaggatacgaccaagggaaaagtaggtacagtacaatgctcagattgagatggaaaagaggatattttaaaggctagtataagataaacctcaaggtaagatataaaggtgataaggataaaggtggtaatgatgaaaagtataatccatggacagagtcgaggcaagactcacgaaatggcaaggtggagaaaacaatcaaggataagataagtgaggtcccgacagaagagttgaagtaaaaattcattaccgaagaaagttacaaggaaacaacgagattaccacaggtgtgcaagataaaatgatcactcatggatcattaagaaacaagggtggtcaagaacatgttaactgaaatgtc

SEQ ID NO: 140843 - DNA, 1018 bp, Zea Mays
acaaggaacaactcctggatctcagaacagatgaaaagggaactctttggtgcaggaaccgtctgtgtgtaccaaagggggaggcatgagaaatcctgctagatgaagcccacaactcagcctattctatccatccagggtctaccaagatgtacctagacctcaagactagatactggtggagagggatgaaaaaggagatagctcaacatgtagcccgatgtgatacttgtcaacgaactaaggcagaacatcaaaggcctgcagggttactgcaaccacttccagtgcccaaatggaagtgggaagaaataggcatggatttcgtgatcgggctgccccgaacccaaaagggcaacgattctatctaggtcataattgaccgtcttaccaaagtacctcactttataccagtaaagactaccttcgtaggagccaccctcgcccggatatacctcaaagaaatagtcagacttcatggcattccgcgaagaatagtatcagacagaggaacacagttcacctcaaagttttggttgagtcttcagcaagctatgggcaccaagttagatttcagcaccgcctaccacccctagttagacagacagatagaaagagtcaataaggtccttgaagatttgttgagagcctgtgtgctgaccttcgacagagattgggagtccagtttgccgtatgcagaattctcgtataacaatagttaccaggccagcatcaagatgtcaccttttgaagccttgtatggaaggagatgccaaacccctttgatgtggtcaaacgtgggagaaaagaccctagaagggcatgccttcatcaaagaggtagaagagaaagttgccctgatccgcaagagactactcgaagcccagagtcggcaaaagagttacgcagacaacaggaggagagaactcaacttcgaggaaggtgattttgtcgatctcaaagtctccccaatgcgtggagtcaaaagatttcaagcaaaagggaagctagctccgcg

SEQ ID NO: 140844 - DNA, 410 bp, Zea Mays
aaagggcatgctagggaaaagatgaactattggtagttcaaccatttggataagctctaaatggccctagtatcatatttgagcaatctagcgaggctaaaaaactcaaactattgaagttggtattttggagctatgtttgagccaatatgggaatatgagttagagaattcaaaatggtcaagttccatgacttagactagttggacagtctctaaatatgtttgtctaagttataggaacactcaagaagtctgcaaaatcaagacaaagaagaaaagcccaaaaagaacttaagtgtgctgctctgcagcacactggaccaattgtgcagagagcatttttctggggcttctaagggctggcgcatcggaccagtctggtgtgcgacgaactgcacaacggaccga

SEQ ID NO: 140845 - DNA, 425 bp, Zea Mays
atccacatataatagaagtaaagtgtgaccttttggagagacatgaacaaacaatgcaggatcatgttcactagaagaaaaacctgcagctgtgatgacagagatgaatctctcaaaccaagcacgaggagcttgtttcagaccatacaatgcgcgacaaagacgacaaacgtgtcctgagggagtatcaacccccggaggaggatgcatataaacttcttcacgtagatcaccattgagaaacacattcttgacatccatatgggagatagtccaagaagatgaggctgcaactgcaatcaaggttcgaacagtagtcatatgtgcaattggtgcaaaagtctcatcataatcaagtccttgagtctgttggaaaccacgagccacaagatgagctttatacctctcaatggaaccatccgatt

SEQ ID NO: 140846 - DNA, 393 bp, Zea Mays
gaacacatggtaaataggtgaaaggaaaataatgaaatattactgaaggcagttgcccattcaagacagggctatcaggacatcacgagttcagtgtatattacaggtagtaatcagaacaataaatactatcaggacacaatctggagtgtgtccattagaggaacgagaaacaattaaaaggcacatcatagagataaactaatcatcaaaatcataattagacggacaaagcactttagaattgagatatatcacatcgatgaaatcgtgtaactttataattgagatacaaatctttccaacaaccaagaaaaggacaatatgacttattagtccaatatgaaaagagaaaataacccataaaaacagaatgattgtaaccactaaaac

SEQ ID NO: 140847 - DNA, 635 bp, Zea Mays
ctagcaggtttttgcgttgtctttgttgctaaatttgcagcgttgtcacgaggcttgtcgctagaaggtggggctgctgttcgagctgacgatgaataaggtgtagcagcacgtccagttgatggaatatttgagcggggctacatggaaaaattcctccttgcagaaatgttagtcctggtacttgcatgtcgtccctgcacttccctttcagctttgcaagcaagatggaacaaatgggttatgttagtgtactctttataagcaaggatgtcctgaatttcccgatttaacccacccaaaaatctagccatagcaggttccatatcctcctctaaattgcaatgtagcatgcccatttgcagctcttgatagtattcttctacacttttagtaccttgttttaactgttgcagttggtttaaaagatcacgtgcatagtaagatggaacaaatctagccctcatgatccgtttcaaagcatcccaagtttgtggcatgttatgaggatttttcttgccatgttctatccaccaaacagaagcaaaatcagtgaattcactagttgcagccctaacacatgcattttttggaaaatcatgacaagtaaacttttgttcaacagccatctccca

SEQ ID NO: 140848 - DNA, 315 bp, Zea Mays
gtgcaaaagaatcaggcatcaccaccgccatatacatcacctggccactgagcaaaataacaggcaaccacctaaggaattcacagcaaaacagccagccaacaacaccacccttccatccacaaaagagtacctagttgagcctaaaacaagtgcaaaacatatcagctaagtacaagttgaaacaataaaactaatgatatgtgaatcacctaatcacttcacagtagtgttgaatcactcaaaaacttgaatacccgtgactgaaaatgttgtttcagctgaagcggataagaaaccacgcatgcccttttg

SEQ ID NO: 140849 - DNA, 648 bp, Zea Mays
aagttattttattcattacaccaatacattacaagcatatgactaccacaagttgtactacacgcgagtgttccctgaggtactaccgaattccttttctagagtgtccccaaattccttgagaagatcatcaaggctagcgagggacatatcctcgatatcggacaaattttctatcctggcgggtactggcgctgggggagctttcttcctcctttctgtctagcatccttggcttgtggttttcttccggattttctttgtgggggcgagcttcttaagcttcttatcatagtccatctttaaggttcgataggcctcacgggtgttggcctcctcgccttctgttatgtcgagacactcctggagagatgccttctccttcttcagctcttggacttgctgctctaggctttccacccgggagtttaggtgggtgcagtgggaggagagatcatcgtagtgggtatcaagggtgtggaggtatccggccatgtagacaatggtggggtcatcctcggtggggtctcttcctgagagagcctgaagtcttttcctccaggtaggggtatttttattggtgggtgggaaataacgaagaggggtttcaaagatttctctgctgtagttttggcatagctgtttgag

SEQ ID NO: 140850 - DNA, 483 bp, Zea Mays
gcatcatcaaaagcaatattgtcatgtgaaaatcatcataccacatatcatcatggctggggccctcctaacgaaggtctctttgttgtggtcgatgcccttgctcagtttcttgtgcaatgtgacgcatttcctcggctgcttcatcgatcttattttgtaactcagacagctgaagcatcttctcccttcatttctccacttgttgatgtatgacttccaggttgctaatctcttgatctagctcttcgtcttgtggggttgggctagtggccttcctcttctgactcgggcttctcttagaaggattccatcttgattggtatccaggggagcaagaacagcccttggcgccgctgtcttcttcggcggcatgacgaaggtggtcgttgatgagttcaccagaggtgggcgtcaatgttggatctatgagttcaccggaggtggtcgttgatgagttcaccggaggttcctctgtctccc

SEQ ID NO: 140851 - DNA, 633 bp, Zea Mays
ttgacaagtgaagacaatcacactcatatgaggttgtagcctcaaagctaatgttttggaaatgagcttaatgaaggaatggattaggcttgtcggactatagtcggccacttcaatagctccctttttggagtgagtattacattggcggtgttgacgagtgacaagatgccacatcgtagagcatgcaaaaattggtcacatttaggatatccccttttattatgttccagcacatgaattatgtagatgatatataaacaaatatgaccttgaaggaccagtgagacgaccagagggggtgaatggaagccacaaaaatttctctactcgatatcaccgtgacttgatcccacttcaatccacaccctacgggactcacaaaactgcgtagcatcatgcaaatcattccagtgtcgatggactgcacctaactactagaaaggaaccaactcaactgtttgtaaaaaactagaagcaaaaccacagaaaaaagcaagcggcagtgcctctctaaaggtcgatagagccggactgtgacaatgttgtgcagatgggtggcagtgtcatgcctctaaatctgttcagaatcctctcaaatttcatggataacaagcacaaaggaaaagaaga

SEQ ID NO: 140852 - DNA, 486 bp, Zea Mays
gacgtctctgaacaggctgaacatgaacaccatgagaaggatggttcatgtccttcctgctcgactcagaaacccgccgctcatctctcttcctcctaaagcaaaaagaagctagatgcccatccctctcacaatattcacaatggtacctcacctctctcctgggtggattttgtttgtggaagggggctttcttttcggatgactgaggggctctaggaaggggatcactagagatgtcgggaaaggtgtcaagtgtgttcctaagatggttaggttttggaagccacacttgtttctgaggaggatctctcataggttcatcaatcacaccatctctcacaggggtgacaggcttaacagaggtggttttgataagcttgggagtgggtgaaggtttctctgaaggtgtcaaaccactgcactcaccaaccttcccaaagcaagcgacactcccattcttagtagcaaagcctaaccccggtc

SEQ ID NO: 140853 - DNA, 2500 bp, Zea Mays
gcctttgcgcattgccaggaactttttttttggctatcagcgtcccagttgcctactctggtaggtagtgtccaagtcactttatgtttactataagcatcccagttgattaaaaaacactccgaattttaaggagcaacgacctgttggaatggagaggaacctaaacagactaaaagtagtcaagacatgcttatacccctctaagttggcatggaatgtaattagcatcaaatatactggtatatgaatagaaaatggaaaatcttcctaatcattattcgtttatgcaccctagtccacagcaggttaatttataagcttttaaagccacgtatctgaagataaccaagacaacataaaagttaaggttcaatgctcatgcagattttgtgcatgatatcataaaactcaaaaggggacgcacgagacacagtagctatcgaaatgatttcatgttagttgataaacaaaaggacagctttgccaggtatagacatgaatgacatagctgctgtgttgtcactgatcatctagtctttgttccaaaacttagaaatagattagacatagcaaccatgcatcaattactgtcgaccatagtatgacaggttctgaacttctgattgtactttattgaacatcatagtacattttgcccccaccagtcttatcgcacagctttggagccccttcactcaaactcaaagaacacatcatcattaagaacatgaccctggacagcccatgcacgtcaatgatcccatcattatcattataaccatatcaaacagaagatggatcaacagaacagatagtaggcaattccactcaaatacaaatataacagaaccagatcgacatttttggcatgcactactaataccaagtgatttttttcatggcttgaattttcatgaaaagtattccaaaaatgcaataattatgtgcttcataaaagcatatactaaaaagctaattgtccaagtgataccttgtataaaacacatgctgatgttcaaagcaacttatatagtatagctatatttgcaatttgagatagcagcagttaaacgttaccagcatgcttccaataaatgtacgttcagggttacagaagaggtgacaaaacacatttgtggtataaaaaatggacagatatgagatttcagctaatgttactccaaaccaaagaaccatggacattgtctatctgaaaccaaacatacgagataataaaaagctgaatatttgccaatatcgtcagatgccaaattttgtaactgagcaagtgccaaaatcaatccagtataattcagaagatatactagtacgtagtggctgtagcacaaataggacaatatgaaggaaaatggttagtcaaacttcactagatactgttcaactttcaggagtaatatggaaattaccgtggattctgctcaccattatgtaagtgtgagaatttcactgatattgaattactgactgatgcaagcacacattttttgtttgtataacagtagcaatgtagcttgtaaacagtaccaatgaattagaactcacagatcagcacattatcaatgccaactgccatggcaatatactgtcacaacgcttttgcagaaacaggtaacatgcacagactgtaataaaataagaaaagcgaggaatgttacacaagtgacttgactagctccctaaagctaaaattatagaatggtaactgccttaggagtgtcaccagcatgacagagcacaagctccaagcatttcgaggaataaaaaaaaagcacttcaaacctgttgagttacctggtgtctgtcaagccattcgatgtaagacttggtccttttacgctacaaccatcttcctccagagatcctaactttttttagttgtagctaactagctatcgttgcagcaagatcagtttgtttggatgtgcctaccgatcaggtcaataattcaatgcacggtaaaaatgtgcatatgtcataaaacacaaaatgagattcacagtacaaaactagctgtctaattatttcatgacgggcaatgcagaaatgataggttttccaggtggagacatgaatgaccacaattgcttgattgtcagtgatttgctactccttgctccaaaacttacgaacagatcagacagagcaaccacatgtcaactactgtccatgataacatgacaccatctgaatgaacagtacagtgcattttgcccccacacatcctagattttagaactatatatttgtggaccctttactcaaaggacttagcatcatcattcaaaagatgaccctggacgacacatggatgtcaatgatggcatgattgtaaccatagaaacaacacccagagtacaaagccaaaggatggtttaagttacttcatccaattgcaaatgcaagttatcacagcggtcatcacatttttggtttgggctgccaaatatcagtatacagaaaaaaatttatattaaca

SEQ ID NO: 140854 - DNA, 346 bp, Zea Mays
ggcagatgcaggagcttgtgccgcggatgctcaagcggatgatcatggagatgaagtcgaagggggtgctggtgccgcgggaaggcgatgagctctgggagattacccacatccagattcagtggatcgcaccggccgtcatggacgagctattcccgtagtccatagatagacagctgactgacttggttagaagtttgggagttattgattgtgtcatttaaacttggcgctacacattatcacatggaataaaatgttgcggatcaggatgagaaattcgtggtcgttctacaacaaacttattgcggcatattcggctagtttagaaacccatatcttcatg

SEQ ID NO: 140855 - DNA, 741 bp, Zea Mays
cccttaatgattctgattgttgcttatgggaagagcttcatactgagcttagggagcataatacctctcatgggagtgacttagtgttttgggctctcgacaactctagcagattcactacaaaatccctttacagatttaggaccgatggtggtgtcaaatctcctgtttacaaaaaaatttggtattgcaaggtgccgttgaagatcaagatttttttatggcaaatttacaatgggaaaatccaagcggccgcagtgctagaaaaaaaagggtggaagggtagtacgctgtgctctctgtgtggggacaaagagacagttgatcacatctttattcactgtgtcctctcgaaacttgtgtggggaagattgaaaaattttgctggttgggatcttgtgcccagatctgttgctagtatgtttagtaattggggagtgggaacatcccaggctgcctgcacttttcatctttttattgttgccgggctggtttggtccctttggtgcaacagaaataagatggcgattacgaaaaaatttcctaacagttcgacaacgatcatatatgagatcatgtctttcttgcagagctggagcgtgctactcaagacaaaggatcaagcgatgttggaagatattctggactcaatgaagaattggttacgggaacagcactcggttgaggaaaattgcagcgacattggagtgatttgaagtggaaaataccctttcttttctg

SEQ ID NO: 140856 - DNA, 370 bp, Zea Mays
tgagttgtgaatgcgtctcctatctggggttggccttaggcgagccatgaccgcgtctcccgctcagggtttgccttggacgagtcataattgtgtctcccgcccgaggttggcctcgggtgagtggtgactccatcttctgcctgaggttggcctctggccgcctggggttagcctcgagcgaatcatgactgcatctcccgcctggggttggcctcaggcgagtcatgactgcttttttcgtcgagtagccgaaggagtcgttgtgggaggagatgttggaggagtcgtcatgggaggagatgctgagtgttagggctacatgaggaagcagagtagccgaaggctgtgccctgggcgtggtgtccgc

SEQ ID NO: 140857 - DNA, 711 bp, Zea Mays
cttctaaaatttggtgttgtgtacaggattggtgatgggagaagtacaaagatatggagggataactggattcctcggggacacaagctgaaaccaatagattgtacttgtctttggtgggtgcatcaattaattgattctcaatctaacccttgggatgaaactacagtgagaaggttttttctatccatgtgaagatgctgaaaatttgaggattaggcttcttggtgaaaaagacaacaggactgctttgtgtggcattattatgaaaaaaaaatgggactgtttacaaccaggagtgcatatagagttgccatgtgcttggccacttgcactaaagtgtgggtgaaactggtggaaactcaacatctgaggaagggaggtagatttgggaggagctatgggagctgaagatactgggcgaaacctagagattcgtccaaaaatcagaatctttgcatggaaagtcataaacaatggattgcaacacgagctaacaaatgctttcgacacttacctacacagactaattgtgagtcatgtgatcatgacatggaggaccgcttccatgcatgtgattcctgcccatccaactgctcacagatttgaatgcacaacccttgctgcagaggatgacatcaatggacagtctcttgtctaactatacagaggaggtaaaagtaaatttcttaatgctcatttggttgaccg

SEQ ID NO: 140858 - DNA, 366 bp, Zea Mays
caaaaactcaagtaacaacatgaaaaggccctaaagatatacaaatccaaaatactatcccttactaactttctattagcaatggagaacacttaaacgacatgacctgatagaatcaatatgacaaaccagtaacgaaccataagtaaatctccatcctccatgatttattaacttaagcaattaatatagatgatgaaacttttttagacaaggtatgcagacaaccaaacaatagaaattcaaacaaataacactaatacttaatggcaagatgtcacaaacagtcttaattaagcactagataggtttatataccccaacacaacgatcatgttctccaacttactcaaacctaatccgaac

SEQ ID NO: 140859 - DNA, 430 bp, Zea Mays
aggtgatcgtattagtagagaagaaaaatgttggcattcaaccttcaggagtctacatatgtctctggcaacagcagtggccgacttaagttgggggtggaggacaggtgtcgcaaagaaggcattttcagtgaaacgctttatggtacaacataaatgactgtcataatgttgcatttcaacctggccctctctccttttgatgttccattatttcagtttgtttgaaacttaaaaattttaatgtcaattgcggaattgcctgatatccattctcattttgtttctccctaacttgatcttagcgtgaagattggagactgcctcctatgactccagaaatgatcgagtatgcacgcactgatgctcactatctgttatacattgcaaattgtttggcatcagagctccatgcaaaagcctgtggtat

SEQ ID NO: 140860 - DNA, 464 bp, Zea Mays
tctaaaatgagttatctaacaagatagtcaatcctggtggaatacattagaccctgctcctttaaacaagtttgagatcttagatcaactcgaccctacccaacaacttgacctacaaaacaggttacacaactaattccatctagcatatagctattgaaccctctacccatcttgtcacaaacacggatgaagacaccaaagctcgaggaagaaagggatcaaccgcattaaggaaggataagagtcaagccaaatatggtcttcagtcccaactcaagccttcaaagaacaagctagatcaccaagatgagtcaagatccacaatcttggatggagtatttccttaccctaccctttcttgcgcaaacctatctatgctttaaaggcatcttctatcctacataatcaagtgcacatacatatatacacccatgctttcctaaccaccagctccaccaagc

SEQ ID NO: 140861 - DNA, 815 bp, Zea Mays
ccggcgttaggactcgtgctcggggtaggtgtataaggacgtgcggtgaaagatccttgccgacggtgagctggaggtcactccggtgactcaccgtggctatcttttctactttgcggctggacagataacctcgccggtgaaccgtcgtgttctggccctgcgccgcgtgtcctaaccgcgccaccacatcaccgtgactccctctagcttcctgtcgaccaccggaactaccgccacggtagaagccacctagcgcttgcgccagtgtcttcttctacctccgaccgccgcgcgtctcgcccgattcaccggccaccgacgaagccgcctataaattaagcccgtgaccagctccgcagggtcatcagctaaccagccaccactaatcagccaagatcgttcgccagagctcgagaatttcttgtttcccccaaactggtttccgccaccgcaaaactcacctcaccgcggccagccctttctaggtcagttcatccctcactctcctttgtttgagcactcttgtcgctctgtgatgcttgccgaaccgccaatttgtacggaatagctctagatcaccgagaacgcgctcatccgtccgccacccattcggttcacgcggatagagcttaataggttgtcattcgtgcaattaggttgggggaaatactcggggtaggtccgatttgatgtccgccgctcgggagcgccagtcttagccccattcggccggtacagacgctcgccggagctcggtcgtgcatgaacgccgtcggggacctcccactgcgaagaaacagaaaccaggggtc

SEQ ID NO: 140862 - DNA, 528 bp, Zea Mays
agaagaaagcagaaaaaaggaaaaggaaaaattccctgcgcttgggccagcatttgaccacttcggcccatttctgattctcaccccgcgcggccttctactcaactttccccacggcgctgatgactgggcccctttgggcagtctcaggtggcacactctggttgatttccctcgcttccatgtgggtccagggagtcggattcatctgcttccctccaacaaactcagccgagcgcatatagatacgggattcaacgcttacgaccgattcttccgtgtcccaacaaacctggccgaaatattcgctaatcgagtgttagctaccacgatttctctcttagccgactactggaggggctaggtaagcagtactgttagcccaatctcaactaccgtggctgagatggtcacccgataatggtgccctggggcgcggacatggtgcggcttgtttataaactccgagcgccgcgaagcccgcccctccctcgtcgatctgctcggtcatccaccttctaactccac

SEQ ID NO: 140863 - DNA, 641 bp, Zea Mays
tttccttggtgcagaaagtccagggcagctagcagatcctccttaataatgctccagcaggtcttgtaaaacctccccgtaaacccatcaggcctaggagctttatcagaaggtaggtcagcaataatatcccttacctccttctccaagaaagggctatccagctcactgagatccatagcaggcctatgacagcccaataaatcaatagtaacgctccttagaaaatcagtgcctagaaggttcgtaaagaaaccgtccagaacttcttgaatatcaccatgatttgtgtacacccttccatcctcctctagttttgaaatgaacttcctctttttatggtagacagcctgtcggtgaaagaattgagtattgacatctccttcttttagaaattaaatttgggaccttagacatgcaatagttctttgcaaagacgcaagcaccagacaatgttgtttcagctacccccataaccaaagctcctccctggacaaggatccgatatcctgcgccatctccagcctatgcaaaacctcacgactaagacccaactgggcattgacactacccacctatttatgaccccatgactgcaaacatttagctaatcttttaaacttcaggaaatcttctccaag

SEQ ID NO: 140864 - DNA, 457 bp, Zea Mays
gacggaacaccggcggcgacgcgacgcccagcacggtggtgccatggctggtgacagcccaaagcggcaaccggtgcacggaacatgaaataaactggtgcaaaaggacgtgtgagttatggcgaagctatccatgggcttaccgaagaccgaggtgaaggttggagagccggccacggcatggcaacgcggaaggcgcaccgacgaggaattccggagatccccggcacccgaacccgagcaatcagcgctcgaagaagatccgcatggtggcgtttctatctcactctctcctccgccctcatgccaagcttgagaccgcggcgccggtgaatcgtccgcgcggcggcacccaatttccctccacagcggaccatggcgccccatgttttgcttgggcgacgacaggaccagaggggtccgagttaaatagccaagggaggcgctagatcttaac

SEQ ID NO: 140865 - DNA, 520 bp, Zea Mays
ccaatactttgggctttggccggaatgtcaataaggtcggctggagacaggccaatgtttggcctgttgacggcccttgcatggttgcacccagattttatgaaagtggcagttgtaccgtgagaagctaccagcgcacagaattcaccgtggccagttatgaattcatcgaggacgtcaacctctttctcgacgcattcaagtgccccggggatatctttggcagagagactagcttcttcggatgcaactccaactgaattgaatatactttttaatcgagcagtgcattgagttgcgaagtcaaaacatttcttcttaaggttgttgagtgattcgctcagcttcaggttcttttcagcctcaaccttgatcgtcatattcaaagctttggtttcatgactgaatcggatggagttttcttgcaaaaatatctgagtctccttcaactctttgcttaatctctcattctcagcctaagcttcggcaagcgatccttcggttgagcacaacaaatcac

SEQ ID NO: 140866 - DNA, 524 bp, Zea Mays
gccgagccaagaaatcatattgtgcatccagggtgagcaggtatgcagtgaggtacgcgactgtggggtcgtcctcaagcagcagctgcccttccaatgcacgcatcctggccatccaaactggacggtttctctgaaagggcggaaagaatctgagcggggtatcggccacttcttcttcataaatttgacacaaggccctcaatgccttgcgagcgatgacttggcaggtgtctttgaatctgtgcccagcagcagtgacactccattccacatggtgtggactggatccaatgtacacagtcacaacacatttctctatgccatgctcgacgaattcacgaccatcatactctggctggctcctgattccgaggcgaactgtgcatgctttcagcaacttgaggaaaccatcttcattctggcaaaagctagtttggcagcggacctccatctgacttctgagagaaggaaaggggaaagcatttttgaaatgaagggatgagagcaagatttttttaaga

SEQ ID NO: 140867 - DNA, 804 bp, Zea Mays
ggccatacccgctggtgctcatgcatgtcacatatagcctctatgcagccgctgagctcctcgagcgtatatcctgctgccgccaccggcgtctccgtctagcagttcaggaccatcctcgccagcaagatcgccgacgcggccacgacagatggcaggaacgccacacaccggtagtcctgcagcgccatattggccaggtggtgcgccagggacctgaccgtcgctgtgccctcctcctggctgtgcctcatgaagtgatccacgaacgtgtaggccgtgggtgcgctcaggcagaagccgatcgtggcaagcagctcgcgttcctggtcgacagcctcgcttctcgtgcacccagcgtacatgacaccgtcgacattgatcttctgcatggtattcctgtcctcgtacttggcgaccgcgaacacggctgcggcgccgaggaggcggatctggcgctcgtcacggttgatcttcttggccgacaagaaccggtcgacgaaggagaccgcgcggtgcagcgctcccggtgcgaggtcgtagcttatgcagaagcgatgcatcttctcgacaaggtcggcgcggtccatcatcagcatctcccctgcctgtcgatcgctgaggtagtctggcgacggccgctctatggtctctttctccatggttcggagcgtggcgtcgatgtcggcatcgtagtcgtattgtggtggctgctgcttcgtattcgtggcgaccacgtcgacgtcgtctgtggcatcgtcgccgtagctgagcggcgctgcaagcaccaccgctcctgctggc

SEQ ID NO: 140868 - DNA, 644 bp, Zea Mays
cttggatctgcctcgtcatctagaaagtagcccctgcccctctcgtccatgctgtcgagttttcctttctcctcctccctcctcctaagagcctccagactcctagatgccatcttcctattcttaggcaccacattcgactgccccctagcactcagcacaatcccagcttcaacagaacctcttttatcttctctaaccctgcccacttcacttaattgagtgccatccaggtccccctctttgatctcctcgctgttagctcttcctctcagctctagtaattcctcttcatgcctttccatcacttcatcctgatcacacacattcgaatgttggctgtcaataagaatagaccctccgacttttttggtagccaaaacattgacttcagccatccctcctagctcctctctcccctgaaaccccttttccagaacagttttaggatctgatacctttggcctagcacctacctcacagctcaccgccctaatctcttcactaatggcataatcttggacagattctgtggcatcactgttttccactccttcctgagagtcaccaagactagagatctattcttttgtagtttcctttcctttcctatcgaatcttccccctattttcctcatctcttc

SEQ ID NO: 140869 - DNA, 520 bp, Zea Mays
gcttcacggggctgctagtacctagtggtcaaattttgttcccatacaacccccaaatcatcagatcacatggaatgaattcaaagaagctttccgagctcaccacatccctgatggaattctacaaatgaaacttgcagagtttctgaggcttagacaaggggcagatattgttatgtagtatattgggaaatttaatcacctctctcagtatgctatagatcatgtcagcactgatatcaagaagagactgtttcaggagggggttcaattcaaagttgcaaaagaaaatgtccacctgctatgatctcacctttaatcacgcagtcagcgtggctatatccgtggaagataaagcacacgtgcattagaatgtgaagcgggcgtggaaaggttcaagcttagggttttcccagggtcagctaaacgccagaaggtggtgatcagaacttttggtcttgcaaatgcttcttatcgcctagctgcctatcctgtcaaaacactcatctacatctgcccc

SEQ ID NO: 140870 - DNA, 271 bp, Zea Mays
cttgtgttgccttggttttcgatacctttaggggaattgaaatcatgtaccaacagtaccagtggcaaaacaatcccatatgcaattacaaaccttcaaaggcaaaactgcaaacgaccattgaggtgtccatctcgtagtagatgatcttcttgattcacttcttcttgccatccttccttgttcgatgagagtcagtgggcttctcatcttttgttttgtcctctagagacgttttgtccttcttagtgtggtcatccaccaccttccc

SEQ ID NO: 140871 - DNA, 423 bp, Zea Mays
cggagccggacgatccacgtatttaaccggacggtccggcacagagtttttttaaggaggatggatatccaactccgtatccgtcccagctagactccccatctcaccatacgacacaccagcaccataatataatctatcaaacccatgagagtgagtactttccggcccctagaaggccagaaaggaatggccagtcctatgagcctcatagggcatgcattaacatgccgcaaaacccaaaccaatggggaggaaaacaacataccaacatccaaacaaactcacccatattgggtcaaagagccggtggtctcccaccggctgccatcgatatagtaagggaggaaatagctagggcgttccgagataagctcggagttagtatagtccccgggggcagtcatatcagagaccttatga

SEQ ID NO: 140872 - DNA, 319 bp, Zea Mays
gtttgtgctaacaggaaaaatggtggacttggcattaaagatttgagagtcatgaatatttgcctaatgtgcaagtggtggtggaaacttgaatatgaaaatggaatctggcaagaaattgtgaaaaagaagtatattcacggtgacagtatcatgaatgttagtcacaaatcgtttgattctcaggtctggcatgatctgttgaatatcagagatcactatgtaattggaaggaaaattatcactcgatcaggtgataaaaccagattctgggaggatccttggctcaatgagactcctctagctatgactgaaccag

SEQ ID NO: 140873 - DNA, 327 bp, Zea Mays
attgccgtcgtgctcctcctggacgggccgacgccagcgagcccactgtcgataaattcgaaaccagttacttacgcagatcctcactcccctcagttagggacatcacacgtgtaccaatcgcaacaatgagacccaatcgcaacaattctccacggctgcaaccacacaacagatgaaacacgtgtctgatccgggtgccaactaattcagcgggaaatccgcgcaacccggatcgaacagcgaccgcatctagagcccccatccgcggatctgaaacccgattcccagcgagcaagcgagcccggtcgtggggaagcggagcgc

SEQ ID NO: 140874 - DNA, 582 bp, Zea Mays
cgcttactgaagccgcacgagcagaattatcccacacacgatttggaattggcagccatagtgcatgccctaaaaatatggaggcactacctaattgggaacaaatgtcacatcttcaccgatcacaagagtctgaagtatattttcactcaaccagacctcaacctccgtcagcgaagatggctggagttgatcaaagattatgaccttgagatccactaccaccccaggaaggccaacgtggtagcagacgccctcagccgaaaacctttcgggaagaaaggaaccaacttcttagaggattggaagaaagaatcagctcaactgaatgcatgtctgggagacaatggcagcctagaagtcaagccaatgctagaagacctcatatgcaaggctcaacgcctggacacggagacagcaggtcttatggaaaaagctcgcaaggaacaacttccggacttcaggacagatgaggaaggagtcctttggttcaagaaccgtctgtgtgtaccaaaaggagaggcatgagaagttctgcttgacaaagctcacaactcagcctactccatccacccagggacc

SEQ ID NO: 140875 - DNA, 329 bp, Zea Mays
gcggacagtgcattatcttctgccttggaatatgctccaagtagttcatcacttgtagcttcgatacacttcagccagtcgtcgtttggttcatcaaacttatccccaaacctgaatgtatacttcagccggaccaaatcaccttcgctagagttagtgatggtctccttcggcatttcccagctttctacaagtggccatactctgaaggctatatgtcgttgaattaaatctcttgtgccaatgaaggagcaaacagtactgaaggccttctgacacgcttcggcggcgtcatcaatttcgaccttcggccttcggaggccgaagcg

SEQ ID NO: 140876 - DNA, 500 bp, Zea Mays
gatgaatgctcatggatcaccgaggaacaatggtggtcaagggcatgttaactgaagtgtttataaacaaacattagggtataaagataagcaaatataaaagataagagtatgcaataccccaatgatacgggcataccaagacaagggaatagaaaaggccaaaggataacagcttcacaacggaataggaaggggtctcagaaggcaagaaattcatggacatataaactgaagtttttaagtaggcagtagaatttcagatgtaagtatttaaacaacagtattgaagaatctaatggtatgagcatgtcaatactaagggaataaagatagtcaaaaggtagcaatttaatgacgaaggagggaagaatcccaacagacaaaaggttatggtcagggggcatctacaaagatgtcgcaagcacaagagtgagatcagatctaatggattaagagaagtatagaccatactagaataaaatactttttggcaaggg

SEQ ID NO: 140877 - DNA, 335 bp, Zea Mays
ggcatcgcggacagacaatcgcgttcctggtgatctaagggatcctagttcaatcaagttggttggggagcatcaggggcacacaagaacactaaaatgagagggcagagggcatgagcagacctgaatcgagctggccgcggtgaggattctttcacggtggcggaaactcagtttgggggaagtgagcaattcgtggtctcgggtggacaattggaggcaagtgtgggtgtgttggcttcgtgataacgtggcgcaacagacccgaccatcaatttataggatcgctaagcggtggccggtgaatttgggtttgagacacgcggcggtcggag

SEQ ID NO: 140878 - DNA, 637 bp, Zea Mays
cattttccctcccttgagttccagcttgtccccaagctggtgcaaaggaaaaatgtcgcttgatgtccgcctcctcttcccatgtagcgtagccatggatgtaggctagcccgtccactgagatgattgttgctaccagcatgcagttttcccatcgcagaggaggcaatcctgagataaaatacatagatactaccagccacgtatggtgttgaaccggcaatggaaaacgttcagagtatttcacccggtcttcccaattacgtatcgtaggatcaaagctaccttcactttgcccggcaggaaatgacaagttcgaaaattcgtgaagacctattttatctgtaaacaagttaaacccaaacggatgcctggtcgtcgcttgttgacagttaacacaagatcgaacaaagtcacgcactgagggcttcattcctggccagctcaacactgccttgatgcaccggtatgtaaccagaaagcctgactgcccacacagagtgctatcgtgcaaagttttcatggtccgttgctgcacttcatggctcgaaaccagccagattttgttcttgtgtctgatcactccatgcactaaggtgaagggttccaactgtccaccggttgagaagatagccat

SEQ ID NO: 140879 - DNA, 419 bp, Zea Mays
gcgcttccatcaggcgcatttcctcgagcacctgacggttgctggcgtcggtgtactccattgctgcaattgtggcacgagtacgccgaggaccgatgttgccgggatccagagtgcctgagtctgataccagattgttaacacgtgtggggaaggaagtagtagaagcagggatcggaggtagaagaaagctattgaggagacggcggcggccaaacagccagcccccagggtattcgtgttgtctgtctgttcattcatacctctccccgttcgagtcccaggttatatatttcttattacaagcagcccatcaggcctacacgacccactccggcccaaatacttttacactacgacgctttactcgttgtggacgcggcgctgctccctcctcagactcgccatctgcatctctg

SEQ ID NO: 140880 - DNA, 624 bp, Zea Mays
ctggtcaccctggcaggcctcccactgctcccgagtgagatgtagcttcccgccaatagtgataggcccagagggagcctgtggttcgtcgccgtcgaccaccttgagacgacctatcgccacttcgatcgtcatcgtggagaggtctagcagagactcgatcgagcgagcgatctgcttgtacttctcagggatgcaacggaagagcttctcaacagctctctcctcatcgtaggtgtcgtcgccgaactgcaccatcttctgcaacagagtgttgaggcggagagcaaagtcatcaacatcctcacctggcttgaaggccaggttctcccactccttgcgaagtgcctgcagtgtggtcttgcgggcacggtcgctgccgatgcgggtcacagcgatggcgtcccaggcctccttggcagtccacttctgggaaagcgaaaactgcatctcggacgggactgcagcaatgagggcatccaacgcccatcgatcctcgtggtagtcaacgtcgccgtaccgaactgcttcccacatttggcgaacctggagccgtaccctcatcaccgcagcccactcgacgtagttggtcttggtgagggtaggccacccaccgccgggacc

SEQ ID NO: 140881 - DNA, 393 bp, Zea Mays
ttcagctcatatataattcaagaatcgccgcgttcgagagacttgaattactctaacgctttactatttgttcgagttaagacaatcaatttagaaccaacaattcgacttgcaaattttattcaagtcattagtgcactaaaattactacaaccaattaacaacgcattctccacgataatcacccaacaatttgccttttaaattagacatcacatgagcactactactttttcatccgcgaccataaccatgcgcaatttggttacaacatcccaaacgggtgcaagaacactagtttctagttttaaccccatgattgttccattaatcattttaactgcttaatcggcatcgaccgacttaaccttcatctcgacggtccgagcacca

SEQ ID NO: 140882 - DNA, 310 bp, Zea Mays
tgacagtgaaagatcatggctctaggaatacagcaccaaactgatctggtacactttaatgccaataagaggtacctcagttagaaatatatcacatagtcatgttttcactcaatctcgccgtcttccttttctatctcatacccgttgcatacagtgctatcttcctccaatcccagtgatgtttgtggatagggattataacgatccgaaacagtattacaatatggaaaatgaaaacggtcggttttgacttttgcatatttgtggaatgaacaaataaggaaacagtaaaaaactccatatccac

SEQ ID NO: 140883 - DNA, 300 bp, Zea Mays
aagctgccttgtagtggaaagacgtggagaagtcctaaggctgattttgtcctgagcaaggaccagaggagggaagtactagagtggatcaagatgttaatgttccctgatgggtatgcatctaacctgagtagcggggtgaacttatctactatgcgggtcttaggggtgaagagttatgactaccacatatggattgaacgaattcttccagtgatggttcaaggctaagtcactgagcatgtctggctagtgcttgcagagtttagctatttcttccgccaactttgtgcaaaggag

SEQ ID NO: 140884 - DNA, 348 bp, Zea Mays
gaggtattgattttcttattttgttccttcctcttggcaatcctcaagtccttgacattttcttcaagggattttgtgcatgccacggttgttcccgtctcaagcttcttcaccatgtaatcacagttatcttgagaaggttgagcagtgcacttcccttttagttgtgtcaatctcattcttagcctctcattttcatcctcgagcttttgacatgtatcatcttttgttcctggaaattctagctcaaaggaggatttgcttgtcgactgacaacaagcattagcacatggtaatacagtttcaatacatgtgcatgagtgaggttgttgggattttaagtttttt

SEQ ID NO: 140885 - DNA, 449 bp, Zea Mays
ggctctgcttagctgccattgcatatatgtttttcgcaacttcttcgacatttgtatcatcaaaagatacaccatcctcagtttccctgggttttctagcacggatccaatttgccgtcctttcaccaagttgctcggaaagtgtcggcaaccatgcggccttcttctcggcgtcttcttgtctccatttagaaacttgacgcttgtaaccacctgtgcctaagtggtggtggtacttgttcttcttagatagttctgaatttgcctcgcttagagatatgaattcagggctgctcctctgctctaaaaatactgcccactgaccttctgagattttacatttttttgtcgggtctaggcctttctttgaaaattttgtattcatctcagacctccagtttcgaaaattgattgcaagctgcttcatcgtgtattccttcacgagttct

SEQ ID NO: 140886 - DNA, 611 bp, Zea Mays
caacattttcgatcggagcttcgggagcaggagtctcgatcttttcaggtgcaatctgccctgccgttttttcctcaggcgcggcaggcttcgccgtgatgggcgctgaaggcctagctttggcttcatcctgagtttttgtagcttcggtttctgctttcccagtttcggtttcggcttgcgctttggcagcttcaacaattttctttgtaggagcagggctcatggcctttgtagtctccagcacagcatccagcacattggccatcctcctcttcttggaagtcacgacagaagccttttgcaccttaggcagtgttgcctctgttggagggctcaggatttctagcatttttatcactttttccacttgtggctcttaggccttatcatctttagcttcggctggcccgactgtaggcatcttcggcactacaattggctcttcaatgctctgtgcaattgaagcagcttgtcttgcttcagcagttgaagaggctccttcggcaaattcaggcaccacgtccgattcaatataacgcgaccggtgggtcagaaccttcacctttttgctcttcggcacaactgtggtggccgaagcggcagccttc

SEQ ID NO: 140887 - DNA, 346 bp, Zea Mays
ctcgtcctcgagatttaggaaggactagggaaaagatgaggaaaatctatacgaagctcttcttctctttcccaggttgcttcatcttcaccgtggtggctccattgcactttgcacatctttataaccttattcctcgtgacacgagtcagtgtatcaataatcttgatggggtactcagcataggtcaaatcctcctgaacactaaggtcctccattggcaactgctcttcaggtaccctgagacatttctttagctgagatacatgaaagacatcatgaacatccgcaagatgatccggtaactccaattgatatgcaacctcccccactcgctttaagatca

SEQ ID NO: 140888 - DNA, 648 bp, Zea Mays
atcccttttattcaatgattggactggggccactattttgtgaaagaccaggggctatttcgtatatttctccaagactcatacccaccccgcgcgtggatggcgggttaaatcaccaagactccgaggactctttaggaagtttgcctcggcgaaggggtacgggccaatccgtgccattagatcgacatcctacggtccggattagacctaatcctacccagacaccagaaccgcccgatgaacgatcaagggcccataacatattgtgaaccggtacgcggccggcatcgtccgatcttcacccgacgctccagatttaattatcccaggatcgcccacacccgatcgattccaatcggacggtaaccgtgacttagaccgaaatagcacccgacttcaaatctgaaccggacatcgccaggtcatcggcgcgccgtcatcaccttctacgacgcctagccacaacggcggccaccgtgtcccggcgacgccctggccggcgcaggtcgatactacgtcaccgagctccaaactctaagtgaaaaagtgctaaacgatgcttggatcatagcgagtttgagggtacggttctcaccggcactcgccgcgaagggcaccctggccacggtagagtgcggacggcgg

SEQ ID NO: 140889 - DNA, 543 bp, Zea Mays
ttcagatttagggagaagtttgatgagccagacgatgactggctgaagtgtattgaagctaccagtgatgagctactcagggcatactccaaggccgaagataatgctttgtccacaactttcaggggtcggggcaagaaaagattgaacagggtatttgatgcgattggcttcgtataccctgactaccactacccactacgagggcaagggaaaaagggaaagactgtcgcttcggccaccccagctaagccaaagagcaaaaaggtgaaggttctgacccaccggtcgcgttatattgaacaggtcgtggtgcctgaatttggcgaagaagcctcttcaactgccgaagcaagacaaggtgctccaattgtgcatggcgttgaagagccaactatagtgccgaagatgcctacagttgggccgatcgaagctaaggatgataaggctgaagagccaaaggtggaaaaagtgataaaagtgccagaaatcctgagcccaccggtagagacagatttgacgaagatgcaaaaacctcctgct

SEQ ID NO: 140890 - DNA, 389 bp, Zea Mays
ctttctttctctcgtcgagctcgttccagaactcgtttccttttcgcgagaccgaccattgcctctcctcgcgaacgacataccactcacgtctgttaacccagtctaccctttgtctactcctcagcatctacccctccgtctaaccttgtctacccccgacatctaacttcatctacccgtataaaccccagcttgccttgtttcgtcatgcaaatgtctcatgcgtcgtgcacgcatccatctgtttctctcactcgttcctctcactgtcatcctgggcgcacgcccgcgtgtcagtttattcttttctcaaattgttgcccgtttgcacgcgcgtctgacttagacgtgatccgcagtgaatttggtaacctccatctgcgctc

SEQ ID NO: 140891 - DNA, 447 bp, Zea Mays
ctacgcaccatcaataagggcacactccatcaattcaaggattgctctttttattaccaaaaaggagacatctccatcgccgaatacattagcaagatgcactccttgtgtgacgagctagcatccaccagcaagctaatcgacgatgacgaattgatctccaacatccccatcgacctcgactacaagtgcaacctagtcgtcaccacacttgcaaaggatcatctcaccatcaacgaggtgtattcacaactagtcagctttgagaaatgcatggaacccccacatcaactaccacacaaaaactaatgcaactagtcatgcgtgaggatgcacacacacaatagaggaaacactcgagaaggtgatcgcggtccaagagttcacaagcaaaatgttgggtgtgtcccagaagcgacaaacaataggagaacaaccttgatgcca

SEQ ID NO: 140892 - DNA, 988 bp, Zea Mays
agaaaataccccatcatttttacaaaggctgcatcgaacctaggaccattggctcactagaaaaactgtcaggcctgtacttagacctctccttcatcagatttatctaaatatttcagaagcctcatacgcacaaaaactttttagccaaatgaaaacacctcaatcacctaacaacgattaagcaggacaaattttagcaccccatcctcatcacgccaagtactgagtgaggactccttcaaagaggaatattacaggaatcagcacgtgcatcgtaatggtagacatgtgccacgaccccaagacatgcacatacactcgtgtgcatgcccacaagaagacatagtgctcgcaggcacacatcccactaagaatctaacacagatcaaccagataagcagagagtttatattttttttatttgctgccaaattatttttgcagctgtggagctgctactaatatgaatatcataagtcaatgtttgaagccaagtgcggcttcactaaaagcaagatcattgacctggcctgagagagcagtattggtgctgcaccatgcatgggcaaagtcattaataccttcgacatgaagataagtttgtctgccataaacgggccataacagatccacacacatacacacaaaaaaaggttgtgcacgacctatggaagaggctccaacaggctaggtgggtaaccactaggtgaggtttatatacctaggatagcacatgtaagcacagctgcacagatatgtggtatccacgaatgtactaatctttcttttataatccgaaaagactgaacgtcatgggtatgatcccaccacatttcattcacggatatgttcattcaagttcaactgcagctcaaaattggactaaaaaactcgacatgagggtaagaccgtcctcacggcattacacacaggtctagaggacttagacctatgctttgacatgagacaacaaggggattttttt

SEQ ID NO: 140893 - DNA, 369 bp, Zea Mays
tgcccgaagtacttcccttgcctggagctgaatttcctgatccttgctgattatttgcctgattttgccttggatagggacaatctttaataaaatgcccagatttgccacagttaaaacatccagttgaagaacttggcaaggcagggaatcgagtgcctggggcacccggctgttttggggtagtgggagtattattggggcggataatgataggctgtttgaagggaaatgaaggtggacgagaaaaagggcgattttggtttgagggtcgaatcacaaaccgtggtttcttcgcctggccctgattaggccgctcaccaccgaatcccttagtctttccagaatttgcatatttggcctccacag

SEQ ID NO: 140894 - DNA, 341 bp, Zea Mays
tgagggggtgcagctggaaggaacatccatgcaaggcatcggtgcttttgttatgaaggccaaagcaccgggagaacaagccttaataagttaatgagaaccccattagaaccaattgaactcacccaagaggaggggagtccaaatagggtttagggttagactgcacatgcagatacaacatgtgcagatggtacatggaaaccactccaatgacacttcaccctctggtcgttacttatacctctcagctcagcaatataagccagtgaatatggctgcttgccagcggtatggcactacaaaagattttcactgcgccagaaaaactgcactgcact

SEQ ID NO: 140895 - DNA, 503 bp, Zea Mays
tgggtcgtgagaatccaagggctagaaccaagcgcaaagtgcttctgtaacatgcacgaactacagtacgagacgaaggccactggcaaggagcaatatcataacaattttggttgttatggcttcgttcctcattctgatgtaagttacccagttccaacatttcgaaaaaggtggcccggggcttggatgtaggaatggttttatgttaagaataatctgattgaaagggaagacataaatgggattatccagcgccccatctattctcgctttggccttagaaggccggctactgcacttgggaatgataccgaagcatgccagaaggctttcaacaatgtttgtgccttcattggcacaagagacctagttcaggagcacatagcctacagggtgtggccacttgtgaatgactgcgagatgccgaaggagactgctgccgggtccagtcaaggtggtttggtttacttgaaatacaccttcagatatagagaccagtt

SEQ ID NO: 140896 - DNA, 361 bp, Zea Mays
ccgcgggtctcacccatacccgacccgtgataaaatcgggtcaggtacgggttttatcttttacccgcgagtcctggtggatatccgaaattattttcagttttcacttttcagcccaccagaaaccggtcggcccaatgtccatctttattcaataatccagaaccctagtctctctcacctcacgtagtcacgcacggagtcaccactcaccaagtcaccggtcgcggtctctcaccgtctctctctcagcctctcatccaagccaccaccagccgctagaaaggcagaaaccgagcgcccttggctcgcccagcccgttctgtgtccctggctccctgtccagtgcggcagtgcccct

SEQ ID NO: 140897 - DNA, 670 bp, Zea Mays
attgtaaccaacatttcaaaaattcagcagtaacactggtttcatctttcaatatgcaacaaccaaaaaacaattgaagtaaacactaaacaacagggacaactagatagggacacagggtcacagggctgcaatcatgattcacgcacaaacaaagccagtgcaacattaagcaatcaaactgcagggacactaccttgtcatgttacagaagtgcaatagcaaaccccaccttccaacgttgcaacccttcaggaacaggcaaataggcaatagcagggctacaagggtagggcgcaggtaacactgtaacaattaaaatatttgaccattgcatacaacataatacatctttgtcgttgtgaatcaagtggagcattagtgtctctgtcctagtagaaagaaacagtgccagcttttgttggttgtgccttcatagttcaatcgaggtgggaactaaatggtatttttgtaagaacattgaatttctcaacatccagagtttctctacctgaatgccatccctatagaacaagctaacaaagtctctagaacctatcgacgatgactttatttctcttactaacactaattactaacggaaaagatttagattttttacctgagaattcagatcaccacagttggtaacatgtcatttagccaaaac

SEQ ID NO: 140898 - DNA, 525 bp, Zea Mays
cgcaattgagccaacacaaagcagtatccaaatcctttggcctttgaaccataacaacagacttcacatcatcacaaagaccatctataaatatcatggtataataaagagggtcggatatagaatgatatgccttcaactgatctaccaactcagaaaatcgttctacataatcagtcactgtagagctttgtctgatatggaacaactgcctaataagaactgcgagttgatccttcccaaacctttctttaatcatgttaccaaagtctgtccatgacacttgcgaaagctggtatcctactgactgcaaccatctagctgcaagacccgtaaaatgcatggtagaaaccctgatccacacactaggatcaacggagtacatgtggaaataatcctcatatcatttatgccacagcttaggattatccccatcaaacccaggaaactgcaccttgggcaattgacctaatgatcgagcagactgccaaccctgatgcccatccccaaaattgccgtgcggca

SEQ ID NO: 140899 - DNA, 615 bp, Zea Mays
caacaagcaaatcatcgtgactacgagcttgaccaaagccatctaacaagtcggctaactagagcaacgacatagcccgctatacaacatacaaatcggcatgcctattattatcgcagactgagacacaacatacactataatgtttctataaacatacatatttatcatgtgaacagagcatttcaataattaccccaaaaacaactaactccattactcaacttgtattacgatcctacttgaccacccgatgtgactactagaattcgcgagcacgaccatatactatatgcaaagcataatttacgaacacatactgcgcatcgactcgactcgacttataaacatagaggaaatgatgactaccttggcatgtcaccacccctctatttaagccgagacaaattctaccatcgattaagagttctaagtattaaacacattattattttcacacacaaataaatctcaacttaacaccatttttggttaacttgatcgacacactacgcatgttctttgcccttcaaaatttatcgcaccacaggaatcatcccacttgctaatgacaccaacaagacctacttatctattattcaccacacaaacaca

SEQ ID NO: 140900 - DNA, 492 bp, Zea Mays
gcaaaaggtcgagcctatgatgatatttactgaatactaagtacaaaggaaggggagaaggatgtctataagatggctaggattcgggaaaggaagacgatggacctcaaccaagttaaatgcattaaggatgacttctttgatgatttaaatagatgttttagggtttaaggatgacttctttagttatggataaactcttggtgaaaggacaagacatcaaacaaaggtggcagaggtattttgacaatcttttcaatggtgagaatgagactatggacatccaattggatggcttctttgatgatttaaatagatgctttgtacgcaggatccaagaatcataggtcaaagaagctttaaagaggatgaaagggggcaaggcgatggacccaaatggtatcccaatagaggtgtggaaatgccttggggatattgctatcgtttggctaaccaagttgttcaaccatatttttcgatcaaacaagatgc

SEQ ID NO: 140901 - DNA, 1101 bp, Zea Mays
atgtgctcttcgatccatacctcctccgttaaacttgtcgatcagtttatcaaggaactcaaaacacttggcatccccagtctgcattagagcataagctgtgggagcaggcgaagacatgtaggagccatctggacactggagcttacgtagccttttccagtccaaacctggcatcccttctatgcttagaaggaaagttgttggttcagcatgaagtgcttctcttgggatcctacacacataaataattgaagtatgtagtacatgtgttcaagttttaaagtgatgatatcagaaaaaatatagaatgaagcagcaagtatatatatacatacttgtttaacttgagttctcttttggctcgtatagcttccaacatgggatcatccaaaggtatgtcgatgcctaggtgtttggccttctctagcaacatagggaatataatctcgaagcctgatagtgcccaattctcatcatccctggtcaacctccacatattttcagtgatgaatgatagacctgcaacaagtcaaattattattcatgtcgtcgtcgatgttcactaaccgctacaaagaatcctagctatataataacttagcgatgaatgttgataaattaagttggatcattattgaaaagaaaacaataaatattttccctccattaatttaaccaacaatgcatcgttgctctatatacatttgatgttcagaattatatcctagaataatacatgagccctctataataatcataccttttgtgcacgcatcatcgtggattttccatgatttcaatgcgatgacgcaggctagggtgttgatgatccgatcttgggctaggaagaagatgtcatgaccccatgatccatcgggaagctggttttgagcaatccaatcaatgcaagatgggaactctggtccatcatctccattattattcaaactccttacaagtgcaacccatgccgtgtcatatgctgaaatgctaatctcaccgtctcccattgaacgaagggctactcggatggcctcaatcatttcgggcatgccactttgtttatccttaatttagaaagatttcgtacacgctgag

SEQ ID NO: 140902 - DNA, 1291 bp, Zea Mays
ttctattactattgaataaaaaccaacataaggtaacactacaaaagaaatattttctaggaggtcaatttttaggtcggctcaaaaatcatctctaaccatgtctctagaaatcaccgtttcataggggaaatgataacccctgcaatggcaatttgcatgtgattcttgagcagttgatggctacttgtgtatttgagtgtaggacaaaggaagagtatggaaaaatcaatggatgtgggcttttactttcccccggcaaaacgatgttggtttcatgagtttttggctttagaagcctgtgatgggacatgcgctaggtggcgcttatgaataagccaatgcaaaagccgtgccaaaatgtcacttaacatgatttaaccttagaagtcaaagaagccacactggaacccctctcatgaaaacctaccaaaaagagtcaaactataaatgttgaccacatttaagagaaccattaataccactgacttaaaatcatgtcttttgataaactgttcctcccttataatgggtaacataggataagatatatgaaattgtatatgaatgtaatttacacatagtattgatggttgaggcgccaccaattcattaacacatggtggatgacaagacaaataaaacagaaaccacacagagaggaacttatatgctgcaactacaatacaaagccaccagacaatagaaaagatcacataaaatatgcaagaccatcatcactcactaagattttcataccccacgccaatgtgtgtattgggcatttgagccccgcacaacccctccccactacaactacaagttagtataatttgcaataaaatttttcaaattcaaccaaaatttgactaaatatatatcattgtccgcttgatacaacgcacatgtggcattggattcagaatggcgagaatgaggggatttggttcccatccattacacccaccatcacaaaggatgaaggcagagcctccacacatgacactatcaatggctcctcatcctatggccgatatgaggacatctctaaactgagcaacaatggcaaaaaggatgaacactaagacggctacaccaaatgttaggtggtccatctctctatttgtgattttcggtgtgattgctatgggaggcagttacatgagaggaagtcgaaagcatatataatgctaatcatcacctagactaaaaggtacaaacgaactagcccaccagggaagtcaaccacacaagccaccaaagattaacgggactgatgcgcccaccatcc

SEQ ID NO: 140903 - DNA, 618 bp, Zea Mays
caagatagcaccaagtacgcagtagagccaacacagttacgcgtcgatgcaagcagaccagccgctagctatgagacgatctgccctgcagacaggctagagactgcttcactgcttcagcgcacgttgcaaaccacatcccatgagataaaaaaggcatgacaagggactgaagcattgttgtatcactgtagtgtcatttcaagactgcacattgtctttttttcttttcaatcaacgtcacttgtcatctctctaaaatataactttacttactgaaatatctctactactctataagagtgactactctataagagtgcattatagacatccacatctatgcaccgtgccccctcctctgtgaccccgtccccatctgtctccagcgtgccagtcgcccctccttctcgagaatgtagccgcttcccccatctccgttcgtgatccccgcggggaaactccaacgcgatgcccgccgcgggtcctcgcccccgccctcttcctccccatgttgccgctacccctgccccaaaacaccacccctcccttctcgcctttatggccacatggagatggtctgctagcgtcgcgaccaatccatagcccacactcgtc

SEQ ID NO: 140904 - DNA, 1333 bp, Zea Mays
tccggtttggagcctttagacaagttgtccactgttgctttttgtttgcctattttatgatgagtgtttacgtccaactgttaaggttatgttcgttttgatttcaatccacctggattgaagagaattaggggttgttcgtttccttctcaatccattaggattgagtgcgttttgatccctagtaagttaaaattattcctattttttctcaatgcacacggaatctggataactgaacaaagccttaaataagtttaaatctctagcaagttaaaatactttctaatttctcctccattctttctaactcgtatgaaatggaaataactgaacaagatctaagctagtttacaatacagaaatggagtagcaactagcaagacagcgggggagctgtgcatacattgaactatattcggttcaaaaaagttaattgttattttggattaaacacaaagatttaagtgttatttcaaatgaaacacacttatgaaccattttaatttctcctacaaacttcagatcctacggttgctagccgggctcttacagtcttgactgcttggcatgtgctcatactttgaccaacttgttagcttctgtgttctcgctccttcgaatgtgcttgaggatgaaaacccaagaaatatgtctccattcttcttatggctgcaagatattttgccaactctggttcttttgccattaagccctttttgatgcgccctacgacgacctgagtctaacatgattgtacatcttacactgacggcttttaggatatccgcactcatacaaccctaatttttatccttctgatcagcgagattctctacactatttcacaatctttcatagtcatattcaacttaaatatctactctatactaactaccacatattctattattttattttcacctcactcttccctcttgactttgtaaataaggtttccaacctccctcttgactttgtagtaccagatagggtatgcgggatagggtgtgcggctgcaggacttttttactggatgcgcaactccgtgtgtaccgtttcctttacagttctccggtatagtttttgtaggccatggaggattgcctcatattcactagacatgttttaggtccaacgaaggcatgacatgtcttagtgtcagattgagccgttgtgtctacactttgggctggtacggcatgtcccaaaagtttttaggtcttcttggcccgaagcacgatggaccctgcccaattgccagcactaatcgagaccacaatgcggccggtggaggcctccgcacggctaggccaggccacagcgctgtcgg

SEQ ID NO: 140905 - DNA, 445 bp, Zea Mays
caccggcaacaccctcgggggctgggttgcagcttgcgctacccactcgagccgaatcattaccggcaacaccctcgggggctgggcaaccaccggcaccacccttgaagactgggttcttcgcaacaaccacctctaaggttgaaggattctcagtcacctccatgggaattgaacgaccttgaccaacctattggttccaaagaccgccatccaaggttgacgaggcacgagacgctgcccgggatacctctaatcccacatctggaatgtcagagcagacgtccatcatatctccattagccggctcggacaacagatcttcaggaacaacgtcctcgagagcctaatcaaaatttgctatggataattcttgcagaccaacaagagtagacagagctggagaaggaatatcgctactccccccgctgactctataacgccg

SEQ ID NO: 140906 - DNA, 625 bp, Zea Mays
tcccgttgcaacgcacgggcactcgcctagtataattcagaagaaagttagatgaggtcattgtttttgtttgcggtgtttatagttcagaaaagatatctccacgccactagatcaatgcttttgtaagtctgcgcgtgtgactggacgagcgatggtgcctctacaacagttaagcgagacaacatggcgtgataccctctaggatcgcaactcacaaagcaagccacatgcaatttgacatttaagcttatgtgatagacgaaacattgtaaaactttcacacacacagtagtacattgggctacaaggtatgccacaacatacgggcataccctatagatccgcccatgtgtttacaacagatacaaacatcacgaagaaaatcttactctcaagcccaagcattataaggtcatgttgggaactatagtgctagtgcttcgcaaatgacaaatatgatcacatgtaatgtctattgaaacacaacatgtttctagaagaggaccaacaccgaaaggtcagtgaacaaccatcagagaaggcaaggcataggtcatccttaagttgattagcatcaatgtaatttatgtggcgtcctccacgattgtgatcttcacaatca

SEQ ID NO: 140907 - DNA, 637 bp, Zea Mays
cgaccatgaccttgcaattttcaagcatgttttttgaatgaacttttaactcacgaaatgagaagcgctgttagtcctcatgcaaatgcaactacttgatgctctatgaggcactaagttttacacagatctgagtcattgacccctcttaatagtatggctatctagcctactaatccggtcaggtatgttctctaaactcctcaagaccggcaaaagtaaaacctatattataccttttccttcatctgatccacaaccaatgcgtatgactcttcaacatttcttgttctatgtggtccaaccctgcattcttatttctccaagaatcgttagtccacaagtagctgtcattaattgccaaaacattaccaaaggggcctagatgattcacaccggtcagtgatgatggatgtctagtggaacacattttttggtcttgtcatactttccacctttaatcttatagaacctaaatgctttgtgatctcaagtagaatctccatgttatttcaaaattttctcaacgatataagtatgcatgcatgcatagaaaagacttactgctctaagatactaaggaattttgcataggttgaagggtcatagttcaaggagtcgagcaccagcacctttc

SEQ ID NO: 140908 - DNA, 589 bp, Zea Mays
cctcaggaggttgatggaccggcgcctcaggtggatcaggcccaggatttggaggttgtgccccctcaggtccatgttgatttgcctaacaataatcaccatcagaatttggagatgaatttcatgctacatcaggattggcagcctgaccccgtctttcagatgattgaggagagaaatagagttgtccagttctctaggctctgggcaaaatactttgctccggctggattgactgatcactcggtggacgtccctgagaagtgggcacccttttttctctcgaatcttcttcagccggagtctttcaactggtccaagacttttcttctgtcagatatcccttcaaagttgcaggagcaaggaatgaattccatcccttttgtggttcctaaggattgtccagttgtcccctccctgggggatgtcacctctggggtctctaaggattccgttggttatggtgggccgactccaatcattgtggagtcaggactcagaagaagcaaacgattgaaggaatcacgtgctgggttcaggcatggggcatgtccaaaaaggaactgcctcatgtgccaacataacttcg

SEQ ID NO: 140909 - DNA, 892 bp, Zea Mays
gggtgaagaacgattttgattaaaaggtcggatcaccaacctggttctcttttcaggcccttgatttgacctttcacctccatacccctttgattttccatgtcccacattcttggcttccactgccagtgctgtactgatagctctgctataggtaaggtccagacatgttgccattttccgctgaagcctgtcattgaacccccttataaaacaattctttttcttcaagtcagtatccacctagtcaatggcatactgagagaggtggttgaatttgttttgatactacatcaccatatctcctccttgcttcaaccggataaactcttctagtttcatctgaagcactccctcaggaacataacgctcttggaatgctagcttgaactcctcccaggtaatctgatgtccaacatgctaaattgctgaaaaatttgcccaccaggccctcttagctgctgagctacgaataggggcttttgcgtcttcgtgcatcgaattaacccaaacttctgttacattactctcactcattcatcggcttctaaaggttcctctgctttgatgaagagcggcggtcgagtcttagagaattccaaataagtagtatcacgcggtccttgagggggaactctacctccgtgctgttgaaattggttgcccgccatttcacgcaagaagcgcatattatcagtggtgccattgaccatggcagcgatatcctcggccaatgttggtggtaccgatggtgggttaggagtatcttccccaccgcgggatgtccccacactatcatgtgcacgagtccgagatggcatctaaggcaaagaaacatttgaaaaatataacatgccaacatacaccatcatattacattgccaaaatgtaa

SEQ ID NO: 140910 - DNA, 313 bp, Zea Mays
tattgtgtcttagtttttgtgggggatttttgcgggtatattacatggctccgcctcattaaaaacctcacccccgggaggaaaagagtgcgggccggaatgatactgtttggcgaattacaagggcgtgttagccctgaggattcaaacaaaaaatttgcggagattgtcgatattccaggaatgctctaggtccttgtcggatggcgttgttagcctgtacgcgctgggggacaccttcgtcttgacgatgaaaggaccctcccactttggctacagcttgccccgtgactctgtccgagttgtccggacg

SEQ ID NO: 140911 - DNA, 330 bp, Zea Mays
aaaagacctcgaccgttggatcttgatctgcggtcaggattagatcggaacccagatcaactgacgtactctccgagccgtcggatcgagcgtgcacgatcgagatttaaaatactacggagcaacctagcgcgttggatcaagatcgcgcggcacggacccgatcccaccgaaccggtacctaacttctaatcgtggccgtccgccatcgatccgacggagcacgatcatcgccccaacagggcaggcacgcacggcggcgccgcccaccgggccgcgacgaagctcgccggagaatcccaatctaccacgccagtggataattcgcgc

SEQ ID NO: 140912 - DNA, 290 bp, Zea Mays
cgtccttttaaactcttgtgtgcatatggatcaaatcatcaaaatatacagacggcaaatctgatgggtcgacagtaggggcggagacaaaggggggcggccggacagggtctgaatccttgtaaggctaattaatacattctacttattagttaaatttgttttttaaaaattttaggtaaaatagcatctcttgacctaaagccaagattaagcacaacctaaggtgccctagacctgcatcaccttcttcctatctcccactgttcctagcattgttgttgactgag

SEQ ID NO: 140913 - DNA, 870 bp, Zea Mays
atgaaaacagtggtactatctgataaacaataatattataaaattataggaaccaaaatgggtcaatttgaacctaatatgaatttcctaggaatttaatatgtttctgcaattaatttaaactgaaaaaccattttctaaatgaatttcctggttttaataggtgtctggactgcgcgctaaataaacagaaacatggggtccacaacgcaaaaggtactaagactcagaatactgtactgcggaccgcgggttgatatctaaatactttgggggctctttagaaagatttacaggctgaaggggtactggaggatctgagccatccgatcaaaatctgaagatccagattagatcgccatcacacccaaccggtatgcatccacaaccctaggatcacgatccgacggcagcggttttaaagaggtaaggagggttctggaccgcccgatcccatccaacgactcacgatcgatcccgaagagagtatcatctgcgcgatcacgatcgtcggacatcaatctaacagtttagattaggtgcacgaaggaatgcattcatattggatcctaaccatcagatagagatctaacggttagaacactgtcttctatccccagcacccaaactcgacggcggcctggttatcacggtggagcagctccggccgcaagcgatttccgggttttaatgccctatacttcgttccgaaaggttctctacacagaggaggatagggcgagcaagttgggtgacgaattaccgaaggtggggcggcgaggtcgtctgaccacagagcaggcgggtccacggatgagctgtaggtacggtgagaaatcgcctgcacaccggtcgatcgcgcgccaagtt

SEQ ID NO: 140914 - DNA, 777 bp, Zea Mays
cttgcgataagtttgatcctcttaataagagattcagctaaaccattttgagtatgtacataaggcacagaatgttcaatgtgtattccttgggccatacaataataattgaatgctctagaagagaatttagccgcattatctaggcggattttctggatttgatgttcaggataatgtgctttcaatcgaatgacttgcgtcatgattttagcaaaagcatggttacgtgtagacagaaggcacacatgtgaccatcgtgtagatgcgtcaattaataccatgaagtatttgaacggtccagataatggttgtatggtaatggttgtatggatccacaaatgtcaccttgaattcgttcaaggaacttgagtggttcagcatgaatcttaagaggagatggtcttaagattagctttcccgttgcacatgatgtacatataaaatcagatggtttagggaatttagcagactttaaatcatgaccgatgcaattacctgtgattttttgcatcatccctattccagggtgaccaagacgtgcatgccaggtcttgaatgaatcgacattctgaaaaatcactttgtacgtaacatgaggtactagttttatgtatgtgtagtacaatccggatggaagtgaaggtattctttccagaatgttagcgccatattcagaaggtttggaaatgaggagaaattcctcattattttctgtatgagtagaaatatgtaaaccacttttccgaatatctcgaaaactcagaagggtacgag

SEQ ID NO: 140915 - DNA, 950 bp, Zea Mays
gccccactggccagattctgtgtacacgcgcggtctctactggtgggatccacacgtcatcccttttcccttcgcctcgtccgcgtgactcgggcaagctgaagaccccatgcgcggcggcaacagaaatagccgagttccgcgtaggtggctatctgccgctccttttgcaatcgcccctcgcgtctgattcgccgctggcttcaaaaaaaacagagccacttctcctctcgccctctcttttcacatccactcttcctacagccgtcatccatccgcgcaaacgactccgcgggggatctctagttcgccgtcgacttaacgctggcggttgtgtccgggaactgctccgggcctagggtgttgcggtagaagccagaccgcttggggttccgtcgccagcagctccggcaattgctcgccgtcgtcgacgaatttcgaatttccgccccaactcgtggacgggttggtctgcacccgcctcgccggtatggtgcccttccacgtgctaatccttacttcgcgatcgattatcgttcaaccgcgcctcggatttggccctctgggtaagggaattgctcgccggagcttctccttggtggcggaggtgcgcctcaccgtggactgcaacaccgactcgtcgctgtggggtatgaactcacccacatggttcgctttgttctgtacttcgagtaggcatgttggtaataactcggggaactccatcgcggtcggcggctaactcaccggcgcaaactccgtcacgcggagcctggccccgccgctactgctgggtggtagacgatggtctagggtcgtccgatggatgatgaacgtcttagattagatttagtttaccccttcgcctggatggaaccccgtccgtcgattccagatcgagcggatagaaagcgagcgtgcgaattcgttcataatctgcccagatttag

SEQ ID NO: 140916 - DNA, 396 bp, Zea Mays
caggccgtcgccctcaccaacatcaagtctcttgttccgctgaccctcgacgtcggatccacggcctatcccaagtggcgcggactccacatcatcaccctcggcaaatactctctcaccaactacgtcctctctgacgaagtccatccggatctcgctccttggcatcgcctggattgcgtcgtcgtctcttggctgttgggcaccgtctctcccaacctccttgagattgtcatgacctctagcgacatcaaccaccaacccaccagccgcgctgtatggcttcttctggaggacatgtttcttggcaacaaggaggcacgcgccctcctcctcgacactgagtttcggacgttcgcgcaaggtgatctctccatctctgattattgccgccgt

SEQ ID NO: 140917 - DNA, 329 bp, Zea Mays
agcgattgaaccggcttgcactagttgaattgtttatttgacattattttgaagtttgtggtgggaatttcatgtttagcctattcacatcctctaggctactttcacactctctttagtgtctctccagggcgttaatcactaaagattacaaattacaattatggcacttggaggagttttgaggcttttgagtgtggcttgaaatgaagacttgctctttgcaatgaatgagagttggggaagcttatgtgtcattgaagggggtggttggggtgtatttatagccatcaaccaccacatagtcatttcctcttctctgctactcg

SEQ ID NO: 140918 - DNA, 510 bp, Zea Mays
ggcaacgtgtacgtagagccaattgaaactagctagctagaagcttcttctgcttatacgctttatagaatctgatgtgatctggccacatgttcacctcagtgcttggctagcgttaagctccagctagcgtcaggctctacagttctactgataggaatcggagacatgcatgcatatatgctctgtgtggcactaggctaaatttgggagagaatgacgtttgctatacgagacaaattttgcccaactttattttctctcttttctagagctgtctcgagcgaggttcgtggttatcctgcgctagctaaatgtttagctctacgacatatatatagattagcatttttacaagtagggttcagagagcaggagggacggcactgtgtctctcactttcacgtctccatccctctcccctttttcttcgcggccttcatcatccgatcccttttttgcgaaatatgctccgcatcgtccctgctgaatctgatgcaaaacgggcag

SEQ ID NO: 140919 - DNA, 621 bp, Zea Mays
ggttggacgtagaagcacatccgagcctgcgtagcgctgcgccgaggatcacgccatcggcgagaaaggaccgtaggtcgtcgtcggacacgtgcggcgggggcagaggcaggccagagcccgccaacaacgaccgtagccacgcaaccgcatctgatcgccgctccgggctctccgctgcgaagaaacaaaccgaaaaaaaagaggacaaatccgcagtagtaagcgtcggccgagagacagaaaaaattggtgaagacttgagcagacatgagaagggaagggacgaaggggtttacgggactcggtggtggtggcggacatggggatggaatcgggcaggcaggccggagacggccgagacgttgggagcttcgaactgtgccgccgtgccgggatcggagacggaggcgtagtttgcaaccgggaggcggctgacgtggagcaggaatgggcgggcgcggatgggaaagaccgagggcgacgtgggcgagtgggcgacgtgcgggtgccgcgggaaggtggtgccctgttgatgtgctgctacgactccctgtctcctgcctttgcctctaccgagcccaagcgccatttggggcgcaatcggattaccggaaaaat

SEQ ID NO: 140920 - DNA, 355 bp, Zea Mays
gctgagaatagcaattgaagagcatatttgagttgttcacctccaggtgcaatgaagaggattcctgcgcctgccccctgcagtttcaacgagccatcgaaatacatccgccatacttctgcagtctctgggttatctaacacttgttgcttggtccactctgatacaaagtcaactagtccttgagtcttgattgcagtgcgaggtcgaaactcaatgtcgtgatctcccagctcgcaggcccacttggctattcttccgatggcttctttgttgtggagaatatccgctattggaaatctagtgactactatgactttgtggtcgtcgaagtagtgacagagcttgcgtgcag

SEQ ID NO: 140921 - DNA, 929 bp, Zea Mays
gccgtgaggacctccatctgcttctcgaggtggttgtttttcatgcaaaggctatgtagctttagctgatcctctatgttgatgcctaggtctttgccttctggtaggtcttcgtcatcatctagggtgggcatccccagcagaggctggcgacttgcgtaaacctcatagcctagggaatttacgacctgtatcttgttaagtctgaccatattatggattggttgggttggctttttagattgggtggtgggtctcttggggtgtctgagctagaatatgaacttctaactcggggggggggggtatctgcttttgtcttgcggtgtggtctttgccttctagctcagtggtggttttgggattgttgggtggtggtgggatttcgtcggcgaaggccaccttgccctttttggtggcgagggtcactcttgctgcgtcgtcctcggctggagagctagctcgggtgttcttcctgggaggcatcatgggttggtcttcactgcacaaacggtgagcgccatatgttggacctgctgataggtggtcaggtgggcccaaacactcgggagctgataaggggtcaggggcacaacaaaatgttaggttggaactacagtgtcttgctatgtgtgtcccattaggttgcagaatggggtatttgtagggcgtcgtggggtaggtagacctaagtacaattatacccctgattacctactacattcctagaatattccacacaacagggtcattacagcacaataaccccatgactcaatgacaccgaacaatctaccaggttgagggtcttacaagttggaccgccaccgcccggcaggagttgggtcccgtgggggtggtttcgaggtctttgtttttacagcatgtttcccttccgtcgagtgttaaaggtggggccttcgttccgt

SEQ ID NO: 140922 - DNA, 593 bp, Zea Mays
ccgtccacagtcgtggacgacgtgctgagccccgtccgctcatccatccgcatccgtggacgacgtgctgagcagccatggatgaccagcgctgcgagccctctcctcatccatcgccatggccgcgtttgaaggtaagcgttcataaaacaaacagcttcacaaatctcattatgtttggttgagcccgctcgtatcaggtgacggcgtgataaaaaatggacgcatagaatctcattaccgtctccacccagcggtatccaagttatgctcccctcgtcatccctcagcctcgcaaaccaaacgaaatttgttaatgcttgcatcggaatggatggcaccgcaaccatataccattaccgttactggctttggtcccgaaacaaacaacaccttgtttaggcctaggacaatgtacgatcacatgatatacagaggcttaggtcggtcctccgcttagaacaactctaagaaaccacgcaaaccaacccgaaaaatcattttagggagaaaaccagacttttctcactccaacgaatcccgcatcttctcccaatattcacaacatcccgcatccgctcctcatctcacgc

SEQ ID NO: 140923 - DNA, 530 bp, Zea Mays
ggcggagggatcatgagctagagggggagatcgtggagggagtgggcagtttggagggagatcgtgggggattcctttgcgcgggcgtctgagagtgagcgggtgctcctgagatggctgagatcgatgatgaacaggagagcacgggacggagacggcgctagcaggaagagctagagggcgagggctcgctgggcagagaaagcaagggagactgaccctaaagtcaagctaggtcagggtaagaagcgtgcggcctcctggcagctacttgagccgcaccaaagaaacacaggccacgcgacctatgtcgtcgtcacggcttgcacatttttatgaccataccggccagccaacatagcttctaccggcttataagccttccttcttcagagaaagcaatcgtggtcaaatgctcctgtcagtgtcaaattgaggcaactttttgcgcgagcagacgtgggtccagtgtgtgcaaaactaagtgtggttgtcacatgggtgcccgtagtctgcaatgtgggcccaat

SEQ ID NO: 140924 - DNA, 770 bp, Zea Mays
tgtgggctcaaagcgcctctccaatgtgctcatggataggggagcgacctcaataccatgtatattgagaccttccatggtctaggaatcacacactccacgctgcgacctagctcatcaccgttttacggcatcatccctgaccactaggcctacccgctcgagcggatcaccctgcccgtcacatttggtgacccctccaactttcgcaccgagtggctgcaatttgaggtgctggacttctcgaggtcctacaataccatactcggaaggtcgtgctattccaagttcatggtcgtgtcaaactacacatacttgaagctgaagatgcctagaccatgtgagatcatcaagactttcgcttcattcaaaggccacgtacacttgcgagcaagctaattgtgagctcgcctcggcgttggccagtctccagaaagccgcccctcagagcactgaaggcaagggggatgcctcgaccgacaccatggacgacaccaagcgcgcacggatccgtgtagcttggcgcgagggcaacaaaggagaagtcacgcaaggttcttagcaaacagggtttgtaagaaaatgactccacctagtgagagtcatggatcttgtattcactaagaaagaaccgatgggaatcaagggatacacaacaatgatttcacttagtatggccccgatggtcagaccacagtttattttggtccaagtaccttccccccacctcgactccacttttcaataacagatcatgacaattgaactgc

SEQ ID NO: 140925 - DNA, 350 bp, Zea Mays
gcaaagggagtatgagtggattctggccgcaggatcacaattcgacggtcacaattagatcaaatcacttaacaaaccggtactcaacatgagctcttggatctggatcccatgaccagaaaccatcgacgctggtcactaatctgatccatcgattgaccattcaacggacacgattcttccctgagcaaaacgccacccagttctaatctcaagcgttcacatctcatccaacgtccgaagcgtatccccttaccctccggtcgagcagatggcagcgccatcaacgaacgcggccgagctccaccgggaaaatcctgatctagagcccacggttcccaaaccccgat

SEQ ID NO: 140926 - DNA, 304 bp, Zea Mays
tcaacatagatctctgcatatttttctgccttgtgggtggtatgtactggtaagaaatgagctgtcttggttaacctatccacaatgacccaaatggaatcgtggtgcctggaggtgtttggcaatcccacaatgaaatccatgcaaatgtcctcccactttcaagaaggaatgggaagaggctgtaaggtacctgctaccttcaaatgactggccttgattctttggcaagtgtcgcactcagatacatacttagctatttccctcttcatcctggtccaccaatataaggatctgaggtcat

SEQ ID NO: 140927 - DNA, 608 bp, Zea Mays
cgggtgcatccggactaacgctataactgcgcaaaaccgaagtcttctccaaaagactatccgcgcaaaagtcgcctacgggtgcagccgggctagcataacaagcacgcaaaatcgaagtattttccaaaaggttcggatcaacgaaggctcgcagtttcatataagttacggttacatacatatagcgagggcatcacactttacattggctcaaccttcgggataatacccatctccctatagttgaacaacattatcctcaactcctcaccctcaaaaagacttcgcaactccccctcacctacactcaccccaaccggcgaggacaacaattctcgcttgctagccccatccacacgatgacgaccaccctccacctcactcactctccgcttcgccatcgcccttcgccgcctacgcccagcactcggaccaggaaacacttcagcgtccatcacacacggagaagcctccaccgcagccacatccaaggccgcaaattaatccaagtcctcatccgaagactcttccgtccacacaaccgaactcctagaatcatcaaactcaaaaaacatagacacggaatcatccgaatcattttcagc

SEQ ID NO: 140928 - DNA, 395 bp, Zea Mays
gttgctctgagcgtgtaataagagggcggagcagggagggcactcaatttatagaggtcggctacgggtgttccgaattttagacgaaggcaagctcacgtcggtgaaaaggtgagtcactggagctcgtctaccgtggcgctcaatggggtaaggactcggggcagtaaatggccgtccaccacgacttactgcgacgtggaatgatggcgtatggcatggcacgatcgggtaaacggcggccatgacagcggtggtcgcgcgaccacgtcgccgggcaagtgggtacgacgagaccggctcgatccacaccccctcagatcttttcatcttcgcggtaacatctcacccaaatcaagcatgaatcactgcggccaacccaaatcaccgcacgg

SEQ ID NO: 140929 - DNA, 423 bp, Zea Mays
gccctgccgaacgatggaccaggactcgactggaagcaatggagagccaaaccgtcccttgcgccggagttcgagcccgtactggacaggatcaaggaactggcggccggtggtttgacctcaatgcacgtagtaggtgatttcctgaagcgttgggtcatgccgttgcagggaggccgcgtttgtgttgctggtacaccagccccaatgacattggtaggattcagcacgggccggggtccgacctatcctgggagcagctggagatctcaatgaaggggatcactggtgaggcctttattgccaaatccttgatacctccccagggcattccgccgctctgtgatgatccagggttgcggtcggcagtgttgtcctggctgccgaccctcaatgagagcggtgtggcggtccgccaaaccg

SEQ ID NO: 140930 - DNA, 440 bp, Zea Mays
tcaccctattcacccacctctaggcgactttcacataccatggcgttattacaacaactaacgtatgggcaaccattccccctaggggctcgggtgtacggccaacccctcggcctctgcctcggctctcagcaggaaatcaacagacacaagtcaacaatgcagtgcactgtcacgtcggcttacaggacaccaagacaacccccttgggatacagcgaccccgggcttcattgcatacctcctacatgtataaatagggcagtgtggttcccccaaggggaaaaaagacacacaggcgaacactcagttatttgccactaggtcttaggatattggtacttgtctcaatcggttttagggacttgggaactttccctctcccattgtgcttgtaatccctactgcaggcacctcgtgcgagtaatataagcctcatcc

SEQ ID NO: 140931 - DNA, 498 bp, Zea Mays
attgagcatggcattgcacagtaactgaacaagatcacaggttcagtgaacctcgtcgtcgatgaccttgcgtcgtgatccgtgcttcggttgagatgtgtgtgcgcgcgagtgacggtggataaccgtcaagggtgaaaagatcgtcagggggtgaacttgagccctgtgtggccatacccacttgcacgacgacatggatgagcggtcatcgccgtggtggccgctgtctcccgctgttgcgccacaccatggtcatttcaccatgtatctgtaactgtggcaagcagacagttactgccttgggcctttaacccatcgtgcgccatagtgaacttgccccagtgaaagatctcgccaccgccgtgaccacctttgccccaaatttgccaaacacatgattatttcctttaaattgagcactccgctagctccgcctctctattacaccagcccctctcatgtaccatagctcccagtcatcagaattccccgagc

SEQ ID NO: 140932 - DNA, 515 bp, Zea Mays
aggaaagagaagatatacgccaggagttgcgccaggagagagatgagatacgccaagaaaggagggcgcaacaacagcagctgcaacaacaacttcaacaacagcaacaagtgccattgcctccaccaccaccaccagttccacctcgtgataagcaccgggagtttatgagtcataagccaccgaccttcgccagttcgccagatccccttgatgcatatgattggttgaagtcaattgagaagatgctcaacattgcccaatgcacagaccgggagaaagttctttatgcctcaggtcgtctgacaggtcctgctgctgactggtgggattcttatactgctgcccatgatgctgctgataatattacttgggcagagttcagtacacaattcacgaactaccatattccagctgggatgataaagatcaagaagaaggagtttctgtcattaaagcaaggcaacatgtcagtcagcgagtacagggataaattcattcagttgtcgagatat

SEQ ID NO: 140933 - DNA, 978 bp, Zea Mays
cagaaaacctgaagcaaatcacgttgcaaaacgctctgtcaaaacacctaaagcagttcttgatggtacagtaacaaaaggtatgcaggttcagtgaacctcgccgtcggtgaccatgcgctcggattcgcgccaggcgctgcgattcgtgctcaacgaagtactaatagttgctcgatgtagtaaataccgccttgaggatgaacttaggccactgttcaaccccggccaccgtgtccgcctgactcacggccggttcagataagatcgccggagttggccacctatcgaccgcacgccacatgccaaggtgccttaacacatcacagtaactcgtattacgcatgtccgttgatcgtcggtgagctcgtcacgatgaaagccaccaattccttgcgatagtgctctcccctctctctggctgccaccacgccatctcaaattcatggcccaccgccctcgggcaatataaatccattggctccactaggtagtcacgcacccaatacaccaaatcgtgcctcaaatcgtccaaaagagctcaccaatttgggatttcccccaaatcggtcaagaacactgtgtgtgtgagctcgtcgcggtcagcgctcgacaggtctgatcatgttctcctcgctcttgttctagcattcctgtgtacccttgaagctcatcggcccaaccaattgcactgaactagagtagatcgatgggaacactttgaattgtccgcggattgtgcggtcaccatgaatagagaaattgggggctagaaccttgcgattgatcgaggggaaacgattgttaggggttaaattaagtgtcagccaagatagagccctagccgttgcctattctggccagtacgagctcgctagagctcggtctgtcgccgttcaccgtcggggatcgcaagctgtgaaggaatagaagtgcgagggtttcattgcaattatcagtgactcatgggaatagtgc

SEQ ID NO: 140934 - DNA, 452 bp, Zea Mays
gctctgcagccttttcagctgcttttattgactctcgagtgtcgtgaatatctttttcgtttttctttattatttcatgggccattcctcggccgccattttcccatatgtcagtgaaatttttccagctattaagcttgcttcggccgaggggtccttcgtatcatcaatgcagagggcagcttcggcctgagccaaggttttaacatgctcacaacctgacttctccaaaatagctgcaattcccctcacaccagagaaggcacatacatccccgcggtcacttagaatttcttcaaaggcttcggtctccccacttaaccattcaataacgccttcgggtcgccttgtataaagttttcttcggaagaataggcgcccacgttagcaaaactggtttttattttcttcacacagtccatagatctttcaaagcatctttccttggatgt

SEQ ID NO: 140935 - DNA, 536 bp, Zea Mays
cacataaaaaatccaaccaacaagtttatagtttacagtagtagattacgaataaataaagtcaaacataatttatataacaaaatattcagatctaagatatgtatgaaactaatgaagagaatataaaatagacagaaacaattgccaaatactcccttcattagtttacgacgaggaatagcaacgcttgggtacaacaaaagtctagcgtacaaaataaggagcaaccaacgacaggattcacaaatgattgaaaatgctgaccagaaccttggaagcgatcatggtgcaaactggctggaaattatttctgctggaccacagaaaaataaagctagcaaatgcacaacgggatacagattccagtgaggaagaaggcagtccaactcaacccacacctggctgggggctgtcgcgctgaagaaaacagtgcaggtctaggtccattcccccgtgccctctccagctctccctctcccaggtccgccagtcccacccagtgtcgtcccgtgccggcgtcccccgtcggcgtc

SEQ ID NO: 140936 - DNA, 623 bp, Zea Mays
gcatgcgtgaggcggtacccgcggtccgggccgtgcgatcaggattggacggaggggattggaccggggaaacaggcggctacaggggtccgagtcgttcgatctgaatcggacggagggcgcgtgcgcgaagcggtacccgcggtatggaccgtgcgatcaggatcggacggaggggatcagaccagggaaatagacggctgcgggcggtgctgctcctctccgcggcggtgaggtcgccgaagttgaggctggcacgagctacggtggctccagggtcaccggagttggacagagagggagagggcaccgtggcgaactcaatggcggggaaggggccatgaatccacgggcagagaagggagaacgacggtgagaaggtctcgggcgggttggagtaactccggtgagccattccggccacgaggaggggacttaaggcgcgctaaggcctaggctagctttagcagaggcaggggtgacacagggacctacttcggggaactagaccgggctaaatcggtcggccaccacgcgagtacggcggaccgtcgcggccgagcaccggcaaaggcgaaattggccgagcacagggcgcaataagggaaattgggcacggggac

SEQ ID NO: 140937 - DNA, 317 bp, Zea Mays
gttgcaccgtcttgagtcgttgccgacttaagccgattgctccgttagcagggcatagtggtcaccccgagttaagtaaacgcgagcatgttgcaccgtcttaagtcgttgccgacttaagccgattgctccattagcagggcatagtggtcaccccgagttaagtaagcacgagcatgttgcaccgtcttaagtcgttgccgacttaagccgattgctccgttggcagggcatagtggtcaccccgagttaagtaaacgcgagcatgttgcaccgtcttaagttgttgccgacttaaaccgattgctccgttagca

SEQ ID NO: 140938 - DNA, 468 bp, Zea Mays
tgtgattacacaagacaatgatcaagaagaagccaatgattaagaggaggatcattcattcatttggctgtcaggctgtgatgggagctgtccgcattggtggcgttcaggagagacggggatgggaactatgcacatgcctggttcggggcttcgggcatccgctggcccggccctgtcattagtcattgccatgttatcttgtcattgtcatcgccggctgttcttttggctgcactggagaacaggttggtgcttgcttgggaacccaccctgatgcatgtcactcaccccacattttcacatgcagattttttcccccttctccgtaccaacaaccgtcgctgtcaactcaacacggagcctgccgtgccgccgcagccgatgcccgatacatactgagcatatgacctcacactgactcgatctgggctgtgcgcctgtgcgcgctgacatgttaactgtaac

SEQ ID NO: 140939 - DNA, 431 bp, Zea Mays
gttttatgtgatcagaaagaggaggacgttcagcacttactaactgtgttttcatccgggaattctggtttaaagttcttaatcatttgggtcttgcttcccgtgcacctaaccagtccgagctctcctttgttgattggtggcacagagcttgcaaacacctgcagagggacaaaaagaaaggattgaattccctgattattttgggtgcttggatgatctggaaacattgtaacagatgtgtttttgagtcaactaatcccagccttggtgtcctgctctctgatctccaggtgcagcaccatctatggtgtagggctggggccaaggccctgcgtgagttaggtcagttaggtggattgtcttagtgtctgttggtctggttggtctgtcccaagtctctctctctctccttttttttctcttttgca

SEQ ID NO: 140940 - DNA, 1089 bp, Zea Mays
ctccaggagtgtctcgacatagcagaaggcgaggaggccaacacccatgacgcctatcgaaccttaaagatggactatgataagaagcttaagaagctcgcccccacaaagaaaatccggaagaaaaccacaagccaaggatgccagacagaaaggaggaagaaagctcccccagcaccagctcctgccaggatagaaaatttgtccgatatcgaggatatgtccctcgctagccttgatgatcttctcaaggaattcggggacactctagaaaaggaatttggtagtacctcagggaacgctcgcgtgtagtacaacttgtagtagtcatatgcttgtaatgtattggtgtaatgaataaaataacttggttgaaaacaatttgcatgtgcataatagtgactctctcccctggcagatggcttcggataaaaccatgcctaccgcctccgggattggagcaaggtttcccctgagagctgaaggggaagccgatagagaggaaagtgaaacccacctccccgcacctccgcaactacccttagacctagcccaagttctagccaatcaaacccgactcatcgaggtcctcactcgaagtctggaaaatcaacgaccgaatggtggaagaccgcaagacagaatgggggatttcctgaggctcaagcctcccacgtttgccgggtctagcaaccccctcgatgcagacgattggctacgcacgatcaaaagaaagctggaagccattggttgctcggaaaatcagcgtgttcaactggccgcccatcaactttccgggatggccttagcctggtgggacaccttcaacgtcaccatcagagatgctacctgggcagaatttgaaacggctttccgggagcaccatgtaccccaggggctcgttcagcttaaggaagacgaattccgggaactgactcaagacggaagatctgtcagtgaatatgtgcacaagttcacagagttagcacgctacgcgcccgatgacgtcagtaccgagggcaagaagatggcctgtttcctgaagggactcaggccagaactcaagacaattctggctagccaatactt

SEQ ID NO: 140941 - DNA, 392 bp, Zea Mays
aatttttttgtgatttccagctagacgatgatgggaaaatagttagtattttttggtcacacgcaagcatgcagggggaatacgcagattatggtgatgctgtgacatttgatacaacacacaagacaaatatatatgataaaccactgggcatgtttgttggagttaacagccatctgcagtgtacagtgtttggatttgttttattgggagatgaaacagtacagacttttgaatgggctttcaattcattcaaaacatgtatgggaggcgagggtccaagagttatgcttacaggtatgtgatatataaatttgttaagcaaaacaatgaattaatttattgtgaaaataactgaataatctgtgaacaattacagatcaagatcctgc

SEQ ID NO: 140942 - DNA, 458 bp, Zea Mays
gttcccaagatctcacttgttgtttattggatcctgcattccacctcttttaattcttggggctctatccttggtctctaccgtcgacgagcccgagcagcaggcctccggagcggacgctgttgctgtgacggtcgtggccctggtggtcgtgatggctgtctcgtagctcatgtcctgctgagagacccaaatgatcgatggccattgcgaacagaatagagaggctttgagtgtgaggccgtgacaacacagtcatctcactagaatctctatcacgttcacatctctaatgtgttagaactggatatttgtttacttgttcaaggtattgagattgcaataatgaactactgtctacgctcagctttagcagctatacctttctgatacttagaattagtttatgtagtttagtcgcaagttataccaaagcacaatatataactgacaataca

SEQ ID NO: 140943 - DNA, 271 bp, Zea Mays
gttggaaaggaagtcgagatatatcaccaaagatctaagggcttctctccactgaaaatatccagttggctggcttggaaacagtgaacagtggagtagttattgagtttgtttgctgtctgtagtattagacaagaaggatattggtgagttgtggataaaccatcccaagttcagtactctggggtgttccactcgacttaaaggcttgggaattgagtgaagtatataacaaaggttctagtggtccagttctcctacagaaaatatc

SEQ ID NO: 140944 - DNA, 513 bp, Zea Mays
tccccccgaacaagcgcatctgtcgtccccgacgtcgacgaacccacgtccaaagacctcatcgattgagaccgtgtctttgccctgcaggccctcaacaaataccaagctcaaacgaaggcctggcgcgaccacgcagtcgtcccaagagaatttaacgaaggagacctcgtactcatccgaaccacccagacagagtcacggggcaagctggagccaaagtgggaaggtccattcatcgtcaagtcgaaggcgtcccccagcgcatacaggctaacaacgccatccggcgaagacctagaccattcctggaatattgacaatctacgcaaattttttgtctaagtcctcagggcctacgcacccttgtaattcaccaaacagcattatttaggctcgcactcttttccttccggggggtgaggtttttaacgaggcggagacatgtaatacatccgcaaaaatcccccgcaaaaactaagatgcaacatgtcaaaaaagaccgcatcaacg

SEQ ID NO: 140945 - DNA, 920 bp, Zea Mays
gcagcacgacagcggctctagcagctccgatgagaaattacgcatgacatagagaaagagggggtaccggagggcgcacgggaggatccttacctcaaggcaagactctagacccccttggaggcggcaacaacacgacgacggcttgggacaatggtggtggctttggtgctgcacaaaggatggtggttgagcgcgggcaaagaaaatcagaggggaaaggaggaattgagggtaagttctgggctgttggcacctaggcgaagcttaccgtggcaaggaacacgcaacacggtggggcctcaacgtcggcgagagaatgagcgcgtgatggtggtgaacgacggcggttctccctcagcgtgcgtgcaacacgaaattgagggcgagagttctatgagtgtatgagtggtggagggggaagagagggtggggcactggagttcaaatgtccgagcatggggcggttgcgggcttgacgcgcgatgtgggcgtgtctccccttgcgtgcgcatggggtgcacgagcggacatgtgaaggagggggatgggactgacgggtgggatcagggtgtcatcaggctgatgcggggcacgcaacggatgggtagagagggcgctgatagccgggtctgcagcgcagagagagagagagagaggatggggcatgcagtgcgggtggaagtgggtcaggaatgggccgaaaggccgactatgaagggggtttgagcttctttcatttttctttttattctaatttatgttttccttttttatttctcctttcgattcatattcaaatgtgctaaaaattcaaaagtaaacatctcaagcatatgcatcaaataaaggtaaaggttggggttcagcatgatgcaacatttcatactcctctgggactttgtctactagaatataat

SEQ ID NO: 140946 - DNA, 576 bp, Zea Mays
tgggcctgggggttgaggcactgacacgagggttcttgtcggcacacccagatgtgagatacaaagcatgttttacggaggctcagctacaacagacatcctctctgcatgaaccgtggaccttgacacctaccaggtgcgttacatgcaaacgttttaatgaacatggtgcacgcttatttttcaagtctgaagtcatggagaagatgcggagccttttgaacctgagccaggagaaggccttgctgtcggagaaaggatctgcaatgcaagagatgtcgttgagccagttttggcgatgaaagaagaagatatgaagctcatgtgttggtcgacgctgacgtggggcatgtgaccattgagaccgaagcggaggctgtcgtacaggcgatgtgctcgtgtgcgtttggccttcggtgttgtgacgaatctctatctctttgctgaactgagaagcttgctagctcttaattttatttcatggtagatccagcgtaggccatattgaattggctggatttcgagcgatcgtacatatggtcgtgcacaatattatatgagagctgttggagatag

SEQ ID NO: 140947 - DNA, 371 bp, Zea Mays
aaaccattagcagtgacaaacatattttcattagtcattaactcctaaactgtaactctagtatacacaggtactttacaatatatgtagtgtggagatcaaggaacaactcttatataatgatcttggcgaaatgagcatgccaagctccactatagtcgtttgcaaacgccctagagccaacccgccatgtgctcgactatatgctccaggaacttgatatgcacgtgtgcgcccatgccatggccgctacgtggagctccctgcccttctaaaccaagcgcggagcacaccaccacctttccctcgcctcactttcgccttctcgtccgctctcgtcgtgcttctcccacacctgagcccaagctgtc

SEQ ID NO: 140948 - DNA, 913 bp, Zea Mays
ccagagtcagccagactcggcaatgtgcgcacacgtaaatattacgcgggagcaattgtttgtggctcgatcttctcgaaggattttcgaaacttgataaatatcgttgcgtgacctgacaaagaggctgcgcaccgcgagatcttgcacacgcgacgaacaatcgagacaatcgcccttccacgtaccaatgaagccagcccacgcaatcacgtcatatagacgtgaaggcacaaactgggtgaaccacagttcggcgttctacaactccctcgagaatcgaaagaacaagtccgcaattctctcaagactcacattgagaactcaaagagtttgtatttctgaattggcagccaaaaagatccactcgtcatctattacatggatacatatagcactagtggtgttttcagtttagataaaataaatgggaacacacagtgggaagttgtagcactccttctattaatagcctggcctaatggaactctttggatggttgatactcttttgcatgcttgtacgtgtgtggacagcaacctggttgctgactgccttcttaactcacaaatttatttgacatccacggctgatctgcatggtagctgaatggtccgtccttctccctttattctcacaagcacgtccaagcaccaagctatcattattcttctaagtttcacactgcaatatcagcatgtcacagagagagctgatcatcacaatgttggaaggcaaaatccatcatcgtcccatgaacttgggtacacgccatcattcctaagaatattcaaacaacaacttgaaagcactgactgatctggatcattgtgattaattaaaataaggttagcattcacctgagaataaatttccttctctagttgtttagctcgcattcttgtaactggac

SEQ ID NO: 140949 - DNA, 678 bp, Zea Mays
tgaagaggtaaggggatagtggatccccttggcgtaacccacatttgtaggtgaagcaaggcctaggggacccctttaccaagatggtagatttggaagaggctaggattttttcgatccagccaagctagaggttactgaagtcgcgggccgcaaggattttgaatagggttccccaatccacagtgtcagaggctttggtgaagtcaagtttgatgacaagggtgggagttttccttttgtggcagcattggacaagatctagcacgtagatgaagttttcatagatcgatctccctttgaggaatccagtctggtcaaggttgatgagggagccaatgattggtttaaggtggtttgtgaggattttagagatgatttttacactacaattttggaggcagatggggtggtaatctcctgtggttcaggcatcaagttttttgggagaagattgacataagatcggttgatgttgtataagttggcatgtccgacgtggaaggcttgaacaaggttcatgatagtgtactttacagaaggctaggcagctttgtagaaactaggccgaagccatcagggctgggagcactatgggatggcatggagaggatagcatctatggtttctttcgacatgaaagggagatcgaggctggctaggagggattagtgggtg

SEQ ID NO: 140950 - DNA, 511 bp, Zea Mays
gaaaaatctggtaaagccagtaccggtgctgaagttagtgcttgtttaagggccacaaatgctgattcctgcacagatgtccagacaaaaactgaatgcttcttgaggagggaagtaagaggcttggccaaaaggccaaaattgcgcgcaaacttgtgataataacccgcgagaccgagaaaccctcgcaattccttgcatgaggatgacacagaccatgaagaaatagcagccaccttggctgggtctgtggccatgccagcactactgattacatgtcccagataagcgatctgctcgtggccaaaagtgcatttagacaatctgacctaccaattgtcgcgcgcaagcaactgcaacaccaactccaagtgtgccaaatgtgcctcccaggttggactataaaacaggatatcatcgaagaatactaaagcacacttacagagcaaggaggataatgtacggttcatagcactctgaaatgtagccagtgctccggttaatccaaagg

SEQ ID NO: 140951 - DNA, 340 bp, Zea Mays
attttttgtcagtcctctgatttgttttcatttcatttagtcccttgatgcagctgtaggcgactttgctattgtgagaaacagaacaaagattgcagaattcacacagccttatattgagtcagggcttgtgatagtagcgccagtgaaacaagcaacttcaagtgcctgggctttcctcaaaccgttcacattggagatgtggtgtgtaactggtgctctttttatttttgtggggatagttgtctggattcttgaacatcggagtaatgaggagtttcgaggatctccacgacgacaacttataacaatattttggtatgctgctgttgctacttag

SEQ ID NO: 140952 - DNA, 527 bp, Zea Mays
tggaggacctcgctgacgtagtagaccgacctctgatcggtctggaccccggcagttggtcctgagtcctcaggttcctggccttcttgcgctgtcctttcttgcgatgtatagatacaatggttccctaggctctggggctactagtattggtagggacaccaggtgctgcttcaactcctggaaggcttgttccgcctcttcggtccaagagaatggatcgaacttccgcaacagcttgaagaagggtagcgccctctcagccagccttgaaatgaagcggctaagggcggataacgaccccgtaagcttctggacgtccttaattcgggctggaggcctcattgcctcaatcgccttgattttctccaggtttgcttcaatgccccggtacgaaaccaggaaccccagcaacttccccgcggagacaccaaagacgcacttgtctaggttcagcttcgtgcgggttgcccgcagcctgtcgaagactagggttaagtcttccactaggatcgaccctctcttag

SEQ ID NO: 140953 - DNA, 320 bp, Zea Mays
ggtgcttccccgtccactacaaggtcacatttgtgatccctaaagctcactgcagcttccctgacctcccccgagctctcctcatccgttgttcagctctgtcgcaccaccctaacttcatcgaagctctctcgaccattgttcttcatcgctagctgctctcaccccatctaccccctcggtgaggcctcaggtatgctcactttctccctagctatctcctaagcccttcctcggttgttttggcctcctagagtgtcgttctggccaactccagcgagagtcctgccgtgcgctgccgcacgccacccctcaccccg

SEQ ID NO: 140954 - DNA, 833 bp, Zea Mays
attttcattgctctctggaccgcgcgtcaaatactaaaaagtgcaggggctaactcgcaaaagttcctaagactcaggttaacacatggaaggactgcgggttgattttataaaaacagagggtctcttaagtaagtttggcactgcgaaggggtaccgactgttctaagtcgtccgattgcgcgccagaggtcaggactagatcaccgaggcatcacgaccggtatacacccgcagccatcggatcgaatcacgacgaccatgattttatttagcccgaacggtgcacatgcctgatccgagccgtctatttacacttcgatgatcaagattctaatgaatccaagggatatgccttaacctaatcaccaccgttgattcataaccaacgaccctagatcaaactcgaggcgaatgatcaacctcggatcaggaccgttcgctggagtatcaacgatactccaaccgtccctgacctcccacatggagcatgatggcgcaaattccccaccccgccaacggacacaccggagacacgaattggcccctggatcgacccaactttcacgtccaccgataacaacccccatggaggtaagtgcaaaatagatgtatggcagatttaccgtatcccaggaaggtggtgctccaattcctgtgatgtggcggtcccatggtgcctctgggtcgccgacgagcaatcacaacgctactcctacgatcaccccgaggaaagcaatgggaaccttcccacacaacacagccaatcacccggacacgcaacccgagacacgacgccggcataaggccttccctctccccagcccgcggca

SEQ ID NO: 140955 - DNA, 286 bp, Zea Mays
ctgatacatcgcgcatgtgctccaaaacttgactcccactagacttagccctcgacacatggacaagctgtcacctttacccaacgatcattgatctgataggcacagccagacctggaacatttaaaggtccgatgcgactagatttagatagattttgggagtgggtttccaacggctctaaggtttttaggggcatataaatatgacttcatccactgtgttgagcattcaagagcagaaaaatgaactgtatacactaaacagacacctccaaccattcaag

SEQ ID NO: 140956 - DNA, 643 bp, Zea Mays
cgctggttcttgaggcttctagtgaggacctcaatgagtcgggtttgattagccaaaacttgagctaggtctagtggcatctccggaggcacatggaggtgggtatcactcccttctccatcgacttctccttcgatacctaggggagtccttgctctaattaccgaggcggtagtcgtggttttatccgaggccatctactagaggggagaaaggattactactatgcatatgccatcatttttttcaaacatgttattttattcaacactccagttcattgcaagcataacaaccaccacaggttacactacgcacgagcgttttctactaaagtgtccccaaactccctgagaaggtcatcaaggctagccaaggacacttcctcgacgtcagtaaagttctctatccctagggaaggtagtgttggtggggtttcttccttcgggttagtctggcatccttgtctcttgaatgcttccggatcttcttgacagggtgaggttctttagcctcctagcatagtccatctttagggttcggtatgcctcacgagtgttggcttcctcaccttctgccatctcgagactgtcttgaagagccgccttttcctccttaaattccttgatttgctgctctaggc

SEQ ID NO: 140957 - DNA, 550 bp, Zea Mays
ctctagccgactttcaggagccctttcgaggggtcaacttttgaacccctgatcagtattggtctcgacaccctgaagtcctaaggcggttcgtctgaaccctgctgagggctgaggcttcgaacctctaaacagtatctttccatgcctttttcctcccgaagcgtcaggccgaggtagaagacaactttttttgattcgctgctccttttccgaggggggtcgcctgaggcagatgatgtttcttcctagttcggttgccgaggggagtaggaggcggtatagtcgaggggagagggtgtaccttttgaggtgagtgtggaacaacgctcgtcatgttttttcctcggaggggatatggtcatttaatgcgacgggacgttctgcctgccaactgaccgttagcgacacacgtgctcgcggaattcaaaacggtcatcgtctagccacttttcgaatcatacattggtggctctgtccgtcctataaacctgaccgagagggagggctttggaccgttacctttgtagtttcaatcctttgccttcaa

SEQ ID NO: 140958 - DNA, 384 bp, Zea Mays
cgagttttgtgtttgctattgaaaaaataacattttttccttgtggttttctttgtaggttcttgattttcttagtggtggcttccttatcctagccacttgtagccatgtgtggttgttttggttgatgattgggtggcccaaacttctaccaattatgagtcactagccaccagctgggagcgtcattgtcggttagggggtggtagtagcctcgctaagggcactatggctagtttgggggccatagtagtctagctagagtcaatggttgtatgactaaggataatggagatagatcgaggatggcgtgggaggaaatccttatggtatgcctattttagtaaccaaatattacaactattggcagaaagcaaaaaaatg

SEQ ID NO: 140959 - DNA, 766 bp, Zea Mays
ctcaatatctaaggatctaagatattggtttttgaatcatgtcgtttggaaacctgaacttgacaaattagtcaaccaaactgagcttgaacacagtgtagaattttaagaatggttcacctagatagcaagttattgtctgccgtggagtgtctgatgtgctccgacgacgttgattgcctttgctcccaagcacgcctcgacaacaaccgtgtcgcctgccttccgccacgcgcaccgcaggaaggacccattgtgcacttcctcattgccgtcaatctccaggtgcacccccgccatggacaaggaggtgtgtgatgtctatgagaaacatgaaaggaaaaatgattctttttctatatagcaagcaattattgtttagttagaattgtttgtaattgtgtgctcagaaactgtgatttaatgttgctcttccctaagcactcattacagcaaacaatgaattccatggagagtaagaacgatcataaaaaagacccagacatttttttgtaatgtggctctatattttttgcggccttcaaaaccagtattttgatgctttgattggaggacctgttcttggaatttatatatttttcccttttctactttgacacttcatgttcattttatagaattggaggcaatttcagtgagaaattgtgttctcattaacaatgaaaatggctactttttacctggtcttttaggctgtcttcgctactaattttttgctgtcactttggaaactatttcaaaagtt

SEQ ID NO: 140960 - DNA, 381 bp, Zea Mays
cggagctgagcacctcccacaagaaggaagggaaacccttgtgggaaagaaaattgaaactgaaacgagtgtctcctccattggcaggggtgggtgaagtcgtctgtggaagagaattagacgcaaacgttatggtagtggaaaggaaaaacatgtgtccgagttgttaaaaggaggtgtgttagactagattttactcattaggttatttattactatccctatttgctacattcatacttagattcatttttcctttaatttctaatcctttcatgttttataatgcatgcatgctgaaagaacatctcctctccgaatagaagggtgcttttagggcatccttgcatttctataactggctcatatggcctacttaat

SEQ ID NO: 140961 - DNA, 490 bp, Zea Mays
gcatggtacatagcctaagcaaaagtacaattatgaccctgatatctataaacaatacgtgaaatgaaatgcttacaactcaatgctcaaactataaatgtcttatttagtgctttgagtgaagatgtctttaataatgtaatatttggagatgatgaaccgcttgaggatgcacatctcatttggaccactctcaaagaaagatatgataagtccaattgagatgagaagtttctctcattagaagcaccacttgaggaatgctcaacctcaccaacaaatgaagacactcaagtggttctcccaaaaggtctaagtgatcctgccacatctactccctcactaacatatggcttaatcaaaggtaatggaatggttggtgagaacaatacttttacatatggcacatctactcctctagttcttgtgggactaaccttttgaaggaagaagaagattgtgatcgatggaggccaaacgatgaatccac

SEQ ID NO: 140962 - DNA, 385 bp, Zea Mays
caataaaggtacctataagtctcgcacgctcagtagcttcttcagctcttttggcttcttcctgagcgtcgtgagattctttttcattctttctaatagcttcatcagctatctcacggctgcttcggctgaaggatttttaatgtcgttggctgaagggtttttaatgtcgtcggcagaagctttggctaaagggtttttaatgtcgtcggctgagaaaacaaattatggctgaactacagccttggcatgttcgcaaccagctttctccaagatagatgtgcccccccgcgcaccagcaaaggcgcagaaatctcctcgatcactcagaatttcgtcaaaagcttcggtttccccgctaatccactggacaactccagggtcg

SEQ ID NO: 140963 - DNA, 451 bp, Zea Mays
cggtgcacgaaaccaatccgagaatgacgccttgtgtatatcttgactgaagacttatgggcctaaaggtatcgtagtcgttccttctcttcaccgagcttggcttgaatctcacagatgtgctcgagttgttttccctgactccccacgggggtctagaccacatcccgttccctcgggccctcgatgtgtggtgctggtgctggggtgttatcattcctgggcatgccaagctggttctctccttcatgctcctcatgcttagcgtagaagcattctcgagttgggtcataaccctcgtcgtcgaagttgtagtcgttggagacatcgaagaggtagtagtcacacacagacaagaagtgccacatggaatcggggtcacagagcccaaaaaagtctaggtcgggatccatgtcatcttcttcctcagagtccccgtgctccgaggttg

SEQ ID NO: 140964 - DNA, 332 bp, Zea Mays
tgccggggtgcatggagaatttggaaaggtgagcttcatccaatattttctttctgagctcagggttcttaggaacaaccaatcggtctacaaaccatagaattcccttgctgtcctaacggaagcatttgtacttgtccaccttctgtccgatcatttccttaataacttgaacacccttgtcaccgatccgtgccatgactatttgctcatgtaaagtgggctccactgaaatataactcaaggcacctaaggaaacaacttctatgttcagcttgcacaactcgtcacacagggtggcaatcttggaatctatactcacacagttacac

SEQ ID NO: 140965 - DNA, 715 bp, Zea Mays
ctcaatgtcatccttgtgcatacggacctgatggtaccctgaacggaggtccaacttagtgtagaatcaagctccatggagttcatctagcaacttgtcaaccactggtataggatatttatccttgatagtgtgttcattgagggctctgtaatcaatgcaaaaacgccatgtattgtctggcttcttcactaggaggaccggggctgagaatgcggatgtactgtgtcagattataccacggcgaagcatatccgcacattgagcttctaattcatccttttgcaattgggtgtaacgatatggacgaacagctgctggtgcagtgcctggtttcaggtggatcctgtggtcacaatgtctggctgacggtaatgactgtggttcctcaaagacatcctcaaaggactgccgcaagtgatccatcatgtgcttgggttcagtgctgatgctacatgtggttggtgtagtggtgtctgttcagacggaccccaaacccttccacagtatgcaccgaccttcatgccagaaggccatgcaaaggtcctggagatcccataatactagtctcaatgttctcaggaatgctgtccctagaatgatctcaaatgtatccaagggaattgcatatgcctcaatggtgaacttctccctgttgatgtcaatggctgcgcgacgagttactccctggcaaaaaactggctctccatttgcc

SEQ ID NO: 140966 - DNA, 324 bp, Zea Mays
gggccccaataaccctgttcctgcaaggatattaccacccaagtgacgtcaacgaggccaagcgcctcaagcaccgaagccgggacttcatacttattgggggccagctatacaagaagggggtcagtcaacccatgcttaaatgcgtcaccgaaaccgaaggcattcaaatcctccgcgaagtccacagcggaacttgcagctcccactcagggcctagggccctcgctgccaaggtgacccgtcaaggattttactggcccgcgataatctgcgccgcgaatcgagtcacgcggtcgtgcgaagcttgccagaagttttctc

SEQ ID NO: 140967 - DNA, 476 bp, Zea Mays
tacagcccccgcacatctcgcttcggtttttcgaaactgctgccgtttcgttgctgggtgagatcggttttgtgcgggtttccgggggattttcccgcggcaaaggcgtggacgcagtgacgacgtcgggtgtttagtggggggtggagtgccccgggggccacgacgactgcgtccgcttttcatctcttctactatctactttcgctgtgtgttgtcttgacatagactagggttccatcccgatacatgtactccctccgtgctcacaattctagaagttgtgtatatttgacacattccataattcaagacgttctacaattctaaaacattccaccgcatggtctgccttcgctagctctcgagaccagattgctcgcacccagaggccagtatccccctactaatcaaaagtttatgataagacagccacctaagaataactcactaatttactagaaatgttaagtttc

SEQ ID NO: 140968 - DNA, 339 bp, Zea Mays
cgaaaccaaacaggccgtaggcgagtttggttggcctcagaatggcgtcaccaagctcctgtaaaaatttcatattttttggacacccgaacgaaaagttatgcccggtttaaggatggtacctcaagttatgtttttgggaggcacgactagaaagcggcggttagggcaaaacttccctatctgcaattacagcggttagggcaagtcgattaatggggtggatcgacttgtgatctgggtaatggtggatgggatagcggcgaaggtgcagttgaactacgacgaagatacaacctaaaccagcaacacgactcgaccacggacacgaactgaaca

SEQ ID NO: 140969 - DNA, 923 bp, Zea Mays
ccaccattggcggggtctgtaactcgccccacccgcggactccgcgctcctataaaatctacccgaattgcgccgccgtcacctgggttgatgccgtgagggaaagaaagggtgaaacacctcgtgttgaaccacatcttcggcgtcgctccgaccggcagtcaggggcagggtgcttcgtcgtggcatggcacgagtgtctgtagcaccggtcgatggtaggcggcttcggtgatcgcggaatttctcaccagcgcaatatttctccgtgggaccacatcgcgtcgtgaacaacaccgcggggacctcgtgcttcggtaatgccctcggatcgactctatacctcctctgcattgtttagcacctggttacgctttgaatcgagcccgggcgtgaccattgggcgctccccgatgatggcgccgccgtgggcggaatccgactgacgtggggcgcggtcgggcgagggagacgtgtccctaggcgtcaatcaaggcttcaacgaccgagattagaagatcgtataatgtttcacctggttgatcatgaaccgttgatccacagatggacgtaggacgttagatcgaggcactttaaaatctgcaccatagatctcgggatcaacggctgtggtgcgtaccgtttcgttataagatcgacctaatctgagccataggatattaatcctacgaccgtaggcaggtacggtgcaataagattgtgagatctaatatgtggcatctatttcggatccaacgacttatcttcgccaataccccttcgcccggcaggtttttgcataggtgaccccttgtttttagcgaattaacccgccgtccacaatcactgttaaataattacaactgcaccctggaatttgtagattaaaccttgagctctctagtaatcatgtccgcggccca

SEQ ID NO: 140970 - DNA, 650 bp, Zea Mays
attctctcagctactggaaagcaacttctggatgaggtccatgctgggcaatgcggagtacacgcagcatccagaaccctagttgggaaggttttcaggtcaggtttctactggccaacagcgaaaagtgacgcagccgagttagtacagaggtgcaaagcctgccagtacttgtcaaaacagcagcatctaccggcacagcagctgcagactatacccataacttggtcgttcgcgtgctggggattagatatgattggacctttcaagaaagcccaaggaggatacactcatgtactggtggctatcgacaaattcactaaatggatagaattcaagcccattgcttctttaacttcagctaagacagtggaattcatacaggatataatattcaggttcgggataccaaatagcatcataactgatctaggatccaacttcaccagctcagaattcttcgatttctacgagcgaaagagcattcagatcaaatatgcctcggtggcgcacccaagagccaacgggcaagtagaaagagctaacgggatgatattagaagcactcagaaagaaagtcttcgacaagaatgagaaattcgcaggaaaatggatcagagaactgccatatgtagtctggagcctgagaac

SEQ ID NO: 140971 - DNA, 622 bp, Zea Mays
tcagggctggtttctataggccaacagcaaagagagatgcagccgagttagtctagatatgtgaaagcttgccaattcttgttgtagcaacaacacttaccagcacagcagatgcagaccgtacctgtgacatggccatttgcatgttggggttagacatgattggacccttcaagaaagctcagggaggttatactcacgtgctagtcgccattgacaaattcaccaaatggatagagtataagcctattgcctctttaacctcagccaaggtagtggagttcatacaagacataatatttaggttcaggataccgaatagcatcataaccaacctggggtctaacttcactagctctgaattctttgatttttgcaaacaacggagtatccagatcaagtatgcatcagtagcacacccaagagccaatggtcaggtggaaagggctaatggaatgatactggaagcactcaggaagaaagtgttcgacaaaaatgaaaagttcgcaggaaagtggatcagagaattgccctatgtggtttggagcttgagaactcaacctagtcgagctctgcatggaaatacccccttctttatggtctatggttctgaggcagtgct

SEQ ID NO: 140972 - DNA, 1029 bp, Zea Mays
ttataagatttttctacaatttataacaaatttccaaagctctactgaaaaagaaaaaggaaaaaggttgaacaggactgggccagttctagcccagtcggcccaacccaaagggaaaggcgtgcccgcgcccgcgcactggcaactttgcacaggggcccttgcgtttctgtctaacagcgaacgagttctttcactgttaaacagagccactgacaacttgcaaaagagacccccattttctgtttcttcgcagtgggaggtccccgacggcgttcatgcacgaccgagctccggcgagcgtctgtaccggccgaatggggctatgactggcgctcccgagcggcggacatcaaatcggacctaccccgagtatttcccccaacctaattgcacgaatggcaacctattaagctctgtccgcgtgaaccgaatgggtggcggacagatgagtgcgttcctggtgatctagagctattccgtacaaattggcggttcgacaagcatcacagagcgacaagagtgctcaaacaaaggagagtgagggatgaactgacctagaaagggctggccgcggtgaggtgagttttgcggtggcggaaacctgtttgggggaaacaagaaattctcgagctctggcgaacgatcgtggctgattagtggtggctggttagctgatgaccctgcggagctggtcacgggcttaatttataggcggcttcgtcgatggccggtgaatcgggcgagacgcgcggcagtcggaggtagaagaagacactggcgcaagcgctaggtggcttctaccgtggcggtagttccggtggtcgacgggaagctagagggagtcacggtgatgtggtggcgcggttaggacacgcggcgcagggccagaacacggcggttcaccggcgaggttatctgcccagccgcaaagtagaaaagaaagccacggtgagtcaccggagtgacctccagctcaccgccgacaaggatctttcaccgcacgtccttatccacccaccccgagcg

SEQ ID NO: 140973 - DNA, 470 bp, Zea Mays
cgattcgcggcgcagattatagcgggccagtagaagccttgacggatcaccttggcagcgagggccctaggccccgcgtgagagccgcaagttccgttgtggacttcgcgtaggatctggacgccttcggtctcggtgacacatttaagcatgggttggctgacccccttcttgtaaagctggccctcaatgagtgcgaagtcccggcttcggtgcttgaggcgcttggcctcgttgatgtcgcttggatggtaatatccctacaggaacagggtgattggtgtccaccaatcttcggtcatgatgaggttgactatgcggtggctttcggtgtcgttggttatttgtaggccctctggactgcggacggctggcgtgccgatgacatggtagaacacgtcggagggcaagacctcgcctctggcggctgctttggccaatgtgtcggtctcctcgttcttggctcggtc

SEQ ID NO: 140974 - DNA, 634 bp, Zea Mays
cattctcaaaggcactcgaattgtttattgtcaatctgcatacttactcgactcagggtgaccattataccctgcaaacggagcaatcggcttaagtcggcaatgacttaaggaggtgtgacatgctcacgcttacttaacccagggtgaccactataccctacaaacggagcaatcggcttaagtcgacaatgacttaaggcggtgtgacatgctcacgcttacttaactcagtgtgaccactatgccctactaatggagcaatcggcttaagtcggcaatgacttaaggcggtgtgacatgctcacgtttacttaactcagggtgaccactatgccctactaatggagcaatcgacttaagttggcaatgacttaaggcagtgtgacatgctcacgtttacttaactcagggtgaccactagaccctaccaacggagcagtcggtttaagttggtagtaacttaaatcggtataacatgctcgcgactactcgattcagcataagcacatttgcgaattgcttgtcttagggcgatctctatgccccgcgaaataggaagaagtttcaaaaccatcacactgcacttacttctgcaatcataacgactgttgaattcaaacaacagaaaaat

SEQ ID NO: 140975 - DNA, 3144 bp, Zea Mays
agttcatttattgattgtgcctctttgtatcttcgtaatgcattgtcatatacttttgatatttgggtacttgatgctacctcatatagaagtagtttaatcattaaaaggaaaatgcataactatttgtttacttgcaataatgaaggcaacgagaagtaagaacaatatactctatgcagtctagcgtaagatgcaattggtctcactaaatatttgttcgaaataatgtgagcaaagttattgtagagaattagggaacacctcacacccaattagggggtggctttcatatatatgtagtcatgtacaacttggaatacaatatgtgttagactatacatacctctaatacctgcccacagtcacaactgtagggaactgaatgagactggacctgaagacattgaactactgtgtaagcagtctcttagtcataatgtacgtgaactgattagttgaggccacatggagtaccctaaagccaccttctcacgaacaaagtggatgtcaattgtcaatgtctatatgcttcgtacgacgatggtgaaccgaattggcagtcatatagactgtggtgacattgtcacaatagacaatggtcgccaaaccgagtgatagtctgaaattgaccatcgactatgttaaagctatcgtgagggaggctacacttgaggcttcgtcgggcaaacgggagcccttgcccccatcggttgcggcaagtccagagcagcaaccttcttcagcgatggaggcggaaaagaacgccgctgaggaactatcttttctaaagcacgcaactttgggaaaatattgtctgattgtggcgaagaagaaagatgaaggctctttggcgcgacctgttgactaggtgtaaattttgtacactaggccatgctgaagattcgttaggttgagttttgcttgaaggccttggaaaatattatgtctgattgtctgccacgcttcaattgtcgaccaatacatcatgcacggtgaagcttatattacagttgattaccatgatattgctgtgtgggtaatatcttagccgaaggtcatcttgagtgaatgttacaggcatatgaaccacttagatctgatataggacccctgaacacctatatgttggaccctcctttgaagttcttgtttttatctcttattgagtggcccgaagcttgatcttctcattattgggaatatgtgctttgctggtggaactaagttgttgacgtctgagctttgggctcttcccttctactgagctggctatgttctcgtatgtggcgtttttgtggaggttgattatataacattggatcatattgtgatgggtctggtagttgggggttgtaagcttcccactgttgtgactgatgttgcacaattgggcttgaggacgaagaatgtgagttctgcccttgatgctggatgtatgacacatcatagttagtcgagcattaagatgatgtatggcacacattcttcggctggccttcctgcttcacggttgccaattccttatgcttttggatggtgatgctacaatattttgttgtatgctctttattctccccgcaaaatacacaatactagtcaatggcgcgcgccagcgcttgcataggatttccctttttttactgggaaggtagagcggcacaacaacagtcgtcgcccacgcgtgcggctagatgtaccaacggccaagatttttcgcgcgacatggatagtgcgaatgtcgaggaagttgcatcggtttaataagaagaaatagctttcttgattgaccgttgttggagtacctgcctccaaaggtgtggccccccttctgtccctttgtgttgagccaccccagaaactactttgctggctttgctaaggtccgttcgaaggttggcttgttgttggagtttgcggaaactacttttctccatcaaactagggtgtagtctgaattgttcgggcttcccttgcatccttgttgaaaaccctcatgatctctctgtgtttctgttgttcttgtcaacgctgtcgaaagtcattgtgtgctctaatatattcatccatcttctgaaacagcttcttcaaggtttgcggaggctttcaggtgaagtattatgagcatgggtcaactttgagctccttgattgttgacttaatgacaattttaactagtactccttgtgcatgtactttgacttagacaaaccttcacatataactttgaagggattcatctacttcttgaaaacatggaacaatgcatgtgccatgactaggtttgtttgaaagccttggaaacttgcaatcgattgtttcttaagttgttcccatgtggttatcgatctggacaaagggatgagtactaggtttgagctatgccttttgttgacggagggatgagtaccaggtttgagctatgccttttgcggccataatatgatttggctaacattgttgtgtttctgccgaattatgcaatggttgcttcgtaactcatgaggaattgctttgatttcgactgcccatcattcagaggaagcatggacagtttatatgcagcttgccatggggctacctgcaaatcccttgagaacgaagatgcactatcatagatgaaattacatttttacctttccctatttcatagtcaccctttgcaattaagggagtacaataatgtcattttactgcgtagacgtgtcgcacacatcttctcttcgtagaagcttcttatgtctcctctccttcgaagtcctctttatcgacgacaaagctttgctttcaatgccttcggcttcatgcacctttggctcattcagatctaccgaagctttttcaaggagagcggtgatcttcctttggccttcattagctttctggacctgaaaaaccatctaaatattgatttcatcattttggaccttcgactagagacctccccaacaacaaccaaatagaaacaattgctggtttacaaatgccattaaaccctggttagagaagtgcaaatataattctaatgcagtcttagacatacttcacgcgagtgtgaaatgtaacgttatatacttgtatactgaccttgttacttaatcattgtgatgttttataatttttttgttatgatttcatgtttaa

SEQ ID NO: 140976 - DNA, 455 bp, Zea Mays
aactggtgcatccagccaaatgccctggactggactggaggtgcagtattctgggggagccacgaaaactgcgctgccgagggaaaaaaggttcgtagtacaagaactgcacagcacactagcacagggagatcctcagatccggggatggcgcaatcaattactggcagtggcaacgccattaattgtttgtttactagtcatgggttaattggcatctgataatgatttattatatctatgaatgtgttatgtgtagggaagcattttctttattttccttgagccttcagtttcagtggcacgtacagacagtacatgtaaaatcgcttgcagtcgcagcaagaaatggtctgtcgactgtctctccaaagtttggcttctgaaactgaaagccattcaggtgcgccgttcctgcctctgtgttgtgttttagtactagcgtagaatttaag

SEQ ID NO: 140977 - DNA, 357 bp, Zea Mays
ggggtatcgcatgatctcagccgctcgatctgattcaatggcccagattaaatcttcctaactctgtaccggcacgtgcgccaaccgttggatcgagatccgatggcccggatccatttaaccgaacagctctcctatggtctaatcatatccgttgaacaccagatggatggcttagatcttggcttcaatgtgacaacaggagatctaatcttcaccgtccagtgagcgatcaacggtcggtggtaatccccctaccctcgctcttacgcaatcggcacgcggcggcgcccgagcatcacacggtggttcttcaccggtgtagtcactgccccgcgccccagtgctccattcttc

SEQ ID NO: 140978 - DNA, 378 bp, Zea Mays
gttttgcatacgctcatgcagcttgagtcttctgtgtacaggcaaacaaacataagcttagacagagtcaacgcatatggtggtctaagacaagacggtgctgttaaccaaacagtgactcgttcgtcttgcaattgtagtgttgatggctagtttggctggtaattggcctccaatgttaggcatgttcatataatgataataataacttcataattgtccatccagcgtcatgcttgttgtttggatgaactccggtccatactaattcttaacgctccagctccttgatttcctttggattactgaaagagttattctgatgggtaagcaaggtagagagcaggttgaaattgattctgcatttctgcaggtggg

SEQ ID NO: 140979 - DNA, 553 bp, Zea Mays
ccgcgcctataagagcagcacgacctcggccgtactccctccgcaccgcgtccaactccccagagccatcccctagctccggtgacctccccgcgacccgccaccacatctagagctcgaccaccgtggccagacctcttcctggccacctcccaccgatctagtgcatcgactagcttccctggagctccgtaaagcttcccgaagcaataaatcaaacacatcctcataggagacgtcgttccacccttgccggagttgttcttccgccgacacgtgtggccacgactaaccagtaagccatagttcaattactcgcgcccatgtctgacactcagtgaacctcgctgcacgttttaatcgaactataccgccatcgttaggccagaacactcgccgccgatgagctcccccgcctgcgcacgaggaccgactgactccgaccaccgccagcgacgaccgaccattgacatgaccgtcgtgacctccccgacctccttggacacctcaccgaagctagatcgccgccggtaagcctcgtcgcccttttctc

SEQ ID NO: 140980 - DNA, 1317 bp, Zea Mays
gtcgaggaaagcgtgtgctttcgattcatcaagatggaggagtgccgctgcagacggtgccgctggaggtagctcgatgcttgcatgtgctagaagcagagcttcctcctccgcctatgcgacgttggtctggccgcgtcgtggctgccgacattccctggcccagtggccaagcttgtcacagttgtgacagccgtcatctcgtgccgacttcttgttgccaacggtgctgccttgggcgcctccgtgggcaccaccctcagcttgtcctcacgccctggccttggcgcctccacgcgccttgcgcggcttgtcgcgtttgcggccccgtgtccaggaggaggactccccttcttgtcaccctggcaggcctcccactgctcccgagtgagatgtagcttcccgccgatggtgataggcccagagagggcctgtggttcgtcaccgtcgacgaccttaagaagaccaatcgcttcttcgatcgtcatcgtggagaggtctagcagagactcgattaaacgagcaatctgcttatacttctcggggatgcaacggaagagcttctcgacggttctctcctcatcgtaggcgtcgtcgccgaactgcaccatcttctgcaacagagtgttgaggcgaagagcaaaatcatcaacatcctcacctggcttgaaggtcaggttctcccactccttgcgaagtgtctgcagtgtggtcttgcgggcacggtcgctgccaatgcgggtcgcagtgatgacatcccagtcatccttggcagtccgcttctgggaaagcgaaaactgcatctcgagtgagactgcagcaatgagggcatccagcgcccgtcgatcctcgtagtagtcgacgtcaccgtaccgaactgcttcccacttgtggcaaacttggagccgtaccctcatcaccgcagcccaatcgacgtagttggtcttggtgagggtaggccacccaccacctagaccgatgtccctaacaacggcctggaccccacggtgaccatggtaccgatccagggagggagagccgcgcagactgtagaggccgcgatctccgtcgacccagccgccgccaccgagagcatcgtcggcgtgtccgcgcccatctgggctgccgtcgcgtgcattctcacccagagcgccttcggcgcatctgcgcctatctaggttgccgccgcgcgggcccccatgggggtgcgcggctgcccattgtgttgcctgctcttgcgctgcctcccttgccagccggagctcgtcgttggtgctgccgtcgccggaaacagagccgccggcgctactgccgcgc

SEQ ID NO: 140981 - DNA, 450 bp, Zea Mays
agacaagcttcaccaacgttggcgcatactccagcgaggacaacttcgtaagaggcgatcctgagggtccaattgaatggatcagcaacgaagccgaagcttttgaggaaattttgagcggtcgtggggatgtctgcgccttctcaggtgacagaggaattgcgtccattttggagaagataggttgcgaacatataaaatctttggcgcaaaacgaagctgccttatctaatgaagatacaaaagtccccttagtcgaagcaagcttagttggtggaaagattttcaccgacatctgggaaaatgacggccgagggatggcccacgaaattataaagaaaagtgaaaaagatactcacgatgctagagaagcagcaaaggcagctgaaaagactgcagaacttgaaaggcggataggtattgcctaattacttttgactttatgtttta

SEQ ID NO: 140982 - DNA, 346 bp, Zea Mays
cataatacgctagccgaagggtatcttgtgatcacggccgtgcgatcaagggtggacgcgtgagattagatccccgaaccggtacgcatacatgaccactggatctaaaatcgacggcacaattttaatgaaacgaaggggtatatgcaggactaatcgcggtcgtccacacaggatctaacggtggatattggttctgaccgaactctatcatctaccaaatcctagccgtccgacacacatccaacggcgcgcatcagatctcccttccctggctcacgcagaacacggcggcgcccagcgcacggcggagcctcgccggagtgcggccaatcggcgaacaagg

SEQ ID NO: 140983 - DNA, 426 bp, Zea Mays
atccatcagctggacgtgaagaacgcctttctccacggccacctgaacgagaccgtctactgtgagcagccgcccggcttcgtcgacccggccgcccccgaccacgtgtgcctcctacagaagtccttgtacggactcaagcaggcgcctcgggcttggcaccagcgcttctccagcttcgtacagcggtccgacttcaccgcgtcagcctccgacacgtctctttttatttacaaagagggcgctgacatcacctacctggtactctatgtcgacgacatcatcctgacagcctcgtcgacccggcttcttcgtcacctcaccgagctccttcactccgagttcgccatgacagatctcggggaccttcatcacttccttgggatctctgtcacgcgttccaaggacgacctcttcctctcccag

SEQ ID NO: 140984 - DNA, 603 bp, Zea Mays
gataataacagtttccgtcagaactcaaaatcaataaaaaatctttccaaataatttcttagtttttttccagtaatatgcatcatcaagaaaaaaggtaatatacaattctgtttatatgtgtacacctttttattgcttgtatcggcttatactcattttttgagttactctgtgattatgaacatttaagtggaaatatagttgggtctttactaaccgatatagacatggagagaacccacaatgttattttttatgccttgttgactctggtttatgtttgtattagtaacatatatttatatggtggctaactttatactttcactaatgctttataatattttttaaggccaaaagaaacatggtgtttgcctggcactttcttcagtatttattatgtaaatcagaagttacaagagaatttctactccatagatcttgttttgtgatggacaattggatttgatacgattgtgttttataacgtattgttgattgttgagacttgagaatcggacttgacaaaatttaaagctcggtttagtgggttttcatgtttcgatacttttttgttaccatggatattttcattttttt

SEQ ID NO: 140985 - DNA, 557 bp, Zea Mays
catgtacattcataataactaaaatcagcatcataaatctttgatagctcaattaacttctctaaatcaaagttggcaaaagaatcccttggatcaaggcaagcaatacatccaagtaactgagttgatctttcagggaagcagttgttgaactcaacaagaacttgatcaatgacaacaatgaaaattccattatgaaaatgatggtagtaactcaccaacttagctccacgacacctttgatctgcctccagctggtattgtgtcatccatatttgggattactatgttcattttggtacaaaaactcttcactttctcaaataagggatcccaaccatttttcctcatgtcattcatattccttagaacagatccaattaatcctattgcacgaacaatattttgattctttatttgcaaacattgtgataaatcttgagtcctccccaatactcttatcataagatgtaatatgaacacaaactcaaaagtttccattctttatatcaaacccaatgcttgtgttttcttttcaccgtcacttgcatcttcac

SEQ ID NO: 140986 - DNA, 662 bp, Zea Mays
ggaggccagttctggagaacgggtacttgcctactagggtggtccagagctgtgtagccgtttagcttggttacataccctaagcctgcacactccaccattctatgacgggtaccctagtattcggaactatagtcttgtgggtccgtcaaccggggatccgattctagagaacggacacccatcccctggggtggtccggagctgtgtggtcgcttagcctggtcccataccctaagcctacgcgctccaccactctatgacgcatgtcctagtatttggagctatgatccaggggggccagacacacgaattgacttcccggtctaaatcctgcaggtcctgttgcgtgaatcaaaggataaaagataccagttagtgggggccctatgggcgcactactaaagcttcctagccaaggctgtgtgcaagtccgggtccaagtcgagactacctcctgggggccacgtcacgaatttttcttaagtatattggcatccagcctcgacatgtcgagcctacataccaggggggccagataccagggagaagttggtaacaaacgcacacagcaaaggcaaatagcatacagataagttctgtcactgttaggttaatacttcccaaaagtatcttacaagaccaaaaatattacaagccac

SEQ ID NO: 140987 - DNA, 1240 bp, Zea Mays
cttaaaattaatctcgtcctcgagatttaagaagaactagagaaaaggtggggaaaatctatacgaagctcttcttctctttcccaagttgcttcatcttcaccgtggtggctccattgaactttgcacatctttataactttactcctcataactcgggtcaaagtatccaaaatcttgatggggtactcaacataagtcaaatcctcttgaacactaaggtcctccattggtaactgttcctcaggcactctgagacatttctttagctgagatacatggaagacatcatgtacatctgacagatgatcgggtaactccaattgatatgcaacttctcccactcgcttcaagattaagaagggtccaataaggcgaggggacaatttgcccttaactttgaatctcctcattccacgaagtggtgacaccttgaggtacacatgatttctttcctcaaattccagtggtcttcttttattatcagcgtagctcttttgcctggtttgagctaccctcaagttctccccgattatacagacttgttcttctgcctcttgaataagtttaggtccaaagaactgtcttcctctagtctgatccaatatagaggagtcctacatttcctgtcatacagagtcttgaaacaatggcatctccagactggcctggtaaccattattatatgagaactccgcatacggtagactcttatcccaactaccaccatgcttaagagcacaagctcttaacatatcttcaagcacttggttagtcctctcagtctgcccatcagtctggggatggtaagccgaactgaaattcaatcttgtatccaattactcgtgcaacttcttccaataccgagaggtaaactgtgatcctcgatcagacacgatcttctttggcacaccatgtaagcatacaatccgtgccatgtacaactctgctaacttggctcctgaatacgtggtctttactggaataaagtgggctaccttggttagcctgtccacaatcacccatatagaatcatatccagcagacgtgcggggtaatccaacaatgaagtccatgccaatctcttcccatttccactcaggtatcttcagtgggtgcagtagtccggttggcctctggtgtttagccttaactctttgacacacatcgcacataaccacaggtgcagccacatctctctttagtccataccaccaatacttttgctttaaatcctgat

SEQ ID NO: 140988 - DNA, 541 bp, Zea Mays
cagtagtgctatatatgctatactagcagatctgctgcgtcgccgtggttccggcggccggccgccggtgatcgatccatcagactatacaccagcagatctgagttggctccgtcctcctgtagcccaccggtcacatgcattcaactacagtacgtatacatgcttcatatatatatgtcttctgggggggccggccaattgcctactacactaccactacaccacctccgtccagcaaaccggtgcatctcctggacatcattgggcggcgtggccaccgggcatggcgtctctattctctaagagatgtgtggctctgggggtgtcgtacgtcggagatggccggccggccgggatggagtacgtagagacgacaagtcgaacaagggtattttcgtctatacagctagctagaaatagggtcggcattaggcagtgcttatatatataggtcgtccaaaggcgcgcgtgttggacgtatacaatggcaaatggactgaaggaaagcagagattattacgatgatcgatagatttat

SEQ ID NO: 140989 - DNA, 872 bp, Zea Mays
gggagttccaatcgacaataaaaagcttaacaagtgtctttgggcttctactgaagagaaggttgaaaaaaaactgagtctttggaaaggtaggttcctaagtctgggaggcagactgaccttaatgcacagatgtttaactaatgttcccttgtacatgctttccatctactctgctcctaaatctgttattaggagaattgatattcacaggaaaaatctcctgtggcaggtcgtgattataaaaaaaaatcatttagcaaagtgggagatggtttgtactccaaaaaagcagggcggtttaggtgttctggaccttaattgcatgaatgttgctctgttatctaagtggttttggaacattgagaactcaaatggtttatggcaggaaattatcaaggctaaatacatcaaagatgttcctcttatttctgtcaaagttagacaaaatgattcacatttttggagggccattctgggcctgagagatgaattttataaatgttgcaaaaaggttgtgggtaatggcaagtctaccagcttttggaaaaacatttggtgcggagatgtctctcttgcagacaaatttccaaggttatacaacatagctcgtgataaagacattacagtggaaaaagtgttgaactctgatttccaggctctttctttcagaaggagaattattggtgatctttccatgaagtttggtgatttagtggcttgctgcaatacctttcaaattaacaatcagaaagacaaagtgagttggtctttagacaaaaaagggtattcagtgaagtccttttattcaaaaaaatgtgatcaggtacgtgtgccgtattattttctatggaaaacgaatgtgcctcaaa

SEQ ID NO: 140990 - DNA, 542 bp, Zea Mays
cgacaagccttcgccgtcgcctcggcggtactcagtcacgtgctgtcgtcatccgggcacgggctgtacgtagttagcacaacaatccgcggatcatgacactgtgtttcctgtctactgttcttttcttcttttttttgccaatcggcggcatactgcttccgtgactggtgtgacctagaggtaaattatttttcatggaagaatattggcctcgccattcctggaatagttgagacgcatggctggcttcacaggagccgacgaggagatggaccttttggagactgtcaggaatagtgggataggacgaacggacccacctcgtatacgtgtttactgtttattagtttgggagtttagattcaatgtagttgtctttggctagcagagttcgcggaaacgacgcgagaatgatttatggggctcccatgtcagtctttgctcccaacgcaagctccacctgcctccatggccgcccgtagagctcccccgatatggatgtcgttgcctctcgcacgccacacgtgcgcggcgcgccg

SEQ ID NO: 140991 - DNA, 642 bp, Zea Mays
tcaagagccagggatgccagattgacccaaaggaggaagctccgccaacactgcctcccctagggatagagaacttttctgacgttgaggaagtgtccctgctagccttgatgatcttctcagggagtttggggacaccctagaaaacgctcgtgcatagtgtgatatgtgtgattgtatgcttgtaatgaactggagtgctgaataaaataacatgtttggaaaaaaaataatatggcatgtgcatagtagtaaacctttctcccctatggcagatggcctcagataaaaccacgcctaccgcctcagggattggagcaaggtctcccctacgtgctgaaggagaagtcagtggagaagggagtgagacccacctccccacacctccggagctgccattagacctagcccaagttctggccaatcaaacccgactcattgaggtcctcactaaaagcctcgagaaccagcatccgaatggaggaagacctcatgacagaatgggggagttcctaaggctcaagcctcctacatttgccagatccagcaacccgctcgacactgatcattggctgcgcacagtaaagaggaagttagaggccatcgaatgccctgaaaaccagcgtgttcatcttgctgctc

SEQ ID NO: 140992 - DNA, 326 bp, Zea Mays
gggccacgcactttggcaaaagtagccacagttgtaccctctactgcgccgccggctacagaacgcgttcgtggtttttttccggctccgtacagtacactctcgttccaagttccaacgtcgccagcacacggcaggtaatttatttggcttgtccacactctctgccaccggcgccagtccataatgttcgccttgttcgtctatgtggacgttgattgttgagaaaatcccttcaatgccatccaaacttatattaatacctttagtgtcatcagaatttataacttctcttcaatatcatcaaatttaaattttaaaccctt

SEQ ID NO: 140993 - DNA, 532 bp, Zea Mays
tacggatgcgtccggcgagcggtggcgcgatgcagtggcagtgagcgcgagtgaggtgcgagagcagggatgagtggcacgggttgttgctggacttgatttataggcaagaaaggagagagaatcacgctagagtttatgccgattgaatgcgtatgcggctgtaaacgtaccattaatggtgccgagaaacagcagtcgcactgctgagtgggaaagaagggaaagaggcaaggagaaatggaacgtccggcatgacgctccactgctgagcacgagcgggcaagcgatccgacgcgagagaatgcaagcaacatcgtggtcaaaggaatcagcaacggcattcactatcaaagaatagaacggctagagcttaaaacactattatggcaaatagggcccacaagcaagagactaatgggagagagaggtgagggagtgacgtgggggagggctggcctgggccaaacggccgatcgtgtgtgcgtatgtgttttgtggtttttttcctacttttttccgaaatatattt

SEQ ID NO: 140994 - DNA, 546 bp, Zea Mays
aaaaacttgagcggtaaaaatagaagtaagacagaagcaagaacctggacaacgggactatcgtcgtaagataatcatgctcgcgggtgcggtgtgccctagcgttcaggttcagtattgccttgtgttgcttgcctgtgggatgcagcctgccaagctgcctatcgtccctgtatgcactagggtggggcctatgggaattgggggcccagatcggttgccctgctcgacccccctcagccattgcctggccatcaatgtgatgattataatgtgatgcttgatatgatgaagaggaaggtactgtggggtttgcacattgaatccggattgctaatttttggtaatgcatccactatccattatcaaacagcatgaatatgatgaccgactctgatgagcaaggccagtttcaccattacatctcaaataggttctgcgaataaatctgctcatactgatgccataaaaactgttagctaaagctatttcaagtgggaagattttttgatataaatacttgggatatgtgtgacagtgaagaag

SEQ ID NO: 140995 - DNA, 723 bp, Zea Mays
aacagatcttcagggaccatatcttcgagagtctgatcaaaatttgttagagacaattcttgcagaccaacgagagcagacaaagctggagaaggaataccactactctctccactgactatatagcaccgactgttcttccgaattaaggggatttcctcctcctcctcctcatcctcatcaatattacatacagtatacccattggggtcagcatcatcaaggttacacccattggggtcagcatcatcaaggttacacccattggggtcagcatcatcaaggtcacatccattggggtcaacatcatcaaggtcacacccattgggttcagcttcagtaaaagtcagtactggcacttccccggcagcaggagcagaagggccggcatcctgattcaagcatgacactcgctgaagccgtctctttttctttttcttcccctcagcaggagaagttggatgattgtttcggcgaggacgcttcgggcgaatactgtcaaatctttgaatgtccaaagcttttccagactccgggatggatgctacagctagtgtttcagcagggaccgaatcagaggaatcctcagccaacatgtccagcatggtacttatttctacatcgctcgaatttaaaggcatctcaaaatgaacttgcttctcatcattggggatttcacctagcgaagcaaccaaagcctcaacctcttcgggagagggtcgc

SEQ ID NO: 140996 - DNA, 537 bp, Zea Mays
gagggaggtcacatcttttggattgtacaagcggtgatgggttcttgattagctgttacaattggatcattcagctttgttgattacatttttgtgcagggctagtgagctatcctcggatgagcttgagcacctcgtgatcctggttggcaaccccgctagttcaagttccccgaccgattcctcaacaggaaaaaggactataatgatggtaggttctctcaggattttttcaacactcgtcatgtgtgtttaagacttagagcaagagggagagggatatggtaggggcaattctgtccttccaacaacatctaactcgtttaaatcttaaacacacgggagtgctgttttgtccactagcaaatgttggcaatgccattttggcgatgaagctgtttagagtgccaaaacagcaaagtgcaatctcgggagtggtataattgcaaatttcttaaggcgagatggatggtgaggtgtctcctcatcaaaggggccatggctccctcatgtaggttggcggcggctccttcttag

SEQ ID NO: 140997 - DNA, 450 bp, Zea Mays
cgtcccgactcccgaagtcctcatgtgagtgtcatcccttgccagggttgcacgtaggccttacagctcaccgccgtcgttgtggtaccttggcttgtgttgcccttggtcggcgagccaccagcgtgccccctcccctgcacgattcccaaccgacaaagccccatgtggttccttccctcccatgatgtgctggagcatcgtcatgcagagcaggaaggagaaaaccactcatgtgtgtgtgactgtatggagaagaaattgacccccataatagatcgtgggatcatctgtgcccccacactttgtgggcatctgtgtgatgaccttctaaccaaccacgttacaccacgttgcccagcccagccccagccataccttatccttttgcacaaaaccctagccttgtacaaaattattgtactattttccgaatcttgcgaatgttct

SEQ ID NO: 140998 - DNA, 491 bp, Zea Mays
gtgcagcgggggcttgggatcggggtcgccggaacaccgcgccgccgtccctgggaagcgcaccactcgggtctgtacaggggtagaagatgggcccgtgatcgttgatcacgtaataaacggataagattagatcttgacttggagcattggcgaccgttggatctcggaattgcggctccgatctgatctggcgatggttgatcggtggtcgttgatctgcggagggacacgcgggattagatccttacgtaccctttcgcgcgttgtattgtgaccattggattcgatctgaacggctctggttacgcgcgcaatataacagtcatggtagttttctagaagagcccctgccctttttacaaatcaacccgccatcccgcgcggtgttctctgtgtctagggaatctttcaagttagcccctgatctttttggtatttggtgtgcagtccagaagatagtgaaagtagaaaattaattatagaaattg

SEQ ID NO: 140999 - DNA, 511 bp, Zea Mays
ctagctcatttagttgagccgacaagcatcacaagcatgcgagggtgctaaaacacgaataaggagggtgagtgcggacctgagagcggctagcctcgatggggtgattcacggtggtgcagatgaccattttgggggaaaacccaaattctacggctatagtggctaatcggagctgagagttagtgtcttgggttcgtgataacttggcgaagcagagtggggcatcaatttataggagctttaggcggcggctccgaatttgggagaagagtggagcttatcttcctggtgaggcaatcaccgaggctcaccgtggagcgcatgcgttcgcctagcgactgccactatctcggggatgccacgatcatggcaatgtggtgaatcaggcgactacgtgtcccttgctgcgatcacggcgagcaccggtggcgatattttaccgaacgcggcaggcaagtgggtacggcggtgactcagctccggctaagaccttcttccccgagatctt

SEQ ID NO: 141000 - DNA, 452 bp, Zea Mays
gctttgcaaagttggagtgcgaaaacagtgggctgtttgaagctgcagcttgagatggctagggaactccttcatatgtttgagatggctcaggagcttcgggttctgtctcctgcggaggactggttccggcgtgctttgatgaagcgcattcttgcgctctcctcctggactagatctgtggcgcgacttcggtctcgtgttacttggttgagagttggagacgccaacacctctctcttccatgctcaagcaagattcaggaagaagaagaattttattgcttccctaactaccaccgagggtgaggtcttgacttcacacgatgacaaggctacaaccctattcgacttctacgatggtttgctaggtactgcttttctgagggatgtctctatcaaccttgatgagctggggttgcagtcctttgatcttgaaagcttgaatgtgcc

SEQ ID NO: 141001 - DNA, 357 bp, Zea Mays
taaattggtctgaacctggtgaaaggtacttcttcaggccggatatggtgaaagaaactgaagaaagagttcaaaggataattcataatttgaagaacgctcaagctcgtcaaaagagttatgcagacaaacgacgaatgcccttatacttccttgtgggggactatttctacctggaagtttcgccaatgaaaggggtatcacgtttcggggttaaaggaaagcttgcaccccggtatattggtccattccctatacttgagcaatgtggaccagtggcataccgactccaactacccgaaaccttgtctgctgtgcataatgtgttccacgtgtcacaattgaagtgtcttcggg

SEQ ID NO: 141002 - DNA, 505 bp, Zea Mays
cgaacttcttcaaaacttcaccgatcatctcataaagggggaaccgaagtcctgccctgaagaaggttttgaagacgacgacttcatcctcttttggctctagaatcacctcctctccagcaaaacgaactagttcgtcatcattctctccgaagtatcctagtttctgccttaactgtggatctcccgaattcgatatggctgggtttgctcgggcttaggatgttgtcatcatcctcatcttcattttcgctattagcttcggcaatagtctgttcagctttggcgtctgtcggaactacttctgtatcttcttgcacaaccaaccagaacgcttcatcacctccgaaatcggggctgtcttagaagtcccaacttcgtctccttcgcgcgccaccctagcagtagatcttactctagctatttcagtgtccagtctttagcaagcaaagttacacttaagtgatggaacgtttgtctgaagcgtaaagcagcaagctccgac

SEQ ID NO: 141003 - DNA, 486 bp, Zea Mays
ccttatatattgggacggagggagtattgtgtaaaactccagaaaaaccaattgggaaaaatttagagaaaatcaacagtatatgatgtctttggtgtctatcgaaaacccagatgaaaaaaatcaagagacagacatgtgcttgtgttgacgttgcctcattaaaaacctaatatgagaaaacttatagagtaaaacttagatagaaaaagagtattgttacaggacttaatttgcataacaccaatctcaccactttgttggagttaatgaggatagaatagcttgggggagatatgtttgataacgttgctcttgatataaccttgttgcatctgagcaacacaagttgcattatcttcatatataatggtgggtgattcaatggaatgaattccacattatgattgaatgtgattaatcaccctttgaagctagacacattcacttgaggcttcatacaatacaataatctctgaaaaatta

SEQ ID NO: 141004 - DNA, 359 bp, Zea Mays
gctaaggactctctgtcttgtgtgagttccaagtgaagatatggtctaggttggaagatacggtggcgcaaagtcaggtctgtctggactgttcagcacgagacaaaacccatgtcaattcatgtcaaacggttttggtttgagttcaaactttaccagagtgtgcttagggtattttggtgccactttgtcaattggaccatgtggatttagagtttgcaactaagtgaacacatgtgatctttagaagtgggctgaaaatagacttagagaaaaagtgattttttttcttttgtgcttcccacttgagtgatcattttggggattttggtgggacctttttgggaaaacctccttac

SEQ ID NO: 141005 - DNA, 1254 bp, Zea Mays
gtcgtatcgtccatgttagtttgtcatcgtaaggcaataaactagtgtgatgtatctctgttgctccaagtgtattgtgaggtcgtgcatgtaatgttcacaattacgaagtattgtcttaactagccaactactttgttcatgaacactacatgatcttaaataaaatggcgactcaaatctcataacaaactacataatagttcataacataagttctcacacaaactccaatacacttcatcacatcaaagatgtcatgcgaactacattatggttcataacaaaaatgaatacgaaaacaaagttctcatgcaaagtacatagaagttgataacaacatacgacatattccacaatagatcctcaaactgtggcaccaccttggcccaaaagttttgatataatcttttgttggttaagcaggtagtattgcctttgcataggattgtagatgttcaaatcttcgcccattatcattagcacctcttttgtctcttgcttgcttttttccatatctagtctttcatgctcaatggacaacttcttcttaatgttcatttattgtttgcgtagacgggtgtactcctgcagtttcctcccctccacattggttgggttctggtacatgctcaaacgttgcaaagacaattctcgaatcctttgcaagagtgcttagagtcagtctccgatgtggtcatggattttggcttcttgcccttagccttactagaatcgtgtcccaaagtcctcttttatgttgtgatgcctggtattgagtcttcaagatccaaatcaatcatgtatgactcatttggcataagaggtatggtgcgtggttgttgtccaatgtgatggtccacccattttggttcatccttaagtacatcccaacaatgcaagaagtcaaatggcttcttctcaacagacccaaatctgataacaactagagatgtctataaaattaaaaaaacatgatcagactggtagcagtacaggttaaggcaaattgttccagaaaatgaaaacacatgatcatcctcatacttgccttgtcttcacttgttagaccactaggattttgatgaagcaccgtagccatgtatctaaaaaagtgaacattaagacttgatgttgtcccacctactcataagtgacttcgtagacctttcaggagtgtctccatgcctagagttgtatagttgtgtaatcctgttctaagaatcttgcttattttgacctatgttgatgatg

SEQ ID NO: 141006 - DNA, 505 bp, Zea Mays
gtgaaaacccgtgaagtgttctcctctcttgtttgaagccctaggctcctccttttatagcctcaaggagggatctcaggagcgcctaggtttgtcgtatgaggagaggagatgagcccgagcccctatagcagcatggccaccaaaattgcctttgtacttgcggttgacttggagcaaggagaggacgtccgacccctgttatctcgcatcttgaccgaggagagagccgaggccaggtcaggggctcgaacgcgtacctaggcctatcttgtggatgtgttgtcagagtcgtagttgttggaatagtgataataagtatggtgaaaagcacacggtaagtcgtcccgtatggcgtaaatcagacttatcaccaaccccacagcttttgtagccatcctgttatcagctgtctctgcggaggggttggtggcgttgggcgtcctttcgtcgatgttatctgggtcgaggccatgctcgggcaaaagcgaaggttcctctcgag

SEQ ID NO: 141007 - DNA, 292 bp, Zea Mays
caattttgtgtatccaccaaagtgtcgcatgtgaattaatttgcactcatgttgtttgtatgttgtttgctcaatgttgctggtacacaaacgaatgttcatcttcctatgcgaacaactaagtaccaattaccgtttaattccccatcagaaccccttgtttcttgcatatccatttctttgaattggagtaagtaactctgtctatgaattcgactcagttaacctacaatttcgagtagtctttccttacatgactaaccattgcatgcaactgacgaaacctttactt

SEQ ID NO: 141008 - DNA, 671 bp, Zea Mays
tgcgggtgcggtaactcttatctagagaggttcgcgattgtgttggttctcagttggggatttgtggtttagtatgcttgagccctctggaacctgatcatccatgttttaggcccatgacttcgtgtttgtgcgtggttgtggtcgtggtgtggtaactcttatctagagagatttgccattgtgttggttctcagttgcggatttgtggtttagtgtgtttcagccctcttgaacctgatcatccatgttttaggtccatgactgtttgtgcgtggtcgtggtgcggtaactcttatctagagagatttgcgattgtgttggttctcagttggggatttgtggtttggtgtgtttgagccctcttgaacctgatcatccatgttttagatccatgacttcgtgtttgtgacttgtgagtggtcgtggtgtgataactcttatctagagagatttgtgattgtcttggttctcagttgaggatgtgtggtttggtgtgtctgagccctcttgaacctgatcatccatgtttaggtccatgacttcgtgtttgtgcgtagtcgtggtcgtggtgtggtaactattatctagagacatttggattgtgttggttctcagttggagatttgtggtttggtgtgcttgagccctcctggacctgatcatccatg

SEQ ID NO: 141009 - DNA, 511 bp, Zea Mays
cgggcatctggctcgtgctgaccgctgtttaaacatctataatcatgcaacgagttaatttaaaatagttgttaggggttatttaaaaaaaattactcgggccgttgtctgctatgtctatttttccgcctcctactagttgagaagccaaggcaatccttgagagagagagctgggattcatccctagctgcagctggcagagtggagagagggggagcccctttttctcgtgacgcgatggcctgatgagagccacaataagtgcaatggaaatgacgagtggagagagagatagaaacgaactggcctggccggagtagcaagagctgcagtaacaggcagccagctgccttgcgtgtttgtgtgcgccgggcgagggaggagcggcaggcagcagcagaattgcagacgcagcagctcagcatccggagcctgtccgtgcccggataaacagggagataggacaaaatctaaacgaaggtcgcttcgccttgcccccgctggcccgg

SEQ ID NO: 141010 - DNA, 824 bp, Zea Mays
atgggagccacctcgttttcattcacaacggcagcagccattctccacctcgccctcctccttgcagcagctcgacggcacggcgcgacggactacaccgtcggcgactccgccgggtgggccatcggccccaactacctcatctggtcgcagaagtacaacttcaccgccggcgacaccctcggtacgtacgccctgtatatattattagctgctgctggcctcctctctcctgctgtttgatccgattcacaaacaatctgccgacgcgccccgcagtgttcaactacgtgaaggagcagcacaacgtgtaccaggtgacgcaggacgagttccggacgtgcgagccgccggcgaaccagtcgacgcgcgtgtgggcgacgggccacgacctcgtcaacctcaccgtgccgggggactactacttcctctgcaacgtcgccggccactgcctcgggggcatgaagttctctatcgccgtggccgcgccaccccctccgcccccgccgccgccgcccccgccggccctgacgccaccgccaccgccgccgccgagctcgggctgcgtgccgttgatttcacggcggcgcgcgtgggcggaggtggggcggattccattcctcgcggcgatcggcctgctcgttctcacttgattgtcgtcgtcgttggtaggtacggtggttaccaatactacttttttttttgtgatggttgacctggacgttttcttggaattgatggttgggatgaactattgctatgcaagtaatggcgtgcgcatgcatgtctacgtttgattgatagtgttgactttgtactcaaaa

SEQ ID NO: 141011 - DNA, 430 bp, Zea Mays
gggctactatcgaggaaaagatccctggggcccaccagtcagaaagagctcatgggacaagagccaccagattgctggggacctccggtcagtgggtgaataagggaaccgtctaccttagaagcgcccgcccccagataaaccataaggcaccgagcctagggtcgggcgtggcagagctagaaaggggtccaggcagaccgaagagaagtcatttgagtggattcctcacctagcccaagactaacccaccgtaaatgtcgactacatcaactacgcctgacaccgagccgcagtagagaaccggtctgcctctcactcatgatctccgaacccctcgaactgcagcacactcataacctaagagtcccctggcctgcaacacactcatgaactaccgagactaggcttgagtgtgcaggccatctac

SEQ ID NO: 141012 - DNA, 440 bp, Zea Mays
aaatggttgataattaaggacattaaatacaataccagacttgtgtgtatttggggtattctttgggctgtataaagtttatagcatgcttccggtatatagaggtcgatgctaattcttagataaacaaatgatagttgggaggcttagctggtagcatgctttttgtatgttgcacttgcactcgcccacaattctttctctcaccctcttctcttcatgcttcttttttggatctaccatttagcgcaagcgaacacccttaagggaaagtattgttgcttatatctctttttctaaacttctttagtgctttccttttagtttgagtcctgcttgttcaaccacacaagatgagtaaactatgcgccagctcatgtccaggaaactaatctccatcaacaacttcgtatccatcaacaatttcgtatccatcaaca

SEQ ID NO: 141013 - DNA, 303 bp, Zea Mays
tgcgtcatagcctaatcacgcgcaaagttctgaacaaaagcgaatcatgggattacaaatgtgcagttattcccttcatgccgaccccatcgtgatgttcgcagcagcgctgaaaccgcccgtgaatgggtcctaagctgcaacagatgaactcaccaaatagaccaatgtcgttccgagaattgccaccaatgggtggttgcgaggtgactaaagctgttaccacaccccgatgaggacccgaggatcaatggtcttacgcacggaggctgagacatcaagaaggcgcaaactataatcccc

SEQ ID NO: 141014 - DNA, 490 bp, Zea Mays
ggcaggttcaccatttgcattatgtttccccttccagagaaacgatatcacgattttatcaattttatttcatgcccacaccgtcaagggaaacactatatgatgataggtaggcatagaggagaagactaaagagactaaaatgagatgccctgctttgtttaaccatcttcagttgcgtagacagggggctagaagggcccatcccccaacacaaagaaaaattgttttgtagttgtttttatatatggctaaaataaaagagttagtttataataagttaaaatatagtgtcgtggtttcggaaaccgaagaacaataagatttgtattcggcagggtgctagcgcagatccactctgaatggtgagctacagggagctcgaaggtggatctgagacatggggttatactggttcatgctagagccttagttcagtgtagtgctgatcgtgtattgcttagagtgtgttacagttaggtgcttgtgt

SEQ ID NO: 141015 - DNA, 286 bp, Zea Mays
ccgaacacaattagactcctagggttggtggggatattaattatttctcctaatctcaagttcctccttgtacttgtcattatatgcataaaaagcctcgtgaacattatcctgcatagcaatagccatgctctttctaatggaagtggcgaaaagctctaacaacttttctacaccttgaagggtatggtttgggatcttcaccacacatagagcatccaaactgtcatcatattgatcgttgttgtactggtagtagatgtatcaatactctatggcccatttg

SEQ ID NO: 141016 - DNA, 324 bp, Zea Mays
gaccatatctacaaaatagatcctatctctaaaaccaaccctatccacaagacagatcctatctctaaaaccgaccctatccacaaaacagatcctgtatctaaaccgaccatatccacaaaacaaatcttatctgtaaaactgaccctatccacaaaatagatcctatctatacaacctaccatatccacaaaatagatcctatctctaaaaccgaccctatcaaaaaaaccgaacccccacccttccaacacctcgccagaaaccctgattcggagtccaaacttaaaacggacataactttcgcctcggaactcgaatcag

SEQ ID NO: 141017 - DNA, 678 bp, Zea Mays
cttcgatcggcatagcaggactcgattctggggcagaagggacaacttatacacgttcaataagctttggcacattggccatctcaatgctcttagtttgtgtgtcaagactttcactttcttcgccttcggcacactagaagaagctgaagctgcaaattttcttttccctctttatttccgaataggaaagcagtaatcaggataaataaacccgataacatcaaaaaccctatttagcctcttttttcctcgagcgccgaaggtgactattatagcttcatctttagccattgagtaggccccaagcagctcatcacttgttgcctctatagcatctaaccagtcatcatttggttcatcaaattgacttctgtgtcggaaggtatacttgagatagaccagaccattttggctggagccagcggcagcctccttcggcatttcccaaccatttgcaaggggccacactctgtaagcaatatgctcttggaccaaatctctcatgccaatataggtgcatatcgtgttaaaagccgtctggcatacttgcacgtcattcccaagtgcgactgaaggtcttgtgatgccaaagcgtgaccatataggacgttggatgattccccttacatcctccctctaatccagggtcgttcttcacataaaaccactactgca

SEQ ID NO: 141018 - DNA, 666 bp, Zea Mays
gcggtgttggaacggagtatccccaggagatggctgtggctgatgcacaaggcctgcgtgagcctcctgctacggacggagaacggctgcgggacgcccagaatgacgcccatttcccctgccatgccatgcggccctatcttcatcacaagctgaaagagggcagcaaacacagctgatcaaaaaagaatcaagaacgccactgcaatttgacgttattgtgtggtgtttgaatggcttgccttctctgttccatcgtcagctgttgtcaacacgtcctgaagcaacaagcaagcagcaggatcggcatgaagagtgttggagcaaggatatataaggttgtagagagaagacagtgcagtgcttaccgctgagccggagacgatgatgtagcaggccgtggaggtcaccttctggaggatgatgtccgcctggggtgggaaatactctgccctcatctctgaaaccagccgcacgacgaggtcgtcggagactccctgaaacaggtagcagcgctggaccgcgtccctgaagaggtggtgcgcgacccgggaccggagcgccgtgggcaggtcggacagcagctgctgctggatcacctccgctgtgctgaacctgagctgcgcgctcgccatcatctgctccctcagctccggcggcagccgg

SEQ ID NO: 141019 - DNA, 723 bp, Zea Mays
taagtgaggtgctttgtgatcaaacaaaatgtatgcatatgatgaaagaaaaactagtggaggtattggatttaaaggatgaagggagggggaaaaggtggatttagggtttcaaacctagattaggatttttgggatgctacaaataatcagaggaatgactaaaccacggtgccttgttcattccagagttaagagtaatgtgggtgtgggttttagccggtactccgtatctatctcagatgagtatgcaaatgtagatatatctaggaaacaaaagttgattattcagaaaatctgaaacgacaatagattgcaaaaacaaaaggatgctctctgaaatctgatgttttttctttacaaccaccacctatgctgtcatagaagaattttgtttgaacatgaacctttcacctttttacatagaatagaagtcctgatacacctattttaaggaaactcgctaccaaaatatccagagtgtcatgtttacgaattacagtggtgtctaatccaaattaaaatcataggcaaggtaatctgattgatgttcagtgcatagaaacactttttaatgagaacaccactgaacttctattatttcaagggacacatcagaagttattagcatcataatatagtaagtcggaaaagatgtcccgggatgggactcacggactgtacatgttcctaaatttgaaacgctaaatgctcaccatctct

SEQ ID NO: 141020 - DNA, 498 bp, Zea Mays
acaatggccagtgcactgttcctgaccttcacgagttgttgaaagaacgtcagttgatgctccaacaggttaaaatgcatctccatcgggcacaacaacgtatgaagagacaggctgacaagggaagaactgactgtgtcttggaagtgggccaacaagtatttctcaaattacaaccttactgtcaaacttcagtggctgctcgcccttatcccaaactagcatttcggttccatggtccatttgaaattactcgtaagattaaccctgtggcttatgagctggctcttccaccaggctcagaaattcatccggtgttccacgtttcccaattgaagcctaaagtgggatccaatgccccggttagcagcacaattccagatgtgtttactggattacagatacctgaggagatcctggattccaaactggtttggcgtggtggcaagactgttgctcaagtcttggtgaaatggtctggctgggatccatctctgg

SEQ ID NO: 141021 - DNA, 434 bp, Zea Mays
gccgacctcaggtttggggcaccaaggctggtcttcgaaaacatagctaaggcagaagctaccagactagaggatattgacatattggaagaagaactattgaatacagtaattcagtcagctagataccagcaaaccctaaggcgctatcatgataaggccatacgacatcgatccttcgcagtgggagacttggtccttcaccgaattctaacgggggaaggccagcacaaattgtcgccactatgggaagggccattcatggtagcaaaagtcacttggccaggatcatatctccttactcagatggatggcacggaaatagggaattcatggaatatagagcatctcaggaagttttacccctagctagatttcaaaagctatcggggcagcattgtattctgtaatcagaaaatacatcatcaataaaa

SEQ ID NO: 141022 - DNA, 544 bp, Zea Mays
aagatatatctcaaatctttttaatacttcaccaatcatctcgtacaatgggaatcgaagcctggcacggaataagctcttgaaaaccaccacctcatcatcctttggctatggaattatctcttcacctgcgaaccttatcgagtcatcatcgtccttccgaaataaccaagcttcttcattaaaactaagtcctcaggtttcacagtggatctaccaaactcgatatggttggccttgcttggactcagtatgccatcatcttctttgtcatcacttccagcttcggcaataacattttcagcttcagctttagcattatccttctcgggaaaagttcttcttcctcttgaataaccaacccagagcgcctcataacttctgaaaatggagctgttttagtagcctcagtctccccacccttgtttgtcagccttgaagtggatctaaatctagccatttcagttcttgagacgaagctaactttcagttgacttaatgtttgttcgaagaccagtcatcaagtgcacagagtgcagatagc

SEQ ID NO: 141023 - DNA, 368 bp, Zea Mays
cagaagcagtagtgcaattgaacagggagatgttgcgtactggaaaaaagaacatgatattgcgttgagattctacaatgaagtaaattattgcgttctccaaatgatattttaattgcatttatagatgccaatataactctccagcctctgtattattggatgattgcaggctgctcaggttggtcacgaggtcgcaaccttgtatgcaaagaagagtctttgctatctgcatctgcgtgatccagcaaaatttatcgatgaagcaattaactacataaatatggtgcagccagatttatcgacacttaaccctgagtctgatgctaagaaattggtgctggtgagttgttggtgctagcaattaa

SEQ ID NO: 141024 - DNA, 1152 bp, Zea Mays
aatgttagctagcgacaacactaggagagtggaggtaaccaattttgggttgcccggtgactctgctacctcgggcaggtactgactgatctcattactcgcatgtctggacgatatccgatgactctagctaaaaatatacaaacgtttgcatgtctgccacactacacttaaatctctggtctcccggcaaaaacgaagatcaaactagcaattagaaattgtgcgttcacaaccattaaaatcacccgtagcccgtgaagttctcttctccccatagtttatttacttgtcttctatatataaagggctaatgaaaagttgagcaaagtcatctcgtgccattctaaatagaagcactactgatggcccaaaacaagatgattgtggtggttctcctccttgccacctttcttgtggtggcaagatcgttgtgggttccagaagaaccctcaaatgcggatgacataagaggtgcttgcatcgaggagtgcaccaaagaaaataaggctcctggcgacaagaagacatgcgaagtgttgtgcaccaagctcacaaaaaagcctagcgaagaaggcaaacatgattgatgaagtagcactccgataatatataccctagtggatcagtggtcatctttgtagccatgtctgccacacgatggccttgactatattgtcttattgttttgtttttggtttccactagtatcctaattccttgttcatataacctaatttcactcaaagcattttatatgcttcacttaattaaataaatacaaaggcaatggcatgttctgttttgatctaattggaatatcatagggcaaaccgatctataaaaagaatggtaatgaatcttatatatagatatgttcaatgtgcaagtatgatcaaatactgaaaaagttgatacgaataatagttgttgttgagcctctcacaacattttgagtaaatctcttgaaaagcaaaacgtgaacgatatggtagaaccccaccattatatatcatggtgcatcaatggtctttatgtagccatgtctatcacaaaatggccttgattaaattatcttattgtttgtgttttggttccacaagtatcctaacttcttattcatgtaccctaatgtcactcaatgcattttct

SEQ ID NO: 141025 - DNA, 793 bp, Zea Mays
cgcggcaccaagagagatcagtagagagggggatctagtgcaaggttggtcaccactggcgtccctcggtcgttggggacttacagcgcggtctgtgatcatcacttggtggtgggggagctccgcctagtctccaggaataagttcttggccacatcggcgcgattgggtggcgtcaacgctagaatccctcatcagagtatgggcgcggctgcaaatccgccctgcgccatggctgaccctgctcctgccttcttcatcggtgaggatctactccgttgactcagctcatcctctatacgtgtagcgccggtctacgaccgatttggggtgccataacctcgggtcaccggttcacaggaatgcatcgccggcttcaccgccatggttctcgcgcgctgccatctggggactatcgcggggaagaaaaccccctggccgtccgattgactatgggtggctggttggagaagatggcgtgggatggaaacggtgaccgttagatcggtaaggtacgatcaagattagaacaacagataacccttcggcactttgaatccgcgtcattgatcgtcgatccggtggtccggggtgatctcatttgtatgcacgtgtgtgtggtggtggggatcttgtgcggatcggatcccgtgcgcctcaccatgtgcaccggggtgtggcacgatctcagccagtcgtaggacgccacgtgtccttgtgcaggaatccgagattggttttgcagagaggcccctgtctttaaaggaaagtaactcggtgtgcgtgtatgtgc

SEQ ID NO: 141026 - DNA, 664 bp, Zea Mays
ttttgaagtgcccctgaaccctagtgatccagagataagcgctatgcttgatttgctggctgaggattcttccgatgctgctcctgctggggcgttggtagtggcgcccctcccagaggctgatacaactttggatactcagaagcctgtcagcactcgcccgaggcgcccttgccgagccagtcaacctgatccttctgctgatgagcagaaaaagaaaaagagacgccttcggcgagtatccagtttggatcgggatgtcggtacctcggttcctactgctgaagaaatgcctgtgactgaatttgctgatgctgatcccaatgggtgtacccaatccgctgctgatcccaatgtgggtgctccatctgttgctgatctcaatgggggtgctgcttctgttgctgatcccaataggggtgctgcttgtgttgccaatgtggacgacgaggaggaggaagatgaagttcctttgactcggaaaaacagtcggcagttcatcgccagcggtgaaagtagtggagttccctctcctgctttgtctgccctcattggtctgcaagaactgtccctggccaactttgatcagactcttgaggatatggttccagaggacttgttatcagagccagtggatgatggtgtaatggaggtttgcgctgac

SEQ ID NO: 141027 - DNA, 683 bp, Zea Mays
gtgagtgtctatagaatcgaagctagagcagggtcaatagcaggaagggcagcaggggtagcacgagaactcccagcctcatgatcatgtgagcgtggaggcataggaggcggaggcggaggtggaatctcaaaatcatcatcatcatcatcatcaactgctgcatcctgagcttcgaactgatgaagagcagcatcctcggcctgagtgtcaaaaactggagcagaagctggcacaggatcctcaggcgctggacggtaggatccaaaaacaaggcgtgaggcctcaagtgtgccctggaactgtgggggcgagtcagctgagcaaaaatgtggcacaagtagtgagcatatggcagctaacgacgagcacgcataccatccaatacggtgtcctcgatctcacaaataaggaaatcaacaacgtcaaactaagagtgagagaccatggcaccaaggagccagagctggatatgggtggtagcctccctgtatcccatccgcggcagaagtgtccgtctcataagctgaaataggaacttggctgctgtagtgaaatctgccagtgagcgtcgcgacccatttgagaagggcgggcggaacagagccacgacgtgagctgtacccggagccacaccgccgtgagggcgacgaggagggtcagaggtgccgtagcataagctg

SEQ ID NO: 141028 - DNA, 491 bp, Zea Mays
cttcgcctgggtcgtcaccactggttagtactcgtccaatctgcatcgtggtcttccccgcatagggtagcgcttaatatttcggagaatgggattggagaagggaagtttgggtgcaccagcaatggtgttgtggcggcgtttcgtcgtcgggctgggggatgacggtgagcgggggaggaaatcttgacgcggcgcgtgaaccgttagatcacgcttgggcggtggatggatttcgttgagtctgcgtcgtagatcttttgatgggcggtgcaaatcggtctgggcgatcaacaatcacaggagcgatccggtccgttggggcggaatcggacgggtcagtggccgtctcgttcttttaaatatccgccgtcagatcttgatccgtaggtccgcgttgcataccggttcggtgcgggaggagagtaatccaaaccctcgatgcctgatcggacggtcgagaatagaacattatcccttcggctgacaga

SEQ ID NO: 141029 - DNA, 495 bp, Zea Mays
cttttagccgtggcagcgtggacggtctaccgacgtcgccgtggaagcgccggtgacctcggttgcgccacgccccagcttgttaccatgcggcggtaaccgtggcacccttaggagtgttatccttgcaccgttgcaccggtgaacgccacggttacagccaccgtgttcttccctatctccggccgtcgcgtatcttcattcaaattcccggccaccgctcgctccttctataaattgagcacccaggtagttgcgctaggtaattgcgaagccaacgcacccactcccactcgtaattgttcatctgagctctggaatttcccattcgccccaatttcattctccgccacccgaaactcaacctcactgcggccagccgtactccggtcagtccaaccctccctctcccttgtttaagcattctcacatgtctacaatgcttgctgacccgtccaattggactaggggtccactaaccgtcgggaacacgtg

SEQ ID NO: 141030 - DNA, 316 bp, Zea Mays
gacggatcaccgtggtgcgtgggttgctgctgcggtgaaatcgcgtcagcggagacagggaactccggtgaattcttcgccgtagttgaaggaccaccgcgggaccgcactctgccgccgaccgacccccttgggcacgccatcaccggtgagtctcggttacccatattcgccatcatctgccgtacgtgttgctctgctcaatcggaatttggggtgtcggtggcgcacggtcactgttggcggcaatggctccgccgtaggagcagagcgccgtcgtgtgtgatctgcggaggagaagatgcatccatggccg

SEQ ID NO: 141031 - DNA, 534 bp, Zea Mays
cgcacttattgtgctattccagctgcacccttaggcgacttttgcgcggagtgtcgcacgcgagggtagtctacgctgcctctcgtggtgacttcggagtggtcgaatgtcgaagaccatcgatgtggtcttttttcgacatgctgtatcttagtttttgttttttgcgggggcttttgcaggtatattacatggctccgcctcgttaaaaacctcacccccccgggaggaaaagagtgcgggccgagaatcgtattgtctggtggattacaagggcgcataggccttgaggttttaacaaaaaatttgcgtagattgtcgatgtttcaggagtgctctaagtcttcgccggtgggcgttgatagcctgtacgcgctgggggatgccttcaacttgacgatgaatggaccctcccattcggctccagcttaccctgtgactctgtctgggtggtccggacgagtatgaggtctcgtgtgttgaactctcttgggacgaccgcgttgtcgtgccaggccttggtttgagcttggt

SEQ ID NO: 141032 - DNA, 276 bp, Zea Mays
tcaagggtggtgctggcggttgcccagcccccgagggtgttgccggtgatgatccaactctgatgggcagtgcgagctgcaacccagcccccgagggtgtccgagcgagctccccttctcatacctccatggatgtccatgtcgggtcttctcggccacactctggtggcataatagcagcgcatgcttcagatgagggagtcgccttagaggtcagcgtaccagatgctggggttctgatgcctgctagtggtgttgaactaatcccctgcgatg

SEQ ID NO: 141033 - DNA, 379 bp, Zea Mays
gtttaaggtgtctccatcgcgctgtttcggtacagtagtgatagcccagattgtacatgtccaccgcgatctggccggccaagaccaagaggttgctgaagcagtgaagcatgtgcagacacatgagacatgggtcctatcatccacccaccatcaccgtgccatttcttgatttcggaaccagcacgtcattgacgattcgctcagcatacactccggcccaactccagaatggaatgccggccgggccattataatgggtcatgcatgtgagccagtcacatataggtagatagtatgcatggccggcggccacgcgtttcctttcggcaacacggaatgtaggagaacggaaattaaagctccgcctttctcctcc

SEQ ID NO: 141034 - DNA, 504 bp, Zea Mays
tttcttgtaactcgagtcaaagtgtcaatactcttattaggatattccgtataagccaaatctctctgaacactgagcttctccattggtaagtattccttagggacacagagacccttcctaagttgagacacatggaatgcacataagatagattatcaggtagctcgagttgataggccatctctccaacttgcctaaaaattcagaatgttccaataaagcgaggggacaatttgcccttgactttgaatctcctcattccacgaagtggtgacatcttgaggtacacatgatcaccttcctcaaactccagtggtcttcttccattatcagtgtagctcttttgcctggtctgagctaccctcaggttctccctgattatacggacttgttcttctgcctcttgaataagttcaggtccaaagaactgtctttatctagtctgatccaatgtagagaaatcctgcattttctgccatatagagtctcaaacagtgacat

SEQ ID NO: 141035 - DNA, 429 bp, Zea Mays
atccgtttcttcgttattggaaatcaatgcctccgtttcctcttctctctccctccattcaagctctatgaacgccatcaatggccatgaagcacccggccgacccttcctctccccctggtgtctcttcccctcacccttctctataaaatctgacactgtgcctacgagccccttgccttttccctgctcgcccatttcccatgcgctcgcctcggtgtcacgcacctgccgctgttcgttcttcgctctcgtccacacttgctatgttgttgtctgtcccgccatcgtcactgttgtagacacgccgtcgcagtccgccccgccgtccgtggagacttgccggaactcgtgctcagtgtccgtgttccccagtcgtgctcgcacctgcgccgtgctgcggtgccatcgcgcgctcgagcccgttcg

SEQ ID NO: 141036 - DNA, 505 bp, Zea Mays
aaaacttcttgtggcactataaggagccagatggtcgatcaggaggcattttgttgggtgttgatttgaatgtgtttgatattggagggattgacgagggagagttttatgttaagtttactctgtgtaataagagtgatgctttaaatgggtgttggcagtggtttatggatctgcacaagtggataagaaggagcttttttggctaagttggtgcagtttactagtcatgcgactctacccctcatcataggtggtgattttaatattcttaggaatcaaaacgagaaaaataaacctttgactgaccaacgttggcctttcctttttaatgtcgtaattgatggtcttaacttaaaagagatagagttgtcgggtcgccagtttacttgggcaaataaccttccgaatcccacatgcgagaagttagatcgggtccttgttacaacggaatgggatcagaaatttccattatcttcggttgttgtcctcaaccgtgatatat

SEQ ID NO: 141037 - DNA, 527 bp, Zea Mays
accaacaccacaaaatcaactactgcaatgcaaaaatactcaaattttggaatgcttggtagctacatcctttttctcccatcaactttttttttttgatttggaatgctttccatagagcgcacacaaatgaacttccttagtagttaaagttgttgtaaggatcagttaaacttgacagcatcacttttatagtgagggcactgcactttggcatcagtggaggcggccggcagctccagctgcttcttcttgctagcattgcccatcactctaatatagctggagtcaaatttggttcattcgaatctctgctcaagtcagaagaaaccagcaaaacgtagtcgccacggaaatggagcttggcgacatctgagctgtggttcctacggcagccgcctcacctgctaggccttttgtgtcctccgcaacggtgagacaacctccgcagcgaagggtcccagtgggagagaggaggcgtcggcgggagaagacgaccgtcgttgatctcgccgtaacaccggcca

SEQ ID NO: 141038 - DNA, 375 bp, Zea Mays
gcgaacggccaggggcggatagagctaagaaaggtggtgaaccgttggatcttgatccaatgatccatgggtcatcctggttccgtgggcgctgatctaatctggcgcttagattactgatccgacggccctgagatcgtgataccctttcgccatagtaaatttgtaaaagagccctcggggttatttagaatgaacccgctgtccttgggtgctgttctctgtgtcttaagacctttgcgcagagccccctgtcttgtatagaaattgaggcgcagtccaaggaattatgaaattagagaaattaatttagaaatggattttaatacaaaaataatagctagaatttatttaattcatagaaaatccattcta

SEQ ID NO: 141039 - DNA, 613 bp, Zea Mays
attctctgaatttgtcttcttgccttcgctgggaaccagtggggatatccttgttgcttggaaaaggaatataggcatccatagaatagatagacaatgtgtctctgttcagttttgcagagaggatggtcagctatggtggttttcttgtgtttatgggcctcaaggagatgccgataaaattcttttcctccaaggactaaggtagtgtttggttccagagtatagggtcacaaagccactccattctagtatatagggtgtttggtttgattctatgtagaatcgagcgacaccaaaaaagagaatattccttcaatatactgcattctctaggctcctgaaaaatgcacgaacctatacgctcgagcgttcagcacttatgttcttctccagttacgtcctcttcctccgacccggtcactccccacctcgtcgccgtctactgcaaccttctccgccgccggccgccgtgtctccaccgccctattattgtgcccctgttctctcccctcctgtcgccgcgcccctattctaaactgtgtcgtgtgagctattcccccccatcgcaccgctgatctgcttcatagtaaaaccaaaaccatagtctcgc

SEQ ID NO: 141040 - DNA, 467 bp, Zea Mays
caccaccatgtgcggtaagaagacccccgttgtgttcgcttttaacccttcttcgaattagctctagggaatcgaggcatgtgcgcttgtgcgcggggatgaccaactccggccatggcgcgccgccgtgttatccctgtgcgccgccgctcggcgggatttgggatgggggaaatcgcgcgggccacggtgtccgtctatccgaccgggaacagctaggattagaaggcatataccctttcggattaattgaatctgtgccctcaattgtcaatcgtacggcctgcactgattatgggctcgggatcgatctggcccatcagatctcgatccagtggcccatggcgcataccccttcatcgttatatcggattccttagatcgtgatcgggcggccgatagtaaacaataccccttcggcctgaccgttatacaaaagagccccttctctttttcgtaaacaaccc

SEQ ID NO: 141041 - DNA, 303 bp, Zea Mays
gtcaaattcacatgatgggcagaatttgaacgacaatatagatgtttagagtctggacacaaaaaacaaactgattcctttatgtatctagacaagcatcgtaaagaccaaacagatgcatagcatggtgctatgatgtttttttcatgttcagtttgtcatgtgacctaatatgggctaataagttcagttttcttgaggatagctaactgttttacagttttgcaacttcaacgttcaaccattttatttctgtcaggctgcattggacttgatggtcttaacttttccaggtatttgtgt

SEQ ID NO: 141042 - DNA, 807 bp, Zea Mays
ttctaatcccatccatccatacacagatccatggccaccacgcgcctagctgaagcgatgcgcccaattttgatcaggatcgtgcatcaacacatcaatggtctcggtgtttcccccctcccgcgacggccgaccacggaggagcagaggcctgcggcggcgtgccattgccgaccaacgccccaagcggcacccgatgcaagaacttcaaacgaactggtgctacccaagcagataggtaaggcgaactacatggatgagttctcacctgctgccgatttgtgaaggagctcggccacgccgtgatgtggccctatggtcaaacccaaagattgcgagcaattccgggctcccccgcacggataacgcacacccacgcgcggcgatcgatggtgacaagtccgaccacaccaatatcgcactggctcatgggtagccctcgcctccctcgttttctctctctaaatactttcttttctgtgttatccggtcgatgctctcagcccaagcttctttgactacacgatagatgggatcaaggtgggggggctcggcttatataggtgggtttgttaagattctcaaccaatgcctagatccatggaggggttcttgcgtgaccggcacgcgagattccccaattcggactcaaggttagtggcaatactgactattgggtcccaccaagaaggctcattgcagtggaggagggaggctagttgagcggtccgcatgtcagtgaccgcgccaggaggaaagatgggccagcttgagaggtccacgagcgcccgacaacatgagtgagat

SEQ ID NO: 141043 - DNA, 282 bp, Zea Mays
tttttcgtccgcattttgcttgctttccggagaagttccatcatacgatggcctctaaagttgtctttccagagaagttccatcattccccatctgttcaggtggtgtgacttgtaaatgctgctttgtcttgaactgaacctgtggaccctttcagcaaaatagttcatatctttttctttattaaactaaaatcacatgataacaaagatttcagattagctatgcacattttttacttaagtgtgtaaataattgctgaacctgcgttttggctaagaa

SEQ ID NO: 141044 - DNA, 376 bp, Zea Mays
caactttgatgcagtaccggacccattgtcgcaaggagctgaggctagagaagctaacaacgaattggcttccatattgagggccaccaagctatcaacttgcataggtgtggtttggtttccattattgttggtcttcgtcacaaaagaattattaatgtttctctgcttgttagcagcatggtcggtattttcctttcttcggtcagcatcctcatttcctccattgtctcgcccactatttggggtaggattaggggttatcgccggtataaaatcttgtgactccggtgtgaatgtaatatcatatccaacattgtgaaacacaacatctgttgttagtggtagttggcccttgtctatgacacccactaat

SEQ ID NO: 141045 - DNA, 280 bp, Zea Mays
cgcacgagcacggtggaggagtatgccaatcgagtttaggccctcctgccacgagcaggtcgtctggaggagaaccagcgcgttcagctcttcacaggggggcttctgccgccgctgagccacgctgtccggatccataacccgaaaacactagcggcggttatgagtctagcccggactctgcttcggactcttcgcctcctcggactccgcttcaactgcaacgagaaatattttcggggccacaaccacacatgccgccgcatcttctacgtgtaag

SEQ ID NO: 141046 - DNA, 364 bp, Zea Mays
ccggggcgaaggctctgcatttcacgaatcatggtaaggaatctccgaatcaactcgcctgttccactgcatcgtgtagcacctgtcggggttaagttgagagcaccagcgccgcgagggcactgcacgccggccatgggcaccgccgtgggggcctgcgccgccgtcctctgccaggtgtggaagacgttgcgtgggcaccatccgatctacgcgggcggtccagattcagttaggcatgggtgttgagaggggtagagcgggtgtcgtagatcttgtatcggacggatgtggttagtttgagtctcataaaatccgaaccattagatctcgatctcgcggctgatggcgcgtactggttcgc

SEQ ID NO: 141047 - DNA, 465 bp, Zea Mays
tagaagtaaccgccgagcgatgtctgatgttgctggcactttagaggtagccgccgagcaatgtatgatgttgctggcattttaaaggtaaccgtcgagcgatggctgacactgctggcgcttttgaggtagccgccgagtcatatctgacgctgccggcgttttggaggtaactgtcgagcgatggctgacactgctagcgctttagagataaccgccaagtcatatctgatgctgccggcgttttggaggtaactgtcgagcgatggctgacactgctgacgctttagagataactgccgagtcatatctgacgcttggaacttagcttttcccgagtaatgacttgtcactttttagaaatagtgaccgacccgggaaaccccatttatactcgcgccgacgtgtagttttgatttccgagccctaacttcacatttccgcctcgaaccactcctctgcttc

SEQ ID NO: 141048 - DNA, 487 bp, Zea Mays
tttgtcattagcaggcttacccactattttcagaataaggcaaatgctcaccaccgccgattttggtctctactttctcctgcagaggttaatgcaataaagtagaatttatttcaattgatttggacggcattggaaactggccaagacagtttgcatcgcttcttatggaagctaagttatttctcaaattaagatggttaaacaatcttgtttaattaatctcttgatcctacctgcccgctcattttctttatgtcattgtcgtgctaatgtgtgatggagtgctgatgggtgccttcgctctatatcacccctcttcctccccgccggcctctctctccaaaacgagctgaggctacaaagcaagcaacacatcgtgcatagtgcatcaacgacccgttccaatgggcaatggcgcccgccttcggccgctccatctccttcccactcagccaggcgcgctcctcctcctccacgaataaac

SEQ ID NO: 141049 - DNA, 542 bp, Zea Mays
cctgaacagacacgagcactattaggtgttagtgtcgaattgtgcctgcgcagcatgattatgcactatatatggtgtagtgtctggacctctagttagatactagtgccggtacggtacgtcacgattattaataatgtcgtgtctaatagtgctagtgtcagtgctgatcatgtatacgtgcagttggaggaagaaattttttttgtcagcatgctgtacacgtagaacctggacgcactgttgcacttgtcaagtgcgatgtgcatgcgccatggcctgatggacacgaatactttccggccagctaggcttctctttcgttttccctttttttctggtcctttttggcgcgcaatactgcagttcaaggctggacacagtactgtttttttctgtgtgctcgcacacctattccttccattcaatgctatgctatgcatcaatcaacaatgcatgcaagggtaaagggtggtgcagcgtgcaacattcacccaactgcctctcttcacaacagcaaacgaaggaaaataggatggttt

SEQ ID NO: 141050 - DNA, 553 bp, Zea Mays
tgacctttctgtcttttgggaccctttccttttctgttgttaagtcgctatctttcggcaatttcttgtgtcttggtattggtatgctcatctccttgaaaccttacatgctctcatctttttatatgcttacctttatatccaatgccaatttaaaacattttagtttacatgtccttgaccacccttgtttcttaatgatccatgagcggtcattttattttgcacatgcttggtgatctcgttgtttccttgtaacttccttgggtaatgaatctttacatcaacccttctgttggaaatttacctatcttacccttgattgttttctccacttcgtcgcttcacgagtcttgccttaactatatccttggttatgcttttaattattatcatatgtacccttgacacctctatattctacgttgatgtttgtccatacctgctctttaaaattgcccctcttctgtttcataccttctttctcttggtcgtatcctcttcttgggctcacgagtttgtaaccccgtcctttgttgtgcttttgtttctt

SEQ ID NO: 141051 - DNA, 394 bp, Zea Mays
taacaacaaaaataatatctatatattatgtaccggaacaatgactgcattcatagctccaaccatgtagttgtactgctgcatatatctcataacaaagaatccacaatcattagaccccaatttcattgttgggcagttattcaagagttcgatagggtacttcaaaaaagcagggagggctgatcttggtcgagcattttgtatggctagattgagcctactcattattaacctggcccatgaaaccttcctatcacccatatccataggtatacaatggtaatttttccagatagtcccacccatctctggtccatatgggttggaatctaacacatgtatgcgtccaatctgaagattaacaacatacaatgtccaatgtccagagcat

SEQ ID NO: 141052 - DNA, 398 bp, Zea Mays
ctgggccgaaaaaacgaaaaattattactgtgacagaagctatcgaaggaacaccacgaccagcttcggcttcaaaagcaccagctgttgagagcactacagctatcaaagctacaccggccgaagctgctactgccgaagttgaacctgttaaagatgcaaatctagaaagcacactttctaacattgataagatacttctggacatggccacagaagaagctgctgcagccgctgaagaaaccatggctacagtacctgagaaggagaaggaaatagctaaagatgcttcagaataagaaaactttaactttcaaaatttaattgggcaagaattgtcgaaggctgagaaagaagagttgagagaatacgccatatcctgcgggtatcaaccaggg

SEQ ID NO: 141053 - DNA, 844 bp, Zea Mays
gttgagatcaggtgcccgaaggtggttaacagcttcggtcagctttgggcggcaccgctcatgcctgtggtggagaagtcaccggagacaaggcgggcccgagttctagggggtctgggaccattcaggtgggccagcaccgttgggatgacctagtgaacttcgcggtcgggggatgctccagtgagtcagggggtgctccggcaagcaatcccgacagcagtgggagttgatccggtgcattgaggccggcgtgagcttcagtgaggggtcgagagtgtctatggccaggatttgggcacggggtgaggctgtagtggccaggtgatgtggaggcacggcggtccggcgtgtaatggctccggcgagcccaaattcactacagtgagacgaagtgcggggtggggttccttacctaggggcggtgctcggggagtcttggcacagcgtcggtgggctccggtcggctggatgacgaggaaacatagcggcggtggtcactggtctacactaggagggggtcaaacatggacgggacagaggggccaagaaaaggggaaactgaggtaggttcccgatgcattgtacttagacggagctaaccgtggcaatggcgacggcagtggctcagcaacgacggcggaaaggccatgagacggtggcggcgttattgcgtgctaggtgggaaaatgggtagggagagtgtgaatgaggggcggggtgcgctggtgggtctggggtcttcactttgaagctagggcgatgtgcgtgggactgggatcatggggtgtgggtggcgattatccgcgcggagcgtgcggtgtgggcgcgagcacgacggagc

SEQ ID NO: 141054 - DNA, 412 bp, Zea Mays
ggggaaacaactgcagggccaccaatggctaaagaggaagaaaaggagcactttatcactgttgggtgcgatcctaatggagataagccagctggaataaatgaagaatggaggtactttaaaagtgttgatcatgtagctattgatccactgcaaaatcttaaagttgagggacagaaaagaaagagggcaagacctgttttagaaataagagactttgatactgaagctgttcctgaggatgagactactctgcttgatgtttttattgtgcctcacacatcacatgacagtgagaatccagtcattaaggagggtgacacctttgtagacaagattgcttttgtccacactattaagcaatatgccatcaaaaatgagtttgagactaggattgaacatagtgacaaag

SEQ ID NO: 141055 - DNA, 500 bp, Zea Mays
taaagaatggctgcaacatggtgattggctgggaggaacgacatcacccattggcgcaggaactcggcgaccacgcattggtcttattgggcggcacgggctattggcgcagaatttggtggccagccatagagttcctacgcgcccacgagagagaaggaaggcagcgcgggggtgagcgcttctgctgtttaaaggcgacgatcacgtgcggcattggtggctttggccggctgctgctggttggctggtgccaggcattggccaagagcatgtgcccaacgactggctgaggagggtggcgacgccgattggttaggagggaggtggtcagctgttggccgatttgcgcaacactcactcgttggctgagactgacgcagggaatggagcgaactaacgtacgaatgaacgagaggccacagaataaaatgaaccgagacattttattagggtgtcgcttggaaaattaaattctcacgcacaagtagaaataaaat

SEQ ID NO: 141056 - DNA, 427 bp, Zea Mays
agcccgcccactaaccagggggaccagcgaggaaggcctgaggcagttgggctagagcaggggggccctgaggtcggtggacgagaaggtgctggagattgtagtagcaccctggccacatgtaaatcgaccccgtccaaggattgtagtagctatggccgccttgtggactgagaacttggctggaaccagcggacagtgcaccacggttaccaccggaggtccggccaccgcgcttgcctcgcttgccccgctactggaaggagtcgtcaccgccacgcccaccagtctgttgttgctagttgggtgaaggggacgcggctaggacgactaggatccgctggagctgccggtattggacagagcagcgagggcagcggccggtgcggcctttgccatcgggagttcctcgagagccaggtcatca

SEQ ID NO: 141057 - DNA, 382 bp, Zea Mays
gctctcctccacctgcttcttgagcctcttgccaaacttcatctcttcttgttccctcgatcacaatgctagctggtggtggctcgatcaacgcatgcaacagctagctctaggatgttctagctggacagaagatatcttatgcaagagcgaggcgaatgggcagtggggggaagatgcagtcgagactgaatgaatggagaattaatgagtgcaactgcaaggtgggtttagtacgccggaatggaatatctcacggcatatgccatgcatggaggtcgggtcggtgagggggaagggaaggtgagcggattgatggtacggcgcgcaacgtcaacgtgactgaacaaggtttgttagtctccagcctgaagtctgaacc

SEQ ID NO: 141058 - DNA, 542 bp, Zea Mays
ggggaggtggtgggggaacctgcttgttttgttcgcgacgaggtctagttgtcatctgaaaatagaaattttgtcgttgttacctcaattcagggttccaaacagtgactttatatcatgagaagaaaaatgacataaatttatatcgaaccaaacgaggatagccattaattcattgcattgttcatataggtttctccgggttacatcatattaggagatccaccctaaagcctagttcaaaagttggtaccaaaagctaagcttacgtggttttcccgttctcctaacatgtttaattctaacccgtctaaccctgattggtagaggcaacattggccgcagatgtagggggaactccggagtgggccgtgttcggactgaaaactggctctatttcctcgggatccttctcttcctcactgcctgcctcattagcattcatgtcttggtgatgcaattctaggtgaacgttggcctccgcaagctcctcttgcacatcatggagctggttctctaggatctcgatggtgttgtcccag

SEQ ID NO: 141059 - DNA, 530 bp, Zea Mays
gattagggttccaaaccttgggttgagatttttgggatgttacaaacctaccccacttaaaggaatctcgccctcgagatttagactggatttgagaaaagataagggtattccctcctcaaggagtcctcactctcccaggtagcttcctcttctccttctctgctccactgaactttacagagtttcacttttgaggtgcgggtcttccggactgctgaatcaaggatctttactggcttctcacggtactgaagatctttctaaatctgcactgcctcttcttcgatgagactttctggtgcttgcaggcatttgcggagctaggatacgtgaaacacattgtggatgtcagacatggattctggtaattcaaggcggtatgctgcgggtcctactctgccaatgatgggatagggtccgacgaatcgcggtgctagctttccttttacttggaatcttctgacaccatgcatcggggagaccttgaggtagatgaagtctccttcctcaaatctgagttctctccg

SEQ ID NO: 141060 - DNA, 632 bp, Zea Mays
ataatattacggtcttccgttgatccgttccagcagctcacacgagtgattttctattcccgagacgccggcttccatcaccgcggcacgcccggtccatgattcagttccgattccgaacgatcacgcgcttcgttcgtcgctgttgcagcgcggaccaagcaactgtcagctgctaatctggctggcaggacagttagggcattaaatgcgccccccacgatgagcgccgatgattagtggcgccaagcatgtgcgtgcccccgatcttactgacgctctaatcctgattatgttcaggagaggcctagctggcacaccacattatttccgccatagcctggtgagatcattatcgatggccatttgcatgggcttatggatcgtattgtttttttagctggtcttggtagagacttgatccatgtttaatgatggctgaatgagaagggtaactcaactccgcgagctatatataataaggatgtctatgacgatgtgggttttccggacactgcaccatgctgttccaacttgttctttgagtcacagcttagttgctctgtacgctgcagcagcatcgagaatcttttgataaatttgaggtagggtacttttttccttcctttgtt

SEQ ID NO: 141061 - DNA, 681 bp, Zea Mays
tgctactttccatgtgagggattcagattagccgggtaggtagttgggacttgcaaaggagtaactagggtgagtaatgagacggtcataaatgagatggcagggaaaagcatcaaaggcgacagcaggtagagaatatggggcatggtcactttggtcaggcgggcaggggcagcatttacgctacacggataccactagaccagatggagccagagacacggagggggccaaggagcatgcaaggcaccggccggctgcccggagccccggacggacctggccctgccgactgccgtggccactggcctggcctctatagcgtcagacaaagattccctcattcacttctccaacccccgctcagctcagccccatgctcctggctggctgtagactccctctgcccgctgccttcctgccctcgctaactgtcacctcctcaccgcgcctattgctgggcaccagtgctgtgccgctacccttcttctttcccacgcctccagtccatccagtacccacgctggtttaaatgcatcggcagagacaagagccactctgccacatggatgggcgttgctgcttgccagtcttctggtccggcctgctcaccttgctgtgacttgatttcctgccccatttcaccctagctccaaaaagttagcacttcacttcttcaag

SEQ ID NO: 141062 - DNA, 334 bp, Zea Mays
cacatttttgagttattgctttgtattctttgattcacaggcagggattttgcttctttgtgaggtcaaccagattgtgatagggttgataactagaggagacatggtgttaaggttgtagggtttaggtctttgtgatatgaatttgtatcggtgtgtcgctctccaacaaattgatagttatcgagaacctaacagaagattgaaaccctagccccatctccacacctatgtttgacatctaatggtggctccacccttgcgcatttgagctccaccaccaagcgccaccctttccatgtagagtccatggttagatggcatatcggcccac

SEQ ID NO: 141063 - DNA, 321 bp, Zea Mays
ctagctgttatgagtggcttttcatcttctgatggtttagcaatcttactgagtgcgccactcgctccaggacgccctgttatccgttctcagaatggttctgcgcccatcgcctgcagaaaaaacacccgatttgaagcatctacaggatcaagttatgcgaggtgtttgctatgagaatgctatggtatttacatgttcaccacaagacagtatggggtacaaatgtttgaagtgacaactgtgacttaattgttctttccagctttgggatgttaggagtatgcattctcaaattgttggaccagtaacatatatgtg

SEQ ID NO: 141064 - DNA, 426 bp, Zea Mays
ccaagctgaagatatatagttgtctaatttaaaagtaatcagtctaggtagctattgtagaaccttgcttgcttgtagccaacagactgaattacaacagatcaagagatgcacacgtagactaatcaccaacatttgtatgccaactaaacacctgaattcagggcaaactccacacatccacaccaactgcggggacgacacgatattgcttttctctccattgttccatgcaaggacaatattggactgctcctagttctgctccagaccagcattatttcagtatgttggcatctatagccgtctccacccgccggcctcagtgccttcactcataaatcaagcattttctgtttgggatcaattgccaagttcatgtttgtttcacaaagattgaaagtttgagcattatgaaggatgttg

SEQ ID NO: 141065 - DNA, 367 bp, Zea Mays
cttatacaggttcgggccacaagagctgcataataccctacttcttgtgatgtttctagtattgaaatgaggtttacaagttgtaaaccatgagtgtggtgggctagatcagatgaaaatggtgtgtgggggggtacttctcggccttatatacacgaccagagagagttatccccgcataagtgatagacattatccactcgctcatctccccgtttgtagcgaactgtctctctacgtatctggaatcatccttgttcatccgtccgagttaccgctaaggatttaacctatcgggtgatcgcaactgctctgcccgatatgcccgtgctcccgtagcgcttaactcgggcgttggtcttcgccg

SEQ ID NO: 141066 - DNA, 325 bp, Zea Mays
aaggtggtgttttgtactgatatttcattgtttacttgaagaaacctctgtcagaggagcagaatgcttggtgctgtttaagttggctcgtgttatattgctcatgttccaagcatacatatccaacatatcggtcacttttctgttgtgccattctaagttaatatatgtaatgctatttctgcaccggtgtagttttgatcattgtcttatgcagcaatatctttattttctttggaaaaaatccttttatttcgcacgggatttccgatgattcaatgcagctttcatactgtttgttcggctgcagtattttcagtgacac

SEQ ID NO: 141067 - DNA, 588 bp, Zea Mays
aatggctgagtcctaggacttaataaagttggtgcccatggtgagttttgttgtcaagggacgagtttcaggaactcggtaatacggtgccaatggatgggtctttctgttagagaaccaagttttgagaactcaataatctggtgcccacgggatgctctttcaatgacagcaaagtcgtgtaggtgatattgtcgccctcctaggagggaccttagttaatatacatgcggtgtccaagaaccttttttagcgagggtgaccaaatcccctcaatgcccttagagtgactactaggtgggatgaagtaagggctgtgaattttcatttggacttgttttgcaggagcaatagcagagccgtagaggtgatactgtgtcattcccttgaggggctcaaatctgactgggtcaaatcatctaggtatttatgacagtagggacaacacctagtacccttgtagtgatgatcgagtgagacaaagttggggttcaggccagttttatcctttaagaaatatttgagagcaaaaataacgcagagatgtaatttttgtagcaactccatacaaatgtattgatacatgat

SEQ ID NO: 141068 - DNA, 468 bp, Zea Mays
gctttgttattcataaccatcaatgattggtgaaagggaaatgtgacattgtcacgttaagaaaaatatactaacttgaagaaatccaccagaagaagtatgtctctagtagcagtttatctataccgctatacttcaaataaatctagagccaccctaacaaatgaccctgtagacatagactaccctccatgcaacaaagcaattgcacccagaaaatcaacacattaaaaataaacgtacgagatcctactcaaagttctcctttctcttactcacatccaacagatgatgttctttgaatcatccctcatccccgcgctcccactgcacgtgcccctgctctaccttcttctctgcatgggagggtcgtggccgggcaagagatatgtgcacgcacacgacgtcaatcatgtacgcgaggcgtcaatcatgtatgctttcctttcttcctttacttttttgtgg

SEQ ID NO: 141069 - DNA, 467 bp, Zea Mays
ggcacctctgaccctccttgtcgccctcacgacggtgtggctccgggtacaactcacgtcgcggctctgttccgcccgcccttctcagatgggtcgcgacgttcaccggcagattttactacagcagccaagtacttatttgagcttatcagacggactcttctgccgaggatgggatacagggaggctaccacacatatccagctctggctccttggtgccctggtctctcactctgcgtttgacgtcgtggatttccttatttgtgagattgaggacaccgttttggatggcatacgtgctcgtcgccagttgccatatgctcactacctgtgccacatttttgcgcagctgattcggcctccacagtttcagggcacacttgaggcctcacgccttgtttttggatcctcctgtcctgcgcctgaggctcctgtgccagcttctgctccagtttttgactctca

SEQ ID NO: 141070 - DNA, 540 bp, Zea Mays
aattgggtattacaggttggggaggtggcatagcatgggcaggggtagggggtcatggtggtggggttaatttggcaggtgggcactcgggatggctggtccatggcgaggtggtgggctcccgcgacggcgaggttgccggcgaggcttacaaggcgggataggtgagggagcagggcgcgctgtgctcatggagaggtggtgaagttcgtgaactacattaattggactctaagccaccgaagaggggagggaggaactcaccggagagaagggaggcgacggcgacgagctcgattgggtccaggggaggggagagggagtggccgaggccggtgcggggagatgaggggcttcgggcagcccttttataggcgttcggggaggggagggtgaaggccatcgggcaccggtgaggcgcaccgaggcagtgataatggtggcacagtggtggcgacgggacgtctctgtgcaggcagtggcgagtggtcacccggtcacagtgcgtggggacgcatggcgccaaatcttactggtgag

SEQ ID NO: 141071 - DNA, 516 bp, Zea Mays
tccatgttggctcatcttcgccttctcgtgatgtagcatgtatcttgccttctccaatgtcgagcatccatttgctaaactgagatagttcttatcgattttcttgtgacaatgatggtgacgaaagcctcatattatgtgtaagacgtaggatatggacatgaggccaaagagaagagttgattattgctgaatttacaatttgtgaacggttacccccctcaattactggcaaaatctgtcgtacatctcctccaagaacaacaacttttccaccaaagggtaaattggtagccattggagacgaagatgctaagatatcccgtaaagatctatcgaatgcttcaaatgcaaatttatgtgtcatcaaagcttcatcccatattattaaagatgtagtttgaatcagttcacacaacattgttccacgtttaatgtcacatattgttccttcatctaattcacatggtattttgaaacgagaatgtgctgttcggccgcctggtaggagtaaag

SEQ ID NO: 141072 - DNA, 942 bp, Zea Mays
cggagcactcagcttgcagtggatcatagtaaacaatagttgtaagctgccactatggtttataacactggacgcgagataagtaatgttctatagtatgcaatacctggagctttgtcagtatatgtgcaattgtatcgtctctagccaggccaagaagaacacggcaggcaagggctcgaatagaatctatagccacaggatgtgtaaccatccgagaaccaagaagctgcaaaagaatctttatgccattattggctcttacaacttctcgagcttggcggtacccttgttccaattgagcagcaagaccaggaccaccacctccaactcctaacattattcttcgatcaccgactactccagatggcacaacaggtgtgctaggagttccttgatgcaaggtattgttcttttcagcagggttgccatcaccagatctttcacgagattcacccaggtttgtaagtagattcctatctgaaatagttttttcaaagttcttttctctgctttctgaagcaagcgcttgtgcagctgcaggttgctgattggaacttgacaatggtttgttgctgatagaaggaggtgggcatacaagattgacgaggacattcagtgctggacagatcacctgattcacaaaaacagtgaaagtagatttttcacaaccttaccaatatcttgggttaatagtcacaggcctaccaaattttgtgcaaacctaccattacttgagtagtcttctcacaaaactacaaaattatgaccattcatgaccaatcaggcccacaacagtcacagttcatcgaatctgatgcgggctcagctgccaatagcatgccgcttgcatgtgggcccagctgaccatgaaaggagaacgctcacaaattgtacttttgtgagaatgtaccccaaacacaggtgggtttgtgaaatgag

SEQ ID NO: 141073 - DNA, 521 bp, Zea Mays
ttctggaactcatttgtatactgatgttgcatctccatgcccaaagcctgctccgcagtagttgaaaaatccactagcagaaaggcactcagagcatgcctgatataaggtctcaagccctaacaaaactggctcgccttttctaattcattataggccacatgcggaacaaagcggaccatcttgttaaagcccacttcatactctgtaaccgtctttttctcctgcttgaatgattgcaagtctatcttcatcttctccaggaaagtgactgggtaaaatctcctttcaaattgcctgacaaaaatatcccaggtcaggtaacccagtgaagacaaatgagctgcctgcacgcctctccaccaaatctaagcctctcccttcaatagttgtgtgccaaagcgaacacgatctccaaacactatctcaaagacatccatcttatcttccacataagtcagccaatctgccgcctcaaccggagtaccactgccatcaaaagtatccaacttcatgcccat

SEQ ID NO: 141074 - DNA, 741 bp, Zea Mays
caaaaatggtttctaggatgggttctaatttttcaaatgagaaagatatagtgatatgctatgtccggctaaatatcagtacagatgcaagtatgcaactacaagtaattgtgtcaaatttatataagtgaacatcaattctgtcgggcaccctggaacggggtgcccaaggaaagcccgggaagcttctcaagagcggtctatccgaccatgtctcccgccgagcaagtctacgaggcagagcggacaaaaaccaagtcctctgccgagcgagtctaagcgttgagtcatagctacaaacatacgtcgaccacgacagtgcgtgacgacagggcccagacgataagacacggacacaactcttatgatagggacaacctcaacaccggagcctctacagtgaccggtatggcagaaacgacaaggcagggcgccatgtcgaaaggacaacattggacccacgatagtggagaggaaccatgtcgtgtcagttgagtcctaggcttacgccataggacccgccacgcatcaccacaaggatgtcagccacgaacccgccgcaaggacaggagcaacagacagcaccatgttcaggagcgcaacttcgtacaatcaggaaataggggcccgccacaacggacaaaaaactctttattctctctctctctctctctctgaagagagagcattgtaaggtctgacccttaggatataaaagggaaggaccctcttcctctcaaa

SEQ ID NO: 141075 - DNA, 406 bp, Zea Mays
gttccttgggggaatctgtgaagaagcagctaatttgctttctttggagtattcccatttgatttgtgtatgttaatttcctagaaaatattcaggttagtttattggaattgcagagattactctgtgggtgtgattctgccgcttctttctacaaatggtacactgctactttttggactcaatgagtattttcgagatattagctttattatttcataaaggaggaaacgtgagattagagatggtttggatgttaggtagtagaacaacgaattgtcattaggtgctttgtctgatagactagattttgcgatggtctagctaggttgcagataaaaaatgtcaaaactgttttgttgttaatctgcatagtcttcatatgcttgtttactcttggaaggtg

SEQ ID NO: 141076 - DNA, 726 bp, Zea Mays
gcgaccatcttggctacatcatcgtctagagttctagtcaacggatgtacatgcaataagtttaaacatgctcgggggctacggcaaggcgatccgctttcgcctatgttattcatcttggccattgaccccctccaaaaaatgattgagcaagcagcaagattaggttttttaaagccggtgctacccagatcagctcgtttgcgttgctcgctttatgctgatgatgctggaatttttgccaatccgtaccatacggagctgcaaaatttacgacaactcttgacaattttcactaattgctcaggcctcaagtttaacctagcaaaaacggaaatctttccaattcgttgtccatcagatacggtcagctcactcattcatctttttcccgggaggatctcgaccttccctggaaaatacttgggtctacctttacactctaggaaacttcgacggattgaggtgcagcctctaattgataagattggtgctagactagctggttggaagggcaagctcctatcaaaagatggtagagaaacactagtaaagacagtgctatcatctcaacctatctaccacttaacagtgttcccacctcaaaaatgggtcattcagaggattgatcgtatccggcgaagttttctttggaagggtgatggcccagagaattcgagtggtggtcattgtctaatcaattggcaagtcacagcgagacccaag

SEQ ID NO: 141077 - DNA, 296 bp, Zea Mays
aatgtgaatcaccaggcctatgtttcactttcgacaaaggatatctctctggatatttattacgcaacaattgttgccacataccgtcctcattaataagcttaaaaagccatttgcttagcaagcatttattctgaacatctatgttctcaattcctaaccctccttgatccttaggttggcataggatatcccatctggcaagtctgtatttcttcttatgattcccaccttgccaaaagaacctagaacgaaagaagtctattctctcgagaactcctctgggtatctcgaag

SEQ ID NO: 141078 - DNA, 510 bp, Zea Mays
caattacttaaagacgcagccggaataatgttgattgaagtctatcattacaaccacactccgcacaaagccgcccacgtacgtagccggaacaatacaagcgtacgaaaacgaccaacaggccacaccatcattacaactacatacacacggcaagggcatcacatattacattggctcaacctttgggatgatacccatctccctgtagttgaacatcattatcctccattcctcaccctcaaaaagatttcgtagctcgccctcacctacactcgccccaattggcgaggataacaattctcgcttaccagtcccgtccacgcgaagaagatcactctccatctcactacgatgacgcctaccacttcgcgacaattcactcactctccgtttcgccaccgccctatgccgcttatacccagtactcgcgcccgggagcccctcggaaccctccacgcacggcgaaggctccgccgcaaccacatctaacgctgcaaaataatccaa

SEQ ID NO: 141079 - DNA, 496 bp, Zea Mays
gggccttggggcgaagtatatgaactttggtttctacgggtgcatggctagggtttggtgattctggtcaataggcactatagagagctcatgtctcgattgtatgtggagactagggtttatgggagaacaggaggtgttggcttatgtgttgacccctacctcatatttatagtgactgtaagatagggggcacaactagtgggataggattgtgcctttaatcagggcacgagttcgttcttaagccaatcctttgaccaagcccgaggtcatatccaacattccccttttgttctcggctttcttgttctttaactttctatattccaccctttgacaagttgacacattaagcccaatgcattacaaagatcaattatgtgtcaatgaactcattgactataacattcccctcaaccttaaggtatggtaactttctcaatcttgtgagatgattatctaataccatctggttcaaaatcataggttttcc

SEQ ID NO: 141080 - DNA, 489 bp, Zea Mays
gaatgccaaaaggccttcggcatagtctgctcttttatcgagacgagggatttagtccaggagcacatagccttcagagtgtggccgcttgtagagcagtgggaaacgccaaaggaaactatcagcaagcctgacaaaggtggactggttaggttgaaatacaccttcagatacgagggtgagtttattgagccagatgatgattggctgaagtgcatcgaagctacaagcgacgaactgcttggaccatattcaaagacagaagataacgcgctatctgcgaccttcggagggcggaagaagaagaggctgaatagagtttttgatgctattgggtttatgtaccctgattaccgctacccgctgaaagggcaaaagagaaaaagtgcaacttctgggaaaggtgatgcttcagttgctctaagtgaggctgcgccaaagaggaaaagggtgaaggtccttactcaccgaccacacttcatcgaaccg

SEQ ID NO: 141081 - DNA, 321 bp, Zea Mays
ccgagttactaataggagaattccttctgtggatttggtgagccggcttgaaatgatcctcaggggtaaagtttcgaacgttggagctccagtggtatactcggcttggaacctaccttcttcccaagccttcactctttttgtgtccaatccacccgtgacagatagcaatttgggtcttagagtgcgaccctctgctgaagaggtccgttctttagttgcttcgctcggggagatacctgatgatgaacggcagatttattttgaagtgcctctgaaccctagtgatgcagacataaatgacatgctcgatctgctagc

SEQ ID NO: 141082 - DNA, 379 bp, Zea Mays
ccaaccttacaaaagagactacttacacagacatcatatttgtacttcattgtctaatgattggtaatattattgaaattttacctttcatttcacaggcttaaacaagaaccagtgcacatcaaagattccacacgccaaaaagatcaccataaatgatatatacaaaaaacatgaaaccaattgagatttggcccttgaatgcagtgtcacatcttttcttattggtcctgccattttacaactaaacataattctctcgtatgttcttaaccctctagccatgttctgaccgctaaaaccatttgatgcactgtaacttatgatagttttagatgatgacccacttagatatggaacgaagattctacatatgttg

SEQ ID NO: 141083 - DNA, 587 bp, Zea Mays
cccgagatgatacccggaaatggcaccaatttgggaagcagtgaggagagtgcggcccctaagccatacatgatgctgaggcgatttcccccgtccatgagcaccttggagaggcactttgagcccataatcggctcaacaacgagggggtaggtcccagggtgtgggatcctctctagattgtcccccattcatgtattaagtgaaggcacttaccatgtcggtgtcggtggtgtcggggagttcgttcctcttctgggagaacctccggatgtaatccctaaggctttccctgctcttttgggtgcatcgcttgaggtcccaagaactcctacggcatttctaggttccctagaaatttcctaagaaggccttcctgaagtcggcctagtcgtggatggtgtcacctagcaagtgcacaagccatgcccatgccccttccacgaggtggatagggaggaactagatgatcagacggtcgtccttgattcccgccatgcagcaggcaagacagtaatcttccaaccatacactgggatttgagaacctgtcgtacttagtgatggttgctaatgctcgcacctttt

SEQ ID NO: 141084 - DNA, 438 bp, Zea Mays
gcgaggttggtgggcgcgcggaggagggatgctctccaactccatcgacctcagccagcaagcagcatccctccctagtttctttctagaccgtggacagtgctctagctgcaaaggcaaccagagtaccgcggactgtgtcgttggcctttcgcggtcggctattttggacctattttagtggcctaccagggacagcagacctaatccccccctccagctcaacggattcgcatcggcgttaactctctcttgcgtactactccgtccttaccaacgctaaaccgtactatgccatttggaaaggagacacacactgacacacatgacagagggccttctagatagatggccgatgtactccttaggtcgcattgatgtcatcgaccgaattttgttcctgctcgatccgctagtgctatgattttttttccaccg

SEQ ID NO: 141085 - DNA, 674 bp, Zea Mays
ggaggtgctgctggcggagacgcaggcggctcccatgagcgtgagagcgctgaactgatcctccatgccatcctcctggtaggtgtagtactcatcagcgccgccgccgccaaagtgcagcagctgctgctggtggtgggaggaggagggcgtggcggcgcccgacggcgacggcgacgccgacgcccaggctgtcgacgaggaagaagggtggtggtggtggtcaccgccgtacgcgatatggtcgtcgtagtagtagtacgcggaggaggaggcctgctggaagccggaagatgccatggtgctgttggagtagcagttgctgtccacgacgacgacgctgtcgtcgtagtgttgtagaccgtagtggttaggatcgctaggcacataggcggcggagacggcgtcgccacagtagtagctgctgcagaattgaggttccatggatcgatcacgcactactagctagctagcccactctgatcctgcgcaatttcttcagatttgtggcaatcgatgtgtggagctagtagctggctagactctagagtctacagctagagctagttagctaagcaagccttccgcttaagctcgccgtgcctaggggtgtgcttatatatgcaattctcgtactgcatttggactgattaggctgcatgtggcttacaaac

SEQ ID NO: 141086 - DNA, 501 bp, Zea Mays
gttgcctgtctggtgcccgctcaatctgtccgtggccgctggcgcttagggttttagcggctcgcaagcgacgttggcgccgcgcttcacggcaatccgccggctacgtcattgatttgtttcgcgaccgcccgcgcacccaccctgtgctgccttgcgcgatctccttgtttttgctcgacccgtctctgtcaacggggatgtgggcgctggctgatgcatcgaggactcgaggtgatagggaaacgcctgtgctcaatctgtcccggaagcaggggatagggaaacatcagccctctgtcttgaattcgttgccacagagccgcgagaccggatccgaaaatggttatttgcagttttgcacgatgtatcacgatcgcttcagtaccactgatgtgtcacctcgggttttgtcagatttaggatgcgcttaaaacccactcgtagatctaggatgcccctaaaacccactcgtatatctaggatgcccctaaaacccac

SEQ ID NO: 141087 - DNA, 963 bp, Zea Mays
gcagagctcggctgggttgagttcttaggctccagaccacatacgacaactctctgatccactttcctgcgaacttttcattcttgtcgaagactttctttctgagtgcttccagtatcattccgttggctctttctacctgcccgttggctcttgggtgtgctactgatgcatatttgatctggatgcttttttgtgcgcaaaaatcaaagaactccgaactagtgaaattggatcccaggtcggttatgatgctgttcggtattccgaacctgaatattatgtcctttatgaattccactgccttagctgaacttagagaagcaatgggcttgaactctatccacttagtgaatttgtcgatagcgaccagtacatgagtgtatcctccttgagccttcttgaagggtccaatcatatccagtccccagcacgcgaacggccatgttacaggtatggtttgcagttgctgtgctggtagatgttgctgttttgataagtattgacaagcttcacacctctggactaactcggctgcatcactctttgtcgttggccagtagaaactagacctgaagaccttcccaaccagagtcctggatgctgcgtgtatctcgcattgtccagcgtgtacctcatctagcagttgcttcccagtagccgaaagaatgcatttcatgaggactcctgtcgcgccccttctgtatagtgtttccccaatgagggtgtagtgagatgactgccttgcgatgcactctgctgcatttttgtcatccgactcctcgttctttatatatctaatgattggctccctccagtcatcagaatctgactctggttggctcagaatattgcattcttctgctcgatccgatgagatgctcgggcgcagtacttcttggacgaagactccaggcgggacctaagtctgactgatcctagctttgacaatgcatcagctgc

SEQ ID NO: 141088 - DNA, 350 bp, Zea Mays
ctcatgcattaccttaacagcctgtttggttcctaggattggtccaaattagatcaaattacatatctcggcccgtttggatccccttagaattcaattggccatttcagtccatttcctgtccctagaaatttggccttgactcatttcagaccatcacccatcggaaagcgtcagaaaggtggctagggttagctgctcgtccccgcattgctcaccgctcatgccgctctgctcactgctcgcgccaccacatcccctctgcagcaacagtctccctccgaggaataaggtaacagtcacgcgcctcccttctctgtatatcgctctcgtgcacgggtttgatcggg

SEQ ID NO: 141089 - DNA, 477 bp, Zea Mays
gtcacttctcaacacctctccattggccaccttgacagagacaggagaacagggttcagtggctagtttcaacttgtccaccatagcttggctgatgaaactggtagaactaccagaatctaccagcatcaacatcaactgattctgaatcaaggctctaaacctgatacactgtgaactatcagctccactgagggcatgaatagacaatctgtgattctcctcttcttgtacctcctccttttctatctgccccagctgctcctcagacaataccatctccaaatcttcagtagtcaatacattgagttgagggattgctcttcttggacatttagcctggtgccctagctcaaacttctcaccacaggtatagcagagtccatttatcctcctgtattctttcacttgtctctccttactccatactccttgatcccctaccttcccttcagtcctaactcctgtcactcccct

SEQ ID NO: 141090 - DNA, 611 bp, Zea Mays
cagtaatcatatgctcatgcaattttaggacaagctagatatataagttagctacaacttttatatagaacatatctacagaaaacacattttactttactatattaactgtatacccgaagttgtacatgcagttttaacaacgatgacatttcgcttcattttctacatagccattacaattaccattcactcgctactctagttgttttaacacccaaccatagttacacaaccgatggcgtaatggctatgaaatcatgtcatcacttcacatacaatccaatgtaaccaaacaactctaaccgaactcgttaactagtcgaaggaatttccaaaccatttatttttaccatactgatcgaatcgatcgatgaacagttttagaaggttaaacctatttgatgcatcgtcactacttcacgcttcatcttccaatttttaccatgctcacataattattttaattcggaaccggtgccgatgctatctactacatctccctcatcataatactaatacgtcacatacacaagttcactaacattttcctttcataactcaccattccaactattcttcaccttttaaacaaaattggcatagacaac

SEQ ID NO: 141091 - DNA, 1028 bp, Zea Mays
tgtgtttaatacttagaactcttagtcgatagtagaaattgttttggcttatgtagagaggtgatgacatgccgtaagtagtcatcacttcctctataattataagtcgagtctatacgcgttaggcgttccttaaattgtgcttcacaaataagtgtatgattgtgttatgccttgaatagatgtcttcgagtgaactaatgggttccttaggcaattatgtgtaaggtgtttatagtgacgctttatcccgaaaggtgttaagtccgcgcataaataagagatgagtgtattttgtgtagtgtggattgatttggagtgcatgtgtcgcaagaattgaattagtgcgcatatatgcgatggatgggcatgatgaaatggtgacatgccttcgtagtcatcatgtcgtctactggtgacctaactgaaggtcgtagaaaagggtcgattacctgtgtgttattattgtcaccttgcggtcctgtatgaattgaaatgtgaagtagtaggctctctatgtgatgctagatgtctaggtagactttcgtgaattgtggtgcttggaccatcgagatgaaggttaagtcggtcgatgctgattaagtagttaaaataattaatggaatagtcatagggttaaaactagaaactagtgttctcgcaccgtttgggatgttgtagccccattgcgcatggttacgatcgcgggtaaaaatttgtaatgctcatgtggtgtctaagctaaaatgtgaactagtgggtgaaaagcgctttgatatacatatatgacggatttgattattgtggtaaatgtgttgattaattgtatatggtaattatagcacatgaagtgacttgaataaaatttataagtctacttgttggtccttatttgattgttttaactaaaataaatggtaaagtgttagagtaatttcagactctagaacatgacaattcttgaattgtatatgagctgaaatttattagaggttgttttgggctgcacacattgttttcgtcgtgtt

SEQ ID NO: 141092 - DNA, 312 bp, Zea Mays
gggtcttgggcggcctagattggatttggccgtgcgacgtctgtagtcgtaggatcgctggcttacggtcccgatctgaccagtgtaccccttcacccagcggaattagaactgtagatctcggatcaagtggctacgattagatcttggtacttaaaatttacatcgttagatccaaatccgagggccagggctgcgtaccggttcagagttgtaaaaatctaatctggaccgtatccttttaatccaacggctctggttgttccttacctcttcgccgttggctttttgcttaagagccccttgggttat

SEQ ID NO: 141093 - DNA, 308 bp, Zea Mays
ctgcaaccttgtgctcaatcttcggtgacttccagggtctgtcacaacctatatcctaccgctactttggtccttatgaaattcaggccataaccggtcaagtggtttacaaattaaaaatggcaccccacgctccactgttcaccctgtgctccatgtctctcccttggtaactggttcgtcttcggttcccttttcgtccttgcctctttatacttctatgcagacctcagcacaactgaatctcgtcttggtttactccggtttcgatgatggcgagctgcggctcgagttcactgacgatggcc

SEQ ID NO: 141094 - DNA, 527 bp, Zea Mays
gagcactaagctcatatggcgccccaagaggaagccctccggcaagcgtgtctccttcgccagcccttcggctgtggtcctgggagtgaaccctattgtgcagctgttgcccagcgttgatccagcttctggtattctccctcttgctgtttctacctttcatccatgtaatgacccaatgcttgatgaagtgctatatggtgctgctgtttcagaagcgcaagcgctgcgtgcatccaagattatgcagttgatccattcagcggaggacagggagtacatgctagctgctcttccagggctgaccagtgaagctaccatggagtacaacatccaggtggaaactatgcaggtgatggggcctgcccctttggtggcgcccctgcaggaggaaatcaggcctaattcagaggtacacaacattgatgatttcctgatttccatatctaaacctatcccagtaccattacttatagagcaaccaccaggtgataattctagaaatgctgaacacatcaatgattttc

SEQ ID NO: 141095 - DNA, 432 bp, Zea Mays
gccgtccccgttggttgatgatgataaagttgcgcgggatatattttgttatttttgcatccgccgcggcgcgtctggacagtggaatctggatctgcaggggttatcaggtaaaagctggtgttggttccagatgcaacagcccacaggccttttggtaggcgtaaggatgtgttgcgaaaggcagcctggtcgaaaacgatgcaagtagtctaccatggcagaaaggaagataccgtgcgtgtgcgtgtgggaactcagggaaggggagtgttgcttgttgagagcgttttctgggactggggtatggaaggcgtcggtgacgtaggcccagcatttccttttccgagtgcagttgagttgagagcgaaggcacaccagcacattaaacccaaggacgtatcacgtcggcacctgtttcatgcacgaacg

SEQ ID NO: 141096 - DNA, 873 bp, Zea Mays
tacgtatgacttgtccaaaggaagcgtggttgacaatggctggtcagttaccatgtgacgtactctattgcgtcggtgtagcctattggatgtggcaagcgctgaagggaacgacattatagatctactacctgtgatgacataagtatcactaacaccatatttttttgctgcagtaatggctgcccaaacacggttgtacgcacgtgttccttgtagcgtaggtatcggctggttagaaggtcccggaaggttagacggggctatttcgtcttcaccatccataatgcgatggccatcagctgtctcaaagaccgggcaatctaaagaggttgcatattttttggcccgcaagagaagcataaaaaattaggatgggtatcggccgttgcgcgcataaacaaagaagcgatactatgagcactaaccctgcgcaactgcaccgtgcctcaggcgcttcgggtcatggcgagaatcaggcatagcactatatatcgcatagcatggaagaacatcacgtaacattggtgaaaaattggtttgtaacaaacaacacataaaaaacagggcaggcgcttaggcacacaaactaaccgacgattggaaatgcaaaatggcgaggggtcttctccaagttgtgataaaattcccccaagcagcaagcacgcaagcacccaaatcactgggaaaaaaaccataagaattagcgaaccagcaacgacatatctctgcacataagtagagagaaacatttacgcatctcctagaagacaactttgtaaaaacaagaaaattaacatgacgtcactattcaaataataccagactattcagattgatacctatcagacagatttttggtcgaactattct

SEQ ID NO: 141097 - DNA, 545 bp, Zea Mays
ccgggatacgcaatgactaatgtccaaacttgctcgacacctatttctacccctggcgactctaatccggtcatcaattgcacaattctagcctggtgcctttatgtccatgaagacggcgaaacctgaggggaaattgaggcgttcttagtgatttagggtgatctagctcaatcaaacgggtctacgagcaacgggagacttaagaacggctagaacatcaagcggagaagcttgaactaacttgtagggggctggccacgccgagatgtcccacggcggcgcggagaacccaattgggggaaacttgaaattcgcgagctacattggctaatcggaggcaagggctagtgcactgggcgtgtaacaatttgacggagctcactggggcatcaatttatagagtccatgaatggtggctctgaatttaagaagagaagcagacagccgaggagaggggatgagtcaccgcggcgatctaccgtggcattcactgaggcactgtcactggcgatggataggctacctactatggactattgcga

SEQ ID NO: 141098 - DNA, 480 bp, Zea Mays
gtccttgttacgggtggtccggagctcacttggtggggtccgaaccctatccaatggctccgggctgctttacttcgggggtccgggttgtgcgtacaggggtcccgtgccttctgggtccgacgctgttgcctccgagaacgccaccttaactgctcacaagatacccctagggttgttctctgcgcgcttaagggtagctgcgcaggcatcatgcccttataccgtagtaaggggtacccctaatccagggtaccgaaagtggcccccgggcccgcctcaggggaggatgcgagcctgcaggtggggccaaagtttgactggtgatcggctcgttgctcctacgcactcgttgatgcagttactgccggcccgcctatggtcacgccgactgccacgcctacccccgcggctgactggcccgtgacctctgtattttaatgtctttgttgggccatgcgcggggtgcctcgagtcgct

SEQ ID NO: 141099 - DNA, 525 bp, Zea Mays
cctaagtctgatttcagtgataatgactgaactttggggccttgcaactttcaaattataggatctttgcccttggtcaccacatcaaaattatagcctaatcataggagaacaactttgcttaaaggtgtgagcattgttgttaaggaaaaactggagataatcatgcctaaagattggctgtcaggctggtttattctgaaattcagattaacaggatgatgggttgaactttgagctcgattttgaatgggatccagtgactttttgtgggagcacattgtatcaaagttatagatggattatagctctacaactttgctgcagaaagttggcataggtttcacataaaaattggaggaaatgaagctccaaaatgctctgtcaggctgtctgatggagttggccatggtacaatgctcgtgcaaatcagaccgccagcgcaaaatgtccaccgccggtgacccctctgccgtgattcgagtcaccggccttaagattcgtgtgcggggtggattgataagg

SEQ ID NO: 141100 - DNA, 469 bp, Zea Mays
gttaatgtaatcacggcgacgtggatcgtctgggtcctagagacggaccctacgtctgtcactcttggtgtccaataataagcatgtgtttggcactccaggcaatgacagtgcggtgtctacagatgagtcacgctgcaatgatattccttagctttcaacacaagaaagcatgcttttagtacatcatcttcatagcctcaatggattcccagtagagtttttggcatgtgctgaaaaataacgcgatgcctacgtttgtggaactccacgcacgacactttgcctcttcatagcctcgattttatagtacaacaattctactatcaaagaataatgatacacaataattctatgaataccaaattatttgtttatcatttatggaataatgtaagccgtgactttttaacaaaggtagtcaaagagaaaacgatctctagtttggaagtcataaaaccagaaaaga

SEQ ID NO: 141101 - DNA, 406 bp, Zea Mays
acctagcaacaaaaatacccctacctggaggaaaagacttcaggccctgtcaggaagagatcctactgaggatgaccccaccatcgtctacatggccggatatctccacactcttgataaccactatgatgacctttcctcccactgcacccacctaaactcccgggtggaaagcttagagcaacaggtcaaggaacttaaaaaggagaaggcgtccctccaagagagtctcgaaatagcagaaggtgaagaggccaacactcgtgaagcctaccgaaccctgaagatggattacgataagaagctaaagaagctcgcccccacgaagaaaatccgaaagaagaccaagagccaaggatgccagactaagcggaagaaggaagcccctccagcactacctccctcc

SEQ ID NO: 141102 - DNA, 619 bp, Zea Mays
cgagataagcatgtttggaccgactaatgaacgtttgacccatggcagaagcaaacacacaagtgtccgacgcctacccacacactagagcgcggactagccagcacccgtgtgcgtccccgcgtgctgtcaactcgattgagcgcccacacacgcctataaagtccaccccacagactcagttgggcgccaccgagcccctaccaccgtacccgagtgctagctgtcggtgatcgccgtcttggccaagctccacctaccgtaaacctgctcgtagcacggccaccgtggccagcttaaaccacacagccacaacatcgtccaaagccactgtcacattcctagagagtcaagggagcacatccaccctttctcgggccaattagctttccatagaagctagctaccgctcgtcgaagcaaacccgtccgccgatgaacgtggccagcccttacgccccaccccggccaattcctttcacctacagcatctctgtgatcctatgaagctccccggcccttcaattgaaaactctatcactaccgacgagacacgctgcctatgcgcgtcgacagggcgatcctggtgatcttcgaccacgacttgaccatggacgtgt

SEQ ID NO: 141103 - DNA, 451 bp, Zea Mays
aataggcttccaaagttgcttcagaatataaaatcttcagtttcagatattgcagtctgaaatatagattctgacattcccactttggaccagttttccacctagttccatatgaatttagggttaagtatcttgaaaaaaattacatatctagtgtagctctacaactttgctactgtgatcatcttcaaattgcctatggatcaaaagttatgaagattcaaagacagctacttgataatgtttccagccatccaaccttaggtctaaaaggctatttttgagttttctccacttcttcctataaaacatggaaatctttgtacctgaaagttgtttgggttggagaactctataactttggtaatttgacatttttgcaaattattgccaaatcacgagttccacttttggagctctatactgagattttcaaaaccaagtccttcac

SEQ ID NO: 141104 - DNA, 728 bp, Zea Mays
accggcccagcgatcaccattggaggcgatgtcgaggccattaaagccaaagagatggagccgaagcttagctcgctttccacctccaaaaggtcgctgcacaacaccctttcgtttgggcgctggcagaagaagcgtcgcccccacggacatatcgcagaggtaggcaaagatggccgcctggaggatgaagtgaagcatgaagtgctgaggttggaggccgagttcctctagcagcagcaagaagaaagacgagatcggcagcgccaacccgtaggggaggttggagacgaagaacacgaattccccgacggtgagacaccgaggggagaggcactgacacggatcctttcggcaaacgccagcgcaccccatccgagtagattgcacacctaggagtggaggcactcgggagggtctagcaaggccttagcggctacagcggcagaagaagttcaaatccaaaggggcccggagagctcgacagcgaaaaggcgcagcagttgggagaaaatgcagaagcttaaaccgctacacacggggtgaaccccttttaaaggaagactcccttgctcatgccctgaggcgccacaaaaaatgtcactcgacgcgcaccaaagcaacccggcctatgacacgagggcccgggcccacaagtcattttgcctgggtgcgggtctccgagtgcgaagaaggcgaaccaccacgagaggagcgaatcgtcgcgc

SEQ ID NO: 141105 - DNA, 455 bp, Zea Mays
acgaatggaaggtgcgtcacatcgtcgcggagtcggaaggttgccttcttgtagggtgtgaagggatgaagtacctggttagcgagacggcgtttgaggcgggcgggcgaggggtggccgggtggggggctccttgttgcggaggcttctccctagttccgggttcgcggctagcgacagtgctagcgccattggaggtggtcctgcagcctggagggagcgccagaggagtgtgagaggagggatcaagggatcgacagaggtgtgaggaaccggaggctcttgggcaagctggattttggggcaaaaggaatggacgggacgcgacgcattgtgaagtttctaggagcgacttagcgagcgcgtagaggacgtggttttgcagacgaagggagttcaccgtgggtcgctcatctatgatccaacgatgaagatgaaatgagacgacgtggatg

SEQ ID NO: 141106 - DNA, 637 bp, Zea Mays
attctgggctcagctacaaaaggatgaagctgatggagttttaataaagaatgtctgtcgtcgcctggaatcggtggccatgcaattttgtgttaattttggttggaggttttctaataggattgccttgtaatcgtctcactggttttattaagtttcaaaaacctttagtgtgttagtgtgtggctgtgtggaggggtctgtcccttcattgagcagtatgatgtaacaatttgtgttggccctaacctcttttgaggggaaagccggaacttgctctccattatctaaaggaacagctagatatatagctagcatttgctcgatcaattgcattattatcacattaaagaagatgcgcacgtacgtacgaaaatgtgaaaaccctttggcagcatgatgggaaaaaggaggcgacttttcagtgtcgggagaacattgatccaaacaagacaaacattgcggtagctttcgataccggccgtcggtgctttctgttgcattgggacttgtaagacgaacgacgtggtatcagccaggagatgtgaagaactcgcgtcggagatgtccaaacccttctgttaggctgggtatatatagagttattacctgagatggaactaatggcggagcattt

SEQ ID NO: 141107 - DNA, 460 bp, Zea Mays
tcgccggtgaccgccgcctcccggccatgtgccgcgtggcttagcctttccaccgcaccaccgtgacaccttaaggccatcccatcgatgccgaggaggttgccacgccgttggccacgtaaccgcgcgcgccaagcttcttccccgtctccggccgccaacacatcgcggtcaaattgagagccaccgcttcccctcgctataaattgagtgcccccgccaccctgtaggatagttacgcgtcagttgcaccaaaccttgcaccggattatccaccagtgactgagaattgctcgttttccccaatcacggtttccgccaccgtagaactcaactccgtcgtggccagccctcctcaggtccgatcacgccctccccaatctcgttttagcatccttaagcttccctcaaacctaccgacgcatgcaattgaattagaaatcctctggtcgccgggaac

SEQ ID NO: 141108 - DNA, 438 bp, Zea Mays
cggcgacaaggaattccatagtactcacaacaacatcatgttccaagatcatttgtctgttggtgtgcatccttttgttcatcagttgtttcatttctagtgacgtttcgacttgccaacacttgctggtatgaggaggtgagttgtgatacattctgtattacaagagcttgtgcatgtaacagcttttctaagtcaactatcgagggtgatgttgtggttgatgtcatatggttatcggtagtctgctcatgtgctataaattctgctaaatcaacttgttggagtctagctaccacttgagatgttgcttgtagaaactgtgcatgcgccttcttgaactgttccatctgatacttagctggaggagttgccaacacaatgtgttctttgcacttagtgacatcacttgcagttgacattccaaggtctgacatc

SEQ ID NO: 141109 - DNA, 495 bp, Zea Mays
tagaaattatggctactaatagttagctgactggtgaacgagcaagagctaggaaacgagccctgaatcatgagaaagcaaaaatttaccatggatccgagtcggccacgcatgtctctctagctaattaaaaactactactactagttctgccagcctcgtttcactccatgacacgtactcctataccagtacaagcttcttgctcgtgtcagtacttcggtctgccatctccaggcatctgcatgcgcagctctcatgcatgacttgcacagccgctgtgaagcaggtctctgcatcgggccgcagcagatctagcacacacgtaccacatgcatcgaccgcgacaagccgacactgcactaccgacacaaacttaacgtgctgaaactgctagttcatggcatgtggcattgtggccggccgcaccgcttccggcggctggcgggcgtgtgcttcagccaccgctccggcggctgctggggccgtgccggg

SEQ ID NO: 141110 - DNA, 609 bp, Zea Mays
tatgttccaaaaaagtcataaggtgtgtcgagtcaagatggaatatgtccctcctttagggagagactcctctaaggcctcttgatgtgataaaaatataagttcatggcgatgccttgactagtggttagtagatgaaattagttctacacagagcaagatatgatcgagttgacaagggttgaacttgacttgccttgtacttggctagatgtcgcatgacagaaagacattgtattattgagtgtcataggttatgaaaaatatgtttttgagaacttttgtgagttagtatgtcttgctagaggctaatgctaattattgcgactagaaactgtttttaggtcatggtcattggttgcacaaacctataagactgcatacttaaggggttagaacataaagatacttgtatagatctctcgaatgaggtgatagcagcacattgcacaattggagttttggtgcaaccttgtctcctttgcttgtgttgtagcaccattattgtcacaatagaggtctatcgaactagagcaactagggatcacagtcacccaactcagaaacaaactttctaatccatataacgttctttgcatcttctgaagc

SEQ ID NO: 141111 - DNA, 331 bp, Zea Mays
cacatccttagatattttggttaaaccacttaatctagggggcaaatggtccaactcaacatctgtgcatatgatggccacacactcttcatgctttgttttgccttgatgcaagctttgtgatgaccccacgtgcctacttccatttcggtacaagtggtgaatgttgaactatcccctccatctataagtctctagtctccctttcgaaaaacacaacacatatactttctatgtttcactgctctctaatgctcccgtctctgcctctacgcgtaaaacgagtagagaaagcaggccttcgaaaccatattgatcctttgcaatcctg

SEQ ID NO: 141112 - DNA, 589 bp, Zea Mays
gtttctctgaggtaagtgcctcctaaaactccaaaccccaatggcacaaagcacgaaaaaaagagaaagaaatttaacttctttctagaaaattgggtatcacactctaccccccttaaaaagaattcgacctcgaattccaacgcttctatcagaacgacaaaagagagatcagcaaagacaaaaaaactcacccataacgaaaagtttggggtacttctgtcgcatcagctcctcaagttcccaagtagcctcacgctcagactgattagtccacaagaccttaacatacttaaatgttctccttctcatgatacgctccgaggactccaagatacgcaccgggagacacaccagagtcagatcttgctgcacagcaattggttccaactcgatttgatggtccggatcccgcaaaaacttcctcaacatagagacatggaatatcgggtgtactcctgccatggattctggcaattgcaatcgataagccaagctgccaatccgggacaagatagagaacggtccaatgtatctcgggctaagcttcctggagacaccgaaccgaatgactcctctagtaggtgat

SEQ ID NO: 141113 - DNA, 528 bp, Zea Mays
caatatgttagggtgaaaacagacaatttacattgacaatactttcttaaacatggagttggataggtagagggagactggtattgtagccaagaagcaagaaaataagaaaagagaggcaaaagtagccacctactgtttgtcccccaacaaatacaagcgtgaagtatggagaagtcgttgaatgtaacataaagagcataacaaaaacatgcagaattatcatccatctaccctttaccctttaaaagaagctatgtaaaatataactgaatgtggctccattgtgctctccgcatgatgtttctttgtacgcatagcactccgcaatattcaccaaaaagtaccggatcgcatcacaagcggcaggcagcaagcccaaatcgttcacaaacacgggtatacatgccgcttggcgaagaaatcagctggaaaatcctacgggatcgaggcggaggggtcacctgaagatggagaaccttgatgcttgggtccacggtcggaggggaacgagactgctgcgtactt

SEQ ID NO: 141114 - DNA, 439 bp, Zea Mays
tgaggataaatctggcgctgcagctgtggcacccatcacaggatggcaaacacaaggacccgaatattcacacagacacagagacagacacgcgctgggcccagcgaaaaccctcggcgtcttccttttttttgtgggtctccctaacatggacagctcaagacgatacagtttgaagctcccgacgaaaaaggacagaacaaatccaaaagatgccgcctagattcatgggaaatttccggtgttgggccttgcgactcagcggattcctggtaatcctgctttgctttgccttgccttgccttgtcgcccgaccctgatcttaataaccgcgaaaaagtgggctgacgcatgtggcaaagcgaggacggaggagacgtttcgagtcgcttggctttccatggaagttcattcgtgctgataaaccctggagctttcg

SEQ ID NO: 141115 - DNA, 400 bp, Zea Mays
ccaaagtgctgcaaaacttggtcctcaatcttgcttcctcagtggaaagtggtgctttcaatattaggacgtttttagaagaggctttccgtcatttgggtgacgagcattaccttctgaatgctctacttgctattcgaaaggaggtagacctgatggagcaggatgcactggagagcaaagcaaggtctgacccagagaaggagaggatggaggaacaaatttaccttgctgaggctgcaaagacagcgcctagacaattcactttcacccccccttcctcaccagaattgtatgaggccagtgacaatgactcctacgactcggacaggtccactaggtatagcatttggaacctgtaatagtggtacctcgaccttggtcgtagtggtacaaatgc

SEQ ID NO: 141116 - DNA, 399 bp, Zea Mays
ggctagctagggacatatcttcaacgtcttacaagctttctatcctggagggaggcagtgttggcggggcttcctcttttcggtcagtctggcatccttggctctttgtccgcttccggattttcttggcgggggcgagcttctttaacttcttcgcgtaatccatctttagagttcagtagcctcgtgagtgttggcctcttcgccttccgctattttgagactttcttggagggacgccctttcttcttttaattccttgacttgttgctctaggctttccacctgggaatttaggtgggtgcagtgggagaaaaggtcgtcatagtggttgtcaagggtgtggagatatctggccatgtagactatggtggggtcatcctcattaagatctctccc

SEQ ID NO: 141117 - DNA, 656 bp, Zea Mays
ggttctagtcacacagctacacgccggtgcgccatggtcccaatcatactcctctcgtcgccttatctcatcctcgtgcaagcgatcgcgcgaagcattgatgttgcttcgcgtgtctcaccggctgttgatggcatggcgcaggtcgttcagcgggtgagcgagggacagaaggtgatttgccacctaggtgagcgtttgcctatagccctccgtgtatggggtgcgcggtagaccattagcgatctgtgccaggacccctccgacctcgctcgttgtattcagtgcccgagcgaagtcatggaataggttctgggtgagaagcgggttttcgtgagccgggcgtcttgctcggctggttcccgctcgcgttcctgagcatggtggcgatcatggcagtgagaattgtgacgctctcggtgtgttctttcgtcggggttctcccctgcctcagaagcttcatcccgagagacaggttgggctagatcacgctctccagcttcatggtgatgtcatatgttacgacgcttgttctgatgttgtcgcgcatcgtgctggaggggatcctcccctagcatggtgggctcgtcgtctgagatgggtgctatctccactctcccttggatgaagaggacatccgggaagaagggggttgg

SEQ ID NO: 141118 - DNA, 417 bp, Zea Mays
ttgcgctgtttgctcgggttttgccctatttcttcccctttctctctcttcttctcccagaactctctccagccgccgcctctttcttccctagcccaagccgacgcctcctcttccctcttctccctctcctccaccaaatccacccattccccattgatttgtgagggaaaaccttgggagatctcagatctgctctccctagtgcttctccttcatttcctcttgcgtggattggattcaagcttctctccaaggtacgttcatggtgttcttggggagctctttcatttccttgaaatttcttgtaaatccattggagattgaggaaatgtgggttatatggatgaagttctctatggttttactctctattgggctaaatcgggataaaacactattgaaccgctcatggtc

SEQ ID NO: 141119 - DNA, 579 bp, Zea Mays
gcaagcccctgctcaggaggtcagagacgctaattgatttgtcctaggcatgctcgaagaggaggggaaaagggtggccaagtcttcgctggcgcaccaggcatcaagtcagaaggaggtgctgcagcagtctcccacatctcaggttgtgatggaatggtagagagggaggactttattgaggctattctagtgatcaccctagagcatgtttgccatgcacgtttgatcccgaacctagatttcccaggaggaggatgttgaggtaaatagtctgtgaagcatcttcaggagcaagtaggagttcgagatcaggatatttttgaccctagactgcctctggctgtagacatcataccaaggaactaagcagttggcgccttttgcttgcttagagccagcccagaggaaccctctccgcttcctttcgatcctgtcaattgcggtaggggtagcctcattgcacctataatgcggttgagaaggacaagacgacccatcgggttgaggagcttggattgccacccgacgagatacttatctgttatgtaatacatcatgttgggggttctctccccg

SEQ ID NO: 141120 - DNA, 313 bp, Zea Mays
gggggtaataatcagtgatgctgcagctaagctaatggaaaaacttgcatgctcgtcttgtgtcgccttcactccaagtcccaaactccaagccgaacacgacatttcgtcatgacagtctctgcgcgtcccatgtactgtactccaagtctccaactccaagcaatggcaggtaaagcaaaacccaacacaagagaactcaggaatgggcaaatcccagtagtaaatcctcctggccctcccctgttcctctccctcgttccgccgttcacctcctccaaactccatcgcgcaaatcaccggtcaaagcaaa

SEQ ID NO: 141121 - DNA, 503 bp, Zea Mays
cgagacttcacgaataggtttatataggtgagtatgagtgaagtgtgtgcttggtttgaatttagtcgaagaaaaagatatttgggcactcggctcggaaacgatcgctcaaaacgggaattttgatgaaatttaagcctgggatctcggattggcgtgaaatttggcaagtaggttactggaagtgtggtgaaggtgcctgaaaaatttgggttcaattggagcaagtatgggtggtttgggcatttcaccgaacacgtgaagggcgaggaattagggttttagggaaatggccatttgaggtgggaatgccctcccgaaggagctaaaagtttgcagggatacataaaagggataatgcaatgcattccaccaactggattcacaaaatttcacaaggatttgaatttttcacaaaggagagaaaatggagcttcactgccttccagtcagagaaacaagagagtaaagggagaggagagaggagagcagctgaccgagag

SEQ ID NO: 141122 - DNA, 540 bp, Zea Mays
ctgagggtgataagttgtactaaagttcaactttgtattcatattctcaagaaagcttctccagaatcttgaggtaaactgtgaacctcaatcagacacaatcttctttggtactccatgtagacacaaaatccgagccatgtataactctgccagctaagagcctttataagtagtcttgaccgaaatgaaatgagctactttggtcagtctatccacaatcacccatttggaatcatatcccttcaaggtgtgaggcaatccagtaatgaaatccataccaatctcttcccacttccattcgggtatccttaatgggtgcaatagtccagctggtctttggtgttcggccttgactctttgacatacatcacacatagctacatgcacagccacatctcttttcagcccattccaccaatacttttgcttcaaatcctgatacatcttggtgctacaaggcgaatagaataatcagaatcatgggcttccttcaatatagtctcccgaaggctatcaatctcaggaacacatatccgg

SEQ ID NO: 141123 - DNA, 512 bp, Zea Mays
ggcaactgctgctgagctacctcctcttgggtgcctgctgctcctgttgagcacgccttccacctctacgcctattctcagacatctgtagaaagcacacacacatcagatctgaccttgcagtctctcaacataagaaaagatatatggaaatcttcatagtactgaacaattgatcatcttcactgactccccaaacaaccaaacacaacttctcagataaagaggatagtcaaaataaatgggttgcctaactaaaactaactttattaataactacacgaagttgcaaaggatgcccacaccttggtgacaatcattagaaagatccaacttcattacaagttcatcacgacagacatagaaaaaacatgataaacaaactaactctaactaggactgactaagaccaagacaatgaattaagcattattacagactctgactctatcgatctatggctccaaatctatctaggtcctgcagttaggggtaccataatcaaagcgacc

SEQ ID NO: 141124 - DNA, 785 bp, Zea Mays
agggattatgccttggtgccatgaaatgttttgagataattaggctcaaagttgggttgtcaaactgccctaagtctgaattcagacagacagtaagattggatgaactttgggctcaattttaagtaggatgtagtgacattttgtgggtgcacaatgtagcaaagttagagctggtctattaggctataactttgctgcagagcattggtctagttgccatataaaattgagaggaaattcgccccaaagctggtttgtcagactgactgatgaagcgtctgatggtacagtgatctgaacttgatctctggttcagcccccctcatcgccggtggcctttgcgcccggattcacgccggccatcgcgattcgtgccttggacgagtggatttcgctcaccgtgaaaagatctcgtcgtggatgggttcgagttactgtggcctcggtgtccccgaccccttgcaccggcgacgtggctttacggccgtcaccggagttggcgtccttcaccgcgattgtgccactccccaagcatttaaccacatcgatactagccgcaccagctcgtcgataactgccgtagctcctcaaccggtgagtgccacggtaaaacgcgccggtgactcaccccttctttccggccgccgcgcgtcttcaccaaattctctggccaccgcttagcgccactataaattgacagcacggtctgctgcgttgggtcatcaccaagcccgagcacccgttcctgccgccgattagtcaccacaactctccaatttcac

SEQ ID NO: 141125 - DNA, 542 bp, Zea Mays
caccgtcttgtttggtctggagttgattcgatcggtgccaagatggaatccggccagtcgaaacaaagaggtcctggctggacgccactcggccatgaacttcattgcctctgcagattagacttgtgcttgatgaccgcatctggactttctcccattccggccgatctcctttttcgtggtatattcattgcatatatgttgcaggtctcaccgcttcagaaaatcttggtgaattcgggaagtacacccaatgggtgtgcccaatgggtgtctgcccagtaaaagatgtccatcgtgtagtcctgaaatagtaacttgacacaacaaagaggtgtaatactctgcctgagtggttgactttgattccatctggtgtcgtgtttgcgaagtagtgccagacgcctaactcatttctaggcggtttgaattgctattgaattcttgtgactgtttggtgagcgggtaggaagcgaacggtcgtctcctagccccctttaaatagcccgctcgccttggctgctctccccacttgttctcat

SEQ ID NO: 141126 - DNA, 1045 bp, Zea Mays
catggagctagagaatcaggctagagtaatagggacctagtgggccttttgaaagggtgtggtaggcccaccagttagtcctaaccacactgttaccgtagtagttggtgtagtaacgtgtgtaattaggacttgggccgcattgttatgtaattaactgttgcatagtatattacaagaatgtagtagatatgactttggccgcattgttctgtaattacttgttgcatagtatattacaagaatgtagtagataactaggtggacgcatgtaccttaggctcatgccccttggttaccctataaatatcttcgttcggaaacgggatggacacgcttgacaagacattgagagttactattccccgattgcctaaccgttttgccctaactgctcatgagcgtttggttcccacctgtctgaacgcaacatgcaacgacggcaggaagcccacaagtacgccaaagtatttgggagcttcgaaagggtcacaaggcatggcagaagtatttagaacctacatcaagccgaagtcaaacacgttcaatccttcttggtcatatatagaatccacaaggtggtttccactgtccaccgacaccaagaggtgatagaggatgccacaacttcagataaaaataaactcaaagcacacaacaacgaaagttgtattgtgtattctgtcgagaaaacaaaggccacacaaacaaggattatgcaattacaatacaaaaataaagagaactagtagctgctaattaggagaatcagccaaaggaaatatgtcacacgacatcttactgtcccccacctcatatccaacgatatgttcaacattaggggtcaaatacacatccttcggcttccaatgtttcagcacacccgtctccgcctcctcaaactgtagttcctattgtacatccatcatcatcttctcaaacttcacatgctgctcctcatcctctttctgacccaccctctgccacaagcatcgccattcagggctccaccaccttctcctcaccctcttggagacccactgtc

SEQ ID NO: 141127 - DNA, 563 bp, Zea Mays
cagacatctccatcgccgacgtgctagccggttcctactcggtttccgtcaagctctcgggccctaggattggggatccttggtggctatccacggtgtacggaccacaaggggtagccgagaaagagctgttcctggaggaggtcgccgcggcgcgtgacgcctgcgaagggccttgggtcgtcatgggtgacttcaatctcattcttgacgagactgacaagagcaacggcagggttaaccgacggctcatgcaggagtttcggcattgcgtcagtgatttggagctccaggacttgcatttgcacggaaggttgttcacttggagcaacgagagggagtctcccacgctgattcgcctggatagggcattggtttcgctcgattgggatgagcgctttccagattccttcctccaagcactctcctcagatacctcggatcactgcccgcttctgctccacacaaacagagatgttggtcgcgggggcaaaccgcggttctacttcgagagcttttggcccaaactcgacggctttgaggacgcgcttcggcgcgggtgg

SEQ ID NO: 141128 - DNA, 301 bp, Zea Mays
ctagcatttctccttcatcccttgtgttcgctctaggtttagtatgttggcatagccctggttattattgtagacttcttagctagactttgggtctgtttggattcaagatctaattactagctagctaaaattagctaaaattgattctagtgcatccaaacaagagggctaatagacgtgataattttttagccaagtttttaactagctgttagccaactagctagccaaactcagctagattttaacccatctagtagccctaactcatccaaacatgatcttttctagtcatgca

SEQ ID NO: 141129 - DNA, 401 bp, Zea Mays
catcacctttcttgcccttcctattacggcattttctggctatgtgaccagattcaccgcacacaaagcaagtcaggtctacaagattcttcttcttcttaaaatcaatgttctgcttggcctttgatttccagttcgtcttgttttcatttttcccatcagatttgccttcaaccacgttggcattaaaggtgccactatccattcgaccagaacggggcacatccttagatctcgcctcctcctcaacatcaagagtagcaattagactttcaacagtcattgcctccttcttgtgtttgagagtcatggcaaaattcctccaagtaggaggtaatttggcaatgatgccaccaaccacgaacttgttaggcaagacacagtcaaagtgtgcaagttcc

SEQ ID NO: 141130 - DNA, 531 bp, Zea Mays
tgatgatcgagtttgacttctctccttccttgacgaggttgatcttgtccttttccagtcttgctctttggtgtctccatccgggtttgggacaagaggctaagatagatctgttatgtaggtcaagttgttgggtatggccgagttgatctaggtcactagtttaagcttaagtggatttggagtatggcttaatcctttgtaccagcattaagtagcttactctagattatatcataatagattagatagaatctagattaggttggtacgactagattgaactagttaagatctcattattttggattaggtcctagtggttattttaggatcagataaatatagtggttaggataaaacaaatctttcatgataagatgaatctattaggataagagagagtcttttaagataagatgaattggttagaatgagatcttttaggataagataaatcttttaagctagatgtattccaatggggataatctaggttgtctagttattttataaatatttttttgtacc

SEQ ID NO: 141131 - DNA, 273 bp, Zea Mays
gtcccttcgttacccgggtcagtgccgccgtcggtagcagaggagcagtaggtggccagtcagtcagccaattgtccgctcgtccactccgttcgagctctcctactcttcaccacccacccatccatccatccatccatcggcgagcgcgagagcacactgttgcattgctgatcgctccgtctccgctgccgacgaggacgaggaagaacgagggagagacgcagacaggctgcgttgcgccatgaggagagcaggggggctatcgcgcgc

SEQ ID NO: 141132 - DNA, 785 bp, Zea Mays
atgacttatccaaagaaagcatctttaaccatgtgcacgcgcacgggcagcaggtggtgaagaatgcctttggccatgtgcgggcacggtggcgccttctggaggaatgctggaagggcgagtgccaagaggcactgccttatgttgtggttgctggttgtctgctccacaattttctcctccaatgcggcgagccggcgaccgaagtgattcaacggaacgctgatgatgatcggtttgtggactttgagggtgacaaggatagggagggggagagaatcagggatgttcttgctgcacatctgagcttggtaagccgaaatcagtgaagactgtgtgtgtgtgtgcatagtagtctctagtccccagcatctgtaatgctgatgtatgtatgtatcgtatgtcatcttctacgtaagctgctttaatctaatgctctactgttttcagttcactccacctgctaactttctgtgtggcactaaaactggtgacatgcctgatgttggttgtcctattctcatacagcttcttctgtttctggaagatagtcataacttggaattagattgttacatataccttcactaacactttgcttagcatttcaccttttgcttagcatgatgtacatttgatttcatcatatggtatcggctgtttcagtcatccctgcacagagatcgcccgacactcttgttgagaatatattccatgtgcctttgcgacgccattccatttcagagcagaacccgagcccagcgccctccttaggccctattcgc

SEQ ID NO: 141133 - DNA, 515 bp, Zea Mays
caaaggtttgggctgttaccacgcaaccagagtgtggaggagaggaccctacgtgaacatccgtggaggtgcaagaaggagaacccgctcggacaccctcgggggctagatcatggcttgcactacccatccaagccggatcatctccagcaacaccctcgggggctgggtagtagctggcactatccatttgagccggatcatctccggcagcaccctcgggggctaggtaaaggctggcaccgtcattgtgggccaagttctctacagcagccacttctaaggctgagggtccctcgatcacttccatgggaggagggaaatccaaaccagcctcctgaccctcaagactgcgctccaaggtcgatgaggcgcgggacgctgcccgggaggaccccaacccggcgtcgagcacatcagcataaacatcctcggcaccatcatctaacggctctgatagcaaatcttctggaatcatatcctcaagagtctgatcaaagttggccagagataat

SEQ ID NO: 141134 - DNA, 399 bp, Zea Mays
aaattgtagtgttgattgcatctatgaattgctttgagcttcattgcatgttgtttcatccttgatgtcaggtcgtgtagtttccttaaacaattagtccaaggtagaagttcttgtgttaattaagaccaataatggacccatgttttgaatggtggtgctatatggggtaccttggatgttttggttggagtggttgaattcgatgacgaattctttttaagggggatagagtgtaatatcccaaaaaaatgttgacccaaaagttgatcttcggtgagtggatatgggaaaaagggttgtgggccgttggatgctgcatcagaagtcatctgaggcgtcacttcttttctcccacaaaataaaccctaggtggccaccctcttccccttcttggcc

SEQ ID NO: 141135 - DNA, 349 bp, Zea Mays
tctggcttgagattgatcgacgaggatgtccattttctaaggggatggattatgatgatccggcccatggtattcctaccaacaaggtgatctttttttcggaagctcctctccaaagaacatccaagttaagcataatttgatcggagcaattcagagatgggtgatcgatcggaaattgctttccgggtgcgcatgatgagtgataacaaagtatgcagaaaagaccaatattgatatgtgtgggacagtctaaacctataaagttgtcaggcccgaggtgaatcatagggtgttacacgttgcattgcatatagccagctgtagaatgtaaacctcagttttcgag

SEQ ID NO: 141136 - DNA, 464 bp, Zea Mays
taaatggccagggtcgtgccagctgacaaccaaagagtcgtctctcacacctaccacccccatcaatacaaccaacatcaatttcaaaatgaacacaaaaattatccccagcagtagaaccacaacatttttccacatcaacaatgccttcaacaccaagaaatcctagtgctgccacccccaccaccacagcatccaaaccaacccctacaacctcccctatagctaccaaagcaagaagactttgccgatcaaccctttagaggagtaatccacatgatctccggagggtccagctgtgagtttgagacaaaacgataaaagaaagatcactaccgaagggtaaaccacgtagccctcactagcaccatcgttcaaacgaagtggtcccatgtgccactcaccttcgacacaagagatgttgacctccgcagtgtgccccatgcagacgcgctggtgataaa

SEQ ID NO: 141137 - DNA, 395 bp, Zea Mays
cggggccactgatatggaaacgaacggatagaattaggtattagcgtaactcttcataaaatcgaatctgggccgtcgatgcgatcggacggatccgtggagatcttgtatatttaaatctgaaccgtgaagtcataatctagcggctgatattgcgtaccatttcagatctgatctgatctaatctgggcctttgaatcgggatcggatggctcgaaccgagtcctggttgggccgccatgaacttttgctaaaaagaccctatggtttgctataatcaacacgtcgtccactctgagtgtaaagtatttaccatagggccctggtttcttatgaaatgacccctgaactcttctaaattagtggccgtagtccaattcaacctcagatttaat

SEQ ID NO: 141138 - DNA, 434 bp, Zea Mays
atcacagttcgcacagacatctcacactcattcatctccgtcaaggcacagacatcgcacatacatttcaatgctaaattacaacttcaaaattgcatgcattaactatatataaatttcaacaatacctatgctatcctcaaatatactgggacaaattttaactagaattgcataatttgttcctttgctaatagaaacagaagaacacgcactgcatactgaacatccccaaaaaacagtagaactaggaaaatatactcgagcataggaaagatgaagtaaaacgaagagcaccctcaccggatcgacagtgccaccagatgccgggacataatcttcgcgcagtggaactccagacctgcctgcttcacaacaggttgctgtcgccggacagcgaaaatggatcccgtcgggacctcctcgcccttcgc

SEQ ID NO: 141139 - DNA, 274 bp, Zea Mays
aacctaaattagctcttgcaagggatggtatgggtttgaggccacgaaggctacgaaagaaatgggcaagtggtggcggcgatggcggtctgtacccatcccttccgggctttggctctagggatatggtcatggtcgtgtgtgtttgtaggtggatcaggcgaggatggttggaatggatgtccctgactcgtgagtgaaagaggtgaggagggaaagcacaagcatcgagagggagagggaaacaattgcatatttcgcactccaaacatct

SEQ ID NO: 141140 - DNA, 485 bp, Zea Mays
ccgaggtgctcgacgaaaggtgagcatgaagacccatgggctcaccgcgcggcaggcgggacggatctgagctactacctcatctgcagaacgtagaagttgtttcattgtttcgcacgcgaaaactgattcggtatgcacaaaccttatttatgctttgaatcatggctacatgtatagataataaagaaataacagacgatcaaacacacgatgcaatacgcgtgctgtcagtgtgacatcatcatacagataccttcactacggtctacaggttgtagtacatgaccttgtccttgcgtgtgccgcgcgtcgctggtccagtgattcatcaattatatatatatatggcgtgtgactgttacgtacagatcctaactccttttagtgtgatgaatgcgtgcacatgcacggttcggctgtgcctggggtctaacggtagcaagcaagggaaaaggaaaggaaaggacgagcagcaaaatggc

SEQ ID NO: 141141 - DNA, 344 bp, Zea Mays
gcagtgcgatgtactcgaagtctcgaacaacacagagattgctgcaggagaagctaggaagcctgatctgactgctaagaaggcaaagctgggcgagagcatggcttcagcccgctagttcagagcactgcttcagcagcagctccagaaaacttttcagtcacatgggatcagaaagcagctcaagctaccattttaagcagatatttttcgtttccaggacaccaagaaagccttgttttgtgggtagcacattacaaaattcatcttaatctggtggacactataaaaatgtgcatttatgtatagcacaccatatcaattaataaactccttttgtgcat

SEQ ID NO: 141142 - DNA, 413 bp, Zea Mays
tcacgggagtgcaaagcggtcggcggttagtcttcccccttgacagttttctctatcctgtgccttgtatggctcttggctcctcttcttctgctcaatattttttgtggggcagatcttcgaatggatttttccgcggcctaggatgcaatgaaggtagtcgtggaggcgaaggagggagcagaggctgaggtgcataggctttcgcttgcctgggatggtgccatctccgcgcagatccaagcggaaacctccctcattgagtgatgcgccaactccaagagcttcgctgggtcacaggtgaggtgtgcgactatctctctcctcctccaccggccgaggtacttctggctgaccgactaagggtgttgctcgggtacgtggagtgcatggtcttcgaacgcgcatacctc

SEQ ID NO: 141143 - DNA, 319 bp, Zea Mays
gtaacctgccaccacatctaacagccattgggggtgcccactgatatagcattgagggaaataggcgaatgaggacgctgagaaagagcattagcagccctgttggttgatccctgcttatagaccacctggtattggagccccaacaacttagtgaagacacgctgctgccaaggaatcttcaaacgttgttcattgagatgagtcaagcttcgctgatccgtgaatattaaaaatgtgccatgctgtaaatatgacctccagtgatctacaacgagcaaaatggtgaggtactccttttcataagcagatagaccca

SEQ ID NO: 141144 - DNA, 490 bp, Zea Mays
aaccggttcaggaacagtagaagccgtggctgaaaataaatgttgtggtgttgatgccgaggtcacggaacatatttccaacaacgaaccagcaggaaccaatgactgacagtcacgcgggacaataagctgatcttgaaatggtatagacagccatttgttcttccaatctatcaacattgggctgaactgttgtagccaatccataccaaggattgtgtcatagtgaggtaaggacaataacttcaatgttgtgctaaacgagacaccctgtaaagtccagtctacttccaccagctctgaattgcatataaggacctcaccattggctacggtgaccattagcggagccgacacaggagtgaggccagtgattgccgcaacgctgttagtgttcagaaaacaatgtgaactgccggagtcaagaagcatcaacaattccacacctttcaaacaaccttgaagtctgaatgcttgggccttggctggg

SEQ ID NO: 141145 - DNA, 728 bp, Zea Mays
ggaagatcctacgtgaacgtccatggaagtgtgagagggagaaccaactcggacaccttcgggggctgggtcatagcttgcgctacccatccgagccggatcatccccggcgacaccctcgggggctgggtaagcgctagcgccatccttgagggccgagttctctgtaacaaccacctctaaggctgaaggaccttcacccacttccatgggagcagaacaatccagaccagcctcttgacccttaagaccgcgctctaaggtcgatgaggcacgggacactgctcgagataactccaacccggcatcaggcacatcagcgcaaacttccatcattccaccatctgccggctctgacaacagatcttctgggaccatgtcttcaagagtctgatcaaagtttgccagagacaattcttgcagaccaatgagggcagacaaagctggagaaggaacaccactactttccccgctggctatgtagcgccggctgttcttccgaattagagggacttcatactcctcttcctcatcttcatcaataatgcggacggtacacccattgggatcagcatcagttgggtcacacccattgggatcaaattcagcaaaaactggcaccagcacttcctcagcagcaggagcagaaggaccggcatcctgatccaagcatgacactcggcgaagacgtctctttttctttttcttcccctcagcaggagaagttg

SEQ ID NO: 141146 - DNA, 285 bp, Zea Mays
aaaagtagatggcaaatcacacaaggagatcatctcttatataagctttataatttgggtattacaagtaggcacttgctcaaaaggtggtggtcctgggacaaaggaaggagatggtgaccacacactcattactgggttacttgaggcgtttgaggccgaaggcaaacttaacattgtgtcctgtaactgagactagacatattatgggatataaggtgaatagtacgatgatgtactgaacacctcttttgactgggagggttgagtggctggcgaagtaag

SEQ ID NO: 141147 - DNA, 277 bp, Zea Mays
tggaggtgcattaccatcctggcaaggccaatgttgtagcagatgctttaagtaggaaagcccagtgcaattgtatgaatatggatgcaagagtcaccaccttatgtgatgagttgtgcaagttgaaaatagaagtcgtttccttcagtgctttaagttatatttcagtggagcccaccttacatgagcaaatagtcatggcacagattggtgacaagggtgttcaagtcattaaggaaatgatcaaacaaaaggtggacaaatacaaatgcttccg

SEQ ID NO: 141148 - DNA, 316 bp, Zea Mays
tgccaacaacactgagcccatggtggtggtgcacgtgcgcatcacagtcgtccgcgcgtgaaaatctgtcgctgatacccccgatcggatggcccagtctcgttctcgcgcgaccccatccctacgggagcaggaggatacgagacgacccccgaattcccaccatgacacggactcctttcccaaaagcgtccatgacatccaaatcgagcagagccatcggattcggggccgcaaatcggacgactgctaccgtggcctggatgtttctccggtcccataaatacgccgcaatcacccccacctccaaacgctc

SEQ ID NO: 141149 - DNA, 291 bp, Zea Mays
cccggctgccacgcggtcattcctccttccggccgtgtccgatcaccggcgccgctctcctctgttcggccacgccatcacggatttgacggtcttccggccatggttgaacgtggcaagctctaggggaatgccgtgttcggtgccatcgccgatcgccagctcgggctggcaatagttatcgccgtgaccgcgattgtgactctccgcggctataaattcaccccgacctcgccctcccttctcaaatcaaccaagccccgaccttcgtctccaaatcgcgaagcagta

SEQ ID NO: 141150 - DNA, 666 bp, Zea Mays
acgctcaaaggaatgggcttcacaccgcaaaagcctgatgtagtgcgggcttggtgtgaaatagacaccaatcaatatattgtgatccctacaccaatcaatagacatctgaaatattttccccaactcctttgacatggtattagctagccataaaccatagtagctgcgggcaccgccatctccatggctggccctgagcagccgtctccctccatggttggtgcccactcctctcttttggtctctctccaccccatctctgatgtgctgcccctggccctctttgcgacgagcacaggatcaagcgatggctagtcgtcgctgttgtctgtgccaccaatgcatgggatgacgctagcccctactgcatcccctccaccgtcgcccgcccatatgatgaccacgtcagttgtgctgccgcctgcttcgtccgccgctcaccaacctaggcgctggtctgccgccgacaatgcctctccctgctagtcggaccactgtcgaccacgcacctccccactagacctcttcagctgccacccagtagcctccaaccgcctcttcttcagctaccacctggttgtgcgggcatcgaaggtcttggcctagactcgtcggtcttggtgtcaccgctgctagcctaggcgcccttgctgcagtgagcct

SEQ ID NO: 141151 - DNA, 475 bp, Zea Mays
tggaatcttgcatactcttatttttatatgtgcttacctttatatctcaatatatgtttaagacatttcagttaacgtgcccttgaccacccttgtttcttaatgatccatgagcggtcattctactttgcatatccttggtgatctcgttgtctccttgtaactccactcggtaatgaatctttacttcaacccttctgttggaaccttacctatcttacccttgattgttttctccactttgtcgtttcgcgagtcttgccttaactatatcctttgtaatgcttttaattattatcatatgcaccattgacacctctatatcctacattgatgtttgtctcatacctgccctttaaaatcgctcctcttccgtctcataccttctttctcttggtcgtatcctcttctttggctcgcgagtttgtaacctcatcctttgttgtgcttttgtttcttattgcctttaccctcc

SEQ ID NO: 141152 - DNA, 307 bp, Zea Mays
ggggtgtccactgcgtcgtacggtgccaggtcagtccagtcacctggagagatttcacctgcacgaggagcaggagcgctgacgccaggagtaggaccaggagcaacaggactcttccccctcgcctcagcaggaggtggagtctgagagaccgccttcccctgcacctcagccagagatgccccctgcaccaccacagggcatctcggctgctggaggagaccctgacggagacagagacgacgatgatgccggtggcagttcgagccatgacacggagcgctcggaggagccggagccggagggg

SEQ ID NO: 141153 - DNA, 432 bp, Zea Mays
gctcggcaagggcgttttgggcgaacactgacaggtctctgaatatccaaggttgtatcagtttctgggagaggcgccaccaccaatgtcccagtaggagcagcatcagaagagtcctcagccagcaaatcaagcatagcacttatctctgcgtcactaggatccaaaggcacctcaaagtggacctgccgctcatcgtcaggaatttccccgagcgaggcaaccaaagcgctaacttcttcggcagagggtcgcactctaaggcccaaccgccatcagtgacaggtggattcgacacaaaatgagtgaaggctttggtaggaggcaggttccaggccgagtacgccactggggcaccaacatttgataccttgcctctaagaatcatttcaagtcggttcaccaaatctgcagcgggaatccttctgttgg

SEQ ID NO: 141154 - DNA, 274 bp, Zea Mays
agcatcccgaggtgcaatatgatgagaccttcagtcctatgaagcccactactgtccacacggtcctgacttgggctctctcccgtgattatttggttcactagctagatgtcaagaacggcttcctcaattgcaccttgacaaagacagtttattgcagccagtcgacagggttcatggattcagctcacccagaaccggtctgcttgctgaataggtcactgtacagtttgaagcaggcgccacgttcttggtacagcagcttcgccacctt

SEQ ID NO: 141155 - DNA, 389 bp, Zea Mays
ctgaaatccctccattttggtccaaaaggactcaaaatggaaccttctcttgccaacaatattgtcttttagaccaagaagcagcgggcaatggtctgaatcttgagaggatgaactgagcagaagcacatttgggaagtaggattcccagtcagccgagcagagtactctatccaacttcacaagcaccgggttatcttgttgattggaccaggtaaactttctgccatgtagctgaatttctttaagagctagatcgttgatcagcgatctgaaccggcccatcatgtccctgttgaggttggagttgttcttatcactgtccttgtagattagattaaaatctcctgtgaccacccaagggccaacacaagccgctcgggtatctc

SEQ ID NO: 141156 - DNA, 411 bp, Zea Mays
agaaaattttgtcactgtctcatatgatgatggtagaagaggcacaacgtcgtcatcgtcacgaaacgtggtgcgtcggctagctcaccaaaatagaagaatgacagaggacaatcctgtggagggcagcatgacacatctaaggtcactggttgcttgtgggtgtgatatggatggttgggtcatgcactcgagctctacgctgctattgcgtgtgctagctttagagcaatgctgcacaccaccatctatggacattggtcatcttggaaaactgcttcatctcagataccttgggctacgtggtactctcgtagacaagctcccagacgaaataggatccctcaagcttctgcaagcactggatttactaggcaccggaatatcacgacttccacggaccgtttgcct

SEQ ID NO: 141157 - DNA, 699 bp, Zea Mays
aaaaccgcccctcttctgtctcataccttccttctcttggtcgtatcctcttctttggctcgcgagtttgtaacctcatcctttgttgtgcttttgtttcttattgcctttacctttctcatctctcaatcttaccttggtgattacgctatgttcgttatctaaaacctccaatctcccaccttagttcaagcgtggtctcttacttatctcactcgtggacatatcctatactttaccacttgcaagacttatcttaactctatttttggttgtacctagattcgtggtttttttatatgcacatttacctcttcctttatatccttgcctattatcacattttacccttgacctctctccatatttaccatgatgtttacctattttccttagcctcacttattccatttcaatccgagagtgttgttttccctatcccgctcttgttcgtttcctttccctttgtcgctttgcaatcttgcctcaccttaacttcatcctttgttgagcttttgtttgatatcatccttatctttgtaatatgtagatcttaccttgatacttatcttaggtctgcttgttgaaatcccctcttttcgatctcaattcgagagctatgttttacttatctcacccttggctatatccttttctttaccacgtaagccttgacatacctccattctttgttgtact

SEQ ID NO: 141158 - DNA, 329 bp, Zea Mays
ggaaattctatccatagcgatgcctcaaagcccttggggacgagttgtactttgtaaatagaaggtttcatcatcaataaagcttccatgttctaaggcatacaagttcttgatcaacaactaacctaggtcgggctcaacttgaaattggcacggcgctcttacatgacttagggtgatcactataccctactaatggagcaatcggtttaagtcgaaaacgccttaagtcggtgtgacatgctcacgcgtacatgactttgggtgatcactataccctactaacgaagcaatcggcttaagtcggaaacgtcttaggttggtgcgac

SEQ ID NO: 141159 - DNA, 414 bp, Zea Mays
aattgcttcagactcagctttcccccgcacaggacgacgggttgattgcataaaagtgcaggggctctttagaaaaataaccgcggtgaaggggtattagtgattgttggccgtcggatctgagatggcaagctcagattaaaataacgaacaggcaagtgattttgatcgtaggatcgcggatcagtggtccaaaattcaccacgacacgagttgcccccagccctaggatcatgaagcagcgactcggattaaaaggagccaaccggtcacatcttagatctaatcgtgaccacccccttgcaaatcaacggtgccaagggtttcttccctcccccaggccggacgcggcagcagaggtgagcccgcatggcggaggccacgacgacgaccgacgcccagcatcccggccca

SEQ ID NO: 141160 - DNA, 359 bp, Zea Mays
caattcgtagggaaaaggcgttgtgtatgccttttcctcctccttcataacctcaacctccttgtcattgcatccaaaggtggatcaataatgttcaatttcatctcttcctcctcctttagcttgtcgttcactaatgtagagccaaccgaagcttttgatttaaacacatggttcgaaggtatcttcttgaaaacatactacaacaatgattttcattagatgtagaccatcaaccaaaatctttctcctcgatagtagcccctcatgggattagttcattctttataatgagctcaaattgcaaaactcaattgagggctttgagccaaaggtccgaaaaacacctccctttctta

SEQ ID NO: 141161 - DNA, 412 bp, Zea Mays
ttcctgactattgaacaactcaaaaacactcttttggtgacttgactagaacttttttttttgaaacaaacttgactagaacttagtttcattggttcagacgagtttatgggaagatggaaatgcaagggaattggtgcactcgtcggttttggagagttgtccagctgtacgatgtattcacttgggtcttttatgcgtccaagacagtccaaatgcgaggccgctcatgccatccgttgtgttcatgctagcaaatgaaacagccccacttcctaccccaaataaacctatatattttactactaggaattatgaaactggtcagtcaagtcaatacacgcgcgaagatcgctgaataacatgagcatcacaattctagaggggcgttaaatgtttagtttcattgtcc

SEQ ID NO: 141162 - DNA, 328 bp, Zea Mays
ctagctagctagcgctagaagtctagaagcagctagtagccacgccagttagtttccaattaagctagccatggcggcattgctcagcatgcttctcgtcggcgtagcgctggtgcagctagggatgcacccgagcgcggcgaccatggacgaggacatcgagctcatctggggcgcgagccacacctacttcttcatggacggcgaaaccgagtcgctggcgctgtccctggacgaccagcagggctcttgcttccggtccaaggccatgttcctctacggcaccatcagcatggagatcaagctcgtcgagggcaactccgccggc

SEQ ID NO: 141163 - DNA, 339 bp, Zea Mays
tattttgtaaaccaagtctgtttgtgtttcagagaggtgtggtgttcagatttgagcgctcagagaggtgtcttccatctcatactcgagcatcgcaagatctgggcggggctggcgcgtagaatgggaagaatgagatggtagggcggtcatgcactttgcgatgggatgcaggtcgatggtggtcctgtgcactagatggcgacgaggggattgggttgcgattccttccatggcagcgaggcgtggattgtgttggaggcgcggaggatatgggtggggcatccgtggtgcatgggaagaacgattgggcgatgggtggtactgcgcgtcatcggc

SEQ ID NO: 141164 - DNA, 345 bp, Zea Mays
cttcagtgtgttggttccattgtaccttataaaacttaagagtcatctttcgagtgattctgtccttctgatatagaactcaaatgggatgttctgagtaggttaggtctggtgccaaagtaacatccaccacatcaatagttcgatcaggaatccgaagacatttctttaactaagatacatggcacacattatgcaccacagatagtgattctggtaattgaagtctgtacgccacttgtccacatcgctcaagaatggggaacggtccaatatatcggggtgccaattttcctttaaccctgaaccggctaacacccttcatcggtgatactttaggtatac

SEQ ID NO: 141165 - DNA, 359 bp, Zea Mays
gtagttcagatttattagtaataaccgaacgtttcgtcgataataacccaatacttcgttggtactaaacaaatgtttcgttggtaataactcaacgcttcgtcggtaataaactaacgctttgccggtaataaccgatcgtttcatcctaataacccaatgcttcgtctgtaataatcgaatgtttcgtcggtacgttttgtcggtaacaacccaatgcttcgttgatgctaaccaaatgtttcatcggtaataacccaacgctttgccggtaataaccgatcgtttcgtcggtaataacccaatgcttcatctgtaataatcgaacgtttcgtcgataataacccaacggttcgtca

SEQ ID NO: 141166 - DNA, 899 bp, Zea Mays
ggaaggctctcggccgttggatcaccgccagatggcacatattagatcactactcgtgctgaagcggtacgaaatcgtggtcaccggatcgcaaatcaacggttcaggctagttcatgacgcgaagtttgtttctacccttggattgacatcgtacgaccaagcgtcgactgcgcgaaagggtacacgcgatcgatcaaggccgaccacaattcatccaatggcccacgacccacacaagctagcaggcactcccgcgtggcggagcagagcccccatggcggcacgctcgtcggagttcgtcaaaccacaaccaggcgccctaattcccagcgaatcccgagattaacagagaggaggaataggtgagcatgatggcagcatccttaccgacgattatagtcccagtagtgcgggccacacgatggagcggcacggcggcgatgaaagagctccggtgagcaattaccgatagcgtagccaattctacgccgagccttgccccaggtaagcttccaccgcgtccacagatgcccctgaacccctacccgaagctcgggcgatgcccacgaaacacggtgccgacggcggaccttttctttcctcccctcgccaaaatctcgctgcttggtgtcggtggggcaaaggaggagagggaggggggttggtcgtgttacataggaagcgggggtgcgaagggttagtgcggagcagacccccgcgagttggttaggctggccgagatttcgagcgcgcggcaatggcggcatggctatggctgaccggtccacaactcgggttcccggagagtacggagaggtagtcgtggtcaaaacggtggggcgtatccgcagacgaagtgggccccccagcaccagctagatttcacgcggtcgctcc

SEQ ID NO: 141167 - DNA, 843 bp, Zea Mays
cccgtatatatattatatcatgaatcgtgttgtagtatgcgtgcatgatcatcgatgcatctcggctcccaatcatacgagagagagtcagtgggcagtgcacatatgatggtgtgcatgtacaactcaccgagctagctaccgcattattggcggttggagttgctctctcgggcagccctgcatgcgtgcagagctggccacgggggggcatcgtcatgcgccacgacgaccttgctcgtgcgcagttgcacgcacaatgcaatcccaggaggaaaggatattgttttcacgtaccggtgccgggtgggtagtttttttttgggggggttatatagggcagggcatgcacggcgtggtaccagctcgcctccaacgtacggctatggcgtgtacgtatctgtcgatggactgactgatggaaccatagccgatttgcgacgcagagaaaataaactgactatgtacatgtgatgtgtcaataccgcgaggttgttgctggcaggacgcaaggatgtcgaatgggtcgtgctgggctgatccaactatcactctactgcattatcgagcgtgcgatgcgtccatcaccctgttggggagattgaagaagggcctcctccttgcctttcatataaaaatataaaggacctgcgcccatcaccctcaccctgttttgggtgcagcagctcggctgagtatgattagcgggcaactttatctcatagatagatctcgctgtctctagttgttgcgcttttcgttgctcactgctcctgctactgctaggcacacactttgtccgtaccgtctgggaggcgtcttgtagctcaatgctgattctcg

SEQ ID NO: 141168 - DNA, 460 bp, Zea Mays
ctagtcatagtggcactgtgctgtcgaagcagatggcatatatatataccactttctgaattggtgtgaaattatcctaatgatcatgaattttttcactaaaacgaagtattaataatcaaacagaaaacaaatagaggaaaaccttaagaataattaaacagaacacacctgtcccatctatactttaaccaaaaatgaagtattatatgaggccttattgcccgtgaacataaatactatgtgatttaacaatagtgtttacgaataaatgttagtttagaatcaaaagaacattagatttgtatatgatcaatcagatagaagaggctaaactactaagcagatttcaagctactacaagaccgcagagacaagattagcatccaaattacatgcaaaacttggaaacagtacatctagacaaatcatcatataggtagcctacatgaagagcaac

SEQ ID NO: 141169 - DNA, 705 bp, Zea Mays
cccagccacaaagttgtgttactctcatctgcaccacactctctttccagctcttgcactttcctgactatctcatcggtttcctccttctcacgctgcttagtttgaagcttctggttgaaatggcgcagcatgatctgattcctctcatcattaatcctggcaatctccttcatgttgttgtccatgctccttactgctgggctcttggacttcttacttggacttgaggcactgatgcttgtgctgcttgccctctttctcccaatgctcactggtggggtcagggcgtccatctcctctgcttcctcgtcatcactgtgggaccaatatggctactttgaccaggaacaaatgaggtagagctgtctaccactacgccatggaacattttgtccatttctgcaaggtaaggtggccacccccacttcagcttcttccactctggtttcccctacataatgactttgtgtttaaaagtctaccgcttatagtatatggaaacaaacagttaggtaggttacctgagtgtttgcttcccaccactcatcggaggcgttaacagcgccatcctcgttgatgcctaaaatcggtgtcattgcggagtctctatacgaaaccccacattgctttcagctacctatacctattacaaaagcaagctttgtcatgaaacaaaccggttcctaaatagaaccagtctat

SEQ ID NO: 141170 - DNA, 559 bp, Zea Mays
gagctcaacgccggtgatctgccaccacaattcacgcctgtctgggagatttgtgccacgggaggagtagataacgtcggggcggggtaaaaatatctggtagggggatgaatccagtcgctagccggaccgaccgccgtgtcccgcagcggacagcgcgctggcatcaccgaagctcgtcgttttttcggccgtgacacgtaataaccacgcctccgcgtcgtatgggtcatggtaagccaccggttattgaccgcagaccagttcccttttgtgtgccacggtgatcaagccactgtgaaaaatcctagccggataaccgtgatctcaatcccaaaattcttgtccagttcgatcgagacatataaattgtggatgccctctactctgcttcttagatacacgcccaacccatccccagctagctcctatcatgcaccaccacaccctaatttcgcatttcccccaattcacttctccacgccgctgtgaaccatcgcgccgtggaccaccaattctaggtccgttcttgttctctttgttcatgtttcaacacctc

SEQ ID NO: 141171 - DNA, 783 bp, Zea Mays
ctaatggcctctaaacgggcaacaggagcaaaggtctcctcataatcaattccctctttttggcaatacccttgggcaaccaacctcgccttatttctcactaccaaaccatcctcactttgtttgtttttgaaaacccattttgtaccgatgggatggcagttagaaggaggtggcaccaaaacccaaacctgatttctttaaaaaaaattcaagctcctcatgcatagcattaacccagttaggatcagataaagcatgtccaacatcttggggctgaaaagtagcaacaaaagctgagtgaacaaaatgagaaatgtgttgtgacctcgagcgagtgactcgctcatgaagctccccgatcatctgctgaggtgggtgacggcgctaaatatgttgtggagcctcccttgaggaagtggcctccccctcaacagcagcttcaattcctccagtctcagcaggagctagctcgagcggactccaagtggtggaaggagtggggtcgggtccgtcaacctagtagtggaagcagtcttgactggggcgggcggtggagttggctcgagagcaacccaatcggtggcgttgtgctcctcctccataaagatggtctgtcccatctgatctggacctgcaggctcaaagacaggggatggacaaggtgcagtctcatcgaatgtaacctcataagtctccataatgcggttagtctctaggttaagaacacgataagcatgagaatgtaatgcataacccagaaaaactccatcagaagaccgg

SEQ ID NO: 141172 - DNA, 630 bp, Zea Mays
tgaaggtatagaagagtcaatggcataattacaacaaagaatggagttatgtcaaggcttacacgtggtaaggaagtggatattgccaagggtaagataagtaaaacatcgctctcaaattgggataggagatttaagatcttagagaacggacatagtgtaatcaccaaggtaagattaagagatgagaaaggtaaaggtaatacccaactggagcacgaccaaggatggagttaaaactcgcaagcgacaaggaatagaatacgaccaagggaaaataggtaaaacacaactataaaattgagatggaagagagaaggttttaatggacgggtataatataagcatcaaagtaagatgtagaggcgacaagggtaaagatgataatcgtgaaaagcataaccaaggatagagttaaagcaagactcgcgaagtggcgaagtggagaaataatcaagggtaagataggtaaggtcccaacagaatggttgaagtaacgaaaattattaccgagggaagttatgaggaaacagtgagatcatcaaggatgtgtgaaatagaatggtcgctcatggaccatcaagaagcaaggtctcaagggcatattaacttaaaggttttgaacagtca

SEQ ID NO: 141173 - DNA, 512 bp, Zea Mays
gtgaacttgttgttgggccgtggtgttctcttgcttcttcgcagcccaccatcagtctttgcgctcttccctttttctgctaccgctgtcttctcttcctcctcctcttgatcagctgttgcagggttgctgacattttccctccctttaaaaccagcttgtccccaagctggagcaaaaggaaaaccccgcctgatatctccttcgtcttcccaagtggccaacgacggaggcgagttgctccaattgatcaacagctgcgatctcaccttgcctgcctgacggtttaacctgctgtccagaatagccgtaggaacctggagatcatgagtcaagtcaggtagaaccgaactgaccggagtatagggtttcaccgcggctttcagttgcgacacatggaaaattggatgtatagaactcccagttggtaattgcagttcatatgtgaccgggttaatctatctggtaatggtgtaaggaccgaaaaatcgaaatgacaatttctggttcaa

SEQ ID NO: 141174 - DNA, 412 bp, Zea Mays
gcatcgtgtgtcgcaatggcctctgtcgacggctattgttggtccgaaagaggtaagatgacttgctctagctctgttgactagatgtggtgtcctgggaatggaaacaacattaagatacaaatgagtatctatcaaatataattagaattaaaaaacattgagatctagtaccgtaaacaagatagagagggtgtcaacagtaggattggcctccctactcgacctggatcgagtggacgtggaggagctttcaccgtttttcttcgctttcctcctaccaagcgctctgatcatctacacaatttccacacaatagtcagaataaatgattcaattataaaataaatttaaaacaggtgtatgagataaattatagtaataaacatacataaattgtagtaataaaaac

SEQ ID NO: 141175 - DNA, 544 bp, Zea Mays
tgaagtttggctgtcaggctgagaatctgtatggttcagaaaaaccagtggtacagggccaacttcaggatcaggtggagctcgatttaatgggtaattggctaagacctttatagcaagattaaagttggattataggggagtaactttggtacagtcttcttctctggttgttgtacaaaaattaatgaaacaatagcccaaagttgctctgtcagaactgtgttgagatactaaaactgaattctagaacatgaatggtcacagtggaatggggccgaattggaagcgccatatctttaattccattcagttttgtaccaaggatcctatagtaagtttgaagactgatgttcagtaaacaatctttattaatggagatcaccttgttcttaacacaaatcaaaagaaaaggagggtgaaagggggtcggttcagaaaagtgctgaagatcaggacaccgaaatatctgaaaaagcgaggacaaagattaggggcactatagaatcagatgtatttgagtgatttggggtaagaatcgacc

SEQ ID NO: 141176 - DNA, 364 bp, Zea Mays
attcgatagaagttgggaatccagtttgccttatgcggagttctcgtataataacagccatcaggccagcatcaagatgtcaccgttcgaagcattgtatggacgaaaatgccagacccctctcatgtggtccaacgtaggggaaaaggcactagaaggacctgcctttgtcaaagaggctgaggagaaagttgccctgatccgcagaagattacttgaagctcagagtcggcagaagagttatgcggacaacagacggagagaactcagatttgaggaaggagacttcgtctacctcaaggtctccccgatgcatggtgtcagaaggttccaagtgaaaggaaagctagcaccgcgattcatc

SEQ ID NO: 141177 - DNA, 602 bp, Zea Mays
tgggacgtgagcggcatgatccgagtatactgacccctggtcttcgtagcttagggcttggcgcgcctcgtcgtgttgtgccttgccaacagtctatgcactaaggcctagtctcgataggtcatgagtgcactgcaggtcgggggagcatgagccataaacgcgctgcagtcccgaggggttcgtaggctagctatgagtgcgttgtagcccgaggggctcgtaggtcatagtgggaggcggaccaatgcccctgctatggcacaatgctaggtgtagttaatgtgaccggtcactcatgacgggtcggtctcgagacgagcgaaggatccactcgattagttttccttcggcgcacttagccccctgtttagttccgccacgttcgaccttggtcttggtggtgtggggctcgtccggggcaagttcttccaggaccgacattacctttctcctcctgctaaccgatgggcctcggtcactagaggctttctctagcgcgctcactgaccgatgggccctagggaccggagatcttatccccgacgcatgggtacaatcatgcttttggagaagttgatgtgaggtatgttgcctcgttg

SEQ ID NO: 141178 - DNA, 535 bp, Zea Mays
cttggtcaatggcccaaatactggcgtatgactgggctacaaggttcgcctagcgtgccacctgacctatactggatcaggaaggtgttggcgtgctccgaattggttccctgcatgcaaaaacatgtgtgaacgtcattttgagccgtgttcggccccctaggtcgtatcgattataaaagagacgatcagtctcctcgggctcgcatcggatccatgccttggtggcgtagggagccgatggtcctcaaaaccccgctctatccttatcgggcgggtccgacccactaaagttaaagcctcaccacacgaccggaacgtccgacacgtggttaggcctagcgatcgtggagggcgcctgaacactgattaagtacgatccctgcccaaactgacgccagccaaccaacacttcaccggaacatccaaccctcatgcaaggcctagccgcatggatattagacaggacttcgataaaacaaagactaatagtgacgaattggatccacctcgcaagaacagaacaagacgtcgc

SEQ ID NO: 141179 - DNA, 890 bp, Zea Mays
atgtgtcggcaattgacctcatctcgttcaactcactatgcttcgtcaacgatgcattaggatagcttaggctatagcctagcatctcacgacaccaaaaccaaagaccatggatccaatagatctgatctatgaaatgacataatggacatcacgtacctgatgagtctcgaatatctgtccgaccccgacgactgtgcagactcagacttgggccctaacttcctaggatcttggctcgcgtccgtgattgatggagaacgatatgacctccctccattggaggatggaagatattcaaagatgaagacaatgagtttgtgacaactctgccgactctctttcaagtagctaacaagtatgccatgaacaaagaggtaacactccacatgactttagcaaaggacaagggaaaagtcgagcagaagcctgagcaagacaagggccagaaatgtcgctacaatcgttggatcaaagcggtcaaacgtgggactcggctgcgccaacataataagttgcctatcctgaatgagacaagaggctacacatggtcctcatagacgaaggaaggagtcttaatatcatcttcactaaaaccctcaggaagatgggattattcgagaaggctttgaggccgagtccaatctccttctatggtatcatccctgaccagtctaccatgtcgttgggacagatagttctgcttgttaccttttgtatcgaacccaatttatgcactcagtccttacactttgaggtagctgacaataacgcatctcatcacgtcatcacagggaggcctagacaatgtttttgaatatgaggctatgttgctgagcctaataattgttgtttcaatggaaatccatcaggtccgaatctcaggtgag

SEQ ID NO: 141180 - DNA, 507 bp, Zea Mays
tttaaacttagtctttattaagttgcatgcaccaactgctaggatcagatttggagcaaggtcgtgaatggtgtcgttactgtgtaagtgtaagttgtaatacacacccacccctcggggtgtataatctttttttgggggtttctttcttcttaatgaaatgacgcacaactctcccgcgtggttcgagaaaaaaacttggattactgtgttgaatgacgcgcaactctttccccataatgtgttgcatgtccccacgacctggacacattcatccacccagtggtgtagggcacaagggatgagacatgtaacaggagttcaggtgggatgtgcatacctagcttccttgggcctgctatgccatttggtcgcccttgtcgtacctttcctaccacatgtcctagccgaggctttgctgccatggccctcctcgattcatcttcactcgctcctattccacctcaccatggtgccagcccttgcctcacgacagccacattcaac

SEQ ID NO: 141181 - DNA, 401 bp, Zea Mays
ggtgtgctctcatgatggcaacaaccatgcctcagagcccaggcatgtcattgaagcactatccgagcaactagggatcagaggaaacaagatgaaggttttgaagcatcacccggagcagtacctcatcatctttgaggagcagcaagatcagagaagggtgctacaccaaagtcgcctccatcaccgtggctgggttttctgctttgctgagtggaatgaacaacgctacagctctgtggcgcgctgggactttcatgttcggctacggctggagggtgtcccagtacatgcctggaacaaggacgttgctgcccagatcattggaagccactgtgccatccatgtgttggacgagaagaccatgcctcgcaagcgaactcgcacttttgatctatggg

SEQ ID NO: 141182 - DNA, 464 bp, Zea Mays
agggaaaaagaggaagattgccgcttcggtcaccacagctgtgccgaagggcaaaaaggtgaaggttctgacccaccgaccgcgatatattgaaccagccgtagtgcctgaatttggggaaggaacctcttcaactgccgaaacaaaacaagctgctccgattgtgaagagcgccgaagagccgattgtagtgccgaaggcgcctacagtcgggccagccgaagccaaagatggtgcggccgaagagccgatagtggaaaaggcagtgaaatgccagaaattctgagcccatcaccaggggcaaagttgccgaaggtacaaaaagctgctgctgcaactcccaagaggaggaggatggccagcgtactagacgctgtcatagagaccacgaaggccttgacccctgctcctaccaagaaagctgccgaagttatcaaagtccaggccagggccgaagctggatc

SEQ ID NO: 141183 - DNA, 558 bp, Zea Mays
tgctacacggctagttcggcatatcaagtcaaattcttcggtagcatgaacaagcacaattggatgaagatttggacggcaaagatgccaagtaaatgcaagatttttctctggctgctcctacagagtcgactccctactgtggatagaattgtcaggcatgggggacacgtcgttcttacctgcaccctttgccagaatgatcgtgaatctcatatacacttgatggcatctttgcagttacgccctccattgctggcagctatttgcaaactatttccatcttaatctgccgtcacaagtcccacatggaatatcacattggtggcaggcattggtctggtcagtgcaggacgcacatcaactgcaagtgatgatctacactctatggaatatttggaaagagcgatgtcgtagggtttttcagtccaagtaacaagtctttcacgtgctggcctcacaaatccaagaggatatctgctcatttcggttggcttccacaacaactctgtaattcatatcctttgtatcccatcaaccataatacgtaccccctcc

SEQ ID NO: 141184 - DNA, 584 bp, Zea Mays
gaagtttggccccttgggtggaaacccaaatgatcgagtcttctggtgccggtcctgctgctgtgcccggagaacctggaacttccttttaagatgccctttttcttcctcctttgccctttcaacttgcatggccttgttggaaaggtgagagaagttgaggaagtcttggctagctagaattgtcttgagttctggcctgagtcccttcagaaaacgggccatcttcttgctctcggtactgacatcatctggcgcatagcgggctaactctgtgaacttgtgcacatactcgctgacagatcttccgtcttgagtcaattctcggaactcgtcctccttaagctgtaccagtccttggggcacatggtgctcccggaaagctgcttcgaattccgcccaggtagcatctctgatggtgacgttgaaggtgtcccaccaggctaaggccgtcccagaaagttggtgggcagccagttgaacacgctgattttctgggcaaccaatggcttccagttttcttttgatcgtgcgcatccaatcgtctgcatcaagggggttgcttgatccggcgaacgtgggtg

SEQ ID NO: 141185 - DNA, 556 bp, Zea Mays
atctgatatagatgtggtccaatcttctgataagtatgataaacttcgattgacgagaactcgatgttcatgatttaggctttaaaccaagtctaatttggaccgccacaatcattacatcattgttatgccagttatcaaccacacaaaacatgattgatctcgtcaagaagactttcctccatgcgaatcaagaacaaagacaagaacggtatgagcgcaatatgaaattgcaagtttatatgaagcttatgaaattgataggaggttcaagtcttgatccgaaaggactagtcaacacaaagtgaataagatcaagaataaaggctttggttcacaacaatcgaccttggcaatactagtacaacgaacaatgtctattcatgagaaaaataagaacataacaaaacacaagccctaacaagagagacaatggataattgtgaattcttgggtgtgatcacccctagatgcattctaatgagctctaagacgatatacgattcaatagaccaagacacgatgtcgcaacaccctcacagtctctatatgccga

SEQ ID NO: 141186 - DNA, 273 bp, Zea Mays
gggagatgttaccaagtccttggggatgattgaggcaagtgccaatatcagtgtggaggtgaaacccgtgaagtgttctcttcccgcaatgaagccctgagctcctctatttatagcctcaaggagggctaccaggagtgccgggatttgtcgcatacgggagaggaggcgtgtccgagcccctatggccagtatggtcatcggcatggccttcgtacttgctattgactcgagctaggaggaggatgtccgatccctatatttgcatctttg

SEQ ID NO: 141187 - DNA, 427 bp, Zea Mays
ctttttattgatgatgtattttccgattacagaatacaatgctgccccgatagcttttgaaatctagctaggggtaaaacttcctgagatgctctatattccatgaatttcctatttccgtgccatccatttgagtaagccaatatgatcctagccgagagtgacttctgctaccatgaacggcccttcccatagtggcgataatttgtgtcgtccttcccccgttagaatttggcgaaggaccaagtctcccactgcgaaggatcgatgtcgtatggccttatcatgatagcgcctcagggtttgctggtacctagctaactgaattactctattcaatcgttcttcctccaatatatcaatatcctccagtctagtagcttctgcctcagctatgttttcaaagatcagccttggtgccccaaac

SEQ ID NO: 141188 - DNA, 292 bp, Zea Mays
ggaggcttgagggaggctagaacatcaagcagagaagcttgaactcacctgcagagagctggccacgacgaagggttcacggtggcacggaaaatggatttgggggaaatgcgaaattgggaggctctagtgaacgatcagaggcgagagctagtgcattgggtgcataataacctagcggagctcactggagcatcaatttatagaatcaatcagcggtggtgtccaatttggagaaggcgcgctagcggcctgagagaggggaagttccctggcgcgggttaccgtggca

SEQ ID NO: 141189 - DNA, 550 bp, Zea Mays
taggcggtacacccctagtgattggcgctgccagattagtgccaacactcttatctcgctctgcaaccctttttccgcgccccgacgaactgttcatagctccagcaggccctctatcccaaagtgcaaaatagaagccacccttggtgctccgtatgcctatgagttctttctcatctccgcacctcaaccttcactttcatccgctcccaccaaatccgctaccaccctgaggatcgaccttcttcctccccccacctattgtcgaatccgcaggagttggtctcatcacgacgctccacctctaagcccacctgctgctcaaggaggactgaagggagtacgtctaagtctgctcctgcatcaacggtgttgcatcctccgtcgagcatcgccattgcgtactctgctccatgctcacgcaccacgctaacaccgcgggtagcttagggaagctcagtcggctcgttgactgcgacactgcacttgcttccagagttctaggaggctcccgatgtttcgcaaggcgtggcctacgaggacattgttg

SEQ ID NO: 141190 - DNA, 370 bp, Zea Mays
gtcagggatgactgtgggtacacccatacatggccctagctcgagttgtgacctgaggtaccttaagacatatccgagacccccgggagcgattcgtgatggtgtcccatcgtagggaggcatcgagccctcagaccccatcaaatgggttcgagactaggcgaatcacccgcaggtatcttttggggcatgtctctggaccactagccaactcttatcagaaggagctcggacccccgctcggattacccaataacaactcaacagaaacgtcctgctcgtcgcccatcgagggtagcatgacacattccccccttcctcctcgcggagaggcgatgcaatggcgtatgaaccaaaagttgagacatcc

SEQ ID NO: 141191 - DNA, 841 bp, Zea Mays
gttatgtcaaggcttacatggggtaaagaagaggatattgccaagggtaggataagtaagacaccgccctcaaactgggataggatattggagattttagagaacggacatagtgtaattaccaaggtaaggtcgagagatgagaaaagtaaagataatacccaaccagagtacaaggatggagttgaaagctcgcaagcgacaaggaagaggatacaaccaagggaaaactaggtaaagtacaatgctcagattgagatagtaaagaggatattttaaagactggtataagataaacatcaaggtaagatatagaggtgataaggatgaaggtgctaatggtgaaaaacataatccatggacagagttaagaaaaaaatcgcaaagtgacgaagtggagaaaacaaacaagggtaagataagtgaggtcccgacagaagagttgaagtaaaaattcattaccgaaggaagttacaaggaattaacgagatcaccaaggatgcgcgaaataaaatgaatgctcatggatcatcgagaaacaagggtggtcaagggcgtgtaaaatgaaatatcttaaatagaccttgggatataaaggtaggcataaaaaggatgagagtatgaaagacttcaaggagatgagcataccaataccaagagacaagaaattgctaaaagatagtgacttaacaatagaagaggaaagggtctcaaaagacaggaagatcatggacatataaactgaaatgcctgagtaggcagtagaaatttagagacaagtattcgaaacaagagtatcaaaggggtacaagcatgtcaataccaaaggactagagttcgc

SEQ ID NO: 141192 - DNA, 306 bp, Zea Mays
aagatatcgatgagcaacacgtagagggtgtgagtgcactagcttgacaggtcagtggtggtgtagggagagagctcgatggctcatcgaggatggcacgggaagaagagaatgagaaaggcacaaagaaggccgaagtcgtggggtacacttgagtacctgtacgtccatttgagaataaattttatttggatacacaaggtcaagtatatatggcgttgcgttgtgcatgatcaaataaacttgtggcttcagtaactggcacgaatagtttaattccagtgaagcctggagcctcccatattg

SEQ ID NO: 141193 - DNA, 544 bp, Zea Mays
cttggggttgagtaaatatcatcgtcgtggatatactccgaccatcgtaccgagctagtcaccgatgcttcagatgtgtttgctggagacagccgcttcacggccttgtgctacgtgcctgggcacatttaccacatcgccgtgactcgcttaagccatccgatcatcgccggggagcccgccacagtattctccacgaatccactacgccagtgacctcccattcctccgaccgccgcgcgtctcaatccaaatacaccggccaccgctcttgcctgctataaattgagcccgtcgtgagctccgcagggtaatcacacatctaagccgccaagtcttgtcttcaattgtccactaacgcccgtgaattgcttagtttccccaatccgtgtttccgccaccacgaaagagacctcaccgtggtcagcttgctctaggttagttcaagctccctggacgtttgttctagtctccttaagaccccctattgatgttcgacccctttgattgaactagaccaccctggattaccgtgaacgctcgt

SEQ ID NO: 141194 - DNA, 510 bp, Zea Mays
ggcccaacgaacatacaagaccgtgacccagttcccaactgcaaccacacaaaccgattgtccctcccatgatctcaccgccttgtgacccagttccagttgtgaggatgagatagaagcaggaccggcgcccacccccggctcgctcgtcgcgagctcacaggaggcaagggcggagtacaaggggagctcgtggaggggggccacccgccgctggagaagaggtaggggtgtaggggagctcacggaggggaaccatcagccgctagagaagaggcaggggcgtagggccaccgtcgccgcctggagagaaggaagatggccatcgcctggaggttccactcatcgccgcttggagtgtctcgcactgtaagcctctcttttccgacctctatatcgttccccaaaccctacaaaggccaaagcatccacaaattaatgccttgccaccgctcgaagcattggggcaacgccttaagcaatgaggcggactggtagggttcctgatcc

SEQ ID NO: 141195 - DNA, 398 bp, Zea Mays
ggaagaagaaagcactatgaccattggatcctgaccaatgggccagattagacctgggataacccttcgatccattagatcctgaccgtgcgattgggtttgggcggatcagatgggggtgtatggcgtggttggatctggggccgacgatctttaatccgatggtccttatggcttacaggttcaatgaaagtaaaatctaatctggatggttcgtgatcgatcggacggtcgagatcctccggtaccctttcagccgtgtacaaattactaaagagtccttgatctcttttgaaaataacccgtagtacacactatgtgcaaaggaatttaatttaggtcctccattttacacaccagaccctggacttcagtataatcgtggccatggtccacag

SEQ ID NO: 141196 - DNA, 307 bp, Zea Mays
ggggtagatgtcatcctagggatgaattggttaatgaagtatgaagcgaatgttagctgtgacaagaggaccgtaacattgaagtccccgtccagagaggaggtagtggctgagctaaggatgcctaaaacagcgaaaggtgattgtcaccagatttcggttgatagcaaggaggccaacccgctcgaggctatcaaggttgtgtcggactttctggatgtgttttccgaggaactaacgggcatgccacccgagagaaaagtcgaatttgccatagagcttatccctggtaccgcccccatttcca

SEQ ID NO: 141197 - DNA, 766 bp, Zea Mays
tataagagtgatgtgcacctattggggtgtttggtttccaggcgagctttgccttgccttgccaatttgggtgagcaaaccttgccaagataggagagtggcattcgctccctcacagcagcaaggcagaagctcgccactgcagcctacaaggtgtgcttgccagttatccaaacacatatctagctgcgaatcctctctgggcaaggccaggtaagctttgccagaggatccaaactgctgcattatcattgacatattgggcaaccttgagaactagtcatctaagtgcatttccttgtatctttaaaatgtaacaacaaatggagtttggaaaggtagcatggtctatttagctgtttgttttgcactgtcagttcatgaaattgttaatgcttatatctccccatgaccatgaacctaccttgtcttgctgcccatagatttgtgcactgttgtgcaagtgcatgtgaggcattagaatgactgtttttaatcttgtgatggattcaagtttttccttgaactcggttcctaaactccatcctcttggtttattatcagtccctgttttaatgccacatcattgatcaaatttggccaagtatattttcgcaaattcatagcccagttgcattgtatactaagcaaactaattctcttttagcttgttcatggagtactatcttctttgaggttttttctatgttgagtagcttaatctctagaatcatcttcagactttcactaaatttttaaatttaat

SEQ ID NO: 141198 - DNA, 456 bp, Zea Mays
gcttgcagttggggacaaaggggatatttgtgtgtgtagttgagatgagtatggagtgtaggattgaggtcttaagacaccaccctctgctggacgaaatatcaaggctttgaacctgttggaacctatccacaagtgatatttgggtgctgtaattgggagatgaccacattcaatgtctttgagctgtgctgtgaacctgtgtggcagtgagcatgtgagccacgtaatgaagtgcatgtgtggctggcaccctgagaacacaactccactgcatgctggacaggttcatgggacatctgcccatttcagcaagcttaaaaggcagggtccagtgaggtttcctccctgtctcaagctctattttcagaccacggaaaggagaatagagttcttgtgctcatactagagataactctcttcccagtctctagccttgatctgaaccagagccaa

SEQ ID NO: 141199 - DNA, 1685 bp, Zea Mays
cgccgtgctcggagctttgagttcgctagctgcgtctcacgatttagttttgccgggggagctttttcgcggcctcttctgcggagggacctcgtggtcttgctgtggcacggtatggtccctgtcggggtttgagctctgcttctgtgccatttcgtgggataaggggattccagagggtgtgatgtggttcagtgatgtgacgctcggatgtcacattgaagaagggtatggtttctagggttccgatggtccgtttgttttggggagccggacatatgtggcttggctggctgcaaaacacgaaagtcgttctcagcccacggccggttgcaatttgcaaccccctttctacttagcaattttgcaggggaggggaggagagacaaacgagcttccagctttaattttgtggatctaggggtcctcgtggatatatagcttcgcacgcgtggaagtagatgaccaccggaaggaaatctttggaatttgtagcaaccactgtagacgtagttgaccacaggaaggaaatcctggaatttacagcagcctaacaatgcaggtaaatttgggaccagatgttcggtgtgaaagcagttcatgtttagaacaaatgacctacccaacctctttggggtccgaggccctcgaccttgcataatatgaattgtcggtccccaacctctttggggtccccaaggccctcgaccttgcataatatgaattgtcggtccccaacctctttagggtccaaggcctcccgtgggaacaagggacttactacgactaagtgtaatcctatccacgaaatagaaggatgtgcctggtcctattgagggcattacgaccccaaagtagggaccccatgtctagggtctagggcctactggcaagtccaaagcactggcttataaaatgtcttaggtacaacacattaaatgtgtgatgtgcgacacaaaatgcttgactggtgcacttttatcacgacttaggctacatgatactcgagaccactattccatacgtgcatcaaccttgtagccacgtgtgcgcatgccaatgtaccatgaagtattatcatgtacatagggctacattggctaccaactttgttgtatccaacgacatgagccatgacactcataaatacgacataacatacatgcccctgcggtaggtatatcaactgactggaggacatctccgacactgtgccacgaccaatgtcatagctttgcttacgacaccatgaatatgataaggtcgggattgttgggtctgagctgatgggatccatggttcgtgtaatgtaacctctcttctctcttctctcttttcctacaaaagggggagcagagtaacattcaggggatggattgctgatacacactctcccattagcccaactcaaaatattagttcaaacttagaatctctagctcatagagaattcactctacatagaggacacacacacgtggattaggaccaataggttggaaatcccacaagaaccaagatgtaagggagacataggaggtcatgatgctcagttgggttatgagtttgtaatctttttcacctttgtgcttatcaattgatgagtaacaagaggatttagggtattatgcactttatgaattgaatctcttaaaattggctcatgtgttggctcccaatcatgc

SEQ ID NO: 141200 - DNA, 653 bp, Zea Mays
ggagttgtacggtgatcgatctagatctaaacggagcaagctcacactaaagagaaaattaagaggtgaaaacaagtctaaaaacaaaggtacatatgagttttgtttttgccggttgaaacacaatatagtgtatgattggatttatgatagatagtcatattattgtaagggaaactctaaagcaaacatgattgtcggtagcctctaggtgttaatttacatgcataagcattaggcctagcgacatgataagttgcaagcaaaatatatattttagaacattttgaaaaaaaataccagctcggtgcttgaatgttgtagaagtatttttgagttagcacactagcttgcatacaatggattgaaattgactcattgtgtgccaagtgcttcagtgtggtatcggggtgatgaatagtgcactggctaggtaaggttaatgcttagagagtagggatggtaacagggaattccctatcggagaatgactccctatccatatatcctcgcgaaaaatatgtccatgtccccgcgaacgatgacaagggaggtttttcttccatccctatcctcgtcagggaatttatccaaatggggaattcgtccatgttagcaaaatacaatatttaggggcaaatataaattgatta

SEQ ID NO: 141201 - DNA, 391 bp, Zea Mays
ttgggaccgacgcattcgatatcaattgcatgtcaccattggaaccacccttatatgaacaataatttaagtcgtggatctcatacgtcttaactttttgtcgctgacatcattgtcaatggagccgtgcaaaaatcattgttttatatggaggaacgtatattgtgctcacgcaggttatgtgctcatgtgagcacttttaatctggtgtgttcgttaccaatccaacgtcagtcggtcatttttcatttcaccccttccacttcagttgctatcgcacaagaaacaattccgagaggctgcacatatccctttactttatgtatcgtcttcctgactgaactggtgacggcgccttctagtcgtccgatcattggcgttagggcaagga

SEQ ID NO: 141202 - DNA, 905 bp, Zea Mays
ttgaattagaaaaaccacatgggctctttagaaattatccaccgccgaaggggtatcttctattgtggaccggacgatctagatccgacggtcaaaaacgaattgataagccacttctaatctcgcccacacatctagcatcctagggttcagattgcatggagcttttcccttaatctaatccgtgcgttgcctcttcaatggtccggatcgatcctaatctcgatcaatccagaacgcctcccgatggatcccacggccaggaactcttcttcctcccagtggccgcatgaggcggcaccgagtgcccagcggcggtgaacacaccggcgtccatcgagccggcgccaaggtgccccagctctagagtggacacgcacggattcacgaggggagttaagcgaactccaggaggtacttcttcttaccggcaatgcaggcgtagggggtgatgtctacgaagagggcggctccacggaagcgacagcgctccggcgagaatttagttgagccccgctcgcccacagcccccaattctcccacgcaacggcccccaagatgagagtatatggaggcgaattttatgggtgtaaagactcaccggtcggtggagtcgacagcagcgcagtacagatccgccatgggatgtgtcgtctagcaaggtacgcgccatgcccatgcttacagtttgattgggcgccgagcggactcccgaagccttgcgaggtccccgggaaccaccatggagtcatcacggcagccagaccatggttcgtcggtggcggccattctctccctcgatctctcctctactggattgacggcgctctgctgcacacgatggactcggtgcttcctctatggtcaaggggacgaggacaccgtggtggtggcgggtatggata

SEQ ID NO: 141203 - DNA, 720 bp, Zea Mays
cccgcccgggcttggcctcagacgagtcgtgattatgtctcccgctcgagggtgtcctcaggcaagtcgtgactgcgtctcccgccgggcttggccttgggcgattcctgacagcctctctcgcccgagagtggtctcgagcgagtcatgactgcgtatcccaccggaggatggcctcgggcgagttgtgactacttgtcttgccggaggttggccttgggccagtcgtgactgtctatcccactcgcagatggcctcgagcgagtcattactgcctgtcccgcccgcggatggcctcaggcgagttgtgactatctgtcccacctgaggatggccacggacgagtcgtgactacgtctcccgccaggggttgcccttgggcgagtcatgactgcatgtcccacctgagggtggcctcaggcgagtcgtgactgactgtctagccagggcatggcctcggttgagtcgtgactgcgtctcccattgggggttggcctcgggcgagttgtgactgcttgtctcgctcgagaatggcctcaggtgagtcgtggttgcctgtctcgctcaggcttggcctcggacgagtcatgattgtgtctcccgcctgagggtggcctctggcgagtcgtgactgcctctcctcccgaggatggcctcgagtgaatcgtgactgcctctcccacccagggttgccctcgggtgaatcattactgcctttcc

SEQ ID NO: 141204 - DNA, 462 bp, Zea Mays
cgggaaggctttataggcacgggcgagcacggccgagggcggggctctgacaagtgcttggggcatgcgcgggcgaacgccagtgcgcgctctggcgcctggcacgacgtcgaacacaaggtaatgcagagagaggtcgagttcaagcgcggattggctccaaatctttgagattatggccatgatcccattgagagatctcttcctctgacattcctttgtcgtttgtgtgtggaggcttgcaggttttgttgactggatcaagagatagagagaggagaaatcgggtttgtctcactgccgcgcacagagagaagatcacgggtttgacgtgtccaaggcatgtgtcccgacgccatcttctgatatgaggtagaggggttagttaggcacaattttgtcaatggggtcattaggaattgagctagggatcaaggtgaacaagctcggtctttggctcaa

SEQ ID NO: 141205 - DNA, 504 bp, Zea Mays
ctcataccctggcttcggagggaccatatgtagacactaagtctaacgattgcattgggtagcagctgatgaaagtatatctcaaatttttttaaaccttctccaatcatctcatgcaggggggagcgaagtcctgccctgaagaagcttttaaaaactacgacttcatcgccttttggatctggaatcacctcttccccagcaaaccggacaggtttgctctttgcctccccaaagtagcccaatttcttcatcatgaccacgtcgtctaccgtcatagtagatttaccaaattcaatgtggctgggtttcgctgggctcagaatagtgtagtcctcttcatctttgctctcacttcctccttcagctgcgatctgttcagcttcagcaatcgaggtaccttcggcaacaacctcctctggcaacaagacccgattgcctcatcacttctgatattggtgtcgtttcagtcacttcggcctcgtccccctcacgagactccct

SEQ ID NO: 141206 - DNA, 456 bp, Zea Mays
cttcccagcgaacaaaaaaaaggaaaccaaaccggatgtgtggacgtgcctagaagcctctcggtgtgcctccagtttcttactacgacggcggccactctgccagcggcggcagcgacgacgctgctgcgtgcgcctccatcgagcccacgcgacgtttcctggacaataatagtgttgctgcatccgcctccatccatcccacgtttcctcgaggtaaaaagagtctcaaactaaactctgattgctttccaccatgccgacattgcctttggttttgaatctctgcaatacgacctccacctacacttagcacacatgcttttgggtccctttttttacctccgcctacaccggaagtcatacatgtctttttatctcctctattataccacattgaaaaccctaactgtgcccaaaaaagacttgctagaccgctcctagccaaggtctcgg

SEQ ID NO: 141207 - DNA, 670 bp, Zea Mays
agtcactggaaaacctgagtggccgccaataggtgaatcatgaagggccgaaatgatttggcgttgtatatccgagctactccccagccacacgcgtcctttataatgaatgattccctgagatagggtgtatggagcagcagcagttgtggatatagacagtttggtcaagagttcctgcgcctgcggatcatcactgtagcttgcaacaaccccttggatccacagtggagtactctgagaaatatgcatgacttgcccctctgtcggaacccgagagagagcatcagcatccatattatcgcagccctttttataaatgatgcgatattgcaaaccagccagcttaacgtataacttctgttgccaaacagtatggagccgctgttcatttaattgcaccaggctttgatggtcagtataaatatgaaactcagccagctataaatatgatcgccactgcgtcactgcaattagaatggccaaatactctttttcatatgttgagagtccttgatttttgggtcccaaagatttgctgagaaaggcaagtggatggcctcgctgcatgagaactgcgccaacaccagtgttgcaggcatccgtataaatgcagaagggaactgcgaagtccggcaaagcaaggacaggtgctgaacgtaacgcctgc

SEQ ID NO: 141208 - DNA, 594 bp, Zea Mays
ttcccattaaaatatacacataactttatagattcatcttatctttaaagattctatcttatccacccatctcaacccaaccacttcgcttatctataataatgtaacaaccatgatctagtccaaaattaactagatcttatccatctaagctagtcataccaatctaatccagatcccatctaagctgctatgatctaatctaatgtgagttacttaaccagttagttaatcctggtgaaatagattagaccccactccgataaaacatgaacctaaattggtgccttacaccaactcatctatgaacaacaacctaacttacatcatgtagtttatctcatccatatccatcttaaccatattcccaacccgatgacatacactaacctcgaatcaatgagaccaaggccggagatgaaaagatcaacatcgacaaggaagaatataacagtcaaagaaaatctcgacatgaatcaagacttaaacatttcggatgaagccttttcctcaccataatctttcttacctccacatgtccaacttatatcctacataataagtaactggatacctatgctcttccaatcaccc

SEQ ID NO: 141209 - DNA, 637 bp, Zea Mays
tcaaataattatactggcattaaagtgcttataaatgcactgtagtttactcactattcatgttgccatgaaaaagaaatacatccatcttcatctagctaaatatttgaaggagtatcataaattcttatatgttcagcttattttcttgttagctataaagtggtgcttcccagtggtatgcatgatcatatccatgcattaataggattgtcagaattgggtaatggtataagtaacatattctttttgaaatgtgattctgagcttgtgtagataaatgttcctcattgaactatgaattacacatcaagctctaaatttacatgttgtgctgttgagtctaaactacatgcaacgattgtaattgaactgatttcttaccttgcagcgtctagaatcccaactatcaagaaccattaaaattttatcaacaaattgaggcacacagtaccagtaggttagactgtttgctatatgttttggctaatttacaagaatgatttgtgatgaaccctgcaagttaaggcttgctgtgacaatgttttaagttgggctttggttcagatgaaacacatggcattgttcccttctctttggaaaatatgaagcactatgtataaatctgaacaattga

SEQ ID NO: 141210 - DNA, 418 bp, Zea Mays
ccgtcagcacgacactggcagtagaagccaagaatacaggccaaggaaaatcaaagggatttggaggtgacaggtccaatcagggacctgagaaacgaaccaggttggtaatccgacctcttaatcagaatcattcttcgcctcgtccaccctcctatccgtttaaacagcctattttcattcgtcctaccactgcccccacttctacaaatcagccgagtgcccctagtgctcgtttcctcgccctccctagttcttccactggctgcttcaactgtgggaagtctggtcattttataaaagactgtccatatctgaagcaaaataagttcaacaatcaacagaactctgggagctccaatcaaggcaaagggaacatggctaataattcagcgggcaagaatgtcaagaagactgg

SEQ ID NO: 141211 - DNA, 715 bp, Zea Mays
ttcgcgctcgggttttggacccctaaaatccaggtgtgacataatggtaagagctctatgttatgaccgacaatgtgtacagccggaggtctaaaaggccgactggtcggcccattgtaagggacgatgcagataaagcatagagttattagcaatttctgttgcaaacagattagataagtcctagaagtaaggagctattagagggagtttgttacatattagataagtcctagaaataagaagttgttagggggagtttgtttcgatcagggactatataagtcctatctctgtaactaggatggtcagccagaaattaatctaaagaagagattatttccttacctctcattgtgcccagccgtgcgacagcacggcgtcctctcgcccccgttcttccagcctacgctctaccccccaccactcatacaacctaaggagtagagatcataccactctatctttcaattaaggaagaaataagtataatattgtgttaaaatatctgaggacacataagctccaaattcaagagcatggccagaacatgactgctccatgctacatatagttctcaaaacagatgagatgaactgatgagattcaaaaattttgggggattagtagaaggtatctggagaaggttggacaaacgatttaaaaaaatgaattggccaactgaaaagttgcaagtggtaaggctaacagatat

SEQ ID NO: 141212 - DNA, 440 bp, Zea Mays
gtaaatatagaaaattaacctgagtttgaacttcccacaaaaatagattcaaacttgaaatctaaatctgaaaagggagaaaacaaaacaaaaaagagaaaagcttgggaactcgactgggccgaatctggctggcccaactcggtttccctcccgcgcagcccatctccttcccttccccttttctttattcctggcgcttacatgtgggccccatctgtcattccattcatcagccgctcggtctcaccttgaccgccatgtgggccaacggcgcagaagtctcttctatcttccccactgaactcagtctgttgcctccgtcagaaatcccggtggctgttgaaacaaactgcccctagcaaaccggagctcgcccggttgactcggtagtcattccccacgatgggataggtatgcgccccctggctactttgctc

SEQ ID NO: 141213 - DNA, 313 bp, Zea Mays
aggcagaagataacgcattatctgcggccttcggaggccggaagaagaagaggctgaatagagttttcgatgctattgggtttatgtaccctgattaccgataccccgtcgcgggggcagaagagaaagagtgccatttccgggaaagatgctgctccagctgctccaagcgagcccgcgccgaagaggaaaaaggtgaaggtccttactcaccggccgtgatatattgaatcggtcgaagtgtccgaatttggcggcgaaacctcttcggctagtaaagctgaagaatctgccctcacacaaaggaatgaag

SEQ ID NO: 141214 - DNA, 518 bp, Zea Mays
gcagtaatgactcacccgaggccatccgcgagtgggatatacagtcacgactggcccaaggctaacctccggcaagacaggtagtcacaacccgcccgaggccatcctccggtggggatacacattcatgactcgctcgagaccactctcgggcgggagaggctgtcaagaatcgcccaaggccaagcccggcgggagacgcagtcacgactcgcctgaggccaccctcgagtgggagacataatcacgacttgtctgaggccaagcccgggcgggacaggcagtcacgactcatccgaggccaagcccaggcagcagacacaatcacgactcatccgagaccaagcccgggtagcagacgcagtcacgactcgcctaaggccactttggcagaactgtccgcacccggcctcctccacctcttcctgcctctcgctctaaccgcgccacgttccacatgtcgcggcctccatccacctaacgccctccaatctgcctcccgacgcaattcgcggtcc

SEQ ID NO: 141215 - DNA, 689 bp, Zea Mays
ctgaaatgaagcggcagaccaaggtacttccccggtaattttgagtatttgccaggaaacacctccatcagttctggccagagagactcggaataacgaattgggaaaatttcagttttattaaaattaatcttcagccctgaacatccttcaaaaacttccagaatccttttcagaacttttaaatcctctttatctgctttaacaaacactccagcatcgtcagcataaagagaacagcgaagctttgccgctcttggcagaacccgccccagaaacccaacatctgccgccatctcaatcatcctctgtagcgggtccatagctaaaataaacaggaacggcgatagcggatccccttgatgaacgccacgcatgtgcctgattgcatttgtttgttggctattgattaagattctggaggaggaagagcccaaaattgtggcgatccaattcctccacttctgagaaaatcctaaagctcttaaaacctctaacaaatatgcccagttgacggagtcaaacgcttttgatatgtcgagcttgacaaaaagtgctggttgtttgctcttatgaagtttctgaataactttttgaacgtagaggaaattatcatgaattgaacgtttctgaatgaacgcgttttgggctgtggagacaatctcattcattcttggcgcgagtctatt

SEQ ID NO: 141216 - DNA, 893 bp, Zea Mays
ggaggagggagatgtaccatgtagggcaccggccacatgctcttagagaagctcctatgccttgcctctgtcctctccaccgccaagcctataattgtcgccgcctctatttatctctatatttcctcgcctgtgatggatctcacgctttatgcgtgcatgtgcatctacacgtgcacaccctacacaacgaatgtggtgaatagtctgtttggtttgtttgatcgattgactagatttgatttggtggccggagaggcgtgaagagtgtcgagtttgctaaatttgggtctatccaatttttgagtgactagcatatatttcgcgctaacgctacgattccgtgaaggggagagatcgacaacgatgacgacgtgaggggaggcattgacaacggcgacgacgacgacgacacgggggagggggagggatgattcaaaaaatattgtccattggatttacgtgggtaaaggaaatagagttatctagcgatctaaaccgttagttttgatggtgtattaaatttgggtgtaatttgtttgttggatttatttgagattatgagtgtggccgtgatttgggtgggcggtttttgcaaaatttaaagggtgaattatatggtggtatagattaatgtgattagtacacggtcgcaatggggtttatctgtggcagcgtgaatttgttggaatggcatgagatgtgaaattgggattatttaagtacgcgttaatttgggcgatcacttgtagtggaactttgatttgacttggtcttgaggattaacgacgttgcctagctaagttatttgtcgttgcacgtgtgcatgcattcccatcacttatgattgctgggatgctcggtcccaagtcacgctcacttgaggacttgag

SEQ ID NO: 141217 - DNA, 441 bp, Zea Mays
ccacgggataaaaatcgcgtgtctcttgtgttacgtctctctatgattaattatgttcgcaagagatcgcttcaagccacttagccgcactaacacttataaccaagttttgtggctattagtttttgatttttacaggatcacctattcatcccctctaggtgctctcagatttttcactaatgaaactagagttttttaaggactggggggctcgggcagttaagggaagggaggcaaggaaggtgaggcagacagaagcatgcggctagagaaggatgaaacaacctttttaaggtaaagcgggacaagacatgcaaacgcaaagtcaactacctcgaacgaatcaaaacaccccagtaagtacgcatcatccttactttaaactccctttgacaaaatgatcgacttaataaacgcacattgtcacccttgctaggc

SEQ ID NO: 141218 - DNA, 855 bp, Zea Mays
ctcaattttccattcaaccaaacattcaaaaacagcctgagctatgacaataccagtgtgtggaggatccaattcaataaagttcagaacacgacattgcaagatccaatcaacatcaacataatgtgccactaaacacatatactgaatgttttgatttgatgtccataaatcagtggttaaacttattgattcagcctctctaagactcttcttgagtagttctttctcagattcatagatcttcatgcattcatttttaatagtcttcctaccaatagattcataattgttattcatccatttcatcaagatattgaaccatttatgctctaccattctaaatgcatattcatggacaattatcatcttagcaattaacactctagtgtgctcatgatcatattcagtgggattaacaacaacaggtccaccatctgaagtaaaggagagactaccttgagcaagatttttcttagcttgtgccagcttgttcaaatactgtgtgcacttgtctaggtgtcggtttagtgttgtagtgctgcccccttgatggtacaaataagatctatgacagaacttgcacttggcttttgtctccataaccccaagttcctttctagaagcaacagtgaccaccttaaaatgcttccagcaaccagccctctttactctattcgccttgcacttggagggggacaactgaataccagctcttgacctctttcctcctctatttgtcttttcagtttttgacaattcatctccatcagtggaaggtggaaactcatcatcattatcaaactcactgtcatctgattccgacaacataacctccaattcctccccttgtcc

SEQ ID NO: 141219 - DNA, 498 bp, Zea Mays
ataaaatcccaatttgtgatgttttctgtgccaaaaaggctttcatgcattaatattgaatttcttcaggttacttcgggtaaaactttatgcacgaggagagagcagagatttaacttatctgtgttccattgtatttcgatttaatttcccagatttaatatagttgttatggccacttggcgatatatataaatatacgatgccacacaacacaatcaaacaaaatataaagtgaaaacaaaattgtttacgaaggttgcacataatgtgacttcacgaccttgaacaacccaccacaatccacgcgagtacaagctctagcgtatctggcgtcaacgcgtgtgcggccatcagggctacgatagtatagcaagccttcgtaataagcgcaacaggcacaattatggctcggtaattggggaacacgataaatccacgcaacgtgcacaacaggcgcaatttttggctcgcgttagacagacagtgcctacaggg

SEQ ID NO: 141220 - DNA, 638 bp, Zea Mays
cgggcctagtgaaggtgagatactagagagcaccggtgaggatgcgataggtggtggggtcacttacggaagcgttgtcgctagagagcttggcatgcgtgtccaccggggtcgcacagggtttagtctagcatgccagcccgcttgaggatgtacatggtgtactgtcgctgttgaggaagagtccatcggagtgatgctcaacgacgatccccagaaattgatgaaggggcccaaatccttcatgtcaaactcatgctgaagggcagtgatgatccggtgcagggagccgaagaggaggcaatgagcatgatgtcatcgacatagaggagcaggtacatggtgtcactgctacgctggaagatgaacatggatgtgttcgacttggcctcaacaaaaccatgggagagcatatatgtggcgaagcggctataccaagcgcaaggtgctttctttaggccatagagggacttgttgagcttgcacaccatatcgggatgagcaggatcaacaaagctagtaggctgactgcagtagatggtctcagtggaagtcccacaaagaaaagcattctttacatccaactgatgacccgaccaagaacgtgggagtgccaaagtgaggaggacattatggac

SEQ ID NO: 141221 - DNA, 593 bp, Zea Mays
ttccattgtctccaaatgactcctcttccatactacctgaatttcctagctgtcatccgcacggatgctttcttggcgaggttgccttttaaattcgcgtagttgttgctccgactgaggaaccgcctttgggaattctcactctccaccatcatcttcctgaggcattttttatttgtgacaccatccgaaagattgttcattgtttgcaccataggaacttgtgcaatttggttgtgaacatcaccccctgcgcctccatggtactgtatatgtgcctctgttcatctcctttgcttccatgattttcgtctttccttcaagatggtgcatcacttctctcactctggtaagtaaatggaacattcttacgcccctctccactgattgacacccacttcctatcgcccatgaatttgctagaaacccaccttagagatttatcaaatggcgccagctcgtccttaacgaatttcatagaacaacttttctgagtgtgtccgatcagaccgcacatataacaaaaatccgataagtattcatagcaaatcggacaccacttctcctttccatctgcttccaactgcatcgtg

SEQ ID NO: 141222 - DNA, 607 bp, Zea Mays
acagtatgcaatgtggaaaggcaggtgtctgttgaagtgctttcataccaactgatattatggttcacctattgatggaaccaatcaccttcgttcagcttgcacaaaactagcctggacttccttggtgaaaactggacctttttccttacgttcacaagagagggttcgattcaggactgtattgcaaagtgacaacatgccaccaattatctactatcgatttggctaggtaaattttcaaataaagatgaactcattcaaaattttcaacatgggtgcaaggcttgcctgaaatcttccattggccacatgagcatgttttcctgtcaagatccactccatgtctccaaggtgtgttgtccctagttaatccagatacttcggccttaagaccaccacttcctgtgattgtatatttcaaggatctgctcttaatgttcagcccactgataacactaggaagtactcgtccggttagcctcgcagctatctttcgtcagctcctgttggatcatctccttctgcatcaaaaccaagatccatatagtgctccacctcttcctcctctgctcttttaggaccagctgctgtgaggccatgttct

SEQ ID NO: 141223 - DNA, 683 bp, Zea Mays
cttcctgagatgttctatgttccatgagttcccaatttctgttccatccatctgagtgaggcgatatgatcccggtcgagtgacttctactattatgaatggtccttcccatagaggtgacaatttatgtcgtccctcccccgttagaattcggcggaggacgagatctcccactgcgaaggatcgatgtcgtatggccttatcatgatagcgcctcagagtttgttggtatcgcgctgattgaatcaccgtattcagtcgctcttcttcgagtacgtcaatgtcttccagcctagtagcttcagcttctgctatgttatcaaagattaaccttggtgccccgaacttgagatcggcaggtagcactgcctccgaaccataacccataaagaagggggtatttccatgcagagctcggctgggttgagttctcaggctccaaactacatatggcaactctctgatccattttcctgcgaacttttcattcttatcgaagactttctttctgagtgcttctaatatcatcccgttggctctttctacttgcccgttggctcttgggtgcgccaccgaggcatatttgatctgaatgctcttttgctcgcagaaatcgaagaattttgaactggtgaagttggatcctaggtcagttatgatgctattcggtatcccgaacctga

SEQ ID NO: 141224 - DNA, 318 bp, Zea Mays
tagtgttctccccaccaaccctcacaatagatatatcatgaaaatattttccctttattgcttcaatctatcccttcttgatggtagaatttccaaacacaacatgacttggcctccagggccgatctttggcatcattgttgtcactctcaatatcaaaactctcgttgtcacttgagtccccagatagcccaactaacatctcatcagtaatttttttcaacattggtcctctctatggcttcgtaaaaaccagagagtgcgggatccataattttcttctcttcggccatttcagcgatgattgcaacaaaaagc

SEQ ID NO: 141225 - DNA, 590 bp, Zea Mays
attttttaaagagcaaagccctgtctaagtatcgtgaggtagcccgagacagccagtttctttccgaagagacatgtaacccatccctttacagcatgaatcaatccgaagtggggtatttatctataatcacagtttacaccatgaagcaatccagtccaatctgtttacgcaaatcatttcactatgcagaaaagacgcacctcccggccgcggcgaaattcttcacataaccacctccgtcatctaaaatcgggatgagtcatcgatatacacgcaaggtgggtttcggttgcagaacccaaatcagattttgcagagccaatcagtgacttgtcaaagatgcccacaaccaccagaataagagcacaaagaagacgtgccttccttgagcttcaattactaaccaatccagagctcagcaaaagaaaaactttgtgcaacaggttttccatcccatccgatgcaaaagaaaaactgcagcaaaaagatggggcatccgaggcaaaactggccttgtatatgactgatgaccgagagagtctgagacattgtagagaccaagttccaggaaaatgtgtagcaaggct

SEQ ID NO: 141226 - DNA, 716 bp, Zea Mays
ggtcaagggacgtctctagttgagagatggggctcgttggttcgacaagctctgacctccaaggacgggtcacatcatcgcgacgaacgaaatctgacctatcgagcaagctcgctcatgaggatgacgagcgaggcgggggcaccgggaaggggtggggttgtgtagtgtcgcgacataaggaacgagacatcgaagcggactggatcaggcggtgtcgataagaatgggactgggtcatagtcaaaatgttcctagatcgattggattgagaagcggggtcatgggtcgtgggtcgacactttaaaaggagaagtatacatctatgagacgagaatattatgaatttgatatgttgagtctaatgggccgatgatcttgggtcgattctatgggtcaagggtcgtgttctaaaatttcaataacaacctaacaccagtctaatattatctcattctaccattgaaactttaggctatctctatcagattccatatcttatcctttattttaaactttactctacaaacagtgtcatctacagtcatgcatcccctattttacaccacctgctggagacagtgttatatttatgcaaacagaaaaacttcaaccgacctaaaactttaatttttctatactaacattaaatgaacattagatatataagagagaaaattaagggggacatggcccactttgcccccctctcggtc

SEQ ID NO: 141227 - DNA, 888 bp, Zea Mays
cggaatagcacaacaagcgcattaatcgaagtcttttatttaaaagacactccgcgcaaaagtcgtctaagggtgcagccggaatagcacagcaagtgcgttaatcaaagtcttttatttaaaagacactccacacacaagtcgcctaagggtgcagccggaatagcacaacaagtgcgttaatcgaagtcttttatttaaaagacactccgcgcaaaagtcgcctgagggtggagccggaatagcacaccaagcgcgttaatcgaagtctctcattaaaaagacactccgcacaaattcgaccacggtcgcagccggaccaacacagacgtacgaatacggcaaacatgccacattaccatacaaattacaattacatacacacgacgagggcatcacatattacattggctcaaccttcaggatgatacccatctccctgtaattaaacaacattattctcaattcctcaccctcaaaaggcttctgaagatccccctcgcctatgctcgccccaatcgacgaggacaacaattctcgtttaccaacccgatctactcggagacggccacgctccatccccatacgacggcgcctgccacttcgcgaaaattcacccacactatgttttcccaccacccttcgccgcctacacccagtactcacactaggaagatccccgacaccctccacatgtggcgaagtctccgccgcagccacatccaatgcaacaaaataatccaagccttcatctgaggaatcctccgtccaaggaaacgaactcccagattcaccatcagactcatcattggcagatcgccaaaatcacagcaatagcacattccatcagactcatccagatcgccaagatcctcaacctcttcgtcg

SEQ ID NO: 141228 - DNA, 451 bp, Zea Mays
ttattttgcattgagattttagactcacgctgggcgattaaattatatattgggtactcgtacgccaatctgactacataattaatcggctgagctatggtattggctgagccctggcaacacgatacagtatttgtgtcatatgaacttggctgcgtcatgtgattgttaatcgcactctcgcttaatcggaccactcccgtagagttggattgccatcgccgagtcacatatttttcgcatgccctgtaggcattgttcgtctgtcgtgatcatcgagccacaattgcgcatattgcgcatgttgcgtggacttatcttgtacccgactattgagccacaactacgcctgttgcgcttattacgaaggcttgccatgttgcttagccctgatggtcgcacacgcgctgacgccagatacactagagcttttactcgcgtggattgtgtt

SEQ ID NO: 141229 - DNA, 619 bp, Zea Mays
tctaactcaccggcccaggcatattgaaacggctgaagtgccgaagctgattgaggggtcttcttgcgcatctgagccccatggcccgggtcctgtcgaagctagagcgaagccagccgaagacccagaatcaaagaaatcgacagagcaaccgaaggctccaagcccattgcaaaggatggaactgcggaaggcgtcgaagattcctgtaacaacttcgaaaaggaggaggatggccagcgtactctgttatggaatccacgaaggcgttaactcctgcctctgccgaagcacctagtgcagaaagcgagattataaagaaatctgccgaagctggcacaacccaggctgcggttgaggctgggccctcagtccccgccgaagcaagaccttcggaggctcttgaggagggtggtgaagcaagaccttcgaaggttgccgaatgatcattaatgttaggaaaagagggtgctacggaagaatctgagtcccctgctcctgtagcatctaccaaggaattggaattcatagtgcgtcatgcttcagggaaaaattaccgaaggaacaaattgtagaagcacaacattacgccagggatctacaataccctcaagggtcc

SEQ ID NO: 141230 - DNA, 286 bp, Zea Mays
cttttttggatcagattcaagagaaacgactgagtcctatcatagttggctagccagatcctgagagtatgaatgcgtggagttgtctgatttggtgaacgttgtccctcgggtttcctgccttaggtcgattgagattgtttgagtggtattgactcgggttgtctgcctctatagtggaggcctcccctcccttttatagaccaatggagagagagttacatatgataggtggggcatggggctagattgaatgcctgtattgtcctccatttatgggtgcccc

SEQ ID NO: 141231 - DNA, 356 bp, Zea Mays
aacgaatcaactgagaccgtacctgtcacaacatctccctgatatctgtcatccgtagagggtaacacatatgctccagaaacacccggagaagaggaagctcccagagtgaaattaacagaagaaccccatggagtcacaggatgaggcagacatggagctccaaactgagatggtacaggagtggtcggtgcaggagtgggcgcggccaggaactgagggaaacctagcataggcaagaactgaggagtaccgggcatataaaaccgctgctgagggggtcgtacagaaaattgttgctcagcggttgtcatcatgttgacagtgccctgcaaagaggaggaagtcaccggctc

SEQ ID NO: 141232 - DNA, 431 bp, Zea Mays
atttaatctggcacacatgaacgaacggacatccgaatttgagacgaaattccagcgtctgaaagtttatatcagacacaaccagtaaagcgagttaattgactttataatactctcgtcgcgcggtttcgccggattactactccgcagctccgcttcgccaggatggtattatggagaacgcgaacacgccaaattagtatggttagtatctcgcccactgtaacattccatcagcaatggtaaaagtcatttctatccctgctttaaccacagcgcactccggtgaaaacctaactccactcgtcccacggcgccgccaatctctctcgttcctcctcttctccgatggcgactccgacgagaggcaagaaacggctggtcgtcgacgtcgatctcgagttggacagtgagaccgaagtggctgccgc

SEQ ID NO: 141233 - DNA, 354 bp, Zea Mays
ttattcgataaaatgtttatgcataacggttacataaaaatgaacaacatatattatcactgattttaacaactcacaaatttaatttgcagattaattcattccgccattactatttctccttgtcagggagtcacaattcaaggaagagatgcattgacccaaagaaatatgaatgagccgccgatggccgcatgataggatcacttgtgactgagaaccgagacagagaccaacaacacagagtcaactcgtgattacgagattaaacttcattttatccagccctccgaatgaacaaaaggatcactgcactacacacagatgtaaacgattttggttatacaacccgcc

SEQ ID NO: 141234 - DNA, 390 bp, Zea Mays
gtggccattgtcgcactggattccttggatggtggtgccaaactgagtgtgcacaaaggagaaaaaatgagtgagggtagaaaaagtgtcgaatttaagccgcaaggagaacatccacaaataatgtgagcaatcatctaggatgactaagtaatatttgaacccagaaatgcttgggacgggtgaggtccaaagatcacaatggattaactgaaaattttgtgtggcacgtgatgaagacacatgaaatggaagacgagtgtggcgacctaactgacatgcataacataaaagatcactagtagttttattacatgaaatcccggaatctgctagtttggataggacttcacgaccggggtgcccgagacgctgaagccaaagtgacga

SEQ ID NO: 141235 - DNA, 737 bp, Zea Mays
ggagcggtgcataccagatacaatgcagtgatgaaaattgaagaagcatcggggaagtctcttgccaagtcggaactcaagaaagtttgggttcagttcattggaattcctcctgatatgttgcagttcaagttgatttgggcggtaggttcagttcttggggtgaccaaagcggtggatatgagttttacaaacaaatataatgttggtcgtcttcaggtttgcgtgcttgatcctagcatcattccacaatttgtggatgttgtgattggtgattttctatacgaactgcagttccgggtggaagagaaaacgttggaggataatcctgtgccgatggatatggatgattatgatagtggagaaaataatgcgaactcatcaaataataatgccccagataatcataaagggggagctgctcctaatgtcattgggtcagctagcaacattgaaggggaaccaaagaacaaggatgtgaacgaaaagaaagtggggctgctaggagggcaagagacagaggtactcatggacagtgagatggagggatccgatctggtaccaggctcaggtgctccagatttgtcttttggtgatggggccgtaattagcaagatttcaagattgttaactcctgaaggcttagcacttgcggcagtaccggaggcagtggttggctcctctgtcatgaagagaagtaagaggagagcagcatcaagcgcaggtgactccattgt

SEQ ID NO: 141236 - DNA, 445 bp, Zea Mays
gcgtgagcatgtcgcatcgtcttaagtcatcgccgacttaagccgattgctccgttagtagggtatagtggtcaccccgagttaagtaagcgtgagcatgtcgcaccgtcttaagtcatcgccaacttaagtcgattgctccgttagtagggtatagtggtcaccctgagttgagcaagaatgcaggttgacaatgaacaattcttgaagtctttttattgatgatgcatttcccagtttacagaatacattatcgccccaatagcttttgaaatatagctaaggataaaacttgctgaggtgttctatgttccatgagttcccaatttccgtgccgtccatctgagtgaggcggtatgatcccggtcgagtgacttcagctactacgaatggtccttcccatagaggtgacaatttgtgccgtccctcccccgttagaattcgg

SEQ ID NO: 141237 - DNA, 286 bp, Zea Mays
tcaactccaaacttcccacgatctccatactcacgaccctggaaactcggaacactctcccacgatcacagacactgtgtggcacaggacatgcccctggctcgcgcttaacactgactctacagcaaaaaactcccgccgagagcctaactgagaagctgaagtatctaacaatctccccctacttctgcttcccataatccggaatcctaaacgactccaatcttcctgcgaatctcctagaaacgcagcctgcttaaagctttggtgaacgtatctgcaagct

SEQ ID NO: 141238 - DNA, 385 bp, Zea Mays
gttttttggaagccaagatacgtatctgtatggaagcgtatggaagcaacgatggtaaagcgagccgttctgtaagccaagccgcgtatacgtccgaggcttagccgagctgcgtatacgtccgaggctttatccatgagatgcagatgccgttgaatatccacgcgtcgttaatcggtgccgggccgcaccggcggcctcgtgcggcacggccgcgtgcaatttttttccttaccaccaccttgctttactccttgctgcacacaaccctagtagcagtcttggtggaaagcaacaggccttggtcatggccaattggccatgcgttgtgcagttgagctagctaggggggcaggcctagggtgcagtatattaagtgtttttt

SEQ ID NO: 141239 - DNA, 712 bp, Zea Mays
cagactcatccatccatgtacattaagtgaggaaaagttggagcgatagactaaacagggcacgacgatgccggagttgaggcggtccaggcggctagagagtcaatcacttggtattagctaaagcactaactaataaattatattaattacatcataaccagaggtaggcacgagtgggattgaacaaaaggcagcagcggattcagggaggcggagattgctagcctgtattacatccttaaggttgttcatggataatggatggatgatctctccttgtctctatgtgcgagtctactgttagcagtcacgcaacaagtgttggagctgtcttcttcgagacgagtggcatgagcagcaactactgcaagctgtggagaggagaggagcatgctttctatggctgaccacggcagcctgtcgacgaacccctctgtgtccttcgtcgttcagcaatcctcttagccacacaacacacaaaaaccgtggtcattggcataaaattctacctacaacaacccataaaaaacaaaacaacgtctcatgataaacactaaccttaaaaactcagacgcggctgcaaccggacggaccggcggcgccccctgggtcagatccgaccgaggcgccgagccctccacgaatcggatcaaaaggactatcatgctcctgatccagtcggtgtgccgcaactgtctgctggtcgtcg

SEQ ID NO: 141240 - DNA, 1205 bp, Zea Mays
cagggagggacgccctcacggcgcccacagcttggaccccctcttctcccgtagccgcaggccgcagcaacagcacgacgcgagcgcctccacttgtgacgtccccgctccgctccctcgacgccatcgaggacccggaacgcccgtcgactgccgcgcgcctcgtgctccgaccgatcctgctcgcggttcgccctagccttggtcccacttcgtgagctcctggcccggtggcccctctcatatcttcccaaccccattccattccgtctggattccaacttgccattacattatgtcgctgtttttcatctgatcctaaggcgtggcctacttgttgacttgtgtagtgccacaaggagagggcatcatgctccactgccctgtgaagtgaagtttgctgccttgctgcttcgtgttcagagaccaaggtaccccaaggctgtgggagaatccacgtgctgccactacttcatctgggaagctctttgcagagcagcgcagcatcgacaagccctcaggcaagtccaccatccatgttgcttaaatacagcaatgtagcacatattgcatccttactttataaacaactctccaatcactttgaggtcactagcctagtcgtatatatgagtcaatttcgaagttcttttgtttctcttgtaactcttgtactgtgtgtgagaatggtggaaggcgatacccaaggagggccaccgcatatcattatatagcaattagaggattacaatggatgacaataatcatgccgagtatcatgggacgcagcccaaggatggaaacaataataactattatagcgagatttcctctctatcctaacacccccctcaatctgtacgggatgaaatcaagttcagattgctacaaatatggcgaaaagcaggtcctggtagagccttagtcattatatcagcaagctggtccttagaggagattagtcgaacatccaattggccggaagcaacacgttctcagacgaaatggtagtcgacttcgacatgcttcattcttcgatgaaatattgggttggcagtaagatatgtagcaccggtattgtcacaccatagaactggtggtcgaggaagaacaacaccaagttcccgaagtaatacttgaagccaaataatttctgccgttgcattagcgacttccttgtattccgcttcagtactggatcgaga

SEQ ID NO: 141241 - DNA, 476 bp, Zea Mays
ctcagacatagagacgagagggaggaaaggatcggacgcccgcgcgcggcagcatcagcaacaacgaatgaactttggctgcagtgcagtgcagtgcaggcgtgcagcacagctctctctctcactctctctctctccacatcgaaacatctgccggtgcagacgacatgcgcaggcccatcgttttgcaggcacacggagagacatgcttgcgtgaacggatctgccaaaccgaatatatagtaacgaacagcccagtcccaccagcttccaatcaatccacacacaatgatcacgcagccctggtttaacacatgcactactggcatgtttggttgtctggataggtgggcctggctagtatctaaagaacctgactcttaacctggttgagagcatgtaatatctctacgtttggttgcttgtatgagcttagcctgacccatgcgagatgatgtttggttgcttgaataaat

SEQ ID NO: 141242 - DNA, 410 bp, Zea Mays
caacggaatgatattggaggcactaggtcttcgataagaatgaaaaattcgcaggaaagtggataagagaattgccttatgttgtttggagcctaagaacccaacctagccgagccctgcatggaaacacccctttcttcatggtctatgggtcggaggcagtgctacctgctgatctcaagtttggggcgccaaggttgattttcgagagcatagcagaagctgaggccaccaggctggaggacattgatgtacttgaggaagaacggctgaatgcggtaatccaatcagcacgataccagcagactctaaggcgctatcacgacaaggctgtgcggcaacggttcttttcagtaggagacctcgtcctccgccgaattctaacgggggagggacgacacaagttatca

SEQ ID NO: 141243 - DNA, 1346 bp, Zea Mays
gctttgtgagcatacctcgtcagtaaagttcagaatctgataatcgcttccattcattcgattgttcctaatccgcaagccaaaaaaagagttcttatcaagctagcattttcagttacctcgccgagaaaggttcgtttcttcatcacccagcacaaaccaagaatctacttaaccttctctcgatggcccaataccttatccacatgcatccgatacgaaaaggaaaccaccattgctgctcccagttcctcctctggtacctcctggctccgatccggctcaggaagaggaggaggaggaggagaaggagcaggcagcagcaatgggctgctcctcgtcgaagctggacgaggaggcggccgtgaagacctgccacgaccggaagagcttcgtgaggaaggcgatcgcgcagcgggacctgctggcctcctcccacgtcgcctacgtccagtcgctccgccgcgtctcgatgggcctcttctactacttcgccgaggacgagcacctccaccggctgcaggagtcctcgtgcgtgcaccgcccgggatcgcccgacaaggttctcgtcgtcgtcaactgcctgaggccggcgggtgctccggtgcatccggtggtcgagcagtgggagccgactgatgaggccattgaggctgccacgatagacggattcttcggggcggatggcccgttcctccgtcctccgtccattgatccgatgtttggcccatcggtgtcgccgcagccgcggagatgggacctcttctgggaccctttctcttcgctgaccgatcatccgagttacagcgtcgaggaggtgagagatgatcaagaagacgaacagataccagagctggaggaagagagtgacggcggcggcggcgactgtcaccgagaaggtgaaggcggagcagaggaggaggagggtgaacaggcagcagtagcagcacaggtggcggcgccgtcgagggagcaggtggggagaaaggtggaccatgtgagcaacgagctgagggtgctggcaagcgcagaaatcgagcagcatggcgcgcctggcttcaccgtgtacgtcgaccggcccccggcgagcatggcggaggccgtgagggacatccaggggcatctcatgaagatccttgacactgccaaagaggcctccgtgctgctggaggttgtcccctaccagaggagaggtaagcgctctgtttctgacagcgacattgccagtacattgagatcctttccattgaccactgctctcttctatctagacagttcaaccacctgtcccgagggacgacggcgaggagcagggcgcccccgaggtcccgccggagccgttcgag

SEQ ID NO: 141244 - DNA, 367 bp, Zea Mays
cctccgccgcgattcgtgtcaccggcgtcgggattcgtgcctggctggttggatagcgccgtggggtaaaaagatcgtctttccccgtgcgctggacgccactccgatgaccccccatacttcccctctggctttcggctgggaccgataagaacgccggtgagccgccgtcgctgggtcttgcgccgcgtgtccgggcgctttaccacgtcacggatagttacgctaggagcgtccggtgatcgccggagataccgccacggtagaagccacctagcgtttgcgccagtgctttcttcttcctctggccgccgcgcgtcccgcccgattcaccggccaccgcttgcgagccctataaattgaaggc

SEQ ID NO: 141245 - DNA, 571 bp, Zea Mays
tcactaactggaatccggtttctttattgttgtccagggtcactgacaacttacggaaaggtccctctactttcttttcttccccacgagtacccctggccatggcgtgcacacagatcaaccctggtgcaacccgtactggtcatggcgggtgttggctactacggctagcgatcgggaaggcattagcgacctacagggatctcggaacacccaacaatttgacacgaacaccctgagaacggcttgtccatgtgcacggcggaaaccgtgattatgggcaaacgttcccgctcaaccggggccgggttgagtaatcaggtgccacggtgagcatcacaagcgtatggagttgcagaaacaacattcaatttaagcagagccttacctagagcggtttggccacggtggggtgggttttacggtggcggagaccagtttggggagaactccaaatttgcggacctcagcgaatggtcgaggctgattcgaggtggctggttagcttactaccctacggagctggtggcacacgcaatttataggcgcatcgagggtcggtgacgaattc

SEQ ID NO: 141246 - DNA, 324 bp, Zea Mays
gtcggatgggaatcgaacgatcccggttagatcaagcttcgcccttcgtccgaatcgtaggatgttgatccaacggtggcaattagagcagggagtacctttcgggtgtgcagatttgggcagttggatgtcgatcggagggctcagggtggatctcgggtatttaaaatctgagccgtagatctagcatcgcgtggctgttaatgaataccggttcattttaatagtcttctaatcttggccgtccacttacgatccaacggctgagatctgtgagtaacccttcgctgtggcaatcttcgtaaagagcccctgttctttttg

SEQ ID NO: 141247 - DNA, 326 bp, Zea Mays
agtcggctaatttgtcatgccatggctgggtcaataaccgcgaccttggcgtgcacacgcgcgtgccctggcctcggcgaccgaacgctggttggagtaaagtcaggcaaggcacgcgccaccgaagcagggcacatgtagtaaactgtcgctcgccgtatagactatatagagtcggcactgacgagtgaggaccctaccctgcgcgcgccgtagctagctatagttcgatcgcgatcggtagggccggcatacgtagcggtagggacgacgaaatctcgcgcgccctatggcgtggacgtacgtacgatatgcatggattggcc

SEQ ID NO: 141248 - DNA, 724 bp, Zea Mays
ctgggtagtagtacagtgtacaggtatagcaaggctctggcatctgagaaaaaaaagaagcatggggctgttgtaccaattgtactgcccaattggatcgtccattttatttgatcatccattttattggctcctatctaatagatacataaaaaaaaaaatcaaagggtcgcataataagaaaagtcagtaaaataaaataaagatatccatgggcaaaaaggtcagcaagacagagcagcaagcaatatgagtggagtagtacgtctggcctgttattattaaccaacctaacccgtgccttggtctgtctcgtctttgtgttatctaatgcggtggcttggtattattatagtatcacacgccttctggccccaagctcacatctccttcttgggcgtatagcttgcattgcatgcctggagctgacaatgcctcggggcaagggcaatggagcatgcatgatgaagtgcacaagcagcagttggtgcagatcaatatcacacagatcatcaggatcagttgaactaccaatacaacatgcagggctccagcgatattccatttgcttgctgctagctgcctagctactctgcgcgcgttgtaccgctatgaagatgcctctcgtccgatgtgacgtgagaggctcagtgatgggccctctcttcccccatgatttcatgaacacattttttttacagggaagcttccaatggctggagct

SEQ ID NO: 141249 - DNA, 475 bp, Zea Mays
accggtgctcccgtgcggttgacaccgaattgaacccttaataaccatttcccctcgatcaattgcacgatctgagctttgaatcaccctgtccacggagacagtgcgaactaaggatgaacacgggtgttcatgacgatctagcacggtttagcttaattgaatgggtcgaggagcatcaggagaatctaaggacactgaaacgggagagcatgaacggacctggaacgagctagccacggcgaggtcactatgcgcggtgtttcggaccgatttggtggaaatcccaaattggggctctctggtgagtaattggaggcacgagcgggtggattggatgcttgaatacctaatggagccgagggtgtgctcaatttatagggcccttgagcggtggctcgtgaatttgagctcgcgcggtggcggtcggagagaaagaggtgcactggcgcaagcgattggtggcatttaccat

SEQ ID NO: 141250 - DNA, 515 bp, Zea Mays
gtgaaaaatctagcatggatgataagggaaaatctcttttagaggatccctcatctcatggtaatgaagttggttttcagtctgaacattcagatggtatgaagactgggaaaatttctgaaggtgtcaaaggataccttgacagttagggtaatgaggatgatgactacaatgagggtgaggatgatctattggattcccaagatctggaggaattcatcaaggatgaagaacttattccttcccctcctcaagagaaaggaaaaatgaatattaatgcttctcatactgaagatgctggtaaggaagctggagctaagaaaggaggatccatggaaggggagcttgcagaaggcgttcggaggagcggcaggttggagtctaataatgaaatgaagattgcagataaggctacaacaagagcaatggctaaagacgcattcattaacaaaggtacgccttacaatccattttctgttcttaatactgataatgttgttcttatggatgttgca

SEQ ID NO: 141251 - DNA, 627 bp, Zea Mays
cggcgatcctccggcgacactgtgcctgccctgcccttctccctctggtgagcagctgtgccttcaccccctcccccctctcttctctctgattcagcccagtggtgccccttcttcccaccttttgcgcaaatctcaaatctctgtgaattcctgtgaaaccaagttgtggtatgtgtgtctctgtgtgccttgaacattcctgcaggttcctagctccttcgggagggttttcacacctcaaatagccatttcccgataccctaaaacttcgcacgtcacgtgttcggtgaaatgcccaaaccagccaaaaatgccctgattgaacccaaattattcaggcaccttcacaacacctccagtaacatatttgccaaatttcacgccaatccgatattccaggcttcaatttcactcaattccccgttttgagcgatcgtttccgagccgagtgcccaaatctcattttcttcgcctaaattcaaaccaagcacacacttcactcatattcacctatataaacctattcgtgaagtatcggctcaattccatgtcatttcgtgcctcaattcgaattccaaatctcctatggcactttttatcgttcaaacgccgttttcacgtcgt

SEQ ID NO: 141252 - DNA, 553 bp, Zea Mays
atgagaagctgtgttgtgactcgatgaaggaagatcaactgggacaatctgaaaagcatcgtcgggggttgattcagctcctccagcagatatcaaaatcttgtcatccagtgcgctgacctctaaggcgattccctcacttgaagctaaagaagtatgcatcactatcagtccatcagaatgtggtggagacgacccagcgtggacatccctggaggtgtgggaaggagaactcgctcggacaccctcgggggctaggtcacagctcgcaccacccgtcggagccggatcgctaccggtaacaccctcgggggctgggttatagcttgcgttacccacctgagccggatcactaccggcaacaccctcgggggctgggtaactgccaacaccacccttgaggactggattttctgcaatagccacttctaaggctgaaggatcttcagtcacctccatgggagttgggcaatcttgaccaacctcttgacactgaagaccgccctccaaggtcgatgacgcgcgagatgccgcccgggacacctctaatccc

SEQ ID NO: 141253 - DNA, 367 bp, Zea Mays
aagctgaaagcactcggcgtgaccacctgcataatcaagacagactccaaagtcgttgctggccagatcgaaaaagactattcagcaaaagaccctgcacttctgtagtatcttacggtcattcgcagtcttgagaaacaattcaagggtttcaccctacagtatgtggaccgtgctaggaacgaggaggccgacacgttagccaaagcagcagccagaggcgaagccctgccatccggcgtgttctaccacgtcattggcactccagctgtacgcaacccaaagggtctgcaaataaccaccaacgccgagggccatcgcattgtcaacctcatcatggccgaagactggtgggccccaataaccc

SEQ ID NO: 141254 - DNA, 741 bp, Zea Mays
tgccgacgcgtcgccgtactgtcgtacgtacgtattcaagtcaaaaagtgctggaggggtagagcgagcgagtatactgcatctgcatgcgccggcggcccgactggttgaacgagccacaaactgcatgcacgtcactctgccaaaactcgctacaaactgcaacagccagcatgccagcctaccagctgcatgtgcgtcaccctcgcctggctagtcgctacctgtaccagccccagctgtcttcgtagcaacacagagttcccacaagtgcttccctatcagtacacccggttcatattccactcctatagtacaagtcttgggaattgggagtgacgagtgcggcacgcggagcactgtacatgtgcaaatacacctgggcaaatgcacgtcgcctggctagtcgctcgcaaatgcacgtcgctcgcatggccatggaaccaatagtagtagcagggctctactgtgagggagcagtgtagtagagctgtagaggtacaaccgagtggaaggaagcacgggcataaagaaatgataaaaatcacgcaagggaggagagagagggagcgcatatcaagaagcacggagttgcgcagccagcgaaaagtgtgggggacggagtaacggagcgctaatggcgggagaagcgagtcgagcggaagttgcgcagctgcgagaggacgtgagggcatgatgcgcggtgctgcttagggagctgagggcgggggaataaaattc

SEQ ID NO: 141255 - DNA, 409 bp, Zea Mays
ggcaaactggagcaatggacagtctggtgcaggcactagacaaaccggtgccccatagaagcggaaggtggccaatcaaggatacgacgatcgttgggcggaggcgcacggacagtctagtgcccctcagaagtagcaaattttcataggattgagatattcgttgcaaggaaaggggcaacggctaggggctcatttagggctataaaaggaccccctagacaccttgttgcaagacacaagagtagccaacaagtccatatatcattgtgatcatttctctctctctcttgtgtatctctcctgtttgtgtagaggcgaagttataagcctttagagagagaagtgctgcctagagctatagcaagaccttgaacaagttgttactctaccggagcgctgtcaagaa

SEQ ID NO: 141256 - DNA, 374 bp, Zea Mays
gcaatcgctggatcagatgaagacaacacccttctccaagagtctagtcaagggcttagcaatgctggaaaaatttggtacgaaacaccgataatatccagcgagccccaagaaacttcgaatttcaaagacactagagggtctcttccactccaccacagccgcaagattcttgggatcaaccgcaatgccctgctgattaatcacatgccctaggaaagccacttcggacagccaaaatgcacacttcttcaacttgccatagaactgattctcccttagggcacccagaacgagacggagatgctgctcatgctcagcctcggtcttagaataaatcagaatgtcatccaggaacacgaccacaaagtcat

SEQ ID NO: 141257 - DNA, 363 bp, Zea Mays
gtgaagttggaggggtgctggcccagatagctaacggcctccctcgaaccccagacacggaaggctaccggcgactgcttaatcaagcagctaatcaccttctacccatcactcatcctcagaacaacctacgtcacgccatcaacagtcggtgagacgcgcggagctccatcaacgcttcgcgcgaccgatggtacaaaagtgagataaggcgctgggaggagtatgactaggatcatggcgtcccggcacgaagtcgcggcacccgagctgagtcggctgcagcctcgactagtggcccgttccggggatggacgagatgacatactaccgactcccctccccgggatcggcaacacgaac

SEQ ID NO: 141258 - DNA, 395 bp, Zea Mays
tggcgggggtgggtgaattcatctgcggaagggtatcaaaggcaaagattatggtggaagggaaaaaataaaacagcctggatagttcttaaaggaagcgggttagctcaagttttaattctttttagattttataatgcatgcatgctggaagtatcgtctcctctccgaataatagggtgcttctagggcatccttaaaagtctaagtactggcccatggggcctacttaattagccacctatttccccctttatgcctaaggcctttcgtcctaggtctagcggtctagtcctgacgattcgtagcagtttctaggcaagttttagattttgaaaattggtattcatggtttattgtccttctctgtggtggaatttgctccaataccagct

SEQ ID NO: 141259 - DNA, 638 bp, Zea Mays
gctcgtcgttcgtccttgacgtggtccgtaccggccatggccggcgacgactgctacggctaactaccggggaggcatcactggcttaaggcgacctaggaacatccatttaatcgacacaaaccccactagaaactatctgtccatgatcagggcggaacccgtggtgtcgatcctgtgttcccaataatctacgctcggattggtcaaacggccactacgaggagcttcatgaatacacagagctgctaaaacaaagcttgaatcggacagggccttactagagagggctggccacggagcgcagagctttacgttcgccggagactgagaaaggggaaaacggtgtcgcagcggctttgggcgaaattgggagatgggatcggggctataggtccgtaagaggctgtgctttcactgtgcacaatcgatttgggagaaggtggagagggcagttcgaattcctggttgtactcaagcttacttgaagaacagcgagcacctcgccgtggctccctgtcctatatataggcacggcggtccggtgatcgatccactgctacgaggtgggctattaacgcatggcaaccacgtaaggaagaggcacagtgaggcgaatcaaagcatgtgcgacagcg

SEQ ID NO: 141260 - DNA, 333 bp, Zea Mays
gctgaacctggaagttgtttcttcaggttatttaatttatatcccggtggagcccaccttacaagagcaaatagtccgggcacagattgaagacaagggtgttcgggttatcaaagaaatgatcaagcaaagggcggagaaatataagtgctttcgtcaggacagcaagggaattctatggtttggagatcgattggttgttcccaaggaccctgagctcagaaagaagatactagatgaagctcacctttcaaaattctccatgcaccctggcagcaacaagatgtaccatgatctcagatccttatactggtggaccagaatgaagaggga

SEQ ID NO: 141261 - DNA, 424 bp, Zea Mays
gggcaatggcagtggccgatgaggaggagaacctaggtacaaaggagggagagtcagcagagcaaggggtcgatgaaagcatcctggctatttcagtggcagcagtcagtggtagtgagggtaaccgaaccattcgcttgtgggcgtcgatccattgccaacaggtgctgatattggttgattcgggaagttcagctagcttcatcggcagtcatctcatgggcatcataccaagagtgaagttactagatagaccgatgaaagtaaaggtggccgatggaggtatcatgtggagcaaatattcagtccaaaactgtttatggctgtgtgcaggaactacgttccgtacagacttcaaggtgttgccgctgggtgggtacgatctgatcctaggcatggactggctagaggggcatagtccaat

SEQ ID NO: 141262 - DNA, 296 bp, Zea Mays
ctttgcatataggccctgaaggtgggcgtgggtgtgagtgttaccttacatgggaccttgcggataatgcaattggagcatcagaagcacttcatggccaaaactttctaggaagagcccataatatgtattcaagaagaaattctgctactgtacaaaaatgtgtcataggctgaagagaaagaggaagatgaagaaaatgatccacatgatgatgcataaatcatatattgtgaagatgaacatgatggtggcaatgatggtggaaaaggggaggcacccaatatccctaaagg

SEQ ID NO: 141263 - DNA, 649 bp, Zea Mays
gaggaatccacgccgacctggatggtcttgatgggaccgttgtctgctccagatggttgcaccttaggcaccttggtatgcgccttggtataggaagtcgaggggtccctccccccgtcatccgggcgagcggtttctgccgccagggcgtgcaacttctcgatagctacaagcgcagcgggtcggtcgccccgcacggtgaggaccctagcaggggacggcatcttgaggaccaagtacccataatgggcaatgtccatgaacccggtacagggccggcctgccaatgatggcattgaaagggaggttaacctccgcaacgtcgaactggacgttctcagtgcggaagttctcctcaatcccaaatgtaatcgggagtgtgatgctcccaagggaatacaccggttgagggcccactttggagaatgggcgagagggtcccagtcgggatcctgggatctgcagctgtttgaacacagcatgactgatgacgttgagcccagccccaccatcaatcaggacatgatgtagcttcatgttggcgatgacaggggcggtgatgagtggtagtatgccggcccctgccatgttttcggggcagtcggatgccccgaaggagagctgatgtggggctgccttcgggacccct

SEQ ID NO: 141264 - DNA, 334 bp, Zea Mays
tctcttttattagtgccacgaatgagtgataatattgtgttgttggttccacaatgtctttgtgattagtaactttgaactgcatgatgttaattttatcggtttctatcacatacatgatttgtattgcttaatttatatgtttgttggttggttgggcaattaatgtcatcggtacgaactacccgacaactatccgatacatatccgcgtagtatccgttatccgtttcttacccgcccggattattacccggtcccgtcctgtatccgtcccgattcttaactacccgtatccggtcccgtatccgagagaaatacattagggtaggata

SEQ ID NO: 141265 - DNA, 1097 bp, Zea Mays
cggccgtgtagtcttagttgagtgataaatccaggaaccgagtgggtccaggtccacgtgaaagggatcctgttgcgatgttggtccttactttggtcacaacacaggtctggtcaattacaaaggttatgcttgctgttgcttttcctacatgttaataatttgagtttaccaaagattctttatgatgttcggtttgcatttttatcattaaccatgcagagtaaataaactaataaaaaaggtgtgcctggcgaaacaataacctaaacaacaaacagagaatcagaagtcactgatggatcacaagtatagcagtgggtaagataatttgaaacacagaagtaatatgttagcattttcaagtaaataagttagccgtttcaaacaaattacactgctcttatgctagactacagtaagaagcctttcggagccttttgcaactgaaactgaataaacatatcttttggcacatttttcacaagataccctatttgtattctgtatactgatggtgtctctgatctattgtgcaatgtcgttcttcctaggaacatgtctgccaacaatactgaagctgtaattattcagttcatgtagaagataagaactttatgttcagctaaaaggagtacacatcttttagaactggttatcgacactggttgcataaaacaccaactagaaggcgcatactatttagatattttaaggttaataattgagccatcttagtaacaattagaggataggtaaatgaccatgcgatgcaattgtcgttatggcttagcattttttgtgtccttaattctccaactttcttttgtcgtgtgcagattaccacattcaatattttcttagttgtccttgaatttggacaccgggcacagagctgatcgagagccatgggacatggaccagctagcgaggacgacgacgatggagatgatggatcgtcaagcaaagcaagccacacacagctgatgaggtgctcttgctctgctctggccatgcatgtatttctccactcctcagtgcagtacgtacctgctgtgcgcggtcggccggcggccctatctaattctgaagcatgc

SEQ ID NO: 141266 - DNA, 409 bp, Zea Mays
cgagaagggaatgagcagacctggggaaggctggccgcggtgaggtgagttcacggtggcggagagtggatttggggggaattggaaattcgcgcgtgctggtggatgatcgagggtgggagcgggtgctatagcttcacggcgacatggcgcagttacgggcgaggtcaatttatagagccctcaagcggtggtggccaatttggtcgagcaacgctggcagtcggagatggggaagaacctggcgcggtgagttcgtggctaacggcgtggcaagctcaccggcgatgatttgacggctgtaagaagccacggcgacgcggtggaaagcaaagccacgcggcgcaaggccgggaggcggtggtcaccagcgaagcaatccgctccagccgcaaagcgggaggggcag

SEQ ID NO: 141267 - DNA, 413 bp, Zea Mays
atcaccgtggagttggggcatccggtgccttgacatccgggggattctcaactcgtcgtagggcaggtgatgaaggattcataatgttgtgaccctaggacgacatcatattgtcgggaggtacgacaatttgaagatagattcgatggcctcgagctgaatcttgtcccccgacgagataatgaagtggtggatgccctcatgaagatggcatcgggacgaataacgctccccaagggtttttgttaccgacctcttcgaaccgaccatccattataatgaaacctgtcgagagggtaggcaactctcaggcaacatcccactggccctcgagtctgtcgctgtcatagaaggtggggaccccccaacaagttccacagttgattggaaaaacatcgtaccataacttcttg

SEQ ID NO: 141268 - DNA, 448 bp, Zea Mays
tacagtgtcttccatattgtaagccagtcttcggacttgccctatccatgtttctatcatttcatctttccggcccgtacggccaattttctttagaaatgcccgaataagctcaagctcattactaatcagtttcatgtcatctggaagcgctgccaccaactcagatttctttgcaagcaaatgtttagcaaaacttagggtctctcctgccagagctattgcaatcttcttcaggacaagaagaacagcaatctctgccatctcttcttattcgattgacttggaatattttagtgcaagtcaaggctcactctctagcatcggtgctgctccttgcgtatcaaatctacatgaatagaagaaatctgttactgagcagcaaactgtaactagtttgtaagatgtaatgtgaaagggaggtagcccttttgaagtccgatctgca

SEQ ID NO: 141269 - DNA, 578 bp, Zea Mays
aagacttgcacatggcaaagatgaggctacgaataagggcggaataagtaaaacaccactctcgaactgagacgtgaaattagagattttagataatagacataatgtaatcacaaggtaggatagagtgatgagaagagtaagggagatgacaaacaaaacacaacaaaggatagagttaaaaaaacttgcaggtaacaaagaagagggtacgaccaagggaagagtaggtacagtacaatgatcagattgagatggaaaagagaatattctaaagaccggtataagataaacatcaaggtaagatatagaggtgaaaaggataaaggtgataatgatgaaaagcataaccatggacagagttaaggcaagactgacgaagtgaagaaaacaagcaatggtaatataggtaagattccaacaaaatggttgaagtaaccgaaattattaccgagggaagttataaagaaatgatgagatcatcaacgatgtgcgaaatagaatggacgttcatggatcaccaagaaataagggtggtcaaaagcatgttaaccggaatgtcttaaacaagcattgag

SEQ ID NO: 141270 - DNA, 679 bp, Zea Mays
ttcttgtcactgcgacgtgggcggtctgcctgtgccgccgtggaaacgccggtgaccgccgccctccggccttgtgccgcgtgtttaccttttccaccgcatcgccacaacttacccctactcaccgttgatcgccggagcaactgccacgcctctggacacgtattcaccgcgcccaaggttcttccctatctctggccgccgcacatcttcattcaaattagcggccaccgcccgctagcactataaattgatcccgccccgaactccgtagggtagtaagctgtccagccaccatgaatcagccacggtcgttcactggaatccgcgaatttggaattctccccaaaactgtttccgccaccgtagaactcaaccccgccgtggtcagcccaattcgggtcagctcctctcctctgctcccttgtttaagcattcgcatacgtctgtgatactcgccaacccatccaattgaactgtgtgaccaccaatcgccgggaacacgattgccaagccgccatgctcacggccaccgtggccagagctccgtagttgatcataagcgaaattaagttaggggaatcaatggttggggcgtgaatctggttttggccgaagtaggacgccgttcctcgcatgaatcggccggtacgcgggctcgccggagctctattgtgct

SEQ ID NO: 141271 - DNA, 480 bp, Zea Mays
gcaagttttcaagtcccccggttccattggtgactgttgtcgcagccttcaaggagttggcattcgcagtcatgaacaacttccctgatgggtccttccattcacgtctcttgtcccttaggtccgcttctagcgaaaattgagccagggcaccccgctcaatgtccttcatgtggttcattcacaggggtctttagttacgttgtgttgatcccctttcccttagagggtggtctagggggaatagtgacaaaagggcttatgtgtgagagaaaagggaagagttagttaggcaccccaatgcaaactggttttcctttttcctttgaattaaatcatttaattctgtagataacttcaaaaaatcataacttgtgaaataaatatccaaatttggtcaaaccaattttgctaggctctatacaaggtaaactttagagtgaaaattgagaaccaccctagtccaatactacttctgga

SEQ ID NO: 141272 - DNA, 372 bp, Zea Mays
caccacgattccagaggttgaagaaggccctgaattccttacgctcaatgcaaccagagttgtaaatatgaaaacccacagccatcgaagaaaccgaaaaccgaaaaacccgatcagccagctgaagcacctcaaagcccgcggcgaacccaccaagagcagcctgaagaagatgaccaaccgagaccgaattcaacttgaagatgcatctgccaaaggagaccaccaatcagaaggacgaccgaagacttgggcgagcagggcaaacagaagatgccaggacatccctgagggagtcctcgaaggccaggcccggccgaaagttcaggagagagaggtccatggttgaagaacgagaagaccggggggagg

SEQ ID NO: 141273 - DNA, 447 bp, Zea Mays
gttaaatttaagcctgggatctcggattggcgtgaaatttggcaagtaggttactggaagtgtggtgaaggtgcctgaaaaatttgggttcaattggagcaaatttggctggtttgggcatttcaccgagcacttggtgggcgtggatttagggttttaggaatatagccatttgaggtgggaatgccctcccgaaggagctaagagtttgcagggatacacaacagagacaatagagcacaaaccaccaattggattcacaggatttcacagaaattggaaggattggcacaagggtggaggtcactgcctaaacgacagagaaacgagagagagagagggaggacagtgggctgctcaccgagggggagcagagggggtgcgcaggtcgccggagatggaggccgccggagatggaggccgccggagttggaggtcgacggcgag

SEQ ID NO: 141274 - DNA, 895 bp, Zea Mays
gggcctcatttcctaagaagcgcaggggcaacaccaaaattttcccaaggcacagatcactggcgcttggagtgcgggttgatttcttttaatcacagggtctctttagcaaaagttggaggccgaaggggtatccacggatcccagccgcccgatccacttcctacggttcagattagatttaggtttaaatgaagcggtatgcagtcctgatccttggatcagagatcgacggtctctactccatctaactgagatcatccggcatccatcggattctcgatctacggtcacggttggatgcagtcgaaacggtatgaggatctaatccaatccgtccaaaacgcatccaacggccagacgtctttctcccctacccagccgcacagccggcggcgcaacaacgacggagacggcggcgccatcaccggagttctccgaactaagctcctagccatcggtccctgcggaagacgctactttacgaagagggcaatgatgggaatgcgttggcgggattcttactagaattcgagcgatgctccgccctgtccgcgacgcacggcggaagtgcggcgacagcgagggattcctcctaccacagctcgcgctttctccaattagccgttcccccagttgctgtgaggggaacccaacactagaatagccctgctggcgcttgaatcccaccggcgacgggaattcgcggcggcgcttcccctctgccctcttttctcttggcgacgcggacgactccctctcactgttgcggcggtggttgcgaaggtaggaaaaagaggagggcgaggcgaaaactcaagggccacggctttatccccaaggcgcggcagactccgtcgccagcttcctcggccgcgccgcgcggagctgttgc

SEQ ID NO: 141275 - DNA, 473 bp, Zea Mays
gttttggttgtgtccgatgtatggacgaatataaaaaacaagcccctaatcaatgtgattgcgtcaaacagttgaggttcatgtttcttatatgcagaagatttctctggagttgaaaaaactggtgaagctattgcacaatatctcttgaaggctattgatgaaattggaccaggaaatgtccttcaagtggtaacggacaatgctgctaattgcaaagcagctggaaaggaaattgaaaaagtaagtcacatattttgtccttcaagtgtttttttatcttggattttccctaatcatattttgtttgattacgtgtacaggtgcataagcacattttttgggccccatgcgttgttcacacgctaaaccttatattcaaggattttgctgtgaaatttccatggatgcttaacacatataagactggaaaagcaattgtcaagtttttttagaatcattgccattgtttg

SEQ ID NO: 141276 - DNA, 596 bp, Zea Mays
gccgcctagcgtagctagctagtgccaaattttctacttcgatatcgtcggcgcccctcgccccgtccgcaccggcgttggcgttcacagtcgcagagtattccgcgccgccgcgttacgttccttgaccagtcgccgttcaccaacgctcactaggactaggtaattgctttcttctccgcttgcggtgctgctatactgactactgaggtcctgtcctctccgacagaacttcgccacggcctcccgcctcgtcgcacccaaacccaaatgtgaggtaccaccacgggccacttgccagtgatggaggccccaccctccgccctcccgtggtggctcgccaccactgcctgctccgcgccgccgacgcccgccgcgtcctccgtcgccggccgcctcgccttcctcttcctctccccctgcctgcagcgcgcgctgctcgccgcgatcgacctcctattcctcgtcgttgcgctcgccgtcatcctacgcgcccgcctcgcccggagcaacgatggcctgagcctcggcctcgaccaccgcgagcgggagcccctcctcgccaagccggccaccacggaccaggcgccgcctcc

SEQ ID NO: 141277 - DNA, 354 bp, Zea Mays
tgcaaatcattcctttgtgaagaatccatatatgttagttttcggtattctcgaaaatgtttgttcatagcctttttcacccaaaaaatgtcggttgtatgcctatcgatcatcggcgagtggattttatccttacaccactcatgtttttatgacataaatcacattcttgtgaaaaaaatctataggtgttaacctttgacatttccaaaaaatctctcccatcaatcgtttatatattgcttgacctggtcataactcaaaggataacactctctactgtctaataggaaaaacgttccacccaataaaaccagaaatgggacaagccaaataaaatgatcgccacaagcg

SEQ ID NO: 141278 - DNA, 840 bp, Zea Mays
ccaatgcaccatcattgggctatttgttgccaaccaatccatgccaagcactacgtcgtactgagttaaatccaatacccggaatgtagcggtgaactggtaaccttgaagggaccacactgtgtcaaccaatgcagattcacaagtcatttgggcgccatttgccacacggaccagcaatggttgtggcaaggaagtaagattggaacattgatttgcaatggtggagctaataaatgaaattgagctgccggaatcaagcaggatgagcaccgagagaccacaaacttcgcccacaaaacgcattgttttcatttgaggcacctgagcaattgctgaatacgataactgaaagctgttgagctgaatgtcctcgagcttttcagaaagggcctcttcagacggttctggaaattgatcccaaagttcttccacgaggtgcagctggactgaatctgggcattgatgaccgcgggtataaggtgacccacacttgtagcataacccttgagccttccgatacacatagactgaagcaagacgatcaccactcccaggtggctgaacagagtgcagagacttgtgttcttgtggccgaacaggagttgtagcaccagccttgggtggagaaggtagaggtaggggacctctattgtaagaccttcccagtggtatataatccatcttcttatactccggcttcttggctgtggcgccgatttcctcctgcaattgcgcaagaacgtaggcagtatccaaatccttgtgtcgctgaatcatgaccatagatttaatgtcaaaacgaagaccatctagaaacctcatggtgtaatacagggg

SEQ ID NO: 141279 - DNA, 537 bp, Zea Mays
gttggtcgtcacacactgcatgcatatgtgtactctgtaccgctgtggcgctgtccgctatacacctatacatacatacatacatactacatagacgtgctgccgtggttggtacgtcgtcgtcctgcatgctagctaccgacaactgtgatgaaccggtcatagtctcgcaacccagtttccccataacgacttgcgaccgtcaatcctattgcgcggctcctgtggtcctgtgtcatcaagattcggtgatgctcaccggtccgaccgctatctcgtctggatccgtcccttcccagttcccccatcggcggagatctctttcccatcttatcttgcccacgctctctcatcatcatgattccatacttccatctgcccacggtttctctctctcttgtctttttaattactaatttctctctccattaacaaagtctcccgagctctaatacacataattaaagcttaaaaattcatatccagtggtattaactatttttcagaatttactacactccctcgttgtctattatt

SEQ ID NO: 141280 - DNA, 290 bp, Zea Mays
gaataattcgggtggttctgccacagctgctcctcaggtaccctgaggcacttcttcagttgtgacacgtggaatacatcttgcacattcgcaagatgattgggtagttttacttgatatgcaacttctcccactcgctttaagatcaagaaaggtcgaatgaagcgaggggacaactttcctttaactttaaatctcctcatgccccggattggtgacaccttcagatacacgtgatcaccctccttaaactccagtagtcttctccgggtatcaacatagctcttctg

SEQ ID NO: 141281 - DNA, 770 bp, Zea Mays
ttgtcgggatagaatgcctttggttcctacgattcttgttcgatacttaaggtcgacgtgtttggttcttgaccctgtatcgcctatatccttatctctcgtgtctgacgtagagaaacgagaggcttgcctagaccggtgaaccaatttggctcactcgtcgcgaaggaagccaaaccttgccagcgcatcacgtgatgcgtccggacaaaagaactagacgtgtcccgactaacctccccgagtcaaaaacgtggatgtggattcttgcttgtcatatttagcgaaacggttttcgccactaaatgctagacgcgaacattttgtcgcattttagcgggtcggttttcaccgctgaccttttagacgtggattccttgtcgtatctagcgggccgattttcgctatcaacctttaagacgtggattttgtcgcattacgtatggcgctacccgtgggcgtcgtgatatatgcttgaataagaaaagtgtcgtgtggcattgagttacatggtgcggcacaagggttattgtgtttagcttgccgtgctagcacctgctgatgaaccgctatctggtattgatatctttagatgcatatatgtttatatctctaaccacagccgcaagaaatacccgccctcctagctatcgattagagctaatttttggttatttaggacatgtacaattgtagtcgtttatggcaattaggttgttttctatcagcgtgaagtctcgcgcaaaccatatcaggcgcttggagaagta

SEQ ID NO: 141282 - DNA, 365 bp, Zea Mays
catcgtgtcaacacgagcatagaatacatgtcgtgatctatacgtggatgcttgttgttagttttatttgcaggttttgaaaacctctatgtggagggagttactgccgaaacattttgttgacatgtttatgtgtgtgtctgtttttttgtagaggtcttcatagctgttgcgggtctgactgtaccgcgtcgcgtcgccacagtcccgctagcttgattccactgtcaccctaggtatgaccactattttcgcatcatagtcgtagatcacgtaacccagttaagtgtcctcccgttcgaaatagatacaatgtagatatatagatctttgcatatctataaatgttatttattttgaattgt

SEQ ID NO: 141283 - DNA, 302 bp, Zea Mays
agttatgctatgccatcaatttctcaattaattttgcagttcttaggcataacatgaagcgaaacgcgcctgagatgtcatcaggctcataggacatggcgaaattggcagtgaggacaaaagtataccagaccaaaaatgcatgaccctgctgaaggatagcatcttcttgctcgagtccgttaacactcaggctgaggtactgtgtctggaaggtggcagatgtcaccgagcagaaagctgggaaaggaaggctgctgaacaggattcacgaagcaaaaagcatggaggctgcatacttc

SEQ ID NO: 141284 - DNA, 348 bp, Zea Mays
agtggatctccctcgacaggttagaattgatggtcaatgccaatatatcattttctgcgtgaaattatgttgtattgagatttgatttaaacattgagttgtgattatgcagatgtaaatgtttacgttattcattgtatacattatttcagcagaggcttaatgtgagatgcaatccccaagatgttatagtaagcattcagattttaaatgacagacaacgtcaagctattgcatggagggggttctctagtatacttgatatgagagttgacgcgcttggcagtagatctcatttagcttggctgatggaaaagcttgaccataatgatatgacaattcgagccg

SEQ ID NO: 141285 - DNA, 729 bp, Zea Mays
ttaccaccgaaattgcgtgagaattccactgctcgtgaagccataggtccagcgagccgcgccgccggtgaaatcgatccgcgtcggcattcccttctctacgtgtggccgtgtgtgtgcgccggtgcccggtgggtctgtccgtgctctcgtgacgtgcagagcaaccccgaatcggggggaattcctcaccggagtgcgcgacagggcggaaattcctcctctccgtggtcggctcgcttgcgcggacaatcctcggtaagaaccactcgcccggacccgctttcatacccatagcatgtagtcggattgaatttgggtttcgtgcctgaaatccggagattagctctgccggcgtgtggccttgctgcggtggcgttagtgccgtggtctggtttgcccaagggaggaggacgaggtgactgttgttgatccagtggtgtgcagccacgattagacctcgggtaccccttcgagttttttagatctgaatcgtcgatgaaataacgagcgatgcatattagatctgggcttcattaaatcgtgggcgtaggatctagatcctgtggatatcgtggcgtgccgattcagtgtaatttggctctaatctggagcgtagatcttagatcgagcggtcgtggtgcgatcataccccttcggtctggcattttagcacatgaaaccctaggtttccttggaatagaacccgccatccactggagatgtgct

SEQ ID NO: 141286 - DNA, 358 bp, Zea Mays
gaaaaatctatgcgaagctcttcttctctctcccaagtagcttcatcttctccatggtgactccattgcactttgcacatctttataaccttatttctcatgacacgagtcagtgtatcaagaatcttgatgggatattcaacataagtcagatcatcttgaacactaaggtcctccattggtagctgctctttaggtaccctcagacacctcttcaactatgatacatggaagacatcatgtacatccgcaagatgatcgggtagttccagttgatatgcgacctctcccactctctttagaattaagaagggtccaatgaagcgaggagataacttccctttcactttgaaccttc

SEQ ID NO: 141287 - DNA, 468 bp, Zea Mays
cacctattcaccctcccctctaggtgctctcagtgacatgtacatcagatgaaaggttggcaagtttagtgcgagtggcccccttctttgttgttaatggtggtcttgatccctctagaacatcatcaaatggtgtgtcttgtaggggggtcattgtccatgttgttgatagttgcctgactcagataactgccatattggggcatcaggtggttccaatcataagccatcttgaaaccaaagaaagcgtagaattctcatatactggaacatacttcatgaataagcaattcatatataacacaattgcaagtaccaacaaaagctcactgtcgtgtcattttattatcaagcacacaagtttgaacgtgagttgtacactcaatggcatacaaacatagagcatgtccactcagaacacatagtgttttgcaaccataacaaacaacttaacctcacaaagcccac

SEQ ID NO: 141288 - DNA, 586 bp, Zea Mays
cccttcgttactttgttgtacgacgacatctgtcgttcctattttaatgacgtctccttttttcgcattgttggaggttgtagctgtatgccccctgccggattagtcagcctttggggtcgagttgttcggcaatcttgttgggcctgtgctcgtggaccagattgaggggctctcaatcggtcttgtactggaggtgtcaacctattgaacacagatgtttggggtgccccccaagcggggtactgtggcatcccaaatgggtatggtggcatgccccacatttgatttgggacatatggtggaggtatgtatgtgtatggatatgtcataggtggatatggtggtgggggtgtccatgcaggtacgttaggtcttgattgaacattatgacctcttgtcctttccgattggtgcggtgatccaatcggcctaacctgtcgtcgcacctgggtgggtaagcgaggttgctttggtggctggtcgctggggccagccttctttttcacatatttagacaataattgatcaaaggttgggctggattttaccaaccgaccagttgccttgaacgtgttagttttcc

SEQ ID NO: 141289 - DNA, 280 bp, Zea Mays
ttcctgaaccggcatgggtggtgtcagcttcactgaatatggaaggaaatgccaaaaggtggtttcagatttcaaaattcagcatggactgggttcatgggaggagttctgtggggctgtgatccaaaagtttggggctcaagagtattcgcaggctatgcaatccttgttgaacttgcgtcaggttggatccgtggaggaatatcagaagtcgtttgatgaggcacggtatactacctcggtacacaaccacacactggatgaaacactttatgtgtct

SEQ ID NO: 141290 - DNA, 445 bp, Zea Mays
catcctactgctcagaggaggaaggattccctcatctcttgcggagttgcgcgcttcgcatggggatccgtaagaaaccggagtatttctggaaagaataccacgaaaacggaattgagaagtgctctatggcagtctacctgggagaaagccgaagttacccaaaccaccctcctttccaagttaccttcactggacaccacttcccagacacttgccaaaatgttgcccgaaaagccctccgacagctatgccaaaactacagcaaagaggtttttgaaacccccttcgttacttcccacctagcaacaaaaacacccctacctagaggaaaagacttcaggccctgtcaggaagagatcctactgaggatgaccccaccatcgtctacatggccggatatctccacactctcgataaccactatgatgacctttcctcccac

SEQ ID NO: 141291 - DNA, 738 bp, Zea Mays
attgaaacgaccgtagtgccgaaatttggcgaaggcacatcttccactgctgaggcaagacaaatcgatttgccgaaggtgcctacagctgagccagtcgaaacgccaaaaaatgctgccgaagccaaagaaaaggcggtcaaaaaaccagagctagaagaaacaatggtgccaccagaaatcttgagtccactggaagaagcaaaattgccgaagatggcaaaggctcccgcaaaaactctcaagagaaggagaatggctagcgtactagacgctgtcatggagaccacaaaggcattaactcctacccctacaaagaaagttgccgaagttgccataattcacactaaaaccgaagctgggccctcagtgcctactgagacaaagcctaccgcaacttaggataatgctgagcaagaatctccaaatgctagcatggctgtggagcaggatgtgaaggaaaaagctaaatctcctgttcccgaagcaccgtccaaggatattgactttattattcgacatgcttcgggaaaaaggttatctgaagaagaagttatggaagccaaacactatgcccggggactgaaatatccgaagggagccttagtgtttactggcacggacgaagatgatttcctatactgtttgcctgacaacaaggaaatatccgtctggcgggagatgaccagaaatatgggatttctgaagctcgaagctggcctctccgccatgtcgaag

SEQ ID NO: 141292 - DNA, 370 bp, Zea Mays
cggaaatagaacacaaagtcaaaagcaattaagcaatacctatctgcctttcaagttccgcagctttctcagctgccttcgtcggttcttttgcatcatgagaatctttttcactcttttttattatctcgtgtgccatctctcagccgccattttctgagatgtcagtgaagaatttcccaccaactaagcttgcttcggccgaggggtcttttgtatcttcaatagataaggtagcttcggtttgggccaaagttttcacgtggtcacagcctagtttctccaaaatagccacgattcccctggcacctgagaaggcgcagacatccccgcgaccactcaaaatttcttcaaaggcttcaacttcgtt

SEQ ID NO: 141293 - DNA, 314 bp, Zea Mays
gcaaaccatgggtcgctctgtgccctcatgttgcgaacaagctttaggtggcacatggattcctagagataagaacttcgtagtgaagcagcaactatttgagcccttgaccccttgcgtacgacatggagcacttgtctgaaatctcccccaaacacaattgtcttcccaccaaagggcagcctaggccaacccattatatcacgcatgctattgtctagtgcctcaaatgcttgtctcttagccattgatgcctcgtcccagataatgagcgatgcttttgtagtaactttgatatcccactttgtttcgtg

SEQ ID NO: 141294 - DNA, 568 bp, Zea Mays
aaagtgcgagcacaggatagacgggggcaaaccaggcaccccttagacatcctctggtgccacatacaacaaataatcccagcagttaccccacttgttcttggcacacggaacaatttcaacaacttcgaccgacgtcttcccagtcctcggcgtgaatgtgcaagacccaaattgggcaatcaatccaccaatcttcttctaccaatgaagacaataattcttggcaaggacctcaactgacggttccccaccatacgaagtcaccacccacacaaactttgccaacgctaccatagcgttcgacaccagttgatggatctgaatttcaaacttccgcagcacttccactataaatcggtgtgccggtaagcgaagtccagcagtaaaaaaggcctcaaacacaaccaactcaccctccatctcggggacatcttcagcccccggtgcccgcccaactccattccaaaataccccaaacgttgcatctcgtgcacgtggctcgagtaaatcctcgacgacctaaactccatagtatggtcgggctaccgctccacggccgctgccg

SEQ ID NO: 141295 - DNA, 369 bp, Zea Mays
gctagagaaagacttaatgaacacacaaacgaagaattcatcatcagaattgttggagctagagagggagatcccgtgcaatacaatatgccgacaactgatgatttagccatgcttgttattggtgatttctcacttgatacctttaaacgagacattatcatagagacaaggaattcagaattgaggcgcatttcatcattgcatccagcatatatggccctttaatatccacttttattcccatatggagaacgtggattccaagttggtgttctgtatagtggtctagaggccagagaaacaaattcaagaacacatatgaccatgcaagactactattgctatcaatttcattacaagtctggg

SEQ ID NO: 141296 - DNA, 415 bp, Zea Mays
ggttgtatttttgtgacgtcattgtgacataaaggccatcgtcacagaaggtgcgtgttaaatggactacaatgacgatcatcaataaatcgtcatagattttatgacgcatatcagatttgtcactacatctatgacgctctatttcgtcataagtgcctctaaaaatgtcacaattagtactatcacatattgccacatggctaatgatgatgacgtgatatttgacatggcaaaacctttatgatgaaaatatttgttatagatttgatcacgtagcaagccacgtggcaaaattcttgtgatgaagatttttgtcaaaaaatggaaggtggtggccacttacgtggcaatacatttgtgacgaacattttcatcataaaatgtgatgacgtggcaagtgacgtggcgaagc

SEQ ID NO: 141297 - DNA, 417 bp, Zea Mays
gaagaagccgacaatgaaaacaatgctgatgatggttgggatttctggccggttcaacaggcccaacaagcgcaaccccctgctccagtgccaaatgccaacaacgaggaggagcagtttagttatcaactttctggtctcgaggacctgccctctgatgaatctgtgggtcttttcaatgacatcattatccctcaagaggttcgattccctcaggaggaagccccagaaaatgaagatgttgtgcttgctttaccagccttccccccagcggatttgattttggagggaaacaacgatcaggggaggataatttgaatgtgaaagaaaacatcaatgtgggctgcatgcaacacttggagtagcccattcatgatcctgcttatgaagattacctagccaggaaacgcttctcat

SEQ ID NO: 141298 - DNA, 403 bp, Zea Mays
actctatccatttagtgaatttgtcaatagcaaccagtacatgagtgtatcctccttgagctttctttaagggtccaatcatatccagtccccagcatgcgaacgaccaggttacaggtatggtttgtagttgctgcgctggtagatgatgctgttttgacaagtactggcaggcttcgcacctctggactaactcggctgcatcactctttgctgttggccaatagaaacccgacctgaagaccttcccaaccagggtcctggatgctgcgtgtatcccgcattgcccagtatggacctcatccagaagttgtttcctagtagtcgagagaatgcatttcatgaggactcctgatgcgccccttctgtatagcgtttccccaatgagagtataatgagctga

SEQ ID NO: 141299 - DNA, 558 bp, Zea Mays
acccactgtacgtcacgcctcccatcctggaggcgctaaaacccaaacagaagagaaaaaagaaagacggccagggaaaggaacctcaacaggctcctaatcccccagactagacaccgtggccatgagctcttggatcttttttgctccagcgctgcaccagagactactttcatccctaacagccctgagaacttcctgaacattgggcctatgttgctcaaacaagcaagcattacgatgcttccacagttcccaagcgaccaaaatgataaaagaatttagacccttccgcatttccttaggagcagttgagattactgtccaccaccattttgaaaaacggaagcatctggcgccaaggcagtaaggcccaactgaagaaagatgcttgctcatacttgtctagcaaaaacacagctggccaagagatggtgaatgtcttcatcatcttgatcacagagcgggcacacatcagggtggggcaagcctctcttagcaaggcgatcaaccgtccaacaccggttatggaacaccagccaaatgaaaaacttacag

SEQ ID NO: 141300 - DNA, 1345 bp, Zea Mays
atagatgacaatgcatttgagtttgctaacataaatggtagtcaacaagatgttacatcagaggaggttgaccatgaaactaaagatgacattatttccatcatccttaaagatgctaaggcaaagctacatcctgggtgtgatgcattcacgaagctttcctttcttgtcaccatatttcatttgaaatgcttacatggatggactcaggagtcatttacatcacttcttggtgttctttctgccgcactccctgaagaggcaaacttaccaaaaaactaccatgcagcaaagaaaataattcgaggactaggtcttgattatgttaagattcatgcatgtccaaaggattgcatgcttttctatggtgaccaggcgaaacaagaaacttgccatatttgcaacacttcacgttgggcagaaagaaaaaagaagggtgaagcaacaaaaacaaagggatataagaagaaaccagcaaagatcttgcggtattttcctttgataccgaggctgaagaggttgtatgctaatgagcaaacagcaagcgacatgcgttggcatgatgagggtcgcacaaagaatgggctgttgaggcatccagctgatgggcaagcttggaatgattgtaatttgagatatcctaatttttctgctgattcccgcaatgtgaggctcggtctttctagtgatggagtaaacccttacagaaacatgaatattagtcacagtacatggccagtactgcttattccgtacaatctacctccctggatctgcatgaagcaaacatcttttatactgtctatggtcattccaggaccagatagcccaggaaatgatattgatatatttctacaaccacttattgatgaattactacagttgtgggagggtgttgaaacttttgatgcctcttcaaggaagaagttctctctcagagcagttttgatgtggactttaaatgatttccctgcattaggtaacttatatggttggagcacaaagggaaaatatgcatgtccatcttgtgctgatttgacgaggtcaatttatttgaagaagggacacaagtgttcatatatgggtcatcgtcggtggttgcctcagtcccatccctatcgtcgtagaaggaaccacttcaatggtatggaggagaaagaactagcgcctgtaacaatgagtggaagtgcagttttgaggatgatggatggtaaaacttttttgtatggcaaaggaaaggttcatccggaggaagaacaatcatcagggcacaaagctaaagccaaaaagaaaggaaacggtaagaaacaaggcaaaaagaggaaacgggtccaaagggaaaaac

SEQ ID NO: 141301 - DNA, 600 bp, Zea Mays
gtaaggtccaggacctccaccggtgcgaacctgacccctaggatgggttccggacctctctgtgtagggtccgggccactcacaacagggtcccgggattctgggacaaagaatacccagaccttaatcaagaccaggcaggggtccggagccgacacgtgtccggaccataccgtgtacgcttctgctccccgctcaggcggagacccgatgctgccacgtggcctactgcccgtgacgtaagccagcgagcggagcctgacgtaaggcctctgggccgcgcggtctctgcatttattgcggataaggcgcgccacctgtctattccgctggcaggtgatgtgtcgcctcggcatttaatgagccctgtccattccactggcaggcaatgtgcctccttagcatttaatgtgccctgtccactcctctgacgagtggtgaccaggccatcccgcaggcggcgtgcctgtccattccgctggcaggcagtatgcccatgctgcggcgtacactatgcacaccatcacccgcacattaccgaggaagcagtcgcaacatatcaatacaatatgcactacggacattatggcgctcggagat

SEQ ID NO: 141302 - DNA, 789 bp, Zea Mays
acagctggtgaaacactgggcgccagcacacgggaaccaggacggccactactatatctgcactgggaggggaggcactaatcagccatggctcatggcttccatcacgagtcgtcatggctgtgtggtgtgctagcccaggctggatttgcagtgcctgccccctaattcgctgcacgctatctggtctactcatccccaccacctcgcaaaagtcgaggatagcaatgaaatctggctggcgatttctttacttagcatctcggtgaagtgccggtataaccatctcccatacaatgatacaactatacaagatgcatgcgtggagtggggctgctgctgcccatttcccccctttaatttgcttgctgaggaagatcaagttgcattgaccgggagcacgccattggtggtggtatgctgcatcgctccagcgacagcgaggtgtaaaggggtggagattacatcgctggagaatcgatcgggaatccagacgcctttcttttctagtgaaaaccgatgcatggctttacaaaatgttgggcggcatatactacccaatactgctactctccctgtagtcttttttagactttgacccgtcgactgtcaaccgctggaggaatagatgcttgattccgcggcatgcatggaaagctttgtgctgatgcagcttttccttctctagctcgtcccccatatccgatcgattcgtttcagagtagtagagtttcttacattcgttcgttgtttcaatattgactcccaagtcccaatatgtatttaccg

SEQ ID NO: 141303 - DNA, 612 bp, Zea Mays
attcgatttacaagttcatttcatgatatgtatttagggttcgtctctcgaagcggataactctaggagctatgaatgagcttcgagtccatcaaaactcccagcgaaagagcctgaaccacttgacagctctactcctcgaccctacactacaccattcccggatcaaaagcgacgctggaagtttatccgagccgcattcgttcgagaaccattagtgatccatgtcgacttcttgacgaggataaggtaggacgccgtaggccggcccacaccatgtttcattcacccagaatttaacgaggataaggtagctaggggccgcacggcacaatttcatccccggatttaaagctgtgcgtactccaagctttgccttgcggttgcagctctccgcatccttttgggatccgccaaggcacccttttttcctcgtcgtcgctcatgcttctgtataagcagactccgttaccaagcccgttgccacgattggctgataggttgtcagctgctggatcagctctgtagaactagaacgaagagttcttcttcgaacttcgaagcagagagtagttttgatgacctactatgtatataaaacaagcttgtgtc

SEQ ID NO: 141304 - DNA, 284 bp, Zea Mays
gccagtcctccgagtctacaagccagtcatccatccgtatcgcctttcagatgcgagtgcgtccatgatccatccccgaccaacgtcacctgatgttccaacccagcgaacgaaacagattccattttccaatttctaaccaattccggctctctcgagaagactcaattctggtgcctgtcgtaatcatcacgcggacacaccacacagttcgtgatccacactgctgcacgtgacggcacagtacagttgatttcaacgacgtagctttcatagtgtgccca

SEQ ID NO: 141305 - DNA, 917 bp, Zea Mays
aatatacattgtgatagtatgaatgattttgaacaccaccaatatcagcatctcccctatggatattgctttcaggcattgtctttgtgacagtctacaagtttagaccaacacattcagttacgtagaaaaaattgaacaatgcaatattaattatatgtgtcatgatagatcgcgtactttagaaacagcaggttcattcatatcattccatattccatcaacaccattggagatgaagtcctttaccaaactagcccaccaagctcgtgccttttcagatgtaaaatcagggaaaacacaatcaccaggccacacctcccctgaatgtaaactgtatgagacatatcctcctaacatttaagaaaattgacgatgaatcttatttaagtcagtgatacataccaacgaacgggctgccatctgccttttgaacccaaacatcattttttgagccactatcaaaaacgaagaaacccttctccttcttgatgcctggatcaagcatccagactgctttgcaaccaatggaatgaagatcgtccaccagtgattttggatctgggaatcggatctgtagcacattgatagcaaaatgctcagacaggattcaacaaaatcaattatcataataaattatttgcattcaaaagagcaccataacgttagctaaaaaagtgcatgatgatagtaaaaaataactggagggtctagtaaacattccaaagcaatatatataaaagttctaaaacatgacaaaagaaacacaaatcagtggttaaagcgctcctgtatagcaaacacagcagatccagtacttacactatcaaacgtgaagcacctaaaaccatccatatagtcaatatccatccagacaacatcacaaggaattcctttctccctaaatgttctaacaa

SEQ ID NO: 141306 - DNA, 459 bp, Zea Mays
gttccaaatagttacgtgcatgtgcaacttgcccacagatgagttcggaccgtgccagctgggatgcgatgacaactaaaatattcattgacctatgcatcattcagaagaaccttaataacttcaatagcatgggcttaactaaatatggttggcaacaagtgtatcgtagcttcaaagagcagactggtcttgattatgaaaacaaaaaactgcaaaacaatttgaacttcctccgaaggtctttccagcattagcaatacttgcagaaccatattgggcttggccttgactcaaggactggtgatatagcgactgatgattcgtactgggggacccaggaaggggtacattgctcacgaatttattacaagttttttattttgtggaccaatactaaatctgtactatgttcaaacgcaggatcctagtccttagggcagtcgaggaaaaccacca

SEQ ID NO: 141307 - DNA, 590 bp, Zea Mays
ccaattagcttcatactaaattcgaacttctccaattttgttcgaatccttattacttctatctaaggccctgaattgatacctgcaatttcaaaaaaaaacgtacattatttcgtggatagtgtaatgaactaattcgaaactgcaaatttggagcgaaatttggaaaattaggaagtacattttaggtacgtaaatggaaggacgtatatgggcatcgtcgggcatgggcgagactggtggggtgggagaggcaaaatctgatggcggccaaagagaaggggtagcagccttttgctatcatatagaacatgcatacaaaacaaaaggcactttcttttctcagagcgacaggcaggctctttcctcgaccgatcccctcatcgtctccgaccgatccccccctccctccttgcacatcgcatgcatgcttgcatggtggcgctacactttctgatctgtcgaccccggccccgcgccggtccatgcatccaccctttgcattgcttggaagttggaacggcgtactgatcgatctgtagcaagcatgctgtgaggaaaggaaacgacgtgcaacgtgtctcttaaag

SEQ ID NO: 141308 - DNA, 500 bp, Zea Mays
attaaagcaggtccaaaacggccgtgaccaggctatccatgtcgctcaaaaaaattcagaccgtcagatcctcgttggacggctcatatcgttcctcagctcactccgtctctagatacttcccttcgtctctggatacttccgtttgatatgcttggcaggtggacactatcctcgctccttcggccatgtctttcttccttctcactccatccgcgtcatcgctttgagtcgtcgtgctctcattctcttcgttttccatcactttcattcatcttctctgtgacatccttttccgagcactttttccttccgtcccttgtcatcggctccgccgcctcctgtatcgtcgctttcatcgcccgctctgattgttgctcggaaagaggtttgtttcacttaggagtcgtcttttgattttttttaatttatacatcatttcctacaatcgcgattccttcttgccatgcttcctcctcttccgctctgatgcatatgcg

SEQ ID NO: 141309 - DNA, 459 bp, Zea Mays
gggaattggagagcccagcgccccaccatcgcctcgtcttgtggtgccatcgtagttctgcaagtgcgccgtcgcttgggccttggtggatatccaggaaggttcgccgtcgtttgtggcatcgatgcatcgttccagtgtgtgctggcgtctagggtcaggggattacgcacctggttctcggtgccgccgcacggcatggtctgcacctaatcgtagaaatcccgggtaagacatcatgaactaactcgcgttaatctgtgtcgtgttgctggggtgccttgcgccgccactgtcgtggggaggaagaagctgaccaaccgttggatccggtacgattagatctgcggttgatagtgtttcgatcgccagatgtagcttgtgcggttaagattagaaccccttacaccttcgccttgattgaacttagaccgttggattagatcggatgggtgagac

SEQ ID NO: 141310 - DNA, 525 bp, Zea Mays
ccttctcccgttagaattcggcgaaggaccaagtctcccactacgaaggatcgatgtcgtatagccttatcatgataacacctcagggtctgctggtatctagctgtctgaattactgtattcaatcgctcttcctccagcacatcaatatcttctagcctggtagcttctgctttagctatgctttcgaagaccagccttggtctcccaaaccggaggtcggcaggtagcactgcctccgaaccatagaccatgaagaagggggtgtttccatgcagagctcgactgggttgagttcttaggctccaaaccacataaggtaactctctgatccacttccccgcgaacttttcattcttgtcgaagactttcttcctgagtgcttctagtatcattccattagccctttccacttggccattagctcttgggtgtgctattgatgcatatttgatctggatgctccgttgttcgcagaaatcaaagaattcagagctagtgaagttggatcccaggtcggttatg

SEQ ID NO: 141311 - DNA, 299 bp, Zea Mays
tacctaggcctgaaatacacatgcaggtgcatggcaccaaagcaaactgttaataaatcaagttatttgtgattacacgagtcaaatggaaaaaacatgctttgttagcttagctcttcattcaagctaacaatgaataagcatgcacagataaatattttgcaataagaggagatagaaagatagctaatattttattgtgcttaattgtggcaataagcatgtaggctttataaagtttgcatcagttctcaaaagataaaactcacgagcaagttgactctgtatggagaatcatc

SEQ ID NO: 141312 - DNA, 398 bp, Zea Mays
cttgatccaggcacgacagtcgtcgaagacgcctctttttcttcttctccttgataggagcagtctggtggttcactcggcatgaacgctttgggcgggcactttcaggtttctggatctccacctctttgccaaattcttgtccagtcgtgatggccattggctcagtgcgggtagagtcagacgattccccggccagcaggctaagcacggcgtccatctcatcatcatcggtgctagctggcatttcaaagtgagtttgcctctcagccttgggaagactccaaagtggagcaatcaaggcctcaatgtcctcgagagagggtcgcactctatgacccgggctaccatcacgagcaggagggttggagacaaattcagagaatgacctatttggt

SEQ ID NO: 141313 - DNA, 416 bp, Zea Mays
tgagcatgaccatcggcactcacacgctgctgcaagttcaacacacggaatggaacctgatgcccttccaactgcacaggtaagtaagccactgcaacctccggtcccacagcacgctttaactgggacacatggaaaatgggatggatagcagaggacgccgacagctccagtttatatgcaaccgagccaatcttagccaggactttgcagggaccgagataacggaatgccagtttctgacaagaccgacgagccacagaagcttgtacatacggttgcaacttcaggaataccagatcaccaaccacaaactggcgctcagagcgatttttatcagcttgctgcttcacacgatgctgagctctcttgagatgtccaaaatgctgcttcacacatgacatccttctcttgaa

SEQ ID NO: 141314 - DNA, 632 bp, Zea Mays
ggcggatgtggtccagtttgtacaacagcgtgcaacttgtcaaaaggcaaagagtgaaagaactcatccagctgggttattacaacctttgcctgtaccacagggtgtgtgggaagatgtgactatggatttcattgaaggtttgcctaagtcggatgggtttgatacaatcttagtggtggttgacagattttcgaaatatagccatttcttccctttgaaacatccttttactgcgaaaggtgttgctcaagtctttctggacagtgtggttaagttacatggagggcccaagtcgctggtatctgacagggataaggtgtttactagcagtttttggaagaatttgtttcagctgatggaggtcaagctgctgatgtctacagcctatcgcccacagactgatggccaaagtgagcgtgtcaaccaatgtctggagatgtatctcaggtgtgctgtcaattctcaacccaccaaatggaagaattggttggctctagcggagtattggtacaatactactcatcatgctgttttgggttgtacaccattcagggtgttatatgggtatgatgctcctctgttagcccttcctagactcatcaatattgaggacccagatgtcactaagt

SEQ ID NO: 141315 - DNA, 453 bp, Zea Mays
cttgacatggatttacctcgggactcgaccttgtgacactgccaccttagcgacgcgacaactccctgtacacagccccaaactgctcgacttccacacataaacgacaaagctctatcgggagagcaaatcttgtgcagtgatcatgccaaaatacgcgaagatctccaacctatgggcgtttgaactcgggcagaagcaaagagccacgtgctcgacgccgtgttaggccggccgagcgtggattggccgcggtagcgcgtgccccacgcgtcagcacctcgccctcgcctataaatgtttccagcagccttagccgtttgcactagcgcacctagagccccgcccgagccagagatcaccggagttcgccgtggaaagcaagcaccaccgcccgccatctctgcccgagcacggccgttgtggccagccccttctgttgacccccgcctc

SEQ ID NO: 141316 - DNA, 374 bp, Zea Mays
caccacgcagcacgcacccaagaaaaaagcagagcagtggacttggccaagaaaaaagcagagcagtggacttggccatcgatcctcccagctgcctgcccccaccagcaatctccgctgccggccccccttctccttctgctagtcgagtgaccgaccgcggcttccaacggcggaggtgatcctctcggtctcgtcgctttttttccatggtgatgcatgcatgcgctcaattggttcctgcatgcatgcacaatcatggctccatccatgcgtgtacatgtacatgtagaacgcctagtgcttcccctccccctttttgttcgtttctgctttacacaatctgctgccccccaatgccttcgatatatttt

SEQ ID NO: 141317 - DNA, 356 bp, Zea Mays
acgagacccaacaccgcgacatgaatcatgatggtcggctgtggcggtggtgcgagagcccgctagaacaggaggacccattcccagcctaattattctcgaagatctggacggtttcccggcaggcccattcgtccgtaacgtccgcatttcaaacttcaatgcgggattgactaccgagccggccgttgaggcaacgaaacagaaaaaccgtgtgacgttgcgcatcgtgcatgcatggacggtcaacagaaaaaagggagcggtcgtgggtcttgctcatgcacaggaagcaacgactcctctttgacctttcttggttttattttcgaaatggtcgttaatctcaatttaat

SEQ ID NO: 141318 - DNA, 347 bp, Zea Mays
tagacgggtatcagttgtgataagaggactgcgaagttgatgtccccgtccggagaagagatcgcggctggactaagtatgactaaagtagagagaggagattgctatcagttgacgttgataacaagaagaccaccccctctagaccatcaaggttgtgtttgagtttcagtatgtatttcataaagagctgccaggtatgccacctgagcgaaaggttgagttcgctatagaactagtccctgacattgcccccatctccaaaagagcctatagggcgtctagaccagagttagtggaactcaagaagcagatagatgagttattagagaaaggttatattaggc

SEQ ID NO: 141319 - DNA, 351 bp, Zea Mays
cgcggactttgcatcctgcaaaaacccgaccggtttaggctgcctctcacccagattgtgactcacgccatggctgggtcaaccacctccgcaatgctcggcatggtgggtagagtctgagctgggcggaatttggggtcggcttaagtataaacgtgggtcctgatgccccattgaccaacaaactagcgctggggtgccgcatcgtgggttgtgggctctagcgccatgggagttctaccgggtgcagtacgtcgaggaattgagcttcgccgtgcacgtggttcggtgagtttttcctcctatgaaatcgtctcgtctccctcgtccattaggttgtctccagcaatg

SEQ ID NO: 141320 - DNA, 317 bp, Zea Mays
gataaagattggtttgttagatcttagataagattggttagctagaaggccactatctcaactatataaatgtgccccttaaattaatgaaaaatcaagcaaacaagtatcttccccgtgcttctcccacatcgtctactattcagcgcgtctactagtcgttagcattactgttcatctgtgccactgttcactcgagatcctattcatctgacactattgttcatcgcgtgaacagtatcgcgccttccccaaatactagcccgacgacgcccaagcaccaaagccctggtcctagaccccaaacctaccactca

SEQ ID NO: 141321 - DNA, 276 bp, Zea Mays
gtaaggaaatactccatccaggattgtggatcttgattactttgaagatctggcttgaatcttatccttccttgatttgatgaggtcgatcatcatcgatcttcgttcttgaagttgttatccgaatttgggacatgtagttaaggtagattcttaggtaaacaaaataggttaataggtagttatgagttaaataagcttaagcagagtcggtcttattgttttgcttatagattggttggataagttatgcaacctgttatatcggtcaagctg

SEQ ID NO: 141322 - DNA, 703 bp, Zea Mays
aacattgccacccctgggtgggatcttcgtgaaagggcgtctgctacgcgatcatcagtgtcttgcttgtaaacaattctatagtgcaagccgagcagtttggtaaatactttctgctgccatggtgtattcaaccgttgttgattgagatgtatcaaacttttctagtcagtgaagatatggaactctccctgcaataaatacgaccgccaatggtctattgctaccaaaattgcaaggtaatctttttcatatgtcgacaatccttgagtcttctgccctagaggcttactgatgaaagccaaggggcgaccgtcttgcagcaaaactgccccgacaccattgtggcaagcatcagtctctatacaaaaagttttgttgaagtctattaaggaaagaactggagcagtactcaggagatgctttaaggagagaacctgagcagtactcaggagatgctttaaggtgcggaatgttacctcatgatcatgagtccacacatatagtgttcctttcttcctgagttcagtaaggggcttagacacaatagcaaaatgcttgacaaactttctataatatcccgccagtcccaaaaaaccccggagttccttgatatttgtgggagaaggccaattcaccatagcttcaacctttgatgggtcagtggcaaccccctgcccactgataatatgccccaagtaag

SEQ ID NO: 141323 - DNA, 364 bp, Zea Mays
gttaaataacattatcctaagctcctcaccctcaaaaagacttcgcaactccccctcacccacactcgccccagccggcgaggacaacaattcctgcttgccagccctgcccacacgaagccgaccgccatccacctcactcactctacgcttcgccaccgcccttcgccgcctacgcccagcactcggaccaggcacaacttcagcatccgcaacacacggagaagcctccgtcgctgccacatccaaggccgcaaagtaatccaagtcctcatccgaagactcttccgtccactcaaccgaactcccagtgtcaccaaaatcagaaaacttagaaccagactcatctgtttcattcccagca

SEQ ID NO: 141324 - DNA, 434 bp, Zea Mays
tctttagctacgagacaacctaacttcagttgttgttgttgttttttttactttctctcttctcacaaatactatgattacgtctttacagcgatcttttttattccaaacctaaaaatgcatgcactcactctaaaagcgcaaagggagcatctttttttcccccatcatctgcacgcagccttttcttttcctcatgtcacgagggactgaaggtgtgtatgcagcgtcaagtcatccatccgttccactccactcactcatgcgtcgcgcactctgcgctcgtgcctgcccggggctaaagctttagtagctagcctcagatcagatactgttcgtgtttgttaggccgcggcagctgcacatgagctcatgacagccggcagcaccaccaccaacgccatggaagaggggtcggggtccatcacatagac

SEQ ID NO: 141325 - DNA, 371 bp, Zea Mays
cgtctgcgccgccatcgccctcgctcggccccctccgcacgcgcaaaccactgttcccccgctcactccaccgacccccctcggatcctccctgcaaattagatcccatcgggtgcttgccctgcccgcgtccctcgttgcttccctacctcgtcgcctcaagcagctctagaaatcctctactcaaaccactgccaccgctagcaccaccatcgctaccactactagcagcaggatcttcaaggtggtgccatgatgctatgctgggtacacgttgcatgagttggggccagtgggcacgacgaacctgagccgcaccaaggtgcacacgctcatggcggagctcaccgctgacttcctgggaacgcctc

SEQ ID NO: 141326 - DNA, 455 bp, Zea Mays
tttggcttcagtagtagtagaggtctcaccaccaaatttgggcactaaggccggttcgatgaagcgcggtcggtgagtaaggaccttcacccttttcctttttggtgtggcttcacttagagcaactgaagcatcaccttttccagaagttgtgctttttctcttttgccctttcagcgggtagtggtaatcagggtacataaacccaatagcatcgaaaactctattcagcctcttctttttccgccctccgaaggtcgcagatagcgcgttatcttctgtctttgaatatggtccaagcagttcgtcgcttgtagcttcgatgcatttcagccaatcatcatctggctcaataaacttaccctcatatctgaagttgtatttcaacctaaccagtccaccttcatcaggcttgttgatagtttcctttggcatttcccattgctctacaagcg

SEQ ID NO: 141327 - DNA, 585 bp, Zea Mays
gttttttcgtagtttttttctcctccacattggaggagttttttttcacattaaactctatgtctacttttttgcacctgtgatcctaacaattggtatgaattggcggggacaacagatctagtgataaatcagcggccgaaccgggaaaagtgagagcagcggctacggatcggatctaatgaagaacggcggcggcggcggaaaaactgtgatttggaatgccatcagtttgggaatcgtggagtgctactgctgcctgggatttcacgtgaagtgctgctagagatcatcattgctgcttcttggaatctccacacaagaatcaaatcattgatttatttcccttttgctacgtgcacttaacagattgcacatttctatttcatctgaaattatttatttcggattataaatgttgactaaaattgatattccgaagtttgatggttgatcagttttgctatttggcagattcagataaaggttgttcttactcagttatgtgtaccaaaagcgttacaatcgcgacctgctgatataactgatgataaatgggaagatcttaatgaaaaagctttgtcc

SEQ ID NO: 141328 - DNA, 292 bp, Zea Mays
cggtgctcctctgtctgacacgataggccttggtattccatgcaaacgcactatttggtcaatatagatttctgcataatttttctaccctgtgggtggtatgtactggcaagaaatgagttgtcttggttagcctatccacaatgacccaaatagaatcatggtgccgggaggtgttgggcaaacccacaatgaaatccatgctgaggtcctcccatttccaagatggtatggggagaggttgtaaggtactaccttcaatgactagccttgattctttggcaagtgtcgc

SEQ ID NO: 141329 - DNA, 1428 bp, Zea Mays
cgcattcgcatcgaccagacgtcacggggcgccggccgtaatccgccgccaccgccagtcgttcgaacttccatactcgggtcttcgtcaatgctctgcgtcagcgtcttagcgttcagcgatcgggcgtctcagtgagccactgtctcccgatcggcaacggccagccggctaggccagcgatccatcggccaggtgcggaagcatccaccgcccaggcccaggtgatttgatgaatccgtgaatggtgattggattggtgcctgctactgctagcgtcttaatctcttacatatttttttttaaaaaaattaatttcagtgatgtgcacttgatcataactatccgtgttccacatcatacatattgtttaaaattttaacttctttatttatctaccgtcttaaatatttagttgcagccgcggagacagacctatggctagtagggtatgggtatgggtcctactcttagaccgaatagcctttaaagcttcatatatcggtcaatatgattagccgtcgaaagagctagcttttggtgtctaaagtttcatacaatgtttttagtgttatatccggctctatatttagagagatcctggctccgccactgtttagttgtaacatttcaattttagtgaaacaattacttgcttttttgattaggtcttagatgctgcccaagaaatcattgtcaggttattaaaaaaaagagaaaacatgaagatcaattggtcgaatcccaaaagggtgcttacataaattctttggcgtttcaactaatgttgatgtcaacgaagttgaaggatatcttggacacttttgattttaatatagtctttgatgatcttgcatcaaaaaatatcccaaaaagtatctttttatgagaagcaatatatgttatagagttcaattcttcattaagtaattatattagctccaaggtaaatatatatagttattttgatcgattttatttctcgataattatttgacatgttacattaaatatattattgtttttgtttttgtttttgtttttgttttacaactaaaattagagcatacatatttacatatatcataattttttatatattttagagggccatcgagatgaccggtgttgttcctgtcgttcggatccccatcccacgaagcctctctctccacctcgccgacgaggtccaggcacgtcgccagtaaaggaagtcgcattgcgttgtcgatagcggtttgtttcctagctgcgggatcctggggcaatgagggctgatttggtgactcgaggttatagaaggatcggagggggattggagaggaaattagttcatttccccctcaatcccttcaattcctcatgattccttttcaccaaattaacccggagtggcattggcacgccattgtcgccggcgacataggg

SEQ ID NO: 141330 - DNA, 595 bp, Zea Mays
ttcaagatcatgagttgggtaattcccctcatgcttcctcaactgccttgagccataagcaatcactctgccttcctgcatcaacacacaaccaagacaatacgcgaaacatccgtataaactgtgaaacgcttaccgctctcaggcaaagctaggataggggcgtccaccaacttgctctttaatgtctgataactgatctcgcaatcactggaccagatgaagagaacacccttctctaagagtctagtcaagggcttagcaatgctggaaaaatttggtacgaaacgccgataatatccagcgagccccaagaaacttcaaatttcagagacactagagggtttcttccactccaccacagccgcaacattcttgggatcaaccgcaatgccctgctgattaatcacatgccccaggaaagccacttcggacagccaaaatgcgtacttcttcaacttgccatagaactgattctcccttagggcacccagaacgagacggagatgctgctcatgctcagcctcggtcttagaataaatcagaatgtcatccaggaacacgaccacaaagtcgtccaagaactcatgcaaca

SEQ ID NO: 141331 - DNA, 574 bp, Zea Mays
tccctttgctaagaaatttaggcttgccagggaaaggcttaatgaacacacaaatgaagaatttatcatcagaattattggggctagaggagatcctgtgcagtacaatatgccaacaaccgatgatttagccatgcttgttattggtgatttctcacttgataccttcaaacgagacattattatagagacaagaaattcggaattgaggcgtatttcatcattgcatccaacatatatggctctccaatatccacttttgtttccatatggagagcgtggattccaagttggtgttgcatatagtgatacaagggttagaggaacaaattcaagggctcatataaccatgcaagaatactattgctatcaatttcattacaaggttggccagccaaatccatttctatcttatgggacactatcaaaccaggctaaggtcgatgctcgtgcctgtattgatgaaaatagacttatgtatattctaaataatcaagataaattacgaatggaaaatcttcaaggcatatcagatgctgttagtagaggctgcataaacggtgacgaaatggga

SEQ ID NO: 141332 - DNA, 481 bp, Zea Mays
cgcgagtcgttccaacgagcaattgacaagtgcagtgcagtgcatgaggcatcccacgcggggaaatccgcgtccgcccaatgggcgagccagccagctagggataaggtttggggatgggtgtgggccgtgcatcgcctccccgtttgtcctctccgcccgcgtcagctcctcagctcctccgatctgtctacaagcgggcccagcgccgtgtcgccactccacacgccacgtgcccacgtgcatggatgggcctgcccaaaccttatcatgcactgtccaggaacgggcgccacttggacagtgatcgaacgctccaattgaagccggatcccttggaatttccatatacttcccctccttgcttgcttgaaagtgctatttctatgtccaccaaaccagtccttgtgttagtgttgaacatcatcaaaaatgtcggacggtccaactatagagaatttgttagctgtcgactaaaaac

SEQ ID NO: 141333 - DNA, 426 bp, Zea Mays
aatgggggtcaggatttctccttgttagatgaggcaccagtttccatcggtgaagatgacactgaatctagtttgctacttaacttcctttctcaattgaaagaagaaaaggcgatgcagtctaccaagttatcggcagagcttggaagcttacaaacagatatcacagaggttgacaaaagacactcaacaagaatgaggttgagtttagatgatacagatgtactgccaagttctagtgctttgtcacgagcttctgtgagtgcccttcaaggtgcattgctgtcaggtttgttaccagcgtcatacaagtcgagcatttatgaggagagggtaatgaggaatttggtgcagcttgaaaatgcatactactccatgaggtcctctctggacacctgtgaaactaatgtaatcaaacagccagat

SEQ ID NO: 141334 - DNA, 341 bp, Zea Mays
agagaattgaagccttttctgtggattgttagcacatggcgttcagccatactccactactattgaaacgctgcttcatccattcctggtgtcaaatgctgcagctccaccttactcaagatttaccaccatatgttcctggtttcatgtcattgaagtgcaagagcagttgtacttctgactgctgcatctgcatgggcttcagtcttcagcaagctagctagccaactacctatttcttctgtgtctttgcagtcattttcctgacttagtggccatgggagtgggacaccattgagcttcatgttttttagctcgctgcattcatagttacatactcc

SEQ ID NO: 141335 - DNA, 623 bp, Zea Mays
caacacccggcttgggggcaccccaaacctttgtgtttgatagattagcgccaccagtacaaggctgatggaatcctcctcgatccggtcatcagatacatgtccagcaagattgtcgtaatactcgaccacaaaggtcgaccaattcagtaaggggcattggtagaaaatgcccacaattatagatatcaatgccaaaagaacaacaattggagatgttattaagatttaagataggcacaacggatgccatcataaaaggcaataataaggagccaatgatccttggtgagttggccgaaacaaatgaggaaaagggaaaagttactaccaacaaaatgtctatcacaaagcacaccatgcctcgatggtgtccatcgggactaacacactctcaaaagcacaaattacaacgcttgagagcaaagtaaaatagagaaaaggggtggaaaagatatttaatgatacacatccacaatacccatcaccacacaaaaaaatggagacctaaaaccgccgagattaacacaaaagaacaagtggccatgaaaaatcaagacacaacacctagtgtacaagtccctacaggtatcgcgaaccatccagcttcagcagtcatactg

SEQ ID NO: 141336 - DNA, 334 bp, Zea Mays
cgcaagtattccggtgactcaggcgaatctttatgtggacggcgggttattctggaattaccgaggggctcatatgctaaaaggtctaggtgaaggggtatggttctttctgagttgttggattagaaaccaagggctaggattagatctcaaataaaacgaatcggtatgcaactatggccattggatctgggatctatggtccatattcagcataactgcactctattcttgttcgcccgatcgcaaatccatgatccagaacccatcatgcgaaagggaatatggtgtcataatctcgtcgctccatcgcctatctgacggcctacctttc

SEQ ID NO: 141337 - DNA, 319 bp, Zea Mays
gcagaacgtgccaaagggggtaataaaggtggtggcatgctggtcgatctccttcatggcaatctggtgatagcccgagtatacattcggggaggaaaggagctcgcacccattggtagagtctacgacctgatcaattcgcgggagagggaaatgatccttggggcatgccttgctgagccctatgtagtcgacgcacatcctccaactctcgttcttcttattaacaagcatgggattcgcgacccacacgaggtggtgtaattccctaacgaaccctgctattaggaatttcgtgacttcttcaatggccttgtgc

SEQ ID NO: 141338 - DNA, 579 bp, Zea Mays
ataacctttactaaatccagtaaacaaattatagccagatttaacacaccttcaaaaccaactgtttagatcgttggataaccctctcctttactcaaatccaattaacaatattatttgaatcatcgctccccctctctctaactctcgtggtcgccaccgttgacctctctcatcgtgttgctgtcgacccttcctcacccttccacgggatcgtagcattagcacatagggatgaaaacgggcgagaaaacccccgtttcgtctgctaccatatcccgtttttaccagcatcgggaatctcgttttgcactgggataatatccgtttttccctattttattatcgaccgaacatctaagcccacagggcacgttcccactcccacgccacacaggcacacgactaggcgaccaggcttcaagcccagcagcagcccactaagcgtctaagcagtctatagagtgcagatgcatcacacactcacgtgtggggactagggaatccggaatcgccaaatcagggataaaccatatccccctcttcctctggctctagcgggcggcggctgcctgtgcg

SEQ ID NO: 141339 - DNA, 381 bp, Zea Mays
ctagcaccgcttaatttttcactaaaataagcaattggttttccttcttgtaacaaaacagcacctagcccaataccgctagcatcgcattcaagctcaaacactttattaaaatcaggcaattgcaataagggagcttgggttaacttatctttcaaagtgcggaacgctacctcctgcgaatcacgccaagcaaacgacacatctttctttgtgagctcatgtagaggcgctgcaatggagctaaaatcacgaacaaatctacggtagaaaccggcaagtccaagaaagctccgaatttgtgtgaccgtcgtcggtgtaggccactcccgaatggcagtaatcttgctgctatccacctcaatgccctgtggagtaaca

SEQ ID NO: 141340 - DNA, 365 bp, Zea Mays
gtctgggagttcgtttccttggacggaggagtcctcggatgaaggcttagattattttgttgcgttggatgtggccgcggcggagatttcaccgcgtgtggagggtgctgaggatcttcctggtacaagtactaggtgtaggcggcgaagggtagtgggaaaacagtgtgttggtgaattttcgcggagcggcaggcgccgtcgcatggggatggagcatggccgacttcgagtagacggggctggtaaacgagaattgttgtcttcgctgaacggggcgggcataggcaaaagggataggcgaagggatcttcgggagttttttgagggtgaggaattgaggataatgttgtttaattacggga

SEQ ID NO: 141341 - DNA, 312 bp, Zea Mays
gcgaggatggtcttgagttctggtcttagccctttcagaaagcgggccatctttttggcttctgtgctgacgtcgttaggcgcgtagcgagccagttctgtgaatttgtgcacgtactcagtgacagatcttccaccttgagttagttcccaaaattcgtcttccttgagctgaacgatcccttggggcacatgatgctctcggaaagcagtttcaaattctgcccaggtagcatctctgacgacagcgctgaaggtatcccaccatgatagggccatcccggaaagttgatgagcagccaattgaacacgc

SEQ ID NO: 141342 - DNA, 778 bp, Zea Mays
gcttatctttgtgactttgtaactttcaaattctaaggttttttccctaggtcaccacatcaatattgtagagctattaaagctaaacaactttgtttaaggggttaagcattgttgttatgaagaattgggagataattaaacccaaagttgggctgtcagtcgggttactgactgaaaaatgaccaccagtgttattagtcgagctttggaattgaaattatgtatgatctagtgctcaactgagttcagttcctatagtcgaaatgtagctggtttgtaactctacaactttgctgcagaaatttgggtgagttgccacgaaaactttagagaaaatccaccctaaactttggctgtcaggagcactgaagaacattgccatggtacggtgcctgggaggataagcttcagaccctcgccgccgacgaccaatccgcgtcgtgatttgcgccagggtcgggatgggcgtgcggagtgcatctcctcgcaaacatctttttgatccgggtaagatcgccgcggtggagcgtgatgattccagccgccacgcgaccactaatcactctggccatatccggtcatcgacgccgctcctcttcgttcatccacgccctcactgatttgaccgtgttactgtcgcggcagaatgtggcaagctcgtaggaaaggatagcgctcgatgccgttgttgatcgccagctaaggccggcgatggttatcaccatggccatggcagtggctcactgcgcctataaattcaccgcatcctcacccc

SEQ ID NO: 141343 - DNA, 314 bp, Zea Mays
accgtgatggggcgggtccagctggtctactgaagtttggccccttgggtggaaatccaaatgatcgagtcttctggtgccggtcctgctgttgtgcccggagaacctggaactttcttttgagatgccctttttcttcctcctttgccctttcaacttgcatggccttgttggaaaggtgagagaaattgaggaagtcttggctagccaaaattgtcttgagttctggcctgagtccctttaggaaacgggccatcttcttgccctcgttactgacatcatctggcgcatagcgggctaactctgtgaacttg

SEQ ID NO: 141344 - DNA, 652 bp, Zea Mays
ttgattctagacctcacataatcgcgatcagaggttgcagatcgatcatgtatatgagtgaacgaatatgtttccaaatggtccctccggtctagaatacatgatgcttccgacaggataactgtacgtgagttcgagcggtggctcgtctacgatttccaccaacaaactgtgttgtctctcacggatgtgcgtgctaccattgtcgccatgtctctcggccatgtgtcgacctctaggtatatgttgtaggtgtagcttgtgcacagagtaggtgtgtgtgattggtgtgcgtttgggatgtgcagtgcgtgagttcagggtggggcaataaaaaagaactacagagttccacttcactttctcctctcatacctattagccgaaaccaacactccatctgcacaacaccacctctcttctccaagatcaccaagaagcttcttttctaaggactgcaagggtatacaccagcaagacaaggtaggaattttctcttgccctaaatcttctagttctccaatttttcccctgaatgaaattaggaaacctgaagcaatatcagtgcttcagttagatgtggctattcatgcattctttttgctattcctcgacttgttgagtacctttgtactcattccgttttgtatcc

SEQ ID NO: 141345 - DNA, 722 bp, Zea Mays
gccgtacagctacctcattgatcatttctgagatgcggtatggaccgaagaagcgaggctggagcttccccttcgatgcctgggacagagaagcaatcggccgattgcgcagccgcagcaggacccagtcacccacgacatatgtgactggtctgtgggacttgtcgtagtggcgcttctgcactgcttgagcttgttccaggaggtcgtggacctcggccaggaactcctcgcgctctgccatcgtctaggcgactgcagccaccctagtgtcgcccgcctcatatgatcgtctgaatggcgggtcgcggccgtagaccacccggaacggagtgtcgcgaagtgaagactggtaggcggtgttgtaggtgtacttggcccacgacagccaacgaagccactcgcgcgggtgatctccggtgaagcggttggcgtcctccgtctggccatccgattgcggatggaacaccgaggacatgtgctgcctaatgcccgttaagcgcatcagctcgctccagaaggtagacgtgaagatggggtcccggtccgagacgatcgactggggcacgccatggaggcgaacaatgtcggagaagaatgcctgggccaccgattcagcagtgtatgggtgagctaaggcaatgaaatgacaatacttgctgaagcgatccaccacggtaaggatgacggatttcccgcgaacacgcggcagtgcctcgatg

SEQ ID NO: 141346 - DNA, 563 bp, Zea Mays
ggtttttcttcttcttcttaaaatcagtgttttgcttggcctttggtttccggttcgacttgtttttgtttttcccaccagatttgccttcaaccacattggcattagaggtaccactatccaatggaccagaacggggcacatccttagatctcgccttctcctcaacatcaagagcagcaattagactttcaacagtcattgcctccttgtgtttgagagccgtggcaaaattcctccaagtaggaggtaattttgcaatgatgtaaaatttgttaggcaagacatagtcaaagtgtgcaagttcccccacaagaagctggatttcatgagcctgttccatgacagaatggtcatcgaccatcttgtattcatggtactgctcattaacataaagttcacgtccagcatctgatttagtatacatatggtccagggtctcccataaatcatgagccacttcgtggtgcatgtgtatgtcatatagttgatctgacaataatgtcaagatacaaccaacacatgttttgttatctgactcgaagttacgatcctgctcctca

SEQ ID NO: 141347 - DNA, 396 bp, Zea Mays
atagtcttttcaccgaaaccctaaaactccgcacaccacgtgttcggtgaaatgcccaaaccagccaaaaatgctccgattgaacccaaattttttaggcaccttcacaacagctccagtaacatatgtgccaaatttgacgccaatccgatattccaagctttaatttcaccaaattccctgtttcgagcgatcgtttccgagccgagtgctcaaatttcattttctacgcctaaattcaaaccaagcacacacttcactcatattcgcccatataaacctattcgtgaagtatcggctccattccatgtcattttgtgcctcaattcgaattccaaacctcctatggcactatttctcgttcaaacgctgttttcgcgtcgtttgacatctcga

SEQ ID NO: 141348 - DNA, 336 bp, Zea Mays
cacagcaaactgctcgatcgacaacgttcgcctttagtacatgttcttttcttccgccggtcatccaacagcctctactctactggccaatgattgtgttgagatcattgctagtcgaagaaagaaagaaaggaaaaaattggagctgttcattgcagtgctgtctgtcagtcagtcgtagtactctaccgctagtagtgagatctggactctgcggagaagtaacaatccgcacgcagtacagaaattcagttaccaaagcacgccactccatgttcatcgacagcacgccacttgacgaccgcctttgcccttaaactttcaaatgacttagcc

SEQ ID NO: 141349 - DNA, 301 bp, Zea Mays
ggcagctggagggaagggacgctcggctccatggctgggaggtgtctgagcgccatgttttgaggagggagagggaaggacgccatgggagagagctcgtcgaccatggagcaaggagcagagatggcgtggaaaaaagaaaagcctgacggctggggaagagaagtggcggctaggggtaggagatgtaaattttcccatttgcaagggagagggacttctatttatagaaagtgagggctagggttttagtggggtcgcttagggtagaagcaaaccaaaaattgctactggattttgg

SEQ ID NO: 141350 - DNA, 735 bp, Zea Mays
attttggtagcctcgtggtcggatcgtgatttgcgctggcagtttcgtttctgattttgttcaatgtatgattttgaggagctgtggatttgggtttcgagcgattggaatttggaaacgagttgtgcttggggaaattcgacttcgggaagtggtctggaacagcatagaatcgtggtgatttgggcgtggtctggaggagagggacaatggacatgaacaagtattgtgctgcggcagaggagctgcagcgtaccacctcctgggggtgatgtcacgaggagcataggcaggtagaggtaggcgttgttggttgagttgagctcggatgattgattactacatgcaaagataggatagacgatgttccgccacctcggcgcggcaggggaaccggggaagcagatgttgacgaagaatttttgtaatttttctatgccatccccctcctcccctattgtgtgttcttcgcaaggttcaaggaagcgctaagcgctgagcgcgcgctagggtggtgaaaaagcttaagcgcgattaattgtgcttaagcgtttttgttaaaaagagaaaaaagacctgatattgggccaccctgcagcagcccttaaccccctcctcctctcttcatgagtctgcagcccactaagcccacctgccaggaggctcaactcaaaaaccctctcccgtgactgctgcctccttccacgccccgcgctgccgcctgtgctctctggc

SEQ ID NO: 141351 - DNA, 301 bp, Zea Mays
ttagagattagatggagcactggctgactgttggattggtgacggtttatcgccgttgatctggccatcggcggcccagatttgatcaagtggacaccggtttggaggattggatctgaccgttggtgctgggatcgatggtccggatcggagtaggtgtgcaccgtcagatggcgatctaatggctagggttcgatatcggttcatgaaaggtcataagttaatccgatccgttgaactctaatcggatggctcacgtggctagataccccttcgccgatcccgttttgtaaaagagccc

SEQ ID NO: 141352 - DNA, 472 bp, Zea Mays
tgggaaaaataaaaactagcttcgccaatgttggcgcatattcaagtgaagacaacttcgtacggggcgatcccgaggggccaattgagtggattagcggcgaggccgaagcctttgaggagattttaaatggccgtggggacgtctacgccttctcaggtgcaaggggaattgctgctattttggaaaaattaggttgcggtcatgtgaaagctttgacccaagccgaagctactttatctattgatgatacgaaagacccctcgaccgaagcaagcttagttggtgggaaattctttactgacatatgggaaaatggcggccgagggatggctcacgagataataaggaagagtgaaaaagatactaacgatgctagggaagcgacgaaggcagctgaaaaagctgcagaactcgaaagacggataggtattgcttaatagcttttaactttaattttttatttttgtga

SEQ ID NO: 141353 - DNA, 584 bp, Zea Mays
aagagaccgtctctacaagattttccatacgtattgtattttaacttcatttatgattcagaagcttatgattgtatcatgcagtttctttgatagggcatgtacaacccacaaaaattgataaatatagagtatccagagctgtatctacaagattttccgacgacgctaaagctttggcttccgtaccttcggcttcattcatctttagcttggttcatatgtttcgaggcttttcaaaaaggggccttccttgattggcattattaacctgaaaatcatttgaacgttcatttcatcaatttaggctttctgtcagaaagcctctcccccaagactaagcgaagccatagattcagacttcctacgagaagtcctgttgcgcttttgacaacacagtatgtggcatgccaattgtcaatgtcctccaagctgctcagtacgtggcattcaaacatatctattctgaattttctcctcatgggcctgcatggtacttccatcaacgtgcttgtgtcaccagtttctcatattttgtgaagcatcttgatttgattcctactgggtttggactcaagagaatc

SEQ ID NO: 141354 - DNA, 437 bp, Zea Mays
tgctctatggggttggtggcctggatggtgttacaaggggtgcaagtgagagtgaaagagcgaggaaggagaagacttctactcgatgctcctgctctatctaccgcagttctagttctgccaccccttttatagttcacgaggaaaggcttacatcaagacgaaaagggttggctacaatgaatgagagtggggactatcatctacaggagccatcccgatgacaatgtcttctgatgcatgtgtaaccgcggtatggtgtgttgttccgccatgttgtatccagggattttgactctaccgtgggttctggatggtcccatgttgcaacattggggatgttcaaggacgtacgtagggggtgcctcgttctgtctacactgacccctagacgttcactcggtatgccgtagcgccagtcgggatggtattaggtg

SEQ ID NO: 141355 - DNA, 839 bp, Zea Mays
gtcacagcgtccgaaatccagcaaaaccttgaggaggaaacttttatggttgtacacatgacaacaatctttgcatctctacaagatccgtacgggctccggccgggtccacaccactcctccagttttaacatgtaatgcgtgatgtgtgaacatacacatcgcgtcgcttctgaaattaaacctcttgttcatcttttccacacacacccaactcgagcaaacacatttatcaaagctgaaaccaacaacaacgcatgtacatagtacatcacaaacgaccgacgatatctacacatgcatgcagcatgcatcacagcagtcagcagcaaacaataaatcaactctcctactccctactcatgcgttagagtcaacagcatgcaggtaaaaccggagtttcctgctacgagacgctgctgatcacagtggaggtggcggcggctctcgacgtcgacggctccaaggcgacgcactgcaccagcccacacagcatactcacctcctgcctcctggtcgctcgccaccgccggcggcggcttcttgccgttgtcaccggcgtagccctcatcagacgcagcgaaagattcaacggcgcagcactcctcgaagcggtagcaggtaacgaggtggtcgttggccataccgacggcctgcatgaaggcgtagaccaccgtcggcccaacgccgaggaacccccgccgcatcaggtcctgactgatggcgtcggccttggccgtccgcagcggcacctcccgcgtgtgccggtatctgccgaccgttggcttgtttccgctcatgaagctccagcagtatctgtcgaacgatccaaactcgtc

SEQ ID NO: 141356 - DNA, 554 bp, Zea Mays
gccagaagcaacgcaccagtccaacccaacggctgtttcaagtgcggtgagctaggccactatgccaacaactgcccaaggcgcaaccagcagacaccccagaaaagcaataactagagaaatgaccagaacacccccgctcgtggatctgctcagaacaagactccgcagaaccagagcagaggaagggtcaatcacgtcaccgcagaatcagtacctaaggatgccgacatagtgtatggtatgtttcttgttaactccatacctacatcagttttatttgactctggagcatcgcattcgtttataactgagtcatttgtggaaaaacacaacatacctaagtaccctcttaataagatattacatattagttcaccgggaggtgacatgaaggccacacactcatgcccccatgttaatatcaagattcaaggaatagatttttcagtcaacccagtggtcctaggatccaacggtattgatgtgattcttggatgcaactggttgaaaagttgtgatggagtgatacagtgtgccaatggaacaattat

SEQ ID NO: 141357 - DNA, 492 bp, Zea Mays
ctcggctgaaggggtatgagtcaatcagggtcgtccgatcaaaagccaagggcccagattagattgcgaatcctgtgaaccggtgcgcgctactggccaccacatcatggatctacggtcagtatttaatgggacgtgatccaatatgggccatccgatctgcccaacggttcggatccaatcaccgaaagggtactcctacatctattcccagcccttcatctctggatcaacagtcgtcgacacgtcgtcccgattcccattcgcatgaggcggcgccgcccaggtgcagcggtggtccactgccggaatcacaccaagcgatgccagggagcgacaatccccggtccaagacccgatacacggtatggagatcaattcgaataagttacgcggatacctaccgatgattatgcgcccagggatccggacctcgaggtttagtggcactgcggctacagagcagcaccggtgagaaattcccattcgccc

SEQ ID NO: 141358 - DNA, 519 bp, Zea Mays
aagtatatgaaatgtgaataaatacatacacaagagaaatatggcacatgaaacacaagatgaggcgatcgagaagtcaaacgacgtgaaaacgacgtttgaaggataaatagtgccatagaaggtttggaattcgaattgaggcacgaaacgatatggaattgagccgaaacttcacgaataggtttatataggtgaatatgagtgaagtgtgtgcttggtttgaatttaggcgaagaaaaagggattagggcactcggctcggaaacgatcgctcgaaacggggaatttagtgaaattgaagcctggaaactcggatttgcgtgaaatttggcaagagtgttactggaagtgttgtgaaggtgcctgaaaaatttgggttcaattggagcatttttggctggtttgggcattttaccgaacacgtggtgtgcgaggaactagggtttcggtgaaacggctatttgaggtgggaaaaccctcccgaaggagctaaaagcctacagggatacacaaaag

SEQ ID NO: 141359 - DNA, 335 bp, Zea Mays
cgagttaaaacgggccgtgtcggacactttgaggataatagccgagtgacgatgtggcacaccggggttttagaagtagccgccgggtgacgacgtggcacgccggtgtttttagaagtaactgatgggtgctgactgggcgcttttggagacggtatctgactcgggaatatcctgcatatactgcgctttcagtcgcctctgctttccgtgccctagttcttgctttcctgcctccagatcctctctgcaattcggctctcgctctgttcgccagtagagttgagatggcgcccaagagaaagggctcgagttcatccgctgcggtgattccc

SEQ ID NO: 141360 - DNA, 510 bp, Zea Mays
ggcggctgggggtctcctagtctcaattgaaggctcggcaagcatcacagagtcatcagggtacttaaacgagggagagtgagggctgaacggacctagaaagggttggccgcggtgagcagttccttgcggtggcggaaatttgatttggggagaactccaaattcgcggattccagtgaatgaccgtggctaattcgtggtggctgggcagcttactagcctacagagttcggggaggggtcaatttataggagggtaaggcggtggccgtgaattttggacgagacatacggcggtcggaagtgaggaagaacggcggtgcgatgaacacgtgtttatcgccgtggcagtaactccggtggtctacggggagttcagaggaggtcacggcaatgcgatggcacggttgggacacgcggtggccaacggcgagggcacggcggcggtgagcactttacccgcgggcggtgagccaggggagatgaactacggctagccggagtggctt

SEQ ID NO: 141361 - DNA, 340 bp, Zea Mays
gtttcaggatgatttcaaataatctaggagcaatcttaataatcctttgtccaaggagccacttatctgtcgaaaacaaggtaagagacccataccctacctctgaaactagaactgtagaaaagaatgttgaagccttgcttggaacttggatggggaggtttgcccaaggatgccctaaatcagtcttgtgcagccgaagccatctcatgcgaagtgctcaatagagctccggtaggctagaaatacctagccctcctaactgaagaggctgacacaccctgccccatactacaatgcaatgccttccccagacttctttacaaccataccaaagaaa

SEQ ID NO: 141362 - DNA, 591 bp, Zea Mays
ggggggtgtctcgattaaaagagcatctaggtcacatacctgggagtgtggaggcatgtcgtaaagtgccaaatcatgtgaaggacctaatgtctcaaaaagtaacaaatgggagaattatgagggcacgtggtacgaagcttcgtctgtttatttaaaaggaggttactacaacaagtcatgattatcgaagtgcaagaattcctcttaatgaagaagcacagattgatacgacaatgagaaattcattgagggattctttttccacattggaacatgatagttgttcaccttttgataagtcaactggtagtgcaagtggagctacaagttgttctacagggaagcaaagtaggctctcaaggtactacaagaatacacaagatacctctagaggtccttttgacattgacttggcacgcagtaggacacaagtgcagccacgcatagatgttatgctagagaggggtcacaaagagaagcttgggatagcattggcaaaatggttccatgcttggtgatggagtaccaattccacatgggagagaaatagatggtccattattggatatgaattatgcaaacatggag

SEQ ID NO: 141363 - DNA, 575 bp, Zea Mays
gcctgttaaggcgtggagtgaaatgatgggtgctggatcctctggattggattcatccttgattcatgtatattcctcaaaatctgtgacctccagatagaacagacgtgggcaccgatgaccacgaacgtattgttcgtcatagttgtaacacatgccttgtttgcggtgctcgcccatctcaccgggagtgagcttcttaaatggacgttgtgtgccccgtgctggttggtgcttctactgttacagtggactgttgtgctggaataggaaatgaaggtcgctggggaggcctcgacggcttgctgatagttgatgtctggtggatgtcgagtgcctgagctcttcgttcatatgctccgccaaacttaatgcatgattgagatctcgaggagccataagtttgacatcgatcttgatacactctagaagacatgccgtgaagagttgtaccttctttttcggagtgagtggcatgctgtgggccagtaaatcccggaacctctcctaataatcctccactgttgtctggaaaggaagtcttgccaattcctcgagtgggttgttgcgaagcg

SEQ ID NO: 141364 - DNA, 337 bp, Zea Mays
aggacaacatcgagtgaggataatgatagtgatgatacttatatttatggcattgagcatgatcctggattgatgactccaatctcaagctattctattaataaccaagatgcagttacaagggcctatattgcattggggccatgtcgaccaaagatgaagaaggatgattttccccaacatgaatgtggaggtatgtgtcgcttcctaccaaagtggttttccgagttttgtaggcttgagtatagtgtggataaagatgttgcatattgtttcgtttgctatctgttcaaagataacaacaaattccctggtggagatgctttcgttaatgagg

SEQ ID NO: 141365 - DNA, 335 bp, Zea Mays
agaggaagtaccaaggacagaccagcagaaaatacctgacaaaacaactcccaaggctctctcgctctgggaatcagagtggaaacaactaccaagtatagcgctttggacaacaaagttagaggaacaatcaataccagaaccagtagaggaacaacactcaaaccggtcaaaggtctggtggtaattcgcataatcgtcaaggaagcgccgtgaacacaccagccaagaacaacacaactaccccagttcaacccaatgactgtttcaagtgtggcgaacttggccattatgccaacaactgccccagacgtaaccaacagacaccccagaag

SEQ ID NO: 141366 - DNA, 713 bp, Zea Mays
gaaacttcggtgagcgattccggccgcggggaggggacttaaggcgctaaggccttagctaagttgagcagagacaggggcgacacagggaactactccggtgaactacaccaggcaaaatcgattggccaccgcacgagtgtggtggaccaccgcggtcgagcaccgacgaaggcaaaattggacgaacaaagggcgcaataagggaaattgggcacgagaatgggtgtctcacctccgggcgaagctcggggaggcttggagcggtctctggcgagctggatggccgggaacacgggcgcgggtctccggcggcggctggcggcgagggcagagcgcgagagagggcgagggtgtgcgaaatgaggtgaaaggtgtgcgcggggcactggtggggctctaaaaagagggttgggcgcgtgggcgggcgtcgtggccgagaaacccggcgacgtgcgcgagtgcgcatgcgccggtccacggcgacgcgcgaggaaggcggagttgacagggttggcccacggcgcagagagagaaaagaggaacgctcggggcaacggctcgacgactgacaaaccgggcccgcgaaacagagagagagagggagagcgagcgggcgaaggaaaactggcgctgacagatcggccccactgggcagcgagcgagagagggagggcgcgcgcgagggagaattgccgctgacaggcggggtc

SEQ ID NO: 141367 - DNA, 549 bp, Zea Mays
aggacttattgattactactttacctcatccttgattctgcttcaaaatattagtcacctcgactaattctatgatgtgctcctatacgcccctttgccaaaagtattttattctaatatggtctatacttctctcaatctattagatctgatctcactcttgtgctttcgacatctttgtagatgccccctgaccataacctcctagtctcttgggattcttttctcttccattattaaattgctaccatttgaccctctctattcccttggtattgacatgctcgtacccctacattcttcaatactcttgttttaaatacttacatctgaatttctcctgcctacttaaacactccagtttatatgtccatgaccttttgtcttctgatatccctttctattccactgttaagtcgtcatcctttgcctctttctattcccttgtcttggtatgcctggcataccctaatgactattcaagacatttcagttaatatgtccttgaccacccttgtttcttgatgatccatgagcggtcattttatt

SEQ ID NO: 141368 - DNA, 376 bp, Zea Mays
catggccacacccacgctgccgctggcctgctcagcacactagctcacacacactccccggcctcgcccaggccgccgtcctctccatcctcggaagctccagccgccgctaccattaccagtgagttgaggtgctctggtgctgggctgactgtacccgccgctaccattaccacgcgctgcaccgtagcagagcggttccaaccccgtcgaggcaaaaagccctggccgttccctggccccgtgccgccgccgccgcctccgtgcgcccaggcttctttctggtaagaaggcgtcctccattgttcctcgcacgcacattcttcgcttttaatcccgacggtttcccctcccctctgttccggacgggggtctc

SEQ ID NO: 141369 - DNA, 415 bp, Zea Mays
cgaaggtggaatcccaaaatcatcatcatcatcatcatcatcatcaattgctgcatcctgagcttcgaactgatgaagagcagcatcctcggcctgagtgtcaaaaactggagcagaagctggcacaagagccttaggcgcaggacggtaggacccaaagacaaggcgtgaggcctcaagtgtgccctggaactgtggaggcggaatcagctaagcaaaaatgtggcacaagtagtgagcatatggcagctgacgacgagcacgcataccatccaatacagtgtcctcgatctcacaaataaggaaatccacgacatcaaactcggagtgagagaccagggcaccaaggagccagagctatatatgtgtggtagcctccctgtatcccatccgcgacagaagtgttcgtctcata

SEQ ID NO: 141370 - DNA, 431 bp, Zea Mays
agctctgtaaggtgatctctgtgtggggaatgggaggacttgggaaaactactcttgtccgaagcatctacagaagccaacagcttgatgactggaactggaagcgcgcttgggtcactgctacgcgtcctttcgacaatgaagtgctcatcagaaccctagcttcgcaactactccacgattctaatacagcaaatatgaagttggatgtcttaagaaaaaagatagaccagcttctactgaacgagaactatctcattgttcttgatgacctatcatctattgaagaatggaacttggttcgagaccaatgggcaaaggctaaacgcatcatagtcaccacaagagaatatagtgttgccaaatattgttcgggaggagacatgaacacgcacaaacttcaagtcctacaagaagaggatgcacttgcc

SEQ ID NO: 141371 - DNA, 658 bp, Zea Mays
gtagactggtggctagcttttgtgctgattagaccaggccagctggtggaccaaaggaatattggcgtgaagaaaacggctagcacaggcggatcagattgcgatgcggacagcgatatccttcctgcagtttatatgacggaaaagtatacacatgcgcttccgctgcacctttttatcacgtcagactcgatcgcgggttccattccagtcacagtcagtctctctccacaccacaccataccacttgcatgcatgcatgatgtactttactatatattcgccttgaattatagtagtaataatcttgactatccacggaaggcactttaatttgggggccttttattttacgaatatgtctgcatggctgccattattatttgcaccaaatagtacatgcaatccggtcacgttgcacatatgatataccccacagctagctagcgagatacggcggatcccggccggcccttttgctggaccgacacatgaacgtaacgcgttgttattaaacacatatacgcgctgcggcaaagcctctcctcccacaccttttgagccccacgcgaacacctaccactccaccacctgctgctgcacacaattattgggacgtgtgtagtacgacgcagacgcagcggcacggcaagggcag

SEQ ID NO: 141372 - DNA, 831 bp, Zea Mays
actgattaacaaaaaaatctcatccatccccgggttgtgaacagcagtggcataccttgcttcttcaaactcttgagcgtactcttcaactccattcttctgatacaggttcagaagatgtctcatggccttgggatattcttccactccaaatttggcccaaacagctctgccaaactgcatccagtttcccagtccctgcctcatcttgtacacttgaagccacctcgctgcattcccctccatgtgcatggatgctgatattgcccacaaatcttcaggaacctgataaatggtgaagtattcttggcacttggctaaccatattccaggttccttcccttgaaatctgggaaacaaatatttaggcagagatggatgtcctcgccctcccatcacctgatcttcttcttctcttactctctcctgttgtggttctcttcttcttcggtttggattaccttgatcagcaccctcccttgatgatccatcaccatcgccctccaagtcctttgccatcatctccaaacgcaactgcgccaccaccttgcccgtctcctccatctgccttgccaatatagtacgctcatcttctgccttccttgccaccgtagctgagagctcggcttgtccttccagccgatgctgtccagcttccaccgtatccaacttcttcaccactcgatccatcatcttcatcatctgttccgacttctcctctcccttctgctccacagtcgccatagcctccagcacgagacgcgtctggacagacggtttcaccatcggcgccgtcttgtcagctccggagtcgaccgtcctctgatacca

SEQ ID NO: 141373 - DNA, 465 bp, Zea Mays
tttgtttttttctgctccaaaaaggaaataacgccagtgattgtattgaacagccattagatcatgccttctcacatttcagttacttccctatcaatactgattgtgccatgccattcataactcaacagcttatctgtcattgttttgaatacgggacaggaatttttttacttgtgagagccgcaagctctgcaggatcccagcatttccacgttagcaaaaagaacttttaccattaaatactagatttacggtgcctcgcattggctgagggttccacactatcatgcctactgcatactgcctatgcagtgtggttcatgtggcaacaaattgctttgtgggtttacggacaaatccgcttgcctatgtagtgtgattcaggtggcaaaaaattgctttgtgggttcgtcgtcaaacttgcttgcctatgtcatatatagataaaaaatgagtattttc

SEQ ID NO: 141374 - DNA, 416 bp, Zea Mays
gaataagtttggataaaaataaaacaaatttaattaaatttgttgggcaccgtacaggacgacagcacccttcaaaaataagtgtatgctgctttatgtgacaagcgcacggtattctttagtaaaaggcgaaagaatagttcgctctgcgctcgtcacgcagctgtatgagctgaaacggtgtagctgccggccactaagaacgccagagcctttgctcacctatgcagagcaagcaatatggcactaatggaaaatggttagcctcttctgaatactcttgtttagacctggctaaaactgtagataatgctaacagtccggcttccttgattgggccgtgaagccaacctgtacaggcccactttcgtcgtgcttttgatccccctacgacttgcgaattgcgataaaagcga

SEQ ID NO: 141375 - DNA, 332 bp, Zea Mays
tgtgctagtccggctgcacccttaggcgacttctgcgcggatagtcttcgcggaagacttcgatttttcgcacttgttgtgctagtccggctgcacccttaggcgacttctgcgcggatagtcgtcgcggaagacttcgatttttcgcacttgttgtgctagtccggctgcacccttaggcgacttctgcgcggagttgtcgcacgcgagggtggctgacgctgggcctcgcggtgactatgtattggtcgaatgtcgaagaccgtcggcgcggtcttttttcgacgtagattttgcgggggatttttcacttgtatattacatgactccgc

SEQ ID NO: 141376 - DNA, 348 bp, Zea Mays
aaccattcattggtccagccagtaggccacttagtacgatatccaatcactggagtcttcatgtcctttcgataggcgaagttgtagcatccgaagttcttgtgaaaactataacctcatcatccttcatctccggaattatttcgtcccaagcaaatctcactagtccatcgtcattcttcccaaaatacccaagcttcttcattagaactaggtcttctgcttttacagtagattttccaaattcaacatgactgtgcttgcttggactcaagataccatcgtcttccccatcatcactaccagcttcggcagcaacatttttagcttcgacactaacactatccc

SEQ ID NO: 141377 - DNA, 596 bp, Zea Mays
ccgtagtaggaatgtcggtggaacggacgtttatgccggatcgaaactctaggaagacgctcgaaggcatgcctttggtgaagatgtcggcgaactgcgaggtggttggcacgtggaggatgcgcacagcactggcggctacgcgttcacgaacaaagtgaaggtcaatctcgacatgtttggtgtgttgatgttgcaccaggtttgtcgagaggtagacaacactcatattgtcgcagtaaacagccatggcacgctggagaggctggtgaagctcgagtagaagctgacgacgccaagtcgccttagtgacgccgttggcgacgacgtggtactcagcctctgcactagattgagagaccgtcagctgtcgcttgctagaacaggagatgagacagtcaccgaggaacacgacgtaccctgacgtggagcgatgagtgttcggactctcggcccagtcggcatcggtgtagacagtcagcgtgtgcgacgttgaagcacgagctacgaacaactcgaggtcgacggtgtcgtgcagatagcgaaggatgcgcttgtcggcggtgagatgcggctcccgaggatcatgcatgtag

SEQ ID NO: 141378 - DNA, 976 bp, Zea Mays
gcggtgtgtcagcttaatggcaatagccatgacacctctccgccccatgtggaggcggctctctgggaccagttaggcattcacaagtagaggctgcaggtattgaagcatcacccggagcagtacttggtaattttctcagattttagggatcgacagagggtggttcgtcaaggggccattccgcacaggggccgcactttcaactttgaagcatggactgagcgaaggtatggatcgctggctcgttgggaatttcgggtgcaccttcgcattgagggtgtgcctattcatgcttggaaggaatcggtcgtgtcccaagttattggaaaattttgctcaatctattatgtagacgggcacacccgtcgtcgggagcgcactaggacttctgatttgtgggcttggagtatcaacccaagtggtattgctaaggaagtgtggctaaccattactgacccagatgaatttccttcgtctgatttccaagtgcaccactcagcgcctgcgaggcttaagtttggtctttcatataagttgctaattcacgttgatgtggtggaggacctatctttcattgaagggcgtaacattcaggatcgcagaaggcggcgcgagttcgagtggaattatggggttcctgactctttgggagagaaaagggtgaaggttgtttatcaggatgcagggaggaagggaagataccaccgaagggatgatgaggatagggaggatccgggccgtggaggtcgccatcttcggagcaggtcttggtgggatgggagaggctctcattgtcggggggctgttgatgactgctattccaacaacaacaagcatcattttaggggcagttcctcctatcgcagccgtggtctttcccaaaattcttggggggcatggctcttggctttccaaccaggtggctgttgtggaactgcagcacaagggtacctacccgttaaagcctccaagc

SEQ ID NO: 141379 - DNA, 880 bp, Zea Mays
caagattaattactaccatagctgaaattgaatgttgcaaaagatgagaaaatgcatacttgtttttcaacttcaaaattcatttcataaaattgctgaactcgaggaagtgatttagcaaattcctaagttatatatggtgatttctcaaaaatggctgtgcagtttaactgaaaatcgaatgagactgtgcagtttagtactatgacttaactgaaaatcgaatgaaacataacagaccagttgtatggagaggatcggtaaacatgtaacctatgtctcagaaataaacttatttcagaaataaacttatttcagaaataaacatgtaacctaacccccagtgatcaacaacgcaaaacactaatgagccaaccaatccacaatcaccgaggccaggcaacccaacccatcgcattcgaagctgccaccccacatcgagtacacacgtatcaacaaataggaacaggctaaaacctcgcgcacgctcccacaacgaaacccgaacaggttccagaaagaacagcatactcaacacaggaaagaattgcgcaggatgaaaagatagtgaattacatggctgatggtgggcgtcggatgtactcgcgtgcgtccgcttggtaaactcgtgtgtggcctccctttggccttttaattgtgctcggatcagatccgtggatttttggaatcacttaaagatgcttcaaaaatccaagagcagatatgcttaagagtagtgtgtcagtttgtcagctaagcatacactatacagcaggccaacccttctatcattcaaaggacaaaattcttttcacatgatttgcagctaaaatttagtgtttcaatacctacaccagaaattgattgccatattgcacac

SEQ ID NO: 141380 - DNA, 443 bp, Zea Mays
cgaagctgctgaaactgctccaatctctgaagtgatgaaacggtcagggctggtagtatcggaggatgcacctgccgctgaagctgagcaggttgatgctgaggaagttgaatctaaagatgattacagtgtcgtgccatctaaacccagccacctggagtttgggaggtccactattaccgaaggtgatatgcctaagctgatgaagttaggctatttcagtgaagccaaaaaaggagctggttcgttttggcggagaggaaattactccaaagctggaaaaggatgaggtggtagtcttcaaaagcttctttaaagcaggattaagatttcctttgaatgggatgattgctgatgttttgaagaagtttgggatttatcttcatcagctaactcctaacgccatcgttagttttagcatctacatctaggccctccgaagc

SEQ ID NO: 141381 - DNA, 424 bp, Zea Mays
cgggaagaagatgcagggtgagctgcgcgcagtggttaaactgactctgccatggattagctagctggcgaggcatggtttacttagccatcggttagtactactagacaaatgaggagcggagggccggcatctgatctgaattcctgagacagtagtttaggtttaggccggggggacagctcggttatgcgaggacaccagttggtgcagtgcagcaccacacgctttcgctgatttctctccctccccttctgcacacacgaacacgagacacaggcagaggcaggggaaggatccatttggcggcgttgcgataaactgtccgtttcgtggaacggatcgcagtctcgacctgtgctgtgttttgtgttggcctccatcatgtgctggggaatccggacgagatgctgccatgtcctcc

SEQ ID NO: 141382 - DNA, 376 bp, Zea Mays
cttggagaagacctggtcgactacgaggcttctccagagcgcccaggtatggacgtaaatattattacattttccgccgattgtactattgtcggcgacgatgaacctgttatggcccagtttgattttggtcctaaagaagccgcctttactaaaccaaaggaatcggtaaatcatttaaagccgctcttcgtgcgcggtcacattgatgggataacgattgctaaaatgttggtagatggaggggcgactgtaaatctaatgccttattcgttatacagaaaattaggtaaacaagatgacgaacttgtcaagaccaacatgaccctcagcggtgttggaactgatagttcgatcaaagctaggggagtcacgt

SEQ ID NO: 141383 - DNA, 627 bp, Zea Mays
cgaaggggtacgctagggtcggagccgttggatcagagcccaacgatccagattagatcgggaaaccctaatattcatcaagcatacagaaccgtgggatctacgatagatggctctgatttgatgaacggcgcgatcacatggaaccgtccatcactggatctacggctgttgcttaatggggcgatggggtatatactaatctgatctcagccggttgctacccatccaacgaccacgacattgtcttcctcccaagaccacgtccgcggcaggcggcagcgcgtggtccgcgtggtggcgccatggccaaacacccaggcacatgcccacgcagctagcacttcgattcgacaagagctacacaccgcgggttttgggtcgagtccacggggcatggttctactagagattaggttccaaaccaggcggtcgtacctaatctgcggcggcaccgtgctcccatggcgacgagtacgccgacgcaacagccatttcccaccccactaccccaatatacgatctggaagctaatacacgttgctaggagcattacgaaacaaggagaactctcacctgggcaagcagagtgacagcagcgcccgaccacggtgtacgacgacatgg

SEQ ID NO: 141384 - DNA, 630 bp, Zea Mays
ggatgggcgccacgcgatcgaagcgaggactcagaccacaaaggaggttgagcacaagactctcatcggtcatgggggccccgagggtgcggagagtgtccaccatcgtcttcatttgacagcggtactcgtccacagagagatcgccctgaacaagctgacggaaggcggtctctaggtatagaatccgagtttggcggttgccgaggaactgagcctcaagggcaccccagatccggtgagcagtatcgtccggcactcgaatgatgtcctaaagctcggccgtgagggtgccatggatccaagatagcaccactttatccatcaggaggcaatcctctgtcggtgcagcgaccgcgagtaggacgtggtcggcgagggcgtagcggtggagggtctacaggacctggtcgtgccactgagggtactgagtggagtccagcgcgagaatgtcggtgacggttgcctggatgctggtgagggtcgtcgcctaggcgtgaagagaggcgctgagggtcgaggctggggctggcgcaggctcgaaagtgtcggcgctgtgacgagtggacgtggggaaccatctgacacgcccttgccagcgagacaatggtaggtctcagtgtactggcg

SEQ ID NO: 141385 - DNA, 599 bp, Zea Mays
cctagttctagtccctttgcctctccagttcttttagtgaaaaagaaggatgggacatggcggttttgtgttgattacagacgactgaatgatctcactattaagaacaggtttcctatgccaatggtggaagagattttggaggagttggtgggtacaaaattttcacaagcttggacttgacagctggataccaccaaatcaggatggcagagtctgaggaatataaaactgcttttaaaactcatcaagggcattatcaattccgtgttatgccttctggacttacaaatgccccggctacattccaatgtgcaatgaactcgattttggccccttttctcaggaaatttgccatggtttttatagatgatattctcatttatagtgattcttggactgctcatcttgagcatattcggttggtgttcacaaaactaaaggagtatcagttcttccttaaaaggactaaatgtgattttggcaaaactgagctctcttatttgggccatattatttcacagaagggtgttgctgcagatccttctaaaactgaggtgatgagcaggtggcctactcctacatctgtcactgaggtg

SEQ ID NO: 141386 - DNA, 451 bp, Zea Mays
gcaaataagacgttggtgagtggggcctaggagtaagcaccgtcatctcctcatccatgaatagcggaaggtagagtccgcccaggaatttctctcaagtagggcgccgctaggcaatttggctctatgcttgatggatgattggtggagccatggcacctgggtcatctccagccgtgtctccttcgccaaaccggatgctaactaacactggcaccaaagcaaaccgtagaccgaatctaccgccgaaatcaccgtgagctcgaatcaactaatgtcgttgcaaatcgctagatttcagcgtggttgttgtgatctgggttgggcagcctcgattgggactccgtttctagtgtatataagtacccatacaaccaaagcgccaatgcaccgagcaccaaattcacgccgagcttcatcgaagagagagaaagacgctccgcttgggtgg

SEQ ID NO: 141387 - DNA, 468 bp, Zea Mays
cggcggtgcccagccctcctctctccccatgcacagcagcttggccattgctggcgtgctgctgccagcagccaagcgcctaatcccctctcttccctgacccccagcagcccttggtagaagcatcgtgctgccccaatttgcctgctagtcttcgaattgaatgtactgatgcagaacaagcttcatggtgccagatagagatcctcgatgcccaacttgattagtcttctgagatcttccccacgtagatcaagctgctgattccatcttgccttgaatcaaccttgtttcctttggaatcaatctcttgtcaagcagaatcggcttgataagattcaaatcgagcctgctgctgttgtatcaagggtctctgtcctaatcttgctcgtcggtgccggtgtcaggttctcccctagatgagcccgcccagcgccccggcgtgcagacctcaacggcgccctcgcc

SEQ ID NO: 141388 - DNA, 458 bp, Zea Mays
gacaacacagttgcaccagggtaaaacactcggttttaccatagtatagtggctccttctcgaggaagccaccgacggtcgacccccaccttagactataaaagaaggacattgatcacaataaataggagaccgaagaacgagagaactaaggaccctcgacggaaggcaaagacacacactcgacaagacctgaagacctggaggccgcaaccaaggcttagtgtaggactccaactccaatcctatagtctttaggtccacccacgcataagagatttgagagctcttatttcctctcttgtccgcttgtaacccgcttatgatccctactacgagcatcgagtaacaaaggtgccagtagcgcgagccattgaagactggatgtagtgacgttctggccgaaccagtataaaccttgtgcccgccgagcacaccgtctggagcccaggacacgc

SEQ ID NO: 141389 - DNA, 409 bp, Zea Mays
ggaagattcgaaaatgattaatttggagagaaaaggtacaaaatagcattctagcgtgtgacaccagttcgataatggcaattgggcgaatcccaattgtgcgggatggtaaacaagcagaacctaagtttggtaatggcaaaatcccaattttctctctgtttgaactttgaactgtgtgctttctcatgtaaagaaaactgtgaattctgttgtcaaggagcctatttgtgcataggaataaactagagcaacacaatgaatcaatattgtgaacagatgtctcagttttgtgcaaaatgaatgagatgatcaattttgaaatgaaaatgacgcaagtgtaaactatgtgcaacatttttaacaatgaaaaattaccgttagtccagaaacagtataataaacattg

SEQ ID NO: 141390 - DNA, 444 bp, Zea Mays
gccgttggtacaatacctgttgaagctatgggaaattggtgttgaagtttgggatgcttgtaagaaagaatattttaacttgagggccttgctgttttgtaccatccatgactataaaggccttggaaacattgcaggattatccactcaaggatacaaagcgtgttatatttgtcaagagaatacaaatagtcgttatctaaaaaatagtagaaaaattgtatacctgggacatcgtaggtggacacgcagaaatcatccataccgaaagaatgttgatgcatttgatgggagtattgaaaatgaaaaggctccataacacatgtctggacatgtggtttatgagagtgtgaaggacattgaaaataagttcgggaaacacaatttagcattgtctggaatttggaagaaaaaatccatattttggaggttaccttattggcg

SEQ ID NO: 141391 - DNA, 543 bp, Zea Mays
ttgtccgggttcagcttcgtgcgggttgcccgcagcttgtcgaagaccagggttaagtcttccactagggtcgaccctctcttagtcttgaccatgatgtcatcgatgtagacttccactttgtccctaatcaggtccccgaaagtcttactcatcgcccgcacaaatgttggcagggcgttttcagaccgtaaggcattacaacatagcagtaaagcccgtccactgttacaaaagcgatatgcttcctatctcccctagacatggagatttgatggaaaccagagtaagcatctaagaatgacaataggtcgcacccggaggtagaatccatgatttgatctatacgtcgaagtgggtacgggtccttgggacaagccttattcagactggtgtagtcgatgcacatccaaagcttcccatttgccttggggacgatgactgggttggccagccacaccgggtgataaacctcttcgatgaagccagcatctagtagcttccggacctcctttcggatgaagtcctgccgctccacggact

SEQ ID NO: 141392 - DNA, 822 bp, Zea Mays
gcccattccacctcagccacgcactgacaactagacccatacctcagcctagttgatcacgcacgggggggggtgttactcggtgtctctgtcaaagtggggccactggccagcggctcgcatcaccgcacacgcgcgcttctgtgatggtcagtcactgactctgtgggcccgttaacctggtggccagaccgtgcactagttgacacccgtgggtcactgacatgttgacccacctgctagactctccctcacggatgttgggtctcctagctggcgtaccccgcaacaacctcgccgggtttgtcgccgtcgcttctgctgggggcaatccaacctcctaggtataataccgagctggggtgcctggtttcgctcgcccatccgagcacttagtcgagcgaggtactaaccgaagcactcttcaccatagtagctagaacctaggggatgaaggtagttcggtcgccgttgtcaaccttggggattactatccccgaaccctccattcgtggggaggggtgattgtttctgtccgccgtgtgttccccgcacccattggagtgttgtggatgaccgtagtgcagcgaattgctcaccggagtcattgattccgcaaattactgtcgtgtgccatggacgggactcctgggagcttaatcctcggtaaggcttccaccattacgttcactacccttccctctctgttccgcgcgttatcatactaaggttgggcctctcggccccccatttgtggtttgtcagccatggcgtcgccgtcggtactctggcatcgctgtgtgcggtccctggttggagggc

SEQ ID NO: 141393 - DNA, 435 bp, Zea Mays
atatttttaaagtgtaaacaaaattacgcgagcgttaaaatgataattataacaaatttatgggtagataaattttagaagaaatccgaccaatatgggttaaagaccaagggagatggacccatatggttagcataaaccactatgctagtgtaggttcaaatgttctaagtggaggatgagtgaatttgttgggcattgaccggtggctatcatgtcaagtggacccaaacacacgagtagcaagtgagagctcagatgcacaacgaaacaaaccgtggaagaactgtagcttcttgttatgcgcgctccatcccgctataggacagggtatttataggccatccgaggataggtggtccaatgtacgtccctacccaggctaccaactatatttgagggataactcgtgtaacagagtaattatagtgctac

SEQ ID NO: 141394 - DNA, 568 bp, Zea Mays
ccgctccccacagcgagagatgacgatctgaggcgcaagaatataatcttagcgtgcgcatctcccgctcgaactgggaagaaaacaatataatgcggctgctatgggcagccatcgtgcttcccatgccggtatgatttggtccctcgcagtctgctaggcacggcagatcttaggggatcctcctcctcctcctcctcgtctcccaccccggcctgtgttaattaagtactgctaactccgtactacgcttcacgatcgaactaacttgagttgtataatcccagcgtagcagtgcgcgttgtgggcaagtggctacaaaagcagcagaaccttctgcaccaaaatcagctaggtcgccacgcaagcaaacacactaggcgatgctccgaacaagcttgcgctgcgctgtcccagtcccggcagctgtctcgcttgcatgcagagcgctgcaataattcggcaaggaacgacaaggctctgcgtgagacgcgagcgtgttattttaatccagtctcggtggcctggccatgtagtagctagctcctagctaggggagtgaggaagc

SEQ ID NO: 141395 - DNA, 380 bp, Zea Mays
attttaacaagttggattgatgagaagtagcatactatatgagaaacattattctcatgtaagagactataagaatttattaagataaagcaatagtcttaatataatcaaaatataagaatggactccctctaaagatatgcatcaagtaattgaaagaatttatttcgatgcattcactgttaaggacataaagggagaagcattatacatcttgatcaaggctcataaatttagcaataaacaacttaagcctggtaatctcataatgaaaaaggatttagaatgcttacaaccacaccattgattgttgtgaagacctttttgtccaagtaggtgttgttgtccttgatgttctttctttttcatttgagtgtcct

SEQ ID NO: 141396 - DNA, 817 bp, Zea Mays
ccccggggacttagactcatgagcaccccgaggcacgaggggccccagggggctttgaattgctcatcagtaccatggggcacaaggggcctcgaggacttagattataacagagacatcaggggcactagggacctcaagccttagagtgccccggggcatgggccccgcctatgatggtactagtgattgggctgacttcctaaaccgagatcattgagtattggtagcggatagagatatggctttcattgggcactaacagtgctaaattgctgaaacttgaggtgcatgagatgatttgcattaaattagaagtatgaatgagaactgccaaaatcaaaagtattcatggggatttgaaatatcagataagtataggtggtgcagtacaatttctttaaaatggcaatagagggttgcttatgtggaataaggggaagaactatagctaaagaaagaagggctatgacagaaaattcatcatttattaagtccttaggaaaggtatgttatatttgtatagttataaatgtagaagtcactgtgctcattgttgatagaattaagaaagaatcagaaatttttatgtcattaaaagttcagacggtatataaataagtaaataactaggaagaaaacaagccatttcttcttaataagaagggcacaactggaggaacagtttctccactacttcataataaacaaaacctaacctgaggatatgtaaacattcagatgctgtgttcaatgcagatgtcctactagagaggcctttcatgcatgcgccttcaatcgagcatttgacaagctt

SEQ ID NO: 141397 - DNA, 697 bp, Zea Mays
ttttccatagcctcttccagggctcaaaggggatggatcctgtgaacaggacactgtagcaagatttagaggagaaccgaccaaaagcctcgtgcctccacacatgttgatcatcatcttgggtcaacactacctctctcaaagtatcccaaagcagaaggtattgttgcaaccccactaaagaaagggaggaaataatgtccctcacccacaatctgttgccaatagcttgtgccaccgttctagtggaaatgaccctttttcaactttagcagccatctcaggagcaatgtcccgaatactacagtcattcagccacctatccgaccagcaaaacgtgttgcatccattgcccacaaaggagatgactaagttagcaaatagttgcctagcctacgactatatggggagttctagaccactccaaggcctattcgggtctattttctacacccataaccatttcgtttgcaaagcccaactaatattagaattcccatgcctccaagattaagcggcctagtaactttatcccatgtcactaaacaactaccctcatttacttctttccttcctttccgaataaaacctcgtcgcagcttatcaatagatttgatcacccatttaggcacattcatggcaatgagaaggtacacagggatagttgagagcacaaaccgcactagagtcgtcctac

SEQ ID NO: 141398 - DNA, 442 bp, Zea Mays
ggattctaagacccttggttttcgagcccacgacaccaccgaggccgcagccatgcacgcgctgactaccttctgcacacatcccattgggttaatccccactgcaaaggaggaggatcctgatgggcttggctctggatgcaaaggtcaccatcgccgaccgggaggatctggtggtggatgtatccactgagttcatggagaaggaccttcagactgagcaaatgagtactcgaatccgagagcttgaagaacaggtggaggaaaggaaccataccatcgaggttcaacatgacatggaagaagacgaggacgtggatatcgagggggaggatcctgagccagcttctagcttggacaccgctaactctggggggcaccttctccagattctagctttgcgtcgcatgcacgctagatgccaggatggggaatacatgtg

SEQ ID NO: 141399 - DNA, 691 bp, Zea Mays
ttataataaaagcagataattcgtcatgttttttaggacattcgaaagagaaggctcccaacaaggaggtaaaacacgacggaaactcctgttggccgttgccatcatccctagattgcagttgtgggcggacttcggctacaaattctgcaatattttgtctcgcagcgggagtccgaacggctgctctatagtgtgaaaccgtggcatcgctcccatcgtccccgcccacggacggtggtcccgcatgccattgtcacggcacggcacggcacagctgagcggagcgaaacgctctatcgactcgtgcacagtacatacacgctgggcgggcttccgttccacggcgcttggaccgacacatggtggcgtgcttgcgaaagcgacgtaacggggcgagctcaacggtctcatcatcagggatgagcagtgtttccgtctgctgtgcagtgggaatgtgggatgggaggatacagtacaggatagggagtgccatgcagccgcggaagggcccgcaccgcgtgtccgaaacgagcaggaattgtattggttttcccactccgacggtccgacctgcgcagcacttgtcctgccggccgcagctgcatctgcatgcatgcaccgcccagtaattcccagctttgttgtttcctgggcccggcccggatccgccggcctcgtcccagctcgc

SEQ ID NO: 141400 - DNA, 420 bp, Zea Mays
aacgggaaccgaaggcctgccttcaagaagtttcggtaaataacaacttcattttcctcaggagcagggacagtgctatctcctccaaccctcacaatagacatgtcgcgaaaatatctacctctcatggcgtcaatatgactttgtttaatggtcgattttctgaagatggtatggcttggccgccagggccggtcctcagaatcttcatctccagtttacaaatcataactatcattgtcatcagaatcttcagacaaaccctccattatctccttagtaattttttctgtatttgtttttgccatagactcataaaacccaacaataaaaggatccgcaactttcttctcttcatacagcttcttctcctcagttatcttcttctcctcagtcatcttcttctcctcagtcatcttc

SEQ ID NO: 141401 - DNA, 546 bp, Zea Mays
cttttgataggtagattaaaaatatgacggaggatatagagaaaatgatacatgctttagaaaaatctcatacgcctaattttttctcacatgaatagggcaccaaaataattgcaccaaacacatcgacaacaaatagggtttctcagtcctagccatattatggtatgttgatgacctcatatccagggcaaccgttgtcgtcatcttcactatgtggtggatcggcactgagcacgaccggacagtccgtgcatgatcttagactattcggtcctccatcgaactgttcggcctctatgtcgaacaattcgaagtcatgtagagcccaccacaaggctcgcatgcgatgctcgacatgatcagacactccggatatagtaccagatcgtccggtcccttcgcagactatccaaccacataggtcagaccgtctgaaacactgaaaaccacctgtgaccgtcctagtgctgaaggtcgtcataaatatagccggacacatgagtcccataatatttttcatgacaatagtagctcaggggatag

SEQ ID NO: 141402 - DNA, 754 bp, Zea Mays
tcgagcaaccctgtgaggcagagctaccgaccaagtcctcatcaagcaactcagcgaggcggaggcctcgacccggtactattgacccacgtcagccacgacgggacgcttagtcaccaaactacgtctagaccagtgacgtggcatactgaagggatatagagaagtctctatcgatgtgatggtacaccaccgcatacgatttctaccttgtgggatcggacaaccataatcgttgagtacctaagcatcagagtcgccacagtaactcgcataccaggaaagacgggagaatgcaccatattgggtgtatgcctacgcacaccagggggtgatgcggggtccattacgaaaggcgagaccgggccacatacaactataccatgagactaccccatgggacccaccaagctccactacaaggacaataacatcagactcactatagggacccgtatgacggacgaacaaagcggtatgccacgttaggggtacgactacacatgaccctacagatgctgtcagaggcacaacgtcaaccggaggcaacaactcacgctcttactagtaggaaacatgtctcctttgtaaggtcctacccgtgaactataaaaggacaggacctcttccttcttctcacacacattagctgtaacacggtctctgaagcaatactacgatcaacattatatcagattagggcgaaaacctaaaccaatataactctctgtctccatccttagctcgaatccta

SEQ ID NO: 141403 - DNA, 502 bp, Zea Mays
atgtcctagcaggattacgtcgggctggtcacgacggtcgaagacgatagggaattttgaccatcgtaggtaccgcgggatggtgggctctacaacgaatactacctgttgggccgcctttcagcagcgtcaatcatcgtatgcctctcccccgccgaagatcatgaggcaccctatggtttcgagaaactctttggtgggggcttcttgttctgccagctcttcttgttttgccttcttagctagtggctcgaagatcaagtgctttaggagttcacactcccagagtttgtggcgaacgggaaagccgtgattttggtacggtgagtccatcaacttctagaaattgtcgttgttgttctttgccgacggcttgggcgaccgatccgtgccagcgacttcaccttcctcggtgtgcgtggggcggtaatttcaccggcgtatgtcaaggtgctcccatcggtcccttctctcgccgctgggctcgccagcgtcgcacgag

SEQ ID NO: 141404 - DNA, 516 bp, Zea Mays
gatccttgtcgatgatcatccagtttgcaacaaataaagatcatctctgccatctgcctcacatcccactcatctccctgacgcatctttccatgagcatccctttgatcccaacctctatactgcgccctggtattctgatctggaccttctcagtgttcgcggtaaaggcattcatctcttggtcttctctgaaggttccctctaccttctaccatctctttcatctgtaggaccagcatcccatctgccatcccgagcatcacggctatacatcttcttgtctttagcacctccacagaagaccagtcgtcggtcgtcttagcctcgatctccaaactgccggatctcgtccatcctcgtcgggtcccaaacctagcggccagaacccgaagccagtgagatgattggggtagcaccgtagcaggggaggacgaggacgagaaaaggtccacaatgttgcgcccgaattgtgccttctggctgggccttttgtttactcggcccaaaacttcc

SEQ ID NO: 141405 - DNA, 625 bp, Zea Mays
gtgggcacaaaactagtgaatgagtgaacaaccaaaagaacagagggattatcgtccaaagagatgttcatctccatctgaagtttgaacagaggaggatggccgcgactgcaggctggagcagagggacgcacaatagggcgacatgagagaaaggcggcggtgttggagaagggggcatggagcaagggcggcggtgttgagcagggcgtacagatgccgacggctacagtcgtatccatgaatctaggtagggcaaaacaatgtatttagaattttagagatgatgggatggcccatagaaaagaggctggataccggcctaaaatggacaaaattagttgatcaaaagtcttgtcggacgactaatcgctgactaatcgtgattaaccggatgatcagctttctagtcgtcctaatcgagtcggagaccctaatcaaactcgcactagtgatatggccgactaatcgcgactaatcacgataggtcagacggatttaaaacccagtgctaatgcataactatttggatgaatatggtggattggcgtgatcgtgtcacctggacgtggatttgagcctttggccggacagagttttgataagttttggttgtgtactttca

SEQ ID NO: 141406 - DNA, 1270 bp, Zea Mays
aatgcccagaagaggtgtatagccacattctccaacatgtggaatgcctctaacaccaacttttccttttcacaccattgcaactaggccccgaaccgtagccgatgctttcccctgaataagaccttcaaaagagttctttttctcgacatttatcagaaataatttcgttccttgttagccaaatggaccagaagatcgctgctgcacccatcaataaaaataatctaaaagttctatctctcataccaattattaaataagttatagacatatagtactaaagatgctatgctatgcattggagtttggaactgaaccgggagagtgattttagtttacactacatgcagattgtttttcaggtgaaagagtgtctgttgttgtcttgttgataaattgcttttcatgaactagtggacctatggatttcatgctcaccatgttcatctatatgagagtttggtcgttaatgcaaagcaaaccagttatgtactctcttgttctttgtagaatccatggctcatcactatttagtgctgtagtgactagtggtttacaccatctaaactcagataatttctagataaggaagctagttcacaggaccttgctgagggaaggctatttgtgataaaatcactctaccatttctcacctcacctattgtttggaactttgaataatggcctgtttggatggtgaatgagaccatcctggctcgcattccccaaccaggcaatgttcggctaggctcgtccatgcaacatggccttgtttggttacatggttcattggagtctatctgagtggaacaactgtttggttggctggatgatccatttgctctctcttgcgcgagcgcgcgctgcacccgcctggccaggcccacgagaaacactcgattcaggcggacgcgccgagccaggttccggggttgtttttgcatgcaccctagccaggccctgaacactgcccaagcatccaaacaaacaaagcaccctaagttgacataaaaaaggtggaaatatcgaaatagtgtcacaagtcataagcattaacagtgccgttatatggatcagataaggtatgctactgttaggacaacatcatgaaatgtgtcatttttttttgtcttggccatgttttttatgctgatctaacagaattacagccttacatgcttctaatctagttggagtccccagctatttatcagttcaaagtttcaattggagtgcattttggaagttggcttgttcatgcacaa

SEQ ID NO: 141407 - DNA, 329 bp, Zea Mays
ctttttttgctcgcagaaatcgaagaactctgaacttgtgaagttggatcctaggtcagttatgatgctgtttggtatcccaaatctgaatattatgtcttgtatgaattccacggccttagctgaggttaaagaagcaatgggtttgaactctatccatttggtgaatttgtcgattgctaccagtacatgagtgtatcctccttgagctttcttgaaaggtccaatcatatcgagtccccagcatgcgaagggccaagtcactagtatggtctgcagttgctgtgctggtagatgttgttgcttcgacaagtactggcaagcttcgc

SEQ ID NO: 141408 - DNA, 812 bp, Zea Mays
gttaaatcaaaccctaaactaaaaatagggtttttgaaaatgagaaaaagagaggaaaatactacgcaaatgaaataaaataaatatataaataggaatacatttacctcccagtaatatatgaatcaatacatttcttgatcatggatgaatttcatatccgaattcaaattcaaatttgaattgtgaaaaaaaagagagaagaaaacttagattgggccaagtcaccctctttcagcccatctcaaccacactcctgcgcggcccagtttgggatcttgcgcgccgacgcgtgggcctgggcgcctgtttcttcactgacgacagggccccacgtgtcgatctccgagccgcatgcacaagccctagatgggtgactgaccagtggacccgagaagtcagcctaaaaacctcaacaaccatggccgcgcatggcgggtgcgccggcgtagctgggagcggactcggggtcaaatccttctccacctcgcctctataagatgcgccgcaaaccctagacgactcctcttccacctccgtgatagccatcgaccaatagcaccatgagcgagagtgcgcgcagtggagtgaattcgccgccgccatcgaacgttcgctgctcggtcaccacgtccccggaatactgcccaggagagttcgcctgtgcctaggagggtggtccgaggccgcaattgcaaggaatcaccagcgggctaggcgaattgctcgttggaacagtgttcgtaccgcgcttccgcctcgtgccttggcgcggctcctccacctcgccattgtcggtaataagcactccc

SEQ ID NO: 141409 - DNA, 388 bp, Zea Mays
atgtgtttaggagatgttggctaggatgcatgtatttgagtgttgcaatttcaatatattttcatgtgaatgtaagagctaactggcagtacaatttgtgcgatgatagtctcctgatgctttcaactatgtagtttggttggtgttggggctcaatattagtaaactacatatactgtagaagttggacagtgttcttttgctgctctagtaaatacaactacaaacccatgttgtgtaagataacgctattattgctagttactctgagtgctgattatttaacctggcgcatgtttattggttaggcagaaaacagttggcacttggcaggatgtaccttaatggataggtaggccacataattgatttctggagaacacaaggc

SEQ ID NO: 141410 - DNA, 540 bp, Zea Mays
gtggcgcggtctagacgctcggaacgaccatccgtttcgggagtctggatttcatcgtcaataaggaagggtatatgaccagggccttggatgctttgacccctttgataagtgacctacccaacgttgccataggtctcatcgacctctagctcgatccccctcagaaggagtacacaccacaaggttcaccacaacccgctcgtaccgaggtagtaataaatattggaccccgttcgtgattcattcttggacatccttttgttaggatcagaggacgggctctcctccccgcctagcaaggtgagttgcgaccccagctaggagtgcctcatagccaacacaatgggggaccatttcccccacgcaggaagcctaggggaaacttctgccagtgtcacgatatgtgccacgacatccatccctgccccagctcaacccgcttcctcaggaatcaccaccaggattgagcctttcgcggagcagccagcgccccacagcagggaggcagggagggccacagtggaagatggggcgacc

SEQ ID NO: 141411 - DNA, 798 bp, Zea Mays
ccgtaacagtttatgccttgagttgggccacctgtaatcttcatcaagtgatcaccaaactctcaatcgccatcaagttatgtaggtggcgctaatcattaagaataatggtaaggataacagactaatgttcatttaataattaagttttggtgtttgatgatcaccatagccatttgggctaaaattatttgctagtgtttttgttacagtttaaaggatgcaatgtagacatggacgaaggcaaagtaatgatcgagatgatcaacacatcagacaagacatttgtagactcattgaagacctataatatcattcaagtgttcaagacacgagatgaaagaaacccagacgaagagatgcaaagaaacagagaaaaatagactacttggtagcactatacgtgttcgatgaggcaccagataagataccagagagttgcattgtagtgaagaaatgacaacagaaatagagttcatcggacatattggtgtgcactagatggggctacacattataaggctatctctagcagtctccctatcacactccctatttcaaacctcactctgtaaacagtgcggtctacagtgcaaaatagtgttttgcacgcccatatacatgttccactagagatagcctaaggaaagcattgggctattggttgtcactatggtttgaccctccagcttcatcgttgatgttgaagatccactacttctaagatctaatgactcgctgctacctttgttgtggtacttacctcctctttagcttagcgagggagcttctctttgg

SEQ ID NO: 141412 - DNA, 555 bp, Zea Mays
cgccgctcctgctcctggtgctcggtcgatgcacgcagcgtagcaaccggcggcgagaagaattgcctgcttccctccctcgcggcgctcgcggccgttcatgccctgcaggaaaagagccgcctccttcccggatcccgccgcctctcgccggagatgggaggctcccgctggctgctccacttcctgctcgtctccgtgctgctgcacgtcgtccggtccctggagtcccaggcgtgccaccccgccgacctgagggcgctcctcgacttctccggcggctgggacagcaaggccgccgggctcgtcgggtggggtcccggcgccgccgcctgctgctcctggacgggcgtcgcctgcgatctcgggcgggtcgtcgcgctggatctctccaacaggagcctccacggcgtcatctcccccgcggtcgcctccctcgacggcctcgccgcgctcaacctctcccggaacgcgctccgcggcgccgcgccggaggcgctggcccgcctcccgaggctgcgggcgctcgacctcagcgccaacgcgctctccggc

SEQ ID NO: 141413 - DNA, 498 bp, Zea Mays
tcgggccggagcccgacccgttaggcagcctctgcgcctcgatcatcaaggaaggatcggcctcgccttggcggagcccgaccctccctcgggggctacaaagagggtacccctctgcgtcaagatctttttaaatcaaaaaaaaggggcctcctgcattctcccagctacgttctcccggctatgtcagaagccgggtctcgaggagcgaacgcgggtacatgaaaacggcaaggccgattgagccgaggaactcccgtacctccgggttagggatacctcactcatcacttgccgcgaagaatggcccaactcgagaagccaccccattattgacgagctaggacgaacatgcagatggaaagaaaggagagtacgactccatgcaagaaagacaaaagtgttcaggcctcagcggccgtggtgagacgcgtattcaacaagaaactgttcaaacgagaatcaggcgccgccttgggaaggagccgcgccttcagc

SEQ ID NO: 141414 - DNA, 419 bp, Zea Mays
aaggactaagacccgagcttaagaccatcctcgccagccaggacttcctcaacttctctcacctctccaacaaggctatccaagtggaaagggcaaaagaggaagaaaaagggcacctcaagaggaaattccaagtcctccgagctcaacagcaagaacgtcaccagagagctcgaccctttggactcccacctagagggacaagcttcaataaaccatctggacccactccatcgcgctacagtcagcagagtcagagttcctttcaggcaccctccgttgcgagcaaccaaccgccagcaaatgtctgttggcactgcggagaccccagtcactttaaaaataactgccctcagttaaaggcacccggaccgacctactccaactcggtgaatggccccaagattccctcggcacct

SEQ ID NO: 141415 - DNA, 893 bp, Zea Mays
gtatcagacagacttccactacccagcacatggattaaaaaaaggaatagagtgacatggatgtttaatggacaagcttgcgcgcatatttcatttgaagagtgcatttttaacatttgctcgtatgaatcaactctgcagggattataaaggaagaggacagtagtcgcatccctgtactcgtcaagaaacccccagtggcattcaccttgaaaaactgggtggcaatactgaagccctgaaacatctgtagggcttccgcctctccaatttcctcaaaaaaaatactgaaagccctgaaacgaacactttgccggagaagagcatttcttcgcctaattcccagtggacagtgccaccaaccacacaccccaaatcaatagctacggaaacaagggaaagagtcctagccacggctcattcgagcagatcgattaacagatctgcaactttcgggaaatgctaagataaaacaaagatggttttccaacaaaaaaataaacatagatctactacagcgcgcagatttcggtagggaaatgctaagataaacaaagatagttttccaacaataaaacataaacatagatctactacagcgcgcagattatcgacggccaaagagggccgtcgcccgccgcggcggcgagcgggcgtgaaaagctggacgtgctgaccttgtatgacggtgaaaggcggccggcgaggtagcggaagacagggcccggaaaccggccttcttggcaacgccggaatggggaaggagctctgacgtccgtgaggaggagagagaagggagcggaggggagggggactaggaactttggcttacactgtagatagtgttattgctgggatgcgggaagggagcgcgcaaggtagctcggcaaatt

SEQ ID NO: 141416 - DNA, 390 bp, Zea Mays
cgtttgtttcctggggtggtccggagctgtgtagccacttagcctagtcccgtaccctaagcctgcacctccaccactcttcaacgggtgccctagtatttggagttgtgatcttataggtccggacatgaggcttggcttcccagactcaatcctgcaggtcctatggcgtgaatcaaaggatggctgataccagacgatgggtcctatgggtgtgctactaacacttcctagccgaagttgtgtacaggtccaggtcccagtcgaggctacctcccgggggccattgccaactctttcttaggtatattggtatccagcctcgacacgtcgagcctacatcccaggggggccaagtaccagggaggagttggtaacgccacacacaac

SEQ ID NO: 141417 - DNA, 547 bp, Zea Mays
tgggccgattctcccccacctgcggcccacctccacttttagcccctgcgccagcccactaatcggccagcccaacaccccaccatgtgcgctcctgtggccactgaacggtgggacccgcgggtcgggcgcttgacgttgtgcgcgcgaagacaatgacatatggggcccgattgtctgatgagtctccttcaccgtaacaactcctccgcgtttgccgccgcgcgccaccaaatcttagtgttccagtctcagcggttccctggaaagctgggtgaactccgggccgcgggcgtatcctacctcctggttgcgactcggactcgcggctagcaacggaatccacggacctcgcgcggcagagaactccgtgctcgcccaaattccgcacctcaaccaccgagctcctcggcgcaattttcttccccatgcctctataaaagtacccgtgcagcagaagcatggagagcttgggcgtcgatgcttgtgctctggcatcgcgctgccgtaaccgagcaccaagagcgagaagagggagagaaaatgg

SEQ ID NO: 141418 - DNA, 320 bp, Zea Mays
ctcgagccgcttcccattcccttgcatcctgtgctctcttctcatctgccgccttcaacctcctatactctgcacgctttgggctgtcataaaaggcatatttcccgtacctacacatgtcgcgtatgcgatcgttaatgtacgaatcgacgagctgagatccacaacacatcttctgtcccattagtctcttggactctattgtgcgtatcacctctcctttgtcgtcataactctcccaactgcatttcctcgtctcctacaaaaaaatagtaagtaccgctataacattacagctggtgcaaaaaataaataaatac

SEQ ID NO: 141419 - DNA, 327 bp, Zea Mays
cggtagtactcttagaaaacaatatgctagtttctttactattaatcatgatttatatccgaaatataatctagaaaactgcctaattattcaacaacagggaggggaggctgactcacgcacgacgtgaggaggcagcagcacacgaggtcatcagctgcgtgtgcgtgcgtgtactatatcatcaccagcttaacccaagggccaggggtagccatcagtagaaaagcagctttgcagtagttaatttgcaaaagaagaacggttgggagggggcgtgatatcctttttggtagcatgcgttgatgcatgttgaattcggaggat

SEQ ID NO: 141420 - DNA, 495 bp, Zea Mays
gtttttttctgacagagtctgttctgaagcttcttcttccagggacttcttcctggcgggctctgagggcccagcttcggactcggcatgactttttgcagcttcggctccagcttgttttgtttcaattcgcgtttttgaaacttcggctgtttttcttggagtagagcttgtagtctttatttcctctagtacatctagtacgtggaccatccttttccttttcggggtaactgtaagatctttttgtgccttcggcactatcacttctgccgaaggacttgtaacttctgatatctttgttctctcgacctctgtctctttaacattatcgaccttcggctcactcaatttggccaatggtgccttcggcgatgcagctggctcttcagtcttctgtgtaagagcaggtcctttggcttcagtagttgtagaggtctcgccaccaaattcgggcactgtggccggttcaatgaagcgcggtcggtgagtaag

SEQ ID NO: 141421 - DNA, 792 bp, Zea Mays
ctttgcactgttgagttgcccagcatgcgctgtatccggcgacggaaaaacgggccaggggtggggcgctcctttttctcgtgtattctctctcatccgcgcaacccaaccgtcattccgaacttcctccttccttcgtcggtatggcgacacgagatctattttcttcctccgagctgtcgggctcgcgctcaagttctcgagttttgtctcctaggtcgaaggacgttgcccccatccgcggcgctggagcacggtcgactatgaacttcaaatctaccggatgccataatcgtgcaggacctttaattattgcgtactgaccttgaagaacgatgaagcaacgttcgacgtcttttcgatactctgctttcggctggccctccgtaggctagcttacgaattgcagcatgaaccctccagtgtagtggcctccatcagaactgagacgacgctggtcgtccttcgttgctacatctgaaaggctgcgccaagtggcacaaatccaaacgatgaactcgcatccgcgggggaaatcaaaatgatgaactcgcatccggcgggggaataaatgaaaacgatgaacgcaccgaaaacctaccgccggggactgcggatggctgcaacagagacgaaatgcgatactagctgtggccgagccaaagacgaggcggagctgcaatccggcgacaagagcttcgatgaaatgctatggtggaggttgtacccgaggctcggtcgatgcagcactgcgactttgggcaacttgtgtcttcggacaggggccaacgg

SEQ ID NO: 141422 - DNA, 457 bp, Zea Mays
tccgttagtagggtatagtggtcaccctaagtcgagtaagtgtgttgattccaagtccaatcgaatcgaagtcaagtgatagtcaatagtttgaatgcccttgaaaatgaaaactttattgatgatgtattctcccattatagagtacaatgttgctccgatagctttcgaggtcttgctaagggtaaaactttctaagatgctctatgtttcatgagttccccacttcagtaccatccatttgagtaagcctgtatgatcctggtcgggtgacctctgacacaatgaacggtccttcccatagtggtgacaacttgtgtcgtccttccccgttagaattcagcggaggaccaggtctcccactacaaaggattagtgtcgtatggctttatcatgatagcgcctcaaggtctgctagtatcgggccgactgaattattgtgttcaatcgctcttcc

SEQ ID NO: 141423 - DNA, 773 bp, Zea Mays
gccgctataacacgtaagggctccttcatcgttttccttgctgatcctcgacgcatagggtttcgcggggtaggatttgggccgtctgtggacctggaatttccaccagcgcgccattagagccgtggcgccgcgccacgccatggaaaggggccggtgcgccagatcaccgtgtcgccggtgaggcaccgccgtggctggcttgcgcggatgcgctcggtcgtcggtaggattggtgacgatcgctcgaccgttgatctcatgtctaacgaccatgattagatatagggtcgaagtagagtgaaccgtggattcgctgctgtgcggtgcggattcaatctgggatgtagcgccgcgcggatcagcgttggcccttggatcacgatcgggcggatccgacagggcctcggctacttaaaatcaggatcgtcagtctctgatccgagggacgtcatcgcataacgtttcataatagataagatctaatagtagccgtccgttgttgatcttgcggccgtgaaccttccataccctttcagcccaacacctttacgtatgggaccctgtctttctttaaaaacaacccgcagtcccccgtgactgtttactgattctgtggaaccttcgcgttttaaccccgaactctctgcaaattatgcacgccatccaggactcgaaagaaagaaataaatgaatatagaaaatgaattcctagtgtaaaaataatcctaaaacttgtttaattcatacaaaactcattttaactccttttc

SEQ ID NO: 141424 - DNA, 553 bp, Zea Mays
gggggcgagcttctttagcttcttatcgtaatccatcttcagggttctgtaggcttcacgagtgttggcctcttcgccttctgctatattgagactctcttggagggatgccttctcctttttaagttccttgacctgctactctaagctttccacccaggagtttaggtgggtgcagtgggaggaaaggtcatcatagtggttatcgagagtgtggagatatccggccatgtagacgatggtggggtcatcctcagtaggatctcttcctgacagggcctgaagtcttttcctccaggtaggggtatttttgttgctaggtgggaagtaacgaaggggggtttcaaaaacttctttgctgtagttttggcatagctgacggagggcttttcgagcaacattttggcgcgtgtctagaaagtggtgtccagtgaaggtaacttggaaaggagggtggtttgggtaacttcggctttctcccaggtagactgccatagagcacttctcaattctgttgtcgcggtattctttccagacacactctggcttcttg

SEQ ID NO: 141425 - DNA, 386 bp, Zea Mays
ataaaagccacacaatggcccagattaaccctaatgctactagaaccacatagatctatagatctactactacaccgaactcacctctacttcggtcgttacattccccccccaacagaactcgcttgcccccaaacgagggcatcaggaaacctgtatttgaccacataaaaatcttccaaggttgctgaagaaacaggcaaacctgaccatttaatcatcacttgaggtactgcatgattacccctctgaaccaaccttctgtccataatttcctcaggccaaatccctggaccagacaaatctcccaccttgggaagctcagcaaaaactggagtatgtttagggtgaaatgcctttaactaggatacataaaaaacagggtg

SEQ ID NO: 141426 - DNA, 398 bp, Zea Mays
cgcttgaacgaacctggggcaagctggccacgacgagggcaaaccgtgcggtgttcttgagtggattgggggaaatgcgaaattgaagctctctggtggaggatttgaggtgcggacgggtgcgctagctgcttgaatacataacgaagtcgatggtgcactcgatttatagactccgggggcggtggctctcaatttgatcacgacgtgctggcagccggagatagggaagaacacggtggttgtaaccgtggcgttcacaggtgcaatggcgcaaggataatactcctaagggtgccacgattactaccgcatggtaacaagatagggcgtggcgcaatcgaggtcaccggcgcttccacggctacaccggtagtccggccacgttgccatggcta

SEQ ID NO: 141427 - DNA, 348 bp, Zea Mays
gactacgggttattttatagaaaacttgaggactctttagcataaagccatcacgaaagggcataaatcgatatcagccgttggattgcaccgacggtcaggattagattccaactcccgcgaaccagtaagttctactagcctctggatcgagatccaaaatcccagatttaattactacgggtccaaccaaggccccccgatcccgatcgaacggctctcctgcaacctagctgatccgatgcccgcgtctaatcctgagcgttcgttaactaatcaatggcccatggcctctctccttcctcctgcctacacacaggacgacgcgtccatcacccacggcggaac

SEQ ID NO: 141428 - DNA, 486 bp, Zea Mays
gtgatagagatagtgagcatacggcagctgtcgacgagcacgcagaccatccagtacggtgtcctcgatctcacaaatgagaaaatccacaacatcaaactctaagtgagaaactagggcaccaaggagccaaagctgaatatgagtggcagcctccctgtaacccatccgtggcagaagcgtccgtctcataagctgatataaaaacttggctgctgtggtgaagtctgccggagaacgtcgtgacccatctgagaagggcggtcggaacagagccgcgacgtgagctgtaccaggagcaacaccgccgtaagggcgacgaggaggatcagaggtgccatagcacaagctatgtagacgagtcgatgactcaggaaatccaaacaactaatgaatctgacttgcatgaatggtaacatcctcaagctcaaatcggaatctcatccagtggtgatcagggtcgatccatacagtggcatagaaaac

SEQ ID NO: 141429 - DNA, 672 bp, Zea Mays
gggatcgctctgttcctaacaagaatcgagagataatcgggtgggatcatggccggttcaggcgactgaaatagatgagccatggtacagtgttttggatggatcagaacgccagctcagctcgccgtcgttgatcaccgtccggaatcgtgcagggtgttgggtggataacaccgggaaaaaggtagctcgtacgtggcaccctctccgtgctcggccgaagttactcaccagcggccgccgtgactcagtggattccgccgcagtggcactcatgccatagttctccctcactgtatctctttccgacgtggtaagcatgtgcgtgtgttactctccgtggccgggggccatccgttgggccgccgtgcctataaattgagcagggggtcacggcgaggtgctcgctgatcttcaagtgagctcagatacaaccagaaattcacactatcctctccaccttctctcaaatcgattgcgcacggtgaaagcccagtcccttatgatcctatagcctcaatccccacccctaatttcatccagagacgttgaattgccactttccccaattcagtccgccgcgccacccaaaacagcccgcccgtggccagcgtactctggtaagtcattgtccaatccttgcgtcgttctagtgttcttgcatactcgcga

SEQ ID NO: 141430 - DNA, 702 bp, Zea Mays
caggaagccgtgagggcgccaagtagaacgccgccacgagaagaaacagagaagcgcgttgtggggagatgggcacatcgctggggagcctgcgccttggggtggagaagatccgttcgacctcgccgcctgtgtttagaacttagaggagcccgtgggattgctggttgaacgagaatcgctcactggagcgggcgcatcgtagcggagccgctgtgcacgtgggcaggctccctttgccgcctcaattgccggtaagtcacgtcccatgttcgttatgagccctgctacgttttgaggtggtcggagattggattttgtacaccggatcgtgaatgggcgctggtccatcaacattgccaccgcggaatgggtgccgccgccgtatttggattcgggggaagaagagataacatgagtcgttgatctcagaagtaagggatgggatccgtccaattcaaccatggccgttagatcgagattggagggccttcgttgtgtatcggttcaccgttaatctaggacgctgatctcaggatggacgaccagaaaacgtccatacccctttggccgagtgtattttcaaaagagcccctatgttctttataaacaacccgcggtccatggttagtagtgaactatttaatttaggtccttcttctttatgaattgaaccctgaagtctttattaatagaacccgc

SEQ ID NO: 141431 - DNA, 516 bp, Zea Mays
gtccaggtataacctcggaccatccgacctcttacgccagaccatgcaggtacgtgtacgcagaacaccagatgcacaatatgcaccgtttttgcacccatcacagcaatactacactaccccaccgatagcatattataacaatgccatgcctcctcatatgcacagggcgggatattcttcggccactagagagcctaagaggtatagggctggaacggtggcactaataggacacctaacacgtattttgaaaattcctgggaggaaagccaacaaaataatgtccgccaacctgaggttttcaccccaagcttaatggatggtcactagacgtggtggaaaaattagggacgatttagttgggatgttcagagacaagttcggtgttagtgtgttagacacgtgacagtcgtattagaaaccttatagtcatcgatttgacgtcgtgccatatccgcaaggaactaggataccatatttctctaaattttccgatgaaggtggaaaaaacac

SEQ ID NO: 141432 - DNA, 373 bp, Zea Mays
cagatgtctgcaagccaggactaacttctcctttgcaacttcatgcctttgaagcagcgcccaggaacgacaccagtaggttcccctgtagattacctgcatgtaagttttcgagttatcacgatcaaaaaccacctcattcctgctaagccatagagcccaaaccattgccgccacccccatcataattagggttttgtcatgtttactgaaacccatcaaccaattcccagcaacgtgctccatatcccgagggatcggcagaccaaaagtggctaacaacgccctccaaatgaaacgagcgtaatgacactcaaagaacaagtgtctaatcgtttcactattagagcaaaacacacaaagcttattccct

SEQ ID NO: 141433 - DNA, 316 bp, Zea Mays
gtaggatgtaagtcgatcttgagtctgagtctgagtcaatactggaggcaaactcgagtcggtgtcatgagatctgagggatgcaaagttgatgtgatggtggttgaatcttagtgatcctgatcgtatgttgcggacattcccaaaaggtctaggacgagccatacattgcagatgatggggtcgctgagcatgttggtacgaatgtcaaggtactgaacataaacttgtataccaatgtgaacttcaaggatgcatcaactcttagttgatctttgcgacaacacctacttggtgcaccaaatctcaaagatgt

SEQ ID NO: 141434 - DNA, 955 bp, Zea Mays
ctaataccaactgaggagccctggccacggtgaccgagagcatggcagctaaggtgttgtgttcccgacgatcccagacggttcagtttgattaaaggggtcggggagcatcactaacatgtaaggatgctagaacaagaacgagaagggaatgagcagacctagggaaggctggccgcggtgaggtgagttcacggtggcagagagtggatttggggcgaatccaaaattcgcgagttctagcgaagaactgccagcgattaacggtggctgggtggatgatgatgttatgcagctaggggagggctcaatttataggcagcttcgacgatggccgggaattttaacggcgatgtgtggaggtcggagataagtaaaaaccgtggcgcggtggttgcgtgtcccgtgtcgtggcaattgctccggtgatcaacggggagctaggagaggtcacggtgatgtggtggcgaggttgggacacgcggtggacaacggcgagggcacgacgacggggagcagctttattcacggcggtgagcaaggggaggagtattgcggctgaccggggtggcttccagctcgacggcgacgacgatctttttacctcgcagcgttatccggttaccagcgaacattaatcttaacgcggcggcgcgaatccttgcacgggggagggtcaccggcggcaagcacgtgatgctggcatcctgatccattttgactactgtaccatcagagctcgtttcagacagcctgacagaacattctgcagaggaatttcccttcaatttcatatggtagctcctcccaagctctgcagcagaattgtagagctacaaaccaaccataattcggctataggacttgaacccatttgagcactaaatcaaggtggaattcatactcaaagttggctctgctacactgaatatctgaatttcagactgaatcagcc

SEQ ID NO: 141435 - DNA, 302 bp, Zea Mays
tttagttgccattccgcctataatgtaatccaccactcatttctcctttgggggatctcttttaacattgtttccgtacatctggcattagaaatatcgaagggcggacctgatgtagcggtaagagctgtctcagccaccaggttccagacccaattacccactgtaaataaactcttgcgttatccatagcagcaactagcaacctgtaaagctgtcactgtccatcggctaatttatccatctattgatccacaggctttactcaggtgggtgccagcactctcagtgactgaatccta

SEQ ID NO: 141436 - DNA, 400 bp, Zea Mays
tagagaaatgtgttttcggagtaccagcagggaagttactcggatttattgttagccaccgaggaatcgaagccaacccagaaaaaatcgaggtcatcatgagaatggaagcgtcgcgatcacataagaaggtacagaggcttactggatgcatggcagccctgagcaggttcatatcaaggctgggcgagaaaggcatgccattctacaaattgctcaagaaggtggacaagtttcagtggaccacagaggcataggaagctctagaggcactgaaaaagttcctgactacgccaccagtactcaagcaaccacgctgagccacgccgaatcaaccggcagaagatctgttgttatacatctcctgcacgactcacgtggtaagcaccgcgttagtagt

SEQ ID NO: 141437 - DNA, 640 bp, Zea Mays
tatagagactctggtgcttagagactggtgttgaggctcctccgtagtggaactcggctagtcccacgtcatagagttggtggactttaagggtcagacatgatgatgcctcgtcccgttgatggagactctccatcaatcccccaatgtgttgtggtgtcagttaaggcggtatttgggggtgacgtgcctcatcgtggctggcgtgggtcaaccatgtttgcctcgttttcatgctaagcaggtaaaagccatgcgcctgccagaagcgtgacgggggtcgtggagctagggtccacatatgcactccccccgttgtgtgtctccacgtctccgccctcgcaaagttgctcggcgggagttggtcgggtcgggtttgcctcgtagagttgctcgatgatggttggtcagattgggtctgcctcacagagttgattggtgggggttggtctgatcgggttcgcctcacagagttgttcgaggggatttggtcggatcgtttgcctcacagagttgctcgacgggaattggtcggatcagggccgcctcgcagaattgctcggcgggtgttggtcgaatcgggtccgcctcgtgaagttgctcgatgggagttggtcggtggctttttgcctagttgggc

SEQ ID NO: 141438 - DNA, 324 bp, Zea Mays
attaagagtgatgtgctataacatgaacaacaaaataatcagatatgactctgagttttataaggacctagaatactgttgtgctgtgatcatttgtcatgtacggtcaaccgtatttccgtagggggaggcgcgcgcgggacattcgccgcgctgaggaacgcgccgaccgcgcagcaggagatcgcgcagatcagggggatcacgcagaacaggaaagggcgccagtgattggcggctaggaaggaaagggctagaaaggaaaggcctaggagtgattggcggctaggaaggaaagggctaggaaggaaaggtctaggaagg

SEQ ID NO: 141439 - DNA, 450 bp, Zea Mays
gtaaagttgtgtatgtaatttacaatttgacagggaacatttaaaatatttctttctttaaagtgcatacaaactgaaaaaagagactttcagattgtgcatagtttctttcgttaaaatatatctgttgttgcattagtagttgtcggttgtgcattagtagctatacccgtttgtacttgcagatagaattactaaattgttattctttggttgtctgcgaactgttgcgagatgaagaggtttggtaattgatggtttatcgtgcatagcaaaaggctcttgtgagaaactaatctttatctacactactccttaagacattactgacctaaactctaccgtcccttcctaatcctgatttagctggaactcaatatctttagttggaactcaatatctttagctggaactcaagcatcggtaagggggtggtgtttatgctgtcag

SEQ ID NO: 141440 - DNA, 786 bp, Zea Mays
tgcctcaatttctataaaagataggggcctcacacctaggtttccagagactcagtaagcaattacagcggacggcgggttagtttagtacttctccagggtcactttcggaaaaacgtcgcggctggcaacgcgcacaagttctcggtcgtctgattacggatctaaggcccaggttacatcaggctacgcatcgaaccggtatgcgatcccatccatctaatacgagatcagccgcccggatttagtgaaggagagaccgagccgtggccctcggatctcgatctaatgcccctggtgcgatactctaaagcggtagacccaatctaatctacgccgtcagtgaagatccaacggtgaccagagcgtctcctacctcatgcatccagacagccatggtcacgacgccctcgacggcggtcaccgatccgccaccgtggcgcgcaggcgacaagcagtactaggctacgtattggagcgtggataattcctacacataatgcaaacaatggtgactacagagatgtgcctttaccgcgtttggaggcatcagtgtggttgtccatggagactggcggcacgccgaatctcttgacaccgacgacgcagcacccgacttctagcttagcgaccctgtggacgagacctcgcgcagtacagggacgcgccaccttctggcaccgcgtgaatattgcggaagagttcgacttcacccgcgatcaaaccctctccctcggtttctctctcttaatggctgcaatctaggcggcgcacacaggttcttgg

SEQ ID NO: 141441 - DNA, 402 bp, Zea Mays
aatggacatgtagaaagagccaacgggatgatacttgatgcactcaggaagaaagtattcgacaagagcgaaaaacttaccaggaaatagattggagaactaccgtatgttgtttggagcctacgaacccaaccaagccgggccctgcatggaaacactccgttcttcatggtatatggattagaagcagtgttgccagtagatttgatctttggagcacccatgctaacatttgaaagtatagttgaagcaaaagcatctagattggaagatgttgacatattagaggaagaacgtctgaatgattgtcatccaatcggctaggtaccagcaaactatgaggcgctaccacgacaaagcagtatggtactgatccttcgcaataggggacctagtgctccg

SEQ ID NO: 141442 - DNA, 481 bp, Zea Mays
ctcccaaccggagtatgcgcgggtcagttgggaatcgggattcgatcaatcctagctcacccaggcctataaatcttgggccctcgcccctcccctagcctgtgccagcaacggacccgaaatccgagcgcctcagcggagagagagttgtgagtgccgccgccaccatagaaccttgccagcgtctgcaattggaggccatcatctggtttgcccgcgcccgttgatggtgtaggagccaatggcgggcaaagaactcgtccggggtgcgcgaaattttgtcgccgtcgcaagaattggccgtggtgccgcaccatcgcgcgagcggagccgtcgccgcatcataccaaggtaataagcccaccaacggaatcaccttatttcgctttacgtttagcactagggaattggcgcctgggtgcttgtgcgcggagatggcgaactccggccatctctctgccgcgggcggtgtaggcgccgc

SEQ ID NO: 141443 - DNA, 333 bp, Zea Mays
gtgagtttgcctctttaaattacttattggtggactcctgactagggtggttgattatagggattaggaagcagcggtttacatgtcagcaacaatgtttcatcaaatatgtttccagtttttacaccattttcatagttcagattaaccatctttggtttactcagcagtatctgctctgtcaggatgcaaagagtgtatgcaactgacaacccgcaaattagtagcccttacgtacttcatcctattttaggagaatgcctatttcttcacatgcagctatttccggatcatattgttgttgctttcgttggaattgtttttgttgtagac

SEQ ID NO: 141444 - DNA, 765 bp, Zea Mays
aatagacgtgacatttgatgagtataatggctcgcaagggcatgtttctaatgacactgcaggaaatgaagaaccaccttgtgaggccataaagaagcttgcaataggtgaagtgagacctcaagaaaaggatgatgaggaaggaattttgtggatgaccaatgaggtttttgatgtgggtgcaaaggtggtgggtgacaaaccctccacccaagcaaacccatcaacctcaagtcatccaagtcttgaagaaaatcatcaaccccaaaggatgccaagttgccaactgtggtagaagatgaacacgaaagtgttaatgaagtgtctcttgatcaagtggatgatgaggaggagcaaattcaaagacaaccatcagtgccccatcctcgagtccatcatactattcaaagagatcatccggtggacaacatcctgggtagcatcaggagagggataacaactcgatctcgtttagtaaatttttttgaattttactcgtttgtttcctctcttgagccacttaaggttgaagaagcgttgggtgatccggattggataattgccatgcaagaggaattgaacaacttcacccggaatgaagtctggtccttggttcaaagacccaagcaaaatgtgattggaacaaaatgggtctttaggaacaaacaagatgaacatgtagttgttacaagaaataaagcacggttggttgctcaaggctacactcaagtggaaggacttgattttgatgaaacatatgcgccg

SEQ ID NO: 141445 - DNA, 838 bp, Zea Mays
gctggttccgccattgctatgatcacatgagcatgctgcgggatggccacaccttggtgtgacgattgggatcatatttctagggcgaggcggtcgtcagagtgtttctcctgtgtgggtatggcaagcagtggtggcagaatccgcgttgccgccgacaatctttggcttcatagccaatccgactgtggctgttgctttgggagcttcgtctgtgcccaacggggtcgcgtgcgcaagcctcttggtgcggggatcttaggggcctagcgaattcctcatcggagttttgggggcgccaatgatccacagggcgccgtggtcgtcgtccttccaccacttttatcgccggtaagtcaatgttgccaagtcgccttgtccttctcattacatagcactcgttagtcacggattagggcatcggggcatctgccaggggctcgccggcaggctgcgccgttgtggatgtttgaaggagacacgtgtgggctgttggatcaaatgaggatgggcgagattataaggttgtatacccctttgttcgggccatcgatctcaaatcggacggatccaagacgatcgcatgtatttaaaatctaaaccgtggaggttagatctgacggctggggtgtgtataccggttcacttaaagcaccgtctaatcgtggtcgtagacttgtgatccaagggatcaaatcgcttgccagttcgttgttttaatctgagctttccatctcagatccgacggctagcgatcaccaataccccttcgccgagcacttttacataagaaaccctgggaaatagtgaaaccaacccgccgtcctacgtagtgggc

SEQ ID NO: 141446 - DNA, 669 bp, Zea Mays
ctctgttttcctagaggtctggactgcgcgcatgattaaacagaaacccagggtctatggcataaaacatctaagactcaggcatacggtcaatggactgcgggtttaataagaaggattctagggtctcttttaaaagacggccagggctgaaggggtataattcaatcctgaccgtccgatctagcatgaacgtcccagattagatcgtgattccagtgaaccgatatgcaacaggggacgtcggatcgtggatgaaggttctggatttaaaatgtcttgatcaaaccatacacgcccaatcgagatccaatggtcagattaggacgcgtgaaggggtatgcgctggtgtgatcccgaccgttgatgcccggaccaatggtccaaagcgcatcgctacacttctcccctatctcgaccaccagagcagccgccccgcccaaggagcacgacggaggatcgccggcgacacgcgatttggcgcaaccgagccggtgccacaacacaactaggtgctaaacgaactagggcgtgcaacgaatcgaatgagctggtccttaccccagattggagagccacggatgcagtccatggtggattgcggcacgatggcggagaaggaagctcgacgcccaattctggcaacccaggccgatgccccgatccgcg

SEQ ID NO: 141447 - DNA, 353 bp, Zea Mays
gtcgacgaggagcagctcagtgtaaggtcaaggcattgtaatgagattatctctattgaacgagcattcaagcatgtgcaaaatgaattttatgatatacattgtgaaaactgaaaagtaaaatgtaagtgcatgaaaacaaaaggtataataaagaagaataaaggacctgaacacatacaacatgtgcactgcaacatccagcgcctacatagtttcgatccgatagttgagcaatcactactcactttgaggaggagctccaaacgagccaagtgagcatttaatcgaatatgaggagctccaaactttaatttgagatgtggcataaaaaatctcagaactggtgaatc

SEQ ID NO: 141448 - DNA, 675 bp, Zea Mays
gtccagcatatcgccagccgtcacccaggcatccaatctcttcgtcagagattatacagcactggaaaacctaggcgtactgttcattcgagcagtttctaccagccgtcgtttcttgcgtctagaacatacgccgacgttctcaagatgggcgttatttctggggacaatacatcgtcctcaagtcggtccggcattatggctaatgatggtttcaatgctgctggctggcgagtggtggatcatcggcgtcaacaagttcatggacgtccctcgggtcctagcagtgggtctttctgtggacgaggtagctgggagatacgtggtcgcgatgcatggtggggacgtggtggatgttttcttgagcccactatgtcacttggttcagtggacagggcggttatgaataatagtagaggcgttcagtctgagaaggctagaaaacaggttgtcatggtagcacccggtgttttagacatggggaagaaaagatgggaagatctttgttgcgaaatttgtgaagataatcatgtccctcaggtgtgcctggtgtttaatgttccaaagccacaggcagccctatgcggttttgcgggcggtgagtctggtttcttccaaattctaacttggggatctaagggtgcaattccgaggtcggatggtgttacgacattc

SEQ ID NO: 141449 - DNA, 410 bp, Zea Mays
agaaagccgaggatatttcggaagaagaggacttcaattttcaagatatacttgggcaagaattgtcgaaggctgaaaaagaagaactgaaagaatatgctatatcttgtgggtacagaccaggtgcgttactcttcgggggagtcaatgaagaaagcttaggatgccttcgggaccacactggggcgaaggttgtcggcactatatcaaagagtgttggcctctcgaaggttgaagcagacctcagcaggtaccggcggcagcatatcgccagtagtctattttatgctaactttaaggtaaaattcttaatttttcgttgttttgatatgaagattgtttttctgatgaagcttaatttatcagagcttactgttgagcaaaatcctgaggatgcaacaagacctcga

SEQ ID NO: 141450 - DNA, 673 bp, Zea Mays
gttttgaaagatctgaagcccctggtcgccgttttgcggatcctggcttcggttttctgaagagatgcgatatcatacctctggacctctggacatgcgggttcgttctatacatcctcgcattttctcgaaggtccaacaatctgcttcaaatacaccagtgaatcataagaattgttcttggcagtttgcattttttttgttttttctattttttgctatgtgaatctatttgaatgaatcatatgcatcttgaatccgtgacgacgaatcgatggctcgatgatgattattcttgctttaaccacaccgaactaaaggctattggaagggtgctttcttccttcctccatttgcgccaggctcctctttcttggtgtttcctcatgaaaccttgctttcttgttgaagaatgcagttcctgttttcttccgcgagagtgcgaggtagaaggattcggtaagatttggtagcgtagcaaggggggaaagctggaggcctcgtccgctggttcttggcttgtagaaaaacctggcctttctctgagagcctttgccctgtatttgcaattgatacccctctttgaataagtatttcccccttttcaagccaatatgttccgctgatcaattatttatatgggtgttggacgataatctggaataaaatttgt

SEQ ID NO: 141451 - DNA, 436 bp, Zea Mays
atattatactcttaatagattagtataagtatagagatagagatatagatatagatacatacgtacttcttttcccccgtggaagcaacgtgcaagtgacagcaaacaaatcacacatgagatgcattttatctatatctaaaaggcagatttgaagatggaagctttgggagtacaatgcgcgaggccatttctgttctgttctgtccatgatcaaacagacaaagacatcagcgaattaactgcaccgagatccaatgaaccgaagaacacaaggtcaaatcagtcctcaaaaccatctgcggagcactcgcgcgccagatccatcgtctagccggcccaagatttccctccccaccgcgccgctccaacgccactaagaagccagccagccatgtcgtcggtctccggcgccggcggccggcgcatgtccatc

SEQ ID NO: 141452 - DNA, 495 bp, Zea Mays
cttgcatggagttggatgcagtcacctctttgttactgtggttggcctaaactctatcacctcattcattcttcaacctctgtctccctcatcttttctgacttcctacgttatacaacatgaactacatcattgccacctccgtcccacaaaatccaaagcggcaggccttgtccttttgctctctctgcccctcctgctaatcacaaatcgtctccttggaaaacaccgatgcgagcactgaagtcaggcggcaggcaccggcatgacactgaccagccgaacaccgatgagtggcaagttgggggacgaggagcgaggatatcagccgttgcggtgaaggtcgtgggaggtgagcctcacttagtcacttagaagggtggcttgtgcaggcctgctgcctgcagccggtatgttgcatatgtaagtccaaccatccaaacaaaggccacctgcactacggtgctgtggatagatcctttatgaaccaccaat

SEQ ID NO: 141453 - DNA, 335 bp, Zea Mays
aggagctcgaagcggacggcaagcacaacgctgcaggaggcaagcggaggctcgaggacggtgaactcgtgggactttgctcggagttccttggttccgcaactgaatccctggccgcggcgctgcagtggatcatggcgaacctaatcaaacgcccagacgtgcaggaggccgtacggagagaggtcgacgctgctgtggacgccgacgccgaggaggtcggggaagaagcccttgcaaagctggaccacctcaatgctgtcatcttggaggcgttcaggctgcatcccaccaccatgtgggtatttaggcaggtgagccatgtactcttcctc

SEQ ID NO: 141454 - DNA, 516 bp, Zea Mays
aggtaacaagccaattgggtggatgtttgataattacaacattttaatctcgtccttcaaggttcatcccagtaccccctgttctggatctgttttgagtgcaatggaattaatttgccacttccttggcttggtctgttttatcttgggtctcagttgtctaccaatgtctcaacataactgcaaaattttgagctggaatgtgcgggggctcaatgaagtggacaggcgtgattctgtgcaaccatccttcgtacctgggctcaatgtctcaatgttgtctaccacagttcgggatactggtagtaccattgtttgcttgcaggagactaaactcactacaatcgacgatgcaaccatccttcgtacctggggtcagaattttctaaacaacattgctgtgctgcctgcaaatggatctaggggtgggattctccttgcagcttcgaatgactttttctcactttcgcaagtgtacaccacctcacacactgtcttggccatgatcactatgaa

SEQ ID NO: 141455 - DNA, 514 bp, Zea Mays
cgaaaataattcacattaaagttgtagcaccgcacttaaacgtgcaccatagtatgacgttgaggcttgtttcagctggaaattggtacataataagattacatggtccaagtttacggctagtcgatacagcgggggacatgcaactaaaccaaagctatttacaaggtacttagagccaactcttggctggcacaatccagacagctaggcacaaacattacgcagctacaagtgcagagccattccatctactaaagccagctgaacaatccatccacaaaagcgctaaacagagatgaccaagatgtacatccacaaaaggcaagacatcatctgtgacgtgttcagactgcaggtttgttaaggctgcaaacaaatataagaatgtgagtataaagttccataaatattatgcgcggggtctctgaagttaatgttataccaaagaaagatattaagcacatgtatacaacctcaaggctacacaaacagggtcttgactggagcagat

SEQ ID NO: 141456 - DNA, 400 bp, Zea Mays
cacctctgtcatgcttgtcagttaggtcgccatgttcggctcccattccctacctcctcttctagggcagcagacatttttgatctgatacactgtgatgtatggacatcccctgtaatcaacatttttggctataagtactatttactcatactccatgatttctctcattatttgtggacttttcctcttcgtcagaaattggacacttttcccaccctgtctcatttcttcgcttgggtctccactcagttcggtagcaccatccgaagcatccagtgtgacaacgaccgcgagttctataacaatgcgtcccgtgctttcttcctctctcgtggcgtccaccactgtatgtcgtgtccctacacgtctcctcagaatggtagggctgagcgcatga

SEQ ID NO: 141457 - DNA, 383 bp, Zea Mays
tatagtactcctgttattcctgatactggttgcaaggactgacaaatttgctggattattttacagctctgctgagccaggaactagaatgagcagcgtgtttggatgtcttgctacccgatcttgatttctgtgctgttaagatttttcttgctgccttaagtgagccaaattggctctcttgtttgggcgggcaagcacctcgttgctcgtgccatttgagctaggcaaggcgagggcagccttgttcagaaccaagcaatgtccatgcccacttgacaggccagcctccggtctcctttgcccaggacttcttccatccccagatccccctatggcctcgtttggcatcaaggggctaatagcccagggaagggaagccc

SEQ ID NO: 141458 - DNA, 2168 bp, Zea Mays
tattggcttttatgtaagtgtaaaaccaaaatgtcttacctgaagaactatgggtaacaattcaggaggtttcttgtccttagagccatgatcaagccaaacttcgaaagccatcaattgttccataaaaaaaggacttggctggtttgaaggagataaagaaattagcaaaacaatacaaagaaaaactattgatatttcttgaaatgctcaatgatgattgatgagtagaaaacctgaaactctgtgtttggatcagcaattaactgaggaagcttggaaaggcaaatctcagcagccatgtcccatgcatccctgggatttagcaagttacaaaatgtacaaaaagtagttgaagcaaaaagaaggacgagtcaggttagttaccacatatggtgttgatgtgttgggggtaacaacggataagaaactggagaacagtttgcagatcgcatgattctctcagcaagcaagaagttacggaagagaccggcaacaagaaggtcctgcctgaaaagcctttggaacagatctgcacagtgaaacatgtatcataaaccaaatataggctaacatttattttgaaatttaataatcttctctagttttcttgttccccaaaaacattatttctctcataaacaatgtaccacgtggaagaacattccatgcgatagtatctgttatagcagtaaaaatccaattgagctctccaagaagtgttttacggtcattttgccttccaggaatttggtcaataagagaacgatccagaggaccatggagtgatgttcgcttacaaaacctgcatggtttataggcatgtactagtgtaagcacaacatgctaagaaaaggagagaaggaacagtacacacacaaaaaagaaggggggagaaagaaccagtgcaaagccattttgatgggcgttgtgaggcaagccgtaaacacatcagcaggaaattctgcactctggggaagcgtctgatgtgcttcacaggcagcaagaagaatgaaatccttctgcgaagatgccgaggaggtagaactccagtctaggcgctgaaataaacaagtcactatgaatactacacagtccaagaacaaaatcatatgaccttcaacttcaagcacaagagaaacaaatgttcatttgaaacatgtatcatacctctagaaaggctttcacaataattccagcagctgagcaatcaaaaacataaatggaaggtgtcttcagccatgaatcaagatcagtaattgaaagtgggatatactgtgtgtaactctgcaacaaaatgcaaaaaaaacaaccattttatcagagacaactatcataaataatgcatgcggcaagtattacagtgtcttcataatgttaccttgttaaacacccaaatctcaccatttgatgtaggctttggtacaccatggccattataatggaaaaggactctctcttctctggcatatttgcggcaagtattagaaagcttcttaacttcctccactgttggatccagctgaagcttgtatcgagccttcaagtgtcattaggtataaaacatgaagatgcaaataatcctcaccaaaataacattgaagttaaacagggaagaagttctttaccttaggttgcaagcgctcatactgggaatgcaatgtttttccaatactttcaagggctttaggaggtgccatagagaaaggatctgtaaagaaagaaacagatttatgaaaatatcacaaagcaactgcactgagtgcaataacagtaatagagtacaaacctatcaacaaatataaattaccaccgttgcccaaggactaataaataagtttaccacaaccaataggtgcagtatcttatattagaaaatttcacttccttttgccatttctcaactttaaatttaaaaggtggatagattcatctaaaaactatggagcaaaacaatatcattttcagaatataaattttaacagtgtcttttgagaaaagaggtgccagatagcttccttgctgtgatttacttcagattagaaatatactgaaagaaaaagttattgggaagactgaatacgagcaaactcgcaaaaaatatccttagatggaactatggaagcacatggaaaccagctatctacaagaatggaccagaaaaagac

SEQ ID NO: 141459 - DNA, 522 bp, Zea Mays
ctaagacagtccgtagtatagaccaccaaaacacccactccctgcccaacttcattttggcacttgcggatagtccacacaactacacagggatatgtgcaatctagttatttccttagccagaactgcggatgacccgaccctaaggcccgacaatgcacactacaatgtcttcggaccacactgatgtcatcacacttcagacctctctaagaagatcgtggacggtccaaccacctggcctagacggtccgcgacatagacatttagtctactttccaaacatgcttttgaaaagattttaactctcaaaagcgaaagcattgttagtcctcatgcatatgcaacatctaaatgctctatgaggcactaagtttgacatagagaattgtcattggcccctcttaacagtacgactgtctagccaactaattcggtcaatttccttctctaaatcccttgtgaccgacaaaagtaaaaacctatgttatacatttgccttcattcgttccacgaccaacg

SEQ ID NO: 141460 - DNA, 282 bp, Zea Mays
tgttaggcgtatccggtgatcgctggagggaccgccacagtgaaagccactaagcgcttgcgccagtgccccttttcttctccggccgccgcgcgtcgtcgtccaattcagcggccaccgctcacggtctctataaattgagcgcactgcgagcttcataggataattatgtatccatagcacccacgcttgcctcgaatcatcccctagaactctccaatttcccattctccccaattcggtttctgccgccgtgaaagcatcctcgtcgtggccagcttg

SEQ ID NO: 141461 - DNA, 540 bp, Zea Mays
gtaagtactaattgttgctcggggtagtaaatatcgtcgtgtggatgaacttgagccactgttcactccggctgtcgtgtctgcctaactcacggccgattcggatgaactcaccggagttagccgctcaacgattgtgcgccacgttccttggtgtcttaccacatcgcagtagctcatattacacctatccggtgatcgtcggtgagccgccacagtgaaagccaccaatctcttgcgatagtgctcttttctttctccgaacgccaccgcaccatctcaaattcacgggccaccgctcagggatcctataaattgagtgtgtcgtcggctccgctagatagtcaagcacccaatccatcaactcatgccttcaattgttcaccagagcctccgaattgctcacttcccccaaatcggtccagaacaccgcgcggagtgacctcgccgtggccagagtgctacaggtttgttcatgtcctatggttcctcgttttagtatccttaggtgctcttgatactccctgacccatccaatta

SEQ ID NO: 141462 - DNA, 457 bp, Zea Mays
acctgcgcatgggtcggccaccgctccattaggcccatctagccgtttcctgcgcgcacccggtgccgcttcctggtgggtcccgcaggtcagggcgggtcttcttctccccaaccgaagcagcgaccgcggcggacggggatcacaacaaaccgagcgattctctcgcttctagccggacttgcctcaacaaaccccaccgaacaacttcctctcaccccctttctcttggtgcgaccatgggactgtaggcgggcctcagtgcgcgctcgtttttccctcccgatacgagctaaacagagctgtggattccacagatttgccgccgtgatcctcgcgggcgtgggcgacttccctccattccgtgccagggtccgtggggcataaattggtgccctctgcgctcctctccacttgtccatctgcctcgcgacttctctctcgcctcggccgcctg

SEQ ID NO: 141463 - DNA, 407 bp, Zea Mays
cctgtcctcagcgcctcgccccgacgcccctcggccgcgacaacaacgacgacaagcacgggcccctccatcgcctcgtcgcatgtggcctcagcgctgccccgacgtcgacccgccgacctccccatcgactcccgacgccacctccctcgcctacagacccagcgcgggccacaaatgcctcgcatggcgacttcccacaaccgaactatgcgcatcacaaatctgttgtgccccacgcatcccacgcgcaaacaaacgccaccacaatagcccgcgctccgcatgtcgcggcatccaatcaccagtggccttcttcgcggacgacgatgtcgatgacctcacatgctctgttgcccatcatcatgccatcgtggaggtgtgtgtgaaggccgcctcggggaagc

SEQ ID NO: 141464 - DNA, 465 bp, Zea Mays
aagttctgcgatctggagttttagttctgccaattcggtgggagccatgcggtacggtctttttgcgattggtgcggtgccgggaattagatcaatgtagaactccacttctctttctggcggcattcctggcaattcttctgagaatacatccatgaattcttctactatagatatgctttctgctgccagattaaacaccattggatcttgggtgggtggctgagcctgacatgaaactgactttccttggtggtcagtgagaaggatggtcttatctgtgcaacttatgatgccattatgcttggttaaccaatccatccctaagatcacatcaatcccataggatggcaagacggcttagtctgccaagaacactaccccacttaaaagaatcctgacttgggagcatttgaggtggcataaaaggtctgaccctggggttcgggtgaccaagggaatttc

SEQ ID NO: 141465 - DNA, 272 bp, Zea Mays
ggagaacggtcaggaggcagaggaaacagtcacacgtaattactagaaacctggaaactgatgatcgttaccaatgtaaagactggaaacagacgaacggattttatactaggcaaaatgtacaaccgcgtgaaataatcggaccaaaggtccaatctacaacgacgacggccgggcccagtggcggcgcgcatgtggcaggccctctatcctgtatcaacttttcaataaatgcacccacagtccacatatttaagttgattgacagttac

SEQ ID NO: 141466 - DNA, 564 bp, Zea Mays
cgatctacgacaataacttaatggaacacgatctgttttgatccgcaggatgccgattcgacggcacagatccaatcacccaacagcgatacgactaaactaatctgggccattcaacaatggatccacggcccaatcacgagagatccggccacggcgatggtcctgcatccgaacaggtccgatgtgatccccgtagtgtaggtcgcccccagaatctttcctgtccagaggttcccaagaaccgtgcggcgcgcctccaggcgctttgctgcgcgcgcagaaggaacaccaagcagtgatcccccaatctcttctctctcttcttcgttgctctctctcaggttctcgcattcccgcggattctatcgaccgtgcacggcaatggggttacaaacattcacttatatgcgcaggggaagcagcagtttggttctggccggatcgacgaggttgttgcggtgaatcgggatctcagcgcgcaatacggtattctgatgcgtttctccggtgttcggttcaaggaagatgacgaccctgccaaggcggcccaccgtcagcgac

SEQ ID NO: 141467 - DNA, 782 bp, Zea Mays
gcgtgggaccgcgctgacagtgaccccctccggggcccgtatcgcagtcactgacgggtggggtgccggtactgtggatcttccccaacggattccgcggctcggcgcctccgtgcgattgtgcctcgaccccgactcaccttgcgcacataagaactaagccgccgtgccccttttccctgctttcagccgaggtaccccaaaattccatcgtcgtttaacctaacccccagcgtgagccgagagtgcggggaacgtgagcgccgccgcacccgtaattggtctgcgtcattattcgactccccggcggtagacagagcacatcgctttcgagagcaggacctgggcaggacgattctgtgggtggcgagccggtgaatcttcgtgaattgctcgccggaggcagtgcttcaccgcgggatcgcccctagccgtggacaggcggactctccagcctagatcttggtatgacaccgcgaatagcctcaccatcctttgttcttcgttttgcgctagaaatcatgtagtggttaatactgggggccaggattgggcgcacgacggcgaggctctatcgtgcgagatggcgcgccgccgctttgtccgctccggcgccgtcaccgagttagggatagaacgaccaccgttggatctctgtccagcgtgcgggattaaatcaagcgtaacggttcggcgagggtatattgggaccgttcgatcacatggggacggtccagatccaatccacgttatgactggcgtaacttggatcctcaccattg

SEQ ID NO: 141468 - DNA, 517 bp, Zea Mays
catgcgctagcaaagctatccggggccggagatcgtctgccgggtcgccgtggctataaatagcacggtggtccacggcggggtatgaacttcgcacacacagtgagtttattgatgcctaaattcgcactgcctctgccccctcctcccaaattggttgagcacggtaaaactagagtcccttgccgccgtatagccccaagctccgccctcaatttcaaccaagcacgccgtgacgccattttcccccaaattagtccgccgcgccaccgtgaacagctctgtcgtggctagcccactcgggtaagactctgtccaattcatgtgttgtttttattgctctatgtgctagggaagcttaccgtggcacccgttagctcaatttggccatggttaagcaggaacgcgtgcccatggtcacggttttcgccgtgcatgtggacaggccattctcagtacgttcgggtcaaattaatgcgtgttccgaggccatcttaggtcagtgaagcctccccga

SEQ ID NO: 141469 - DNA, 322 bp, Zea Mays
ggcggtggagtggtggcaggaggagcactcggtagcggtggacggtgtcacaacccaaccaaattatcggtcccacgtataccaatccttgcctttaaagcctcggatggatatgtatgtgaatcagataacttactcagggtgccgagtttcgataaactcgtttgtttctaaggatcattcacccgtaattgtgaaccgaggcccttttcatttaggccctgctagattggctaaccgaacaagagtcatgtgacctattcctatgtctcactgacatgtgcactgaggcccttttgtttttgttcttttacactttctc

SEQ ID NO: 141470 - DNA, 399 bp, Zea Mays
tatcaccccggaaacgccaacgtggtagcagacgccctcagccgaaaacctttcgggataaagggaaccaactttttagaagattggaagaaggaatcagctcaactgaatgcatgtttgggaaacaacggcagcctcgaagtcaaaccaatgttagaagacctcatatgcaaagctcaacacctggactcagagacaacaagacttgtggaaaaagctcgcaaagaacaacttccggacctcaggacagatgaacaaggagccctttggttcaagaatcgtctgtgtgtgccaaaaggggaggcaagaatagtcctgctcggggaagctcacaactcagcctactccatccacccagggactaccaagatgtacctatacctcaaaaccatattctgg

SEQ ID NO: 141471 - DNA, 620 bp, Zea Mays
cttgtttttacatgtttaaccgatcacaacgtcaaccaatacattagtttctgtttgtttaatatttacccgattctgttgtcggggcaagcgatgtcgccggtgctgaaattcgatgccgcttgatttatgtgttataggattgctgtaacattttgagtgactacctactcaaccaaacaaaataggcaggcaagtgttcaattctcactacattcgtttatgcattcactttgtgttgtcgttgcggtttgtgagagtggcctaaaggggtgaatatgccacacctgcaattctcaacataaacttcaaacttttgtgagaaacgatagttcaacaggggaggctggttcaaccgatcttgaggccggttaaaccgcaattcacctattcaactgcgaacttaaatgaaactactcagatctaccaacaataaatgcagcggaagagttggattaaaaccaactagatggatcagagatctaagatgatgagagacaaacacgatttttatcgaggttcggtcacaccaccaaggtgccctactttctcgttaaggtgcccacaaagagctaggtatctttcaaccctaatcctcaccgaccacaaagatccaagag

SEQ ID NO: 141472 - DNA, 594 bp, Zea Mays
acagcacagagattcctcatcaatcaacaccgtcttccaggctactgcaccgcagttatgcgaaagttgactatcctttcctgcgttcagcaccgatcagagcgacggcaaaaaaagaaaggcttattcgtacgtcttctggctgttatggccaagcagccacgaaaaagctaaccgccgcacgccgcttcgtatcgtcaacaacgcccgggccgtagcgagaggtcaatagatgcttagagggatggccaactgcaatgactaatccgccattagcagccccctgttccgtatggggccggtcagaagaaatttgtcaaacactagagtcatgcatttatggatattcctctaatcccagatgtcttttcggtcaggtcagcagcttggccttagcacatggaagaattagatgcatctgttaagaaacgcgtcatcgcgtgcatactcagacttgctcttccctgcaatgttgttatcgctgtccacacgccaacacttcattctttctggaaaaagtcgtctgaatctataagctcatcaaacgactcttgatttagggccgaatcttttagtcttcaacttgtatcaaca

SEQ ID NO: 141473 - DNA, 411 bp, Zea Mays
cggtggtagaattcgagccgatagcatttgcttgaatgtaagtgtggaaataagggggatagcgtttcccgctaatcttatagtaatgggtactcagggaatagatgtcatcctagggatgaattggctagataagtatcagacagttatcagttgtgataagaggacaatcaagttgatgtccccactaggagaggatgtgatgaccgagttagtcccgcctgagccgaagaagggaagttgttattagatggctgttgatagcagtgaagcagacccactagagatcatcaaggttgtgtccgagttcctagatgtgttcccaaaggacctaccaggtatgccacctgagcgaaaagtggagtttgccatagagcttcttcctggaaccgcccccttctttaagagagc

SEQ ID NO: 141474 - DNA, 454 bp, Zea Mays
gactcagtgttgggatttgcatccatggacaagaacagggattgtatggaagaactgctgtcctctttctctgatttgtttcaggaccctcagggactgccaccatcacgtcgccaagaccatcacatacggttgatggctggtacagaaccagtggctgtacgaccctaccgataccctcaactgcttaaagacgagattgagcgtcagtgtgatcagatgttggcacaaggcatcattcgagagtgcacatcagcattctcgtcacctttattattggtcaagaaggcagataaaacatggaggttttgcattgattaccgtgaattaaatgcaaaaacaatcaaggacaaatttccaattccggtggtggacgagctacttgatgaactccgaggtgcaagtttcttcacaaagctggatctccggagtggttatcatcaagtcaggatgc

SEQ ID NO: 141475 - DNA, 499 bp, Zea Mays
cagaggatgtgtgtcagggagctggaggtgacccggagggagaagaaggtggccaggagggaggtagtcgtgacccagagggaggccctcatgatggagtaccaagccaagctgagcaccctagaccagactctggaagcccagcgggcccagcaggtgaaggcggtggaaaggctgtagaaatggcaggtagagctcgagggcaaggccagcgacgctgcccttgccgaggaaaactaaatgagaaggagctatccttggacaggcgggagacggacctcgctaggcgagagacagatctcgccttcagggaataaatgctcacccagcgaggcgagttgctggccgagcacgagctcgaagcagaggaaaaagagaggaagctggaggagcagatccaccagttcaatgcgacgcaggcggcagcgggcccccaggcaatggaggccaccagaaaggccctcgaggatctccaggcagaacaccgtgccggggtcca

SEQ ID NO: 141476 - DNA, 567 bp, Zea Mays
aaaatctaaatttacgcttcacccaataggaagaatgatataattaagcagcaaaggcaatcctaatagtgtatcacgctagaatgatattgacacctcagctgctggatctattgcagcattaattcaaaatagaaagtgataataatactgtcccaaattaaaattcgttttagctaatcaatgagctcatacaatatttgtatatgttttatatgtgtataggttcatccttatttatttaaatagagactaaaatgactaatattttaggacgaccgaggtagtaccggccaatgcaagtcacatatgagtggaagtgtacgcatcaaattccaggacaaatatgcgtgttgtggtaaaaccgtacctgagcttgatcatttcgttgcctgtattaaacagttctagaaaattcagataaatacatccttatcctcatatactaatataaaatacgagtttcgtaaccctctccacagtagtgagggtttttcgcacgccaacgaaatataaaaaaatgcagctgtcagaattcaaattgtggcctacaagagagcacctgcc

SEQ ID NO: 141477 - DNA, 340 bp, Zea Mays
caagttcctaagattaaaaactctagtttgtcaataaaatggcatctaaatttgaaaatactaaacaagtaaaaattcaggttaaagtgagtatagtgtaaattgcatatgtgaataatcatgtctccatgggcagcataggcatgctcaataccctatgtatgatatgacctggatcagactacaggtccattcgtgcgatgttcaccatctcatgagctacttgaactttccaccacgaaatccgtcaatgcaaagagtagtatcttagcagtaactatcattacaaaggcttctattgaagagctgaatattgtggaaccaacctcaactacctaac

SEQ ID NO: 141478 - DNA, 428 bp, Zea Mays
cgcaggctcggtgctgtcagcaacagaggatgcaggggctccaccaaccacatgagactcaggaaagatcacctcaacgttatcagcaccacggcggctaccatggatctctgtacagatcaaaggaagggcaaaacaaccactttttggcaccacttaactcatacagagttacagaccatcggcagtcggcactcagcaccacttaactcattcagatgaagagcagaccagaaaacaggagagaaaagagggaaacttggggcgggggaccttcacttgaggagctcatgttgtggttgccttgccggagaacaggagccatcatcggtcaactggaataggatcagctgtcgactctggagcaggagaggagaggagaggtggagaggagatcaagagccgcagccaccggtcttggaacaggg

SEQ ID NO: 141479 - DNA, 767 bp, Zea Mays
cgaaggaatgcttggggaggcaccgggcaaaaagtgggaaaatggtggccggggccgatggcgatttctgtggaacgtcgtcgcttgtgccggtggagatgggggtggatgaaattcgttgaagctttcaggtgtcgggttttggagatcatcgtagctgcagtcaggaccgcgcaaggcgtggacgggtggtggactggctgcttgcgttctgtcgcaaaaatgtgatgtgtgtatgtgcatcggctgcattgctactagccacgcgtgtacgtgtggacgaggtccagatcgagatctgagcgccccctgagccctgaccactactcctgttgccaatcaacctcggaacttggaacggatgagagaagccgccggaaaagaaaaggaaaaaaaactatgacatcacatcacttcgacaccaacagatagaatccttgaattgcatggatagaacgtggttataatatatactagaacaggagacacccttacgggcaccctatcaatagagtactcaatatctacatttattattatagtataggaacaatgtttgtacacattagatcatgtggcacaagctgtaccggtcaccaatacacatgatcatctcaaaccatattgtaaccatttcttctactatacaaagctcatggtcaagttgcatatacatgtggccactctttggcagtcattaaagaatgccatgagctaagaagttcatccagattatgcaactaaaacctgaacgtggctgattattc

SEQ ID NO: 141480 - DNA, 393 bp, Zea Mays
cttcggttgtccaggattagacccagaattattccacctaatgaaatctctatctccaatagtagtctgcctctgacatgttctgccaccggctgttctacctctaaaccgtgggacctgtgttctgccatctacctgcccccaccggccgtacatgcctcatacatgtgggccccaccggccgtacaccctccaaaatcacccaagcagccccatgcaaaaatacgcacctcagtgtggcactagagctggaggagttagagtgagcaacacatgatccacgataatgcttataagccacgttccgtctctctcagtggccggtatgttactaatcaaacaaatcatctagccgactgaatacttataagccacgttccgtctctctcagtg

SEQ ID NO: 141481 - DNA, 425 bp, Zea Mays
cccctccgaacacggcttcaaaccccgcacgcactcgccaacgacaccaacttccggccaatcccccgcgatgccgactggtgaggtgtaacacccctagccgtcggcgagtcacgaggacgtgagaccggtcttccccgcggtacgtcaaggcaaggagccccaagaacgggacccgggtatggaacatgtaagtggttgtggatttgtgttatttcttgatctctagatctcagtttgttacaagtacttaaagctatctaatgaccggcctaatcctccccctgttggaaccagaccactgacacatggcgtgtctgtcaggtcgtccgcacacacggcgcgcccacccataccgtcggaccgcgacacacgcgcccacacacatatcagcgggctttagatctcttgggtcaacactcccc

SEQ ID NO: 141482 - DNA, 574 bp, Zea Mays
cgcttctgcagccgccgcgatgtataaatacaatggctccccaagttctggagctaccagtattggtagggacactaggtgctgcttcaactcttggaaggcttgttccgcctcttcagtccaagagaatgggccggatttccgcaacagcttgaagaagggtagcgccctctcagtcagcctttaatgaagcggctaagggcagctaatgaccccgtaagcttctggacgtccttgatacgggccggaggcctcatcgcctcaatcactttgatcttctccatgtttgcttcaatgccccggtgcgaaaccaggaaccccagcaacttccttgcggagacaccaaagacgcacttgtccgggttcagcttcgtgcatgttgcccgcagcttgtcgaagaccagtgttaagtcttccactagggtcgaccctctcttagtcttgaccacgatttcatcgacgtatacctctactatgtccctaatcaggtccccaaaagtcttactcatcgcccgcacaaatgtcggcacgacttttttttcagatcgtaaggcattacgacatagcagtaaag

SEQ ID NO: 141483 - DNA, 465 bp, Zea Mays
tcatagccagaacaactactggctgccgctgaacatcaccaaaaaaactgaaacggagcagggcattggttcatcgaggagtgcagtgcgtatgggaaagggaaggcaaaagcttcgaattatatttcaacaggttagctggctccatgaattgaaacaccgcaggttattaggtcgccatatatatgtaattatgtatggcatttaacagtaagtcttatcgaacgcagacgtaccccagccatgttgctgcatgcaccatgcagtacgcgcacgtaccgtcgtcgtcaaccagggcctgcacgcgcacgttacgccgtcccctctctccccctgccggcgggcgggatacgacacagctagtagtgctatagcctgcatgcatgagcgcgaggctgtgactgtgagccaccgcatctgcatagtgccgatcaccaacttggcacagctaggcgctagcgcgca

SEQ ID NO: 141484 - DNA, 520 bp, Zea Mays
gcacaaactgtcaccactatgggaaggaccattcaaagtagcagaagtcactcggcctggatcatatcgtctcactcaaatggatggcacggaaattgggaactcgtggaacatagaacatctcagaaagttttacccctagctatatctcaaaagctattgggacgacaatgtattctataaactgggaaatatatcatcaataaaaagacttcaaaggcactcaaattgtttactgtcaacctgcttgcttacttaactcggggtgaccactataccctactaacggagcaatcggcttaagtcggcaacgacttaaggcggtgtgacatgctcatgcttacttaactcggggtgaccactataccctactaacggagcaatcaaaggcggtgtgacatgctcacgcttacttaactcggggtgaccactataccctactaatggagccatcagcttaagtcggcaacggcttaaggcggtgtgacatgctcacgcttatttaactcggggtgaccac

SEQ ID NO: 141485 - DNA, 330 bp, Zea Mays
ccggccttcctcctctctcatcgccagacggggcccacccgtcaggcatttcttcctcctcgcgccgcactcgcgcgcgcctcgcaccgctgccgaacccttgccagtcagccaagcccgaccccgcgccctcggccgaactggcccacgccctctcgtctcccttccagagccggaaactactgagctctccccctttctctcccccactctcgctcccattgatgaagccaccatcaatggctttgatggagctgctggcgccctttccctcccctggcgtcccttcccttcccctctctctctataaaaggccaagccgaacccctg

SEQ ID NO: 141486 - DNA, 296 bp, Zea Mays
cgagccacagcgggaccaacgatccgctgccaccgtggatgtgagagagaagatggagtccaaacgccaagtctctaggaatagagttcgaaggtgcgtcgggcttgatgcagtttaggatagagttcaccgctgcagctgttttcaaactccaaaatgccaccaaggcggtagagttcagcgtggagttcgtcagtgccgatagcctgaggtctttagtactagcgctgacctggaatccaggcccatgaatatgatttggtggcgtggggtttggaagatgaacgtgagtgacg

SEQ ID NO: 141487 - DNA, 683 bp, Zea Mays
tggcactatacgcgatccatggagctagacgttgaaggagttgacgaatgactggccgccccagcatgggctcacccgcgcgctgaaaaggtgcttctagagcttctagtgggggccatgctgaggtaggcctcacacaacatgatgaagcatgctatgtgaaggatggtgtttgggtggagattttgcagctctagctcgtagtggaacaagatcccctaaacaaacggatgcagggggaacccggagccacgctcataaaaggagacgagaaccacctcctcctcgtcccgcgcgtcggagcatcgcctccttcgccaagatgccacccagaaaccgccctttcctctctagatctttgaatcgactatgagtcagggagcatgtgagaaaggagtccatggggaccaaaagggggtgcaagcgaagaaggaagacgaacaggggagcgcaggaaggcttcaaaggaaagggagaaggaaatgcctgggcatgagattgcaataagcgtaaccaaacacaggcaccctcccactctgttttatgtgcaggagaaggaagcccaagcggtgcttggaaggtgggcccacacaaaccactcacaaagatccatcgctccggggtaacattgcctcagaaaccgggcgagagattgtgcattttgcaagaaaccaatcgcctcg

SEQ ID NO: 141488 - DNA, 384 bp, Zea Mays
ctggaagacctcatatgcaaatctcaaggccgagacccagagacagcaaaacttgcggaaagggcctgcaaggaacaactcccggacctcaggacagatgaacaaggagcccattggttcaaaaatcgtctgtgtgtaccgaaaggggaagcccgagaagtcctgctcaaagaagctcacaactcagcctacttcatccacccagggactaccaagatgtacctagacctcaaaaccagatactggtggaaagggatgaagaaagaaatagctcagtatgtggcccggtgtgacatctgccaacgaacgaaggccgagcaccaaaaacctgcaggcctattgcaacccctcccgatacctgaatggaagtgggaagaaataggc

SEQ ID NO: 141489 - DNA, 350 bp, Zea Mays
attgaggagcaacacaatatttgcaaaaaaagaaatcttttaaaaaaatatcatacattgtccacgtctcgcttggtaatcatcaaacatttggttagctttggtgtccctgaagttactccattgatttgatgattgcacattggtaatcatactcactttactttgaacatcatgagattcaacaaatattacttgatcaacttggcctaaaagtaaatcatccatatctctttgcctatctcttacaaagttgtgcaatatgcaacaagcattgatgatcctaatctgattttgtaagtcaaaatatgagtttttccttaatatagcccacctcatcttcaatagcc

SEQ ID NO: 141490 - DNA, 375 bp, Zea Mays
accacgtctccttgctctctgccatccgcagcgggtagcacataagctccagaaatacccgcagaagaggaagctctcggagtgaaactaacagaagaaccccactgagtcgccgggtgaggcagacgcggagctccaaactgagacggcataggagtagacggtgcaggagtaggcgcggccagatactgagaaaaaccctgcatcggcacgaactgagaagtcccaggcacatagagctgctgcggaggaagaggaactgaaaattgctgctcagcacttgacatcatgttgatagtgccctgagaagaggaggaagtcaccgggtcccatctaagcttcccattaggattcctcctacacaccacatccttg

SEQ ID NO: 141491 - DNA, 332 bp, Zea Mays
ccgagaatgacaacctatctgtcgacggacatggtggatggccgtactgacctggaattgctgcgccaaacaattcgtttttttagaaagttcatatggtaaactattggagggggtaaattaaggttggtgcttattttgttaacttgtctctggtttagcaagtaaattatacatcagagtcctgaagattttctaattactaaaaactactggcgaggaagataaaaataaagccctctatttattttgttcatcgatcacttggcataatcatgcattgacttcccaaatgatttttaaggagggttttggagacgttttgagtgtat

SEQ ID NO: 141492 - DNA, 630 bp, Zea Mays
cagaccactggatctagatcatgcggcccataatcgccctaagcatccgtcgttcgatccacacgaacgaccctgatctaatcaacgaatcggtacgttcattctaatctgcgccgttccttttcaatccaacgtctcacggttcgtcttctctccctcataaccctcagacggcggtcggaccaggtgaccaagcaggccacggcggcggcattgatggaaagcgcccatcgaagtccgagctcccatcggtcaccactgtcaaattgaacggagctacacggtgtgcgcggcatcacggtcacaatggatgtattcttaccggcattaaggtgcggatgaagcttggccacggcgcacagcgaagcctgggtgacggcgaagaatcgtggtcaccgggatctcccttcctccctgccaccgccccccgacgcgatccggatgcatgacatgagcctcctgaccgcgcaccaacccccgatggagaacacccgtggtgaatccatgcggcggcatcactcaaatctctctgtgcttcgttaatggcggacgcaattagaaggtggtggtgaggaagcaacggtggccggtcctggcggtgattgtggtcgaggctcggagtggatgagg

SEQ ID NO: 141493 - DNA, 817 bp, Zea Mays
cgctactaacaatgatatttttgtggcggcttcgaccgtggctgctgatgacgattcgtttggctctgtgtctaagtgttttgagtctgatgattctgggagtttgattgcgtggacggaggagtcttcagatgaggacttggattattttgcagcgttggatgtggctgcagcggagccttcgccgcgcgcggagggttccgaggaacccccgggcgcgaatactgggtataggcggcgaagggcggtggcgaagcggagagtgagtgaattgtcgcgaagtggtaggcgttatcgtagcgaggtggagagaggtcgtcttcgcgtggacgggactggtaagcgagaattgttgtcctcgccgattggggtgagtgtaggtgaaggggagctgcgaaatctgtttgagggtgaggaagtaaggataatgctattcaactacagggagatgggtatcatcccgaaggttgagccaatgtaatatatgatgccctcgctgtgtgtatgtaatcgctatttgtatgataaggctgcgcgccttcgttgatccggccgcgcccgtgggcgacttctgcacggagagtctttttggaaaggcttcgattttgcgcacttattgtgcttagtccggctgtacccttaggtgacttttgcacggagagtctttctggaaaagacttcgattttgcgtacttattgtgcttagtccggctgcacccttaggcgacttttatgtggagtgtcgcacgcgagggtggccagtgctgcccctcacggtgacttcggtgtggtcgaatgtcgaagactgtcgatgtgg

SEQ ID NO: 141494 - DNA, 313 bp, Zea Mays
gttaggaaagcataggtgtatatatgtatgtccactttattatgtagaatagaagaggcctttaaagcatagataggtttgggcaagaaagggtagggttaggaaatactccatccaagattgtggatcttgattacattgaagatctgtcttgaaccttatctttccttgatttgatgaggtcgatcatcttcgatcttcgttcttgaagttgttatccgaatttgggacatgtagttaaggtagattcttaggtaaacaaaataggttaataggtagttatgagttaaataagcttaagcagagtctgtcg

SEQ ID NO: 141495 - DNA, 275 bp, Zea Mays
ttctcactttcctctctatctgagaagatgtgttggttgtgttgagagtcagtgaagatgatcaattgtttagtgttatgaagatttccatatatcttttcttatgctgaaagattgtagagtcagacctgatatgtgtgtgctttctacagatgtttgagaacaggcgcataggtggaaggcatgctcagcaagagcagcaggcaccccaaaaggaggcacctcagcagcagttgccaccgccacccccgatgaccattgaacagatgttcctg

SEQ ID NO: 141496 - DNA, 510 bp, Zea Mays
gaagacgttgctggagacagtcttagtgcggtgcagaggagtagccgtgttgatcacgttaagaagatgatgaactaagcaatagtgccacttacgtacactccctcaaaacgtgattgtcggtattcacctaagcaagtaaactcgaagcctcctctttcagtggtcatgcacacaagaaactcgaatggaaaacttggctaacggtagaaatgcaggcaaaccaagctgatgaatgaatgacaagatgaggctttcatattgaagctaggaaaacgagtgggtgcgaggagaatcgagcagatagaagagatcaagagatgtgggaaactcccgtggctccaacaattacggcacgagatcatcaagagacggtaaactcctgtaactctacgagttatgatgaaagatcaatagacggcaaacttccataactccacatgcagtactttaagtggcaaaacatcgacacgtcgcgctacactcgtgtcttgccatgtcgcaccacag

SEQ ID NO: 141497 - DNA, 559 bp, Zea Mays
attatattctattattgaaagaggggaaaaggaatttcgaaattaaaaaaaatcacatcgctcgcttagcctagctatcccacgtgaacctcaccctctctcctaacgctcactctcacttgcacattgacccacctcgtcagcccccacctttcttctcctgtccgttcttgctccaggaaatgagacgccaccacccgcaccttctctctccttgcttctcccacccggcctctctctctcctcgcttcccctttctctcccaggcgcgccgccaggagctcctgcagcccaccagtctagccgccaggaccccgtcgcgtctccctgccttctcccacggccgagcagccggccggacccaagcgccccttcgcctgcacgcgccccgatgcccgctcgcctgcacacccgacccggcccctgctagagaccgacgcaggccgagccaagcgccatgagcatcgcgccctgcaccgcgcgaccccgccaggaacctgcatgtatccaagctcaagcactgaccgcgcgaagcccaaatccgagcgcccgacacgac

SEQ ID NO: 141498 - DNA, 386 bp, Zea Mays
ggatggtggcccttctgctcgtgctgctgaagaagtgcaagtggaactttgtactgtagctgaccccaatgggtgtgaccctgctgatgctgaccccaatgggtgtgaccttgacgatgttgatcccaatgggtgcgatcctgccagagctgaccccaatgggtgtggtcctgccagagctgaccccaatgggggtgatcctgccagagctggcaccaatgggggtattgttcgtattgttgacaaggacgaagaagaagaggaagaaatccccttaattcggaagaatagtcggcattacatagtcagtggggagagtagtgatattccttctccagctttgtctgctctcgttggtctgcaagaattatatatccatagccaat

SEQ ID NO: 141499 - DNA, 412 bp, Zea Mays
catcttgtagagcggaaagccaattttcgagtattataaggtcgcaggtttggccagcatgcacagccaaaactttaaaaaaattatagtcatgagactgtttgaacaagtgctcaagaggtgtagagtaatcaagaggttttgtgggggtgcgattaatgaggtatgcagctatggaaaaggcctcatcccagaacttaagcagcatggatgcttgtgcaaggatagacaacccaacttcaacaatatgtctatgtttgtgttcagcagacccattttgctgatgcgcatgtgggcaggacacataatgaatgatgctgagtttagtaaagaaagaatttaggcattgatactcgcctccccagtctgtttgcatagcaataattttggtgtcaaataggcgctcaaccat

SEQ ID NO: 141500 - DNA, 514 bp, Zea Mays
gcaagatatgttactttgattgccatagatgttttctacccttcaatcaccccttcagaaggcagagaaaggagtttaggaagggcaccatcgtcatgaagggaccgcccaagcgacatagtgggatagaaattacagaagagcataggaaacttgtcctagacgagagtgggaaaaggtatcaaggttttggtgaggagcataactggactcacatatgtggcttatgggagcttccttatgctaagtcattgattttgattcacaacatcgacgtcatgcatcaagagagtaacttttgccaagcccttataaatacatgcatggatttccctgataaaacgaaagacaatgacaaggcacgcatggacctagctgtgatatgtgatcatccaacccaagtgcttagagaaattggaggcaaaccaaaagctgactattatctgaaacctaagcaacgaaaagaagtgatgaagtggataaaggatattaaattccccgatggttatgctgc

SEQ ID NO: 141501 - DNA, 345 bp, Zea Mays
catagatctcaagctttgtagactccactttgaagacaatttaatatgtgtttagttgagtaagtggaagtcgattacctataaattgggtgggtggaccatcttgagatctccaatagaccatgaattattgtagtgttgagacaaattgtccaatttaggttatgtgaagcgtagggtctaggatacaaacaataatgaagtcattaagtggaagtgcaccaagcagttggtgtgacaacatcatgtggagggatgaccctacccatccttgcaccataacatactaacaataggaaattgtcactaatatttaccaaaaatatgtattttccataatctaac

SEQ ID NO: 141502 - DNA, 450 bp, Zea Mays
tgccccttcccgtctgcccttcctgtgttagtctagaatcttgcgttatgcttgctcacctgactggatctgctcgggctctataactcgttgcgtcattccgtgcaccacgtgctctaattcactaggttttactagttcggatgtgattgttccggaaaggaattttgctgttatccgatttcgttgggggttaaagttgggagatttggtggtacaagggactgcgagcggaagcgtggaattcttgctacgcaggtcgactgcatcccttcaggttgcagcagtgcgagccttttggacactttctgtagtaacaagcatggctaggggataattctgcttagattgcctctacttctcaagcgtgtaagactgtctaatccccagagcagtgctgaaatattgggacttgtatgatctattggaagaaagttgtgggagtcttta

SEQ ID NO: 141503 - DNA, 632 bp, Zea Mays
tgaataaatttagagaatctctcatgcctatcgtgttttgcctctttataaagagactaaagtatggtgtcatctgctatatgcaaacaatgtgatgctctactttagttaccctaaagtcccgctcaagtcttcctctcaaattgtgctcaaagaaatactattggatcagaaagatgatttggatatcatgctctgaaatctataaggttcaaaagatctctgttaaggaatataacacctgtaaactcttgaagtatgatgaagctagaaaccatccttgctccttaactaatcttatcttggaaatcagaaagttgtgttagctctttatcttaatgtcatacaagcctcttatgtggtctgtctcactaactcttttaccctccgactagataatgaaccccaatggaaaggaagtaaataatgccaacgacaatactcctatattaacgactataaatgagaaaaatgaatcacagagatattttggaatgaagaacaacaaaagcaatagaaaaatgttttgatacatgattagtccacctcaaccacaagcaaaagccacaaaacacatggatacccaaacagaagaatcaagtcaggctcagctatatgagatacaaacaccc

SEQ ID NO: 141504 - DNA, 377 bp, Zea Mays
atccatgaacatggcatagcgatagaccctgaccaaattaagtctattcggaatgtgggacctccgacctgtaaggtcgaagtgcagaagtttctcggcaaggtgaattatttacgaaggtttatttctaacctagccgggaagattgatgccttcacccctatccttcggcttaagaatgatgtcgaattcgcttggggggcagagcaacaggaaacatttgatctcattaaaaaatacttgtcttcagctcccgtattaaaagcaccacgagcaggagtaccattccgattatacattgcagctgaagataaggtcattggggctgttctgacacaagaaactgaaggaaaggagcatgtggtgacatatctaag

SEQ ID NO: 141505 - DNA, 766 bp, Zea Mays
cgttgccccgagcgtccctcttttctctctctgcgccgtgggccagccttgtcagctccgccctctccgcgcgtcgccgtggaccggcgcatgcgcactcgcgcacgtcgtcgggtttctctgccacgacgcccgcccacgcacccaactctcttcttatagccccgccggtgccccgtgcaaacccctctcctcatttcgcacaccctcaccctctctcgcgctctgctctcaccgctagccgccgtcggagacccacgcccacgtccccggccatccagctcgctggagtccgcaccgagcctccccgagctccgccccgaggtgagacacccgtccctgtgcccaatttcccttattgtgccctgtgctcggccaatttcactgttgctggtgttcggccgtggtggtccgccgtgctcgcacggtgaccggccgattatgcccggtttggttcccaagagttagtccctgagatgtccctgcctctgctgaagttagccagagccttagcacgccttaagccccttccccatggtcgaaatggctcaccggagtttctccgggcccgctcgaggccacctcaccgccgctctcccctctctgcccgtgaattcatggccccttcctcgccatcgagtacgccgtggcaccctcatcccctctacccaacttcggcgaccccggagccaccctagctcgcgcccgcctcaactccggtgacttcaccgccgcggagaggagcaacgccgcccgcagccatctg

SEQ ID NO: 141506 - DNA, 419 bp, Zea Mays
gactaattccgtggggactgcgggttcattatgcaaaaactcagggaccattttacaaggcagtcgcaccgaaggggtatgattgaatgtcgaccgtccgatcagcatctgacctcctagattagatctgccctgatctaaaccggtatatattcatatccctccgatcaatgaccgacgacgcggatttaaaatactccaacccatcccagaattacccgatcgagatcaaacggctcataagcagactggacaaaccggcatccaaatctaatcggggcgcccacgatccaacggctcacacactcccctccccaaccagcctgtcgaccatggtggcgcggagcacaccgcggcggagctcaccagcgatcatggccgaacagcacccaagcacccaaatcacccacaaaaacagc

SEQ ID NO: 141507 - DNA, 489 bp, Zea Mays
ggggtggagccccgagcaattgagcgctggagggaggaaggtaggtaatctcgtgagtccacagcgcaaacggtcgtgcccgtcgaatgccaggccgagtccatagaggtcaagaaaaagaagaagaagctctagcgttcgtcggacatgtagccagtaatcgaggccaagctgaacccagatgatgacgtggttgatgctggtttggaggatgtcgtggaaggtggacatggggtgaaaacgactaggtttgtggtggatgtggaagatgaggaggaggaagaggtacttcccttggttcggcgtgaacggcgctccaaggctcggagtaatacttcgagtcttgctgcccagctaggatggtggatatttagggtttatctatgtcggctgtcgatggtatacttgaagagggcgttcatgaggagctactgcttgagttacctgaaatcaatgttattgatgtctgcatagattacccggatgaag

SEQ ID NO: 141508 - DNA, 375 bp, Zea Mays
ggctcgttggctggggtgtttggcgaggtgagcagcaatcctagttgtgtcaaagacatagtgggctcggcccaactcgattgcaagaaatttaaggctttaagaccaatcagcggttgatcacccaactgtagccaaagggatgaaaggaagccgttttagtcccacatcggcagcgaaacagaggccgtagagcaaggcagtgagataaaacagtgagcaggtgcaccgtacttagcatgatccttcaggcagttaaagggatatgatgagtggtaaaaactcggtttttttattccgagaggggtgcctgccccaaataagcctgttacgacaacatggcgctcacattttttaccatctgatcccgaaact

SEQ ID NO: 141509 - DNA, 389 bp, Zea Mays
ctagggtttcagttgtatgccctaaaaggccaggggtgcctcctttatatagccccaatcactagagagaaattagggatataatcttgaaaccaatctgcccagagctggttgaactaccccgaagaccagttgaacctcttttgaccaaagccagatccagttcaacttgccggatcccggttgaaccttggtacaatgctggttgaacatgccccaaagaccgattgaacctctcttgactagagtcgaatctagttcaagtgaccagttcaacttgcctaaccctgattgaacctgggtacaaggccagttgaaccaaggttttcttcgttttgacttggactttttcgagagcttccctatgacttagataaacattgttagca

SEQ ID NO: 141510 - DNA, 403 bp, Zea Mays
aattgatggcatgggcaccttctcccttctagccaacgatgagggcgcgtcctccctgcgaggcaatggcgtggacgcctcttccctgcgagaagatgttgatggcaccatctccatgcgagcaaatgttgagggcgcctcctcactgcgaggcaatggcgtggacgcgtcctccctgcaagcagacgtcgagggagcctcctccctgggatgcgacgaccaggacgcctcctccctacgtggcctatgcgtcgacagttcttctctacaactcgtctcagccatccctgggtaaatttattcataaattttctacagttaacaacacatacatattgtcaccattttctacagttaacaacaccattgatgctattttgttgaattttagtgctcaaatgtt

SEQ ID NO: 141511 - DNA, 602 bp, Zea Mays
ctggatcagtattagggttgtatggttctggaggaggagagagttcagccacaccaaaatataagtttttgtcagactcgaagctaaaataattacgaagctaaaacatgacaaatgtacctatacgcattttgcgctcagcggtttcttgagcttttctcacttcttctgaggcaagatgatattcttcttcgctttgtcagataccttcgtcggctatctcttaaccattgttcaaccaaacttcggaataaaatttcccgctaagggcagtagcttcggctgaaggcactttgatgttagtcgttgaaactgagaagtctggctaaattacagcattcgcatgttcacaaccagctttttcaagcaaagatactgctccccgagcaccgacacaggcacaaaaatccccctgctagtgagaacttcgtcaaatgcctcgatttcgccctaaatccatttgatcacaccctcaggatcaccacgaatgacattccactcagccgagaacacaccaacactagtaaaagcatttttagcttgtctgagcactgcatagcaatgttatagcattcctatttcacctgtcgaagctctttaac

SEQ ID NO: 141512 - DNA, 586 bp, Zea Mays
ctttttttcaccttaagaatcataccctggccatattaagcttaagggagaaaggaaatgccaaaaccctaacaaccttttctttagagcaatggagcactgaaaagaaactcagtggaaagtccaagtacatcacattatcatgatttggacaaattaacaaagttttagtacactaaataacctacaaaatatagtaagaaaatttacccaaaaatgttttgcaaaatccttaaacaagccactcaagtggtgacttcaaataaaaatcaggatttcagaattctgaaatccaaccctccaacaaagatcaaccgcgttcatcttgttccaaaactcaaaaccacatggtccaaataacaaaaatggtgccaaaatatcctaggaacactctggtgaagtttgaaatcaaaccaaaatcgtttgacacgatttggcttggctttggtctcgggttctagctgggcgacatacccaacttcacctcctcgtaactcgccaacccgagatcaaatccacttgagcactgcatgagaaacaaagggtaagcgacaaggaagatatcttgtgcagggatattgggtag

SEQ ID NO: 141513 - DNA, 541 bp, Zea Mays
ctggaacacccctcggttcgctcctaatccctctagtccgccctgtccgcgctcaccggatatcttcctgtgtagccgaagctccgccaccatcgccccgtcgcgtccctgcgtcaccgttgttgccccgtgactccagtgcttcccctcgaggtgagcaaccttcccgtgccctttatttggttgttactgccctggttagcgcgtgattgttcgcgagagttgccccgcgccgccgttagcccgtctcgccgtgtgcagcgcccttaggtgctcccgcgccagcgtgatgcctatggctgagtccgccagaccgccctgaatgcgcctgagctagtccccaagcctctggaaccccgccatggccagtcccctcgtctccggcgagccctcgcctcaggaccgagcgacgccaccatgtttaggtccagccccgaccgttagatctcgggtgcccgtccgagatcgggcggtttaggtttcatcagtgtggatctggtcacagccctctgatctggatccgactgctctcccctcttcg

SEQ ID NO: 141514 - DNA, 421 bp, Zea Mays
gtgcggattcttcccggaccacccgcatcgcgggcaatctggaggagaaataggaactcgcgctcgtcgccttcctttgggcaaatgtcaatgttttcgcatgggtaccgtcgcagatgccttggatcccctgggaggtgattgagcaccatctgaagatccaccctgatgccaaaccggtgagtcaaaaacctcgcagacagtccgttgagcggcacgacttcatccgtgaggaggtccggaagctgctaaacgctagcttcatcaaagaggttcatcacgcagtgtggttggccaacccagtcacgttccaaaggcaaacgggaagcttcggatgtgcatcgactacaccagccttaataaggcttgtcccaaggacccgtatcctattccacgcatagatctgatcatggactctact

SEQ ID NO: 141515 - DNA, 701 bp, Zea Mays
ggggaggcaagctgcatgtggcacaggggccttgtcatcctgaagctcaatttcaatggattcataaccatagtcatcagcttctccctccttttctcgtctgcctttatgtaaaaccattcgcttttgcaatcggtcggccacttggtacgatagctgagaaccggagccttcgtatccttccgatacgcaaagttgtagcagccgaagttctcatgaagaccatctactcttgccttcgtttggtagtgcagctcgtgcacccggcagacagcttcggcattaggactcataccctggcttcggagggcccatatgtagatactaagtctagcaattacgttgggtgtcagctggtgaaagtatagctcaaaaagtttcaaaacttccccaatcatctcatttagtgggaaacgaagtcctgccctgaagaagcttttaaaactacgacttcatcgtcttttggatctggaatcacctcttccccagcaaatcggacaagtttgctcttggcctccccaaagtagcccaatttcttcgtcataaccatgtcatctgctgtcacagtagatttaccaaattcaatgtgactgggtttcgctgggctcagaatagtgtaatccacttcatgttcgttctcactccctccaattgtgatttgtttagcttcagcagtcaaagtacctttggcaaaaggctcc

SEQ ID NO: 141516 - DNA, 378 bp, Zea Mays
aatgattcatatagtacaaaataacaataggaaggagtatactatactaatatttgcaggagtaaacaagaagcacaaaggaccacaagctacatacatgcatgcactatatattagttaaattagttagaacttcctggaaacgtcgtgggagctagctgcaatggatctatctcgttccggtagcctatagccattagctgatgtctcaaagtcagaagacatggaccatttaccgttgcattgtattattctggccgagaaatattgaccatcgcaatcgcaagcatgcatttttcactgtcgtcgtcgtttactacttctctctcgatccataatgaaataaagctgacaattagcttgcaccatatattctac

SEQ ID NO: 141517 - DNA, 715 bp, Zea Mays
aagaggaaaagggcagtggccattgggccactataaggtccatacgaatcgagcagcccatcagtccaaccaatcgcccttatccttatcctcttctttctgcttggtctcatatgtaagggtaacaagttgcagctcctagtggcggcggcgacagcaatgcctctccaccctaggcagcatgccttccacacgacatgggcagacgcaatgaccgaggctactactccactctttcaaatacggtcatgtatctcttttccatggatgtgcaacgcatacaaactcatatgctctccctgattcactattccagtcaagaaaacaatcggtctgttcaatttcggggggcgttggtcctcatcaccttccttttccatcatgtggtggtgtcattcattgatctggtgccctgtattgctgtagattaagagggtgacagtgtatttgcgtgtggcgtctgctagtgatgtttggaggtcgtgcatatactagcgtggagttgtttcttgtgatatttctactactcgcgcaaactgacaaactagtgatcgtgtgtgtgcttgtgtggtactgcacgatttttctggttggcatagatcgtggcctgattcttgggatcttcgatgcataatattccgttgttcctctttggattgttgtcgtggacgtctccctcggctctagcagctgctttgtatctccatcaatctcc

SEQ ID NO: 141518 - DNA, 444 bp, Zea Mays
tgacaacttatagggtgctcatactctattgcacaagcttcaccaataacttatattacattagtacgcaaggtagacctactacctatatctaggattaagaatctaaattcgcgcactaaagcacgccacatgcaccccaacacactcatacactagtgcataagttagacctacaatctttatcatcctagtgtgcaaagttgagctaaaatctatatcgaggtctaaggatataccattgagagaaataaaagtcatgtcacatgcgtgtagggatggcaattttacccgcaagttcggatatccgccgaatatccgacccgtcggtttcgatttcgggtacaatatttcacccgcgtgtcttacccgtatccgacccgaggtaacatcgggtcgggttcggatactgtactttactcgcggccccccgcggatatccaa

SEQ ID NO: 141519 - DNA, 706 bp, Zea Mays
gcccaccttgaagagaaggcacttcttatcgacgcatatttgaatgagggctatcctcttacggtcattttcaaaccattcggtatctaaacccacgatgaggggcttaggctcctcgccgcggacatcccgcaggaagcgctctaccgtcatggttgcagatgtgactgcgacttggacctcacttttaccgactatgatcatcttgtgttggtccgtgaaacaggagggatcgctatggagcttgggcaatgagtcactttctgccatcacagcctttcttttgtcaataggacgtgggcggtttatttcttccgccacttcggtcccttgtttgccgtgaggctgcgagccctgaggttggtcctgcaacactatccccccatttggaggtgggaaagactttgttgatgttgaattccttggaggtgcccccagtatgcttggagaaggtgtggaggaatcggacccctgcttctcatgagtgacagcaggtggcatcgcttccttttcctttggagaagatgaagacaccatcagcactgttgacttggttggtggcgcctttctagcacagatgggccactcccccagtgtgatagggtggaacagcttaggcgtcatcatgaagctggagggcttggcgcccttgtacttggatgaatcaggagttgagttagtaggtgtagccttgtgccaatttgca

SEQ ID NO: 141520 - DNA, 498 bp, Zea Mays
attcccccaatagattatgaatgtctcaatcagtcgtacaccgttatatttatagagggaggtctgtaccctttcttaggtgaagtccaacaaaatcccacaagaaacctggataatctcgcaagaaaccaagactccagcctgaactgatataatttcacactatttgggctaaatgccgaccgtccggggcatggatcatccgctaacacgtcggatcgtctgggacatggactgtccgagctactatgtcagaatgtctgtgtggtaccagtgctgcaaaattaggtgtttaacagatgtcacgtccttttggtggaggtcatgaaccaaaaacacttgtaccatcaacatcttttgagaaataacagattttacaagtcgccttgctccttaaataagaacttagctcaagtcattggctctttcctttaaaccaaacaacatagtcatttaacaaaactccaacgcataaagatcgttttggatacatcttcg

SEQ ID NO: 141521 - DNA, 330 bp, Zea Mays
ggctactgcagaaggtgttgctggtagtgatccagctcttgtgggtagtgcaagctacaacccagcccccgagggtgttcaggtgtgctctctttcccatgcctccatggatgtccacgtcgggtcgtccccacctcgattcgatggagtgacggcagtacatgcttccactgttttaactggacaagttgccttagaggtcggcgagctagatgcaaggaacctattgtctgctggtggggctgaggtcaccccggatagtgctcttttcagatcgttcctgctgaccttccctcgtcgagccatgcctcagttcctcctgccctgggt

SEQ ID NO: 141522 - DNA, 962 bp, Zea Mays
gtggtctattgaccaccctgaccttgtgttgcactaaaccacactgacaagccatgtcacgggtagaggattgagcagcgaggatcataatctcggaggaaattttgccttccatggcaatgaaattccttcaggatgaacttcttgtgcatggtgttgatgtcgagaagccacattgttgttcgatgtgttgcagaactatggttgaggccatgtagaaggttgaggagtagttgcgacagcaagaaagcatggcccacatcgtgtagtgcatcagagatggtcttcatgcgttcctggtagtagtcattgatacaaaggtccccctacctcatagaggagaatttctcatgcaaaaagatgatgaggggctctttgttgagccaacagaggatctcgatggcaacctagagctggcacgacgattgcgccacaactaggtccctaatgtcggtggcgatggatctaacaggccaattttggacacaggaatcatccatcacccactggggaccattgtggtttgtcaatattgtcccgtcgatgtggccataaggccgaacttccccacagggccttaaagaaaggtgcccacttgtggaagtcctggtctcctagcttgaggacgtcatggagatgagagcggacatcgattgtcatgtagggagcgacaacagtcaacccagcaaggagatggcacatggcgccgatggtggaggaggaggtagtggagtcgatagatatcacgacaagaaggaagcacagaggcaagccgtcgtatgcatgcagaggagatcatggaaggggcatcttgatgtgcgtggccacaatgccatggaatcggtgatgtgggagagaagttaggaaaaacaaaggagtcgaaagaagacccaaaatcttgataccatgtacacaataaagagaatactgtatatatatagtcaggatacaactcagagaag

SEQ ID NO: 141523 - DNA, 317 bp, Zea Mays
tttacatatacatattgggctgtagccattcttttcaatgcaagcagtatccaacatggtacacagagcaagattttcatgctagggtttacctcgccgttgtcatgctcctgattgcggctcctctcgctgcgctgtggggtcttggcttttctgatgtggctcctactagtcacgacccctcactttgtggctctttgcccagacgctctctcgcttgctcaactatcattggccgctaggacgtggatgcacctggccatcacggcgcctgtgcgccagctgcgcccacacacgctcatccatgtgccagtgac

SEQ ID NO: 141524 - DNA, 459 bp, Zea Mays
ggggatataaggcggcttaccctaggctcttatgaaccctaacttggcacgaagaccaccattaatcgggttagggtgagggagaagcgctgtcaccaagagcaatgagagagggagcaagccagccgccgccgcggattctcgttgccaacccggctcgagctcccgcgtggctgcctgggggtggcctggccgcatagaagctgtgggaggggtcaatcgaagaggaaactggctgaagcatcactgattcatcgctggagtatcctcaccgccatggagacgcgcacaagcgtgggcaggaccgtccgcaccgtcaaccgaggcgagaacttccccaacatgcccgtcgtgatcttcgctaagtgttgcacgcttttccttaggagctgggactctggggggctagttgggcagtctccggcgaaagcgctgtcgtctgcgcgctgcgccaccgcg

SEQ ID NO: 141525 - DNA, 551 bp, Zea Mays
gcaaaaaactctaaaaaagctaaattgcaaaaaagttgacattaccgaacacttaacgactgacctcatagagaaggggtcgtatcccacgtgaacaggggccgaataccgccgggatcgtggctttgttcctcgtcacgagatatggcttcgtttgtcgtcgggagctgctggatcccgcatggcttcgtttctctctgagaatggactggatctctctgagaagaccacaaaacccgatgagagctggacgaggttgcatgcgctaccagatcatgccggatccaatcgtttattgcagaaactcggcatcgaagaggcggatctcgttgcttttcacgcgataaatgatgtcgtcgatgctagctgagaagagaacaaagagtgtgtgagtgaggagagctggaaaatgcatgaatgaggtccatatccatttaataacggatctagcaatcgggtcaaagggtctaaaactcattaactttttttggacactaaaagatgttttaacaataaatacatttctggactcctgagatcctctagttttt

SEQ ID NO: 141526 - DNA, 352 bp, Zea Mays
ggatgatataatctcacaagtttagagacctacatgtgcactttgggagtttagggaccgggatgatacattgctaaaagtttagggaccaccattgtatttactcaaacattaaaatatgcgttcggtcgattaagtgagtgtgaatgtggagtaaaaaactaaggttttaaccctcacttgtgctagaagggggaaacatgatgtatgatgtttgtggaactgtttaaattggtgctttacacagtagagattcctctcttaattcacttaagcatcgtcctttaaatggtacttgttggtcactcgttttttattactaaaggatatcaaaaacaaggcaacataagtt

SEQ ID NO: 141527 - DNA, 409 bp, Zea Mays
ctgaattggatgtcatctgcaaccggctgaactctgctttcctcctaccagtctgccccttctctgcttttgactgctagatgagtgacccacctgcacaccaaatatcttgttcgttgataggtgtgcccaattaatcctaaaaaacagcgaccacatattattccaacgcagcaaaagataccagtctgccatcacaacgacaaacacacatcgcaatcacaatcagctagataccacaacatcggcatcctcaccggcctacggcatgccgttccagtctcacaagtcacagctgcatcatccagccactacaaaactagccttcttttgacaccttccttcaagaagcagcacggaggaatatatgacattacagcacacaaattagaatcacgctgccgttacg

SEQ ID NO: 141528 - DNA, 397 bp, Zea Mays
ctgtccacggtgatagcgtgaactacggatgaaccgaggcgttcccagtgatcctatgtgttttagctcaattggccgggtcgagaagcatcaagagcacacaagagagctgaaacaagagcgaggagggcgtgatcggacctgtggagagctggccacagcgagctcacacactgcggtgttcttgacagatttgggggaaatcccaaattggggagctgtgggggacgattggaggtgagggctggttcactgggtgcacaactacttagcggagctcactagggcggcaatttataggttgcatcggcggtggtggctaattttggagaagacgcgcgacggccggagagaggggtggtcactggcgcaactaattcgtggctttcaccgtggc

SEQ ID NO: 141529 - DNA, 624 bp, Zea Mays
ggaaagatgaagaagaagaaagcagatgattggagaacaagtgaagagaatagatggggcaagcaggctatttatagaggcagggggtgaccttccacttcctacctcgctcgccgaacagtcacaggaattcaataagaaattcaagccatttgaaaatgagtcaggcaacaggtgtcgcttcgtgtaacacggcaccgattggacctaagtcaactgctcaagtaaatgattacacccctcggtcacatcaagttactactctaggatagtacggtaaacactctgcgtaccaagacaccctttaggcacacccattgggtgtgtcaccaagaattttcaaatattttctgaagaagtcatatccacaaaatatacgcaatgaatgtaccacaaaaggaggagatcggctgagatggaaggaagtccaaatgtggctactaaagtgcaagtctaatcaacagaagcattgaagcaaagagcggggtgatgtccagctgagagccatctgcctcaaccagccaggcatccaatctatcaccgatcaaattgatttcagacctaacaaggcatggacagataacatcgtttcaattcccaaagcacaattccattcaaagcttg

SEQ ID NO: 141530 - DNA, 935 bp, Zea Mays
gcagccattattactaagctcggcgatggagccaatacccttttctggaaggacagatggttggaggggagatgtattaaggacatagctcctgcattgtttgatttggtgcccttgcgtcttgccaacaaacggttggtcaaagatgctctgcctaatttccattggctctccgatgtgcaaggggcaatcttagtcagagtcattgctgaattcctggaactttgtgaagtgcttgatgtagttgtgctccagcctggaataagggatcgacatttatggaaattcaacgcttcaggtgattattcatctagttctgcttataatgctctcttccttggttcagttcagttcgaaccagcagagcgggtgtggaaatcttgggctcctgggaagtgcaagttctttttatggcttgtggaacataatagatgctggactgctgacaggctcagaaaaagagggctagaccgaccagagcagtgccccttgtgcgaccaagaggctaaaaccataaatcatttgctggtcaagtgtgtttttgctaagcagttctggtttgatttccttaattcattggggctgcgggatctgtatctagctcatgaggaatcctttgagtagtggtggaaatctagcagctctcgaacatcggatattgtgagaaaaggtttcaattctttagtgatcctaggtgcttggaccatttggaagcataggaatgggtgtgtttttgatggttgtaatcccagcttggtcacggcccttaggatagctagggaagaggcagtgctctggtccatgactggtgccaaggccttgtccttcctccaagtcgatgagttgctggcttaaaacagcagtgtgggtcgtgtttcctccatgttttagtcggtgatccgtagttagtctctagtggtgtgtgtgctgtattg

SEQ ID NO: 141531 - DNA, 385 bp, Zea Mays
caacagtctacgacgatatcgatggaagcttaatccagaaaaatgtgtctttggagtaccagcagggaagttgctcggattcattgtcagccaccgaggaattgaagctaacccggaaaaaatcgaggctatcatgagaatggaagcaccacgatcacagaagaaagtgcaaaggcttactggatgcatggcaaccttgagcaggttcatatcaaggctaggagaaaaggcttacccttctacaaattgctcaagaaggtggacaagttccagtggaccaagcacaggaagctctcgatgcactaaagaagttcttgactacgccaccagtgctaaagccgccacgtcgagccatgccagatcagccgatggaagatctgttgtt

SEQ ID NO: 141532 - DNA, 454 bp, Zea Mays
ggaggggtcaagagaaaaagggtcatcagtattctgagtaggcaagttgtctggtctgccaaggaagattaagagactttgaagaaggtaaagatagtgccggagctgaaggtatcggctcctaaacaatggaagctttccgaaaaaacctctgagaagacgaagacacaagatgtgccgaaactaactgcaagcccttcgtattctaccgcggaggtctcagaaatattgaaggtgatgactgagtccttcccattcacaccgctaagtcctctgggattggaactgacgagcctcttacagaaaaaggaagtctcttcggatgctgatggaagagatgggggccaaaagaagcgacgcatgatgaatatactgcaagcaattgagcaaaccccgcccccaactttggcagacaaagccgccaaaccgactgatcccgaagttgttgttgcag

SEQ ID NO: 141533 - DNA, 331 bp, Zea Mays
tgcacattgaattgctttcctgttccattttctttgtcactagttgcttgtcacaactacatcttaatttatggacgtggggcatataaaagaacttgcataataaggcttaacaatggatggttggattggttgggacgtgatcccagccagccgattccctgatcagactgcattagaaacattctccagtttctgaagcataggagctttctcttctcgagggtctgtagggcaacgtcctcattattatgcatttgctagttggggctaaattaaagatatcacaagcgaatgcatttcaaagctccaagcctccaactatcttagt

SEQ ID NO: 141534 - DNA, 659 bp, Zea Mays
actcaggctatcactgaactagaccgcgggttgattcgctaaaagctgaggggcgcttatgtaaaacgagccagcgaaggggtatcgctcacccaggaccgttcgatcgggactcgacgacccagattagacccacattacattgaaccggtacgcgatctgggcagttggatccgtgatccacgatccacattcactgagtctgcgatctaatcgccaccctttgatctaacgccaacggcatggatcgcgctggcgaagaggtatctgatctcgaccatctattttctaatccacggatgccctggcgtcttcaaccttacgccgcccatgcacagacgccgtgccctccccagtactctttctctctctcccgttggtcaactggcgtgcacaccacccggactagtacacgccaccgctgttctccggcggcgcaccaatctcggtccgtatctaaacttcgctcagggctactgctcctccacggaccgagcaaaagccatagaatggagaaaggaggaaattctgaggtagctactcaccgacaatcacgtggcgcggacacccaacaccggacgcacttgattctgcggcgtaaccccgacaccgacgagcaatccgatccccgcacagcaccgcagtccagcagtgccccg

SEQ ID NO: 141535 - DNA, 842 bp, Zea Mays
cagggagatggagatgtggaatcgagggtaggagagagaatttgacgccgcctctagcaatctacgcttgcgtggtggctcgggggtttgggaggacttcgcaggagcaggccagtggccgaccggtggacttggcatggtcgtcggtgcacgctcggaaccgcgcatgtccatggcgaggacgtttcttctcgctttgtcacaaccaccagaccgcatgaattcgtgggcaatctggtctaccgcctctgcgtcaggtatgacaccatgaattgattcgcctaacacgtagcagcatgtagcacctatctgcatttcctaaagtcactctggcaccgtgcggtactctcaccggcgaagtcgccgccatggtgggtctgggcgccaccgtggtgtgggtttcaggaagaagataacgtgatggccgtctgttccatggatgtgcggtcatgattaaatccctgagtcactacgccacaaccgttgatgctagattagacgcttgtgattggaacccgcataccccttcgggttttaaatctaggccgtggatctggttatcgacggcgagcgttcaaccgtggcgcgtaatgcctcgggccgttgatcttgatccaagggctgctagatcacaccacgttaatgaagtctcaatctaatccgcaccgctcaatcgtgatccaacagctctcatccgcccataccccttcgaccataagttttgctaaagacccccttgaaaataggagaaataacccgccgtccgcgcggggtgaatcctgagtcttggaacattttgtgagttaacccctgtatttctctgtttttgacgctcagtccag

SEQ ID NO: 141536 - DNA, 821 bp, Zea Mays
cacaagggtatgaaggtaatcacaaggggattaaccccacaaacctaattgggttctaacaccaccttagtctcaactctatcatgtatagatgttgagacaggagcgaaaatcggtgaagacactcgacgacagcaccttggtgaagatgtcgtcgaactatagcatggtcgggacgctgagaacccgaacatcaccgatgtcgacgcactcccgaacaaactgaaggtcgatctccacgtgcttcgtgcgctgatggtgtacgagatttgtggagaggtagatcgcgctaatgttgtcgcagtagtcgagggtggcgcgctggaggggactatggaactcctagagaagttggcgcagccaggaagcctcggccatgccattggcaacattgcgatactcggccacagtgctggagcgagagacgacgagctatcgcttgttggcctaggagacgaggttggcgcctaggaatatggcataaccagaactccaaccatctttgccatgtcagtgcacttttgaacccggttcatgcccccaaaaactcgatcccactctgtgatgtatgaatgtattagatgaaacttgatgtaaaaatgggatcgagttcttgggatttgtttgcgcgttgatccgggtccttgcgtttttctgtgatttattttgtgtgctatagttagatccggtactcgaacttcactaatagtgctcaatgcacttaaatctgagccgaatttgtgggaaaagagttagggtttgtgaaccctaatcctatctctgtttctatattcttcttttactattcttggccatggatt

SEQ ID NO: 141537 - DNA, 496 bp, Zea Mays
ttggggctcccgcaatttcatgtcaagattgatatattttggaaatcccatagcgaacaacttcgcttgttggcatgacatgatcttggtattcttgcatcttggtcaagaatcgaagacgagccaatgtgtcaacgcggttgttgcgaattgggggccaaaaacacaagttgcaaaggtccttgaattcgatccacgatagtgtgctcgtgtcatgttcgaataggtgatacgacttgtcaacctccaaggtgtgttagccatggaagaactactcacactacgtcaatcattcgtatgaaagaaattcaagcttgtggaagcacgacactgcatgggcagcggcaatgtagtccaccaaggccagcgataatgtgtcaaaccatcctagaatcagccaagacgatgttgggaactgaatttggtgcatgagaattgggcgagatatttttttctaggaagcgcaggggaactaagctttaaatatattagggaa

SEQ ID NO: 141538 - DNA, 669 bp, Zea Mays
gagaactgggcagctcttttcctctcctcaaacatctgaaacacagggtcaggttgccatccctgattgaccatgaaattcatctctaaattctggaaatggttattatttggatccccaacttgggcctaatgcggcaaatcagcaataccagggacagggtccacttgaagcgccgggccatcaacctcctgaggcccattgaatgcagcaatattgacagcaagcccatcccctggcaaaataggaccattctcaacaacatggccattctgtagaggtgcaacttgaccagcgccaaaggaactatccgacgacaagcctgagtgctgattactgagttgaagctcatccggttgaatgggttgcaaatcaggctgaaagggctgcagaatctgttgattgggttgaacattttcgatccactagtcccaatccccatgggcattgtcatcctgaagagccggcaaatcaccacccgcattccccgacgggaaatttaggtcaagcccaaccgggggcattggctgacccagaccgaagaaaaccaagggaagttgctgaccatcttccggggcaggaggaatagggtcctcatcctgagcctgcccgccaagcatgttttgctgaataatctcacactgaacagtccaagaatcaccaacgaag

SEQ ID NO: 141539 - DNA, 360 bp, Zea Mays
cggttctccgcgccgccgtgagccaccgtgctgtgggccgtcgtccccaggtccgctctcgtcctccttaccctcgtttcagcacccttgcatgctaaagatgcttatcggcccaaccaattgaactagaccacactagattatcgggaacacctcgggttgtcctcggtgttcgccgtcgtcatggacagagggattttgagctagaattgtgcaattgatggagggattagggtcgccaggggtagaatttggcgtcgaccaagtaagaagcctagtcgttgagcattttggccggtacaagttcgccagaggcatgctcgttgtcattcaccgtcgtggacttggcgctgtaaagaa

SEQ ID NO: 141540 - DNA, 334 bp, Zea Mays
tggctcgagtttctgcttctttggatgatgccaactcattgaattcctctcttagtgctcagcttgactctgaaagggtggctaatgaagtaagtttacttgactttctttgctgtatttttactgcctgctgggtgtttaagagctgattcttgtctataggaagaaaaacgtgcccttgcagcctctcgcgataaccttgataggttgtatcgcgacgccaacaattctttaactatcttggaaaggagccatcgttttaccatggtggatttggataatcaccgtcacaagctgcaagagtcccaggatgaaatcattcgccttaggcaat

SEQ ID NO: 141541 - DNA, 1037 bp, Zea Mays
gtggtacccatccctgaggctgacaaagctttggacgctcagaagtctgtcaatgttcgtccaaaacgttctcgccgagccgatcaagcctcttttcctgctgagggggagaaaaagaagaagagacgtcttcgtcggttgtctagcttagatcagggtgccggtccttctgctcctgttgctgaggaagtgcccatgcctaaatttacagaagctgatcccaatgggtgtgactcgtgtgacgctgaccccaatgggtgtgctgtccgtgttgttgatgaggatgatgaagaagaggacgaaatccctctgattcagaagaacagccggcgttacatagctagtggggaaagtagtagtgttccttctcctgccttgtctgccctcgttggtctgcaagaattatctctggcgaactttgatcaaactcttgaagatatggttccagaagatctgttgtcagaaccgaaagatggtggcgcgatggatgtttgtgttgatgtgctcgacgccgggttggggccatcccgggcagcttcccgcgcctcatcgaccttggagcgcggtcttgagggtcaggaagctagtttggattgccctgctgccatggaagtgactgagggaccttcagccttagaggtggctgctgcagagaactcgaccctcaaggatggtgctggcgcttacccagcccccgagggtgttgccggggatgattcggctcggatgggtagcgcaagctgcgacccagcccccgagggtgttgcgggagatgatccagctcggatgggtagcgcaagctatgacccagcccccgagggtgtccgagcgggttctccctcttgcacttccatggatgttcacgtaggatcttctcctccacactctggttgcatggtgatagcccaagcctttggtcaaggagtcgctttagaggccagcgttcccgacgatagagttttgggttctgctgatgacactgaattggttcctgctgattcgttgcaagttgctccaggtggtgatccttcaccgag

SEQ ID NO: 141542 - DNA, 755 bp, Zea Mays
ctgaagcaccaaaggtcgatggtctcagaggggggagcagagcaccggaggccggagcagccgcacatggaggtcggcgacgagtcggccgaaggccgtagcagccacacatggagatcgactacgcttcgacatcactccattgcgggatttttggtctttacaacgatgtcgtccacgtagacctccaagttacgtccgacttggtcggtgaagcagtggcacatgcgcctctggtacgtagctccaacgctcttcaagccgaacgacatggagacgtagcggaacatggcgaagagggtaatgaaggtggtggcatgttggtcggtctcatcatggcgatttggtggtagctcgagtatgcgtccaggaaggaaaggaactcacacccgatggtcgagtctatggcctgattgacacatgggagagggaagggtctttggggcatgctttattgagccctatttagtcgacgcacatcctccaattcccattcttcttcttaacaagcacatgattcgttatccacactaggtggtgtatttcccttatgaatcccaccgccacaatccttgctacctcttcgccaatggccttgcgcttttcttcatcaaaataacgaagccgctaggtgactggcctggccgtaggctagatatctagggagtgtttgtcgacctccctcgagattcctggcatatctgtggtcttccaggcaaaaacatcgcggttggcccggaggaaatcgataaggg

SEQ ID NO: 141543 - DNA, 376 bp, Zea Mays
gcggagggtcgcggggatcatggccgcagaaaatctgtgaggttatgtgtgggacggttttgcttttgctaatgggatggaggaaaaataatgtgtcgcatgcaatggctttggttctgcatgtcgtgcatgcggtggggcctaggtggtcttgttccagacgcatggctagaggaaaaacttggtcgggtggaaacttcatgcaaggtggtccccaagggccgtttccttttccctggttgcacggacgaacaactgcatcagtgctttcttcttccttgggaaaaagcagagaacgacatgggggagaaggagagggcatcagccatcggaaggctggggtggctagccgtgcccaggctgcaggggattttgt

SEQ ID NO: 141544 - DNA, 362 bp, Zea Mays
gcttattccttccagtaatgcaccattgtttctagagcttgctatggaattgcagcatggttctgatccacatgtgctattgcagcagcatgaccaggcattgttcaaggtacccatgacatccatgagtgatgcccatggagtgtttgatgcaatttctagccatgttctatgggatgatgagttaccgcaaggtcttcagttacataactgtttattgaaactagtagctcaaggagagtgtatggttggcgagacagacatgaatgctgagctatgtgatgtggtgagctgggatgaggaagtggctactttgagcaaatgcatgcaatctcggccactcaccgggggtgaagagtact

SEQ ID NO: 141545 - DNA, 840 bp, Zea Mays
tctcaatctaatttgtgtaaaattaggttgtactatagaaagataatattgcaacaaaaaagcctaatgaagttttatattttgtttcgtgacgtagatagtacaataggatgttcagatgggccatttttcatatataaaaaaggcacatgttaaattggccgcatacaaattgtaattgagggcacattttgattactgatagttctttcttttccttcttttttacttgaggttacgaagggtgcagggtgttctgcatgatagtatgtatttgctcattattatcaattcctttatattgtgaaatctgaaagaacatggaacctgaaattgttgtctggtggctgattttcattttcgaaggctggtacatagctctgttttgactccatacaccaaggtatttagacatccgggtcctcccttgaatccttactatcatggttatcttgtgtcgtctctagatcaaactgaattatgtctaatgcgtagaatcaaggcagccatcatccgtgggagtaagactctagccacataattgctttaatgatctagcttgctacataagatcgtgattgtcaagtcaatgaataataataaagtttatcttgcttttatatttataagatcaaacgccacaaatgatttgctttccgaaacaacggctgcaatatctcatcccctgactcatggcatcactgtaggttccttcgacgcagactgcacaatcataggtattcatccctcctcgaacaacctacctgcaccacatgactctgagagaatttctaaccaaggtagtgcagcagcaccaggtgtgtaattttcaaatcacac

SEQ ID NO: 141546 - DNA, 639 bp, Zea Mays
cacaatatcatttgaaaataaattcggcactaagttggattcaaaatttgaattggatttgaaaatagaaagggaaaggaagagaaaataaaaagaaaagaccaaaaaccccgtttgggccggctagacctaattcggcccatttcatctgtttgccccgcgcggccgagctcctaatacacccgcgcgcggccaacttacaggcggggcccaactgtcaacctcccgcgtgtccctttgctcactgcggattggggcccgctgtcaggtccatcttcaacaccagaagcttcggaacgagctcgggcgtgtggactccgtccatccgccccgtcaaccacatcccgagcatggcgggctacgcccagggatctcctccacgcggtcgtccctccatcacaactccctgtctcgattacagctgggccccgtgtcagaaccgtctccgcggatgtcgcgctcggggcaacgcacccccgctattaccgccgccaacggagcatgttgttgcggactgtattgggttattggaatcaaccgttttccccgggcgcggacttcctttggcggtgtataaaaccctggcatcgcctcgctcctcggttcatgtgcttcgtgaagaacccgggtgcagtgcaa

SEQ ID NO: 141547 - DNA, 574 bp, Zea Mays
cgggtgaggcgacaacaggcgagggttagcgagggcaggcgatcatgtggtggtacatggcggtggcagcaagcggcagccattgccgcgttgcaacggcataatgagacccagttagatagtgagagcaggtgacgtcatggtgccaaggtatgatcctaccgatagcctacccatctactggtgtggactacgaggcaaggtagcggcactgtgtgcaagatcctgatgaggctttatttgagtactctagtatccatcccgatccacatgtattgaggtgtattggggtgtaaagtatccagacaaagcatgaggcgacaagctgacaagtgacgaggaggtaaggtgacgctggtagcgggtgagttaggtcacccaattaatcattcgatggccgaaggagcgagcgaaccgtgagtgagctagcactagaggaaggaatcgaacggctcggatgggtagtgggttgagcagtggagcgtcgagaaaaaattagattaaaacctaaatttcattaaatttggcccaacttactatataaaaatttgataattttattgtatatctaaac

SEQ ID NO: 141548 - DNA, 304 bp, Zea Mays
ggcggcacatctgtcaagccgcgagactgaagctcctccagatcaggaagtcgcagcagcagtactacaagagaatcgggacacatgcacgaacaggctgcatttacaaggagacccgaggaagaagcttcccctgctcagtggccaaaatgaacagagtgctcactgccgacgacgacaagcgatggaattgggggctagcgctttgctcactgccttcgtgatgaccgtgcccacgctcgtcgtcatcctcctcggcgggagcactgctggcgcgccgctggtctaggttaggacagccatg

SEQ ID NO: 141549 - DNA, 434 bp, Zea Mays
tccgggattggagcaagatttcccctaggagctgaaggagaagccggtggagaagggagtgagacccacctccccacacctcaagagctgccattagatttagcccaagttctggccaaccaaacccgactcattgaagtcctcgccagaagtcttgagaacaagcgcccgaatggtggaagacctcaggacaggatgggagattttctaagactcaagcctcccacattcgctggatccagcaatccactcgacgctaatgactggctactcatgataaaaaggaagttagaagccatcggattccctaagaaccaacatgttcatctggctgctcatcaactttctgggatggccctatcctggtgggataccttcagcgttgccgtcagggatgctacctaggtagaatttgaagccgcttcccgagaaca

SEQ ID NO: 141550 - DNA, 632 bp, Zea Mays
cgcgcgggcgcaggggagcatgaacctgtcggcgacgtacgacagcaggacgcacgacgtggagagctcggtggtggccagaggcgacctgtggcgcgcggaggcgtcgcacagcagcagcagcagcgccggcgccggcggcaatggagccaataacaacctgttcctcgtgcagctcggtcctgtcctcttcgtccgcgacacgacgctactcttcccggtgcacctctccaagcggcacctcatctggtacggattcgagcgcaaggtgcgtgcatcgatcgatctcctgcagctagttgtgcaaaaaaaataaaaaaaaaaaccccaagcagaaacacaatggatgccctgactaattgagaggcgtacggttctggtcttcttgcagaacggagtgcactcggtctgccccgcgtactggtcggcccacaagagatggttcttcatgtccatgctatgcctgaacccgttcgcttttgtaaagtctaggcgatcgaccttgtgtccccacccagcctattttctgctacgtacttttagctttctctctcctgtccatatatatttcccgacttaaacatttttgttcgaacactgtcagtcgttcatggacatgcaattcccaaacg

SEQ ID NO: 141551 - DNA, 872 bp, Zea Mays
cctgtttgtatcattcaatcaattgatcacaactttggagtccatgatgttcgacatatagatatcagtggtgaataataatgtctgaatgcttaaaaattgtaaaggccggtgcttaatacaagtgcttcagaatattagaacctctcgatataaaatcgtacctgtggctatagtggcggacgggtataagtattgtcacaagcggatatttagcatagccgattcggaacggatccattgccatcgctagctcttactactacggtcctcgtcaatcctcatataagcataggctgatgcgtgcagcgtgctagtggaaggctagctgtctaaaattttcagttcaccatgaggtcaccggctgctccggggccttctcacgattccctcgactcatcaccgccggcgcctggttttcgtagttaccagcagacaaaactggcggagcttgatctggattcatccttgtcgccggccaccgcggcgccaggttcgcagcctactccatcggagtcgccgctgccagctccgacaccaacacctgcgcccgcggcgacagggctgctgataccaataccagcgcggccagtgcttgctccatattcccagccggcgtcttcatcgggttcacctgccgacaagtcagtggcgggcattgctgctggctcagctgctgcgggcgcccttctcatcgtgctactggtagcagttggtttgtatgtggcgtcgcctatttggaagaggcgcactgggcgtgaccgcaggggagcaggcagctccggtggcggcggtgcctcacaacatgaatcgcagaaacgccactctgctgttcaaatcgaggtcgaagtgacgccgccgccaacagcgtc

SEQ ID NO: 141552 - DNA, 358 bp, Zea Mays
ctacatagccggatcgtccgcgttgggctcgaaccatctgggcaagggttctagattgtctggcggtaccagggacgtcctcttaattaattcggctaataatgcaaccgatgcaactaattggagggcgcccataattaattacctgcgtaatcccagcattaggacagataggaatgtttggcgtacaactttcaaatatgttttagttgatgatgaactctagcgccaaagtatcggtgatgtccttcttagatgcttgggcccaaatgagtacatgaggggatttgtggtactcatcaatcggctccaaagatgaagtggctattgtgaagatctggcttctattggcctgata

SEQ ID NO: 141553 - DNA, 528 bp, Zea Mays
cagtcttactttaaagtactggcacgagggacacaaccgatcgttccaaaatcaacggatccggaccaatccatgcctaaacgattcgcgcgactaatctaagctgtccgagccgatcggacggccaggaggcttccttcaacctctagacacggacgacggtggaggaacgccccctacggctgcgcaactcgccagtgaagagtgccccaggggccggatgcccaatcctatgagagtacaggtgcaaaacgtggtacagacgctagcgaacaagatgggattttgttagcatcgaatcagtagcgtaatcctcccgccatggcaccatgcggccccgagatggcacatccaacacagcgagcaattgccgtagcaccgagccatcaccgtgcttgacgaggtgccacgaaggtctaccttgttcctgcgaagcgcctcgtccctctatactctctacttcttttctctgctacccttctcggctgttcagtctaccagctagatggaggtggtctaggaggcttt

SEQ ID NO: 141554 - DNA, 572 bp, Zea Mays
tgaaccgagttggggagaatgcaaaatttgagctcgctggtgatcgactgggagcaatactgggtgtggtggtgcgtgatgatgttgcgaagctagccgcatgctcaatttatagcgctcgcaagcggtggccggtgaatcgagcgataacgcgcggcggccgggaaagaaaaaggcactggcgcaagcgctaggtggcttctactgtggcggtctctccggcggtcacgggacgcccctagcgtgactatccgcgacgtggtaaagtgcccggacacgcggggcaagaccgagcgacggcggttcaccggcgaagttatccgcagtggccgtggcaacttggtacggtggtcgaacttgtttatggccggagttatcaacgacggtgatatttgtgtgaccctgagcgctatccaaaccatctgaacaccaatcgcggcgacgacggcacgaatcacggcggagggtcgtcggtggtgaggattccctgcgctggcgatctgatccatatggggtactgtaccatggcgatctccattcagtcgacctgacagagcctagtttagggccga

SEQ ID NO: 141555 - DNA, 483 bp, Zea Mays
caggcgagtgctaggggttctggggtctctggagttaggcatagagggagagaatgctacggcgaactcaatggcagggaagaggccatgaatccgtgggcagaaaggggagaacggcggggagaaggccttgggcggactagaggagctccggcgaggcatttcggccacgggcagggggcttaaggcgcgctaaggcctgggctagcttcagtagaggcagaggcaccttagggactaacgccggggaactaaaccgggctatatcggccggcgaccgcgtgagcacgacggaccgccacgaccgagcaccggcgaagccgaaattagccgagcacagagcgcaatagggaaaattgggcacgggcaaaggtgtctcacctcggggcgaagctcggagaggcttggcgcggtctccggcgagctggatggtcgggaacgcgggcgcgggtctccgacggcgtctggcggtgagggcagagc

SEQ ID NO: 141556 - DNA, 687 bp, Zea Mays
cttccccaggaggccgtgaggcttgcccgagcttgagccgaggaccagccccaccggaatagtgtaatcgcgctcgccggagttcgtgaacccgccggagcacgtggaccgggtaaccctctgcaccatttcttaattccttgcgcccatggcctctacatcacccaatggagctcctcatgcactttaattgaaccccaccgccgtggtttggccggagcaggagccaccgacgacctccgccgcctgcgctcgtggccagagcaactccgaccacccccgacgccgacccacacaccgacgtgaccgccgtgacctccccgacgtccctgaccaccccgccggaactctactgccgccggtaagcctcgccgccgtaatcgttgccgcggttactatttcagtcagccagggatcacgggttagatttaggctaagtccagggggttttgtgcaacgtcagtgactcatgcaaatagtagaccaagggctgttttgtgagagaaaagggggagaaaacccagggacttcagcgcaaatctgtatttcttttccatttcgaatttacttttcctttaaatattgcagagaaattaataaatgcataacttgaagaataatcatccaaaattagtcaaaccaattttgctagactttgtgaaatataaactatcaggaaaaaatgat

SEQ ID NO: 141557 - DNA, 386 bp, Zea Mays
tggcaaagtcactgtgtacggtcgcttctctgctccaaatcctatctttttgctgtgagttccaagtcgagatatggtcggggtagggagatagagaggggagaagtttgctgtgtcagctaggcccaaaccgagacaaaagtggtgtcaagtcgtgtctagcttcctagggtaggtgtcatctctttccagggtgttctagggtaaatttggcgccactttgtcaattgggtcgaagggttttgaaaattggattaaggtgaacatgtggaatctttgtgcaagggttagttttttgtacttaggcaaaaactgaatttttccttgtgctgaaccttaggtgagccttttaggacttttctgaaaactttttgggggtacttcct

SEQ ID NO: 141558 - DNA, 477 bp, Zea Mays
agagagtatggtaaagaccatttccctttcaatgatattttattcgataataaccatgatattgtttcggttcgagatgtagatagttcgagacttctttccactggaggatgatacttctctctttatgttgtgatgatggggaagatgtgggaggaaactttccatttctagggggtgatggagagggaggcggtggaggaggaggagaaggcgagtcatcttttctaggaggtgaatagggaggtggatctctaggtggagaaggtgcctacaagatgaagattctttatcgtcctcatcattagaaaacgactgttcgttaatcttaacgtagaatttacgttaggcaatagtagtaccttattgtgttaataagtgtcatgtcttacttgatggggtaattaatgggtatcttccatcaatgctgaacctgacacctctcaaggtgaatatggaggtggatctctaacaggc

SEQ ID NO: 141559 - DNA, 856 bp, Zea Mays
tgccttactaccttcgcaaaatccaaccatgaatatttacttttcaaggattccttgacatgtctgaactgtaaacagagtgctgctatattaacattggttttgaatatttgggcaggcatacattgttaaaaaatgcaacactgaatgacactcaaatagatgaaaagacaaggtcagttcagagtacagcaagaaggggttatccacactttggtaatcgaggcatctcatagctcagggatggaattagaccgcatgaacaagcggacagttgaaagggctaaaatggattgattccaaattgatagacaactacctcctagattacaccaacaaaacaaaattgatgcaaatggtagccatagacctatatataaatatgaaaccaggtttccagtcatagctcgtataccacaccaaacaaaagatgctttgatccgatgaagcttcctgccttgaactcatagtaaaaccaatctatgccatctcaataggctcattgcgcttaaccacatagtaaaaccaatctatgccatctcaataggctcattgcgcttaaccacatatgttccgctgtctgatcatgtgaatcaaataagctcccatctcaacttttttgtacataaaaactaattttcaatgctagggaagttgcttgtagtcacaacttaagccatagacatatcaatcacactgtgtttgcatcaacgagacaacttagacagtagcagctcgagctattgggacatgagcttgtgtaaaagcagcacaatctaagctaaaccgttcgccaaaccagcttgaagccttgaaccgaccacatctaatctaaccgaggcagaaagtagagctc

SEQ ID NO: 141560 - DNA, 416 bp, Zea Mays
caacccaaagtgccgtggaggatggccatacaatacctcgaacggagaccttccgaccgatgaatgaaaatttgtgttataccagaattttgcaaccgacaaccagtgcacccatttgcttggacaggcgtgaacaaagcaccgtaaacttggagaatcgatccaccacgaccaagatgcagtccatataccaaacttagggagcccttcaatgaaatcaagagaaatagaatgccaagcgtgtggaggcaccggtaaaggagacaacgaccgaggatagcgagctctatctggttttgcttgttgataagtatcacaatattgcacaaagtggtgaactaaaagagttgtttctatcatgcctttccaataaaagagttgtttcactcaacggtatgtgacagggaagccgaaat

SEQ ID NO: 141561 - DNA, 453 bp, Zea Mays
ttgcttggtatgctgccttaccccctaattctattgattcctagaatgatttagagcataagtttcatgagcacctctatttagggactgagtcatatttagctgatctagcatcgctccggcagggggacgaagaatcagttaatgattatctccagatgttccgggatactaaaagtcgatgctttcaggtccaccttacaaataggcagctataggggcagacctagcctaaaatgtgagtgggggcccaacatctgagtgagggcctaaacataggcatactaactaatgagcctttgtagatacaataaataagataaaagattcaccaaaataaaaaaatgagtggggcctatgcccccgctcagcactacatgtgttcgcccctaggcagctagaagggttgctcttaatgggttgcgctcatacttgaaagaaaaactagatgac

SEQ ID NO: 141562 - DNA, 400 bp, Zea Mays
tgagggaacaatgagatcatcaaggatgtgccaaatagaacgatcattcatggagcgtcaagaaaccagggtggtcaagggcatgtgaactgaaatgtcttaaacagacactggtgtataaatataagcatacataaaaatatgagagtatgcaagatttcaaggaaacaggcatgccaagacaagggaactgaaaaggccaaaggataacgacttaacgacggagtaggaaggggtctcagaagacaagaagttaatggacatataaactggagtgtttaagtaggcatgagaaattcagatgtgggtatttaaaaccagagtattgaagaatctaggggtacgagcatgccaataccaagagacaagaaattgccgaaagatagcgacttaacaacag

SEQ ID NO: 141563 - DNA, 523 bp, Zea Mays
gggagcattaagggcggttaataaataaattggttgtgaggtaagcactgttttcaccagagttaagcgtcctgccactgagaagtttctcccattccagctactcagcttgttcaatactttgtccaccaaaaactggaagtgccccttcctgagtctagttggggtgagagggaggcccaggtaccggatcgggaaggttgctcttctggctggaaagcaactaagaatgtcatcaaggggtagcccctggcagcggattgggacgatcatggacttctgaaaattggtcatcagaccagatgcctcgccaaataaggtgagcaacctgacaattgtctcaatatcctctttttcggcttaacaaacaaagttgcatcatcagtatatagcgagagcctaatgctgggcgaactgttccccaacttgttcaatgctccattgtccgcagcgatctttagaattttttgcaatgggtcgatcgccaagacgaacagaagaggggagagaggatcgccttgcc

SEQ ID NO: 141564 - DNA, 543 bp, Zea Mays
aaatacccgggactcctacttccattaccgattcctaaacagtcatggcaaacagtcagtatggactttatttcaggtctcccgccgtctcgcaatggtaactgtattctggtggtggtggacaagctgtctaagtacgcacatttcataccaatgcttcacccgttcacagctttgacagttgccaaggtatacatgtctgagatttatcggttgcatgggatgcctactgccattatttctgaccgagatcccattttcacaagcaaaatatggcaggaactattcaaactaactggcacccagttgtgcctcagtagttcataccacccgcagtcggacggacaaacagagcgagtaaaccagtgtctggaaacttatctgaggtgctttgttcactcctgtcccagactctggcctaattggttacccctagcagaattttggtacaatacttgccaccattcatcacttggcaaaaccccttttgaagtgctctatggccatccaccatctcaattggggttgatatcctccgctcag

SEQ ID NO: 141565 - DNA, 519 bp, Zea Mays
tcttggccgatgaaatacctaggcattcctatttcggatggccgtctgaaaccatctgtgtttgaccatatagtcgaaaagatggaaaaaaggctggacccatggaaaggtaaacacctgtcttctgggggaagactcattttgactaattcgtgtttaagtagtcttccaatctatactatgggattctacctcctgcctaacaagattcacaagaaaatgagctcgatcagagctaatttttttggcaaggggccgaagattcaagaaaataccacatggcgaaatgggatagtttaaccagacctaaagaccaaggcggtcttggaatcacaaatactctcatgatgaatgaatgcttgattgtgaaatggatatggaaattatgccaaggatcagatgagttatggtacaagctgctgcaagctaaatacatgcacaggaataatttctttctctctaagaacaagggagtttctcaattttggcaaggccttcatcaggtcaagcatctgtttc

SEQ ID NO: 141566 - DNA, 352 bp, Zea Mays
tgtgaagtgaggaaatgtgaagtgaggaaatttgaagtgaggaaatgcttagccctgtgatgaaatctttgaaaatagtcaactgaatactacacttgttgttttgatgcgatgaaatttgtgagggctatggctatttgagcctgtttgttgctgtttcattgaataatttgaccaggggcttgtgcgttgagattaacagtttgcttagccctgtgatgttttatttgaaaacagtgaactgtatactacacttgttctttttatgttaagaaaatactgagggctatggctgtttcagcctgtttcatgctgtttaattgaagaaatttacctgatgcttgtgttaatg

SEQ ID NO: 141567 - DNA, 887 bp, Zea Mays
ctcatcactcttcggttgattgaacctttgtttttctctcttgctctcctgatcatgttgaagtcacctagaaggatccattctggtctgactattgattggatgtaccggagttccgaaaggaatatcattttctcgttttccagttgtggcccgtaaacccccgtgaggtcccacaccacatcctccagcctagaactgatcctgactgatagtgaatatgctgctgaacttggtaagagagtcatgtcgaaaaaatccggatcagcgacaataaggataccaccagaggtgcccagagaagggagttgaaaagattggttggctagtttggcgcctactgtttcctttaatacgacatttgaccagctcgaaatctttgtctcttgaaggcaagcaatggaagcattggtggacagaattgtatgtcttacgctgtcgcgcttagcatggtcatttagcccccgcacgttccaagaaaaaatagtacatttcggattcataaggtaaaaacagccactctacttgagacatatagctgccagcacacacaaatcagcaagagtctttgctgaaccgaaatatcagaatctgaaacaataagctgccagcgcacaacaaacagcaggagacactgctgaaccaaaataacagaaactaggaccataaaacagtggaaagcagagctatgacactatccagccccaagccataaactgaaatggccgagatacaaaggcgtgccagggagcctatagcacagcctagaatcactaaagctagcagaggtacaaccaagaacggatggagcggagctgcgccgagcgagtctatccatctgaagatacattgttcaccaaaagcaccaccgaccggcccagacaaag

SEQ ID NO: 141568 - DNA, 598 bp, Zea Mays
catatatgtacgccagcccggtgaggtccgccctcgtaaaaccagtctgttggtttacgctcattaacatcaagttacgaagagaagattaccccccagatttgctttatggtggtcttatcctgcttaagtttgcaaccattaagtttatctaacccacccatacggtttccctccattgctggtatattgacatccggactgagtagccaggtcgtatagcctaggggccagtccaagagacggataattgtccctagggaggtccagagccgtgcgaccgcttagcttggtccagtaccctaagcccacacgctttaccgctctgtggcaggtgtcctagtatccggatctatagtcttgtgggtccggaaacccgaggtccggctctaaagaaaggacactcgcctcatggggaggtccggagctgtgtggctgcttagcctggtcccgtatcgtaagcctacgcactccaccaccctgcaatgagtaccctggtagttggaagccgtgacccagagggtccgacacacgggtcggcttcctagtctaaatcctacaggtcctgttgcgtaaatcaaaggataaaggataccag

SEQ ID NO: 141569 - DNA, 511 bp, Zea Mays
ttcggccattttgcggcggccgcttctccgccggaggcgtccccgtcggcctccaccgtggtgtcgcatggtgtcgtatattgaattatgacggagagaggcgaggaaggaagaaatcgacgagggggttggattggactgcgactgttgttgattctctcttgcacgcggcggtcctcctccagagtccagacccaatcccaaatccctaatcctacaaagggatcccaaatccggcgtccagtccagtccaacctgtagtagatatcccctccggcttggctgtccgtccttgccccaattccgattgaccagagaggagttggatcagggagcattggaatggccgccgccgcataggatggatctggattcctccggctgctgctcggttggtcccgtggatgctgtgattcgaggacgcggctagagattcggtaccgatggtggcacgaatttcgcacggtggcagatttgacgcgcgttcgcccatttttgcgggtggggttgg

SEQ ID NO: 141570 - DNA, 313 bp, Zea Mays
tcaaccaattcacagaggcagaaatccgtaactcatggcgcatcactttcatcccttcttgtttctagtccaagacctttcttttccccaaccaattcacacacacagatccaaagttcaggacgcattactttcaagtcccatacttcttatttctagtccagagcgcgccaggtcacaacagaatcaaatcgcctttgcttggacggcaccaagcaccacaaacaggtcgcttccacccaatctcagagacacaccacacctctcttcgtcacgaatcaaaaaacaccactacagcatcagcagaactctc

SEQ ID NO: 141571 - DNA, 416 bp, Zea Mays
ggttggtttcggagcccaccttggttttcaatgtgaggaggtggggtcatcctccgaaaccaccctagtccttgacgggaggacggggacgaaaggggttatcgactcgttcaaagggacacaacctcaacaaagccgccctttgggtcatatttggggtgtttggaccgtgtgttcatagcctagggttacagtgtcacaaattatggctaacttggtgtatgatcgaggtatgtcttcggccttttccccaacaatccccatgtaactgccactctaaataggtcagagtaacaccatggctttttaatttgaacccgtccttttaagttctttggtggggaaagccacaaaaggaatcatcaccatgagataatacctcccacctccaatccagctgtcaatcttgctagctc

SEQ ID NO: 141572 - DNA, 503 bp, Zea Mays
agtcattggggcaatattcatgtgagtcagcgggttcacaaaaaaaccactaggtttctatctctctcaacccgcggtcctctctcagccgaaaccgtgttccgtgaggaaaacacgacagcgccactcaacgccatcggtagcatttccggggtgaggtcagggagaagcgagaggatgtggtgaacacgtcggtacctttggtttggttggaggtggtcggagtcatgttggccacgtgcgggggtagacgaagtcggcagcggcgaggggcttggcctatacacggtagtagagttcgaatggactgctcgaggagcttcactaggtgatgtagaggttgtgcgtgcaaggaatctaagaatggtgtgccggcttacctgggccacgtactccggcgagcgaaggaagtctggcgagggcgatcgatcgtctccggcggggtagcactcggtttgagggcttgggaagtttcaccggactctcggaaaactggtcgagca

SEQ ID NO: 141573 - DNA, 431 bp, Zea Mays
gccaagaagacactaagctacggggaattatggccttagtcctgatactgatcacctatgtcttggtaacaagcagatatcctggatatagaagcagccaaaaatagtgtcagattctggttcccacacccgtgtcctggtaccactattcgtgcctatgttgggctcctatatccatgtgagcgagcatgaagatgctcaccaacatggcaactagagtatgcttcccactgatgtttcacccagtataactgcatttacctcaccaacatggcaactagagtatgcttcccactgatgtttcaccgagtataactgcatttactttataatagtaatctggcatatttgatttgggtctcttgttgtcatatttgttgatgctatatttgagcctatgttcagtgcagaaaacctattcatattgtgca

SEQ ID NO: 141574 - DNA, 295 bp, Zea Mays
agaagaaatgaatctcttccccatttttgtggatttgaatacggtcaccatcaaatttgcactcagcaactacttgttttccatgaagctggaaaaggagaagggtgtgatgaccaagcaaatccaagcaatgtagaacaagtgtaaagcagcctttcacttaacaatgactatatatttagaaggaaactggtgggtggaggcaggcaccttcttccaagcaactgaagaatcacgaactctcaaagctagctgaggcctgacagccttcccaatttctatatcctgatcaaac

SEQ ID NO: 141575 - DNA, 282 bp, Zea Mays
gaggggttggtcatggttacgtaccaattcccttaggtagacaatcgaggaagttcgaacatagaaattcctcagtctcccaagtagcctcttcctctgagtgattactccattggattttatacatcttgatcgatttagcccgagttgatcattctttgcaatccagaaccttgaaagggtatgatctcggtcggcaatcgaacacacttcttcagttgggatgcatggaatacattatggatggcagacatttttggagttaacttcaatttgtatgcc

SEQ ID NO: 141576 - DNA, 298 bp, Zea Mays
gaaagtgaagatgaaggaaatggaagtgaaagtgatgaggagttggctctctttgtgaagaaattcaagaaattcatgaggaagaagaagggtcaacctagaaggggccaaacatcaagaagaaatgcttttaatgatagaaaatattttgagtgtggggaacccggtcacattgccatgaattgtctcagcaagaagaacaagggcaaggatggagatggtaaaaagaagaagttctatcacaataaaaaggatggcaaagcctatcttgttgaatgggatttgaatgctagctcag

SEQ ID NO: 141577 - DNA, 461 bp, Zea Mays
gtccagatcttctcccacgaatcaaggacgaaatcaaccagctgctagaagctgattttgttagaccttgcagatacacagaatgggtctccaatattgtgccggtggagaaggagtcaggtaagcttagagtatgcattgattttcgcaatttaaatagagcaactcctaaagatgagtatcccatgcccatagccgacacattaatcaataatgcatcaaggaatagaattattagctttcttgatggtaatgccggatataatcatattttcatgggcgaagaagatgcgtctaaaacggcctttatatgtctaggcttcattggtttatttgaatgggtggtcatgacatttggtctgaaaaatgctggtgctacttatcagagggctatgaatttgatcttctatgagttgttgggaaacactgtggaagtctacattgatgatattgtagtcaaa

SEQ ID NO: 141578 - DNA, 497 bp, Zea Mays
ttagaactcttagtcgttagtagaaattgttttggcttatgtagaaaggtgatgacatgccgtaagtagtcatcacttactctataattataagtcgagtctatacgcgttaggcgttccttaagttgtgcttcgcaaataagtgtatgattgtgtttatgacttgaatagatgtcttcgagtgaactgataggttcctaaggcaaatatgtgtaaggtgtttatagtaacactttattccgaaaggtgttaagcctgcacaaaaataagagataagtgtacttgttttatgcatgtgatcgatgattgggatagtcgaggcgaatgaggagtatgattaatccggttagagtcactatgttgttgatgccttgtgcgtaacctggggcacgtatgtgcgtgtgtgccgtggtgtattatagtggtggtggcataagatatttgattgagatgtgcgggtatatgccgtgatatggttatactcgcgacgaggaagg

SEQ ID NO: 141579 - DNA, 486 bp, Zea Mays
cgggacggtctctctgaaagagcggaaagaatctgagcggtgtgtcggccacttcttcttcatagatctgacacatggccctcaatgcctcacgggcgacgacttggcaggtgtctttgaatctgtgccctttatcagtgacactccattccacatggtgcgactagatccaatgtatacagtcatgacacacttctctgtgccatgctcgacgaattcacgaccatcatactctggctggctcctgattccgaggtgaactgtgcatgctctcagcaaacttggggaaaccatcttcaatctggcaaaagctggtttggcaacggacctccatctgacttctgagagaaggaaaggggaaagcatttttgaaatgaagggatgagagcaagaattttttttttaaaaaaatagttttgactcaaaaacttttggaccaaggctaagggttacatcctgcggccaacctaacagctttgataccac

SEQ ID NO: 141580 - DNA, 700 bp, Zea Mays
ttctctgccctctggactatgcgcagaaatacagagaagaacagggaccactacgtaaaaacacagagactcagaactctatgctatggactgggggtttattttcaaataagctgagggctcatatgtaaacggtttcgggtgaaggggtatgaatggatcccagccgttggattagagactggcggtacagagtacaccgaccccatcccgaatcggtacgcaatcaagtccgttggatcgcgatccgatggatccagattcctctgcctcgtattaaatcctacgcgccagccatgcatcggacggtccagaataaccaatccaagcggtactctaaaaactgatccgaaccgttcatcatagatcgacggttaccgagacatccatgcactaccatgatccagtacgcacatcactggatggacgacgctcaatctacaactaacccgcgatggcacctaaacggacaggacggcgatgctagccaccccacggcggtgccattaccggcgcacagccgcccgccgttccgagcgcgaatccccaagtccaagtgacggtaaatggagcagagatgaaggcgagtcatacggaggcgttctcaccgttggtcatgtcgtggagacctccacccacggtgggctgcgaacgatggtgatacacaggcgccgatgaggaatcctgctcgccatgattg

SEQ ID NO: 141581 - DNA, 1091 bp, Zea Mays
ggcaaatgggctgaacaacttcctaaagtcatttgggtgctaaacacaacataatctagagctatcgggtgtacccctttctgtttaatgtacagatccgaaacaatgactccacaagagctgaagcatggatcaccacgaacaaatgccacagctacaccagatgtcgccgactgaactaccaaggaccttctcgatggagatcgtgttcttgccctcaaaacattgaacagataccaagtgcaaacgaaggcatggcaagacaacaacatcagccctaaagagttcgacgaatgtgacctcgtcctaattagaaccagcagaatagagtcccaaggcaaactcgagccaaaatgagaagggcccttcatcatcaagaagaaaatgtccccaaatagctacaggctcacaacacaattcgacaaagaaggcaatagatccctaggcctttgcatctttgtaatacctacatacattattccagccgggcccacactcttttcctcgcaggggtgaggtttttaatgaggcggtgccatataatatatcgccacaaaaatcaccccacaaaaaagacaccatgacaacaggatgtcgaaaaagaccgcagggtcagtcttcggcattcgacgctaaaacagtcaccacaacggccagtttcaatagccgttgcgtgcgataggcactatccaaaaaaagtcgcctaagggtgcagctggatcagcacaacaagtgtgtcacagcatccaatggtgcgacgttgtccaagatacgcatatttcaatccgagcaaaagtcatctaagggagaagctggagcagcacaacaagtgcttaatagcatctaaggatgcaaagtcgtcctagagacgtatatttctatccaagcaaaagtcaccgaagggtgcaactggattaacacagcaggtgcatcacaaaggtgcgaagtcgccgccaagatagacggttataccctagcacaagtcacctaaagatgcagccggatcaatataaacgtgttaacgacacctaagagcgcgaagtcatccaaggacgcagctgagatagcgcaaatacatttaatgttaccac

SEQ ID NO: 141582 - DNA, 359 bp, Zea Mays
cgggggcggtggctcgtgatttagagttggtgcggtggcggccggagagggaagaggttactggcgctagcaattcgtggcgttcaccgtggcaagctcaccggcgatgaacgggtgggttacagtgactcactgcgacgcggttaaagggtcagggagtgtcgcgatcacggcaggcagcgtatgcctcgacgacggctgctgcgccacgtcgccggcacaagtgggcacgacatagggcggaacaatggcttcgagctcatccgcggtgaagatcttttcaccacgagacgttatccgggcaccggtgagcacgaatcacctcgtcggcgtgaatccaggcgcaggggtcgccggcg

SEQ ID NO: 141583 - DNA, 615 bp, Zea Mays
gtgaagggggtgagggatcctctcaaggattcgagaagcggtcaaggctagtgatgcatcgctttaacccaaatctctcttttcctcgcccatcctcctatcctttcaagcaaccggactttatccgtccaactactgcccctactcaaaatattcagctgagtgcccctggtacttgtttcccagtcctacccagttcatctaacagctgctccaactgtgggaagtctggacatttcatcaaggattgtccctatccgaagcaaaataaatcaaacttccaaaaggcttctagaagcacatctcaaggcaagggaaatgtggcaagcactcaggcaggcaaaggtgaaaggaaaactagactggtctactatactcaagtggctaccacagtagaaggagagcctgtgatgatgggtacgttttccgttgccaatcatcctgccatcattctttttgactcttgtgcatcgcatactttcatgagcaaagcttttgctgagaatcattgcatacctagtgttgaatcaaagaaaggtcttattattcaattacctgggggtcaaatttttactaaggaagtagtcttccacatatccttgaagttagccggat

SEQ ID NO: 141584 - DNA, 436 bp, Zea Mays
aacagattgttgcatggggatatttctaaactgcatctccttaattcagcttatgtgaccttactacctaaaaagaaggaggctttggaagttaaagattttaggccaataagtctgatacacagttttgcaaaaattgtaactaagttattggccaccagacttgcaccaaggcttcttgtactggtgtcaaaaaaccaaagtgcgtttgtgaagggaagaagcatccatgataattttatttcagttcagcagactgcaagggctattcataggcaaaaggtgccccgtatcctgctgaaattggatattggaaaagcttttgactcggtatcttggcccttcttgtttgaaatcttcaggcatttgggttttggtcctgtttggtgcagcatcatttctaaaatgttgtactcttcttcaacaagagtacttg

SEQ ID NO: 141585 - DNA, 601 bp, Zea Mays
cttcaagttatgcatttattaagttatctgccatatcaaaagaaaaataaattcgaaaatggaaaagaaaacaggtttgcgctgaggcccctgggttttatctccttctcctctcacaaaacagtcctcggtctactattggcatgggtcactgacattgcacaaaaccccctggacctaaccgaaatctaacccgcgctccctggctgacttaaacagtacccgcggcatagattacggcggcgaggcttaccggcggcagtagagctccggcggggtggtcagtgacgtccgggaggtcacgacggtcacgtcggtgtgcgggtcggcgtcggaggtggtcggagctaccctggccacgaacataggcggtgggggtcgtcggcggctcctgctccggccaaaccacggcggtatagttcaattaatgtgcgctttttagcttcactgggtgatgtaaaggcccatgcgcgcaatgaattggaaaatggtgcagaggcttacccggtccacgtgcgccggcgggttgttgaactccggcgagcacgattgcgctattccggtgacgcgggtcctcggttcaagcttgggtaagctccac

SEQ ID NO: 141586 - DNA, 471 bp, Zea Mays
cgcttacccacctaggagcgacaacaggttaggccgattggaccacctcaccaatcggaaaagacgggaggtcataatgttcaattaagacctgacgtacctgcgtggacacctacacctccacatacacccatgtcttatcattataaatacataccaccgctaccatatatctggaatcagatgtggggcgcgccaccatatccattcgggataccacaataccccgcctgaggggcacctcaatcacctgtttttgacaggttgacacctccagtataagaccgattgagaacccctcaatctggtccacgagcacaggcccagcaagattgccaaacaactcggcctcaaaggttaactaatccagcagaggggcatacagctacagcctccaacagtgtgataaaaggggatgtcattaaaataggaatgacagatgtcgtcatacaacaaaataacgaagggcca

SEQ ID NO: 141587 - DNA, 512 bp, Zea Mays
acaaaaagcgcagcatgcgatgtcattgtagtttacatacacacagtgaggggcccgccaaccatattgcacaaacaaaaaaatcacatcttgttgccctccctctctattgcgagccggggagggtagcgttttcactcactaccacaacacgagagtgagggcagcagacatgctacatcggctcagccttctgaataaggcctgcctctcaaaagttaaacaacatcatcttcaactcctcgccctcaaaaagattccaaagatccccctccccaatacacgtcccggatgtcgaggatagcaaatctcgttggccgcctcaatctagccgaagacgggatcgttccatccccatccgtcgacgcctcccacttcgcgatatcacgccaacattgtgcttcgactccaccttccgccagcagcgctcttcggccatcgccccagccaagggagcagacacttcgcgcacttcaggctgcggcaaggactccgccgcggccacattcaac

SEQ ID NO: 141588 - DNA, 417 bp, Zea Mays
attgacctggtcaattgcatactgggacaaatgattgaatttgtagagatactgcataacaatatctcctccttgcttgagtctcatgaattcttcttgcttcatgtgcaacactccttctggaatgtagtgctcacggaatgccaatttaaattcgtcccatgtgacctgatgttcggcaggctaaatggccacataatttccccaccaggtattggcaaggcctcttaactactgagccgcaaaaaatggcttctgggtctccgtgcatcggatcagtccaaatttctgctcaatgacccgtacccattcgtcagcttcaagaggatcctcatctttaacgaaaagtgggggacgggtttccgagaaatccaggtacgaagtttcacggggtccctgcggataagccctcccgcc

SEQ ID NO: 141589 - DNA, 744 bp, Zea Mays
cgccaggacagcaagggaattctatggtttggagatcgattggttgttcccaaggaccctgagctcagaaagcagatattagatgaggctcacctttcaaaattctccgtacaccccggcagtaacaagatgtatcacgatctcagatccttatactggtggaccagaatgaagagggaaatttccaagtacctatccgagtgtgatacctgccagagaatcaaagccagtcatttgaaggcagcaggccctttgcaaccccttaccataccatcttggaaatgggaggacatttgcatggactttatcgtgggattgcccaatacctccaggcaccatgattccatttgggttattgtagacagattgaccaagaccgctcatttcttaccagtgcataccactcacaagacagagaaatatgcagaaatttatgttgatcaaatagtgcggttgcatggtattccaaagaccattgtatctgacagaggagcactgtttgtggcacacttttgggagcagctacaagaatcacgtgggacccatgtaataggaagcttagcataccatcctcaaacagatggtcagacagagagggtaaatcaaatcctcgaagacatgttgcgaccatgtgtagtacactacggaaaggattgggacaagtgtctttctttggcagagttttcttataataacagctaccagtccagtttgaagatggcaccttttgaagccttgtatggg

SEQ ID NO: 141590 - DNA, 518 bp, Zea Mays
tgcggggtcatggcctccgaaccgtatagcaggcgaaagggagtaaatccggtcgcccgacattcggtcgtgttcagcacccagactgcttcaggtagcaggtcggcccatttacccttcttgtcgtcgaggagcattttcttgatcgccgtgaagatcttgccgttggcgcgctccacgacgccgttggattgtgggtgatatactgaggcgaaagcaagcttggtgccaatggagaagcagaagtccctgaagtcttggctatcaaattgcttgccattgtcaactgtgagctcggacgggactctgaatcggcaaacaatgttttgccagaagaatttctgggcagtcttcgatgttatcgttgatactgctcttgcctcgatccacttagtgaaatactcgacggcgacgaaggtgaacttgaggttcccttgggccgtgggtagtggcccgacaatgtccaggccccagcgctgaaggggccacgtgtgggcgattagctttgtgaactacga

SEQ ID NO: 141591 - DNA, 539 bp, Zea Mays
caatccagctgctgtgtatttcttttccccactagaggcatcatcggatacaatctctaacacctctagaactgcatcccacatgtgaataatacgacataaggtcttatgatgtgaaccccatcgagtatccccaggtcgcacaaggttggtttcttgattttccctctcccggaaacaagttcacctctatccaacatgttcactaaattttcatggtgttgttgggccaattgatcccttcgcttacaggatgcattgacagtgttcacaattagagtagatgtctgaaaaaaatcaaacactgaggaacaacacttggcaactgaaacaacaactagttgcaattgatgggcaaaacaatgtatgtaaaaagcatatggattctcatctaatattcttctttgccgtccatgaaattctcccctcatatttgatgccccatcatacccttgtccacgcaatctggatattgacaacccatgaaaagcaagcatagaatccaaagcttgctttagagaatacgatgtcgtgtcagc

SEQ ID NO: 141592 - DNA, 547 bp, Zea Mays
gattggccgaaaagacctcatcagcaagaataacggaatactcctgacaaattgaacagctactaatggagccattagcagaactaaccaaaattgggtgacccaacctctgcaccgaaagaccagcccgcgacacaaaatcctctgaaacaaacgaatagctagtgccagagtcaaaaagagcatggaccacaaacgaatcaactgaaatcgtacctgtcaccacgtctccttgctctctgccatccgcagcgggtagcacataagccccggaaatacccgcagaagaggaagctcccagagtgaaattaatagaagaaccccactgagccgctgggtgaggcagacgcggagctccaaactgagacgacataggagtagttggtgcaggagtaggtgcagccagatactgaggaaaaccctgcatcggcacgaactgagaagtcctaggcacataaaactgttgtggaggaagtggaactgaaaactgctgctcagcacttgacatcatgttgatagtgccctgagaagaggaggaagtcaccgg

SEQ ID NO: 141593 - DNA, 725 bp, Zea Mays
ttatatcttaattaaggttcatatatgagtaaaattataattattaacttagagggactaatttgataaacataggctaacagtttctaatcataaaagtgtgtgacataatataactcatgttattagtgtttagataatttattatgaagctaacgagacttgaacggagaaaatcggagttaaaatgagaaagatacggattttacaattttctagaattattttcctactaaaatcaatttctatatctgttttatcaaattctaagctgaatggactgcgggctcaaatcaattaaagctcaaggtcaaattcattaattatacgacctactcgtgattatttctacttaagcaaggacgtcgggtttaatagctaaaacccgagggtctcttaaaaaatgtgcatgctgtgataacccagatccaacctaagccttctgacgattctacgtgaagtctggacaaggcgagtaaagtatatgagaactcactgaggatcatgtcgcacgacacacagaccttgcgcggtccacggcagagcctcatcacctgcaagcaatagccggcataccggggacacacccagatcatcggtggtacgccccgcttttgcacacgccagagatcactctggtcgaactttgggctccaatcgccagcgtgggtaaatgtaacctcagcgagcggcttcacgactaagagtgtaaacggatattttaa

SEQ ID NO: 141594 - DNA, 681 bp, Zea Mays
aaggctttcagcaatgtctgtgcttttattggcacaagagatatacttcaagagcacatagcctacagaatgtggccactagttgatagttgggatatgccgaaggagactgttgctgggtcctgcgaaggtggattagttcgattgaaatatacctccagattcagagaaaggttcgacgaaccgaatgacgactggttgaaatgcattgaggctactagcgacgagttgcttggggcatataccagagccgaagatgatgctttatcctcagcctttgggggtcggggcaagaaaagattgaacagggtttttgatgcaattgacttcatataccctgattactgctaccccttgcgaaggtaaggaaaaaagagaaaaacttccgcttcggccaccactattgtgccgaaggtcaagaaaataaaggttttgacccaccgaccacgatatattgaaacggccgcagtccctgaatttggtgaagggacctcctccgctgccgaagcgaaacaagctgctcccatcgctcggagcgctgagggatcgattgtagtgccgaaggtgcctatagtcgggtcagccgaagccaaagatgatgcggccagagagccaaagctggaaaaaacagtgatgctgccaaaaattctgagtcctccggcagaggcaaaactgccgaag

SEQ ID NO: 141595 - DNA, 1603 bp, Zea Mays
attgtaattgtacaagccttcctcttggctctactaacagcatgaaatttcatggtattcaggcattggataacagaatgttctgttattccatattcatgaataacataaaatgcttgtaagctgaatccttactttaacagcaggagaatcatctaggtccatatgacgtaacgctgagcctctaattccatcaactttgatactttcttcattcttttcctcacgagaaacaattggtttaggtggatcagactcaatggttcttgcacgcaataagtctgtaagacgatcaaactcaaccctgcaaaggatgtaatgctcggcatgaacagcttcagtagcattgaaaaagaatacattgtgaaagcaacacacaagcacaaacaaaggaaaggtgaagaacacaccacgtgcagcagtacaacaaaaggaaacctcttttgaattatgttttagactggaagaggtgggacatcacagaaccagataataccaggggtgacggtgaatgctagttatgaattgagaatttacgaaattcatttcaagaaaaaatatagcaaatcaaacacaataaattgaagaatagtaattatgcagctacatacttagtaaatgtctttcgcattaacaagtgctctacttcagacattgctttgacatctgatgtgtcaactatgctcttccctttctccattccaccctctgggattggaagtgaatcctgcattgagttttgaaatgttctggtctgaacaacggtcaaccaaatagaatacaggctcactaaacataatatatagcgtgttctgtttaactggaaaactgtcagttgctacttacaacatgtgttgaatcaggtaagccctgttttggctcattgtttcgtcctgcaagaaaaaactgtgatcagaccagcaacaatgtaatttattagtttatttatatgcaattattacacaatcgctattaggaagtaagagccaaccataagaaaggatgcggagagtaagagagctcttttatttcgcatccaccaataaaaacataaggatccaattggttagacaccgcttgagcgctaaaattgactctatcatacaccaatcaatcattgtgatatgtttccttttatacataactgcaaaccacggttttaaagctttccgtttctgcaggaaagttcatgtgagttaccacggcaaaacacatcagcttcatcacgagctcaactctatgtatcgccaataaatcatccacagccaaaatcacccaaaaccttacgtaggtgcaggtaaaccctagcatgctcgggaagtccgaaaccctagtcccaataaaaatcacggacggttgttgcggacgccgatctcaggtagcggaggggagcacagatgaatctcatgctcaccaggaggcgacgacagcggcggagaaggggccggcggcggggcgaggcgcttgcggaacaccgagccgaagaggcgcgcggcgccacccgcgatgaggcgggaggccgggtccaccagccgggacacccagccaccgcccccgccgccgcgctccccgccgggctccgaggatgcggaagccgctgcag

SEQ ID NO: 141596 - DNA, 826 bp, Zea Mays
aattgacgaagctaggcaatatgccaaggatttgaagtatgccctaggatccttggtattcaacgacactaatgaagatgacgttctatattgcctaccggacaacaaggagttatctgtttgtcgagaaatggcaaagaatgtgggatttccaaagctggagcttggcttatctgcgatgtcgaaggatgatcttgcagacagccttgcttataatagcttgaaggtatagatacttttgctcgtaaaataagttatgtttattagttttcttactgtttttatgttctcacccatatatttttgctattacggcttaattcttagtaaagctttaagggcttagaaagaggctgatgacgaaagctgccaaattgctcttgggaaccttcggtcagaggtcatcacgctgaggaatgaagcccttgaaaaagataagattctgctctccttagtagatagactgaaagtcagtgaagccgggcttaatgcacaagccgaaactcacaaagccgaagttgacgatctaaagaataaacttgccgaaatgaatgaaaaatttgaagttgcgaaggcaaagcaagagataagtgaatggacaagttcaaggctaaaaaagaatgttgaagagcttcgtgattccagggaaaggtgttatgaaaaatccttggactgcgcaaagaagctaaaagatagctttgcaaaggtgggggcgtattcctcagaacaaaaaaatatttgcggcgatcccgaaggggttattcaatggataggtgaagaagctgaagctttcgatgagatccttagcgatagcggagacttttgt

SEQ ID NO: 141597 - DNA, 516 bp, Zea Mays
cgtgtcacctattcgactgagcgtctttgaccacaccacagtctctcaatcggtgatggaggcaaaggacggcatcggctgctcttgctcccctctctctatgcgctctcgtctctccctatcggcggtggctggaatttgggtagcaatggataggcaggggtttgaggggggtcaggcgcgccggtttatagcccccctccccggcgaagtcggtttggctagctgtgatcgcgcggcttgcggcggagcggaggcacatctgttacgagaagatctacagggtttgtggaccccacagctcggcgaaacaacacatcgcacggatgcggcctgaggcaccgatcgccctgccccacacgccagtgatacaagcaagtacgcggaggcgcgcagctcctggcgactaagccgctgataacaggggcccgcttggcggcgcgctattgtcgtgctaggccaggcgagcgtggccgagaaacctcagttggcccgaaatcacgttctgtgtttctt

SEQ ID NO: 141598 - DNA, 469 bp, Zea Mays
ggcggttgtggactacggggaggaaggcgacgtggaagtggacgaccgcgccgagcgcttcatcgagcggttctaccaggagatgaggctgcagaggcagcgctctctggtccagcgcctgctctagagacattcgtccgttgctgctgcttcaattccttggtcgatcgggcagaaccagtcgtggttgtcgctgctatcttagctgcacttcggttaaatctctccgtatcttgcatttgcgtcgttccatgtttttttgcttctcatgtggcaattctcttgtctgtggaaggagacattcgtctcccctgctgttgtactgttacttctagtccttacctatataatccatccttgtgttgcaatgttcatttttttttggggggtagtgttttgagtttgtacaattattacaaagcatgcgtgctacacacctgtttctattagcacaaaatgccaacttctg

SEQ ID NO: 141599 - DNA, 992 bp, Zea Mays
gtccttgctatctttattgttgccactcttgttagtttgataagatatgtcatcatctccatcatcactaccactagactcatctgacattgaaacttctttcctttcttctttttcagctctcttttgcttctcttcttcttccaatcttagttcctcttgtcttttgagtctcattgctgctcccctaagaagtttttcttcttcttctcccaacttttgtgcttgttttttgcttcttttctcaaacgacgctcttctttccttcttgctctttctccttcggatatctcgacatagagtgttgcatagcttgttgctgatatgatttcattcgctgattcttcaccaaagagattcgtgccatcatttgtcccttcatttccttgcctagacatagccatacctcacgcggttaaacgctgctaaggaacaaggttctgataccacttgtaaggatttggtacacctagaggaggatgaatagggtacgtgtaaattttcagctcaagaaactcttaaaatcttgagtggcagtgcctctctcaggcccgacactgtcggtgttctgaacgtagccaaacttgtacggaatcaaattgatatgatttcccacttctactcaaaatatgaggttcaaactagttaaacacatatatcagactaaataaagtaacaagggattcaaagagcacaacttaaaccctaactacttaaatgagcaactcaaatcagcacacaaagacaaggtatttatcccatggttcagatcgccacaaaggcttgcctacctccacgttgttgaggaaagccaataaggccaagggttacacacaccctttatcgatctcaagccaagagctctcgctcttagtatgggattttttactatgatttaggaaaacttatagcataccaaggctataacaaacttgcagctcgaggagagattcacatgccggctaagatcaagctccatgattcaatgagag

SEQ ID NO: 141600 - DNA, 636 bp, Zea Mays
caagaatcttgataggatattctgtataagtcaaatcatcttggacagtaagatcctccataggtagctgctcttcaggtaccctgaggcacttctcaattgtgatacatggaagacatcatgtacatccgcgagatgatcaggtaattccagttgatatgcagcctctcccactcgctttaggattaagaagggtccaatgaagcgaggggacaactttcctttgactttaaatctcctcataccccggattggtgacaccttcagatatacgtgatcaccctccttaaactcgagtagtctcctccgggtatcagcataacttttctgccttgactgtgcagttctcaaattctcccttgtttgatggacttgttcctctgcctcttgtataatttcaggtccaaagaactgtctttcaccagtttgatcccaatacagtggagtcatgcactttctgccatacaaagcctcaaacggggacatcttcaaactggcctggtagctattattgtaggagaactccgcatacggtaaactcttatcccagctaccaccatgtttaagagcacaagctcttaacataacttctagtacttggttggttctctcggtctgcccattagtttgaggatg

SEQ ID NO: 141601 - DNA, 322 bp, Zea Mays
tatatattttttgaaagtgttaagaacagtacatcaagaagatacaaaggtttagctcagaaaacttctggcctctactaacacgcacacagccaaaaaggcgaaaaaggggagcaaataccaagcacatctctaatgaccttcaatctgtagattagatcgccacctatgtgccagggagaagaaaaccttggccgtttgcaccaaaagttgtgatcctgccacaacccgctcctacaaatccgactgtcccagtatagtgtgtgttcccagttttaaaggcagttctttaggtcgtgccatttgtttatcatgcagagca

SEQ ID NO: 141602 - DNA, 1227 bp, Zea Mays
attttccataaaacgcaggggctcttttgtaaaacgaacgagtgaaggggtatcgtgatataaccaccatccgatcgaactctggcggcccagattagatcggcgccttcgcgaaccggtactggatcgtagccgctggatcacccatcggcggcccagatctaaataccccaaattcaatcctatccattgaagccccagatcaacggtcaccgagtcctagccgagccgttcacctggcttctaatcctagccatccgtctccgcatcaacggcccaggtgtctaacccaatacccttgtcgagctacggtggcgccgcccagggcacacggtggaccatcgccggagcacactgaaacccgtcccccaatactccaaaatccaattaatgcccttctacacgatgccagatgaaaagcgagacgcaggggggaagtattaccgtctggtgcggcacgaaactcacggcacgcggtgcagttcgtccccacggcggcgagcggacgacagcgggcaatcaccggcgcgcagagcttcaatcgcgcccacagaggtcgagggaacacaccgtaggtcgcgtagaagcactcaggaccacaactccgaccgtgccagcgtcgcaatcgcgaaaccacggcggcgggcacctcgcagcgacgactaactctcgacggggctggagcttcttgcgggttgtaaggtagaccagggatggcggcttactccacggtcatataggccggttggttcggtaccgagcgcatgacgaccggggaaatcgcgcgggttgttgagcaggggccgttcggccatggcgacgatcgcgcggagcggggagcagctggtaagcggggcctacacgtcatacacacggagcggaaaggggcgcagagagaacacgcagcgcgcgatgcgaggggctgactgcccggtcccacatggcagtgacagaggaaagcgcgagcgtgcggtggctaagggggctggaaagtggggcccaggcgtaagtgagcgcctgcggtgtaagtgtgggctacgcgctgtggaagcggaagtgggccgaattggtgcagtccggcccaggtaagctttttattctttttctttttatttttctgttttctttcttcttctcttctaggtttaaatttgaatttgaatttagtttcaaaccttgtgcaaatttgttatcaaatcatattatggaatgtaaaatacaaatttt

SEQ ID NO: 141603 - DNA, 529 bp, Zea Mays
gccacctttttgctagctgatcaagttccagtgatcaacattaagttcaaaaatctacaaaacagaaatccctcctcatagtattgctatcaagaatcaaacttcatcagtagttcagtacaggtcatacttcagcataatataaagaccggatgtgatcaacaaaaggacccatctttattacatgcagcagaaatccatgccatacctgtcagcatggtccacagcaagaaagcaggaaaaatcattcatgcacgcccgcaataccatcttgtctcgggcacactagatctgaccgcacatgcacagtgcacttgtccaaacgagaaacggcttgcgtttagctcgagcctaaattccaggatttctacactaatgatcagaactttcccataatttcagtgcatgcatcccaatcctgtgcattcccccgttccagaacctcgagcgcgccacgaaatctcgcctaccgaagaccaaggtgagcaccatgaatgcactaaccagcaaccacgcattgctctccatt

SEQ ID NO: 141604 - DNA, 454 bp, Zea Mays
acaaataggaaggcgcgctcatccagttcctgcaagataaccgagatgtattcacatggcaacctatggatatgccgggagtccagagggaactggccgagcacaaattgaaggtctacccccaggcgaggccgattcggcaaaaattatgacgtttcacgcccgacaagagagagaccattcgcgctgagctggctcgcttggtcgtggctggatttattagagaggtgttacatctcgagtggttagctaaccctattcttgtactcaaaaagaataaggtggattggtgcatgtgcgtcgactatacggatctcaacaaacactgtccaaaggatcccttcgggctccctaggatagatcaggtggtagattccaccgctggatgttctgtgctgtccttcttggattgctactctgggtatcatcagattagcctggcgaaagaagacga

SEQ ID NO: 141605 - DNA, 1037 bp, Zea Mays
tgactatagtgacttggcaaaatagcactgtatatatatatgttggctgatccgttccagtcaatggctgtagtgtggaaaggatgacgactatagtgcagcgctatacaagaaacatcccagaaagtccgcgtcaccaagccgcaaagctagaatccttccaccacagccatggtgccatcacgacacaataattgattgccactgattccagcaaggttctaataaatcttgtagatgcaacctcgctttgcctgccgccgccagtcttccgcctccgccacacacaaatgtccagtttctttgctgtagctgtagctttggtgctctcatctctcatccatggaaccacgatggccacagcgagcagcgaagagagcttcttccagaagtgcccagcgtccaggtgcagcgaaggagggccagagatccggttcccgttccgccttgcgaccagccctctgtcatgcggtgcgcccggcatggagctggtgtgctccaaagcagacaccgtcctggttcacccaaaccttggcttgtgtaaggtaactgccatctggtatggcggcagcactataaccatcgtcccactcgcagtcgcagcagaacccaagtgccctttccagaagatcatctccaccaatctatcaaccgatgtgtatagaccttatggggatagggcaaccttagtgagctgttcagcagagttcatagtaccaagccatccggccagccttgctggtcccatctcttgccttaccaacgctagccgccggttcgcttacttggtgccgtcttttcgaccaatggatttccttcccttggactgcacggttctttcgaatagcatctcggtaccttaccctgcttctgtcaacgcgggcttcaacggaactgcaagaggagccatcgcatttggcgagacaatgttagaatggagagttcctaacattaccgatgtctgccgagactgcgaagctgaaggaaggctctgtggatttagctccgagagtaggcaagcattctgtaagagtaag

SEQ ID NO: 141606 - DNA, 359 bp, Zea Mays
ctaactttgaacttttgcatttagtgcttttttatagttgggacctaatgccctttgttttagatggactgtgcttgtctggaggctcaccctgtaagtggtacattaatcctgatgttcctgaagcaagtgccctcatggctaggtaatattctgctatgtctggtgcacgtatcagactaatgtttgtctttgctctgttctaacctgagcttgactcattgtatgtaaaaaccagtgcgagaaaagcgcatagtcccattaagtggaacgaggttctatcttcgaatcagcctatgcctcatgttcctgaggaacaaaaaatcgcttatatcagagatctgcacccatttgagaat

SEQ ID NO: 141607 - DNA, 441 bp, Zea Mays
cttaaaaatgaaaaattatgcctaaatattaaatcaattggctctctgagacggagtcgttccactcctaactgcctccggaaccaaacgttgactcgcagagtttgatgagcatccagatatatgacctgttggcatatctccccaaaagtagcggtcaagaaataacccaatacccgacataccaaagccgcccaagaaatagagaaggaagaaatccaggaatgactcgccgagggcatctgtgagatcctcaaggtcgtcaagatcaaggtccaaaagctcattttcttctacatctgacagtatcagtgttaaggatatgcaaccagaaatctagattgtatacacaagggttttgtggtctgaggccaaaaccatgattagatattctgtcgagtttaggcaagactgggttttttttaattctttctgttaagt

SEQ ID NO: 141608 - DNA, 820 bp, Zea Mays
tgacgaagtatcaagtaggccttagctgtgataatagtactgtggggttggtgtcctcatcgagagaagaagtagtggtgaagttgatcttgtctgaaccaatgaagggaagctatcaccacatatatattgatagtaaggaagccaattcgcttaaagtctttagagtagtatcagaattcctagatgtgttccccgagaagctactgggcatgccacctgagagaaaagttgagtttgccatagagcttatcccaggcaccgccctatttctaaaagagcctatagagtgtccagactagaactagtggaactcaagaagcatatagaagagttgttggagaagggctacattagaccaagcaactcaccttgggccgttccagtgctgtatgtagagaagatggatgatactaagaggatgcacatagattacaaagccttgaatgaggtcaccatcgagaacaagtaccccctaccagaacagaagatctgttcgaccagctgagagaagctagtgtgttctcaaagaaagatctgaggtcaggttaacatcagctcagaatccgaccttccgatgtaccgaagacatcatttaccaccaagtatgggttgtatgaattcatagtgaactcttttggtctaacaaatgcgcgacctttcttcatgtatctgatgaatagcgtgttcatggattacctggacaagtttgtggtggtgttcatcgatgatattcccatatactctcagagcaaggaggagcatgtgaatcatttaaagatggtattgcaaaggctacaagagcgccagttatatgcca

SEQ ID NO: 141609 - DNA, 342 bp, Zea Mays
ggaggaatgactgcgacggacgaactctaggctttccgcttgggcgccatctcaaccttgctggcgagcggagcggaggcaatattgcaagagagcagagaaggcctggatgcagaaaagcaaaactagggcacagaatgcagaggcgtgcgacagtgcagtacatatggggttttcccgggacagacgccaattctaaaaagcgcccagtcatcaccgagccgttatttctaaaacgctgacgtgccacgtcatcactcagccgttatttccaaaacggccgacgcggcccaatttaactcagctgttatttctaaaaacgctgacgttaccatacttcac

SEQ ID NO: 141610 - DNA, 562 bp, Zea Mays
agaagaagactcacttaagcgcttgggccaaatctcacctggtcggcccatttgcttctcacgcgctagcccacgcagtccgctccgcactcaccctgcgtgctcgcagctgacaggaaggcccaccctgtcagcctccccaatccttcgccctaccgatgacacgcgggcccgcttcgtcagatcgtcatcttccccggtgaaatcgcggcgcgcaacagaaaaccgggcaatccggcgtggtcaagactttgggggccgattccttcggcctgtatataagcaaccccctgccctctcgtcctgcgtgcttcgccgtcgccttgccctcgtgcaactcgcaaacgctgaaggttttgggccaccaggtcacgagctgagagccgccgcagggaaatccctggttcacgccgtcgggtagtcgtgaggagcagcgcgtgtgcttcgccaccacctgggggatccgcgcgtcgcgctattgggctcagttgcgggcggttctgctgtgaatcgctcgtcggagcagccacgacgtgtctgatccgcgccgcgccgagagcag

SEQ ID NO: 141611 - DNA, 438 bp, Zea Mays
atcctatctaatctcatatgatctaatctagtgtgagttacttaatgctagtacaaaggataaggccatacttctaattcacttacgcctaaattggtgacttagatcaactcggccatacccaacaacttgacctacatgataggttacataacctatcccacccgtcttgaagcaaatgaccaaaccagattctgactaacctcattaaactcagccatctactaaaccagctgctctacctacgtgttacatacagatctatcttaaccaagacaccaatacgaagaagatcaacctcatcaaagaaaggataagagtcaccgtcaaggaaggtaatcgttaaggataaaagtcaaactagatctctagatgcatcaagatccaccatccgagatagaagtttttcttgcctaaccttctcttatcctaagcttt

SEQ ID NO: 141612 - DNA, 384 bp, Zea Mays
ccacgttcagcaccctccctcttctctaacctcttccccatgatgaatgctacaggtccctagaactcaaaaaccgcccctacttgttttcatcgctgtgtagtctctctccctctcctcgcggtcatactgcttggcaggcgaacccctcctggcgccgcgccgctggctgccgtcctgcgaacctgtcggctcttatgtgtcgcctatgtgtccagcgagcttcaacctagacctctgtcgctccggtgagtccttcttccctccctgtttttttcctttccgtctggttttttttcgatgtttgcgctggccttggaccctttcgctcggccttaccatcgcctggccgcaaccgcacgtcatgcatgagggaaaagagaa

SEQ ID NO: 141613 - DNA, 556 bp, Zea Mays
ggactacggaccaggtgcttcatcttcaacgacagcgattttcacggcaacaaacagagagagaatttggggactgcgatttgatgcggatcgttgcacgtggccaagatcttcgccgcgcagacctccggacggggtcggccatgaataccctcgcccccgggctataaattgggcctgcgacctcctcttctcacctcatccagtccgccgccatcgccgttgcccgagagagagggagcagtggggagctcgaatcgcgccgccggggaatcagggaaatccacattcgctgctccgatcatcgtgagtctcctcttgagtctacccctgcttcttctcgctcgttcgcgcccggattaacccatcggtgggagcttggtcgccggcaattgctcgacggagcagggatcctgccgctgtgcggtggtctacgtgggcacatgattctgtacctctatctcgggtaggtgctctacctggcgattcgtgatgctctgcgcatagtgtagcattctcggaatttgtcaattgggcttcgggtgtgctggggcgc

SEQ ID NO: 141614 - DNA, 689 bp, Zea Mays
cttggttttgggacttttctgatcctcaggatgatgcaaggctgctacactgtgatatggtgttgctcgacgaagaggtaaagtagcaacaacctctaccagcttattgttgcatctcaccagtttgcttcaacggttttctcccttaatatgataatagagagcctaatgtgccttctttttactagctgaattgtttctactcttactaaagttgaatctacatctttctatatccagggaaataacatacatgctacgacatacccacccttcatagagaaattcaggccactcataaaagaaggcagcgtgtacaacatgacatactttcgagttcgagcatcgaacagcttgtacaagccagttctaaatgatatcatgattaccttcacgaattgggcaaagttagagcaggatattgagattcctcctgcatttcctacacttacctactccctcactcacatagagcagatccattcgcgcatcaaccataaagactactatacaggtaaacgttgttacctatatacttaaacgcttgttttcctttgctaatattgtatatactgctcgtttgaaagcagatgccattgggatagttacttcagtctcgaatgtttcgccacatcgctccaaaggacaacaagcttccagcttgaagaggaacatttccatatgcagtg

SEQ ID NO: 141615 - DNA, 425 bp, Zea Mays
gcacaaatgttcctaagactcagagagccagcagtaggactgcgggttgatactgaggaaacgcagggactcttctgtaaagatgacggccgaaggggtaagatctaatgtgagccgcacgatctaaattctatggcctagattagatcgccagggtgcccgatcggtacttgatttcgacggttggatcgtgatccaatgcacaacaggtaataagactgtggtcacatcacgaccgcccactcctgaatctacggatcgcaacacctttcccaaccgatctaatcatatgcgatggattgaaatcctacggttaccaatcgcccggtcgactcgatacgagacttctaatcccagccgcctaaaccagatccgacgacccgaaggccacagacctgtcacccccagcgaggcacctgcgcggt

SEQ ID NO: 141616 - DNA, 471 bp, Zea Mays
aaccctttccccggtcggacgcggcgccgccgcccaaatctacggtggagcgccgacgacgcatgccgcactttgctcgttgaggtttgattactaaaattgacaagtgcaacttgaagtgtatatcattgcgagtgttgaggaggtattattaccggcaatgaagtcacgtagccccctgacgacggtggacggtggagtggcaagagagacggagagagtacagagagggcgaggcccaggaggacgtcagtgcatcatcggccaagtcaacagaaggaaaggggtgagtacgtggttggatccttgaggatgtcctcaccggagaacaccagaacagattgacgcactacaacggctgggcgaaggagagaactggccacgacaaggtaacggcggcaacaaggtcacccccctggtatttatccccctgattgctcgagcctaacaaaccgcgagccgaggatccca

SEQ ID NO: 141617 - DNA, 728 bp, Zea Mays
tccctgcgtaatattccttatgaaaggatggacggcgggttgaatggattaaagtcgagggtctcttatgcaaaaatactacgacgaaggggtatggttcggttatgactgcccgatcagattcaacggcctggattagacccttcttaaatcgaagcggtatgctatgtggacaatcggatcagaaacctacggccgagatcttattaggcccccatccacacacccgtttgatctgaatcgaatgacttatgttacacctacccaaaccgatatccggatttgattttgaccgcctgatcaagaatcggcaacccggatcgttatgcgcgaaggggtacatttgatctaattgcagccgttaagcgagcaatcgactgacgtgaccatatctcccatcccagaagaacacgacagcgccgcatggcatacccgcgaggccgcgatggagcttcgccggcggacacgcaatccgatgcccaaacaccccaaacctaaaattgtccggtgctaaacctagaggggaagatggcgaacatgcggagaggggtctcacctaagtcagagatgtggagttcgctgcccacgaagaggcgtagtccgcaccagagggcatgcatcggcgagcaattgccgccactctgaggtactccgcgtgccaccggtccccacaaccgaacccacttggttgcgctagggaccctgccacccccagactcggattgaag

SEQ ID NO: 141618 - DNA, 527 bp, Zea Mays
catttcaaagctagcttcggctcatcgaccatcggtgccatcattctgcagaataacaaagtacaaggtaatcagaaatttgataagaaaaaaatcaaggtaaaaaacaaaggtaaagtcccatactatgttaagtagcctccgagcttcgtctccacccaattcacgcccgcccttagcccaaattggggtaataaacatgttccctatgcttcgggctttggttgggatgtcaaccagatccaatgatgaaagattgaaattcagcctattgacagctcttacgtgattgcatctagcttttatgaaggtggtagctgtaccacgagaaactaccagcccacaaaagtctccatggccggttataacttcatcaaggacatcaacctccttttcaatacattcgagtgccccgggtatatcttcggcggagaggctggtttcctcagatgcagctccaactgaattgaaaatgcttttcaaccgagcggtgcactggcttgcaaactcaaagcatctctccttca

SEQ ID NO: 141619 - DNA, 346 bp, Zea Mays
ataatcaattggatcattgttgtggttttggaaactagggataataagatttgtgttcggcgggggtgcaaacgcgaactcactctgaatggtgaattgttgggactcaggtgtgagttgagacatagggtttatactagttcggccttgtgccctagtctagtgtagtgttgatcgtagtattgcttgaaggtgtgttacaactagtgtgatcctgtgtagatggaaagggatcctgcccttttatagatcaaggacaaattctcacaattggagacttgtattctgcttgcgagggcacgcttcgtcgctcctggacggtgtagcccttctgacgtcgttcgta

SEQ ID NO: 141620 - DNA, 657 bp, Zea Mays
cacatgtactagtaatttaaaagttaattgttattgttgccatccaatgatcatatgccccttatagtctaaggtccttgagtctgacgatcgtcgaacaaaaaacctttgggaccacgacatacgtaagacaaacctaagaggagccaactcatgttggactgatcaaatgatcatcgtttgacttgctctaaaggcataaaaaccctatatggatgtacaatgggcctcagcgacgagatgtgggtcaggtttgggcatgaaggggattttttttgacatgttggtgttcgcctttgtgtgtgctcatacatcgacaacatgctcatacccctggcttggttctatgcacttttcaaagcaagaagtgaatgagttatgggcacaatgcaaatagtactatgagcggtcaagtagacctgatggggaggctcacgtagctgcataattgctttcttctttttagggggtttagtttgcaaagacctaggcccacatagcatgtaacacccatggtgtttagcatattcatccatggcatgtgcatcataagggcattatcatgagcatcatcaatcatattatcacttccattgaaaccttaaattgccacaaatagttatgaagtgaacccttgcttacaccactagaaaaacc

SEQ ID NO: 141621 - DNA, 669 bp, Zea Mays
cgccgggcaggccacgccgccgtaccgccggggcaagggtgggagctcagcctctagccagagtgcgcgtacagggcgtgaggggtaagccgccataggtgctgtgcaggctacaggagagccacgcccgaccgacctgcacggtagccagtagggacacggtgaggggttgcaggaaggggcttggctacgaccatggtgaggttgcggggagacttcaggcagcacgcggaggggctgctgccgtgcctagggcgtgcgagggacttcagtgatgggcaccggtaggatcaacgaaggaggaggggagaagaagaggactcaccccggtcatgacgatcggtaaccgaaggggcgcctgctttgtctgagagaagtggaggagtgggcgggacatgggcgggcagttggagaagaggaatactaggaggggaaagaactgacgtgcgggaccctctgcgcagccagcagcctggagcagcgtgatgctaggcgcgggatgggctaggggaagcaacgcggcatgggccgggcgcgaagcgcgcgctgctgctggcgggctggcgaggaggtggagctggtccgcgcgcgcaagccggccgggggtaaggggctgggctggctaagaaaattgaggaagcaagaccctttttctattttcttcttttt

SEQ ID NO: 141622 - DNA, 769 bp, Zea Mays
cctcagctcccaactagccattaagtcatggaacttctacaatgtgacagtggtgcatattgatgtgacacttccgtgcaagccaacaatgaaaatgagattgaagcttagtctagctcgactaatgtgtgaggaaacaagcatggtgggttaaagttgagcacttgattgcacattgaagcgtgcattttgcatgccctttaataatatggttattcctatactgtacttcaaatacaaaatgaatttatgaacttcaataagtccaccaccacaaccttcctgtaatgggagtccaccatgttatataatttcctcattactttctcacgggcttgtcaacttgataaatctcattagtcctctaatatatggttattagcaccaaaaaccacatcagagattaattgcacttacaaattttcccttttcggtgattgatgacaacaaaattagagcttacaaatggatgaaatataatatgagatttttggtccatgggtatatagactctccctcagggctaatttggaaactcaaatcccatccaggattgaaggggactgagaagaatcgcgaaacgggatttgagtttccaaactagcccaaaatgtataaagcaagaactgaattcttgaattggcatgcatagaaggtcaagttccacacaaacagataagcaatggggctacctctaaatctatgcatctaattgtgttacacattgtgtcacatggtagagtcatgaagtgaatgatagttatgcact

SEQ ID NO: 141623 - DNA, 598 bp, Zea Mays
gtcgtgcaccatctcggtgagccaccccgattccaaagcacccccgagaggacagaaagagagaaatcatgctgccaccataggaagctcgctggtgtggtcgttcgggttgcgtgtggtggtcgggggtcctcgtcgttcgtcgaagcacgctagagcaaggggtgccctcggcgagcacaattgatggacaactgggaaggaattcctcaccggagctatttcccccgcctcaaaaatcgccatgcgccatggctgaagatgaggaatgcacgattcaccgtaagatgcccttgatcttgttcgcccatcctcctgtacacgtagcacctaagcaattcacgtgtttcgctttagggctccgagcacgctgcttgtcgtgcgatgccaccacacagtgtatggctgtcgtcgtgctctattatcagaggagagagagagacacaatgatccgttgatctagggatcgacggtggtggttagaagctggataccggttagcgggagccgtagatcttggatctgacagtgtggtttagatctcgcttaaatagaatcctgaccgtaggatttagatccgaggggcgggatcgcgtac

SEQ ID NO: 141624 - DNA, 457 bp, Zea Mays
cgaggatgtcccggagaacagcgagatcagcctgctgaaagcgctggcccatcagcctgtcagcgtcggcatagctgcagggagcagggacttccagttctacagaggggtaagtatcaactgacttgcctgtagtatggttggtttcagatggtgtcatcactagctgtcacagaagggaagtaacatgtgcgtgtatacctcgtctggctggctgcactgctgcagggggtgtttgacggggcctgcagcgtcgagctcgaccatgcgctgacggccgtcgggtacggctcatcgtacggccagaactacatcaccatgaagaactcgtggggcaagaactggggggagcaaggctacgtcaggataaagatgggcaccgggaagccggagggtgtctgcggaatctataccatggcctcctatcccgtgaaaaatgcaacacgctggggtgctt

SEQ ID NO: 141625 - DNA, 567 bp, Zea Mays
ggagggagccctaccaaattgatgtcgatgtattgttgtaacgaggatgatccgatcccctcaatccccttagagtgactatcaaagtgtgataaaataaagaggaggatcctttcagacttgttcacctggcggtagtcgagccatgtaggtggtactaccgcccttcccctaagggaccctgttggtactgagaacggtgggcccaagcaatcgggagcagtgtgacaggtggcaaataggtgacacagaagcatggccaaatgttaggcagggaattgtagcgtattgttgtgtgtgtcccatccgtgtatagaaagggtgtatttataggtaactggggtgggtaggtagactaatgtaccattatgcccccggttacctgctacattcttggaatattccacacaacggggccattacacaatggaggatgcttaaggtcgtcgcctagatgttgatcccttcgccttgtggagaccgccaaaagcatcttcgtcatgaagttgtcttcgtcctgtgaagggggccttcacccgtagcggcacaagaaacggggagccccac

SEQ ID NO: 141626 - DNA, 284 bp, Zea Mays
gtgggaaaggttctgcggcggcgcagctagctccagtgagcaattacgcaggcgcaggggcaacgcttggtgaaataagggcatgggaaggttgctcacctcgagtgcgaactccaggggcttggagaacggcggaggtgcgatggagattcgggtcgacggcggtggggctctggctgcgcaagaaatgctccagtgagcgtgggtcgggcaaaccagagggagaatgagggaaccagagggtgtcccgagtaggtgacagtgaggcggaacacaccgaggca

SEQ ID NO: 141627 - DNA, 537 bp, Zea Mays
aataagattaacctgtccccacataggtatagctctactcctctttctagtatctagtcagttacaccgaggtaacctgatcagcgactgcggcttagccactaatttagggaaacgacagtcttgagtagagtgtcctgactttccacaattctcgcatgagtcagtgttgtctaagatatctttagaaggaatgtctgggatatctggcttatgtggaatgaaaggaatgacaacctgttttcacatgactgtggtgagctaggcagttggggtggagaaaaacgaggataataaacttgttgataaaaaaccctccgacactgtttgattttaccaaatgattcctctgcaaacttctttcttttagactcctgatgaagccgaatcttgttatcacccaaaacagcctgactgaccacctcattatatctttcagccaaactggttgccatcaagccctgaagtttcttgttgaggccacgtaggaagtagaactttttcttctcattggtatttacaaaatccaagatgtac

SEQ ID NO: 141628 - DNA, 375 bp, Zea Mays
taaaatcgctcccatttggttctgcatctcttcctcttccgtttgcaccatttatcgctcgggttaaggctgtaggggccgaccgaccgtgttgccggcgatggcgccgccgcggtgccctgtccctggccgcatgggtggccggagggggaagagaagcgcttgtcgtgggcctttgatctgtgtatgaacgatctagattagattgggttcaaactagatgtggatcgttcgatctgaatggacgagcgagattatatacagcatacctccttcgcagatgaaatctgagccactggttatagatccgatggttaggttaggtcaatgacgtggaactctctcggtcatggatttcgtgtccgtgggccttgg

SEQ ID NO: 141629 - DNA, 339 bp, Zea Mays
actggcgtgattgattgtgctgtgccagtgtgattataattggtcttgctgtcgcttctgcttttgtcatactgggtcggctgcgcccttgggcggtttttgcgggtcggctgcgccttttaggcgacttctgcgcgaaaagccttcgcgatagactttgatttttgcgcacttgtggagctaaggccggctgcacccttgggcgacttctgcgcggttagtcttcgcgatagactttgatttttgcgcacttgtggagctaaggccggctgcacccttgggcgacttctgcgcggttagtcttcgcgatagactttgatttttgcgcactcgttgtgc

SEQ ID NO: 141630 - DNA, 292 bp, Zea Mays
ctcatgttttgagtcgcaatgtctaaactgggttgaataaacttgagatgtattacaatagttgtgtgtcgtgccggttatccaaaaaatggcgaaaggtggtgtgtgatggtaattgggaaatagtcacgtcattagccaactcatgttaggtaggagttgattgtgttaagtgattgttatatatgttgtgtctcgaattatgataataatagtcaagccgacgtgtatgctgtctagtgggttgtgtcgttgctctagctagccgactcgttatatgactttagttaag

SEQ ID NO: 141631 - DNA, 684 bp, Zea Mays
atcgccactatgggaaggaccattcatggtagcagaagcaatatctctactcccccactgattctgtaatgccgactgttcttccgaactaatgggacttcttcttcgtccttgtcaacaatacgaacaataaacgacacagggtcacacccattgggttcagctctggcagggtcacacccattgggatcagctctggcagggtcacacccattgggatcagcatcagcaaggtcacacccattgggatcagctccagtaaagagttccacaggcacttcttcagcagcaggagcagaagggccagcatcctggtccaaacatgacactcgctgaagctgtctctttttctttttcttcccctcggcaggtgcagttggatgactaacctggcggagacgtttcgggcgagtaccctcaggccttcgagtatccacggttttttcaggctctgggatagttgcaacagccattgtttcagcagggaccgagtcagaagaatccccagccaacatgtccagcatagcacttatctctgcatcacatggactcataggcatctcaaagtgaacttgcctctcatcatgggtaatatcaccaagtgaagcaaccagaacctcaacttcttcgagagagggtcgcactctaagacctaaaccactgtcaccagcaggaggattggac

SEQ ID NO: 141632 - DNA, 908 bp, Zea Mays
ccaatgacagatctgcctcctcccgcaccatcccctgtatcaccttgccagcagcttgatagaccatgttaaaatccccagccaatagccatggttcactactgagagctctgaaatctagaagttcccgaaggaattgaattttactctcatcttcttgcgggccataaacaccagtgaaccaccaattaccatccatcccagcaaactgaactgaaaccgagaaattatcaatacgagaggagatgacttgacatactgctcccttccaagcaatcaggatgccaccacgagtaccattggcaggcagggtcaagaacttatcaaagtctgaaccacacacggagaggagcagatgggtggaaagcgatgccattttagtctcttggagacaaataatatcagccttggaggatagaattgtgtctcttacataatctcgcctagccttattattaaggcaacgggcgttccagacaagaatgtttgatagattcattgtaaacaaataaaacatgaccaaggaccgcaggaattagcagccagccaggagctccggacctctaaaatcatcaaagcgctccgcctgccagccaaaaatggcagcaagagcaacgaggtgagagtccgtcagttgcccctcgaacaacttgcagtagttgtcttgagctttttgatcaatggcttcatccttggctgcaagacccaggctcctgatgactttcctttgggctccagtgatgaccggacccagagaacagggtttgacaccggccaccctcctgctacgacgaggcgcaacagcagacgtcttacaacttcttttcttggcaaccggcataggcagcagctgcaccactggcttggttattttctccaggtcattgagaggggcagcaggctcatcc

SEQ ID NO: 141633 - DNA, 692 bp, Zea Mays
aaatcgcttacattagagatctgcacccatttgagaataaggtatgttccatgtttcagtcccttagtcattgttgccttaccaactgccctggccttcggttattgttttcctacagtcgtgtcatagttgattggatctgggaatatagcatgagcgtacatttacatgttcaagcaggatagggaattcttggtgacggtcactataaaaaagattggtgataggtggtggtacaatgcatgcaaaaaatgcacccgcacaactgtggctcatggggattcctacaagtgcaacgatcaagtttgcgctaccattggcacgcccaaccaaaggttaggcaacatctcttcgcttcaattgcctccattttacctttgcctcccaatagttctcgctgttttgactcccactcacatctaatatacaacggctacttttctatgcatcaccctgagtgaacgtttccatttcctatacacacggcctacccattttcactaagctgactcggtatcgccatgtgttttaggtacaaactgcttctcactgcaggggacgagacaggtgacacagacttcatcctctttggtcgaatggcgcaacgcatcatcaagaagccgtgcgatatgctcattgccaacaatccgatcggctttattcctgatccaatcacagatctgctcgagaag

SEQ ID NO: 141634 - DNA, 435 bp, Zea Mays
aaagcaagttttcctggcataacactcttcagaccagtccccaaagtgaaaaacccgaccacgatatgagaccgacctcctatccagagcccactgcttggttcttgaatcagcgaagatgataaagaactgttcaggaaaatgcttgacaagctgatactgaccgtgatgaagatcaaaagaatccctcagcatatcccccgctgccagcacatccacctcatgactgttcccatcaaaggagcaaaccaccgccttactgattaactcatccctgcgtcgacggatcaaaccagtcgcggtgatggcgcagacagcccttgcagaccgagcccttgggtctccggggtagcgagcatccattgcctgaccactctggacaacctgaaggtaagacttccgttgcagcaaggaggaagtgggaggtgcttgcac

SEQ ID NO: 141635 - DNA, 596 bp, Zea Mays
tggacgggacctcacgtcatgtactgttgatttggtcgagcacgaggagtctgcagaaaaggctaaggcaatggccgcaaagataaagatcccaactaaggcagattataaaaatgtgcctaaacattatgtgccggccagaccgctactaactcttgagaaactgaggaaggtccctgctggtattaaaaggttgcatgactggtacatgcgtgcatcatcagttggcattgacgccattagtgtgcatataccagatcatgcttttattggttcgcaccaaaaggcctttcttgcattcgaggatatgtggttaatgatgaaccttcagaaactcaatgtgcaacttgtgactctatttgcactgtaagtgtcgctcatatttccacatctatgtgttattaattttcaatatctgacacacgcatgtgtgacttgtagaatgcaacatgaccaacaagagatcctgtacggtaccaagcccaatgctaatgccggtaaaagtattaggtatctgaacccaatactgatatgtgaggaaagccacactttcagaatcggcaaagacaatgaagagttaaagggaaagacggtcg

SEQ ID NO: 141636 - DNA, 627 bp, Zea Mays
cgggaggggttgcaaaaggcctgcaggtttttggtgctcgaccttcgtttgttggcagatgtcacaccgggccacatactgagctatttctttcttcatccctctccaccagtatctggttttgaggtctaggtacatcttggtagtccctgggtggatggagtaggctgagttgtgagcttcttcgagcaggacctctcgtgcttccccttttggtacacatagacgatttttgaaccaaagggctccttgttcatctgtcctgaggtccgggagttgttccttgcgggccctttccacaagttttgctgtctctgggtctaggcattgagatttgcatatgaggtcttccagcattggtctgactttgagactgtcgctgtttcccagacatgtatttagttgagctgattctttcttccaatcttctaaaaagttggtccctttatttcgaatggttttcgactgagggcgtctgctaccacgttggccttttcggggtgataatgaatttccaggtcgtaatccttgatcagctccagccatcttcgctgacggaggttgagatctggttgagtgaatatatacctctgactcttgtgatcggtgaaaatgtgacatttgttc

SEQ ID NO: 141637 - DNA, 839 bp, Zea Mays
gccaaactcgtttttgccatggtgaggaatgaccccaaagatgccagcagctgcttggggcttggtacgtggccttactcacccatcaccacgctggttcaaagggacaactgggcagtaaaccaggtccggtaatgggtaaggattttatcacggataactctgaattccacccatgtgcagatattttcgttagtgaaacccatcagacactagaagctccccagccactctctgtaatactcatccataactcagtcttgacaaaccagtggagcacagtagggatacacagatcttttcaaggttggaaaccaacactgaattctattgagtccaacactccactgtccacctgaaccccttaggtttacccctttatctctctatttccaacagcaacaaatcgaccaaggctaaccaaatattctcacaaagcaaagtctaccatcttgctaaaacacacaggtcaaaagtttcagagccccaaagtttcctctcaatactcagatatttgaagcctcatatctatcctctatgtcgagcacacaggacaagcaagcaagcaagctcctgccgatgtgcagtttgagcacgccgcttcccctccctcctgtccaactaaaacaaattcatacccccacacgcccagctaatggattgacttgaaatcccctttgaactactagccttttgcattttaaatcacagcttcaaatcacagacaagggaaacatagctgcagcgtggaaagttttttttgctcccaaaaactgaacccagttttcagtcacctaaaactgaattcagcactaatcaactgaacccctacctttaac

SEQ ID NO: 141638 - DNA, 394 bp, Zea Mays
cctgaaccgaaatgtgtacttcagataaactaggccattttggctggagccagcagcagtctccttcagcatttcccatccacttgcaaggggccatactctgtaagaaatttgctcttggaccaaatccctcgtgccgatataggtgcatatagtattgaaagccgtctggcacgcttgcacgtcttttccgagtgcagctgaaggtcttctaatgccgaagcgttaccatataggacgttgaatgatgccccttatgtcctccctctggtccaggtcgttcttcacataaaaccacttttgcatccaagacctcgaccacttcttcctaaatgtaggcacatgataattggcctcagagtggggcatgaagctgtagcagccgaagttgttg

SEQ ID NO: 141639 - DNA, 524 bp, Zea Mays
cccttcgcgtaaccgacggtcgtcgcgccgcgcaatggcctccgcatccgcggtccgccactagccagcaaagtcgtcgcagccatcgcctataaataaaaggggggaagcctcggtcgcgctcaggaatgccaagccttgtgccattgcctgaatgctccactccgcgctcgccattggaagagagggggaagttgcggggtgcacgccggggggaatttcctccaccgtacgtcctctggcgggtgctctggcacttttggccgggtgtgtggatccaagcgggggcaggattggtgcctccgaggccatagcgcggcgggaattgctcaccagagccaggagttcgcgccgtgaagctccccaccacggtccgacctccacgcgacacctctgccggtgagcccctctccgcaagatttgccttcatccctgctatgtgatgctgcgctcacattcgatgattagactcgtgcgcgcccaatgcacctcgcgccagcgtgaaaccaccgtgtcaatggatt

SEQ ID NO: 141640 - DNA, 421 bp, Zea Mays
gcaggaacacccgcccgaacaacgctcaaggttcgccgttccgctctggaaatcagggtggaaataattatcaagtgcaacgctctagacagcaaggccagagggacaatcaaagctagaaccagcaaaggagcaacactcagaccaaccaaaggtctagtgggaattcacagaatcatcaaggtggcgccagtaacacgcaggctagaagcaaaaacgcaccagtccaacccaatggctatttcaagtgcggtgagctaggccactatgctaataactgcccaaagcgcaaccagtaggcacctcagaaaagcaataaccagagaaatgaccagaacacccccgctcgtggatctgcacagaaaaagactccgcagaaccagagtagaggaagggtcaatcacgtcaccgcagaatcaat

SEQ ID NO: 141641 - DNA, 282 bp, Zea Mays
ttggtcctgtataaaaagtggagtaaagttggttccaaaatcagctgacaggtttgcactgactgcatttttattcagctgctgaaatctgaagttcagtgaaggatgacttgtttggagccattttgtgattgatctgagtggttttagactatagtttctatagtaaacctggagagcttatgttggtaagtaagttccttattttgatacttgtaaggttctgcataaaaagtggagtaaagtgtactcaaagttggaatgtcaggtgttggggattca

SEQ ID NO: 141642 - DNA, 397 bp, Zea Mays
tgcaaaacgactataggagactagcacgtgcatttgataaatctagcattgcaaattttccttcgcacgaggttgagttaggaggtaactcatgtaatacatcggctataggttgtcacgaccaacccctttatgggatgccgatggacacgtcctgagcaaccgcaaatcggcagtaaatcagccgatctgcacatgtccgaaccgtccgcccgtgatcgcggaccgtccaggccagccacagccaggcccatttttaatgagttacccaggcatgcacccgagccaccacatatggcacagaatctgaagtacctagtcggacggtccgcatataaccacggacagtccgggccaatgtccggacagttcgcacatgacctttttgaggagaatt

SEQ ID NO: 141643 - DNA, 336 bp, Zea Mays
aacaattatcaagtgcaacgctctggacaacaaagccagagaaataatcagagtcagaaccaacaaaggagcaactctcagaccaaccagaggtctggtgggagttcacagaaccgtcaaggtggcgccagtaacacgcaggccagaagcaacgcaccagtccaacccaacggctgtttcaagtgcggtgagctaggccactatgccaacaactgcccaaggcgcaaccagtagacaccccagaaaagcaataactagagaaatgaccagaacacccccgcttgtggatctgctcagaacaagactccgcagaaccagagcagaggaagggtcaat

SEQ ID NO: 141644 - DNA, 740 bp, Zea Mays
gcaactcggtggctgataaatgaagtagagctgcccgaatccaagagtaccaacatatccataccaccaatgtggctaataaaccgcatggtcttgggggtatctgcactgagaacagcagcctgcgacatatgtaacagaagcaactcttcagctgtaacatcagtaacaggttcctcatcttccggtaactgaaaggactgccacatttcttcgaccaggtgtaactgcacggtgtcagggcacttgtgacctcgattatattggagtccacatttgtaacaaagtcctttggccttccgatatgcatataatgtagccaatttgtcctcggactgagcttgtcgagaaggaatggcagcaggcgcatgatccaacttgagggaatgagttgctttactgtcatgtgtaaggttggtgcctgaggccgctggtttgctgaatgttcttggagtgaacttgccctcccgctgtcgggtaccctcgcgcacctcctcctgcaactgagcaagaacataggcagtatcgagatctcatgggcgttgcactaacacaatagagcatacatcatcacgcaacccatcgacaaacttagtgatatagtaaagtgggtcagcatggggttgataagcctttaactggtcaactagttgtgcaaattgttcaatataatcagagacactggaatattgacggatgtgcaggagttgtctaagaagagtttcgtgctggtttttgcc

SEQ ID NO: 141645 - DNA, 497 bp, Zea Mays
cccggcggcgagatcgccgaggggagaggcaccgacgcggatccttccggtgaacgccggtgcaccccatcaaagcaggttgcgcaccaggttgagtgccccctcggactgcaagcgctcaggatgagctagcgaagccatggcgactacggcggtggaaagcagaggaacgcgaatgcaaaggggcgcggagagctcgaaggcgaaagagcgcagcagttggagagaatgcgaaagcgtaactgctgcatgcgaggtgaatcccttttcaaggaagactctcctgctcgcgccccgagacaccgcagaaaatctcgcccgacgtgcaccaaagcaacccgcctatgacacgggggcccaggtccacaagtcatacagctggtgtgcgggtctctgagtgctgagaaggcaaaccaccatgcgaggagcgaaccgccgcccgcggtagtgtgccacttcatctttgccggaaacaaaggcccaatctatgacatggg

SEQ ID NO: 141646 - DNA, 420 bp, Zea Mays
gttcaccagagatgacgcacatgctaagttttggactaggcacaaatagaaaggtggggcgacagagagggtgtcacggcggcattctacagagcaacagcgtgttccggtgaaaggcttcggccgaccttcaattggccgcattcgagagcaataagagatcaaagaccgactagaacaggaagcaatttgataaatactgacccgaggagcgctggccacgggtgttgcttctcggtggagctaagaacagaggagagagagatttgggggctacgtgggtttttcggtgagcttgagtcgagcgcttagtcgctgagatgcgggatatggtgaagaagcagcacccgcactcaatttataggctaccggccggaaccagatgagattcaccgagctgtgaccgcgctagcgagctca

SEQ ID NO: 141647 - DNA, 622 bp, Zea Mays
gatgtggttcgtcagatctccatccaacgacccacattataatctgaaccggtgtatgcgattgaccacccgatccaataccaagggtctagatttaaagtaacggaggggatccccgtcgtccgttccaaatcaacgatccatatctagttcgatcccgatcttatcacgaccctcaattctcgatccaaaggccagggcagccccacacgtccccccctttgatcacacccgttcaaacctaatcaaacggccaaaagtttgtctcctacccaatggtgagctacggcgagcggagctctccgcgcggcggcggtgctgtcggagtacgccccaacgcccctattctctaattgtactcgtgctacatctcgattgggcactaacgagactggggaaggcactcttaccggcaatggtcgaggcatagggtctgcccgcgatgcccgatgactccgcgatgacggcgcacgtggatgggggaattccccggtcttccgcacctcggtgaggaacgcacggctttctcgcgctccggtaaacctggttgacggcgcgatggcatgagccagtggcgcggtgggggtttgccgaggcgagtcgccgcgacaatggcgtacgg

SEQ ID NO: 141648 - DNA, 469 bp, Zea Mays
actaattattatgtacaaaatatgtggccaatagtgaccattcaaagtccatatgaggttgtgttctcagttcagcaggacaaagttataaggctccatgaacttggggtggatagaagtgcagctttcagcactatattgatttcaacattttatgattccattgtttgggagtattttggaagggctgttagttccatgcttaaagagcaattggtcagggatcaacagttcatggaaagtgacgaggagtgtataggattcaacaatgacatgcgccagtttgccatacattttttgtgtgttctccactaccttatttctgcaacaatgactagtgtgaagtgctgccttcgtgtcctggaacagcgaaattctgatttgcagaagtttgcagttaatctgatttccttttcgcatattcttttcatcgtggttggattccattcactgacctcacggtgctccc

SEQ ID NO: 141649 - DNA, 743 bp, Zea Mays
tctgcagcggtcaccgctactgtcacgcgagaaaaaaaaattcctcacgctgttgcgcaaagaaagcagcagctactgataaaaaaaggagcttattagctcaaatcagcatcagtgactgaaagcgaaggtctctgttttaggtcagtctaacacaatcacagaaactaactaactttacgggaactaaagtgttcgtagaaactagaaagccgcgtgttctagagctcataaaattgattgtgattttttcgtctgatcatataatatgttgaacaaatgccaggcgaataatcgtgtcatcgccgagtaatggaggtggtccaactatgaagtaccacccaatatgattttgatgtgggctactatagtagtttcggaatcatcaggctccactccagccaatgtgttaacacaataatgatacgtttgtcggtttgtccatcagaaagcaccatcatcaatacggtaacgctagaaagcaaacacaatactgactctcaaggaagaaactgatatatatacacgcagctggtgcatggctcgcattacattaactcagtagctggcaattttaggattatgatttttttcatgactccaaatacccaccatgccgacatcaactactctgcaaagttcttaataatgtctgcatgcctcgtcatcagaaagtagctggatgaaagaaaacaccgatacccacacagtcccctctgcccccacgatagaattcctttcag

SEQ ID NO: 141650 - DNA, 543 bp, Zea Mays
cacaaggctccaagagtaacaaatccgcacatggttaagtttgcaatgagctcaagaacagagagaatgggagaatcaagatgaaattgacagcgcgttagatcgacttcacctcacaccaaggatccttcaagcgattgaaggagatgcgatttcaggtgtgagatgtgaattgaatgcccttgtttggagtttggtcaactgtggagagagcagaagtaatgaagagacagtgtatggggggtatttaaaggatcccccaaaagctggcagccattgggagaaaagaaccgaaaaccggtttccaccaggaagatctcggttcactgatctactcaaccggagactcgaccggattcaaaaccggttgagccggggaaaaatccggttgaaccgatttccaaaaaatatctgcatacgtcttttctgacagctctgactgtcagactggtcagagcagaagtggcagagaaatagtccagaaaccggttgaaccggtttcaggtccggttgaaccggtttttgaagctgaagagcaagttt

SEQ ID NO: 141651 - DNA, 647 bp, Zea Mays
ccagcatcgagaacttggactgatccaattagaaacccaactaacacccagatacagatttttttcattcattcattcattcattcattcccattagatacgtagacatgtatgagaaccgggactaatcttattagaaattcaacaaggacatccaaaattcagccgtggaacatattttgaattctgtgtgcaccagacagccacgttttctagttaacaaacaaaagaatctagcaggagtaagtatgggtattggttgatcaaaatcaatattggtatgggtattggttgttcaaaatcaacactggatcatgccgactagctgcatgctccatagacagtattagtaattagatgcaggccaggatgtctgaagtacaacgttgtattagaaatcaaggaagcagtatactgcgccacggccctcaatccggcacatcttcctgaagcggaatgttgtgatcgcaggtgagcaggatggaaccccggcaatcactcctgatgacaaaagcggttgcgtaccaccctcccgcggcacggacgcccggctcgaagtgctgcctcgtctctggcctcccagccatatatcctgcaaagcatgtgcggcgccggtgttggagaaccagctcgcggacggcggatct

SEQ ID NO: 141652 - DNA, 710 bp, Zea Mays
ctttggagcgaatgagtttggacaaaacttcatgcccaagatgcccaagacgacggtgccatagcgaggtgggtgcagcaaggaatgcggaggtgctggtggctggaggaaaaaacgggtagaggtcgccagagctattgcacctggcgatcacgttcctggtttccaaatccttcacagaaagaccaaacggatcaaattcgatggcgcaattattgtcggttgtaaaacgacgaatggaaatcaagttcttaattatgtgaggtgagactaagacattgttaaggacgagattgcgatgcggaaaagaaaaggtatgtgatccgatggcagtgacaggaagtaaagcaccattgcccacaatgatagaggaaggtgtggagtatgtgggcgaggatagggtggaaattttaccagcatcggcagtcatatgcgagccggcaccagagtcggcgtaccactccgatggtgccgggggggtgagcgtcatggtgttgaagttctgcactagggagtcttggttccatgcacctccatgtgtgggattccagggggcaatcggctgctggtatggccccccctgaaacatcggcgtcgagggtgtacctcctccaccgtagacgtacgggtggccggggccattgctgtagaggtggccgccgggggcaccaccgaagggtgccccgtactggggaacagcggcgaaggcc

SEQ ID NO: 141653 - DNA, 346 bp, Zea Mays
gaagcgataggggcgttttgtctgaaggagctagctttggagtttggagctggaggcactatcgacgaaaggggatatattggcccttcccatgcaccatgagccgctctgcgttggctggattggctagctgggtttcgtctcatgcttatttcgcacaactgcacatgtctgccgctacttctgggtcaatcggcccaatgtttgtttatcatctatgcactctgcatctcccttgctgctccaagagtgcggcaaagtcttgtttctttaatctttcagcacattggtttctcaattacgtgccgtctgttgcttcttcgcgttttcattgccgaagtagtcc

SEQ ID NO: 141654 - DNA, 379 bp, Zea Mays
ttatacaggtttgatccactttgaattgcgtaacaccctacttcttgttgtgggttgtggctatgtattggtttttgggtattaggattaccagtgagctttgcgattctcgattgctgttgatgaggatggggtgagatgatgttgtaggggtctcccctcggccttatatacgcgaccagagagttatccctttacaagttgcaatcactatctacttcacttatctccgtctttgtcgtagcttgcaatactatacatccggagtcttgatcaccttcttgtccgagttatcgccgaatgcttggctcctcaggtgcttacaactacaccacccgagatatcagtgcttcagtagcgcctaaatcggacgtcggtc

SEQ ID NO: 141655 - DNA, 470 bp, Zea Mays
cgcccgtacaaatgttggcaaggcgttctttagaccgtagggcattacaacatagtagtagagcccatctattgttacaaaagcggtatgcttcctatcttccctagccatctgggtctgatggaaaccagagtaggcatctagaaaggataagagatcacacccggaggtagagtccacaatttgatctatgcgtggaagtggatatgggtccttgggataagccttgttcaggctggtgtagtcgatgcacatccgaagcttcccgttcgcctttggaacgatgactaggttggccagctacatagggtgatggacctcttcgataaagccagcgtcaagcagcttttggacctcctggcgaatgaagtcctgccgctcaatggactgtcttcgaggctcctgactcaccggtttggcgtcagagtggatctttagatgatgctcaatcacctccctggggatcccag

SEQ ID NO: 141656 - DNA, 574 bp, Zea Mays
aggaggtgttcatggcggcgcagagagtggatttgggggaaattccaaattagggcgctatagtggacgattgggcacgaggagtggttcactgggtttgtaacaagtaggcggaacaggccgaggcatcaatttatagaggacggtcatgaggagggcgaatttggacggggaagagtgcgcggtgagaagggggaagagtcaccgaagtttgctaatgtggcgttcactggtttacggtctacggtggtcactatcgagtcttcacggcttgcgacgagtggtgagatgacttaaggcatgtcacaatcgagctagatggcggcacaacgacgacagggcaaaacaatgccccaagttcatccccttcgcgagatttttcaccctacgtagttatctgcactccaccgggcacgaatcgcaacggcggcgaggatcatggcgtgggatcaccggcggcggtgcatttaacctagcgatcttcatcaggttactgtaccattgtgaactcccttcagggcgcctaacagagcaagtttcagagcgttttactccaaaaattgttcagcgcctg

SEQ ID NO: 141657 - DNA, 437 bp, Zea Mays
gttggagaagaggcatcgcggcgcgctgctgagggaggggcagagccagcacagaggggcgccgggctagagaggggaacaggggcgctggccataggaactgctccctacgcctccacctggggaggagcagtagggaggaagatggggaggcgccatgggaggagagaaagcttcctgcgcgctgaacagagaagcaaggggagcagccatggggctcttctgccgtgtgccaagggatagatagaagagatggtgtggggaggaagaggtggagatggctcgtgggaaggggtgggctgccacctttaaaggggcgctcgctgcagccattggtgggcatgggcggctgctgcagagcaccagtctgcacagagacaaaaaagagcacacattggacggacgttttggcatttttcgtttggattcggacccgg

SEQ ID NO: 141658 - DNA, 461 bp, Zea Mays
gctattcgttatcccgaacctgaatattatatcctgaataaactccactgcttttgctgaggtcaaagaggcgatcggcttatactctatccattttgtgaatttgtcaatggcaaccagtatatgagtatagcctccctgagctttcttgaaaggtccgatcatgtcctgcccccagcatgcaaacgaccacgttacaagaatggtctgcagctgctgcgcgggcaagtgctgttgcttcgacaggaattggcacgcttcacacttctggactaacttggcagcatcactcctcacagttggccaatagaagccggatctgaaagccttcccgaccagagtccttgatgcaatatgtaccccacacgggccggcatggatttcatctaacaattgtttcctagtggccgagtgaatgcatttcatgaagactcctcctgcacctctcctgtacagtaagc

SEQ ID NO: 141659 - DNA, 484 bp, Zea Mays
agcgttgattgctcagtctttgttcggattcggactagagagctaagatcacgcatgcgtatcgatggattctcttctatcatctgcttctttatttccaccctctcagtgtcgtgacgatgcacgtacgtacgagccgcgcggtttgcatcaactgtgccggccggcgtctcttgatctgctctgcagcatgcatatgatgactcaattattgctcaacgtccttcgtcactgacatactagtagtgtgtcagtgtgtgcgtgtcagcgtgtgcaggcgtctcttgcatgcccgccctgcagatatgtacacgcaatatatattaagtagtataacaagctacacgtgcttcgcagctgccaggaggccttgtttgcttcgagcgcgcgcgcttaccgcttagcttccagctatctgcgctgctgcatgcatgcatgtcgaattctagctctactgggtggtttccgttttttttcttccttc

SEQ ID NO: 141660 - DNA, 512 bp, Zea Mays
atcattccgaaggttgaaccgatgtgaggtgtggtgcactcgctgtaagtatgttactatagtttgtatgatgaggccgtgtgccttcgcgcattcggctatgtctatagggacgttgtgcgcttggtcgggcgcatttattatgttggtctggttgcgcctgtagctggtctgtgcgcagatagtttcttggtgtagacttgtgcatggacgtaatgcgcttgcgttttggcgcgcttgttgaattaatccggctgcacccttaggcgacttttgcacggatagtcttttgaggatgacttcgattttgcgcacgtgttgtgctagtccagctgcacccttagacgacttttgcacggatagtctttcggagaagacttcgattttgcgcacttgttgtgctagtccggatgcacccttaggcgacttttgcacggatagtctttcggagaagacttcgattttgcgcacttgttgtgctagtccggctgcacccttaggcgacttttgca

SEQ ID NO: 141661 - DNA, 423 bp, Zea Mays
gccagtggtataagtacaacaaagaatggaggtatgtcaaggcttacgcggtaaagaagaggatatagccaagggtgagataagtaaaacatagatctcgaattgagatcgaaaagaggggatttcaacaagcagacctaagataagtatcaagtcaagatctacagattacaaaggtaaggatgatatcaaacaagagctcaacaaaggatgaagttaaggtgaggcaagattgcagagcgacaaagggaaaggaaatgaacaagagcgggatagggaaaacaacactctcagattgaaatggaataagtgaggctaagaaaaataggtaaacatcatggtaaatatggagagaggtcaagggtcaaaggtgataataggcaaggatataaaggaagaggtaaatgtgcataaaagaaccag

SEQ ID NO: 141662 - DNA, 375 bp, Zea Mays
aacaacttcagttgttacgggtttatcgcccgtcccaacgcaagtcacccagtgccaacatttcggaagaggtggccgggaaattggatggaggaatggtcttatgtgaagaacgacttggtagcgagggaggatgttaaggaggttattatgcgtcccatatggtcccacttcggccttcgaaaaccgaaggttgaaattgatgaagccgccgaagcatgccagaaggcctttggtactgtatgcttctttattggtacaagagacttgatttaagaaaatatagcattcagagtatggccgcttgtagagaactgggaaatgccgaaggagactgtcaccgagtctagcgaaggtgacctgattcgactgaaa

SEQ ID NO: 141663 - DNA, 511 bp, Zea Mays
gcggcgtgccgatggtagccgtgccgaggtgggcggaccagccgaccgtggcagcactagtggaggcatctgcgggcgtgggcgtgcgtgcgcgggtggacggcgacggagtggtggagcgtcgtgagctgcagcggtgcgtcgagaaggtcatgggaagcacggacagcgcttcggcagtgagggcacgcgcagagtgctggggccaacgcgccaaagaggcggccgccgtaggggggacgtcgcagaggaatctccgagcgtttgcgtccgggctgtgacttgtgagccacgcaccgatgcgtcacgcatatggtcaaaataaacacggattttaccatgaccattcacgttaataatgtttgttgacaagaaatgagcccactgctcattgacggtagcaatcgacactggacagcgacttcgtcgtctttgtttcttccgattattaattcaacaattcggagactagaataaaacataactagcaaggtggtccacgtaaataaaa

SEQ ID NO: 141664 - DNA, 501 bp, Zea Mays
cgcctttctcgtcttgataagttttggctcagcgtagagagctcgatacactccattgtctctctttgtatccattggttaccttcgcccgtaatgaacccaaacttctcccctatgcagagccgccaccgacgcagtctgggatgttgtagcagtgcctctactgtcgagaggtgaactctaggcgccacttcacggtatgaacctttcccacccctcccatttgtttattgacatttcttcttgctcaattgcttatcagagccaagctccaagcgaccgccttgccactcaccgttgtgctcccatgccgacccctcggttgtggactaatccactcccatcaagctcgccacactacaccagaccatctccacctaggttcatcgtgaattaatcattttcccatgtggaattgctcaccgcaacttccccagtcgaaccactccaccgccatccacccatctttggccactccactgcggacaaagaactatcgtg

SEQ ID NO: 141665 - DNA, 575 bp, Zea Mays
ggtggcagccgcacaagacctgcgcagcccagcaatgccttgcgccgacatccaggggccacctatcggtctccactgtggattacatgctctccccgttctgtcgctgattggcgggcccaggtggtcagctctttccctgctggcgtaacaaaccccgcggtcagagtcgcctcccagcttccgatcgaggcggactccaacaaaatcaaccgatctacgcgtgcacgattatagagatcaagtcaaattcggattgcactggcaccataaaacccaggccctcatgcctcccttcgcccacatcaacttgagacgccacagaaatctcggggagcaaaagcttgctcagaaggagggaaagccacaccgtggcgtgggtatggcccaccgccgaccgattcgccgtaggaggcatgctctggggtgtccgccgtgccctggggttcgtgttcatgggtgcggttgatcacgtagggcttcaatggcgccctaattgctcatcggagcatcaccgtcgccactcaccgtggcctggccctactgtgtcgcgttttcgggtgagttccttcccc

SEQ ID NO: 141666 - DNA, 613 bp, Zea Mays
cgagggtgccctggaactgaggcggccggatcagctgcgtgaagatgtagcagagatagtgcgcatatggcagctgtcgatgagcacgaagaccatccaacatcgtgtcctcaatctcacagataaggaaatcaaccacatcaaactctgaatgtgagatcaaggcaccaagtagccagagttgtatgtgggtggtggcctctctataacccatccggggcagtagtgtctgtctcatgatctgatagagatactttgttgctagagtgaaatctgctggagaatgtcgcgacccatttgtgaagggcggtctgaacagggccacgacgtgagcagtagaaggagtgactccgtgtgagggcgttgaggaggatctgaagtaccatagcataggctgtgaaggtgagtcgatgactcaggaaatccaaacagctggcgtatctggatggcatgaatagtgacatcctctcgctcgaaacgaaacctcatccactggtggtccgggtctatccatactgaagcataaaacactcggacccactcctcaagatatctgccgctggtagtcagtagagtgagaagtccaggcagataggagaggtgcacctcggaa

SEQ ID NO: 141667 - DNA, 968 bp, Zea Mays
atgattctgatgttgctgtcctctacaaggagttcctcagtatgcaaccaccagtgttctccaaggtagaagatccattggaagcataaaattggcttcgaacgattgaacagaaattgggactcatccgttgtgatgatatccaaaaagttcagtgtgctacccaacaacttcagggtcccgctggagcttggtggaccgaataccttgcactgcagccagaaggtcatcaagtttcttgggtggagttctgtgaggtatttcgggcacatcatattccgaaagcccttatggaaataaagttcaacgaattcctagatctaaagcaaggcgaagaagagggtgtgatgggatattttgagaggtttactcgtctatcccagtatgtcttggattttgtgaatactaatcagaagaaaaagttctatttcttgcgtggccttaacgagaagctccaatgtttgatggcaactagtttggctgaagattataatgagttggtcagtcaggctgttttgggtgataacaagattcatcgtcattaggaatctaaaagaaagcaacttgtggaggaatcctctggtagtgtcaagcagtgccggaggattgtttatcaacctgtttatcatcctcatccttttctaccccagttacctagctcacaacagtcatgtgaaagacatgctactattccttttgttccacatgagccggatgtcctagacattcattttgaaaatattccgaataatgtcaattcgggtgcgaattgtggaaagtcgggacactctattctagattgtcgcttccctagccgagtgagtgagcgacaatcgcttgtgactctttgtcgcggtagccagccgaaagcaaagaagaaagagggtgttcttaaaatgggacaagttcattatactaagatcaaagctattcctgagggtgaaccagttatgctgggtgcttttcca

SEQ ID NO: 141668 - DNA, 291 bp, Zea Mays
tgcttgggtgggagatggcgatcctccggtggggcgccgccgttgtccgtgtgtgtaccgccgctctgttggtcgatggggagaagaacactatgatccgttggattgaaatcaacagtgtggattagatctccatgacacattgcataagtagatttatgccgtcaagatccgatccaagggcgggatactagtgctggcgtggccgtccttgggaccatggatcctagatcatgaggagtccgcggcatgccgatttagatataggcgaggttgtaatctggaccgtct

SEQ ID NO: 141669 - DNA, 845 bp, Zea Mays
ccagaaattcagtctgttttcagtttgtgctcctctcctaaagcagtttgtgttcccagaaattcagtttgtgttcccagaaatttcagtttgtgctcctctcctaaagcagtttgtgttcccagaaattcagtctgttaattcagtttgtgttccagaaattcagtttgtgttcccagatattcagtctgttttcagtttatgctcctctcctaaagcaggcaattcgtgttcccaagaaattcagtttgtgttcccagaaaatcagtcactaagttttcagttaattcagtctgttttcagtgacaaacaatgaatacagtctgttttcagtctgttatcccttcacaacatagaatgcagtcacaaacatcacaaactgaatgctcccattaactagcagatagatagtcttacataaagcagactgtgttgtgagtcacaaacataaagcagactgttatcccttcacaacacagaaagcagtctgttttgagtcacaaacatagaatgcagtcacaaaaatcactgatgctcccattaactagcagatagatagtcttacataaagacaaccacatcacaaatgttacaagtacatagtcttgacatcacaaaagtctgacttactggttacaagttcatctcatgacacaaactagttacaagttcatctcatgaccacaaaagaaacagactatctgcttataggaccacagaaggaacatactaatagtgttgacaactcaaacagtacgatcataaatctcatcgtagtcgtagcccataatacgacaatgtgaaagtcgcctagaaggggggtgaataggcaaatctgaaattta

SEQ ID NO: 141670 - DNA, 646 bp, Zea Mays
atctcatactggtatccttttgattattcattataattaagtttagaatttaaactttatttgaagaccatttgaaattagaggtttaaatgaaataaaaagaaaagaaaaggactgacttaacatgggccaaattccagagtcccggcccacctttccccacatccgctccgctgcgctatacggaggcttccactgacgccgggtcccacctgccagacggataccgtgcgctctcgctcacgcttgtggccgagtcgatcgacgttctcggacgctgactcgggggccccacccggctgtttgcacatgtgattgcacctggactcgctgcagcggctgactgtgggcccctggtctccggcgggaggtctccttccgcctggtgcatcaactaccgccgcaacctccgcgcataaccggaaaaatcggcgctgatcgttcttggagctggggaataaaacttgggcacccctgcgccctcttctctatctgcctccctctcctctccgttccacaccccatgaccgaaccccaccgtgagagatatagcgcgtgcagcggaggcaagaagtgcgcccgccgtcgaggacctctaggcgtcgtggttggacatcggctcacggttggaggccctgcgcagcac

SEQ ID NO: 141671 - DNA, 932 bp, Zea Mays
ccgaggtctgattggtggcactcgcagattctcattttcagcgtcagctgttatattattgttatatcatgtatcgtatacctaactaaaatgacaactaaaaatctgaagtctattatgttgggaaaagaatgatatagatatgttctggttctgattctgacaataggcaggcacaatgtatacgcgataggaagtggaaagggtagagcccgttcatgctattgctattgcttttgctgttggatattgctattgcttttgctgactgcctggctggccttgctctgctcaatggacatgtaggtgttggactggaggaggacaactgctagtgcctgcctctgcctggaatgctgggttttataggcagggccgacccttggctagcagaggagaggtttgaagaaaggttgggagcggcggcactgcaacattttgcacgactgcatcgtgcaacattttgcaggattgcccagcaggcaggcaagcatagcaagaatagcaacgctgtcatatctacagctagcaggctagcttatcggccggcgtcgccttttgtttccaccgattgccctgcatgccaactccaacgggaatactactaagctagtagtattgcgaacaattttgtctcctttcacaaacctcgtccattctctgctttctttcttcctagtcgtatactctatattatttgcacggtcgatcatcgatgatatgccgccggtaacagtgatggcagtgggtagggtacctaataggcacataaagttatacctatacccactaaaagaaagccatatacctactatccgttacgggtagaaaattatgtcaatatccatatgcatcacgggtatcggtgatacttatacacactatgtcataatagaaatgatcatttgaatcacacaaaagtaagtacagaa

SEQ ID NO: 141672 - DNA, 360 bp, Zea Mays
catgaatggctgtcggatcatgattacgcgatcgtgattagatgtaggatgacgtttcggcgatggctcattctggccgttgatcggggggcgaatgatgacgattgatcatagtcattttaactatggtcgtccatctccgatgaacacaccggattagatctaactcgtaccccttcggccttatgatctcagcccttgatttttgatcagatggctacgaatcaccaataccccttcaactgtgtcttttggcataaagacccttactttttacagaaaacgacccgcagtcctaccagttcaaagaaccttgcgattgggttatgttttattaagaatagcccctgtactctttag

SEQ ID NO: 141673 - DNA, 460 bp, Zea Mays
gtttgtaaccttcagacatgttctcgtagcttttaagctcttgagccctctacatcacaaattttccatccttaggggacatgcatggtcttggaatcctctaagtaggaccccattgcttcttcctttcctgtttcttcttgtcttgtacttcctagcaatgcaacctcctcctccatgatatacatcaaaactagctccctccaaggatatcattacctcttgttatatcacctattcttcctcatcataatcttgcaattccatcatttttagtagatgagagcattcctcaccaacactctcggacttagccaactatctgaactcttctcatttagagtggtgggactcatcatttagtaaattgttcaatttgtttcccacaatatgactgtctaaatgttgagtatggctgattttatgagtttgccaactacctaaattttcacatttaatc

SEQ ID NO: 141674 - DNA, 579 bp, Zea Mays
gtcattcgcaaggcttggtgattgctcgttgtttgttttcgtttggtctggattgttttcacaaccgagaaacatgaatcagctttccacgctacgtcttagttcttagtacgtattttatgggggatcatgttcacgtgatcatgagggtcccacatcggctcccaacgattttccgtcggtcgacccaccttgggtccgccataaggcgttcgtcgctttcttgaaaggtgtaggcctttaggcatccgtctccataaatggacgagttgctcttgcaaatttttccctctcttgtcttccgcgctcggcaatggatcaaggtaggtcgtcgagggatgggctcctcttagtgggggaatctttcgaaaatcatccttgggggctatggtacatgcattttttcctttggtttattccactaggttttcctattttcctcagcacttcgaccctattcgggcatgagcattcctttctccatagtgcgaggggagcttagtctttcacttaggccgattaatcctttggtccactgggagtcgtcgatggaggacctctaaagggactttgttgcat

SEQ ID NO: 141675 - DNA, 325 bp, Zea Mays
tgggagatagactttccagttgagaagattgggagacagtggttgtgaagattgggagatagactttccaattgaggggatcataactttgcaggaggcaatgaacgagttggtcctttggcatcgacgcgacatcaagttgggtgatgagccgatcttaagccgtctatcgcatcataagtcaccaatgccgaattcaacaccaatgcaacataaatatagttcgatcattccataccccatggtgcaggaaaatatagcaccgacctccacaaaaaccgttgaaacaatcatatcacctcttgcgaaggaactcgacgagggg

SEQ ID NO: 141676 - DNA, 354 bp, Zea Mays
cccctctaggcgactatcagagacgcagtcatgactccctcgaggccaaccctaggcgggagacgcagtcacgacttgcccgaggccaaccccaggcgggagacacagtcacgactcgcccgaggctaatctcgggcggcagtcggtcacgactcccctgaggccaacctcgggcgggagacgagcacaactcgcccgaggccaaccccgggcgggagacgcaatcacgactcacccgaggccaacctcaggcgagagacgcagtcacaactcgcccaaggccaaccccaggagggagacggtcacgacacgcccaaggccaacatcgggcgggagacacagtcacggctcgcc

SEQ ID NO: 141677 - DNA, 303 bp, Zea Mays
atgcaccaagcaaaacaagggagttaatccccatcttcatttgtccaactgccatttcacttattgtcctccaccagttcaggaaactatcattttctagttgaggggacagagtatgcagtccaaattgtctcaacaaaaggaaccagcactcccttgagaaaacacaagagaccagaagatggtctattgtttcactttcttgttcacaaagagggcagctatcagggtgatccaatcctctttttgcaagacgatcagctgtccaacaccttttttgagcaactaaccacagaaaaaccc

SEQ ID NO: 141678 - DNA, 281 bp, Zea Mays
tctccatcaatgcttcgcgcgaccgacaacatgaaaacgagataaggcaccaagaagagtatgaccaggaccatgacgtctcggcttgaagccacaccacccgagttgaatcggctatggcctcaactagtggcccgatccgggggcagtcaagacaacacatcgccgactcccctccctaggaccgacaccatgaacatcgacaggaagacacatgtggggtattcgcggttactccacgtctccgggccatccagtgcccccctaacttcaaagtctcc

SEQ ID NO: 141679 - DNA, 460 bp, Zea Mays
atcccatatgacattgttattgaggccatgatcatggggctttgtctaggaccagcatcacaatattttgccagaaaaccgtcgacacttttgaaaagctccttagaaaaatagatgagtacatcaaggcaggcaatgactatcatccattagtatgtcgaagtctccagaagcttcgactcggacacaacacatgcgagaagcattcaaaacccacaatcaaccaaagaaaagcatgcccacccttaaggactgacttaatcctctagtggccatatgcagaatcagtaggatggtttttgccggccactagcacaaagaggcggtagaggaggtcacaacttcgtaggaagatactctcaaggggcatagtcacgaagattgtattgtgtgttctgcagagaaaacataggttacacgaccaataactgcacaatttatcggtgtttcgaacctcgct

SEQ ID NO: 141680 - DNA, 414 bp, Zea Mays
taataataatgtagatttgttgctgacttcgtctgccagtgaattgcctgaagaaattcatctcttttgcggcttgatgtccaagtcgtctggtgtgaaaggtttgtggttgttgtggtgagtggcactaacttggatttgaaattcaaggttcgtcaaacaggactagacgatggtgttgaacgattctgttccttcaaagcaacagagcatggatgcagtatcgaacaactagcacttgagtttgccactatattagtgaagcttaattggttgacttcggtagtttcaatctgatgtctgccctgcttgtagatatcgactatgtttattctgggtttattgtaacctacacaacttgactattgtagcatgcaagttgtgtgttaatgatattttgtcaggtatgctaat

SEQ ID NO: 141681 - DNA, 316 bp, Zea Mays
cgaacacgtggtggtttacttctgccagtgttcaacgacctgtttggtcgccttagcgtgcagatctcagcaaaaatcccgtgtacggtctcttctctgcaccatatcctatcttttccatgtgagtcccaagcaaagatatggtcggggttgagagatattgtgttgtgaagttggctctgtctgagttgtccagaccgagacaaaaaccgtgccaagtcatgtcaaacgactttgggttgggttcaaatttttcttgggtgttctaggggtccttaggcgccattttgtcaattggttcctatggttttgaggt

SEQ ID NO: 141682 - DNA, 383 bp, Zea Mays
ttttttttttaaaaaaaactaccatcattgttcctatccagttacctactcaatattcatgcactcgagtcaagcttgatgtttcagtgagcagaaaataacatgaacttgctcatatctcgtgtcctagaaccttccagtgcataaaagaggaacatctataagcttcttcctgaatttgttgccacaaccacaagcaattgaataggaatcatggtaccaccgacccatccctgcgttgcaaatttgcaatctacaagctggagagggagtagcgccacgtcgcttacttctcctgcacaaaatgaccaaaaagaaaacagttgtgcttggcgatctttctcaactaaacactgtagtcattaaaagcaagcgactccaac

SEQ ID NO: 141683 - DNA, 612 bp, Zea Mays
caccggaccccaccgtacgacaaactgctcagcttaaggaaaagcgtaacaactacttagggctccaatgggcggccaacggctagctaacgtggaggatggtctggtggtgcaccatatcggtcccgtgccagtcagaaaagtaagccgccaatcagaatctcggggtgcatgcaactgttctcggtccggtgcgccactgtgcagagcagttttgtaggaatgacgagactttgggctataaatagagcccctagccaaccccctctctacactaagctactcaagagcaagtacttcattcctacatatttgtgaaccacaccaaagcgatccgagcgccctttgtagtgagattgggttgtgttgctgttgcacttgtgttcttgtctttggatgttgtttctttgctcttgtgttgcattctactctctctcttgttgttacttgaagtattgctcccatcaaacttgtgtatggctacaagagactccgatctatggagatccttgagaggagaaaagtatatataaggaagaaccatggcctcaagttgatcattagatcacttgacaaggtttgagttgagtgcaactctcatcctctaggaca

SEQ ID NO: 141684 - DNA, 359 bp, Zea Mays
cagacgcttccctcctcgaaatcagaaagaaacgaaactgaataccaaaatatgtccccgcccatttaccatctagtataagcgtgatcattttcgataatcaaaatcatgcgaaaaaaatgagagagagaaagcagtgtttaggggaccaaggatcgcagacggagcgggcagacgccactgtccattgatgggagcccaccggaagaaatcaccacccgccatctggcaagaatcgaccgggcagaccccactctcccagttttgccatgtgcgggcactataaaactgacagcttgaacacgccagcgatatcaccagtgtctgaatcgatcgttcgtctgggctttcaacttgcg

SEQ ID NO: 141685 - DNA, 604 bp, Zea Mays
ctctactcaagtgctcctctctcacccaacttccccacgcctcctcatgcccagcactgcacagcagcaggaggagcaagagcccggcgaccatggtgtccgtcgtcctacccatgtcccggcgtctaggacgactttacctctgcgagcagccgcacccccatgagctccggagatgcccccatgatccccgctcgctgctctagcaagtccctcggtgagctctcttcttcctcggcttaccattcaccacttgcttgcaaagatgctgccatggctgcacctagcagccctatccccgtagatcccggcgcgcggcgagctcagtgccgaagcccctccgcgccgctcccagccctctccccggccatgcgatctgctcctcgcaggtcccctacgcgctgccttgccgctcggttcgtgttccggcaagccgctggcgctaacctgccccacgttcttccccagccccagctccgccgagccaactctagctatgggccctgctatcgcaccgccgccggtgggatgccgggctgcactagacgcaacccaaaccccaaacgcgatgtcgactttcctgatgtcgtgttctcaagaaaag

SEQ ID NO: 141686 - DNA, 847 bp, Zea Mays
ttagtgcctttagttgattccggctcttttattggattttacactagcttcggttgacatggcaggagctgattccagacttgaggggacagccttggcactttcaatgaacttcgatacctcgaccgtcccaataggcttcggtctgcgggtcaggatcttaactctcttcgatttcggcgcgctggaagaggttgaggtggcaattttccttttacctccttgccttcggacagggaagcaatagtcaggatacacaaatccgatcacatcagaaactctattcagtctcctttttcctcaagcactgaaggccatggtaatggcttcgtcttctgcctttgtgtaggctcctagtagctcatcactggttgcctcaatagcatctaaccaatcatcatttggctcgtcgaactgacttctgtagcggaaggtgtatttaagataaaccaaaccaccctggctggagccagcagcagtttccttcggcatctcccactcactcacaagaggccataccttggaagtaatgtgttcttgtaccaaatccctggaaccaatgtaagtacatacggtgttgaaagccattaggcacgcttgcacctcattcccaattgcaattgatggtcttctaatgccgaagcgcgaccatatgggacgttgaatgatgaccctcacatcctccctctaattcagatcattctttacagagaaccattgcttcatccaagagcctggccacttcttccgaaatgttggcacgagataattttcctcagagcagggcacgaagctataacatacgaagttgttatggtattgttcctttccggttgcctttgtctgg

SEQ ID NO: 141687 - DNA, 431 bp, Zea Mays
atgaaacgatcgagaggtcaaacgacgtgaaaacgacgtttgaacgataaacagtgtcataggaggtttggaattggaattgaggcacgaaacgacatggaattgagccgatacttcacgaataggtttatataggtgaatatgagtgaagtgtgtgcctggtttgaatttaggcgaagaaaaagagatttgtgcacacgactcgaaaacgatcgctcaaaacggggaattgagtgaaattgaagcctgtaatctcggattggcgtgaaatttggcaaatgtgttactggaagtgttgtgaaggtgcctgaaaaatttgggttcaattggagcatttttggctggtttggccatttcaccgaacacgtggagggcggtggtttagggtttcggggaaatggctgtttgaggtgtgaaaaccctcccgaagg

SEQ ID NO: 141688 - DNA, 617 bp, Zea Mays
gaactttgagcccgattttgaatggaattcagtaactattttatggtaagccccatggcaaagttgaagatgaactataggtctataactttggtatagagagctagcctggtcaccacacaaaatcaggagtaaatcgaggtccaagatgctctgtcaggttcatctgactgaattcgccatggtacaatactcgtgtggatcaggacgccagcgcagccactttaccgccggtgaccgattgccgctgcgattcgtgcgaccgccggtccactttgtgctcggggtgagtggataacacccggtgtacgtcgtcggggataaactccgaccataaacaaatccggccaccgtaccgtacacgccgcggtggaaattcgatgggcacgctggtgatcaccgcctctcggccttacatcgcgtgtccgagcctcgccaccgcaccgccacgattcactttagctccccgttgctcaccggaatagctgccacggcgttgaacacgtattcactacgccggtattcttccttatctccggtcgcctgcgttgctcggccaaattgcacgccaccatcgaagctccctataaattgaaggccaggactgctgcgctagg

SEQ ID NO: 141689 - DNA, 931 bp, Zea Mays
tggctaccaagaagaggcaaggcatcatttcactatgatcttaacagcaacgctgtcatgaagcccaaggcaagtaataatctgctatccaaaaaaagtagcatacaaggattgaatgacaatgaccctttctcttcctgaaaggaacatactattttaagaagacatttgaaaatagataaaatatgcaatctgattttggagaaaatatgcattatatatcaggattaacataagagagggcccgccacaaatattttcatgctttctgagcagttttgtcaggaaaaaaggttatacatgtatattgggacatttagaatttgatgagaatgaagttgatcagaccttgtataacgatcatttgtttacattatgaaaggaatcatacttgtttaccaccattgacaagtccaagtgcaaaagacgctgcaactagagctctagaggggttaggtgggtcagggaactagattcaataatctgggaatgaactgaaacatagacaagaagaatggacaacacaaggtaccccacattgatcaaaacttgaggattgaagcaagatgccgcgaactcacaaccaaaaatgtacttgtcaatgtccagcaatgagaccactcaatttaatactattattaagtatctaggatccgccaaacaaacatggcagggctcacacctagatgtgcacatggaagcctgaggtgatggtcattatccctgagtgatcagtttcattatccctgagtgatcagtttcattgagtaaacatagagctatcagtttccagcctctcatgactgaataagaaaggcgttacatttttttctgttttccagtccatgaataaatctgcctgagttttgaactaagaaatgttatccccgttcatttgtaggtggtaccagtattttaaactaagaaaaat

SEQ ID NO: 141690 - DNA, 510 bp, Zea Mays
cggggaatggcactcggctggcgtgctcaacggcgcggtcgtcgccattgtgcgatcagcgccgccgcagttcatcggaggttgacgacggatcgagcgccgttggatctagatgtagggccaggattagatcaggggtgggtgagcaactggccgttagatcaggatcttgtggacctgggtgtatatcggttggatgaagtggacttcagatctggaccgtagatcgtggattgcgcggctgaaactgcataccggttcgctgtttaaatctaggccctagatccttgaatggatggcccaggcgcacctaagttcaatcagtcgtggcactttcgtaaagagcccctcggttttcaccaaatcaacccgcaatccaccctgtgcagtccactgagtcttaggaatttttacgcgccagcccctgcgctttctggaatttgaggcccaatccaaagaactttgaaaatcagaaattaatatcagaaattaatatcagaaatcaatttt

SEQ ID NO: 141691 - DNA, 504 bp, Zea Mays
gtgcaagccatcgcaagcgcaagagcgtgccatgagccaagcgcgacactacacaaagagaagactatggcgaaccctgtcgtggcatccatttagtgaaccacaggtggactgggcccgaccacgacagcccgcggaaccacggcggaggcgcacaccgaccggaaatccctggcaccctacgaccccgtactatgccattacacagtaaccgcaacggaaggtaggagacaaatggaacacagagatccataccagcactagagtcctggagacgttcgtccgcagcgtgacgcgagatggccggacccgccctgctccagcgaggaattgacacccgatggcccgaatccgctccaaataccggtatgaacccgctttgtgcgcaacggcgaaccccgacagctggacacagggtcgcaattacggcgaactcctgagcacggcgacgacggcgctaatattcagctcctcaccaactctctatgcaacactacgaccaag

SEQ ID NO: 141692 - DNA, 307 bp, Zea Mays
ggggcggccaacaaggtgaaaagggaaaagggggcggccacctagggttttgtgggagaaaagaaacgacgcctcagatgacttctgactttgcatccaatggcccacaatactttcccacatccacgcaccaaagatcaactttcggccaacatttttttgggatattacactctaccccccttaaaaagaattcgtcctcgaattcgaccacttcaaacaaagcattcaaggtatcccatatagcaccaccattcaaaacatgggtcaattattggtcttaattaacacaagaacttctacctcg

SEQ ID NO: 141693 - DNA, 338 bp, Zea Mays
aattttgcccctccgattagatctcaacggtcgagacccacccaagggaacgggtacaccctttaatcccgtgcgttgctggtagatcggatggtgcacggtgtctagacgaaggggggtatggtcacatcaaatccggaccgcccatctaaatccaacagcctagaggccaccatctttcctctacccttttcctctaatccacaccatccatcgcgagatccacggccacgcacacatcttcttccccctggtctcccacggcagccagggtagcggcgtcgcatcccgccacgacggcggctaccaaccagagaagccccgcgcggcacccagag

SEQ ID NO: 141694 - DNA, 568 bp, Zea Mays
tccagacttcaggccacagaccactagcttccctacttcagtcattcagccggacagccgccaagggagtagagtagagtagagtaggtcagcaagctcacccacccactcgcccccaactctctcaggtccccacaccaatgcgttttggttttgcgcccgcgcgggagatagggagcgaggaggcgcgaggaatccacttcctccacagctctgctgcgttgatctggttctcaccgtgaccgaggtaatgggatttgccggttcgtttctggggccggtaccgagttcattcagtttcgaacttctgccatttttgctacttcgctacgctaatgctgaagatcaatgggtggggattcgggcgctggagataggccaaagttgggtttgaggatggcggggacagattttcttagtgaaaaacaaacccatttcttcaacaaatgcgcggacgtctatcgatgagatacttggatttcatgcaggggtgtgagtttcaggaggaggggttgactatttggtagcccgatttattcaaatgtgcaaatgtttggggttttatggg

SEQ ID NO: 141695 - DNA, 347 bp, Zea Mays
gtgatgatgaagttgtggaagactacagtattttgagcccatcgaagccaagccacatcgaatttggaaaatctactatgacagcagaggacatgattatgatgaagaagttgtgttattttggagaggctgagagcaaacttgtccgctttgatggggaggaagtggttccggagccaaaagaggacgaagttgttgttttcaagagcttcttcagggcagggcttcggttccctttatatgacatgagaggagaagttttaaagaattttgagatatatcttcatcaactaacaccaaatgccatcgtcagactcagtgtttacatatgggctctccgaagccag

SEQ ID NO: 141696 - DNA, 519 bp, Zea Mays
aagttgtccaaggactgatgagacgctaatgcatggaccgagccgcctttcactctttctctctcttatcttctctctttcagggtgagtgacagacacacagagacagagacaagttcaaagtaggcgcacgctgaaggagacagaagaatgcctggagaatatcctcctccggctccgctgtggataagagcacgcaggcaggacccagttgccactacacaaagattactctgaccgccagccagcgatagggacgccggagttgttaatgccgccacccccggcagcgtgcactgcatgcaggcttgccgcttgcagcacgggggagtcgcagaggaaggaggcctgcatctgcatgccaagaacgcccgccgtcggcaacggtgaggttcttggcgtgcgactgtgcggacggttgggggcagcagatgaacagaaaggctgctgccgtgcccgtgtcttctttagcattctgctgtcagttcagttcagcagatgaaggaggcctgcatgctg

SEQ ID NO: 141697 - DNA, 728 bp, Zea Mays
gtgcttttgggtaggacggtgttgttgattatagctcgatggttcgtgctaggagcacgagagagagagagagacgagcgattttctgcaggttcggaccgctttgagaggtgtagtaccctacttcctagggtggatcggtatgtgtggtgtgttataagtggcgtctcttaaatggagaagggctaatgagatgaaaatgatggggttccccctgggccttatatacacgaccgtgggatactccctatgtacatgatgatcacgttctttcagtatacctcctaactaatagcgaaccgccttagcttatcttaaggaaaacctaccgacttcatccaggtctatcacgatgtttgagggcgccgggcgccggaaagtcggacggttccttgagattgcgcgtaaccttcggacggtccgggtacgggcccattgccttcttgggtcggtccatttcacttgtagtctttgctcggcctacgaggagacgacattgcggggtaactggtctgtggccccatacaaagatctttcgccttctagtggacccgaagatatctgtcctccacagcagggatgatcgacaacataccagttgtcccacgacccatcaggccaatgtcatttttcagcaaggtgtcgcatgccgacaaggaggcacaccagtgtttctgtgcacccgtggcaaggtagagatgcgaactgaggcgagcagtggggtgaag

SEQ ID NO: 141698 - DNA, 1036 bp, Zea Mays
cggtaatgattctttttccgttgcttgttttttgaaatctaaactggaccctccagtaatcatgtggatgaccccctgaatggtgggttggcgaagtgctctttgtgatttggtcgtggggggtacttgatagggttgttggtttggttgttgtagaggtggtgggggtcggtggaagggctaatctctcattgcttgggagttggggtgttgatgggggtagttggagggatgttggttgtagtttttgtggtaatgcgggaagggttggtgattgtcttcgtatcgttggaggtattgtggatggtacctgtgggctatagccctctcattgtttgcaggggccattccagccatatggtcattagcttcctttgttactaggcaatctctggtcgaatgccctacgtcttcgccatggaaaatgtagtagagctttctttgctgcagagggcctctcccacagcctctccccccttgctgcactaccaccgtgggcttggtgtgaggggtagtcttgacgttgatgggggccttcgcctggttgctgttgattggctacgttgtgaacttgaagttgttgttggccttgctcttggagagggtgctcttgttgtgaacctctagtccatgacttgctagactgcatgatatcctttgacttgtgttgtgactccacttttctgtagtggagctctttggatcggacatactttttgaagagctggtacaacccttggagggtggatggtgggtctctagtgcaatggttgtatagctgactagtgtagaggccgatgatcgcataatggattacaatgtggcatcgaccagcggtagctgcgatttgagcaataagaatatcttgtaataatcacaaagacttcctttttccagttgtctgcagagcgacagttcgaccaatgcatctgtttcgggcctatacccatggaagttgagcaagtacttgtcgcaaagggtcttccctgattcgattgaaagaggaggcaatcttgaataccatgtaagggtcggg

SEQ ID NO: 141699 - DNA, 469 bp, Zea Mays
tgtttgtttccctgcaccaagggccaagccaggccactgggatgcagtaactcgtgtttgattacctggatggaggggaaatggaattttactttgtttttttgagaaccgactcatgtattctgcctttgggcaatgtggaggcccacagcagtgcaggtaacatacaagaacctgcgttggtctggtttgtttgctgcaagaataccaaacacggctagttgcagtgtgaacgtgtcccaaaatatcctggctacgatatatgcaggctccttggtgcaaggcaagcacatggaattcattggtttgcctaacgtgctgttgggtgttttgtcctttggagttctcaatatcctgatgtcccttttatgagtttaccttagctttttttttcaaaaaaaaatgaaggagaggtgtgtatcattataataagaagaaatgagtttatctcataacatgtacttaacca

SEQ ID NO: 141700 - DNA, 294 bp, Zea Mays
gggtgacctaacctgcctgctgccagcgccaccttacctcctcgtcactagtcagctcgtcgcctttgtcgacatcgtacatgcagcgccgctactttgcctcatagttcgcatatgtggatgggcaagctatcgttaggatcctgccttagtaccacggtgccttctgcgcttcctacgtcactagggtcccgtcgtgctgtcataacgcagcaatgattgttgctcaccgccgccttgtcgcctcgtcaccgccatttaccgtcgtcccatcgtcgcataccctcgctaccc

SEQ ID NO: 141701 - DNA, 723 bp, Zea Mays
acgtcacatctttatttccttatttgtcttatagggcaggggtggtatggggttcattccaactttacaatcaaatatacacatcttatatttaacatgaagctaaaaacctaggaaaattcttttccaaaaaatcttgagtctcccaggtagcttcatcttcggtgtgttggttccattgtaccttataaaacttgagggtcctttttcgagtgatcctatccttctgatccaaaactcgaatgggatgttctgaataagtcaaatctggttctaaagcaacatccactacatcgatggttcgattaggaattcgaagacacttctttaactgagatacatgaaacacgttatgtactgcagataatgtttcatgcagttgaagtttttatgccactggtccgcattgttcaagaatgggaaacgagccaacttatcggggtgacaactttccttttaccccgaatcgattaacacccttcattggtgatactttcaggtatacatgatctttgacttgaaagaacaagggttggcgtcgtttatccgcataactcttctgccgggcttgagcttcttcaagtggtgctttatccatagaacctttgcctctgtttccttgactaaatcagacctgaaaacccattgttcccctggttcagaccaatttatgggtgttcggcaccgtcgcccgtacaatgcttcaaatggtgccatcttaat

SEQ ID NO: 141702 - DNA, 402 bp, Zea Mays
cgaagtgctagatactcaaatataactaggatgaagtgcaactgaattccagataagctagaaggtgtgtcactttaaaaggaggattcaggtagagtcatagtcatcatgacttgtaaagggatagccctctcgtcgtctatataaggccgagggggtgtccctatcatctcatctctcagctcatcacatctcagcttggctcagaccatcttagataatctcttatcagatctcagctcgtcaccacctcatagctcattagccctctaatagcaaccacaccaccactagatcgtcaagagaacccactctacaccgtccacaactcatttgtaacccatgaacaccagtgatacttaaatacccagcatcggcaagaagtagggtgttacgcattct

SEQ ID NO: 141703 - DNA, 295 bp, Zea Mays
gtcgattcattccaattaatgtgttccatctaaaaggatgcatgttcttcctaaactcagcacttgcatgcagtaaaaaagggtgataccatgcacctaccgaaaagacagcaactataacccactaactgtacataatatctacattttaacatttgtatcaaatcagaaattgcaaaccaaaattaagtgtgtcaaaacacacgttgtagtttgtcaaaaggaacatgtgctaggaaacctacaatttccatgataatcatctagtgaaaatcacacatgctttctagtatat

SEQ ID NO: 141704 - DNA, 308 bp, Zea Mays
gggtcacggtggccgccggtgaggtctccggctggactcgggaaatggtgccacgtatgcgttatctaactccggcgttatccgttccttaccgagcccaaattggaacggcagcgacacgaatcgcggcggcgagtcaccgacggtgagatgcacggcacctcagatcttttgtcactgtaccatggcgaagatcatcagccgacctgatagagcgatttgcagggatgtttactcccaattttgtgtagtaacatgatcatcacgctttagcaaagttatagccctaggatccagctataatcttg

SEQ ID NO: 141705 - DNA, 317 bp, Zea Mays
agttatgctcctttttgttaccgtttacactcttttggtgtgcgcacgtctcgcggcatccgggcccacgaaaagatcgtgttcccgcaatctgggcagtttacgtataccgggcccacgaatcaaggaaccgagctttcattttctcagctcatctctcccgtaactatcgctcccgccgaaccctagtcaaatccgccgccgtatgctgcttctcctccgcgcccggcgaaccctagactaatcgcctccgtgagcattaagattctcccccgcagttcccccgccgtcgcattctccttcaccaccgcagagac

SEQ ID NO: 141706 - DNA, 664 bp, Zea Mays
gtggggatatagaataaatacatatgccctaatatcggggctcctaaacaaaaaagagatgcaatgcgcgatgcaatgacccgattagagtgatgtctaaacggatacaaatcacacatttagctggagaataagggttacaatcaaatccacttcaatcgaccgataggcttcaaaaaatcgacggcaaactcggtgtatttcattgttggattacctggaacttcttgaatcgggctccaatgctgggagattgaaggatgtaagatggaatggaagggcgctggattggagcggcggtggattggcgctgcgctggtttggaggcgcggaaatcgctggggagtcgcctccgacgaaaggaaaatctgcgcggctggggttttcttcctatcggcgctggtttgtctccgttgattgcgcgactacggttttagaaacaggaaacgtgggagaggtggctggctgacggagaaaacggtgtaacggcgccgtgactgggacctgttgactcggtgtggttcaaccaaaatgcccatattaactagcctgggcttcctctattattggaagcccagggctcttaatatataaactatatatatatacacactgaaccaatgcaagcaatgcatcaataatgggccaacgaacatactcggcg

SEQ ID NO: 141707 - DNA, 697 bp, Zea Mays
ctgccctcccactcacgttacatgcaagccgaactgtcatcctgcataacgcacgggcacggctgtagactgcgtacgtagatgttggtattgacgtagccgacggctgtgagaacgtgcaggacgtcaacttgtctgatacgggagcatcggcagcagccagccccagcccctaggtcctcctactcctggcttcccgggcgagaaatttatttgtccatttgtccatagctagctggagctttgattagtcttggtatgactatctaagggagtgtgctacaccaatacacgccatcctctctccgacgacacatcagtaggagatgaaggcgggtatatataattagacatcgtaatccgcatgcagagcaggcaacctcagcccacggctcttatatataaaaccataccacgtatacgttgttttcaagtgttttgttcacactcgacaaagtcagatgatgtcgagatgaaacagcactaatattctggcattagagtaccaaacaagcaatacaaactaaactcgatccagagcgtctcctcctcctctctctctctctgtctcggttgtttagccacatatcactggctgcagcgcaagacggtaatgcttatcttagccaactaacgacgtgcccccctcatccactcatgctacatgcaagccaccgaagccgatcttcgtggctcc

SEQ ID NO: 141708 - DNA, 402 bp, Zea Mays
aatgagtttagtgtggtgcacactagttctcttttgctataggtggcttagtagatgcccaaaactagtaaggatcaaaacctaattctaaagtttcaaaaatgaacaagttaaaaggttttttgaggcatctatgatacatggttattagaccatagtagttcgacaatacaatgggtctggtggtttatgtgatcagactcgtgagtttcaaggatgtgtcggactagtccgacgacatgtgtaggaccatacagcggaacgattttagctaaggttttagctacatggtcattggacttttgtgaacaattgcttcatagcaccaaagtgtatggggctccaccgagcattgcatagtaagagtgcatctagccctcttgtgggttttggtgatttgga

SEQ ID NO: 141709 - DNA, 508 bp, Zea Mays
cttttccatggcgaggactcagcacacccaacctgggattgccctgaaaccaaggcaacaaaatatcgaatggctagaaaccaaccgactgacaaccaaagagatgtagcccgcacctaccatccccatcagtacaaccagcaacaattccacaatgagcatttccatcctcaccaacaaaaccacaatatataccaacaacaccaagaaatcccagctctacctcctccaccaccatagcatccaaatcaatcattaccaccaccacccccaccgaagcaagaggacttcatcgatcaaccctcgaggggtcatccacatgattaccggaggatccagctccgaatttgacacaaatcggcagaagagagaccactatagaagggtcaatcatgtagccctcaccgggctagtttttcaaacaaagttgtcccatataccaatcaccttcgtcgcaagagacgtcgacctccgcagtgcaccccatgccgatgcaatggtgataaac

SEQ ID NO: 141710 - DNA, 352 bp, Zea Mays
tagggttagcacatcggcggcgctccctggaggacctatcgaggccagccatggcgaaccacagcctccgtgcgttcctggttctcctcgtcgcgaaggtctgcttcgtcatggcgatggtggcgacggcggtgcagggcaggcctgggcctggacccacggccctggagtctgttcccgcgtgctgcttctaccaccccgagtgctgctacgacgctgccggccctccggctgatctagggtgacggtgattgttgtttcgatgcccgtaatgagctaatgctgtttctggctccgtcattgtactgatcgctcgcgtaataaaatgagagttatgagtatggttcaggtc

SEQ ID NO: 141711 - DNA, 350 bp, Zea Mays
gttgagcacctggcagcagtgggatggtatgatcacaagatcgtgaaggaggtaggcctttaggagactcgaagaccgactggaactgcttaataacttgggcaatccttgggtctaattgggtatctgtatgggtatcagcagcggaatgcagcaaataaaccacatgtagtaggtgcttgttatcagaagaaaagttaccctgtaacactgcttgcttgccctggtaagaaaatggcagccacctttctgaccaatgtatcttcattggactaaacttttcaagccagtccatgcccagaactatatcataagattgtaatggaaacactcggaaatcagtgacgaac

SEQ ID NO: 141712 - DNA, 468 bp, Zea Mays
atttttttcatgtgtactaatcattctcaatttgaccatttgagtttcaatcaggctagtttcaggtgagaattctgcagcatgtgtctattgggcagatgctgcatgctgtgtcattttagccctaggtgacccgacatacacaagtagaacagagtggaacatcaaataaacaagcagagaaaacgagccataattttcattcctaacttggcacaaactaatgtacatagctcgactaaacaaacacgataagctttacctttagatagtatggtcgatgatggctgtgaggccggtgtagttggaagtgtgctgccaccatccatttctgcatttatagcattcacttggaaggaaacactgctataaataattgtgctttcggtgaagctaacattccactcgaaagacttctccagtaggtttgtaatttcgtttggaatgaaaccaggcggattagttgat

SEQ ID NO: 141713 - DNA, 584 bp, Zea Mays
gggcgacaggtgcgggaacccgtgctgcgcatcacggacagtccgccatccagacgtagacggtccgaagcttcttcggacggtccgaagacctccggctacactcaggacccgcaacgaccacatacattcaaaccacgacgaccagagataggtacgtggaaaacaaatacatttaaagcagctgttcgactggtcaaatctggcccgactttcgatcaattgttgtccaaatatgtgaaaaagaaggctggccccagtgaccggccagcaaagcgaccccgctcacccattcatgagcaacgtcaggtaaggccgattggaccaccccaccaatcggaagaaatgaaaggtcatactgtacaattgagacctaacatacctacatggacacctccacccccatatccacctatgccatatccgtacacatacatacctccaccatatgttccaaatcaaatgtggggcatgccaccatattcatttgagatgccacagtacccccgcttgggggcaccccaaacatctgtattcaacaggttggcaccaccagtacaagaccgattgagcgccactcaatc

SEQ ID NO: 141714 - DNA, 456 bp, Zea Mays
aaaaagggtggcaaatattcgtccttcgataaacatcaacaatttctccctcctgaccatccattcccccctagacatcaagaactttacgaaaggtgtcgtagtgacagaccgcccacctgcaacgatgactgatgccaaaatttgtcaacagatagatgggctcgtggccaatacagaaggtggttttgtgggatatggtgagcagcatatgtggacacaaaagtttggcttgactcggctcccctattatgatgacctgctccttccacacaacattgacatgatgcacactgaaaagaatgttgccgaggcactgtgggcaacaattatggacattcctgataagtcaaaggataacataaaggcaagagtggatctggcagcgttatgtgatagaccaaacctagagatgaagccgccaagtggcggaaagacgtggagaaggcctaaggc

SEQ ID NO: 141715 - DNA, 381 bp, Zea Mays
aggcgttgggctcgcacttggatctcccacggactaagtgtaatcttgagggagccatccgtctttcctgcgcccgacaccctcaaacgccagagaaatatcaggaagaagccatcgggttttccttaagataagcaaagtctgttcgctatttactaggagataagtcggaagagtgtgatcagcgtgtacgtagggagtgccccacgatcgtgtatattaggccaagggggaaccccatcattttcatctcattagcatctttccattcaagaaacaccacttgtaaacacaccgcacttacaaagccacccctggaagtagggtattacgcctctcaaagcgacccaaacatgtagaaaatcgcccgactctccctct

SEQ ID NO: 141716 - DNA, 632 bp, Zea Mays
aaacttcacaacagcacttgaattcaaaatttgaaaaacataaacttaggaaagaaaagaaaacagaaaataaaaaggagaaaagaataaaaccttaattgggccggcagactcccattttggcccactagggctttccactgcgcgcagccatccctcgttctcgcgctcccggcgctgacatgcgggaccgagacgtcaggcactccctgcttcttacctcttccgctcttcgccgcatacccccccctggcgtgtggggcccctttgccagcttgcgtagctcattcgcgccgcaccctcactgcgtctgggccccctgcgccaggacctcaccgctactgtcgcaacaaccttggccgcaatgtccgccaccgcgcgcaatttgtggatcagctggctgatggccaaccaacctcacccggccataagactctggtgcccgaaccctgtgcgcctctcgcacccgtgccaaacccttgccgtcgcgtgtagagcttagggaaagataaagctagggtggcggaagcggggaggcacggaattcacgttgccgtcgacgtcgggtgccggagttcggatcagaagcctgcgccgggttgctgcgaaggtggtagtggcactggccggcc

SEQ ID NO: 141717 - DNA, 474 bp, Zea Mays
cgcttaccatgctatccgcgaccgccgatcattagccgactcgccgtggctataaatgacaccatggtccacggcgaggtgttttcatctccaccagtgaagctcagtcgacatccaaattcgcgaagttccctccaccgttcccaaaattgacagtgcatggtgaaactatagtcctttacggacgtgtagccttaatctcgcctcccaattccacccgagaccgttgcggcttcgtttttacccttttctgttacccgcgagccaggatcctccgcgccccgtggtcagctcgtcctaggtctgctcctgcttgttttaatcatgttccagtatctatatgcgctagtgatgctcatcggccctgccctttttgcttagtcacaatcaatcacccggaacacatgaactcgcttcggtattttccgccaccgtggtcagtctaaaccagggtcgtaactacgtaactgaaac

SEQ ID NO: 141718 - DNA, 687 bp, Zea Mays
ctagaggctaaccagcctcgatagagcctgaattgggacatcgttgttggctttgctacgacgattcctgcgaaccaaaggaggaacatcttcctcatcctcctcctccacttcctcctcctacgaaacacgcctaccagatctgatgccaccacaactctcaatgtcatcttcgagatcgacactcgccgggtcaccaccaaggtctggagcagcggagttagcctctagctctaagccggatgagtgctgaagctttcttttcctcctcttcgtctcggtggacacaaccggagaaccttctcggcgtgttcgcttgcaacaagcactaccagggctgcagactctctcctccccaccaaacacacgctcggttgcggcactcgccgactcaccgcgaacagactcgactgactcgccagccagaatactaagaacaacattcgctttggcttcatcagagatagtttgtatccggaggtgagtcagtttttcctcttcagggagaccccggtacgcagcaatgaaggattcaatctccttcgaagaatgtcatgctttatggcctagacccccgtcttaaacaggtaggttggatataaaatctgaaagggacctctgcagtgacaaaacgacacaatatgggcactacgtatgacaagtacaaaaactcatatacaacaacgc

SEQ ID NO: 141719 - DNA, 424 bp, Zea Mays
aatggactaaaacatgactgattttaccacaaactagtaggctttatatttctatcttctttctattcctttgtcctctatccaccacctctttcaggggcggatccaaggggtggacaaggtgggccatggccccacctcaatttttttaaccccttatacctaggtttaggtacacgccaaaataaaacaaatttttgtttagttagcgtgaacaaatctagtgaaaactaggttttgatctatttttctgtcgatacttcactgctcaatccactcttcacctgagccatttgattctcttccctagcgcaagcccagtcgtggctcactcgcttcttcggtcatcgactgaccagtaagtcggtgacctaatccgcccgctgcagcgcaccttaccttctcatcactcatcagctcgtcg

SEQ ID NO: 141720 - DNA, 396 bp, Zea Mays
aaaataccagagcggggacattcaagttgaactaagcagggagcctaatagtgaaaatctaggcactaatacttgtaacagataaacgagcgaggacataggccctcactctcttatacgtatgtcggcccctgcaccatgatgtagatgagaacgaggttccgacggtcgctctaagaatcatggcgattggagatgtacgacccgataggaacccgataggaacaacaagtacaagatcaaccttcttcctcaactatgacataccccctactcaaggtgaggaacatattcctcaacatgatagcatggagcaagggggagcacatgaataagaagacaaggaggaagaagatgtaccataggcacctctggcccaagtccgcgccaacatac

SEQ ID NO: 141721 - DNA, 787 bp, Zea Mays
taagctgcttggtgtgacttagcttgtaggtagacctgacagccatgcacataatttcgaacaaatgattttaaacccttccaagcaaagagcttcttaacctagctacacgtaatagggatgccagagtggccaccgataggagaattgtttagagtagagagcacacgtgtatggagttgagtgtcatcccctagccataagtgacctttgtatctcaacaaaccatcttgtaaaacaaaatgatgaacaatcggagcatcaatggagaggcctccgtgtgttgactgtagttgtgctgaacattagttaaccatttgggcactacgacagagactgcattcaattcagaagaagtatagtgagatagagcatcagcagcccagttctccatgcctttatggtagtggatgtgatattggagacccaacagtttggtaaagaccttgtgctgccatggtgtgtgcattcgttgctcattcaactatgataatctcttgtggtccgtaacgatcacaaattcaccatgttgcaggtaagcacgccattgctgaacatcaatgataatggccatatactctttttcgtaagtggataagccctaggacttgggacccttggctttgctaaggtatgccaaggggtgcccagactgcattagcacaacacccacaccctggtcactcgcatcggtctcgatggtgaaaggggaagaaaaatccggcagtgacaacataggggctgacactagggcttgtttcaatgcatgaaatgccacatcatgctc

SEQ ID NO: 141722 - DNA, 644 bp, Zea Mays
ctatgtctgaatgttttgagtccgacggtgagtctgggagtttgtttccttagacggaggagtcctcggatgaaggcttagattattttgttgcgttggatgtggctgtggtggagactttgccacgtgtggagggtgctaaggatcttcctggtacgagtagtgggtgttcgcggcgaagggtggtgggaaaacagtgcgttggtgaattttcgcggagcggcaggtgccgtcgcatggagatggagcgtggccgacttcgagtagacggggctggtaaacgagaattgttgtcttcaccgaacggggcaggcataggcgaaaagaatcttcgggagctatttgagggtgaggaattgaggataatgctgtttaattacagggagatgggtatcattccgaaggttgagccgatgtgataggcgatgccctcgccgtgtgtgtgtaattgtaatggtgatgtggcatgttggccgtattcgtacacttgtattgttccggctgcgtacgtgggcggctttgtgcggagtatctttgtaatgatagacttcgattaacgttattccggttgcgcccttaagtaattgttgcgctatcttttgaataaaagatttcgattaaagttcctgatgtgctgttccggc

SEQ ID NO: 141723 - DNA, 1790 bp, Zea Mays
tatgccacatcatttctcaaaataaaacaatgaccatggaaaatttagccaaatcgagtgagagaacaatccaaacataggttaaggttgtaaggcacattgggctagtcgatgaagacgtcattgggcaaaattttccatggtctttattttattttgagaaaagatgtagcaaattgatgtgtggtgttttacttgagtggacataaacacaacctagttacgccttgaatagaagggattataggaaacctggtatcacaaaaagttatttgctagcccaataacgtcttcatcctctagttgtactctaataccctctcgtgcgaatacagtgccctcaatatcataaaaacgtcatttgtggtttaaaaggtgatctattgttttgaattctttatattccaactttttagtaaccgtatggtggaaaaatgtgccttacaactttaacctatgtttggatagttctctcactcaatttggctaaatttttcatggtctttattttattgagaaacaatgtggcatattaatatgtagtgttttatttgagtagacataaacaccgtctaggtatgccttgaatagaggggattataggaaacctggtatcacaaaaggtcattagctagcccaataacatctttatccactagttgtactctaataccctctcgtgcgaatacaatgcccttgacatctgggaaacttcatttttagtttaaaaggtgatctattgttttgaattctttatattcctgctttttagcaaccgtatagtggaaaaaagtgccttacaaccttaacatatgtttggaaagttctcacacacaatggctaaatttcccacggtctttattttattttgagaagcgatgtggcatattgatgtgcggtgttttacttgagaggacacaaataccatctaggtatgcattaaatagaggagattataggaatcccgctatcacaaaaggtcatttgctagcccaataacgtcttcttccactagttgtactctaataccgtctcgtgtgaatacaatgccctcaatattatagaaacgtcatttgaggtttaaaaggtgatctattgttttgaattctttatattccaacttttttgcaactgtatggtggaaaaaaggtgccttacaaccttaacctatgtttggaaagttcactcacgtaatttggctaaattttccatggtcattattttattttgagaaacgatgtggcatattgatgtcttttgtttttcttgagtggacataaacacgactaggtatgccttgaatagaggggattataggaaacctggtatcacaaaaggtcattagctagcccaataatgtcttcatccactggttgtactttaataccctctcgtgtgaatacaattccgtcaatatcatagaaacgacatttgaggtttaaaaggtgatatattgttttgaattatttatattccaaccttttagcatctgtatggtggaaaaaaggtgccttacaaccgtaacttatgtttggacaaatctcacacgcaatttggataaatttcccatcgtctttattttattgagaaacgatgtggcaaaatgatgtgcggtgttttacttgagtggacataaacaccatctaggtatgccttgaatagaggggacaataggaaacctggtatcacaaaaggtcattagctagcccaataacgtcttcatccactagttgtactctaataccgtctcatgtgaatacaatgccctcaatatcatagaaacgtcattt

SEQ ID NO: 141724 - DNA, 878 bp, Zea Mays
gctactatgaatggtccttcctatagtggtgacagtttgtgtcgtccctcccccgttagaattcagcggaggacgaggtctcccactgcgaaggatcgatgccgtacgaccctatcatgatagcaccttagagtttgctgataccgggccgactgaatcaccgtattcaatcgttcttcttctagtacatcgacatcttccagcctagtagcctcagcttctgctatgttttcaaagattaaccttggtgccccaaacttgagatcagtaggtagcactgcttccgaaccatagaccataaagaaaggtgtgtttccatgcaaagctcgactaggttgagttctcaggctccaaacaacatatggcagctctctgatccactttcctgcaaacttttcattcttgtcgaagactttctttctgagtgcttccaatatcgtcccgttggctctttctacctgcctgttggctcttgggtgtgccaccgaggcatatttgatctgaatgctcttttgctcgtagaaatcaaagaactctaagcttgtgaaattggatcctaggtcggttatgatgctattcggtattccaaacctgaatattatgtcttgtatgaattccactaccttagctgaagttagagaagcaatgggtttgaattctgtccatttagtgaatttgtcgatggcaaccagtacatgagtgtatcctccttgagctttcttgaaaggtccaatcatatccaatccccagcatgcgaatgaccaagttatgggtatggtttgtagttgctgcgctggtagatgttgctgttttgacaagtactggcaggcttcgcacctctggactaactcggctgcatcactctttgctgttggcca

SEQ ID NO: 141725 - DNA, 887 bp, Zea Mays
cgacagccgtggatcacgggactctccggttgccgcggcgggttccatctcgttgtcgctgtccggttgggattactgtgccttggtcgtggaacggaaagggttaatgtgacgtgacgagtctagtgccattgtcaggtgccggatggaattgacgtggaatttgttttcatttctttcaggaggaatgccttggtccgatactgacacgtgccttgaaaaatgatatgtttaggacctacattcatggatctagaccctcacgggtcaggaccccacgtgtaccgtttaggtcctcacaaagggtcccgaaccgcctcgtcggatattaggaccccggcaagcgagacccaagtcttcgggccagtgtgtgcccttgtccctactctagggtcagggtccaactactctagggtcagggtccaacgattagaaaggaaaaaaaacaatctcatcgtttacaatactttgctcaaataaaacatgttcaactcaagatcatgaccgtcactcgtgtcacaacgaagtcatcactgttgctgccaccaaaacctcactgttgatcgccaacatttaattcacactagaccctctaaaacaaaattctcattgtttcttctgattctcaatttgaccaacagtagtgtacaaaaaatcagaatttttagagctacagttgtatcacaaaaattcaattatgctttattagcttaactttaaataaaagctatatagaaaagcatctgttaaaatagaataaatatttttaacatggattactcattttctttgaaccagttaaatttatttcatcatttttgcatacttctactaaccaaagcataattcacaagataacacatattagaaactaattggacattgtt

SEQ ID NO: 141726 - DNA, 442 bp, Zea Mays
cggccgacggataaaattatccgtgtgggtacggatatggataagattctatatagatgtgaaattatatacgggccagccaaagtcagctctcactctgctatagtgctatagacctatagtgctataccattatttttttattgatctgatgtgtccacgtggcgcttcctttgctgctattattttttatgatctgtcgaggtcgatataataatatttgttatggatgttgtctgcttcagaatcagaatgttataagtaaattaattctcagggttcagacgagcgagatggcggacatggcaaaacaagctaattaattaaggatcaatcagtcatcaaatcatgttcctccgtacataaaatatgtggtacagtacaatgtagcataaattttccatttgttttgatgtatttcagattttattactcctctttg

SEQ ID NO: 141727 - DNA, 366 bp, Zea Mays
ggcccacatcacaggagaagctatgtttccaactaaataggatattttttttagagctcttcctgaaaataaagagtaatctattttcctagaagagccatagccagagctggcagagtaagagtcctacataccgcgagttagcgagcgtttctgcggaccccgccataactggtgtgtggtaaattcgtatctccgttgtcagcgagcactatcgctgggtacagccacggtgccgtcaccatgagcggtgactgtgtgacgggactggacaccatgggagtgggacagggagcgcgacgacgagctcgccctcgccgctctaatggtggtggtggtcgtttccttgggcgaatgtctgggagt

SEQ ID NO: 141728 - DNA, 668 bp, Zea Mays
gcattattcagcgtcccatatggtcgtgcttcggcattagaaggtcgtcaactgcgattgggaatgaagggcaagtgtgcctaatggctttcaacatcgtgtgtacttacatcagtaccagggatttggtacaagaacacattgctttcaaggtatggcctcttgtgaatgagtgggagatgccgaaggaaactgctgctggctccagccaaggttgtttagtttatcttagatacacctttcggtactgaagccagtttgacgagccaaatgacgattggcttgatgctattgaggcaaccagtgatgagttgatgggagcctacacgaaggcagaggacgaagccatgaccgttgccttcagcgctcgaggaaaaagaaggctaaatagagtctttgacataattaggtttgtttatcctgattattgttttcctactcgaggaaagcaaggagggaaaagaaaaattacccccctagacttcttctagcgcaccgaagccaaagagagtcaaggtcctgactcgtaggtcgaagcctactgggacgactgaagtaccgaagcttattgagagtgccaatgctgtccccttagttacggaattagctcctgccatgccagccgaagctaatgtaaatctggtagaagaaccgaaaacaaagaaaac

SEQ ID NO: 141729 - DNA, 294 bp, Zea Mays
caagcaatgaattacatcttccatgacctgctaggttgattggtggaagtctacatcgatgacatcatggtgaaatctattttcaagcgacacacttagctgatctttgccaagtacactagaactagactccatggtttgaaaatgaaccctaagaattgtgaatgtaggctgattgcatgctagttccttggtttcatggtgcaccagcgcgatattgagatcagagacaagagcacgaatgctataatgatgatggcccctctcaccaacaaggttgagttgcaaagcctg

SEQ ID NO: 141730 - DNA, 855 bp, Zea Mays
cgggcgctgacctgtggggccgcctagtcggaagcttcatccatttgtgaccgggtttgttgcaatgaacttatgtatcctccgctgggatgtggcaattgggtgttggatgtggtgttgctgagagcccctcctcgtgcctataaaacatggccttcttctccgcctcatctatcttggatcatcgtgcactagaataagggtcatcgagagcgccatcaagaactcgaacgcattgagatcttggagtcgccaccgccataattcgtcctcaccatcgatcgacgtcctgggtgtggtcgatggtcctcgctaggagccgtggggtatgctcggtgtcgctggacgtgggatgctcggtgtcactggcaatttgttgataaagtttaaataccaccgtggagcctctgttattgctcctcccgtacactatcgcccggaccaaacatctacatagcctaatcatggttcgagaccgttcggggcaccaagaattcagcgctagagtagaggaagcaccaccaggtcgttgtccaccgtggatggagctcttgcgcgctagttgaggtgagaacctcctttgagacttacccttcatatgtaattcatgtagcactagggattaggtaatcggtcgactgggtcatggcaccgccgaggcggccgaatgtcgcctcgttgatccatgggccgatggtcaggattaaatgaggaataacggcttggctctgggtggtgtgagtcgttgatcttagatcgggcgggtccgagtggggttgggctatttaaaacctgagccatcgatcccgggttgtgtggctcaaggttaaacggggccgcgttccggtttgttct

SEQ ID NO: 141731 - DNA, 434 bp, Zea Mays
gttggactccgtgcggcttaggttatgttcccccgattctagcgtcccaatttgtttgataagtattgttttgctatggacattgttctgttgttcaccctggggtagccaattatttgtgcctggtctaatttgtagtcttttgtacagttcaggatctgctcttggaactgcttacatttttttggtctataattgcaccatttagaactttcttttgttagattaatgctatgttatctaagtttctacagattgtgcagaagatctgattcgggtgggacattttaagttacatgcatgtgcgttttcggctctattttaaccatgggaacgggactatttagtttcaataaatgtctggatttgaaatgtgggggtgaaaatttctctgatatattcactttattttggcactggctcctgattcctga

SEQ ID NO: 141732 - DNA, 440 bp, Zea Mays
cgggtacccaggaaagggataactgaagtgaggcccctgaacctctctttggcccatttaccgaccaagtccccaccgagtaagtctacgaagcggggcgaccaaccaagtccccaccgagtaagtctgcaaggcggggcgaccgaccaagcccccgccaagcatgtctatgaggcggggagaatgaccaagcccctgccgagcaattatgcgaggcggggcgaacgaccaaactcccacgacagccacgacaagacagaacatcatcaaaccacgcctggaccgtacctaccgtaccaaaaggcctcaggcagacacgatggaacaccccgtgtaagcccatggaaataccctcactgactcatgggactagtcaactcccgtcgtggagacctcggcactggagtctctatagtgacccatacaccggaaaggatgag

SEQ ID NO: 141733 - DNA, 327 bp, Zea Mays
gccaacaggaaaagaaaaataaagaaggtcatgggagaacatatttgtaaaaataaattttaatgctgcaacaaatctagcacaatatgtttggtccaaaccaccaaggtctgggccaattcccaacactatatatctatctagatggttgtttgccagcgtgcgctgtatgcctgtagttgttggtttcaactttagctacgatgttttgtgtcactagtccagcaaaatgttttgtgtcacttttgaacggaattggacttgcgattactcaaatgtccattttacaacttttgtttgctgttgtgtttccagcttgtgtgcctg

SEQ ID NO: 141734 - DNA, 603 bp, Zea Mays
cccgccacgccgccggctcatacggttgttgtggaactgcatgaaccggctggccacaagtgccagctcctcatccacaaggctctccacctgctcctctgtaataaacaataaagaagacagagcaaacatagcaggtgaggagttagaagcagaaccacctccagagaccagggccatggtgggtgcactagggttctcaatcttggctcgagtctggtggtcaatctctatggacttgagcttgctgaagagcttgtccacggtgagagtctcgtagttgggtgacttgatgatcgccgagaccttcacctcccaaaccctctgatctagagcatgtagtaatttcagcgctctctcatgatcactatagggtagttgtgccttgttggcacgcatcttgttcacaattgactggaacctggataacatggaatcaatggtctctccagccaactgtgtgaagttctcgtactctcgcctgtacgtctcaaacagtctagtcttcacatgatcattgccctcatggaatctctcgagggtagaccagatctgatgagccgtagtcagatgtccaactcgctcaaactcaccaagcgagag

SEQ ID NO: 141735 - DNA, 708 bp, Zea Mays
ttaggccaaaaagcctcaaaatgaaaacgtcgactccctgatttattatctcgaagacccataattaaggggcagtgatcagagtcttgggaagtagaactctgtagcaacacattagggaaaagcagctctcagtcaattgagcatagaaccatgtccaacctgacaagaatcggctccacttgttgatttgaccaagtaaaacgccgaccatggagaggaacttctttaagggcaagatcattgataaagcgcctaaaacgccccatcatagctctattgaaattgttgttgttcttgtctgaggttttgtaaattaagttgaaatccccagcaacgacccaaggtccattgcagccctctctgacatttcttagctcctgcaaaaatgagatcttctcttcatccccttgaggaccatacacataggttaaccaccaggcacctccttcctgcttatgaaactgaatggagacactatgattatcaactctgttcgcacctgtgtatctcaaatgatttttccaagccaccaaaattcccccattggccccatctgaaggcaagaaaatatactcagtaaattcaaaacccaaaacagagactaaggtgcttctagcaatatattgcatcttagtttcctgcggacataccatctcagccttaatggatagaattagacctctaactgaatcttggcgagcacga

SEQ ID NO: 141736 - DNA, 692 bp, Zea Mays
gatgaaggtgcttgcttaaactaaataacagtagtctactatttatgtttaccgagacaatgctagctatgaaaatagatgagtcaaatatgcatagaattcggaataaacaaagccgcaatagttgctaaagttgtcacagttatacctactttcaacgtaaactgagtaaatagatgttaaagttacaggcactgctcatctggatgacatagatgatagatcgcatcatcgcaatgtgaccaaatcccaagccaattgtctatgtcaactcctgatcacctcaatcaaataggcaatctcacagaagctcaccaatcccaagcttcgcagacaaaaaacaaaaacaaaaacaaaaacggaatcccttaagcaaatgaccgcaagcacagaccgctcaaagcacctgcgtcaaaattttacccaaattcggctactccgtttcaatgaacttcaaaagtatcgcgataccatacaaacgggcatggattcctcatccaaaaccatggccaaacaaatcatgaccagatacaaagtcctaaatagcaatggcagaacaaaaacaatgtgatagggacgaggctgaccctccgcggccttcttcgcggccatgacggggcccctggacctccgcttggaggccgacggggtgacgaggccgccgctggactcggtgcagaacggctgcggcc

SEQ ID NO: 141737 - DNA, 306 bp, Zea Mays
atcctccttgagccttcttgaaaggtccaatcatatccaatccccagcatgcgaacggccaagttatgggtatggtttgcagttgctgcgctggtagatgttgctgttttgacaagtactagcaggcttcgcacctctggactaactcggttgcatcactctttgttgttggccagtagaaacccgacctgaagaccttcccaaccagggtcctggatgctgcgtgtatcccgcattgcccagcatgaacctcttctagcagttgctttccggtggctgagagaatgcatttcatgaggactcctg

SEQ ID NO: 141738 - DNA, 455 bp, Zea Mays
aggccataaccaaggggcaaggtagcagcagtgttcgtcctctctacgttccaccacaaggtacaccaactcgtccaggagaaggaccatgcccagctcagtacactccacagaggtccccacggacaactcccactcgtcaggttgcccccactggcaccccgacaaggcctacaacacagaagacaagccctacatgcttcaagtgtagtcaggttgggcattatgctaatgcttgtccggaggggaattctagtgcatctgctcaggacaggcaacagactcctggcaagggatttagcaatgccagggtgaaccaagtcagtgctgaggccactgctgacggtgcagacatcgctatcggtatgttttacattaatgcaattccagcagcattattatttgattctagagctacgcattcgtttatgtctgctcaatttgccaccaccaat

SEQ ID NO: 141739 - DNA, 583 bp, Zea Mays
cggcccacctctgatcatattgaccgtcgtgtctatctccgcggctgagtgacccgtgatcgtcgcacttaatgggcactgttgggtcacgcgcatggctgccttgagtcgctgtgctggttctgtagttgagaagacgcagcattggtgcaggtggcggtgcgatttcctcgcacgtagtgaccggcacgccggttacatgacatgtgagaccgggcctccatgctggaccgccggatgcgacgaagctaaaagggtgcacaaccgtagtgtggttgcatgcttcttgcgcggcggtccgccctttcgaccgctggtttcggcgagaatgagggaatgcttataaccgcggggcggttacgtgcttcgcgtgcagcggtttgccttcttcgcgttttgggtcagctcgcatgacgtgtgggacccagcccccgtgtcgtggggtggtaaccctggagcacgtcggtggagactttgcccgtgacgcttgggggtgcgagtgaggagatctgcctttaaaaagggatcgaccccccccccccgggcggtagccatgccttcacactcctcgcattcatcgtgt

SEQ ID NO: 141740 - DNA, 287 bp, Zea Mays
gcagtgccctactcggccgccctgactcccgcaaactaggaccggcacatccgtagccagtgcacccgtcgccgatcgttccgccgccgccacagacgatcaacgccggcagcgaccacgtgcctacaaggaccgacgctggtgattcgactacatgctaggagtctgtttgttgcgatcgatgtgggcgtggtgtctagggtcacgacgaattgctcgtcgtgcttctctgttcgtcgcaaagccgctcctcgtcgtgggcaactcaatgggcatcaaatccatcg

SEQ ID NO: 141741 - DNA, 344 bp, Zea Mays
cgtccaatcttcatcggatggcccggatgcgcggataacgtttcgtgtggatcgtggagccagaaccattgatcaacgatctagaagccagcgtaccccacgctctcagcaccccgctaacccgtgggccccgtgcgtcagtgcctcagctcgtccctgccccacctgtcagtcgcgctcgcgcccgcgcgctcgcccgtaggatttgatctcagccgttcgcttgtaatcgtgcggtcaagattacccgataccccttcgtgcggcggttttgcttaagagagcctcgggtttccgagaatcaacccgttgtcctgtgttttagagcgcagacccctgaactc

SEQ ID NO: 141742 - DNA, 614 bp, Zea Mays
atcaagtacccaacattggcgcccaactccggtgattccatgaccacatcagcatatgccaccaaagaaagcaacgacaactggctccatccttgcaccaatcgatcccaagcaagggaacaaagctctcaacagagaagcaaggaactagaagagggccacctgcccaccacccagagaagaggaacttgacgaggatattgccaatcttgaggtcatccaccaacaagttgagaagcacaaggagaaaatgcattgtctttcagagctctagaggaagatcaacgaagcaactgaagagatgtgcaacatcaaagcgcatgagaacatgaacaactacaaagaccaaaattacgatggatgcgattatgacaaccttcgtcatgaagtatacaatgtctaggatttcctttatgatgaaaattccccactaacaccagaattacaagctaaaccatggtcaccactatataagactcctacactgccaatctatgatggcctgaccaacctgaagcagttcctcatgagctacaaggctaccatatccttgtatggttgtaattcaccagtcatggtgaagtctttcatcatgccagtttgaagtgtgtccc

SEQ ID NO: 141743 - DNA, 612 bp, Zea Mays
cctttgttgtaagggtgggcggatcaggttggaaccttacaaaaaaccacctgaacctctgcgaactcttctgaggtttgatggcgacgctcgctcaaaacggtttttgcgccagatacgatattacaactcacttttctctttcaccaccttgggtgctgccgcgacaaggctataaacaatggtactgcaccgtatgttttccgaattaacggtgtggttcatcatcctatgctggtatctttgtctaaccttgctatttacacttctattaagactctgtttacccaaggttccaaacctttctggtaccacttcgctgacaggtggatcgtcttgcaaatggtacgtgaatccgcaggttccagaggcgacaagccttgcagccaggtaccataaacacgtcgcccgcttcccttgaacgccaaaaaatataggtctaccctttatatgtctagttcactcgtctccttttttagcttgcagcataaaaggagcccaattatggctgctactggttcgacgcagcgtgtgccaaggatttctaccactgagcataagaaagtatctgaaattaaacacctgcatccattcaagcatgatgtggttcat

SEQ ID NO: 141744 - DNA, 1651 bp, Zea Mays
ttcccgtctattatccctctcatccacacaactaagaatagccgaatgaaaacaagcctcttcttcacctctcccatgcaagacctccagtgtctctcctcccattttccagaagcaaagcgacgtcaagaaacaagaagagagggaggttgatccgtccaaataatagatgggattccaatcaaatggcagcaatggcacagcctagttagccgacagatcatcacttgatttgtcagcaacagcatccgattctaacagacagcgagcccgaagacatgacggcggtggcgaacctgtcgtcgggggcgctggaggcgacggcgaagccgctggcggcggcgtgctacgacaacaacctggtgaactcgcagggcatgttcctgggcgaccagccgctgcgcttctcgctgccgctgctcctcgtgcaggtgtccgtcatcctagtcctctccgcggccgcccacgtcgtgctccgccgcctcggccagtcccgcttcgtcacccacatgctggtcggcatcttcctggggccctccgtgctgggccggaacgcctccttccgcgacctcctcttctccgagcggggcacctacatcctcgagagcgtctccctggtggcgctcatcctcttcctcttctccatgggcgtcaagaccgacctcagcctgctccgccgccccagcggccgcgccgttgccgtcggcatcacgggagccgtcgtcccgctcgccatcaccctgcccgtcttccacgcgctccagccctcgctgcccgaagacctgcggggctcctcgctcgtcaccgagctcgccgtccgcctctccctctcctccttccccgtcgtcgccgacgcgctctccgacctggacctcctcaacaccgacctcggccgcatcgcgctcacggcgtccctcatcacggacgtcacctcctggttcctccgcgcctgctccgccgcggtgttcctcgtctccgaggccatgtcgccggccttcacggccaggatcctcgcctcattcgtcgccttcgtgctcttcgtcggcttcgtcgcgcgccccgccggccgctacatcgcgtacaagcgcaccccgacgggggcgctcctgtccgagggctctttcgtcgtggtggtcatcgccgcgctgctgtcggcgctggtcacggacgccatcggcttcaagtacatgatcgggcccatgatgctggggctggcgctccccggcggcatgcccattggcgccacgatgacggagcgcctcgactccttcttcatcgcgctcttcctgcccgtctacatggcgctctccggctaccgcaccgacttcagcaaggcggaggaggcctcagagaggtggtgcgcgctggagctgttcgtggtgctctgcgtctccgggaagctcgtcggctgcgtcgccgcggggctcttcttcgccatgccgttccgtgacgccgccgtgctggcgctcatgctcaacatccggggcatcgtggaggtggcggccatcaacagctggggcgacagcatgaaggccaccgcggagcactactccacgctgaccctggccatggtgctcatcaccgccgtgtccacgccgctgatcaagctcctgtacgacccgtcggggcagttcgcgcgggcgaagcggcg

SEQ ID NO: 141745 - DNA, 367 bp, Zea Mays
gcatagcgtccgttagcaggaagaacgggtcccggatggccggggcgtctgctcgcctgcgcggtgccgccgcggttggggacgccgccgcggtctaggggcgttggttgagggagtaatgggaagcgtagatttattgacgatcagcctggattagatgttagggtgttgcgccgggcgccattgatcccgcgggcttctgatcggacggccgaatttctctataccccttcgaccgtggcaaaattcttaaagagcccctgatcttcacagtactcaacccgccgtcctcggccgatgtaaagtaattgctattgagccctgtatatttataaactagcccatgtactctttagaatttgtagca

SEQ ID NO: 141746 - DNA, 619 bp, Zea Mays
attagctctgtttgtttagaagataagaagagataaagagggagtcagttagccctcctattttagtggagagattagctcccagttgttagaggtggttgagattaaagtggcacctaagtctataaaaggagttactgtagtttgtattagggttcattaaagaaagttttacctggccggtggagcttccttggtcatcctggcgcaccttgcgctaactgacggaatcagctccccctctagccgatccccatatccattaagatccctgccccagtcccaagccttgctgcgatcactactgcgcagtcctaggcgcccacgacatatcaatttgctatcagattcctccgacgcatcgcccaacatgtccggcgttgatcacgatcctgcgaagacctcctccgactcagccaagttggataagatattggcgcaactctccaccatcaactcacgcctcgacctacatggacagcggatcacgcttttggagaagcgcccaatcggccagcagctgccggaatcttcagaaaccggcccacataccgcagcgcctgtcggggtcatgcatagcacaggatctgctcctcgtgaccgcgtcgacgatggtggc

SEQ ID NO: 141747 - DNA, 782 bp, Zea Mays
aagattgttaatgtacaggaccaaacggatcacaggcgtttagtgtctgtcagttctacaaacaagggtggttacatccacaagatcacgatgtaatagcgcgaggttccgttcatcgaatgccatgcaatggaaatcttcttgatttatgctgcgcgggtcatctggctaggaatacgactccacattcgtagactccattcatgctgcttaatttgaagccgacatggcacaacaagcagatttcataacacatcttccctatcgcaatttgacagtcagatctgggagaagttatggttcgcctccacaactaaagaatctcactcgacggagtcacattaatgctctgagaccgaaccctgtctatgatcttctgcctgcctgttaaatcttcttcgtatccaacgacctgcagaaaaaagccagatttaaatgagtcagacaatgttttttttttttgtgattgccgagttattcgatagactacacacctgagattctgtctgcgtctcactgaaagggtagtaagtagtaggagctggggaggggactggtacagagtttaagttttgaacctttgtgacagaggtgctatcttgcttctgttgcctagagaaaataaacaacagttaccgaaccaaacgtgaagcagggacgacaccatccctcaaagcaggggcaggaccatcccacccactatatcccagaaccaaagacaccctccctaattactgcaaacaagttgtgagatggaagttttatgctacgtagaggccaga

SEQ ID NO: 141748 - DNA, 292 bp, Zea Mays
ctgccctgtgggtggtatgtaatggcaagaagtgagctgtcttagttagcctatcgacaatgacccaaatagaatcgtggtgtcgagaggtgttgggtaaacccacaataaaatccatgctgaggtcctcccatttccaagatggtatgggaagaggctgtaaggtacctgctaccttcaaatggctagccttgattcttcagcaagtgtcgcattcagatacgtacttagcaatttgcctcttcattctggtccaccaatacaaggatctgagatcatgatacatcttgtt

SEQ ID NO: 141749 - DNA, 562 bp, Zea Mays
atccaaagtaatcagatactatctagtctaatctagtcatatccaatctagtctggatcttatctaatctaatatgttctaatctattgtgagttacttaatgctggtacaaaggataaggccatactcctaactcatttaagcctaaattggtgaccgggattaactcggccataccccaacaacttgacctacataataggatacctgatctgtccaactaatcaatcaaactaaattctgaataatctcatttaactcatagccacctactaaactagctactccacctactactttatcttaactacatgtccctaattcggataacaacttcaagaacgaagatcgaagatgatcgacctcatcaatcaaggaaggataagattcaagtcagatcttcaaaggaatcaagatccacaatccgggatggagtctttctttaccgtactctttcttacccaaacctctctatgctttaaagacatcttttaccatacacaataaagtggatatacatacccaagcttccctaatcaccttctaatttgtattataaaac

SEQ ID NO: 141750 - DNA, 344 bp, Zea Mays
cgaggatggtcttaagctcgggtcttagccctttcagaaaacgggccatcttcctggactcggtgctgacatcgtcaggcgcgtaacgggccaactctgtgaacttgtgcacatattcgctgacggtccttccaccttgagttagttcccggaactcgtcttccttgagttgaactatcccctggggtacatggtgctcacggaaagctgtttcgaattctgtccaggtagcatctctgacggcctcgctgaaggtgtcccaccatgctagggccattccagaaagttgatgagcagctagttgaacacgctgatttttggggcatctgatggcttccagtttc

SEQ ID NO: 141751 - DNA, 372 bp, Zea Mays
attcagttctgctattttggatttgatatccagtatttggcagctacttcaatttcaatgtaatgattcttaagttcaactcctattatttggcttcaattacttaagtaaccttgggtaggatatgtaggaattttgcttcgtttttttgcttcttggggtgtcagttctgtggtctgtcatttttgaaacagttttgagccttattgggcaggagttgtcatcactaaattagtctaattaatatgccactttaccttctcagattttggcggccacattttctcatgtttacttttttagtaaagaaaaaggagcatggaaactaatgattgttctttgcattaccacaatatgacctttatttttgtc

SEQ ID NO: 141752 - DNA, 506 bp, Zea Mays
aaaagcgcaacgaaacaagcataaaattgacagttcatgtaaaaatgtcatgacataataagtaaaccaaacaaccaaactgtgctgattgatgggagtgaaagctttgtgttagccaaccaattaacgctggaacaagcacattaaaggccttattatcaactgaaccctgttgttacctgccgatcaatattcttagcaccgtcctgcagatcagccacattactgcagctctccttggcttcaacctctgccttcactggaggcgcagaggggtgtgccccctcgagcaggaggacgaccctcctgatcccattgagccttgcgtccctgggcacttcgttcatcacggcgaagggttctccgccctcatctctgaccctgaacccgacggcctccaagagcgccatcccgccttccctgtccgccaccgcctctttgatccgcgggttgctcagcctcacccgcctgaacttgtcgttctcgggctcccgcagcaggttgcc

SEQ ID NO: 141753 - DNA, 808 bp, Zea Mays
attcatcataacttcgagcttaaccaaagccatctaacaagttgattaaccaaaggaatggcatagcccgccatacgacatacacgtcggcttgcctattattaacgcagttcgagacaccacatgtatatatatcacaatcacttacgccatcgactcttacttaacatgagttggctaacgccatataagacttaccaaaccattttaaacattgtaactcgaaacatgggttgaagcaggttaattagtttttcttaaccatttctccactcgaattagttaacacacaagtcacttaaaacaccatattttaggagggctaacatagagacattaaaacatggcataaaactccataagacttacactggctaatgaaagacctaaagcacccatgtgcatatgttatcggactgttcttaaattttagcaaggattgactcatgaacactacttgcctccaataattattgggctgcgataacgctcatataagacctctaatcgatcaacaagacatttatttatccaaagggaatggaatgcaataatttataaagctaagcatcgatcggtcatacaacaaaaatcatgacaacactgacagatactatccactaaccgttgaaaatttaaacttacttctcgcttgccactacatcactcctcaatcacacaaccatcacgagcatccttcacacgattatataatagcgacctaaacgtcgtgttacacaatacatacatctttcctcgtcgcgagtataaccacattacgacatatacccgcacacctcaatcaatt

SEQ ID NO: 141754 - DNA, 536 bp, Zea Mays
ccgggagatcgccttgggagaaggagcggaattcttggtcggcataaagagcacgtgtggtgcggtttcccaggaactgggactctatagagagccagagggtgcgggcagaggcgctgcgctgagagatgatgtcagcgagggcatcggaaagggtgccaagaagccaagtgcggacgacggcattcatgcgaatccaatcaggtgactcgggaaaaacagaatcagagaggacgtggcattccagggaaaatttggtgagggtgagaaggaaagattcggaccagcgggcgtaaaagttggagttggtgtcaaggagtagagggacaagagcccggatgttggttactgcaacagcctgggcgtgaaggtttagcagcgtggctgcctcgtggtggagaagagcagcatgcagagttgcaggtgggatgtcgtcgtcggcgtgagtgccagtcgaacaagtgtcctcctccggctggggaggagcagcagccgcgcgctctctggcggcgcgatcctgggcagcgcgaacgcgg

SEQ ID NO: 141755 - DNA, 620 bp, Zea Mays
cagtagttcactaccaagttcagttacataataaggttattgaaatactcagataaccttacacaagctaactcttacacagataacacatccagtgcccattccacaccacccatactactctacttcctctgacgaccccgaatctcttcataattgacatcatccagtgcccattccccaccacccatatcttgatcttcagcaaattggttattgaaatactcagataatggtggcgacggaccagcttcgagatcttctaaacgttgtgcttcctcctcaagtgactgagcaagctcatacacgcgccacattgcgaagttcactgacacctctttggccgtatctggcgaatccataatctcgtctccagccaaatctttcaactcctcccaactacatgcatctttgcaatggcttgggcgaggtcactacgaaccgtttcaaatcaggttatttgcgaaaccacaaacaatgttgttggaattgaacatagtactgcaaaagtttacaaaccacaaccctaaattaggtggaagggaaaccttaccgacactgaacgaggtgccgagcactgcttgaagacagaatgggtctgccgttgggaagtaaattgc

SEQ ID NO: 141756 - DNA, 514 bp, Zea Mays
ttgatccggcgttgttcgggttttatgaagccatggaaaaaacaaacgtagagaagattgcaaacgagatgctagctgggatatctgaaaactccagcgatagtgaaagttttgatgtagaaagtgggaatgaagatgtcgaagatcagccctagaaaccaagccatggtgtcttcgggaaatcaactatcgagcaagggcagattgatgcaatgagggggaggtgctttcgtgatatctcaattgtgagggcttgagaggaaaataatgtccctctacctgaagctgacgaagtggtagtttatagaagcttcatgaaggtagggcttcggttccctctggataaattgctggtcgaagtcctgagaaccttcgaaatttaccttcatcaacttactcccgaagctatcattaaggtgaggatcttcatatgggccatgaggagccagggactggagccaaatgcaaaatgtttccgcaacatccatgagctgtcttatgagacgaaggctac

SEQ ID NO: 141757 - DNA, 514 bp, Zea Mays
gctgtgcagcgcccgtgagatagtacgtggccgtccagactttatccacctctggcgttccttgattgtagaagaagctctcacagcgggacaaccaaccaacatgatcctctttgtcgttgaatgtgggaaagggaaggttgtgatggtgctgattgggagggttttgctgcggtgggtaagcggtatggtggggtttggaaaagcctgggattggtgatggggagtgtgggaagggtatctgatggatgggtatgggcatggtagatgtgggtggcagcaaggctaaggttggtagtggaaggttggttgaggtggatgggagtggagcggttgtggtggtgatcagtggtgatggtatgggtggtgtggcggggtttgacaagggaggtatcctgccataacctggaatgccatatgggatggaagtagggctggtggacgctgggggtggtggtggtgttggcggcctactgatcatttgagtgatggcggtggtgagatcggcaagggc

SEQ ID NO: 141758 - DNA, 476 bp, Zea Mays
gactcacctgcatcccaactctattctgcaaatttctgtctttgttcatttgtgcgaagcctaccttggaattcttcctcacttcagtttgtggaagtacttgtatcattgttggcatgggatggctggggggcagcaccagctcgtgggtggtgcgagtctggagatgtgctgtgggaggaaaacggaataccttgacatccaacttaaggatagcattaaaggatgacgcttagagtggttcattgtggaaaaccatggcaagtccctcccccctcggtcagggagacagacggatgttcgtgctccaagttggattgggtcccccacagacttggagatagcagaatccaaggttctgcttgctgaaatttgtttgttgaaggagagaggtctgactgctgaagctgtggttgcagactttgtttttaagaatattcagccactgaaggacagagcatacccggcttatttgt

SEQ ID NO: 141759 - DNA, 519 bp, Zea Mays
aggttctgaggtttgggcctgcgcacgcaaccgctactgacaatgctatttttgtggcggcttcgaccgtggctgccgatgatgattcgtttggctctgtgtctaagtgttttgagtctgatgattctgggagttcgattgcgtggacggaggagtcttcagatgaggacttggattattttgcagcgttagatgtggctgcagcggagccttcgccgcgcgtggagggttccgaggggtgcctgggtgcgagtactgggtataggcggcgaagggcggtggcgaaacggagagtgagtgaattttcgcgaagtggtaggcgtcatcgtagtgagatggagagtggtcgtcttcgcgtggacgggactggtaagcgagaattgttgtcctcgccgattggggcgagtgtaggtgagggggagctgcgaaatctttttgagggtgaggaattgaggataatgctgtccaactacagggagatgggtatcatcccaaaggttgagccaatgtaatatatga

SEQ ID NO: 141760 - DNA, 434 bp, Zea Mays
ttccttttctgatcatcagcagaaggctcgggctggctggttcggctgggacgcctcgggcgaatattggcaggtttcgagacatccaaggtcgcaacaacctctggaggcgacaccactgccagtgtaccatcaggaacagtatcagacgaatcctcagctagcagatcgagcatgtcatttatgtctgcgtcactagggttcaagggcacctcaaaataaatctgtcgctcatcatcaggtatctccccgagcgaagcaactaaggaacggacatcttcagcagaaggtcgaactctaagacccaaattgctatctgtcacgggcggattggacacaaaaagagtgaaatctttgggggaaggcagattccaagccgagtatgccactggagctccaacgtttgaaaccttacccctgaggatcatctcgag

SEQ ID NO: 141761 - DNA, 495 bp, Zea Mays
cgatttcaaagggaatttagtgactatttgatagtgagctttgtggcaaagttaaagattaactttagccctataactttggtacagagagatgaccaagtcgtaatgcaaaattttgagaacagtggccctaaaccgtggctgtcaggttgtttgatgacccttgccatggtacagtagttccaaactgaagaagatcacaggttcacccccctgctcgtcgccggtgacttttcgccgggattgttgacggacagccatgattcgtgcatcgtgggcatcagataagctcggggtcacgtaaatatcgccgccatggataagccccggtcagtaaaatattccggccgccgtaccgtgttcaccgcggtggaaaccgataagcccgccggtgaccgccgcctcccgggccgtgcgccgcgtggctctcactttccactgcaccgccacgacttactctaactccccgtcgatcgccggaacaaccgccacacc

SEQ ID NO: 141762 - DNA, 1143 bp, Zea Mays
acctgtgctgcagctggtgatggggtgtcaaactgtgatacattagaagttgaactgttctgcacatgcaatgcggttggtcttacatgaggataaccagatacttctgttatgttgttagcatgaagctgtttgatttgcttaggaataatatccccaaaacttgcagagacactggatgatagaactcgattttcattggcaaagttcgacttcaccaaagtggacgtggatgtgtgttcctgctggagacgtagagcagtcgattcactaaaacactcatcggtatcttcggcaatacctataagacaaagacacgtttttaatgtatgtttatggcttcaaactttaaattgagagtgactccttgcaagcaaaaaggcaaggattaatgaatcatagtgtaacttctacagtaaggcaaaaggaaatactgcccaccaggtatgagccagtaacaacgaatggcggaatggcaagctaattgatgatgattgaaatccatcggatagagaatttactgcagtaatgctcaaatgctctgaatttacaggaacaaacatatttctacaggttaacatagaagacaacaatatatgagaaatgtctatgaaggccatattcaaatccactagatgtagcatattcagtaacacgcattcaaatcaccatttcatttctatttctacaccttcaaaggttaagatatgaggcaatagtatacttcatgcaactagtcctaatatatcacaattgctatagacctaccacagaacttcatatatgggtgtaaaatgaaccaacctaatatacacaattcctcatatgccgcccataaaagaggatctagagtcaacgcttgtgtaaattgttcagctgcagctgaaattctgcctgtgcacctgcacacagttgagataaatatctgaactctgaagaaatatagaatgcagcaacatggattcagttaagccatgaataataaacctgtagatcactccaaggaggtagtgtcctgttgctccacttggaacctgcagaaggatgaaactaatactagaaacaagctgacccaatacaggaattaaaacaaacaaatgtgattgattttattttctaagtatctacttcacctctgtagaa

SEQ ID NO: 141763 - DNA, 279 bp, Zea Mays
gtcagctacaacaagacctgacagtttcattacttctgaaattggtgctgtttcagtggcctcggtttcttctccctcacgagacacctttgcagttgatcgcaccctggccattttgatggatttttacagtctgacgaagctaacccatttgacgaagttaaccttaaatgatgaagtgttctcttgaaagcgcagtgcagaaagcttcgtctatggttaaattttttaacagcacaatagtgcaatggcaatgaatgctgtggtaactcttcacca

SEQ ID NO: 141764 - DNA, 462 bp, Zea Mays
cagattttcaaagcctgctaggaaaagaaaaaggaaatttatgaatagtctcgggccgaaagcagcccgagccggcccaattagcgcagaaacgcgccagcgcgcgcccgcgttgcgggttttgcagaaaaggccctgactaacagaataacctaaagcggggtcagagcactgtttcggtgagtcgctgacattcgcagaaagacccccatacttctaattcttctccaactacacccctgtccacggcgcgctcgccgttcatcctggacgggatctgtaccggccatggccggcgataactgcccggactaaccatcgaggaggcttcactgacctaagatggcttcagaacacccatcaatttgacccgaacgcactgagaatggcctgtccacatgcacgacggaatccgcggtgtcgattccgtgttcttaattatctacgcccgaattggtcaaa

SEQ ID NO: 141765 - DNA, 788 bp, Zea Mays
caaagaccagcaccctatcttagtcgagaccgaattcaagacctaatgagcgtttcccctcactcaatttcacgaatggctacccagatggttctagccacggtgacagtgcggacaatcaaaggaacaacgtgttcccggtgatccacggtggtctagttcaattagaggggtcgaggagcttgaggagaacttaaggacgctagaacaaacgatctgggagcttgaattaacctagaataagctagccgcggtgaggctaaaccgagcggggttcttgagtgttttggggagaatccaaaattggagctctctggtggaggatttgaggtgcgggtgggtgcgttagttgcttgattacatgacggagccgagggcgtgctcaatttatagagcccgcaagcggtggccggtgatttggacgacgacgtgcggcggctagaggaacaaggagttactggcgcaaggaattagtggcatctaccgtggcagccctcaccggcgatgatcagacggctaaagtgagtcacgacgatgcggtgaatgtgcccgggtacatggcgtaaggccgtgaggcggctgtcaccagcgagctcatccgaatccgccgtggcgagctcggtacggtggccggagtttatctacggcggtgatacttactcaaccccgagcgttatccaattgatccgagcacgaattgccaacatctccgatccaggccgaactttggatcatgtacttcgatgggtcgctcatgaaaacaggagcaggcgctggcttgctcttcg

SEQ ID NO: 141766 - DNA, 507 bp, Zea Mays
acgatgcctaggggatggcgaatacactaagacgtacctcactggtagggacgaagcacagaggcccgaccgcggcgcgaggcggacggtcgcggagagcaaagtccggggataaattccgaggcgctggagcgtgactcgacccaagcaaggcgtcgaccacccaacctaggtccgggcgaaccccactggacacttgccgcgaggacagttgcgctaggctcgcgattccggtgcggcggcgaaactcactcacggcgcggtggcaatgcggtgtatgactcggggagtgggatacgggggaggaaaggggccagcgcacgcaccatatagactagcgagtccgcgccgagggagaagaaatcgggatagtggttggaacggcgcccgggaagcgcgcggagctcgcggcgagttcgcgcggtcgcaaaggagaggaaagcgctgacaggagggtcccacacttcagcgagcttacacgcgcgagcgcgagggaatgagaggctg

SEQ ID NO: 141767 - DNA, 339 bp, Zea Mays
aaagcggacgaagaagcagggggagcaaccacaacctgaacgtgttgaaactccagtcccatatctctcttcagactcctctccagatccagctggtaatgtctctccaatccctgtttctcccatttctgaacatgaagaattacctcttgcacaaagaagagctcctagagtaaatgctgggaaacctccttctcgttattgttatgaacatgacattgctaagtatgtctcatactctagtgtctctcctgcatatagaactttcattgcatctctacaaacaatatctattccgaaagattggaggtgtgccaaacaggatccaaagtggaagga

SEQ ID NO: 141768 - DNA, 1491 bp, Zea Mays
ggagaatcagacgccccggatcgcagccccagcctccatggaaggggagtcctctcgatccgtgtccgtgttgtccatggaagaaaccttgctgtcagcgcgtctccacttggtgagtgatctttgggtagtcttgctatgaacaacaattcgttgttgctgttgtacttgtggaggggcttgcgttcactaaagtgtaggtggatgcatttgtttattgttgcccccatcaagaatccaggtttcaattcagcaagaaatgttatccagaattccagatcacggaggaagcagtcattacctgcaccaatccatcttaaggtatattcttatatttgttataagcctgttaattgaatagcaagctttctatagtacggttctatttttttgtggctgaatgcattgtgaaacacattttttattgtggcccaggtgtgtatcgctcacggtcctacatctccaaaccccgtaagtgttgttcttgatacacaactgaagcctaaaatgtaaagtgtacgtgttttgactaaaactgaggagctcttaagtaacatctgcttggtatgcaacagtttcaggatatacctcacaagtttcaggatgcaaaaacacaagatatacccgctggttcgttgtattttttgctaacattttgactagcatcaatatgttacttgggtcacgagaatttctacggtgagctcattttcttgattaagggaataaatctcggcgcaacccctcagcgtcaagcagaaggtgtcgcacatcactccctctccccccttgcaacaacgacatacccctctctccccccttggaacagcgaaatcgaaggttcctgcaacagcggcatcgacgaccagttcccgggccctcccctgaacgtaacaagcattcaggtacatcttagcattttattcatgttagtaggttggcgcataggtaatgacttttttgacatgcctcaacacagctgttcaaatccattatttcttggtttcggtatccaccccaaaacgccattcgtacatgaagtgtgaaccttgaaccttgcatagaggctttgcttacaagctctaaattgctttactctaacatcactggaaagttatccgtatgtacacaatgtaaccaagcatactacatttgataccttttagtgaaatttagctcacactatagagctccccaacagatttagctcacagcctagatgtactaaaaatactatagttaaatttaagcggaccagcaagaataatttggtacttcatttttctggttctcatattcaccccaaatattacttggttatagttttcgcacacagtcctctatctacacccactactattctatatgagcctactgtggacgtccacagtactcaccatgcccccgcccttcccaccgcacagcatattctgccccgtgcatctgtaagtggctttgttttcttttccttactgaacaatgtcatgtttc

SEQ ID NO: 141769 - DNA, 904 bp, Zea Mays
ctattttggtgtaagcgtatttttttcgtcggaagaatgtaagcgtatttttttcgtgcctctacatacgcacccgtctagaaacgtctgcagttgcattggagcacaaaaaatgcatatacttgtgtaattgcacaagcagcctcgccggcgacgacgcatcgggaaggttgcccggggatgctcaccctcagcctgcaacacgcagattcaacatgcatcactagctagtacgtactactagtacaaaactagaagtggttcctattattttctagcgagtagaaccacccccaggcctcgtacgtgcactttacaagccgattctagatatgcctctccgtagtcggacgatgaagttgcaaccgtatctagattctagagatcagttcggacgcaaaagttttgaccggccgcagtggggtggacacagcgccgcaacttacgactggaggataatttagggggccgtttcaaacctctgagacaacccggctttatttgttgagatgtattaagatgtaaattaatttattaattcatctcaatacatatggaccgggacgaatctaggtttataggagtgtgtgcacatgcactcaccaaaatttgcaaaatcattgacttgaaccatattttcaccatatatgcaccacctataaaatattactatgtataacatgtgcaccttcccctgagtcactctagcttccgccactgcatgtggatttgggtcaatacttgagtagccaaactagtcctaattagggtgtcttttgaggagtatttagagcatctccaacaagatgacttaaaataaattcttaacaattaaaattgtacatcatttgaagtgtttagggcactaaaaacaaattacgttccaacagttatgccataaatc

SEQ ID NO: 141770 - DNA, 636 bp, Zea Mays
aatttgccctcctcgacggcgacttcctctcgtcggcggcgatccttcggcgatctccagcctcttcactcctctctagtgagaagcctcagctctctctactcttctcctcttcctctgtttcaagcagcagtgcagcttctcttccacctctattgctcccatttcaaattcctatcgaatccagtgaatggaatgaatcccagtgcatggttgtgtgccctagtgctccattcaatcccctgtaggttcctagctccttcgggagggtttccctacctccaatagccatttcattcaaaacctaaatccctgcgcatcacatgttcgatgaaatgtccaaaccagccaaaaatgctccaatcgatcccaaatttttcaggcaccttcactccagtaacatattcgcgcaatttcacgtcaatccgatataccaggcctcaatttcacacaattccctgttttgagcgatcaattccgagccgagtgcctaaatttcattttctctgcctaaattcaaaccaagcagacacttcactcatatttacccatataaacctattcgtgaagtatcggctcaattccacgtcatttcatgcctcaattcgaatttcaaacctcctatggcactatttc

SEQ ID NO: 141771 - DNA, 324 bp, Zea Mays
attctagatctgatccaatctaataggttaatctaacctaacaaagtctaaccttaagttgagctaacctaaggacagtaacttaacaagttaacactagtgaaataaactggattctactcctatgaaccttgttctccccttatgcacataaacctaaattagcgcattagaccaactcaaccgtgagcataagagctaacccaaccaatagtgtcatggtggattgcataatctgtctaccccacctaacatcaaacaagtttttgaccaacatcatgtagtctatctcacctatatctaccttaaccatactcccactcc

SEQ ID NO: 141772 - DNA, 693 bp, Zea Mays
atcacgacgtgcttgaaaaggtgggtgcgcggtgatccaagggaagttgtgcctgagtgtgtgtactcaagcgccacatccctcaaatcatcgcgcacccaccttttcaagcatgacgtgagattgagggagttgtcatcgctggcgtgggaggagggggaacttgaatgctgccatgccatccaaacacctagattgtcgttgtgtcctcatcgggcattctggggacatcttccgagcattggagatctacgtgaggcatccacgtgcgtggacatacacacacacacacactcaagcgccacatccctcagatcaccatgcacccaccttttcaagcacgctgtgagattaagggagccgtcatcgccggcgtgagaggagggggaactcgaatgccgccacgccatccaaacacctagactatcgttgtgtcctcaccgggcattctagggacatcgttcgagcgttggggatctacgtgaggcatccacacacatggacatgatctggtagtcgcgtaatttcttgttggaatttctccaccagtgcccctatcaccttctttgccaatgagagtcccatagagtcctagccttcatcttctattttgcattgtaaccgatttacctcaaattgttttacctcatatccgacaatcgatcgtgtggggaatcgtggtcgtagtcccgc

SEQ ID NO: 141773 - DNA, 273 bp, Zea Mays
ggtcgcggcttggagaaataccagggaatgggacgtcacgagctgggaacagggataaacgccgaccatggaaccgagtagggagaagcgaccggcgcaggggaactggagcaccgcgagaactctatggcagggcgcgacgaaatggccgagacggagaagtccgagcgcagccatggatggaggagcacaggagatggacgcgcgcgcaggagctagagcagaagcaccgcgtagaggggagagagaaggagcaccgcagcgagcaacaag

SEQ ID NO: 141774 - DNA, 429 bp, Zea Mays
tggagatagaccctttggatcactatgtatgcccttatggtgaagttcttggtcgtgatccgagttgattcttgttcgagttcattttgagaaaacccccaaaaaaacccatctctctttggttttctgatctgtgcttcgattttttgtttgttcgatccatacttcaccagtaaacatcttctaccctgtgcaaactttttgtgaagattgagaattttctaggcatttttagtgcccgacactgtcgcccgtgtgcgcgacactgctggacctaaggtcggcattgtcgccctaactttctagatcttttgactctgatattttctaggaagttgggtctatagttcttagagttttggtgcatacaaacgatactagtctatgttgcactctgatctgctgctttgagtccctagagggcttccg

SEQ ID NO: 141775 - DNA, 603 bp, Zea Mays
tagaaactccctaccacagtgcaagccacttgccacctttgccatggctgcttccgtctcctcccaaagaaaaagcaaaaggagatgagatagcgagcaagaggatcaccactagcaccattgaaccagagcagcagagcgacgcactagctagatagatcagagtagtacgttgctctgtagtctactagacacccttcatccagacgccatatatatctcaaaagccaaccccccctcccctgccttgcagttgccacagcgagcgagcgaacgaacatattcccctagattgctctcctgacactatcatcttccacctcccagcttcactctcaagcctccactccatcttcttgtgaagcttctcaagattctcgcatgcctttactcctcctctcactcactctcgccagcttgcttgctaaacaacctccaacgccgacgccaatgccgacagctcaactcctctaactagcctcccgccgcaattcacaagcgcccggagaaagaaaaaagaaagaaacattggaggcaccccccgatgaggccttcgccacctctgctcctgctcgtgctcctgcatttcgcgctcctgtccac

SEQ ID NO: 141776 - DNA, 298 bp, Zea Mays
cggagtcgaacggacgcacggaaccgatattgtgccttttcacttacccgcgcccgactgcgccttttcactttcctggccctccgcgtacggctcaatccattctcttccccggcgacctagccctcgccgtagccgttgtgcgctcgctcccgttcccgtcttcgtccatcccgcacgctcccgctcgttcccagcttcggccccctccacacttctccgcgaacggatcctccgctcccgtcagaatcgtttgctcgcctgagtcgtagaccgcgaacgtcgacgtagcccgcgc

SEQ ID NO: 141777 - DNA, 274 bp, Zea Mays
ggggaaggctaatgtagtggctgatgcccttagcaggtccagggttccagaggtggccttgtcgttgatcgctgatctgaaccgtttgggaatcgctttgtgttatgtcggtaccgctagcaaggagactcagatgattattcaatcctctctcatggagagagtgtgtgcggctcagcagcaggatcgtctattgcaggaagctcgaaagagggttggtgatggtaaaccacgagagttcaccattgatgagaatgatttggttcgtttcagg

SEQ ID NO: 141778 - DNA, 871 bp, Zea Mays
cggaattgtttgtagggcctgggctggcatgtgcatttgcttcacgtagaattgtcatcctctgcaaaaccacataatcttggtggcgtcggcaaccgcgggtggcctgtagaacccctgtttggggtgtcgcgtggtgcccgcaagcccccaagtggattttgcctaacaattcttgtccctggaggatggatatgcacgctagagaattctcgaggggctgcatcggtagagctccttttcttctctgagcagtacaaaagtctttgcccgacgtgctaggcgtctggcctcggccttgccaagagggagttctcctcggaggaggtactctaggtacgtggttcactagtgtgaggctggtgtggccccgctctgttctccgtcgatctgcatggcttcggagctcaccagatgggggcgtgctggtgtcgggagtaggttcgagcgcctccttaattacaacaaagggtttgtagacatccctggaaaagacgctcaggggaaccgtggttcaccccaaggctatcttcgctagttcgtctgcaacctcgctgtaatgtcgtgtgatgtggttaagttccagaccgaacaactagtcctacatgcgccaaacctctttatcataggcctccatccttgcatcatggcaacttgaattcttcataacttggtcgatgatgagttgggagtctccttagacgtctaggcgtctaactcctagctcgatgatgatgcatagaccattgaccaaggcttcatattcgaccacgttgttggatgcagtgaagtggaggcgtatggcataacatagatgtactccggggggtgagatgaagagtaggcctgcgcccgctcccgttttcatcag

SEQ ID NO: 141779 - DNA, 1423 bp, Zea Mays
ggaggatgtgctgatctgcactggaagaaaggagagtcggaggatggagggtggaggattttccaaaccaaccggaagattcagtccggtgctgggatctaattcaaatgtaaacggtggtcggaatgctcaatccacaaatgaccgccgaggtgggaccaccatgaacccgagaacagatgacggtaaattgtcggcactgaaggcctacaggagagctaagggtctgtgcttcaagtgtggggaaaggtggggtcagaatcatcggtgttctgccaatgtcccattacatgttgtggaggagatgtgggctatggcacaggcaactgaagaaagtgacggcaatgaggagttggaaaatacttatgaaaacgaggaagacgcagagattctagctatatctgcagcagcggttagtggaggcgaaggcaatcgaaccattcggctgctagcatctgtttgtggacaacaggtgttaattctagtggactcgggtagctctagaagtttcatgagcaacaagctaatgggaacaatatcaccggtgcaaaaattaccaaggccaattcgggtgaaggtagcagatggaaggatattgtggagtaagcattgggttcctaattgcaagtggctttgtgggggaataacatttcacatggatttgaaggtgttgccactcagtggatacgacatgatattgggaatggactggttagaagggtacagtcctatggctgtgcattgggctgaaaaatggatgaagtttttacataatgggaaggaagttattctgcaaggactcaaacctcaactgggaagttgcaggcagctctcaagtacacaacttagagggttggtcaaacgggacgctgtggaacaactgctggaaatacgagtggcaacccagactgaaaattcaggaatacccccggtgatcgaacaactggtggatcgttatcaggatctgttccagaaaccaaaggcattgccacctaaaaggtccatcgatcactctatccctctaataccgggtgcacttccatttcggttgaggccctatcggtataccccacagcaaaagtctgaaatcgagaaacaggtgaaggagatgttagagaacggaatcattcagcccagttcaagcccgtttgcctcccctgtcctcctggtcaagaagaaagacggagaatggcgaatgtgtgtggattatcgacggttaaacacctataccgtcaagaaccggtacccgatgccattatttgatgaaatcacggatgagctaagtgggtcaaccatttttaccaagttagatcatcgatccgggtaccaccagatacgcatcaaagagggtgaggaatataaaacggcatttcaaacacaccacgggcactttgaatacagggtaatgccatttggtctaaca

SEQ ID NO: 141780 - DNA, 524 bp, Zea Mays
gtcacatagtcataagtatatgaaatgtgaataaatacatacacaagagaaatatggcacaggaaacacaagatgagacaatcgagaggtcaaacgacgtgaaaaagacgtttgaacgataaatagtgccataggaggtttggaattcaaattgaggcacgaatcgatatggaattgagctgatacttcatgaaaaggtttatatagatgaatatgagtgaagtgagtgcttggtttgaatttaggcgaagaaaaagagatatgggcactcggctcggaaacgatcgctcaaaacgggaaattgagtgaaatttaagcctggaatctcggattggcgtgaaatttggcaagtaggttactggaagtgttgtgaacgtgcctgaaaaatttgggttcaattggagcatttttggctggtttgggcatttcaccgagcacgtggcgtgcggggaattaggttttcggtgaaacggctatttgaggtgggaaaaccctcccgaaggagctaagaacctgcagggata

SEQ ID NO: 141781 - DNA, 670 bp, Zea Mays
ctagggggctcaacccgctaggggcatctcattgagtccttccttattcgatcctgtatcgactctttggttagtctggctgaccaaagagaggccttgtggccaccctgtcaaccgggtttccacagaagaatgtaaggttcgaccttggacgtgaatacgagaaaatgacctatgggctagtcacctagcttgcagctcactgggaccttgctcgatccacccctcgctctacatgaaaagttggggtgagttatagtttttacctggtcggcatgaggtagttactgcgagggtgaggtgaagagggtggctatcatgatgccgcttggcatgggtggcttgatgggacacgaaatggtccaatcgctgtatcgtgtgctagtggcatgattggtggttaaccgcctagtttgttactagcgtgtcctctatggcacacccctctagagctctgccctaggtggtgtaaaacctgcaaagcagacaattcatccatgttcgatgcttaaggcagttttacggtcgaagcggtggatccccagtgccgtttgcgctgggcccaccgttcaggcgtcgttctggctccttgtgactgcataaatagggaaggaaaatgctcgagacatatttctcttactgcattattcgttcaagcactcgcctcctc

SEQ ID NO: 141782 - DNA, 351 bp, Zea Mays
ctggtggggggtgcgagtctggagatgtgtcgtgggaggaagactgactatcttgaaatcccactcaaggatagtatcaaaggatggcgcttggagtggtttattgttgagaaccacgggaattctctccctccacggtcggggagacagccagatgttcgtactccgagttggaccgagtcccctacggaccaggaggtggctgaggcaggggctttgctggctgaagttgggctgctgaaggagaggggtctgactgcagaggttgtagttgctgattttgtcttcaagaatattcaaccattgaaggatagggcatatccagcctatctgtatcgaggcctagctgac

SEQ ID NO: 141783 - DNA, 646 bp, Zea Mays
ccggtacacagcgctccccacgctcatgtcactgcaccgtggcccccacgcgtcggattcttcgtcaacgacctcgcatgcaccccggcggaacttgcgggcacaatcgcggcgaggcggtgcggagttgaccggactcgggggaatatatgacctagagccacagtaccttgaccctctgtaaccctaggtcagtgcccctccatagctattcaccgccgccgtaagcaaatcgctgtagaagccgccgccagctgcctgcctctggactaacgacccaccctcggcgtaccacctatcggaatcgccgaagcgccgggaagctattggtgaccttgtgctggcttggacgtcttcggagcgcggtggattcctcgccgtagtaaagctccgccgcggaagcccctgttccgcgtggtagggcctcgtcgtcgcgccaacctctgagtaagatccccgaccactctcaccgtgttgttaggagtgcattgcgcccgtccgtagtgattcagggtagcgtagcgccgggttgggggagctcgccggacttctcagccgttggtgcggtggcgctgccgtcgcggggtaggaggtggaagaagtgttgtgagccgctgatgtgcagatgaacggtttagattaaaac

SEQ ID NO: 141784 - DNA, 419 bp, Zea Mays
gtggagttgaatgtcatacaaatgatgttgtggtggcccctcattcaagtaagtgtcatagtgagtatgtagctttcgaccttaattccatttgtttgtctcaaccatgtcaactttatgcttgtgatgaatgagacattcctaataatcttgattatcctcttattgctccaataggcaacatcattaggtcctctaatagtgtgggtgtctaaattatggatgaggaggaggcttatgggcttgcaagagccattgtttcttatgatgaccgtcgtgttgcagctctaagtaaacatatgagactttgttgccttgaacaaggtctgtgagtccttgaatttagcaatcttaattagtctcataaggtttatgtagaaggtagatatgatgagcttctagaggctcctgaggtaggg

SEQ ID NO: 141785 - DNA, 494 bp, Zea Mays
atttcaaacttgcggattgtataacattgctactgcatatttacagtgcaaactaacaacaggttaggaaattttaacaggtgtgagtattgataagagggttctaacaaactatcagtaccatctaaagaaaaaagaataaaaagaaagacctaaccatcaggagcttccgatgtcttgcaacgctttctgctagcattaggctccttcagtattgcatcttgctttctacctttacgttgctttttctgagggctttcatctaaatttcaacagggcaacattgatacgcagaattctgtcagcacgactattgcttctcatacataagtggcaaataacaagcaaaatttgatgaacagaccggtcaagcattgtagaaatgacaataattctgcaaaaagatatcaggacgacgtaccaaccaaaatgactccatctttgttcgattgatcctgccattgtttctgtttgcttgaagagccctacaaaag

SEQ ID NO: 141786 - DNA, 339 bp, Zea Mays
tgaatggtccttcccatagtggtgacagcttgtgtcgcccttcccccgttagaattcggcgaaggaccaagtctcccactgcaaaggatcggtgttgcacagctttatcatggtagcacctcaaggtctgctggtacctagccgactgaattactgtgttcaatcgttcttcctccagcacatcaatgtcttccagcctggttgcttctgcttcggctatgctttcgaaagttaacctcggcgccccgaagattagatcggtaggcaacactgcctctgacccataaaccatgaaaaacggggtatttccatgcagagctcgactgggttgagttctca

SEQ ID NO: 141787 - DNA, 431 bp, Zea Mays
atccctgggcccgaaggaatcgagacacttggacaagccatcaaaaatttcatcttttggccatgaagggatgtcgaattggttgatccaccaacgtcgtcgtcgtctcatccccaaccatctccgcctcctcaaactttagtacctattgtacatccatcatcacctcctcaatcttcacatgctgctcctcatcctctttctaacccaccgtctctgccacaagcatcaacatttaggacaccaccaccatctccacagccatcaagggattcacgacaatcaaagaaatctaaattccctataccaaaattggtgtccatgttcgagaaaaagaagagtaaagctactactgctggcacagctcgatttttgaaagggattgcacgggacctcacgtcacatactgttgatttggctgagcacgagga

SEQ ID NO: 141788 - DNA, 687 bp, Zea Mays
tgagattacaatgctactgacgccaaaatgacctgtcctgccacttctacaagagtaacagcttagccaatggtcccacaggaaacaatttcgattttcgagaacggggcatgcattttttcggccctaagttctgttagtcttactacactaattcaataaaaagtaggattagctttcctactataatgctgcacaaaaaggaattcatactcaacttccaattcttttctcggggatttatctgtacatgttcacaactcagccaaaattgatgtctgagatgaacacaactgtggccaaaactgtctcacatccaatcatttctcgggttccaagttgagatgtgtactctcgatttcatcataagcaacggcatgttgaagtgtaacttgaaaaaacaatagtatcacctcaccgaggctctacgtcaataggtttcattgtatctaggaagtatggaccatcttgggagacaaatcccctgcagcttcgttgcagtccttatctttcgtgcttctagaagttttttcgtgcttctagaagtttccggggcacaggacctgaagtttccggggcacgttgttgattctaagagcctcggcttccatccccttcgccactgccatcagaatttttcgtgcttctagaaggcgagggggggccctccttatctttcgaacaacc

SEQ ID NO: 141789 - DNA, 644 bp, Zea Mays
gtcgagaagaccgacgaggtccatgaggtttcttttgtaggtattctggccgaggacttttttagatcctccaactttgtatattgtcactacataagcacgcatatttcttgttttttaatccatggcgaacacttgtatctagatcgtatttatatacaagtataatatccatttgaaggggaataggatcatgtatcttctcttaacattatatcttgccaattcatgcttgtaatatgcacttcagtaggtaacttctgtcaataccactttctaaggatcggagattgatctacctataacacatttcccccttatttatcatcctcccgtttctatttcaatgactgcatataatccttttctgtctctactctttattgtcctttcttatctattgatattgtgaatactcagttactgtacatcgtcttctttgttgataaaaacatatgtgcaatcaattctttatgtagaacatctcttaagtaattgctttcctacagatttttcatcactagctcaatatgattttacccgaggaacattttgctttaattggtttgatctatcgtggttgctggtaatttgatatgagcaggaggcaactaatcaacaatgttcaggatgcagggccacac

SEQ ID NO: 141790 - DNA, 997 bp, Zea Mays
ctgaagcacctcagagccgaagacagcgtcgaggggcgacgcgggaagactggtcatggcagcgccgaatggtgggcgcgcactgaggcggaagcgaagtggaaaaaaagaaggatcggtcggtagacctaggcctctgataccatgtaagtaagcaggattgaggaagaatgattgttgtatagaatgagggacagactgtgtacatatataggagaggaggaagagaggtaaaaggaaagccctatgtctaggaagctaataatacacaggatcaatcagatgcggactcctctccctaattccctctatctataattacagtggccggccggcacaggattgccaggctcaggcccttccatatgtagcagattctctaacagcaacatatctagtgtaaaaacgattagggtctaacatgctaacattaaaacttgtccataagatccaccatctatggccaagtgcaatcccacgtcttctcaaactattttctaaagaatccctatgttttcacacaattggacgtgttgtccccaggtggaattacactcagtcattaatggtggatctaatagacaagtgtcgttgtttcgagtaagcatcgccaagtaaatttgtgatacgctttaggcctggatggtatgcgaggcggacacaagagttatattagttcgggtcgaatatccctactccaatcttcggtggcttacgataccggcaccagatgtatttgttcctactaagttcatggatagtttcctatatctttgctttagacctccttagaagggaattcttgtatgtgggtccattttggaccatcttatttcttcttaatataatgatgcgcatctttcctgtgcgttagagaaagaaaaggggttacaagcagacgagaaagtgaagagctcacaagtctaatctaagtgttcgacggtccgcgatggcgcagggtcgtcttcctcctcctcgctggaatctagatctcgcc

SEQ ID NO: 141791 - DNA, 952 bp, Zea Mays
actgatggtagcaccattggtgtgatggctctaccatctgagtcagcgttcgagtggttgtggtttctagatttggctaagcactgattttgttcaaacatctgatttgccttcaggactggatgtgggctgcttctccagataagcttgttattcaagtgtagcaccaccggttaatactttggtctgaaatttgagctaaagaggcattgcgtgtttaaaattttagctaaatatgcattgttgtctaaaactgggctaaatatgcattgacgtcttagataacctatcgctgatgtctaagatgcatgcttttattttaataaacacttgattgggtaatttgagctaaatatgcatttatagtttaagctaattaggttgtacaccaccaacacaaatgattacacgcaaacagacctcaatgagattttttgcgagagcttagattttctgttagaaaattatgcaaactgtaacatgttttcctttccttcgtcttgttcttgtgctgaaacttgccgccttggatcacccatcactaatccatattgtggatgttttttattaagtgtgcacaaattaacatcatgaatctaccattggccaaattctatttatgcattgtcaacttctatacaacctttagactgcaaactgcattttcttgaacatccaacttctcatccttgttatatagggctagagaaacataaagcgaggctaatctctattccaaggttctctgaaagtggcgttgctgcaatgatatgttcttatatgattgagtacaagtatagcatagtgtgctggtgaaaaccattttgcttccaggggcttaaggccatgtttcaatattttgtcctgctggtttacttccaccacacaattgttgaatcacattgcttatgcatttgtggactattttgcatatatttatttctgcataaat

SEQ ID NO: 141792 - DNA, 392 bp, Zea Mays
ttccaattgttgcctcccttggatactatcgagtttctagcagaaaaattgtggatcttgttttctctaatacatggtatgaccacaccataaacacaactgatgtgatctcacaagatttacattccttcccggtacaactcaatacaatggtgcatgtagacatcaaaggggaagaggtgtgcctaacctcacttctattgttaggactaaacatagaggaagcgctaatggtagtggtctaactaacctaagcacttcataaaatacctacaccaatcactaagtgatttttaagcatttgggtgctctcaccctactcaaatggtcggttgagtggatatatatagcctccaacgctagaactagctagtgcaaaaagttgctacccg

SEQ ID NO: 141793 - DNA, 466 bp, Zea Mays
cgggagatgcccaaatccagactaaaaaaccaaccgactgttcgccaaggaactctagacatggagcacacaaatcagccaaagaaatccttgtaaatcccaaaaactctcatgtttcacggcgcaaaacaaatccaaacacgcagagaagcggaccagaacatgaacctctttctaccgaaccaaaaccagagcaatttgaacgaaaaatagcactaaattgagccaaaaacaggaccaaactcgtcgagccccactcagaatcatccaaatctgcatccaactctagaaagcacaacccgggtacagaaatcttaccagaaacaagggaggacaaccattccacgatttcacacctagaccgccacggcctcgaagcaccaccatccgcctcagtagccgcctcgggcgactgtgatgacgaaggagatcacctcggcgatgattgtgagctcgcgtaagaacc

SEQ ID NO: 141794 - DNA, 613 bp, Zea Mays
attttgaggctttttggcctaagttggagggatttcaggatactgtgcatgctgtttcggagtcagttgggaatgtgagttgtccatatcaaaccctatatcttaaactgcggaagacatccacgagtctgcgggcttggaacgataagcatgttggtcacatcagatcccagctggccttggcaaaggaagttttacataagatggaaatagcacatgatgaaagggtgttaactcctgctgagttttggctgaaaaacaagcttaagaaacactctttgctgctgtcctccctgaagcgtactatggctaggatgagatcaaggattttatggcttaaagatggtgatgctaacactaagtttttccactagcatgccaggcaccgaaagagaaagaatttcattgcttctttggttgatggggatgtcattcttaccagtcatgaggacaaggcagcagtggatgactatggacttggaggcactttggccttgctcatcatgacctagcacagcttgaggccccctgttcagaagatgaagtttgggagaccattaagcttttatcttccgataaagctctaggcccaaatggcttcactggatgcttc

SEQ ID NO: 141795 - DNA, 882 bp, Zea Mays
gagaggccggcattcttataaagctccataatttgaggagacttctcaaactctagctttgttgcggccactgccgaactgagggagctgaaatctctaggttcgcgtcgagacacctctagcgaccaatgttgttgcatgccatgtatacacatactaacagcttcttgagggtgcatttctcttgcaaggcgaacatagctattgtagaagcgaagtatgtagtcgtcaattttctcatctcgcttttgcttgacttgaagtagctcgacgatggagaagtccttcttcatggacacaaagtgggatttaaacaattctttcatggttttccagtcaggtatggagccaaccggcaagcgactgtaccaatgaaaggctggcctggtcaatgaaccagagaactgtcgtaatagaagagatggagtgcgggatgtgtctccacacatggcttcaaagtacgccaaatgctctcttgcatcaccagtgccatcaaatagacgaaactttggtgggtgccaccctgatgggaagggcactaaatcatgccatgcttcatatggcttttcaagctcactttcagaaacttgagggctttgctcaattgatatttgcttcatcttcttatcaaccaagtcattaatgatatcatgataatccttcaatgtgtgtaatggtggtggtgcttgttgcttttggaacatgaatcgttcatgaccttttcctgcttcatgccaattttcatccccttcttgatcttccatttgcgggtcaataactttattggacacatcacccgtgacattcttgaaaagctcaactagctgacctacttgtgccatcagagcatcaatttgtttttgctgagtgaacaacatctgc

SEQ ID NO: 141796 - DNA, 387 bp, Zea Mays
gattgttgtaagaccaattgtaatctttagttttgttggatgtcatgaattagccaccaaataccgtttgtcgactcatggttgaagcgatttaagttatcctgttttattcgcttttaacgctgtaacttgaactatgttctctgctgaaaatctaatacatggcccttggatccagcaaccgatcgttctgatacatggtctttggggtatcattttgttgtttagtggttaaattctgtcttcacagaggaatacatgttcacctgctttgttttttttggggtaccttcgtcagcttgtattgtgtcccgtcatgcttgtattgctcctagaactcttgaatccttgtttgtttttggcaaatggtagagttgcagtcaatgg

SEQ ID NO: 141797 - DNA, 486 bp, Zea Mays
gtggtagtggatttcgaggtcataatccttgatcaattcaagccatcttctttgacggaggttgaggtccggctgagtgaagatgtacttcagactcttgtgattagtgaagatgtggcatttgttcccaatcaggtaatgcctccatattttcagggcgtgaactatggctgtcaactccaagtcgtgggtagggtagttctgctcgtgtggcttgagtaagcgggatgcataagcaataactttctcattttgcatcaagacacaccctaagccttgccttgaagcatcacagaagatgacgaaatcctggtgtatatctggtagtgtcaggacgggcgcggttgtaagcttttccttgatgatctggaaactttcctcacacttcggagtccacacaaacttattgtcctttttgagaagtttggtcataggtttcgctatgctggagaatcctttgataaagcggcggtaataccccgccat

SEQ ID NO: 141798 - DNA, 371 bp, Zea Mays
ccgaagctgagaaggcatctacgacagactcagtaatctctgtcttcgaactccctgcactaggcagtaaagcagccctctccaaaaaaatacgacttcggtcggtgggttacaactttcactttctttggtttgggtgcggtagagggggttgttgatgcaattttccttttcgcctcttgttttcgagtcggaaagcagtaatcaggatagacaaaactgatgacatcaaatactctattcaaccttttctttcaacgggcgccaaaggcgacattcatatcttcatcttcagctttcgtataagctcccaacaaatcatcactagtcgcctcaatgacctcaagccattcatcatctggctccccgaa

SEQ ID NO: 141799 - DNA, 279 bp, Zea Mays
gatatgtttggattctagaacaatgttgttgactattcgagcttcgaactcttctcttgcatcacgctgctgctggtcttgatattgcccctgaggctgctgattgtaagatgaagttggaactggtgcaggtggttgaggtaaggcccacctagctggagagtgatttgctgaagcaaccggagctgtagactgtggaagtggttgttggttacgcacgtactctgggatgtatggagagtaatacgaagcagtgtgaagaacttgtttcggctgatt

SEQ ID NO: 141800 - DNA, 553 bp, Zea Mays
ctgcactatcggcccatgtagaattacataagtccgaagtactaagattagaaaaaaacttgatgaagtgagcgaaaattttgaatgtgataaagcaaagcgtgagatagctgaagtcgaacatgatagagttcgaaggaatttagaagagcttcgggaatccaaggaacaatgcttttctgttgccgctctttgctgtggaaaactgaagaaaatgttttctaacatcggagctttctcgaacgatgaaaagtttgtacgtggtgatgccgaaggggctgtcaagtggattgaaggtgaagtcgaagctttcgacgaagtccttacgggtcgaggagacttttgtgcctgcgtatgggcccgagaggcaatatcattggctgactgcgatcactcaaaggttgtaattcaaccagactttgcattttcagctgatgatgtaaaggagccctctgccgaagccattgccctgggaggaaaattttactccgaaatttggcttaatggtggaagagagatagctgacaaagctatcaagcaaagtgaagaagag

SEQ ID NO: 141801 - DNA, 379 bp, Zea Mays
caatgccccgcgtgcgaaaccaggaatcccagcaacttctcttcagagacaccaaagacgcacttttccgggttcagcctcatgcatgttgcccgcagcttgtcaaagaccagggtcaagtcttccactagggtcgaccctctcttagtcttgaccacgatgtcatcaacgtatacctctaccctgtccctaattaggtcaccaaaggtcttactcatcacccgtacaaatgtcggcaaggcatttttcagaccgttaggcattacaacataacagtaaagcccatccacagttacaaaagatgtatgcttcctatcttgcttagacatctggatctgatggaaaccagagtaagcatctaggaaggacaggaggtcgc

SEQ ID NO: 141802 - DNA, 494 bp, Zea Mays
tcgacccccaaattcagcctgcccttcatctatcattgttggcaatgggtccactctaccagtcacctcagaaggcgactcggttcttcccagcccattgaatcttaataatattttgctcacacccgacatcgttgataatcttctttctgttcgccatttcaccactgataatcgttgttccatggaatttgacccgtttggtgtttctgtgaaggatctgtattctaggaacgtggtcgttaggtgcaatagcttcggatccctctacaccttgtgcctacctgctgctcgtcctcttgccacactgtgtgtcttggttgcagttgccctactacttggtactgtcacctcggtcatcctggagttgacgtcttgtccaaactcactatttctctcgccatcccacgcggtaatgtcgcgaataatgtccaatgtcacgtctgtcagctagggcgccatgtttgtctaccttttttcgagtcttgtactgc

SEQ ID NO: 141803 - DNA, 332 bp, Zea Mays
atccaaatgtgatttctggctgaaggaaataaaatttttgggtcacaccatttctcaggatggggtatcagttgaccctgagaaagtgcaataagtgatggattggaagcctcctaccactgtacggcaaattcggagttttctgggattggcagggtattatgggcgatttattccggatttctccaggattgcaaagccaatgactgaattgttgaagaaaggagaaaagtatgaatggagtcagaaatgtgaagacacctttcatacattgaggcagcatctaacaacagcacccgttctagcacaacctgacaataccaaaccctttg

SEQ ID NO: 141804 - DNA, 445 bp, Zea Mays
agtttcttcaacgatttcctcattagtgtttgggtccacgttgaagtagatgacaatatgtatagttctggttacgagttggtccacaggccttggggtctcattcaaagcgacatctagtgacccaaagaatgttacatctgaccgttgttgttctagacaagttttcttatatttgaccaactttatataaaaacatatcaatatgtgcgtgtgtcatagatttactgtaaaagtatatccctaattaatataatatatcctcagttatgaccaacttgagcagcctccctatcacgctctctatccctttttctgcagcccgatgaactgttcatagctccagcaggccccctatcctgaagtgcaaaatagaagccacccctagcactcaatatgcctatgagtactctctctcatctccgcacctcaaccttcacttccg

SEQ ID NO: 141805 - DNA, 490 bp, Zea Mays
tcaaatgaagaaagggacgaaaatcactgattcatgggtatcctacataggcacggtattcccttgcgaaacccgccaggaacacagttcctttgatggaagaatgccaaactcaactagatgaagcaagtcagattcagaaacaataaaagtgtaattatcgcagaagggaagctggttgttgggaatgatagggggatgatgggcgcagcgcccttgcttcttcttcctgggagccatgagacctcacgaagatgtagaattgagagcagactcaccgaggtgagagaattttagagaggaaagttatggtgaaagaatagagctagggttttgcttgctggaaaccgtcaaacagcaggtgtgatatacgtatccactgcagtccttccacaagcgttagcgcgagggaaatggattttcaaattgaagggagtaagcacaaggtcagatgagttaagtcaaacgggttcaaccggacgatctaagt

SEQ ID NO: 141806 - DNA, 336 bp, Zea Mays
tggaatgtcgcacacggtggttctggtccgagaagagagctcgtggggccgatcgttgggcaagggagaatgacacgcagagatttgaacagccaaaatcgattatcatccacaagtaggattttaagcaatggatctgcacataaaagggaaccagggaggaaggtggggcatgatgcagcaatcagtaacagagatgacataaatgcagttgcagttgcttctagatcatctacaaagcccgtgaccagagcttcgttgtcgcgaagcaatctatcaaagggtggatccccaagtaggctagcacatgagacaactcgcacacgagtcccggct

SEQ ID NO: 141807 - DNA, 951 bp, Zea Mays
ggaaaatggaggtatccttgcattaagtgagtagagagttgctagccctgcattagttattcattattcttcttcgacaagaagtagagaggaagtggtattttctaaaaaagggaaattttttgtgaaaatcagagtaaagtgtttgattaacaccatcaccaccatgagctggatggtcgggactccctggtcgtgggagggctcaaagagaagttagcttagccggattaggcatgagcgtggtggactgtcccatctcgcttaaggaccagtttatcatttatttcttgcctaaactctcaaaagtacaaccactcgaggttgtatggacaactgctcagtttgagtctacatgggccgaatccgagggttattgacgactggggagcactaggaggaaaaggaaggggaacattagcgtcttggtttgggaaagatggtggacttgttcctctcgatattaccgccaaggtaaagccgtataggggaggatagaatttcggtactcagatcgcacgatggtgggattgtagaaattgaactagtaggtaaagtgcacaccactgcaaaaagtcaaaaatctattcaaatagtctgtgtccattagaatggatgagtatggtatggttaccacaaatagaatatttaggtgttcattcaaaaaagggagtgcgtgtatgtgtcatcccaattaaaggagtttatgtaccacgggggtgaggtgcccagtggtgtttcataaaaaggtactcttttctagtgatacttcagggtttaagccactttttccaaaattaaacaaaggagggatttgagcaccaactcccactaaagtgcatgtgaattatataggtctctcaccttaagggtaaaagtcgatttgcggagtacatttgtactcactcattgcttcatgaattttttcagtggcagaagactcgatgttcg

SEQ ID NO: 141808 - DNA, 343 bp, Zea Mays
gcacaacccggacagagtcacggggtaagctggaaccgaagtgggaaggaccatttatcgtcaagatgaagtcgtctcccagcgcgtatagattaacaacacaatctggcgaagacctggaacattcctggaacataaacaatcttcgcaaaatttttgtttgaatcctcagggccatcacgcccttgtaattcacttaacattattattccggcccgcactcttttcctcccagggggtgaggtttttaatgaggcggcgccatgtaatatacaagcaaaaatcccccacaaaaaactaagccaatgtcgaaaaagaccgcatcgacggtcttcgtcattcg

SEQ ID NO: 141809 - DNA, 324 bp, Zea Mays
ttttctgcaagactaaaaacatgctcaacaattttgaactagcaaaaataaaagttccagtcttcgtcaatagcttcattgacaattttgatggtctcgagtgcctcttttaggaacgggtcagcttctggattgtatggctccggaggcggagatagttcagctgcaccaaagtatatgtttgttagttccgaagctaaaacatattacaaagctaaaatataacagatgtacctataagcctagcccgctcggcagcctcttcagcccttctcgccgcttctgaagcatcatgtgactccttttcgttctttttaatggctt

SEQ ID NO: 141810 - DNA, 481 bp, Zea Mays
tggcattccattgtaggatccaatcagcagtcagaattaacaaaacaaagtagactgtaatgacttttattcttcctggctttagatatagaaagacaacggttggtgattctcttttgctgtgaaggttccaacaacttgataaaggagccaaggtggtagtggtcttattcaagctggtggccttgctgcagaactggacggtgatggtatcacagaaggataaagaaagagtggcagagcttatcaggaacatggtaaacaacattgaacaaaattagagtgttgttttctctattgtggttgaattttggctaggtagcaggagcctggtgttgttttgcatgaactgctgaaggtaaatgcagctgtggttgtatatttgtcgcatttttttgctggtaggtttttagatgagtttgcatagtggttgtttagattctggtgagtattaagttagtttgtgttttttaggtgttag

SEQ ID NO: 141811 - DNA, 430 bp, Zea Mays
ggggcttacaaatgggcccggatggtgatggggtggagcctaggtcccactgtgatctggcgtggccttcgcctgcatgttgcacccttgactccgcgaagtcgtgtccttgacttcgtcgggacttggacttcgctatcgtggaaagagtttgagcattcaggacgcgggtgtggggatgtggtgagccccccttgactagtgtgacccttcgctttgtcccgtccgaaggccgcgatcgaagacctcaatgctggtacgagtcaaagtacacttcgcaacttgtacgtacgccaaaacctatttgattgtagcccgattagcctaatcgaggatgcgctcggccttcgctccaacactagccccatgagggactagttgaactagtgagatggtcctaaagtctttttcgaaagatggtcgaacgctg

SEQ ID NO: 141812 - DNA, 831 bp, Zea Mays
gtctgtaccaggcacttgagcagtcttctctaaagagtgcagcttcgacctacgagtcaaaactttagctctttttagctttgacgaggtggaagaggtcgtagttgcgattttcctatttgctccttgtttccgagcgagaaagctgtaatcaggataaataaatccaatcacatcaaaaactatgttcagtctccttttgcctcgagcaccgaaagcagtgttcatggcttcgtcctctgccttcgtataagcccccaaaagctcatcactggtcgcctcaatggcttcaagccagtcatcatttggctcgtcaaactgacttctataatgataggtgtatttcaagtaaaccaggccacctttgttggagccagcagcggtctccttcaacatttctcaatcattaacaagaggccataccttaaaagcaatgtgctcctgaaccaaatctctagtgccaatgtaggtgcatactgtgttgaaagccatcaaactttcttgtgtttcatttccacccgcgatcgaaggcctcctgataccgaagcgtgatcgtatggggcgttggattatgcccttcacatgctctctcccactcagatcatttttgacataaaaccaatgcttcatccatgagcccgaccattttttcaaaatgttggcacatgacacttcacatcagatcgatacacgaagctataacattcaaagttgttatgatattgctctttcccaaccgccttcgtctagtaggacaattcgtgaatattgcagaagcagttggcgtctggctctagcccttagctcctcatagcccaaatgaaaactcca

SEQ ID NO: 141813 - DNA, 481 bp, Zea Mays
gaatgatccgcaatccagagaggggaaagttaccgtcgaggagggccgaggggatcactggtgcggcgttggtcgactccgcggcaatggcagcgacaaattcgtgggctctccgttgccaattccgcccgacgagcttggggttaccgacagagagtggatccgaagcaccctggaccgaaaggatggctcgacggcggctatcgcgaggtaatgccaggacgcagggtcggcggcaacggtggctaagcgcacggcaagaactccctgggcttgcgcgagaaacgcagtggcggtacttatctctgggtgccagacccaactcttgtgcggctagcgcaacaacccacgcaccgaacggcgaggtcaaccacggcgcgcgattcttacgggaagagaaacagggcgagtccgcgcgagtctgttgcgacggagatgggagccctgacgaaatggccccacgcggcagtgaagagatgag

SEQ ID NO: 141814 - DNA, 759 bp, Zea Mays
taggtggtccaaagactgcttgtcagtgctaggatgcagcttccctttctcacagccttttggaactggcaattttaggtgtgtatatagaatgtctgcgatatcagcagtagcatttagagagaaattcttgcctgccaatctgtaagcttctttctctagttccttcagcttttttgttataatatgcctcgcacggagacaagcatccatgtcagcgccaattccccaaagctccatatcagcaagaacattaacctgtcaaaataaatgcataagagatatccaagcataatacaagcagcaatattgtattccgatcacaagtgtaattttggataccaacatgggtactaataggatgattcgattgctacaaaatgtatgaaactataacaaagttgttatgttttgaactactttccaggaagaatctagttgcgttattttcagatattcaatctgaagcatcaaagtataaacaaattaactgcaggcaacccaaaatgacacttttgttataactggagagagtattaagtaagaataggtgttgtaccaatggggcctcgattgtttcaaccaaaacagaaagattttgagtaagtaatttcttcagaacagtatacaaagcccgtgtctgtgcagcacgtctacagcagccattgtgtgctgctttgtgcatctgatttctccatcttccatcgcgatttgcagcagcagcttcttgactatgaagtcgcctcttgacaaactgtt

SEQ ID NO: 141815 - DNA, 499 bp, Zea Mays
atggagtctgactatctctttgagataaattcgggcaagggtggctcctccaaaggtagttttcactgggatgaaatgggctaccttggtgaggcgatctatttttacctagatagagtcattccctttttgcgtccggggtagtccggttacaaaatccatgcctatttcttcccacttccattcaggcactgggaggggttgcaataggcctgcaggtttttggtgctcggcctttgtttgttggcaggtgtcacaccgggccacatactgtgctatctctttcttcatccctctccaccagtatctggttttgaggtctaggtacatcttggtagttcttgggtggatggagtaggctgagttgtgagcttccttgagcaggacttctcgtgcctctccttttggtacacacagacgattcttgaaccaaagggctccttgttcatctgtcctgaggtccgagagttgttccttgcgagctttttccacaagtctt

SEQ ID NO: 141816 - DNA, 706 bp, Zea Mays
gtggatcccgtgcagtgccgcccttcatggtcccgtggccaccagtgcgtagagggtggtgtggctggagcaaatgacggcgaggccagcagaccccttgcacgaaggagagtagtcgtggtagttgcccggtcaccgcagatgagggccagcgccggacggagcgttgcagaggggcgccatgtcttgcagcctcttgtacgcgaaggtgaacagccaccacgttgctcgaccgcgctggtgcaactacggctccctcgcaatggagcacccctatcatccgcttcacccgtcgacgcgctaggaaaccgcatgctgcagcctgcaggtggacggtcgtcgtcgtatgtcgcggagcaaccaccatctcctggacgtcgctcttggggtcaagggtagcaatgatggctgcccctgatgacgggggcgatgtcagcgacgagggcgcgacaaacgtggcagcaaaagtcgccactgctgcaagggaaccaaagcgctgctggcacatgatcttgaactgtggctacgtgacctgatgctcgtcgtgttccagccgccagaaccacgtatgtgcgtggccgatgaggtgatacgatgctaggtaggccttgtcggactccagggtgcgttggctccagaagaactgctcgcagccgttgaaccaccccagagggtcaccgcttccgtcgtagatggggaaggaggg

SEQ ID NO: 141817 - DNA, 734 bp, Zea Mays
tccgggtgtgacagaggtctctttcaaccctctcgagtgattctaaacatcaaactcgagtcatcttctcttgtatcaaatgatcaagagactcccgcaaggtactccacagagtcgaatcctcttgctagcctttacaatcttaatggttgccttgcaccaagacacaaaaacactagatactctcttttggctttatgacaagtgcacactttgatcactatgaattctactcaattggggcacttggatcacttgaggtgttgggaattcttctctcacttgtaggaatgaatgctcaagatttgtgttttgaatgagctagttggggtgtatttatagcccccaatcactcgaataaccattataccatctctgtcatctttgtgcactagcggacggtcaagtatgaaagttcaacaactataattgataatccaacggcaagaactgacagatcaacgactatttgaccttaatgacatcacgcggacagtccgcccctttgatatgaccatgcacagttcacttatctcagtgtctcggactgttcacgaattatagcatgacggtccgcgcatgacactaaaattcatttcttcaacttgccaccttctgttgatacaggattgaataacgaacggtccgcttcttggtgctggacggtccgcgcagaggctcaaaatgtacctgacatgacatgggtacgaacagtctgtaatacaaatgtccaa

SEQ ID NO: 141818 - DNA, 766 bp, Zea Mays
gctggactattgacaaggaaattgatcaagtgtcgacccctcctatctgtccaaccatcagacataagtgtgcaaccaaattcagtccaagccaactcatgagtctttttttatctcatctacactcttctttgccttctcaagcaatggcaccttaacatcatgatatgagggtttcacgtacccaggaccatattgcccaaccgcctcaagcatgatctcaaaggcccttgagttgatgacattaagtggtaagccgctctcataaataaaatcagcaacatacatatatgttatttccttctcctccttgctctttcgctgcaatgtagtttgagtgttgcccttacaatgcctctcgcgaaccacatcttcaggtgctttgcgaaacatggatgcaattgacttagaagacttcgacgcgtgttgattgttttggcttgcttcagctaagagccttctcttttgggttgttccggaactgagctgaacaactaaatgggatgctctactttccccttgtccaagtacttcaacttcatcatctttatcaccatctttatcatcatccaagtcaataggcttctgtctagcattcttcttcaaataatcactcatctctttgctaattgtcgatgttgtctttgggcacttagcaacatcaccatgaccaccaacaaggtgctgcctcaaccttctaacacctgcatgaacgattttgccacaaagtatgcacttcaccacatcttttttgttcaaatcaggc

SEQ ID NO: 141819 - DNA, 375 bp, Zea Mays
ataggtatccaactacttattatgtaggatctaagagatggataatgttaaggcaagaatagccaaggtaagaaagcttatggtaagaaagaactccgtgttgggtgataatgcatctgaagattgagtttgatttctctcctcccttgacgaggttgatcttttcttctccggtcttggtctcattgagtcagggtcagtgtttatcatcggagttaccggagtatggttaggatggatatgggtgagatagactagataagatctacttaatttattttagaatagatcatgcttgttacacttttatgagataagcaaattggtgggggtaagtatgctgattaggacaagatgagtctccaagagtaagat

SEQ ID NO: 141820 - DNA, 706 bp, Zea Mays
caattatgcaacaacgtatagagttctagtcgtcactttaaatgtttaggctatcatgttactcaccaaatagccattctgataggttaccgttgatgcacagctcatacacaagaaaacactcctcctgcccgtcacagtaacctcttaatgacacaaggttcgggtgcctgacatgtgacaggcttttaacttcccttaggaatgtttctgcatgctcattcttaacaatgtgcttcactgcaacaggccagccatttgtcagcactcctctgtataccttgcctggaaccacaagatgaaccagttgcacaccataaaggacaacatatacttgaacagttaggtttctaagtctcgtgttcttggatgaaaaatatactttctcttgatttatggtatagataccataactgtgaatcaggtattgtgaacacgtacctgcaataccctgtccaatgacgtttgatggactcaagttttcagttgctgtgtatatttctttgatcgacatcggcttgcaggtagtctcctcatactcaagggatgccaacgcgacctctgcaagaaaaaaaaacatgtgcaacttcgtattgctattagtgggtaaaaaaacatctatctcagtaacttctatatgcatatggatgtgcaattaattagtgaaattaccaatatcgtttcttgatggttgggacttgctggc

SEQ ID NO: 141821 - DNA, 274 bp, Zea Mays
acctcatacaatttgcttagatcttaaagaacaacatcaatctaaggtggcatctcatcctctatgtgttgagaacttgagatggcatgattagtatcgcgttgagaataagtcttgattagctgtgtctatcagacgagtttaaaagctctagtggtctctcactagagcgtacaaaagaaattgcatcctcaacaaaagagaaggcttatgtgcggttgttttggcgtttataatttggtctctgcttaaacttgatttctgcccactgtcc

SEQ ID NO: 141822 - DNA, 691 bp, Zea Mays
ttgggggcggatgccgaggtatccttggggccattcaccgagttggagtaggtgggtcctggtggcttcagctggggacagttgttcttgaaatgactgggatctccgcagtgccaacatgcattcgcggggggttggttacttgcaactgagggggcatggaaagagctctgactctgctgactgaaccgtgatggggcgggtccagctggtctactgaagtttggtcccttgggtgggaatccaaatgatcgagtcttctggtgccggtcttgctgctgagcccggaggacttggaactttcttttgagatgccctttttcttccttctttgccctttcaacttgcatggccttgttggaaaggtgagagaaactgaggaagtcttggctagccagaattgtcttgagttctggccttagtccctttaggaagcgggccatcttcttgacttcggtactgacgtcatctggcgcgtagcgggctaactccgtgaacttgtgcacatattcactgacagatcttccgtcttgagtcagttctcggaactcgtcttccttaagctgaacgagcccctggggcacatggtgctcccggaaagccgcttcaaactccgcccaggtagcatctctgatggtgacgttgaaggtatcccaccaggctaaggccatcccggaaagttgatggcggc

SEQ ID NO: 141823 - DNA, 699 bp, Zea Mays
tggcccagacttgcacgcgcgaaagggttcgccagatcgattctccaccccacatccctggatcaacggtctgcccatcatctaatcttaaccgcttgctacggaatcaacggccaatggcccgtctcccacctcccggttgcgacaaacagagggcaaccggagcatcgccgacgagcaatgtgccccggccacatagctcaatccccagtaccgatcaaacaatcgcgtagtgtacgacaatgcgaacgcgacagagtttttcttaccggaagtcgaggcgtggagatcaccggccacagcggtagcggcccagcgcgccaccacggactccggcgagcgattccgtctgagccagtggccccaaccgcccgccgacgccatgggagcatccacaaggtttaggcgagtctcgttgacccgacagagagcccgcgacgatggtgaaagcgctcgaccaacatggcggctcccgactctccccctccgacctcacctgtctgcgcggcaaggagcacacagcaatggcggcgcccagggttctcattcctaggacgagaggcgctggccgaatcttataggacgcgagatagtagctggggctggtgagaggcacacgcagattgcggcaaggttgttgcttccgcgcgggttccgcgccattggtgatcgcaaggttgaaggcacgacgaggcttca

SEQ ID NO: 141824 - DNA, 694 bp, Zea Mays
tgggggaaatccaaaattggagttctctggtgaatgatttgagacacgagtgggtgcgctgggtgcttgaatacctagcgaagctgagagcacgctcaatttataggattcgagggcggtggcttgtgaattggacgtagtgcgctggcggccggagaggcagaagaacactggtggctttaatcgtggcgttcaccggtgcaacggctcaacgattgcgatcctaagtgtgccacggttactaccgcacagtaacgagccacggcgtggcatacccgaggagaacggcgatagtcgcgtcaatggctgttcggccacgtcgccggcgcaggtgggcaaaagacagagcgaccacattgtcttgtgttcatccgcgacgagatctttttaccgtcgagcgtaatccactcgcccgaggcacgaatcgcgacggccggcgcgaatctaggcgcaaaggccaccggcggcgaggggggctgaaccaaagatctttgtttattgtaccatcagattcttattcagtcagcctgtcagagcaatttgcagggagatttgttcccaaattcatgtagtgactcgatcatctctctttatcaaagttgtagccctatgatccatctacaatcttgctatagcaaccatagtcaaacaattactggatcatggtcgaatccaatctcaaagcttgcccaac

SEQ ID NO: 141825 - DNA, 481 bp, Zea Mays
gctgaacttccgtttccgaaataccgatattgtttccatttccggagttaccgttttttattttgtttccgataaaaaatggaaacggtaacggttttagtattttccgactgttttcatccctagggaagacttttgtgcttataagttgggtttgtaaaaggcttatgatgatcagcccaaattagcagcatggcgaattttgtttcactgtaaggatgctgaagatcaagagactaaggcggctgctagcctggagggtgtctgtctggctgcacaatggccagagataccaataacccttgaggctgactgtcttgcagtcaaagtggtgcagaagctgaaggcaatatgccatgacagatcgatggtgatgcccctgatccaggaaatgttaccggaaggctgactcaactaactattaggtttagtgggttcgtgttttcttttcagacttccccgaatgtgttggtgcacttat

SEQ ID NO: 141826 - DNA, 328 bp, Zea Mays
catgaatgctttttcttagaaaatatcatcttctatgttattcacttaagttaatcatggagggtggatatttacttatgattcatttgtcttttgtcattttgactttatcatgtccatgttatctacgtgttatctttttcaaacagattgtaagcagaaggtggcattatggatttgtggatctctaggccttctcataccattgcttgggtttttgtttggggagtgggttattcaagtagatgtgatcatgatacttgttacttggaattagctttacctatgttcttatgcgtatgtaagtaaacatttgatgaaatgcctt

SEQ ID NO: 141827 - DNA, 440 bp, Zea Mays
gaagttggcagggcaatccctcagatgaggaaaggcatgaagacgacagctttgtgagtgtcctctgtcggaacggtgaccccgcaccagatttgccaggaacacggctccttcggtggcagaatgccggtttcgacgaggtgcaagagatcagacttggagacgacatacatgtggttaccggcaaatagaagctggctattgggatcgatgggcagaatgattgcaatagcagtactttgtctcttcctcttgggggccatcgcagtctcccaagtgaagtgggcgggctcatgaactcagaaaacagagaagcgtggaggaaaaaacaagagttagggttaggagctcaaggggatacgttagcataaatatgagttggctcgataagtcgggcgcaaaaaatgtcaggtcataactcggaaaagtggagatcacaa

SEQ ID NO: 141828 - DNA, 356 bp, Zea Mays
atttctactactagacgcgcaacacagtggaaggacacattgatgtagtggaagtcatcgaatgtccttgcgtaccaacaacaacacatttgcccatcctcctcaagtttgttattgatcaacaccacagtaacaacagtgtcaccgtggtatatccatacgtgtgaagatgaaatatcgtaatgtcggtgcgctaaaaacatgcatattgagagaagcggtgtcgacgtatcgagcgtctgcaaccattggaagagacagcgatagctaatatgattctctcaagcatgccagacctttggtacatatagacccttactaatgtgtttttaccataaagactcattagtgttatc

SEQ ID NO: 141829 - DNA, 917 bp, Zea Mays
gggccagcaggtaaattatcctagactcagccgacagtgacactagactgcgggttcatttctgtaaagctcagggtttctttcgcaaagtcatcggccgaaggggtacgttaggatctgggccgctcgatctcactcctaaggcctagattagatctacatttattaaaccggtacgcgataagggctttcggatctagatctaacggccgcgatttaatgaaacgtgatccgcccgactaccacatgatcacagatccatggtggaaatctatccaggtgaaacgttataccccgatccgatcagaaccacacatcgcgaaatcgggacccagggttcatcttcttccctacgttcggcgcacagcagtcaaggcctccaccgcggcggcgatttcgccagtgaacagcgcgcccatgcccacgagaaccattcccaaatttgacggcagcgacacaatgcaaagattatggtgagctcatggatgagtggcataccggtggttaacccactgtaaggtccgcccacgcgtgcagtcgagcccgaggcggatcgtgatcctggcgagtaaccgcgagcgctcaaattaggttgggctgcggcaaattcggggttgtgctgctccacacccggcttcggcaacgacgaagggcgccagcacggagtaagaccgttcactgtcgaggcggtggaggtggcaatccgatggcggaatcccgggcgccgctgcaatcgccagttgattatgagctcgctggtgaggttgtagacaaatacgagcgcgaagggggaagaaaaagtacacggcttcatttgtacccagcccgggatggcggccaggtcaacccacggccgcgaatttcgcggcgaagcaaccgcgccagccggattctgcggcggaagggaggaacagaag

SEQ ID NO: 141830 - DNA, 1716 bp, Zea Mays
ctgatatttggtagtgtcaagggcctgggcgtttagagcagggggccctcggctacgaaggtcgtagccgcggttcgtcgtcttctccggcgtggttatcccccacagccgtaggcttagatggtagagaggtggagaggagataacttgtttgctgccctttcctgtctccctgtgccgcatatatagccatcggcctgctgtcctggagcctttattttaggcaagcctaaacatggtaacactaatcaatcactaatcaatctctcctttccttccctcaactttccattcttctaatttccttcctagccactactttccataggttcctgctgatctcccagatctgcgccccccccagatcgtgctcctggcgatctgcgcgctcctgtgcgcggcgcctgtcacgggcgcgatgctgcctggcgtacgagcgccttacatgacatctctcccctcgtcgaagaccagctcgtcctcgagctggaaggctgggaatcgggcgcggaagtcatcgaactcctcccaggtggctgatgaagctggtccgccgctccagtgaacgaggacttgccgcacgccacgcgacaagcgagcccccgctatttttgcaggctcaggcactaccgcatcattgagcagaggcggtagaggcggcggtgtggtgggtggtgagcccacgtacttccggagcacgccgacatgaaacacgtcgtgcaggcgcgcgccgggtggcaattctagccgaacagccacgtcattgatgagctcggtgacgcggtagggtcccacgtagcgaggcttgagcttcccagtgatggttcgcggtagggacgccgccacacattggcgaaggcgaaggaatgcccagtccccaacctcatatgtgacctcccggtggtgcttatcgtactgcagcttttggaccgcctgagcctgctcgagacggaagcggacgtcagccagaaaagcttcccgcgcttccatttcttgtgccaccgccgccacccttgtgtcgccgggctcgtaggagcggatggagggcggatcacgaccgtagaccacccggaacggggtgtcgcgtagggatgactggtaggccgtgttgtagacgtactccgcccagggaagccagcgaagccactggcgaggacgatcccccgtgaggcagtgtaggtacatgacgatgacacggttggccgcctccgtctggccatccgtctgcaggtggaacgccgatgacatgaggagcttggtgcccatgaggcgcatcagctcgctccagaacaacgaggtaaacagcgggtcgcggtcggagacgatggactgcggtatcccgtggaggcggacgatgtcggtgaagaaagcctgtgccacagactccgccgtgtacgggtgcgctaggggatgaaatggcagtatttgctgaagcgggcgacgacggagaggatgaccgtttttccgtgcacccggggtagcgcttcgacgaagtccatcgcaatgtccgcccagaccgtcgagggcaccggcagcggctgcagcaagccagctggatgtagatgttccgacttgaaccgctggcacgtcgtacacgcccgtactaagtcctgcaccaggcatctcatgttggggaagtggaagtcccggcgcaggcggtgaagggtgcggtggacgccctcatgcccatcgtcatgcacggcggccacgatctcc

SEQ ID NO: 141831 - DNA, 453 bp, Zea Mays
cgttctctggggttgcgtgggcgctgtcccgatcatgccgcacttgtagggcacctcgggggagagcgaattcctgtggggtggctcctaattgctcaccgacgtaccgcgaccaccgtaatccgcatcttccggtggctgagctcctactccatcttcttacggtggtaagcacctctgttaagttcccctcagtcccctctatgcaaagcttcatttggacttgagaatcagtcaccacatctcgttttcgcgcaaccccggtgatggcgccgccgtggtagctgcttgcgccggccgttgttgtgtcgggagggatgaagtgggcgcgaccgtgggatgctcgttcaatgatcgggattgggtcctggagttgtgaggattgatgcatccgggaccgtccgatcgaggttaagcggataagattaaatctccatctagtgttccaacgtt

SEQ ID NO: 141832 - DNA, 474 bp, Zea Mays
cagaggctctggcacaaaatgtactaagactcaggctaaccctgagtggaccgcgggttgttactatgtaaacagaggggtttatatgcaacttgcgcgactgaaggggtatcgaggatttctgaccgtccgattggaaacaaggcactcagattagatcgaaccaggtcaagtctctcgcttctcccactactgttggatccggaatccacgtctaggatctgaccacgccagagttcggttgcagccgtcggatgaaatacacattttatggattaacacgatcgttaccaagaccggtactgagcaggaaccgtacgatccaatatcaacgatcaagattttaaatactatgatctacttgggtgtgcacgatctggatccgacggtcgcgatccagggctcgaaccggtattccacaatctgatctaaggcattaatccgtgatcggacggttcccgatcgatgtccagc

SEQ ID NO: 141833 - DNA, 619 bp, Zea Mays
gtctgctggtacctggccgactgaattactgtgttcaatcgttcttcctccagcacatcaatgtcttccagcctggttgcttctgcctcagctatgttttcgaaagtcaacctcggcaccccgaagattagatcagcaggcagtactgcttttgacccataaaccatgaagaacagggtatttacatgcaaagctcgactgggttgagttcgcaggctccagaccacgtatggcagctctctaatccattttcctgcaagcttttcactcttgtcgaataccttctttctgagtgcttctagtatcattctgttggctctttccacctggccattggctcttgggtgcgccactgatgcgtacttgatctgaatacttctttgttcgcagaaatcaaagaattcagagctagtgaagttggatcccaggacagtgatgatgctattcggtatcccaaacctgaatattatgtccaggataaactccactgctttggctaaggtcaaggaggcaattggcttgtactctatctattttgtgaatttgtcaatggcaaccagtatatgagtatagcctccctgagttttcttgaaaggtccaatcatgtccagcccccagc

SEQ ID NO: 141834 - DNA, 279 bp, Zea Mays
ctttcgagatatgtctattgtgagagtcagtggagacaacaacgtccctgcccctaaggaagacgaagttgtgatttaccgaagtttcttcaaggctgggctttggtttccattgagcaggtttgtagttgaagtgttaaaaaccttccaaattttccttcatcaactgacccccgaagctatattgaggatgggagtcttcgtctgggcgtcaagaagccaaggtatagacccaagcacaaaatgcttctgcagtatgcatgaacttatgtatgaaac

SEQ ID NO: 141835 - DNA, 567 bp, Zea Mays
gcacatccatagtttggcaatactttaccaaaaaagagaagatagttgagatagatgggaagaaatacaaccagatgtggggacattgcaacttcccaaattgcaaggcaatgtatagagctgagagctatcaaggaacatctgggtttataaaccatttgaggacagcacatagtattgtgaaaggacagcaacagctcaaggcagacaaagaccatggcacaaatctcacacttgtccaaacctacaagtatgatcaggaagatagcttgaaaaaattttacttggctattataatgcatgagtaccctttccaaatggctgagcataactacttttgtggatttcattaaatcgttaaggcctagctttccattgaagtctcgtgtgactgttaggaatgatatcatggatttgtatttggaagagaaaaagaaattgtatgcacatctgaaaacagttgaatgcaggtttagtacaaccatggatatgtggacctcccgccaaaacatctctttccgactttcccgatcaattccgagctattttaccatttcccgatcaatt

SEQ ID NO: 141836 - DNA, 395 bp, Zea Mays
gccattttaggcaggtcaaagggaagactgtttacattgagcagcaggaggacaagaagaagcgacgtatggacagagccgctcgtgcagcactagcagcggcagcagcggcagagcaggctgagcggggaggccagctctagatttcctcttattagatagcctatcgagttcgttgccttgcatctcagcctcggcccactactccctccacaccttccgctactatctctactccacctcccacttcaccagctcttgtcactccagagccatccactacttccactgtacccagcacctccaccactccagattccactgctcccctcccgctcccatttccgctccgcccattacaccacctcgctttagggagcgtgacaagactgagg

SEQ ID NO: 141837 - DNA, 1039 bp, Zea Mays
atcttcactggaaatcatctacagatctttacttttcatcgcttggttccctattagttcatctatttcattcttgtgcatccttttataatttaaaactaacatacactgggagtaaacttattaatgcatttttatttgttttgtccattaatcaccaaaaccctcaagaagttaattgcacttacaatctcccccttttgctacctagcttacccttgggcgtcgtggaagtgtgctacttggctctggcatccttagtcctctgtgtgctctagtgtggtcttctgtcgtctctgtttgagtcgtccgcgcgtctctatgtgtgagccgtatgtgatctctctgtgtgtttgttctcggtgaccctccccttttataggccaaggtggggatcagttaccggtagcttctcaaggaaggaggcaaggagctaatgcaccatggtaaaatgagacattctacctcgataatgtcaagcttgtcggcatgtgcctcggtcatctgagctactctggtcgtgctctttaagactggctgcgcgtgggcaacaaagagcttcggtgccatcgttactggcactgggccatgtcgacccctagcctccatagcctgggtctcagcgtggctcatcatgttgtgggtcttgtagacgaccagtgcactcaggcctaggcttgataggttatgagtgggtcacaggtctaggggcccatatgtcatgagtggaaggaggacctacccttttgctgcggctcagtgccagacgcagttaacgcagtcggtcacttatgctgggttagtcctaggtcaagcgcgaaacccactcgagtggtttcttctcggttcatccggcctcttatggctccgccttgcctgatctcggactcagtgccttaggactattagggggtgttcttccggacgtagttttcccttgtcctccagctgacttatggggcctgaggatctttcccctgacactactatcttttttataatacacgaatctattctaaaaactatttatttatgggca

SEQ ID NO: 141838 - DNA, 559 bp, Zea Mays
cgcgtggcctagagtccttatgttaggctccgcccgctggcttacgtcatgggcaacaagccacgtggcagcatcaggtctccgcctgagcggggagcgcaagcgtacatgataaagcccaaacatgtgttagcattggacccttgcttacgccagggtatcccctgtcttgggaccttgtcatggcccggaccttactcggagggatctggaccccatccgagggacccggcatgcttacttgggagttccgggccgtaatcgggggttcgggttgtgtgtacaggggtccggtgtttccttgcggaggtctggctcaactgacgcatcctgggatgtatcatcctttctcgccacgcagtgccccttgagccgcccacgtggtggggtcgggtgttgttcaccgtgcggctagagaacgtcgtacgggcaccgtgtcttcatactgtagtaaggggtacccctgattcagggtactgacagtggccccagggcctacctcaggggaggatacgagcctgtaggtggggccaaagtttgactggcgattggctcgctg

SEQ ID NO: 141839 - DNA, 513 bp, Zea Mays
tttcattcctacccataaattcagccacagactcagctccagcacttttagagccattaccacctatcaggtaagattaaaccactgagaactgagtacttaaacaacagccaattaagctatgagacagcgtaaggtaactacaaagagtgtaccctttgctgcagcattatttgttttcccgccacatgccaaaccaacttctctagttcgcctctttgattttaccatatctgcatcttcagcgccatgagccctatgatgaatccctaacagaggctctaaaaatgttgtccagatcctcatcactttgttaacttgatctgaagaattgcatagttctccgcaagagtatttgatgatctgataaagatcttcatgaatgtccatatccaaatacacaaatgacatgttggcaactagtggccacctattcccagcagcaatagcaagtaacacatcatcccccttcctattcttctcactgatttctttaatctgagataatagagc

SEQ ID NO: 141840 - DNA, 294 bp, Zea Mays
gatggctatgcccttagcaagcataccatgtgctcttgtagccaccagcagcagcatgagaagagcagcaaaggccacgacaggagccctcatcttcatcgacctcctcctgtgctgtgctgtgttgatcgaaatcaattgaagaaccaagtgctggtggtttatttgtcctgctcagtggccaagtgacctcagtcgcctgtatttatatacacacactgacacacaccggcagtagtggtggccttgcccactgcagtgatggagcactgacatgtcaaactctccccaatt

SEQ ID NO: 141841 - DNA, 671 bp, Zea Mays
gggagatcaagcaaagtgttgatttatgtagttgatcaagtggcttgatgatgaacgataggaacatcatgctatatgcaatgattaacagtgacttgatttgatacactatgggtgatcattgttcatcatttcatgaagataaaggttgatcctagtgtggcatcactaatggaggagataaaatagaatgtgcaggggggtactagggttttctgaccgttggatccaaaatcgagggcccagattagattagtctttaagtgaaccggtacatgatatggaccgctagatcttaatccaagggtcgggatctaaagtatctcgcgctcacgctcacccgttcatctgccgatctacggtcatgaagagccctggccgaaggggtatgcagatctgatcaacgctaagcatcgatggatcgacgatcagggttgtttgcccctcaccaggacatgcccacggcggcgcacaagcgcctgcagcggcgctcaccggcaagctagttcgcaagcaccccggtggtctaatcataaatagaaaacatgcagaatgaagtctacggtctaacagacttgggtgtggccatcttactgcaaccgaggtaacgaggagtcctggcgacgttgtactgcagcgccacagtggagaactctctccgacgagcaatc

SEQ ID NO: 141842 - DNA, 481 bp, Zea Mays
tgcccacggcgatcgcatgggcaacagaagaacacggacgttcacgacaatccagggtgatctaattcaatcaaaggggtcgaggagcttgaggaggacctaaggacgctagaacaaatgatcaaggcactggaactgacctggagcaagctgtccacggcgagggtgaccatgtggggtttttgagcagattggtggaagtccaaaattggagctcactggtgatcgtttgagggcaatacttggtggatgggtgcgtgatgatcctatggagctcatggtggcctcaatttatagtaaccaagagcggtggccgggaatttgagcgatgacacgcggcggccggaaggacaaggagttactggcgcgcgattagtgtccagttaccgtggccatctccccggcgatggacagaggattacagcgggtcacagcgactaggtagaggtgccagggtacgtggcatcaagtcgtgaggtgg

SEQ ID NO: 141843 - DNA, 400 bp, Zea Mays
ggacggtcaagatatggtgttcggcggcacacgtatcccccaattgcagatggtcggggttggagttcccagtggcggagttgaaccgcgaggtggaggtccaccacgaccaccgatgttagctcgttctagggacgattcggatccactagcagcttcgacgttcagatgcagtggccatctctctccatccatggatttccaggcggctggtaatgaaattgtccccttcaatttttctgcagtggtagtcagggacgacagattgaaatctggctggtcctgttcgctacacctgcaatacctctgctcggcgatttttttttcaattctagacggagggtgtgggttaagcttggccttcaccatgagtcgtagtcctccagctgttggtatacgt

SEQ ID NO: 141844 - DNA, 525 bp, Zea Mays
gatttctctgttgtgtgtctataggccgttgtcgatgagttgcgcaggatgctggatcccgggaagccatccttcacccccagcaaagggaagcccaatgtggtcatgttcgtcggcttgcagggtcagtatcgttcatctgcctaattgttcgttacatcttattcttacatataatgtcgaattgcttgtctccattgattgtgcaaagtaccatacacacagtagaagatgcatgtcttcgttcagtgtttatttccacacacctggaatgaaacaatagaaggtgtttgtttgataaatcattagcaacaaattatgtagttatttctttttcatgtttaaattgggcgtatttgtcactgatgattatatgtttgaggcctttatttcaaaggtttggggctgcctattttttcgggggtgtttgaatctcgaaatggtatagagaagcattctcttttgctttcgactgtccattcaaacagcttgtctcttccaatcgcgtcgctctgccatccaatg

SEQ ID NO: 141845 - DNA, 373 bp, Zea Mays
cttgtcggtcagtgagcgtgctgaggaaagagccccttatcactagggccctttagtcagtcaagaaagtcaggtgcgtcaaccttggaaggacctacccctggttgcaccccatggcaccgagttgggggtcgggcatggtggaacctgacaacagaggctgggtgtgtcggaagggaaccgctcgagtgaaacccacgcccagccccaaactgacttgccataaatgactggtcgcattaactacgattggcatcgagccacaatgtcggtgttggtctacttcccactcatgacctacggaccccttgggccacatagcattcatgacctacgagcccctggactgtggcttattaatggcccgcgcgcc

SEQ ID NO: 141846 - DNA, 362 bp, Zea Mays
gggcaattgaacaagttcattcttcttccttgttcccttcatctttggcatactccattcactcaatgttggagataccttgttggctaggtattcttgcactagatctctagtgctgatctgttcagccaccaccctgaattctgctacatcttgttggcatggtgaccccgatgtcatgcggcacaagggcctagtcagtttgaagcttaaactcagtgggctcatgaccattgtcctcagcttctccctcttgttttcatcggccttgatatagaaccactcacttttatagccggttggccacttggtgcgatagctgagcaccggagcctttgtatccttgcgatacgcgaagttat

SEQ ID NO: 141847 - DNA, 393 bp, Zea Mays
gtaagaatgcaagccaatcgtaaacgagccaagtatctttgaaatctctctttattgatgacatatttccaccttacagaatacattgttgcctcagcagttttgaagcatagctagggataaaattttctgagatgctctatgttccaagagttcccaacttctgtgccatccatctgagtgaggcgatatgatccgggccgagtgacctctgctactatgaaaggcccttcccataagggtgataacttgtgccgtccctcccccgttagaattcggcggaggacgaggtctcctattgaaacgaaatgttgccgcacagctttgtcgtgatagcgccttagagtctgctggtaccgtgctgattggattactgcattcagtcgttcttcc

SEQ ID NO: 141848 - DNA, 765 bp, Zea Mays
gaaccaaagggctccttgttcatctgtcctgaggtccggaagttgttctttgcgagctttttccacaagtcttgttgtctctgagtctaggcgttgagctttgcatatgaggtcttctagcattggtttaacttcgaggctgctgttgtttcccaaacatgcattcagttgagctgattccttcttccaatcttctaaaaagttggttccttttatcccgaaaggttttcggttgagggcgtctgctactacgttggcctttctggggtgataatgaatctcaaagtcataatctttgatcagttccagccatcttctctgacggaggttgagatctggctgcgtgaagatatatttcagactcttgtgatcggtgaagatgtgacatttgttcccaattaggtagtgcctccatatcttcagggcatgcactatggctaccaattccaaatcatgggtgggataattctgctcatgcgggttgagtaggcgtgatgcataagcaatgactttctcattttgcatcagcacgcaccccaagccttgcctcgaggcatcacagaagacgacgaaatcctgatgtatatctggtagtgtcaaaacgggtgcagtcgtgagcttcttctttatgatctagaaacttccttcacacttcggggtccacacaaacttatggtctttcttgaggagctcggtcataggtcttgctatgctggagaatcccttgataaagcggcggtaatatcctgccattcccagaaagct

SEQ ID NO: 141849 - DNA, 460 bp, Zea Mays
ccctctgctgaagaagtcagtactttggttgcttcgcttggggagattcctgatgatgaacggcaggtttattttgaagtgcccctgaaccctagtgatgcggacataagtgacatgcttgatctgttagctgaggattcatccgacgctgctcctgttggtacgttggcggtggtgccccttccagaggttgatacaactttggatgtcccgaaacctgtcagtactcgcccgaggcgtcctagccgaaccaatcagcctgagccttctgctgatgagcaaaagaagaaaagaagacgcctccgacgggtatccagttttgatgaggacgctggtacctcatttcctgctactgaaagagtgcctgcgactggacttactgacgccgaccccaatgggtgtacccaaactgctactgatcccaatgggggtgctacttgtgttgtcactgtggaagatg

SEQ ID NO: 141850 - DNA, 412 bp, Zea Mays
aagaagtttccaagtgttacatttggtaaaaataaaaaggactcatctcctagcctaatataccatgaatccaaaagctaacctatcccgaggagtgctacttcctaacgattccgctccaagcatgacacctaatgagcaaatgaggcaatactactctggagaaggtggccctcctgagcgagctatgctagtagtgtccaagctagaagtcggctcaggatcatcatcctcgatgtccacattctcatctgcttccatgtcctgatgcatttcctggtgatgcatgtccatgtgctcgtttgcctcctcgagctgttgttgggtagtttggagctgcttctctagaagttcaatagtgtggttccttttctccacttgctcttcaagctcatggattcgggtacccatc

SEQ ID NO: 141851 - DNA, 477 bp, Zea Mays
cttgttcttgatagtaacctcattcaaggatctgtagtcaatgcagatcttctttgttccatccttcttctccacaaatagcactgggctgcccaaggcgaggtacttggtctgatgtagcctttctctgacaactcatcaatttgcttcttgagttctaccaattctggtctggacactcgataggctctcttggaaataggggcggtacctggtataagctctatggcaaattcaaccttcctttcaggtggcatacctagtaactcctcgagagacacatctgggaattctgatactacattgatagcctctgatggtttaatctcctcaatacaagcggtgatttggtgacaactctctttccttggtccagacaagaccaactctactaacacttcttctcctgatagggatactaacttcaccgttctcttgtcacagctaagactggcttgatacttggttagccaattc

SEQ ID NO: 141852 - DNA, 600 bp, Zea Mays
cggctgcctctgaataagtagggtactccacccagctgggcgtgcgaacgtcgggctgccttccagaccgagggggagggatttgttgtgattctccatggtgaaccactcgaggcgccatcccttaatgctgtccttgaggggaatgttaaggtattccactttcctcccctagcgaagttccaaacttgcgccgccgacgagctgatgctgtcctctagccatggcaacttgaagaatggagttaggttttaaatgtgtcagatttaaatcatagaagtcaagaagaccgtggaaaaagggagaaacgggaagagcaagtccgcggatgaggaacgacacataaacaacagatttgtgggtgtcctctgtcggaacagtgaccccgtgccagatccgcaaaaacacagttctttcagcggtaaaaccccagtctcaacaaggtgaaaagatttgattcagagattatggacatgtgattaccataaaacggaagctggctgttggggtcgatgggtggaatgatcagagcaacgacgctatgtctcttctgcttgggagccatcgcaatctctcaggcagaacgagtgggctaaagaa

SEQ ID NO: 141853 - DNA, 448 bp, Zea Mays
cgtggcaactatttgaccaattcgggcataatcttgtgggaacgcgggctcgacgtcgcggtttccgccgtgcgcgtgggtagagcgttctcagagtgtgccagccaaattgatgcccataacagtttaagatagggtagaatttggtggggcagggagcaacgggtgctcgggtatcccatggtcgtagcgcgacaaaggggtgttcgtcctcgccgccgtccggggtcaaggatctagttttaaaagacaaagaacttggaaggggcagggtgtaatgtgttagtgacatgttaaagtcagatgaggacttcgtttcagattttcaaactagcgagggtctttgcgcaaatacgacggcatggccgcgggcgcgcctgtaatctgtataggtctgggccgaatgggctgatggcggcccaatactattgaaagcttttcctttttc

SEQ ID NO: 141854 - DNA, 402 bp, Zea Mays
gtgaactatagcattcaaacacaccagcatccatcatgttttaaccaacatcaggtcactctaggccatcatattaatacccgttttaaccaacatcagcatccatcatgttgtaggttatttaagtagtaactttgagaaggaacaaatatgcatatttagacaggttactggaaagccctggactttagatgagtttatcaactatgtgcaacacctacaaaaccaagtggaggtaaatcacgaatcatgaatagttaaatattagtgctaaaattgtgtcactttcagatatcatagatgctctcactttaaaggcaacaaaggaatatatctaactatgtgctcgcgtgtattaaagataacaataccgagacctaccacgcaaagcatgtgctcccc

SEQ ID NO: 141855 - DNA, 417 bp, Zea Mays
ccagatccaagcaggaatccttctgttggtaacccgagttgagtcagtaataccacgatacagataagccgagtacgctctgtccatcaatggttgagtgttcttaaaaacaaaatcggcgactacaacttcagcagttagacctttctccttcaacaaaccaacttcggcaagcagaaccctggcctcggctatctccaagtctgtgggggattcagtccaacttggagcacgaacattcggttgtctccctgaccgaggggggagagacttgtcgtgattctctacaataaaccattccaggtgccatcctttgatgttgtccttgagtgggatatcgaggtactctgtcttcctcccacggcgcatctccaaactcgcaccacccacaagctggtgctgccatccagccattcc

SEQ ID NO: 141856 - DNA, 1504 bp, Zea Mays
ctgttcaagctcaagatcttgcatagcaacaatactcaagaaagtataaatagaactatgctttacaactagagagaaaacatcattataatcaattcatggtatttgactagaaccttttgcaactaaccttgccttaaaccttggaggttcacttggagatgaatcctcctttcttttgaagatccatttgcagcggacggtcttcttttctttaggcaagcgaacaatgtcccatgtaccatttttctcaagtgactaaatctcctcttgcatagcgaacacccatttgccacgaccattggaaaccattgcttcaaggctctgcactgcaatcaatatcctctgcataactcagagcaaaagcaatgttgcattcttcaaccaatctctttggaggcctaatatctcttttggcccttccaactacaacagactgttgtggttgctgcacaacaggagaagaatgctcagtagacaaagaatcatcaataatgggtgaaatatcacgaacctgtggatctggaatagcagcatcctaaaacatactgtcatcctcatttaagttctccacctgcaaacttactttatctagaaacgacggttgaacattagatgaacggttagcatagtacattttagattctttgagaacaacacttctactcaacatggccttcttggtttcagggttccacaatttgtatccttttgcccctgaaccattacccaaaaacacacactttgctgctctaggctctaattttccattatcaacatgagcataggcggtgcaaccgaccaattttttttgcaatttagtcccttttttgaaaaaaaaacatgtttggccccttggacgacttaatgtcgtttttacaccctttgctcggcgccataggccacggcgccgaggtaacacgtcttggagccgaggtacggtcgagaagtgctgcgatggcggctacgtggcaagacctcagccccgagatccatggcgccgagatctggctgcctgccacggtcggttgcatgcatggaaaaaaagatagaggaaggggatttgtcctcaggcggcaagatgatggccgccacaactttttgatgacagcaactgcatgcaaacaaaactgaaagcttctgggatagaggagagtcaaaactgggagacgagaggcccatgcgctagtaaagcgaggacgtacaagacaagagggagtagatggaacgaggctacagtaggctggtgaacggagaagcaatggtatgtgttcaggtaggcaggctgcctctgcctcgtcttcatccgtctgttgatcggcatggtccgcgtgcagtgcggcctgcaaccccagagtgacagcactggaacggtgcatatgccggcaccacgcccaagtgtacattgtacaactagctcatttactaatcgttgtttatttatttacgcaaaccgtatatgcatatgttacagtgataatttatgcttagggctaaccctaat

SEQ ID NO: 141857 - DNA, 492 bp, Zea Mays
cagctttccccgtgactctgtccgggttgttcggacaagtatgaggtctccttcgctaaattccctcgggatgactgtgtggtcgcgccatgcttttgtttgagcttggtatttgtttagagcctgtagggcaaagacgcggtctccgtcgatgaggtccttcaaagtaggctcgtctacgtcggggacggctaacgtgacccatgttttatttcctgcggggtcatggcctccgatccatacagaaggcggaaaggggtgaacccagtcgccctgcactcagtcgtgttcagcgcccagacaacttcgggtaacaggtcggcccacttgcctttcttgtcatcgaggagcattttcttgatggctgtgaaaattttaccattggcgtgttccacgactccgttggattgcgggtggtacactgaggcgaaggcaagcttggtgccaatggagaagcagaaatccttgaagtcttggctgtcaaattgcttg

SEQ ID NO: 141858 - DNA, 443 bp, Zea Mays
gccacggaacgacaacggtagggggacaatgagtcccccatccaggaggaggaatatcagtgccattggcaagtgtgcatcctcgctcacgaggccaccctccagcagcagtaagaagtgcttgacgctctcgttcataatctcgatcgagtttagggggcgacatcgagcaaaaacacatcgaggtcgaacggtcctgggtgaataagatttacgaccagctcaccaagagtagtgatggagcacaatacttcctcaaccctaggcaaaacatggcagcagcaactatgatgcatcgatccatccccgagcctgatgaactagaggtgaaggaaatgtaccgaaacctccgcaatttagtggataaggttgcggtataacagactgagatcgaccgacatactcccaccagtgcggatagctactacacgcgcacgacctcg

SEQ ID NO: 141859 - DNA, 531 bp, Zea Mays
tgggtcgcgatgctctccggcagacttcaccacagtagcaaagtttttatatcagcttatgagacggacacttctgccgcggatggggtacagggaggctgccactcatatccagctctggctccttggtgccctggtctctcactccgagtttgatgttgtggatttccttatttgtgagattgaggacaccatattggatggtctacgtgctcgtcgacagctgccatatgctcactatctatgtcacatttttgctcagctgattcggcctccacagttccagggcacacttgaggcctcacgcctcgtctttgggtcctaccgtccagcgcctgaggatcctatgccagcacctgctccagtatttgactctcaggctgaggatactactcttcatcagttcgaagctcaggacgcagcagttgttgatgatgatgatgatgatgaatttgggattccacctccgcctccgcctcctatgcctccacgctcacatgatcatgaggctgggagttctcgtgctacccc

SEQ ID NO: 141860 - DNA, 295 bp, Zea Mays
gggaaatgcaatctatgctgaagtacctgccaaattattggaacaaaaaggttcattgttacagttgaacaaagtgtactacatccgacgctttcgagttgcaaatgcaaagtcacaatacaaagttatcgatgcccctctcatgatctacttcactgtttattcgataattgaagtttgtcgtgatcccccatctacatttccactgtacgtgtataatcttattccatatgaggctattgatgcaaatggaccaaagagtaaagacttccatggtaagaatgacatcattcta

SEQ ID NO: 141861 - DNA, 343 bp, Zea Mays
tggggaggaccttaaggacgacgactttgccatcgatgtgccacacatccatgatgacattcttgtcatgaggctgccactcgcaatctctacatctaggtggttgttgtgtagaacatttatgtgttcatgcctcacatcatcgatgtcacctcaacattctaagcttgttggcctgaggtgtcactcctccccgtcggtcgatcctcccttgagggccatgtcgtctctgatgtttctaacttgactcacctcactaggtccacatggattgtgtcatgtagatgtggatcatcaacatcatcttcgataagcttgttgaagccatcgttgtgtgtggcgc

SEQ ID NO: 141862 - DNA, 432 bp, Zea Mays
cgccgccgagctgaggcctgaggccggcctctactgtgtgttcgtttggtagtccaactccagtggatttccgccagtagtttccacgttactctagcttattcgtctaatgcaatttgatcatacattgacacacccaaaaaaaaaaaaccccccgttctgtggcaagagtcaacaagctgcagtgagagaggtggagaggacctgcatggtggctggtgtcgtcgtcgtcattgtctcactctcaccaagcaagcagcaaccgccaaccggcaaggacaaaaagtgtcaacgctttccgagcagaaaggagcctgcaacgccttgtgttccgttccaatccgttgcaaaccaaaccagccagccaaacacacacacattgcagcggtgtcttgtgatcctcttctcctggcctgggtttccccattttcc

SEQ ID NO: 141863 - DNA, 385 bp, Zea Mays
gtcacgattaaatcgagctgaactggtatctcgaactaatcaaaaccacctatcggccaaccaacggcccacgcgttcctctcctcaccccggttggagacggcagtgcgccagcccgcgccgacggcggcgccattggcggcgaacccttgagcacgcctggaagggcctaagtctaacgcgacccgatgcaaaacgaagagggaaaggtggcgagcatcatggtgggggccttaccgaggattaggtcaccaggagtcacgcccacggcgcacggtggaagtctgtgggtcctcatcgtcggtgagcaattccggctgcacagagacccacctcacacccacacccccgcgtgtcgtcaccggtgggttgcgtaatgctccgg

SEQ ID NO: 141864 - DNA, 823 bp, Zea Mays
tatgggtgccccaatgggtgacattaacccacatgggtacgcgagaatttgtacccaccagtgtatatggtgatccgacgaggttgtttttaattatgggtatgaatatggggatagcaataccaagtggggatctatccattgccatctctagtttagtgcttagggtttagggcttagggtttagtgattaaaatataggtcttaggtttcagggcctgagttttaggatttatggttttaagagggttttagattttaggaatttaggatttatggttttggtttggggtctagggtttagggattagagatcagggcttatgtttttagaatttggtgttcagagttttgtgcttagaatttatggtttaaggtttgggatttatagtttaggatttggggggtttagggtaaacttgaaaagttacgaaatttgtagttggcaaaattttcattctaattcatctaagcatgaaactatccgatatggagaaatgaccaaaacaaaagttatagaccttgaaaagttacaaaactatgtagtccagacattgaaattcatcttcatgaaaaactatgtttggatttattacgattaaaatttgaatttttctgaatagccttagatggagaattgtccaagtcagaaatcctagatcttaaaatgttatggaattatgtagttgacaacttttttatttgaatttagctatgcataaaaaattatatttgaatctactacatttaaaattcgaatttttcaaatgactttgtttgaagaaatgaaaagtataaaagttatatatctcaaaaaaattaa

SEQ ID NO: 141865 - DNA, 445 bp, Zea Mays
agccaggtgctagggacgcagtgtcctagggtcgctcggtgcctcggcttgatgcctactgctggcggatggtagctgagtggttgggcaggtaaaacggacgcaggacggcacgttcggcgcgcgtggtcgctcactcgctcggcttgatgccttgatgcctactgcagtactgctggcggccgggacaccgagtgggacttggagagcttagggttagtccagccggtcacaagttgggcctccaattgggccacaattggctacttggctcggtggctcctatttacatattttcggatatccgcgggtacccgctggtaaagtacaatatccgaacccgacccgatgttatctcgggtcgggtatgggtaagacccgcgggtaaaatattgtacccgaaaccgaacccgacgggtcggatatccgcggatatccgaaccca

SEQ ID NO: 141866 - DNA, 1045 bp, Zea Mays
tgccttccaacaccatctatcccaaaaaatcttaaggaattaaaaaaaaaatacaaaaataagtaatccttatccagagacgtacatgcgatgcaaaaaatcacatgtaggaaaattttgaaaaactaagacacaattctaaaaaattccgagacacaattccagaaaatttcgagacacaaatccggtaattttcgacaaaaaccggtaaccgaaggaaactgtcggtaaaaaaccacgctgattccgatacctattcatatagaaaattctgaaaattgattttgttttcgaaaaataccgttaccggtgaatccgatcgaaaaatttcgaaatcagtttccagaatatcgaaaaattccgaaaccgttttcatccctacccgcagtgttgtcaaggtcgttcactagcaagcccagtcgtgtgcagaggacccgttgtgcgcgtggccaaatcggtgcgcacgaattttgtcgtgacgactcgtcatccccgcggccccgccgtggtcacctgacgtcaccaccaaccccacctctgccttcccttccggtgagaacccttccactatctttggtattcaccctagttggtatagcttcggtccgtgaccaaaatcgatcactggggccttagtaattgctcactagagttctgtggctaccgcactctgtggtcggcctcgcctgagttaccaccgccataacaacgctccccttcgagttcgccttgtcccatgctctatgtaggatcattttggctgcctgggggtcctggatggccgggcacgtctcctcgccagcgtgctccgtcgtgggaacacctttgccaccgcggtaccaggcgtcgggaggaagaagcttgtgtaccgtcggagtagcatcgtgcagctaagattagaagttggatagttgcgccggagccattgatcgcacaggggatggccctgatcaagttgggcgtaccccttcgatgtattcaatcacggccgcatagttgttaatgagtggccctagttgcatacctagtcacatgtttaatcggg

SEQ ID NO: 141867 - DNA, 424 bp, Zea Mays
attttattgggttcatttacccagactactgctatcacgtccaaaagaaagggaggaaaaggaatgttgctgcttcgacatctactgatgtgtctaagacaaagaaaatcaaggttttgacatgtagaccgaggcgcatcaaggttttgacaacccccctagccagagagaccgctcttgctatgcctattgaagccattgcagacccagccagagagccagagccagaaaaggtaccagagcagcctaagatgatggtgacagcactgccgaagctgtcagctactacaggaactccaaggaagagtaggatggctagtgttttggaagctattttagaatctgtgaaaacgtcacctccttcttctgccgacaaaattgaagatgccatagagatgatcacttccagtacttctgctcatgc

SEQ ID NO: 141868 - DNA, 602 bp, Zea Mays
gctgtcagagccaactgatggtgatatgatggacgtctgctctgacactccagatgtgggattagaggtatcccgggcagcatttcgtgcatcgtcgaccttggaaggcggtcttcggagccaagaggttggtcaaggtcgctcaattcccatggaggtgactgagaatccttcagccttagaggtggctgttgcagagaacccagtcctcaagggtggtgctagcggttgcccagcccccgagggtgttgctggcggttgcccagcccccaagggtgttgccggtgatgatccagctctgatgggcagtgcgagctgcaacccagcccccgagggtgtccgagcgagctccccttctcatacctccatggatgtccacgtcgggtcttctccaccacattttggtggcataatagcagcacatgcttcaaatgagggagtcgccttagaggtcggcgcaccggatgctagagttctgatgcctgctagtggtgttgaattaatccctggcgatgttcttcagattgtcccggttgatattccttcgtcgagccaccacctagcttctcgtgacttgggatttccttcgttcttttctaatc

SEQ ID NO: 141869 - DNA, 938 bp, Zea Mays
ggtttttgatctactggttgagatgaaagtgattgacaagcaacgtgtcagtcatctgaacatttggctatcgctgtagcctgaaatttagcttaggtttcgtccgcgctgaaactttcttagctcaccggtggcaccactgtctcagattcagaggacggaggatttggcaagggcagcatagaccttggaggcctagaggtgcgccaggtcaccacgtttgccaaggtctggtccaccacacagggcggccaagacggcctcggcgccaccttcttcaagccctcgccggtgcccgccggcttctccgtgctcggccactacgcgcagcccaacaaccggcctctcttcggccacgtcctcgtcggccgggacacgtctggcgccggcggtgcgctcctcgccgcgccagtggactacgccctcgtctggtccagcccggacggcgccggccacttctggctccccacggctcccgagggctacaaggccgtcggcgtggtggtcacggccgcggcggacaagccttcacccgacgaggtccggtgcgtccgcgccgacttcaccgacgcgtgcgaggccgaggactcggtgtggagcagcgacaaggacggcttcagcgcgtccaccctgaggccggcggtccgcggcatcgaagcccgcggcgtgcacgctggcacgttcctcgcccagagcagcgcgacgccggcggcggcggcgggcgtgtcaacgacgctggcgtgtctgaagaacaacagcgcgagctacacgtcctccatgcccgacctggcccagctgaactccctcctggcggcctacgcgccgcacgtgtacctgcacccgaacgagccctacttcccgtcgtcggtggcgtggttcttcgagaacggcgcgctgatgtaccagaagggcagcagccagaccccgacgccggtggc

SEQ ID NO: 141870 - DNA, 484 bp, Zea Mays
agcgtggactcactctgaatggtgagccacaaggggctcaaaggtggatctgagacgagcgttgtactagttcaggcttgcgcccttgtccactacattgttgatcgtagtatttcttggagcgtgttacagttgtctgctagtgtctaaaagatggggttgtcttgcccttttatagctcaagggtagatttcacagtgagaactcgtattcttcctaggaggagttcgtccagttgtcttgggttgccttagccctcatggcacagtccgttggggcgcatgctgtcgtattcttgatgtgacattctgtcttgtctacccagcgtttgggtccctatagcttgtctggtgccagcgtagcggtatctggcgtgtccagcagagtggcctcatgacgaggttcagggttgtattcagtacagcttcatcttccggcatgacccttgcgtcacctttcggtacgcattggcatatacccagta

SEQ ID NO: 141871 - DNA, 373 bp, Zea Mays
ctgcatctaagttttctgattttggtgactctgagagctcggttgagtggaatgaggagtcgtcggatgaggatttggactacttcgcggccttggatgtggcggcggcgaaggcttcgccgcatgctgcggatgctgaagttgtgcctggtccgagtactgggcgtaggcggcgaagggtggttgccaagcgtagagtgagtggggcggacggcggtcggcttcgggtgagtagggctggcaggcaggagctgttgtccttgccggccgctgtgagtgcaggtgagggggagctgcgaagtctttttgcgggtgaggagcttaggataatgttatttaattatagggagatgggaattattccgaaggttga

SEQ ID NO: 141872 - DNA, 430 bp, Zea Mays
gtagaaaataacagtagaaagcagtagaagtcaccttagtcatttttaaggcggtgtttcagaagtggaggtgcctgctgtttccaatatctttttgggcctatgatgtataattattttaatgagggaatgtggtaggtgggaatacttatcataggataaaaagatgtagcaacatttagggagcaaagatgtagtaaaacctttttgtgggtgattgtactgtattggttaggagttgaggatcagtagataccaaatcttctgtatcctgcaatttttttcggtaacagttaaactatggttgtgtatagctatgttcgagggtaataaagcgtaccttatgtggagcatcaacattcttttttgagtttttttgctaccggtttgcattaaatggttttgtaataaaagataagtgtcattaaat

SEQ ID NO: 141873 - DNA, 338 bp, Zea Mays
cattcactaacagaggatcccaaaatttccttgtgtgtgtttatgcgtgaagatgcacggcagacctagaggctgcaattcctgcctgcgggcaagattcatgagcagccatgatgaactgtggtgaagcaaataaggcaccttcaggctaaagtttctcttggcatgtcatggtggtggcgaaggctgaagggccaacctctacagccacacgttcccagtcttttttagcaggcccaaagtagctgagcatcatatgagagatgagatgggatgcatgcccccagaaaacaagaattggaccctaccctttcctggattccattccaatgccccag

SEQ ID NO: 141874 - DNA, 535 bp, Zea Mays
cgtttctgtagtgttaaaatattcccatctcctttcactggtgttaaaatctagttttagtaatataccgtgtataccaagtttccatcgaactggaaacctgatcactgagaatcatcccgggttacatttacctctcggggctggtttgctgatagtaagaaaatagaggatttccctctcggggctggtttgctaataataagaaaatagaggggattaaaagcgatcgagggaaaaattagtttcgttgctaaagccaaccttgacgcgaactgaaactcttgacgcgaaagaaattcggtaaagccactaaacagaaaaatctcctacaacgttgagaggggacggagatgatgaagccgtgcccatgtggccgctgtgtaggcactaacagaataggccgtgtaggcatggtgacgtcaaaccggcaatcctttttccaccggcacgcagggagaattgtccatcacaaatcgctggggcgtgggatatccaaagatcatgtcactttcgtgggaacgttacaaaccgt

SEQ ID NO: 141875 - DNA, 379 bp, Zea Mays
ttgacaaggccaaaaatcaactctcgatgtggtgccatgtggcctgacaagcggaatcagaacagtagtactgaactttaccattcgcatcaaaaggtcaaatctgagatcagacaacggaataatggacggagtatgactgttggtttgacaaaattcatttgaactttcagcaaaccaacaatccctcgtgagaagccctgcatataaacgtccacatggcccacacacacggaaacggaatcatccattcgagtacaagtttctctgcggacacatggagtgtttccaaccgtttaccgacgcctcctcctcgctgtcagctcaaattaagaagaagaagaaaaaacatttgactttctgcagccacattgaaaac

SEQ ID NO: 141876 - DNA, 950 bp, Zea Mays
gtagagtacatcacatggtacctgacgagccattgtcaaccacgcttcctttggacaggtcatacgtagatgctctaaaaggtgtgtattatgcccaacattcctggtaacattcttcctgctttgctttggtgctaccctttctcttcttcctgtgtagtgcctaccctgagaggtcatactatggtggacctgaacatgtatacccatacagccatgctgttttctggttccaagagcgtgttaaaaatgattcctgctacacccagaggaaaattgtgtacaacctttgctgcagaggagggaaagtgaacctaaaaccgtttgagcgtccgccgcctttgcttgctaatcttttgagatttgatggaggtactcgctcaaggcgtttattgaggcttatccggtcctacaattcattgtttgcattcacctctttcagtgcagctatcgatagaacgataaataacggcactgcaccctacgtttatggggtggtgcaccataagattggcaccctacttccacagcgtgggacacaaccataatttgcccagttgtacacatatgacacggaacatgagacctagaataggctagggatgtttgagaccgatgatggcgctggtggccagccagaccctgaaatagcgtcggcgctgctcgatatgctgaatgaaaacaactcgcttgtcaaagcgttctgatacgcgagagagcgccttgagcgtgagggtgatcaaaagataacactcagattgctaggctgcaacacacgccatgatgtacaatacaacctaccctcaaatggcgagatcgctgtcattatagttggcgactacacggctggggaatacacatacgatgttcttgtgcatgatagagagtgtggcctaaaacgtgtttcatgcttgcatccagcatacatgcctttgcaatacccgttgttg

SEQ ID NO: 141877 - DNA, 895 bp, Zea Mays
caaatttctgttctatcgtcatctcccaatcaagatatccctcagcatcataatgacccgaaaaagatggtaattgttattaccttgctggcggtgttggtgtggcataccttctatgttttgatgaaggcggcgacgtaggcgcaaatctctggtggccgcttaatcataattaccttcttcatcaaacaccgcatcatcgggaagtcgtggacgaggaggtggtggtggtggtgcttgttgttgcgtctccaacacagcaagtctgtcgacgatctgggacaatcgtcgatccaacctctcgtaagtcttgccaaggttcatgtcaatgaaggcatcatgcactgacttgtggaccgtctcctccatttgctccttcaggagattgttttttgcctcaagatcttggcggctaacacattcatcgaagtctgtagggatccttgcttcttcttcgtcgcctaccatcaaaacacaaaaacaggaaacaaacggtgacggttatccctaataatttcactacacgctcctctcaggtataacacaggaacacactttaatgtatcttaccaagctcttacaagtgtttgacgaaatacaagcaaaggatggtacaatcggaggttggttcgtgatacttaccaagagatagtgaaaccgcgattgcaaggtcaaatctgtattgatcagaagatatagtatgtggagctataggacaagcacaatatgtatgtgaatgtgaaacaaaatcgagtgcagatgagcgaagttcaataaatatccaaagcacaagtcacaattgctggctaagagatgtatccgaggcatatcacaacaagttggaacaaagaacaatggaaatagcagaatggcagtaccgtaaatgttgtactcg

SEQ ID NO: 141878 - DNA, 522 bp, Zea Mays
gcgaggtcggaactctatgtcgtgagctcccggctcacatgcccacttggctacccttctgatagcttctttgttgtggagaatgtcccctattggaaatccagtgacgactatgattttgtggtcgtcaaagtagtgacagagcttgtgagcggttagaagtaccgcgtatagtagtttctgaacttgggggtacttcatttttgagggcccgagaactttgatgatgaagtagagcagatgctgcaccgggtatgtatgtccttcttccacccgctcgactactaacgctgtgcttaccacgtgagtcgtgcaggagatgtataacaacagatcttctgctggttgattcggcgtggctcggcgtggtggcttgagtactggtggtgtagtcaggaactttttcagtgcctctagagcttcctgtgactttgtggtccactgaaacttgtccacctttttgagcaatttgtagaatggcatgcctttctcgcctagccttgatatgaatctgctcagggc

SEQ ID NO: 141879 - DNA, 412 bp, Zea Mays
gggtggtggtaggcactggagtaacggaggctggcgtggtagaggagggtggactggtagtggtggttggagcagaggggtcaaatctagctggagtggagcatacccgagactagaggcacctaactctgaaagttatcttgtctgagctaatcctcatatgacctccctgctctgctctctcaactactactgctgttattgttgctcgagtagctctatacagtctatgcttcttcttgcctccctgctgctcaaggtagacttccttgcccttgtcatgtttgaatgggcaaaggggatcctcgtcatcaccccctcttgctagagtgacattctttgtcctcaccatactgagtgctagaactgcccacgaactactgacacgttgcgcgagaattagagaagataa

SEQ ID NO: 141880 - DNA, 507 bp, Zea Mays
ggcgagcgcgctgtggccgctgtgggcggctgcgcctggcggtggcggcctggcgagcgagcgcgctggcgggcgagcgcctggcggtggcggcctgacgggcgagctggagcctggagaggacagaggagggcaggagcaggaggcgcgggccgcgggcgagcgcgctgcggcgctggagctggagcctggagaggtggtgcggccgcgcggtaccaggacggacagcaggagagccaagcggcggctggagctagggttggggctgggcccgacgatgggcctctagtgggccgcaacttccgaccggggctgcctcctagatatgtcgtcgaggtgttggatgtttgccggcggtgtctcggcgacgaggggcgtggcctggatgaaggtcgtcgtcgtcgaggagatgaagggacgagggtcgagcagacgaacgacggcggtcgagggaggacggcggatatctgggcgcgcgactgggtttttgcgcgcgcgggaggaaag

SEQ ID NO: 141881 - DNA, 298 bp, Zea Mays
gtgggggtactgtggaacgaggctccggagtcaaccacccaatcggtggtggttcggggaggtggaagtggcgaaggtacagtgtgagcggagagggccaaagaaggtgccccgatagaggcactaggaagggtgggagatgacacgggctcaaccgctagggaggcgatcgcagcacgtgggaagacaagcggtccaggcacgtgacggcccgcctgagggtggacctcgacgtagtcccgaagaatagggttccagactggatcgaaggacacgaacatgccccggatgagctggt

SEQ ID NO: 141882 - DNA, 456 bp, Zea Mays
cagaaggcctgacagaagaactattgccagcggcaacccttttgtgttgtccaagattctctgtctgtattctcttattgcttcgtcaggaagttcatttctgccacatgattggaaggtttccttgaacagattgatgactacttcttggtcataaaacttcggaacctcaagtttggcttcttgatagtgtgggggtggcttatgtggcggaatctgagaaatcctcactattctgctggcagcatcgacatccacatccttggggtcagggagcatagcgaaaatgcgattccactccgagttactgagctcagcatctatcaccaacagatacttcttttctttcagtatctcccgcagcttcctctctatgttgtccttggaacattcttctccatctgtaatgcgtctgatgatgatcttgaggacatcagaggcactgagattgggccc

SEQ ID NO: 141883 - DNA, 516 bp, Zea Mays
ttcacttgtggcaatgtgggccactatgccaagaattgtcccagaaaccagcaaaggcagatgccagcaccaaatgaagacaagggaagaaagcagaaggtacaagtcaggcaagggaagctcaacttcactactctggaggaagtacctgagggagctcccatcatgaccggtatcttttcagtttataatcaacccactttaattctgtttgaatctggtgcatctcatagtttcattagccaaaagttcagtgctaaatgtgaactgccattctctcactcaaaagggtcatttatgatagccacacctgggggtaaaatctcaactaatcaattaaaccaaagtgtgcctatttaactgggaagccacattgtcaaaaccacccttcttgtgttgggtttggaaaatgtggatattattttgggagctaattggatgaccctgcaccaagtagtgcttgatgtagccagccgcatcgtggaaatcaattccccgttttgtgggaacttcacc

SEQ ID NO: 141884 - DNA, 1108 bp, Zea Mays
tgaattttctgtgtcagaaactaagaagggaccttggcattattatttttaagatagattataaaccatatgtaacattacccaataacaataatctttttaactgcttctcttattccatttatgtattgttcttgcgcctgtaccacacatgaaattgagcatatactcatctgctatgtagaccaaatggttaaaaccattcaatattttatgaactgaatgttgagagaaggctataaagtttgtatctgtacaggcttagtaggagattctaatatctagcactgataaatcacatatgactgaacaaacaatctgaggaccgaggacaatatttgcttcgctaatagggctgagattggatacaataattcgttcccgtgtgatttgtccagtcctatgtagcactgattatcatcccttggctcattttgtggattagcccacggtttgcatgttaagccaccttccttttaccacctcaatgtatacacatgaattgtcttttcaagaactacaaaggaattaattatgagtaaaaatacacggaggtcctccaacttgtctcagcgtcattttggtcgccaactcttaaaatgcattttaggtcctaaacttctgaaatgctatttttacctcctgaaacttgtctcggtgtgtcgtcatttaggtccaaaactttcaaaatgttatttttaggtccacaaacttgtctctgcgcgtcatctaggtaggtccttcaactcgtcatagtgtcacttgggtccaaatagacccgatgtactctctgcatcataatgtcacatgccacaccccattcttgatcagggcaggaatttaatggcaaagcaaatcgttcgactacctcttccgttcaggtgtactagtcttggcattgctgccaccactattgttgacgtcgtggtctttgatgtggaggatggtgaaggtatggattgaggatggtgagttggcaaccatgatgcgaatatccactagattggaaaagcagagggaaggggagatatggagacggtgctagaagagatcggaggagtatgtagatggagtgctagagaccaacttttgggtttgttggagcttg

SEQ ID NO: 141885 - DNA, 374 bp, Zea Mays
aaaacttggaaatgttgctctgcaacaatggaacgacatatcaacataaacattagcataagtcggcaaccgatgacacggggttgaggaagatgaacttaatgtcggaggaggattccatgcagaatagcctagggggcaccctcattgaatatatcaccgctcagcatcatcccaactcaaagcagaacatcttcttcagtgattgctttactagtcaactgggtagtatccttaactgcagattacaagtatgcatgataaacttgatcttttaaaggctgaatgttgcaatacacaaaatcaattactacagcttgagctatcagacccctaccttttatattggcaatcttgatcatcaaagcagtaat

SEQ ID NO: 141886 - DNA, 806 bp, Zea Mays
cgacatcgagcacaggaaacggtccacggcgcacagatcacgacggtagtatatcagccacgcgacctgaaggaccacacgcttccactcaataaagccgctccccatcaaactggcgggactgcgcaacttgccggagcgagcaccatcattcttccgagcgctcattccccacagctactagcgcaacacgaagaagtaacgggaaaagaaattagtacgaggtgttccttaccgttggaattggggtgcagttctcagcccatggtgctacgcggtctcgcggcggaggaatatcccagcgttgaatccatgacggtgctgaaccggtggtccactccacgctctctaacgccggcacgatcctgcgcacccccagcttcccggttaaagcccttcgatggcacgcgggcggagtagccgttgtggctctcggcggctaccaagttctctgtccttgcgtggttatggtgtttggttccctcaggaatctgcccaacggctggtggcgaggggtcgtagtctcgttggttttatatttggaaaaggaaagagtccaggcctcaacagaaccccagagattcccggcgcaatcaacgatctgcacggacgagttctcgtagcagatatgcctggcaaggcggttacaacaacctactgattccgattgggctcggcacacagagatggagctgtcctcaggcccacccgccagcaactccatacgggacgtgagtgcagcgagcgtactgaagcatggccctacccgttattggattctaggcgagcgactgtccttacgactg

SEQ ID NO: 141887 - DNA, 525 bp, Zea Mays
cacgtactcactgacagatcttccgtcttgagtcagttcccggaattcatcttccttgagctgaacgatcccttggggcacatggtgctcccggaaagccgtttcaaactctgcccaggtagcatctctgatggtaacattgaaggtatcccaccaggctaaggccattccggaaagttgatgagcagccaattgaacacgctgattttctgggcatccgattgcttctagtttcctcttaatcatgtgcagccaatcgtcagcatcgaggggattgctagatccggcaaacatgggaagcttgagcctcaggaaatctcccatcctgtcttgtggtcttccaccattcgggcgttgattttccagacttcgagtgaggacctcgatgagtcgggtttggttggctagaacttgggctaaatctaggggtagttctggaggtgcggggaggtgggtctcacttccttctctaccggcttctcttttagctcttaggggaaaccctgctccaatcccggaggcggt

SEQ ID NO: 141888 - DNA, 987 bp, Zea Mays
aaggagaatgggggcggaggctggttgttcgtccataggctaggggagcaggagtggcctcgcccctagatgggagaagcggtagtcagcatcaaccgagtgtctaggtgggaggagcaccatgtcatactcaatactgagtgacatgaactcgagactcccgaaccatatcactgagccgagctacaaagggtgttgggggttggccgtctggagccttgatgggaacgtggtgtctacacgcagcgaacccctaccaagtgcgccaactgtcagtgttttgacccgaggatcctaccgactagtgaatgaatgttgcgtgcactggcccagatgggtgatgtaaggagaagcaagtctttatcttggttcgggccagagaaggccctacttccagcagagaggggatcatacttatatttcttgcacctaagtgcttgcagtagggaatacaagcttggcaggagagggaaaggatcccaagtccctagggttaattgaggcaagtaccaatatcgttgtggaggcaaaacctgtgaagtgttctcccatcctgactgaagcccaggactcctctatttatagcctcgaggagggatgccaggagcgccgaggcttgtcacatatgggagaggaggcgtgcccgagcccctatagccggtatggcccttgtactcgctattgacttgtgccaagaaggggatgtatggttcctgtatttgcatctttgactacgcagagagtcgaggccagagcagggcgctcagtcatgtacctaagcctgtctggtggggaagctgtccgagtcgtagtggttggagcagtggtaagtatgtcaaaaacatcttggttatacgaagggtatctgatgtcagctctgtagcttctgatgacgttgggcatcctttcgtcgatattacaaggccgaagcctcgctcaggcgaggcagaaatcttctgagggcatggtcgagcctgctctggggct

SEQ ID NO: 141889 - DNA, 594 bp, Zea Mays
atttcctttcaccagtttgatcccaatataaaggagtcctgcattttctgccatataaagcctcacacggagacatcttcaaactggcctggtagctattattgtgagaaaactccacatagggcaaactcttatcccaactgccaccatgtttaagggcacaagctcttaacatatcttctagtacttggttggtcctctcggtctgcccatcagtttgaggatggtaggccgagctgaaattcaactcggtgtccaagcactcgtgcaacttctgccaaaatcgagaagtgaactatgatcctcggtctgacatgatcttcttaggcactctgtgtagacaaactatccgcgccatgtacaactctgctagcttggctcccgtgtaattggttctcacgggaatgaagtgagccacttttgttagtctgtccacaatcacccaaatagagtcataccctgcaggagtgcggggtagaccaacaatgaagtccatgccaatttcttcccacttccatttgggtatcttaagcgagtgaagtaatcctgcaggtctctgatgtttagattttaccctctagcaaacatcacaac

SEQ ID NO: 141890 - DNA, 330 bp, Zea Mays
gttccagggacatcagcgcaaatgagatcgtgtcggtcttggctccacgactggaaatggaggagggaggattggttctccggcagttatcccagtccagcttcttggctgtcttacccagccgtgtgcaactcgacacgctggtggatagcttccctatcatcagagaagaaaatttcatgctctcctcaaggcgctggacgaggttcgggggtgctggtggtaattccttgaagcacctcgtggaacttgagctcagaggtctgccggtgcatgcgtgggagacttcggtggtgcaacaattgatcaacccccatgcgtgcatttccc

SEQ ID NO: 141891 - DNA, 438 bp, Zea Mays
ctcggcttcttcgtcccgggattcctcggcggccttgtaatatcggggcacgtggccgagtggtctcgcctgccggtgttctccgcgacgacacgctgctggctgtcgagatctgtcagacatacagaatccgccacagaacgcgtgtcagccgcgcatggcaagaaccaagaaggcaagaacgcggcacgtgatccttcctaagaatcctggaaagcaacatcaagtgcgtgatcttggaacgaagaacggcaacacaacgtgatccggatctgaggaggatgtctgccgactgcccggccgcgggcagcggctgtcgccaggtacaccaaccaaccacacgcacgccgacaccactcgctctgtccagggcctccaggcaacaagcacagcacgaacgacaccaactgatcgtgtcgtgtccccatcacacgaagc

SEQ ID NO: 141892 - DNA, 339 bp, Zea Mays
ccgccgcatagtagaaaccctaagccgccacacaatagaaaccctaagtcgtcgcctctgccccctctcacactctgctccattgctgccctgcggccctgccctctgctccggtggtcctcagctccggtggccctgccctctgttgcgctcgcctctgctgtctgctcagctccggtggccctgccctctgatgcgctcgcctctgctcaactccggtggccctaccctctgccctctgttgcgctcgcctctactcagcttcggcgctcgcctctgctcactgctctgctccgacaactgtctgcaccaatctgttctgaactctgttcagagttc

SEQ ID NO: 141893 - DNA, 331 bp, Zea Mays
cagccggacggggggaacgaaaagcgactgcccaccaatgaaggcacgtgaagccatatcctccgaggggaagaagacgaggaaagagttcgatgcaacatgccggaggtggagcgcgtcagcttcaagcgaaacccttgaggcgagctgctccaacaccaccgcgacacaatcagagctccccgggccaagaacagagacaatcagcacccgacaaaggtcagcctcggcctgatcaaccttcctggagcgtcgaaggaacctcacaagacgagcaggccccccaggcgaagaatcagacgccacctgaccagaaacaacacgatcaact

SEQ ID NO: 141894 - DNA, 485 bp, Zea Mays
ttgggacgtaggggaacgaggaaggcgaactggctctagctgcatctacagcggaggttggagatgcagcaggatggtgaaaattcaggttcattcttactcttcttatgctttctttatttttgttcatttctgaatttaaaatttatcgcaaagatttgataggcaatgaattcttgctttctttctttctaattccccgtgtaaagaacttccatggttctatgaaattgtactgcgctggagcctgaaatagagtgttcttatctgttgggttgggtgaataagtgaaagtgcatacttcgttgtcatctttggtgttacgataatattatgactgttttagtaattccttgatgaatgtgtttactttgttgtcatctttttgtgatgattgtgttatcaatgacaccgaactgtttagctgtttatgagaagtgtaaacatccaaactgcacaccccaagatggatatgcatgtccaat

SEQ ID NO: 141895 - DNA, 464 bp, Zea Mays
aggaggtggagcagactgaaccggaggtactgagataccagaatactgaagcataagagccatgaatgccctagtctcagcccgatcctgaagtagctgctgctgaagggcatcctgcctgtcctgcatgttctgaaacatcgagagcatcctctcggataaccgggcctgctcggccgccaggttggccagaatcgaagtaagagcagggtccatagactcccagcctcatgatcatgtgagcgtggaggcataggaggcggaggcggaggaggaaccccaaaatcatcatcatcatcatcatcatcatcagctgctgtaccctgagtgtcaagctgtcgaagagctgcatcctcgacctgagagtcaaacacagaagcagaagctggcacaggagtctcaggcgcaggacggtaggatccaaaaacgaggcgtgaggcctcaagggtgctctgaaatcgagg

SEQ ID NO: 141896 - DNA, 380 bp, Zea Mays
catgagctcctgctgtcttcagtttgcaaaaacagcatcagcataacgagagcatcacaaaattgctacttttgagagaagtgggtctaggtggcctttttggtgctagctcaatgattttgtgaagtggttctatttctaggatgaagaacattggggagagaggatctccttgttgaaggcctcttgcatgcctgaacatcttacccagcatcccatttaggagaatcttggaggatgccgtctcaaggagaagtgcaattcaacttcaacatttttgaacaaaactaagagcctccatgacctccagtagaaaaggttagcttactaagtcgaatacacgagatatgtctaaatttgatgaaaagggaagaatgttt

SEQ ID NO: 141897 - DNA, 321 bp, Zea Mays
gcacgggcgatcgggattagacctgggaataccgattcgaacgcgttcgatctgagccgtagattcagaatcgtggggatcgggttagatttaggttgctgttgatcgcggccgtcgatctgtagatatgtggtcgtgatcacgtaccgtttcgcgatgtcaccgatttaatctgcacgcccatcctagatcggacggcctagattcaccaataccccttcgcgggtgcactttgctaaagaacccctgaactatgtagaaaacaacccgcagtccacagcagtgtcagtctgagtcttagaaacattttcaccgtagccc

SEQ ID NO: 141898 - DNA, 327 bp, Zea Mays
cgtagtactggtactgcagtctgcacgggagtagtaggctagtaggctgcttgctttgtttgtccatgatgatttctctttctacgtgcagtgctttgttgtttctgttgaatggtgcggcgtgcgtggcatcagagctctccaaccacgtgtacgtgtgtactcgatgcgacggaacggagcaggaagcgatggtgcgttgacatgggagagcatacgacgacgcgacgcgacgcgagcgtgttgttgtcggtcaccagaacggagtagttctgcctgctaggacggatcacgggcatggacgacgatggaaccactcgtcccgta

SEQ ID NO: 141899 - DNA, 327 bp, Zea Mays
tacggatgcgtccggcgagcggtggcgcgatgcagtggcagtgagcgcgagtgaggtgcgagagcagggatgagtggcacgggttgttgctggacttgatttataggcaagaaaggagagagaatcacgctagagtttatgccgattgaatgcgtatgcggctgtaaacgtaccattaatggtgccgagaaacagcagccgcactgctgagtgggaaagaagggaaagaggcaaggagaaatggaacatccggcatgacactccactgctgagcacgagcgggcaagcgatccgacgcgagagaatgcaagcagcatcgtggtcaaa

SEQ ID NO: 141900 - DNA, 524 bp, Zea Mays
attatggctgcgcgactcacggtaagctctccttcccccgactcgctttcatctctagttcgtgtagtgtcgttcggttaaggaaataggcccgggaggggcatgtgcacgcagctccggcgaaatccgccgccgcgggtgcgcgtggcgccgccgtcctggccgtcggccgaagtgagatgctaggagccgtagatctaggatcgtagggccgctggtacgcgtaatatattaaccgtagatcttggatcggacgaatgcgatcgcgtaccggttcattacagtatggatctaatcctgaccgctgattcagaatccatcggtcgagatcgagtcctacccctttgcggtgcacttttgcataaagagcccctctggaattgcagattagaacccgcggtccattataattattcactgagtcgtagaaaacttcggtttaggcccctggactttctgaaaattggcgcccagtccagtgttgattaaaactagagaaataatattagaaattcgtttttagt

SEQ ID NO: 141901 - DNA, 345 bp, Zea Mays
aattgaaactgagaccagcttgggtgttagcatggttcgctgacagccaaagacaatcaggccctgtttgtaactcttagctagttaataaattgaactaacaattagctggacctctaactattagatctacgacacgagcaattagtaacaagtagaaccaagggtttagtagcatacgggtgaagtgtctatgtacttgagaatgaccctacagtaccgaaagcgagacacatgactgcagttttgcttgcagtaagctgtcaatcagaaacaagcggaatgcaaaatcaggtacagccctgcaaatgctaaaacccgattgtactgcaaatgacttttttt

SEQ ID NO: 141902 - DNA, 631 bp, Zea Mays
ttcggattttcgcctcgcgggtttgttcagtggagacttggttggccgctccgcctcgcaggcttgctcggcggagacttagttggccaccctgcctcgtaggcttaggcttgttcgacagggacttggtcggccgctccgcctcgcatacttgctcgacagggacttggtcggccgccgcgcctcgcagtcttgctcgacagggacttggtcagccgtcctgcctcgcaggcttgctcgcagggacttggtcggctgctctgcctcgcagacttgctcggcagggacttgggttggaaatgaggttacatacctatttagtgtaccctgtccctgggtacccaataagaaggattaattatttaagccttcatgccttgttctacacatagagatgtattctaattatagatagagttgtagccgaacatggctagatatagaatcatgagcggctaccacattgtaactgagttggactctaacttgttggcagtttcttcccatataaatatacatcatgtggcctcctatggaggatatatgcttaaacaatttggtggttttctctcatggtattagagcccacctcctaaagacctaaaccctagctgctaggactatccagaaa

SEQ ID NO: 141903 - DNA, 577 bp, Zea Mays
ttctactgcggttccggggtcaccggagctggctagaaacgaagaggaatactcggcgaactcgttggtggggttgcggccacgagaccagggtcagagggggggaacggcggaggaaaggctccgggctggtcgggacaattccggtgaggaatccgactgctaggagaggcaatcgaccgcgataaggctcggtctagttccagtggaggtggggagcactatgggccaatgtaggggcactggacagggtcgggttggccagacaccgtgcgggcgcggcgagcaagcgtggccgcacaccggcgaggccaaattggctacaggtaggcgtgaatagggaaaaccaagcacgagaacgggtgtctcacctcggggcggagctcggggtggcctggcgtggcttccagcgagctggatgaccagcacggcgggcgagggtcttcggcgaggtcgagcggcgtgggtagagcgcgcgagagagcgaggctgtgcgaaatgggatgggggagcgagtgcgggtgtgggcggtgctcaaaaggagctgggggcgtgggcgggcgacgtggtcgaggat

SEQ ID NO: 141904 - DNA, 688 bp, Zea Mays
gtttacgcgccctaaccactaatccgaccggagctaggcattgcgacgaaccaaacgaacgcatccgaggaaaatcataccggaagttatgcgcgccgacgagctgtccacgatgatcgcagccttcagttcacgtgcgacccacagcgagcaattgccgccagcggccaagcgaatccgacccaaaagtcggtcctacacgtgcgatgaggaccacagatgcacccggaatagtcctccacgatcaaaaggctgaccggggttgtgtcgacggcggcggcacagatttggttctctctccccctcacgctgtttttcctcctcctcagtacgggcggctttggttcgcgattgagggaaacccatatgcacggaagcgcgtgaggtatttaacagcatgaattggtcacggatgcaacgatgaggtcggacgtgccggagaatctccggtaaacgtggcggatcccattgcgcttctgttgagcggaggagctggaagatgacaatttgggcccgcgcgacagtgtaacaggcggggcgcacacggatggcaagtgggccccgggcgtcggcgtatacatcagctggttgggccacgcacgcggagaaagcttgggccgcgcgcagggagaaaggggaggtgggccaaaatgaggcagtcgacccagacaacggttttccctttttt

SEQ ID NO: 141905 - DNA, 373 bp, Zea Mays
gttttctccaaggacctctctggtcaaaactggatggttcaaccggtgtcaggacctgagtacccattttgacctgtgtctgctagtcaaactggtagattacaagacaggcggttgaattggtgttaaaatcgtttcaaccggttttgcccactggcttccagttgaacaaatcgtttttgaacttggtttggctttactcaaaactagttcaaccgctttccacgcaaaacattccaattgttagcaccttttgagagacctctataaatacccccttgtgtctctctcatttactctagctgctcctcgcattcattgctgacctaactcaagacaaagcttctaactcctctctcacacccaaaatctc

SEQ ID NO: 141906 - DNA, 344 bp, Zea Mays
gcgggatgccaagtaaacctagtcatttggactttgggaagtccaccatctctgaagctgatcttccaaaaatggtgaagctgggctactttagtgaagcaaaaaaggagctggttcgttttggcggggaggaaactattctgaagccggaaaagaatgaggttgtagtgttcaaaagcttctttaaagctggcctaaggttccccctgaatgggatgattgctattgtactgaagaagtttgggatttatcttcatcaactgacccccaatgctattgttagattaagtgtttacatttgggcccttcgtagccagggagtggaaccgttcggtgagggtttc

SEQ ID NO: 141907 - DNA, 321 bp, Zea Mays
cgctaaccacagtcgctcagatctaatcctaaggcccagatcttattagggcgagatccaaccggatctgtcaatccaaagatcaaccacctagagccgcacatcgactaggtaatggccaacctaatccacaccgcacgatggatatccaatggcccccacgcatcttctcccacacgacaaccaggacggcggcacacacccatcgcacacggcggagccaacaccggagcacaccagatcaacgccccgatgctccctgcactcaactggaccacgattcgcatcagggagagtggttcgagcatgattgggatacat

SEQ ID NO: 141908 - DNA, 806 bp, Zea Mays
gtgagcactagcactgttttcgggagtcgctgacagtttgcaggaacctcccccaagttctattccttcaccgcccgaggtccacgacgacgaacagcgcggggacgaactccggtgagcctgtgccggtggattcacgcaactaccggtgctcccaagtggcagacaccaaatcagacccctcccgagcatttcccctcaaacaatttcaagaatggcgacctagtttactctggccgcagtgaccgtagaccatgcggacagctgaacgcgttcccggcgattggtggcggactagttcaatcggatgggtcgacgagcatcacgggtatgtgatatcactcaaacgagagagcagaggggacgagctaacctatatcgcgctggccacggcgaggtgtgttttacggtggcggaaaccgtgattggggaaactgagcaattctcgatccctggtggataatccggggcaaggtttgatgcaatagatgcgtgattaccctacggagctgtgggtgcactcaatttatagagcgcaacagcggtggcgctcaatttggcagagaagtgctggcggccggagggaccatgagttactagcgcgcgattagtgtccggttaccgtggccatctccccggcgatggacagaaggttacagcgggtcacggcgacacgatggaggtgccagggcacgtggcacaaggccggaaggcggcagtcaccggcgggcttatccaaagcgaccgtggtaacctgtacggtggccggagttgtttactggccggacttatcaacgacggcgata

SEQ ID NO: 141909 - DNA, 430 bp, Zea Mays
cggactagcacaataagtacgaaaagtcgaagtcttatccaaaagaccctccgcacaaaagtcgcctacgtgtgcagccggaatactagtacgaaaaaatcgaagcctacgagagcggcctgatcaacgaaagcacgcagccttcacacattacattggctcaaccttcggggtgatacccatctccctatagttgaacaacattatcctcaattcctcacccacaaacaggcttcgcagctctccctcacccacactcgccccagccggcgaggacaacaattcccacttgccagtcccgcccacacgaaggagaccaccttccacctcaccacaatgacgcctatcactttgcgacaactcactcaccctccgcttcgccaccgcccttcgccgcctatgcccaacactcgcacccggaggatcgtca

SEQ ID NO: 141910 - DNA, 480 bp, Zea Mays
cgctcgcaagctctcaatctctctcttcctctcctcggatttctttctccatcgattttgcgttggcgctcggttccagctcagatgtgacgaaacggggaggccgaagcggtcgtggctggtggctttgtactagcgatgcatgttgggatggctgtaacggccccgaagctcacggcgcgacgcggcatgcgcggggcgagagacgcgcggagaagacggacacattctgttgaagggaggctgacgaggcgatcccacgtactagtgacaaggaaagaatccgcgcaaggaaggagtggctgaccaggtgggtcctacctgtcggcacacagatgcggatgggctgcgcggtagtgaggtgagatgtggtttgggccgagcgcaggtgaatccgacccaacagacttcttttccctttttttcctggttccttttcccctttatttttagaattcacatttgaatttaaatttgttt

SEQ ID NO: 141911 - DNA, 1389 bp, Zea Mays
tcataataatctaaggtgaatatgcttcatgataatttgattttatttgaatgttaagtttatacagtaaatgataaggattactgtcttttggtcatgttatttatataacgactacttaagatcagagctcctttatctgttgggttgacatatgcacttgtagcccatattgctcatgagattgtatatatattgtcgtatccactactagcggtcttacgaaaccccaaggttactaaagccatggattagggtttgagataactttcaaatgcactcatgattcaattttctttttacctggtttgtgccgatcagaattaatgtctgcgcccttcttcagtttgttgtggcctaacttgtgaaacccttgctatctcacaacttccatctgttagacaatttattttcttccctagttacgaggatttcttctctgattatgtgccagcagttgtttcctccgtacgtagctgtccttgattaggtgtggacaattggttccttcctccctgactgtttccttttagcgcccagatcatctccccgattattgtttccacgaattcaggtggagcacgttctggtagaggcctattgttctcctgctatttagttgaatataagcaacatttcgcgctattatggcatcaagagattgttacgatcccgtgagaactcgcttttggtaatacttgcttgcccacgtcgcctccccgatgttgtgccgtcatgccacctagtgaccctctgcccgttttccggtgaccaacaacataccgaggatgcagccacataggagaaggcctgctagatccttatcgttgctgccgatgaggctgtcaaggccgtcactgccgcctaggatcgtggccgcacaacccaggacgctctcgcgagggaacgctaggctgctaccggtctcaagcgtgctaaggccgctgctcgtgacgctgccttccctcctctcaacgacgaccctgatgatgacgccgacgctagtgaagatttcaattatgaggccgctaccgcctccaacctccacgtggaggccgtgggcgtacagaacctccatgcccttgtgcctgtggttctggacatcctctccacccactacagtcgctgcgggatctcgtcctcctcgccctcgagcggtatgccgtcgccgaccatgtcctcttcgacgccctatttgtgccatcctatcgacgcatggacatcgtcgtcttgtcatgggtgttgtgcacgctctccctgagtttgagttcgctcgcacccccggcggcacaacacaccacacctggatcgttgttgaggagcaattcctcggtaatcgtgaagctcgcgcccttcatcttgacgccaaattctatgtctttatgcatg

SEQ ID NO: 141912 - DNA, 323 bp, Zea Mays
cggccatctcatggccgcctttcatccagatatcggaatagaatttcccgcccatcaaagtagcctcggctgaaggttccttcgtatcgtctacagagaagatgacttctacctaggttacaaccttaacatgttcacaaccagtcttctccaaaactgctacaacccctcgggcaccggtgaaggcacaaaaatccccacgatcgctaagtatttcttcaaaagcttcgacctcttcgccaatccagtgaataactccttcgggatctcctcggataaatttttgctctaatgagtatgcacccacctttgcaaaactatct

SEQ ID NO: 141913 - DNA, 373 bp, Zea Mays
gagaatactccacaatatgaatatgaaaacattatgtaatatcaagagtaacttgaagtgcaaaccacatggggaagagatagacatgttatctatcactaaggtttggttgcttgctaacaacctacattatttttggggtaagtctaacctttaatgattcatatgcttattttcttaataaggcaagacccacatagggtgtcatggcaattactcttggatatcacaccaaaaagctactattccattagagtttgtattcacgaatatcccatagggatgccacaagagcccctcaaaatccgatttatagagataacaacaatcaccaatgtcactcgacgatctttcatggcacaaaatacatcta

SEQ ID NO: 141914 - DNA, 338 bp, Zea Mays
tagcatacttcctagcatcttggaaagaaatattttcctgctcatcacaaaagcccaaaagtctgcacactttagcagcagagtcagaacgcaacttagggggaaacttcgcaaccctcctgctacgtcgtggcttgaaattgcttggcatcaactttctgcgcttaacaataagaggagtaggcaacagttgagccgtcggcaaaacgagatagtttctgaattcctgcaattggggtgacagcaccaattcctcaaccaccagtgtcttcttccttctggagtaggccttgaaacacagcggcttggtacttaactagcaactcagcgaaagcccc

SEQ ID NO: 141915 - DNA, 326 bp, Zea Mays
tctgcgatcttagagtcccccaactatgagaccctcatcaaaattgaccacttgacttgggtcaagattgagaaccctagtgcacccaccatggcccttatctctataggtggtcctttgtcgctaacacttcaattgcgtgtttgctttgttgtcttcgctatctatttcagagacgcaggttgagtgtcttgaggatgaggagttgatgcttatggttagttagtttgcacaattccacaacaactgcatgaactacaagcatgttgagggcaaggatggttgcttcaacttcagagactctaaccacttcattaccaactgcc

SEQ ID NO: 141916 - DNA, 564 bp, Zea Mays
taacacgccctgcccacggtgacagcggacaccacgggtaaccgaacacgttcccggcgatcctagggactctagctcaattggatgggtcagagagtatcaggagcatccaaggatactgaaacgaggactcagagggcatgaacggacctgagatgcgctggccacggcgaggtcaaaccgctcggtgttcttgagtgatctgggggaaatcccaaattggggagttctaggggatgattcgaggcacaagttgcttcactggttgcacaactacctagcggagcaggcggggtcggcaatttatagcaggcttgagtggtggcgtccaatttcacgatgatgcgctagcggccggagaggaagaaggtcactggcgctcggggttagtggctttcaccgtggcagctctcaggagatcaccgggcatgcacgacgtgtttcactatgacgtggtctagcgctttagcacgtggcgcacagcggtgagcggccaacggcggcgaggtctatcccggccgcacgacgagcaagtgggtacggtgaaactcatctgagaccgag

SEQ ID NO: 141917 - DNA, 646 bp, Zea Mays
atcagaattcttctaagtccaaaatcaccccttttccaaagatcaaacatgttcaccttgatcccaaactcaaaaccacttggcccaattgacaaagtggcgccaaaatacctctagaacaccctggaaaagtttgaacccaaccctaagtcgtttgacacaacttggcatagcttttgtctcggtttggacagctaggacaaaggcaacttctcacacctatatctcccaaccctgaccgtatccttgcttgggactcacatcaaaaaggtaggatttggtgcagggaagagaccgtacatgggtgttttgccaagatctgcacgctaaggtactccaatcggccgttgaaccatggcagaagcaaacacacacgtgttcgacgagggctgacactcgggggcacactcagagcacgcctgtgcgcgaacccccacgcgcccacggccacccagtgaccacgcccgcgctacggctataaagcccgccccagtgctcggctatcttccccgttgcatcctctgtactgcgccaaactccccggagctcgcccgtagctccggcgacctctccgcgacccgccagagccgctcgagggcaaccaccatggccgaaccatttcccgccctccttcgctcgatccaag

SEQ ID NO: 141918 - DNA, 1011 bp, Zea Mays
cgcgtaacaaccgggagccgacgtaaccaactcccgccgagacagctggccgatccaatcgccccatcttagcatatatgtggacgcaggtgccgtcgaccgcctccttgagttcctagccgccagaagccctagccgccgagagctagcgctgacagacgtgaggtattgccgccagcggcggtccacgtgagcaacgccgtcgggtcatcgccgaggaatcgtagagcttttctggtgcatgtgaagcgctcctgcggagtttcaaggctcgcgggttaatcagggcttcggaactcgtcgccggagttgactctctgccacgcgtcgaggccaggcgttacccacaaaatcctcggtatgtttccccccattgtgttcgccttcgttagcacatcgcagagcaccggggagcactagggttagtgaatcaggtccctggtcgcgctgctcaccggagtgcaccaccgtgagggagcagacgtcgccgctcggtgaccgccaggaaggaggatgggtgtgtgaccgtacatcggctgctcgaaggctcagattagattctggtagcgtttcaggatcgattgtattgggatgtttgatctgatcggagggttaggattgaagcgcgccttcattatatcatggtcgtaactctcggagtgaacgacatcatccacataccgattcatcgtctgcaataatcttatctggaccgcttgattgaaacgggtggttcagatctaagaataccctttcgcctacacatcaggttccttaaaacctgacccggtttgaagcgctgtccgcgtttcatgggatgttcgcccatcgggtgccgacacgtggacactgctctagagtcgcggacgcgaaacttccatccaatgacgttgagtgctgagcagttccgtctccctcctgaccttccctccctccacaccctccctctcccgtcacgcccctgcctcctcccccgatctcgctgtcgagcctgcgtcctctgcgtcgttc

SEQ ID NO: 141919 - DNA, 532 bp, Zea Mays
tggataacgtcggggaggggtaactcgtacgtggcaccatctcctgagctcggccggagttactcaccggcggccgccgtgactcagtgaattctgccgcggtggcgctcatgccgtagttctccctcactgtaccttctaccgacgtggttggcatgcgctagtgatgttgtccgtggccgtgtggtgatcgccggaccgccacgactataaatagccattgggttcacggcgaagggtgatcatcgcaaacacagtgactagatcgaagtcaaattcgcaccgccccctccaccttctcccaaatcgtttgcgcacggtgaaagcacagcttcttacggcccagtagcctcaatccccaaaaccaatttcaaccagagccaccgcgacgccgttttcccccaaattggtctgccgcatcgcaaagaacagcccgcccgtggctgggccactctagtgagttcctatccaattaaagtgttgtttccatgcctctgcgtgcttgcgaagctcatggtgacgtccgttcgct

SEQ ID NO: 141920 - DNA, 435 bp, Zea Mays
tgttggtgcatgtggaacggtgtgagcataaagagcaatggagctgacatagcatggcgtggtagagggcacgagtgtagggcgtggatgcacgcagtgctatagccgtgggggctgatggagttacaacgacatccaagggtatcacagatgcgagagaagagtaggtgacgaatagagtgaacatggcaccactacacaaattagatggggaagagtgtatctaagccctaatctggatgttgggtcgtcaaacgcagcactgtcgggccaacgagtatggtccgacacatgtgcaaaaagtgctagagagcttctataggccatcggtctgatgagtatcgttggatggtacgatggaactatgtagttggcatggtgcattgtacatcaccgtaagactagttcgatccccaattgcccatagagacactc

SEQ ID NO: 141921 - DNA, 653 bp, Zea Mays
ccctaatcctcaccgtccaaagcaatcggacggttccgagttcgtcttcccacacaccgatcagagcaacagcgcaggggccccaatgcggcgatgcgttcgtcggagagcagcccatgtcgcaacatgtccaaatccgaggtccctaacacaccaaggagggtataaggatgacaggtaaaggggattctcaccggttcatgaaagggggggtcgaccagtccggtcatcacgtggggcggacagcagcgtttcggcgaggaattcatcctccccgatcgacccgcatcaaccaaccgagctccgcatgatccccacagcactgtgaagcttctattcccgcgcccgacggttggtgtgatcgacgatgtgcggctgctccttgctctcagcatctctgatgacatgcggctattggctagggtggctacggctagagtcttggcgacaacgtgcgcgacctcttcttttataggccagaaaggataaggatcgtctcttcattgttgcatgcacgcgttggccggataaggactgtatatacatgcgcatggacatatgtttgcatttggaccctcggtgttgaagtatgatcgttatccaagcagtttgggtcagctacacaagcaggatttgggattgttttgcatgca

SEQ ID NO: 141922 - DNA, 464 bp, Zea Mays
ctccacagccctcctcacatctcgtctggtctctcggacgtttgggaatatcagtgaaggtaactagttgcgagacgggagtttctcagctagatcgagaggcgtctgaccgtgctaacgagtagacagagtgagctaattggccggtgactcaaatgaagtggttgaattgcagatcactagactcgcccattagattgtctgatctagtcaagcctttgcgtatttgcttattactacgaggcaatgacgtgtgtaaccttactggggatgggaatctccaccactagatcgagcaaatgtaaggcttgccatagcatgtcggtcgacggtgatcagtggcttaggcagtaaagctgtagtgctctgttctgatttgcaaacgcaaaggttaactactagcgttggttggttggaccccactggtgagatgaaacgaacgcagcactgacatttggtttctg

SEQ ID NO: 141923 - DNA, 520 bp, Zea Mays
cggtgtggctccgggtacagctcacgtcgcggctctgttccgcccgcccttctctgatgggtcgcgacgttcaccggcagattttactacagcagccaagtatttatatgagcttatcatacggactcttctgccgaggatgggatacagggaggctaccacacatattcagctttggctccttggtgccctggtctctcactctgagtttgacgtcgtggacttccttatttgtgagatcgaggacaccgttttggatgggattcgtgctcgtcgtcagttgccatatgctcactacttgtgccacatctttgcgcagctgattcagcctcctcggtttcagggcacacttgaggcctcacgcctcgtttttggatcctaccgtcctgtgcctgaggctcttgtgccagcttctgcgcctgtttttgactctcaggccgaggacgctgctcttcgtcagttcgatactcagggtacagcagctgatgatgatgattttggggttcctcctccgcctccg

SEQ ID NO: 141924 - DNA, 657 bp, Zea Mays
agaacgtttgactaccttacgtctatggatcatggctcgtgggtccttgttgtttttggaaggggcaggtggttggacgtctctaaagtccttcttattgtacctaccttgtacgacacacgtctagctaggagtgtgcatcaagtggtcagagggccataaatgtgtcaaccatacatagagattcatggtacctctgaaccgcgacgacatagagttttatcaaggttatacgatttacattgatctagcttagggcgacatcagttagatctgcttggtcgggatgactaggccgaggtcacttgggacgaccaaggttgggatgatcaggtcgggacaattttggtcgaagccgacctggtagatgtgactaggtcgaagcggttttagttgagggttgtcctagttaggaccacattagattgtgctcttctcttagaatgggcttttggggccatattgggataccttaatttggtatatgtacacatcactcataaagttattgggtcattccctaaccctatgcagtttaccgccatgagttgcattgggtggctgaacatgcaaccccagtaccccacaatcaaggaaagatcctcttccatctccatctccacagcaagggatccatcctttagcttagaattcttc

SEQ ID NO: 141925 - DNA, 355 bp, Zea Mays
gtcgtatcgtatgctggtggtgtgatgtggtggttaaccacctcactcgttactattatgtcctctacgtcgcccctctctggcactctgccttggctggtgtaaacctgcaaagcacgctatgttccctgttcaaggcctgaggcggctctttgatcgaagtggcagattccccatgctgttcgtggtgggcccaccgtctaggtgccgttttggttccctgtgcttgtgcataaatagggaaggaaaactcttggtgctggctctgcttaccgcattctcgcgttcaagtagtcgcctcctccttcgcttagaagcctccctaccatcgatcccccatgtctgttgagcccgc

SEQ ID NO: 141926 - DNA, 454 bp, Zea Mays
aaaaattgatgcaaagtagatggtacacaaccattagcatgtatccaatctcgccctagcaaaacattatacctccctttcacatccaccacaaaaaaggttgttgggatagttttgctgcccactgtgagttcaacagacataatcccttttgcttgtgatggatcccatgaaaacccactcagattcatcacatccaccacaaaaaaggttgttgggatagttttgctgcccactgtgagttcaacagacataatcccttttgcttgtgatggatcccatgaaaacccactcagattcatatttgtcttaattacctcactctccttgtatcctaatttagaaaacacggacaacggcattacatttatacctgcacccccatcaatcagcatgccccccattggcttcccatcaatgtgaccgcgaacatatagtggttttaggtgagatc

SEQ ID NO: 141927 - DNA, 609 bp, Zea Mays
tgtgacaaaacgcataaacgagagttcggtacgtaacttcatcaacgacattcctctccccaccatattgttcttcacctccactgcctcaagaacacgattgtttctgcagagaccatacatcaacacattgtatggcacaacactgcccttaacaccctcactttccatcctcgccaacaatctccttgcgccatccaaattccttatctcacagtaggcccaaatttcggccgtgtaaacatactcgtccaagtgaatttatattgaagcatttcatcgaacaggtcgcgagcaagagcaaattaccggatcttaatgagagcaaaaagtatctgcaaagcggtgtattgcttcatcgcaatgccggatgagagagataggcgcaggacggtggcaactcgcgggtgcggcgaatccagaggtacgaggatgcaagaagcgtggcggcagcggtggcggcgccaggtcggaaggtggcgagtttgttagcgtgtgagagatacgaaaacgaggaggacgcgaacggggtggatgacgcgagggagagaagtagggaggcagcgtgcggagaggatgccgaggaggaagtggacgaggacaggaaag

SEQ ID NO: 141928 - DNA, 426 bp, Zea Mays
ccagaactcaagactatccttgccagccaagatttcctcagcttctcgcacctctcaagcaaggccatacaagtggaaagggcaagggaagaagaaaaaggtcacctcaagagaaaattccaagtcctccaagctcagcagcaggaaaggcaccagagaatttgatcctttgggtttccacccaagggaccaagcttcaacaagccagctggacccactccgtcacgtttcagtcagcagggtcaaagctcctttcaggccccctcctttgcaagcaaccaacctccagctaatgcatgttggcactgcagagaccccagtcactacaagaataattgcccccagttgaaggcatccgtgcctacttactccaactcggtgaatggccccaagaatgccccagcaaccgcctccaagacaccctcc

SEQ ID NO: 141929 - DNA, 423 bp, Zea Mays
actgaggaatgaagccgcagagaaggacaaaattctactttccttggtggacacagtcaaggctagcgaagccaatcttaccgcagagtccgaagctcatagagccgaaattgaaaatttaaagaaaaagtttgccaagaagaatgaagatttcgaagtggctaacgcaaagaaggaaataagcgagtggactagcgcaaggttgcaaaagaatgtagatgagcttcgagaatcaaaggaaagatattacgaaaaatccttggattgtgccatgaagctaaatgacagttttgcaaaggtgggtgcttactcatccgagcaaaaaattattagaggcgaccccgaaggaaacatcgaattgataggtgaagaagctgaagcttttgaagagattcttagtgatcgtggtgatttctgcgcctt

SEQ ID NO: 141930 - DNA, 629 bp, Zea Mays
ccctcgtgtcatgattgaggcaaacctattgcaacctggtcttttaggatactattggaatggacctccggactcaatgacctcttcagtacagtacccctctaacatggatgcctcgggacgagcacaagttgatacatagccattcaatattgacatgaaacactcatacgtccacatttcatgcaagtacataggacccaatgcctctatttgtggcaccaagtgcaccataatatcaaagaacgatggggggaaacacatgcatcacaaattatgatattgtctccactacgaattcctgaagagatgctaactcatcacggtcaattaacttttgtgaaattctattaaaaaagtagcacaaccctatgattgccatatttaaaaacaaaggatttatagccttgatggcaataggtaggaatgtagtcaccatgacatgacaatcatgtgagttgtagctgctgactctcagagtctcaggtctttcattgacacaatactccgtatgctagagcagaatccagatgggactttcaagttcttgagccaaacacatatcatatgtttctcatctacattgagattgtagcttgctgctgggagatggtacttcccattttctt

SEQ ID NO: 141931 - DNA, 500 bp, Zea Mays
ctttaactcctcgtgagtttgaatgtgcctaggaaatgatgctagaagaatacaatctgcatgaagctattactctacgcaagttatatgaaatacggaaagaatggataccagcatttttttaaaaatgacttctgtggggtaatggtgtctacataacgcaatgagagcacaaacagattagtgaagaaatcacatgtagatgcgaacacccctctgcatgagtttgctaaacaagtgatgaaaatgttgcatagcaggaaaatgaaagaatcaaaggaggcattgatgagcaaggtatatcgtgtttgttatcaataatcaatggcatacatgtttatgtaattacgttatttaattatgatgttaacgtcttatagggaccaaggacaaccgatacgttgtataggttcgaagtgagagtctctagggcatacaccagagctgttatgaatagatttgaggaatcaatgaaatacgccactgcatacagaatattg

SEQ ID NO: 141932 - DNA, 391 bp, Zea Mays
cgagcgggctcaagaattcggaaagcggagaagcgctagaggaaaaagtaagagttagggttcagaactcaagaaggcacgttgacatgagtataagttggctccttgggtcaggtattacatctaaagtgccacatcacaactcggaaaactaaagaccacaatcgtcactcgggcattacctctaaaatgccatcactgtcaagcgcacggacaaactttcaaacgcacaaatgaaaagcaagcagcgatgattatgtggagtaacttcatccttcattcgtaataggggaagtaatacaaactcgaagccgactcattatgagtcagcctcttctacccttgtcactacattacactacattacattaccctactacttacactacac

SEQ ID NO: 141933 - DNA, 453 bp, Zea Mays
gcggcatatgggagtttctttactgggtcgacatcttttgaacctttccgtagaatttggaaacattgggcaccaccaaaaaccaagttttttttgtggctagttgcccaatgaagagtttggatagctgataggttgcaaaaaaggagtatggatcatcccgctgcatgtcgcttatgtgaccaggagcaagaaacaattaatcatctgctacttggccgtgtttttgcctgagaagtttggttcaaatttttggctagagtgaaccttccaaacatggcccccagcaaggcgaaagagctttcatggactggtggagatggatatgtacacaggtccaaggtgtggcgcaaggactaaattctctcattattcttgggatgtggaccttatggaagcatcgtaaggaggccttttgatgtattgacccttcaggaccccattcgttttctt

SEQ ID NO: 141934 - DNA, 639 bp, Zea Mays
ttgttccttaaagcccgggtgtgacatttcacctccaaaaccgtttgattttccatgtcctgaatttttggcttccactgccagtgctgtactcacagccctactgtaggtaaggtccaagcatgttgccattttccgctgaagcctgtcattgagtcccctcataaaacaattcttattttttagatctgtattgacctggtcaatggcatactgggagagatggttaaatttattgagatgctgcattacagtatctcccccttgctttaaccagatagactcttcttgtttcatatggagcactccctctggaacataatgctcccggaacgctagcttgaattactcccaggtaatctgatgcccagccggttggattgctgaaaaatttgcccacctggtactggcaagccctcttagccgttgtacggcgaacaggggcttttgcgtctctgagcatcgaattaacccaaacttctgttccatcactctcacccattcgtcggcttctaaagcttcttctgctctgatgaagagcggtgaccgagtctcagagaattccaaataggtagtatcacgcggtccttgaggaggagctcttcctccatgctgttggaattggttgcccgccatttc

SEQ ID NO: 141935 - DNA, 683 bp, Zea Mays
aatatttttgccatagccctttgtttcaatctgtttttccagtgagttttgttaagtttcagtccttagagtctttgtttagttgttgttcactctatcctttgtgtttcctttgagcctcttatatatatctgaaaatatccacaaaaaaatctgaaaaccctcatcatttccttcgcgttaactttgatcctatttaagttatagctgctggttgagttctttgttaagtattataaagtgtgcaatatcatatcagatctctgtgtttagttctataaaaaaagagtataaaaaagtgttgaacaagattgtgaaagaaaagtagaacgatcagtttgtttatgtgcacaagtgttgaaagttcatcaagttgttcaaccagtttgctattgtcatttggtgcaaaattttggttgggtctgatcgcaacacttgcattccaaccatactccttgatttgcatcaaatctgaaaattatttgcccgtgtgtttgatctacttacatcactcgtatcttgtggtcagcagtaggcagtgaacttctagttggatggttatttaactttacaacaactagaattcagattgcattccttgtttactattctccaccaagctccacatataagccatcgtaaccggtactctggtcttgtattcgcttaaccatcactttatt

SEQ ID NO: 141936 - DNA, 518 bp, Zea Mays
gaaggggtatgaggtgtgttctggccactcgatcaccaatgtagggttcagattagatgtccatttacaacgaaccagtatttaacgcaacccgtccaatcggagatctatggtgaggatctttaaacaacgagatcaacttaggtccgatcattcaccaatcaacggctgggatcaatcatgccgaagcagtatgcgctttctaatcgcgaccgctctcggccagatcaacgtctttgtgtggttctccctcgcagcaaccaataggtgcggtggcgcgctggccacccgcggcggaccatggccgtcgaacgcggtttcgcgctcccatgcccaaaactatgacctgatcgacgacaagtgatgcgggggtgacggcaaacatcaaggtaacgatcttacccgcagtggggttggcgacagagctagccaccacagttcggatccattgccgtgtgcaactccgacgaggaattgaagatgtcccgaggaacacccctttacggcgtagccccgga

SEQ ID NO: 141937 - DNA, 665 bp, Zea Mays
ccacgttccacggaccacgccttagcttttctgaaactggaccggagtgcatgcatgcacatgacatgaggactgaggtgaccggttttggagccagggttttggcgcataagataactaccaaaaatttcttgttgggcctatactaatctcctcgggccgcctgtctccttcggccctagagaaatgtcttagcgtccagttgatgatattaccccacctgctttaactaggtactataccaccatgaccacgtctatttaatttgcattttccccacaactctaatcggcgtccatcctaccaacgaattggtgttatcactagctggcttgcctcccccgaacaactttttagggcaaaagattgtacaagtgaaactctctcaatctagcccccacttgaactagtctgcatgcatgtagcaaagctgtactggaggtaataataatcggtacgtcgtaagcaatagaaaagacaagcacaaaaacgaatgttatgtggaatttcatgctcgatccgagcaacatcaggaaaaagtaagcataaagtaatgtaatttgacaagtttatttgtattgcaagagaaatgaacgaacctaaagttgggaacgaatctcgtgggccatccatgaaccctatgttctactcaaacaagatttaag

SEQ ID NO: 141938 - DNA, 556 bp, Zea Mays
gtcctcgccggagtttgccgtcaatcatagccgcgccacgtgcttagaagaactaccacgtcgcagtagatattcgtatgaggtctgttcgtcgctggaggcattaccccggggaacgccacgatagttcacgccggtgactcacctctcccctcgaccgccggtctccccctttcaaaattcggcaccaccgcttagcgcccttataaattgacagcacggtctgctccgctatgttatcaccaagccagagcatccatccctgccctcgattagccactacaaccgttgaatttgggttttcccccaaattggttgattgcgccgccgtgaatcaccccatcgcggctagctgctcccaggtccgcactcaccctccgtgttcgtattttagcaccctcgtatacttgtgatgcttgttgactcaactaaataagcttgacagcatccactcattgggaatgccttgatttggtctcggtgatcgccgtcatcgtgggcaggcaaatccagggccagattaacacaattaaagcatgttctaggttcacctcgg

SEQ ID NO: 141939 - DNA, 407 bp, Zea Mays
aaaaaagttcctgactacgccaccagtactcaagccaccacgccgagccacgccgaatcagccgacagaagatctgttgttatacatctcctgcacgactcacgtggtgagcaccgcgttagtagtcaagcgggtggaggaaggacatacatatccagtacaacatccagtctacttcatcagcaaggttctcggaccctctaaaatgaagtatccccaagttcagaaactactatacgcggtacttctaaccgctcgcaagctccgtcactactttgacgaccacaaagtcatagtagttactggatttccaataggggatattcttcacaacaaagaagccatcagaagaatagcaaagtgggcctgcgaactgggagctcatgacatagagttccggcctcgca

SEQ ID NO: 141940 - DNA, 331 bp, Zea Mays
caagtgcactcagcaagcgtcaagacaaaaaggacaaagaagccaaatccccctgaggtaattcaacgatcaaaaggagaatgcagaaaatgaaggaaatgcaagagcttcaggagtatagccaatagagtgcaaaatgctttaagtggtgttgtgcgatgtgtgcagcaataaatgcacgtgctaacagatgctcaaactgatcatatgcacaagatatgtaaagaattagcatttttatttagttttaagcatgtcaaaaatgaagttcaccactaaaacagtactaggcatagagtaagcaagaaatcaaccaaatgctagtcaaagg

SEQ ID NO: 141941 - DNA, 306 bp, Zea Mays
gtcgagaggcggttagggaacgatctgaccgggcgagggatcaggtaaagtttgtcttttgttttgcgttgtggaatgtgggtacgcgtgggtttgctgaatgagtgtgctgttgctgcagatggcgcgtgccgaggatgttgaagactttgggcatttgaatggcgcgccgcccgaggcggaggttaacccgatgctgcccgaggctgaggtcgacccggcattgcccccgaaaaccggcgaagcctccctcgctgcacctgcgtctactgagtctggtgaaggctcgttgccagcccctgcgcc

SEQ ID NO: 141942 - DNA, 303 bp, Zea Mays
cgagaggtcaaacgacgcgaaaacggcgtttgaacgagaaatagtgccataggaggtttgaaattgaaaatgaggcatgaaatgatttggaattgagccgatacttcacgaataggtttatatgggtaaatatgagtgaagtgtgtgctaggtttgattttagacaaagaaaatggaatttgggcgctcggctcggaatcgatcgctagaaacgaggatttgtgtaaaattgaagcctgggatatcggattggcgtgaaatttggcgaatatgttactggaggtattgtgaaggtgcctgaaa

SEQ ID NO: 141943 - DNA, 343 bp, Zea Mays
gctttattggaatgcaggcactatttacataaaagcaagggtgtaatcataaattcttggacctctttttaataacttttatcgtacaggggacaacaggtttatttttaaaatatatgaggtctcttttgcaaaaatgctcgggcgaagggttatcggttaatatgagccgctcagatctagatcaatggccctgatttaacgcgtgaaggggtttgcagatatctaactcaattagaccgtttcgatctcgacgatctaggtttaatgaagacacaatctaatcttagccatccgcaaatagatcaacggtccagacctatccccgaactggtacttgaat

SEQ ID NO: 141944 - DNA, 340 bp, Zea Mays
gaagcattttggtgttttgagctcaggaatggagtcacaactcacacacaatgtttctcagctctccacatttgagaatgatcgttgggtgggtacatagagccctaggcccaaaagatatgttggaaggctagcaccttttctacatctcatgggactgtcctgtacgccaccaatgtgcaccaaaccagatcgcgctctacgtcaaccgcaatgtcagttagccattgggagtttgtcagacttagcaacacaccagattggtccagtgtgtcaattgtgaacaacagactaggttcagtgtcttccatgtcagctagttattggggtgacacttgcc

SEQ ID NO: 141945 - DNA, 372 bp, Zea Mays
ggctcacactcaggaccaagggccctcgcagccaaggtgattcgtcaggggttttactggcccgcgataatttgcaccaccaaccgagtcaccaagtcatgcgaagcatgccagaagttctctcttcgctcaggcaaccctttgcaattcaccaagctcatcgcacacacatggccacttcaacgctgggggctagacatcgttggaccactgcctacagctcaagggaacctcaagttcaccttcttcgccgttgaatacttcacaaagtggattgaggccagggtagtctccacgataacagcaaagactgcccaaaaattcttctggcaaaacattgcctgtcgcttcggagtcccgtccgaactcaca

SEQ ID NO: 141946 - DNA, 755 bp, Zea Mays
tctgacgattcgtttttagaagcatttcctatttcccctcaaattggtcttggcacaagttcttggcggtcgggctgatgtctgattgagcggagggtagaaggagatgagaccttgcttcggtttttccggggttgttggtgatacaggacaatgaatctgttgcttttgctgaattctagcagagaattcagtttgggacagtagaatttgggcaaaacgtgccacctgtttgtcaagtttgcatgttgtaggttgtagctgcttactccgaaatgagatggtgagttacgaatttcatatcaatggattgctcacaacatttttcctctgatccatgcacaataatagcgatgtaatttgggggccaaagtaggtgtaaatctttggatggtgtgtgcagactgtagagttaggaaacgtgagaaactgatgtacttttttctttttgatttttgaaatggattagcaatgaagggcataaggtaatcaagacttgtgggttggttgtttgtaacatggtaatttttgtatgcagtcgtcgaccgagtgctgcatccatctgtggatgcaaatctaagtttcaagatgaaaagtatattgtttatgaaatatgcagaaatattgtttgtttaataaacatgattacgattttaattaatcatcaaaggttgatagatataagaaatttttaataactggttacctaacagtaaaagcatttgagttgccaataacattgcaagcaccatccg

SEQ ID NO: 141947 - DNA, 724 bp, Zea Mays
aaacaacatctacgttgcaacaaaagtcaggatgcggaattcataaattttgttgatgcaatgcatgatagccgagtgccccagtattgcatagttgattttatatcagacatgcatgatgggccagagaacgtaccgataactgctcaagatctgaaaaacatgtaaggaatcttttgttgttgactatgaatatattgagtgccatagatattactatagtaaatgtttggatgttcattttttgtacaacaattgtaggagggcagcaaggagacgtgaaaactgcgcaaatgatatagccaaacttctgtctttctttacggaatgcaagaaacagaatgcacaatttttttgtgattttcagctagacaaggatgggaaaatagtgagtattttttggtcacgtgcaagtatgcaggggggaatatgcagattatggtgatgatgtgacctttgatacaacacacaagaccaatatatatgataaaccactgggcatgtttattggagctaacagtcatctgcagtgtacagtgtttggatttgtgttgttgggagatgaaacagttcagacttttgaatgggctttcaattcattcaaaacatgtatgggatgcgagggaccgagagttatgctaacaggtatgtgatatgtgaatttgttatgctaacacatcaaataatttattgtgatagtcaaataatggtttgtgagcaattg

SEQ ID NO: 141948 - DNA, 487 bp, Zea Mays
gaaaccctcaccgaacggttccactccctggctacgaagggcccaaatgtaaacacttaatctaacaatagcattgggggtcagttgatgaaggtaaatcccaaacttcttcagtacaatagcaatcatctcattcagggggaaccttaggccagctttaaagaagcttttgaacactacaacctcattcttttccggcttcggaatagtttcctctccaccaaaacgaaccagctcctttttttgcttcactaaagtagcccagcttcaccatttttggaagatcagcttcagagatggtggactttccaaagcccaaatgactaggtttacttggcatcccacagttgtactcatcttcggaaccaacttcttcaacatcagcttgtgttgcttcggcaacaggtgtgtcctctgacgaaaccaacccagagcgcctcattgcttcagaaattggaacagtttcaacggtttcggtctcatctcc

SEQ ID NO: 141949 - DNA, 526 bp, Zea Mays
ggggactagaccaggggaaacagacggctgtaggcggcgccgctcctctccgcggcggtgaggtcgccggagttgaggctggcgcgagctagggtggctccggggtcgccggagttgcgcagagagggagagggcgccacgacgaactcgatggcagggaagaggccatgaatccacaggcagagaggggagaacggcggtgagaaagcctcgggcgggccggagtaactctggtgagccatttcggccacggggaggggacttaaggcgtgctaaggcctgggctagcttcagcagaggcaggggtgacacagggacctactccggggactagaccgagctaaatcggctggcctccgcgtgagcacggcgggccgccgcggccgagcaccggggaaggtgacattggctgaacatagggcgcaataggggaaattgggcacggagacgggtgtctcacctcgaggcggatctcagggaggcttggagcggtctccggcgagctggatggccgggaacgcgggcg

SEQ ID NO: 141950 - DNA, 592 bp, Zea Mays
agacaagtaggagtgtcgatgtcgtcggtgaggtttgtgaagagtcgaggtgtcgatgtagattgatgaatggcaacacttgccactccttcacctgagcttgagctttcttcatcagaattccattcttcaccaatgtgtgcttggccacatttcttcttcttgtagtggaccttgctcttctcacctttgttgtacttgtctttcttatactcctctttgccttcttgatccttcttgtctcgacaatctgctatgaagtggccggacttgccacactcattacaagctctcttctttcctttccttcctttgaaatttgttgcttcctttggcatactttttgaacgtgttgatgaacatatctgcctcttcatgaagatcatcacttgagctctcaatgactttcttgtgtttgtaatccttgcttgaagaagacttttttatgactcttgttcatctgcatccaaatcatttgtatcccttgcctttgttgaagcttcttcggactcacgatgttggattttggcaaacatctgatgaggagtaatctcctcataatcatcctgacctctgatcattcttgccaaac

SEQ ID NO: 141951 - DNA, 352 bp, Zea Mays
gtggacttcttcatgcagctcattagaataatcttccagatcattataggctagaaccaaatcctaaaaacagcctctcaagtggtcctcccgggcaaaagctgcctcccgagatcgcatggctgccgccaagcgttccttctgctccgccaattccttctgaagttgtttcttttcagccagtagctcaagaatatgggctgcgtcaagacaccgctcatagaaggacacgtcttgactctgctgcagctgctccacctacgtcgcaggtgtacgactgctactgcattcctccactgcacgtaaagccatctgatgcttgggcacacctcgtggtccaacacgcatgcgg

SEQ ID NO: 141952 - DNA, 341 bp, Zea Mays
ctcacttgaacgaccaaaaaaggccaaacaagtcgtccaaggcaagtaaaacttggtcccaaagaaatgggcaatggctcaacacaacgaagtataaaatggctagtcctcaagaagaggcaaaagtagggctcaacaccactaaccagcagacgaaaccagacccaagcacaaaatcagcgcaaaagctgaaatcaaagctagttcctctagaaagaggaaaatggcttaacacaactagcaaaagctccataatccagaggcaaatggctcaacacagctagcaaaagctccataatctagagtctctcccccctgagaatctctccccttactctccc

SEQ ID NO: 141953 - DNA, 543 bp, Zea Mays
ccagcctctgggaggggcgccaccaccgatgtcccagcaggagcagcatcagaagaatcctcagccagcaaatcaagcatagcacttatctctgcatcgctgggattcaggggcacctcaaaatggacctgtcgttcatcatcaggaatctccccgagcgaggcaaccaagacactaacttcttcagcagagggtcgcactctaaggcccaaactgccgtcagtgacaggtggattcgacacaaaaagggtgaaggctttgggaggaggtaggttccaggccgagtatgccactggggcaccaacatttgacaccttgcctctaaggatcatctcaagtcggttcaccaagtctgcagagggaattctcctgttggtaacccgagttgagtcggctaggcctcgatacagataagctgggtacgccctgtctttcaacggctgaatattcttgaagacaaaatcagcaacaacagcttcagcagtcagacccctctccttcagcaatccaacttcagccagcaaagcacctacctcagctacc

SEQ ID NO: 141954 - DNA, 339 bp, Zea Mays
aggtttttatcccatataacccacgctcctacttcgcctgaaaagtggccgaagacgaaaaagcggtggcgcggcttaccgacgacggtagaggtccagcgaagggtcgggtgaggtctaggggtctcttgcgatcacgtcgaggtgcggatcatcgacggtggtggtcggagatgggttggccgcgtgcgcaggcgatcgggctcgccggcgatgcgtgctccgacctgctcatggtggcagagtcaaattaaagtgctcggggatcttcagtgaaggtcagcggtgatgtgggtgcgaggaatcagaaaaagactcacatgcagcgtgtttggttac

SEQ ID NO: 141955 - DNA, 1172 bp, Zea Mays
ctactggccttttgtgacaacaccatatagcaaagatgtagttggtataatgctctccaagtttgctgcaatgcttgacttgtgttgtcacaatgaattaagagaaaatctcgctccaagttgggctgtcaggcgactgaatcaagttttagccatggtacagtgctctgttgaagatcagaccgccagcgtcaaaaatctcaccgccgatgacctcttcgccgggattcgtgccgcgggcgtgtggagttcgctcaccatgaaaagatctagtcacggatgtgtatgaactactgtggcctcgctgttccctgcccttcgcgccggcgacgtggccgtatggccgtcatcggagttgtcgtgcttcaccacggttgtgccacgctccgagcttttcaccacgtcgtcactagccgcaccagctcaccggtaaccgccgtagctcctcaaccggtgatcaccggaggaagcgccacggtgaaagccacccatcccttgctccagtgtccatattccctccgcacgccagcacgacccttgcgaaattggacaccaccgtcgatgggatctataaattgagcccccctcagtttcgccatgtattctaccagctattgcacccacctgcatcccaaaccccccaccagagaactcgaatttgggattttccccaaaacggttgaagaacaccatgaacccaacctcaccgtgggaagctctcctcaggtccgatcctgttgtctttagtcttgttctagcatcctcatgtgcccttgatgctcaccaaaccgtccaattaaactagaagcccaccaatcgctgggaacacgaactaatatccatggttttcgctgtcctcgtgggcagaacgaaataggtcaccaatcatgcaattgacttaggggaaatactccttaggggtagaatcaggtgtgaaccaaagattagcgtcggtcttcgccctctccggccggtatagctcaccggatttcggcttcccgtgcggagcttcgtcgaggacctgacgcggtgaaggaatagaacgtgaagggtttttctgcaatctgttagtgactcgcataaacagtgcatgtgcccacttgcggttatccaaaaaggactgggtctttctgcgaagtttccaccgcgggcgtaggcgcgcccgattttcc

SEQ ID NO: 141956 - DNA, 556 bp, Zea Mays
aactcaacacaagagatggcattagtagcacaagcactagtttcttatttagcaaccctttttttatgtggaaggcaggtgagttgctaaaaataaagaaacctcataatatggactaaatttcccttaatcccttatacacaatatattattgaatgacatagatttagatatgcatggtttttcaatgaagtccaaaggtctaatttaagacatattatggtgagtgtctaatatggaagaatcaaatccaaattaattagagagagataatacatcacatagttttgaattattgatcatatgataagattcatttttcttccaattggacctttatttcataatcaacaactgatgtatgtcctcaggtgcttcttcttccttagtggctacacaagtcacaaaggagataagattttaaaaaaatatgcacttaagattcagttgttaccaccgttgctactatctccaaatatgatttatacattcattatcgaacacccaacttgatccattgaaggagtgatcctgcaaaacaagtttaagcttcata

SEQ ID NO: 141957 - DNA, 960 bp, Zea Mays
atctccccacttgaatggaacatccttctttgtcaaattattgaggggtgcagcgatcatgctgaaatctttaacaaaacgcctgtaaaaatctgcaagaccatgaaagcttcgaacttggctcacatttaacggtgtaggccaatcctttattgctttaaccttctcttcatcaacctgaataccatctgcggaaataacaaagccaaggaaaacaacacggtctgtgcaaaaggtgcacttagcaatgttgccatacaatttctcttccctcaaaacaacaagtacttgatggatatgatcaagatgttcatcaaatgatttgctatagatcagaatatcatcaaaataaacaacgacaaacttgccaatgaaagctcgtaaaacatgattcattaagtgcataaaagttgaaggagcatttgtcaagccaaatggcatcacaagccattcatagaggccaaatttagttttaaacgctattttccattcatcaccaagtttcatgcggatttgatgataaccactatgcaaatctatcttggtgaaaatgatagaaccactcaattcatctaacatgtcatcaagtcgtggaatgggatggcgatatcgaacagttatagcattgatagcacgacaatcaacacacatgcgccaagagccatctttctttgggactaaaagaacgggaactgcacatggtgataaagattcatgaacataccctttgtccaaaagctcttttacctgtcgctggatttcctttgtttcttcgggattggtgcggtaggctggacgatttggaagcgaagcacctggtaccaaatcaatttgatgctcaattccacggagtggaggaagtccagctggtatctcatctggaaaaacatcttcgaagtcctgtaagagatcaagaacaacactaggcagcgatgaaggtaaatcgttagttgaaagtag

SEQ ID NO: 141958 - DNA, 408 bp, Zea Mays
agatgacatgcccctcataaagcggttttacgatttatatgggcactaatttagtatattggtgttgtgtaccagagaacaagtacctagagaaggtccaaaagcctttaaaagacggtatatctgtcaagtagctcggtgtgaaggtccaaaaggcctcctggtgacggaccgccaagccgcccggcctgtccgccgaacaaataccaccgagcaacccagcaagtcaggcccgccgaccaacctgcccatcgagcaacctagccatacgacaaccggctctcagacgaacacctctactaaaaggaagagcaaacctaatactatcgatccatcagcatgatgagacatcactaagccatacccagaccgtggaagtggtatcgaagagtctctatcaaacatgac

SEQ ID NO: 141959 - DNA, 407 bp, Zea Mays
tctggcttcggggtaacttcctctcccccgaagcgaatcagctcccttttgtcttcactaaaatagcctagcttcagtaacttagccatatcaccttcggtaatagtagacttcccaaactctaagtggctgggtttagatggcattgcaccgtactcatcttcaaattcatcttcttcaacgtcagcttgttttgcttcggcggcagatgtatcccctgatgttgccagcccggaccgcctcattgcttcggaaattgggacagtttcaatggcttcggtctcatcccctcacgatcaaccctggcagtggaacgcactctagccatttgattatgagtttctagaagtttttttgaaattgatgaccttttttcgaagcacttcttgtgacgaagcagaatccga

SEQ ID NO: 141960 - DNA, 918 bp, Zea Mays
attgggggaagcgtgaaattggagctctcgggtacacgattggaggcaatactttgtggttgggtgtgtgattacactacggagctgacggcgcgctcaatttataagaagcaagagcggcagccgggaatttggatgacgacgcgcggcagttggagaaggagaggagcactggcgcaagcgcttagtggttttcaccgtggcgctccctccggcgatcaccggatcccctaacgtgactaatcgtgacgtggtaaagtgtctggacacacggcacacggcagtgatcgatcaacggcggcgaggtcttatcccgatccaccgatgagcaagggggtacggcgggcttagccgcgaccgagctcgggctgatcccacgcccagatctttactttaccgtagttatccccccgccagtaaacacaaatcgtggcgacggcgtgaatcacggcgtagagatcgtcagcggtgaggggggatgaatcgatatcttcttcagttactgtaccatggcatacatctccggttgacctgacagagcaacttgaagctggattttctcctaaattcgcttggcaaccaatccaaggctctgcagcaaagttgtagtctaacataccatcttcatctttgttatagtattccaaaacaaattcttactagatcatgctgagaattgagctcaaagtctgctcaaacatactggcagtccaaattcagacttcaaacagcctgaaagcctaactttgggtgtatttatctccaaattcttcataacaacaatgtttaaccccttaaacaaagttgttcacccttgatagatctacaatattgatgtggtgacctagggcaaaatcccttttgtttggaagttaccaggccctaaagatgaacctattctctaaaaatcagacttag

SEQ ID NO: 141961 - DNA, 635 bp, Zea Mays
gttgaggcgatcttctccagctccacctggaacaatgctggtctggctttctccacgaatacgcagaggaagatgcctgtacttcatgttgtgcagctgctgccggtatgtgtggctgagggaccacatattctcctagcagcatcactgatcgaagcaacataggtagatagcagtgttagagactcatcagctgatagagtcctgaaccctctatcacctgcatccatcaccctgacatgaatacgagtgatgtagtagcaagcctgaggaggctcgtacactcgccttgtctcatataggggtcggacgtaggttcccaatgcatgcagaacatcctgcagtaggttagggaagtgccctctctcgaacattgaggtatgatgttcagtgataggccataaccccacgtagaggtcctgctgttatcttcgttggcttcctcgttgatgttttcctcatcttcttcttcatcgtcttcatcatcgtcactagagtcgttcgagtcgtcgcctccggaagcaggggcttggactgctggtgctggctgtgctgaagctgacgatccagctgcgaaggctagtgattctgccaatggggtgggtgtaggcagaaactccttcgagctgtccttc

SEQ ID NO: 141962 - DNA, 372 bp, Zea Mays
tgcctcttgaataagtttaggtccaaagaactgtactcctccagtctggtcctaatatagaggagtcctgcacttcctgccatatagagcctcgaatagtgacatcttcagattggcctggtaactattattataggagaactcaacataaggtagactcttgtcccaacttccaccatgtttaagagcacaagctcttaacatatcttccagtacattgttagtcctctctgtctacccatcagtctgaggatggtaggctaaactaaaattcaactttgtatccaagctctcatgcaacttcttccaaaaccgagaagtaaactgtgatcctcgatcagacacgatcttcttaggcactccatgtagaca

SEQ ID NO: 141963 - DNA, 547 bp, Zea Mays
cgaatacggcaaacaggccacattaccatataaattacaattacaaacacacggtgagggcatcacatattacattggctcaaccttcaggatgatacccatctccctgtaattaaacaacattatcctcaattcatcaccctcaaaaagcttccgaagatccccctcgcctatgctcaccccaatcggcgaggacaacaattcttgtttaccaacccggtctactcggagacggccacgctccatccccatacgacgacgcctgccacttcgcgaaaactcacccacactatgttttcccaccacccttcgccgcctacacccagtactcgcactaggaagatccccggcaccctccacacgtagcgaagtctctgacgcagccacatccaacgcaacaaaataatccaagccttcatccgaggactcctccgtccaaggaaacggactcccagattcaccatcagactcaaaacactcagacatagaaccaaacaaactatcatcggcaggcactacggttgaggccgccacaaaatcagtattg

SEQ ID NO: 141964 - DNA, 373 bp, Zea Mays
gcaagatcatccttcgataagaccgaaaggccttcttcaagcttaggaaatcccatactcttagctatttcccggcaaacagatatttctttgttgtctgggaggcagtataggaaatcatcttcgtcagtgctgttaaacactagagctcccttcggatattttaatttttgggcatagtgtctggcttcaaggatttcttcttcgtataattcttccccgaagcatgtcgataaatgtaatcaacatcttcggttggggcttcgagggcaggggattttgctttttctgccatgctggtatccgaagtttgctgatcagctttgtcttcaggcgcgacagccttcgcctcaatgggcgctgaagacccagc

SEQ ID NO: 141965 - DNA, 758 bp, Zea Mays
ggagggtggacgaggtgaagaacaattttgattgaaaggtcggattaccaacctttgtcgcttttcaggtccctggttggacctgtcacctccaattccctttgattttcctgggcctgcatgcttagcttcaactgccagcgttgtgctgacatccctgctgtaggagagatcgaggcaggtagccatctttctttgtagccggatattgagacctcgcatgaagcagtttttctttttcaggtcagtattgacctggtcaattgcatactgggacaaatgattgaatttgttgagttgcttgagtctcatgaattcttcctgcttcatgtgcagcactccttctgggatgtagtgctcacaaaacgccaatttaaattcgtccgaggtgacctgatgtccggcaggctgaatggccacataatttccccaccaggtactggcagggcctcttaactgctgagccgcaaacaacgacttttgggtctccgtgcagcggatgagcccaaatttctgctcaatgacctgtacctattcgtcggcttcgagagggtcttcgactttgacgaatagtgggggacgggtttccgagaaatccaagtacgaagttttatggggtccctgcggataagccctcccgccttgttgctgaaattgatgtcctgccatttcacgtaggaagcgggtgttgtcagcggtcgcggtgaccaaggcagcgatagcctcggccaacatgggcggtaccggcggtggattgg

SEQ ID NO: 141966 - DNA, 449 bp, Zea Mays
gggtgatgcagaatccgttgtgggcgcgcatgaactaatctcgggcggccataaaaggggcgtagccaagcccttatcctccctttactccgtcaacgcgcaattactcccaaccaaaaccaatctccaccgtcgccgtaagaaccatgggggccgagtgccaccgcacggggcaagccttacccctcgccgatctaggcgcattgtcgggccgtggagcatcgtaggtgcgtggtgaagccatctgaggtctcggcggggcaaatcaagaatcggggcaggaggaatcgctcatcggcgtgtccccgacgatggaaaccgcgccgtcccgtgggcagcctcttcctcgcctctatccccggtgagtacctcccctgcggcttggtgtttatccgcgcatcgtgtagagggcaataggagggagttttgggctctaatttggtggtttg

SEQ ID NO: 141967 - DNA, 281 bp, Zea Mays
agaagaacccgccctcagacaaaccacgcagcaccaagcctggggtcatgcgtggaggaacgtgacaggggggccgagcatgccgaaaggaaaccactcgagtggatccttcacttggcccgagaccgacccatcataaatgatcgaccgcattaactgcgcctagcggtgagccacaatggagacatcggtcagctacccactatgacctacgaaaccttcgaaccgtagagcactcatgacctacgagcccctcggactatggcacatttatgtctcgc

SEQ ID NO: 141968 - DNA, 710 bp, Zea Mays
gtgcccatgcccatccaccatcgtcccgaggtggccagttgccaaggtatgtgtgttagcagatgcgctgtcttcgtcttggtggccagtgttaggcacgcgatgaagcacggtggcccatttagatccgtgcctttttctaagatagagtagtaagtgcttgatccttctattctcatccaacctctattccccacatcgtgcctcattgatgatgcaattaaatggagtaatggattgtatgatttttattgaaaccctaatttggatttagttgaatcagctcccctcgggccctccccaagggcccaggcacccagctgcacaggcaagtgcactatttatctaccccctcttggcctatctcggcactaaccaagccaccggccaccatggggaggaagagggaactattaggaagtcttctgctagtaggaaagatggttgtagcaatcctccccaactcttttccttatagagggagcctctcactggggtgtaaggtttttaatgaggcagatcgaggaataaaatttagttttcctcaaatcttgttgtgttcactaatttagtgtatgatgatgacttatagtgatccctagtgctcaaaaaatgattctgtaattttttactggtgtgttggagaatataagctatattttgtattctgttatatattgtgtgtcgtgcctaggctagtacgatccaat

SEQ ID NO: 141969 - DNA, 435 bp, Zea Mays
gcgatgggcgcagtgccggggattagatctatgtagaactccacttctctttctggcggcattcttagcaattcttctgggaatacatccatgaattcttctaccacagatatgctttctgctgctagattaaacaccattggatccttggcgggtggctgagcctgacaagaaactaactttccttggtggtccgtgagaagaacggtcttatttgtgcaacttatgatgcccttatgtttggttaaccaatccattcctaagatcacatcaatcccttgggatggcaagacgattaaatctgccaagaacactaccccacttaaaagaattctgacttgggagcatttaagctggcacaaaaggtctgaccctggggttcgggtgaccaagggaatttctaggtgggtagagggaatgccatgcttttccaca

SEQ ID NO: 141970 - DNA, 668 bp, Zea Mays
gacagcaaggagcaggggcagggattctctttatcgcccccggaggtgagcaactcaagtatgcactccagcttttgtttcctgcatcaaataacgcagcagaatatgaagcactgatccacgggctgagcatcgcggtttcactcagcatcaagaatttaatggtgtacgacgactcaatggtagtcataagtcaagtaaacaaagattgggactgctcgtccgactcaatgggcaaatattgtgtagtcgtgcaaaagttggaagataaattcgaaggattagaattccaccacgtggaaagggatcgcaatgcagcggctgatgcattgtcaaaactaggatccagttgggcccaagttccacctggggtctttgtccaagaaatatagcaaccaagtatcacagattagatggaggaatgctacgctctgagtcagccagaggcagatcccaatgactggagagagccgatcatcatatacataaggaacgaagaagaactggatgaaaaggccgcagcagagcgcatcgcaagacaatcgacccactacaccatcataggggcttgctgtacagaagaggcgcaggaggagtcctcatgaagtgcattcacttggctaccgggaggcagctattagatgagattcatgtcggacagtgtggcg

SEQ ID NO: 141971 - DNA, 1027 bp, Zea Mays
catagtacatactacagagacagaggccgagtcgatcggatatgtgcatcttacccaaacacactctcttagtcattgttggcccgtatctaggcatcaaacactgaaacaaaccgtctggcggtgctctctgcgaaggcgcagacggtccacgacaaaggaccggacggtccagatctgggcgcaggagtgtctactcttcgtacgtccagacgatccgcgcctggggcttaaacggtttgtgatggcgcagaggatcgtcttcttcacagcagacctagatctcgtcttttgggagggccctgtcggagaaggagaaatcctcgggtgtgttttgtcatcggcaaaccattcaagacgcctctagtcaacgtagagccgaagagaggtgaaaatttgtggtagatagaggctaaactaggactaaactagagctacttttattgtataaagtaaaaaggataagtagcgttgattgtatcgattgtggggttcaactgaccatagtccttcatctatatataaaggaaggagatctgaatccattatagattgattctcgggttaatccctcaggttttgctaaaaaatctcgctagaatactggaaacttaactgattatgtgcaacaagctttttcaatgtccaactggtgcagggtcgtgggaacaagcaacatgcccagctagctggttggtgctgtgtagtagagtgtagagctttcgcctcagaacatacagtacagctccatcctccgtccatgcaagaaaaagctagctagcatgccagcaaccgacatatctgggaggtgtaccgaaccgatcgagcagttcgcgcgcggctttagctagctttgtgggctgtcgacggatctctcgcccatgcgtgcgtgcacgtacactgcattcggcacaagaccagggccctgcctctgccacagctagctcgtacgtgatgaagaaaagcaaggagggatggggagagcgaggttgagatctcgcagggcccggccgggatcggaaagggc

SEQ ID NO: 141972 - DNA, 298 bp, Zea Mays
tggagaacaaccacactactctggggaaggaccgcgacgacatgctgaagagtggcggcgcgggtcgcatggagggtggcggcgctggccgccgcagcgacgagatatgggcgtggggtttgtgccgccggaccccacgatggcggtggttgggggtggtgggtccgagacggacgcgacggagaaacccagcggcggcggcgcagagaagtcttgcgaggttgcggacgcggtagaggcgcgagcggtgacgtccgcctagtgtttgcaatggccttagtagcactttaggtcctcg

SEQ ID NO: 141973 - DNA, 368 bp, Zea Mays
ctttgtctggtttgttttgttgtgctgtgctggtgtgattatagttggtcttggcgcggacggtttgatgttgtcgtttctgcctttgttgtgttagtccggttgtacccttaggtgtcttctgcacggacagtctttgcggtaggcttcggttttttcgcacttgttgtgctagtccggctgcacccttaggcgacttctgcgcggacttgtcgcacgcgagggtggctagcgcttagcctcgcggtgacttcgaattggtcgaatgccgaagacctgtgtcacggtcttttttcgacatgtttttgcgggggatttttctcacatatattacatggctccgcctcgttaaaaacctcaccccccgg

SEQ ID NO: 141974 - DNA, 561 bp, Zea Mays
caaagatcttcgaaaagccacatttagcggtgtagttctaaaaacatccgaaacaatcactttcttctttctgacaatggcgtaaaggttaggagataagtatttgaaagctacattgccacaccatctatctttccaaaatctaatttgggtcccatccccgagcttgaaacaccctagacccaaaaacatgtgtttaaccttcattagacctacccaaaagtgagaatcaccaggcatatgctctatttgggtaaaggcttttcctctcatatatttatttcacagaattgtctgccatacaccatcctcattaatcagcttaaaaagccatttactcaataagcacttgttctggaggtcacgatttattatcccaaacctcccaagtcttttggaaagcagactatgttccacttggtaattttgtatttccttttgtgttcctcctgtcccaaagaaaacgggatctaaatttatccaatctagcgagtacctctctaggcacctcaaaaaaggataacataaacaacgtgagactcatcaagacttaaattaaca

SEQ ID NO: 141975 - DNA, 495 bp, Zea Mays
agcctttagagtatggtcgcttgtagaggagtgggaaatgccaaaggagactgtcaccaagtctggcgaaggtgagctggttcggttgagatacaccttcagatatgaaggtaagtttgatgagtcgaatgatgactggttgaaatgtatcgaagctacaagtgatgaactacttgggccgtattccaaagcagaagataacgcattatctgcagccttcgggagccgaaagaagaaaaggttaaatagagtttttgatgctattggatttatgtaccctgactaccgctacccaccacgggggcagaagagaaaaaatgcaccttccaggaaggatgttgcctcagccgccttaagcgagcccacgccgaagaggaaaatgatgaaggtccttactcaccgaccgcgctacattgaaccggccatagtgcctgaatttggcagtgaaacctcttcggctattaaagccaaagagcctgccctaacgcagaggat

SEQ ID NO: 141976 - DNA, 1051 bp, Zea Mays
cgaaaccaccccaggtcggcccactatcagcagaagcatgcccacgtgctcgcgcccgcggtagttttgcacagaggcccttggtttaataactaactcgaatcaggtttgtttactgtttcactgggccactgaccaattgcagaaaggccctccaacttctatttcttcgcacggctaggtccccgacgacggcagcgcacggaggagctccggcgagcgcgtagaccggccgataggggctatgactagcgctctccgtcgactaacacctaattcataccttaatcgatgtttcccctaacttaatttcaccaattgcgcactaaaactctctggccacggtgaccgtgagcagcgtggcaagatcatcgtgttcccggcgagtggtaatctcttagttcgaattagaggctcggtaagcatcgcagggtgaccagagtgctcaaacaagagagagtgagggatggacggacctagaaagggctggccgcggtgaggttgctcttcgcgatgttcttgaaccgaattggggagaatgcgcaattcgggcgtgctggtggacgatcgagggtgggagcgggtgctacagcttcacaattatatggcgcaactatccccgccctcaatttataggctccaagggcggtggccggtgaattttgaggaggacgcgcggcggcccggaggtggaagagagcactggtgcacgcgagttcgtggccaatggcgtggcaacctccccgacgatgatgggatggcccaagggagtcacggcgacacggtagaaagctaggccacgtggcgcgatgtcgggaagcggcggttctccggcgagctaatctgctccagccgtagggtagaaggggaggcacgggaggccgtcggagtggcgtccagctcaccggcggtgaagatttttactgggcgatacttatctgatggcgacggcgcacgaatcacggcgagcggcaatcgacggcgacggccaccggcgacgagatcttttggcgctggcggtcgatctgatccggttagggtactgtaccat

SEQ ID NO: 141977 - DNA, 361 bp, Zea Mays
gcggtggcgaaacagagagtgggtgagttgtcgcgaagtgataggcgtcatcgtggtgagatggagggtggtcgtcttcgtgtggacgggactggcaaacgggaattgttgtcctcgccggctggggcaagtgtgggtgagggggagctgcgaagtctgtttgcgggtgaggaattgaggataatgttgttcaactatagggagatgggtatcatcctgaaggttgagccaatgtaatgtgtgatgccctcgctgtatgtatgtaaccatgattttgtgtgatgaagctgcacgctttcgttgatcaggctggtcccgtaggcttctgtacggagtgctttggaaaagacttcgatttttt

SEQ ID NO: 141978 - DNA, 434 bp, Zea Mays
ggtggctttaatttggcaggagaccatcgaagagaagccctgggttaggctgcaagtgccttgtaacattatagacaaccttctgtttcaggcttccatcttagtgacacttgtttgcttcttttcttttcttttccgcatcctagttgaagtccagctgcatgcatgcatgcctccggacctgtgttctatctgctcttcaaagcaaagcgaccgagccgtatacctttttcatcatccgcaggaaaaccactttgcattgcattaattgattcgatctgtgtagaaccaacagtacagattggcccatcactcgacctactaacctaatcaacgccgatgatgacagcactcatcggccgggtatgggcccaagaaatgacaattcaacaacagacatattcttatgaaacaatgcgaaattaatcatgcat

SEQ ID NO: 141979 - DNA, 738 bp, Zea Mays
atagcttcgggatgacttagcgcagtagcccgagccatcaatttataggaagcttcgtcggtggcgcttaatttggccgcgccgtgcgggtggtcggagataaggaagaacgcgggtgcggtgaatccgtgtccaccgtcgtggcgagctcaccggcgacgattggacagccgtagcgagtcacggtgtcgcggtggaaagcaaagccacgcggcgcaaggccgggaggcggtggctcaccggcgagctaatccgctccagccgcaaagcagacggggcagccacggtgagtcaccggagttatccccagggggtggcttttacctggcggccttatcgggtcatcggcgacgcgaatcctacagcggtggcgtgaatcacggcgagcggcaatcaacggcgacgggccaccggcgacgagcaagggataggatcttctttagtttaacatttactgtaccatggcgtcccatttcagttaacttgacagagcaacttggagcatgatttactctcaatttccaatgacaactcctcccaagctctgcagcaaaattgtagagctataaaccagcaataattcgactatagggcttgaactcatttgagcactagatcaaggttgaattcatactcaaagttggctctgttacactgaacatctgaatttcagagtggatccagcctgacagccaaactttaggcttaattatctccaatattttcttaacaactatg

SEQ ID NO: 141980 - DNA, 982 bp, Zea Mays
cgaggtggatggcacaattctctcggttgccaaggaactgggcctcaagagcgagccaagcctggcgagccgcacccctgtgctcgcggacgatgtcttacagctcgatggtgagagtctcgaggatccaggagaggacgacactgtccatccggaaccaggagaggcgaggcgtggggcggttagtgagaacatggttgtcgagtgcgtagcgctacagggtgagggggaccaaatcccaccagcgagcgtaggcagatgaggtggtgtcggggacgacaggcaccagggaccggatgttctggacaccggcggcctgggcgtggagcttggcgaccaccgaagccacatagtcagggaccctcatcggtggcgggctcgagcggaggaccaccaagaaggagctcgacctcggctagctggcgagcgagagccttcgtagaaacacgctcctactcccaagcgagagccgcaacccgctcacgtgcctgagcgatggccatggacgaatgggcagcagcgacaacaacgacgagggtggaatgcgccacggacatagtcgccggagggggagggtctgaagctgtggatccagtctcgtgaggcccgagtggtggagggaacccgagggagatcggcaccccatcaggagttgcttcaagagtgtcagtcaacgtgacggacggcgacggcagggacgacgcaggtgcccctagagcacccttagtcaaagccaaggaaacagggcccacggccaggggcacccctgacacctggccagaggcctccccacacgcccggcagccccgcaggagacccccccgcgcctggagccgcgcgcctggagccgcgcgcctgcagccgcgatggcagcggggcccgcacctacggctgtgatgggagggggccgatgggcaagggcggggccctagtcgccgtgcgtcctggcaggcgtggtggctggaaggggaaaggaggagcg

SEQ ID NO: 141981 - DNA, 272 bp, Zea Mays
aaggaggatacactcatgtactggtggctatcgacaaattcactaaatggatagaattcaagcccattgcttctttaacttcagctaaggcagtggaattcatacatgatataatattcaggttcgggataccgaatagcatcataactgatctaggatccaacttcaccagctcaggattcttcgatttctgcgagcaaaagagctttcagatcaaatacgcctcggtggcgcacccaagagccaacgagcaagtagaaagagctaacgtg

SEQ ID NO: 141982 - DNA, 372 bp, Zea Mays
cgacccaagtcaagagctggtgcatcgaggggctccgtcagcgtgcgacccaagtcgagagctggtgcatcgagaggctccgtcagcgtgcttcgtggtgagtaacctcaagagcgtgcgcgtcggttgttcaccgaagacgacaacaatgatgaggacatcgcgaggggcgttctcatgtggtggatctgaaaccgcagatcgaagtggtcccagctagagcaacatggtggatctaaagccatagatctatgttctatgtttaatgtttgttacttcagcttgatagtagtgatgcatatatgtttttagtgaaattagtgtcgttacctctcatttcctttcctaatttactcatttccctcattgcct

SEQ ID NO: 141983 - DNA, 307 bp, Zea Mays
aggggagtattttccccaaactaattgcatctaagactaactatggagctctagccacggtgaccgaaagcatggcggttagcttgacgtgttcccagcgattaatggactcctagttcaattcagtggctcggcaagcatcgtaggcttaagggaaaacttgaacgaggaagaggaagaggtgaactgaccgggagaggggctagccgcggtgaggcgagttcacggtggcggaaacagttttggggagaaatccaaattcgagctctcggaggcacgactgctaacaattgctgggggctgggtg

SEQ ID NO: 141984 - DNA, 553 bp, Zea Mays
tgcatagggtaactcgggggctcggggaagtctaggtcatcgtgaattgctcaccggagcaatttgtaccaccgcggatcacacctcaccgtggacccctctcgtcgttgcctcgcatgttcggtaagtcacgtccctatgttcgccgccattccgacatcgtgtatcacatcttgggtggggatataagtgctcgatgtgcttgggtggggttcgccggcggtagcgccgcgtgcgagctggtggggtggtgatgccctcagtcgtccgattggatctagacgaccacaattggatcagaggggtacccctttgtggttctgatccgtgccattgatcagtcatccgagggctcgcatatgtgggaggcatggtcacgtgtggaccgtggatctcttatccaacgaccctagtggcatacccattcataaaagcaccagggtgtaatcttgaccatcgggcacgtattcggcggctgtgaatagcccataccccttcgtcgatggggttttgcaaaaatgcccccacagtatacacaaaacaacctgaagac

SEQ ID NO: 141985 - DNA, 425 bp, Zea Mays
gtggagtatatggggattattttgggagtagcgggagaaggaaatataaaaaatagaatcttgctgatgtggttgtatagtatgatatagtggggggatttagagagaagcctgaccagcaggaaaccgtggcctgcatgatgatgacagtgccttgccgcagagcttgttgctgcacatcacaagacgtgcacattaaatacacactgtacaaacacttgccccgtcgaagacgccaaagtcaacaaagggcgatgggaccacaatcaaatctactttcactgcccacgatgtcgcacgagcgtgaatatcgggcactattccccgctgcggtcactgtttcaacaactccagacaggtaatgcaacgactagccacgaccacggtctcggccttgggaagaaactccgcctcgcctgagctcg

SEQ ID NO: 141986 - DNA, 472 bp, Zea Mays
caaacctggagagtggagacagatactcgacaggagaccgtgtcgatgcatgcgtagttggattcatgcttggtttgactcctgatgtctcgtgcttgatgtgtttttgttccgactcgcttaattatggcgcgctgctgcaacatttgacgcacgggttctcttccttactgttcatcttctccaaccaccgtatgctcttcttctttgaggaaccctgccagtttgccctcacctccgacctctaccgccatccctatccggcggttcacctgccgccggctgtctacccctgcccacctctaaatctagtcggagaagaaaagattgccatctcaccgcctccgccaccaacaccgtccatccaattatcttcctctgcatacttcgcttatcgccgtttaacccgccacaatcaccggatccttccctttctaagcatggtcatagagggccctccaaaaactcgaac

SEQ ID NO: 141987 - DNA, 294 bp, Zea Mays
tccaccactctgcaacgggtaccctagtatttggaactatgatcctgtgggtccgagcatacggcttggcttaccaggctaaatcttgcaggtcctattgcatgaatcaaaggatgacagataccagacgatgggtcctatgggtgtgctccaaacaattcaagaccaaagttgtgtgcaggtccaggtcctagggctggaccatcaatttcttctttggtaaactggtatccagcctcgacacgtcgagcctacctaccagggggccaagtaccagggggaagttgatgacgc

SEQ ID NO: 141988 - DNA, 435 bp, Zea Mays
gcttctgctcgaggtgagcaacctgctcgtgcctttaatttggttatcctcactctatagctcgcgcgattgctcgccgaagcaatccagtgccgccgttagcccgctccgccgtggtctgcgccctctagtgcccctgcgccagcgtgtaggccatggccgagttcgccagacctccctgattgcgcctaggttagtccccgagcctctagttccccgccgtggccagtctgctcgtctccggtgcaccctcgccgtcggaccgagcgacgccaccgcgcccaagtcaggccggaccgttagatctcggtcgtttgtccgagatcggatgatttggacttaacccgagtagatctaatcctagcccttcgatcgggatctgaccgcccctctctcttcccctcatccacgtctctgcccctggcactgcttgtc

SEQ ID NO: 141989 - DNA, 636 bp, Zea Mays
gtagtcaatagtgtgattgaattgtcttaacactcgtctatttattggacctttgtttttctcccttgctctccttatcatgtcaaaatcacctaggatcaaccattccggcttcatcaaatttcgaatgttgcgcagctctgttaagaaagtcattttcttggtctcaggttgagggccataaactcctgtaaggtcccacgccacatcggatagacgggagcaaatcctaaccgataacgaatataccgatgagtatggaatggaaaccatctcaaaaaagtctgcatcgcaagcgattagaatcccaccggaggctccaaggctcccttatcttcgaaccttcggaataataaggccgcatttgggaaccgacacatttttaaaatctggataatgcacactatccaagaaaatccaatgtaaagttgataatgtagattctctatagcagcacattatccgatgcacagaaagcaaaacgtttggatcaataaccgataatgtttatctgatcacgagaaactctaggtaaccaaacacggcctaagtggagaaggtttcaccttttaaccatgttaccatattatggtttcttgcagggactttagtagttgaccaacaacatgccctcaa

SEQ ID NO: 141990 - DNA, 537 bp, Zea Mays
gcgaagtccaccgccaggattagatcatacccctgacaaccaaaacgcttcccaactgtcgaatccgatcccaatggtgcagtttagatctggctctaacccaagtgatacgcgcacagagccattgatccaacgatctgtggctaggattctatatagacgaagggggtatgcttgattaaatcatggccacccatctgtgagtcgacggttctgatctatcaggctgaagcagtacctgcgatctaatcgtagccgttcacacggaatcagacggtagcgagatcgtcgtccccgcggccctccatagccacgccggcgcgacccaatacccggcagcgccattgcaggggcaacccacccgcgcattctagtgcccgactaccgatccgaaacggtcccaacccaaggggcgacccaggcgaacgcataggcaacttccatacctcgatttatggcgacgaccgcgtggtccatggcgcaaggcagatctacgaacgcgcccatactccgacgaggaatcgccatggattcgtg

SEQ ID NO: 141991 - DNA, 399 bp, Zea Mays
tgtgggccaatgatgagcgaggggcattgacatgagctgttcctgcaatgacacggcctgcccgaatgactaatccatccatccctcttctgatggcaatcattgggaggaggcatcatccggccgggctagggagaaacgacagcccttagctgggatacagaaggattcgcgtcgtcggccggtgattgaagacggtgaaacgagacgatgcatgcagcagcttaattgggtatctgcataaacaatgaccttcgataggctcgttttagtcgttttaccatagcacacaaagccacgatcgaacgacccaaacaatgatgctagccagagtcaggaattcctggtgactttgtcgtccctttcctggcagtagctgcttctctcttagaaccccac

SEQ ID NO: 141992 - DNA, 470 bp, Zea Mays
ccaccccaacgccgaaggatgatgaagtagtggttttcaagagttttttagagcgggactgcggtttcgtctgaacgagatgataggagaagtcttgaaaaattaagaaatttatctttatcagctgacccctaacgccattgttaggcttagcgtcttcatctaggccctccaaagccaagggatgagcccagatgccgaagcgttctgcagagtgcatgaactgtactaccagacgaaggccagggtagacggtatacatgaaaattttggttgctataactttgcgtatcgcaaggatacgaaggctccagttctcagttatcgcaccaagtggccaaccggctagaaaggtgaatggttttatatcaaggctgatgagaagaagagggggaaactgatgacgatggttatgtgcccgctatctctaaacttcggaatgaccaggcccctgtgcaacatgcagctag

SEQ ID NO: 141993 - DNA, 309 bp, Zea Mays
tctcgacctacctgagaagattttcttcttaatataatgcctaggactgtcttacctcatacgggttgagattttttaaacgctagaatggattgttgtgtatgcttaaatgtcatttaggggcctatttgttttggcttctagccaaattatggctgtctgaattggcttctggccaccaaacgctttgtttcccaacctgcttttcacataatgaaaatcgcccaaatcaacgtgaatgcagaatcaactgagtcgtcatgacaggaggaatctgttgcttcctaaaccctaaaccgtgcatacccc

SEQ ID NO: 141994 - DNA, 637 bp, Zea Mays
cttgaactctatccacttagtgaatttgtcgatagcaaccagtacatgagtgtatcctccttgagccttcttgaagggtccaatcatatccagtccctagcacgcgaacgaccaagttacaggtatggtttgcagttgttgtgctggtaaatgctgctgttttgataagtactgacaagcctcgcacctctagactaactcggctgcatcactctttgttgttggccagtagaaaccagacctgaagaccttcccaaccagagtcctggatgctgcgtgtatcccgcattgcccagcatggacctcatctagcagttgcttcccagtagccgaaagaatgcatttcatgaggactcctgtcgcgctccttctgtatagtgtttccccaatgagagtgtagtgagtcgactgtcttgcgatgcgctctgctgcatttttgtcattcggctcatcctcattctttatgtatctgatgattggctccctccagtcatcagaatctgactctggctggttcagaatattgcattcttctacctgatctagtgaaatgctcgggtgcagtacttcttggacgaaaactccaggcgggacctgagtctgactggatcctagcttcgacaatgcatcagccgcc

SEQ ID NO: 141995 - DNA, 1813 bp, Zea Mays
atcaacaatgactgcgtttactgttcaaatttattttttaatgtagcttttgcttgtcctgattaacttgaaattgcaattttggactgtgtgcattgtatgtggctggtgcagtggtgagagctgtttcactaagtcatcaggttacgggttcgaaacagtcaatctgcatttgtgggagaaggttcgccccagtttattccttccctagaccttacttatgtggaagcctccgtcattgcatctgccattttttattgtatttggctttatgcattgactgttgcactgttgtaccatgccatcaaatttatctttgagagcattaccttaggaaaaactaaagaagagcaattttgtggaaaataagatgatgcattgatacctggaactccttgatatttcattgttttgtcatttctattttgttgtgggctattttatcttttctgttgggctcattctatctgtggtagagatgctgtcagcagttaagacaaaaaatgtaccaaggattggactgctttgagcaatacaacacagatcctccaaatggaagtagccaaagttgtttgtttatttgccattgctattgatagaacttacagtgcaaaacaaacgacaattgattggagttgtatgaattgattgtgacttttatggcatatttctgcattatcctgacttgttaaagttctaggttggatacttggaatttatgcagccttcgtgcaaaacaatgtatcagtatataggattatgtagttactgatctttggcaagggcttgaagttagatgtcttaatgactagagctaccttgattttttttcctgaaagacctgccttgatgattttttttgcagctttgcttctagatttgctgtattttagctttgtttctagattttctgtatccagaaaaaaatggtgtagtatcaaattatcaaaatttacacttatgttatgtgatgattgattgggacacctttaagaaatttatgagatcaaaataagcaagatattcaaggtcatttttaattagtcaataaatagttatgatgttacaagcctactcttcatatcttcaggtacattctcaaaccatccttgctccctgtcaggaataaaaagatggattgctatttattatttctttaatgttcctctagagaattggttgaaaatgacgtgtacattgggaaactttgtcatgcaccatatagcactttgcacggtccattagctcacgattcaaatacatgaatgggatccaattgcttgttggttagggaatcttgaggggttgtcggaattggtgttagcacttggcaaaataatggtgcagagttgggtttgcgttgcgtgtggtgctggtttacgctgcctagttcaaaataacaaacatgactagtccatttggtgcatgctgagcgagccatgctgaacctggttgatccctggaagctgctggggcgtcgtatgactgacgatcaggggttgctttaaagcacaggtagacttcaagttctgtttcccgcaagttgccattgcggtcctgaaatgaaaaaaccaggtgtgggaatgcggaactgtccatctacaaaatcagtggcagggatcctctcattataaagttatctatagagagcaaggacaagaaagaaaatagatatcttggctattcttttgtccagctgggcaatcgacaaggtgatgaacgcagcagttggacagaatgagtaaggctcgctgtattcattatgctttgatatactgtaagcagatctttggtaacttggtcaagttctatg

SEQ ID NO: 141996 - DNA, 635 bp, Zea Mays
aaattgatttttgtactgataagaatacttcaaatgaaccaaactgctctttctagcattctgacttgtatcagccctagcatccttcgcatttcccactcggtagctaaaggccataccttgaaagctatgtgctcttgcaataggtctcttatgccgatgtagctgtgcacagcgttgaacgctactaggcaggcttgagatttttccgtattcacaatagttggtctctttaacccgaagctggatcgaatgggccaatggatcacatccttcacatcattcctctgacccaggtcattcttcacataaaagcattgcttcatccacgaacccgaccatttcttcctgaaatttggcacagggtatcagacatctgatgagtacacgaaggtgtagcatccaaagttgttgtgatattgcacttttccagtggccttcgtctgataggacaattcatgaatattacaaaaacaatcggcatctggttctagcccttgacttcttatggcccaaatgataattccatttttgtaagcttcaggcgtaagctgatgaaggaagatttcaaacttcttcaagatttcaaccaacatcttatgcagggggaatcgtagcccagcttgaagcttcgg

SEQ ID NO: 141997 - DNA, 306 bp, Zea Mays
tttccctacattagccacaacagcaggggcaaaatcttggatacaagacccatccacccaccgatctgtccaaaataaagtattacacccattgccaaccagggtaacaattgaagaagaaaagaagctcttgacatgctgctgaataggaaattctagactagaccacggcttgttaggatctgttttttccaaccataaccatttagcttgtggcgcccaactttggtacagcaggttagaaatcccaagcccaccgagatttaaaggccttgtaacaatgtcccacgaaacaaggcaattacc

SEQ ID NO: 141998 - DNA, 563 bp, Zea Mays
ctatcttctggcaatacttgtcatatttatacagatcacaaaagtctcaagtacattttcactcaagttgaattaaatatgagatagcggaggtggctggaactaatcaagaattatgatttagaagtacattatcatccgggaaaggcaaatgtggttgcagatgcgctcagtcgtaaggaacatttgtgttatctgtcgactagttcatttgaaaccacaatctgtcaagaaatggaacgactgaatctgagtatgttccaaccaaccctactagccaatttgcaattggaatcaactctagttaaccaaattgtggaagctcaaagaagaggtgttggaataactcatatcaaggagcgtatggtaatggatcccaatacgtatttccaccttgataacaaaggtattctttggtttaagaatcggttagtagttccaaaggtcccgacattgaggcaacagatacttgatgaatctcatacctcccagtattccattcatcctgagagtaacaagatgtatcgagacttgaaatcacgattctggtggaccaagatgaa

SEQ ID NO: 141999 - DNA, 813 bp, Zea Mays
ccctgaaccaatcgacgccgccattgctacgctcgcggaaggattgtggccgccgccgttgacccggccccggtatcgccggtgggtggccagggtggtgtcgggattgttcatcggcgtgtggggatcgtctgcgtgaagtattgcgctcggtgacctgtccaatcatccagaattgctcgccgttgtcggtaatccgccgtgctctgtgggcagaggtctgtgccgcgcgattcacagtaagtcctccccatttcgtttcgccttactcacagcatcgtgttgatcaccacgggtagagggattagcgcccgatgcgtcacattgggattcaccggtgaggtctccgccgtggaggcctgtgcgccgccgcgcgcgactgctggggttggtgtagctgggggatgaactgggggccgtcggatgaccatcgtacggctgcggtttgagctggaaaacgattggggttgattagatctgaatcgttggatcgtgatccgactgtcttggttagatccgagcacgcgttactctgggatcattcggaccgttgatgttggatcgggcggctctgggcgggtactggttcggccgagatccgatctaatccgtgcccttggcaagtgatccaacggccagaaaacatccgtacccccttcgcgggtcaatttttataaagagaccctcacctctctggaaatcaacccgcagtccagaccagtggcgcgctgtgtcttggagatcttgcgggttagcccctgaacttaccagtaattgaggcccgatccagaattgttttaaatcaattaaatg

SEQ ID NO: 142000 - DNA, 364 bp, Zea Mays
aaatagttgtagtaacgaaagacaagttaatatgacgcaaatgattcatgatacaatacaacacatgtatgatgacacacctatggttgatggcaatgctcctacgaaagggtcctgtttggatgcagcaaagttttataagatgattgaggaatcaaatcagctgctatggacaggatgtgagttgacaattctaactttattggtgcttctatttaatataaaatcaatgaacaaatggacggataaatcttttggtgatgttcttgacattcttcgtatggctattccaaatggacaacaactccccatgaatttttatgaagccaaaaaaattatttcaaaatttggattagggtatgag

SEQ ID NO: 142001 - DNA, 495 bp, Zea Mays
tatgaaatgtgaataaatacatacacagagagatatggcacgagacgggacgatcaagaagtcaaatgacgtgaaaacgacgcttgacggataaatagtgtcataggatgtttggaaatcaaattggggcacgaaacgatatggaattgagccgatacttcacgaataggtttatataggtgaatatgagtgaagtgtgtgcttggtttgaatttaggcggagaaaaaggaatttgggcactcggctcggaaactatcgctctaaacgggaattttggtgaaatttaagcctgggatctcggattggcgtgaaatttggcaagtaggttactggaagtgttgtgaaggtgcctgaaaaatttgggttcaattggagcatttttggctggtttgggcatttcaccgagcatgtggcgtgcggggagctagggttttggtgaaacggccatttgaggtgggaataccctcccgaaggagctaaaagcttgcagggat

SEQ ID NO: 142002 - DNA, 600 bp, Zea Mays
tgggggggtctcggctcttgaaatcgggtcgtggagtgtcgcattcacctggggaagccgtgtgtgccatcaatttgagttgtacgccgccaggactcgagcaatcgctcgtcgcactgcgattctccgccgcggtccgctcttcgtcgcggccagggtcgccgtggcatcgaacacaggtaataagcctatccttgtcttcgtagtgcatcgcgcattgtgtagcagcgacgaatttgagtttggatcgccataggcgcggaatcgagctcgggcgaatcacggcaatggcgtcgcggcggtgcgagctcatcaccggcgcgaatttggttggggaacgctgtggctgttggatctccgatgtgtggcccggattaagtcgtcgcgtaccggttgggttgggattgtgtggaccgtccgatcggaatcccgtgaccctggttcaatctcacttcattaaaccgcgaccgtcggatttagatccgagggctacaattgcgtaccggttcagatgagattcaatctaatctgggtcgtccgtagcagatcgagtggatgagagttaaccgtaacccttcggcctcgtgcgttttgtaaaag

SEQ ID NO: 142003 - DNA, 373 bp, Zea Mays
tggtccccgacaaatagtaaaaagtgctagcatccagtgggtaagggccctctgtttttggagatccgatgcggccacacccttcacacccctcaggtacggccctattcacaactatgaaattcttagcagtgcgtactcgatgaagtgcagtagctagctcaatggcatatatgaatcaagtcttttctacacgaatcacaaatgtactcacaggaagcacgtgaatagctatatatttccgtcaggtttcagttctagaggatcctgaaattgagaactgagaacttcaattcaaagctgtctgattgtggtcctgccccttcgtgatggcgatggatcctccactcaagcctatcgagacacgccaatg

SEQ ID NO: 142004 - DNA, 443 bp, Zea Mays
atgatacccgacaaataaagtgttgctttctcattgcctcaatccaagtcacttttgcattctgactagcaaacgcattagtccataagttatattgatcatcaaacaccaaaatcatttattcaaataggtcgggtccatttttcttacaaataacaacagaatgagaaggggggaaagtgccctgaatggctcagatttatcaactaccggcgtgaacgttgcactttatgatggaagcacaatgtgatctccctaccccctacacccaaacaaacaataaaatagcattgtacattgctctttcagacagacatgcaacttcatatatgcaatttctgcgactgaccatatagctggttgcttgctaaggcacaggccataagacagatggctcactttacaatacaaatggcaaagatgatatcattattaaattgttg

SEQ ID NO: 142005 - DNA, 462 bp, Zea Mays
gtcgggtccggccattcctaacatgaattttccagtgttcgatggaactaatcctaaactgtggaagcatagatgtgagacttatttcgagttctatgcagtacctgtcgaggtgtgggttaggatggctaccatgtatttcgagggatctgcagtgttctgggttcagtccatggagagtaggattagggaaatgaattgggaatctctgtgtgctgcccttagtgctaggtttggccgagaccagcataatatgcttatccgtcagttttatcacatccaccaaactgcctcagtagctgaatatgtagagaattttgatcaactgatgcaccaattgctagctcatgagaatagtctaactgcaaatatgataactgcacgatttgttgatgggttaaaagatgagataaaaactgttgttaccattcagcgaccgtccgatttggatactgcttgttc

SEQ ID NO: 142006 - DNA, 537 bp, Zea Mays
cactcgcaagcccatggcacaacaaattaatgctatagccatgttcgtgtcaaaacgttaacacggtgaccatatcgttaacgtacaagtcaagcatctcattacacaaattcaagacatgtcgaacaaaaactactaaaagtcaccaataatctaattaacaaatgcatcgtctgtacatagacatccacgatccatacacaaattggggtgtttgcttcctctcgctgtgctcgcgctcactacctctgttgccctagctcccgcctccgcaccatcagccgctggccatgcacccacctactcacgatgagtttttatgcactattaatttaattggtaaccgttggatatgacttgttagggaaaagatccacgggcccttggagtccacaggtaagagagatcgcatgatataagaacgtccgaactactacgggccacccatcagcgagggagtaggagaatcgtctaccttttgtgtgctaagatcagatcaagcgtttaagccctttctccgtgcgtgtttatccatct

SEQ ID NO: 142007 - DNA, 419 bp, Zea Mays
aaataagggggatagagttccccgctgattggtagtaatgggtactcgggatgtagtaattgatgtcatcatagagatgaattggttgacaaagtaccaagcaggacttagatgtgataagaggattgtgaggttggtgtccttgttaggataagaagtattggtggagttgatcttgtctgaaccaaggaagggaaattgtcaccagatatctgtcaatagtgaggaagtcaatctgcttgaagttatcatagtagtatcggaattcacatatgtgttccttgaggagttaccaggcatgccacttgagagaaaagttgaatttgccatagagcttatcctaggcacaacccccatttccaaaagagtctacagagtgtccggactagagttggtggaactcaagaagtagatcgatg

SEQ ID NO: 142008 - DNA, 568 bp, Zea Mays
caccggccacgttatattgaactggccgtggtgcctgagtttggcggggagacttcttcagctgctgaaccaaaggagcccattcctcctacgcaaaaggctgaagatccggctataatgccgaaggtaccctcagccgagctagttgagtcgaagactgataaagatcaggccgaagagccaaaaattgaaggaacaaaaatgttagaaattttaagcccttcggcagaagtaacagtgccgaaggcacaaaaaagttttgcagcaactcccaaaagaagaaggatggcaaatgtactagatgtgttagaaacagtaaaggctttaagctctactccttcagggaaaattgccgaggcttcaaaaatgcaaaccgaagccgaaataaagccgaccgaaattaaagctgcaataagccaagctagtgccgaagctgggccttcagagctcgccgagaaaaaacctccaaaaattgaagaaaaggcaatagaagaaaaggcctcagagaaaacttcgcctgaaaaggttgctactcctggtcccgaagctttgaaagagagcattgatt

SEQ ID NO: 142009 - DNA, 537 bp, Zea Mays
ataaaatgcttcctatatcgggggaaaaaattcccgtgccgtctgcttaagttgtggctatttctagttctagcttgcggctgttaactctttgctgttgtcttttgtaatattccctaccttcttagcatacttggagtcacttccacctgctttcttagctcttagttcattttctcaaaaagcagcttttcgaacttttcaaatgcctaagcatatacttggtcttggagtcacttggacctgctttcttagctctcagttcatttttctcagaaagcagcttttcgaacttttcaaatgcctacactgctcaacagcgagctgtttatttcagctttcttagtacagaagctagcaaaaaaaaaaagtttcacctttcaggatgatttgacccatggatatgcttgttacgagttccaaatagacggaattgcgtttcagcctttcaggacggtttgcagtagaaacatagcgattgagtcgtcatttatggctggtaggggcgtcaatgcaaatgcaaatcgaataagtgtg

SEQ ID NO: 142010 - DNA, 992 bp, Zea Mays
aagaagaagaagaagaactgctgtctggatgttgcttgtgtttttgtaactgacaggaacacctagagaacgcgcgctgctgaactggcgccggaggctgcagatcattcaggggatcgccgacggcgtgaagcacctccacgagggagaagggtcgtccggcaacgtgatccaccgggatctgaagccggccaatgtgctgctggacggcggatggcaggccaaggtggccgacttcgggacagcaaaattgctcgtcgctggagctaccggaactcggacaaggataggcacagcgtaagaaagatcaccgcagtgggcttgtcttcgaatcagctcgctctttcttcagtgctatatatctactactaatatttacatcatcgtttctttttcttcttactgggaactcactctgttcctgaatgttatggtaccaagtggatacatggctccagagtacgttcagagcgacggtagcgagacgacgctcaagtgcgacgtgtatagcttcggagtcactttaatggagacactgagcggacgaaagaactgtgacacgccaggcctcgtctcagaagtaaagaccatactgaactacctcggccgttcgccatgatttctcttcaattcgatagatgaacaaatgaatagcaagaactgtcattgatttcttgtaggcctggagactctgggtgggccgctgcgtcacggcactccttgatccagcggttgcaccggcgcctgccaagcccgagcttgcgcaactgcgcaggtgcatccaggtcggcctcctctgcgtccaggagaagccggacgagaggcccgccatgtccgcggttgtcgagatgctaggcagcccctgctcggagcttgccgagcccatggtgccgacggtcgtcggcaatgcagccttggctactctcctggaggccgatctctccagaccgacggtgtacgagacaatcgattttagataagagatgacgcgc

SEQ ID NO: 142011 - DNA, 582 bp, Zea Mays
taaacgtcgaatataatgattatcggaataactatcgacttcactatacaaacaagatttatcaaaatcaatactgacagtacttactagcaacacgttaaacctactttatgcattactaactcgatcggacaacttatgtatattaaccaattcaacgatatttgagacacacagtcagcaaagcactccacacaatatttgtatcaagaacttgagtatttactacacgaagtgattacttcatatttatgcacataacactacatgagatggggtgtttttaacaaacactatacgcacaatcacaacaccataatacctcaaacctagacttcaccacacatcgcacctgttaatgacacaaaatcaatgtgactaatacaatgttcaattcatccatgagcacaaacaactaacagggatagcaatgtattttaccaaaactaaatctgttttaaaacgaaatcaacgatgctttccggttctagcattttaccgaacacccgatgagcatagtacaacttgcctctcttcatacacctaggattcctcacctcctcacccttgcatacacaaaca

SEQ ID NO: 142012 - DNA, 969 bp, Zea Mays
tcggcgcccccatcttcttcgttccctcaaccgatccccctgctgcgcccctggaagcaacgccaccaaccttcttgcgccccaagcagccgcccctgcctgcactagctcctgcggcatctgcacagatcttgctgccccgcatcttcctactccctgcggccatcaatggatccgaggcaagcccctaaggttcgcaggtcctcgctcaaggctgcaattggtgtgattccaggaggccgacctagtttttgccaaacatcacgtggaaacaccgtagatggcagcaccatgtcacaacctgtgcccgttacagcacctgcatctacaaatcattcgacccccggcattgttgatcctgactggatgttacctgattataggtatgcattgactgaattcttacatatgttcaatgacgatgattgtgtttgcaccacctggatgggtatatatgttcaatgagaatgattttgtttgcagcacctgcaatagttgttccctattagctgatacaaggtccttggcatgtctatatattacttttttttgcagtaccatgtcctccacaggcaactacttcacaaatttgcttaaccaagatggattacattctttagggtcgggggacaatgtggagtatgattctgaattctcagagtcaccgcttgcagctgacatgaattctcagacaaagtcaaagggtcgatcaaaaagtttcagtgaagaggaggacatgttgcttgtgtcggcttatctaaatgttagcaaagacgctattgcaggacgagatcaaaaagatggtcgtttttgggaaagaattcacaagtactattatgacaacttatcttttgactcacatcgtaattgtgcatcattgcgacatcggtgggggataatccaaaaagaagtgagtctttttcaaagttactacgaagccatagaaaggaagaatgaaagtggaaagac

SEQ ID NO: 142013 - DNA, 559 bp, Zea Mays
aggaggtttggaattcgaattgaggtatgaaatgatgtggaattgagccgatacttcacgaataggtttatatgggtgaatatgagtgaagtgtgtgcttggtttgaatttaggcagagaaaatgaaatttaggcactcggctcggaattgatcgctcgaaacagagaattgtgtgaaattgaagcctggaatatcggattggcctgaaattgggtgaatatgttactggaggtgttgtgaaggtgcctgaaaagtttgggttcaatcggagcatttttggctggtttgggcgtttcaccgagcatgtggcgtgcggtggattagggttttggtgaaaaggctatttgaggatttaaaccctcccaaagggagctagaaacctgcagggatactcaagggatacataggaacacctccaaccacatggattcacaggaattcataagattttgaattggatcaaaggggtggaagaggagtgctcattaggcattgaacagagagagaagagagaagagggaggcagagctgctgagagcacctagaggcggggtgaat

SEQ ID NO: 142014 - DNA, 371 bp, Zea Mays
aaattatacttaaattccaattctgaaaatggaaaacaacaaaatagtgtaaactgtgcgacccagccgaattcagcccaacaagccacgtgtgcccgctctccccttctccctctcactaagagtcggtccccgcctatcggcactgacccctcacgcgtcgtgccttagtcactgatgcctaggtcccagttgtcatcaccgaccttccgctccccctctctgttcaccagcagacacaccactgccaatcttgcccttgcgagaccagaccaccactccctcacctgtcatttggtgacggagatctcgcgcattcacctcggtcgttacttcccacgtttcctccccagatgcccgctccacaattc

SEQ ID NO: 142015 - DNA, 338 bp, Zea Mays
gcagcgaggcttgggggtaggtggcgacgacacggggggcggaggtcaggggacgtcggtgatccgaagtagggacggtgcatgccatgcttgccgtaattctccggtagcagccacgaatcaaccagcatcacctagcagacgaagcaatcaccagttgaagaatcatgaatccaaaggtctgctagaattctcgtcacttcctccacatggcccacaagccgaacatacgagaagtcgaaacctcatgtgcaacgccagtcgacttccatgactgaggaaaaaacttggaacgcctagcgaacagacaaggctacaagcacaccaaccgagtgtcg

SEQ ID NO: 142016 - DNA, 275 bp, Zea Mays
gtgacaatccccaatgatgggtcagatgaagcaaacacttccatgccaactgaccctgggtgacgataatgaagcctgacaaaagtaagctgggaggtgtagggaccaccggtggaggcgtctgtcttgcggatcaaaacagattgaccttcgtggcaccaagggaagatgtgttagttgcttcttccacaaagggcgcaaaaagatcgaccactggtgaatcgaagtgagctccatccccgaaggcgtccagactccctaaccccatgctcctg

SEQ ID NO: 142017 - DNA, 638 bp, Zea Mays
aggcagagaagcagccgccactccgtccgtgagccaaggaagcgaggcgggtgggtgtgacggatctgaggcggggagagggaggtagagttaccgggggcggcaatgcgaagagggaagggtggaggcacaggggcggcatggcgctaggcgaaagcttggccccacgccctgattcagagccaccgcacgaccgctctgagctccgccaccggattcggcattttagagggagggatacaaggctcttggtgatggcttgcaacggagattgaaggggctggatcttgggacttcgcaacatcggtgtgttgggtcgcgtagtcgttgggacagggccggagggggatctgttctcagagttgctttcatcgaagagggagcagtggggcgacccttccctaccatggacgacggcggagtagcaccgaccttcggatttctctggaatcgccgtgagtaggtgagaggccgaccttatccgttggcatgggacgaagacggccaccaagccatgggtgagagggatctggaatcttcgcagcgccagactgagacttcacgggcaaagttgttggaaatgtttttcagccgttggattgcgatcagatggacgaaggaaaaaaggacgacgtgga

SEQ ID NO: 142018 - DNA, 518 bp, Zea Mays
cggagttccacatcgctttgaaacttcacgactgtgtcttgtaatctacagtgtttaatctgaggaatggtggtcgatatcgcccatagttttggttggcttcaaacttagtttgtgtcttgcagaatttttgaagcatttcgttcttgagttcttcccttcccttctcatgtggacttatggagaacaatcgatttcttgtttcgctggtgctattgggatttgttggtgggtgaaatttactcttagggtcacttcttatgcctagatggttctctttgtggttgtgatcctctctgatcttgttttgagttcgtcctagaaaaccccaacaaaaccccactcttctcgtgtttttgaatctgcgttgtgttttttgtgttgctcaggttggtacttcaacagtagacatcattctccccacgcaaactttctacaaagttcgagatctttcttggcagtttttattgcctggcactaccaccactatgctcggcactgtcggacctcaggcaggc

SEQ ID NO: 142019 - DNA, 440 bp, Zea Mays
tgacgctgacactggctagagcgcgtcctgtgcaagctagctagttggtagacgcggctagtacacaccacacgccaccaatatttgcatgctagtgcaagtcagctagctagctagctagctcacggcggtggccaatactctagacctcaattactgccacacgaagcggtagctagatagagtacgtgcgaccacttcgaaacgtatctgtccggagcggtagaaatctgtagcgtacgtcagcgtcgtctcggagacggagaagtagcgtgtagctactattatactacgcgtactagatgccatccgtgttcgctttggccaatcggggcaaggccgtttttctgccatacatcacgtcgtcatcgccgtcaccaccattcgtgacttgtgtagtaggtagtagtatacccggaggccggagcagatgcatttgc

SEQ ID NO: 142020 - DNA, 642 bp, Zea Mays
cccaggacgaaaatggttaggaccatcatactggaacttgcctcttgccatcgggcgacctgagccagcgtcccccatcttgcctccttgagccggcggctgcgggttctgcttctccatcgtccctggtggcttagccttgactgctgcagcgtaggatgggaatcctaagcggcgagtactggtactgggagctctacagagtgagaatagcgagaaagactttttgaaaaaggccacaagaccattaggcggcttgtagggcctgtatcgattgaacttctgtcgaggctctaatccgtaattactgcccaggcccacaggctggcgctctgttacacactgcgactgtctaccttcttcttcggggtactttggtccgctaacatgtggaccccccacactgtttgtcttcctcctcgggttggtgggaggagtagtctgaggtcaagccatgatatgccatgttctcgcccgacgactcccattcaagctaaccgaagcacgagatggacgacaaactgcttcctcaagcatatccccgaacgttatagccggcgaacgcctaggtcccggcaatgggccctgccaagttcttgagcagtagttttggcgactcaccgatctgccgctcgacgaccc

SEQ ID NO: 142021 - DNA, 701 bp, Zea Mays
cgaccatggccttgtcctcaacgtccttcgtgagcttaatggtcatttcaaagatatctggcttcatcatcatcatggacgtcccttcccctctttcttataggcacgcaactacctccttattgaagagctcaccatggcagcagttcctctagccatcacacttcataatgcggctactaagcccagcagtgctcggcactatcccctgcgcctctatctttagcttgtacgactctcccaccctaaccactattcttgccaccactctctcctaactccatcggcggtgtcaaaccgacgatagtcaagcgaggtagctgtgacactatgcctgatgacccgttcgggggccaggccaccccatggcccaatcatcatcaacattggatctagtccatcaacatatgctctaacccatgattgttgtccctcatgcatcctcacaaccttatcattggggcccaacttctgcactaggcccaacagctccctcacacgctcctcgttgggctcaatagtagcaccaggcccaacaattccactatgtgctcctgcctagagcctagccatgatggatcgatgcctttaatgggcccttcaaccagtaggtctatacaaccctacttagagatggcaacatatcagatttgaatcagatattgtaattatccacctgcaaccatatctgtggttgcaac

SEQ ID NO: 142022 - DNA, 334 bp, Zea Mays
agccaacctgtcagctgtccaacatctatcctgctcaaccagccacataaaaattttgcatttcccttgtgcccaagtcttccaaatccgttcagccggcccaaactcaacagctccaagaagtagaacctggtaggcagaactagaggagtaatcccccgacgcgctgaacctccaaatatgcttatcaggaatcccaggttgaagaactaagccctccagcaagtcacagagatccaaaacctgcaagcgccctaactgaaagcgcaccccttatatcagccacccaattcagatttgttagagcatcttttaccagccttttggaagcgac

SEQ ID NO: 142023 - DNA, 567 bp, Zea Mays
atgatacagaaaggacaatattttcagcttgtgcaccttcctgaagtagagaaaacttggagtcattccattcatcactaacaaacaagccctgtaatctattcttatgcttgtacatgcttgccaaagtcaagaatgatgttgcaaatctagtgacacctggcctaacaaggtccccgcctagcttttctctcattaggccgtgaagtcgcccatgcttgtataggaacctcgaaaccttctttgctatattgatgcaagtgttgaactccttgatcttgtcaatatcctccaacaacagatccaagcaatgtgttgcacaaggagtccaaaacatatgggaaattctgtccattagaattcgccctgctgctttgaaattgactccattgtcagttaccacctcgacaacatgttctttccccaggttcattatttgcttctccaacagatctgccaacatattggcatttgctacctcacttgaggcatcaacagaacctagtaagtaggtccctgctggactgttggcaaggaagttgatcaaatgacgttgtcttgtgtcgg

SEQ ID NO: 142024 - DNA, 324 bp, Zea Mays
gcactttgtaaagcccctacattatttagcaagtgttcactaaagcaccatgcatgtggagagctctaaaatgttgtagcaataccctacaacaacttcccaagtccttccacattaaatgagtcaattttgggagggggatatatatatagccccacccagtcaatatagttgttgggtttttgttgaccttaggctcatcctgatagtccaaccgccagcaccgtcaatggtcgactgcaagcaacaatcatcagctttgtctagtcccatgtgtcgatcgcatggacctagcggtctagcaatgacccgctctattgactc

SEQ ID NO: 142025 - DNA, 314 bp, Zea Mays
ctcgagttgttttgacactcaaccatagtcacacaataggtggtgtgatggctatgaagtcatgccatcacttcactatataatccaaattaacaaaacaactttaaccgaactcatcaactagcccattgaattctaaccccttgacatgatgaaatcaatatgacaaaccactaaagaaccataattaaatctctaccctccatgattcattaacttgaacaaatatcctagaagatgatattttctaagacaagacattcatgttaccattcaataggagttcacataaggaatactaatagctctcgtcg

SEQ ID NO: 142026 - DNA, 728 bp, Zea Mays
gttttgttttggccaggcggagaatgaggaatacagttatatttgcctatttggatgcaaaaaggggtataccttttcaagtatcttggaatcccaatgcattttaggaaattaagtaatattgactggaaagtagtggaagacaaaattgaaaggaaattaagtagctggaaagggaaactgatgtcggttggaggtcgtctagttctgttaaattatgctctaacaagtttggtaatgttcatgttgtcttttttcgaggtcccaaagggagtcctagaaaaatagactactttagatcacagttcttctggcaaggtagtgattacaaaaagaaatatagacttgctaaatgggaaattctttgccagccaaaagaagtagggggtttgggtattcagaatatagacgtccaaaacaagtgtctgctaagtaaatggttgtttaaattgttgaatgaggatggtttgtggcaaactttgcttaggaaaaatatctgagtagatacacgctcacaaaagtaacctcaaaaccaggtgactcccatttctgggcaggtttgatgaaagtgaaggacaccttcctaaatttaggttcttttatcttgaaaaacgggactcagattaggttttgggaggaccgctggttggggttgcaacctctaatgacccaatatccatcgttgtataatatagcgcgcaaaaagagtgctactgtagcgtcggttt

SEQ ID NO: 142027 - DNA, 373 bp, Zea Mays
attgttacattaatagctgacccaaaaaataagttatcttcggctcaaggagtcgatcgtggcaaaccgcacaggccgatccctgcaatccaactggaatttagcattcaacttattactatgcacatgcatagtggtacattgacgtcaaaaccctttcctgcatggttgcatgtcaagctaggtggcatgtcctaaacccccgtacccggagccgtggtcaggagggacgatcgtagcagcaagtgctcctctggtgtgtcggctgccaagacgaccctagcaggttcccacgacgacaacaatatatagtcctgatgactctgaactaataagcgcttactaacttacacttattcatctaatttattac

SEQ ID NO: 142028 - DNA, 376 bp, Zea Mays
gacctatggtaatggttggcggaaccaccggccgtttatcgtcggcaacgcctgttgctggatttgtgggagcaagacgtcccttttctctctgccgcccctctctctcctttattccaaatccttgttcctaaacatagaaactagggagcagtataatgctcaataaggtaactaatactaccattacaaaattgagagatacttgctactaaataagccgcaactgattactttccataacctactgtttcctaaagtacaccctgttcggttgggccatatcattttcacatgtcattcaccatggtcaatcctctagcttctctagttcttcaatccaagactcaacgaatgtccttcattactcttagac

SEQ ID NO: 142029 - DNA, 592 bp, Zea Mays
cggtcttgggaagggtggtcaactactttccgtggacgaatcgtgctccagcacctcggaatttcccaccggacttcgttcggcggcgaccgtccgccccacgccgtggccggcccccttcgcgacccaatcaacaggtaatacccttcccaattgattcactgcatcgtcccgtaggtatttccatcgtctgtgcgcgctttagggcatcgggtaggggacaggaccctgtaattccgccgccgctgcggtagaccggccgcgccgccgtgccatatgtgcgggggaaggtgatgatggttgtgccattggattcttgcccaacggtggagattagatagggagataacttttcggtggattggatccagaccatccatccagatcggacgggtgaaaagcaatcgcatgactttaaaatcgagggcgtcgatttgtgatcggacgatctagagcgcttgctggtttgtaatggttaagatctaatctgggccatccgcgcctgatcgggcggccgagatcaaaccgtaccccttcgcgggtcacttttgttaaagagccctcggactttagtgaaatcaacccgccatcc

SEQ ID NO: 142030 - DNA, 335 bp, Zea Mays
gagttaggatgcctttttcttttgcctaataaagagagagctttacgaattactcaagaaagaaatacaatctgcagcaactagatgctcgacacacactggacaattattgcaatctgcagtatgaaacatccattttgctagctgggtgagctcgtgagtaactgaattctgctccttttgtgtgcttgaggagagataggcatgtgcgtctagagaggacctatccctgactgcgaattggacaccccaaccctcaagaaggcacacttgggtcagattgcaccaacatcatcaagcacctgatcaaactaactgctcagagacccagctat

SEQ ID NO: 142031 - DNA, 807 bp, Zea Mays
aaagatactaccttatccttatggattcatcttgccctcattagtatatgtatcccactctagaataacaaccatgagctaatccaaaatttatttagatcttatctaatctattatgatcaaacctaatgtgagtcactcaaacctgattagctaatgctgaggaaatacattagaccctgccttataaacaagtttgatatcttagatcaacctaacccaacccatagaatattgatggattgcataatctgtctatcctcacctaacatcaaacaaacttttgacctacatcaatctcacccatatctatcttaaccatatttcccaacccgatgacatacactaaccttgaatcaatgagaccaagaccggagatgaaaagatcaacatcaacaaggaagaatatcatagtcaaagcaaatctcgacatgaatcaagacttaaacatttcagatgaagtcttttccttgcaataatctttcttgcctcaaccggtccggcttatatcatacataatatacctatgccctcctgatcacccactattgagtatataaaacaaatgagactatggacttttgaaacaattatagactaaaagttgaattacaaacttattgtatcccttttcttacaaatctcgaggacgagatttctgttaagggggtaggatttgtaaaaccctaaaatcctgatttaaggataagtaaaactttcaaaaaaaaattgataataaataattaagtaatgttaaaagtttggaggttcagaattaaatataaactttaacactagaaattaaat

SEQ ID NO: 142032 - DNA, 281 bp, Zea Mays
gcaatctcaagtctgtgcaaaatttccctggccaagctaagctgagatttaatatttccgatccttttatgactccacgactgcaaagcctttgcaagccttttcaactttagagccattctttccaagggataagaaaacatcactggctgctcccaagaggtagccaccgtctccaaaaaatctggaatcttagtccaaaaactctcaaaatggaatcttcgcttccccttgacatcctcattaagatgcagagctaagggacaatggtcagagagctc

SEQ ID NO: 142033 - DNA, 496 bp, Zea Mays
agcttgtatcgagcctgcaagtgccactagaaataggacatgaagatgcaaataatcctcaccaaaataacattgaagttaaacagacaagcatgttctttaccttaggttgccagcgctcatactgtgaatgcaacgtttttccaatactttcaagagctttaagaggtgtcatagagaaagggtctgaaaaggaaggaataggtctatgaacataacacaaaccaactgcaccaagtgtaataagttaataacagtaatgaagtgcaaacctatcaacaaatataaattaccatcattgcctaaagtctggtaacacttgcttgacattataaccatcccaaggactaataaataagtttatatatccatggccacagccaataggtgcagtatcttacattagaaaaattcacttcctttacaattaaatgtcaattctcaacttcaaattttaaacagatggaagattcctctaaaaactattgagaaaaac

SEQ ID NO: 142034 - DNA, 921 bp, Zea Mays
ccccaggcacatgaagaacaccctgaattggtgggccgtcaacctcctggggcccaatcatagggaggtcacccaaggcaaggggggcaggggcattaaagttgggcaccggccccacagccaccagatcctcagggatctgcccattctgaagcaaggcaccatgaatgtgaccagaagaactatctgaggacaggtccgaataggggttgctgatttgttgctcgtcaggtggcaggtccagatgaggctgctgaacaggtggaacattaacaatccattggtcccaatctccttgaatgttgtctgctggctgagcttggaaattgtcttctggcgggaaaataagatcccagcccaccgccggcacaagttgacccaaaccaaaaaaactcaaaagggagctgctgaccatcctccgggaccactggcaccgggtccttatcttgaggctgacccccagcaaagtttgttggatgatctcacactgcaccgtccacgagtcaccaataaagccatcagcttctgaaaaaacaatgaactgcgggacctcctccagagacgtgacccgcaccctgagcagagtcctgtaaacattgcgtctgtcctcttcccacaagatcaatctgccaaaagagccaatagccgcctgcaagtattctgatgaacgataatccagagggaatcccaacaacataagccagcattcccgattaaagtaaagggctctatgattccaagcatcattatgtcgctgagcagtgaaggaagcatcgaggtactgttgcgggccgagcagaacaagattgtctctttcaagaacgctgctaaactgaaccaaaacctgacccaggtgcgaccgctggatatctcgcaccccaagccgtctgtgctccacaaggtattctctaaccacatccc

SEQ ID NO: 142035 - DNA, 312 bp, Zea Mays
cagggatcacaagaacagctaacggtgagtctgtgactctcgtcaagtactcagatcaggtcacacaatgcattaaccctcgcgatgcggccaccaggcaggacagaaaagcaaggaagcgggtgtcacactgccgccaggcaagatagggcaaagctgtgcgtttagaaaagcaagacgtgaggtgatgcactgatgctacttgtcttattgttgttgggcctttacaaactaatacttaataatattcactaatcactacatgggatgaggccccattaatctggaggcccacgtcaagggcactcgtcg

SEQ ID NO: 142036 - DNA, 490 bp, Zea Mays
ggtaattttggatatcatatgaattttctatgaattttataagttctagtatttattttctcattaaaaaccatttctgatattatttattcaattcctaggatctctgggctgcgcgtatattaaacagaaacacaggggctcggtgcaaaaagtcctaagactcggtgcacagtagaacgggatggcgggttattttaacggaaaccagaggtctcttatgcaaaaatccaagccgaacgggtatccttcactcagagctgtccgatccaaaacggaccgccaggattagcccacgctttataagaatcagtaaacaatcctgatcggtggatcgggctcctacggctcagatctaccatatgcagtaactcacccacgaccgctttccggccgccagatgcggattgaacggcgccgagcccattacgcgaatcggtatgcacatgatctaatcgcagccgttgctggccatccaatggcgcacgat

SEQ ID NO: 142037 - DNA, 293 bp, Zea Mays
atggcacatgaggtaaactcccttggttgattttgtcatgcttattgttgactgggtgctgaatgttgattcttgttcgtaggaggagaaacgagcacttgcagctagggatggcagtgggtacggatatgggtaaataaccgcggttatttacccgtcggatacggatacggtggattttcatatccgcgggtacgggtatggatactatatggtatccacggttaataatttcgcgagtatggatatatgctatccatatccgtcacccgttgggcatatgacatgtggac

SEQ ID NO: 142038 - DNA, 357 bp, Zea Mays
atggcttgggcgcttggctcatggcccatcacggcatcaccgttgtcattagtcacgtacatacgcacatggcccatggcctgctcgctgcccgcattagtacttagaataatacttgttggctggctgcaacaccatgcaaacgaaaccctagaataatacttgttgcccgccgcccgccgttggactccctgctcacctgcgcaccgctggctgctactcgcagcgccgccgtcgcctgtagttgatggcacccaccggaggagcaccgtataatacgacctctagatctgtcccagcccctcgtctcttgttggagccgccttcacctcgtcttccattaatcgttggccaaac

SEQ ID NO: 142039 - DNA, 697 bp, Zea Mays
ttcttgaaccaaagaactccttgttcatttgtcctaagatccggaagttgctccttgcgagctctttccataagtctggctgtctctgcgtccaggcgttgagccttgcatatgagatcttcttgcatcggcttgacttccaggctgccgttgtctcctagacatgcatttagctgagctgattccttcttccaatcttctaaaaagttggtcccctttatcccgaaaggtttttggctgagggcgtccgctaccacgttggccttcccggggtggtaatgaatctcgaggtcatagtccttgatcaattcaagccatcttctttgacggaggttgaggtctgctgagtgaagatgtacctcagactcatgtgatcagtgaagatgtggcatttgttcccaatcagatagtgcctccatatttttagggcatgcactatggctgccaactccaagtcgtgggtggggtagttctgctcgtgtggcttgagtaagcgggatgcataggcaataactttctcattttgcattaagacacaccctaagccttgccttgaagcatcacagaagatgatgaaatcctggtgtatatctggtagtgtcaaaacgggcgcggttgtatgcttctccttgatgatctggaaacttccctcacattttggagtccacacaaacttattgtcctttttgagaagttc

SEQ ID NO: 142040 - DNA, 430 bp, Zea Mays
tcctgtttttggaagacagtgttattgcaggcgccatcgggtagggatgtggtattcttgggaagttcccctaagttcatgttatccttgttggcgcaattgcttccggatcgccggtcaaggaagtcgggaatctttttctccatggtggtggagggtgaggctgccttgcgggtgcaggacatccgggtggtgtgtgactttgctgacgtgttttcggcagagcttccaggcatccctccagagcgcgatgcagcttttgagattaagctgattccgggtacgcagcccattcataaggctttgtatcgaatggccccaaaggagcaggttgaattgaagcggtaattgaatgatctgctagctaagggtttcattaggcctagcaggtctccatgggcttccccagtattgtttgttgagaagaagg

SEQ ID NO: 142041 - DNA, 424 bp, Zea Mays
tcggcaaagttaaaaattttcaacttcattcgaaaaacaagaaattcaatcatcagatggccagagtacgttcaacagctagggttactcgcgacggaggggaagccgaaggtgccgaaactgctacaatctctgaagtgatgaagcgttcagggctggtagtatcggaggatgcacctgccgctgaagctgagcaggctgatgctgaggaagttgagtcagaagatgattacagcgcagtgccaactaaacccagccacctggagtttgggaaatccaccatttccgaaggtgacatgccgaagctgatgaatttgggctatttcagtgaagcgaagaaggagctggttcgtttcggcggggaggagattactccgaagccaggaaaggatgaagtagtggccttcaaaagcttctttaaagc

SEQ ID NO: 142042 - DNA, 403 bp, Zea Mays
ttttgcaagtggtgggttatgtaactttgtaaggcgaccaattctaagggtgagggccttgatagttggtttgggttacaccgggcctcagtgtggatagtacttgtacaaacaacgatgcgacatggtgtttgttgctatatgccactaaaattcaattatcccttctctccacagcaatgtgtcagtatgcaaatatgttctgtatttgtttatgtgcgcatcttgcattttacctgtttttacaacaatctgaacggtctgtggtggtacatgccgctgaaatttaacggttccatctctatgcggtgcatgcatgattcaacaccgaataagtgctattgaaagctataccttactggacgggttactcagtgtcaatcagaatattgagatgtcctca

SEQ ID NO: 142043 - DNA, 1141 bp, Zea Mays
agtctgcgctgcccacttgagccggatcatctctggcagtaccctcgggggctgggcagtggcttgcgcttcccacccgagccgagtcatcctcggcaacaccctcgggggctgggcaagcatcaacactatccttgagggccaagttctctgcagtagccgcctctaaggctgaaggccccttagttacttccataggatcaagatgatccaagtcagtctcctgaccctcaagaccacgctccaaggtcgatgaggcgcgggatgacctcaacccagcatcgagcacatcagcacaaacctccatcacaccatcatccgctggctctgataacagatcctctgaaaccatatcttcaagagtctgatcaaaattcgccagggacaattcttgcagaccaatgagagcagacaaagcaggagaaggaactccactactttcaccactggcgacatactgccgactgttctttcgagtcagagggacctcatcttcttcgtccccgtcattttcaccaacaacacaaacaataccccactgggaccagcagtagatggagcacacccattgggatcagcagcagatggagctcacccattgggatcagcagtagatggagcacacccattgggatcagcagcagatggagcacccctattggggtcagcgtcagtaaattcaggcacaggcacttcttcagcagcaggaaccgaaggaccaacgtcccgatccaaactagatactcgccggaggcgtctctttttctttttctgctcatcagcagaaggatcaagttgattggctcggcaagggcgtctcgggcgaacactggcaggcttctgaatatccaaggttataccagcttctgggagaggcgccaccaccaatgtcccggcaggagcagcatcagaagagtcctcaaccagcaagtcaagcatagcacttatttctgcttcactaggatccaaaggcacctcaaagtggacctgccgttcatcatcaggaatttccccgagcgaggcaaccaaagtgttaacctcttcggcagagggtcgcactctaaggcccaaaccgccatcagcgacaggtggattcgacacaaaaagagtgaaggccttgggaggaggcagattccatgct

SEQ ID NO: 142044 - DNA, 288 bp, Zea Mays
aaaccacatgcctcagatttctcatcgagtccctatgattcaccattcaaagcgagtctacgctagcccccctgctgaacacaaatctcattgccccctatttccaaaacgatagctggcgcaccagttaagggaccgttagcgtgccaagtgacatcttccactccgatggctcgcacttcaatgttcaccgacgatgagagcttcgctccaggaagccgcatcatgttcgactctctcgacttcctcaccactgccaccagcgaacctcgtcttgtccactttgat

SEQ ID NO: 142045 - DNA, 622 bp, Zea Mays
ctacgagtggatctatgtgctggtgggaattacggcctatttacttgtaatgattatttgtataaagggaacgatgtcttaaaagcgttgacatgtgggtgaacaaacaaaacatggcgtcggctggtgtgtctaggatgatcgttccgaccacctccagtttatctactagcgatgagttcatgcgtaatagttagcatcagagcgaatctggaaccaccacacgaacatcataccagattccaaatgaagagaggaagcatggtgtcggcgcgagtgcatgatcccatggcacaattgctggctaaaatcaaagaagggaacaaggagacgtatcgacgcatggagacgatgcgaagtggtgatcacgaacatggatggtaccgtgaagagtgtgatggccaagtagagtgacgtccaaaagtggcgaccagaggtggaggcgaaggtgtcaaagttcacagaggcgttgaagaaagacaatacaaagcaaggtagagaaggcagatcagaagcaatcgaggagtttgaacctcaatgaattgtcgagcgaatacggtgtatcggcttccacccatctttaagcttcccctcttgaggcgatacatgagcaacaacgcaa

SEQ ID NO: 142046 - DNA, 569 bp, Zea Mays
gttcaactaaccgcccttgcgggaattagggacagttttatggcagacgtaaaaatcctattcatcatcgtaaaaatcatcactggaatgcataaatagtttatgtagcaggcataaaacataatcaccgatggcataaacatgaatcagatagttcgtcaccggaggacgatcccaaggctgccagatcaaaggacgcctcagaggccatcgagtcaaacgtggtcatcgaaggaggacgccctctgatgcgccacatcggaggagattgttcttttcggatgccaccacggacggttaccgcagccatcaccgctcgcgcctcggaaggtcgtcaccaccgctaggtcgtggtccccgcaaccgctcgcgcctaggacagacgtggccaccgcctctcgcgtctcgagccgccactcgccgacatcgcctggggttgccgctcaccgacgtcgtctaggtccgccgctcgcacctcacaacactgctcgcgtctcgcgccaccgggagtcgtcgtcgacgtccggccgtcactcgccctgcttgcacctcacgcagttgcaaccgcc

SEQ ID NO: 142047 - DNA, 527 bp, Zea Mays
cttgtttctgggcacttgaggcatctggacttgcactggaggctgaggcggtggtggccactgctgcatggctgctaaggtctgaccaattgcctggactgcttgggtctgcatcaagaacatctgctcgatggtcatcggtggtggcggtggcaaatgctgctgcggggctgcctcctcttggggtgtctgctattcaggctgagcacgcctcgcacctctgcgcctgttcttagacatctgtagaaatcacacacatatatcaactctgactctgcagtctttcagcataagaaaagatgtatggaaaatctgcatagaactgaacaattgaccatcttcactgacagcttctcagataaagaggaaagtggaaataaatggattacccaactaaataactactttattaataactacaccaagttgtaggggatgcccacagcttgatgacaatcattacaaagatccaacttcagtacatgtccatcataacaagcatccaacataagataagcaaacaaact

SEQ ID NO: 142048 - DNA, 452 bp, Zea Mays
ggagcagagacaaactgactcaaaatctgaaccgcatgagcaatatctggcctggtgacagtaaggtaaaccaagctgccaacaagatgtgtatatcgagatggatcctccaaaggtgtcccatcagtcggacgaagagataagtgaagatccataggtgtggcaacagtgcgagtatcactaagaccagaacgatcaagaaggtcttgtatgtacttggcctgagaaagataaataccctttttagtctgcaaaacctcaatgcccaagaaataactgagtgcccccaagtcagacatttgaaattccttactcagagacgccttcacatgagcaatatggtctggatcattgcctgtaatcaacatgtcatcaacatatagtaatagcaacgtccgtcctcgtgaagaaacatgaatgaacaatgcaggatcatggtcactagaatagaa

SEQ ID NO: 142049 - DNA, 376 bp, Zea Mays
caattttaccggtttcctttcttacatctgatctatcatatacatgattatgtatttcttaaattatggatggttgggcaattaatatcatcgacaattatccggtacctatccgagtagtatctgttatgcgtttcttacccgtccggattattatccggtcccatcctgtatccgtcacgaatcttaactacccgtatccggtcctgtatccgagagaaatacattagggtaggatacgagatgaccctgtatccggctgtatccgtcccgttttcatccctaccgccgtccaccgagacctcatcagccgtcagaactgcagggcttagttcgtgtcctcgtgactgtttttactctatttactgctggctgc

SEQ ID NO: 142050 - DNA, 387 bp, Zea Mays
atgtgattcccgtagaaataccaaggtcacacgagagacaacatattcatcatcataaaatcctcaaatggaatgtataaaaattgcagtggtcgatataaaaatatcatggaatgcataacacatggatcagatgaggccgtcggagaaggatgctccaaaaccgccggatcggatgttccacgctgtcgcatcggcatccagttcatcgaagctcgaagaatagttggagggagggcgtcaccgttgcatgtagaatagggaggtgacgttgttgtgcatgcctctggccgccactgacgctcgcgcctcccggggtcgccgccatcactccctcctaagaggggggcaccgggaaggcgggaaccgccgccacgtgcccctcgg

SEQ ID NO: 142051 - DNA, 750 bp, Zea Mays
gcaatgtatagatatttgaatagtttaatactattattgagttcatgagttggtccccataaaatggtcttcagtacgacgcgcaaaagtattagactgcacaaacaatacgactaatgaaattatagccgcacatacatatatatatatacaaagataagtttgaaaatttttgtttcatcatcataagtcgatggtcatcaccaagcattgcctagcatatattggcatctatgtttcagctgcaaactcggccttcaacaactagttttcagaaagaagaaaaaaaaacttggtcatcaggatttgccaatgtcttactatatcgatcactatcgacagcaggactacattatattgccgtttaatttgtctgtctcattgatgcgcaacctaataaagatccattgtatttgcacccccgccggccagatcgatgacccagccaatgactggtttgacaaaatgtcgtcgttgcatcaatcatccattaatgtgaagagtcgtcgattaataagtcatgatgtcaaaatgtgtatgcaaattcagctcattactgtctaatactgttcgatcaaaagttgatgaatgggcaaataattcaccgaaatcattcaagaattggtgagctaagcattatcaaaccacaccgaaattcagtgcatgcaccatgcatggtaccaattgatgtgctagaacgacaaaagttgcaactctaaatttttttaaccccccctagctaataataac

SEQ ID NO: 142052 - DNA, 483 bp, Zea Mays
gaaaaattcgcaggaaagtggataagagagctgccttatgttgtttggagcctgagaactcaacctagccgagccctgcatggaaacactcctttcttcatggtctatggttcggaggcagtgctacctgctgatctcaagttcggggcgccaaggttgatcttcgacagtatagcagaagctgaagccaccagattagaggatattgatgtactcgaggaggaacggctaaatgcagtgatccaatcagcacggtaccagcagactctaagacgctatcatgacaaggccgtgcggcaacgattcttctcagtaggagatctcgtcctccgccgaattctaacgggggagggacagcacaagttgtcacccttatgggaagggcctttcatagtatcagaggtcactcggcccggatcgtatcgtctcactcagatggatggcacagaagttgggaactcctggaatatagaacacctcagg

SEQ ID NO: 142053 - DNA, 342 bp, Zea Mays
cttgttaccccatggcgccgccatcttccagagcaattacacccttcacccagccgcgccctatcaaatgatgcgtactgtccactttttttggaagattatgattattttccctgtaccatgcgtatatccaatatcgtggacgcgaaattcacgacgcatatccattatctgctgaattttaggatcgtggccgcgctgatcgtgggcgctctgatcgtgggagtaacagccatttatgcgcttttatacatagatttacggtgtcgtaactgtctgtttaaatgcgcttccccaatttacgggttacacgtcaccgacccacgttcgaacaagtggccc

SEQ ID NO: 142054 - DNA, 621 bp, Zea Mays
gagaaaggttcctgggttcactagagatgacgcacacgccaaattttggactagacacgagcggaaaggtggggcgacggagagggtgccatggcggtgtttgacagtgcacgggtgcgttccggcgatgggcttcggtcaaactccaaattgttgcgtccaggggcaataagagatcacatactaactgaaacaaagagtaatttgatcattactgaccggaggagcgctggccacgatgaggttgggtttcgggtgtgcttgaactgaattggggcgaatgcaaaattagagctcgtagggaatcggctaggagcaatacttggtgtggaggtgcgcaatgatattgcgaagctagttacgagctcaatttataaaaggcttcgtcggtggcactcaatttggtcgagcaacgcggcggccggagatgaggaaggactctggcgccacggtttcgtgtccaccgccgtggcgggctcaccggcatcggtgaggcagcagcggggaaacacgatgacacgacagaggtgcccggatacgtggcgtagggtcggacgacggctatcaccggcgttcttatcgtcttccaccgcggtgacgcagtatggtggccggagtttt

SEQ ID NO: 142055 - DNA, 750 bp, Zea Mays
atcaatttctaaatctatttttctggttttatttaattcctggactacgcctcaatttatatagaaggcaggggccactgcgcaagcattcccgtgactcagtcaatagtacacgggacggcgggttaaatagagtaaacttcagggtctcttatgcataatcttctggccgaaggggtatcgttgaatggtggccgtccgatctaaaccaagggctcagattaaatcagtcttacttgaaccggtaagctctcagaaccataggatcaaggatcgacggctcggatctaattggacaaaccggtgtaacatgatctaatctcagccactcaatttcatatccacgattcagatcggatcgggccgaagtaacatcgaccatttaatctgagccgaacacagggagatcaacgaccctcgcatcatctcctatcccagaccgaataacagacgcacgatgcacatccaacggtcagccataactccccctcttcccagctgaacacggcggcgcaggggcttactgcggtgaaggtacgccatcggcgacccccatgataaccaccgcccagtcatccatggtggcgcgcccagcccgaggaggctgattcactactccagcgatctagcctcagtacggacccgtgcaaaatcgagagggaagctaggcgaacatcatgggaggtcccccgcaatggatcggggcgataacaccgcaacacaagagacgcggcagcccgtccgccatag

SEQ ID NO: 142056 - DNA, 1189 bp, Zea Mays
ggctggtggggcctagtgaggcccctcccctaataaaattatttatttactattttaaaacacattttatgttttttggaaaagatcttcacttgcggtcttattagctcgacgcgagtgaaaatcaattttcacgggcgattttctcaacccgaaagccaataacaattgattttcactagcggttctcagttacctgtatatacaaatatttttttctactggcccctagcactagcggttctaaaaaacgtcagtacaaatgtgttcacaaccgcctgatttttactgttgttttcttagggcgaccgatggtggaaatcgatattcacggggcgatcttagttacccacctgcatagataattttttattgttccctaacacttttggttctgaaaaacggcagtataaatatgtttacaaccgtatgtatagagcctctatcaggggcggatccagagggggtaaagtgggccatgaccccctctcaattatgtacaatcttttaaatataatgaccggttaatgttaagttaagtttagaaaaaaccaaagttttgatgtgatatagtgctattctaaacctctaaactaaataggtagcgactaaaattagccgaaaaatttagaatgggtcaactaatttttagctatacctttcaaataatcattaattgttacctcaacctagctaaaaccagttaacaattagctttagaggcttagatcagggcataaaacaaccctgtcatgagcctcctcgtcagatccttcccgacctagtcctcgcatccatcaggctgaccctaatcttttcaacgccacctaaactagtttgcctcgatgccccatttcgaccattgcctccttcctgacgcgacgctgcccaaccccctccttcctggcgcctccaccctgccccatcgtcgtcgtgtcaccggcccgcccaataaagccgggtctcactcatcgcaatgatgtgaccctctttgtggccaacgagcttggcgaaccagcaagccctggctctcagctgcagacgtcgcctcaccccacccctttactggcatccctgtccttctaagagatcgatatttgacaagataaacgtctttgattcggtcatcaaaaacttaacgacatgtttgtttattttgttcatacagttttattctttgaatttgttt

SEQ ID NO: 142057 - DNA, 663 bp, Zea Mays
gggcggggcggtggcgtccagcggtctaggtggttggattgggtggcggagttgaggcgaggaagatgggcgtggtgtggggtcgtggggtagcgtaggagcggcggcgccgaggaggggcggggcagtggcgtccagcggtccagacggttggattgggtggtggcgttgatgcaagaaagatgggcgtggtgtggggttgtggggtagcttagcccctggaagatttgtgtttttaaatctggaattctgtagcgtgctactcacaaaagaatactagttttcatacataaatagataagtataagcaccaaactctattattataatggtaagccaattaggctaacttttccttattcgtgagaaaatgtgaggtataatgtactttgtttcacatgtttttaataaaatctagtcggtacttagagaataataaaaaaaatcaataataacaaaaatagattaaaaaataaaaacttttaatccattgtttaaaggcacaaacattggtgtgactgtgccgcaatttttaaaagatgcaaaaaaaagaaaagaataaagcaacatacatgggaattggaccaccatctaataaagtgctagtaaaccaagacaaaccactacactacatgctagttactatctaatgggcaaagataa

SEQ ID NO: 142058 - DNA, 406 bp, Zea Mays
ttttgttgcatgctggttgctgctacttcaccatggacacaagcacgaccacggactgctattgttggcggcaggctgctgctactatacaccatgtcacgggctgctggagctggttgctgcatgctgttttcatttatcaatttatcatggcgtatgtgttgttaattaatgaatattaacttgtgctaacagtcaactgtaatgtactagaaactaatgagacattgacaatgttatgactgtcaactgtcatgaactcattaagcttttattctctgtactcgaatttaaatctattggatgcgataattatgagttgagatattgtatcgacgtgtagccaaatatagtcattctcgtgttgtactggtgcttagatggaaactaaaatattttatgtatt

SEQ ID NO: 142059 - DNA, 343 bp, Zea Mays
caccaatagtacgcatagtattaaggtgttgtcctccttgatttactgtcatcctcgatgcctcaaatatggtctgatcatcaacccccggggccctcaaagctactggtggagtaattgcatctacagcagtagctgattgtgtatgcgtacttgcttctgaggtaaactggttccctccttgttgttcttcctgcaccattgttacgatatccaagcattgatttggtcgatgaacagacgtcgacgtcgtatactcacttattgactcgttaccccatggcgccgccatcttccagagcaattacgctcttcacccagccgcgccctatcaaatgatgca

SEQ ID NO: 142060 - DNA, 606 bp, Zea Mays
ggataatgcaaggctttgtttttattatttgttttttcttctttcctctttgtctttcttcttcgatatataacatagaagtgggggacatgttgttggaaaattgaacatttggtttcaatttagtcaaaaaaagcatgaccattgtgacaaacatgtaaagaaagagaatagatctaaatgtgcatcatgccaattaagactaaaacttgaactagcaaaaccaagtataaaaaattagacagaatagcatggatgtacgtttgttccttgctaatgatggggtagagaagatgatatcaactttcaacattgtctcgttcttgacgatgacgtgaaacgcccacacgatgagcacgtagatgagccatggccacgagattaaagacgaagatgaagcgatcgagcagttgtgtggagtgcttcccaaaaaccttatttgccctctttgtgtaggatcattaacgatgaaagtactagagaccttctcgcccttccgccagtgcatgccaacgatagggataaagtagtgtacatggcggcacatcttgcagaaaaaggccagactagatgtgttggctaatgttatgtttgatggaagcatct

SEQ ID NO: 142061 - DNA, 827 bp, Zea Mays
ggggcagccagtcccttgtaatcttggacaaacgtaagcaagcttttccaccaaaaggagccaattttcgagcaaccaggcatcctgactgtcctgtaataattgctccaaaccaagttaacccagggaatatcatgattgttgaagaacttgtgtaaaaacttcaggagcaaggctttattgtgagtctctaatcttaccactctcaggcccccattttttttagtctgagtgaccatactccaggcagctagcgcaggtttctttgaattgacgtcgtttcccctccagaggcagtgtttccgataagagtcaatcttcttaaccgtggtcaccgggattttcagagtacacatcaaaaaggtcgggagagctgaaaaaaccgagttgacaagctccagcctgccagcctgagagaggagggcagaagtgcatgatagtctcttttgaatcctctgaatgagtggtaaaaagtggcagattttaggttttgaaagacccagcggagtgcccagataggtaaagggcattgaacctatctgacaattaagagttcctgcaaggatcgccattttagcaggactgacattgatggggtacatacttgatttgttgtagttcaccttcaaccccgttgaaaaagcaaaagagttcaggacagctcttaggaagaatagctgtctagggcaagcttccaaaatcagcagtgtgtcatccgcatattgaactatcggataaaatcttgaccacaattctctggcaatggtaacttgagaaggtcttgtcgccgcgctttatttatgatgctctgaagcagatctgccgcg

SEQ ID NO: 142062 - DNA, 470 bp, Zea Mays
tttgctcagcactttttctaatgtcagctagaccgacaatccagacgaccgtcgaagcacatccagacgaccgtcaaagcacaagaagattcacaatcttttatggaggaaatctgatttcttagggttctaggaaggatcctaatgtctctcgttcaagtactgaagtttaatataaagagtttgcaaacaccatagctaaaagaatttggattcaatccctcttgtgtgaacttggaatcaccatgactcggccttcaacattatggtgtgacaacatcggtgcaacatatctcacggccaatctgatcttccatcgtcacatgaagcatgtcgaagtagactatcactttgttcgtgaacgtgtggtgtctcaatagctcgatgtagaaattatttcatccaaagatcaagttgttgacatcatgaccaagtcactatcgggaccagctttctctaaaatatgtaac

SEQ ID NO: 142063 - DNA, 604 bp, Zea Mays
caacggtaaggattagatctgtaacccggtcaaccggtacggaatctccgccatcggatcaaacctcaacgcccatgattctaagtaacctacattgattcacctccgaccgatcggaatcggacgacgtacgatccgcccacccgaatcggtacctctctcctaatctgggtcgtcgagcactagatcaacggatccggttaatatttttcctccaattcatcccgacggcggcgccgccccaaaccgagtaccgcggcggtccgccatggaaggaacgccaattgcgctccacggtacccaatcccctcgtgtcacgagtgcaaaacgaaattgagagggtagcaaatatgggaggtgtgctttcacagtgattccggccgtcacctggtctgcccgcaatgacccgtggacttgcgactgcggcgatgaattgagcgcccccccggtcaccctccgagctcataatcgccacccaacagctccagggacttgggcgaagccttccgtccgcacgcgaggccccaatttggcgccgagcacaaccgacgatggtgaggtcgccaatccgcccgcacggtcccatggtttctggctctctctc

SEQ ID NO: 142064 - DNA, 1825 bp, Zea Mays
ggaggcagcagtgaccttacaagctcacgtggtcatcaccagctaaacgtggtcatcaccttcctgtctcggccccctttctccaaaagatcacatgtaccatattatattctacgactcgtcatattgcttgattgcgatagatgtccaatagcttagagttactattaccagataagatgctaccctaattaggaatgctgtcggcctcacttgtagaacatctctgctgtgttattgtgtcttgtccgatcctctctaatcttagtgggtccatgtatcggcttggatctgtttgggatgctttgctcgggatctctccttgcaaacggcggtgctttctccttatggaaatttaagtccatcaataatatacttaactagtaatatacgtaggatataaaatatgtaagaaattaaagtgttatatattatgaaattattttcacaacggatgaagtcagtgctacgttgtctatatatattcgcgcaaacaaatgtaaatctatatggacttatgttttttgttctacagggtattaggtctttttctcatcccggcccgtatacaagtccaaccttcacctttgttagtgacatcacaacatttggactagtcaaattaccacacacacttcattcattagaccatattgattctcaccctgaacattcttattttattatttcaccttgcacatgtcagtgctagtttaaacatctacttagttactagtaggttgtagatgtactttcccgcatcaagtaatccaaatgagatttgtaacaccacacgcaccattattcttgtaccatcggcatcaacctcggtcaaattcaaggttcagggttcgagagggtgccaaacaaactagaggaaaaggcaaggaagtaggctagacgggtagtggtagtggacaagacaacaaaagtggtagggatgatgtcgaccgtggcccgtgggtgaccaagaaccaatggtggtcatcgtctgaggcggattctatcacattgatggctcgacgctattgggttgggttagcctggcatgcatggcaggatctagcgtctgcaaccaaggaaggagagcaacgggaaactgtgacccgatcttgcaagcactggatacatctggccgccgtgatgacctcggcctttcctccatcggcgtggaagcagcaccggagcagggaaaccaggtcgggacaacatcgccggacggcgaccctgctcacaggatgaagaggaccttagtaagctgctcgccaacaaagcaaagctgaggaggaacaccggaccggcggaccccgacgaggaggagaaccggcggcggtgcgaggtggacagacagatccggggcggcggagaacggatcgcgaccggggtgagaacaagccaggccacaaccgcccgcaaaggaacgaacaatccggcgtcgaaggcagagcgatcaatggcttctgctgagggtgacatgacaggtctcctctatctctatgtggtcactggtcagcgcagagccacacgagcaaccaagtacacgataaactgcgaattgacccggcgtcggtgctggtgcggttcatccgtgctttagtcgcgccccatgcccgtgcacgtcaagcgttcgtcttaatgcctgtgaggcacaccgtacgcgtacgtactcctaccctctctgtctctaggcggcgatcaatggtgctcaagtgcagcgtggtggaccgccaggtcgtccatggagaagtgctccccatgcagctcaatgtggacggccacttgccacggcagccaaggaggctcgcaccagggtctggaccgtcct

SEQ ID NO: 142065 - DNA, 337 bp, Zea Mays
cccacaggcttgcaaccagctgggagatcagttatctcccaggttccgttcgagatgattgaatccatctcgctacggacagcctccctccagtactctgcatccagagatgtatatgcctctgtgagggagcatggttcttcatccactagataaataatataatcatcacccaatgacttttcagtcctttgtctcttactcctccttaactccaattctggagtctggtcatggacactcgagggcagagaatatgtctaagatggaccatctggggctactacttccttatcccgcatagggaagatgctctcaaagaatgtcacatcccgag

SEQ ID NO: 142066 - DNA, 364 bp, Zea Mays
ctagtaattcatttgcaataggttttttagcactcagcacgtagtgacgattcttacaatattattacaaccgactatgttatgaactacacatgggtgttaagccaaacagatcgtgttgtattttcagagtttttttatggggtacaaggataccacacgacacccacatactcatgcgcgtacattacacactagaaagagatttagaggcctaaacctatatatagtacgtgagaaacacgtaataccattaaacacgcacgcgtgtgtataccctgtatctagacctaggcataaccagggaggcaaccaaggataaactctaaagtgaagcatcaaaatgcagatcctgaggatcgaa

SEQ ID NO: 142067 - DNA, 312 bp, Zea Mays
cgcaaaagatcctaagacacagatgacacactaggtggactgcgggttgtaatcttcaaaactataagggttcatttgcaaaacccgcgccgcgaaggggtacgggtgtctctggtccgcccgattggaaatctagggtcccgattaacccactaggatgactaccgtgcttgaaccgagaccgccgatccccagatcgacgatggaaagcagatctcccagggaaccgatggatcgacaacctacggtcgggatttaatgctccgaatcggtataacacatctaatcgcaaccctccaacgtagatcgcat

SEQ ID NO: 142068 - DNA, 916 bp, Zea Mays
agggaacatcaccacaaagaggatggacctttcctagttgtggcttgctctcacacttcacaaactcctggctatacttgttatgctttgaccttttacatctaagcctcactaatgactccaacatggacacttatgatagcgggtgagtggcattgacacgtacctaggccatccaatgccaccgttgaaagagctgctcacacgtgacctgatcacgaagaaggagtgctagtggagggaggagcatggaggggatgttagttgtgcgaaatgccaaagcgggaaaccatgatgaccggagttgtagcctgtcatctcgaccagttccaaagtgagtatcaccatcgtggggaggagacatcagccgtggggagagggaaagccaacgagggtagtagaaccactgtaaccatcgctaggaactccaaagcgacgagcgctagtgcgggaacgtgtgtggaggggatgtagccgtggtaaaggtcatcacggggagcagggatgacataaatgaagtttggagtcgtggtcgactgtcgtgactagatccaaagcttctacctctgatacagggtggggatggccattgcagatagcgtggaagtcgatgatgtagagcgaggccacgactgatctttgagagcagcgttggagtgacatagacgaaacgagactagaggagggaagatcgatggcttggggagtggcgtcgtagagcgccaataggggtcgacatctacttcaatttgactcaaatgaggaacattttgatgttgacgatgggtttcgtctgtaaatggatcgaagccatcgtacgtgtaactgtgtaagtgacatcgtggacaaaattactccataaaaatatcaacatatatgaatgctacactaaaaaactaagcaagcgatggttcca

SEQ ID NO: 142069 - DNA, 393 bp, Zea Mays
ccttgatgtccataagtctcccttgaaaatagttaaagtcagtgcaacaaataaaatcataaaaaacatatcattgccaaaagtagtgcataatcaattaagatatcgcagcagtttgctgaattaccttcaaatgtctcattatgatcaatcatatatttacattgtaagatacatatgattgctgttcacagtcccagagaacaaaaggtgtaataatatgtttacagttcccgtaacacactaatgaagaaatagagatttggacaaggatataaacacctacaaagtgggtgttaccttgtgcttcagagcatcatgttcctctccagcctgagaagtgggtctactgctcatcaggcatcagctaggtataattttcaggacaaaaac

SEQ ID NO: 142070 - DNA, 522 bp, Zea Mays
cggacggggctccgaaggcgcatttggagcgcttgacgaagagttggtggcgttgcagttcctcgaggactatcctgaggtggtgcaggtgctcctcccaattcttgctatatatcaagatatcatcaaagaaaacaaggacaaaccggcataggaagggacggagtacatcgttcatgagcgcctggaatgtcgccggtgcgttgcaaagcccgaacgccatcaccaggaactcgtccaggccgtcgtgtgtacgaaatgtcattttgtgcacgtcctccggcctcatgcgcacctgatggtacccggaacgcaggtctagcttggagaagaaccgggcaccatgaagctcgtccagcagctcgtcgaccatcgggatcgagaaggcgtccttgatggtgaccgcgtttagcgcgcggtagtcgacacagaaccgccacgacccgtcgggcttcttcacgaggaggaccggcgacaagaacggtgaatcgctacgacggacgatcccttgctcgatcatgg

SEQ ID NO: 142071 - DNA, 766 bp, Zea Mays
gttaagctcttgtccaaccgtaacagccatcgtttcagcatgggccgagtcagaagattctccagccaacatattgagtacaacatctatttttgcatcatccggacttaccggcattgaaaagtgaacttgcctctcatcattgggaagatcacgaaggggagcaaccagagcctcaatgcaaccagagcctcaatgtcttcaggagagggtcgcactctaagacccagaccactatcactagcaggagggttggacacgaaattgaaaaatgacctagaaggtggcagattccaagcagaataagcaacaggagcaccaacatttgatatcttgcccctcaggatcatgactagtcggctcaccaagacctcagtaggaattttcctgttagtgacctgagttgagtcagtaataccactgtacaagtaagctggatacgtcgtctttcaaaggctgaatattcttgaaaacgaagtcggcaaccacagctttggcattcagacctctctccttcagcaaacagatctcagcaagcagaaccctagcttccgtcacctccaaggcagtgggagactcaacccaactcggagtgcgtacatctggctgtctcctcgaccgaggggggaaggacttgtcgtggttttccataataaaccactcaaggcgccaccctttaatgttgtccttgagaggaatgtcaaagtattccgtcttcctcccgcggcgcatctccagacttgcaccaccaacgagctgatgctac

SEQ ID NO: 142072 - DNA, 601 bp, Zea Mays
gggaaaggtagaggattctcacctatgcgtgtcgattgacgtagaggcaaggacacgacgggcgcgaggtttgtcggaggcgcgtgacttgtcgaagcacgaccggacaccgaggcctgccggcggtagtggctgcacaggggctcagtcctggaggacgactgcgcgctgggctcggccatagccgtcatgtccggccagccgaccagcaggggctcacgcgagtggccagagagagggcggcagaggctcagcacggctgctgcacgatagccaggtagggagaggaggatggagtagttgccgaatctactcgcatggcacggtttggggaagaggggagttcgagtgggcgtctgcagcttgaataggtgcgtcgagcgagcggttactagaatccacacgtcgtgggcgctcaggccggagatgcagttgcgagagagagtgaggatatgacatgtggaccatccaagtatggtgcgatgaggcaaggcaaaaaaaggtagacggggtagtcacagcagtagtagcagacgcaagcggcataccattcgcgagaagacgtggttcggtgatctcgtgaaaaaggacacaagatctg

SEQ ID NO: 142073 - DNA, 398 bp, Zea Mays
tgaaattttgcctggtccgagtgttgggcgtaggcggcgaagggcagtggtgaagcgtagagtgagcgggtttgatggtggtcggcttcgtgtgggcagggctggtaggcaggaattgttgtcctcgccggttggggcgagtatgggtgagggggagttgcgaaggctttttgagggtgaggagctgaggataatgctatttaactatagggagatggggatcattccgaagattgagcctatgcaaggtgtgatgccctcgctgtacgcgtgtaactgtagtttgtatgataaggttgactgccttcgcgcatctgggtgtgttcgttaggtgttgcgcacccggtctggtacattattgtgttggtccggctgcgcctgtagactttcggactgat

SEQ ID NO: 142074 - DNA, 721 bp, Zea Mays
gttgaacaggtgaattgcggttgaactggcctcaagacctgttgaactggcctcccttgttgaactgtcatttctcacaaaagttcgaagtttgtgttgagagttgcaggtgtcgcctattcacctctcccctctaggccaccttcacaaacccaacttgaactctccactagtgtcatgtgccaagttgttccattgaactgacatgttcaaacacccacccatgcaccccttttctagaataccctccccctttcccctcgaccttattgccactaccagtatttgtatgtcttcatcttccagtaattatagcaaggatatttaacctaactactaactataataaaacctcatcaaccacttaattctaggcctgcttcttgcagagactagtctccacaacctctaagccccatgtcacccaccccttgtttttacacatctcctatgatacatacatgagtagtagatctaatgcctcaaataaaatgtaattattatactaaactacatcactgcatcaaatggcttcttcttagtctatagctaacaaggccatagatctgatgcaaggagcatcgaagtagctcctttccctctctaaggagcaactacatcaaggaagaggtttgacctctattgaggtgaaccagctccagaaggcgctcaaagccatagcagatagcctggactaggactatttatgtgccaagaggcc

SEQ ID NO: 142075 - DNA, 288 bp, Zea Mays
aggaggcgacctccttgctccgcatctctgccatgcaggagaggagggcaagcgtggtggaggtggcgatttagtagcaggagatgaggagacggaggactagcgctggaggcctgggaggttgggagcgacggtgattatgtctcttcagcaccccagcagaggggaagagcaggggacatcggagggtagcgagaggagagagatgagcatggcagcaggagcagaggcggaggaattgtgcaggttcccgatgatccacgagcgcatgagttttacggatcaatg

SEQ ID NO: 142076 - DNA, 705 bp, Zea Mays
gtcgggtcgaggagcaccaagggcacataagggtactgaaacaagagagcagaggacatgaacgaacctgtagcacgctgaccacggcgaggtcacttcgcgcggtgctctggaccgattttggggaaatctcaaattggcgagctctggtggaagatttgaggcacgagttggtgtattggttgcttaactaccttgcgaaactgatgacatgctcaatttataggatccccgagcggtcgcccgtgaatttgagatggcgcggtggcggtcaaagagagaggagagcattgtcgcaagagattggtggctttcactgtggcgagctcaccggcggtcaccggacatgtgtaatacgagctactgcaacgtggtaagacaccaaggcacgtggcgcatggccgataggtggctaactccggtgagttcattcgaatcggccgtgagtcaggcggacacggcggccggagtgaaatagtggctcaagttcatccacaaggcgatatttactaccccgagcaactatcagtactccattgagcacgaatcacatcgccgacatcaatcgcggcgtaagatcaccggcggcgatatttagtggattggggatatttccagtgcactgtaccatgggaatttctgtttgaagcgcctgacaaagcaaaagaaagcgccgagatctttaatttttatgtgagcacttgc

SEQ ID NO: 142077 - DNA, 1148 bp, Zea Mays
ctgcagcatattcagagaaaaaactcaaccagcagggggcatgacctctccctaggcaatgtttttaactcaaccttgctcgttgacaaaatccctgaaccccatgtttgccaatgagaggattgttttaaccagactaaattcactgccacagggagttggacccaagtgctgttttaggctgtctattgctccaatgatttagatatacagtgtccttgatgaaactaccaaatatcactctattaagccatttctaatagttgaaaatgcttgcactgaagggatatatgcattaggtagttgcaaattcctaactttttgcgcacatcaagaaccattaataacaacatattgttagtcagcggaagtgtatagtggttcccgtcatgccccagtatacgcataatgtacttttttatacttaagtttttcttatagtgcattagtttaactggtcaacacaaacttacttaactacacactatcacgatttacagatttggaagacaatgacagtaaggcaccaaatctccagcttctgaccataccattaattaatataatcaaagaaaaatatagaacataagcaagaatatcactgagttgccaaaactcagtaatggtcacttccttaaaggagggcgtggatggggattcgttgcaaggaacagtaatggtcacttcctagaaggagggtgcggcaatctcacaagagtggcgagtccaattcaaacttgctgccttgtacagtttggacagagtaacccagttgggaatgtcaagattattgtgtcgacccatgcaaaagagctaacaaggggcctgactttggtggatcttgatcaaagtgtggatgagagctttttcagcaaaccggagatcttatcagcacttcctttgattactgtagtgttcggcaacataaggaagaaaaatatagaacacaaggaagaatatcactgagttgcctagggggaggtcatgcttcaagctggttgagttttttctctgaatatggtcattagggctgcaaacgagccgagatgaagaaagaggctcggctcgtctcaaagtcgactcgtgagctacacctcaataaatattattgtattgtattgtgaattaatagtatataaatgtgaaat

SEQ ID NO: 142078 - DNA, 363 bp, Zea Mays
gaaggattcctgctgtggatctggtaagccatcttgagatgattattagaggcaaggtgtcgaatatcgatgctcccgttgcgcattctgcctagaatctgcctccttccaagactttcatcagttttgtgtcaaatcctcctgctagtgacagtggtttgggccttagagtgcgaccctctcccgaagaggttgaggctttggttgtttcgcttggtgaaatccccaatgacgagaagcaggtccattttgagatgcctataaacccgagcgacgcagaaataagtgctatgctggacatgttagctgaggattcttctgattcggtcccttctgaaacactagctgtagcgcctatcccag

SEQ ID NO: 142079 - DNA, 542 bp, Zea Mays
ccagcgtgggaccgtcggaaataaagtgaggtgggccccgcagacggccggccgccggcgcctgacgccgtcacagcttatttccgacggccccgtcggaaataagaggccgtcggaagtaattaaaaaacagagaaacagaatttgcctgctttttattttacaaacaatcacacaaattcaatcaatatccagtttccaataattcatccagaatcacatacaataccacaaatatccataattcatcgtttcacatgaaacacacaattaaattcacaaaatattcacccgtccacaaattaaagcacaagttcacaagttcacatgttcacaagttcacaagttcacaatagcacaagttcgttcacaataccacaagttcacaagtccatagtacgagaaaaacacaaggagacaagctactcaaatggaggaggttgatcaaatggatggggttgatttgatccgctagctcctccgctgtttagaagaccgtccacaaaagaagcgactgcatctttagagtcctcatttcccgg

SEQ ID NO: 142080 - DNA, 625 bp, Zea Mays
tgtatctcccctctgtgctgggagactttgggagagagatccctggttggtcctgattgggttcagcagacttctgaaaaaggttcgggaaattcgtcagaatattttggcagctcagagccgtcagaagagttatgctgatgtgaggaggtgggatttggaatttgcattgggtgaccaagtccttctcagggtatcacctactaaaggagttgttcggttcggtgtctctggaaagctcatcccgaggtacattggaccgttcactatcttggcccgagtgggcagcctagcttatcgcttgctgctgccggattccatggcatgggtacacccggtttttcatgtctctatgttgaggaagttcttgcaggatccggaccatcagattgagatgaaaccaattgctgtgcagcaggatctgactttggagtgtcgtccggtgcgtatattggaattctcggagcgtgtattgaggaagagatcaattaagtatgtcgaggtcttatcgactaatcagtctgagtgcgaggctacgtgggaacttgaggacctaatgcgacagaagtatcctgaacttttcgttgtgggtaagtgttgttgattctttaatctttccttttgt

SEQ ID NO: 142081 - DNA, 284 bp, Zea Mays
gtcaagctgagctaatacgggtgctgttgtcaaatgatgtctcaatgtatgaaaggcctcttcacatttctgaatccactcatattttactcctttcttcagcaactccgtcattggcttggcaatcctggagaaatccggaataaatcgtcgataataccctactaatcccagaaaactccgaatctgctgtatagtggtaggaggtttccaattcatcacttcttgcactttctcaggatcaactgatatcccatcctgagaaattgtgtgacccaaaaatt

SEQ ID NO: 142082 - DNA, 1138 bp, Zea Mays
acgccatccggcgaagacttagagcattcctagaatattgacaatctccgtaatttttttgtttgaatcctcagggctaacacgcccttgtaattcaccaaacagttttattccggcccgcactcttttcctcccggggggtgaggtttttaatgtggcggagccatgtaatatacacgcaaaaatcccccgcaaaaaattaaaacaatgtcgaaaaagaccgcatcgacggtcttcggcattcgaccacatcgaagtaaccgcgaggggcagcgccggcctccctcgcgtgcgacactccgtgcaaaagtctcctaagggtgcagccggactagcacaacaagtgcaaaaaatcgaagtcttttccaaaagactctccgcgcaaaagtcgcctaagggtgcagctggactagcacaacaagtgcgaaaaatcgaagtcttttccaaaagactctccgtgcaaaagtggcctaagggtgcagccggactagcacaataagtgcacaaaaccactctccgtgcaaaagtcgcccaagggtgcagtcggaataataagcacgaaaaatcaaagtcctttccaaaagactccgcaaaagtcgcctacaggtgcagccggaatactggtacgaaaaatcgaagtctttttctaaagaactccgtacagaagcctacgggagcggcctgatcaacgaaagcgcgcagcttcatcacacataattatggttacacacatacagcgagggcatcacacattacatcggctcaaccttcgggatgatacccatctccctatagttgaacaacattatcctcaattcctcacccgcaaacagacttcgcagctccccctcacccacactcgccccagccggcgaggacaacaattcccgtttgccagtcccatccacacgaagacgaccaccctccatctcaccatgatgacgcctatcacctcgcgacaactcacccactctacgtttcaccaccgcacttcgccgcctatgcccagcactcgcacccggatgatcctcagcacccatcacacgtggaggagtctccgccgcagccacatccaacgcttcaaaataatccaagtcctcttccgaagactcatccgtccacacaatcgaactcccag

SEQ ID NO: 142083 - DNA, 329 bp, Zea Mays
gaagggtcgaatggtcgataaagttgtcgagcaagttgtctgggctgctgggcaggcttaatgcggtcgcttagagtcatctccataacagctggtactggcagtttggacccaatctccatcactccatgtggtatggcagcataaggcattgcagtatggcagcatactgtgatatcttagcctgctggatgtggatccaacaagcaccaaacggatggccccagagcaatctaatcaaaaccacacactattttctccttgtttgcacttcatgttcagagctcgtggtcttgtctctagaccgcccgagttcgatagacgcactt

SEQ ID NO: 142084 - DNA, 768 bp, Zea Mays
accatggcaacgtgtgaaagtagctctgaggtcgatgggtatttgaaatccaaaacaagttgatccaagagattcggcaaagacggatccttctctacacaaattacagatattgggggaaaataacaagagttttagtgtactagtactacattgactgaaattattaaggttatctgtaagagcctaaaggaaagaataaattgctcactgttgctagttagtatgattggccattttgtagtctctgccatcttaagaatagttgaaataaacccacgatcctcatcaaagacagtatccacatcctcaaatagtatgagtgtcttgttagcaacttgtttaggaggttcatcacaggccttcaaacctgagtagtatcctacaggtgatttctgttgatcacagtcaatcattactcttgtagcacaggacatcaaacattggtattcagtcctatcaggagttcctgaatctggatccaaggaatcatcccttagtggattgataacctcctcctgtgacctgtacaagagataaaaacgattcaaaggtatgtttgcttaggcaactatgcgaaatgttagacaaatgcacagattattagaacttaagctcactgtgtatctacttctgcagaaaagaacttcacagaattttaaccaagctactacatcatttgcatggccattgctattttcatgtgctccaaattccttataccatcattctctgcagatgttgtttcccgcatgctactgatcaaat

SEQ ID NO: 142085 - DNA, 424 bp, Zea Mays
gtcacgtcttacggatgcaagtgaaatgacttatattgcatatgttcatgtaggccacgtctcctacgtacaagtaaccaaacagtagctcacataaaattaacacacacgataatacagaataagatgatgcgggcaaccaatcaactagatagtgactcagcgggatcgaggtaacagtcgaaagacgtgctctcctctcatggcccgggggcgatagtcaatgtggagatcgctgatggaagggcgtcagcagtggtggtagtggtggtgaatcgcaatcatcaacggagccatgaaaagcaggcgcagtaagaaaggtggaaaaggtaaaaattctcgcatggagctcccctcttttcaacctttcctgtcgaggttcatgacgatttgacatggaatttgtatatggacagaatatcgg

SEQ ID NO: 142086 - DNA, 338 bp, Zea Mays
attggtcgtgaagattaccttgtccgtagcatatgcgttgtggtgtatttgatgtttgtagtttttgcctcctcgtttgtggcgatatgaatttatgttcatatttgtggagtagtcgcgtcaagtgaagcttaggtttaagatacaaattatgctagtaatgtgaaaactaagtttagcgttttaaatgtttagccgatagtgctatcagtattgttgacaggaattcttgtttaaatagtgaggtcgatgatttactctgttaaccattatattctgtgtttagtaatcgattgtgtcatagataaatgttgactgctacccccaagtatttagaa

SEQ ID NO: 142087 - DNA, 510 bp, Zea Mays
gctgaagtggggaattcatggaacatagagcatcttaggaagttttacccttagcaaggcctcaaaagctatcagagcaacattatcccttgtaattggagagttcgtcatcaataaagttttcgttttcaaaggcattcgaactattgactatcaactgacttcgatccagttggacttggaatcaacacggcttagggtgaccactataccctactaatggagcaatcggcttaagtcggcaatgacttaagacggtgcaatatgctcacgcttactcgacttagggtgaccactataccctacggacggagcaatcgacttaactcggcgacgacttaagacggtgcaacatgctcacgcttactcggcttagggtgatcactataccctactaacagagcaatcagcttaagtcggtgatgatttaagatggtgcaacatgctcgcgcttacttgacttagggtgaccactataccctactaacggagcaatcgacttaagtcggc

SEQ ID NO: 142088 - DNA, 467 bp, Zea Mays
catggaagtatgttgccattacggtggtgtctccaccggctgccgtaatggcggtgacgtaaacctgcaataattccgacggatttgacgtaccgtcgtacttctccggcaggtgcggccgaaacttggatggccaagtcgccgcgcggagatgatccgccagtgcagcgcagcccacgccggccaatgggacacccgcttggatccgggtgctcgttggagtctgttgtgcaaccgcagcgaagtcgtagtcaaggttgcgaccctcgacgttctatcggtgctcacgcgccctctctagagagacgcgggcatcctcgcctgcacatctgcggttgagttctgcccgtaggtcctcagtcggtgcggccctcaccgagggggagcgcactaacgccgacgcctcatgttgacaccgggatgaccgaggcctgggcctggttgagccagagtgcgccatgccgagc

SEQ ID NO: 142089 - DNA, 709 bp, Zea Mays
ttctttcccaatgtcctccaatctcctgcaaccatctgggtgcacaaaaccttgtgctaaccacagcagaatcagctgctcagcttcaaattcccagtttctgggggaagatgctgcaatatgcaaagcattgtttcagctgtggtggtagattgtcatagctcgttcgtagaattggcatgatttcctcccatactgcatttctctgcaagacttgtttccactcatctacactgttgttacgtttcaggtgtccagctaccacctttgcggcaagaggaaggccactgagtgtctcagcaattttccttccaatgttctccagttttgagtcgatggtatgttttgtctcatcaaacacataagtctttatcagggaccaacaatcattaacttgcaaggtctccagattaattatagaggatgattgtagcatctctgctactatacttgaccgagttgtcaaaagtatcttgctcccctttgctccgtccttcagaggggctagcagcttctgccagttctcttgttctattgctattgttttgttgtcactgttccaaacgtcatctaaggcaaggaggaaacgttttgaagcaagccttgccttcaaggcgacttgaagtctattgaaatttgctatgccaccatgcctaaaccgactgctggaagctgactccagcatttcttttgtgattctcaactcgtc

SEQ ID NO: 142090 - DNA, 519 bp, Zea Mays
tccatatctgatctgctcaaattcggctatgtaggatttcagagtctcagtttgtgtcagagatagaaatcttctcaaagctcatggataggcgtcagcagcaaacttactagaaacagctgctacaaacccttgctagtccaccatgccatgttgtaatttgtagcacttccaccattgagtggcacatagttctaagttcatagcagccactgacacccataatgactctgctgccttatacataacaaaatactcctcgcactggtcgatccaaaccactggatctccggtagaaatttttgaaaaggtagcttaggtaatacctgtcattgtcgattctccgtctacatctccatattaggttcctgatcaatcaattcagtcctcctccctctatgcgacctccaacatcaggtggcactccttgcatgttcacatcagagttcctaattagtcgatttagtccacctccctctgtgtgatctctagcattagagggtactcattgcatttctc

SEQ ID NO: 142091 - DNA, 328 bp, Zea Mays
ttatagcagctcgaagcggtggctctaaatttgggaggagagaggagcacggctgtgacaagacattgtactggcgggtccgtcatggcgctcaacggcatacaaacgcagggatagtaattctgagtgtgccacggttacgactacgtggtaaaggatctcagcgtggcgcaattgaggtaaccggtgagccatgacgacattggttgttcggccacgtcgcacggtcatgaggtgcatccgataatcccctgcccacgaccaaatccatcccccgccagatcttttacccccctcgcggttatccactttgcgctgagcacgaatc

SEQ ID NO: 142092 - DNA, 512 bp, Zea Mays
gcccccttggcatataaatagggtaggggaccctccatggatgagggatccacagatcgacatcaacgccacacgcccacaacacacgtagacgaactctcactctctcattctgtcttagatattggcacttgcctcaatcatctctagggacttggggacttcccctctcccgttgtgcttgtaatcccctactacaggcaccatggtgtgagtaatataagcctcatcttctctgctagaattagggccttgagtagcccaaaccaggataattgcttgtgtctcctcgcacaccatctagagtcggccacgcgacacatttactggttggttaaggacccacggtccaaacaccgacagatgccatccaagaaataagagtcacatacaatgtgattagcaaatgttgattacctatgttattatgtttctagtcgtgatgtcaaagcccactagaacttagtgaacatgaaccttgtccactatttgttgttagaggcaagatgatt

SEQ ID NO: 142093 - DNA, 526 bp, Zea Mays
aatcacggcgggaaaggttaccggcggcgggatttttctgccgcggccgatctgatccgctggggacactataccatcgcgctgcttcatcagagcttctgacagtcaatgtttgggctcaaatttctctcaaatttcaatggcaacctatccgaggctctgcggcaaatttgtagagctacaaaccagcaacacttcgactataggggttgaactcatttgagcactggatcaaggtgtaattcacactcaaagttgaccctgttacactgaaaagctgaatttcagaatgaaaccagcctgacagtcaaactttgagcataattatctccaatattttctcaacaactatgctcacactcttaagcaaagttgttctccttagtttggtctacaattttgatgtggtgacctagggcaaactcttaataatttggaagatgtagagctccaaagttgagccaatatcactgaaaatcagacttaatcatttgagaaaaagtgtggctttttgcatataagccca

SEQ ID NO: 142094 - DNA, 383 bp, Zea Mays
ctttctctctctcttttgcgtgattgggtctcagcgactttgtccgggtcacaaaaggccggtgggaactcgggagttgggtctctctcatcgctcctctggtgggacccagttgtctgtctctggattctagttctggacgggcggctcctgcccctgcgtgccactgccaccacatcgctggccgagctgctgccccgcgccatcttttcttgccgcgcaaggcaattgtgcgcatcctgtacgggggtccattcggcctgtgcgacaccgacgactcccacaaactcgtaaaccaaggatggcagtcaatggaagacacggtggcacatatccgtagagaaagggcttcctcccatgtcccatggggtggggtcaaatgt

SEQ ID NO: 142095 - DNA, 554 bp, Zea Mays
gaggacacgacgcgcccgcgcacggaatcgatgggaacggcgtggaggggagcacacaaatgttctgcgagtcaggcggttgcgtccacacacacgcacgcagggagacatatctggaatcatcgcggtgctatggtcactaatccagctgggggcaggctcgccgatcgtggggatgaagcaaggttgaccggtcgtgtcaccgaaaaggggaccgaggtggctatgcggatgggagtcgagacgcaggggctctgctcgggaagggtgtgggctcaacgctagcgccatggtggacaaggccgcgcctgccgaacagggatagagaagaacgagaggccatggtcaggggtacacactggggatcctcaccttgaacctcgatggagatggcgagggcgcgactcgacagggcgtggatgatggtgatggtgcgcggctctgcgcggacgacacgaggtgcaccgggcgcgcgcacacgacgggaggtgcaggacggcggtggggcttggtgatggcagctcgacgagttcctggcgtgcgacgcgggtgca

SEQ ID NO: 142096 - DNA, 374 bp, Zea Mays
ctaaaaagggggaacccctctcgtcgagtttggacgtatcgttccgcgtcggaaaaactctttttcggtcaagaggggttttttgcgttctcccggatgcgtcagaagcagggtcctgcgagtaaacggcgagaccgactgagccggggaacacctacgcctccgggctagggacatctcactcgtcgcttgccacgaaaaaggacccagctcgggaaaccgccctgttatcgacactacgggccaggcgcggaaatcgaaacgaaaaggagcatgacttcacggaaggagaagtaaaatgttcaggcctcaaaggccgcggcaaatcacacatccaacaggaactgtcccaactaaaatcaggcgtcgcctcg

SEQ ID NO: 142097 - DNA, 787 bp, Zea Mays
tgtgtttctcttgccttgctatctaggtggtattgtaattgttcaaccctttttgccaaaaaaagtgttgtctgttctgctcatgaaaaagccccctccaaacaatcttgagtttaggaagtgaaaccttttaacaaaattcatgcttgtgttggtattctctaacccttatgtgttttacccttgaagttacacctgcacagtttgtagacccccatagcttgaccgctagaccaacccaagtctcattatgcacttgttgtgtcaaatttttttgtttggtatctagttgcacaaaccctatcaaggccatgtttctttccatagatcctgtcccgaatcttcatagcatttctgctgctcatcctaacagatgttgttttcctacctctcctttgtccgaatctggtaatcattttccttgaggatcatgttgtgaccatatccatcgagtctctagatcattcattgagatctaccatgtcgtcttgtaatcagctccaaccgattatcaagtaccaggtgtcgatcaatctaatctctcatttctagtctttccgatgctctttctctaggcatcatgacgtcgtttttgtcaaccttatctttaaatggcatatccatgtggattaatggattttgctgttgtccttggatctcttgcgtctctaaaagctcgacaatctattttgatctcatggtcggttcatcctcatatcaaatatcatactagtctcttgcctgataatctccatgttgatcataaaatagttctttgagtggaaga

SEQ ID NO: 142098 - DNA, 618 bp, Zea Mays
cctacccggacttccttcctaatgcgtggacgtcgcgggtttggcaccgctcgactcgcgacagcttttccacacacttggtcagcctgtgcgcccaacgcagggagatctcgccagccgccatctcaacgactcgcgtgacttccccggggacgtgcgcggcaaactcgtcgtcacaacgtgcgaccgagggacccgcttgacctcttgaccgagccggagtacttatgtgatgcgacgtccttcccttcgcactcaagccatccgagcagccgggatcgagaacaccaatgtcgtgaccgagagatgagagagagagggagaggaagccctcgctcgtgctcatctcgccaggaccgcccaacctcacagcgccgacatccctagcctaatgcctcgtgtgcgtgagccgcgctgggtgctcatccattcgtagccgccgataggagagagagtgagagaaagcgttctgtgtgtcgcctgggtgcccggaccagtggaccacgcgtgcgtttagtacccaagcgcggggcgccctcgcgtgctccatggtcgcgcgcgccaggcctttgcgatccgtggagctcggcgtagcttccttggccgcggtccgtcatg

SEQ ID NO: 142099 - DNA, 1020 bp, Zea Mays
tgtgaatgatctacccactcggcgcgagatcttcagatgtaacagctctggtccgttgtaccccctgcgattcccggcttctgctctccttgcatctaccttatggcaccaatgacttggacatcccggtcatgtcgttttatctcatttagcgcagtcatctgcaatttcttgtaataaaaatactagtactcatccatgtcatgcttgtcaactcggacgccatgttcgtataccatttcctacctcttcctcccgcgccacatgtaactttcaattaattcactgcgatctctggacatcacccatcaccagtgtatctggccacaaatactaccttgttattttggatgactgctcccaatatttatggatatttcctttacgcctcaaatctgacaccctctccaccctaaccaatttctttgcctacgttcgtacgcagttcggtgtcactatccagagcatccagtgcgacaatggtcgcgaatttgacaaccttcaagcccgcaccttcttctcctcccatggagtccatctgcgtatgtcttgcccctatacttcacctcaaaatggtaaggctggacatgttatccactccatcaacaatatcattcgcaccctcctcattcaatctagtgttcccccaatttttgggatgcggctcttggcactgcaacctatctcctcaacatattacccaccaaaacacttgcactctctacaccacactttgctctcttcggccacaacccatcctatgagcaccttcgtgtttttggctgcaaatgctaccccaatctttctgccaccactccacataaattatctcctcgctcaaccccttatgtcttccttggctattctccccaccacaaaggctacctatgctttgatcgccaatccaatcgtaccatcatttcctgtcatgtgttttttgatgaaacctcatttcccttttctgaggattccaatccacccacaccagcggcctttgacttcctcgatgatcactctaac

SEQ ID NO: 142100 - DNA, 329 bp, Zea Mays
agagaagacgcgccgcctgtctatcctgctgacaggcgatgtgccccttcagcatttaatgtgtcctgtccactccgctagcaggcgatgtgactactcggcatttaatgcaccctctccctactcctctagtaggcggcgattgggctatcctgcaggcggcgtgcctgtccaatccgaacattatgcccatgctgtaggatacacagatatgttatgtccacgagcacttgtgcattgccagggaagcttccccagcacaccaagactacacgaactgcgggtgtcagagcgcgggaagattgctccagcagacaactattgctgcc

SEQ ID NO: 142101 - DNA, 544 bp, Zea Mays
ggagcataaggatcctagttgaggtctccaaacacatcactcgaatcatattcgatgatggcattgtccaagtccatgtaatcggtgtcggtcagaagcggaggattggtcgtgcttggttccattgtagccatgcttgagcaaccagctccatccttcaagttaggtggggtggtgaagcgagcttcatatccctgtccttcagcatttttgcccttaagagattgctggtacagtgccactaaatgacgaggaatgcgacactttttagtaggatggttgaagcatgcacacttcttacacttctcttgcttggaagtgggggtgtctttccttggagcctttgtattttgcttatctggacgcttgttgcgtttgcgcttctttgaattatcagagttcttgggatggtttttggggccatcccctttcttctcattcttcacagcatgatgtatttcaggcatatgagcagctccatcacgatgttgcttatgatttttcatcgtaagctcatcatgcttttctgcacgaagtagatcat

SEQ ID NO: 142102 - DNA, 556 bp, Zea Mays
atgggttcttatgcacgttgtagccctttgtgtcgatgtctaggttgccaagcgtgagggtgaaggaaccatggtcgaggatgttgtcttggatatagttgtgatcaatgtagcagttgagtcaactaatgtcaaggtataggcacaatgatgcgtcgtggggttgatggaaatgcgttcaggaagttgtcgtggaagagggcgatggcgaggtcgacgtagtcagggccgtcgaagacggggacacaactgagagagttcatgtagtcaagctgccaaggatgaagcgtgcgttggggtagccaggctcgataacacgttgtggatgaaagtacgaacctatcgtgatttcgatcccacaacaagtagatttgtagattaggtgtgggtcagcgcgtcactgtttcgatggctttgctctggatgagcataaggaagagagtttttactggttcggagagaactacgttcagtatagtgctgaactctttgttgttggctttcatgtgttacaaggctgaacacttggctctcgtgcttgtgtgagaagtgttac

SEQ ID NO: 142103 - DNA, 312 bp, Zea Mays
ttctagccgtcgtacccacttgctctgcggccagctaaaatgaacctcgtcggagttggtcacttgccgcccatgcgccatgtaatcagtggtgttaccacgtcacagtagaccgctataggtagcctatccatcgcctgtgacagtgccccggtgaatgccatgatagataactccggtgactccttccctttctcactgcctgcccttccccgcctaaattcgtcgtattcacgatcgctctctatatattgagcgctcagcgtgctccgttaggttgttacgtgcccagtacaccagccctcgcctccg

SEQ ID NO: 142104 - DNA, 343 bp, Zea Mays
tggttgagtagaagagaagagaaaagaggagaataagcaacaaacggtagagagatgtgtgaagacaccagtgaagcaagcaatctatttattgaggcagaaggcaaccacttatctcctaccacggtcaccgaacagtcgcaaatattcaataatccattcaaattgtctggaaacaagtcagacagcagacactgtttcacgtaacacgacacccattgggactgaagtcaactgcttggacgatatgattacaccccgtggtcacatcaagttactactcaagggcagtttgctaaacgctcagcgcatcaagccatcccttgcctacacccattggggg

SEQ ID NO: 142105 - DNA, 632 bp, Zea Mays
atcgacggagaccgcgtcgttgccttgcaggccctcaacaaataccaagctcaaacgaaggcctggcgcgaccacgcagtcgtcccaagagaattcaacgaaggagacctcgtactcatccgaaccactcggacagagtcacaggggaagctggagccaaagtgggagggtccattcatcgtcaagtcgaaggcgtcccccagcgcatacaggctaacaacaccatccggcgaagacctagaccattcctggaacattgacaatctccgcaaattttttgtttaaatcctcagggcctacgtgcccttgtaattcaccaaacagtattattcaggcccgcactcttttcctcccggggggtgaggtttttaatgagtcggagccatgtaatatatctgcaaaaatcccccgcaaaaactaagatacaacatgtcgaaaaagaccgcatcgacggtcttcggcattcgaccactccgaagtcaccgtgagaggcagcacagactaccctcgcgtgcgacactccgcgcaaaagtcgcctaagggtgcagccggaatagcacaacaagtgtgttaatcagtcttttattcaaaagacactccgcacaaaagtcgcctaagggtgcagccggaat

SEQ ID NO: 142106 - DNA, 618 bp, Zea Mays
cgaaaactttaatatgaagagaacggaagatgaaaacagatggcttaactcgaggcctcgagcgcaattcactccagtgctgatcttgctctattcatatcgatcggtcaaaataaacttcacctagtaaggctattcataagctatgagaccagaggattttctgctgtttttgcctgatgaagatactgcaaccagagtccttaatgggggtaggctgttcagaggccctcgattctctcttctgttcaaaagatggtcgcggtttgtgcatgcttcgtcagcttcgttgtccaagctggtggatattgagattaaaggcattccagaacatggttggtctctctctacagcggagcacatcttacgtggctcttgctggatttccgatatccaccaggattcggcacacaagaaaaacttttcatctttcctggtgagagcatggtgttttgatcctagaattctgcccacagaaatggatcttcatattattgaaccaggccctgccgttcttgagaagagatgtctatcttataaaatctcgatcggagtttgcccggtggatcttcagtctgtgagcctggatacaccgtcttcttctccaccgtcgtctgg

SEQ ID NO: 142107 - DNA, 427 bp, Zea Mays
cttttttctttcagagtggatagattggtcattagagtaacaaaatggtcgtttgacaaaaagggaaacagtagttgtgtaattcctcgcaatgaaaaaaaatcacacacactaatgtaagtggttcaaagatgaatatatatgtggaaaaatgtataggtacacacatttacaacagaaaagtgcacagttcattttaaacatatctaatattttttggagaaggaattggaaaagtaaatgtaatttaattaacaaaaggctacgtaaagaaagaggcctaattcttctaatgaggttctttctattgcagagtgaatagaatggtcattatagtaatgaaatggtcatctgacggagaggaaagtgaaacaatagttgtgtaattcctcgcaacgaataaaaacacacgctcatgtaagtggtt

SEQ ID NO: 142108 - DNA, 540 bp, Zea Mays
gggtatcacactctaccccccatagaaaaaattcgacctcgaattctgacgcttctatcggaatgacacaagaaagattaatgaatcaacaaaactcacacgtaacaaaaagttcgggtacttctgccgcatcagctcctcaagctcctaggattctaagatacgcagcagacgacactctagagtctggtcttgctacatgggaatcggctctagctcgatttgatggtctggattcctcaaatacttcctcaacataaagacatggaatacatggtgtactctgatcatagattccgacaattgcatgtgctaagtccagctgccaactcggctaagatagtagacggtcctatatacctcagacaaagcttcctgacaccaaatcaacattgacatatgcaagcacttcaataaatgtatatatgaatgcaatgcatatagtgttcctatagcctaaaccaaacttagccaaacaagagcaacttcaagagagcaacttaacgcttgcatatttctggacagcagcacagcggttaa

SEQ ID NO: 142109 - DNA, 701 bp, Zea Mays
ccgggggtcgtctcagccagtcccagctagctccacaccgtgcagctcggccggcaaaaactagctaagctagcaagtagccaccgtttcgttccaggctccagcctaggggcgcgcgacgacgacatggggttgggagctgttgctgcgacccgggaggatgaggaggcgaagatggaggccggcggcgacaccgctggccagaagctcgacgccggcgcgctcttcgtgctccagtccaaaggtgatttgccgcggcgcttcttttgctcccgatcgccatgcatatctttccgtgttgttatgtttcttgagcacgaacaagcttcaacggcggtggacgtcgggggcggttgtgttttttccccttgctgcaagtaaagtaacaagcataatagctggaggttattgctaaacacgaccttagctcagagcttctgcttcgatccatctggacatgattgcggtcctaattactaagaactagtcagtagtgaacccacgcggcacggttgcatgccgcagctacctgtacgcgctgttggcaagatgagagagagagagagatggagaagacggcgattcagcaatttcccttttaaataaaaaagaaaagagaagcagaggaaacttcattgattgaatggtgcctggcagatgccctgaacagctgatgctactgttcctcctctgaccacaga

SEQ ID NO: 142110 - DNA, 536 bp, Zea Mays
taactgcacgcctcatactcgtctattccaaagttcttcgtctaaccaatacactacactctgcatacgtaggatccatttaacacactcaacatatacacttaatataacattttttcatacgacctataaaatcaatctagccttttcatcgcacaacatgtctctttccctatttcgaatgcaaccatattcggcatgcattcaaactactccaaacgactctaacacaatcactattataatatatcgaaatacatgttcaataatacaccctacccacaaacctacaatttttaaatttacacatcacgtccaatctacataactcagttatttccccgattcgcacatgcgttcacgccactacatatgaataataaactttaccaacattcaacgcattacaatatatcgcctaagattagttggaaaacaaaagggatggcttactcttcatgacttacctcatcgaggttccccactcgcatgcaaacaaggttttggctaaaccgcaagcttgcaaggagactcga

SEQ ID NO: 142111 - DNA, 497 bp, Zea Mays
taacctgctgcagttacaaccgtctccagtagcttatccaaactcatattcaaaatactatctacaaacagtacaatatacagtgtaaaatagatatatttagtgaccatgtgggtgcaatgtacagtggtttacccatatgatcatcaaaaccacagttttgtactatagattataccgtttgtagagcttgtagagtatagcttgaatacatgtatgagtctgctggagatgatttaagggaagcaaagaaagcaactaacttgagccgctgagcgcccggttaggttgacaggtttacgtttcacggctccggcagcggcagcggcagtggctgcgatgcagccggctgctttgtctccgcggctggcagcaccggtcgccgccggtgcgcgctcctccgccagcgcgctagcctggtgcagtcgtaggactcgtcgggtccctcggcctgcgcggcgcacacccggccaaacacacaggagagcacggtgagc

SEQ ID NO: 142112 - DNA, 427 bp, Zea Mays
gaccgcttcaacggtcttcggcattcgactacaccaaagtcacagcgagggacagcgctggctaccctcgcgtgcgacactccgcgcaaaaagtcgcctacgggtgcagccgggctaagcacaataagtgcgcaaaatcgaagtcctctccaaaggactctccgcgcaaaagtcgcctacgggtgcagccggactaagcacaataagtgcgcaaaatcgaagtcctctccaaaggactctccgcgcaaaagtcgcctacgggtgcagccggactaagcacaataagtgcgcaaaatcgaagtcctctccaaaggactcttcgtgcaaaagtcgcccaagggcgcagccggatcctccgtgcaaaagtcacctacgggtgcagccggaccagcacagtaagtgcccaaaatcgaagtcctctccaaag

SEQ ID NO: 142113 - DNA, 568 bp, Zea Mays
actggacgtcccccaacagcacgctcaatgcggcattctgggagtccgacgaggacgaggacgaggagacctctgaacgagcgttcgaaaggatcagctcattggcgagtcactgcacggatttgccggactgggatttggagttggaggaaggatggatccaagcgcggggagactgctcccgcgtctccgaggcaccggcagccatgctgacaaccagttttgccttagggtgtgaagcgttggatgccgccgccgccgttgtcgtcgtggaaggccgcagtgcatttgctacatgaagtgcaggagttagagatgattctaccatatgccagagacattcgcctgtccacgcaggacggcaggacgcagtgtaggatttctcgacgattttgttaagtgccagagacgtcccagcgcaggaataggcagcaatgtaggaattacagatggttttgctgagtgcaagagacaacctaggatgagcgcaggcagaaatgtagggattgctgttgattttgtcaagagggagagacattttagggctactgtagacagcaatgtagag

SEQ ID NO: 142114 - DNA, 318 bp, Zea Mays
gtcctcactttcccaggtagcttcctcctctcctctgctccactgaaccttacagagtctcacttctgagttgtgggtctttcggactgctgagtcgagaatctttattggcttttcccggtactggagatctttttgaatctgaattgtctctgcctcgatgtggttctctggtacttgcaggcatttacggagctgggacacatgaaacacattgtgaatatctgacatggattctggtagctcaaggcggtatgctgcgggtcccactctgctaatgacgggataggggccgacgaaatgcggtgctagctttcc

SEQ ID NO: 142115 - DNA, 622 bp, Zea Mays
ctcggtgagttccttgttgaatttactcccgctactgtgctttttgattcgggagcatcccattcttttatagccgctaagtttgtggaaaagcatggcatcccctctacacccctagctatccctttggtcacccgaaccccgggatcagacctcctgtgcaaactcaggtgctcccaagtcagaattctcttaagtgggatagtgttcctggcagacttaaccatcttgccatcccaaggaattgatgtaatcctagggatggattggctagccaagcacaagggtatcatcagctgcgcaagcaagacggttctcctcacagatcaccaagaaaaggcagtttcctgtcaagcccaaccgcccgcaaacgatccaatgatgtttaatctaaccgcagagagcatgtctgtaatcaagtagtttgaggatgtatttccggaagagttgcccggaatgccaccagaaagaggagtggagttctatatagatctcattcctggcactgcgcccatcgcaaagagaccataccgcatggcccccactgaattggcagaattgaaacttcagatttcagaactacagcaaaaagggtacatctgtcccagttcgtctccctggg

SEQ ID NO: 142116 - DNA, 426 bp, Zea Mays
cttcatcacacatctttcattacaaacctacttgacttatttgaagtgtctactcgaaaccgtgagcacaatcatatgcgaagcataatttaacgaacacaaaatacgcatcgactcgattcgacttataaatattgagaaagcgatgactactttggcatgtcaccacctctctaattaagcaaacacaatttcctacttatatcgaccgaacattcgtgtcgagcacaccttatgttaccttgtctcgcatacaaccatgttatggcgtgcactcgagacacttcaatcaatggggcgcgaccactaatataaatgaactccgacactcatgtcttaacgatacatcccccatgcaaactagcattctctacactactcgccacatcaataaatatatcccctctaaaattacgaatcccatca

SEQ ID NO: 142117 - DNA, 407 bp, Zea Mays
taggttttgacgggatcagagtgccataatcttcttcttcttcatcaacgatttcttcctcaatatcttgttcagtttcggcagcaggtgcaccttgttcaatggcttcctctgtcacaactagtctcgactgtctcatcactttggagattgggacagtctcggtggcttcagcctcctctccgtcacgagtcacccttgcagttgaacgtactctgaccatatgatgttgaatttcttgcagttcctacgaagttgatggtttttacagttttgacgaagttttctcttatgacgaagctaaatcaagacgatgctttgctcgagaatgcgatgaaaaagcttccgctatggttaaatttttcagcagcacaacagtgcaatggcaatgaatgttgtggtaactt

SEQ ID NO: 142118 - DNA, 590 bp, Zea Mays
ctattccaatctgatctagatcccatctaatctaacatgatctaatccaaattgagttacttaaataagttagataatgttggcgacataaactatgccctaattctataaacatatcttaccctaaattaataccttggactaactcgtccgtaaacaacaacctaacctacatcataggctgcctaatctagatatcccaaaagcaaagtaaaactctgtttaaactgaactacctcatgtaccccggctatcctaaccatatatccttagccatatgtccttaactcggatgacaactccaagaataaaggccaaagaagaccaaccaagtcaaaggaggataagcatcaactcaattattcaaagatcaagttggatcgccagaagaatcaaggtccagagtttaggatgaagtctttccttactatacccttgccacaacccctacttgccataatcgtacctcatctgacctaatagatggctagacatacaatatccatatgttccaaatcgtctactaattgttatgtaaaaacttgaacaaaactttgatttccaaaatccaatgagaaactaaaattcta

SEQ ID NO: 142119 - DNA, 330 bp, Zea Mays
gtgagacgtatctgctctagaagaagcgcgtctcatgtatttgtcaaagagcggggcgctgagaatcgaacaagggaacgggagggactgtacgtacaaatactacatgatgtttggtttgtactggtgcagtctgatcgatccatgcctgctggcattggcacctggcagctcagttcagctggagctggtcattctctcgtgcatgcagatggatacgttgcagcttgcaggcagcgcgcgatcgtcagcttgctagctctagcgaggcacgtgagtaggatgctaggctatgacacatgggcccgtacaccatttaacggcgatatg

SEQ ID NO: 142120 - DNA, 687 bp, Zea Mays
tcattacttcccagtccgaagtatcatacccaatatcaagaatgccacatagaatgctgccagaaagatacacctccataatgtataatatcatacttatatgtttatatgtttgaactagttaattagtgccatgttgtgtctgttagaatagacccaaacattattttgttttgtttataacctaagatatcgtgtcaaagcagtattttgtttagggcatgtacgactcttaagaccatgattagttttctaagtaccagagatagctaaaagtttgtatgatataactctgaatccttggatcataaatgcacttaagaaacaatatgtatagagaattatgtagagacaggctcttcgcgaaaacctcatctcttgtttttaactaacctcatagagacccctcaacatacctcatttatacctcatcttaaatgaggttgtacatgcctttaagataccgttttctctctctcttattaaatgccttgtcacatcaaaaaaattctacatggcatctcattaatgaactggtactaccgattgggaatagccttagtcatttcttgcacagcgttcggaggttgtttaagcattgggccgaccagtgcctgctatttgggcgaaattaaatgctactcttgcaacaaatttgatctggcatggtgggccattagaagggga

SEQ ID NO: 142121 - DNA, 299 bp, Zea Mays
cggatggtgtccgagggatcgccgcatttctgggtgaatggagattttggttatctctgtgggtggtcggttcttagttctggtctttacttttgttgaacctttcagttcgcctagcttcttagttgaggttttcgtcgatgcaataagcaaagcttatggctctgacttggtttggcatctcactttgctagttttccttgcttatctagtttgatattgtaaggttgtctaacagcattttgttatgcctagtagctggtaggctagcttgtcttaatgatgcttcctgtaatgac

SEQ ID NO: 142122 - DNA, 1046 bp, Zea Mays
acggcacaagggtcaatgcgggtgcgctgataatggaggcattctcatcagttgcaaacacgaagcgcggccatatcttacactcggttcgtgcttctcctgctatattgcatcttcatctcatttattccgtgctgatttggtggctcgtgtaacttttggttccacctcctattctcctttactgcgtgacacaaagagtaaactagacaatactactacgggctgctagcatgtgccaattcaagaaaagggggaacccacgaccacagaatgggctttaggttagacagaggttgagttccatacgaacatccaaccttctgatgatttttttgtgtgtctgcttgatagcttggtaatggacatggatggtgacctcagattacatcctatgatgagaagagcgccctgctggattatgttatctgtgatcctggttcagtaaaaattcatgctgacccagcaagaatcttgggcagtgaatcaacaatggtggggcccgttcaaagatttagtgggtttcaaagcaatgcctaccgatgcttgctgagtaggtgtgcatcaatggtcctttcgcattgacttttcctcatgaagttgcctgacaattatattggacttttgtgggtcagtcagtcatgttcaggatgaatcttgactcctcagatcaacttaaattgaatagtctgattaaccatcgctttgtacaaatccagctaaggttacaatgattgtggccgttattggaaacccgacctaccactgaaatcattctagaccagaatcaaagtacagcaacctcaagtgcactatgataacgttatagccttttgctatcactcagacttgtggctccctcagtttgtctttctgcattctctcttctcttttgcatgctatccaatttcatgaagtacaaagtatttaatgaaagtcacagtgtattgtcttggtaactgcatgtgcactcaattatcagtctagacattctggaagttactgtttatttctcagctttgatctatccactggacattgaaatt

SEQ ID NO: 142123 - DNA, 936 bp, Zea Mays
cgaagagggaagtgacgttctccagcgcggccacccgggtcatggcgtccgccgtgaactcctcgagaggagcccagccgagcgcccctgtggtctccggcgtggtgtcgcgatttgcgacctgcacctggatcgcggcgatgtcgtcggaattggcggccacagacttctccagatggcgccaccgtgcatcctgggtttccaatcggtcgcataactgctgaagtagcttggattgggtggttaggctcttggattgggcttcgatctgtttggattgggcattcagagcagccgccagattgggatcgaaggcgcccgccatttttgccgagcgagtgaagtaagggggaatctccagtgccaagatcggtagtctttgataccaatttgttagcagcctactcgaatggggaagaacagatcgaggaagaagaagaggataggcgaggaaggaagtttaactggagtttagcatttgtttttcccctcaggttacagacttcttgcgtagggttaatacccatccgcttacacagtccactccggaccagagtaccgagcattcagcctttttactctacggcccaccaagcgcggcgacagcaccggaccagtgtcggtggctgtgttgtgaccccgcgatggagcattgctgacatgcacgtagagaagggcgaaggaaccagtcgagttcgtgtgcccagaggagggagaaatagatccaccacgtgcaccctcaccgctacgccgacgccgacgaggacgcaggtgaacgtgagcgccgagaggaggggtcgcccgccgttcatcgacctacagctgaaaaggtccgcctctctcgcgcgtcacccaaatcaatgcccaacgcacgtccatgtgtgcgccaataggtctgtagctatgtcgtgttcggttaagggacacacaggccac

SEQ ID NO: 142124 - DNA, 313 bp, Zea Mays
gcggcatagctgctgcattcttgaaggccagatgcacgcatgcgaagacagtaaacaagccaaccttcagcctgtcgccatcagacctgattaatattcctggtgaggctcgaagtttcggaaatagatttagaggcggacgagagttggctggagacgaagctcggaatctgcttaaatcagtacgaaacttatacatgatgtttgccttgatttttatcatcacttttaccttatatcatcgtttgtctataggatggcggtgtcgaaggttaataatccaaagcacattccgaaggttgctggcctgaag

SEQ ID NO: 142125 - DNA, 580 bp, Zea Mays
gaaggaaggacgagtcagaaatcacatatacaataaattgtaggcaaactggcttatacagaagtggcatcttatagtgtgtttgattgaatatacaaggagagatggaaggaggccagccatatttttttccatgatgtttggataagggtcacatgagagcgtgaacaccggagcaatttttcctgacggcgcggtcccaaaaaaacgtgtgaccaaaaaagagctcttgcgttgcctcccaactttatccttaccctaccccctctcatcatttatcttggtgacggatcttggcggccgggagccaatgcacgtggccgccatcgtgagggtgagcataagcacaagcgcaggcgaaggcgagcgtccaggcgagcggccgaccaagtgcacatcaccggcttgtcggctgccttccgggtacgtgccacctgcctgtgatcttgcatgggtttcgatgcgtgtcaccttcctgaaatttggttccgatatgtgtttcaggaactccaaccaccggaccagcatcggaacgtctaagaacaatctccctggcaccagcacaagaacatccaagaac

SEQ ID NO: 142126 - DNA, 365 bp, Zea Mays
ttgggccgccgtgcctataaattgagcagggagccacggtgaggtgctttcatctccaccagtgaagctcagtcgaagtcaaatttgcgctgccctctccatcttcgcccaaattgattgcgcgcaatgaaaacacaacttcttacggccctgtaacctcaatccccaaccccaatttcaacccgagctgccgcgacgccgatttcccccaaactggtccgccgcatcgcaaagaatagcccacccgtggctgggtcactctggtgagttcctattcaattcaagtgtcgtttccatgcctctgtatgcttgcgaagctcatggtggcgcccgtttgctttgatcaaccatggtctggcgggaac

SEQ ID NO: 142127 - DNA, 574 bp, Zea Mays
gtctaaatgaaaggggtgttttggaattgtgatgggtttagagaccctttaaaacatagatttatttcagagttaacaaaggagcaaaatttatcttttattgctatttcagaaacagttaagagatcgtttgcagaatcttttttaaggaatttatgtggagggagaaattttatttggcatacaaaagaaccttctggtcattcagggggaattctaatgggtattgatatggatatttatgacataggagctattgatgaaggggatttctacgttaagttcattttgtgcaacaaaaatgattgcttcaaatgggctttaactgtagtgtatggtcctgctcagaatgataggaaagatgctttcttgacagagcttgttcaattagtgagtcgtgagaccttgcctatagtaataggtggtgattttaatattcttagatgtccaaaggacaagaataaagacaattttcaaagtagatggccttttatgtttaatgcagtaattgatagtttaaacctgaaagagattgagatgtctggaaggcagttcacgtgggctaacaggttac

SEQ ID NO: 142128 - DNA, 365 bp, Zea Mays
cagcactggagtaggtgaaccttgaagcaagggaggagtggcacaagcggatccatggagagtggggcagcaaacgggaagaacacgggaaaaaatgagatgaagactacgctagggagtggaaaagagaaagatatcggagggcatatcagtccatggccagatcttatctgctaatcgtggctcgacgcacgtgacgggtgtgtttggatgcaggtccaaatattccacattgtcttgccaatctattgtagccgatatttggttgtaggacaatttttggctatgcccataaaattttggccatgccaatacaaatctatgccaaattttggccaaaactaaggccagcaaatcggctgcca

SEQ ID NO: 142129 - DNA, 340 bp, Zea Mays
tcatgcatggagtactggtaccaaacatgcattctgaagtttgtcttcgtggctcggtcatacgtccatacccttcctcccaagcacgtaccaattcatcgatcaaaggctccatgtacatgtccattttattccctaggtgtccgagaattatcaacgacacgaatatattctgcctttgaaagcacacaccggggggagattgattgagataacaaacacgggccaacatgtgtacggggcagagctcattccatagggattgaacccatctgtggccagcacaacacgtacattacgagcctcttcggctttctcacggtgaatggcatcaaagtgt

SEQ ID NO: 142130 - DNA, 461 bp, Zea Mays
cgcggagtcacagctcgtggagcagtcaatggtgaagtaggtgtagacgtcgtgcccggtgcagcctgtgtgcttgtagaaggtggtgtgcccggtgaggacggtgtccccaacgatgatgacatgggtacaaccacctcatcgtggctcctcaggttgtagtcgtactccatcgtgaaggagtcctcgctccctatcgtcaatgcttctccctagttccagcgcgcgctctcgtcaaaaatagcgtcgcatgagacatggacgcgctcggtgacggggtcgtagaaatgatacgcctttgacccgaactggtagccgatgaagacgaccttctgcccgcggtcatcgagcttgctgtggtgtggacgcaggttcttgatgtaggcaacacacccgaacaccttgaggaagcgcacgggcggcttcttcttgtaccatgcctggtacggtatcagcccgtc

SEQ ID NO: 142131 - DNA, 734 bp, Zea Mays
acacacaatagccataccgatcacaagatgtcctacaaaaacaggttagacaaacatgtttctatatgttcgccagtacagcagatagccatggcggagaatctcatgcgattgatcaaatcaacccaaatccaagactttcgacccgaaggagattacactcatgacgtcgatttgttacgtcaatctgctggttgtgtatgcagttagccccgatggtgattccagccggtaggggcaagtcacacacataacagagaaggacgaactaatctctttagtcatataagatgtaatctactccaaccccttagaaccaaatgatctaatcacactgtgcatcaagtagatccatctcatgaacctagatccagacctaaaactacgcagaacctggctttgataccactgtaggattatggggaggccacgctagcaaaaaacaaaattttcgaccccataaaaccaagaactactggggttataggtcatggaattaccactagacacgtaggcaacagaagacgtctcgatgtagacgaacgtgtcgagcagtgtcgtgtagtcaccggtgtccttcacgtcctcgcgtggtccgtcctagtgctctagacgcagcacctccgaggtatccacacgtacaaggaggaaccgctgcgtaccgatcgaactgctaggttcacgacggtggcttcacgagggcgagaggcgagcggctgctcgtttgctggtgg

SEQ ID NO: 142132 - DNA, 626 bp, Zea Mays
cacgcctttatcatattcatgctagtagattgcatagggctgtccggctgtgttgggatgtgaaagttgtcacggcattgccctcttgcgccgtgggggtatgttctttttttcactgaacttgtttttgtgtctcagaagcttggtctctttgaagtgtcatagatcagaacgggaccaaaggtgagggtacggtgttctagtaacatgtctctatgtatcgggatcaacattgcaaaacagaaagtttatggaaggtaaaaagaaaactaaaggtccatgcagccatgaggccttccagcgtcaatgagcttgcattgctatctatttagccatctagatcagacaaaacttttgactttggattctgataaaggagcactcgagtacaaaggatcgtcattcacggttttagtctagcatatatgtctgtggatgcataaacttgattgtcttcccccgtaatagatatggtctagttcctttctttctttaaatgaaagattttataaacagtgatcacagtctcaaccaatataacagagattttatttgatttcaaccttggttggggaacaatgcgttctatccatcctgagctaacttgctgttttcttcttcttaac

SEQ ID NO: 142133 - DNA, 308 bp, Zea Mays
ggtggccatatagagttcatgacgccttgtgatgatctgagtatgtgttaataactcaaaaggatgacacagaagtagtatgagtgaatcaaccgtgatgcagagatgtttagggttggcgaggtgtggtttagagagatgcgacagaaaatataactcggggaaatacgagatgcaatagagaagatttgcgtcaacgaaacatgagatgcaatataaaataatgtcaaggcagaccatgtgccaaaaagtaattagagaaagtatgcgaagagtagagaacgtttcaatgcacagtttgactgacc

SEQ ID NO: 142134 - DNA, 510 bp, Zea Mays
caatgacgcacgggcgccgccgcccgcaaacacggcggcgaccatggccgtggatggccaactcgacaccccaggccgtaccctccaatctaagacgtgctacgtggtaagtagatgaaggcgatctccatgggttcagtactcaccgaggacaaggtcgtgcatgggttattcacggcgaggtgcgggcatggcggaaatcccaactctagcgagggattccaaaggactcagctaggtccctttcgattaatccctcctacgacttctatgcaatccgcccgagcctcggtgaccacaatgggggccaaaccccactgcagatggttatccgtggtggcagtgagttgtccccgtgtggaacgcggcggcacaatgggtggtgtggagtagcgacagcgaagaaagggcacgggtgaacgaggcccaagcatgcgctatttataggcgagaggggtgcggggatggcatgcaagctccaacgaggatctcgacatggtcggtacccgc

SEQ ID NO: 142135 - DNA, 553 bp, Zea Mays
gctagatccagttaattccagtttttagtttgcttcattttgcctaatcacttgttgctctgcagtccattttctgttattaaaaggacaatgatgtgctattttgtcccatgctagatccagttaattccagtttttagtttgcttcattttgcctaatcacttgttgctctgcagtccattttctgttattaaaaggacaatgatgtgctattttgtcccatgctacatccagttaattccagttttcagtttgctccattttgcttgttacctgaattgcttgttaactgttttgccatgtttctgcttgtttaatataatggattatgcaactagcataatctgtctattatattaagtagctagttgttcctctttaattctccccctcttaccttcatctgttcctgttttcctcttcccttacaacaatcttaccttttgttcctcttttcttctctccttctttagcctcttgtcttgtttaatttaatggattaatgcattatattatgcagttacctccataactatcttctttttatactat

SEQ ID NO: 142136 - DNA, 1221 bp, Zea Mays
gatgaactctagggccattttgaagatgatcccattgatgtttgagcatggttaccataatcggtttatagctggatcatagggctacaggtttgctacaaacggattagtaagttcttacgcgaaaattcaagattttggtgtcacaaatctatctatcaggctgactgaagaagattgtgatggtacagtaaccaaaaaaatcagcagattcagtgaactggccgccggtgacccttcaccgggatttgtgctgctcgccgtgattcgtgcatctggtctgtggattgagttcgccggtgaaaagatctcgtcacggatgggttcaagttactgtggcctcgctgttcctcaatcacttgcaccggcgacgtggctttacggccatcaccggagttggcgtctttcaccgcggttgtgccatgccccaggcctttaaccacgtcgattccagccgcaccagctcgccgataaccgccgtagcccctcagccggtgagtgccacggtttcacccgcgccagtagccttctccctctccggccaccagcgcgtcttcgtgaaattggacaccaccgccttgcgctcctataaattgatggtctgttctgttgcgccatactatcacgaagctagagcacccattcccgccttcaattagccaccatagccggagaatttccttcttcccccaattcagtcgactgcgttgccgtgaaccgcctcatcgcggctagctgcttccaggtccgccctcgctctttttgtccatgtttcagtgcccacacgtgcttgtgatcgtcacctgctcagcccattgagtttgacttcacctaatcaaccggaacgtcttgatcggtgtttggtatccgctgtcactgtggtcaggcacatcctggcccagattaatccaattaaagcttgttctagggtcgcctcgggtcagtaatgcttacccaacagctggtttaggcagccgccgaagttcttggctagtccgagcaacgggatggtcggtggtgagcacgccgtggtctaggggtcgggttaaagaagaaacagaactagaggggggttttgtaaggtgttagtgagacatgggaatagcaccgtgacccttttccagttaatcaaaatgttaggggtatttctgcaaagccgatagcgtgggcgcgcgcgggcgtgcttctgcctgtagatgggccggctcgggccaatttcag

SEQ ID NO: 142137 - DNA, 695 bp, Zea Mays
ataaaatattttggtaaaattattctttatcctttttaaatgagcctaatacctgagctaatgctatagtcccaggaaagagagggcccaacgtcggcagcggtggcagcgtgacgtgagtgagggtggaggcatgggcgaggagtgaagagaaaaaaatgacccaaatatcattgattattggatttgagtgaataagagagatgcgttgttcaataatctaagccgttagttttgatattatgtttatgtgggtggaattcgtttaatggatttaggagaggttttggttgtggggtgatttggttggatggattttgtaaaaattaaattggtaagttacataaagtggctcctcgtattcacatcaacacctagattctttcgcaccaccaccatagaggacattaaccttccccgtcaacaagggtctcgaaccgcattagcgacactgtaggcagcagagcaagaacaatgagggagaggaggatgagacacttctgcaactctcgactgtaatatgtctttgcaaccaacggggcaagaacaccttagaggaggaagaggcgctgtcgctgatgacgcgtggctgaaaagtcgaggaagaggaggaggcgttctggatcctaagtgtagttttgtattggttgtcgacaaataatttgtgagatattaaagtcgatttgaatatatat

SEQ ID NO: 142138 - DNA, 299 bp, Zea Mays
cacaaacattcagtttttcatactcagcttcagtttgatgtcttctggggaaccctaatggacacaaactttcacaagcatcaagttattgattggaaatttatgttgggccagtcagtcatggagggattgattccaaagttcgaggcatgtggtctctatgactttatgggccagaagacagacttcagtgagatggatgtgaaacagttccgggcaactgctgagattgacattgatgagcaatcaatcacttggatgactggctttaagaggtattctgcaacctttgctaagtt

SEQ ID NO: 142139 - DNA, 675 bp, Zea Mays
cccacccttcatcacggattggatggcgaggagcctttcttcctcccccgatcagtacaggcggcgcccaaactcccacggccgcgagcacatcagagtcgcgcccgacggtgctcccaggtccatcaacggcaaaccaagcgcagatgcaagaggggcggaagtgagcataatgggggagtcatcataccctggtacaagctgcgaggtgccctgcgcacgtgacccgcggcccggtggttagatccttacaccggcgagcaatcactgtattatggtggatctcctaggacacccacccaggacgcagcaagacgagggtatggatcgacggcggcttcatcttttctctcccctctccatttcctttgctcgacaccgcgcttgatgaagatccgcaccggccgttctctatctctctctctctccgacctcttcctctggttttgatgctcggctcaacgctacgatctcccagcctcgataccttacgagattgttgaatcgtagagcaccccagccagtattttaaggcgcaaggaggtaggattgaggcgagaaatccgcacttggcgacctccccagacgtccgcccaacctcacgcagacgatagcgattctgttacgttaggagtccgtccaggtgggagctcggccggctgttccaaggatcgc

SEQ ID NO: 142140 - DNA, 358 bp, Zea Mays
tgctctgaatacgtcaagtctggttctagggcaacatccattacttcaatggttcgatcgggaacccgaagacacttcttcaactgagacacgtggaacacatgtactgcagacaaggttttgggtaactaaagtcgatatgccactggtccatatctttcaaggataggaaaaggaccaatataccggggtgcaagcttcccttttaccccaaaatgtgatatacccttcattggtgaaactttcaggtagacatagtctccaactggaaagtacaagggtatccagtgtgtgtctgcgtaactcttctgacgggcttgagctttcttcaaattatgaattattcgttgaaccttct

SEQ ID NO: 142141 - DNA, 986 bp, Zea Mays
aattaatagcgttgtgactattcatcatatagattaagttcgtcaacggaaaggagcccaaacccaacaactgggagggcaaaagtgtatctgttaagacagaacagaacacagccagaaaccaccaagttcgtgaacacagaaggcagataaaaacgccagggccgagacagccaaaaagcctggcgaggttgagacctacaaaagacacccacccaaggcagaattaacatatcagttgtcatcatctgaagagtcttgcgtcttgtccccctcatcttttttgcctgacttgctagagccaacacagccaggtggattcttctttttcttcagagcttggtcagccaattcctcctctgacagattacaaaagcgctctcctaagcgcctgatagctttagctgaaagtgagggggggccctcacacttgtgctgacataacaaacaattcttcttttggcaagagccttgcctgaatccagcccgggcgtcacgtagcctcttgcttctcctcagttctgattccacaatagcaatattaggcttggaggaggttttgtccgaagggacagaggtgccatcagcagattcctcagaaacaaccgaatcagtgagcgtgtccacaggacacttcctggggatgacaaaagggattgtcacagactcaggctccaacaaatctgaagaaatatctgaagacaagaactttttggaccagccaaaggaatcttcgtgcatcaagttggataagaaaaagggcgcccatttcttggggacctgcaccgaggtcactgagcaatccaccggagcaaaaaatctctcccagatcctattaaactgggcattcctttccctttctaagagactcagcaaaacaggatccgcacgccagtcatgcgaaaacataaagttcaaccccacgttattgtgcccattaacaaaaggcaccactggctgggcatccggaataactatatccccag

SEQ ID NO: 142142 - DNA, 535 bp, Zea Mays
ggcaggggttcaggaggtttctcgacctatttgagaaggtcttcgtaatacaatgcccgggggctgtttttacagacacacattcataaaaaactactagcatcagaatatacaagataaactagttcaaaggcatttaaatgaagcatgcagttcaaatgccaattattctttagtggcactcaccccaacaggtccagtgattagaagtgtattttcacaatcagaagcactctctgaataatctgaatcagatatatcttgatatgagttatcattagtgtccccgttagcaactccaatcttgtggcctttttcatcccagcttttaagccattcagcaagaaactttacgtgctcactatttccacatacctgtttaaccaaagatagcagtaacataagatgaaatgtaagcatactacaaagattgatctccactttcctaaatgaagcatttagcagaaaaggctaatgaaatagaagcaataagggaaatgcagtgcacaattgattatcttcatattatgcatgg

SEQ ID NO: 142143 - DNA, 274 bp, Zea Mays
gaggtagtggctgagctaaggatgcctaaaacagcaaaagaagattgtcaccagatttcggttgatagcaaggaggccaacccgctcgaggttatcagggttgtgtcgaactttccagatgtgtttcccgaggaactaccgggcatgccacccgagagaaaagtcaaatttgccatagagcttatccctggcaccacccccatttctaaaagagcctatcgagtgtctgggccagaattggtggaactcaagaagcagatagatgagctgttag

SEQ ID NO: 142144 - DNA, 817 bp, Zea Mays
ctcgacatctcactcaaggacaacatcaagggatggtgcctggattggttcatcgtggagaatcatgggaattccctccccccacggtcagggagacaaccggatgttcgcactctgagctggaccgaatcccccatagaccaggaggtggctaaggcaggggctctgctagctgaagttggattgttgaaagaaaggggtctgactgcagaagctgtggtcgctgactttgttttcaagaacattcagccgctaaaagacagagcatatccgacctatctgtatcgaggcctggctgattcaacccaggtaaccaacagaagaattcctgctgtggacttggtgagccggcttgagatgatactcagaggcaaggtgtcgaacatcggcgctcctgttgcatactcggcctggaatctgcctccttcccaggcctttaccagtttcgtgtaaaatcctgctgatggtgatagcggtttgggccttagagtgcgaccctctcccgaagaagttagtgctttggttgcctcactcggagaaattcctgacgatgagaggcaggttcattttgaggtgcctttgaatccaagtgacgcagagataagtgccatgctgaatatgttagctgaggattcttctgatgccgctcctgctgaaacactggtggtggcgtccatccctgaggccggcaaagctttggatgctcagaggtctgacagtgttcgcccgaagcgttctcgctgagacaatcagcccacttctcctgctgaggggaagaaaaagaagaagagatgtcttcgtcgagtgtctagcttgg

SEQ ID NO: 142145 - DNA, 1127 bp, Zea Mays
aagagtaatgccacatgcaatttatacaccctggcaacatgtccaaacacttatgcaggagaagatactaggttgtggcaagcaataactaatttcatcatttcattattgtcctgctcgcaagagtagcgagcagaacgttacatgtgccatgacttccggggcctattagctaacttctagctaacgtattcagtaagagttgatagatagtgttcagtttccaggtaccataatcaattcacacgaccagcagctgcacccaatttgccgttttttagtttggtcggctaactgatatcctaagaatgtcccacccaattcacacgaccagcagctgcacccaatttgccatttttaagctcggtcagctaactcatatcctaagaatgtcccacccaattcacacgaccagcagctgcacccaatttgacatttttaagctcggtcagctaactgatatcctaagaatgtctcaccccattcctacacgacgcgccaaatccagcgaagtctagtataacatcagttcaagcactaggtacagcatctgcaaactgcatcacgtccattacccggtccttgggtcgccagttggagacgaggccgctggtagagagcgcggcggtggtagcttcgtcgatcccctcgtggcgatagtcgcacagcacgaccacctggggcaggtacgcctcggacgccggcttctccacctcggggacctccaacccgttcttgggctccggcccgctggcgacggggaggtcatccgcgacgtggttctggtggtggttgtggtggtgatggggtagcggcggcaccggggccaatgacggcgacggcgaggacgaggagtggccgaacctggacgccatgagatctcccaatgccatcgacgtttgctgggttggtgggggaggggtttagggttagggtttagatgcggctgggaggatggagagagggggggtgtaggtaggtgggaggagaagcggcgtctcggactctcggtgcgggaggaagcaggcgacgccgagcaaggagagcgattgacgacgagaaagtaaaataaaactgctataaaactaaaactagtagcttactcgcgccttattcgaatttttttc

SEQ ID NO: 142146 - DNA, 374 bp, Zea Mays
ttgtaacataataataagcagtggtcaaagtggacctaaacagattaattgaactgggttgggatgagaattgtacctacgacgtcctggcggtgaggtgtgaggactcgttgtcctcctcgctcttctgcgtgcccagtcctcctctggctctagtcgtctcgcgtccacatgtatgtgtcctctctctttgggtcgcaacaagcttctcctcaacgagaactcttccggctcctgcgtccgcacgcactcagacaaaattcgataatcagagaagccgagagggaaactgggtgtagctcggcagtgtcgacgaagtgtcgcatgctcaccatttatcatcctcgatttaattgtcgtgttagtcaccaaaa

SEQ ID NO: 142147 - DNA, 738 bp, Zea Mays
gcgggtagcacataagccccagaaatacccgcagaagaggaagctcccggagtgaaattaatagaagaacgccactgagtcgccgggtgaggcagacgcggagctccaaactgagacgacataggagtagtcggtgcaggagtaggcgcactgaggaaaaccctgcatcggcacaaactgagaagtcccaggcacataaaactgctgcggaggaagtggaactgaaaactgctgctcaacacttgacatcatgttgatagtgccctgagaagaggaggaagtcaccggctgccatctgagcttcccattaggattcctcttacacaccacatccttgtggtcctgactgcagatagaacacctgccactccactggcactctgcacgacgatgcgcatcaccacaacggaaacacaccagccccagcccgggcttaggaatagcccgaaacctctgagtacttcctcccgaagtacccgagtcagaagatttgccacggtaaggatggtggcgctgatgctgagacttgcccctcttgtgggctagacctccagtgttgcccctcctcgcgtcctggccatgaggctaatcaacacctgaagacttctgcgactccatggtatactgatgctgcatctccacacccagtgcctgctccactgtagtacggaagtccaccaacggaaaggctcaggcatgcctgatagaggtttcaggccctgacggaactggctcgcc

SEQ ID NO: 142148 - DNA, 501 bp, Zea Mays
acccgataagcatgccggtgaccgccgctttccggctttgtgccgtgtgtctaggcttttccaccgcatcgccgtgacctgctctctctctccattgatcaccggagtgactggcacggcgtaggacacgaattccttgcgccagtgaactctccctcctccgaccgctgcgtgtcttcgctaaattcaccggccaccgttcgctaatgctataaattgaagccaccgcaagctccgtagtatcatcacgcaccacaccacccagtataacccccagacgatcaccagtgagctccaattttaaacttcccccaaatctgctcaagaacaccgtaggagagacctcaccgcggctagcctattccaggttagttccagtgccttgatcatttgttctagcattcttaggtccttctcaagctcctcgacccctctgattgaactagaccaccatgaatcaccgggaacacgttgttctttgggttgtccgcgctgtcaccg

SEQ ID NO: 142149 - DNA, 386 bp, Zea Mays
tccctccataaatagttcatggcttcctgcttcttctcatcatctgcgacctcttctagagcatatctgacatccctccctgcttgagtgaaagaaactccttaatcttcatcagtctggctagaatatggtagtttctgaagcttgcagagaacacaacccaggtgatggtgtcgacaggagcatgggttgcacagtaagcatcccaccgattggcagcggggccagtgaggcgacccgatgcataaaggacttttcctgatccatgcattaagcgatattaagcatcttctccatatatttcagccagtcaatggcctgtagtggatctatggagctggaaaaggttggcagattgtggctcataaactcacgatatttgtctt

SEQ ID NO: 142150 - DNA, 577 bp, Zea Mays
tcgaggagttcgcctaggaggtattaaaaaaatctgaatcggcaccccttcagtccctgacgctttctttgggcgtcacctcaccaaaaccccaacctgctccgtcttcgtccgctggttggcgatcctcagttcctgctctgatggcgtataggcgcgttgatcctgaaccctttctcccaccaggcttcagcgcctcgatggtccttcaccgggaaattatggccaggtcagttactaggcgcctcccgccattgcatgaggactgggctattatcagcattcaacctttacctgaccatgagattactttcccggtggtgagggatgtggttagagaataccttgtggagcacagacgacttggggtgcgtgatatccagcggtcgcacctgggtcaggttctggttcagtttagcagcgtgcttgaaagagacaatcttgtcctgctcggtccgcaacaataccttgatgcttccttcactactcagtggaataacgatgcttggaatcatagagcccttttctttaatcgggaatgttggcttatgttgttgggattccccctggattaccg

SEQ ID NO: 142151 - DNA, 584 bp, Zea Mays
ggcaagctcttatcccaactaccaccatgtttaagagcacaagctcttaacatatcatccagcacttggttagtcctctctgtctgcccatcagtttgaggatggtaggccgaactaaaattcaactgcgtatccaagctctcatgcaacttcttccaaaactgagaagtgaactgtgatcctcggtctgacatgatcttcttaggcaccccatgtagacaaactatccgagtcatatacaattctgctagcttggctcccgtgtaattagtcctcacaggtatgaagtgagccacttttgtcagtctgtacacaattacccaaatagagtcataccctgcaggagtacgggatagtccaacaatgaaatacatgcctatttcttcccatttccactcgggtatcttaagcgggtgcaatagtccagctggtctttgatgttcggccttgactctttgacacacatcacacttagccacatgtgcagccacatctctttttagcccataccaccagtacttctgtttcaaatcctgatacatcttagtgctactagggtggatagagtaattagaatcatgggc

SEQ ID NO: 142152 - DNA, 467 bp, Zea Mays
agacttgctcggcatagatatcatttgattctacttggggctcgacaacttgaaacccctgctgcgactgctgatgcacgtccacatttgagatcttaggattcagagaattatggaggtttgagataggactgggaacaggcttactaggaagtggggctattgcagtatctgaagagagcttcgatattaccttgggagatgtagcagtttccatggcgaggtcgttctgtatgtcgaatgaattggctgcatcttaggcggggctttcgtcagcgaccatctcaacaacggctccaggggacgacccatcagtgcgaagagcacctgcagagaaacctgcaccagcaattaccttgggtgcaatcagctttgttggtgatccccctctggcatggaagccaagtgcctcttgcatgccagcttcagtgccaccattcagcaagagcctgtcagcaccagccgcc

SEQ ID NO: 142153 - DNA, 955 bp, Zea Mays
gaccatgtcttcaagagtctgatcaaagtttgctagagacaattcttgcagaccaatgagggcagacaaagctggagaagggacaccactactttccccgctgactatgtagtgtcgactgttcttccgaactagagggatttcaccctcctcttcctcatcttcatcaacaatgcggacgatacacccattggggtcagcatcatcttggtcacacccattgggtttagcatcagtcgggttacacccattggggtcagcttcagcaaaaactagcacgggcacttcctcaggagcaggagcagaaggaccagcatcctgatccaagcttgacactcggcgaagacgtctcttcttttttctattcccctcagcaggagaagttggttgattggttcggcgaggacgcttcgggtgaacactatcagacctctgaatatccaaagctttgccagcctctgggatgggcactgcatccagtgtttcagcaggggctgcatcagaggaatcctcagccaacatatccagcatcacacttatcttagcatcacttggattcaaaggtacctcgaaatgaacctgcctctcgtcatcagggatttcaccaagtgaggcaaccaaagcactaacctcttcgggagagggtcgcactctaaggcccaaaccgctatcaccagcaggaggatttgacacaaaattggtaaaagccttggaaggaggcagattccaggccgaatatgcaacaggagcaccgatgttcgacaccttgcctctgagtatcatctcgagccagctgaccaaatccactgcaggaattcttctgttggtaacccgggtcgaatcagcgaggcctcgatacagataagccgggtatgctctgtcctttaatggctgaatgttcttgaaaacgaaatcggcgaccacagcttctgcagtcagacccctctctttcaac

SEQ ID NO: 142154 - DNA, 458 bp, Zea Mays
aaagaagctacagccccttattacaaatttacaatactcaacacgccatattgaccaagttaatgcagaaaacaaagtttagataaaagcacctaactacaaatcctattggtgaacctccatccatacttgctgaaaatctccatgacgacaatctccatcttcagacacgctgtctttatcaactctttatcatcttcagccttctgcatttgactccagaagcggaaccaataggttcccctgtaaattacctgcataaatgttttcattggagatttatcaaaaaccacatcatttctactaagccatattgccccaacaaatcgccgatgcacccactagtagaagttgtttcaatctacccccaatcccattaagccaggaactgaacatatacattgtgttatgtggtggtttcaacccaaaacatatttcgactaaaccccatataaaac

SEQ ID NO: 142155 - DNA, 422 bp, Zea Mays
ttcctggcacgtcgctggcggcttcgaccgtgccgagtacctggtgggcgcgagccaggcgtttggggtagggccacatgggcaggcttatatgagcagggagtcctggcggccagtgcggatttccgttgaaccggactttgctggtagcagagaaaccggccggatctcaacgaaccccgcgatttctccggctgaggtgctcacacgaggaagaagatcccggtcggggcggctgggagatccatgcttagcgcgcgagtctgttacagccgtggagtagaagattctgttgaatccagacccataagcagcgacccaagaggcttaaagcaggttcgtgaggacttctgggggcttgcatgctgacctcattatgatgatagggtgacgcaggctccggcaaggagaataaagaattg

SEQ ID NO: 142156 - DNA, 347 bp, Zea Mays
gctccatggtccatgtcggcctagaaggcatggagcttccgcacgacggaggagttagaagcgatgctactgacgcaacagaaggaggaggaggacctcgctatagccacgacgccaacagggccaaagctagcgcgagggtttgaggtcacggctagcggcaagtggagggcacaatcatggtatctaggcgagatggaagtgacaacgacagcgttcttctccagctccgcgagcctgagggactgcatgtgccagggcacgcagaccttctcgtcgagcacctacgtaaccaccatgtttgggacgccgctaccgctgatcacagttgactccgctccttttcc

SEQ ID NO: 142157 - DNA, 498 bp, Zea Mays
aggtggcggtgtgcgccgacgcttgggagagctcttgacgggggtggaggggacgacgaagcacctaggtaacggcgtttgagggcggggagtggactgtctagaaccttcacggcaaatggagacaccggatagggccataggggtagctgggggttatacggaaacggtcgcttgatggctccttcgtgcatcatctagaatggtccttcgcttggaggagaaagagcgtgtgttagagaccgctgggatgcgtgagatgtgattatgaccgttggatttggatcatgcggctaaaacagaaagtgctgacgtggaggcacctgaaagcagaattgctccctgctttaccgttggatttggatcatgcggttaaaacagaaagtgctgacgcggaggcacctgaaagcataattgctccctgctttaccgttggatttggatcatgcggctaaaacacagagtgctgacgtggaggcacctgaaagcagaattgct

SEQ ID NO: 142158 - DNA, 523 bp, Zea Mays
acgcgatccccgccgaccaccgtcctcccccgctctgccatcacatcagtgccagtggatttaggcaccgcttcgtcctcacccactatgctcacacccccacacgacaacctgccccgagccgtcctgtcctcggtgctgtgcgccattatcaccgccgctgcacacctcgccagtgtccgccatccccactccccctcttctctaggcgcctataaaagggccgtcccgagcccctcatctcctcgccccagcctcaaccactatcctccccctgagcttaatcaagctggcaccaccgcttctccctctgctccggtgagttctcccctctccgatagcctaatgccaaattaaactagctcactagcttcaccactttgtcatgagcacggaacactgcatcccctcccagtcacaccccaaggcctcgctggtgacctcactgtcgcttgagccccgccactttgctgtggtcggccctttccgaaccactatcggcaaaatcctccccaccaccgtg

SEQ ID NO: 142159 - DNA, 474 bp, Zea Mays
ttatgttgttttaataggcgctaagggatgaagagattgaggacctcgctggcttggaaagcttaatggatacgcaagatgctggtgcgaaggcgaatacagaagagcagtcatcgcacgggagggtcggtggtactgaccctgcagcagtggggaccttgcattcgtctgccgctgagcaggtatcaaataggagtaggcctgctatgacaatacttttgatatttgttaatacaagtcggttgttgcgtaggttctggtgactgggcttgcgcaagcaaattttggcttcctggacaaagggatggaaatggttggggctgttgaatgtgttacaccattgtcttgttggagttcaacaaagtttagcaacgatggctctgaatttgactcatggtcgtcgtgtagcgaagggtggttgagccctttcgcgaagatggacgaagagtcctcggaagagaatttggatttatt

SEQ ID NO: 142160 - DNA, 405 bp, Zea Mays
atgtttgaagaaaaaaaattgacatgtgcatagtagtaattctctccccctggcagatggcttcggataaaaccacgcctaccacctccgggattggagcaaggtttcccctaggagctgaaggagaagccggtggagaagggagtgagacccacctcctcgcacctccggatctgccattagatttagcccaagttctggccaaccaaacccgactcattgaagtcctcaccagaagccttgagaaccagcgcccgaatggtggaaggcctcaggacatgatgagagattttctaagactcaagcctcccacattcgctggatccagcaatccgcccgacgctgatgactggctgcgcacaataaaaaggaagttagaagccatcggatgccccgagaaccagc

SEQ ID NO: 142161 - DNA, 586 bp, Zea Mays
gaggcgactacatattagcacgaaacactgataccaaaaataaaagttacagataacttgcgagggctgcaatgactctttagtttagttaatgacagcatatcattattatcactcacatgacttggatacattcagaaaaatcgtggcaataatttgttacgtttactccttgatcacacggccttgacagaaaagaaaagctgatcagaaaggacagaaaagaaaagctgatcagaaccaaagtgtagtaatcaaccacagattcccgtagcaagatgtccgcagtggcacttgccaacaagatcggacgacgattagtgatgctgcgggttgggaccaccggggctgagcctcttcgacccgtcgtacggtatccccggcgcctcctccgaccaggcagaggctgaggcagaggtcgtgttcccttcagggcccttggcaatgacaacttcgtctcgcagccagcgtcgccccatcgcagggcggctatcagagagcgggaccggcgacgaggcgatgacgagaacgacacagatgcagaagcacaggacgagcttcatggctgatgagaagtgtgctgcta

SEQ ID NO: 142162 - DNA, 342 bp, Zea Mays
atcaaattatctcttccggggtaagtaatatatagaacatgatcatgtgaaatttgtgccttaaccatgattggttatcacctatcgctcataaaaatactagtccaaaactgaatgtttccataaagtgttaaaataatatctattatctaattaaaagaacttgtgaatgattagaagagattgagttcatgcatttttcttggaaagcttgatttgtgccgtgatgtcaattagaagctttaggattaagtatgagggtgcagaactgagtactggttaggttttgtcataatcttgcataggataattttgctgcacacatcctctccgttgtggtaa

SEQ ID NO: 142163 - DNA, 404 bp, Zea Mays
atttgctagcaatttcaaatatgattctagcatgatgagtgaccgttgtttggggtagttcaccttgtttacctttgactagcacttggttgatttcatgcttacatatgtccagtgtttgttttatggtgaacttctcttttgactgcttaaaactaaatgaaatgcttacaattcacatatcttgtgcatatgatcagtttgagcatatgctagctcgtgaatttaatgtttcacacatcaaagagtgctacttatagcatttttacactctgactactatactcctaaaactcctgcattatccgcattttctacgttgtcttttgcatctttgtattttcttagaggcagatctctgatcgaggggggtttctattgatacccttgtttatggctcgatg

SEQ ID NO: 142164 - DNA, 598 bp, Zea Mays
tgtgaggctcctgaatcaaacagtattgatgctgatatggaattaataaagaacgtaacaatgactatgtcagaaccatcaacagtagcttcaacactgatctgattaaccctggcgatgttataccctctttggtcgtgactgttgggtggagcctgcttcccattactagaagactgattccacctgttcagattactgcctcaggctggagtggtgtatgcaacctttttgggacaaacgatagcataatgacctgcttcaccacatttgaagcatgtactggttgttggggtagctagggtggctatgttttggttgggtgctagcttcacgagtttgtggtgtttggggtgtggtttgcactgtttgcggagtagggcacggatatgagtgttgcccactacttgggcggactggggttccctgtggtggagcatagcaagtggcccgatcagtcactccagaaatagttcctgcttcttctcgtcgtctgcaacttcctcgggagcatatctggataattggatgaatttgtctatgtactcgctctctgccatccctctatgtttaagtgaaagaaactccttcttaatct

SEQ ID NO: 142165 - DNA, 604 bp, Zea Mays
ctgtaaggtagtaatgtgaaagtgtgatgcaaccaagcgatttaaactctaaaggtcactagggatcattattttccatacgaaagaagtcaatgaagcaaactagttggcacatgactaaggtcagtagtgattattattcaaacaacttgtgcatcacactcaagaaaatgccctacacctttgtacattttaggccttattcggttgcatgaggattgaggggttgaatcattcaattttgagtaggaagggatttaatccccttcaattcacccctaaccgaacaagcccttaatggtctgaacaagaatatcagaagatttggataaaccacctaattgttgaggaagtgttaaacacctctgcacgcctaagaagatgaaccgaactttcaacatattgaacctgtaagtagtagtgtgaacgtgtgatacaactaagtgatcattattttccagatgaaagaagctaaattaagcagactagtgggcacatgattcgtcagcagtgatcattactcaaacagcttgcgcttcacgctcaagaaaattctctgtgcctttgtacattgtgtaatgatttgacacaagaacatcagaag

SEQ ID NO: 142166 - DNA, 370 bp, Zea Mays
gacaaaggaaaagaagagttctaggttcaggcagcagctgagggcagatgaggcagcacgaacccattttggggacgatgagtatgaggatgaacttaaagcggctatgcatcagtcacgtgtagagcacgaatttagtcagagggctggtgcaaggtatgacaggggtggtggatcctccagccagaggatatctcgagggccacttgataggatgatgggaaggagtagggaacaagtacctgagcgtgttagagactacaatcttgctcaagcctctcgaccaaggcaacagaggatagatactggtccctggacaagtaagggaaggagctcgaaaaagattcttggtagggcttaggcaaaggct

SEQ ID NO: 142167 - DNA, 964 bp, Zea Mays
tcgaacctccttccctacgtagttaattaaacatgttgcaaatagtagtatcacagcaaccagcgctagcttacacagttcagcagagctcctgcgtgtgtactagtatgcacatacacatgccactgtacatatgcaacctgcatacacgcttcacactttgcacagtgtgctgaaggttacataatacgacggtcgagggcgtggcgtggaagaaaacgacccggccgtctgccgattccagaggacgggaggacgacgcttggacgggagcgagcggcggacgatgctaaccctgcctgcggcatgcagcagaatgcaaattctccgggtgcagtgcagtgcagtgcagccatgcaggaaacactttattcgtgccacggggaaagctaccaatcaagcatgatttcggcctcttgggctcttggcgttagcaccgcagtccacgaatattgctccgatccgctcggcgacgtgtccacggcgacatgctggagatcccgctttacaactgtctttttttttttttgaaatggaaacgcattccatggctattaagcagctccaggcacatcgccggagacaagattacaaatgaagtccggtgcatgatctagccataaactagagtcaacgtcacctgagtttgctccatgagcagctaaacagtcagcaactaaattacaggttctttgacatttagacacaatacaacaagcaaactcagaaaacatcctactccttatttccttgaacactacgcccaaagcagagaggtcatgttcttgtgaggtcaacgccgtcttcaggatcgcagcatcggtttcaatcatcacattttgcattccaaggaaaacagccagctccaaacctttcatacaggcgacgctctcagcatgaagggcagaggatatgccagtcaaagcgcccgcccccgcagccaaaaaaccgccatcgtggcccc

SEQ ID NO: 142168 - DNA, 408 bp, Zea Mays
accaacgcgttcctggcgatctaaggtagcttagctcaatcgagttggtcgaggagcatcaggggcacacgagaacactaaaacgagagggaagaggctatgagcggacctaagatgagctgaccacggcgaggtcacaccgctcggtgttcttgagtgatttgggggaaatcccaaactagggagttctagtggatgattcgaggcatgggttgcttctctggttgcacaattacatagcggagtaggcggggtcagcaatttataggcttccacagtggtggcgtccaatttcgtgaagatgtgctggcggccggagaggaagaaagttactggcgctcgggattagtggctttcaccgtggcaagctcccaggcgatcaccgggcatgcacgatgtgattcactg

SEQ ID NO: 142169 - DNA, 773 bp, Zea Mays
aaagggcacaggaccaagacgttcctgcgggtgctcaaatactccaatggcggggtcctcgaggtgaccttccagccgtctctctctttctttgctggtcttcctcagatcgccagaatggaaaattaattgtaaaagatgcgttattctgattgcctatgcatgcatgcatgtatcactcactgtatcagccggcaaaagtgtacaagatcaagcatctccacaagatagaggtctcccaaaacgaccccagcggctgcaccttcgtcctggtatgccacttccccgttcgatctccagaatataaataccacgaagaacaatggatccagaacatatatatacttgtgatgacaaatcgcctgctgtgctttctggaaatgaactgttgttcaggggtttgacaacctgagaagccagagtgtggcgcctccacaatggaccatgcgcaacaaagacgacaggtgacgcatcatcacctcttcacgatcaattcctactcccatcctgctcctgcgtgtgccatcagttcaagattgtatacaactgttatctactgcaggaaccgcctgctgatgtgcatcctcaacatgtgcaaagagcacttgggaagcatccccaaagtcgtcggcatggacgtcgtcgagatggctatctgggcaaaggtatcatgcctcttgcttatagttttgatgacataacactaactctcgcacatgtgggccatctaacaaaacccctagagttgcatgggtattggaggggaccgagag

SEQ ID NO: 142170 - DNA, 322 bp, Zea Mays
tgtagagtcatccttgccagaagccatcgaaatgcgatcatcccttcaccactcaccccttgacacttttaccatccgagcaaatgcttcccgcagagcgagcaaatacatgacctctcctagctcaacgcacgtctcggccagctcctcagcaaacctgtcacagaccttcgccagttttgctgccctcgccagccacttcgcctttgccttcaccttcctcctctttctcactagtggcattacaaccttacccttggagcacccctcagccatactaccactcttgattccacccttcttccactcctcgacatcccca

SEQ ID NO: 142171 - DNA, 851 bp, Zea Mays
atttttttttgactgatttgtttattcatctagatattttttgtttattcaaactccgtgacgcaaggaccatgcacataatctattggagcactccgtgtatgtaccactgtgcgcagaaactgctttctagagagtagttaaatggtcactttgttttatgcgtcctctactagcagtagctaataactcaataaaacggggaaaatcctgggggtacggattggatatgcgaaggtgtcgaagtccacagctagtttggacgttttcagatcatttttcatgtttcagtctttaactaccggccgtcgtcctttgcacagatcaatattatttgcctaattatttacttgacggtaatgttagacgtaagtgcattgattaatttatgattttttaactgtattagatggtagttgttataattactgacatgatagttgttataaaaaatatgtggtagtattatttgcagtgttataggtgagatgccggatctaacgtgggagtatggagaggaaattagggatagttttaggtgcaagtattaccgtaaagtgaagagctaaagaggtgctaaaagattgaagtagtagcatctgtatatttgctttcgtcgtatgaagctccgtcccttccttccaagacctagctagtcctagactactacctgctcgtcaatcaaaaaatcgtatgaagcaaaaaaaatctaagtattatcgtatgaagaaaaaaaaatctagatgagaaataaattttgacggacaaatcagcggcataaacgaaaaaatctcgacaaaaaaaaatcagcgacaaaaacaaaaagtattaaacaccgatggggtttgaac

SEQ ID NO: 142172 - DNA, 392 bp, Zea Mays
tagtagcaggatgggtttggtctaatccttggccctgccagaactaaggatcccacatgggtggtgggaaaatgtggttacctgaactggggccggcaccaggaggtcgaatatgtgagtttcggttgttctcagccattctgggaatgaaatacaggaatcaatgaattggaacaacagaaaacacacttttactaaaatatagcaatgttcatgcattccacaaaaggttcatacaaaaggaacattaacatacatcgcacatgtcctacatcggcaacccatgcatcatagacatcacacataagtttttatttatttggatgcattactagcactaagactctactaggtaccacatttacaggttccaaatgctatacctagtggac

SEQ ID NO: 142173 - DNA, 414 bp, Zea Mays
gcgacttcttgctcggggatgagtacgtactctgcatcagcgaggtttccatctaaatgaatgcaatgaataagagacatgtatgctatggtatgtaaattaaaatgcaaggtgaagtactcaagttagcaggacgggtcttagttccactatttaagattttaggggtatacttggtaattaggagtaggtgtggctagtctaggaagttggattaaggttgtacttaacaatctttcaatgtcttagtgaagacttaataaagttcttggctgaagttatttatgacttaattagcacttcattaatcctttctttcccttttcctacttaggcttttagagtggctttgaactacaacactgatttagaaatttataacaagcctgtaagaattacagtggctcctcactg

SEQ ID NO: 142174 - DNA, 298 bp, Zea Mays
cacaccctaagccttgccttgaagcatcacagaagatgacgaaatcctggtgtatatctggtagtgtcaaaacgggcgcggtcgtgagcttttcctttatgatttggaaactttcctcacactttggggtccacacaaacttattgtccttcttgaggagttcggtcataggtcttgctatgctggagaatcccttgataaagcggtggtaatacactgccattcccagaaagcttcgcacttcactgacgttggatggctgcttccattttgaaacggcttctaccttggatgggtc

SEQ ID NO: 142175 - DNA, 371 bp, Zea Mays
ggcatggctagaaaggagataggacgtggcgctaaggtcaaattcaaacaagtccgtcgtctaccagtgcagcatggaaggtcatgaggacaccttgtacgcggagaacgggatccagttctacctgcagaccttgatctggggcactgtggacttaatttgtgtttggcaatgcctaggccatgttccagagctacctgctgctggtgcaccgcccaccgaaaggcaagcacaatgtgctgacggcatttggctgcaacaacgctagccgcgagtccgacttctcgttccacatgtgcaccgtggaagcggcaccgggcgtggacctcgacggcgtggagacctacctcggctgcccctacaggaacttc

SEQ ID NO: 142176 - DNA, 802 bp, Zea Mays
caacttctagtctctctctgacaagccggcgtagccatgggacctcaaatccatcaggtgccagggaaatgaaacacttcgttcatacctcaagaggtttcagaccatgaggaaccgcatccccaaagtcgccgaggcagcggtgattgaagatttctaccggggatccaatgactcggccttcgtctgagccatactgcaaaaagcgcccgccacctccgaacaactgtttcgagaggcagacctctacatcaccgtggatgagtgggcccaggacctcatcggaggtacgaaacatgctccacctgcgtcacagcgcgacgcgaagcagcaacctgataggcgcttggagaagaggcctcatgaggaggtacacgccgccggaccacccatcgctcaagcccgtggtgcgcccagcggaggtgaacggacactggatgacatcctcgacgcccagtgcctgtaccacaaggacatgcgccacaccctacagaactgtagggatttcaagcactccgttggacacgaccaaccgttccagcctctaccacctcccccaccttgaggagggcctggcgagcccagacagcctcagcagcaagaagggggagggggcggagcattcccgcgtattgacagggaggtcaacgtcatcttcggaggacatagagcacatgagaaaaggaggcagcaaaagctcaacgaccgacaggtcctggcggcaaccaccagtgcctcgctccctattagtggtcggagcacgcaataaccttcatctgagcggatcaatggctcaacttcg

SEQ ID NO: 142177 - DNA, 364 bp, Zea Mays
gcaagaggtgatgaaatggaagccacccacgactatccgtcagattcggagttttctgggattggccgggtattatcgacgatttattccagatttctctcgaattgcgaagcccatgatagaattgttgaagaagggatcaaagtttgaatggggccagaaatgtgaagatgccttccacaccttgaggcaacatctgaccacagcccctgtgttagcgcaacctgacaacaacaagctatttgatgtgtattgtgatgcctctggcactggactgggttctgttttgatgcaagacaaccgagttattgcctatgcatcaagggcactcaggcctcatgagcaaaattatcccactcatgac

SEQ ID NO: 142178 - DNA, 677 bp, Zea Mays
tgacagttcaggttaatagtgcgaaagatgtgggtgagtgggatttacaccaaaataagaagttctcggttaattccatgtatctggcgcttatgtcaaatggtattataagacaaaataatcctctttggaaattgaatataccgcttaaaattaaggtttttctgtggtatcttggcaggggggtcatcctgactaaagataacttgacgcgtaggaactggaaagggaataagctttgtgtgttttgttccaatagggaaacgatcagacaccggttctttgagtgtcattacgctcgtttcatttggagggccttgttagccgcttttggtctgccgatctctcgggacatggagcacgttgctgggaattggttgatgggtttcagtaatcatgacaaatacctagttatgacgggggcggcgactatggtttgggctctttggcttagtaggaatgaggtggttttttatcgtgataacccgaaaacttacatgcaggtaatctacaagggaacctactggtgccgttcctgggcgctgtttcaaaggcatgaagaggcaaaggagaagctagtccatgcttgcagacatctggagaaagtggtgatgaaggtgtttgcggataatggatggcgttttccaatcgcattactctgtagtttttttatgtct

SEQ ID NO: 142179 - DNA, 585 bp, Zea Mays
aacaaattatcgttttgtcatatgcagctaatgacatcacattaccaaaattctggggacccatggatgccttgtgtcaacggtaggctgactcgatcaggtaccattttgaaaccagtgtacggtttcatttctcaataactgggcgaccatagatagccaaggcatgggtttatgccaatactcataggttaaatggcgctttggtcatctgcagagttgccaccctcaaatggctatctcatgatagaagcaaatggcggtctaaatcaacaacggctttctgtaagtaccaggattgttattcttgaacaaatgtgtggtcatggttctgagtagatataccattgccattgtcttatatggaagtccagtgccttgtgaatctttggtccacgaataagtgttttggatattcatgttagtgtacactgtactcaacagagctggctttctttaacagttttgttatgaaatcatgcaacgggcaacatgatagaacttgtcatggaaaaaaaggttatttcatttgagaagcaggacctcaaagtttcttaactaaacgtaaagcctgctgtgtaggac

SEQ ID NO: 142180 - DNA, 377 bp, Zea Mays
cagtgatcatgtgaatgactccgcgatacggctgatcagcgaagtcttcttgctttggtgcttgggggtgatttgggtggtggatgtttggctgatgcgggtgcagaggctggagcggaggtggtacgatttgtacctcctggtggtgttggtatgcgtggttaggtggatgctgagtggggtcgtggttgtatggttgtggtaggtggtgttgatatgtgtgggcgacaactcttgggttgtcggcgggttgcgcccgggacattctgtccctagtggccttcgtttccgggcagtccctcgtcgggtgcgcgcagtcttcaccgtgaaataggcagtaaaacctgcgcggttgttgtgcccgtccttgatcccga

SEQ ID NO: 142181 - DNA, 559 bp, Zea Mays
aaggtattgcaaccactggatatgtccatctaggggctatctgacgaacatgttccctccatttttttttgaacaaaagtcaggatgtctgccaaaatttattgataagaagaataacaagagggtttaagtctgaccgaagcaccaggcaggtctgtgatgttcagactatttttgtgctgaccagcaattggcagtccaatcgtactggatgctgaagcctggagtgtacccttgtaggttggatattctgcaggtccactttaggttctgtcgttatgcgcgtgcgcaatatgtattcgcgcgcaagggagtgcagcccagaaggcagaagcgatgaggtgtgagatgcactgggcgtccacctctgtctggttgcagaagcttttgggaactgaatggcttaaggctctccttccgtcttccataacatgaagctggtccggatcatataggcccaacaaggtgggcttacatatctgcaatctccttatctcccttccagttccagaacacaagtctccagcctacatgctccgggatcctgctttcgtgtgcg

SEQ ID NO: 142182 - DNA, 291 bp, Zea Mays
ccacgggatgatatttcttacccttctgcgttatccaactgcgctgggcacgaatcactgtggtgggcgcgaatccgagtgcacgatcgccggtggtgagttatctgaactggtgttctgatccggacactgtaccattgaaaacccggttcagagagcctgacagacaaagttgcaacacctagatcttggatttttgtgcaagaacatgccaatccatctataacaaacttgtagccctacataccagctacaattctgctatagagatcttgcccacttgcttactcc

SEQ ID NO: 142183 - DNA, 410 bp, Zea Mays
ggagcatcaaggcacgctacatcaacaccaaggatcagcttgcagacctgctcaccaagccccttgggaagatcaagtttgttgagctttgctccaggtccgggatggcccaactttctcacaagacgacgcccaagacttagggggagaatgatggaataagtcttgagcatctagaggacagcagtcgcttttgactgtcatctgtagtcctttagcatctagaggacaacttgactgtcctctgtagtctctttagtatctagaggacaacaatcgctttttgactgtcctctgtagtctctttagcatctagaggacagcagtcgcttttgactgtcctctgtagtctctttagcatctagaggacaatcatgttgtgtagtgtgtgtgagaaggtgtggtagtgc

SEQ ID NO: 142184 - DNA, 647 bp, Zea Mays
cggtgacaggtcaatgaagaaggagaaaaaggtcggctagagggtaggtgaaatcgcgctgggtgcgcaaatcgcgtgcgaggaggacgacgataggcgtgatctactgaggcggggggtatggcgtacctggtggacgccctccttacgtgttaatagagtagtatatagataatatccaacaatttaactatgtttttgcactgtagactcacgtaatggagtttgagatagcctaataattaaatatggaagtcgttactgactactgagaataaaaatctataaaaaacaggagaaccatataactctctgacacgttgggaacttgcacattaactctgtcgtaaaaccgtgagtcatcactcgcccaccccactattgttccagctggtatagcataggtggtgctccaaacagtctgccgctgccaccgctaaaaaaaaacgtgagagccgcaggacatgacccaacgtccagggctctctgttcttgtgatgtctgacctgatcctctccgtgaccccgtgccagtgccatgcatgctgggttggcatggccggtgcccgtctgcagcgggaggcaccgaatgatgcattgctgtgcgcgcacgcttgtacagtaagtacgtcaggatctcaactcctc

SEQ ID NO: 142185 - DNA, 901 bp, Zea Mays
tactaggggcataggaaatctgttcttgatggtcatgtcattgagttttctgtggttcacacaaaatctccaacttccatcttttttttgaaccaacaagactggagatgcaaagggactcatggtaggcacaattagaccagaggttaatagttcagagacctgcttctctaactctgttttgtgcaatggtgagtacctgtagggccttgagttcacaggtatatgtcctggtaccaaagaaatatgatgatcataatctctggaaggaggcaaactagtaaggacagcaaaaatatcctcaaaatccaccagcaacctttgtaactgctcagggactactgcttctttcttatccaccacttgctccagcataaccaaagcccaaacctcattgtctttcaaccatttattcacttgtagaatggaaatttgtggaacctccttctgctgacccgcatctcctcttagccgaatagtcactcccttgtccacaaatgtgagcacattttgcagccaatcacattgcataggactatgctttttcagccaatcaaaacccaaaatcaggtcatacacatccaactccaataccctcagagtagtagtataggtatgacccccaaaccaccgctccagatcaaccaccttcttgtcactcctcatcttttctccattagccaccttcacatccactgctgcacacttttgcataggcaagcccattttatccactaagttttgactgacaaaactcatagaactgccagagtctatcagaaccaccaacgtatggttatgcataaaaccttgcaccctcatacatccatcactttccattccactgatagcatttagagatagtttatacaattcttcaacctccttgtcttcgaactcc

SEQ ID NO: 142186 - DNA, 428 bp, Zea Mays
ttgggaggttctgtcatagtgacgttggtgaggatcgtgtccttgaattcacagagctaggttgacgtcgaggccgcagcgcgctcaaggtcgccgatgcgggtctcccacttggcgtcctgtgccacaatttttttgtccagctcggcgacgaacgatctggtctgagcgtcgagcgctatctttagttgtggatccatggctcccaaaagcttccgcacgacgcgtgtactaatgggaggctagatccgagggccgatggacctctgataccaattgttagcgcccactggcaccaaccgtatgaggggaaggggattagagaaaggaggcaaagaggagaaggaactggaggaggagatacatgaatgttgattgtatttcttttcttgatttggttttccttaatacagagtcttatatccccg

SEQ ID NO: 142187 - DNA, 658 bp, Zea Mays
gtggcccctcatatgatcatcattgttcttgaataggaaattcctcctcaagcggtcaattttcttgattgcccaattagacaaattcacagaggtcatccagtaaactggtattgcagataaaactgagtttactagaactagtttccctgccctgttcagtagtctccccttccacccagcaagcttgtgtgcaatcttgtcgaccacaagctgttcggcggcacgagtgactcgaccaaaatgcagaggcataccaagataagtagctaggaaagaacccaccgaaccctgaaactgttgggccactgagtgtagcacctgcggatctgtctgtatgctgaataaagtggattttgccatattcatgtttaggctcgatgccttgccgaagtgtatcaggatttgttgtacatttctcacatccggagttgtcggttttaagaaaagcccaacatcatcagcatagagactagtgcgaactacgatatggtcaggctacactggtgtaagcaaatgatgatcagtggcagcatctagtaaccgctgcaatgggtccatagccaatatgaacagcataggcgacagggggtcaccttgcctgagaccaaagtggtgcctgattggtttgcccggtatcccattcagaataatcttc

SEQ ID NO: 142188 - DNA, 1069 bp, Zea Mays
aataataatgccagctatccatgcacggttattcagagcttgggccaccgtcctcctcttgataagcccctttgggacagccttaactaaattaggagccaattctgagattttcttcccctgtacccatctatgattccataattttatattctctccattaccctctaaggagtctacagcaatatgaaagagggataatgcctttagggggacttggagcggtagtccagcccatggtctagcatgatcagttttctctgcccacagccaaagaatgcacagagcacaacacatagtctccaaattatgaatttccacccctccatatcgcaatgggcgttggacatggactcgctcccaagaaatcagacagctccctccattggcactctcttgagtcttgacctttccaaaggaaacccctgccgtttatcaatggctttgactactcatttaggaagctcgatgacaatagcattagcatgatagatggtactatggtagaagcagttagaaccaccttgaccatagtgaggcaccctgctctgttcatcagggaggccttccaacctggaagttgatcagccaccttgttcaccaaaggaaggtcagccttagaagctttgtggatggtgagagggggggtcaagatacttgcaggggaagtccttcacagagcaagccagattgccagaatatcagaggtctgctgcaaatgttccttttgcttgaccaccagaatatcaaagctttgtagatggtgagatggaaaactttgtagatgatcaccaagagggggaggggaacatgggctgcctggtgggctgggccagcccacttcttactctgttccttttctttttctcttcatcatctgctgctctaagctgctgttttaaattttccttaaattcttaaggtgtcacctcacctcacactttagtcgcttaagtgtaaggtatagtcagtcaccacatcaccataccgccttgataaccatgataaaagatgtaccccaccgtatggttctaccggttattatggggtaccagatttattagacttc

SEQ ID NO: 142189 - DNA, 390 bp, Zea Mays
gcgaggtatcccgtgccaatgttccgaaagaaatggctgggttcttggatgaaacaatcgttttatgtcaaaaatgatttgagcaatagggaagatgggaggggtataatctagcaccctgtacggtcacgcttcggcatcaggaggcagtcaactgcaagggggaatgaagtgcaagcgtgtttgatggctttcaacactgtgtgtacttacatcagtaccaaggatttggttcaggagcatattgcttacaaggtgtggccgctcattaatgactaggagatgctgaaggagactgctgccggttctagcataggtggtttggtttacctaagatacacttatcgttacagaagtcagtttgataagtcgaatgaagactggcttgag

SEQ ID NO: 142190 - DNA, 417 bp, Zea Mays
cgagtgtgtggtacacgcgccatacatcgccggactcgaccgtgaccttgtgtgcggtgcagatcggtcggcgtgggctgaatcgctcgtcggagcagggtcactgtcgcgcgtctgcctccttccatggacagaccacaccataacgccttcatcggtgagtccttaaccattctattctcctcgttctactcgacgtgttgaaccagtcgcccattgggtttggcctccctggcgtctatcgcgctagtcgtcagagtgctccgccgcgtggagtactcgcgccgccgtgacctgactagatgtagacgaagaactcgggtcctttagattaagtatggacggttggattagaacaacgcatacctgttcatgtggatgagatctgggccgttctgtggtagatctacggacgtg

SEQ ID NO: 142191 - DNA, 1044 bp, Zea Mays
ccaaagctgctgggccacgtctcggattccgtgggttcgggggaataaatacggacctcgcccacgaaccctccaccataacccgaaccattagcaccctgtcggagcgatttgtcgtgagcagtggcgacgcaggttgtggccatcatcgaagacctcttggcgccgctgttggggcctcggtgttgagttgtggcgtcaccttgaacctctggggacatatctgtgaccttggcgggagttgcggtgcatcgtgaccgagttaattcctcgccgtcatcacaccgccgccgcggatccgcccactgtcgtggtccgctaaatctccggcatataccgcggtgagtacgcccctatcaaattcgcacggtcctcctctgcctgtaccataggacggattggaaaatagctgtagaaatcgccggtggcgcgtactccggccatggcgccgccacagtggtcgtgtccggtggccggagttggcggcagcaatcgttaccgttagattccatagcaacgacttggatttgatcctggcatagcgattgggtaggcgggatctgaaccattatgatccgatcggacggatcagggcagtcccgggacgaatgagatctgcgtcgtagatttcggatcctgaggtcgacatcgagtaccgattcattgagatgctagatctaaggcgggccgtaagatatggatcctatggtccacattccataccgattcttttacaacgtgacttaatctggaccgtggatcagatcgaacagctgagagcgtccaataccctcttggccaaacgcttatgcaaaagagtccctgtgttttagcttattcaacttgcagtccacgacagagccgttctgagtctggggacttttcacgcaagagcccctgagctttctcataatattgtgcgcagtctagtcaaggaataaattatagaaattcatttagaaaatgattattagtgcaaaattaattctagaaacttgtttaattcatagaaaaattatgttaactccttttaaacccactcca

SEQ ID NO: 142192 - DNA, 554 bp, Zea Mays
gcagagggcatccaggttgatgaagacaaaatcaaagcaataaaggactggcctgtaccaaaaaatgtgagtcaagttcgaagtttccatgggctagcaggtttctatcggaggtttgtcaaagattttagcacaattgctacaccactaaagaacttgacaaagaaagtagttccattcttgtggggagatgaacaagagagagccatccaagagctaaaaaccaaactatgtgaggcaccactcctacaattaccagattttggtaagacttttgagattgagtgtgatgcaagtggtattggcataggaggtgtgctacttcaagaaggtaaacccattgcttacttttctaaaaaactaaatggtccacacctgaactactctgtttatgacaaagagctttatgccttagttcgagttttagaaacatggcagcattacttattccctaaagaatttttcatacactctgatcatgaagctttgaaatatctgaaaagtcaaggtaaattgaaccgtcggcatgcgaaatggatcgagttcattgaaac

SEQ ID NO: 142193 - DNA, 347 bp, Zea Mays
ggttgtggacatacagcgccacctacttgacatgatgaatggttcgtgacattcaaacacagacagacaagtctggttctacctccttaactttattggctggtcatcttcgcgtcacaagggcaggagagaacaataatttcgtcgagtggtgggtcaaaatcaacaaatgggtgccttcaaccttaaaaaagggtctaattccttgataatcctaggctcctggatgatttggaaacaaagaaattagattgttttcaattggaccacacgagtatcctgaggattcttgtccagattgaggaggctcatctgtggtgtcttgcaggagccaaagagctagcccg

SEQ ID NO: 142194 - DNA, 527 bp, Zea Mays
ggaggccggcggtgtcacccgtctgtgcgctaggttcagcagggtaaggtgagcatcatagatctgaaaaagagcggaccagattagaagatcccatacccctccgcttccaattagatatgaccatagatcttcgattgcgtggatccgaggagatctcaattatttgatgtctgggccgtggatccgggatcagatggttgggattggataccatttcataaccaagccaatctaatctaggccgccagatcgcaatcgtgcggctgatgtaatgtgatacccctttggccttggaataatgcagaagagcccctgaccttgtttctatttcacctgcaattcactactatacaaagaccattacacataagtccgcatctttgcaaatgtggaccctagcctttttggaacctcaacccaccgtcctggggtaacaactttacacctgatccctcccatttacactagtaattacatttaagtcatgattttctcacaaacagatcactagacatagatttcta

SEQ ID NO: 142195 - DNA, 351 bp, Zea Mays
cctcaggggcaaggtgtcaaatgttggtgctccattggcgtactcagcctggaacttgcctcctcctaaagctttcacccttttcgtgtcgaatccgcccattactgatggcggtttgggccttagagtgcgaccctctgctgaagaagtcaatgctttggttgcttcgcttggggagattcctgatgacgaacgacaggttcattttgaggtgcctctgaaccctagtgatgcagatataagcgctatgcttgatatgctagctgaagattcatccgatgctgctcctgctgggacgtcggcagtggtgcccctcccagaggttgatacgactttggatgctcagaaacc

SEQ ID NO: 142196 - DNA, 444 bp, Zea Mays
ggttgacgaacagcagtagttctagcagtttctgggcattttttgtggggaattaaggggaatcagtttgggaatcatgtagaactttggcatacctttccaacgagtatttatgagctcaattcggagttataaattaaaagatatcgccgtttgaatccgggtatgtggctgtcaaaaaaacagatttttcaggtggacgaacagcagcagtattagcagtttctggggaggtttcgtgagtaattagtgttaatcagtatgagaatcatgtagggctttgtcttacctttccaacaagtacttatgcgctcgattcggaattatattttaaaagtcatcgctgtttgaatccgggtatgtcgctgcccaaaagagaaaaaaacagattgcagggtttatcttgtggaccgtttaggggtaattagatgatagaatttaatc

SEQ ID NO: 142197 - DNA, 293 bp, Zea Mays
gctgactatactgattttgtggcggcctcaaccatagtgcctgccaatgataatttgtctgtttatatgtctgatgattttgagtccgatggtgaatctgggagtttgtttccttagacggaggagtcctcggatgaaggcttggattattttgttgcgttggatgtggctgcggcggaggcttcatcgtgtatggagggtgccggggatcttcctagtgcgggtggagggcgtatgcggtgaagggtggtggggaaacatagtgtgggtgagttttcgtggagtggcaggcg

SEQ ID NO: 142198 - DNA, 1149 bp, Zea Mays
tgatacttgaaagtatgaagttcaaaccagcaacttaaattcaattgaaccttttgaatttgaaaaaacagaataaagaaaaaagaaaaacagagggaagcttaactaggcctgggcacaccattgtggccctcttgacctcggcgcccacgggcccaactaataccacgccgcaagggaactgtggctgacactccggggccgcgtgtcagcatccctccgccacgattgactcagccgctaggtacacgcgccactgccttgcgggcccggtaggtcagggccttctccccgggagaatcgtgcgcgccgacataactgcatccgcgatctccgcctctgctcgcgtcgtgaccccctggaatctagctagcctaccctacgcatatatgatggggagtagggcgctcggccgcgctcaccatgttccaaatcaccgagaaacttgccaccgtctaagagttctgcgagtgaagagatcgggcgccaaggacgcgttccttgcctcccgtgccctggctgccattggttgaggtcgaccgtcgccggggaagcctgagcggaggtgtccttgtgcgtcgggcgcttggaattgacccaattccacgccggtgagctaccagacttgcggatccaccgcttgccgtcgccgtgatagtctacgaggaattgaggagtaagtacccatccatccagttcgtctagcatagagcattgtgtagcaccgatcgaattgaagtttggtgcgtcatgccagagatctgcgcggtccggctatggcaccaccgcgtcgaacttccgcgccgcccggttgggtcggtcgtgggagggaagggagttttccaccatccgatctcgaacgggtggcctacattagatagctcaccgcttcacctatttatgaccagggccattcgatcacattggatggctggtgttgggccgtggcgtggatgcatgttaacccttggatctggatccaaggatcgacatagtgtaacggttcgggctagcgagatttaatcctgactgtccctgttcgatcgaatggctgtgatcacatcgaaccccttcgcgagttctcttttacttaagagaccctgcattttagattaatcaactcgccatcctagcctatttagaaaatgt

SEQ ID NO: 142199 - DNA, 568 bp, Zea Mays
aaaacaatcaatggaactgtggcagatagagaaaaagaatcaaacgttcgacaacaattactcacaatagaggagaaacactcagcacacatcgcttgccgctcaggtggtcgctgccaattggccagggaggcgctccgccctcgcctatgaataagaaaagaaaaggaatcaggttgaggaagttgtatagtttgggagaaggtgtaatggcaggggtagatttgggcggtggcgcggcgccagtgcaggccgcgtgcgtcattgctacagggacgctagaggcgaattggtggaggtggaggccggactggcggtggcggatgcctgagttagagctcacccggccgcctcggaggttgttgccttgtgcccttgcagaattcgtagagccttaaggcgtggagagcgatagagggctgaatggaggcggtcgcgccactagcaacataggaaacgcagccgcacaggtttgcgaaataattgaaagagtctatgttctcgtgacttgagcgacttagggagaccgccagcgccaggctcaatcagtgcaagcaggaggtctttt

SEQ ID NO: 142200 - DNA, 630 bp, Zea Mays
gtgtttgcactctaactacttttgtagagaaaagtgtttttggacttgacttgggccataactcaaatcctaaagaaactatgaaaaaaagttgagtttcctagacttagtcaatttaattatgtgctaactatgtttgtctaagtcgtagggaagctcacaagaaaggtcatgtcaaatggaacaacttttggaagaaaaggacttaaatgtgatagtgttggtaccatctaacacgtggacaggtgggcccaaaactttatgcaggtcccaccctgtgactctgcaatttatcactagtgtgtctgcatgggttgcactacgaaggtcgacgtctctcgcgtcgaaggcgagtgacacatgggaccacttcgtgtggcccacgggtccggtgagggctacatggtttacccttcgataatggtctttcttctgtcgcttagtttcaaactcgaaggtggaccctccggtgaccatgtgaattacacctctgaagggtggattagcaaactcttcttgcttggatggtgggggaagtggttggtttgcttgctgtggtggagggactggtagggctaatatctcctagtgttaaaggcgtggtcgctggagcaaaattggattgtggtt

SEQ ID NO: 142201 - DNA, 843 bp, Zea Mays
gaaatttccagcacattgaggcttcccaagctctgcagccacgggggaattacgccgatgagtagatagtttgtcaggatgagcacctgcattgtctcaccaccgcggaaattcctggtcagcaccaagcttgtcaggttgggcaggtgttgcaagacctgcaatgtctatgccaggttgtgaaactattcctggtcagcgagaggtacgacagggatctcaactccttgaagctctccggtatcccccacgagcttgttccttgtaagatttagtgtcctcaacttggtgcacacactgatgccaggagctatagcaccactcagatagttggttccaacatcaaaagtattaagcttcggcagcaagctggagtcgatagcaatctcactagagagcgagttgttcctcaagctgattaccctcagcagtggagaactttacagggaagcgggcaactcaccatccagcctattggtggccaggtttacggactctagcctcctcatctctccaaagacatcagggatggagcctgtgaacttgttataggacaagtcaagttgcatgatctgagagaggttaccaaggtcactgccgaggttgtcagtgaactgattttcatgtaagctcactctcctcaggttgggcaacgtgtacaggtcgtcgggatcccggtgaaatagttgtcgtcgagggagagctctgtgagcaccctgcaccgacatcagagatgcaggatgtacatcgatacatgtgtgttggttttttgtttaaccttctttataatatttgcaagttgctttaaaattgagtgctcataagatgcatcaaaatgtttcg

SEQ ID NO: 142202 - DNA, 271 bp, Zea Mays
tttaaatttcacttgtatgtttggttgataggacctgaacaatcagattgtattgtttcagggagttcagtaaagcgatgattagttttatatgatgacagtaggcatcatgtgtaaaagatgtcttgttttccatgaatccatagtgcatggttctcatttattttttggataagggttctcaaagtttgtgtttgggtttgccaattctgtgtttacagccataaaatctcatccttcctgtttcagattaaggttgtctccagcagcg

SEQ ID NO: 142203 - DNA, 303 bp, Zea Mays
gatgagccgaacgacgactggctgaagtgcatcgaagctactagtgatgagctgcttggagcatactccaaggctgaagataacgctctgtccgcagcctttggaggtcgggggaagaaaagactggacagagttttcgatgtgatagacttcatataccccgattatcactacccactgcgagggcaagagaaaaagaggaagattgttgtttcggtcaccccagctgagcctgtgccgaagagtaaaaaggtgaaggttctgacccaccggtcgcgttatattgaaccgaccgtagtgcct

SEQ ID NO: 142204 - DNA, 553 bp, Zea Mays
gtcatcccatttccatgaaggtattgataggggttgcaaagcaccagttgatttcaagtggcttgcctttatcctctgacatgtgtcacattctgatacatattgggctatctccctcttcattctggtccaccaatacaagggctttagatcatggtacattttggtgcttcctggatgcatggagaatttggagagatgagcttcatccaagatcttcttgagatccttatttttaggaaccaccaatgtgcttccaaaccacaatatacccttcccatcttggcagaaacacttatacttctctgtcttctggtggaggttctccttaatgatttgcactcccttgtcactgagttgggccatgattatctggtcttgcaaagttggctcaacggaaatgtgagacaaagcaccagaaggaatcacttcaattttcattttgttcaactcatcacacagggtgttgatgcgagaatccatcataacacagttgcattgcgatttccgactcaaggcatcagctaccacattggctttccctgggtgatag

SEQ ID NO: 142205 - DNA, 1154 bp, Zea Mays
gaggtttgagtctcaggaaatcccccattttgtcttgtggtattccaccattcggccgttgattttccagatttcgagtgaggacctcgatgagtcgggtttgattggctagaacttgggctaggtctaagggtagtggtggaggagcggggaggtgggtttcactttcctctctaacggcttccccttcagctctcaggggaaaccctgctccaatcccggaggcggtaggcgtggttttatccgaagccatctgccagggaagagagtcactattatgcacatgcaaattgttttcaaccaagttattttattcattacaccatcacattacaagcataagactactacaggtggaactacacgagagcgttccccgaggtactaccgaactccttctctaaggtgtccccaaattccttgagaagatcatcaaggcttgctagggatatatcctcgtcgtcggaccaatcatctattctgggggggaggtagggctagaggggtcttcttctgcttcttctctgtttggcatcctcggttggtggtcttcttctggattttctttttgggggcgagcttcttaagcttcttgtcatagtccatcttcaaggttcgataggcctcacgggtgttggcttcctcgccttctgctatgtcgagactctcctggagggatgccttctcttgcttaagctctttgacttgctgctctaggctttccactcgggagtttaggtgggtgcagtgggaggagagctcatcgtagtggttgtcgagggtgtggaggtatccggccatgtagacaatagtggggtcatcttctgtgggatctcctcctgacagagcctggagtcttttcctccaggtgggggtgtttttgttgctgggtgggaaatatcggagggggatctcagagatctctcggctatagttttggcacagttgtttaagggcttttcgggcaacgccctggcaagtgtctgggaagcggtgcccgatgaaggtaatttggaagggagggtggtttgggtagttccggctttctcccaagtagaccgccatagagcacttttctattccattttcacggtactccttccagacatattcgggcttcttgcggatccccatgcgtagcgcgcaactccgaa

SEQ ID NO: 142206 - DNA, 336 bp, Zea Mays
ttgatggtgacattcgatgaactgtacctcaccaatataaaaacagttaaattgcacattcgggtttttctgcccagccctaacccagaggaactcgcactgtgtttcgaacccctcgcgtcgcgtgatgccagggcacagaagagttagattgcacatttcgggttcaggcttcgggtttttctgtacaattgaagactccgatgattgtgtagtgtggactgtgccgctgtggagtgtgcactggtgtgagctgagctgtgaatatgtgatttgtgaacattgtgtgattctatgattctgtgatgtgatcttgagagcatacagtgctgactg

SEQ ID NO: 142207 - DNA, 604 bp, Zea Mays
gggtcaacaaggtcctcgaagatttactaagagcctgtgtgttgacgttcgacaggaattgggagtccagtttgccgtatgccgaattctcatataacaacagccatcaggccagtatcaagatgtcaccgtttgaagcattatacagacgaaagtgccagacccccctaatgtggtccaatgtaggggaaaggacactggaaggacccgactttgttaaagaggccgaagagaaggttgccctggtccgcaagaggttacttgaagctcagagtcgccagaaaagttatgcagacaacagacggagataactcagatttgaggaaggagacttcgtatacctcaaggtctccccgatgcgtggggtcaaaaggttccaaatgaaaggaaagttagcaccgtgtttcgtcggtccctaccccgtcattagcagagtgggactcgcagcataccgcattgaactaccagaatccatgtcagatattcacaatgtatttcatgtgtcccagctccgtaagtgcctgcaagtaccagagaaccacatcgaggcagagacaattcagattcaaaaagatctccagtaccgggaaaagccaataaagat

SEQ ID NO: 142208 - DNA, 286 bp, Zea Mays
cttgcatcaagacacatcccaatctagtgcctgaagcatcgcaatagacatcaaaagatttggtgttgtcaggttgtgctagcacgggtgcggtggttagatgctgcctcaatgtatgaaaggcatcttcacatttctgactccattcatactttactcctttcttcaacaattctgtaattggctttgcaatcctggagaaatccagaataaatcgccaataataccctgccaatcccagaaaactccgaatctgccgtaccgtggtaggaggcttccaatccat

SEQ ID NO: 142209 - DNA, 712 bp, Zea Mays
gccgccagcttctgttactcctgattcctcatcttcttcagacaactctgaagggttcaccaccaccgcgacttcctcaatcggcctgcacttcatatgagttcctctcctttgagcaggcttgttcctgcatgcatcaagcactaacgttcagtgacttctaaccattcaactgataatccctcaacttcatcataatatatcctttgttccatctgcatcataaaatcacagaggtgagaagtcagaaaaatgaaacaagtgttccttctgtacgagggttggcaaaaaaatcataccgcaagcttgggaacataaactgacatgaacctgggaccaagtcccagaactctagcattgcatactacagtctgaaaagataaataaatagcagaatttcaaaataaagatcacagaaaaacttgctcgaaagctgcaaatggtgatgcaccagttacctctttgttctttatcagagcccacatgtagagcttctgtccagcttcttctgcacggcgaccagcccactttctttcattacagtgttcagcaatctccctaagattttcagaggaaggaaccttaaatttcttagctgcagcagaaagtgctcaatggagaggcagaaccatagtgcaatcagtctcacaagtaaacatcttgtgtgcatgaatttaaacagtgaaatatgtccgaaagtacaacattaaca

SEQ ID NO: 142210 - DNA, 665 bp, Zea Mays
cgacttttgtatctccctgtatttctgtcagccaccgatgtcgagtcagagggtcacctctcttatctaccaggtttgctttcacttctgacctctagtggcagatacattgaggagtgggtcagagtgttctatgccaccgtttggattgaccctgaccatcagtggctggggttccactttgagcgcgaggatgtcactctgcatgccactcagattggacagctctttggattttctaagtcgacgaccaggctccatagcttgtgctacgacacatcgaatcctccccgtcgccctcacgacggagttgccccggctacagctcacattgctgccctgttcagacctccatttttagatgggtcgcgacgttctcctgcagcgaagttttttatgagatgatgagacggactttgctactcaggatgggatacagagaggccaccacacatattcagctatggcaacttggtgccttgatctcacacttagagttcaacgtggttgattttcttatctgtgagatcgaggatacaatattagatggtctctgtgctcgtcgtcagctgccatatgctcactacctctgtcacacctttgtgcagctgatcaggcctcctcagttccaggccaccctcgaggcctctcgcctctagttcgga

SEQ ID NO: 142211 - DNA, 535 bp, Zea Mays
ttagcattccatttctcataattaaactcttctcctacaagatttgtgggatctctaggttcggggaacccttgtgtggcggctttgtagacaccaatgtctatagcctctaaataagcttccatacgaattttccaatatggaaaatcgtcaccataaaaaacgggaggaggtccatccccaccggacatcgtactctagcgggtaagttaatctaagagcaacaagtctctgataccaattgaaaggatcacgatgcccaagaggggggtgaattgggcttttctaaaattcaacaataattaaaccctaaacaagagcccaacttcaccccaacaactagcaataagagaatactactaaaaatacaacaatactaagacgatacttcaactacttgctaaacaaatgcacaaggtaaaatacttgaattaagtgcggaatgtaaagcaaggtttagaagactcctccaatttttcccgaggtatcgaagagtcggcactctcccctagtcctcgttggagcacccgcgcaa

SEQ ID NO: 142212 - DNA, 517 bp, Zea Mays
gagtgctacaattcgaaatacaactcagattatgactctggttggagatgctttaacatagtaagagaaaaccatgttctagttgagcctatagagaaagcaaaaacatgtatgtgaactatatacttaaagaagaagaaaaaaatgtcggtgtatgttgtgtttataatcagacccccttttgttttcttcccgttgtatatttgtccgtcttctttgagacattcagatggatacaggatatggttaccatgcatttgaagtgaacaaatctagtctcaagcaagccgataccatgttctatctccgctggtaaagatctgtagccgaagcctagtgtgccctggtatttttcactcacaacaattaatcctgcgaaggaggtcactccacacgcacacacagagagagagagacagagagaatatctgcgagtttaccgattcagagcaaatctattttgaggttaacggttgcacgacgattgggcccactccttgacactgacccattcctg

SEQ ID NO: 142213 - DNA, 533 bp, Zea Mays
gtcgaccctagtggaagacttaaccctggtcttcgacaagctacaacacgcacaaagctgaacccggacaagtgcgtctttggtgtctctgcaagaaagttgttggggttcctggtttcgcaccggggcattgaagcaaacccggagaagatcaaagcgattgaggcgatgaggcctccagcccgtatcaaggacgtccagaagcttacagggtcattagccgcccttagctgcttcatttcgaggctggttgagagggcgctgcccttcttcaagctgttgcggaagttcggcccattctcttggaccgaagaggcgaaacaagcttttcaagagttgaagcagcacctggtgtccctaccaatactggtagctccagaacctggggagtcgatgtatttatacatcgcggcggcttcagaagtggtgagcatggtgctggttatcgaaaggacggctcaggaccggctacagaggtccggactgttcagaggccggtctactacatcagcgaggtcctccatgaagcaaaa

SEQ ID NO: 142214 - DNA, 425 bp, Zea Mays
ctgccaactcaaactgatgcttccagcatttagagatttgatccctatgaaaacaatccaccatgcatctacttctctgaatgtacatttgcccagcaactacaggagtatgtgcacattttagactcattgccatcgccagcatgatttttgatagtttagcatacatgtatttgaaattttgttttaatgggggtggccatggagacttcaagagacagatgtaatactggcaatctctaatataggtcgattcatcaaatccaaaagcaactatagactgatggcaatatagggatggccatgaccttggccgaagctcaccacttgcatgaacaatcttaactggcgtaggccacgatagccacagaataaatgtcctctctaggccacttgagttaatgcagatgatggtgtgctccttg

SEQ ID NO: 142215 - DNA, 351 bp, Zea Mays
gcgcgacgaggatggcaacagggaggcccctccatcgtcgttcatggccggagatctactagtcggcggcacagaaggagggggaagagggtttccttggggatatgtccaagatggggattgggaacatgctcgacggtgattcgagatgagggcaggggcggcgcaacaggatagggacgacaagtgggtggagaaaagtcaggataggagggagagccattgaggacgcagatgtgagcgttgaacgagatcagacgactgattatttctaggatacgtggctgctctcacgcaccgagaatcctcttgaattttaataaaagagattactagcgacacaactattgc

SEQ ID NO: 142216 - DNA, 627 bp, Zea Mays
ttatcataggtttaccaaaaacatcaaagggttatgactctatttgggtaattgtggaccgttttactaaggtcgcacatttcttgccggtgagaactttgtatccaacaaagacttatgctgaactatatattgctcggattatgagtttgcacggtgtgcctaagaccatagtgtctgatcgaggacctcagttcgtttcaagattttgggaggaattccacaagtcactcggcactaagctaattcatagttcagcttattatccccaaactagtgggcaaaccgaaagggtaaatcagatcttggaagatatgttgcgagcatgtgtattagtttattcggaaaaatgggatgagtgcttgccgttggctgaattctcctacaacaatagttaccaagagagtatccagatggcaccttttgaggctctttaggggcagcggtgcggaactccaatcaattggtcagggcccggtgaactgtttttctttgggccagatttagtaaaagatgcggaagaaaaagtgaaacttattcaacaccgtttaaaggttgcacaacaccgtcacaaacgttatgcggaccagcgaagacgacccttatttttccaagtgggcgattttg

SEQ ID NO: 142217 - DNA, 503 bp, Zea Mays
cacgttactacggtttctttagcttttattgctgtttcctctcacgatttcagaccttgtattaaatgacgtatggtcgtcctgttgtaagctatcaaaacatgattgccgaggcgggattttcatccttgatctaaaataaaaaaaaatggaacatcgttggatgccttctacgttctacttctactttacctatgtgatcgagtgctagttactgctttttcacacccctgatcgatttccttttcttgaacgcaaaactctgatagatttcacgtcgcttataacttcttcttttgcaatttactatacatatgtactagtcttctagggaccacaataaaaaaacacgaaccaaatttcttttcaagacgaaggttaaaaacttttacaattaaacattcctataaacagaccttggcagatttcagtccatctactcatgcaccatcttttcaggccgaagcccgggatcattctttgggcctttcaaacgtctggct

SEQ ID NO: 142218 - DNA, 503 bp, Zea Mays
agacagccttagaagcctcacgtgaataattgttcatagtacaggaggtttgccataacgtgaataattgttcatagtacaaaagaaggtttgccataatgtgaataattgttcatagtacaaaaggaggtttgccataacgtccatgccttagaagccttaattagaagcctcacgtgaataattgttcatggtacatgttcaagtgaataattgttcatggtacatgttcaaatactatatggcatttgttcagaaaaattaaacgatgggaacgagagagtatgtgtatacgtgcaacaatactgatgtttctatgtctcgatgtgtgagtatgaggctatctgtctgtgagtcatctctgagccgttcaacacatctgtgggcatctaccagagattccttactagggatacagagccgcccccattcttccctcctcatctgctcgctccgtctcccgattcatgccatccccatacgaccactagctcctatattcc

SEQ ID NO: 142219 - DNA, 380 bp, Zea Mays
aaccctgagacatgtgagtatgtgacattggatgactgaattgctacttagagaatttggaatgcagagatgaatttaaattcagggccactcttatcagcaagtttcactgtccttttacagcgaagaaagttctaatcgctgggttcattaggtgattaggtccagtgaatctggagttggagaagctgctcactgttttcaacaaagtgagatttatttcctttttggtcagcatgctgttcatgaatccatatgggccaacaggtcagaaaaccatggagtattgatgcctaattcattccatattgtgcatgacgacaaaaatgaacctgacaatgaatttgaataccttttactcatcattatttctttttgac

SEQ ID NO: 142220 - DNA, 590 bp, Zea Mays
tgaaaccagtcatctgtcccatgaattcatacaagccgcttgcctgaaatttagcaagcaagccctccatgactgtctgaccctccatataatcccagtcaatcacctgatgcttatgaaacttggtgtcatgagagttccatagaaaacatcaaactgcagctgagtatgaaaatattgaatatttatgtcacatgaaagagaaaactggtcaacagtccttctagaggaatattcagccatagaaaacctcatcttagatgagtgtgtggcgcatcttcagcatccaaagagacactgcccctagcggatgattgggactcggaatcggtgacagggttataatctgtgtcatccgcacgacaacgcttggacaaaaaaatgccctgctaacttctttttcagaccaacgaaaccacagtaataaaatataaaataatcccaacaatcagaagacaataacttgaaaacatgtgcaagatggataagctgatctgctagaatgcgaacagtccacgctagagggacgaacggtccatgcacccacgaccggatggtgcgcgccacctaggaggaaggtccgcgaccgt

SEQ ID NO: 142221 - DNA, 916 bp, Zea Mays
agctctgctgtcctgagctatttcaagttgatgaaggacctccttggccaaccaccactgactctgtacgtgccccaccttttttttactccaactcagaagaccttcggcagtggccttaagcttcaaggataaagtcactaagggacagggccctgtcaggaccaaggaccacccagtagcaactacatcctgaaaaccacccaacttgggccagaactcttcaaaatggaatctccttttaccatgtttaaaatcttgcaaccccaatacaagggggcaatggtctgaatcttgtgtggctgagttttgcaggagacagttaggaaaaagttcttcccaatccacagaacaaaagaccctgtccaatctaactagtgtgggattagcctgtccattagaccaagtaatcttcttaccaatcagcgggacttctttgagagcaagatcattaatccatctccaaaatctacccatcatagcccggtctaaatttgaattgttcttgtcttcatcttgaaaaatcaagttgaaatctccaaccaccacccagggtccagcacattctgccctgacctccctgagttccataaaaaactgaactttagcttcatttccttgagggtcgtaaacacatgtaagccaccaaggggaaccttgagctgaaccaaactgaactgatactgaatgcgagtcaattctgtataggccttgatagctgagacgatcacgccaagcaactaaaattccgccactggcacccaccgaaggcatgacaacgaaattcttgaaatcagggcccaacattcgtgtaaccagaaaacgagaaacctcagtcattttagtctcctgtaagcaaacgacatcacatcttaaggagccagctaaacccctaacaacatcctgacgagcgccg

SEQ ID NO: 142222 - DNA, 480 bp, Zea Mays
ttcgggccagagcttgtcttcccacgacgatggagaacgctaaggacaaaccgaggtgttcccggtgattggatgcgatctagctcaaatgatcgggtcgacaagcatgccaagcgtgcctaggtgctaaaacaagggtgaggagggtgagaacaggcctggagacagcggtccacggcgcggtggctcacggtgacgcagagaaccaaattgggggaagaaaggaattagagcgctatggtggctaatcggaggcaagggtaggtgctttggcttcgtgacaacctaacggagctagcggcacactcaatttatagtgttcgagggcggtggctccgaattttgaaggagaaggctggcggccggagggaggggtgagtcaccggagtcgcataacgtggcattactggggtagaggcctgagacgatgactgaccaattcatacgacaccttacgacgaggtaacagggtcagtagcg

SEQ ID NO: 142223 - DNA, 486 bp, Zea Mays
gctgcgcagtgggcacaaagcgaactattctttcgccttttactaaagaataccgtgtgtccgctgcaataagcagcatacgccaacaagtcaatttaggttttgtttgaattaaatttgtgttacgtttaaatcaaacgttgatcagaaatattttcatatggtttgtttaaaggttaacataaaagtgttgtttgaattaaatttgagttatgtttaaatcaaacgttgatcagaaagattttcatatggtttgtttaaaggttaacattaaagtgttttggctttaatcagtttaatccaacatatttttttttgatgttactgagccaagggcttcccccatcccgtgggggataaattcctaagatccccatccatgtagtttatatgccattaatgcaaagttccccacggggataaattcctagatccttatacacattatcataggtaagagacaaaataattatttgtttttattat

SEQ ID NO: 142224 - DNA, 357 bp, Zea Mays
actgcaacaaaaatgaaaataacaacttgtttctctaactatgaactaatgaaaacagtgtatattcattttaaacacgcaaattaaaaaaacaaacaaaagcaaatgtcatatggctaagagatagaattaccgtttcatcccaacattccaaaatatcgatccgaatatgatagctgcaattgccgtgaaaaataaccgcacaacattgtactctggacttctccagtaaacaagtctttgcttacgccagcaagctttgaactgagtaagaaagttctgtgaaaactctgatgagaattttaaaggttccgtgccaatagctggaatactcgattctttaattaactgttcgac

SEQ ID NO: 142225 - DNA, 288 bp, Zea Mays
atttaactcagagaaccattttatgatcaacatagagattatcagatcagatattagcacgagatttaatatgaggatgaaccgaccatgagatcaaaatagattgttgagcttttagagacatgagagaaccaaggacaacaatgaaatccattgaactaagtggatacactgattagagataagttgataaaatgacgtcatgatccttggagaaagagtatgagaataattagaatgagagatttaggcaagatcaacattcgatacttgagaacgggttatagc

SEQ ID NO: 142226 - DNA, 663 bp, Zea Mays
aagggatactattgttgacctgccttctgataaagctcctgggcctgatgggtttacggggaggtttttacaagacctgctggagcattattaaggaggatctgctggctgccctgaattttctgcaccaaggaaatgcccataaacttagattgttgaattcagcctatcttattcttctccctaagaggttcgatgctatgactgcaagtgaatacaggcctattagtttcatccacagttttgctatgctggtcaccaagctgctggccaacaggttgggtccccgtcttcatgagttggtggcagccaatcagagcgcttttgtgagagggagatcaattcatgataactttatgctggttcagcagtctattaagtcgctacacaagagaaaggttacgggtctattcttaaaattagatatctccagggcgttcgattccgtgtcatgggccttcattattgaaattcttatccatcttggctttggtccaatctggtggaatcttatttcctccctaatgttcatgtattctacgcaagtacttcttaatggctcgcctggtgatcgtattgctcatcggcgaggccttcgtcagggtgatcccctttctcctatgctgtttgtgatggttatggacgttcttaatagtctgttca

SEQ ID NO: 142227 - DNA, 477 bp, Zea Mays
gcagcagattcaagcttgctattaataaaataagtaggagcgttgcctattaatattccttttctcacctaccaataaacatataagcgcacctacatgggcacatggctggtagtgttataccacctctttgccgtctcaccagaagcaacccagtaaaaacatataaacataagggcacgtacatcctataattcttttgccaaccgtcttttccaaacatggccttgttattcaacttttctcttcgattttgagatttaagcgacgactggtcagaaaaaaaataacctgcatatggatgcacggtgcaactgcactgcacatgcttctcttagcctgggactgaggagagaagtcgaaaacaacatgcacatgcttctcttcagtctgcactttgttcgttttttttttccaccggaaccgggcaccaaaccgttggctggttccttcggaaatctacgtacggcttctccg

SEQ ID NO: 142228 - DNA, 443 bp, Zea Mays
tgggcgtaggcggcgaagggcggtggcgaagcgtagagtgagtgaggtggagggtggtcgtcttcgtgtggacggggctggcaagcgggaattgttgtcctcgccggttggggcgagtgtaggtgagggggagttgcgaaatctttttgagggtgaggagatgaggataatgctatttaactacagggagatgggtatcatcccaaaggttgaaccaatgtaaggtgtgatgccctcgctgtatgtatgtaactataatttgtatgatgaggctgtgtgccttcgctgatccggtcgtgcccgtaggggacttgtgcacttgatctagcgcgtttattgtgtcggtccggctgcacccgtagtcggtttttgcacggagggtccggctgcacccttaggtgacttttgcacggatagtcttttgaagaggacttcgattttgc

SEQ ID NO: 142229 - DNA, 408 bp, Zea Mays
gtccgagtgttgacgaaaccatatcagcgtcagaatgactgttgaccacgtcggcgctcttagaggtgacagccgagtgacttgtgacgacgccagcgttttttagagataaccgccgagcgactgaggacatcatcggcgctttagagatagccgccgggcgactgaagacatcgtcggcactttagagataaatgccgagcaattggtggtaacgttggcgttttgaaaatagccgccgagcgactgaagacatcatcgacgctttagagatagccgccgagcgactgaagacatcgtcggaactttagagataaatgccgagcgactggtgataacgtcggcgttttagaaataacagccgagttagaacgggccgtgtcggccactttgaggataatagccgag

SEQ ID NO: 142230 - DNA, 557 bp, Zea Mays
agaaatcatccataccgaaagaatgttgatgcattttatgggagtattgaaaataaaaaggctccatcacgcaggcctggacatgtggtttatgagagtgtgaaggacattgaaaataagttcgggaaacacaatttagcattgtctggaatttggaagaaaaaatccatattttggaggttaccttattggcgcgatctaagtgtgcgtcattgtcttgatcttatgcatattgagaagaatgtgtgtgaagctttgattggtacaatttttaacataaaagggaaaactaaggacaacaccaacacccagtgtgaccttgatgagctgaacattgaaaagccccaggaatggtatactctgaccaaggaggaaaaaattaaagtttttgatctgttacatgatgtgaaagttccatctggttattcagcaaatattagaagactcgtgtcaaataaagacctaaaactgtcaggtatgaaaactcatgactgccatgttttaatgacttagatcctcctcgtggtcctccgtgggtctttcaagcatatcaaaat

SEQ ID NO: 142231 - DNA, 327 bp, Zea Mays
tcctccaccgtcccgctcgcacgaatctccttcgttgcgacactatcgtgggcctgcggtgcaaggagatcgccacgctcgttgttggggcctctgcgctctcctcctggcacgacggcagtcgtggtgagccccgaccctacttcattcttgaaagcttggcacctccgcgcgggattgggtgggttggttttctagcagactggtgaggttggtggcccgcgccttctacgatgaccacgatgggtgcaacccgccacatgacgccaacactcggtatgccgtgcagctgctcgacgtctgtggtgagccccgaccctacgtcat

SEQ ID NO: 142232 - DNA, 271 bp, Zea Mays
gcgaagtaggaactgtgatgtgttaggcgaattttcctcggtgaattggtggcttcatttgtggtgtgtggtccgtgttctgatcctgcatgcacgctgcggcttatgatttacagagcacataatttgacttgagtgatgatggacagtgaggagcgtgtcgttctcgttcaaagggccatgacgcactattttttattttgatccacgattatcaagtacaaaggactacactatttgcttgaaagtatatttgacggagaagacaaac

SEQ ID NO: 142233 - DNA, 320 bp, Zea Mays
tgcgtggccttcctccacctcctcgacacgaccaccgcatcaggctgctgccagggacgccaccagtggcagtccgcccctaccgatacccctagttgttgaaagccgagattgagctctagtgcgaagacatgttgcagcaaggcatcattcgggagtgcacatctgcctactcttctccagtgctacttgtgaagaaagctgataaatcctgacatttttgcattgactatcgggcccttaataccaaaacagtgaaggacaagttccccatcccggtggtcaacgaactcttagataagttatgaggtgcctgcttc

SEQ ID NO: 142234 - DNA, 711 bp, Zea Mays
gcggagtgtcgcgagatcattgatctcgcaaaacgcgtcagcaaatgcaccagcgagcgaagtgagcagtcttccaaagacagctccccacctcgccgccgtcctggcaaagaaaaggtcgacgacggcgaggtggctgcggctgaacaggacctcgggtatcagtcacccgaaggggacctgaaggacgtcttcgcaaaagactcccactccggtggcgacgactaggcggaccaccggcgggaccccatgtcccccggcctacggagctgaagcctgccttcctccggaaacccatctggattcctcacgggtccagctttctgacaggttcatccaggaatgaccacagccaaaggcggggcctccttcgtcaaatgcagatgggaacccagggtcgggacctaatcttacaagagtaccagaccaaattagggctccgtaacactcccccagctgggaaggacccttcatggtaatgggagtaccccgacccaagggcaactgtctagctacgaccgaagaaatgccttccccagtgtcgaaatatctctgtaagttttatctatagagcaagtctgaggggtcgaagtttttcccttttgtaactaggtagtgcatacgggtacgcaacccggtggggtctacccccataaacccggcctgttggcccgcacccatgcatgattagctataaaggaaaactaccct

SEQ ID NO: 142235 - DNA, 341 bp, Zea Mays
gtgcgacattgatccttcgcagtgggagattcaatcctcgccgagtactaacaggggagggacgacataaactgtcaccaccatgggaacgaccgttcgttgttgcagaggtcgcaaggccgggatcctatcggctcactcagatggacggcacctaagtgaggaattcatggaatattgagcacctcatgatattctacccctagcaatacctcaaaagtctcaggggcgagttgtactctgtaagcagaaggtttcatcatcaataaagctttcatcttccaaaggcattcaagttcttgattgacaactgactcatattaggctcaactcaaaaccag

SEQ ID NO: 142236 - DNA, 820 bp, Zea Mays
caccgccgccacccacggcggaggttccaccggagacatccaacacggtgcccaggtgccccattcgcaaccccgcatggtccaacacgaagctactgacatgggtagagtgttggagcgctatttacctgggtgaagatggagcggtgagctgcccacgagcacagtggtttcggatgcgtaaacacgaacaccgacgagcaattgggattgtcacggtggccgaaccaccctgtctcggccatgggcgcaaccctagagattatacgaagcacccggagtcgacgctgaggcctcgctgacggcgggcatggaggtccacggcggcaagtctccctcccatggtctctgtctactatccggccatggcgacgaggtggcttcctccgcggtattgggcttgggatttgacaaggggaggtgcggttagactttctggacacgacgagagagacagcgcttggccttagtcatatcctagggatccggtcaaggcacggagcaagaaatccgcggtggttgttgagcccggtcagcggaaatcgggcgcgcgcggagatctcgcccacggcctaatcagtcagcaggatccgattctcgcgggggctcatagtatcagaggtgagcggaggtaatcaatcggcctaagtgcccccgaatttcccggcggccggtgagctcgcgagcgagtcgcgcggaggagaagactcccaggtgcagtcgggcggctgacaggttggcccaccaggaagtcacacagggcggcagtgagcgcgaggcggcaaggccgacaagtggacctcggatcggcaggcgcaag

SEQ ID NO: 142237 - DNA, 854 bp, Zea Mays
tattcagcctggaatctgcctcctgccaaggccttcactcgtttcgtgtcaaacccaccttcaactgatggcaatttgggccttagaacgcggccctctgatgaggaggttagtgctttggttgcttcacttgggaaaatccctgatgatgaaagacaaacccatttcgaggtacctttggatcctactgatgctgaaataaatgccgtgcttgacatgttggctgaggattcttctgacgctattcctgctgagacattggcagtggcacctctcccagaggtcggtataatcttggatgctcagagacctgtccgtgctcgctcgaagcgtccccgccgaaccaaccagactgatctttctgttgatgagcagaagaagaagaagagacgtattcggcgagtatctagtttggatcagggtgctggtccctcggttcctgctgatgaggaggttcccgcgcctgaatttgctgatgctgatcccaatgggtgtggtatgactgttgctgatcccaatgggtgtggtatgactgttgctgatcccaatgggtgtggtccatctgttgctgatcccaatgggggtgttgccagtgttgctgatgaagacgacgaagaggaggaagatgaggttcctctgactcggaagaatagtcggcaattcctcgccagtggggaaagtagtggggttccttctccggctttgtctgctcttgttggtctgcaaaacatatccctggccgactttgatcaaactctcgaggacatggtcccagaggatttgttatcagggccagtggatgatgatgtagcggaagcttgtggtgctgtgctggatgctgggttgaggtcgtc

SEQ ID NO: 142238 - DNA, 957 bp, Zea Mays
ctctcggataactgctgatgggctgctgcctggcgggactgctcggctgccaagtgagcctactgctgagtgagtgtgtgaagaatcgaagcaagtgcagggtcaatagcaggaggggcagcaggggtagcactagaactcctagcctcatgatcatgtgagcgtggaggcataggagggggaggcggaggaggaatcccaaaatcatcatcatcatcatcatcaactgctgcatcctgagcttcaaactgatgaagagcagcatcctcggcctgagagtcaaaaactggagcagaagctggcacaggagcctcaggcgcaggacagtaggacccaaagacaaggcgtgaggcctcaagtgtaccctggaactgtggaggccgaatcagctgcgcaaaaatgtgacacaggtagtgagcatatggcaactgtcgacgagcacgtatgccatccaaaacagtgtcctcgatctcacaaataaggaaatccacgacgtcaaactcagagtgagagactagggcaccaaggagccagagctggatatgtgtggtagcctccctgtatcccatcctcggcagaagagtccgtctgataagctcaaataagtacttggctgctgtagtaaaatctgtcggtgaacgtcgcgacccatctgagaagggcgggcggaacagagccgcgacgtgagctgtacccggagccacaccaccgtgagggcgacaaggagggtcagaggtgccgtagcataagctgtgaagtcgagtcgacgactcaggaaatccaaagagctggcgaatctgactggcagtaatagtgacatcctctcgctcaaaacaaaacctcatccagtgatgatctgggtctatccatacagtcacgtagaaaactcggacccactcctcaacatacctgccgctggtagtcaaaagagtcagaaggctaggcagatatgtgagg

SEQ ID NO: 142239 - DNA, 587 bp, Zea Mays
cacatgccgagccaatggctatcatggatgggcaagaacttgttggaatggagacgacccagaaacccgaagaggtccgtccaaagcgtccacgccgagtgagtcggcctaccgcacccgttgaagagaaaagtaagaagaggcggcttcggcgactgtcgagcttggatcatggcgcgggtccttcggtgccggtttgcgatgaagtgccggcagaggtccttcctgaggttgatcccaatggttgcgcccatgctgaagttgatcccaatgggtgtggccgccttgaagttgatcccaatgggtgtgactgtgcaccggctgttgtccgtatatatgatgaagatgaagaagagaaagaagaagaagtcccgctgattcgtaagaacagacggcattacagaggtagtaagggggatagtgacattccttctctagctctgtcagcccttgtcacccttcaggaactgtcaataacggattttgatcaggcccttgaggaggtcgtccctgaggatatgctatcggagccgactgctgatgacatgatggctatttgttcggaaattctagccacgggattggag

SEQ ID NO: 142240 - DNA, 807 bp, Zea Mays
ctactatacaaaaccaaacaaatatgggataaataaaaccttgctatgatggtttgaccaaactgcataattaaaataggttcaaattcccaaataagtttgaatccagatttggatttaaaagagttaaggataaaagaaaacaggaaataaaataaaaaaagggaatacatggcaactgggccgcagaccacctattcggcccacttgcgttttcctcctgcgcagcctactccatctccttcttctttttttttattttctctttgctttaagagactgacatgtgggccccctcgcctgacaaactttcttccccgtgaggatcggaccgcgctgaccgaagaacgcctcctgccgatctcctcgccgtagatcccgctcccgtaacaacctgtgcgcttcgaccgggctgttggagctcgtcctcgcccccgtgctataaatcgggccccgcaacatcttcttctcaccccatccagtccgccaccatcgctgtttcccgccgagagatttgggggagcttggtggctgtcacggtcgtgatcgggccacaccgtcaaccagacgtcgatgatgggtggtacgtgttcgcggggagattccgatcgttgtcgggaagttgctgggcatgggtggcgaccgaacctcggcgaatttctcactggagtaaaagcacagccgcggcaccgcctcgcatcgtggtgaacatccctcaccacctccacagccggtgagatcctcacacatacttgccgccttactctctatattgcgtagcacgtaggtgcgcctggtatttatgtc

SEQ ID NO: 142241 - DNA, 376 bp, Zea Mays
tagttaccacgtcgcaaccccggtgccatactggtctgatgattgccgggagggccgtcacggtaaggaggccacgaatcaccatgtcggtgactcacttcttctctgaccgccaccgcgctcaacccaaattcccggccaccgctcacttggcctataaattgagcccgctgtcagcttcgcaacatcatcacgcaccaccacatctagtattgctcccagccgatcaccagcgagctcaaattttgcatttcccccaacccggttcaaatacgccgcgaagaacacctcgccgtggccagctcaactcaggtccgatctcgccctctatgctattgttccaacaccctcccatgtccttgatgctcaccaaatc

SEQ ID NO: 142242 - DNA, 443 bp, Zea Mays
agcttggcaactgaactggcagtgtaagggtgtgaaagtggaatgaagtgaccaaactttgtaaacttgtccacgaccactaaaatacagtcgaaggatctagactgaggaaggccttcaacgaagtccattgacacagtgtgccacgcagaagacggtactggtaggggctgcaacttgccggggtaagcagctctgtcgggcttagcctgcaagcagatttaacattgttgcacaaagttcttgacgaatgacttcatattggtccatgcgaataatcccttgacatggctgtaagttactggaaccccggagtgaccccctaccgctgaagaatgcaatgctgacacaatgcggactgaatggttgtgtcgtctcccacccaaatacgacctttgtatctgaggatgccttcggtcagagtaaaattggaaacagcggat

SEQ ID NO: 142243 - DNA, 474 bp, Zea Mays
gtggaggtctctgtttttgctacctgggatagatttcctctttgctttgtgttgttccctacaaaacatggctttgtgttgttccctacaaaaaatggcagaagcctaggtggacgcccaaggtgaccgagcggtgagtccaccacttacaatgtgaggctatggagtatgagtgatttgaacttatgtcttgtactcacgtgactattttattatgcatattgttaatccgtgtcgggcgcttaccgttgagggtgtggataaagttttctacccgtgatcgacaatgagtattatgtcggatagatttttatttttacgggtatagataaggaaaggtaatacccgacggctacgtattgttgccatctctatataggatagatcacctgtgtttatgtcggtaggtccaaattaatatgcaagagtagtataatgcctgtgcagcacgtaaattatttggtaaaatgttag

SEQ ID NO: 142244 - DNA, 718 bp, Zea Mays
gccggctcaaccacattacggaacggaggctcgcgagcctttacactcaaccacagtcacgaaccaaatggcgccacactgcataacaaaatcagagggaaacaagcatagttgataatctatagttgatacaaccacgccatataggaccactgtatgtatcatgtacgcaagatgcaatcgttcaaccagtgtcattgattcaaaagaacaacgaagtacgcaaaaatgcaaaatagtgtcattgatccataagaccacgcacagaatagctcccgtattttgtatgcactgcacctaggcaccaaggatccatcgtccagtaatccaacaccacatgagggcaaggctgcacctgcaccctgcagcgtctggggtggcctcgtgccctcctgggcagtggcagagcgatcgacagaagcagaagacgggtcgggggcgcggtgcgatgggcgaccgccgacagcaggtttagggctgggacgagggaggaccgtagcgggctggcggcggcggagtcggacttcggagtcggatgtcggtgctcggcggcagcaggaagcaagaacgagagagagacgccggtcactcagtggcactgaagaaaggcggcggtgggcgtgccaccgcactgctctgtacctggcgttaggcacttaggccattagggtttagcgggattcattttaggcctcggtggttgggcttgggctggctg

SEQ ID NO: 142245 - DNA, 364 bp, Zea Mays
ccacgccgtagcacgcggcccatgaagcccaacccaagatatgccggcggactgaagtagagtatatgtaatctgttagctgggagagagatttttatgcattttgtaaaacctgaactgagaagtaaactccagcttcgctgtcctatccttctctgttctccactttcccttcctccttcccccagagctaacaattggtatcaaagacctcatcgatccctccccgatggcgtcaaccacaccctccccgatcgatcccaacctcatagcagcgatcggcgcggagttcgacaagcggatctcatcgctggacaccaaatgggagcaacgcttctctgcgctggagaagtccgtcgcgggc

SEQ ID NO: 142246 - DNA, 439 bp, Zea Mays
ggagattggggctacacggccgttaggaactgtagtttcatcatgcacactcaatttgagaggaggggtggaggctgggagaatttgggcttggatcaacgcattgggtggaggtgtgcataccccgccgtggatcatggtggtatttatagccacggcggctcgactagcgatctccggccacagatagattcgttagcgcatgcctaccacgtcggtaagggacacagtgaggaagatcgaggcatgggtgacaccgtggcaaaagtttaatcgagtcacggtggtcgccggtgactaactccggccacgcgtggctcggcccgcggaatgatgccacgtactaagttactcccaggcgatcaaatcctcaccgattcatccaagttcatccaaatcaacagtgccgtagatcttttgatgttcttcagattttgag

SEQ ID NO: 142247 - DNA, 837 bp, Zea Mays
gtaatccttatgcatgctactctatccatttcaaaaaggcatatatgtatacttatcacactagtgtgtacactttgctctgttctaactctaccttatttctctacacagtttttccctctcgcctccaaactatcttcataaatcatggaggcattccattcgttagaccctttacagatgggcccatcggaccttataggtgggatccactcttttttctcccaaaatagaaccctaacccgagccctcaagcaccagcttccactcgaccctaagcagcagcccccgcttgtcctagaccaccagtcatcggtcacagatcgtccccgatcgtccatcaacactccgccctttgctcttccctgactacataccctcttctggcctccacccatccctggttggccaataaacactccaacctccaaaatgtatcggtcgaccatcgcctcgagcctctgcttggcctcgaccgcctgaggcagtccctagccaaagctcgtccctggccgcttgccagtgctttgcccttcgcgctgccccgaccaccctctttcggccttcgctctgccccaacaccaaccatcgcttcggccacccgacactttagcctctagaagaccctaacgaccgcccaccacctcaagcctctgctcttccatgacctccggccacctatgcctctgcttgacccataaagctcgccacgtctaaccatatctcccaccaccagtagcattcgaacctatgtctactagtacaccccaacccaccacaacaccactcttgccactagtagccaccatctagccctctcctccgttcactagtgac

SEQ ID NO: 142248 - DNA, 551 bp, Zea Mays
cccacttttgaggccataaggataaaacttctttgtcaaggtatagtccttctatagatgcttaatggggaaggcatggttggtacatggttgttccatcttcttctcgaggaagtttggagtccccttggtgcgaggttcgcccttctttcattttgaggtagcgataaattgggcatctatccgccccttgtccttcttgtttttcttggagcggtcagaggtgcaatcattggaaacctctccccacatgcctttgcctttggagagatcaaagatcaccccatggcctcctcacccgagatgtaacttatggcaatgttgagagggttcctttgtggttctcagatgcttgtgcccgagcttatgggctagggactcataggtggtccaaaagaggaatgcctcaatgatgtgcgacatccgatgttgggcaactcattgcactaccgagagaatcgttggatgtactcgtatagagtttcacctaacttctatcgatagttcttgatgtgccatgggttcccttagcatatgtaggtagcctagaa

SEQ ID NO: 142249 - DNA, 281 bp, Zea Mays
caggagtcctcatgaaatgcattctctcgactactggaaaacaacttctggatgaggtccatgctgggcaatgcgggatacacgcagcatccaggaccctggttgggaaggtcttcaggtcgggtttttactagccaatggcaaaagtgatgcagccgagttagtccagaggtgcgaagcctgccattacttatcaaaacagcagcattttccagcacaacaactgcaaaccatacctgtaacctggccgttcgcatgctggggactggatatgattggac

SEQ ID NO: 142250 - DNA, 854 bp, Zea Mays
gttcagtagcattccgggtgtgtttgtggaccccagggtgttatagttctggatgctattttacaatccactaagttgcccactattgctactactgaggtttctgatgataaaattgaagatgcaaggtaagtagccactgcaagcgattcttttattcatgctaaatcagagccttcgggagctacgctagtagagctggcgaaagaaaatcttctagaaaagcccaggacacctgctcccgaagcaccaccccagggtgatttggactacattgttcgacatgcttcaggaaaacaggtatcaggagatcaaattgccaaagtgcaacactatgctaaggagctgaaatacccccaagggtccttggtatacggaggagacaacgaggatgacttcctttactgtctacctgacagtaaagagatcaatgtttgccgtgaaatgatggacaacatggggtatccaaaggttgagcttggtctgtctgtaatgacgaaggatcagcctcgcttacaatagcttgagggtttgtatactttggcttgtcattttgtaatttttgttatggtgaactatttttgtggtaattcttatcgttattatttgtccactctttgtttgccagggtttaattctaagtaaagcttgaaaagctcaaaaagatgtgaaagatgaaagtagccaaatagcaattgaaaacctttgttcggaggtcataacattgagaaacgaagctcttgaaaagtataagatcttgctctctttggtggagagattaaaatctagtgaagccaggctttctagcatttctgaagtagagcagaggatgcagaaggctgaagagaggcaat

SEQ ID NO: 142251 - DNA, 808 bp, Zea Mays
atgaaatccaccacaatatttgaaatccaaattgaagtccaaaaatgagaagaaataaattcagaaaataggaggagagaaagaaagaaataaataaaagagagagagagaagaataaacatgccattgggcccaaagaagcgatctcggcccataccgacctggtcgtagccactcgcgcgtgctggtccatctaccgcatctacgtactgactcatggggccgggttgctagccgctcgcctagtgccactggtgcgtggaccaaacttgtcagtctcctttcccccaactgaccgccatgctcggaggaccggccgtgccattgtcgtcgggcagttgctgcgccccaaccaccctcgcatccataaatacagttgtgaacctgggctcgttccttccttcccctcctttttaccttctcgaccatcaccattcggcggctcgacgctggaaggaattgcgttgccaagtttgtgttgccgcgtcgtggccacgctaccaccaacctctgcaggggaccatcagtgaagggttacgggagtctgccgaagcactatgaagatttaatacctcgtggtgggggaaatcttggaccgagacgttgtgaatttttcgccgttgggcggtgccatttctctctgtggtcggagtgcgccgctgctccactgtgggtaagtaaccatgtgacctgttcattttttagcccccatggcataggctgtatgggtagaaggtttgtgggcgctagtagaaggcaggggcggtcttcggtgggcgcctctgtcgtaggttgggtgcgctaccgt

SEQ ID NO: 142252 - DNA, 464 bp, Zea Mays
gcatacatggggacacccatgtcctttacttgacccgcgccttcagttctgtgtgctttgatctgctttgctctgaatgtaggtgttaggcagtgcaaatgggatcaggatatgtgatgatgatatataaagtggtggtttaaaagctttgatgaaattacctagtggccattgcaagtgaaatttgcttagggtgaccgtgctgggcatggaaatgagcctgaacctatgaatggattgctgatggaaggcaaggatgttctaccttttcctgaattgcatgccattgagcaagcgaggcagctgcgagtacctaactagagctgaccctctatcctcctgaagcatatttaatcagcgctttttgtttgtggttctgcctaggaagatcatttggacgtgacaatcagcacagttacagttagagcatctccaacagtaccttaaaagaaatactacgccag

SEQ ID NO: 142253 - DNA, 967 bp, Zea Mays
gatagaggagaggagagagaaactctagatatagaggatccagcaatgtcctctaaattagactctttacggggtctgttggagcacgtctaagccaggtgccagactatcaagagcatggttttaaagtcgtccgactaatcgcgactagtcgcgattagtcggccttatcgcctggtagagcacgattagcatggacgactcgattagggcgactaggttacgactaatcgtcctagtcggcgactaatcgcgattagtcggccgactaggtgccatgtccgactagcttgtgccaagtttgggcctgtaaaaaaaagtgtcctctgttatatcattatatgggctggcggcccactgtctccactctccagtccacagtagaaacaagctctattgtctgccactgtgccgccgcacagtagaaagttagaaaccctaaaacagtaaaaccctaagccgccgcctctgccccctctcacactctgctccattgctgccctgcggccctgccctctactccggtggtcctcagctccggtggccctgccctctgccctttattgcgcttgcctctgctcagctccggtggccctgccctctgccctctgttgcactcgcctctgctcactgctcagctccagcgctcgcctctgctcactgctctgctccggcaatcgtctgcaccaatatgttctgaactctgttcagagttcagtgttcagtgctcacttcactagtctgttctgaacttaaccgaaatgagcacctctacagatggtaatctctgtgttcttttggttcttcaattgttcatttggtgctgcaccttttgagttgttattcacactacagatgagactaggaggcggcgtaataatgttcaagttatctattagtggaaacatccttgattttgattgcttgtattgctgtcctgctagacagctatagtgtactgctgtcg

SEQ ID NO: 142254 - DNA, 630 bp, Zea Mays
atggtgcaggatcacacccattggggtcagcttcaataggatcacacccattggggtcagcttcaacaggatcacacccattggggtcagctggtgcacggatacattcgttggggtcagttgatgcacggtcatacccattggggtcaacttcagcaggtacaccaccagtggggtcaacttcagtaaatacctatgttgatacttcttcgcaaacaggagcagaaggtccagcatcctggtccaagcacgacagtcgctgaagccgtctctttttcttcttctcctcagcaggcgtagctgggcggctgacttggcgaagacgctttgggtgagtaccctcaggcttttgggtatccactgtttttacagtctttggtataatcgcaacagccattgtttcagcaggggccgagtcagatgattctctagccaacatatcaagtacaacattcatttttgcatcatctgggctcgttggcatctcaaaatgaacctgtctttcatcattgggaatatcacaaagagaagcaaccaagacttcaataacttcaggagagggtcgcactctaagacccagaccactatcaccagcaggaggattggacacgaaactgaaaaaggacttag

SEQ ID NO: 142255 - DNA, 521 bp, Zea Mays
ggagggcgcgccaaaagagcacttagagcgcttgacgaagagctggtggcggcgcagctcatcgaggaccgcccggaggtggcggagatgatctgcccatgtcttgctgtaaattagaatatcatcaaaaataccagcacgaatcggcgtaggaacggccggagcacgtcgttcatcagagcttggaacgtggcgggggcgttgcagagcctgaacgccatcaccaggaactcggtacaagccgtcgtgggtgcggaacgtggtcttgtgtacatctttcggccgcatgctcacctggtgatatcccgacctgagatccagcttggtgaagaacttggcgccatggagctcgtcgaggagttcctccaccacaggaatcggaaacgcgtccttgacggtgagggcgttcaaggctcggtagtcgacacagaagcgccatgacccatcgggcttcttgaccaagaggacaggcaacgagaacggggagtcgctgcgacgcacaatcccctggtcaatcatgg

SEQ ID NO: 142256 - DNA, 562 bp, Zea Mays
gtttcgacgaagacggcgtcgtaggcgggcgtctctggcagctgcctcatcaaaattgccacgtgcatcgaaaatggcatcatcttgagcctgtggtagaggttgctgatgccatggtggatgctgctagggttgtggtggtggaggaggaggctactgatgtagtggacgtgtctccaacgtggcaacccgatcgacaagctcggttatccgtctctccaccctatctagcactttgccaagatccattgcaataatcgtgtcatggatagatttgtggactgcttcctccatattttcctccatacacttgcaaataacatcgaagtcttcgcggctgacacaatcggaaaattgtgtgggaatgactacctcaatctcgtcatcggatcctgacattggaaacacaaaaacaggaacaaacagtaaaggttatccctaataagcaactacgcgctctctgggtgaataggaacacacactaccgtgtcttaccaagttcttactcgtatctaatgaaaacacaatgcaaaggatggtacaatcggaggctggttcgtga

SEQ ID NO: 142257 - DNA, 638 bp, Zea Mays
gatgttggcccggcctccttcagccggcactgagccccctccacagtcgcgtccatggtcgtcgaacacgccagacgctgtgggctcacctcatctagctccctgctcgccggcaccacttgggccagcctcgccgtaaaccagttccggcctcaactcgtcctcgctctgtagcaacgcctttttcccaagcgtcatgtcggttgtcgtctccaaccttcccttgacgctgtcattccttgtcctccacactggagttcgccgttgtcggtccctgctacgacatcgactcgccggggtctgcatatgtagaggaaagtgaagcttcgtgcagtgttcgttgttgttgcgtccggtggtaggtataggccgtatagcgaacatggttgctcctgcgtgcatagtgttggtggtggcggtacgattgatggtcgacgcggcttcttgcagcacgttgcgggtgcgggtgatgaaagcaaagtcatgtggcgtgacatcagggtcgtttctgactttttagaggcctagtgcgaaatccgatatggaggccccatcacccatatatatatataattgaatatttggcgtataaaaattattatgttgttttaaagtttataagatgataaatgtaaaat

SEQ ID NO: 142258 - DNA, 315 bp, Zea Mays
cttgggttgatgcttttcctcccttgatgtggttggtcttctttggccctcaatcctggagttgccatccgagttgagtacatatggctaaggacatatagctaggatagctagggtacatgaggtagttcggtttaaatagagttttactttgcttttgggatatctagattagacagcttatgatgtaggacaagttgttgtttacggacgagttagtccaacgtattaatttagggtaagatatgtttatagaattagggcataatttatgtcgccaacattatctaacttattaaagtaactcaatttgga

SEQ ID NO: 142259 - DNA, 494 bp, Zea Mays
gaaaatgcgccaacttttgcaaagctatttttcagcttgttgtaatattccatagcgacgttgtagcactcctcttttgcccgatgaagttcctcaacatttttgaactgtcaaccgttctgtattagatatctcacgttttgcttgatcgacgttaaagttttcagtgacttcatcaagattcttcgccagtccttccacttcggatatgtgcagtcccacttgagtagatagagcatattctaaatcagcaatacactttgcatcttcttttccatcttctcaaatttctccattttttgatccactttagaaaggctagccagtctagcttcgctagattttaacctctcaactaaagaaagcaggatcttgtccttctcaagggcctcattccgaagtgttatgacttctgagcacaggtttctgaaggctatccgagtgcttttatcttcagcatctttctggaccttcaaagccttgctaaggataag

SEQ ID NO: 142260 - DNA, 2050 bp, Zea Mays
aaaaaactgacacataagaaaagagcagcgagcaagctgaaggtgaaagccacagcagctcgtccccttccccccacttcttcctcagataaggagaggccccaggccagagaaaaaagcatcgaatttccccccgttaattggcctgagccctcagccgtctaccagcagcagctagaggtacgattctcgcattgcttgctccctgcgcctgccctcgatttttgctgttttttcgagctcctcttccagttcttttgccgtgttggaaccgcatctatgcagcctagcgcggggtactagcgtgattcggtcagtggatcccgtcgggctgctgcttcctcgcggctgatttgcgagaggaagcaggtccccgggaagcgatctcatttttcgttatttttttagctccctacaccaaagaccagagtcagatccgaggctacccgccgccccggcaaggattttacccggccggagctctgcaacatcggtgggatcgatggctgcgacctccacgagctccggtgcccacgaatcgaagtcagcagcgccgtgtggactgagtcacgtgcctggttcgccgtcctgtccgacgcttctcacctcgagagcccgtcgctgttgcctcggactcgagggagctggcggcgcaaacgccgtgcggccaaaatcgagatccccaccatccgaatcgaggtcctctctaccagaatcagttcccgccgccgcgtcgaggtagctgtcacccaaattgagctttccgtcgctgctggatgtgttggaatcggaagcttcgggcgcatagcttgagctcgctcaagtgtatcgagcaagcaaaccaagcgttgggggtcttgctttgcgcctttgccgcgctagcttagcctatctatccgtgctaggaatccccctccctttcggtgtgatgtttttgacttgccactgcctggtgttgctggggctgcttttctcttctcctttggggctctgaatgaagactgaagaaatcgaaagagaggaaagctacgcctgagtcggggaacgcctacgaagtaagttttggcttaaaggtggaagcttttgaggtttctccttgcgaaataaatgcttttttcgatgttatttgatggatttggttggtactcggtcaaaaggtgttcttggtttgccctttctatgctctggctgctgttgcaactgcaacttccctttcccttagagtttggcgctctaaaagttggttcactttgcacgaaggatttctgtttcttgttgctgattgggttgtttggatctatctgcaggcagacaagctaggttttactgcttcattgagcacaaagatccgctgacctcttgctcttggtaaaaatccaacctttcttgtattgttttcttcctgggaaaacctccttgtggtgcataaacttcgtagtacactctgccatttctggagaggaagctgagaactactatccatatctggcacgacccttgtcaagaaccatggctgttcacatgccatgaagctgcttgaactggaggcacctaaatgctgtggattgttcctatgcagatgattggatcagtggtttcaggcttcggggggttcgatcagatgttgtatgaataatagcaggattgcttgagagactatagtttgggtactgtttgcttctgtatttactggtacggtttcctactgatctgcggctgcgcaggaaggcattctcttttttgccgtaccatggatgcaccggatgttcaacagagcatgggatataaggagtccaggggtggtatgcctaagtttttccatgcccttggaccagcactcctgatttcaatgggttacattgatctcgggaagtgggtggcagccgttgaagctggttcttgttttggattcgacctggtgttgctggctctccttttcaatttcactgccattgtatgtcagtaccttgctgcttgcattggcactgtcacagggaagaatcttgcagaggtatcggtttaccgatgttgttccttggttttgctggcc

SEQ ID NO: 142261 - DNA, 595 bp, Zea Mays
aagagcgagggcagcataaacgctacattggctcaacattcgggataaggcctgcctcacaaaaattaaacaacatcattctcaactcctcaccctcaaatagactctgcagatccccctccccaatacatgtccccggacgacgaggacagcaaatctcgttggtcatcccgatctagccgaaggcgggttcgttccatccccatccaacgacgcatattacttcgcgacgtacggccaacattatgcttcgccaccacccttcaccggcgggactccccggtcctcgcctcagccgaggactcgaatgctccacgcgcttccatccgcagcacggactccgccgcggccacatccaacacagcaaaataatccaaatcctcagccgaagactcctctgtccacgaaaacgggctcccaaactcacccccatcagatgaccaagacccagtttccgtactagacaaattttcattaacatgcatcgcactcgcagccgccacaaaattactatcatcagtaggggttgtttgcgcaggcccagacgtcggaacctgcgtagcaaccaactttcagtatcacaaaaatgaagtcc

SEQ ID NO: 142262 - DNA, 484 bp, Zea Mays
ctgcacacaagtttgagtagtagcacttacaaggagagacatggtcgtagccgtgcagtcgtaggaggcggaaacccatggccgtgtcatcgatgtccttcaccaggcagcccttcgtataggccaacccttcctcactccagtgcctgttaataataaggtaagaagaagaatataatgctctactactcctgatgaatatataacataaaggatatggccatgggttaatgcttacctgtaaacataatctaagtagtcctcaatttcgctcttgaaataacctgatatgcccagcctctccaaccggtccacagcccataagcgcccaaacatctccattgggtaaacaaaaggtactgaaaagggttaacaatggaggcacattcaattttgggttatcttggaattcaatgctttctcaaggcaccattttaattagctaggattgtttggagttaaaaaaatttgtctttaatttgaa

SEQ ID NO: 142263 - DNA, 852 bp, Zea Mays
agaggttgggcggccggcctgtcgcccccaaacccaggccatcatggctctcgatagtagcatatctgcctttcacagtagatcaccgcccgtcctctgcgctcggctgcacgggctgacgtcccttttttttttcttcccccaccgccaccgccaccggccgctcggcctggccccggtcgggttgcattgcataccaggtgatcgagcactatcgtcttaggacggacgagagggcgaacaagaatgattattatttagttctaccgcctgaacgattatttaggcagcttgtttgctaagagctttcttgtgataccgtgtccagaagtttatccatatggttattcaaaacactgttttgtacagagtggagtttgaatctgggaataaagatgagtaagatgatagagatcccaaaatcccaacccgtttaatcctatccaaaacaccgtatttaaaaaatctaggctgagcccaataatcaaacagcccagtaccacacttgatggttggcccaccttgcagcccaatctaccctttcacctttgcgtgttgcgtgcctaccccacgtgacgaggcccacgcccgcaccactgagactgcatggtcgtattgttgcttggacggcggctaggaacacaccatatatggtgcggtgcatttatgtttgtatcatgtttttatatctgtttccgtatatctgtatcctggttttatatctgtttttgacttgttttaaacccaatctcacgaataaaaaattataaaaaaaaccaaaaaacccaacttcaacggcccgcccagctgaaagcctgaactgtgccgtcagaccgacggttcaaggtttgc

SEQ ID NO: 142264 - DNA, 510 bp, Zea Mays
tgtacaccaaagatagaagaggcaaggagatatggtagctagcgctgtaaaaggaaaagagataatctgttactatctttacctccttaattatctcctggccgttgtctaggtgctacacctcccctatatgtaagccacggctggggcttttccagtcatcaatctatcaacacgcagcacgcctgtgacggcgtttctctccttccaagcgcctctgaatctctcacatggtatcagagcttagggttccatggcaacgagttcaagcaccatcaccaatcccttattcggcttccaagtgaccgagaagctatccaagaacaatcatgcgtcatggagagcgcaggtcctcgccgcgatccgcggtgctggctacgaggggcatctcaatggcaagaccaaggctcccgatgctgaaatcgtcgagaagaagactgacgacacgatcgtcaccaatcctaacccagcgtttcaggtgtggtattctcgggatcaacagatcctttg

SEQ ID NO: 142265 - DNA, 298 bp, Zea Mays
cccgcgtcggctatcctcgttattttgggtcgcagaccagctctaaccgtcttcgtttaattttatcaaacccgcctaagtcagtctgtcttacattgtctcgcacaattgtctttttcgctcagttgcagccacctcattttgcctcgccccgtcgcgcaacgcctcgcgcgtcgtgcgcacaaccaccttgccgcacccctcctctatatatatgcacacatcccttctggcaacccctcgtctttccccgatccccagatccaaaattgcgcaggagcaggcaccccgcggttac

SEQ ID NO: 142266 - DNA, 468 bp, Zea Mays
gaacacaagcacgcaacatatcttccaaggtttggatagttcgctctgactgaccatcagtctgagggtgaaaagcgacactaagagagagcttggtacccaatgcacagtgaagactctcccagaatttggatacaaatttggagtctcgatctaaaacaatggacttaggcaccccgtgaagcctgattacttctttcatatacaagggaaccaactctgaagctgaatttgtggtattcatgggaataaagtgcgcagacttagtcaagcaatccactaccacccatatagcatccctgcctcgaggagaacgaggtaagcccaccacaaaatccatggtgatatgctcccacttccactccgaaatttccaatggcttcaataaacccgcaggcctcttatgctcggtcttcacgcgctgacatacttcacagggggccacatacttagaaaaatcaaccttca

SEQ ID NO: 142267 - DNA, 518 bp, Zea Mays
aaaaaatgtaagtcgctgccttctggtgaaccatcatcgatgacttgttgcaattgggcaataaccttgacacgaacagggtcggtctcagcagaggtgatggacttgttagtgttcattgaacgggactcaaaagccgccactaggcgtttcatgtactcttctctggtatcttttatcttctttggtttaggagaatcatgacgaatcttacgcttcccagtcgcatttgagcatgggtcaggtgtgctgttttcacctccacctaaagtggcttcgacatgatcatcagatgatgaatttgcatcctcgacgccaggaacaagtgttctttcatttgtgcagaaaatgggtccaaacataatctttagctcgtcctcattctctaggggggctgttttgaacattatacaccctggcattgcctgcaccaacatggtatttcctactttcagatggctaatactaatgtaaaacaaaaaaataaaaaaagtctacttacttcattttgcttagcc

SEQ ID NO: 142268 - DNA, 815 bp, Zea Mays
taccgagtcggcccagctcgacggggatggggccggaaaggttgttgacaccgaggtagagctcggcgaggccagggagggcgccgagctcgcgcggtatctccccgcgcagggcgttgtagtgtaggtagaggccggtgagggccgggagcatggcgagcgcgggagggacggcgccagcgagccccttcccctggagcgagatggtggcgaccctgccacgggcgtcgcaggcgacgccctcgaagtagtcgccgcggccgcaggggtcgccgccgcgcgcccacgaggccagagcgcgccccgctgggtctagcgccgccttcagctccatcagcgcgtccagctcggcgttgcgcgacgacgcggcggcggcggcggcgcagaggagcaggagcgggagcgggaggagggagctccgggacgacatggcgtgcggactgcggaggggcactggtgggagggtggctggagcgagttcttggcggtgcgtggggtgtgaggattcggaggtttatagagggtgtttgtggtaaaaaaaaagtggagggggtgaaaagctggataactggaaaggcgtttggatggatagtaaaaacgggagggggtttatcgggattgtaactggcagcgtggatgcatgatgaggctactgtggtacacgggtgtacgatctgcatgtgtgcgtgtttgtggactactagtctgtgtggtatcatacgatacaaacatacgtacaaaataggctggtgatgtgtactagctgctggtgtaaaggacgaatcagatatctattagcgatagtacacatatct

SEQ ID NO: 142269 - DNA, 347 bp, Zea Mays
gaatctcaagacacagtgtatagctgtaatggacggcgggttgttaatctaaaacttcaggggctcttgtgcaattttgttccgcgaaggggtacgcggccatctaagccattggatccaaattcaagggctcgaattagatcattcattacccgaaccggtaccggatgtggactgctagattaaaatccgacggttgatgctagcgcaagacccaagccctccggatctgctcgatttcagatggacgggccggattcaatatcgcgaaggaataagcaatttctaatcccaaccgtctaccctcaaatctacggcccagagttacacgcgcggagggggggtat

SEQ ID NO: 142270 - DNA, 469 bp, Zea Mays
gtagtactgcacaatgcatagaagatttatgatcataatccatgagaactagtttcagttaaataaagaatgcgacatcaactaacatgaactaacatgagaacaggggagtaaagcgaagggtggggcgctgtcaaggggaacatgtgtgcgtccaacttttgggcagagagcatgtgcgcacctagcttttgggcagcgggagtaaaggatcagttcatgtgtgcgtctagcttttgggcagcagcagccatgtcgccggagtgggcagacttgacttggaaataaggatcagttcatccatgcgaggagcaggctcgctcgacgatggcgccaactacaaacaacaaaagcttcgtggggaaatatatgtagccaacagccatgcgaggagcaggctcgctcgaccatggtgcggctggagctagatccgtctagccagatttgcacagatttggaagaggagaag

SEQ ID NO: 142271 - DNA, 456 bp, Zea Mays
ccaagcctagctcttcattcctcagttgctaatccaacaagccactagccatcatgttctgtcccccatcctctgtgatcaacggaattccccagaaccagtttcttctgccgccgtgaagaactcttccgtggccagcactcctcgggttagtgcatacccaattgattcgagttatttcttgtttttagccccctgttgctctcggagccagccaattggagtttacctgagtctcatcaccggaacacccctctgctctgtagaacgccgccgcgacgccctctctatcgacccgcttttctactcttgcccaacccaaattctagcgtgtatataaactctggtgaacccatgaagcttacccaagcttcaatttagtcaaccatgctttctgttatccagaacgcattgatccattcgaccatccgcactgtcgccatgaactggttgatt

SEQ ID NO: 142272 - DNA, 720 bp, Zea Mays
ggccgctttaaagcattatggaagaaattttgtagctcttgtgctttttcattgtgagagaagacccacccattaccggtccgcaaccgttgaatgaaattttttcgcctcctggagccagctttccggtggaaaaatttagtgttggcatctccgaatttaagcatgcgtgagttttgcctgttccatgccctttcaattaccgcatagccaaggatgtgcatcttcaatctatttcggaggttcacttccatgtcagacagccccctattttcttgtgccatgtacagtcttagaataacttctagggccatatacataaagagtctagcatcaggtattaacttgaagctccattccttaagcgccttggccgtgaactgcagtttgtagtacaacctatgaaaaggctcgcgatgttgggtcggcgccaaccaggcttgctcaactgtatgctggaaacctggtaatttggtccagaaattctcaaatttaaaggaacgtggacgcctcggcatagtagtattggataggagcagcgggcagtggtcagagatcgaggatgatagcgcatgtagtccacatataccgaacatctcctcccactcagagttgcagaagaatctgtctagtcttacgagagtggggtgtcgtctctcattgctccaagtgaacttcctgttttgcaaaggaatttctttcaagtcgcaaatgtcgaga

SEQ ID NO: 142273 - DNA, 334 bp, Zea Mays
cttggcctttgccctaagcctggcactccttctgactgtcgtgtcgactgagataggctgcctttttctgggagttgcctctgactggggagggagttgaggcttagcaggggaatcctgactgggtggagggggaattctgattgaaatggtgcccatgctgggtgcgacgaatgccgagatagctcccgacaataggaatttcctggcccaatcaaacgaatctggcctcattaaaaggcccatgaagaaagcaacccaaacctttggaacagaaactgagccatcattgtcagggaacaaatcagcccaagaggaggaacgctttctggcc

SEQ ID NO: 142274 - DNA, 476 bp, Zea Mays
aacttcgactgtcacaacaggaattgtctcggagctaaggggatagcttcgacacgttcagcaatctccatcttttatgtatcaagaactacagctgtcttctctaaaggacgtggcttcggcctgcgagtcaaaacctttgctcttttcagcttaggtgcagtggaacaggatgaagctgccacatttctctttaacccttgttttcgagcaggaaagcagtaatcaggataaaaaattcgatcacatcgaaaactctattcagcctcctcttgccgcgagcgccaaaggcagttgtcatggcttcgtcttctgcctttgaataagctcccaacagctcatcgttggtggcatcaacagcctcaagccaatcatcattcggctcgtcaaattgacttctatagcgataggtgtatcttaagtaaccagaccaccttcgcttggagctgacagcagtttccttcggtatttcccag

SEQ ID NO: 142275 - DNA, 347 bp, Zea Mays
gtaaaaccttcgggtgacccgaaacctaatgggttaggggtgcaggtttagaatggcacccatgggtacaatcgcgggcgagtttagtacacttcatggatgcgatcgtagacgggttttacgccacccaatctgaacccgacccattatcatccctacatccaaccataacactggacacatgtggtgagcagatttgaatctcatgcacttggaaaaaaagtcattgtcccgggtaggtgtgtgcactttagactgtgttcagcggttccccctatatcccactcacgtgtgttctctctccccctatatctccacgctctacagcggttccccctatatcaaac

SEQ ID NO: 142276 - DNA, 406 bp, Zea Mays
accaaactgatcgcccacacatggccacttcaacgctgggggctggatattgtcgggccactacctacggctcaagggaacctcaagttcaccttcgtcgccgtcgaatacttcacaaagtggatcgaggccagggcagtatccacgataacattgaagaccgcccagaagttcttctggcaaaacattatttgccgattcggagtcccgtccgagctcacagtcgacaacggcaaatagtttgacagtcaggacttcagagatttctgcctctccatcggcaccaagcctgtcttcgcctcagtataccatccgcaatccaacggcatcgtcgtgcgcgccaatggcaaaatcttcaccgccatcaagaaaagacttctcgacgacaagaagggtaaatgggccg

SEQ ID NO: 142277 - DNA, 447 bp, Zea Mays
agacccatcctctttgcaaggataattagttctaatccacacagagaaagtgctatgataaggaactaaaagtttaagcatcaggaatgttgaattccacctaacatccatatctactccaaatttacgtggtctaacaccaacactcatgcagtattgtttataagaagcaattctttgatgtgaagagtttaaaaatgttatagcagtcctaaagtcttcaagatatggttgcaaacatttcaaacaacttttaacaatcagattaataatatggcaagcgcaacgctaatgcaaaaagatattactcaaatcactctcattcctactaggtgcaggtatcaaatggccaatataaccagaaaagacaggtttcagaacatcaataacagttttgttagatgaggcattatcaagcacaatagcaaaaatcttatcagtaatgct

SEQ ID NO: 142278 - DNA, 402 bp, Zea Mays
gttgtttcatgcttgatatcaggttgtgtagtttccttagacaattagtccgaggtagaggttcttgtgttaattaagaccaataatggacccatgttttgaatggtggtgctatatggggtaccttggatgctttgcttggaagtggtcgaattcgagaacgaattgtttttaaggggggtagagtgtgataccccaatcttctgaaaagaagttaaatttatttttctcttttctttcatgttctgtggcattggggtttggagttttaggaggcattcctcagggaaataatagatttttggcattttttccgctggggtcgggagctcagatgggagagcgagttcgggccattgatctcgatccgatggatgggagcccccctctcctccccaaccc

SEQ ID NO: 142279 - DNA, 449 bp, Zea Mays
attgcagtatctaacactcactcgacctgatctctcttatgcaatcaatagagtttgccagttccttcacgccccgaccgaccttcactggacagtagttaagcgtattcttcgcaatatacaacatactattagcctcggtctcactatcagaccatctccgtccctaatgctaagtgcattctcagatgcggactgggccggttgccctgatgacaggaagtctacaggcgggtatgcgctcttccttggtcctaatttgatctcctggaactctaagaaacaaagcacggtgtcacgatcaagcacagaagctgaatataaggccatggccaatgcgactgccgaagttatctggcttcagtcccttctccacgagcttggtattcggctcaccggtattcctcgcctctggtgcgataatctgggtgctacatacttgtcttcca

SEQ ID NO: 142280 - DNA, 415 bp, Zea Mays
cgcgcttttactgcgcagtttgaccagaagccggttgaaccggtttttgaaccggttgaaccggttttctgtttttctggcggccgactttcccccttttttatttctcaccctctctcctcttcccttctcagtctcatattccagccgccgccgcccactcatcctcctctctctccttcacactccactccaaaaactctcttgtgccctcacacttttggaagagttgttggagatccgttcatcccagcgttctccatcatcttcctccatctcgttgggatttcttgacccaatctccggatcgaggtattgccctatttcatttccttgtactcgatcctatgcgttcttgattatctaatgtatcattcattgggtacattttagtttaagtgattgcaacacttag

SEQ ID NO: 142281 - DNA, 357 bp, Zea Mays
cgagaaatagaatggagtgctagtagcatccaatcgcttgacccacgcactagagaaaccgaacttgaagttcaacgaataatacacctgcaaaacttagcaaataatctaccaaattcctttactgatataagaggagtgtcgaagtcacatattcctgcggcaaatgcaccagagagagtggagatacctttgtagggtatggattctactcgtactccccatcctacgaaaagggggagaaaatcggatgatttagtatcagccaagcggggacacctgcaccagcaagttactgaaaagaatgcaacgcgctccctttcagatgttccagcagtaacacaccttgaaggtaaa

SEQ ID NO: 142282 - DNA, 337 bp, Zea Mays
aattcttggtacattattaggtattcccgagaaatcaaaggatagtgttaatgctaggcttgatatggaagacatgggtataagaaaatctttgcacttgaagcgtgatggagattcatataacgctcctcctgctccatacacaatggataaaaaacagaagcttgctttctatgactttataagaagtgtaaagtttccagatggatatgcttcaaacctagcaacatgcattactactgatggatgcaacctccaagggttaaaaactcatgattgccatataatattgcaacggattttacctgccgctctacgaggaatcatggataatgac

SEQ ID NO: 142283 - DNA, 632 bp, Zea Mays
taaaaggcgtgcttaattacttcacaaggagatggcccctccacgctcagcccctagccccatcccctcatctcccaaccccagccccgtcccctccctccgtggcgtcatcgtccaccacctcagcccctcacccgacctcactccaaacccgacgaacacctccacgaacccccctctcttatggcgtcagggcccacagcaaacactgtttggcttcccagtccgggcgggctaaggttctagagatgcagtgacgccagtcctacccccttgttttctggaggatcctgtgtcgtgccttactcttataaagaagttgtgctctccaatgatgagagagtagcctcttctcctccgctgtgtgttgctgcttcttctcagctgaggggtgcccaccagttgcaagcggtgaagaagacagtccgtgtgcgcccggtgctgcaaagtcaggaaccagcgcttcgtacccgttctaaacacgggtggcaggaagtggtgcgtcggagatatagacatgcggcacttggtcctcgtcgatggtccccagaggatctccgaggaaggtgctacaattgtttttctccctcccactttggtgctgcatgtagacgacctacccgctgctttag

SEQ ID NO: 142284 - DNA, 525 bp, Zea Mays
cgtggtcgggccactcggaatctgtcgccaagatcgtcggaatcgctcaccgtacctcgggctccgccgcgcgccgcgggcgggggatcttcagcctgttaatcatggtattaatgccgcccgcgtattcgcgctcccattcgataggtatatctgtagcgaattagggtttgaaccgccgtggtgcgcgggatttactcgccggcgatggctgcgccgggcggtgttgcgccaccgtgtgagcagatcggagttagggaagggctgcggtagccgttgatcgggcaaaggacgggcccgattaaatctggtggtgctgattcgagaagaagatccgggtcgttgatcggctcacggacggagacaaatagggtgtggctgttttaaatccgtggccgtaggagcgtgatctggcgggcagcgtctcgtaccggttcgttttgagtaggatctaatccgcaccatccgcgcgtaatcgggcgacctaaatctcaccgtacccctttctgccatagtattttgcaa

SEQ ID NO: 142285 - DNA, 382 bp, Zea Mays
gcgaggcgtgcacagccagagcagcaggcaccccaagaggaagtagccccgcagtagcatttgccactgccacccctgatgaccattgagcagatgttcttgatgcagacacaggcagttcaggcaattagtcagacattagcagcgatgcagcaagctcagcagcagccaccgccacctcagcctccagtgcaagtccagatgcctcaagtgcctagggacaagcgggcagagttcatgaggggccatccccctatctttgcccactctgcagatcctatggacgctaaagattggctgcataccgtggagcatgagttgcacactgcacagtgcaatgaccgcgagaaggtgttgtatggtccccgacagctgaggggag

SEQ ID NO: 142286 - DNA, 378 bp, Zea Mays
atatcaccgcctttatcgccttgtgcgaagggtatctgggcgttgagcccaattttgacttatggcgatatttttttgcgtcaagttgctacgaaagagggaagagtgaagagttatagaggtgtggctgatcgagtgtgcgagcaaccatctctacaacgacaggtcgtgcgaatatatcctaattccactttccttatctaccaagggctagcatgaacaatggttttatttatggggcacgggtgaagagaccttaccagtgctacgactccctggcttcgacttgggcgttcccttcgaggctcctatcagttggagccatgacatcatgtccggtcagtaggtttagatccgcaatcatttggcaggtgtgct

SEQ ID NO: 142287 - DNA, 279 bp, Zea Mays
ccatgggacattgcatggtgcagcggcagcgaaagccggccaaaattttggtccgcgacgtgctgtcagggctgcaagaggcagtcaaccagtcacgcgagaaattcgaggcagagagcatggctgattggtacatgcataatgcattgaactagcttcatcttttcaacaccaacagaggcaacaaccgtgtcattgtttcaagtcttttgtttgtgagccattagaaaagatggtgactttctttcgtgccaataagatgtgatcagcggagcgtat

SEQ ID NO: 142288 - DNA, 485 bp, Zea Mays
ggcatattgctctacacttttgctgcagagcttgacttgtgttgacattagaaattaagagaaaatgatgctccaagtttggctgacaggctgtctgaatggggtttgccattgtacagtactgtagaagatcagagcgccagcgcggcagtctctcaccgccgacggctctctccgccgtgattcgtgtcgtcggcgtcgagattagtgcctgggtgttggatagcgctgcggggtcgcgaaaatatcatcgccgtggataactccgggcagtaaacaattccggccgccgtactgcactcaccacggcggatttggatatgctcgccggcgacagccgcctcccggccttgcgccgcgtggctcagcccctccactgcttagccgtgaacccttgtgcctcttcgtggctcgtcggagtaactgccacggtagatgccacgaattcacgtgcgccagtatcttctccacctccggccgccgcg

SEQ ID NO: 142289 - DNA, 840 bp, Zea Mays
gtccgttaactatccaatggcccaaggcctctcttcttcccttatttctctctctcccccaccggtgccagcccgacggcactgagcagaggcacggcggcgccatcgccgaccccgcccaaaccattggcccgagcaccaatccatgacccggacagtgctacacgaactatggagcaaggtgaattaaataagctgattctcaccgacgattgggacgcgcagaatcactgccacggagatgcgtaacactacagtggagaaaggattcctatgagaaatctcgcggtcacatgtgctccacgactctcccagcgctctcccagcaagttccgagtcgatccccgagagctcgtcgccggcggaaatccttcttctctttcttctcctcccatggtttcgctcagcctgcgctcggcttggtgctgtccgctctgacctagcctatctgtagagggggcgatggtgctcgagttttatacccggtgtttgatctgtggttcgccaaatcccaacaaccttgacgaataccccggaatccgcgcacctgagtgacggggtttgttacgcgagatccacggagtctgttggtgctcaacccggttcgcgacgacgaaggagacgagcattacaagtgggccccacatgcaagagacacataaagccacacacggaggtgagcagtcactgggcactaggacccacccgtcggcgcgagtggccgcgtggacgagtgtgggcagaaggttgctgggccgaggggatgagaagcggcccaaacgtgagtttcctttcttttccaatttttttcttttcctatttcttattttcgaattccaa

SEQ ID NO: 142290 - DNA, 449 bp, Zea Mays
gtgcgtgatttgggcgagcccggagctacccacgagttctgcggacggttgaagaagacacggtcctgggtggcccactcgtcagccgcaccagcaagaagatgagtcactgaccgcatgggaccgccagtcggtgattgagagcacagcaggctgtgacgcgggtgcacgtgagaggagtgtggcggctagggttttgccgtagaggaggcgcgcgcggaggagagtggaaatgggctgcgcgggtgaaagtttggaaatgggccgaaaggtgagtcttgggcctagtcaaggcgtttttcatttctccttttcttttctttcttaaattctagaatttcttttagattctagatttcctttttgaattaatatgtttcttgtctcattatttttatattgtcacaaaaatgcacacaaaaacaaaatcccagcatgatgcataattt

SEQ ID NO: 142291 - DNA, 1044 bp, Zea Mays
atcatgttgggtctcttgtattgttgcattcatatttgaatttataatccagatttggatttgaagtaaggatttaaatagaaagcagaaattaacaaataaataaaaatagaaaaggaaaaaaatgcaagaaacgtacctgctgaagcccataccgcttggcccagtctcaaattctatccaaatggcccacacgtgcaaattcttttcccttttctttattcatttggccagcgcttacatatcctgatgccagtgcgttcgatgtttcatccgctgaaatcgcgtcgggcagttgtaacaatcgaatcaaagaagcatcgatcagctgcctcggactcaatcccatctcggccggacttcaaccatccctgtgtatatatgtagaccctcgatgtgcccctcctctcatccttcgtcgcaaaccgggtgagactttgctgccgccattgttgctcggttgacgagctcgatgcttggaaaccccctgcgtgacgtcgtgcattgtcgaggaagtctcgagcgcagtggacaacttacattacccggaattactcatcggagcagatctccaccgtagacccgctctccaccgtggtctgggcgttgggctgtatacatctcggtgagcaaaaccttatcagattcatgggatacttgtctgcgtgtaggaaccatgcaggtagaaaatggagatttcgggtggctgttttagatgtccacggcgatggcgccgccgccctggatactgtcgcgccgctgtcctggggtcacggggtgggagacgacgttctgaccgttagattttattggttggtgtggattagatctgggtagcccttcacccgctaccgttagatgtcgattggatggatcggggtggacctctagtatttaaaatgtggagcgttggatggcgatccgacggtctagatgcagtaccggttcgggcgggggaaagatttaatctgagccctaggtttctaatcggacagctagagtttacccgtaccccttcggccgggccattttgcataagagacc

SEQ ID NO: 142292 - DNA, 483 bp, Zea Mays
aaacaattaagtgcacatatcgtatttcgaggagtcaactaatttcaaaatttattttatctattgacatttgaattgggtctgccaattacatccctataagtgagttaatatttattgtttatgggtcctaggcctgccacaaaaattttaagaaatatgagtataatgaactattgaaatgtacctgttctttcatctgcatcaattcattgcattagtaatttatcctgagggactggttctgttaacacgagaacttgttaatataaagtaataatatacacaaaatgcaaggcaaatgattaatgcctatacaataaatccctggtgtccagaatgattgcaagaacaagtcagatccataaattgaccttaccaagacaaaaaaaaaaactagtgaaaaatataatggtcttagtagcttcactaatatggtaattagagtacttacaattccaaagtccggtatatatatcgtag

SEQ ID NO: 142293 - DNA, 419 bp, Zea Mays
acaagtatccagacagattagctgcaaaaaagccttggtgcttgctgcatcggcatcgagtcgtcgtgcgtttactgggagcaggacctgaaatgtcacagtactcagttgcgatgtgatgaattaacatgtcttggagcgatgtttcttcgacgacgttggtagttaggttgccgccatacgttgatatgagagatctagcaacagctctcttcaccgcatcagagacctccactggaccttgctttccttgccggagaaccaccgaatactgctccatcctgtttcttctcatcagctgttgtcgtccagaaagcgtagcccttctaagaaaagcgatgactgctccaaaggtggatgcgctggtctcgtaccagtgtttcttgacatgcatggtggctagtgatacctgggcccag

SEQ ID NO: 142294 - DNA, 488 bp, Zea Mays
cggggaactccttcttgtcgtcgactggcagggatatcatcccaatccccgatgcgacggctcgaagtgactcactagggtatccgttaggggtagaacgtttttccttgaagtttagtaggccggatcaatgggaaggtttacacctgcaatggcgcgccgtcgtgtactccctgtgcgacgccgctcggcctggcttagggaaggaggaaaggcggggaccgtcgagctgggatgcggatgagatgaagcaccacataacgattcagccgggtatatcagaaccgtagatcgtagatcgtggggttgtgagagagtcgcttttcattaaatctggtccatcggatctaatccaacggttaagaattagggataccccttcggccgggtctttttgctaaagagtcctcggaaaatcttgaaactaacccgccatccccagcctgtgctaaataatttaatctgtgccctcgtcatttatggaatag

SEQ ID NO: 142295 - DNA, 451 bp, Zea Mays
ggacaacggcgagggaagaggcctggtgagcaattcggtgagccggtgaacaactgttggcctcccgactacagctcacgccagacgagaccacatacgcgcgcggcggaatccgcgatactctcacaaagcctcgccacgatggggcacacatcgaccgcggcggatctccatcccccgaccgactgttcacgcggcaactgtgattggtttgcttcgatggtttcgggtacggcttggcgtggctatcggtgcagggcgagatgaccccggggcatgggcataaataccccggaatccgtcgatggagtgcccggctagatcggcggaggatacggtacccgcgcgcgcgtagctcgcggttctgttatggtggggaagaaagacccgaccgctgggccccacgtgccactgatagcaagaatgtggtgcggtacgtgtgactggaatg

SEQ ID NO: 142296 - DNA, 423 bp, Zea Mays
ccactatgccctactaacggagcaatcgacttaagttggcagcaacttaaggtggtgcaacatgctcacgcttacttaactcggggtgaccactatgccctactaacggagcaatcgacttaagtcggcagcgacttaaggcggtgcaacatgctcacgcttacttaaactcggggtgaccactatgccctactatcagagcaatcgacttaagtcggcaatgacttaaggcggcgcaacatgctcacgctcactcagctcggggtgaccactatgccctactatcggagcaatcgacttaagtcggcaacgacttaaggcggtgcaacatgctcacgctcactcagctcggggtgaccactatgccctactaatggagcaatcggctaaagtcagtggcgacttaagccggtgcaacatgct

SEQ ID NO: 142297 - DNA, 975 bp, Zea Mays
ctggcacatatccatatacacacaccctatatggcaatctaatactcagaatgaatacggctctaaccaaacaatagttttgaagaaataagtagaaaaatcattcttgatgatgataaaaagaaaaggtcagcaaatagtcttcatctccaataaaaccataccagcagcaagttcaggggagcaaaattcccaaccatcccgaatgcaaatagctgtatgagcaggatattgcttagctacctcagcctcgttggggttcagatctgcattggatacaaagttcagaaatatgaaaggtatcaaagtgatcaaaacataatgtaccagtcgcaccaaacaatttataatgtatttggtttcgtgcttcgcctcatgcagcatggcctggttccgtggcgagacggataggttcgtccggcgttttcttgcagaatgagttggctcgtatattggcttataggttcgtccggcgttttcttgcagaatgagttggctcgtatattggcttgcgactgttactgtgcgggatgagtcaatgtggcataatctcattaggtgactcaaaccaaacagctctataggttctcggacataggttcggatgactccagtgcccacccatgccgcaaaccaaacaggctggtagtgtatcagaacatgtagtataatagaaactttgcagatatttggagctttaagggtagacattaggacattactgatgttcatgctcaaatatgtggtatcacagcaattttccagatagttagagctttggagtagacatcactgatgctcgtaatcatgtatatatattgcagataaccattaaaattgagctccctaatttcacagtttttttaaacagaaatcatgataatgatgtgtgacctttcttatgcaaacattaaggtgtatttaaaatacataaaaggtataatatctggaaaatataaaataatgaaatatctc

SEQ ID NO: 142298 - DNA, 629 bp, Zea Mays
ttctaatcgcttgtgatgcggatttttttgatatggttacgattccatacccatctgtattttcgttatctgtcagggtttgttcccgtctttgcgatgtggcgtgggaccttacaggagtttatggccctcaacatgagaacgagaaaatgactttcttaacagagctgcgcaatattcgacatatgatgaagcctgaatggttgatcttaggtgattttaacatgataaggagagcaagggagaaaaataaaggttcaataaatagaagagtgataagacaattcaatcacacaattgactaccttcagcttttagagattgagctcaatggtaaattattcacttggtcaaacgaacaagacgaccctacgatgtctagaattgacagatttttggcgactacggagtggcatgatacgtttcctcaggccgatctgcaagcttttgggaccatgacttcggatcattgccctctagttatgcaaggttgctcggattttggtttctataggggttttcgatttgaggctttttggacaaaaattgatgggttcaatgaggtggttcagcaagcgtggttgtctagggttagttcctcagatgccattctccggctgcatgtgaaa

SEQ ID NO: 142299 - DNA, 417 bp, Zea Mays
tgtaaggtcagcgccaattgcgacggcattgaccttatggtacattttctgaattcaaacaaaaaaaagacatatttgtaaagaaaaccctggaaagtaatgaatagaaaaagagacagtgtgccctctgactataggtagactgattgatttgcctgcctgccaatagcccaatacgatgacgtgtgcgtgtctgaacgaacggacacaagccatggaacttgcgttcatggagaaagacctgctagctgtacttgaaatggggccctccaaatgccacatctcctaggcatccttgcttaaaccggggatgagcaaagaaggtgtccacgaggaccacgacggcgaagcgcttaaccccgctcatggtggctaatgtgatctattgaaaattcttccattggtgtggattgcggt

SEQ ID NO: 142300 - DNA, 337 bp, Zea Mays
gtatggagtatcctcgctgccatagttgggagagggctcatgaacacctccaacactaatcaagttgcccctgtcgtgtgtggctcggctgaacaaagtgtacaactcatcaagaaagggtggttgttttcctcgattggcctattgagtactaggatcctgcgtttgaacatagtgcagatttagtattggtccataggacaaataaattgtaataaattattagctagttgagccagctaatgaactaattgttagccagaggtaattaacaattagctgatgtattaactggtattagctaagggtgtttggaacccatcaactaattgttagt

SEQ ID NO: 142301 - DNA, 336 bp, Zea Mays
cttttagaaaagcccaattcaccccccctcttgggcatcgtgatcctttcagaagtcttgcacagatcctacgctgctagggactataggtggactcatgtggcctggcttgagttcacatgatatgcatcatgttttcttcattttctccatcacgtcattaatagccttttgtaccctttcatcaatagtctcttcaagtgtccttttcgacttctcgtgtttcctatatgacgccgcatactctggaaacgcctctctccaggtaatcttagaaaagattccccgagcccgtccagtgtgttcaggattgcctagtgccgcggttagtatgcc

SEQ ID NO: 142302 - DNA, 723 bp, Zea Mays
tgacaatagaactaatatataggaggtgcaagttgaaaaccaatctcaccacccaatatatctcagggatatgaacaatttgtttaagtatccttacccggctaagtatccttccaagaggggtagaatcaaaaaaggacattggcgcacggaacaatgagttgagtaactgggaaaataaagatcttgatgtttggatcccaagaacaacaagtgctatcgatctaaacagcaagaagaacactgtgatgaatccaattgcaatgtacacagaaatcaacttaagtgtaccaacatcaggattctggacattagcagccatccatgaattctgtgctatttggccacatacgaaaatcacatggcaaagaatacccatagagccattgaagaagcctttattctggcgcaagtaaaggatataaggcttgagaccagtgtcacccatttctctttcctctgtcttgatcagctgatctgctggtgatggcttcaaagactctttgtataagcttccatgaatatcaatcgatcccttgttttcatttgttctatgggatctgactctgttaagatctgaaacaccaatagtgtctttatgggcatttacgaggttctgaaattcttgacaatgtgccaataaatcttgataaggtgcagcacgaataatttcaccatctgacattaactgataaaaagcaacacttgttttagatggcatca

SEQ ID NO: 142303 - DNA, 425 bp, Zea Mays
tcgctctgtgctcggccaattttggcatcgccggcgctcggtcgtggcggtacgccatgctcgcgcggtggccgaccaatttagcctggtctagttccccggtgtaggttcctgtttcgcccctgcctctgctgaggcttttccaatccttagcacgcctcaagcctcctccctgtggctggaatgcctcactggagttcctccggtccgcccaagtccttctccctgctattctcccctctctgccctcggattcgtggccttttccccgccactgagttcgctgtggcgttctctcgctctctacccagtcccggcgaccccggaacccccctagcacatgcctacctcaactctggcgacctcaccaccacggagaggagcagcgccgcccatagctgttcaaccccccggtcagattcccc

SEQ ID NO: 142304 - DNA, 802 bp, Zea Mays
cgcaagaagaccagaagctaaggatgccaaactgagcagaaggaagaagcccctccagccctacctcctaccagaatagggaactcgtccgacaccgaggaaatgtccctagccagccttgatgaccttctcaaggaatttggggacactttagagaaggagttcgggagtaccctagatagcactcatgtgtaatgaacttatggtagttgtatgctgtaatgaacttgtgtaatgaataaagtaacttgttgaaaaaaaatttggcatgtgcatggtagtaactcttttcccctagcagatggcttcggataaaaccacgcctaccgcctccgggattggagcagggtttcccctaggagcagaaggagaagctggcggagaagggagtgagacccacctccccgcacctccggaactaccactagatttggcccaagttctagccaatcaaacctgactcattgaagtcctcactagaagtctggagaaccagcgcccaggtggtggaagaccacaggacaggatgggagaatttctgagactcaagcctcccacgttcgctggatccagcaatcccctcgatgccgacaactggctgcgcacgatcaagaggaaattggaagccatcggatgccccgaaaatcagcgtgttcaattggctactcgtcaactttctaggatggccctagcatggtgggataccttcagcgcggccgtcagggacactacctgggcagaatttgaaactgctttccgtgagcaccatgtaccccaggggattgttcaactcaaggatgat

SEQ ID NO: 142305 - DNA, 651 bp, Zea Mays
ggcctggctcccgagatacgtaggaattggcgtttctccagagtcaggccctaccggtgcaaccattagtctttcctaatgacaaattaacgtataattagtgtctattaaataattttaatttatttaaaagtggattaaggctttgtatgacatattatgactattgcaacatgatcacatgaaaatataataaaactttatagcttttaagctcatgcatcaagcatttatgcaagcaactaaacatcatctcgcatgagtcaggctaagctcatacaggcaaccaaacataggaatattgcatgctctcgaccagactatcaagagtcaggttccctagatatgagccaggccacccatccagacaaccaaacaggccaataatagccgctacaacgcttgacgctctccagcgatgatgtcatggtcctttttcccaggctcagcaacggtgtatcttgaactcgattgcggtggcacggtatctctctatgtgcctttcacggcaacaagggggatggaccaggggattttccggtcggttatataggggaggaaaggggcactcggctggcagtggcaggaacctcgactggttatgccagctagcgaatcgacggggctgttgcagtgcgcgcccgagttcgg

SEQ ID NO: 142306 - DNA, 355 bp, Zea Mays
cattaatccacttgatgaatagcccagatcaacgcttgtcttgatatctctataatgatatgatccactccatgtcatcacatggccttattggttcatccatctaaacatagcttgctcttcaccatttcattatgtccatcagtgccaagtccttgctcttgcttcatcgccatgtggtctctcacacatgagcctcttacttgcccttcacactagaaacttggtccatctaagccaagacatgtctcttgatgttctccatatagccacatgacatcatgtcatgtcttcatatgcaatgagctccttcatcacactagatgaacatatcaatatcaccaagccacatcac

SEQ ID NO: 142307 - DNA, 429 bp, Zea Mays
tctgattcgtgatttctcaatgagtgctagtcccaaggatttagctttcaatcttctgaggaggttcagttcgacaagagagagagagagtgcgcacttcctgagcagtttctaagcgaagaatcacttccttgactatggcaagttgaagtttcgtgtctcctactttcactctcctccaagctttgatggccttggccatccgtgccaggcgcaagagtggttgctggacagagggtaacggcttattccaggccgaatagaccgcttctttgaatccatcaatgcgtgcccagaagttctcgaagcggaaggagttgtttgttttgcgcattatctccccctgtaagagcagaggggtgtggtccgacatgagggagggtagggagtggatgtagcaggttgggaagagaagctcctaaccgggcg

SEQ ID NO: 142308 - DNA, 444 bp, Zea Mays
tcttttgctaataatagaagcacaacatgcatgcatttgggcgcgattattatttagcgttagaggggagaggaagagagatgttttcgacgatggatggacagatattatgttgcatgcacacggtagtatacggagcgtaacgagatgcatggaatcagctgtgaggcggtaattcgggagtacatacagttgtttggaacgtttccttcgcgcatgcaaagactacgatgatctatcgatggacgaccgcgaacgacccatacatatatatacgattataattaggagctagccgtatgtccgcttcaggaccaataagctagctaggcttttcgatgacgtgtctgcgcgcctttgatttgctgcgaagtacgttctcatatgtttccctctctcccgtcgacttttcaaaccgcaccgcgcatcacatacacatcacgc

SEQ ID NO: 142309 - DNA, 370 bp, Zea Mays
ggaggtggggctggaggggtcttcttcttcttcttctctgtttggcatccttggttggtggtcttcttctggattttcttcttgggagcgagcttccttagcttcttgtcatagtccatctttaaggttcgataggcctcacgggtgttggcttcctcaccttctgctatgtcgagactctcatggagagatgccttctcttgcttaagctctttgacctgctgctctaggctttccacttgggagtttaggtgggtgcagtgggaggagagatcatcgtagtggttgtcgagggtgtggaggtatccggccatgtagacgatggtggggtcatcttctgtggggtctcctcctgacagagcttggagtc

SEQ ID NO: 142310 - DNA, 1125 bp, Zea Mays
atcatttgcagcggttcaaacggatttttatactaaaaaatggcgttaataaaagaaatgcaagttctgtatgtaaatcaaaatgagcactcattccagcattttttatgattgtatagttttaggaacagctttggcatacaacatattgctcaacatcccttttttggttggtgttctgatatgtggagcaagcacgttcctgcttctagctttacagatctatggggtaagattctcatgtcatcataaaatatacatgttattaatatagtttgtcaccacctaagtttgataaatgtcatatgcaatttcatttatctaaaaaaactacataagatacttttaggagaaaatatgtgtgtgtgtgtctatatacaattcattccatttcacttgtagaaaggagaagtaatactttctgttatggaggccaaataatgagggtacaaatctcaaaagaattatgtagcacagaaaaattgatgcctagacaataagatatatagtgcttcaactttggttagcatataactgacatgtgaaccattctttgtttttcttgaaggttaggaaaatagagctcataggagttatttttatgctccttatcgccatttccttctttgttgaactgagtactgtcaatcctcctatgggtgaggtaattcaaggtctatttatcccgagattgcgaggggtttatgctgtgtcagatgcaattgcactatttagcgtcctcgttgtgccgtaagtatatgtaattttcaattaggatcttgatgtgaaataatccatcttttccaaaaatatgtcacaataagatttaaaatttgtcccacaatcttgtcattgtaggttatggatgactaatttggctatcaatattcattccaacccttttgcatgtgtctaatctgacgatcactgtctctcataccgagtagctcatatgcatacacgaaatggggaagattaaacctttcttatttcttagtgctagaaacaatatactatcactacaatagctaaggcacctagataaattacctttagtgctaacctatcttaatattgttgtactgatgtattttgggatgaggggatatcaaatatgcatctctc

SEQ ID NO: 142311 - DNA, 665 bp, Zea Mays
ccctaataatagaaatatatgagaacacaacaataaaaagaaaatatataaacataacttattttacaacaaaaatatataccttcaaactattataagcaaggctgtctccaagttcatccttcgacattgcagataggccaacctctagtttcgggaatcctatattttttgccatctcccgacaaacatatatcttcttattgttcgaaaggcagtatagaatgtcgtcttcatcagtgccattaaacaccaaggatcctgggggatacttcaaatcctttgcataatgcataacttcggcaatctgctcttctgatagtttttccctgccgcgtgacacactataaattccaatccctcaatagaagcttcagcagcagggaattcagactctttgctagtttccgtagcatctgatggtcttgctttgatattcttttcaacaacctccgcaggctccgtttctgcaggaactgagggcccaacttcagttccaacctgactcatgtcggctttgacagtttccttcgtattcttttcacccatgttaggtacttctgtagaagcaggagtcagtacctttgttgattccatgacagcgtataatacgctggccattcttctcctttttggagttactgcaggaatttctgacatcttcg

SEQ ID NO: 142312 - DNA, 385 bp, Zea Mays
ccgaccacgggtgctgctgcgcaagcaactcggcgggggaaggaaagtgaggcggggttcaccgtcgccctcagtgcgtgggcgccgtttgtgcgtggccgattccagtggcggaggacaccgaagaatcaagatatgactgctagctgctggccgtgctggaacttgatgcaatgcgcgcgcatgtgtgcgatgcgatacacatgtggaggcggtgagcgcaatttaggtggcgatgcgctggtggcggcgcgttgcggatgcaatggcggcgagcacaagcgtggcgcggaggcagagggtggctgatagcctagtatgcaatacgatgtagaggcgtgtagggttcttcacttgttttgctggattagaccatgtaatttag

SEQ ID NO: 142313 - DNA, 328 bp, Zea Mays
aagaaagacatttctttgggcctaaattgattcaagaggcagaagagcaagttcgtataatttgagagaatttgagggtggctcaaaccaggcaaaagagctatgctgataatagaagaagaccactagaattcgaggaaggagatcatgtgtacctcaaggtgtcaccacttcatggaatgaggagattcaaggttaagggcaaattgtcccctcgctttattggaccattcatgatctttaggcgagttggggagatggcataccaactcgagctacctgataatctatctgatgtgcataatgtatttcatgtgtctcaacttaa

SEQ ID NO: 142314 - DNA, 491 bp, Zea Mays
ctcgggcgaacacaaggttactccggtgagcaatacccatcgtggtggggttaatccggcgctgtacgaccgacataggctctggtgagaggtgggggtgccctaggcctgagttcgggctcgaggaggggttgcagtggtcagacgctgtgaagacgcggtgacccgacgaggggcgactccggtgagccgaaatcccccacggtaaagcagaattggcgcaaaagagggacaaggaaaggtcacttacccagagacagcgcttgggacagcttggcatgacacgaggggctccgattggccggacgtcgaagaatcgcagcggcgacgagctctaacctgcgtaggttgagcacagatcgggcagaggagttgaggaaaggggaaaccaccgcgggttcccggtgcgccaagctcaggcgaagctcaccgtggccaaagcgctggcagaagtctagcagcgacgacagaacgacgaagcaacaacgggg

SEQ ID NO: 142315 - DNA, 495 bp, Zea Mays
acagattatagcgccttatgtaggaaaccaaacatgccctaaagcctaacctcttgacccagttgaggccacaaatacgaactaaagggtatgagacctttagtcctggttggtagatccaactgatactaaacaccctcctgcaaaagcttgtgacgctagtcgttgggtttgtagatttaatccaagtatgtggttccatcatggactagtgcttatatacccctaggcaaaaaaccgtaacccaatacccaaactcagaatactcaaaacccaaattttatttgtgaactttaggttacaacctatgaaacccaaaattatttcaggtaatttgggtaccaccctccgaattacttgaactcctaatcctaacccggtaggtgtacagagatatatagcccactcccagagtccaacccaacagctgaatcaggaacacgtcaacactattcttcgattcttccccatccccaccctaagccttgaccaggc

SEQ ID NO: 142316 - DNA, 702 bp, Zea Mays
agacgaagtcaacgccgattgtctagatacatgtgggcatattttattggtcggttcggtcagtaccgatcgtctttaatgacgtggtatgttctgattgggccacgcatgtgttttagcaattagttgtttttaaaccgtttgaagtggaaagctcaaaaaaatccaaaaactcaaaaagttgatggaatctagtttataaatagtgggaaggtgttcggtttattcatacccccatactttgcattgcactcctatcgcttcctatttcactcctatcactctccttccactccaccaaaccatttttgccatgtctttctcgagctccgacgttgagaactaaccattgtgtgctttcttatggactataatgtcagctagctttcaccataatgtgatatgagaagtgccattatgagttgttgcgtcgttgcattttggcgaagagttactactgttatttttaggatggtttcaatgctggtttgcatcgacatgatgacatagaatgcatgttggtcgatatcaatcgtgccagcttcaacttcgatcatttctgtcggctagtcggtggacctactgacaggttggtactgaccggcaatatcgattgatccattaaacagccgggtcggtatcgatcgtctagatacacgtggttgcccttgattggtcgattccaacatgaacaactcgcta

SEQ ID NO: 142317 - DNA, 338 bp, Zea Mays
gtcaagatgctgtgcggaagcgctgggcggtcactagtgtaacaccccaggtgttaccagggtgctagcttcctaatggcacttatacctattatcacatgtggttaaaacttggaggagagggagcacttaagaccttggaagcatgagtgagttaagaaatgccaaggaccaaagcattacccaagcttttaggcaataatcaccttgggcaaggaaggattgaaccttgggccccctctcttgaagcctctagttgagagaaagattaggcaaatgcacatttcataatttaaaccttaaccaaagtttaagagtaccaaaatgtttacaaaaga

SEQ ID NO: 142318 - DNA, 416 bp, Zea Mays
caagcatatcaggcttggccgaacctcgggataaattcctgtgtccacgtgctctgctctgtgttatgtgctgattctctgtcttattcagttcttacttctgcacttcactgcttacttgtggtactagctttctttgaagtgcaggatattcttaagacatgaacttcaattccgctgcaacctactcgaagggttcttcactccactgcgatcctgtcttcgagtagagtaagatttaagttttaaagtgataattgttattcgcctattcaccccccctctaggcgacatccagatcctgttcccaggccaaagggaactttcagagttgaagtgtcggatttgggcaacctcgtccgaatcataatcttcatcccccggcgatggtacctgcactccaaactcaacaatgt

SEQ ID NO: 142319 - DNA, 591 bp, Zea Mays
gatattcatcatgagtatattggctcaatttctgttcaggaaatttagatgctggatacagaggctaaagggtgcagctcctgaaagcaataaacaacatcaggaacataagattattgctataaagctgggtatctcatataaagcttgcatagcttgttgtctgcttatactaggcagtcatgtcctgagggcagtatttctacagttacatgaaagaataagtgactgcaagtatccaccctttattctttgtgaaggtttgcaggtgctatcgtggataatattgtcactactagtattcagttttcagaaaacaaattctgcaaaacttccaatggtaattcggtcctggtggatatttaacttcctacaatcagctaccactgttgtaattgatctcaggtcaattttggcaacccatggcgatataggatttaaagaatggattgatatgttcatgcttgttgtttgcatttacctgtttgcgatttcagctggaggaaaaacaggaatcacattcacagacagcagtgtaacagagccactattgaatccatctgtgggacagcaggcagaagccaaacgaac

SEQ ID NO: 142320 - DNA, 398 bp, Zea Mays
ccgggatttctccatcgatgagaatgatttggttcgttgcaggggtcgcctttgtgtgcctcagaaatcagaggtgaatatggatatattgagagaagctcataaaatgccttacaccgttcaccctggcgaaaccaagatgtaccgagatctgaagcaaaacttctggtggaagcggatgaaggttgacgtttctaagtatgtggccgcttgtgaagtatgtcagcgcgtgaaggccgagcataagcggcctgcaggtttactaaagccattgaaaattctggagtggaaatgggagcatatcaccatggattttgtggtgggtttacctcgttctcctcggggcagagatgctatatgggtggtagtggatcgcttgactaagtctgcgcatttta

SEQ ID NO: 142321 - DNA, 501 bp, Zea Mays
gcacaaaccagtaaatatcccagcgtctggtccactcgagctcggtctcggctaagcatgccgtactttcctcccagccgtcggtcgctcagataactctcaccaccgtcgtgctgtcaccgtcgcgcaccacgtgccttagcgctagctctcgttgcggtgaatcatgcggcgcatgtccggtgatcaccggagttactgccacgccctaggacacgtaaccacgcgcgccaggcttcttcttcacctctggccgccagctcgccgtgggcaaattgagagccaccgctctcggagtctttaaattgagcccaccgttagctccgcaacctcatcacgtaccccatcgtccagtatcacccccagtcctgccaccgtgagctccaattccaagttttccccaaacctgttcgaatccaccgtgaaggtccgttcaccgcggccagcacaagccaggtccgatactgtcatcctcagtcttgttctaacattcccttgtgc

SEQ ID NO: 142322 - DNA, 415 bp, Zea Mays
accagagagagcaagcataagcaagaacagagatcggacacggcccagccaaacccccacccgaccagcgagatcaggcattgatcggttcagaccgtacgccatggaggtttgcagccctagcgatgacgtcatggaggctcagcggcggcagcgcgagccgacccaagccgggggctgctccgacgaccccagggcggtgctgacgtgcctcaccttcctggagcagaagatcgcccacctccgcggcatcatcagcgcagcgccgcggccgccgcggcagatggtgtcggccgagctcagctgcatcgccgtccagctcgtctccctctccaagagcctcgccgctgccggcggcgccgcggatctggacgacggcgccgcccggtcgccggctccgaacgacggcggcgac

SEQ ID NO: 142323 - DNA, 1171 bp, Zea Mays
aacgggatctggtttaatggaaaccccactccctcccttttttcttcttgctgtagtgcttgtagcgtgctgttgcgccagtatctggtggctcaaaggtctctctgcattgccgccgcagaattgttgatttttgggcttcaagatttctcctagataacccacataaagtacttgtagtcggtgccgtgttaaactggttagtttgtggcttagatgatcacttgacttgcttatgcgaaagttactagtccttctgcccaattcagtgcaaatgcataatttaacaagtgtgggtaatgtgtgcactattagcttatgatgtttttccttttacaatctgcattttggactgaaactagaagataaagagtaagcccttagcccagcatcaaactgcgttactttcatgttagttatgtgacaatcattgtaattcccaaacaaatagcttagcataatagtgcattttatgacagcttactgtcatgcttttaaggaaacaatggcacacttcattttagtgtcagggcctcagagccgcaaactcgcggtgctgaactttttgtgtgttatttgtgctggactagctaagagaaaggtagtcaaggcaaattgccataaagataaatttgagtaggaacagcctaatgcaagcaataaccaatgtcgatcacctttgttagaccttatggtcttcagctagtgttctgtggtgcattaaaagttgatgtaatgtaaccattttgaggccaggttgcttccactctaaggttacatgggctactgtagtgttatatgtgtgggttgcatgggaaggtatatatgccatgccttactttaaattgcatggatgtcaaatatcagtagtttggaacatatagggcataatattgtgtttttccctaaaaatccattttgactggtatgttcaaacagtctacactcgataatttttcttgtttcatccgcttgcctcttcttggactatgcttatctcaaaactgataatgccaagcaatggatgtatctcataaagtaactaaacatgctacggatttatctgctttgattttttatatctgatattacctagtcacctttgcttctaggcatgtctagagttaagctatatttgtgttctgttgggttctttctgaccatcttggtc

SEQ ID NO: 142324 - DNA, 459 bp, Zea Mays
ggacccacgccatgatccaagctcgatagtcaccgaagtcgcctcttcttccttttctcttcaacgggtgcagtcgactagctcactcggcatggacgctttggacggacctcttcgggtttctggatcctctccattccaacaagttcttgcccatccgtgatagccattggctcggcatgtgtcgagtcagatgattccctagccagcaagttgagcgcagcatctatctcctcgtcatcagtgctagccgacatctcgaaatgagtctgtctctcaccctctgggagaccccagagtggggcaattaaagcttcaatgtcctcagggttgggtcacactctaagacccggaccgccatcacgggcaggaggattacacacaaactcaaagaaggacctatgcgatggcaggttctaggcagaataagcaacaggagcaccagcgtttgaaactcta

SEQ ID NO: 142325 - DNA, 330 bp, Zea Mays
ggcgggggaacttgctcgttatgcccgcgatgctgcctagctgccatctgaaaacagagatcgtcgccattgttatcccaattcacaatttcgaacaacatgctattatctcatatggaaagaaaattgccataatcataacattaagtttgaatgaagataacatggttacaacatcccacagatctcaaaagtcctcaagggttacatcaattaggggaaaggacccgtaagcctagtccaaaatctgccattaactaagctcgcgtaggtttctatcctcctaagacgtcaaaacgactcgtcaaccctgagtagtggaagcgacac

SEQ ID NO: 142326 - DNA, 411 bp, Zea Mays
cagcgaaattagccaggaaacactcgccagccgatcagaaatggggacggggtcaaaaccgatgccatcgccgaagaaacgcaggaggcgggggtacctaagcagtggtcgctcttggcgtagccgatgacggccccgtcctcgtcctcctgcgaggcgccgaggcccgcgcaggtgagtgagagcaccgccgagtccatggcggcgcacggtagggtttagccgcctggccggtgcgcgcagttgaagctgaccacggtcggacggatgcggagcgaaggcgacggaggggaagttagaaggatagatgcgcaacggaggatcggagcagagagtgacccgagtggggaacagggagaggcagcgagatcggttgctgggtgcagatgagaatggggaattttcccgccg

SEQ ID NO: 142327 - DNA, 497 bp, Zea Mays
catgagttggctaatgccgtgactatttcccaattaccatcacacaccacctttcgccatttttggataaccggcacgacacacagctattgtaatacatctcaagttcattcaacccatcagtggagcactagcatatttcagaaaatttcctgagactacgacgacaaggcatcgagcttatcatgcacataaaagcatcacaagcatatttacggaacctatcgattaacctaatcgacacactagacatgttcttcgcccttcaaaatttatcgcacaaccaaaatcatcccacttgctaatgacaccaacaatacctactgatatgttattcacatcacgagcacagttacacgctgcatactagtttctaacataatcctcatataactcgtaattcaaactactcactaacaataaatcacgcacgccaactaccacatcgaccagttaatttatttggacaccgcctgtctagcgtaccactagtaccc

SEQ ID NO: 142328 - DNA, 491 bp, Zea Mays
gcggatctcagcgaacggttggggctaattcgaggtggctggttagcttatgactttacggaactggtgggggctcaatttatagggagcgacagcggcgacggtcaattcgagcaggatgtgcttgcggccggaggggagagagttcactggtgcgtgcggtaggtggcgaacatcgtggcgcttcctccggtgatcaccggttaataagctacggcggccaccgatgagttggtgcggctagagacgacgtggtagaaagcttggagcgtggcgcagccgcagtaacacacggcgactccggtgacggccaggaggccacgtcgccggtgaaaaaggacagggagcgacgagtctacggtagctcatacatatccgcaaagagatctttacctggtgaacaaaacccatacggacgtagcacgaatcccgacgaagaggtcgccggcggtgagatttttctgccgcgaccgatctgatccatacacgac

SEQ ID NO: 142329 - DNA, 477 bp, Zea Mays
tttggacggcgacgttcacatgctggcccccgctgggattgtggttgtcagttgtttctcttgcttaaatggctcgggctggtggttaagacctaaacaacaacgattcggtggggggtgttatcgatgcgagcctttggtagaggctgatgtgattctgatttctaaaatgtgctcatagtggaggaggttggggtattagtgtcaatttaaattgcgaggttgatgtcgagcgctgttgtatttcgagagttggtttcgaagacttggatggattttttgttcttccataggaagaggttcatgaacattgaggcgtttatttatgcctacatatgtatgtatgtggttcctctgttcagtaaggcccgtgaatggttcactggagaaatgcagctggacgacgtcaggagccctgggcgtcttgtaaagataggaaatgccatggaccggtgcaagaaactctactgaaatctg

SEQ ID NO: 142330 - DNA, 650 bp, Zea Mays
gctgatattaattttgtcattgattcgctaatattaattttttcatgctagttatgctcagactagctgtagcgtgctgcgtgcaacccttccatagcactattgtgcttgtggcggctataatactacaacaaacgacgcgacgctcaccccctaaacgtgctacaatgtgagggggtgcaacaatgaaccgccaaatatagggtagcggccccttgcgtgaatttacgtgcacgtcaatgtttgttagttagagaaaatagataaatgatgatgaatatatatgaaaaataatattttatgattgtagtggggaatatggggagaatcgaggggaaatcgctgcggaaaggagaaaagtagggggtataatctaggtgacgtgacataaaagtaggatatgagagaaatttagaggaaaccgttgcagacaatcttaacgattgctatagcgttgaaggtttgagataccgatacatagtagtatagagttgtttctactaccactgagcccaggacgaaggtgggcatatgtagagagtgcgggcgacatctgtctatagcaccacacgtgaacatgagacaaagagacacaatgagaagaggagaatacatacaaaagggcaattatgaccatatttggaagcaac

SEQ ID NO: 142331 - DNA, 490 bp, Zea Mays
tcacaatggaaaagaaatgagttccaacattttagaggtttcaagagacccaggtctccagaaggggcaggaggcggcctcttttggacagaggggagggtcattgaaactggagaagtaggggagactgtgcccaatgcagaaaaccgagatttgttctcacaacgtgaattcccgaagcgaccatatttggagacagagcgaaagcatggagtgtggagcaggctagggaggagtatggggagtcggcccatggctattgccatatcaaaaggtcccgaggagttgtgctcgcagatgcaaaagaaatggtctcctcgcaacccaacggatgccagagagctgtgtatgggtgttgatgggcaaaatgagccgttgggcaaaagcggctcaaaaatcatagtgggaacagtggagtgcgacatattaaatgctgcaaaaggcccccaggcagagatggctaagaagaatggtcaggtggctatcaaag

SEQ ID NO: 142332 - DNA, 395 bp, Zea Mays
tgctggccgcataacccctatcaggagtggaccccaaagtttggacaatcattgatcaattctcatatgtgtttgaagacctagtgggtttaccccctactcgataatgtgatcattccatacctttggtgctaggttcccaccctttcaatatccgtccatatcattattcaccggttctcaaggagaaaattgagaaacaagtccaagagatgttgtcataaggggttatccaaaagagccacagtatgttcgcctctccggtgctcttggtaaagaagaaggatcttacttggtgtttctgtgttgactaccgttatctgaatgtgatgactggtaaagagaaactaccatgttctagttttcgatctgttgatggacgagttgtctgcagc

SEQ ID NO: 142333 - DNA, 346 bp, Zea Mays
ggttatgggttaccaagtaggcctccatcaacttctggacatgctcatccttggcttgcttcagggcttcaacaacaatgacttcacgactttccaaggcagctacacgggcttgagctatggtgagatccacatggagcttacggttgagcttctctgcatcttctgctcgggcaatcatctgacggtggtgccgagccaagaaatcatatcgtgcatctagggtgagtaggtatgcagtgaggtacacgactgaggggttgtcctcaagcagcagctgcccttccaatgcacgcatcctggccatccaaactggacggtttctctgaaagggcggaaagaattt

SEQ ID NO: 142334 - DNA, 692 bp, Zea Mays
gtgagaaccgaaagggccgagatccgtcgcgccggtgttctgtgaacgggggcaagctcagaggttcgctcaagatcgggtatcacgtctgtggtatggccaaaccgtggaagtgcatgctggtgaggaaatttctcgccgtcgcgcagcgacgccatggatccgccatgcgccgtggattgtgatccaccgagcacgtgacgcggtgagtttccctcctatgaatgcgccttgtctccctcttcctttagcgctcaacttcaattgggatctggcatctggcatggcctgtgttggtcgccgacgagcagcgccgctggggaactgggcaccagtggctgttgcgccgtcggggggaagaagagagtcttcggaccgttcgatctttgatggacgactaggaataggtctgtgcgtaccccctcgatcggatgaacccgcgccctaggatttcgatcgggcggtcacatctgaactcagggctactgacgtgctagaccgtcagatccggatccgagcgtcatcgtagcgtaccggttcgttgagtggacaatctaatccgagccacaagatctagatcctacggacgataatagagaataccccttcacgctggcacttttgttaaagagcccttttgtttatagtaaatagaacccgccgtccgcgcctgggtctgtctgtgtcttggg

SEQ ID NO: 142335 - DNA, 490 bp, Zea Mays
ctcagcccctcccctgctggctgctgcggtggtgaacggggtgtccgtgaccgtacgtgcatttccagtcgtttcctcgtgtcgccggctcgcccgtgctgtttgtttggggcgtttaacctctttcttccttcgtctacgcctatatggtgtggtgtggatccagatctccaaccgaccaacctctccctctcagtccttgcttcatcatgacaattgacaagcctacatctcgatcccttctcgttgaaaagctaaattcaccacagtagtaacagcgagtcatctgtataaacctctgacagcgatgggatcacgagtctcgtttttttttatgaacggagtaactgctctgctcctttgaactcgaagcgcaagtgcgcaacagcagctgtacctccggcatggcagctgtgcgcctgtgcctaaactccttttcgtaacctttttttctttctttttcttttttttaagaaacttttttaggcga

SEQ ID NO: 142336 - DNA, 715 bp, Zea Mays
ggggtctgaaatggtgctatatgccttgagttgatcgaccagctgagaaaactgttctacatatgtggcgacagttgtggtttgcttaatgtgaaaaagctgtcgaataaggagttcgtgctgatcacaaccgaaacggtccttaatcatgcaaccaaactcaggccaagtgatgttgggtaattggggttccacagactgcaaccaacgtgcagctgggccagtgaagtgcattgtggaaacacggatctagacactcagatcaactgagtacattgcaaaagtaattttcgcatctggtttgccagagtttgggattatcaccatcaaaaacagggaaaggcactttgggcagctgaccgagtgaactgggtgtgggatggttcatggatccccaaaggcatcaggatacataggctgctggaaaactgtagcaaactcaggagcaggtagcataccattggtcaggggcatgtcgtgggtgtatggaaacccttggcctccctcccgatagtaagttggagagcggtgcccccaagggccgtcgacgtgcaccgtggaaggaggtaggcggcccaccgtcgactcgtacatgcctaggacgccgtcgcgaggaggacacggtctgctgtgctcctcgaggcgggcagagatgcgcgacacatcggcacacaacacctccgtgttcgcatgaacgatgcccaccgaatgttcg

SEQ ID NO: 142337 - DNA, 508 bp, Zea Mays
tcaaaagactatccgtacaaaaaccgactacaggtgcagccggaccgacataataaacacgctagatcaagtgcacaagtcccccacgggcacacccatctccctgtagttaaacagcattatcctcagctcctcaccctcaaagagacttcgcaactccccctcacctacactcgccccagctggcgaggacaacaattcccgcttgccagccctatccacacgaagacgcccaccctccacctcactcactctacgctttgccaccgcccttcgccgcctgcgcccagcactcggaccaggaaaaacatcagcatccatcacacgcggagaagcctccgccgcaaccacatccaaggccgcaaaataatctaagtcctcatctgaagactcttcagtccacacaaccgaactcccagaatcatcagactcaaaaaacttagacacagaatcatccgattcattttcagcaaccacggtcgaagccgccacaaaattagcagtgtca

SEQ ID NO: 142338 - DNA, 341 bp, Zea Mays
tgccagaaaacaaaatccggttcttctattttgtagtttcactttcgtttgtactgatctagcgacaaggaattccatagtacgcacaacaacatgttccaagatcacttgtctgttggtgtgcatcatgttgtgtctcttcatcagttgtttcatttctagtgacgtttcaacttgccaacacttgctggtatgaggaggtgagttgagatgctttctgtattatcagagcttgtgcatgtaacaacttttctaagtcaactatcgagggtgatgttgtggttgatgtcatatggttatcggtagtctgctcatgtgctataaattctgctaaatcaact

SEQ ID NO: 142339 - DNA, 2371 bp, Zea Mays
agagaagactgcatcagcatcactacttgcctgttttgaaatttaatgtacctttcacggaagccctcactaacattaattgtttgtatgtttcatctcagcttgatgactgaaaataactagggccttgcagggaaaccttcgttgacttctgaggtactgaaggttagtgaagaggcagatgattacgttccaaataggaagtcttgaatactgctgtgacttgtgttttgaaatagatatagtattttctggttctcttgcaaacctcattgttgcagccctaacatttcatggtgtgtttgatttgtggggtgggggtggatgggagacggtcaacccattttttaaagttgttcagttagatgggatgcccaaccagtggggatattcccccgagatcttggatgggatgtccatgcaaatctggtggacagagtagtccatggccttgttgaatacttattgcgcgactggttgtggtcacctaatgtgccttttctttttgctccaattgttcccaatctcatccctcattaacctgtttctgactgggatgcgcacagcaattgggaaccagcaggccctctgtccagacgctggtgctttgtgctccgttgttgtgctgctgctccactggcgtttactagttctagtgccttttcactgatttgtccgcacagggatcctggtgctagtgcttggctgattgctgctgcccctgtgttctccctcaattcgtactgctcatgcaattcctggaggccctaggaattggttctgcagttgtacctgtaggctgtagctgccaatttagttcgattttgaatttggcaggtagttgttgtgcttgtttctagatgcaagagtgcttattgtttgtggtgtttgttattggaaattttggttggtggtagttatttgtccggaaaggttaatgcaatgctgtggcttgtcttgcttttagtcaatggtagtaagttgagtaaaatgttcatgtgtatgtgcagcttgtggtcggcagtgtgaaattttgacctctaattatttgttagtaatgtaattttctcagcaggaatccaattcatgatgatgagctacattattcaagtttagcaactattgattgtgtttcccatcatgccttggatgtgtcaaaacttgaacacaccaatttgaagattatcataccctgcttatctatccacatacaaccaaccaaacaaaaatctgctggatcatcccatttgaaaacttgcaaccaaccaaacaagaatttggctcatgcaatccgtccaacctaatgagctaatacatgtaggagcatcattctatgattctatcctaaatccatggatggccctatcccatccaaccttgcctctccaacccatacggccatacaaacttgtgaccattcattgtaattctcatttcattgtcataagtgcgcctcgtttgacactgttgtttctctcgtcatcattggctttgtgtcggacacgttcatgataatttatctgcagcaacggtcaaatttatgaagctacaaggtgcaagttatgagctgctgtaactaaaaggatctctggtttcttttgagcagctgtctgttgtgtcaagttatgtgctacttgtaacactaaagtaccattttaccttatgacatgcagtgcttggttgttctgtcgtagttaaagaccgtgttgcaataagtgctagttctgtatgtttcctgggtttatgttatcaaatggttgcctggtttgcccactaatgtcatgttgctataagtattcctagctgttgagaaatgcgtgcgcgcgtgccgatcgttgtatcattgggtgcaacatcataggtcattgtagccaagggctatgaagaggggagtttcagatagtccaaaaacaccagggtacatagcaaatacgaaggttcttaggaaggaacagaagtgcgcaggccatttcgcgcaccatgaagcacccgcgatgagcagacgacaaccttggaacaaaacgaacctagagttcgaaggcggaccacactgcggatgatgtagcttatggacgtccacactgaggtctgaggatgaacgaaatagttatggctcaatgcgcttggagtacgtgggggctagatgatcttatcatcgatcgagagacaaaagttgtctgggcgtgcattgtaactgaattagcatactattattatttctctcctaatctgttaggctaagtactatagaatagctatcctacacccccatcccactctccaaattcaaactacattttatataaaagacctagctaaggacgtgtttgaatacaaatgaccaaactttagccactaaagtttaatctat

SEQ ID NO: 142340 - DNA, 357 bp, Zea Mays
cctgattagatcccgcgtaccctttcgccgcgtttcaatctggatcgttgatctggatcagacggacagagataggtctagagtaataaaatccccaccgtttgattcggatccaatggatgcgattcagtaccggttcgtttgaataaggatttaatctgggcgctcggtgtctaatccaacggccgagactcgcccataccgcttcattggccgttttgctaaagagcccttcgcttattagataactagcccgccatccagagcaccctattcactgtgtcacggaaaacttaccccgaggcccctgtgttttctggaatttgacgcccagtcccgagagtattaaaaacagag

SEQ ID NO: 142341 - DNA, 513 bp, Zea Mays
gaaacccgagacacagcgcatagtgactatggacggcgggttcattataaaataccctagggtctcttatgaaaactaagcagccgaagggggtatcctctaatttcagccgtccgatcaaacgcggatggcccagattagatcctctcctgctaaaatcccgctcttgctctccaccgatggatccgacaacaagggttaggatctaaacaccgaaggggggtaagcctcggtctaatctctaccgcacactcaaatccgacggcgcacataagctcttcctcgcccagacacaagggacacccgcggtgcctgctccattcacggcggcggaccgctggagttcgaatccggccatcccgtgcacgtattgccaattaaaccataccacctataattgatgctacccggaactcaatttcccaacaaattttggttgacctcgagtgtaggacccggtacacggtgtaccgcggcgacgccatggtcggctagtgcacccaggaattcggc

SEQ ID NO: 142342 - DNA, 323 bp, Zea Mays
ggcggcggcgtcgccccccacatgtcccacagcatgtcctcgtacgtcgccgccgagaaccggaccaccatgtacggggtcgcgcagtgcagccccgacgtgtcggcctccgagtgcactgcctgcctcgccgttgttggaaccggaccgcccacacacggcgtgtccgtcggggccgcccgcacacactgtgcaagatcatgcattgcattattagttacttgttttagtaatgcatatttgtgttccacaaatagatagctgcatgagtggtgttcagcctgaatcgtgctgcgttcacggtgaggcgagtgtggtcaccg

SEQ ID NO: 142343 - DNA, 1123 bp, Zea Mays
gccaccttggtgagacgatcgattattacccagatagaatcattccctttctgcgttcggggtagtccggtcacgaaatccatgcctatttcttcccacttccattcaggcactgggaggggttgcagcaggcctgcaggcttctgatgttcggcctttgttcgctggcaggtgtcacaccgggccacatactgtgctatttccttcttcattcctttccaccagtatctggttttgaggtctaggtacatcttggtggttcctgggtggatggagtaagctgagttgtgggcttcattgagcaggactttccgtgcctctcccattggtacacacagacggttcttgaaccaaagggctccttgatcatctgtcctaagatccggaagttgctccttgcgagctctttccctaagtctagctgtctctgtgtccaggcgttgagccttgcatatgagatcttctagcattggtttgacttccaggctaccgttgtctcccagacatgcatttagctgagctgattcttttttccaatcttctaaaaagttggtccccttaatcccgaaaggttttcggctaagggcatctgctaccacgttggccttcccggggtggtagtggattacgaggtcataatccttgatcaattcaagccatcttctttgacggaggttgaggtccggctgagtgaagatgtacttcagactcttgtgatcagtgaagatgtggcatttgttcccaatcagatagtgcctccatatttttagggcgtgtactatggctgccaactccaagtcgtgggtggggtagttctgctcgtgtggcttgagtaaacgggatgcataggcgataactttctcattttgcatcaagacacaccctaagccttgccttgaagcatcacataagatgacgaaatcctggtgtatatctggtagtgacaaaacgggcgcggttataagcttttccttgatgatctggaaactttcctcacattttggagtccatacaaacttattgtcctttttgagaagttcggtcataggtttcgctatgctggagaatcctttgataaagcggcggtaatacccagccattcccagaaagcttcgtacttcac

SEQ ID NO: 142344 - DNA, 731 bp, Zea Mays
tgcatgccgacatgcatgggagtcatgcgtgcatgggtgggcgagcactcggccaccgctcaatcggcctttggccgcgaccagccatggctggtcggccatgcatccaagggctgggcgtttcacggttcgatgtcggcagcggaggtgcggttggccggcgaaggatagaaatgacaacagctagcgcagaaacaaaataaagaaaaatggctcaccggagaacgggaagggctcgtcggaagaaacaacttcgtgcgtggcagggacccctcgacacagcgacgagtgcggcgagacctccagctaggacatcggtcctttctccacggtgacaaatgatgcgacgacgagctctgcatgggacctctgctcgacggcgggcgcggcgccggggcgactgcgtgatgcaaggggtggttgctgcaaggttgagggacagagagcaggtgccgactgtttgaatgggactatgggagcggctataacggaccattgctaaattcttgcgtcgtggccatatagtgcggtagaggttgttcacacacggaagagatggtggtgggcctgcggcgcagcagccgagtgcggcgctggtgcttcccccacgcgtgctagcaggtagatatgaatatacatatatgtttatatgaatatatctatttatattagatcatgtcccgataatttaatttgatagtttttccttctttcgagtgtgaacaccgcca

SEQ ID NO: 142345 - DNA, 534 bp, Zea Mays
ccacattaccatacaaattacaattacatacacacggcgagggcatcacatattacattggctcaaccttcgggatgatacccatctccctgtaattgaatagcattatcctcaattcctcaccctcaaaagcttccgaagatccccctcgcctatgctcgccccaatcggcgaggacaacaattcttgtttaccaacccggtctactcggagacgaccacgctccatccccatatgacggtgcctaccacttcgcgaaaattcacccacactatgttttcccacgacccttcgtcgcctatacccagtactcgcactaggaagatcccctgcaccctccacacacggcgaagtctccgctgcagccacatccaacgcaacaaaataatccaagccttcatccaaggactcctccgtccaaggaaacgaactcccagattcaccatcagactcaaaacactcagacacagaaccaaacaaactatcgtcgacaggcactacggttgaggccgccacaaaatcagtattgtcagc

SEQ ID NO: 142346 - DNA, 2002 bp, Zea Mays
atcagttatctgaatgaaacatctgagatgcaaagtaggttgttcctctttaagattggcacatgctcagctggtgtcaatggtggccccatcaatcttaaataaaatacagttcattttctattcaaaataaaaatgactggccaacatactgcaactgcaattcatttgatggccccccatttcacattctagatcataattgacaactgaatcagctttcattcacatgtcaagtgcactgcacacaaccaacctggcaagatagtgaataactcaacctatcctagagtatcctctactggccatggatgccattaaatcataattgttgatctaatcacaatcttggctacaaagcccatctgcccttgactgcctattagacaaaaggcctcccacaggaattagtccggaacttattgttcacatagtaaggttgcagctactcaaagaattcttcgttattcaagtggctgcaataacttatccaagggggtgtgatctgtatgtctgatgagggctattaaaccatccaaagttttatatacctctttccttttcttgtgccttgtgtctttagccaaaaactcatgtacctcatttcctacctgaatcaagctactaccaggtgttttctcaactccgcaatcacgcattgttctgcgagcatccatcacactgtcccaccttccctctagggcactacaatttgaaaccaacacttgataactagaattaaaaggttccatttcaactatctttgtgctgacatactctgacaactctgcatcaccatgcgtaatgcaagaactaagcaaagttacccaaatgacaaccccaggcttaagaggcatgctttcaataaatcgaactgcctcttgtaacttaccagctcgaccaagtaggtccactatgcatccatagtgctccattcttggaacaatgcgacagtactcaaccatttgattaaagatgctccaaccttcttgcaacaaacctccatgagcacaagcaccaagtgcagcaacaaagactgtatcatccagtgtgactccttctctgcacatatcattgtagaccaatagggcttctctaaactgtccattataagcaaaaccagatatcattgttgtccatgtaatggtacatcttgttttcattttattaaaaactaaatgtgctcttcctacatctccacattttgcaaacatatctacgagtgcatttcctaatgcaacggttatatgagtgttgcttttactaatgtaagaactgatccagttgcagtattcaacactgcctagctgagcgcaggctgagacaacacttactaatgttgcttcatcaggcatgaatcttccctcaagcatcatctgctgaaatgtgcacagtgcatcatcatacctcaagttgtggttgtaccctgtaatcattgcattccacgaaaccaaattcttatcaggcatctgatcaaatagcactctagctgaatctagttccccaatctttgcataagcagagaccatagcagtccaggaaactacatccttccgatccataatatcaaaaagtgaccatgcagattcaacattgccacttgttgcataccctgagatcatgagattccaagagatggcatctctgatcggcatcctatcaaacacagcacgtgctgacaccatgtcccccgccctcgtgaatgcagcgacaatagtgttccaggagacaacattcctctctggcatcgcctcgaacaactccatggcccctgctgcgtctccattcgacatgtacacaccaactatggagttccacgaaaccacgtctctattagccatttcatcgaacacctggcgagcgattccaacatcacccgggtcgctgcacttgtagtacacgttcaggagagcgttctgcacgaccacatcggacccgaacccacacctcacgatctgtccatggacgcaccggcacaggaacagccgcctcaaggattcgc

SEQ ID NO: 142347 - DNA, 828 bp, Zea Mays
ctgttggtccagccagggtttgctcttttggagggaagtggtatgtgcttgtggttgtcgacgacttctctcgctactcttgggtgttctttatgacgacgaaggatgaggcttttactcatgctcgagatttgagtcttcgattgcaaaatgagtttcctaaaaatgccatgagaggtataagcagtgacaatggcacataattgaaaatactcaatttgcaaccttttgtgcttctttgggactcgagcatcagttttcctctccgtatgtgccccaacagaatggtattgttgaacgaaaaaatcgaaccctcgttgagatggccaggacaatgcttgatgagcataggactcctaggcgtttttgggccgaagcgatcaacaccgcttgccatgtgtccaatcgcatctttcttcaggcttttctgaacaaaacttcttatgagctgtgatttggacggccacccaaggtcagtcattttagggtatttggctgcagatgctttgtgctaaaacagggtaatctggacaaatttgagtcccggtcttctgatggagtttttctgggttatgcattacattctcgttcttattgtgttcttaacctagagactaaccgcgttatgtagacttgtgaggttacattcgatgagactgcaccttatccatcccctgtctttgagcctgcaggtccagatcagatgggatagaccatctttatggaggaggagcatgacgatgccgattgggttgctctcgagccaactccaccggctgccctagtcgagcctgcttccactactacggctgatggacccgaccccac

SEQ ID NO: 142348 - DNA, 1137 bp, Zea Mays
ctcaacgccactgccgctgcagctcgccgcaacctccctccgtgcacgggcaacctcgatgccgtggccctcggcctcctcccccacacggccacctacgcggcgaactcagtagcaccgttgggcttgaacaactccatggtgtggtactcggcgccgtcgaggacaacgactttctccctccgtcacgtcgccgttggccacggttgctgtgggagatagatatcccctgggtcctcataacatggatatattcaatggttgtctggcgggctctcgaaagaatcgtcgaacaagcatactattgggccacccccagacagaacagatttctccaaagaaggtgacactcggagctagaggcaatcccgaagaatgtggcgcaaggcagttatctgtgcatatccgacacaaaaaggattgctgataatccgagggcatactttgcgcacaacataatggcgagatacatggaggataactcggacgaccgaactccacggtagtcggcacacaatagaagcggaagtagatagactcatatatgattagataagctgttacgatctgtaaagggacgtcttcctagctggttatataaggccgagggggtacccctacaaaactctctcgacgttactctcaccgcaaccacaccaccattagactggtaggagatctcatccatcaccacccgcaaatcatatgtaatctgtgcaccaccagcaaactcaatactcagcaccaaacatgatgtagggtattacacattcaggcggcccgaacctgtattactcccttgtgtatcgacgtgctcctgcacgtaccatcgagtcgcgatcaatggcgctgtcctcccaaaagcactgcgtgggttaccctgtagtgcgcagtcggaacataaacaccgatagttgcctccccctccccaccgaccctgtcgtcctcccccccgctgtagccgcccacgtcgccgcgggcgttggcatgcacacctccgcgggcacaggcacgaccaacaccgcacaccacctctccgacgcggcccgaggccttgcctgctgccctcctcgcgctcggctccagcacaatggacgtcacgggcacgactggcgctttctccttgtccagttttcc

SEQ ID NO: 142349 - DNA, 834 bp, Zea Mays
tttaaaatttggaatttaaattataatgagaaaataaaatagaaaatgattaaaaagaaaggaaatctcaataaagtcaattactccttccataattaaataatggaaggagaataaataatagtattgaaagtaataagagttatatccacattagaatggtatttaatatttgaaaatctaaaatttaaaacatgaatttaaaatttagtttgaatctttaaattccgaatttgaaaagaaaatagaaaagaaaaacctgtacttgggtcaacttctttcccttcgacccattcacttcatcccgcgctagcccatcttccttcaccggctgacatgagggcccatgatcaacactgcccgcgcgctggctccgcactatctcgctggcgcgtgggaccaccgcgtcagtgacttagctaaaagcattcagactcgcggtctcgctgccatgtggggtcaatgcgtcagctcgtctctacccgaacaaccagcgcggatcttcgttgttgccggccgggagcgctttcctcgggatattgtggttccttggtcggactccggtatttcttattcttatatacaaaccgcgacgtaaaagaccaacgtcgttcgtccatgtctgctctttttctctcgtccgttccattcggtatctatgttctgcggttcgtctggcatccaacgaagccatttgctgagtctccacatcgctacagccttccagaaattactactacgaacgaatacctcacctctgtccccaaaagggcgtcctctcaaacggtctggctccagcgagggcaacggcgacgccggagaccagtggtcgtg

SEQ ID NO: 142350 - DNA, 916 bp, Zea Mays
agggagaacccgctcggacaccctcaggggctgggtcatagttcgcgccacccattcgagccggatcgtctccggcaacaccctcgggggctgggtcgcagtttgcgttacccatccgagccgagttacccccggcaacaccctcgggggctaggtgagcgccaacaccatccttgagggccgagttctctgtagcagccacctctaaggctgaaggtccttcagtcacttccatgggagcaggacaatccaagtcagcttcctgacactcaagaccacgctccaaggtcgatgaggcgcgggacgctgcccgggatgaccccaacccggcgtcgaacacaccagcacaaacatccatcgcgtcaccatccgccggttctgataacagatcctctggaaccatatcttcaagagtttgatcaaagttcgccagagataattcttgtagaccaatgagggcagacaaagcaggagaaggaactccactactttcccctctggctacgtagcgccgactgttctttcgaattagagggacttcatcttcttcttcctcctcattttcatcagcaacgcggacagtacacccattggggtcaacgtcagatgggtcgcacccattggggtcagcgtcggtaaactcaggcacaggcacttcctcagcagcaggagccgaaggaccagcatccgatccaagctagacactcgtcgaagacgtctctttttctttttctgcccatcggcaggagaagcaggctgaccggctcgacaagggcgtttcgggcgaacactgacaggcctctgaatatccaaggctttactagcttctaggagaggcgccaccgtcaatgttccagcaggagcggcatcagaagaatcctcggctaacatgtcaagcatagcacttatctctgca

SEQ ID NO: 142351 - DNA, 818 bp, Zea Mays
attcttacagaccaatgagggcagacaaagctggagaaggaacaccactactctccccgttggctatgtagcgtcggctgtttttccgaattagagggatttcatcctcctcttcctcatcttcatcaacaatgcggacggtacacccattggggtcagctttggccggattacacccattgggttcagcatcatctaggtcacacccattggggtcagcatcagtcgggtcacacccattgggatcagcttcagcaaaaactggtactggcacttcctcagcagcaggagcagaaggaccggcatcctaatccaagcatgatacccggcgaagacgtctctttttctttttcttcccctcagcaggagaagttggttgattggctcggcgaggatgcttcgggcgaacactatcagacctctgaatatccaaagctttgccagcctttaggatgggtgctacagccagtgtttcagcaggggctgcatcagaggaatcttcagccaacatatccagcatggcacttatctctgcatcactttgattcaaaggtacctcgaaatgaacctgcctctcgtcgtcagggatttcgccaagtgaggcaactaaagcactaacctcttcgggagagggtcgcactctaaagcccaaaccgctatcaccagcaggaggatttgacacaaaactggtaaaggccttggaaggaggcagattccaggctgagtatgcaacaggagctccgatgttcgacaccttgcctctgagtatcatctcgagccggctcaccaaatccacagcaggaatccttctgttggta

SEQ ID NO: 142352 - DNA, 502 bp, Zea Mays
cggcagtgagagcggttgactgttttttgtttgtgggaacaagagcaagacttcattattccaactactgaaactgactgttttttgtttgtacatagaatcccttacccccttccatctcgtacgagaatcgagtagctccaccctggccgtgtattgtatgtatgcaaggcgacgggccgtcgcgtacttactcgttccatcggtacaggtcacaggtacatgcatgccacatttgccatacgaacaagtcgaaggcgaaacggtcgtcgactagcgggccacatcattccttccttgttggtgccacttacggcgtccaacccttcgccgtgatctctctccttcctttccttcccctcctctcctcgcaaacgccgccgtcgtggtcctctgcaaaaagcccctttcttttgagggggtgatctctgggccagtagaatcgaagggttgaacgttcggcacagctaacatcggcactgcccgcggctttgaatattcc

SEQ ID NO: 142353 - DNA, 572 bp, Zea Mays
cagcaatataataatatcgcaagcacagtaaaagaatgttccgtttgtagacttgttggagatcaaaagtgaaaaataagaagcatgcatccacatgacacactttcttttcatccattatattcaaagtagtgacacacctagtagctacttgatataatgatatcgacatcatctgaatagaaaatagtcgccatctcaatccaacgagcttatactaagtctaatattccgttgatgtggacttcagataagttataattatattaaagcaagtccagtcatacgtttcgagaggaattcaattgcctaattcaaccagaaattaaactgttgcctacgttcatgtgctcaacggagaagtatacgaagcaatcaccgtacccggtgttttagctagcaatctagccaaaccttcaatgcatgcttgacgatgagccgcagggtaatttgaaaagttttctaccgaaaaggagggaaaatcctcccaaaccatagccctattcggtggtcggttaatcagtcccacacatcgatttatcggctttggggagcgactgactaatcagtat

SEQ ID NO: 142354 - DNA, 584 bp, Zea Mays
catcaacttaccctcgaagctattgtcaaaatgggggttttcatatgggccatgggagccaagggttagaggcagacaccaggtgtttctgcaatatgcacaagttattatatcatacgaaggcgtctcgaaaagagcagtaccacaacaattttggctgttacagcttcgtgcaccgcaccgatgccagctatcctgtgtcgacatatcggaaaaatggctagactcttggatgcaagaatggttttatgtgaaggttgacctgagtcagagggaggatataagagggattattcagcgccctatatggtctcgcttcggcattagaaggccgcccactacacatggaaatgacgtgcaagcatgccaaatggctttcaatacagtgtgcacttatattggcacaagagacttggtacaggagcacatcgcttacagagtgtggccacttgtaagcggatgggaaatgccgaaggaggctgccgctggctcgagccaaaatggtttagtttatctgaagtatacctttcgttacatgagccaatttgatgaaccgaatgatgactgcatggatgctatagagg

SEQ ID NO: 142355 - DNA, 752 bp, Zea Mays
tcgtggaagaaaggggaaactggcagacctaatccccgaatcaggaagggaacagagacaactgattcatgattatcctctattgggacggtgatcccctgctagatccgccaagagcacagttccttgcgtggaagaacaccgacttcgacaaggtggagaagatcagactcagagacaatggaagcatagttaccgcagaatggaagttggctattaggatcgattgagggaatggtgggcatagtagtccctgttttttcttcctggatgccatcaagaccacacgaacgagagggtttgagcacaaccgcagggatgagcgagggtctcaagaactggattgcgacggagaaaaaatagagttagggttcgtttgccaggaaactgccaacagtgacgtatatgcgcacactaatttgggcgcatcatgacagacaagtaattcagaccagacctcaattggatggagtaagtcaggtggatttgttagttgggcctatcagacgaattcactagtcgaagttatcagtcggatctgtcagtaaagcctgtcagttgggttcactcaattggattgatcaggcggaacaagttgaatagaacagaagatactaagaacaacaaccacatttcattcattagaaagaggtcgttacaaagggaagggctggctcattatgaaccgaccctgtcatccctcactccttcatcaccatttccatttctactactactaccaccactaccac

SEQ ID NO: 142356 - DNA, 650 bp, Zea Mays
ctgggctgagcggctctgccgtctgcggctgggctggcagcacgccgcactctgcgcggtctggccgagcggccagcgggcagcgaggacaggacagcgtccagccgtgagccatccaccaccaagcaccaggcgtccaggcaggtagcagtgcccgcgccgagtttcttaatttctttcacccgttctttgatgtttgatctagctaggtgcctaggtaaaataataaattagataattaccatttaccagttgtcaattatgtttatttggggcattgtcattatgtaattttgcatctactaaatttcagccaagatgaagagaaaactcaaaacaattgattgttttttccaacgtgataatcctagagctactcctatcgaaaatcctaacctaaccaatgtgcaagattctgatccaattaatttgcatactgaggcagctgagctaaatcaacaagagactttagccacgacatttgagagagacccaggtaaacgtgttcaaattttgaggctaccttttgatcaacaagatgaagctcggagattttatatatctgagggcccatatcaagttatattagatgagtacccattgaatgatgcatctcatgctcgtcggttccagagcaattggtttaaaca

SEQ ID NO: 142357 - DNA, 540 bp, Zea Mays
tgtacacgcccattttattccacgggtgtccgggattatcaactacacgaatatattatgcctttgaaagcacacaccgggggagattgattgggataacaaacatgggccaacatgtgtatggggcagcgctcattccatagggattgaacccatctgtggctagcgcaacacgtacattacgagcctcttcgactttctcacggtgaatggcatcaaagtgtttccatgctccaccatcggatgcgtgcaccatgttgtcaggattgtatcgttttccatttttgtccaatgtcatctgtttcgtggattcctcggtcatgtatagacgctggatcctcggtatgaacggaaggtggcgtaggattgtcaaggggatgtcgagctgcctcttctgtccatcaccagagtctacgtccatgaacctagatgatttacactttggacagtactttgcatccgcgtattctttcctaaatagcacgcagcccttcagacaagcatgtatctgctcatacgtcatcttgagtgcacaaagga

SEQ ID NO: 142358 - DNA, 486 bp, Zea Mays
cttaaaacaagggctaaggactgctggtacaaattctacagagcgcaggggctagtttataaagatccagggcttggctgaaatttgttttgacttgggaggatggcgggttggtttaacaaaagtgcaggggctcttttgaaagaagtgcacggcgaaggggtaactaggatccgagccacatgattagaaaccgagggctaggattagatcggccaaacactgaaccagttggttttctgggccaccggattgaggatcgacggtctagattttaaagtcacgcgatcgattttcatccgcccgatcaagatctaacaaccgctggtgaatcgttatcgcgcttctaatcttcaccgttcattagaaaatcaacgccacacgccatcacccccaactcagccaccagtagggcggcgctacacccaaccgcggcggagggttggccggagttcagccatccggcacaccagtgccccaatttac

SEQ ID NO: 142359 - DNA, 735 bp, Zea Mays
tgcgagttcagaatagtgaggagaaccaagacattcttccagtgatgtactagaatctccatctgattcctcttcttcaacactttcattattaacatgtgatgaggtacatgctattttctgtgatgcaatcatcttaagacgagtgctaacaccctctctttgcgcaataatctccaatgagggattatcttgtggcagacgtgactccacatttatgtaatgatgtggtgatagcccacctcgtgatctcccactagctgttgaattttttgatgtaatagggaggcatggtgctgttgaagccttcatatcactctcatcatcttgatcattagacccactgaaccacttacggacctttcctagattaggaagaagtcccctcttggaatagcttgccttagggttgggaactatttcctcatccgacggataagaaaactcatgtgttacttgtggtggtgcccatttggggtcatcactttgttctgagagtgccgaaagagtgccacataaagcaacatcattgtcaacacccttcatattatcagcatctttcatatgatggtcaccatcttcagtgttttgcaatatctctttaccctttcgctcaaggtcttgtaatgatgtcacctgttgtgcctttgtttgctcaatctcctttggaggagtcaaagcttctgatttttcctttatagaatttttagtatcgacctccattacggctgccta

SEQ ID NO: 142360 - DNA, 359 bp, Zea Mays
atagtaatgtttatatgaatctaatgattaaagtgtttcatgtgcaggatgttaacgagactcgagaggaggaggcgaggggtgaggatgcagccgattacgatgcggccgatgcagactatgagcaggaagatgatgctggaggtggagctggagatgggtggtcttctggtggtggtcagtttgagggtggagggtcagcaggtggatgggactcatggcctagcagtgatgctagagcttctagtggtggagggtcttctcgggcacggaagtcgaggaaaacacattgggtgcctcctcctaaagttcctgctcgtgaggaggataagattctgatcgtaccgtgtggcgacgag

SEQ ID NO: 142361 - DNA, 565 bp, Zea Mays
tctcggtttcaatctgtgttttcgaagccttggcaatttttcctggagtagagcttgaagcttttatcgtctccagcacatctaatacactagccatcctttttctcttgggggttgctactagacctttttgtgtcttcgacacctccactcctgccgaagggctaagaacttctaatgtttttgtctcttcggttctcggttcttcaattttgtcagtcttcggcattgcagccgactcttcaatcctctgcataagagcaggtcctttggcttcaacagctgaagaagtctcaccgccaaattcaggcactatggccggttcaatgtagcgcggtcggtgagtaaggaccttcaactttttcctcttcggtgcgggctcgcttgaagcatctgaagcagcagtcttcccagaagttgcaccctttcttttctgcccccgcggcgggtagcgatagtcagggtacacaaatccaatagcatcaaaaactctgtttagccttttcttttttcggctcccgaaggttgcagatagtgcattatcctcagacatggagtatgctcc

SEQ ID NO: 142362 - DNA, 2012 bp, Zea Mays
tttcgaactaatttctaatctttgttaaaaacatatttattctagggaatgcaacttcagtggtaaacaattctttaaaagatattctaattcaaaatttttgtggagtatttaactaaaaacttaccataggattttccagtgttacaaattgaccatctgctacctgccaacttgtgacaggaataaggaagttgattataaccgtttttcaattttcttaattaggggtaagaatgagtccagctttggtttagtggttcccataggcaggcctaggtacgtaaaaggaaaacttccaatgttgcagctaaatgctctggcaaggatgtccatcttctcatctgagacatcaatgaggtatgtgttagattttttatagttgacgtgcagaccaattgatgtagcaaaagagttcagcatcaccttgaggaagatggtgtcatatgtttactgtatgatgggaaaatcttgaccacacctatgcattagcggcaatttgagaagaccaagattcttagccttattaacaatagcttgaagaagatctacaaccagcacaaagaggaggggagaagggggtctccttggcgaactcctctcttgcagtgaaagatttaccaggtaccccattcaataggacagaggaagttcttgactccatgatcaccatagtccatttcaaccatttaggactgaaacccttgtgtctcaatatgtcagtaataacattgtgctctagtttgtcaaaagctttctcgaaatccaacatgagaatcaccatttgttttttactgtttgaataggtatatgaattcaaaggaccacagaagacaatcttgtatggtgtgttccttgatgaagccatattgattgttgtgaattagtctggtgatcaatttttgcagtctatttgccatcaatttggttagcagcttgacacttgtgtttaacaagtatatggggcaatagtcactaactatgattgggacaacttctttgggagcaatatgacatggggcccatctatactccgcgtgtagatattttcatcatagaaatcacaacatagataaaaaagtcctgagagattgttggccaacacttcctcatgaagtctgtgttaaaactatccgggacaggtgctttactagaagggagatttgccaccacagaggtgatcccatcctcggtgaaaggggactccagattagttagatctatggaagcatccatagggttctgcaaatcgaagatcgtgttgttatgctccgtcgtaccgagtctatctttgtaagctttatacaacattgttgcttcattgtcatgatcagtaaccacttgacccaaaccatcctagagagttgcaatagtgttatacttgagcttaattgtggcattggtgtggaagaattttgtgtcgacatcaccacaagttgtcaacttaatgttcacccattgtttccaatatgttttctgttgttcaagcatgcttaagttttttgataagatatctcgaaagttccattattgcatggtatattccctagcttcctcaatgagatccatgaactgcatagtcagcttaatattctcaatcgtggtggctagttttgacagttttatttatgctagctcattagagcctttctagattttttgaacttctccatattcctcttggctagatctagttggtgaatatgttgggaccaaatttcttggaatattggatagaagttatcatgttgaagccataaatttttgaatctaaagatgtttggtctaggcacattagttgcaatctctacaagccaagggacatggtctaaaatatatctggccagagtgtgagctctagttcctaagaattactgaaccacttatgtgaaatgaagcaccactccaatttttccaatagtggatgctgctgcatatttgactaggtaaaagcttgaccatgaagggggatttcttgcaaacctagctgattgatggaggcattgaattga

SEQ ID NO: 142363 - DNA, 896 bp, Zea Mays
ctcttttcctcgcagggggcgaggtttttaatgaggcggcaccatgtaataaaataaacaggaaagtccccgcacaaaagaaagaagtgcgtcccgaacacgttgaaaaaggccgcaaggtcagccttcgctattcaacggcaggacagtcaccacaacaacaagtcttaagtcagccatcgtgtgcgacaatcatcatctatccaagcaaaaattcacctaagggtgcagccggattagcacaacaagtgcgccaaaacacctaagggtgtgaagtcgttcgagagacgcatcatctatctgagcaaaaagtcgcctaagggtgtagccggattagcacaacaagtgcaccaaaacacctaagggtgcgaagtagtccaagagacgcatcatctatccgagcaaaaagtcacctaagggtgcaaccggattagcacaataagtgcaccaaaacacctaagggtgtgaagttgtccgagagacgcatcatctatccaagcaaaaagtcacctaagggtgcaactggattagcacaagtgtgcaaaaaacacctaagagcacgaaattgtccacgaacaagtcgcctaagggtgcagccgcatatgcacattgacacacgaatcaaaccatcacccatagaaaaaggaaaaagctccagtatattcaagaaccgaagactcgcatagtcgtcccttggttaaggcgggcgagggcagcgtttcactcaaatcgccaaggcacgactacgcaaatatttcaaatattacaaagtccctgccttcggaatcagagtagcttctcgaaaattaaacaacttaagcctaagctcttcgccataaaaaagcgccctaagatcttgctcttcgaagccccgttcggttgttggtgcgagaaca

SEQ ID NO: 142364 - DNA, 475 bp, Zea Mays
aataatttaacgaacgcataatacgcatcgtcatgacttgacctataaatatagagaaagcgatgactactctggcatgtcaccacctctctatttaagccaagacaatttctaccatcgactaagagtcgtaagcattaaataccttactactttatatgcacaaataaacctcaacttaacccaagtgacaccgatggaatttttactaaactcatcatgcgcataacctcgtctcgcatacaaccatatggtggcgtgcactcgagacacttcgatcaatgtgacgcgactactaatatatgaactccgacactcatgtcttaataatacatcctccacgcaaactagcatcttctaaactactcgtcacatcaataaatatacccctatataatcacgaaccccatcacattgcataaaacaaatacacttttcacatagacaccaatcgatgcattccccaacacataat

SEQ ID NO: 142365 - DNA, 783 bp, Zea Mays
cgaaaagagaccaaggcttccatgatcgggtattgtacaaaatggcctactagctggacaactgaatggttttatatgaaagctgataggaaaaggagggagaaggttatggacatggtgatgagtcctctgagattaagcttcgacatgacgaggcctttatgttttatgcaaataggctccccatgctagttggccaaatttatttttagaattgcggcagagcatatcagcactcgtattttggtccaagaatatctgaccaacagagtttttccaacactaagcgggtggggaatgctaaagctcaaaggtgaatgaaataagtttgaacttgtgatactgccctatcactttaagcaccaggataccttcagcggcccctgtgtcgagtggctagaaatgatagaaacaatgtgcaatgagattcttggtaactatacaaagaaagaagaccaactaatgattgttgctttcgacacccgagagaaacgaaggttgaactgggttatggacacttaggcttcgagtaccctgattatgaaaacattaaagaagaagctaggggaatgaagaggaaaagggttgtgagcatcatgaagaggcaggctatgaggtccattgaagataagaaaaggacactttcaaagaaacgaaaggtctctagcgaagctgaaacttctaagtcagggccaaaatctttgaaagtgagccgtgtagagaagaagatacttgttcccttaggacaggtccttgaaaccccttcggcttcttctatcggcg
